United States Patent Application Publication US 2014/0004565 A1 - sequence listing, part 113

SEQ ID NO: 2826887 - RNA, 19 nt, Artificial Sequence
  Description of Artificial Sequence: Synthetic oligonucleotide
ccccugccccuccgugcug

SEQ ID NO: 2826888 - RNA, 19 nt, Artificial Sequence
  Description of Artificial Sequence: Synthetic oligonucleotide
cccgcggcugaacccuucu

SEQ ID NO: 2826889 - RNA, 19 nt, Artificial Sequence
  Description of Artificial Sequence: Synthetic oligonucleotide
gcccgcggcugaacccuuc

SEQ ID NO: 2826890 - RNA, 19 nt, Artificial Sequence
  Description of Artificial Sequence: Synthetic oligonucleotide
ccuccgugcuggccugugu

SEQ ID NO: 2826891 - RNA, 19 nt, Artificial Sequence
  Description of Artificial Sequence: Synthetic oligonucleotide
ccgcggcugaacccuucua

SEQ ID NO: 2826892 - RNA, 19 nt, Artificial Sequence
  Description of Artificial Sequence: Synthetic oligonucleotide
cgagggccuugcccaccuc

SEQ ID NO: 2826893 - RNA, 19 nt, Artificial Sequence
  Description of Artificial Sequence: Synthetic oligonucleotide
gcggccccugccccuccgu

SEQ ID NO: 2826894 - RNA, 19 nt, Artificial Sequence
  Description of Artificial Sequence: Synthetic oligonucleotide
cggcuugggugauuccauu

SEQ ID NO: 2826895 - RNA, 19 nt, Artificial Sequence
  Description of Artificial Sequence: Synthetic oligonucleotide
ccgccuugaugagcgcccu

SEQ ID NO: 2826896 - RNA, 19 nt, Artificial Sequence
  Description of Artificial Sequence: Synthetic oligonucleotide
gcgcccuguccagcggcgu

SEQ ID NO: 2826897 - RNA, 19 nt, Artificial Sequence
  Description of Artificial Sequence: Synthetic oligonucleotide
cccuguccagcggcguggu

SEQ ID NO: 2826898 - RNA, 19 nt, Artificial Sequence
  Description of Artificial Sequence: Synthetic oligonucleotide
ccuuccggcuugggugauu

SEQ ID NO: 2826899 - RNA, 19 nt, Artificial Sequence
  Description of Artificial Sequence: Synthetic oligonucleotide
cgacgccacuguugaucuu

SEQ ID NO: 2826900 - RNA, 19 nt, Artificial Sequence
  Description of Artificial Sequence: Synthetic oligonucleotide
cccuuccggcuugggugau

SEQ ID NO: 2826901 - RNA, 19 nt, Artificial Sequence
  Description of Artificial Sequence: Synthetic oligonucleotide
ccccuccgugcuggccugu

SEQ ID NO: 2826902 - RNA, 19 nt, Artificial Sequence
  Description of Artificial Sequence: Synthetic oligonucleotide
uguagcuucaucauggaca

SEQ ID NO: 2826903 - RNA, 19 nt, Artificial Sequence
  Description of Artificial Sequence: Synthetic oligonucleotide
ucuugaaauccacugaugc

SEQ ID NO: 2826904 - RNA, 19 nt, Artificial Sequence
  Description of Artificial Sequence: Synthetic oligonucleotide
aucggaagcagucacuugc

SEQ ID NO: 2826905 - RNA, 19 nt, Artificial Sequence
  Description of Artificial Sequence: Synthetic oligonucleotide
uucacugauccacagauca

SEQ ID NO: 2826906 - RNA, 19 nt, Artificial Sequence
  Description of Artificial Sequence: Synthetic oligonucleotide
uagacauugacaaacuccu

SEQ ID NO: 2826907 - RNA, 19 nt, Artificial Sequence
  Description of Artificial Sequence: Synthetic oligonucleotide
ugggccaaagccaagaagc

SEQ ID NO: 2826908 - RNA, 19 nt, Artificial Sequence
  Description of Artificial Sequence: Synthetic oligonucleotide
uucaucauggacaggcugg

SEQ ID NO: 2826909 - RNA, 19 nt, Artificial Sequence
  Description of Artificial Sequence: Synthetic oligonucleotide
cauucaaggauucuugucc

SEQ ID NO: 2826910 - RNA, 19 nt, Artificial Sequence
  Description of Artificial Sequence: Synthetic oligonucleotide
ugguguagcuucaucaugg

SEQ ID NO: 2826911 - RNA, 19 nt, Artificial Sequence
  Description of Artificial Sequence: Synthetic oligonucleotide
auacuaaaguggcagugcc

SEQ ID NO: 2826912 - RNA, 19 nt, Artificial Sequence
  Description of Artificial Sequence: Synthetic oligonucleotide
cuugcuaucuuccacacug

SEQ ID NO: 2826913 - RNA, 19 nt, Artificial Sequence
  Description of Artificial Sequence: Synthetic oligonucleotide
agcuucaucauggacaggc

SEQ ID NO: 2826914 - RNA, 19 nt, Artificial Sequence
  Description of Artificial Sequence: Synthetic oligonucleotide
aggauucuuguccugaaac

SEQ ID NO: 2826915 - RNA, 19 nt, Artificial Sequence
  Description of Artificial Sequence: Synthetic oligonucleotide
cauuccauacuaaaguggc

SEQ ID NO: 2826916 - RNA, 19 nt, Artificial Sequence
  Description of Artificial Sequence: Synthetic oligonucleotide
uuuccauuccauacuaaag

SEQ ID NO: 2826917 - RNA, 19 nt, Artificial Sequence
  Description of Artificial Sequence: Synthetic oligonucleotide
uuccauuccauacuaaagu

SEQ ID NO: 2826918 - RNA, 19 nt, Artificial Sequence
  Description of Artificial Sequence: Synthetic oligonucleotide
ucuggaacucacuggaagg

SEQ ID NO: 2826919 - RNA, 19 nt, Artificial Sequence
  Description of Artificial Sequence: Synthetic oligonucleotide
accacauugaucuggaacu

SEQ ID NO: 2826920 - RNA, 19 nt, Artificial Sequence
  Description of Artificial Sequence: Synthetic oligonucleotide
ugaucuggaacucacugga

SEQ ID NO: 2826921 - RNA, 19 nt, Artificial Sequence
  Description of Artificial Sequence: Synthetic oligonucleotide
uugaaauccacugaugcca

SEQ ID NO: 2826922 - RNA, 19 nt, Artificial Sequence
  Description of Artificial Sequence: Synthetic oligonucleotide
ugggcagucaagaugaagu

SEQ ID NO: 2826923 - RNA, 19 nt, Artificial Sequence
  Description of Artificial Sequence: Synthetic oligonucleotide
auugaucuggaacucacug

SEQ ID NO: 2826924 - RNA, 19 nt, Artificial Sequence
  Description of Artificial Sequence: Synthetic oligonucleotide
ucaaacuucacugauccac

SEQ ID NO: 2826925 - RNA, 19 nt, Artificial Sequence
  Description of Artificial Sequence: Synthetic oligonucleotide
aaaauucauucaaggauuc

SEQ ID NO: 2826926 - RNA, 19 nt, Artificial Sequence
  Description of Artificial Sequence: Synthetic oligonucleotide
uccacauaggucuugaaau

SEQ ID NO: 2826927 - RNA, 19 nt, Artificial Sequence
  Description of Artificial Sequence: Synthetic oligonucleotide
aguggcagugcccauguac

SEQ ID NO: 2826928 - RNA, 19 nt, Artificial Sequence
  Description of Artificial Sequence: Synthetic oligonucleotide
uugaucuggaacucacugg

SEQ ID NO: 2826929 - RNA, 19 nt, Artificial Sequence
  Description of Artificial Sequence: Synthetic oligonucleotide
uccacacuguguuaguggg

SEQ ID NO: 2826930 - RNA, 19 nt, Artificial Sequence
  Description of Artificial Sequence: Synthetic oligonucleotide
aaagccaagaagccuuucu

SEQ ID NO: 2826931 - RNA, 19 nt, Artificial Sequence
  Description of Artificial Sequence: Synthetic oligonucleotide
uccugaaacagcauuucca

SEQ ID NO: 2826932 - RNA, 19 nt, Artificial Sequence
  Description of Artificial Sequence: Synthetic oligonucleotide
uuccauacuaaaguggcag

SEQ ID NO: 2826933 - RNA, 19 nt, Artificial Sequence
  Description of Artificial Sequence: Synthetic oligonucleotide
gauucuuguccugaaacag

SEQ ID NO: 2826934 - RNA, 19 nt, Artificial Sequence
  Description of Artificial Sequence: Synthetic oligonucleotide
uucuuguccugaaacagca

SEQ ID NO: 2826935 - RNA, 19 nt, Artificial Sequence
  Description of Artificial Sequence: Synthetic oligonucleotide
cuugaaauccacugaugcc

SEQ ID NO: 2826936 - RNA, 19 nt, Artificial Sequence
  Description of Artificial Sequence: Synthetic oligonucleotide
uccauuccauacuaaagug

SEQ ID NO: 2826937 - RNA, 19 nt, Artificial Sequence
  Description of Artificial Sequence: Synthetic oligonucleotide
aagucccgcuguuuguugc

SEQ ID NO: 2826938 - RNA, 19 nt, Artificial Sequence
  Description of Artificial Sequence: Synthetic oligonucleotide
uugacaaacuccucugcag

SEQ ID NO: 2826939 - RNA, 19 nt, Artificial Sequence
  Description of Artificial Sequence: Synthetic oligonucleotide
guagacauugacaaacucc

SEQ ID NO: 2826940 - RNA, 19 nt, Artificial Sequence
  Description of Artificial Sequence: Synthetic oligonucleotide
agaacuguggucuggcuug

SEQ ID NO: 2826941 - RNA, 19 nt, Artificial Sequence
  Description of Artificial Sequence: Synthetic oligonucleotide
guaguagacauugacaaac

SEQ ID NO: 2826942 - RNA, 19 nt, Artificial Sequence
  Description of Artificial Sequence: Synthetic oligonucleotide
caagaagccuuucucaccc

SEQ ID NO: 2826943 - RNA, 19 nt, Artificial Sequence
  Description of Artificial Sequence: Synthetic oligonucleotide
uuuguugcccucaaacuuc

SEQ ID NO: 2826944 - RNA, 19 nt, Artificial Sequence
  Description of Artificial Sequence: Synthetic oligonucleotide
uugcccucaaacuucacug

SEQ ID NO: 2826945 - RNA, 19 nt, Artificial Sequence
  Description of Artificial Sequence: Synthetic oligonucleotide
aguagacauugacaaacuc

SEQ ID NO: 2826946 - RNA, 19 nt, Artificial Sequence
  Description of Artificial Sequence: Synthetic oligonucleotide
uaccacauugaucuggaac

SEQ ID NO: 2826947 - RNA, 19 nt, Artificial Sequence
  Description of Artificial Sequence: Synthetic oligonucleotide
uaguguaguagacauugac

SEQ ID NO: 2826948 - RNA, 19 nt, Artificial Sequence
  Description of Artificial Sequence: Synthetic oligonucleotide
uguuagugggugaagccug

SEQ ID NO: 2826949 - RNA, 19 nt, Artificial Sequence
  Description of Artificial Sequence: Synthetic oligonucleotide
acuucacugauccacagau

SEQ ID NO: 2826950 - RNA, 19 nt, Artificial Sequence
  Description of Artificial Sequence: Synthetic oligonucleotide
uucucaccccacuagcugg

SEQ ID NO: 2826951 - RNA, 19 nt, Artificial Sequence
  Description of Artificial Sequence: Synthetic oligonucleotide
uuccacacuguguuagugg

SEQ ID NO: 2826952 - RNA, 19 nt, Artificial Sequence
  Description of Artificial Sequence: Synthetic oligonucleotide
gaaguucugguugaagucc

SEQ ID NO: 2826953 - RNA, 19 nt, Artificial Sequence
  Description of Artificial Sequence: Synthetic oligonucleotide
uguacaggcgggauagcag

SEQ ID NO: 2826954 - RNA, 19 nt, Artificial Sequence
  Description of Artificial Sequence: Synthetic oligonucleotide
uccacagaucaccacaaga

SEQ ID NO: 2826955 - RNA, 19 nt, Artificial Sequence
  Description of Artificial Sequence: Synthetic oligonucleotide
aauucauucaaggauucuu

SEQ ID NO: 2826956 - RNA, 19 nt, Artificial Sequence
  Description of Artificial Sequence: Synthetic oligonucleotide
aaacuucacugauccacag

SEQ ID NO: 2826957 - RNA, 19 nt, Artificial Sequence
  Description of Artificial Sequence: Synthetic oligonucleotide
uguuuguugcccucaaacu

SEQ ID NO: 2826958 - RNA, 19 nt, Artificial Sequence
  Description of Artificial Sequence: Synthetic oligonucleotide
uguguuagugggugaagcc

SEQ ID NO: 2826959 - RNA, 19 nt, Artificial Sequence
  Description of Artificial Sequence: Synthetic oligonucleotide
cagucuaccacauugaucu

SEQ ID NO: 2826960 - RNA, 19 nt, Artificial Sequence
  Description of Artificial Sequence: Synthetic oligonucleotide
uccaugguaguguaguaga

SEQ ID NO: 2826961 - RNA, 19 nt, Artificial Sequence
  Description of Artificial Sequence: Synthetic oligonucleotide
aaauccacugaugccaucu

SEQ ID NO: 2826962 - RNA, 19 nt, Artificial Sequence
  Description of Artificial Sequence: Synthetic oligonucleotide
uuauccaugguaguguagu

SEQ ID NO: 2826963 - RNA, 19 nt, Artificial Sequence
  Description of Artificial Sequence: Synthetic oligonucleotide
aucuggaacucacuggaag

SEQ ID NO: 2826964 - RNA, 19 nt, Artificial Sequence
  Description of Artificial Sequence: Synthetic oligonucleotide
guguaguagacauugacaa

SEQ ID NO: 2826965 - RNA, 19 nt, Artificial Sequence
  Description of Artificial Sequence: Synthetic oligonucleotide
ugguucugccgacagaggc

SEQ ID NO: 2826966 - RNA, 19 nt, Artificial Sequence
  Description of Artificial Sequence: Synthetic oligonucleotide
cagaucaccacaagaacug

SEQ ID NO: 2826967 - RNA, 19 nt, Artificial Sequence
  Description of Artificial Sequence: Synthetic oligonucleotide
ucuaccacauugaucugga

SEQ ID NO: 2826968 - RNA, 19 nt, Artificial Sequence
  Description of Artificial Sequence: Synthetic oligonucleotide
agaggccucugucagauug

SEQ ID NO: 2826969 - RNA, 19 nt, Artificial Sequence
  Description of Artificial Sequence: Synthetic oligonucleotide
uuucucaccccacuagcug

SEQ ID NO: 2826970 - RNA, 19 nt, Artificial Sequence
  Description of Artificial Sequence: Synthetic oligonucleotide
ucacuugcuaucuuccaca

SEQ ID NO: 2826971 - RNA, 19 nt, Artificial Sequence
  Description of Artificial Sequence: Synthetic oligonucleotide
auuuccauuccauacuaaa

SEQ ID NO: 2826972 - RNA, 19 nt, Artificial Sequence
  Description of Artificial Sequence: Synthetic oligonucleotide
cuguuuguugcccucaaac

SEQ ID NO: 2826973 - RNA, 19 nt, Artificial Sequence
  Description of Artificial Sequence: Synthetic oligonucleotide
ucuggcuugguguagcuuc

SEQ ID NO: 2826974 - RNA, 19 nt, Artificial Sequence
  Description of Artificial Sequence: Synthetic oligonucleotide
gguaguguaguagacauug

SEQ ID NO: 2826975 - RNA, 19 nt, Artificial Sequence
  Description of Artificial Sequence: Synthetic oligonucleotide
augguaguguaguagacau

SEQ ID NO: 2826976 - RNA, 19 nt, Artificial Sequence
  Description of Artificial Sequence: Synthetic oligonucleotide
auucuuguccugaaacagc

SEQ ID NO: 2826977 - RNA, 19 nt, Artificial Sequence
  Description of Artificial Sequence: Synthetic oligonucleotide
ucagauuggcuccucugug

SEQ ID NO: 2826978 - RNA, 19 nt, Artificial Sequence
  Description of Artificial Sequence: Synthetic oligonucleotide
guugaagucccgcuguuug

SEQ ID NO: 2826979 - RNA, 19 nt, Artificial Sequence
  Description of Artificial Sequence: Synthetic oligonucleotide
gaagcagucacuugcuauc

SEQ ID NO: 2826980 - RNA, 19 nt, Artificial Sequence
  Description of Artificial Sequence: Synthetic oligonucleotide
agauuggcuccucuguggg

SEQ ID NO: 2826981 - RNA, 19 nt, Artificial Sequence
  Description of Artificial Sequence: Synthetic oligonucleotide
cuggcagucuaccacauug

SEQ ID NO: 2826982 - RNA, 19 nt, Artificial Sequence
  Description of Artificial Sequence: Synthetic oligonucleotide
uuuauccaugguaguguag

SEQ ID NO: 2826983 - RNA, 19 nt, Artificial Sequence
  Description of Artificial Sequence: Synthetic oligonucleotide
acaagaacuguggucuggc

SEQ ID NO: 2826984 - RNA, 19 nt, Artificial Sequence
  Description of Artificial Sequence: Synthetic oligonucleotide
aucaccacaagaacugugg

SEQ ID NO: 2826985 - RNA, 19 nt, Artificial Sequence
  Description of Artificial Sequence: Synthetic oligonucleotide
agcauuuccauuccauacu

SEQ ID NO: 2826986 - RNA, 19 nt, Artificial Sequence
  Description of Artificial Sequence: Synthetic oligonucleotide
aagaagccuuucucacccc

SEQ ID NO: 2826987 - RNA, 19 nt, Artificial Sequence
  Description of Artificial Sequence: Synthetic oligonucleotide
agugggugaagccugggca

SEQ ID NO: 2826988 - RNA, 19 nt, Artificial Sequence
  Description of Artificial Sequence: Synthetic oligonucleotide
agugcccauguacaggcgg

SEQ ID NO: 2826989 - RNA, 19 nt, Artificial Sequence
  Description of Artificial Sequence: Synthetic oligonucleotide
uucauucaaggauucuugu

SEQ ID NO: 2826990 - RNA, 19 nt, Artificial Sequence
  Description of Artificial Sequence: Synthetic oligonucleotide
acuaaaguggcagugccca

SEQ ID NO: 2826991 - RNA, 19 nt, Artificial Sequence
  Description of Artificial Sequence: Synthetic oligonucleotide
auucaaggauucuuguccu

SEQ ID NO: 2826992 - RNA, 19 nt, Artificial Sequence
  Description of Artificial Sequence: Synthetic oligonucleotide
uugguguagcuucaucaug

SEQ ID NO: 2826993 - RNA, 19 nt, Artificial Sequence
  Description of Artificial Sequence: Synthetic oligonucleotide
cauacuaaaguggcagugc

SEQ ID NO: 2826994 - RNA, 19 nt, Artificial Sequence
  Description of Artificial Sequence: Synthetic oligonucleotide
uggaaucggaagcagucac

SEQ ID NO: 2826995 - RNA, 19 nt, Artificial Sequence
  Description of Artificial Sequence: Synthetic oligonucleotide
cagcauuuccauuccauac

SEQ ID NO: 2826996 - RNA, 19 nt, Artificial Sequence
  Description of Artificial Sequence: Synthetic oligonucleotide
aagaacuguggucuggcuu

SEQ ID NO: 2826997 - RNA, 19 nt, Artificial Sequence
  Description of Artificial Sequence: Synthetic oligonucleotide
auucauucaaggauucuug

SEQ ID NO: 2826998 - RNA, 19 nt, Artificial Sequence
  Description of Artificial Sequence: Synthetic oligonucleotide
uacuaaaguggcagugccc

SEQ ID NO: 2826999 - RNA, 19 nt, Artificial Sequence
  Description of Artificial Sequence: Synthetic oligonucleotide
acuggaaggcaacaucuca

SEQ ID NO: 2827000 - RNA, 19 nt, Artificial Sequence
  Description of Artificial Sequence: Synthetic oligonucleotide
gacauugacaaacuccucu

SEQ ID NO: 2827001 - RNA, 19 nt, Artificial Sequence
  Description of Artificial Sequence: Synthetic oligonucleotide
ucauucaaggauucuuguc

SEQ ID NO: 2827002 - RNA, 19 nt, Artificial Sequence
  Description of Artificial Sequence: Synthetic oligonucleotide
cucuguggggauccgaggg

SEQ ID NO: 2827003 - RNA, 19 nt, Artificial Sequence
  Description of Artificial Sequence: Synthetic oligonucleotide
uaguagacauugacaaacu

SEQ ID NO: 2827004 - RNA, 19 nt, Artificial Sequence
  Description of Artificial Sequence: Synthetic oligonucleotide
cacauaggucuugaaaucc

SEQ ID NO: 2827005 - RNA, 19 nt, Artificial Sequence
  Description of Artificial Sequence: Synthetic oligonucleotide
aguguaguagacauugaca

SEQ ID NO: 2827006 - RNA, 19 nt, Artificial Sequence
  Description of Artificial Sequence: Synthetic oligonucleotide
ucaagaugaaguucugguu

SEQ ID NO: 2827007 - RNA, 19 nt, Artificial Sequence
  Description of Artificial Sequence: Synthetic oligonucleotide
uccucuguggggauccgag

SEQ ID NO: 2827008 - RNA, 19 nt, Artificial Sequence
  Description of Artificial Sequence: Synthetic oligonucleotide
aacuucacugauccacaga

SEQ ID NO: 2827009 - RNA, 19 nt, Artificial Sequence
  Description of Artificial Sequence: Synthetic oligonucleotide
ccucaaacuucacugaucc

SEQ ID NO: 2827010 - RNA, 19 nt, Artificial Sequence
  Description of Artificial Sequence: Synthetic oligonucleotide
cagauuggcuccucugugg

SEQ ID NO: 2827011 - RNA, 19 nt, Artificial Sequence
  Description of Artificial Sequence: Synthetic oligonucleotide
aacuccucugcagcucugc

SEQ ID NO: 2827012 - RNA, 19 nt, Artificial Sequence
  Description of Artificial Sequence: Synthetic oligonucleotide
acagaucaccacaagaacu

SEQ ID NO: 2827013 - RNA, 19 nt, Artificial Sequence
  Description of Artificial Sequence: Synthetic oligonucleotide
aaucggaagcagucacuug

SEQ ID NO: 2827014 - RNA, 19 nt, Artificial Sequence
  Description of Artificial Sequence: Synthetic oligonucleotide
uguaguagacauugacaaa

SEQ ID NO: 2827015 - RNA, 19 nt, Artificial Sequence
  Description of Artificial Sequence: Synthetic oligonucleotide
ucaaggauucuuguccuga

SEQ ID NO: 2827016 - RNA, 19 nt, Artificial Sequence
  Description of Artificial Sequence: Synthetic oligonucleotide
guacaggcgggauagcagc

SEQ ID NO: 2827017 - RNA, 19 nt, Artificial Sequence
  Description of Artificial Sequence: Synthetic oligonucleotide
caguccuggaaucggaagc

SEQ ID NO: 2827018 - RNA, 19 nt, Artificial Sequence
  Description of Artificial Sequence: Synthetic oligonucleotide
agucaagaugaaguucugg

SEQ ID NO: 2827019 - RNA, 19 nt, Artificial Sequence
  Description of Artificial Sequence: Synthetic oligonucleotide
ugucagauuggcuccucug

SEQ ID NO: 2827020 - RNA, 19 nt, Artificial Sequence
  Description of Artificial Sequence: Synthetic oligonucleotide
ugcuaucuuccacacugug

SEQ ID NO: 2827021 - RNA, 19 nt, Artificial Sequence
  Description of Artificial Sequence: Synthetic oligonucleotide
cauaggucuugaaauccac

SEQ ID NO: 2827022 - RNA, 19 nt, Artificial Sequence
  Description of Artificial Sequence: Synthetic oligonucleotide
aaauucauucaaggauucu

SEQ ID NO: 2827023 - RNA, 19 nt, Artificial Sequence
  Description of Artificial Sequence: Synthetic oligonucleotide
ucucugguucugccgacag

SEQ ID NO: 2827024 - RNA, 19 nt, Artificial Sequence
  Description of Artificial Sequence: Synthetic oligonucleotide
cagucacuugcuaucuucc

SEQ ID NO: 2827025 - RNA, 19 nt, Artificial Sequence
  Description of Artificial Sequence: Synthetic oligonucleotide
agccaagaagccuuucuca

SEQ ID NO: 2827026 - RNA, 19 nt, Artificial Sequence
  Description of Artificial Sequence: Synthetic oligonucleotide
uuguccugaaacagcauuu

SEQ ID NO: 2827027 - RNA, 19 nt, Artificial Sequence
  Description of Artificial Sequence: Synthetic oligonucleotide
agucccgcuguuuguugcc

SEQ ID NO: 2827028 - RNA, 19 nt, Artificial Sequence
  Description of Artificial Sequence: Synthetic oligonucleotide
aucuuccacacuguguuag

SEQ ID NO: 2827029 - RNA, 19 nt, Artificial Sequence
  Description of Artificial Sequence: Synthetic oligonucleotide
cuucaucauggacaggcug

SEQ ID NO: 2827030 - RNA, 19 nt, Artificial Sequence
  Description of Artificial Sequence: Synthetic oligonucleotide
ugaaauccacugaugccau

SEQ ID NO: 2827031 - RNA, 19 nt, Artificial Sequence
  Description of Artificial Sequence: Synthetic oligonucleotide
aggucuugaaauccacuga

SEQ ID NO: 2827032 - RNA, 19 nt, Artificial Sequence
  Description of Artificial Sequence: Synthetic oligonucleotide
ccauuccauacuaaagugg

SEQ ID NO: 2827033 - RNA, 19 nt, Artificial Sequence
  Description of Artificial Sequence: Synthetic oligonucleotide
ucaccacaagaacuguggu

SEQ ID NO: 2827034 - RNA, 19 nt, Artificial Sequence
  Description of Artificial Sequence: Synthetic oligonucleotide
aagccuuucucaccccacu

SEQ ID NO: 2827035 - RNA, 19 nt, Artificial Sequence
  Description of Artificial Sequence: Synthetic oligonucleotide
uccauacuaaaguggcagu

SEQ ID NO: 2827036 - RNA, 19 nt, Artificial Sequence
  Description of Artificial Sequence: Synthetic oligonucleotide
gucaagaugaaguucuggu

SEQ ID NO: 2827037 - RNA, 19 nt, Artificial Sequence
  Description of Artificial Sequence: Synthetic oligonucleotide
gauuggcuccucugugggg

SEQ ID NO: 2827038 - RNA, 19 nt, Artificial Sequence
  Description of Artificial Sequence: Synthetic oligonucleotide
aaggauucuuguccugaaa

SEQ ID NO: 2827039 - RNA, 19 nt, Artificial Sequence
  Description of Artificial Sequence: Synthetic oligonucleotide
uuguugcccucaaacuuca

SEQ ID NO: 2827040 - RNA, 19 nt, Artificial Sequence
  Description of Artificial Sequence: Synthetic oligonucleotide
ucauggacaggcuggcagu

SEQ ID NO: 2827041 - RNA, 19 nt, Artificial Sequence
  Description of Artificial Sequence: Synthetic oligonucleotide
uagugggugaagccugggc

SEQ ID NO: 2827042 - RNA, 19 nt, Artificial Sequence
  Description of Artificial Sequence: Synthetic oligonucleotide
aacagcauuuccauuccau

SEQ ID NO: 2827043 - RNA, 19 nt, Artificial Sequence
  Description of Artificial Sequence: Synthetic oligonucleotide
cuguguuagugggugaagc

SEQ ID NO: 2827044 - RNA, 19 nt, Artificial Sequence
  Description of Artificial Sequence: Synthetic oligonucleotide
uggaaggcaacaucucaaa

SEQ ID NO: 2827045 - RNA, 19 nt, Artificial Sequence
  Description of Artificial Sequence: Synthetic oligonucleotide
ucuguggggauccgaggga

SEQ ID NO: 2827046 - RNA, 19 nt, Artificial Sequence
  Description of Artificial Sequence: Synthetic oligonucleotide
uucugguugaagucccgcu

SEQ ID NO: 2827047 - RNA, 19 nt, Artificial Sequence
  Description of Artificial Sequence: Synthetic oligonucleotide
cacacuguguuagugggug

SEQ ID NO: 2827048 - RNA, 19 nt, Artificial Sequence
  Description of Artificial Sequence: Synthetic oligonucleotide
gucacuugcuaucuuccac

SEQ ID NO: 2827049 - RNA, 19 nt, Artificial Sequence
  Description of Artificial Sequence: Synthetic oligonucleotide
cucacuggaaggcaacauc

SEQ ID NO: 2827050 - RNA, 19 nt, Artificial Sequence
  Description of Artificial Sequence: Synthetic oligonucleotide
uucaaggauucuuguccug

SEQ ID NO: 2827051 - RNA, 19 nt, Artificial Sequence
  Description of Artificial Sequence: Synthetic oligonucleotide
cuggaacucacuggaaggc

SEQ ID NO: 2827052 - RNA, 19 nt, Artificial Sequence
  Description of Artificial Sequence: Synthetic oligonucleotide
caaacuucacugauccaca

SEQ ID NO: 2827053 - RNA, 19 nt, Artificial Sequence
  Description of Artificial Sequence: Synthetic oligonucleotide
gaucaccacaagaacugug

SEQ ID NO: 2827054 - RNA, 19 nt, Artificial Sequence
  Description of Artificial Sequence: Synthetic oligonucleotide
acuguggucuggcuuggug

SEQ ID NO: 2827055 - RNA, 19 nt, Artificial Sequence
  Description of Artificial Sequence: Synthetic oligonucleotide
uggcagucuaccacauuga

SEQ ID NO: 2827056 - RNA, 19 nt, Artificial Sequence
  Description of Artificial Sequence: Synthetic oligonucleotide
ugaagccugggcagucaag

SEQ ID NO: 2827057 - RNA, 19 nt, Artificial Sequence
  Description of Artificial Sequence: Synthetic oligonucleotide
ucaucauggacaggcuggc

SEQ ID NO: 2827058 - RNA, 19 nt, Artificial Sequence
  Description of Artificial Sequence: Synthetic oligonucleotide
agccugggcagucaagaug

SEQ ID NO: 2827059 - RNA, 19 nt, Artificial Sequence
  Description of Artificial Sequence: Synthetic oligonucleotide
guccugaaacagcauuucc

SEQ ID NO: 2827060 - RNA, 19 nt, Artificial Sequence
  Description of Artificial Sequence: Synthetic oligonucleotide
acagcauuuccauuccaua

SEQ ID NO: 2827061 - RNA, 19 nt, Artificial Sequence
  Description of Artificial Sequence: Synthetic oligonucleotide
uccuggaaucggaagcagu

SEQ ID NO: 2827062 - RNA, 19 nt, Artificial Sequence
  Description of Artificial Sequence: Synthetic oligonucleotide
ucggaagcagucacuugcu

SEQ ID NO: 2827063 - RNA, 19 nt, Artificial Sequence
  Description of Artificial Sequence: Synthetic oligonucleotide
gaagccugggcagucaaga

SEQ ID NO: 2827064 - RNA, 19 nt, Artificial Sequence
  Description of Artificial Sequence: Synthetic oligonucleotide
uacaggcgggauagcagcc

SEQ ID NO: 2827065 - RNA, 19 nt, Artificial Sequence
  Description of Artificial Sequence: Synthetic oligonucleotide
gaugccaucucugguucug

SEQ ID NO: 2827066 - RNA, 19 nt, Artificial Sequence
  Description of Artificial Sequence: Synthetic oligonucleotide
gaagucccgcuguuuguug

SEQ ID NO: 2827067 - RNA, 19 nt, Artificial Sequence
  Description of Artificial Sequence: Synthetic oligonucleotide
auuggcuccucugugggga

SEQ ID NO: 2827068 - RNA, 19 nt, Artificial Sequence
  Description of Artificial Sequence: Synthetic oligonucleotide
ucucaccccacuagcuggc

SEQ ID NO: 2827069 - RNA, 19 nt, Artificial Sequence
  Description of Artificial Sequence: Synthetic oligonucleotide
uugaagucccgcuguuugu

SEQ ID NO: 2827070 - RNA, 19 nt, Artificial Sequence
  Description of Artificial Sequence: Synthetic oligonucleotide
aagcagucacuugcuaucu

SEQ ID NO: 2827071 - RNA, 19 nt, Artificial Sequence
  Description of Artificial Sequence: Synthetic oligonucleotide
gcuugguguagcuucauca

SEQ ID NO: 2827072 - RNA, 19 nt, Artificial Sequence
  Description of Artificial Sequence: Synthetic oligonucleotide
agucacuugcuaucuucca

SEQ ID NO: 2827073 - RNA, 19 nt, Artificial Sequence
  Description of Artificial Sequence: Synthetic oligonucleotide
ugcccucaaacuucacuga

SEQ ID NO: 2827074 - RNA, 19 nt, Artificial Sequence
  Description of Artificial Sequence: Synthetic oligonucleotide
cuagcuggcccaguccugg

SEQ ID NO: 2827075 - RNA, 19 nt, Artificial Sequence
  Description of Artificial Sequence: Synthetic oligonucleotide
caccacaagaacugugguc

SEQ ID NO: 2827076 - RNA, 19 nt, Artificial Sequence
  Description of Artificial Sequence: Synthetic oligonucleotide
gccucugucagauuggcuc

SEQ ID NO: 2827077 - RNA, 19 nt, Artificial Sequence
  Description of Artificial Sequence: Synthetic oligonucleotide
aacucacuggaaggcaaca

SEQ ID NO: 2827078 - RNA, 19 nt, Artificial Sequence
  Description of Artificial Sequence: Synthetic oligonucleotide
uguccugaaacagcauuuc

SEQ ID NO: 2827079 - RNA, 19 nt, Artificial Sequence
  Description of Artificial Sequence: Synthetic oligonucleotide
gcagugcccauguacaggc

SEQ ID NO: 2827080 - RNA, 19 nt, Artificial Sequence
  Description of Artificial Sequence: Synthetic oligonucleotide
caggcuggcagucuaccac

SEQ ID NO: 2827081 - RNA, 19 nt, Artificial Sequence
  Description of Artificial Sequence: Synthetic oligonucleotide
uggaacucacuggaaggca

SEQ ID NO: 2827082 - RNA, 19 nt, Artificial Sequence
  Description of Artificial Sequence: Synthetic oligonucleotide
guuagugggugaagccugg

SEQ ID NO: 2827083 - RNA, 19 nt, Artificial Sequence
  Description of Artificial Sequence: Synthetic oligonucleotide
cacaagaacuguggucugg

SEQ ID NO: 2827084 - RNA, 19 nt, Artificial Sequence
  Description of Artificial Sequence: Synthetic oligonucleotide
ggauucuuguccugaaaca

SEQ ID NO: 2827085 - RNA, 19 nt, Artificial Sequence
  Description of Artificial Sequence: Synthetic oligonucleotide
uggcagugcccauguacag

SEQ ID NO: 2827086 - RNA, 19 nt, Artificial Sequence
  Description of Artificial Sequence: Synthetic oligonucleotide
cacuugcuaucuuccacac

SEQ ID NO: 2827087 - RNA, 19 nt, Artificial Sequence
  Description of Artificial Sequence: Synthetic oligonucleotide
uuagugggugaagccuggg

SEQ ID NO: 2827088 - RNA, 19 nt, Artificial Sequence
  Description of Artificial Sequence: Synthetic oligonucleotide
guccacauaggucuugaaa

SEQ ID NO: 2827089 - RNA, 19 nt, Artificial Sequence
  Description of Artificial Sequence: Synthetic oligonucleotide
cugaugccaucucugguuc

SEQ ID NO: 2827090 - RNA, 19 nt, Artificial Sequence
  Description of Artificial Sequence: Synthetic oligonucleotide
uugcuaucuuccacacugu

SEQ ID NO: 2827091 - RNA, 19 nt, Artificial Sequence
  Description of Artificial Sequence: Synthetic oligonucleotide
ucuuccacacuguguuagu

SEQ ID NO: 2827092 - RNA, 19 nt, Artificial Sequence
  Description of Artificial Sequence: Synthetic oligonucleotide
aguccuggaaucggaagca

SEQ ID NO: 2827093 - RNA, 19 nt, Artificial Sequence
  Description of Artificial Sequence: Synthetic oligonucleotide
cuaucuuccacacuguguu

SEQ ID NO: 2827094 - RNA, 19 nt, Artificial Sequence
  Description of Artificial Sequence: Synthetic oligonucleotide
auccacagaucaccacaag

SEQ ID NO: 2827095 - RNA, 19 nt, Artificial Sequence
  Description of Artificial Sequence: Synthetic oligonucleotide
acauaggucuugaaaucca

SEQ ID NO: 2827096 - RNA, 19 nt, Artificial Sequence
  Description of Artificial Sequence: Synthetic oligonucleotide
uauccaugguaguguagua

SEQ ID NO: 2827097 - RNA, 19 nt, Artificial Sequence
  Description of Artificial Sequence: Synthetic oligonucleotide
guuuguugcccucaaacuu

SEQ ID NO: 2827098 - RNA, 19 nt, Artificial Sequence
  Description of Artificial Sequence: Synthetic oligonucleotide
ucaccccacuagcuggccc

SEQ ID NO: 2827099 - RNA, 19 nt, Artificial Sequence
  Description of Artificial Sequence: Synthetic oligonucleotide
auguacaggcgggauagca

SEQ ID NO: 2827100 - RNA, 19 nt, Artificial Sequence
  Description of Artificial Sequence: Synthetic oligonucleotide
gaggccucugucagauugg

SEQ ID NO: 2827101 - RNA, 19 nt, Artificial Sequence
  Description of Artificial Sequence: Synthetic oligonucleotide
cagagcugggccaaagcca

SEQ ID NO: 2827102 - RNA, 19 nt, Artificial Sequence
  Description of Artificial Sequence: Synthetic oligonucleotide
guuuauccaugguagugua

SEQ ID NO: 2827103 - RNA, 19 nt, Artificial Sequence
  Description of Artificial Sequence: Synthetic oligonucleotide
aggcuggcagucuaccaca

SEQ ID NO: 2827104 - RNA, 19 nt, Artificial Sequence
  Description of Artificial Sequence: Synthetic oligonucleotide
auaggucuugaaauccacu

SEQ ID NO: 2827105 - RNA, 19 nt, Artificial Sequence
  Description of Artificial Sequence: Synthetic oligonucleotide
cuggaaggcaacaucucaa

SEQ ID NO: 2827106 - RNA, 19 nt, Artificial Sequence
  Description of Artificial Sequence: Synthetic oligonucleotide
cuucacugauccacagauc

SEQ ID NO: 2827107 - RNA, 19 nt, Artificial Sequence
  Description of Artificial Sequence: Synthetic oligonucleotide
gucuugaaauccacugaug

SEQ ID NO: 2827108 - RNA, 19 nt, Artificial Sequence
  Description of Artificial Sequence: Synthetic oligonucleotide
acuguguuagugggugaag

SEQ ID NO: 2827109 - RNA, 19 nt, Artificial Sequence
  Description of Artificial Sequence: Synthetic oligonucleotide
aagccugggcagucaagau

SEQ ID NO: 2827110 - RNA, 19 nt, Artificial Sequence
  Description of Artificial Sequence: Synthetic oligonucleotide
caugguaguguaguagaca

SEQ ID NO: 2827111 - RNA, 19 nt, Artificial Sequence
  Description of Artificial Sequence: Synthetic oligonucleotide
acagaggccucugucagau

SEQ ID NO: 2827112 - RNA, 19 nt, Artificial Sequence
  Description of Artificial Sequence: Synthetic oligonucleotide
cuuccacacuguguuagug

SEQ ID NO: 2827113 - RNA, 19 nt, Artificial Sequence
  Description of Artificial Sequence: Synthetic oligonucleotide
guguagcuucaucauggac

SEQ ID NO: 2827114 - RNA, 19 nt, Artificial Sequence
  Description of Artificial Sequence: Synthetic oligonucleotide
ucuuguccugaaacagcau

SEQ ID NO: 2827115 - RNA, 19 nt, Artificial Sequence
  Description of Artificial Sequence: Synthetic oligonucleotide
ccuggaaucggaagcaguc

SEQ ID NO: 2827116 - RNA, 19 nt, Artificial Sequence
  Description of Artificial Sequence: Synthetic oligonucleotide
agacauugacaaacuccuc

SEQ ID NO: 2827117 - RNA, 19 nt, Artificial Sequence
  Description of Artificial Sequence: Synthetic oligonucleotide
gaacuguggucuggcuugg

SEQ ID NO: 2827118 - RNA, 19 nt, Artificial Sequence
  Description of Artificial Sequence: Synthetic oligonucleotide
uggcccaguccuggaaucg

SEQ ID NO: 2827119 - RNA, 19 nt, Artificial Sequence
  Description of Artificial Sequence: Synthetic oligonucleotide
gaacucacuggaaggcaac

SEQ ID NO: 2827120 - RNA, 19 nt, Artificial Sequence
  Description of Artificial Sequence: Synthetic oligonucleotide
ccaagaagccuuucucacc

SEQ ID NO: 2827121 - RNA, 19 nt, Artificial Sequence
  Description of Artificial Sequence: Synthetic oligonucleotide
ccauguacaggcgggauag

SEQ ID NO: 2827122 - RNA, 19 nt, Artificial Sequence
  Description of Artificial Sequence: Synthetic oligonucleotide
acuugcuaucuuccacacu

SEQ ID NO: 2827123 - RNA, 19 nt, Artificial Sequence
  Description of Artificial Sequence: Synthetic oligonucleotide
acaggcgggauagcagccg

SEQ ID NO: 2827124 - RNA, 19 nt, Artificial Sequence
  Description of Artificial Sequence: Synthetic oligonucleotide
acaggcuggcagucuacca

SEQ ID NO: 2827125 - RNA, 19 nt, Artificial Sequence
  Description of Artificial Sequence: Synthetic oligonucleotide
gccaucucugguucugccg

SEQ ID NO: 2827126 - RNA, 19 nt, Artificial Sequence
  Description of Artificial Sequence: Synthetic oligonucleotide
uguggggauccgagggacu

SEQ ID NO: 2827127 - RNA, 19 nt, Artificial Sequence
  Description of Artificial Sequence: Synthetic oligonucleotide
uggucuggcuugguguagc

SEQ ID NO: 2827128 - RNA, 19 nt, Artificial Sequence
  Description of Artificial Sequence: Synthetic oligonucleotide
auuccauacuaaaguggca

SEQ ID NO: 2827129 - RNA, 19 nt, Artificial Sequence
  Description of Artificial Sequence: Synthetic oligonucleotide
guucugguugaagucccgc

SEQ ID NO: 2827130 - RNA, 19 nt, Artificial Sequence
  Description of Artificial Sequence: Synthetic oligonucleotide
cagucaagaugaaguucug

SEQ ID NO: 2827131 - RNA, 19 nt, Artificial Sequence
  Description of Artificial Sequence: Synthetic oligonucleotide
ugaagucccgcuguuuguu

SEQ ID NO: 2827132 - RNA, 19 nt, Artificial Sequence
  Description of Artificial Sequence: Synthetic oligonucleotide
ccuuucucaccccacuagc

SEQ ID NO: 2827133 - RNA, 19 nt, Artificial Sequence
  Description of Artificial Sequence: Synthetic oligonucleotide
gcagucacuugcuaucuuc

SEQ ID NO: 2827134 - RNA, 19 nt, Artificial Sequence
  Description of Artificial Sequence: Synthetic oligonucleotide
ucugccgacagaggccucu

SEQ ID NO: 2827135 - RNA, 19 nt, Artificial Sequence
  Description of Artificial Sequence: Synthetic oligonucleotide
guggcagugcccauguaca

SEQ ID NO: 2827136 - RNA, 19 nt, Artificial Sequence
  Description of Artificial Sequence: Synthetic oligonucleotide
gugcccauguacaggcggg

SEQ ID NO: 2827137 - RNA, 19 nt, Artificial Sequence
  Description of Artificial Sequence: Synthetic oligonucleotide
gaagccuuucucaccccac

SEQ ID NO: 2827138 - RNA, 19 nt, Artificial Sequence
  Description of Artificial Sequence: Synthetic oligonucleotide
guugcccucaaacuucacu

SEQ ID NO: 2827139 - RNA, 19 nt, Artificial Sequence
  Description of Artificial Sequence: Synthetic oligonucleotide
uaucuuccacacuguguua

SEQ ID NO: 2827140 - RNA, 19 nt, Artificial Sequence
  Description of Artificial Sequence: Synthetic oligonucleotide
gucagauuggcuccucugu

SEQ ID NO: 2827141 - RNA, 19 nt, Artificial Sequence
  Description of Artificial Sequence: Synthetic oligonucleotide
ugaugccaucucugguucu

SEQ ID NO: 2827142 - RNA, 19 nt, Artificial Sequence
  Description of Artificial Sequence: Synthetic oligonucleotide
ccacugaugccaucucugg

SEQ ID NO: 2827143 - RNA, 19 nt, Artificial Sequence
  Description of Artificial Sequence: Synthetic oligonucleotide
ccacagaucaccacaagaa

SEQ ID NO: 2827144 - RNA, 19 nt, Artificial Sequence
  Description of Artificial Sequence: Synthetic oligonucleotide
gccuuucucaccccacuag

SEQ ID NO: 2827145 - RNA, 19 nt, Artificial Sequence
  Description of Artificial Sequence: Synthetic oligonucleotide
ugguaguguaguagacauu

SEQ ID NO: 2827146 - RNA, 19 nt, Artificial Sequence
  Description of Artificial Sequence: Synthetic oligonucleotide
ccacauaggucuugaaauc

SEQ ID NO: 2827147 - RNA, 19 nt, Artificial Sequence
  Description of Artificial Sequence: Synthetic oligonucleotide
cgccguuuauccaugguag

SEQ ID NO: 2827148 - RNA, 19 nt, Artificial Sequence
  Description of Artificial Sequence: Synthetic oligonucleotide
acuccucugcagcucugca

SEQ ID NO: 2827149 - RNA, 19 nt, Artificial Sequence
  Description of Artificial Sequence: Synthetic oligonucleotide
gccugguccacauaggucu

SEQ ID NO: 2827150 - RNA, 19 nt, Artificial Sequence
  Description of Artificial Sequence: Synthetic oligonucleotide
gguucugccgacagaggcc

SEQ ID NO: 2827151 - RNA, 19 nt, Artificial Sequence
  Description of Artificial Sequence: Synthetic oligonucleotide
acacuguguuaguggguga

SEQ ID NO: 2827152 - RNA, 19 nt, Artificial Sequence
  Description of Artificial Sequence: Synthetic oligonucleotide
caggcgggauagcagccgc

SEQ ID NO: 2827153 - RNA, 19 nt, Artificial Sequence
  Description of Artificial Sequence: Synthetic oligonucleotide
cagccgccgccguuuaucc

SEQ ID NO: 2827154 - RNA, 19 nt, Artificial Sequence
  Description of Artificial Sequence: Synthetic oligonucleotide
guggggauccgagggacug

SEQ ID NO: 2827155 - RNA, 19 nt, Artificial Sequence
  Description of Artificial Sequence: Synthetic oligonucleotide
agcugggccaaagccaaga

SEQ ID NO: 2827156 - RNA, 19 nt, Artificial Sequence
  Description of Artificial Sequence: Synthetic oligonucleotide
gacagaggccucugucaga

SEQ ID NO: 2827157 - RNA, 19 nt, Artificial Sequence
  Description of Artificial Sequence: Synthetic oligonucleotide
ccauacuaaaguggcagug

SEQ ID NO: 2827158 - RNA, 19 nt, Artificial Sequence
  Description of Artificial Sequence: Synthetic oligonucleotide
cuugguguagcuucaucau

SEQ ID NO: 2827159 - RNA, 19 nt, Artificial Sequence
  Description of Artificial Sequence: Synthetic oligonucleotide
cuuucucaccccacuagcu

SEQ ID NO: 2827160 - RNA, 19 nt, Artificial Sequence
  Description of Artificial Sequence: Synthetic oligonucleotide
ggucuugaaauccacugau

SEQ ID NO: 2827161 - RNA, 19 nt, Artificial Sequence
  Description of Artificial Sequence: Synthetic oligonucleotide
cuguggggauccgagggac

SEQ ID NO: 2827162 - RNA, 19 nt, Artificial Sequence
  Description of Artificial Sequence: Synthetic oligonucleotide
cuuguccugaaacagcauu

SEQ ID NO: 2827163 - RNA, 19 nt, Artificial Sequence
  Description of Artificial Sequence: Synthetic oligonucleotide
ugguugaagucccgcuguu

SEQ ID NO: 2827164 - RNA, 19 nt, Artificial Sequence
  Description of Artificial Sequence: Synthetic oligonucleotide
cuggcccaguccuggaauc

SEQ ID NO: 2827165 - RNA, 19 nt, Artificial Sequence
  Description of Artificial Sequence: Synthetic oligonucleotide
gaaucggaagcagucacuu

SEQ ID NO: 2827166 - RNA, 19 nt, Artificial Sequence
  Description of Artificial Sequence: Synthetic oligonucleotide
caaggauucuuguccugaa

SEQ ID NO: 2827167 - RNA, 19 nt, Artificial Sequence
  Description of Artificial Sequence: Synthetic oligonucleotide
cucugcagcucugcaggcc

SEQ ID NO: 2827168 - RNA, 19 nt, Artificial Sequence
  Description of Artificial Sequence: Synthetic oligonucleotide
cauuuccauuccauacuaa

SEQ ID NO: 2827169 - RNA, 19 nt, Artificial Sequence
  Description of Artificial Sequence: Synthetic oligonucleotide
cagugcccauguacaggcg

SEQ ID NO: 2827170 - RNA, 19 nt, Artificial Sequence
  Description of Artificial Sequence: Synthetic oligonucleotide
gccugggcagucaagauga

SEQ ID NO: 2827171 - RNA, 19 nt, Artificial Sequence
  Description of Artificial Sequence: Synthetic oligonucleotide
acucacuggaaggcaacau

SEQ ID NO: 2827172 - RNA, 19 nt, Artificial Sequence
  Description of Artificial Sequence: Synthetic oligonucleotide
uguugcccucaaacuucac

SEQ ID NO: 2827173 - RNA, 19 nt, Artificial Sequence
  Description of Artificial Sequence: Synthetic oligonucleotide
guguuagugggugaagccu

SEQ ID NO: 2827174 - RNA, 19 nt, Artificial Sequence
  Description of Artificial Sequence: Synthetic oligonucleotide
cucaaacuucacugaucca

SEQ ID NO: 2827175 - RNA, 19 nt, Artificial Sequence
  Description of Artificial Sequence: Synthetic oligonucleotide
ugggugaagccugggcagu

SEQ ID NO: 2827176 - RNA, 19 nt, Artificial Sequence
  Description of Artificial Sequence: Synthetic oligonucleotide
ggaaggcaacaucucaaaa

SEQ ID NO: 2827177 - RNA, 19 nt, Artificial Sequence
  Description of Artificial Sequence: Synthetic oligonucleotide
ccaguccuggaaucggaag

SEQ ID NO: 2827178 - RNA, 19 nt, Artificial Sequence
  Description of Artificial Sequence: Synthetic oligonucleotide
ccaugguaguguaguagac

SEQ ID NO: 2827179 - RNA, 19 nt, Artificial Sequence
  Description of Artificial Sequence: Synthetic oligonucleotide
gggauagcagccgccgccg

SEQ ID NO: 2827180 - RNA, 19 nt, Artificial Sequence
  Description of Artificial Sequence: Synthetic oligonucleotide
cuguggucuggcuuggugu

SEQ ID NO: 2827181 - RNA, 19 nt, Artificial Sequence
  Description of Artificial Sequence: Synthetic oligonucleotide
aaacuccucugcagcucug

SEQ ID NO: 2827182 - RNA, 19 nt, Artificial Sequence
  Description of Artificial Sequence: Synthetic oligonucleotide
cauggacaggcuggcaguc

SEQ ID NO: 2827183 - RNA, 19 nt, Artificial Sequence
  Description of Artificial Sequence: Synthetic oligonucleotide
cuggaaucggaagcaguca

SEQ ID NO: 2827184 - RNA, 19 nt, Artificial Sequence
  Description of Artificial Sequence: Synthetic oligonucleotide
gcauuuccauuccauacua

SEQ ID NO: 2827185 - RNA, 19 nt, Artificial Sequence
  Description of Artificial Sequence: Synthetic oligonucleotide
ucccgcuguuuguugcccu

SEQ ID NO: 2827186 - RNA, 19 nt, Artificial Sequence
  Description of Artificial Sequence: Synthetic oligonucleotide
ggcagucaagaugaaguuc

SEQ ID NO: 2827187 - RNA, 19 nt, Artificial Sequence
  Description of Artificial Sequence: Synthetic oligonucleotide
guaguguaguagacauuga

SEQ ID NO: 2827188 - RNA, 19 nt, Artificial Sequence
  Description of Artificial Sequence: Synthetic oligonucleotide
guccuggaaucggaagcag

SEQ ID NO: 2827189 - RNA, 19 nt, Artificial Sequence
  Description of Artificial Sequence: Synthetic oligonucleotide
ggcgggauagcagccgccg

SEQ ID NO: 2827190 - RNA, 19 nt, Artificial Sequence
  Description of Artificial Sequence: Synthetic oligonucleotide
cuggcuugguguagcuuca

SEQ ID NO: 2827191 - RNA, 19 nt, Artificial Sequence
  Description of Artificial Sequence: Synthetic oligonucleotide
ugcccauguacaggcggga

SEQ ID NO: 2827192 - RNA, 19 nt, Artificial Sequence
  Description of Artificial Sequence: Synthetic oligonucleotide
caccccacuagcuggccca

SEQ ID NO: 2827193 - RNA, 19 nt, Artificial Sequence
  Description of Artificial Sequence: Synthetic oligonucleotide
ccguuuauccaugguagug

SEQ ID NO: 2827194 - RNA, 19 nt, Artificial Sequence
  Description of Artificial Sequence: Synthetic oligonucleotide
gggccaaagccaagaagcc

SEQ ID NO: 2827195 - RNA, 19 nt, Artificial Sequence
  Description of Artificial Sequence: Synthetic oligonucleotide
aggcgggauagcagccgcc

SEQ ID NO: 2827196 - RNA, 19 nt, Artificial Sequence
  Description of Artificial Sequence: Synthetic oligonucleotide
caaacuccucugcagcucu

SEQ ID NO: 2827197 - RNA, 19 nt, Artificial Sequence
  Description of Artificial Sequence: Synthetic oligonucleotide
uagcuucaucauggacagg

SEQ ID NO: 2827198 - RNA, 19 nt, Artificial Sequence
  Description of Artificial Sequence: Synthetic oligonucleotide
ggaagcagucacuugcuau

SEQ ID NO: 2827199 - RNA, 19 nt, Artificial Sequence
  Description of Artificial Sequence: Synthetic oligonucleotide
cauugaucuggaacucacu

SEQ ID NO: 2827200 - RNA, 19 nt, Artificial Sequence
  Description of Artificial Sequence: Synthetic oligonucleotide
cauguacaggcgggauagc

SEQ ID NO: 2827201 - RNA, 19 nt, Artificial Sequence
  Description of Artificial Sequence: Synthetic oligonucleotide
agcagucacuugcuaucuu

SEQ ID NO: 2827202 - RNA, 19 nt, Artificial Sequence
  Description of Artificial Sequence: Synthetic oligonucleotide
ugccgacagaggccucugu

SEQ ID NO: 2827203 - RNA, 19 nt, Artificial Sequence
  Description of Artificial Sequence: Synthetic oligonucleotide
acuagcuggcccaguccug

SEQ ID NO: 2827204 - RNA, 19 nt, Artificial Sequence
  Description of Artificial Sequence: Synthetic oligonucleotide
cccucaaacuucacugauc

SEQ ID NO: 2827205 - RNA, 19 nt, Artificial Sequence
  Description of Artificial Sequence: Synthetic oligonucleotide
gcagucuaccacauugauc

SEQ ID NO: 2827206 - RNA, 19 nt, Artificial Sequence
  Description of Artificial Sequence: Synthetic oligonucleotide
caaagccaagaagccuuuc

SEQ ID NO: 2827207 - RNA, 19 nt, Artificial Sequence
  Description of Artificial Sequence: Synthetic oligonucleotide
cacuagcuggcccaguccu

SEQ ID NO: 2827208 - RNA, 19 nt, Artificial Sequence
  Description of Artificial Sequence: Synthetic oligonucleotide
guucugccgacagaggccu

SEQ ID NO: 2827209 - RNA, 19 nt, Artificial Sequence
  Description of Artificial Sequence: Synthetic oligonucleotide
guggucuggcuugguguag

SEQ ID NO: 2827210 - RNA, 19 nt, Artificial Sequence
  Description of Artificial Sequence: Synthetic oligonucleotide
ccucuguggggauccgagg

SEQ ID NO: 2827211 - RNA, 19 nt, Artificial Sequence
  Description of Artificial Sequence: Synthetic oligonucleotide
gugaagccugggcagucaa

SEQ ID NO: 2827212 - RNA, 19 nt, Artificial Sequence
  Description of Artificial Sequence: Synthetic oligonucleotide
ggaacucacuggaaggcaa

SEQ ID NO: 2827213 - RNA, 19 nt, Artificial Sequence
  Description of Artificial Sequence: Synthetic oligonucleotide
ccaucucugguucugccga

SEQ ID NO: 2827214 - RNA, 19 nt, Artificial Sequence
  Description of Artificial Sequence: Synthetic oligonucleotide
agcuggcccaguccuggaa

SEQ ID NO: 2827215 - RNA, 19 nt, Artificial Sequence
  Description of Artificial Sequence: Synthetic oligonucleotide
cacuguguuagugggugaa

SEQ ID NO: 2827216 - RNA, 19 nt, Artificial Sequence
  Description of Artificial Sequence: Synthetic oligonucleotide
aacuguggucuggcuuggu

SEQ ID NO: 2827217 - RNA, 19 nt, Artificial Sequence
  Description of Artificial Sequence: Synthetic oligonucleotide
uagcuggcccaguccugga

SEQ ID NO: 2827218 - RNA, 19 nt, Artificial Sequence
  Description of Artificial Sequence: Synthetic oligonucleotide
uuggcuccucuguggggau

SEQ ID NO: 2827219 - RNA, 19 nt, Artificial Sequence
  Description of Artificial Sequence: Synthetic oligonucleotide
ccugaaacagcauuuccau

SEQ ID NO: 2827220 - RNA, 19 nt, Artificial Sequence
  Description of Artificial Sequence: Synthetic oligonucleotide
cgacagaggccucugucag

SEQ ID NO: 2827221 - RNA, 19 nt, Artificial Sequence
  Description of Artificial Sequence: Synthetic oligonucleotide
cugguccacauaggucuug

SEQ ID NO: 2827222 - RNA, 19 nt, Artificial Sequence
  Description of Artificial Sequence: Synthetic oligonucleotide
ggcccaguccuggaaucgg

SEQ ID NO: 2827223 - RNA, 19 nt, Artificial Sequence
  Description of Artificial Sequence: Synthetic oligonucleotide
gucccgcuguuuguugccc

SEQ ID NO: 2827224 - RNA, 19 nt, Artificial Sequence
  Description of Artificial Sequence: Synthetic oligonucleotide
aaguggcagugcccaugua

SEQ ID NO: 2827225 - RNA, 19 nt, Artificial Sequence
  Description of Artificial Sequence: Synthetic oligonucleotide
ccacuagcuggcccagucc

SEQ ID NO: 2827226 - RNA, 19 nt, Artificial Sequence
  Description of Artificial Sequence: Synthetic oligonucleotide
gccgacagaggccucuguc

SEQ ID NO: 2827227 - RNA, 19 nt, Artificial Sequence
  Description of Artificial Sequence: Synthetic oligonucleotide
cucaccccacuagcuggcc

SEQ ID NO: 2827228 - RNA, 19 nt, Artificial Sequence
  Description of Artificial Sequence: Synthetic oligonucleotide
cagcucugcaggccugguc

SEQ ID NO: 2827229 - RNA, 19 nt, Artificial Sequence
  Description of Artificial Sequence: Synthetic oligonucleotide
ggcuugguguagcuucauc

SEQ ID NO: 2827230 - RNA, 19 nt, Artificial Sequence
  Description of Artificial Sequence: Synthetic oligonucleotide
cucugguucugccgacaga

SEQ ID NO: 2827231 - RNA, 19 nt, Artificial Sequence
  Description of Artificial Sequence: Synthetic oligonucleotide
caagaacuguggucuggcu

SEQ ID NO: 2827232 - RNA, 19 nt, Artificial Sequence
  Description of Artificial Sequence: Synthetic oligonucleotide
gcuaucuuccacacugugu

SEQ ID NO: 2827233 - RNA, 19 nt, Artificial Sequence
  Description of Artificial Sequence: Synthetic oligonucleotide
cgggauagcagccgccgcc

SEQ ID NO: 2827234 - RNA, 19 nt, Artificial Sequence
  Description of Artificial Sequence: Synthetic oligonucleotide
cccacuagcuggcccaguc

SEQ ID NO: 2827235 - RNA, 19 nt, Artificial Sequence
  Description of Artificial Sequence: Synthetic oligonucleotide
cugaaacagcauuuccauu

SEQ ID NO: 2827236 - RNA, 19 nt, Artificial Sequence
  Description of Artificial Sequence: Synthetic oligonucleotide
ccacaagaacuguggucug

SEQ ID NO: 2827237 - RNA, 19 nt, Artificial Sequence
  Description of Artificial Sequence: Synthetic oligonucleotide
cacugaugccaucucuggu

SEQ ID NO: 2827238 - RNA, 19 nt, Artificial Sequence
  Description of Artificial Sequence: Synthetic oligonucleotide
cuaccacauugaucuggaa

SEQ ID NO: 2827239 - RNA, 19 nt, Artificial Sequence
  Description of Artificial Sequence: Synthetic oligonucleotide
gauagcagccgccgccguu

SEQ ID NO: 2827240 - RNA, 19 nt, Artificial Sequence
  Description of Artificial Sequence: Synthetic oligonucleotide
agccgccgccguuuaucca

SEQ ID NO: 2827241 - RNA, 19 nt, Artificial Sequence
  Description of Artificial Sequence: Synthetic oligonucleotide
accccacuagcuggcccag

SEQ ID NO: 2827242 - RNA, 19 nt, Artificial Sequence
  Description of Artificial Sequence: Synthetic oligonucleotide
cucugcaggccugguccac

SEQ ID NO: 2827243 - RNA, 19 nt, Artificial Sequence
  Description of Artificial Sequence: Synthetic oligonucleotide
uucugccgacagaggccuc

SEQ ID NO: 2827244 - RNA, 19 nt, Artificial Sequence
  Description of Artificial Sequence: Synthetic oligonucleotide
caucauggacaggcuggca

SEQ ID NO: 2827245 - RNA, 19 nt, Artificial Sequence
  Description of Artificial Sequence: Synthetic oligonucleotide
gccaaagccaagaagccuu

SEQ ID NO: 2827246 - RNA, 19 nt, Artificial Sequence
  Description of Artificial Sequence: Synthetic oligonucleotide
uagcagccgccgccguuua

SEQ ID NO: 2827247 - RNA, 19 nt, Artificial Sequence
  Description of Artificial Sequence: Synthetic oligonucleotide
ggcagucuaccacauugau

SEQ ID NO: 2827248 - RNA, 19 nt, Artificial Sequence
  Description of Artificial Sequence: Synthetic oligonucleotide
uggcuugguguagcuucau

SEQ ID NO: 2827249 - RNA, 19 nt, Artificial Sequence
  Description of Artificial Sequence: Synthetic oligonucleotide
ggugaagccugggcaguca

SEQ ID NO: 2827250 - RNA, 19 nt, Artificial Sequence
  Description of Artificial Sequence: Synthetic oligonucleotide
cugccgacagaggccucug

SEQ ID NO: 2827251 - RNA, 19 nt, Artificial Sequence
  Description of Artificial Sequence: Synthetic oligonucleotide
cugucagauuggcuccucu

SEQ ID NO: 2827252 - RNA, 19 nt, Artificial Sequence
  Description of Artificial Sequence: Synthetic oligonucleotide
ggccugguccacauagguc

SEQ ID NO: 2827253 - RNA, 19 nt, Artificial Sequence
  Description of Artificial Sequence: Synthetic oligonucleotide
gcugggccaaagccaagaa

SEQ ID NO: 2827254 - RNA, 19 nt, Artificial Sequence
  Description of Artificial Sequence: Synthetic oligonucleotide
ggaaucggaagcagucacu

SEQ ID NO: 2827255 - RNA, 19 nt, Artificial Sequence
  Description of Artificial Sequence: Synthetic oligonucleotide
gcgggauagcagccgccgc

SEQ ID NO: 2827256 - RNA, 19 nt, Artificial Sequence
  Description of Artificial Sequence: Synthetic oligonucleotide
cuaaaguggcagugcccau

SEQ ID NO: 2827257 - RNA, 19 nt, Artificial Sequence
  Description of Artificial Sequence: Synthetic oligonucleotide
gcagccgccgccguuuauc

SEQ ID NO: 2827258 - RNA, 19 nt, Artificial Sequence
  Description of Artificial Sequence: Synthetic oligonucleotide
gguccacauaggucuugaa

SEQ ID NO: 2827259 - RNA, 19 nt, Artificial Sequence
  Description of Artificial Sequence: Synthetic oligonucleotide
gggcagucaagaugaaguu

SEQ ID NO: 2827260 - RNA, 19 nt, Artificial Sequence
  Description of Artificial Sequence: Synthetic oligonucleotide
uggcuccucuguggggauc

SEQ ID NO: 2827261 - RNA, 19 nt, Artificial Sequence
  Description of Artificial Sequence: Synthetic oligonucleotide
gccguuuauccaugguagu

SEQ ID NO: 2827262 - RNA, 19 nt, Artificial Sequence
  Description of Artificial Sequence: Synthetic oligonucleotide
ccgccguuuauccauggua

SEQ ID NO: 2827263 - RNA, 19 nt, Artificial Sequence
  Description of Artificial Sequence: Synthetic oligonucleotide
gcucugcaggccuggucca

SEQ ID NO: 2827264 - RNA, 19 nt, Artificial Sequence
  Description of Artificial Sequence: Synthetic oligonucleotide
ggccaaagccaagaagccu

SEQ ID NO: 2827265 - RNA, 19 nt, Artificial Sequence
  Description of Artificial Sequence: Synthetic oligonucleotide
agcagccgccgccguuuau

SEQ ID NO: 2827266 - RNA, 19 nt, Artificial Sequence
  Description of Artificial Sequence: Synthetic oligonucleotide
cccgcuguuuguugcccuc

SEQ ID NO: 2827267 - RNA, 19 nt, Artificial Sequence
  Description of Artificial Sequence: Synthetic oligonucleotide
cguuuauccaugguagugu

SEQ ID NO: 2827268 - RNA, 19 nt, Artificial Sequence
  Description of Artificial Sequence: Synthetic oligonucleotide
cuccucuguggggauccga

SEQ ID NO: 2827269 - RNA, 19 nt, Artificial Sequence
  Description of Artificial Sequence: Synthetic oligonucleotide
gcccucaaacuucacugau

SEQ ID NO: 2827270 - RNA, 19 nt, Artificial Sequence
  Description of Artificial Sequence: Synthetic oligonucleotide
gccgccgccguuuauccau

SEQ ID NO: 2827271 - RNA, 19 nt, Artificial Sequence
  Description of Artificial Sequence: Synthetic oligonucleotide
gggugaagccugggcaguc

SEQ ID NO: 2827272 - RNA, 19 nt, Artificial Sequence
  Description of Artificial Sequence: Synthetic oligonucleotide
cccauguacaggcgggaua

SEQ ID NO: 2827273 - RNA, 19 nt, Artificial Sequence
  Description of Artificial Sequence: Synthetic oligonucleotide
ggucuggcuugguguagcu

SEQ ID NO: 2827274 - RNA, 19 nt, Artificial Sequence
  Description of Artificial Sequence: Synthetic oligonucleotide
cccaguccuggaaucggaa

SEQ ID NO: 2827275 - RNA, 19 nt, Artificial Sequence
  Description of Artificial Sequence: Synthetic oligonucleotide
gcuccucuguggggauccg

SEQ ID NO: 2827276 - RNA, 19 nt, Artificial Sequence
  Description of Artificial Sequence: Synthetic oligonucleotide
gcuucaucauggacaggcu

SEQ ID NO: 2827277 - RNA, 19 nt, Artificial Sequence
  Description of Artificial Sequence: Synthetic oligonucleotide
gcccaguccuggaaucgga

SEQ ID NO: 2827278 - RNA, 19 nt, Artificial Sequence
  Description of Artificial Sequence: Synthetic oligonucleotide
gguugaagucccgcuguuu

SEQ ID NO: 2827279 - RNA, 19 nt, Artificial Sequence
  Description of Artificial Sequence: Synthetic oligonucleotide
ccgccgccguuuauccaug

SEQ ID NO: 2827280 - RNA, 19 nt, Artificial Sequence
  Description of Artificial Sequence: Synthetic oligonucleotide
cgccgccguuuauccaugg

SEQ ID NO: 2827281 - RNA, 19 nt, Artificial Sequence
  Description of Artificial Sequence: Synthetic oligonucleotide
gucuggcuugguguagcuu

SEQ ID NO: 2827282 - RNA, 19 nt, Artificial Sequence
  Description of Artificial Sequence: Synthetic oligonucleotide
ggauagcagccgccgccgu

SEQ ID NO: 2827283 - RNA, 19 nt, Artificial Sequence
  Description of Artificial Sequence: Synthetic oligonucleotide
ccacacuguguuagugggu

SEQ ID NO: 2827284 - RNA, 19 nt, Artificial Sequence
  Description of Artificial Sequence: Synthetic oligonucleotide
gccgccguuuauccauggu

SEQ ID NO: 2827285 - RNA, 19 nt, Artificial Sequence
  Description of Artificial Sequence: Synthetic oligonucleotide
ccaaagccaagaagccuuu

SEQ ID NO: 2827286 - RNA, 19 nt, Artificial Sequence
  Description of Artificial Sequence: Synthetic oligonucleotide
ccgcuguuuguugcccuca

SEQ ID NO: 2827287 - RNA, 19 nt, Artificial Sequence
  Description of Artificial Sequence: Synthetic oligonucleotide
ggccucugucagauuggcu

SEQ ID NO: 2827288 - RNA, 19 nt, Artificial Sequence
  Description of Artificial Sequence: Synthetic oligonucleotide
ccugggcagucaagaugaa

SEQ ID NO: 2827289 - RNA, 19 nt, Artificial Sequence
  Description of Artificial Sequence: Synthetic oligonucleotide
gcuggcagucuaccacauu

SEQ ID NO: 2827290 - RNA, 19 nt, Artificial Sequence
  Description of Artificial Sequence: Synthetic oligonucleotide
cgcuguuuguugcccucaa

SEQ ID NO: 2827291 - RNA, 19 nt, Artificial Sequence
  Description of Artificial Sequence: Synthetic oligonucleotide
cggaagcagucacuugcua

SEQ ID NO: 2827292 - RNA, 19 nt, Artificial Sequence
  Description of Artificial Sequence: Synthetic oligonucleotide
ggcuggcagucuaccacau

SEQ ID NO: 2827293 - RNA, 19 nt, Artificial Sequence
  Description of Artificial Sequence: Synthetic oligonucleotide
gcccauguacaggcgggau

SEQ ID NO: 2827294 - RNA, 19 nt, Artificial Sequence
  Description of Artificial Sequence: Synthetic oligonucleotide
ccugguccacauaggucuu

SEQ ID NO: 2827295 - RNA, 19 nt, Artificial Sequence
  Description of Artificial Sequence: Synthetic oligonucleotide
cagaggccucugucagauu

SEQ ID NO: 2827296 - RNA, 19 nt, Artificial Sequence
  Description of Artificial Sequence: Synthetic oligonucleotide
gcagcucugcaggccuggu

SEQ ID NO: 2827297 - RNA, 19 nt, Artificial Sequence
  Description of Artificial Sequence: Synthetic oligonucleotide
ccccacuagcuggcccagu

SEQ ID NO: 2827298 - RNA, 19 nt, Artificial Sequence
  Description of Artificial Sequence: Synthetic oligonucleotide
aaaaggaagcgauggcugc

SEQ ID NO: 2827299 - RNA, 19 nt, Artificial Sequence
  Description of Artificial Sequence: Synthetic oligonucleotide
ucaacuuccgccauuucgg

SEQ ID NO: 2827300 - RNA, 19 nt, Artificial Sequence
  Description of Artificial Sequence: Synthetic oligonucleotide
aaugagugcugcuuccgcc

SEQ ID NO: 2827301 - RNA, 19 nt, Artificial Sequence
  Description of Artificial Sequence: Synthetic oligonucleotide
uuuuaucucgaccugguug

SEQ ID NO: 2827302 - RNA, 19 nt, Artificial Sequence
  Description of Artificial Sequence: Synthetic oligonucleotide
ugagaacucgcccagguag

SEQ ID NO: 2827303 - RNA, 19 nt, Artificial Sequence
  Description of Artificial Sequence: Synthetic oligonucleotide
uauacaccagucuuuauug

SEQ ID NO: 2827304 - RNA, 19 nt, Artificial Sequence
  Description of Artificial Sequence: Synthetic oligonucleotide
uuggaaaaggaagcgaugg

SEQ ID NO: 2827305 - RNA, 19 nt, Artificial Sequence
  Description of Artificial Sequence: Synthetic oligonucleotide
uuuaucucgaccugguuga

SEQ ID NO: 2827306 - RNA, 19 nt, Artificial Sequence
  Description of Artificial Sequence: Synthetic oligonucleotide
cuucccauuguacacaccg

SEQ ID NO: 2827307 - RNA, 19 nt, Artificial Sequence
  Description of Artificial Sequence: Synthetic oligonucleotide
aguaaugagugcugcuucc

SEQ ID NO: 2827308 - RNA, 19 nt, Artificial Sequence
  Description of Artificial Sequence: Synthetic oligonucleotide
ugaacuugcggaacguccg

SEQ ID NO: 2827309 - RNA, 19 nt, Artificial Sequence
  Description of Artificial Sequence: Synthetic oligonucleotide
aacucgcccagguaguggc

SEQ ID NO: 2827310 - RNA, 19 nt, Artificial Sequence
  Description of Artificial Sequence: Synthetic oligonucleotide
uuguaggugauugagaacu

SEQ ID NO: 2827311 - RNA, 19 nt, Artificial Sequence
  Description of Artificial Sequence: Synthetic oligonucleotide
acuuccgccauuucggugg

SEQ ID NO: 2827312 - RNA, 19 nt, Artificial Sequence
  Description of Artificial Sequence: Synthetic oligonucleotide
ucuggcaggaugaucaugu

SEQ ID NO: 2827313 - RNA, 19 nt, Artificial Sequence
  Description of Artificial Sequence: Synthetic oligonucleotide
uacacaccgaccaugcugc

SEQ ID NO: 2827314 - RNA, 19 nt, Artificial Sequence
  Description of Artificial Sequence: Synthetic oligonucleotide
aucaucucugguuuuaucu

SEQ ID NO: 2827315 - RNA, 19 nt, Artificial Sequence
  Description of Artificial Sequence: Synthetic oligonucleotide
cuuuauuggccacaguuac

SEQ ID NO: 2827316 - RNA, 19 nt, Artificial Sequence
  Description of Artificial Sequence: Synthetic oligonucleotide
augaucaugucccucaggu

SEQ ID NO: 2827317 - RNA, 19 nt, Artificial Sequence
  Description of Artificial Sequence: Synthetic oligonucleotide
ucgggcuucuccaugggcg

SEQ ID NO: 2827318 - RNA, 19 nt, Artificial Sequence
  Description of Artificial Sequence: Synthetic oligonucleotide
cucaacuuccgccauuucg

SEQ ID NO: 2827319 - RNA, 19 nt, Artificial Sequence
  Description of Artificial Sequence: Synthetic oligonucleotide
uuagccgucgccucugccg

SEQ ID NO: 2827320 - RNA, 19 nt, Artificial Sequence
  Description of Artificial Sequence: Synthetic oligonucleotide
augucuucccauuguacac

SEQ ID NO: 2827321 - RNA, 19 nt, Artificial Sequence
  Description of Artificial Sequence: Synthetic oligonucleotide
uaggugaacuugcggaacg

SEQ ID NO: 2827322 - RNA, 19 nt, Artificial Sequence
  Description of Artificial Sequence: Synthetic oligonucleotide
ugauugagaacucgcccag

SEQ ID NO: 2827323 - RNA, 19 nt, Artificial Sequence
  Description of Artificial Sequence: Synthetic oligonucleotide
uucuuggccuuucucaggc

SEQ ID NO: 2827324 - RNA, 19 nt, Artificial Sequence
  Description of Artificial Sequence: Synthetic oligonucleotide
accugguugaaugucuucc

SEQ ID NO: 2827325 - RNA, 19 nt, Artificial Sequence
  Description of Artificial Sequence: Synthetic oligonucleotide
ucuuuauuggccacaguua

SEQ ID NO: 2827326 - RNA, 19 nt, Artificial Sequence
  Description of Artificial Sequence: Synthetic oligonucleotide
uaggugauugagaacucgc

SEQ ID NO: 2827327 - RNA, 19 nt, Artificial Sequence
  Description of Artificial Sequence: Synthetic oligonucleotide
caucucugguuuuaucucg

SEQ ID NO: 2827328 - RNA, 19 nt, Artificial Sequence
  Description of Artificial Sequence: Synthetic oligonucleotide
uacaccagucuuuauuggc

SEQ ID NO: 2827329 - RNA, 19 nt, Artificial Sequence
  Description of Artificial Sequence: Synthetic oligonucleotide
gaaaaggaagcgauggcug

SEQ ID NO: 2827330 - RNA, 19 nt, Artificial Sequence
  Description of Artificial Sequence: Synthetic oligonucleotide
aucucgaccugguugaaug

SEQ ID NO: 2827331 - RNA, 19 nt, Artificial Sequence
  Description of Artificial Sequence: Synthetic oligonucleotide
uuguacacaccgaccaugc

SEQ ID NO: 2827332 - RNA, 19 nt, Artificial Sequence
  Description of Artificial Sequence: Synthetic oligonucleotide
acaccagucuuuauuggcc

SEQ ID NO: 2827333 - RNA, 19 nt, Artificial Sequence
  Description of Artificial Sequence: Synthetic oligonucleotide
agcugguccagguccacgc

SEQ ID NO: 2827334 - RNA, 19 nt, Artificial Sequence
  Description of Artificial Sequence: Synthetic oligonucleotide
uaggacauguccagcagcu

SEQ ID NO: 2827335 - RNA, 19 nt, Artificial Sequence
  Description of Artificial Sequence: Synthetic oligonucleotide
cuucuucugcucaacuucc

SEQ ID NO: 2827336 - RNA, 19 nt, Artificial Sequence
  Description of Artificial Sequence: Synthetic oligonucleotide
ugcaucagcugcucguagg

SEQ ID NO: 2827337 - RNA, 19 nt, Artificial Sequence
  Description of Artificial Sequence: Synthetic oligonucleotide
auacaccagucuuuauugg

SEQ ID NO: 2827338 - RNA, 19 nt, Artificial Sequence
  Description of Artificial Sequence: Synthetic oligonucleotide
augagugcugcuuccgccg

SEQ ID NO: 2827339 - RNA, 19 nt, Artificial Sequence
  Description of Artificial Sequence: Synthetic oligonucleotide
uggaaaaggaagcgauggc

SEQ ID NO: 2827340 - RNA, 19 nt, Artificial Sequence
  Description of Artificial Sequence: Synthetic oligonucleotide
guacacaccgaccaugcug

SEQ ID NO: 2827341 - RNA, 19 nt, Artificial Sequence
  Description of Artificial Sequence: Synthetic oligonucleotide
gaguggguggcaccgaugc

SEQ ID NO: 2827342 - RNA, 19 nt, Artificial Sequence
  Description of Artificial Sequence: Synthetic oligonucleotide
aggaugaucaugucccuca

SEQ ID NO: 2827343 - RNA, 19 nt, Artificial Sequence
  Description of Artificial Sequence: Synthetic oligonucleotide
cauuucgguggcuucuugg

SEQ ID NO: 2827344 - RNA, 19 nt, Artificial Sequence
  Description of Artificial Sequence: Synthetic oligonucleotide
uuuauuggccacaguuacu

SEQ ID NO: 2827345 - RNA, 19 nt, Artificial Sequence
  Description of Artificial Sequence: Synthetic oligonucleotide
ucuucugcucaacuuccgc

SEQ ID NO: 2827346 - RNA, 19 nt, Artificial Sequence
  Description of Artificial Sequence: Synthetic oligonucleotide
ugguuuuaucucgaccugg

SEQ ID NO: 2827347 - RNA, 19 nt, Artificial Sequence
  Description of Artificial Sequence: Synthetic oligonucleotide
gaugaucaugucccucagg

SEQ ID NO: 2827348 - RNA, 19 nt, Artificial Sequence
  Description of Artificial Sequence: Synthetic oligonucleotide
ucccauuguacacaccgac

SEQ ID NO: 2827349 - RNA, 19 nt, Artificial Sequence
  Description of Artificial Sequence: Synthetic oligonucleotide
uggcaggaugaucaugucc

SEQ ID NO: 2827350 - RNA, 19 nt, Artificial Sequence
  Description of Artificial Sequence: Synthetic oligonucleotide
uucaccggcuuguagguga

SEQ ID NO: 2827351 - RNA, 19 nt, Artificial Sequence
  Description of Artificial Sequence: Synthetic oligonucleotide
cuucuuggaaaaggaagcg

SEQ ID NO: 2827352 - RNA, 19 nt, Artificial Sequence
  Description of Artificial Sequence: Synthetic oligonucleotide
auugagaacucgcccaggu

SEQ ID NO: 2827353 - RNA, 19 nt, Artificial Sequence
  Description of Artificial Sequence: Synthetic oligonucleotide
uucuucugcucaacuuccg

SEQ ID NO: 2827354 - RNA, 19 nt, Artificial Sequence
  Description of Artificial Sequence: Synthetic oligonucleotide
ugaaugucuucccauugua

SEQ ID NO: 2827355 - RNA, 19 nt, Artificial Sequence
  Description of Artificial Sequence: Synthetic oligonucleotide
cuuggaaaaggaagcgaug

SEQ ID NO: 2827356 - RNA, 19 nt, Artificial Sequence
  Description of Artificial Sequence: Synthetic oligonucleotide
aggugauugagaacucgcc

SEQ ID NO: 2827357 - RNA, 19 nt, Artificial Sequence
  Description of Artificial Sequence: Synthetic oligonucleotide
aucucuggcaggaugauca

SEQ ID NO: 2827358 - RNA, 19 nt, Artificial Sequence
  Description of Artificial Sequence: Synthetic oligonucleotide
uuauuggccacaguuacuu

SEQ ID NO: 2827359 - RNA, 19 nt, Artificial Sequence
  Description of Artificial Sequence: Synthetic oligonucleotide
ucguaggacauguccagca

SEQ ID NO: 2827360 - RNA, 19 nt, Artificial Sequence
  Description of Artificial Sequence: Synthetic oligonucleotide
auuucgguggcuucuugga

SEQ ID NO: 2827361 - RNA, 19 nt, Artificial Sequence
  Description of Artificial Sequence: Synthetic oligonucleotide
gugauugagaacucgccca

SEQ ID NO: 2827362 - RNA, 19 nt, Artificial Sequence
  Description of Artificial Sequence: Synthetic oligonucleotide
ggacauguccagcagcugg

SEQ ID NO: 2827363 - RNA, 19 nt, Artificial Sequence
  Description of Artificial Sequence: Synthetic oligonucleotide
ggugauugagaacucgccc

SEQ ID NO: 2827364 - RNA, 19 nt, Artificial Sequence
  Description of Artificial Sequence: Synthetic oligonucleotide
uuucucaggcgcuucagua

SEQ ID NO: 2827365 - RNA, 19 nt, Artificial Sequence
  Description of Artificial Sequence: Synthetic oligonucleotide
auuguacacaccgaccaug

SEQ ID NO: 2827366 - RNA, 19 nt, Artificial Sequence
  Description of Artificial Sequence: Synthetic oligonucleotide
aucagcugcucguaggaca

SEQ ID NO: 2827367 - RNA, 19 nt, Artificial Sequence
  Description of Artificial Sequence: Synthetic oligonucleotide
aaccgggaggagugggugg

SEQ ID NO: 2827368 - RNA, 19 nt, Artificial Sequence
  Description of Artificial Sequence: Synthetic oligonucleotide
gaagcgauggcugcgucug

SEQ ID NO: 2827369 - RNA, 19 nt, Artificial Sequence
  Description of Artificial Sequence: Synthetic oligonucleotide
ggccacaguuacuugaggg

SEQ ID NO: 2827370 - RNA, 19 nt, Artificial Sequence
  Description of Artificial Sequence: Synthetic oligonucleotide
guaggugauugagaacucg

SEQ ID NO: 2827371 - RNA, 19 nt, Artificial Sequence
  Description of Artificial Sequence: Synthetic oligonucleotide
cuuggccuuucucaggcgc

SEQ ID NO: 2827372 - RNA, 19 nt, Artificial Sequence
  Description of Artificial Sequence: Synthetic oligonucleotide
uagccgucgccucugccgg

SEQ ID NO: 2827373 - RNA, 19 nt, Artificial Sequence
  Description of Artificial Sequence: Synthetic oligonucleotide
uucaguaaugagugcugcu

SEQ ID NO: 2827374 - RNA, 19 nt, Artificial Sequence
  Description of Artificial Sequence: Synthetic oligonucleotide
cugcucguaggacaugucc

SEQ ID NO: 2827375 - RNA, 19 nt, Artificial Sequence
  Description of Artificial Sequence: Synthetic oligonucleotide
uccagguacuauacaccag

SEQ ID NO: 2827376 - RNA, 19 nt, Artificial Sequence
  Description of Artificial Sequence: Synthetic oligonucleotide
agguacuauacaccagucu

SEQ ID NO: 2827377 - RNA, 19 nt, Artificial Sequence
  Description of Artificial Sequence: Synthetic oligonucleotide
ucgaccugguugaaugucu

SEQ ID NO: 2827378 - RNA, 19 nt, Artificial Sequence
  Description of Artificial Sequence: Synthetic oligonucleotide
uucgguggcuucuuggaaa

SEQ ID NO: 2827379 - RNA, 19 nt, Artificial Sequence
  Description of Artificial Sequence: Synthetic oligonucleotide
uucuuggaaaaggaagcga

SEQ ID NO: 2827380 - RNA, 19 nt, Artificial Sequence
  Description of Artificial Sequence: Synthetic oligonucleotide
acaccgaccaugcugccca

SEQ ID NO: 2827381 - RNA, 19 nt, Artificial Sequence
  Description of Artificial Sequence: Synthetic oligonucleotide
guaggacauguccagcagc

SEQ ID NO: 2827382 - RNA, 19 nt, Artificial Sequence
  Description of Artificial Sequence: Synthetic oligonucleotide
ugaucaugucccucaggug

SEQ ID NO: 2827383 - RNA, 19 nt, Artificial Sequence
  Description of Artificial Sequence: Synthetic oligonucleotide
guacagcugcaucagcugc

SEQ ID NO: 2827384 - RNA, 19 nt, Artificial Sequence
  Description of Artificial Sequence: Synthetic oligonucleotide
accagucuuuauuggccac

SEQ ID NO: 2827385 - RNA, 19 nt, Artificial Sequence
  Description of Artificial Sequence: Synthetic oligonucleotide
ucaguaaugagugcugcuu

SEQ ID NO: 2827386 - RNA, 19 nt, Artificial Sequence
  Description of Artificial Sequence: Synthetic oligonucleotide
gauggcugcgucugcgcag

SEQ ID NO: 2827387 - RNA, 19 nt, Artificial Sequence
  Description of Artificial Sequence: Synthetic oligonucleotide
gccacaguuacuugagggg

SEQ ID NO: 2827388 - RNA, 19 nt, Artificial Sequence
  Description of Artificial Sequence: Synthetic oligonucleotide
cuuguaggugauugagaac

SEQ ID NO: 2827389 - RNA, 19 nt, Artificial Sequence
  Description of Artificial Sequence: Synthetic oligonucleotide
ucucaggcgcuucaguaau

SEQ ID NO: 2827390 - RNA, 19 nt, Artificial Sequence
  Description of Artificial Sequence: Synthetic oligonucleotide
gaaugucuucccauuguac

SEQ ID NO: 2827391 - RNA, 19 nt, Artificial Sequence
  Description of Artificial Sequence: Synthetic oligonucleotide
gugaacuugcggaacgucc

SEQ ID NO: 2827392 - RNA, 19 nt, Artificial Sequence
  Description of Artificial Sequence: Synthetic oligonucleotide
ucagcugcucguaggacau

SEQ ID NO: 2827393 - RNA, 19 nt, Artificial Sequence
  Description of Artificial Sequence: Synthetic oligonucleotide
aggccggccaugcuucacc

SEQ ID NO: 2827394 - RNA, 19 nt, Artificial Sequence
  Description of Artificial Sequence: Synthetic oligonucleotide
ggcgcuucaguaaugagug

SEQ ID NO: 2827395 - RNA, 19 nt, Artificial Sequence
  Description of Artificial Sequence: Synthetic oligonucleotide
uucucaggcgcuucaguaa

SEQ ID NO: 2827396 - RNA, 19 nt, Artificial Sequence
  Description of Artificial Sequence: Synthetic oligonucleotide
ugucuucccauuguacaca

SEQ ID NO: 2827397 - RNA, 19 nt, Artificial Sequence
  Description of Artificial Sequence: Synthetic oligonucleotide
uacuauacaccagucuuua

SEQ ID NO: 2827398 - RNA, 19 nt, Artificial Sequence
  Description of Artificial Sequence: Synthetic oligonucleotide
uguaggugauugagaacuc

SEQ ID NO: 2827399 - RNA, 19 nt, Artificial Sequence
  Description of Artificial Sequence: Synthetic oligonucleotide
cucaggugggucuucacca

SEQ ID NO: 2827400 - RNA, 19 nt, Artificial Sequence
  Description of Artificial Sequence: Synthetic oligonucleotide
aagcgauggcugcgucugc

SEQ ID NO: 2827401 - RNA, 19 nt, Artificial Sequence
  Description of Artificial Sequence: Synthetic oligonucleotide
aguggguggcaccgaugcc

SEQ ID NO: 2827402 - RNA, 19 nt, Artificial Sequence
  Description of Artificial Sequence: Synthetic oligonucleotide
ugguugaaugucuucccau

SEQ ID NO: 2827403 - RNA, 19 nt, Artificial Sequence
  Description of Artificial Sequence: Synthetic oligonucleotide
ugcccaccaucucuggcag

SEQ ID NO: 2827404 - RNA, 19 nt, Artificial Sequence
  Description of Artificial Sequence: Synthetic oligonucleotide
uaguggccgaucaucucug

SEQ ID NO: 2827405 - RNA, 19 nt, Artificial Sequence
  Description of Artificial Sequence: Synthetic oligonucleotide
uucccauuguacacaccga

SEQ ID NO: 2827406 - RNA, 19 nt, Artificial Sequence
  Description of Artificial Sequence: Synthetic oligonucleotide
uggccacaguuacuugagg

SEQ ID NO: 2827407 - RNA, 19 nt, Artificial Sequence
  Description of Artificial Sequence: Synthetic oligonucleotide
gauugagaacucgcccagg

SEQ ID NO: 2827408 - RNA, 19 nt, Artificial Sequence
  Description of Artificial Sequence: Synthetic oligonucleotide
agcugcaucagcugcucgu

SEQ ID NO: 2827409 - RNA, 19 nt, Artificial Sequence
  Description of Artificial Sequence: Synthetic oligonucleotide
ucaggcgcuucaguaauga

SEQ ID NO: 2827410 - RNA, 19 nt, Artificial Sequence
  Description of Artificial Sequence: Synthetic oligonucleotide
gaucaucucugguuuuauc

SEQ ID NO: 2827411 - RNA, 19 nt, Artificial Sequence
  Description of Artificial Sequence: Synthetic oligonucleotide
uuucgguggcuucuuggaa

SEQ ID NO: 2827412 - RNA, 19 nt, Artificial Sequence
  Description of Artificial Sequence: Synthetic oligonucleotide
gaacuugcggaacguccgc

SEQ ID NO: 2827413 - RNA, 19 nt, Artificial Sequence
  Description of Artificial Sequence: Synthetic oligonucleotide
ucugccgggcgcuguacag

SEQ ID NO: 2827414 - RNA, 19 nt, Artificial Sequence
  Description of Artificial Sequence: Synthetic oligonucleotide
uggguggcaccgaugccag

SEQ ID NO: 2827415 - RNA, 19 nt, Artificial Sequence
  Description of Artificial Sequence: Synthetic oligonucleotide
accaccucgggcuucucca

SEQ ID NO: 2827416 - RNA, 19 nt, Artificial Sequence
  Description of Artificial Sequence: Synthetic oligonucleotide
uauuggccacaguuacuug

SEQ ID NO: 2827417 - RNA, 19 nt, Artificial Sequence
  Description of Artificial Sequence: Synthetic oligonucleotide
ucuuggccuuucucaggcg

SEQ ID NO: 2827418 - RNA, 19 nt, Artificial Sequence
  Description of Artificial Sequence: Synthetic oligonucleotide
uggcaccgaugccaggccg

SEQ ID NO: 2827419 - RNA, 19 nt, Artificial Sequence
  Description of Artificial Sequence: Synthetic oligonucleotide
gaugaaccgggaggagugg

SEQ ID NO: 2827420 - RNA, 19 nt, Artificial Sequence
  Description of Artificial Sequence: Synthetic oligonucleotide
uuuagccgucgccucugcc

SEQ ID NO: 2827421 - RNA, 19 nt, Artificial Sequence
  Description of Artificial Sequence: Synthetic oligonucleotide
ugaaccgggaggagugggu

SEQ ID NO: 2827422 - RNA, 19 nt, Artificial Sequence
  Description of Artificial Sequence: Synthetic oligonucleotide
uggcuucuuggaaaaggaa

SEQ ID NO: 2827423 - RNA, 19 nt, Artificial Sequence
  Description of Artificial Sequence: Synthetic oligonucleotide
ugguccagguccacgccgc

SEQ ID NO: 2827424 - RNA, 19 nt, Artificial Sequence
  Description of Artificial Sequence: Synthetic oligonucleotide
ugagugcugcuuccgccgc

SEQ ID NO: 2827425 - RNA, 19 nt, Artificial Sequence
  Description of Artificial Sequence: Synthetic oligonucleotide
accggcuuguaggugauug

SEQ ID NO: 2827426 - RNA, 19 nt, Artificial Sequence
  Description of Artificial Sequence: Synthetic oligonucleotide
cugguuuuaucucgaccug

SEQ ID NO: 2827427 - RNA, 19 nt, Artificial Sequence
  Description of Artificial Sequence: Synthetic oligonucleotide
aucaugucccucagguggg

SEQ ID NO: 2827428 - RNA, 19 nt, Artificial Sequence
  Description of Artificial Sequence: Synthetic oligonucleotide
uguacacaccgaccaugcu

SEQ ID NO: 2827429 - RNA, 19 nt, Artificial Sequence
  Description of Artificial Sequence: Synthetic oligonucleotide
cugguccagguccacgccg

SEQ ID NO: 2827430 - RNA, 19 nt, Artificial Sequence
  Description of Artificial Sequence: Synthetic oligonucleotide
uuggccuuucucaggcgcu

SEQ ID NO: 2827431 - RNA, 19 nt, Artificial Sequence
  Description of Artificial Sequence: Synthetic oligonucleotide
gaacucgcccagguagugg

SEQ ID NO: 2827432 - RNA, 19 nt, Artificial Sequence
  Description of Artificial Sequence: Synthetic oligonucleotide
uggccgaucaucucugguu

SEQ ID NO: 2827433 - RNA, 19 nt, Artificial Sequence
  Description of Artificial Sequence: Synthetic oligonucleotide
accgaugccaggccggcca

SEQ ID NO: 2827434 - RNA, 19 nt, Artificial Sequence
  Description of Artificial Sequence: Synthetic oligonucleotide
accgggaggaguggguggc

SEQ ID NO: 2827435 - RNA, 19 nt, Artificial Sequence
  Description of Artificial Sequence: Synthetic oligonucleotide
ucaggugggucuucaccac

SEQ ID NO: 2827436 - RNA, 19 nt, Artificial Sequence
  Description of Artificial Sequence: Synthetic oligonucleotide
gguacuauacaccagucuu

SEQ ID NO: 2827437 - RNA, 19 nt, Artificial Sequence
  Description of Artificial Sequence: Synthetic oligonucleotide
aaggaagcgauggcugcgu

SEQ ID NO: 2827438 - RNA, 19 nt, Artificial Sequence
  Description of Artificial Sequence: Synthetic oligonucleotide
aggcgcuucaguaaugagu

SEQ ID NO: 2827439 - RNA, 19 nt, Artificial Sequence
  Description of Artificial Sequence: Synthetic oligonucleotide
ucucgaccugguugaaugu

SEQ ID NO: 2827440 - RNA, 19 nt, Artificial Sequence
  Description of Artificial Sequence: Synthetic oligonucleotide
uugagaacucgcccaggua

SEQ ID NO: 2827441 - RNA, 19 nt, Artificial Sequence
  Description of Artificial Sequence: Synthetic oligonucleotide
ucgguggcuucuuggaaaa

SEQ ID NO: 2827442 - RNA, 19 nt, Artificial Sequence
  Description of Artificial Sequence: Synthetic oligonucleotide
augucccucaggugggucu

SEQ ID NO: 2827443 - RNA, 19 nt, Artificial Sequence
  Description of Artificial Sequence: Synthetic oligonucleotide
augaaccgggaggaguggg

SEQ ID NO: 2827444 - RNA, 19 nt, Artificial Sequence
  Description of Artificial Sequence: Synthetic oligonucleotide
aguggccgaucaucucugg

SEQ ID NO: 2827445 - RNA, 19 nt, Artificial Sequence
  Description of Artificial Sequence: Synthetic oligonucleotide
cagucuuuauuggccacag

SEQ ID NO: 2827446 - RNA, 19 nt, Artificial Sequence
  Description of Artificial Sequence: Synthetic oligonucleotide
ucucugguuuuaucucgac

SEQ ID NO: 2827447 - RNA, 19 nt, Artificial Sequence
  Description of Artificial Sequence: Synthetic oligonucleotide
uccacgccgcgguagguga

SEQ ID NO: 2827448 - RNA, 19 nt, Artificial Sequence
  Description of Artificial Sequence: Synthetic oligonucleotide
guaguggccgaucaucucu

SEQ ID NO: 2827449 - RNA, 19 nt, Artificial Sequence
  Description of Artificial Sequence: Synthetic oligonucleotide
cagguacuauacaccaguc

SEQ ID NO: 2827450 - RNA, 19 nt, Artificial Sequence
  Description of Artificial Sequence: Synthetic oligonucleotide
uugcggaacguccgcuucu

SEQ ID NO: 2827451 - RNA, 19 nt, Artificial Sequence
  Description of Artificial Sequence: Synthetic oligonucleotide
ucugcucaacuuccgccau

SEQ ID NO: 2827452 - RNA, 19 nt, Artificial Sequence
  Description of Artificial Sequence: Synthetic oligonucleotide
agcgauggcugcgucugcg

SEQ ID NO: 2827453 - RNA, 19 nt, Artificial Sequence
  Description of Artificial Sequence: Synthetic oligonucleotide
gaaccgggaggagugggug

SEQ ID NO: 2827454 - RNA, 19 nt, Artificial Sequence
  Description of Artificial Sequence: Synthetic oligonucleotide
aacuugcggaacguccgcu

SEQ ID NO: 2827455 - RNA, 19 nt, Artificial Sequence
  Description of Artificial Sequence: Synthetic oligonucleotide
agguccacgccgcgguagg

SEQ ID NO: 2827456 - RNA, 19 nt, Artificial Sequence
  Description of Artificial Sequence: Synthetic oligonucleotide
gcucguaggacauguccag

SEQ ID NO: 2827457 - RNA, 19 nt, Artificial Sequence
  Description of Artificial Sequence: Synthetic oligonucleotide
ggaugaaccgggaggagug

SEQ ID NO: 2827458 - RNA, 19 nt, Artificial Sequence
  Description of Artificial Sequence: Synthetic oligonucleotide
cagguaguggccgaucauc

SEQ ID NO: 2827459 - RNA, 19 nt, Artificial Sequence
  Description of Artificial Sequence: Synthetic oligonucleotide
cuauacaccagucuuuauu

SEQ ID NO: 2827460 - RNA, 19 nt, Artificial Sequence
  Description of Artificial Sequence: Synthetic oligonucleotide
acacaccgaccaugcugcc

SEQ ID NO: 2827461 - RNA, 19 nt, Artificial Sequence
  Description of Artificial Sequence: Synthetic oligonucleotide
aggaagcgauggcugcguc

SEQ ID NO: 2827462 - RNA, 19 nt, Artificial Sequence
  Description of Artificial Sequence: Synthetic oligonucleotide
ggaggaguggguggcaccg

SEQ ID NO: 2827463 - RNA, 19 nt, Artificial Sequence
  Description of Artificial Sequence: Synthetic oligonucleotide
cuugcggaacguccgcuuc

SEQ ID NO: 2827464 - RNA, 19 nt, Artificial Sequence
  Description of Artificial Sequence: Synthetic oligonucleotide
guaggugaacuugcggaac

SEQ ID NO: 2827465 - RNA, 19 nt, Artificial Sequence
  Description of Artificial Sequence: Synthetic oligonucleotide
acuauacaccagucuuuau

SEQ ID NO: 2827466 - RNA, 19 nt, Artificial Sequence
  Description of Artificial Sequence: Synthetic oligonucleotide
gaacguccgcuucuucuuc

SEQ ID NO: 2827467 - RNA, 19 nt, Artificial Sequence
  Description of Artificial Sequence: Synthetic oligonucleotide
ccauuguacacaccgacca

SEQ ID NO: 2827468 - RNA, 19 nt, Artificial Sequence
  Description of Artificial Sequence: Synthetic oligonucleotide
cugcuuccgccgcaggccg

SEQ ID NO: 2827469 - RNA, 19 nt, Artificial Sequence
  Description of Artificial Sequence: Synthetic oligonucleotide
ccugguugaaugucuuccc

SEQ ID NO: 2827470 - RNA, 19 nt, Artificial Sequence
  Description of Artificial Sequence: Synthetic oligonucleotide
ugccgggcgcuguacagcu

SEQ ID NO: 2827471 - RNA, 19 nt, Artificial Sequence
  Description of Artificial Sequence: Synthetic oligonucleotide
ugcugcccaccaucucugg

SEQ ID NO: 2827472 - RNA, 19 nt, Artificial Sequence
  Description of Artificial Sequence: Synthetic oligonucleotide
cugcccaccaucucuggca

SEQ ID NO: 2827473 - RNA, 19 nt, Artificial Sequence
  Description of Artificial Sequence: Synthetic oligonucleotide
cccauuguacacaccgacc

SEQ ID NO: 2827474 - RNA, 19 nt, Artificial Sequence
  Description of Artificial Sequence: Synthetic oligonucleotide
agcugcucguaggacaugu

SEQ ID NO: 2827475 - RNA, 19 nt, Artificial Sequence
  Description of Artificial Sequence: Synthetic oligonucleotide
caccagucuuuauuggcca

SEQ ID NO: 2827476 - RNA, 19 nt, Artificial Sequence
  Description of Artificial Sequence: Synthetic oligonucleotide
agguaguggccgaucaucu

SEQ ID NO: 2827477 - RNA, 19 nt, Artificial Sequence
  Description of Artificial Sequence: Synthetic oligonucleotide
ugcucaacuuccgccauuu

SEQ ID NO: 2827478 - RNA, 19 nt, Artificial Sequence
  Description of Artificial Sequence: Synthetic oligonucleotide
ggaugaucaugucccucag

SEQ ID NO: 2827479 - RNA, 19 nt, Artificial Sequence
  Description of Artificial Sequence: Synthetic oligonucleotide
caggugggucuucaccacc

SEQ ID NO: 2827480 - RNA, 19 nt, Artificial Sequence
  Description of Artificial Sequence: Synthetic oligonucleotide
guggguggcaccgaugcca

SEQ ID NO: 2827481 - RNA, 19 nt, Artificial Sequence
  Description of Artificial Sequence: Synthetic oligonucleotide
cucguaggacauguccagc

SEQ ID NO: 2827482 - RNA, 19 nt, Artificial Sequence
  Description of Artificial Sequence: Synthetic oligonucleotide
gguggcaccgaugccaggc

SEQ ID NO: 2827483 - RNA, 19 nt, Artificial Sequence
  Description of Artificial Sequence: Synthetic oligonucleotide
cucgcccagguaguggccg

SEQ ID NO: 2827484 - RNA, 19 nt, Artificial Sequence
  Description of Artificial Sequence: Synthetic oligonucleotide
agucuuuauuggccacagu

SEQ ID NO: 2827485 - RNA, 19 nt, Artificial Sequence
  Description of Artificial Sequence: Synthetic oligonucleotide
gguaggugaacuugcggaa

SEQ ID NO: 2827486 - RNA, 19 nt, Artificial Sequence
  Description of Artificial Sequence: Synthetic oligonucleotide
ggcggcgccuccuucuugg

SEQ ID NO: 2827487 - RNA, 19 nt, Artificial Sequence
  Description of Artificial Sequence: Synthetic oligonucleotide
agaacucgcccagguagug

SEQ ID NO: 2827488 - RNA, 19 nt, Artificial Sequence
  Description of Artificial Sequence: Synthetic oligonucleotide
ggaaaaggaagcgauggcu

SEQ ID NO: 2827489 - RNA, 19 nt, Artificial Sequence
  Description of Artificial Sequence: Synthetic oligonucleotide
caugcugcccaccaucucu

SEQ ID NO: 2827490 - RNA, 19 nt, Artificial Sequence
  Description of Artificial Sequence: Synthetic oligonucleotide
gggucuucaccaccucggg

SEQ ID NO: 2827491 - RNA, 19 nt, Artificial Sequence
  Description of Artificial Sequence: Synthetic oligonucleotide
gcgguaggugaacuugcgg

SEQ ID NO: 2827492 - RNA, 19 nt, Artificial Sequence
  Description of Artificial Sequence: Synthetic oligonucleotide
ugccaggccggccaugcuu

SEQ ID NO: 2827493 - RNA, 19 nt, Artificial Sequence
  Description of Artificial Sequence: Synthetic oligonucleotide
caggcgcuucaguaaugag

SEQ ID NO: 2827494 - RNA, 19 nt, Artificial Sequence
  Description of Artificial Sequence: Synthetic oligonucleotide
cugcaucagcugcucguag

SEQ ID NO: 2827495 - RNA, 19 nt, Artificial Sequence
  Description of Artificial Sequence: Synthetic oligonucleotide
gcuucaguaaugagugcug

SEQ ID NO: 2827496 - RNA, 19 nt, Artificial Sequence
  Description of Artificial Sequence: Synthetic oligonucleotide
aucucugguuuuaucucga

SEQ ID NO: 2827497 - RNA, 19 nt, Artificial Sequence
  Description of Artificial Sequence: Synthetic oligonucleotide
augggcggcgccuccuucu

SEQ ID NO: 2827498 - RNA, 19 nt, Artificial Sequence
  Description of Artificial Sequence: Synthetic oligonucleotide
ccucaggugggucuucacc

SEQ ID NO: 2827499 - RNA, 19 nt, Artificial Sequence
  Description of Artificial Sequence: Synthetic oligonucleotide
acuugcggaacguccgcuu

SEQ ID NO: 2827500 - RNA, 19 nt, Artificial Sequence
  Description of Artificial Sequence: Synthetic oligonucleotide
cucgaccugguugaauguc

SEQ ID NO: 2827501 - RNA, 19 nt, Artificial Sequence
  Description of Artificial Sequence: Synthetic oligonucleotide
cucaggcgcuucaguaaug

SEQ ID NO: 2827502 - RNA, 19 nt, Artificial Sequence
  Description of Artificial Sequence: Synthetic oligonucleotide
ggucuucaccaccucgggc

SEQ ID NO: 2827503 - RNA, 19 nt, Artificial Sequence
  Description of Artificial Sequence: Synthetic oligonucleotide
ucucuggcaggaugaucau

SEQ ID NO: 2827504 - RNA, 19 nt, Artificial Sequence
  Description of Artificial Sequence: Synthetic oligonucleotide
acguccgcuucuucuucug

SEQ ID NO: 2827505 - RNA, 19 nt, Artificial Sequence
  Description of Artificial Sequence: Synthetic oligonucleotide
guuuagccgucgccucugc

SEQ ID NO: 2827506 - RNA, 19 nt, Artificial Sequence
  Description of Artificial Sequence: Synthetic oligonucleotide
caccaccucgggcuucucc

SEQ ID NO: 2827507 - RNA, 19 nt, Artificial Sequence
  Description of Artificial Sequence: Synthetic oligonucleotide
guggcaccgaugccaggcc

SEQ ID NO: 2827508 - RNA, 19 nt, Artificial Sequence
  Description of Artificial Sequence: Synthetic oligonucleotide
aggaguggguggcaccgau

SEQ ID NO: 2827509 - RNA, 19 nt, Artificial Sequence
  Description of Artificial Sequence: Synthetic oligonucleotide
cuuccgccauuucgguggc

SEQ ID NO: 2827510 - RNA, 19 nt, Artificial Sequence
  Description of Artificial Sequence: Synthetic oligonucleotide
gcaggccgcgguuuagccg

SEQ ID NO: 2827511 - RNA, 19 nt, Artificial Sequence
  Description of Artificial Sequence: Synthetic oligonucleotide
uccgccauuucgguggcuu

SEQ ID NO: 2827512 - RNA, 19 nt, Artificial Sequence
  Description of Artificial Sequence: Synthetic oligonucleotide
cacaccgaccaugcugccc

SEQ ID NO: 2827513 - RNA, 19 nt, Artificial Sequence
  Description of Artificial Sequence: Synthetic oligonucleotide
uaucucgaccugguugaau

SEQ ID NO: 2827514 - RNA, 19 nt, Artificial Sequence
  Description of Artificial Sequence: Synthetic oligonucleotide
ucaccggcuuguaggugau

SEQ ID NO: 2827515 - RNA, 19 nt, Artificial Sequence
  Description of Artificial Sequence: Synthetic oligonucleotide
gcaucagcugcucguagga

SEQ ID NO: 2827516 - RNA, 19 nt, Artificial Sequence
  Description of Artificial Sequence: Synthetic oligonucleotide
accgaccaugcugcccacc

SEQ ID NO: 2827517 - RNA, 19 nt, Artificial Sequence
  Description of Artificial Sequence: Synthetic oligonucleotide
acucgcccagguaguggcc

SEQ ID NO: 2827518 - RNA, 19 nt, Artificial Sequence
  Description of Artificial Sequence: Synthetic oligonucleotide
cuggcaggaugaucauguc

SEQ ID NO: 2827519 - RNA, 19 nt, Artificial Sequence
  Description of Artificial Sequence: Synthetic oligonucleotide
ccggccaugcuucaccggc

SEQ ID NO: 2827520 - RNA, 19 nt, Artificial Sequence
  Description of Artificial Sequence: Synthetic oligonucleotide
caucagcugcucguaggac

SEQ ID NO: 2827521 - RNA, 19 nt, Artificial Sequence
  Description of Artificial Sequence: Synthetic oligonucleotide
aggugaacuugcggaacgu

SEQ ID NO: 2827522 - RNA, 19 nt, Artificial Sequence
  Description of Artificial Sequence: Synthetic oligonucleotide
caggaugaucaugucccuc

SEQ ID NO: 2827523 - RNA, 19 nt, Artificial Sequence
  Description of Artificial Sequence: Synthetic oligonucleotide
cagcugcaucagcugcucg

SEQ ID NO: 2827524 - RNA, 19 nt, Artificial Sequence
  Description of Artificial Sequence: Synthetic oligonucleotide
gacauguccagcagcuggu

SEQ ID NO: 2827525 - RNA, 19 nt, Artificial Sequence
  Description of Artificial Sequence: Synthetic oligonucleotide
auggcugcgucugcgcagu

SEQ ID NO: 2827526 - RNA, 19 nt, Artificial Sequence
  Description of Artificial Sequence: Synthetic oligonucleotide
ggcgcuguacagcugcauc

SEQ ID NO: 2827527 - RNA, 19 nt, Artificial Sequence
  Description of Artificial Sequence: Synthetic oligonucleotide
cucuggcaggaugaucaug

SEQ ID NO: 2827528 - RNA, 19 nt, Artificial Sequence
  Description of Artificial Sequence: Synthetic oligonucleotide
gcgcuguacagcugcauca

SEQ ID NO: 2827529 - RNA, 19 nt, Artificial Sequence
  Description of Artificial Sequence: Synthetic oligonucleotide
gcuguacagcugcaucagc

SEQ ID NO: 2827530 - RNA, 19 nt, Artificial Sequence
  Description of Artificial Sequence: Synthetic oligonucleotide
gcugcuuccgccgcaggcc

SEQ ID NO: 2827531 - RNA, 19 nt, Artificial Sequence
  Description of Artificial Sequence: Synthetic oligonucleotide
aggacauguccagcagcug

SEQ ID NO: 2827532 - RNA, 19 nt, Artificial Sequence
  Description of Artificial Sequence: Synthetic oligonucleotide
uuaucucgaccugguugaa

SEQ ID NO: 2827533 - RNA, 19 nt, Artificial Sequence
  Description of Artificial Sequence: Synthetic oligonucleotide
ggccggccaugcuucaccg

SEQ ID NO: 2827534 - RNA, 19 nt, Artificial Sequence
  Description of Artificial Sequence: Synthetic oligonucleotide
caucucuggcaggaugauc

SEQ ID NO: 2827535 - RNA, 19 nt, Artificial Sequence
  Description of Artificial Sequence: Synthetic oligonucleotide
gguaguggccgaucaucuc

SEQ ID NO: 2827536 - RNA, 19 nt, Artificial Sequence
  Description of Artificial Sequence: Synthetic oligonucleotide
caggccgcgguuuagccgu

SEQ ID NO: 2827537 - RNA, 19 nt, Artificial Sequence
  Description of Artificial Sequence: Synthetic oligonucleotide
ggcaccgaugccaggccgg

SEQ ID NO: 2827538 - RNA, 19 nt, Artificial Sequence
  Description of Artificial Sequence: Synthetic oligonucleotide
guccgcuucuucuucugcu

SEQ ID NO: 2827539 - RNA, 19 nt, Artificial Sequence
  Description of Artificial Sequence: Synthetic oligonucleotide
gguuuagccgucgccucug

SEQ ID NO: 2827540 - RNA, 19 nt, Artificial Sequence
  Description of Artificial Sequence: Synthetic oligonucleotide
cagguccacgccgcgguag

SEQ ID NO: 2827541 - RNA, 19 nt, Artificial Sequence
  Description of Artificial Sequence: Synthetic oligonucleotide
ucgcccagguaguggccga

SEQ ID NO: 2827542 - RNA, 19 nt, Artificial Sequence
  Description of Artificial Sequence: Synthetic oligonucleotide
cgguaggugaacuugcgga

SEQ ID NO: 2827543 - RNA, 19 nt, Artificial Sequence
  Description of Artificial Sequence: Synthetic oligonucleotide
ggcuucuccaugggcggcg

SEQ ID NO: 2827544 - RNA, 19 nt, Artificial Sequence
  Description of Artificial Sequence: Synthetic oligonucleotide
ugcuuccgccgcaggccgc

SEQ ID NO: 2827545 - RNA, 19 nt, Artificial Sequence
  Description of Artificial Sequence: Synthetic oligonucleotide
cuucaccggcuuguaggug

SEQ ID NO: 2827546 - RNA, 19 nt, Artificial Sequence
  Description of Artificial Sequence: Synthetic oligonucleotide
cuucuccaugggcggcgcc

SEQ ID NO: 2827547 - RNA, 19 nt, Artificial Sequence
  Description of Artificial Sequence: Synthetic oligonucleotide
gagaacucgcccagguagu

SEQ ID NO: 2827548 - RNA, 19 nt, Artificial Sequence
  Description of Artificial Sequence: Synthetic oligonucleotide
cugccgggcgcuguacagc

SEQ ID NO: 2827549 - RNA, 19 nt, Artificial Sequence
  Description of Artificial Sequence: Synthetic oligonucleotide
cguaggacauguccagcag

SEQ ID NO: 2827550 - RNA, 19 nt, Artificial Sequence
  Description of Artificial Sequence: Synthetic oligonucleotide
ccagguacuauacaccagu

SEQ ID NO: 2827551 - RNA, 19 nt, Artificial Sequence
  Description of Artificial Sequence: Synthetic oligonucleotide
guacuauacaccagucuuu

SEQ ID NO: 2827552 - RNA, 19 nt, Artificial Sequence
  Description of Artificial Sequence: Synthetic oligonucleotide
gggaggaguggguggcacc

SEQ ID NO: 2827553 - RNA, 19 nt, Artificial Sequence
  Description of Artificial Sequence: Synthetic oligonucleotide
cuuucucaggcgcuucagu

SEQ ID NO: 2827554 - RNA, 19 nt, Artificial Sequence
  Description of Artificial Sequence: Synthetic oligonucleotide
gccgcgguaggugaacuug

SEQ ID NO: 2827555 - RNA, 19 nt, Artificial Sequence
  Description of Artificial Sequence: Synthetic oligonucleotide
gcugcccaccaucucuggc

SEQ ID NO: 2827556 - RNA, 19 nt, Artificial Sequence
  Description of Artificial Sequence: Synthetic oligonucleotide
gguugaaugucuucccauu

SEQ ID NO: 2827557 - RNA, 19 nt, Artificial Sequence
  Description of Artificial Sequence: Synthetic oligonucleotide
ccgggcgcuguacagcugc

SEQ ID NO: 2827558 - RNA, 19 nt, Artificial Sequence
  Description of Artificial Sequence: Synthetic oligonucleotide
ugucccucaggugggucuu

SEQ ID NO: 2827559 - RNA, 19 nt, Artificial Sequence
  Description of Artificial Sequence: Synthetic oligonucleotide
ggugaacuugcggaacguc

SEQ ID NO: 2827560 - RNA, 19 nt, Artificial Sequence
  Description of Artificial Sequence: Synthetic oligonucleotide
agcagcugguccaggucca

SEQ ID NO: 2827561 - RNA, 19 nt, Artificial Sequence
  Description of Artificial Sequence: Synthetic oligonucleotide
guccacgccgcgguaggug

SEQ ID NO: 2827562 - RNA, 19 nt, Artificial Sequence
  Description of Artificial Sequence: Synthetic oligonucleotide
gguuuuaucucgaccuggu

SEQ ID NO: 2827563 - RNA, 19 nt, Artificial Sequence
  Description of Artificial Sequence: Synthetic oligonucleotide
uccaugggcggcgccuccu

SEQ ID NO: 2827564 - RNA, 19 nt, Artificial Sequence
  Description of Artificial Sequence: Synthetic oligonucleotide
ccgcgguaggugaacuugc

SEQ ID NO: 2827565 - RNA, 19 nt, Artificial Sequence
  Description of Artificial Sequence: Synthetic oligonucleotide
agccgucgccucugccggg

SEQ ID NO: 2827566 - RNA, 19 nt, Artificial Sequence
  Description of Artificial Sequence: Synthetic oligonucleotide
gcugguccagguccacgcc

SEQ ID NO: 2827567 - RNA, 19 nt, Artificial Sequence
  Description of Artificial Sequence: Synthetic oligonucleotide
ugcggaacguccgcuucuu

SEQ ID NO: 2827568 - RNA, 19 nt, Artificial Sequence
  Description of Artificial Sequence: Synthetic oligonucleotide
gguccagguccacgccgcg

SEQ ID NO: 2827569 - RNA, 19 nt, Artificial Sequence
  Description of Artificial Sequence: Synthetic oligonucleotide
guuuuaucucgaccugguu

SEQ ID NO: 2827570 - RNA, 19 nt, Artificial Sequence
  Description of Artificial Sequence: Synthetic oligonucleotide
gugcugcuuccgccgcagg

SEQ ID NO: 2827571 - RNA, 19 nt, Artificial Sequence
  Description of Artificial Sequence: Synthetic oligonucleotide
cuccaugggcggcgccucc

SEQ ID NO: 2827572 - RNA, 19 nt, Artificial Sequence
  Description of Artificial Sequence: Synthetic oligonucleotide
ggcgccuccuucuuggccu

SEQ ID NO: 2827573 - RNA, 19 nt, Artificial Sequence
  Description of Artificial Sequence: Synthetic oligonucleotide
caugggcggcgccuccuuc

SEQ ID NO: 2827574 - RNA, 19 nt, Artificial Sequence
  Description of Artificial Sequence: Synthetic oligonucleotide
cauuguacacaccgaccau

SEQ ID NO: 2827575 - RNA, 19 nt, Artificial Sequence
  Description of Artificial Sequence: Synthetic oligonucleotide
uccgccgcaggccgcgguu

SEQ ID NO: 2827576 - RNA, 19 nt, Artificial Sequence
  Description of Artificial Sequence: Synthetic oligonucleotide
caacuuccgccauuucggu

SEQ ID NO: 2827577 - RNA, 19 nt, Artificial Sequence
  Description of Artificial Sequence: Synthetic oligonucleotide
uggccuuucucaggcgcuu

SEQ ID NO: 2827578 - RNA, 19 nt, Artificial Sequence
  Description of Artificial Sequence: Synthetic oligonucleotide
gcgauggcugcgucugcgc

SEQ ID NO: 2827579 - RNA, 19 nt, Artificial Sequence
  Description of Artificial Sequence: Synthetic oligonucleotide
cgcgguaggugaacuugcg

SEQ ID NO: 2827580 - RNA, 19 nt, Artificial Sequence
  Description of Artificial Sequence: Synthetic oligonucleotide
ugggcggcgccuccuucuu

SEQ ID NO: 2827581 - RNA, 19 nt, Artificial Sequence
  Description of Artificial Sequence: Synthetic oligonucleotide
gcuucaccggcuuguaggu

SEQ ID NO: 2827582 - RNA, 19 nt, Artificial Sequence
  Description of Artificial Sequence: Synthetic oligonucleotide
ggaagcgauggcugcgucu

SEQ ID NO: 2827583 - RNA, 19 nt, Artificial Sequence
  Description of Artificial Sequence: Synthetic oligonucleotide
ggaacguccgcuucuucuu

SEQ ID NO: 2827584 - RNA, 19 nt, Artificial Sequence
  Description of Artificial Sequence: Synthetic oligonucleotide
gcgguuuagccgucgccuc

SEQ ID NO: 2827585 - RNA, 19 nt, Artificial Sequence
  Description of Artificial Sequence: Synthetic oligonucleotide
gcugcgucugcgcaguuau

SEQ ID NO: 2827586 - RNA, 19 nt, Artificial Sequence
  Description of Artificial Sequence: Synthetic oligonucleotide
gcuuccgccgcaggccgcg

SEQ ID NO: 2827587 - RNA, 19 nt, Artificial Sequence
  Description of Artificial Sequence: Synthetic oligonucleotide
cugcgucugcgcaguuauc

SEQ ID NO: 2827588 - RNA, 19 nt, Artificial Sequence
  Description of Artificial Sequence: Synthetic oligonucleotide
cacgccgcgguaggugaac

SEQ ID NO: 2827589 - RNA, 19 nt, Artificial Sequence
  Description of Artificial Sequence: Synthetic oligonucleotide
guggccgaucaucucuggu

SEQ ID NO: 2827590 - RNA, 19 nt, Artificial Sequence
  Description of Artificial Sequence: Synthetic oligonucleotide
gcgcuucaguaaugagugc

SEQ ID NO: 2827591 - RNA, 19 nt, Artificial Sequence
  Description of Artificial Sequence: Synthetic oligonucleotide
augccaggccggccaugcu

SEQ ID NO: 2827592 - RNA, 19 nt, Artificial Sequence
  Description of Artificial Sequence: Synthetic oligonucleotide
cucugccgggcgcuguaca

SEQ ID NO: 2827593 - RNA, 19 nt, Artificial Sequence
  Description of Artificial Sequence: Synthetic oligonucleotide
ggaguggguggcaccgaug

SEQ ID NO: 2827594 - RNA, 19 nt, Artificial Sequence
  Description of Artificial Sequence: Synthetic oligonucleotide
ggugggucuucaccaccuc

SEQ ID NO: 2827595 - RNA, 19 nt, Artificial Sequence
  Description of Artificial Sequence: Synthetic oligonucleotide
gccaugcuucaccggcuug

SEQ ID NO: 2827596 - RNA, 19 nt, Artificial Sequence
  Description of Artificial Sequence: Synthetic oligonucleotide
gaggaguggguggcaccga

SEQ ID NO: 2827597 - RNA, 19 nt, Artificial Sequence
  Description of Artificial Sequence: Synthetic oligonucleotide
ccauuucgguggcuucuug

SEQ ID NO: 2827598 - RNA, 19 nt, Artificial Sequence
  Description of Artificial Sequence: Synthetic oligonucleotide
ggggaugaaccgggaggag

SEQ ID NO: 2827599 - RNA, 19 nt, Artificial Sequence
  Description of Artificial Sequence: Synthetic oligonucleotide
gccggccaugcuucaccgg

SEQ ID NO: 2827600 - RNA, 19 nt, Artificial Sequence
  Description of Artificial Sequence: Synthetic oligonucleotide
gggaugaaccgggaggagu

SEQ ID NO: 2827601 - RNA, 19 nt, Artificial Sequence
  Description of Artificial Sequence: Synthetic oligonucleotide
cccagguaguggccgauca

SEQ ID NO: 2827602 - RNA, 19 nt, Artificial Sequence
  Description of Artificial Sequence: Synthetic oligonucleotide
cccaccaucucuggcagga

SEQ ID NO: 2827603 - RNA, 19 nt, Artificial Sequence
  Description of Artificial Sequence: Synthetic oligonucleotide
ggccgaucaucucugguuu

SEQ ID NO: 2827604 - RNA, 19 nt, Artificial Sequence
  Description of Artificial Sequence: Synthetic oligonucleotide
ccgaccaugcugcccacca

SEQ ID NO: 2827605 - RNA, 19 nt, Artificial Sequence
  Description of Artificial Sequence: Synthetic oligonucleotide
caugcuucaccggcuugua

SEQ ID NO: 2827606 - RNA, 19 nt, Artificial Sequence
  Description of Artificial Sequence: Synthetic oligonucleotide
cgcuguacagcugcaucag

SEQ ID NO: 2827607 - RNA, 19 nt, Artificial Sequence
  Description of Artificial Sequence: Synthetic oligonucleotide
acgccgcgguaggugaacu

SEQ ID NO: 2827608 - RNA, 19 nt, Artificial Sequence
  Description of Artificial Sequence: Synthetic oligonucleotide
caccgaugccaggccggcc

SEQ ID NO: 2827609 - RNA, 19 nt, Artificial Sequence
  Description of Artificial Sequence: Synthetic oligonucleotide
caccgaccaugcugcccac

SEQ ID NO: 2827610 - RNA, 19 nt, Artificial Sequence
  Description of Artificial Sequence: Synthetic oligonucleotide
gccgcgguuuagccgucgc

SEQ ID NO: 2827611 - RNA, 19 nt, Artificial Sequence
  Description of Artificial Sequence: Synthetic oligonucleotide
gcccaccaucucuggcagg

SEQ ID NO: 2827612 - RNA, 19 nt, Artificial Sequence
  Description of Artificial Sequence: Synthetic oligonucleotide
ccgcgguuuagccgucgcc

SEQ ID NO: 2827613 - RNA, 19 nt, Artificial Sequence
  Description of Artificial Sequence: Synthetic oligonucleotide
cgcaggccgcgguuuagcc

SEQ ID NO: 2827614 - RNA, 19 nt, Artificial Sequence
  Description of Artificial Sequence: Synthetic oligonucleotide
cguccgcuucuucuucugc

SEQ ID NO: 2827615 - RNA, 19 nt, Artificial Sequence
  Description of Artificial Sequence: Synthetic oligonucleotide
ggguggcaccgaugccagg

SEQ ID NO: 2827616 - RNA, 19 nt, Artificial Sequence
  Description of Artificial Sequence: Synthetic oligonucleotide
gccaggccggccaugcuuc

SEQ ID NO: 2827617 - RNA, 19 nt, Artificial Sequence
  Description of Artificial Sequence: Synthetic oligonucleotide
caggccggccaugcuucac

SEQ ID NO: 2827618 - RNA, 19 nt, Artificial Sequence
  Description of Artificial Sequence: Synthetic oligonucleotide
gcugcaucagcugcucgua

SEQ ID NO: 2827619 - RNA, 19 nt, Artificial Sequence
  Description of Artificial Sequence: Synthetic oligonucleotide
gcuucuccaugggcggcgc

SEQ ID NO: 2827620 - RNA, 19 nt, Artificial Sequence
  Description of Artificial Sequence: Synthetic oligonucleotide
gcaccgaugccaggccggc

SEQ ID NO: 2827621 - RNA, 19 nt, Artificial Sequence
  Description of Artificial Sequence: Synthetic oligonucleotide
gcaggaugaucaugucccu

SEQ ID NO: 2827622 - RNA, 19 nt, Artificial Sequence
  Description of Artificial Sequence: Synthetic oligonucleotide
gcucaacuuccgccauuuc

SEQ ID NO: 2827623 - RNA, 19 nt, Artificial Sequence
  Description of Artificial Sequence: Synthetic oligonucleotide
ccggcuuguaggugauuga

SEQ ID NO: 2827624 - RNA, 19 nt, Artificial Sequence
  Description of Artificial Sequence: Synthetic oligonucleotide
uuccgccauuucgguggcu

SEQ ID NO: 2827625 - RNA, 19 nt, Artificial Sequence
  Description of Artificial Sequence: Synthetic oligonucleotide
gggcuucuccaugggcggc

SEQ ID NO: 2827626 - RNA, 19 nt, Artificial Sequence
  Description of Artificial Sequence: Synthetic oligonucleotide
ccgccauuucgguggcuuc

SEQ ID NO: 2827627 - RNA, 19 nt, Artificial Sequence
  Description of Artificial Sequence: Synthetic oligonucleotide
cccucaggugggucuucac

SEQ ID NO: 2827628 - RNA, 19 nt, Artificial Sequence
  Description of Artificial Sequence: Synthetic oligonucleotide
cgcuucaguaaugagugcu

SEQ ID NO: 2827629 - RNA, 19 nt, Artificial Sequence
  Description of Artificial Sequence: Synthetic oligonucleotide
gcugcucguaggacauguc

SEQ ID NO: 2827630 - RNA, 19 nt, Artificial Sequence
  Description of Artificial Sequence: Synthetic oligonucleotide
ggccgcgguuuagccgucg

SEQ ID NO: 2827631 - RNA, 19 nt, Artificial Sequence
  Description of Artificial Sequence: Synthetic oligonucleotide
gccgucgccucugccgggc

SEQ ID NO: 2827632 - RNA, 19 nt, Artificial Sequence
  Description of Artificial Sequence: Synthetic oligonucleotide
gucgccucugccgggcgcu

SEQ ID NO: 2827633 - RNA, 19 nt, Artificial Sequence
  Description of Artificial Sequence: Synthetic oligonucleotide
cggaacguccgcuucuucu

SEQ ID NO: 2827634 - RNA, 19 nt, Artificial Sequence
  Description of Artificial Sequence: Synthetic oligonucleotide
gcggcgccuccuucuuggc

SEQ ID NO: 2827635 - RNA, 19 nt, Artificial Sequence
  Description of Artificial Sequence: Synthetic oligonucleotide
uggcugcgucugcgcaguu

SEQ ID NO: 2827636 - RNA, 19 nt, Artificial Sequence
  Description of Artificial Sequence: Synthetic oligonucleotide
aggccgcgguuuagccguc

SEQ ID NO: 2827637 - RNA, 19 nt, Artificial Sequence
  Description of Artificial Sequence: Synthetic oligonucleotide
gggcggcgccuccuucuug

SEQ ID NO: 2827638 - RNA, 19 nt, Artificial Sequence
  Description of Artificial Sequence: Synthetic oligonucleotide
gcggaacguccgcuucuuc

SEQ ID NO: 2827639 - RNA, 19 nt, Artificial Sequence
  Description of Artificial Sequence: Synthetic oligonucleotide
gucccucaggugggucuuc

SEQ ID NO: 2827640 - RNA, 19 nt, Artificial Sequence
  Description of Artificial Sequence: Synthetic oligonucleotide
ccgcaggccgcgguuuagc

SEQ ID NO: 2827641 - RNA, 19 nt, Artificial Sequence
  Description of Artificial Sequence: Synthetic oligonucleotide
ccgaucaucucugguuuua

SEQ ID NO: 2827642 - RNA, 19 nt, Artificial Sequence
  Description of Artificial Sequence: Synthetic oligonucleotide
ccaugcuucaccggcuugu

SEQ ID NO: 2827643 - RNA, 19 nt, Artificial Sequence
  Description of Artificial Sequence: Synthetic oligonucleotide
gccgcaggccgcgguuuag

SEQ ID NO: 2827644 - RNA, 19 nt, Artificial Sequence
  Description of Artificial Sequence: Synthetic oligonucleotide
cgauggcugcgucugcgca

SEQ ID NO: 2827645 - RNA, 19 nt, Artificial Sequence
  Description of Artificial Sequence: Synthetic oligonucleotide
cugcucaacuuccgccauu

SEQ ID NO: 2827646 - RNA, 19 nt, Artificial Sequence
  Description of Artificial Sequence: Synthetic oligonucleotide
ccgucgccucugccgggcg

SEQ ID NO: 2827647 - RNA, 19 nt, Artificial Sequence
  Description of Artificial Sequence: Synthetic oligonucleotide
ggccaugcuucaccggcuu

SEQ ID NO: 2827648 - RNA, 19 nt, Artificial Sequence
  Description of Artificial Sequence: Synthetic oligonucleotide
cgucgccucugccgggcgc

SEQ ID NO: 2827649 - RNA, 19 nt, Artificial Sequence
  Description of Artificial Sequence: Synthetic oligonucleotide
ggcugcgucugcgcaguua

SEQ ID NO: 2827650 - RNA, 19 nt, Artificial Sequence
  Description of Artificial Sequence: Synthetic oligonucleotide
gcccagguaguggccgauc

SEQ ID NO: 2827651 - RNA, 19 nt, Artificial Sequence
  Description of Artificial Sequence: Synthetic oligonucleotide
ccucugccgggcgcuguac

SEQ ID NO: 2827652 - RNA, 19 nt, Artificial Sequence
  Description of Artificial Sequence: Synthetic oligonucleotide
cgcgguuuagccgucgccu

SEQ ID NO: 2827653 - RNA, 19 nt, Artificial Sequence
  Description of Artificial Sequence: Synthetic oligonucleotide
gccgaucaucucugguuuu

SEQ ID NO: 2827654 - RNA, 19 nt, Artificial Sequence
  Description of Artificial Sequence: Synthetic oligonucleotide
cgguggcuucuuggaaaag

SEQ ID NO: 2827655 - RNA, 19 nt, Artificial Sequence
  Description of Artificial Sequence: Synthetic oligonucleotide
ccagguaguggccgaucau

SEQ ID NO: 2827656 - RNA, 19 nt, Artificial Sequence
  Description of Artificial Sequence: Synthetic oligonucleotide
ccaggccggccaugcuuca

SEQ ID NO: 2827657 - RNA, 19 nt, Artificial Sequence
  Description of Artificial Sequence: Synthetic oligonucleotide
ccuccuucuuggccuuucu

SEQ ID NO: 2827658 - RNA, 19 nt, Artificial Sequence
  Description of Artificial Sequence: Synthetic oligonucleotide
gccgggcgcuguacagcug

SEQ ID NO: 2827659 - RNA, 19 nt, Artificial Sequence
  Description of Artificial Sequence: Synthetic oligonucleotide
gccauuucgguggcuucuu

SEQ ID NO: 2827660 - RNA, 19 nt, Artificial Sequence
  Description of Artificial Sequence: Synthetic oligonucleotide
cgguuuagccgucgccucu

SEQ ID NO: 2827661 - RNA, 19 nt, Artificial Sequence
  Description of Artificial Sequence: Synthetic oligonucleotide
gguccacgccgcgguaggu

SEQ ID NO: 2827662 - RNA, 19 nt, Artificial Sequence
  Description of Artificial Sequence: Synthetic oligonucleotide
ccacgccgcgguaggugaa

SEQ ID NO: 2827663 - RNA, 19 nt, Artificial Sequence
  Description of Artificial Sequence: Synthetic oligonucleotide
cgaugccaggccggccaug

SEQ ID NO: 2827664 - RNA, 19 nt, Artificial Sequence
  Description of Artificial Sequence: Synthetic oligonucleotide
ccaucucuggcaggaugau

SEQ ID NO: 2827665 - RNA, 19 nt, Artificial Sequence
  Description of Artificial Sequence: Synthetic oligonucleotide
gggcgcuguacagcugcau

SEQ ID NO: 2827666 - RNA, 19 nt, Artificial Sequence
  Description of Artificial Sequence: Synthetic oligonucleotide
cgggcgcuguacagcugca

SEQ ID NO: 2827667 - RNA, 19 nt, Artificial Sequence
  Description of Artificial Sequence: Synthetic oligonucleotide
ccgggaggaguggguggca

SEQ ID NO: 2827668 - RNA, 19 nt, Artificial Sequence
  Description of Artificial Sequence: Synthetic oligonucleotide
ccgaugccaggccggccau

SEQ ID NO: 2827669 - RNA, 19 nt, Artificial Sequence
  Description of Artificial Sequence: Synthetic oligonucleotide
caccggcuuguaggugauu

SEQ ID NO: 2827670 - RNA, 19 nt, Artificial Sequence
  Description of Artificial Sequence: Synthetic oligonucleotide
cgaccaugcugcccaccau

SEQ ID NO: 2827671 - RNA, 19 nt, Artificial Sequence
  Description of Artificial Sequence: Synthetic oligonucleotide
ccaugggcggcgccuccuu

SEQ ID NO: 2827672 - RNA, 19 nt, Artificial Sequence
  Description of Artificial Sequence: Synthetic oligonucleotide
cgccgcaggccgcgguuua

SEQ ID NO: 2827673 - RNA, 19 nt, Artificial Sequence
  Description of Artificial Sequence: Synthetic oligonucleotide
cgccgcgguaggugaacuu

SEQ ID NO: 2827674 - RNA, 19 nt, Artificial Sequence
  Description of Artificial Sequence: Synthetic oligonucleotide
ccgccgcaggccgcgguuu

SEQ ID NO: 2827675 - RNA, 19 nt, Artificial Sequence
  Description of Artificial Sequence: Synthetic oligonucleotide
cgccucugccgggcgcugu

SEQ ID NO: 2827676 - RNA, 19 nt, Artificial Sequence
  Description of Artificial Sequence: Synthetic oligonucleotide
ucggauaugcucuugaugg

SEQ ID NO: 2827677 - RNA, 19 nt, Artificial Sequence
  Description of Artificial Sequence: Synthetic oligonucleotide
gaauuaaugaaucucuggc

SEQ ID NO: 2827678 - RNA, 19 nt, Artificial Sequence
  Description of Artificial Sequence: Synthetic oligonucleotide
auuaaugaaucucuggcuc

SEQ ID NO: 2827679 - RNA, 19 nt, Artificial Sequence
  Description of Artificial Sequence: Synthetic oligonucleotide
ucaauaucuugccucaugg

SEQ ID NO: 2827680 - RNA, 19 nt, Artificial Sequence
  Description of Artificial Sequence: Synthetic oligonucleotide
ucuguuuucagcucaauca

SEQ ID NO: 2827681 - RNA, 19 nt, Artificial Sequence
  Description of Artificial Sequence: Synthetic oligonucleotide
ugaauuaaugaaucucugg

SEQ ID NO: 2827682 - RNA, 19 nt, Artificial Sequence
  Description of Artificial Sequence: Synthetic oligonucleotide
aagguccacgcucaaaacc

SEQ ID NO: 2827683 - RNA, 19 nt, Artificial Sequence
  Description of Artificial Sequence: Synthetic oligonucleotide
aaagcugaauuaaugaauc

SEQ ID NO: 2827684 - RNA, 19 nt, Artificial Sequence
  Description of Artificial Sequence: Synthetic oligonucleotide
aauuaaugaaucucuggcu

SEQ ID NO: 2827685 - RNA, 19 nt, Artificial Sequence
  Description of Artificial Sequence: Synthetic oligonucleotide
aaaaccauccaauucgaga

SEQ ID NO: 2827686 - RNA, 19 nt, Artificial Sequence
  Description of Artificial Sequence: Synthetic oligonucleotide
uguaaggucguucaagagc

SEQ ID NO: 2827687 - RNA, 19 nt, Artificial Sequence
  Description of Artificial Sequence: Synthetic oligonucleotide
  modified_base (7)..(7): a, c, u, g, unknown or other
uuuuaancugucuaucacu

SEQ ID NO: 2827688 - RNA, 19 nt, Artificial Sequence
  Description of Artificial Sequence: Synthetic oligonucleotide
  modified_base (2)..(2): a, c, u, g, unknown or other
ancugucuaucacuaaagg

SEQ ID NO: 2827689 - RNA, 19 nt, Artificial Sequence
  Description of Artificial Sequence: Synthetic oligonucleotide
aaucauuccucccagucca

SEQ ID NO: 2827690 - RNA, 19 nt, Artificial Sequence
  Description of Artificial Sequence: Synthetic oligonucleotide
cugucuaucacuaaagguc

SEQ ID NO: 2827691 - RNA, 19 nt, Artificial Sequence
  Description of Artificial Sequence: Synthetic oligonucleotide
ugucuaucacuaaaggucc

SEQ ID NO: 2827692 - RNA, 19 nt, Artificial Sequence
  Description of Artificial Sequence: Synthetic oligonucleotide
uuaaugaaucucuggcucg

SEQ ID NO: 2827693 - RNA, 19 nt, Artificial Sequence
  Description of Artificial Sequence: Synthetic oligonucleotide
uuuugugagcuccuggucc

SEQ ID NO: 2827694 - RNA, 19 nt, Artificial Sequence
  Description of Artificial Sequence: Synthetic oligonucleotide
uuuucuguaaggucguuca

SEQ ID NO: 2827695 - RNA, 19 nt, Artificial Sequence
  Description of Artificial Sequence: Synthetic oligonucleotide
aauaucuugccucaugguu

SEQ ID NO: 2827696 - RNA, 19 nt, Artificial Sequence
  Description of Artificial Sequence: Synthetic oligonucleotide
  modified_base (4)..(4): a, c, u, g, unknown or other
uaancugucuaucacuaaa

SEQ ID NO: 2827697 - RNA, 19 nt, Artificial Sequence
  Description of Artificial Sequence: Synthetic oligonucleotide
cuucacauuccucagcucg

SEQ ID NO: 2827698 - RNA, 19 nt, Artificial Sequence
  Description of Artificial Sequence: Synthetic oligonucleotide
uucacguucagcuuuugug

SEQ ID NO: 2827699 - RNA, 19 nt, Artificial Sequence
  Description of Artificial Sequence: Synthetic oligonucleotide
  modified_base (6)..(6): a, c, u, g, unknown or other
uuuaancugucuaucacua

SEQ ID NO: 2827700 - RNA, 19 nt, Artificial Sequence
  Description of Artificial Sequence: Synthetic oligonucleotide
aucugauucugcuucagag

SEQ ID NO: 2827701 - RNA, 19 nt, Artificial Sequence
  Description of Artificial Sequence: Synthetic oligonucleotide
cugugugucaauaucuugc

SEQ ID NO: 2827702 - RNA, 19 nt, Artificial Sequence
  Description of Artificial Sequence: Synthetic oligonucleotide
uaaagguccacgcucaaaa

SEQ ID NO: 2827703 - RNA, 19 nt, Artificial Sequence
  Description of Artificial Sequence: Synthetic oligonucleotide
aaagguccacgcucaaaac

SEQ ID NO: 2827704 - RNA, 19 nt, Artificial Sequence
  Description of Artificial Sequence: Synthetic oligonucleotide
auggcgaucugccuguagc

SEQ ID NO: 2827705 - RNA, 19 nt, Artificial Sequence
  Description of Artificial Sequence: Synthetic oligonucleotide
ucucacaaguucaugaaau

SEQ ID NO: 2827706 - RNA, 19 nt, Artificial Sequence
  Description of Artificial Sequence: Synthetic oligonucleotide
ucuguaaggucguucaaga

SEQ ID NO: 2827707 - RNA, 19 nt, Artificial Sequence
  Description of Artificial Sequence: Synthetic oligonucleotide
ucaucaaucugauucugcu

SEQ ID NO: 2827708 - RNA, 19 nt, Artificial Sequence
  Description of Artificial Sequence: Synthetic oligonucleotide
ucguucuucacauuccuca

SEQ ID NO: 2827709 - RNA, 19 nt, Artificial Sequence
  Description of Artificial Sequence: Synthetic oligonucleotide
ugucugaugagcccucuag

SEQ ID NO: 2827710 - RNA, 19 nt, Artificial Sequence
  Description of Artificial Sequence: Synthetic oligonucleotide
uucuucacauuccucagcu

SEQ ID NO: 2827711 - RNA, 19 nt, Artificial Sequence
  Description of Artificial Sequence: Synthetic oligonucleotide
aggaguucuguuuucagcu

SEQ ID NO: 2827712 - RNA, 19 nt, Artificial Sequence
  Description of Artificial Sequence: Synthetic oligonucleotide
uaucacuaaagguccacgc

SEQ ID NO: 2827713 - RNA, 19 nt, Artificial Sequence
  Description of Artificial Sequence: Synthetic oligonucleotide
  modified_base (3)..(3): a, c, u, g, unknown or other
aancugucuaucacuaaag

SEQ ID NO: 2827714 - RNA, 19 nt, Artificial Sequence
  Description of Artificial Sequence: Synthetic oligonucleotide
ucacguucagcuuuuguga

SEQ ID NO: 2827715 - RNA, 19 nt, Artificial Sequence
  Description of Artificial Sequence: Synthetic oligonucleotide
uuucagcucaaucauuccu

SEQ ID NO: 2827716 - RNA, 19 nt, Artificial Sequence
  Description of Artificial Sequence: Synthetic oligonucleotide
uccacgcucaaaaccaucc

SEQ ID NO: 2827717 - RNA, 19 nt, Artificial Sequence
  Description of Artificial Sequence: Synthetic oligonucleotide
agcugaauuaaugaaucuc

SEQ ID NO: 2827718 - RNA, 19 nt, Artificial Sequence
  Description of Artificial Sequence: Synthetic oligonucleotide
ucuuuauuuaugcuauuuu

SEQ ID NO: 2827719 - RNA, 19 nt, Artificial Sequence
  Description of Artificial Sequence: Synthetic oligonucleotide
ucuggcucggauaugcucu

SEQ ID NO: 2827720 - RNA, 19 nt, Artificial Sequence
  Description of Artificial Sequence: Synthetic oligonucleotide
uucaagagcuggcuggcag

SEQ ID NO: 2827721 - RNA, 19 nt, Artificial Sequence
  Description of Artificial Sequence: Synthetic oligonucleotide
auaucuugccucaugguuc

SEQ ID NO: 2827722 - RNA, 19 nt, Artificial Sequence
  Description of Artificial Sequence: Synthetic oligonucleotide
ucccuuaucucaucaaucu

SEQ ID NO: 2827723 - RNA, 19 nt, Artificial Sequence
  Description of Artificial Sequence: Synthetic oligonucleotide
ucaaaaccauccaauucga

SEQ ID NO: 2827724 - RNA, 19 nt, Artificial Sequence
  Description of Artificial Sequence: Synthetic oligonucleotide
ugccaaagcugaauuaaug

SEQ ID NO: 2827725 - RNA, 19 nt, Artificial Sequence
  Description of Artificial Sequence: Synthetic oligonucleotide
ucccauuucuuuauuuaug

SEQ ID NO: 2827726 - RNA, 19 nt, Artificial Sequence
  Description of Artificial Sequence: Synthetic oligonucleotide
ucuucugugugucaauauc

SEQ ID NO: 2827727 - RNA, 19 nt, Artificial Sequence
  Description of Artificial Sequence: Synthetic oligonucleotide
uccaauucgagaugugcug

SEQ ID NO: 2827728 - RNA, 19 nt, Artificial Sequence
  Description of Artificial Sequence: Synthetic oligonucleotide
ucacuaaagguccacgcuc

SEQ ID NO: 2827729 - RNA, 19 nt, Artificial Sequence
  Description of Artificial Sequence: Synthetic oligonucleotide
guuuaguucacguucagcu

SEQ ID NO: 2827730 - RNA, 19 nt, Artificial Sequence
  Description of Artificial Sequence: Synthetic oligonucleotide
uuaguucacguucagcuuu

SEQ ID NO: 2827731 - RNA, 19 nt, Artificial Sequence
  Description of Artificial Sequence: Synthetic oligonucleotide
aaggucguucaagagcugg

SEQ ID NO: 2827732 - RNA, 19 nt, Artificial Sequence
  Description of Artificial Sequence: Synthetic oligonucleotide
ucugauucugcuucagagu

SEQ ID NO: 2827733 - RNA, 19 nt, Artificial Sequence
  Description of Artificial Sequence: Synthetic oligonucleotide
aucucuggcucggauaugc

SEQ ID NO: 2827734 - RNA, 19 nt, Artificial Sequence
  Description of Artificial Sequence: Synthetic oligonucleotide
uucagcucaaucauuccuc

SEQ ID NO: 2827735 - RNA, 19 nt, Artificial Sequence
  Description of Artificial Sequence: Synthetic oligonucleotide
uuuccuguaucuucugugu

SEQ ID NO: 2827736 - RNA, 19 nt, Artificial Sequence
  Description of Artificial Sequence: Synthetic oligonucleotide
gaggaguucuguuuucagc

SEQ ID NO: 2827737 - RNA, 19 nt, Artificial Sequence
  Description of Artificial Sequence: Synthetic oligonucleotide
uaaugaaucucuggcucgg

SEQ ID NO: 2827738 - RNA, 19 nt, Artificial Sequence
  Description of Artificial Sequence: Synthetic oligonucleotide
uaucuugccucaugguucc

SEQ ID NO: 2827739 - RNA, 19 nt, Artificial Sequence
  Description of Artificial Sequence: Synthetic oligonucleotide
cugaauuaaugaaucucug

SEQ ID NO: 2827740 - RNA, 19 nt, Artificial Sequence
  Description of Artificial Sequence: Synthetic oligonucleotide
ucccaguccacucuucuug

SEQ ID NO: 2827741 - RNA, 19 nt, Artificial Sequence
  Description of Artificial Sequence: Synthetic oligonucleotide
uucagcuuuugugagcucc

SEQ ID NO: 2827742 - RNA, 19 nt, Artificial Sequence
  Description of Artificial Sequence: Synthetic oligonucleotide
uucuguaaggucguucaag

SEQ ID NO: 2827743 - RNA, 19 nt, Artificial Sequence
  Description of Artificial Sequence: Synthetic oligonucleotide
cucuugauggcgaucugcc

SEQ ID NO: 2827744 - RNA, 19 nt, Artificial Sequence
  Description of Artificial Sequence: Synthetic oligonucleotide
ucugugugucaauaucuug

SEQ ID NO: 2827745 - RNA, 19 nt, Artificial Sequence
  Description of Artificial Sequence: Synthetic oligonucleotide
agcucaaucauuccuccca

SEQ ID NO: 2827746 - RNA, 19 nt, Artificial Sequence
  Description of Artificial Sequence: Synthetic oligonucleotide
uuuucagcucaaucauucc

SEQ ID NO: 2827747 - RNA, 19 nt, Artificial Sequence
  Description of Artificial Sequence: Synthetic oligonucleotide
ucagcucaaucauuccucc

SEQ ID NO: 2827748 - RNA, 19 nt, Artificial Sequence
  Description of Artificial Sequence: Synthetic oligonucleotide
caaucauuccucccagucc

SEQ ID NO: 2827749 - RNA, 19 nt, Artificial Sequence
  Description of Artificial Sequence: Synthetic oligonucleotide
cauuucuuuauuuaugcua

SEQ ID NO: 2827750 - RNA, 19 nt, Artificial Sequence
  Description of Artificial Sequence: Synthetic oligonucleotide
uucuguuuucagcucaauc

SEQ ID NO: 2827751 - RNA, 19 nt, Artificial Sequence
  Description of Artificial Sequence: Synthetic oligonucleotide
aucacuaaagguccacgcu

SEQ ID NO: 2827752 - RNA, 19 nt, Artificial Sequence
  Description of Artificial Sequence: Synthetic oligonucleotide
agcuccaggauccugucug

SEQ ID NO: 2827753 - RNA, 19 nt, Artificial Sequence
  Description of Artificial Sequence: Synthetic oligonucleotide
cuucuugucccuuaucuca

SEQ ID NO: 2827754 - RNA, 19 nt, Artificial Sequence
  Description of Artificial Sequence: Synthetic oligonucleotide
uuagugaggaguucuguuu

SEQ ID NO: 2827755 - RNA, 19 nt, Artificial Sequence
  Description of Artificial Sequence: Synthetic oligonucleotide
uuuucucagccuuguuuag

SEQ ID NO: 2827756 - RNA, 19 nt, Artificial Sequence
  Description of Artificial Sequence: Synthetic oligonucleotide
uuugugagcuccuggucca

SEQ ID NO: 2827757 - RNA, 19 nt, Artificial Sequence
  Description of Artificial Sequence: Synthetic oligonucleotide
cucaucaaucugauucugc

SEQ ID NO: 2827758 - RNA, 19 nt, Artificial Sequence
  Description of Artificial Sequence: Synthetic oligonucleotide
agcuuuugugagcuccugg

SEQ ID NO: 2827759 - RNA, 19 nt, Artificial Sequence
  Description of Artificial Sequence: Synthetic oligonucleotide
uguaucuucugugugucaa

SEQ ID NO: 2827760 - RNA, 19 nt, Artificial Sequence
  Description of Artificial Sequence: Synthetic oligonucleotide
ugaggaguucuguuuucag

SEQ ID NO: 2827761 - RNA, 19 nt, Artificial Sequence
  Description of Artificial Sequence: Synthetic oligonucleotide
guuuucagcucaaucauuc

SEQ ID NO: 2827762 - RNA, 19 nt, Artificial Sequence
  Description of Artificial Sequence: Synthetic oligonucleotide
uucuuagugaggaguucug

SEQ ID NO: 2827763 - RNA, 19 nt, Artificial Sequence
  Description of Artificial Sequence: Synthetic oligonucleotide
uccuguaucuucugugugu

SEQ ID NO: 2827764 - RNA, 19 nt, Artificial Sequence
  Description of Artificial Sequence: Synthetic oligonucleotide
aaccauccaauucgagaug

SEQ ID NO: 2827765 - RNA, 19 nt, Artificial Sequence
  Description of Artificial Sequence: Synthetic oligonucleotide
ugucccuuaucucaucaau

SEQ ID NO: 2827766 - RNA, 19 nt, Artificial Sequence
  Description of Artificial Sequence: Synthetic oligonucleotide
cuuguuuaguucacguuca

SEQ ID NO: 2827767 - RNA, 19 nt, Artificial Sequence
  Description of Artificial Sequence: Synthetic oligonucleotide
cauccaauucgagaugugc

SEQ ID NO: 2827768 - RNA, 19 nt, Artificial Sequence
  Description of Artificial Sequence: Synthetic oligonucleotide
agugaggaguucuguuuuc

SEQ ID NO: 2827769 - RNA, 19 nt, Artificial Sequence
  Description of Artificial Sequence: Synthetic oligonucleotide
ucucucacaaguucaugaa

SEQ ID NO: 2827770 - RNA, 19 nt, Artificial Sequence
  Description of Artificial Sequence: Synthetic oligonucleotide
uuguuuaguucacguucag

SEQ ID NO: 2827771 - RNA, 19 nt, Artificial Sequence
  Description of Artificial Sequence: Synthetic oligonucleotide
uucccauuucuuuauuuau

SEQ ID NO: 2827772 - RNA, 19 nt, Artificial Sequence
  Description of Artificial Sequence: Synthetic oligonucleotide
gauccugucugaugagccc

SEQ ID NO: 2827773 - RNA, 19 nt, Artificial Sequence
  Description of Artificial Sequence: Synthetic oligonucleotide
gauucugcuucagaguuuc

SEQ ID NO: 2827774 - RNA, 19 nt, Artificial Sequence
  Description of Artificial Sequence: Synthetic oligonucleotide
cccauuucuuuauuuaugc

SEQ ID NO: 2827775 - RNA, 19 nt, Artificial Sequence
  Description of Artificial Sequence: Synthetic oligonucleotide
cuaucacuaaagguccacg

SEQ ID NO: 2827776 - RNA, 19 nt, Artificial Sequence
  Description of Artificial Sequence: Synthetic oligonucleotide
ucaaucugauucugcuuca

SEQ ID NO: 2827777 - RNA, 19 nt, Artificial Sequence
  Description of Artificial Sequence: Synthetic oligonucleotide
uuccuguaucuucugugug

SEQ ID NO: 2827778 - RNA, 19 nt, Artificial Sequence
  Description of Artificial Sequence: Synthetic oligonucleotide
uuuaguucacguucagcuu

SEQ ID NO: 2827779 - RNA, 19 nt, Artificial Sequence
  Description of Artificial Sequence: Synthetic oligonucleotide
gucaauaucuugccucaug

SEQ ID NO: 2827780 - RNA, 19 nt, Artificial Sequence
  Description of Artificial Sequence: Synthetic oligonucleotide
uccugguccagcuccagga

SEQ ID NO: 2827781 - RNA, 19 nt, Artificial Sequence
  Description of Artificial Sequence: Synthetic oligonucleotide
acauuccucagcucgcucu

SEQ ID NO: 2827782 - RNA, 19 nt, Artificial Sequence
  Description of Artificial Sequence: Synthetic oligonucleotide
ugccuguagcugcagacga

SEQ ID NO: 2827783 - RNA, 19 nt, Artificial Sequence
  Description of Artificial Sequence: Synthetic oligonucleotide
aggauccugucugaugagc

SEQ ID NO: 2827784 - RNA, 19 nt, Artificial Sequence
  Description of Artificial Sequence: Synthetic oligonucleotide
uucuuuauuuaugcuauuu

SEQ ID NO: 2827785 - RNA, 19 nt, Artificial Sequence
  Description of Artificial Sequence: Synthetic oligonucleotide
  modified_base (5)..(5): a, c, u, g, unknown or other
uuaancugucuaucacuaa

SEQ ID NO: 2827786 - RNA, 19 nt, Artificial Sequence
  Description of Artificial Sequence: Synthetic oligonucleotide
uccugucucucucucacaa

SEQ ID NO: 2827787 - RNA, 19 nt, Artificial Sequence
  Description of Artificial Sequence: Synthetic oligonucleotide
ucucuuuccugucucucuc

SEQ ID NO: 2827788 - RNA, 19 nt, Artificial Sequence
  Description of Artificial Sequence: Synthetic oligonucleotide
ugcagcucguucuucacau

SEQ ID NO: 2827789 - RNA, 19 nt, Artificial Sequence
  Description of Artificial Sequence: Synthetic oligonucleotide
ucacaaguucaugaaauuu

SEQ ID NO: 2827790 - RNA, 19 nt, Artificial Sequence
  Description of Artificial Sequence: Synthetic oligonucleotide
caauucgagaugugcugcc

SEQ ID NO: 2827791 - RNA, 19 nt, Artificial Sequence
  Description of Artificial Sequence: Synthetic oligonucleotide
ugaaucucuggcucggaua

SEQ ID NO: 2827792 - RNA, 19 nt, Artificial Sequence
  Description of Artificial Sequence: Synthetic oligonucleotide
ugagcccucuagcugcugc

SEQ ID NO: 2827793 - RNA, 19 nt, Artificial Sequence
  Description of Artificial Sequence: Synthetic oligonucleotide
uugauggcgaucugccugu

SEQ ID NO: 2827794 - RNA, 19 nt, Artificial Sequence
  Description of Artificial Sequence: Synthetic oligonucleotide
gaguucuguuuucagcuca

SEQ ID NO: 2827795 - RNA, 19 nt, Artificial Sequence
  Description of Artificial Sequence: Synthetic oligonucleotide
caguccacucuucuugucc

SEQ ID NO: 2827796 - RNA, 19 nt, Artificial Sequence
  Description of Artificial Sequence: Synthetic oligonucleotide
uguagcugcagacgacccu

SEQ ID NO: 2827797 - RNA, 19 nt, Artificial Sequence
  Description of Artificial Sequence: Synthetic oligonucleotide
cucggauaugcucuugaug

SEQ ID NO: 2827798 - RNA, 19 nt, Artificial Sequence
  Description of Artificial Sequence: Synthetic oligonucleotide
ucaugguucccauuucuuu

SEQ ID NO: 2827799 - RNA, 19 nt, Artificial Sequence
  Description of Artificial Sequence: Synthetic oligonucleotide
ucagcuuuugugagcuccu

SEQ ID NO: 2827800 - RNA, 19 nt, Artificial Sequence
  Description of Artificial Sequence: Synthetic oligonucleotide
cacguucagcuuuugugag

SEQ ID NO: 2827801 - RNA, 19 nt, Artificial Sequence
  Description of Artificial Sequence: Synthetic oligonucleotide
ucuaucacuaaagguccac

SEQ ID NO: 2827802 - RNA, 19 nt, Artificial Sequence
  Description of Artificial Sequence: Synthetic oligonucleotide
caaaaccauccaauucgag

SEQ ID NO: 2827803 - RNA, 19 nt, Artificial Sequence
  Description of Artificial Sequence: Synthetic oligonucleotide
uagugaggaguucuguuuu

SEQ ID NO: 2827804 - RNA, 19 nt, Artificial Sequence
  Description of Artificial Sequence: Synthetic oligonucleotide
uuagcuucucuuuccuguc

SEQ ID NO: 2827805 - RNA, 19 nt, Artificial Sequence
  Description of Artificial Sequence: Synthetic oligonucleotide
uucugugugucaauaucuu

SEQ ID NO: 2827806 - RNA, 19 nt, Artificial Sequence
  Description of Artificial Sequence: Synthetic oligonucleotide
ucagccuuguuuaguucac

SEQ ID NO: 2827807 - RNA, 19 nt, Artificial Sequence
  Description of Artificial Sequence: Synthetic oligonucleotide
agaugugcugccaaagcug

SEQ ID NO: 2827808 - RNA, 19 nt, Artificial Sequence
  Description of Artificial Sequence: Synthetic oligonucleotide
ccuuguuuaguucacguuc

SEQ ID NO: 2827809 - RNA, 19 nt, Artificial Sequence
  Description of Artificial Sequence: Synthetic oligonucleotide
ugcuucuuagugaggaguu

SEQ ID NO: 2827810 - RNA, 19 nt, Artificial Sequence
  Description of Artificial Sequence: Synthetic oligonucleotide
agcucguucuucacauucc

SEQ ID NO: 2827811 - RNA, 19 nt, Artificial Sequence
  Description of Artificial Sequence: Synthetic oligonucleotide
ugccucaugguucccauuu

SEQ ID NO: 2827812 - RNA, 19 nt, Artificial Sequence
  Description of Artificial Sequence: Synthetic oligonucleotide
uguuuucagcucaaucauu

SEQ ID NO: 2827813 - RNA, 19 nt, Artificial Sequence
  Description of Artificial Sequence: Synthetic oligonucleotide
cucgcucugcuucuuagug

SEQ ID NO: 2827814 - RNA, 19 nt, Artificial Sequence
  Description of Artificial Sequence: Synthetic oligonucleotide
cuguaaggucguucaagag

SEQ ID NO: 2827815 - RNA, 19 nt, Artificial Sequence
  Description of Artificial Sequence: Synthetic oligonucleotide
ucgagaugugcugccaaag

SEQ ID NO: 2827816 - RNA, 19 nt, Artificial Sequence
  Description of Artificial Sequence: Synthetic oligonucleotide
cugaugagcccucuagcug

SEQ ID NO: 2827817 - RNA, 19 nt, Artificial Sequence
  Description of Artificial Sequence: Synthetic oligonucleotide
ggauaugcucuugauggcg

SEQ ID NO: 2827818 - RNA, 19 nt, Artificial Sequence
  Description of Artificial Sequence: Synthetic oligonucleotide
uucucagccuuguuuaguu

SEQ ID NO: 2827819 - RNA, 19 nt, Artificial Sequence
  Description of Artificial Sequence: Synthetic oligonucleotide
uccaggauccugucugaug

SEQ ID NO: 2827820 - RNA, 19 nt, Artificial Sequence
  Description of Artificial Sequence: Synthetic oligonucleotide
aauucgagaugugcugcca

SEQ ID NO: 2827821 - RNA, 19 nt, Artificial Sequence
  Description of Artificial Sequence: Synthetic oligonucleotide
ucaagagcuggcuggcagu

SEQ ID NO: 2827822 - RNA, 19 nt, Artificial Sequence
  Description of Artificial Sequence: Synthetic oligonucleotide
guucuucacauuccucagc

SEQ ID NO: 2827823 - RNA, 19 nt, Artificial Sequence
  Description of Artificial Sequence: Synthetic oligonucleotide
gucugaugagcccucuagc

SEQ ID NO: 2827824 - RNA, 19 nt, Artificial Sequence
  Description of Artificial Sequence: Synthetic oligonucleotide
ucuuagugaggaguucugu

SEQ ID NO: 2827825 - RNA, 19 nt, Artificial Sequence
  Description of Artificial Sequence: Synthetic oligonucleotide
guaaggucguucaagagcu

SEQ ID NO: 2827826 - RNA, 19 nt, Artificial Sequence
  Description of Artificial Sequence: Synthetic oligonucleotide
uucuugucccuuaucucau

SEQ ID NO: 2827827 - RNA, 19 nt, Artificial Sequence
  Description of Artificial Sequence: Synthetic oligonucleotide
gugucaauaucuugccuca

SEQ ID NO: 2827828 - RNA, 19 nt, Artificial Sequence
  Description of Artificial Sequence: Synthetic oligonucleotide
cugcagacgacccugccuc

SEQ ID NO: 2827829 - RNA, 19 nt, Artificial Sequence
  Description of Artificial Sequence: Synthetic oligonucleotide
gaugugcugccaaagcuga

SEQ ID NO: 2827830 - RNA, 19 nt, Artificial Sequence
  Description of Artificial Sequence: Synthetic oligonucleotide
ucuuuccugucucucucuc

SEQ ID NO: 2827831 - RNA, 19 nt, Artificial Sequence
  Description of Artificial Sequence: Synthetic oligonucleotide
gccaaagcugaauuaauga

SEQ ID NO: 2827832 - RNA, 19 nt, Artificial Sequence
  Description of Artificial Sequence: Synthetic oligonucleotide
gagaugugcugccaaagcu

SEQ ID NO: 2827833 - RNA, 19 nt, Artificial Sequence
  Description of Artificial Sequence: Synthetic oligonucleotide
gaaucucuggcucggauau

SEQ ID NO: 2827834 - RNA, 19 nt, Artificial Sequence
  Description of Artificial Sequence: Synthetic oligonucleotide
auccaauucgagaugugcu

SEQ ID NO: 2827835 - RNA, 19 nt, Artificial Sequence
  Description of Artificial Sequence: Synthetic oligonucleotide
agacgacccugccuccacc

SEQ ID NO: 2827836 - RNA, 19 nt, Artificial Sequence
  Description of Artificial Sequence: Synthetic oligonucleotide
gauaugcucuugauggcga

SEQ ID NO: 2827837 - RNA, 19 nt, Artificial Sequence
  Description of Artificial Sequence: Synthetic oligonucleotide
accauccaauucgagaugu

SEQ ID NO: 2827838 - RNA, 19 nt, Artificial Sequence
  Description of Artificial Sequence: Synthetic oligonucleotide
cuuuugugagcuccugguc

SEQ ID NO: 2827839 - RNA, 19 nt, Artificial Sequence
  Description of Artificial Sequence: Synthetic oligonucleotide
guagcugcagacgacccug

SEQ ID NO: 2827840 - RNA, 19 nt, Artificial Sequence
  Description of Artificial Sequence: Synthetic oligonucleotide
uuucuguaaggucguucaa

SEQ ID NO: 2827841 - RNA, 19 nt, Artificial Sequence
  Description of Artificial Sequence: Synthetic oligonucleotide
aggucguucaagagcuggc

SEQ ID NO: 2827842 - RNA, 19 nt, Artificial Sequence
  Description of Artificial Sequence: Synthetic oligonucleotide
augcucuugauggcgaucu

SEQ ID NO: 2827843 - RNA, 19 nt, Artificial Sequence
  Description of Artificial Sequence: Synthetic oligonucleotide
auuccucccaguccacucu

SEQ ID NO: 2827844 - RNA, 19 nt, Artificial Sequence
  Description of Artificial Sequence: Synthetic oligonucleotide
guucccauuucuuuauuua

SEQ ID NO: 2827845 - RNA, 19 nt, Artificial Sequence
  Description of Artificial Sequence: Synthetic oligonucleotide
agguccacgcucaaaacca

SEQ ID NO: 2827846 - RNA, 19 nt, Artificial Sequence
  Description of Artificial Sequence: Synthetic oligonucleotide
agcugcagacgacccugcc

SEQ ID NO: 2827847 - RNA, 19 nt, Artificial Sequence
  Description of Artificial Sequence: Synthetic oligonucleotide
augguucccauuucuuuau

SEQ ID NO: 2827848 - RNA, 19 nt, Artificial Sequence
  Description of Artificial Sequence: Synthetic oligonucleotide
ccuuaucucaucaaucuga

SEQ ID NO: 2827849 - RNA, 19 nt, Artificial Sequence
  Description of Artificial Sequence: Synthetic oligonucleotide
cuggcuggcaguuuuagcu

SEQ ID NO: 2827850 - RNA, 19 nt, Artificial Sequence
  Description of Artificial Sequence: Synthetic oligonucleotide
agcucgcucugcuucuuag

SEQ ID NO: 2827851 - RNA, 19 nt, Artificial Sequence
  Description of Artificial Sequence: Synthetic oligonucleotide
uuucucagccuuguuuagu

SEQ ID NO: 2827852 - RNA, 19 nt, Artificial Sequence
  Description of Artificial Sequence: Synthetic oligonucleotide
ugugcugccaaagcugaau

SEQ ID NO: 2827853 - RNA, 19 nt, Artificial Sequence
  Description of Artificial Sequence: Synthetic oligonucleotide
ucgcucugcuucuuaguga

SEQ ID NO: 2827854 - RNA, 19 nt, Artificial Sequence
  Description of Artificial Sequence: Synthetic oligonucleotide
cuguagcugcagacgaccc

SEQ ID NO: 2827855 - RNA, 19 nt, Artificial Sequence
  Description of Artificial Sequence: Synthetic oligonucleotide
gucguucaagagcuggcug

SEQ ID NO: 2827856 - RNA, 19 nt, Artificial Sequence
  Description of Artificial Sequence: Synthetic oligonucleotide
uucgagaugugcugccaaa

SEQ ID NO: 2827857 - RNA, 19 nt, Artificial Sequence
  Description of Artificial Sequence: Synthetic oligonucleotide
cagcucguucuucacauuc

SEQ ID NO: 2827858 - RNA, 19 nt, Artificial Sequence
  Description of Artificial Sequence: Synthetic oligonucleotide
uaucuucugugugucaaua

SEQ ID NO: 2827859 - RNA, 19 nt, Artificial Sequence
  Description of Artificial Sequence: Synthetic oligonucleotide
cacuaaagguccacgcuca

SEQ ID NO: 2827860 - RNA, 19 nt, Artificial Sequence
  Description of Artificial Sequence: Synthetic oligonucleotide
uggcaguuuuagcuucucu

SEQ ID NO: 2827861 - RNA, 19 nt, Artificial Sequence
  Description of Artificial Sequence: Synthetic oligonucleotide
caugguucccauuucuuua

SEQ ID NO: 2827862 - RNA, 19 nt, Artificial Sequence
  Description of Artificial Sequence: Synthetic oligonucleotide
gauggcgaucugccuguag

SEQ ID NO: 2827863 - RNA, 19 nt, Artificial Sequence
  Description of Artificial Sequence: Synthetic oligonucleotide
uggcgaucugccuguagcu

SEQ ID NO: 2827864 - RNA, 19 nt, Artificial Sequence
  Description of Artificial Sequence: Synthetic oligonucleotide
cauuccucccaguccacuc

SEQ ID NO: 2827865 - RNA, 19 nt, Artificial Sequence
  Description of Artificial Sequence: Synthetic oligonucleotide
agagcuggcuggcaguuuu

SEQ ID NO: 2827866 - RNA, 19 nt, Artificial Sequence
  Description of Artificial Sequence: Synthetic oligonucleotide
aaugaaucucuggcucgga

SEQ ID NO: 2827867 - RNA, 19 nt, Artificial Sequence
  Description of Artificial Sequence: Synthetic oligonucleotide
cuugucccuuaucucauca

SEQ ID NO: 2827868 - RNA, 19 nt, Artificial Sequence
  Description of Artificial Sequence: Synthetic oligonucleotide
uuucuuuauuuaugcuauu

SEQ ID NO: 2827869 - RNA, 19 nt, Artificial Sequence
  Description of Artificial Sequence: Synthetic oligonucleotide
auucgagaugugcugccaa

SEQ ID NO: 2827870 - RNA, 19 nt, Artificial Sequence
  Description of Artificial Sequence: Synthetic oligonucleotide
augaaucucuggcucggau

SEQ ID NO: 2827871 - RNA, 19 nt, Artificial Sequence
  Description of Artificial Sequence: Synthetic oligonucleotide
cauuccucagcucgcucug

SEQ ID NO: 2827872 - RNA, 19 nt, Artificial Sequence
  Description of Artificial Sequence: Synthetic oligonucleotide
ugauucugcuucagaguuu

SEQ ID NO: 2827873 - RNA, 19 nt, Artificial Sequence
  Description of Artificial Sequence: Synthetic oligonucleotide
ugucucucucucacaaguu

SEQ ID NO: 2827874 - RNA, 19 nt, Artificial Sequence
  Description of Artificial Sequence: Synthetic oligonucleotide
ucuugccucaugguuccca

SEQ ID NO: 2827875 - RNA, 19 nt, Artificial Sequence
  Description of Artificial Sequence: Synthetic oligonucleotide
cacaaguucaugaaauuuu

SEQ ID NO: 2827876 - RNA, 19 nt, Artificial Sequence
  Description of Artificial Sequence: Synthetic oligonucleotide
uaaggucguucaagagcug

SEQ ID NO: 2827877 - RNA, 19 nt, Artificial Sequence
  Description of Artificial Sequence: Synthetic oligonucleotide
cucuggcucggauaugcuc

SEQ ID NO: 2827878 - RNA, 19 nt, Artificial Sequence
  Description of Artificial Sequence: Synthetic oligonucleotide
ugcugccaaagcugaauua

SEQ ID NO: 2827879 - RNA, 19 nt, Artificial Sequence
  Description of Artificial Sequence: Synthetic oligonucleotide
gcucaaucauuccucccag

SEQ ID NO: 2827880 - RNA, 19 nt, Artificial Sequence
  Description of Artificial Sequence: Synthetic oligonucleotide
uugucccuuaucucaucaa

SEQ ID NO: 2827881 - RNA, 19 nt, Artificial Sequence
  Description of Artificial Sequence: Synthetic oligonucleotide
gcugaauuaaugaaucucu

SEQ ID NO: 2827882 - RNA, 19 nt, Artificial Sequence
  Description of Artificial Sequence: Synthetic oligonucleotide
ucuucacauuccucagcuc

SEQ ID NO: 2827883 - RNA, 19 nt, Artificial Sequence
  Description of Artificial Sequence: Synthetic oligonucleotide
cagcucaaucauuccuccc

SEQ ID NO: 2827884 - RNA, 19 nt, Artificial Sequence
  Description of Artificial Sequence: Synthetic oligonucleotide
caaucugauucugcuucag

SEQ ID NO: 2827885 - RNA, 19 nt, Artificial Sequence
  Description of Artificial Sequence: Synthetic oligonucleotide
cucguucuucacauuccuc

SEQ ID NO: 2827886 - RNA, 19 nt, Artificial Sequence
  Description of Artificial Sequence: Synthetic oligonucleotide
ggauccugucugaugagcc

SEQ ID NO: 2827887 - RNA, 19 nt, Artificial Sequence
  Description of Artificial Sequence: Synthetic oligonucleotide
gucccuuaucucaucaauc

SEQ ID NO: 2827888 - RNA, 19 nt, Artificial Sequence
  Description of Artificial Sequence: Synthetic oligonucleotide
auaugcucuugauggcgau

SEQ ID NO: 2827889 - RNA, 19 nt, Artificial Sequence
  Description of Artificial Sequence: Synthetic oligonucleotide
ucacauuccucagcucgcu

SEQ ID NO: 2827890 - RNA, 19 nt, Artificial Sequence
  Description of Artificial Sequence: Synthetic oligonucleotide
cuuaucucaucaaucugau

SEQ ID NO: 2827891 - RNA, 19 nt, Artificial Sequence
  Description of Artificial Sequence: Synthetic oligonucleotide
auccugucugaugagcccu

SEQ ID NO: 2827892 - RNA, 19 nt, Artificial Sequence
  Description of Artificial Sequence: Synthetic oligonucleotide
ucucuggcucggauaugcu

SEQ ID NO: 2827893 - RNA, 19 nt, Artificial Sequence
  Description of Artificial Sequence: Synthetic oligonucleotide
gcgaucugccuguagcugc

SEQ ID NO: 2827894 - RNA, 19 nt, Artificial Sequence
  Description of Artificial Sequence: Synthetic oligonucleotide
ccaaagcugaauuaaugaa

SEQ ID NO: 2827895 - RNA, 19 nt, Artificial Sequence
  Description of Artificial Sequence: Synthetic oligonucleotide
ugcucuugauggcgaucug

SEQ ID NO: 2827896 - RNA, 19 nt, Artificial Sequence
  Description of Artificial Sequence: Synthetic oligonucleotide
cugauucugcuucagaguu

SEQ ID NO: 2827897 - RNA, 19 nt, Artificial Sequence
  Description of Artificial Sequence: Synthetic oligonucleotide
gacgacccugccuccacca

SEQ ID NO: 2827898 - RNA, 19 nt, Artificial Sequence
  Description of Artificial Sequence: Synthetic oligonucleotide
ccaggauccugucugauga

SEQ ID NO: 2827899 - RNA, 19 nt, Artificial Sequence
  Description of Artificial Sequence: Synthetic oligonucleotide
accuuuccuguaucuucug

SEQ ID NO: 2827900 - RNA, 19 nt, Artificial Sequence
  Description of Artificial Sequence: Synthetic oligonucleotide
aaucucuggcucggauaug

SEQ ID NO: 2827901 - RNA, 19 nt, Artificial Sequence
  Description of Artificial Sequence: Synthetic oligonucleotide
agccaccuuuccuguaucu

SEQ ID NO: 2827902 - RNA, 19 nt, Artificial Sequence
  Description of Artificial Sequence: Synthetic oligonucleotide
cuccugguccagcuccagg

SEQ ID NO: 2827903 - RNA, 19 nt, Artificial Sequence
  Description of Artificial Sequence: Synthetic oligonucleotide
ugccuccaccagcaguucu

SEQ ID NO: 2827904 - RNA, 19 nt, Artificial Sequence
  Description of Artificial Sequence: Synthetic oligonucleotide
uggcuggcaguuuuagcuu

SEQ ID NO: 2827905 - RNA, 19 nt, Artificial Sequence
  Description of Artificial Sequence: Synthetic oligonucleotide
acgcucaaaaccauccaau

SEQ ID NO: 2827906 - RNA, 19 nt, Artificial Sequence
  Description of Artificial Sequence: Synthetic oligonucleotide
ucauuccucccaguccacu

SEQ ID NO: 2827907 - RNA, 19 nt, Artificial Sequence
  Description of Artificial Sequence: Synthetic oligonucleotide
cucucacaaguucaugaaa

SEQ ID NO: 2827908 - RNA, 19 nt, Artificial Sequence
  Description of Artificial Sequence: Synthetic oligonucleotide
cugucucucucucacaagu

SEQ ID NO: 2827909 - RNA, 19 nt, Artificial Sequence
  Description of Artificial Sequence: Synthetic oligonucleotide
ccaauucgagaugugcugc

SEQ ID NO: 2827910 - RNA, 19 nt, Artificial Sequence
  Description of Artificial Sequence: Synthetic oligonucleotide
caggauccugucugaugag

SEQ ID NO: 2827911 - RNA, 19 nt, Artificial Sequence
  Description of Artificial Sequence: Synthetic oligonucleotide
acuaaagguccacgcucaa

SEQ ID NO: 2827912 - RNA, 19 nt, Artificial Sequence
  Description of Artificial Sequence: Synthetic oligonucleotide
ugcagacgacccugccucc

SEQ ID NO: 2827913 - RNA, 19 nt, Artificial Sequence
  Description of Artificial Sequence: Synthetic oligonucleotide
cacgcucaaaaccauccaa

SEQ ID NO: 2827914 - RNA, 19 nt, Artificial Sequence
  Description of Artificial Sequence: Synthetic oligonucleotide
cuuuccugucucucucuca

SEQ ID NO: 2827915 - RNA, 19 nt, Artificial Sequence
  Description of Artificial Sequence: Synthetic oligonucleotide
cuguuuucagcucaaucau

SEQ ID NO: 2827916 - RNA, 19 nt, Artificial Sequence
  Description of Artificial Sequence: Synthetic oligonucleotide
agcuggcuggcaguuuuag

SEQ ID NO: 2827917 - RNA, 19 nt, Artificial Sequence
  Description of Artificial Sequence: Synthetic oligonucleotide
aucugccuguagcugcaga

SEQ ID NO: 2827918 - RNA, 19 nt, Artificial Sequence
  Description of Artificial Sequence: Synthetic oligonucleotide
cugguccagcuccaggauc

SEQ ID NO: 2827919 - RNA, 19 nt, Artificial Sequence
  Description of Artificial Sequence: Synthetic oligonucleotide
uagccaccuuuccuguauc

SEQ ID NO: 2827920 - RNA, 19 nt, Artificial Sequence
  Description of Artificial Sequence: Synthetic oligonucleotide
uccugucugaugagcccuc

SEQ ID NO: 2827921 - RNA, 19 nt, Artificial Sequence
  Description of Artificial Sequence: Synthetic oligonucleotide
uguagccaccuuuccugua

SEQ ID NO: 2827922 - RNA, 19 nt, Artificial Sequence
  Description of Artificial Sequence: Synthetic oligonucleotide
cuucuuagugaggaguucu

SEQ ID NO: 2827923 - RNA, 19 nt, Artificial Sequence
  Description of Artificial Sequence: Synthetic oligonucleotide
aucauuccucccaguccac

SEQ ID NO: 2827924 - RNA, 19 nt, Artificial Sequence
  Description of Artificial Sequence: Synthetic oligonucleotide
ccuguagcugcagacgacc

SEQ ID NO: 2827925 - RNA, 19 nt, Artificial Sequence
  Description of Artificial Sequence: Synthetic oligonucleotide
gugaggaguucuguuuuca

SEQ ID NO: 2827926 - RNA, 19 nt, Artificial Sequence
  Description of Artificial Sequence: Synthetic oligonucleotide
cuuagugaggaguucuguu

SEQ ID NO: 2827927 - RNA, 19 nt, Artificial Sequence
  Description of Artificial Sequence: Synthetic oligonucleotide
ggaguucuguuuucagcuc

SEQ ID NO: 2827928 - RNA, 19 nt, Artificial Sequence
  Description of Artificial Sequence: Synthetic oligonucleotide
gagcccucuagcugcugca

SEQ ID NO: 2827929 - RNA, 19 nt, Artificial Sequence
  Description of Artificial Sequence: Synthetic oligonucleotide
gcugccaaagcugaauuaa

SEQ ID NO: 2827930 - RNA, 19 nt, Artificial Sequence
  Description of Artificial Sequence: Synthetic oligonucleotide
acgacccugccuccaccag

SEQ ID NO: 2827931 - RNA, 19 nt, Artificial Sequence
  Description of Artificial Sequence: Synthetic oligonucleotide
gcucuugauggcgaucugc

SEQ ID NO: 2827932 - RNA, 19 nt, Artificial Sequence
  Description of Artificial Sequence: Synthetic oligonucleotide
ugucaauaucuugccucau

SEQ ID NO: 2827933 - RNA, 19 nt, Artificial Sequence
  Description of Artificial Sequence: Synthetic oligonucleotide
gcuuuugugagcuccuggu

SEQ ID NO: 2827934 - RNA, 19 nt, Artificial Sequence
  Description of Artificial Sequence: Synthetic oligonucleotide
caauaucuugccucauggu

SEQ ID NO: 2827935 - RNA, 19 nt, Artificial Sequence
  Description of Artificial Sequence: Synthetic oligonucleotide
uuccucccaguccacucuu

SEQ ID NO: 2827936 - RNA, 19 nt, Artificial Sequence
  Description of Artificial Sequence: Synthetic oligonucleotide
aguucuguuuucagcucaa

SEQ ID NO: 2827937 - RNA, 19 nt, Artificial Sequence
  Description of Artificial Sequence: Synthetic oligonucleotide
uugugagcuccugguccag

SEQ ID NO: 2827938 - RNA, 19 nt, Artificial Sequence
  Description of Artificial Sequence: Synthetic oligonucleotide
cgagaugugcugccaaagc

SEQ ID NO: 2827939 - RNA, 19 nt, Artificial Sequence
  Description of Artificial Sequence: Synthetic oligonucleotide
guagccaccuuuccuguau

SEQ ID NO: 2827940 - RNA, 19 nt, Artificial Sequence
  Description of Artificial Sequence: Synthetic oligonucleotide
ggcaguuuuagcuucucuu

SEQ ID NO: 2827941 - RNA, 19 nt, Artificial Sequence
  Description of Artificial Sequence: Synthetic oligonucleotide
cacauuccucagcucgcuc

SEQ ID NO: 2827942 - RNA, 19 nt, Artificial Sequence
  Description of Artificial Sequence: Synthetic oligonucleotide
cccuuaucucaucaaucug

SEQ ID NO: 2827943 - RNA, 19 nt, Artificial Sequence
  Description of Artificial Sequence: Synthetic oligonucleotide
agcccucuagcugcugcag

SEQ ID NO: 2827944 - RNA, 19 nt, Artificial Sequence
  Description of Artificial Sequence: Synthetic oligonucleotide
cagacgacccugccuccac

SEQ ID NO: 2827945 - RNA, 19 nt, Artificial Sequence
  Description of Artificial Sequence: Synthetic oligonucleotide
aucuugccucaugguuccc

SEQ ID NO: 2827946 - RNA, 19 nt, Artificial Sequence
  Description of Artificial Sequence: Synthetic oligonucleotide
ggcuggcaguuuuagcuuc

SEQ ID NO: 2827947 - RNA, 19 nt, Artificial Sequence
  Description of Artificial Sequence: Synthetic oligonucleotide
cuguaucuucuguguguca

SEQ ID NO: 2827948 - RNA, 19 nt, Artificial Sequence
  Description of Artificial Sequence: Synthetic oligonucleotide
gcuggcuggcaguuuuagc

SEQ ID NO: 2827949 - RNA, 19 nt, Artificial Sequence
  Description of Artificial Sequence: Synthetic oligonucleotide
uccucccaguccacucuuc

SEQ ID NO: 2827950 - RNA, 19 nt, Artificial Sequence
  Description of Artificial Sequence: Synthetic oligonucleotide
cucacaaguucaugaaauu

SEQ ID NO: 2827951 - RNA, 19 nt, Artificial Sequence
  Description of Artificial Sequence: Synthetic oligonucleotide
ccuguaucuucuguguguc

SEQ ID NO: 2827952 - RNA, 19 nt, Artificial Sequence
  Description of Artificial Sequence: Synthetic oligonucleotide
guucacguucagcuuuugu

SEQ ID NO: 2827953 - RNA, 19 nt, Artificial Sequence
  Description of Artificial Sequence: Synthetic oligonucleotide
cuaaagguccacgcucaaa

SEQ ID NO: 2827954 - RNA, 19 nt, Artificial Sequence
  Description of Artificial Sequence: Synthetic oligonucleotide
ggcucggauaugcucuuga

SEQ ID NO: 2827955 - RNA, 19 nt, Artificial Sequence
  Description of Artificial Sequence: Synthetic oligonucleotide
gucuaucacuaaaggucca

SEQ ID NO: 2827956 - RNA, 19 nt, Artificial Sequence
  Description of Artificial Sequence: Synthetic oligonucleotide
aguucacguucagcuuuug

SEQ ID NO: 2827957 - RNA, 19 nt, Artificial Sequence
  Description of Artificial Sequence: Synthetic oligonucleotide
ccucagcucgcucugcuuc

SEQ ID NO: 2827958 - RNA, 19 nt, Artificial Sequence
  Description of Artificial Sequence: Synthetic oligonucleotide
cugcuucuuagugaggagu

SEQ ID NO: 2827959 - RNA, 19 nt, Artificial Sequence
  Description of Artificial Sequence: Synthetic oligonucleotide
guaucuucugugugucaau

SEQ ID NO: 2827960 - RNA, 19 nt, Artificial Sequence
  Description of Artificial Sequence: Synthetic oligonucleotide
cagcuuuugugagcuccug

SEQ ID NO: 2827961 - RNA, 19 nt, Artificial Sequence
  Description of Artificial Sequence: Synthetic oligonucleotide
ggcgaucugccuguagcug

SEQ ID NO: 2827962 - RNA, 19 nt, Artificial Sequence
  Description of Artificial Sequence: Synthetic oligonucleotide
caucaaucugauucugcuu

SEQ ID NO: 2827963 - RNA, 19 nt, Artificial Sequence
  Description of Artificial Sequence: Synthetic oligonucleotide
aagagcuggcuggcaguuu

SEQ ID NO: 2827964 - RNA, 19 nt, Artificial Sequence
  Description of Artificial Sequence: Synthetic oligonucleotide
cggauaugcucuugauggc

SEQ ID NO: 2827965 - RNA, 19 nt, Artificial Sequence
  Description of Artificial Sequence: Synthetic oligonucleotide
uugccucaugguucccauu

SEQ ID NO: 2827966 - RNA, 19 nt, Artificial Sequence
  Description of Artificial Sequence: Synthetic oligonucleotide
uggcucggauaugcucuug

SEQ ID NO: 2827967 - RNA, 19 nt, Artificial Sequence
  Description of Artificial Sequence: Synthetic oligonucleotide
cuggcaguuuuagcuucuc

SEQ ID NO: 2827968 - RNA, 19 nt, Artificial Sequence
  Description of Artificial Sequence: Synthetic oligonucleotide
guucaagagcuggcuggca

SEQ ID NO: 2827969 - RNA, 19 nt, Artificial Sequence
  Description of Artificial Sequence: Synthetic oligonucleotide
guccacgcucaaaaccauc

SEQ ID NO: 2827970 - RNA, 19 nt, Artificial Sequence
  Description of Artificial Sequence: Synthetic oligonucleotide
cucaugguucccauuucuu

SEQ ID NO: 2827971 - RNA, 19 nt, Artificial Sequence
  Description of Artificial Sequence: Synthetic oligonucleotide
ccauccaauucgagaugug

SEQ ID NO: 2827972 - RNA, 19 nt, Artificial Sequence
  Description of Artificial Sequence: Synthetic oligonucleotide
cucaaucauuccucccagu

SEQ ID NO: 2827973 - RNA, 19 nt, Artificial Sequence
  Description of Artificial Sequence: Synthetic oligonucleotide
cuugccucaugguucccau

SEQ ID NO: 2827974 - RNA, 19 nt, Artificial Sequence
  Description of Artificial Sequence: Synthetic oligonucleotide
gcuucuuagugaggaguuc

SEQ ID NO: 2827975 - RNA, 19 nt, Artificial Sequence
  Description of Artificial Sequence: Synthetic oligonucleotide
cuguagccaccuuuccugu

SEQ ID NO: 2827976 - RNA, 19 nt, Artificial Sequence
  Description of Artificial Sequence: Synthetic oligonucleotide
gguucccauuucuuuauuu

SEQ ID NO: 2827977 - RNA, 19 nt, Artificial Sequence
  Description of Artificial Sequence: Synthetic oligonucleotide
cucuuuccugucucucucu

SEQ ID NO: 2827978 - RNA, 19 nt, Artificial Sequence
  Description of Artificial Sequence: Synthetic oligonucleotide
gcccucuagcugcugcagc

SEQ ID NO: 2827979 - RNA, 19 nt, Artificial Sequence
  Description of Artificial Sequence: Synthetic oligonucleotide
gugcugccaaagcugaauu

SEQ ID NO: 2827980 - RNA, 19 nt, Artificial Sequence
  Description of Artificial Sequence: Synthetic oligonucleotide
gcucguucuucacauuccu

SEQ ID NO: 2827981 - RNA, 19 nt, Artificial Sequence
  Description of Artificial Sequence: Synthetic oligonucleotide
cucagcucgcucugcuucu

SEQ ID NO: 2827982 - RNA, 19 nt, Artificial Sequence
  Description of Artificial Sequence: Synthetic oligonucleotide
ccauuucuuuauuuaugcu

SEQ ID NO: 2827983 - RNA, 19 nt, Artificial Sequence
  Description of Artificial Sequence: Synthetic oligonucleotide
gaugagcccucuagcugcu

SEQ ID NO: 2827984 - RNA, 19 nt, Artificial Sequence
  Description of Artificial Sequence: Synthetic oligonucleotide
acccugccuccaccagcag

SEQ ID NO: 2827985 - RNA, 19 nt, Artificial Sequence
  Description of Artificial Sequence: Synthetic oligonucleotide
gcugcagacgacccugccu

SEQ ID NO: 2827986 - RNA, 19 nt, Artificial Sequence
  Description of Artificial Sequence: Synthetic oligonucleotide
ggucguucaagagcuggcu

SEQ ID NO: 2827987 - RNA, 19 nt, Artificial Sequence
  Description of Artificial Sequence: Synthetic oligonucleotide
augagcccucuagcugcug

SEQ ID NO: 2827988 - RNA, 19 nt, Artificial Sequence
  Description of Artificial Sequence: Synthetic oligonucleotide
ccaguccacucuucuuguc

SEQ ID NO: 2827989 - RNA, 19 nt, Artificial Sequence
  Description of Artificial Sequence: Synthetic oligonucleotide
cugucugaugagcccucua

SEQ ID NO: 2827990 - RNA, 19 nt, Artificial Sequence
  Description of Artificial Sequence: Synthetic oligonucleotide
gcuucucuuuccugucucu

SEQ ID NO: 2827991 - RNA, 19 nt, Artificial Sequence
  Description of Artificial Sequence: Synthetic oligonucleotide
ugauggcgaucugccugua

SEQ ID NO: 2827992 - RNA, 19 nt, Artificial Sequence
  Description of Artificial Sequence: Synthetic oligonucleotide
cgacccugccuccaccagc

SEQ ID NO: 2827993 - RNA, 19 nt, Artificial Sequence
  Description of Artificial Sequence: Synthetic oligonucleotide
cacucuucuugucccuuau

SEQ ID NO: 2827994 - RNA, 19 nt, Artificial Sequence
  Description of Artificial Sequence: Synthetic oligonucleotide
ccacgcucaaaaccaucca

SEQ ID NO: 2827995 - RNA, 19 nt, Artificial Sequence
  Description of Artificial Sequence: Synthetic oligonucleotide
cugccuccaccagcaguuc

SEQ ID NO: 2827996 - RNA, 19 nt, Artificial Sequence
  Description of Artificial Sequence: Synthetic oligonucleotide
ccucaugguucccauuucu

SEQ ID NO: 2827997 - RNA, 19 nt, Artificial Sequence
  Description of Artificial Sequence: Synthetic oligonucleotide
gccuuguuuaguucacguu

SEQ ID NO: 2827998 - RNA, 19 nt, Artificial Sequence
  Description of Artificial Sequence: Synthetic oligonucleotide
gccuguagcugcagacgac

SEQ ID NO: 2827999 - RNA, 19 nt, Artificial Sequence
  Description of Artificial Sequence: Synthetic oligonucleotide
ccugccuccaccagcaguu

SEQ ID NO: 2828000 - RNA, 19 nt, Artificial Sequence
  Description of Artificial Sequence: Synthetic oligonucleotide
guucuguuuucagcucaau

SEQ ID NO: 2828001 - RNA, 19 nt, Artificial Sequence
  Description of Artificial Sequence: Synthetic oligonucleotide
cccucuagcugcugcagcu

SEQ ID NO: 2828002 - RNA, 19 nt, Artificial Sequence
  Description of Artificial Sequence: Synthetic oligonucleotide
gagcuggcuggcaguuuua

SEQ ID NO: 2828003 - RNA, 19 nt, Artificial Sequence
  Description of Artificial Sequence: Synthetic oligonucleotide
gcucggauaugcucuugau

SEQ ID NO: 2828004 - RNA, 19 nt, Artificial Sequence
  Description of Artificial Sequence: Synthetic oligonucleotide
caagagcuggcuggcaguu

SEQ ID NO: 2828005 - RNA, 19 nt, Artificial Sequence
  Description of Artificial Sequence: Synthetic oligonucleotide
gcucgcucugcuucuuagu

SEQ ID NO: 2828006 - RNA, 19 nt, Artificial Sequence
  Description of Artificial Sequence: Synthetic oligonucleotide
ccuuuccuguaucuucugu

SEQ ID NO: 2828007 - RNA, 19 nt, Artificial Sequence
  Description of Artificial Sequence: Synthetic oligonucleotide
gcagacgacccugccucca

SEQ ID NO: 2828008 - RNA, 19 nt, Artificial Sequence
  Description of Artificial Sequence: Synthetic oligonucleotide
cuagcugcugcagcucguu

SEQ ID NO: 2828009 - RNA, 19 nt, Artificial Sequence
  Description of Artificial Sequence: Synthetic oligonucleotide
cagcuccaggauccugucu

SEQ ID NO: 2828010 - RNA, 19 nt, Artificial Sequence
  Description of Artificial Sequence: Synthetic oligonucleotide
cuggcucggauaugcucuu

SEQ ID NO: 2828011 - RNA, 19 nt, Artificial Sequence
  Description of Artificial Sequence: Synthetic oligonucleotide
cagcucgcucugcuucuua

SEQ ID NO: 2828012 - RNA, 19 nt, Artificial Sequence
  Description of Artificial Sequence: Synthetic oligonucleotide
cccaguccacucuucuugu

SEQ ID NO: 2828013 - RNA, 19 nt, Artificial Sequence
  Description of Artificial Sequence: Synthetic oligonucleotide
gcuggcaguuuuagcuucu

SEQ ID NO: 2828014 - RNA, 19 nt, Artificial Sequence
  Description of Artificial Sequence: Synthetic oligonucleotide
cgcucaaaaccauccaauu

SEQ ID NO: 2828015 - RNA, 19 nt, Artificial Sequence
  Description of Artificial Sequence: Synthetic oligonucleotide
ccucccaguccacucuucu

SEQ ID NO: 2828016 - RNA, 19 nt, Artificial Sequence
  Description of Artificial Sequence: Synthetic oligonucleotide
cuccaggauccugucugau

SEQ ID NO: 2828017 - RNA, 19 nt, Artificial Sequence
  Description of Artificial Sequence: Synthetic oligonucleotide
gguccacgcucaaaaccau

SEQ ID NO: 2828018 - RNA, 19 nt, Artificial Sequence
  Description of Artificial Sequence: Synthetic oligonucleotide
gccaccuuuccuguaucuu

SEQ ID NO: 2828019 - RNA, 19 nt, Artificial Sequence
  Description of Artificial Sequence: Synthetic oligonucleotide
gcagcucguucuucacauu

SEQ ID NO: 2828020 - RNA, 19 nt, Artificial Sequence
  Description of Artificial Sequence: Synthetic oligonucleotide
ccugguccagcuccaggau

SEQ ID NO: 2828021 - RNA, 19 nt, Artificial Sequence
  Description of Artificial Sequence: Synthetic oligonucleotide
gguccagcuccaggauccu

SEQ ID NO: 2828022 - RNA, 19 nt, Artificial Sequence
  Description of Artificial Sequence: Synthetic oligonucleotide
  modified_base (1)..(1): a, c, u, g, unknown or other
ncugucuaucacuaaaggu

SEQ ID NO: 2828023 - RNA, 19 nt, Artificial Sequence
  Description of Artificial Sequence: Synthetic oligonucleotide
uacuuaaaggagaaggccg

SEQ ID NO: 2828024 - RNA, 19 nt, Artificial Sequence
  Description of Artificial Sequence: Synthetic oligonucleotide
aacgcggccaagcaguucc

SEQ ID NO: 2828025 - RNA, 19 nt, Artificial Sequence
  Description of Artificial Sequence: Synthetic oligonucleotide
ucagacaucuccccaaacg

SEQ ID NO: 2828026 - RNA, 19 nt, Artificial Sequence
  Description of Artificial Sequence: Synthetic oligonucleotide
gucucgaaaacccucaggg

SEQ ID NO: 2828027 - RNA, 19 nt, Artificial Sequence
  Description of Artificial Sequence: Synthetic oligonucleotide
cuacaugucguacaggcgg

SEQ ID NO: 2828028 - RNA, 19 nt, Artificial Sequence
  Description of Artificial Sequence: Synthetic oligonucleotide
cuguacuuaaaggagaagg

SEQ ID NO: 2828029 - RNA, 19 nt, Artificial Sequence
  Description of Artificial Sequence: Synthetic oligonucleotide
cuuguugucuuucaugagc

SEQ ID NO: 2828030 - RNA, 19 nt, Artificial Sequence
  Description of Artificial Sequence: Synthetic oligonucleotide
uuuaauccccagcacuccg

SEQ ID NO: 2828031 - RNA, 19 nt, Artificial Sequence
  Description of Artificial Sequence: Synthetic oligonucleotide
uccuuguugucuuucauga

SEQ ID NO: 2828032 - RNA, 19 nt, Artificial Sequence
  Description of Artificial Sequence: Synthetic oligonucleotide
uccaguucuucuuugguca

SEQ ID NO: 2828033 - RNA, 19 nt, Artificial Sequence
  Description of Artificial Sequence: Synthetic oligonucleotide
cuggacuucacagagaaac

SEQ ID NO: 2828034 - RNA, 19 nt, Artificial Sequence
  Description of Artificial Sequence: Synthetic oligonucleotide
uuguugucuuucaugagcu

SEQ ID NO: 2828035 - RNA, 19 nt, Artificial Sequence
  Description of Artificial Sequence: Synthetic oligonucleotide
acuuaaaggagaaggccgc

SEQ ID NO: 2828036 - RNA, 19 nt, Artificial Sequence
  Description of Artificial Sequence: Synthetic oligonucleotide
uuaauccccagcacuccgg

SEQ ID NO: 2828037 - RNA, 19 nt, Artificial Sequence
  Description of Artificial Sequence: Synthetic oligonucleotide
guugucuuucaugagcugg

SEQ ID NO: 2828038 - RNA, 19 nt, Artificial Sequence
  Description of Artificial Sequence: Synthetic oligonucleotide
gucgcagucagacaucucc

SEQ ID NO: 2828039 - RNA, 19 nt, Artificial Sequence
  Description of Artificial Sequence: Synthetic oligonucleotide
gacagccuggacuucacag

SEQ ID NO: 2828040 - RNA, 19 nt, Artificial Sequence
  Description of Artificial Sequence: Synthetic oligonucleotide
aaacccucagggcugucag

SEQ ID NO: 2828041 - RNA, 19 nt, Artificial Sequence
  Description of Artificial Sequence: Synthetic oligonucleotide
ugucucgaaaacccucagg

SEQ ID NO: 2828042 - RNA, 19 nt, Artificial Sequence
  Description of Artificial Sequence: Synthetic oligonucleotide
uccugcaugucgcagucag

SEQ ID NO: 2828043 - RNA, 19 nt, Artificial Sequence
  Description of Artificial Sequence: Synthetic oligonucleotide
augccuuuaauccccagca

SEQ ID NO: 2828044 - RNA, 19 nt, Artificial Sequence
  Description of Artificial Sequence: Synthetic oligonucleotide
ucuuucugagcucucugcu

SEQ ID NO: 2828045 - RNA, 19 nt, Artificial Sequence
  Description of Artificial Sequence: Synthetic oligonucleotide
ucgaaaacccucagggcug

SEQ ID NO: 2828046 - RNA, 19 nt, Artificial Sequence
  Description of Artificial Sequence: Synthetic oligonucleotide
guacuuaaaggagaaggcc

SEQ ID NO: 2828047 - RNA, 19 nt, Artificial Sequence
  Description of Artificial Sequence: Synthetic oligonucleotide
uucuuucugagcucucugc

SEQ ID NO: 2828048 - RNA, 19 nt, Artificial Sequence
  Description of Artificial Sequence: Synthetic oligonucleotide
uugucuuucaugagcugga

SEQ ID NO: 2828049 - RNA, 19 nt, Artificial Sequence
  Description of Artificial Sequence: Synthetic oligonucleotide
cuggcuuccccucagcugc

SEQ ID NO: 2828050 - RNA, 19 nt, Artificial Sequence
  Description of Artificial Sequence: Synthetic oligonucleotide
uggacuucacagagaaacc

SEQ ID NO: 2828051 - RNA, 19 nt, Artificial Sequence
  Description of Artificial Sequence: Synthetic oligonucleotide
auccccagcacuccggagg

SEQ ID NO: 2828052 - RNA, 19 nt, Artificial Sequence
  Description of Artificial Sequence: Synthetic oligonucleotide
agcucucugcuccuccucc

SEQ ID NO: 2828053 - RNA, 19 nt, Artificial Sequence
  Description of Artificial Sequence: Synthetic oligonucleotide
uguacuggcuuccccucag

SEQ ID NO: 2828054 - RNA, 19 nt, Artificial Sequence
  Description of Artificial Sequence: Synthetic oligonucleotide
caugccuuuaauccccagc

SEQ ID NO: 2828055 - RNA, 19 nt, Artificial Sequence
  Description of Artificial Sequence: Synthetic oligonucleotide
ucucgaaaacccucagggc

SEQ ID NO: 2828056 - RNA, 19 nt, Artificial Sequence
  Description of Artificial Sequence: Synthetic oligonucleotide
uggaagauggcagccagcu

SEQ ID NO: 2828057 - RNA, 19 nt, Artificial Sequence
  Description of Artificial Sequence: Synthetic oligonucleotide
gagcugguccugcaugucg

SEQ ID NO: 2828058 - RNA, 19 nt, Artificial Sequence
  Description of Artificial Sequence: Synthetic oligonucleotide
aaaggagaaggccgcucca

SEQ ID NO: 2828059 - RNA, 19 nt, Artificial Sequence
  Description of Artificial Sequence: Synthetic oligonucleotide
uuucaugagcuggaagaug

SEQ ID NO: 2828060 - RNA, 19 nt, Artificial Sequence
  Description of Artificial Sequence: Synthetic oligonucleotide
ucgcagucagacaucuccc

SEQ ID NO: 2828061 - RNA, 19 nt, Artificial Sequence
  Description of Artificial Sequence: Synthetic oligonucleotide
cagggcuguacuuaaagga

SEQ ID NO: 2828062 - RNA, 19 nt, Artificial Sequence
  Description of Artificial Sequence: Synthetic oligonucleotide
augucguacaggcggagcu

SEQ ID NO: 2828063 - RNA, 19 nt, Artificial Sequence
  Description of Artificial Sequence: Synthetic oligonucleotide
gccuacaugucguacaggc

SEQ ID NO: 2828064 - RNA, 19 nt, Artificial Sequence
  Description of Artificial Sequence: Synthetic oligonucleotide
uucuuguacuggcuucccc

SEQ ID NO: 2828065 - RNA, 19 nt, Artificial Sequence
  Description of Artificial Sequence: Synthetic oligonucleotide
agggcuguacuuaaaggag

SEQ ID NO: 2828066 - RNA, 19 nt, Artificial Sequence
  Description of Artificial Sequence: Synthetic oligonucleotide
uacaugucguacaggcgga

SEQ ID NO: 2828067 - RNA, 19 nt, Artificial Sequence
  Description of Artificial Sequence: Synthetic oligonucleotide
ugggcgacaggccuacaug

SEQ ID NO: 2828068 - RNA, 19 nt, Artificial Sequence
  Description of Artificial Sequence: Synthetic oligonucleotide
uccauccucuuccucgggc

SEQ ID NO: 2828069 - RNA, 19 nt, Artificial Sequence
  Description of Artificial Sequence: Synthetic oligonucleotide
guacaggcggagcuggucc

SEQ ID NO: 2828070 - RNA, 19 nt, Artificial Sequence
  Description of Artificial Sequence: Synthetic oligonucleotide
ugucagggugcucuggguc

SEQ ID NO: 2828071 - RNA, 19 nt, Artificial Sequence
  Description of Artificial Sequence: Synthetic oligonucleotide
aaacgucuccuuguugucu

SEQ ID NO: 2828072 - RNA, 19 nt, Artificial Sequence
  Description of Artificial Sequence: Synthetic oligonucleotide
aggccuacaugucguacag

SEQ ID NO: 2828073 - RNA, 19 nt, Artificial Sequence
  Description of Artificial Sequence: Synthetic oligonucleotide
aacgucuccuuguugucuu

SEQ ID NO: 2828074 - RNA, 19 nt, Artificial Sequence
  Description of Artificial Sequence: Synthetic oligonucleotide
cuuuaauccccagcacucc

SEQ ID NO: 2828075 - RNA, 19 nt, Artificial Sequence
  Description of Artificial Sequence: Synthetic oligonucleotide
cugcaugucgcagucagac

SEQ ID NO: 2828076 - RNA, 19 nt, Artificial Sequence
  Description of Artificial Sequence: Synthetic oligonucleotide
uaauccccagcacuccgga

SEQ ID NO: 2828077 - RNA, 19 nt, Artificial Sequence
  Description of Artificial Sequence: Synthetic oligonucleotide
uguucuuucugagcucucu

SEQ ID NO: 2828078 - RNA, 19 nt, Artificial Sequence
  Description of Artificial Sequence: Synthetic oligonucleotide
aggagaaggccgcuccauc

SEQ ID NO: 2828079 - RNA, 19 nt, Artificial Sequence
  Description of Artificial Sequence: Synthetic oligonucleotide
aacccucagggcugucagg

SEQ ID NO: 2828080 - RNA, 19 nt, Artificial Sequence
  Description of Artificial Sequence: Synthetic oligonucleotide
ucuugcugggcgacaggcc

SEQ ID NO: 2828081 - RNA, 19 nt, Artificial Sequence
  Description of Artificial Sequence: Synthetic oligonucleotide
gucuuucaugagcuggaag

SEQ ID NO: 2828082 - RNA, 19 nt, Artificial Sequence
  Description of Artificial Sequence: Synthetic oligonucleotide
cuuucugagcucucugcuc

SEQ ID NO: 2828083 - RNA, 19 nt, Artificial Sequence
  Description of Artificial Sequence: Synthetic oligonucleotide
acuggcuuccccucagcug

SEQ ID NO: 2828084 - RNA, 19 nt, Artificial Sequence
  Description of Artificial Sequence: Synthetic oligonucleotide
guucuuucugagcucucug

SEQ ID NO: 2828085 - RNA, 19 nt, Artificial Sequence
  Description of Artificial Sequence: Synthetic oligonucleotide
acccucagggcugucaggg

SEQ ID NO: 2828086 - RNA, 19 nt, Artificial Sequence
  Description of Artificial Sequence: Synthetic oligonucleotide
aauccccagcacuccggag

SEQ ID NO: 2828087 - RNA, 19 nt, Artificial Sequence
  Description of Artificial Sequence: Synthetic oligonucleotide
uguugucuuucaugagcug

SEQ ID NO: 2828088 - RNA, 19 nt, Artificial Sequence
  Description of Artificial Sequence: Synthetic oligonucleotide
agcuguucuuucugagcuc

SEQ ID NO: 2828089 - RNA, 19 nt, Artificial Sequence
  Description of Artificial Sequence: Synthetic oligonucleotide
agacaucuccccaaacguc

SEQ ID NO: 2828090 - RNA, 19 nt, Artificial Sequence
  Description of Artificial Sequence: Synthetic oligonucleotide
ggucaggucuugcugggcg

SEQ ID NO: 2828091 - RNA, 19 nt, Artificial Sequence
  Description of Artificial Sequence: Synthetic oligonucleotide
agaaggccgcuccauccuc

SEQ ID NO: 2828092 - RNA, 19 nt, Artificial Sequence
  Description of Artificial Sequence: Synthetic oligonucleotide
agcugguccugcaugucgc

SEQ ID NO: 2828093 - RNA, 19 nt, Artificial Sequence
  Description of Artificial Sequence: Synthetic oligonucleotide
acuucacagagaaacccug

SEQ ID NO: 2828094 - RNA, 19 nt, Artificial Sequence
  Description of Artificial Sequence: Synthetic oligonucleotide
uacuggcuuccccucagcu

SEQ ID NO: 2828095 - RNA, 19 nt, Artificial Sequence
  Description of Artificial Sequence: Synthetic oligonucleotide
caucaucuucuuguacugg

SEQ ID NO: 2828096 - RNA, 19 nt, Artificial Sequence
  Description of Artificial Sequence: Synthetic oligonucleotide
cucgaaaacccucagggcu

SEQ ID NO: 2828097 - RNA, 19 nt, Artificial Sequence
  Description of Artificial Sequence: Synthetic oligonucleotide
uuaaaggagaaggccgcuc

SEQ ID NO: 2828098 - RNA, 19 nt, Artificial Sequence
  Description of Artificial Sequence: Synthetic oligonucleotide
uccccagcacuccggaggc

SEQ ID NO: 2828099 - RNA, 19 nt, Artificial Sequence
  Description of Artificial Sequence: Synthetic oligonucleotide
ugccuuuaauccccagcac

SEQ ID NO: 2828100 - RNA, 19 nt, Artificial Sequence
  Description of Artificial Sequence: Synthetic oligonucleotide
uuguacuggcuuccccuca

SEQ ID NO: 2828101 - RNA, 19 nt, Artificial Sequence
  Description of Artificial Sequence: Synthetic oligonucleotide
cuuguacuggcuuccccuc

SEQ ID NO: 2828102 - RNA, 19 nt, Artificial Sequence
  Description of Artificial Sequence: Synthetic oligonucleotide
ggacuucacagagaaaccc

SEQ ID NO: 2828103 - RNA, 19 nt, Artificial Sequence
  Description of Artificial Sequence: Synthetic oligonucleotide
agggcugucagggugcucu

SEQ ID NO: 2828104 - RNA, 19 nt, Artificial Sequence
  Description of Artificial Sequence: Synthetic oligonucleotide
acaggccuacaugucguac

SEQ ID NO: 2828105 - RNA, 19 nt, Artificial Sequence
  Description of Artificial Sequence: Synthetic oligonucleotide
gcgacaggccuacaugucg

SEQ ID NO: 2828106 - RNA, 19 nt, Artificial Sequence
  Description of Artificial Sequence: Synthetic oligonucleotide
gucguacaggcggagcugg

SEQ ID NO: 2828107 - RNA, 19 nt, Artificial Sequence
  Description of Artificial Sequence: Synthetic oligonucleotide
ugcaugucgcagucagaca

SEQ ID NO: 2828108 - RNA, 19 nt, Artificial Sequence
  Description of Artificial Sequence: Synthetic oligonucleotide
ugguccugcaugucgcagu

SEQ ID NO: 2828109 - RNA, 19 nt, Artificial Sequence
  Description of Artificial Sequence: Synthetic oligonucleotide
caaacgucuccuuguuguc

SEQ ID NO: 2828110 - RNA, 19 nt, Artificial Sequence
  Description of Artificial Sequence: Synthetic oligonucleotide
ugucguacaggcggagcug

SEQ ID NO: 2828111 - RNA, 19 nt, Artificial Sequence
  Description of Artificial Sequence: Synthetic oligonucleotide
gucuugcugggcgacaggc

SEQ ID NO: 2828112 - RNA, 19 nt, Artificial Sequence
  Description of Artificial Sequence: Synthetic oligonucleotide
cuggaagauggcagccagc

SEQ ID NO: 2828113 - RNA, 19 nt, Artificial Sequence
  Description of Artificial Sequence: Synthetic oligonucleotide
gacaucuccccaaacgucu

SEQ ID NO: 2828114 - RNA, 19 nt, Artificial Sequence
  Description of Artificial Sequence: Synthetic oligonucleotide
ccagggcuguacuuaaagg

SEQ ID NO: 2828115 - RNA, 19 nt, Artificial Sequence
  Description of Artificial Sequence: Synthetic oligonucleotide
gcugucagggugcucuggg

SEQ ID NO: 2828116 - RNA, 19 nt, Artificial Sequence
  Description of Artificial Sequence: Synthetic oligonucleotide
cuccccaaacgucuccuug

SEQ ID NO: 2828117 - RNA, 19 nt, Artificial Sequence
  Description of Artificial Sequence: Synthetic oligonucleotide
agucagacaucuccccaaa

SEQ ID NO: 2828118 - RNA, 19 nt, Artificial Sequence
  Description of Artificial Sequence: Synthetic oligonucleotide
gucagggugcucuggguca

SEQ ID NO: 2828119 - RNA, 19 nt, Artificial Sequence
  Description of Artificial Sequence: Synthetic oligonucleotide
guggccagcgccggcaacg

SEQ ID NO: 2828120 - RNA, 19 nt, Artificial Sequence
  Description of Artificial Sequence: Synthetic oligonucleotide
caugucgcagucagacauc

SEQ ID NO: 2828121 - RNA, 19 nt, Artificial Sequence
  Description of Artificial Sequence: Synthetic oligonucleotide
ccuacaugucguacaggcg

SEQ ID NO: 2828122 - RNA, 19 nt, Artificial Sequence
  Description of Artificial Sequence: Synthetic oligonucleotide
aaggagaaggccgcuccau

SEQ ID NO: 2828123 - RNA, 19 nt, Artificial Sequence
  Description of Artificial Sequence: Synthetic oligonucleotide
cuuccccucagcugcccag

SEQ ID NO: 2828124 - RNA, 19 nt, Artificial Sequence
  Description of Artificial Sequence: Synthetic oligonucleotide
uccccucagcugcccaggg

SEQ ID NO: 2828125 - RNA, 19 nt, Artificial Sequence
  Description of Artificial Sequence: Synthetic oligonucleotide
augucgcagucagacaucu

SEQ ID NO: 2828126 - RNA, 19 nt, Artificial Sequence
  Description of Artificial Sequence: Synthetic oligonucleotide
caugucguacaggcggagc

SEQ ID NO: 2828127 - RNA, 19 nt, Artificial Sequence
  Description of Artificial Sequence: Synthetic oligonucleotide
gagcuggaagauggcagcc

SEQ ID NO: 2828128 - RNA, 19 nt, Artificial Sequence
  Description of Artificial Sequence: Synthetic oligonucleotide
cugucucgaaaacccucag

SEQ ID NO: 2828129 - RNA, 19 nt, Artificial Sequence
  Description of Artificial Sequence: Synthetic oligonucleotide
ucgggcuccuccgugggug

SEQ ID NO: 2828130 - RNA, 19 nt, Artificial Sequence
  Description of Artificial Sequence: Synthetic oligonucleotide
uacaggcggagcugguccu

SEQ ID NO: 2828131 - RNA, 19 nt, Artificial Sequence
  Description of Artificial Sequence: Synthetic oligonucleotide
agcagcagggccagcgccg

SEQ ID NO: 2828132 - RNA, 19 nt, Artificial Sequence
  Description of Artificial Sequence: Synthetic oligonucleotide
ucagggugcucugggucag

SEQ ID NO: 2828133 - RNA, 19 nt, Artificial Sequence
  Description of Artificial Sequence: Synthetic oligonucleotide
caggccuacaugucguaca

SEQ ID NO: 2828134 - RNA, 19 nt, Artificial Sequence
  Description of Artificial Sequence: Synthetic oligonucleotide
ggugcucugggucaggucu

SEQ ID NO: 2828135 - RNA, 19 nt, Artificial Sequence
  Description of Artificial Sequence: Synthetic oligonucleotide
cagacaucuccccaaacgu

SEQ ID NO: 2828136 - RNA, 19 nt, Artificial Sequence
  Description of Artificial Sequence: Synthetic oligonucleotide
uggacagccuggacuucac

SEQ ID NO: 2828137 - RNA, 19 nt, Artificial Sequence
  Description of Artificial Sequence: Synthetic oligonucleotide
aggucuugcugggcgacag

SEQ ID NO: 2828138 - RNA, 19 nt, Artificial Sequence
  Description of Artificial Sequence: Synthetic oligonucleotide
agccagcuguucuuucuga

SEQ ID NO: 2828139 - RNA, 19 nt, Artificial Sequence
  Description of Artificial Sequence: Synthetic oligonucleotide
ccagcuguucuuucugagc

SEQ ID NO: 2828140 - RNA, 19 nt, Artificial Sequence
  Description of Artificial Sequence: Synthetic oligonucleotide
ugucuuucaugagcuggaa

SEQ ID NO: 2828141 - RNA, 19 nt, Artificial Sequence
  Description of Artificial Sequence: Synthetic oligonucleotide
aguuccuggacagccugga

SEQ ID NO: 2828142 - RNA, 19 nt, Artificial Sequence
  Description of Artificial Sequence: Synthetic oligonucleotide
cagcuguucuuucugagcu

SEQ ID NO: 2828143 - RNA, 19 nt, Artificial Sequence
  Description of Artificial Sequence: Synthetic oligonucleotide
ggccgcuccauccucuucc

SEQ ID NO: 2828144 - RNA, 19 nt, Artificial Sequence
  Description of Artificial Sequence: Synthetic oligonucleotide
cgcuccauccucuuccucg

SEQ ID NO: 2828145 - RNA, 19 nt, Artificial Sequence
  Description of Artificial Sequence: Synthetic oligonucleotide
cucucugcuccuccuccag

SEQ ID NO: 2828146 - RNA, 19 nt, Artificial Sequence
  Description of Artificial Sequence: Synthetic oligonucleotide
ggccaagcaguuccgccgg

SEQ ID NO: 2828147 - RNA, 19 nt, Artificial Sequence
  Description of Artificial Sequence: Synthetic oligonucleotide
gucuccuuguugucuuuca

SEQ ID NO: 2828148 - RNA, 19 nt, Artificial Sequence
  Description of Artificial Sequence: Synthetic oligonucleotide
ucaggucuugcugggcgac

SEQ ID NO: 2828149 - RNA, 19 nt, Artificial Sequence
  Description of Artificial Sequence: Synthetic oligonucleotide
cagccagcuguucuuucug

SEQ ID NO: 2828150 - RNA, 19 nt, Artificial Sequence
  Description of Artificial Sequence: Synthetic oligonucleotide
gucagacaucuccccaaac

SEQ ID NO: 2828151 - RNA, 19 nt, Artificial Sequence
  Description of Artificial Sequence: Synthetic oligonucleotide
uccuccguggguggccccg

SEQ ID NO: 2828152 - RNA, 19 nt, Artificial Sequence
  Description of Artificial Sequence: Synthetic oligonucleotide
uggguggccccgccccacg

SEQ ID NO: 2828153 - RNA, 19 nt, Artificial Sequence
  Description of Artificial Sequence: Synthetic oligonucleotide
ugcccagggcuguacuuaa

SEQ ID NO: 2828154 - RNA, 19 nt, Artificial Sequence
  Description of Artificial Sequence: Synthetic oligonucleotide
gccagcuguucuuucugag

SEQ ID NO: 2828155 - RNA, 19 nt, Artificial Sequence
  Description of Artificial Sequence: Synthetic oligonucleotide
cagucagacaucuccccaa

SEQ ID NO: 2828156 - RNA, 19 nt, Artificial Sequence
  Description of Artificial Sequence: Synthetic oligonucleotide
cuugcugggcgacaggccu

SEQ ID NO: 2828157 - RNA, 19 nt, Artificial Sequence
  Description of Artificial Sequence: Synthetic oligonucleotide
cccagggcuguacuuaaag

SEQ ID NO: 2828158 - RNA, 19 nt, Artificial Sequence
  Description of Artificial Sequence: Synthetic oligonucleotide
acaugucguacaggcggag

SEQ ID NO: 2828159 - RNA, 19 nt, Artificial Sequence
  Description of Artificial Sequence: Synthetic oligonucleotide
agcagcagccaggcgagca

SEQ ID NO: 2828160 - RNA, 19 nt, Artificial Sequence
  Description of Artificial Sequence: Synthetic oligonucleotide
agcgccguggccagcgccg

SEQ ID NO: 2828161 - RNA, 19 nt, Artificial Sequence
  Description of Artificial Sequence: Synthetic oligonucleotide
uccguggguggccccgccc

SEQ ID NO: 2828162 - RNA, 19 nt, Artificial Sequence
  Description of Artificial Sequence: Synthetic oligonucleotide
ccuuguugucuuucaugag

SEQ ID NO: 2828163 - RNA, 19 nt, Artificial Sequence
  Description of Artificial Sequence: Synthetic oligonucleotide
guacuggcuuccccucagc

SEQ ID NO: 2828164 - RNA, 19 nt, Artificial Sequence
  Description of Artificial Sequence: Synthetic oligonucleotide
cuucacagagaaacccugu

SEQ ID NO: 2828165 - RNA, 19 nt, Artificial Sequence
  Description of Artificial Sequence: Synthetic oligonucleotide
ccaaacgucuccuuguugu

SEQ ID NO: 2828166 - RNA, 19 nt, Artificial Sequence
  Description of Artificial Sequence: Synthetic oligonucleotide
gcaugucgcagucagacau

SEQ ID NO: 2828167 - RNA, 19 nt, Artificial Sequence
  Description of Artificial Sequence: Synthetic oligonucleotide
aaggccgcuccauccucuu

SEQ ID NO: 2828168 - RNA, 19 nt, Artificial Sequence
  Description of Artificial Sequence: Synthetic oligonucleotide
ucguacaggcggagcuggu

SEQ ID NO: 2828169 - RNA, 19 nt, Artificial Sequence
  Description of Artificial Sequence: Synthetic oligonucleotide
uggcuuccccucagcugcc

SEQ ID NO: 2828170 - RNA, 19 nt, Artificial Sequence
  Description of Artificial Sequence: Synthetic oligonucleotide
aggccgcuccauccucuuc

SEQ ID NO: 2828171 - RNA, 19 nt, Artificial Sequence
  Description of Artificial Sequence: Synthetic oligonucleotide
ugucgcagucagacaucuc

SEQ ID NO: 2828172 - RNA, 19 nt, Artificial Sequence
  Description of Artificial Sequence: Synthetic oligonucleotide
cugguccugcaugucgcag

SEQ ID NO: 2828173 - RNA, 19 nt, Artificial Sequence
  Description of Artificial Sequence: Synthetic oligonucleotide
ccugucucgaaaacccuca

SEQ ID NO: 2828174 - RNA, 19 nt, Artificial Sequence
  Description of Artificial Sequence: Synthetic oligonucleotide
cuguucuuucugagcucuc

SEQ ID NO: 2828175 - RNA, 19 nt, Artificial Sequence
  Description of Artificial Sequence: Synthetic oligonucleotide
ugcugggcgacaggccuac

SEQ ID NO: 2828176 - RNA, 19 nt, Artificial Sequence
  Description of Artificial Sequence: Synthetic oligonucleotide
ucugagcucucugcuccuc

SEQ ID NO: 2828177 - RNA, 19 nt, Artificial Sequence
  Description of Artificial Sequence: Synthetic oligonucleotide
gguccugcaugucgcaguc

SEQ ID NO: 2828178 - RNA, 19 nt, Artificial Sequence
  Description of Artificial Sequence: Synthetic oligonucleotide
uugcugggcgacaggccua

SEQ ID NO: 2828179 - RNA, 19 nt, Artificial Sequence
  Description of Artificial Sequence: Synthetic oligonucleotide
ggucuugcugggcgacagg

SEQ ID NO: 2828180 - RNA, 19 nt, Artificial Sequence
  Description of Artificial Sequence: Synthetic oligonucleotide
ccucagggcugucagggug

SEQ ID NO: 2828181 - RNA, 19 nt, Artificial Sequence
  Description of Artificial Sequence: Synthetic oligonucleotide
ucuccccaaacgucuccuu

SEQ ID NO: 2828182 - RNA, 19 nt, Artificial Sequence
  Description of Artificial Sequence: Synthetic oligonucleotide
cuuucaugagcuggaagau

SEQ ID NO: 2828183 - RNA, 19 nt, Artificial Sequence
  Description of Artificial Sequence: Synthetic oligonucleotide
ggcuguacuuaaaggagaa

SEQ ID NO: 2828184 - RNA, 19 nt, Artificial Sequence
  Description of Artificial Sequence: Synthetic oligonucleotide
gcggccaagcaguuccgcc

SEQ ID NO: 2828185 - RNA, 19 nt, Artificial Sequence
  Description of Artificial Sequence: Synthetic oligonucleotide
cggccaagcaguuccgccg

SEQ ID NO: 2828186 - RNA, 19 nt, Artificial Sequence
  Description of Artificial Sequence: Synthetic oligonucleotide
cuggacagccuggacuuca

SEQ ID NO: 2828187 - RNA, 19 nt, Artificial Sequence
  Description of Artificial Sequence: Synthetic oligonucleotide
gggcuguacuuaaaggaga

SEQ ID NO: 2828188 - RNA, 19 nt, Artificial Sequence
  Description of Artificial Sequence: Synthetic oligonucleotide
acgccgcagcagcagccag

SEQ ID NO: 2828189 - RNA, 19 nt, Artificial Sequence
  Description of Artificial Sequence: Synthetic oligonucleotide
gcggagcugguccugcaug

SEQ ID NO: 2828190 - RNA, 19 nt, Artificial Sequence
  Description of Artificial Sequence: Synthetic oligonucleotide
ucagggcugucagggugcu

SEQ ID NO: 2828191 - RNA, 19 nt, Artificial Sequence
  Description of Artificial Sequence: Synthetic oligonucleotide
caguucuucuuuggucauc

SEQ ID NO: 2828192 - RNA, 19 nt, Artificial Sequence
  Description of Artificial Sequence: Synthetic oligonucleotide
gacaggccuacaugucgua

SEQ ID NO: 2828193 - RNA, 19 nt, Artificial Sequence
  Description of Artificial Sequence: Synthetic oligonucleotide
cccugucucgaaaacccuc

SEQ ID NO: 2828194 - RNA, 19 nt, Artificial Sequence
  Description of Artificial Sequence: Synthetic oligonucleotide
uggccagcgccggcaacgc

SEQ ID NO: 2828195 - RNA, 19 nt, Artificial Sequence
  Description of Artificial Sequence: Synthetic oligonucleotide
agggugcucugggucaggu

SEQ ID NO: 2828196 - RNA, 19 nt, Artificial Sequence
  Description of Artificial Sequence: Synthetic oligonucleotide
caucuucuuguacuggcuu

SEQ ID NO: 2828197 - RNA, 19 nt, Artificial Sequence
  Description of Artificial Sequence: Synthetic oligonucleotide
ggcaacgcggccaagcagu

SEQ ID NO: 2828198 - RNA, 19 nt, Artificial Sequence
  Description of Artificial Sequence: Synthetic oligonucleotide
cucugggucaggucuugcu

SEQ ID NO: 2828199 - RNA, 19 nt, Artificial Sequence
  Description of Artificial Sequence: Synthetic oligonucleotide
gcuguucuuucugagcucu

SEQ ID NO: 2828200 - RNA, 19 nt, Artificial Sequence
  Description of Artificial Sequence: Synthetic oligonucleotide
gggcgacaggccuacaugu

SEQ ID NO: 2828201 - RNA, 19 nt, Artificial Sequence
  Description of Artificial Sequence: Synthetic oligonucleotide
gcaugccuuuaauccccag

SEQ ID NO: 2828202 - RNA, 19 nt, Artificial Sequence
  Description of Artificial Sequence: Synthetic oligonucleotide
ccaagcaguuccgccggcg

SEQ ID NO: 2828203 - RNA, 19 nt, Artificial Sequence
  Description of Artificial Sequence: Synthetic oligonucleotide
cccaaacgucuccuuguug

SEQ ID NO: 2828204 - RNA, 19 nt, Artificial Sequence
  Description of Artificial Sequence: Synthetic oligonucleotide
ggcugucagggugcucugg

SEQ ID NO: 2828205 - RNA, 19 nt, Artificial Sequence
  Description of Artificial Sequence: Synthetic oligonucleotide
aggcggagcugguccugca

SEQ ID NO: 2828206 - RNA, 19 nt, Artificial Sequence
  Description of Artificial Sequence: Synthetic oligonucleotide
cuuuggucaucaucuucuu

SEQ ID NO: 2828207 - RNA, 19 nt, Artificial Sequence
  Description of Artificial Sequence: Synthetic oligonucleotide
gaaggccgcuccauccucu

SEQ ID NO: 2828208 - RNA, 19 nt, Artificial Sequence
  Description of Artificial Sequence: Synthetic oligonucleotide
acgucuccuuguugucuuu

SEQ ID NO: 2828209 - RNA, 19 nt, Artificial Sequence
  Description of Artificial Sequence: Synthetic oligonucleotide
gguggccccgccccacgcc

SEQ ID NO: 2828210 - RNA, 19 nt, Artificial Sequence
  Description of Artificial Sequence: Synthetic oligonucleotide
gccggcaacgcggccaagc

SEQ ID NO: 2828211 - RNA, 19 nt, Artificial Sequence
  Description of Artificial Sequence: Synthetic oligonucleotide
acgcggccaagcaguuccg

SEQ ID NO: 2828212 - RNA, 19 nt, Artificial Sequence
  Description of Artificial Sequence: Synthetic oligonucleotide
cuccguggguggccccgcc

SEQ ID NO: 2828213 - RNA, 19 nt, Artificial Sequence
  Description of Artificial Sequence: Synthetic oligonucleotide
gcagccagcuguucuuucu

SEQ ID NO: 2828214 - RNA, 19 nt, Artificial Sequence
  Description of Artificial Sequence: Synthetic oligonucleotide
ccguggguggccccgcccc

SEQ ID NO: 2828215 - RNA, 19 nt, Artificial Sequence
  Description of Artificial Sequence: Synthetic oligonucleotide
ggacagccuggacuucaca

SEQ ID NO: 2828216 - RNA, 19 nt, Artificial Sequence
  Description of Artificial Sequence: Synthetic oligonucleotide
cuccuccguggguggcccc

SEQ ID NO: 2828217 - RNA, 19 nt, Artificial Sequence
  Description of Artificial Sequence: Synthetic oligonucleotide
cugcccagggcuguacuua

SEQ ID NO: 2828218 - RNA, 19 nt, Artificial Sequence
  Description of Artificial Sequence: Synthetic oligonucleotide
gcugguccugcaugucgca

SEQ ID NO: 2828219 - RNA, 19 nt, Artificial Sequence
  Description of Artificial Sequence: Synthetic oligonucleotide
cugucagggugcucugggu

SEQ ID NO: 2828220 - RNA, 19 nt, Artificial Sequence
  Description of Artificial Sequence: Synthetic oligonucleotide
caacgcggccaagcaguuc

SEQ ID NO: 2828221 - RNA, 19 nt, Artificial Sequence
  Description of Artificial Sequence: Synthetic oligonucleotide
ggcgacaggccuacauguc

SEQ ID NO: 2828222 - RNA, 19 nt, Artificial Sequence
  Description of Artificial Sequence: Synthetic oligonucleotide
cccacgccgcagcagcagc

SEQ ID NO: 2828223 - RNA, 19 nt, Artificial Sequence
  Description of Artificial Sequence: Synthetic oligonucleotide
ggccagcgccggcaacgcg

SEQ ID NO: 2828224 - RNA, 19 nt, Artificial Sequence
  Description of Artificial Sequence: Synthetic oligonucleotide
cugggcgacaggccuacau

SEQ ID NO: 2828225 - RNA, 19 nt, Artificial Sequence
  Description of Artificial Sequence: Synthetic oligonucleotide
cacgccgcagcagcagcca

SEQ ID NO: 2828226 - RNA, 19 nt, Artificial Sequence
  Description of Artificial Sequence: Synthetic oligonucleotide
gggcugucagggugcucug

SEQ ID NO: 2828227 - RNA, 19 nt, Artificial Sequence
  Description of Artificial Sequence: Synthetic oligonucleotide
gggucaggucuugcugggc

SEQ ID NO: 2828228 - RNA, 19 nt, Artificial Sequence
  Description of Artificial Sequence: Synthetic oligonucleotide
gccaagcaguuccgccggc

SEQ ID NO: 2828229 - RNA, 19 nt, Artificial Sequence
  Description of Artificial Sequence: Synthetic oligonucleotide
gcuccuccguggguggccc

SEQ ID NO: 2828230 - RNA, 19 nt, Artificial Sequence
  Description of Artificial Sequence: Synthetic oligonucleotide
ggagcugguccugcauguc

SEQ ID NO: 2828231 - RNA, 19 nt, Artificial Sequence
  Description of Artificial Sequence: Synthetic oligonucleotide
ggcuccuccguggguggcc

SEQ ID NO: 2828232 - RNA, 19 nt, Artificial Sequence
  Description of Artificial Sequence: Synthetic oligonucleotide
cagcugcccagggcuguac

SEQ ID NO: 2828233 - RNA, 19 nt, Artificial Sequence
  Description of Artificial Sequence: Synthetic oligonucleotide
cgccgcagcagcagccagg

SEQ ID NO: 2828234 - RNA, 19 nt, Artificial Sequence
  Description of Artificial Sequence: Synthetic oligonucleotide
cgccccacgccgcagcagc

SEQ ID NO: 2828235 - RNA, 19 nt, Artificial Sequence
  Description of Artificial Sequence: Synthetic oligonucleotide
guggguggccccgccccac

SEQ ID NO: 2828236 - RNA, 19 nt, Artificial Sequence
  Description of Artificial Sequence: Synthetic oligonucleotide
ccccucagcugcccagggc

SEQ ID NO: 2828237 - RNA, 19 nt, Artificial Sequence
  Description of Artificial Sequence: Synthetic oligonucleotide
guccugcaugucgcaguca

SEQ ID NO: 2828238 - RNA, 19 nt, Artificial Sequence
  Description of Artificial Sequence: Synthetic oligonucleotide
cuuccucgggcuccuccgu

SEQ ID NO: 2828239 - RNA, 19 nt, Artificial Sequence
  Description of Artificial Sequence: Synthetic oligonucleotide
ggguggccccgccccacgc

SEQ ID NO: 2828240 - RNA, 19 nt, Artificial Sequence
  Description of Artificial Sequence: Synthetic oligonucleotide
gcucugggucaggucuugc

SEQ ID NO: 2828241 - RNA, 19 nt, Artificial Sequence
  Description of Artificial Sequence: Synthetic oligonucleotide
cagcagcagccaggcgagc

SEQ ID NO: 2828242 - RNA, 19 nt, Artificial Sequence
  Description of Artificial Sequence: Synthetic oligonucleotide
ccggcaacgcggccaagca

SEQ ID NO: 2828243 - RNA, 19 nt, Artificial Sequence
  Description of Artificial Sequence: Synthetic oligonucleotide
cggcaacgcggccaagcag

SEQ ID NO: 2828244 - RNA, 19 nt, Artificial Sequence
  Description of Artificial Sequence: Synthetic oligonucleotide
cguacaggcggagcugguc

SEQ ID NO: 2828245 - RNA, 19 nt, Artificial Sequence
  Description of Artificial Sequence: Synthetic oligonucleotide
ggcuuccccucagcugccc

SEQ ID NO: 2828246 - RNA, 19 nt, Artificial Sequence
  Description of Artificial Sequence: Synthetic oligonucleotide
cagcgccggcaacgcggcc

SEQ ID NO: 2828247 - RNA, 19 nt, Artificial Sequence
  Description of Artificial Sequence: Synthetic oligonucleotide
cgggcuccuccgugggugg

SEQ ID NO: 2828248 - RNA, 19 nt, Artificial Sequence
  Description of Artificial Sequence: Synthetic oligonucleotide
cucagcugcccagggcugu

SEQ ID NO: 2828249 - RNA, 19 nt, Artificial Sequence
  Description of Artificial Sequence: Synthetic oligonucleotide
ccuggacuucacagagaaa

SEQ ID NO: 2828250 - RNA, 19 nt, Artificial Sequence
  Description of Artificial Sequence: Synthetic oligonucleotide
gccguggccagcgccggca

SEQ ID NO: 2828251 - RNA, 19 nt, Artificial Sequence
  Description of Artificial Sequence: Synthetic oligonucleotide
cgucuccuuguugucuuuc

SEQ ID NO: 2828252 - RNA, 19 nt, Artificial Sequence
  Description of Artificial Sequence: Synthetic oligonucleotide
gccaggcgagcagcagggc

SEQ ID NO: 2828253 - RNA, 19 nt, Artificial Sequence
  Description of Artificial Sequence: Synthetic oligonucleotide
cgacaggccuacaugucgu

SEQ ID NO: 2828254 - RNA, 19 nt, Artificial Sequence
  Description of Artificial Sequence: Synthetic oligonucleotide
gcgccguggccagcgccgg

SEQ ID NO: 2828255 - RNA, 19 nt, Artificial Sequence
  Description of Artificial Sequence: Synthetic oligonucleotide
ccccacgccgcagcagcag

SEQ ID NO: 2828256 - RNA, 19 nt, Artificial Sequence
  Description of Artificial Sequence: Synthetic oligonucleotide
gggcuccuccguggguggc

SEQ ID NO: 2828257 - RNA, 19 nt, Artificial Sequence
  Description of Artificial Sequence: Synthetic oligonucleotide
ccuggacagccuggacuuc

SEQ ID NO: 2828258 - RNA, 19 nt, Artificial Sequence
  Description of Artificial Sequence: Synthetic oligonucleotide
ggcggagcugguccugcau

SEQ ID NO: 2828259 - RNA, 19 nt, Artificial Sequence
  Description of Artificial Sequence: Synthetic oligonucleotide
ccagcgccguggccagcgc

SEQ ID NO: 2828260 - RNA, 19 nt, Artificial Sequence
  Description of Artificial Sequence: Synthetic oligonucleotide
ccccgccccacgccgcagc

SEQ ID NO: 2828261 - RNA, 19 nt, Artificial Sequence
  Description of Artificial Sequence: Synthetic oligonucleotide
cucgggcuccuccgugggu

SEQ ID NO: 2828262 - RNA, 19 nt, Artificial Sequence
  Description of Artificial Sequence: Synthetic oligonucleotide
ccgcagcagcagccaggcg

SEQ ID NO: 2828263 - RNA, 19 nt, Artificial Sequence
  Description of Artificial Sequence: Synthetic oligonucleotide
gcgccggcaacgcggccaa

SEQ ID NO: 2828264 - RNA, 19 nt, Artificial Sequence
  Description of Artificial Sequence: Synthetic oligonucleotide
ccuccguggguggccccgc

SEQ ID NO: 2828265 - RNA, 19 nt, Artificial Sequence
  Description of Artificial Sequence: Synthetic oligonucleotide
cgcggccaagcaguuccgc

SEQ ID NO: 2828266 - RNA, 19 nt, Artificial Sequence
  Description of Artificial Sequence: Synthetic oligonucleotide
cggagcugguccugcaugu

SEQ ID NO: 2828267 - RNA, 19 nt, Artificial Sequence
  Description of Artificial Sequence: Synthetic oligonucleotide
ggccccgccccacgccgca

SEQ ID NO: 2828268 - RNA, 19 nt, Artificial Sequence
  Description of Artificial Sequence: Synthetic oligonucleotide
cguggccagcgccggcaac

SEQ ID NO: 2828269 - RNA, 19 nt, Artificial Sequence
  Description of Artificial Sequence: Synthetic oligonucleotide
gcccagggcuguacuuaaa

SEQ ID NO: 2828270 - RNA, 19 nt, Artificial Sequence
  Description of Artificial Sequence: Synthetic oligonucleotide
ccccaaacgucuccuuguu

SEQ ID NO: 2828271 - RNA, 19 nt, Artificial Sequence
  Description of Artificial Sequence: Synthetic oligonucleotide
gccccacgccgcagcagca

SEQ ID NO: 2828272 - RNA, 19 nt, Artificial Sequence
  Description of Artificial Sequence: Synthetic oligonucleotide
ccgccccacgccgcagcag

SEQ ID NO: 2828273 - RNA, 19 nt, Artificial Sequence
  Description of Artificial Sequence: Synthetic oligonucleotide
cgaaaacccucagggcugu

SEQ ID NO: 2828274 - RNA, 19 nt, Artificial Sequence
  Description of Artificial Sequence: Synthetic oligonucleotide
cccgccccacgccgcagca

SEQ ID NO: 2828275 - RNA, 19 nt, Artificial Sequence
  Description of Artificial Sequence: Synthetic oligonucleotide
gcaacgcggccaagcaguu

SEQ ID NO: 2828276 - RNA, 19 nt, Artificial Sequence
  Description of Artificial Sequence: Synthetic oligonucleotide
cguggguggccccgcccca

SEQ ID NO: 2828277 - RNA, 19 nt, Artificial Sequence
  Description of Artificial Sequence: Synthetic oligonucleotide
gccccgccccacgccgcag

SEQ ID NO: 2828278 - RNA, 19 nt, Artificial Sequence
  Description of Artificial Sequence: Synthetic oligonucleotide
gcugggcgacaggccuaca

SEQ ID NO: 2828279 - RNA, 19 nt, Artificial Sequence
  Description of Artificial Sequence: Synthetic oligonucleotide
cgccguggccagcgccggc

SEQ ID NO: 2828280 - RNA, 19 nt, Artificial Sequence
  Description of Artificial Sequence: Synthetic oligonucleotide
ccguggccagcgccggcaa

SEQ ID NO: 2828281 - RNA, 19 nt, Artificial Sequence
  Description of Artificial Sequence: Synthetic oligonucleotide
cgccggcaacgcggccaag

SEQ ID NO: 2828282 - RNA, 19 nt, Artificial Sequence
  Description of Artificial Sequence: Synthetic oligonucleotide
aaaguuacaggcuuuaaac

SEQ ID NO: 2828283 - RNA, 19 nt, Artificial Sequence
  Description of Artificial Sequence: Synthetic oligonucleotide
aguaauagaggcuucaagc

SEQ ID NO: 2828284 - RNA, 19 nt, Artificial Sequence
  Description of Artificial Sequence: Synthetic oligonucleotide
uuuauugucauuuauaauc

SEQ ID NO: 2828285 - RNA, 19 nt, Artificial Sequence
  Description of Artificial Sequence: Synthetic oligonucleotide
gucauuuauaaucagaugg

SEQ ID NO: 2828286 - RNA, 19 nt, Artificial Sequence
  Description of Artificial Sequence: Synthetic oligonucleotide
acaacuacaaguuugucuc

SEQ ID NO: 2828287 - RNA, 19 nt, Artificial Sequence
  Description of Artificial Sequence: Synthetic oligonucleotide
aaaagguuagaauuaauau

SEQ ID NO: 2828288 - RNA, 19 nt, Artificial Sequence
  Description of Artificial Sequence: Synthetic oligonucleotide
uagaauuaauauuuuauug

SEQ ID NO: 2828289 - RNA, 19 nt, Artificial Sequence
  Description of Artificial Sequence: Synthetic oligonucleotide
aauucacccaccuuuugac

SEQ ID NO: 2828290 - RNA, 19 nt, Artificial Sequence
  Description of Artificial Sequence: Synthetic oligonucleotide
uauaaaacuggaagguugg

SEQ ID NO: 2828291 - RNA, 19 nt, Artificial Sequence
  Description of Artificial Sequence: Synthetic oligonucleotide
ucuacuucaaggaacacga

SEQ ID NO: 2828292 - RNA, 19 nt, Artificial Sequence
  Description of Artificial Sequence: Synthetic oligonucleotide
uuauaaaacuggaagguug

SEQ ID NO: 2828293 - RNA, 19 nt, Artificial Sequence
  Description of Artificial Sequence: Synthetic oligonucleotide
agaauuaauauuuuauugu

SEQ ID NO: 2828294 - RNA, 19 nt, Artificial Sequence
  Description of Artificial Sequence: Synthetic oligonucleotide
uuuugcaugguccacacca

SEQ ID NO: 2828295 - RNA, 19 nt, Artificial Sequence
  Description of Artificial Sequence: Synthetic oligonucleotide
uuuauaaucagauggcagu

SEQ ID NO: 2828296 - RNA, 19 nt, Artificial Sequence
  Description of Artificial Sequence: Synthetic oligonucleotide
uucacagagggaaugaaag

SEQ ID NO: 2828297 - RNA, 19 nt, Artificial Sequence
  Description of Artificial Sequence: Synthetic oligonucleotide
aaguuugucucccgcagcc

SEQ ID NO: 2828298 - RNA, 19 nt, Artificial Sequence
  Description of Artificial Sequence: Synthetic oligonucleotide
ucauuuauaaucagauggc

SEQ ID NO: 2828299 - RNA, 19 nt, Artificial Sequence
  Description of Artificial Sequence: Synthetic oligonucleotide
uuauugucauuuauaauca

SEQ ID NO: 2828300 - RNA, 19 nt, Artificial Sequence
  Description of Artificial Sequence: Synthetic oligonucleotide
uuugacuucacacucugca

SEQ ID NO: 2828301 - RNA, 19 nt, Artificial Sequence
  Description of Artificial Sequence: Synthetic oligonucleotide
aaagguuagaauuaauauu

SEQ ID NO: 2828302 - RNA, 19 nt, Artificial Sequence
  Description of Artificial Sequence: Synthetic oligonucleotide
acaggcuuuaaacagcugg

SEQ ID NO: 2828303 - RNA, 19 nt, Artificial Sequence
  Description of Artificial Sequence: Synthetic oligonucleotide
uuucuguaggaucggaugg

SEQ ID NO: 2828304 - RNA, 19 nt, Artificial Sequence
  Description of Artificial Sequence: Synthetic oligonucleotide
aguuacaggcuuuaaacag

SEQ ID NO: 2828305 - RNA, 19 nt, Artificial Sequence
  Description of Artificial Sequence: Synthetic oligonucleotide
ugaucauuuugcauggucc

SEQ ID NO: 2828306 - RNA, 19 nt, Artificial Sequence
  Description of Artificial Sequence: Synthetic oligonucleotide
agaggcuucaagcuuuucc

SEQ ID NO: 2828307 - RNA, 19 nt, Artificial Sequence
  Description of Artificial Sequence: Synthetic oligonucleotide
uuuuauaaaacuggaaggu

SEQ ID NO: 2828308 - RNA, 19 nt, Artificial Sequence
  Description of Artificial Sequence: Synthetic oligonucleotide
uaaaagguuagaauuaaua

SEQ ID NO: 2828309 - RNA, 19 nt, Artificial Sequence
  Description of Artificial Sequence: Synthetic oligonucleotide
ugcagcaacauccuggcag

SEQ ID NO: 2828310 - RNA, 19 nt, Artificial Sequence
  Description of Artificial Sequence: Synthetic oligonucleotide
uguaggaucggauggaagc

SEQ ID NO: 2828311 - RNA, 19 nt, Artificial Sequence
  Description of Artificial Sequence: Synthetic oligonucleotide
caaacucaguaauagaggc

SEQ ID NO: 2828312 - RNA, 19 nt, Artificial Sequence
  Description of Artificial Sequence: Synthetic oligonucleotide
aaaacuggaagguuggcau

SEQ ID NO: 2828313 - RNA, 19 nt, Artificial Sequence
  Description of Artificial Sequence: Synthetic oligonucleotide
aacauccuggcagucaucc

SEQ ID NO: 2828314 - RNA, 19 nt, Artificial Sequence
  Description of Artificial Sequence: Synthetic oligonucleotide
auaaucagauggcaguugg

SEQ ID NO: 2828315 - RNA, 19 nt, Artificial Sequence
  Description of Artificial Sequence: Synthetic oligonucleotide
aagggcuugaucauuuugc

SEQ ID NO: 2828316 - RNA, 19 nt, Artificial Sequence
  Description of Artificial Sequence: Synthetic oligonucleotide
auccacaucuacuucaagg

SEQ ID NO: 2828317 - RNA, 19 nt, Artificial Sequence
  Description of Artificial Sequence: Synthetic oligonucleotide
ucaagcuuuuccuuguuag

SEQ ID NO: 2828318 - RNA, 19 nt, Artificial Sequence
  Description of Artificial Sequence: Synthetic oligonucleotide
ucaaggaacacgacacugg

SEQ ID NO: 2828319 - RNA, 19 nt, Artificial Sequence
  Description of Artificial Sequence: Synthetic oligonucleotide
uugucauuuauaaucagau

SEQ ID NO: 2828320 - RNA, 19 nt, Artificial Sequence
  Description of Artificial Sequence: Synthetic oligonucleotide
uuagaauuaauauuuuauu

SEQ ID NO: 2828321 - RNA, 19 nt, Artificial Sequence
  Description of Artificial Sequence: Synthetic oligonucleotide
aaaaguuacaggcuuuaaa

SEQ ID NO: 2828322 - RNA, 19 nt, Artificial Sequence
  Description of Artificial Sequence: Synthetic oligonucleotide
ugagaauucacccaccuuu

SEQ ID NO: 2828323 - RNA, 19 nt, Artificial Sequence
  Description of Artificial Sequence: Synthetic oligonucleotide
aagcuuuuccuuguuagcg

SEQ ID NO: 2828324 - RNA, 19 nt, Artificial Sequence
  Description of Artificial Sequence: Synthetic oligonucleotide
caugauuaggcaaacucag

SEQ ID NO: 2828325 - RNA, 19 nt, Artificial Sequence
  Description of Artificial Sequence: Synthetic oligonucleotide
caugcauuugacuucacac

SEQ ID NO: 2828326 - RNA, 19 nt, Artificial Sequence
  Description of Artificial Sequence: Synthetic oligonucleotide
acuucaaggaacacgacac

SEQ ID NO: 2828327 - RNA, 19 nt, Artificial Sequence
  Description of Artificial Sequence: Synthetic oligonucleotide
aacuacaaguuugucuccc

SEQ ID NO: 2828328 - RNA, 19 nt, Artificial Sequence
  Description of Artificial Sequence: Synthetic oligonucleotide
aaguuacaggcuuuaaaca

SEQ ID NO: 2828329 - RNA, 19 nt, Artificial Sequence
  Description of Artificial Sequence: Synthetic oligonucleotide
aucggauggaagcggaucc

SEQ ID NO: 2828330 - RNA, 19 nt, Artificial Sequence
  Description of Artificial Sequence: Synthetic oligonucleotide
agcuucaccauuuuggcug

SEQ ID NO: 2828331 - RNA, 19 nt, Artificial Sequence
  Description of Artificial Sequence: Synthetic oligonucleotide
aauuaauauuuuauuguca

SEQ ID NO: 2828332 - RNA, 19 nt, Artificial Sequence
  Description of Artificial Sequence: Synthetic oligonucleotide
agcgccugagaauucaccc

SEQ ID NO: 2828333 - RNA, 19 nt, Artificial Sequence
  Description of Artificial Sequence: Synthetic oligonucleotide
aacuggaagguuggcaugc

SEQ ID NO: 2828334 - RNA, 19 nt, Artificial Sequence
  Description of Artificial Sequence: Synthetic oligonucleotide
ugaaaagcuuccuugcucu

SEQ ID NO: 2828335 - RNA, 19 nt, Artificial Sequence
  Description of Artificial Sequence: Synthetic oligonucleotide
ugagaaguccacaacuaca

SEQ ID NO: 2828336 - RNA, 19 nt, Artificial Sequence
  Description of Artificial Sequence: Synthetic oligonucleotide
uccacaucuacuucaagga

SEQ ID NO: 2828337 - RNA, 19 nt, Artificial Sequence
  Description of Artificial Sequence: Synthetic oligonucleotide
cugguuauguuuuccaggc

SEQ ID NO: 2828338 - RNA, 19 nt, Artificial Sequence
  Description of Artificial Sequence: Synthetic oligonucleotide
cagagggaaugaaagaagg

SEQ ID NO: 2828339 - RNA, 19 nt, Artificial Sequence
  Description of Artificial Sequence: Synthetic oligonucleotide
uacuucaaggaacacgaca

SEQ ID NO: 2828340 - RNA, 19 nt, Artificial Sequence
  Description of Artificial Sequence: Synthetic oligonucleotide
ugauuaggcaaacucagua

SEQ ID NO: 2828341 - RNA, 19 nt, Artificial Sequence
  Description of Artificial Sequence: Synthetic oligonucleotide
uuaaacagcugguggcugg

SEQ ID NO: 2828342 - RNA, 19 nt, Artificial Sequence
  Description of Artificial Sequence: Synthetic oligonucleotide
agcuuuuccuuguuagcgc

SEQ ID NO: 2828343 - RNA, 19 nt, Artificial Sequence
  Description of Artificial Sequence: Synthetic oligonucleotide
uaggcaaacucaguaauag

SEQ ID NO: 2828344 - RNA, 19 nt, Artificial Sequence
  Description of Artificial Sequence: Synthetic oligonucleotide
ugacuucacacucugcagc

SEQ ID NO: 2828345 - RNA, 19 nt, Artificial Sequence
  Description of Artificial Sequence: Synthetic oligonucleotide
ugcauuugacuucacacuc

SEQ ID NO: 2828346 - RNA, 19 nt, Artificial Sequence
  Description of Artificial Sequence: Synthetic oligonucleotide
gagggaaugaaagaagggc

SEQ ID NO: 2828347 - RNA, 19 nt, Artificial Sequence
  Description of Artificial Sequence: Synthetic oligonucleotide
aagguuggcaugcauuuga

SEQ ID NO: 2828348 - RNA, 19 nt, Artificial Sequence
  Description of Artificial Sequence: Synthetic oligonucleotide
aaaagcuuccuugcucucg

SEQ ID NO: 2828349 - RNA, 19 nt, Artificial Sequence
  Description of Artificial Sequence: Synthetic oligonucleotide
uuuaaaagguuagaauuaa

SEQ ID NO: 2828350 - RNA, 19 nt, Artificial Sequence
  Description of Artificial Sequence: Synthetic oligonucleotide
auuuauaaucagauggcag

SEQ ID NO: 2828351 - RNA, 19 nt, Artificial Sequence
  Description of Artificial Sequence: Synthetic oligonucleotide
uucacccaccuuuugaccc

SEQ ID NO: 2828352 - RNA, 19 nt, Artificial Sequence
  Description of Artificial Sequence: Synthetic oligonucleotide
ugucauuuauaaucagaug

SEQ ID NO: 2828353 - RNA, 19 nt, Artificial Sequence
  Description of Artificial Sequence: Synthetic oligonucleotide
cucugcagcaacauccugg

SEQ ID NO: 2828354 - RNA, 19 nt, Artificial Sequence
  Description of Artificial Sequence: Synthetic oligonucleotide
uuccaggccaugauuaggc

SEQ ID NO: 2828355 - RNA, 19 nt, Artificial Sequence
  Description of Artificial Sequence: Synthetic oligonucleotide
auucacccaccuuuugacc

SEQ ID NO: 2828356 - RNA, 19 nt, Artificial Sequence
  Description of Artificial Sequence: Synthetic oligonucleotide
aaucagauggcaguugggu

SEQ ID NO: 2828357 - RNA, 19 nt, Artificial Sequence
  Description of Artificial Sequence: Synthetic oligonucleotide
guuucuguaggaucggaug

SEQ ID NO: 2828358 - RNA, 19 nt, Artificial Sequence
  Description of Artificial Sequence: Synthetic oligonucleotide
aggaacacgacacuggaau

SEQ ID NO: 2828359 - RNA, 19 nt, Artificial Sequence
  Description of Artificial Sequence: Synthetic oligonucleotide
uuacaggcuuuaaacagcu

SEQ ID NO: 2828360 - RNA, 19 nt, Artificial Sequence
  Description of Artificial Sequence: Synthetic oligonucleotide
augaaagaagggcuugauc

SEQ ID NO: 2828361 - RNA, 19 nt, Artificial Sequence
  Description of Artificial Sequence: Synthetic oligonucleotide
aucuacuucaaggaacacg

SEQ ID NO: 2828362 - RNA, 19 nt, Artificial Sequence
  Description of Artificial Sequence: Synthetic oligonucleotide
uucuccacacuucauauuu

SEQ ID NO: 2828363 - RNA, 19 nt, Artificial Sequence
  Description of Artificial Sequence: Synthetic oligonucleotide
auuaggcaaacucaguaau

SEQ ID NO: 2828364 - RNA, 19 nt, Artificial Sequence
  Description of Artificial Sequence: Synthetic oligonucleotide
accauuuuggcugucgcgg

SEQ ID NO: 2828365 - RNA, 19 nt, Artificial Sequence
  Description of Artificial Sequence: Synthetic oligonucleotide
uauugucauuuauaaucag

SEQ ID NO: 2828366 - RNA, 19 nt, Artificial Sequence
  Description of Artificial Sequence: Synthetic oligonucleotide
acaaguuugucucccgcag

SEQ ID NO: 2828367 - RNA, 19 nt, Artificial Sequence
  Description of Artificial Sequence: Synthetic oligonucleotide
aacucaguaauagaggcuu

SEQ ID NO: 2828368 - RNA, 19 nt, Artificial Sequence
  Description of Artificial Sequence: Synthetic oligonucleotide
auauuuuauugucauuuau

SEQ ID NO: 2828369 - RNA, 19 nt, Artificial Sequence
  Description of Artificial Sequence: Synthetic oligonucleotide
acgaguuucuguaggaucg

SEQ ID NO: 2828370 - RNA, 19 nt, Artificial Sequence
  Description of Artificial Sequence: Synthetic oligonucleotide
ggcuugaucauuuugcaug

SEQ ID NO: 2828371 - RNA, 19 nt, Artificial Sequence
  Description of Artificial Sequence: Synthetic oligonucleotide
uuuuauugucauuuauaau

SEQ ID NO: 2828372 - RNA, 19 nt, Artificial Sequence
  Description of Artificial Sequence: Synthetic oligonucleotide
aaagcuuccuugcucucga

SEQ ID NO: 2828373 - RNA, 19 nt, Artificial Sequence
  Description of Artificial Sequence: Synthetic oligonucleotide
uccacaacuacaaguuugu

SEQ ID NO: 2828374 - RNA, 19 nt, Artificial Sequence
  Description of Artificial Sequence: Synthetic oligonucleotide
uugacuucacacucugcag

SEQ ID NO: 2828375 - RNA, 19 nt, Artificial Sequence
  Description of Artificial Sequence: Synthetic oligonucleotide
uccugaaaagcuuccuugc

SEQ ID NO: 2828376 - RNA, 19 nt, Artificial Sequence
  Description of Artificial Sequence: Synthetic oligonucleotide
uaaaacuggaagguuggca

SEQ ID NO: 2828377 - RNA, 19 nt, Artificial Sequence
  Description of Artificial Sequence: Synthetic oligonucleotide
uugaucauuuugcaugguc

SEQ ID NO: 2828378 - RNA, 19 nt, Artificial Sequence
  Description of Artificial Sequence: Synthetic oligonucleotide
augcauuugacuucacacu

SEQ ID NO: 2828379 - RNA, 19 nt, Artificial Sequence
  Description of Artificial Sequence: Synthetic oligonucleotide
gaucauuuugcauggucca

SEQ ID NO: 2828380 - RNA, 19 nt, Artificial Sequence
  Description of Artificial Sequence: Synthetic oligonucleotide
aaacuggaagguuggcaug

SEQ ID NO: 2828381 - RNA, 19 nt, Artificial Sequence
  Description of Artificial Sequence: Synthetic oligonucleotide
aaccacacgaguuucugua

SEQ ID NO: 2828382 - RNA, 19 nt, Artificial Sequence
  Description of Artificial Sequence: Synthetic oligonucleotide
uucaaggaacacgacacug

SEQ ID NO: 2828383 - RNA, 19 nt, Artificial Sequence
  Description of Artificial Sequence: Synthetic oligonucleotide
uuucacagagggaaugaaa

SEQ ID NO: 2828384 - RNA, 19 nt, Artificial Sequence
  Description of Artificial Sequence: Synthetic oligonucleotide
uuuuccaggccaugauuag

SEQ ID NO: 2828385 - RNA, 19 nt, Artificial Sequence
  Description of Artificial Sequence: Synthetic oligonucleotide
acuacaaguuugucucccg

SEQ ID NO: 2828386 - RNA, 19 nt, Artificial Sequence
  Description of Artificial Sequence: Synthetic oligonucleotide
gauuaggcaaacucaguaa

SEQ ID NO: 2828387 - RNA, 19 nt, Artificial Sequence
  Description of Artificial Sequence: Synthetic oligonucleotide
uaauagaggcuucaagcuu

SEQ ID NO: 2828388 - RNA, 19 nt, Artificial Sequence
  Description of Artificial Sequence: Synthetic oligonucleotide
uauguuuuccaggccauga

SEQ ID NO: 2828389 - RNA, 19 nt, Artificial Sequence
  Description of Artificial Sequence: Synthetic oligonucleotide
ggcuuuaaacagcuggugg

SEQ ID NO: 2828390 - RNA, 19 nt, Artificial Sequence
  Description of Artificial Sequence: Synthetic oligonucleotide
auaaaacuggaagguuggc

SEQ ID NO: 2828391 - RNA, 19 nt, Artificial Sequence
  Description of Artificial Sequence: Synthetic oligonucleotide
gaauucacccaccuuuuga

SEQ ID NO: 2828392 - RNA, 19 nt, Artificial Sequence
  Description of Artificial Sequence: Synthetic oligonucleotide
aauagaggcuucaagcuuu

SEQ ID NO: 2828393 - RNA, 19 nt, Artificial Sequence
  Description of Artificial Sequence: Synthetic oligonucleotide
auggcaguuggguacaggu

SEQ ID NO: 2828394 - RNA, 19 nt, Artificial Sequence
  Description of Artificial Sequence: Synthetic oligonucleotide
uacaaguuugucucccgca

SEQ ID NO: 2828395 - RNA, 19 nt, Artificial Sequence
  Description of Artificial Sequence: Synthetic oligonucleotide
uauaaucagauggcaguug

SEQ ID NO: 2828396 - RNA, 19 nt, Artificial Sequence
  Description of Artificial Sequence: Synthetic oligonucleotide
ugcaugguccacaccaugu

SEQ ID NO: 2828397 - RNA, 19 nt, Artificial Sequence
  Description of Artificial Sequence: Synthetic oligonucleotide
gaagggcuugaucauuuug

SEQ ID NO: 2828398 - RNA, 19 nt, Artificial Sequence
  Description of Artificial Sequence: Synthetic oligonucleotide
auugucauuuauaaucaga

SEQ ID NO: 2828399 - RNA, 19 nt, Artificial Sequence
  Description of Artificial Sequence: Synthetic oligonucleotide
caagcuuuuccuuguuagc

SEQ ID NO: 2828400 - RNA, 19 nt, Artificial Sequence
  Description of Artificial Sequence: Synthetic oligonucleotide
guuacaggcuuuaaacagc

SEQ ID NO: 2828401 - RNA, 19 nt, Artificial Sequence
  Description of Artificial Sequence: Synthetic oligonucleotide
gcuuuaaacagcugguggc

SEQ ID NO: 2828402 - RNA, 19 nt, Artificial Sequence
  Description of Artificial Sequence: Synthetic oligonucleotide
ucacagagggaaugaaaga

SEQ ID NO: 2828403 - RNA, 19 nt, Artificial Sequence
  Description of Artificial Sequence: Synthetic oligonucleotide
ucaccauuuuggcugucgc

SEQ ID NO: 2828404 - RNA, 19 nt, Artificial Sequence
  Description of Artificial Sequence: Synthetic oligonucleotide
caugguccacaccaugugg

SEQ ID NO: 2828405 - RNA, 19 nt, Artificial Sequence
  Description of Artificial Sequence: Synthetic oligonucleotide
uuuccaggccaugauuagg

SEQ ID NO: 2828406 - RNA, 19 nt, Artificial Sequence
  Description of Artificial Sequence: Synthetic oligonucleotide
augguccacaccauguggc

SEQ ID NO: 2828407 - RNA, 19 nt, Artificial Sequence
  Description of Artificial Sequence: Synthetic oligonucleotide
auuuugcaugguccacacc

SEQ ID NO: 2828408 - RNA, 19 nt, Artificial Sequence
  Description of Artificial Sequence: Synthetic oligonucleotide
caguaauagaggcuucaag

SEQ ID NO: 2828409 - RNA, 19 nt, Artificial Sequence
  Description of Artificial Sequence: Synthetic oligonucleotide
ucauuuugcaugguccaca

SEQ ID NO: 2828410 - RNA, 19 nt, Artificial Sequence
  Description of Artificial Sequence: Synthetic oligonucleotide
gcuugaucauuuugcaugg

SEQ ID NO: 2828411 - RNA, 19 nt, Artificial Sequence
  Description of Artificial Sequence: Synthetic oligonucleotide
uuaggcaaacucaguaaua

SEQ ID NO: 2828412 - RNA, 19 nt, Artificial Sequence
  Description of Artificial Sequence: Synthetic oligonucleotide
guaggaucggauggaagcg

SEQ ID NO: 2828413 - RNA, 19 nt, Artificial Sequence
  Description of Artificial Sequence: Synthetic oligonucleotide
cauuugacuucacacucug

SEQ ID NO: 2828414 - RNA, 19 nt, Artificial Sequence
  Description of Artificial Sequence: Synthetic oligonucleotide
guaauagaggcuucaagcu

SEQ ID NO: 2828415 - RNA, 19 nt, Artificial Sequence
  Description of Artificial Sequence: Synthetic oligonucleotide
uucaccauuuuggcugucg

SEQ ID NO: 2828416 - RNA, 19 nt, Artificial Sequence
  Description of Artificial Sequence: Synthetic oligonucleotide
uucacacucugcagcaaca

SEQ ID NO: 2828417 - RNA, 19 nt, Artificial Sequence
  Description of Artificial Sequence: Synthetic oligonucleotide
acagguucuccacacuuca

SEQ ID NO: 2828418 - RNA, 19 nt, Artificial Sequence
  Description of Artificial Sequence: Synthetic oligonucleotide
agagggaaugaaagaaggg

SEQ ID NO: 2828419 - RNA, 19 nt, Artificial Sequence
  Description of Artificial Sequence: Synthetic oligonucleotide
gguuauguuuuccaggcca

SEQ ID NO: 2828420 - RNA, 19 nt, Artificial Sequence
  Description of Artificial Sequence: Synthetic oligonucleotide
uuuaaacagcugguggcug

SEQ ID NO: 2828421 - RNA, 19 nt, Artificial Sequence
  Description of Artificial Sequence: Synthetic oligonucleotide
cugaaaagcuuccuugcuc

SEQ ID NO: 2828422 - RNA, 19 nt, Artificial Sequence
  Description of Artificial Sequence: Synthetic oligonucleotide
aaugaaagaagggcuugau

SEQ ID NO: 2828423 - RNA, 19 nt, Artificial Sequence
  Description of Artificial Sequence: Synthetic oligonucleotide
cauccuggcagucauccac

SEQ ID NO: 2828424 - RNA, 19 nt, Artificial Sequence
  Description of Artificial Sequence: Synthetic oligonucleotide
aguuggguacagguucucc

SEQ ID NO: 2828425 - RNA, 19 nt, Artificial Sequence
  Description of Artificial Sequence: Synthetic oligonucleotide
agggaaugaaagaagggcu

SEQ ID NO: 2828426 - RNA, 19 nt, Artificial Sequence
  Description of Artificial Sequence: Synthetic oligonucleotide
cauuuugcaugguccacac

SEQ ID NO: 2828427 - RNA, 19 nt, Artificial Sequence
  Description of Artificial Sequence: Synthetic oligonucleotide
aaacucaguaauagaggcu

SEQ ID NO: 2828428 - RNA, 19 nt, Artificial Sequence
  Description of Artificial Sequence: Synthetic oligonucleotide
aucauuuugcaugguccac

SEQ ID NO: 2828429 - RNA, 19 nt, Artificial Sequence
  Description of Artificial Sequence: Synthetic oligonucleotide
gcaaacucaguaauagagg

SEQ ID NO: 2828430 - RNA, 19 nt, Artificial Sequence
  Description of Artificial Sequence: Synthetic oligonucleotide
uuauaaucagauggcaguu

SEQ ID NO: 2828431 - RNA, 19 nt, Artificial Sequence
  Description of Artificial Sequence: Synthetic oligonucleotide
uguuuuccaggccaugauu

SEQ ID NO: 2828432 - RNA, 19 nt, Artificial Sequence
  Description of Artificial Sequence: Synthetic oligonucleotide
cugagaaguccacaacuac

SEQ ID NO: 2828433 - RNA, 19 nt, Artificial Sequence
  Description of Artificial Sequence: Synthetic oligonucleotide
cuacaaguuugucucccgc

SEQ ID NO: 2828434 - RNA, 19 nt, Artificial Sequence
  Description of Artificial Sequence: Synthetic oligonucleotide
uaggaucggauggaagcgg

SEQ ID NO: 2828435 - RNA, 19 nt, Artificial Sequence
  Description of Artificial Sequence: Synthetic oligonucleotide
uuggcaugcauuugacuuc

SEQ ID NO: 2828436 - RNA, 19 nt, Artificial Sequence
  Description of Artificial Sequence: Synthetic oligonucleotide
gaucagcuucaccauuuug

SEQ ID NO: 2828437 - RNA, 19 nt, Artificial Sequence
  Description of Artificial Sequence: Synthetic oligonucleotide
cuggcagucauccacaucu

SEQ ID NO: 2828438 - RNA, 19 nt, Artificial Sequence
  Description of Artificial Sequence: Synthetic oligonucleotide
gagaaguccacaacuacaa

SEQ ID NO: 2828439 - RNA, 19 nt, Artificial Sequence
  Description of Artificial Sequence: Synthetic oligonucleotide
gacuucacacucugcagca

SEQ ID NO: 2828440 - RNA, 19 nt, Artificial Sequence
  Description of Artificial Sequence: Synthetic oligonucleotide
uuuuccuuguuagcgccug

SEQ ID NO: 2828441 - RNA, 19 nt, Artificial Sequence
  Description of Artificial Sequence: Synthetic oligonucleotide
caccauuuuggcugucgcg

SEQ ID NO: 2828442 - RNA, 19 nt, Artificial Sequence
  Description of Artificial Sequence: Synthetic oligonucleotide
uuguuagcgccugagaauu

SEQ ID NO: 2828443 - RNA, 19 nt, Artificial Sequence
  Description of Artificial Sequence: Synthetic oligonucleotide
guuugucucccgcagccgc

SEQ ID NO: 2828444 - RNA, 19 nt, Artificial Sequence
  Description of Artificial Sequence: Synthetic oligonucleotide
uacagguucuccacacuuc

SEQ ID NO: 2828445 - RNA, 19 nt, Artificial Sequence
  Description of Artificial Sequence: Synthetic oligonucleotide
agaauucacccaccuuuug

SEQ ID NO: 2828446 - RNA, 19 nt, Artificial Sequence
  Description of Artificial Sequence: Synthetic oligonucleotide
agcuuccuugcucucgauc

SEQ ID NO: 2828447 - RNA, 19 nt, Artificial Sequence
  Description of Artificial Sequence: Synthetic oligonucleotide
uuugucucccgcagccgcc

SEQ ID NO: 2828448 - RNA, 19 nt, Artificial Sequence
  Description of Artificial Sequence: Synthetic oligonucleotide
ugguuauguuuuccaggcc

SEQ ID NO: 2828449 - RNA, 19 nt, Artificial Sequence
  Description of Artificial Sequence: Synthetic oligonucleotide
cacgaguuucuguaggauc

SEQ ID NO: 2828450 - RNA, 19 nt, Artificial Sequence
  Description of Artificial Sequence: Synthetic oligonucleotide
agggcuugaucauuuugca

SEQ ID NO: 2828451 - RNA, 19 nt, Artificial Sequence
  Description of Artificial Sequence: Synthetic oligonucleotide
uugcucucgaucagcuuca

SEQ ID NO: 2828452 - RNA, 19 nt, Artificial Sequence
  Description of Artificial Sequence: Synthetic oligonucleotide
cauuuauaaucagauggca

SEQ ID NO: 2828453 - RNA, 19 nt, Artificial Sequence
  Description of Artificial Sequence: Synthetic oligonucleotide
ucgaucagcuucaccauuu

SEQ ID NO: 2828454 - RNA, 19 nt, Artificial Sequence
  Description of Artificial Sequence: Synthetic oligonucleotide
guuggcaugcauuugacuu

SEQ ID NO: 2828455 - RNA, 19 nt, Artificial Sequence
  Description of Artificial Sequence: Synthetic oligonucleotide
cuucacacucugcagcaac

SEQ ID NO: 2828456 - RNA, 19 nt, Artificial Sequence
  Description of Artificial Sequence: Synthetic oligonucleotide
guuggguacagguucucca

SEQ ID NO: 2828457 - RNA, 19 nt, Artificial Sequence
  Description of Artificial Sequence: Synthetic oligonucleotide
auuugacuucacacucugc

SEQ ID NO: 2828458 - RNA, 19 nt, Artificial Sequence
  Description of Artificial Sequence: Synthetic oligonucleotide
gccaugauuaggcaaacuc

SEQ ID NO: 2828459 - RNA, 19 nt, Artificial Sequence
  Description of Artificial Sequence: Synthetic oligonucleotide
uugcaugguccacaccaug

SEQ ID NO: 2828460 - RNA, 19 nt, Artificial Sequence
  Description of Artificial Sequence: Synthetic oligonucleotide
uucaagcuuuuccuuguua

SEQ ID NO: 2828461 - RNA, 19 nt, Artificial Sequence
  Description of Artificial Sequence: Synthetic oligonucleotide
cauuuuggcugucgcgggg

SEQ ID NO: 2828462 - RNA, 19 nt, Artificial Sequence
  Description of Artificial Sequence: Synthetic oligonucleotide
accacacgaguuucuguag

SEQ ID NO: 2828463 - RNA, 19 nt, Artificial Sequence
  Description of Artificial Sequence: Synthetic oligonucleotide
uccuuguuagcgccugaga

SEQ ID NO: 2828464 - RNA, 19 nt, Artificial Sequence
  Description of Artificial Sequence: Synthetic oligonucleotide
aacagcugguggcugguua

SEQ ID NO: 2828465 - RNA, 19 nt, Artificial Sequence
  Description of Artificial Sequence: Synthetic oligonucleotide
caaguuugucucccgcagc

SEQ ID NO: 2828466 - RNA, 19 nt, Artificial Sequence
  Description of Artificial Sequence: Synthetic oligonucleotide
uagcgccugagaauucacc

SEQ ID NO: 2828467 - RNA, 19 nt, Artificial Sequence
  Description of Artificial Sequence: Synthetic oligonucleotide
caacuacaaguuugucucc

SEQ ID NO: 2828468 - RNA, 19 nt, Artificial Sequence
  Description of Artificial Sequence: Synthetic oligonucleotide
uuugcaugguccacaccau

SEQ ID NO: 2828469 - RNA, 19 nt, Artificial Sequence
  Description of Artificial Sequence: Synthetic oligonucleotide
aaagaagggcuugaucauu

SEQ ID NO: 2828470 - RNA, 19 nt, Artificial Sequence
  Description of Artificial Sequence: Synthetic oligonucleotide
uggcugguuauguuuucca

SEQ ID NO: 2828471 - RNA, 19 nt, Artificial Sequence
  Description of Artificial Sequence: Synthetic oligonucleotide
cacaacuacaaguuugucu

SEQ ID NO: 2828472 - RNA, 19 nt, Artificial Sequence
  Description of Artificial Sequence: Synthetic oligonucleotide
uuuucacagagggaaugaa

SEQ ID NO: 2828473 - RNA, 19 nt, Artificial Sequence
  Description of Artificial Sequence: Synthetic oligonucleotide
ggcaguuggguacagguuc

SEQ ID NO: 2828474 - RNA, 19 nt, Artificial Sequence
  Description of Artificial Sequence: Synthetic oligonucleotide
ucccgcagccgccagggcc

SEQ ID NO: 2828475 - RNA, 19 nt, Artificial Sequence
  Description of Artificial Sequence: Synthetic oligonucleotide
uuagcgccugagaauucac

SEQ ID NO: 2828476 - RNA, 19 nt, Artificial Sequence
  Description of Artificial Sequence: Synthetic oligonucleotide
uucuguaggaucggaugga

SEQ ID NO: 2828477 - RNA, 19 nt, Artificial Sequence
  Description of Artificial Sequence: Synthetic oligonucleotide
uuggcugucgcggggagga

SEQ ID NO: 2828478 - RNA, 19 nt, Artificial Sequence
  Description of Artificial Sequence: Synthetic oligonucleotide
uuccuuguuagcgccugag

SEQ ID NO: 2828479 - RNA, 19 nt, Artificial Sequence
  Description of Artificial Sequence: Synthetic oligonucleotide
uuauguuuuccaggccaug

SEQ ID NO: 2828480 - RNA, 19 nt, Artificial Sequence
  Description of Artificial Sequence: Synthetic oligonucleotide
ucucccgcagccgccaggg

SEQ ID NO: 2828481 - RNA, 19 nt, Artificial Sequence
  Description of Artificial Sequence: Synthetic oligonucleotide
aggcaaacucaguaauaga

SEQ ID NO: 2828482 - RNA, 19 nt, Artificial Sequence
  Description of Artificial Sequence: Synthetic oligonucleotide
cuguaggaucggauggaag

SEQ ID NO: 2828483 - RNA, 19 nt, Artificial Sequence
  Description of Artificial Sequence: Synthetic oligonucleotide
ucaguaauagaggcuucaa

SEQ ID NO: 2828484 - RNA, 19 nt, Artificial Sequence
  Description of Artificial Sequence: Synthetic oligonucleotide
cacaccauguggcugagaa

SEQ ID NO: 2828485 - RNA, 19 nt, Artificial Sequence
  Description of Artificial Sequence: Synthetic oligonucleotide
uggcaugcauuugacuuca

SEQ ID NO: 2828486 - RNA, 19 nt, Artificial Sequence
  Description of Artificial Sequence: Synthetic oligonucleotide
aagaagggcuugaucauuu

SEQ ID NO: 2828487 - RNA, 19 nt, Artificial Sequence
  Description of Artificial Sequence: Synthetic oligonucleotide
agguucuccacacuucaua

SEQ ID NO: 2828488 - RNA, 19 nt, Artificial Sequence
  Description of Artificial Sequence: Synthetic oligonucleotide
cauguggcugagaagucca

SEQ ID NO: 2828489 - RNA, 19 nt, Artificial Sequence
  Description of Artificial Sequence: Synthetic oligonucleotide
gcuuuuccuuguuagcgcc

SEQ ID NO: 2828490 - RNA, 19 nt, Artificial Sequence
  Description of Artificial Sequence: Synthetic oligonucleotide
ggcuucaagcuuuuccuug

SEQ ID NO: 2828491 - RNA, 19 nt, Artificial Sequence
  Description of Artificial Sequence: Synthetic oligonucleotide
acaccauguggcugagaag

SEQ ID NO: 2828492 - RNA, 19 nt, Artificial Sequence
  Description of Artificial Sequence: Synthetic oligonucleotide
caaggaacacgacacugga

SEQ ID NO: 2828493 - RNA, 19 nt, Artificial Sequence
  Description of Artificial Sequence: Synthetic oligonucleotide
gauggcaguuggguacagg

SEQ ID NO: 2828494 - RNA, 19 nt, Artificial Sequence
  Description of Artificial Sequence: Synthetic oligonucleotide
uggcugagaaguccacaac

SEQ ID NO: 2828495 - RNA, 19 nt, Artificial Sequence
  Description of Artificial Sequence: Synthetic oligonucleotide
guuuuccaggccaugauua

SEQ ID NO: 2828496 - RNA, 19 nt, Artificial Sequence
  Description of Artificial Sequence: Synthetic oligonucleotide
uguggcugagaaguccaca

SEQ ID NO: 2828497 - RNA, 19 nt, Artificial Sequence
  Description of Artificial Sequence: Synthetic oligonucleotide
auguuuuccaggccaugau

SEQ ID NO: 2828498 - RNA, 19 nt, Artificial Sequence
  Description of Artificial Sequence: Synthetic oligonucleotide
gaucggauggaagcggauc

SEQ ID NO: 2828499 - RNA, 19 nt, Artificial Sequence
  Description of Artificial Sequence: Synthetic oligonucleotide
gaagguuggcaugcauuug

SEQ ID NO: 2828500 - RNA, 19 nt, Artificial Sequence
  Description of Artificial Sequence: Synthetic oligonucleotide
aacacgacacuggaauauu

SEQ ID NO: 2828501 - RNA, 19 nt, Artificial Sequence
  Description of Artificial Sequence: Synthetic oligonucleotide
uacaggcuuuaaacagcug

SEQ ID NO: 2828502 - RNA, 19 nt, Artificial Sequence
  Description of Artificial Sequence: Synthetic oligonucleotide
gaaaagcuuccuugcucuc

SEQ ID NO: 2828503 - RNA, 19 nt, Artificial Sequence
  Description of Artificial Sequence: Synthetic oligonucleotide
ugguggcugguuauguuuu

SEQ ID NO: 2828504 - RNA, 19 nt, Artificial Sequence
  Description of Artificial Sequence: Synthetic oligonucleotide
ggaaugaaagaagggcuug

SEQ ID NO: 2828505 - RNA, 19 nt, Artificial Sequence
  Description of Artificial Sequence: Synthetic oligonucleotide
aggcuuuaaacagcuggug

SEQ ID NO: 2828506 - RNA, 19 nt, Artificial Sequence
  Description of Artificial Sequence: Synthetic oligonucleotide
ucuguaggaucggauggaa

SEQ ID NO: 2828507 - RNA, 19 nt, Artificial Sequence
  Description of Artificial Sequence: Synthetic oligonucleotide
aguuugucucccgcagccg

SEQ ID NO: 2828508 - RNA, 19 nt, Artificial Sequence
  Description of Artificial Sequence: Synthetic oligonucleotide
uuuccuuguuagcgccuga

SEQ ID NO: 2828509 - RNA, 19 nt, Artificial Sequence
  Description of Artificial Sequence: Synthetic oligonucleotide
ggcugguuauguuuuccag

SEQ ID NO: 2828510 - RNA, 19 nt, Artificial Sequence
  Description of Artificial Sequence: Synthetic oligonucleotide
ucacccaccuuuugacccu

SEQ ID NO: 2828511 - RNA, 19 nt, Artificial Sequence
  Description of Artificial Sequence: Synthetic oligonucleotide
ccaugauuaggcaaacuca

SEQ ID NO: 2828512 - RNA, 19 nt, Artificial Sequence
  Description of Artificial Sequence: Synthetic oligonucleotide
caggccaugauuaggcaaa

SEQ ID NO: 2828513 - RNA, 19 nt, Artificial Sequence
  Description of Artificial Sequence: Synthetic oligonucleotide
uuuggcugucgcggggagg

SEQ ID NO: 2828514 - RNA, 19 nt, Artificial Sequence
  Description of Artificial Sequence: Synthetic oligonucleotide
guggcugagaaguccacaa

SEQ ID NO: 2828515 - RNA, 19 nt, Artificial Sequence
  Description of Artificial Sequence: Synthetic oligonucleotide
uccaggccaugauuaggca

SEQ ID NO: 2828516 - RNA, 19 nt, Artificial Sequence
  Description of Artificial Sequence: Synthetic oligonucleotide
ucuccacacuucauauuuu

SEQ ID NO: 2828517 - RNA, 19 nt, Artificial Sequence
  Description of Artificial Sequence: Synthetic oligonucleotide
agguuggcaugcauuugac

SEQ ID NO: 2828518 - RNA, 19 nt, Artificial Sequence
  Description of Artificial Sequence: Synthetic oligonucleotide
acagcugguggcugguuau

SEQ ID NO: 2828519 - RNA, 19 nt, Artificial Sequence
  Description of Artificial Sequence: Synthetic oligonucleotide
cuacuucaaggaacacgac

SEQ ID NO: 2828520 - RNA, 19 nt, Artificial Sequence
  Description of Artificial Sequence: Synthetic oligonucleotide
uaaacagcugguggcuggu

SEQ ID NO: 2828521 - RNA, 19 nt, Artificial Sequence
  Description of Artificial Sequence: Synthetic oligonucleotide
guccacaccauguggcuga

SEQ ID NO: 2828522 - RNA, 19 nt, Artificial Sequence
  Description of Artificial Sequence: Synthetic oligonucleotide
acucaguaauagaggcuuc

SEQ ID NO: 2828523 - RNA, 19 nt, Artificial Sequence
  Description of Artificial Sequence: Synthetic oligonucleotide
guuagcgccugagaauuca

SEQ ID NO: 2828524 - RNA, 19 nt, Artificial Sequence
  Description of Artificial Sequence: Synthetic oligonucleotide
uguuagcgccugagaauuc

SEQ ID NO: 2828525 - RNA, 19 nt, Artificial Sequence
  Description of Artificial Sequence: Synthetic oligonucleotide
augauuaggcaaacucagu

SEQ ID NO: 2828526 - RNA, 19 nt, Artificial Sequence
  Description of Artificial Sequence: Synthetic oligonucleotide
auuuuggcugucgcgggga

SEQ ID NO: 2828527 - RNA, 19 nt, Artificial Sequence
  Description of Artificial Sequence: Synthetic oligonucleotide
cacacgaguuucuguagga

SEQ ID NO: 2828528 - RNA, 19 nt, Artificial Sequence
  Description of Artificial Sequence: Synthetic oligonucleotide
caccauguggcugagaagu

SEQ ID NO: 2828529 - RNA, 19 nt, Artificial Sequence
  Description of Artificial Sequence: Synthetic oligonucleotide
cucaguaauagaggcuuca

SEQ ID NO: 2828530 - RNA, 19 nt, Artificial Sequence
  Description of Artificial Sequence: Synthetic oligonucleotide
aguuucuguaggaucggau

SEQ ID NO: 2828531 - RNA, 19 nt, Artificial Sequence
  Description of Artificial Sequence: Synthetic oligonucleotide
cauccacaucuacuucaag

SEQ ID NO: 2828532 - RNA, 19 nt, Artificial Sequence
  Description of Artificial Sequence: Synthetic oligonucleotide
cacacucugcagcaacauc

SEQ ID NO: 2828533 - RNA, 19 nt, Artificial Sequence
  Description of Artificial Sequence: Synthetic oligonucleotide
aggccaugauuaggcaaac

SEQ ID NO: 2828534 - RNA, 19 nt, Artificial Sequence
  Description of Artificial Sequence: Synthetic oligonucleotide
uggcaguuggguacagguu

SEQ ID NO: 2828535 - RNA, 19 nt, Artificial Sequence
  Description of Artificial Sequence: Synthetic oligonucleotide
ccacacgaguuucuguagg

SEQ ID NO: 2828536 - RNA, 19 nt, Artificial Sequence
  Description of Artificial Sequence: Synthetic oligonucleotide
ucacacucugcagcaacau

SEQ ID NO: 2828537 - RNA, 19 nt, Artificial Sequence
  Description of Artificial Sequence: Synthetic oligonucleotide
aaggaacacgacacuggaa

SEQ ID NO: 2828538 - RNA, 19 nt, Artificial Sequence
  Description of Artificial Sequence: Synthetic oligonucleotide
cuuguuagcgccugagaau

SEQ ID NO: 2828539 - RNA, 19 nt, Artificial Sequence
  Description of Artificial Sequence: Synthetic oligonucleotide
gcggggaggaaccacacga

SEQ ID NO: 2828540 - RNA, 19 nt, Artificial Sequence
  Description of Artificial Sequence: Synthetic oligonucleotide
gaacacgacacuggaauau

SEQ ID NO: 2828541 - RNA, 19 nt, Artificial Sequence
  Description of Artificial Sequence: Synthetic oligonucleotide
ggguacagguucuccacac

SEQ ID NO: 2828542 - RNA, 19 nt, Artificial Sequence
  Description of Artificial Sequence: Synthetic oligonucleotide
ccauuuuggcugucgcggg

SEQ ID NO: 2828543 - RNA, 19 nt, Artificial Sequence
  Description of Artificial Sequence: Synthetic oligonucleotide
cuuuaaacagcugguggcu

SEQ ID NO: 2828544 - RNA, 19 nt, Artificial Sequence
  Description of Artificial Sequence: Synthetic oligonucleotide
gcaugguccacaccaugug

SEQ ID NO: 2828545 - RNA, 19 nt, Artificial Sequence
  Description of Artificial Sequence: Synthetic oligonucleotide
accauguggcugagaaguc

SEQ ID NO: 2828546 - RNA, 19 nt, Artificial Sequence
  Description of Artificial Sequence: Synthetic oligonucleotide
ggcugagaaguccacaacu

SEQ ID NO: 2828547 - RNA, 19 nt, Artificial Sequence
  Description of Artificial Sequence: Synthetic oligonucleotide
aggcuucaagcuuuuccuu

SEQ ID NO: 2828548 - RNA, 19 nt, Artificial Sequence
  Description of Artificial Sequence: Synthetic oligonucleotide
gaaccacacgaguuucugu

SEQ ID NO: 2828549 - RNA, 19 nt, Artificial Sequence
  Description of Artificial Sequence: Synthetic oligonucleotide
acauccuggcagucaucca

SEQ ID NO: 2828550 - RNA, 19 nt, Artificial Sequence
  Description of Artificial Sequence: Synthetic oligonucleotide
auguggcugagaaguccac

SEQ ID NO: 2828551 - RNA, 19 nt, Artificial Sequence
  Description of Artificial Sequence: Synthetic oligonucleotide
acacgaguuucuguaggau

SEQ ID NO: 2828552 - RNA, 19 nt, Artificial Sequence
  Description of Artificial Sequence: Synthetic oligonucleotide
gaguuucuguaggaucgga

SEQ ID NO: 2828553 - RNA, 19 nt, Artificial Sequence
  Description of Artificial Sequence: Synthetic oligonucleotide
ccuuguuagcgccugagaa

SEQ ID NO: 2828554 - RNA, 19 nt, Artificial Sequence
  Description of Artificial Sequence: Synthetic oligonucleotide
ucgcggggaggaaccacac

SEQ ID NO: 2828555 - RNA, 19 nt, Artificial Sequence
  Description of Artificial Sequence: Synthetic oligonucleotide
gcaugcauuugacuucaca

SEQ ID NO: 2828556 - RNA, 19 nt, Artificial Sequence
  Description of Artificial Sequence: Synthetic oligonucleotide
guacagguucuccacacuu

SEQ ID NO: 2828557 - RNA, 19 nt, Artificial Sequence
  Description of Artificial Sequence: Synthetic oligonucleotide
aggaucggauggaagcgga

SEQ ID NO: 2828558 - RNA, 19 nt, Artificial Sequence
  Description of Artificial Sequence: Synthetic oligonucleotide
ugucucccgcagccgccag

SEQ ID NO: 2828559 - RNA, 19 nt, Artificial Sequence
  Description of Artificial Sequence: Synthetic oligonucleotide
aagcuuccuugcucucgau

SEQ ID NO: 2828560 - RNA, 19 nt, Artificial Sequence
  Description of Artificial Sequence: Synthetic oligonucleotide
uugucucccgcagccgcca

SEQ ID NO: 2828561 - RNA, 19 nt, Artificial Sequence
  Description of Artificial Sequence: Synthetic oligonucleotide
ccauguggcugagaagucc

SEQ ID NO: 2828562 - RNA, 19 nt, Artificial Sequence
  Description of Artificial Sequence: Synthetic oligonucleotide
ggaagguuggcaugcauuu

SEQ ID NO: 2828563 - RNA, 19 nt, Artificial Sequence
  Description of Artificial Sequence: Synthetic oligonucleotide
auccuggcagucauccaca

SEQ ID NO: 2828564 - RNA, 19 nt, Artificial Sequence
  Description of Artificial Sequence: Synthetic oligonucleotide
uccuggcagucauccacau

SEQ ID NO: 2828565 - RNA, 19 nt, Artificial Sequence
  Description of Artificial Sequence: Synthetic oligonucleotide
uccacaccauguggcugag

SEQ ID NO: 2828566 - RNA, 19 nt, Artificial Sequence
  Description of Artificial Sequence: Synthetic oligonucleotide
gucucccgcagccgccagg

SEQ ID NO: 2828567 - RNA, 19 nt, Artificial Sequence
  Description of Artificial Sequence: Synthetic oligonucleotide
caacauccuggcagucauc

SEQ ID NO: 2828568 - RNA, 19 nt, Artificial Sequence
  Description of Artificial Sequence: Synthetic oligonucleotide
acuggaagguuggcaugca

SEQ ID NO: 2828569 - RNA, 19 nt, Artificial Sequence
  Description of Artificial Sequence: Synthetic oligonucleotide
cuucaaggaacacgacacu

SEQ ID NO: 2828570 - RNA, 19 nt, Artificial Sequence
  Description of Artificial Sequence: Synthetic oligonucleotide
gagaauucacccaccuuuu

SEQ ID NO: 2828571 - RNA, 19 nt, Artificial Sequence
  Description of Artificial Sequence: Synthetic oligonucleotide
guuauguuuuccaggccau

SEQ ID NO: 2828572 - RNA, 19 nt, Artificial Sequence
  Description of Artificial Sequence: Synthetic oligonucleotide
ugucgcggggaggaaccac

SEQ ID NO: 2828573 - RNA, 19 nt, Artificial Sequence
  Description of Artificial Sequence: Synthetic oligonucleotide
ggaacacgacacuggaaua

SEQ ID NO: 2828574 - RNA, 19 nt, Artificial Sequence
  Description of Artificial Sequence: Synthetic oligonucleotide
acacgacacuggaauauuu

SEQ ID NO: 2828575 - RNA, 19 nt, Artificial Sequence
  Description of Artificial Sequence: Synthetic oligonucleotide
gcugucgcggggaggaacc

SEQ ID NO: 2828576 - RNA, 19 nt, Artificial Sequence
  Description of Artificial Sequence: Synthetic oligonucleotide
agauggcaguuggguacag

SEQ ID NO: 2828577 - RNA, 19 nt, Artificial Sequence
  Description of Artificial Sequence: Synthetic oligonucleotide
gcuucaagcuuuuccuugu

SEQ ID NO: 2828578 - RNA, 19 nt, Artificial Sequence
  Description of Artificial Sequence: Synthetic oligonucleotide
gucgcggggaggaaccaca

SEQ ID NO: 2828579 - RNA, 19 nt, Artificial Sequence
  Description of Artificial Sequence: Synthetic oligonucleotide
aaacagcugguggcugguu

SEQ ID NO: 2828580 - RNA, 19 nt, Artificial Sequence
  Description of Artificial Sequence: Synthetic oligonucleotide
ggaggaaccacacgaguuu

SEQ ID NO: 2828581 - RNA, 19 nt, Artificial Sequence
  Description of Artificial Sequence: Synthetic oligonucleotide
gguccacaccauguggcug

SEQ ID NO: 2828582 - RNA, 19 nt, Artificial Sequence
  Description of Artificial Sequence: Synthetic oligonucleotide
cuuuuccuuguuagcgccu

SEQ ID NO: 2828583 - RNA, 19 nt, Artificial Sequence
  Description of Artificial Sequence: Synthetic oligonucleotide
cacgacacuggaauauuuu

SEQ ID NO: 2828584 - RNA, 19 nt, Artificial Sequence
  Description of Artificial Sequence: Synthetic oligonucleotide
acuucacacucugcagcaa

SEQ ID NO: 2828585 - RNA, 19 nt, Artificial Sequence
  Description of Artificial Sequence: Synthetic oligonucleotide
cagauggcaguuggguaca

SEQ ID NO: 2828586 - RNA, 19 nt, Artificial Sequence
  Description of Artificial Sequence: Synthetic oligonucleotide
gcugagaaguccacaacua

SEQ ID NO: 2828587 - RNA, 19 nt, Artificial Sequence
  Description of Artificial Sequence: Synthetic oligonucleotide
gguggcugguuauguuuuc

SEQ ID NO: 2828588 - RNA, 19 nt, Artificial Sequence
  Description of Artificial Sequence: Synthetic oligonucleotide
agggccuccugaaaagcuu

SEQ ID NO: 2828589 - RNA, 19 nt, Artificial Sequence
  Description of Artificial Sequence: Synthetic oligonucleotide
cugguggcugguuauguuu

SEQ ID NO: 2828590 - RNA, 19 nt, Artificial Sequence
  Description of Artificial Sequence: Synthetic oligonucleotide
gcgccugagaauucaccca

SEQ ID NO: 2828591 - RNA, 19 nt, Artificial Sequence
  Description of Artificial Sequence: Synthetic oligonucleotide
cgccugagaauucacccac

SEQ ID NO: 2828592 - RNA, 19 nt, Artificial Sequence
  Description of Artificial Sequence: Synthetic oligonucleotide
auagaggcuucaagcuuuu

SEQ ID NO: 2828593 - RNA, 19 nt, Artificial Sequence
  Description of Artificial Sequence: Synthetic oligonucleotide
agccgccagggccuccuga

SEQ ID NO: 2828594 - RNA, 19 nt, Artificial Sequence
  Description of Artificial Sequence: Synthetic oligonucleotide
gguuggcaugcauuugacu

SEQ ID NO: 2828595 - RNA, 19 nt, Artificial Sequence
  Description of Artificial Sequence: Synthetic oligonucleotide
ugcucucgaucagcuucac

SEQ ID NO: 2828596 - RNA, 19 nt, Artificial Sequence
  Description of Artificial Sequence: Synthetic oligonucleotide
guucuccacacuucauauu

SEQ ID NO: 2828597 - RNA, 19 nt, Artificial Sequence
  Description of Artificial Sequence: Synthetic oligonucleotide
cagcugguggcugguuaug

SEQ ID NO: 2828598 - RNA, 19 nt, Artificial Sequence
  Description of Artificial Sequence: Synthetic oligonucleotide
ccacaucuacuucaaggaa

SEQ ID NO: 2828599 - RNA, 19 nt, Artificial Sequence
  Description of Artificial Sequence: Synthetic oligonucleotide
gguacagguucuccacacu

SEQ ID NO: 2828600 - RNA, 19 nt, Artificial Sequence
  Description of Artificial Sequence: Synthetic oligonucleotide
ccaggccaugauuaggcaa

SEQ ID NO: 2828601 - RNA, 19 nt, Artificial Sequence
  Description of Artificial Sequence: Synthetic oligonucleotide
ggccuccugaaaagcuucc

SEQ ID NO: 2828602 - RNA, 19 nt, Artificial Sequence
  Description of Artificial Sequence: Synthetic oligonucleotide
gggccuccugaaaagcuuc

SEQ ID NO: 2828603 - RNA, 19 nt, Artificial Sequence
  Description of Artificial Sequence: Synthetic oligonucleotide
cgaguuucuguaggaucgg

SEQ ID NO: 2828604 - RNA, 19 nt, Artificial Sequence
  Description of Artificial Sequence: Synthetic oligonucleotide
ggggaggaaccacacgagu

SEQ ID NO: 2828605 - RNA, 19 nt, Artificial Sequence
  Description of Artificial Sequence: Synthetic oligonucleotide
gccugagaauucacccacc

SEQ ID NO: 2828606 - RNA, 19 nt, Artificial Sequence
  Description of Artificial Sequence: Synthetic oligonucleotide
cggggaggaaccacacgag

SEQ ID NO: 2828607 - RNA, 19 nt, Artificial Sequence
  Description of Artificial Sequence: Synthetic oligonucleotide
cugagaauucacccaccuu

SEQ ID NO: 2828608 - RNA, 19 nt, Artificial Sequence
  Description of Artificial Sequence: Synthetic oligonucleotide
ccugagaauucacccaccu

SEQ ID NO: 2828609 - RNA, 19 nt, Artificial Sequence
  Description of Artificial Sequence: Synthetic oligonucleotide
ccugaaaagcuuccuugcu

SEQ ID NO: 2828610 - RNA, 19 nt, Artificial Sequence
  Description of Artificial Sequence: Synthetic oligonucleotide
cagcaacauccuggcaguc

SEQ ID NO: 2828611 - RNA, 19 nt, Artificial Sequence
  Description of Artificial Sequence: Synthetic oligonucleotide
gcauuugacuucacacucu

SEQ ID NO: 2828612 - RNA, 19 nt, Artificial Sequence
  Description of Artificial Sequence: Synthetic oligonucleotide
gcuucaccauuuuggcugu

SEQ ID NO: 2828613 - RNA, 19 nt, Artificial Sequence
  Description of Artificial Sequence: Synthetic oligonucleotide
cucgaucagcuucaccauu

SEQ ID NO: 2828614 - RNA, 19 nt, Artificial Sequence
  Description of Artificial Sequence: Synthetic oligonucleotide
cugcagcaacauccuggca

SEQ ID NO: 2828615 - RNA, 19 nt, Artificial Sequence
  Description of Artificial Sequence: Synthetic oligonucleotide
cuucaccauuuuggcuguc

SEQ ID NO: 2828616 - RNA, 19 nt, Artificial Sequence
  Description of Artificial Sequence: Synthetic oligonucleotide
cuugaucauuuugcauggu

SEQ ID NO: 2828617 - RNA, 19 nt, Artificial Sequence
  Description of Artificial Sequence: Synthetic oligonucleotide
ggcugucgcggggaggaac

SEQ ID NO: 2828618 - RNA, 19 nt, Artificial Sequence
  Description of Artificial Sequence: Synthetic oligonucleotide
gggcuugaucauuuugcau

SEQ ID NO: 2828619 - RNA, 19 nt, Artificial Sequence
  Description of Artificial Sequence: Synthetic oligonucleotide
gggaggaaccacacgaguu

SEQ ID NO: 2828620 - RNA, 19 nt, Artificial Sequence
  Description of Artificial Sequence: Synthetic oligonucleotide
ccacaacuacaaguuuguc

SEQ ID NO: 2828621 - RNA, 19 nt, Artificial Sequence
  Description of Artificial Sequence: Synthetic oligonucleotide
cuucaagcuuuuccuuguu

SEQ ID NO: 2828622 - RNA, 19 nt, Artificial Sequence
  Description of Artificial Sequence: Synthetic oligonucleotide
ccuggcagucauccacauc

SEQ ID NO: 2828623 - RNA, 19 nt, Artificial Sequence
  Description of Artificial Sequence: Synthetic oligonucleotide
cucccgcagccgccagggc

SEQ ID NO: 2828624 - RNA, 19 nt, Artificial Sequence
  Description of Artificial Sequence: Synthetic oligonucleotide
gcaguuggguacagguucu

SEQ ID NO: 2828625 - RNA, 19 nt, Artificial Sequence
  Description of Artificial Sequence: Synthetic oligonucleotide
gccgccagggccuccugaa

SEQ ID NO: 2828626 - RNA, 19 nt, Artificial Sequence
  Description of Artificial Sequence: Synthetic oligonucleotide
cagguucuccacacuucau

SEQ ID NO: 2828627 - RNA, 19 nt, Artificial Sequence
  Description of Artificial Sequence: Synthetic oligonucleotide
cgcggggaggaaccacacg

SEQ ID NO: 2828628 - RNA, 19 nt, Artificial Sequence
  Description of Artificial Sequence: Synthetic oligonucleotide
cugucgcggggaggaacca

SEQ ID NO: 2828629 - RNA, 19 nt, Artificial Sequence
  Description of Artificial Sequence: Synthetic oligonucleotide
uggcugucgcggggaggaa

SEQ ID NO: 2828630 - RNA, 19 nt, Artificial Sequence
  Description of Artificial Sequence: Synthetic oligonucleotide
gcugguggcugguuauguu

SEQ ID NO: 2828631 - RNA, 19 nt, Artificial Sequence
  Description of Artificial Sequence: Synthetic oligonucleotide
ggccaugauuaggcaaacu

SEQ ID NO: 2828632 - RNA, 19 nt, Artificial Sequence
  Description of Artificial Sequence: Synthetic oligonucleotide
cgccagggccuccugaaaa

SEQ ID NO: 2828633 - RNA, 19 nt, Artificial Sequence
  Description of Artificial Sequence: Synthetic oligonucleotide
ggaucggauggaagcggau

SEQ ID NO: 2828634 - RNA, 19 nt, Artificial Sequence
  Description of Artificial Sequence: Synthetic oligonucleotide
cccgcagccgccagggccu

SEQ ID NO: 2828635 - RNA, 19 nt, Artificial Sequence
  Description of Artificial Sequence: Synthetic oligonucleotide
acccaccuuuugacccuuu

SEQ ID NO: 2828636 - RNA, 19 nt, Artificial Sequence
  Description of Artificial Sequence: Synthetic oligonucleotide
cccaccuuuugacccuuuu

SEQ ID NO: 2828637 - RNA, 19 nt, Artificial Sequence
  Description of Artificial Sequence: Synthetic oligonucleotide
cacccaccuuuugacccuu

SEQ ID NO: 2828638 - RNA, 19 nt, Artificial Sequence
  Description of Artificial Sequence: Synthetic oligonucleotide
ccgccagggccuccugaaa

SEQ ID NO: 2828639 - RNA, 19 nt, Artificial Sequence
  Description of Artificial Sequence: Synthetic oligonucleotide
cgaucagcuucaccauuuu

SEQ ID NO: 2828640 - RNA, 19 nt, Artificial Sequence
  Description of Artificial Sequence: Synthetic oligonucleotide
ccacaccauguggcugaga

SEQ ID NO: 2828641 - RNA, 19 nt, Artificial Sequence
  Description of Artificial Sequence: Synthetic oligonucleotide
cgcagccgccagggccucc

SEQ ID NO: 2828642 - RNA, 19 nt, Artificial Sequence
  Description of Artificial Sequence: Synthetic oligonucleotide
ccgcagccgccagggccuc

SEQ ID NO: 2828643 - RNA, 19 nt, Artificial Sequence
  Description of Artificial Sequence: Synthetic oligonucleotide
uccaauuucacacugaggg

SEQ ID NO: 2828644 - RNA, 19 nt, Artificial Sequence
  Description of Artificial Sequence: Synthetic oligonucleotide
aaucuagcagcuucugucc

SEQ ID NO: 2828645 - RNA, 19 nt, Artificial Sequence
  Description of Artificial Sequence: Synthetic oligonucleotide
uagaagauugccugcagcg

SEQ ID NO: 2828646 - RNA, 19 nt, Artificial Sequence
  Description of Artificial Sequence: Synthetic oligonucleotide
acacuauacacauacaccu

SEQ ID NO: 2828647 - RNA, 19 nt, Artificial Sequence
  Description of Artificial Sequence: Synthetic oligonucleotide
uacacauacaccuucgcug

SEQ ID NO: 2828648 - RNA, 19 nt, Artificial Sequence
  Description of Artificial Sequence: Synthetic oligonucleotide
ucacuaaagaagaaauccc

SEQ ID NO: 2828649 - RNA, 19 nt, Artificial Sequence
  Description of Artificial Sequence: Synthetic oligonucleotide
uaucuugucacgaaggauc

SEQ ID NO: 2828650 - RNA, 19 nt, Artificial Sequence
  Description of Artificial Sequence: Synthetic oligonucleotide
acuauacacauacaccuuc

SEQ ID NO: 2828651 - RNA, 19 nt, Artificial Sequence
  Description of Artificial Sequence: Synthetic oligonucleotide
gucacuaaagaagaaaucc

SEQ ID NO: 2828652 - RNA, 19 nt, Artificial Sequence
  Description of Artificial Sequence: Synthetic oligonucleotide
ucacacuauacacauacac

SEQ ID NO: 2828653 - RNA, 19 nt, Artificial Sequence
  Description of Artificial Sequence: Synthetic oligonucleotide
uagcacgucacuaaagaag

SEQ ID NO: 2828654 - RNA, 19 nt, Artificial Sequence
  Description of Artificial Sequence: Synthetic oligonucleotide
acacacucacacuauacac

SEQ ID NO: 2828655 - RNA, 19 nt, Artificial Sequence
  Description of Artificial Sequence: Synthetic oligonucleotide
uucacacugagggugaugg

SEQ ID NO: 2828656 - RNA, 19 nt, Artificial Sequence
  Description of Artificial Sequence: Synthetic oligonucleotide
cacuaaagaagaaaucccc

SEQ ID NO: 2828657 - RNA, 19 nt, Artificial Sequence
  Description of Artificial Sequence: Synthetic oligonucleotide
cuaaagaagaaauccccag

SEQ ID NO: 2828658 - RNA, 19 nt, Artificial Sequence
  Description of Artificial Sequence: Synthetic oligonucleotide
uacucugugaagaaggauc

SEQ ID NO: 2828659 - RNA, 19 nt, Artificial Sequence
  Description of Artificial Sequence: Synthetic oligonucleotide
ucuucggucacaccucugg

SEQ ID NO: 2828660 - RNA, 19 nt, Artificial Sequence
  Description of Artificial Sequence: Synthetic oligonucleotide
ugcaguaccagcagcaucu

SEQ ID NO: 2828661 - RNA, 19 nt, Artificial Sequence
  Description of Artificial Sequence: Synthetic oligonucleotide
ucacgaaggaucaccaugc

SEQ ID NO: 2828662 - RNA, 19 nt, Artificial Sequence
  Description of Artificial Sequence: Synthetic oligonucleotide
aaauccccaggucuccgcc

SEQ ID NO: 2828663 - RNA, 19 nt, Artificial Sequence
  Description of Artificial Sequence: Synthetic oligonucleotide
cacacuauacacauacacc

SEQ ID NO: 2828664 - RNA, 19 nt, Artificial Sequence
  Description of Artificial Sequence: Synthetic oligonucleotide
gaaucuagcagcuucuguc

SEQ ID NO: 2828665 - RNA, 19 nt, Artificial Sequence
  Description of Artificial Sequence: Synthetic oligonucleotide
ugcacaggguagaagauug

SEQ ID NO: 2828666 - RNA, 19 nt, Artificial Sequence
  Description of Artificial Sequence: Synthetic oligonucleotide
acacauacaccuucgcugg

SEQ ID NO: 2828667 - RNA, 19 nt, Artificial Sequence
  Description of Artificial Sequence: Synthetic oligonucleotide
caagcuggcgcacugacgg

SEQ ID NO: 2828668 - RNA, 19 nt, Artificial Sequence
  Description of Artificial Sequence: Synthetic oligonucleotide
gaguagaggccauaggugc

SEQ ID NO: 2828669 - RNA, 19 nt, Artificial Sequence
  Description of Artificial Sequence: Synthetic oligonucleotide
uuugugagcagcugguucu

SEQ ID NO: 2828670 - RNA, 19 nt, Artificial Sequence
  Description of Artificial Sequence: Synthetic oligonucleotide
aagaaauccccaggucucc

SEQ ID NO: 2828671 - RNA, 19 nt, Artificial Sequence
  Description of Artificial Sequence: Synthetic oligonucleotide
aucaccaugcccuuuguga

SEQ ID NO: 2828672 - RNA, 19 nt, Artificial Sequence
  Description of Artificial Sequence: Synthetic oligonucleotide
acucugugaagaaggaucc

SEQ ID NO: 2828673 - RNA, 19 nt, Artificial Sequence
  Description of Artificial Sequence: Synthetic oligonucleotide
acgaaggaucaccaugccc

SEQ ID NO: 2828674 - RNA, 19 nt, Artificial Sequence
  Description of Artificial Sequence: Synthetic oligonucleotide
ucugcagguacucugugaa

SEQ ID NO: 2828675 - RNA, 19 nt, Artificial Sequence
  Description of Artificial Sequence: Synthetic oligonucleotide
gaagauugccugcagcgug

SEQ ID NO: 2828676 - RNA, 19 nt, Artificial Sequence
  Description of Artificial Sequence: Synthetic oligonucleotide
cucacacacacacacacac

SEQ ID NO: 2828677 - RNA, 19 nt, Artificial Sequence
  Description of Artificial Sequence: Synthetic oligonucleotide
uauacacauacaccuucgc

SEQ ID NO: 2828678 - RNA, 19 nt, Artificial Sequence
  Description of Artificial Sequence: Synthetic oligonucleotide
ucaccaugcccuuugugag

SEQ ID NO: 2828679 - RNA, 19 nt, Artificial Sequence
  Description of Artificial Sequence: Synthetic oligonucleotide
ugaagaaggaucccagcuc

SEQ ID NO: 2828680 - RNA, 19 nt, Artificial Sequence
  Description of Artificial Sequence: Synthetic oligonucleotide
uucugucccucguagaagc

SEQ ID NO: 2828681 - RNA, 19 nt, Artificial Sequence
  Description of Artificial Sequence: Synthetic oligonucleotide
cacacacacacacacacac

SEQ ID NO: 2828682 - RNA, 19 nt, Artificial Sequence
  Description of Artificial Sequence: Synthetic oligonucleotide
aggguagaagauugccugc

SEQ ID NO: 2828683 - RNA, 19 nt, Artificial Sequence
  Description of Artificial Sequence: Synthetic oligonucleotide
agaagcguaucuugucacg

SEQ ID NO: 2828684 - RNA, 19 nt, Artificial Sequence
  Description of Artificial Sequence: Synthetic oligonucleotide
caauuucacacugagggug

SEQ ID NO: 2828685 - RNA, 19 nt, Artificial Sequence
  Description of Artificial Sequence: Synthetic oligonucleotide
cucucucacacacacacac

SEQ ID NO: 2828686 - RNA, 19 nt, Artificial Sequence
  Description of Artificial Sequence: Synthetic oligonucleotide
aaggaucccagcucugucu

SEQ ID NO: 2828687 - RNA, 19 nt, Artificial Sequence
  Description of Artificial Sequence: Synthetic oligonucleotide
agcagcaucugugcgaugg

SEQ ID NO: 2828688 - RNA, 19 nt, Artificial Sequence
  Description of Artificial Sequence: Synthetic oligonucleotide
caggguagaagauugccug

SEQ ID NO: 2828689 - RNA, 19 nt, Artificial Sequence
  Description of Artificial Sequence: Synthetic oligonucleotide
aucuagcagcuucuguccc

SEQ ID NO: 2828690 - RNA, 19 nt, Artificial Sequence
  Description of Artificial Sequence: Synthetic oligonucleotide
cuugucacgaaggaucacc

SEQ ID NO: 2828691 - RNA, 19 nt, Artificial Sequence
  Description of Artificial Sequence: Synthetic oligonucleotide
agguacucugugaagaagg

SEQ ID NO: 2828692 - RNA, 19 nt, Artificial Sequence
  Description of Artificial Sequence: Synthetic oligonucleotide
auacacauacaccuucgcu

SEQ ID NO: 2828693 - RNA, 19 nt, Artificial Sequence
  Description of Artificial Sequence: Synthetic oligonucleotide
ucugugaagaaggauccca

SEQ ID NO: 2828694 - RNA, 19 nt, Artificial Sequence
  Description of Artificial Sequence: Synthetic oligonucleotide
gucacgaaggaucaccaug

SEQ ID NO: 2828695 - RNA, 19 nt, Artificial Sequence
  Description of Artificial Sequence: Synthetic oligonucleotide
cucucacacacacacacac

SEQ ID NO: 2828696 - RNA, 19 nt, Artificial Sequence
  Description of Artificial Sequence: Synthetic oligonucleotide
ugugaagaaggaucccagc

SEQ ID NO: 2828697 - RNA, 19 nt, Artificial Sequence
  Description of Artificial Sequence: Synthetic oligonucleotide
gugagagcgggccagcgcg

SEQ ID NO: 2828698 - RNA, 19 nt, Artificial Sequence
  Description of Artificial Sequence: Synthetic oligonucleotide
cacacacacacacucacac

SEQ ID NO: 2828699 - RNA, 19 nt, Artificial Sequence
  Description of Artificial Sequence: Synthetic oligonucleotide
gaucagugucuccaggcgc

SEQ ID NO: 2828700 - RNA, 19 nt, Artificial Sequence
  Description of Artificial Sequence: Synthetic oligonucleotide
cacacacacacacacacuc

SEQ ID NO: 2828701 - RNA, 19 nt, Artificial Sequence
  Description of Artificial Sequence: Synthetic oligonucleotide
ucggucacaccucuggacu

SEQ ID NO: 2828702 - RNA, 19 nt, Artificial Sequence
  Description of Artificial Sequence: Synthetic oligonucleotide
ugucuccaggcgcagguag

SEQ ID NO: 2828703 - RNA, 19 nt, Artificial Sequence
  Description of Artificial Sequence: Synthetic oligonucleotide
uugucacgaaggaucacca

SEQ ID NO: 2828704 - RNA, 19 nt, Artificial Sequence
  Description of Artificial Sequence: Synthetic oligonucleotide
guagaagauugccugcagc

SEQ ID NO: 2828705 - RNA, 19 nt, Artificial Sequence
  Description of Artificial Sequence: Synthetic oligonucleotide
agcguaucuugucacgaag

SEQ ID NO: 2828706 - RNA, 19 nt, Artificial Sequence
  Description of Artificial Sequence: Synthetic oligonucleotide
aagauugccugcagcgugg

SEQ ID NO: 2828707 - RNA, 19 nt, Artificial Sequence
  Description of Artificial Sequence: Synthetic oligonucleotide
cucguagaagcguaucuug

SEQ ID NO: 2828708 - RNA, 19 nt, Artificial Sequence
  Description of Artificial Sequence: Synthetic oligonucleotide
ucguagaagcguaucuugu

SEQ ID NO: 2828709 - RNA, 19 nt, Artificial Sequence
  Description of Artificial Sequence: Synthetic oligonucleotide
guuccggaagugcagcagg

SEQ ID NO: 2828710 - RNA, 19 nt, Artificial Sequence
  Description of Artificial Sequence: Synthetic oligonucleotide
uuccggaagugcagcaggg

SEQ ID NO: 2828711 - RNA, 19 nt, Artificial Sequence
  Description of Artificial Sequence: Synthetic oligonucleotide
guagaagcguaucuuguca

SEQ ID NO: 2828712 - RNA, 19 nt, Artificial Sequence
  Description of Artificial Sequence: Synthetic oligonucleotide
cugugaagaaggaucccag

SEQ ID NO: 2828713 - RNA, 19 nt, Artificial Sequence
  Description of Artificial Sequence: Synthetic oligonucleotide
uagaagcguaucuugucac

SEQ ID NO: 2828714 - RNA, 19 nt, Artificial Sequence
  Description of Artificial Sequence: Synthetic oligonucleotide
acuaaagaagaaaucccca

SEQ ID NO: 2828715 - RNA, 19 nt, Artificial Sequence
  Description of Artificial Sequence: Synthetic oligonucleotide
gaugguguuccggaagugc

SEQ ID NO: 2828716 - RNA, 19 nt, Artificial Sequence
  Description of Artificial Sequence: Synthetic oligonucleotide
uacaccuucgcuggaguag

SEQ ID NO: 2828717 - RNA, 19 nt, Artificial Sequence
  Description of Artificial Sequence: Synthetic oligonucleotide
guagucuucggucacaccu

SEQ ID NO: 2828718 - RNA, 19 nt, Artificial Sequence
  Description of Artificial Sequence: Synthetic oligonucleotide
gaagaaauccccaggucuc

SEQ ID NO: 2828719 - RNA, 19 nt, Artificial Sequence
  Description of Artificial Sequence: Synthetic oligonucleotide
aguagaggccauaggugcc

SEQ ID NO: 2828720 - RNA, 19 nt, Artificial Sequence
  Description of Artificial Sequence: Synthetic oligonucleotide
aauuucacacugaggguga

SEQ ID NO: 2828721 - RNA, 19 nt, Artificial Sequence
  Description of Artificial Sequence: Synthetic oligonucleotide
uccgccagcgaaucuagca

SEQ ID NO: 2828722 - RNA, 19 nt, Artificial Sequence
  Description of Artificial Sequence: Synthetic oligonucleotide
gaagaaggaucccagcucu

SEQ ID NO: 2828723 - RNA, 19 nt, Artificial Sequence
  Description of Artificial Sequence: Synthetic oligonucleotide
agcacgucacuaaagaaga

SEQ ID NO: 2828724 - RNA, 19 nt, Artificial Sequence
  Description of Artificial Sequence: Synthetic oligonucleotide
uucgcuggaguagaggcca

SEQ ID NO: 2828725 - RNA, 19 nt, Artificial Sequence
  Description of Artificial Sequence: Synthetic oligonucleotide
ucugucccucguagaagcg

SEQ ID NO: 2828726 - RNA, 19 nt, Artificial Sequence
  Description of Artificial Sequence: Synthetic oligonucleotide
ggugacaccaccuucugga

SEQ ID NO: 2828727 - RNA, 19 nt, Artificial Sequence
  Description of Artificial Sequence: Synthetic oligonucleotide
aggaucaccaugcccuuug

SEQ ID NO: 2828728 - RNA, 19 nt, Artificial Sequence
  Description of Artificial Sequence: Synthetic oligonucleotide
cuuugugagcagcugguuc

SEQ ID NO: 2828729 - RNA, 19 nt, Artificial Sequence
  Description of Artificial Sequence: Synthetic oligonucleotide
cacacacacacacacucac

SEQ ID NO: 2828730 - RNA, 19 nt, Artificial Sequence
  Description of Artificial Sequence: Synthetic oligonucleotide
ucucacacacacacacaca

SEQ ID NO: 2828731 - RNA, 19 nt, Artificial Sequence
  Description of Artificial Sequence: Synthetic oligonucleotide
ugguguuccggaagugcag

SEQ ID NO: 2828732 - RNA, 19 nt, Artificial Sequence
  Description of Artificial Sequence: Synthetic oligonucleotide
aagcuggcgcacugacggc

SEQ ID NO: 2828733 - RNA, 19 nt, Artificial Sequence
  Description of Artificial Sequence: Synthetic oligonucleotide
acugacggcuccuugcccu

SEQ ID NO: 2828734 - RNA, 19 nt, Artificial Sequence
  Description of Artificial Sequence: Synthetic oligonucleotide
agugucuccaggcgcaggu

SEQ ID NO: 2828735 - RNA, 19 nt, Artificial Sequence
  Description of Artificial Sequence: Synthetic oligonucleotide
ucacacacacacacacaca

SEQ ID NO: 2828736 - RNA, 19 nt, Artificial Sequence
  Description of Artificial Sequence: Synthetic oligonucleotide
uugccugcagcguggguag

SEQ ID NO: 2828737 - RNA, 19 nt, Artificial Sequence
  Description of Artificial Sequence: Synthetic oligonucleotide
cacacucacacuauacaca

SEQ ID NO: 2828738 - RNA, 19 nt, Artificial Sequence
  Description of Artificial Sequence: Synthetic oligonucleotide
ugcagcguggguagcacgu

SEQ ID NO: 2828739 - RNA, 19 nt, Artificial Sequence
  Description of Artificial Sequence: Synthetic oligonucleotide
ucuccgccagcgaaucuag

SEQ ID NO: 2828740 - RNA, 19 nt, Artificial Sequence
  Description of Artificial Sequence: Synthetic oligonucleotide
ucucucacacacacacaca

SEQ ID NO: 2828741 - RNA, 19 nt, Artificial Sequence
  Description of Artificial Sequence: Synthetic oligonucleotide
gguagcacgucacuaaaga

SEQ ID NO: 2828742 - RNA, 19 nt, Artificial Sequence
  Description of Artificial Sequence: Synthetic oligonucleotide
ggaucagugucuccaggcg

SEQ ID NO: 2828743 - RNA, 19 nt, Artificial Sequence
  Description of Artificial Sequence: Synthetic oligonucleotide
uucggucacaccucuggac

SEQ ID NO: 2828744 - RNA, 19 nt, Artificial Sequence
  Description of Artificial Sequence: Synthetic oligonucleotide
cacaggguagaagauugcc

SEQ ID NO: 2828745 - RNA, 19 nt, Artificial Sequence
  Description of Artificial Sequence: Synthetic oligonucleotide
gaaauccccaggucuccgc

SEQ ID NO: 2828746 - RNA, 19 nt, Artificial Sequence
  Description of Artificial Sequence: Synthetic oligonucleotide
cuucgcuggaguagaggcc

SEQ ID NO: 2828747 - RNA, 19 nt, Artificial Sequence
  Description of Artificial Sequence: Synthetic oligonucleotide
agggugaugguguuccgga

SEQ ID NO: 2828748 - RNA, 19 nt, Artificial Sequence
  Description of Artificial Sequence: Synthetic oligonucleotide
cuagguacggugacaccac

SEQ ID NO: 2828749 - RNA, 19 nt, Artificial Sequence
  Description of Artificial Sequence: Synthetic oligonucleotide
cacacugagggugauggug

SEQ ID NO: 2828750 - RNA, 19 nt, Artificial Sequence
  Description of Artificial Sequence: Synthetic oligonucleotide
gaggccauaggugccuagg

SEQ ID NO: 2828751 - RNA, 19 nt, Artificial Sequence
  Description of Artificial Sequence: Synthetic oligonucleotide
acgucacuaaagaagaaau

SEQ ID NO: 2828752 - RNA, 19 nt, Artificial Sequence
  Description of Artificial Sequence: Synthetic oligonucleotide
aagcguaucuugucacgaa

SEQ ID NO: 2828753 - RNA, 19 nt, Artificial Sequence
  Description of Artificial Sequence: Synthetic oligonucleotide
uguuccggaagugcagcag

SEQ ID NO: 2828754 - RNA, 19 nt, Artificial Sequence
  Description of Artificial Sequence: Synthetic oligonucleotide
aagugcagcagggcaagcu

SEQ ID NO: 2828755 - RNA, 19 nt, Artificial Sequence
  Description of Artificial Sequence: Synthetic oligonucleotide
ugcagcagggcaagcuggc

SEQ ID NO: 2828756 - RNA, 19 nt, Artificial Sequence
  Description of Artificial Sequence: Synthetic oligonucleotide
gcguccuccaauuucacac

SEQ ID NO: 2828757 - RNA, 19 nt, Artificial Sequence
  Description of Artificial Sequence: Synthetic oligonucleotide
uagucuucggucacaccuc

SEQ ID NO: 2828758 - RNA, 19 nt, Artificial Sequence
  Description of Artificial Sequence: Synthetic oligonucleotide
ggugaugguguuccggaag

SEQ ID NO: 2828759 - RNA, 19 nt, Artificial Sequence
  Description of Artificial Sequence: Synthetic oligonucleotide
gaucaccaugcccuuugug

SEQ ID NO: 2828760 - RNA, 19 nt, Artificial Sequence
  Description of Artificial Sequence: Synthetic oligonucleotide
ccuucgcuggaguagaggc

SEQ ID NO: 2828761 - RNA, 19 nt, Artificial Sequence
  Description of Artificial Sequence: Synthetic oligonucleotide
gaagcguaucuugucacga

SEQ ID NO: 2828762 - RNA, 19 nt, Artificial Sequence
  Description of Artificial Sequence: Synthetic oligonucleotide
gccauaggugccuagguac

SEQ ID NO: 2828763 - RNA, 19 nt, Artificial Sequence
  Description of Artificial Sequence: Synthetic oligonucleotide
gagggugaugguguuccgg

SEQ ID NO: 2828764 - RNA, 19 nt, Artificial Sequence
  Description of Artificial Sequence: Synthetic oligonucleotide
uggguagcacgucacuaaa

SEQ ID NO: 2828765 - RNA, 19 nt, Artificial Sequence
  Description of Artificial Sequence: Synthetic oligonucleotide
cagcgaaucuagcagcuuc

SEQ ID NO: 2828766 - RNA, 19 nt, Artificial Sequence
  Description of Artificial Sequence: Synthetic oligonucleotide
cacacacucacacuauaca

SEQ ID NO: 2828767 - RNA, 19 nt, Artificial Sequence
  Description of Artificial Sequence: Synthetic oligonucleotide
cacacacacacucacacua

SEQ ID NO: 2828768 - RNA, 19 nt, Artificial Sequence
  Description of Artificial Sequence: Synthetic oligonucleotide
agguagucuucggucacac

SEQ ID NO: 2828769 - RNA, 19 nt, Artificial Sequence
  Description of Artificial Sequence: Synthetic oligonucleotide
cuugcccugcacaggguag

SEQ ID NO: 2828770 - RNA, 19 nt, Artificial Sequence
  Description of Artificial Sequence: Synthetic oligonucleotide
cuggaguagaggccauagg

SEQ ID NO: 2828771 - RNA, 19 nt, Artificial Sequence
  Description of Artificial Sequence: Synthetic oligonucleotide
uaggugccuagguacggug

SEQ ID NO: 2828772 - RNA, 19 nt, Artificial Sequence
  Description of Artificial Sequence: Synthetic oligonucleotide
aauccccaggucuccgcca

SEQ ID NO: 2828773 - RNA, 19 nt, Artificial Sequence
  Description of Artificial Sequence: Synthetic oligonucleotide
gaaggaucccagcucuguc

SEQ ID NO: 2828774 - RNA, 19 nt, Artificial Sequence
  Description of Artificial Sequence: Synthetic oligonucleotide
ugucccucguagaagcgua

SEQ ID NO: 2828775 - RNA, 19 nt, Artificial Sequence
  Description of Artificial Sequence: Synthetic oligonucleotide
ugacaccaccuucuggauc

SEQ ID NO: 2828776 - RNA, 19 nt, Artificial Sequence
  Description of Artificial Sequence: Synthetic oligonucleotide
accaccuucuggaucagug

SEQ ID NO: 2828777 - RNA, 19 nt, Artificial Sequence
  Description of Artificial Sequence: Synthetic oligonucleotide
uagguacggugacaccacc

SEQ ID NO: 2828778 - RNA, 19 nt, Artificial Sequence
  Description of Artificial Sequence: Synthetic oligonucleotide
ugccuagguacggugacac

SEQ ID NO: 2828779 - RNA, 19 nt, Artificial Sequence
  Description of Artificial Sequence: Synthetic oligonucleotide
cauaggugccuagguacgg

SEQ ID NO: 2828780 - RNA, 19 nt, Artificial Sequence
  Description of Artificial Sequence: Synthetic oligonucleotide
acacacacacacucacacu

SEQ ID NO: 2828781 - RNA, 19 nt, Artificial Sequence
  Description of Artificial Sequence: Synthetic oligonucleotide
agaagauugccugcagcgu

SEQ ID NO: 2828782 - RNA, 19 nt, Artificial Sequence
  Description of Artificial Sequence: Synthetic oligonucleotide
acaggguagaagauugccu

SEQ ID NO: 2828783 - RNA, 19 nt, Artificial Sequence
  Description of Artificial Sequence: Synthetic oligonucleotide
agcaucugugcgauggcag

SEQ ID NO: 2828784 - RNA, 19 nt, Artificial Sequence
  Description of Artificial Sequence: Synthetic oligonucleotide
ugagggugaugguguuccg

SEQ ID NO: 2828785 - RNA, 19 nt, Artificial Sequence
  Description of Artificial Sequence: Synthetic oligonucleotide
agucuucggucacaccucu

SEQ ID NO: 2828786 - RNA, 19 nt, Artificial Sequence
  Description of Artificial Sequence: Synthetic oligonucleotide
auugccugcagcgugggua

SEQ ID NO: 2828787 - RNA, 19 nt, Artificial Sequence
  Description of Artificial Sequence: Synthetic oligonucleotide
caucugugcgauggcaggg

SEQ ID NO: 2828788 - RNA, 19 nt, Artificial Sequence
  Description of Artificial Sequence: Synthetic oligonucleotide
aucugugcgauggcagggg

SEQ ID NO: 2828789 - RNA, 19 nt, Artificial Sequence
  Description of Artificial Sequence: Synthetic oligonucleotide
ggaguagaggccauaggug

SEQ ID NO: 2828790 - RNA, 19 nt, Artificial Sequence
  Description of Artificial Sequence: Synthetic oligonucleotide
agagcgggccagcgcgucc

SEQ ID NO: 2828791 - RNA, 19 nt, Artificial Sequence
  Description of Artificial Sequence: Synthetic oligonucleotide
gcaucugugcgauggcagg

SEQ ID NO: 2828792 - RNA, 19 nt, Artificial Sequence
  Description of Artificial Sequence: Synthetic oligonucleotide
guagcacgucacuaaagaa

SEQ ID NO: 2828793 - RNA, 19 nt, Artificial Sequence
  Description of Artificial Sequence: Synthetic oligonucleotide
guccuccaauuucacacug

SEQ ID NO: 2828794 - RNA, 19 nt, Artificial Sequence
  Description of Artificial Sequence: Synthetic oligonucleotide
gguagaagauugccugcag

SEQ ID NO: 2828795 - RNA, 19 nt, Artificial Sequence
  Description of Artificial Sequence: Synthetic oligonucleotide
agaaggaucccagcucugu

SEQ ID NO: 2828796 - RNA, 19 nt, Artificial Sequence
  Description of Artificial Sequence: Synthetic oligonucleotide
cagcagggcaagcuggcgc

SEQ ID NO: 2828797 - RNA, 19 nt, Artificial Sequence
  Description of Artificial Sequence: Synthetic oligonucleotide
aucuugucacgaaggauca

SEQ ID NO: 2828798 - RNA, 19 nt, Artificial Sequence
  Description of Artificial Sequence: Synthetic oligonucleotide
ccuccaauuucacacugag

SEQ ID NO: 2828799 - RNA, 19 nt, Artificial Sequence
  Description of Artificial Sequence: Synthetic oligonucleotide
cuucugucccucguagaag

SEQ ID NO: 2828800 - RNA, 19 nt, Artificial Sequence
  Description of Artificial Sequence: Synthetic oligonucleotide
caccaugcccuuugugagc

SEQ ID NO: 2828801 - RNA, 19 nt, Artificial Sequence
  Description of Artificial Sequence: Synthetic oligonucleotide
ggggacgcgagcgugagag

SEQ ID NO: 2828802 - RNA, 19 nt, Artificial Sequence
  Description of Artificial Sequence: Synthetic oligonucleotide
caugcccuuugugagcagc

SEQ ID NO: 2828803 - RNA, 19 nt, Artificial Sequence
  Description of Artificial Sequence: Synthetic oligonucleotide
ggacgcgagcgugagagcg

SEQ ID NO: 2828804 - RNA, 19 nt, Artificial Sequence
  Description of Artificial Sequence: Synthetic oligonucleotide
uuucacacugagggugaug

SEQ ID NO: 2828805 - RNA, 19 nt, Artificial Sequence
  Description of Artificial Sequence: Synthetic oligonucleotide
auccccaggucuccgccag

SEQ ID NO: 2828806 - RNA, 19 nt, Artificial Sequence
  Description of Artificial Sequence: Synthetic oligonucleotide
aucagugucuccaggcgca

SEQ ID NO: 2828807 - RNA, 19 nt, Artificial Sequence
  Description of Artificial Sequence: Synthetic oligonucleotide
ccauaggugccuagguacg

SEQ ID NO: 2828808 - RNA, 19 nt, Artificial Sequence
  Description of Artificial Sequence: Synthetic oligonucleotide
gcguaucuugucacgaagg

SEQ ID NO: 2828809 - RNA, 19 nt, Artificial Sequence
  Description of Artificial Sequence: Synthetic oligonucleotide
augguguuccggaagugca

SEQ ID NO: 2828810 - RNA, 19 nt, Artificial Sequence
  Description of Artificial Sequence: Synthetic oligonucleotide
cacgaaggaucaccaugcc

SEQ ID NO: 2828811 - RNA, 19 nt, Artificial Sequence
  Description of Artificial Sequence: Synthetic oligonucleotide
cagguacucugugaagaag

SEQ ID NO: 2828812 - RNA, 19 nt, Artificial Sequence
  Description of Artificial Sequence: Synthetic oligonucleotide
gcccuuugugagcagcugg

SEQ ID NO: 2828813 - RNA, 19 nt, Artificial Sequence
  Description of Artificial Sequence: Synthetic oligonucleotide
aggccauaggugccuaggu

SEQ ID NO: 2828814 - RNA, 19 nt, Artificial Sequence
  Description of Artificial Sequence: Synthetic oligonucleotide
ugaugguguuccggaagug

SEQ ID NO: 2828815 - RNA, 19 nt, Artificial Sequence
  Description of Artificial Sequence: Synthetic oligonucleotide
acugagggugaugguguuc

SEQ ID NO: 2828816 - RNA, 19 nt, Artificial Sequence
  Description of Artificial Sequence: Synthetic oligonucleotide
accuucgcuggaguagagg

SEQ ID NO: 2828817 - RNA, 19 nt, Artificial Sequence
  Description of Artificial Sequence: Synthetic oligonucleotide
ugucacgaaggaucaccau

SEQ ID NO: 2828818 - RNA, 19 nt, Artificial Sequence
  Description of Artificial Sequence: Synthetic oligonucleotide
cagcugguucugcagguac

SEQ ID NO: 2828819 - RNA, 19 nt, Artificial Sequence
  Description of Artificial Sequence: Synthetic oligonucleotide
gacgcgagcgugagagcgg

SEQ ID NO: 2828820 - RNA, 19 nt, Artificial Sequence
  Description of Artificial Sequence: Synthetic oligonucleotide
guggguagcacgucacuaa

SEQ ID NO: 2828821 - RNA, 19 nt, Artificial Sequence
  Description of Artificial Sequence: Synthetic oligonucleotide
agcgcguccuccaauuuca

SEQ ID NO: 2828822 - RNA, 19 nt, Artificial Sequence
  Description of Artificial Sequence: Synthetic oligonucleotide
agcguggguagcacgucac

SEQ ID NO: 2828823 - RNA, 19 nt, Artificial Sequence
  Description of Artificial Sequence: Synthetic oligonucleotide
agcgaaucuagcagcuucu

SEQ ID NO: 2828824 - RNA, 19 nt, Artificial Sequence
  Description of Artificial Sequence: Synthetic oligonucleotide
agggcaagcuggcgcacug

SEQ ID NO: 2828825 - RNA, 19 nt, Artificial Sequence
  Description of Artificial Sequence: Synthetic oligonucleotide
agaggccauaggugccuag

SEQ ID NO: 2828826 - RNA, 19 nt, Artificial Sequence
  Description of Artificial Sequence: Synthetic oligonucleotide
acaccuucgcuggaguaga

SEQ ID NO: 2828827 - RNA, 19 nt, Artificial Sequence
  Description of Artificial Sequence: Synthetic oligonucleotide
aggaucccagcucugucuu

SEQ ID NO: 2828828 - RNA, 19 nt, Artificial Sequence
  Description of Artificial Sequence: Synthetic oligonucleotide
cugcagcguggguagcacg

SEQ ID NO: 2828829 - RNA, 19 nt, Artificial Sequence
  Description of Artificial Sequence: Synthetic oligonucleotide
uccggaagugcagcagggc

SEQ ID NO: 2828830 - RNA, 19 nt, Artificial Sequence
  Description of Artificial Sequence: Synthetic oligonucleotide
cacgucacuaaagaagaaa

SEQ ID NO: 2828831 - RNA, 19 nt, Artificial Sequence
  Description of Artificial Sequence: Synthetic oligonucleotide
guacggugacaccaccuuc

SEQ ID NO: 2828832 - RNA, 19 nt, Artificial Sequence
  Description of Artificial Sequence: Synthetic oligonucleotide
uugugagcagcugguucug

SEQ ID NO: 2828833 - RNA, 19 nt, Artificial Sequence
  Description of Artificial Sequence: Synthetic oligonucleotide
cugcaguaccagcagcauc

SEQ ID NO: 2828834 - RNA, 19 nt, Artificial Sequence
  Description of Artificial Sequence: Synthetic oligonucleotide
aggucuccgccagcgaauc

SEQ ID NO: 2828835 - RNA, 19 nt, Artificial Sequence
  Description of Artificial Sequence: Synthetic oligonucleotide
agauugccugcagcguggg

SEQ ID NO: 2828836 - RNA, 19 nt, Artificial Sequence
  Description of Artificial Sequence: Synthetic oligonucleotide
cucugugaagaaggauccc

SEQ ID NO: 2828837 - RNA, 19 nt, Artificial Sequence
  Description of Artificial Sequence: Synthetic oligonucleotide
auacaccuucgcuggagua

SEQ ID NO: 2828838 - RNA, 19 nt, Artificial Sequence
  Description of Artificial Sequence: Synthetic oligonucleotide
ugugagcagcugguucugc

SEQ ID NO: 2828839 - RNA, 19 nt, Artificial Sequence
  Description of Artificial Sequence: Synthetic oligonucleotide
cucacacuauacacauaca

SEQ ID NO: 2828840 - RNA, 19 nt, Artificial Sequence
  Description of Artificial Sequence: Synthetic oligonucleotide
ggaagugcagcagggcaag

SEQ ID NO: 2828841 - RNA, 19 nt, Artificial Sequence
  Description of Artificial Sequence: Synthetic oligonucleotide
auaggugccuagguacggu

SEQ ID NO: 2828842 - RNA, 19 nt, Artificial Sequence
  Description of Artificial Sequence: Synthetic oligonucleotide
uccaggcgcagguagucuu

SEQ ID NO: 2828843 - RNA, 19 nt, Artificial Sequence
  Description of Artificial Sequence: Synthetic oligonucleotide
gagcgugagagcgggccag

SEQ ID NO: 2828844 - RNA, 19 nt, Artificial Sequence
  Description of Artificial Sequence: Synthetic oligonucleotide
gcuggaguagaggccauag

SEQ ID NO: 2828845 - RNA, 19 nt, Artificial Sequence
  Description of Artificial Sequence: Synthetic oligonucleotide
ucagugucuccaggcgcag

SEQ ID NO: 2828846 - RNA, 19 nt, Artificial Sequence
  Description of Artificial Sequence: Synthetic oligonucleotide
ucacacugagggugauggu

SEQ ID NO: 2828847 - RNA, 19 nt, Artificial Sequence
  Description of Artificial Sequence: Synthetic oligonucleotide
gugaugguguuccggaagu

SEQ ID NO: 2828848 - RNA, 19 nt, Artificial Sequence
  Description of Artificial Sequence: Synthetic oligonucleotide
gguguuccggaagugcagc

SEQ ID NO: 2828849 - RNA, 19 nt, Artificial Sequence
  Description of Artificial Sequence: Synthetic oligonucleotide
cacaccucuggacucaugu

SEQ ID NO: 2828850 - RNA, 19 nt, Artificial Sequence
  Description of Artificial Sequence: Synthetic oligonucleotide
ugcccuuugugagcagcug

SEQ ID NO: 2828851 - RNA, 19 nt, Artificial Sequence
  Description of Artificial Sequence: Synthetic oligonucleotide
acacacacacacacacuca

SEQ ID NO: 2828852 - RNA, 19 nt, Artificial Sequence
  Description of Artificial Sequence: Synthetic oligonucleotide
ucacaccucuggacucaug

SEQ ID NO: 2828853 - RNA, 19 nt, Artificial Sequence
  Description of Artificial Sequence: Synthetic oligonucleotide
ugagagcgggccagcgcgu

SEQ ID NO: 2828854 - RNA, 19 nt, Artificial Sequence
  Description of Artificial Sequence: Synthetic oligonucleotide
agcgugagagcgggccagc

SEQ ID NO: 2828855 - RNA, 19 nt, Artificial Sequence
  Description of Artificial Sequence: Synthetic oligonucleotide
acgcgagcgugagagcggg

SEQ ID NO: 2828856 - RNA, 19 nt, Artificial Sequence
  Description of Artificial Sequence: Synthetic oligonucleotide
uugcccugcacaggguaga

SEQ ID NO: 2828857 - RNA, 19 nt, Artificial Sequence
  Description of Artificial Sequence: Synthetic oligonucleotide
ggugccuagguacggugac

SEQ ID NO: 2828858 - RNA, 19 nt, Artificial Sequence
  Description of Artificial Sequence: Synthetic oligonucleotide
aggcgcagguagucuucgg

SEQ ID NO: 2828859 - RNA, 19 nt, Artificial Sequence
  Description of Artificial Sequence: Synthetic oligonucleotide
ucuugucacgaaggaucac

SEQ ID NO: 2828860 - RNA, 19 nt, Artificial Sequence
  Description of Artificial Sequence: Synthetic oligonucleotide
gcuucugucccucguagaa

SEQ ID NO: 2828861 - RNA, 19 nt, Artificial Sequence
  Description of Artificial Sequence: Synthetic oligonucleotide
cacugacggcuccuugccc

SEQ ID NO: 2828862 - RNA, 19 nt, Artificial Sequence
  Description of Artificial Sequence: Synthetic oligonucleotide
cccugcacaggguagaaga

SEQ ID NO: 2828863 - RNA, 19 nt, Artificial Sequence
  Description of Artificial Sequence: Synthetic oligonucleotide
cagcgcguccuccaauuuc

SEQ ID NO: 2828864 - RNA, 19 nt, Artificial Sequence
  Description of Artificial Sequence: Synthetic oligonucleotide
acggcuccuugcccugcac

SEQ ID NO: 2828865 - RNA, 19 nt, Artificial Sequence
  Description of Artificial Sequence: Synthetic oligonucleotide
ccucuggacucauguaccc

SEQ ID NO: 2828866 - RNA, 19 nt, Artificial Sequence
  Description of Artificial Sequence: Synthetic oligonucleotide
caggcgcagguagucuucg

SEQ ID NO: 2828867 - RNA, 19 nt, Artificial Sequence
  Description of Artificial Sequence: Synthetic oligonucleotide
gcacugacggcuccuugcc

SEQ ID NO: 2828868 - RNA, 19 nt, Artificial Sequence
  Description of Artificial Sequence: Synthetic oligonucleotide
acacacacacacacucaca

SEQ ID NO: 2828869 - RNA, 19 nt, Artificial Sequence
  Description of Artificial Sequence: Synthetic oligonucleotide
acacacacacacacacaca

SEQ ID NO: 2828870 - RNA, 19 nt, Artificial Sequence
  Description of Artificial Sequence: Synthetic oligonucleotide
cgaaggaucaccaugcccu

SEQ ID NO: 2828871 - RNA, 19 nt, Artificial Sequence
  Description of Artificial Sequence: Synthetic oligonucleotide
acacacacacacacacacu

SEQ ID NO: 2828872 - RNA, 19 nt, Artificial Sequence
  Description of Artificial Sequence: Synthetic oligonucleotide
cuucggucacaccucugga

SEQ ID NO: 2828873 - RNA, 19 nt, Artificial Sequence
  Description of Artificial Sequence: Synthetic oligonucleotide
cgucacuaaagaagaaauc

SEQ ID NO: 2828874 - RNA, 19 nt, Artificial Sequence
  Description of Artificial Sequence: Synthetic oligonucleotide
ccuagguacggugacacca

SEQ ID NO: 2828875 - RNA, 19 nt, Artificial Sequence
  Description of Artificial Sequence: Synthetic oligonucleotide
agcuggcgcacugacggcu

SEQ ID NO: 2828876 - RNA, 19 nt, Artificial Sequence
  Description of Artificial Sequence: Synthetic oligonucleotide
gguacucugugaagaagga

SEQ ID NO: 2828877 - RNA, 19 nt, Artificial Sequence
  Description of Artificial Sequence: Synthetic oligonucleotide
gguagucuucggucacacc

SEQ ID NO: 2828878 - RNA, 19 nt, Artificial Sequence
  Description of Artificial Sequence: Synthetic oligonucleotide
gaagugcagcagggcaagc

SEQ ID NO: 2828879 - RNA, 19 nt, Artificial Sequence
  Description of Artificial Sequence: Synthetic oligonucleotide
guguuccggaagugcagca

SEQ ID NO: 2828880 - RNA, 19 nt, Artificial Sequence
  Description of Artificial Sequence: Synthetic oligonucleotide
cugacggcuccuugcccug

SEQ ID NO: 2828881 - RNA, 19 nt, Artificial Sequence
  Description of Artificial Sequence: Synthetic oligonucleotide
ggcaagcuggcgcacugac

SEQ ID NO: 2828882 - RNA, 19 nt, Artificial Sequence
  Description of Artificial Sequence: Synthetic oligonucleotide
agguacggugacaccaccu

SEQ ID NO: 2828883 - RNA, 19 nt, Artificial Sequence
  Description of Artificial Sequence: Synthetic oligonucleotide
cguagaagcguaucuuguc

SEQ ID NO: 2828884 - RNA, 19 nt, Artificial Sequence
  Description of Artificial Sequence: Synthetic oligonucleotide
ccgccagcgaaucuagcag

SEQ ID NO: 2828885 - RNA, 19 nt, Artificial Sequence
  Description of Artificial Sequence: Synthetic oligonucleotide
uccuugcccugcacagggu

SEQ ID NO: 2828886 - RNA, 19 nt, Artificial Sequence
  Description of Artificial Sequence: Synthetic oligonucleotide
ucccucguagaagcguauc

SEQ ID NO: 2828887 - RNA, 19 nt, Artificial Sequence
  Description of Artificial Sequence: Synthetic oligonucleotide
aaggaucaccaugcccuuu

SEQ ID NO: 2828888 - RNA, 19 nt, Artificial Sequence
  Description of Artificial Sequence: Synthetic oligonucleotide
ggguagcacgucacuaaag

SEQ ID NO: 2828889 - RNA, 19 nt, Artificial Sequence
  Description of Artificial Sequence: Synthetic oligonucleotide
caccuucgcuggaguagag

SEQ ID NO: 2828890 - RNA, 19 nt, Artificial Sequence
  Description of Artificial Sequence: Synthetic oligonucleotide
augcccuuugugagcagcu

SEQ ID NO: 2828891 - RNA, 19 nt, Artificial Sequence
  Description of Artificial Sequence: Synthetic oligonucleotide
gcagguagucuucggucac

SEQ ID NO: 2828892 - RNA, 19 nt, Artificial Sequence
  Description of Artificial Sequence: Synthetic oligonucleotide
ggguagaagauugccugca

SEQ ID NO: 2828893 - RNA, 19 nt, Artificial Sequence
  Description of Artificial Sequence: Synthetic oligonucleotide
guaucuugucacgaaggau

SEQ ID NO: 2828894 - RNA, 19 nt, Artificial Sequence
  Description of Artificial Sequence: Synthetic oligonucleotide
aggugccuagguacgguga

SEQ ID NO: 2828895 - RNA, 19 nt, Artificial Sequence
  Description of Artificial Sequence: Synthetic oligonucleotide
gcaagcuggcgcacugacg

SEQ ID NO: 2828896 - RNA, 19 nt, Artificial Sequence
  Description of Artificial Sequence: Synthetic oligonucleotide
cuccgccagcgaaucuagc

SEQ ID NO: 2828897 - RNA, 19 nt, Artificial Sequence
  Description of Artificial Sequence: Synthetic oligonucleotide
gcgcagguagucuucgguc

SEQ ID NO: 2828898 - RNA, 19 nt, Artificial Sequence
  Description of Artificial Sequence: Synthetic oligonucleotide
cuggcgcacugacggcucc

SEQ ID NO: 2828899 - RNA, 19 nt, Artificial Sequence
  Description of Artificial Sequence: Synthetic oligonucleotide
cgcacugacggcuccuugc

SEQ ID NO: 2828900 - RNA, 19 nt, Artificial Sequence
  Description of Artificial Sequence: Synthetic oligonucleotide
cauacaccuucgcuggagu

SEQ ID NO: 2828901 - RNA, 19 nt, Artificial Sequence
  Description of Artificial Sequence: Synthetic oligonucleotide
auuucacacugagggugau

SEQ ID NO: 2828902 - RNA, 19 nt, Artificial Sequence
  Description of Artificial Sequence: Synthetic oligonucleotide
gcagguacucugugaagaa

SEQ ID NO: 2828903 - RNA, 19 nt, Artificial Sequence
  Description of Artificial Sequence: Synthetic oligonucleotide
gcgagcgugagagcgggcc

SEQ ID NO: 2828904 - RNA, 19 nt, Artificial Sequence
  Description of Artificial Sequence: Synthetic oligonucleotide
cagugucuccaggcgcagg

SEQ ID NO: 2828905 - RNA, 19 nt, Artificial Sequence
  Description of Artificial Sequence: Synthetic oligonucleotide
gaaggaucaccaugcccuu

SEQ ID NO: 2828906 - RNA, 19 nt, Artificial Sequence
  Description of Artificial Sequence: Synthetic oligonucleotide
gcagcaucugugcgauggc

SEQ ID NO: 2828907 - RNA, 19 nt, Artificial Sequence
  Description of Artificial Sequence: Synthetic oligonucleotide
uccccaggucuccgccagc

SEQ ID NO: 2828908 - RNA, 19 nt, Artificial Sequence
  Description of Artificial Sequence: Synthetic oligonucleotide
gacggcuccuugcccugca

SEQ ID NO: 2828909 - RNA, 19 nt, Artificial Sequence
  Description of Artificial Sequence: Synthetic oligonucleotide
gucuccgccagcgaaucua

SEQ ID NO: 2828910 - RNA, 19 nt, Artificial Sequence
  Description of Artificial Sequence: Synthetic oligonucleotide
cguaucuugucacgaagga

SEQ ID NO: 2828911 - RNA, 19 nt, Artificial Sequence
  Description of Artificial Sequence: Synthetic oligonucleotide
ugacggcuccuugcccugc

SEQ ID NO: 2828912 - RNA, 19 nt, Artificial Sequence
  Description of Artificial Sequence: Synthetic oligonucleotide
cacuauacacauacaccuu

SEQ ID NO: 2828913 - RNA, 19 nt, Artificial Sequence
  Description of Artificial Sequence: Synthetic oligonucleotide
cagcguggguagcacguca

SEQ ID NO: 2828914 - RNA, 19 nt, Artificial Sequence
  Description of Artificial Sequence: Synthetic oligonucleotide
guagaggccauaggugccu

SEQ ID NO: 2828915 - RNA, 19 nt, Artificial Sequence
  Description of Artificial Sequence: Synthetic oligonucleotide
cgccagcgaaucuagcagc

SEQ ID NO: 2828916 - RNA, 19 nt, Artificial Sequence
  Description of Artificial Sequence: Synthetic oligonucleotide
gcuccuugcccugcacagg

SEQ ID NO: 2828917 - RNA, 19 nt, Artificial Sequence
  Description of Artificial Sequence: Synthetic oligonucleotide
cacauacaccuucgcugga

SEQ ID NO: 2828918 - RNA, 19 nt, Artificial Sequence
  Description of Artificial Sequence: Synthetic oligonucleotide
ugcccugcacaggguagaa

SEQ ID NO: 2828919 - RNA, 19 nt, Artificial Sequence
  Description of Artificial Sequence: Synthetic oligonucleotide
cccugcaguaccagcagca

SEQ ID NO: 2828920 - RNA, 19 nt, Artificial Sequence
  Description of Artificial Sequence: Synthetic oligonucleotide
ucgcuggaguagaggccau

SEQ ID NO: 2828921 - RNA, 19 nt, Artificial Sequence
  Description of Artificial Sequence: Synthetic oligonucleotide
ccggaagugcagcagggca

SEQ ID NO: 2828922 - RNA, 19 nt, Artificial Sequence
  Description of Artificial Sequence: Synthetic oligonucleotide
gcagcagggcaagcuggcg

SEQ ID NO: 2828923 - RNA, 19 nt, Artificial Sequence
  Description of Artificial Sequence: Synthetic oligonucleotide
ggccauaggugccuaggua

SEQ ID NO: 2828924 - RNA, 19 nt, Artificial Sequence
  Description of Artificial Sequence: Synthetic oligonucleotide
gcgaaucuagcagcuucug

SEQ ID NO: 2828925 - RNA, 19 nt, Artificial Sequence
  Description of Artificial Sequence: Synthetic oligonucleotide
gguacggugacaccaccuu

SEQ ID NO: 2828926 - RNA, 19 nt, Artificial Sequence
  Description of Artificial Sequence: Synthetic oligonucleotide
guacucugugaagaaggau

SEQ ID NO: 2828927 - RNA, 19 nt, Artificial Sequence
  Description of Artificial Sequence: Synthetic oligonucleotide
gcacaggguagaagauugc

SEQ ID NO: 2828928 - RNA, 19 nt, Artificial Sequence
  Description of Artificial Sequence: Synthetic oligonucleotide
gucuucggucacaccucug

SEQ ID NO: 2828929 - RNA, 19 nt, Artificial Sequence
  Description of Artificial Sequence: Synthetic oligonucleotide
gccuagguacggugacacc

SEQ ID NO: 2828930 - RNA, 19 nt, Artificial Sequence
  Description of Artificial Sequence: Synthetic oligonucleotide
acaccaccuucuggaucag

SEQ ID NO: 2828931 - RNA, 19 nt, Artificial Sequence
  Description of Artificial Sequence: Synthetic oligonucleotide
ccaauuucacacugagggu

SEQ ID NO: 2828932 - RNA, 19 nt, Artificial Sequence
  Description of Artificial Sequence: Synthetic oligonucleotide
cagguagucuucggucaca

SEQ ID NO: 2828933 - RNA, 19 nt, Artificial Sequence
  Description of Artificial Sequence: Synthetic oligonucleotide
gagagcgggccagcgcguc

SEQ ID NO: 2828934 - RNA, 19 nt, Artificial Sequence
  Description of Artificial Sequence: Synthetic oligonucleotide
gugacaccaccuucuggau

SEQ ID NO: 2828935 - RNA, 19 nt, Artificial Sequence
  Description of Artificial Sequence: Synthetic oligonucleotide
ggcgcagguagucuucggu

SEQ ID NO: 2828936 - RNA, 19 nt, Artificial Sequence
  Description of Artificial Sequence: Synthetic oligonucleotide
uggcgcacugacggcuccu

SEQ ID NO: 2828937 - RNA, 19 nt, Artificial Sequence
  Description of Artificial Sequence: Synthetic oligonucleotide
cacucacacuauacacaua

SEQ ID NO: 2828938 - RNA, 19 nt, Artificial Sequence
  Description of Artificial Sequence: Synthetic oligonucleotide
cgcagguagucuucgguca

SEQ ID NO: 2828939 - RNA, 19 nt, Artificial Sequence
  Description of Artificial Sequence: Synthetic oligonucleotide
gauugccugcagcgugggu

SEQ ID NO: 2828940 - RNA, 19 nt, Artificial Sequence
  Description of Artificial Sequence: Synthetic oligonucleotide
ccccaggucuccgccagcg

SEQ ID NO: 2828941 - RNA, 19 nt, Artificial Sequence
  Description of Artificial Sequence: Synthetic oligonucleotide
gcagcuucugucccucgua

SEQ ID NO: 2828942 - RNA, 19 nt, Artificial Sequence
  Description of Artificial Sequence: Synthetic oligonucleotide
ggaucccagcucugucuuc

SEQ ID NO: 2828943 - RNA, 19 nt, Artificial Sequence
  Description of Artificial Sequence: Synthetic oligonucleotide
ccaggcgcagguagucuuc

SEQ ID NO: 2828944 - RNA, 19 nt, Artificial Sequence
  Description of Artificial Sequence: Synthetic oligonucleotide
cgugagagcgggccagcgc

SEQ ID NO: 2828945 - RNA, 19 nt, Artificial Sequence
  Description of Artificial Sequence: Synthetic oligonucleotide
ccccugcaguaccagcagc

SEQ ID NO: 2828946 - RNA, 19 nt, Artificial Sequence
  Description of Artificial Sequence: Synthetic oligonucleotide
gcgugagagcgggccagcg

SEQ ID NO: 2828947 - RNA, 19 nt, Artificial Sequence
  Description of Artificial Sequence: Synthetic oligonucleotide
gggacgcgagcgugagagc

SEQ ID NO: 2828948 - RNA, 19 nt, Artificial Sequence
  Description of Artificial Sequence: Synthetic oligonucleotide
gcaguaccagcagcaucug

SEQ ID NO: 2828949 - RNA, 19 nt, Artificial Sequence
  Description of Artificial Sequence: Synthetic oligonucleotide
cugucccucguagaagcgu

SEQ ID NO: 2828950 - RNA, 19 nt, Artificial Sequence
  Description of Artificial Sequence: Synthetic oligonucleotide
ccaggucuccgccagcgaa

SEQ ID NO: 2828951 - RNA, 19 nt, Artificial Sequence
  Description of Artificial Sequence: Synthetic oligonucleotide
cagcagcaucugugcgaug

SEQ ID NO: 2828952 - RNA, 19 nt, Artificial Sequence
  Description of Artificial Sequence: Synthetic oligonucleotide
ccugcagcguggguagcac

SEQ ID NO: 2828953 - RNA, 19 nt, Artificial Sequence
  Description of Artificial Sequence: Synthetic oligonucleotide
gcgcacugacggcuccuug

SEQ ID NO: 2828954 - RNA, 19 nt, Artificial Sequence
  Description of Artificial Sequence: Synthetic oligonucleotide
cugcacaggguagaagauu

SEQ ID NO: 2828955 - RNA, 19 nt, Artificial Sequence
  Description of Artificial Sequence: Synthetic oligonucleotide
cccuuugugagcagcuggu

SEQ ID NO: 2828956 - RNA, 19 nt, Artificial Sequence
  Description of Artificial Sequence: Synthetic oligonucleotide
cggaagugcagcagggcaa

SEQ ID NO: 2828957 - RNA, 19 nt, Artificial Sequence
  Description of Artificial Sequence: Synthetic oligonucleotide
gcccugcacaggguagaag

SEQ ID NO: 2828958 - RNA, 19 nt, Artificial Sequence
  Description of Artificial Sequence: Synthetic oligonucleotide
cggucacaccucuggacuc

SEQ ID NO: 2828959 - RNA, 19 nt, Artificial Sequence
  Description of Artificial Sequence: Synthetic oligonucleotide
ggaucaccaugcccuuugu

SEQ ID NO: 2828960 - RNA, 19 nt, Artificial Sequence
  Description of Artificial Sequence: Synthetic oligonucleotide
cccucguagaagcguaucu

SEQ ID NO: 2828961 - RNA, 19 nt, Artificial Sequence
  Description of Artificial Sequence: Synthetic oligonucleotide
ccuugcccugcacagggua

SEQ ID NO: 2828962 - RNA, 19 nt, Artificial Sequence
  Description of Artificial Sequence: Synthetic oligonucleotide
gccagcgaaucuagcagcu

SEQ ID NO: 2828963 - RNA, 19 nt, Artificial Sequence
  Description of Artificial Sequence: Synthetic oligonucleotide
gugucuccaggcgcaggua

SEQ ID NO: 2828964 - RNA, 19 nt, Artificial Sequence
  Description of Artificial Sequence: Synthetic oligonucleotide
gcacgucacuaaagaagaa

SEQ ID NO: 2828965 - RNA, 19 nt, Artificial Sequence
  Description of Artificial Sequence: Synthetic oligonucleotide
ccaugcccuuugugagcag

SEQ ID NO: 2828966 - RNA, 19 nt, Artificial Sequence
  Description of Artificial Sequence: Synthetic oligonucleotide
gcagcguggguagcacguc

SEQ ID NO: 2828967 - RNA, 19 nt, Artificial Sequence
  Description of Artificial Sequence: Synthetic oligonucleotide
gcuggcgcacugacggcuc

SEQ ID NO: 2828968 - RNA, 19 nt, Artificial Sequence
  Description of Artificial Sequence: Synthetic oligonucleotide
cgaaucuagcagcuucugu

SEQ ID NO: 2828969 - RNA, 19 nt, Artificial Sequence
  Description of Artificial Sequence: Synthetic oligonucleotide
ccugcacaggguagaagau

SEQ ID NO: 2828970 - RNA, 19 nt, Artificial Sequence
  Description of Artificial Sequence: Synthetic oligonucleotide
cuccaggcgcagguagucu

SEQ ID NO: 2828971 - RNA, 19 nt, Artificial Sequence
  Description of Artificial Sequence: Synthetic oligonucleotide
gccagcgcguccuccaauu

SEQ ID NO: 2828972 - RNA, 19 nt, Artificial Sequence
  Description of Artificial Sequence: Synthetic oligonucleotide
cgcguccuccaauuucaca

SEQ ID NO: 2828973 - RNA, 19 nt, Artificial Sequence
  Description of Artificial Sequence: Synthetic oligonucleotide
gggcaagcuggcgcacuga

SEQ ID NO: 2828974 - RNA, 19 nt, Artificial Sequence
  Description of Artificial Sequence: Synthetic oligonucleotide
gcagggcaagcuggcgcac

SEQ ID NO: 2828975 - RNA, 19 nt, Artificial Sequence
  Description of Artificial Sequence: Synthetic oligonucleotide
gucacaccucuggacucau

SEQ ID NO: 2828976 - RNA, 19 nt, Artificial Sequence
  Description of Artificial Sequence: Synthetic oligonucleotide
gcguggguagcacgucacu

SEQ ID NO: 2828977 - RNA, 19 nt, Artificial Sequence
  Description of Artificial Sequence: Synthetic oligonucleotide
cguccuccaauuucacacu

SEQ ID NO: 2828978 - RNA, 19 nt, Artificial Sequence
  Description of Artificial Sequence: Synthetic oligonucleotide
ccagcagcaucugugcgau

SEQ ID NO: 2828979 - RNA, 19 nt, Artificial Sequence
  Description of Artificial Sequence: Synthetic oligonucleotide
ccucguagaagcguaucuu

SEQ ID NO: 2828980 - RNA, 19 nt, Artificial Sequence
  Description of Artificial Sequence: Synthetic oligonucleotide
cguggguagcacgucacua

SEQ ID NO: 2828981 - RNA, 19 nt, Artificial Sequence
  Description of Artificial Sequence: Synthetic oligonucleotide
gucccucguagaagcguau

SEQ ID NO: 2828982 - RNA, 19 nt, Artificial Sequence
  Description of Artificial Sequence: Synthetic oligonucleotide
cgagcgugagagcgggcca

SEQ ID NO: 2828983 - RNA, 19 nt, Artificial Sequence
  Description of Artificial Sequence: Synthetic oligonucleotide
cagggcaagcuggcgcacu

SEQ ID NO: 2828984 - RNA, 19 nt, Artificial Sequence
  Description of Artificial Sequence: Synthetic oligonucleotide
gcgcguccuccaauuucac

SEQ ID NO: 2828985 - RNA, 19 nt, Artificial Sequence
  Description of Artificial Sequence: Synthetic oligonucleotide
ggucuccgccagcgaaucu

SEQ ID NO: 2828986 - RNA, 19 nt, Artificial Sequence
  Description of Artificial Sequence: Synthetic oligonucleotide
cggcuccuugcccugcaca

SEQ ID NO: 2828987 - RNA, 19 nt, Artificial Sequence
  Description of Artificial Sequence: Synthetic oligonucleotide
caccaccuucuggaucagu

SEQ ID NO: 2828988 - RNA, 19 nt, Artificial Sequence
  Description of Artificial Sequence: Synthetic oligonucleotide
cgcgagcgugagagcgggc

SEQ ID NO: 2828989 - RNA, 19 nt, Artificial Sequence
  Description of Artificial Sequence: Synthetic oligonucleotide
ggccagcgcguccuccaau

SEQ ID NO: 2828990 - RNA, 19 nt, Artificial Sequence
  Description of Artificial Sequence: Synthetic oligonucleotide
ccuuugugagcagcugguu

SEQ ID NO: 2828991 - RNA, 19 nt, Artificial Sequence
  Description of Artificial Sequence: Synthetic oligonucleotide
ggcgcacugacggcuccuu

SEQ ID NO: 2828992 - RNA, 19 nt, Artificial Sequence
  Description of Artificial Sequence: Synthetic oligonucleotide
ccagcgcguccuccaauuu

SEQ ID NO: 2828993 - RNA, 19 nt, Artificial Sequence
  Description of Artificial Sequence: Synthetic oligonucleotide
ccagcgaaucuagcagcuu

SEQ ID NO: 2828994 - RNA, 19 nt, Artificial Sequence
  Description of Artificial Sequence: Synthetic oligonucleotide
aauaguaguuuauuccagc

SEQ ID NO: 2828995 - RNA, 19 nt, Artificial Sequence
  Description of Artificial Sequence: Synthetic oligonucleotide
aguaguuuauuccagccac

SEQ ID NO: 2828996 - RNA, 19 nt, Artificial Sequence
  Description of Artificial Sequence: Synthetic oligonucleotide
aaaugaggcugcuaacacc

SEQ ID NO: 2828997 - RNA, 19 nt, Artificial Sequence
  Description of Artificial Sequence: Synthetic oligonucleotide
auaguaguuuauuccagcc

SEQ ID NO: 2828998 - RNA, 19 nt, Artificial Sequence
  Description of Artificial Sequence: Synthetic oligonucleotide
aacccuuaggcacuuuugc

SEQ ID NO: 2828999 - RNA, 19 nt, Artificial Sequence
  Description of Artificial Sequence: Synthetic oligonucleotide
uaccaucacauccaaauag

SEQ ID NO: 2829000 - RNA, 19 nt, Artificial Sequence
  Description of Artificial Sequence: Synthetic oligonucleotide
uuguuguacucgcugaugg

SEQ ID NO: 2829001 - RNA, 19 nt, Artificial Sequence
  Description of Artificial Sequence: Synthetic oligonucleotide
aucacauccaaauaguagu

SEQ ID NO: 2829002 - RNA, 19 nt, Artificial Sequence
  Description of Artificial Sequence: Synthetic oligonucleotide
ugucuuccucaucagaugg

SEQ ID NO: 2829003 - RNA, 19 nt, Artificial Sequence
  Description of Artificial Sequence: Synthetic oligonucleotide
uagaguucgaacaggacug

SEQ ID NO: 2829004 - RNA, 19 nt, Artificial Sequence
  Description of Artificial Sequence: Synthetic oligonucleotide
aaucugucagguuuggcug

SEQ ID NO: 2829005 - RNA, 19 nt, Artificial Sequence
  Description of Artificial Sequence: Synthetic oligonucleotide
ugggacuugguacaugugg

SEQ ID NO: 2829006 - RNA, 19 nt, Artificial Sequence
  Description of Artificial Sequence: Synthetic oligonucleotide
gaaaggacaaucugucagg

SEQ ID NO: 2829007 - RNA, 19 nt, Artificial Sequence
  Description of Artificial Sequence: Synthetic oligonucleotide
ucucacuaccucuagggcg

SEQ ID NO: 2829008 - RNA, 19 nt, Artificial Sequence
  Description of Artificial Sequence: Synthetic oligonucleotide
auagaguucgaacaggacu

SEQ ID NO: 2829009 - RNA, 19 nt, Artificial Sequence
  Description of Artificial Sequence: Synthetic oligonucleotide
aacaggacugaggaguugc

SEQ ID NO: 2829010 - RNA, 19 nt, Artificial Sequence
  Description of Artificial Sequence: Synthetic oligonucleotide
aacaccuugcagcuuuuac

SEQ ID NO: 2829011 - RNA, 19 nt, Artificial Sequence
  Description of Artificial Sequence: Synthetic oligonucleotide
ucuuccucgacuuuggccu

SEQ ID NO: 2829012 - RNA, 19 nt, Artificial Sequence
  Description of Artificial Sequence: Synthetic oligonucleotide
agagggauagaguucgaac

SEQ ID NO: 2829013 - RNA, 19 nt, Artificial Sequence
  Description of Artificial Sequence: Synthetic oligonucleotide
uuuauuccagccaccaucu

SEQ ID NO: 2829014 - RNA, 19 nt, Artificial Sequence
  Description of Artificial Sequence: Synthetic oligonucleotide
aggacugaggaguugcagc

SEQ ID NO: 2829015 - RNA, 19 nt, Artificial Sequence
  Description of Artificial Sequence: Synthetic oligonucleotide
uguagaucuggaaggagca

SEQ ID NO: 2829016 - RNA, 19 nt, Artificial Sequence
  Description of Artificial Sequence: Synthetic oligonucleotide
gacagagggauagaguucg

SEQ ID NO: 2829017 - RNA, 19 nt, Artificial Sequence
  Description of Artificial Sequence: Synthetic oligonucleotide
ugguugcugggacagaggg

SEQ ID NO: 2829018 - RNA, 19 nt, Artificial Sequence
  Description of Artificial Sequence: Synthetic oligonucleotide
uauuccagccaccaucugc

SEQ ID NO: 2829019 - RNA, 19 nt, Artificial Sequence
  Description of Artificial Sequence: Synthetic oligonucleotide
aaugaggcugcuaacaccu

SEQ ID NO: 2829020 - RNA, 19 nt, Artificial Sequence
  Description of Artificial Sequence: Synthetic oligonucleotide
ugugguacgcaucauugcu

SEQ ID NO: 2829021 - RNA, 19 nt, Artificial Sequence
  Description of Artificial Sequence: Synthetic oligonucleotide
caucacauccaaauaguag

SEQ ID NO: 2829022 - RNA, 19 nt, Artificial Sequence
  Description of Artificial Sequence: Synthetic oligonucleotide
cacaguguagaucuggaag

SEQ ID NO: 2829023 - RNA, 19 nt, Artificial Sequence
  Description of Artificial Sequence: Synthetic oligonucleotide
aucuggaaggagcagagug

SEQ ID NO: 2829024 - RNA, 19 nt, Artificial Sequence
  Description of Artificial Sequence: Synthetic oligonucleotide
ucauggaaaggacaaucug

SEQ ID NO: 2829025 - RNA, 19 nt, Artificial Sequence
  Description of Artificial Sequence: Synthetic oligonucleotide
uccaaauaguaguuuauuc

SEQ ID NO: 2829026 - RNA, 19 nt, Artificial Sequence
  Description of Artificial Sequence: Synthetic oligonucleotide
acuugguacaugugguucg

SEQ ID NO: 2829027 - RNA, 19 nt, Artificial Sequence
  Description of Artificial Sequence: Synthetic oligonucleotide
aaauaguaguuuauuccag

SEQ ID NO: 2829028 - RNA, 19 nt, Artificial Sequence
  Description of Artificial Sequence: Synthetic oligonucleotide
ucggccuaccaucacaucc

SEQ ID NO: 2829029 - RNA, 19 nt, Artificial Sequence
  Description of Artificial Sequence: Synthetic oligonucleotide
ccaaauaguaguuuauucc

SEQ ID NO: 2829030 - RNA, 19 nt, Artificial Sequence
  Description of Artificial Sequence: Synthetic oligonucleotide
gcugcuaacaccuugcagc

SEQ ID NO: 2829031 - RNA, 19 nt, Artificial Sequence
  Description of Artificial Sequence: Synthetic oligonucleotide
uuuggcugggacuugguac

SEQ ID NO: 2829032 - RNA, 19 nt, Artificial Sequence
  Description of Artificial Sequence: Synthetic oligonucleotide
guuuauuccagccaccauc

SEQ ID NO: 2829033 - RNA, 19 nt, Artificial Sequence
  Description of Artificial Sequence: Synthetic oligonucleotide
uuuugucagggucugugug

SEQ ID NO: 2829034 - RNA, 19 nt, Artificial Sequence
  Description of Artificial Sequence: Synthetic oligonucleotide
ugaaaugaggcugcuaaca

SEQ ID NO: 2829035 - RNA, 19 nt, Artificial Sequence
  Description of Artificial Sequence: Synthetic oligonucleotide
gagggauagaguucgaaca

SEQ ID NO: 2829036 - RNA, 19 nt, Artificial Sequence
  Description of Artificial Sequence: Synthetic oligonucleotide
acuuuggccuccugcaggc

SEQ ID NO: 2829037 - RNA, 19 nt, Artificial Sequence
  Description of Artificial Sequence: Synthetic oligonucleotide
uccaaagcuugcuucacgc

SEQ ID NO: 2829038 - RNA, 19 nt, Artificial Sequence
  Description of Artificial Sequence: Synthetic oligonucleotide
aaggagcagagugucuucc

SEQ ID NO: 2829039 - RNA, 19 nt, Artificial Sequence
  Description of Artificial Sequence: Synthetic oligonucleotide
caaagcuugcuucacgccc

SEQ ID NO: 2829040 - RNA, 19 nt, Artificial Sequence
  Description of Artificial Sequence: Synthetic oligonucleotide
aggacaaucugucagguuu

SEQ ID NO: 2829041 - RNA, 19 nt, Artificial Sequence
  Description of Artificial Sequence: Synthetic oligonucleotide
ucgaacaggacugaggagu

SEQ ID NO: 2829042 - RNA, 19 nt, Artificial Sequence
  Description of Artificial Sequence: Synthetic oligonucleotide
gaaaugaggcugcuaacac

SEQ ID NO: 2829043 - RNA, 19 nt, Artificial Sequence
  Description of Artificial Sequence: Synthetic oligonucleotide
uuugucagggucugugugc

SEQ ID NO: 2829044 - RNA, 19 nt, Artificial Sequence
  Description of Artificial Sequence: Synthetic oligonucleotide
aaguccaaagcuugcuuca

SEQ ID NO: 2829045 - RNA, 19 nt, Artificial Sequence
  Description of Artificial Sequence: Synthetic oligonucleotide
uaguaguuuauuccagcca

SEQ ID NO: 2829046 - RNA, 19 nt, Artificial Sequence
  Description of Artificial Sequence: Synthetic oligonucleotide
guugcagcugaaaugaggc

SEQ ID NO: 2829047 - RNA, 19 nt, Artificial Sequence
  Description of Artificial Sequence: Synthetic oligonucleotide
agggauagaguucgaacag

SEQ ID NO: 2829048 - RNA, 19 nt, Artificial Sequence
  Description of Artificial Sequence: Synthetic oligonucleotide
cucacuaccucuagggcgc

SEQ ID NO: 2829049 - RNA, 19 nt, Artificial Sequence
  Description of Artificial Sequence: Synthetic oligonucleotide
auugcugcccuuguuguac

SEQ ID NO: 2829050 - RNA, 19 nt, Artificial Sequence
  Description of Artificial Sequence: Synthetic oligonucleotide
guuguacucgcugauggcg

SEQ ID NO: 2829051 - RNA, 19 nt, Artificial Sequence
  Description of Artificial Sequence: Synthetic oligonucleotide
auggaaaggacaaucuguc

SEQ ID NO: 2829052 - RNA, 19 nt, Artificial Sequence
  Description of Artificial Sequence: Synthetic oligonucleotide
ucuggaaggagcagagugu

SEQ ID NO: 2829053 - RNA, 19 nt, Artificial Sequence
  Description of Artificial Sequence: Synthetic oligonucleotide
ugugguucggccuaccauc

SEQ ID NO: 2829054 - RNA, 19 nt, Artificial Sequence
  Description of Artificial Sequence: Synthetic oligonucleotide
guucgaacaggacugagga

SEQ ID NO: 2829055 - RNA, 19 nt, Artificial Sequence
  Description of Artificial Sequence: Synthetic oligonucleotide
gaaguccaaagcuugcuuc

SEQ ID NO: 2829056 - RNA, 19 nt, Artificial Sequence
  Description of Artificial Sequence: Synthetic oligonucleotide
uaggcacuuuugcagcugg

SEQ ID NO: 2829057 - RNA, 19 nt, Artificial Sequence
  Description of Artificial Sequence: Synthetic oligonucleotide
ugguacgcaucauugcugc

SEQ ID NO: 2829058 - RNA, 19 nt, Artificial Sequence
  Description of Artificial Sequence: Synthetic oligonucleotide
ucgacuuuggccuccugca

SEQ ID NO: 2829059 - RNA, 19 nt, Artificial Sequence
  Description of Artificial Sequence: Synthetic oligonucleotide
cuuacgggcucucacuacc

SEQ ID NO: 2829060 - RNA, 19 nt, Artificial Sequence
  Description of Artificial Sequence: Synthetic oligonucleotide
ugguacaugugguucggcc

SEQ ID NO: 2829061 - RNA, 19 nt, Artificial Sequence
  Description of Artificial Sequence: Synthetic oligonucleotide
ucgcugauggcgaagucca

SEQ ID NO: 2829062 - RNA, 19 nt, Artificial Sequence
  Description of Artificial Sequence: Synthetic oligonucleotide
cuugcuugguguucgcagc

SEQ ID NO: 2829063 - RNA, 19 nt, Artificial Sequence
  Description of Artificial Sequence: Synthetic oligonucleotide
ucugcuuacgggcucucac

SEQ ID NO: 2829064 - RNA, 19 nt, Artificial Sequence
  Description of Artificial Sequence: Synthetic oligonucleotide
ugaggcugcuaacaccuug

SEQ ID NO: 2829065 - RNA, 19 nt, Artificial Sequence
  Description of Artificial Sequence: Synthetic oligonucleotide
cugauggcgaaguccaaag

SEQ ID NO: 2829066 - RNA, 19 nt, Artificial Sequence
  Description of Artificial Sequence: Synthetic oligonucleotide
aaaggacaaucugucaggu

SEQ ID NO: 2829067 - RNA, 19 nt, Artificial Sequence
  Description of Artificial Sequence: Synthetic oligonucleotide
acauccaaauaguaguuua

SEQ ID NO: 2829068 - RNA, 19 nt, Artificial Sequence
  Description of Artificial Sequence: Synthetic oligonucleotide
cuucacgcccucuuccucg

SEQ ID NO: 2829069 - RNA, 19 nt, Artificial Sequence
  Description of Artificial Sequence: Synthetic oligonucleotide
uuugcagcuggauuuuguc

SEQ ID NO: 2829070 - RNA, 19 nt, Artificial Sequence
  Description of Artificial Sequence: Synthetic oligonucleotide
ugcaggccucccaagaggc

SEQ ID NO: 2829071 - RNA, 19 nt, Artificial Sequence
  Description of Artificial Sequence: Synthetic oligonucleotide
agccaggauggcuagcagg

SEQ ID NO: 2829072 - RNA, 19 nt, Artificial Sequence
  Description of Artificial Sequence: Synthetic oligonucleotide
aguugcagcugaaaugagg

SEQ ID NO: 2829073 - RNA, 19 nt, Artificial Sequence
  Description of Artificial Sequence: Synthetic oligonucleotide
gcucucacuaccucuaggg

SEQ ID NO: 2829074 - RNA, 19 nt, Artificial Sequence
  Description of Artificial Sequence: Synthetic oligonucleotide
aucugucagguuuggcugg

SEQ ID NO: 2829075 - RNA, 19 nt, Artificial Sequence
  Description of Artificial Sequence: Synthetic oligonucleotide
ucauugcugcccuuguugu

SEQ ID NO: 2829076 - RNA, 19 nt, Artificial Sequence
  Description of Artificial Sequence: Synthetic oligonucleotide
uggcgaaguccaaagcuug

SEQ ID NO: 2829077 - RNA, 19 nt, Artificial Sequence
  Description of Artificial Sequence: Synthetic oligonucleotide
ugauggcgaaguccaaagc

SEQ ID NO: 2829078 - RNA, 19 nt, Artificial Sequence
  Description of Artificial Sequence: Synthetic oligonucleotide
uuguacucgcugauggcga

SEQ ID NO: 2829079 - RNA, 19 nt, Artificial Sequence
  Description of Artificial Sequence: Synthetic oligonucleotide
aguucgaacaggacugagg

SEQ ID NO: 2829080 - RNA, 19 nt, Artificial Sequence
  Description of Artificial Sequence: Synthetic oligonucleotide
uaguuuauuccagccacca

SEQ ID NO: 2829081 - RNA, 19 nt, Artificial Sequence
  Description of Artificial Sequence: Synthetic oligonucleotide
agcaggagcagcggggugc

SEQ ID NO: 2829082 - RNA, 19 nt, Artificial Sequence
  Description of Artificial Sequence: Synthetic oligonucleotide
gauggcgaaguccaaagcu

SEQ ID NO: 2829083 - RNA, 19 nt, Artificial Sequence
  Description of Artificial Sequence: Synthetic oligonucleotide
cucuuccucgacuuuggcc

SEQ ID NO: 2829084 - RNA, 19 nt, Artificial Sequence
  Description of Artificial Sequence: Synthetic oligonucleotide
uagaucuggaaggagcaga

SEQ ID NO: 2829085 - RNA, 19 nt, Artificial Sequence
  Description of Artificial Sequence: Synthetic oligonucleotide
uguuguacucgcugauggc

SEQ ID NO: 2829086 - RNA, 19 nt, Artificial Sequence
  Description of Artificial Sequence: Synthetic oligonucleotide
guguagaucuggaaggagc

SEQ ID NO: 2829087 - RNA, 19 nt, Artificial Sequence
  Description of Artificial Sequence: Synthetic oligonucleotide
auggcuagcaggagcagcg

SEQ ID NO: 2829088 - RNA, 19 nt, Artificial Sequence
  Description of Artificial Sequence: Synthetic oligonucleotide
auuuugucagggucugugu

SEQ ID NO: 2829089 - RNA, 19 nt, Artificial Sequence
  Description of Artificial Sequence: Synthetic oligonucleotide
uggaaaggacaaucuguca

SEQ ID NO: 2829090 - RNA, 19 nt, Artificial Sequence
  Description of Artificial Sequence: Synthetic oligonucleotide
ugguguucgcagccgaggc

SEQ ID NO: 2829091 - RNA, 19 nt, Artificial Sequence
  Description of Artificial Sequence: Synthetic oligonucleotide
acuaccucuagggcgcggc

SEQ ID NO: 2829092 - RNA, 19 nt, Artificial Sequence
  Description of Artificial Sequence: Synthetic oligonucleotide
cucgacuuuggccuccugc

SEQ ID NO: 2829093 - RNA, 19 nt, Artificial Sequence
  Description of Artificial Sequence: Synthetic oligonucleotide
uacgcaucauugcugcccu

SEQ ID NO: 2829094 - RNA, 19 nt, Artificial Sequence
  Description of Artificial Sequence: Synthetic oligonucleotide
aaagcuugcuucacgcccu

SEQ ID NO: 2829095 - RNA, 19 nt, Artificial Sequence
  Description of Artificial Sequence: Synthetic oligonucleotide
uugcuugguguucgcagcc

SEQ ID NO: 2829096 - RNA, 19 nt, Artificial Sequence
  Description of Artificial Sequence: Synthetic oligonucleotide
ugugugccuugccagggca

SEQ ID NO: 2829097 - RNA, 19 nt, Artificial Sequence
  Description of Artificial Sequence: Synthetic oligonucleotide
uugguguucgcagccgagg

SEQ ID NO: 2829098 - RNA, 19 nt, Artificial Sequence
  Description of Artificial Sequence: Synthetic oligonucleotide
uucgaacaggacugaggag

SEQ ID NO: 2829099 - RNA, 19 nt, Artificial Sequence
  Description of Artificial Sequence: Synthetic oligonucleotide
ugucagguuuggcugggac

SEQ ID NO: 2829100 - RNA, 19 nt, Artificial Sequence
  Description of Artificial Sequence: Synthetic oligonucleotide
caucagauggggcugguca

SEQ ID NO: 2829101 - RNA, 19 nt, Artificial Sequence
  Description of Artificial Sequence: Synthetic oligonucleotide
cauggaaaggacaaucugu

SEQ ID NO: 2829102 - RNA, 19 nt, Artificial Sequence
  Description of Artificial Sequence: Synthetic oligonucleotide
gaggcgcggaccuugcuug

SEQ ID NO: 2829103 - RNA, 19 nt, Artificial Sequence
  Description of Artificial Sequence: Synthetic oligonucleotide
uggggcuggucauggaaag

SEQ ID NO: 2829104 - RNA, 19 nt, Artificial Sequence
  Description of Artificial Sequence: Synthetic oligonucleotide
agugucuuccucaucagau

SEQ ID NO: 2829105 - RNA, 19 nt, Artificial Sequence
  Description of Artificial Sequence: Synthetic oligonucleotide
ugggacagagggauagagu

SEQ ID NO: 2829106 - RNA, 19 nt, Artificial Sequence
  Description of Artificial Sequence: Synthetic oligonucleotide
gcugaaaugaggcugcuaa

SEQ ID NO: 2829107 - RNA, 19 nt, Artificial Sequence
  Description of Artificial Sequence: Synthetic oligonucleotide
caugguugcugggacagag

SEQ ID NO: 2829108 - RNA, 19 nt, Artificial Sequence
  Description of Artificial Sequence: Synthetic oligonucleotide
ucaacccuuaggcacuuuu

SEQ ID NO: 2829109 - RNA, 19 nt, Artificial Sequence
  Description of Artificial Sequence: Synthetic oligonucleotide
uggauuuugucagggucug

SEQ ID NO: 2829110 - RNA, 19 nt, Artificial Sequence
  Description of Artificial Sequence: Synthetic oligonucleotide
agagugucuuccucaucag

SEQ ID NO: 2829111 - RNA, 19 nt, Artificial Sequence
  Description of Artificial Sequence: Synthetic oligonucleotide
acaaucugucagguuuggc

SEQ ID NO: 2829112 - RNA, 19 nt, Artificial Sequence
  Description of Artificial Sequence: Synthetic oligonucleotide
cugugguacgcaucauugc

SEQ ID NO: 2829113 - RNA, 19 nt, Artificial Sequence
  Description of Artificial Sequence: Synthetic oligonucleotide
gacaaucugucagguuugg

SEQ ID NO: 2829114 - RNA, 19 nt, Artificial Sequence
  Description of Artificial Sequence: Synthetic oligonucleotide
gccaccaucugcuuacggg

SEQ ID NO: 2829115 - RNA, 19 nt, Artificial Sequence
  Description of Artificial Sequence: Synthetic oligonucleotide
cucucacuaccucuagggc

SEQ ID NO: 2829116 - RNA, 19 nt, Artificial Sequence
  Description of Artificial Sequence: Synthetic oligonucleotide
cucgcugauggcgaagucc

SEQ ID NO: 2829117 - RNA, 19 nt, Artificial Sequence
  Description of Artificial Sequence: Synthetic oligonucleotide
guacgcaucauugcugccc

SEQ ID NO: 2829118 - RNA, 19 nt, Artificial Sequence
  Description of Artificial Sequence: Synthetic oligonucleotide
uugucagggucugugugcc

SEQ ID NO: 2829119 - RNA, 19 nt, Artificial Sequence
  Description of Artificial Sequence: Synthetic oligonucleotide
cugaaaugaggcugcuaac

SEQ ID NO: 2829120 - RNA, 19 nt, Artificial Sequence
  Description of Artificial Sequence: Synthetic oligonucleotide
gauggcuagcaggagcagc

SEQ ID NO: 2829121 - RNA, 19 nt, Artificial Sequence
  Description of Artificial Sequence: Synthetic oligonucleotide
gauagaguucgaacaggac

SEQ ID NO: 2829122 - RNA, 19 nt, Artificial Sequence
  Description of Artificial Sequence: Synthetic oligonucleotide
gucugugugccuugccagg

SEQ ID NO: 2829123 - RNA, 19 nt, Artificial Sequence
  Description of Artificial Sequence: Synthetic oligonucleotide
caaucugucagguuuggcu

SEQ ID NO: 2829124 - RNA, 19 nt, Artificial Sequence
  Description of Artificial Sequence: Synthetic oligonucleotide
gacuugguacaugugguuc

SEQ ID NO: 2829125 - RNA, 19 nt, Artificial Sequence
  Description of Artificial Sequence: Synthetic oligonucleotide
gaggcugcuaacaccuugc

SEQ ID NO: 2829126 - RNA, 19 nt, Artificial Sequence
  Description of Artificial Sequence: Synthetic oligonucleotide
caacccuuaggcacuuuug

SEQ ID NO: 2829127 - RNA, 19 nt, Artificial Sequence
  Description of Artificial Sequence: Synthetic oligonucleotide
gugucuuccucaucagaug

SEQ ID NO: 2829128 - RNA, 19 nt, Artificial Sequence
  Description of Artificial Sequence: Synthetic oligonucleotide
cuugguacaugugguucgg

SEQ ID NO: 2829129 - RNA, 19 nt, Artificial Sequence
  Description of Artificial Sequence: Synthetic oligonucleotide
aguguagaucuggaaggag

SEQ ID NO: 2829130 - RNA, 19 nt, Artificial Sequence
  Description of Artificial Sequence: Synthetic oligonucleotide
accaucugcuuacgggcuc

SEQ ID NO: 2829131 - RNA, 19 nt, Artificial Sequence
  Description of Artificial Sequence: Synthetic oligonucleotide
cuggucauggaaaggacaa

SEQ ID NO: 2829132 - RNA, 19 nt, Artificial Sequence
  Description of Artificial Sequence: Synthetic oligonucleotide
uccugcaggccucccaaga

SEQ ID NO: 2829133 - RNA, 19 nt, Artificial Sequence
  Description of Artificial Sequence: Synthetic oligonucleotide
ucugucagguuuggcuggg

SEQ ID NO: 2829134 - RNA, 19 nt, Artificial Sequence
  Description of Artificial Sequence: Synthetic oligonucleotide
accaucacauccaaauagu

SEQ ID NO: 2829135 - RNA, 19 nt, Artificial Sequence
  Description of Artificial Sequence: Synthetic oligonucleotide
ucuagggcgcggcuguggu

SEQ ID NO: 2829136 - RNA, 19 nt, Artificial Sequence
  Description of Artificial Sequence: Synthetic oligonucleotide
aagcuugcuucacgcccuc

SEQ ID NO: 2829137 - RNA, 19 nt, Artificial Sequence
  Description of Artificial Sequence: Synthetic oligonucleotide
cugcaggccucccaagagg

SEQ ID NO: 2829138 - RNA, 19 nt, Artificial Sequence
  Description of Artificial Sequence: Synthetic oligonucleotide
ugcuuacgggcucucacua

SEQ ID NO: 2829139 - RNA, 19 nt, Artificial Sequence
  Description of Artificial Sequence: Synthetic oligonucleotide
ucccaagaggcgcggaccu

SEQ ID NO: 2829140 - RNA, 19 nt, Artificial Sequence
  Description of Artificial Sequence: Synthetic oligonucleotide
cugcccuuguuguacucgc

SEQ ID NO: 2829141 - RNA, 19 nt, Artificial Sequence
  Description of Artificial Sequence: Synthetic oligonucleotide
cuuguuguacucgcugaug

SEQ ID NO: 2829142 - RNA, 19 nt, Artificial Sequence
  Description of Artificial Sequence: Synthetic oligonucleotide
cuugguguucgcagccgag

SEQ ID NO: 2829143 - RNA, 19 nt, Artificial Sequence
  Description of Artificial Sequence: Synthetic oligonucleotide
uuacgggcucucacuaccu

SEQ ID NO: 2829144 - RNA, 19 nt, Artificial Sequence
  Description of Artificial Sequence: Synthetic oligonucleotide
guaguuuauuccagccacc

SEQ ID NO: 2829145 - RNA, 19 nt, Artificial Sequence
  Description of Artificial Sequence: Synthetic oligonucleotide
gcuggauuuugucaggguc

SEQ ID NO: 2829146 - RNA, 19 nt, Artificial Sequence
  Description of Artificial Sequence: Synthetic oligonucleotide
ccuuaggcacuuuugcagc

SEQ ID NO: 2829147 - RNA, 19 nt, Artificial Sequence
  Description of Artificial Sequence: Synthetic oligonucleotide
uuaggcacuuuugcagcug

SEQ ID NO: 2829148 - RNA, 19 nt, Artificial Sequence
  Description of Artificial Sequence: Synthetic oligonucleotide
cccuuaggcacuuuugcag

SEQ ID NO: 2829149 - RNA, 19 nt, Artificial Sequence
  Description of Artificial Sequence: Synthetic oligonucleotide
gaaggagcagagugucuuc

SEQ ID NO: 2829150 - RNA, 19 nt, Artificial Sequence
  Description of Artificial Sequence: Synthetic oligonucleotide
aaggacaaucugucagguu

SEQ ID NO: 2829151 - RNA, 19 nt, Artificial Sequence
  Description of Artificial Sequence: Synthetic oligonucleotide
ccaccaucugcuuacgggc

SEQ ID NO: 2829152 - RNA, 19 nt, Artificial Sequence
  Description of Artificial Sequence: Synthetic oligonucleotide
ggucugugugccuugccag

SEQ ID NO: 2829153 - RNA, 19 nt, Artificial Sequence
  Description of Artificial Sequence: Synthetic oligonucleotide
aguuuauuccagccaccau

SEQ ID NO: 2829154 - RNA, 19 nt, Artificial Sequence
  Description of Artificial Sequence: Synthetic oligonucleotide
agggucugugugccuugcc

SEQ ID NO: 2829155 - RNA, 19 nt, Artificial Sequence
  Description of Artificial Sequence: Synthetic oligonucleotide
cuugcuucacgcccucuuc

SEQ ID NO: 2829156 - RNA, 19 nt, Artificial Sequence
  Description of Artificial Sequence: Synthetic oligonucleotide
uugcagcugaaaugaggcu

SEQ ID NO: 2829157 - RNA, 19 nt, Artificial Sequence
  Description of Artificial Sequence: Synthetic oligonucleotide
ugcuugguguucgcagccg

SEQ ID NO: 2829158 - RNA, 19 nt, Artificial Sequence
  Description of Artificial Sequence: Synthetic oligonucleotide
uugccagggcacaguguag

SEQ ID NO: 2829159 - RNA, 19 nt, Artificial Sequence
  Description of Artificial Sequence: Synthetic oligonucleotide
aggauggcuagcaggagca

SEQ ID NO: 2829160 - RNA, 19 nt, Artificial Sequence
  Description of Artificial Sequence: Synthetic oligonucleotide
uucgcagccgaggccacag

SEQ ID NO: 2829161 - RNA, 19 nt, Artificial Sequence
  Description of Artificial Sequence: Synthetic oligonucleotide
augugguucggccuaccau

SEQ ID NO: 2829162 - RNA, 19 nt, Artificial Sequence
  Description of Artificial Sequence: Synthetic oligonucleotide
uagggcgcggcugugguac

SEQ ID NO: 2829163 - RNA, 19 nt, Artificial Sequence
  Description of Artificial Sequence: Synthetic oligonucleotide
aucagauggggcuggucau

SEQ ID NO: 2829164 - RNA, 19 nt, Artificial Sequence
  Description of Artificial Sequence: Synthetic oligonucleotide
gagugucuuccucaucaga

SEQ ID NO: 2829165 - RNA, 19 nt, Artificial Sequence
  Description of Artificial Sequence: Synthetic oligonucleotide
auccaaauaguaguuuauu

SEQ ID NO: 2829166 - RNA, 19 nt, Artificial Sequence
  Description of Artificial Sequence: Synthetic oligonucleotide
agcagagugucuuccucau

SEQ ID NO: 2829167 - RNA, 19 nt, Artificial Sequence
  Description of Artificial Sequence: Synthetic oligonucleotide
gaggaguugcagcugaaau

SEQ ID NO: 2829168 - RNA, 19 nt, Artificial Sequence
  Description of Artificial Sequence: Synthetic oligonucleotide
gggauagaguucgaacagg

SEQ ID NO: 2829169 - RNA, 19 nt, Artificial Sequence
  Description of Artificial Sequence: Synthetic oligonucleotide
uguacucgcugauggcgaa

SEQ ID NO: 2829170 - RNA, 19 nt, Artificial Sequence
  Description of Artificial Sequence: Synthetic oligonucleotide
agguuuggcugggacuugg

SEQ ID NO: 2829171 - RNA, 19 nt, Artificial Sequence
  Description of Artificial Sequence: Synthetic oligonucleotide
gcugugguacgcaucauug

SEQ ID NO: 2829172 - RNA, 19 nt, Artificial Sequence
  Description of Artificial Sequence: Synthetic oligonucleotide
guagaucuggaaggagcag

SEQ ID NO: 2829173 - RNA, 19 nt, Artificial Sequence
  Description of Artificial Sequence: Synthetic oligonucleotide
ggucauggaaaggacaauc

SEQ ID NO: 2829174 - RNA, 19 nt, Artificial Sequence
  Description of Artificial Sequence: Synthetic oligonucleotide
uacucgcugauggcgaagu

SEQ ID NO: 2829175 - RNA, 19 nt, Artificial Sequence
  Description of Artificial Sequence: Synthetic oligonucleotide
acgggcucucacuaccucu

SEQ ID NO: 2829176 - RNA, 19 nt, Artificial Sequence
  Description of Artificial Sequence: Synthetic oligonucleotide
ugugccuugccagggcaca

SEQ ID NO: 2829177 - RNA, 19 nt, Artificial Sequence
  Description of Artificial Sequence: Synthetic oligonucleotide
gaguucgaacaggacugag

SEQ ID NO: 2829178 - RNA, 19 nt, Artificial Sequence
  Description of Artificial Sequence: Synthetic oligonucleotide
accucuagggcgcggcugu

SEQ ID NO: 2829179 - RNA, 19 nt, Artificial Sequence
  Description of Artificial Sequence: Synthetic oligonucleotide
cagcuggauuuugucaggg

SEQ ID NO: 2829180 - RNA, 19 nt, Artificial Sequence
  Description of Artificial Sequence: Synthetic oligonucleotide
agccaccaucugcuuacgg

SEQ ID NO: 2829181 - RNA, 19 nt, Artificial Sequence
  Description of Artificial Sequence: Synthetic oligonucleotide
gugguacgcaucauugcug

SEQ ID NO: 2829182 - RNA, 19 nt, Artificial Sequence
  Description of Artificial Sequence: Synthetic oligonucleotide
agcuggauuuugucagggu

SEQ ID NO: 2829183 - RNA, 19 nt, Artificial Sequence
  Description of Artificial Sequence: Synthetic oligonucleotide
ccuugcuugguguucgcag

SEQ ID NO: 2829184 - RNA, 19 nt, Artificial Sequence
  Description of Artificial Sequence: Synthetic oligonucleotide
aggagcagagugucuuccu

SEQ ID NO: 2829185 - RNA, 19 nt, Artificial Sequence
  Description of Artificial Sequence: Synthetic oligonucleotide
acucgcugauggcgaaguc

SEQ ID NO: 2829186 - RNA, 19 nt, Artificial Sequence
  Description of Artificial Sequence: Synthetic oligonucleotide
ugaggaguugcagcugaaa

SEQ ID NO: 2829187 - RNA, 19 nt, Artificial Sequence
  Description of Artificial Sequence: Synthetic oligonucleotide
caggccucccaagaggcgc

SEQ ID NO: 2829188 - RNA, 19 nt, Artificial Sequence
  Description of Artificial Sequence: Synthetic oligonucleotide
guugcugggacagagggau

SEQ ID NO: 2829189 - RNA, 19 nt, Artificial Sequence
  Description of Artificial Sequence: Synthetic oligonucleotide
ggaccuugcuugguguucg

SEQ ID NO: 2829190 - RNA, 19 nt, Artificial Sequence
  Description of Artificial Sequence: Synthetic oligonucleotide
gcuagcaggagcagcgggg

SEQ ID NO: 2829191 - RNA, 19 nt, Artificial Sequence
  Description of Artificial Sequence: Synthetic oligonucleotide
ggauagaguucgaacagga

SEQ ID NO: 2829192 - RNA, 19 nt, Artificial Sequence
  Description of Artificial Sequence: Synthetic oligonucleotide
cacuuuugcagcuggauuu

SEQ ID NO: 2829193 - RNA, 19 nt, Artificial Sequence
  Description of Artificial Sequence: Synthetic oligonucleotide
caagaggcgcggaccuugc

SEQ ID NO: 2829194 - RNA, 19 nt, Artificial Sequence
  Description of Artificial Sequence: Synthetic oligonucleotide
gcagcuggauuuugucagg

SEQ ID NO: 2829195 - RNA, 19 nt, Artificial Sequence
  Description of Artificial Sequence: Synthetic oligonucleotide
uucacgcccucuuccucga

SEQ ID NO: 2829196 - RNA, 19 nt, Artificial Sequence
  Description of Artificial Sequence: Synthetic oligonucleotide
acaugugguucggccuacc

SEQ ID NO: 2829197 - RNA, 19 nt, Artificial Sequence
  Description of Artificial Sequence: Synthetic oligonucleotide
guacaugugguucggccua

SEQ ID NO: 2829198 - RNA, 19 nt, Artificial Sequence
  Description of Artificial Sequence: Synthetic oligonucleotide
agaggcgcggaccuugcuu

SEQ ID NO: 2829199 - RNA, 19 nt, Artificial Sequence
  Description of Artificial Sequence: Synthetic oligonucleotide
ggcucucacuaccucuagg

SEQ ID NO: 2829200 - RNA, 19 nt, Artificial Sequence
  Description of Artificial Sequence: Synthetic oligonucleotide
caggacugaggaguugcag

SEQ ID NO: 2829201 - RNA, 19 nt, Artificial Sequence
  Description of Artificial Sequence: Synthetic oligonucleotide
cucccaagaggcgcggacc

SEQ ID NO: 2829202 - RNA, 19 nt, Artificial Sequence
  Description of Artificial Sequence: Synthetic oligonucleotide
ggcugcuaacaccuugcag

SEQ ID NO: 2829203 - RNA, 19 nt, Artificial Sequence
  Description of Artificial Sequence: Synthetic oligonucleotide
guguucgcagccgaggcca

SEQ ID NO: 2829204 - RNA, 19 nt, Artificial Sequence
  Description of Artificial Sequence: Synthetic oligonucleotide
augguugcugggacagagg

SEQ ID NO: 2829205 - RNA, 19 nt, Artificial Sequence
  Description of Artificial Sequence: Synthetic oligonucleotide
ggcuagcaggagcagcggg

SEQ ID NO: 2829206 - RNA, 19 nt, Artificial Sequence
  Description of Artificial Sequence: Synthetic oligonucleotide
gaguugcagcugaaaugag

SEQ ID NO: 2829207 - RNA, 19 nt, Artificial Sequence
  Description of Artificial Sequence: Synthetic oligonucleotide
gcagcugaaaugaggcugc

SEQ ID NO: 2829208 - RNA, 19 nt, Artificial Sequence
  Description of Artificial Sequence: Synthetic oligonucleotide
uggcuagcaggagcagcgg

SEQ ID NO: 2829209 - RNA, 19 nt, Artificial Sequence
  Description of Artificial Sequence: Synthetic oligonucleotide
aagaggcgcggaccuugcu

SEQ ID NO: 2829210 - RNA, 19 nt, Artificial Sequence
  Description of Artificial Sequence: Synthetic oligonucleotide
agcgggcuggccaugguug

SEQ ID NO: 2829211 - RNA, 19 nt, Artificial Sequence
  Description of Artificial Sequence: Synthetic oligonucleotide
ugcccuuguuguacucgcu

SEQ ID NO: 2829212 - RNA, 19 nt, Artificial Sequence
  Description of Artificial Sequence: Synthetic oligonucleotide
ccuaccaucacauccaaau

SEQ ID NO: 2829213 - RNA, 19 nt, Artificial Sequence
  Description of Artificial Sequence: Synthetic oligonucleotide
gggacagagggauagaguu

SEQ ID NO: 2829214 - RNA, 19 nt, Artificial Sequence
  Description of Artificial Sequence: Synthetic oligonucleotide
uacgggcucucacuaccuc

SEQ ID NO: 2829215 - RNA, 19 nt, Artificial Sequence
  Description of Artificial Sequence: Synthetic oligonucleotide
auggcgaaguccaaagcuu

SEQ ID NO: 2829216 - RNA, 19 nt, Artificial Sequence
  Description of Artificial Sequence: Synthetic oligonucleotide
uuggccuccugcaggccuc

SEQ ID NO: 2829217 - RNA, 19 nt, Artificial Sequence
  Description of Artificial Sequence: Synthetic oligonucleotide
ccaaagcuugcuucacgcc

SEQ ID NO: 2829218 - RNA, 19 nt, Artificial Sequence
  Description of Artificial Sequence: Synthetic oligonucleotide
uugguacaugugguucggc

SEQ ID NO: 2829219 - RNA, 19 nt, Artificial Sequence
  Description of Artificial Sequence: Synthetic oligonucleotide
uaccucuagggcgcggcug

SEQ ID NO: 2829220 - RNA, 19 nt, Artificial Sequence
  Description of Artificial Sequence: Synthetic oligonucleotide
gaacaggacugaggaguug

SEQ ID NO: 2829221 - RNA, 19 nt, Artificial Sequence
  Description of Artificial Sequence: Synthetic oligonucleotide
gucauggaaaggacaaucu

SEQ ID NO: 2829222 - RNA, 19 nt, Artificial Sequence
  Description of Artificial Sequence: Synthetic oligonucleotide
agaguucgaacaggacuga

SEQ ID NO: 2829223 - RNA, 19 nt, Artificial Sequence
  Description of Artificial Sequence: Synthetic oligonucleotide
cuaccaucacauccaaaua

SEQ ID NO: 2829224 - RNA, 19 nt, Artificial Sequence
  Description of Artificial Sequence: Synthetic oligonucleotide
ggacaaucugucagguuug

SEQ ID NO: 2829225 - RNA, 19 nt, Artificial Sequence
  Description of Artificial Sequence: Synthetic oligonucleotide
uagcaggagcagcggggug

SEQ ID NO: 2829226 - RNA, 19 nt, Artificial Sequence
  Description of Artificial Sequence: Synthetic oligonucleotide
cugugugccuugccagggc

SEQ ID NO: 2829227 - RNA, 19 nt, Artificial Sequence
  Description of Artificial Sequence: Synthetic oligonucleotide
gguguucgcagccgaggcc

SEQ ID NO: 2829228 - RNA, 19 nt, Artificial Sequence
  Description of Artificial Sequence: Synthetic oligonucleotide
gguucggccuaccaucaca

SEQ ID NO: 2829229 - RNA, 19 nt, Artificial Sequence
  Description of Artificial Sequence: Synthetic oligonucleotide
cauccaaauaguaguuuau

SEQ ID NO: 2829230 - RNA, 19 nt, Artificial Sequence
  Description of Artificial Sequence: Synthetic oligonucleotide
cugggacuugguacaugug

SEQ ID NO: 2829231 - RNA, 19 nt, Artificial Sequence
  Description of Artificial Sequence: Synthetic oligonucleotide
gggcacaguguagaucugg

SEQ ID NO: 2829232 - RNA, 19 nt, Artificial Sequence
  Description of Artificial Sequence: Synthetic oligonucleotide
gguacaugugguucggccu

SEQ ID NO: 2829233 - RNA, 19 nt, Artificial Sequence
  Description of Artificial Sequence: Synthetic oligonucleotide
gucagguuuggcugggacu

SEQ ID NO: 2829234 - RNA, 19 nt, Artificial Sequence
  Description of Artificial Sequence: Synthetic oligonucleotide
ucacuaccucuagggcgcg

SEQ ID NO: 2829235 - RNA, 19 nt, Artificial Sequence
  Description of Artificial Sequence: Synthetic oligonucleotide
uacaugugguucggccuac

SEQ ID NO: 2829236 - RNA, 19 nt, Artificial Sequence
  Description of Artificial Sequence: Synthetic oligonucleotide
ugcgcagcgggcuggccau

SEQ ID NO: 2829237 - RNA, 19 nt, Artificial Sequence
  Description of Artificial Sequence: Synthetic oligonucleotide
gaccuugcuugguguucgc

SEQ ID NO: 2829238 - RNA, 19 nt, Artificial Sequence
  Description of Artificial Sequence: Synthetic oligonucleotide
gcugcccuuguuguacucg

SEQ ID NO: 2829239 - RNA, 19 nt, Artificial Sequence
  Description of Artificial Sequence: Synthetic oligonucleotide
uguucgcagccgaggccac

SEQ ID NO: 2829240 - RNA, 19 nt, Artificial Sequence
  Description of Artificial Sequence: Synthetic oligonucleotide
cugcuaacaccuugcagcu

SEQ ID NO: 2829241 - RNA, 19 nt, Artificial Sequence
  Description of Artificial Sequence: Synthetic oligonucleotide
aggcgcggaccuugcuugg

SEQ ID NO: 2829242 - RNA, 19 nt, Artificial Sequence
  Description of Artificial Sequence: Synthetic oligonucleotide
gcccuuguuguacucgcug

SEQ ID NO: 2829243 - RNA, 19 nt, Artificial Sequence
  Description of Artificial Sequence: Synthetic oligonucleotide
gacucaacccuuaggcacu

SEQ ID NO: 2829244 - RNA, 19 nt, Artificial Sequence
  Description of Artificial Sequence: Synthetic oligonucleotide
uggucauggaaaggacaau

SEQ ID NO: 2829245 - RNA, 19 nt, Artificial Sequence
  Description of Artificial Sequence: Synthetic oligonucleotide
cucuagggcgcggcugugg

SEQ ID NO: 2829246 - RNA, 19 nt, Artificial Sequence
  Description of Artificial Sequence: Synthetic oligonucleotide
guuuggcugggacuuggua

SEQ ID NO: 2829247 - RNA, 19 nt, Artificial Sequence
  Description of Artificial Sequence: Synthetic oligonucleotide
gggucugugugccuugcca

SEQ ID NO: 2829248 - RNA, 19 nt, Artificial Sequence
  Description of Artificial Sequence: Synthetic oligonucleotide
ugguucggccuaccaucac

SEQ ID NO: 2829249 - RNA, 19 nt, Artificial Sequence
  Description of Artificial Sequence: Synthetic oligonucleotide
ggacugaggaguugcagcu

SEQ ID NO: 2829250 - RNA, 19 nt, Artificial Sequence
  Description of Artificial Sequence: Synthetic oligonucleotide
cagcggggugcgcagcggg

SEQ ID NO: 2829251 - RNA, 19 nt, Artificial Sequence
  Description of Artificial Sequence: Synthetic oligonucleotide
cuuaggcacuuuugcagcu

SEQ ID NO: 2829252 - RNA, 19 nt, Artificial Sequence
  Description of Artificial Sequence: Synthetic oligonucleotide
cccucuuccucgacuuugg

SEQ ID NO: 2829253 - RNA, 19 nt, Artificial Sequence
  Description of Artificial Sequence: Synthetic oligonucleotide
acgcccucuuccucgacuu

SEQ ID NO: 2829254 - RNA, 19 nt, Artificial Sequence
  Description of Artificial Sequence: Synthetic oligonucleotide
uucggccuaccaucacauc

SEQ ID NO: 2829255 - RNA, 19 nt, Artificial Sequence
  Description of Artificial Sequence: Synthetic oligonucleotide
gcggcugugguacgcauca

SEQ ID NO: 2829256 - RNA, 19 nt, Artificial Sequence
  Description of Artificial Sequence: Synthetic oligonucleotide
guacucgcugauggcgaag

SEQ ID NO: 2829257 - RNA, 19 nt, Artificial Sequence
  Description of Artificial Sequence: Synthetic oligonucleotide
agcggggugcgcagcgggc

SEQ ID NO: 2829258 - RNA, 19 nt, Artificial Sequence
  Description of Artificial Sequence: Synthetic oligonucleotide
gguacgcaucauugcugcc

SEQ ID NO: 2829259 - RNA, 19 nt, Artificial Sequence
  Description of Artificial Sequence: Synthetic oligonucleotide
gcugggacuugguacaugu

SEQ ID NO: 2829260 - RNA, 19 nt, Artificial Sequence
  Description of Artificial Sequence: Synthetic oligonucleotide
gccaggauggcuagcagga

SEQ ID NO: 2829261 - RNA, 19 nt, Artificial Sequence
  Description of Artificial Sequence: Synthetic oligonucleotide
ugucagggucugugugccu

SEQ ID NO: 2829262 - RNA, 19 nt, Artificial Sequence
  Description of Artificial Sequence: Synthetic oligonucleotide
ggcuggccaugguugcugg

SEQ ID NO: 2829263 - RNA, 19 nt, Artificial Sequence
  Description of Artificial Sequence: Synthetic oligonucleotide
ccugcaggccucccaagag

SEQ ID NO: 2829264 - RNA, 19 nt, Artificial Sequence
  Description of Artificial Sequence: Synthetic oligonucleotide
gggcuggucauggaaagga

SEQ ID NO: 2829265 - RNA, 19 nt, Artificial Sequence
  Description of Artificial Sequence: Synthetic oligonucleotide
gcuaacaccuugcagcuuu

SEQ ID NO: 2829266 - RNA, 19 nt, Artificial Sequence
  Description of Artificial Sequence: Synthetic oligonucleotide
gcuggucauggaaaggaca

SEQ ID NO: 2829267 - RNA, 19 nt, Artificial Sequence
  Description of Artificial Sequence: Synthetic oligonucleotide
aggccucccaagaggcgcg

SEQ ID NO: 2829268 - RNA, 19 nt, Artificial Sequence
  Description of Artificial Sequence: Synthetic oligonucleotide
cuccugcaggccucccaag

SEQ ID NO: 2829269 - RNA, 19 nt, Artificial Sequence
  Description of Artificial Sequence: Synthetic oligonucleotide
ggcgaaguccaaagcuugc

SEQ ID NO: 2829270 - RNA, 19 nt, Artificial Sequence
  Description of Artificial Sequence: Synthetic oligonucleotide
gugcgcagcgggcuggcca

SEQ ID NO: 2829271 - RNA, 19 nt, Artificial Sequence
  Description of Artificial Sequence: Synthetic oligonucleotide
acaggacugaggaguugca

SEQ ID NO: 2829272 - RNA, 19 nt, Artificial Sequence
  Description of Artificial Sequence: Synthetic oligonucleotide
gugguucggccuaccauca

SEQ ID NO: 2829273 - RNA, 19 nt, Artificial Sequence
  Description of Artificial Sequence: Synthetic oligonucleotide
uaacaccuugcagcuuuua

SEQ ID NO: 2829274 - RNA, 19 nt, Artificial Sequence
  Description of Artificial Sequence: Synthetic oligonucleotide
ugcugcccuuguuguacuc

SEQ ID NO: 2829275 - RNA, 19 nt, Artificial Sequence
  Description of Artificial Sequence: Synthetic oligonucleotide
ucgcagccgaggccacagc

SEQ ID NO: 2829276 - RNA, 19 nt, Artificial Sequence
  Description of Artificial Sequence: Synthetic oligonucleotide
ugccuugccagggcacagu

SEQ ID NO: 2829277 - RNA, 19 nt, Artificial Sequence
  Description of Artificial Sequence: Synthetic oligonucleotide
accuugcuugguguucgca

SEQ ID NO: 2829278 - RNA, 19 nt, Artificial Sequence
  Description of Artificial Sequence: Synthetic oligonucleotide
gcuuacgggcucucacuac

SEQ ID NO: 2829279 - RNA, 19 nt, Artificial Sequence
  Description of Artificial Sequence: Synthetic oligonucleotide
cuuuggccuccugcaggcc

SEQ ID NO: 2829280 - RNA, 19 nt, Artificial Sequence
  Description of Artificial Sequence: Synthetic oligonucleotide
ggacagagggauagaguuc

SEQ ID NO: 2829281 - RNA, 19 nt, Artificial Sequence
  Description of Artificial Sequence: Synthetic oligonucleotide
gccuugccagggcacagug

SEQ ID NO: 2829282 - RNA, 19 nt, Artificial Sequence
  Description of Artificial Sequence: Synthetic oligonucleotide
ggcacaguguagaucugga

SEQ ID NO: 2829283 - RNA, 19 nt, Artificial Sequence
  Description of Artificial Sequence: Synthetic oligonucleotide
agggcgcggcugugguacg

SEQ ID NO: 2829284 - RNA, 19 nt, Artificial Sequence
  Description of Artificial Sequence: Synthetic oligonucleotide
ggggcuggucauggaaagg

SEQ ID NO: 2829285 - RNA, 19 nt, Artificial Sequence
  Description of Artificial Sequence: Synthetic oligonucleotide
cugcuuacgggcucucacu

SEQ ID NO: 2829286 - RNA, 19 nt, Artificial Sequence
  Description of Artificial Sequence: Synthetic oligonucleotide
cagggucugugugccuugc

SEQ ID NO: 2829287 - RNA, 19 nt, Artificial Sequence
  Description of Artificial Sequence: Synthetic oligonucleotide
aucugcuuacgggcucuca

SEQ ID NO: 2829288 - RNA, 19 nt, Artificial Sequence
  Description of Artificial Sequence: Synthetic oligonucleotide
ccuugcagcuuuuacccaa

SEQ ID NO: 2829289 - RNA, 19 nt, Artificial Sequence
  Description of Artificial Sequence: Synthetic oligonucleotide
uugcugggacagagggaua

SEQ ID NO: 2829290 - RNA, 19 nt, Artificial Sequence
  Description of Artificial Sequence: Synthetic oligonucleotide
cauugcugcccuuguugua

SEQ ID NO: 2829291 - RNA, 19 nt, Artificial Sequence
  Description of Artificial Sequence: Synthetic oligonucleotide
cagagggauagaguucgaa

SEQ ID NO: 2829292 - RNA, 19 nt, Artificial Sequence
  Description of Artificial Sequence: Synthetic oligonucleotide
gcuugguguucgcagccga

SEQ ID NO: 2829293 - RNA, 19 nt, Artificial Sequence
  Description of Artificial Sequence: Synthetic oligonucleotide
gugccuugccagggcacag

SEQ ID NO: 2829294 - RNA, 19 nt, Artificial Sequence
  Description of Artificial Sequence: Synthetic oligonucleotide
ccaagaggcgcggaccuug

SEQ ID NO: 2829295 - RNA, 19 nt, Artificial Sequence
  Description of Artificial Sequence: Synthetic oligonucleotide
gcaggagcagcggggugcg

SEQ ID NO: 2829296 - RNA, 19 nt, Artificial Sequence
  Description of Artificial Sequence: Synthetic oligonucleotide
gggcucucacuaccucuag

SEQ ID NO: 2829297 - RNA, 19 nt, Artificial Sequence
  Description of Artificial Sequence: Synthetic oligonucleotide
ucacgcccucuuccucgac

SEQ ID NO: 2829298 - RNA, 19 nt, Artificial Sequence
  Description of Artificial Sequence: Synthetic oligonucleotide
ccucaucagauggggcugg

SEQ ID NO: 2829299 - RNA, 19 nt, Artificial Sequence
  Description of Artificial Sequence: Synthetic oligonucleotide
gggacuugguacauguggu

SEQ ID NO: 2829300 - RNA, 19 nt, Artificial Sequence
  Description of Artificial Sequence: Synthetic oligonucleotide
cacagccaggauggcuagc

SEQ ID NO: 2829301 - RNA, 19 nt, Artificial Sequence
  Description of Artificial Sequence: Synthetic oligonucleotide
uccucgacuuuggccuccu

SEQ ID NO: 2829302 - RNA, 19 nt, Artificial Sequence
  Description of Artificial Sequence: Synthetic oligonucleotide
cccuuguuguacucgcuga

SEQ ID NO: 2829303 - RNA, 19 nt, Artificial Sequence
  Description of Artificial Sequence: Synthetic oligonucleotide
agcugaaaugaggcugcua

SEQ ID NO: 2829304 - RNA, 19 nt, Artificial Sequence
  Description of Artificial Sequence: Synthetic oligonucleotide
gcccucuuccucgacuuug

SEQ ID NO: 2829305 - RNA, 19 nt, Artificial Sequence
  Description of Artificial Sequence: Synthetic oligonucleotide
cagccaccaucugcuuacg

SEQ ID NO: 2829306 - RNA, 19 nt, Artificial Sequence
  Description of Artificial Sequence: Synthetic oligonucleotide
ggcuggucauggaaaggac

SEQ ID NO: 2829307 - RNA, 19 nt, Artificial Sequence
  Description of Artificial Sequence: Synthetic oligonucleotide
gcacaguguagaucuggaa

SEQ ID NO: 2829308 - RNA, 19 nt, Artificial Sequence
  Description of Artificial Sequence: Synthetic oligonucleotide
gaucuggaaggagcagagu

SEQ ID NO: 2829309 - RNA, 19 nt, Artificial Sequence
  Description of Artificial Sequence: Synthetic oligonucleotide
cacuaccucuagggcgcgg

SEQ ID NO: 2829310 - RNA, 19 nt, Artificial Sequence
  Description of Artificial Sequence: Synthetic oligonucleotide
guucggccuaccaucacau

SEQ ID NO: 2829311 - RNA, 19 nt, Artificial Sequence
  Description of Artificial Sequence: Synthetic oligonucleotide
gugugccuugccagggcac

SEQ ID NO: 2829312 - RNA, 19 nt, Artificial Sequence
  Description of Artificial Sequence: Synthetic oligonucleotide
caccaucugcuuacgggcu

SEQ ID NO: 2829313 - RNA, 19 nt, Artificial Sequence
  Description of Artificial Sequence: Synthetic oligonucleotide
ugcuaacaccuugcagcuu

SEQ ID NO: 2829314 - RNA, 19 nt, Artificial Sequence
  Description of Artificial Sequence: Synthetic oligonucleotide
gcugauggcgaaguccaaa

SEQ ID NO: 2829315 - RNA, 19 nt, Artificial Sequence
  Description of Artificial Sequence: Synthetic oligonucleotide
cugaggaguugcagcugaa

SEQ ID NO: 2829316 - RNA, 19 nt, Artificial Sequence
  Description of Artificial Sequence: Synthetic oligonucleotide
gccacagccaggauggcua

SEQ ID NO: 2829317 - RNA, 19 nt, Artificial Sequence
  Description of Artificial Sequence: Synthetic oligonucleotide
ggauggcuagcaggagcag

SEQ ID NO: 2829318 - RNA, 19 nt, Artificial Sequence
  Description of Artificial Sequence: Synthetic oligonucleotide
cuagcaggagcagcggggu

SEQ ID NO: 2829319 - RNA, 19 nt, Artificial Sequence
  Description of Artificial Sequence: Synthetic oligonucleotide
cagguuuggcugggacuug

SEQ ID NO: 2829320 - RNA, 19 nt, Artificial Sequence
  Description of Artificial Sequence: Synthetic oligonucleotide
acagagggauagaguucga

SEQ ID NO: 2829321 - RNA, 19 nt, Artificial Sequence
  Description of Artificial Sequence: Synthetic oligonucleotide
ccucccaagaggcgcggac

SEQ ID NO: 2829322 - RNA, 19 nt, Artificial Sequence
  Description of Artificial Sequence: Synthetic oligonucleotide
ccacagccaggauggcuag

SEQ ID NO: 2829323 - RNA, 19 nt, Artificial Sequence
  Description of Artificial Sequence: Synthetic oligonucleotide
cgcagccgaggccacagcc

SEQ ID NO: 2829324 - RNA, 19 nt, Artificial Sequence
  Description of Artificial Sequence: Synthetic oligonucleotide
ccucuuccucgacuuuggc

SEQ ID NO: 2829325 - RNA, 19 nt, Artificial Sequence
  Description of Artificial Sequence: Synthetic oligonucleotide
gcgggcuggccaugguugc

SEQ ID NO: 2829326 - RNA, 19 nt, Artificial Sequence
  Description of Artificial Sequence: Synthetic oligonucleotide
acucaacccuuaggcacuu

SEQ ID NO: 2829327 - RNA, 19 nt, Artificial Sequence
  Description of Artificial Sequence: Synthetic oligonucleotide
ggccaugguugcugggaca

SEQ ID NO: 2829328 - RNA, 19 nt, Artificial Sequence
  Description of Artificial Sequence: Synthetic oligonucleotide
aggcacuuuugcagcugga

SEQ ID NO: 2829329 - RNA, 19 nt, Artificial Sequence
  Description of Artificial Sequence: Synthetic oligonucleotide
gcaggccucccaagaggcg

SEQ ID NO: 2829330 - RNA, 19 nt, Artificial Sequence
  Description of Artificial Sequence: Synthetic oligonucleotide
gagcagcggggugcgcagc

SEQ ID NO: 2829331 - RNA, 19 nt, Artificial Sequence
  Description of Artificial Sequence: Synthetic oligonucleotide
gcacuuuugcagcuggauu

SEQ ID NO: 2829332 - RNA, 19 nt, Artificial Sequence
  Description of Artificial Sequence: Synthetic oligonucleotide
cacauccaaauaguaguuu

SEQ ID NO: 2829333 - RNA, 19 nt, Artificial Sequence
  Description of Artificial Sequence: Synthetic oligonucleotide
gcgcggaccuugcuuggug

SEQ ID NO: 2829334 - RNA, 19 nt, Artificial Sequence
  Description of Artificial Sequence: Synthetic oligonucleotide
agggcacaguguagaucug

SEQ ID NO: 2829335 - RNA, 19 nt, Artificial Sequence
  Description of Artificial Sequence: Synthetic oligonucleotide
cgcaucauugcugcccuug

SEQ ID NO: 2829336 - RNA, 19 nt, Artificial Sequence
  Description of Artificial Sequence: Synthetic oligonucleotide
agcuugcuucacgcccucu

SEQ ID NO: 2829337 - RNA, 19 nt, Artificial Sequence
  Description of Artificial Sequence: Synthetic oligonucleotide
gcaucauugcugcccuugu

SEQ ID NO: 2829338 - RNA, 19 nt, Artificial Sequence
  Description of Artificial Sequence: Synthetic oligonucleotide
ccagggcacaguguagauc

SEQ ID NO: 2829339 - RNA, 19 nt, Artificial Sequence
  Description of Artificial Sequence: Synthetic oligonucleotide
ggggugcgcagcgggcugg

SEQ ID NO: 2829340 - RNA, 19 nt, Artificial Sequence
  Description of Artificial Sequence: Synthetic oligonucleotide
ggacuugguacaugugguu

SEQ ID NO: 2829341 - RNA, 19 nt, Artificial Sequence
  Description of Artificial Sequence: Synthetic oligonucleotide
gucagggucugugugccuu

SEQ ID NO: 2829342 - RNA, 19 nt, Artificial Sequence
  Description of Artificial Sequence: Synthetic oligonucleotide
cggccuaccaucacaucca

SEQ ID NO: 2829343 - RNA, 19 nt, Artificial Sequence
  Description of Artificial Sequence: Synthetic oligonucleotide
cacgcccucuuccucgacu

SEQ ID NO: 2829344 - RNA, 19 nt, Artificial Sequence
  Description of Artificial Sequence: Synthetic oligonucleotide
ggcacuuuugcagcuggau

SEQ ID NO: 2829345 - RNA, 19 nt, Artificial Sequence
  Description of Artificial Sequence: Synthetic oligonucleotide
ggccuaccaucacauccaa

SEQ ID NO: 2829346 - RNA, 19 nt, Artificial Sequence
  Description of Artificial Sequence: Synthetic oligonucleotide
caucauugcugcccuuguu

SEQ ID NO: 2829347 - RNA, 19 nt, Artificial Sequence
  Description of Artificial Sequence: Synthetic oligonucleotide
guucgcagccgaggccaca

SEQ ID NO: 2829348 - RNA, 19 nt, Artificial Sequence
  Description of Artificial Sequence: Synthetic oligonucleotide
cuaacaccuugcagcuuuu

SEQ ID NO: 2829349 - RNA, 19 nt, Artificial Sequence
  Description of Artificial Sequence: Synthetic oligonucleotide
ggcugugguacgcaucauu

SEQ ID NO: 2829350 - RNA, 19 nt, Artificial Sequence
  Description of Artificial Sequence: Synthetic oligonucleotide
acgcaucauugcugcccuu

SEQ ID NO: 2829351 - RNA, 19 nt, Artificial Sequence
  Description of Artificial Sequence: Synthetic oligonucleotide
gcgaaguccaaagcuugcu

SEQ ID NO: 2829352 - RNA, 19 nt, Artificial Sequence
  Description of Artificial Sequence: Synthetic oligonucleotide
cuagggcgcggcuguggua

SEQ ID NO: 2829353 - RNA, 19 nt, Artificial Sequence
  Description of Artificial Sequence: Synthetic oligonucleotide
gcagcggggugcgcagcgg

SEQ ID NO: 2829354 - RNA, 19 nt, Artificial Sequence
  Description of Artificial Sequence: Synthetic oligonucleotide
augaggcugcuaacaccuu

SEQ ID NO: 2829355 - RNA, 19 nt, Artificial Sequence
  Description of Artificial Sequence: Synthetic oligonucleotide
cuaccucuagggcgcggcu

SEQ ID NO: 2829356 - RNA, 19 nt, Artificial Sequence
  Description of Artificial Sequence: Synthetic oligonucleotide
ccuccugcaggccucccaa

SEQ ID NO: 2829357 - RNA, 19 nt, Artificial Sequence
  Description of Artificial Sequence: Synthetic oligonucleotide
gcuugcuucacgcccucuu

SEQ ID NO: 2829358 - RNA, 19 nt, Artificial Sequence
  Description of Artificial Sequence: Synthetic oligonucleotide
gccuccugcaggccuccca

SEQ ID NO: 2829359 - RNA, 19 nt, Artificial Sequence
  Description of Artificial Sequence: Synthetic oligonucleotide
ggccucccaagaggcgcgg

SEQ ID NO: 2829360 - RNA, 19 nt, Artificial Sequence
  Description of Artificial Sequence: Synthetic oligonucleotide
gcugggacagagggauaga

SEQ ID NO: 2829361 - RNA, 19 nt, Artificial Sequence
  Description of Artificial Sequence: Synthetic oligonucleotide
cugucagguuuggcuggga

SEQ ID NO: 2829362 - RNA, 19 nt, Artificial Sequence
  Description of Artificial Sequence: Synthetic oligonucleotide
ccuuguuguacucgcugau

SEQ ID NO: 2829363 - RNA, 19 nt, Artificial Sequence
  Description of Artificial Sequence: Synthetic oligonucleotide
cggaccuugcuugguguuc

SEQ ID NO: 2829364 - RNA, 19 nt, Artificial Sequence
  Description of Artificial Sequence: Synthetic oligonucleotide
ggcgcggcugugguacgca

SEQ ID NO: 2829365 - RNA, 19 nt, Artificial Sequence
  Description of Artificial Sequence: Synthetic oligonucleotide
cucaucagauggggcuggu

SEQ ID NO: 2829366 - RNA, 19 nt, Artificial Sequence
  Description of Artificial Sequence: Synthetic oligonucleotide
ggauuuugucagggucugu

SEQ ID NO: 2829367 - RNA, 19 nt, Artificial Sequence
  Description of Artificial Sequence: Synthetic oligonucleotide
cgcggcugugguacgcauc

SEQ ID NO: 2829368 - RNA, 19 nt, Artificial Sequence
  Description of Artificial Sequence: Synthetic oligonucleotide
ggugcgcagcgggcuggcc

SEQ ID NO: 2829369 - RNA, 19 nt, Artificial Sequence
  Description of Artificial Sequence: Synthetic oligonucleotide
gggcgcggcugugguacgc

SEQ ID NO: 2829370 - RNA, 19 nt, Artificial Sequence
  Description of Artificial Sequence: Synthetic oligonucleotide
cgcagcgggcuggccaugg

SEQ ID NO: 2829371 - RNA, 19 nt, Artificial Sequence
  Description of Artificial Sequence: Synthetic oligonucleotide
gccagggcacaguguagau

SEQ ID NO: 2829372 - RNA, 19 nt, Artificial Sequence
  Description of Artificial Sequence: Synthetic oligonucleotide
gggugcgcagcgggcuggc

SEQ ID NO: 2829373 - RNA, 19 nt, Artificial Sequence
  Description of Artificial Sequence: Synthetic oligonucleotide
cagcgggcuggccaugguu

SEQ ID NO: 2829374 - RNA, 19 nt, Artificial Sequence
  Description of Artificial Sequence: Synthetic oligonucleotide
cgggcucucacuaccucua

SEQ ID NO: 2829375 - RNA, 19 nt, Artificial Sequence
  Description of Artificial Sequence: Synthetic oligonucleotide
cagcugaaaugaggcugcu

SEQ ID NO: 2829376 - RNA, 19 nt, Artificial Sequence
  Description of Artificial Sequence: Synthetic oligonucleotide
gccuaccaucacauccaaa

SEQ ID NO: 2829377 - RNA, 19 nt, Artificial Sequence
  Description of Artificial Sequence: Synthetic oligonucleotide
ccucgacuuuggccuccug

SEQ ID NO: 2829378 - RNA, 19 nt, Artificial Sequence
  Description of Artificial Sequence: Synthetic oligonucleotide
cgaaguccaaagcuugcuu

SEQ ID NO: 2829379 - RNA, 19 nt, Artificial Sequence
  Description of Artificial Sequence: Synthetic oligonucleotide
cgaacaggacugaggaguu

SEQ ID NO: 2829380 - RNA, 19 nt, Artificial Sequence
  Description of Artificial Sequence: Synthetic oligonucleotide
gcggaccuugcuugguguu

SEQ ID NO: 2829381 - RNA, 19 nt, Artificial Sequence
  Description of Artificial Sequence: Synthetic oligonucleotide
ccucuagggcgcggcugug

SEQ ID NO: 2829382 - RNA, 19 nt, Artificial Sequence
  Description of Artificial Sequence: Synthetic oligonucleotide
cggggugcgcagcgggcug

SEQ ID NO: 2829383 - RNA, 19 nt, Artificial Sequence
  Description of Artificial Sequence: Synthetic oligonucleotide
gccucccaagaggcgcgga

SEQ ID NO: 2829384 - RNA, 19 nt, Artificial Sequence
  Description of Artificial Sequence: Synthetic oligonucleotide
cgcggaccuugcuuggugu

SEQ ID NO: 2829385 - RNA, 19 nt, Artificial Sequence
  Description of Artificial Sequence: Synthetic oligonucleotide
ggcgcggaccuugcuuggu

SEQ ID NO: 2829386 - RNA, 19 nt, Artificial Sequence
  Description of Artificial Sequence: Synthetic oligonucleotide
gcggggugcgcagcgggcu

SEQ ID NO: 2829387 - RNA, 19 nt, Artificial Sequence
  Description of Artificial Sequence: Synthetic oligonucleotide
gcagcgggcuggccauggu

SEQ ID NO: 2829388 - RNA, 19 nt, Artificial Sequence
  Description of Artificial Sequence: Synthetic oligonucleotide
cgcugauggcgaaguccaa

SEQ ID NO: 2829389 - RNA, 19 nt, Artificial Sequence
  Description of Artificial Sequence: Synthetic oligonucleotide
cucaacccuuaggcacuuu

SEQ ID NO: 2829390 - RNA, 19 nt, Artificial Sequence
  Description of Artificial Sequence: Synthetic oligonucleotide
gcgcggcugugguacgcau

SEQ ID NO: 2829391 - RNA, 19 nt, Artificial Sequence
  Description of Artificial Sequence: Synthetic oligonucleotide
cccaagaggcgcggaccuu

SEQ ID NO: 2829392 - RNA, 19 nt, Artificial Sequence
  Description of Artificial Sequence: Synthetic oligonucleotide
cgggcuggccaugguugcu

SEQ ID NO: 2829393 - RNA, 19 nt, Artificial Sequence
  Description of Artificial Sequence: Synthetic oligonucleotide
cgcccucuuccucgacuuu

SEQ ID NO: 2829394 - RNA, 19 nt, Artificial Sequence
  Description of Artificial Sequence: Synthetic oligonucleotide
aauaucauaaaauaauaga

SEQ ID NO: 2829395 - RNA, 19 nt, Artificial Sequence
  Description of Artificial Sequence: Synthetic oligonucleotide
aggaauuucaacuaguuac

SEQ ID NO: 2829396 - RNA, 19 nt, Artificial Sequence
  Description of Artificial Sequence: Synthetic oligonucleotide
cauaaaauaauagagauuc

SEQ ID NO: 2829397 - RNA, 19 nt, Artificial Sequence
  Description of Artificial Sequence: Synthetic oligonucleotide
uauauuuucugcauuguag

SEQ ID NO: 2829398 - RNA, 19 nt, Artificial Sequence
  Description of Artificial Sequence: Synthetic oligonucleotide
aauuaauauauuuucugca

SEQ ID NO: 2829399 - RNA, 19 nt, Artificial Sequence
  Description of Artificial Sequence: Synthetic oligonucleotide
uuaauuaauauauuuucug

SEQ ID NO: 2829400 - RNA, 19 nt, Artificial Sequence
  Description of Artificial Sequence: Synthetic oligonucleotide
auuucaacuaguuaccaac

SEQ ID NO: 2829401 - RNA, 19 nt, Artificial Sequence
  Description of Artificial Sequence: Synthetic oligonucleotide
aacuuugugauuuauacau

SEQ ID NO: 2829402 - RNA, 19 nt, Artificial Sequence
  Description of Artificial Sequence: Synthetic oligonucleotide
uuguaguuaacauauaugu

SEQ ID NO: 2829403 - RNA, 19 nt, Artificial Sequence
  Description of Artificial Sequence: Synthetic oligonucleotide
uaauuaauauauuuucugc

SEQ ID NO: 2829404 - RNA, 19 nt, Artificial Sequence
  Description of Artificial Sequence: Synthetic oligonucleotide
uaucauaaaauaauagaga

SEQ ID NO: 2829405 - RNA, 19 nt, Artificial Sequence
  Description of Artificial Sequence: Synthetic oligonucleotide
ugauauguuauauucagac

SEQ ID NO: 2829406 - RNA, 19 nt, Artificial Sequence
  Description of Artificial Sequence: Synthetic oligonucleotide
guaguuaacauauauguac

SEQ ID NO: 2829407 - RNA, 19 nt, Artificial Sequence
  Description of Artificial Sequence: Synthetic oligonucleotide
auaucauaaaauaauagag

SEQ ID NO: 2829408 - RNA, 19 nt, Artificial Sequence
  Description of Artificial Sequence: Synthetic oligonucleotide
acauauauguacuuuaugu

SEQ ID NO: 2829409 - RNA, 19 nt, Artificial Sequence
  Description of Artificial Sequence: Synthetic oligonucleotide
uuauauucagacaugagua

SEQ ID NO: 2829410 - RNA, 19 nt, Artificial Sequence
  Description of Artificial Sequence: Synthetic oligonucleotide
uugugauuuauacauauac

SEQ ID NO: 2829411 - RNA, 19 nt, Artificial Sequence
  Description of Artificial Sequence: Synthetic oligonucleotide
agugauauguuauauucag

SEQ ID NO: 2829412 - RNA, 19 nt, Artificial Sequence
  Description of Artificial Sequence: Synthetic oligonucleotide
aaauaucauaaaauaauag

SEQ ID NO: 2829413 - RNA, 19 nt, Artificial Sequence
  Description of Artificial Sequence: Synthetic oligonucleotide
ucaacuuugugauuuauac

SEQ ID NO: 2829414 - RNA, 19 nt, Artificial Sequence
  Description of Artificial Sequence: Synthetic oligonucleotide
auuggaaacacccagcugu

SEQ ID NO: 2829415 - RNA, 19 nt, Artificial Sequence
  Description of Artificial Sequence: Synthetic oligonucleotide
auauguuauauucagacau

SEQ ID NO: 2829416 - RNA, 19 nt, Artificial Sequence
  Description of Artificial Sequence: Synthetic oligonucleotide
aaauaauagagauucgcau

SEQ ID NO: 2829417 - RNA, 19 nt, Artificial Sequence
  Description of Artificial Sequence: Synthetic oligonucleotide
ugcaauaaauaucauaaaa

SEQ ID NO: 2829418 - RNA, 19 nt, Artificial Sequence
  Description of Artificial Sequence: Synthetic oligonucleotide
aaguccuucacagacacgg

SEQ ID NO: 2829419 - RNA, 19 nt, Artificial Sequence
  Description of Artificial Sequence: Synthetic oligonucleotide
auaauaaauauucuuuaca

SEQ ID NO: 2829420 - RNA, 19 nt, Artificial Sequence
  Description of Artificial Sequence: Synthetic oligonucleotide
aaguuuaacagacuuuugu

SEQ ID NO: 2829421 - RNA, 19 nt, Artificial Sequence
  Description of Artificial Sequence: Synthetic oligonucleotide
uaaaauaauagagauucgc

SEQ ID NO: 2829422 - RNA, 19 nt, Artificial Sequence
  Description of Artificial Sequence: Synthetic oligonucleotide
uaauauauuuucugcauug

SEQ ID NO: 2829423 - RNA, 19 nt, Artificial Sequence
  Description of Artificial Sequence: Synthetic oligonucleotide
auucgcauaauaaauauuc

SEQ ID NO: 2829424 - RNA, 19 nt, Artificial Sequence
  Description of Artificial Sequence: Synthetic oligonucleotide
aucauaaaauaauagagau

SEQ ID NO: 2829425 - RNA, 19 nt, Artificial Sequence
  Description of Artificial Sequence: Synthetic oligonucleotide
gcuguuaagagucaaaagg

SEQ ID NO: 2829426 - RNA, 19 nt, Artificial Sequence
  Description of Artificial Sequence: Synthetic oligonucleotide
aguuuaacagacuuuuguc

SEQ ID NO: 2829427 - RNA, 19 nt, Artificial Sequence
  Description of Artificial Sequence: Synthetic oligonucleotide
ugcauuguaguuaacauau

SEQ ID NO: 2829428 - RNA, 19 nt, Artificial Sequence
  Description of Artificial Sequence: Synthetic oligonucleotide
uuaagagucaaaaggccag

SEQ ID NO: 2829429 - RNA, 19 nt, Artificial Sequence
  Description of Artificial Sequence: Synthetic oligonucleotide
aaggauuggaaacacccag

SEQ ID NO: 2829430 - RNA, 19 nt, Artificial Sequence
  Description of Artificial Sequence: Synthetic oligonucleotide
uaaauaucauaaaauaaua

SEQ ID NO: 2829431 - RNA, 19 nt, Artificial Sequence
  Description of Artificial Sequence: Synthetic oligonucleotide
aauaauagagauucgcaua

SEQ ID NO: 2829432 - RNA, 19 nt, Artificial Sequence
  Description of Artificial Sequence: Synthetic oligonucleotide
uuuauguacuuucuucgag

SEQ ID NO: 2829433 - RNA, 19 nt, Artificial Sequence
  Description of Artificial Sequence: Synthetic oligonucleotide
uguuaagagucaaaaggcc

SEQ ID NO: 2829434 - RNA, 19 nt, Artificial Sequence
  Description of Artificial Sequence: Synthetic oligonucleotide
cuguuaagagucaaaaggc

SEQ ID NO: 2829435 - RNA, 19 nt, Artificial Sequence
  Description of Artificial Sequence: Synthetic oligonucleotide
aaaauagccaggauucaac

SEQ ID NO: 2829436 - RNA, 19 nt, Artificial Sequence
  Description of Artificial Sequence: Synthetic oligonucleotide
ucauuaauuaauauauuuu

SEQ ID NO: 2829437 - RNA, 19 nt, Artificial Sequence
  Description of Artificial Sequence: Synthetic oligonucleotide
uauauguacuuuauguacu

SEQ ID NO: 2829438 - RNA, 19 nt, Artificial Sequence
  Description of Artificial Sequence: Synthetic oligonucleotide
auaaauaucauaaaauaau

SEQ ID NO: 2829439 - RNA, 19 nt, Artificial Sequence
  Description of Artificial Sequence: Synthetic oligonucleotide
uucauuaauuaauauauuu

SEQ ID NO: 2829440 - RNA, 19 nt, Artificial Sequence
  Description of Artificial Sequence: Synthetic oligonucleotide
aaagcaccacaauuugugg

SEQ ID NO: 2829441 - RNA, 19 nt, Artificial Sequence
  Description of Artificial Sequence: Synthetic oligonucleotide
aaaauaauagagauucgca

SEQ ID NO: 2829442 - RNA, 19 nt, Artificial Sequence
  Description of Artificial Sequence: Synthetic oligonucleotide
ugugauuuauacauauacu

SEQ ID NO: 2829443 - RNA, 19 nt, Artificial Sequence
  Description of Artificial Sequence: Synthetic oligonucleotide
aaaagcaccacaauuugug

SEQ ID NO: 2829444 - RNA, 19 nt, Artificial Sequence
  Description of Artificial Sequence: Synthetic oligonucleotide
caugaguacauuucaacag

SEQ ID NO: 2829445 - RNA, 19 nt, Artificial Sequence
  Description of Artificial Sequence: Synthetic oligonucleotide
cauuucaacagucuuuugc

SEQ ID NO: 2829446 - RNA, 19 nt, Artificial Sequence
  Description of Artificial Sequence: Synthetic oligonucleotide
guagugauauguuauauuc

SEQ ID NO: 2829447 - RNA, 19 nt, Artificial Sequence
  Description of Artificial Sequence: Synthetic oligonucleotide
gaagggaaguccuucacag

SEQ ID NO: 2829448 - RNA, 19 nt, Artificial Sequence
  Description of Artificial Sequence: Synthetic oligonucleotide
aacauauauguacuuuaug

SEQ ID NO: 2829449 - RNA, 19 nt, Artificial Sequence
  Description of Artificial Sequence: Synthetic oligonucleotide
agggaaguccuucacagac

SEQ ID NO: 2829450 - RNA, 19 nt, Artificial Sequence
  Description of Artificial Sequence: Synthetic oligonucleotide
ugauuuauacauauacuau

SEQ ID NO: 2829451 - RNA, 19 nt, Artificial Sequence
  Description of Artificial Sequence: Synthetic oligonucleotide
cauaauaaauauucuuuac

SEQ ID NO: 2829452 - RNA, 19 nt, Artificial Sequence
  Description of Artificial Sequence: Synthetic oligonucleotide
auuaauauauuuucugcau

SEQ ID NO: 2829453 - RNA, 19 nt, Artificial Sequence
  Description of Artificial Sequence: Synthetic oligonucleotide
ugaaguagugauauguuau

SEQ ID NO: 2829454 - RNA, 19 nt, Artificial Sequence
  Description of Artificial Sequence: Synthetic oligonucleotide
auuucaacagucuuuugca

SEQ ID NO: 2829455 - RNA, 19 nt, Artificial Sequence
  Description of Artificial Sequence: Synthetic oligonucleotide
cacaauuugugguuaaggc

SEQ ID NO: 2829456 - RNA, 19 nt, Artificial Sequence
  Description of Artificial Sequence: Synthetic oligonucleotide
uuaacauauauguacuuua

SEQ ID NO: 2829457 - RNA, 19 nt, Artificial Sequence
  Description of Artificial Sequence: Synthetic oligonucleotide
aacaaggaggauuagccaa

SEQ ID NO: 2829458 - RNA, 19 nt, Artificial Sequence
  Description of Artificial Sequence: Synthetic oligonucleotide
auauuuucugcauuguagu

SEQ ID NO: 2829459 - RNA, 19 nt, Artificial Sequence
  Description of Artificial Sequence: Synthetic oligonucleotide
agucuuuugcaauaaauau

SEQ ID NO: 2829460 - RNA, 19 nt, Artificial Sequence
  Description of Artificial Sequence: Synthetic oligonucleotide
uauguuauauucagacaug

SEQ ID NO: 2829461 - RNA, 19 nt, Artificial Sequence
  Description of Artificial Sequence: Synthetic oligonucleotide
aaauagccaggauucaacu

SEQ ID NO: 2829462 - RNA, 19 nt, Artificial Sequence
  Description of Artificial Sequence: Synthetic oligonucleotide
cuuucuucgagucaccuug

SEQ ID NO: 2829463 - RNA, 19 nt, Artificial Sequence
  Description of Artificial Sequence: Synthetic oligonucleotide
uaguuaacauauauguacu

SEQ ID NO: 2829464 - RNA, 19 nt, Artificial Sequence
  Description of Artificial Sequence: Synthetic oligonucleotide
ucaugaaguagugauaugu

SEQ ID NO: 2829465 - RNA, 19 nt, Artificial Sequence
  Description of Artificial Sequence: Synthetic oligonucleotide
auaauagagauucgcauaa

SEQ ID NO: 2829466 - RNA, 19 nt, Artificial Sequence
  Description of Artificial Sequence: Synthetic oligonucleotide
acaauuugugguuaaggca

SEQ ID NO: 2829467 - RNA, 19 nt, Artificial Sequence
  Description of Artificial Sequence: Synthetic oligonucleotide
gauuuauacauauacuaua

SEQ ID NO: 2829468 - RNA, 19 nt, Artificial Sequence
  Description of Artificial Sequence: Synthetic oligonucleotide
aggaggauuagccaacauc

SEQ ID NO: 2829469 - RNA, 19 nt, Artificial Sequence
  Description of Artificial Sequence: Synthetic oligonucleotide
aauagagauucgcauaaua

SEQ ID NO: 2829470 - RNA, 19 nt, Artificial Sequence
  Description of Artificial Sequence: Synthetic oligonucleotide
uguuauauucagacaugag

SEQ ID NO: 2829471 - RNA, 19 nt, Artificial Sequence
  Description of Artificial Sequence: Synthetic oligonucleotide
uguacuuucuucgagucac

SEQ ID NO: 2829472 - RNA, 19 nt, Artificial Sequence
  Description of Artificial Sequence: Synthetic oligonucleotide
uuugugguuaaggcaaugg

SEQ ID NO: 2829473 - RNA, 19 nt, Artificial Sequence
  Description of Artificial Sequence: Synthetic oligonucleotide
ugugguuaaggcaauggaa

SEQ ID NO: 2829474 - RNA, 19 nt, Artificial Sequence
  Description of Artificial Sequence: Synthetic oligonucleotide
acaugaguacauuucaaca

SEQ ID NO: 2829475 - RNA, 19 nt, Artificial Sequence
  Description of Artificial Sequence: Synthetic oligonucleotide
auuaauuaauauauuuucu

SEQ ID NO: 2829476 - RNA, 19 nt, Artificial Sequence
  Description of Artificial Sequence: Synthetic oligonucleotide
uauauucagacaugaguac

SEQ ID NO: 2829477 - RNA, 19 nt, Artificial Sequence
  Description of Artificial Sequence: Synthetic oligonucleotide
ucagacaugaguacauuuc

SEQ ID NO: 2829478 - RNA, 19 nt, Artificial Sequence
  Description of Artificial Sequence: Synthetic oligonucleotide
uacuuuauguacuuucuuc

SEQ ID NO: 2829479 - RNA, 19 nt, Artificial Sequence
  Description of Artificial Sequence: Synthetic oligonucleotide
caauggaaacacaggaagg

SEQ ID NO: 2829480 - RNA, 19 nt, Artificial Sequence
  Description of Artificial Sequence: Synthetic oligonucleotide
uagagauucgcauaauaaa

SEQ ID NO: 2829481 - RNA, 19 nt, Artificial Sequence
  Description of Artificial Sequence: Synthetic oligonucleotide
uuauguacuuucuucgagu

SEQ ID NO: 2829482 - RNA, 19 nt, Artificial Sequence
  Description of Artificial Sequence: Synthetic oligonucleotide
uuaauauauuuucugcauu

SEQ ID NO: 2829483 - RNA, 19 nt, Artificial Sequence
  Description of Artificial Sequence: Synthetic oligonucleotide
gugauuuauacauauacua

SEQ ID NO: 2829484 - RNA, 19 nt, Artificial Sequence
  Description of Artificial Sequence: Synthetic oligonucleotide
aggauuagccaacaucauc

SEQ ID NO: 2829485 - RNA, 19 nt, Artificial Sequence
  Description of Artificial Sequence: Synthetic oligonucleotide
uuucaugaaguagugauau

SEQ ID NO: 2829486 - RNA, 19 nt, Artificial Sequence
  Description of Artificial Sequence: Synthetic oligonucleotide
uuuaacagacuuuugucuu

SEQ ID NO: 2829487 - RNA, 19 nt, Artificial Sequence
  Description of Artificial Sequence: Synthetic oligonucleotide
gacaugaguacauuucaac

SEQ ID NO: 2829488 - RNA, 19 nt, Artificial Sequence
  Description of Artificial Sequence: Synthetic oligonucleotide
aauuucaacuaguuaccaa

SEQ ID NO: 2829489 - RNA, 19 nt, Artificial Sequence
  Description of Artificial Sequence: Synthetic oligonucleotide
guuauauucagacaugagu

SEQ ID NO: 2829490 - RNA, 19 nt, Artificial Sequence
  Description of Artificial Sequence: Synthetic oligonucleotide
gauauguuauauucagaca

SEQ ID NO: 2829491 - RNA, 19 nt, Artificial Sequence
  Description of Artificial Sequence: Synthetic oligonucleotide
uguagugcgggugggaagg

SEQ ID NO: 2829492 - RNA, 19 nt, Artificial Sequence
  Description of Artificial Sequence: Synthetic oligonucleotide
uuucaacuaguuaccaacu

SEQ ID NO: 2829493 - RNA, 19 nt, Artificial Sequence
  Description of Artificial Sequence: Synthetic oligonucleotide
uguaguuaacauauaugua

SEQ ID NO: 2829494 - RNA, 19 nt, Artificial Sequence
  Description of Artificial Sequence: Synthetic oligonucleotide
uagugauauguuauauuca

SEQ ID NO: 2829495 - RNA, 19 nt, Artificial Sequence
  Description of Artificial Sequence: Synthetic oligonucleotide
guuucauuaauuaauauau

SEQ ID NO: 2829496 - RNA, 19 nt, Artificial Sequence
  Description of Artificial Sequence: Synthetic oligonucleotide
ucauaaaauaauagagauu

SEQ ID NO: 2829497 - RNA, 19 nt, Artificial Sequence
  Description of Artificial Sequence: Synthetic oligonucleotide
aacuaguuaccaacucgcc

SEQ ID NO: 2829498 - RNA, 19 nt, Artificial Sequence
  Description of Artificial Sequence: Synthetic oligonucleotide
gcaauggaaacacaggaag

SEQ ID NO: 2829499 - RNA, 19 nt, Artificial Sequence
  Description of Artificial Sequence: Synthetic oligonucleotide
agauucgcauaauaaauau

SEQ ID NO: 2829500 - RNA, 19 nt, Artificial Sequence
  Description of Artificial Sequence: Synthetic oligonucleotide
uucgcauaauaaauauucu

SEQ ID NO: 2829501 - RNA, 19 nt, Artificial Sequence
  Description of Artificial Sequence: Synthetic oligonucleotide
augaguacauuucaacagu

SEQ ID NO: 2829502 - RNA, 19 nt, Artificial Sequence
  Description of Artificial Sequence: Synthetic oligonucleotide
auuguaguuaacauauaug

SEQ ID NO: 2829503 - RNA, 19 nt, Artificial Sequence
  Description of Artificial Sequence: Synthetic oligonucleotide
aacacccagcuguuaagag

SEQ ID NO: 2829504 - RNA, 19 nt, Artificial Sequence
  Description of Artificial Sequence: Synthetic oligonucleotide
caauuugugguuaaggcaa

SEQ ID NO: 2829505 - RNA, 19 nt, Artificial Sequence
  Description of Artificial Sequence: Synthetic oligonucleotide
uaacauauauguacuuuau

SEQ ID NO: 2829506 - RNA, 19 nt, Artificial Sequence
  Description of Artificial Sequence: Synthetic oligonucleotide
uauucagacaugaguacau

SEQ ID NO: 2829507 - RNA, 19 nt, Artificial Sequence
  Description of Artificial Sequence: Synthetic oligonucleotide
aggcaauggaaacacagga

SEQ ID NO: 2829508 - RNA, 19 nt, Artificial Sequence
  Description of Artificial Sequence: Synthetic oligonucleotide
aggaacaaggaggauuagc

SEQ ID NO: 2829509 - RNA, 19 nt, Artificial Sequence
  Description of Artificial Sequence: Synthetic oligonucleotide
cacaggaaggauuggaaac

SEQ ID NO: 2829510 - RNA, 19 nt, Artificial Sequence
  Description of Artificial Sequence: Synthetic oligonucleotide
aagcaccacaauuuguggu

SEQ ID NO: 2829511 - RNA, 19 nt, Artificial Sequence
  Description of Artificial Sequence: Synthetic oligonucleotide
uauguacuuucuucgaguc

SEQ ID NO: 2829512 - RNA, 19 nt, Artificial Sequence
  Description of Artificial Sequence: Synthetic oligonucleotide
auagccaggauucaacuuu

SEQ ID NO: 2829513 - RNA, 19 nt, Artificial Sequence
  Description of Artificial Sequence: Synthetic oligonucleotide
agcuguuaagagucaaaag

SEQ ID NO: 2829514 - RNA, 19 nt, Artificial Sequence
  Description of Artificial Sequence: Synthetic oligonucleotide
uaccaacucgcccucagug

SEQ ID NO: 2829515 - RNA, 19 nt, Artificial Sequence
  Description of Artificial Sequence: Synthetic oligonucleotide
uccuucacagacacggggc

SEQ ID NO: 2829516 - RNA, 19 nt, Artificial Sequence
  Description of Artificial Sequence: Synthetic oligonucleotide
uuuucaugaaguagugaua

SEQ ID NO: 2829517 - RNA, 19 nt, Artificial Sequence
  Description of Artificial Sequence: Synthetic oligonucleotide
gaaacacccagcuguuaag

SEQ ID NO: 2829518 - RNA, 19 nt, Artificial Sequence
  Description of Artificial Sequence: Synthetic oligonucleotide
auaaaauaauagagauucg

SEQ ID NO: 2829519 - RNA, 19 nt, Artificial Sequence
  Description of Artificial Sequence: Synthetic oligonucleotide
agacaggaauuucaacuag

SEQ ID NO: 2829520 - RNA, 19 nt, Artificial Sequence
  Description of Artificial Sequence: Synthetic oligonucleotide
ugaguacauuucaacaguc

SEQ ID NO: 2829521 - RNA, 19 nt, Artificial Sequence
  Description of Artificial Sequence: Synthetic oligonucleotide
ggaacaaggaggauuagcc

SEQ ID NO: 2829522 - RNA, 19 nt, Artificial Sequence
  Description of Artificial Sequence: Synthetic oligonucleotide
uuucauuaauuaauauauu

SEQ ID NO: 2829523 - RNA, 19 nt, Artificial Sequence
  Description of Artificial Sequence: Synthetic oligonucleotide
ucaacagucuuuugcaaua

SEQ ID NO: 2829524 - RNA, 19 nt, Artificial Sequence
  Description of Artificial Sequence: Synthetic oligonucleotide
aagagucaaaaggccaguc

SEQ ID NO: 2829525 - RNA, 19 nt, Artificial Sequence
  Description of Artificial Sequence: Synthetic oligonucleotide
ggaaggauuggaaacaccc

SEQ ID NO: 2829526 - RNA, 19 nt, Artificial Sequence
  Description of Artificial Sequence: Synthetic oligonucleotide
aaacacaggaaggauugga

SEQ ID NO: 2829527 - RNA, 19 nt, Artificial Sequence
  Description of Artificial Sequence: Synthetic oligonucleotide
ucgcauaauaaauauucuu

SEQ ID NO: 2829528 - RNA, 19 nt, Artificial Sequence
  Description of Artificial Sequence: Synthetic oligonucleotide
acagacuuuugucuuaaaa

SEQ ID NO: 2829529 - RNA, 19 nt, Artificial Sequence
  Description of Artificial Sequence: Synthetic oligonucleotide
gucaaaaggccagucagag

SEQ ID NO: 2829530 - RNA, 19 nt, Artificial Sequence
  Description of Artificial Sequence: Synthetic oligonucleotide
caagacaggaauuucaacu

SEQ ID NO: 2829531 - RNA, 19 nt, Artificial Sequence
  Description of Artificial Sequence: Synthetic oligonucleotide
aauagccaggauucaacuu

SEQ ID NO: 2829532 - RNA, 19 nt, Artificial Sequence
  Description of Artificial Sequence: Synthetic oligonucleotide
gacacggggcacuagagga

SEQ ID NO: 2829533 - RNA, 19 nt, Artificial Sequence
  Description of Artificial Sequence: Synthetic oligonucleotide
uucaacuaguuaccaacuc

SEQ ID NO: 2829534 - RNA, 19 nt, Artificial Sequence
  Description of Artificial Sequence: Synthetic oligonucleotide
agagauucgcauaauaaau

SEQ ID NO: 2829535 - RNA, 19 nt, Artificial Sequence
  Description of Artificial Sequence: Synthetic oligonucleotide
aaaaggccagucagaggcc

SEQ ID NO: 2829536 - RNA, 19 nt, Artificial Sequence
  Description of Artificial Sequence: Synthetic oligonucleotide
ugguuaaggcaauggaaac

SEQ ID NO: 2829537 - RNA, 19 nt, Artificial Sequence
  Description of Artificial Sequence: Synthetic oligonucleotide
agagucaaaaggccaguca

SEQ ID NO: 2829538 - RNA, 19 nt, Artificial Sequence
  Description of Artificial Sequence: Synthetic oligonucleotide
cucaguguagugcgggugg

SEQ ID NO: 2829539 - RNA, 19 nt, Artificial Sequence
  Description of Artificial Sequence: Synthetic oligonucleotide
uacauuucaacagucuuuu

SEQ ID NO: 2829540 - RNA, 19 nt, Artificial Sequence
  Description of Artificial Sequence: Synthetic oligonucleotide
aguagugauauguuauauu

SEQ ID NO: 2829541 - RNA, 19 nt, Artificial Sequence
  Description of Artificial Sequence: Synthetic oligonucleotide
cauauauguacuuuaugua

SEQ ID NO: 2829542 - RNA, 19 nt, Artificial Sequence
  Description of Artificial Sequence: Synthetic oligonucleotide
ucaagacaggaauuucaac

SEQ ID NO: 2829543 - RNA, 19 nt, Artificial Sequence
  Description of Artificial Sequence: Synthetic oligonucleotide
auagagauucgcauaauaa

SEQ ID NO: 2829544 - RNA, 19 nt, Artificial Sequence
  Description of Artificial Sequence: Synthetic oligonucleotide
uuugugauuuauacauaua

SEQ ID NO: 2829545 - RNA, 19 nt, Artificial Sequence
  Description of Artificial Sequence: Synthetic oligonucleotide
aaaguuuaacagacuuuug

SEQ ID NO: 2829546 - RNA, 19 nt, Artificial Sequence
  Description of Artificial Sequence: Synthetic oligonucleotide
guuuaacagacuuuugucu

SEQ ID NO: 2829547 - RNA, 19 nt, Artificial Sequence
  Description of Artificial Sequence: Synthetic oligonucleotide
aggauuggaaacacccagc

SEQ ID NO: 2829548 - RNA, 19 nt, Artificial Sequence
  Description of Artificial Sequence: Synthetic oligonucleotide
guuaagagucaaaaggcca

SEQ ID NO: 2829549 - RNA, 19 nt, Artificial Sequence
  Description of Artificial Sequence: Synthetic oligonucleotide
auauauuuucugcauugua

SEQ ID NO: 2829550 - RNA, 19 nt, Artificial Sequence
  Description of Artificial Sequence: Synthetic oligonucleotide
auauucagacaugaguaca

SEQ ID NO: 2829551 - RNA, 19 nt, Artificial Sequence
  Description of Artificial Sequence: Synthetic oligonucleotide
uggaaacacaggaaggauu

SEQ ID NO: 2829552 - RNA, 19 nt, Artificial Sequence
  Description of Artificial Sequence: Synthetic oligonucleotide
uucaacuuugugauuuaua

SEQ ID NO: 2829553 - RNA, 19 nt, Artificial Sequence
  Description of Artificial Sequence: Synthetic oligonucleotide
aaguagugauauguuauau

SEQ ID NO: 2829554 - RNA, 19 nt, Artificial Sequence
  Description of Artificial Sequence: Synthetic oligonucleotide
auguuauauucagacauga

SEQ ID NO: 2829555 - RNA, 19 nt, Artificial Sequence
  Description of Artificial Sequence: Synthetic oligonucleotide
ggaggauuagccaacauca

SEQ ID NO: 2829556 - RNA, 19 nt, Artificial Sequence
  Description of Artificial Sequence: Synthetic oligonucleotide
auuagccaacaucaucucu

SEQ ID NO: 2829557 - RNA, 19 nt, Artificial Sequence
  Description of Artificial Sequence: Synthetic oligonucleotide
cacccagcuguuaagaguc

SEQ ID NO: 2829558 - RNA, 19 nt, Artificial Sequence
  Description of Artificial Sequence: Synthetic oligonucleotide
augaaguagugauauguua

SEQ ID NO: 2829559 - RNA, 19 nt, Artificial Sequence
  Description of Artificial Sequence: Synthetic oligonucleotide
gauuggaaacacccagcug

SEQ ID NO: 2829560 - RNA, 19 nt, Artificial Sequence
  Description of Artificial Sequence: Synthetic oligonucleotide
agacacggggcacuagagg

SEQ ID NO: 2829561 - RNA, 19 nt, Artificial Sequence
  Description of Artificial Sequence: Synthetic oligonucleotide
caccuuagggcacuguagc

SEQ ID NO: 2829562 - RNA, 19 nt, Artificial Sequence
  Description of Artificial Sequence: Synthetic oligonucleotide
guccuucacagacacgggg

SEQ ID NO: 2829563 - RNA, 19 nt, Artificial Sequence
  Description of Artificial Sequence: Synthetic oligonucleotide
gaacaaggaggauuagcca

SEQ ID NO: 2829564 - RNA, 19 nt, Artificial Sequence
  Description of Artificial Sequence: Synthetic oligonucleotide
gucuuuugcaauaaauauc

SEQ ID NO: 2829565 - RNA, 19 nt, Artificial Sequence
  Description of Artificial Sequence: Synthetic oligonucleotide
uuaacagacuuuugucuua

SEQ ID NO: 2829566 - RNA, 19 nt, Artificial Sequence
  Description of Artificial Sequence: Synthetic oligonucleotide
ggaauuucaacuaguuacc

SEQ ID NO: 2829567 - RNA, 19 nt, Artificial Sequence
  Description of Artificial Sequence: Synthetic oligonucleotide
aggccaauggcaccuuagg

SEQ ID NO: 2829568 - RNA, 19 nt, Artificial Sequence
  Description of Artificial Sequence: Synthetic oligonucleotide
aaacacccagcuguuaaga

SEQ ID NO: 2829569 - RNA, 19 nt, Artificial Sequence
  Description of Artificial Sequence: Synthetic oligonucleotide
auauguacuuuauguacuu

SEQ ID NO: 2829570 - RNA, 19 nt, Artificial Sequence
  Description of Artificial Sequence: Synthetic oligonucleotide
acaaggaggauuagccaac

SEQ ID NO: 2829571 - RNA, 19 nt, Artificial Sequence
  Description of Artificial Sequence: Synthetic oligonucleotide
uguagcucugagcagccua

SEQ ID NO: 2829572 - RNA, 19 nt, Artificial Sequence
  Description of Artificial Sequence: Synthetic oligonucleotide
uuaaggcaauggaaacaca

SEQ ID NO: 2829573 - RNA, 19 nt, Artificial Sequence
  Description of Artificial Sequence: Synthetic oligonucleotide
gccaauggcaccuuagggc

SEQ ID NO: 2829574 - RNA, 19 nt, Artificial Sequence
  Description of Artificial Sequence: Synthetic oligonucleotide
uagccaggauucaacuuug

SEQ ID NO: 2829575 - RNA, 19 nt, Artificial Sequence
  Description of Artificial Sequence: Synthetic oligonucleotide
gaaguagugauauguuaua

SEQ ID NO: 2829576 - RNA, 19 nt, Artificial Sequence
  Description of Artificial Sequence: Synthetic oligonucleotide
uucaugaaguagugauaug

SEQ ID NO: 2829577 - RNA, 19 nt, Artificial Sequence
  Description of Artificial Sequence: Synthetic oligonucleotide
cuuuauguacuuucuucga

SEQ ID NO: 2829578 - RNA, 19 nt, Artificial Sequence
  Description of Artificial Sequence: Synthetic oligonucleotide
cuaguuaccaacucgcccu

SEQ ID NO: 2829579 - RNA, 19 nt, Artificial Sequence
  Description of Artificial Sequence: Synthetic oligonucleotide
aguuaacauauauguacuu

SEQ ID NO: 2829580 - RNA, 19 nt, Artificial Sequence
  Description of Artificial Sequence: Synthetic oligonucleotide
agcucugagcagccuaggg

SEQ ID NO: 2829581 - RNA, 19 nt, Artificial Sequence
  Description of Artificial Sequence: Synthetic oligonucleotide
acaggaaggauuggaaaca

SEQ ID NO: 2829582 - RNA, 19 nt, Artificial Sequence
  Description of Artificial Sequence: Synthetic oligonucleotide
acagacacggggcacuaga

SEQ ID NO: 2829583 - RNA, 19 nt, Artificial Sequence
  Description of Artificial Sequence: Synthetic oligonucleotide
acacccagcuguuaagagu

SEQ ID NO: 2829584 - RNA, 19 nt, Artificial Sequence
  Description of Artificial Sequence: Synthetic oligonucleotide
auuuucugcauuguaguua

SEQ ID NO: 2829585 - RNA, 19 nt, Artificial Sequence
  Description of Artificial Sequence: Synthetic oligonucleotide
aagggaaguccuucacaga

SEQ ID NO: 2829586 - RNA, 19 nt, Artificial Sequence
  Description of Artificial Sequence: Synthetic oligonucleotide
aacacaggaaggauuggaa

SEQ ID NO: 2829587 - RNA, 19 nt, Artificial Sequence
  Description of Artificial Sequence: Synthetic oligonucleotide
gauuagccaacaucaucuc

SEQ ID NO: 2829588 - RNA, 19 nt, Artificial Sequence
  Description of Artificial Sequence: Synthetic oligonucleotide
acacaggaaggauuggaaa

SEQ ID NO: 2829589 - RNA, 19 nt, Artificial Sequence
  Description of Artificial Sequence: Synthetic oligonucleotide
guuaccaacucgcccucag

SEQ ID NO: 2829590 - RNA, 19 nt, Artificial Sequence
  Description of Artificial Sequence: Synthetic oligonucleotide
cagucuuuugcaauaaaua

SEQ ID NO: 2829591 - RNA, 19 nt, Artificial Sequence
  Description of Artificial Sequence: Synthetic oligonucleotide
gaauuucaacuaguuacca

SEQ ID NO: 2829592 - RNA, 19 nt, Artificial Sequence
  Description of Artificial Sequence: Synthetic oligonucleotide
ucagaggccaauggcaccu

SEQ ID NO: 2829593 - RNA, 19 nt, Artificial Sequence
  Description of Artificial Sequence: Synthetic oligonucleotide
ucuucgagucaccuuguuu

SEQ ID NO: 2829594 - RNA, 19 nt, Artificial Sequence
  Description of Artificial Sequence: Synthetic oligonucleotide
cagacaugaguacauuuca

SEQ ID NO: 2829595 - RNA, 19 nt, Artificial Sequence
  Description of Artificial Sequence: Synthetic oligonucleotide
ggaaguccuucacagacac

SEQ ID NO: 2829596 - RNA, 19 nt, Artificial Sequence
  Description of Artificial Sequence: Synthetic oligonucleotide
aggaaggauuggaaacacc

SEQ ID NO: 2829597 - RNA, 19 nt, Artificial Sequence
  Description of Artificial Sequence: Synthetic oligonucleotide
acagucuuuugcaauaaau

SEQ ID NO: 2829598 - RNA, 19 nt, Artificial Sequence
  Description of Artificial Sequence: Synthetic oligonucleotide
caacuuugugauuuauaca

SEQ ID NO: 2829599 - RNA, 19 nt, Artificial Sequence
  Description of Artificial Sequence: Synthetic oligonucleotide
gcucugagcagccuagggg

SEQ ID NO: 2829600 - RNA, 19 nt, Artificial Sequence
  Description of Artificial Sequence: Synthetic oligonucleotide
gugguuaaggcaauggaaa

SEQ ID NO: 2829601 - RNA, 19 nt, Artificial Sequence
  Description of Artificial Sequence: Synthetic oligonucleotide
cuuugugauuuauacauau

SEQ ID NO: 2829602 - RNA, 19 nt, Artificial Sequence
  Description of Artificial Sequence: Synthetic oligonucleotide
gcauaauaaauauucuuua

SEQ ID NO: 2829603 - RNA, 19 nt, Artificial Sequence
  Description of Artificial Sequence: Synthetic oligonucleotide
gagauucgcauaauaaaua

SEQ ID NO: 2829604 - RNA, 19 nt, Artificial Sequence
  Description of Artificial Sequence: Synthetic oligonucleotide
aauggcaccuuagggcacu

SEQ ID NO: 2829605 - RNA, 19 nt, Artificial Sequence
  Description of Artificial Sequence: Synthetic oligonucleotide
ccaggauucaacuuuguga

SEQ ID NO: 2829606 - RNA, 19 nt, Artificial Sequence
  Description of Artificial Sequence: Synthetic oligonucleotide
cagucagaggccaauggca

SEQ ID NO: 2829607 - RNA, 19 nt, Artificial Sequence
  Description of Artificial Sequence: Synthetic oligonucleotide
caggauucaacuuugugau

SEQ ID NO: 2829608 - RNA, 19 nt, Artificial Sequence
  Description of Artificial Sequence: Synthetic oligonucleotide
uuucuucgagucaccuugu

SEQ ID NO: 2829609 - RNA, 19 nt, Artificial Sequence
  Description of Artificial Sequence: Synthetic oligonucleotide
uaagagucaaaaggccagu

SEQ ID NO: 2829610 - RNA, 19 nt, Artificial Sequence
  Description of Artificial Sequence: Synthetic oligonucleotide
gaaggauuggaaacaccca

SEQ ID NO: 2829611 - RNA, 19 nt, Artificial Sequence
  Description of Artificial Sequence: Synthetic oligonucleotide
auguacuuucuucgaguca

SEQ ID NO: 2829612 - RNA, 19 nt, Artificial Sequence
  Description of Artificial Sequence: Synthetic oligonucleotide
ucaguguagugcggguggg

SEQ ID NO: 2829613 - RNA, 19 nt, Artificial Sequence
  Description of Artificial Sequence: Synthetic oligonucleotide
ggccaauggcaccuuaggg

SEQ ID NO: 2829614 - RNA, 19 nt, Artificial Sequence
  Description of Artificial Sequence: Synthetic oligonucleotide
accaacucgcccucagugu

SEQ ID NO: 2829615 - RNA, 19 nt, Artificial Sequence
  Description of Artificial Sequence: Synthetic oligonucleotide
uaacagacuuuugucuuaa

SEQ ID NO: 2829616 - RNA, 19 nt, Artificial Sequence
  Description of Artificial Sequence: Synthetic oligonucleotide
gggccagggaucaagacag

SEQ ID NO: 2829617 - RNA, 19 nt, Artificial Sequence
  Description of Artificial Sequence: Synthetic oligonucleotide
cauuguaguuaacauauau

SEQ ID NO: 2829618 - RNA, 19 nt, Artificial Sequence
  Description of Artificial Sequence: Synthetic oligonucleotide
uucacagacacggggcacu

SEQ ID NO: 2829619 - RNA, 19 nt, Artificial Sequence
  Description of Artificial Sequence: Synthetic oligonucleotide
uuaccaacucgcccucagu

SEQ ID NO: 2829620 - RNA, 19 nt, Artificial Sequence
  Description of Artificial Sequence: Synthetic oligonucleotide
guagcucugagcagccuag

SEQ ID NO: 2829621 - RNA, 19 nt, Artificial Sequence
  Description of Artificial Sequence: Synthetic oligonucleotide
aggaggaacaaggaggauu

SEQ ID NO: 2829622 - RNA, 19 nt, Artificial Sequence
  Description of Artificial Sequence: Synthetic oligonucleotide
ggauuagccaacaucaucu

SEQ ID NO: 2829623 - RNA, 19 nt, Artificial Sequence
  Description of Artificial Sequence: Synthetic oligonucleotide
aaggaggauuagccaacau

SEQ ID NO: 2829624 - RNA, 19 nt, Artificial Sequence
  Description of Artificial Sequence: Synthetic oligonucleotide
uacuuucuucgagucaccu

SEQ ID NO: 2829625 - RNA, 19 nt, Artificial Sequence
  Description of Artificial Sequence: Synthetic oligonucleotide
cuucgagucaccuuguuuu

SEQ ID NO: 2829626 - RNA, 19 nt, Artificial Sequence
  Description of Artificial Sequence: Synthetic oligonucleotide
cucgcccucaguguagugc

SEQ ID NO: 2829627 - RNA, 19 nt, Artificial Sequence
  Description of Artificial Sequence: Synthetic oligonucleotide
uuggaaacacccagcuguu

SEQ ID NO: 2829628 - RNA, 19 nt, Artificial Sequence
  Description of Artificial Sequence: Synthetic oligonucleotide
cagacacggggcacuagag

SEQ ID NO: 2829629 - RNA, 19 nt, Artificial Sequence
  Description of Artificial Sequence: Synthetic oligonucleotide
gaggccaauggcaccuuag

SEQ ID NO: 2829630 - RNA, 19 nt, Artificial Sequence
  Description of Artificial Sequence: Synthetic oligonucleotide
accuuagggcacuguagcu

SEQ ID NO: 2829631 - RNA, 19 nt, Artificial Sequence
  Description of Artificial Sequence: Synthetic oligonucleotide
aauuugugguuaaggcaau

SEQ ID NO: 2829632 - RNA, 19 nt, Artificial Sequence
  Description of Artificial Sequence: Synthetic oligonucleotide
accacaauuugugguuaag

SEQ ID NO: 2829633 - RNA, 19 nt, Artificial Sequence
  Description of Artificial Sequence: Synthetic oligonucleotide
gauucaacuuugugauuua

SEQ ID NO: 2829634 - RNA, 19 nt, Artificial Sequence
  Description of Artificial Sequence: Synthetic oligonucleotide
gucagaggccaauggcacc

SEQ ID NO: 2829635 - RNA, 19 nt, Artificial Sequence
  Description of Artificial Sequence: Synthetic oligonucleotide
acaggaauuucaacuaguu

SEQ ID NO: 2829636 - RNA, 19 nt, Artificial Sequence
  Description of Artificial Sequence: Synthetic oligonucleotide
auuugugguuaaggcaaug

SEQ ID NO: 2829637 - RNA, 19 nt, Artificial Sequence
  Description of Artificial Sequence: Synthetic oligonucleotide
ccacaauuugugguuaagg

SEQ ID NO: 2829638 - RNA, 19 nt, Artificial Sequence
  Description of Artificial Sequence: Synthetic oligonucleotide
aacagacuuuugucuuaaa

SEQ ID NO: 2829639 - RNA, 19 nt, Artificial Sequence
  Description of Artificial Sequence: Synthetic oligonucleotide
uaguuaccaacucgcccuc

SEQ ID NO: 2829640 - RNA, 19 nt, Artificial Sequence
  Description of Artificial Sequence: Synthetic oligonucleotide
agucaaaaggccagucaga

SEQ ID NO: 2829641 - RNA, 19 nt, Artificial Sequence
  Description of Artificial Sequence: Synthetic oligonucleotide
ggaaacacccagcuguuaa

SEQ ID NO: 2829642 - RNA, 19 nt, Artificial Sequence
  Description of Artificial Sequence: Synthetic oligonucleotide
guguagugcgggugggaag

SEQ ID NO: 2829643 - RNA, 19 nt, Artificial Sequence
  Description of Artificial Sequence: Synthetic oligonucleotide
gaaguccuucacagacacg

SEQ ID NO: 2829644 - RNA, 19 nt, Artificial Sequence
  Description of Artificial Sequence: Synthetic oligonucleotide
auggaaacacaggaaggau

SEQ ID NO: 2829645 - RNA, 19 nt, Artificial Sequence
  Description of Artificial Sequence: Synthetic oligonucleotide
guuaacauauauguacuuu

SEQ ID NO: 2829646 - RNA, 19 nt, Artificial Sequence
  Description of Artificial Sequence: Synthetic oligonucleotide
caggaaggauuggaaacac

SEQ ID NO: 2829647 - RNA, 19 nt, Artificial Sequence
  Description of Artificial Sequence: Synthetic oligonucleotide
gccagucagaggccaaugg

SEQ ID NO: 2829648 - RNA, 19 nt, Artificial Sequence
  Description of Artificial Sequence: Synthetic oligonucleotide
uaauagagauucgcauaau

SEQ ID NO: 2829649 - RNA, 19 nt, Artificial Sequence
  Description of Artificial Sequence: Synthetic oligonucleotide
gguuaaggcaauggaaaca

SEQ ID NO: 2829650 - RNA, 19 nt, Artificial Sequence
  Description of Artificial Sequence: Synthetic oligonucleotide
cacggggcacuagaggagg

SEQ ID NO: 2829651 - RNA, 19 nt, Artificial Sequence
  Description of Artificial Sequence: Synthetic oligonucleotide
cuuagggcacuguagcucu

SEQ ID NO: 2829652 - RNA, 19 nt, Artificial Sequence
  Description of Artificial Sequence: Synthetic oligonucleotide
ccagucagaggccaauggc

SEQ ID NO: 2829653 - RNA, 19 nt, Artificial Sequence
  Description of Artificial Sequence: Synthetic oligonucleotide
caacucgcccucaguguag

SEQ ID NO: 2829654 - RNA, 19 nt, Artificial Sequence
  Description of Artificial Sequence: Synthetic oligonucleotide
gugauauguuauauucaga

SEQ ID NO: 2829655 - RNA, 19 nt, Artificial Sequence
  Description of Artificial Sequence: Synthetic oligonucleotide
ccaauggcaccuuagggca

SEQ ID NO: 2829656 - RNA, 19 nt, Artificial Sequence
  Description of Artificial Sequence: Synthetic oligonucleotide
agggcacuguagcucugag

SEQ ID NO: 2829657 - RNA, 19 nt, Artificial Sequence
  Description of Artificial Sequence: Synthetic oligonucleotide
aguguagugcgggugggaa

SEQ ID NO: 2829658 - RNA, 19 nt, Artificial Sequence
  Description of Artificial Sequence: Synthetic oligonucleotide
uuagggcacuguagcucug

SEQ ID NO: 2829659 - RNA, 19 nt, Artificial Sequence
  Description of Artificial Sequence: Synthetic oligonucleotide
auucaacuuugugauuuau

SEQ ID NO: 2829660 - RNA, 19 nt, Artificial Sequence
  Description of Artificial Sequence: Synthetic oligonucleotide
ggaagggaaguccuucaca

SEQ ID NO: 2829661 - RNA, 19 nt, Artificial Sequence
  Description of Artificial Sequence: Synthetic oligonucleotide
aguccuucacagacacggg

SEQ ID NO: 2829662 - RNA, 19 nt, Artificial Sequence
  Description of Artificial Sequence: Synthetic oligonucleotide
aacucgcccucaguguagu

SEQ ID NO: 2829663 - RNA, 19 nt, Artificial Sequence
  Description of Artificial Sequence: Synthetic oligonucleotide
gacaggaauuucaacuagu

SEQ ID NO: 2829664 - RNA, 19 nt, Artificial Sequence
  Description of Artificial Sequence: Synthetic oligonucleotide
agacaugaguacauuucaa

SEQ ID NO: 2829665 - RNA, 19 nt, Artificial Sequence
  Description of Artificial Sequence: Synthetic oligonucleotide
caggaauuucaacuaguua

SEQ ID NO: 2829666 - RNA, 19 nt, Artificial Sequence
  Description of Artificial Sequence: Synthetic oligonucleotide
uagcucugagcagccuagg

SEQ ID NO: 2829667 - RNA, 19 nt, Artificial Sequence
  Description of Artificial Sequence: Synthetic oligonucleotide
gaguacauuucaacagucu

SEQ ID NO: 2829668 - RNA, 19 nt, Artificial Sequence
  Description of Artificial Sequence: Synthetic oligonucleotide
gccaggauucaacuuugug

SEQ ID NO: 2829669 - RNA, 19 nt, Artificial Sequence
  Description of Artificial Sequence: Synthetic oligonucleotide
ggauuggaaacacccagcu

SEQ ID NO: 2829670 - RNA, 19 nt, Artificial Sequence
  Description of Artificial Sequence: Synthetic oligonucleotide
cagcuguuaagagucaaaa

SEQ ID NO: 2829671 - RNA, 19 nt, Artificial Sequence
  Description of Artificial Sequence: Synthetic oligonucleotide
cagggaucaagacaggaau

SEQ ID NO: 2829672 - RNA, 19 nt, Artificial Sequence
  Description of Artificial Sequence: Synthetic oligonucleotide
gaggaacaaggaggauuag

SEQ ID NO: 2829673 - RNA, 19 nt, Artificial Sequence
  Description of Artificial Sequence: Synthetic oligonucleotide
ggaggaacaaggaggauua

SEQ ID NO: 2829674 - RNA, 19 nt, Artificial Sequence
  Description of Artificial Sequence: Synthetic oligonucleotide
uucuucgagucaccuuguu

SEQ ID NO: 2829675 - RNA, 19 nt, Artificial Sequence
  Description of Artificial Sequence: Synthetic oligonucleotide
caugaaguagugauauguu

SEQ ID NO: 2829676 - RNA, 19 nt, Artificial Sequence
  Description of Artificial Sequence: Synthetic oligonucleotide
cuucacagacacggggcac

SEQ ID NO: 2829677 - RNA, 19 nt, Artificial Sequence
  Description of Artificial Sequence: Synthetic oligonucleotide
ggggccagggaucaagaca

SEQ ID NO: 2829678 - RNA, 19 nt, Artificial Sequence
  Description of Artificial Sequence: Synthetic oligonucleotide
uagggcacuguagcucuga

SEQ ID NO: 2829679 - RNA, 19 nt, Artificial Sequence
  Description of Artificial Sequence: Synthetic oligonucleotide
ugcgggugggaagggaagu

SEQ ID NO: 2829680 - RNA, 19 nt, Artificial Sequence
  Description of Artificial Sequence: Synthetic oligonucleotide
aggauucaacuuugugauu

SEQ ID NO: 2829681 - RNA, 19 nt, Artificial Sequence
  Description of Artificial Sequence: Synthetic oligonucleotide
gugggaagggaaguccuuc

SEQ ID NO: 2829682 - RNA, 19 nt, Artificial Sequence
  Description of Artificial Sequence: Synthetic oligonucleotide
guacuuucuucgagucacc

SEQ ID NO: 2829683 - RNA, 19 nt, Artificial Sequence
  Description of Artificial Sequence: Synthetic oligonucleotide
gauucgcauaauaaauauu

SEQ ID NO: 2829684 - RNA, 19 nt, Artificial Sequence
  Description of Artificial Sequence: Synthetic oligonucleotide
acacggggcacuagaggag

SEQ ID NO: 2829685 - RNA, 19 nt, Artificial Sequence
  Description of Artificial Sequence: Synthetic oligonucleotide
guacauuucaacagucuuu

SEQ ID NO: 2829686 - RNA, 19 nt, Artificial Sequence
  Description of Artificial Sequence: Synthetic oligonucleotide
ggauucaacuuugugauuu

SEQ ID NO: 2829687 - RNA, 19 nt, Artificial Sequence
  Description of Artificial Sequence: Synthetic oligonucleotide
ggaucaagacaggaauuuc

SEQ ID NO: 2829688 - RNA, 19 nt, Artificial Sequence
  Description of Artificial Sequence: Synthetic oligonucleotide
gcaccuuagggcacuguag

SEQ ID NO: 2829689 - RNA, 19 nt, Artificial Sequence
  Description of Artificial Sequence: Synthetic oligonucleotide
agggaucaagacaggaauu

SEQ ID NO: 2829690 - RNA, 19 nt, Artificial Sequence
  Description of Artificial Sequence: Synthetic oligonucleotide
gggaagggaaguccuucac

SEQ ID NO: 2829691 - RNA, 19 nt, Artificial Sequence
  Description of Artificial Sequence: Synthetic oligonucleotide
agugcgggugggaagggaa

SEQ ID NO: 2829692 - RNA, 19 nt, Artificial Sequence
  Description of Artificial Sequence: Synthetic oligonucleotide
guagugcgggugggaaggg

SEQ ID NO: 2829693 - RNA, 19 nt, Artificial Sequence
  Description of Artificial Sequence: Synthetic oligonucleotide
ggcaauggaaacacaggaa

SEQ ID NO: 2829694 - RNA, 19 nt, Artificial Sequence
  Description of Artificial Sequence: Synthetic oligonucleotide
gggcacuguagcucugagc

SEQ ID NO: 2829695 - RNA, 19 nt, Artificial Sequence
  Description of Artificial Sequence: Synthetic oligonucleotide
caaggaggauuagccaaca

SEQ ID NO: 2829696 - RNA, 19 nt, Artificial Sequence
  Description of Artificial Sequence: Synthetic oligonucleotide
gcacuagaggaggaacaag

SEQ ID NO: 2829697 - RNA, 19 nt, Artificial Sequence
  Description of Artificial Sequence: Synthetic oligonucleotide
uggaaacacccagcuguua

SEQ ID NO: 2829698 - RNA, 19 nt, Artificial Sequence
  Description of Artificial Sequence: Synthetic oligonucleotide
gugcgggugggaagggaag

SEQ ID NO: 2829699 - RNA, 19 nt, Artificial Sequence
  Description of Artificial Sequence: Synthetic oligonucleotide
uagugcgggugggaaggga

SEQ ID NO: 2829700 - RNA, 19 nt, Artificial Sequence
  Description of Artificial Sequence: Synthetic oligonucleotide
aguuaccaacucgcccuca

SEQ ID NO: 2829701 - RNA, 19 nt, Artificial Sequence
  Description of Artificial Sequence: Synthetic oligonucleotide
caacagucuuuugcaauaa

SEQ ID NO: 2829702 - RNA, 19 nt, Artificial Sequence
  Description of Artificial Sequence: Synthetic oligonucleotide
agaggccaauggcaccuua

SEQ ID NO: 2829703 - RNA, 19 nt, Artificial Sequence
  Description of Artificial Sequence: Synthetic oligonucleotide
acucgcccucaguguagug

SEQ ID NO: 2829704 - RNA, 19 nt, Artificial Sequence
  Description of Artificial Sequence: Synthetic oligonucleotide
ggcaccuuagggcacugua

SEQ ID NO: 2829705 - RNA, 19 nt, Artificial Sequence
  Description of Artificial Sequence: Synthetic oligonucleotide
ucacagacacggggcacua

SEQ ID NO: 2829706 - RNA, 19 nt, Artificial Sequence
  Description of Artificial Sequence: Synthetic oligonucleotide
gcccucaguguagugcggg

SEQ ID NO: 2829707 - RNA, 19 nt, Artificial Sequence
  Description of Artificial Sequence: Synthetic oligonucleotide
cuuuugcaauaaauaucau

SEQ ID NO: 2829708 - RNA, 19 nt, Artificial Sequence
  Description of Artificial Sequence: Synthetic oligonucleotide
caccacaauuugugguuaa

SEQ ID NO: 2829709 - RNA, 19 nt, Artificial Sequence
  Description of Artificial Sequence: Synthetic oligonucleotide
ggggcacuagaggaggaac

SEQ ID NO: 2829710 - RNA, 19 nt, Artificial Sequence
  Description of Artificial Sequence: Synthetic oligonucleotide
ccagggaucaagacaggaa

SEQ ID NO: 2829711 - RNA, 19 nt, Artificial Sequence
  Description of Artificial Sequence: Synthetic oligonucleotide
ggcacuagaggaggaacaa

SEQ ID NO: 2829712 - RNA, 19 nt, Artificial Sequence
  Description of Artificial Sequence: Synthetic oligonucleotide
gggcacuagaggaggaaca

SEQ ID NO: 2829713 - RNA, 19 nt, Artificial Sequence
  Description of Artificial Sequence: Synthetic oligonucleotide
gaggauuagccaacaucau

SEQ ID NO: 2829714 - RNA, 19 nt, Artificial Sequence
  Description of Artificial Sequence: Synthetic oligonucleotide
aaggccagucagaggccaa

SEQ ID NO: 2829715 - RNA, 19 nt, Artificial Sequence
  Description of Artificial Sequence: Synthetic oligonucleotide
cacagacacggggcacuag

SEQ ID NO: 2829716 - RNA, 19 nt, Artificial Sequence
  Description of Artificial Sequence: Synthetic oligonucleotide
gggaaguccuucacagaca

SEQ ID NO: 2829717 - RNA, 19 nt, Artificial Sequence
  Description of Artificial Sequence: Synthetic oligonucleotide
ccuucacagacacggggca

SEQ ID NO: 2829718 - RNA, 19 nt, Artificial Sequence
  Description of Artificial Sequence: Synthetic oligonucleotide
gggaucaagacaggaauuu

SEQ ID NO: 2829719 - RNA, 19 nt, Artificial Sequence
  Description of Artificial Sequence: Synthetic oligonucleotide
agccaggauucaacuuugu

SEQ ID NO: 2829720 - RNA, 19 nt, Artificial Sequence
  Description of Artificial Sequence: Synthetic oligonucleotide
aggccagucagaggccaau

SEQ ID NO: 2829721 - RNA, 19 nt, Artificial Sequence
  Description of Artificial Sequence: Synthetic oligonucleotide
gccagggaucaagacagga

SEQ ID NO: 2829722 - RNA, 19 nt, Artificial Sequence
  Description of Artificial Sequence: Synthetic oligonucleotide
ccucaguguagugcgggug

SEQ ID NO: 2829723 - RNA, 19 nt, Artificial Sequence
  Description of Artificial Sequence: Synthetic oligonucleotide
ccagcuguuaagagucaaa

SEQ ID NO: 2829724 - RNA, 19 nt, Artificial Sequence
  Description of Artificial Sequence: Synthetic oligonucleotide
uggcaccuuagggcacugu

SEQ ID NO: 2829725 - RNA, 19 nt, Artificial Sequence
  Description of Artificial Sequence: Synthetic oligonucleotide
auggcaccuuagggcacug

SEQ ID NO: 2829726 - RNA, 19 nt, Artificial Sequence
  Description of Artificial Sequence: Synthetic oligonucleotide
ggccagucagaggccaaug

SEQ ID NO: 2829727 - RNA, 19 nt, Artificial Sequence
  Description of Artificial Sequence: Synthetic oligonucleotide
ccaacucgcccucagugua

SEQ ID NO: 2829728 - RNA, 19 nt, Artificial Sequence
  Description of Artificial Sequence: Synthetic oligonucleotide
acccagcuguuaagaguca

SEQ ID NO: 2829729 - RNA, 19 nt, Artificial Sequence
  Description of Artificial Sequence: Synthetic oligonucleotide
caguguagugcggguggga

SEQ ID NO: 2829730 - RNA, 19 nt, Artificial Sequence
  Description of Artificial Sequence: Synthetic oligonucleotide
ggccagggaucaagacagg

SEQ ID NO: 2829731 - RNA, 19 nt, Artificial Sequence
  Description of Artificial Sequence: Synthetic oligonucleotide
cgggugggaagggaagucc

SEQ ID NO: 2829732 - RNA, 19 nt, Artificial Sequence
  Description of Artificial Sequence: Synthetic oligonucleotide
acggggcacuagaggagga

SEQ ID NO: 2829733 - RNA, 19 nt, Artificial Sequence
  Description of Artificial Sequence: Synthetic oligonucleotide
gcauuguaguuaacauaua

SEQ ID NO: 2829734 - RNA, 19 nt, Artificial Sequence
  Description of Artificial Sequence: Synthetic oligonucleotide
gcgggugggaagggaaguc

SEQ ID NO: 2829735 - RNA, 19 nt, Artificial Sequence
  Description of Artificial Sequence: Synthetic oligonucleotide
gggugggaagggaaguccu

SEQ ID NO: 2829736 - RNA, 19 nt, Artificial Sequence
  Description of Artificial Sequence: Synthetic oligonucleotide
cgcccucaguguagugcgg

SEQ ID NO: 2829737 - RNA, 19 nt, Artificial Sequence
  Description of Artificial Sequence: Synthetic oligonucleotide
cccagcuguuaagagucaa

SEQ ID NO: 2829738 - RNA, 19 nt, Artificial Sequence
  Description of Artificial Sequence: Synthetic oligonucleotide
cuguagcucugagcagccu

SEQ ID NO: 2829739 - RNA, 19 nt, Artificial Sequence
  Description of Artificial Sequence: Synthetic oligonucleotide
ggugggaagggaaguccuu

SEQ ID NO: 2829740 - RNA, 19 nt, Artificial Sequence
  Description of Artificial Sequence: Synthetic oligonucleotide
cagaggccaauggcaccuu

SEQ ID NO: 2829741 - RNA, 19 nt, Artificial Sequence
  Description of Artificial Sequence: Synthetic oligonucleotide
cggggcacuagaggaggaa

SEQ ID NO: 2829742 - RNA, 19 nt, Artificial Sequence
  Description of Artificial Sequence: Synthetic oligonucleotide
aauagugggcuuuagagug

SEQ ID NO: 2829743 - RNA, 19 nt, Artificial Sequence
  Description of Artificial Sequence: Synthetic oligonucleotide
caaauauuuguucugaagg

SEQ ID NO: 2829744 - RNA, 19 nt, Artificial Sequence
  Description of Artificial Sequence: Synthetic oligonucleotide
uacaacuuuugucagaagg

SEQ ID NO: 2829745 - RNA, 19 nt, Artificial Sequence
  Description of Artificial Sequence: Synthetic oligonucleotide
uuuagaguggucaaaacug

SEQ ID NO: 2829746 - RNA, 19 nt, Artificial Sequence
  Description of Artificial Sequence: Synthetic oligonucleotide
uuuagaaguauuuauuuca

SEQ ID NO: 2829747 - RNA, 19 nt, Artificial Sequence
  Description of Artificial Sequence: Synthetic oligonucleotide
auaauagugggcuuuagag

SEQ ID NO: 2829748 - RNA, 19 nt, Artificial Sequence
  Description of Artificial Sequence: Synthetic oligonucleotide
aaguauuuauuucaaauau

SEQ ID NO: 2829749 - RNA, 19 nt, Artificial Sequence
  Description of Artificial Sequence: Synthetic oligonucleotide
uuugccagaacucagccgc

SEQ ID NO: 2829750 - RNA, 19 nt, Artificial Sequence
  Description of Artificial Sequence: Synthetic oligonucleotide
ucagcugcucaucauagcg

SEQ ID NO: 2829751 - RNA, 19 nt, Artificial Sequence
  Description of Artificial Sequence: Synthetic oligonucleotide
uuauucuugucuuugccag

SEQ ID NO: 2829752 - RNA, 19 nt, Artificial Sequence
  Description of Artificial Sequence: Synthetic oligonucleotide
ucaaauauuuguucugaag

SEQ ID NO: 2829753 - RNA, 19 nt, Artificial Sequence
  Description of Artificial Sequence: Synthetic oligonucleotide
cucaucauagcgauaauag

SEQ ID NO: 2829754 - RNA, 19 nt, Artificial Sequence
  Description of Artificial Sequence: Synthetic oligonucleotide
caucauagcgauaauagug

SEQ ID NO: 2829755 - RNA, 19 nt, Artificial Sequence
  Description of Artificial Sequence: Synthetic oligonucleotide
aaguagccggcacacaggc

SEQ ID NO: 2829756 - RNA, 19 nt, Artificial Sequence
  Description of Artificial Sequence: Synthetic oligonucleotide
aucuugauguugcacaugg

SEQ ID NO: 2829757 - RNA, 19 nt, Artificial Sequence
  Description of Artificial Sequence: Synthetic oligonucleotide
cuugauguugcacaugggg

SEQ ID NO: 2829758 - RNA, 19 nt, Artificial Sequence
  Description of Artificial Sequence: Synthetic oligonucleotide
agaaguauuuauuucaaau

SEQ ID NO: 2829759 - RNA, 19 nt, Artificial Sequence
  Description of Artificial Sequence: Synthetic oligonucleotide
uguucauucagguucuuug

SEQ ID NO: 2829760 - RNA, 19 nt, Artificial Sequence
  Description of Artificial Sequence: Synthetic oligonucleotide
uagcuuauacacuaugucc

SEQ ID NO: 2829761 - RNA, 19 nt, Artificial Sequence
  Description of Artificial Sequence: Synthetic oligonucleotide
gucaaaacugcugaaaggg

SEQ ID NO: 2829762 - RNA, 19 nt, Artificial Sequence
  Description of Artificial Sequence: Synthetic oligonucleotide
cacaauacaacuuuuguca

SEQ ID NO: 2829763 - RNA, 19 nt, Artificial Sequence
  Description of Artificial Sequence: Synthetic oligonucleotide
uuuuauucuugucuuugcc

SEQ ID NO: 2829764 - RNA, 19 nt, Artificial Sequence
  Description of Artificial Sequence: Synthetic oligonucleotide
gauagaauucccgaauccg

SEQ ID NO: 2829765 - RNA, 19 nt, Artificial Sequence
  Description of Artificial Sequence: Synthetic oligonucleotide
acuauguccugcaugaccc

SEQ ID NO: 2829766 - RNA, 19 nt, Artificial Sequence
  Description of Artificial Sequence: Synthetic oligonucleotide
aacgaauguguucauucag

SEQ ID NO: 2829767 - RNA, 19 nt, Artificial Sequence
  Description of Artificial Sequence: Synthetic oligonucleotide
uacacuauguccugcauga

SEQ ID NO: 2829768 - RNA, 19 nt, Artificial Sequence
  Description of Artificial Sequence: Synthetic oligonucleotide
uggucaaaacugcugaaag

SEQ ID NO: 2829769 - RNA, 19 nt, Artificial Sequence
  Description of Artificial Sequence: Synthetic oligonucleotide
uucacaauacaacuuuugu

SEQ ID NO: 2829770 - RNA, 19 nt, Artificial Sequence
  Description of Artificial Sequence: Synthetic oligonucleotide
ugucuugcaagccugguac

SEQ ID NO: 2829771 - RNA, 19 nt, Artificial Sequence
  Description of Artificial Sequence: Synthetic oligonucleotide
uuauuucaaauauuuguuc

SEQ ID NO: 2829772 - RNA, 19 nt, Artificial Sequence
  Description of Artificial Sequence: Synthetic oligonucleotide
aauacaacuuuugucagaa

SEQ ID NO: 2829773 - RNA, 19 nt, Artificial Sequence
  Description of Artificial Sequence: Synthetic oligonucleotide
ucaguuuagaaguauuuau

SEQ ID NO: 2829774 - RNA, 19 nt, Artificial Sequence
  Description of Artificial Sequence: Synthetic oligonucleotide
auuucaaauauuuguucug

SEQ ID NO: 2829775 - RNA, 19 nt, Artificial Sequence
  Description of Artificial Sequence: Synthetic oligonucleotide
ugauagaauucccgaaucc

SEQ ID NO: 2829776 - RNA, 19 nt, Artificial Sequence
  Description of Artificial Sequence: Synthetic oligonucleotide
uuagaguggucaaaacugc

SEQ ID NO: 2829777 - RNA, 19 nt, Artificial Sequence
  Description of Artificial Sequence: Synthetic oligonucleotide
aaacugcugaaagggaggc

SEQ ID NO: 2829778 - RNA, 19 nt, Artificial Sequence
  Description of Artificial Sequence: Synthetic oligonucleotide
aaaacugcugaaagggagg

SEQ ID NO: 2829779 - RNA, 19 nt, Artificial Sequence
  Description of Artificial Sequence: Synthetic oligonucleotide
caaaacugcugaaagggag

SEQ ID NO: 2829780 - RNA, 19 nt, Artificial Sequence
  Description of Artificial Sequence: Synthetic oligonucleotide
aucauagcgauaauagugg

SEQ ID NO: 2829781 - RNA, 19 nt, Artificial Sequence
  Description of Artificial Sequence: Synthetic oligonucleotide
uggaucuugauguugcaca

SEQ ID NO: 2829782 - RNA, 19 nt, Artificial Sequence
  Description of Artificial Sequence: Synthetic oligonucleotide
ugggcauccacgaaguagc

SEQ ID NO: 2829783 - RNA, 19 nt, Artificial Sequence
  Description of Artificial Sequence: Synthetic oligonucleotide
uuagaaguauuuauuucaa

SEQ ID NO: 2829784 - RNA, 19 nt, Artificial Sequence
  Description of Artificial Sequence: Synthetic oligonucleotide
aguuuagaaguauuuauuu

SEQ ID NO: 2829785 - RNA, 19 nt, Artificial Sequence
  Description of Artificial Sequence: Synthetic oligonucleotide
gaaguauuuauuucaaaua

SEQ ID NO: 2829786 - RNA, 19 nt, Artificial Sequence
  Description of Artificial Sequence: Synthetic oligonucleotide
ucuugucuuugccagaacu

SEQ ID NO: 2829787 - RNA, 19 nt, Artificial Sequence
  Description of Artificial Sequence: Synthetic oligonucleotide
aaacgaauguguucauuca

SEQ ID NO: 2829788 - RNA, 19 nt, Artificial Sequence
  Description of Artificial Sequence: Synthetic oligonucleotide
caaacgaauguguucauuc

SEQ ID NO: 2829789 - RNA, 19 nt, Artificial Sequence
  Description of Artificial Sequence: Synthetic oligonucleotide
auagcgauaauagugggcu

SEQ ID NO: 2829790 - RNA, 19 nt, Artificial Sequence
  Description of Artificial Sequence: Synthetic oligonucleotide
uguggagacacucugugau

SEQ ID NO: 2829791 - RNA, 19 nt, Artificial Sequence
  Description of Artificial Sequence: Synthetic oligonucleotide
gaaagggaggccaagguug

SEQ ID NO: 2829792 - RNA, 19 nt, Artificial Sequence
  Description of Artificial Sequence: Synthetic oligonucleotide
ucacaauacaacuuuuguc

SEQ ID NO: 2829793 - RNA, 19 nt, Artificial Sequence
  Description of Artificial Sequence: Synthetic oligonucleotide
uuucaaauauuuguucuga

SEQ ID NO: 2829794 - RNA, 19 nt, Artificial Sequence
  Description of Artificial Sequence: Synthetic oligonucleotide
uaauagugggcuuuagagu

SEQ ID NO: 2829795 - RNA, 19 nt, Artificial Sequence
  Description of Artificial Sequence: Synthetic oligonucleotide
acaauacaacuuuugucag

SEQ ID NO: 2829796 - RNA, 19 nt, Artificial Sequence
  Description of Artificial Sequence: Synthetic oligonucleotide
caagccucgggacugauag

SEQ ID NO: 2829797 - RNA, 19 nt, Artificial Sequence
  Description of Artificial Sequence: Synthetic oligonucleotide
ucauagcgauaauaguggg

SEQ ID NO: 2829798 - RNA, 19 nt, Artificial Sequence
  Description of Artificial Sequence: Synthetic oligonucleotide
cugguacuagcuuauacac

SEQ ID NO: 2829799 - RNA, 19 nt, Artificial Sequence
  Description of Artificial Sequence: Synthetic oligonucleotide
ucuuugccagaacucagcc

SEQ ID NO: 2829800 - RNA, 19 nt, Artificial Sequence
  Description of Artificial Sequence: Synthetic oligonucleotide
uuugucagaagguguggag

SEQ ID NO: 2829801 - RNA, 19 nt, Artificial Sequence
  Description of Artificial Sequence: Synthetic oligonucleotide
aagguguggagacacucug

SEQ ID NO: 2829802 - RNA, 19 nt, Artificial Sequence
  Description of Artificial Sequence: Synthetic oligonucleotide
agacaaacgaauguguuca

SEQ ID NO: 2829803 - RNA, 19 nt, Artificial Sequence
  Description of Artificial Sequence: Synthetic oligonucleotide
uacuucacaauacaacuuu

SEQ ID NO: 2829804 - RNA, 19 nt, Artificial Sequence
  Description of Artificial Sequence: Synthetic oligonucleotide
uucacugucuugcaagccu

SEQ ID NO: 2829805 - RNA, 19 nt, Artificial Sequence
  Description of Artificial Sequence: Synthetic oligonucleotide
guuuagaaguauuuauuuc

SEQ ID NO: 2829806 - RNA, 19 nt, Artificial Sequence
  Description of Artificial Sequence: Synthetic oligonucleotide
agccgcuccaggcauaggc

SEQ ID NO: 2829807 - RNA, 19 nt, Artificial Sequence
  Description of Artificial Sequence: Synthetic oligonucleotide
uauuuguucugaaggacau

SEQ ID NO: 2829808 - RNA, 19 nt, Artificial Sequence
  Description of Artificial Sequence: Synthetic oligonucleotide
uuauacacuauguccugca

SEQ ID NO: 2829809 - RNA, 19 nt, Artificial Sequence
  Description of Artificial Sequence: Synthetic oligonucleotide
ucaaaacugcugaaaggga

SEQ ID NO: 2829810 - RNA, 19 nt, Artificial Sequence
  Description of Artificial Sequence: Synthetic oligonucleotide
guagccggcacacaggcag

SEQ ID NO: 2829811 - RNA, 19 nt, Artificial Sequence
  Description of Artificial Sequence: Synthetic oligonucleotide
agguacuucacaauacaac

SEQ ID NO: 2829812 - RNA, 19 nt, Artificial Sequence
  Description of Artificial Sequence: Synthetic oligonucleotide
uggagacacucugugaugg

SEQ ID NO: 2829813 - RNA, 19 nt, Artificial Sequence
  Description of Artificial Sequence: Synthetic oligonucleotide
caggcauaggcucagcugc

SEQ ID NO: 2829814 - RNA, 19 nt, Artificial Sequence
  Description of Artificial Sequence: Synthetic oligonucleotide
cuagcuuauacacuauguc

SEQ ID NO: 2829815 - RNA, 19 nt, Artificial Sequence
  Description of Artificial Sequence: Synthetic oligonucleotide
gauaauagugggcuuuaga

SEQ ID NO: 2829816 - RNA, 19 nt, Artificial Sequence
  Description of Artificial Sequence: Synthetic oligonucleotide
aaagggaggccaagguugc

SEQ ID NO: 2829817 - RNA, 19 nt, Artificial Sequence
  Description of Artificial Sequence: Synthetic oligonucleotide
ucguggaucuugauguugc

SEQ ID NO: 2829818 - RNA, 19 nt, Artificial Sequence
  Description of Artificial Sequence: Synthetic oligonucleotide
ucaucauagcgauaauagu

SEQ ID NO: 2829819 - RNA, 19 nt, Artificial Sequence
  Description of Artificial Sequence: Synthetic oligonucleotide
uacuagcuuauacacuaug

SEQ ID NO: 2829820 - RNA, 19 nt, Artificial Sequence
  Description of Artificial Sequence: Synthetic oligonucleotide
cucuucacugucuugcaag

SEQ ID NO: 2829821 - RNA, 19 nt, Artificial Sequence
  Description of Artificial Sequence: Synthetic oligonucleotide
cuucacaauacaacuuuug

SEQ ID NO: 2829822 - RNA, 19 nt, Artificial Sequence
  Description of Artificial Sequence: Synthetic oligonucleotide
acccgauccagcuugaggu

SEQ ID NO: 2829823 - RNA, 19 nt, Artificial Sequence
  Description of Artificial Sequence: Synthetic oligonucleotide
uuuguucugaaggacauuu

SEQ ID NO: 2829824 - RNA, 19 nt, Artificial Sequence
  Description of Artificial Sequence: Synthetic oligonucleotide
cacucugugaugguggugg

SEQ ID NO: 2829825 - RNA, 19 nt, Artificial Sequence
  Description of Artificial Sequence: Synthetic oligonucleotide
cauagcgauaauagugggc

SEQ ID NO: 2829826 - RNA, 19 nt, Artificial Sequence
  Description of Artificial Sequence: Synthetic oligonucleotide
ugucuuugccagaacucag

SEQ ID NO: 2829827 - RNA, 19 nt, Artificial Sequence
  Description of Artificial Sequence: Synthetic oligonucleotide
gcauccacgaaguagccgg

SEQ ID NO: 2829828 - RNA, 19 nt, Artificial Sequence
  Description of Artificial Sequence: Synthetic oligonucleotide
ugucagaagguguggagac

SEQ ID NO: 2829829 - RNA, 19 nt, Artificial Sequence
  Description of Artificial Sequence: Synthetic oligonucleotide
auacacuauguccugcaug

SEQ ID NO: 2829830 - RNA, 19 nt, Artificial Sequence
  Description of Artificial Sequence: Synthetic oligonucleotide
uugcacauggggcaguacu

SEQ ID NO: 2829831 - RNA, 19 nt, Artificial Sequence
  Description of Artificial Sequence: Synthetic oligonucleotide
agcuuauacacuauguccu

SEQ ID NO: 2829832 - RNA, 19 nt, Artificial Sequence
  Description of Artificial Sequence: Synthetic oligonucleotide
ugucaguuuagaaguauuu

SEQ ID NO: 2829833 - RNA, 19 nt, Artificial Sequence
  Description of Artificial Sequence: Synthetic oligonucleotide
ggucaaaacugcugaaagg

SEQ ID NO: 2829834 - RNA, 19 nt, Artificial Sequence
  Description of Artificial Sequence: Synthetic oligonucleotide
ugcagguacuucacaauac

SEQ ID NO: 2829835 - RNA, 19 nt, Artificial Sequence
  Description of Artificial Sequence: Synthetic oligonucleotide
caugacccgauccagcuug

SEQ ID NO: 2829836 - RNA, 19 nt, Artificial Sequence
  Description of Artificial Sequence: Synthetic oligonucleotide
uugucuuugccagaacuca

SEQ ID NO: 2829837 - RNA, 19 nt, Artificial Sequence
  Description of Artificial Sequence: Synthetic oligonucleotide
gaguggucaaaacugcuga

SEQ ID NO: 2829838 - RNA, 19 nt, Artificial Sequence
  Description of Artificial Sequence: Synthetic oligonucleotide
uugagguugagcagcggcu

SEQ ID NO: 2829839 - RNA, 19 nt, Artificial Sequence
  Description of Artificial Sequence: Synthetic oligonucleotide
cacuauguccugcaugacc

SEQ ID NO: 2829840 - RNA, 19 nt, Artificial Sequence
  Description of Artificial Sequence: Synthetic oligonucleotide
acgaauguguucauucagg

SEQ ID NO: 2829841 - RNA, 19 nt, Artificial Sequence
  Description of Artificial Sequence: Synthetic oligonucleotide
aacuuuugucagaaggugu

SEQ ID NO: 2829842 - RNA, 19 nt, Artificial Sequence
  Description of Artificial Sequence: Synthetic oligonucleotide
uucaaauauuuguucugaa

SEQ ID NO: 2829843 - RNA, 19 nt, Artificial Sequence
  Description of Artificial Sequence: Synthetic oligonucleotide
aacucagccgcuccaggca

SEQ ID NO: 2829844 - RNA, 19 nt, Artificial Sequence
  Description of Artificial Sequence: Synthetic oligonucleotide
auauuuguucugaaggaca

SEQ ID NO: 2829845 - RNA, 19 nt, Artificial Sequence
  Description of Artificial Sequence: Synthetic oligonucleotide
cuuugccagaacucagccg

SEQ ID NO: 2829846 - RNA, 19 nt, Artificial Sequence
  Description of Artificial Sequence: Synthetic oligonucleotide
ucacugucuugcaagccug

SEQ ID NO: 2829847 - RNA, 19 nt, Artificial Sequence
  Description of Artificial Sequence: Synthetic oligonucleotide
aguacuugcuggucugcag

SEQ ID NO: 2829848 - RNA, 19 nt, Artificial Sequence
  Description of Artificial Sequence: Synthetic oligonucleotide
acaacuuuugucagaaggu

SEQ ID NO: 2829849 - RNA, 19 nt, Artificial Sequence
  Description of Artificial Sequence: Synthetic oligonucleotide
acuuuugucagaaggugug

SEQ ID NO: 2829850 - RNA, 19 nt, Artificial Sequence
  Description of Artificial Sequence: Synthetic oligonucleotide
aacugcugaaagggaggcc

SEQ ID NO: 2829851 - RNA, 19 nt, Artificial Sequence
  Description of Artificial Sequence: Synthetic oligonucleotide
cagacaaacgaauguguuc

SEQ ID NO: 2829852 - RNA, 19 nt, Artificial Sequence
  Description of Artificial Sequence: Synthetic oligonucleotide
uucauucagguucuuugau

SEQ ID NO: 2829853 - RNA, 19 nt, Artificial Sequence
  Description of Artificial Sequence: Synthetic oligonucleotide
uuuugucagaaggugugga

SEQ ID NO: 2829854 - RNA, 19 nt, Artificial Sequence
  Description of Artificial Sequence: Synthetic oligonucleotide
gacccgauccagcuugagg

SEQ ID NO: 2829855 - RNA, 19 nt, Artificial Sequence
  Description of Artificial Sequence: Synthetic oligonucleotide
ugcaugacccgauccagcu

SEQ ID NO: 2829856 - RNA, 19 nt, Artificial Sequence
  Description of Artificial Sequence: Synthetic oligonucleotide
gaacucagccgcuccaggc

SEQ ID NO: 2829857 - RNA, 19 nt, Artificial Sequence
  Description of Artificial Sequence: Synthetic oligonucleotide
acugcugaaagggaggcca

SEQ ID NO: 2829858 - RNA, 19 nt, Artificial Sequence
  Description of Artificial Sequence: Synthetic oligonucleotide
cugauagaauucccgaauc

SEQ ID NO: 2829859 - RNA, 19 nt, Artificial Sequence
  Description of Artificial Sequence: Synthetic oligonucleotide
gguacuagcuuauacacua

SEQ ID NO: 2829860 - RNA, 19 nt, Artificial Sequence
  Description of Artificial Sequence: Synthetic oligonucleotide
uccugcaugacccgaucca

SEQ ID NO: 2829861 - RNA, 19 nt, Artificial Sequence
  Description of Artificial Sequence: Synthetic oligonucleotide
uagaguggucaaaacugcu

SEQ ID NO: 2829862 - RNA, 19 nt, Artificial Sequence
  Description of Artificial Sequence: Synthetic oligonucleotide
uagaaguauuuauuucaaa

SEQ ID NO: 2829863 - RNA, 19 nt, Artificial Sequence
  Description of Artificial Sequence: Synthetic oligonucleotide
ugguacuagcuuauacacu

SEQ ID NO: 2829864 - RNA, 19 nt, Artificial Sequence
  Description of Artificial Sequence: Synthetic oligonucleotide
aggccaagguugcucaggg

SEQ ID NO: 2829865 - RNA, 19 nt, Artificial Sequence
  Description of Artificial Sequence: Synthetic oligonucleotide
cacacaggcagacaaacga

SEQ ID NO: 2829866 - RNA, 19 nt, Artificial Sequence
  Description of Artificial Sequence: Synthetic oligonucleotide
uugucagaagguguggaga

SEQ ID NO: 2829867 - RNA, 19 nt, Artificial Sequence
  Description of Artificial Sequence: Synthetic oligonucleotide
acuagcuuauacacuaugu

SEQ ID NO: 2829868 - RNA, 19 nt, Artificial Sequence
  Description of Artificial Sequence: Synthetic oligonucleotide
gaaguagccggcacacagg

SEQ ID NO: 2829869 - RNA, 19 nt, Artificial Sequence
  Description of Artificial Sequence: Synthetic oligonucleotide
cuuauacacuauguccugc

SEQ ID NO: 2829870 - RNA, 19 nt, Artificial Sequence
  Description of Artificial Sequence: Synthetic oligonucleotide
gguacuucacaauacaacu

SEQ ID NO: 2829871 - RNA, 19 nt, Artificial Sequence
  Description of Artificial Sequence: Synthetic oligonucleotide
caacuuuugucagaaggug

SEQ ID NO: 2829872 - RNA, 19 nt, Artificial Sequence
  Description of Artificial Sequence: Synthetic oligonucleotide
guggugggcauccacgaag

SEQ ID NO: 2829873 - RNA, 19 nt, Artificial Sequence
  Description of Artificial Sequence: Synthetic oligonucleotide
agacacucugugauggugg

SEQ ID NO: 2829874 - RNA, 19 nt, Artificial Sequence
  Description of Artificial Sequence: Synthetic oligonucleotide
cuugcuggucugcagguac

SEQ ID NO: 2829875 - RNA, 19 nt, Artificial Sequence
  Description of Artificial Sequence: Synthetic oligonucleotide
uagaauucccgaauccguu

SEQ ID NO: 2829876 - RNA, 19 nt, Artificial Sequence
  Description of Artificial Sequence: Synthetic oligonucleotide
auagaauucccgaauccgu

SEQ ID NO: 2829877 - RNA, 19 nt, Artificial Sequence
  Description of Artificial Sequence: Synthetic oligonucleotide
uuugucaguuuagaaguau

SEQ ID NO: 2829878 - RNA, 19 nt, Artificial Sequence
  Description of Artificial Sequence: Synthetic oligonucleotide
uauucuugucuuugccaga

SEQ ID NO: 2829879 - RNA, 19 nt, Artificial Sequence
  Description of Artificial Sequence: Synthetic oligonucleotide
guucauucagguucuuuga

SEQ ID NO: 2829880 - RNA, 19 nt, Artificial Sequence
  Description of Artificial Sequence: Synthetic oligonucleotide
ucgggacugauagaauucc

SEQ ID NO: 2829881 - RNA, 19 nt, Artificial Sequence
  Description of Artificial Sequence: Synthetic oligonucleotide
cuuuugucagaaggugugg

SEQ ID NO: 2829882 - RNA, 19 nt, Artificial Sequence
  Description of Artificial Sequence: Synthetic oligonucleotide
uugucaguuuagaaguauu

SEQ ID NO: 2829883 - RNA, 19 nt, Artificial Sequence
  Description of Artificial Sequence: Synthetic oligonucleotide
uauacacuauguccugcau

SEQ ID NO: 2829884 - RNA, 19 nt, Artificial Sequence
  Description of Artificial Sequence: Synthetic oligonucleotide
cuuuagaguggucaaaacu

SEQ ID NO: 2829885 - RNA, 19 nt, Artificial Sequence
  Description of Artificial Sequence: Synthetic oligonucleotide
acucuguccaagccucggg

SEQ ID NO: 2829886 - RNA, 19 nt, Artificial Sequence
  Description of Artificial Sequence: Synthetic oligonucleotide
aguauuuauuucaaauauu

SEQ ID NO: 2829887 - RNA, 19 nt, Artificial Sequence
  Description of Artificial Sequence: Synthetic oligonucleotide
gacugauagaauucccgaa

SEQ ID NO: 2829888 - RNA, 19 nt, Artificial Sequence
  Description of Artificial Sequence: Synthetic oligonucleotide
uuccccacugggcugggug

SEQ ID NO: 2829889 - RNA, 19 nt, Artificial Sequence
  Description of Artificial Sequence: Synthetic oligonucleotide
uugcaagccugguacuagc

SEQ ID NO: 2829890 - RNA, 19 nt, Artificial Sequence
  Description of Artificial Sequence: Synthetic oligonucleotide
ucuguccaagccucgggac

SEQ ID NO: 2829891 - RNA, 19 nt, Artificial Sequence
  Description of Artificial Sequence: Synthetic oligonucleotide
aggcagacaaacgaaugug

SEQ ID NO: 2829892 - RNA, 19 nt, Artificial Sequence
  Description of Artificial Sequence: Synthetic oligonucleotide
auccguuucucuucacugu

SEQ ID NO: 2829893 - RNA, 19 nt, Artificial Sequence
  Description of Artificial Sequence: Synthetic oligonucleotide
agaguggucaaaacugcug

SEQ ID NO: 2829894 - RNA, 19 nt, Artificial Sequence
  Description of Artificial Sequence: Synthetic oligonucleotide
gugggcauccacgaaguag

SEQ ID NO: 2829895 - RNA, 19 nt, Artificial Sequence
  Description of Artificial Sequence: Synthetic oligonucleotide
cucgggacugauagaauuc

SEQ ID NO: 2829896 - RNA, 19 nt, Artificial Sequence
  Description of Artificial Sequence: Synthetic oligonucleotide
uccaggcauaggcucagcu

SEQ ID NO: 2829897 - RNA, 19 nt, Artificial Sequence
  Description of Artificial Sequence: Synthetic oligonucleotide
gggacugauagaauucccg

SEQ ID NO: 2829898 - RNA, 19 nt, Artificial Sequence
  Description of Artificial Sequence: Synthetic oligonucleotide
ugagguugagcagcggcug

SEQ ID NO: 2829899 - RNA, 19 nt, Artificial Sequence
  Description of Artificial Sequence: Synthetic oligonucleotide
ugacucuguccaagccucg

SEQ ID NO: 2829900 - RNA, 19 nt, Artificial Sequence
  Description of Artificial Sequence: Synthetic oligonucleotide
uggugggcauccacgaagu

SEQ ID NO: 2829901 - RNA, 19 nt, Artificial Sequence
  Description of Artificial Sequence: Synthetic oligonucleotide
uccacgaaguagccggcac

SEQ ID NO: 2829902 - RNA, 19 nt, Artificial Sequence
  Description of Artificial Sequence: Synthetic oligonucleotide
gagacacucugugauggug

SEQ ID NO: 2829903 - RNA, 19 nt, Artificial Sequence
  Description of Artificial Sequence: Synthetic oligonucleotide
gguguggagacacucugug

SEQ ID NO: 2829904 - RNA, 19 nt, Artificial Sequence
  Description of Artificial Sequence: Synthetic oligonucleotide
ugcaagccugguacuagcu

SEQ ID NO: 2829905 - RNA, 19 nt, Artificial Sequence
  Description of Artificial Sequence: Synthetic oligonucleotide
gaugguggugggcauccac

SEQ ID NO: 2829906 - RNA, 19 nt, Artificial Sequence
  Description of Artificial Sequence: Synthetic oligonucleotide
uguccaagccucgggacug

SEQ ID NO: 2829907 - RNA, 19 nt, Artificial Sequence
  Description of Artificial Sequence: Synthetic oligonucleotide
ugggcuuuagaguggucaa

SEQ ID NO: 2829908 - RNA, 19 nt, Artificial Sequence
  Description of Artificial Sequence: Synthetic oligonucleotide
ugggugacucuguccaagc

SEQ ID NO: 2829909 - RNA, 19 nt, Artificial Sequence
  Description of Artificial Sequence: Synthetic oligonucleotide
cuauguccugcaugacccg

SEQ ID NO: 2829910 - RNA, 19 nt, Artificial Sequence
  Description of Artificial Sequence: Synthetic oligonucleotide
cagcuugagguugagcagc

SEQ ID NO: 2829911 - RNA, 19 nt, Artificial Sequence
  Description of Artificial Sequence: Synthetic oligonucleotide
cuugcaagccugguacuag

SEQ ID NO: 2829912 - RNA, 19 nt, Artificial Sequence
  Description of Artificial Sequence: Synthetic oligonucleotide
auacaacuuuugucagaag

SEQ ID NO: 2829913 - RNA, 19 nt, Artificial Sequence
  Description of Artificial Sequence: Synthetic oligonucleotide
uggucugcagguacuucac

SEQ ID NO: 2829914 - RNA, 19 nt, Artificial Sequence
  Description of Artificial Sequence: Synthetic oligonucleotide
gaggccaagguugcucagg

SEQ ID NO: 2829915 - RNA, 19 nt, Artificial Sequence
  Description of Artificial Sequence: Synthetic oligonucleotide
cuggcucuuccccacuggg

SEQ ID NO: 2829916 - RNA, 19 nt, Artificial Sequence
  Description of Artificial Sequence: Synthetic oligonucleotide
agggcuggcucuuccccac

SEQ ID NO: 2829917 - RNA, 19 nt, Artificial Sequence
  Description of Artificial Sequence: Synthetic oligonucleotide
acaggcagacaaacgaaug

SEQ ID NO: 2829918 - RNA, 19 nt, Artificial Sequence
  Description of Artificial Sequence: Synthetic oligonucleotide
ugguggugggcauccacga

SEQ ID NO: 2829919 - RNA, 19 nt, Artificial Sequence
  Description of Artificial Sequence: Synthetic oligonucleotide
uucccgaauccguuucucu

SEQ ID NO: 2829920 - RNA, 19 nt, Artificial Sequence
  Description of Artificial Sequence: Synthetic oligonucleotide
auagugggcuuuagagugg

SEQ ID NO: 2829921 - RNA, 19 nt, Artificial Sequence
  Description of Artificial Sequence: Synthetic oligonucleotide
auucuugucuuugccagaa

SEQ ID NO: 2829922 - RNA, 19 nt, Artificial Sequence
  Description of Artificial Sequence: Synthetic oligonucleotide
ugcgucucguggaucuuga

SEQ ID NO: 2829923 - RNA, 19 nt, Artificial Sequence
  Description of Artificial Sequence: Synthetic oligonucleotide
gacucuguccaagccucgg

SEQ ID NO: 2829924 - RNA, 19 nt, Artificial Sequence
  Description of Artificial Sequence: Synthetic oligonucleotide
cucagcugcucaucauagc

SEQ ID NO: 2829925 - RNA, 19 nt, Artificial Sequence
  Description of Artificial Sequence: Synthetic oligonucleotide
uggcucuuccccacugggc

SEQ ID NO: 2829926 - RNA, 19 nt, Artificial Sequence
  Description of Artificial Sequence: Synthetic oligonucleotide
auaggcucagcugcucauc

SEQ ID NO: 2829927 - RNA, 19 nt, Artificial Sequence
  Description of Artificial Sequence: Synthetic oligonucleotide
aguggucaaaacugcugaa

SEQ ID NO: 2829928 - RNA, 19 nt, Artificial Sequence
  Description of Artificial Sequence: Synthetic oligonucleotide
gucuuugccagaacucagc

SEQ ID NO: 2829929 - RNA, 19 nt, Artificial Sequence
  Description of Artificial Sequence: Synthetic oligonucleotide
uauguccugcaugacccga

SEQ ID NO: 2829930 - RNA, 19 nt, Artificial Sequence
  Description of Artificial Sequence: Synthetic oligonucleotide
caagguugcucagggcugg

SEQ ID NO: 2829931 - RNA, 19 nt, Artificial Sequence
  Description of Artificial Sequence: Synthetic oligonucleotide
acucugugauggugguggg

SEQ ID NO: 2829932 - RNA, 19 nt, Artificial Sequence
  Description of Artificial Sequence: Synthetic oligonucleotide
gaucuugauguugcacaug

SEQ ID NO: 2829933 - RNA, 19 nt, Artificial Sequence
  Description of Artificial Sequence: Synthetic oligonucleotide
cugcaugacccgauccagc

SEQ ID NO: 2829934 - RNA, 19 nt, Artificial Sequence
  Description of Artificial Sequence: Synthetic oligonucleotide
ggacugauagaauucccga

SEQ ID NO: 2829935 - RNA, 19 nt, Artificial Sequence
  Description of Artificial Sequence: Synthetic oligonucleotide
cacugucuugcaagccugg

SEQ ID NO: 2829936 - RNA, 19 nt, Artificial Sequence
  Description of Artificial Sequence: Synthetic oligonucleotide
aagguugcucagggcuggc

SEQ ID NO: 2829937 - RNA, 19 nt, Artificial Sequence
  Description of Artificial Sequence: Synthetic oligonucleotide
gagguugagcagcggcugc

SEQ ID NO: 2829938 - RNA, 19 nt, Artificial Sequence
  Description of Artificial Sequence: Synthetic oligonucleotide
gaauccguuucucuucacu

SEQ ID NO: 2829939 - RNA, 19 nt, Artificial Sequence
  Description of Artificial Sequence: Synthetic oligonucleotide
gucugcagguacuucacaa

SEQ ID NO: 2829940 - RNA, 19 nt, Artificial Sequence
  Description of Artificial Sequence: Synthetic oligonucleotide
gugggcuuuagagugguca

SEQ ID NO: 2829941 - RNA, 19 nt, Artificial Sequence
  Description of Artificial Sequence: Synthetic oligonucleotide
guggagacacucugugaug

SEQ ID NO: 2829942 - RNA, 19 nt, Artificial Sequence
  Description of Artificial Sequence: Synthetic oligonucleotide
gcuuauacacuauguccug

SEQ ID NO: 2829943 - RNA, 19 nt, Artificial Sequence
  Description of Artificial Sequence: Synthetic oligonucleotide
cugcucaucauagcgauaa

SEQ ID NO: 2829944 - RNA, 19 nt, Artificial Sequence
  Description of Artificial Sequence: Synthetic oligonucleotide
cuucacugucuugcaagcc

SEQ ID NO: 2829945 - RNA, 19 nt, Artificial Sequence
  Description of Artificial Sequence: Synthetic oligonucleotide
cacgaaguagccggcacac

SEQ ID NO: 2829946 - RNA, 19 nt, Artificial Sequence
  Description of Artificial Sequence: Synthetic oligonucleotide
uuguucugaaggacauuuu

SEQ ID NO: 2829947 - RNA, 19 nt, Artificial Sequence
  Description of Artificial Sequence: Synthetic oligonucleotide
gucaguuuagaaguauuua

SEQ ID NO: 2829948 - RNA, 19 nt, Artificial Sequence
  Description of Artificial Sequence: Synthetic oligonucleotide
caagccugguacuagcuua

SEQ ID NO: 2829949 - RNA, 19 nt, Artificial Sequence
  Description of Artificial Sequence: Synthetic oligonucleotide
ucccgaauccguuucucuu

SEQ ID NO: 2829950 - RNA, 19 nt, Artificial Sequence
  Description of Artificial Sequence: Synthetic oligonucleotide
agcgauaauagugggcuuu

SEQ ID NO: 2829951 - RNA, 19 nt, Artificial Sequence
  Description of Artificial Sequence: Synthetic oligonucleotide
ccugguacuagcuuauaca

SEQ ID NO: 2829952 - RNA, 19 nt, Artificial Sequence
  Description of Artificial Sequence: Synthetic oligonucleotide
gcugaaagggaggccaagg

SEQ ID NO: 2829953 - RNA, 19 nt, Artificial Sequence
  Description of Artificial Sequence: Synthetic oligonucleotide
ucagccgcuccaggcauag

SEQ ID NO: 2829954 - RNA, 19 nt, Artificial Sequence
  Description of Artificial Sequence: Synthetic oligonucleotide
uucuugucuuugccagaac

SEQ ID NO: 2829955 - RNA, 19 nt, Artificial Sequence
  Description of Artificial Sequence: Synthetic oligonucleotide
agguugagcagcggcugcg

SEQ ID NO: 2829956 - RNA, 19 nt, Artificial Sequence
  Description of Artificial Sequence: Synthetic oligonucleotide
ugcugaaagggaggccaag

SEQ ID NO: 2829957 - RNA, 19 nt, Artificial Sequence
  Description of Artificial Sequence: Synthetic oligonucleotide
uguccugcaugacccgauc

SEQ ID NO: 2829958 - RNA, 19 nt, Artificial Sequence
  Description of Artificial Sequence: Synthetic oligonucleotide
gugaugguggugggcaucc

SEQ ID NO: 2829959 - RNA, 19 nt, Artificial Sequence
  Description of Artificial Sequence: Synthetic oligonucleotide
agcuugagguugagcagcg

SEQ ID NO: 2829960 - RNA, 19 nt, Artificial Sequence
  Description of Artificial Sequence: Synthetic oligonucleotide
ucuugcaagccugguacua

SEQ ID NO: 2829961 - RNA, 19 nt, Artificial Sequence
  Description of Artificial Sequence: Synthetic oligonucleotide
cauccacgaaguagccggc

SEQ ID NO: 2829962 - RNA, 19 nt, Artificial Sequence
  Description of Artificial Sequence: Synthetic oligonucleotide
cucagggcuggcucuuccc

SEQ ID NO: 2829963 - RNA, 19 nt, Artificial Sequence
  Description of Artificial Sequence: Synthetic oligonucleotide
guccugcaugacccgaucc

SEQ ID NO: 2829964 - RNA, 19 nt, Artificial Sequence
  Description of Artificial Sequence: Synthetic oligonucleotide
gcagguacuucacaauaca

SEQ ID NO: 2829965 - RNA, 19 nt, Artificial Sequence
  Description of Artificial Sequence: Synthetic oligonucleotide
cagguacuucacaauacaa

SEQ ID NO: 2829966 - RNA, 19 nt, Artificial Sequence
  Description of Artificial Sequence: Synthetic oligonucleotide
agccucgggacugauagaa

SEQ ID NO: 2829967 - RNA, 19 nt, Artificial Sequence
  Description of Artificial Sequence: Synthetic oligonucleotide
auguguucauucagguucu

SEQ ID NO: 2829968 - RNA, 19 nt, Artificial Sequence
  Description of Artificial Sequence: Synthetic oligonucleotide
cucguggaucuugauguug

SEQ ID NO: 2829969 - RNA, 19 nt, Artificial Sequence
  Description of Artificial Sequence: Synthetic oligonucleotide
cugggugacucuguccaag

SEQ ID NO: 2829970 - RNA, 19 nt, Artificial Sequence
  Description of Artificial Sequence: Synthetic oligonucleotide
ugagcagcggcugcgucuc

SEQ ID NO: 2829971 - RNA, 19 nt, Artificial Sequence
  Description of Artificial Sequence: Synthetic oligonucleotide
acacuauguccugcaugac

SEQ ID NO: 2829972 - RNA, 19 nt, Artificial Sequence
  Description of Artificial Sequence: Synthetic oligonucleotide
uccccacugggcuggguga

SEQ ID NO: 2829973 - RNA, 19 nt, Artificial Sequence
  Description of Artificial Sequence: Synthetic oligonucleotide
caguuuagaaguauuuauu

SEQ ID NO: 2829974 - RNA, 19 nt, Artificial Sequence
  Description of Artificial Sequence: Synthetic oligonucleotide
cgaaguagccggcacacag

SEQ ID NO: 2829975 - RNA, 19 nt, Artificial Sequence
  Description of Artificial Sequence: Synthetic oligonucleotide
guggaucuugauguugcac

SEQ ID NO: 2829976 - RNA, 19 nt, Artificial Sequence
  Description of Artificial Sequence: Synthetic oligonucleotide
ggcaguacuugcuggucug

SEQ ID NO: 2829977 - RNA, 19 nt, Artificial Sequence
  Description of Artificial Sequence: Synthetic oligonucleotide
uagugggcuuuagaguggu

SEQ ID NO: 2829978 - RNA, 19 nt, Artificial Sequence
  Description of Artificial Sequence: Synthetic oligonucleotide
agcggcugcgucucgugga

SEQ ID NO: 2829979 - RNA, 19 nt, Artificial Sequence
  Description of Artificial Sequence: Synthetic oligonucleotide
ugugaugguggugggcauc

SEQ ID NO: 2829980 - RNA, 19 nt, Artificial Sequence
  Description of Artificial Sequence: Synthetic oligonucleotide
aagccucgggacugauaga

SEQ ID NO: 2829981 - RNA, 19 nt, Artificial Sequence
  Description of Artificial Sequence: Synthetic oligonucleotide
uugccagaacucagccgcu

SEQ ID NO: 2829982 - RNA, 19 nt, Artificial Sequence
  Description of Artificial Sequence: Synthetic oligonucleotide
cugcagguacuucacaaua

SEQ ID NO: 2829983 - RNA, 19 nt, Artificial Sequence
  Description of Artificial Sequence: Synthetic oligonucleotide
aagccugguacuagcuuau

SEQ ID NO: 2829984 - RNA, 19 nt, Artificial Sequence
  Description of Artificial Sequence: Synthetic oligonucleotide
acaaacgaauguguucauu

SEQ ID NO: 2829985 - RNA, 19 nt, Artificial Sequence
  Description of Artificial Sequence: Synthetic oligonucleotide
cucuguccaagccucggga

SEQ ID NO: 2829986 - RNA, 19 nt, Artificial Sequence
  Description of Artificial Sequence: Synthetic oligonucleotide
acucagccgcuccaggcau

SEQ ID NO: 2829987 - RNA, 19 nt, Artificial Sequence
  Description of Artificial Sequence: Synthetic oligonucleotide
guggucaaaacugcugaaa

SEQ ID NO: 2829988 - RNA, 19 nt, Artificial Sequence
  Description of Artificial Sequence: Synthetic oligonucleotide
guguggagacacucuguga

SEQ ID NO: 2829989 - RNA, 19 nt, Artificial Sequence
  Description of Artificial Sequence: Synthetic oligonucleotide
acuucacaauacaacuuuu

SEQ ID NO: 2829990 - RNA, 19 nt, Artificial Sequence
  Description of Artificial Sequence: Synthetic oligonucleotide
cagcugcucaucauagcga

SEQ ID NO: 2829991 - RNA, 19 nt, Artificial Sequence
  Description of Artificial Sequence: Synthetic oligonucleotide
acacaggcagacaaacgaa

SEQ ID NO: 2829992 - RNA, 19 nt, Artificial Sequence
  Description of Artificial Sequence: Synthetic oligonucleotide
ugcucaucauagcgauaau

SEQ ID NO: 2829993 - RNA, 19 nt, Artificial Sequence
  Description of Artificial Sequence: Synthetic oligonucleotide
ccaggcauaggcucagcug

SEQ ID NO: 2829994 - RNA, 19 nt, Artificial Sequence
  Description of Artificial Sequence: Synthetic oligonucleotide
gguugcucagggcuggcuc

SEQ ID NO: 2829995 - RNA, 19 nt, Artificial Sequence
  Description of Artificial Sequence: Synthetic oligonucleotide
caggcagacaaacgaaugu

SEQ ID NO: 2829996 - RNA, 19 nt, Artificial Sequence
  Description of Artificial Sequence: Synthetic oligonucleotide
uagccggcacacaggcaga

SEQ ID NO: 2829997 - RNA, 19 nt, Artificial Sequence
  Description of Artificial Sequence: Synthetic oligonucleotide
gccugguacuagcuuauac

SEQ ID NO: 2829998 - RNA, 19 nt, Artificial Sequence
  Description of Artificial Sequence: Synthetic oligonucleotide
ucucguggaucuugauguu

SEQ ID NO: 2829999 - RNA, 19 nt, Artificial Sequence
  Description of Artificial Sequence: Synthetic oligonucleotide
gccaagguugcucagggcu

SEQ ID NO: 2830000 - RNA, 19 nt, Artificial Sequence
  Description of Artificial Sequence: Synthetic oligonucleotide
acugucuugcaagccuggu

SEQ ID NO: 2830001 - RNA, 19 nt, Artificial Sequence
  Description of Artificial Sequence: Synthetic oligonucleotide
gacacucugugaugguggu

SEQ ID NO: 2830002 - RNA, 19 nt, Artificial Sequence
  Description of Artificial Sequence: Synthetic oligonucleotide
acauggggcaguacuugcu

SEQ ID NO: 2830003 - RNA, 19 nt, Artificial Sequence
  Description of Artificial Sequence: Synthetic oligonucleotide
ggugacucuguccaagccu

SEQ ID NO: 2830004 - RNA, 19 nt, Artificial Sequence
  Description of Artificial Sequence: Synthetic oligonucleotide
ggcauccacgaaguagccg

SEQ ID NO: 2830005 - RNA, 19 nt, Artificial Sequence
  Description of Artificial Sequence: Synthetic oligonucleotide
gauccagcuugagguugag

SEQ ID NO: 2830006 - RNA, 19 nt, Artificial Sequence
  Description of Artificial Sequence: Synthetic oligonucleotide
uagcgauaauagugggcuu

SEQ ID NO: 2830007 - RNA, 19 nt, Artificial Sequence
  Description of Artificial Sequence: Synthetic oligonucleotide
agccggcacacaggcagac

SEQ ID NO: 2830008 - RNA, 19 nt, Artificial Sequence
  Description of Artificial Sequence: Synthetic oligonucleotide
gggugacucuguccaagcc

SEQ ID NO: 2830009 - RNA, 19 nt, Artificial Sequence
  Description of Artificial Sequence: Synthetic oligonucleotide
gcacacaggcagacaaacg

SEQ ID NO: 2830010 - RNA, 19 nt, Artificial Sequence
  Description of Artificial Sequence: Synthetic oligonucleotide
cagcggcugcgucucgugg

SEQ ID NO: 2830011 - RNA, 19 nt, Artificial Sequence
  Description of Artificial Sequence: Synthetic oligonucleotide
guugcucagggcuggcucu

SEQ ID NO: 2830012 - RNA, 19 nt, Artificial Sequence
  Description of Artificial Sequence: Synthetic oligonucleotide
cugaaagggaggccaaggu

SEQ ID NO: 2830013 - RNA, 19 nt, Artificial Sequence
  Description of Artificial Sequence: Synthetic oligonucleotide
auuuguucugaaggacauu

SEQ ID NO: 2830014 - RNA, 19 nt, Artificial Sequence
  Description of Artificial Sequence: Synthetic oligonucleotide
ggcuuuagaguggucaaaa

SEQ ID NO: 2830015 - RNA, 19 nt, Artificial Sequence
  Description of Artificial Sequence: Synthetic oligonucleotide
gccagaacucagccgcucc

SEQ ID NO: 2830016 - RNA, 19 nt, Artificial Sequence
  Description of Artificial Sequence: Synthetic oligonucleotide
ugacccgauccagcuugag

SEQ ID NO: 2830017 - RNA, 19 nt, Artificial Sequence
  Description of Artificial Sequence: Synthetic oligonucleotide
cccgaauccguuucucuuc

SEQ ID NO: 2830018 - RNA, 19 nt, Artificial Sequence
  Description of Artificial Sequence: Synthetic oligonucleotide
gggaggccaagguugcuca

SEQ ID NO: 2830019 - RNA, 19 nt, Artificial Sequence
  Description of Artificial Sequence: Synthetic oligonucleotide
agguguggagacacucugu

SEQ ID NO: 2830020 - RNA, 19 nt, Artificial Sequence
  Description of Artificial Sequence: Synthetic oligonucleotide
cacaggcagacaaacgaau

SEQ ID NO: 2830021 - RNA, 19 nt, Artificial Sequence
  Description of Artificial Sequence: Synthetic oligonucleotide
cugcgucucguggaucuug

SEQ ID NO: 2830022 - RNA, 19 nt, Artificial Sequence
  Description of Artificial Sequence: Synthetic oligonucleotide
gucagaagguguggagaca

SEQ ID NO: 2830023 - RNA, 19 nt, Artificial Sequence
  Description of Artificial Sequence: Synthetic oligonucleotide
acacucugugaugguggug

SEQ ID NO: 2830024 - RNA, 19 nt, Artificial Sequence
  Description of Artificial Sequence: Synthetic oligonucleotide
cugucuugcaagccuggua

SEQ ID NO: 2830025 - RNA, 19 nt, Artificial Sequence
  Description of Artificial Sequence: Synthetic oligonucleotide
ggcucuuccccacugggcu

SEQ ID NO: 2830026 - RNA, 19 nt, Artificial Sequence
  Description of Artificial Sequence: Synthetic oligonucleotide
gacaaacgaauguguucau

SEQ ID NO: 2830027 - RNA, 19 nt, Artificial Sequence
  Description of Artificial Sequence: Synthetic oligonucleotide
ugccagaacucagccgcuc

SEQ ID NO: 2830028 - RNA, 19 nt, Artificial Sequence
  Description of Artificial Sequence: Synthetic oligonucleotide
auccacgaaguagccggca

SEQ ID NO: 2830029 - RNA, 19 nt, Artificial Sequence
  Description of Artificial Sequence: Synthetic oligonucleotide
guacuucacaauacaacuu

SEQ ID NO: 2830030 - RNA, 19 nt, Artificial Sequence
  Description of Artificial Sequence: Synthetic oligonucleotide
gcauaggcucagcugcuca

SEQ ID NO: 2830031 - RNA, 19 nt, Artificial Sequence
  Description of Artificial Sequence: Synthetic oligonucleotide
gcucaucauagcgauaaua

SEQ ID NO: 2830032 - RNA, 19 nt, Artificial Sequence
  Description of Artificial Sequence: Synthetic oligonucleotide
ggaucuugauguugcacau

SEQ ID NO: 2830033 - RNA, 19 nt, Artificial Sequence
  Description of Artificial Sequence: Synthetic oligonucleotide
aggcucagcugcucaucau

SEQ ID NO: 2830034 - RNA, 19 nt, Artificial Sequence
  Description of Artificial Sequence: Synthetic oligonucleotide
ggaggccaagguugcucag

SEQ ID NO: 2830035 - RNA, 19 nt, Artificial Sequence
  Description of Artificial Sequence: Synthetic oligonucleotide
agugggcuuuagagugguc

SEQ ID NO: 2830036 - RNA, 19 nt, Artificial Sequence
  Description of Artificial Sequence: Synthetic oligonucleotide
ugcuggucugcagguacuu

SEQ ID NO: 2830037 - RNA, 19 nt, Artificial Sequence
  Description of Artificial Sequence: Synthetic oligonucleotide
ggcucagcugcucaucaua

SEQ ID NO: 2830038 - RNA, 19 nt, Artificial Sequence
  Description of Artificial Sequence: Synthetic oligonucleotide
ugaugguggugggcaucca

SEQ ID NO: 2830039 - RNA, 19 nt, Artificial Sequence
  Description of Artificial Sequence: Synthetic oligonucleotide
caguacuugcuggucugca

SEQ ID NO: 2830040 - RNA, 19 nt, Artificial Sequence
  Description of Artificial Sequence: Synthetic oligonucleotide
aggcauaggcucagcugcu

SEQ ID NO: 2830041 - RNA, 19 nt, Artificial Sequence
  Description of Artificial Sequence: Synthetic oligonucleotide
guugcacauggggcaguac

SEQ ID NO: 2830042 - RNA, 19 nt, Artificial Sequence
  Description of Artificial Sequence: Synthetic oligonucleotide
ggcagacaaacgaaugugu

SEQ ID NO: 2830043 - RNA, 19 nt, Artificial Sequence
  Description of Artificial Sequence: Synthetic oligonucleotide
acgaaguagccggcacaca

SEQ ID NO: 2830044 - RNA, 19 nt, Artificial Sequence
  Description of Artificial Sequence: Synthetic oligonucleotide
cuguccaagccucgggacu

SEQ ID NO: 2830045 - RNA, 19 nt, Artificial Sequence
  Description of Artificial Sequence: Synthetic oligonucleotide
gcucuuccccacugggcug

SEQ ID NO: 2830046 - RNA, 19 nt, Artificial Sequence
  Description of Artificial Sequence: Synthetic oligonucleotide
ggucugcagguacuucaca

SEQ ID NO: 2830047 - RNA, 19 nt, Artificial Sequence
  Description of Artificial Sequence: Synthetic oligonucleotide
auguccugcaugacccgau

SEQ ID NO: 2830048 - RNA, 19 nt, Artificial Sequence
  Description of Artificial Sequence: Synthetic oligonucleotide
cgggacugauagaauuccc

SEQ ID NO: 2830049 - RNA, 19 nt, Artificial Sequence
  Description of Artificial Sequence: Synthetic oligonucleotide
gagcagcggcugcgucucg

SEQ ID NO: 2830050 - RNA, 19 nt, Artificial Sequence
  Description of Artificial Sequence: Synthetic oligonucleotide
gucuugcaagccugguacu

SEQ ID NO: 2830051 - RNA, 19 nt, Artificial Sequence
  Description of Artificial Sequence: Synthetic oligonucleotide
cauaggcucagcugcucau

SEQ ID NO: 2830052 - RNA, 19 nt, Artificial Sequence
  Description of Artificial Sequence: Synthetic oligonucleotide
ggcuggcucuuccccacug

SEQ ID NO: 2830053 - RNA, 19 nt, Artificial Sequence
  Description of Artificial Sequence: Synthetic oligonucleotide
aguagccggcacacaggca

SEQ ID NO: 2830054 - RNA, 19 nt, Artificial Sequence
  Description of Artificial Sequence: Synthetic oligonucleotide
cugcugaaagggaggccaa

SEQ ID NO: 2830055 - RNA, 19 nt, Artificial Sequence
  Description of Artificial Sequence: Synthetic oligonucleotide
ggccaagguugcucagggc

SEQ ID NO: 2830056 - RNA, 19 nt, Artificial Sequence
  Description of Artificial Sequence: Synthetic oligonucleotide
agcagcggcugcgucucgu

SEQ ID NO: 2830057 - RNA, 19 nt, Artificial Sequence
  Description of Artificial Sequence: Synthetic oligonucleotide
acuugcuggucugcaggua

SEQ ID NO: 2830058 - RNA, 19 nt, Artificial Sequence
  Description of Artificial Sequence: Synthetic oligonucleotide
gcaguacuugcuggucugc

SEQ ID NO: 2830059 - RNA, 19 nt, Artificial Sequence
  Description of Artificial Sequence: Synthetic oligonucleotide
ggcugcgucucguggaucu

SEQ ID NO: 2830060 - RNA, 19 nt, Artificial Sequence
  Description of Artificial Sequence: Synthetic oligonucleotide
ccgauccagcuugagguug

SEQ ID NO: 2830061 - RNA, 19 nt, Artificial Sequence
  Description of Artificial Sequence: Synthetic oligonucleotide
ccgaauccguuucucuuca

SEQ ID NO: 2830062 - RNA, 19 nt, Artificial Sequence
  Description of Artificial Sequence: Synthetic oligonucleotide
ccggcacacaggcagacaa

SEQ ID NO: 2830063 - RNA, 19 nt, Artificial Sequence
  Description of Artificial Sequence: Synthetic oligonucleotide
cgaauguguucauucaggu

SEQ ID NO: 2830064 - RNA, 19 nt, Artificial Sequence
  Description of Artificial Sequence: Synthetic oligonucleotide
gcagcggcugcgucucgug

SEQ ID NO: 2830065 - RNA, 19 nt, Artificial Sequence
  Description of Artificial Sequence: Synthetic oligonucleotide
uccaagccucgggacugau

SEQ ID NO: 2830066 - RNA, 19 nt, Artificial Sequence
  Description of Artificial Sequence: Synthetic oligonucleotide
gggcaguacuugcuggucu

SEQ ID NO: 2830067 - RNA, 19 nt, Artificial Sequence
  Description of Artificial Sequence: Synthetic oligonucleotide
cuccaggcauaggcucagc

SEQ ID NO: 2830068 - RNA, 19 nt, Artificial Sequence
  Description of Artificial Sequence: Synthetic oligonucleotide
ccgcuccaggcauaggcuc

SEQ ID NO: 2830069 - RNA, 19 nt, Artificial Sequence
  Description of Artificial Sequence: Synthetic oligonucleotide
augacccgauccagcuuga

SEQ ID NO: 2830070 - RNA, 19 nt, Artificial Sequence
  Description of Artificial Sequence: Synthetic oligonucleotide
gguggugggcauccacgaa

SEQ ID NO: 2830071 - RNA, 19 nt, Artificial Sequence
  Description of Artificial Sequence: Synthetic oligonucleotide
gggcauccacgaaguagcc

SEQ ID NO: 2830072 - RNA, 19 nt, Artificial Sequence
  Description of Artificial Sequence: Synthetic oligonucleotide
ccacgaaguagccggcaca

SEQ ID NO: 2830073 - RNA, 19 nt, Artificial Sequence
  Description of Artificial Sequence: Synthetic oligonucleotide
gcagacaaacgaauguguu

SEQ ID NO: 2830074 - RNA, 19 nt, Artificial Sequence
  Description of Artificial Sequence: Synthetic oligonucleotide
cgauaauagugggcuuuag

SEQ ID NO: 2830075 - RNA, 19 nt, Artificial Sequence
  Description of Artificial Sequence: Synthetic oligonucleotide
guacuagcuuauacacuau

SEQ ID NO: 2830076 - RNA, 19 nt, Artificial Sequence
  Description of Artificial Sequence: Synthetic oligonucleotide
ggcauaggcucagcugcuc

SEQ ID NO: 2830077 - RNA, 19 nt, Artificial Sequence
  Description of Artificial Sequence: Synthetic oligonucleotide
gcgauaauagugggcuuua

SEQ ID NO: 2830078 - RNA, 19 nt, Artificial Sequence
  Description of Artificial Sequence: Synthetic oligonucleotide
ggagacacucugugauggu

SEQ ID NO: 2830079 - RNA, 19 nt, Artificial Sequence
  Description of Artificial Sequence: Synthetic oligonucleotide
gggcuuuagaguggucaaa

SEQ ID NO: 2830080 - RNA, 19 nt, Artificial Sequence
  Description of Artificial Sequence: Synthetic oligonucleotide
gcuggucugcagguacuuc

SEQ ID NO: 2830081 - RNA, 19 nt, Artificial Sequence
  Description of Artificial Sequence: Synthetic oligonucleotide
ccucgggacugauagaauu

SEQ ID NO: 2830082 - RNA, 19 nt, Artificial Sequence
  Description of Artificial Sequence: Synthetic oligonucleotide
guccaagccucgggacuga

SEQ ID NO: 2830083 - RNA, 19 nt, Artificial Sequence
  Description of Artificial Sequence: Synthetic oligonucleotide
gcaagccugguacuagcuu

SEQ ID NO: 2830084 - RNA, 19 nt, Artificial Sequence
  Description of Artificial Sequence: Synthetic oligonucleotide
cucagccgcuccaggcaua

SEQ ID NO: 2830085 - RNA, 19 nt, Artificial Sequence
  Description of Artificial Sequence: Synthetic oligonucleotide
cgauccagcuugagguuga

SEQ ID NO: 2830086 - RNA, 19 nt, Artificial Sequence
  Description of Artificial Sequence: Synthetic oligonucleotide
cagccgcuccaggcauagg

SEQ ID NO: 2830087 - RNA, 19 nt, Artificial Sequence
  Description of Artificial Sequence: Synthetic oligonucleotide
cugugaugguggugggcau

SEQ ID NO: 2830088 - RNA, 19 nt, Artificial Sequence
  Description of Artificial Sequence: Synthetic oligonucleotide
gcugggugacucuguccaa

SEQ ID NO: 2830089 - RNA, 19 nt, Artificial Sequence
  Description of Artificial Sequence: Synthetic oligonucleotide
cgaauccguuucucuucac

SEQ ID NO: 2830090 - RNA, 19 nt, Artificial Sequence
  Description of Artificial Sequence: Synthetic oligonucleotide
ggugggcauccacgaagua

SEQ ID NO: 2830091 - RNA, 19 nt, Artificial Sequence
  Description of Artificial Sequence: Synthetic oligonucleotide
cguggaucuugauguugca

SEQ ID NO: 2830092 - RNA, 19 nt, Artificial Sequence
  Description of Artificial Sequence: Synthetic oligonucleotide
cgcuccaggcauaggcuca

SEQ ID NO: 2830093 - RNA, 19 nt, Artificial Sequence
  Description of Artificial Sequence: Synthetic oligonucleotide
ccguuucucuucacugucu

SEQ ID NO: 2830094 - RNA, 19 nt, Artificial Sequence
  Description of Artificial Sequence: Synthetic oligonucleotide
gguugagcagcggcugcgu

SEQ ID NO: 2830095 - RNA, 19 nt, Artificial Sequence
  Description of Artificial Sequence: Synthetic oligonucleotide
cacugggcugggugacucu

SEQ ID NO: 2830096 - RNA, 19 nt, Artificial Sequence
  Description of Artificial Sequence: Synthetic oligonucleotide
gccgcuccaggcauaggcu

SEQ ID NO: 2830097 - RNA, 19 nt, Artificial Sequence
  Description of Artificial Sequence: Synthetic oligonucleotide
ccccacugggcugggugac

SEQ ID NO: 2830098 - RNA, 19 nt, Artificial Sequence
  Description of Artificial Sequence: Synthetic oligonucleotide
ccaagccucgggacugaua

SEQ ID NO: 2830099 - RNA, 19 nt, Artificial Sequence
  Description of Artificial Sequence: Synthetic oligonucleotide
gcugcucaucauagcgaua

SEQ ID NO: 2830100 - RNA, 19 nt, Artificial Sequence
  Description of Artificial Sequence: Synthetic oligonucleotide
gcaugacccgauccagcuu

SEQ ID NO: 2830101 - RNA, 19 nt, Artificial Sequence
  Description of Artificial Sequence: Synthetic oligonucleotide
gccggcacacaggcagaca

SEQ ID NO: 2830102 - RNA, 19 nt, Artificial Sequence
  Description of Artificial Sequence: Synthetic oligonucleotide
gcggcugcgucucguggau

SEQ ID NO: 2830103 - RNA, 19 nt, Artificial Sequence
  Description of Artificial Sequence: Synthetic oligonucleotide
cggcacacaggcagacaaa

SEQ ID NO: 2830104 - RNA, 19 nt, Artificial Sequence
  Description of Artificial Sequence: Synthetic oligonucleotide
cccgauccagcuugagguu

SEQ ID NO: 2830105 - RNA, 19 nt, Artificial Sequence
  Description of Artificial Sequence: Synthetic oligonucleotide
gggcuggcucuuccccacu

SEQ ID NO: 2830106 - RNA, 19 nt, Artificial Sequence
  Description of Artificial Sequence: Synthetic oligonucleotide
gcgucucguggaucuugau

SEQ ID NO: 2830107 - RNA, 19 nt, Artificial Sequence
  Description of Artificial Sequence: Synthetic oligonucleotide
cuuccccacugggcugggu

SEQ ID NO: 2830108 - RNA, 19 nt, Artificial Sequence
  Description of Artificial Sequence: Synthetic oligonucleotide
gccucgggacugauagaau

SEQ ID NO: 2830109 - RNA, 19 nt, Artificial Sequence
  Description of Artificial Sequence: Synthetic oligonucleotide
gcugcgucucguggaucuu

SEQ ID NO: 2830110 - RNA, 19 nt, Artificial Sequence
  Description of Artificial Sequence: Synthetic oligonucleotide
cggcugcgucucguggauc

SEQ ID NO: 2830111 - RNA, 19 nt, Artificial Sequence
  Description of Artificial Sequence: Synthetic oligonucleotide
cccacugggcugggugacu

SEQ ID NO: 2830112 - RNA, 19 nt, Artificial Sequence
  Description of Artificial Sequence: Synthetic oligonucleotide
aaggugaugaagccaaaac

SEQ ID NO: 2830113 - RNA, 19 nt, Artificial Sequence
  Description of Artificial Sequence: Synthetic oligonucleotide
aguagcuucgaccacgccc

SEQ ID NO: 2830114 - RNA, 19 nt, Artificial Sequence
  Description of Artificial Sequence: Synthetic oligonucleotide
uguaauuuccuccugagua

SEQ ID NO: 2830115 - RNA, 19 nt, Artificial Sequence
  Description of Artificial Sequence: Synthetic oligonucleotide
aggugaugaagccaaaacc

SEQ ID NO: 2830116 - RNA, 19 nt, Artificial Sequence
  Description of Artificial Sequence: Synthetic oligonucleotide
ucaguugucauaauugucu

SEQ ID NO: 2830117 - RNA, 19 nt, Artificial Sequence
  Description of Artificial Sequence: Synthetic oligonucleotide
cauggcaaaaugcaaaucc

SEQ ID NO: 2830118 - RNA, 19 nt, Artificial Sequence
  Description of Artificial Sequence: Synthetic oligonucleotide
auaucuuccgcuuccauag

SEQ ID NO: 2830119 - RNA, 19 nt, Artificial Sequence
  Description of Artificial Sequence: Synthetic oligonucleotide
ucuagaguagcuucgacca

SEQ ID NO: 2830120 - RNA, 19 nt, Artificial Sequence
  Description of Artificial Sequence: Synthetic oligonucleotide
uauccauauccauauaucc

SEQ ID NO: 2830121 - RNA, 19 nt, Artificial Sequence
  Description of Artificial Sequence: Synthetic oligonucleotide
aauugucucuguaauuucc

SEQ ID NO: 2830122 - RNA, 19 nt, Artificial Sequence
  Description of Artificial Sequence: Synthetic oligonucleotide
uauccauauauccuccagg

SEQ ID NO: 2830123 - RNA, 19 nt, Artificial Sequence
  Description of Artificial Sequence: Synthetic oligonucleotide
ucgguguugaaguugagcc

SEQ ID NO: 2830124 - RNA, 19 nt, Artificial Sequence
  Description of Artificial Sequence: Synthetic oligonucleotide
gacaacaaccaccucagag

SEQ ID NO: 2830125 - RNA, 19 nt, Artificial Sequence
  Description of Artificial Sequence: Synthetic oligonucleotide
uuggugaaggugaugaagc

SEQ ID NO: 2830126 - RNA, 19 nt, Artificial Sequence
  Description of Artificial Sequence: Synthetic oligonucleotide
uugacaacaaccaccucag

SEQ ID NO: 2830127 - RNA, 19 nt, Artificial Sequence
  Description of Artificial Sequence: Synthetic oligonucleotide
ucagagauaggcccaaagc

SEQ ID NO: 2830128 - RNA, 19 nt, Artificial Sequence
  Description of Artificial Sequence: Synthetic oligonucleotide
cugaguagcggucauaacc

SEQ ID NO: 2830129 - RNA, 19 nt, Artificial Sequence
  Description of Artificial Sequence: Synthetic oligonucleotide
uucaagugccugcucaucg

SEQ ID NO: 2830130 - RNA, 19 nt, Artificial Sequence
  Description of Artificial Sequence: Synthetic oligonucleotide
ucgacugucauaucuuccg

SEQ ID NO: 2830131 - RNA, 19 nt, Artificial Sequence
  Description of Artificial Sequence: Synthetic oligonucleotide
aaccaccucagagauaggc

SEQ ID NO: 2830132 - RNA, 19 nt, Artificial Sequence
  Description of Artificial Sequence: Synthetic oligonucleotide
acaaccaccucagagauag

SEQ ID NO: 2830133 - RNA, 19 nt, Artificial Sequence
  Description of Artificial Sequence: Synthetic oligonucleotide
ugaguagcggucauaacca

SEQ ID NO: 2830134 - RNA, 19 nt, Artificial Sequence
  Description of Artificial Sequence: Synthetic oligonucleotide
acauuaugugugcaugccc

SEQ ID NO: 2830135 - RNA, 19 nt, Artificial Sequence
  Description of Artificial Sequence: Synthetic oligonucleotide
uucuucagaagacauggca

SEQ ID NO: 2830136 - RNA, 19 nt, Artificial Sequence
  Description of Artificial Sequence: Synthetic oligonucleotide
cauuaugugugcaugcccc

SEQ ID NO: 2830137 - RNA, 19 nt, Artificial Sequence
  Description of Artificial Sequence: Synthetic oligonucleotide
accgcccauauccauaucc

SEQ ID NO: 2830138 - RNA, 19 nt, Artificial Sequence
  Description of Artificial Sequence: Synthetic oligonucleotide
ucauaauugucucuguaau

SEQ ID NO: 2830139 - RNA, 19 nt, Artificial Sequence
  Description of Artificial Sequence: Synthetic oligonucleotide
ugaaguggucuucaagugc

SEQ ID NO: 2830140 - RNA, 19 nt, Artificial Sequence
  Description of Artificial Sequence: Synthetic oligonucleotide
ccauauauccuccaggucg

SEQ ID NO: 2830141 - RNA, 19 nt, Artificial Sequence
  Description of Artificial Sequence: Synthetic oligonucleotide
uccauauccauauauccuc

SEQ ID NO: 2830142 - RNA, 19 nt, Artificial Sequence
  Description of Artificial Sequence: Synthetic oligonucleotide
ucuucagaagacauggcaa

SEQ ID NO: 2830143 - RNA, 19 nt, Artificial Sequence
  Description of Artificial Sequence: Synthetic oligonucleotide
cucuggaccgcccauaucc

SEQ ID NO: 2830144 - RNA, 19 nt, Artificial Sequence
  Description of Artificial Sequence: Synthetic oligonucleotide
ucuguaauuuccuccugag

SEQ ID NO: 2830145 - RNA, 19 nt, Artificial Sequence
  Description of Artificial Sequence: Synthetic oligonucleotide
ucuacauuaugugugcaug

SEQ ID NO: 2830146 - RNA, 19 nt, Artificial Sequence
  Description of Artificial Sequence: Synthetic oligonucleotide
guaauuuccuccugaguag

SEQ ID NO: 2830147 - RNA, 19 nt, Artificial Sequence
  Description of Artificial Sequence: Synthetic oligonucleotide
ugucauaucuuccgcuucc

SEQ ID NO: 2830148 - RNA, 19 nt, Artificial Sequence
  Description of Artificial Sequence: Synthetic oligonucleotide
auauccuccaggucgacug

SEQ ID NO: 2830149 - RNA, 19 nt, Artificial Sequence
  Description of Artificial Sequence: Synthetic oligonucleotide
ugucucuguaauuuccucc

SEQ ID NO: 2830150 - RNA, 19 nt, Artificial Sequence
  Description of Artificial Sequence: Synthetic oligonucleotide
cuugacaacaaccaccuca

SEQ ID NO: 2830151 - RNA, 19 nt, Artificial Sequence
  Description of Artificial Sequence: Synthetic oligonucleotide
uccuugacaacaaccaccu

SEQ ID NO: 2830152 - RNA, 19 nt, Artificial Sequence
  Description of Artificial Sequence: Synthetic oligonucleotide
ggaucuuugagucucccgg

SEQ ID NO: 2830153 - RNA, 19 nt, Artificial Sequence
  Description of Artificial Sequence: Synthetic oligonucleotide
cacuauagucucuggaccg

SEQ ID NO: 2830154 - RNA, 19 nt, Artificial Sequence
  Description of Artificial Sequence: Synthetic oligonucleotide
aaagcugcugaaguggucu

SEQ ID NO: 2830155 - RNA, 19 nt, Artificial Sequence
  Description of Artificial Sequence: Synthetic oligonucleotide
gaagacauggcaaaaugca

SEQ ID NO: 2830156 - RNA, 19 nt, Artificial Sequence
  Description of Artificial Sequence: Synthetic oligonucleotide
cucuagaguagcuucgacc

SEQ ID NO: 2830157 - RNA, 19 nt, Artificial Sequence
  Description of Artificial Sequence: Synthetic oligonucleotide
gaaguggucuucaagugcc

SEQ ID NO: 2830158 - RNA, 19 nt, Artificial Sequence
  Description of Artificial Sequence: Synthetic oligonucleotide
ucucaguugucauaauugu

SEQ ID NO: 2830159 - RNA, 19 nt, Artificial Sequence
  Description of Artificial Sequence: Synthetic oligonucleotide
aucuuccgcuuccauagcc

SEQ ID NO: 2830160 - RNA, 19 nt, Artificial Sequence
  Description of Artificial Sequence: Synthetic oligonucleotide
ucgaccacgcccaugggcc

SEQ ID NO: 2830161 - RNA, 19 nt, Artificial Sequence
  Description of Artificial Sequence: Synthetic oligonucleotide
ugaaguugagcccucccac

SEQ ID NO: 2830162 - RNA, 19 nt, Artificial Sequence
  Description of Artificial Sequence: Synthetic oligonucleotide
auauccauauccauauauc

SEQ ID NO: 2830163 - RNA, 19 nt, Artificial Sequence
  Description of Artificial Sequence: Synthetic oligonucleotide
guugucauaauugucucug

SEQ ID NO: 2830164 - RNA, 19 nt, Artificial Sequence
  Description of Artificial Sequence: Synthetic oligonucleotide
uggcaaaaugcaaauccug

SEQ ID NO: 2830165 - RNA, 19 nt, Artificial Sequence
  Description of Artificial Sequence: Synthetic oligonucleotide
gaaguugagcccucccacg

SEQ ID NO: 2830166 - RNA, 19 nt, Artificial Sequence
  Description of Artificial Sequence: Synthetic oligonucleotide
auaauugucucuguaauuu

SEQ ID NO: 2830167 - RNA, 19 nt, Artificial Sequence
  Description of Artificial Sequence: Synthetic oligonucleotide
uagaguagcuucgaccacg

SEQ ID NO: 2830168 - RNA, 19 nt, Artificial Sequence
  Description of Artificial Sequence: Synthetic oligonucleotide
auauccauauauccuccag

SEQ ID NO: 2830169 - RNA, 19 nt, Artificial Sequence
  Description of Artificial Sequence: Synthetic oligonucleotide
ggugaugaagccaaaaccc

SEQ ID NO: 2830170 - RNA, 19 nt, Artificial Sequence
  Description of Artificial Sequence: Synthetic oligonucleotide
uugaaguugagcccuccca

SEQ ID NO: 2830171 - RNA, 19 nt, Artificial Sequence
  Description of Artificial Sequence: Synthetic oligonucleotide
cuacauuaugugugcaugc

SEQ ID NO: 2830172 - RNA, 19 nt, Artificial Sequence
  Description of Artificial Sequence: Synthetic oligonucleotide
ugugcaugccccaucucag

SEQ ID NO: 2830173 - RNA, 19 nt, Artificial Sequence
  Description of Artificial Sequence: Synthetic oligonucleotide
cucucauggcaucugaggc

SEQ ID NO: 2830174 - RNA, 19 nt, Artificial Sequence
  Description of Artificial Sequence: Synthetic oligonucleotide
agacuugccugcauggucc

SEQ ID NO: 2830175 - RNA, 19 nt, Artificial Sequence
  Description of Artificial Sequence: Synthetic oligonucleotide
ucuuugagucucccggucc

SEQ ID NO: 2830176 - RNA, 19 nt, Artificial Sequence
  Description of Artificial Sequence: Synthetic oligonucleotide
ucaagugccugcucaucgg

SEQ ID NO: 2830177 - RNA, 19 nt, Artificial Sequence
  Description of Artificial Sequence: Synthetic oligonucleotide
ugaggcaugcucuggguug

SEQ ID NO: 2830178 - RNA, 19 nt, Artificial Sequence
  Description of Artificial Sequence: Synthetic oligonucleotide
uccaccaccucuagaguag

SEQ ID NO: 2830179 - RNA, 19 nt, Artificial Sequence
  Description of Artificial Sequence: Synthetic oligonucleotide
cuggcuucugccacuauag

SEQ ID NO: 2830180 - RNA, 19 nt, Artificial Sequence
  Description of Artificial Sequence: Synthetic oligonucleotide
aucgguguugaaguugagc

SEQ ID NO: 2830181 - RNA, 19 nt, Artificial Sequence
  Description of Artificial Sequence: Synthetic oligonucleotide
aucucaguugucauaauug

SEQ ID NO: 2830182 - RNA, 19 nt, Artificial Sequence
  Description of Artificial Sequence: Synthetic oligonucleotide
aaccacccuggcuucugcc

SEQ ID NO: 2830183 - RNA, 19 nt, Artificial Sequence
  Description of Artificial Sequence: Synthetic oligonucleotide
ugcugaaguggucuucaag

SEQ ID NO: 2830184 - RNA, 19 nt, Artificial Sequence
  Description of Artificial Sequence: Synthetic oligonucleotide
uacauuaugugugcaugcc

SEQ ID NO: 2830185 - RNA, 19 nt, Artificial Sequence
  Description of Artificial Sequence: Synthetic oligonucleotide
gagauaggcccaaagcugc

SEQ ID NO: 2830186 - RNA, 19 nt, Artificial Sequence
  Description of Artificial Sequence: Synthetic oligonucleotide
cagaagacauggcaaaaug

SEQ ID NO: 2830187 - RNA, 19 nt, Artificial Sequence
  Description of Artificial Sequence: Synthetic oligonucleotide
ucuuccgcuuccauagccc

SEQ ID NO: 2830188 - RNA, 19 nt, Artificial Sequence
  Description of Artificial Sequence: Synthetic oligonucleotide
acuauagucucuggaccgc

SEQ ID NO: 2830189 - RNA, 19 nt, Artificial Sequence
  Description of Artificial Sequence: Synthetic oligonucleotide
aaguugagcccucccacga

SEQ ID NO: 2830190 - RNA, 19 nt, Artificial Sequence
  Description of Artificial Sequence: Synthetic oligonucleotide
ggcaaaaugcaaauccugg

SEQ ID NO: 2830191 - RNA, 19 nt, Artificial Sequence
  Description of Artificial Sequence: Synthetic oligonucleotide
guagcggucauaaccaccc

SEQ ID NO: 2830192 - RNA, 19 nt, Artificial Sequence
  Description of Artificial Sequence: Synthetic oligonucleotide
aaccccgggaucuuugagu

SEQ ID NO: 2830193 - RNA, 19 nt, Artificial Sequence
  Description of Artificial Sequence: Synthetic oligonucleotide
agagauaggcccaaagcug

SEQ ID NO: 2830194 - RNA, 19 nt, Artificial Sequence
  Description of Artificial Sequence: Synthetic oligonucleotide
ugucauaauugucucugua

SEQ ID NO: 2830195 - RNA, 19 nt, Artificial Sequence
  Description of Artificial Sequence: Synthetic oligonucleotide
aauuuccuccugaguagcg

SEQ ID NO: 2830196 - RNA, 19 nt, Artificial Sequence
  Description of Artificial Sequence: Synthetic oligonucleotide
ucugccacuauagucucug

SEQ ID NO: 2830197 - RNA, 19 nt, Artificial Sequence
  Description of Artificial Sequence: Synthetic oligonucleotide
uucgaccacgcccaugggc

SEQ ID NO: 2830198 - RNA, 19 nt, Artificial Sequence
  Description of Artificial Sequence: Synthetic oligonucleotide
ccuucuucagaagacaugg

SEQ ID NO: 2830199 - RNA, 19 nt, Artificial Sequence
  Description of Artificial Sequence: Synthetic oligonucleotide
aucuuugagucucccgguc

SEQ ID NO: 2830200 - RNA, 19 nt, Artificial Sequence
  Description of Artificial Sequence: Synthetic oligonucleotide
accccgggaucuuugaguc

SEQ ID NO: 2830201 - RNA, 19 nt, Artificial Sequence
  Description of Artificial Sequence: Synthetic oligonucleotide
uccaggucgacugucauau

SEQ ID NO: 2830202 - RNA, 19 nt, Artificial Sequence
  Description of Artificial Sequence: Synthetic oligonucleotide
uaauuuccuccugaguagc

SEQ ID NO: 2830203 - RNA, 19 nt, Artificial Sequence
  Description of Artificial Sequence: Synthetic oligonucleotide
uaauugucucuguaauuuc

SEQ ID NO: 2830204 - RNA, 19 nt, Artificial Sequence
  Description of Artificial Sequence: Synthetic oligonucleotide
agagcuucccuucuucaga

SEQ ID NO: 2830205 - RNA, 19 nt, Artificial Sequence
  Description of Artificial Sequence: Synthetic oligonucleotide
cugaaguggucuucaagug

SEQ ID NO: 2830206 - RNA, 19 nt, Artificial Sequence
  Description of Artificial Sequence: Synthetic oligonucleotide
gccugcaugguccacacgg

SEQ ID NO: 2830207 - RNA, 19 nt, Artificial Sequence
  Description of Artificial Sequence: Synthetic oligonucleotide
aaaaccccgggaucuuuga

SEQ ID NO: 2830208 - RNA, 19 nt, Artificial Sequence
  Description of Artificial Sequence: Synthetic oligonucleotide
gcuucgaccacgcccaugg

SEQ ID NO: 2830209 - RNA, 19 nt, Artificial Sequence
  Description of Artificial Sequence: Synthetic oligonucleotide
uauagucucuggaccgccc

SEQ ID NO: 2830210 - RNA, 19 nt, Artificial Sequence
  Description of Artificial Sequence: Synthetic oligonucleotide
accaccucagagauaggcc

SEQ ID NO: 2830211 - RNA, 19 nt, Artificial Sequence
  Description of Artificial Sequence: Synthetic oligonucleotide
aaaccccgggaucuuugag

SEQ ID NO: 2830212 - RNA, 19 nt, Artificial Sequence
  Description of Artificial Sequence: Synthetic oligonucleotide
uggugaaggugaugaagcc

SEQ ID NO: 2830213 - RNA, 19 nt, Artificial Sequence
  Description of Artificial Sequence: Synthetic oligonucleotide
ugccacuauagucucugga

SEQ ID NO: 2830214 - RNA, 19 nt, Artificial Sequence
  Description of Artificial Sequence: Synthetic oligonucleotide
guccacacggaucuggcgc

SEQ ID NO: 2830215 - RNA, 19 nt, Artificial Sequence
  Description of Artificial Sequence: Synthetic oligonucleotide
uccgcuuccauagcccugg

SEQ ID NO: 2830216 - RNA, 19 nt, Artificial Sequence
  Description of Artificial Sequence: Synthetic oligonucleotide
cuucccuucuucagaagac

SEQ ID NO: 2830217 - RNA, 19 nt, Artificial Sequence
  Description of Artificial Sequence: Synthetic oligonucleotide
guccuugacaacaaccacc

SEQ ID NO: 2830218 - RNA, 19 nt, Artificial Sequence
  Description of Artificial Sequence: Synthetic oligonucleotide
auuuccuccugaguagcgg

SEQ ID NO: 2830219 - RNA, 19 nt, Artificial Sequence
  Description of Artificial Sequence: Synthetic oligonucleotide
aguugucauaauugucucu

SEQ ID NO: 2830220 - RNA, 19 nt, Artificial Sequence
  Description of Artificial Sequence: Synthetic oligonucleotide
cucaguugucauaauuguc

SEQ ID NO: 2830221 - RNA, 19 nt, Artificial Sequence
  Description of Artificial Sequence: Synthetic oligonucleotide
ugaagccaaaaccccggga

SEQ ID NO: 2830222 - RNA, 19 nt, Artificial Sequence
  Description of Artificial Sequence: Synthetic oligonucleotide
augaagccaaaaccccggg

SEQ ID NO: 2830223 - RNA, 19 nt, Artificial Sequence
  Description of Artificial Sequence: Synthetic oligonucleotide
gugaugaagccaaaacccc

SEQ ID NO: 2830224 - RNA, 19 nt, Artificial Sequence
  Description of Artificial Sequence: Synthetic oligonucleotide
cucagagauaggcccaaag

SEQ ID NO: 2830225 - RNA, 19 nt, Artificial Sequence
  Description of Artificial Sequence: Synthetic oligonucleotide
uucauggcucucauggcau

SEQ ID NO: 2830226 - RNA, 19 nt, Artificial Sequence
  Description of Artificial Sequence: Synthetic oligonucleotide
uuuccuccugaguagcggu

SEQ ID NO: 2830227 - RNA, 19 nt, Artificial Sequence
  Description of Artificial Sequence: Synthetic oligonucleotide
aagacauggcaaaaugcaa

SEQ ID NO: 2830228 - RNA, 19 nt, Artificial Sequence
  Description of Artificial Sequence: Synthetic oligonucleotide
caccucuagaguagcuucg

SEQ ID NO: 2830229 - RNA, 19 nt, Artificial Sequence
  Description of Artificial Sequence: Synthetic oligonucleotide
aucuacauuaugugugcau

SEQ ID NO: 2830230 - RNA, 19 nt, Artificial Sequence
  Description of Artificial Sequence: Synthetic oligonucleotide
auagcccuggucuccacca

SEQ ID NO: 2830231 - RNA, 19 nt, Artificial Sequence
  Description of Artificial Sequence: Synthetic oligonucleotide
ugagcccucccacgaagag

SEQ ID NO: 2830232 - RNA, 19 nt, Artificial Sequence
  Description of Artificial Sequence: Synthetic oligonucleotide
auuaugugugcaugcccca

SEQ ID NO: 2830233 - RNA, 19 nt, Artificial Sequence
  Description of Artificial Sequence: Synthetic oligonucleotide
agaguagcuucgaccacgc

SEQ ID NO: 2830234 - RNA, 19 nt, Artificial Sequence
  Description of Artificial Sequence: Synthetic oligonucleotide
ucagaagacauggcaaaau

SEQ ID NO: 2830235 - RNA, 19 nt, Artificial Sequence
  Description of Artificial Sequence: Synthetic oligonucleotide
agugccugcucaucggugu

SEQ ID NO: 2830236 - RNA, 19 nt, Artificial Sequence
  Description of Artificial Sequence: Synthetic oligonucleotide
auccauauccauauauccu

SEQ ID NO: 2830237 - RNA, 19 nt, Artificial Sequence
  Description of Artificial Sequence: Synthetic oligonucleotide
guugagcccucccacgaag

SEQ ID NO: 2830238 - RNA, 19 nt, Artificial Sequence
  Description of Artificial Sequence: Synthetic oligonucleotide
acugucauaucuuccgcuu

SEQ ID NO: 2830239 - RNA, 19 nt, Artificial Sequence
  Description of Artificial Sequence: Synthetic oligonucleotide
cauauauccuccaggucga

SEQ ID NO: 2830240 - RNA, 19 nt, Artificial Sequence
  Description of Artificial Sequence: Synthetic oligonucleotide
auaggcccaaagcugcuga

SEQ ID NO: 2830241 - RNA, 19 nt, Artificial Sequence
  Description of Artificial Sequence: Synthetic oligonucleotide
gaagagcuucccuucuuca

SEQ ID NO: 2830242 - RNA, 19 nt, Artificial Sequence
  Description of Artificial Sequence: Synthetic oligonucleotide
uccauauauccuccagguc

SEQ ID NO: 2830243 - RNA, 19 nt, Artificial Sequence
  Description of Artificial Sequence: Synthetic oligonucleotide
ugcaugguccacacggauc

SEQ ID NO: 2830244 - RNA, 19 nt, Artificial Sequence
  Description of Artificial Sequence: Synthetic oligonucleotide
ucucuguaauuuccuccug

SEQ ID NO: 2830245 - RNA, 19 nt, Artificial Sequence
  Description of Artificial Sequence: Synthetic oligonucleotide
cuucuucagaagacauggc

SEQ ID NO: 2830246 - RNA, 19 nt, Artificial Sequence
  Description of Artificial Sequence: Synthetic oligonucleotide
guugaaguugagcccuccc

SEQ ID NO: 2830247 - RNA, 19 nt, Artificial Sequence
  Description of Artificial Sequence: Synthetic oligonucleotide
cauggcaucugaggcaugc

SEQ ID NO: 2830248 - RNA, 19 nt, Artificial Sequence
  Description of Artificial Sequence: Synthetic oligonucleotide
gucauaaccacccuggcuu

SEQ ID NO: 2830249 - RNA, 19 nt, Artificial Sequence
  Description of Artificial Sequence: Synthetic oligonucleotide
uccacacggaucuggcgcc

SEQ ID NO: 2830250 - RNA, 19 nt, Artificial Sequence
  Description of Artificial Sequence: Synthetic oligonucleotide
ucuccauucauggcucuca

SEQ ID NO: 2830251 - RNA, 19 nt, Artificial Sequence
  Description of Artificial Sequence: Synthetic oligonucleotide
gcucucauggcaucugagg

SEQ ID NO: 2830252 - RNA, 19 nt, Artificial Sequence
  Description of Artificial Sequence: Synthetic oligonucleotide
guggucuucaagugccugc

SEQ ID NO: 2830253 - RNA, 19 nt, Artificial Sequence
  Description of Artificial Sequence: Synthetic oligonucleotide
gucuucaagugccugcuca

SEQ ID NO: 2830254 - RNA, 19 nt, Artificial Sequence
  Description of Artificial Sequence: Synthetic oligonucleotide
cuucagaagacauggcaaa

SEQ ID NO: 2830255 - RNA, 19 nt, Artificial Sequence
  Description of Artificial Sequence: Synthetic oligonucleotide
augugugcaugccccaucu

SEQ ID NO: 2830256 - RNA, 19 nt, Artificial Sequence
  Description of Artificial Sequence: Synthetic oligonucleotide
uccugaguagcggucauaa

SEQ ID NO: 2830257 - RNA, 19 nt, Artificial Sequence
  Description of Artificial Sequence: Synthetic oligonucleotide
uaugugugcaugccccauc

SEQ ID NO: 2830258 - RNA, 19 nt, Artificial Sequence
  Description of Artificial Sequence: Synthetic oligonucleotide
guagcuucgaccacgccca

SEQ ID NO: 2830259 - RNA, 19 nt, Artificial Sequence
  Description of Artificial Sequence: Synthetic oligonucleotide
ggaucuggcgcccauccag

SEQ ID NO: 2830260 - RNA, 19 nt, Artificial Sequence
  Description of Artificial Sequence: Synthetic oligonucleotide
agcggucauaaccacccug

SEQ ID NO: 2830261 - RNA, 19 nt, Artificial Sequence
  Description of Artificial Sequence: Synthetic oligonucleotide
acgcccaugggccccaaag

SEQ ID NO: 2830262 - RNA, 19 nt, Artificial Sequence
  Description of Artificial Sequence: Synthetic oligonucleotide
auggcaaaaugcaaauccu

SEQ ID NO: 2830263 - RNA, 19 nt, Artificial Sequence
  Description of Artificial Sequence: Synthetic oligonucleotide
ucccuucuucagaagacau

SEQ ID NO: 2830264 - RNA, 19 nt, Artificial Sequence
  Description of Artificial Sequence: Synthetic oligonucleotide
gaucuggcgcccauccagg

SEQ ID NO: 2830265 - RNA, 19 nt, Artificial Sequence
  Description of Artificial Sequence: Synthetic oligonucleotide
agacauggcaaaaugcaaa

SEQ ID NO: 2830266 - RNA, 19 nt, Artificial Sequence
  Description of Artificial Sequence: Synthetic oligonucleotide
gccacuauagucucuggac

SEQ ID NO: 2830267 - RNA, 19 nt, Artificial Sequence
  Description of Artificial Sequence: Synthetic oligonucleotide
ucuucaagugccugcucau

SEQ ID NO: 2830268 - RNA, 19 nt, Artificial Sequence
  Description of Artificial Sequence: Synthetic oligonucleotide
ucuggaccgcccauaucca

SEQ ID NO: 2830269 - RNA, 19 nt, Artificial Sequence
  Description of Artificial Sequence: Synthetic oligonucleotide
ugguccacacggaucuggc

SEQ ID NO: 2830270 - RNA, 19 nt, Artificial Sequence
  Description of Artificial Sequence: Synthetic oligonucleotide
gugugcaugccccaucuca

SEQ ID NO: 2830271 - RNA, 19 nt, Artificial Sequence
  Description of Artificial Sequence: Synthetic oligonucleotide
auagucucuggaccgccca

SEQ ID NO: 2830272 - RNA, 19 nt, Artificial Sequence
  Description of Artificial Sequence: Synthetic oligonucleotide
auugucucuguaauuuccu

SEQ ID NO: 2830273 - RNA, 19 nt, Artificial Sequence
  Description of Artificial Sequence: Synthetic oligonucleotide
caaaaccccgggaucuuug

SEQ ID NO: 2830274 - RNA, 19 nt, Artificial Sequence
  Description of Artificial Sequence: Synthetic oligonucleotide
uggcaucugaggcaugcuc

SEQ ID NO: 2830275 - RNA, 19 nt, Artificial Sequence
  Description of Artificial Sequence: Synthetic oligonucleotide
uucccuucuucagaagaca

SEQ ID NO: 2830276 - RNA, 19 nt, Artificial Sequence
  Description of Artificial Sequence: Synthetic oligonucleotide
ggcagacuugccugcaugg

SEQ ID NO: 2830277 - RNA, 19 nt, Artificial Sequence
  Description of Artificial Sequence: Synthetic oligonucleotide
cagagauaggcccaaagcu

SEQ ID NO: 2830278 - RNA, 19 nt, Artificial Sequence
  Description of Artificial Sequence: Synthetic oligonucleotide
uucagaagacauggcaaaa

SEQ ID NO: 2830279 - RNA, 19 nt, Artificial Sequence
  Description of Artificial Sequence: Synthetic oligonucleotide
ucugaggcaugcucugggu

SEQ ID NO: 2830280 - RNA, 19 nt, Artificial Sequence
  Description of Artificial Sequence: Synthetic oligonucleotide
uaucuuccgcuuccauagc

SEQ ID NO: 2830281 - RNA, 19 nt, Artificial Sequence
  Description of Artificial Sequence: Synthetic oligonucleotide
gaggcaugcucuggguugg

SEQ ID NO: 2830282 - RNA, 19 nt, Artificial Sequence
  Description of Artificial Sequence: Synthetic oligonucleotide
cugcucaucgguguugaag

SEQ ID NO: 2830283 - RNA, 19 nt, Artificial Sequence
  Description of Artificial Sequence: Synthetic oligonucleotide
uugagcccucccacgaaga

SEQ ID NO: 2830284 - RNA, 19 nt, Artificial Sequence
  Description of Artificial Sequence: Synthetic oligonucleotide
augguccacacggaucugg

SEQ ID NO: 2830285 - RNA, 19 nt, Artificial Sequence
  Description of Artificial Sequence: Synthetic oligonucleotide
gugaaggugaugaagccaa

SEQ ID NO: 2830286 - RNA, 19 nt, Artificial Sequence
  Description of Artificial Sequence: Synthetic oligonucleotide
ccaccucagagauaggccc

SEQ ID NO: 2830287 - RNA, 19 nt, Artificial Sequence
  Description of Artificial Sequence: Synthetic oligonucleotide
cuggcgcccauccagggac

SEQ ID NO: 2830288 - RNA, 19 nt, Artificial Sequence
  Description of Artificial Sequence: Synthetic oligonucleotide
gcaaaaugcaaauccugga

SEQ ID NO: 2830289 - RNA, 19 nt, Artificial Sequence
  Description of Artificial Sequence: Synthetic oligonucleotide
ucauaaccacccuggcuuc

SEQ ID NO: 2830290 - RNA, 19 nt, Artificial Sequence
  Description of Artificial Sequence: Synthetic oligonucleotide
ccacuauagucucuggacc

SEQ ID NO: 2830291 - RNA, 19 nt, Artificial Sequence
  Description of Artificial Sequence: Synthetic oligonucleotide
ucauaucuuccgcuuccau

SEQ ID NO: 2830292 - RNA, 19 nt, Artificial Sequence
  Description of Artificial Sequence: Synthetic oligonucleotide
cauaucuuccgcuuccaua

SEQ ID NO: 2830293 - RNA, 19 nt, Artificial Sequence
  Description of Artificial Sequence: Synthetic oligonucleotide
agccaaaaccccgggaucu

SEQ ID NO: 2830294 - RNA, 19 nt, Artificial Sequence
  Description of Artificial Sequence: Synthetic oligonucleotide
uguugaaguugagcccucc

SEQ ID NO: 2830295 - RNA, 19 nt, Artificial Sequence
  Description of Artificial Sequence: Synthetic oligonucleotide
uggucuucaagugccugcu

SEQ ID NO: 2830296 - RNA, 19 nt, Artificial Sequence
  Description of Artificial Sequence: Synthetic oligonucleotide
gcugaaguggucuucaagu

SEQ ID NO: 2830297 - RNA, 19 nt, Artificial Sequence
  Description of Artificial Sequence: Synthetic oligonucleotide
cauagcccuggucuccacc

SEQ ID NO: 2830298 - RNA, 19 nt, Artificial Sequence
  Description of Artificial Sequence: Synthetic oligonucleotide
uaaccacccuggcuucugc

SEQ ID NO: 2830299 - RNA, 19 nt, Artificial Sequence
  Description of Artificial Sequence: Synthetic oligonucleotide
cucuguaauuuccuccuga

SEQ ID NO: 2830300 - RNA, 19 nt, Artificial Sequence
  Description of Artificial Sequence: Synthetic oligonucleotide
uauauccuccaggucgacu

SEQ ID NO: 2830301 - RNA, 19 nt, Artificial Sequence
  Description of Artificial Sequence: Synthetic oligonucleotide
cuauagucucuggaccgcc

SEQ ID NO: 2830302 - RNA, 19 nt, Artificial Sequence
  Description of Artificial Sequence: Synthetic oligonucleotide
cuucugccacuauagucuc

SEQ ID NO: 2830303 - RNA, 19 nt, Artificial Sequence
  Description of Artificial Sequence: Synthetic oligonucleotide
gauaggcccaaagcugcug

SEQ ID NO: 2830304 - RNA, 19 nt, Artificial Sequence
  Description of Artificial Sequence: Synthetic oligonucleotide
ucuggcgcccauccaggga

SEQ ID NO: 2830305 - RNA, 19 nt, Artificial Sequence
  Description of Artificial Sequence: Synthetic oligonucleotide
ugcaugccccaucucaguu

SEQ ID NO: 2830306 - RNA, 19 nt, Artificial Sequence
  Description of Artificial Sequence: Synthetic oligonucleotide
gcggucauaaccacccugg

SEQ ID NO: 2830307 - RNA, 19 nt, Artificial Sequence
  Description of Artificial Sequence: Synthetic oligonucleotide
uggcucucauggcaucuga

SEQ ID NO: 2830308 - RNA, 19 nt, Artificial Sequence
  Description of Artificial Sequence: Synthetic oligonucleotide
gggaucuuugagucucccg

SEQ ID NO: 2830309 - RNA, 19 nt, Artificial Sequence
  Description of Artificial Sequence: Synthetic oligonucleotide
uggucuccaccaccucuag

SEQ ID NO: 2830310 - RNA, 19 nt, Artificial Sequence
  Description of Artificial Sequence: Synthetic oligonucleotide
cauauccauauauccucca

SEQ ID NO: 2830311 - RNA, 19 nt, Artificial Sequence
  Description of Artificial Sequence: Synthetic oligonucleotide
aucuggcgcccauccaggg

SEQ ID NO: 2830312 - RNA, 19 nt, Artificial Sequence
  Description of Artificial Sequence: Synthetic oligonucleotide
ugagucucccgguccuuga

SEQ ID NO: 2830313 - RNA, 19 nt, Artificial Sequence
  Description of Artificial Sequence: Synthetic oligonucleotide
cuagaguagcuucgaccac

SEQ ID NO: 2830314 - RNA, 19 nt, Artificial Sequence
  Description of Artificial Sequence: Synthetic oligonucleotide
gaguagcggucauaaccac

SEQ ID NO: 2830315 - RNA, 19 nt, Artificial Sequence
  Description of Artificial Sequence: Synthetic oligonucleotide
cugucauaucuuccgcuuc

SEQ ID NO: 2830316 - RNA, 19 nt, Artificial Sequence
  Description of Artificial Sequence: Synthetic oligonucleotide
uccccgggcagacuugccu

SEQ ID NO: 2830317 - RNA, 19 nt, Artificial Sequence
  Description of Artificial Sequence: Synthetic oligonucleotide
gagcuucccuucuucagaa

SEQ ID NO: 2830318 - RNA, 19 nt, Artificial Sequence
  Description of Artificial Sequence: Synthetic oligonucleotide
gucgacugucauaucuucc

SEQ ID NO: 2830319 - RNA, 19 nt, Artificial Sequence
  Description of Artificial Sequence: Synthetic oligonucleotide
ugaaggugaugaagccaaa

SEQ ID NO: 2830320 - RNA, 19 nt, Artificial Sequence
  Description of Artificial Sequence: Synthetic oligonucleotide
cccaaagcugcugaagugg

SEQ ID NO: 2830321 - RNA, 19 nt, Artificial Sequence
  Description of Artificial Sequence: Synthetic oligonucleotide
uggaccgcccauauccaua

SEQ ID NO: 2830322 - RNA, 19 nt, Artificial Sequence
  Description of Artificial Sequence: Synthetic oligonucleotide
gaaggugaugaagccaaaa

SEQ ID NO: 2830323 - RNA, 19 nt, Artificial Sequence
  Description of Artificial Sequence: Synthetic oligonucleotide
ucugcuuccccgggcagac

SEQ ID NO: 2830324 - RNA, 19 nt, Artificial Sequence
  Description of Artificial Sequence: Synthetic oligonucleotide
uggcuucugccacuauagu

SEQ ID NO: 2830325 - RNA, 19 nt, Artificial Sequence
  Description of Artificial Sequence: Synthetic oligonucleotide
ugacaacaaccaccucaga

SEQ ID NO: 2830326 - RNA, 19 nt, Artificial Sequence
  Description of Artificial Sequence: Synthetic oligonucleotide
gacugucauaucuuccgcu

SEQ ID NO: 2830327 - RNA, 19 nt, Artificial Sequence
  Description of Artificial Sequence: Synthetic oligonucleotide
uuccgcuuccauagcccug

SEQ ID NO: 2830328 - RNA, 19 nt, Artificial Sequence
  Description of Artificial Sequence: Synthetic oligonucleotide
ugcuuccccgggcagacuu

SEQ ID NO: 2830329 - RNA, 19 nt, Artificial Sequence
  Description of Artificial Sequence: Synthetic oligonucleotide
uugagucucccgguccuug

SEQ ID NO: 2830330 - RNA, 19 nt, Artificial Sequence
  Description of Artificial Sequence: Synthetic oligonucleotide
agucucccgguccuugaca

SEQ ID NO: 2830331 - RNA, 19 nt, Artificial Sequence
  Description of Artificial Sequence: Synthetic oligonucleotide
gaucuuugagucucccggu

SEQ ID NO: 2830332 - RNA, 19 nt, Artificial Sequence
  Description of Artificial Sequence: Synthetic oligonucleotide
uccuccugaguagcgguca

SEQ ID NO: 2830333 - RNA, 19 nt, Artificial Sequence
  Description of Artificial Sequence: Synthetic oligonucleotide
aagugccugcucaucggug

SEQ ID NO: 2830334 - RNA, 19 nt, Artificial Sequence
  Description of Artificial Sequence: Synthetic oligonucleotide
auauauccuccaggucgac

SEQ ID NO: 2830335 - RNA, 19 nt, Artificial Sequence
  Description of Artificial Sequence: Synthetic oligonucleotide
caaagcugcugaagugguc

SEQ ID NO: 2830336 - RNA, 19 nt, Artificial Sequence
  Description of Artificial Sequence: Synthetic oligonucleotide
uuaugugugcaugccccau

SEQ ID NO: 2830337 - RNA, 19 nt, Artificial Sequence
  Description of Artificial Sequence: Synthetic oligonucleotide
caucugaggcaugcucugg

SEQ ID NO: 2830338 - RNA, 19 nt, Artificial Sequence
  Description of Artificial Sequence: Synthetic oligonucleotide
gguccuugacaacaaccac

SEQ ID NO: 2830339 - RNA, 19 nt, Artificial Sequence
  Description of Artificial Sequence: Synthetic oligonucleotide
auaaccacccuggcuucug

SEQ ID NO: 2830340 - RNA, 19 nt, Artificial Sequence
  Description of Artificial Sequence: Synthetic oligonucleotide
uuccuccugaguagcgguc

SEQ ID NO: 2830341 - RNA, 19 nt, Artificial Sequence
  Description of Artificial Sequence: Synthetic oligonucleotide
ccgguccuugacaacaacc

SEQ ID NO: 2830342 - RNA, 19 nt, Artificial Sequence
  Description of Artificial Sequence: Synthetic oligonucleotide
agcugcugaaguggucuuc

SEQ ID NO: 2830343 - RNA, 19 nt, Artificial Sequence
  Description of Artificial Sequence: Synthetic oligonucleotide
cugccacuauagucucugg

SEQ ID NO: 2830344 - RNA, 19 nt, Artificial Sequence
  Description of Artificial Sequence: Synthetic oligonucleotide
uucugccacuauagucucu

SEQ ID NO: 2830345 - RNA, 19 nt, Artificial Sequence
  Description of Artificial Sequence: Synthetic oligonucleotide
aagcugcugaaguggucuu

SEQ ID NO: 2830346 - RNA, 19 nt, Artificial Sequence
  Description of Artificial Sequence: Synthetic oligonucleotide
gguccacacggaucuggcg

SEQ ID NO: 2830347 - RNA, 19 nt, Artificial Sequence
  Description of Artificial Sequence: Synthetic oligonucleotide
gcuucugccacuauagucu

SEQ ID NO: 2830348 - RNA, 19 nt, Artificial Sequence
  Description of Artificial Sequence: Synthetic oligonucleotide
ugccugcaugguccacacg

SEQ ID NO: 2830349 - RNA, 19 nt, Artificial Sequence
  Description of Artificial Sequence: Synthetic oligonucleotide
gcccaugggccccaaaggc

SEQ ID NO: 2830350 - RNA, 19 nt, Artificial Sequence
  Description of Artificial Sequence: Synthetic oligonucleotide
gagucucccgguccuugac

SEQ ID NO: 2830351 - RNA, 19 nt, Artificial Sequence
  Description of Artificial Sequence: Synthetic oligonucleotide
ugugugcaugccccaucuc

SEQ ID NO: 2830352 - RNA, 19 nt, Artificial Sequence
  Description of Artificial Sequence: Synthetic oligonucleotide
aguugagcccucccacgaa

SEQ ID NO: 2830353 - RNA, 19 nt, Artificial Sequence
  Description of Artificial Sequence: Synthetic oligonucleotide
cauaauugucucuguaauu

SEQ ID NO: 2830354 - RNA, 19 nt, Artificial Sequence
  Description of Artificial Sequence: Synthetic oligonucleotide
caggucgacugucauaucu

SEQ ID NO: 2830355 - RNA, 19 nt, Artificial Sequence
  Description of Artificial Sequence: Synthetic oligonucleotide
caugggccccaaaggcacc

SEQ ID NO: 2830356 - RNA, 19 nt, Artificial Sequence
  Description of Artificial Sequence: Synthetic oligonucleotide
ggucgacugucauaucuuc

SEQ ID NO: 2830357 - RNA, 19 nt, Artificial Sequence
  Description of Artificial Sequence: Synthetic oligonucleotide
gcaucugaggcaugcucug

SEQ ID NO: 2830358 - RNA, 19 nt, Artificial Sequence
  Description of Artificial Sequence: Synthetic oligonucleotide
ggugaaggugaugaagcca

SEQ ID NO: 2830359 - RNA, 19 nt, Artificial Sequence
  Description of Artificial Sequence: Synthetic oligonucleotide
uagucucuggaccgcccau

SEQ ID NO: 2830360 - RNA, 19 nt, Artificial Sequence
  Description of Artificial Sequence: Synthetic oligonucleotide
gggacucuccauucauggc

SEQ ID NO: 2830361 - RNA, 19 nt, Artificial Sequence
  Description of Artificial Sequence: Synthetic oligonucleotide
cuucaagugccugcucauc

SEQ ID NO: 2830362 - RNA, 19 nt, Artificial Sequence
  Description of Artificial Sequence: Synthetic oligonucleotide
ccaugggccccaaaggcac

SEQ ID NO: 2830363 - RNA, 19 nt, Artificial Sequence
  Description of Artificial Sequence: Synthetic oligonucleotide
acucuccauucauggcucu

SEQ ID NO: 2830364 - RNA, 19 nt, Artificial Sequence
  Description of Artificial Sequence: Synthetic oligonucleotide
gguguugaaguugagcccu

SEQ ID NO: 2830365 - RNA, 19 nt, Artificial Sequence
  Description of Artificial Sequence: Synthetic oligonucleotide
ccaccucuagaguagcuuc

SEQ ID NO: 2830366 - RNA, 19 nt, Artificial Sequence
  Description of Artificial Sequence: Synthetic oligonucleotide
ucucuggaccgcccauauc

SEQ ID NO: 2830367 - RNA, 19 nt, Artificial Sequence
  Description of Artificial Sequence: Synthetic oligonucleotide
caacaaccaccucagagau

SEQ ID NO: 2830368 - RNA, 19 nt, Artificial Sequence
  Description of Artificial Sequence: Synthetic oligonucleotide
cuccaccaccucuagagua

SEQ ID NO: 2830369 - RNA, 19 nt, Artificial Sequence
  Description of Artificial Sequence: Synthetic oligonucleotide
gaguagcuucgaccacgcc

SEQ ID NO: 2830370 - RNA, 19 nt, Artificial Sequence
  Description of Artificial Sequence: Synthetic oligonucleotide
cuugccugcaugguccaca

SEQ ID NO: 2830371 - RNA, 19 nt, Artificial Sequence
  Description of Artificial Sequence: Synthetic oligonucleotide
accucuagaguagcuucga

SEQ ID NO: 2830372 - RNA, 19 nt, Artificial Sequence
  Description of Artificial Sequence: Synthetic oligonucleotide
auccuccaggucgacuguc

SEQ ID NO: 2830373 - RNA, 19 nt, Artificial Sequence
  Description of Artificial Sequence: Synthetic oligonucleotide
uaggcccaaagcugcugaa

SEQ ID NO: 2830374 - RNA, 19 nt, Artificial Sequence
  Description of Artificial Sequence: Synthetic oligonucleotide
cuuccccgggcagacuugc

SEQ ID NO: 2830375 - RNA, 19 nt, Artificial Sequence
  Description of Artificial Sequence: Synthetic oligonucleotide
ucauggcaucugaggcaug

SEQ ID NO: 2830376 - RNA, 19 nt, Artificial Sequence
  Description of Artificial Sequence: Synthetic oligonucleotide
accaccucuagaguagcuu

SEQ ID NO: 2830377 - RNA, 19 nt, Artificial Sequence
  Description of Artificial Sequence: Synthetic oligonucleotide
ucccgguccuugacaacaa

SEQ ID NO: 2830378 - RNA, 19 nt, Artificial Sequence
  Description of Artificial Sequence: Synthetic oligonucleotide
acgaagagcuucccuucuu

SEQ ID NO: 2830379 - RNA, 19 nt, Artificial Sequence
  Description of Artificial Sequence: Synthetic oligonucleotide
cucccgguccuugacaaca

SEQ ID NO: 2830380 - RNA, 19 nt, Artificial Sequence
  Description of Artificial Sequence: Synthetic oligonucleotide
gacuugccugcauggucca

SEQ ID NO: 2830381 - RNA, 19 nt, Artificial Sequence
  Description of Artificial Sequence: Synthetic oligonucleotide
ccucccacgaagagcuucc

SEQ ID NO: 2830382 - RNA, 19 nt, Artificial Sequence
  Description of Artificial Sequence: Synthetic oligonucleotide
gcaugccccaucucaguug

SEQ ID NO: 2830383 - RNA, 19 nt, Artificial Sequence
  Description of Artificial Sequence: Synthetic oligonucleotide
cuucgaccacgcccauggg

SEQ ID NO: 2830384 - RNA, 19 nt, Artificial Sequence
  Description of Artificial Sequence: Synthetic oligonucleotide
caucgguguugaaguugag

SEQ ID NO: 2830385 - RNA, 19 nt, Artificial Sequence
  Description of Artificial Sequence: Synthetic oligonucleotide
ugccugcucaucgguguug

SEQ ID NO: 2830386 - RNA, 19 nt, Artificial Sequence
  Description of Artificial Sequence: Synthetic oligonucleotide
auggcucucauggcaucug

SEQ ID NO: 2830387 - RNA, 19 nt, Artificial Sequence
  Description of Artificial Sequence: Synthetic oligonucleotide
ucucccgguccuugacaac

SEQ ID NO: 2830388 - RNA, 19 nt, Artificial Sequence
  Description of Artificial Sequence: Synthetic oligonucleotide
acuugccugcaugguccac

SEQ ID NO: 2830389 - RNA, 19 nt, Artificial Sequence
  Description of Artificial Sequence: Synthetic oligonucleotide
gggcagacuugccugcaug

SEQ ID NO: 2830390 - RNA, 19 nt, Artificial Sequence
  Description of Artificial Sequence: Synthetic oligonucleotide
caugccccaucucaguugu

SEQ ID NO: 2830391 - RNA, 19 nt, Artificial Sequence
  Description of Artificial Sequence: Synthetic oligonucleotide
caucucaguugucauaauu

SEQ ID NO: 2830392 - RNA, 19 nt, Artificial Sequence
  Description of Artificial Sequence: Synthetic oligonucleotide
uuccccgggcagacuugcc

SEQ ID NO: 2830393 - RNA, 19 nt, Artificial Sequence
  Description of Artificial Sequence: Synthetic oligonucleotide
cuggucuccaccaccucua

SEQ ID NO: 2830394 - RNA, 19 nt, Artificial Sequence
  Description of Artificial Sequence: Synthetic oligonucleotide
caaccaccucagagauagg

SEQ ID NO: 2830395 - RNA, 19 nt, Artificial Sequence
  Description of Artificial Sequence: Synthetic oligonucleotide
agauaggcccaaagcugcu

SEQ ID NO: 2830396 - RNA, 19 nt, Artificial Sequence
  Description of Artificial Sequence: Synthetic oligonucleotide
cuguaauuuccuccugagu

SEQ ID NO: 2830397 - RNA, 19 nt, Artificial Sequence
  Description of Artificial Sequence: Synthetic oligonucleotide
augcucuggguuggugaag

SEQ ID NO: 2830398 - RNA, 19 nt, Artificial Sequence
  Description of Artificial Sequence: Synthetic oligonucleotide
cgguguugaaguugagccc

SEQ ID NO: 2830399 - RNA, 19 nt, Artificial Sequence
  Description of Artificial Sequence: Synthetic oligonucleotide
aggucgacugucauaucuu

SEQ ID NO: 2830400 - RNA, 19 nt, Artificial Sequence
  Description of Artificial Sequence: Synthetic oligonucleotide
ggucauaaccacccuggcu

SEQ ID NO: 2830401 - RNA, 19 nt, Artificial Sequence
  Description of Artificial Sequence: Synthetic oligonucleotide
aacaaccaccucagagaua

SEQ ID NO: 2830402 - RNA, 19 nt, Artificial Sequence
  Description of Artificial Sequence: Synthetic oligonucleotide
ccacgaagagcuucccuuc

SEQ ID NO: 2830403 - RNA, 19 nt, Artificial Sequence
  Description of Artificial Sequence: Synthetic oligonucleotide
cccauauccauauccauau

SEQ ID NO: 2830404 - RNA, 19 nt, Artificial Sequence
  Description of Artificial Sequence: Synthetic oligonucleotide
uuugagucucccgguccuu

SEQ ID NO: 2830405 - RNA, 19 nt, Artificial Sequence
  Description of Artificial Sequence: Synthetic oligonucleotide
cuuccgcuuccauagcccu

SEQ ID NO: 2830406 - RNA, 19 nt, Artificial Sequence
  Description of Artificial Sequence: Synthetic oligonucleotide
auggcaucugaggcaugcu

SEQ ID NO: 2830407 - RNA, 19 nt, Artificial Sequence
  Description of Artificial Sequence: Synthetic oligonucleotide
ggcucucauggcaucugag

SEQ ID NO: 2830408 - RNA, 19 nt, Artificial Sequence
  Description of Artificial Sequence: Synthetic oligonucleotide
ggcccaaagcugcugaagu

SEQ ID NO: 2830409 - RNA, 19 nt, Artificial Sequence
  Description of Artificial Sequence: Synthetic oligonucleotide
cucuccauucauggcucuc

SEQ ID NO: 2830410 - RNA, 19 nt, Artificial Sequence
  Description of Artificial Sequence: Synthetic oligonucleotide
gaccacgcccaugggcccc

SEQ ID NO: 2830411 - RNA, 19 nt, Artificial Sequence
  Description of Artificial Sequence: Synthetic oligonucleotide
accucagagauaggcccaa

SEQ ID NO: 2830412 - RNA, 19 nt, Artificial Sequence
  Description of Artificial Sequence: Synthetic oligonucleotide
uggcgcccauccagggacu

SEQ ID NO: 2830413 - RNA, 19 nt, Artificial Sequence
  Description of Artificial Sequence: Synthetic oligonucleotide
agucucuggaccgcccaua

SEQ ID NO: 2830414 - RNA, 19 nt, Artificial Sequence
  Description of Artificial Sequence: Synthetic oligonucleotide
cgacugucauaucuuccgc

SEQ ID NO: 2830415 - RNA, 19 nt, Artificial Sequence
  Description of Artificial Sequence: Synthetic oligonucleotide
cccgggaucuuugagucuc

SEQ ID NO: 2830416 - RNA, 19 nt, Artificial Sequence
  Description of Artificial Sequence: Synthetic oligonucleotide
cccaucucaguugucauaa

SEQ ID NO: 2830417 - RNA, 19 nt, Artificial Sequence
  Description of Artificial Sequence: Synthetic oligonucleotide
acacggaucuggcgcccau

SEQ ID NO: 2830418 - RNA, 19 nt, Artificial Sequence
  Description of Artificial Sequence: Synthetic oligonucleotide
ggcaucugaggcaugcucu

SEQ ID NO: 2830419 - RNA, 19 nt, Artificial Sequence
  Description of Artificial Sequence: Synthetic oligonucleotide
cauccagggacucuccauu

SEQ ID NO: 2830420 - RNA, 19 nt, Artificial Sequence
  Description of Artificial Sequence: Synthetic oligonucleotide
ccucuagaguagcuucgac

SEQ ID NO: 2830421 - RNA, 19 nt, Artificial Sequence
  Description of Artificial Sequence: Synthetic oligonucleotide
cgaagagcuucccuucuuc

SEQ ID NO: 2830422 - RNA, 19 nt, Artificial Sequence
  Description of Artificial Sequence: Synthetic oligonucleotide
agcuucgaccacgcccaug

SEQ ID NO: 2830423 - RNA, 19 nt, Artificial Sequence
  Description of Artificial Sequence: Synthetic oligonucleotide
caagugccugcucaucggu

SEQ ID NO: 2830424 - RNA, 19 nt, Artificial Sequence
  Description of Artificial Sequence: Synthetic oligonucleotide
ccugaguagcggucauaac

SEQ ID NO: 2830425 - RNA, 19 nt, Artificial Sequence
  Description of Artificial Sequence: Synthetic oligonucleotide
caugguccacacggaucug

SEQ ID NO: 2830426 - RNA, 19 nt, Artificial Sequence
  Description of Artificial Sequence: Synthetic oligonucleotide
cuccaggucgacugucaua

SEQ ID NO: 2830427 - RNA, 19 nt, Artificial Sequence
  Description of Artificial Sequence: Synthetic oligonucleotide
gcccauauccauauccaua

SEQ ID NO: 2830428 - RNA, 19 nt, Artificial Sequence
  Description of Artificial Sequence: Synthetic oligonucleotide
cacgaagagcuucccuucu

SEQ ID NO: 2830429 - RNA, 19 nt, Artificial Sequence
  Description of Artificial Sequence: Synthetic oligonucleotide
cccaugggccccaaaggca

SEQ ID NO: 2830430 - RNA, 19 nt, Artificial Sequence
  Description of Artificial Sequence: Synthetic oligonucleotide
guguugaaguugagcccuc

SEQ ID NO: 2830431 - RNA, 19 nt, Artificial Sequence
  Description of Artificial Sequence: Synthetic oligonucleotide
cgcccaugggccccaaagg

SEQ ID NO: 2830432 - RNA, 19 nt, Artificial Sequence
  Description of Artificial Sequence: Synthetic oligonucleotide
gucucuggaccgcccauau

SEQ ID NO: 2830433 - RNA, 19 nt, Artificial Sequence
  Description of Artificial Sequence: Synthetic oligonucleotide
ccgcccauauccauaucca

SEQ ID NO: 2830434 - RNA, 19 nt, Artificial Sequence
  Description of Artificial Sequence: Synthetic oligonucleotide
ggucuucaagugccugcuc

SEQ ID NO: 2830435 - RNA, 19 nt, Artificial Sequence
  Description of Artificial Sequence: Synthetic oligonucleotide
gugcaugccccaucucagu

SEQ ID NO: 2830436 - RNA, 19 nt, Artificial Sequence
  Description of Artificial Sequence: Synthetic oligonucleotide
uagcuucgaccacgcccau

SEQ ID NO: 2830437 - RNA, 19 nt, Artificial Sequence
  Description of Artificial Sequence: Synthetic oligonucleotide
cucugcuuccccgggcaga

SEQ ID NO: 2830438 - RNA, 19 nt, Artificial Sequence
  Description of Artificial Sequence: Synthetic oligonucleotide
gaccgcccauauccauauc

SEQ ID NO: 2830439 - RNA, 19 nt, Artificial Sequence
  Description of Artificial Sequence: Synthetic oligonucleotide
ccccgggcagacuugccug

SEQ ID NO: 2830440 - RNA, 19 nt, Artificial Sequence
  Description of Artificial Sequence: Synthetic oligonucleotide
cacggaucuggcgcccauc

SEQ ID NO: 2830441 - RNA, 19 nt, Artificial Sequence
  Description of Artificial Sequence: Synthetic oligonucleotide
cauggcucucauggcaucu

SEQ ID NO: 2830442 - RNA, 19 nt, Artificial Sequence
  Description of Artificial Sequence: Synthetic oligonucleotide
cugcugaaguggucuucaa

SEQ ID NO: 2830443 - RNA, 19 nt, Artificial Sequence
  Description of Artificial Sequence: Synthetic oligonucleotide
ggucuccaccaccucuaga

SEQ ID NO: 2830444 - RNA, 19 nt, Artificial Sequence
  Description of Artificial Sequence: Synthetic oligonucleotide
cccgggcagacuugccugc

SEQ ID NO: 2830445 - RNA, 19 nt, Artificial Sequence
  Description of Artificial Sequence: Synthetic oligonucleotide
ggaccgcccauauccauau

SEQ ID NO: 2830446 - RNA, 19 nt, Artificial Sequence
  Description of Artificial Sequence: Synthetic oligonucleotide
ggcaugcucuggguuggug

SEQ ID NO: 2830447 - RNA, 19 nt, Artificial Sequence
  Description of Artificial Sequence: Synthetic oligonucleotide
ccugcaugguccacacgga

SEQ ID NO: 2830448 - RNA, 19 nt, Artificial Sequence
  Description of Artificial Sequence: Synthetic oligonucleotide
ccgggaucuuugagucucc

SEQ ID NO: 2830449 - RNA, 19 nt, Artificial Sequence
  Description of Artificial Sequence: Synthetic oligonucleotide
ccaccaccucuagaguagc

SEQ ID NO: 2830450 - RNA, 19 nt, Artificial Sequence
  Description of Artificial Sequence: Synthetic oligonucleotide
cggucauaaccacccuggc

SEQ ID NO: 2830451 - RNA, 19 nt, Artificial Sequence
  Description of Artificial Sequence: Synthetic oligonucleotide
ccuggcuucugccacuaua

SEQ ID NO: 2830452 - RNA, 19 nt, Artificial Sequence
  Description of Artificial Sequence: Synthetic oligonucleotide
cugcaugguccacacggau

SEQ ID NO: 2830453 - RNA, 19 nt, Artificial Sequence
  Description of Artificial Sequence: Synthetic oligonucleotide
cugaggcaugcucuggguu

SEQ ID NO: 2830454 - RNA, 19 nt, Artificial Sequence
  Description of Artificial Sequence: Synthetic oligonucleotide
cuccauucauggcucucau

SEQ ID NO: 2830455 - RNA, 19 nt, Artificial Sequence
  Description of Artificial Sequence: Synthetic oligonucleotide
cuggguuggugaaggugau

SEQ ID NO: 2830456 - RNA, 19 nt, Artificial Sequence
  Description of Artificial Sequence: Synthetic oligonucleotide
augccccaucucaguuguc

SEQ ID NO: 2830457 - RNA, 19 nt, Artificial Sequence
  Description of Artificial Sequence: Synthetic oligonucleotide
cauaaccacccuggcuucu

SEQ ID NO: 2830458 - RNA, 19 nt, Artificial Sequence
  Description of Artificial Sequence: Synthetic oligonucleotide
accacgcccaugggcccca

SEQ ID NO: 2830459 - RNA, 19 nt, Artificial Sequence
  Description of Artificial Sequence: Synthetic oligonucleotide
caccaccucuagaguagcu

SEQ ID NO: 2830460 - RNA, 19 nt, Artificial Sequence
  Description of Artificial Sequence: Synthetic oligonucleotide
cccgguccuugacaacaac

SEQ ID NO: 2830461 - RNA, 19 nt, Artificial Sequence
  Description of Artificial Sequence: Synthetic oligonucleotide
acccuggcuucugccacua

SEQ ID NO: 2830462 - RNA, 19 nt, Artificial Sequence
  Description of Artificial Sequence: Synthetic oligonucleotide
ccuugacaacaaccaccuc

SEQ ID NO: 2830463 - RNA, 19 nt, Artificial Sequence
  Description of Artificial Sequence: Synthetic oligonucleotide
cuggaccgcccauauccau

SEQ ID NO: 2830464 - RNA, 19 nt, Artificial Sequence
  Description of Artificial Sequence: Synthetic oligonucleotide
aggcaugcucuggguuggu

SEQ ID NO: 2830465 - RNA, 19 nt, Artificial Sequence
  Description of Artificial Sequence: Synthetic oligonucleotide
gcuuccccgggcagacuug

SEQ ID NO: 2830466 - RNA, 19 nt, Artificial Sequence
  Description of Artificial Sequence: Synthetic oligonucleotide
cccucugcuuccccgggca

SEQ ID NO: 2830467 - RNA, 19 nt, Artificial Sequence
  Description of Artificial Sequence: Synthetic oligonucleotide
ccauagcccuggucuccac

SEQ ID NO: 2830468 - RNA, 19 nt, Artificial Sequence
  Description of Artificial Sequence: Synthetic oligonucleotide
ccccucugcuuccccgggc

SEQ ID NO: 2830469 - RNA, 19 nt, Artificial Sequence
  Description of Artificial Sequence: Synthetic oligonucleotide
gcagacuugccugcauggu

SEQ ID NO: 2830470 - RNA, 19 nt, Artificial Sequence
  Description of Artificial Sequence: Synthetic oligonucleotide
cgaccacgcccaugggccc

SEQ ID NO: 2830471 - RNA, 19 nt, Artificial Sequence
  Description of Artificial Sequence: Synthetic oligonucleotide
cacccuggcuucugccacu

SEQ ID NO: 2830472 - RNA, 19 nt, Artificial Sequence
  Description of Artificial Sequence: Synthetic oligonucleotide
cccauccagggacucucca

SEQ ID NO: 2830473 - RNA, 19 nt, Artificial Sequence
  Description of Artificial Sequence: Synthetic oligonucleotide
cuccugaguagcggucaua

SEQ ID NO: 2830474 - RNA, 19 nt, Artificial Sequence
  Description of Artificial Sequence: Synthetic oligonucleotide
cgggaucuuugagucuccc

SEQ ID NO: 2830475 - RNA, 19 nt, Artificial Sequence
  Description of Artificial Sequence: Synthetic oligonucleotide
ccacacggaucuggcgccc

SEQ ID NO: 2830476 - RNA, 19 nt, Artificial Sequence
  Description of Artificial Sequence: Synthetic oligonucleotide
gcccauccagggacucucc

SEQ ID NO: 2830477 - RNA, 19 nt, Artificial Sequence
  Description of Artificial Sequence: Synthetic oligonucleotide
ccauauccauauccauaua

SEQ ID NO: 2830478 - RNA, 19 nt, Artificial Sequence
  Description of Artificial Sequence: Synthetic oligonucleotide
ccaggucgacugucauauc

SEQ ID NO: 2830479 - RNA, 19 nt, Artificial Sequence
  Description of Artificial Sequence: Synthetic oligonucleotide
ccccaucucaguugucaua

SEQ ID NO: 2830480 - RNA, 19 nt, Artificial Sequence
  Description of Artificial Sequence: Synthetic oligonucleotide
gugccugcucaucgguguu

SEQ ID NO: 2830481 - RNA, 19 nt, Artificial Sequence
  Description of Artificial Sequence: Synthetic oligonucleotide
ccauccagggacucuccau

SEQ ID NO: 2830482 - RNA, 19 nt, Artificial Sequence
  Description of Artificial Sequence: Synthetic oligonucleotide
cgcccauccagggacucuc

SEQ ID NO: 2830483 - RNA, 19 nt, Artificial Sequence
  Description of Artificial Sequence: Synthetic oligonucleotide
gcucaucgguguugaaguu

SEQ ID NO: 2830484 - RNA, 19 nt, Artificial Sequence
  Description of Artificial Sequence: Synthetic oligonucleotide
gccccaucucaguugucau

SEQ ID NO: 2830485 - RNA, 19 nt, Artificial Sequence
  Description of Artificial Sequence: Synthetic oligonucleotide
cgcuuccauagcccugguc

SEQ ID NO: 2830486 - RNA, 19 nt, Artificial Sequence
  Description of Artificial Sequence: Synthetic oligonucleotide
ggcgcccauccagggacuc

SEQ ID NO: 2830487 - RNA, 19 nt, Artificial Sequence
  Description of Artificial Sequence: Synthetic oligonucleotide
gcccuggucuccaccaccu

SEQ ID NO: 2830488 - RNA, 19 nt, Artificial Sequence
  Description of Artificial Sequence: Synthetic oligonucleotide
cccuggucuccaccaccuc

SEQ ID NO: 2830489 - RNA, 19 nt, Artificial Sequence
  Description of Artificial Sequence: Synthetic oligonucleotide
cacgcccaugggccccaaa

SEQ ID NO: 2830490 - RNA, 19 nt, Artificial Sequence
  Description of Artificial Sequence: Synthetic oligonucleotide
cgcccauauccauauccau

SEQ ID NO: 2830491 - RNA, 19 nt, Artificial Sequence
  Description of Artificial Sequence: Synthetic oligonucleotide
ccuccaggucgacugucau

SEQ ID NO: 2830492 - RNA, 19 nt, Artificial Sequence
  Description of Artificial Sequence: Synthetic oligonucleotide
ccaucucaguugucauaau

SEQ ID NO: 2830493 - RNA, 19 nt, Artificial Sequence
  Description of Artificial Sequence: Synthetic oligonucleotide
cggaucuggcgcccaucca

SEQ ID NO: 2830494 - RNA, 19 nt, Artificial Sequence
  Description of Artificial Sequence: Synthetic oligonucleotide
gccaaaaccccgggaucuu

SEQ ID NO: 2830495 - RNA, 19 nt, Artificial Sequence
  Description of Artificial Sequence: Synthetic oligonucleotide
ccucagagauaggcccaaa

SEQ ID NO: 2830496 - RNA, 19 nt, Artificial Sequence
  Description of Artificial Sequence: Synthetic oligonucleotide
ccgggcagacuugccugca

SEQ ID NO: 2830497 - RNA, 19 nt, Artificial Sequence
  Description of Artificial Sequence: Synthetic oligonucleotide
ccaaaaccccgggaucuuu

SEQ ID NO: 2830498 - RNA, 19 nt, Artificial Sequence
  Description of Artificial Sequence: Synthetic oligonucleotide
ccuccugaguagcggucau

SEQ ID NO: 2830499 - RNA, 19 nt, Artificial Sequence
  Description of Artificial Sequence: Synthetic oligonucleotide
ccccgggaucuuugagucu

SEQ ID NO: 2830500 - RNA, 19 nt, Artificial Sequence
  Description of Artificial Sequence: Synthetic oligonucleotide
cugcuuccccgggcagacu

SEQ ID NO: 2830501 - RNA, 19 nt, Artificial Sequence
  Description of Artificial Sequence: Synthetic oligonucleotide
gcgcccauccagggacucu

SEQ ID NO: 2830502 - RNA, 19 nt, Artificial Sequence
  Description of Artificial Sequence: Synthetic oligonucleotide
ccgcuuccauagcccuggu

SEQ ID NO: 2830503 - RNA, 19 nt, Artificial Sequence
  Description of Artificial Sequence: Synthetic oligonucleotide
cccuggcuucugccacuau

SEQ ID NO: 2830504 - RNA, 19 nt, Artificial Sequence
  Description of Artificial Sequence: Synthetic oligonucleotide
ccacgcccaugggccccaa

SEQ ID NO: 2830505 - RNA, 19 nt, Artificial Sequence
  Description of Artificial Sequence: Synthetic oligonucleotide
uuuauaaccaauucgaucg

SEQ ID NO: 2830506 - RNA, 19 nt, Artificial Sequence
  Description of Artificial Sequence: Synthetic oligonucleotide
aacagcaguaacuucaugc

SEQ ID NO: 2830507 - RNA, 19 nt, Artificial Sequence
  Description of Artificial Sequence: Synthetic oligonucleotide
aaaacauucugcuugguug

SEQ ID NO: 2830508 - RNA, 19 nt, Artificial Sequence
  Description of Artificial Sequence: Synthetic oligonucleotide
uaucuuaucagaaaaguug

SEQ ID NO: 2830509 - RNA, 19 nt, Artificial Sequence
  Description of Artificial Sequence: Synthetic oligonucleotide
aaugucaucgagcuugagc

SEQ ID NO: 2830510 - RNA, 19 nt, Artificial Sequence
  Description of Artificial Sequence: Synthetic oligonucleotide
aaacucuucaaugucaucg

SEQ ID NO: 2830511 - RNA, 19 nt, Artificial Sequence
  Description of Artificial Sequence: Synthetic oligonucleotide
uuuuccagaaacaagccag

SEQ ID NO: 2830512 - RNA, 19 nt, Artificial Sequence
  Description of Artificial Sequence: Synthetic oligonucleotide
aauucucuaaaucuguucu

SEQ ID NO: 2830513 - RNA, 19 nt, Artificial Sequence
  Description of Artificial Sequence: Synthetic oligonucleotide
caauuuuccagaaacaagc

SEQ ID NO: 2830514 - RNA, 19 nt, Artificial Sequence
  Description of Artificial Sequence: Synthetic oligonucleotide
aaucagguaagcuuuccac

SEQ ID NO: 2830515 - RNA, 19 nt, Artificial Sequence
  Description of Artificial Sequence: Synthetic oligonucleotide
aucguuaaucauuuguucc

SEQ ID NO: 2830516 - RNA, 19 nt, Artificial Sequence
  Description of Artificial Sequence: Synthetic oligonucleotide
uuaucagaaaaguugaaca

SEQ ID NO: 2830517 - RNA, 19 nt, Artificial Sequence
  Description of Artificial Sequence: Synthetic oligonucleotide
ucugccaucauuuuauucc

SEQ ID NO: 2830518 - RNA, 19 nt, Artificial Sequence
  Description of Artificial Sequence: Synthetic oligonucleotide
aaaguugaacagcaguaac

SEQ ID NO: 2830519 - RNA, 19 nt, Artificial Sequence
  Description of Artificial Sequence: Synthetic oligonucleotide
acagaaaacauucugcuug

SEQ ID NO: 2830520 - RNA, 19 nt, Artificial Sequence
  Description of Artificial Sequence: Synthetic oligonucleotide
aguaacuucaugcagacau

SEQ ID NO: 2830521 - RNA, 19 nt, Artificial Sequence
  Description of Artificial Sequence: Synthetic oligonucleotide
uuuauuccauuccagaggu

SEQ ID NO: 2830522 - RNA, 19 nt, Artificial Sequence
  Description of Artificial Sequence: Synthetic oligonucleotide
uuuggcuucuaucuuauca

SEQ ID NO: 2830523 - RNA, 19 nt, Artificial Sequence
  Description of Artificial Sequence: Synthetic oligonucleotide
ucagaaaaguugaacagca

SEQ ID NO: 2830524 - RNA, 19 nt, Artificial Sequence
  Description of Artificial Sequence: Synthetic oligonucleotide
aaucauuuguucccggcuc

SEQ ID NO: 2830525 - RNA, 19 nt, Artificial Sequence
  Description of Artificial Sequence: Synthetic oligonucleotide
aaacaagccagaauuuggc

SEQ ID NO: 2830526 - RNA, 19 nt, Artificial Sequence
  Description of Artificial Sequence: Synthetic oligonucleotide
cauuauuucucccugcagg

SEQ ID NO: 2830527 - RNA, 19 nt, Artificial Sequence
  Description of Artificial Sequence: Synthetic oligonucleotide
aauuuuccagaaacaagcc

SEQ ID NO: 2830528 - RNA, 19 nt, Artificial Sequence
  Description of Artificial Sequence: Synthetic oligonucleotide
ucuucaaugucaucgagcu

SEQ ID NO: 2830529 - RNA, 19 nt, Artificial Sequence
  Description of Artificial Sequence: Synthetic oligonucleotide
acacuuaauucucuaaauc

SEQ ID NO: 2830530 - RNA, 19 nt, Artificial Sequence
  Description of Artificial Sequence: Synthetic oligonucleotide
augucaucgagcuugagcu

SEQ ID NO: 2830531 - RNA, 19 nt, Artificial Sequence
  Description of Artificial Sequence: Synthetic oligonucleotide
ugagaugugcgguuguugg

SEQ ID NO: 2830532 - RNA, 19 nt, Artificial Sequence
  Description of Artificial Sequence: Synthetic oligonucleotide
uagguugggguuuauaacc

SEQ ID NO: 2830533 - RNA, 19 nt, Artificial Sequence
  Description of Artificial Sequence: Synthetic oligonucleotide
aaaucuguucuguauuucu

SEQ ID NO: 2830534 - RNA, 19 nt, Artificial Sequence
  Description of Artificial Sequence: Synthetic oligonucleotide
aucagaaaaguugaacagc

SEQ ID NO: 2830535 - RNA, 19 nt, Artificial Sequence
  Description of Artificial Sequence: Synthetic oligonucleotide
aaaacucaaaguuuccaaa

SEQ ID NO: 2830536 - RNA, 19 nt, Artificial Sequence
  Description of Artificial Sequence: Synthetic oligonucleotide
agaaaaguugaacagcagu

SEQ ID NO: 2830537 - RNA, 19 nt, Artificial Sequence
  Description of Artificial Sequence: Synthetic oligonucleotide
aaaaucagguaagcuuucc

SEQ ID NO: 2830538 - RNA, 19 nt, Artificial Sequence
  Description of Artificial Sequence: Synthetic oligonucleotide
accaauucgaucguuaauc

SEQ ID NO: 2830539 - RNA, 19 nt, Artificial Sequence
  Description of Artificial Sequence: Synthetic oligonucleotide
uuccaaacugagaugugcg

SEQ ID NO: 2830540 - RNA, 19 nt, Artificial Sequence
  Description of Artificial Sequence: Synthetic oligonucleotide
gaaacaagccagaauuugg

SEQ ID NO: 2830541 - RNA, 19 nt, Artificial Sequence
  Description of Artificial Sequence: Synthetic oligonucleotide
uucuaucuuaucagaaaag

SEQ ID NO: 2830542 - RNA, 19 nt, Artificial Sequence
  Description of Artificial Sequence: Synthetic oligonucleotide
ucagguaagcuuuccacag

SEQ ID NO: 2830543 - RNA, 19 nt, Artificial Sequence
  Description of Artificial Sequence: Synthetic oligonucleotide
uuuucgucucagcauauug

SEQ ID NO: 2830544 - RNA, 19 nt, Artificial Sequence
  Description of Artificial Sequence: Synthetic oligonucleotide
aaacauucugcuugguugu

SEQ ID NO: 2830545 - RNA, 19 nt, Artificial Sequence
  Description of Artificial Sequence: Synthetic oligonucleotide
gaauccaucucuaaaacuc

SEQ ID NO: 2830546 - RNA, 19 nt, Artificial Sequence
  Description of Artificial Sequence: Synthetic oligonucleotide
ucuaucuuaucagaaaagu

SEQ ID NO: 2830547 - RNA, 19 nt, Artificial Sequence
  Description of Artificial Sequence: Synthetic oligonucleotide
ucuaaaacucaaaguuucc

SEQ ID NO: 2830548 - RNA, 19 nt, Artificial Sequence
  Description of Artificial Sequence: Synthetic oligonucleotide
ucguuaaucauuuguuccc

SEQ ID NO: 2830549 - RNA, 19 nt, Artificial Sequence
  Description of Artificial Sequence: Synthetic oligonucleotide
cucuaaaacucaaaguuuc

SEQ ID NO: 2830550 - RNA, 19 nt, Artificial Sequence
  Description of Artificial Sequence: Synthetic oligonucleotide
uccuacaccuuccacaucu

SEQ ID NO: 2830551 - RNA, 19 nt, Artificial Sequence
  Description of Artificial Sequence: Synthetic oligonucleotide
ucgaucguuaaucauuugu

SEQ ID NO: 2830552 - RNA, 19 nt, Artificial Sequence
  Description of Artificial Sequence: Synthetic oligonucleotide
ugcuagagaauccaucucu

SEQ ID NO: 2830553 - RNA, 19 nt, Artificial Sequence
  Description of Artificial Sequence: Synthetic oligonucleotide
aucauuuuauuccauucca

SEQ ID NO: 2830554 - RNA, 19 nt, Artificial Sequence
  Description of Artificial Sequence: Synthetic oligonucleotide
cuuucgaaugcucucaaac

SEQ ID NO: 2830555 - RNA, 19 nt, Artificial Sequence
  Description of Artificial Sequence: Synthetic oligonucleotide
caucauuuuauuccauucc

SEQ ID NO: 2830556 - RNA, 19 nt, Artificial Sequence
  Description of Artificial Sequence: Synthetic oligonucleotide
uaaaacucaaaguuuccaa

SEQ ID NO: 2830557 - RNA, 19 nt, Artificial Sequence
  Description of Artificial Sequence: Synthetic oligonucleotide
uacaccuuccacaucuucc

SEQ ID NO: 2830558 - RNA, 19 nt, Artificial Sequence
  Description of Artificial Sequence: Synthetic oligonucleotide
agacagaaaacauucugcu

SEQ ID NO: 2830559 - RNA, 19 nt, Artificial Sequence
  Description of Artificial Sequence: Synthetic oligonucleotide
agagaauccaucucuaaaa

SEQ ID NO: 2830560 - RNA, 19 nt, Artificial Sequence
  Description of Artificial Sequence: Synthetic oligonucleotide
ucuaaaucuguucuguauu

SEQ ID NO: 2830561 - RNA, 19 nt, Artificial Sequence
  Description of Artificial Sequence: Synthetic oligonucleotide
uuaaucauuuguucccggc

SEQ ID NO: 2830562 - RNA, 19 nt, Artificial Sequence
  Description of Artificial Sequence: Synthetic oligonucleotide
uucgaaugcucucaaacuc

SEQ ID NO: 2830563 - RNA, 19 nt, Artificial Sequence
  Description of Artificial Sequence: Synthetic oligonucleotide
guuuauaaccaauucgauc

SEQ ID NO: 2830564 - RNA, 19 nt, Artificial Sequence
  Description of Artificial Sequence: Synthetic oligonucleotide
gagacagaaaacauucugc

SEQ ID NO: 2830565 - RNA, 19 nt, Artificial Sequence
  Description of Artificial Sequence: Synthetic oligonucleotide
agacauuauuucucccugc

SEQ ID NO: 2830566 - RNA, 19 nt, Artificial Sequence
  Description of Artificial Sequence: Synthetic oligonucleotide
uuucgaaugcucucaaacu

SEQ ID NO: 2830567 - RNA, 19 nt, Artificial Sequence
  Description of Artificial Sequence: Synthetic oligonucleotide
acucaaaguuuccaaacug

SEQ ID NO: 2830568 - RNA, 19 nt, Artificial Sequence
  Description of Artificial Sequence: Synthetic oligonucleotide
uauuccauuccagaggucu

SEQ ID NO: 2830569 - RNA, 19 nt, Artificial Sequence
  Description of Artificial Sequence: Synthetic oligonucleotide
uuucgucucagcauauuga

SEQ ID NO: 2830570 - RNA, 19 nt, Artificial Sequence
  Description of Artificial Sequence: Synthetic oligonucleotide
aaaucagguaagcuuucca

SEQ ID NO: 2830571 - RNA, 19 nt, Artificial Sequence
  Description of Artificial Sequence: Synthetic oligonucleotide
caggagacagaaaacauuc

SEQ ID NO: 2830572 - RNA, 19 nt, Artificial Sequence
  Description of Artificial Sequence: Synthetic oligonucleotide
auuauuucucccugcagga

SEQ ID NO: 2830573 - RNA, 19 nt, Artificial Sequence
  Description of Artificial Sequence: Synthetic oligonucleotide
uauuucucccugcaggaga

SEQ ID NO: 2830574 - RNA, 19 nt, Artificial Sequence
  Description of Artificial Sequence: Synthetic oligonucleotide
ucgagcuugagcuccaggc

SEQ ID NO: 2830575 - RNA, 19 nt, Artificial Sequence
  Description of Artificial Sequence: Synthetic oligonucleotide
uguucuguauuucugccau

SEQ ID NO: 2830576 - RNA, 19 nt, Artificial Sequence
  Description of Artificial Sequence: Synthetic oligonucleotide
aguuuccaaacugagaugu

SEQ ID NO: 2830577 - RNA, 19 nt, Artificial Sequence
  Description of Artificial Sequence: Synthetic oligonucleotide
ucugcuugguuguacacac

SEQ ID NO: 2830578 - RNA, 19 nt, Artificial Sequence
  Description of Artificial Sequence: Synthetic oligonucleotide
agguaagcuuuccacaguc

SEQ ID NO: 2830579 - RNA, 19 nt, Artificial Sequence
  Description of Artificial Sequence: Synthetic oligonucleotide
uaaucauuuguucccggcu

SEQ ID NO: 2830580 - RNA, 19 nt, Artificial Sequence
  Description of Artificial Sequence: Synthetic oligonucleotide
ucuguucuguauuucugcc

SEQ ID NO: 2830581 - RNA, 19 nt, Artificial Sequence
  Description of Artificial Sequence: Synthetic oligonucleotide
cuuaucagaaaaguugaac

SEQ ID NO: 2830582 - RNA, 19 nt, Artificial Sequence
  Description of Artificial Sequence: Synthetic oligonucleotide
aauucgaucguuaaucauu

SEQ ID NO: 2830583 - RNA, 19 nt, Artificial Sequence
  Description of Artificial Sequence: Synthetic oligonucleotide
gggguuuauaaccaauucg

SEQ ID NO: 2830584 - RNA, 19 nt, Artificial Sequence
  Description of Artificial Sequence: Synthetic oligonucleotide
uuuccaaacugagaugugc

SEQ ID NO: 2830585 - RNA, 19 nt, Artificial Sequence
  Description of Artificial Sequence: Synthetic oligonucleotide
gguuguugggcuuagguug

SEQ ID NO: 2830586 - RNA, 19 nt, Artificial Sequence
  Description of Artificial Sequence: Synthetic oligonucleotide
aucacugguuccuacaccu

SEQ ID NO: 2830587 - RNA, 19 nt, Artificial Sequence
  Description of Artificial Sequence: Synthetic oligonucleotide
uuagguugggguuuauaac

SEQ ID NO: 2830588 - RNA, 19 nt, Artificial Sequence
  Description of Artificial Sequence: Synthetic oligonucleotide
caugcagacauuauuucuc

SEQ ID NO: 2830589 - RNA, 19 nt, Artificial Sequence
  Description of Artificial Sequence: Synthetic oligonucleotide
ucaugcagacauuauuucu

SEQ ID NO: 2830590 - RNA, 19 nt, Artificial Sequence
  Description of Artificial Sequence: Synthetic oligonucleotide
auuuguucccggcucuugg

SEQ ID NO: 2830591 - RNA, 19 nt, Artificial Sequence
  Description of Artificial Sequence: Synthetic oligonucleotide
uagagaauccaucucuaaa

SEQ ID NO: 2830592 - RNA, 19 nt, Artificial Sequence
  Description of Artificial Sequence: Synthetic oligonucleotide
ucucuaaaacucaaaguuu

SEQ ID NO: 2830593 - RNA, 19 nt, Artificial Sequence
  Description of Artificial Sequence: Synthetic oligonucleotide
uccaaacugagaugugcgg

SEQ ID NO: 2830594 - RNA, 19 nt, Artificial Sequence
  Description of Artificial Sequence: Synthetic oligonucleotide
gaucguuaaucauuuguuc

SEQ ID NO: 2830595 - RNA, 19 nt, Artificial Sequence
  Description of Artificial Sequence: Synthetic oligonucleotide
aacucuucaaugucaucga

SEQ ID NO: 2830596 - RNA, 19 nt, Artificial Sequence
  Description of Artificial Sequence: Synthetic oligonucleotide
acagcaguaacuucaugca

SEQ ID NO: 2830597 - RNA, 19 nt, Artificial Sequence
  Description of Artificial Sequence: Synthetic oligonucleotide
acuuaauucucuaaaucug

SEQ ID NO: 2830598 - RNA, 19 nt, Artificial Sequence
  Description of Artificial Sequence: Synthetic oligonucleotide
aaaaguugaacagcaguaa

SEQ ID NO: 2830599 - RNA, 19 nt, Artificial Sequence
  Description of Artificial Sequence: Synthetic oligonucleotide
uccaaguccuuucgaaugc

SEQ ID NO: 2830600 - RNA, 19 nt, Artificial Sequence
  Description of Artificial Sequence: Synthetic oligonucleotide
gagaauccaucucuaaaac

SEQ ID NO: 2830601 - RNA, 19 nt, Artificial Sequence
  Description of Artificial Sequence: Synthetic oligonucleotide
cagaaaacauucugcuugg

SEQ ID NO: 2830602 - RNA, 19 nt, Artificial Sequence
  Description of Artificial Sequence: Synthetic oligonucleotide
agaugugcgguuguugggc

SEQ ID NO: 2830603 - RNA, 19 nt, Artificial Sequence
  Description of Artificial Sequence: Synthetic oligonucleotide
auuuuccagaaacaagcca

SEQ ID NO: 2830604 - RNA, 19 nt, Artificial Sequence
  Description of Artificial Sequence: Synthetic oligonucleotide
uaauucucuaaaucuguuc

SEQ ID NO: 2830605 - RNA, 19 nt, Artificial Sequence
  Description of Artificial Sequence: Synthetic oligonucleotide
ugguuguacacacuuaauu

SEQ ID NO: 2830606 - RNA, 19 nt, Artificial Sequence
  Description of Artificial Sequence: Synthetic oligonucleotide
uccaauuuuccagaaacaa

SEQ ID NO: 2830607 - RNA, 19 nt, Artificial Sequence
  Description of Artificial Sequence: Synthetic oligonucleotide
cucuucaaugucaucgagc

SEQ ID NO: 2830608 - RNA, 19 nt, Artificial Sequence
  Description of Artificial Sequence: Synthetic oligonucleotide
aaguugaacagcaguaacu

SEQ ID NO: 2830609 - RNA, 19 nt, Artificial Sequence
  Description of Artificial Sequence: Synthetic oligonucleotide
ucgaaugcucucaaacucu

SEQ ID NO: 2830610 - RNA, 19 nt, Artificial Sequence
  Description of Artificial Sequence: Synthetic oligonucleotide
uguacacacuuaauucucu

SEQ ID NO: 2830611 - RNA, 19 nt, Artificial Sequence
  Description of Artificial Sequence: Synthetic oligonucleotide
uuguacacacuuaauucuc

SEQ ID NO: 2830612 - RNA, 19 nt, Artificial Sequence
  Description of Artificial Sequence: Synthetic oligonucleotide
cuucuuacgggucuccaag

SEQ ID NO: 2830613 - RNA, 19 nt, Artificial Sequence
  Description of Artificial Sequence: Synthetic oligonucleotide
uuacgggucuccaaguccu

SEQ ID NO: 2830614 - RNA, 19 nt, Artificial Sequence
  Description of Artificial Sequence: Synthetic oligonucleotide
agaaacaagccagaauuug

SEQ ID NO: 2830615 - RNA, 19 nt, Artificial Sequence
  Description of Artificial Sequence: Synthetic oligonucleotide
agaauccaucucuaaaacu

SEQ ID NO: 2830616 - RNA, 19 nt, Artificial Sequence
  Description of Artificial Sequence: Synthetic oligonucleotide
gguuguacacacuuaauuc

SEQ ID NO: 2830617 - RNA, 19 nt, Artificial Sequence
  Description of Artificial Sequence: Synthetic oligonucleotide
uuuguucccggcucuuggg

SEQ ID NO: 2830618 - RNA, 19 nt, Artificial Sequence
  Description of Artificial Sequence: Synthetic oligonucleotide
uucuguauuucugccauca

SEQ ID NO: 2830619 - RNA, 19 nt, Artificial Sequence
  Description of Artificial Sequence: Synthetic oligonucleotide
aguccuuucgaaugcucuc

SEQ ID NO: 2830620 - RNA, 19 nt, Artificial Sequence
  Description of Artificial Sequence: Synthetic oligonucleotide
guuaaucauuuguucccgg

SEQ ID NO: 2830621 - RNA, 19 nt, Artificial Sequence
  Description of Artificial Sequence: Synthetic oligonucleotide
ugagcuccaggcgaguugg

SEQ ID NO: 2830622 - RNA, 19 nt, Artificial Sequence
  Description of Artificial Sequence: Synthetic oligonucleotide
guugguuuucgucucagca

SEQ ID NO: 2830623 - RNA, 19 nt, Artificial Sequence
  Description of Artificial Sequence: Synthetic oligonucleotide
uccacaguccaauuuucca

SEQ ID NO: 2830624 - RNA, 19 nt, Artificial Sequence
  Description of Artificial Sequence: Synthetic oligonucleotide
uuaauucucuaaaucuguu

SEQ ID NO: 2830625 - RNA, 19 nt, Artificial Sequence
  Description of Artificial Sequence: Synthetic oligonucleotide
uuuccagaaacaagccaga

SEQ ID NO: 2830626 - RNA, 19 nt, Artificial Sequence
  Description of Artificial Sequence: Synthetic oligonucleotide
uauuucugccaucauuuua

SEQ ID NO: 2830627 - RNA, 19 nt, Artificial Sequence
  Description of Artificial Sequence: Synthetic oligonucleotide
aguugguuuucgucucagc

SEQ ID NO: 2830628 - RNA, 19 nt, Artificial Sequence
  Description of Artificial Sequence: Synthetic oligonucleotide
cuuagguugggguuuauaa

SEQ ID NO: 2830629 - RNA, 19 nt, Artificial Sequence
  Description of Artificial Sequence: Synthetic oligonucleotide
aucuuaucagaaaaguuga

SEQ ID NO: 2830630 - RNA, 19 nt, Artificial Sequence
  Description of Artificial Sequence: Synthetic oligonucleotide
acacacuuaauucucuaaa

SEQ ID NO: 2830631 - RNA, 19 nt, Artificial Sequence
  Description of Artificial Sequence: Synthetic oligonucleotide
cuuacgggucuccaagucc

SEQ ID NO: 2830632 - RNA, 19 nt, Artificial Sequence
  Description of Artificial Sequence: Synthetic oligonucleotide
caagccagaauuuggcuuc

SEQ ID NO: 2830633 - RNA, 19 nt, Artificial Sequence
  Description of Artificial Sequence: Synthetic oligonucleotide
uucucuaaaucuguucugu

SEQ ID NO: 2830634 - RNA, 19 nt, Artificial Sequence
  Description of Artificial Sequence: Synthetic oligonucleotide
gacauuauuucucccugca

SEQ ID NO: 2830635 - RNA, 19 nt, Artificial Sequence
  Description of Artificial Sequence: Synthetic oligonucleotide
uuguucccggcucuugggg

SEQ ID NO: 2830636 - RNA, 19 nt, Artificial Sequence
  Description of Artificial Sequence: Synthetic oligonucleotide
ugggguuuauaaccaauuc

SEQ ID NO: 2830637 - RNA, 19 nt, Artificial Sequence
  Description of Artificial Sequence: Synthetic oligonucleotide
auucugcuugguuguacac

SEQ ID NO: 2830638 - RNA, 19 nt, Artificial Sequence
  Description of Artificial Sequence: Synthetic oligonucleotide
uuauaaccaauucgaucgu

SEQ ID NO: 2830639 - RNA, 19 nt, Artificial Sequence
  Description of Artificial Sequence: Synthetic oligonucleotide
ggagacagaaaacauucug

SEQ ID NO: 2830640 - RNA, 19 nt, Artificial Sequence
  Description of Artificial Sequence: Synthetic oligonucleotide
ugguuuucgucucagcaua

SEQ ID NO: 2830641 - RNA, 19 nt, Artificial Sequence
  Description of Artificial Sequence: Synthetic oligonucleotide
uuggggucgcugcugagcc

SEQ ID NO: 2830642 - RNA, 19 nt, Artificial Sequence
  Description of Artificial Sequence: Synthetic oligonucleotide
cuccaaguccuuucgaaug

SEQ ID NO: 2830643 - RNA, 19 nt, Artificial Sequence
  Description of Artificial Sequence: Synthetic oligonucleotide
aauccaucucuaaaacuca

SEQ ID NO: 2830644 - RNA, 19 nt, Artificial Sequence
  Description of Artificial Sequence: Synthetic oligonucleotide
accuuccacaucuuccuuc

SEQ ID NO: 2830645 - RNA, 19 nt, Artificial Sequence
  Description of Artificial Sequence: Synthetic oligonucleotide
guaagcuuuccacagucca

SEQ ID NO: 2830646 - RNA, 19 nt, Artificial Sequence
  Description of Artificial Sequence: Synthetic oligonucleotide
gagaugugcgguuguuggg

SEQ ID NO: 2830647 - RNA, 19 nt, Artificial Sequence
  Description of Artificial Sequence: Synthetic oligonucleotide
uaaccaauucgaucguuaa

SEQ ID NO: 2830648 - RNA, 19 nt, Artificial Sequence
  Description of Artificial Sequence: Synthetic oligonucleotide
acuucaugcagacauuauu

SEQ ID NO: 2830649 - RNA, 19 nt, Artificial Sequence
  Description of Artificial Sequence: Synthetic oligonucleotide
ucuuaucagaaaaguugaa

SEQ ID NO: 2830650 - RNA, 19 nt, Artificial Sequence
  Description of Artificial Sequence: Synthetic oligonucleotide
cagaauuuggcuucuaucu

SEQ ID NO: 2830651 - RNA, 19 nt, Artificial Sequence
  Description of Artificial Sequence: Synthetic oligonucleotide
cuucuaucuuaucagaaaa

SEQ ID NO: 2830652 - RNA, 19 nt, Artificial Sequence
  Description of Artificial Sequence: Synthetic oligonucleotide
guuguacacacuuaauucu

SEQ ID NO: 2830653 - RNA, 19 nt, Artificial Sequence
  Description of Artificial Sequence: Synthetic oligonucleotide
acugguuccuacaccuucc

SEQ ID NO: 2830654 - RNA, 19 nt, Artificial Sequence
  Description of Artificial Sequence: Synthetic oligonucleotide
gaauuuggcuucuaucuua

SEQ ID NO: 2830655 - RNA, 19 nt, Artificial Sequence
  Description of Artificial Sequence: Synthetic oligonucleotide
uccagaaacaagccagaau

SEQ ID NO: 2830656 - RNA, 19 nt, Artificial Sequence
  Description of Artificial Sequence: Synthetic oligonucleotide
cacaucuuccuucugcuuc

SEQ ID NO: 2830657 - RNA, 19 nt, Artificial Sequence
  Description of Artificial Sequence: Synthetic oligonucleotide
ugcaggagacagaaaacau

SEQ ID NO: 2830658 - RNA, 19 nt, Artificial Sequence
  Description of Artificial Sequence: Synthetic oligonucleotide
cagacauuauuucucccug

SEQ ID NO: 2830659 - RNA, 19 nt, Artificial Sequence
  Description of Artificial Sequence: Synthetic oligonucleotide
uacacacuuaauucucuaa

SEQ ID NO: 2830660 - RNA, 19 nt, Artificial Sequence
  Description of Artificial Sequence: Synthetic oligonucleotide
cucaaacucuucaauguca

SEQ ID NO: 2830661 - RNA, 19 nt, Artificial Sequence
  Description of Artificial Sequence: Synthetic oligonucleotide
aaccaauucgaucguuaau

SEQ ID NO: 2830662 - RNA, 19 nt, Artificial Sequence
  Description of Artificial Sequence: Synthetic oligonucleotide
uaagcuuuccacaguccaa

SEQ ID NO: 2830663 - RNA, 19 nt, Artificial Sequence
  Description of Artificial Sequence: Synthetic oligonucleotide
augcuagagaauccaucuc

SEQ ID NO: 2830664 - RNA, 19 nt, Artificial Sequence
  Description of Artificial Sequence: Synthetic oligonucleotide
ugcuugguuguacacacuu

SEQ ID NO: 2830665 - RNA, 19 nt, Artificial Sequence
  Description of Artificial Sequence: Synthetic oligonucleotide
cagaggucuggcaugcuag

SEQ ID NO: 2830666 - RNA, 19 nt, Artificial Sequence
  Description of Artificial Sequence: Synthetic oligonucleotide
uuccauuccagaggucugg

SEQ ID NO: 2830667 - RNA, 19 nt, Artificial Sequence
  Description of Artificial Sequence: Synthetic oligonucleotide
uucugcuucuuacgggucu

SEQ ID NO: 2830668 - RNA, 19 nt, Artificial Sequence
  Description of Artificial Sequence: Synthetic oligonucleotide
uugggguuuauaaccaauu

SEQ ID NO: 2830669 - RNA, 19 nt, Artificial Sequence
  Description of Artificial Sequence: Synthetic oligonucleotide
acaagccagaauuuggcuu

SEQ ID NO: 2830670 - RNA, 19 nt, Artificial Sequence
  Description of Artificial Sequence: Synthetic oligonucleotide
aaacugagaugugcgguug

SEQ ID NO: 2830671 - RNA, 19 nt, Artificial Sequence
  Description of Artificial Sequence: Synthetic oligonucleotide
ccaucucuaaaacucaaag

SEQ ID NO: 2830672 - RNA, 19 nt, Artificial Sequence
  Description of Artificial Sequence: Synthetic oligonucleotide
auuucucccugcaggagac

SEQ ID NO: 2830673 - RNA, 19 nt, Artificial Sequence
  Description of Artificial Sequence: Synthetic oligonucleotide
ugaacagcaguaacuucau

SEQ ID NO: 2830674 - RNA, 19 nt, Artificial Sequence
  Description of Artificial Sequence: Synthetic oligonucleotide
acucuucaaugucaucgag

SEQ ID NO: 2830675 - RNA, 19 nt, Artificial Sequence
  Description of Artificial Sequence: Synthetic oligonucleotide
cuuaauucucuaaaucugu

SEQ ID NO: 2830676 - RNA, 19 nt, Artificial Sequence
  Description of Artificial Sequence: Synthetic oligonucleotide
aguugaacagcaguaacuu

SEQ ID NO: 2830677 - RNA, 19 nt, Artificial Sequence
  Description of Artificial Sequence: Synthetic oligonucleotide
ccaauuuuccagaaacaag

SEQ ID NO: 2830678 - RNA, 19 nt, Artificial Sequence
  Description of Artificial Sequence: Synthetic oligonucleotide
ugcucucaaacucuucaau

SEQ ID NO: 2830679 - RNA, 19 nt, Artificial Sequence
  Description of Artificial Sequence: Synthetic oligonucleotide
ucuuacgggucuccaaguc

SEQ ID NO: 2830680 - RNA, 19 nt, Artificial Sequence
  Description of Artificial Sequence: Synthetic oligonucleotide
uugagcuccaggcgaguug

SEQ ID NO: 2830681 - RNA, 19 nt, Artificial Sequence
  Description of Artificial Sequence: Synthetic oligonucleotide
cuugguuguacacacuuaa

SEQ ID NO: 2830682 - RNA, 19 nt, Artificial Sequence
  Description of Artificial Sequence: Synthetic oligonucleotide
ggguuuauaaccaauucga

SEQ ID NO: 2830683 - RNA, 19 nt, Artificial Sequence
  Description of Artificial Sequence: Synthetic oligonucleotide
uuauuucucccugcaggag

SEQ ID NO: 2830684 - RNA, 19 nt, Artificial Sequence
  Description of Artificial Sequence: Synthetic oligonucleotide
aaguccuuucgaaugcucu

SEQ ID NO: 2830685 - RNA, 19 nt, Artificial Sequence
  Description of Artificial Sequence: Synthetic oligonucleotide
agcaguaacuucaugcaga

SEQ ID NO: 2830686 - RNA, 19 nt, Artificial Sequence
  Description of Artificial Sequence: Synthetic oligonucleotide
ucaaugucaucgagcuuga

SEQ ID NO: 2830687 - RNA, 19 nt, Artificial Sequence
  Description of Artificial Sequence: Synthetic oligonucleotide
uccaucacugguuccuaca

SEQ ID NO: 2830688 - RNA, 19 nt, Artificial Sequence
  Description of Artificial Sequence: Synthetic oligonucleotide
uccaucucuaaaacucaaa

SEQ ID NO: 2830689 - RNA, 19 nt, Artificial Sequence
  Description of Artificial Sequence: Synthetic oligonucleotide
cagaaaaguugaacagcag

SEQ ID NO: 2830690 - RNA, 19 nt, Artificial Sequence
  Description of Artificial Sequence: Synthetic oligonucleotide
aggcgaguugguuuucguc

SEQ ID NO: 2830691 - RNA, 19 nt, Artificial Sequence
  Description of Artificial Sequence: Synthetic oligonucleotide
ucuccaaguccuuucgaau

SEQ ID NO: 2830692 - RNA, 19 nt, Artificial Sequence
  Description of Artificial Sequence: Synthetic oligonucleotide
aauuuggcuucuaucuuau

SEQ ID NO: 2830693 - RNA, 19 nt, Artificial Sequence
  Description of Artificial Sequence: Synthetic oligonucleotide
cuaaaacucaaaguuucca

SEQ ID NO: 2830694 - RNA, 19 nt, Artificial Sequence
  Description of Artificial Sequence: Synthetic oligonucleotide
ugcagacauuauuucuccc

SEQ ID NO: 2830695 - RNA, 19 nt, Artificial Sequence
  Description of Artificial Sequence: Synthetic oligonucleotide
aucauuuguucccggcucu

SEQ ID NO: 2830696 - RNA, 19 nt, Artificial Sequence
  Description of Artificial Sequence: Synthetic oligonucleotide
uggcuucuaucuuaucaga

SEQ ID NO: 2830697 - RNA, 19 nt, Artificial Sequence
  Description of Artificial Sequence: Synthetic oligonucleotide
caugcuagagaauccaucu

SEQ ID NO: 2830698 - RNA, 19 nt, Artificial Sequence
  Description of Artificial Sequence: Synthetic oligonucleotide
aagcuuuccacaguccaau

SEQ ID NO: 2830699 - RNA, 19 nt, Artificial Sequence
  Description of Artificial Sequence: Synthetic oligonucleotide
uaaaucuguucuguauuuc

SEQ ID NO: 2830700 - RNA, 19 nt, Artificial Sequence
  Description of Artificial Sequence: Synthetic oligonucleotide
gcucucaaacucuucaaug

SEQ ID NO: 2830701 - RNA, 19 nt, Artificial Sequence
  Description of Artificial Sequence: Synthetic oligonucleotide
aacugagaugugcgguugu

SEQ ID NO: 2830702 - RNA, 19 nt, Artificial Sequence
  Description of Artificial Sequence: Synthetic oligonucleotide
uucugcuugguuguacaca

SEQ ID NO: 2830703 - RNA, 19 nt, Artificial Sequence
  Description of Artificial Sequence: Synthetic oligonucleotide
gguuccuacaccuuccaca

SEQ ID NO: 2830704 - RNA, 19 nt, Artificial Sequence
  Description of Artificial Sequence: Synthetic oligonucleotide
cuggcaugcuagagaaucc

SEQ ID NO: 2830705 - RNA, 19 nt, Artificial Sequence
  Description of Artificial Sequence: Synthetic oligonucleotide
gucaucgagcuugagcucc

SEQ ID NO: 2830706 - RNA, 19 nt, Artificial Sequence
  Description of Artificial Sequence: Synthetic oligonucleotide
acauucugcuugguuguac

SEQ ID NO: 2830707 - RNA, 19 nt, Artificial Sequence
  Description of Artificial Sequence: Synthetic oligonucleotide
uaacuucaugcagacauua

SEQ ID NO: 2830708 - RNA, 19 nt, Artificial Sequence
  Description of Artificial Sequence: Synthetic oligonucleotide
aggucuggcaugcuagaga

SEQ ID NO: 2830709 - RNA, 19 nt, Artificial Sequence
  Description of Artificial Sequence: Synthetic oligonucleotide
uugguuguacacacuuaau

SEQ ID NO: 2830710 - RNA, 19 nt, Artificial Sequence
  Description of Artificial Sequence: Synthetic oligonucleotide
caucacugguuccuacacc

SEQ ID NO: 2830711 - RNA, 19 nt, Artificial Sequence
  Description of Artificial Sequence: Synthetic oligonucleotide
cagcaguaacuucaugcag

SEQ ID NO: 2830712 - RNA, 19 nt, Artificial Sequence
  Description of Artificial Sequence: Synthetic oligonucleotide
gagcuugagcuccaggcga

SEQ ID NO: 2830713 - RNA, 19 nt, Artificial Sequence
  Description of Artificial Sequence: Synthetic oligonucleotide
uucuuacgggucuccaagu

SEQ ID NO: 2830714 - RNA, 19 nt, Artificial Sequence
  Description of Artificial Sequence: Synthetic oligonucleotide
ucucuaaaucuguucugua

SEQ ID NO: 2830715 - RNA, 19 nt, Artificial Sequence
  Description of Artificial Sequence: Synthetic oligonucleotide
auuuggcuucuaucuuauc

SEQ ID NO: 2830716 - RNA, 19 nt, Artificial Sequence
  Description of Artificial Sequence: Synthetic oligonucleotide
aucgagcuugagcuccagg

SEQ ID NO: 2830717 - RNA, 19 nt, Artificial Sequence
  Description of Artificial Sequence: Synthetic oligonucleotide
cacaguccaauuuuccaga

SEQ ID NO: 2830718 - RNA, 19 nt, Artificial Sequence
  Description of Artificial Sequence: Synthetic oligonucleotide
uggcaugcuagagaaucca

SEQ ID NO: 2830719 - RNA, 19 nt, Artificial Sequence
  Description of Artificial Sequence: Synthetic oligonucleotide
caucucuaaaacucaaagu

SEQ ID NO: 2830720 - RNA, 19 nt, Artificial Sequence
  Description of Artificial Sequence: Synthetic oligonucleotide
uguugggcuuagguugggg

SEQ ID NO: 2830721 - RNA, 19 nt, Artificial Sequence
  Description of Artificial Sequence: Synthetic oligonucleotide
ccacaguccaauuuuccag

SEQ ID NO: 2830722 - RNA, 19 nt, Artificial Sequence
  Description of Artificial Sequence: Synthetic oligonucleotide
cauucugcuugguuguaca

SEQ ID NO: 2830723 - RNA, 19 nt, Artificial Sequence
  Description of Artificial Sequence: Synthetic oligonucleotide
uguucccggcucuuggggu

SEQ ID NO: 2830724 - RNA, 19 nt, Artificial Sequence
  Description of Artificial Sequence: Synthetic oligonucleotide
ucuguauuucugccaucau

SEQ ID NO: 2830725 - RNA, 19 nt, Artificial Sequence
  Description of Artificial Sequence: Synthetic oligonucleotide
gaacagcaguaacuucaug

SEQ ID NO: 2830726 - RNA, 19 nt, Artificial Sequence
  Description of Artificial Sequence: Synthetic oligonucleotide
auucgaucguuaaucauuu

SEQ ID NO: 2830727 - RNA, 19 nt, Artificial Sequence
  Description of Artificial Sequence: Synthetic oligonucleotide
gaaaacauucugcuugguu

SEQ ID NO: 2830728 - RNA, 19 nt, Artificial Sequence
  Description of Artificial Sequence: Synthetic oligonucleotide
uucgaucguuaaucauuug

SEQ ID NO: 2830729 - RNA, 19 nt, Artificial Sequence
  Description of Artificial Sequence: Synthetic oligonucleotide
ucgcugcugagcccugcgg

SEQ ID NO: 2830730 - RNA, 19 nt, Artificial Sequence
  Description of Artificial Sequence: Synthetic oligonucleotide
cacugguuccuacaccuuc

SEQ ID NO: 2830731 - RNA, 19 nt, Artificial Sequence
  Description of Artificial Sequence: Synthetic oligonucleotide
cugccaucauuuuauucca

SEQ ID NO: 2830732 - RNA, 19 nt, Artificial Sequence
  Description of Artificial Sequence: Synthetic oligonucleotide
uccuuucgaaugcucucaa

SEQ ID NO: 2830733 - RNA, 19 nt, Artificial Sequence
  Description of Artificial Sequence: Synthetic oligonucleotide
auaaccaauucgaucguua

SEQ ID NO: 2830734 - RNA, 19 nt, Artificial Sequence
  Description of Artificial Sequence: Synthetic oligonucleotide
ucaucgagcuugagcucca

SEQ ID NO: 2830735 - RNA, 19 nt, Artificial Sequence
  Description of Artificial Sequence: Synthetic oligonucleotide
cuuggggucgcugcugagc

SEQ ID NO: 2830736 - RNA, 19 nt, Artificial Sequence
  Description of Artificial Sequence: Synthetic oligonucleotide
gcaguaacuucaugcagac

SEQ ID NO: 2830737 - RNA, 19 nt, Artificial Sequence
  Description of Artificial Sequence: Synthetic oligonucleotide
cugcaggagacagaaaaca

SEQ ID NO: 2830738 - RNA, 19 nt, Artificial Sequence
  Description of Artificial Sequence: Synthetic oligonucleotide
uauaaccaauucgaucguu

SEQ ID NO: 2830739 - RNA, 19 nt, Artificial Sequence
  Description of Artificial Sequence: Synthetic oligonucleotide
agaggucuggcaugcuaga

SEQ ID NO: 2830740 - RNA, 19 nt, Artificial Sequence
  Description of Artificial Sequence: Synthetic oligonucleotide
acaguccaauuuuccagaa

SEQ ID NO: 2830741 - RNA, 19 nt, Artificial Sequence
  Description of Artificial Sequence: Synthetic oligonucleotide
gaggucuggcaugcuagag

SEQ ID NO: 2830742 - RNA, 19 nt, Artificial Sequence
  Description of Artificial Sequence: Synthetic oligonucleotide
caaguccuuucgaaugcuc

SEQ ID NO: 2830743 - RNA, 19 nt, Artificial Sequence
  Description of Artificial Sequence: Synthetic oligonucleotide
aacuucaugcagacauuau

SEQ ID NO: 2830744 - RNA, 19 nt, Artificial Sequence
  Description of Artificial Sequence: Synthetic oligonucleotide
augcucucaaacucuucaa

SEQ ID NO: 2830745 - RNA, 19 nt, Artificial Sequence
  Description of Artificial Sequence: Synthetic oligonucleotide
caaacucuucaaugucauc

SEQ ID NO: 2830746 - RNA, 19 nt, Artificial Sequence
  Description of Artificial Sequence: Synthetic oligonucleotide
cuguucuguauuucugcca

SEQ ID NO: 2830747 - RNA, 19 nt, Artificial Sequence
  Description of Artificial Sequence: Synthetic oligonucleotide
cuaucuuaucagaaaaguu

SEQ ID NO: 2830748 - RNA, 19 nt, Artificial Sequence
  Description of Artificial Sequence: Synthetic oligonucleotide
ggucuggcaugcuagagaa

SEQ ID NO: 2830749 - RNA, 19 nt, Artificial Sequence
  Description of Artificial Sequence: Synthetic oligonucleotide
cuagagaauccaucucuaa

SEQ ID NO: 2830750 - RNA, 19 nt, Artificial Sequence
  Description of Artificial Sequence: Synthetic oligonucleotide
ugguuccuacaccuuccac

SEQ ID NO: 2830751 - RNA, 19 nt, Artificial Sequence
  Description of Artificial Sequence: Synthetic oligonucleotide
uuauuccauuccagagguc

SEQ ID NO: 2830752 - RNA, 19 nt, Artificial Sequence
  Description of Artificial Sequence: Synthetic oligonucleotide
gggucuccaaguccuuucg

SEQ ID NO: 2830753 - RNA, 19 nt, Artificial Sequence
  Description of Artificial Sequence: Synthetic oligonucleotide
uccauuccagaggucuggc

SEQ ID NO: 2830754 - RNA, 19 nt, Artificial Sequence
  Description of Artificial Sequence: Synthetic oligonucleotide
ugucaucgagcuugagcuc

SEQ ID NO: 2830755 - RNA, 19 nt, Artificial Sequence
  Description of Artificial Sequence: Synthetic oligonucleotide
uuccagaaacaagccagaa

SEQ ID NO: 2830756 - RNA, 19 nt, Artificial Sequence
  Description of Artificial Sequence: Synthetic oligonucleotide
gcuucuaucuuaucagaaa

SEQ ID NO: 2830757 - RNA, 19 nt, Artificial Sequence
  Description of Artificial Sequence: Synthetic oligonucleotide
guuccuacaccuuccacau

SEQ ID NO: 2830758 - RNA, 19 nt, Artificial Sequence
  Description of Artificial Sequence: Synthetic oligonucleotide
cugagaugugcgguuguug

SEQ ID NO: 2830759 - RNA, 19 nt, Artificial Sequence
  Description of Artificial Sequence: Synthetic oligonucleotide
cucuaaaucuguucuguau

SEQ ID NO: 2830760 - RNA, 19 nt, Artificial Sequence
  Description of Artificial Sequence: Synthetic oligonucleotide
gucgcugcugagcccugcg

SEQ ID NO: 2830761 - RNA, 19 nt, Artificial Sequence
  Description of Artificial Sequence: Synthetic oligonucleotide
ccagaaacaagccagaauu

SEQ ID NO: 2830762 - RNA, 19 nt, Artificial Sequence
  Description of Artificial Sequence: Synthetic oligonucleotide
agcccugcggccccuucuc

SEQ ID NO: 2830763 - RNA, 19 nt, Artificial Sequence
  Description of Artificial Sequence: Synthetic oligonucleotide
agguugggguuuauaacca

SEQ ID NO: 2830764 - RNA, 19 nt, Artificial Sequence
  Description of Artificial Sequence: Synthetic oligonucleotide
gacagaaaacauucugcuu

SEQ ID NO: 2830765 - RNA, 19 nt, Artificial Sequence
  Description of Artificial Sequence: Synthetic oligonucleotide
cacacuuaauucucuaaau

SEQ ID NO: 2830766 - RNA, 19 nt, Artificial Sequence
  Description of Artificial Sequence: Synthetic oligonucleotide
uuucugccaucauuuuauu

SEQ ID NO: 2830767 - RNA, 19 nt, Artificial Sequence
  Description of Artificial Sequence: Synthetic oligonucleotide
cuaaaucuguucuguauuu

SEQ ID NO: 2830768 - RNA, 19 nt, Artificial Sequence
  Description of Artificial Sequence: Synthetic oligonucleotide
guccaauuuuccagaaaca

SEQ ID NO: 2830769 - RNA, 19 nt, Artificial Sequence
  Description of Artificial Sequence: Synthetic oligonucleotide
guuuccaaacugagaugug

SEQ ID NO: 2830770 - RNA, 19 nt, Artificial Sequence
  Description of Artificial Sequence: Synthetic oligonucleotide
ugcggccccuucuccauca

SEQ ID NO: 2830771 - RNA, 19 nt, Artificial Sequence
  Description of Artificial Sequence: Synthetic oligonucleotide
ugccaucauuuuauuccau

SEQ ID NO: 2830772 - RNA, 19 nt, Artificial Sequence
  Description of Artificial Sequence: Synthetic oligonucleotide
cuucugcuucuuacggguc

SEQ ID NO: 2830773 - RNA, 19 nt, Artificial Sequence
  Description of Artificial Sequence: Synthetic oligonucleotide
ucuuggggucgcugcugag

SEQ ID NO: 2830774 - RNA, 19 nt, Artificial Sequence
  Description of Artificial Sequence: Synthetic oligonucleotide
ugcuucuuacgggucucca

SEQ ID NO: 2830775 - RNA, 19 nt, Artificial Sequence
  Description of Artificial Sequence: Synthetic oligonucleotide
cuccaucacugguuccuac

SEQ ID NO: 2830776 - RNA, 19 nt, Artificial Sequence
  Description of Artificial Sequence: Synthetic oligonucleotide
aagccagaauuuggcuucu

SEQ ID NO: 2830777 - RNA, 19 nt, Artificial Sequence
  Description of Artificial Sequence: Synthetic oligonucleotide
ggcgaguugguuuucgucu

SEQ ID NO: 2830778 - RNA, 19 nt, Artificial Sequence
  Description of Artificial Sequence: Synthetic oligonucleotide
aggagacagaaaacauucu

SEQ ID NO: 2830779 - RNA, 19 nt, Artificial Sequence
  Description of Artificial Sequence: Synthetic oligonucleotide
ugugcgguuguugggcuua

SEQ ID NO: 2830780 - RNA, 19 nt, Artificial Sequence
  Description of Artificial Sequence: Synthetic oligonucleotide
cauuuguucccggcucuug

SEQ ID NO: 2830781 - RNA, 19 nt, Artificial Sequence
  Description of Artificial Sequence: Synthetic oligonucleotide
uuguugggcuuagguuggg

SEQ ID NO: 2830782 - RNA, 19 nt, Artificial Sequence
  Description of Artificial Sequence: Synthetic oligonucleotide
ccugcaggagacagaaaac

SEQ ID NO: 2830783 - RNA, 19 nt, Artificial Sequence
  Description of Artificial Sequence: Synthetic oligonucleotide
cauuccagaggucuggcau

SEQ ID NO: 2830784 - RNA, 19 nt, Artificial Sequence
  Description of Artificial Sequence: Synthetic oligonucleotide
guccuuucgaaugcucuca

SEQ ID NO: 2830785 - RNA, 19 nt, Artificial Sequence
  Description of Artificial Sequence: Synthetic oligonucleotide
gguaagcuuuccacagucc

SEQ ID NO: 2830786 - RNA, 19 nt, Artificial Sequence
  Description of Artificial Sequence: Synthetic oligonucleotide
agcuugagcuccaggcgag

SEQ ID NO: 2830787 - RNA, 19 nt, Artificial Sequence
  Description of Artificial Sequence: Synthetic oligonucleotide
ugcugagcccugcggcccc

SEQ ID NO: 2830788 - RNA, 19 nt, Artificial Sequence
  Description of Artificial Sequence: Synthetic oligonucleotide
cguuaaucauuuguucccg

SEQ ID NO: 2830789 - RNA, 19 nt, Artificial Sequence
  Description of Artificial Sequence: Synthetic oligonucleotide
agaaaacauucugcuuggu

SEQ ID NO: 2830790 - RNA, 19 nt, Artificial Sequence
  Description of Artificial Sequence: Synthetic oligonucleotide
ccaauucgaucguuaauca

SEQ ID NO: 2830791 - RNA, 19 nt, Artificial Sequence
  Description of Artificial Sequence: Synthetic oligonucleotide
aacauucugcuugguugua

SEQ ID NO: 2830792 - RNA, 19 nt, Artificial Sequence
  Description of Artificial Sequence: Synthetic oligonucleotide
gaugugcgguuguugggcu

SEQ ID NO: 2830793 - RNA, 19 nt, Artificial Sequence
  Description of Artificial Sequence: Synthetic oligonucleotide
guucuguauuucugccauc

SEQ ID NO: 2830794 - RNA, 19 nt, Artificial Sequence
  Description of Artificial Sequence: Synthetic oligonucleotide
ucacugguuccuacaccuu

SEQ ID NO: 2830795 - RNA, 19 nt, Artificial Sequence
  Description of Artificial Sequence: Synthetic oligonucleotide
ccaucacugguuccuacac

SEQ ID NO: 2830796 - RNA, 19 nt, Artificial Sequence
  Description of Artificial Sequence: Synthetic oligonucleotide
auccaucucuaaaacucaa

SEQ ID NO: 2830797 - RNA, 19 nt, Artificial Sequence
  Description of Artificial Sequence: Synthetic oligonucleotide
cccugcaggagacagaaaa

SEQ ID NO: 2830798 - RNA, 19 nt, Artificial Sequence
  Description of Artificial Sequence: Synthetic oligonucleotide
cuguauuucugccaucauu

SEQ ID NO: 2830799 - RNA, 19 nt, Artificial Sequence
  Description of Artificial Sequence: Synthetic oligonucleotide
uuccuacaccuuccacauc

SEQ ID NO: 2830800 - RNA, 19 nt, Artificial Sequence
  Description of Artificial Sequence: Synthetic oligonucleotide
agcuuuccacaguccaauu

SEQ ID NO: 2830801 - RNA, 19 nt, Artificial Sequence
  Description of Artificial Sequence: Synthetic oligonucleotide
ugcgguuguugggcuuagg

SEQ ID NO: 2830802 - RNA, 19 nt, Artificial Sequence
  Description of Artificial Sequence: Synthetic oligonucleotide
gcaugcuagagaauccauc

SEQ ID NO: 2830803 - RNA, 19 nt, Artificial Sequence
  Description of Artificial Sequence: Synthetic oligonucleotide
cucccugcaggagacagaa

SEQ ID NO: 2830804 - RNA, 19 nt, Artificial Sequence
  Description of Artificial Sequence: Synthetic oligonucleotide
caaacugagaugugcgguu

SEQ ID NO: 2830805 - RNA, 19 nt, Artificial Sequence
  Description of Artificial Sequence: Synthetic oligonucleotide
ucauuuguucccggcucuu

SEQ ID NO: 2830806 - RNA, 19 nt, Artificial Sequence
  Description of Artificial Sequence: Synthetic oligonucleotide
cugcugagcccugcggccc

SEQ ID NO: 2830807 - RNA, 19 nt, Artificial Sequence
  Description of Artificial Sequence: Synthetic oligonucleotide
ucuccaucacugguuccua

SEQ ID NO: 2830808 - RNA, 19 nt, Artificial Sequence
  Description of Artificial Sequence: Synthetic oligonucleotide
cuuccacaucuuccuucug

SEQ ID NO: 2830809 - RNA, 19 nt, Artificial Sequence
  Description of Artificial Sequence: Synthetic oligonucleotide
caauucgaucguuaaucau

SEQ ID NO: 2830810 - RNA, 19 nt, Artificial Sequence
  Description of Artificial Sequence: Synthetic oligonucleotide
acugagaugugcgguuguu

SEQ ID NO: 2830811 - RNA, 19 nt, Artificial Sequence
  Description of Artificial Sequence: Synthetic oligonucleotide
cugcuucuuacgggucucc

SEQ ID NO: 2830812 - RNA, 19 nt, Artificial Sequence
  Description of Artificial Sequence: Synthetic oligonucleotide
cucuuggggucgcugcuga

SEQ ID NO: 2830813 - RNA, 19 nt, Artificial Sequence
  Description of Artificial Sequence: Synthetic oligonucleotide
cugguuccuacaccuucca

SEQ ID NO: 2830814 - RNA, 19 nt, Artificial Sequence
  Description of Artificial Sequence: Synthetic oligonucleotide
gcgaguugguuuucgucuc

SEQ ID NO: 2830815 - RNA, 19 nt, Artificial Sequence
  Description of Artificial Sequence: Synthetic oligonucleotide
ggcuucuaucuuaucagaa

SEQ ID NO: 2830816 - RNA, 19 nt, Artificial Sequence
  Description of Artificial Sequence: Synthetic oligonucleotide
cagaaacaagccagaauuu

SEQ ID NO: 2830817 - RNA, 19 nt, Artificial Sequence
  Description of Artificial Sequence: Synthetic oligonucleotide
guugggguuuauaaccaau

SEQ ID NO: 2830818 - RNA, 19 nt, Artificial Sequence
  Description of Artificial Sequence: Synthetic oligonucleotide
caguccaauuuuccagaaa

SEQ ID NO: 2830819 - RNA, 19 nt, Artificial Sequence
  Description of Artificial Sequence: Synthetic oligonucleotide
gguugggguuuauaaccaa

SEQ ID NO: 2830820 - RNA, 19 nt, Artificial Sequence
  Description of Artificial Sequence: Synthetic oligonucleotide
caaugucaucgagcuugag

SEQ ID NO: 2830821 - RNA, 19 nt, Artificial Sequence
  Description of Artificial Sequence: Synthetic oligonucleotide
gguuuauaaccaauucgau

SEQ ID NO: 2830822 - RNA, 19 nt, Artificial Sequence
  Description of Artificial Sequence: Synthetic oligonucleotide
ugagcccugcggccccuuc

SEQ ID NO: 2830823 - RNA, 19 nt, Artificial Sequence
  Description of Artificial Sequence: Synthetic oligonucleotide
gcuucuuacgggucuccaa

SEQ ID NO: 2830824 - RNA, 19 nt, Artificial Sequence
  Description of Artificial Sequence: Synthetic oligonucleotide
uacgggucuccaaguccuu

SEQ ID NO: 2830825 - RNA, 19 nt, Artificial Sequence
  Description of Artificial Sequence: Synthetic oligonucleotide
augugcgguuguugggcuu

SEQ ID NO: 2830826 - RNA, 19 nt, Artificial Sequence
  Description of Artificial Sequence: Synthetic oligonucleotide
gcuagagaauccaucucua

SEQ ID NO: 2830827 - RNA, 19 nt, Artificial Sequence
  Description of Artificial Sequence: Synthetic oligonucleotide
ucccugcaggagacagaaa

SEQ ID NO: 2830828 - RNA, 19 nt, Artificial Sequence
  Description of Artificial Sequence: Synthetic oligonucleotide
caucgagcuugagcuccag

SEQ ID NO: 2830829 - RNA, 19 nt, Artificial Sequence
  Description of Artificial Sequence: Synthetic oligonucleotide
gcgguuguugggcuuaggu

SEQ ID NO: 2830830 - RNA, 19 nt, Artificial Sequence
  Description of Artificial Sequence: Synthetic oligonucleotide
agcuccaggcgaguugguu

SEQ ID NO: 2830831 - RNA, 19 nt, Artificial Sequence
  Description of Artificial Sequence: Synthetic oligonucleotide
ccaggcgaguugguuuucg

SEQ ID NO: 2830832 - RNA, 19 nt, Artificial Sequence
  Description of Artificial Sequence: Synthetic oligonucleotide
guaacuucaugcagacauu

SEQ ID NO: 2830833 - RNA, 19 nt, Artificial Sequence
  Description of Artificial Sequence: Synthetic oligonucleotide
cagguaagcuuuccacagu

SEQ ID NO: 2830834 - RNA, 19 nt, Artificial Sequence
  Description of Artificial Sequence: Synthetic oligonucleotide
uccagaggucuggcaugcu

SEQ ID NO: 2830835 - RNA, 19 nt, Artificial Sequence
  Description of Artificial Sequence: Synthetic oligonucleotide
gccaucauuuuauuccauu

SEQ ID NO: 2830836 - RNA, 19 nt, Artificial Sequence
  Description of Artificial Sequence: Synthetic oligonucleotide
caguaacuucaugcagaca

SEQ ID NO: 2830837 - RNA, 19 nt, Artificial Sequence
  Description of Artificial Sequence: Synthetic oligonucleotide
uccaggcgaguugguuuuc

SEQ ID NO: 2830838 - RNA, 19 nt, Artificial Sequence
  Description of Artificial Sequence: Synthetic oligonucleotide
gugcgguuguugggcuuag

SEQ ID NO: 2830839 - RNA, 19 nt, Artificial Sequence
  Description of Artificial Sequence: Synthetic oligonucleotide
acgggucuccaaguccuuu

SEQ ID NO: 2830840 - RNA, 19 nt, Artificial Sequence
  Description of Artificial Sequence: Synthetic oligonucleotide
cuccaggcgaguugguuuu

SEQ ID NO: 2830841 - RNA, 19 nt, Artificial Sequence
  Description of Artificial Sequence: Synthetic oligonucleotide
gccagaauuuggcuucuau

SEQ ID NO: 2830842 - RNA, 19 nt, Artificial Sequence
  Description of Artificial Sequence: Synthetic oligonucleotide
gcucuuggggucgcugcug

SEQ ID NO: 2830843 - RNA, 19 nt, Artificial Sequence
  Description of Artificial Sequence: Synthetic oligonucleotide
gagcccugcggccccuucu

SEQ ID NO: 2830844 - RNA, 19 nt, Artificial Sequence
  Description of Artificial Sequence: Synthetic oligonucleotide
ccaaacugagaugugcggu

SEQ ID NO: 2830845 - RNA, 19 nt, Artificial Sequence
  Description of Artificial Sequence: Synthetic oligonucleotide
cgaucguuaaucauuuguu

SEQ ID NO: 2830846 - RNA, 19 nt, Artificial Sequence
  Description of Artificial Sequence: Synthetic oligonucleotide
gcuccaggcgaguugguuu

SEQ ID NO: 2830847 - RNA, 19 nt, Artificial Sequence
  Description of Artificial Sequence: Synthetic oligonucleotide
guuuucgucucagcauauu

SEQ ID NO: 2830848 - RNA, 19 nt, Artificial Sequence
  Description of Artificial Sequence: Synthetic oligonucleotide
cggcucuuggggucgcugc

SEQ ID NO: 2830849 - RNA, 19 nt, Artificial Sequence
  Description of Artificial Sequence: Synthetic oligonucleotide
caggcgaguugguuuucgu

SEQ ID NO: 2830850 - RNA, 19 nt, Artificial Sequence
  Description of Artificial Sequence: Synthetic oligonucleotide
ccauuccagaggucuggca

SEQ ID NO: 2830851 - RNA, 19 nt, Artificial Sequence
  Description of Artificial Sequence: Synthetic oligonucleotide
cgggucuccaaguccuuuc

SEQ ID NO: 2830852 - RNA, 19 nt, Artificial Sequence
  Description of Artificial Sequence: Synthetic oligonucleotide
gcuugguuguacacacuua

SEQ ID NO: 2830853 - RNA, 19 nt, Artificial Sequence
  Description of Artificial Sequence: Synthetic oligonucleotide
ccuuucgaaugcucucaaa

SEQ ID NO: 2830854 - RNA, 19 nt, Artificial Sequence
  Description of Artificial Sequence: Synthetic oligonucleotide
cuucaaugucaucgagcuu

SEQ ID NO: 2830855 - RNA, 19 nt, Artificial Sequence
  Description of Artificial Sequence: Synthetic oligonucleotide
ccagaggucuggcaugcua

SEQ ID NO: 2830856 - RNA, 19 nt, Artificial Sequence
  Description of Artificial Sequence: Synthetic oligonucleotide
cugcuugguuguacacacu

SEQ ID NO: 2830857 - RNA, 19 nt, Artificial Sequence
  Description of Artificial Sequence: Synthetic oligonucleotide
gcuuagguugggguuuaua

SEQ ID NO: 2830858 - RNA, 19 nt, Artificial Sequence
  Description of Artificial Sequence: Synthetic oligonucleotide
ucccggcucuuggggucgc

SEQ ID NO: 2830859 - RNA, 19 nt, Artificial Sequence
  Description of Artificial Sequence: Synthetic oligonucleotide
agccagaauuuggcuucua

SEQ ID NO: 2830860 - RNA, 19 nt, Artificial Sequence
  Description of Artificial Sequence: Synthetic oligonucleotide
cuugagcuccaggcgaguu

SEQ ID NO: 2830861 - RNA, 19 nt, Artificial Sequence
  Description of Artificial Sequence: Synthetic oligonucleotide
ggggucgcugcugagcccu

SEQ ID NO: 2830862 - RNA, 19 nt, Artificial Sequence
  Description of Artificial Sequence: Synthetic oligonucleotide
gcccugcggccccuucucc

SEQ ID NO: 2830863 - RNA, 19 nt, Artificial Sequence
  Description of Artificial Sequence: Synthetic oligonucleotide
ggcaugcuagagaauccau

SEQ ID NO: 2830864 - RNA, 19 nt, Artificial Sequence
  Description of Artificial Sequence: Synthetic oligonucleotide
gguuuucgucucagcauau

SEQ ID NO: 2830865 - RNA, 19 nt, Artificial Sequence
  Description of Artificial Sequence: Synthetic oligonucleotide
cgaguugguuuucgucuca

SEQ ID NO: 2830866 - RNA, 19 nt, Artificial Sequence
  Description of Artificial Sequence: Synthetic oligonucleotide
ccggcucuuggggucgcug

SEQ ID NO: 2830867 - RNA, 19 nt, Artificial Sequence
  Description of Artificial Sequence: Synthetic oligonucleotide
ccaaguccuuucgaaugcu

SEQ ID NO: 2830868 - RNA, 19 nt, Artificial Sequence
  Description of Artificial Sequence: Synthetic oligonucleotide
cgaaugcucucaaacucuu

SEQ ID NO: 2830869 - RNA, 19 nt, Artificial Sequence
  Description of Artificial Sequence: Synthetic oligonucleotide
cgguuguugggcuuagguu

SEQ ID NO: 2830870 - RNA, 19 nt, Artificial Sequence
  Description of Artificial Sequence: Synthetic oligonucleotide
gcggccccuucuccaucac

SEQ ID NO: 2830871 - RNA, 19 nt, Artificial Sequence
  Description of Artificial Sequence: Synthetic oligonucleotide
gagcuccaggcgaguuggu

SEQ ID NO: 2830872 - RNA, 19 nt, Artificial Sequence
  Description of Artificial Sequence: Synthetic oligonucleotide
gggucgcugcugagcccug

SEQ ID NO: 2830873 - RNA, 19 nt, Artificial Sequence
  Description of Artificial Sequence: Synthetic oligonucleotide
ccacaucuuccuucugcuu

SEQ ID NO: 2830874 - RNA, 19 nt, Artificial Sequence
  Description of Artificial Sequence: Synthetic oligonucleotide
ccugcggccccuucuccau

SEQ ID NO: 2830875 - RNA, 19 nt, Artificial Sequence
  Description of Artificial Sequence: Synthetic oligonucleotide
ggcuuagguugggguuuau

SEQ ID NO: 2830876 - RNA, 19 nt, Artificial Sequence
  Description of Artificial Sequence: Synthetic oligonucleotide
gcugagcccugcggccccu

SEQ ID NO: 2830877 - RNA, 19 nt, Artificial Sequence
  Description of Artificial Sequence: Synthetic oligonucleotide
cugagcccugcggccccuu

SEQ ID NO: 2830878 - RNA, 19 nt, Artificial Sequence
  Description of Artificial Sequence: Synthetic oligonucleotide
cccggcucuuggggucgcu

SEQ ID NO: 2830879 - RNA, 19 nt, Artificial Sequence
  Description of Artificial Sequence: Synthetic oligonucleotide
aaaucugacaguuaaaggc

SEQ ID NO: 2830880 - RNA, 19 nt, Artificial Sequence
  Description of Artificial Sequence: Synthetic oligonucleotide
aauuagagaaaucugacag

SEQ ID NO: 2830881 - RNA, 19 nt, Artificial Sequence
  Description of Artificial Sequence: Synthetic oligonucleotide
uuaucaguaaauuugaccc

SEQ ID NO: 2830882 - RNA, 19 nt, Artificial Sequence
  Description of Artificial Sequence: Synthetic oligonucleotide
aauucagucucccacagac

SEQ ID NO: 2830883 - RNA, 19 nt, Artificial Sequence
  Description of Artificial Sequence: Synthetic oligonucleotide
guaaauuugacccacauug

SEQ ID NO: 2830884 - RNA, 19 nt, Artificial Sequence
  Description of Artificial Sequence: Synthetic oligonucleotide
uuuauuaccagugugaaca

SEQ ID NO: 2830885 - RNA, 19 nt, Artificial Sequence
  Description of Artificial Sequence: Synthetic oligonucleotide
aucaauaaaucucuguggc

SEQ ID NO: 2830886 - RNA, 19 nt, Artificial Sequence
  Description of Artificial Sequence: Synthetic oligonucleotide
uuuuauugcauccacauaa

SEQ ID NO: 2830887 - RNA, 19 nt, Artificial Sequence
  Description of Artificial Sequence: Synthetic oligonucleotide
aaagguuagaggcuuaauc

SEQ ID NO: 2830888 - RNA, 19 nt, Artificial Sequence
  Description of Artificial Sequence: Synthetic oligonucleotide
aagcaucacauucauaugg

SEQ ID NO: 2830889 - RNA, 19 nt, Artificial Sequence
  Description of Artificial Sequence: Synthetic oligonucleotide
auuuaugggguuuauuacc

SEQ ID NO: 2830890 - RNA, 19 nt, Artificial Sequence
  Description of Artificial Sequence: Synthetic oligonucleotide
aacagaguaaucauaauuc

SEQ ID NO: 2830891 - RNA, 19 nt, Artificial Sequence
  Description of Artificial Sequence: Synthetic oligonucleotide
ugcuuuaucaguaaauuug

SEQ ID NO: 2830892 - RNA, 19 nt, Artificial Sequence
  Description of Artificial Sequence: Synthetic oligonucleotide
uagaacuacuugaagaagg

SEQ ID NO: 2830893 - RNA, 19 nt, Artificial Sequence
  Description of Artificial Sequence: Synthetic oligonucleotide
aaauuugacccacauuggg

SEQ ID NO: 2830894 - RNA, 19 nt, Artificial Sequence
  Description of Artificial Sequence: Synthetic oligonucleotide
uuuaucaguaaauuugacc

SEQ ID NO: 2830895 - RNA, 19 nt, Artificial Sequence
  Description of Artificial Sequence: Synthetic oligonucleotide
auucauaugguugacaagg

SEQ ID NO: 2830896 - RNA, 19 nt, Artificial Sequence
  Description of Artificial Sequence: Synthetic oligonucleotide
uaugaaaacagaguaauca

SEQ ID NO: 2830897 - RNA, 19 nt, Artificial Sequence
  Description of Artificial Sequence: Synthetic oligonucleotide
aagguuagaggcuuaauca

SEQ ID NO: 2830898 - RNA, 19 nt, Artificial Sequence
  Description of Artificial Sequence: Synthetic oligonucleotide
auuugacccacauuggggc

SEQ ID NO: 2830899 - RNA, 19 nt, Artificial Sequence
  Description of Artificial Sequence: Synthetic oligonucleotide
ugagaaauugcuuuaucag

SEQ ID NO: 2830900 - RNA, 19 nt, Artificial Sequence
  Description of Artificial Sequence: Synthetic oligonucleotide
acauuccucacauuuaugg

SEQ ID NO: 2830901 - RNA, 19 nt, Artificial Sequence
  Description of Artificial Sequence: Synthetic oligonucleotide
aagucaacuccacugaaag

SEQ ID NO: 2830902 - RNA, 19 nt, Artificial Sequence
  Description of Artificial Sequence: Synthetic oligonucleotide
guaaucauaauucagucuc

SEQ ID NO: 2830903 - RNA, 19 nt, Artificial Sequence
  Description of Artificial Sequence: Synthetic oligonucleotide
auugcauccacauaauaug

SEQ ID NO: 2830904 - RNA, 19 nt, Artificial Sequence
  Description of Artificial Sequence: Synthetic oligonucleotide
auuggggccauacuaaaac

SEQ ID NO: 2830905 - RNA, 19 nt, Artificial Sequence
  Description of Artificial Sequence: Synthetic oligonucleotide
uuuagaacuacuugaagaa

SEQ ID NO: 2830906 - RNA, 19 nt, Artificial Sequence
  Description of Artificial Sequence: Synthetic oligonucleotide
uuuugaugcugaauuagag

SEQ ID NO: 2830907 - RNA, 19 nt, Artificial Sequence
  Description of Artificial Sequence: Synthetic oligonucleotide
auucauaggaccuuuagaa

SEQ ID NO: 2830908 - RNA, 19 nt, Artificial Sequence
  Description of Artificial Sequence: Synthetic oligonucleotide
gaaaucugacaguuaaagg

SEQ ID NO: 2830909 - RNA, 19 nt, Artificial Sequence
  Description of Artificial Sequence: Synthetic oligonucleotide
uguggcuaugaaaacagag

SEQ ID NO: 2830910 - RNA, 19 nt, Artificial Sequence
  Description of Artificial Sequence: Synthetic oligonucleotide
auuccucacauuuaugggg

SEQ ID NO: 2830911 - RNA, 19 nt, Artificial Sequence
  Description of Artificial Sequence: Synthetic oligonucleotide
uaaauuugacccacauugg

SEQ ID NO: 2830912 - RNA, 19 nt, Artificial Sequence
  Description of Artificial Sequence: Synthetic oligonucleotide
ucauaauucagucucccac

SEQ ID NO: 2830913 - RNA, 19 nt, Artificial Sequence
  Description of Artificial Sequence: Synthetic oligonucleotide
uugaugcugaauuagagaa

SEQ ID NO: 2830914 - RNA, 19 nt, Artificial Sequence
  Description of Artificial Sequence: Synthetic oligonucleotide
aaacagaguaaucauaauu

SEQ ID NO: 2830915 - RNA, 19 nt, Artificial Sequence
  Description of Artificial Sequence: Synthetic oligonucleotide
acaguuaaaggcuucacca

SEQ ID NO: 2830916 - RNA, 19 nt, Artificial Sequence
  Description of Artificial Sequence: Synthetic oligonucleotide
ugaauuagagaaaucugac

SEQ ID NO: 2830917 - RNA, 19 nt, Artificial Sequence
  Description of Artificial Sequence: Synthetic oligonucleotide
uugaagaaggccaaugaga

SEQ ID NO: 2830918 - RNA, 19 nt, Artificial Sequence
  Description of Artificial Sequence: Synthetic oligonucleotide
ucaaacucagguauaugag

SEQ ID NO: 2830919 - RNA, 19 nt, Artificial Sequence
  Description of Artificial Sequence: Synthetic oligonucleotide
ucuguggcuaugaaaacag

SEQ ID NO: 2830920 - RNA, 19 nt, Artificial Sequence
  Description of Artificial Sequence: Synthetic oligonucleotide
ucauaggaccuuuagaacu

SEQ ID NO: 2830921 - RNA, 19 nt, Artificial Sequence
  Description of Artificial Sequence: Synthetic oligonucleotide
cauaacauuucuccuaugc

SEQ ID NO: 2830922 - RNA, 19 nt, Artificial Sequence
  Description of Artificial Sequence: Synthetic oligonucleotide
auuaccagugugaacaccc

SEQ ID NO: 2830923 - RNA, 19 nt, Artificial Sequence
  Description of Artificial Sequence: Synthetic oligonucleotide
uauugcauccacauaauau

SEQ ID NO: 2830924 - RNA, 19 nt, Artificial Sequence
  Description of Artificial Sequence: Synthetic oligonucleotide
ugaauaagaccugaguucc

SEQ ID NO: 2830925 - RNA, 19 nt, Artificial Sequence
  Description of Artificial Sequence: Synthetic oligonucleotide
ucugguguugaauaagacc

SEQ ID NO: 2830926 - RNA, 19 nt, Artificial Sequence
  Description of Artificial Sequence: Synthetic oligonucleotide
uuuaugggguuuauuacca

SEQ ID NO: 2830927 - RNA, 19 nt, Artificial Sequence
  Description of Artificial Sequence: Synthetic oligonucleotide
uccacugaaagguuagagg

SEQ ID NO: 2830928 - RNA, 19 nt, Artificial Sequence
  Description of Artificial Sequence: Synthetic oligonucleotide
agaaaucugacaguuaaag

SEQ ID NO: 2830929 - RNA, 19 nt, Artificial Sequence
  Description of Artificial Sequence: Synthetic oligonucleotide
aauuugacccacauugggg

SEQ ID NO: 2830930 - RNA, 19 nt, Artificial Sequence
  Description of Artificial Sequence: Synthetic oligonucleotide
uuaaucaauaaaucucugu

SEQ ID NO: 2830931 - RNA, 19 nt, Artificial Sequence
  Description of Artificial Sequence: Synthetic oligonucleotide
uugaauaagaccugaguuc

SEQ ID NO: 2830932 - RNA, 19 nt, Artificial Sequence
  Description of Artificial Sequence: Synthetic oligonucleotide
uguauguauucucuggugu

SEQ ID NO: 2830933 - RNA, 19 nt, Artificial Sequence
  Description of Artificial Sequence: Synthetic oligonucleotide
uucaccacaagcaucacau

SEQ ID NO: 2830934 - RNA, 19 nt, Artificial Sequence
  Description of Artificial Sequence: Synthetic oligonucleotide
ugcguuguugacuaaaacu

SEQ ID NO: 2830935 - RNA, 19 nt, Artificial Sequence
  Description of Artificial Sequence: Synthetic oligonucleotide
cuuuagaacuacuugaaga

SEQ ID NO: 2830936 - RNA, 19 nt, Artificial Sequence
  Description of Artificial Sequence: Synthetic oligonucleotide
aaaacugcacuuggguagc

SEQ ID NO: 2830937 - RNA, 19 nt, Artificial Sequence
  Description of Artificial Sequence: Synthetic oligonucleotide
cauaugguugacaaggcug

SEQ ID NO: 2830938 - RNA, 19 nt, Artificial Sequence
  Description of Artificial Sequence: Synthetic oligonucleotide
uguugaauaagaccugagu

SEQ ID NO: 2830939 - RNA, 19 nt, Artificial Sequence
  Description of Artificial Sequence: Synthetic oligonucleotide
accuguaagguuucucucc

SEQ ID NO: 2830940 - RNA, 19 nt, Artificial Sequence
  Description of Artificial Sequence: Synthetic oligonucleotide
uauucauaggaccuuuaga

SEQ ID NO: 2830941 - RNA, 19 nt, Artificial Sequence
  Description of Artificial Sequence: Synthetic oligonucleotide
uuugaugcugaauuagaga

SEQ ID NO: 2830942 - RNA, 19 nt, Artificial Sequence
  Description of Artificial Sequence: Synthetic oligonucleotide
auacuaaaacugcacuugg

SEQ ID NO: 2830943 - RNA, 19 nt, Artificial Sequence
  Description of Artificial Sequence: Synthetic oligonucleotide
ugcugaauuagagaaaucu

SEQ ID NO: 2830944 - RNA, 19 nt, Artificial Sequence
  Description of Artificial Sequence: Synthetic oligonucleotide
auuucuccuaugcuuugcc

SEQ ID NO: 2830945 - RNA, 19 nt, Artificial Sequence
  Description of Artificial Sequence: Synthetic oligonucleotide
uccacuauucauaggaccu

SEQ ID NO: 2830946 - RNA, 19 nt, Artificial Sequence
  Description of Artificial Sequence: Synthetic oligonucleotide
acuaaaacugcacuugggu

SEQ ID NO: 2830947 - RNA, 19 nt, Artificial Sequence
  Description of Artificial Sequence: Synthetic oligonucleotide
aacuacuugaagaaggcca

SEQ ID NO: 2830948 - RNA, 19 nt, Artificial Sequence
  Description of Artificial Sequence: Synthetic oligonucleotide
acauuuaugggguuuauua

SEQ ID NO: 2830949 - RNA, 19 nt, Artificial Sequence
  Description of Artificial Sequence: Synthetic oligonucleotide
aaacucagguauaugagug

SEQ ID NO: 2830950 - RNA, 19 nt, Artificial Sequence
  Description of Artificial Sequence: Synthetic oligonucleotide
aaggccaaugagaaauugc

SEQ ID NO: 2830951 - RNA, 19 nt, Artificial Sequence
  Description of Artificial Sequence: Synthetic oligonucleotide
uacuaaaacugcacuuggg

SEQ ID NO: 2830952 - RNA, 19 nt, Artificial Sequence
  Description of Artificial Sequence: Synthetic oligonucleotide
auaugguugacaaggcugc

SEQ ID NO: 2830953 - RNA, 19 nt, Artificial Sequence
  Description of Artificial Sequence: Synthetic oligonucleotide
aaaggcuucaccacaagca

SEQ ID NO: 2830954 - RNA, 19 nt, Artificial Sequence
  Description of Artificial Sequence: Synthetic oligonucleotide
ugacuaaaacuuuugucac

SEQ ID NO: 2830955 - RNA, 19 nt, Artificial Sequence
  Description of Artificial Sequence: Synthetic oligonucleotide
aguaaucauaauucagucu

SEQ ID NO: 2830956 - RNA, 19 nt, Artificial Sequence
  Description of Artificial Sequence: Synthetic oligonucleotide
gacaguuaaaggcuucacc

SEQ ID NO: 2830957 - RNA, 19 nt, Artificial Sequence
  Description of Artificial Sequence: Synthetic oligonucleotide
caucacauucauaugguug

SEQ ID NO: 2830958 - RNA, 19 nt, Artificial Sequence
  Description of Artificial Sequence: Synthetic oligonucleotide
uaaaggcuucaccacaagc

SEQ ID NO: 2830959 - RNA, 19 nt, Artificial Sequence
  Description of Artificial Sequence: Synthetic oligonucleotide
uagucucaaacucagguau

SEQ ID NO: 2830960 - RNA, 19 nt, Artificial Sequence
  Description of Artificial Sequence: Synthetic oligonucleotide
uguugacuaaaacuuuugu

SEQ ID NO: 2830961 - RNA, 19 nt, Artificial Sequence
  Description of Artificial Sequence: Synthetic oligonucleotide
agaacuacuugaagaaggc

SEQ ID NO: 2830962 - RNA, 19 nt, Artificial Sequence
  Description of Artificial Sequence: Synthetic oligonucleotide
aaucugacaguuaaaggcu

SEQ ID NO: 2830963 - RNA, 19 nt, Artificial Sequence
  Description of Artificial Sequence: Synthetic oligonucleotide
auaagaccugaguuccugc

SEQ ID NO: 2830964 - RNA, 19 nt, Artificial Sequence
  Description of Artificial Sequence: Synthetic oligonucleotide
uugcauccacauaauaugc

SEQ ID NO: 2830965 - RNA, 19 nt, Artificial Sequence
  Description of Artificial Sequence: Synthetic oligonucleotide
cugaauuagagaaaucuga

SEQ ID NO: 2830966 - RNA, 19 nt, Artificial Sequence
  Description of Artificial Sequence: Synthetic oligonucleotide
gaaaacagaguaaucauaa

SEQ ID NO: 2830967 - RNA, 19 nt, Artificial Sequence
  Description of Artificial Sequence: Synthetic oligonucleotide
aggcuuaaucaauaaaucu

SEQ ID NO: 2830968 - RNA, 19 nt, Artificial Sequence
  Description of Artificial Sequence: Synthetic oligonucleotide
gaccuuuagaacuacuuga

SEQ ID NO: 2830969 - RNA, 19 nt, Artificial Sequence
  Description of Artificial Sequence: Synthetic oligonucleotide
gaguaaucauaauucaguc

SEQ ID NO: 2830970 - RNA, 19 nt, Artificial Sequence
  Description of Artificial Sequence: Synthetic oligonucleotide
aucaguaaauuugacccac

SEQ ID NO: 2830971 - RNA, 19 nt, Artificial Sequence
  Description of Artificial Sequence: Synthetic oligonucleotide
uggcuaugaaaacagagua

SEQ ID NO: 2830972 - RNA, 19 nt, Artificial Sequence
  Description of Artificial Sequence: Synthetic oligonucleotide
uaaucauaauucagucucc

SEQ ID NO: 2830973 - RNA, 19 nt, Artificial Sequence
  Description of Artificial Sequence: Synthetic oligonucleotide
ugaaaacagaguaaucaua

SEQ ID NO: 2830974 - RNA, 19 nt, Artificial Sequence
  Description of Artificial Sequence: Synthetic oligonucleotide
uucauaacauuucuccuau

SEQ ID NO: 2830975 - RNA, 19 nt, Artificial Sequence
  Description of Artificial Sequence: Synthetic oligonucleotide
cuugaagaaggccaaugag

SEQ ID NO: 2830976 - RNA, 19 nt, Artificial Sequence
  Description of Artificial Sequence: Synthetic oligonucleotide
guugacuaaaacuuuuguc

SEQ ID NO: 2830977 - RNA, 19 nt, Artificial Sequence
  Description of Artificial Sequence: Synthetic oligonucleotide
auaacauuucuccuaugcu

SEQ ID NO: 2830978 - RNA, 19 nt, Artificial Sequence
  Description of Artificial Sequence: Synthetic oligonucleotide
acauucauaugguugacaa

SEQ ID NO: 2830979 - RNA, 19 nt, Artificial Sequence
  Description of Artificial Sequence: Synthetic oligonucleotide
aauaagaccugaguuccug

SEQ ID NO: 2830980 - RNA, 19 nt, Artificial Sequence
  Description of Artificial Sequence: Synthetic oligonucleotide
cauacuaaaacugcacuug

SEQ ID NO: 2830981 - RNA, 19 nt, Artificial Sequence
  Description of Artificial Sequence: Synthetic oligonucleotide
gaauuagagaaaucugaca

SEQ ID NO: 2830982 - RNA, 19 nt, Artificial Sequence
  Description of Artificial Sequence: Synthetic oligonucleotide
cauuuaugggguuuauuac

SEQ ID NO: 2830983 - RNA, 19 nt, Artificial Sequence
  Description of Artificial Sequence: Synthetic oligonucleotide
acagaguaaucauaauuca

SEQ ID NO: 2830984 - RNA, 19 nt, Artificial Sequence
  Description of Artificial Sequence: Synthetic oligonucleotide
auaauucagucucccacag

SEQ ID NO: 2830985 - RNA, 19 nt, Artificial Sequence
  Description of Artificial Sequence: Synthetic oligonucleotide
agaguaaucauaauucagu

SEQ ID NO: 2830986 - RNA, 19 nt, Artificial Sequence
  Description of Artificial Sequence: Synthetic oligonucleotide
uaacauuucuccuaugcuu

SEQ ID NO: 2830987 - RNA, 19 nt, Artificial Sequence
  Description of Artificial Sequence: Synthetic oligonucleotide
cauuccucacauuuauggg

SEQ ID NO: 2830988 - RNA, 19 nt, Artificial Sequence
  Description of Artificial Sequence: Synthetic oligonucleotide
cagaguaaucauaauucag

SEQ ID NO: 2830989 - RNA, 19 nt, Artificial Sequence
  Description of Artificial Sequence: Synthetic oligonucleotide
ugccaagucaacuccacug

SEQ ID NO: 2830990 - RNA, 19 nt, Artificial Sequence
  Description of Artificial Sequence: Synthetic oligonucleotide
uuguugacuaaaacuuuug

SEQ ID NO: 2830991 - RNA, 19 nt, Artificial Sequence
  Description of Artificial Sequence: Synthetic oligonucleotide
uggguagcuagucucaaac

SEQ ID NO: 2830992 - RNA, 19 nt, Artificial Sequence
  Description of Artificial Sequence: Synthetic oligonucleotide
cucaaacucagguauauga

SEQ ID NO: 2830993 - RNA, 19 nt, Artificial Sequence
  Description of Artificial Sequence: Synthetic oligonucleotide
aguuaaaggcuucaccaca

SEQ ID NO: 2830994 - RNA, 19 nt, Artificial Sequence
  Description of Artificial Sequence: Synthetic oligonucleotide
aauaaaucucuguggcuau

SEQ ID NO: 2830995 - RNA, 19 nt, Artificial Sequence
  Description of Artificial Sequence: Synthetic oligonucleotide
auuagagaaaucugacagu

SEQ ID NO: 2830996 - RNA, 19 nt, Artificial Sequence
  Description of Artificial Sequence: Synthetic oligonucleotide
augaaaacagaguaaucau

SEQ ID NO: 2830997 - RNA, 19 nt, Artificial Sequence
  Description of Artificial Sequence: Synthetic oligonucleotide
uuagaacuacuugaagaag

SEQ ID NO: 2830998 - RNA, 19 nt, Artificial Sequence
  Description of Artificial Sequence: Synthetic oligonucleotide
uucauaugguugacaaggc

SEQ ID NO: 2830999 - RNA, 19 nt, Artificial Sequence
  Description of Artificial Sequence: Synthetic oligonucleotide
aaauugcuuuaucaguaaa

SEQ ID NO: 2831000 - RNA, 19 nt, Artificial Sequence
  Description of Artificial Sequence: Synthetic oligonucleotide
uuagagaaaucugacaguu

SEQ ID NO: 2831001 - RNA, 19 nt, Artificial Sequence
  Description of Artificial Sequence: Synthetic oligonucleotide
uagcuagucucaaacucag

SEQ ID NO: 2831002 - RNA, 19 nt, Artificial Sequence
  Description of Artificial Sequence: Synthetic oligonucleotide
aaaacagaguaaucauaau

SEQ ID NO: 2831003 - RNA, 19 nt, Artificial Sequence
  Description of Artificial Sequence: Synthetic oligonucleotide
acuugaagaaggccaauga

SEQ ID NO: 2831004 - RNA, 19 nt, Artificial Sequence
  Description of Artificial Sequence: Synthetic oligonucleotide
uaucaguaaauuugaccca

SEQ ID NO: 2831005 - RNA, 19 nt, Artificial Sequence
  Description of Artificial Sequence: Synthetic oligonucleotide
ugaguuccugcuaaaggcu

SEQ ID NO: 2831006 - RNA, 19 nt, Artificial Sequence
  Description of Artificial Sequence: Synthetic oligonucleotide
agaggcuuaaucaauaaau

SEQ ID NO: 2831007 - RNA, 19 nt, Artificial Sequence
  Description of Artificial Sequence: Synthetic oligonucleotide
ucaauaaaucucuguggcu

SEQ ID NO: 2831008 - RNA, 19 nt, Artificial Sequence
  Description of Artificial Sequence: Synthetic oligonucleotide
cuauucauaggaccuuuag

SEQ ID NO: 2831009 - RNA, 19 nt, Artificial Sequence
  Description of Artificial Sequence: Synthetic oligonucleotide
uucauaggaccuuuagaac

SEQ ID NO: 2831010 - RNA, 19 nt, Artificial Sequence
  Description of Artificial Sequence: Synthetic oligonucleotide
cuuaaucaauaaaucucug

SEQ ID NO: 2831011 - RNA, 19 nt, Artificial Sequence
  Description of Artificial Sequence: Synthetic oligonucleotide
aaucucuguggcuaugaaa

SEQ ID NO: 2831012 - RNA, 19 nt, Artificial Sequence
  Description of Artificial Sequence: Synthetic oligonucleotide
uggggccauacuaaaacug

SEQ ID NO: 2831013 - RNA, 19 nt, Artificial Sequence
  Description of Artificial Sequence: Synthetic oligonucleotide
ccacugaaagguuagaggc

SEQ ID NO: 2831014 - RNA, 19 nt, Artificial Sequence
  Description of Artificial Sequence: Synthetic oligonucleotide
cugguguugaauaagaccu

SEQ ID NO: 2831015 - RNA, 19 nt, Artificial Sequence
  Description of Artificial Sequence: Synthetic oligonucleotide
aaggcuucaccacaagcau

SEQ ID NO: 2831016 - RNA, 19 nt, Artificial Sequence
  Description of Artificial Sequence: Synthetic oligonucleotide
aacucagguauaugagugu

SEQ ID NO: 2831017 - RNA, 19 nt, Artificial Sequence
  Description of Artificial Sequence: Synthetic oligonucleotide
ucuccuaugcuuugccaag

SEQ ID NO: 2831018 - RNA, 19 nt, Artificial Sequence
  Description of Artificial Sequence: Synthetic oligonucleotide
acugcacuuggguagcuag

SEQ ID NO: 2831019 - RNA, 19 nt, Artificial Sequence
  Description of Artificial Sequence: Synthetic oligonucleotide
agucaacuccacugaaagg

SEQ ID NO: 2831020 - RNA, 19 nt, Artificial Sequence
  Description of Artificial Sequence: Synthetic oligonucleotide
uuaaaggcuucaccacaag

SEQ ID NO: 2831021 - RNA, 19 nt, Artificial Sequence
  Description of Artificial Sequence: Synthetic oligonucleotide
uaugggguuuauuaccagu

SEQ ID NO: 2831022 - RNA, 19 nt, Artificial Sequence
  Description of Artificial Sequence: Synthetic oligonucleotide
uauguauucucugguguug

SEQ ID NO: 2831023 - RNA, 19 nt, Artificial Sequence
  Description of Artificial Sequence: Synthetic oligonucleotide
ugcauccacauaauaugca

SEQ ID NO: 2831024 - RNA, 19 nt, Artificial Sequence
  Description of Artificial Sequence: Synthetic oligonucleotide
aaggcugcguuguugacua

SEQ ID NO: 2831025 - RNA, 19 nt, Artificial Sequence
  Description of Artificial Sequence: Synthetic oligonucleotide
acuaaaacuuuugucacau

SEQ ID NO: 2831026 - RNA, 19 nt, Artificial Sequence
  Description of Artificial Sequence: Synthetic oligonucleotide
cuguccacuauucauagga

SEQ ID NO: 2831027 - RNA, 19 nt, Artificial Sequence
  Description of Artificial Sequence: Synthetic oligonucleotide
cuuuaucaguaaauuugac

SEQ ID NO: 2831028 - RNA, 19 nt, Artificial Sequence
  Description of Artificial Sequence: Synthetic oligonucleotide
gagaaauugcuuuaucagu

SEQ ID NO: 2831029 - RNA, 19 nt, Artificial Sequence
  Description of Artificial Sequence: Synthetic oligonucleotide
uuagaggcuuaaucaauaa

SEQ ID NO: 2831030 - RNA, 19 nt, Artificial Sequence
  Description of Artificial Sequence: Synthetic oligonucleotide
guccacuauucauaggacc

SEQ ID NO: 2831031 - RNA, 19 nt, Artificial Sequence
  Description of Artificial Sequence: Synthetic oligonucleotide
auugcuuuaucaguaaauu

SEQ ID NO: 2831032 - RNA, 19 nt, Artificial Sequence
  Description of Artificial Sequence: Synthetic oligonucleotide
uucuccuaugcuuugccaa

SEQ ID NO: 2831033 - RNA, 19 nt, Artificial Sequence
  Description of Artificial Sequence: Synthetic oligonucleotide
uuugccaagucaacuccac

SEQ ID NO: 2831034 - RNA, 19 nt, Artificial Sequence
  Description of Artificial Sequence: Synthetic oligonucleotide
gaggcuuaaucaauaaauc

SEQ ID NO: 2831035 - RNA, 19 nt, Artificial Sequence
  Description of Artificial Sequence: Synthetic oligonucleotide
cauaauucagucucccaca

SEQ ID NO: 2831036 - RNA, 19 nt, Artificial Sequence
  Description of Artificial Sequence: Synthetic oligonucleotide
aacauuucuccuaugcuuu

SEQ ID NO: 2831037 - RNA, 19 nt, Artificial Sequence
  Description of Artificial Sequence: Synthetic oligonucleotide
acucagguauaugaguguc

SEQ ID NO: 2831038 - RNA, 19 nt, Artificial Sequence
  Description of Artificial Sequence: Synthetic oligonucleotide
auccacauaauaugcaauu

SEQ ID NO: 2831039 - RNA, 19 nt, Artificial Sequence
  Description of Artificial Sequence: Synthetic oligonucleotide
uagaggcuuaaucaauaaa

SEQ ID NO: 2831040 - RNA, 19 nt, Artificial Sequence
  Description of Artificial Sequence: Synthetic oligonucleotide
uccugcuaaaggcuuuccc

SEQ ID NO: 2831041 - RNA, 19 nt, Artificial Sequence
  Description of Artificial Sequence: Synthetic oligonucleotide
agaaauugcuuuaucagua

SEQ ID NO: 2831042 - RNA, 19 nt, Artificial Sequence
  Description of Artificial Sequence: Synthetic oligonucleotide
cauucauaugguugacaag

SEQ ID NO: 2831043 - RNA, 19 nt, Artificial Sequence
  Description of Artificial Sequence: Synthetic oligonucleotide
ugcuuugccaagucaacuc

SEQ ID NO: 2831044 - RNA, 19 nt, Artificial Sequence
  Description of Artificial Sequence: Synthetic oligonucleotide
guugaauaagaccugaguu

SEQ ID NO: 2831045 - RNA, 19 nt, Artificial Sequence
  Description of Artificial Sequence: Synthetic oligonucleotide
uacuugaagaaggccaaug

SEQ ID NO: 2831046 - RNA, 19 nt, Artificial Sequence
  Description of Artificial Sequence: Synthetic oligonucleotide
aacuccacugaaagguuag

SEQ ID NO: 2831047 - RNA, 19 nt, Artificial Sequence
  Description of Artificial Sequence: Synthetic oligonucleotide
uuaugggguuuauuaccag

SEQ ID NO: 2831048 - RNA, 19 nt, Artificial Sequence
  Description of Artificial Sequence: Synthetic oligonucleotide
uuauugcauccacauaaua

SEQ ID NO: 2831049 - RNA, 19 nt, Artificial Sequence
  Description of Artificial Sequence: Synthetic oligonucleotide
caccacaagcaucacauuc

SEQ ID NO: 2831050 - RNA, 19 nt, Artificial Sequence
  Description of Artificial Sequence: Synthetic oligonucleotide
gacuaaaacuuuugucaca

SEQ ID NO: 2831051 - RNA, 19 nt, Artificial Sequence
  Description of Artificial Sequence: Synthetic oligonucleotide
uaaaucucuguggcuauga

SEQ ID NO: 2831052 - RNA, 19 nt, Artificial Sequence
  Description of Artificial Sequence: Synthetic oligonucleotide
gaaauugcuuuaucaguaa

SEQ ID NO: 2831053 - RNA, 19 nt, Artificial Sequence
  Description of Artificial Sequence: Synthetic oligonucleotide
ugaugcugaauuagagaaa

SEQ ID NO: 2831054 - RNA, 19 nt, Artificial Sequence
  Description of Artificial Sequence: Synthetic oligonucleotide
uguccacuauucauaggac

SEQ ID NO: 2831055 - RNA, 19 nt, Artificial Sequence
  Description of Artificial Sequence: Synthetic oligonucleotide
cuguauguauucucuggug

SEQ ID NO: 2831056 - RNA, 19 nt, Artificial Sequence
  Description of Artificial Sequence: Synthetic oligonucleotide
cacuguccacuauucauag

SEQ ID NO: 2831057 - RNA, 19 nt, Artificial Sequence
  Description of Artificial Sequence: Synthetic oligonucleotide
ucaguaaauuugacccaca

SEQ ID NO: 2831058 - RNA, 19 nt, Artificial Sequence
  Description of Artificial Sequence: Synthetic oligonucleotide
uugcuuuaucaguaaauuu

SEQ ID NO: 2831059 - RNA, 19 nt, Artificial Sequence
  Description of Artificial Sequence: Synthetic oligonucleotide
uuugacccacauuggggcc

SEQ ID NO: 2831060 - RNA, 19 nt, Artificial Sequence
  Description of Artificial Sequence: Synthetic oligonucleotide
gacaaggcugcguuguuga

SEQ ID NO: 2831061 - RNA, 19 nt, Artificial Sequence
  Description of Artificial Sequence: Synthetic oligonucleotide
agguuagaggcuuaaucaa

SEQ ID NO: 2831062 - RNA, 19 nt, Artificial Sequence
  Description of Artificial Sequence: Synthetic oligonucleotide
uuauuaccagugugaacac

SEQ ID NO: 2831063 - RNA, 19 nt, Artificial Sequence
  Description of Artificial Sequence: Synthetic oligonucleotide
caguuaaaggcuucaccac

SEQ ID NO: 2831064 - RNA, 19 nt, Artificial Sequence
  Description of Artificial Sequence: Synthetic oligonucleotide
ugguguugaauaagaccug

SEQ ID NO: 2831065 - RNA, 19 nt, Artificial Sequence
  Description of Artificial Sequence: Synthetic oligonucleotide
gguagcuagucucaaacuc

SEQ ID NO: 2831066 - RNA, 19 nt, Artificial Sequence
  Description of Artificial Sequence: Synthetic oligonucleotide
ggcuuaaucaauaaaucuc

SEQ ID NO: 2831067 - RNA, 19 nt, Artificial Sequence
  Description of Artificial Sequence: Synthetic oligonucleotide
aucauaauucagucuccca

SEQ ID NO: 2831068 - RNA, 19 nt, Artificial Sequence
  Description of Artificial Sequence: Synthetic oligonucleotide
aaaucucuguggcuaugaa

SEQ ID NO: 2831069 - RNA, 19 nt, Artificial Sequence
  Description of Artificial Sequence: Synthetic oligonucleotide
uuucuccuaugcuuugcca

SEQ ID NO: 2831070 - RNA, 19 nt, Artificial Sequence
  Description of Artificial Sequence: Synthetic oligonucleotide
ugggguuuauuaccagugu

SEQ ID NO: 2831071 - RNA, 19 nt, Artificial Sequence
  Description of Artificial Sequence: Synthetic oligonucleotide
gaacuacuugaagaaggcc

SEQ ID NO: 2831072 - RNA, 19 nt, Artificial Sequence
  Description of Artificial Sequence: Synthetic oligonucleotide
guuuauuaccagugugaac

SEQ ID NO: 2831073 - RNA, 19 nt, Artificial Sequence
  Description of Artificial Sequence: Synthetic oligonucleotide
ggaccuuuagaacuacuug

SEQ ID NO: 2831074 - RNA, 19 nt, Artificial Sequence
  Description of Artificial Sequence: Synthetic oligonucleotide
cuucauaacauuucuccua

SEQ ID NO: 2831075 - RNA, 19 nt, Artificial Sequence
  Description of Artificial Sequence: Synthetic oligonucleotide
aggccaaugagaaauugcu

SEQ ID NO: 2831076 - RNA, 19 nt, Artificial Sequence
  Description of Artificial Sequence: Synthetic oligonucleotide
caagcaucacauucauaug

SEQ ID NO: 2831077 - RNA, 19 nt, Artificial Sequence
  Description of Artificial Sequence: Synthetic oligonucleotide
uuggggccauacuaaaacu

SEQ ID NO: 2831078 - RNA, 19 nt, Artificial Sequence
  Description of Artificial Sequence: Synthetic oligonucleotide
ugguugacaaggcugcguu

SEQ ID NO: 2831079 - RNA, 19 nt, Artificial Sequence
  Description of Artificial Sequence: Synthetic oligonucleotide
gaugcugaauuagagaaau

SEQ ID NO: 2831080 - RNA, 19 nt, Artificial Sequence
  Description of Artificial Sequence: Synthetic oligonucleotide
uaauucagucucccacaga

SEQ ID NO: 2831081 - RNA, 19 nt, Artificial Sequence
  Description of Artificial Sequence: Synthetic oligonucleotide
gucaacuccacugaaaggu

SEQ ID NO: 2831082 - RNA, 19 nt, Artificial Sequence
  Description of Artificial Sequence: Synthetic oligonucleotide
acagacacuguccacuauu

SEQ ID NO: 2831083 - RNA, 19 nt, Artificial Sequence
  Description of Artificial Sequence: Synthetic oligonucleotide
uauuaccagugugaacacc

SEQ ID NO: 2831084 - RNA, 19 nt, Artificial Sequence
  Description of Artificial Sequence: Synthetic oligonucleotide
gaaggccaaugagaaauug

SEQ ID NO: 2831085 - RNA, 19 nt, Artificial Sequence
  Description of Artificial Sequence: Synthetic oligonucleotide
augggguuuauuaccagug

SEQ ID NO: 2831086 - RNA, 19 nt, Artificial Sequence
  Description of Artificial Sequence: Synthetic oligonucleotide
cacuuggguagcuagucuc

SEQ ID NO: 2831087 - RNA, 19 nt, Artificial Sequence
  Description of Artificial Sequence: Synthetic oligonucleotide
acuguccacuauucauagg

SEQ ID NO: 2831088 - RNA, 19 nt, Artificial Sequence
  Description of Artificial Sequence: Synthetic oligonucleotide
uaugguugacaaggcugcg

SEQ ID NO: 2831089 - RNA, 19 nt, Artificial Sequence
  Description of Artificial Sequence: Synthetic oligonucleotide
uaccagugugaacacccug

SEQ ID NO: 2831090 - RNA, 19 nt, Artificial Sequence
  Description of Artificial Sequence: Synthetic oligonucleotide
agguauaugagugucucua

SEQ ID NO: 2831091 - RNA, 19 nt, Artificial Sequence
  Description of Artificial Sequence: Synthetic oligonucleotide
caauaaaucucuguggcua

SEQ ID NO: 2831092 - RNA, 19 nt, Artificial Sequence
  Description of Artificial Sequence: Synthetic oligonucleotide
agaccugaguuccugcuaa

SEQ ID NO: 2831093 - RNA, 19 nt, Artificial Sequence
  Description of Artificial Sequence: Synthetic oligonucleotide
guagcuagucucaaacuca

SEQ ID NO: 2831094 - RNA, 19 nt, Artificial Sequence
  Description of Artificial Sequence: Synthetic oligonucleotide
uuaccagugugaacacccu

SEQ ID NO: 2831095 - RNA, 19 nt, Artificial Sequence
  Description of Artificial Sequence: Synthetic oligonucleotide
acauuucuccuaugcuuug

SEQ ID NO: 2831096 - RNA, 19 nt, Artificial Sequence
  Description of Artificial Sequence: Synthetic oligonucleotide
auaggaccuuuagaacuac

SEQ ID NO: 2831097 - RNA, 19 nt, Artificial Sequence
  Description of Artificial Sequence: Synthetic oligonucleotide
ccugaguuccugcuaaagg

SEQ ID NO: 2831098 - RNA, 19 nt, Artificial Sequence
  Description of Artificial Sequence: Synthetic oligonucleotide
ucaacuccacugaaagguu

SEQ ID NO: 2831099 - RNA, 19 nt, Artificial Sequence
  Description of Artificial Sequence: Synthetic oligonucleotide
accacaagcaucacauuca

SEQ ID NO: 2831100 - RNA, 19 nt, Artificial Sequence
  Description of Artificial Sequence: Synthetic oligonucleotide
cagacacuguccacuauuc

SEQ ID NO: 2831101 - RNA, 19 nt, Artificial Sequence
  Description of Artificial Sequence: Synthetic oligonucleotide
ucauaacauuucuccuaug

SEQ ID NO: 2831102 - RNA, 19 nt, Artificial Sequence
  Description of Artificial Sequence: Synthetic oligonucleotide
cuccacugaaagguuagag

SEQ ID NO: 2831103 - RNA, 19 nt, Artificial Sequence
  Description of Artificial Sequence: Synthetic oligonucleotide
cagucucccacagacacug

SEQ ID NO: 2831104 - RNA, 19 nt, Artificial Sequence
  Description of Artificial Sequence: Synthetic oligonucleotide
acaaggcugcguuguugac

SEQ ID NO: 2831105 - RNA, 19 nt, Artificial Sequence
  Description of Artificial Sequence: Synthetic oligonucleotide
ugaaagguuagaggcuuaa

SEQ ID NO: 2831106 - RNA, 19 nt, Artificial Sequence
  Description of Artificial Sequence: Synthetic oligonucleotide
gcugaauuagagaaaucug

SEQ ID NO: 2831107 - RNA, 19 nt, Artificial Sequence
  Description of Artificial Sequence: Synthetic oligonucleotide
uagagaaaucugacaguua

SEQ ID NO: 2831108 - RNA, 19 nt, Artificial Sequence
  Description of Artificial Sequence: Synthetic oligonucleotide
uccacauaauaugcaauuu

SEQ ID NO: 2831109 - RNA, 19 nt, Artificial Sequence
  Description of Artificial Sequence: Synthetic oligonucleotide
ucucaaacucagguauaug

SEQ ID NO: 2831110 - RNA, 19 nt, Artificial Sequence
  Description of Artificial Sequence: Synthetic oligonucleotide
uugccaagucaacuccacu

SEQ ID NO: 2831111 - RNA, 19 nt, Artificial Sequence
  Description of Artificial Sequence: Synthetic oligonucleotide
gcuuugccaagucaacucc

SEQ ID NO: 2831112 - RNA, 19 nt, Artificial Sequence
  Description of Artificial Sequence: Synthetic oligonucleotide
ugacaaggcugcguuguug

SEQ ID NO: 2831113 - RNA, 19 nt, Artificial Sequence
  Description of Artificial Sequence: Synthetic oligonucleotide
acuacuugaagaaggccaa

SEQ ID NO: 2831114 - RNA, 19 nt, Artificial Sequence
  Description of Artificial Sequence: Synthetic oligonucleotide
ugcacuuggguagcuaguc

SEQ ID NO: 2831115 - RNA, 19 nt, Artificial Sequence
  Description of Artificial Sequence: Synthetic oligonucleotide
ucagucucccacagacacu

SEQ ID NO: 2831116 - RNA, 19 nt, Artificial Sequence
  Description of Artificial Sequence: Synthetic oligonucleotide
cauuucuccuaugcuuugc

SEQ ID NO: 2831117 - RNA, 19 nt, Artificial Sequence
  Description of Artificial Sequence: Synthetic oligonucleotide
uccuaugcuuugccaaguc

SEQ ID NO: 2831118 - RNA, 19 nt, Artificial Sequence
  Description of Artificial Sequence: Synthetic oligonucleotide
agcaucacauucauauggu

SEQ ID NO: 2831119 - RNA, 19 nt, Artificial Sequence
  Description of Artificial Sequence: Synthetic oligonucleotide
caaacucagguauaugagu

SEQ ID NO: 2831120 - RNA, 19 nt, Artificial Sequence
  Description of Artificial Sequence: Synthetic oligonucleotide
cuagucucaaacucaggua

SEQ ID NO: 2831121 - RNA, 19 nt, Artificial Sequence
  Description of Artificial Sequence: Synthetic oligonucleotide
acauuggggccauacuaaa

SEQ ID NO: 2831122 - RNA, 19 nt, Artificial Sequence
  Description of Artificial Sequence: Synthetic oligonucleotide
acccacauuggggccauac

SEQ ID NO: 2831123 - RNA, 19 nt, Artificial Sequence
  Description of Artificial Sequence: Synthetic oligonucleotide
uaggaccuuuagaacuacu

SEQ ID NO: 2831124 - RNA, 19 nt, Artificial Sequence
  Description of Artificial Sequence: Synthetic oligonucleotide
cauaggaccuuuagaacua

SEQ ID NO: 2831125 - RNA, 19 nt, Artificial Sequence
  Description of Artificial Sequence: Synthetic oligonucleotide
ugacaguuaaaggcuucac

SEQ ID NO: 2831126 - RNA, 19 nt, Artificial Sequence
  Description of Artificial Sequence: Synthetic oligonucleotide
cacauuggggccauacuaa

SEQ ID NO: 2831127 - RNA, 19 nt, Artificial Sequence
  Description of Artificial Sequence: Synthetic oligonucleotide
gcuuuaucaguaaauuuga

SEQ ID NO: 2831128 - RNA, 19 nt, Artificial Sequence
  Description of Artificial Sequence: Synthetic oligonucleotide
auaaaucucuguggcuaug

SEQ ID NO: 2831129 - RNA, 19 nt, Artificial Sequence
  Description of Artificial Sequence: Synthetic oligonucleotide
cugcguuguugacuaaaac

SEQ ID NO: 2831130 - RNA, 19 nt, Artificial Sequence
  Description of Artificial Sequence: Synthetic oligonucleotide
guuagaggcuuaaucaaua

SEQ ID NO: 2831131 - RNA, 19 nt, Artificial Sequence
  Description of Artificial Sequence: Synthetic oligonucleotide
accuuuagaacuacuugaa

SEQ ID NO: 2831132 - RNA, 19 nt, Artificial Sequence
  Description of Artificial Sequence: Synthetic oligonucleotide
cuuugccaagucaacucca

SEQ ID NO: 2831133 - RNA, 19 nt, Artificial Sequence
  Description of Artificial Sequence: Synthetic oligonucleotide
guuaaaggcuucaccacaa

SEQ ID NO: 2831134 - RNA, 19 nt, Artificial Sequence
  Description of Artificial Sequence: Synthetic oligonucleotide
gcuagucucaaacucaggu

SEQ ID NO: 2831135 - RNA, 19 nt, Artificial Sequence
  Description of Artificial Sequence: Synthetic oligonucleotide
uugacccacauuggggcca

SEQ ID NO: 2831136 - RNA, 19 nt, Artificial Sequence
  Description of Artificial Sequence: Synthetic oligonucleotide
gcuuaaucaauaaaucucu

SEQ ID NO: 2831137 - RNA, 19 nt, Artificial Sequence
  Description of Artificial Sequence: Synthetic oligonucleotide
caccuguaagguuucucuc

SEQ ID NO: 2831138 - RNA, 19 nt, Artificial Sequence
  Description of Artificial Sequence: Synthetic oligonucleotide
augcuuugccaagucaacu

SEQ ID NO: 2831139 - RNA, 19 nt, Artificial Sequence
  Description of Artificial Sequence: Synthetic oligonucleotide
accugaguuccugcuaaag

SEQ ID NO: 2831140 - RNA, 19 nt, Artificial Sequence
  Description of Artificial Sequence: Synthetic oligonucleotide
ucacauucauaugguugac

SEQ ID NO: 2831141 - RNA, 19 nt, Artificial Sequence
  Description of Artificial Sequence: Synthetic oligonucleotide
caagucaacuccacugaaa

SEQ ID NO: 2831142 - RNA, 19 nt, Artificial Sequence
  Description of Artificial Sequence: Synthetic oligonucleotide
ggggccauacuaaaacugc

SEQ ID NO: 2831143 - RNA, 19 nt, Artificial Sequence
  Description of Artificial Sequence: Synthetic oligonucleotide
ggguuuauuaccaguguga

SEQ ID NO: 2831144 - RNA, 19 nt, Artificial Sequence
  Description of Artificial Sequence: Synthetic oligonucleotide
uuggguagcuagucucaaa

SEQ ID NO: 2831145 - RNA, 19 nt, Artificial Sequence
  Description of Artificial Sequence: Synthetic oligonucleotide
aggaccuuuagaacuacuu

SEQ ID NO: 2831146 - RNA, 19 nt, Artificial Sequence
  Description of Artificial Sequence: Synthetic oligonucleotide
ccugcuaaaggcuuuccca

SEQ ID NO: 2831147 - RNA, 19 nt, Artificial Sequence
  Description of Artificial Sequence: Synthetic oligonucleotide
guggcuaugaaaacagagu

SEQ ID NO: 2831148 - RNA, 19 nt, Artificial Sequence
  Description of Artificial Sequence: Synthetic oligonucleotide
aggcuucaccacaagcauc

SEQ ID NO: 2831149 - RNA, 19 nt, Artificial Sequence
  Description of Artificial Sequence: Synthetic oligonucleotide
cuucaccacaagcaucaca

SEQ ID NO: 2831150 - RNA, 19 nt, Artificial Sequence
  Description of Artificial Sequence: Synthetic oligonucleotide
gcauccacauaauaugcaa

SEQ ID NO: 2831151 - RNA, 19 nt, Artificial Sequence
  Description of Artificial Sequence: Synthetic oligonucleotide
acuuggguagcuagucuca

SEQ ID NO: 2831152 - RNA, 19 nt, Artificial Sequence
  Description of Artificial Sequence: Synthetic oligonucleotide
ggcuucaccacaagcauca

SEQ ID NO: 2831153 - RNA, 19 nt, Artificial Sequence
  Description of Artificial Sequence: Synthetic oligonucleotide
gguuuauuaccagugugaa

SEQ ID NO: 2831154 - RNA, 19 nt, Artificial Sequence
  Description of Artificial Sequence: Synthetic oligonucleotide
acacuguccacuauucaua

SEQ ID NO: 2831155 - RNA, 19 nt, Artificial Sequence
  Description of Artificial Sequence: Synthetic oligonucleotide
gcuaugaaaacagaguaau

SEQ ID NO: 2831156 - RNA, 19 nt, Artificial Sequence
  Description of Artificial Sequence: Synthetic oligonucleotide
gagaaaucugacaguuaaa

SEQ ID NO: 2831157 - RNA, 19 nt, Artificial Sequence
  Description of Artificial Sequence: Synthetic oligonucleotide
augcugaauuagagaaauc

SEQ ID NO: 2831158 - RNA, 19 nt, Artificial Sequence
  Description of Artificial Sequence: Synthetic oligonucleotide
guugacaaggcugcguugu

SEQ ID NO: 2831159 - RNA, 19 nt, Artificial Sequence
  Description of Artificial Sequence: Synthetic oligonucleotide
gguguugaauaagaccuga

SEQ ID NO: 2831160 - RNA, 19 nt, Artificial Sequence
  Description of Artificial Sequence: Synthetic oligonucleotide
augguugacaaggcugcgu

SEQ ID NO: 2831161 - RNA, 19 nt, Artificial Sequence
  Description of Artificial Sequence: Synthetic oligonucleotide
gccaaugagaaauugcuuu

SEQ ID NO: 2831162 - RNA, 19 nt, Artificial Sequence
  Description of Artificial Sequence: Synthetic oligonucleotide
cugacaguuaaaggcuuca

SEQ ID NO: 2831163 - RNA, 19 nt, Artificial Sequence
  Description of Artificial Sequence: Synthetic oligonucleotide
agcuagucucaaacucagg

SEQ ID NO: 2831164 - RNA, 19 nt, Artificial Sequence
  Description of Artificial Sequence: Synthetic oligonucleotide
uugacaaggcugcguuguu

SEQ ID NO: 2831165 - RNA, 19 nt, Artificial Sequence
  Description of Artificial Sequence: Synthetic oligonucleotide
guauguauucucugguguu

SEQ ID NO: 2831166 - RNA, 19 nt, Artificial Sequence
  Description of Artificial Sequence: Synthetic oligonucleotide
cauuggggccauacuaaaa

SEQ ID NO: 2831167 - RNA, 19 nt, Artificial Sequence
  Description of Artificial Sequence: Synthetic oligonucleotide
guuguugacuaaaacuuuu

SEQ ID NO: 2831168 - RNA, 19 nt, Artificial Sequence
  Description of Artificial Sequence: Synthetic oligonucleotide
ucacauuuaugggguuuau

SEQ ID NO: 2831169 - RNA, 19 nt, Artificial Sequence
  Description of Artificial Sequence: Synthetic oligonucleotide
guauaugagugucucuauu

SEQ ID NO: 2831170 - RNA, 19 nt, Artificial Sequence
  Description of Artificial Sequence: Synthetic oligonucleotide
gguugacaaggcugcguug

SEQ ID NO: 2831171 - RNA, 19 nt, Artificial Sequence
  Description of Artificial Sequence: Synthetic oligonucleotide
ggccauacuaaaacugcac

SEQ ID NO: 2831172 - RNA, 19 nt, Artificial Sequence
  Description of Artificial Sequence: Synthetic oligonucleotide
ucccacagacacuguccac

SEQ ID NO: 2831173 - RNA, 19 nt, Artificial Sequence
  Description of Artificial Sequence: Synthetic oligonucleotide
cacauucauaugguugaca

SEQ ID NO: 2831174 - RNA, 19 nt, Artificial Sequence
  Description of Artificial Sequence: Synthetic oligonucleotide
aaacugcacuuggguagcu

SEQ ID NO: 2831175 - RNA, 19 nt, Artificial Sequence
  Description of Artificial Sequence: Synthetic oligonucleotide
auucagucucccacagaca

SEQ ID NO: 2831176 - RNA, 19 nt, Artificial Sequence
  Description of Artificial Sequence: Synthetic oligonucleotide
gccauacuaaaacugcacu

SEQ ID NO: 2831177 - RNA, 19 nt, Artificial Sequence
  Description of Artificial Sequence: Synthetic oligonucleotide
cauccacauaauaugcaau

SEQ ID NO: 2831178 - RNA, 19 nt, Artificial Sequence
  Description of Artificial Sequence: Synthetic oligonucleotide
cacugaaagguuagaggcu

SEQ ID NO: 2831179 - RNA, 19 nt, Artificial Sequence
  Description of Artificial Sequence: Synthetic oligonucleotide
caacuccacugaaagguua

SEQ ID NO: 2831180 - RNA, 19 nt, Artificial Sequence
  Description of Artificial Sequence: Synthetic oligonucleotide
ucaccacaagcaucacauu

SEQ ID NO: 2831181 - RNA, 19 nt, Artificial Sequence
  Description of Artificial Sequence: Synthetic oligonucleotide
ggcuaugaaaacagaguaa

SEQ ID NO: 2831182 - RNA, 19 nt, Artificial Sequence
  Description of Artificial Sequence: Synthetic oligonucleotide
cuguggcuaugaaaacaga

SEQ ID NO: 2831183 - RNA, 19 nt, Artificial Sequence
  Description of Artificial Sequence: Synthetic oligonucleotide
aacugcacuuggguagcua

SEQ ID NO: 2831184 - RNA, 19 nt, Artificial Sequence
  Description of Artificial Sequence: Synthetic oligonucleotide
aucugacaguuaaaggcuu

SEQ ID NO: 2831185 - RNA, 19 nt, Artificial Sequence
  Description of Artificial Sequence: Synthetic oligonucleotide
acuauucauaggaccuuua

SEQ ID NO: 2831186 - RNA, 19 nt, Artificial Sequence
  Description of Artificial Sequence: Synthetic oligonucleotide
acuccacugaaagguuaga

SEQ ID NO: 2831187 - RNA, 19 nt, Artificial Sequence
  Description of Artificial Sequence: Synthetic oligonucleotide
cucagguauaugagugucu

SEQ ID NO: 2831188 - RNA, 19 nt, Artificial Sequence
  Description of Artificial Sequence: Synthetic oligonucleotide
ccaaugagaaauugcuuua

SEQ ID NO: 2831189 - RNA, 19 nt, Artificial Sequence
  Description of Artificial Sequence: Synthetic oligonucleotide
uccucacauuuaugggguu

SEQ ID NO: 2831190 - RNA, 19 nt, Artificial Sequence
  Description of Artificial Sequence: Synthetic oligonucleotide
agaaggccaaugagaaauu

SEQ ID NO: 2831191 - RNA, 19 nt, Artificial Sequence
  Description of Artificial Sequence: Synthetic oligonucleotide
agucucaaacucagguaua

SEQ ID NO: 2831192 - RNA, 19 nt, Artificial Sequence
  Description of Artificial Sequence: Synthetic oligonucleotide
gcguuguugacuaaaacuu

SEQ ID NO: 2831193 - RNA, 19 nt, Artificial Sequence
  Description of Artificial Sequence: Synthetic oligonucleotide
aguuccugcuaaaggcuuu

SEQ ID NO: 2831194 - RNA, 19 nt, Artificial Sequence
  Description of Artificial Sequence: Synthetic oligonucleotide
gaauaagaccugaguuccu

SEQ ID NO: 2831195 - RNA, 19 nt, Artificial Sequence
  Description of Artificial Sequence: Synthetic oligonucleotide
gucucaaacucagguauau

SEQ ID NO: 2831196 - RNA, 19 nt, Artificial Sequence
  Description of Artificial Sequence: Synthetic oligonucleotide
gaaagguuagaggcuuaau

SEQ ID NO: 2831197 - RNA, 19 nt, Artificial Sequence
  Description of Artificial Sequence: Synthetic oligonucleotide
gguauaugagugucucuau

SEQ ID NO: 2831198 - RNA, 19 nt, Artificial Sequence
  Description of Artificial Sequence: Synthetic oligonucleotide
ccacauuggggccauacua

SEQ ID NO: 2831199 - RNA, 19 nt, Artificial Sequence
  Description of Artificial Sequence: Synthetic oligonucleotide
caaugagaaauugcuuuau

SEQ ID NO: 2831200 - RNA, 19 nt, Artificial Sequence
  Description of Artificial Sequence: Synthetic oligonucleotide
cugaaagguuagaggcuua

SEQ ID NO: 2831201 - RNA, 19 nt, Artificial Sequence
  Description of Artificial Sequence: Synthetic oligonucleotide
gggccauacuaaaacugca

SEQ ID NO: 2831202 - RNA, 19 nt, Artificial Sequence
  Description of Artificial Sequence: Synthetic oligonucleotide
cuuggguagcuagucucaa

SEQ ID NO: 2831203 - RNA, 19 nt, Artificial Sequence
  Description of Artificial Sequence: Synthetic oligonucleotide
ugacccacauuggggccau

SEQ ID NO: 2831204 - RNA, 19 nt, Artificial Sequence
  Description of Artificial Sequence: Synthetic oligonucleotide
gguuagaggcuuaaucaau

SEQ ID NO: 2831205 - RNA, 19 nt, Artificial Sequence
  Description of Artificial Sequence: Synthetic oligonucleotide
cacaagcaucacauucaua

SEQ ID NO: 2831206 - RNA, 19 nt, Artificial Sequence
  Description of Artificial Sequence: Synthetic oligonucleotide
ggguagcuagucucaaacu

SEQ ID NO: 2831207 - RNA, 19 nt, Artificial Sequence
  Description of Artificial Sequence: Synthetic oligonucleotide
ccuguauguauucucuggu

SEQ ID NO: 2831208 - RNA, 19 nt, Artificial Sequence
  Description of Artificial Sequence: Synthetic oligonucleotide
caaggcugcguuguugacu

SEQ ID NO: 2831209 - RNA, 19 nt, Artificial Sequence
  Description of Artificial Sequence: Synthetic oligonucleotide
cagguauaugagugucucu

SEQ ID NO: 2831210 - RNA, 19 nt, Artificial Sequence
  Description of Artificial Sequence: Synthetic oligonucleotide
gaguuccugcuaaaggcuu

SEQ ID NO: 2831211 - RNA, 19 nt, Artificial Sequence
  Description of Artificial Sequence: Synthetic oligonucleotide
ccauacuaaaacugcacuu

SEQ ID NO: 2831212 - RNA, 19 nt, Artificial Sequence
  Description of Artificial Sequence: Synthetic oligonucleotide
gcugcguuguugacuaaaa

SEQ ID NO: 2831213 - RNA, 19 nt, Artificial Sequence
  Description of Artificial Sequence: Synthetic oligonucleotide
cuaaaacuuuugucacauu

SEQ ID NO: 2831214 - RNA, 19 nt, Artificial Sequence
  Description of Artificial Sequence: Synthetic oligonucleotide
cugcacuuggguagcuagu

SEQ ID NO: 2831215 - RNA, 19 nt, Artificial Sequence
  Description of Artificial Sequence: Synthetic oligonucleotide
ggcugcguuguugacuaaa

SEQ ID NO: 2831216 - RNA, 19 nt, Artificial Sequence
  Description of Artificial Sequence: Synthetic oligonucleotide
cacuauucauaggaccuuu

SEQ ID NO: 2831217 - RNA, 19 nt, Artificial Sequence
  Description of Artificial Sequence: Synthetic oligonucleotide
gcaucacauucauaugguu

SEQ ID NO: 2831218 - RNA, 19 nt, Artificial Sequence
  Description of Artificial Sequence: Synthetic oligonucleotide
gcacuuggguagcuagucu

SEQ ID NO: 2831219 - RNA, 19 nt, Artificial Sequence
  Description of Artificial Sequence: Synthetic oligonucleotide
cuccuaugcuuugccaagu

SEQ ID NO: 2831220 - RNA, 19 nt, Artificial Sequence
  Description of Artificial Sequence: Synthetic oligonucleotide
cacauuuaugggguuuauu

SEQ ID NO: 2831221 - RNA, 19 nt, Artificial Sequence
  Description of Artificial Sequence: Synthetic oligonucleotide
agucucccacagacacugu

SEQ ID NO: 2831222 - RNA, 19 nt, Artificial Sequence
  Description of Artificial Sequence: Synthetic oligonucleotide
cccacagacacuguccacu

SEQ ID NO: 2831223 - RNA, 19 nt, Artificial Sequence
  Description of Artificial Sequence: Synthetic oligonucleotide
ccacagacacuguccacua

SEQ ID NO: 2831224 - RNA, 19 nt, Artificial Sequence
  Description of Artificial Sequence: Synthetic oligonucleotide
cuacuugaagaaggccaau

SEQ ID NO: 2831225 - RNA, 19 nt, Artificial Sequence
  Description of Artificial Sequence: Synthetic oligonucleotide
aggcugcguuguugacuaa

SEQ ID NO: 2831226 - RNA, 19 nt, Artificial Sequence
  Description of Artificial Sequence: Synthetic oligonucleotide
ggccaaugagaaauugcuu

SEQ ID NO: 2831227 - RNA, 19 nt, Artificial Sequence
  Description of Artificial Sequence: Synthetic oligonucleotide
cacagacacuguccacuau

SEQ ID NO: 2831228 - RNA, 19 nt, Artificial Sequence
  Description of Artificial Sequence: Synthetic oligonucleotide
cguuguugacuaaaacuuu

SEQ ID NO: 2831229 - RNA, 19 nt, Artificial Sequence
  Description of Artificial Sequence: Synthetic oligonucleotide
ccacaagcaucacauucau

SEQ ID NO: 2831230 - RNA, 19 nt, Artificial Sequence
  Description of Artificial Sequence: Synthetic oligonucleotide
cccacauuggggccauacu

SEQ ID NO: 2831231 - RNA, 19 nt, Artificial Sequence
  Description of Artificial Sequence: Synthetic oligonucleotide
ccucacauuuaugggguuu

SEQ ID NO: 2831232 - RNA, 19 nt, Artificial Sequence
  Description of Artificial Sequence: Synthetic oligonucleotide
ccacuauucauaggaccuu

SEQ ID NO: 2831233 - RNA, 19 nt, Artificial Sequence
  Description of Artificial Sequence: Synthetic oligonucleotide
gacccacauuggggccaua

SEQ ID NO: 2831234 - RNA, 19 nt, Artificial Sequence
  Description of Artificial Sequence: Synthetic oligonucleotide
uuugauagaggguagaucg

SEQ ID NO: 2831235 - RNA, 19 nt, Artificial Sequence
  Description of Artificial Sequence: Synthetic oligonucleotide
aagacuuuggccugguccc

SEQ ID NO: 2831236 - RNA, 19 nt, Artificial Sequence
  Description of Artificial Sequence: Synthetic oligonucleotide
aagacaaagaagcagguaa

SEQ ID NO: 2831237 - RNA, 19 nt, Artificial Sequence
  Description of Artificial Sequence: Synthetic oligonucleotide
uggacguucaggaaggugg

SEQ ID NO: 2831238 - RNA, 19 nt, Artificial Sequence
  Description of Artificial Sequence: Synthetic oligonucleotide
acugagagugagcagaggc

SEQ ID NO: 2831239 - RNA, 19 nt, Artificial Sequence
  Description of Artificial Sequence: Synthetic oligonucleotide
cauggcauuugauagaggg

SEQ ID NO: 2831240 - RNA, 19 nt, Artificial Sequence
  Description of Artificial Sequence: Synthetic oligonucleotide
caagccaucauuaucgccg

SEQ ID NO: 2831241 - RNA, 19 nt, Artificial Sequence
  Description of Artificial Sequence: Synthetic oligonucleotide
aggaagguauagcagauac

SEQ ID NO: 2831242 - RNA, 19 nt, Artificial Sequence
  Description of Artificial Sequence: Synthetic oligonucleotide
gaugauaggguugacacag

SEQ ID NO: 2831243 - RNA, 19 nt, Artificial Sequence
  Description of Artificial Sequence: Synthetic oligonucleotide
gaagguauagcagauacug

SEQ ID NO: 2831244 - RNA, 19 nt, Artificial Sequence
  Description of Artificial Sequence: Synthetic oligonucleotide
uagaugauaggguugacac

SEQ ID NO: 2831245 - RNA, 19 nt, Artificial Sequence
  Description of Artificial Sequence: Synthetic oligonucleotide
auagaggguagaucggacc

SEQ ID NO: 2831246 - RNA, 19 nt, Artificial Sequence
  Description of Artificial Sequence: Synthetic oligonucleotide
guauagcagauacugagag

SEQ ID NO: 2831247 - RNA, 19 nt, Artificial Sequence
  Description of Artificial Sequence: Synthetic oligonucleotide
cacgacauagaugauaggg

SEQ ID NO: 2831248 - RNA, 19 nt, Artificial Sequence
  Description of Artificial Sequence: Synthetic oligonucleotide
aucauuaucgccguuaccu

SEQ ID NO: 2831249 - RNA, 19 nt, Artificial Sequence
  Description of Artificial Sequence: Synthetic oligonucleotide
acgcacaaggaguucagcc

SEQ ID NO: 2831250 - RNA, 19 nt, Artificial Sequence
  Description of Artificial Sequence: Synthetic oligonucleotide
ugguagggcagccagaaga

SEQ ID NO: 2831251 - RNA, 19 nt, Artificial Sequence
  Description of Artificial Sequence: Synthetic oligonucleotide
auguaagccagggacacgc

SEQ ID NO: 2831252 - RNA, 19 nt, Artificial Sequence
  Description of Artificial Sequence: Synthetic oligonucleotide
gauacugagagugagcaga

SEQ ID NO: 2831253 - RNA, 19 nt, Artificial Sequence
  Description of Artificial Sequence: Synthetic oligonucleotide
guagaucggaccuucuggg

SEQ ID NO: 2831254 - RNA, 19 nt, Artificial Sequence
  Description of Artificial Sequence: Synthetic oligonucleotide
agccaagccaucauuaucg

SEQ ID NO: 2831255 - RNA, 19 nt, Artificial Sequence
  Description of Artificial Sequence: Synthetic oligonucleotide
uccucugaccuccaacacg

SEQ ID NO: 2831256 - RNA, 19 nt, Artificial Sequence
  Description of Artificial Sequence: Synthetic oligonucleotide
aacacggugugccauggca

SEQ ID NO: 2831257 - RNA, 19 nt, Artificial Sequence
  Description of Artificial Sequence: Synthetic oligonucleotide
uugauagaggguagaucgg

SEQ ID NO: 2831258 - RNA, 19 nt, Artificial Sequence
  Description of Artificial Sequence: Synthetic oligonucleotide
gaucggaccuucugggucg

SEQ ID NO: 2831259 - RNA, 19 nt, Artificial Sequence
  Description of Artificial Sequence: Synthetic oligonucleotide
aaacgggugaaagacuuug

SEQ ID NO: 2831260 - RNA, 19 nt, Artificial Sequence
  Description of Artificial Sequence: Synthetic oligonucleotide
uugauguaagccagggaca

SEQ ID NO: 2831261 - RNA, 19 nt, Artificial Sequence
  Description of Artificial Sequence: Synthetic oligonucleotide
ugugccauggcauuugaua

SEQ ID NO: 2831262 - RNA, 19 nt, Artificial Sequence
  Description of Artificial Sequence: Synthetic oligonucleotide
agaucggaccuucuggguc

SEQ ID NO: 2831263 - RNA, 19 nt, Artificial Sequence
  Description of Artificial Sequence: Synthetic oligonucleotide
aggaggaagguauagcaga

SEQ ID NO: 2831264 - RNA, 19 nt, Artificial Sequence
  Description of Artificial Sequence: Synthetic oligonucleotide
ugauaggguugacacagca

SEQ ID NO: 2831265 - RNA, 19 nt, Artificial Sequence
  Description of Artificial Sequence: Synthetic oligonucleotide
uguccaucguggaaacggg

SEQ ID NO: 2831266 - RNA, 19 nt, Artificial Sequence
  Description of Artificial Sequence: Synthetic oligonucleotide
aggaguucagccuguggac

SEQ ID NO: 2831267 - RNA, 19 nt, Artificial Sequence
  Description of Artificial Sequence: Synthetic oligonucleotide
auuugauagaggguagauc

SEQ ID NO: 2831268 - RNA, 19 nt, Artificial Sequence
  Description of Artificial Sequence: Synthetic oligonucleotide
gugccauggcauuugauag

SEQ ID NO: 2831269 - RNA, 19 nt, Artificial Sequence
  Description of Artificial Sequence: Synthetic oligonucleotide
uagaggguagaucggaccu

SEQ ID NO: 2831270 - RNA, 19 nt, Artificial Sequence
  Description of Artificial Sequence: Synthetic oligonucleotide
accuccaacacggugugcc

SEQ ID NO: 2831271 - RNA, 19 nt, Artificial Sequence
  Description of Artificial Sequence: Synthetic oligonucleotide
cauuaucgccguuaccugg

SEQ ID NO: 2831272 - RNA, 19 nt, Artificial Sequence
  Description of Artificial Sequence: Synthetic oligonucleotide
gguagaucggaccuucugg

SEQ ID NO: 2831273 - RNA, 19 nt, Artificial Sequence
  Description of Artificial Sequence: Synthetic oligonucleotide
aucgccguuaccugguagg

SEQ ID NO: 2831274 - RNA, 19 nt, Artificial Sequence
  Description of Artificial Sequence: Synthetic oligonucleotide
acgaaacccaggaucagcc

SEQ ID NO: 2831275 - RNA, 19 nt, Artificial Sequence
  Description of Artificial Sequence: Synthetic oligonucleotide
aggaucagccucaucaugg

SEQ ID NO: 2831276 - RNA, 19 nt, Artificial Sequence
  Description of Artificial Sequence: Synthetic oligonucleotide
guguccaucguggaaacgg

SEQ ID NO: 2831277 - RNA, 19 nt, Artificial Sequence
  Description of Artificial Sequence: Synthetic oligonucleotide
aucaggaggaagguauagc

SEQ ID NO: 2831278 - RNA, 19 nt, Artificial Sequence
  Description of Artificial Sequence: Synthetic oligonucleotide
uaagccagggacacgcaca

SEQ ID NO: 2831279 - RNA, 19 nt, Artificial Sequence
  Description of Artificial Sequence: Synthetic oligonucleotide
agacaaagaagcagguaac

SEQ ID NO: 2831280 - RNA, 19 nt, Artificial Sequence
  Description of Artificial Sequence: Synthetic oligonucleotide
guccguaucaggaggaagg

SEQ ID NO: 2831281 - RNA, 19 nt, Artificial Sequence
  Description of Artificial Sequence: Synthetic oligonucleotide
gacaaagaagcagguaacc

SEQ ID NO: 2831282 - RNA, 19 nt, Artificial Sequence
  Description of Artificial Sequence: Synthetic oligonucleotide
cugagagugagcagaggcc

SEQ ID NO: 2831283 - RNA, 19 nt, Artificial Sequence
  Description of Artificial Sequence: Synthetic oligonucleotide
agggcguuccggaugaugc

SEQ ID NO: 2831284 - RNA, 19 nt, Artificial Sequence
  Description of Artificial Sequence: Synthetic oligonucleotide
ugagagugagcagaggcca

SEQ ID NO: 2831285 - RNA, 19 nt, Artificial Sequence
  Description of Artificial Sequence: Synthetic oligonucleotide
ucugaccuccaacacggug

SEQ ID NO: 2831286 - RNA, 19 nt, Artificial Sequence
  Description of Artificial Sequence: Synthetic oligonucleotide
ucauuaucgccguuaccug

SEQ ID NO: 2831287 - RNA, 19 nt, Artificial Sequence
  Description of Artificial Sequence: Synthetic oligonucleotide
cuguggacguucaggaagg

SEQ ID NO: 2831288 - RNA, 19 nt, Artificial Sequence
  Description of Artificial Sequence: Synthetic oligonucleotide
uggcauuugauagagggua

SEQ ID NO: 2831289 - RNA, 19 nt, Artificial Sequence
  Description of Artificial Sequence: Synthetic oligonucleotide
uauagcagauacugagagu

SEQ ID NO: 2831290 - RNA, 19 nt, Artificial Sequence
  Description of Artificial Sequence: Synthetic oligonucleotide
guggaaacgggugaaagac

SEQ ID NO: 2831291 - RNA, 19 nt, Artificial Sequence
  Description of Artificial Sequence: Synthetic oligonucleotide
ccagccacgacauagauga

SEQ ID NO: 2831292 - RNA, 19 nt, Artificial Sequence
  Description of Artificial Sequence: Synthetic oligonucleotide
ucugagagggcguuccgga

SEQ ID NO: 2831293 - RNA, 19 nt, Artificial Sequence
  Description of Artificial Sequence: Synthetic oligonucleotide
acauagaugauaggguuga

SEQ ID NO: 2831294 - RNA, 19 nt, Artificial Sequence
  Description of Artificial Sequence: Synthetic oligonucleotide
agguuguccucugaccucc

SEQ ID NO: 2831295 - RNA, 19 nt, Artificial Sequence
  Description of Artificial Sequence: Synthetic oligonucleotide
ugauguaagccagggacac

SEQ ID NO: 2831296 - RNA, 19 nt, Artificial Sequence
  Description of Artificial Sequence: Synthetic oligonucleotide
ugauagaggguagaucgga

SEQ ID NO: 2831297 - RNA, 19 nt, Artificial Sequence
  Description of Artificial Sequence: Synthetic oligonucleotide
uaccugguagggcagccag

SEQ ID NO: 2831298 - RNA, 19 nt, Artificial Sequence
  Description of Artificial Sequence: Synthetic oligonucleotide
ucuugguggagcguguggc

SEQ ID NO: 2831299 - RNA, 19 nt, Artificial Sequence
  Description of Artificial Sequence: Synthetic oligonucleotide
uaucaggaggaagguauag

SEQ ID NO: 2831300 - RNA, 19 nt, Artificial Sequence
  Description of Artificial Sequence: Synthetic oligonucleotide
gaugaugccggggagugac

SEQ ID NO: 2831301 - RNA, 19 nt, Artificial Sequence
  Description of Artificial Sequence: Synthetic oligonucleotide
ugaccauggaguccucuga

SEQ ID NO: 2831302 - RNA, 19 nt, Artificial Sequence
  Description of Artificial Sequence: Synthetic oligonucleotide
acguucaggaaggugggcg

SEQ ID NO: 2831303 - RNA, 19 nt, Artificial Sequence
  Description of Artificial Sequence: Synthetic oligonucleotide
uuccggaugaugccgggga

SEQ ID NO: 2831304 - RNA, 19 nt, Artificial Sequence
  Description of Artificial Sequence: Synthetic oligonucleotide
uccagguccguaucaggag

SEQ ID NO: 2831305 - RNA, 19 nt, Artificial Sequence
  Description of Artificial Sequence: Synthetic oligonucleotide
auagaugauaggguugaca

SEQ ID NO: 2831306 - RNA, 19 nt, Artificial Sequence
  Description of Artificial Sequence: Synthetic oligonucleotide
cacacgaaacccaggauca

SEQ ID NO: 2831307 - RNA, 19 nt, Artificial Sequence
  Description of Artificial Sequence: Synthetic oligonucleotide
aacgggugaaagacuuugg

SEQ ID NO: 2831308 - RNA, 19 nt, Artificial Sequence
  Description of Artificial Sequence: Synthetic oligonucleotide
aagcagguaaccacggcca

SEQ ID NO: 2831309 - RNA, 19 nt, Artificial Sequence
  Description of Artificial Sequence: Synthetic oligonucleotide
gucgagguguccaucgugg

SEQ ID NO: 2831310 - RNA, 19 nt, Artificial Sequence
  Description of Artificial Sequence: Synthetic oligonucleotide
ccucugaccuccaacacgg

SEQ ID NO: 2831311 - RNA, 19 nt, Artificial Sequence
  Description of Artificial Sequence: Synthetic oligonucleotide
ucguggaaacgggugaaag

SEQ ID NO: 2831312 - RNA, 19 nt, Artificial Sequence
  Description of Artificial Sequence: Synthetic oligonucleotide
agaugauaggguugacaca

SEQ ID NO: 2831313 - RNA, 19 nt, Artificial Sequence
  Description of Artificial Sequence: Synthetic oligonucleotide
aaggugggcgaggaagggg

SEQ ID NO: 2831314 - RNA, 19 nt, Artificial Sequence
  Description of Artificial Sequence: Synthetic oligonucleotide
ugaccuccaacacggugug

SEQ ID NO: 2831315 - RNA, 19 nt, Artificial Sequence
  Description of Artificial Sequence: Synthetic oligonucleotide
agccucaucauggccacac

SEQ ID NO: 2831316 - RNA, 19 nt, Artificial Sequence
  Description of Artificial Sequence: Synthetic oligonucleotide
uggaaacgggugaaagacu

SEQ ID NO: 2831317 - RNA, 19 nt, Artificial Sequence
  Description of Artificial Sequence: Synthetic oligonucleotide
ugcguagccgcccuuggaa

SEQ ID NO: 2831318 - RNA, 19 nt, Artificial Sequence
  Description of Artificial Sequence: Synthetic oligonucleotide
agccuguggacguucagga

SEQ ID NO: 2831319 - RNA, 19 nt, Artificial Sequence
  Description of Artificial Sequence: Synthetic oligonucleotide
caguugauguaagccaggg

SEQ ID NO: 2831320 - RNA, 19 nt, Artificial Sequence
  Description of Artificial Sequence: Synthetic oligonucleotide
gaucagccucaucauggcc

SEQ ID NO: 2831321 - RNA, 19 nt, Artificial Sequence
  Description of Artificial Sequence: Synthetic oligonucleotide
uuguccucugaccuccaac

SEQ ID NO: 2831322 - RNA, 19 nt, Artificial Sequence
  Description of Artificial Sequence: Synthetic oligonucleotide
agguguccaucguggaaac

SEQ ID NO: 2831323 - RNA, 19 nt, Artificial Sequence
  Description of Artificial Sequence: Synthetic oligonucleotide
uaucgccguuaccugguag

SEQ ID NO: 2831324 - RNA, 19 nt, Artificial Sequence
  Description of Artificial Sequence: Synthetic oligonucleotide
gagcguguggcccugcgac

SEQ ID NO: 2831325 - RNA, 19 nt, Artificial Sequence
  Description of Artificial Sequence: Synthetic oligonucleotide
agcagguaaccacggccac

SEQ ID NO: 2831326 - RNA, 19 nt, Artificial Sequence
  Description of Artificial Sequence: Synthetic oligonucleotide
cagauacugagagugagca

SEQ ID NO: 2831327 - RNA, 19 nt, Artificial Sequence
  Description of Artificial Sequence: Synthetic oligonucleotide
guaaccacggccaccacca

SEQ ID NO: 2831328 - RNA, 19 nt, Artificial Sequence
  Description of Artificial Sequence: Synthetic oligonucleotide
gacacagcaguugauguaa

SEQ ID NO: 2831329 - RNA, 19 nt, Artificial Sequence
  Description of Artificial Sequence: Synthetic oligonucleotide
cacagcaguugauguaagc

SEQ ID NO: 2831330 - RNA, 19 nt, Artificial Sequence
  Description of Artificial Sequence: Synthetic oligonucleotide
aaacccaggaucagccuca

SEQ ID NO: 2831331 - RNA, 19 nt, Artificial Sequence
  Description of Artificial Sequence: Synthetic oligonucleotide
aguugauguaagccaggga

SEQ ID NO: 2831332 - RNA, 19 nt, Artificial Sequence
  Description of Artificial Sequence: Synthetic oligonucleotide
aagguauagcagauacuga

SEQ ID NO: 2831333 - RNA, 19 nt, Artificial Sequence
  Description of Artificial Sequence: Synthetic oligonucleotide
cuugguggagcguguggcc

SEQ ID NO: 2831334 - RNA, 19 nt, Artificial Sequence
  Description of Artificial Sequence: Synthetic oligonucleotide
cuggccagccacgacauag

SEQ ID NO: 2831335 - RNA, 19 nt, Artificial Sequence
  Description of Artificial Sequence: Synthetic oligonucleotide
ugccauggcauuugauaga

SEQ ID NO: 2831336 - RNA, 19 nt, Artificial Sequence
  Description of Artificial Sequence: Synthetic oligonucleotide
acgacauagaugauagggu

SEQ ID NO: 2831337 - RNA, 19 nt, Artificial Sequence
  Description of Artificial Sequence: Synthetic oligonucleotide
gauagaggguagaucggac

SEQ ID NO: 2831338 - RNA, 19 nt, Artificial Sequence
  Description of Artificial Sequence: Synthetic oligonucleotide
agugagcagaggccacacg

SEQ ID NO: 2831339 - RNA, 19 nt, Artificial Sequence
  Description of Artificial Sequence: Synthetic oligonucleotide
uccaacacggugugccaug

SEQ ID NO: 2831340 - RNA, 19 nt, Artificial Sequence
  Description of Artificial Sequence: Synthetic oligonucleotide
gauguaagccagggacacg

SEQ ID NO: 2831341 - RNA, 19 nt, Artificial Sequence
  Description of Artificial Sequence: Synthetic oligonucleotide
ugguccccugaccauggag

SEQ ID NO: 2831342 - RNA, 19 nt, Artificial Sequence
  Description of Artificial Sequence: Synthetic oligonucleotide
cugaccauggaguccucug

SEQ ID NO: 2831343 - RNA, 19 nt, Artificial Sequence
  Description of Artificial Sequence: Synthetic oligonucleotide
gagugaccugcguagccgc

SEQ ID NO: 2831344 - RNA, 19 nt, Artificial Sequence
  Description of Artificial Sequence: Synthetic oligonucleotide
gccacgacauagaugauag

SEQ ID NO: 2831345 - RNA, 19 nt, Artificial Sequence
  Description of Artificial Sequence: Synthetic oligonucleotide
ggugaaagacuuuggccug

SEQ ID NO: 2831346 - RNA, 19 nt, Artificial Sequence
  Description of Artificial Sequence: Synthetic oligonucleotide
ucagccucaucauggccac

SEQ ID NO: 2831347 - RNA, 19 nt, Artificial Sequence
  Description of Artificial Sequence: Synthetic oligonucleotide
caaggaguucagccugugg

SEQ ID NO: 2831348 - RNA, 19 nt, Artificial Sequence
  Description of Artificial Sequence: Synthetic oligonucleotide
gaggccacacgaaacccag

SEQ ID NO: 2831349 - RNA, 19 nt, Artificial Sequence
  Description of Artificial Sequence: Synthetic oligonucleotide
gaaggugggcgaggaaggg

SEQ ID NO: 2831350 - RNA, 19 nt, Artificial Sequence
  Description of Artificial Sequence: Synthetic oligonucleotide
ccuguggacguucaggaag

SEQ ID NO: 2831351 - RNA, 19 nt, Artificial Sequence
  Description of Artificial Sequence: Synthetic oligonucleotide
gggugaaagacuuuggccu

SEQ ID NO: 2831352 - RNA, 19 nt, Artificial Sequence
  Description of Artificial Sequence: Synthetic oligonucleotide
caucauuaucgccguuacc

SEQ ID NO: 2831353 - RNA, 19 nt, Artificial Sequence
  Description of Artificial Sequence: Synthetic oligonucleotide
uagaucggaccuucugggu

SEQ ID NO: 2831354 - RNA, 19 nt, Artificial Sequence
  Description of Artificial Sequence: Synthetic oligonucleotide
gagguguccaucguggaaa

SEQ ID NO: 2831355 - RNA, 19 nt, Artificial Sequence
  Description of Artificial Sequence: Synthetic oligonucleotide
gagagggcguuccggauga

SEQ ID NO: 2831356 - RNA, 19 nt, Artificial Sequence
  Description of Artificial Sequence: Synthetic oligonucleotide
cacgaaacccaggaucagc

SEQ ID NO: 2831357 - RNA, 19 nt, Artificial Sequence
  Description of Artificial Sequence: Synthetic oligonucleotide
ucaggaaggugggcgagga

SEQ ID NO: 2831358 - RNA, 19 nt, Artificial Sequence
  Description of Artificial Sequence: Synthetic oligonucleotide
guaagccagggacacgcac

SEQ ID NO: 2831359 - RNA, 19 nt, Artificial Sequence
  Description of Artificial Sequence: Synthetic oligonucleotide
ucagccuguggacguucag

SEQ ID NO: 2831360 - RNA, 19 nt, Artificial Sequence
  Description of Artificial Sequence: Synthetic oligonucleotide
auacugagagugagcagag

SEQ ID NO: 2831361 - RNA, 19 nt, Artificial Sequence
  Description of Artificial Sequence: Synthetic oligonucleotide
uugguggagcguguggccc

SEQ ID NO: 2831362 - RNA, 19 nt, Artificial Sequence
  Description of Artificial Sequence: Synthetic oligonucleotide
gguaaccacggccaccacc

SEQ ID NO: 2831363 - RNA, 19 nt, Artificial Sequence
  Description of Artificial Sequence: Synthetic oligonucleotide
ucgccguuaccugguaggg

SEQ ID NO: 2831364 - RNA, 19 nt, Artificial Sequence
  Description of Artificial Sequence: Synthetic oligonucleotide
cagggacacgcacaaggag

SEQ ID NO: 2831365 - RNA, 19 nt, Artificial Sequence
  Description of Artificial Sequence: Synthetic oligonucleotide
uggagcguguggcccugcg

SEQ ID NO: 2831366 - RNA, 19 nt, Artificial Sequence
  Description of Artificial Sequence: Synthetic oligonucleotide
uucugggucgaggugucca

SEQ ID NO: 2831367 - RNA, 19 nt, Artificial Sequence
  Description of Artificial Sequence: Synthetic oligonucleotide
agcgucuugguggagcgug

SEQ ID NO: 2831368 - RNA, 19 nt, Artificial Sequence
  Description of Artificial Sequence: Synthetic oligonucleotide
uuuggccugguccccugac

SEQ ID NO: 2831369 - RNA, 19 nt, Artificial Sequence
  Description of Artificial Sequence: Synthetic oligonucleotide
auuaucgccguuaccuggu

SEQ ID NO: 2831370 - RNA, 19 nt, Artificial Sequence
  Description of Artificial Sequence: Synthetic oligonucleotide
accuucugggucgaggugu

SEQ ID NO: 2831371 - RNA, 19 nt, Artificial Sequence
  Description of Artificial Sequence: Synthetic oligonucleotide
agacuuuggccuggucccc

SEQ ID NO: 2831372 - RNA, 19 nt, Artificial Sequence
  Description of Artificial Sequence: Synthetic oligonucleotide
acaccccucuccuugugga

SEQ ID NO: 2831373 - RNA, 19 nt, Artificial Sequence
  Description of Artificial Sequence: Synthetic oligonucleotide
ggaguucagccuguggacg

SEQ ID NO: 2831374 - RNA, 19 nt, Artificial Sequence
  Description of Artificial Sequence: Synthetic oligonucleotide
augauaggguugacacagc

SEQ ID NO: 2831375 - RNA, 19 nt, Artificial Sequence
  Description of Artificial Sequence: Synthetic oligonucleotide
cuccagguccguaucagga

SEQ ID NO: 2831376 - RNA, 19 nt, Artificial Sequence
  Description of Artificial Sequence: Synthetic oligonucleotide
gaagcccuggccagccacg

SEQ ID NO: 2831377 - RNA, 19 nt, Artificial Sequence
  Description of Artificial Sequence: Synthetic oligonucleotide
cagccuguggacguucagg

SEQ ID NO: 2831378 - RNA, 19 nt, Artificial Sequence
  Description of Artificial Sequence: Synthetic oligonucleotide
caggaucagccucaucaug

SEQ ID NO: 2831379 - RNA, 19 nt, Artificial Sequence
  Description of Artificial Sequence: Synthetic oligonucleotide
uccguaucaggaggaaggu

SEQ ID NO: 2831380 - RNA, 19 nt, Artificial Sequence
  Description of Artificial Sequence: Synthetic oligonucleotide
ggagugaccugcguagccg

SEQ ID NO: 2831381 - RNA, 19 nt, Artificial Sequence
  Description of Artificial Sequence: Synthetic oligonucleotide
cacaccccucuccuugugg

SEQ ID NO: 2831382 - RNA, 19 nt, Artificial Sequence
  Description of Artificial Sequence: Synthetic oligonucleotide
ccacacgaaacccaggauc

SEQ ID NO: 2831383 - RNA, 19 nt, Artificial Sequence
  Description of Artificial Sequence: Synthetic oligonucleotide
uggccagccacgacauaga

SEQ ID NO: 2831384 - RNA, 19 nt, Artificial Sequence
  Description of Artificial Sequence: Synthetic oligonucleotide
uuggaagcccuggccagcc

SEQ ID NO: 2831385 - RNA, 19 nt, Artificial Sequence
  Description of Artificial Sequence: Synthetic oligonucleotide
cagccaagccaucauuauc

SEQ ID NO: 2831386 - RNA, 19 nt, Artificial Sequence
  Description of Artificial Sequence: Synthetic oligonucleotide
ugaugccggggagugaccu

SEQ ID NO: 2831387 - RNA, 19 nt, Artificial Sequence
  Description of Artificial Sequence: Synthetic oligonucleotide
ucgagguguccaucgugga

SEQ ID NO: 2831388 - RNA, 19 nt, Artificial Sequence
  Description of Artificial Sequence: Synthetic oligonucleotide
guuaccugguagggcagcc

SEQ ID NO: 2831389 - RNA, 19 nt, Artificial Sequence
  Description of Artificial Sequence: Synthetic oligonucleotide
ccagguccguaucaggagg

SEQ ID NO: 2831390 - RNA, 19 nt, Artificial Sequence
  Description of Artificial Sequence: Synthetic oligonucleotide
auggcauuugauagagggu

SEQ ID NO: 2831391 - RNA, 19 nt, Artificial Sequence
  Description of Artificial Sequence: Synthetic oligonucleotide
ccucaucauggccacaccc

SEQ ID NO: 2831392 - RNA, 19 nt, Artificial Sequence
  Description of Artificial Sequence: Synthetic oligonucleotide
agugaccugcguagccgcc

SEQ ID NO: 2831393 - RNA, 19 nt, Artificial Sequence
  Description of Artificial Sequence: Synthetic oligonucleotide
gccguuaccugguagggca

SEQ ID NO: 2831394 - RNA, 19 nt, Artificial Sequence
  Description of Artificial Sequence: Synthetic oligonucleotide
gaggguagaucggaccuuc

SEQ ID NO: 2831395 - RNA, 19 nt, Artificial Sequence
  Description of Artificial Sequence: Synthetic oligonucleotide
gaugccggggagugaccug

SEQ ID NO: 2831396 - RNA, 19 nt, Artificial Sequence
  Description of Artificial Sequence: Synthetic oligonucleotide
gguauagcagauacugaga

SEQ ID NO: 2831397 - RNA, 19 nt, Artificial Sequence
  Description of Artificial Sequence: Synthetic oligonucleotide
cuuggaagcccuggccagc

SEQ ID NO: 2831398 - RNA, 19 nt, Artificial Sequence
  Description of Artificial Sequence: Synthetic oligonucleotide
gaaagacuuuggccugguc

SEQ ID NO: 2831399 - RNA, 19 nt, Artificial Sequence
  Description of Artificial Sequence: Synthetic oligonucleotide
ucugggucgagguguccau

SEQ ID NO: 2831400 - RNA, 19 nt, Artificial Sequence
  Description of Artificial Sequence: Synthetic oligonucleotide
cgggugaaagacuuuggcc

SEQ ID NO: 2831401 - RNA, 19 nt, Artificial Sequence
  Description of Artificial Sequence: Synthetic oligonucleotide
ggcauuugauagaggguag

SEQ ID NO: 2831402 - RNA, 19 nt, Artificial Sequence
  Description of Artificial Sequence: Synthetic oligonucleotide
cagguaaccacggccacca

SEQ ID NO: 2831403 - RNA, 19 nt, Artificial Sequence
  Description of Artificial Sequence: Synthetic oligonucleotide
guagccgcccuuggaagcc

SEQ ID NO: 2831404 - RNA, 19 nt, Artificial Sequence
  Description of Artificial Sequence: Synthetic oligonucleotide
cagguuguccucugaccuc

SEQ ID NO: 2831405 - RNA, 19 nt, Artificial Sequence
  Description of Artificial Sequence: Synthetic oligonucleotide
ggacguucaggaagguggg

SEQ ID NO: 2831406 - RNA, 19 nt, Artificial Sequence
  Description of Artificial Sequence: Synthetic oligonucleotide
ggguagaucggaccuucug

SEQ ID NO: 2831407 - RNA, 19 nt, Artificial Sequence
  Description of Artificial Sequence: Synthetic oligonucleotide
ggcguuccggaugaugccg

SEQ ID NO: 2831408 - RNA, 19 nt, Artificial Sequence
  Description of Artificial Sequence: Synthetic oligonucleotide
ggccacacgaaacccagga

SEQ ID NO: 2831409 - RNA, 19 nt, Artificial Sequence
  Description of Artificial Sequence: Synthetic oligonucleotide
ccaucauuaucgccguuac

SEQ ID NO: 2831410 - RNA, 19 nt, Artificial Sequence
  Description of Artificial Sequence: Synthetic oligonucleotide
gaguucagccuguggacgu

SEQ ID NO: 2831411 - RNA, 19 nt, Artificial Sequence
  Description of Artificial Sequence: Synthetic oligonucleotide
acacgaaacccaggaucag

SEQ ID NO: 2831412 - RNA, 19 nt, Artificial Sequence
  Description of Artificial Sequence: Synthetic oligonucleotide
gagugagcagaggccacac

SEQ ID NO: 2831413 - RNA, 19 nt, Artificial Sequence
  Description of Artificial Sequence: Synthetic oligonucleotide
ugccggggagugaccugcg

SEQ ID NO: 2831414 - RNA, 19 nt, Artificial Sequence
  Description of Artificial Sequence: Synthetic oligonucleotide
uuaucgccguuaccuggua

SEQ ID NO: 2831415 - RNA, 19 nt, Artificial Sequence
  Description of Artificial Sequence: Synthetic oligonucleotide
ggucgagguguccaucgug

SEQ ID NO: 2831416 - RNA, 19 nt, Artificial Sequence
  Description of Artificial Sequence: Synthetic oligonucleotide
agccacgacauagaugaua

SEQ ID NO: 2831417 - RNA, 19 nt, Artificial Sequence
  Description of Artificial Sequence: Synthetic oligonucleotide
gacguucaggaaggugggc

SEQ ID NO: 2831418 - RNA, 19 nt, Artificial Sequence
  Description of Artificial Sequence: Synthetic oligonucleotide
uccccugaccauggagucc

SEQ ID NO: 2831419 - RNA, 19 nt, Artificial Sequence
  Description of Artificial Sequence: Synthetic oligonucleotide
augaugccggggagugacc

SEQ ID NO: 2831420 - RNA, 19 nt, Artificial Sequence
  Description of Artificial Sequence: Synthetic oligonucleotide
acacgcacaaggaguucag

SEQ ID NO: 2831421 - RNA, 19 nt, Artificial Sequence
  Description of Artificial Sequence: Synthetic oligonucleotide
cauagaugauaggguugac

SEQ ID NO: 2831422 - RNA, 19 nt, Artificial Sequence
  Description of Artificial Sequence: Synthetic oligonucleotide
gagagugagcagaggccac

SEQ ID NO: 2831423 - RNA, 19 nt, Artificial Sequence
  Description of Artificial Sequence: Synthetic oligonucleotide
gcagauacugagagugagc

SEQ ID NO: 2831424 - RNA, 19 nt, Artificial Sequence
  Description of Artificial Sequence: Synthetic oligonucleotide
ggccacaccccucuccuug

SEQ ID NO: 2831425 - RNA, 19 nt, Artificial Sequence
  Description of Artificial Sequence: Synthetic oligonucleotide
gggagugaccugcguagcc

SEQ ID NO: 2831426 - RNA, 19 nt, Artificial Sequence
  Description of Artificial Sequence: Synthetic oligonucleotide
guggacguucaggaaggug

SEQ ID NO: 2831427 - RNA, 19 nt, Artificial Sequence
  Description of Artificial Sequence: Synthetic oligonucleotide
agguaaccacggccaccac

SEQ ID NO: 2831428 - RNA, 19 nt, Artificial Sequence
  Description of Artificial Sequence: Synthetic oligonucleotide
acacagcaguugauguaag

SEQ ID NO: 2831429 - RNA, 19 nt, Artificial Sequence
  Description of Artificial Sequence: Synthetic oligonucleotide
cacgcacaaggaguucagc

SEQ ID NO: 2831430 - RNA, 19 nt, Artificial Sequence
  Description of Artificial Sequence: Synthetic oligonucleotide
agcguguggcccugcgacu

SEQ ID NO: 2831431 - RNA, 19 nt, Artificial Sequence
  Description of Artificial Sequence: Synthetic oligonucleotide
cagguccguaucaggagga

SEQ ID NO: 2831432 - RNA, 19 nt, Artificial Sequence
  Description of Artificial Sequence: Synthetic oligonucleotide
gguccguaucaggaggaag

SEQ ID NO: 2831433 - RNA, 19 nt, Artificial Sequence
  Description of Artificial Sequence: Synthetic oligonucleotide
caccaccaccuucagcguc

SEQ ID NO: 2831434 - RNA, 19 nt, Artificial Sequence
  Description of Artificial Sequence: Synthetic oligonucleotide
gugaccugcguagccgccc

SEQ ID NO: 2831435 - RNA, 19 nt, Artificial Sequence
  Description of Artificial Sequence: Synthetic oligonucleotide
caacacggugugccauggc

SEQ ID NO: 2831436 - RNA, 19 nt, Artificial Sequence
  Description of Artificial Sequence: Synthetic oligonucleotide
uaaccacggccaccaccac

SEQ ID NO: 2831437 - RNA, 19 nt, Artificial Sequence
  Description of Artificial Sequence: Synthetic oligonucleotide
uguggacguucaggaaggu

SEQ ID NO: 2831438 - RNA, 19 nt, Artificial Sequence
  Description of Artificial Sequence: Synthetic oligonucleotide
gcguagccgcccuuggaag

SEQ ID NO: 2831439 - RNA, 19 nt, Artificial Sequence
  Description of Artificial Sequence: Synthetic oligonucleotide
accugcguagccgcccuug

SEQ ID NO: 2831440 - RNA, 19 nt, Artificial Sequence
  Description of Artificial Sequence: Synthetic oligonucleotide
gaggaagguauagcagaua

SEQ ID NO: 2831441 - RNA, 19 nt, Artificial Sequence
  Description of Artificial Sequence: Synthetic oligonucleotide
cggggagugaccugcguag

SEQ ID NO: 2831442 - RNA, 19 nt, Artificial Sequence
  Description of Artificial Sequence: Synthetic oligonucleotide
gcccuuggaagcccuggcc

SEQ ID NO: 2831443 - RNA, 19 nt, Artificial Sequence
  Description of Artificial Sequence: Synthetic oligonucleotide
guaucaggaggaagguaua

SEQ ID NO: 2831444 - RNA, 19 nt, Artificial Sequence
  Description of Artificial Sequence: Synthetic oligonucleotide
aucguggaaacgggugaaa

SEQ ID NO: 2831445 - RNA, 19 nt, Artificial Sequence
  Description of Artificial Sequence: Synthetic oligonucleotide
gguguccaucguggaaacg

SEQ ID NO: 2831446 - RNA, 19 nt, Artificial Sequence
  Description of Artificial Sequence: Synthetic oligonucleotide
agaggguagaucggaccuu

SEQ ID NO: 2831447 - RNA, 19 nt, Artificial Sequence
  Description of Artificial Sequence: Synthetic oligonucleotide
gcauuugauagaggguaga

SEQ ID NO: 2831448 - RNA, 19 nt, Artificial Sequence
  Description of Artificial Sequence: Synthetic oligonucleotide
cacggccaccaccaccuuc

SEQ ID NO: 2831449 - RNA, 19 nt, Artificial Sequence
  Description of Artificial Sequence: Synthetic oligonucleotide
ggaaacgggugaaagacuu

SEQ ID NO: 2831450 - RNA, 19 nt, Artificial Sequence
  Description of Artificial Sequence: Synthetic oligonucleotide
ggaccuucugggucgaggu

SEQ ID NO: 2831451 - RNA, 19 nt, Artificial Sequence
  Description of Artificial Sequence: Synthetic oligonucleotide
ccauggcauuugauagagg

SEQ ID NO: 2831452 - RNA, 19 nt, Artificial Sequence
  Description of Artificial Sequence: Synthetic oligonucleotide
aguccucugagagggcguu

SEQ ID NO: 2831453 - RNA, 19 nt, Artificial Sequence
  Description of Artificial Sequence: Synthetic oligonucleotide
ccaacacggugugccaugg

SEQ ID NO: 2831454 - RNA, 19 nt, Artificial Sequence
  Description of Artificial Sequence: Synthetic oligonucleotide
ccacgacauagaugauagg

SEQ ID NO: 2831455 - RNA, 19 nt, Artificial Sequence
  Description of Artificial Sequence: Synthetic oligonucleotide
caucguggaaacgggugaa

SEQ ID NO: 2831456 - RNA, 19 nt, Artificial Sequence
  Description of Artificial Sequence: Synthetic oligonucleotide
ccaucguggaaacggguga

SEQ ID NO: 2831457 - RNA, 19 nt, Artificial Sequence
  Description of Artificial Sequence: Synthetic oligonucleotide
cguagccgcccuuggaagc

SEQ ID NO: 2831458 - RNA, 19 nt, Artificial Sequence
  Description of Artificial Sequence: Synthetic oligonucleotide
gcagguaaccacggccacc

SEQ ID NO: 2831459 - RNA, 19 nt, Artificial Sequence
  Description of Artificial Sequence: Synthetic oligonucleotide
aacccaggaucagccucau

SEQ ID NO: 2831460 - RNA, 19 nt, Artificial Sequence
  Description of Artificial Sequence: Synthetic oligonucleotide
uagccgcccuuggaagccc

SEQ ID NO: 2831461 - RNA, 19 nt, Artificial Sequence
  Description of Artificial Sequence: Synthetic oligonucleotide
guuguccucugaccuccaa

SEQ ID NO: 2831462 - RNA, 19 nt, Artificial Sequence
  Description of Artificial Sequence: Synthetic oligonucleotide
ggugugccauggcauuuga

SEQ ID NO: 2831463 - RNA, 19 nt, Artificial Sequence
  Description of Artificial Sequence: Synthetic oligonucleotide
gcguuccggaugaugccgg

SEQ ID NO: 2831464 - RNA, 19 nt, Artificial Sequence
  Description of Artificial Sequence: Synthetic oligonucleotide
cguggaaacgggugaaaga

SEQ ID NO: 2831465 - RNA, 19 nt, Artificial Sequence
  Description of Artificial Sequence: Synthetic oligonucleotide
ccugcguagccgcccuugg

SEQ ID NO: 2831466 - RNA, 19 nt, Artificial Sequence
  Description of Artificial Sequence: Synthetic oligonucleotide
ccagggacacgcacaagga

SEQ ID NO: 2831467 - RNA, 19 nt, Artificial Sequence
  Description of Artificial Sequence: Synthetic oligonucleotide
ggcagccaagccaucauua

SEQ ID NO: 2831468 - RNA, 19 nt, Artificial Sequence
  Description of Artificial Sequence: Synthetic oligonucleotide
cacaaggaguucagccugu

SEQ ID NO: 2831469 - RNA, 19 nt, Artificial Sequence
  Description of Artificial Sequence: Synthetic oligonucleotide
gccagccacgacauagaug

SEQ ID NO: 2831470 - RNA, 19 nt, Artificial Sequence
  Description of Artificial Sequence: Synthetic oligonucleotide
gaccuccaacacggugugc

SEQ ID NO: 2831471 - RNA, 19 nt, Artificial Sequence
  Description of Artificial Sequence: Synthetic oligonucleotide
gcccugcgacuccaggucc

SEQ ID NO: 2831472 - RNA, 19 nt, Artificial Sequence
  Description of Artificial Sequence: Synthetic oligonucleotide
cuuuggccugguccccuga

SEQ ID NO: 2831473 - RNA, 19 nt, Artificial Sequence
  Description of Artificial Sequence: Synthetic oligonucleotide
cugggucgagguguccauc

SEQ ID NO: 2831474 - RNA, 19 nt, Artificial Sequence
  Description of Artificial Sequence: Synthetic oligonucleotide
agguccguaucaggaggaa

SEQ ID NO: 2831475 - RNA, 19 nt, Artificial Sequence
  Description of Artificial Sequence: Synthetic oligonucleotide
ggaagguauagcagauacu

SEQ ID NO: 2831476 - RNA, 19 nt, Artificial Sequence
  Description of Artificial Sequence: Synthetic oligonucleotide
ccucugagagggcguuccg

SEQ ID NO: 2831477 - RNA, 19 nt, Artificial Sequence
  Description of Artificial Sequence: Synthetic oligonucleotide
acggugugccauggcauuu

SEQ ID NO: 2831478 - RNA, 19 nt, Artificial Sequence
  Description of Artificial Sequence: Synthetic oligonucleotide
ggggagugaccugcguagc

SEQ ID NO: 2831479 - RNA, 19 nt, Artificial Sequence
  Description of Artificial Sequence: Synthetic oligonucleotide
aggguagaucggaccuucu

SEQ ID NO: 2831480 - RNA, 19 nt, Artificial Sequence
  Description of Artificial Sequence: Synthetic oligonucleotide
gcgacuccagguccguauc

SEQ ID NO: 2831481 - RNA, 19 nt, Artificial Sequence
  Description of Artificial Sequence: Synthetic oligonucleotide
gaaacgggugaaagacuuu

SEQ ID NO: 2831482 - RNA, 19 nt, Artificial Sequence
  Description of Artificial Sequence: Synthetic oligonucleotide
cugcguagccgcccuugga

SEQ ID NO: 2831483 - RNA, 19 nt, Artificial Sequence
  Description of Artificial Sequence: Synthetic oligonucleotide
accugguagggcagccaga

SEQ ID NO: 2831484 - RNA, 19 nt, Artificial Sequence
  Description of Artificial Sequence: Synthetic oligonucleotide
ccguuaccugguagggcag

SEQ ID NO: 2831485 - RNA, 19 nt, Artificial Sequence
  Description of Artificial Sequence: Synthetic oligonucleotide
cuucagcgucuugguggag

SEQ ID NO: 2831486 - RNA, 19 nt, Artificial Sequence
  Description of Artificial Sequence: Synthetic oligonucleotide
gacuuuggccugguccccu

SEQ ID NO: 2831487 - RNA, 19 nt, Artificial Sequence
  Description of Artificial Sequence: Synthetic oligonucleotide
gaguccucugagagggcgu

SEQ ID NO: 2831488 - RNA, 19 nt, Artificial Sequence
  Description of Artificial Sequence: Synthetic oligonucleotide
aucggaccuucugggucga

SEQ ID NO: 2831489 - RNA, 19 nt, Artificial Sequence
  Description of Artificial Sequence: Synthetic oligonucleotide
ucggaccuucugggucgag

SEQ ID NO: 2831490 - RNA, 19 nt, Artificial Sequence
  Description of Artificial Sequence: Synthetic oligonucleotide
cguucaggaaggugggcga

SEQ ID NO: 2831491 - RNA, 19 nt, Artificial Sequence
  Description of Artificial Sequence: Synthetic oligonucleotide
gcagccaagccaucauuau

SEQ ID NO: 2831492 - RNA, 19 nt, Artificial Sequence
  Description of Artificial Sequence: Synthetic oligonucleotide
ccugguagggcagccagaa

SEQ ID NO: 2831493 - RNA, 19 nt, Artificial Sequence
  Description of Artificial Sequence: Synthetic oligonucleotide
cguuccggaugaugccggg

SEQ ID NO: 2831494 - RNA, 19 nt, Artificial Sequence
  Description of Artificial Sequence: Synthetic oligonucleotide
guccaucguggaaacgggu

SEQ ID NO: 2831495 - RNA, 19 nt, Artificial Sequence
  Description of Artificial Sequence: Synthetic oligonucleotide
cacggugugccauggcauu

SEQ ID NO: 2831496 - RNA, 19 nt, Artificial Sequence
  Description of Artificial Sequence: Synthetic oligonucleotide
gguggagcguguggcccug

SEQ ID NO: 2831497 - RNA, 19 nt, Artificial Sequence
  Description of Artificial Sequence: Synthetic oligonucleotide
cugagagggcguuccggau

SEQ ID NO: 2831498 - RNA, 19 nt, Artificial Sequence
  Description of Artificial Sequence: Synthetic oligonucleotide
gcguguggcccugcgacuc

SEQ ID NO: 2831499 - RNA, 19 nt, Artificial Sequence
  Description of Artificial Sequence: Synthetic oligonucleotide
guccucugagagggcguuc

SEQ ID NO: 2831500 - RNA, 19 nt, Artificial Sequence
  Description of Artificial Sequence: Synthetic oligonucleotide
gccuguggacguucaggaa

SEQ ID NO: 2831501 - RNA, 19 nt, Artificial Sequence
  Description of Artificial Sequence: Synthetic oligonucleotide
cguuaccugguagggcagc

SEQ ID NO: 2831502 - RNA, 19 nt, Artificial Sequence
  Description of Artificial Sequence: Synthetic oligonucleotide
ccgcccuuggaagcccugg

SEQ ID NO: 2831503 - RNA, 19 nt, Artificial Sequence
  Description of Artificial Sequence: Synthetic oligonucleotide
ggacacgcacaaggaguuc

SEQ ID NO: 2831504 - RNA, 19 nt, Artificial Sequence
  Description of Artificial Sequence: Synthetic oligonucleotide
gggacacgcacaaggaguu

SEQ ID NO: 2831505 - RNA, 19 nt, Artificial Sequence
  Description of Artificial Sequence: Synthetic oligonucleotide
cugguccccugaccaugga

SEQ ID NO: 2831506 - RNA, 19 nt, Artificial Sequence
  Description of Artificial Sequence: Synthetic oligonucleotide
cgcccuuggaagcccuggc

SEQ ID NO: 2831507 - RNA, 19 nt, Artificial Sequence
  Description of Artificial Sequence: Synthetic oligonucleotide
ggaugaugccggggaguga

SEQ ID NO: 2831508 - RNA, 19 nt, Artificial Sequence
  Description of Artificial Sequence: Synthetic oligonucleotide
guggagcguguggcccugc

SEQ ID NO: 2831509 - RNA, 19 nt, Artificial Sequence
  Description of Artificial Sequence: Synthetic oligonucleotide
agccgcccuuggaagcccu

SEQ ID NO: 2831510 - RNA, 19 nt, Artificial Sequence
  Description of Artificial Sequence: Synthetic oligonucleotide
cuccaacacggugugccau

SEQ ID NO: 2831511 - RNA, 19 nt, Artificial Sequence
  Description of Artificial Sequence: Synthetic oligonucleotide
ccacaccccucuccuugug

SEQ ID NO: 2831512 - RNA, 19 nt, Artificial Sequence
  Description of Artificial Sequence: Synthetic oligonucleotide
gccacacgaaacccaggau

SEQ ID NO: 2831513 - RNA, 19 nt, Artificial Sequence
  Description of Artificial Sequence: Synthetic oligonucleotide
cucugaccuccaacacggu

SEQ ID NO: 2831514 - RNA, 19 nt, Artificial Sequence
  Description of Artificial Sequence: Synthetic oligonucleotide
ggccagccacgacauagau

SEQ ID NO: 2831515 - RNA, 19 nt, Artificial Sequence
  Description of Artificial Sequence: Synthetic oligonucleotide
cgagguguccaucguggaa

SEQ ID NO: 2831516 - RNA, 19 nt, Artificial Sequence
  Description of Artificial Sequence: Synthetic oligonucleotide
cggugugccauggcauuug

SEQ ID NO: 2831517 - RNA, 19 nt, Artificial Sequence
  Description of Artificial Sequence: Synthetic oligonucleotide
cgccguuaccugguagggc

SEQ ID NO: 2831518 - RNA, 19 nt, Artificial Sequence
  Description of Artificial Sequence: Synthetic oligonucleotide
ggggcagccaagccaucau

SEQ ID NO: 2831519 - RNA, 19 nt, Artificial Sequence
  Description of Artificial Sequence: Synthetic oligonucleotide
gguuguccucugaccucca

SEQ ID NO: 2831520 - RNA, 19 nt, Artificial Sequence
  Description of Artificial Sequence: Synthetic oligonucleotide
gugugccauggcauuugau

SEQ ID NO: 2831521 - RNA, 19 nt, Artificial Sequence
  Description of Artificial Sequence: Synthetic oligonucleotide
ccggggagugaccugcgua

SEQ ID NO: 2831522 - RNA, 19 nt, Artificial Sequence
  Description of Artificial Sequence: Synthetic oligonucleotide
agagggcguuccggaugau

SEQ ID NO: 2831523 - RNA, 19 nt, Artificial Sequence
  Description of Artificial Sequence: Synthetic oligonucleotide
ccccugaccauggaguccu

SEQ ID NO: 2831524 - RNA, 19 nt, Artificial Sequence
  Description of Artificial Sequence: Synthetic oligonucleotide
cgaaacccaggaucagccu

SEQ ID NO: 2831525 - RNA, 19 nt, Artificial Sequence
  Description of Artificial Sequence: Synthetic oligonucleotide
cagccucaucauggccaca

SEQ ID NO: 2831526 - RNA, 19 nt, Artificial Sequence
  Description of Artificial Sequence: Synthetic oligonucleotide
ccguaucaggaggaaggua

SEQ ID NO: 2831527 - RNA, 19 nt, Artificial Sequence
  Description of Artificial Sequence: Synthetic oligonucleotide
gccgcccuuggaagcccug

SEQ ID NO: 2831528 - RNA, 19 nt, Artificial Sequence
  Description of Artificial Sequence: Synthetic oligonucleotide
cugcgacuccagguccgua

SEQ ID NO: 2831529 - RNA, 19 nt, Artificial Sequence
  Description of Artificial Sequence: Synthetic oligonucleotide
ggccugguccccugaccau

SEQ ID NO: 2831530 - RNA, 19 nt, Artificial Sequence
  Description of Artificial Sequence: Synthetic oligonucleotide
cagccacgacauagaugau

SEQ ID NO: 2831531 - RNA, 19 nt, Artificial Sequence
  Description of Artificial Sequence: Synthetic oligonucleotide
cccuggccagccacgacau

SEQ ID NO: 2831532 - RNA, 19 nt, Artificial Sequence
  Description of Artificial Sequence: Synthetic oligonucleotide
gcgucuugguggagcgugu

SEQ ID NO: 2831533 - RNA, 19 nt, Artificial Sequence
  Description of Artificial Sequence: Synthetic oligonucleotide
gccggggagugaccugcgu

SEQ ID NO: 2831534 - RNA, 19 nt, Artificial Sequence
  Description of Artificial Sequence: Synthetic oligonucleotide
ccuggccagccacgacaua

SEQ ID NO: 2831535 - RNA, 19 nt, Artificial Sequence
  Description of Artificial Sequence: Synthetic oligonucleotide
aacucuuuuggacaggucc

SEQ ID NO: 2831536 - RNA, 19 nt, Artificial Sequence
  Description of Artificial Sequence: Synthetic oligonucleotide
aaucugguuaucuugggcc

SEQ ID NO: 2831537 - RNA, 19 nt, Artificial Sequence
  Description of Artificial Sequence: Synthetic oligonucleotide
uaaaucgugauccuagucg

SEQ ID NO: 2831538 - RNA, 19 nt, Artificial Sequence
  Description of Artificial Sequence: Synthetic oligonucleotide
auuuauucuucuuaaaauc

SEQ ID NO: 2831539 - RNA, 19 nt, Artificial Sequence
  Description of Artificial Sequence: Synthetic oligonucleotide
cuaaugaacaccaagauca

SEQ ID NO: 2831540 - RNA, 19 nt, Artificial Sequence
  Description of Artificial Sequence: Synthetic oligonucleotide
uuuauucuucuuaaaaucc

SEQ ID NO: 2831541 - RNA, 19 nt, Artificial Sequence
  Description of Artificial Sequence: Synthetic oligonucleotide
uuaaaauccaaucugguua

SEQ ID NO: 2831542 - RNA, 19 nt, Artificial Sequence
  Description of Artificial Sequence: Synthetic oligonucleotide
uguaucuaaaucgugaucc

SEQ ID NO: 2831543 - RNA, 19 nt, Artificial Sequence
  Description of Artificial Sequence: Synthetic oligonucleotide
uuuacccugaucaucaucc

SEQ ID NO: 2831544 - RNA, 19 nt, Artificial Sequence
  Description of Artificial Sequence: Synthetic oligonucleotide
aacaagccaauuuugguuc

SEQ ID NO: 2831545 - RNA, 19 nt, Artificial Sequence
  Description of Artificial Sequence: Synthetic oligonucleotide
cuugcuuucauuuguaggg

SEQ ID NO: 2831546 - RNA, 19 nt, Artificial Sequence
  Description of Artificial Sequence: Synthetic oligonucleotide
aaagguaugcucuuguucu

SEQ ID NO: 2831547 - RNA, 19 nt, Artificial Sequence
  Description of Artificial Sequence: Synthetic oligonucleotide
uucuuaaaauccaaucugg

SEQ ID NO: 2831548 - RNA, 19 nt, Artificial Sequence
  Description of Artificial Sequence: Synthetic oligonucleotide
uuguucuuuacccugauca

SEQ ID NO: 2831549 - RNA, 19 nt, Artificial Sequence
  Description of Artificial Sequence: Synthetic oligonucleotide
aaaacaggacuccuguugg

SEQ ID NO: 2831550 - RNA, 19 nt, Artificial Sequence
  Description of Artificial Sequence: Synthetic oligonucleotide
gucgaaugaauccugaucg

SEQ ID NO: 2831551 - RNA, 19 nt, Artificial Sequence
  Description of Artificial Sequence: Synthetic oligonucleotide
ucuucuuaaaauccaaucu

SEQ ID NO: 2831552 - RNA, 19 nt, Artificial Sequence
  Description of Artificial Sequence: Synthetic oligonucleotide
uuccacuguaucuaaaucg

SEQ ID NO: 2831553 - RNA, 19 nt, Artificial Sequence
  Description of Artificial Sequence: Synthetic oligonucleotide
aaugaauccugaucgauga

SEQ ID NO: 2831554 - RNA, 19 nt, Artificial Sequence
  Description of Artificial Sequence: Synthetic oligonucleotide
ucgaugagaacucuuuugg

SEQ ID NO: 2831555 - RNA, 19 nt, Artificial Sequence
  Description of Artificial Sequence: Synthetic oligonucleotide
gaugaucuagucuaaagac

SEQ ID NO: 2831556 - RNA, 19 nt, Artificial Sequence
  Description of Artificial Sequence: Synthetic oligonucleotide
uccauaaguguuuacaggc

SEQ ID NO: 2831557 - RNA, 19 nt, Artificial Sequence
  Description of Artificial Sequence: Synthetic oligonucleotide
ucuagucuaaagacaaagg

SEQ ID NO: 2831558 - RNA, 19 nt, Artificial Sequence
  Description of Artificial Sequence: Synthetic oligonucleotide
uuuuggaugaucuagucua

SEQ ID NO: 2831559 - RNA, 19 nt, Artificial Sequence
  Description of Artificial Sequence: Synthetic oligonucleotide
aguguuuacaggcuuuugg

SEQ ID NO: 2831560 - RNA, 19 nt, Artificial Sequence
  Description of Artificial Sequence: Synthetic oligonucleotide
uuuccauaaguguuuacag

SEQ ID NO: 2831561 - RNA, 19 nt, Artificial Sequence
  Description of Artificial Sequence: Synthetic oligonucleotide
agaaguagagcuaaugaac

SEQ ID NO: 2831562 - RNA, 19 nt, Artificial Sequence
  Description of Artificial Sequence: Synthetic oligonucleotide
uccuccacaaccacuaggg

SEQ ID NO: 2831563 - RNA, 19 nt, Artificial Sequence
  Description of Artificial Sequence: Synthetic oligonucleotide
uuucaaaggaggucgaucu

SEQ ID NO: 2831564 - RNA, 19 nt, Artificial Sequence
  Description of Artificial Sequence: Synthetic oligonucleotide
ugaucuagucuaaagacaa

SEQ ID NO: 2831565 - RNA, 19 nt, Artificial Sequence
  Description of Artificial Sequence: Synthetic oligonucleotide
aacaccaagaucaucaggu

SEQ ID NO: 2831566 - RNA, 19 nt, Artificial Sequence
  Description of Artificial Sequence: Synthetic oligonucleotide
augcucuuguucuuuaccc

SEQ ID NO: 2831567 - RNA, 19 nt, Artificial Sequence
  Description of Artificial Sequence: Synthetic oligonucleotide
aguagagcuaaugaacacc

SEQ ID NO: 2831568 - RNA, 19 nt, Artificial Sequence
  Description of Artificial Sequence: Synthetic oligonucleotide
guuaucuugggccagaaga

SEQ ID NO: 2831569 - RNA, 19 nt, Artificial Sequence
  Description of Artificial Sequence: Synthetic oligonucleotide
auccuagucgaaugaaucc

SEQ ID NO: 2831570 - RNA, 19 nt, Artificial Sequence
  Description of Artificial Sequence: Synthetic oligonucleotide
uuauucuucuuaaaaucca

SEQ ID NO: 2831571 - RNA, 19 nt, Artificial Sequence
  Description of Artificial Sequence: Synthetic oligonucleotide
uucuuuacccugaucauca

SEQ ID NO: 2831572 - RNA, 19 nt, Artificial Sequence
  Description of Artificial Sequence: Synthetic oligonucleotide
cuucuuaaaauccaaucug

SEQ ID NO: 2831573 - RNA, 19 nt, Artificial Sequence
  Description of Artificial Sequence: Synthetic oligonucleotide
uuuacaggcuuuuggauga

SEQ ID NO: 2831574 - RNA, 19 nt, Artificial Sequence
  Description of Artificial Sequence: Synthetic oligonucleotide
aaaucgugauccuagucga

SEQ ID NO: 2831575 - RNA, 19 nt, Artificial Sequence
  Description of Artificial Sequence: Synthetic oligonucleotide
gaugagaacucuuuuggac

SEQ ID NO: 2831576 - RNA, 19 nt, Artificial Sequence
  Description of Artificial Sequence: Synthetic oligonucleotide
cuucuuucaaaggaggucg

SEQ ID NO: 2831577 - RNA, 19 nt, Artificial Sequence
  Description of Artificial Sequence: Synthetic oligonucleotide
ucuagccuugaccacaugc

SEQ ID NO: 2831578 - RNA, 19 nt, Artificial Sequence
  Description of Artificial Sequence: Synthetic oligonucleotide
aagaacaagccaauuuugg

SEQ ID NO: 2831579 - RNA, 19 nt, Artificial Sequence
  Description of Artificial Sequence: Synthetic oligonucleotide
uuccauaaguguuuacagg

SEQ ID NO: 2831580 - RNA, 19 nt, Artificial Sequence
  Description of Artificial Sequence: Synthetic oligonucleotide
agucauucccaucucuagc

SEQ ID NO: 2831581 - RNA, 19 nt, Artificial Sequence
  Description of Artificial Sequence: Synthetic oligonucleotide
agagcuaaugaacaccaag

SEQ ID NO: 2831582 - RNA, 19 nt, Artificial Sequence
  Description of Artificial Sequence: Synthetic oligonucleotide
aggaggucgaucuucuggc

SEQ ID NO: 2831583 - RNA, 19 nt, Artificial Sequence
  Description of Artificial Sequence: Synthetic oligonucleotide
uccuguuggaguuaguccc

SEQ ID NO: 2831584 - RNA, 19 nt, Artificial Sequence
  Description of Artificial Sequence: Synthetic oligonucleotide
agucgaaugaauccugauc

SEQ ID NO: 2831585 - RNA, 19 nt, Artificial Sequence
  Description of Artificial Sequence: Synthetic oligonucleotide
agaucaucagguuuuguug

SEQ ID NO: 2831586 - RNA, 19 nt, Artificial Sequence
  Description of Artificial Sequence: Synthetic oligonucleotide
uuuugguucuccuucaaaa

SEQ ID NO: 2831587 - RNA, 19 nt, Artificial Sequence
  Description of Artificial Sequence: Synthetic oligonucleotide
acuaggguuaauuuauucu

SEQ ID NO: 2831588 - RNA, 19 nt, Artificial Sequence
  Description of Artificial Sequence: Synthetic oligonucleotide
acggaagaaggcaugaugc

SEQ ID NO: 2831589 - RNA, 19 nt, Artificial Sequence
  Description of Artificial Sequence: Synthetic oligonucleotide
aagaucaucagguuuuguu

SEQ ID NO: 2831590 - RNA, 19 nt, Artificial Sequence
  Description of Artificial Sequence: Synthetic oligonucleotide
agaagaacaagccaauuuu

SEQ ID NO: 2831591 - RNA, 19 nt, Artificial Sequence
  Description of Artificial Sequence: Synthetic oligonucleotide
ucuuaaaauccaaucuggu

SEQ ID NO: 2831592 - RNA, 19 nt, Artificial Sequence
  Description of Artificial Sequence: Synthetic oligonucleotide
ugagaacucuuuuggacag

SEQ ID NO: 2831593 - RNA, 19 nt, Artificial Sequence
  Description of Artificial Sequence: Synthetic oligonucleotide
uagucuaaagacaaaggua

SEQ ID NO: 2831594 - RNA, 19 nt, Artificial Sequence
  Description of Artificial Sequence: Synthetic oligonucleotide
guuaauuuauucuucuuaa

SEQ ID NO: 2831595 - RNA, 19 nt, Artificial Sequence
  Description of Artificial Sequence: Synthetic oligonucleotide
uagaaguagagcuaaugaa

SEQ ID NO: 2831596 - RNA, 19 nt, Artificial Sequence
  Description of Artificial Sequence: Synthetic oligonucleotide
ugcacauuuccauaagugu

SEQ ID NO: 2831597 - RNA, 19 nt, Artificial Sequence
  Description of Artificial Sequence: Synthetic oligonucleotide
uuagucccaagcuauaguc

SEQ ID NO: 2831598 - RNA, 19 nt, Artificial Sequence
  Description of Artificial Sequence: Synthetic oligonucleotide
uccacuguaucuaaaucgu

SEQ ID NO: 2831599 - RNA, 19 nt, Artificial Sequence
  Description of Artificial Sequence: Synthetic oligonucleotide
guuuacaggcuuuuggaug

SEQ ID NO: 2831600 - RNA, 19 nt, Artificial Sequence
  Description of Artificial Sequence: Synthetic oligonucleotide
gaagaaggcaugaugcucc

SEQ ID NO: 2831601 - RNA, 19 nt, Artificial Sequence
  Description of Artificial Sequence: Synthetic oligonucleotide
ugugcuugcuuucauuugu

SEQ ID NO: 2831602 - RNA, 19 nt, Artificial Sequence
  Description of Artificial Sequence: Synthetic oligonucleotide
uggaugaucuagucuaaag

SEQ ID NO: 2831603 - RNA, 19 nt, Artificial Sequence
  Description of Artificial Sequence: Synthetic oligonucleotide
ucauuuguaggguccgccg

SEQ ID NO: 2831604 - RNA, 19 nt, Artificial Sequence
  Description of Artificial Sequence: Synthetic oligonucleotide
ugggccuucuuucaaagga

SEQ ID NO: 2831605 - RNA, 19 nt, Artificial Sequence
  Description of Artificial Sequence: Synthetic oligonucleotide
uccacaaccacuaggguua

SEQ ID NO: 2831606 - RNA, 19 nt, Artificial Sequence
  Description of Artificial Sequence: Synthetic oligonucleotide
uuuguggucugauacucug

SEQ ID NO: 2831607 - RNA, 19 nt, Artificial Sequence
  Description of Artificial Sequence: Synthetic oligonucleotide
agucuaaagacaaagguau

SEQ ID NO: 2831608 - RNA, 19 nt, Artificial Sequence
  Description of Artificial Sequence: Synthetic oligonucleotide
aucuagucuaaagacaaag

SEQ ID NO: 2831609 - RNA, 19 nt, Artificial Sequence
  Description of Artificial Sequence: Synthetic oligonucleotide
aauccugaucgaugagaac

SEQ ID NO: 2831610 - RNA, 19 nt, Artificial Sequence
  Description of Artificial Sequence: Synthetic oligonucleotide
uaaaauccaaucugguuau

SEQ ID NO: 2831611 - RNA, 19 nt, Artificial Sequence
  Description of Artificial Sequence: Synthetic oligonucleotide
augaacaccaagaucauca

SEQ ID NO: 2831612 - RNA, 19 nt, Artificial Sequence
  Description of Artificial Sequence: Synthetic oligonucleotide
uuaucuugggccagaagaa

SEQ ID NO: 2831613 - RNA, 19 nt, Artificial Sequence
  Description of Artificial Sequence: Synthetic oligonucleotide
guuggaguuagucccaagc

SEQ ID NO: 2831614 - RNA, 19 nt, Artificial Sequence
  Description of Artificial Sequence: Synthetic oligonucleotide
auuuccauaaguguuuaca

SEQ ID NO: 2831615 - RNA, 19 nt, Artificial Sequence
  Description of Artificial Sequence: Synthetic oligonucleotide
ugcuccacugcacauuucc

SEQ ID NO: 2831616 - RNA, 19 nt, Artificial Sequence
  Description of Artificial Sequence: Synthetic oligonucleotide
aagccaauuuugguucucc

SEQ ID NO: 2831617 - RNA, 19 nt, Artificial Sequence
  Description of Artificial Sequence: Synthetic oligonucleotide
aucgaugagaacucuuuug

SEQ ID NO: 2831618 - RNA, 19 nt, Artificial Sequence
  Description of Artificial Sequence: Synthetic oligonucleotide
agaacaagccaauuuuggu

SEQ ID NO: 2831619 - RNA, 19 nt, Artificial Sequence
  Description of Artificial Sequence: Synthetic oligonucleotide
uuggaguuagucccaagcu

SEQ ID NO: 2831620 - RNA, 19 nt, Artificial Sequence
  Description of Artificial Sequence: Synthetic oligonucleotide
uauagucauucccaucucu

SEQ ID NO: 2831621 - RNA, 19 nt, Artificial Sequence
  Description of Artificial Sequence: Synthetic oligonucleotide
aaauccaaucugguuaucu

SEQ ID NO: 2831622 - RNA, 19 nt, Artificial Sequence
  Description of Artificial Sequence: Synthetic oligonucleotide
gucauucccaucucuagcc

SEQ ID NO: 2831623 - RNA, 19 nt, Artificial Sequence
  Description of Artificial Sequence: Synthetic oligonucleotide
gaaguagagcuaaugaaca

SEQ ID NO: 2831624 - RNA, 19 nt, Artificial Sequence
  Description of Artificial Sequence: Synthetic oligonucleotide
uuuggacagguccucggag

SEQ ID NO: 2831625 - RNA, 19 nt, Artificial Sequence
  Description of Artificial Sequence: Synthetic oligonucleotide
aaugaacaccaagaucauc

SEQ ID NO: 2831626 - RNA, 19 nt, Artificial Sequence
  Description of Artificial Sequence: Synthetic oligonucleotide
uaaagacaaagguaugcuc

SEQ ID NO: 2831627 - RNA, 19 nt, Artificial Sequence
  Description of Artificial Sequence: Synthetic oligonucleotide
uuuuccacuguaucuaaau

SEQ ID NO: 2831628 - RNA, 19 nt, Artificial Sequence
  Description of Artificial Sequence: Synthetic oligonucleotide
caagcuauagucauuccca

SEQ ID NO: 2831629 - RNA, 19 nt, Artificial Sequence
  Description of Artificial Sequence: Synthetic oligonucleotide
auccugaucgaugagaacu

SEQ ID NO: 2831630 - RNA, 19 nt, Artificial Sequence
  Description of Artificial Sequence: Synthetic oligonucleotide
gacggaagaaggcaugaug

SEQ ID NO: 2831631 - RNA, 19 nt, Artificial Sequence
  Description of Artificial Sequence: Synthetic oligonucleotide
gaagaacaagccaauuuug

SEQ ID NO: 2831632 - RNA, 19 nt, Artificial Sequence
  Description of Artificial Sequence: Synthetic oligonucleotide
cuagaaguagagcuaauga

SEQ ID NO: 2831633 - RNA, 19 nt, Artificial Sequence
  Description of Artificial Sequence: Synthetic oligonucleotide
auuuguaggguccgccggg

SEQ ID NO: 2831634 - RNA, 19 nt, Artificial Sequence
  Description of Artificial Sequence: Synthetic oligonucleotide
aaggcaugaugcuccacug

SEQ ID NO: 2831635 - RNA, 19 nt, Artificial Sequence
  Description of Artificial Sequence: Synthetic oligonucleotide
ugaacaccaagaucaucag

SEQ ID NO: 2831636 - RNA, 19 nt, Artificial Sequence
  Description of Artificial Sequence: Synthetic oligonucleotide
uagucauucccaucucuag

SEQ ID NO: 2831637 - RNA, 19 nt, Artificial Sequence
  Description of Artificial Sequence: Synthetic oligonucleotide
gacagguccucggagacgg

SEQ ID NO: 2831638 - RNA, 19 nt, Artificial Sequence
  Description of Artificial Sequence: Synthetic oligonucleotide
aauccaaucugguuaucuu

SEQ ID NO: 2831639 - RNA, 19 nt, Artificial Sequence
  Description of Artificial Sequence: Synthetic oligonucleotide
gaaugaauccugaucgaug

SEQ ID NO: 2831640 - RNA, 19 nt, Artificial Sequence
  Description of Artificial Sequence: Synthetic oligonucleotide
ugaauccugaucgaugaga

SEQ ID NO: 2831641 - RNA, 19 nt, Artificial Sequence
  Description of Artificial Sequence: Synthetic oligonucleotide
cugcacauuuccauaagug

SEQ ID NO: 2831642 - RNA, 19 nt, Artificial Sequence
  Description of Artificial Sequence: Synthetic oligonucleotide
uggucugauacucuguuuu

SEQ ID NO: 2831643 - RNA, 19 nt, Artificial Sequence
  Description of Artificial Sequence: Synthetic oligonucleotide
ucauccuccacaaccacua

SEQ ID NO: 2831644 - RNA, 19 nt, Artificial Sequence
  Description of Artificial Sequence: Synthetic oligonucleotide
aggguuaauuuauucuucu

SEQ ID NO: 2831645 - RNA, 19 nt, Artificial Sequence
  Description of Artificial Sequence: Synthetic oligonucleotide
ugaucaucauccuccacaa

SEQ ID NO: 2831646 - RNA, 19 nt, Artificial Sequence
  Description of Artificial Sequence: Synthetic oligonucleotide
uaggguuaauuuauucuuc

SEQ ID NO: 2831647 - RNA, 19 nt, Artificial Sequence
  Description of Artificial Sequence: Synthetic oligonucleotide
acuguaucuaaaucgugau

SEQ ID NO: 2831648 - RNA, 19 nt, Artificial Sequence
  Description of Artificial Sequence: Synthetic oligonucleotide
ugaucgaugagaacucuuu

SEQ ID NO: 2831649 - RNA, 19 nt, Artificial Sequence
  Description of Artificial Sequence: Synthetic oligonucleotide
aacaggacuccuguuggag

SEQ ID NO: 2831650 - RNA, 19 nt, Artificial Sequence
  Description of Artificial Sequence: Synthetic oligonucleotide
uuuuggacagguccucgga

SEQ ID NO: 2831651 - RNA, 19 nt, Artificial Sequence
  Description of Artificial Sequence: Synthetic oligonucleotide
ucuaaaucgugauccuagu

SEQ ID NO: 2831652 - RNA, 19 nt, Artificial Sequence
  Description of Artificial Sequence: Synthetic oligonucleotide
caaagguaugcucuuguuc

SEQ ID NO: 2831653 - RNA, 19 nt, Artificial Sequence
  Description of Artificial Sequence: Synthetic oligonucleotide
cugaucaucauccuccaca

SEQ ID NO: 2831654 - RNA, 19 nt, Artificial Sequence
  Description of Artificial Sequence: Synthetic oligonucleotide
agcuaaugaacaccaagau

SEQ ID NO: 2831655 - RNA, 19 nt, Artificial Sequence
  Description of Artificial Sequence: Synthetic oligonucleotide
uguuuacaggcuuuuggau

SEQ ID NO: 2831656 - RNA, 19 nt, Artificial Sequence
  Description of Artificial Sequence: Synthetic oligonucleotide
acuccuguuggaguuaguc

SEQ ID NO: 2831657 - RNA, 19 nt, Artificial Sequence
  Description of Artificial Sequence: Synthetic oligonucleotide
gauccuagucgaaugaauc

SEQ ID NO: 2831658 - RNA, 19 nt, Artificial Sequence
  Description of Artificial Sequence: Synthetic oligonucleotide
gagcuaaugaacaccaaga

SEQ ID NO: 2831659 - RNA, 19 nt, Artificial Sequence
  Description of Artificial Sequence: Synthetic oligonucleotide
aagacaaagguaugcucuu

SEQ ID NO: 2831660 - RNA, 19 nt, Artificial Sequence
  Description of Artificial Sequence: Synthetic oligonucleotide
cuuuuggacagguccucgg

SEQ ID NO: 2831661 - RNA, 19 nt, Artificial Sequence
  Description of Artificial Sequence: Synthetic oligonucleotide
cauuuguaggguccgccgg

SEQ ID NO: 2831662 - RNA, 19 nt, Artificial Sequence
  Description of Artificial Sequence: Synthetic oligonucleotide
cuugaccacaugcauauca

SEQ ID NO: 2831663 - RNA, 19 nt, Artificial Sequence
  Description of Artificial Sequence: Synthetic oligonucleotide
cuuucauuuguaggguccg

SEQ ID NO: 2831664 - RNA, 19 nt, Artificial Sequence
  Description of Artificial Sequence: Synthetic oligonucleotide
cuccuguuggaguuagucc

SEQ ID NO: 2831665 - RNA, 19 nt, Artificial Sequence
  Description of Artificial Sequence: Synthetic oligonucleotide
aggcaugaugcuccacugc

SEQ ID NO: 2831666 - RNA, 19 nt, Artificial Sequence
  Description of Artificial Sequence: Synthetic oligonucleotide
uugaccacaugcauaucaa

SEQ ID NO: 2831667 - RNA, 19 nt, Artificial Sequence
  Description of Artificial Sequence: Synthetic oligonucleotide
uggaguuagucccaagcua

SEQ ID NO: 2831668 - RNA, 19 nt, Artificial Sequence
  Description of Artificial Sequence: Synthetic oligonucleotide
caaucugguuaucuugggc

SEQ ID NO: 2831669 - RNA, 19 nt, Artificial Sequence
  Description of Artificial Sequence: Synthetic oligonucleotide
agcuauagucauucccauc

SEQ ID NO: 2831670 - RNA, 19 nt, Artificial Sequence
  Description of Artificial Sequence: Synthetic oligonucleotide
cacuguaucuaaaucguga

SEQ ID NO: 2831671 - RNA, 19 nt, Artificial Sequence
  Description of Artificial Sequence: Synthetic oligonucleotide
ucuuuuggacagguccucg

SEQ ID NO: 2831672 - RNA, 19 nt, Artificial Sequence
  Description of Artificial Sequence: Synthetic oligonucleotide
uucauuuguaggguccgcc

SEQ ID NO: 2831673 - RNA, 19 nt, Artificial Sequence
  Description of Artificial Sequence: Synthetic oligonucleotide
auccuccacaaccacuagg

SEQ ID NO: 2831674 - RNA, 19 nt, Artificial Sequence
  Description of Artificial Sequence: Synthetic oligonucleotide
gggaguaucgcuugcuggg

SEQ ID NO: 2831675 - RNA, 19 nt, Artificial Sequence
  Description of Artificial Sequence: Synthetic oligonucleotide
guguuuacaggcuuuugga

SEQ ID NO: 2831676 - RNA, 19 nt, Artificial Sequence
  Description of Artificial Sequence: Synthetic oligonucleotide
gcuugcuuucauuuguagg

SEQ ID NO: 2831677 - RNA, 19 nt, Artificial Sequence
  Description of Artificial Sequence: Synthetic oligonucleotide
uuuuguggucugauacucu

SEQ ID NO: 2831678 - RNA, 19 nt, Artificial Sequence
  Description of Artificial Sequence: Synthetic oligonucleotide
acugcacauuuccauaagu

SEQ ID NO: 2831679 - RNA, 19 nt, Artificial Sequence
  Description of Artificial Sequence: Synthetic oligonucleotide
ugauccuagucgaaugaau

SEQ ID NO: 2831680 - RNA, 19 nt, Artificial Sequence
  Description of Artificial Sequence: Synthetic oligonucleotide
aggcuuuuggaugaucuag

SEQ ID NO: 2831681 - RNA, 19 nt, Artificial Sequence
  Description of Artificial Sequence: Synthetic oligonucleotide
cuagucuaaagacaaaggu

SEQ ID NO: 2831682 - RNA, 19 nt, Artificial Sequence
  Description of Artificial Sequence: Synthetic oligonucleotide
ucuugggccagaagaacaa

SEQ ID NO: 2831683 - RNA, 19 nt, Artificial Sequence
  Description of Artificial Sequence: Synthetic oligonucleotide
ucgugauccuagucgaaug

SEQ ID NO: 2831684 - RNA, 19 nt, Artificial Sequence
  Description of Artificial Sequence: Synthetic oligonucleotide
uuuguugugcuugcuuuca

SEQ ID NO: 2831685 - RNA, 19 nt, Artificial Sequence
  Description of Artificial Sequence: Synthetic oligonucleotide
aauuuugguucuccuucaa

SEQ ID NO: 2831686 - RNA, 19 nt, Artificial Sequence
  Description of Artificial Sequence: Synthetic oligonucleotide
agcggucacugcuagaagu

SEQ ID NO: 2831687 - RNA, 19 nt, Artificial Sequence
  Description of Artificial Sequence: Synthetic oligonucleotide
aagcuauagucauucccau

SEQ ID NO: 2831688 - RNA, 19 nt, Artificial Sequence
  Description of Artificial Sequence: Synthetic oligonucleotide
ugcuugcuuucauuuguag

SEQ ID NO: 2831689 - RNA, 19 nt, Artificial Sequence
  Description of Artificial Sequence: Synthetic oligonucleotide
ucaaaggaggucgaucuuc

SEQ ID NO: 2831690 - RNA, 19 nt, Artificial Sequence
  Description of Artificial Sequence: Synthetic oligonucleotide
uccuagucgaaugaauccu

SEQ ID NO: 2831691 - RNA, 19 nt, Artificial Sequence
  Description of Artificial Sequence: Synthetic oligonucleotide
ggaugaucuagucuaaaga

SEQ ID NO: 2831692 - RNA, 19 nt, Artificial Sequence
  Description of Artificial Sequence: Synthetic oligonucleotide
agucccaagcuauagucau

SEQ ID NO: 2831693 - RNA, 19 nt, Artificial Sequence
  Description of Artificial Sequence: Synthetic oligonucleotide
uguggucugauacucuguu

SEQ ID NO: 2831694 - RNA, 19 nt, Artificial Sequence
  Description of Artificial Sequence: Synthetic oligonucleotide
aguuagucccaagcuauag

SEQ ID NO: 2831695 - RNA, 19 nt, Artificial Sequence
  Description of Artificial Sequence: Synthetic oligonucleotide
uuuggaugaucuagucuaa

SEQ ID NO: 2831696 - RNA, 19 nt, Artificial Sequence
  Description of Artificial Sequence: Synthetic oligonucleotide
guagagcuaaugaacacca

SEQ ID NO: 2831697 - RNA, 19 nt, Artificial Sequence
  Description of Artificial Sequence: Synthetic oligonucleotide
uuggacagguccucggaga

SEQ ID NO: 2831698 - RNA, 19 nt, Artificial Sequence
  Description of Artificial Sequence: Synthetic oligonucleotide
uugugcuugcuuucauuug

SEQ ID NO: 2831699 - RNA, 19 nt, Artificial Sequence
  Description of Artificial Sequence: Synthetic oligonucleotide
gguuaauuuauucuucuua

SEQ ID NO: 2831700 - RNA, 19 nt, Artificial Sequence
  Description of Artificial Sequence: Synthetic oligonucleotide
aaacaggacuccuguugga

SEQ ID NO: 2831701 - RNA, 19 nt, Artificial Sequence
  Description of Artificial Sequence: Synthetic oligonucleotide
augaucuagucuaaagaca

SEQ ID NO: 2831702 - RNA, 19 nt, Artificial Sequence
  Description of Artificial Sequence: Synthetic oligonucleotide
gaucaucagguuuuguugu

SEQ ID NO: 2831703 - RNA, 19 nt, Artificial Sequence
  Description of Artificial Sequence: Synthetic oligonucleotide
ucgaaugaauccugaucga

SEQ ID NO: 2831704 - RNA, 19 nt, Artificial Sequence
  Description of Artificial Sequence: Synthetic oligonucleotide
ugcucuuguucuuuacccu

SEQ ID NO: 2831705 - RNA, 19 nt, Artificial Sequence
  Description of Artificial Sequence: Synthetic oligonucleotide
ucaucagguuuuguugugc

SEQ ID NO: 2831706 - RNA, 19 nt, Artificial Sequence
  Description of Artificial Sequence: Synthetic oligonucleotide
uaaugaacaccaagaucau

SEQ ID NO: 2831707 - RNA, 19 nt, Artificial Sequence
  Description of Artificial Sequence: Synthetic oligonucleotide
aaaauccaaucugguuauc

SEQ ID NO: 2831708 - RNA, 19 nt, Artificial Sequence
  Description of Artificial Sequence: Synthetic oligonucleotide
uccugaucgaugagaacuc

SEQ ID NO: 2831709 - RNA, 19 nt, Artificial Sequence
  Description of Artificial Sequence: Synthetic oligonucleotide
cuagccuugaccacaugca

SEQ ID NO: 2831710 - RNA, 19 nt, Artificial Sequence
  Description of Artificial Sequence: Synthetic oligonucleotide
aucugguuaucuugggcca

SEQ ID NO: 2831711 - RNA, 19 nt, Artificial Sequence
  Description of Artificial Sequence: Synthetic oligonucleotide
aaaggaggucgaucuucug

SEQ ID NO: 2831712 - RNA, 19 nt, Artificial Sequence
  Description of Artificial Sequence: Synthetic oligonucleotide
ucggagacggaagaaggca

SEQ ID NO: 2831713 - RNA, 19 nt, Artificial Sequence
  Description of Artificial Sequence: Synthetic oligonucleotide
uucuuucaaaggaggucga

SEQ ID NO: 2831714 - RNA, 19 nt, Artificial Sequence
  Description of Artificial Sequence: Synthetic oligonucleotide
cucggagacggaagaaggc

SEQ ID NO: 2831715 - RNA, 19 nt, Artificial Sequence
  Description of Artificial Sequence: Synthetic oligonucleotide
cacuaggguuaauuuauuc

SEQ ID NO: 2831716 - RNA, 19 nt, Artificial Sequence
  Description of Artificial Sequence: Synthetic oligonucleotide
aagaaggcaugaugcucca

SEQ ID NO: 2831717 - RNA, 19 nt, Artificial Sequence
  Description of Artificial Sequence: Synthetic oligonucleotide
accacuaggguuaauuuau

SEQ ID NO: 2831718 - RNA, 19 nt, Artificial Sequence
  Description of Artificial Sequence: Synthetic oligonucleotide
ucauucccaucucuagccu

SEQ ID NO: 2831719 - RNA, 19 nt, Artificial Sequence
  Description of Artificial Sequence: Synthetic oligonucleotide
gaaggcaugaugcuccacu

SEQ ID NO: 2831720 - RNA, 19 nt, Artificial Sequence
  Description of Artificial Sequence: Synthetic oligonucleotide
uggacagguccucggagac

SEQ ID NO: 2831721 - RNA, 19 nt, Artificial Sequence
  Description of Artificial Sequence: Synthetic oligonucleotide
uccucggagacggaagaag

SEQ ID NO: 2831722 - RNA, 19 nt, Artificial Sequence
  Description of Artificial Sequence: Synthetic oligonucleotide
cuuucaaaggaggucgauc

SEQ ID NO: 2831723 - RNA, 19 nt, Artificial Sequence
  Description of Artificial Sequence: Synthetic oligonucleotide
gaacaagccaauuuugguu

SEQ ID NO: 2831724 - RNA, 19 nt, Artificial Sequence
  Description of Artificial Sequence: Synthetic oligonucleotide
ucccaagcuauagucauuc

SEQ ID NO: 2831725 - RNA, 19 nt, Artificial Sequence
  Description of Artificial Sequence: Synthetic oligonucleotide
ccaauuuugguucuccuuc

SEQ ID NO: 2831726 - RNA, 19 nt, Artificial Sequence
  Description of Artificial Sequence: Synthetic oligonucleotide
ugaccacaugcauaucaac

SEQ ID NO: 2831727 - RNA, 19 nt, Artificial Sequence
  Description of Artificial Sequence: Synthetic oligonucleotide
uguaggguccgccgggagu

SEQ ID NO: 2831728 - RNA, 19 nt, Artificial Sequence
  Description of Artificial Sequence: Synthetic oligonucleotide
gcuaaugaacaccaagauc

SEQ ID NO: 2831729 - RNA, 19 nt, Artificial Sequence
  Description of Artificial Sequence: Synthetic oligonucleotide
auuuugguucuccuucaaa

SEQ ID NO: 2831730 - RNA, 19 nt, Artificial Sequence
  Description of Artificial Sequence: Synthetic oligonucleotide
ccaagcuauagucauuccc

SEQ ID NO: 2831731 - RNA, 19 nt, Artificial Sequence
  Description of Artificial Sequence: Synthetic oligonucleotide
gaauccugaucgaugagaa

SEQ ID NO: 2831732 - RNA, 19 nt, Artificial Sequence
  Description of Artificial Sequence: Synthetic oligonucleotide
gcuauagucauucccaucu

SEQ ID NO: 2831733 - RNA, 19 nt, Artificial Sequence
  Description of Artificial Sequence: Synthetic oligonucleotide
gaguaucgcuugcugggcc

SEQ ID NO: 2831734 - RNA, 19 nt, Artificial Sequence
  Description of Artificial Sequence: Synthetic oligonucleotide
uccacugcacauuuccaua

SEQ ID NO: 2831735 - RNA, 19 nt, Artificial Sequence
  Description of Artificial Sequence: Synthetic oligonucleotide
agaacucuuuuggacaggu

SEQ ID NO: 2831736 - RNA, 19 nt, Artificial Sequence
  Description of Artificial Sequence: Synthetic oligonucleotide
cagguuuuguugugcuugc

SEQ ID NO: 2831737 - RNA, 19 nt, Artificial Sequence
  Description of Artificial Sequence: Synthetic oligonucleotide
augaauccugaucgaugag

SEQ ID NO: 2831738 - RNA, 19 nt, Artificial Sequence
  Description of Artificial Sequence: Synthetic oligonucleotide
uaucuugggccagaagaac

SEQ ID NO: 2831739 - RNA, 19 nt, Artificial Sequence
  Description of Artificial Sequence: Synthetic oligonucleotide
cuguaucuaaaucgugauc

SEQ ID NO: 2831740 - RNA, 19 nt, Artificial Sequence
  Description of Artificial Sequence: Synthetic oligonucleotide
aguaucgcuugcugggccu

SEQ ID NO: 2831741 - RNA, 19 nt, Artificial Sequence
  Description of Artificial Sequence: Synthetic oligonucleotide
acaaccacuaggguuaauu

SEQ ID NO: 2831742 - RNA, 19 nt, Artificial Sequence
  Description of Artificial Sequence: Synthetic oligonucleotide
aaguguuuacaggcuuuug

SEQ ID NO: 2831743 - RNA, 19 nt, Artificial Sequence
  Description of Artificial Sequence: Synthetic oligonucleotide
acaggacuccuguuggagu

SEQ ID NO: 2831744 - RNA, 19 nt, Artificial Sequence
  Description of Artificial Sequence: Synthetic oligonucleotide
ucugguuaucuugggccag

SEQ ID NO: 2831745 - RNA, 19 nt, Artificial Sequence
  Description of Artificial Sequence: Synthetic oligonucleotide
uuguggucugauacucugu

SEQ ID NO: 2831746 - RNA, 19 nt, Artificial Sequence
  Description of Artificial Sequence: Synthetic oligonucleotide
accaagaucaucagguuuu

SEQ ID NO: 2831747 - RNA, 19 nt, Artificial Sequence
  Description of Artificial Sequence: Synthetic oligonucleotide
uguuggaguuagucccaag

SEQ ID NO: 2831748 - RNA, 19 nt, Artificial Sequence
  Description of Artificial Sequence: Synthetic oligonucleotide
uagccuugaccacaugcau

SEQ ID NO: 2831749 - RNA, 19 nt, Artificial Sequence
  Description of Artificial Sequence: Synthetic oligonucleotide
caugaugcuccacugcaca

SEQ ID NO: 2831750 - RNA, 19 nt, Artificial Sequence
  Description of Artificial Sequence: Synthetic oligonucleotide
cuuuacccugaucaucauc

SEQ ID NO: 2831751 - RNA, 19 nt, Artificial Sequence
  Description of Artificial Sequence: Synthetic oligonucleotide
uugcuuucauuuguagggu

SEQ ID NO: 2831752 - RNA, 19 nt, Artificial Sequence
  Description of Artificial Sequence: Synthetic oligonucleotide
aucucuagccuugaccaca

SEQ ID NO: 2831753 - RNA, 19 nt, Artificial Sequence
  Description of Artificial Sequence: Synthetic oligonucleotide
caauuuugguucuccuuca

SEQ ID NO: 2831754 - RNA, 19 nt, Artificial Sequence
  Description of Artificial Sequence: Synthetic oligonucleotide
acaagccaauuuugguucu

SEQ ID NO: 2831755 - RNA, 19 nt, Artificial Sequence
  Description of Artificial Sequence: Synthetic oligonucleotide
uacccugaucaucauccuc

SEQ ID NO: 2831756 - RNA, 19 nt, Artificial Sequence
  Description of Artificial Sequence: Synthetic oligonucleotide
uuucauuuguaggguccgc

SEQ ID NO: 2831757 - RNA, 19 nt, Artificial Sequence
  Description of Artificial Sequence: Synthetic oligonucleotide
uguugugcuugcuuucauu

SEQ ID NO: 2831758 - RNA, 19 nt, Artificial Sequence
  Description of Artificial Sequence: Synthetic oligonucleotide
cuaggguuaauuuauucuu

SEQ ID NO: 2831759 - RNA, 19 nt, Artificial Sequence
  Description of Artificial Sequence: Synthetic oligonucleotide
aagguaugcucuuguucuu

SEQ ID NO: 2831760 - RNA, 19 nt, Artificial Sequence
  Description of Artificial Sequence: Synthetic oligonucleotide
gacaaagguaugcucuugu

SEQ ID NO: 2831761 - RNA, 19 nt, Artificial Sequence
  Description of Artificial Sequence: Synthetic oligonucleotide
acaaagguaugcucuuguu

SEQ ID NO: 2831762 - RNA, 19 nt, Artificial Sequence
  Description of Artificial Sequence: Synthetic oligonucleotide
acucuuuuggacagguccu

SEQ ID NO: 2831763 - RNA, 19 nt, Artificial Sequence
  Description of Artificial Sequence: Synthetic oligonucleotide
cuagucgaaugaauccuga

SEQ ID NO: 2831764 - RNA, 19 nt, Artificial Sequence
  Description of Artificial Sequence: Synthetic oligonucleotide
ccaucucuagccuugacca

SEQ ID NO: 2831765 - RNA, 19 nt, Artificial Sequence
  Description of Artificial Sequence: Synthetic oligonucleotide
ucucuagccuugaccacau

SEQ ID NO: 2831766 - RNA, 19 nt, Artificial Sequence
  Description of Artificial Sequence: Synthetic oligonucleotide
uagucgaaugaauccugau

SEQ ID NO: 2831767 - RNA, 19 nt, Artificial Sequence
  Description of Artificial Sequence: Synthetic oligonucleotide
uuacccugaucaucauccu

SEQ ID NO: 2831768 - RNA, 19 nt, Artificial Sequence
  Description of Artificial Sequence: Synthetic oligonucleotide
gcuagaaguagagcuaaug

SEQ ID NO: 2831769 - RNA, 19 nt, Artificial Sequence
  Description of Artificial Sequence: Synthetic oligonucleotide
agccaauuuugguucuccu

SEQ ID NO: 2831770 - RNA, 19 nt, Artificial Sequence
  Description of Artificial Sequence: Synthetic oligonucleotide
uaaguguuuacaggcuuuu

SEQ ID NO: 2831771 - RNA, 19 nt, Artificial Sequence
  Description of Artificial Sequence: Synthetic oligonucleotide
cauuuccauaaguguuuac

SEQ ID NO: 2831772 - RNA, 19 nt, Artificial Sequence
  Description of Artificial Sequence: Synthetic oligonucleotide
ccucggagacggaagaagg

SEQ ID NO: 2831773 - RNA, 19 nt, Artificial Sequence
  Description of Artificial Sequence: Synthetic oligonucleotide
auucccaucucuagccuug

SEQ ID NO: 2831774 - RNA, 19 nt, Artificial Sequence
  Description of Artificial Sequence: Synthetic oligonucleotide
gcucuuguucuuuacccug

SEQ ID NO: 2831775 - RNA, 19 nt, Artificial Sequence
  Description of Artificial Sequence: Synthetic oligonucleotide
auucuucuuaaaauccaau

SEQ ID NO: 2831776 - RNA, 19 nt, Artificial Sequence
  Description of Artificial Sequence: Synthetic oligonucleotide
cuauagucauucccaucuc

SEQ ID NO: 2831777 - RNA, 19 nt, Artificial Sequence
  Description of Artificial Sequence: Synthetic oligonucleotide
ucgaucuucuggcuuuguu

SEQ ID NO: 2831778 - RNA, 19 nt, Artificial Sequence
  Description of Artificial Sequence: Synthetic oligonucleotide
uucaaaggaggucgaucuu

SEQ ID NO: 2831779 - RNA, 19 nt, Artificial Sequence
  Description of Artificial Sequence: Synthetic oligonucleotide
uagagcuaaugaacaccaa

SEQ ID NO: 2831780 - RNA, 19 nt, Artificial Sequence
  Description of Artificial Sequence: Synthetic oligonucleotide
guuuuguugugcuugcuuu

SEQ ID NO: 2831781 - RNA, 19 nt, Artificial Sequence
  Description of Artificial Sequence: Synthetic oligonucleotide
uuguaggguccgccgggag

SEQ ID NO: 2831782 - RNA, 19 nt, Artificial Sequence
  Description of Artificial Sequence: Synthetic oligonucleotide
ggcaugaugcuccacugca

SEQ ID NO: 2831783 - RNA, 19 nt, Artificial Sequence
  Description of Artificial Sequence: Synthetic oligonucleotide
cuugcugggccuucuuuca

SEQ ID NO: 2831784 - RNA, 19 nt, Artificial Sequence
  Description of Artificial Sequence: Synthetic oligonucleotide
gcuuucauuuguagggucc

SEQ ID NO: 2831785 - RNA, 19 nt, Artificial Sequence
  Description of Artificial Sequence: Synthetic oligonucleotide
cacugcacauuuccauaag

SEQ ID NO: 2831786 - RNA, 19 nt, Artificial Sequence
  Description of Artificial Sequence: Synthetic oligonucleotide
aggucgaucuucuggcuuu

SEQ ID NO: 2831787 - RNA, 19 nt, Artificial Sequence
  Description of Artificial Sequence: Synthetic oligonucleotide
cuuguucuuuacccugauc

SEQ ID NO: 2831788 - RNA, 19 nt, Artificial Sequence
  Description of Artificial Sequence: Synthetic oligonucleotide
agacaaagguaugcucuug

SEQ ID NO: 2831789 - RNA, 19 nt, Artificial Sequence
  Description of Artificial Sequence: Synthetic oligonucleotide
uuuguaggguccgccggga

SEQ ID NO: 2831790 - RNA, 19 nt, Artificial Sequence
  Description of Artificial Sequence: Synthetic oligonucleotide
cuuuuggaugaucuagucu

SEQ ID NO: 2831791 - RNA, 19 nt, Artificial Sequence
  Description of Artificial Sequence: Synthetic oligonucleotide
auaaguguuuacaggcuuu

SEQ ID NO: 2831792 - RNA, 19 nt, Artificial Sequence
  Description of Artificial Sequence: Synthetic oligonucleotide
auagucauucccaucucua

SEQ ID NO: 2831793 - RNA, 19 nt, Artificial Sequence
  Description of Artificial Sequence: Synthetic oligonucleotide
acugcuagaaguagagcua

SEQ ID NO: 2831794 - RNA, 19 nt, Artificial Sequence
  Description of Artificial Sequence: Synthetic oligonucleotide
caucauccuccacaaccac

SEQ ID NO: 2831795 - RNA, 19 nt, Artificial Sequence
  Description of Artificial Sequence: Synthetic oligonucleotide
gaucaucauccuccacaac

SEQ ID NO: 2831796 - RNA, 19 nt, Artificial Sequence
  Description of Artificial Sequence: Synthetic oligonucleotide
guugugcuugcuuucauuu

SEQ ID NO: 2831797 - RNA, 19 nt, Artificial Sequence
  Description of Artificial Sequence: Synthetic oligonucleotide
gagacggaagaaggcauga

SEQ ID NO: 2831798 - RNA, 19 nt, Artificial Sequence
  Description of Artificial Sequence: Synthetic oligonucleotide
caucucuagccuugaccac

SEQ ID NO: 2831799 - RNA, 19 nt, Artificial Sequence
  Description of Artificial Sequence: Synthetic oligonucleotide
uccgccgggaguaucgcuu

SEQ ID NO: 2831800 - RNA, 19 nt, Artificial Sequence
  Description of Artificial Sequence: Synthetic oligonucleotide
uuguugugcuugcuuucau

SEQ ID NO: 2831801 - RNA, 19 nt, Artificial Sequence
  Description of Artificial Sequence: Synthetic oligonucleotide
augaugcuccacugcacau

SEQ ID NO: 2831802 - RNA, 19 nt, Artificial Sequence
  Description of Artificial Sequence: Synthetic oligonucleotide
aucgugauccuagucgaau

SEQ ID NO: 2831803 - RNA, 19 nt, Artificial Sequence
  Description of Artificial Sequence: Synthetic oligonucleotide
acaccaagaucaucagguu

SEQ ID NO: 2831804 - RNA, 19 nt, Artificial Sequence
  Description of Artificial Sequence: Synthetic oligonucleotide
uuggaugaucuagucuaaa

SEQ ID NO: 2831805 - RNA, 19 nt, Artificial Sequence
  Description of Artificial Sequence: Synthetic oligonucleotide
guuagucccaagcuauagu

SEQ ID NO: 2831806 - RNA, 19 nt, Artificial Sequence
  Description of Artificial Sequence: Synthetic oligonucleotide
ggccuucuuucaaaggagg

SEQ ID NO: 2831807 - RNA, 19 nt, Artificial Sequence
  Description of Artificial Sequence: Synthetic oligonucleotide
ucuuucaaaggaggucgau

SEQ ID NO: 2831808 - RNA, 19 nt, Artificial Sequence
  Description of Artificial Sequence: Synthetic oligonucleotide
ugcugggccuucuuucaaa

SEQ ID NO: 2831809 - RNA, 19 nt, Artificial Sequence
  Description of Artificial Sequence: Synthetic oligonucleotide
cuugggccagaagaacaag

SEQ ID NO: 2831810 - RNA, 19 nt, Artificial Sequence
  Description of Artificial Sequence: Synthetic oligonucleotide
ggaagaaggcaugaugcuc

SEQ ID NO: 2831811 - RNA, 19 nt, Artificial Sequence
  Description of Artificial Sequence: Synthetic oligonucleotide
aucuucuggcuuuguuagu

SEQ ID NO: 2831812 - RNA, 19 nt, Artificial Sequence
  Description of Artificial Sequence: Synthetic oligonucleotide
guaucuaaaucgugauccu

SEQ ID NO: 2831813 - RNA, 19 nt, Artificial Sequence
  Description of Artificial Sequence: Synthetic oligonucleotide
ugcuagaaguagagcuaau

SEQ ID NO: 2831814 - RNA, 19 nt, Artificial Sequence
  Description of Artificial Sequence: Synthetic oligonucleotide
aucauccuccacaaccacu

SEQ ID NO: 2831815 - RNA, 19 nt, Artificial Sequence
  Description of Artificial Sequence: Synthetic oligonucleotide
ccuagucgaaugaauccug

SEQ ID NO: 2831816 - RNA, 19 nt, Artificial Sequence
  Description of Artificial Sequence: Synthetic oligonucleotide
ccaaucugguuaucuuggg

SEQ ID NO: 2831817 - RNA, 19 nt, Artificial Sequence
  Description of Artificial Sequence: Synthetic oligonucleotide
agaaggcaugaugcuccac

SEQ ID NO: 2831818 - RNA, 19 nt, Artificial Sequence
  Description of Artificial Sequence: Synthetic oligonucleotide
aucagguuuuguugugcuu

SEQ ID NO: 2831819 - RNA, 19 nt, Artificial Sequence
  Description of Artificial Sequence: Synthetic oligonucleotide
gaugcuccacugcacauuu

SEQ ID NO: 2831820 - RNA, 19 nt, Artificial Sequence
  Description of Artificial Sequence: Synthetic oligonucleotide
ucuuuacccugaucaucau

SEQ ID NO: 2831821 - RNA, 19 nt, Artificial Sequence
  Description of Artificial Sequence: Synthetic oligonucleotide
gguuaucuugggccagaag

SEQ ID NO: 2831822 - RNA, 19 nt, Artificial Sequence
  Description of Artificial Sequence: Synthetic oligonucleotide
ugaugcuccacugcacauu

SEQ ID NO: 2831823 - RNA, 19 nt, Artificial Sequence
  Description of Artificial Sequence: Synthetic oligonucleotide
uugcugggccuucuuucaa

SEQ ID NO: 2831824 - RNA, 19 nt, Artificial Sequence
  Description of Artificial Sequence: Synthetic oligonucleotide
cagaagaacaagccaauuu

SEQ ID NO: 2831825 - RNA, 19 nt, Artificial Sequence
  Description of Artificial Sequence: Synthetic oligonucleotide
gaucgaugagaacucuuuu

SEQ ID NO: 2831826 - RNA, 19 nt, Artificial Sequence
  Description of Artificial Sequence: Synthetic oligonucleotide
aaucgugauccuagucgaa

SEQ ID NO: 2831827 - RNA, 19 nt, Artificial Sequence
  Description of Artificial Sequence: Synthetic oligonucleotide
cauccuccacaaccacuag

SEQ ID NO: 2831828 - RNA, 19 nt, Artificial Sequence
  Description of Artificial Sequence: Synthetic oligonucleotide
caaaggaggucgaucuucu

SEQ ID NO: 2831829 - RNA, 19 nt, Artificial Sequence
  Description of Artificial Sequence: Synthetic oligonucleotide
cucuuuuggacagguccuc

SEQ ID NO: 2831830 - RNA, 19 nt, Artificial Sequence
  Description of Artificial Sequence: Synthetic oligonucleotide
gaucuagucuaaagacaaa

SEQ ID NO: 2831831 - RNA, 19 nt, Artificial Sequence
  Description of Artificial Sequence: Synthetic oligonucleotide
ggccagaagaacaagccaa

SEQ ID NO: 2831832 - RNA, 19 nt, Artificial Sequence
  Description of Artificial Sequence: Synthetic oligonucleotide
gcuugcugggccuucuuuc

SEQ ID NO: 2831833 - RNA, 19 nt, Artificial Sequence
  Description of Artificial Sequence: Synthetic oligonucleotide
cauaaguguuuacaggcuu

SEQ ID NO: 2831834 - RNA, 19 nt, Artificial Sequence
  Description of Artificial Sequence: Synthetic oligonucleotide
agguccucggagacggaag

SEQ ID NO: 2831835 - RNA, 19 nt, Artificial Sequence
  Description of Artificial Sequence: Synthetic oligonucleotide
ccuucuuucaaaggagguc

SEQ ID NO: 2831836 - RNA, 19 nt, Artificial Sequence
  Description of Artificial Sequence: Synthetic oligonucleotide
cugcuagaaguagagcuaa

SEQ ID NO: 2831837 - RNA, 19 nt, Artificial Sequence
  Description of Artificial Sequence: Synthetic oligonucleotide
caucagguuuuguugugcu

SEQ ID NO: 2831838 - RNA, 19 nt, Artificial Sequence
  Description of Artificial Sequence: Synthetic oligonucleotide
gaacucuuuuggacagguc

SEQ ID NO: 2831839 - RNA, 19 nt, Artificial Sequence
  Description of Artificial Sequence: Synthetic oligonucleotide
cuccacaaccacuaggguu

SEQ ID NO: 2831840 - RNA, 19 nt, Artificial Sequence
  Description of Artificial Sequence: Synthetic oligonucleotide
ggaguaucgcuugcugggc

SEQ ID NO: 2831841 - RNA, 19 nt, Artificial Sequence
  Description of Artificial Sequence: Synthetic oligonucleotide
uacaggcuuuuggaugauc

SEQ ID NO: 2831842 - RNA, 19 nt, Artificial Sequence
  Description of Artificial Sequence: Synthetic oligonucleotide
ugguuaucuugggccagaa

SEQ ID NO: 2831843 - RNA, 19 nt, Artificial Sequence
  Description of Artificial Sequence: Synthetic oligonucleotide
cagcggucacugcuagaag

SEQ ID NO: 2831844 - RNA, 19 nt, Artificial Sequence
  Description of Artificial Sequence: Synthetic oligonucleotide
ccacuguaucuaaaucgug

SEQ ID NO: 2831845 - RNA, 19 nt, Artificial Sequence
  Description of Artificial Sequence: Synthetic oligonucleotide
gugauccuagucgaaugaa

SEQ ID NO: 2831846 - RNA, 19 nt, Artificial Sequence
  Description of Artificial Sequence: Synthetic oligonucleotide
cgggaguaucgcuugcugg

SEQ ID NO: 2831847 - RNA, 19 nt, Artificial Sequence
  Description of Artificial Sequence: Synthetic oligonucleotide
uucccaucucuagccuuga

SEQ ID NO: 2831848 - RNA, 19 nt, Artificial Sequence
  Description of Artificial Sequence: Synthetic oligonucleotide
caagccaauuuugguucuc

SEQ ID NO: 2831849 - RNA, 19 nt, Artificial Sequence
  Description of Artificial Sequence: Synthetic oligonucleotide
gguccucggagacggaaga

SEQ ID NO: 2831850 - RNA, 19 nt, Artificial Sequence
  Description of Artificial Sequence: Synthetic oligonucleotide
agguaugcucuuguucuuu

SEQ ID NO: 2831851 - RNA, 19 nt, Artificial Sequence
  Description of Artificial Sequence: Synthetic oligonucleotide
ggaguuagucccaagcuau

SEQ ID NO: 2831852 - RNA, 19 nt, Artificial Sequence
  Description of Artificial Sequence: Synthetic oligonucleotide
guaggguccgccgggagua

SEQ ID NO: 2831853 - RNA, 19 nt, Artificial Sequence
  Description of Artificial Sequence: Synthetic oligonucleotide
agacggaagaaggcaugau

SEQ ID NO: 2831854 - RNA, 19 nt, Artificial Sequence
  Description of Artificial Sequence: Synthetic oligonucleotide
gguaugcucuuguucuuua

SEQ ID NO: 2831855 - RNA, 19 nt, Artificial Sequence
  Description of Artificial Sequence: Synthetic oligonucleotide
ggacuccuguuggaguuag

SEQ ID NO: 2831856 - RNA, 19 nt, Artificial Sequence
  Description of Artificial Sequence: Synthetic oligonucleotide
gccuugaccacaugcauau

SEQ ID NO: 2831857 - RNA, 19 nt, Artificial Sequence
  Description of Artificial Sequence: Synthetic oligonucleotide
agccuugaccacaugcaua

SEQ ID NO: 2831858 - RNA, 19 nt, Artificial Sequence
  Description of Artificial Sequence: Synthetic oligonucleotide
agguuuuguugugcuugcu

SEQ ID NO: 2831859 - RNA, 19 nt, Artificial Sequence
  Description of Artificial Sequence: Synthetic oligonucleotide
gcagcggucacugcuagaa

SEQ ID NO: 2831860 - RNA, 19 nt, Artificial Sequence
  Description of Artificial Sequence: Synthetic oligonucleotide
ggguccgccgggaguaucg

SEQ ID NO: 2831861 - RNA, 19 nt, Artificial Sequence
  Description of Artificial Sequence: Synthetic oligonucleotide
cuccacugcacauuuccau

SEQ ID NO: 2831862 - RNA, 19 nt, Artificial Sequence
  Description of Artificial Sequence: Synthetic oligonucleotide
ggacagguccucggagacg

SEQ ID NO: 2831863 - RNA, 19 nt, Artificial Sequence
  Description of Artificial Sequence: Synthetic oligonucleotide
gaguuagucccaagcuaua

SEQ ID NO: 2831864 - RNA, 19 nt, Artificial Sequence
  Description of Artificial Sequence: Synthetic oligonucleotide
gaggucgaucuucuggcuu

SEQ ID NO: 2831865 - RNA, 19 nt, Artificial Sequence
  Description of Artificial Sequence: Synthetic oligonucleotide
uuacaggcuuuuggaugau

SEQ ID NO: 2831866 - RNA, 19 nt, Artificial Sequence
  Description of Artificial Sequence: Synthetic oligonucleotide
cccaagcuauagucauucc

SEQ ID NO: 2831867 - RNA, 19 nt, Artificial Sequence
  Description of Artificial Sequence: Synthetic oligonucleotide
caccaagaucaucagguuu

SEQ ID NO: 2831868 - RNA, 19 nt, Artificial Sequence
  Description of Artificial Sequence: Synthetic oligonucleotide
aucgcuugcugggccuucu

SEQ ID NO: 2831869 - RNA, 19 nt, Artificial Sequence
  Description of Artificial Sequence: Synthetic oligonucleotide
gcacauuuccauaaguguu

SEQ ID NO: 2831870 - RNA, 19 nt, Artificial Sequence
  Description of Artificial Sequence: Synthetic oligonucleotide
uaucgcuugcugggccuuc

SEQ ID NO: 2831871 - RNA, 19 nt, Artificial Sequence
  Description of Artificial Sequence: Synthetic oligonucleotide
cugguuaucuugggccaga

SEQ ID NO: 2831872 - RNA, 19 nt, Artificial Sequence
  Description of Artificial Sequence: Synthetic oligonucleotide
ccaagaucaucagguuuug

SEQ ID NO: 2831873 - RNA, 19 nt, Artificial Sequence
  Description of Artificial Sequence: Synthetic oligonucleotide
aggguccgccgggaguauc

SEQ ID NO: 2831874 - RNA, 19 nt, Artificial Sequence
  Description of Artificial Sequence: Synthetic oligonucleotide
augcuccacugcacauuuc

SEQ ID NO: 2831875 - RNA, 19 nt, Artificial Sequence
  Description of Artificial Sequence: Synthetic oligonucleotide
caggacuccuguuggaguu

SEQ ID NO: 2831876 - RNA, 19 nt, Artificial Sequence
  Description of Artificial Sequence: Synthetic oligonucleotide
gcaugaugcuccacugcac

SEQ ID NO: 2831877 - RNA, 19 nt, Artificial Sequence
  Description of Artificial Sequence: Synthetic oligonucleotide
ccuguuggaguuaguccca

SEQ ID NO: 2831878 - RNA, 19 nt, Artificial Sequence
  Description of Artificial Sequence: Synthetic oligonucleotide
cgaucuucuggcuuuguua

SEQ ID NO: 2831879 - RNA, 19 nt, Artificial Sequence
  Description of Artificial Sequence: Synthetic oligonucleotide
ccacugcacauuuccauaa

SEQ ID NO: 2831880 - RNA, 19 nt, Artificial Sequence
  Description of Artificial Sequence: Synthetic oligonucleotide
ggcuuuuggaugaucuagu

SEQ ID NO: 2831881 - RNA, 19 nt, Artificial Sequence
  Description of Artificial Sequence: Synthetic oligonucleotide
cucuagccuugaccacaug

SEQ ID NO: 2831882 - RNA, 19 nt, Artificial Sequence
  Description of Artificial Sequence: Synthetic oligonucleotide
cugaucgaugagaacucuu

SEQ ID NO: 2831883 - RNA, 19 nt, Artificial Sequence
  Description of Artificial Sequence: Synthetic oligonucleotide
ccauaaguguuuacaggcu

SEQ ID NO: 2831884 - RNA, 19 nt, Artificial Sequence
  Description of Artificial Sequence: Synthetic oligonucleotide
cgugauccuagucgaauga

SEQ ID NO: 2831885 - RNA, 19 nt, Artificial Sequence
  Description of Artificial Sequence: Synthetic oligonucleotide
ccgggaguaucgcuugcug

SEQ ID NO: 2831886 - RNA, 19 nt, Artificial Sequence
  Description of Artificial Sequence: Synthetic oligonucleotide
cauucccaucucuagccuu

SEQ ID NO: 2831887 - RNA, 19 nt, Artificial Sequence
  Description of Artificial Sequence: Synthetic oligonucleotide
ucgcuugcugggccuucuu

SEQ ID NO: 2831888 - RNA, 19 nt, Artificial Sequence
  Description of Artificial Sequence: Synthetic oligonucleotide
ggucgaucuucuggcuuug

SEQ ID NO: 2831889 - RNA, 19 nt, Artificial Sequence
  Description of Artificial Sequence: Synthetic oligonucleotide
gugcuugcuuucauuugua

SEQ ID NO: 2831890 - RNA, 19 nt, Artificial Sequence
  Description of Artificial Sequence: Synthetic oligonucleotide
aggacuccuguuggaguua

SEQ ID NO: 2831891 - RNA, 19 nt, Artificial Sequence
  Description of Artificial Sequence: Synthetic oligonucleotide
gccaauuuugguucuccuu

SEQ ID NO: 2831892 - RNA, 19 nt, Artificial Sequence
  Description of Artificial Sequence: Synthetic oligonucleotide
ccugaucaucauccuccac

SEQ ID NO: 2831893 - RNA, 19 nt, Artificial Sequence
  Description of Artificial Sequence: Synthetic oligonucleotide
guggucugauacucuguuu

SEQ ID NO: 2831894 - RNA, 19 nt, Artificial Sequence
  Description of Artificial Sequence: Synthetic oligonucleotide
cuguuggaguuagucccaa

SEQ ID NO: 2831895 - RNA, 19 nt, Artificial Sequence
  Description of Artificial Sequence: Synthetic oligonucleotide
cagguccucggagacggaa

SEQ ID NO: 2831896 - RNA, 19 nt, Artificial Sequence
  Description of Artificial Sequence: Synthetic oligonucleotide
caagaucaucagguuuugu

SEQ ID NO: 2831897 - RNA, 19 nt, Artificial Sequence
  Description of Artificial Sequence: Synthetic oligonucleotide
ggaggucgaucuucuggcu

SEQ ID NO: 2831898 - RNA, 19 nt, Artificial Sequence
  Description of Artificial Sequence: Synthetic oligonucleotide
guccucggagacggaagaa

SEQ ID NO: 2831899 - RNA, 19 nt, Artificial Sequence
  Description of Artificial Sequence: Synthetic oligonucleotide
cggucacugcuagaaguag

SEQ ID NO: 2831900 - RNA, 19 nt, Artificial Sequence
  Description of Artificial Sequence: Synthetic oligonucleotide
cccugaucaucauccucca

SEQ ID NO: 2831901 - RNA, 19 nt, Artificial Sequence
  Description of Artificial Sequence: Synthetic oligonucleotide
gccuucuuucaaaggaggu

SEQ ID NO: 2831902 - RNA, 19 nt, Artificial Sequence
  Description of Artificial Sequence: Synthetic oligonucleotide
gcggucacugcuagaagua

SEQ ID NO: 2831903 - RNA, 19 nt, Artificial Sequence
  Description of Artificial Sequence: Synthetic oligonucleotide
ccgccgggaguaucgcuug

SEQ ID NO: 2831904 - RNA, 19 nt, Artificial Sequence
  Description of Artificial Sequence: Synthetic oligonucleotide
gguccgccgggaguaucgc

SEQ ID NO: 2831905 - RNA, 19 nt, Artificial Sequence
  Description of Artificial Sequence: Synthetic oligonucleotide
uaggguccgccgggaguau

SEQ ID NO: 2831906 - RNA, 19 nt, Artificial Sequence
  Description of Artificial Sequence: Synthetic oligonucleotide
gccagaagaacaagccaau

SEQ ID NO: 2831907 - RNA, 19 nt, Artificial Sequence
  Description of Artificial Sequence: Synthetic oligonucleotide
ggcagcggucacugcuaga

SEQ ID NO: 2831908 - RNA, 19 nt, Artificial Sequence
  Description of Artificial Sequence: Synthetic oligonucleotide
guccgccgggaguaucgcu

SEQ ID NO: 2831909 - RNA, 19 nt, Artificial Sequence
  Description of Artificial Sequence: Synthetic oligonucleotide
acagguccucggagacgga

SEQ ID NO: 2831910 - RNA, 19 nt, Artificial Sequence
  Description of Artificial Sequence: Synthetic oligonucleotide
cggaagaaggcaugaugcu

SEQ ID NO: 2831911 - RNA, 19 nt, Artificial Sequence
  Description of Artificial Sequence: Synthetic oligonucleotide
gacuccuguuggaguuagu

SEQ ID NO: 2831912 - RNA, 19 nt, Artificial Sequence
  Description of Artificial Sequence: Synthetic oligonucleotide
gucgaucuucuggcuuugu

SEQ ID NO: 2831913 - RNA, 19 nt, Artificial Sequence
  Description of Artificial Sequence: Synthetic oligonucleotide
gucccaagcuauagucauu

SEQ ID NO: 2831914 - RNA, 19 nt, Artificial Sequence
  Description of Artificial Sequence: Synthetic oligonucleotide
guaucgcuugcugggccuu

SEQ ID NO: 2831915 - RNA, 19 nt, Artificial Sequence
  Description of Artificial Sequence: Synthetic oligonucleotide
ccuugaccacaugcauauc

SEQ ID NO: 2831916 - RNA, 19 nt, Artificial Sequence
  Description of Artificial Sequence: Synthetic oligonucleotide
cgaaugaauccugaucgau

SEQ ID NO: 2831917 - RNA, 19 nt, Artificial Sequence
  Description of Artificial Sequence: Synthetic oligonucleotide
ccugaucgaugagaacucu

SEQ ID NO: 2831918 - RNA, 19 nt, Artificial Sequence
  Description of Artificial Sequence: Synthetic oligonucleotide
ccacuaggguuaauuuauu

SEQ ID NO: 2831919 - RNA, 19 nt, Artificial Sequence
  Description of Artificial Sequence: Synthetic oligonucleotide
cgccgggaguaucgcuugc

SEQ ID NO: 2831920 - RNA, 19 nt, Artificial Sequence
  Description of Artificial Sequence: Synthetic oligonucleotide
ccagaagaacaagccaauu

SEQ ID NO: 2831921 - RNA, 19 nt, Artificial Sequence
  Description of Artificial Sequence: Synthetic oligonucleotide
gccgggaguaucgcuugcu

SEQ ID NO: 2831922 - RNA, 19 nt, Artificial Sequence
  Description of Artificial Sequence: Synthetic oligonucleotide
ccacaaccacuaggguuaa

SEQ ID NO: 2831923 - RNA, 19 nt, Artificial Sequence
  Description of Artificial Sequence: Synthetic oligonucleotide
cacaaccacuaggguuaau

SEQ ID NO: 2831924 - RNA, 19 nt, Artificial Sequence
  Description of Artificial Sequence: Synthetic oligonucleotide
cgcuugcugggccuucuuu

SEQ ID NO: 2831925 - RNA, 19 nt, Artificial Sequence
  Description of Artificial Sequence: Synthetic oligonucleotide
ugugccuucagcaugguca

SEQ ID NO: 2831926 - RNA, 19 nt, Artificial Sequence
  Description of Artificial Sequence: Synthetic oligonucleotide
ugugccuacaaauucucgg

SEQ ID NO: 2831927 - RNA, 19 nt, Artificial Sequence
  Description of Artificial Sequence: Synthetic oligonucleotide
aaucccgacacucgcuggc

SEQ ID NO: 2831928 - RNA, 19 nt, Artificial Sequence
  Description of Artificial Sequence: Synthetic oligonucleotide
aaccuccuguuguagcucc

SEQ ID NO: 2831929 - RNA, 19 nt, Artificial Sequence
  Description of Artificial Sequence: Synthetic oligonucleotide
cuugcuacgccguacacuc

SEQ ID NO: 2831930 - RNA, 19 nt, Artificial Sequence
  Description of Artificial Sequence: Synthetic oligonucleotide
acgccguacacucucuucc

SEQ ID NO: 2831931 - RNA, 19 nt, Artificial Sequence
  Description of Artificial Sequence: Synthetic oligonucleotide
uagcccuugagguugcacg

SEQ ID NO: 2831932 - RNA, 19 nt, Artificial Sequence
  Description of Artificial Sequence: Synthetic oligonucleotide
aggagauggaugcugagcu

SEQ ID NO: 2831933 - RNA, 19 nt, Artificial Sequence
  Description of Artificial Sequence: Synthetic oligonucleotide
aucugguccaguguggccc

SEQ ID NO: 2831934 - RNA, 19 nt, Artificial Sequence
  Description of Artificial Sequence: Synthetic oligonucleotide
uugugguucugcuccaggg

SEQ ID NO: 2831935 - RNA, 19 nt, Artificial Sequence
  Description of Artificial Sequence: Synthetic oligonucleotide
uccaguguggcccugcacu

SEQ ID NO: 2831936 - RNA, 19 nt, Artificial Sequence
  Description of Artificial Sequence: Synthetic oligonucleotide
cucaucugccuccagcugg

SEQ ID NO: 2831937 - RNA, 19 nt, Artificial Sequence
  Description of Artificial Sequence: Synthetic oligonucleotide
acugcgccaagcuuccucg

SEQ ID NO: 2831938 - RNA, 19 nt, Artificial Sequence
  Description of Artificial Sequence: Synthetic oligonucleotide
cucgcucucagcuaccgcc

SEQ ID NO: 2831939 - RNA, 19 nt, Artificial Sequence
  Description of Artificial Sequence: Synthetic oligonucleotide
ucugcuuccgucucagcca

SEQ ID NO: 2831940 - RNA, 19 nt, Artificial Sequence
  Description of Artificial Sequence: Synthetic oligonucleotide
uggaugcugagcuccuucg

SEQ ID NO: 2831941 - RNA, 19 nt, Artificial Sequence
  Description of Artificial Sequence: Synthetic oligonucleotide
cuguuguagcuccaggugc

SEQ ID NO: 2831942 - RNA, 19 nt, Artificial Sequence
  Description of Artificial Sequence: Synthetic oligonucleotide
uguuguagcuccaggugcu

SEQ ID NO: 2831943 - RNA, 19 nt, Artificial Sequence
  Description of Artificial Sequence: Synthetic oligonucleotide
uuccgucucagccagcugu

SEQ ID NO: 2831944 - RNA, 19 nt, Artificial Sequence
  Description of Artificial Sequence: Synthetic oligonucleotide
ucaaccuccuguuguagcu

SEQ ID NO: 2831945 - RNA, 19 nt, Artificial Sequence
  Description of Artificial Sequence: Synthetic oligonucleotide
uacaaauucucgguggccu

SEQ ID NO: 2831946 - RNA, 19 nt, Artificial Sequence
  Description of Artificial Sequence: Synthetic oligonucleotide
aguguggcccugcacuccc

SEQ ID NO: 2831947 - RNA, 19 nt, Artificial Sequence
  Description of Artificial Sequence: Synthetic oligonucleotide
ugagcuccuucgaagcucc

SEQ ID NO: 2831948 - RNA, 19 nt, Artificial Sequence
  Description of Artificial Sequence: Synthetic oligonucleotide
ucaccugcuccuccaaucc

SEQ ID NO: 2831949 - RNA, 19 nt, Artificial Sequence
  Description of Artificial Sequence: Synthetic oligonucleotide
ugacugagggugcuggucu

SEQ ID NO: 2831950 - RNA, 19 nt, Artificial Sequence
  Description of Artificial Sequence: Synthetic oligonucleotide
cucugcuuccgucucagcc

SEQ ID NO: 2831951 - RNA, 19 nt, Artificial Sequence
  Description of Artificial Sequence: Synthetic oligonucleotide
uucucgguggccugcaggc

SEQ ID NO: 2831952 - RNA, 19 nt, Artificial Sequence
  Description of Artificial Sequence: Synthetic oligonucleotide
gagggugcuggucuggacc

SEQ ID NO: 2831953 - RNA, 19 nt, Artificial Sequence
  Description of Artificial Sequence: Synthetic oligonucleotide
ugcaccugggcacugcgca

SEQ ID NO: 2831954 - RNA, 19 nt, Artificial Sequence
  Description of Artificial Sequence: Synthetic oligonucleotide
ugccuacaaauucucggug

SEQ ID NO: 2831955 - RNA, 19 nt, Artificial Sequence
  Description of Artificial Sequence: Synthetic oligonucleotide
ucgaagcuccuucugcagc

SEQ ID NO: 2831956 - RNA, 19 nt, Artificial Sequence
  Description of Artificial Sequence: Synthetic oligonucleotide
uccuguuguagcuccaggu

SEQ ID NO: 2831957 - RNA, 19 nt, Artificial Sequence
  Description of Artificial Sequence: Synthetic oligonucleotide
auucucgguggccugcagg

SEQ ID NO: 2831958 - RNA, 19 nt, Artificial Sequence
  Description of Artificial Sequence: Synthetic oligonucleotide
ucugcaccugggcacugcg

SEQ ID NO: 2831959 - RNA, 19 nt, Artificial Sequence
  Description of Artificial Sequence: Synthetic oligonucleotide
ugcucaucugccuccagcu

SEQ ID NO: 2831960 - RNA, 19 nt, Artificial Sequence
  Description of Artificial Sequence: Synthetic oligonucleotide
agggcuaccaccugugccu

SEQ ID NO: 2831961 - RNA, 19 nt, Artificial Sequence
  Description of Artificial Sequence: Synthetic oligonucleotide
accaccugugccuacaaau

SEQ ID NO: 2831962 - RNA, 19 nt, Artificial Sequence
  Description of Artificial Sequence: Synthetic oligonucleotide
uggucuggaccuuaaguuc

SEQ ID NO: 2831963 - RNA, 19 nt, Artificial Sequence
  Description of Artificial Sequence: Synthetic oligonucleotide
agcccuugagguugcacgg

SEQ ID NO: 2831964 - RNA, 19 nt, Artificial Sequence
  Description of Artificial Sequence: Synthetic oligonucleotide
ugcacggucucucucugcu

SEQ ID NO: 2831965 - RNA, 19 nt, Artificial Sequence
  Description of Artificial Sequence: Synthetic oligonucleotide
ugcuccuccaaucccgaca

SEQ ID NO: 2831966 - RNA, 19 nt, Artificial Sequence
  Description of Artificial Sequence: Synthetic oligonucleotide
ugugcgcuccgucugcacc

SEQ ID NO: 2831967 - RNA, 19 nt, Artificial Sequence
  Description of Artificial Sequence: Synthetic oligonucleotide
uucgaagcuccuucugcag

SEQ ID NO: 2831968 - RNA, 19 nt, Artificial Sequence
  Description of Artificial Sequence: Synthetic oligonucleotide
ugcacucccgcuugcuacg

SEQ ID NO: 2831969 - RNA, 19 nt, Artificial Sequence
  Description of Artificial Sequence: Synthetic oligonucleotide
acuggauugugguucugcu

SEQ ID NO: 2831970 - RNA, 19 nt, Artificial Sequence
  Description of Artificial Sequence: Synthetic oligonucleotide
agcuuccucgcucucagcu

SEQ ID NO: 2831971 - RNA, 19 nt, Artificial Sequence
  Description of Artificial Sequence: Synthetic oligonucleotide
acucccgcuugcuacgccg

SEQ ID NO: 2831972 - RNA, 19 nt, Artificial Sequence
  Description of Artificial Sequence: Synthetic oligonucleotide
cagcuguugacugagggug

SEQ ID NO: 2831973 - RNA, 19 nt, Artificial Sequence
  Description of Artificial Sequence: Synthetic oligonucleotide
agcauggucaccugcuccu

SEQ ID NO: 2831974 - RNA, 19 nt, Artificial Sequence
  Description of Artificial Sequence: Synthetic oligonucleotide
agcuaccgccuucugcagc

SEQ ID NO: 2831975 - RNA, 19 nt, Artificial Sequence
  Description of Artificial Sequence: Synthetic oligonucleotide
agcugccuagcccuugagg

SEQ ID NO: 2831976 - RNA, 19 nt, Artificial Sequence
  Description of Artificial Sequence: Synthetic oligonucleotide
acaaauucucgguggccug

SEQ ID NO: 2831977 - RNA, 19 nt, Artificial Sequence
  Description of Artificial Sequence: Synthetic oligonucleotide
ugcacugcgccaagcuucc

SEQ ID NO: 2831978 - RNA, 19 nt, Artificial Sequence
  Description of Artificial Sequence: Synthetic oligonucleotide
gccuacaaauucucggugg

SEQ ID NO: 2831979 - RNA, 19 nt, Artificial Sequence
  Description of Artificial Sequence: Synthetic oligonucleotide
agcuggacuggauuguggu

SEQ ID NO: 2831980 - RNA, 19 nt, Artificial Sequence
  Description of Artificial Sequence: Synthetic oligonucleotide
aagcuuccucgcucucagc

SEQ ID NO: 2831981 - RNA, 19 nt, Artificial Sequence
  Description of Artificial Sequence: Synthetic oligonucleotide
caagcuuccucgcucucag

SEQ ID NO: 2831982 - RNA, 19 nt, Artificial Sequence
  Description of Artificial Sequence: Synthetic oligonucleotide
ugaggagauggaugcugag

SEQ ID NO: 2831983 - RNA, 19 nt, Artificial Sequence
  Description of Artificial Sequence: Synthetic oligonucleotide
ucaucugccuccagcugga

SEQ ID NO: 2831984 - RNA, 19 nt, Artificial Sequence
  Description of Artificial Sequence: Synthetic oligonucleotide
aauucucgguggccugcag

SEQ ID NO: 2831985 - RNA, 19 nt, Artificial Sequence
  Description of Artificial Sequence: Synthetic oligonucleotide
gagggugaggagauggaug

SEQ ID NO: 2831986 - RNA, 19 nt, Artificial Sequence
  Description of Artificial Sequence: Synthetic oligonucleotide
uccgucugcaccugggcac

SEQ ID NO: 2831987 - RNA, 19 nt, Artificial Sequence
  Description of Artificial Sequence: Synthetic oligonucleotide
uccagugugcgcuccgucu

SEQ ID NO: 2831988 - RNA, 19 nt, Artificial Sequence
  Description of Artificial Sequence: Synthetic oligonucleotide
cugugccuacaaauucucg

SEQ ID NO: 2831989 - RNA, 19 nt, Artificial Sequence
  Description of Artificial Sequence: Synthetic oligonucleotide
cugcacugcgccaagcuuc

SEQ ID NO: 2831990 - RNA, 19 nt, Artificial Sequence
  Description of Artificial Sequence: Synthetic oligonucleotide
cuggacuggauugugguuc

SEQ ID NO: 2831991 - RNA, 19 nt, Artificial Sequence
  Description of Artificial Sequence: Synthetic oligonucleotide
cucagcuaccgccuucugc

SEQ ID NO: 2831992 - RNA, 19 nt, Artificial Sequence
  Description of Artificial Sequence: Synthetic oligonucleotide
uccagggcuaccaccugug

SEQ ID NO: 2831993 - RNA, 19 nt, Artificial Sequence
  Description of Artificial Sequence: Synthetic oligonucleotide
cuuccucgcucucagcuac

SEQ ID NO: 2831994 - RNA, 19 nt, Artificial Sequence
  Description of Artificial Sequence: Synthetic oligonucleotide
acggucucucucugcuucc

SEQ ID NO: 2831995 - RNA, 19 nt, Artificial Sequence
  Description of Artificial Sequence: Synthetic oligonucleotide
ugcuacgccguacacucuc

SEQ ID NO: 2831996 - RNA, 19 nt, Artificial Sequence
  Description of Artificial Sequence: Synthetic oligonucleotide
gaugcugagcuccuucgaa

SEQ ID NO: 2831997 - RNA, 19 nt, Artificial Sequence
  Description of Artificial Sequence: Synthetic oligonucleotide
ugccuagcccuugagguug

SEQ ID NO: 2831998 - RNA, 19 nt, Artificial Sequence
  Description of Artificial Sequence: Synthetic oligonucleotide
uccuucgaagcuccuucug

SEQ ID NO: 2831999 - RNA, 19 nt, Artificial Sequence
  Description of Artificial Sequence: Synthetic oligonucleotide
ucagccagcuguugacuga

SEQ ID NO: 2832000 - RNA, 19 nt, Artificial Sequence
  Description of Artificial Sequence: Synthetic oligonucleotide
gacuggauugugguucugc

SEQ ID NO: 2832001 - RNA, 19 nt, Artificial Sequence
  Description of Artificial Sequence: Synthetic oligonucleotide
uccaaucccgacacucgcu

SEQ ID NO: 2832002 - RNA, 19 nt, Artificial Sequence
  Description of Artificial Sequence: Synthetic oligonucleotide
cuacaaauucucgguggcc

SEQ ID NO: 2832003 - RNA, 19 nt, Artificial Sequence
  Description of Artificial Sequence: Synthetic oligonucleotide
cuucgaagcuccuucugca

SEQ ID NO: 2832004 - RNA, 19 nt, Artificial Sequence
  Description of Artificial Sequence: Synthetic oligonucleotide
cuccaaucccgacacucgc

SEQ ID NO: 2832005 - RNA, 19 nt, Artificial Sequence
  Description of Artificial Sequence: Synthetic oligonucleotide
cucagccagcuguugacug

SEQ ID NO: 2832006 - RNA, 19 nt, Artificial Sequence
  Description of Artificial Sequence: Synthetic oligonucleotide
ugcuuggcccgcucagccg

SEQ ID NO: 2832007 - RNA, 19 nt, Artificial Sequence
  Description of Artificial Sequence: Synthetic oligonucleotide
uccuccaaucccgacacuc

SEQ ID NO: 2832008 - RNA, 19 nt, Artificial Sequence
  Description of Artificial Sequence: Synthetic oligonucleotide
ugcaggcuccucuccagug

SEQ ID NO: 2832009 - RNA, 19 nt, Artificial Sequence
  Description of Artificial Sequence: Synthetic oligonucleotide
ugcagugccagcucugcuu

SEQ ID NO: 2832010 - RNA, 19 nt, Artificial Sequence
  Description of Artificial Sequence: Synthetic oligonucleotide
cugcacucccgcuugcuac

SEQ ID NO: 2832011 - RNA, 19 nt, Artificial Sequence
  Description of Artificial Sequence: Synthetic oligonucleotide
uggacuggauugugguucu

SEQ ID NO: 2832012 - RNA, 19 nt, Artificial Sequence
  Description of Artificial Sequence: Synthetic oligonucleotide
ucagcauggucaccugcuc

SEQ ID NO: 2832013 - RNA, 19 nt, Artificial Sequence
  Description of Artificial Sequence: Synthetic oligonucleotide
cuugagguugcacggucuc

SEQ ID NO: 2832014 - RNA, 19 nt, Artificial Sequence
  Description of Artificial Sequence: Synthetic oligonucleotide
ugagguugcacggucucuc

SEQ ID NO: 2832015 - RNA, 19 nt, Artificial Sequence
  Description of Artificial Sequence: Synthetic oligonucleotide
agcuguugacugagggugc

SEQ ID NO: 2832016 - RNA, 19 nt, Artificial Sequence
  Description of Artificial Sequence: Synthetic oligonucleotide
cagcauggucaccugcucc

SEQ ID NO: 2832017 - RNA, 19 nt, Artificial Sequence
  Description of Artificial Sequence: Synthetic oligonucleotide
aaauucucgguggccugca

SEQ ID NO: 2832018 - RNA, 19 nt, Artificial Sequence
  Description of Artificial Sequence: Synthetic oligonucleotide
caaucccgacacucgcugg

SEQ ID NO: 2832019 - RNA, 19 nt, Artificial Sequence
  Description of Artificial Sequence: Synthetic oligonucleotide
caccugugccuacaaauuc

SEQ ID NO: 2832020 - RNA, 19 nt, Artificial Sequence
  Description of Artificial Sequence: Synthetic oligonucleotide
gccagcuguugacugaggg

SEQ ID NO: 2832021 - RNA, 19 nt, Artificial Sequence
  Description of Artificial Sequence: Synthetic oligonucleotide
ucccgacacucgcuggcgg

SEQ ID NO: 2832022 - RNA, 19 nt, Artificial Sequence
  Description of Artificial Sequence: Synthetic oligonucleotide
ccuacaaauucucgguggc

SEQ ID NO: 2832023 - RNA, 19 nt, Artificial Sequence
  Description of Artificial Sequence: Synthetic oligonucleotide
cuggauugugguucugcuc

SEQ ID NO: 2832024 - RNA, 19 nt, Artificial Sequence
  Description of Artificial Sequence: Synthetic oligonucleotide
accugcuccuccaaucccg

SEQ ID NO: 2832025 - RNA, 19 nt, Artificial Sequence
  Description of Artificial Sequence: Synthetic oligonucleotide
cuccuguuguagcuccagg

SEQ ID NO: 2832026 - RNA, 19 nt, Artificial Sequence
  Description of Artificial Sequence: Synthetic oligonucleotide
uucugcuccagggcuacca

SEQ ID NO: 2832027 - RNA, 19 nt, Artificial Sequence
  Description of Artificial Sequence: Synthetic oligonucleotide
agguugcacggucucucuc

SEQ ID NO: 2832028 - RNA, 19 nt, Artificial Sequence
  Description of Artificial Sequence: Synthetic oligonucleotide
ugcuggucuggaccuuaag

SEQ ID NO: 2832029 - RNA, 19 nt, Artificial Sequence
  Description of Artificial Sequence: Synthetic oligonucleotide
gucucagccagcuguugac

SEQ ID NO: 2832030 - RNA, 19 nt, Artificial Sequence
  Description of Artificial Sequence: Synthetic oligonucleotide
gucaccugcuccuccaauc

SEQ ID NO: 2832031 - RNA, 19 nt, Artificial Sequence
  Description of Artificial Sequence: Synthetic oligonucleotide
cagcuggacuggauugugg

SEQ ID NO: 2832032 - RNA, 19 nt, Artificial Sequence
  Description of Artificial Sequence: Synthetic oligonucleotide
uguggcccugcacucccgc

SEQ ID NO: 2832033 - RNA, 19 nt, Artificial Sequence
  Description of Artificial Sequence: Synthetic oligonucleotide
ucucucugcuuccgucuca

SEQ ID NO: 2832034 - RNA, 19 nt, Artificial Sequence
  Description of Artificial Sequence: Synthetic oligonucleotide
ucuccagugcugccaucug

SEQ ID NO: 2832035 - RNA, 19 nt, Artificial Sequence
  Description of Artificial Sequence: Synthetic oligonucleotide
cugcuuccgucucagccag

SEQ ID NO: 2832036 - RNA, 19 nt, Artificial Sequence
  Description of Artificial Sequence: Synthetic oligonucleotide
ugcgccaagcuuccucgcu

SEQ ID NO: 2832037 - RNA, 19 nt, Artificial Sequence
  Description of Artificial Sequence: Synthetic oligonucleotide
accugggcacugcgcaggc

SEQ ID NO: 2832038 - RNA, 19 nt, Artificial Sequence
  Description of Artificial Sequence: Synthetic oligonucleotide
acucgcuggcggugggccc

SEQ ID NO: 2832039 - RNA, 19 nt, Artificial Sequence
  Description of Artificial Sequence: Synthetic oligonucleotide
uccucgcucucagcuaccg

SEQ ID NO: 2832040 - RNA, 19 nt, Artificial Sequence
  Description of Artificial Sequence: Synthetic oligonucleotide
caucugguccaguguggcc

SEQ ID NO: 2832041 - RNA, 19 nt, Artificial Sequence
  Description of Artificial Sequence: Synthetic oligonucleotide
ucccgugccuccagugugc

SEQ ID NO: 2832042 - RNA, 19 nt, Artificial Sequence
  Description of Artificial Sequence: Synthetic oligonucleotide
guugcacggucucucucug

SEQ ID NO: 2832043 - RNA, 19 nt, Artificial Sequence
  Description of Artificial Sequence: Synthetic oligonucleotide
uacgccguacacucucuuc

SEQ ID NO: 2832044 - RNA, 19 nt, Artificial Sequence
  Description of Artificial Sequence: Synthetic oligonucleotide
ucgcucucagcuaccgccu

SEQ ID NO: 2832045 - RNA, 19 nt, Artificial Sequence
  Description of Artificial Sequence: Synthetic oligonucleotide
accugugccuacaaauucu

SEQ ID NO: 2832046 - RNA, 19 nt, Artificial Sequence
  Description of Artificial Sequence: Synthetic oligonucleotide
gugccuucagcauggucac

SEQ ID NO: 2832047 - RNA, 19 nt, Artificial Sequence
  Description of Artificial Sequence: Synthetic oligonucleotide
uuguagcuccaggugcugc

SEQ ID NO: 2832048 - RNA, 19 nt, Artificial Sequence
  Description of Artificial Sequence: Synthetic oligonucleotide
cuggcggugggcccgcucc

SEQ ID NO: 2832049 - RNA, 19 nt, Artificial Sequence
  Description of Artificial Sequence: Synthetic oligonucleotide
gcugccaucugguccagug

SEQ ID NO: 2832050 - RNA, 19 nt, Artificial Sequence
  Description of Artificial Sequence: Synthetic oligonucleotide
caggugcugcucaucugcc

SEQ ID NO: 2832051 - RNA, 19 nt, Artificial Sequence
  Description of Artificial Sequence: Synthetic oligonucleotide
gacugagggugcuggucug

SEQ ID NO: 2832052 - RNA, 19 nt, Artificial Sequence
  Description of Artificial Sequence: Synthetic oligonucleotide
gacacucgcuggcgguggg

SEQ ID NO: 2832053 - RNA, 19 nt, Artificial Sequence
  Description of Artificial Sequence: Synthetic oligonucleotide
ucugguccaguguggcccu

SEQ ID NO: 2832054 - RNA, 19 nt, Artificial Sequence
  Description of Artificial Sequence: Synthetic oligonucleotide
ccagagggugaggagaugg

SEQ ID NO: 2832055 - RNA, 19 nt, Artificial Sequence
  Description of Artificial Sequence: Synthetic oligonucleotide
ucucagccagcuguugacu

SEQ ID NO: 2832056 - RNA, 19 nt, Artificial Sequence
  Description of Artificial Sequence: Synthetic oligonucleotide
cagcugugccuucagcaug

SEQ ID NO: 2832057 - RNA, 19 nt, Artificial Sequence
  Description of Artificial Sequence: Synthetic oligonucleotide
ccuguuguagcuccaggug

SEQ ID NO: 2832058 - RNA, 19 nt, Artificial Sequence
  Description of Artificial Sequence: Synthetic oligonucleotide
gugccuacaaauucucggu

SEQ ID NO: 2832059 - RNA, 19 nt, Artificial Sequence
  Description of Artificial Sequence: Synthetic oligonucleotide
ccuccaaucccgacacucg

SEQ ID NO: 2832060 - RNA, 19 nt, Artificial Sequence
  Description of Artificial Sequence: Synthetic oligonucleotide
accgccuucugcagcugcc

SEQ ID NO: 2832061 - RNA, 19 nt, Artificial Sequence
  Description of Artificial Sequence: Synthetic oligonucleotide
gucucucucugcuuccguc

SEQ ID NO: 2832062 - RNA, 19 nt, Artificial Sequence
  Description of Artificial Sequence: Synthetic oligonucleotide
cucccgugccuccagugug

SEQ ID NO: 2832063 - RNA, 19 nt, Artificial Sequence
  Description of Artificial Sequence: Synthetic oligonucleotide
uugagguugcacggucucu

SEQ ID NO: 2832064 - RNA, 19 nt, Artificial Sequence
  Description of Artificial Sequence: Synthetic oligonucleotide
gcuccuccaaucccgacac

SEQ ID NO: 2832065 - RNA, 19 nt, Artificial Sequence
  Description of Artificial Sequence: Synthetic oligonucleotide
cucucugcuuccgucucag

SEQ ID NO: 2832066 - RNA, 19 nt, Artificial Sequence
  Description of Artificial Sequence: Synthetic oligonucleotide
cugagcuccuucgaagcuc

SEQ ID NO: 2832067 - RNA, 19 nt, Artificial Sequence
  Description of Artificial Sequence: Synthetic oligonucleotide
cuggucuggaccuuaaguu

SEQ ID NO: 2832068 - RNA, 19 nt, Artificial Sequence
  Description of Artificial Sequence: Synthetic oligonucleotide
ugguucugcuccagggcua

SEQ ID NO: 2832069 - RNA, 19 nt, Artificial Sequence
  Description of Artificial Sequence: Synthetic oligonucleotide
cucgguggccugcaggcuc

SEQ ID NO: 2832070 - RNA, 19 nt, Artificial Sequence
  Description of Artificial Sequence: Synthetic oligonucleotide
uugcacggucucucucugc

SEQ ID NO: 2832071 - RNA, 19 nt, Artificial Sequence
  Description of Artificial Sequence: Synthetic oligonucleotide
cuucugcagcugccuagcc

SEQ ID NO: 2832072 - RNA, 19 nt, Artificial Sequence
  Description of Artificial Sequence: Synthetic oligonucleotide
gcuccuucgaagcuccuuc

SEQ ID NO: 2832073 - RNA, 19 nt, Artificial Sequence
  Description of Artificial Sequence: Synthetic oligonucleotide
aucccgacacucgcuggcg

SEQ ID NO: 2832074 - RNA, 19 nt, Artificial Sequence
  Description of Artificial Sequence: Synthetic oligonucleotide
ucucagcuaccgccuucug

SEQ ID NO: 2832075 - RNA, 19 nt, Artificial Sequence
  Description of Artificial Sequence: Synthetic oligonucleotide
agcucugcuuggcccgcuc

SEQ ID NO: 2832076 - RNA, 19 nt, Artificial Sequence
  Description of Artificial Sequence: Synthetic oligonucleotide
gcugccuagcccuugaggu

SEQ ID NO: 2832077 - RNA, 19 nt, Artificial Sequence
  Description of Artificial Sequence: Synthetic oligonucleotide
uuccucgcucucagcuacc

SEQ ID NO: 2832078 - RNA, 19 nt, Artificial Sequence
  Description of Artificial Sequence: Synthetic oligonucleotide
ccguacacucucuuccugc

SEQ ID NO: 2832079 - RNA, 19 nt, Artificial Sequence
  Description of Artificial Sequence: Synthetic oligonucleotide
uaccaccugugccuacaaa

SEQ ID NO: 2832080 - RNA, 19 nt, Artificial Sequence
  Description of Artificial Sequence: Synthetic oligonucleotide
cagccagcuguugacugag

SEQ ID NO: 2832081 - RNA, 19 nt, Artificial Sequence
  Description of Artificial Sequence: Synthetic oligonucleotide
cacugcgccaagcuuccuc

SEQ ID NO: 2832082 - RNA, 19 nt, Artificial Sequence
  Description of Artificial Sequence: Synthetic oligonucleotide
cucucucugcuuccgucuc

SEQ ID NO: 2832083 - RNA, 19 nt, Artificial Sequence
  Description of Artificial Sequence: Synthetic oligonucleotide
uccgucucagccagcuguu

SEQ ID NO: 2832084 - RNA, 19 nt, Artificial Sequence
  Description of Artificial Sequence: Synthetic oligonucleotide
acacucgcuggcggugggc

SEQ ID NO: 2832085 - RNA, 19 nt, Artificial Sequence
  Description of Artificial Sequence: Synthetic oligonucleotide
cagugugcgcuccgucugc

SEQ ID NO: 2832086 - RNA, 19 nt, Artificial Sequence
  Description of Artificial Sequence: Synthetic oligonucleotide
gcuuggcccgcucagccgc

SEQ ID NO: 2832087 - RNA, 19 nt, Artificial Sequence
  Description of Artificial Sequence: Synthetic oligonucleotide
cucgcuggcggugggcccg

SEQ ID NO: 2832088 - RNA, 19 nt, Artificial Sequence
  Description of Artificial Sequence: Synthetic oligonucleotide
cacucgcuggcggugggcc

SEQ ID NO: 2832089 - RNA, 19 nt, Artificial Sequence
  Description of Artificial Sequence: Synthetic oligonucleotide
ugggcacugcgcaggcgcu

SEQ ID NO: 2832090 - RNA, 19 nt, Artificial Sequence
  Description of Artificial Sequence: Synthetic oligonucleotide
ccaaucccgacacucgcug

SEQ ID NO: 2832091 - RNA, 19 nt, Artificial Sequence
  Description of Artificial Sequence: Synthetic oligonucleotide
ucucugcuuccgucucagc

SEQ ID NO: 2832092 - RNA, 19 nt, Artificial Sequence
  Description of Artificial Sequence: Synthetic oligonucleotide
cacucucuuccugcagugc

SEQ ID NO: 2832093 - RNA, 19 nt, Artificial Sequence
  Description of Artificial Sequence: Synthetic oligonucleotide
gccuucugcagcugccuag

SEQ ID NO: 2832094 - RNA, 19 nt, Artificial Sequence
  Description of Artificial Sequence: Synthetic oligonucleotide
guuguagcuccaggugcug

SEQ ID NO: 2832095 - RNA, 19 nt, Artificial Sequence
  Description of Artificial Sequence: Synthetic oligonucleotide
cuagcccuugagguugcac

SEQ ID NO: 2832096 - RNA, 19 nt, Artificial Sequence
  Description of Artificial Sequence: Synthetic oligonucleotide
uugcuacgccguacacucu

SEQ ID NO: 2832097 - RNA, 19 nt, Artificial Sequence
  Description of Artificial Sequence: Synthetic oligonucleotide
gcaggcuccucuccagugc

SEQ ID NO: 2832098 - RNA, 19 nt, Artificial Sequence
  Description of Artificial Sequence: Synthetic oligonucleotide
ccugugccuacaaauucuc

SEQ ID NO: 2832099 - RNA, 19 nt, Artificial Sequence
  Description of Artificial Sequence: Synthetic oligonucleotide
uggcccugcacucccgcuu

SEQ ID NO: 2832100 - RNA, 19 nt, Artificial Sequence
  Description of Artificial Sequence: Synthetic oligonucleotide
cagagggugaggagaugga

SEQ ID NO: 2832101 - RNA, 19 nt, Artificial Sequence
  Description of Artificial Sequence: Synthetic oligonucleotide
uggucaccugcuccuccaa

SEQ ID NO: 2832102 - RNA, 19 nt, Artificial Sequence
  Description of Artificial Sequence: Synthetic oligonucleotide
ucuggaccuuaaguucauc

SEQ ID NO: 2832103 - RNA, 19 nt, Artificial Sequence
  Description of Artificial Sequence: Synthetic oligonucleotide
gcuggucuggaccuuaagu

SEQ ID NO: 2832104 - RNA, 19 nt, Artificial Sequence
  Description of Artificial Sequence: Synthetic oligonucleotide
aggcgcucaaccuccuguu

SEQ ID NO: 2832105 - RNA, 19 nt, Artificial Sequence
  Description of Artificial Sequence: Synthetic oligonucleotide
ggagauggaugcugagcuc

SEQ ID NO: 2832106 - RNA, 19 nt, Artificial Sequence
  Description of Artificial Sequence: Synthetic oligonucleotide
cagcuaccgccuucugcag

SEQ ID NO: 2832107 - RNA, 19 nt, Artificial Sequence
  Description of Artificial Sequence: Synthetic oligonucleotide
cugucugcacugcgccaag

SEQ ID NO: 2832108 - RNA, 19 nt, Artificial Sequence
  Description of Artificial Sequence: Synthetic oligonucleotide
agauggaugcugagcuccu

SEQ ID NO: 2832109 - RNA, 19 nt, Artificial Sequence
  Description of Artificial Sequence: Synthetic oligonucleotide
cuccgucugcaccugggca

SEQ ID NO: 2832110 - RNA, 19 nt, Artificial Sequence
  Description of Artificial Sequence: Synthetic oligonucleotide
cuuggcccgcucagccgcc

SEQ ID NO: 2832111 - RNA, 19 nt, Artificial Sequence
  Description of Artificial Sequence: Synthetic oligonucleotide
caaccuccuguuguagcuc

SEQ ID NO: 2832112 - RNA, 19 nt, Artificial Sequence
  Description of Artificial Sequence: Synthetic oligonucleotide
caguguggcccugcacucc

SEQ ID NO: 2832113 - RNA, 19 nt, Artificial Sequence
  Description of Artificial Sequence: Synthetic oligonucleotide
cugcgccaagcuuccucgc

SEQ ID NO: 2832114 - RNA, 19 nt, Artificial Sequence
  Description of Artificial Sequence: Synthetic oligonucleotide
gguugcacggucucucucu

SEQ ID NO: 2832115 - RNA, 19 nt, Artificial Sequence
  Description of Artificial Sequence: Synthetic oligonucleotide
cuuccgucucagccagcug

SEQ ID NO: 2832116 - RNA, 19 nt, Artificial Sequence
  Description of Artificial Sequence: Synthetic oligonucleotide
uggcggugggcccgcuccc

SEQ ID NO: 2832117 - RNA, 19 nt, Artificial Sequence
  Description of Artificial Sequence: Synthetic oligonucleotide
cugugccuucagcaugguc

SEQ ID NO: 2832118 - RNA, 19 nt, Artificial Sequence
  Description of Artificial Sequence: Synthetic oligonucleotide
gagguugcacggucucucu

SEQ ID NO: 2832119 - RNA, 19 nt, Artificial Sequence
  Description of Artificial Sequence: Synthetic oligonucleotide
cuccagugugcgcuccguc

SEQ ID NO: 2832120 - RNA, 19 nt, Artificial Sequence
  Description of Artificial Sequence: Synthetic oligonucleotide
gcucaucugccuccagcug

SEQ ID NO: 2832121 - RNA, 19 nt, Artificial Sequence
  Description of Artificial Sequence: Synthetic oligonucleotide
ucucgguggccugcaggcu

SEQ ID NO: 2832122 - RNA, 19 nt, Artificial Sequence
  Description of Artificial Sequence: Synthetic oligonucleotide
agugugcgcuccgucugca

SEQ ID NO: 2832123 - RNA, 19 nt, Artificial Sequence
  Description of Artificial Sequence: Synthetic oligonucleotide
ggaugcugagcuccuucga

SEQ ID NO: 2832124 - RNA, 19 nt, Artificial Sequence
  Description of Artificial Sequence: Synthetic oligonucleotide
ccuucugcagcugccuagc

SEQ ID NO: 2832125 - RNA, 19 nt, Artificial Sequence
  Description of Artificial Sequence: Synthetic oligonucleotide
cugccuccagcuggacugg

SEQ ID NO: 2832126 - RNA, 19 nt, Artificial Sequence
  Description of Artificial Sequence: Synthetic oligonucleotide
cuguugacugagggugcug

SEQ ID NO: 2832127 - RNA, 19 nt, Artificial Sequence
  Description of Artificial Sequence: Synthetic oligonucleotide
ggcgcucaaccuccuguug

SEQ ID NO: 2832128 - RNA, 19 nt, Artificial Sequence
  Description of Artificial Sequence: Synthetic oligonucleotide
ccagugugcgcuccgucug

SEQ ID NO: 2832129 - RNA, 19 nt, Artificial Sequence
  Description of Artificial Sequence: Synthetic oligonucleotide
ugcuuccgucucagccagc

SEQ ID NO: 2832130 - RNA, 19 nt, Artificial Sequence
  Description of Artificial Sequence: Synthetic oligonucleotide
cacucccgcuugcuacgcc

SEQ ID NO: 2832131 - RNA, 19 nt, Artificial Sequence
  Description of Artificial Sequence: Synthetic oligonucleotide
guccaguguggcccugcac

SEQ ID NO: 2832132 - RNA, 19 nt, Artificial Sequence
  Description of Artificial Sequence: Synthetic oligonucleotide
ggauugugguucugcucca

SEQ ID NO: 2832133 - RNA, 19 nt, Artificial Sequence
  Description of Artificial Sequence: Synthetic oligonucleotide
ggugggcccgcucccgugc

SEQ ID NO: 2832134 - RNA, 19 nt, Artificial Sequence
  Description of Artificial Sequence: Synthetic oligonucleotide
guggccugcaggcuccucu

SEQ ID NO: 2832135 - RNA, 19 nt, Artificial Sequence
  Description of Artificial Sequence: Synthetic oligonucleotide
gcucaaccuccuguuguag

SEQ ID NO: 2832136 - RNA, 19 nt, Artificial Sequence
  Description of Artificial Sequence: Synthetic oligonucleotide
gccguacacucucuuccug

SEQ ID NO: 2832137 - RNA, 19 nt, Artificial Sequence
  Description of Artificial Sequence: Synthetic oligonucleotide
gccgccugucugcacugcg

SEQ ID NO: 2832138 - RNA, 19 nt, Artificial Sequence
  Description of Artificial Sequence: Synthetic oligonucleotide
cugcuccuccaaucccgac

SEQ ID NO: 2832139 - RNA, 19 nt, Artificial Sequence
  Description of Artificial Sequence: Synthetic oligonucleotide
gguucugcuccagggcuac

SEQ ID NO: 2832140 - RNA, 19 nt, Artificial Sequence
  Description of Artificial Sequence: Synthetic oligonucleotide
ggcccugcacucccgcuug

SEQ ID NO: 2832141 - RNA, 19 nt, Artificial Sequence
  Description of Artificial Sequence: Synthetic oligonucleotide
ugcgcuccgucugcaccug

SEQ ID NO: 2832142 - RNA, 19 nt, Artificial Sequence
  Description of Artificial Sequence: Synthetic oligonucleotide
ugccuucagcauggucacc

SEQ ID NO: 2832143 - RNA, 19 nt, Artificial Sequence
  Description of Artificial Sequence: Synthetic oligonucleotide
cagcugccuagcccuugag

SEQ ID NO: 2832144 - RNA, 19 nt, Artificial Sequence
  Description of Artificial Sequence: Synthetic oligonucleotide
gucugcaccugggcacugc

SEQ ID NO: 2832145 - RNA, 19 nt, Artificial Sequence
  Description of Artificial Sequence: Synthetic oligonucleotide
ugccuccagugugcgcucc

SEQ ID NO: 2832146 - RNA, 19 nt, Artificial Sequence
  Description of Artificial Sequence: Synthetic oligonucleotide
cuccucuccagugcugcca

SEQ ID NO: 2832147 - RNA, 19 nt, Artificial Sequence
  Description of Artificial Sequence: Synthetic oligonucleotide
gcuaccgccuucugcagcu

SEQ ID NO: 2832148 - RNA, 19 nt, Artificial Sequence
  Description of Artificial Sequence: Synthetic oligonucleotide
ccaguguggcccugcacuc

SEQ ID NO: 2832149 - RNA, 19 nt, Artificial Sequence
  Description of Artificial Sequence: Synthetic oligonucleotide
agccagcuguugacugagg

SEQ ID NO: 2832150 - RNA, 19 nt, Artificial Sequence
  Description of Artificial Sequence: Synthetic oligonucleotide
gcaccugggcacugcgcag

SEQ ID NO: 2832151 - RNA, 19 nt, Artificial Sequence
  Description of Artificial Sequence: Synthetic oligonucleotide
caggcgcucaaccuccugu

SEQ ID NO: 2832152 - RNA, 19 nt, Artificial Sequence
  Description of Artificial Sequence: Synthetic oligonucleotide
ccugcagugccagcucugc

SEQ ID NO: 2832153 - RNA, 19 nt, Artificial Sequence
  Description of Artificial Sequence: Synthetic oligonucleotide
ucccgcuugcuacgccgua

SEQ ID NO: 2832154 - RNA, 19 nt, Artificial Sequence
  Description of Artificial Sequence: Synthetic oligonucleotide
cucagccgccugucugcac

SEQ ID NO: 2832155 - RNA, 19 nt, Artificial Sequence
  Description of Artificial Sequence: Synthetic oligonucleotide
gugugcgcuccgucugcac

SEQ ID NO: 2832156 - RNA, 19 nt, Artificial Sequence
  Description of Artificial Sequence: Synthetic oligonucleotide
gugcgcuccgucugcaccu

SEQ ID NO: 2832157 - RNA, 19 nt, Artificial Sequence
  Description of Artificial Sequence: Synthetic oligonucleotide
gugggcccgcucccgugcc

SEQ ID NO: 2832158 - RNA, 19 nt, Artificial Sequence
  Description of Artificial Sequence: Synthetic oligonucleotide
gcuaccaccugugccuaca

SEQ ID NO: 2832159 - RNA, 19 nt, Artificial Sequence
  Description of Artificial Sequence: Synthetic oligonucleotide
cuaccaccugugccuacaa

SEQ ID NO: 2832160 - RNA, 19 nt, Artificial Sequence
  Description of Artificial Sequence: Synthetic oligonucleotide
gccuccagugugcgcuccg

SEQ ID NO: 2832161 - RNA, 19 nt, Artificial Sequence
  Description of Artificial Sequence: Synthetic oligonucleotide
cuccuucgaagcuccuucu

SEQ ID NO: 2832162 - RNA, 19 nt, Artificial Sequence
  Description of Artificial Sequence: Synthetic oligonucleotide
gcgccaagcuuccucgcuc

SEQ ID NO: 2832163 - RNA, 19 nt, Artificial Sequence
  Description of Artificial Sequence: Synthetic oligonucleotide
cccuugagguugcacgguc

SEQ ID NO: 2832164 - RNA, 19 nt, Artificial Sequence
  Description of Artificial Sequence: Synthetic oligonucleotide
ugggcccgcucccgugccu

SEQ ID NO: 2832165 - RNA, 19 nt, Artificial Sequence
  Description of Artificial Sequence: Synthetic oligonucleotide
guguggcccugcacucccg

SEQ ID NO: 2832166 - RNA, 19 nt, Artificial Sequence
  Description of Artificial Sequence: Synthetic oligonucleotide
cugagggugcuggucugga

SEQ ID NO: 2832167 - RNA, 19 nt, Artificial Sequence
  Description of Artificial Sequence: Synthetic oligonucleotide
cgcucagccgccugucugc

SEQ ID NO: 2832168 - RNA, 19 nt, Artificial Sequence
  Description of Artificial Sequence: Synthetic oligonucleotide
ccagggcuaccaccugugc

SEQ ID NO: 2832169 - RNA, 19 nt, Artificial Sequence
  Description of Artificial Sequence: Synthetic oligonucleotide
cacugcgcaggcgcucaac

SEQ ID NO: 2832170 - RNA, 19 nt, Artificial Sequence
  Description of Artificial Sequence: Synthetic oligonucleotide
cgccugucugcacugcgcc

SEQ ID NO: 2832171 - RNA, 19 nt, Artificial Sequence
  Description of Artificial Sequence: Synthetic oligonucleotide
caggcuccucuccagugcu

SEQ ID NO: 2832172 - RNA, 19 nt, Artificial Sequence
  Description of Artificial Sequence: Synthetic oligonucleotide
ccagcuggacuggauugug

SEQ ID NO: 2832173 - RNA, 19 nt, Artificial Sequence
  Description of Artificial Sequence: Synthetic oligonucleotide
gcucucagcuaccgccuuc

SEQ ID NO: 2832174 - RNA, 19 nt, Artificial Sequence
  Description of Artificial Sequence: Synthetic oligonucleotide
gguccaguguggcccugca

SEQ ID NO: 2832175 - RNA, 19 nt, Artificial Sequence
  Description of Artificial Sequence: Synthetic oligonucleotide
cuccagggcuaccaccugu

SEQ ID NO: 2832176 - RNA, 19 nt, Artificial Sequence
  Description of Artificial Sequence: Synthetic oligonucleotide
gcugcucaucugccuccag

SEQ ID NO: 2832177 - RNA, 19 nt, Artificial Sequence
  Description of Artificial Sequence: Synthetic oligonucleotide
gcgcucaaccuccuguugu

SEQ ID NO: 2832178 - RNA, 19 nt, Artificial Sequence
  Description of Artificial Sequence: Synthetic oligonucleotide
guucugcuccagggcuacc

SEQ ID NO: 2832179 - RNA, 19 nt, Artificial Sequence
  Description of Artificial Sequence: Synthetic oligonucleotide
gcuuccucgcucucagcua

SEQ ID NO: 2832180 - RNA, 19 nt, Artificial Sequence
  Description of Artificial Sequence: Synthetic oligonucleotide
gugccuccagugugcgcuc

SEQ ID NO: 2832181 - RNA, 19 nt, Artificial Sequence
  Description of Artificial Sequence: Synthetic oligonucleotide
cuaccgccuucugcagcug

SEQ ID NO: 2832182 - RNA, 19 nt, Artificial Sequence
  Description of Artificial Sequence: Synthetic oligonucleotide
cgcuccgucugcaccuggg

SEQ ID NO: 2832183 - RNA, 19 nt, Artificial Sequence
  Description of Artificial Sequence: Synthetic oligonucleotide
accuccuguuguagcucca

SEQ ID NO: 2832184 - RNA, 19 nt, Artificial Sequence
  Description of Artificial Sequence: Synthetic oligonucleotide
gcuugcuacgccguacacu

SEQ ID NO: 2832185 - RNA, 19 nt, Artificial Sequence
  Description of Artificial Sequence: Synthetic oligonucleotide
gcucugcuuggcccgcuca

SEQ ID NO: 2832186 - RNA, 19 nt, Artificial Sequence
  Description of Artificial Sequence: Synthetic oligonucleotide
caucugccuccagcuggac

SEQ ID NO: 2832187 - RNA, 19 nt, Artificial Sequence
  Description of Artificial Sequence: Synthetic oligonucleotide
ccucgcucucagcuaccgc

SEQ ID NO: 2832188 - RNA, 19 nt, Artificial Sequence
  Description of Artificial Sequence: Synthetic oligonucleotide
aggcuccucuccagugcug

SEQ ID NO: 2832189 - RNA, 19 nt, Artificial Sequence
  Description of Artificial Sequence: Synthetic oligonucleotide
ccagcuguugacugagggu

SEQ ID NO: 2832190 - RNA, 19 nt, Artificial Sequence
  Description of Artificial Sequence: Synthetic oligonucleotide
ugcugccaucugguccagu

SEQ ID NO: 2832191 - RNA, 19 nt, Artificial Sequence
  Description of Artificial Sequence: Synthetic oligonucleotide
ggcacugcgcaggcgcuca

SEQ ID NO: 2832192 - RNA, 19 nt, Artificial Sequence
  Description of Artificial Sequence: Synthetic oligonucleotide
gcuuccgucucagccagcu

SEQ ID NO: 2832193 - RNA, 19 nt, Artificial Sequence
  Description of Artificial Sequence: Synthetic oligonucleotide
ccugcuccuccaaucccga

SEQ ID NO: 2832194 - RNA, 19 nt, Artificial Sequence
  Description of Artificial Sequence: Synthetic oligonucleotide
cugccuagcccuugagguu

SEQ ID NO: 2832195 - RNA, 19 nt, Artificial Sequence
  Description of Artificial Sequence: Synthetic oligonucleotide
ccaagcuuccucgcucuca

SEQ ID NO: 2832196 - RNA, 19 nt, Artificial Sequence
  Description of Artificial Sequence: Synthetic oligonucleotide
ggcggugggcccgcucccg

SEQ ID NO: 2832197 - RNA, 19 nt, Artificial Sequence
  Description of Artificial Sequence: Synthetic oligonucleotide
ccugucugcacugcgccaa

SEQ ID NO: 2832198 - RNA, 19 nt, Artificial Sequence
  Description of Artificial Sequence: Synthetic oligonucleotide
gccugucugcacugcgcca

SEQ ID NO: 2832199 - RNA, 19 nt, Artificial Sequence
  Description of Artificial Sequence: Synthetic oligonucleotide
ggcuaccaccugugccuac

SEQ ID NO: 2832200 - RNA, 19 nt, Artificial Sequence
  Description of Artificial Sequence: Synthetic oligonucleotide
cgucucagccagcuguuga

SEQ ID NO: 2832201 - RNA, 19 nt, Artificial Sequence
  Description of Artificial Sequence: Synthetic oligonucleotide
ggugcuggucuggaccuua

SEQ ID NO: 2832202 - RNA, 19 nt, Artificial Sequence
  Description of Artificial Sequence: Synthetic oligonucleotide
ucgcuggcggugggcccgc

SEQ ID NO: 2832203 - RNA, 19 nt, Artificial Sequence
  Description of Artificial Sequence: Synthetic oligonucleotide
cccgcuugcuacgccguac

SEQ ID NO: 2832204 - RNA, 19 nt, Artificial Sequence
  Description of Artificial Sequence: Synthetic oligonucleotide
gugcugccaucugguccag

SEQ ID NO: 2832205 - RNA, 19 nt, Artificial Sequence
  Description of Artificial Sequence: Synthetic oligonucleotide
cugcaggcuccucuccagu

SEQ ID NO: 2832206 - RNA, 19 nt, Artificial Sequence
  Description of Artificial Sequence: Synthetic oligonucleotide
ggacuggauugugguucug

SEQ ID NO: 2832207 - RNA, 19 nt, Artificial Sequence
  Description of Artificial Sequence: Synthetic oligonucleotide
gcacucccgcuugcuacgc

SEQ ID NO: 2832208 - RNA, 19 nt, Artificial Sequence
  Description of Artificial Sequence: Synthetic oligonucleotide
cgacacucgcuggcggugg

SEQ ID NO: 2832209 - RNA, 19 nt, Artificial Sequence
  Description of Artificial Sequence: Synthetic oligonucleotide
cucccgcuugcuacgccgu

SEQ ID NO: 2832210 - RNA, 19 nt, Artificial Sequence
  Description of Artificial Sequence: Synthetic oligonucleotide
cccgugccuccagugugcg

SEQ ID NO: 2832211 - RNA, 19 nt, Artificial Sequence
  Description of Artificial Sequence: Synthetic oligonucleotide
cgaagcuccuucugcagcu

SEQ ID NO: 2832212 - RNA, 19 nt, Artificial Sequence
  Description of Artificial Sequence: Synthetic oligonucleotide
gcucccgugccuccagugu

SEQ ID NO: 2832213 - RNA, 19 nt, Artificial Sequence
  Description of Artificial Sequence: Synthetic oligonucleotide
cugcagugccagcucugcu

SEQ ID NO: 2832214 - RNA, 19 nt, Artificial Sequence
  Description of Artificial Sequence: Synthetic oligonucleotide
ccgacacucgcuggcggug

SEQ ID NO: 2832215 - RNA, 19 nt, Artificial Sequence
  Description of Artificial Sequence: Synthetic oligonucleotide
gcgcuccgucugcaccugg

SEQ ID NO: 2832216 - RNA, 19 nt, Artificial Sequence
  Description of Artificial Sequence: Synthetic oligonucleotide
ccuugagguugcacggucu

SEQ ID NO: 2832217 - RNA, 19 nt, Artificial Sequence
  Description of Artificial Sequence: Synthetic oligonucleotide
guggcccugcacucccgcu

SEQ ID NO: 2832218 - RNA, 19 nt, Artificial Sequence
  Description of Artificial Sequence: Synthetic oligonucleotide
ccaccugugccuacaaauu

SEQ ID NO: 2832219 - RNA, 19 nt, Artificial Sequence
  Description of Artificial Sequence: Synthetic oligonucleotide
gcuguugacugagggugcu

SEQ ID NO: 2832220 - RNA, 19 nt, Artificial Sequence
  Description of Artificial Sequence: Synthetic oligonucleotide
ccgcuugcuacgccguaca

SEQ ID NO: 2832221 - RNA, 19 nt, Artificial Sequence
  Description of Artificial Sequence: Synthetic oligonucleotide
gccaagcuuccucgcucuc

SEQ ID NO: 2832222 - RNA, 19 nt, Artificial Sequence
  Description of Artificial Sequence: Synthetic oligonucleotide
cugguccaguguggcccug

SEQ ID NO: 2832223 - RNA, 19 nt, Artificial Sequence
  Description of Artificial Sequence: Synthetic oligonucleotide
gcuggacuggauugugguu

SEQ ID NO: 2832224 - RNA, 19 nt, Artificial Sequence
  Description of Artificial Sequence: Synthetic oligonucleotide
cggucucucucugcuuccg

SEQ ID NO: 2832225 - RNA, 19 nt, Artificial Sequence
  Description of Artificial Sequence: Synthetic oligonucleotide
ccugggcacugcgcaggcg

SEQ ID NO: 2832226 - RNA, 19 nt, Artificial Sequence
  Description of Artificial Sequence: Synthetic oligonucleotide
ggucaccugcuccuccaau

SEQ ID NO: 2832227 - RNA, 19 nt, Artificial Sequence
  Description of Artificial Sequence: Synthetic oligonucleotide
ggcccgcucccgugccucc

SEQ ID NO: 2832228 - RNA, 19 nt, Artificial Sequence
  Description of Artificial Sequence: Synthetic oligonucleotide
cgugccuccagugugcgcu

SEQ ID NO: 2832229 - RNA, 19 nt, Artificial Sequence
  Description of Artificial Sequence: Synthetic oligonucleotide
cuacgccguacacucucuu

SEQ ID NO: 2832230 - RNA, 19 nt, Artificial Sequence
  Description of Artificial Sequence: Synthetic oligonucleotide
cgcucccgugccuccagug

SEQ ID NO: 2832231 - RNA, 19 nt, Artificial Sequence
  Description of Artificial Sequence: Synthetic oligonucleotide
cgcuugcuacgccguacac

SEQ ID NO: 2832232 - RNA, 19 nt, Artificial Sequence
  Description of Artificial Sequence: Synthetic oligonucleotide
gcccugcacucccgcuugc

SEQ ID NO: 2832233 - RNA, 19 nt, Artificial Sequence
  Description of Artificial Sequence: Synthetic oligonucleotide
ccgugccuccagugugcgc

SEQ ID NO: 2832234 - RNA, 19 nt, Artificial Sequence
  Description of Artificial Sequence: Synthetic oligonucleotide
ccugcacucccgcuugcua

SEQ ID NO: 2832235 - RNA, 19 nt, Artificial Sequence
  Description of Artificial Sequence: Synthetic oligonucleotide
gcucagccgccugucugca

SEQ ID NO: 2832236 - RNA, 19 nt, Artificial Sequence
  Description of Artificial Sequence: Synthetic oligonucleotide
ccgucucagccagcuguug

SEQ ID NO: 2832237 - RNA, 19 nt, Artificial Sequence
  Description of Artificial Sequence: Synthetic oligonucleotide
cgcucaaccuccuguugua

SEQ ID NO: 2832238 - RNA, 19 nt, Artificial Sequence
  Description of Artificial Sequence: Synthetic oligonucleotide
gcuggcggugggcccgcuc

SEQ ID NO: 2832239 - RNA, 19 nt, Artificial Sequence
  Description of Artificial Sequence: Synthetic oligonucleotide
gcuacgccguacacucucu

SEQ ID NO: 2832240 - RNA, 19 nt, Artificial Sequence
  Description of Artificial Sequence: Synthetic oligonucleotide
ccuccagcuggacuggauu

SEQ ID NO: 2832241 - RNA, 19 nt, Artificial Sequence
  Description of Artificial Sequence: Synthetic oligonucleotide
gggcacugcgcaggcgcuc

SEQ ID NO: 2832242 - RNA, 19 nt, Artificial Sequence
  Description of Artificial Sequence: Synthetic oligonucleotide
gggcccgcucccgugccuc

SEQ ID NO: 2832243 - RNA, 19 nt, Artificial Sequence
  Description of Artificial Sequence: Synthetic oligonucleotide
gggcuaccaccugugccua

SEQ ID NO: 2832244 - RNA, 19 nt, Artificial Sequence
  Description of Artificial Sequence: Synthetic oligonucleotide
gggugaggagauggaugcu

SEQ ID NO: 2832245 - RNA, 19 nt, Artificial Sequence
  Description of Artificial Sequence: Synthetic oligonucleotide
cuccuccaaucccgacacu

SEQ ID NO: 2832246 - RNA, 19 nt, Artificial Sequence
  Description of Artificial Sequence: Synthetic oligonucleotide
gagcuccuucgaagcuccu

SEQ ID NO: 2832247 - RNA, 19 nt, Artificial Sequence
  Description of Artificial Sequence: Synthetic oligonucleotide
cccgacacucgcuggcggu

SEQ ID NO: 2832248 - RNA, 19 nt, Artificial Sequence
  Description of Artificial Sequence: Synthetic oligonucleotide
ggcccgcucagccgccugu

SEQ ID NO: 2832249 - RNA, 19 nt, Artificial Sequence
  Description of Artificial Sequence: Synthetic oligonucleotide
gcccuugagguugcacggu

SEQ ID NO: 2832250 - RNA, 19 nt, Artificial Sequence
  Description of Artificial Sequence: Synthetic oligonucleotide
cggugggcccgcucccgug

SEQ ID NO: 2832251 - RNA, 19 nt, Artificial Sequence
  Description of Artificial Sequence: Synthetic oligonucleotide
cugcagcugccuagcccuu

SEQ ID NO: 2832252 - RNA, 19 nt, Artificial Sequence
  Description of Artificial Sequence: Synthetic oligonucleotide
cgccaagcuuccucgcucu

SEQ ID NO: 2832253 - RNA, 19 nt, Artificial Sequence
  Description of Artificial Sequence: Synthetic oligonucleotide
gcacugcgcaggcgcucaa

SEQ ID NO: 2832254 - RNA, 19 nt, Artificial Sequence
  Description of Artificial Sequence: Synthetic oligonucleotide
cgccguacacucucuuccu

SEQ ID NO: 2832255 - RNA, 19 nt, Artificial Sequence
  Description of Artificial Sequence: Synthetic oligonucleotide
gcggugggcccgcucccgu

SEQ ID NO: 2832256 - RNA, 19 nt, Artificial Sequence
  Description of Artificial Sequence: Synthetic oligonucleotide
ccuagcccuugagguugca

SEQ ID NO: 2832257 - RNA, 19 nt, Artificial Sequence
  Description of Artificial Sequence: Synthetic oligonucleotide
cgucugcaccugggcacug

SEQ ID NO: 2832258 - RNA, 19 nt, Artificial Sequence
  Description of Artificial Sequence: Synthetic oligonucleotide
ccgucugcaccugggcacu

SEQ ID NO: 2832259 - RNA, 19 nt, Artificial Sequence
  Description of Artificial Sequence: Synthetic oligonucleotide
gcccgcucccgugccucca

SEQ ID NO: 2832260 - RNA, 19 nt, Artificial Sequence
  Description of Artificial Sequence: Synthetic oligonucleotide
cagcucugcuuggcccgcu

SEQ ID NO: 2832261 - RNA, 19 nt, Artificial Sequence
  Description of Artificial Sequence: Synthetic oligonucleotide
ccuccagugugcgcuccgu

SEQ ID NO: 2832262 - RNA, 19 nt, Artificial Sequence
  Description of Artificial Sequence: Synthetic oligonucleotide
ccgccuucugcagcugccu

SEQ ID NO: 2832263 - RNA, 19 nt, Artificial Sequence
  Description of Artificial Sequence: Synthetic oligonucleotide
cccgcucagccgccugucu

SEQ ID NO: 2832264 - RNA, 19 nt, Artificial Sequence
  Description of Artificial Sequence: Synthetic oligonucleotide
cccugcacucccgcuugcu

SEQ ID NO: 2832265 - RNA, 19 nt, Artificial Sequence
  Description of Artificial Sequence: Synthetic oligonucleotide
gcacugcgccaagcuuccu

SEQ ID NO: 2832266 - RNA, 19 nt, Artificial Sequence
  Description of Artificial Sequence: Synthetic oligonucleotide
cgcaggcgcucaaccuccu

SEQ ID NO: 2832267 - RNA, 19 nt, Artificial Sequence
  Description of Artificial Sequence: Synthetic oligonucleotide
cgcucucagcuaccgccuu

SEQ ID NO: 2832268 - RNA, 19 nt, Artificial Sequence
  Description of Artificial Sequence: Synthetic oligonucleotide
cgguggccugcaggcuccu

SEQ ID NO: 2832269 - RNA, 19 nt, Artificial Sequence
  Description of Artificial Sequence: Synthetic oligonucleotide
cauacauaaaccagcaugg

SEQ ID NO: 2832270 - RNA, 19 nt, Artificial Sequence
  Description of Artificial Sequence: Synthetic oligonucleotide
aagagaaacaugaagacga

SEQ ID NO: 2832271 - RNA, 19 nt, Artificial Sequence
  Description of Artificial Sequence: Synthetic oligonucleotide
ugaagaagaagccgaaucc

SEQ ID NO: 2832272 - RNA, 19 nt, Artificial Sequence
  Description of Artificial Sequence: Synthetic oligonucleotide
ucuaggaaguaguagaugu

SEQ ID NO: 2832273 - RNA, 19 nt, Artificial Sequence
  Description of Artificial Sequence: Synthetic oligonucleotide
ucuucuaggaaguaguaga

SEQ ID NO: 2832274 - RNA, 19 nt, Artificial Sequence
  Description of Artificial Sequence: Synthetic oligonucleotide
cacaauaaucccuagcagg

SEQ ID NO: 2832275 - RNA, 19 nt, Artificial Sequence
  Description of Artificial Sequence: Synthetic oligonucleotide
gaaguaguagaugugaccc

SEQ ID NO: 2832276 - RNA, 19 nt, Artificial Sequence
  Description of Artificial Sequence: Synthetic oligonucleotide
aauaaucccuagcaggucu

SEQ ID NO: 2832277 - RNA, 19 nt, Artificial Sequence
  Description of Artificial Sequence: Synthetic oligonucleotide
ugaagcugcaguuagggcu

SEQ ID NO: 2832278 - RNA, 19 nt, Artificial Sequence
  Description of Artificial Sequence: Synthetic oligonucleotide
auugggguccuccugaggg

SEQ ID NO: 2832279 - RNA, 19 nt, Artificial Sequence
  Description of Artificial Sequence: Synthetic oligonucleotide
uacauaaaccagcauggcc

SEQ ID NO: 2832280 - RNA, 19 nt, Artificial Sequence
  Description of Artificial Sequence: Synthetic oligonucleotide
uagcggaacacgaagagca

SEQ ID NO: 2832281 - RNA, 19 nt, Artificial Sequence
  Description of Artificial Sequence: Synthetic oligonucleotide
gaagagaaacaugaagacg

SEQ ID NO: 2832282 - RNA, 19 nt, Artificial Sequence
  Description of Artificial Sequence: Synthetic oligonucleotide
aaucccaacagagucauga

SEQ ID NO: 2832283 - RNA, 19 nt, Artificial Sequence
  Description of Artificial Sequence: Synthetic oligonucleotide
aggaagguagugaugagcc

SEQ ID NO: 2832284 - RNA, 19 nt, Artificial Sequence
  Description of Artificial Sequence: Synthetic oligonucleotide
aacagagucaugagaacac

SEQ ID NO: 2832285 - RNA, 19 nt, Artificial Sequence
  Description of Artificial Sequence: Synthetic oligonucleotide
aagaggaagguagugauga

SEQ ID NO: 2832286 - RNA, 19 nt, Artificial Sequence
  Description of Artificial Sequence: Synthetic oligonucleotide
acgaagagcauguugaaga

SEQ ID NO: 2832287 - RNA, 19 nt, Artificial Sequence
  Description of Artificial Sequence: Synthetic oligonucleotide
uugaagaagaagccgaauc

SEQ ID NO: 2832288 - RNA, 19 nt, Artificial Sequence
  Description of Artificial Sequence: Synthetic oligonucleotide
aacacgaagagcauguuga

SEQ ID NO: 2832289 - RNA, 19 nt, Artificial Sequence
  Description of Artificial Sequence: Synthetic oligonucleotide
ucugugaggaccgaguugc

SEQ ID NO: 2832290 - RNA, 19 nt, Artificial Sequence
  Description of Artificial Sequence: Synthetic oligonucleotide
uccaguaguagcuucagaa

SEQ ID NO: 2832291 - RNA, 19 nt, Artificial Sequence
  Description of Artificial Sequence: Synthetic oligonucleotide
accagcauggccaugaggg

SEQ ID NO: 2832292 - RNA, 19 nt, Artificial Sequence
  Description of Artificial Sequence: Synthetic oligonucleotide
aagagcauguugaagaaga

SEQ ID NO: 2832293 - RNA, 19 nt, Artificial Sequence
  Description of Artificial Sequence: Synthetic oligonucleotide
accgaagagaaacaugaag

SEQ ID NO: 2832294 - RNA, 19 nt, Artificial Sequence
  Description of Artificial Sequence: Synthetic oligonucleotide
acgaagucggccuugcgac

SEQ ID NO: 2832295 - RNA, 19 nt, Artificial Sequence
  Description of Artificial Sequence: Synthetic oligonucleotide
caugagaacaccaccgaag

SEQ ID NO: 2832296 - RNA, 19 nt, Artificial Sequence
  Description of Artificial Sequence: Synthetic oligonucleotide
guagaugugacccacaaua

SEQ ID NO: 2832297 - RNA, 19 nt, Artificial Sequence
  Description of Artificial Sequence: Synthetic oligonucleotide
aaagaggcugcccaggaau

SEQ ID NO: 2832298 - RNA, 19 nt, Artificial Sequence
  Description of Artificial Sequence: Synthetic oligonucleotide
agaaacaugaagacgaagu

SEQ ID NO: 2832299 - RNA, 19 nt, Artificial Sequence
  Description of Artificial Sequence: Synthetic oligonucleotide
augugacccacaauaaucc

SEQ ID NO: 2832300 - RNA, 19 nt, Artificial Sequence
  Description of Artificial Sequence: Synthetic oligonucleotide
aucgagaagcccaugaggg

SEQ ID NO: 2832301 - RNA, 19 nt, Artificial Sequence
  Description of Artificial Sequence: Synthetic oligonucleotide
gaagaagccgaaucccagg

SEQ ID NO: 2832302 - RNA, 19 nt, Artificial Sequence
  Description of Artificial Sequence: Synthetic oligonucleotide
acauaaaccagcauggcca

SEQ ID NO: 2832303 - RNA, 19 nt, Artificial Sequence
  Description of Artificial Sequence: Synthetic oligonucleotide
ugggaaagacaucuucuag

SEQ ID NO: 2832304 - RNA, 19 nt, Artificial Sequence
  Description of Artificial Sequence: Synthetic oligonucleotide
uccagcaugcgacaguagc

SEQ ID NO: 2832305 - RNA, 19 nt, Artificial Sequence
  Description of Artificial Sequence: Synthetic oligonucleotide
caguaguagcuucagaaag

SEQ ID NO: 2832306 - RNA, 19 nt, Artificial Sequence
  Description of Artificial Sequence: Synthetic oligonucleotide
gaagccgaaucccaggggc

SEQ ID NO: 2832307 - RNA, 19 nt, Artificial Sequence
  Description of Artificial Sequence: Synthetic oligonucleotide
aagguagugaugagccucc

SEQ ID NO: 2832308 - RNA, 19 nt, Artificial Sequence
  Description of Artificial Sequence: Synthetic oligonucleotide
agucaugagaacaccaccg

SEQ ID NO: 2832309 - RNA, 19 nt, Artificial Sequence
  Description of Artificial Sequence: Synthetic oligonucleotide
acaguagcggaacacgaag

SEQ ID NO: 2832310 - RNA, 19 nt, Artificial Sequence
  Description of Artificial Sequence: Synthetic oligonucleotide
gggaaagacaucuucuagg

SEQ ID NO: 2832311 - RNA, 19 nt, Artificial Sequence
  Description of Artificial Sequence: Synthetic oligonucleotide
aguagcggaacacgaagag

SEQ ID NO: 2832312 - RNA, 19 nt, Artificial Sequence
  Description of Artificial Sequence: Synthetic oligonucleotide
gaugugacccacaauaauc

SEQ ID NO: 2832313 - RNA, 19 nt, Artificial Sequence
  Description of Artificial Sequence: Synthetic oligonucleotide
gaagaagaagccgaauccc

SEQ ID NO: 2832314 - RNA, 19 nt, Artificial Sequence
  Description of Artificial Sequence: Synthetic oligonucleotide
auaauugggguccuccuga

SEQ ID NO: 2832315 - RNA, 19 nt, Artificial Sequence
  Description of Artificial Sequence: Synthetic oligonucleotide
gauaauugggguccuccug

SEQ ID NO: 2832316 - RNA, 19 nt, Artificial Sequence
  Description of Artificial Sequence: Synthetic oligonucleotide
gaaggggcagauaauuggg

SEQ ID NO: 2832317 - RNA, 19 nt, Artificial Sequence
  Description of Artificial Sequence: Synthetic oligonucleotide
ucucuugccuccaggcugg

SEQ ID NO: 2832318 - RNA, 19 nt, Artificial Sequence
  Description of Artificial Sequence: Synthetic oligonucleotide
augaagacgaagucggccu

SEQ ID NO: 2832319 - RNA, 19 nt, Artificial Sequence
  Description of Artificial Sequence: Synthetic oligonucleotide
caucgagaagcccaugagg

SEQ ID NO: 2832320 - RNA, 19 nt, Artificial Sequence
  Description of Artificial Sequence: Synthetic oligonucleotide
ggaaggggcagauaauugg

SEQ ID NO: 2832321 - RNA, 19 nt, Artificial Sequence
  Description of Artificial Sequence: Synthetic oligonucleotide
augagaacaccaccgaaga

SEQ ID NO: 2832322 - RNA, 19 nt, Artificial Sequence
  Description of Artificial Sequence: Synthetic oligonucleotide
uaaaccagcauggccauga

SEQ ID NO: 2832323 - RNA, 19 nt, Artificial Sequence
  Description of Artificial Sequence: Synthetic oligonucleotide
acccacaauaaucccuagc

SEQ ID NO: 2832324 - RNA, 19 nt, Artificial Sequence
  Description of Artificial Sequence: Synthetic oligonucleotide
uaggaaguaguagauguga

SEQ ID NO: 2832325 - RNA, 19 nt, Artificial Sequence
  Description of Artificial Sequence: Synthetic oligonucleotide
gagucaugagaacaccacc

SEQ ID NO: 2832326 - RNA, 19 nt, Artificial Sequence
  Description of Artificial Sequence: Synthetic oligonucleotide
auacauaaaccagcauggc

SEQ ID NO: 2832327 - RNA, 19 nt, Artificial Sequence
  Description of Artificial Sequence: Synthetic oligonucleotide
cugucccaggaaaagaggc

SEQ ID NO: 2832328 - RNA, 19 nt, Artificial Sequence
  Description of Artificial Sequence: Synthetic oligonucleotide
gaacacgaagagcauguug

SEQ ID NO: 2832329 - RNA, 19 nt, Artificial Sequence
  Description of Artificial Sequence: Synthetic oligonucleotide
gagaacaccaccgaagaga

SEQ ID NO: 2832330 - RNA, 19 nt, Artificial Sequence
  Description of Artificial Sequence: Synthetic oligonucleotide
ccauacauaaaccagcaug

SEQ ID NO: 2832331 - RNA, 19 nt, Artificial Sequence
  Description of Artificial Sequence: Synthetic oligonucleotide
aaucccaggggcccaaaga

SEQ ID NO: 2832332 - RNA, 19 nt, Artificial Sequence
  Description of Artificial Sequence: Synthetic oligonucleotide
cuugccuccaggcugguug

SEQ ID NO: 2832333 - RNA, 19 nt, Artificial Sequence
  Description of Artificial Sequence: Synthetic oligonucleotide
gacaucuucuaggaaguag

SEQ ID NO: 2832334 - RNA, 19 nt, Artificial Sequence
  Description of Artificial Sequence: Synthetic oligonucleotide
gucagcagcagucucuugc

SEQ ID NO: 2832335 - RNA, 19 nt, Artificial Sequence
  Description of Artificial Sequence: Synthetic oligonucleotide
caggaaucccaacagaguc

SEQ ID NO: 2832336 - RNA, 19 nt, Artificial Sequence
  Description of Artificial Sequence: Synthetic oligonucleotide
uugcucuucuggaaggggc

SEQ ID NO: 2832337 - RNA, 19 nt, Artificial Sequence
  Description of Artificial Sequence: Synthetic oligonucleotide
ucauccaguaguagcuuca

SEQ ID NO: 2832338 - RNA, 19 nt, Artificial Sequence
  Description of Artificial Sequence: Synthetic oligonucleotide
acagagucaugagaacacc

SEQ ID NO: 2832339 - RNA, 19 nt, Artificial Sequence
  Description of Artificial Sequence: Synthetic oligonucleotide
guagugaugagccuccaga

SEQ ID NO: 2832340 - RNA, 19 nt, Artificial Sequence
  Description of Artificial Sequence: Synthetic oligonucleotide
acaauaaucccuagcaggu

SEQ ID NO: 2832341 - RNA, 19 nt, Artificial Sequence
  Description of Artificial Sequence: Synthetic oligonucleotide
aagacaucuucuaggaagu

SEQ ID NO: 2832342 - RNA, 19 nt, Artificial Sequence
  Description of Artificial Sequence: Synthetic oligonucleotide
uggaaggggcagauaauug

SEQ ID NO: 2832343 - RNA, 19 nt, Artificial Sequence
  Description of Artificial Sequence: Synthetic oligonucleotide
aagacgaagucggccuugc

SEQ ID NO: 2832344 - RNA, 19 nt, Artificial Sequence
  Description of Artificial Sequence: Synthetic oligonucleotide
aaccagcauggccaugagg

SEQ ID NO: 2832345 - RNA, 19 nt, Artificial Sequence
  Description of Artificial Sequence: Synthetic oligonucleotide
ucccuagcaggucugugag

SEQ ID NO: 2832346 - RNA, 19 nt, Artificial Sequence
  Description of Artificial Sequence: Synthetic oligonucleotide
ugagaacaccaccgaagag

SEQ ID NO: 2832347 - RNA, 19 nt, Artificial Sequence
  Description of Artificial Sequence: Synthetic oligonucleotide
aaguaguagaugugaccca

SEQ ID NO: 2832348 - RNA, 19 nt, Artificial Sequence
  Description of Artificial Sequence: Synthetic oligonucleotide
ugguugcucuucuggaagg

SEQ ID NO: 2832349 - RNA, 19 nt, Artificial Sequence
  Description of Artificial Sequence: Synthetic oligonucleotide
gcaguuagggcucugguug

SEQ ID NO: 2832350 - RNA, 19 nt, Artificial Sequence
  Description of Artificial Sequence: Synthetic oligonucleotide
ucagcagcagucucuugcc

SEQ ID NO: 2832351 - RNA, 19 nt, Artificial Sequence
  Description of Artificial Sequence: Synthetic oligonucleotide
agcagcagucucuugccuc

SEQ ID NO: 2832352 - RNA, 19 nt, Artificial Sequence
  Description of Artificial Sequence: Synthetic oligonucleotide
gaccgaguugcccagcagc

SEQ ID NO: 2832353 - RNA, 19 nt, Artificial Sequence
  Description of Artificial Sequence: Synthetic oligonucleotide
uaguagaugugacccacaa

SEQ ID NO: 2832354 - RNA, 19 nt, Artificial Sequence
  Description of Artificial Sequence: Synthetic oligonucleotide
ugugacccacaauaauccc

SEQ ID NO: 2832355 - RNA, 19 nt, Artificial Sequence
  Description of Artificial Sequence: Synthetic oligonucleotide
uagaugugacccacaauaa

SEQ ID NO: 2832356 - RNA, 19 nt, Artificial Sequence
  Description of Artificial Sequence: Synthetic oligonucleotide
aggacccucacaugaggcg

SEQ ID NO: 2832357 - RNA, 19 nt, Artificial Sequence
  Description of Artificial Sequence: Synthetic oligonucleotide
ugacccacaauaaucccua

SEQ ID NO: 2832358 - RNA, 19 nt, Artificial Sequence
  Description of Artificial Sequence: Synthetic oligonucleotide
ucacaugaggcgugcgccg

SEQ ID NO: 2832359 - RNA, 19 nt, Artificial Sequence
  Description of Artificial Sequence: Synthetic oligonucleotide
aaggaacccuccuccagca

SEQ ID NO: 2832360 - RNA, 19 nt, Artificial Sequence
  Description of Artificial Sequence: Synthetic oligonucleotide
aagaagaagccgaauccca

SEQ ID NO: 2832361 - RNA, 19 nt, Artificial Sequence
  Description of Artificial Sequence: Synthetic oligonucleotide
ucccaacagagucaugaga

SEQ ID NO: 2832362 - RNA, 19 nt, Artificial Sequence
  Description of Artificial Sequence: Synthetic oligonucleotide
ucaugagaacaccaccgaa

SEQ ID NO: 2832363 - RNA, 19 nt, Artificial Sequence
  Description of Artificial Sequence: Synthetic oligonucleotide
ggaaguaguagaugugacc

SEQ ID NO: 2832364 - RNA, 19 nt, Artificial Sequence
  Description of Artificial Sequence: Synthetic oligonucleotide
aaggggcagauaauugggg

SEQ ID NO: 2832365 - RNA, 19 nt, Artificial Sequence
  Description of Artificial Sequence: Synthetic oligonucleotide
gaggaagguagugaugagc

SEQ ID NO: 2832366 - RNA, 19 nt, Artificial Sequence
  Description of Artificial Sequence: Synthetic oligonucleotide
aggaaaagaggcugcccag

SEQ ID NO: 2832367 - RNA, 19 nt, Artificial Sequence
  Description of Artificial Sequence: Synthetic oligonucleotide
agauaauugggguccuccu

SEQ ID NO: 2832368 - RNA, 19 nt, Artificial Sequence
  Description of Artificial Sequence: Synthetic oligonucleotide
uagcuucagaaaguugggg

SEQ ID NO: 2832369 - RNA, 19 nt, Artificial Sequence
  Description of Artificial Sequence: Synthetic oligonucleotide
ggaaagacaucuucuagga

SEQ ID NO: 2832370 - RNA, 19 nt, Artificial Sequence
  Description of Artificial Sequence: Synthetic oligonucleotide
guagcuucagaaaguuggg

SEQ ID NO: 2832371 - RNA, 19 nt, Artificial Sequence
  Description of Artificial Sequence: Synthetic oligonucleotide
agcaucgagaagcccauga

SEQ ID NO: 2832372 - RNA, 19 nt, Artificial Sequence
  Description of Artificial Sequence: Synthetic oligonucleotide
aucuucuaggaaguaguag

SEQ ID NO: 2832373 - RNA, 19 nt, Artificial Sequence
  Description of Artificial Sequence: Synthetic oligonucleotide
aggaaguaguagaugugac

SEQ ID NO: 2832374 - RNA, 19 nt, Artificial Sequence
  Description of Artificial Sequence: Synthetic oligonucleotide
gagaaacaugaagacgaag

SEQ ID NO: 2832375 - RNA, 19 nt, Artificial Sequence
  Description of Artificial Sequence: Synthetic oligonucleotide
agaagccgaaucccagggg

SEQ ID NO: 2832376 - RNA, 19 nt, Artificial Sequence
  Description of Artificial Sequence: Synthetic oligonucleotide
gacgaagucggccuugcga

SEQ ID NO: 2832377 - RNA, 19 nt, Artificial Sequence
  Description of Artificial Sequence: Synthetic oligonucleotide
cuuacugcuccugaagcug

SEQ ID NO: 2832378 - RNA, 19 nt, Artificial Sequence
  Description of Artificial Sequence: Synthetic oligonucleotide
gaagagcauguugaagaag

SEQ ID NO: 2832379 - RNA, 19 nt, Artificial Sequence
  Description of Artificial Sequence: Synthetic oligonucleotide
aagccgaaucccaggggcc

SEQ ID NO: 2832380 - RNA, 19 nt, Artificial Sequence
  Description of Artificial Sequence: Synthetic oligonucleotide
uccugaagcugcaguuagg

SEQ ID NO: 2832381 - RNA, 19 nt, Artificial Sequence
  Description of Artificial Sequence: Synthetic oligonucleotide
cagauaauugggguccucc

SEQ ID NO: 2832382 - RNA, 19 nt, Artificial Sequence
  Description of Artificial Sequence: Synthetic oligonucleotide
gaaaagaggcugcccagga

SEQ ID NO: 2832383 - RNA, 19 nt, Artificial Sequence
  Description of Artificial Sequence: Synthetic oligonucleotide
aaaagaggcugcccaggaa

SEQ ID NO: 2832384 - RNA, 19 nt, Artificial Sequence
  Description of Artificial Sequence: Synthetic oligonucleotide
uucuaggaaguaguagaug

SEQ ID NO: 2832385 - RNA, 19 nt, Artificial Sequence
  Description of Artificial Sequence: Synthetic oligonucleotide
aguaguagcuucagaaagu

SEQ ID NO: 2832386 - RNA, 19 nt, Artificial Sequence
  Description of Artificial Sequence: Synthetic oligonucleotide
agaugugacccacaauaau

SEQ ID NO: 2832387 - RNA, 19 nt, Artificial Sequence
  Description of Artificial Sequence: Synthetic oligonucleotide
uaauugggguccuccugag

SEQ ID NO: 2832388 - RNA, 19 nt, Artificial Sequence
  Description of Artificial Sequence: Synthetic oligonucleotide
aagaggcugcccaggaauc

SEQ ID NO: 2832389 - RNA, 19 nt, Artificial Sequence
  Description of Artificial Sequence: Synthetic oligonucleotide
cagucucuugccuccaggc

SEQ ID NO: 2832390 - RNA, 19 nt, Artificial Sequence
  Description of Artificial Sequence: Synthetic oligonucleotide
ucugguugcucuucuggaa

SEQ ID NO: 2832391 - RNA, 19 nt, Artificial Sequence
  Description of Artificial Sequence: Synthetic oligonucleotide
aaaccagcauggccaugag

SEQ ID NO: 2832392 - RNA, 19 nt, Artificial Sequence
  Description of Artificial Sequence: Synthetic oligonucleotide
gaguugcccagcagcaucg

SEQ ID NO: 2832393 - RNA, 19 nt, Artificial Sequence
  Description of Artificial Sequence: Synthetic oligonucleotide
cucacaugaggcgugcgcc

SEQ ID NO: 2832394 - RNA, 19 nt, Artificial Sequence
  Description of Artificial Sequence: Synthetic oligonucleotide
ucgagaagcccaugagggc

SEQ ID NO: 2832395 - RNA, 19 nt, Artificial Sequence
  Description of Artificial Sequence: Synthetic oligonucleotide
ccgaagagaaacaugaaga

SEQ ID NO: 2832396 - RNA, 19 nt, Artificial Sequence
  Description of Artificial Sequence: Synthetic oligonucleotide
aagucggccuugcgacccc

SEQ ID NO: 2832397 - RNA, 19 nt, Artificial Sequence
  Description of Artificial Sequence: Synthetic oligonucleotide
agaggcugcccaggaaucc

SEQ ID NO: 2832398 - RNA, 19 nt, Artificial Sequence
  Description of Artificial Sequence: Synthetic oligonucleotide
aucccaacagagucaugag

SEQ ID NO: 2832399 - RNA, 19 nt, Artificial Sequence
  Description of Artificial Sequence: Synthetic oligonucleotide
cuccugaagcugcaguuag

SEQ ID NO: 2832400 - RNA, 19 nt, Artificial Sequence
  Description of Artificial Sequence: Synthetic oligonucleotide
agcagcaucgagaagccca

SEQ ID NO: 2832401 - RNA, 19 nt, Artificial Sequence
  Description of Artificial Sequence: Synthetic oligonucleotide
aucccuagcaggucuguga

SEQ ID NO: 2832402 - RNA, 19 nt, Artificial Sequence
  Description of Artificial Sequence: Synthetic oligonucleotide
uuagggcucugguugcucu

SEQ ID NO: 2832403 - RNA, 19 nt, Artificial Sequence
  Description of Artificial Sequence: Synthetic oligonucleotide
cuccauacauaaaccagca

SEQ ID NO: 2832404 - RNA, 19 nt, Artificial Sequence
  Description of Artificial Sequence: Synthetic oligonucleotide
caggaaaagaggcugccca

SEQ ID NO: 2832405 - RNA, 19 nt, Artificial Sequence
  Description of Artificial Sequence: Synthetic oligonucleotide
cagcaugcgacaguagcgg

SEQ ID NO: 2832406 - RNA, 19 nt, Artificial Sequence
  Description of Artificial Sequence: Synthetic oligonucleotide
ucccaggggcccaaagaag

SEQ ID NO: 2832407 - RNA, 19 nt, Artificial Sequence
  Description of Artificial Sequence: Synthetic oligonucleotide
caggacccucacaugaggc

SEQ ID NO: 2832408 - RNA, 19 nt, Artificial Sequence
  Description of Artificial Sequence: Synthetic oligonucleotide
gaagaggaagguagugaug

SEQ ID NO: 2832409 - RNA, 19 nt, Artificial Sequence
  Description of Artificial Sequence: Synthetic oligonucleotide
uugccuccaggcugguugg

SEQ ID NO: 2832410 - RNA, 19 nt, Artificial Sequence
  Description of Artificial Sequence: Synthetic oligonucleotide
agaggaagguagugaugag

SEQ ID NO: 2832411 - RNA, 19 nt, Artificial Sequence
  Description of Artificial Sequence: Synthetic oligonucleotide
aucccaggggcccaaagaa

SEQ ID NO: 2832412 - RNA, 19 nt, Artificial Sequence
  Description of Artificial Sequence: Synthetic oligonucleotide
gaagucggccuugcgaccc

SEQ ID NO: 2832413 - RNA, 19 nt, Artificial Sequence
  Description of Artificial Sequence: Synthetic oligonucleotide
aagcccaugagggcccagg

SEQ ID NO: 2832414 - RNA, 19 nt, Artificial Sequence
  Description of Artificial Sequence: Synthetic oligonucleotide
ugaggaccgaguugcccag

SEQ ID NO: 2832415 - RNA, 19 nt, Artificial Sequence
  Description of Artificial Sequence: Synthetic oligonucleotide
cugaagcugcaguuagggc

SEQ ID NO: 2832416 - RNA, 19 nt, Artificial Sequence
  Description of Artificial Sequence: Synthetic oligonucleotide
gaacccuccuccagcaugc

SEQ ID NO: 2832417 - RNA, 19 nt, Artificial Sequence
  Description of Artificial Sequence: Synthetic oligonucleotide
ugugaggaccgaguugccc

SEQ ID NO: 2832418 - RNA, 19 nt, Artificial Sequence
  Description of Artificial Sequence: Synthetic oligonucleotide
ugagggucauccaguagua

SEQ ID NO: 2832419 - RNA, 19 nt, Artificial Sequence
  Description of Artificial Sequence: Synthetic oligonucleotide
ggcccaaagaagaggaagg

SEQ ID NO: 2832420 - RNA, 19 nt, Artificial Sequence
  Description of Artificial Sequence: Synthetic oligonucleotide
gugaggaccgaguugccca

SEQ ID NO: 2832421 - RNA, 19 nt, Artificial Sequence
  Description of Artificial Sequence: Synthetic oligonucleotide
ugaggcgugcgccggcucc

SEQ ID NO: 2832422 - RNA, 19 nt, Artificial Sequence
  Description of Artificial Sequence: Synthetic oligonucleotide
ucuggaaggggcagauaau

SEQ ID NO: 2832423 - RNA, 19 nt, Artificial Sequence
  Description of Artificial Sequence: Synthetic oligonucleotide
ggcuuacugcuccugaagc

SEQ ID NO: 2832424 - RNA, 19 nt, Artificial Sequence
  Description of Artificial Sequence: Synthetic oligonucleotide
gaaucccaggggcccaaag

SEQ ID NO: 2832425 - RNA, 19 nt, Artificial Sequence
  Description of Artificial Sequence: Synthetic oligonucleotide
agccgaaucccaggggccc

SEQ ID NO: 2832426 - RNA, 19 nt, Artificial Sequence
  Description of Artificial Sequence: Synthetic oligonucleotide
acaugaggcgugcgccggc

SEQ ID NO: 2832427 - RNA, 19 nt, Artificial Sequence
  Description of Artificial Sequence: Synthetic oligonucleotide
agaacaccaccgaagagaa

SEQ ID NO: 2832428 - RNA, 19 nt, Artificial Sequence
  Description of Artificial Sequence: Synthetic oligonucleotide
guugcucuucuggaagggg

SEQ ID NO: 2832429 - RNA, 19 nt, Artificial Sequence
  Description of Artificial Sequence: Synthetic oligonucleotide
gcuccauacauaaaccagc

SEQ ID NO: 2832430 - RNA, 19 nt, Artificial Sequence
  Description of Artificial Sequence: Synthetic oligonucleotide
caacagagucaugagaaca

SEQ ID NO: 2832431 - RNA, 19 nt, Artificial Sequence
  Description of Artificial Sequence: Synthetic oligonucleotide
agucucuugccuccaggcu

SEQ ID NO: 2832432 - RNA, 19 nt, Artificial Sequence
  Description of Artificial Sequence: Synthetic oligonucleotide
cccaggaaucccaacagag

SEQ ID NO: 2832433 - RNA, 19 nt, Artificial Sequence
  Description of Artificial Sequence: Synthetic oligonucleotide
gguugggaaagacaucuuc

SEQ ID NO: 2832434 - RNA, 19 nt, Artificial Sequence
  Description of Artificial Sequence: Synthetic oligonucleotide
uccauacauaaaccagcau

SEQ ID NO: 2832435 - RNA, 19 nt, Artificial Sequence
  Description of Artificial Sequence: Synthetic oligonucleotide
gaaagacaucuucuaggaa

SEQ ID NO: 2832436 - RNA, 19 nt, Artificial Sequence
  Description of Artificial Sequence: Synthetic oligonucleotide
gcucugguugcucuucugg

SEQ ID NO: 2832437 - RNA, 19 nt, Artificial Sequence
  Description of Artificial Sequence: Synthetic oligonucleotide
ccagcaugcgacaguagcg

SEQ ID NO: 2832438 - RNA, 19 nt, Artificial Sequence
  Description of Artificial Sequence: Synthetic oligonucleotide
ugcaguuagggcucugguu

SEQ ID NO: 2832439 - RNA, 19 nt, Artificial Sequence
  Description of Artificial Sequence: Synthetic oligonucleotide
gucaugagaacaccaccga

SEQ ID NO: 2832440 - RNA, 19 nt, Artificial Sequence
  Description of Artificial Sequence: Synthetic oligonucleotide
ccaccgaagagaaacauga

SEQ ID NO: 2832441 - RNA, 19 nt, Artificial Sequence
  Description of Artificial Sequence: Synthetic oligonucleotide
caugcgacaguagcggaac

SEQ ID NO: 2832442 - RNA, 19 nt, Artificial Sequence
  Description of Artificial Sequence: Synthetic oligonucleotide
aguagaugugacccacaau

SEQ ID NO: 2832443 - RNA, 19 nt, Artificial Sequence
  Description of Artificial Sequence: Synthetic oligonucleotide
guagcggaacacgaagagc

SEQ ID NO: 2832444 - RNA, 19 nt, Artificial Sequence
  Description of Artificial Sequence: Synthetic oligonucleotide
cgaagagaaacaugaagac

SEQ ID NO: 2832445 - RNA, 19 nt, Artificial Sequence
  Description of Artificial Sequence: Synthetic oligonucleotide
gccggcuccauacauaaac

SEQ ID NO: 2832446 - RNA, 19 nt, Artificial Sequence
  Description of Artificial Sequence: Synthetic oligonucleotide
cccacaauaaucccuagca

SEQ ID NO: 2832447 - RNA, 19 nt, Artificial Sequence
  Description of Artificial Sequence: Synthetic oligonucleotide
aaucccuagcaggucugug

SEQ ID NO: 2832448 - RNA, 19 nt, Artificial Sequence
  Description of Artificial Sequence: Synthetic oligonucleotide
caguuagggcucugguugc

SEQ ID NO: 2832449 - RNA, 19 nt, Artificial Sequence
  Description of Artificial Sequence: Synthetic oligonucleotide
gcauguugaagaagaagcc

SEQ ID NO: 2832450 - RNA, 19 nt, Artificial Sequence
  Description of Artificial Sequence: Synthetic oligonucleotide
ggaaaagaggcugcccagg

SEQ ID NO: 2832451 - RNA, 19 nt, Artificial Sequence
  Description of Artificial Sequence: Synthetic oligonucleotide
ggcuccauacauaaaccag

SEQ ID NO: 2832452 - RNA, 19 nt, Artificial Sequence
  Description of Artificial Sequence: Synthetic oligonucleotide
cagagucaugagaacacca

SEQ ID NO: 2832453 - RNA, 19 nt, Artificial Sequence
  Description of Artificial Sequence: Synthetic oligonucleotide
cacgaagagcauguugaag

SEQ ID NO: 2832454 - RNA, 19 nt, Artificial Sequence
  Description of Artificial Sequence: Synthetic oligonucleotide
ccugaagcugcaguuaggg

SEQ ID NO: 2832455 - RNA, 19 nt, Artificial Sequence
  Description of Artificial Sequence: Synthetic oligonucleotide
gucugugaggaccgaguug

SEQ ID NO: 2832456 - RNA, 19 nt, Artificial Sequence
  Description of Artificial Sequence: Synthetic oligonucleotide
cagcauggccaugagggcc

SEQ ID NO: 2832457 - RNA, 19 nt, Artificial Sequence
  Description of Artificial Sequence: Synthetic oligonucleotide
ugcgacaguagcggaacac

SEQ ID NO: 2832458 - RNA, 19 nt, Artificial Sequence
  Description of Artificial Sequence: Synthetic oligonucleotide
cugagggucauccaguagu

SEQ ID NO: 2832459 - RNA, 19 nt, Artificial Sequence
  Description of Artificial Sequence: Synthetic oligonucleotide
gaagacgaagucggccuug

SEQ ID NO: 2832460 - RNA, 19 nt, Artificial Sequence
  Description of Artificial Sequence: Synthetic oligonucleotide
ugaagacgaagucggccuu

SEQ ID NO: 2832461 - RNA, 19 nt, Artificial Sequence
  Description of Artificial Sequence: Synthetic oligonucleotide
ggaacccuccuccagcaug

SEQ ID NO: 2832462 - RNA, 19 nt, Artificial Sequence
  Description of Artificial Sequence: Synthetic oligonucleotide
gucauccaguaguagcuuc

SEQ ID NO: 2832463 - RNA, 19 nt, Artificial Sequence
  Description of Artificial Sequence: Synthetic oligonucleotide
augagggccugucccagga

SEQ ID NO: 2832464 - RNA, 19 nt, Artificial Sequence
  Description of Artificial Sequence: Synthetic oligonucleotide
auggccaugagggccuguc

SEQ ID NO: 2832465 - RNA, 19 nt, Artificial Sequence
  Description of Artificial Sequence: Synthetic oligonucleotide
gagaagcccaugagggccc

SEQ ID NO: 2832466 - RNA, 19 nt, Artificial Sequence
  Description of Artificial Sequence: Synthetic oligonucleotide
aggaaucccaacagaguca

SEQ ID NO: 2832467 - RNA, 19 nt, Artificial Sequence
  Description of Artificial Sequence: Synthetic oligonucleotide
guugggaaagacaucuucu

SEQ ID NO: 2832468 - RNA, 19 nt, Artificial Sequence
  Description of Artificial Sequence: Synthetic oligonucleotide
uccuccagcaugcgacagu

SEQ ID NO: 2832469 - RNA, 19 nt, Artificial Sequence
  Description of Artificial Sequence: Synthetic oligonucleotide
gacccacaauaaucccuag

SEQ ID NO: 2832470 - RNA, 19 nt, Artificial Sequence
  Description of Artificial Sequence: Synthetic oligonucleotide
gcaucgagaagcccaugag

SEQ ID NO: 2832471 - RNA, 19 nt, Artificial Sequence
  Description of Artificial Sequence: Synthetic oligonucleotide
ugggcuuacugcuccugaa

SEQ ID NO: 2832472 - RNA, 19 nt, Artificial Sequence
  Description of Artificial Sequence: Synthetic oligonucleotide
agacgaagucggccuugcg

SEQ ID NO: 2832473 - RNA, 19 nt, Artificial Sequence
  Description of Artificial Sequence: Synthetic oligonucleotide
acacgaagagcauguugaa

SEQ ID NO: 2832474 - RNA, 19 nt, Artificial Sequence
  Description of Artificial Sequence: Synthetic oligonucleotide
gagggcccagggcaggacc

SEQ ID NO: 2832475 - RNA, 19 nt, Artificial Sequence
  Description of Artificial Sequence: Synthetic oligonucleotide
caugagggccugucccagg

SEQ ID NO: 2832476 - RNA, 19 nt, Artificial Sequence
  Description of Artificial Sequence: Synthetic oligonucleotide
auaaucccuagcaggucug

SEQ ID NO: 2832477 - RNA, 19 nt, Artificial Sequence
  Description of Artificial Sequence: Synthetic oligonucleotide
cauccaguaguagcuucag

SEQ ID NO: 2832478 - RNA, 19 nt, Artificial Sequence
  Description of Artificial Sequence: Synthetic oligonucleotide
uggccaugagggccugucc

SEQ ID NO: 2832479 - RNA, 19 nt, Artificial Sequence
  Description of Artificial Sequence: Synthetic oligonucleotide
cccaacagagucaugagaa

SEQ ID NO: 2832480 - RNA, 19 nt, Artificial Sequence
  Description of Artificial Sequence: Synthetic oligonucleotide
cugguugggaaagacaucu

SEQ ID NO: 2832481 - RNA, 19 nt, Artificial Sequence
  Description of Artificial Sequence: Synthetic oligonucleotide
ccacaauaaucccuagcag

SEQ ID NO: 2832482 - RNA, 19 nt, Artificial Sequence
  Description of Artificial Sequence: Synthetic oligonucleotide
uacugcuccugaagcugca

SEQ ID NO: 2832483 - RNA, 19 nt, Artificial Sequence
  Description of Artificial Sequence: Synthetic oligonucleotide
accaccgaagagaaacaug

SEQ ID NO: 2832484 - RNA, 19 nt, Artificial Sequence
  Description of Artificial Sequence: Synthetic oligonucleotide
caguagcggaacacgaaga

SEQ ID NO: 2832485 - RNA, 19 nt, Artificial Sequence
  Description of Artificial Sequence: Synthetic oligonucleotide
ggccuugcgaccccggaag

SEQ ID NO: 2832486 - RNA, 19 nt, Artificial Sequence
  Description of Artificial Sequence: Synthetic oligonucleotide
cucugguugcucuucugga

SEQ ID NO: 2832487 - RNA, 19 nt, Artificial Sequence
  Description of Artificial Sequence: Synthetic oligonucleotide
caggggcccaaagaagagg

SEQ ID NO: 2832488 - RNA, 19 nt, Artificial Sequence
  Description of Artificial Sequence: Synthetic oligonucleotide
gcaggacccucacaugagg

SEQ ID NO: 2832489 - RNA, 19 nt, Artificial Sequence
  Description of Artificial Sequence: Synthetic oligonucleotide
agcaugcgacaguagcgga

SEQ ID NO: 2832490 - RNA, 19 nt, Artificial Sequence
  Description of Artificial Sequence: Synthetic oligonucleotide
auccaguaguagcuucaga

SEQ ID NO: 2832491 - RNA, 19 nt, Artificial Sequence
  Description of Artificial Sequence: Synthetic oligonucleotide
gaggcugcccaggaauccc

SEQ ID NO: 2832492 - RNA, 19 nt, Artificial Sequence
  Description of Artificial Sequence: Synthetic oligonucleotide
gcgacaguagcggaacacg

SEQ ID NO: 2832493 - RNA, 19 nt, Artificial Sequence
  Description of Artificial Sequence: Synthetic oligonucleotide
ggccaugagggccuguccc

SEQ ID NO: 2832494 - RNA, 19 nt, Artificial Sequence
  Description of Artificial Sequence: Synthetic oligonucleotide
ccugucccaggaaaagagg

SEQ ID NO: 2832495 - RNA, 19 nt, Artificial Sequence
  Description of Artificial Sequence: Synthetic oligonucleotide
caaagaagaggaagguagu

SEQ ID NO: 2832496 - RNA, 19 nt, Artificial Sequence
  Description of Artificial Sequence: Synthetic oligonucleotide
caauaaucccuagcagguc

SEQ ID NO: 2832497 - RNA, 19 nt, Artificial Sequence
  Description of Artificial Sequence: Synthetic oligonucleotide
gguagugaugagccuccag

SEQ ID NO: 2832498 - RNA, 19 nt, Artificial Sequence
  Description of Artificial Sequence: Synthetic oligonucleotide
aggaccgaguugcccagca

SEQ ID NO: 2832499 - RNA, 19 nt, Artificial Sequence
  Description of Artificial Sequence: Synthetic oligonucleotide
uccugagggucauccagua

SEQ ID NO: 2832500 - RNA, 19 nt, Artificial Sequence
  Description of Artificial Sequence: Synthetic oligonucleotide
uugggguccuccugagggu

SEQ ID NO: 2832501 - RNA, 19 nt, Artificial Sequence
  Description of Artificial Sequence: Synthetic oligonucleotide
agggcccagggcaggaccc

SEQ ID NO: 2832502 - RNA, 19 nt, Artificial Sequence
  Description of Artificial Sequence: Synthetic oligonucleotide
ccggaaggaacccuccucc

SEQ ID NO: 2832503 - RNA, 19 nt, Artificial Sequence
  Description of Artificial Sequence: Synthetic oligonucleotide
cacaugaggcgugcgccgg

SEQ ID NO: 2832504 - RNA, 19 nt, Artificial Sequence
  Description of Artificial Sequence: Synthetic oligonucleotide
gacaguagcggaacacgaa

SEQ ID NO: 2832505 - RNA, 19 nt, Artificial Sequence
  Description of Artificial Sequence: Synthetic oligonucleotide
acccucacaugaggcgugc

SEQ ID NO: 2832506 - RNA, 19 nt, Artificial Sequence
  Description of Artificial Sequence: Synthetic oligonucleotide
gguugcucuucuggaaggg

SEQ ID NO: 2832507 - RNA, 19 nt, Artificial Sequence
  Description of Artificial Sequence: Synthetic oligonucleotide
gagggccugucccaggaaa

SEQ ID NO: 2832508 - RNA, 19 nt, Artificial Sequence
  Description of Artificial Sequence: Synthetic oligonucleotide
uaaucccuagcaggucugu

SEQ ID NO: 2832509 - RNA, 19 nt, Artificial Sequence
  Description of Artificial Sequence: Synthetic oligonucleotide
agagaaacaugaagacgaa

SEQ ID NO: 2832510 - RNA, 19 nt, Artificial Sequence
  Description of Artificial Sequence: Synthetic oligonucleotide
cuucuaggaaguaguagau

SEQ ID NO: 2832511 - RNA, 19 nt, Artificial Sequence
  Description of Artificial Sequence: Synthetic oligonucleotide
cccuccuccagcaugcgac

SEQ ID NO: 2832512 - RNA, 19 nt, Artificial Sequence
  Description of Artificial Sequence: Synthetic oligonucleotide
agggcucugguugcucuuc

SEQ ID NO: 2832513 - RNA, 19 nt, Artificial Sequence
  Description of Artificial Sequence: Synthetic oligonucleotide
ccggcuccauacauaaacc

SEQ ID NO: 2832514 - RNA, 19 nt, Artificial Sequence
  Description of Artificial Sequence: Synthetic oligonucleotide
gccugucccaggaaaagag

SEQ ID NO: 2832515 - RNA, 19 nt, Artificial Sequence
  Description of Artificial Sequence: Synthetic oligonucleotide
uccuccugagggucaucca

SEQ ID NO: 2832516 - RNA, 19 nt, Artificial Sequence
  Description of Artificial Sequence: Synthetic oligonucleotide
ccuccugagggucauccag

SEQ ID NO: 2832517 - RNA, 19 nt, Artificial Sequence
  Description of Artificial Sequence: Synthetic oligonucleotide
accgaguugcccagcagca

SEQ ID NO: 2832518 - RNA, 19 nt, Artificial Sequence
  Description of Artificial Sequence: Synthetic oligonucleotide
caucuucuaggaaguagua

SEQ ID NO: 2832519 - RNA, 19 nt, Artificial Sequence
  Description of Artificial Sequence: Synthetic oligonucleotide
aggucugugaggaccgagu

SEQ ID NO: 2832520 - RNA, 19 nt, Artificial Sequence
  Description of Artificial Sequence: Synthetic oligonucleotide
ucggccuugcgaccccgga

SEQ ID NO: 2832521 - RNA, 19 nt, Artificial Sequence
  Description of Artificial Sequence: Synthetic oligonucleotide
ccaacagagucaugagaac

SEQ ID NO: 2832522 - RNA, 19 nt, Artificial Sequence
  Description of Artificial Sequence: Synthetic oligonucleotide
caugagggcccagggcagg

SEQ ID NO: 2832523 - RNA, 19 nt, Artificial Sequence
  Description of Artificial Sequence: Synthetic oligonucleotide
ugcgccggcuccauacaua

SEQ ID NO: 2832524 - RNA, 19 nt, Artificial Sequence
  Description of Artificial Sequence: Synthetic oligonucleotide
gggcaggacccucacauga

SEQ ID NO: 2832525 - RNA, 19 nt, Artificial Sequence
  Description of Artificial Sequence: Synthetic oligonucleotide
caggcugguugggaaagac

SEQ ID NO: 2832526 - RNA, 19 nt, Artificial Sequence
  Description of Artificial Sequence: Synthetic oligonucleotide
aacccuccuccagcaugcg

SEQ ID NO: 2832527 - RNA, 19 nt, Artificial Sequence
  Description of Artificial Sequence: Synthetic oligonucleotide
accccggaaggaacccucc

SEQ ID NO: 2832528 - RNA, 19 nt, Artificial Sequence
  Description of Artificial Sequence: Synthetic oligonucleotide
gcugcaguuagggcucugg

SEQ ID NO: 2832529 - RNA, 19 nt, Artificial Sequence
  Description of Artificial Sequence: Synthetic oligonucleotide
cugugaggaccgaguugcc

SEQ ID NO: 2832530 - RNA, 19 nt, Artificial Sequence
  Description of Artificial Sequence: Synthetic oligonucleotide
agagcauguugaagaagaa

SEQ ID NO: 2832531 - RNA, 19 nt, Artificial Sequence
  Description of Artificial Sequence: Synthetic oligonucleotide
augaggcgugcgccggcuc

SEQ ID NO: 2832532 - RNA, 19 nt, Artificial Sequence
  Description of Artificial Sequence: Synthetic oligonucleotide
gacccucacaugaggcgug

SEQ ID NO: 2832533 - RNA, 19 nt, Artificial Sequence
  Description of Artificial Sequence: Synthetic oligonucleotide
gugggcuuacugcuccuga

SEQ ID NO: 2832534 - RNA, 19 nt, Artificial Sequence
  Description of Artificial Sequence: Synthetic oligonucleotide
auaaaccagcauggccaug

SEQ ID NO: 2832535 - RNA, 19 nt, Artificial Sequence
  Description of Artificial Sequence: Synthetic oligonucleotide
cgagaagcccaugagggcc

SEQ ID NO: 2832536 - RNA, 19 nt, Artificial Sequence
  Description of Artificial Sequence: Synthetic oligonucleotide
ccucacaugaggcgugcgc

SEQ ID NO: 2832537 - RNA, 19 nt, Artificial Sequence
  Description of Artificial Sequence: Synthetic oligonucleotide
ccuagcaggucugugagga

SEQ ID NO: 2832538 - RNA, 19 nt, Artificial Sequence
  Description of Artificial Sequence: Synthetic oligonucleotide
cccaugagggcccagggca

SEQ ID NO: 2832539 - RNA, 19 nt, Artificial Sequence
  Description of Artificial Sequence: Synthetic oligonucleotide
gugacccacaauaaucccu

SEQ ID NO: 2832540 - RNA, 19 nt, Artificial Sequence
  Description of Artificial Sequence: Synthetic oligonucleotide
ugagggccugucccaggaa

SEQ ID NO: 2832541 - RNA, 19 nt, Artificial Sequence
  Description of Artificial Sequence: Synthetic oligonucleotide
acaccaccgaagagaaaca

SEQ ID NO: 2832542 - RNA, 19 nt, Artificial Sequence
  Description of Artificial Sequence: Synthetic oligonucleotide
augcgacaguagcggaaca

SEQ ID NO: 2832543 - RNA, 19 nt, Artificial Sequence
  Description of Artificial Sequence: Synthetic oligonucleotide
guaguagcuucagaaaguu

SEQ ID NO: 2832544 - RNA, 19 nt, Artificial Sequence
  Description of Artificial Sequence: Synthetic oligonucleotide
ugggguccuccugaggguc

SEQ ID NO: 2832545 - RNA, 19 nt, Artificial Sequence
  Description of Artificial Sequence: Synthetic oligonucleotide
cuugcgaccccggaaggaa

SEQ ID NO: 2832546 - RNA, 19 nt, Artificial Sequence
  Description of Artificial Sequence: Synthetic oligonucleotide
caggucugugaggaccgag

SEQ ID NO: 2832547 - RNA, 19 nt, Artificial Sequence
  Description of Artificial Sequence: Synthetic oligonucleotide
cauaaaccagcauggccau

SEQ ID NO: 2832548 - RNA, 19 nt, Artificial Sequence
  Description of Artificial Sequence: Synthetic oligonucleotide
ccaguaguagcuucagaaa

SEQ ID NO: 2832549 - RNA, 19 nt, Artificial Sequence
  Description of Artificial Sequence: Synthetic oligonucleotide
aggcugguugggaaagaca

SEQ ID NO: 2832550 - RNA, 19 nt, Artificial Sequence
  Description of Artificial Sequence: Synthetic oligonucleotide
gaccccggaaggaacccuc

SEQ ID NO: 2832551 - RNA, 19 nt, Artificial Sequence
  Description of Artificial Sequence: Synthetic oligonucleotide
cccaggggcccaaagaaga

SEQ ID NO: 2832552 - RNA, 19 nt, Artificial Sequence
  Description of Artificial Sequence: Synthetic oligonucleotide
gaaucccaacagagucaug

SEQ ID NO: 2832553 - RNA, 19 nt, Artificial Sequence
  Description of Artificial Sequence: Synthetic oligonucleotide
acccuccuccagcaugcga

SEQ ID NO: 2832554 - RNA, 19 nt, Artificial Sequence
  Description of Artificial Sequence: Synthetic oligonucleotide
caccgaagagaaacaugaa

SEQ ID NO: 2832555 - RNA, 19 nt, Artificial Sequence
  Description of Artificial Sequence: Synthetic oligonucleotide
ggcaggacccucacaugag

SEQ ID NO: 2832556 - RNA, 19 nt, Artificial Sequence
  Description of Artificial Sequence: Synthetic oligonucleotide
cuccuccagcaugcgacag

SEQ ID NO: 2832557 - RNA, 19 nt, Artificial Sequence
  Description of Artificial Sequence: Synthetic oligonucleotide
ccaggggcccaaagaagag

SEQ ID NO: 2832558 - RNA, 19 nt, Artificial Sequence
  Description of Artificial Sequence: Synthetic oligonucleotide
uagggcucugguugcucuu

SEQ ID NO: 2832559 - RNA, 19 nt, Artificial Sequence
  Description of Artificial Sequence: Synthetic oligonucleotide
ggcugguugggaaagacau

SEQ ID NO: 2832560 - RNA, 19 nt, Artificial Sequence
  Description of Artificial Sequence: Synthetic oligonucleotide
agucggccuugcgaccccg

SEQ ID NO: 2832561 - RNA, 19 nt, Artificial Sequence
  Description of Artificial Sequence: Synthetic oligonucleotide
ccaggaaaagaggcugccc

SEQ ID NO: 2832562 - RNA, 19 nt, Artificial Sequence
  Description of Artificial Sequence: Synthetic oligonucleotide
ugccuccaggcugguuggg

SEQ ID NO: 2832563 - RNA, 19 nt, Artificial Sequence
  Description of Artificial Sequence: Synthetic oligonucleotide
gcuuacugcuccugaagcu

SEQ ID NO: 2832564 - RNA, 19 nt, Artificial Sequence
  Description of Artificial Sequence: Synthetic oligonucleotide
gcggaacacgaagagcaug

SEQ ID NO: 2832565 - RNA, 19 nt, Artificial Sequence
  Description of Artificial Sequence: Synthetic oligonucleotide
aagcugcaguuagggcucu

SEQ ID NO: 2832566 - RNA, 19 nt, Artificial Sequence
  Description of Artificial Sequence: Synthetic oligonucleotide
guugaagaagaagccgaau

SEQ ID NO: 2832567 - RNA, 19 nt, Artificial Sequence
  Description of Artificial Sequence: Synthetic oligonucleotide
ggaccgaguugcccagcag

SEQ ID NO: 2832568 - RNA, 19 nt, Artificial Sequence
  Description of Artificial Sequence: Synthetic oligonucleotide
ccaugagggcccagggcag

SEQ ID NO: 2832569 - RNA, 19 nt, Artificial Sequence
  Description of Artificial Sequence: Synthetic oligonucleotide
agacaucuucuaggaagua

SEQ ID NO: 2832570 - RNA, 19 nt, Artificial Sequence
  Description of Artificial Sequence: Synthetic oligonucleotide
gccuugcgaccccggaagg

SEQ ID NO: 2832571 - RNA, 19 nt, Artificial Sequence
  Description of Artificial Sequence: Synthetic oligonucleotide
gggccugucccaggaaaag

SEQ ID NO: 2832572 - RNA, 19 nt, Artificial Sequence
  Description of Artificial Sequence: Synthetic oligonucleotide
gcgugcgccggcuccauac

SEQ ID NO: 2832573 - RNA, 19 nt, Artificial Sequence
  Description of Artificial Sequence: Synthetic oligonucleotide
aggaacccuccuccagcau

SEQ ID NO: 2832574 - RNA, 19 nt, Artificial Sequence
  Description of Artificial Sequence: Synthetic oligonucleotide
cuccugagggucauccagu

SEQ ID NO: 2832575 - RNA, 19 nt, Artificial Sequence
  Description of Artificial Sequence: Synthetic oligonucleotide
gaggaccgaguugcccagc

SEQ ID NO: 2832576 - RNA, 19 nt, Artificial Sequence
  Description of Artificial Sequence: Synthetic oligonucleotide
ccugagggucauccaguag

SEQ ID NO: 2832577 - RNA, 19 nt, Artificial Sequence
  Description of Artificial Sequence: Synthetic oligonucleotide
gcucuucuggaaggggcag

SEQ ID NO: 2832578 - RNA, 19 nt, Artificial Sequence
  Description of Artificial Sequence: Synthetic oligonucleotide
ugagggcccagggcaggac

SEQ ID NO: 2832579 - RNA, 19 nt, Artificial Sequence
  Description of Artificial Sequence: Synthetic oligonucleotide
ggaaucccaacagagucau

SEQ ID NO: 2832580 - RNA, 19 nt, Artificial Sequence
  Description of Artificial Sequence: Synthetic oligonucleotide
cuggaaggggcagauaauu

SEQ ID NO: 2832581 - RNA, 19 nt, Artificial Sequence
  Description of Artificial Sequence: Synthetic oligonucleotide
agggccugucccaggaaaa

SEQ ID NO: 2832582 - RNA, 19 nt, Artificial Sequence
  Description of Artificial Sequence: Synthetic oligonucleotide
cagcagcaucgagaagccc

SEQ ID NO: 2832583 - RNA, 19 nt, Artificial Sequence
  Description of Artificial Sequence: Synthetic oligonucleotide
agcggaacacgaagagcau

SEQ ID NO: 2832584 - RNA, 19 nt, Artificial Sequence
  Description of Artificial Sequence: Synthetic oligonucleotide
augagggcccagggcagga

SEQ ID NO: 2832585 - RNA, 19 nt, Artificial Sequence
  Description of Artificial Sequence: Synthetic oligonucleotide
cgaguugcccagcagcauc

SEQ ID NO: 2832586 - RNA, 19 nt, Artificial Sequence
  Description of Artificial Sequence: Synthetic oligonucleotide
cccuagcaggucugugagg

SEQ ID NO: 2832587 - RNA, 19 nt, Artificial Sequence
  Description of Artificial Sequence: Synthetic oligonucleotide
aguugcccagcagcaucga

SEQ ID NO: 2832588 - RNA, 19 nt, Artificial Sequence
  Description of Artificial Sequence: Synthetic oligonucleotide
agguagugaugagccucca

SEQ ID NO: 2832589 - RNA, 19 nt, Artificial Sequence
  Description of Artificial Sequence: Synthetic oligonucleotide
ggaagguagugaugagccu

SEQ ID NO: 2832590 - RNA, 19 nt, Artificial Sequence
  Description of Artificial Sequence: Synthetic oligonucleotide
agaagcccaugagggccca

SEQ ID NO: 2832591 - RNA, 19 nt, Artificial Sequence
  Description of Artificial Sequence: Synthetic oligonucleotide
aggcugcccaggaauccca

SEQ ID NO: 2832592 - RNA, 19 nt, Artificial Sequence
  Description of Artificial Sequence: Synthetic oligonucleotide
cugcaguuagggcucuggu

SEQ ID NO: 2832593 - RNA, 19 nt, Artificial Sequence
  Description of Artificial Sequence: Synthetic oligonucleotide
cccggaaggaacccuccuc

SEQ ID NO: 2832594 - RNA, 19 nt, Artificial Sequence
  Description of Artificial Sequence: Synthetic oligonucleotide
gcgccggcuccauacauaa

SEQ ID NO: 2832595 - RNA, 19 nt, Artificial Sequence
  Description of Artificial Sequence: Synthetic oligonucleotide
gucggccuugcgaccccgg

SEQ ID NO: 2832596 - RNA, 19 nt, Artificial Sequence
  Description of Artificial Sequence: Synthetic oligonucleotide
ggucagcagcagucucuug

SEQ ID NO: 2832597 - RNA, 19 nt, Artificial Sequence
  Description of Artificial Sequence: Synthetic oligonucleotide
cgaagagcauguugaagaa

SEQ ID NO: 2832598 - RNA, 19 nt, Artificial Sequence
  Description of Artificial Sequence: Synthetic oligonucleotide
gcugguugggaaagacauc

SEQ ID NO: 2832599 - RNA, 19 nt, Artificial Sequence
  Description of Artificial Sequence: Synthetic oligonucleotide
cgaagucggccuugcgacc

SEQ ID NO: 2832600 - RNA, 19 nt, Artificial Sequence
  Description of Artificial Sequence: Synthetic oligonucleotide
ccaggaaucccaacagagu

SEQ ID NO: 2832601 - RNA, 19 nt, Artificial Sequence
  Description of Artificial Sequence: Synthetic oligonucleotide
cgacaguagcggaacacga

SEQ ID NO: 2832602 - RNA, 19 nt, Artificial Sequence
  Description of Artificial Sequence: Synthetic oligonucleotide
gaggcgugcgccggcucca

SEQ ID NO: 2832603 - RNA, 19 nt, Artificial Sequence
  Description of Artificial Sequence: Synthetic oligonucleotide
ggccugucccaggaaaaga

SEQ ID NO: 2832604 - RNA, 19 nt, Artificial Sequence
  Description of Artificial Sequence: Synthetic oligonucleotide
ccaugagggccugucccag

SEQ ID NO: 2832605 - RNA, 19 nt, Artificial Sequence
  Description of Artificial Sequence: Synthetic oligonucleotide
cggcuccauacauaaacca

SEQ ID NO: 2832606 - RNA, 19 nt, Artificial Sequence
  Description of Artificial Sequence: Synthetic oligonucleotide
ggacccucacaugaggcgu

SEQ ID NO: 2832607 - RNA, 19 nt, Artificial Sequence
  Description of Artificial Sequence: Synthetic oligonucleotide
ggucugugaggaccgaguu

SEQ ID NO: 2832608 - RNA, 19 nt, Artificial Sequence
  Description of Artificial Sequence: Synthetic oligonucleotide
gcaugcgacaguagcggaa

SEQ ID NO: 2832609 - RNA, 19 nt, Artificial Sequence
  Description of Artificial Sequence: Synthetic oligonucleotide
cagcaucgagaagcccaug

SEQ ID NO: 2832610 - RNA, 19 nt, Artificial Sequence
  Description of Artificial Sequence: Synthetic oligonucleotide
cggaacacgaagagcaugu

SEQ ID NO: 2832611 - RNA, 19 nt, Artificial Sequence
  Description of Artificial Sequence: Synthetic oligonucleotide
ucuugccuccaggcugguu

SEQ ID NO: 2832612 - RNA, 19 nt, Artificial Sequence
  Description of Artificial Sequence: Synthetic oligonucleotide
agcugcaguuagggcucug

SEQ ID NO: 2832613 - RNA, 19 nt, Artificial Sequence
  Description of Artificial Sequence: Synthetic oligonucleotide
gcagauaauugggguccuc

SEQ ID NO: 2832614 - RNA, 19 nt, Artificial Sequence
  Description of Artificial Sequence: Synthetic oligonucleotide
gcuccugaagcugcaguua

SEQ ID NO: 2832615 - RNA, 19 nt, Artificial Sequence
  Description of Artificial Sequence: Synthetic oligonucleotide
cccaaagaagaggaaggua

SEQ ID NO: 2832616 - RNA, 19 nt, Artificial Sequence
  Description of Artificial Sequence: Synthetic oligonucleotide
ccuccaggcugguugggaa

SEQ ID NO: 2832617 - RNA, 19 nt, Artificial Sequence
  Description of Artificial Sequence: Synthetic oligonucleotide
caccaccgaagagaaacau

SEQ ID NO: 2832618 - RNA, 19 nt, Artificial Sequence
  Description of Artificial Sequence: Synthetic oligonucleotide
gcgaccccggaaggaaccc

SEQ ID NO: 2832619 - RNA, 19 nt, Artificial Sequence
  Description of Artificial Sequence: Synthetic oligonucleotide
cagcagcagucucuugccu

SEQ ID NO: 2832620 - RNA, 19 nt, Artificial Sequence
  Description of Artificial Sequence: Synthetic oligonucleotide
ccuccuccagcaugcgaca

SEQ ID NO: 2832621 - RNA, 19 nt, Artificial Sequence
  Description of Artificial Sequence: Synthetic oligonucleotide
ccuccagcaugcgacagua

SEQ ID NO: 2832622 - RNA, 19 nt, Artificial Sequence
  Description of Artificial Sequence: Synthetic oligonucleotide
cccucacaugaggcgugcg

SEQ ID NO: 2832623 - RNA, 19 nt, Artificial Sequence
  Description of Artificial Sequence: Synthetic oligonucleotide
caugaggcgugcgccggcu

SEQ ID NO: 2832624 - RNA, 19 nt, Artificial Sequence
  Description of Artificial Sequence: Synthetic oligonucleotide
gugcgccggcuccauacau

SEQ ID NO: 2832625 - RNA, 19 nt, Artificial Sequence
  Description of Artificial Sequence: Synthetic oligonucleotide
gcagcaucgagaagcccau

SEQ ID NO: 2832626 - RNA, 19 nt, Artificial Sequence
  Description of Artificial Sequence: Synthetic oligonucleotide
ggcagauaauugggguccu

SEQ ID NO: 2832627 - RNA, 19 nt, Artificial Sequence
  Description of Artificial Sequence: Synthetic oligonucleotide
cggaaggaacccuccucca

SEQ ID NO: 2832628 - RNA, 19 nt, Artificial Sequence
  Description of Artificial Sequence: Synthetic oligonucleotide
ccuugcgaccccggaagga

SEQ ID NO: 2832629 - RNA, 19 nt, Artificial Sequence
  Description of Artificial Sequence: Synthetic oligonucleotide
ggucauccaguaguagcuu

SEQ ID NO: 2832630 - RNA, 19 nt, Artificial Sequence
  Description of Artificial Sequence: Synthetic oligonucleotide
gccgaaucccaggggccca

SEQ ID NO: 2832631 - RNA, 19 nt, Artificial Sequence
  Description of Artificial Sequence: Synthetic oligonucleotide
ggaacacgaagagcauguu

SEQ ID NO: 2832632 - RNA, 19 nt, Artificial Sequence
  Description of Artificial Sequence: Synthetic oligonucleotide
ggcugcccaggaaucccaa

SEQ ID NO: 2832633 - RNA, 19 nt, Artificial Sequence
  Description of Artificial Sequence: Synthetic oligonucleotide
aggcgugcgccggcuccau

SEQ ID NO: 2832634 - RNA, 19 nt, Artificial Sequence
  Description of Artificial Sequence: Synthetic oligonucleotide
gcaggucugugaggaccga

SEQ ID NO: 2832635 - RNA, 19 nt, Artificial Sequence
  Description of Artificial Sequence: Synthetic oligonucleotide
gcccagggcaggacccuca

SEQ ID NO: 2832636 - RNA, 19 nt, Artificial Sequence
  Description of Artificial Sequence: Synthetic oligonucleotide
gguccuccugagggucauc

SEQ ID NO: 2832637 - RNA, 19 nt, Artificial Sequence
  Description of Artificial Sequence: Synthetic oligonucleotide
cgugcgccggcuccauaca

SEQ ID NO: 2832638 - RNA, 19 nt, Artificial Sequence
  Description of Artificial Sequence: Synthetic oligonucleotide
cauggccaugagggccugu

SEQ ID NO: 2832639 - RNA, 19 nt, Artificial Sequence
  Description of Artificial Sequence: Synthetic oligonucleotide
cggccuugcgaccccggaa

SEQ ID NO: 2832640 - RNA, 19 nt, Artificial Sequence
  Description of Artificial Sequence: Synthetic oligonucleotide
ggcgugcgccggcuccaua

SEQ ID NO: 2832641 - RNA, 19 nt, Artificial Sequence
  Description of Artificial Sequence: Synthetic oligonucleotide
ccgaaucccaggggcccaa

SEQ ID NO: 2832642 - RNA, 19 nt, Artificial Sequence
  Description of Artificial Sequence: Synthetic oligonucleotide
cucuugccuccaggcuggu

SEQ ID NO: 2832643 - RNA, 19 nt, Artificial Sequence
  Description of Artificial Sequence: Synthetic oligonucleotide
ccgaguugcccagcagcau

SEQ ID NO: 2832644 - RNA, 19 nt, Artificial Sequence
  Description of Artificial Sequence: Synthetic oligonucleotide
cgccggcuccauacauaaa

SEQ ID NO: 2832645 - RNA, 19 nt, Artificial Sequence
  Description of Artificial Sequence: Synthetic oligonucleotide
cgaaucccaggggcccaaa

SEQ ID NO: 2832646 - RNA, 19 nt, Artificial Sequence
  Description of Artificial Sequence: Synthetic oligonucleotide
cgaccccggaaggaacccu

SEQ ID NO: 2832647 - RNA, 19 nt, Artificial Sequence
  Description of Artificial Sequence: Synthetic oligonucleotide
aacuuuauuaaucauucag

SEQ ID NO: 2832648 - RNA, 19 nt, Artificial Sequence
  Description of Artificial Sequence: Synthetic oligonucleotide
uuuaccaaagaccagauuc

SEQ ID NO: 2832649 - RNA, 19 nt, Artificial Sequence
  Description of Artificial Sequence: Synthetic oligonucleotide
aagaucuuugcuuggaaac

SEQ ID NO: 2832650 - RNA, 19 nt, Artificial Sequence
  Description of Artificial Sequence: Synthetic oligonucleotide
uuauuaaucauucaggauu

SEQ ID NO: 2832651 - RNA, 19 nt, Artificial Sequence
  Description of Artificial Sequence: Synthetic oligonucleotide
aaucauucaggauuaguuc

SEQ ID NO: 2832652 - RNA, 19 nt, Artificial Sequence
  Description of Artificial Sequence: Synthetic oligonucleotide
ugaauagugagccacucgg

SEQ ID NO: 2832653 - RNA, 19 nt, Artificial Sequence
  Description of Artificial Sequence: Synthetic oligonucleotide
aucauucaggauuaguucc

SEQ ID NO: 2832654 - RNA, 19 nt, Artificial Sequence
  Description of Artificial Sequence: Synthetic oligonucleotide
ucaacuuuauuaaucauuc

SEQ ID NO: 2832655 - RNA, 19 nt, Artificial Sequence
  Description of Artificial Sequence: Synthetic oligonucleotide
gauuauugaaggcagucag

SEQ ID NO: 2832656 - RNA, 19 nt, Artificial Sequence
  Description of Artificial Sequence: Synthetic oligonucleotide
auugaaggcagucagggag

SEQ ID NO: 2832657 - RNA, 19 nt, Artificial Sequence
  Description of Artificial Sequence: Synthetic oligonucleotide
uucucgagauuauugaagg

SEQ ID NO: 2832658 - RNA, 19 nt, Artificial Sequence
  Description of Artificial Sequence: Synthetic oligonucleotide
auuaguuccucuucuugcc

SEQ ID NO: 2832659 - RNA, 19 nt, Artificial Sequence
  Description of Artificial Sequence: Synthetic oligonucleotide
aagacgaaaaggccugagc

SEQ ID NO: 2832660 - RNA, 19 nt, Artificial Sequence
  Description of Artificial Sequence: Synthetic oligonucleotide
gaaaccuuuaccaaagacc

SEQ ID NO: 2832661 - RNA, 19 nt, Artificial Sequence
  Description of Artificial Sequence: Synthetic oligonucleotide
uuauugaaggcagucaggg

SEQ ID NO: 2832662 - RNA, 19 nt, Artificial Sequence
  Description of Artificial Sequence: Synthetic oligonucleotide
guugauauaguacaggcca

SEQ ID NO: 2832663 - RNA, 19 nt, Artificial Sequence
  Description of Artificial Sequence: Synthetic oligonucleotide
aaaccuuuaccaaagacca

SEQ ID NO: 2832664 - RNA, 19 nt, Artificial Sequence
  Description of Artificial Sequence: Synthetic oligonucleotide
aagagugccaacagcaagc

SEQ ID NO: 2832665 - RNA, 19 nt, Artificial Sequence
  Description of Artificial Sequence: Synthetic oligonucleotide
gaaucaacuuuauuaauca

SEQ ID NO: 2832666 - RNA, 19 nt, Artificial Sequence
  Description of Artificial Sequence: Synthetic oligonucleotide
aauagugagccacucggug

SEQ ID NO: 2832667 - RNA, 19 nt, Artificial Sequence
  Description of Artificial Sequence: Synthetic oligonucleotide
acuuuauuaaucauucagg

SEQ ID NO: 2832668 - RNA, 19 nt, Artificial Sequence
  Description of Artificial Sequence: Synthetic oligonucleotide
uaaucauucaggauuaguu

SEQ ID NO: 2832669 - RNA, 19 nt, Artificial Sequence
  Description of Artificial Sequence: Synthetic oligonucleotide
aucuuguugauauaguaca

SEQ ID NO: 2832670 - RNA, 19 nt, Artificial Sequence
  Description of Artificial Sequence: Synthetic oligonucleotide
gauuaguuccucuucuugc

SEQ ID NO: 2832671 - RNA, 19 nt, Artificial Sequence
  Description of Artificial Sequence: Synthetic oligonucleotide
agggagaagacgaaaaggc

SEQ ID NO: 2832672 - RNA, 19 nt, Artificial Sequence
  Description of Artificial Sequence: Synthetic oligonucleotide
uuggaaaccuuuaccaaag

SEQ ID NO: 2832673 - RNA, 19 nt, Artificial Sequence
  Description of Artificial Sequence: Synthetic oligonucleotide
agaaucaacuuuauuaauc

SEQ ID NO: 2832674 - RNA, 19 nt, Artificial Sequence
  Description of Artificial Sequence: Synthetic oligonucleotide
uaucuuguugauauaguac

SEQ ID NO: 2832675 - RNA, 19 nt, Artificial Sequence
  Description of Artificial Sequence: Synthetic oligonucleotide
ucgagauuauugaaggcag

SEQ ID NO: 2832676 - RNA, 19 nt, Artificial Sequence
  Description of Artificial Sequence: Synthetic oligonucleotide
uauaguacaggccaaccau

SEQ ID NO: 2832677 - RNA, 19 nt, Artificial Sequence
  Description of Artificial Sequence: Synthetic oligonucleotide
uguugauauaguacaggcc

SEQ ID NO: 2832678 - RNA, 19 nt, Artificial Sequence
  Description of Artificial Sequence: Synthetic oligonucleotide
cuuuauuaaucauucagga

SEQ ID NO: 2832679 - RNA, 19 nt, Artificial Sequence
  Description of Artificial Sequence: Synthetic oligonucleotide
ugcuuggaaaccuuuacca

SEQ ID NO: 2832680 - RNA, 19 nt, Artificial Sequence
  Description of Artificial Sequence: Synthetic oligonucleotide
uauuaaucauucaggauua

SEQ ID NO: 2832681 - RNA, 19 nt, Artificial Sequence
  Description of Artificial Sequence: Synthetic oligonucleotide
accauggagaagaugaagc

SEQ ID NO: 2832682 - RNA, 19 nt, Artificial Sequence
  Description of Artificial Sequence: Synthetic oligonucleotide
gaugaggccagaugcaaag

SEQ ID NO: 2832683 - RNA, 19 nt, Artificial Sequence
  Description of Artificial Sequence: Synthetic oligonucleotide
agcgaagagcagcagagac

SEQ ID NO: 2832684 - RNA, 19 nt, Artificial Sequence
  Description of Artificial Sequence: Synthetic oligonucleotide
ugucaccugguacagagug

SEQ ID NO: 2832685 - RNA, 19 nt, Artificial Sequence
  Description of Artificial Sequence: Synthetic oligonucleotide
ucuuguugauauaguacag

SEQ ID NO: 2832686 - RNA, 19 nt, Artificial Sequence
  Description of Artificial Sequence: Synthetic oligonucleotide
uaguacaggccaaccaugg

SEQ ID NO: 2832687 - RNA, 19 nt, Artificial Sequence
  Description of Artificial Sequence: Synthetic oligonucleotide
auagugagccacucggugg

SEQ ID NO: 2832688 - RNA, 19 nt, Artificial Sequence
  Description of Artificial Sequence: Synthetic oligonucleotide
aaggcagucagggagaaga

SEQ ID NO: 2832689 - RNA, 19 nt, Artificial Sequence
  Description of Artificial Sequence: Synthetic oligonucleotide
uuaccaaagaccagauucu

SEQ ID NO: 2832690 - RNA, 19 nt, Artificial Sequence
  Description of Artificial Sequence: Synthetic oligonucleotide
uuugcuuggaaaccuuuac

SEQ ID NO: 2832691 - RNA, 19 nt, Artificial Sequence
  Description of Artificial Sequence: Synthetic oligonucleotide
uuuauuaaucauucaggau

SEQ ID NO: 2832692 - RNA, 19 nt, Artificial Sequence
  Description of Artificial Sequence: Synthetic oligonucleotide
ucagggagaagacgaaaag

SEQ ID NO: 2832693 - RNA, 19 nt, Artificial Sequence
  Description of Artificial Sequence: Synthetic oligonucleotide
aagagcagcagagacagga

SEQ ID NO: 2832694 - RNA, 19 nt, Artificial Sequence
  Description of Artificial Sequence: Synthetic oligonucleotide
agaugaagcagguggugac

SEQ ID NO: 2832695 - RNA, 19 nt, Artificial Sequence
  Description of Artificial Sequence: Synthetic oligonucleotide
aagaccagauucucgagau

SEQ ID NO: 2832696 - RNA, 19 nt, Artificial Sequence
  Description of Artificial Sequence: Synthetic oligonucleotide
agauucucgagauuauuga

SEQ ID NO: 2832697 - RNA, 19 nt, Artificial Sequence
  Description of Artificial Sequence: Synthetic oligonucleotide
accaccaucacgccccgcc

SEQ ID NO: 2832698 - RNA, 19 nt, Artificial Sequence
  Description of Artificial Sequence: Synthetic oligonucleotide
agaaucucagggaagaucu

SEQ ID NO: 2832699 - RNA, 19 nt, Artificial Sequence
  Description of Artificial Sequence: Synthetic oligonucleotide
aagcagaugagaaucucag

SEQ ID NO: 2832700 - RNA, 19 nt, Artificial Sequence
  Description of Artificial Sequence: Synthetic oligonucleotide
cuuguugauauaguacagg

SEQ ID NO: 2832701 - RNA, 19 nt, Artificial Sequence
  Description of Artificial Sequence: Synthetic oligonucleotide
uugcuuggaaaccuuuacc

SEQ ID NO: 2832702 - RNA, 19 nt, Artificial Sequence
  Description of Artificial Sequence: Synthetic oligonucleotide
auauaguacaggccaacca

SEQ ID NO: 2832703 - RNA, 19 nt, Artificial Sequence
  Description of Artificial Sequence: Synthetic oligonucleotide
aaaggggagccaaagccgg

SEQ ID NO: 2832704 - RNA, 19 nt, Artificial Sequence
  Description of Artificial Sequence: Synthetic oligonucleotide
ggugacacagacucggugg

SEQ ID NO: 2832705 - RNA, 19 nt, Artificial Sequence
  Description of Artificial Sequence: Synthetic oligonucleotide
agcagguggugacacagac

SEQ ID NO: 2832706 - RNA, 19 nt, Artificial Sequence
  Description of Artificial Sequence: Synthetic oligonucleotide
gguggaugaggccagaugc

SEQ ID NO: 2832707 - RNA, 19 nt, Artificial Sequence
  Description of Artificial Sequence: Synthetic oligonucleotide
cagguggugacacagacuc

SEQ ID NO: 2832708 - RNA, 19 nt, Artificial Sequence
  Description of Artificial Sequence: Synthetic oligonucleotide
uguauaucugcaugccagc

SEQ ID NO: 2832709 - RNA, 19 nt, Artificial Sequence
  Description of Artificial Sequence: Synthetic oligonucleotide
gacgaaaaggccugagccc

SEQ ID NO: 2832710 - RNA, 19 nt, Artificial Sequence
  Description of Artificial Sequence: Synthetic oligonucleotide
guacaggccaaccauggag

SEQ ID NO: 2832711 - RNA, 19 nt, Artificial Sequence
  Description of Artificial Sequence: Synthetic oligonucleotide
gaugcaaagagugccaaca

SEQ ID NO: 2832712 - RNA, 19 nt, Artificial Sequence
  Description of Artificial Sequence: Synthetic oligonucleotide
aaucaacuuuauuaaucau

SEQ ID NO: 2832713 - RNA, 19 nt, Artificial Sequence
  Description of Artificial Sequence: Synthetic oligonucleotide
uacagaguggaggauaucu

SEQ ID NO: 2832714 - RNA, 19 nt, Artificial Sequence
  Description of Artificial Sequence: Synthetic oligonucleotide
cagauucucgagauuauug

SEQ ID NO: 2832715 - RNA, 19 nt, Artificial Sequence
  Description of Artificial Sequence: Synthetic oligonucleotide
ugcaugccagcgaagagca

SEQ ID NO: 2832716 - RNA, 19 nt, Artificial Sequence
  Description of Artificial Sequence: Synthetic oligonucleotide
uauaucugcaugccagcga

SEQ ID NO: 2832717 - RNA, 19 nt, Artificial Sequence
  Description of Artificial Sequence: Synthetic oligonucleotide
auaucuuguugauauagua

SEQ ID NO: 2832718 - RNA, 19 nt, Artificial Sequence
  Description of Artificial Sequence: Synthetic oligonucleotide
gaggauaucuuguugauau

SEQ ID NO: 2832719 - RNA, 19 nt, Artificial Sequence
  Description of Artificial Sequence: Synthetic oligonucleotide
uacaggccaaccauggaga

SEQ ID NO: 2832720 - RNA, 19 nt, Artificial Sequence
  Description of Artificial Sequence: Synthetic oligonucleotide
guaccgaccaccaucacgc

SEQ ID NO: 2832721 - RNA, 19 nt, Artificial Sequence
  Description of Artificial Sequence: Synthetic oligonucleotide
gacaggagggaggacagcg

SEQ ID NO: 2832722 - RNA, 19 nt, Artificial Sequence
  Description of Artificial Sequence: Synthetic oligonucleotide
ucauucaggauuaguuccu

SEQ ID NO: 2832723 - RNA, 19 nt, Artificial Sequence
  Description of Artificial Sequence: Synthetic oligonucleotide
gauauaguacaggccaacc

SEQ ID NO: 2832724 - RNA, 19 nt, Artificial Sequence
  Description of Artificial Sequence: Synthetic oligonucleotide
agugccaacagcaagcaga

SEQ ID NO: 2832725 - RNA, 19 nt, Artificial Sequence
  Description of Artificial Sequence: Synthetic oligonucleotide
ucagggaagaucuuugcuu

SEQ ID NO: 2832726 - RNA, 19 nt, Artificial Sequence
  Description of Artificial Sequence: Synthetic oligonucleotide
gaagcagguggugacacag

SEQ ID NO: 2832727 - RNA, 19 nt, Artificial Sequence
  Description of Artificial Sequence: Synthetic oligonucleotide
aaaggccugagcccagcag

SEQ ID NO: 2832728 - RNA, 19 nt, Artificial Sequence
  Description of Artificial Sequence: Synthetic oligonucleotide
auuauugaaggcagucagg

SEQ ID NO: 2832729 - RNA, 19 nt, Artificial Sequence
  Description of Artificial Sequence: Synthetic oligonucleotide
ucaggauuaguuccucuuc

SEQ ID NO: 2832730 - RNA, 19 nt, Artificial Sequence
  Description of Artificial Sequence: Synthetic oligonucleotide
auucucgagauuauugaag

SEQ ID NO: 2832731 - RNA, 19 nt, Artificial Sequence
  Description of Artificial Sequence: Synthetic oligonucleotide
uuaaucauucaggauuagu

SEQ ID NO: 2832732 - RNA, 19 nt, Artificial Sequence
  Description of Artificial Sequence: Synthetic oligonucleotide
aguggaggauaucuuguug

SEQ ID NO: 2832733 - RNA, 19 nt, Artificial Sequence
  Description of Artificial Sequence: Synthetic oligonucleotide
auaucugcaugccagcgaa

SEQ ID NO: 2832734 - RNA, 19 nt, Artificial Sequence
  Description of Artificial Sequence: Synthetic oligonucleotide
cagggaagaucuuugcuug

SEQ ID NO: 2832735 - RNA, 19 nt, Artificial Sequence
  Description of Artificial Sequence: Synthetic oligonucleotide
aacagcaagcagaugagaa

SEQ ID NO: 2832736 - RNA, 19 nt, Artificial Sequence
  Description of Artificial Sequence: Synthetic oligonucleotide
agaugcaaagagugccaac

SEQ ID NO: 2832737 - RNA, 19 nt, Artificial Sequence
  Description of Artificial Sequence: Synthetic oligonucleotide
ggauaucuuguugauauag

SEQ ID NO: 2832738 - RNA, 19 nt, Artificial Sequence
  Description of Artificial Sequence: Synthetic oligonucleotide
gaugagaaucucagggaag

SEQ ID NO: 2832739 - RNA, 19 nt, Artificial Sequence
  Description of Artificial Sequence: Synthetic oligonucleotide
uugaaggcagucagggaga

SEQ ID NO: 2832740 - RNA, 19 nt, Artificial Sequence
  Description of Artificial Sequence: Synthetic oligonucleotide
gagaagacgaaaaggccug

SEQ ID NO: 2832741 - RNA, 19 nt, Artificial Sequence
  Description of Artificial Sequence: Synthetic oligonucleotide
aggagguuccgguaccgac

SEQ ID NO: 2832742 - RNA, 19 nt, Artificial Sequence
  Description of Artificial Sequence: Synthetic oligonucleotide
cugaauagugagccacucg

SEQ ID NO: 2832743 - RNA, 19 nt, Artificial Sequence
  Description of Artificial Sequence: Synthetic oligonucleotide
cucgguggaggccagcugg

SEQ ID NO: 2832744 - RNA, 19 nt, Artificial Sequence
  Description of Artificial Sequence: Synthetic oligonucleotide
ucugcaugccagcgaagag

SEQ ID NO: 2832745 - RNA, 19 nt, Artificial Sequence
  Description of Artificial Sequence: Synthetic oligonucleotide
caaucugugccuccggcag

SEQ ID NO: 2832746 - RNA, 19 nt, Artificial Sequence
  Description of Artificial Sequence: Synthetic oligonucleotide
gagauuauugaaggcaguc

SEQ ID NO: 2832747 - RNA, 19 nt, Artificial Sequence
  Description of Artificial Sequence: Synthetic oligonucleotide
uccgguaccgaccaccauc

SEQ ID NO: 2832748 - RNA, 19 nt, Artificial Sequence
  Description of Artificial Sequence: Synthetic oligonucleotide
cagaguggaggauaucuug

SEQ ID NO: 2832749 - RNA, 19 nt, Artificial Sequence
  Description of Artificial Sequence: Synthetic oligonucleotide
ucucgagauuauugaaggc

SEQ ID NO: 2832750 - RNA, 19 nt, Artificial Sequence
  Description of Artificial Sequence: Synthetic oligonucleotide
uagugagccacucggugga

SEQ ID NO: 2832751 - RNA, 19 nt, Artificial Sequence
  Description of Artificial Sequence: Synthetic oligonucleotide
gaagaucuuugcuuggaaa

SEQ ID NO: 2832752 - RNA, 19 nt, Artificial Sequence
  Description of Artificial Sequence: Synthetic oligonucleotide
ccaaccauggagaagauga

SEQ ID NO: 2832753 - RNA, 19 nt, Artificial Sequence
  Description of Artificial Sequence: Synthetic oligonucleotide
guauaucugcaugccagcg

SEQ ID NO: 2832754 - RNA, 19 nt, Artificial Sequence
  Description of Artificial Sequence: Synthetic oligonucleotide
uugauauaguacaggccaa

SEQ ID NO: 2832755 - RNA, 19 nt, Artificial Sequence
  Description of Artificial Sequence: Synthetic oligonucleotide
accuuuaccaaagaccaga

SEQ ID NO: 2832756 - RNA, 19 nt, Artificial Sequence
  Description of Artificial Sequence: Synthetic oligonucleotide
uccaaucugugccuccggc

SEQ ID NO: 2832757 - RNA, 19 nt, Artificial Sequence
  Description of Artificial Sequence: Synthetic oligonucleotide
ucucagggaagaucuuugc

SEQ ID NO: 2832758 - RNA, 19 nt, Artificial Sequence
  Description of Artificial Sequence: Synthetic oligonucleotide
gauucucgagauuauugaa

SEQ ID NO: 2832759 - RNA, 19 nt, Artificial Sequence
  Description of Artificial Sequence: Synthetic oligonucleotide
gccaacagcaagcagauga

SEQ ID NO: 2832760 - RNA, 19 nt, Artificial Sequence
  Description of Artificial Sequence: Synthetic oligonucleotide
caugccagcgaagagcagc

SEQ ID NO: 2832761 - RNA, 19 nt, Artificial Sequence
  Description of Artificial Sequence: Synthetic oligonucleotide
augcaaagagugccaacag

SEQ ID NO: 2832762 - RNA, 19 nt, Artificial Sequence
  Description of Artificial Sequence: Synthetic oligonucleotide
agcagcagagacaggaggg

SEQ ID NO: 2832763 - RNA, 19 nt, Artificial Sequence
  Description of Artificial Sequence: Synthetic oligonucleotide
augagaaucucagggaaga

SEQ ID NO: 2832764 - RNA, 19 nt, Artificial Sequence
  Description of Artificial Sequence: Synthetic oligonucleotide
guggaggauaucuuguuga

SEQ ID NO: 2832765 - RNA, 19 nt, Artificial Sequence
  Description of Artificial Sequence: Synthetic oligonucleotide
aggccaaccauggagaaga

SEQ ID NO: 2832766 - RNA, 19 nt, Artificial Sequence
  Description of Artificial Sequence: Synthetic oligonucleotide
augaagcagguggugacac

SEQ ID NO: 2832767 - RNA, 19 nt, Artificial Sequence
  Description of Artificial Sequence: Synthetic oligonucleotide
agauuauugaaggcaguca

SEQ ID NO: 2832768 - RNA, 19 nt, Artificial Sequence
  Description of Artificial Sequence: Synthetic oligonucleotide
accgaccaccaucacgccc

SEQ ID NO: 2832769 - RNA, 19 nt, Artificial Sequence
  Description of Artificial Sequence: Synthetic oligonucleotide
cuuggaaaccuuuaccaaa

SEQ ID NO: 2832770 - RNA, 19 nt, Artificial Sequence
  Description of Artificial Sequence: Synthetic oligonucleotide
ucaccugguacagagugga

SEQ ID NO: 2832771 - RNA, 19 nt, Artificial Sequence
  Description of Artificial Sequence: Synthetic oligonucleotide
aucaacuuuauuaaucauu

SEQ ID NO: 2832772 - RNA, 19 nt, Artificial Sequence
  Description of Artificial Sequence: Synthetic oligonucleotide
gguaccgaccaccaucacg

SEQ ID NO: 2832773 - RNA, 19 nt, Artificial Sequence
  Description of Artificial Sequence: Synthetic oligonucleotide
acagacucgguggaugagg

SEQ ID NO: 2832774 - RNA, 19 nt, Artificial Sequence
  Description of Artificial Sequence: Synthetic oligonucleotide
gcugucaccugguacagag

SEQ ID NO: 2832775 - RNA, 19 nt, Artificial Sequence
  Description of Artificial Sequence: Synthetic oligonucleotide
uucaggauuaguuccucuu

SEQ ID NO: 2832776 - RNA, 19 nt, Artificial Sequence
  Description of Artificial Sequence: Synthetic oligonucleotide
cucgagauuauugaaggca

SEQ ID NO: 2832777 - RNA, 19 nt, Artificial Sequence
  Description of Artificial Sequence: Synthetic oligonucleotide
ugauauaguacaggccaac

SEQ ID NO: 2832778 - RNA, 19 nt, Artificial Sequence
  Description of Artificial Sequence: Synthetic oligonucleotide
gguggugacacagacucgg

SEQ ID NO: 2832779 - RNA, 19 nt, Artificial Sequence
  Description of Artificial Sequence: Synthetic oligonucleotide
uggugacacagacucggug

SEQ ID NO: 2832780 - RNA, 19 nt, Artificial Sequence
  Description of Artificial Sequence: Synthetic oligonucleotide
acagcaagcagaugagaau

SEQ ID NO: 2832781 - RNA, 19 nt, Artificial Sequence
  Description of Artificial Sequence: Synthetic oligonucleotide
gaagaugaagcagguggug

SEQ ID NO: 2832782 - RNA, 19 nt, Artificial Sequence
  Description of Artificial Sequence: Synthetic oligonucleotide
aaaaggccugagcccagca

SEQ ID NO: 2832783 - RNA, 19 nt, Artificial Sequence
  Description of Artificial Sequence: Synthetic oligonucleotide
cuggcggcuguauaucugc

SEQ ID NO: 2832784 - RNA, 19 nt, Artificial Sequence
  Description of Artificial Sequence: Synthetic oligonucleotide
ugaggacuggugcugucac

SEQ ID NO: 2832785 - RNA, 19 nt, Artificial Sequence
  Description of Artificial Sequence: Synthetic oligonucleotide
accaaagaccagauucucg

SEQ ID NO: 2832786 - RNA, 19 nt, Artificial Sequence
  Description of Artificial Sequence: Synthetic oligonucleotide
caaagaccagauucucgag

SEQ ID NO: 2832787 - RNA, 19 nt, Artificial Sequence
  Description of Artificial Sequence: Synthetic oligonucleotide
agggaagaucuuugcuugg

SEQ ID NO: 2832788 - RNA, 19 nt, Artificial Sequence
  Description of Artificial Sequence: Synthetic oligonucleotide
aaucucagggaagaucuuu

SEQ ID NO: 2832789 - RNA, 19 nt, Artificial Sequence
  Description of Artificial Sequence: Synthetic oligonucleotide
ggaaaccuuuaccaaagac

SEQ ID NO: 2832790 - RNA, 19 nt, Artificial Sequence
  Description of Artificial Sequence: Synthetic oligonucleotide
cagacucgguggaugaggc

SEQ ID NO: 2832791 - RNA, 19 nt, Artificial Sequence
  Description of Artificial Sequence: Synthetic oligonucleotide
gagaaucucagggaagauc

SEQ ID NO: 2832792 - RNA, 19 nt, Artificial Sequence
  Description of Artificial Sequence: Synthetic oligonucleotide
cugcaugccagcgaagagc

SEQ ID NO: 2832793 - RNA, 19 nt, Artificial Sequence
  Description of Artificial Sequence: Synthetic oligonucleotide
aggccagaugcaaagagug

SEQ ID NO: 2832794 - RNA, 19 nt, Artificial Sequence
  Description of Artificial Sequence: Synthetic oligonucleotide
cagcaagcagaugagaauc

SEQ ID NO: 2832795 - RNA, 19 nt, Artificial Sequence
  Description of Artificial Sequence: Synthetic oligonucleotide
acgaaaaggccugagccca

SEQ ID NO: 2832796 - RNA, 19 nt, Artificial Sequence
  Description of Artificial Sequence: Synthetic oligonucleotide
ugccagugaccuuggcugg

SEQ ID NO: 2832797 - RNA, 19 nt, Artificial Sequence
  Description of Artificial Sequence: Synthetic oligonucleotide
ggauuaguuccucuucuug

SEQ ID NO: 2832798 - RNA, 19 nt, Artificial Sequence
  Description of Artificial Sequence: Synthetic oligonucleotide
ggugcugucaccugguaca

SEQ ID NO: 2832799 - RNA, 19 nt, Artificial Sequence
  Description of Artificial Sequence: Synthetic oligonucleotide
gacacagacucgguggaug

SEQ ID NO: 2832800 - RNA, 19 nt, Artificial Sequence
  Description of Artificial Sequence: Synthetic oligonucleotide
agacucgguggaugaggcc

SEQ ID NO: 2832801 - RNA, 19 nt, Artificial Sequence
  Description of Artificial Sequence: Synthetic oligonucleotide
uaguuccucuucuugcccu

SEQ ID NO: 2832802 - RNA, 19 nt, Artificial Sequence
  Description of Artificial Sequence: Synthetic oligonucleotide
uggaaaccuuuaccaaaga

SEQ ID NO: 2832803 - RNA, 19 nt, Artificial Sequence
  Description of Artificial Sequence: Synthetic oligonucleotide
gacagcgccaaggagguuc

SEQ ID NO: 2832804 - RNA, 19 nt, Artificial Sequence
  Description of Artificial Sequence: Synthetic oligonucleotide
gaagacgaaaaggccugag

SEQ ID NO: 2832805 - RNA, 19 nt, Artificial Sequence
  Description of Artificial Sequence: Synthetic oligonucleotide
ucuuugcuuggaaaccuuu

SEQ ID NO: 2832806 - RNA, 19 nt, Artificial Sequence
  Description of Artificial Sequence: Synthetic oligonucleotide
auucaggauuaguuccucu

SEQ ID NO: 2832807 - RNA, 19 nt, Artificial Sequence
  Description of Artificial Sequence: Synthetic oligonucleotide
gacucgguggaugaggcca

SEQ ID NO: 2832808 - RNA, 19 nt, Artificial Sequence
  Description of Artificial Sequence: Synthetic oligonucleotide
uugcccuugccagugaccu

SEQ ID NO: 2832809 - RNA, 19 nt, Artificial Sequence
  Description of Artificial Sequence: Synthetic oligonucleotide
agaagaugaagcagguggu

SEQ ID NO: 2832810 - RNA, 19 nt, Artificial Sequence
  Description of Artificial Sequence: Synthetic oligonucleotide
auaguacaggccaaccaug

SEQ ID NO: 2832811 - RNA, 19 nt, Artificial Sequence
  Description of Artificial Sequence: Synthetic oligonucleotide
agggaggacagcgccaagg

SEQ ID NO: 2832812 - RNA, 19 nt, Artificial Sequence
  Description of Artificial Sequence: Synthetic oligonucleotide
gaccagauucucgagauua

SEQ ID NO: 2832813 - RNA, 19 nt, Artificial Sequence
  Description of Artificial Sequence: Synthetic oligonucleotide
uggugcugucaccugguac

SEQ ID NO: 2832814 - RNA, 19 nt, Artificial Sequence
  Description of Artificial Sequence: Synthetic oligonucleotide
uggugugaggacuggugcu

SEQ ID NO: 2832815 - RNA, 19 nt, Artificial Sequence
  Description of Artificial Sequence: Synthetic oligonucleotide
uggaggauaucuuguugau

SEQ ID NO: 2832816 - RNA, 19 nt, Artificial Sequence
  Description of Artificial Sequence: Synthetic oligonucleotide
auuaaucauucaggauuag

SEQ ID NO: 2832817 - RNA, 19 nt, Artificial Sequence
  Description of Artificial Sequence: Synthetic oligonucleotide
aggacuggugcugucaccu

SEQ ID NO: 2832818 - RNA, 19 nt, Artificial Sequence
  Description of Artificial Sequence: Synthetic oligonucleotide
ucuugcccuugccagugac

SEQ ID NO: 2832819 - RNA, 19 nt, Artificial Sequence
  Description of Artificial Sequence: Synthetic oligonucleotide
agugaccuuggcuggugug

SEQ ID NO: 2832820 - RNA, 19 nt, Artificial Sequence
  Description of Artificial Sequence: Synthetic oligonucleotide
agaguggaggauaucuugu

SEQ ID NO: 2832821 - RNA, 19 nt, Artificial Sequence
  Description of Artificial Sequence: Synthetic oligonucleotide
ugugccuccggcagagaaa

SEQ ID NO: 2832822 - RNA, 19 nt, Artificial Sequence
  Description of Artificial Sequence: Synthetic oligonucleotide
cuugcccuugccagugacc

SEQ ID NO: 2832823 - RNA, 19 nt, Artificial Sequence
  Description of Artificial Sequence: Synthetic oligonucleotide
uaucugcaugccagcgaag

SEQ ID NO: 2832824 - RNA, 19 nt, Artificial Sequence
  Description of Artificial Sequence: Synthetic oligonucleotide
aaggggagccaaagccggc

SEQ ID NO: 2832825 - RNA, 19 nt, Artificial Sequence
  Description of Artificial Sequence: Synthetic oligonucleotide
aucugcaugccagcgaaga

SEQ ID NO: 2832826 - RNA, 19 nt, Artificial Sequence
  Description of Artificial Sequence: Synthetic oligonucleotide
aaccuuuaccaaagaccag

SEQ ID NO: 2832827 - RNA, 19 nt, Artificial Sequence
  Description of Artificial Sequence: Synthetic oligonucleotide
gagguuccgguaccgacca

SEQ ID NO: 2832828 - RNA, 19 nt, Artificial Sequence
  Description of Artificial Sequence: Synthetic oligonucleotide
aguacaggccaaccaugga

SEQ ID NO: 2832829 - RNA, 19 nt, Artificial Sequence
  Description of Artificial Sequence: Synthetic oligonucleotide
aucucagggaagaucuuug

SEQ ID NO: 2832830 - RNA, 19 nt, Artificial Sequence
  Description of Artificial Sequence: Synthetic oligonucleotide
ugaccuuggcuggugugag

SEQ ID NO: 2832831 - RNA, 19 nt, Artificial Sequence
  Description of Artificial Sequence: Synthetic oligonucleotide
acaggagggaggacagcgc

SEQ ID NO: 2832832 - RNA, 19 nt, Artificial Sequence
  Description of Artificial Sequence: Synthetic oligonucleotide
gauaucuuguugauauagu

SEQ ID NO: 2832833 - RNA, 19 nt, Artificial Sequence
  Description of Artificial Sequence: Synthetic oligonucleotide
guggaggccagcuggcggc

SEQ ID NO: 2832834 - RNA, 19 nt, Artificial Sequence
  Description of Artificial Sequence: Synthetic oligonucleotide
ccaaagaccagauucucga

SEQ ID NO: 2832835 - RNA, 19 nt, Artificial Sequence
  Description of Artificial Sequence: Synthetic oligonucleotide
caacuuuauuaaucauuca

SEQ ID NO: 2832836 - RNA, 19 nt, Artificial Sequence
  Description of Artificial Sequence: Synthetic oligonucleotide
ugaagcagguggugacaca

SEQ ID NO: 2832837 - RNA, 19 nt, Artificial Sequence
  Description of Artificial Sequence: Synthetic oligonucleotide
ugguacagaguggaggaua

SEQ ID NO: 2832838 - RNA, 19 nt, Artificial Sequence
  Description of Artificial Sequence: Synthetic oligonucleotide
gaugaagcagguggugaca

SEQ ID NO: 2832839 - RNA, 19 nt, Artificial Sequence
  Description of Artificial Sequence: Synthetic oligonucleotide
uggaugaggccagaugcaa

SEQ ID NO: 2832840 - RNA, 19 nt, Artificial Sequence
  Description of Artificial Sequence: Synthetic oligonucleotide
acagcgccaaggagguucc

SEQ ID NO: 2832841 - RNA, 19 nt, Artificial Sequence
  Description of Artificial Sequence: Synthetic oligonucleotide
gucaccugguacagagugg

SEQ ID NO: 2832842 - RNA, 19 nt, Artificial Sequence
  Description of Artificial Sequence: Synthetic oligonucleotide
aggggagccaaagccggcg

SEQ ID NO: 2832843 - RNA, 19 nt, Artificial Sequence
  Description of Artificial Sequence: Synthetic oligonucleotide
agcgccaaggagguuccgg

SEQ ID NO: 2832844 - RNA, 19 nt, Artificial Sequence
  Description of Artificial Sequence: Synthetic oligonucleotide
cuucuugcccuugccagug

SEQ ID NO: 2832845 - RNA, 19 nt, Artificial Sequence
  Description of Artificial Sequence: Synthetic oligonucleotide
gggagaagacgaaaaggcc

SEQ ID NO: 2832846 - RNA, 19 nt, Artificial Sequence
  Description of Artificial Sequence: Synthetic oligonucleotide
aggauuaguuccucuucuu

SEQ ID NO: 2832847 - RNA, 19 nt, Artificial Sequence
  Description of Artificial Sequence: Synthetic oligonucleotide
gaccuuggcuggugugagg

SEQ ID NO: 2832848 - RNA, 19 nt, Artificial Sequence
  Description of Artificial Sequence: Synthetic oligonucleotide
ccaacagcaagcagaugag

SEQ ID NO: 2832849 - RNA, 19 nt, Artificial Sequence
  Description of Artificial Sequence: Synthetic oligonucleotide
gaucuuugcuuggaaaccu

SEQ ID NO: 2832850 - RNA, 19 nt, Artificial Sequence
  Description of Artificial Sequence: Synthetic oligonucleotide
cguggguccaaucugugcc

SEQ ID NO: 2832851 - RNA, 19 nt, Artificial Sequence
  Description of Artificial Sequence: Synthetic oligonucleotide
gguggaggccagcuggcgg

SEQ ID NO: 2832852 - RNA, 19 nt, Artificial Sequence
  Description of Artificial Sequence: Synthetic oligonucleotide
ccgaccaccaucacgcccc

SEQ ID NO: 2832853 - RNA, 19 nt, Artificial Sequence
  Description of Artificial Sequence: Synthetic oligonucleotide
gaggacuggugcugucacc

SEQ ID NO: 2832854 - RNA, 19 nt, Artificial Sequence
  Description of Artificial Sequence: Synthetic oligonucleotide
ucgguggaggccagcuggc

SEQ ID NO: 2832855 - RNA, 19 nt, Artificial Sequence
  Description of Artificial Sequence: Synthetic oligonucleotide
gagugccaacagcaagcag

SEQ ID NO: 2832856 - RNA, 19 nt, Artificial Sequence
  Description of Artificial Sequence: Synthetic oligonucleotide
gugacacagacucggugga

SEQ ID NO: 2832857 - RNA, 19 nt, Artificial Sequence
  Description of Artificial Sequence: Synthetic oligonucleotide
aucugugccuccggcagag

SEQ ID NO: 2832858 - RNA, 19 nt, Artificial Sequence
  Description of Artificial Sequence: Synthetic oligonucleotide
gcggcuguauaucugcaug

SEQ ID NO: 2832859 - RNA, 19 nt, Artificial Sequence
  Description of Artificial Sequence: Synthetic oligonucleotide
caaggagguuccgguaccg

SEQ ID NO: 2832860 - RNA, 19 nt, Artificial Sequence
  Description of Artificial Sequence: Synthetic oligonucleotide
cuuugcuuggaaaccuuua

SEQ ID NO: 2832861 - RNA, 19 nt, Artificial Sequence
  Description of Artificial Sequence: Synthetic oligonucleotide
agcuggcggcuguauaucu

SEQ ID NO: 2832862 - RNA, 19 nt, Artificial Sequence
  Description of Artificial Sequence: Synthetic oligonucleotide
gcagucagggagaagacga

SEQ ID NO: 2832863 - RNA, 19 nt, Artificial Sequence
  Description of Artificial Sequence: Synthetic oligonucleotide
caccaucacgccccgcccg

SEQ ID NO: 2832864 - RNA, 19 nt, Artificial Sequence
  Description of Artificial Sequence: Synthetic oligonucleotide
agacaggagggaggacagc

SEQ ID NO: 2832865 - RNA, 19 nt, Artificial Sequence
  Description of Artificial Sequence: Synthetic oligonucleotide
guccaaucugugccuccgg

SEQ ID NO: 2832866 - RNA, 19 nt, Artificial Sequence
  Description of Artificial Sequence: Synthetic oligonucleotide
aucacgccccgcccguggg

SEQ ID NO: 2832867 - RNA, 19 nt, Artificial Sequence
  Description of Artificial Sequence: Synthetic oligonucleotide
agcaagcagaugagaaucu

SEQ ID NO: 2832868 - RNA, 19 nt, Artificial Sequence
  Description of Artificial Sequence: Synthetic oligonucleotide
gucagggagaagacgaaaa

SEQ ID NO: 2832869 - RNA, 19 nt, Artificial Sequence
  Description of Artificial Sequence: Synthetic oligonucleotide
aggacagcgccaaggaggu

SEQ ID NO: 2832870 - RNA, 19 nt, Artificial Sequence
  Description of Artificial Sequence: Synthetic oligonucleotide
ggagaagacgaaaaggccu

SEQ ID NO: 2832871 - RNA, 19 nt, Artificial Sequence
  Description of Artificial Sequence: Synthetic oligonucleotide
acaggccaaccauggagaa

SEQ ID NO: 2832872 - RNA, 19 nt, Artificial Sequence
  Description of Artificial Sequence: Synthetic oligonucleotide
gguccaaucugugccuccg

SEQ ID NO: 2832873 - RNA, 19 nt, Artificial Sequence
  Description of Artificial Sequence: Synthetic oligonucleotide
ugagaaucucagggaagau

SEQ ID NO: 2832874 - RNA, 19 nt, Artificial Sequence
  Description of Artificial Sequence: Synthetic oligonucleotide
ggcagucagggagaagacg

SEQ ID NO: 2832875 - RNA, 19 nt, Artificial Sequence
  Description of Artificial Sequence: Synthetic oligonucleotide
gagccaaagccggcgcggg

SEQ ID NO: 2832876 - RNA, 19 nt, Artificial Sequence
  Description of Artificial Sequence: Synthetic oligonucleotide
cauucaggauuaguuccuc

SEQ ID NO: 2832877 - RNA, 19 nt, Artificial Sequence
  Description of Artificial Sequence: Synthetic oligonucleotide
aaggagguuccgguaccga

SEQ ID NO: 2832878 - RNA, 19 nt, Artificial Sequence
  Description of Artificial Sequence: Synthetic oligonucleotide
aaagccggcgcgggugucu

SEQ ID NO: 2832879 - RNA, 19 nt, Artificial Sequence
  Description of Artificial Sequence: Synthetic oligonucleotide
uggcggcuguauaucugca

SEQ ID NO: 2832880 - RNA, 19 nt, Artificial Sequence
  Description of Artificial Sequence: Synthetic oligonucleotide
cagcagagacaggagggag

SEQ ID NO: 2832881 - RNA, 19 nt, Artificial Sequence
  Description of Artificial Sequence: Synthetic oligonucleotide
gguuccgguaccgaccacc

SEQ ID NO: 2832882 - RNA, 19 nt, Artificial Sequence
  Description of Artificial Sequence: Synthetic oligonucleotide
aggcagucagggagaagac

SEQ ID NO: 2832883 - RNA, 19 nt, Artificial Sequence
  Description of Artificial Sequence: Synthetic oligonucleotide
caucacgccccgcccgugg

SEQ ID NO: 2832884 - RNA, 19 nt, Artificial Sequence
  Description of Artificial Sequence: Synthetic oligonucleotide
aggauaucuuguugauaua

SEQ ID NO: 2832885 - RNA, 19 nt, Artificial Sequence
  Description of Artificial Sequence: Synthetic oligonucleotide
ccugguacagaguggagga

SEQ ID NO: 2832886 - RNA, 19 nt, Artificial Sequence
  Description of Artificial Sequence: Synthetic oligonucleotide
ggagguuccgguaccgacc

SEQ ID NO: 2832887 - RNA, 19 nt, Artificial Sequence
  Description of Artificial Sequence: Synthetic oligonucleotide
ggcuguauaucugcaugcc

SEQ ID NO: 2832888 - RNA, 19 nt, Artificial Sequence
  Description of Artificial Sequence: Synthetic oligonucleotide
cuugccagugaccuuggcu

SEQ ID NO: 2832889 - RNA, 19 nt, Artificial Sequence
  Description of Artificial Sequence: Synthetic oligonucleotide
ugugaggacuggugcuguc

SEQ ID NO: 2832890 - RNA, 19 nt, Artificial Sequence
  Description of Artificial Sequence: Synthetic oligonucleotide
gcuguauaucugcaugcca

SEQ ID NO: 2832891 - RNA, 19 nt, Artificial Sequence
  Description of Artificial Sequence: Synthetic oligonucleotide
acucgguggaggccagcug

SEQ ID NO: 2832892 - RNA, 19 nt, Artificial Sequence
  Description of Artificial Sequence: Synthetic oligonucleotide
uucuugcccuugccaguga

SEQ ID NO: 2832893 - RNA, 19 nt, Artificial Sequence
  Description of Artificial Sequence: Synthetic oligonucleotide
ggugugaggacuggugcug

SEQ ID NO: 2832894 - RNA, 19 nt, Artificial Sequence
  Description of Artificial Sequence: Synthetic oligonucleotide
agaagacgaaaaggccuga

SEQ ID NO: 2832895 - RNA, 19 nt, Artificial Sequence
  Description of Artificial Sequence: Synthetic oligonucleotide
ggagccaaagccggcgcgg

SEQ ID NO: 2832896 - RNA, 19 nt, Artificial Sequence
  Description of Artificial Sequence: Synthetic oligonucleotide
gcuuggaaaccuuuaccaa

SEQ ID NO: 2832897 - RNA, 19 nt, Artificial Sequence
  Description of Artificial Sequence: Synthetic oligonucleotide
gugaccuuggcugguguga

SEQ ID NO: 2832898 - RNA, 19 nt, Artificial Sequence
  Description of Artificial Sequence: Synthetic oligonucleotide
gugagccacucgguggagg

SEQ ID NO: 2832899 - RNA, 19 nt, Artificial Sequence
  Description of Artificial Sequence: Synthetic oligonucleotide
ccauggagaagaugaagca

SEQ ID NO: 2832900 - RNA, 19 nt, Artificial Sequence
  Description of Artificial Sequence: Synthetic oligonucleotide
caggauuaguuccucuucu

SEQ ID NO: 2832901 - RNA, 19 nt, Artificial Sequence
  Description of Artificial Sequence: Synthetic oligonucleotide
accaucacgccccgcccgu

SEQ ID NO: 2832902 - RNA, 19 nt, Artificial Sequence
  Description of Artificial Sequence: Synthetic oligonucleotide
aguuccucuucuugcccuu

SEQ ID NO: 2832903 - RNA, 19 nt, Artificial Sequence
  Description of Artificial Sequence: Synthetic oligonucleotide
agccacucgguggaggcca

SEQ ID NO: 2832904 - RNA, 19 nt, Artificial Sequence
  Description of Artificial Sequence: Synthetic oligonucleotide
gaauagugagccacucggu

SEQ ID NO: 2832905 - RNA, 19 nt, Artificial Sequence
  Description of Artificial Sequence: Synthetic oligonucleotide
augccagcgaagagcagca

SEQ ID NO: 2832906 - RNA, 19 nt, Artificial Sequence
  Description of Artificial Sequence: Synthetic oligonucleotide
caaccauggagaagaugaa

SEQ ID NO: 2832907 - RNA, 19 nt, Artificial Sequence
  Description of Artificial Sequence: Synthetic oligonucleotide
gaaggcagucagggagaag

SEQ ID NO: 2832908 - RNA, 19 nt, Artificial Sequence
  Description of Artificial Sequence: Synthetic oligonucleotide
ggaagaucuuugcuuggaa

SEQ ID NO: 2832909 - RNA, 19 nt, Artificial Sequence
  Description of Artificial Sequence: Synthetic oligonucleotide
uaccgaccaccaucacgcc

SEQ ID NO: 2832910 - RNA, 19 nt, Artificial Sequence
  Description of Artificial Sequence: Synthetic oligonucleotide
augaggccagaugcaaaga

SEQ ID NO: 2832911 - RNA, 19 nt, Artificial Sequence
  Description of Artificial Sequence: Synthetic oligonucleotide
gggagccaaagccggcgcg

SEQ ID NO: 2832912 - RNA, 19 nt, Artificial Sequence
  Description of Artificial Sequence: Synthetic oligonucleotide
acagaguggaggauaucuu

SEQ ID NO: 2832913 - RNA, 19 nt, Artificial Sequence
  Description of Artificial Sequence: Synthetic oligonucleotide
gcuggugugaggacuggug

SEQ ID NO: 2832914 - RNA, 19 nt, Artificial Sequence
  Description of Artificial Sequence: Synthetic oligonucleotide
gaggccagaugcaaagagu

SEQ ID NO: 2832915 - RNA, 19 nt, Artificial Sequence
  Description of Artificial Sequence: Synthetic oligonucleotide
caccugguacagaguggag

SEQ ID NO: 2832916 - RNA, 19 nt, Artificial Sequence
  Description of Artificial Sequence: Synthetic oligonucleotide
acuggugcugucaccuggu

SEQ ID NO: 2832917 - RNA, 19 nt, Artificial Sequence
  Description of Artificial Sequence: Synthetic oligonucleotide
caggccaaccauggagaag

SEQ ID NO: 2832918 - RNA, 19 nt, Artificial Sequence
  Description of Artificial Sequence: Synthetic oligonucleotide
guggaugaggccagaugca

SEQ ID NO: 2832919 - RNA, 19 nt, Artificial Sequence
  Description of Artificial Sequence: Synthetic oligonucleotide
cucagggaagaucuuugcu

SEQ ID NO: 2832920 - RNA, 19 nt, Artificial Sequence
  Description of Artificial Sequence: Synthetic oligonucleotide
gugcugucaccugguacag

SEQ ID NO: 2832921 - RNA, 19 nt, Artificial Sequence
  Description of Artificial Sequence: Synthetic oligonucleotide
acucgguggaugaggccag

SEQ ID NO: 2832922 - RNA, 19 nt, Artificial Sequence
  Description of Artificial Sequence: Synthetic oligonucleotide
agguggugacacagacucg

SEQ ID NO: 2832923 - RNA, 19 nt, Artificial Sequence
  Description of Artificial Sequence: Synthetic oligonucleotide
ccaaggagguuccgguacc

SEQ ID NO: 2832924 - RNA, 19 nt, Artificial Sequence
  Description of Artificial Sequence: Synthetic oligonucleotide
agaccagauucucgagauu

SEQ ID NO: 2832925 - RNA, 19 nt, Artificial Sequence
  Description of Artificial Sequence: Synthetic oligonucleotide
gugaggacuggugcuguca

SEQ ID NO: 2832926 - RNA, 19 nt, Artificial Sequence
  Description of Artificial Sequence: Synthetic oligonucleotide
gugccuccggcagagaaaa

SEQ ID NO: 2832927 - RNA, 19 nt, Artificial Sequence
  Description of Artificial Sequence: Synthetic oligonucleotide
cacagacucgguggaugag

SEQ ID NO: 2832928 - RNA, 19 nt, Artificial Sequence
  Description of Artificial Sequence: Synthetic oligonucleotide
gcccuugccagugaccuug

SEQ ID NO: 2832929 - RNA, 19 nt, Artificial Sequence
  Description of Artificial Sequence: Synthetic oligonucleotide
gaguggaggauaucuuguu

SEQ ID NO: 2832930 - RNA, 19 nt, Artificial Sequence
  Description of Artificial Sequence: Synthetic oligonucleotide
gagggaggacagcgccaag

SEQ ID NO: 2832931 - RNA, 19 nt, Artificial Sequence
  Description of Artificial Sequence: Synthetic oligonucleotide
guuccgguaccgaccacca

SEQ ID NO: 2832932 - RNA, 19 nt, Artificial Sequence
  Description of Artificial Sequence: Synthetic oligonucleotide
cggcuguauaucugcaugc

SEQ ID NO: 2832933 - RNA, 19 nt, Artificial Sequence
  Description of Artificial Sequence: Synthetic oligonucleotide
agguuccgguaccgaccac

SEQ ID NO: 2832934 - RNA, 19 nt, Artificial Sequence
  Description of Artificial Sequence: Synthetic oligonucleotide
accagauucucgagauuau

SEQ ID NO: 2832935 - RNA, 19 nt, Artificial Sequence
  Description of Artificial Sequence: Synthetic oligonucleotide
ugacacagacucgguggau

SEQ ID NO: 2832936 - RNA, 19 nt, Artificial Sequence
  Description of Artificial Sequence: Synthetic oligonucleotide
acgccccgcccgugggucc

SEQ ID NO: 2832937 - RNA, 19 nt, Artificial Sequence
  Description of Artificial Sequence: Synthetic oligonucleotide
aagccggcgcgggugucug

SEQ ID NO: 2832938 - RNA, 19 nt, Artificial Sequence
  Description of Artificial Sequence: Synthetic oligonucleotide
ccagaugcaaagagugcca

SEQ ID NO: 2832939 - RNA, 19 nt, Artificial Sequence
  Description of Artificial Sequence: Synthetic oligonucleotide
agugagccacucgguggag

SEQ ID NO: 2832940 - RNA, 19 nt, Artificial Sequence
  Description of Artificial Sequence: Synthetic oligonucleotide
ccugagcccagcaggcccc

SEQ ID NO: 2832941 - RNA, 19 nt, Artificial Sequence
  Description of Artificial Sequence: Synthetic oligonucleotide
cugugccuccggcagagaa

SEQ ID NO: 2832942 - RNA, 19 nt, Artificial Sequence
  Description of Artificial Sequence: Synthetic oligonucleotide
gccagcgaagagcagcaga

SEQ ID NO: 2832943 - RNA, 19 nt, Artificial Sequence
  Description of Artificial Sequence: Synthetic oligonucleotide
gagccacucgguggaggcc

SEQ ID NO: 2832944 - RNA, 19 nt, Artificial Sequence
  Description of Artificial Sequence: Synthetic oligonucleotide
ccccugaauagugagccac

SEQ ID NO: 2832945 - RNA, 19 nt, Artificial Sequence
  Description of Artificial Sequence: Synthetic oligonucleotide
gggaagaucuuugcuugga

SEQ ID NO: 2832946 - RNA, 19 nt, Artificial Sequence
  Description of Artificial Sequence: Synthetic oligonucleotide
ggcgcgggugucuguacgc

SEQ ID NO: 2832947 - RNA, 19 nt, Artificial Sequence
  Description of Artificial Sequence: Synthetic oligonucleotide
cuuggcuggugugaggacu

SEQ ID NO: 2832948 - RNA, 19 nt, Artificial Sequence
  Description of Artificial Sequence: Synthetic oligonucleotide
ugccagcgaagagcagcag

SEQ ID NO: 2832949 - RNA, 19 nt, Artificial Sequence
  Description of Artificial Sequence: Synthetic oligonucleotide
cagaugcaaagagugccaa

SEQ ID NO: 2832950 - RNA, 19 nt, Artificial Sequence
  Description of Artificial Sequence: Synthetic oligonucleotide
ugcugucaccugguacaga

SEQ ID NO: 2832951 - RNA, 19 nt, Artificial Sequence
  Description of Artificial Sequence: Synthetic oligonucleotide
aucuuugcuuggaaaccuu

SEQ ID NO: 2832952 - RNA, 19 nt, Artificial Sequence
  Description of Artificial Sequence: Synthetic oligonucleotide
ucacgccccgcccgugggu

SEQ ID NO: 2832953 - RNA, 19 nt, Artificial Sequence
  Description of Artificial Sequence: Synthetic oligonucleotide
uuccgguaccgaccaccau

SEQ ID NO: 2832954 - RNA, 19 nt, Artificial Sequence
  Description of Artificial Sequence: Synthetic oligonucleotide
gcaagcagaugagaaucuc

SEQ ID NO: 2832955 - RNA, 19 nt, Artificial Sequence
  Description of Artificial Sequence: Synthetic oligonucleotide
agccaaagccggcgcgggu

SEQ ID NO: 2832956 - RNA, 19 nt, Artificial Sequence
  Description of Artificial Sequence: Synthetic oligonucleotide
ggguccaaucugugccucc

SEQ ID NO: 2832957 - RNA, 19 nt, Artificial Sequence
  Description of Artificial Sequence: Synthetic oligonucleotide
ccugaauagugagccacuc

SEQ ID NO: 2832958 - RNA, 19 nt, Artificial Sequence
  Description of Artificial Sequence: Synthetic oligonucleotide
ugccaacagcaagcagaug

SEQ ID NO: 2832959 - RNA, 19 nt, Artificial Sequence
  Description of Artificial Sequence: Synthetic oligonucleotide
gcgaagagcagcagagaca

SEQ ID NO: 2832960 - RNA, 19 nt, Artificial Sequence
  Description of Artificial Sequence: Synthetic oligonucleotide
ucgguggaugaggccagau

SEQ ID NO: 2832961 - RNA, 19 nt, Artificial Sequence
  Description of Artificial Sequence: Synthetic oligonucleotide
ccguggguccaaucugugc

SEQ ID NO: 2832962 - RNA, 19 nt, Artificial Sequence
  Description of Artificial Sequence: Synthetic oligonucleotide
ggggagccaaagccggcgc

SEQ ID NO: 2832963 - RNA, 19 nt, Artificial Sequence
  Description of Artificial Sequence: Synthetic oligonucleotide
gccaaagccggcgcgggug

SEQ ID NO: 2832964 - RNA, 19 nt, Artificial Sequence
  Description of Artificial Sequence: Synthetic oligonucleotide
cagcuggcggcuguauauc

SEQ ID NO: 2832965 - RNA, 19 nt, Artificial Sequence
  Description of Artificial Sequence: Synthetic oligonucleotide
ccaaucugugccuccggca

SEQ ID NO: 2832966 - RNA, 19 nt, Artificial Sequence
  Description of Artificial Sequence: Synthetic oligonucleotide
ccgguaccgaccaccauca

SEQ ID NO: 2832967 - RNA, 19 nt, Artificial Sequence
  Description of Artificial Sequence: Synthetic oligonucleotide
guacagaguggaggauauc

SEQ ID NO: 2832968 - RNA, 19 nt, Artificial Sequence
  Description of Artificial Sequence: Synthetic oligonucleotide
gccaaccauggagaagaug

SEQ ID NO: 2832969 - RNA, 19 nt, Artificial Sequence
  Description of Artificial Sequence: Synthetic oligonucleotide
uggaggccagcuggcggcu

SEQ ID NO: 2832970 - RNA, 19 nt, Artificial Sequence
  Description of Artificial Sequence: Synthetic oligonucleotide
cuuuaccaaagaccagauu

SEQ ID NO: 2832971 - RNA, 19 nt, Artificial Sequence
  Description of Artificial Sequence: Synthetic oligonucleotide
ggaggauaucuuguugaua

SEQ ID NO: 2832972 - RNA, 19 nt, Artificial Sequence
  Description of Artificial Sequence: Synthetic oligonucleotide
gcuggcggcuguauaucug

SEQ ID NO: 2832973 - RNA, 19 nt, Artificial Sequence
  Description of Artificial Sequence: Synthetic oligonucleotide
ccucuucuugcccuugcca

SEQ ID NO: 2832974 - RNA, 19 nt, Artificial Sequence
  Description of Artificial Sequence: Synthetic oligonucleotide
ggagggaggacagcgccaa

SEQ ID NO: 2832975 - RNA, 19 nt, Artificial Sequence
  Description of Artificial Sequence: Synthetic oligonucleotide
ccaccaucacgccccgccc

SEQ ID NO: 2832976 - RNA, 19 nt, Artificial Sequence
  Description of Artificial Sequence: Synthetic oligonucleotide
ucugugccuccggcagaga

SEQ ID NO: 2832977 - RNA, 19 nt, Artificial Sequence
  Description of Artificial Sequence: Synthetic oligonucleotide
cagcgaagagcagcagaga

SEQ ID NO: 2832978 - RNA, 19 nt, Artificial Sequence
  Description of Artificial Sequence: Synthetic oligonucleotide
ugcccuugccagugaccuu

SEQ ID NO: 2832979 - RNA, 19 nt, Artificial Sequence
  Description of Artificial Sequence: Synthetic oligonucleotide
gaggccagcuggcggcugu

SEQ ID NO: 2832980 - RNA, 19 nt, Artificial Sequence
  Description of Artificial Sequence: Synthetic oligonucleotide
cgaaaaggccugagcccag

SEQ ID NO: 2832981 - RNA, 19 nt, Artificial Sequence
  Description of Artificial Sequence: Synthetic oligonucleotide
cacgccccgcccguggguc

SEQ ID NO: 2832982 - RNA, 19 nt, Artificial Sequence
  Description of Artificial Sequence: Synthetic oligonucleotide
cgguggaugaggccagaug

SEQ ID NO: 2832983 - RNA, 19 nt, Artificial Sequence
  Description of Artificial Sequence: Synthetic oligonucleotide
gaaucucagggaagaucuu

SEQ ID NO: 2832984 - RNA, 19 nt, Artificial Sequence
  Description of Artificial Sequence: Synthetic oligonucleotide
cccguggguccaaucugug

SEQ ID NO: 2832985 - RNA, 19 nt, Artificial Sequence
  Description of Artificial Sequence: Synthetic oligonucleotide
cugucaccugguacagagu

SEQ ID NO: 2832986 - RNA, 19 nt, Artificial Sequence
  Description of Artificial Sequence: Synthetic oligonucleotide
gugugaggacuggugcugu

SEQ ID NO: 2832987 - RNA, 19 nt, Artificial Sequence
  Description of Artificial Sequence: Synthetic oligonucleotide
ccuuuaccaaagaccagau

SEQ ID NO: 2832988 - RNA, 19 nt, Artificial Sequence
  Description of Artificial Sequence: Synthetic oligonucleotide
gaccaccaucacgccccgc

SEQ ID NO: 2832989 - RNA, 19 nt, Artificial Sequence
  Description of Artificial Sequence: Synthetic oligonucleotide
ccagugaccuuggcuggug

SEQ ID NO: 2832990 - RNA, 19 nt, Artificial Sequence
  Description of Artificial Sequence: Synthetic oligonucleotide
gcgccaaggagguuccggu

SEQ ID NO: 2832991 - RNA, 19 nt, Artificial Sequence
  Description of Artificial Sequence: Synthetic oligonucleotide
caaagccggcgcggguguc

SEQ ID NO: 2832992 - RNA, 19 nt, Artificial Sequence
  Description of Artificial Sequence: Synthetic oligonucleotide
ccuugccagugaccuuggc

SEQ ID NO: 2832993 - RNA, 19 nt, Artificial Sequence
  Description of Artificial Sequence: Synthetic oligonucleotide
cuggugcugucaccuggua

SEQ ID NO: 2832994 - RNA, 19 nt, Artificial Sequence
  Description of Artificial Sequence: Synthetic oligonucleotide
cagcgccaaggagguuccg

SEQ ID NO: 2832995 - RNA, 19 nt, Artificial Sequence
  Description of Artificial Sequence: Synthetic oligonucleotide
cacucgguggaggccagcu

SEQ ID NO: 2832996 - RNA, 19 nt, Artificial Sequence
  Description of Artificial Sequence: Synthetic oligonucleotide
ccagcuggcggcuguauau

SEQ ID NO: 2832997 - RNA, 19 nt, Artificial Sequence
  Description of Artificial Sequence: Synthetic oligonucleotide
cagugaccuuggcuggugu

SEQ ID NO: 2832998 - RNA, 19 nt, Artificial Sequence
  Description of Artificial Sequence: Synthetic oligonucleotide
guggugacacagacucggu

SEQ ID NO: 2832999 - RNA, 19 nt, Artificial Sequence
  Description of Artificial Sequence: Synthetic oligonucleotide
ggcggcuguauaucugcau

SEQ ID NO: 2833000 - RNA, 19 nt, Artificial Sequence
  Description of Artificial Sequence: Synthetic oligonucleotide
cgcccguggguccaaucug

SEQ ID NO: 2833001 - RNA, 19 nt, Artificial Sequence
  Description of Artificial Sequence: Synthetic oligonucleotide
cggcgcgggugucuguacg

SEQ ID NO: 2833002 - RNA, 19 nt, Artificial Sequence
  Description of Artificial Sequence: Synthetic oligonucleotide
cucgguggaugaggccaga

SEQ ID NO: 2833003 - RNA, 19 nt, Artificial Sequence
  Description of Artificial Sequence: Synthetic oligonucleotide
agccggcgcgggugucugu

SEQ ID NO: 2833004 - RNA, 19 nt, Artificial Sequence
  Description of Artificial Sequence: Synthetic oligonucleotide
cgagauuauugaaggcagu

SEQ ID NO: 2833005 - RNA, 19 nt, Artificial Sequence
  Description of Artificial Sequence: Synthetic oligonucleotide
gcagguggugacacagacu

SEQ ID NO: 2833006 - RNA, 19 nt, Artificial Sequence
  Description of Artificial Sequence: Synthetic oligonucleotide
gccagcuggcggcuguaua

SEQ ID NO: 2833007 - RNA, 19 nt, Artificial Sequence
  Description of Artificial Sequence: Synthetic oligonucleotide
cugguacagaguggaggau

SEQ ID NO: 2833008 - RNA, 19 nt, Artificial Sequence
  Description of Artificial Sequence: Synthetic oligonucleotide
gccacucgguggaggccag

SEQ ID NO: 2833009 - RNA, 19 nt, Artificial Sequence
  Description of Artificial Sequence: Synthetic oligonucleotide
ggaggccagcuggcggcug

SEQ ID NO: 2833010 - RNA, 19 nt, Artificial Sequence
  Description of Artificial Sequence: Synthetic oligonucleotide
cgaccaccaucacgccccg

SEQ ID NO: 2833011 - RNA, 19 nt, Artificial Sequence
  Description of Artificial Sequence: Synthetic oligonucleotide
aggccagcuggcggcugua

SEQ ID NO: 2833012 - RNA, 19 nt, Artificial Sequence
  Description of Artificial Sequence: Synthetic oligonucleotide
gcccguggguccaaucugu

SEQ ID NO: 2833013 - RNA, 19 nt, Artificial Sequence
  Description of Artificial Sequence: Synthetic oligonucleotide
ccggcgcgggugucuguac

SEQ ID NO: 2833014 - RNA, 19 nt, Artificial Sequence
  Description of Artificial Sequence: Synthetic oligonucleotide
ccgcccguggguccaaucu

SEQ ID NO: 2833015 - RNA, 19 nt, Artificial Sequence
  Description of Artificial Sequence: Synthetic oligonucleotide
ccagauucucgagauuauu

SEQ ID NO: 2833016 - RNA, 19 nt, Artificial Sequence
  Description of Artificial Sequence: Synthetic oligonucleotide
ggcuggugugaggacuggu

SEQ ID NO: 2833017 - RNA, 19 nt, Artificial Sequence
  Description of Artificial Sequence: Synthetic oligonucleotide
ccaaagccggcgcgggugu

SEQ ID NO: 2833018 - RNA, 19 nt, Artificial Sequence
  Description of Artificial Sequence: Synthetic oligonucleotide
cccgcccguggguccaauc

SEQ ID NO: 2833019 - RNA, 19 nt, Artificial Sequence
  Description of Artificial Sequence: Synthetic oligonucleotide
ccacucgguggaggccagc

SEQ ID NO: 2833020 - RNA, 19 nt, Artificial Sequence
  Description of Artificial Sequence: Synthetic oligonucleotide
ccaucacgccccgcccgug

SEQ ID NO: 2833021 - RNA, 19 nt, Artificial Sequence
  Description of Artificial Sequence: Synthetic oligonucleotide
gccagugaccuuggcuggu

SEQ ID NO: 2833022 - RNA, 19 nt, Artificial Sequence
  Description of Artificial Sequence: Synthetic oligonucleotide
gccggcgcgggugucugua

SEQ ID NO: 2833023 - RNA, 19 nt, Artificial Sequence
  Description of Artificial Sequence: Synthetic oligonucleotide
cgccaaggagguuccggua

SEQ ID NO: 2833024 - RNA, 19 nt, Artificial Sequence
  Description of Artificial Sequence: Synthetic oligonucleotide
cgguaccgaccaccaucac

SEQ ID NO: 2833025 - RNA, 19 nt, Artificial Sequence
  Description of Artificial Sequence: Synthetic oligonucleotide
ggccaaccauggagaagau

SEQ ID NO: 2833026 - RNA, 19 nt, Artificial Sequence
  Description of Artificial Sequence: Synthetic oligonucleotide
ggccagcuggcggcuguau

SEQ ID NO: 2833027 - RNA, 19 nt, Artificial Sequence
  Description of Artificial Sequence: Synthetic oligonucleotide
ggacagcgccaaggagguu

SEQ ID NO: 2833028 - RNA, 19 nt, Artificial Sequence
  Description of Artificial Sequence: Synthetic oligonucleotide
cgccccgcccgugggucca

SEQ ID NO: 2833029 - RNA, 19 nt, Artificial Sequence
  Description of Artificial Sequence: Synthetic oligonucleotide
gccccgcccguggguccaa

SEQ ID NO: 2833030 - RNA, 19 nt, Artificial Sequence
  Description of Artificial Sequence: Synthetic oligonucleotide
ccccgcccguggguccaau

SEQ ID NO: 2833031 - RNA, 19 nt, Artificial Sequence
  Description of Artificial Sequence: Synthetic oligonucleotide
uaagaaauaauccuugucg

SEQ ID NO: 2833032 - RNA, 19 nt, Artificial Sequence
  Description of Artificial Sequence: Synthetic oligonucleotide
aguacauugauacuaaacc

SEQ ID NO: 2833033 - RNA, 19 nt, Artificial Sequence
  Description of Artificial Sequence: Synthetic oligonucleotide
uuuauuauaaaagggaagg

SEQ ID NO: 2833034 - RNA, 19 nt, Artificial Sequence
  Description of Artificial Sequence: Synthetic oligonucleotide
ucuaaauaagaaauaaucc

SEQ ID NO: 2833035 - RNA, 19 nt, Artificial Sequence
  Description of Artificial Sequence: Synthetic oligonucleotide
ugaugaauaguucagaaug

SEQ ID NO: 2833036 - RNA, 19 nt, Artificial Sequence
  Description of Artificial Sequence: Synthetic oligonucleotide
acagaaauuauuuacauga

SEQ ID NO: 2833037 - RNA, 19 nt, Artificial Sequence
  Description of Artificial Sequence: Synthetic oligonucleotide
ucuagaacuacuuuggugc

SEQ ID NO: 2833038 - RNA, 19 nt, Artificial Sequence
  Description of Artificial Sequence: Synthetic oligonucleotide
ucaguuuauuauaaaaggg

SEQ ID NO: 2833039 - RNA, 19 nt, Artificial Sequence
  Description of Artificial Sequence: Synthetic oligonucleotide
cuuuuaaguacauugauac

SEQ ID NO: 2833040 - RNA, 19 nt, Artificial Sequence
  Description of Artificial Sequence: Synthetic oligonucleotide
aauacucugucaaagagcg

SEQ ID NO: 2833041 - RNA, 19 nt, Artificial Sequence
  Description of Artificial Sequence: Synthetic oligonucleotide
auacuaaaccuucagagac

SEQ ID NO: 2833042 - RNA, 19 nt, Artificial Sequence
  Description of Artificial Sequence: Synthetic oligonucleotide
aucaguuuauuauaaaagg

SEQ ID NO: 2833043 - RNA, 19 nt, Artificial Sequence
  Description of Artificial Sequence: Synthetic oligonucleotide
ugugauaccauuucaacag

SEQ ID NO: 2833044 - RNA, 19 nt, Artificial Sequence
  Description of Artificial Sequence: Synthetic oligonucleotide
ugauacuaaaccuucagag

SEQ ID NO: 2833045 - RNA, 19 nt, Artificial Sequence
  Description of Artificial Sequence: Synthetic oligonucleotide
uuuucuggaagcauaaugc

SEQ ID NO: 2833046 - RNA, 19 nt, Artificial Sequence
  Description of Artificial Sequence: Synthetic oligonucleotide
aauaguucagaaugucggc

SEQ ID NO: 2833047 - RNA, 19 nt, Artificial Sequence
  Description of Artificial Sequence: Synthetic oligonucleotide
aauggaugucaguuuaggc

SEQ ID NO: 2833048 - RNA, 19 nt, Artificial Sequence
  Description of Artificial Sequence: Synthetic oligonucleotide
cucuaaauaagaaauaauc

SEQ ID NO: 2833049 - RNA, 19 nt, Artificial Sequence
  Description of Artificial Sequence: Synthetic oligonucleotide
ugaauaguucagaaugucg

SEQ ID NO: 2833050 - RNA, 19 nt, Artificial Sequence
  Description of Artificial Sequence: Synthetic oligonucleotide
uuccuuucgagccugaucc

SEQ ID NO: 2833051 - RNA, 19 nt, Artificial Sequence
  Description of Artificial Sequence: Synthetic oligonucleotide
aaagggaaggcacagaaau

SEQ ID NO: 2833052 - RNA, 19 nt, Artificial Sequence
  Description of Artificial Sequence: Synthetic oligonucleotide
gaauaguucagaaugucgg

SEQ ID NO: 2833053 - RNA, 19 nt, Artificial Sequence
  Description of Artificial Sequence: Synthetic oligonucleotide
auuauaaaagggaaggcac

SEQ ID NO: 2833054 - RNA, 19 nt, Artificial Sequence
  Description of Artificial Sequence: Synthetic oligonucleotide
uuauuuacaugaugaauag

SEQ ID NO: 2833055 - RNA, 19 nt, Artificial Sequence
  Description of Artificial Sequence: Synthetic oligonucleotide
ucaacagugauuucagucc

SEQ ID NO: 2833056 - RNA, 19 nt, Artificial Sequence
  Description of Artificial Sequence: Synthetic oligonucleotide
uaaaccuucagagacaaug

SEQ ID NO: 2833057 - RNA, 19 nt, Artificial Sequence
  Description of Artificial Sequence: Synthetic oligonucleotide
uaaauaagaaauaauccuu

SEQ ID NO: 2833058 - RNA, 19 nt, Artificial Sequence
  Description of Artificial Sequence: Synthetic oligonucleotide
aagaaauaauccuugucgu

SEQ ID NO: 2833059 - RNA, 19 nt, Artificial Sequence
  Description of Artificial Sequence: Synthetic oligonucleotide
uauuuuccaagaaugucag

SEQ ID NO: 2833060 - RNA, 19 nt, Artificial Sequence
  Description of Artificial Sequence: Synthetic oligonucleotide
uuuggucacaguuucggcg

SEQ ID NO: 2833061 - RNA, 19 nt, Artificial Sequence
  Description of Artificial Sequence: Synthetic oligonucleotide
auaagaaauaauccuuguc

SEQ ID NO: 2833062 - RNA, 19 nt, Artificial Sequence
  Description of Artificial Sequence: Synthetic oligonucleotide
uuuuccaagaaugucagca

SEQ ID NO: 2833063 - RNA, 19 nt, Artificial Sequence
  Description of Artificial Sequence: Synthetic oligonucleotide
aauaagaaauaauccuugu

SEQ ID NO: 2833064 - RNA, 19 nt, Artificial Sequence
  Description of Artificial Sequence: Synthetic oligonucleotide
uuccuugagacuuuucugg

SEQ ID NO: 2833065 - RNA, 19 nt, Artificial Sequence
  Description of Artificial Sequence: Synthetic oligonucleotide
ccaacuuucacacugaccg

SEQ ID NO: 2833066 - RNA, 19 nt, Artificial Sequence
  Description of Artificial Sequence: Synthetic oligonucleotide
aaugucagcaucucuaaau

SEQ ID NO: 2833067 - RNA, 19 nt, Artificial Sequence
  Description of Artificial Sequence: Synthetic oligonucleotide
aaauaagaaauaauccuug

SEQ ID NO: 2833068 - RNA, 19 nt, Artificial Sequence
  Description of Artificial Sequence: Synthetic oligonucleotide
uauuauaaaagggaaggca

SEQ ID NO: 2833069 - RNA, 19 nt, Artificial Sequence
  Description of Artificial Sequence: Synthetic oligonucleotide
aauacuuuuccuugagacu

SEQ ID NO: 2833070 - RNA, 19 nt, Artificial Sequence
  Description of Artificial Sequence: Synthetic oligonucleotide
uuuuccuugagacuuuucu

SEQ ID NO: 2833071 - RNA, 19 nt, Artificial Sequence
  Description of Artificial Sequence: Synthetic oligonucleotide
uuacaugaugaauaguuca

SEQ ID NO: 2833072 - RNA, 19 nt, Artificial Sequence
  Description of Artificial Sequence: Synthetic oligonucleotide
uuuaaguacauugauacua

SEQ ID NO: 2833073 - RNA, 19 nt, Artificial Sequence
  Description of Artificial Sequence: Synthetic oligonucleotide
aaguacauugauacuaaac

SEQ ID NO: 2833074 - RNA, 19 nt, Artificial Sequence
  Description of Artificial Sequence: Synthetic oligonucleotide
ucgucuagaacuacuuugg

SEQ ID NO: 2833075 - RNA, 19 nt, Artificial Sequence
  Description of Artificial Sequence: Synthetic oligonucleotide
ucaaccaauacucugucaa

SEQ ID NO: 2833076 - RNA, 19 nt, Artificial Sequence
  Description of Artificial Sequence: Synthetic oligonucleotide
cagucuuuuaaguacauug

SEQ ID NO: 2833077 - RNA, 19 nt, Artificial Sequence
  Description of Artificial Sequence: Synthetic oligonucleotide
uacaugaugaauaguucag

SEQ ID NO: 2833078 - RNA, 19 nt, Artificial Sequence
  Description of Artificial Sequence: Synthetic oligonucleotide
cauaaugccaccuuugguc

SEQ ID NO: 2833079 - RNA, 19 nt, Artificial Sequence
  Description of Artificial Sequence: Synthetic oligonucleotide
aacuuucacacugaccggc

SEQ ID NO: 2833080 - RNA, 19 nt, Artificial Sequence
  Description of Artificial Sequence: Synthetic oligonucleotide
aagaacuuugucuccaacu

SEQ ID NO: 2833081 - RNA, 19 nt, Artificial Sequence
  Description of Artificial Sequence: Synthetic oligonucleotide
auccuugucgucuagaacu

SEQ ID NO: 2833082 - RNA, 19 nt, Artificial Sequence
  Description of Artificial Sequence: Synthetic oligonucleotide
ucuggaagcauaaugccac

SEQ ID NO: 2833083 - RNA, 19 nt, Artificial Sequence
  Description of Artificial Sequence: Synthetic oligonucleotide
auugauacuaaaccuucag

SEQ ID NO: 2833084 - RNA, 19 nt, Artificial Sequence
  Description of Artificial Sequence: Synthetic oligonucleotide
aaauuauuuacaugaugaa

SEQ ID NO: 2833085 - RNA, 19 nt, Artificial Sequence
  Description of Artificial Sequence: Synthetic oligonucleotide
aauccuugucgucuagaac

SEQ ID NO: 2833086 - RNA, 19 nt, Artificial Sequence
  Description of Artificial Sequence: Synthetic oligonucleotide
aauuauuuacaugaugaau

SEQ ID NO: 2833087 - RNA, 19 nt, Artificial Sequence
  Description of Artificial Sequence: Synthetic oligonucleotide
uuauaaaagggaaggcaca

SEQ ID NO: 2833088 - RNA, 19 nt, Artificial Sequence
  Description of Artificial Sequence: Synthetic oligonucleotide
uaaaagggaaggcacagaa

SEQ ID NO: 2833089 - RNA, 19 nt, Artificial Sequence
  Description of Artificial Sequence: Synthetic oligonucleotide
cuugcaauacuuuuccuug

SEQ ID NO: 2833090 - RNA, 19 nt, Artificial Sequence
  Description of Artificial Sequence: Synthetic oligonucleotide
ucaucaguuuauuauaaaa

SEQ ID NO: 2833091 - RNA, 19 nt, Artificial Sequence
  Description of Artificial Sequence: Synthetic oligonucleotide
aacuuugucuccaacuuuc

SEQ ID NO: 2833092 - RNA, 19 nt, Artificial Sequence
  Description of Artificial Sequence: Synthetic oligonucleotide
auggaugucaguuuaggca

SEQ ID NO: 2833093 - RNA, 19 nt, Artificial Sequence
  Description of Artificial Sequence: Synthetic oligonucleotide
ucagcaucucuaaauaaga

SEQ ID NO: 2833094 - RNA, 19 nt, Artificial Sequence
  Description of Artificial Sequence: Synthetic oligonucleotide
uuugaaagcuuguccagcc

SEQ ID NO: 2833095 - RNA, 19 nt, Artificial Sequence
  Description of Artificial Sequence: Synthetic oligonucleotide
agaaauaauccuugucguc

SEQ ID NO: 2833096 - RNA, 19 nt, Artificial Sequence
  Description of Artificial Sequence: Synthetic oligonucleotide
aaucucuccacccuuuccu

SEQ ID NO: 2833097 - RNA, 19 nt, Artificial Sequence
  Description of Artificial Sequence: Synthetic oligonucleotide
acuccuuucaaccaauacu

SEQ ID NO: 2833098 - RNA, 19 nt, Artificial Sequence
  Description of Artificial Sequence: Synthetic oligonucleotide
cuaaauaagaaauaauccu

SEQ ID NO: 2833099 - RNA, 19 nt, Artificial Sequence
  Description of Artificial Sequence: Synthetic oligonucleotide
uucaacagugauuucaguc

SEQ ID NO: 2833100 - RNA, 19 nt, Artificial Sequence
  Description of Artificial Sequence: Synthetic oligonucleotide
uuuacaugaugaauaguuc

SEQ ID NO: 2833101 - RNA, 19 nt, Artificial Sequence
  Description of Artificial Sequence: Synthetic oligonucleotide
uauaaaagggaaggcacag

SEQ ID NO: 2833102 - RNA, 19 nt, Artificial Sequence
  Description of Artificial Sequence: Synthetic oligonucleotide
uuaaguacauugauacuaa

SEQ ID NO: 2833103 - RNA, 19 nt, Artificial Sequence
  Description of Artificial Sequence: Synthetic oligonucleotide
cuccuuucaaccaauacuc

SEQ ID NO: 2833104 - RNA, 19 nt, Artificial Sequence
  Description of Artificial Sequence: Synthetic oligonucleotide
aaaccuucagagacaaugg

SEQ ID NO: 2833105 - RNA, 19 nt, Artificial Sequence
  Description of Artificial Sequence: Synthetic oligonucleotide
uuggucacaguuucggcgg

SEQ ID NO: 2833106 - RNA, 19 nt, Artificial Sequence
  Description of Artificial Sequence: Synthetic oligonucleotide
gauacuaaaccuucagaga

SEQ ID NO: 2833107 - RNA, 19 nt, Artificial Sequence
  Description of Artificial Sequence: Synthetic oligonucleotide
ucaaagagcgguagaaacu

SEQ ID NO: 2833108 - RNA, 19 nt, Artificial Sequence
  Description of Artificial Sequence: Synthetic oligonucleotide
uuucuggaagcauaaugcc

SEQ ID NO: 2833109 - RNA, 19 nt, Artificial Sequence
  Description of Artificial Sequence: Synthetic oligonucleotide
cuuuucuggaagcauaaug

SEQ ID NO: 2833110 - RNA, 19 nt, Artificial Sequence
  Description of Artificial Sequence: Synthetic oligonucleotide
ucuuuuaaguacauugaua

SEQ ID NO: 2833111 - RNA, 19 nt, Artificial Sequence
  Description of Artificial Sequence: Synthetic oligonucleotide
uugauacuaaaccuucaga

SEQ ID NO: 2833112 - RNA, 19 nt, Artificial Sequence
  Description of Artificial Sequence: Synthetic oligonucleotide
caauacucugucaaagagc

SEQ ID NO: 2833113 - RNA, 19 nt, Artificial Sequence
  Description of Artificial Sequence: Synthetic oligonucleotide
guuuauuauaaaagggaag

SEQ ID NO: 2833114 - RNA, 19 nt, Artificial Sequence
  Description of Artificial Sequence: Synthetic oligonucleotide
uuauuauaaaagggaaggc

SEQ ID NO: 2833115 - RNA, 19 nt, Artificial Sequence
  Description of Artificial Sequence: Synthetic oligonucleotide
auauuuuccaagaauguca

SEQ ID NO: 2833116 - RNA, 19 nt, Artificial Sequence
  Description of Artificial Sequence: Synthetic oligonucleotide
uaguucagaaugucggcgg

SEQ ID NO: 2833117 - RNA, 19 nt, Artificial Sequence
  Description of Artificial Sequence: Synthetic oligonucleotide
agcauaaugccaccuuugg

SEQ ID NO: 2833118 - RNA, 19 nt, Artificial Sequence
  Description of Artificial Sequence: Synthetic oligonucleotide
caguuuauuauaaaaggga

SEQ ID NO: 2833119 - RNA, 19 nt, Artificial Sequence
  Description of Artificial Sequence: Synthetic oligonucleotide
uacauugauacuaaaccuu

SEQ ID NO: 2833120 - RNA, 19 nt, Artificial Sequence
  Description of Artificial Sequence: Synthetic oligonucleotide
cuugagacuuuucuggaag

SEQ ID NO: 2833121 - RNA, 19 nt, Artificial Sequence
  Description of Artificial Sequence: Synthetic oligonucleotide
uauauuuuccaagaauguc

SEQ ID NO: 2833122 - RNA, 19 nt, Artificial Sequence
  Description of Artificial Sequence: Synthetic oligonucleotide
ucaguuuaggcaucaucag

SEQ ID NO: 2833123 - RNA, 19 nt, Artificial Sequence
  Description of Artificial Sequence: Synthetic oligonucleotide
uuuccuugagacuuuucug

SEQ ID NO: 2833124 - RNA, 19 nt, Artificial Sequence
  Description of Artificial Sequence: Synthetic oligonucleotide
gucacagucuuuuaaguac

SEQ ID NO: 2833125 - RNA, 19 nt, Artificial Sequence
  Description of Artificial Sequence: Synthetic oligonucleotide
uuuggugccuccauauucu

SEQ ID NO: 2833126 - RNA, 19 nt, Artificial Sequence
  Description of Artificial Sequence: Synthetic oligonucleotide
ucucuaaauaagaaauaau

SEQ ID NO: 2833127 - RNA, 19 nt, Artificial Sequence
  Description of Artificial Sequence: Synthetic oligonucleotide
uucaugugauaccauuuca

SEQ ID NO: 2833128 - RNA, 19 nt, Artificial Sequence
  Description of Artificial Sequence: Synthetic oligonucleotide
ugcaauacuuuuccuugag

SEQ ID NO: 2833129 - RNA, 19 nt, Artificial Sequence
  Description of Artificial Sequence: Synthetic oligonucleotide
uccaagaaugucagcaucu

SEQ ID NO: 2833130 - RNA, 19 nt, Artificial Sequence
  Description of Artificial Sequence: Synthetic oligonucleotide
auaguucagaaugucggcg

SEQ ID NO: 2833131 - RNA, 19 nt, Artificial Sequence
  Description of Artificial Sequence: Synthetic oligonucleotide
ugauaccauuucaacagug

SEQ ID NO: 2833132 - RNA, 19 nt, Artificial Sequence
  Description of Artificial Sequence: Synthetic oligonucleotide
uucuggaagcauaaugcca

SEQ ID NO: 2833133 - RNA, 19 nt, Artificial Sequence
  Description of Artificial Sequence: Synthetic oligonucleotide
gucgucuagaacuacuuug

SEQ ID NO: 2833134 - RNA, 19 nt, Artificial Sequence
  Description of Artificial Sequence: Synthetic oligonucleotide
ucaugugauaccauuucaa

SEQ ID NO: 2833135 - RNA, 19 nt, Artificial Sequence
  Description of Artificial Sequence: Synthetic oligonucleotide
aguccguauauuuuccaag

SEQ ID NO: 2833136 - RNA, 19 nt, Artificial Sequence
  Description of Artificial Sequence: Synthetic oligonucleotide
aauaauccuugucgucuag

SEQ ID NO: 2833137 - RNA, 19 nt, Artificial Sequence
  Description of Artificial Sequence: Synthetic oligonucleotide
augugauaccauuucaaca

SEQ ID NO: 2833138 - RNA, 19 nt, Artificial Sequence
  Description of Artificial Sequence: Synthetic oligonucleotide
uuaggcaucaucaguuuau

SEQ ID NO: 2833139 - RNA, 19 nt, Artificial Sequence
  Description of Artificial Sequence: Synthetic oligonucleotide
uuucaguccguauauuuuc

SEQ ID NO: 2833140 - RNA, 19 nt, Artificial Sequence
  Description of Artificial Sequence: Synthetic oligonucleotide
caugugauaccauuucaac

SEQ ID NO: 2833141 - RNA, 19 nt, Artificial Sequence
  Description of Artificial Sequence: Synthetic oligonucleotide
uccauauucugggagaaga

SEQ ID NO: 2833142 - RNA, 19 nt, Artificial Sequence
  Description of Artificial Sequence: Synthetic oligonucleotide
uacucugucaaagagcggu

SEQ ID NO: 2833143 - RNA, 19 nt, Artificial Sequence
  Description of Artificial Sequence: Synthetic oligonucleotide
gucaaagagcgguagaaac

SEQ ID NO: 2833144 - RNA, 19 nt, Artificial Sequence
  Description of Artificial Sequence: Synthetic oligonucleotide
uuuuaaguacauugauacu

SEQ ID NO: 2833145 - RNA, 19 nt, Artificial Sequence
  Description of Artificial Sequence: Synthetic oligonucleotide
agugauuucaguccguaua

SEQ ID NO: 2833146 - RNA, 19 nt, Artificial Sequence
  Description of Artificial Sequence: Synthetic oligonucleotide
uggaugucaguuuaggcau

SEQ ID NO: 2833147 - RNA, 19 nt, Artificial Sequence
  Description of Artificial Sequence: Synthetic oligonucleotide
acauugauacuaaaccuuc

SEQ ID NO: 2833148 - RNA, 19 nt, Artificial Sequence
  Description of Artificial Sequence: Synthetic oligonucleotide
auaaugccaccuuugguca

SEQ ID NO: 2833149 - RNA, 19 nt, Artificial Sequence
  Description of Artificial Sequence: Synthetic oligonucleotide
uucugggagaagaacuuug

SEQ ID NO: 2833150 - RNA, 19 nt, Artificial Sequence
  Description of Artificial Sequence: Synthetic oligonucleotide
accauuucaacagugauuu

SEQ ID NO: 2833151 - RNA, 19 nt, Artificial Sequence
  Description of Artificial Sequence: Synthetic oligonucleotide
agccugaucccacagccac

SEQ ID NO: 2833152 - RNA, 19 nt, Artificial Sequence
  Description of Artificial Sequence: Synthetic oligonucleotide
cacccuuuccuuucgagcc

SEQ ID NO: 2833153 - RNA, 19 nt, Artificial Sequence
  Description of Artificial Sequence: Synthetic oligonucleotide
uucaguccguauauuuucc

SEQ ID NO: 2833154 - RNA, 19 nt, Artificial Sequence
  Description of Artificial Sequence: Synthetic oligonucleotide
uuuugaaagcuuguccagc

SEQ ID NO: 2833155 - RNA, 19 nt, Artificial Sequence
  Description of Artificial Sequence: Synthetic oligonucleotide
agcaucucuaaauaagaaa

SEQ ID NO: 2833156 - RNA, 19 nt, Artificial Sequence
  Description of Artificial Sequence: Synthetic oligonucleotide
aguuuauuauaaaagggaa

SEQ ID NO: 2833157 - RNA, 19 nt, Artificial Sequence
  Description of Artificial Sequence: Synthetic oligonucleotide
caacagugauuucaguccg

SEQ ID NO: 2833158 - RNA, 19 nt, Artificial Sequence
  Description of Artificial Sequence: Synthetic oligonucleotide
auuuuccaagaaugucagc

SEQ ID NO: 2833159 - RNA, 19 nt, Artificial Sequence
  Description of Artificial Sequence: Synthetic oligonucleotide
gucaguuuaggcaucauca

SEQ ID NO: 2833160 - RNA, 19 nt, Artificial Sequence
  Description of Artificial Sequence: Synthetic oligonucleotide
augaauaguucagaauguc

SEQ ID NO: 2833161 - RNA, 19 nt, Artificial Sequence
  Description of Artificial Sequence: Synthetic oligonucleotide
cguauauuuuccaagaaug

SEQ ID NO: 2833162 - RNA, 19 nt, Artificial Sequence
  Description of Artificial Sequence: Synthetic oligonucleotide
aagaaugucagcaucucua

SEQ ID NO: 2833163 - RNA, 19 nt, Artificial Sequence
  Description of Artificial Sequence: Synthetic oligonucleotide
uacuaaaccuucagagaca

SEQ ID NO: 2833164 - RNA, 19 nt, Artificial Sequence
  Description of Artificial Sequence: Synthetic oligonucleotide
gucagcaucucuaaauaag

SEQ ID NO: 2833165 - RNA, 19 nt, Artificial Sequence
  Description of Artificial Sequence: Synthetic oligonucleotide
ggugccuccauauucuggg

SEQ ID NO: 2833166 - RNA, 19 nt, Artificial Sequence
  Description of Artificial Sequence: Synthetic oligonucleotide
uguccagccaugacucgcg

SEQ ID NO: 2833167 - RNA, 19 nt, Artificial Sequence
  Description of Artificial Sequence: Synthetic oligonucleotide
auuucaacagugauuucag

SEQ ID NO: 2833168 - RNA, 19 nt, Artificial Sequence
  Description of Artificial Sequence: Synthetic oligonucleotide
gucuagaacuacuuuggug

SEQ ID NO: 2833169 - RNA, 19 nt, Artificial Sequence
  Description of Artificial Sequence: Synthetic oligonucleotide
auauucugggagaagaacu

SEQ ID NO: 2833170 - RNA, 19 nt, Artificial Sequence
  Description of Artificial Sequence: Synthetic oligonucleotide
acuacuguugcuugcaaua

SEQ ID NO: 2833171 - RNA, 19 nt, Artificial Sequence
  Description of Artificial Sequence: Synthetic oligonucleotide
aaauaauccuugucgucua

SEQ ID NO: 2833172 - RNA, 19 nt, Artificial Sequence
  Description of Artificial Sequence: Synthetic oligonucleotide
uuucacacugaccggcuga

SEQ ID NO: 2833173 - RNA, 19 nt, Artificial Sequence
  Description of Artificial Sequence: Synthetic oligonucleotide
uccaacuuucacacugacc

SEQ ID NO: 2833174 - RNA, 19 nt, Artificial Sequence
  Description of Artificial Sequence: Synthetic oligonucleotide
ugaaagcuuguccagccau

SEQ ID NO: 2833175 - RNA, 19 nt, Artificial Sequence
  Description of Artificial Sequence: Synthetic oligonucleotide
uauucugggagaagaacuu

SEQ ID NO: 2833176 - RNA, 19 nt, Artificial Sequence
  Description of Artificial Sequence: Synthetic oligonucleotide
ugucaguuuaggcaucauc

SEQ ID NO: 2833177 - RNA, 19 nt, Artificial Sequence
  Description of Artificial Sequence: Synthetic oligonucleotide
agcuuguccagccaugacu

SEQ ID NO: 2833178 - RNA, 19 nt, Artificial Sequence
  Description of Artificial Sequence: Synthetic oligonucleotide
auacuuuuccuugagacuu

SEQ ID NO: 2833179 - RNA, 19 nt, Artificial Sequence
  Description of Artificial Sequence: Synthetic oligonucleotide
gaaauaauccuugucgucu

SEQ ID NO: 2833180 - RNA, 19 nt, Artificial Sequence
  Description of Artificial Sequence: Synthetic oligonucleotide
agaacuacuuuggugccuc

SEQ ID NO: 2833181 - RNA, 19 nt, Artificial Sequence
  Description of Artificial Sequence: Synthetic oligonucleotide
cagaaugucggcggaaugg

SEQ ID NO: 2833182 - RNA, 19 nt, Artificial Sequence
  Description of Artificial Sequence: Synthetic oligonucleotide
cuuuggugccuccauauuc

SEQ ID NO: 2833183 - RNA, 19 nt, Artificial Sequence
  Description of Artificial Sequence: Synthetic oligonucleotide
cuagaacuacuuuggugcc

SEQ ID NO: 2833184 - RNA, 19 nt, Artificial Sequence
  Description of Artificial Sequence: Synthetic oligonucleotide
cauuucaacagugauuuca

SEQ ID NO: 2833185 - RNA, 19 nt, Artificial Sequence
  Description of Artificial Sequence: Synthetic oligonucleotide
uaauccuugucgucuagaa

SEQ ID NO: 2833186 - RNA, 19 nt, Artificial Sequence
  Description of Artificial Sequence: Synthetic oligonucleotide
cuucaugugauaccauuuc

SEQ ID NO: 2833187 - RNA, 19 nt, Artificial Sequence
  Description of Artificial Sequence: Synthetic oligonucleotide
auaccauuucaacagugau

SEQ ID NO: 2833188 - RNA, 19 nt, Artificial Sequence
  Description of Artificial Sequence: Synthetic oligonucleotide
agaaugucggcggaauggg

SEQ ID NO: 2833189 - RNA, 19 nt, Artificial Sequence
  Description of Artificial Sequence: Synthetic oligonucleotide
aaugucggcggaaugggca

SEQ ID NO: 2833190 - RNA, 19 nt, Artificial Sequence
  Description of Artificial Sequence: Synthetic oligonucleotide
aagcuuguccagccaugac

SEQ ID NO: 2833191 - RNA, 19 nt, Artificial Sequence
  Description of Artificial Sequence: Synthetic oligonucleotide
uuccaagaaugucagcauc

SEQ ID NO: 2833192 - RNA, 19 nt, Artificial Sequence
  Description of Artificial Sequence: Synthetic oligonucleotide
ugaucccacagccacuacu

SEQ ID NO: 2833193 - RNA, 19 nt, Artificial Sequence
  Description of Artificial Sequence: Synthetic oligonucleotide
uuuugacugucacagucuu

SEQ ID NO: 2833194 - RNA, 19 nt, Artificial Sequence
  Description of Artificial Sequence: Synthetic oligonucleotide
caauggaugucaguuuagg

SEQ ID NO: 2833195 - RNA, 19 nt, Artificial Sequence
  Description of Artificial Sequence: Synthetic oligonucleotide
uugacugucacagucuuuu

SEQ ID NO: 2833196 - RNA, 19 nt, Artificial Sequence
  Description of Artificial Sequence: Synthetic oligonucleotide
uuuaggcaucaucaguuua

SEQ ID NO: 2833197 - RNA, 19 nt, Artificial Sequence
  Description of Artificial Sequence: Synthetic oligonucleotide
ugccuccauauucugggag

SEQ ID NO: 2833198 - RNA, 19 nt, Artificial Sequence
  Description of Artificial Sequence: Synthetic oligonucleotide
uaccauuucaacagugauu

SEQ ID NO: 2833199 - RNA, 19 nt, Artificial Sequence
  Description of Artificial Sequence: Synthetic oligonucleotide
gaucccacagccacuacug

SEQ ID NO: 2833200 - RNA, 19 nt, Artificial Sequence
  Description of Artificial Sequence: Synthetic oligonucleotide
gacaauggaugucaguuua

SEQ ID NO: 2833201 - RNA, 19 nt, Artificial Sequence
  Description of Artificial Sequence: Synthetic oligonucleotide
uuuccaagaaugucagcau

SEQ ID NO: 2833202 - RNA, 19 nt, Artificial Sequence
  Description of Artificial Sequence: Synthetic oligonucleotide
aaagcuuguccagccauga

SEQ ID NO: 2833203 - RNA, 19 nt, Artificial Sequence
  Description of Artificial Sequence: Synthetic oligonucleotide
gggagaagaacuuugucuc

SEQ ID NO: 2833204 - RNA, 19 nt, Artificial Sequence
  Description of Artificial Sequence: Synthetic oligonucleotide
ucagaaugucggcggaaug

SEQ ID NO: 2833205 - RNA, 19 nt, Artificial Sequence
  Description of Artificial Sequence: Synthetic oligonucleotide
cauauucugggagaagaac

SEQ ID NO: 2833206 - RNA, 19 nt, Artificial Sequence
  Description of Artificial Sequence: Synthetic oligonucleotide
guacauugauacuaaaccu

SEQ ID NO: 2833207 - RNA, 19 nt, Artificial Sequence
  Description of Artificial Sequence: Synthetic oligonucleotide
gaaucucuccacccuuucc

SEQ ID NO: 2833208 - RNA, 19 nt, Artificial Sequence
  Description of Artificial Sequence: Synthetic oligonucleotide
agucuuuuaaguacauuga

SEQ ID NO: 2833209 - RNA, 19 nt, Artificial Sequence
  Description of Artificial Sequence: Synthetic oligonucleotide
acacugaccggcugaaucu

SEQ ID NO: 2833210 - RNA, 19 nt, Artificial Sequence
  Description of Artificial Sequence: Synthetic oligonucleotide
uggugccuccauauucugg

SEQ ID NO: 2833211 - RNA, 19 nt, Artificial Sequence
  Description of Artificial Sequence: Synthetic oligonucleotide
aagcauaaugccaccuuug

SEQ ID NO: 2833212 - RNA, 19 nt, Artificial Sequence
  Description of Artificial Sequence: Synthetic oligonucleotide
agaaugucagcaucucuaa

SEQ ID NO: 2833213 - RNA, 19 nt, Artificial Sequence
  Description of Artificial Sequence: Synthetic oligonucleotide
cuuuggucacaguuucggc

SEQ ID NO: 2833214 - RNA, 19 nt, Artificial Sequence
  Description of Artificial Sequence: Synthetic oligonucleotide
ugucagcaucucuaaauaa

SEQ ID NO: 2833215 - RNA, 19 nt, Artificial Sequence
  Description of Artificial Sequence: Synthetic oligonucleotide
aguuuaggcaucaucaguu

SEQ ID NO: 2833216 - RNA, 19 nt, Artificial Sequence
  Description of Artificial Sequence: Synthetic oligonucleotide
ucuccaacuuucacacuga

SEQ ID NO: 2833217 - RNA, 19 nt, Artificial Sequence
  Description of Artificial Sequence: Synthetic oligonucleotide
uccuugagacuuuucugga

SEQ ID NO: 2833218 - RNA, 19 nt, Artificial Sequence
  Description of Artificial Sequence: Synthetic oligonucleotide
uccguauauuuuccaagaa

SEQ ID NO: 2833219 - RNA, 19 nt, Artificial Sequence
  Description of Artificial Sequence: Synthetic oligonucleotide
acaguuucggcggcacucc

SEQ ID NO: 2833220 - RNA, 19 nt, Artificial Sequence
  Description of Artificial Sequence: Synthetic oligonucleotide
ugagacuuuucuggaagca

SEQ ID NO: 2833221 - RNA, 19 nt, Artificial Sequence
  Description of Artificial Sequence: Synthetic oligonucleotide
uacuguugcuugcaauacu

SEQ ID NO: 2833222 - RNA, 19 nt, Artificial Sequence
  Description of Artificial Sequence: Synthetic oligonucleotide
uugaaagcuuguccagcca

SEQ ID NO: 2833223 - RNA, 19 nt, Artificial Sequence
  Description of Artificial Sequence: Synthetic oligonucleotide
uugcaauacuuuuccuuga

SEQ ID NO: 2833224 - RNA, 19 nt, Artificial Sequence
  Description of Artificial Sequence: Synthetic oligonucleotide
gaagaacuuugucuccaac

SEQ ID NO: 2833225 - RNA, 19 nt, Artificial Sequence
  Description of Artificial Sequence: Synthetic oligonucleotide
uauuuacaugaugaauagu

SEQ ID NO: 2833226 - RNA, 19 nt, Artificial Sequence
  Description of Artificial Sequence: Synthetic oligonucleotide
agccacuacuguugcuugc

SEQ ID NO: 2833227 - RNA, 19 nt, Artificial Sequence
  Description of Artificial Sequence: Synthetic oligonucleotide
guccguauauuuuccaaga

SEQ ID NO: 2833228 - RNA, 19 nt, Artificial Sequence
  Description of Artificial Sequence: Synthetic oligonucleotide
ucaguccguauauuuucca

SEQ ID NO: 2833229 - RNA, 19 nt, Artificial Sequence
  Description of Artificial Sequence: Synthetic oligonucleotide
ucuccacccuuuccuuucg

SEQ ID NO: 2833230 - RNA, 19 nt, Artificial Sequence
  Description of Artificial Sequence: Synthetic oligonucleotide
uucaaccaauacucuguca

SEQ ID NO: 2833231 - RNA, 19 nt, Artificial Sequence
  Description of Artificial Sequence: Synthetic oligonucleotide
uccuuucaaccaauacucu

SEQ ID NO: 2833232 - RNA, 19 nt, Artificial Sequence
  Description of Artificial Sequence: Synthetic oligonucleotide
caacuuucacacugaccgg

SEQ ID NO: 2833233 - RNA, 19 nt, Artificial Sequence
  Description of Artificial Sequence: Synthetic oligonucleotide
augucagcaucucuaaaua

SEQ ID NO: 2833234 - RNA, 19 nt, Artificial Sequence
  Description of Artificial Sequence: Synthetic oligonucleotide
accggcugaaucucuccac

SEQ ID NO: 2833235 - RNA, 19 nt, Artificial Sequence
  Description of Artificial Sequence: Synthetic oligonucleotide
ccaauacucugucaaagag

SEQ ID NO: 2833236 - RNA, 19 nt, Artificial Sequence
  Description of Artificial Sequence: Synthetic oligonucleotide
cacacugaccggcugaauc

SEQ ID NO: 2833237 - RNA, 19 nt, Artificial Sequence
  Description of Artificial Sequence: Synthetic oligonucleotide
uaaguacauugauacuaaa

SEQ ID NO: 2833238 - RNA, 19 nt, Artificial Sequence
  Description of Artificial Sequence: Synthetic oligonucleotide
acuaaaccuucagagacaa

SEQ ID NO: 2833239 - RNA, 19 nt, Artificial Sequence
  Description of Artificial Sequence: Synthetic oligonucleotide
uucgagccugaucccacag

SEQ ID NO: 2833240 - RNA, 19 nt, Artificial Sequence
  Description of Artificial Sequence: Synthetic oligonucleotide
aucaucaguuuauuauaaa

SEQ ID NO: 2833241 - RNA, 19 nt, Artificial Sequence
  Description of Artificial Sequence: Synthetic oligonucleotide
uuucaacagugauuucagu

SEQ ID NO: 2833242 - RNA, 19 nt, Artificial Sequence
  Description of Artificial Sequence: Synthetic oligonucleotide
uccacccuuuccuuucgag

SEQ ID NO: 2833243 - RNA, 19 nt, Artificial Sequence
  Description of Artificial Sequence: Synthetic oligonucleotide
uugucgucuagaacuacuu

SEQ ID NO: 2833244 - RNA, 19 nt, Artificial Sequence
  Description of Artificial Sequence: Synthetic oligonucleotide
uucggcggcacuccuuuca

SEQ ID NO: 2833245 - RNA, 19 nt, Artificial Sequence
  Description of Artificial Sequence: Synthetic oligonucleotide
acuacuuuggugccuccau

SEQ ID NO: 2833246 - RNA, 19 nt, Artificial Sequence
  Description of Artificial Sequence: Synthetic oligonucleotide
acaugaugaauaguucaga

SEQ ID NO: 2833247 - RNA, 19 nt, Artificial Sequence
  Description of Artificial Sequence: Synthetic oligonucleotide
gauuucaguccguauauuu

SEQ ID NO: 2833248 - RNA, 19 nt, Artificial Sequence
  Description of Artificial Sequence: Synthetic oligonucleotide
caucaucaguuuauuauaa

SEQ ID NO: 2833249 - RNA, 19 nt, Artificial Sequence
  Description of Artificial Sequence: Synthetic oligonucleotide
agcuucaugugauaccauu

SEQ ID NO: 2833250 - RNA, 19 nt, Artificial Sequence
  Description of Artificial Sequence: Synthetic oligonucleotide
ugaaucucuccacccuuuc

SEQ ID NO: 2833251 - RNA, 19 nt, Artificial Sequence
  Description of Artificial Sequence: Synthetic oligonucleotide
gagaagaacuuugucucca

SEQ ID NO: 2833252 - RNA, 19 nt, Artificial Sequence
  Description of Artificial Sequence: Synthetic oligonucleotide
gaugaauaguucagaaugu

SEQ ID NO: 2833253 - RNA, 19 nt, Artificial Sequence
  Description of Artificial Sequence: Synthetic oligonucleotide
aguucagaaugucggcgga

SEQ ID NO: 2833254 - RNA, 19 nt, Artificial Sequence
  Description of Artificial Sequence: Synthetic oligonucleotide
gaaagcuuguccagccaug

SEQ ID NO: 2833255 - RNA, 19 nt, Artificial Sequence
  Description of Artificial Sequence: Synthetic oligonucleotide
cuuucgagccugaucccac

SEQ ID NO: 2833256 - RNA, 19 nt, Artificial Sequence
  Description of Artificial Sequence: Synthetic oligonucleotide
ugucaaagagcgguagaaa

SEQ ID NO: 2833257 - RNA, 19 nt, Artificial Sequence
  Description of Artificial Sequence: Synthetic oligonucleotide
augucggcggaaugggcag

SEQ ID NO: 2833258 - RNA, 19 nt, Artificial Sequence
  Description of Artificial Sequence: Synthetic oligonucleotide
gagacaauggaugucaguu

SEQ ID NO: 2833259 - RNA, 19 nt, Artificial Sequence
  Description of Artificial Sequence: Synthetic oligonucleotide
caccuuuggucacaguuuc

SEQ ID NO: 2833260 - RNA, 19 nt, Artificial Sequence
  Description of Artificial Sequence: Synthetic oligonucleotide
uuguccagccaugacucgc

SEQ ID NO: 2833261 - RNA, 19 nt, Artificial Sequence
  Description of Artificial Sequence: Synthetic oligonucleotide
cacuccuuucaaccaauac

SEQ ID NO: 2833262 - RNA, 19 nt, Artificial Sequence
  Description of Artificial Sequence: Synthetic oligonucleotide
cauugauacuaaaccuuca

SEQ ID NO: 2833263 - RNA, 19 nt, Artificial Sequence
  Description of Artificial Sequence: Synthetic oligonucleotide
cuacuguugcuugcaauac

SEQ ID NO: 2833264 - RNA, 19 nt, Artificial Sequence
  Description of Artificial Sequence: Synthetic oligonucleotide
agacaauggaugucaguuu

SEQ ID NO: 2833265 - RNA, 19 nt, Artificial Sequence
  Description of Artificial Sequence: Synthetic oligonucleotide
aacuacuuuggugccucca

SEQ ID NO: 2833266 - RNA, 19 nt, Artificial Sequence
  Description of Artificial Sequence: Synthetic oligonucleotide
cuuguccagccaugacucg

SEQ ID NO: 2833267 - RNA, 19 nt, Artificial Sequence
  Description of Artificial Sequence: Synthetic oligonucleotide
ggcggcacuccuuucaacc

SEQ ID NO: 2833268 - RNA, 19 nt, Artificial Sequence
  Description of Artificial Sequence: Synthetic oligonucleotide
ggagaagaacuuugucucc

SEQ ID NO: 2833269 - RNA, 19 nt, Artificial Sequence
  Description of Artificial Sequence: Synthetic oligonucleotide
cuggaagcauaaugccacc

SEQ ID NO: 2833270 - RNA, 19 nt, Artificial Sequence
  Description of Artificial Sequence: Synthetic oligonucleotide
ugaccggcugaaucucucc

SEQ ID NO: 2833271 - RNA, 19 nt, Artificial Sequence
  Description of Artificial Sequence: Synthetic oligonucleotide
uucagaaugucggcggaau

SEQ ID NO: 2833272 - RNA, 19 nt, Artificial Sequence
  Description of Artificial Sequence: Synthetic oligonucleotide
auuucaguccguauauuuu

SEQ ID NO: 2833273 - RNA, 19 nt, Artificial Sequence
  Description of Artificial Sequence: Synthetic oligonucleotide
auaaaagggaaggcacaga

SEQ ID NO: 2833274 - RNA, 19 nt, Artificial Sequence
  Description of Artificial Sequence: Synthetic oligonucleotide
aagagcgguagaaacuuuu

SEQ ID NO: 2833275 - RNA, 19 nt, Artificial Sequence
  Description of Artificial Sequence: Synthetic oligonucleotide
ccuuucaaccaauacucug

SEQ ID NO: 2833276 - RNA, 19 nt, Artificial Sequence
  Description of Artificial Sequence: Synthetic oligonucleotide
gaugucaguuuaggcauca

SEQ ID NO: 2833277 - RNA, 19 nt, Artificial Sequence
  Description of Artificial Sequence: Synthetic oligonucleotide
uccuugucgucuagaacua

SEQ ID NO: 2833278 - RNA, 19 nt, Artificial Sequence
  Description of Artificial Sequence: Synthetic oligonucleotide
guauauuuuccaagaaugu

SEQ ID NO: 2833279 - RNA, 19 nt, Artificial Sequence
  Description of Artificial Sequence: Synthetic oligonucleotide
uuucgagccugaucccaca

SEQ ID NO: 2833280 - RNA, 19 nt, Artificial Sequence
  Description of Artificial Sequence: Synthetic oligonucleotide
acaauggaugucaguuuag

SEQ ID NO: 2833281 - RNA, 19 nt, Artificial Sequence
  Description of Artificial Sequence: Synthetic oligonucleotide
ggcaucaucaguuuauuau

SEQ ID NO: 2833282 - RNA, 19 nt, Artificial Sequence
  Description of Artificial Sequence: Synthetic oligonucleotide
cagagacaauggaugucag

SEQ ID NO: 2833283 - RNA, 19 nt, Artificial Sequence
  Description of Artificial Sequence: Synthetic oligonucleotide
uggaagcauaaugccaccu

SEQ ID NO: 2833284 - RNA, 19 nt, Artificial Sequence
  Description of Artificial Sequence: Synthetic oligonucleotide
ggcacagaaauuauuuaca

SEQ ID NO: 2833285 - RNA, 19 nt, Artificial Sequence
  Description of Artificial Sequence: Synthetic oligonucleotide
gacuuuucuggaagcauaa

SEQ ID NO: 2833286 - RNA, 19 nt, Artificial Sequence
  Description of Artificial Sequence: Synthetic oligonucleotide
uuggugccuccauauucug

SEQ ID NO: 2833287 - RNA, 19 nt, Artificial Sequence
  Description of Artificial Sequence: Synthetic oligonucleotide
auaauccuugucgucuaga

SEQ ID NO: 2833288 - RNA, 19 nt, Artificial Sequence
  Description of Artificial Sequence: Synthetic oligonucleotide
cucugucaaagagcgguag

SEQ ID NO: 2833289 - RNA, 19 nt, Artificial Sequence
  Description of Artificial Sequence: Synthetic oligonucleotide
ccuuuggucacaguuucgg

SEQ ID NO: 2833290 - RNA, 19 nt, Artificial Sequence
  Description of Artificial Sequence: Synthetic oligonucleotide
acagccacuacuguugcuu

SEQ ID NO: 2833291 - RNA, 19 nt, Artificial Sequence
  Description of Artificial Sequence: Synthetic oligonucleotide
ugcuugcaauacuuuuccu

SEQ ID NO: 2833292 - RNA, 19 nt, Artificial Sequence
  Description of Artificial Sequence: Synthetic oligonucleotide
gaagcauaaugccaccuuu

SEQ ID NO: 2833293 - RNA, 19 nt, Artificial Sequence
  Description of Artificial Sequence: Synthetic oligonucleotide
gaaugucagcaucucuaaa

SEQ ID NO: 2833294 - RNA, 19 nt, Artificial Sequence
  Description of Artificial Sequence: Synthetic oligonucleotide
gucuuuuaaguacauugau

SEQ ID NO: 2833295 - RNA, 19 nt, Artificial Sequence
  Description of Artificial Sequence: Synthetic oligonucleotide
uagaacuacuuuggugccu

SEQ ID NO: 2833296 - RNA, 19 nt, Artificial Sequence
  Description of Artificial Sequence: Synthetic oligonucleotide
uuugacugucacagucuuu

SEQ ID NO: 2833297 - RNA, 19 nt, Artificial Sequence
  Description of Artificial Sequence: Synthetic oligonucleotide
cuuucacacugaccggcug

SEQ ID NO: 2833298 - RNA, 19 nt, Artificial Sequence
  Description of Artificial Sequence: Synthetic oligonucleotide
ggcagcuucaugugauacc

SEQ ID NO: 2833299 - RNA, 19 nt, Artificial Sequence
  Description of Artificial Sequence: Synthetic oligonucleotide
uccuuucgagccugauccc

SEQ ID NO: 2833300 - RNA, 19 nt, Artificial Sequence
  Description of Artificial Sequence: Synthetic oligonucleotide
uccagccaugacucgcgcc

SEQ ID NO: 2833301 - RNA, 19 nt, Artificial Sequence
  Description of Artificial Sequence: Synthetic oligonucleotide
gugauuucaguccguauau

SEQ ID NO: 2833302 - RNA, 19 nt, Artificial Sequence
  Description of Artificial Sequence: Synthetic oligonucleotide
cacaguuucggcggcacuc

SEQ ID NO: 2833303 - RNA, 19 nt, Artificial Sequence
  Description of Artificial Sequence: Synthetic oligonucleotide
cuucagagacaauggaugu

SEQ ID NO: 2833304 - RNA, 19 nt, Artificial Sequence
  Description of Artificial Sequence: Synthetic oligonucleotide
gaaugucggcggaaugggc

SEQ ID NO: 2833305 - RNA, 19 nt, Artificial Sequence
  Description of Artificial Sequence: Synthetic oligonucleotide
aacagugauuucaguccgu

SEQ ID NO: 2833306 - RNA, 19 nt, Artificial Sequence
  Description of Artificial Sequence: Synthetic oligonucleotide
agacuuuucuggaagcaua

SEQ ID NO: 2833307 - RNA, 19 nt, Artificial Sequence
  Description of Artificial Sequence: Synthetic oligonucleotide
uggucacaguuucggcggc

SEQ ID NO: 2833308 - RNA, 19 nt, Artificial Sequence
  Description of Artificial Sequence: Synthetic oligonucleotide
gcaucaucaguuuauuaua

SEQ ID NO: 2833309 - RNA, 19 nt, Artificial Sequence
  Description of Artificial Sequence: Synthetic oligonucleotide
uacuuuuccuugagacuuu

SEQ ID NO: 2833310 - RNA, 19 nt, Artificial Sequence
  Description of Artificial Sequence: Synthetic oligonucleotide
gaacuacuuuggugccucc

SEQ ID NO: 2833311 - RNA, 19 nt, Artificial Sequence
  Description of Artificial Sequence: Synthetic oligonucleotide
cuccaacuuucacacugac

SEQ ID NO: 2833312 - RNA, 19 nt, Artificial Sequence
  Description of Artificial Sequence: Synthetic oligonucleotide
cuuuuccuugagacuuuuc

SEQ ID NO: 2833313 - RNA, 19 nt, Artificial Sequence
  Description of Artificial Sequence: Synthetic oligonucleotide
cagcaucucuaaauaagaa

SEQ ID NO: 2833314 - RNA, 19 nt, Artificial Sequence
  Description of Artificial Sequence: Synthetic oligonucleotide
ucccacagccacuacuguu

SEQ ID NO: 2833315 - RNA, 19 nt, Artificial Sequence
  Description of Artificial Sequence: Synthetic oligonucleotide
gcagcuucaugugauacca

SEQ ID NO: 2833316 - RNA, 19 nt, Artificial Sequence
  Description of Artificial Sequence: Synthetic oligonucleotide
ucacaguuucggcggcacu

SEQ ID NO: 2833317 - RNA, 19 nt, Artificial Sequence
  Description of Artificial Sequence: Synthetic oligonucleotide
uucacacugaccggcugaa

SEQ ID NO: 2833318 - RNA, 19 nt, Artificial Sequence
  Description of Artificial Sequence: Synthetic oligonucleotide
gaccggcugaaucucucca

SEQ ID NO: 2833319 - RNA, 19 nt, Artificial Sequence
  Description of Artificial Sequence: Synthetic oligonucleotide
cagccacuacuguugcuug

SEQ ID NO: 2833320 - RNA, 19 nt, Artificial Sequence
  Description of Artificial Sequence: Synthetic oligonucleotide
cuugucgucuagaacuacu

SEQ ID NO: 2833321 - RNA, 19 nt, Artificial Sequence
  Description of Artificial Sequence: Synthetic oligonucleotide
acuuuggugccuccauauu

SEQ ID NO: 2833322 - RNA, 19 nt, Artificial Sequence
  Description of Artificial Sequence: Synthetic oligonucleotide
caaccaauacucugucaaa

SEQ ID NO: 2833323 - RNA, 19 nt, Artificial Sequence
  Description of Artificial Sequence: Synthetic oligonucleotide
acccuuuccuuucgagccu

SEQ ID NO: 2833324 - RNA, 19 nt, Artificial Sequence
  Description of Artificial Sequence: Synthetic oligonucleotide
ccacccuuuccuuucgagc

SEQ ID NO: 2833325 - RNA, 19 nt, Artificial Sequence
  Description of Artificial Sequence: Synthetic oligonucleotide
cugaccggcugaaucucuc

SEQ ID NO: 2833326 - RNA, 19 nt, Artificial Sequence
  Description of Artificial Sequence: Synthetic oligonucleotide
ugucuccaacuuucacacu

SEQ ID NO: 2833327 - RNA, 19 nt, Artificial Sequence
  Description of Artificial Sequence: Synthetic oligonucleotide
acagugauuucaguccgua

SEQ ID NO: 2833328 - RNA, 19 nt, Artificial Sequence
  Description of Artificial Sequence: Synthetic oligonucleotide
ucucuccacccuuuccuuu

SEQ ID NO: 2833329 - RNA, 19 nt, Artificial Sequence
  Description of Artificial Sequence: Synthetic oligonucleotide
uaggcaucaucaguuuauu

SEQ ID NO: 2833330 - RNA, 19 nt, Artificial Sequence
  Description of Artificial Sequence: Synthetic oligonucleotide
cgagccugaucccacagcc

SEQ ID NO: 2833331 - RNA, 19 nt, Artificial Sequence
  Description of Artificial Sequence: Synthetic oligonucleotide
ucggcggcacuccuuucaa

SEQ ID NO: 2833332 - RNA, 19 nt, Artificial Sequence
  Description of Artificial Sequence: Synthetic oligonucleotide
ugauuucaguccguauauu

SEQ ID NO: 2833333 - RNA, 19 nt, Artificial Sequence
  Description of Artificial Sequence: Synthetic oligonucleotide
accuuuggucacaguuucg

SEQ ID NO: 2833334 - RNA, 19 nt, Artificial Sequence
  Description of Artificial Sequence: Synthetic oligonucleotide
aggcaucaucaguuuauua

SEQ ID NO: 2833335 - RNA, 19 nt, Artificial Sequence
  Description of Artificial Sequence: Synthetic oligonucleotide
caguccguauauuuuccaa

SEQ ID NO: 2833336 - RNA, 19 nt, Artificial Sequence
  Description of Artificial Sequence: Synthetic oligonucleotide
auacucugucaaagagcgg

SEQ ID NO: 2833337 - RNA, 19 nt, Artificial Sequence
  Description of Artificial Sequence: Synthetic oligonucleotide
gcaauacuuuuccuugaga

SEQ ID NO: 2833338 - RNA, 19 nt, Artificial Sequence
  Description of Artificial Sequence: Synthetic oligonucleotide
cugucacagucuuuuaagu

SEQ ID NO: 2833339 - RNA, 19 nt, Artificial Sequence
  Description of Artificial Sequence: Synthetic oligonucleotide
aaagagcgguagaaacuuu

SEQ ID NO: 2833340 - RNA, 19 nt, Artificial Sequence
  Description of Artificial Sequence: Synthetic oligonucleotide
acuuucacacugaccggcu

SEQ ID NO: 2833341 - RNA, 19 nt, Artificial Sequence
  Description of Artificial Sequence: Synthetic oligonucleotide
aucccacagccacuacugu

SEQ ID NO: 2833342 - RNA, 19 nt, Artificial Sequence
  Description of Artificial Sequence: Synthetic oligonucleotide
auucugggagaagaacuuu

SEQ ID NO: 2833343 - RNA, 19 nt, Artificial Sequence
  Description of Artificial Sequence: Synthetic oligonucleotide
ugacugucacagucuuuua

SEQ ID NO: 2833344 - RNA, 19 nt, Artificial Sequence
  Description of Artificial Sequence: Synthetic oligonucleotide
cuccauauucugggagaag

SEQ ID NO: 2833345 - RNA, 19 nt, Artificial Sequence
  Description of Artificial Sequence: Synthetic oligonucleotide
caguuuaggcaucaucagu

SEQ ID NO: 2833346 - RNA, 19 nt, Artificial Sequence
  Description of Artificial Sequence: Synthetic oligonucleotide
augggcagcuucaugugau

SEQ ID NO: 2833347 - RNA, 19 nt, Artificial Sequence
  Description of Artificial Sequence: Synthetic oligonucleotide
acagucuuuuaaguacauu

SEQ ID NO: 2833348 - RNA, 19 nt, Artificial Sequence
  Description of Artificial Sequence: Synthetic oligonucleotide
acuuuucuggaagcauaau

SEQ ID NO: 2833349 - RNA, 19 nt, Artificial Sequence
  Description of Artificial Sequence: Synthetic oligonucleotide
gugauaccauuucaacagu

SEQ ID NO: 2833350 - RNA, 19 nt, Artificial Sequence
  Description of Artificial Sequence: Synthetic oligonucleotide
caagaaugucagcaucucu

SEQ ID NO: 2833351 - RNA, 19 nt, Artificial Sequence
  Description of Artificial Sequence: Synthetic oligonucleotide
gcacagaaauuauuuacau

SEQ ID NO: 2833352 - RNA, 19 nt, Artificial Sequence
  Description of Artificial Sequence: Synthetic oligonucleotide
gucacaguuucggcggcac

SEQ ID NO: 2833353 - RNA, 19 nt, Artificial Sequence
  Description of Artificial Sequence: Synthetic oligonucleotide
gagacuuuucuggaagcau

SEQ ID NO: 2833354 - RNA, 19 nt, Artificial Sequence
  Description of Artificial Sequence: Synthetic oligonucleotide
caaagagcgguagaaacuu

SEQ ID NO: 2833355 - RNA, 19 nt, Artificial Sequence
  Description of Artificial Sequence: Synthetic oligonucleotide
ccggcugaaucucuccacc

SEQ ID NO: 2833356 - RNA, 19 nt, Artificial Sequence
  Description of Artificial Sequence: Synthetic oligonucleotide
guuuaggcaucaucaguuu

SEQ ID NO: 2833357 - RNA, 19 nt, Artificial Sequence
  Description of Artificial Sequence: Synthetic oligonucleotide
acuuuuccuugagacuuuu

SEQ ID NO: 2833358 - RNA, 19 nt, Artificial Sequence
  Description of Artificial Sequence: Synthetic oligonucleotide
ugucggcggaaugggcagc

SEQ ID NO: 2833359 - RNA, 19 nt, Artificial Sequence
  Description of Artificial Sequence: Synthetic oligonucleotide
gcuugcaauacuuuuccuu

SEQ ID NO: 2833360 - RNA, 19 nt, Artificial Sequence
  Description of Artificial Sequence: Synthetic oligonucleotide
cuacuuuggugccuccaua

SEQ ID NO: 2833361 - RNA, 19 nt, Artificial Sequence
  Description of Artificial Sequence: Synthetic oligonucleotide
cacugaccggcugaaucuc

SEQ ID NO: 2833362 - RNA, 19 nt, Artificial Sequence
  Description of Artificial Sequence: Synthetic oligonucleotide
guccagccaugacucgcgc

SEQ ID NO: 2833363 - RNA, 19 nt, Artificial Sequence
  Description of Artificial Sequence: Synthetic oligonucleotide
augccaccuuuggucacag

SEQ ID NO: 2833364 - RNA, 19 nt, Artificial Sequence
  Description of Artificial Sequence: Synthetic oligonucleotide
acugaccggcugaaucucu

SEQ ID NO: 2833365 - RNA, 19 nt, Artificial Sequence
  Description of Artificial Sequence: Synthetic oligonucleotide
guuucggcggcacuccuuu

SEQ ID NO: 2833366 - RNA, 19 nt, Artificial Sequence
  Description of Artificial Sequence: Synthetic oligonucleotide
uuucggcggcacuccuuuc

SEQ ID NO: 2833367 - RNA, 19 nt, Artificial Sequence
  Description of Artificial Sequence: Synthetic oligonucleotide
guucagaaugucggcggaa

SEQ ID NO: 2833368 - RNA, 19 nt, Artificial Sequence
  Description of Artificial Sequence: Synthetic oligonucleotide
ccaagaaugucagcaucuc

SEQ ID NO: 2833369 - RNA, 19 nt, Artificial Sequence
  Description of Artificial Sequence: Synthetic oligonucleotide
gagccugaucccacagcca

SEQ ID NO: 2833370 - RNA, 19 nt, Artificial Sequence
  Description of Artificial Sequence: Synthetic oligonucleotide
gccaccuuuggucacaguu

SEQ ID NO: 2833371 - RNA, 19 nt, Artificial Sequence
  Description of Artificial Sequence: Synthetic oligonucleotide
gugccuccauauucuggga

SEQ ID NO: 2833372 - RNA, 19 nt, Artificial Sequence
  Description of Artificial Sequence: Synthetic oligonucleotide
gcauaaugccaccuuuggu

SEQ ID NO: 2833373 - RNA, 19 nt, Artificial Sequence
  Description of Artificial Sequence: Synthetic oligonucleotide
ccacagccacuacuguugc

SEQ ID NO: 2833374 - RNA, 19 nt, Artificial Sequence
  Description of Artificial Sequence: Synthetic oligonucleotide
gggcagcuucaugugauac

SEQ ID NO: 2833375 - RNA, 19 nt, Artificial Sequence
  Description of Artificial Sequence: Synthetic oligonucleotide
acucugucaaagagcggua

SEQ ID NO: 2833376 - RNA, 19 nt, Artificial Sequence
  Description of Artificial Sequence: Synthetic oligonucleotide
ccauauucugggagaagaa

SEQ ID NO: 2833377 - RNA, 19 nt, Artificial Sequence
  Description of Artificial Sequence: Synthetic oligonucleotide
ggcggaaugggcagcuuca

SEQ ID NO: 2833378 - RNA, 19 nt, Artificial Sequence
  Description of Artificial Sequence: Synthetic oligonucleotide
ggaagcauaaugccaccuu

SEQ ID NO: 2833379 - RNA, 19 nt, Artificial Sequence
  Description of Artificial Sequence: Synthetic oligonucleotide
cagccaugacucgcgccgc

SEQ ID NO: 2833380 - RNA, 19 nt, Artificial Sequence
  Description of Artificial Sequence: Synthetic oligonucleotide
cacuacuguugcuugcaau

SEQ ID NO: 2833381 - RNA, 19 nt, Artificial Sequence
  Description of Artificial Sequence: Synthetic oligonucleotide
gccacuacuguugcuugca

SEQ ID NO: 2833382 - RNA, 19 nt, Artificial Sequence
  Description of Artificial Sequence: Synthetic oligonucleotide
ggcugaaucucuccacccu

SEQ ID NO: 2833383 - RNA, 19 nt, Artificial Sequence
  Description of Artificial Sequence: Synthetic oligonucleotide
ucacacugaccggcugaau

SEQ ID NO: 2833384 - RNA, 19 nt, Artificial Sequence
  Description of Artificial Sequence: Synthetic oligonucleotide
cacagucuuuuaaguacau

SEQ ID NO: 2833385 - RNA, 19 nt, Artificial Sequence
  Description of Artificial Sequence: Synthetic oligonucleotide
cugaaucucuccacccuuu

SEQ ID NO: 2833386 - RNA, 19 nt, Artificial Sequence
  Description of Artificial Sequence: Synthetic oligonucleotide
cggcugaaucucuccaccc

SEQ ID NO: 2833387 - RNA, 19 nt, Artificial Sequence
  Description of Artificial Sequence: Synthetic oligonucleotide
augucaguuuaggcaucau

SEQ ID NO: 2833388 - RNA, 19 nt, Artificial Sequence
  Description of Artificial Sequence: Synthetic oligonucleotide
ccuugagacuuuucuggaa

SEQ ID NO: 2833389 - RNA, 19 nt, Artificial Sequence
  Description of Artificial Sequence: Synthetic oligonucleotide
ccguauauuuuccaagaau

SEQ ID NO: 2833390 - RNA, 19 nt, Artificial Sequence
  Description of Artificial Sequence: Synthetic oligonucleotide
aguuucggcggcacuccuu

SEQ ID NO: 2833391 - RNA, 19 nt, Artificial Sequence
  Description of Artificial Sequence: Synthetic oligonucleotide
ugccaccuuuggucacagu

SEQ ID NO: 2833392 - RNA, 19 nt, Artificial Sequence
  Description of Artificial Sequence: Synthetic oligonucleotide
ggaugucaguuuaggcauc

SEQ ID NO: 2833393 - RNA, 19 nt, Artificial Sequence
  Description of Artificial Sequence: Synthetic oligonucleotide
ccauuucaacagugauuuc

SEQ ID NO: 2833394 - RNA, 19 nt, Artificial Sequence
  Description of Artificial Sequence: Synthetic oligonucleotide
cuguugcuugcaauacuuu

SEQ ID NO: 2833395 - RNA, 19 nt, Artificial Sequence
  Description of Artificial Sequence: Synthetic oligonucleotide
cagugauuucaguccguau

SEQ ID NO: 2833396 - RNA, 19 nt, Artificial Sequence
  Description of Artificial Sequence: Synthetic oligonucleotide
gcugaaucucuccacccuu

SEQ ID NO: 2833397 - RNA, 19 nt, Artificial Sequence
  Description of Artificial Sequence: Synthetic oligonucleotide
gcuucaugugauaccauuu

SEQ ID NO: 2833398 - RNA, 19 nt, Artificial Sequence
  Description of Artificial Sequence: Synthetic oligonucleotide
cuccacccuuuccuuucga

SEQ ID NO: 2833399 - RNA, 19 nt, Artificial Sequence
  Description of Artificial Sequence: Synthetic oligonucleotide
ccuuucgagccugauccca

SEQ ID NO: 2833400 - RNA, 19 nt, Artificial Sequence
  Description of Artificial Sequence: Synthetic oligonucleotide
ccuugucgucuagaacuac

SEQ ID NO: 2833401 - RNA, 19 nt, Artificial Sequence
  Description of Artificial Sequence: Synthetic oligonucleotide
cccuuuccuuucgagccug

SEQ ID NO: 2833402 - RNA, 19 nt, Artificial Sequence
  Description of Artificial Sequence: Synthetic oligonucleotide
cuaaaccuucagagacaau

SEQ ID NO: 2833403 - RNA, 19 nt, Artificial Sequence
  Description of Artificial Sequence: Synthetic oligonucleotide
ccuccauauucugggagaa

SEQ ID NO: 2833404 - RNA, 19 nt, Artificial Sequence
  Description of Artificial Sequence: Synthetic oligonucleotide
ggucacaguuucggcggca

SEQ ID NO: 2833405 - RNA, 19 nt, Artificial Sequence
  Description of Artificial Sequence: Synthetic oligonucleotide
gggaaggcacagaaauuau

SEQ ID NO: 2833406 - RNA, 19 nt, Artificial Sequence
  Description of Artificial Sequence: Synthetic oligonucleotide
gucggcggaaugggcagcu

SEQ ID NO: 2833407 - RNA, 19 nt, Artificial Sequence
  Description of Artificial Sequence: Synthetic oligonucleotide
cacagccacuacuguugcu

SEQ ID NO: 2833408 - RNA, 19 nt, Artificial Sequence
  Description of Artificial Sequence: Synthetic oligonucleotide
ccaccuuuggucacaguuu

SEQ ID NO: 2833409 - RNA, 19 nt, Artificial Sequence
  Description of Artificial Sequence: Synthetic oligonucleotide
cuuuccuuucgagccugau

SEQ ID NO: 2833410 - RNA, 19 nt, Artificial Sequence
  Description of Artificial Sequence: Synthetic oligonucleotide
cggcggaaugggcagcuuc

SEQ ID NO: 2833411 - RNA, 19 nt, Artificial Sequence
  Description of Artificial Sequence: Synthetic oligonucleotide
ucggcggaaugggcagcuu

SEQ ID NO: 2833412 - RNA, 19 nt, Artificial Sequence
  Description of Artificial Sequence: Synthetic oligonucleotide
cagcuucaugugauaccau

SEQ ID NO: 2833413 - RNA, 19 nt, Artificial Sequence
  Description of Artificial Sequence: Synthetic oligonucleotide
caguuucggcggcacuccu

SEQ ID NO: 2833414 - RNA, 19 nt, Artificial Sequence
  Description of Artificial Sequence: Synthetic oligonucleotide
ggcacuccuuucaaccaau

SEQ ID NO: 2833415 - RNA, 19 nt, Artificial Sequence
  Description of Artificial Sequence: Synthetic oligonucleotide
ccuuuccuuucgagccuga

SEQ ID NO: 2833416 - RNA, 19 nt, Artificial Sequence
  Description of Artificial Sequence: Synthetic oligonucleotide
gcacuccuuucaaccaaua

SEQ ID NO: 2833417 - RNA, 19 nt, Artificial Sequence
  Description of Artificial Sequence: Synthetic oligonucleotide
cgucuagaacuacuuuggu

SEQ ID NO: 2833418 - RNA, 19 nt, Artificial Sequence
  Description of Artificial Sequence: Synthetic oligonucleotide
cggcacuccuuucaaccaa

SEQ ID NO: 2833419 - RNA, 19 nt, Artificial Sequence
  Description of Artificial Sequence: Synthetic oligonucleotide
cggcggcacuccuuucaac

SEQ ID NO: 2833420 - RNA, 19 nt, Artificial Sequence
  Description of Artificial Sequence: Synthetic oligonucleotide
gcggaaugggcagcuucau

SEQ ID NO: 2833421 - RNA, 19 nt, Artificial Sequence
  Description of Artificial Sequence: Synthetic oligonucleotide
auaaauguccaguuuacac

SEQ ID NO: 2833422 - RNA, 19 nt, Artificial Sequence
  Description of Artificial Sequence: Synthetic oligonucleotide
ucuaguacggacuccaggg

SEQ ID NO: 2833423 - RNA, 19 nt, Artificial Sequence
  Description of Artificial Sequence: Synthetic oligonucleotide
uuagcaagaaaccauaaau

SEQ ID NO: 2833424 - RNA, 19 nt, Artificial Sequence
  Description of Artificial Sequence: Synthetic oligonucleotide
aaaauacuccuccacaaca

SEQ ID NO: 2833425 - RNA, 19 nt, Artificial Sequence
  Description of Artificial Sequence: Synthetic oligonucleotide
acaucugucuucuaguacg

SEQ ID NO: 2833426 - RNA, 19 nt, Artificial Sequence
  Description of Artificial Sequence: Synthetic oligonucleotide
uucacaguagcaaaugacc

SEQ ID NO: 2833427 - RNA, 19 nt, Artificial Sequence
  Description of Artificial Sequence: Synthetic oligonucleotide
ucagaucucaaguagacac

SEQ ID NO: 2833428 - RNA, 19 nt, Artificial Sequence
  Description of Artificial Sequence: Synthetic oligonucleotide
aggacaguuagcaagaaac

SEQ ID NO: 2833429 - RNA, 19 nt, Artificial Sequence
  Description of Artificial Sequence: Synthetic oligonucleotide
ugauccauuuccuuggaag

SEQ ID NO: 2833430 - RNA, 19 nt, Artificial Sequence
  Description of Artificial Sequence: Synthetic oligonucleotide
gaguacuugauccauuucc

SEQ ID NO: 2833431 - RNA, 19 nt, Artificial Sequence
  Description of Artificial Sequence: Synthetic oligonucleotide
uguucuauuagcugggugu

SEQ ID NO: 2833432 - RNA, 19 nt, Artificial Sequence
  Description of Artificial Sequence: Synthetic oligonucleotide
uagcaagaaaccauaaaug

SEQ ID NO: 2833433 - RNA, 19 nt, Artificial Sequence
  Description of Artificial Sequence: Synthetic oligonucleotide
caaagaaauauuaccuggg

SEQ ID NO: 2833434 - RNA, 19 nt, Artificial Sequence
  Description of Artificial Sequence: Synthetic oligonucleotide
agcaagaaaccauaaaugu

SEQ ID NO: 2833435 - RNA, 19 nt, Artificial Sequence
  Description of Artificial Sequence: Synthetic oligonucleotide
ugucaggacaguuagcaag

SEQ ID NO: 2833436 - RNA, 19 nt, Artificial Sequence
  Description of Artificial Sequence: Synthetic oligonucleotide
auugucagaucucaaguag

SEQ ID NO: 2833437 - RNA, 19 nt, Artificial Sequence
  Description of Artificial Sequence: Synthetic oligonucleotide
uaaauguccaguuuacacu

SEQ ID NO: 2833438 - RNA, 19 nt, Artificial Sequence
  Description of Artificial Sequence: Synthetic oligonucleotide
agaugcucgauuuucgcgg

SEQ ID NO: 2833439 - RNA, 19 nt, Artificial Sequence
  Description of Artificial Sequence: Synthetic oligonucleotide
aucucaaguagacacaucu

SEQ ID NO: 2833440 - RNA, 19 nt, Artificial Sequence
  Description of Artificial Sequence: Synthetic oligonucleotide
acuugauccauuuccuugg

SEQ ID NO: 2833441 - RNA, 19 nt, Artificial Sequence
  Description of Artificial Sequence: Synthetic oligonucleotide
agaauagcuacucugcugu

SEQ ID NO: 2833442 - RNA, 19 nt, Artificial Sequence
  Description of Artificial Sequence: Synthetic oligonucleotide
aauuucguaguaguucuuc

SEQ ID NO: 2833443 - RNA, 19 nt, Artificial Sequence
  Description of Artificial Sequence: Synthetic oligonucleotide
aaaugaccacccuugggag

SEQ ID NO: 2833444 - RNA, 19 nt, Artificial Sequence
  Description of Artificial Sequence: Synthetic oligonucleotide
acaguagcaaaugaccacc

SEQ ID NO: 2833445 - RNA, 19 nt, Artificial Sequence
  Description of Artificial Sequence: Synthetic oligonucleotide
gugguguucuauuagcugg

SEQ ID NO: 2833446 - RNA, 19 nt, Artificial Sequence
  Description of Artificial Sequence: Synthetic oligonucleotide
aauucacaguagcaaauga

SEQ ID NO: 2833447 - RNA, 19 nt, Artificial Sequence
  Description of Artificial Sequence: Synthetic oligonucleotide
ucuuguuuaccaagucugg

SEQ ID NO: 2833448 - RNA, 19 nt, Artificial Sequence
  Description of Artificial Sequence: Synthetic oligonucleotide
uccaguuuacacuagaauu

SEQ ID NO: 2833449 - RNA, 19 nt, Artificial Sequence
  Description of Artificial Sequence: Synthetic oligonucleotide
aaggcgauggcuuucucca

SEQ ID NO: 2833450 - RNA, 19 nt, Artificial Sequence
  Description of Artificial Sequence: Synthetic oligonucleotide
gauccauuuccuuggaagc

SEQ ID NO: 2833451 - RNA, 19 nt, Artificial Sequence
  Description of Artificial Sequence: Synthetic oligonucleotide
aaguucaccagcgccagac

SEQ ID NO: 2833452 - RNA, 19 nt, Artificial Sequence
  Description of Artificial Sequence: Synthetic oligonucleotide
gcaaagaaauauuaccugg

SEQ ID NO: 2833453 - RNA, 19 nt, Artificial Sequence
  Description of Artificial Sequence: Synthetic oligonucleotide
cuuggaagcaggcuugugg

SEQ ID NO: 2833454 - RNA, 19 nt, Artificial Sequence
  Description of Artificial Sequence: Synthetic oligonucleotide
ucacaguagcaaaugacca

SEQ ID NO: 2833455 - RNA, 19 nt, Artificial Sequence
  Description of Artificial Sequence: Synthetic oligonucleotide
ucuggcaaagaaauauuac

SEQ ID NO: 2833456 - RNA, 19 nt, Artificial Sequence
  Description of Artificial Sequence: Synthetic oligonucleotide
uaguucuucaguacaguug

SEQ ID NO: 2833457 - RNA, 19 nt, Artificial Sequence
  Description of Artificial Sequence: Synthetic oligonucleotide
uaugguuccccuuucccag

SEQ ID NO: 2833458 - RNA, 19 nt, Artificial Sequence
  Description of Artificial Sequence: Synthetic oligonucleotide
uagcaaaugaccacccuug

SEQ ID NO: 2833459 - RNA, 19 nt, Artificial Sequence
  Description of Artificial Sequence: Synthetic oligonucleotide
uucuaguacggacuccagg

SEQ ID NO: 2833460 - RNA, 19 nt, Artificial Sequence
  Description of Artificial Sequence: Synthetic oligonucleotide
uacuugauccauuuccuug

SEQ ID NO: 2833461 - RNA, 19 nt, Artificial Sequence
  Description of Artificial Sequence: Synthetic oligonucleotide
aauacuccuccacaacaug

SEQ ID NO: 2833462 - RNA, 19 nt, Artificial Sequence
  Description of Artificial Sequence: Synthetic oligonucleotide
aguacaguugccuucugcu

SEQ ID NO: 2833463 - RNA, 19 nt, Artificial Sequence
  Description of Artificial Sequence: Synthetic oligonucleotide
aagucuggcaaagaaauau

SEQ ID NO: 2833464 - RNA, 19 nt, Artificial Sequence
  Description of Artificial Sequence: Synthetic oligonucleotide
uuucguaguaguucuucag

SEQ ID NO: 2833465 - RNA, 19 nt, Artificial Sequence
  Description of Artificial Sequence: Synthetic oligonucleotide
aaaccauaaauguccaguu

SEQ ID NO: 2833466 - RNA, 19 nt, Artificial Sequence
  Description of Artificial Sequence: Synthetic oligonucleotide
uuguuuaccaagucuggca

SEQ ID NO: 2833467 - RNA, 19 nt, Artificial Sequence
  Description of Artificial Sequence: Synthetic oligonucleotide
uuuaccaagucuggcaaag

SEQ ID NO: 2833468 - RNA, 19 nt, Artificial Sequence
  Description of Artificial Sequence: Synthetic oligonucleotide
uaguaguucuucaguacag

SEQ ID NO: 2833469 - RNA, 19 nt, Artificial Sequence
  Description of Artificial Sequence: Synthetic oligonucleotide
acauugucagaucucaagu

SEQ ID NO: 2833470 - RNA, 19 nt, Artificial Sequence
  Description of Artificial Sequence: Synthetic oligonucleotide
uccagaugcucgauuuucg

SEQ ID NO: 2833471 - RNA, 19 nt, Artificial Sequence
  Description of Artificial Sequence: Synthetic oligonucleotide
uguuuaccaagucuggcaa

SEQ ID NO: 2833472 - RNA, 19 nt, Artificial Sequence
  Description of Artificial Sequence: Synthetic oligonucleotide
gauaugguuccccuuuccc

SEQ ID NO: 2833473 - RNA, 19 nt, Artificial Sequence
  Description of Artificial Sequence: Synthetic oligonucleotide
agacacaucugucuucuag

SEQ ID NO: 2833474 - RNA, 19 nt, Artificial Sequence
  Description of Artificial Sequence: Synthetic oligonucleotide
ugucagaucucaaguagac

SEQ ID NO: 2833475 - RNA, 19 nt, Artificial Sequence
  Description of Artificial Sequence: Synthetic oligonucleotide
caacaugaugggaauuucg

SEQ ID NO: 2833476 - RNA, 19 nt, Artificial Sequence
  Description of Artificial Sequence: Synthetic oligonucleotide
ucaaguagacacaucuguc

SEQ ID NO: 2833477 - RNA, 19 nt, Artificial Sequence
  Description of Artificial Sequence: Synthetic oligonucleotide
uucguaguaguucuucagu

SEQ ID NO: 2833478 - RNA, 19 nt, Artificial Sequence
  Description of Artificial Sequence: Synthetic oligonucleotide
aguagacacaucugucuuc

SEQ ID NO: 2833479 - RNA, 19 nt, Artificial Sequence
  Description of Artificial Sequence: Synthetic oligonucleotide
acaaaauacuccuccacaa

SEQ ID NO: 2833480 - RNA, 19 nt, Artificial Sequence
  Description of Artificial Sequence: Synthetic oligonucleotide
ugguguucuauuagcuggg

SEQ ID NO: 2833481 - RNA, 19 nt, Artificial Sequence
  Description of Artificial Sequence: Synthetic oligonucleotide
ucugucuucuaguacggac

SEQ ID NO: 2833482 - RNA, 19 nt, Artificial Sequence
  Description of Artificial Sequence: Synthetic oligonucleotide
aacaugaugggaauuucgu

SEQ ID NO: 2833483 - RNA, 19 nt, Artificial Sequence
  Description of Artificial Sequence: Synthetic oligonucleotide
guguuuuccaguugucagg

SEQ ID NO: 2833484 - RNA, 19 nt, Artificial Sequence
  Description of Artificial Sequence: Synthetic oligonucleotide
uugucagaucucaaguaga

SEQ ID NO: 2833485 - RNA, 19 nt, Artificial Sequence
  Description of Artificial Sequence: Synthetic oligonucleotide
uugggaguccaccaucuug

SEQ ID NO: 2833486 - RNA, 19 nt, Artificial Sequence
  Description of Artificial Sequence: Synthetic oligonucleotide
cacuagaauucacaguagc

SEQ ID NO: 2833487 - RNA, 19 nt, Artificial Sequence
  Description of Artificial Sequence: Synthetic oligonucleotide
uuacacuagaauucacagu

SEQ ID NO: 2833488 - RNA, 19 nt, Artificial Sequence
  Description of Artificial Sequence: Synthetic oligonucleotide
ucucaaguagacacaucug

SEQ ID NO: 2833489 - RNA, 19 nt, Artificial Sequence
  Description of Artificial Sequence: Synthetic oligonucleotide
uuggaagcaggcuuguggu

SEQ ID NO: 2833490 - RNA, 19 nt, Artificial Sequence
  Description of Artificial Sequence: Synthetic oligonucleotide
ucuucuaguacggacucca

SEQ ID NO: 2833491 - RNA, 19 nt, Artificial Sequence
  Description of Artificial Sequence: Synthetic oligonucleotide
uaguacggacuccaggggc

SEQ ID NO: 2833492 - RNA, 19 nt, Artificial Sequence
  Description of Artificial Sequence: Synthetic oligonucleotide
uggucagcgaaggcgaugg

SEQ ID NO: 2833493 - RNA, 19 nt, Artificial Sequence
  Description of Artificial Sequence: Synthetic oligonucleotide
gguguuuuccaguugucag

SEQ ID NO: 2833494 - RNA, 19 nt, Artificial Sequence
  Description of Artificial Sequence: Synthetic oligonucleotide
uguuuuccaguugucagga

SEQ ID NO: 2833495 - RNA, 19 nt, Artificial Sequence
  Description of Artificial Sequence: Synthetic oligonucleotide
cagaugcucgauuuucgcg

SEQ ID NO: 2833496 - RNA, 19 nt, Artificial Sequence
  Description of Artificial Sequence: Synthetic oligonucleotide
auaugguuccccuuuccca

SEQ ID NO: 2833497 - RNA, 19 nt, Artificial Sequence
  Description of Artificial Sequence: Synthetic oligonucleotide
guaguaguucuucaguaca

SEQ ID NO: 2833498 - RNA, 19 nt, Artificial Sequence
  Description of Artificial Sequence: Synthetic oligonucleotide
gaugggaauuucguaguag

SEQ ID NO: 2833499 - RNA, 19 nt, Artificial Sequence
  Description of Artificial Sequence: Synthetic oligonucleotide
ugauaugguuccccuuucc

SEQ ID NO: 2833500 - RNA, 19 nt, Artificial Sequence
  Description of Artificial Sequence: Synthetic oligonucleotide
guugucaggacaguuagca

SEQ ID NO: 2833501 - RNA, 19 nt, Artificial Sequence
  Description of Artificial Sequence: Synthetic oligonucleotide
ggcaaagaaauauuaccug

SEQ ID NO: 2833502 - RNA, 19 nt, Artificial Sequence
  Description of Artificial Sequence: Synthetic oligonucleotide
agcaaaugaccacccuugg

SEQ ID NO: 2833503 - RNA, 19 nt, Artificial Sequence
  Description of Artificial Sequence: Synthetic oligonucleotide
caguugucaggacaguuag

SEQ ID NO: 2833504 - RNA, 19 nt, Artificial Sequence
  Description of Artificial Sequence: Synthetic oligonucleotide
gaaggggucuuguuuacca

SEQ ID NO: 2833505 - RNA, 19 nt, Artificial Sequence
  Description of Artificial Sequence: Synthetic oligonucleotide
caaaauacuccuccacaac

SEQ ID NO: 2833506 - RNA, 19 nt, Artificial Sequence
  Description of Artificial Sequence: Synthetic oligonucleotide
aaugaccacccuugggagu

SEQ ID NO: 2833507 - RNA, 19 nt, Artificial Sequence
  Description of Artificial Sequence: Synthetic oligonucleotide
uaccaagucuggcaaagaa

SEQ ID NO: 2833508 - RNA, 19 nt, Artificial Sequence
  Description of Artificial Sequence: Synthetic oligonucleotide
gacaguuagcaagaaacca

SEQ ID NO: 2833509 - RNA, 19 nt, Artificial Sequence
  Description of Artificial Sequence: Synthetic oligonucleotide
uuccccuuucccagaauag

SEQ ID NO: 2833510 - RNA, 19 nt, Artificial Sequence
  Description of Artificial Sequence: Synthetic oligonucleotide
gaaaccauaaauguccagu

SEQ ID NO: 2833511 - RNA, 19 nt, Artificial Sequence
  Description of Artificial Sequence: Synthetic oligonucleotide
augaugggaauuucguagu

SEQ ID NO: 2833512 - RNA, 19 nt, Artificial Sequence
  Description of Artificial Sequence: Synthetic oligonucleotide
uccgucgguguccacggcg

SEQ ID NO: 2833513 - RNA, 19 nt, Artificial Sequence
  Description of Artificial Sequence: Synthetic oligonucleotide
uuccuuggaagcaggcuug

SEQ ID NO: 2833514 - RNA, 19 nt, Artificial Sequence
  Description of Artificial Sequence: Synthetic oligonucleotide
cacaguagcaaaugaccac

SEQ ID NO: 2833515 - RNA, 19 nt, Artificial Sequence
  Description of Artificial Sequence: Synthetic oligonucleotide
cuuguuuaccaagucuggc

SEQ ID NO: 2833516 - RNA, 19 nt, Artificial Sequence
  Description of Artificial Sequence: Synthetic oligonucleotide
agaaaccauaaauguccag

SEQ ID NO: 2833517 - RNA, 19 nt, Artificial Sequence
  Description of Artificial Sequence: Synthetic oligonucleotide
caucugucuucuaguacgg

SEQ ID NO: 2833518 - RNA, 19 nt, Artificial Sequence
  Description of Artificial Sequence: Synthetic oligonucleotide
cagaauagcuacucugcug

SEQ ID NO: 2833519 - RNA, 19 nt, Artificial Sequence
  Description of Artificial Sequence: Synthetic oligonucleotide
aaauacuccuccacaacau

SEQ ID NO: 2833520 - RNA, 19 nt, Artificial Sequence
  Description of Artificial Sequence: Synthetic oligonucleotide
ucagcgaaggcgauggcuu

SEQ ID NO: 2833521 - RNA, 19 nt, Artificial Sequence
  Description of Artificial Sequence: Synthetic oligonucleotide
guuuacacuagaauucaca

SEQ ID NO: 2833522 - RNA, 19 nt, Artificial Sequence
  Description of Artificial Sequence: Synthetic oligonucleotide
ucguaguaguucuucagua

SEQ ID NO: 2833523 - RNA, 19 nt, Artificial Sequence
  Description of Artificial Sequence: Synthetic oligonucleotide
uucgcggcagggcacgcgg

SEQ ID NO: 2833524 - RNA, 19 nt, Artificial Sequence
  Description of Artificial Sequence: Synthetic oligonucleotide
aagaaaccauaaaugucca

SEQ ID NO: 2833525 - RNA, 19 nt, Artificial Sequence
  Description of Artificial Sequence: Synthetic oligonucleotide
ccaguuuacacuagaauuc

SEQ ID NO: 2833526 - RNA, 19 nt, Artificial Sequence
  Description of Artificial Sequence: Synthetic oligonucleotide
aggggcuccacuccgucgg

SEQ ID NO: 2833527 - RNA, 19 nt, Artificial Sequence
  Description of Artificial Sequence: Synthetic oligonucleotide
aggggucuuguuuaccaag

SEQ ID NO: 2833528 - RNA, 19 nt, Artificial Sequence
  Description of Artificial Sequence: Synthetic oligonucleotide
cuaguacggacuccagggg

SEQ ID NO: 2833529 - RNA, 19 nt, Artificial Sequence
  Description of Artificial Sequence: Synthetic oligonucleotide
gaugcucgauuuucgcggc

SEQ ID NO: 2833530 - RNA, 19 nt, Artificial Sequence
  Description of Artificial Sequence: Synthetic oligonucleotide
augaccacccuugggaguc

SEQ ID NO: 2833531 - RNA, 19 nt, Artificial Sequence
  Description of Artificial Sequence: Synthetic oligonucleotide
ucugcuacauugucagauc

SEQ ID NO: 2833532 - RNA, 19 nt, Artificial Sequence
  Description of Artificial Sequence: Synthetic oligonucleotide
aucuugauaugguuccccu

SEQ ID NO: 2833533 - RNA, 19 nt, Artificial Sequence
  Description of Artificial Sequence: Synthetic oligonucleotide
cugccgaaguucaccagcg

SEQ ID NO: 2833534 - RNA, 19 nt, Artificial Sequence
  Description of Artificial Sequence: Synthetic oligonucleotide
aguacuugauccauuuccu

SEQ ID NO: 2833535 - RNA, 19 nt, Artificial Sequence
  Description of Artificial Sequence: Synthetic oligonucleotide
acuccgucgguguccacgg

SEQ ID NO: 2833536 - RNA, 19 nt, Artificial Sequence
  Description of Artificial Sequence: Synthetic oligonucleotide
uuucccagaauagcuacuc

SEQ ID NO: 2833537 - RNA, 19 nt, Artificial Sequence
  Description of Artificial Sequence: Synthetic oligonucleotide
guuagcaagaaaccauaaa

SEQ ID NO: 2833538 - RNA, 19 nt, Artificial Sequence
  Description of Artificial Sequence: Synthetic oligonucleotide
guucaccagcgccagacgc

SEQ ID NO: 2833539 - RNA, 19 nt, Artificial Sequence
  Description of Artificial Sequence: Synthetic oligonucleotide
agaaggggucuuguuuacc

SEQ ID NO: 2833540 - RNA, 19 nt, Artificial Sequence
  Description of Artificial Sequence: Synthetic oligonucleotide
uucaccagcgccagacgcu

SEQ ID NO: 2833541 - RNA, 19 nt, Artificial Sequence
  Description of Artificial Sequence: Synthetic oligonucleotide
aguuuacacuagaauucac

SEQ ID NO: 2833542 - RNA, 19 nt, Artificial Sequence
  Description of Artificial Sequence: Synthetic oligonucleotide
acucugcuguaggagaagg

SEQ ID NO: 2833543 - RNA, 19 nt, Artificial Sequence
  Description of Artificial Sequence: Synthetic oligonucleotide
ggccacaaaauacuccucc

SEQ ID NO: 2833544 - RNA, 19 nt, Artificial Sequence
  Description of Artificial Sequence: Synthetic oligonucleotide
aguagcaaaugaccacccu

SEQ ID NO: 2833545 - RNA, 19 nt, Artificial Sequence
  Description of Artificial Sequence: Synthetic oligonucleotide
cagacgcuccagaugcucg

SEQ ID NO: 2833546 - RNA, 19 nt, Artificial Sequence
  Description of Artificial Sequence: Synthetic oligonucleotide
uacuccuccacaacaugau

SEQ ID NO: 2833547 - RNA, 19 nt, Artificial Sequence
  Description of Artificial Sequence: Synthetic oligonucleotide
ucgauuuucgcggcagggc

SEQ ID NO: 2833548 - RNA, 19 nt, Artificial Sequence
  Description of Artificial Sequence: Synthetic oligonucleotide
aggagaaggggucuuguuu

SEQ ID NO: 2833549 - RNA, 19 nt, Artificial Sequence
  Description of Artificial Sequence: Synthetic oligonucleotide
cucugcuguaggagaaggg

SEQ ID NO: 2833550 - RNA, 19 nt, Artificial Sequence
  Description of Artificial Sequence: Synthetic oligonucleotide
caguagcaaaugaccaccc

SEQ ID NO: 2833551 - RNA, 19 nt, Artificial Sequence
  Description of Artificial Sequence: Synthetic oligonucleotide
aauguccaguuuacacuag

SEQ ID NO: 2833552 - RNA, 19 nt, Artificial Sequence
  Description of Artificial Sequence: Synthetic oligonucleotide
auuuucgcggcagggcacg

SEQ ID NO: 2833553 - RNA, 19 nt, Artificial Sequence
  Description of Artificial Sequence: Synthetic oligonucleotide
caucuugauaugguucccc

SEQ ID NO: 2833554 - RNA, 19 nt, Artificial Sequence
  Description of Artificial Sequence: Synthetic oligonucleotide
uccccuuucccagaauagc

SEQ ID NO: 2833555 - RNA, 19 nt, Artificial Sequence
  Description of Artificial Sequence: Synthetic oligonucleotide
ugggaauuucguaguaguu

SEQ ID NO: 2833556 - RNA, 19 nt, Artificial Sequence
  Description of Artificial Sequence: Synthetic oligonucleotide
acaugaugggaauuucgua

SEQ ID NO: 2833557 - RNA, 19 nt, Artificial Sequence
  Description of Artificial Sequence: Synthetic oligonucleotide
cacaucugucuucuaguac

SEQ ID NO: 2833558 - RNA, 19 nt, Artificial Sequence
  Description of Artificial Sequence: Synthetic oligonucleotide
agaucucaaguagacacau

SEQ ID NO: 2833559 - RNA, 19 nt, Artificial Sequence
  Description of Artificial Sequence: Synthetic oligonucleotide
cucgauuuucgcggcaggg

SEQ ID NO: 2833560 - RNA, 19 nt, Artificial Sequence
  Description of Artificial Sequence: Synthetic oligonucleotide
aguaguucuucaguacagu

SEQ ID NO: 2833561 - RNA, 19 nt, Artificial Sequence
  Description of Artificial Sequence: Synthetic oligonucleotide
cccagaauagcuacucugc

SEQ ID NO: 2833562 - RNA, 19 nt, Artificial Sequence
  Description of Artificial Sequence: Synthetic oligonucleotide
gacacaucugucuucuagu

SEQ ID NO: 2833563 - RNA, 19 nt, Artificial Sequence
  Description of Artificial Sequence: Synthetic oligonucleotide
ggaauuucguaguaguucu

SEQ ID NO: 2833564 - RNA, 19 nt, Artificial Sequence
  Description of Artificial Sequence: Synthetic oligonucleotide
uucccagaauagcuacucu

SEQ ID NO: 2833565 - RNA, 19 nt, Artificial Sequence
  Description of Artificial Sequence: Synthetic oligonucleotide
acuccuccacaacaugaug

SEQ ID NO: 2833566 - RNA, 19 nt, Artificial Sequence
  Description of Artificial Sequence: Synthetic oligonucleotide
ugaugggaauuucguagua

SEQ ID NO: 2833567 - RNA, 19 nt, Artificial Sequence
  Description of Artificial Sequence: Synthetic oligonucleotide
gcaaaugaccacccuuggg

SEQ ID NO: 2833568 - RNA, 19 nt, Artificial Sequence
  Description of Artificial Sequence: Synthetic oligonucleotide
aguugucaggacaguuagc

SEQ ID NO: 2833569 - RNA, 19 nt, Artificial Sequence
  Description of Artificial Sequence: Synthetic oligonucleotide
agcuacucugcuguaggag

SEQ ID NO: 2833570 - RNA, 19 nt, Artificial Sequence
  Description of Artificial Sequence: Synthetic oligonucleotide
caguacaguugccuucugc

SEQ ID NO: 2833571 - RNA, 19 nt, Artificial Sequence
  Description of Artificial Sequence: Synthetic oligonucleotide
aaggggucuuguuuaccaa

SEQ ID NO: 2833572 - RNA, 19 nt, Artificial Sequence
  Description of Artificial Sequence: Synthetic oligonucleotide
guccacggcgugcagcugg

SEQ ID NO: 2833573 - RNA, 19 nt, Artificial Sequence
  Description of Artificial Sequence: Synthetic oligonucleotide
ugcucgauuuucgcggcag

SEQ ID NO: 2833574 - RNA, 19 nt, Artificial Sequence
  Description of Artificial Sequence: Synthetic oligonucleotide
guguucuauuagcugggug

SEQ ID NO: 2833575 - RNA, 19 nt, Artificial Sequence
  Description of Artificial Sequence: Synthetic oligonucleotide
gagaaggggucuuguuuac

SEQ ID NO: 2833576 - RNA, 19 nt, Artificial Sequence
  Description of Artificial Sequence: Synthetic oligonucleotide
acacaucugucuucuagua

SEQ ID NO: 2833577 - RNA, 19 nt, Artificial Sequence
  Description of Artificial Sequence: Synthetic oligonucleotide
ccauaaauguccaguuuac

SEQ ID NO: 2833578 - RNA, 19 nt, Artificial Sequence
  Description of Artificial Sequence: Synthetic oligonucleotide
uugauccauuuccuuggaa

SEQ ID NO: 2833579 - RNA, 19 nt, Artificial Sequence
  Description of Artificial Sequence: Synthetic oligonucleotide
acggcgugcagcuggucag

SEQ ID NO: 2833580 - RNA, 19 nt, Artificial Sequence
  Description of Artificial Sequence: Synthetic oligonucleotide
ggacaguuagcaagaaacc

SEQ ID NO: 2833581 - RNA, 19 nt, Artificial Sequence
  Description of Artificial Sequence: Synthetic oligonucleotide
ucuugauaugguuccccuu

SEQ ID NO: 2833582 - RNA, 19 nt, Artificial Sequence
  Description of Artificial Sequence: Synthetic oligonucleotide
cuucuaguacggacuccag

SEQ ID NO: 2833583 - RNA, 19 nt, Artificial Sequence
  Description of Artificial Sequence: Synthetic oligonucleotide
uugucaggacaguuagcaa

SEQ ID NO: 2833584 - RNA, 19 nt, Artificial Sequence
  Description of Artificial Sequence: Synthetic oligonucleotide
gcaagaaaccauaaauguc

SEQ ID NO: 2833585 - RNA, 19 nt, Artificial Sequence
  Description of Artificial Sequence: Synthetic oligonucleotide
uagcuacucugcuguagga

SEQ ID NO: 2833586 - RNA, 19 nt, Artificial Sequence
  Description of Artificial Sequence: Synthetic oligonucleotide
caguuuacacuagaauuca

SEQ ID NO: 2833587 - RNA, 19 nt, Artificial Sequence
  Description of Artificial Sequence: Synthetic oligonucleotide
cagaucucaaguagacaca

SEQ ID NO: 2833588 - RNA, 19 nt, Artificial Sequence
  Description of Artificial Sequence: Synthetic oligonucleotide
cacuccgucgguguccacg

SEQ ID NO: 2833589 - RNA, 19 nt, Artificial Sequence
  Description of Artificial Sequence: Synthetic oligonucleotide
cuauuagcuggguguuuuc

SEQ ID NO: 2833590 - RNA, 19 nt, Artificial Sequence
  Description of Artificial Sequence: Synthetic oligonucleotide
caguuagcaagaaaccaua

SEQ ID NO: 2833591 - RNA, 19 nt, Artificial Sequence
  Description of Artificial Sequence: Synthetic oligonucleotide
uuaccaagucuggcaaaga

SEQ ID NO: 2833592 - RNA, 19 nt, Artificial Sequence
  Description of Artificial Sequence: Synthetic oligonucleotide
cauaaauguccaguuuaca

SEQ ID NO: 2833593 - RNA, 19 nt, Artificial Sequence
  Description of Artificial Sequence: Synthetic oligonucleotide
gccgaaguucaccagcgcc

SEQ ID NO: 2833594 - RNA, 19 nt, Artificial Sequence
  Description of Artificial Sequence: Synthetic oligonucleotide
gauuuucgcggcagggcac

SEQ ID NO: 2833595 - RNA, 19 nt, Artificial Sequence
  Description of Artificial Sequence: Synthetic oligonucleotide
gcuacucugcuguaggaga

SEQ ID NO: 2833596 - RNA, 19 nt, Artificial Sequence
  Description of Artificial Sequence: Synthetic oligonucleotide
ccuuucccagaauagcuac

SEQ ID NO: 2833597 - RNA, 19 nt, Artificial Sequence
  Description of Artificial Sequence: Synthetic oligonucleotide
agacgcuccagaugcucga

SEQ ID NO: 2833598 - RNA, 19 nt, Artificial Sequence
  Description of Artificial Sequence: Synthetic oligonucleotide
accaagucuggcaaagaaa

SEQ ID NO: 2833599 - RNA, 19 nt, Artificial Sequence
  Description of Artificial Sequence: Synthetic oligonucleotide
aguuagcaagaaaccauaa

SEQ ID NO: 2833600 - RNA, 19 nt, Artificial Sequence
  Description of Artificial Sequence: Synthetic oligonucleotide
cuugauaugguuccccuuu

SEQ ID NO: 2833601 - RNA, 19 nt, Artificial Sequence
  Description of Artificial Sequence: Synthetic oligonucleotide
uggguguuuuccaguuguc

SEQ ID NO: 2833602 - RNA, 19 nt, Artificial Sequence
  Description of Artificial Sequence: Synthetic oligonucleotide
agcuggguguuuuccaguu

SEQ ID NO: 2833603 - RNA, 19 nt, Artificial Sequence
  Description of Artificial Sequence: Synthetic oligonucleotide
guagcaaaugaccacccuu

SEQ ID NO: 2833604 - RNA, 19 nt, Artificial Sequence
  Description of Artificial Sequence: Synthetic oligonucleotide
uccaguugucaggacaguu

SEQ ID NO: 2833605 - RNA, 19 nt, Artificial Sequence
  Description of Artificial Sequence: Synthetic oligonucleotide
ucgcggcugccgaaguuca

SEQ ID NO: 2833606 - RNA, 19 nt, Artificial Sequence
  Description of Artificial Sequence: Synthetic oligonucleotide
uuucgcggcagggcacgcg

SEQ ID NO: 2833607 - RNA, 19 nt, Artificial Sequence
  Description of Artificial Sequence: Synthetic oligonucleotide
guagacacaucugucuucu

SEQ ID NO: 2833608 - RNA, 19 nt, Artificial Sequence
  Description of Artificial Sequence: Synthetic oligonucleotide
ccacaaaauacuccuccac

SEQ ID NO: 2833609 - RNA, 19 nt, Artificial Sequence
  Description of Artificial Sequence: Synthetic oligonucleotide
agcgccagacgcuccagau

SEQ ID NO: 2833610 - RNA, 19 nt, Artificial Sequence
  Description of Artificial Sequence: Synthetic oligonucleotide
ccagaugcucgauuuucgc

SEQ ID NO: 2833611 - RNA, 19 nt, Artificial Sequence
  Description of Artificial Sequence: Synthetic oligonucleotide
agggcacgcggccggcgcc

SEQ ID NO: 2833612 - RNA, 19 nt, Artificial Sequence
  Description of Artificial Sequence: Synthetic oligonucleotide
gucuggcaaagaaauauua

SEQ ID NO: 2833613 - RNA, 19 nt, Artificial Sequence
  Description of Artificial Sequence: Synthetic oligonucleotide
aagcaggcuugugguguuc

SEQ ID NO: 2833614 - RNA, 19 nt, Artificial Sequence
  Description of Artificial Sequence: Synthetic oligonucleotide
agcgaaggcgauggcuuuc

SEQ ID NO: 2833615 - RNA, 19 nt, Artificial Sequence
  Description of Artificial Sequence: Synthetic oligonucleotide
uaggagaaggggucuuguu

SEQ ID NO: 2833616 - RNA, 19 nt, Artificial Sequence
  Description of Artificial Sequence: Synthetic oligonucleotide
cguaguaguucuucaguac

SEQ ID NO: 2833617 - RNA, 19 nt, Artificial Sequence
  Description of Artificial Sequence: Synthetic oligonucleotide
guuuaccaagucuggcaaa

SEQ ID NO: 2833618 - RNA, 19 nt, Artificial Sequence
  Description of Artificial Sequence: Synthetic oligonucleotide
ccauuuccuuggaagcagg

SEQ ID NO: 2833619 - RNA, 19 nt, Artificial Sequence
  Description of Artificial Sequence: Synthetic oligonucleotide
ggucuuguuuaccaagucu

SEQ ID NO: 2833620 - RNA, 19 nt, Artificial Sequence
  Description of Artificial Sequence: Synthetic oligonucleotide
ugguuccccuuucccagaa

SEQ ID NO: 2833621 - RNA, 19 nt, Artificial Sequence
  Description of Artificial Sequence: Synthetic oligonucleotide
guaguucuucaguacaguu

SEQ ID NO: 2833622 - RNA, 19 nt, Artificial Sequence
  Description of Artificial Sequence: Synthetic oligonucleotide
cgccagacgcuccagaugc

SEQ ID NO: 2833623 - RNA, 19 nt, Artificial Sequence
  Description of Artificial Sequence: Synthetic oligonucleotide
gucagaucucaaguagaca

SEQ ID NO: 2833624 - RNA, 19 nt, Artificial Sequence
  Description of Artificial Sequence: Synthetic oligonucleotide
guacaguugccuucugcua

SEQ ID NO: 2833625 - RNA, 19 nt, Artificial Sequence
  Description of Artificial Sequence: Synthetic oligonucleotide
gaucucaaguagacacauc

SEQ ID NO: 2833626 - RNA, 19 nt, Artificial Sequence
  Description of Artificial Sequence: Synthetic oligonucleotide
cuugauccauuuccuugga

SEQ ID NO: 2833627 - RNA, 19 nt, Artificial Sequence
  Description of Artificial Sequence: Synthetic oligonucleotide
guccaguuuacacuagaau

SEQ ID NO: 2833628 - RNA, 19 nt, Artificial Sequence
  Description of Artificial Sequence: Synthetic oligonucleotide
ggggccacaaaauacuccu

SEQ ID NO: 2833629 - RNA, 19 nt, Artificial Sequence
  Description of Artificial Sequence: Synthetic oligonucleotide
ucaccagcgccagacgcuc

SEQ ID NO: 2833630 - RNA, 19 nt, Artificial Sequence
  Description of Artificial Sequence: Synthetic oligonucleotide
uccacuccgucggugucca

SEQ ID NO: 2833631 - RNA, 19 nt, Artificial Sequence
  Description of Artificial Sequence: Synthetic oligonucleotide
augguuccccuuucccaga

SEQ ID NO: 2833632 - RNA, 19 nt, Artificial Sequence
  Description of Artificial Sequence: Synthetic oligonucleotide
ucaggacaguuagcaagaa

SEQ ID NO: 2833633 - RNA, 19 nt, Artificial Sequence
  Description of Artificial Sequence: Synthetic oligonucleotide
gaauagcuacucugcugua

SEQ ID NO: 2833634 - RNA, 19 nt, Artificial Sequence
  Description of Artificial Sequence: Synthetic oligonucleotide
uccacggcgugcagcuggu

SEQ ID NO: 2833635 - RNA, 19 nt, Artificial Sequence
  Description of Artificial Sequence: Synthetic oligonucleotide
guucuucaguacaguugcc

SEQ ID NO: 2833636 - RNA, 19 nt, Artificial Sequence
  Description of Artificial Sequence: Synthetic oligonucleotide
cuccacuccgucggugucc

SEQ ID NO: 2833637 - RNA, 19 nt, Artificial Sequence
  Description of Artificial Sequence: Synthetic oligonucleotide
gucuucuaguacggacucc

SEQ ID NO: 2833638 - RNA, 19 nt, Artificial Sequence
  Description of Artificial Sequence: Synthetic oligonucleotide
uucuauuagcuggguguuu

SEQ ID NO: 2833639 - RNA, 19 nt, Artificial Sequence
  Description of Artificial Sequence: Synthetic oligonucleotide
cacccuugggaguccacca

SEQ ID NO: 2833640 - RNA, 19 nt, Artificial Sequence
  Description of Artificial Sequence: Synthetic oligonucleotide
caagucuggcaaagaaaua

SEQ ID NO: 2833641 - RNA, 19 nt, Artificial Sequence
  Description of Artificial Sequence: Synthetic oligonucleotide
agccgggccaccgccucgc

SEQ ID NO: 2833642 - RNA, 19 nt, Artificial Sequence
  Description of Artificial Sequence: Synthetic oligonucleotide
uccuuggaagcaggcuugu

SEQ ID NO: 2833643 - RNA, 19 nt, Artificial Sequence
  Description of Artificial Sequence: Synthetic oligonucleotide
agcaggcuugugguguucu

SEQ ID NO: 2833644 - RNA, 19 nt, Artificial Sequence
  Description of Artificial Sequence: Synthetic oligonucleotide
cacggcgugcagcugguca

SEQ ID NO: 2833645 - RNA, 19 nt, Artificial Sequence
  Description of Artificial Sequence: Synthetic oligonucleotide
acccuugggaguccaccau

SEQ ID NO: 2833646 - RNA, 19 nt, Artificial Sequence
  Description of Artificial Sequence: Synthetic oligonucleotide
uuccaguugucaggacagu

SEQ ID NO: 2833647 - RNA, 19 nt, Artificial Sequence
  Description of Artificial Sequence: Synthetic oligonucleotide
gaaguucaccagcgccaga

SEQ ID NO: 2833648 - RNA, 19 nt, Artificial Sequence
  Description of Artificial Sequence: Synthetic oligonucleotide
uggcuuucuccagccgggc

SEQ ID NO: 2833649 - RNA, 19 nt, Artificial Sequence
  Description of Artificial Sequence: Synthetic oligonucleotide
aucugucuucuaguacgga

SEQ ID NO: 2833650 - RNA, 19 nt, Artificial Sequence
  Description of Artificial Sequence: Synthetic oligonucleotide
gggucuuguuuaccaaguc

SEQ ID NO: 2833651 - RNA, 19 nt, Artificial Sequence
  Description of Artificial Sequence: Synthetic oligonucleotide
ccgaaguucaccagcgcca

SEQ ID NO: 2833652 - RNA, 19 nt, Artificial Sequence
  Description of Artificial Sequence: Synthetic oligonucleotide
augcucgauuuucgcggca

SEQ ID NO: 2833653 - RNA, 19 nt, Artificial Sequence
  Description of Artificial Sequence: Synthetic oligonucleotide
caggacaguuagcaagaaa

SEQ ID NO: 2833654 - RNA, 19 nt, Artificial Sequence
  Description of Artificial Sequence: Synthetic oligonucleotide
accgccucgcggcugccga

SEQ ID NO: 2833655 - RNA, 19 nt, Artificial Sequence
  Description of Artificial Sequence: Synthetic oligonucleotide
ggguguuuuccaguuguca

SEQ ID NO: 2833656 - RNA, 19 nt, Artificial Sequence
  Description of Artificial Sequence: Synthetic oligonucleotide
uacggacuccaggggcucc

SEQ ID NO: 2833657 - RNA, 19 nt, Artificial Sequence
  Description of Artificial Sequence: Synthetic oligonucleotide
cuuucccagaauagcuacu

SEQ ID NO: 2833658 - RNA, 19 nt, Artificial Sequence
  Description of Artificial Sequence: Synthetic oligonucleotide
cuggucagcgaaggcgaug

SEQ ID NO: 2833659 - RNA, 19 nt, Artificial Sequence
  Description of Artificial Sequence: Synthetic oligonucleotide
cacaacaugaugggaauuu

SEQ ID NO: 2833660 - RNA, 19 nt, Artificial Sequence
  Description of Artificial Sequence: Synthetic oligonucleotide
uuuucgcggcagggcacgc

SEQ ID NO: 2833661 - RNA, 19 nt, Artificial Sequence
  Description of Artificial Sequence: Synthetic oligonucleotide
gguguccacggcgugcagc

SEQ ID NO: 2833662 - RNA, 19 nt, Artificial Sequence
  Description of Artificial Sequence: Synthetic oligonucleotide
gcuggguguuuuccaguug

SEQ ID NO: 2833663 - RNA, 19 nt, Artificial Sequence
  Description of Artificial Sequence: Synthetic oligonucleotide
uagacacaucugucuucua

SEQ ID NO: 2833664 - RNA, 19 nt, Artificial Sequence
  Description of Artificial Sequence: Synthetic oligonucleotide
guacuugauccauuuccuu

SEQ ID NO: 2833665 - RNA, 19 nt, Artificial Sequence
  Description of Artificial Sequence: Synthetic oligonucleotide
aguugccuucugcuacauu

SEQ ID NO: 2833666 - RNA, 19 nt, Artificial Sequence
  Description of Artificial Sequence: Synthetic oligonucleotide
ucgcggcagggcacgcggc

SEQ ID NO: 2833667 - RNA, 19 nt, Artificial Sequence
  Description of Artificial Sequence: Synthetic oligonucleotide
gucagcgaaggcgauggcu

SEQ ID NO: 2833668 - RNA, 19 nt, Artificial Sequence
  Description of Artificial Sequence: Synthetic oligonucleotide
ugaccacccuugggagucc

SEQ ID NO: 2833669 - RNA, 19 nt, Artificial Sequence
  Description of Artificial Sequence: Synthetic oligonucleotide
ccaguugucaggacaguua

SEQ ID NO: 2833670 - RNA, 19 nt, Artificial Sequence
  Description of Artificial Sequence: Synthetic oligonucleotide
guucuauuagcuggguguu

SEQ ID NO: 2833671 - RNA, 19 nt, Artificial Sequence
  Description of Artificial Sequence: Synthetic oligonucleotide
ggcuugugguguucuauua

SEQ ID NO: 2833672 - RNA, 19 nt, Artificial Sequence
  Description of Artificial Sequence: Synthetic oligonucleotide
guaggagaaggggucuugu

SEQ ID NO: 2833673 - RNA, 19 nt, Artificial Sequence
  Description of Artificial Sequence: Synthetic oligonucleotide
ggcugccgaaguucaccag

SEQ ID NO: 2833674 - RNA, 19 nt, Artificial Sequence
  Description of Artificial Sequence: Synthetic oligonucleotide
gcggcugccgaaguucacc

SEQ ID NO: 2833675 - RNA, 19 nt, Artificial Sequence
  Description of Artificial Sequence: Synthetic oligonucleotide
ccaucuugauaugguuccc

SEQ ID NO: 2833676 - RNA, 19 nt, Artificial Sequence
  Description of Artificial Sequence: Synthetic oligonucleotide
gaagcaggcuugugguguu

SEQ ID NO: 2833677 - RNA, 19 nt, Artificial Sequence
  Description of Artificial Sequence: Synthetic oligonucleotide
acgcuccagaugcucgauu

SEQ ID NO: 2833678 - RNA, 19 nt, Artificial Sequence
  Description of Artificial Sequence: Synthetic oligonucleotide
cgauuuucgcggcagggca

SEQ ID NO: 2833679 - RNA, 19 nt, Artificial Sequence
  Description of Artificial Sequence: Synthetic oligonucleotide
accacccuugggaguccac

SEQ ID NO: 2833680 - RNA, 19 nt, Artificial Sequence
  Description of Artificial Sequence: Synthetic oligonucleotide
ggcgugcagcuggucagcg

SEQ ID NO: 2833681 - RNA, 19 nt, Artificial Sequence
  Description of Artificial Sequence: Synthetic oligonucleotide
uguccacggcgugcagcug

SEQ ID NO: 2833682 - RNA, 19 nt, Artificial Sequence
  Description of Artificial Sequence: Synthetic oligonucleotide
gcgccagacgcuccagaug

SEQ ID NO: 2833683 - RNA, 19 nt, Artificial Sequence
  Description of Artificial Sequence: Synthetic oligonucleotide
acggacuccaggggcucca

SEQ ID NO: 2833684 - RNA, 19 nt, Artificial Sequence
  Description of Artificial Sequence: Synthetic oligonucleotide
gaauuucguaguaguucuu

SEQ ID NO: 2833685 - RNA, 19 nt, Artificial Sequence
  Description of Artificial Sequence: Synthetic oligonucleotide
cuccgucgguguccacggc

SEQ ID NO: 2833686 - RNA, 19 nt, Artificial Sequence
  Description of Artificial Sequence: Synthetic oligonucleotide
ggucagcgaaggcgauggc

SEQ ID NO: 2833687 - RNA, 19 nt, Artificial Sequence
  Description of Artificial Sequence: Synthetic oligonucleotide
ggggucuuguuuaccaagu

SEQ ID NO: 2833688 - RNA, 19 nt, Artificial Sequence
  Description of Artificial Sequence: Synthetic oligonucleotide
ccagaauagcuacucugcu

SEQ ID NO: 2833689 - RNA, 19 nt, Artificial Sequence
  Description of Artificial Sequence: Synthetic oligonucleotide
gccaccgccucgcggcugc

SEQ ID NO: 2833690 - RNA, 19 nt, Artificial Sequence
  Description of Artificial Sequence: Synthetic oligonucleotide
gaccacccuugggagucca

SEQ ID NO: 2833691 - RNA, 19 nt, Artificial Sequence
  Description of Artificial Sequence: Synthetic oligonucleotide
ccccuuucccagaauagcu

SEQ ID NO: 2833692 - RNA, 19 nt, Artificial Sequence
  Description of Artificial Sequence: Synthetic oligonucleotide
cccuuucccagaauagcua

SEQ ID NO: 2833693 - RNA, 19 nt, Artificial Sequence
  Description of Artificial Sequence: Synthetic oligonucleotide
ggcuccacuccgucggugu

SEQ ID NO: 2833694 - RNA, 19 nt, Artificial Sequence
  Description of Artificial Sequence: Synthetic oligonucleotide
caccgccucgcggcugccg

SEQ ID NO: 2833695 - RNA, 19 nt, Artificial Sequence
  Description of Artificial Sequence: Synthetic oligonucleotide
cagcgccagacgcuccaga

SEQ ID NO: 2833696 - RNA, 19 nt, Artificial Sequence
  Description of Artificial Sequence: Synthetic oligonucleotide
caggcuugugguguucuau

SEQ ID NO: 2833697 - RNA, 19 nt, Artificial Sequence
  Description of Artificial Sequence: Synthetic oligonucleotide
gggccacaaaauacuccuc

SEQ ID NO: 2833698 - RNA, 19 nt, Artificial Sequence
  Description of Artificial Sequence: Synthetic oligonucleotide
gguguucuauuagcugggu

SEQ ID NO: 2833699 - RNA, 19 nt, Artificial Sequence
  Description of Artificial Sequence: Synthetic oligonucleotide
ccuuggaagcaggcuugug

SEQ ID NO: 2833700 - RNA, 19 nt, Artificial Sequence
  Description of Artificial Sequence: Synthetic oligonucleotide
gacgcuccagaugcucgau

SEQ ID NO: 2833701 - RNA, 19 nt, Artificial Sequence
  Description of Artificial Sequence: Synthetic oligonucleotide
gcagggcacgcggccggcg

SEQ ID NO: 2833702 - RNA, 19 nt, Artificial Sequence
  Description of Artificial Sequence: Synthetic oligonucleotide
gcgugcagcuggucagcga

SEQ ID NO: 2833703 - RNA, 19 nt, Artificial Sequence
  Description of Artificial Sequence: Synthetic oligonucleotide
gcaggcuugugguguucua

SEQ ID NO: 2833704 - RNA, 19 nt, Artificial Sequence
  Description of Artificial Sequence: Synthetic oligonucleotide
gggcuccacuccgucggug

SEQ ID NO: 2833705 - RNA, 19 nt, Artificial Sequence
  Description of Artificial Sequence: Synthetic oligonucleotide
ccgggccaccgccucgcgg

SEQ ID NO: 2833706 - RNA, 19 nt, Artificial Sequence
  Description of Artificial Sequence: Synthetic oligonucleotide
cgcggcagggcacgcggcc

SEQ ID NO: 2833707 - RNA, 19 nt, Artificial Sequence
  Description of Artificial Sequence: Synthetic oligonucleotide
cagcgaaggcgauggcuuu

SEQ ID NO: 2833708 - RNA, 19 nt, Artificial Sequence
  Description of Artificial Sequence: Synthetic oligonucleotide
cggcugccgaaguucacca

SEQ ID NO: 2833709 - RNA, 19 nt, Artificial Sequence
  Description of Artificial Sequence: Synthetic oligonucleotide
gcuccagaugcucgauuuu

SEQ ID NO: 2833710 - RNA, 19 nt, Artificial Sequence
  Description of Artificial Sequence: Synthetic oligonucleotide
gcgaaggcgauggcuuucu

SEQ ID NO: 2833711 - RNA, 19 nt, Artificial Sequence
  Description of Artificial Sequence: Synthetic oligonucleotide
gggcacgcggccggcgccc

SEQ ID NO: 2833712 - RNA, 19 nt, Artificial Sequence
  Description of Artificial Sequence: Synthetic oligonucleotide
cggcagggcacgcggccgg

SEQ ID NO: 2833713 - RNA, 19 nt, Artificial Sequence
  Description of Artificial Sequence: Synthetic oligonucleotide
ccagcgccagacgcuccag

SEQ ID NO: 2833714 - RNA, 19 nt, Artificial Sequence
  Description of Artificial Sequence: Synthetic oligonucleotide
gccgggccaccgccucgcg

SEQ ID NO: 2833715 - RNA, 19 nt, Artificial Sequence
  Description of Artificial Sequence: Synthetic oligonucleotide
ccgucgguguccacggcgu

SEQ ID NO: 2833716 - RNA, 19 nt, Artificial Sequence
  Description of Artificial Sequence: Synthetic oligonucleotide
cgcuccagaugcucgauuu

SEQ ID NO: 2833717 - RNA, 19 nt, Artificial Sequence
  Description of Artificial Sequence: Synthetic oligonucleotide
cgucgguguccacggcgug

SEQ ID NO: 2833718 - RNA, 19 nt, Artificial Sequence
  Description of Artificial Sequence: Synthetic oligonucleotide
cgcggcugccgaaguucac

SEQ ID NO: 2833719 - RNA, 19 nt, Artificial Sequence
  Description of Artificial Sequence: Synthetic oligonucleotide
cgccucgcggcugccgaag

SEQ ID NO: 2833720 - RNA, 19 nt, Artificial Sequence
  Description of Artificial Sequence: Synthetic oligonucleotide
ggggcuccacuccgucggu

SEQ ID NO: 2833721 - RNA, 19 nt, Artificial Sequence
  Description of Artificial Sequence: Synthetic oligonucleotide
gcacgcggccggcgcccug

SEQ ID NO: 2833722 - RNA, 19 nt, Artificial Sequence
  Description of Artificial Sequence: Synthetic oligonucleotide
gccucgcggcugccgaagu

SEQ ID NO: 2833723 - RNA, 19 nt, Artificial Sequence
  Description of Artificial Sequence: Synthetic oligonucleotide
gcuggucagcgaaggcgau

SEQ ID NO: 2833724 - RNA, 19 nt, Artificial Sequence
  Description of Artificial Sequence: Synthetic oligonucleotide
ccacuccgucgguguccac

SEQ ID NO: 2833725 - RNA, 19 nt, Artificial Sequence
  Description of Artificial Sequence: Synthetic oligonucleotide
ccacggcgugcagcugguc

SEQ ID NO: 2833726 - RNA, 19 nt, Artificial Sequence
  Description of Artificial Sequence: Synthetic oligonucleotide
ccgccucgcggcugccgaa

SEQ ID NO: 2833727 - RNA, 19 nt, Artificial Sequence
  Description of Artificial Sequence: Synthetic oligonucleotide
ggcacgcggccggcgcccu

SEQ ID NO: 2833728 - RNA, 19 nt, Artificial Sequence
  Description of Artificial Sequence: Synthetic oligonucleotide
uguuuuaucaaauauaugu

SEQ ID NO: 2833729 - RNA, 19 nt, Artificial Sequence
  Description of Artificial Sequence: Synthetic oligonucleotide
auauaaauauaacugacac

SEQ ID NO: 2833730 - RNA, 19 nt, Artificial Sequence
  Description of Artificial Sequence: Synthetic oligonucleotide
ucaaauauauguauaauca

SEQ ID NO: 2833731 - RNA, 19 nt, Artificial Sequence
  Description of Artificial Sequence: Synthetic oligonucleotide
auaaauauaacugacacug

SEQ ID NO: 2833732 - RNA, 19 nt, Artificial Sequence
  Description of Artificial Sequence: Synthetic oligonucleotide
uuucuuauagaucaugaag

SEQ ID NO: 2833733 - RNA, 19 nt, Artificial Sequence
  Description of Artificial Sequence: Synthetic oligonucleotide
uucuuauagaucaugaagc

SEQ ID NO: 2833734 - RNA, 19 nt, Artificial Sequence
  Description of Artificial Sequence: Synthetic oligonucleotide
aaauauaacugacacuguc

SEQ ID NO: 2833735 - RNA, 19 nt, Artificial Sequence
  Description of Artificial Sequence: Synthetic oligonucleotide
uauauguauaaucaaaggu

SEQ ID NO: 2833736 - RNA, 19 nt, Artificial Sequence
  Description of Artificial Sequence: Synthetic oligonucleotide
uuauagaucaugaagcugu

SEQ ID NO: 2833737 - RNA, 19 nt, Artificial Sequence
  Description of Artificial Sequence: Synthetic oligonucleotide
aauauauguauaaucaaag

SEQ ID NO: 2833738 - RNA, 19 nt, Artificial Sequence
  Description of Artificial Sequence: Synthetic oligonucleotide
uguguguguaccuaaaagg

SEQ ID NO: 2833739 - RNA, 19 nt, Artificial Sequence
  Description of Artificial Sequence: Synthetic oligonucleotide
uuuguuuuaucaaauauau

SEQ ID NO: 2833740 - RNA, 19 nt, Artificial Sequence
  Description of Artificial Sequence: Synthetic oligonucleotide
uauguauaaucaaagguug

SEQ ID NO: 2833741 - RNA, 19 nt, Artificial Sequence
  Description of Artificial Sequence: Synthetic oligonucleotide
uguacaaguauauaaauau

SEQ ID NO: 2833742 - RNA, 19 nt, Artificial Sequence
  Description of Artificial Sequence: Synthetic oligonucleotide
aguauauaaauauaacuga

SEQ ID NO: 2833743 - RNA, 19 nt, Artificial Sequence
  Description of Artificial Sequence: Synthetic oligonucleotide
aaaaguacagagucaaugu

SEQ ID NO: 2833744 - RNA, 19 nt, Artificial Sequence
  Description of Artificial Sequence: Synthetic oligonucleotide
agaucaugaagcuguaugc

SEQ ID NO: 2833745 - RNA, 19 nt, Artificial Sequence
  Description of Artificial Sequence: Synthetic oligonucleotide
auauauguauaaucaaagg

SEQ ID NO: 2833746 - RNA, 19 nt, Artificial Sequence
  Description of Artificial Sequence: Synthetic oligonucleotide
uauauaaauauaacugaca

SEQ ID NO: 2833747 - RNA, 19 nt, Artificial Sequence
  Description of Artificial Sequence: Synthetic oligonucleotide
uacaaguauauaaauauaa

SEQ ID NO: 2833748 - RNA, 19 nt, Artificial Sequence
  Description of Artificial Sequence: Synthetic oligonucleotide
auauaacugacacugucac

SEQ ID NO: 2833749 - RNA, 19 nt, Artificial Sequence
  Description of Artificial Sequence: Synthetic oligonucleotide
uaugcucaaaaguacagag

SEQ ID NO: 2833750 - RNA, 19 nt, Artificial Sequence
  Description of Artificial Sequence: Synthetic oligonucleotide
cucaauuucuuauagauca

SEQ ID NO: 2833751 - RNA, 19 nt, Artificial Sequence
  Description of Artificial Sequence: Synthetic oligonucleotide
aaguacagagucaaugugc

SEQ ID NO: 2833752 - RNA, 19 nt, Artificial Sequence
  Description of Artificial Sequence: Synthetic oligonucleotide
auaacugacacugucacuc

SEQ ID NO: 2833753 - RNA, 19 nt, Artificial Sequence
  Description of Artificial Sequence: Synthetic oligonucleotide
aaaagguggauuuucucug

SEQ ID NO: 2833754 - RNA, 19 nt, Artificial Sequence
  Description of Artificial Sequence: Synthetic oligonucleotide
agagucaaugugcaggacc

SEQ ID NO: 2833755 - RNA, 19 nt, Artificial Sequence
  Description of Artificial Sequence: Synthetic oligonucleotide
uagaucaugaagcuguaug

SEQ ID NO: 2833756 - RNA, 19 nt, Artificial Sequence
  Description of Artificial Sequence: Synthetic oligonucleotide
ugcucaaaaguacagaguc

SEQ ID NO: 2833757 - RNA, 19 nt, Artificial Sequence
  Description of Artificial Sequence: Synthetic oligonucleotide
uuaucaaauauauguauaa

SEQ ID NO: 2833758 - RNA, 19 nt, Artificial Sequence
  Description of Artificial Sequence: Synthetic oligonucleotide
uuuuguuuuaucaaauaua

SEQ ID NO: 2833759 - RNA, 19 nt, Artificial Sequence
  Description of Artificial Sequence: Synthetic oligonucleotide
gacacugucacucgcaugc

SEQ ID NO: 2833760 - RNA, 19 nt, Artificial Sequence
  Description of Artificial Sequence: Synthetic oligonucleotide
aaaguacagagucaaugug

SEQ ID NO: 2833761 - RNA, 19 nt, Artificial Sequence
  Description of Artificial Sequence: Synthetic oligonucleotide
uuuuaucaaauauauguau

SEQ ID NO: 2833762 - RNA, 19 nt, Artificial Sequence
  Description of Artificial Sequence: Synthetic oligonucleotide
uaaaagguggauuuucucu

SEQ ID NO: 2833763 - RNA, 19 nt, Artificial Sequence
  Description of Artificial Sequence: Synthetic oligonucleotide
uacagagucaaugugcagg

SEQ ID NO: 2833764 - RNA, 19 nt, Artificial Sequence
  Description of Artificial Sequence: Synthetic oligonucleotide
auaaucaaagguugcaucu

SEQ ID NO: 2833765 - RNA, 19 nt, Artificial Sequence
  Description of Artificial Sequence: Synthetic oligonucleotide
aaauauauguauaaucaaa

SEQ ID NO: 2833766 - RNA, 19 nt, Artificial Sequence
  Description of Artificial Sequence: Synthetic oligonucleotide
uguaugcucaaaaguacag

SEQ ID NO: 2833767 - RNA, 19 nt, Artificial Sequence
  Description of Artificial Sequence: Synthetic oligonucleotide
uauaaauauaacugacacu

SEQ ID NO: 2833768 - RNA, 19 nt, Artificial Sequence
  Description of Artificial Sequence: Synthetic oligonucleotide
gaagcuguaugcucaaaag

SEQ ID NO: 2833769 - RNA, 19 nt, Artificial Sequence
  Description of Artificial Sequence: Synthetic oligonucleotide
aacacacagcccuugcuuc

SEQ ID NO: 2833770 - RNA, 19 nt, Artificial Sequence
  Description of Artificial Sequence: Synthetic oligonucleotide
aaagguugcaucuguacaa

SEQ ID NO: 2833771 - RNA, 19 nt, Artificial Sequence
  Description of Artificial Sequence: Synthetic oligonucleotide
cuuugguacacacuugagg

SEQ ID NO: 2833772 - RNA, 19 nt, Artificial Sequence
  Description of Artificial Sequence: Synthetic oligonucleotide
uuaaaggcgugucugccag

SEQ ID NO: 2833773 - RNA, 19 nt, Artificial Sequence
  Description of Artificial Sequence: Synthetic oligonucleotide
aauuucuuauagaucauga

SEQ ID NO: 2833774 - RNA, 19 nt, Artificial Sequence
  Description of Artificial Sequence: Synthetic oligonucleotide
ucuuauagaucaugaagcu

SEQ ID NO: 2833775 - RNA, 19 nt, Artificial Sequence
  Description of Artificial Sequence: Synthetic oligonucleotide
aauauaacugacacuguca

SEQ ID NO: 2833776 - RNA, 19 nt, Artificial Sequence
  Description of Artificial Sequence: Synthetic oligonucleotide
ucaugaagcuguaugcuca

SEQ ID NO: 2833777 - RNA, 19 nt, Artificial Sequence
  Description of Artificial Sequence: Synthetic oligonucleotide
augucuuguuuucugcagc

SEQ ID NO: 2833778 - RNA, 19 nt, Artificial Sequence
  Description of Artificial Sequence: Synthetic oligonucleotide
uguauaaucaaagguugca

SEQ ID NO: 2833779 - RNA, 19 nt, Artificial Sequence
  Description of Artificial Sequence: Synthetic oligonucleotide
aagcuguaugcucaaaagu

SEQ ID NO: 2833780 - RNA, 19 nt, Artificial Sequence
  Description of Artificial Sequence: Synthetic oligonucleotide
agcaugucuuguuuucugc

SEQ ID NO: 2833781 - RNA, 19 nt, Artificial Sequence
  Description of Artificial Sequence: Synthetic oligonucleotide
aacugacacugucacucgc

SEQ ID NO: 2833782 - RNA, 19 nt, Artificial Sequence
  Description of Artificial Sequence: Synthetic oligonucleotide
guguguaccuaaaaggugg

SEQ ID NO: 2833783 - RNA, 19 nt, Artificial Sequence
  Description of Artificial Sequence: Synthetic oligonucleotide
uauggaguggcucucaauu

SEQ ID NO: 2833784 - RNA, 19 nt, Artificial Sequence
  Description of Artificial Sequence: Synthetic oligonucleotide
auauguauaaucaaagguu

SEQ ID NO: 2833785 - RNA, 19 nt, Artificial Sequence
  Description of Artificial Sequence: Synthetic oligonucleotide
caaaaguacagagucaaug

SEQ ID NO: 2833786 - RNA, 19 nt, Artificial Sequence
  Description of Artificial Sequence: Synthetic oligonucleotide
guauauaaauauaacugac

SEQ ID NO: 2833787 - RNA, 19 nt, Artificial Sequence
  Description of Artificial Sequence: Synthetic oligonucleotide
aaugugcaggaccucacgu

SEQ ID NO: 2833788 - RNA, 19 nt, Artificial Sequence
  Description of Artificial Sequence: Synthetic oligonucleotide
uuucucugucccucuaugg

SEQ ID NO: 2833789 - RNA, 19 nt, Artificial Sequence
  Description of Artificial Sequence: Synthetic oligonucleotide
agguggauuuucucugucc

SEQ ID NO: 2833790 - RNA, 19 nt, Artificial Sequence
  Description of Artificial Sequence: Synthetic oligonucleotide
augcacaacacacagcccu

SEQ ID NO: 2833791 - RNA, 19 nt, Artificial Sequence
  Description of Artificial Sequence: Synthetic oligonucleotide
uuguuuuaucaaauauaug

SEQ ID NO: 2833792 - RNA, 19 nt, Artificial Sequence
  Description of Artificial Sequence: Synthetic oligonucleotide
ucgcaugcacaacacacag

SEQ ID NO: 2833793 - RNA, 19 nt, Artificial Sequence
  Description of Artificial Sequence: Synthetic oligonucleotide
uuuucucugucccucuaug

SEQ ID NO: 2833794 - RNA, 19 nt, Artificial Sequence
  Description of Artificial Sequence: Synthetic oligonucleotide
ugaagcuguaugcucaaaa

SEQ ID NO: 2833795 - RNA, 19 nt, Artificial Sequence
  Description of Artificial Sequence: Synthetic oligonucleotide
gcaugcacaacacacagcc

SEQ ID NO: 2833796 - RNA, 19 nt, Artificial Sequence
  Description of Artificial Sequence: Synthetic oligonucleotide
ucaaagguugcaucuguac

SEQ ID NO: 2833797 - RNA, 19 nt, Artificial Sequence
  Description of Artificial Sequence: Synthetic oligonucleotide
ucucaauuucuuauagauc

SEQ ID NO: 2833798 - RNA, 19 nt, Artificial Sequence
  Description of Artificial Sequence: Synthetic oligonucleotide
ucucugucccucuauggag

SEQ ID NO: 2833799 - RNA, 19 nt, Artificial Sequence
  Description of Artificial Sequence: Synthetic oligonucleotide
acucgcaugcacaacacac

SEQ ID NO: 2833800 - RNA, 19 nt, Artificial Sequence
  Description of Artificial Sequence: Synthetic oligonucleotide
auguauaaucaaagguugc

SEQ ID NO: 2833801 - RNA, 19 nt, Artificial Sequence
  Description of Artificial Sequence: Synthetic oligonucleotide
uucucugucccucuaugga

SEQ ID NO: 2833802 - RNA, 19 nt, Artificial Sequence
  Description of Artificial Sequence: Synthetic oligonucleotide
ugugugugugagcacaagu

SEQ ID NO: 2833803 - RNA, 19 nt, Artificial Sequence
  Description of Artificial Sequence: Synthetic oligonucleotide
uaaauauaacugacacugu

SEQ ID NO: 2833804 - RNA, 19 nt, Artificial Sequence
  Description of Artificial Sequence: Synthetic oligonucleotide
aagguggauuuucucuguc

SEQ ID NO: 2833805 - RNA, 19 nt, Artificial Sequence
  Description of Artificial Sequence: Synthetic oligonucleotide
cuguguguguaccuaaaag

SEQ ID NO: 2833806 - RNA, 19 nt, Artificial Sequence
  Description of Artificial Sequence: Synthetic oligonucleotide
aaagguggauuuucucugu

SEQ ID NO: 2833807 - RNA, 19 nt, Artificial Sequence
  Description of Artificial Sequence: Synthetic oligonucleotide
gacccagcagcuuugguac

SEQ ID NO: 2833808 - RNA, 19 nt, Artificial Sequence
  Description of Artificial Sequence: Synthetic oligonucleotide
auuucuuauagaucaugaa

SEQ ID NO: 2833809 - RNA, 19 nt, Artificial Sequence
  Description of Artificial Sequence: Synthetic oligonucleotide
acacacuugaggcugugug

SEQ ID NO: 2833810 - RNA, 19 nt, Artificial Sequence
  Description of Artificial Sequence: Synthetic oligonucleotide
cuuguuuucugcagcuggc

SEQ ID NO: 2833811 - RNA, 19 nt, Artificial Sequence
  Description of Artificial Sequence: Synthetic oligonucleotide
acacacagcccuugcuucc

SEQ ID NO: 2833812 - RNA, 19 nt, Artificial Sequence
  Description of Artificial Sequence: Synthetic oligonucleotide
gauuaaaggcgugucugcc

SEQ ID NO: 2833813 - RNA, 19 nt, Artificial Sequence
  Description of Artificial Sequence: Synthetic oligonucleotide
caugucuuguuuucugcag

SEQ ID NO: 2833814 - RNA, 19 nt, Artificial Sequence
  Description of Artificial Sequence: Synthetic oligonucleotide
ugugugugagcacaaguuu

SEQ ID NO: 2833815 - RNA, 19 nt, Artificial Sequence
  Description of Artificial Sequence: Synthetic oligonucleotide
uaacugacacugucacucg

SEQ ID NO: 2833816 - RNA, 19 nt, Artificial Sequence
  Description of Artificial Sequence: Synthetic oligonucleotide
agcuuugguacacacuuga

SEQ ID NO: 2833817 - RNA, 19 nt, Artificial Sequence
  Description of Artificial Sequence: Synthetic oligonucleotide
ugcaucuguacaaguauau

SEQ ID NO: 2833818 - RNA, 19 nt, Artificial Sequence
  Description of Artificial Sequence: Synthetic oligonucleotide
acagagucaaugugcagga

SEQ ID NO: 2833819 - RNA, 19 nt, Artificial Sequence
  Description of Artificial Sequence: Synthetic oligonucleotide
caaauauauguauaaucaa

SEQ ID NO: 2833820 - RNA, 19 nt, Artificial Sequence
  Description of Artificial Sequence: Synthetic oligonucleotide
uucugcagcuggcuucucg

SEQ ID NO: 2833821 - RNA, 19 nt, Artificial Sequence
  Description of Artificial Sequence: Synthetic oligonucleotide
accuaaaagguggauuuuc

SEQ ID NO: 2833822 - RNA, 19 nt, Artificial Sequence
  Description of Artificial Sequence: Synthetic oligonucleotide
uaucaaauauauguauaau

SEQ ID NO: 2833823 - RNA, 19 nt, Artificial Sequence
  Description of Artificial Sequence: Synthetic oligonucleotide
cuaaaagguggauuuucuc

SEQ ID NO: 2833824 - RNA, 19 nt, Artificial Sequence
  Description of Artificial Sequence: Synthetic oligonucleotide
aagguugcaucuguacaag

SEQ ID NO: 2833825 - RNA, 19 nt, Artificial Sequence
  Description of Artificial Sequence: Synthetic oligonucleotide
ugucuuguuuucugcagcu

SEQ ID NO: 2833826 - RNA, 19 nt, Artificial Sequence
  Description of Artificial Sequence: Synthetic oligonucleotide
uaaucaaagguugcaucug

SEQ ID NO: 2833827 - RNA, 19 nt, Artificial Sequence
  Description of Artificial Sequence: Synthetic oligonucleotide
auuaaaggcgugucugcca

SEQ ID NO: 2833828 - RNA, 19 nt, Artificial Sequence
  Description of Artificial Sequence: Synthetic oligonucleotide
cuuauagaucaugaagcug

SEQ ID NO: 2833829 - RNA, 19 nt, Artificial Sequence
  Description of Artificial Sequence: Synthetic oligonucleotide
ugguacacacuugaggcug

SEQ ID NO: 2833830 - RNA, 19 nt, Artificial Sequence
  Description of Artificial Sequence: Synthetic oligonucleotide
uguguaccuaaaaggugga

SEQ ID NO: 2833831 - RNA, 19 nt, Artificial Sequence
  Description of Artificial Sequence: Synthetic oligonucleotide
uguaccuaaaagguggauu

SEQ ID NO: 2833832 - RNA, 19 nt, Artificial Sequence
  Description of Artificial Sequence: Synthetic oligonucleotide
uauaacugacacugucacu

SEQ ID NO: 2833833 - RNA, 19 nt, Artificial Sequence
  Description of Artificial Sequence: Synthetic oligonucleotide
aguacagagucaaugugca

SEQ ID NO: 2833834 - RNA, 19 nt, Artificial Sequence
  Description of Artificial Sequence: Synthetic oligonucleotide
uggaguggcucucaauuuc

SEQ ID NO: 2833835 - RNA, 19 nt, Artificial Sequence
  Description of Artificial Sequence: Synthetic oligonucleotide
gguggauuuucucuguccc

SEQ ID NO: 2833836 - RNA, 19 nt, Artificial Sequence
  Description of Artificial Sequence: Synthetic oligonucleotide
ucugcagcuggcuucucga

SEQ ID NO: 2833837 - RNA, 19 nt, Artificial Sequence
  Description of Artificial Sequence: Synthetic oligonucleotide
ucaauuucuuauagaucau

SEQ ID NO: 2833838 - RNA, 19 nt, Artificial Sequence
  Description of Artificial Sequence: Synthetic oligonucleotide
caauuucuuauagaucaug

SEQ ID NO: 2833839 - RNA, 19 nt, Artificial Sequence
  Description of Artificial Sequence: Synthetic oligonucleotide
guuuuaucaaauauaugua

SEQ ID NO: 2833840 - RNA, 19 nt, Artificial Sequence
  Description of Artificial Sequence: Synthetic oligonucleotide
ucaaugugcaggaccucac

SEQ ID NO: 2833841 - RNA, 19 nt, Artificial Sequence
  Description of Artificial Sequence: Synthetic oligonucleotide
aaaggcgugucugccagca

SEQ ID NO: 2833842 - RNA, 19 nt, Artificial Sequence
  Description of Artificial Sequence: Synthetic oligonucleotide
caaagguugcaucuguaca

SEQ ID NO: 2833843 - RNA, 19 nt, Artificial Sequence
  Description of Artificial Sequence: Synthetic oligonucleotide
guuuucugcagcuggcuuc

SEQ ID NO: 2833844 - RNA, 19 nt, Artificial Sequence
  Description of Artificial Sequence: Synthetic oligonucleotide
ugucccucuauggaguggc

SEQ ID NO: 2833845 - RNA, 19 nt, Artificial Sequence
  Description of Artificial Sequence: Synthetic oligonucleotide
cucucaauuucuuauagau

SEQ ID NO: 2833846 - RNA, 19 nt, Artificial Sequence
  Description of Artificial Sequence: Synthetic oligonucleotide
gucacucgcaugcacaaca

SEQ ID NO: 2833847 - RNA, 19 nt, Artificial Sequence
  Description of Artificial Sequence: Synthetic oligonucleotide
caaugugcaggaccucacg

SEQ ID NO: 2833848 - RNA, 19 nt, Artificial Sequence
  Description of Artificial Sequence: Synthetic oligonucleotide
uugcaucuguacaaguaua

SEQ ID NO: 2833849 - RNA, 19 nt, Artificial Sequence
  Description of Artificial Sequence: Synthetic oligonucleotide
augugcaggaccucacgug

SEQ ID NO: 2833850 - RNA, 19 nt, Artificial Sequence
  Description of Artificial Sequence: Synthetic oligonucleotide
cucaaaaguacagagucaa

SEQ ID NO: 2833851 - RNA, 19 nt, Artificial Sequence
  Description of Artificial Sequence: Synthetic oligonucleotide
uauagaucaugaagcugua

SEQ ID NO: 2833852 - RNA, 19 nt, Artificial Sequence
  Description of Artificial Sequence: Synthetic oligonucleotide
agcuguaugcucaaaagua

SEQ ID NO: 2833853 - RNA, 19 nt, Artificial Sequence
  Description of Artificial Sequence: Synthetic oligonucleotide
uggauuuucucugucccuc

SEQ ID NO: 2833854 - RNA, 19 nt, Artificial Sequence
  Description of Artificial Sequence: Synthetic oligonucleotide
uuuucugcagcuggcuucu

SEQ ID NO: 2833855 - RNA, 19 nt, Artificial Sequence
  Description of Artificial Sequence: Synthetic oligonucleotide
cuguacaaguauauaaaua

SEQ ID NO: 2833856 - RNA, 19 nt, Artificial Sequence
  Description of Artificial Sequence: Synthetic oligonucleotide
agcccuugcuuccccaggg

SEQ ID NO: 2833857 - RNA, 19 nt, Artificial Sequence
  Description of Artificial Sequence: Synthetic oligonucleotide
cuguaugcucaaaaguaca

SEQ ID NO: 2833858 - RNA, 19 nt, Artificial Sequence
  Description of Artificial Sequence: Synthetic oligonucleotide
ucacgugugugugugugug

SEQ ID NO: 2833859 - RNA, 19 nt, Artificial Sequence
  Description of Artificial Sequence: Synthetic oligonucleotide
acaacacacagcccuugcu

SEQ ID NO: 2833860 - RNA, 19 nt, Artificial Sequence
  Description of Artificial Sequence: Synthetic oligonucleotide
uguuuucugcagcuggcuu

SEQ ID NO: 2833861 - RNA, 19 nt, Artificial Sequence
  Description of Artificial Sequence: Synthetic oligonucleotide
ggauuaaaggcgugucugc

SEQ ID NO: 2833862 - RNA, 19 nt, Artificial Sequence
  Description of Artificial Sequence: Synthetic oligonucleotide
aggcgugucugccagcaug

SEQ ID NO: 2833863 - RNA, 19 nt, Artificial Sequence
  Description of Artificial Sequence: Synthetic oligonucleotide
ucugucccucuauggagug

SEQ ID NO: 2833864 - RNA, 19 nt, Artificial Sequence
  Description of Artificial Sequence: Synthetic oligonucleotide
ucuauggaguggcucucaa

SEQ ID NO: 2833865 - RNA, 19 nt, Artificial Sequence
  Description of Artificial Sequence: Synthetic oligonucleotide
ucacucgcaugcacaacac

SEQ ID NO: 2833866 - RNA, 19 nt, Artificial Sequence
  Description of Artificial Sequence: Synthetic oligonucleotide
ugcaggaccucacgugugu

SEQ ID NO: 2833867 - RNA, 19 nt, Artificial Sequence
  Description of Artificial Sequence: Synthetic oligonucleotide
auuuucucugucccucuau

SEQ ID NO: 2833868 - RNA, 19 nt, Artificial Sequence
  Description of Artificial Sequence: Synthetic oligonucleotide
ugugugugugugugugagc

SEQ ID NO: 2833869 - RNA, 19 nt, Artificial Sequence
  Description of Artificial Sequence: Synthetic oligonucleotide
gggauuaaaggcgugucug

SEQ ID NO: 2833870 - RNA, 19 nt, Artificial Sequence
  Description of Artificial Sequence: Synthetic oligonucleotide
gugugugugugugugagca

SEQ ID NO: 2833871 - RNA, 19 nt, Artificial Sequence
  Description of Artificial Sequence: Synthetic oligonucleotide
gugugugugugugugugag

SEQ ID NO: 2833872 - RNA, 19 nt, Artificial Sequence
  Description of Artificial Sequence: Synthetic oligonucleotide
caugcacaacacacagccc

SEQ ID NO: 2833873 - RNA, 19 nt, Artificial Sequence
  Description of Artificial Sequence: Synthetic oligonucleotide
uguguguguguguguguga

SEQ ID NO: 2833874 - RNA, 19 nt, Artificial Sequence
  Description of Artificial Sequence: Synthetic oligonucleotide
guaccuaaaagguggauuu

SEQ ID NO: 2833875 - RNA, 19 nt, Artificial Sequence
  Description of Artificial Sequence: Synthetic oligonucleotide
ugugugugugugagcacaa

SEQ ID NO: 2833876 - RNA, 19 nt, Artificial Sequence
  Description of Artificial Sequence: Synthetic oligonucleotide
ugacacugucacucgcaug

SEQ ID NO: 2833877 - RNA, 19 nt, Artificial Sequence
  Description of Artificial Sequence: Synthetic oligonucleotide
cagcaugucuuguuuucug

SEQ ID NO: 2833878 - RNA, 19 nt, Artificial Sequence
  Description of Artificial Sequence: Synthetic oligonucleotide
cacaacacacagcccuugc

SEQ ID NO: 2833879 - RNA, 19 nt, Artificial Sequence
  Description of Artificial Sequence: Synthetic oligonucleotide
cuugaggcuguguguguac

SEQ ID NO: 2833880 - RNA, 19 nt, Artificial Sequence
  Description of Artificial Sequence: Synthetic oligonucleotide
ucugccagcaugucuuguu

SEQ ID NO: 2833881 - RNA, 19 nt, Artificial Sequence
  Description of Artificial Sequence: Synthetic oligonucleotide
guugcaucuguacaaguau

SEQ ID NO: 2833882 - RNA, 19 nt, Artificial Sequence
  Description of Artificial Sequence: Synthetic oligonucleotide
ugugugugugugugugugu

SEQ ID NO: 2833883 - RNA, 19 nt, Artificial Sequence
  Description of Artificial Sequence: Synthetic oligonucleotide
ugcagcuggcuucucgauc

SEQ ID NO: 2833884 - RNA, 19 nt, Artificial Sequence
  Description of Artificial Sequence: Synthetic oligonucleotide
uugaggcuguguguguacc

SEQ ID NO: 2833885 - RNA, 19 nt, Artificial Sequence
  Description of Artificial Sequence: Synthetic oligonucleotide
ugaggcuguguguguaccu

SEQ ID NO: 2833886 - RNA, 19 nt, Artificial Sequence
  Description of Artificial Sequence: Synthetic oligonucleotide
guaugcucaaaaguacaga

SEQ ID NO: 2833887 - RNA, 19 nt, Artificial Sequence
  Description of Artificial Sequence: Synthetic oligonucleotide
uuguuuucugcagcuggcu

SEQ ID NO: 2833888 - RNA, 19 nt, Artificial Sequence
  Description of Artificial Sequence: Synthetic oligonucleotide
guacagagucaaugugcag

SEQ ID NO: 2833889 - RNA, 19 nt, Artificial Sequence
  Description of Artificial Sequence: Synthetic oligonucleotide
gaucaugaagcuguaugcu

SEQ ID NO: 2833890 - RNA, 19 nt, Artificial Sequence
  Description of Artificial Sequence: Synthetic oligonucleotide
acugucacucgcaugcaca

SEQ ID NO: 2833891 - RNA, 19 nt, Artificial Sequence
  Description of Artificial Sequence: Synthetic oligonucleotide
gugugugugugugugugug

SEQ ID NO: 2833892 - RNA, 19 nt, Artificial Sequence
  Description of Artificial Sequence: Synthetic oligonucleotide
guguguguaccuaaaaggu

SEQ ID NO: 2833893 - RNA, 19 nt, Artificial Sequence
  Description of Artificial Sequence: Synthetic oligonucleotide
gagucaaugugcaggaccu

SEQ ID NO: 2833894 - RNA, 19 nt, Artificial Sequence
  Description of Artificial Sequence: Synthetic oligonucleotide
gaccucacgugugugugug

SEQ ID NO: 2833895 - RNA, 19 nt, Artificial Sequence
  Description of Artificial Sequence: Synthetic oligonucleotide
aguggcucucaauuucuua

SEQ ID NO: 2833896 - RNA, 19 nt, Artificial Sequence
  Description of Artificial Sequence: Synthetic oligonucleotide
acagcccuugcuuccccag

SEQ ID NO: 2833897 - RNA, 19 nt, Artificial Sequence
  Description of Artificial Sequence: Synthetic oligonucleotide
guacaaguauauaaauaua

SEQ ID NO: 2833898 - RNA, 19 nt, Artificial Sequence
  Description of Artificial Sequence: Synthetic oligonucleotide
acgugugugugugugugug

SEQ ID NO: 2833899 - RNA, 19 nt, Artificial Sequence
  Description of Artificial Sequence: Synthetic oligonucleotide
ugugugugugugugagcac

SEQ ID NO: 2833900 - RNA, 19 nt, Artificial Sequence
  Description of Artificial Sequence: Synthetic oligonucleotide
cucgcaugcacaacacaca

SEQ ID NO: 2833901 - RNA, 19 nt, Artificial Sequence
  Description of Artificial Sequence: Synthetic oligonucleotide
gcuguaugcucaaaaguac

SEQ ID NO: 2833902 - RNA, 19 nt, Artificial Sequence
  Description of Artificial Sequence: Synthetic oligonucleotide
auggaguggcucucaauuu

SEQ ID NO: 2833903 - RNA, 19 nt, Artificial Sequence
  Description of Artificial Sequence: Synthetic oligonucleotide
augcucaaaaguacagagu

SEQ ID NO: 2833904 - RNA, 19 nt, Artificial Sequence
  Description of Artificial Sequence: Synthetic oligonucleotide
agguugcaucuguacaagu

SEQ ID NO: 2833905 - RNA, 19 nt, Artificial Sequence
  Description of Artificial Sequence: Synthetic oligonucleotide
cuugcuuccccagggagga

SEQ ID NO: 2833906 - RNA, 19 nt, Artificial Sequence
  Description of Artificial Sequence: Synthetic oligonucleotide
gugugugugugugagcaca

SEQ ID NO: 2833907 - RNA, 19 nt, Artificial Sequence
  Description of Artificial Sequence: Synthetic oligonucleotide
acugacacugucacucgca

SEQ ID NO: 2833908 - RNA, 19 nt, Artificial Sequence
  Description of Artificial Sequence: Synthetic oligonucleotide
ccuugcuuccccagggagg

SEQ ID NO: 2833909 - RNA, 19 nt, Artificial Sequence
  Description of Artificial Sequence: Synthetic oligonucleotide
guggcucucaauuucuuau

SEQ ID NO: 2833910 - RNA, 19 nt, Artificial Sequence
  Description of Artificial Sequence: Synthetic oligonucleotide
guauaaucaaagguugcau

SEQ ID NO: 2833911 - RNA, 19 nt, Artificial Sequence
  Description of Artificial Sequence: Synthetic oligonucleotide
cagcuuugguacacacuug

SEQ ID NO: 2833912 - RNA, 19 nt, Artificial Sequence
  Description of Artificial Sequence: Synthetic oligonucleotide
cagcagcuuugguacacac

SEQ ID NO: 2833913 - RNA, 19 nt, Artificial Sequence
  Description of Artificial Sequence: Synthetic oligonucleotide
gauuuucucugucccucua

SEQ ID NO: 2833914 - RNA, 19 nt, Artificial Sequence
  Description of Artificial Sequence: Synthetic oligonucleotide
cacugucacucgcaugcac

SEQ ID NO: 2833915 - RNA, 19 nt, Artificial Sequence
  Description of Artificial Sequence: Synthetic oligonucleotide
gaggacccagcagcuuugg

SEQ ID NO: 2833916 - RNA, 19 nt, Artificial Sequence
  Description of Artificial Sequence: Synthetic oligonucleotide
auagaucaugaagcuguau

SEQ ID NO: 2833917 - RNA, 19 nt, Artificial Sequence
  Description of Artificial Sequence: Synthetic oligonucleotide
gcagcuuugguacacacuu

SEQ ID NO: 2833918 - RNA, 19 nt, Artificial Sequence
  Description of Artificial Sequence: Synthetic oligonucleotide
uccccagggaggacccagc

SEQ ID NO: 2833919 - RNA, 19 nt, Artificial Sequence
  Description of Artificial Sequence: Synthetic oligonucleotide
gcaugucuuguuuucugca

SEQ ID NO: 2833920 - RNA, 19 nt, Artificial Sequence
  Description of Artificial Sequence: Synthetic oligonucleotide
ugccagcaugucuuguuuu

SEQ ID NO: 2833921 - RNA, 19 nt, Artificial Sequence
  Description of Artificial Sequence: Synthetic oligonucleotide
uacacacuugaggcugugu

SEQ ID NO: 2833922 - RNA, 19 nt, Artificial Sequence
  Description of Artificial Sequence: Synthetic oligonucleotide
gucuuguuuucugcagcug

SEQ ID NO: 2833923 - RNA, 19 nt, Artificial Sequence
  Description of Artificial Sequence: Synthetic oligonucleotide
caugaagcuguaugcucaa

SEQ ID NO: 2833924 - RNA, 19 nt, Artificial Sequence
  Description of Artificial Sequence: Synthetic oligonucleotide
cacacagcccuugcuuccc

SEQ ID NO: 2833925 - RNA, 19 nt, Artificial Sequence
  Description of Artificial Sequence: Synthetic oligonucleotide
uaccuaaaagguggauuuu

SEQ ID NO: 2833926 - RNA, 19 nt, Artificial Sequence
  Description of Artificial Sequence: Synthetic oligonucleotide
gcucucaauuucuuauaga

SEQ ID NO: 2833927 - RNA, 19 nt, Artificial Sequence
  Description of Artificial Sequence: Synthetic oligonucleotide
agcagcuuugguacacacu

SEQ ID NO: 2833928 - RNA, 19 nt, Artificial Sequence
  Description of Artificial Sequence: Synthetic oligonucleotide
aggcuguguguguaccuaa

SEQ ID NO: 2833929 - RNA, 19 nt, Artificial Sequence
  Description of Artificial Sequence: Synthetic oligonucleotide
ucccucuauggaguggcuc

SEQ ID NO: 2833930 - RNA, 19 nt, Artificial Sequence
  Description of Artificial Sequence: Synthetic oligonucleotide
cugucacucgcaugcacaa

SEQ ID NO: 2833931 - RNA, 19 nt, Artificial Sequence
  Description of Artificial Sequence: Synthetic oligonucleotide
ugucacucgcaugcacaac

SEQ ID NO: 2833932 - RNA, 19 nt, Artificial Sequence
  Description of Artificial Sequence: Synthetic oligonucleotide
ggacccagcagcuuuggua

SEQ ID NO: 2833933 - RNA, 19 nt, Artificial Sequence
  Description of Artificial Sequence: Synthetic oligonucleotide
acuugaggcugugugugua

SEQ ID NO: 2833934 - RNA, 19 nt, Artificial Sequence
  Description of Artificial Sequence: Synthetic oligonucleotide
gugugugugugagcacaag

SEQ ID NO: 2833935 - RNA, 19 nt, Artificial Sequence
  Description of Artificial Sequence: Synthetic oligonucleotide
gccagcaugucuuguuuuc

SEQ ID NO: 2833936 - RNA, 19 nt, Artificial Sequence
  Description of Artificial Sequence: Synthetic oligonucleotide
cacacuugaggcugugugu

SEQ ID NO: 2833937 - RNA, 19 nt, Artificial Sequence
  Description of Artificial Sequence: Synthetic oligonucleotide
cugucccucuauggagugg

SEQ ID NO: 2833938 - RNA, 19 nt, Artificial Sequence
  Description of Artificial Sequence: Synthetic oligonucleotide
gcuuugguacacacuugag

SEQ ID NO: 2833939 - RNA, 19 nt, Artificial Sequence
  Description of Artificial Sequence: Synthetic oligonucleotide
gguugcaucuguacaagua

SEQ ID NO: 2833940 - RNA, 19 nt, Artificial Sequence
  Description of Artificial Sequence: Synthetic oligonucleotide
aucaaagguugcaucugua

SEQ ID NO: 2833941 - RNA, 19 nt, Artificial Sequence
  Description of Artificial Sequence: Synthetic oligonucleotide
gcagcuggcuucucgaucu

SEQ ID NO: 2833942 - RNA, 19 nt, Artificial Sequence
  Description of Artificial Sequence: Synthetic oligonucleotide
aaggcgugucugccagcau

SEQ ID NO: 2833943 - RNA, 19 nt, Artificial Sequence
  Description of Artificial Sequence: Synthetic oligonucleotide
guggauuuucucugucccu

SEQ ID NO: 2833944 - RNA, 19 nt, Artificial Sequence
  Description of Artificial Sequence: Synthetic oligonucleotide
cucugucccucuauggagu

SEQ ID NO: 2833945 - RNA, 19 nt, Artificial Sequence
  Description of Artificial Sequence: Synthetic oligonucleotide
gaggcuguguguguaccua

SEQ ID NO: 2833946 - RNA, 19 nt, Artificial Sequence
  Description of Artificial Sequence: Synthetic oligonucleotide
aggacccagcagcuuuggu

SEQ ID NO: 2833947 - RNA, 19 nt, Artificial Sequence
  Description of Artificial Sequence: Synthetic oligonucleotide
gcucaaaaguacagaguca

SEQ ID NO: 2833948 - RNA, 19 nt, Artificial Sequence
  Description of Artificial Sequence: Synthetic oligonucleotide
gugugugugagcacaaguu

SEQ ID NO: 2833949 - RNA, 19 nt, Artificial Sequence
  Description of Artificial Sequence: Synthetic oligonucleotide
cacucgcaugcacaacaca

SEQ ID NO: 2833950 - RNA, 19 nt, Artificial Sequence
  Description of Artificial Sequence: Synthetic oligonucleotide
caacacacagcccuugcuu

SEQ ID NO: 2833951 - RNA, 19 nt, Artificial Sequence
  Description of Artificial Sequence: Synthetic oligonucleotide
gugucugccagcaugucuu

SEQ ID NO: 2833952 - RNA, 19 nt, Artificial Sequence
  Description of Artificial Sequence: Synthetic oligonucleotide
guacacacuugaggcugug

SEQ ID NO: 2833953 - RNA, 19 nt, Artificial Sequence
  Description of Artificial Sequence: Synthetic oligonucleotide
ccuaaaagguggauuuucu

SEQ ID NO: 2833954 - RNA, 19 nt, Artificial Sequence
  Description of Artificial Sequence: Synthetic oligonucleotide
cagagucaaugugcaggac

SEQ ID NO: 2833955 - RNA, 19 nt, Artificial Sequence
  Description of Artificial Sequence: Synthetic oligonucleotide
gcuguguguguaccuaaaa

SEQ ID NO: 2833956 - RNA, 19 nt, Artificial Sequence
  Description of Artificial Sequence: Synthetic oligonucleotide
acccagcagcuuugguaca

SEQ ID NO: 2833957 - RNA, 19 nt, Artificial Sequence
  Description of Artificial Sequence: Synthetic oligonucleotide
accucacgugugugugugu

SEQ ID NO: 2833958 - RNA, 19 nt, Artificial Sequence
  Description of Artificial Sequence: Synthetic oligonucleotide
gugugugagcacaaguuuu

SEQ ID NO: 2833959 - RNA, 19 nt, Artificial Sequence
  Description of Artificial Sequence: Synthetic oligonucleotide
cccuugcuuccccagggag

SEQ ID NO: 2833960 - RNA, 19 nt, Artificial Sequence
  Description of Artificial Sequence: Synthetic oligonucleotide
acacugucacucgcaugca

SEQ ID NO: 2833961 - RNA, 19 nt, Artificial Sequence
  Description of Artificial Sequence: Synthetic oligonucleotide
augaagcuguaugcucaaa

SEQ ID NO: 2833962 - RNA, 19 nt, Artificial Sequence
  Description of Artificial Sequence: Synthetic oligonucleotide
cucuauggaguggcucuca

SEQ ID NO: 2833963 - RNA, 19 nt, Artificial Sequence
  Description of Artificial Sequence: Synthetic oligonucleotide
ccucacgugugugugugug

SEQ ID NO: 2833964 - RNA, 19 nt, Artificial Sequence
  Description of Artificial Sequence: Synthetic oligonucleotide
cgcaugcacaacacacagc

SEQ ID NO: 2833965 - RNA, 19 nt, Artificial Sequence
  Description of Artificial Sequence: Synthetic oligonucleotide
gcacaacacacagcccuug

SEQ ID NO: 2833966 - RNA, 19 nt, Artificial Sequence
  Description of Artificial Sequence: Synthetic oligonucleotide
cacagcccuugcuucccca

SEQ ID NO: 2833967 - RNA, 19 nt, Artificial Sequence
  Description of Artificial Sequence: Synthetic oligonucleotide
cuauggaguggcucucaau

SEQ ID NO: 2833968 - RNA, 19 nt, Artificial Sequence
  Description of Artificial Sequence: Synthetic oligonucleotide
cugacacugucacucgcau

SEQ ID NO: 2833969 - RNA, 19 nt, Artificial Sequence
  Description of Artificial Sequence: Synthetic oligonucleotide
cucacgugugugugugugu

SEQ ID NO: 2833970 - RNA, 19 nt, Artificial Sequence
  Description of Artificial Sequence: Synthetic oligonucleotide
cccagggaggacccagcag

SEQ ID NO: 2833971 - RNA, 19 nt, Artificial Sequence
  Description of Artificial Sequence: Synthetic oligonucleotide
cagggaggacccagcagcu

SEQ ID NO: 2833972 - RNA, 19 nt, Artificial Sequence
  Description of Artificial Sequence: Synthetic oligonucleotide
cccucuauggaguggcucu

SEQ ID NO: 2833973 - RNA, 19 nt, Artificial Sequence
  Description of Artificial Sequence: Synthetic oligonucleotide
agcuggcuucucgaucuuu

SEQ ID NO: 2833974 - RNA, 19 nt, Artificial Sequence
  Description of Artificial Sequence: Synthetic oligonucleotide
uugcuuccccagggaggac

SEQ ID NO: 2833975 - RNA, 19 nt, Artificial Sequence
  Description of Artificial Sequence: Synthetic oligonucleotide
cacgugugugugugugugu

SEQ ID NO: 2833976 - RNA, 19 nt, Artificial Sequence
  Description of Artificial Sequence: Synthetic oligonucleotide
cugccagcaugucuuguuu

SEQ ID NO: 2833977 - RNA, 19 nt, Artificial Sequence
  Description of Artificial Sequence: Synthetic oligonucleotide
ggcuguguguguaccuaaa

SEQ ID NO: 2833978 - RNA, 19 nt, Artificial Sequence
  Description of Artificial Sequence: Synthetic oligonucleotide
agggaggacccagcagcuu

SEQ ID NO: 2833979 - RNA, 19 nt, Artificial Sequence
  Description of Artificial Sequence: Synthetic oligonucleotide
guguaccuaaaagguggau

SEQ ID NO: 2833980 - RNA, 19 nt, Artificial Sequence
  Description of Artificial Sequence: Synthetic oligonucleotide
ccucuauggaguggcucuc

SEQ ID NO: 2833981 - RNA, 19 nt, Artificial Sequence
  Description of Artificial Sequence: Synthetic oligonucleotide
ggcgugucugccagcaugu

SEQ ID NO: 2833982 - RNA, 19 nt, Artificial Sequence
  Description of Artificial Sequence: Synthetic oligonucleotide
gaguggcucucaauuucuu

SEQ ID NO: 2833983 - RNA, 19 nt, Artificial Sequence
  Description of Artificial Sequence: Synthetic oligonucleotide
gguacacacuugaggcugu

SEQ ID NO: 2833984 - RNA, 19 nt, Artificial Sequence
  Description of Artificial Sequence: Synthetic oligonucleotide
ggaccucacgugugugugu

SEQ ID NO: 2833985 - RNA, 19 nt, Artificial Sequence
  Description of Artificial Sequence: Synthetic oligonucleotide
gcccuugcuuccccaggga

SEQ ID NO: 2833986 - RNA, 19 nt, Artificial Sequence
  Description of Artificial Sequence: Synthetic oligonucleotide
cugcagcuggcuucucgau

SEQ ID NO: 2833987 - RNA, 19 nt, Artificial Sequence
  Description of Artificial Sequence: Synthetic oligonucleotide
gucugccagcaugucuugu

SEQ ID NO: 2833988 - RNA, 19 nt, Artificial Sequence
  Description of Artificial Sequence: Synthetic oligonucleotide
ccagcagcuuugguacaca

SEQ ID NO: 2833989 - RNA, 19 nt, Artificial Sequence
  Description of Artificial Sequence: Synthetic oligonucleotide
ccagcaugucuuguuuucu

SEQ ID NO: 2833990 - RNA, 19 nt, Artificial Sequence
  Description of Artificial Sequence: Synthetic oligonucleotide
cgugucugccagcaugucu

SEQ ID NO: 2833991 - RNA, 19 nt, Artificial Sequence
  Description of Artificial Sequence: Synthetic oligonucleotide
ccccagggaggacccagca

SEQ ID NO: 2833992 - RNA, 19 nt, Artificial Sequence
  Description of Artificial Sequence: Synthetic oligonucleotide
gucccucuauggaguggcu

SEQ ID NO: 2833993 - RNA, 19 nt, Artificial Sequence
  Description of Artificial Sequence: Synthetic oligonucleotide
gcgugucugccagcauguc

SEQ ID NO: 2833994 - RNA, 19 nt, Artificial Sequence
  Description of Artificial Sequence: Synthetic oligonucleotide
cgugugugugugugugugu

SEQ ID NO: 2833995 - RNA, 19 nt, Artificial Sequence
  Description of Artificial Sequence: Synthetic oligonucleotide
cagcuggcuucucgaucuu

SEQ ID NO: 2833996 - RNA, 19 nt, Artificial Sequence
  Description of Artificial Sequence: Synthetic oligonucleotide
aauucagacaaacugaagc

SEQ ID NO: 2833997 - RNA, 19 nt, Artificial Sequence
  Description of Artificial Sequence: Synthetic oligonucleotide
uauacuuucccauacauga

SEQ ID NO: 2833998 - RNA, 19 nt, Artificial Sequence
  Description of Artificial Sequence: Synthetic oligonucleotide
acuugaaugacuaagcagc

SEQ ID NO: 2833999 - RNA, 19 nt, Artificial Sequence
  Description of Artificial Sequence: Synthetic oligonucleotide
aauccaugcaaguuguugg

SEQ ID NO: 2834000 - RNA, 19 nt, Artificial Sequence
  Description of Artificial Sequence: Synthetic oligonucleotide
auacaugacauacucaaac

SEQ ID NO: 2834001 - RNA, 19 nt, Artificial Sequence
  Description of Artificial Sequence: Synthetic oligonucleotide
ugaaugacuaagcagcagg

SEQ ID NO: 2834002 - RNA, 19 nt, Artificial Sequence
  Description of Artificial Sequence: Synthetic oligonucleotide
acugaauucagacaaacug

SEQ ID NO: 2834003 - RNA, 19 nt, Artificial Sequence
  Description of Artificial Sequence: Synthetic oligonucleotide
acaaacugaagcuguaucc

SEQ ID NO: 2834004 - RNA, 19 nt, Artificial Sequence
  Description of Artificial Sequence: Synthetic oligonucleotide
uucaucagcagauacaccc

SEQ ID NO: 2834005 - RNA, 19 nt, Artificial Sequence
  Description of Artificial Sequence: Synthetic oligonucleotide
caaaguacuagcuaugacc

SEQ ID NO: 2834006 - RNA, 19 nt, Artificial Sequence
  Description of Artificial Sequence: Synthetic oligonucleotide
ugaagcuguauccagagug

SEQ ID NO: 2834007 - RNA, 19 nt, Artificial Sequence
  Description of Artificial Sequence: Synthetic oligonucleotide
guuggcaucacccugaagc

SEQ ID NO: 2834008 - RNA, 19 nt, Artificial Sequence
  Description of Artificial Sequence: Synthetic oligonucleotide
guuguauucaccaucaucc

SEQ ID NO: 2834009 - RNA, 19 nt, Artificial Sequence
  Description of Artificial Sequence: Synthetic oligonucleotide
caagguaccaucuucauac

SEQ ID NO: 2834010 - RNA, 19 nt, Artificial Sequence
  Description of Artificial Sequence: Synthetic oligonucleotide
augagguccaucuugaaag

SEQ ID NO: 2834011 - RNA, 19 nt, Artificial Sequence
  Description of Artificial Sequence: Synthetic oligonucleotide
ucuaagaugagguccaucu

SEQ ID NO: 2834012 - RNA, 19 nt, Artificial Sequence
  Description of Artificial Sequence: Synthetic oligonucleotide
caugacauacucaaacugg

SEQ ID NO: 2834013 - RNA, 19 nt, Artificial Sequence
  Description of Artificial Sequence: Synthetic oligonucleotide
cuucauacaaaguacuagc

SEQ ID NO: 2834014 - RNA, 19 nt, Artificial Sequence
  Description of Artificial Sequence: Synthetic oligonucleotide
gacauacucaaacuggucc

SEQ ID NO: 2834015 - RNA, 19 nt, Artificial Sequence
  Description of Artificial Sequence: Synthetic oligonucleotide
aaucugaauguucacgucu

SEQ ID NO: 2834016 - RNA, 19 nt, Artificial Sequence
  Description of Artificial Sequence: Synthetic oligonucleotide
uaaaucugaauguucacgu

SEQ ID NO: 2834017 - RNA, 19 nt, Artificial Sequence
  Description of Artificial Sequence: Synthetic oligonucleotide
ugaauguucacgucuaaga

SEQ ID NO: 2834018 - RNA, 19 nt, Artificial Sequence
  Description of Artificial Sequence: Synthetic oligonucleotide
uuuuccacugaauucagac

SEQ ID NO: 2834019 - RNA, 19 nt, Artificial Sequence
  Description of Artificial Sequence: Synthetic oligonucleotide
aaaguacuagcuaugacca

SEQ ID NO: 2834020 - RNA, 19 nt, Artificial Sequence
  Description of Artificial Sequence: Synthetic oligonucleotide
ucccacgagguucagaagg

SEQ ID NO: 2834021 - RNA, 19 nt, Artificial Sequence
  Description of Artificial Sequence: Synthetic oligonucleotide
uucaccaucauccaaggua

SEQ ID NO: 2834022 - RNA, 19 nt, Artificial Sequence
  Description of Artificial Sequence: Synthetic oligonucleotide
uucacgucuaagaugaggu

SEQ ID NO: 2834023 - RNA, 19 nt, Artificial Sequence
  Description of Artificial Sequence: Synthetic oligonucleotide
aaaucugaauguucacguc

SEQ ID NO: 2834024 - RNA, 19 nt, Artificial Sequence
  Description of Artificial Sequence: Synthetic oligonucleotide
uggaauccaccucaaaucc

SEQ ID NO: 2834025 - RNA, 19 nt, Artificial Sequence
  Description of Artificial Sequence: Synthetic oligonucleotide
aaguccacuggguaaaucu

SEQ ID NO: 2834026 - RNA, 19 nt, Artificial Sequence
  Description of Artificial Sequence: Synthetic oligonucleotide
uucgguugaggucucaucc

SEQ ID NO: 2834027 - RNA, 19 nt, Artificial Sequence
  Description of Artificial Sequence: Synthetic oligonucleotide
aaugacuaagcagcagggc

SEQ ID NO: 2834028 - RNA, 19 nt, Artificial Sequence
  Description of Artificial Sequence: Synthetic oligonucleotide
cuagcuaugaccaaucgga

SEQ ID NO: 2834029 - RNA, 19 nt, Artificial Sequence
  Description of Artificial Sequence: Synthetic oligonucleotide
acauacucaaacugguccg

SEQ ID NO: 2834030 - RNA, 19 nt, Artificial Sequence
  Description of Artificial Sequence: Synthetic oligonucleotide
ucuucauacaaaguacuag

SEQ ID NO: 2834031 - RNA, 19 nt, Artificial Sequence
  Description of Artificial Sequence: Synthetic oligonucleotide
gacuugaaugacuaagcag

SEQ ID NO: 2834032 - RNA, 19 nt, Artificial Sequence
  Description of Artificial Sequence: Synthetic oligonucleotide
uuccacugaauucagacaa

SEQ ID NO: 2834033 - RNA, 19 nt, Artificial Sequence
  Description of Artificial Sequence: Synthetic oligonucleotide
aauccuguauacuuuccca

SEQ ID NO: 2834034 - RNA, 19 nt, Artificial Sequence
  Description of Artificial Sequence: Synthetic oligonucleotide
guaaaucugaauguucacg

SEQ ID NO: 2834035 - RNA, 19 nt, Artificial Sequence
  Description of Artificial Sequence: Synthetic oligonucleotide
ugaauucagacaaacugaa

SEQ ID NO: 2834036 - RNA, 19 nt, Artificial Sequence
  Description of Artificial Sequence: Synthetic oligonucleotide
accaaucggaacuugucac

SEQ ID NO: 2834037 - RNA, 19 nt, Artificial Sequence
  Description of Artificial Sequence: Synthetic oligonucleotide
auucagacaaacugaagcu

SEQ ID NO: 2834038 - RNA, 19 nt, Artificial Sequence
  Description of Artificial Sequence: Synthetic oligonucleotide
aaacugaagcuguauccag

SEQ ID NO: 2834039 - RNA, 19 nt, Artificial Sequence
  Description of Artificial Sequence: Synthetic oligonucleotide
aacugguccgcccuggaag

SEQ ID NO: 2834040 - RNA, 19 nt, Artificial Sequence
  Description of Artificial Sequence: Synthetic oligonucleotide
ucagguucgaacagugucc

SEQ ID NO: 2834041 - RNA, 19 nt, Artificial Sequence
  Description of Artificial Sequence: Synthetic oligonucleotide
acuagcuaugaccaaucgg

SEQ ID NO: 2834042 - RNA, 19 nt, Artificial Sequence
  Description of Artificial Sequence: Synthetic oligonucleotide
gacacauaggcagagagac

SEQ ID NO: 2834043 - RNA, 19 nt, Artificial Sequence
  Description of Artificial Sequence: Synthetic oligonucleotide
ucaaauccaugcaaguugu

SEQ ID NO: 2834044 - RNA, 19 nt, Artificial Sequence
  Description of Artificial Sequence: Synthetic oligonucleotide
cucaaauccaugcaaguug

SEQ ID NO: 2834045 - RNA, 19 nt, Artificial Sequence
  Description of Artificial Sequence: Synthetic oligonucleotide
aaggccaguuucuucauca

SEQ ID NO: 2834046 - RNA, 19 nt, Artificial Sequence
  Description of Artificial Sequence: Synthetic oligonucleotide
aaauccaugcaaguuguug

SEQ ID NO: 2834047 - RNA, 19 nt, Artificial Sequence
  Description of Artificial Sequence: Synthetic oligonucleotide
uucauacaaaguacuagcu

SEQ ID NO: 2834048 - RNA, 19 nt, Artificial Sequence
  Description of Artificial Sequence: Synthetic oligonucleotide
uuucccauacaugacauac

SEQ ID NO: 2834049 - RNA, 19 nt, Artificial Sequence
  Description of Artificial Sequence: Synthetic oligonucleotide
augacuugaaugacuaagc

SEQ ID NO: 2834050 - RNA, 19 nt, Artificial Sequence
  Description of Artificial Sequence: Synthetic oligonucleotide
aacgccagcuucuacucag

SEQ ID NO: 2834051 - RNA, 19 nt, Artificial Sequence
  Description of Artificial Sequence: Synthetic oligonucleotide
uucuacucagguucgaaca

SEQ ID NO: 2834052 - RNA, 19 nt, Artificial Sequence
  Description of Artificial Sequence: Synthetic oligonucleotide
accaucuucauacaaagua

SEQ ID NO: 2834053 - RNA, 19 nt, Artificial Sequence
  Description of Artificial Sequence: Synthetic oligonucleotide
guaccaucuucauacaaag

SEQ ID NO: 2834054 - RNA, 19 nt, Artificial Sequence
  Description of Artificial Sequence: Synthetic oligonucleotide
aagccucaugagcaggccc

SEQ ID NO: 2834055 - RNA, 19 nt, Artificial Sequence
  Description of Artificial Sequence: Synthetic oligonucleotide
uguauacuuucccauacau

SEQ ID NO: 2834056 - RNA, 19 nt, Artificial Sequence
  Description of Artificial Sequence: Synthetic oligonucleotide
ucuucaucagcagauacac

SEQ ID NO: 2834057 - RNA, 19 nt, Artificial Sequence
  Description of Artificial Sequence: Synthetic oligonucleotide
uauucaccaucauccaagg

SEQ ID NO: 2834058 - RNA, 19 nt, Artificial Sequence
  Description of Artificial Sequence: Synthetic oligonucleotide
ucuacucagguucgaacag

SEQ ID NO: 2834059 - RNA, 19 nt, Artificial Sequence
  Description of Artificial Sequence: Synthetic oligonucleotide
acaaaguacuagcuaugac

SEQ ID NO: 2834060 - RNA, 19 nt, Artificial Sequence
  Description of Artificial Sequence: Synthetic oligonucleotide
cacuggguaaaucugaaug

SEQ ID NO: 2834061 - RNA, 19 nt, Artificial Sequence
  Description of Artificial Sequence: Synthetic oligonucleotide
ugacuugaaugacuaagca

SEQ ID NO: 2834062 - RNA, 19 nt, Artificial Sequence
  Description of Artificial Sequence: Synthetic oligonucleotide
caugacuugaaugacuaag

SEQ ID NO: 2834063 - RNA, 19 nt, Artificial Sequence
  Description of Artificial Sequence: Synthetic oligonucleotide
uacuuucccauacaugaca

SEQ ID NO: 2834064 - RNA, 19 nt, Artificial Sequence
  Description of Artificial Sequence: Synthetic oligonucleotide
ugugggguuguauucacca

SEQ ID NO: 2834065 - RNA, 19 nt, Artificial Sequence
  Description of Artificial Sequence: Synthetic oligonucleotide
auccaugcaaguuguuggc

SEQ ID NO: 2834066 - RNA, 19 nt, Artificial Sequence
  Description of Artificial Sequence: Synthetic oligonucleotide
aggacacauaggcagagag

SEQ ID NO: 2834067 - RNA, 19 nt, Artificial Sequence
  Description of Artificial Sequence: Synthetic oligonucleotide
uuucccacgagguucagaa

SEQ ID NO: 2834068 - RNA, 19 nt, Artificial Sequence
  Description of Artificial Sequence: Synthetic oligonucleotide
augacuaagcagcagggcu

SEQ ID NO: 2834069 - RNA, 19 nt, Artificial Sequence
  Description of Artificial Sequence: Synthetic oligonucleotide
acugaagcuguauccagag

SEQ ID NO: 2834070 - RNA, 19 nt, Artificial Sequence
  Description of Artificial Sequence: Synthetic oligonucleotide
uacaugacauacucaaacu

SEQ ID NO: 2834071 - RNA, 19 nt, Artificial Sequence
  Description of Artificial Sequence: Synthetic oligonucleotide
uuucuucaucagcagauac

SEQ ID NO: 2834072 - RNA, 19 nt, Artificial Sequence
  Description of Artificial Sequence: Synthetic oligonucleotide
gaaugacuaagcagcaggg

SEQ ID NO: 2834073 - RNA, 19 nt, Artificial Sequence
  Description of Artificial Sequence: Synthetic oligonucleotide
uaggcagagagacgugucg

SEQ ID NO: 2834074 - RNA, 19 nt, Artificial Sequence
  Description of Artificial Sequence: Synthetic oligonucleotide
agcagauacacccuggaau

SEQ ID NO: 2834075 - RNA, 19 nt, Artificial Sequence
  Description of Artificial Sequence: Synthetic oligonucleotide
guauucaccaucauccaag

SEQ ID NO: 2834076 - RNA, 19 nt, Artificial Sequence
  Description of Artificial Sequence: Synthetic oligonucleotide
aaggccugucaucuguggg

SEQ ID NO: 2834077 - RNA, 19 nt, Artificial Sequence
  Description of Artificial Sequence: Synthetic oligonucleotide
ugacuaagcagcagggcug

SEQ ID NO: 2834078 - RNA, 19 nt, Artificial Sequence
  Description of Artificial Sequence: Synthetic oligonucleotide
agcuaugaccaaucggaac

SEQ ID NO: 2834079 - RNA, 19 nt, Artificial Sequence
  Description of Artificial Sequence: Synthetic oligonucleotide
aguguccaugacuugaaug

SEQ ID NO: 2834080 - RNA, 19 nt, Artificial Sequence
  Description of Artificial Sequence: Synthetic oligonucleotide
ucauacaaaguacuagcua

SEQ ID NO: 2834081 - RNA, 19 nt, Artificial Sequence
  Description of Artificial Sequence: Synthetic oligonucleotide
acccugaagccucaugagc

SEQ ID NO: 2834082 - RNA, 19 nt, Artificial Sequence
  Description of Artificial Sequence: Synthetic oligonucleotide
uacuagcuaugaccaaucg

SEQ ID NO: 2834083 - RNA, 19 nt, Artificial Sequence
  Description of Artificial Sequence: Synthetic oligonucleotide
ucccauacaugacauacuc

SEQ ID NO: 2834084 - RNA, 19 nt, Artificial Sequence
  Description of Artificial Sequence: Synthetic oligonucleotide
gaagcuguauccagagugg

SEQ ID NO: 2834085 - RNA, 19 nt, Artificial Sequence
  Description of Artificial Sequence: Synthetic oligonucleotide
ucgaacaguguccaugacu

SEQ ID NO: 2834086 - RNA, 19 nt, Artificial Sequence
  Description of Artificial Sequence: Synthetic oligonucleotide
cuggaauccaccucaaauc

SEQ ID NO: 2834087 - RNA, 19 nt, Artificial Sequence
  Description of Artificial Sequence: Synthetic oligonucleotide
auguucacgucuaagauga

SEQ ID NO: 2834088 - RNA, 19 nt, Artificial Sequence
  Description of Artificial Sequence: Synthetic oligonucleotide
cugaauucagacaaacuga

SEQ ID NO: 2834089 - RNA, 19 nt, Artificial Sequence
  Description of Artificial Sequence: Synthetic oligonucleotide
aacaguguccaugacuuga

SEQ ID NO: 2834090 - RNA, 19 nt, Artificial Sequence
  Description of Artificial Sequence: Synthetic oligonucleotide
guguccaugacuugaauga

SEQ ID NO: 2834091 - RNA, 19 nt, Artificial Sequence
  Description of Artificial Sequence: Synthetic oligonucleotide
cuuucacaggucagcaacg

SEQ ID NO: 2834092 - RNA, 19 nt, Artificial Sequence
  Description of Artificial Sequence: Synthetic oligonucleotide
uuuccacugaauucagaca

SEQ ID NO: 2834093 - RNA, 19 nt, Artificial Sequence
  Description of Artificial Sequence: Synthetic oligonucleotide
uccaugacuugaaugacua

SEQ ID NO: 2834094 - RNA, 19 nt, Artificial Sequence
  Description of Artificial Sequence: Synthetic oligonucleotide
auccagaguggacacagag

SEQ ID NO: 2834095 - RNA, 19 nt, Artificial Sequence
  Description of Artificial Sequence: Synthetic oligonucleotide
uccaucuugaaagauucac

SEQ ID NO: 2834096 - RNA, 19 nt, Artificial Sequence
  Description of Artificial Sequence: Synthetic oligonucleotide
ugaagccucaugagcaggc

SEQ ID NO: 2834097 - RNA, 19 nt, Artificial Sequence
  Description of Artificial Sequence: Synthetic oligonucleotide
aaguuguuggcaucacccu

SEQ ID NO: 2834098 - RNA, 19 nt, Artificial Sequence
  Description of Artificial Sequence: Synthetic oligonucleotide
uguauucaccaucauccaa

SEQ ID NO: 2834099 - RNA, 19 nt, Artificial Sequence
  Description of Artificial Sequence: Synthetic oligonucleotide
gacaaacugaagcuguauc

SEQ ID NO: 2834100 - RNA, 19 nt, Artificial Sequence
  Description of Artificial Sequence: Synthetic oligonucleotide
uacucagguucgaacagug

SEQ ID NO: 2834101 - RNA, 19 nt, Artificial Sequence
  Description of Artificial Sequence: Synthetic oligonucleotide
agaguggacacagagccag

SEQ ID NO: 2834102 - RNA, 19 nt, Artificial Sequence
  Description of Artificial Sequence: Synthetic oligonucleotide
ccagaguggacacagagcc

SEQ ID NO: 2834103 - RNA, 19 nt, Artificial Sequence
  Description of Artificial Sequence: Synthetic oligonucleotide
ucaauccuguauacuuucc

SEQ ID NO: 2834104 - RNA, 19 nt, Artificial Sequence
  Description of Artificial Sequence: Synthetic oligonucleotide
uccagaguggacacagagc

SEQ ID NO: 2834105 - RNA, 19 nt, Artificial Sequence
  Description of Artificial Sequence: Synthetic oligonucleotide
uuggcaucacccugaagcc

SEQ ID NO: 2834106 - RNA, 19 nt, Artificial Sequence
  Description of Artificial Sequence: Synthetic oligonucleotide
cacgucuaagaugaggucc

SEQ ID NO: 2834107 - RNA, 19 nt, Artificial Sequence
  Description of Artificial Sequence: Synthetic oligonucleotide
caauccuguauacuuuccc

SEQ ID NO: 2834108 - RNA, 19 nt, Artificial Sequence
  Description of Artificial Sequence: Synthetic oligonucleotide
uccaccucaaauccaugca

SEQ ID NO: 2834109 - RNA, 19 nt, Artificial Sequence
  Description of Artificial Sequence: Synthetic oligonucleotide
cucagguucgaacaguguc

SEQ ID NO: 2834110 - RNA, 19 nt, Artificial Sequence
  Description of Artificial Sequence: Synthetic oligonucleotide
aguuguuggcaucacccug

SEQ ID NO: 2834111 - RNA, 19 nt, Artificial Sequence
  Description of Artificial Sequence: Synthetic oligonucleotide
agcaacgccagcuucuacu

SEQ ID NO: 2834112 - RNA, 19 nt, Artificial Sequence
  Description of Artificial Sequence: Synthetic oligonucleotide
uggguaaaucugaauguuc

SEQ ID NO: 2834113 - RNA, 19 nt, Artificial Sequence
  Description of Artificial Sequence: Synthetic oligonucleotide
ucagcagauacacccugga

SEQ ID NO: 2834114 - RNA, 19 nt, Artificial Sequence
  Description of Artificial Sequence: Synthetic oligonucleotide
guauccagaguggacacag

SEQ ID NO: 2834115 - RNA, 19 nt, Artificial Sequence
  Description of Artificial Sequence: Synthetic oligonucleotide
aacuugucacccaagucca

SEQ ID NO: 2834116 - RNA, 19 nt, Artificial Sequence
  Description of Artificial Sequence: Synthetic oligonucleotide
cauacaaaguacuagcuau

SEQ ID NO: 2834117 - RNA, 19 nt, Artificial Sequence
  Description of Artificial Sequence: Synthetic oligonucleotide
acugguccgcccuggaagg

SEQ ID NO: 2834118 - RNA, 19 nt, Artificial Sequence
  Description of Artificial Sequence: Synthetic oligonucleotide
gaaggccugucaucugugg

SEQ ID NO: 2834119 - RNA, 19 nt, Artificial Sequence
  Description of Artificial Sequence: Synthetic oligonucleotide
guucacgucuaagaugagg

SEQ ID NO: 2834120 - RNA, 19 nt, Artificial Sequence
  Description of Artificial Sequence: Synthetic oligonucleotide
ucaucugugggguuguauu

SEQ ID NO: 2834121 - RNA, 19 nt, Artificial Sequence
  Description of Artificial Sequence: Synthetic oligonucleotide
cuucuacucagguucgaac

SEQ ID NO: 2834122 - RNA, 19 nt, Artificial Sequence
  Description of Artificial Sequence: Synthetic oligonucleotide
caccucaaauccaugcaag

SEQ ID NO: 2834123 - RNA, 19 nt, Artificial Sequence
  Description of Artificial Sequence: Synthetic oligonucleotide
uaagcagcagggcugguuu

SEQ ID NO: 2834124 - RNA, 19 nt, Artificial Sequence
  Description of Artificial Sequence: Synthetic oligonucleotide
uggaaggccugucaucugu

SEQ ID NO: 2834125 - RNA, 19 nt, Artificial Sequence
  Description of Artificial Sequence: Synthetic oligonucleotide
ugaccaaucggaacuuguc

SEQ ID NO: 2834126 - RNA, 19 nt, Artificial Sequence
  Description of Artificial Sequence: Synthetic oligonucleotide
cucaauccuguauacuuuc

SEQ ID NO: 2834127 - RNA, 19 nt, Artificial Sequence
  Description of Artificial Sequence: Synthetic oligonucleotide
gaccaaucggaacuuguca

SEQ ID NO: 2834128 - RNA, 19 nt, Artificial Sequence
  Description of Artificial Sequence: Synthetic oligonucleotide
gaugagguccaucuugaaa

SEQ ID NO: 2834129 - RNA, 19 nt, Artificial Sequence
  Description of Artificial Sequence: Synthetic oligonucleotide
uucacaggucagcaacgcc

SEQ ID NO: 2834130 - RNA, 19 nt, Artificial Sequence
  Description of Artificial Sequence: Synthetic oligonucleotide
gaauucagacaaacugaag

SEQ ID NO: 2834131 - RNA, 19 nt, Artificial Sequence
  Description of Artificial Sequence: Synthetic oligonucleotide
auacucaaacugguccgcc

SEQ ID NO: 2834132 - RNA, 19 nt, Artificial Sequence
  Description of Artificial Sequence: Synthetic oligonucleotide
agagacgugucgccgcuuc

SEQ ID NO: 2834133 - RNA, 19 nt, Artificial Sequence
  Description of Artificial Sequence: Synthetic oligonucleotide
uugaaugacuaagcagcag

SEQ ID NO: 2834134 - RNA, 19 nt, Artificial Sequence
  Description of Artificial Sequence: Synthetic oligonucleotide
ccccauaggacacauaggc

SEQ ID NO: 2834135 - RNA, 19 nt, Artificial Sequence
  Description of Artificial Sequence: Synthetic oligonucleotide
aguuucuucaucagcagau

SEQ ID NO: 2834136 - RNA, 19 nt, Artificial Sequence
  Description of Artificial Sequence: Synthetic oligonucleotide
uugucacccaaguccacug

SEQ ID NO: 2834137 - RNA, 19 nt, Artificial Sequence
  Description of Artificial Sequence: Synthetic oligonucleotide
gacuaagcagcagggcugg

SEQ ID NO: 2834138 - RNA, 19 nt, Artificial Sequence
  Description of Artificial Sequence: Synthetic oligonucleotide
uacucaaacugguccgccc

SEQ ID NO: 2834139 - RNA, 19 nt, Artificial Sequence
  Description of Artificial Sequence: Synthetic oligonucleotide
aguacuagcuaugaccaau

SEQ ID NO: 2834140 - RNA, 19 nt, Artificial Sequence
  Description of Artificial Sequence: Synthetic oligonucleotide
caaucggaacuugucaccc

SEQ ID NO: 2834141 - RNA, 19 nt, Artificial Sequence
  Description of Artificial Sequence: Synthetic oligonucleotide
ugacauacucaaacugguc

SEQ ID NO: 2834142 - RNA, 19 nt, Artificial Sequence
  Description of Artificial Sequence: Synthetic oligonucleotide
agccucaugagcaggcccc

SEQ ID NO: 2834143 - RNA, 19 nt, Artificial Sequence
  Description of Artificial Sequence: Synthetic oligonucleotide
aaucggaacuugucaccca

SEQ ID NO: 2834144 - RNA, 19 nt, Artificial Sequence
  Description of Artificial Sequence: Synthetic oligonucleotide
guucgaacaguguccauga

SEQ ID NO: 2834145 - RNA, 19 nt, Artificial Sequence
  Description of Artificial Sequence: Synthetic oligonucleotide
agagccaguuccuuucaca

SEQ ID NO: 2834146 - RNA, 19 nt, Artificial Sequence
  Description of Artificial Sequence: Synthetic oligonucleotide
ugagguccaucuugaaaga

SEQ ID NO: 2834147 - RNA, 19 nt, Artificial Sequence
  Description of Artificial Sequence: Synthetic oligonucleotide
gucacccaaguccacuggg

SEQ ID NO: 2834148 - RNA, 19 nt, Artificial Sequence
  Description of Artificial Sequence: Synthetic oligonucleotide
uuucacaggucagcaacgc

SEQ ID NO: 2834149 - RNA, 19 nt, Artificial Sequence
  Description of Artificial Sequence: Synthetic oligonucleotide
aggcagagagacgugucgc

SEQ ID NO: 2834150 - RNA, 19 nt, Artificial Sequence
  Description of Artificial Sequence: Synthetic oligonucleotide
uacacccuggaauccaccu

SEQ ID NO: 2834151 - RNA, 19 nt, Artificial Sequence
  Description of Artificial Sequence: Synthetic oligonucleotide
uucccauacaugacauacu

SEQ ID NO: 2834152 - RNA, 19 nt, Artificial Sequence
  Description of Artificial Sequence: Synthetic oligonucleotide
ucaaacugguccgcccugg

SEQ ID NO: 2834153 - RNA, 19 nt, Artificial Sequence
  Description of Artificial Sequence: Synthetic oligonucleotide
auacuuucccauacaugac

SEQ ID NO: 2834154 - RNA, 19 nt, Artificial Sequence
  Description of Artificial Sequence: Synthetic oligonucleotide
ucgguugaggucucauccc

SEQ ID NO: 2834155 - RNA, 19 nt, Artificial Sequence
  Description of Artificial Sequence: Synthetic oligonucleotide
cauccaagguaccaucuuc

SEQ ID NO: 2834156 - RNA, 19 nt, Artificial Sequence
  Description of Artificial Sequence: Synthetic oligonucleotide
ccaucuucauacaaaguac

SEQ ID NO: 2834157 - RNA, 19 nt, Artificial Sequence
  Description of Artificial Sequence: Synthetic oligonucleotide
acucaaacugguccgcccu

SEQ ID NO: 2834158 - RNA, 19 nt, Artificial Sequence
  Description of Artificial Sequence: Synthetic oligonucleotide
cuugaaugacuaagcagca

SEQ ID NO: 2834159 - RNA, 19 nt, Artificial Sequence
  Description of Artificial Sequence: Synthetic oligonucleotide
gguucagaaggccaguuuc

SEQ ID NO: 2834160 - RNA, 19 nt, Artificial Sequence
  Description of Artificial Sequence: Synthetic oligonucleotide
aagcagcagggcugguuuc

SEQ ID NO: 2834161 - RNA, 19 nt, Artificial Sequence
  Description of Artificial Sequence: Synthetic oligonucleotide
accucaaauccaugcaagu

SEQ ID NO: 2834162 - RNA, 19 nt, Artificial Sequence
  Description of Artificial Sequence: Synthetic oligonucleotide
augacauacucaaacuggu

SEQ ID NO: 2834163 - RNA, 19 nt, Artificial Sequence
  Description of Artificial Sequence: Synthetic oligonucleotide
agccaguuccuuucacagg

SEQ ID NO: 2834164 - RNA, 19 nt, Artificial Sequence
  Description of Artificial Sequence: Synthetic oligonucleotide
uccacuggguaaaucugaa

SEQ ID NO: 2834165 - RNA, 19 nt, Artificial Sequence
  Description of Artificial Sequence: Synthetic oligonucleotide
aacugaagcuguauccaga

SEQ ID NO: 2834166 - RNA, 19 nt, Artificial Sequence
  Description of Artificial Sequence: Synthetic oligonucleotide
ugguuucccacgagguuca

SEQ ID NO: 2834167 - RNA, 19 nt, Artificial Sequence
  Description of Artificial Sequence: Synthetic oligonucleotide
auaggacacauaggcagag

SEQ ID NO: 2834168 - RNA, 19 nt, Artificial Sequence
  Description of Artificial Sequence: Synthetic oligonucleotide
aagguaccaucuucauaca

SEQ ID NO: 2834169 - RNA, 19 nt, Artificial Sequence
  Description of Artificial Sequence: Synthetic oligonucleotide
auacaaaguacuagcuaug

SEQ ID NO: 2834170 - RNA, 19 nt, Artificial Sequence
  Description of Artificial Sequence: Synthetic oligonucleotide
cacagagccaguuccuuuc

SEQ ID NO: 2834171 - RNA, 19 nt, Artificial Sequence
  Description of Artificial Sequence: Synthetic oligonucleotide
uaccaucuucauacaaagu

SEQ ID NO: 2834172 - RNA, 19 nt, Artificial Sequence
  Description of Artificial Sequence: Synthetic oligonucleotide
gguuguauucaccaucauc

SEQ ID NO: 2834173 - RNA, 19 nt, Artificial Sequence
  Description of Artificial Sequence: Synthetic oligonucleotide
caucauccaagguaccauc

SEQ ID NO: 2834174 - RNA, 19 nt, Artificial Sequence
  Description of Artificial Sequence: Synthetic oligonucleotide
cugaauguucacgucuaag

SEQ ID NO: 2834175 - RNA, 19 nt, Artificial Sequence
  Description of Artificial Sequence: Synthetic oligonucleotide
auccuguauacuuucccau

SEQ ID NO: 2834176 - RNA, 19 nt, Artificial Sequence
  Description of Artificial Sequence: Synthetic oligonucleotide
ucagaaggccaguuucuuc

SEQ ID NO: 2834177 - RNA, 19 nt, Artificial Sequence
  Description of Artificial Sequence: Synthetic oligonucleotide
gcagauacacccuggaauc

SEQ ID NO: 2834178 - RNA, 19 nt, Artificial Sequence
  Description of Artificial Sequence: Synthetic oligonucleotide
guuccuuucacaggucagc

SEQ ID NO: 2834179 - RNA, 19 nt, Artificial Sequence
  Description of Artificial Sequence: Synthetic oligonucleotide
cacaggucagcaacgccag

SEQ ID NO: 2834180 - RNA, 19 nt, Artificial Sequence
  Description of Artificial Sequence: Synthetic oligonucleotide
agcagcagggcugguuucc

SEQ ID NO: 2834181 - RNA, 19 nt, Artificial Sequence
  Description of Artificial Sequence: Synthetic oligonucleotide
acacccuggaauccaccuc

SEQ ID NO: 2834182 - RNA, 19 nt, Artificial Sequence
  Description of Artificial Sequence: Synthetic oligonucleotide
cauacucaaacugguccgc

SEQ ID NO: 2834183 - RNA, 19 nt, Artificial Sequence
  Description of Artificial Sequence: Synthetic oligonucleotide
ucacccaaguccacugggu

SEQ ID NO: 2834184 - RNA, 19 nt, Artificial Sequence
  Description of Artificial Sequence: Synthetic oligonucleotide
uuccuuucacaggucagca

SEQ ID NO: 2834185 - RNA, 19 nt, Artificial Sequence
  Description of Artificial Sequence: Synthetic oligonucleotide
ucugugggguuguauucac

SEQ ID NO: 2834186 - RNA, 19 nt, Artificial Sequence
  Description of Artificial Sequence: Synthetic oligonucleotide
ucugaauguucacgucuaa

SEQ ID NO: 2834187 - RNA, 19 nt, Artificial Sequence
  Description of Artificial Sequence: Synthetic oligonucleotide
caucugugggguuguauuc

SEQ ID NO: 2834188 - RNA, 19 nt, Artificial Sequence
  Description of Artificial Sequence: Synthetic oligonucleotide
cuguauccagaguggacac

SEQ ID NO: 2834189 - RNA, 19 nt, Artificial Sequence
  Description of Artificial Sequence: Synthetic oligonucleotide
cugguuucccacgagguuc

SEQ ID NO: 2834190 - RNA, 19 nt, Artificial Sequence
  Description of Artificial Sequence: Synthetic oligonucleotide
uagcuaugaccaaucggaa

SEQ ID NO: 2834191 - RNA, 19 nt, Artificial Sequence
  Description of Artificial Sequence: Synthetic oligonucleotide
caaacugaagcuguaucca

SEQ ID NO: 2834192 - RNA, 19 nt, Artificial Sequence
  Description of Artificial Sequence: Synthetic oligonucleotide
ucggaacuugucacccaag

SEQ ID NO: 2834193 - RNA, 19 nt, Artificial Sequence
  Description of Artificial Sequence: Synthetic oligonucleotide
caugcaaguuguuggcauc

SEQ ID NO: 2834194 - RNA, 19 nt, Artificial Sequence
  Description of Artificial Sequence: Synthetic oligonucleotide
ccuuucacaggucagcaac

SEQ ID NO: 2834195 - RNA, 19 nt, Artificial Sequence
  Description of Artificial Sequence: Synthetic oligonucleotide
gguaaaucugaauguucac

SEQ ID NO: 2834196 - RNA, 19 nt, Artificial Sequence
  Description of Artificial Sequence: Synthetic oligonucleotide
caucagcagauacacccug

SEQ ID NO: 2834197 - RNA, 19 nt, Artificial Sequence
  Description of Artificial Sequence: Synthetic oligonucleotide
uguccaugacuugaaugac

SEQ ID NO: 2834198 - RNA, 19 nt, Artificial Sequence
  Description of Artificial Sequence: Synthetic oligonucleotide
gcuaugaccaaucggaacu

SEQ ID NO: 2834199 - RNA, 19 nt, Artificial Sequence
  Description of Artificial Sequence: Synthetic oligonucleotide
cagagagacgugucgccgc

SEQ ID NO: 2834200 - RNA, 19 nt, Artificial Sequence
  Description of Artificial Sequence: Synthetic oligonucleotide
aaguacuagcuaugaccaa

SEQ ID NO: 2834201 - RNA, 19 nt, Artificial Sequence
  Description of Artificial Sequence: Synthetic oligonucleotide
ucauccaagguaccaucuu

SEQ ID NO: 2834202 - RNA, 19 nt, Artificial Sequence
  Description of Artificial Sequence: Synthetic oligonucleotide
uaugaccaaucggaacuug

SEQ ID NO: 2834203 - RNA, 19 nt, Artificial Sequence
  Description of Artificial Sequence: Synthetic oligonucleotide
cauaggacacauaggcaga

SEQ ID NO: 2834204 - RNA, 19 nt, Artificial Sequence
  Description of Artificial Sequence: Synthetic oligonucleotide
uccacugaauucagacaaa

SEQ ID NO: 2834205 - RNA, 19 nt, Artificial Sequence
  Description of Artificial Sequence: Synthetic oligonucleotide
auaggcagagagacguguc

SEQ ID NO: 2834206 - RNA, 19 nt, Artificial Sequence
  Description of Artificial Sequence: Synthetic oligonucleotide
gguucgaacaguguccaug

SEQ ID NO: 2834207 - RNA, 19 nt, Artificial Sequence
  Description of Artificial Sequence: Synthetic oligonucleotide
aagcuguauccagagugga

SEQ ID NO: 2834208 - RNA, 19 nt, Artificial Sequence
  Description of Artificial Sequence: Synthetic oligonucleotide
aaacugguccgcccuggaa

SEQ ID NO: 2834209 - RNA, 19 nt, Artificial Sequence
  Description of Artificial Sequence: Synthetic oligonucleotide
aucggaacuugucacccaa

SEQ ID NO: 2834210 - RNA, 19 nt, Artificial Sequence
  Description of Artificial Sequence: Synthetic oligonucleotide
aucagcagauacacccugg

SEQ ID NO: 2834211 - RNA, 19 nt, Artificial Sequence
  Description of Artificial Sequence: Synthetic oligonucleotide
agcuguauccagaguggac

SEQ ID NO: 2834212 - RNA, 19 nt, Artificial Sequence
  Description of Artificial Sequence: Synthetic oligonucleotide
cagcuucuacucagguucg

SEQ ID NO: 2834213 - RNA, 19 nt, Artificial Sequence
  Description of Artificial Sequence: Synthetic oligonucleotide
ucacgucuaagaugagguc

SEQ ID NO: 2834214 - RNA, 19 nt, Artificial Sequence
  Description of Artificial Sequence: Synthetic oligonucleotide
ggguaaaucugaauguuca

SEQ ID NO: 2834215 - RNA, 19 nt, Artificial Sequence
  Description of Artificial Sequence: Synthetic oligonucleotide
acaggucagcaacgccagc

SEQ ID NO: 2834216 - RNA, 19 nt, Artificial Sequence
  Description of Artificial Sequence: Synthetic oligonucleotide
caucuucauacaaaguacu

SEQ ID NO: 2834217 - RNA, 19 nt, Artificial Sequence
  Description of Artificial Sequence: Synthetic oligonucleotide
gguccaucuugaaagauuc

SEQ ID NO: 2834218 - RNA, 19 nt, Artificial Sequence
  Description of Artificial Sequence: Synthetic oligonucleotide
acgagguucagaaggccag

SEQ ID NO: 2834219 - RNA, 19 nt, Artificial Sequence
  Description of Artificial Sequence: Synthetic oligonucleotide
gauacacccuggaauccac

SEQ ID NO: 2834220 - RNA, 19 nt, Artificial Sequence
  Description of Artificial Sequence: Synthetic oligonucleotide
gaacaguguccaugacuug

SEQ ID NO: 2834221 - RNA, 19 nt, Artificial Sequence
  Description of Artificial Sequence: Synthetic oligonucleotide
agauacacccuggaaucca

SEQ ID NO: 2834222 - RNA, 19 nt, Artificial Sequence
  Description of Artificial Sequence: Synthetic oligonucleotide
auacacccuggaauccacc

SEQ ID NO: 2834223 - RNA, 19 nt, Artificial Sequence
  Description of Artificial Sequence: Synthetic oligonucleotide
accaucauccaagguacca

SEQ ID NO: 2834224 - RNA, 19 nt, Artificial Sequence
  Description of Artificial Sequence: Synthetic oligonucleotide
ccuguauacuuucccauac

SEQ ID NO: 2834225 - RNA, 19 nt, Artificial Sequence
  Description of Artificial Sequence: Synthetic oligonucleotide
aguuccuuucacaggucag

SEQ ID NO: 2834226 - RNA, 19 nt, Artificial Sequence
  Description of Artificial Sequence: Synthetic oligonucleotide
uccaagguaccaucuucau

SEQ ID NO: 2834227 - RNA, 19 nt, Artificial Sequence
  Description of Artificial Sequence: Synthetic oligonucleotide
gagacgugucgccgcuucg

SEQ ID NO: 2834228 - RNA, 19 nt, Artificial Sequence
  Description of Artificial Sequence: Synthetic oligonucleotide
uccaugcaaguuguuggca

SEQ ID NO: 2834229 - RNA, 19 nt, Artificial Sequence
  Description of Artificial Sequence: Synthetic oligonucleotide
auccaagguaccaucuuca

SEQ ID NO: 2834230 - RNA, 19 nt, Artificial Sequence
  Description of Artificial Sequence: Synthetic oligonucleotide
uguucacgucuaagaugag

SEQ ID NO: 2834231 - RNA, 19 nt, Artificial Sequence
  Description of Artificial Sequence: Synthetic oligonucleotide
agacgugucgccgcuucgg

SEQ ID NO: 2834232 - RNA, 19 nt, Artificial Sequence
  Description of Artificial Sequence: Synthetic oligonucleotide
cuucgguugaggucucauc

SEQ ID NO: 2834233 - RNA, 19 nt, Artificial Sequence
  Description of Artificial Sequence: Synthetic oligonucleotide
agagagacgugucgccgcu

SEQ ID NO: 2834234 - RNA, 19 nt, Artificial Sequence
  Description of Artificial Sequence: Synthetic oligonucleotide
aggccaguuucuucaucag

SEQ ID NO: 2834235 - RNA, 19 nt, Artificial Sequence
  Description of Artificial Sequence: Synthetic oligonucleotide
uauccagaguggacacaga

SEQ ID NO: 2834236 - RNA, 19 nt, Artificial Sequence
  Description of Artificial Sequence: Synthetic oligonucleotide
uguuggcaucacccugaag

SEQ ID NO: 2834237 - RNA, 19 nt, Artificial Sequence
  Description of Artificial Sequence: Synthetic oligonucleotide
aucacccugaagccucaug

SEQ ID NO: 2834238 - RNA, 19 nt, Artificial Sequence
  Description of Artificial Sequence: Synthetic oligonucleotide
aguccacuggguaaaucug

SEQ ID NO: 2834239 - RNA, 19 nt, Artificial Sequence
  Description of Artificial Sequence: Synthetic oligonucleotide
uguauccagaguggacaca

SEQ ID NO: 2834240 - RNA, 19 nt, Artificial Sequence
  Description of Artificial Sequence: Synthetic oligonucleotide
agguaccaucuucauacaa

SEQ ID NO: 2834241 - RNA, 19 nt, Artificial Sequence
  Description of Artificial Sequence: Synthetic oligonucleotide
ccaaucggaacuugucacc

SEQ ID NO: 2834242 - RNA, 19 nt, Artificial Sequence
  Description of Artificial Sequence: Synthetic oligonucleotide
auucaccaucauccaaggu

SEQ ID NO: 2834243 - RNA, 19 nt, Artificial Sequence
  Description of Artificial Sequence: Synthetic oligonucleotide
acgucuaagaugaggucca

SEQ ID NO: 2834244 - RNA, 19 nt, Artificial Sequence
  Description of Artificial Sequence: Synthetic oligonucleotide
cagauacacccuggaaucc

SEQ ID NO: 2834245 - RNA, 19 nt, Artificial Sequence
  Description of Artificial Sequence: Synthetic oligonucleotide
cacauaggcagagagacgu

SEQ ID NO: 2834246 - RNA, 19 nt, Artificial Sequence
  Description of Artificial Sequence: Synthetic oligonucleotide
acacauaggcagagagacg

SEQ ID NO: 2834247 - RNA, 19 nt, Artificial Sequence
  Description of Artificial Sequence: Synthetic oligonucleotide
gaagccucaugagcaggcc

SEQ ID NO: 2834248 - RNA, 19 nt, Artificial Sequence
  Description of Artificial Sequence: Synthetic oligonucleotide
gcuguauccagaguggaca

SEQ ID NO: 2834249 - RNA, 19 nt, Artificial Sequence
  Description of Artificial Sequence: Synthetic oligonucleotide
aauccaccucaaauccaug

SEQ ID NO: 2834250 - RNA, 19 nt, Artificial Sequence
  Description of Artificial Sequence: Synthetic oligonucleotide
cauacaugacauacucaaa

SEQ ID NO: 2834251 - RNA, 19 nt, Artificial Sequence
  Description of Artificial Sequence: Synthetic oligonucleotide
uucccacgagguucagaag

SEQ ID NO: 2834252 - RNA, 19 nt, Artificial Sequence
  Description of Artificial Sequence: Synthetic oligonucleotide
cacccuggaauccaccuca

SEQ ID NO: 2834253 - RNA, 19 nt, Artificial Sequence
  Description of Artificial Sequence: Synthetic oligonucleotide
aucauccaagguaccaucu

SEQ ID NO: 2834254 - RNA, 19 nt, Artificial Sequence
  Description of Artificial Sequence: Synthetic oligonucleotide
uucgaacaguguccaugac

SEQ ID NO: 2834255 - RNA, 19 nt, Artificial Sequence
  Description of Artificial Sequence: Synthetic oligonucleotide
acuuucccauacaugacau

SEQ ID NO: 2834256 - RNA, 19 nt, Artificial Sequence
  Description of Artificial Sequence: Synthetic oligonucleotide
acagagccaguuccuuuca

SEQ ID NO: 2834257 - RNA, 19 nt, Artificial Sequence
  Description of Artificial Sequence: Synthetic oligonucleotide
ggaacuugucacccaaguc

SEQ ID NO: 2834258 - RNA, 19 nt, Artificial Sequence
  Description of Artificial Sequence: Synthetic oligonucleotide
cacgagguucagaaggcca

SEQ ID NO: 2834259 - RNA, 19 nt, Artificial Sequence
  Description of Artificial Sequence: Synthetic oligonucleotide
cugugggguuguauucacc

SEQ ID NO: 2834260 - RNA, 19 nt, Artificial Sequence
  Description of Artificial Sequence: Synthetic oligonucleotide
uccuuucacaggucagcaa

SEQ ID NO: 2834261 - RNA, 19 nt, Artificial Sequence
  Description of Artificial Sequence: Synthetic oligonucleotide
augaccaaucggaacuugu

SEQ ID NO: 2834262 - RNA, 19 nt, Artificial Sequence
  Description of Artificial Sequence: Synthetic oligonucleotide
guacuagcuaugaccaauc

SEQ ID NO: 2834263 - RNA, 19 nt, Artificial Sequence
  Description of Artificial Sequence: Synthetic oligonucleotide
caguuucuucaucagcaga

SEQ ID NO: 2834264 - RNA, 19 nt, Artificial Sequence
  Description of Artificial Sequence: Synthetic oligonucleotide
agacaaacugaagcuguau

SEQ ID NO: 2834265 - RNA, 19 nt, Artificial Sequence
  Description of Artificial Sequence: Synthetic oligonucleotide
gcaaguuguuggcaucacc

SEQ ID NO: 2834266 - RNA, 19 nt, Artificial Sequence
  Description of Artificial Sequence: Synthetic oligonucleotide
gguaccaucuucauacaaa

SEQ ID NO: 2834267 - RNA, 19 nt, Artificial Sequence
  Description of Artificial Sequence: Synthetic oligonucleotide
uucagaaggccaguuucuu

SEQ ID NO: 2834268 - RNA, 19 nt, Artificial Sequence
  Description of Artificial Sequence: Synthetic oligonucleotide
cuguauacuuucccauaca

SEQ ID NO: 2834269 - RNA, 19 nt, Artificial Sequence
  Description of Artificial Sequence: Synthetic oligonucleotide
gaauccaccucaaauccau

SEQ ID NO: 2834270 - RNA, 19 nt, Artificial Sequence
  Description of Artificial Sequence: Synthetic oligonucleotide
caguuccuuucacagguca

SEQ ID NO: 2834271 - RNA, 19 nt, Artificial Sequence
  Description of Artificial Sequence: Synthetic oligonucleotide
cucaaacugguccgcccug

SEQ ID NO: 2834272 - RNA, 19 nt, Artificial Sequence
  Description of Artificial Sequence: Synthetic oligonucleotide
guggacacagagccaguuc

SEQ ID NO: 2834273 - RNA, 19 nt, Artificial Sequence
  Description of Artificial Sequence: Synthetic oligonucleotide
ggcagagagacgugucgcc

SEQ ID NO: 2834274 - RNA, 19 nt, Artificial Sequence
  Description of Artificial Sequence: Synthetic oligonucleotide
gggcugguuucccacgagg

SEQ ID NO: 2834275 - RNA, 19 nt, Artificial Sequence
  Description of Artificial Sequence: Synthetic oligonucleotide
acacagagccaguuccuuu

SEQ ID NO: 2834276 - RNA, 19 nt, Artificial Sequence
  Description of Artificial Sequence: Synthetic oligonucleotide
agguucagaaggccaguuu

SEQ ID NO: 2834277 - RNA, 19 nt, Artificial Sequence
  Description of Artificial Sequence: Synthetic oligonucleotide
gcagagagacgugucgccg

SEQ ID NO: 2834278 - RNA, 19 nt, Artificial Sequence
  Description of Artificial Sequence: Synthetic oligonucleotide
uaggacacauaggcagaga

SEQ ID NO: 2834279 - RNA, 19 nt, Artificial Sequence
  Description of Artificial Sequence: Synthetic oligonucleotide
aucugaauguucacgucua

SEQ ID NO: 2834280 - RNA, 19 nt, Artificial Sequence
  Description of Artificial Sequence: Synthetic oligonucleotide
caccaucauccaagguacc

SEQ ID NO: 2834281 - RNA, 19 nt, Artificial Sequence
  Description of Artificial Sequence: Synthetic oligonucleotide
ugcaaguuguuggcaucac

SEQ ID NO: 2834282 - RNA, 19 nt, Artificial Sequence
  Description of Artificial Sequence: Synthetic oligonucleotide
agaugagguccaucuugaa

SEQ ID NO: 2834283 - RNA, 19 nt, Artificial Sequence
  Description of Artificial Sequence: Synthetic oligonucleotide
acuugucacccaaguccac

SEQ ID NO: 2834284 - RNA, 19 nt, Artificial Sequence
  Description of Artificial Sequence: Synthetic oligonucleotide
uggcaucacccugaagccu

SEQ ID NO: 2834285 - RNA, 19 nt, Artificial Sequence
  Description of Artificial Sequence: Synthetic oligonucleotide
agguccaucuugaaagauu

SEQ ID NO: 2834286 - RNA, 19 nt, Artificial Sequence
  Description of Artificial Sequence: Synthetic oligonucleotide
guccacuggguaaaucuga

SEQ ID NO: 2834287 - RNA, 19 nt, Artificial Sequence
  Description of Artificial Sequence: Synthetic oligonucleotide
gggguuguauucaccauca

SEQ ID NO: 2834288 - RNA, 19 nt, Artificial Sequence
  Description of Artificial Sequence: Synthetic oligonucleotide
ugguccgcccuggaaggcc

SEQ ID NO: 2834289 - RNA, 19 nt, Artificial Sequence
  Description of Artificial Sequence: Synthetic oligonucleotide
ucagcaacgccagcuucua

SEQ ID NO: 2834290 - RNA, 19 nt, Artificial Sequence
  Description of Artificial Sequence: Synthetic oligonucleotide
cccacgagguucagaaggc

SEQ ID NO: 2834291 - RNA, 19 nt, Artificial Sequence
  Description of Artificial Sequence: Synthetic oligonucleotide
aggucagcaacgccagcuu

SEQ ID NO: 2834292 - RNA, 19 nt, Artificial Sequence
  Description of Artificial Sequence: Synthetic oligonucleotide
cacugaauucagacaaacu

SEQ ID NO: 2834293 - RNA, 19 nt, Artificial Sequence
  Description of Artificial Sequence: Synthetic oligonucleotide
ccacugaauucagacaaac

SEQ ID NO: 2834294 - RNA, 19 nt, Artificial Sequence
  Description of Artificial Sequence: Synthetic oligonucleotide
aguggacacagagccaguu

SEQ ID NO: 2834295 - RNA, 19 nt, Artificial Sequence
  Description of Artificial Sequence: Synthetic oligonucleotide
gcaacgccagcuucuacuc

SEQ ID NO: 2834296 - RNA, 19 nt, Artificial Sequence
  Description of Artificial Sequence: Synthetic oligonucleotide
cuggaaggccugucaucug

SEQ ID NO: 2834297 - RNA, 19 nt, Artificial Sequence
  Description of Artificial Sequence: Synthetic oligonucleotide
cagagccaguuccuuucac

SEQ ID NO: 2834298 - RNA, 19 nt, Artificial Sequence
  Description of Artificial Sequence: Synthetic oligonucleotide
gcagggcugguuucccacg

SEQ ID NO: 2834299 - RNA, 19 nt, Artificial Sequence
  Description of Artificial Sequence: Synthetic oligonucleotide
cagguucgaacagugucca

SEQ ID NO: 2834300 - RNA, 19 nt, Artificial Sequence
  Description of Artificial Sequence: Synthetic oligonucleotide
acauaggcagagagacgug

SEQ ID NO: 2834301 - RNA, 19 nt, Artificial Sequence
  Description of Artificial Sequence: Synthetic oligonucleotide
caaguccacuggguaaauc

SEQ ID NO: 2834302 - RNA, 19 nt, Artificial Sequence
  Description of Artificial Sequence: Synthetic oligonucleotide
cagacaaacugaagcugua

SEQ ID NO: 2834303 - RNA, 19 nt, Artificial Sequence
  Description of Artificial Sequence: Synthetic oligonucleotide
gucuaagaugagguccauc

SEQ ID NO: 2834304 - RNA, 19 nt, Artificial Sequence
  Description of Artificial Sequence: Synthetic oligonucleotide
gucgccgcuucgguugagg

SEQ ID NO: 2834305 - RNA, 19 nt, Artificial Sequence
  Description of Artificial Sequence: Synthetic oligonucleotide
ggcaucacccugaagccuc

SEQ ID NO: 2834306 - RNA, 19 nt, Artificial Sequence
  Description of Artificial Sequence: Synthetic oligonucleotide
guucagaaggccaguuucu

SEQ ID NO: 2834307 - RNA, 19 nt, Artificial Sequence
  Description of Artificial Sequence: Synthetic oligonucleotide
cagaguggacacagagcca

SEQ ID NO: 2834308 - RNA, 19 nt, Artificial Sequence
  Description of Artificial Sequence: Synthetic oligonucleotide
cgugucgccgcuucgguug

SEQ ID NO: 2834309 - RNA, 19 nt, Artificial Sequence
  Description of Artificial Sequence: Synthetic oligonucleotide
acucagguucgaacagugu

SEQ ID NO: 2834310 - RNA, 19 nt, Artificial Sequence
  Description of Artificial Sequence: Synthetic oligonucleotide
cauaggcagagagacgugu

SEQ ID NO: 2834311 - RNA, 19 nt, Artificial Sequence
  Description of Artificial Sequence: Synthetic oligonucleotide
ggacacauaggcagagaga

SEQ ID NO: 2834312 - RNA, 19 nt, Artificial Sequence
  Description of Artificial Sequence: Synthetic oligonucleotide
ggaauccaccucaaaucca

SEQ ID NO: 2834313 - RNA, 19 nt, Artificial Sequence
  Description of Artificial Sequence: Synthetic oligonucleotide
cuuucccauacaugacaua

SEQ ID NO: 2834314 - RNA, 19 nt, Artificial Sequence
  Description of Artificial Sequence: Synthetic oligonucleotide
acgccagcuucuacucagg

SEQ ID NO: 2834315 - RNA, 19 nt, Artificial Sequence
  Description of Artificial Sequence: Synthetic oligonucleotide
guccaugacuugaaugacu

SEQ ID NO: 2834316 - RNA, 19 nt, Artificial Sequence
  Description of Artificial Sequence: Synthetic oligonucleotide
cuugucacccaaguccacu

SEQ ID NO: 2834317 - RNA, 19 nt, Artificial Sequence
  Description of Artificial Sequence: Synthetic oligonucleotide
cagcagauacacccuggaa

SEQ ID NO: 2834318 - RNA, 19 nt, Artificial Sequence
  Description of Artificial Sequence: Synthetic oligonucleotide
ggaaggccugucaucugug

SEQ ID NO: 2834319 - RNA, 19 nt, Artificial Sequence
  Description of Artificial Sequence: Synthetic oligonucleotide
cacccaaguccacugggua

SEQ ID NO: 2834320 - RNA, 19 nt, Artificial Sequence
  Description of Artificial Sequence: Synthetic oligonucleotide
ccaucuugaaagauucacu

SEQ ID NO: 2834321 - RNA, 19 nt, Artificial Sequence
  Description of Artificial Sequence: Synthetic oligonucleotide
caaacugguccgcccugga

SEQ ID NO: 2834322 - RNA, 19 nt, Artificial Sequence
  Description of Artificial Sequence: Synthetic oligonucleotide
cccauaggacacauaggca

SEQ ID NO: 2834323 - RNA, 19 nt, Artificial Sequence
  Description of Artificial Sequence: Synthetic oligonucleotide
cgguugaggucucaucccc

SEQ ID NO: 2834324 - RNA, 19 nt, Artificial Sequence
  Description of Artificial Sequence: Synthetic oligonucleotide
agcuucuacucagguucga

SEQ ID NO: 2834325 - RNA, 19 nt, Artificial Sequence
  Description of Artificial Sequence: Synthetic oligonucleotide
guccaucuugaaagauuca

SEQ ID NO: 2834326 - RNA, 19 nt, Artificial Sequence
  Description of Artificial Sequence: Synthetic oligonucleotide
gacgugucgccgcuucggu

SEQ ID NO: 2834327 - RNA, 19 nt, Artificial Sequence
  Description of Artificial Sequence: Synthetic oligonucleotide
guuucccacgagguucaga

SEQ ID NO: 2834328 - RNA, 19 nt, Artificial Sequence
  Description of Artificial Sequence: Synthetic oligonucleotide
caggucagcaacgccagcu

SEQ ID NO: 2834329 - RNA, 19 nt, Artificial Sequence
  Description of Artificial Sequence: Synthetic oligonucleotide
cccauacaugacauacuca

SEQ ID NO: 2834330 - RNA, 19 nt, Artificial Sequence
  Description of Artificial Sequence: Synthetic oligonucleotide
caacgccagcuucuacuca

SEQ ID NO: 2834331 - RNA, 19 nt, Artificial Sequence
  Description of Artificial Sequence: Synthetic oligonucleotide
gccgcuucgguugaggucu

SEQ ID NO: 2834332 - RNA, 19 nt, Artificial Sequence
  Description of Artificial Sequence: Synthetic oligonucleotide
agguucgaacaguguccau

SEQ ID NO: 2834333 - RNA, 19 nt, Artificial Sequence
  Description of Artificial Sequence: Synthetic oligonucleotide
cagcaacgccagcuucuac

SEQ ID NO: 2834334 - RNA, 19 nt, Artificial Sequence
  Description of Artificial Sequence: Synthetic oligonucleotide
acgugucgccgcuucgguu

SEQ ID NO: 2834335 - RNA, 19 nt, Artificial Sequence
  Description of Artificial Sequence: Synthetic oligonucleotide
cuaagaugagguccaucuu

SEQ ID NO: 2834336 - RNA, 19 nt, Artificial Sequence
  Description of Artificial Sequence: Synthetic oligonucleotide
cgaacaguguccaugacuu

SEQ ID NO: 2834337 - RNA, 19 nt, Artificial Sequence
  Description of Artificial Sequence: Synthetic oligonucleotide
ccaccucaaauccaugcaa

SEQ ID NO: 2834338 - RNA, 19 nt, Artificial Sequence
  Description of Artificial Sequence: Synthetic oligonucleotide
cugguccgcccuggaaggc

SEQ ID NO: 2834339 - RNA, 19 nt, Artificial Sequence
  Description of Artificial Sequence: Synthetic oligonucleotide
cuacucagguucgaacagu

SEQ ID NO: 2834340 - RNA, 19 nt, Artificial Sequence
  Description of Artificial Sequence: Synthetic oligonucleotide
gagguccaucuugaaagau

SEQ ID NO: 2834341 - RNA, 19 nt, Artificial Sequence
  Description of Artificial Sequence: Synthetic oligonucleotide
gacacagagccaguuccuu

SEQ ID NO: 2834342 - RNA, 19 nt, Artificial Sequence
  Description of Artificial Sequence: Synthetic oligonucleotide
ccacgagguucagaaggcc

SEQ ID NO: 2834343 - RNA, 19 nt, Artificial Sequence
  Description of Artificial Sequence: Synthetic oligonucleotide
cccucaauccuguauacuu

SEQ ID NO: 2834344 - RNA, 19 nt, Artificial Sequence
  Description of Artificial Sequence: Synthetic oligonucleotide
cugaagcuguauccagagu

SEQ ID NO: 2834345 - RNA, 19 nt, Artificial Sequence
  Description of Artificial Sequence: Synthetic oligonucleotide
uccgcccuggaaggccugu

SEQ ID NO: 2834346 - RNA, 19 nt, Artificial Sequence
  Description of Artificial Sequence: Synthetic oligonucleotide
gugucgccgcuucgguuga

SEQ ID NO: 2834347 - RNA, 19 nt, Artificial Sequence
  Description of Artificial Sequence: Synthetic oligonucleotide
cccuggaaggccugucauc

SEQ ID NO: 2834348 - RNA, 19 nt, Artificial Sequence
  Description of Artificial Sequence: Synthetic oligonucleotide
gcuucuacucagguucgaa

SEQ ID NO: 2834349 - RNA, 19 nt, Artificial Sequence
  Description of Artificial Sequence: Synthetic oligonucleotide
ugucgccgcuucgguugag

SEQ ID NO: 2834350 - RNA, 19 nt, Artificial Sequence
  Description of Artificial Sequence: Synthetic oligonucleotide
ccaguuccuuucacagguc

SEQ ID NO: 2834351 - RNA, 19 nt, Artificial Sequence
  Description of Artificial Sequence: Synthetic oligonucleotide
cagcagggcugguuuccca

SEQ ID NO: 2834352 - RNA, 19 nt, Artificial Sequence
  Description of Artificial Sequence: Synthetic oligonucleotide
gagguucagaaggccaguu

SEQ ID NO: 2834353 - RNA, 19 nt, Artificial Sequence
  Description of Artificial Sequence: Synthetic oligonucleotide
ccaagguaccaucuucaua

SEQ ID NO: 2834354 - RNA, 19 nt, Artificial Sequence
  Description of Artificial Sequence: Synthetic oligonucleotide
cuaugaccaaucggaacuu

SEQ ID NO: 2834355 - RNA, 19 nt, Artificial Sequence
  Description of Artificial Sequence: Synthetic oligonucleotide
gucaucugugggguuguau

SEQ ID NO: 2834356 - RNA, 19 nt, Artificial Sequence
  Description of Artificial Sequence: Synthetic oligonucleotide
ggcugguuucccacgaggu

SEQ ID NO: 2834357 - RNA, 19 nt, Artificial Sequence
  Description of Artificial Sequence: Synthetic oligonucleotide
ccaugcaaguuguuggcau

SEQ ID NO: 2834358 - RNA, 19 nt, Artificial Sequence
  Description of Artificial Sequence: Synthetic oligonucleotide
cuaagcagcagggcugguu

SEQ ID NO: 2834359 - RNA, 19 nt, Artificial Sequence
  Description of Artificial Sequence: Synthetic oligonucleotide
caaauccaugcaaguuguu

SEQ ID NO: 2834360 - RNA, 19 nt, Artificial Sequence
  Description of Artificial Sequence: Synthetic oligonucleotide
gaguggacacagagccagu

SEQ ID NO: 2834361 - RNA, 19 nt, Artificial Sequence
  Description of Artificial Sequence: Synthetic oligonucleotide
ccaugacuugaaugacuaa

SEQ ID NO: 2834362 - RNA, 19 nt, Artificial Sequence
  Description of Artificial Sequence: Synthetic oligonucleotide
gguuucccacgagguucag

SEQ ID NO: 2834363 - RNA, 19 nt, Artificial Sequence
  Description of Artificial Sequence: Synthetic oligonucleotide
ccucaauccuguauacuuu

SEQ ID NO: 2834364 - RNA, 19 nt, Artificial Sequence
  Description of Artificial Sequence: Synthetic oligonucleotide
gcugguuucccacgagguu

SEQ ID NO: 2834365 - RNA, 19 nt, Artificial Sequence
  Description of Artificial Sequence: Synthetic oligonucleotide
caguguccaugacuugaau

SEQ ID NO: 2834366 - RNA, 19 nt, Artificial Sequence
  Description of Artificial Sequence: Synthetic oligonucleotide
ggacacagagccaguuccu

SEQ ID NO: 2834367 - RNA, 19 nt, Artificial Sequence
  Description of Artificial Sequence: Synthetic oligonucleotide
ggccugucaucuguggggu

SEQ ID NO: 2834368 - RNA, 19 nt, Artificial Sequence
  Description of Artificial Sequence: Synthetic oligonucleotide
gccagcuucuacucagguu

SEQ ID NO: 2834369 - RNA, 19 nt, Artificial Sequence
  Description of Artificial Sequence: Synthetic oligonucleotide
cggaacuugucacccaagu

SEQ ID NO: 2834370 - RNA, 19 nt, Artificial Sequence
  Description of Artificial Sequence: Synthetic oligonucleotide
cgccgcuucgguugagguc

SEQ ID NO: 2834371 - RNA, 19 nt, Artificial Sequence
  Description of Artificial Sequence: Synthetic oligonucleotide
ccaucauccaagguaccau

SEQ ID NO: 2834372 - RNA, 19 nt, Artificial Sequence
  Description of Artificial Sequence: Synthetic oligonucleotide
ggguuguauucaccaucau

SEQ ID NO: 2834373 - RNA, 19 nt, Artificial Sequence
  Description of Artificial Sequence: Synthetic oligonucleotide
gcuucgguugaggucucau

SEQ ID NO: 2834374 - RNA, 19 nt, Artificial Sequence
  Description of Artificial Sequence: Synthetic oligonucleotide
gguccgcccuggaaggccu

SEQ ID NO: 2834375 - RNA, 19 nt, Artificial Sequence
  Description of Artificial Sequence: Synthetic oligonucleotide
ccacuggguaaaucugaau

SEQ ID NO: 2834376 - RNA, 19 nt, Artificial Sequence
  Description of Artificial Sequence: Synthetic oligonucleotide
gagagacgugucgccgcuu

SEQ ID NO: 2834377 - RNA, 19 nt, Artificial Sequence
  Description of Artificial Sequence: Synthetic oligonucleotide
cccuggaauccaccucaaa

SEQ ID NO: 2834378 - RNA, 19 nt, Artificial Sequence
  Description of Artificial Sequence: Synthetic oligonucleotide
cgcccuggaaggccuguca

SEQ ID NO: 2834379 - RNA, 19 nt, Artificial Sequence
  Description of Artificial Sequence: Synthetic oligonucleotide
ccgcuucgguugaggucuc

SEQ ID NO: 2834380 - RNA, 19 nt, Artificial Sequence
  Description of Artificial Sequence: Synthetic oligonucleotide
ccccucaauccuguauacu

SEQ ID NO: 2834381 - RNA, 19 nt, Artificial Sequence
  Description of Artificial Sequence: Synthetic oligonucleotide
caucacccugaagccucau

SEQ ID NO: 2834382 - RNA, 19 nt, Artificial Sequence
  Description of Artificial Sequence: Synthetic oligonucleotide
ccgcccuggaaggccuguc

SEQ ID NO: 2834383 - RNA, 19 nt, Artificial Sequence
  Description of Artificial Sequence: Synthetic oligonucleotide
cgagguucagaaggccagu

SEQ ID NO: 2834384 - RNA, 19 nt, Artificial Sequence
  Description of Artificial Sequence: Synthetic oligonucleotide
cgccagcuucuacucaggu

SEQ ID NO: 2834385 - RNA, 19 nt, Artificial Sequence
  Description of Artificial Sequence: Synthetic oligonucleotide
gccugucaucugugggguu

SEQ ID NO: 2834386 - RNA, 19 nt, Artificial Sequence
  Description of Artificial Sequence: Synthetic oligonucleotide
ccaaguccacuggguaaau

SEQ ID NO: 2834387 - RNA, 19 nt, Artificial Sequence
  Description of Artificial Sequence: Synthetic oligonucleotide
cgcuucgguugaggucuca

SEQ ID NO: 2834388 - RNA, 19 nt, Artificial Sequence
  Description of Artificial Sequence: Synthetic oligonucleotide
cgucuaagaugagguccau

SEQ ID NO: 2834389 - RNA, 19 nt, Artificial Sequence
  Description of Artificial Sequence: Synthetic oligonucleotide
uugcggauagcuuucaggg

SEQ ID NO: 2834390 - RNA, 19 nt, Artificial Sequence
  Description of Artificial Sequence: Synthetic oligonucleotide
aaggucgaucuucuguucc

SEQ ID NO: 2834391 - RNA, 19 nt, Artificial Sequence
  Description of Artificial Sequence: Synthetic oligonucleotide
aggaggcugauguacaccc

SEQ ID NO: 2834392 - RNA, 19 nt, Artificial Sequence
  Description of Artificial Sequence: Synthetic oligonucleotide
ucuugaaggccaaggagag

SEQ ID NO: 2834393 - RNA, 19 nt, Artificial Sequence
  Description of Artificial Sequence: Synthetic oligonucleotide
uguccuuggguuuaggcug

SEQ ID NO: 2834394 - RNA, 19 nt, Artificial Sequence
  Description of Artificial Sequence: Synthetic oligonucleotide
uugaaggccaaggagagcc

SEQ ID NO: 2834395 - RNA, 19 nt, Artificial Sequence
  Description of Artificial Sequence: Synthetic oligonucleotide
gaucuugaaggccaaggag

SEQ ID NO: 2834396 - RNA, 19 nt, Artificial Sequence
  Description of Artificial Sequence: Synthetic oligonucleotide
ugcucacaggucaucaugg

SEQ ID NO: 2834397 - RNA, 19 nt, Artificial Sequence
  Description of Artificial Sequence: Synthetic oligonucleotide
guacaguucuccuugucgg

SEQ ID NO: 2834398 - RNA, 19 nt, Artificial Sequence
  Description of Artificial Sequence: Synthetic oligonucleotide
accaccgcuacaucgaagg

SEQ ID NO: 2834399 - RNA, 19 nt, Artificial Sequence
  Description of Artificial Sequence: Synthetic oligonucleotide
gaugcgcucauucagguuc

SEQ ID NO: 2834400 - RNA, 19 nt, Artificial Sequence
  Description of Artificial Sequence: Synthetic oligonucleotide
gagcccaucacccaagggc

SEQ ID NO: 2834401 - RNA, 19 nt, Artificial Sequence
  Description of Artificial Sequence: Synthetic oligonucleotide
ucacaggucaucauggaau

SEQ ID NO: 2834402 - RNA, 19 nt, Artificial Sequence
  Description of Artificial Sequence: Synthetic oligonucleotide
uagaucuugaaggccaagg

SEQ ID NO: 2834403 - RNA, 19 nt, Artificial Sequence
  Description of Artificial Sequence: Synthetic oligonucleotide
cuugcggauagcuuucagg

SEQ ID NO: 2834404 - RNA, 19 nt, Artificial Sequence
  Description of Artificial Sequence: Synthetic oligonucleotide
ucuucuguuccacuucggc

SEQ ID NO: 2834405 - RNA, 19 nt, Artificial Sequence
  Description of Artificial Sequence: Synthetic oligonucleotide
uaggagcucauccaaaguc

SEQ ID NO: 2834406 - RNA, 19 nt, Artificial Sequence
  Description of Artificial Sequence: Synthetic oligonucleotide
uguagcaccucuccgcgcc

SEQ ID NO: 2834407 - RNA, 19 nt, Artificial Sequence
  Description of Artificial Sequence: Synthetic oligonucleotide
uuggguuuaggcuguagca

SEQ ID NO: 2834408 - RNA, 19 nt, Artificial Sequence
  Description of Artificial Sequence: Synthetic oligonucleotide
ucggccugcuuccacaggg

SEQ ID NO: 2834409 - RNA, 19 nt, Artificial Sequence
  Description of Artificial Sequence: Synthetic oligonucleotide
caaggagagcccaucaccc

SEQ ID NO: 2834410 - RNA, 19 nt, Artificial Sequence
  Description of Artificial Sequence: Synthetic oligonucleotide
gaagguuccggccucgccc

SEQ ID NO: 2834411 - RNA, 19 nt, Artificial Sequence
  Description of Artificial Sequence: Synthetic oligonucleotide
guagcagcuguagacagcg

SEQ ID NO: 2834412 - RNA, 19 nt, Artificial Sequence
  Description of Artificial Sequence: Synthetic oligonucleotide
uaguaggcgguacaguucu

SEQ ID NO: 2834413 - RNA, 19 nt, Artificial Sequence
  Description of Artificial Sequence: Synthetic oligonucleotide
ucgaaggucgaucuucugu

SEQ ID NO: 2834414 - RNA, 19 nt, Artificial Sequence
  Description of Artificial Sequence: Synthetic oligonucleotide
ucacccaagggcaggaggc

SEQ ID NO: 2834415 - RNA, 19 nt, Artificial Sequence
  Description of Artificial Sequence: Synthetic oligonucleotide
cuuggguuuaggcuguagc

SEQ ID NO: 2834416 - RNA, 19 nt, Artificial Sequence
  Description of Artificial Sequence: Synthetic oligonucleotide
aagguuccggccucgcccg

SEQ ID NO: 2834417 - RNA, 19 nt, Artificial Sequence
  Description of Artificial Sequence: Synthetic oligonucleotide
uuguccuuggguuuaggcu

SEQ ID NO: 2834418 - RNA, 19 nt, Artificial Sequence
  Description of Artificial Sequence: Synthetic oligonucleotide
cucauccaaagucugcagg

SEQ ID NO: 2834419 - RNA, 19 nt, Artificial Sequence
  Description of Artificial Sequence: Synthetic oligonucleotide
uaggcuguagcaccucucc

SEQ ID NO: 2834420 - RNA, 19 nt, Artificial Sequence
  Description of Artificial Sequence: Synthetic oligonucleotide
auucagguuccgcacgcac

SEQ ID NO: 2834421 - RNA, 19 nt, Artificial Sequence
  Description of Artificial Sequence: Synthetic oligonucleotide
cuuguccuuggguuuaggc

SEQ ID NO: 2834422 - RNA, 19 nt, Artificial Sequence
  Description of Artificial Sequence: Synthetic oligonucleotide
uuggaccagaagcugggcc

SEQ ID NO: 2834423 - RNA, 19 nt, Artificial Sequence
  Description of Artificial Sequence: Synthetic oligonucleotide
ugcuagaugagccgcgcca

SEQ ID NO: 2834424 - RNA, 19 nt, Artificial Sequence
  Description of Artificial Sequence: Synthetic oligonucleotide
uugucggcguccaccaccg

SEQ ID NO: 2834425 - RNA, 19 nt, Artificial Sequence
  Description of Artificial Sequence: Synthetic oligonucleotide
uccacuucggccugcuucc

SEQ ID NO: 2834426 - RNA, 19 nt, Artificial Sequence
  Description of Artificial Sequence: Synthetic oligonucleotide
accgcuacaucgaagguuc

SEQ ID NO: 2834427 - RNA, 19 nt, Artificial Sequence
  Description of Artificial Sequence: Synthetic oligonucleotide
uacaucgaagguuccggcc

SEQ ID NO: 2834428 - RNA, 19 nt, Artificial Sequence
  Description of Artificial Sequence: Synthetic oligonucleotide
agccgcgccagguuggacc

SEQ ID NO: 2834429 - RNA, 19 nt, Artificial Sequence
  Description of Artificial Sequence: Synthetic oligonucleotide
aucacccaagggcaggagg

SEQ ID NO: 2834430 - RNA, 19 nt, Artificial Sequence
  Description of Artificial Sequence: Synthetic oligonucleotide
aagcgccagugcuagauga

SEQ ID NO: 2834431 - RNA, 19 nt, Artificial Sequence
  Description of Artificial Sequence: Synthetic oligonucleotide
uuccacuucggccugcuuc

SEQ ID NO: 2834432 - RNA, 19 nt, Artificial Sequence
  Description of Artificial Sequence: Synthetic oligonucleotide
aucuugaaggccaaggaga

SEQ ID NO: 2834433 - RNA, 19 nt, Artificial Sequence
  Description of Artificial Sequence: Synthetic oligonucleotide
uucgggaagcgccagugcu

SEQ ID NO: 2834434 - RNA, 19 nt, Artificial Sequence
  Description of Artificial Sequence: Synthetic oligonucleotide
ugggccugcucacagguca

SEQ ID NO: 2834435 - RNA, 19 nt, Artificial Sequence
  Description of Artificial Sequence: Synthetic oligonucleotide
acaucgaagguuccggccu

SEQ ID NO: 2834436 - RNA, 19 nt, Artificial Sequence
  Description of Artificial Sequence: Synthetic oligonucleotide
gccagguuggaccagaagc

SEQ ID NO: 2834437 - RNA, 19 nt, Artificial Sequence
  Description of Artificial Sequence: Synthetic oligonucleotide
uuuaggcuguagcaccucu

SEQ ID NO: 2834438 - RNA, 19 nt, Artificial Sequence
  Description of Artificial Sequence: Synthetic oligonucleotide
ugcagucgaaggucgaucu

SEQ ID NO: 2834439 - RNA, 19 nt, Artificial Sequence
  Description of Artificial Sequence: Synthetic oligonucleotide
agaagcugggccugcucac

SEQ ID NO: 2834440 - RNA, 19 nt, Artificial Sequence
  Description of Artificial Sequence: Synthetic oligonucleotide
gaugagccgcgccagguug

SEQ ID NO: 2834441 - RNA, 19 nt, Artificial Sequence
  Description of Artificial Sequence: Synthetic oligonucleotide
cuguagacagcgcucguag

SEQ ID NO: 2834442 - RNA, 19 nt, Artificial Sequence
  Description of Artificial Sequence: Synthetic oligonucleotide
agcagcuguagacagcgcu

SEQ ID NO: 2834443 - RNA, 19 nt, Artificial Sequence
  Description of Artificial Sequence: Synthetic oligonucleotide
ucagguuccgcacgcacuc

SEQ ID NO: 2834444 - RNA, 19 nt, Artificial Sequence
  Description of Artificial Sequence: Synthetic oligonucleotide
cucauucagguuccgcacg

SEQ ID NO: 2834445 - RNA, 19 nt, Artificial Sequence
  Description of Artificial Sequence: Synthetic oligonucleotide
uccaccaccgcuacaucga

SEQ ID NO: 2834446 - RNA, 19 nt, Artificial Sequence
  Description of Artificial Sequence: Synthetic oligonucleotide
caggucaucauggaauccc

SEQ ID NO: 2834447 - RNA, 19 nt, Artificial Sequence
  Description of Artificial Sequence: Synthetic oligonucleotide
ugauguacacccuggcguc

SEQ ID NO: 2834448 - RNA, 19 nt, Artificial Sequence
  Description of Artificial Sequence: Synthetic oligonucleotide
caggaugcgcucauucagg

SEQ ID NO: 2834449 - RNA, 19 nt, Artificial Sequence
  Description of Artificial Sequence: Synthetic oligonucleotide
gaggcugauguacacccug

SEQ ID NO: 2834450 - RNA, 19 nt, Artificial Sequence
  Description of Artificial Sequence: Synthetic oligonucleotide
cugagcacggcgagcaugc

SEQ ID NO: 2834451 - RNA, 19 nt, Artificial Sequence
  Description of Artificial Sequence: Synthetic oligonucleotide
guccaccaccgcuacaucg

SEQ ID NO: 2834452 - RNA, 19 nt, Artificial Sequence
  Description of Artificial Sequence: Synthetic oligonucleotide
agugcuagaugagccgcgc

SEQ ID NO: 2834453 - RNA, 19 nt, Artificial Sequence
  Description of Artificial Sequence: Synthetic oligonucleotide
uagacagcgcucguaguag

SEQ ID NO: 2834454 - RNA, 19 nt, Artificial Sequence
  Description of Artificial Sequence: Synthetic oligonucleotide
uucagguuccgcacgcacu

SEQ ID NO: 2834455 - RNA, 19 nt, Artificial Sequence
  Description of Artificial Sequence: Synthetic oligonucleotide
ucgcagguuaccacgcggc

SEQ ID NO: 2834456 - RNA, 19 nt, Artificial Sequence
  Description of Artificial Sequence: Synthetic oligonucleotide
acaguucuccuugucggcg

SEQ ID NO: 2834457 - RNA, 19 nt, Artificial Sequence
  Description of Artificial Sequence: Synthetic oligonucleotide
aaggagagcccaucaccca

SEQ ID NO: 2834458 - RNA, 19 nt, Artificial Sequence
  Description of Artificial Sequence: Synthetic oligonucleotide
aagucugcagggcgggcug

SEQ ID NO: 2834459 - RNA, 19 nt, Artificial Sequence
  Description of Artificial Sequence: Synthetic oligonucleotide
cuacaucgaagguuccggc

SEQ ID NO: 2834460 - RNA, 19 nt, Artificial Sequence
  Description of Artificial Sequence: Synthetic oligonucleotide
caccucgcagguuaccacg

SEQ ID NO: 2834461 - RNA, 19 nt, Artificial Sequence
  Description of Artificial Sequence: Synthetic oligonucleotide
uggguuuaggcuguagcac

SEQ ID NO: 2834462 - RNA, 19 nt, Artificial Sequence
  Description of Artificial Sequence: Synthetic oligonucleotide
aggucaucauggaaucccc

SEQ ID NO: 2834463 - RNA, 19 nt, Artificial Sequence
  Description of Artificial Sequence: Synthetic oligonucleotide
aagcugggccugcucacag

SEQ ID NO: 2834464 - RNA, 19 nt, Artificial Sequence
  Description of Artificial Sequence: Synthetic oligonucleotide
uaccacgcggccagcuucg

SEQ ID NO: 2834465 - RNA, 19 nt, Artificial Sequence
  Description of Artificial Sequence: Synthetic oligonucleotide
cagguuaccacgcggccag

SEQ ID NO: 2834466 - RNA, 19 nt, Artificial Sequence
  Description of Artificial Sequence: Synthetic oligonucleotide
agacagcgcucguaguagg

SEQ ID NO: 2834467 - RNA, 19 nt, Artificial Sequence
  Description of Artificial Sequence: Synthetic oligonucleotide
cacaggucaucauggaauc

SEQ ID NO: 2834468 - RNA, 19 nt, Artificial Sequence
  Description of Artificial Sequence: Synthetic oligonucleotide
acaggucaucauggaaucc

SEQ ID NO: 2834469 - RNA, 19 nt, Artificial Sequence
  Description of Artificial Sequence: Synthetic oligonucleotide
uuaccacgcggccagcuuc

SEQ ID NO: 2834470 - RNA, 19 nt, Artificial Sequence
  Description of Artificial Sequence: Synthetic oligonucleotide
agcacggcgagcaugccuc

SEQ ID NO: 2834471 - RNA, 19 nt, Artificial Sequence
  Description of Artificial Sequence: Synthetic oligonucleotide
ucgaucuucuguuccacuu

SEQ ID NO: 2834472 - RNA, 19 nt, Artificial Sequence
  Description of Artificial Sequence: Synthetic oligonucleotide
gcugauguacacccuggcg

SEQ ID NO: 2834473 - RNA, 19 nt, Artificial Sequence
  Description of Artificial Sequence: Synthetic oligonucleotide
gagagcccaucacccaagg

SEQ ID NO: 2834474 - RNA, 19 nt, Artificial Sequence
  Description of Artificial Sequence: Synthetic oligonucleotide
gcuaggagcucauccaaag

SEQ ID NO: 2834475 - RNA, 19 nt, Artificial Sequence
  Description of Artificial Sequence: Synthetic oligonucleotide
cuggcgucccgcaggaugc

SEQ ID NO: 2834476 - RNA, 19 nt, Artificial Sequence
  Description of Artificial Sequence: Synthetic oligonucleotide
uccuugucggcguccacca

SEQ ID NO: 2834477 - RNA, 19 nt, Artificial Sequence
  Description of Artificial Sequence: Synthetic oligonucleotide
ggguuuaggcuguagcacc

SEQ ID NO: 2834478 - RNA, 19 nt, Artificial Sequence
  Description of Artificial Sequence: Synthetic oligonucleotide
ucuguuccacuucggccug

SEQ ID NO: 2834479 - RNA, 19 nt, Artificial Sequence
  Description of Artificial Sequence: Synthetic oligonucleotide
cucgcagguuaccacgcgg

SEQ ID NO: 2834480 - RNA, 19 nt, Artificial Sequence
  Description of Artificial Sequence: Synthetic oligonucleotide
ucugagcacggcgagcaug

SEQ ID NO: 2834481 - RNA, 19 nt, Artificial Sequence
  Description of Artificial Sequence: Synthetic oligonucleotide
gcuacaucgaagguuccgg

SEQ ID NO: 2834482 - RNA, 19 nt, Artificial Sequence
  Description of Artificial Sequence: Synthetic oligonucleotide
uuaggcuguagcaccucuc

SEQ ID NO: 2834483 - RNA, 19 nt, Artificial Sequence
  Description of Artificial Sequence: Synthetic oligonucleotide
ugaaggccaaggagagccc

SEQ ID NO: 2834484 - RNA, 19 nt, Artificial Sequence
  Description of Artificial Sequence: Synthetic oligonucleotide
agguuccgcacgcacuccg

SEQ ID NO: 2834485 - RNA, 19 nt, Artificial Sequence
  Description of Artificial Sequence: Synthetic oligonucleotide
agagcccaucacccaaggg

SEQ ID NO: 2834486 - RNA, 19 nt, Artificial Sequence
  Description of Artificial Sequence: Synthetic oligonucleotide
cugcucacaggucaucaug

SEQ ID NO: 2834487 - RNA, 19 nt, Artificial Sequence
  Description of Artificial Sequence: Synthetic oligonucleotide
cacagcacucugagcacgg

SEQ ID NO: 2834488 - RNA, 19 nt, Artificial Sequence
  Description of Artificial Sequence: Synthetic oligonucleotide
uccgcagccuuguccuugg

SEQ ID NO: 2834489 - RNA, 19 nt, Artificial Sequence
  Description of Artificial Sequence: Synthetic oligonucleotide
auguacacccuggcguccc

SEQ ID NO: 2834490 - RNA, 19 nt, Artificial Sequence
  Description of Artificial Sequence: Synthetic oligonucleotide
ggcgguacaguucuccuug

SEQ ID NO: 2834491 - RNA, 19 nt, Artificial Sequence
  Description of Artificial Sequence: Synthetic oligonucleotide
uguagacagcgcucguagu

SEQ ID NO: 2834492 - RNA, 19 nt, Artificial Sequence
  Description of Artificial Sequence: Synthetic oligonucleotide
aggcuguagcaccucuccg

SEQ ID NO: 2834493 - RNA, 19 nt, Artificial Sequence
  Description of Artificial Sequence: Synthetic oligonucleotide
acagcgcucguaguaggcg

SEQ ID NO: 2834494 - RNA, 19 nt, Artificial Sequence
  Description of Artificial Sequence: Synthetic oligonucleotide
uccgcacgcacuccgcagc

SEQ ID NO: 2834495 - RNA, 19 nt, Artificial Sequence
  Description of Artificial Sequence: Synthetic oligonucleotide
gcaggaugcgcucauucag

SEQ ID NO: 2834496 - RNA, 19 nt, Artificial Sequence
  Description of Artificial Sequence: Synthetic oligonucleotide
cagcgcucguaguaggcgg

SEQ ID NO: 2834497 - RNA, 19 nt, Artificial Sequence
  Description of Artificial Sequence: Synthetic oligonucleotide
agguuggaccagaagcugg

SEQ ID NO: 2834498 - RNA, 19 nt, Artificial Sequence
  Description of Artificial Sequence: Synthetic oligonucleotide
gcuguagcaccucuccgcg

SEQ ID NO: 2834499 - RNA, 19 nt, Artificial Sequence
  Description of Artificial Sequence: Synthetic oligonucleotide
uguacacccuggcgucccg

SEQ ID NO: 2834500 - RNA, 19 nt, Artificial Sequence
  Description of Artificial Sequence: Synthetic oligonucleotide
aggaugcgcucauucaggu

SEQ ID NO: 2834501 - RNA, 19 nt, Artificial Sequence
  Description of Artificial Sequence: Synthetic oligonucleotide
acucugagcacggcgagca

SEQ ID NO: 2834502 - RNA, 19 nt, Artificial Sequence
  Description of Artificial Sequence: Synthetic oligonucleotide
aggagcucauccaaagucu

SEQ ID NO: 2834503 - RNA, 19 nt, Artificial Sequence
  Description of Artificial Sequence: Synthetic oligonucleotide
aguucuccuugucggcguc

SEQ ID NO: 2834504 - RNA, 19 nt, Artificial Sequence
  Description of Artificial Sequence: Synthetic oligonucleotide
gaagcgccagugcuagaug

SEQ ID NO: 2834505 - RNA, 19 nt, Artificial Sequence
  Description of Artificial Sequence: Synthetic oligonucleotide
ugcggauagcuuucagggu

SEQ ID NO: 2834506 - RNA, 19 nt, Artificial Sequence
  Description of Artificial Sequence: Synthetic oligonucleotide
cugauguacacccuggcgu

SEQ ID NO: 2834507 - RNA, 19 nt, Artificial Sequence
  Description of Artificial Sequence: Synthetic oligonucleotide
gaaggucgaucuucuguuc

SEQ ID NO: 2834508 - RNA, 19 nt, Artificial Sequence
  Description of Artificial Sequence: Synthetic oligonucleotide
ccaaggagagcccaucacc

SEQ ID NO: 2834509 - RNA, 19 nt, Artificial Sequence
  Description of Artificial Sequence: Synthetic oligonucleotide
cagcacucugagcacggcg

SEQ ID NO: 2834510 - RNA, 19 nt, Artificial Sequence
  Description of Artificial Sequence: Synthetic oligonucleotide
cagugcuagaugagccgcg

SEQ ID NO: 2834511 - RNA, 19 nt, Artificial Sequence
  Description of Artificial Sequence: Synthetic oligonucleotide
cuagaugagccgcgccagg

SEQ ID NO: 2834512 - RNA, 19 nt, Artificial Sequence
  Description of Artificial Sequence: Synthetic oligonucleotide
cucguaguaggcgguacag

SEQ ID NO: 2834513 - RNA, 19 nt, Artificial Sequence
  Description of Artificial Sequence: Synthetic oligonucleotide
aggucgaucuucuguucca

SEQ ID NO: 2834514 - RNA, 19 nt, Artificial Sequence
  Description of Artificial Sequence: Synthetic oligonucleotide
guaggcgguacaguucucc

SEQ ID NO: 2834515 - RNA, 19 nt, Artificial Sequence
  Description of Artificial Sequence: Synthetic oligonucleotide
guagacagcgcucguagua

SEQ ID NO: 2834516 - RNA, 19 nt, Artificial Sequence
  Description of Artificial Sequence: Synthetic oligonucleotide
cagcuguagacagcgcucg

SEQ ID NO: 2834517 - RNA, 19 nt, Artificial Sequence
  Description of Artificial Sequence: Synthetic oligonucleotide
uccacaggggccgucccag

SEQ ID NO: 2834518 - RNA, 19 nt, Artificial Sequence
  Description of Artificial Sequence: Synthetic oligonucleotide
ucgcccgccgcuaggagcu

SEQ ID NO: 2834519 - RNA, 19 nt, Artificial Sequence
  Description of Artificial Sequence: Synthetic oligonucleotide
ggcuguagcaccucuccgc

SEQ ID NO: 2834520 - RNA, 19 nt, Artificial Sequence
  Description of Artificial Sequence: Synthetic oligonucleotide
uccaccucgcagguuacca

SEQ ID NO: 2834521 - RNA, 19 nt, Artificial Sequence
  Description of Artificial Sequence: Synthetic oligonucleotide
acaggggccgucccagcuc

SEQ ID NO: 2834522 - RNA, 19 nt, Artificial Sequence
  Description of Artificial Sequence: Synthetic oligonucleotide
accucuccgcgccacagca

SEQ ID NO: 2834523 - RNA, 19 nt, Artificial Sequence
  Description of Artificial Sequence: Synthetic oligonucleotide
acggcgagcaugccuccgg

SEQ ID NO: 2834524 - RNA, 19 nt, Artificial Sequence
  Description of Artificial Sequence: Synthetic oligonucleotide
uaggcgguacaguucuccu

SEQ ID NO: 2834525 - RNA, 19 nt, Artificial Sequence
  Description of Artificial Sequence: Synthetic oligonucleotide
cuccguguccaccucgcag

SEQ ID NO: 2834526 - RNA, 19 nt, Artificial Sequence
  Description of Artificial Sequence: Synthetic oligonucleotide
uuccgcacgcacuccgcag

SEQ ID NO: 2834527 - RNA, 19 nt, Artificial Sequence
  Description of Artificial Sequence: Synthetic oligonucleotide
uucggccugcuuccacagg

SEQ ID NO: 2834528 - RNA, 19 nt, Artificial Sequence
  Description of Artificial Sequence: Synthetic oligonucleotide
gcggauagcuuucaggguc

SEQ ID NO: 2834529 - RNA, 19 nt, Artificial Sequence
  Description of Artificial Sequence: Synthetic oligonucleotide
aggagagcccaucacccaa

SEQ ID NO: 2834530 - RNA, 19 nt, Artificial Sequence
  Description of Artificial Sequence: Synthetic oligonucleotide
cagucgaaggucgaucuuc

SEQ ID NO: 2834531 - RNA, 19 nt, Artificial Sequence
  Description of Artificial Sequence: Synthetic oligonucleotide
augcgcucauucagguucc

SEQ ID NO: 2834532 - RNA, 19 nt, Artificial Sequence
  Description of Artificial Sequence: Synthetic oligonucleotide
gauguacacccuggcgucc

SEQ ID NO: 2834533 - RNA, 19 nt, Artificial Sequence
  Description of Artificial Sequence: Synthetic oligonucleotide
gccagugcuagaugagccg

SEQ ID NO: 2834534 - RNA, 19 nt, Artificial Sequence
  Description of Artificial Sequence: Synthetic oligonucleotide
uccggggcguagcagcugu

SEQ ID NO: 2834535 - RNA, 19 nt, Artificial Sequence
  Description of Artificial Sequence: Synthetic oligonucleotide
cuccuugucggcguccacc

SEQ ID NO: 2834536 - RNA, 19 nt, Artificial Sequence
  Description of Artificial Sequence: Synthetic oligonucleotide
cuucggccugcuuccacag

SEQ ID NO: 2834537 - RNA, 19 nt, Artificial Sequence
  Description of Artificial Sequence: Synthetic oligonucleotide
accucgcagguuaccacgc

SEQ ID NO: 2834538 - RNA, 19 nt, Artificial Sequence
  Description of Artificial Sequence: Synthetic oligonucleotide
agcccaucacccaagggca

SEQ ID NO: 2834539 - RNA, 19 nt, Artificial Sequence
  Description of Artificial Sequence: Synthetic oligonucleotide
uagaugagccgcgccaggu

SEQ ID NO: 2834540 - RNA, 19 nt, Artificial Sequence
  Description of Artificial Sequence: Synthetic oligonucleotide
agcacucugagcacggcga

SEQ ID NO: 2834541 - RNA, 19 nt, Artificial Sequence
  Description of Artificial Sequence: Synthetic oligonucleotide
ucggcguccaccaccgcua

SEQ ID NO: 2834542 - RNA, 19 nt, Artificial Sequence
  Description of Artificial Sequence: Synthetic oligonucleotide
cuucgggaagcgccagugc

SEQ ID NO: 2834543 - RNA, 19 nt, Artificial Sequence
  Description of Artificial Sequence: Synthetic oligonucleotide
ugcagggcgggcugcaguc

SEQ ID NO: 2834544 - RNA, 19 nt, Artificial Sequence
  Description of Artificial Sequence: Synthetic oligonucleotide
aggcugauguacacccugg

SEQ ID NO: 2834545 - RNA, 19 nt, Artificial Sequence
  Description of Artificial Sequence: Synthetic oligonucleotide
gauagcuuucagggucagc

SEQ ID NO: 2834546 - RNA, 19 nt, Artificial Sequence
  Description of Artificial Sequence: Synthetic oligonucleotide
cucgcccgccgcuaggagc

SEQ ID NO: 2834547 - RNA, 19 nt, Artificial Sequence
  Description of Artificial Sequence: Synthetic oligonucleotide
gacagcgcucguaguaggc

SEQ ID NO: 2834548 - RNA, 19 nt, Artificial Sequence
  Description of Artificial Sequence: Synthetic oligonucleotide
cagaagcugggccugcuca

SEQ ID NO: 2834549 - RNA, 19 nt, Artificial Sequence
  Description of Artificial Sequence: Synthetic oligonucleotide
guguccaccucgcagguua

SEQ ID NO: 2834550 - RNA, 19 nt, Artificial Sequence
  Description of Artificial Sequence: Synthetic oligonucleotide
uuccacaggggccguccca

SEQ ID NO: 2834551 - RNA, 19 nt, Artificial Sequence
  Description of Artificial Sequence: Synthetic oligonucleotide
guaguaggcgguacaguuc

SEQ ID NO: 2834552 - RNA, 19 nt, Artificial Sequence
  Description of Artificial Sequence: Synthetic oligonucleotide
gggcguagcagcuguagac

SEQ ID NO: 2834553 - RNA, 19 nt, Artificial Sequence
  Description of Artificial Sequence: Synthetic oligonucleotide
ucgggaagcgccagugcua

SEQ ID NO: 2834554 - RNA, 19 nt, Artificial Sequence
  Description of Artificial Sequence: Synthetic oligonucleotide
uacacccuggcgucccgca

SEQ ID NO: 2834555 - RNA, 19 nt, Artificial Sequence
  Description of Artificial Sequence: Synthetic oligonucleotide
cacgcggccagcuucggga

SEQ ID NO: 2834556 - RNA, 19 nt, Artificial Sequence
  Description of Artificial Sequence: Synthetic oligonucleotide
agucgaaggucgaucuucu

SEQ ID NO: 2834557 - RNA, 19 nt, Artificial Sequence
  Description of Artificial Sequence: Synthetic oligonucleotide
cacccuggcgucccgcagg

SEQ ID NO: 2834558 - RNA, 19 nt, Artificial Sequence
  Description of Artificial Sequence: Synthetic oligonucleotide
gcucauucagguuccgcac

SEQ ID NO: 2834559 - RNA, 19 nt, Artificial Sequence
  Description of Artificial Sequence: Synthetic oligonucleotide
ucguaguaggcgguacagu

SEQ ID NO: 2834560 - RNA, 19 nt, Artificial Sequence
  Description of Artificial Sequence: Synthetic oligonucleotide
gcguagcagcuguagacag

SEQ ID NO: 2834561 - RNA, 19 nt, Artificial Sequence
  Description of Artificial Sequence: Synthetic oligonucleotide
aucuucuguuccacuucgg

SEQ ID NO: 2834562 - RNA, 19 nt, Artificial Sequence
  Description of Artificial Sequence: Synthetic oligonucleotide
caggggccgucccagcucc

SEQ ID NO: 2834563 - RNA, 19 nt, Artificial Sequence
  Description of Artificial Sequence: Synthetic oligonucleotide
cucacaggucaucauggaa

SEQ ID NO: 2834564 - RNA, 19 nt, Artificial Sequence
  Description of Artificial Sequence: Synthetic oligonucleotide
agucugcagggcgggcugc

SEQ ID NO: 2834565 - RNA, 19 nt, Artificial Sequence
  Description of Artificial Sequence: Synthetic oligonucleotide
gcucauccaaagucugcag

SEQ ID NO: 2834566 - RNA, 19 nt, Artificial Sequence
  Description of Artificial Sequence: Synthetic oligonucleotide
aucgaagguuccggccucg

SEQ ID NO: 2834567 - RNA, 19 nt, Artificial Sequence
  Description of Artificial Sequence: Synthetic oligonucleotide
uguccaccucgcagguuac

SEQ ID NO: 2834568 - RNA, 19 nt, Artificial Sequence
  Description of Artificial Sequence: Synthetic oligonucleotide
gcgagcaugccuccggggc

SEQ ID NO: 2834569 - RNA, 19 nt, Artificial Sequence
  Description of Artificial Sequence: Synthetic oligonucleotide
cuguagcaccucuccgcgc

SEQ ID NO: 2834570 - RNA, 19 nt, Artificial Sequence
  Description of Artificial Sequence: Synthetic oligonucleotide
caucgaagguuccggccuc

SEQ ID NO: 2834571 - RNA, 19 nt, Artificial Sequence
  Description of Artificial Sequence: Synthetic oligonucleotide
ggagcucauccaaagucug

SEQ ID NO: 2834572 - RNA, 19 nt, Artificial Sequence
  Description of Artificial Sequence: Synthetic oligonucleotide
cuuccacaggggccguccc

SEQ ID NO: 2834573 - RNA, 19 nt, Artificial Sequence
  Description of Artificial Sequence: Synthetic oligonucleotide
gugcuagaugagccgcgcc

SEQ ID NO: 2834574 - RNA, 19 nt, Artificial Sequence
  Description of Artificial Sequence: Synthetic oligonucleotide
caugccuccggggcguagc

SEQ ID NO: 2834575 - RNA, 19 nt, Artificial Sequence
  Description of Artificial Sequence: Synthetic oligonucleotide
uagcagcuguagacagcgc

SEQ ID NO: 2834576 - RNA, 19 nt, Artificial Sequence
  Description of Artificial Sequence: Synthetic oligonucleotide
ggcugauguacacccuggc

SEQ ID NO: 2834577 - RNA, 19 nt, Artificial Sequence
  Description of Artificial Sequence: Synthetic oligonucleotide
gcuagaugagccgcgccag

SEQ ID NO: 2834578 - RNA, 19 nt, Artificial Sequence
  Description of Artificial Sequence: Synthetic oligonucleotide
gucgaaggucgaucuucug

SEQ ID NO: 2834579 - RNA, 19 nt, Artificial Sequence
  Description of Artificial Sequence: Synthetic oligonucleotide
uguuccacuucggccugcu

SEQ ID NO: 2834580 - RNA, 19 nt, Artificial Sequence
  Description of Artificial Sequence: Synthetic oligonucleotide
agaugagccgcgccagguu

SEQ ID NO: 2834581 - RNA, 19 nt, Artificial Sequence
  Description of Artificial Sequence: Synthetic oligonucleotide
augagccgcgccagguugg

SEQ ID NO: 2834582 - RNA, 19 nt, Artificial Sequence
  Description of Artificial Sequence: Synthetic oligonucleotide
acacccuggcgucccgcag

SEQ ID NO: 2834583 - RNA, 19 nt, Artificial Sequence
  Description of Artificial Sequence: Synthetic oligonucleotide
caccaccgcuacaucgaag

SEQ ID NO: 2834584 - RNA, 19 nt, Artificial Sequence
  Description of Artificial Sequence: Synthetic oligonucleotide
guuggaccagaagcugggc

SEQ ID NO: 2834585 - RNA, 19 nt, Artificial Sequence
  Description of Artificial Sequence: Synthetic oligonucleotide
uccgcgccacagcacucug

SEQ ID NO: 2834586 - RNA, 19 nt, Artificial Sequence
  Description of Artificial Sequence: Synthetic oligonucleotide
cugcagucgaaggucgauc

SEQ ID NO: 2834587 - RNA, 19 nt, Artificial Sequence
  Description of Artificial Sequence: Synthetic oligonucleotide
agcgccagugcuagaugag

SEQ ID NO: 2834588 - RNA, 19 nt, Artificial Sequence
  Description of Artificial Sequence: Synthetic oligonucleotide
gaagcugggccugcucaca

SEQ ID NO: 2834589 - RNA, 19 nt, Artificial Sequence
  Description of Artificial Sequence: Synthetic oligonucleotide
ugcgcucauucagguuccg

SEQ ID NO: 2834590 - RNA, 19 nt, Artificial Sequence
  Description of Artificial Sequence: Synthetic oligonucleotide
agcuguagacagcgcucgu

SEQ ID NO: 2834591 - RNA, 19 nt, Artificial Sequence
  Description of Artificial Sequence: Synthetic oligonucleotide
ggcgggcugcagucgaagg

SEQ ID NO: 2834592 - RNA, 19 nt, Artificial Sequence
  Description of Artificial Sequence: Synthetic oligonucleotide
ccagugcuagaugagccgc

SEQ ID NO: 2834593 - RNA, 19 nt, Artificial Sequence
  Description of Artificial Sequence: Synthetic oligonucleotide
guuccgcacgcacuccgca

SEQ ID NO: 2834594 - RNA, 19 nt, Artificial Sequence
  Description of Artificial Sequence: Synthetic oligonucleotide
gcacuccgcagccuugucc

SEQ ID NO: 2834595 - RNA, 19 nt, Artificial Sequence
  Description of Artificial Sequence: Synthetic oligonucleotide
cacuccgcagccuuguccu

SEQ ID NO: 2834596 - RNA, 19 nt, Artificial Sequence
  Description of Artificial Sequence: Synthetic oligonucleotide
ucugcagggcgggcugcag

SEQ ID NO: 2834597 - RNA, 19 nt, Artificial Sequence
  Description of Artificial Sequence: Synthetic oligonucleotide
aaggccaaggagagcccau

SEQ ID NO: 2834598 - RNA, 19 nt, Artificial Sequence
  Description of Artificial Sequence: Synthetic oligonucleotide
gccgcuaggagcucaucca

SEQ ID NO: 2834599 - RNA, 19 nt, Artificial Sequence
  Description of Artificial Sequence: Synthetic oligonucleotide
ucuccuugucggcguccac

SEQ ID NO: 2834600 - RNA, 19 nt, Artificial Sequence
  Description of Artificial Sequence: Synthetic oligonucleotide
agguuccggccucgcccgc

SEQ ID NO: 2834601 - RNA, 19 nt, Artificial Sequence
  Description of Artificial Sequence: Synthetic oligonucleotide
aggcgguacaguucuccuu

SEQ ID NO: 2834602 - RNA, 19 nt, Artificial Sequence
  Description of Artificial Sequence: Synthetic oligonucleotide
cacucugagcacggcgagc

SEQ ID NO: 2834603 - RNA, 19 nt, Artificial Sequence
  Description of Artificial Sequence: Synthetic oligonucleotide
ccaaagucugcagggcggg

SEQ ID NO: 2834604 - RNA, 19 nt, Artificial Sequence
  Description of Artificial Sequence: Synthetic oligonucleotide
ccuggcgucccgcaggaug

SEQ ID NO: 2834605 - RNA, 19 nt, Artificial Sequence
  Description of Artificial Sequence: Synthetic oligonucleotide
agcuucgggaagcgccagu

SEQ ID NO: 2834606 - RNA, 19 nt, Artificial Sequence
  Description of Artificial Sequence: Synthetic oligonucleotide
ucgaagguuccggccucgc

SEQ ID NO: 2834607 - RNA, 19 nt, Artificial Sequence
  Description of Artificial Sequence: Synthetic oligonucleotide
gccuccggggcguagcagc

SEQ ID NO: 2834608 - RNA, 19 nt, Artificial Sequence
  Description of Artificial Sequence: Synthetic oligonucleotide
gccaaggagagcccaucac

SEQ ID NO: 2834609 - RNA, 19 nt, Artificial Sequence
  Description of Artificial Sequence: Synthetic oligonucleotide
ggagagcccaucacccaag

SEQ ID NO: 2834610 - RNA, 19 nt, Artificial Sequence
  Description of Artificial Sequence: Synthetic oligonucleotide
cuaggagcucauccaaagu

SEQ ID NO: 2834611 - RNA, 19 nt, Artificial Sequence
  Description of Artificial Sequence: Synthetic oligonucleotide
cacgcacuccgcagccuug

SEQ ID NO: 2834612 - RNA, 19 nt, Artificial Sequence
  Description of Artificial Sequence: Synthetic oligonucleotide
guucuccuugucggcgucc

SEQ ID NO: 2834613 - RNA, 19 nt, Artificial Sequence
  Description of Artificial Sequence: Synthetic oligonucleotide
ucuccgcgccacagcacuc

SEQ ID NO: 2834614 - RNA, 19 nt, Artificial Sequence
  Description of Artificial Sequence: Synthetic oligonucleotide
caccucuccgcgccacagc

SEQ ID NO: 2834615 - RNA, 19 nt, Artificial Sequence
  Description of Artificial Sequence: Synthetic oligonucleotide
guuuaggcuguagcaccuc

SEQ ID NO: 2834616 - RNA, 19 nt, Artificial Sequence
  Description of Artificial Sequence: Synthetic oligonucleotide
acccuggcgucccgcagga

SEQ ID NO: 2834617 - RNA, 19 nt, Artificial Sequence
  Description of Artificial Sequence: Synthetic oligonucleotide
ggcguagcagcuguagaca

SEQ ID NO: 2834618 - RNA, 19 nt, Artificial Sequence
  Description of Artificial Sequence: Synthetic oligonucleotide
cgccagugcuagaugagcc

SEQ ID NO: 2834619 - RNA, 19 nt, Artificial Sequence
  Description of Artificial Sequence: Synthetic oligonucleotide
aguaggcgguacaguucuc

SEQ ID NO: 2834620 - RNA, 19 nt, Artificial Sequence
  Description of Artificial Sequence: Synthetic oligonucleotide
augccuccggggcguagca

SEQ ID NO: 2834621 - RNA, 19 nt, Artificial Sequence
  Description of Artificial Sequence: Synthetic oligonucleotide
gaccagaagcugggccugc

SEQ ID NO: 2834622 - RNA, 19 nt, Artificial Sequence
  Description of Artificial Sequence: Synthetic oligonucleotide
caucacccaagggcaggag

SEQ ID NO: 2834623 - RNA, 19 nt, Artificial Sequence
  Description of Artificial Sequence: Synthetic oligonucleotide
gggcugcagucgaaggucg

SEQ ID NO: 2834624 - RNA, 19 nt, Artificial Sequence
  Description of Artificial Sequence: Synthetic oligonucleotide
agguuaccacgcggccagc

SEQ ID NO: 2834625 - RNA, 19 nt, Artificial Sequence
  Description of Artificial Sequence: Synthetic oligonucleotide
gggcaggaggcugauguac

SEQ ID NO: 2834626 - RNA, 19 nt, Artificial Sequence
  Description of Artificial Sequence: Synthetic oligonucleotide
ugagccgcgccagguugga

SEQ ID NO: 2834627 - RNA, 19 nt, Artificial Sequence
  Description of Artificial Sequence: Synthetic oligonucleotide
uggcgucccgcaggaugcg

SEQ ID NO: 2834628 - RNA, 19 nt, Artificial Sequence
  Description of Artificial Sequence: Synthetic oligonucleotide
gagcacggcgagcaugccu

SEQ ID NO: 2834629 - RNA, 19 nt, Artificial Sequence
  Description of Artificial Sequence: Synthetic oligonucleotide
agcaccucuccgcgccaca

SEQ ID NO: 2834630 - RNA, 19 nt, Artificial Sequence
  Description of Artificial Sequence: Synthetic oligonucleotide
ugagcacggcgagcaugcc

SEQ ID NO: 2834631 - RNA, 19 nt, Artificial Sequence
  Description of Artificial Sequence: Synthetic oligonucleotide
ccacagcacucugagcacg

SEQ ID NO: 2834632 - RNA, 19 nt, Artificial Sequence
  Description of Artificial Sequence: Synthetic oligonucleotide
gggcuccguguccaccucg

SEQ ID NO: 2834633 - RNA, 19 nt, Artificial Sequence
  Description of Artificial Sequence: Synthetic oligonucleotide
gucgaucuucuguuccacu

SEQ ID NO: 2834634 - RNA, 19 nt, Artificial Sequence
  Description of Artificial Sequence: Synthetic oligonucleotide
gcagcuguagacagcgcuc

SEQ ID NO: 2834635 - RNA, 19 nt, Artificial Sequence
  Description of Artificial Sequence: Synthetic oligonucleotide
ggucgaucuucuguuccac

SEQ ID NO: 2834636 - RNA, 19 nt, Artificial Sequence
  Description of Artificial Sequence: Synthetic oligonucleotide
gcucguaguaggcgguaca

SEQ ID NO: 2834637 - RNA, 19 nt, Artificial Sequence
  Description of Artificial Sequence: Synthetic oligonucleotide
gcuuccacaggggccgucc

SEQ ID NO: 2834638 - RNA, 19 nt, Artificial Sequence
  Description of Artificial Sequence: Synthetic oligonucleotide
gucggcguccaccaccgcu

SEQ ID NO: 2834639 - RNA, 19 nt, Artificial Sequence
  Description of Artificial Sequence: Synthetic oligonucleotide
ccagguuggaccagaagcu

SEQ ID NO: 2834640 - RNA, 19 nt, Artificial Sequence
  Description of Artificial Sequence: Synthetic oligonucleotide
gccacagcacucugagcac

SEQ ID NO: 2834641 - RNA, 19 nt, Artificial Sequence
  Description of Artificial Sequence: Synthetic oligonucleotide
ggaccagaagcugggccug

SEQ ID NO: 2834642 - RNA, 19 nt, Artificial Sequence
  Description of Artificial Sequence: Synthetic oligonucleotide
ggccaaggagagcccauca

SEQ ID NO: 2834643 - RNA, 19 nt, Artificial Sequence
  Description of Artificial Sequence: Synthetic oligonucleotide
cacggcgagcaugccuccg

SEQ ID NO: 2834644 - RNA, 19 nt, Artificial Sequence
  Description of Artificial Sequence: Synthetic oligonucleotide
gcucacaggucaucaugga

SEQ ID NO: 2834645 - RNA, 19 nt, Artificial Sequence
  Description of Artificial Sequence: Synthetic oligonucleotide
agccuuguccuuggguuua

SEQ ID NO: 2834646 - RNA, 19 nt, Artificial Sequence
  Description of Artificial Sequence: Synthetic oligonucleotide
cgagcaugccuccggggcg

SEQ ID NO: 2834647 - RNA, 19 nt, Artificial Sequence
  Description of Artificial Sequence: Synthetic oligonucleotide
cagguuccgcacgcacucc

SEQ ID NO: 2834648 - RNA, 19 nt, Artificial Sequence
  Description of Artificial Sequence: Synthetic oligonucleotide
cucuccgcgccacagcacu

SEQ ID NO: 2834649 - RNA, 19 nt, Artificial Sequence
  Description of Artificial Sequence: Synthetic oligonucleotide
cugggccugcucacagguc

SEQ ID NO: 2834650 - RNA, 19 nt, Artificial Sequence
  Description of Artificial Sequence: Synthetic oligonucleotide
agcgcucguaguaggcggu

SEQ ID NO: 2834651 - RNA, 19 nt, Artificial Sequence
  Description of Artificial Sequence: Synthetic oligonucleotide
accagaagcugggccugcu

SEQ ID NO: 2834652 - RNA, 19 nt, Artificial Sequence
  Description of Artificial Sequence: Synthetic oligonucleotide
ggauagcuuucagggucag

SEQ ID NO: 2834653 - RNA, 19 nt, Artificial Sequence
  Description of Artificial Sequence: Synthetic oligonucleotide
cgcgccacagcacucugag

SEQ ID NO: 2834654 - RNA, 19 nt, Artificial Sequence
  Description of Artificial Sequence: Synthetic oligonucleotide
guacacccuggcgucccgc

SEQ ID NO: 2834655 - RNA, 19 nt, Artificial Sequence
  Description of Artificial Sequence: Synthetic oligonucleotide
cgaucuucuguuccacuuc

SEQ ID NO: 2834656 - RNA, 19 nt, Artificial Sequence
  Description of Artificial Sequence: Synthetic oligonucleotide
uagcaccucuccgcgccac

SEQ ID NO: 2834657 - RNA, 19 nt, Artificial Sequence
  Description of Artificial Sequence: Synthetic oligonucleotide
ggcaggaggcugauguaca

SEQ ID NO: 2834658 - RNA, 19 nt, Artificial Sequence
  Description of Artificial Sequence: Synthetic oligonucleotide
guagcaccucuccgcgcca

SEQ ID NO: 2834659 - RNA, 19 nt, Artificial Sequence
  Description of Artificial Sequence: Synthetic oligonucleotide
acgcacuccgcagccuugu

SEQ ID NO: 2834660 - RNA, 19 nt, Artificial Sequence
  Description of Artificial Sequence: Synthetic oligonucleotide
gcgccagugcuagaugagc

SEQ ID NO: 2834661 - RNA, 19 nt, Artificial Sequence
  Description of Artificial Sequence: Synthetic oligonucleotide
ggggcguagcagcuguaga

SEQ ID NO: 2834662 - RNA, 19 nt, Artificial Sequence
  Description of Artificial Sequence: Synthetic oligonucleotide
ccuugcggauagcuuucag

SEQ ID NO: 2834663 - RNA, 19 nt, Artificial Sequence
  Description of Artificial Sequence: Synthetic oligonucleotide
cgccgcuaggagcucaucc

SEQ ID NO: 2834664 - RNA, 19 nt, Artificial Sequence
  Description of Artificial Sequence: Synthetic oligonucleotide
cauucagguuccgcacgca

SEQ ID NO: 2834665 - RNA, 19 nt, Artificial Sequence
  Description of Artificial Sequence: Synthetic oligonucleotide
ccucgcagguuaccacgcg

SEQ ID NO: 2834666 - RNA, 19 nt, Artificial Sequence
  Description of Artificial Sequence: Synthetic oligonucleotide
ccaccucgcagguuaccac

SEQ ID NO: 2834667 - RNA, 19 nt, Artificial Sequence
  Description of Artificial Sequence: Synthetic oligonucleotide
gggccgucccagcuccggg

SEQ ID NO: 2834668 - RNA, 19 nt, Artificial Sequence
  Description of Artificial Sequence: Synthetic oligonucleotide
cgcuacaucgaagguuccg

SEQ ID NO: 2834669 - RNA, 19 nt, Artificial Sequence
  Description of Artificial Sequence: Synthetic oligonucleotide
cuguuccacuucggccugc

SEQ ID NO: 2834670 - RNA, 19 nt, Artificial Sequence
  Description of Artificial Sequence: Synthetic oligonucleotide
guccaccucgcagguuacc

SEQ ID NO: 2834671 - RNA, 19 nt, Artificial Sequence
  Description of Artificial Sequence: Synthetic oligonucleotide
gcggccagcuucgggaagc

SEQ ID NO: 2834672 - RNA, 19 nt, Artificial Sequence
  Description of Artificial Sequence: Synthetic oligonucleotide
uuccggccucgcccgccgc

SEQ ID NO: 2834673 - RNA, 19 nt, Artificial Sequence
  Description of Artificial Sequence: Synthetic oligonucleotide
ccagcuucgggaagcgcca

SEQ ID NO: 2834674 - RNA, 19 nt, Artificial Sequence
  Description of Artificial Sequence: Synthetic oligonucleotide
gguuccgcacgcacuccgc

SEQ ID NO: 2834675 - RNA, 19 nt, Artificial Sequence
  Description of Artificial Sequence: Synthetic oligonucleotide
caguucuccuugucggcgu

SEQ ID NO: 2834676 - RNA, 19 nt, Artificial Sequence
  Description of Artificial Sequence: Synthetic oligonucleotide
gguuuaggcuguagcaccu

SEQ ID NO: 2834677 - RNA, 19 nt, Artificial Sequence
  Description of Artificial Sequence: Synthetic oligonucleotide
ggaagcgccagugcuagau

SEQ ID NO: 2834678 - RNA, 19 nt, Artificial Sequence
  Description of Artificial Sequence: Synthetic oligonucleotide
cagcuucgggaagcgccag

SEQ ID NO: 2834679 - RNA, 19 nt, Artificial Sequence
  Description of Artificial Sequence: Synthetic oligonucleotide
ccgcaggaugcgcucauuc

SEQ ID NO: 2834680 - RNA, 19 nt, Artificial Sequence
  Description of Artificial Sequence: Synthetic oligonucleotide
guuaccacgcggccagcuu

SEQ ID NO: 2834681 - RNA, 19 nt, Artificial Sequence
  Description of Artificial Sequence: Synthetic oligonucleotide
ggcuccguguccaccucgc

SEQ ID NO: 2834682 - RNA, 19 nt, Artificial Sequence
  Description of Artificial Sequence: Synthetic oligonucleotide
accacgcggccagcuucgg

SEQ ID NO: 2834683 - RNA, 19 nt, Artificial Sequence
  Description of Artificial Sequence: Synthetic oligonucleotide
gccugcucacaggucauca

SEQ ID NO: 2834684 - RNA, 19 nt, Artificial Sequence
  Description of Artificial Sequence: Synthetic oligonucleotide
ccccuugcggauagcuuuc

SEQ ID NO: 2834685 - RNA, 19 nt, Artificial Sequence
  Description of Artificial Sequence: Synthetic oligonucleotide
cgcagguuaccacgcggcc

SEQ ID NO: 2834686 - RNA, 19 nt, Artificial Sequence
  Description of Artificial Sequence: Synthetic oligonucleotide
gccgcgccagguuggacca

SEQ ID NO: 2834687 - RNA, 19 nt, Artificial Sequence
  Description of Artificial Sequence: Synthetic oligonucleotide
acuccgcagccuuguccuu

SEQ ID NO: 2834688 - RNA, 19 nt, Artificial Sequence
  Description of Artificial Sequence: Synthetic oligonucleotide
gagcaugccuccggggcgu

SEQ ID NO: 2834689 - RNA, 19 nt, Artificial Sequence
  Description of Artificial Sequence: Synthetic oligonucleotide
gcagggcgggcugcagucg

SEQ ID NO: 2834690 - RNA, 19 nt, Artificial Sequence
  Description of Artificial Sequence: Synthetic oligonucleotide
cgggaagcgccagugcuag

SEQ ID NO: 2834691 - RNA, 19 nt, Artificial Sequence
  Description of Artificial Sequence: Synthetic oligonucleotide
gcuguagacagcgcucgua

SEQ ID NO: 2834692 - RNA, 19 nt, Artificial Sequence
  Description of Artificial Sequence: Synthetic oligonucleotide
cccaagggcaggaggcuga

SEQ ID NO: 2834693 - RNA, 19 nt, Artificial Sequence
  Description of Artificial Sequence: Synthetic oligonucleotide
ggggccgucccagcuccgg

SEQ ID NO: 2834694 - RNA, 19 nt, Artificial Sequence
  Description of Artificial Sequence: Synthetic oligonucleotide
ugcuuccacaggggccguc

SEQ ID NO: 2834695 - RNA, 19 nt, Artificial Sequence
  Description of Artificial Sequence: Synthetic oligonucleotide
ccuuguccuuggguuuagg

SEQ ID NO: 2834696 - RNA, 19 nt, Artificial Sequence
  Description of Artificial Sequence: Synthetic oligonucleotide
cggauagcuuucaggguca

SEQ ID NO: 2834697 - RNA, 19 nt, Artificial Sequence
  Description of Artificial Sequence: Synthetic oligonucleotide
guccuuggguuuaggcugu

SEQ ID NO: 2834698 - RNA, 19 nt, Artificial Sequence
  Description of Artificial Sequence: Synthetic oligonucleotide
cacaggggccgucccagcu

SEQ ID NO: 2834699 - RNA, 19 nt, Artificial Sequence
  Description of Artificial Sequence: Synthetic oligonucleotide
caccgcuacaucgaagguu

SEQ ID NO: 2834700 - RNA, 19 nt, Artificial Sequence
  Description of Artificial Sequence: Synthetic oligonucleotide
ccgcacgcacuccgcagcc

SEQ ID NO: 2834701 - RNA, 19 nt, Artificial Sequence
  Description of Artificial Sequence: Synthetic oligonucleotide
cgcaggaugcgcucauuca

SEQ ID NO: 2834702 - RNA, 19 nt, Artificial Sequence
  Description of Artificial Sequence: Synthetic oligonucleotide
gggcgggcugcagucgaag

SEQ ID NO: 2834703 - RNA, 19 nt, Artificial Sequence
  Description of Artificial Sequence: Synthetic oligonucleotide
gguuccggccucgcccgcc

SEQ ID NO: 2834704 - RNA, 19 nt, Artificial Sequence
  Description of Artificial Sequence: Synthetic oligonucleotide
cuccggggcguagcagcug

SEQ ID NO: 2834705 - RNA, 19 nt, Artificial Sequence
  Description of Artificial Sequence: Synthetic oligonucleotide
gcgcucauucagguuccgc

SEQ ID NO: 2834706 - RNA, 19 nt, Artificial Sequence
  Description of Artificial Sequence: Synthetic oligonucleotide
ggccucgcccgccgcuagg

SEQ ID NO: 2834707 - RNA, 19 nt, Artificial Sequence
  Description of Artificial Sequence: Synthetic oligonucleotide
gcacggcgagcaugccucc

SEQ ID NO: 2834708 - RNA, 19 nt, Artificial Sequence
  Description of Artificial Sequence: Synthetic oligonucleotide
gucugcagggcgggcugca

SEQ ID NO: 2834709 - RNA, 19 nt, Artificial Sequence
  Description of Artificial Sequence: Synthetic oligonucleotide
gcgccacagcacucugagc

SEQ ID NO: 2834710 - RNA, 19 nt, Artificial Sequence
  Description of Artificial Sequence: Synthetic oligonucleotide
ccacgcggccagcuucggg

SEQ ID NO: 2834711 - RNA, 19 nt, Artificial Sequence
  Description of Artificial Sequence: Synthetic oligonucleotide
ccgcuacaucgaagguucc

SEQ ID NO: 2834712 - RNA, 19 nt, Artificial Sequence
  Description of Artificial Sequence: Synthetic oligonucleotide
cgggcugcagucgaagguc

SEQ ID NO: 2834713 - RNA, 19 nt, Artificial Sequence
  Description of Artificial Sequence: Synthetic oligonucleotide
uccuuggguuuaggcugua

SEQ ID NO: 2834714 - RNA, 19 nt, Artificial Sequence
  Description of Artificial Sequence: Synthetic oligonucleotide
cagccuuguccuuggguuu

SEQ ID NO: 2834715 - RNA, 19 nt, Artificial Sequence
  Description of Artificial Sequence: Synthetic oligonucleotide
gccuuguccuuggguuuag

SEQ ID NO: 2834716 - RNA, 19 nt, Artificial Sequence
  Description of Artificial Sequence: Synthetic oligonucleotide
gcgggcugcagucgaaggu

SEQ ID NO: 2834717 - RNA, 19 nt, Artificial Sequence
  Description of Artificial Sequence: Synthetic oligonucleotide
cgaaggucgaucuucuguu

SEQ ID NO: 2834718 - RNA, 19 nt, Artificial Sequence
  Description of Artificial Sequence: Synthetic oligonucleotide
ccucuccgcgccacagcac

SEQ ID NO: 2834719 - RNA, 19 nt, Artificial Sequence
  Description of Artificial Sequence: Synthetic oligonucleotide
gcguccaccaccgcuacau

SEQ ID NO: 2834720 - RNA, 19 nt, Artificial Sequence
  Description of Artificial Sequence: Synthetic oligonucleotide
gagccgcgccagguuggac

SEQ ID NO: 2834721 - RNA, 19 nt, Artificial Sequence
  Description of Artificial Sequence: Synthetic oligonucleotide
ccacaggggccgucccagc

SEQ ID NO: 2834722 - RNA, 19 nt, Artificial Sequence
  Description of Artificial Sequence: Synthetic oligonucleotide
ccgcuaggagcucauccaa

SEQ ID NO: 2834723 - RNA, 19 nt, Artificial Sequence
  Description of Artificial Sequence: Synthetic oligonucleotide
cggcgagcaugccuccggg

SEQ ID NO: 2834724 - RNA, 19 nt, Artificial Sequence
  Description of Artificial Sequence: Synthetic oligonucleotide
ggcgucccgcaggaugcgc

SEQ ID NO: 2834725 - RNA, 19 nt, Artificial Sequence
  Description of Artificial Sequence: Synthetic oligonucleotide
gguuaccacgcggccagcu

SEQ ID NO: 2834726 - RNA, 19 nt, Artificial Sequence
  Description of Artificial Sequence: Synthetic oligonucleotide
cgccagguuggaccagaag

SEQ ID NO: 2834727 - RNA, 19 nt, Artificial Sequence
  Description of Artificial Sequence: Synthetic oligonucleotide
aggggccgucccagcuccg

SEQ ID NO: 2834728 - RNA, 19 nt, Artificial Sequence
  Description of Artificial Sequence: Synthetic oligonucleotide
ccaucacccaagggcagga

SEQ ID NO: 2834729 - RNA, 19 nt, Artificial Sequence
  Description of Artificial Sequence: Synthetic oligonucleotide
gcuccguguccaccucgca

SEQ ID NO: 2834730 - RNA, 19 nt, Artificial Sequence
  Description of Artificial Sequence: Synthetic oligonucleotide
cgguacaguucuccuuguc

SEQ ID NO: 2834731 - RNA, 19 nt, Artificial Sequence
  Description of Artificial Sequence: Synthetic oligonucleotide
ggccagcuucgggaagcgc

SEQ ID NO: 2834732 - RNA, 19 nt, Artificial Sequence
  Description of Artificial Sequence: Synthetic oligonucleotide
cggggcguagcagcuguag

SEQ ID NO: 2834733 - RNA, 19 nt, Artificial Sequence
  Description of Artificial Sequence: Synthetic oligonucleotide
ggcugcagucgaaggucga

SEQ ID NO: 2834734 - RNA, 19 nt, Artificial Sequence
  Description of Artificial Sequence: Synthetic oligonucleotide
ggaugcgcucauucagguu

SEQ ID NO: 2834735 - RNA, 19 nt, Artificial Sequence
  Description of Artificial Sequence: Synthetic oligonucleotide
ggggcuccguguccaccuc

SEQ ID NO: 2834736 - RNA, 19 nt, Artificial Sequence
  Description of Artificial Sequence: Synthetic oligonucleotide
ccucgcccgccgcuaggag

SEQ ID NO: 2834737 - RNA, 19 nt, Artificial Sequence
  Description of Artificial Sequence: Synthetic oligonucleotide
cuccgcgccacagcacucu

SEQ ID NO: 2834738 - RNA, 19 nt, Artificial Sequence
  Description of Artificial Sequence: Synthetic oligonucleotide
agggcgggcugcagucgaa

SEQ ID NO: 2834739 - RNA, 19 nt, Artificial Sequence
  Description of Artificial Sequence: Synthetic oligonucleotide
cgucccgcaggaugcgcuc

SEQ ID NO: 2834740 - RNA, 19 nt, Artificial Sequence
  Description of Artificial Sequence: Synthetic oligonucleotide
gggaagcgccagugcuaga

SEQ ID NO: 2834741 - RNA, 19 nt, Artificial Sequence
  Description of Artificial Sequence: Synthetic oligonucleotide
gcaugccuccggggcguag

SEQ ID NO: 2834742 - RNA, 19 nt, Artificial Sequence
  Description of Artificial Sequence: Synthetic oligonucleotide
ggcguccaccaccgcuaca

SEQ ID NO: 2834743 - RNA, 19 nt, Artificial Sequence
  Description of Artificial Sequence: Synthetic oligonucleotide
cgcuaggagcucauccaaa

SEQ ID NO: 2834744 - RNA, 19 nt, Artificial Sequence
  Description of Artificial Sequence: Synthetic oligonucleotide
gcgguacaguucuccuugu

SEQ ID NO: 2834745 - RNA, 19 nt, Artificial Sequence
  Description of Artificial Sequence: Synthetic oligonucleotide
gcugcagucgaaggucgau

SEQ ID NO: 2834746 - RNA, 19 nt, Artificial Sequence
  Description of Artificial Sequence: Synthetic oligonucleotide
cgcucguaguaggcgguac

SEQ ID NO: 2834747 - RNA, 19 nt, Artificial Sequence
  Description of Artificial Sequence: Synthetic oligonucleotide
ccaccaccgcuacaucgaa

SEQ ID NO: 2834748 - RNA, 19 nt, Artificial Sequence
  Description of Artificial Sequence: Synthetic oligonucleotide
gcagucgaaggucgaucuu

SEQ ID NO: 2834749 - RNA, 19 nt, Artificial Sequence
  Description of Artificial Sequence: Synthetic oligonucleotide
gcacgcacuccgcagccuu

SEQ ID NO: 2834750 - RNA, 19 nt, Artificial Sequence
  Description of Artificial Sequence: Synthetic oligonucleotide
gccucgcccgccgcuagga

SEQ ID NO: 2834751 - RNA, 19 nt, Artificial Sequence
  Description of Artificial Sequence: Synthetic oligonucleotide
ccgcagccuuguccuuggg

SEQ ID NO: 2834752 - RNA, 19 nt, Artificial Sequence
  Description of Artificial Sequence: Synthetic oligonucleotide
guuccacuucggccugcuu

SEQ ID NO: 2834753 - RNA, 19 nt, Artificial Sequence
  Description of Artificial Sequence: Synthetic oligonucleotide
ccugcucacaggucaucau

SEQ ID NO: 2834754 - RNA, 19 nt, Artificial Sequence
  Description of Artificial Sequence: Synthetic oligonucleotide
agcaugccuccggggcgua

SEQ ID NO: 2834755 - RNA, 19 nt, Artificial Sequence
  Description of Artificial Sequence: Synthetic oligonucleotide
cguccaccaccgcuacauc

SEQ ID NO: 2834756 - RNA, 19 nt, Artificial Sequence
  Description of Artificial Sequence: Synthetic oligonucleotide
cucugagcacggcgagcau

SEQ ID NO: 2834757 - RNA, 19 nt, Artificial Sequence
  Description of Artificial Sequence: Synthetic oligonucleotide
cggccagcuucgggaagcg

SEQ ID NO: 2834758 - RNA, 19 nt, Artificial Sequence
  Description of Artificial Sequence: Synthetic oligonucleotide
ccgcgccacagcacucuga

SEQ ID NO: 2834759 - RNA, 19 nt, Artificial Sequence
  Description of Artificial Sequence: Synthetic oligonucleotide
cccuugcggauagcuuuca

SEQ ID NO: 2834760 - RNA, 19 nt, Artificial Sequence
  Description of Artificial Sequence: Synthetic oligonucleotide
ccaccgcuacaucgaaggu

SEQ ID NO: 2834761 - RNA, 19 nt, Artificial Sequence
  Description of Artificial Sequence: Synthetic oligonucleotide
gcgucccgcaggaugcgcu

SEQ ID NO: 2834762 - RNA, 19 nt, Artificial Sequence
  Description of Artificial Sequence: Synthetic oligonucleotide
cggcguccaccaccgcuac

SEQ ID NO: 2834763 - RNA, 19 nt, Artificial Sequence
  Description of Artificial Sequence: Synthetic oligonucleotide
ccuccggggcguagcagcu

SEQ ID NO: 2834764 - RNA, 19 nt, Artificial Sequence
  Description of Artificial Sequence: Synthetic oligonucleotide
cgcacuccgcagccuuguc

SEQ ID NO: 2834765 - RNA, 19 nt, Artificial Sequence
  Description of Artificial Sequence: Synthetic oligonucleotide
cgcagccuuguccuugggu

SEQ ID NO: 2834766 - RNA, 19 nt, Artificial Sequence
  Description of Artificial Sequence: Synthetic oligonucleotide
gcgcucguaguaggcggua

SEQ ID NO: 2834767 - RNA, 19 nt, Artificial Sequence
  Description of Artificial Sequence: Synthetic oligonucleotide
gcgccagguuggaccagaa

SEQ ID NO: 2834768 - RNA, 19 nt, Artificial Sequence
  Description of Artificial Sequence: Synthetic oligonucleotide
gcccgccgcuaggagcuca

SEQ ID NO: 2834769 - RNA, 19 nt, Artificial Sequence
  Description of Artificial Sequence: Synthetic oligonucleotide
ccguguccaccucgcaggu

SEQ ID NO: 2834770 - RNA, 19 nt, Artificial Sequence
  Description of Artificial Sequence: Synthetic oligonucleotide
cgcgccagguuggaccaga

SEQ ID NO: 2834771 - RNA, 19 nt, Artificial Sequence
  Description of Artificial Sequence: Synthetic oligonucleotide
cggccucgcccgccgcuag

SEQ ID NO: 2834772 - RNA, 19 nt, Artificial Sequence
  Description of Artificial Sequence: Synthetic oligonucleotide
cugcuuccacaggggccgu

SEQ ID NO: 2834773 - RNA, 19 nt, Artificial Sequence
  Description of Artificial Sequence: Synthetic oligonucleotide
ccgcgccagguuggaccag

SEQ ID NO: 2834774 - RNA, 19 nt, Artificial Sequence
  Description of Artificial Sequence: Synthetic oligonucleotide
ccgccgcuaggagcucauc

SEQ ID NO: 2834775 - RNA, 19 nt, Artificial Sequence
  Description of Artificial Sequence: Synthetic oligonucleotide
ccaagggcaggaggcugau

SEQ ID NO: 2834776 - RNA, 19 nt, Artificial Sequence
  Description of Artificial Sequence: Synthetic oligonucleotide
ccggggcguagcagcugua

SEQ ID NO: 2834777 - RNA, 19 nt, Artificial Sequence
  Description of Artificial Sequence: Synthetic oligonucleotide
cccgccgcuaggagcucau

SEQ ID NO: 2834778 - RNA, 19 nt, Artificial Sequence
  Description of Artificial Sequence: Synthetic oligonucleotide
ccggccucgcccgccgcua

SEQ ID NO: 2834779 - RNA, 19 nt, Artificial Sequence
  Description of Artificial Sequence: Synthetic oligonucleotide
cgcacgcacuccgcagccu

SEQ ID NO: 2834780 - RNA, 19 nt, Artificial Sequence
  Description of Artificial Sequence: Synthetic oligonucleotide
cccgcaggaugcgcucauu

SEQ ID NO: 2834781 - RNA, 19 nt, Artificial Sequence
  Description of Artificial Sequence: Synthetic oligonucleotide
cguguccaccucgcagguu

SEQ ID NO: 2834782 - RNA, 19 nt, Artificial Sequence
  Description of Artificial Sequence: Synthetic oligonucleotide
cgcccgccgcuaggagcuc

SEQ ID NO: 2834783 - RNA, 19 nt, Artificial Sequence
  Description of Artificial Sequence: Synthetic oligonucleotide
cccuggcgucccgcaggau

SEQ ID NO: 2834784 - RNA, 19 nt, Artificial Sequence
  Description of Artificial Sequence: Synthetic oligonucleotide
aauauaauucacuagaagc

SEQ ID NO: 2834785 - RNA, 19 nt, Artificial Sequence
  Description of Artificial Sequence: Synthetic oligonucleotide
ucuauaauaacuuaaauaa

SEQ ID NO: 2834786 - RNA, 19 nt, Artificial Sequence
  Description of Artificial Sequence: Synthetic oligonucleotide
uaaacaaagaacaagcaag

SEQ ID NO: 2834787 - RNA, 19 nt, Artificial Sequence
  Description of Artificial Sequence: Synthetic oligonucleotide
aauuaaauaauguaagagu

SEQ ID NO: 2834788 - RNA, 19 nt, Artificial Sequence
  Description of Artificial Sequence: Synthetic oligonucleotide
agacuagaaaauuaaaacc

SEQ ID NO: 2834789 - RNA, 19 nt, Artificial Sequence
  Description of Artificial Sequence: Synthetic oligonucleotide
aaugacacauguuacaauc

SEQ ID NO: 2834790 - RNA, 19 nt, Artificial Sequence
  Description of Artificial Sequence: Synthetic oligonucleotide
aauaacuuaaauaaacuuc

SEQ ID NO: 2834791 - RNA, 19 nt, Artificial Sequence
  Description of Artificial Sequence: Synthetic oligonucleotide
uauaauaacuuaaauaaac

SEQ ID NO: 2834792 - RNA, 19 nt, Artificial Sequence
  Description of Artificial Sequence: Synthetic oligonucleotide
aagaauauaauucacuaga

SEQ ID NO: 2834793 - RNA, 19 nt, Artificial Sequence
  Description of Artificial Sequence: Synthetic oligonucleotide
ucuuaaacaaagaacaagc

SEQ ID NO: 2834794 - RNA, 19 nt, Artificial Sequence
  Description of Artificial Sequence: Synthetic oligonucleotide
auaacuuaaauaaacuucc

SEQ ID NO: 2834795 - RNA, 19 nt, Artificial Sequence
  Description of Artificial Sequence: Synthetic oligonucleotide
aucuaauuaauuuacaugu

SEQ ID NO: 2834796 - RNA, 19 nt, Artificial Sequence
  Description of Artificial Sequence: Synthetic oligonucleotide
acauguuacaaucuuaaac

SEQ ID NO: 2834797 - RNA, 19 nt, Artificial Sequence
  Description of Artificial Sequence: Synthetic oligonucleotide
uuaauuaauuaaauaaugu

SEQ ID NO: 2834798 - RNA, 19 nt, Artificial Sequence
  Description of Artificial Sequence: Synthetic oligonucleotide
aagaugauaacauaacagu

SEQ ID NO: 2834799 - RNA, 19 nt, Artificial Sequence
  Description of Artificial Sequence: Synthetic oligonucleotide
uaauuaaauaauguaagag

SEQ ID NO: 2834800 - RNA, 19 nt, Artificial Sequence
  Description of Artificial Sequence: Synthetic oligonucleotide
ucucccaucaaacauuugg

SEQ ID NO: 2834801 - RNA, 19 nt, Artificial Sequence
  Description of Artificial Sequence: Synthetic oligonucleotide
aauuaauuaaauaauguaa

SEQ ID NO: 2834802 - RNA, 19 nt, Artificial Sequence
  Description of Artificial Sequence: Synthetic oligonucleotide
aagcauaugaacucaucac

SEQ ID NO: 2834803 - RNA, 19 nt, Artificial Sequence
  Description of Artificial Sequence: Synthetic oligonucleotide
uuuguuuggaagaugauaa

SEQ ID NO: 2834804 - RNA, 19 nt, Artificial Sequence
  Description of Artificial Sequence: Synthetic oligonucleotide
uagacuagaaaauuaaaac

SEQ ID NO: 2834805 - RNA, 19 nt, Artificial Sequence
  Description of Artificial Sequence: Synthetic oligonucleotide
uguuuaauuugccaaguag

SEQ ID NO: 2834806 - RNA, 19 nt, Artificial Sequence
  Description of Artificial Sequence: Synthetic oligonucleotide
auuaauuuacauguggaac

SEQ ID NO: 2834807 - RNA, 19 nt, Artificial Sequence
  Description of Artificial Sequence: Synthetic oligonucleotide
uuaauuuacauguggaacu

SEQ ID NO: 2834808 - RNA, 19 nt, Artificial Sequence
  Description of Artificial Sequence: Synthetic oligonucleotide
auuaauuaaauaauguaag

SEQ ID NO: 2834809 - RNA, 19 nt, Artificial Sequence
  Description of Artificial Sequence: Synthetic oligonucleotide
cuaauuaauuuacaugugg

SEQ ID NO: 2834810 - RNA, 19 nt, Artificial Sequence
  Description of Artificial Sequence: Synthetic oligonucleotide
aauguaagaguauauguaa

SEQ ID NO: 2834811 - RNA, 19 nt, Artificial Sequence
  Description of Artificial Sequence: Synthetic oligonucleotide
acuacaucuuguuugauag

SEQ ID NO: 2834812 - RNA, 19 nt, Artificial Sequence
  Description of Artificial Sequence: Synthetic oligonucleotide
auaugaacucaucacauuc

SEQ ID NO: 2834813 - RNA, 19 nt, Artificial Sequence
  Description of Artificial Sequence: Synthetic oligonucleotide
caaucuuaaacaaagaaca

SEQ ID NO: 2834814 - RNA, 19 nt, Artificial Sequence
  Description of Artificial Sequence: Synthetic oligonucleotide
acaguagaaaugucaaugc

SEQ ID NO: 2834815 - RNA, 19 nt, Artificial Sequence
  Description of Artificial Sequence: Synthetic oligonucleotide
aauaauguaagaguauaug

SEQ ID NO: 2834816 - RNA, 19 nt, Artificial Sequence
  Description of Artificial Sequence: Synthetic oligonucleotide
cauuuuaucuuccugaaac

SEQ ID NO: 2834817 - RNA, 19 nt, Artificial Sequence
  Description of Artificial Sequence: Synthetic oligonucleotide
guuacaaucuuaaacaaag

SEQ ID NO: 2834818 - RNA, 19 nt, Artificial Sequence
  Description of Artificial Sequence: Synthetic oligonucleotide
uaacauaacaguagaaaug

SEQ ID NO: 2834819 - RNA, 19 nt, Artificial Sequence
  Description of Artificial Sequence: Synthetic oligonucleotide
uuugaauaacaucuggaug

SEQ ID NO: 2834820 - RNA, 19 nt, Artificial Sequence
  Description of Artificial Sequence: Synthetic oligonucleotide
uuaauuaaauaauguaaga

SEQ ID NO: 2834821 - RNA, 19 nt, Artificial Sequence
  Description of Artificial Sequence: Synthetic oligonucleotide
uaauuaauuuacaugugga

SEQ ID NO: 2834822 - RNA, 19 nt, Artificial Sequence
  Description of Artificial Sequence: Synthetic oligonucleotide
gaagaugauaacauaacag

SEQ ID NO: 2834823 - RNA, 19 nt, Artificial Sequence
  Description of Artificial Sequence: Synthetic oligonucleotide
aacauaacaguagaaaugu

SEQ ID NO: 2834824 - RNA, 19 nt, Artificial Sequence
  Description of Artificial Sequence: Synthetic oligonucleotide
uuuaauuugccaaguagac

SEQ ID NO: 2834825 - RNA, 19 nt, Artificial Sequence
  Description of Artificial Sequence: Synthetic oligonucleotide
auuugucuaaccuacaaga

SEQ ID NO: 2834826 - RNA, 19 nt, Artificial Sequence
  Description of Artificial Sequence: Synthetic oligonucleotide
acaaucuuaaacaaagaac

SEQ ID NO: 2834827 - RNA, 19 nt, Artificial Sequence
  Description of Artificial Sequence: Synthetic oligonucleotide
auaauguaagaguauaugu

SEQ ID NO: 2834828 - RNA, 19 nt, Artificial Sequence
  Description of Artificial Sequence: Synthetic oligonucleotide
acaagcaagaauauaauuc

SEQ ID NO: 2834829 - RNA, 19 nt, Artificial Sequence
  Description of Artificial Sequence: Synthetic oligonucleotide
gauagcuuuacucugcaug

SEQ ID NO: 2834830 - RNA, 19 nt, Artificial Sequence
  Description of Artificial Sequence: Synthetic oligonucleotide
aaaguuaauuaauuaaaua

SEQ ID NO: 2834831 - RNA, 19 nt, Artificial Sequence
  Description of Artificial Sequence: Synthetic oligonucleotide
uaauuaauuaaauaaugua

SEQ ID NO: 2834832 - RNA, 19 nt, Artificial Sequence
  Description of Artificial Sequence: Synthetic oligonucleotide
uacauguggaacuacaucu

SEQ ID NO: 2834833 - RNA, 19 nt, Artificial Sequence
  Description of Artificial Sequence: Synthetic oligonucleotide
uuaaacaaagaacaagcaa

SEQ ID NO: 2834834 - RNA, 19 nt, Artificial Sequence
  Description of Artificial Sequence: Synthetic oligonucleotide
acuagaagcauaugaacuc

SEQ ID NO: 2834835 - RNA, 19 nt, Artificial Sequence
  Description of Artificial Sequence: Synthetic oligonucleotide
gaugauaacauaacaguag

SEQ ID NO: 2834836 - RNA, 19 nt, Artificial Sequence
  Description of Artificial Sequence: Synthetic oligonucleotide
uuuuguuuaauuugccaag

SEQ ID NO: 2834837 - RNA, 19 nt, Artificial Sequence
  Description of Artificial Sequence: Synthetic oligonucleotide
cauguuacaaucuuaaaca

SEQ ID NO: 2834838 - RNA, 19 nt, Artificial Sequence
  Description of Artificial Sequence: Synthetic oligonucleotide
uaauuugccaaguagacua

SEQ ID NO: 2834839 - RNA, 19 nt, Artificial Sequence
  Description of Artificial Sequence: Synthetic oligonucleotide
gaauauaauucacuagaag

SEQ ID NO: 2834840 - RNA, 19 nt, Artificial Sequence
  Description of Artificial Sequence: Synthetic oligonucleotide
uauauguaagucuauaaua

SEQ ID NO: 2834841 - RNA, 19 nt, Artificial Sequence
  Description of Artificial Sequence: Synthetic oligonucleotide
aauuaauuuacauguggaa

SEQ ID NO: 2834842 - RNA, 19 nt, Artificial Sequence
  Description of Artificial Sequence: Synthetic oligonucleotide
uggaacuacaucuuguuug

SEQ ID NO: 2834843 - RNA, 19 nt, Artificial Sequence
  Description of Artificial Sequence: Synthetic oligonucleotide
uguuugauagcuuuacucu

SEQ ID NO: 2834844 - RNA, 19 nt, Artificial Sequence
  Description of Artificial Sequence: Synthetic oligonucleotide
uacaaucuuaaacaaagaa

SEQ ID NO: 2834845 - RNA, 19 nt, Artificial Sequence
  Description of Artificial Sequence: Synthetic oligonucleotide
acuuaaauaaacuuccaaa

SEQ ID NO: 2834846 - RNA, 19 nt, Artificial Sequence
  Description of Artificial Sequence: Synthetic oligonucleotide
ucuuccugaaacaaaagaa

SEQ ID NO: 2834847 - RNA, 19 nt, Artificial Sequence
  Description of Artificial Sequence: Synthetic oligonucleotide
auaacauaacaguagaaau

SEQ ID NO: 2834848 - RNA, 19 nt, Artificial Sequence
  Description of Artificial Sequence: Synthetic oligonucleotide
accuacaagacuuuggaug

SEQ ID NO: 2834849 - RNA, 19 nt, Artificial Sequence
  Description of Artificial Sequence: Synthetic oligonucleotide
aacuugguauguuuuaacu

SEQ ID NO: 2834850 - RNA, 19 nt, Artificial Sequence
  Description of Artificial Sequence: Synthetic oligonucleotide
ucaaacauuuggauggcgc

SEQ ID NO: 2834851 - RNA, 19 nt, Artificial Sequence
  Description of Artificial Sequence: Synthetic oligonucleotide
uaagaguauauguaagucu

SEQ ID NO: 2834852 - RNA, 19 nt, Artificial Sequence
  Description of Artificial Sequence: Synthetic oligonucleotide
uuuugaauaacaucuggau

SEQ ID NO: 2834853 - RNA, 19 nt, Artificial Sequence
  Description of Artificial Sequence: Synthetic oligonucleotide
ucaacaucuaauuaauuua

SEQ ID NO: 2834854 - RNA, 19 nt, Artificial Sequence
  Description of Artificial Sequence: Synthetic oligonucleotide
uuccugaaacaaaagaaca

SEQ ID NO: 2834855 - RNA, 19 nt, Artificial Sequence
  Description of Artificial Sequence: Synthetic oligonucleotide
gacuagaaaauuaaaacca

SEQ ID NO: 2834856 - RNA, 19 nt, Artificial Sequence
  Description of Artificial Sequence: Synthetic oligonucleotide
caucuaauuaauuuacaug

SEQ ID NO: 2834857 - RNA, 19 nt, Artificial Sequence
  Description of Artificial Sequence: Synthetic oligonucleotide
uaauguaagaguauaugua

SEQ ID NO: 2834858 - RNA, 19 nt, Artificial Sequence
  Description of Artificial Sequence: Synthetic oligonucleotide
caaagaacaagcaagaaua

SEQ ID NO: 2834859 - RNA, 19 nt, Artificial Sequence
  Description of Artificial Sequence: Synthetic oligonucleotide
auucacuagaagcauauga

SEQ ID NO: 2834860 - RNA, 19 nt, Artificial Sequence
  Description of Artificial Sequence: Synthetic oligonucleotide
aaauugauggcagaucuca

SEQ ID NO: 2834861 - RNA, 19 nt, Artificial Sequence
  Description of Artificial Sequence: Synthetic oligonucleotide
ucuaauuaauuuacaugug

SEQ ID NO: 2834862 - RNA, 19 nt, Artificial Sequence
  Description of Artificial Sequence: Synthetic oligonucleotide
uuugauagcuuuacucugc

SEQ ID NO: 2834863 - RNA, 19 nt, Artificial Sequence
  Description of Artificial Sequence: Synthetic oligonucleotide
aagugguuuuguuuggaag

SEQ ID NO: 2834864 - RNA, 19 nt, Artificial Sequence
  Description of Artificial Sequence: Synthetic oligonucleotide
aauaacaucuggaugcucu

SEQ ID NO: 2834865 - RNA, 19 nt, Artificial Sequence
  Description of Artificial Sequence: Synthetic oligonucleotide
uuggaagaugauaacauaa

SEQ ID NO: 2834866 - RNA, 19 nt, Artificial Sequence
  Description of Artificial Sequence: Synthetic oligonucleotide
uaauaacuuaaauaaacuu

SEQ ID NO: 2834867 - RNA, 19 nt, Artificial Sequence
  Description of Artificial Sequence: Synthetic oligonucleotide
uaaccuacaagacuuugga

SEQ ID NO: 2834868 - RNA, 19 nt, Artificial Sequence
  Description of Artificial Sequence: Synthetic oligonucleotide
uguaagaguauauguaagu

SEQ ID NO: 2834869 - RNA, 19 nt, Artificial Sequence
  Description of Artificial Sequence: Synthetic oligonucleotide
uuaacuaugauuccuccuu

SEQ ID NO: 2834870 - RNA, 19 nt, Artificial Sequence
  Description of Artificial Sequence: Synthetic oligonucleotide
cuuaaauaaacuuccaaaa

SEQ ID NO: 2834871 - RNA, 19 nt, Artificial Sequence
  Description of Artificial Sequence: Synthetic oligonucleotide
uucacuagaagcauaugaa

SEQ ID NO: 2834872 - RNA, 19 nt, Artificial Sequence
  Description of Artificial Sequence: Synthetic oligonucleotide
aguaaaugacacauguuac

SEQ ID NO: 2834873 - RNA, 19 nt, Artificial Sequence
  Description of Artificial Sequence: Synthetic oligonucleotide
aacuuaaauaaacuuccaa

SEQ ID NO: 2834874 - RNA, 19 nt, Artificial Sequence
  Description of Artificial Sequence: Synthetic oligonucleotide
cuuccugaaacaaaagaac

SEQ ID NO: 2834875 - RNA, 19 nt, Artificial Sequence
  Description of Artificial Sequence: Synthetic oligonucleotide
aaaaguuaauuaauuaaau

SEQ ID NO: 2834876 - RNA, 19 nt, Artificial Sequence
  Description of Artificial Sequence: Synthetic oligonucleotide
ugucuaaccuacaagacuu

SEQ ID NO: 2834877 - RNA, 19 nt, Artificial Sequence
  Description of Artificial Sequence: Synthetic oligonucleotide
auauaauucacuagaagca

SEQ ID NO: 2834878 - RNA, 19 nt, Artificial Sequence
  Description of Artificial Sequence: Synthetic oligonucleotide
ugccaaguagacuagaaaa

SEQ ID NO: 2834879 - RNA, 19 nt, Artificial Sequence
  Description of Artificial Sequence: Synthetic oligonucleotide
gaagcauaugaacucauca

SEQ ID NO: 2834880 - RNA, 19 nt, Artificial Sequence
  Description of Artificial Sequence: Synthetic oligonucleotide
caagaauauaauucacuag

SEQ ID NO: 2834881 - RNA, 19 nt, Artificial Sequence
  Description of Artificial Sequence: Synthetic oligonucleotide
acugauacaucucccauca

SEQ ID NO: 2834882 - RNA, 19 nt, Artificial Sequence
  Description of Artificial Sequence: Synthetic oligonucleotide
uuuuaacuaugauuccucc

SEQ ID NO: 2834883 - RNA, 19 nt, Artificial Sequence
  Description of Artificial Sequence: Synthetic oligonucleotide
auuaaauaauguaagagua

SEQ ID NO: 2834884 - RNA, 19 nt, Artificial Sequence
  Description of Artificial Sequence: Synthetic oligonucleotide
aaugucaaugccucacuga

SEQ ID NO: 2834885 - RNA, 19 nt, Artificial Sequence
  Description of Artificial Sequence: Synthetic oligonucleotide
agaaaugucaaugccucac

SEQ ID NO: 2834886 - RNA, 19 nt, Artificial Sequence
  Description of Artificial Sequence: Synthetic oligonucleotide
caacaucuaauuaauuuac

SEQ ID NO: 2834887 - RNA, 19 nt, Artificial Sequence
  Description of Artificial Sequence: Synthetic oligonucleotide
uguuuuguuuaauuugcca

SEQ ID NO: 2834888 - RNA, 19 nt, Artificial Sequence
  Description of Artificial Sequence: Synthetic oligonucleotide
aaaugucaaugccucacug

SEQ ID NO: 2834889 - RNA, 19 nt, Artificial Sequence
  Description of Artificial Sequence: Synthetic oligonucleotide
augauaacauaacaguaga

SEQ ID NO: 2834890 - RNA, 19 nt, Artificial Sequence
  Description of Artificial Sequence: Synthetic oligonucleotide
uuguuugauagcuuuacuc

SEQ ID NO: 2834891 - RNA, 19 nt, Artificial Sequence
  Description of Artificial Sequence: Synthetic oligonucleotide
agugguuuuguuuggaaga

SEQ ID NO: 2834892 - RNA, 19 nt, Artificial Sequence
  Description of Artificial Sequence: Synthetic oligonucleotide
cauaacaguagaaauguca

SEQ ID NO: 2834893 - RNA, 19 nt, Artificial Sequence
  Description of Artificial Sequence: Synthetic oligonucleotide
auguuuuaacuaugauucc

SEQ ID NO: 2834894 - RNA, 19 nt, Artificial Sequence
  Description of Artificial Sequence: Synthetic oligonucleotide
gauaacauaacaguagaaa

SEQ ID NO: 2834895 - RNA, 19 nt, Artificial Sequence
  Description of Artificial Sequence: Synthetic oligonucleotide
acaaagaacaagcaagaau

SEQ ID NO: 2834896 - RNA, 19 nt, Artificial Sequence
  Description of Artificial Sequence: Synthetic oligonucleotide
uuaugagucacucuugcuu

SEQ ID NO: 2834897 - RNA, 19 nt, Artificial Sequence
  Description of Artificial Sequence: Synthetic oligonucleotide
cuaaccuacaagacuuugg

SEQ ID NO: 2834898 - RNA, 19 nt, Artificial Sequence
  Description of Artificial Sequence: Synthetic oligonucleotide
ugauacaucucccaucaaa

SEQ ID NO: 2834899 - RNA, 19 nt, Artificial Sequence
  Description of Artificial Sequence: Synthetic oligonucleotide
agcauaugaacucaucaca

SEQ ID NO: 2834900 - RNA, 19 nt, Artificial Sequence
  Description of Artificial Sequence: Synthetic oligonucleotide
gucaaugccucacugauac

SEQ ID NO: 2834901 - RNA, 19 nt, Artificial Sequence
  Description of Artificial Sequence: Synthetic oligonucleotide
uugucuaaccuacaagacu

SEQ ID NO: 2834902 - RNA, 19 nt, Artificial Sequence
  Description of Artificial Sequence: Synthetic oligonucleotide
cuugcuuuugaauaacauc

SEQ ID NO: 2834903 - RNA, 19 nt, Artificial Sequence
  Description of Artificial Sequence: Synthetic oligonucleotide
uaaauaauguaagaguaua

SEQ ID NO: 2834904 - RNA, 19 nt, Artificial Sequence
  Description of Artificial Sequence: Synthetic oligonucleotide
uuugucuaaccuacaagac

SEQ ID NO: 2834905 - RNA, 19 nt, Artificial Sequence
  Description of Artificial Sequence: Synthetic oligonucleotide
caagcaagaauauaauuca

SEQ ID NO: 2834906 - RNA, 19 nt, Artificial Sequence
  Description of Artificial Sequence: Synthetic oligonucleotide
uaugauuccuccuuguuuu

SEQ ID NO: 2834907 - RNA, 19 nt, Artificial Sequence
  Description of Artificial Sequence: Synthetic oligonucleotide
aucuuaaacaaagaacaag

SEQ ID NO: 2834908 - RNA, 19 nt, Artificial Sequence
  Description of Artificial Sequence: Synthetic oligonucleotide
agaacaagcaagaauauaa

SEQ ID NO: 2834909 - RNA, 19 nt, Artificial Sequence
  Description of Artificial Sequence: Synthetic oligonucleotide
auaauaacuuaaauaaacu

SEQ ID NO: 2834910 - RNA, 19 nt, Artificial Sequence
  Description of Artificial Sequence: Synthetic oligonucleotide
uaugaacucaucacauucu

SEQ ID NO: 2834911 - RNA, 19 nt, Artificial Sequence
  Description of Artificial Sequence: Synthetic oligonucleotide
aacaagcaagaauauaauu

SEQ ID NO: 2834912 - RNA, 19 nt, Artificial Sequence
  Description of Artificial Sequence: Synthetic oligonucleotide
uauguaagucuauaauaac

SEQ ID NO: 2834913 - RNA, 19 nt, Artificial Sequence
  Description of Artificial Sequence: Synthetic oligonucleotide
aaacaaagaacaagcaaga

SEQ ID NO: 2834914 - RNA, 19 nt, Artificial Sequence
  Description of Artificial Sequence: Synthetic oligonucleotide
uggaagaugauaacauaac

SEQ ID NO: 2834915 - RNA, 19 nt, Artificial Sequence
  Description of Artificial Sequence: Synthetic oligonucleotide
acaucuaauuaauuuacau

SEQ ID NO: 2834916 - RNA, 19 nt, Artificial Sequence
  Description of Artificial Sequence: Synthetic oligonucleotide
uaauucacuagaagcauau

SEQ ID NO: 2834917 - RNA, 19 nt, Artificial Sequence
  Description of Artificial Sequence: Synthetic oligonucleotide
auuuggauggcgcagguaa

SEQ ID NO: 2834918 - RNA, 19 nt, Artificial Sequence
  Description of Artificial Sequence: Synthetic oligonucleotide
uguuuggaagaugauaaca

SEQ ID NO: 2834919 - RNA, 19 nt, Artificial Sequence
  Description of Artificial Sequence: Synthetic oligonucleotide
aguuaauuaauuaaauaau

SEQ ID NO: 2834920 - RNA, 19 nt, Artificial Sequence
  Description of Artificial Sequence: Synthetic oligonucleotide
gucuauaauaacuuaaaua

SEQ ID NO: 2834921 - RNA, 19 nt, Artificial Sequence
  Description of Artificial Sequence: Synthetic oligonucleotide
cuuuaugagucacucuugc

SEQ ID NO: 2834922 - RNA, 19 nt, Artificial Sequence
  Description of Artificial Sequence: Synthetic oligonucleotide
gauacaucucccaucaaac

SEQ ID NO: 2834923 - RNA, 19 nt, Artificial Sequence
  Description of Artificial Sequence: Synthetic oligonucleotide
aguauauguaagucuauaa

SEQ ID NO: 2834924 - RNA, 19 nt, Artificial Sequence
  Description of Artificial Sequence: Synthetic oligonucleotide
ugcauggagaacuugguau

SEQ ID NO: 2834925 - RNA, 19 nt, Artificial Sequence
  Description of Artificial Sequence: Synthetic oligonucleotide
uguuuuaacuaugauuccu

SEQ ID NO: 2834926 - RNA, 19 nt, Artificial Sequence
  Description of Artificial Sequence: Synthetic oligonucleotide
aacauuuggauggcgcagg

SEQ ID NO: 2834927 - RNA, 19 nt, Artificial Sequence
  Description of Artificial Sequence: Synthetic oligonucleotide
uguuacaaucuuaaacaaa

SEQ ID NO: 2834928 - RNA, 19 nt, Artificial Sequence
  Description of Artificial Sequence: Synthetic oligonucleotide
augaacucaucacauucuc

SEQ ID NO: 2834929 - RNA, 19 nt, Artificial Sequence
  Description of Artificial Sequence: Synthetic oligonucleotide
aauuuacauguggaacuac

SEQ ID NO: 2834930 - RNA, 19 nt, Artificial Sequence
  Description of Artificial Sequence: Synthetic oligonucleotide
uacaucuuguuugauagcu

SEQ ID NO: 2834931 - RNA, 19 nt, Artificial Sequence
  Description of Artificial Sequence: Synthetic oligonucleotide
cucugcauggagaacuugg

SEQ ID NO: 2834932 - RNA, 19 nt, Artificial Sequence
  Description of Artificial Sequence: Synthetic oligonucleotide
ucacuagaagcauaugaac

SEQ ID NO: 2834933 - RNA, 19 nt, Artificial Sequence
  Description of Artificial Sequence: Synthetic oligonucleotide
uuuaacuaugauuccuccu

SEQ ID NO: 2834934 - RNA, 19 nt, Artificial Sequence
  Description of Artificial Sequence: Synthetic oligonucleotide
ugccauuugucuaaccuac

SEQ ID NO: 2834935 - RNA, 19 nt, Artificial Sequence
  Description of Artificial Sequence: Synthetic oligonucleotide
cacauucucuuuaugaguc

SEQ ID NO: 2834936 - RNA, 19 nt, Artificial Sequence
  Description of Artificial Sequence: Synthetic oligonucleotide
aagcaagaauauaauucac

SEQ ID NO: 2834937 - RNA, 19 nt, Artificial Sequence
  Description of Artificial Sequence: Synthetic oligonucleotide
ucuuuaugagucacucuug

SEQ ID NO: 2834938 - RNA, 19 nt, Artificial Sequence
  Description of Artificial Sequence: Synthetic oligonucleotide
uaaaugacacauguuacaa

SEQ ID NO: 2834939 - RNA, 19 nt, Artificial Sequence
  Description of Artificial Sequence: Synthetic oligonucleotide
guuuaauuugccaaguaga

SEQ ID NO: 2834940 - RNA, 19 nt, Artificial Sequence
  Description of Artificial Sequence: Synthetic oligonucleotide
auauguaagucuauaauaa

SEQ ID NO: 2834941 - RNA, 19 nt, Artificial Sequence
  Description of Artificial Sequence: Synthetic oligonucleotide
uuacaaucuuaaacaaaga

SEQ ID NO: 2834942 - RNA, 19 nt, Artificial Sequence
  Description of Artificial Sequence: Synthetic oligonucleotide
aucuuccugaaacaaaaga

SEQ ID NO: 2834943 - RNA, 19 nt, Artificial Sequence
  Description of Artificial Sequence: Synthetic oligonucleotide
ugguauguuuuaacuauga

SEQ ID NO: 2834944 - RNA, 19 nt, Artificial Sequence
  Description of Artificial Sequence: Synthetic oligonucleotide
auuuuaucuuccugaaaca

SEQ ID NO: 2834945 - RNA, 19 nt, Artificial Sequence
  Description of Artificial Sequence: Synthetic oligonucleotide
uuacauguggaacuacauc

SEQ ID NO: 2834946 - RNA, 19 nt, Artificial Sequence
  Description of Artificial Sequence: Synthetic oligonucleotide
uuuacauguggaacuacau

SEQ ID NO: 2834947 - RNA, 19 nt, Artificial Sequence
  Description of Artificial Sequence: Synthetic oligonucleotide
guuugauagcuuuacucug

SEQ ID NO: 2834948 - RNA, 19 nt, Artificial Sequence
  Description of Artificial Sequence: Synthetic oligonucleotide
uaacuuaaauaaacuucca

SEQ ID NO: 2834949 - RNA, 19 nt, Artificial Sequence
  Description of Artificial Sequence: Synthetic oligonucleotide
agaucucaguaaaugacac

SEQ ID NO: 2834950 - RNA, 19 nt, Artificial Sequence
  Description of Artificial Sequence: Synthetic oligonucleotide
aaacauuuggauggcgcag

SEQ ID NO: 2834951 - RNA, 19 nt, Artificial Sequence
  Description of Artificial Sequence: Synthetic oligonucleotide
uuacucugcauggagaacu

SEQ ID NO: 2834952 - RNA, 19 nt, Artificial Sequence
  Description of Artificial Sequence: Synthetic oligonucleotide
guaaaugacacauguuaca

SEQ ID NO: 2834953 - RNA, 19 nt, Artificial Sequence
  Description of Artificial Sequence: Synthetic oligonucleotide
ucacucuugcuuuugaaua

SEQ ID NO: 2834954 - RNA, 19 nt, Artificial Sequence
  Description of Artificial Sequence: Synthetic oligonucleotide
aucuggaugcucucuuccc

SEQ ID NO: 2834955 - RNA, 19 nt, Artificial Sequence
  Description of Artificial Sequence: Synthetic oligonucleotide
cauuugucuaaccuacaag

SEQ ID NO: 2834956 - RNA, 19 nt, Artificial Sequence
  Description of Artificial Sequence: Synthetic oligonucleotide
aguagaaaugucaaugccu

SEQ ID NO: 2834957 - RNA, 19 nt, Artificial Sequence
  Description of Artificial Sequence: Synthetic oligonucleotide
uauaauucacuagaagcau

SEQ ID NO: 2834958 - RNA, 19 nt, Artificial Sequence
  Description of Artificial Sequence: Synthetic oligonucleotide
aaaauugauggcagaucuc

SEQ ID NO: 2834959 - RNA, 19 nt, Artificial Sequence
  Description of Artificial Sequence: Synthetic oligonucleotide
cuuuugaauaacaucugga

SEQ ID NO: 2834960 - RNA, 19 nt, Artificial Sequence
  Description of Artificial Sequence: Synthetic oligonucleotide
agguaauucauuuuaucuu

SEQ ID NO: 2834961 - RNA, 19 nt, Artificial Sequence
  Description of Artificial Sequence: Synthetic oligonucleotide
aacuacaucuuguuugaua

SEQ ID NO: 2834962 - RNA, 19 nt, Artificial Sequence
  Description of Artificial Sequence: Synthetic oligonucleotide
auguaagucuauaauaacu

SEQ ID NO: 2834963 - RNA, 19 nt, Artificial Sequence
  Description of Artificial Sequence: Synthetic oligonucleotide
auaacaucuggaugcucuc

SEQ ID NO: 2834964 - RNA, 19 nt, Artificial Sequence
  Description of Artificial Sequence: Synthetic oligonucleotide
uaacuaugauuccuccuug

SEQ ID NO: 2834965 - RNA, 19 nt, Artificial Sequence
  Description of Artificial Sequence: Synthetic oligonucleotide
uuuuguuuggaagaugaua

SEQ ID NO: 2834966 - RNA, 19 nt, Artificial Sequence
  Description of Artificial Sequence: Synthetic oligonucleotide
uugguauguuuuaacuaug

SEQ ID NO: 2834967 - RNA, 19 nt, Artificial Sequence
  Description of Artificial Sequence: Synthetic oligonucleotide
aaaugacacauguuacaau

SEQ ID NO: 2834968 - RNA, 19 nt, Artificial Sequence
  Description of Artificial Sequence: Synthetic oligonucleotide
uuuguuuaauuugccaagu

SEQ ID NO: 2834969 - RNA, 19 nt, Artificial Sequence
  Description of Artificial Sequence: Synthetic oligonucleotide
uugauggcagaucucagua

SEQ ID NO: 2834970 - RNA, 19 nt, Artificial Sequence
  Description of Artificial Sequence: Synthetic oligonucleotide
uuuuaucuuccugaaacaa

SEQ ID NO: 2834971 - RNA, 19 nt, Artificial Sequence
  Description of Artificial Sequence: Synthetic oligonucleotide
ucuugcuuuugaauaacau

SEQ ID NO: 2834972 - RNA, 19 nt, Artificial Sequence
  Description of Artificial Sequence: Synthetic oligonucleotide
ugauaacauaacaguagaa

SEQ ID NO: 2834973 - RNA, 19 nt, Artificial Sequence
  Description of Artificial Sequence: Synthetic oligonucleotide
aucucaguaaaugacacau

SEQ ID NO: 2834974 - RNA, 19 nt, Artificial Sequence
  Description of Artificial Sequence: Synthetic oligonucleotide
aaauaauguaagaguauau

SEQ ID NO: 2834975 - RNA, 19 nt, Artificial Sequence
  Description of Artificial Sequence: Synthetic oligonucleotide
uuaauuugccaaguagacu

SEQ ID NO: 2834976 - RNA, 19 nt, Artificial Sequence
  Description of Artificial Sequence: Synthetic oligonucleotide
caucacauucucuuuauga

SEQ ID NO: 2834977 - RNA, 19 nt, Artificial Sequence
  Description of Artificial Sequence: Synthetic oligonucleotide
aaguagacuagaaaauuaa

SEQ ID NO: 2834978 - RNA, 19 nt, Artificial Sequence
  Description of Artificial Sequence: Synthetic oligonucleotide
aacuaugauuccuccuugu

SEQ ID NO: 2834979 - RNA, 19 nt, Artificial Sequence
  Description of Artificial Sequence: Synthetic oligonucleotide
agucuauaauaacuuaaau

SEQ ID NO: 2834980 - RNA, 19 nt, Artificial Sequence
  Description of Artificial Sequence: Synthetic oligonucleotide
aaacaaaagugguuuuguu

SEQ ID NO: 2834981 - RNA, 19 nt, Artificial Sequence
  Description of Artificial Sequence: Synthetic oligonucleotide
uuugccaaguagacuagaa

SEQ ID NO: 2834982 - RNA, 19 nt, Artificial Sequence
  Description of Artificial Sequence: Synthetic oligonucleotide
caguagaaaugucaaugcc

SEQ ID NO: 2834983 - RNA, 19 nt, Artificial Sequence
  Description of Artificial Sequence: Synthetic oligonucleotide
uaauucauuuuaucuuccu

SEQ ID NO: 2834984 - RNA, 19 nt, Artificial Sequence
  Description of Artificial Sequence: Synthetic oligonucleotide
ucuuguuugauagcuuuac

SEQ ID NO: 2834985 - RNA, 19 nt, Artificial Sequence
  Description of Artificial Sequence: Synthetic oligonucleotide
auugauggcagaucucagu

SEQ ID NO: 2834986 - RNA, 19 nt, Artificial Sequence
  Description of Artificial Sequence: Synthetic oligonucleotide
uaugagucacucuugcuuu

SEQ ID NO: 2834987 - RNA, 19 nt, Artificial Sequence
  Description of Artificial Sequence: Synthetic oligonucleotide
guagaaaugucaaugccuc

SEQ ID NO: 2834988 - RNA, 19 nt, Artificial Sequence
  Description of Artificial Sequence: Synthetic oligonucleotide
caguaaaugacacauguua

SEQ ID NO: 2834989 - RNA, 19 nt, Artificial Sequence
  Description of Artificial Sequence: Synthetic oligonucleotide
agcuuuacucugcauggag

SEQ ID NO: 2834990 - RNA, 19 nt, Artificial Sequence
  Description of Artificial Sequence: Synthetic oligonucleotide
auaacaguagaaaugucaa

SEQ ID NO: 2834991 - RNA, 19 nt, Artificial Sequence
  Description of Artificial Sequence: Synthetic oligonucleotide
guagacuagaaaauuaaaa

SEQ ID NO: 2834992 - RNA, 19 nt, Artificial Sequence
  Description of Artificial Sequence: Synthetic oligonucleotide
ugaacucaucacauucucu

SEQ ID NO: 2834993 - RNA, 19 nt, Artificial Sequence
  Description of Artificial Sequence: Synthetic oligonucleotide
uugauagcuuuacucugca

SEQ ID NO: 2834994 - RNA, 19 nt, Artificial Sequence
  Description of Artificial Sequence: Synthetic oligonucleotide
uuuaugagucacucuugcu

SEQ ID NO: 2834995 - RNA, 19 nt, Artificial Sequence
  Description of Artificial Sequence: Synthetic oligonucleotide
guaagaguauauguaaguc

SEQ ID NO: 2834996 - RNA, 19 nt, Artificial Sequence
  Description of Artificial Sequence: Synthetic oligonucleotide
gaacuugguauguuuuaac

SEQ ID NO: 2834997 - RNA, 19 nt, Artificial Sequence
  Description of Artificial Sequence: Synthetic oligonucleotide
augucaaugccucacugau

SEQ ID NO: 2834998 - RNA, 19 nt, Artificial Sequence
  Description of Artificial Sequence: Synthetic oligonucleotide
aacaucuaauuaauuuaca

SEQ ID NO: 2834999 - RNA, 19 nt, Artificial Sequence
  Description of Artificial Sequence: Synthetic oligonucleotide
ucugcauggagaacuuggu

SEQ ID NO: 2835000 - RNA, 19 nt, Artificial Sequence
  Description of Artificial Sequence: Synthetic oligonucleotide
ucucaguaaaugacacaug

SEQ ID NO: 2835001 - RNA, 19 nt, Artificial Sequence
  Description of Artificial Sequence: Synthetic oligonucleotide
cuauaauaacuuaaauaaa

SEQ ID NO: 2835002 - RNA, 19 nt, Artificial Sequence
  Description of Artificial Sequence: Synthetic oligonucleotide
auguuacaaucuuaaacaa

SEQ ID NO: 2835003 - RNA, 19 nt, Artificial Sequence
  Description of Artificial Sequence: Synthetic oligonucleotide
acuugguauguuuuaacua

SEQ ID NO: 2835004 - RNA, 19 nt, Artificial Sequence
  Description of Artificial Sequence: Synthetic oligonucleotide
gauggcagaucucaguaaa

SEQ ID NO: 2835005 - RNA, 19 nt, Artificial Sequence
  Description of Artificial Sequence: Synthetic oligonucleotide
aaugccucacugauacauc

SEQ ID NO: 2835006 - RNA, 19 nt, Artificial Sequence
  Description of Artificial Sequence: Synthetic oligonucleotide
ucuggaugcucucuucccu

SEQ ID NO: 2835007 - RNA, 19 nt, Artificial Sequence
  Description of Artificial Sequence: Synthetic oligonucleotide
uccuuguuuuguuuaauuu

SEQ ID NO: 2835008 - RNA, 19 nt, Artificial Sequence
  Description of Artificial Sequence: Synthetic oligonucleotide
uucucuuuaugagucacuc

SEQ ID NO: 2835009 - RNA, 19 nt, Artificial Sequence
  Description of Artificial Sequence: Synthetic oligonucleotide
auacaucucccaucaaaca

SEQ ID NO: 2835010 - RNA, 19 nt, Artificial Sequence
  Description of Artificial Sequence: Synthetic oligonucleotide
aaaagugguuuuguuugga

SEQ ID NO: 2835011 - RNA, 19 nt, Artificial Sequence
  Description of Artificial Sequence: Synthetic oligonucleotide
auguaagaguauauguaag

SEQ ID NO: 2835012 - RNA, 19 nt, Artificial Sequence
  Description of Artificial Sequence: Synthetic oligonucleotide
ucuaaccuacaagacuuug

SEQ ID NO: 2835013 - RNA, 19 nt, Artificial Sequence
  Description of Artificial Sequence: Synthetic oligonucleotide
ucauuuuaucuuccugaaa

SEQ ID NO: 2835014 - RNA, 19 nt, Artificial Sequence
  Description of Artificial Sequence: Synthetic oligonucleotide
aauugauggcagaucucag

SEQ ID NO: 2835015 - RNA, 19 nt, Artificial Sequence
  Description of Artificial Sequence: Synthetic oligonucleotide
uugccaaguagacuagaaa

SEQ ID NO: 2835016 - RNA, 19 nt, Artificial Sequence
  Description of Artificial Sequence: Synthetic oligonucleotide
agcaagaauauaauucacu

SEQ ID NO: 2835017 - RNA, 19 nt, Artificial Sequence
  Description of Artificial Sequence: Synthetic oligonucleotide
uggcagaucucaguaaaug

SEQ ID NO: 2835018 - RNA, 19 nt, Artificial Sequence
  Description of Artificial Sequence: Synthetic oligonucleotide
ggaagaugauaacauaaca

SEQ ID NO: 2835019 - RNA, 19 nt, Artificial Sequence
  Description of Artificial Sequence: Synthetic oligonucleotide
ucaucacauucucuuuaug

SEQ ID NO: 2835020 - RNA, 19 nt, Artificial Sequence
  Description of Artificial Sequence: Synthetic oligonucleotide
aacaucuggaugcucucuu

SEQ ID NO: 2835021 - RNA, 19 nt, Artificial Sequence
  Description of Artificial Sequence: Synthetic oligonucleotide
aaagaacaagcaagaauau

SEQ ID NO: 2835022 - RNA, 19 nt, Artificial Sequence
  Description of Artificial Sequence: Synthetic oligonucleotide
auuuacauguggaacuaca

SEQ ID NO: 2835023 - RNA, 19 nt, Artificial Sequence
  Description of Artificial Sequence: Synthetic oligonucleotide
ucuucccugccauuugucu

SEQ ID NO: 2835024 - RNA, 19 nt, Artificial Sequence
  Description of Artificial Sequence: Synthetic oligonucleotide
guuuuaacuaugauuccuc

SEQ ID NO: 2835025 - RNA, 19 nt, Artificial Sequence
  Description of Artificial Sequence: Synthetic oligonucleotide
aacaaagaacaagcaagaa

SEQ ID NO: 2835026 - RNA, 19 nt, Artificial Sequence
  Description of Artificial Sequence: Synthetic oligonucleotide
ucacugauacaucucccau

SEQ ID NO: 2835027 - RNA, 19 nt, Artificial Sequence
  Description of Artificial Sequence: Synthetic oligonucleotide
ugaauaacaucuggaugcu

SEQ ID NO: 2835028 - RNA, 19 nt, Artificial Sequence
  Description of Artificial Sequence: Synthetic oligonucleotide
aaccuacaagacuuuggau

SEQ ID NO: 2835029 - RNA, 19 nt, Artificial Sequence
  Description of Artificial Sequence: Synthetic oligonucleotide
uuguuuaauuugccaagua

SEQ ID NO: 2835030 - RNA, 19 nt, Artificial Sequence
  Description of Artificial Sequence: Synthetic oligonucleotide
aauucacuagaagcauaug

SEQ ID NO: 2835031 - RNA, 19 nt, Artificial Sequence
  Description of Artificial Sequence: Synthetic oligonucleotide
guauauguaagucuauaau

SEQ ID NO: 2835032 - RNA, 19 nt, Artificial Sequence
  Description of Artificial Sequence: Synthetic oligonucleotide
cauguggaacuacaucuug

SEQ ID NO: 2835033 - RNA, 19 nt, Artificial Sequence
  Description of Artificial Sequence: Synthetic oligonucleotide
uuguuuggaagaugauaac

SEQ ID NO: 2835034 - RNA, 19 nt, Artificial Sequence
  Description of Artificial Sequence: Synthetic oligonucleotide
cagaucucaguaaaugaca

SEQ ID NO: 2835035 - RNA, 19 nt, Artificial Sequence
  Description of Artificial Sequence: Synthetic oligonucleotide
acuagaaaauuaaaaccaa

SEQ ID NO: 2835036 - RNA, 19 nt, Artificial Sequence
  Description of Artificial Sequence: Synthetic oligonucleotide
acucuugcuuuugaauaac

SEQ ID NO: 2835037 - RNA, 19 nt, Artificial Sequence
  Description of Artificial Sequence: Synthetic oligonucleotide
augccucacugauacaucu

SEQ ID NO: 2835038 - RNA, 19 nt, Artificial Sequence
  Description of Artificial Sequence: Synthetic oligonucleotide
agaauauaauucacuagaa

SEQ ID NO: 2835039 - RNA, 19 nt, Artificial Sequence
  Description of Artificial Sequence: Synthetic oligonucleotide
caaacauuuggauggcgca

SEQ ID NO: 2835040 - RNA, 19 nt, Artificial Sequence
  Description of Artificial Sequence: Synthetic oligonucleotide
cagguaauucauuuuaucu

SEQ ID NO: 2835041 - RNA, 19 nt, Artificial Sequence
  Description of Artificial Sequence: Synthetic oligonucleotide
uaauuuacauguggaacua

SEQ ID NO: 2835042 - RNA, 19 nt, Artificial Sequence
  Description of Artificial Sequence: Synthetic oligonucleotide
cuugguauguuuuaacuau

SEQ ID NO: 2835043 - RNA, 19 nt, Artificial Sequence
  Description of Artificial Sequence: Synthetic oligonucleotide
agaugauaacauaacagua

SEQ ID NO: 2835044 - RNA, 19 nt, Artificial Sequence
  Description of Artificial Sequence: Synthetic oligonucleotide
aagaacaagcaagaauaua

SEQ ID NO: 2835045 - RNA, 19 nt, Artificial Sequence
  Description of Artificial Sequence: Synthetic oligonucleotide
cucaguaaaugacacaugu

SEQ ID NO: 2835046 - RNA, 19 nt, Artificial Sequence
  Description of Artificial Sequence: Synthetic oligonucleotide
ucucuuuaugagucacucu

SEQ ID NO: 2835047 - RNA, 19 nt, Artificial Sequence
  Description of Artificial Sequence: Synthetic oligonucleotide
cuuuacucugcauggagaa

SEQ ID NO: 2835048 - RNA, 19 nt, Artificial Sequence
  Description of Artificial Sequence: Synthetic oligonucleotide
uaacaguagaaaugucaau

SEQ ID NO: 2835049 - RNA, 19 nt, Artificial Sequence
  Description of Artificial Sequence: Synthetic oligonucleotide
agaagcauaugaacucauc

SEQ ID NO: 2835050 - RNA, 19 nt, Artificial Sequence
  Description of Artificial Sequence: Synthetic oligonucleotide
gcaagaauauaauucacua

SEQ ID NO: 2835051 - RNA, 19 nt, Artificial Sequence
  Description of Artificial Sequence: Synthetic oligonucleotide
caaguagacuagaaaauua

SEQ ID NO: 2835052 - RNA, 19 nt, Artificial Sequence
  Description of Artificial Sequence: Synthetic oligonucleotide
uagaaaugucaaugccuca

SEQ ID NO: 2835053 - RNA, 19 nt, Artificial Sequence
  Description of Artificial Sequence: Synthetic oligonucleotide
gaucucaguaaaugacaca

SEQ ID NO: 2835054 - RNA, 19 nt, Artificial Sequence
  Description of Artificial Sequence: Synthetic oligonucleotide
gguuuuguuuggaagauga

SEQ ID NO: 2835055 - RNA, 19 nt, Artificial Sequence
  Description of Artificial Sequence: Synthetic oligonucleotide
guaagucuauaauaacuua

SEQ ID NO: 2835056 - RNA, 19 nt, Artificial Sequence
  Description of Artificial Sequence: Synthetic oligonucleotide
cacuagaagcauaugaacu

SEQ ID NO: 2835057 - RNA, 19 nt, Artificial Sequence
  Description of Artificial Sequence: Synthetic oligonucleotide
ucucuucccugccauuugu

SEQ ID NO: 2835058 - RNA, 19 nt, Artificial Sequence
  Description of Artificial Sequence: Synthetic oligonucleotide
acacauguuacaaucuuaa

SEQ ID NO: 2835059 - RNA, 19 nt, Artificial Sequence
  Description of Artificial Sequence: Synthetic oligonucleotide
uagaagcauaugaacucau

SEQ ID NO: 2835060 - RNA, 19 nt, Artificial Sequence
  Description of Artificial Sequence: Synthetic oligonucleotide
aucaaacauuuggauggcg

SEQ ID NO: 2835061 - RNA, 19 nt, Artificial Sequence
  Description of Artificial Sequence: Synthetic oligonucleotide
cauucucuuuaugagucac

SEQ ID NO: 2835062 - RNA, 19 nt, Artificial Sequence
  Description of Artificial Sequence: Synthetic oligonucleotide
uucccugccauuugucuaa

SEQ ID NO: 2835063 - RNA, 19 nt, Artificial Sequence
  Description of Artificial Sequence: Synthetic oligonucleotide
cacugauacaucucccauc

SEQ ID NO: 2835064 - RNA, 19 nt, Artificial Sequence
  Description of Artificial Sequence: Synthetic oligonucleotide
ggaacuacaucuuguuuga

SEQ ID NO: 2835065 - RNA, 19 nt, Artificial Sequence
  Description of Artificial Sequence: Synthetic oligonucleotide
agaacuugguauguuuuaa

SEQ ID NO: 2835066 - RNA, 19 nt, Artificial Sequence
  Description of Artificial Sequence: Synthetic oligonucleotide
acuaugauuccuccuuguu

SEQ ID NO: 2835067 - RNA, 19 nt, Artificial Sequence
  Description of Artificial Sequence: Synthetic oligonucleotide
cucacugauacaucuccca

SEQ ID NO: 2835068 - RNA, 19 nt, Artificial Sequence
  Description of Artificial Sequence: Synthetic oligonucleotide
ugauggcagaucucaguaa

SEQ ID NO: 2835069 - RNA, 19 nt, Artificial Sequence
  Description of Artificial Sequence: Synthetic oligonucleotide
aguagacuagaaaauuaaa

SEQ ID NO: 2835070 - RNA, 19 nt, Artificial Sequence
  Description of Artificial Sequence: Synthetic oligonucleotide
gagaacuugguauguuuua

SEQ ID NO: 2835071 - RNA, 19 nt, Artificial Sequence
  Description of Artificial Sequence: Synthetic oligonucleotide
cuagaagcauaugaacuca

SEQ ID NO: 2835072 - RNA, 19 nt, Artificial Sequence
  Description of Artificial Sequence: Synthetic oligonucleotide
acauaacaguagaaauguc

SEQ ID NO: 2835073 - RNA, 19 nt, Artificial Sequence
  Description of Artificial Sequence: Synthetic oligonucleotide
uggaugcucucuucccugc

SEQ ID NO: 2835074 - RNA, 19 nt, Artificial Sequence
  Description of Artificial Sequence: Synthetic oligonucleotide
uuuacucugcauggagaac

SEQ ID NO: 2835075 - RNA, 19 nt, Artificial Sequence
  Description of Artificial Sequence: Synthetic oligonucleotide
uuuggauggcgcagguaau

SEQ ID NO: 2835076 - RNA, 19 nt, Artificial Sequence
  Description of Artificial Sequence: Synthetic oligonucleotide
gcauggagaacuugguaug

SEQ ID NO: 2835077 - RNA, 19 nt, Artificial Sequence
  Description of Artificial Sequence: Synthetic oligonucleotide
gaaaugucaaugccucacu

SEQ ID NO: 2835078 - RNA, 19 nt, Artificial Sequence
  Description of Artificial Sequence: Synthetic oligonucleotide
cuggaugcucucuucccug

SEQ ID NO: 2835079 - RNA, 19 nt, Artificial Sequence
  Description of Artificial Sequence: Synthetic oligonucleotide
caucaaacauuuggauggc

SEQ ID NO: 2835080 - RNA, 19 nt, Artificial Sequence
  Description of Artificial Sequence: Synthetic oligonucleotide
ggcagaucucaguaaauga

SEQ ID NO: 2835081 - RNA, 19 nt, Artificial Sequence
  Description of Artificial Sequence: Synthetic oligonucleotide
ugagucacucuugcuuuug

SEQ ID NO: 2835082 - RNA, 19 nt, Artificial Sequence
  Description of Artificial Sequence: Synthetic oligonucleotide
gaguauauguaagucuaua

SEQ ID NO: 2835083 - RNA, 19 nt, Artificial Sequence
  Description of Artificial Sequence: Synthetic oligonucleotide
gcagaucucaguaaaugac

SEQ ID NO: 2835084 - RNA, 19 nt, Artificial Sequence
  Description of Artificial Sequence: Synthetic oligonucleotide
uuccuccuuguuuuguuua

SEQ ID NO: 2835085 - RNA, 19 nt, Artificial Sequence
  Description of Artificial Sequence: Synthetic oligonucleotide
gccucacugauacaucucc

SEQ ID NO: 2835086 - RNA, 19 nt, Artificial Sequence
  Description of Artificial Sequence: Synthetic oligonucleotide
ugucaaugccucacugaua

SEQ ID NO: 2835087 - RNA, 19 nt, Artificial Sequence
  Description of Artificial Sequence: Synthetic oligonucleotide
uaacaucuggaugcucucu

SEQ ID NO: 2835088 - RNA, 19 nt, Artificial Sequence
  Description of Artificial Sequence: Synthetic oligonucleotide
guuuggaagaugauaacau

SEQ ID NO: 2835089 - RNA, 19 nt, Artificial Sequence
  Description of Artificial Sequence: Synthetic oligonucleotide
agucacucuugcuuuugaa

SEQ ID NO: 2835090 - RNA, 19 nt, Artificial Sequence
  Description of Artificial Sequence: Synthetic oligonucleotide
acauuuggauggcgcaggu

SEQ ID NO: 2835091 - RNA, 19 nt, Artificial Sequence
  Description of Artificial Sequence: Synthetic oligonucleotide
ugauuccuccuuguuuugu

SEQ ID NO: 2835092 - RNA, 19 nt, Artificial Sequence
  Description of Artificial Sequence: Synthetic oligonucleotide
uggcgcagguaauucauuu

SEQ ID NO: 2835093 - RNA, 19 nt, Artificial Sequence
  Description of Artificial Sequence: Synthetic oligonucleotide
auaauucacuagaagcaua

SEQ ID NO: 2835094 - RNA, 19 nt, Artificial Sequence
  Description of Artificial Sequence: Synthetic oligonucleotide
auguggaacuacaucuugu

SEQ ID NO: 2835095 - RNA, 19 nt, Artificial Sequence
  Description of Artificial Sequence: Synthetic oligonucleotide
gcagguaauucauuuuauc

SEQ ID NO: 2835096 - RNA, 19 nt, Artificial Sequence
  Description of Artificial Sequence: Synthetic oligonucleotide
cacucuugcuuuugaauaa

SEQ ID NO: 2835097 - RNA, 19 nt, Artificial Sequence
  Description of Artificial Sequence: Synthetic oligonucleotide
cucuugcuuuugaauaaca

SEQ ID NO: 2835098 - RNA, 19 nt, Artificial Sequence
  Description of Artificial Sequence: Synthetic oligonucleotide
ugauagcuuuacucugcau

SEQ ID NO: 2835099 - RNA, 19 nt, Artificial Sequence
  Description of Artificial Sequence: Synthetic oligonucleotide
gagucacucuugcuuuuga

SEQ ID NO: 2835100 - RNA, 19 nt, Artificial Sequence
  Description of Artificial Sequence: Synthetic oligonucleotide
acaucucccaucaaacauu

SEQ ID NO: 2835101 - RNA, 19 nt, Artificial Sequence
  Description of Artificial Sequence: Synthetic oligonucleotide
gaacaagcaagaauauaau

SEQ ID NO: 2835102 - RNA, 19 nt, Artificial Sequence
  Description of Artificial Sequence: Synthetic oligonucleotide
uggauggcgcagguaauuc

SEQ ID NO: 2835103 - RNA, 19 nt, Artificial Sequence
  Description of Artificial Sequence: Synthetic oligonucleotide
ucaaugccucacugauaca

SEQ ID NO: 2835104 - RNA, 19 nt, Artificial Sequence
  Description of Artificial Sequence: Synthetic oligonucleotide
uacucugcauggagaacuu

SEQ ID NO: 2835105 - RNA, 19 nt, Artificial Sequence
  Description of Artificial Sequence: Synthetic oligonucleotide
uagcuuuacucugcaugga

SEQ ID NO: 2835106 - RNA, 19 nt, Artificial Sequence
  Description of Artificial Sequence: Synthetic oligonucleotide
auucucuuuaugagucacu

SEQ ID NO: 2835107 - RNA, 19 nt, Artificial Sequence
  Description of Artificial Sequence: Synthetic oligonucleotide
gaauaacaucuggaugcuc

SEQ ID NO: 2835108 - RNA, 19 nt, Artificial Sequence
  Description of Artificial Sequence: Synthetic oligonucleotide
cucucuucccugccauuug

SEQ ID NO: 2835109 - RNA, 19 nt, Artificial Sequence
  Description of Artificial Sequence: Synthetic oligonucleotide
gucacucuugcuuuugaau

SEQ ID NO: 2835110 - RNA, 19 nt, Artificial Sequence
  Description of Artificial Sequence: Synthetic oligonucleotide
agaguauauguaagucuau

SEQ ID NO: 2835111 - RNA, 19 nt, Artificial Sequence
  Description of Artificial Sequence: Synthetic oligonucleotide
cugccauuugucuaaccua

SEQ ID NO: 2835112 - RNA, 19 nt, Artificial Sequence
  Description of Artificial Sequence: Synthetic oligonucleotide
uuggauggcgcagguaauu

SEQ ID NO: 2835113 - RNA, 19 nt, Artificial Sequence
  Description of Artificial Sequence: Synthetic oligonucleotide
cucuucccugccauuuguc

SEQ ID NO: 2835114 - RNA, 19 nt, Artificial Sequence
  Description of Artificial Sequence: Synthetic oligonucleotide
cuaugauuccuccuuguuu

SEQ ID NO: 2835115 - RNA, 19 nt, Artificial Sequence
  Description of Artificial Sequence: Synthetic oligonucleotide
cuuguuugauagcuuuacu

SEQ ID NO: 2835116 - RNA, 19 nt, Artificial Sequence
  Description of Artificial Sequence: Synthetic oligonucleotide
cuucccugccauuugucua

SEQ ID NO: 2835117 - RNA, 19 nt, Artificial Sequence
  Description of Artificial Sequence: Synthetic oligonucleotide
acauguggaacuacaucuu

SEQ ID NO: 2835118 - RNA, 19 nt, Artificial Sequence
  Description of Artificial Sequence: Synthetic oligonucleotide
augagucacucuugcuuuu

SEQ ID NO: 2835119 - RNA, 19 nt, Artificial Sequence
  Description of Artificial Sequence: Synthetic oligonucleotide
caaugccucacugauacau

SEQ ID NO: 2835120 - RNA, 19 nt, Artificial Sequence
  Description of Artificial Sequence: Synthetic oligonucleotide
gauggcgcagguaauucau

SEQ ID NO: 2835121 - RNA, 19 nt, Artificial Sequence
  Description of Artificial Sequence: Synthetic oligonucleotide
acucugcauggagaacuug

SEQ ID NO: 2835122 - RNA, 19 nt, Artificial Sequence
  Description of Artificial Sequence: Synthetic oligonucleotide
cauaugaacucaucacauu

SEQ ID NO: 2835123 - RNA, 19 nt, Artificial Sequence
  Description of Artificial Sequence: Synthetic oligonucleotide
ggauggcgcagguaauuca

SEQ ID NO: 2835124 - RNA, 19 nt, Artificial Sequence
  Description of Artificial Sequence: Synthetic oligonucleotide
gguauguuuuaacuaugau

SEQ ID NO: 2835125 - RNA, 19 nt, Artificial Sequence
  Description of Artificial Sequence: Synthetic oligonucleotide
gcuuuacucugcauggaga

SEQ ID NO: 2835126 - RNA, 19 nt, Artificial Sequence
  Description of Artificial Sequence: Synthetic oligonucleotide
aucuuguuugauagcuuua

SEQ ID NO: 2835127 - RNA, 19 nt, Artificial Sequence
  Description of Artificial Sequence: Synthetic oligonucleotide
cucaucacauucucuuuau

SEQ ID NO: 2835128 - RNA, 19 nt, Artificial Sequence
  Description of Artificial Sequence: Synthetic oligonucleotide
gcgcagguaauucauuuua

SEQ ID NO: 2835129 - RNA, 19 nt, Artificial Sequence
  Description of Artificial Sequence: Synthetic oligonucleotide
ggaugcucucuucccugcc

SEQ ID NO: 2835130 - RNA, 19 nt, Artificial Sequence
  Description of Artificial Sequence: Synthetic oligonucleotide
auggagaacuugguauguu

SEQ ID NO: 2835131 - RNA, 19 nt, Artificial Sequence
  Description of Artificial Sequence: Synthetic oligonucleotide
cugcauggagaacuuggua

SEQ ID NO: 2835132 - RNA, 19 nt, Artificial Sequence
  Description of Artificial Sequence: Synthetic oligonucleotide
ccauuugucuaaccuacaa

SEQ ID NO: 2835133 - RNA, 19 nt, Artificial Sequence
  Description of Artificial Sequence: Synthetic oligonucleotide
caucucccaucaaacauuu

SEQ ID NO: 2835134 - RNA, 19 nt, Artificial Sequence
  Description of Artificial Sequence: Synthetic oligonucleotide
gcauaugaacucaucacau

SEQ ID NO: 2835135 - RNA, 19 nt, Artificial Sequence
  Description of Artificial Sequence: Synthetic oligonucleotide
guggaacuacaucuuguuu

SEQ ID NO: 2835136 - RNA, 19 nt, Artificial Sequence
  Description of Artificial Sequence: Synthetic oligonucleotide
gugguuuuguuuggaagau

SEQ ID NO: 2835137 - RNA, 19 nt, Artificial Sequence
  Description of Artificial Sequence: Synthetic oligonucleotide
ccugccauuugucuaaccu

SEQ ID NO: 2835138 - RNA, 19 nt, Artificial Sequence
  Description of Artificial Sequence: Synthetic oligonucleotide
cauggagaacuugguaugu

SEQ ID NO: 2835139 - RNA, 19 nt, Artificial Sequence
  Description of Artificial Sequence: Synthetic oligonucleotide
ugcucucuucccugccauu

SEQ ID NO: 2835140 - RNA, 19 nt, Artificial Sequence
  Description of Artificial Sequence: Synthetic oligonucleotide
gccaaguagacuagaaaau

SEQ ID NO: 2835141 - RNA, 19 nt, Artificial Sequence
  Description of Artificial Sequence: Synthetic oligonucleotide
guuuuguuuggaagaugau

SEQ ID NO: 2835142 - RNA, 19 nt, Artificial Sequence
  Description of Artificial Sequence: Synthetic oligonucleotide
ucccugccauuugucuaac

SEQ ID NO: 2835143 - RNA, 19 nt, Artificial Sequence
  Description of Artificial Sequence: Synthetic oligonucleotide
aucucccaucaaacauuug

SEQ ID NO: 2835144 - RNA, 19 nt, Artificial Sequence
  Description of Artificial Sequence: Synthetic oligonucleotide
ggagaacuugguauguuuu

SEQ ID NO: 2835145 - RNA, 19 nt, Artificial Sequence
  Description of Artificial Sequence: Synthetic oligonucleotide
auggcgcagguaauucauu

SEQ ID NO: 2835146 - RNA, 19 nt, Artificial Sequence
  Description of Artificial Sequence: Synthetic oligonucleotide
cugauacaucucccaucaa

SEQ ID NO: 2835147 - RNA, 19 nt, Artificial Sequence
  Description of Artificial Sequence: Synthetic oligonucleotide
gaacuacaucuuguuugau

SEQ ID NO: 2835148 - RNA, 19 nt, Artificial Sequence
  Description of Artificial Sequence: Synthetic oligonucleotide
ccaaguagacuagaaaauu

SEQ ID NO: 2835149 - RNA, 19 nt, Artificial Sequence
  Description of Artificial Sequence: Synthetic oligonucleotide
cauuuggauggcgcaggua

SEQ ID NO: 2835150 - RNA, 19 nt, Artificial Sequence
  Description of Artificial Sequence: Synthetic oligonucleotide
gccauuugucuaaccuaca

SEQ ID NO: 2835151 - RNA, 19 nt, Artificial Sequence
  Description of Artificial Sequence: Synthetic oligonucleotide
cccugccauuugucuaacc

SEQ ID NO: 2835152 - RNA, 19 nt, Artificial Sequence
  Description of Artificial Sequence: Synthetic oligonucleotide
ggcgcagguaauucauuuu

SEQ ID NO: 2835153 - RNA, 19 nt, Artificial Sequence
  Description of Artificial Sequence: Synthetic oligonucleotide
gucuaaccuacaagacuuu

SEQ ID NO: 2835154 - RNA, 19 nt, Artificial Sequence
  Description of Artificial Sequence: Synthetic oligonucleotide
gcucucuucccugccauuu

SEQ ID NO: 2835155 - RNA, 19 nt, Artificial Sequence
  Description of Artificial Sequence: Synthetic oligonucleotide
cgcagguaauucauuuuau

SEQ ID NO: 2835156 - RNA, 19 nt, Artificial Sequence
  Description of Artificial Sequence: Synthetic oligonucleotide
uucaaaaucauccaccaag

SEQ ID NO: 2835157 - RNA, 19 nt, Artificial Sequence
  Description of Artificial Sequence: Synthetic oligonucleotide
aauaagcccagucaaucgc

SEQ ID NO: 2835158 - RNA, 19 nt, Artificial Sequence
  Description of Artificial Sequence: Synthetic oligonucleotide
uguguauuuauccucaggc

SEQ ID NO: 2835159 - RNA, 19 nt, Artificial Sequence
  Description of Artificial Sequence: Synthetic oligonucleotide
aaaaucauccaccaagcca

SEQ ID NO: 2835160 - RNA, 19 nt, Artificial Sequence
  Description of Artificial Sequence: Synthetic oligonucleotide
uguccugggauucagacag

SEQ ID NO: 2835161 - RNA, 19 nt, Artificial Sequence
  Description of Artificial Sequence: Synthetic oligonucleotide
aaaucauccaccaagccag

SEQ ID NO: 2835162 - RNA, 19 nt, Artificial Sequence
  Description of Artificial Sequence: Synthetic oligonucleotide
gaagacuucauucaaguca

SEQ ID NO: 2835163 - RNA, 19 nt, Artificial Sequence
  Description of Artificial Sequence: Synthetic oligonucleotide
ugaucaaaggggaugaugu

SEQ ID NO: 2835164 - RNA, 19 nt, Artificial Sequence
  Description of Artificial Sequence: Synthetic oligonucleotide
cuuuucaaaaucauccacc

SEQ ID NO: 2835165 - RNA, 19 nt, Artificial Sequence
  Description of Artificial Sequence: Synthetic oligonucleotide
uguauuuauccucaggcac

SEQ ID NO: 2835166 - RNA, 19 nt, Artificial Sequence
  Description of Artificial Sequence: Synthetic oligonucleotide
ucauucaagucaucaaugg

SEQ ID NO: 2835167 - RNA, 19 nt, Artificial Sequence
  Description of Artificial Sequence: Synthetic oligonucleotide
aucuccacaaaagacaccc

SEQ ID NO: 2835168 - RNA, 19 nt, Artificial Sequence
  Description of Artificial Sequence: Synthetic oligonucleotide
ugggauucagacaggaacg

SEQ ID NO: 2835169 - RNA, 19 nt, Artificial Sequence
  Description of Artificial Sequence: Synthetic oligonucleotide
uuuuagggcaaguuuacgc

SEQ ID NO: 2835170 - RNA, 19 nt, Artificial Sequence
  Description of Artificial Sequence: Synthetic oligonucleotide
uugucuuuugguuucgagg

SEQ ID NO: 2835171 - RNA, 19 nt, Artificial Sequence
  Description of Artificial Sequence: Synthetic oligonucleotide
ucaaaaucauccaccaagc

SEQ ID NO: 2835172 - RNA, 19 nt, Artificial Sequence
  Description of Artificial Sequence: Synthetic oligonucleotide
uaugaucuccacaaaagac

SEQ ID NO: 2835173 - RNA, 19 nt, Artificial Sequence
  Description of Artificial Sequence: Synthetic oligonucleotide
uuuucaaaaucauccacca

SEQ ID NO: 2835174 - RNA, 19 nt, Artificial Sequence
  Description of Artificial Sequence: Synthetic oligonucleotide
uuuagggcaaguuuacgcc

SEQ ID NO: 2835175 - RNA, 19 nt, Artificial Sequence
  Description of Artificial Sequence: Synthetic oligonucleotide
gauguucuuaaucuucucc

SEQ ID NO: 2835176 - RNA, 19 nt, Artificial Sequence
  Description of Artificial Sequence: Synthetic oligonucleotide
uuugcaauugucuuuuggu

SEQ ID NO: 2835177 - RNA, 19 nt, Artificial Sequence
  Description of Artificial Sequence: Synthetic oligonucleotide
uaauaagcccagucaaucg

SEQ ID NO: 2835178 - RNA, 19 nt, Artificial Sequence
  Description of Artificial Sequence: Synthetic oligonucleotide
uucaagucaucaaugguca

SEQ ID NO: 2835179 - RNA, 19 nt, Artificial Sequence
  Description of Artificial Sequence: Synthetic oligonucleotide
auucaagucaucaaugguc

SEQ ID NO: 2835180 - RNA, 19 nt, Artificial Sequence
  Description of Artificial Sequence: Synthetic oligonucleotide
ucauuccaagacuucaggg

SEQ ID NO: 2835181 - RNA, 19 nt, Artificial Sequence
  Description of Artificial Sequence: Synthetic oligonucleotide
agauuagccaaccuggugu

SEQ ID NO: 2835182 - RNA, 19 nt, Artificial Sequence
  Description of Artificial Sequence: Synthetic oligonucleotide
ucuggucuuguaauaagcc

SEQ ID NO: 2835183 - RNA, 19 nt, Artificial Sequence
  Description of Artificial Sequence: Synthetic oligonucleotide
uggucuuguaauaagccca

SEQ ID NO: 2835184 - RNA, 19 nt, Artificial Sequence
  Description of Artificial Sequence: Synthetic oligonucleotide
uccucauuguccaccaggg

SEQ ID NO: 2835185 - RNA, 19 nt, Artificial Sequence
  Description of Artificial Sequence: Synthetic oligonucleotide
cuuaaucuucuccagcugc

SEQ ID NO: 2835186 - RNA, 19 nt, Artificial Sequence
  Description of Artificial Sequence: Synthetic oligonucleotide
uuguaauaagcccagucaa

SEQ ID NO: 2835187 - RNA, 19 nt, Artificial Sequence
  Description of Artificial Sequence: Synthetic oligonucleotide
uucuuaaucuucuccagcu

SEQ ID NO: 2835188 - RNA, 19 nt, Artificial Sequence
  Description of Artificial Sequence: Synthetic oligonucleotide
aucaauggucaucugauca

SEQ ID NO: 2835189 - RNA, 19 nt, Artificial Sequence
  Description of Artificial Sequence: Synthetic oligonucleotide
uauuccuggauccuguccu

SEQ ID NO: 2835190 - RNA, 19 nt, Artificial Sequence
  Description of Artificial Sequence: Synthetic oligonucleotide
uuccucauuguccaccagg

SEQ ID NO: 2835191 - RNA, 19 nt, Artificial Sequence
  Description of Artificial Sequence: Synthetic oligonucleotide
uucucauauuccuggaucc

SEQ ID NO: 2835192 - RNA, 19 nt, Artificial Sequence
  Description of Artificial Sequence: Synthetic oligonucleotide
ugaucuccacaaaagacac

SEQ ID NO: 2835193 - RNA, 19 nt, Artificial Sequence
  Description of Artificial Sequence: Synthetic oligonucleotide
aagacacccaaucaauggu

SEQ ID NO: 2835194 - RNA, 19 nt, Artificial Sequence
  Description of Artificial Sequence: Synthetic oligonucleotide
acaaaagacacccaaucaa

SEQ ID NO: 2835195 - RNA, 19 nt, Artificial Sequence
  Description of Artificial Sequence: Synthetic oligonucleotide
ucaucaauggucaucugau

SEQ ID NO: 2835196 - RNA, 19 nt, Artificial Sequence
  Description of Artificial Sequence: Synthetic oligonucleotide
auauuccuggauccugucc

SEQ ID NO: 2835197 - RNA, 19 nt, Artificial Sequence
  Description of Artificial Sequence: Synthetic oligonucleotide
ucugggaagacuucauuca

SEQ ID NO: 2835198 - RNA, 19 nt, Artificial Sequence
  Description of Artificial Sequence: Synthetic oligonucleotide
ucuuguaauaagcccaguc

SEQ ID NO: 2835199 - RNA, 19 nt, Artificial Sequence
  Description of Artificial Sequence: Synthetic oligonucleotide
uuucucaggcagauuagcc

SEQ ID NO: 2835200 - RNA, 19 nt, Artificial Sequence
  Description of Artificial Sequence: Synthetic oligonucleotide
uguucuuaaucuucuccag

SEQ ID NO: 2835201 - RNA, 19 nt, Artificial Sequence
  Description of Artificial Sequence: Synthetic oligonucleotide
uuuauccucaggcacugga

SEQ ID NO: 2835202 - RNA, 19 nt, Artificial Sequence
  Description of Artificial Sequence: Synthetic oligonucleotide
ucauuguccaccagggcug

SEQ ID NO: 2835203 - RNA, 19 nt, Artificial Sequence
  Description of Artificial Sequence: Synthetic oligonucleotide
uucuuuucaaaaucaucca

SEQ ID NO: 2835204 - RNA, 19 nt, Artificial Sequence
  Description of Artificial Sequence: Synthetic oligonucleotide
aaggggaugauguucuuaa

SEQ ID NO: 2835205 - RNA, 19 nt, Artificial Sequence
  Description of Artificial Sequence: Synthetic oligonucleotide
auguucuuaaucuucucca

SEQ ID NO: 2835206 - RNA, 19 nt, Artificial Sequence
  Description of Artificial Sequence: Synthetic oligonucleotide
aaucuucagggcauuguac

SEQ ID NO: 2835207 - RNA, 19 nt, Artificial Sequence
  Description of Artificial Sequence: Synthetic oligonucleotide
aucuugggauccuucaccg

SEQ ID NO: 2835208 - RNA, 19 nt, Artificial Sequence
  Description of Artificial Sequence: Synthetic oligonucleotide
ucucauuccaagacuucag

SEQ ID NO: 2835209 - RNA, 19 nt, Artificial Sequence
  Description of Artificial Sequence: Synthetic oligonucleotide
guuugcaauugucuuuugg

SEQ ID NO: 2835210 - RNA, 19 nt, Artificial Sequence
  Description of Artificial Sequence: Synthetic oligonucleotide
ugguuucgagguaugaucu

SEQ ID NO: 2835211 - RNA, 19 nt, Artificial Sequence
  Description of Artificial Sequence: Synthetic oligonucleotide
cuuguaauaagcccaguca

SEQ ID NO: 2835212 - RNA, 19 nt, Artificial Sequence
  Description of Artificial Sequence: Synthetic oligonucleotide
uugguuucgagguaugauc

SEQ ID NO: 2835213 - RNA, 19 nt, Artificial Sequence
  Description of Artificial Sequence: Synthetic oligonucleotide
aucaaaggggaugauguuc

SEQ ID NO: 2835214 - RNA, 19 nt, Artificial Sequence
  Description of Artificial Sequence: Synthetic oligonucleotide
aagacuucagggaguuugc

SEQ ID NO: 2835215 - RNA, 19 nt, Artificial Sequence
  Description of Artificial Sequence: Synthetic oligonucleotide
cuggucuuguaauaagccc

SEQ ID NO: 2835216 - RNA, 19 nt, Artificial Sequence
  Description of Artificial Sequence: Synthetic oligonucleotide
uuaaucuucuccagcugcu

SEQ ID NO: 2835217 - RNA, 19 nt, Artificial Sequence
  Description of Artificial Sequence: Synthetic oligonucleotide
uucucaggcagauuagcca

SEQ ID NO: 2835218 - RNA, 19 nt, Artificial Sequence
  Description of Artificial Sequence: Synthetic oligonucleotide
uuagggcaaguuuacgccc

SEQ ID NO: 2835219 - RNA, 19 nt, Artificial Sequence
  Description of Artificial Sequence: Synthetic oligonucleotide
uuuacgcccggccaucuug

SEQ ID NO: 2835220 - RNA, 19 nt, Artificial Sequence
  Description of Artificial Sequence: Synthetic oligonucleotide
uguaauaagcccagucaau

SEQ ID NO: 2835221 - RNA, 19 nt, Artificial Sequence
  Description of Artificial Sequence: Synthetic oligonucleotide
ucuuaaucuucuccagcug

SEQ ID NO: 2835222 - RNA, 19 nt, Artificial Sequence
  Description of Artificial Sequence: Synthetic oligonucleotide
uucacauccucccuuuccu

SEQ ID NO: 2835223 - RNA, 19 nt, Artificial Sequence
  Description of Artificial Sequence: Synthetic oligonucleotide
uagggcaaguuuacgcccg

SEQ ID NO: 2835224 - RNA, 19 nt, Artificial Sequence
  Description of Artificial Sequence: Synthetic oligonucleotide
aggaacgcagcacaguucu

SEQ ID NO: 2835225 - RNA, 19 nt, Artificial Sequence
  Description of Artificial Sequence: Synthetic oligonucleotide
aucuucagggcauuguacu

SEQ ID NO: 2835226 - RNA, 19 nt, Artificial Sequence
  Description of Artificial Sequence: Synthetic oligonucleotide
ugggaagacuucauucaag

SEQ ID NO: 2835227 - RNA, 19 nt, Artificial Sequence
  Description of Artificial Sequence: Synthetic oligonucleotide
auugucuuuugguuucgag

SEQ ID NO: 2835228 - RNA, 19 nt, Artificial Sequence
  Description of Artificial Sequence: Synthetic oligonucleotide
aagacuucauucaagucau

SEQ ID NO: 2835229 - RNA, 19 nt, Artificial Sequence
  Description of Artificial Sequence: Synthetic oligonucleotide
cucuggucuuguaauaagc

SEQ ID NO: 2835230 - RNA, 19 nt, Artificial Sequence
  Description of Artificial Sequence: Synthetic oligonucleotide
caagacuucagggaguuug

SEQ ID NO: 2835231 - RNA, 19 nt, Artificial Sequence
  Description of Artificial Sequence: Synthetic oligonucleotide
cucauuccaagacuucagg

SEQ ID NO: 2835232 - RNA, 19 nt, Artificial Sequence
  Description of Artificial Sequence: Synthetic oligonucleotide
ucaggcacuggaaucuuca

SEQ ID NO: 2835233 - RNA, 19 nt, Artificial Sequence
  Description of Artificial Sequence: Synthetic oligonucleotide
acuucagggaguuugcaau

SEQ ID NO: 2835234 - RNA, 19 nt, Artificial Sequence
  Description of Artificial Sequence: Synthetic oligonucleotide
cuucucauauuccuggauc

SEQ ID NO: 2835235 - RNA, 19 nt, Artificial Sequence
  Description of Artificial Sequence: Synthetic oligonucleotide
uccuucaccgaccccggcg

SEQ ID NO: 2835236 - RNA, 19 nt, Artificial Sequence
  Description of Artificial Sequence: Synthetic oligonucleotide
gauuagccaaccuggugug

SEQ ID NO: 2835237 - RNA, 19 nt, Artificial Sequence
  Description of Artificial Sequence: Synthetic oligonucleotide
ugcaauugucuuuugguuu

SEQ ID NO: 2835238 - RNA, 19 nt, Artificial Sequence
  Description of Artificial Sequence: Synthetic oligonucleotide
caucuugggauccuucacc

SEQ ID NO: 2835239 - RNA, 19 nt, Artificial Sequence
  Description of Artificial Sequence: Synthetic oligonucleotide
ucaauggucaucugaucaa

SEQ ID NO: 2835240 - RNA, 19 nt, Artificial Sequence
  Description of Artificial Sequence: Synthetic oligonucleotide
guucuuaaucuucuccagc

SEQ ID NO: 2835241 - RNA, 19 nt, Artificial Sequence
  Description of Artificial Sequence: Synthetic oligonucleotide
augaucuccacaaaagaca

SEQ ID NO: 2835242 - RNA, 19 nt, Artificial Sequence
  Description of Artificial Sequence: Synthetic oligonucleotide
uuguacuucuuuucaaaau

SEQ ID NO: 2835243 - RNA, 19 nt, Artificial Sequence
  Description of Artificial Sequence: Synthetic oligonucleotide
cuugggauccuucaccgac

SEQ ID NO: 2835244 - RNA, 19 nt, Artificial Sequence
  Description of Artificial Sequence: Synthetic oligonucleotide
cagggcuguguauuuaucc

SEQ ID NO: 2835245 - RNA, 19 nt, Artificial Sequence
  Description of Artificial Sequence: Synthetic oligonucleotide
aagcccagucaaucgcugg

SEQ ID NO: 2835246 - RNA, 19 nt, Artificial Sequence
  Description of Artificial Sequence: Synthetic oligonucleotide
guaugaucuccacaaaaga

SEQ ID NO: 2835247 - RNA, 19 nt, Artificial Sequence
  Description of Artificial Sequence: Synthetic oligonucleotide
caaaaucauccaccaagcc

SEQ ID NO: 2835248 - RNA, 19 nt, Artificial Sequence
  Description of Artificial Sequence: Synthetic oligonucleotide
aggcagauuagccaaccug

SEQ ID NO: 2835249 - RNA, 19 nt, Artificial Sequence
  Description of Artificial Sequence: Synthetic oligonucleotide
gguaugaucuccacaaaag

SEQ ID NO: 2835250 - RNA, 19 nt, Artificial Sequence
  Description of Artificial Sequence: Synthetic oligonucleotide
cauuccaagacuucaggga

SEQ ID NO: 2835251 - RNA, 19 nt, Artificial Sequence
  Description of Artificial Sequence: Synthetic oligonucleotide
aacgcagcacaguucuuca

SEQ ID NO: 2835252 - RNA, 19 nt, Artificial Sequence
  Description of Artificial Sequence: Synthetic oligonucleotide
uccucgaugggcuggugag

SEQ ID NO: 2835253 - RNA, 19 nt, Artificial Sequence
  Description of Artificial Sequence: Synthetic oligonucleotide
uauuuauccucaggcacug

SEQ ID NO: 2835254 - RNA, 19 nt, Artificial Sequence
  Description of Artificial Sequence: Synthetic oligonucleotide
uggagggucucauuccaag

SEQ ID NO: 2835255 - RNA, 19 nt, Artificial Sequence
  Description of Artificial Sequence: Synthetic oligonucleotide
gagggucucauuccaagac

SEQ ID NO: 2835256 - RNA, 19 nt, Artificial Sequence
  Description of Artificial Sequence: Synthetic oligonucleotide
ggucaucugaucaaagggg

SEQ ID NO: 2835257 - RNA, 19 nt, Artificial Sequence
  Description of Artificial Sequence: Synthetic oligonucleotide
guaauaagcccagucaauc

SEQ ID NO: 2835258 - RNA, 19 nt, Artificial Sequence
  Description of Artificial Sequence: Synthetic oligonucleotide
acuucauucaagucaucaa

SEQ ID NO: 2835259 - RNA, 19 nt, Artificial Sequence
  Description of Artificial Sequence: Synthetic oligonucleotide
uuucgagguaugaucucca

SEQ ID NO: 2835260 - RNA, 19 nt, Artificial Sequence
  Description of Artificial Sequence: Synthetic oligonucleotide
uacuucuuuucaaaaucau

SEQ ID NO: 2835261 - RNA, 19 nt, Artificial Sequence
  Description of Artificial Sequence: Synthetic oligonucleotide
acaguucuucacauccucc

SEQ ID NO: 2835262 - RNA, 19 nt, Artificial Sequence
  Description of Artificial Sequence: Synthetic oligonucleotide
uuacgcccggccaucuugg

SEQ ID NO: 2835263 - RNA, 19 nt, Artificial Sequence
  Description of Artificial Sequence: Synthetic oligonucleotide
acucuggucuuguaauaag

SEQ ID NO: 2835264 - RNA, 19 nt, Artificial Sequence
  Description of Artificial Sequence: Synthetic oligonucleotide
cuguguauuuauccucagg

SEQ ID NO: 2835265 - RNA, 19 nt, Artificial Sequence
  Description of Artificial Sequence: Synthetic oligonucleotide
auccucaggcacuggaauc

SEQ ID NO: 2835266 - RNA, 19 nt, Artificial Sequence
  Description of Artificial Sequence: Synthetic oligonucleotide
uguccagcuugguuucugg

SEQ ID NO: 2835267 - RNA, 19 nt, Artificial Sequence
  Description of Artificial Sequence: Synthetic oligonucleotide
uccagcuugguuucuggga

SEQ ID NO: 2835268 - RNA, 19 nt, Artificial Sequence
  Description of Artificial Sequence: Synthetic oligonucleotide
cuggugguuucucaggcag

SEQ ID NO: 2835269 - RNA, 19 nt, Artificial Sequence
  Description of Artificial Sequence: Synthetic oligonucleotide
ucgagguaugaucuccaca

SEQ ID NO: 2835270 - RNA, 19 nt, Artificial Sequence
  Description of Artificial Sequence: Synthetic oligonucleotide
ggauccuucaccgaccccg

SEQ ID NO: 2835271 - RNA, 19 nt, Artificial Sequence
  Description of Artificial Sequence: Synthetic oligonucleotide
gacuucauucaagucauca

SEQ ID NO: 2835272 - RNA, 19 nt, Artificial Sequence
  Description of Artificial Sequence: Synthetic oligonucleotide
uuucaaaaucauccaccaa

SEQ ID NO: 2835273 - RNA, 19 nt, Artificial Sequence
  Description of Artificial Sequence: Synthetic oligonucleotide
uugcaauugucuuuugguu

SEQ ID NO: 2835274 - RNA, 19 nt, Artificial Sequence
  Description of Artificial Sequence: Synthetic oligonucleotide
guuucgagguaugaucucc

SEQ ID NO: 2835275 - RNA, 19 nt, Artificial Sequence
  Description of Artificial Sequence: Synthetic oligonucleotide
aucgcuggugguuucucag

SEQ ID NO: 2835276 - RNA, 19 nt, Artificial Sequence
  Description of Artificial Sequence: Synthetic oligonucleotide
uucacagguccucgauggg

SEQ ID NO: 2835277 - RNA, 19 nt, Artificial Sequence
  Description of Artificial Sequence: Synthetic oligonucleotide
agggguacuucuucuuguc

SEQ ID NO: 2835278 - RNA, 19 nt, Artificial Sequence
  Description of Artificial Sequence: Synthetic oligonucleotide
caccaagccagccuuggcc

SEQ ID NO: 2835279 - RNA, 19 nt, Artificial Sequence
  Description of Artificial Sequence: Synthetic oligonucleotide
uucagggcauuguacuucu

SEQ ID NO: 2835280 - RNA, 19 nt, Artificial Sequence
  Description of Artificial Sequence: Synthetic oligonucleotide
uugggauccuucaccgacc

SEQ ID NO: 2835281 - RNA, 19 nt, Artificial Sequence
  Description of Artificial Sequence: Synthetic oligonucleotide
aaucgcuggugguuucuca

SEQ ID NO: 2835282 - RNA, 19 nt, Artificial Sequence
  Description of Artificial Sequence: Synthetic oligonucleotide
guguauuuauccucaggca

SEQ ID NO: 2835283 - RNA, 19 nt, Artificial Sequence
  Description of Artificial Sequence: Synthetic oligonucleotide
guagggguacuucuucuug

SEQ ID NO: 2835284 - RNA, 19 nt, Artificial Sequence
  Description of Artificial Sequence: Synthetic oligonucleotide
uuugguuucgagguaugau

SEQ ID NO: 2835285 - RNA, 19 nt, Artificial Sequence
  Description of Artificial Sequence: Synthetic oligonucleotide
aaucauccaccaagccagc

SEQ ID NO: 2835286 - RNA, 19 nt, Artificial Sequence
  Description of Artificial Sequence: Synthetic oligonucleotide
uaagcccagucaaucgcug

SEQ ID NO: 2835287 - RNA, 19 nt, Artificial Sequence
  Description of Artificial Sequence: Synthetic oligonucleotide
caucugaucaaaggggaug

SEQ ID NO: 2835288 - RNA, 19 nt, Artificial Sequence
  Description of Artificial Sequence: Synthetic oligonucleotide
cacaaaagacacccaauca

SEQ ID NO: 2835289 - RNA, 19 nt, Artificial Sequence
  Description of Artificial Sequence: Synthetic oligonucleotide
ugggauccuucaccgaccc

SEQ ID NO: 2835290 - RNA, 19 nt, Artificial Sequence
  Description of Artificial Sequence: Synthetic oligonucleotide
aaguuuacgcccggccauc

SEQ ID NO: 2835291 - RNA, 19 nt, Artificial Sequence
  Description of Artificial Sequence: Synthetic oligonucleotide
acaggaacgcagcacaguu

SEQ ID NO: 2835292 - RNA, 19 nt, Artificial Sequence
  Description of Artificial Sequence: Synthetic oligonucleotide
aguucuucacauccucccu

SEQ ID NO: 2835293 - RNA, 19 nt, Artificial Sequence
  Description of Artificial Sequence: Synthetic oligonucleotide
uuagccaaccuggugugga

SEQ ID NO: 2835294 - RNA, 19 nt, Artificial Sequence
  Description of Artificial Sequence: Synthetic oligonucleotide
cauuguacuucuuuucaaa

SEQ ID NO: 2835295 - RNA, 19 nt, Artificial Sequence
  Description of Artificial Sequence: Synthetic oligonucleotide
uagggguacuucuucuugu

SEQ ID NO: 2835296 - RNA, 19 nt, Artificial Sequence
  Description of Artificial Sequence: Synthetic oligonucleotide
accaagccagccuuggcca

SEQ ID NO: 2835297 - RNA, 19 nt, Artificial Sequence
  Description of Artificial Sequence: Synthetic oligonucleotide
guacuucuuuucaaaauca

SEQ ID NO: 2835298 - RNA, 19 nt, Artificial Sequence
  Description of Artificial Sequence: Synthetic oligonucleotide
aucugaucaaaggggauga

SEQ ID NO: 2835299 - RNA, 19 nt, Artificial Sequence
  Description of Artificial Sequence: Synthetic oligonucleotide
augauguucuuaaucuucu

SEQ ID NO: 2835300 - RNA, 19 nt, Artificial Sequence
  Description of Artificial Sequence: Synthetic oligonucleotide
uccuggauccuguccuggg

SEQ ID NO: 2835301 - RNA, 19 nt, Artificial Sequence
  Description of Artificial Sequence: Synthetic oligonucleotide
uuuugguuucgagguauga

SEQ ID NO: 2835302 - RNA, 19 nt, Artificial Sequence
  Description of Artificial Sequence: Synthetic oligonucleotide
agggucucauuccaagacu

SEQ ID NO: 2835303 - RNA, 19 nt, Artificial Sequence
  Description of Artificial Sequence: Synthetic oligonucleotide
ucaucugaucaaaggggau

SEQ ID NO: 2835304 - RNA, 19 nt, Artificial Sequence
  Description of Artificial Sequence: Synthetic oligonucleotide
ucgcuggugguuucucagg

SEQ ID NO: 2835305 - RNA, 19 nt, Artificial Sequence
  Description of Artificial Sequence: Synthetic oligonucleotide
uucagggaguuugcaauug

SEQ ID NO: 2835306 - RNA, 19 nt, Artificial Sequence
  Description of Artificial Sequence: Synthetic oligonucleotide
ucacagguccucgaugggc

SEQ ID NO: 2835307 - RNA, 19 nt, Artificial Sequence
  Description of Artificial Sequence: Synthetic oligonucleotide
ucagacaggaacgcagcac

SEQ ID NO: 2835308 - RNA, 19 nt, Artificial Sequence
  Description of Artificial Sequence: Synthetic oligonucleotide
guuucucaggcagauuagc

SEQ ID NO: 2835309 - RNA, 19 nt, Artificial Sequence
  Description of Artificial Sequence: Synthetic oligonucleotide
uuucugggaagacuucauu

SEQ ID NO: 2835310 - RNA, 19 nt, Artificial Sequence
  Description of Artificial Sequence: Synthetic oligonucleotide
uccucaggcacuggaaucu

SEQ ID NO: 2835311 - RNA, 19 nt, Artificial Sequence
  Description of Artificial Sequence: Synthetic oligonucleotide
ucaggcagauuagccaacc

SEQ ID NO: 2835312 - RNA, 19 nt, Artificial Sequence
  Description of Artificial Sequence: Synthetic oligonucleotide
uccaccaagccagccuugg

SEQ ID NO: 2835313 - RNA, 19 nt, Artificial Sequence
  Description of Artificial Sequence: Synthetic oligonucleotide
ugauguucuuaaucuucuc

SEQ ID NO: 2835314 - RNA, 19 nt, Artificial Sequence
  Description of Artificial Sequence: Synthetic oligonucleotide
caagucaucaauggucauc

SEQ ID NO: 2835315 - RNA, 19 nt, Artificial Sequence
  Description of Artificial Sequence: Synthetic oligonucleotide
gggaugauguucuuaaucu

SEQ ID NO: 2835316 - RNA, 19 nt, Artificial Sequence
  Description of Artificial Sequence: Synthetic oligonucleotide
cagauuagccaaccuggug

SEQ ID NO: 2835317 - RNA, 19 nt, Artificial Sequence
  Description of Artificial Sequence: Synthetic oligonucleotide
cacaguucuucacauccuc

SEQ ID NO: 2835318 - RNA, 19 nt, Artificial Sequence
  Description of Artificial Sequence: Synthetic oligonucleotide
gaacgcagcacaguucuuc

SEQ ID NO: 2835319 - RNA, 19 nt, Artificial Sequence
  Description of Artificial Sequence: Synthetic oligonucleotide
gcaauugucuuuugguuuc

SEQ ID NO: 2835320 - RNA, 19 nt, Artificial Sequence
  Description of Artificial Sequence: Synthetic oligonucleotide
gucaucugaucaaagggga

SEQ ID NO: 2835321 - RNA, 19 nt, Artificial Sequence
  Description of Artificial Sequence: Synthetic oligonucleotide
agggaguuugcaauugucu

SEQ ID NO: 2835322 - RNA, 19 nt, Artificial Sequence
  Description of Artificial Sequence: Synthetic oligonucleotide
cucauuguccaccagggcu

SEQ ID NO: 2835323 - RNA, 19 nt, Artificial Sequence
  Description of Artificial Sequence: Synthetic oligonucleotide
cuuuugguuucgagguaug

SEQ ID NO: 2835324 - RNA, 19 nt, Artificial Sequence
  Description of Artificial Sequence: Synthetic oligonucleotide
ugcuucucauauuccugga

SEQ ID NO: 2835325 - RNA, 19 nt, Artificial Sequence
  Description of Artificial Sequence: Synthetic oligonucleotide
ggcauuguacuucuuuuca

SEQ ID NO: 2835326 - RNA, 19 nt, Artificial Sequence
  Description of Artificial Sequence: Synthetic oligonucleotide
cucgaugggcuggugaggc

SEQ ID NO: 2835327 - RNA, 19 nt, Artificial Sequence
  Description of Artificial Sequence: Synthetic oligonucleotide
ucuccacaaaagacaccca

SEQ ID NO: 2835328 - RNA, 19 nt, Artificial Sequence
  Description of Artificial Sequence: Synthetic oligonucleotide
ucucauauuccuggauccu

SEQ ID NO: 2835329 - RNA, 19 nt, Artificial Sequence
  Description of Artificial Sequence: Synthetic oligonucleotide
aauugucuuuugguuucga

SEQ ID NO: 2835330 - RNA, 19 nt, Artificial Sequence
  Description of Artificial Sequence: Synthetic oligonucleotide
ucuucagggcauuguacuu

SEQ ID NO: 2835331 - RNA, 19 nt, Artificial Sequence
  Description of Artificial Sequence: Synthetic oligonucleotide
caucaauggucaucugauc

SEQ ID NO: 2835332 - RNA, 19 nt, Artificial Sequence
  Description of Artificial Sequence: Synthetic oligonucleotide
ggggaugauguucuuaauc

SEQ ID NO: 2835333 - RNA, 19 nt, Artificial Sequence
  Description of Artificial Sequence: Synthetic oligonucleotide
guguggagggucucauucc

SEQ ID NO: 2835334 - RNA, 19 nt, Artificial Sequence
  Description of Artificial Sequence: Synthetic oligonucleotide
uucgagguaugaucuccac

SEQ ID NO: 2835335 - RNA, 19 nt, Artificial Sequence
  Description of Artificial Sequence: Synthetic oligonucleotide
aaaggggaugauguucuua

SEQ ID NO: 2835336 - RNA, 19 nt, Artificial Sequence
  Description of Artificial Sequence: Synthetic oligonucleotide
cacuggaaucuucagggca

SEQ ID NO: 2835337 - RNA, 19 nt, Artificial Sequence
  Description of Artificial Sequence: Synthetic oligonucleotide
gauccuucaccgaccccgg

SEQ ID NO: 2835338 - RNA, 19 nt, Artificial Sequence
  Description of Artificial Sequence: Synthetic oligonucleotide
uucuucacauccucccuuu

SEQ ID NO: 2835339 - RNA, 19 nt, Artificial Sequence
  Description of Artificial Sequence: Synthetic oligonucleotide
ggcuggugaggccaguagg

SEQ ID NO: 2835340 - RNA, 19 nt, Artificial Sequence
  Description of Artificial Sequence: Synthetic oligonucleotide
ccacaaaagacacccaauc

SEQ ID NO: 2835341 - RNA, 19 nt, Artificial Sequence
  Description of Artificial Sequence: Synthetic oligonucleotide
caaaagacacccaaucaau

SEQ ID NO: 2835342 - RNA, 19 nt, Artificial Sequence
  Description of Artificial Sequence: Synthetic oligonucleotide
cagggaguuugcaauuguc

SEQ ID NO: 2835343 - RNA, 19 nt, Artificial Sequence
  Description of Artificial Sequence: Synthetic oligonucleotide
cuucagggcauuguacuuc

SEQ ID NO: 2835344 - RNA, 19 nt, Artificial Sequence
  Description of Artificial Sequence: Synthetic oligonucleotide
caauugucuuuugguuucg

SEQ ID NO: 2835345 - RNA, 19 nt, Artificial Sequence
  Description of Artificial Sequence: Synthetic oligonucleotide
gucucauuccaagacuuca

SEQ ID NO: 2835346 - RNA, 19 nt, Artificial Sequence
  Description of Artificial Sequence: Synthetic oligonucleotide
aguagggguacuucuucuu

SEQ ID NO: 2835347 - RNA, 19 nt, Artificial Sequence
  Description of Artificial Sequence: Synthetic oligonucleotide
uccugggauucagacagga

SEQ ID NO: 2835348 - RNA, 19 nt, Artificial Sequence
  Description of Artificial Sequence: Synthetic oligonucleotide
uuccuggauccuguccugg

SEQ ID NO: 2835349 - RNA, 19 nt, Artificial Sequence
  Description of Artificial Sequence: Synthetic oligonucleotide
acgcagcacaguucuucac

SEQ ID NO: 2835350 - RNA, 19 nt, Artificial Sequence
  Description of Artificial Sequence: Synthetic oligonucleotide
auuagccaaccuggugugg

SEQ ID NO: 2835351 - RNA, 19 nt, Artificial Sequence
  Description of Artificial Sequence: Synthetic oligonucleotide
cauauuccuggauccuguc

SEQ ID NO: 2835352 - RNA, 19 nt, Artificial Sequence
  Description of Artificial Sequence: Synthetic oligonucleotide
auaagcccagucaaucgcu

SEQ ID NO: 2835353 - RNA, 19 nt, Artificial Sequence
  Description of Artificial Sequence: Synthetic oligonucleotide
ggcaaguuuacgcccggcc

SEQ ID NO: 2835354 - RNA, 19 nt, Artificial Sequence
  Description of Artificial Sequence: Synthetic oligonucleotide
ucuugggauccuucaccga

SEQ ID NO: 2835355 - RNA, 19 nt, Artificial Sequence
  Description of Artificial Sequence: Synthetic oligonucleotide
agcccagucaaucgcuggu

SEQ ID NO: 2835356 - RNA, 19 nt, Artificial Sequence
  Description of Artificial Sequence: Synthetic oligonucleotide
uggugguuucucaggcaga

SEQ ID NO: 2835357 - RNA, 19 nt, Artificial Sequence
  Description of Artificial Sequence: Synthetic oligonucleotide
agccuuggccacucugguc

SEQ ID NO: 2835358 - RNA, 19 nt, Artificial Sequence
  Description of Artificial Sequence: Synthetic oligonucleotide
acuggaaucuucagggcau

SEQ ID NO: 2835359 - RNA, 19 nt, Artificial Sequence
  Description of Artificial Sequence: Synthetic oligonucleotide
gaucuccacaaaagacacc

SEQ ID NO: 2835360 - RNA, 19 nt, Artificial Sequence
  Description of Artificial Sequence: Synthetic oligonucleotide
gcuggugaggccaguaggg

SEQ ID NO: 2835361 - RNA, 19 nt, Artificial Sequence
  Description of Artificial Sequence: Synthetic oligonucleotide
aguuugcaauugucuuuug

SEQ ID NO: 2835362 - RNA, 19 nt, Artificial Sequence
  Description of Artificial Sequence: Synthetic oligonucleotide
cuccacaaaagacacccaa

SEQ ID NO: 2835363 - RNA, 19 nt, Artificial Sequence
  Description of Artificial Sequence: Synthetic oligonucleotide
auccucccuuuccucauug

SEQ ID NO: 2835364 - RNA, 19 nt, Artificial Sequence
  Description of Artificial Sequence: Synthetic oligonucleotide
ggucuuguaauaagcccag

SEQ ID NO: 2835365 - RNA, 19 nt, Artificial Sequence
  Description of Artificial Sequence: Synthetic oligonucleotide
cuggugaggccaguagggg

SEQ ID NO: 2835366 - RNA, 19 nt, Artificial Sequence
  Description of Artificial Sequence: Synthetic oligonucleotide
agggcaaguuuacgcccgg

SEQ ID NO: 2835367 - RNA, 19 nt, Artificial Sequence
  Description of Artificial Sequence: Synthetic oligonucleotide
uuguccaccagggcugugu

SEQ ID NO: 2835368 - RNA, 19 nt, Artificial Sequence
  Description of Artificial Sequence: Synthetic oligonucleotide
guauuuauccucaggcacu

SEQ ID NO: 2835369 - RNA, 19 nt, Artificial Sequence
  Description of Artificial Sequence: Synthetic oligonucleotide
accagggcuguguauuuau

SEQ ID NO: 2835370 - RNA, 19 nt, Artificial Sequence
  Description of Artificial Sequence: Synthetic oligonucleotide
ucuucacauccucccuuuc

SEQ ID NO: 2835371 - RNA, 19 nt, Artificial Sequence
  Description of Artificial Sequence: Synthetic oligonucleotide
aagccagccuuggccacuc

SEQ ID NO: 2835372 - RNA, 19 nt, Artificial Sequence
  Description of Artificial Sequence: Synthetic oligonucleotide
ucaagucaucaauggucau

SEQ ID NO: 2835373 - RNA, 19 nt, Artificial Sequence
  Description of Artificial Sequence: Synthetic oligonucleotide
gccaaccugguguggaggg

SEQ ID NO: 2835374 - RNA, 19 nt, Artificial Sequence
  Description of Artificial Sequence: Synthetic oligonucleotide
uggaaucuucagggcauug

SEQ ID NO: 2835375 - RNA, 19 nt, Artificial Sequence
  Description of Artificial Sequence: Synthetic oligonucleotide
cacauccucccuuuccuca

SEQ ID NO: 2835376 - RNA, 19 nt, Artificial Sequence
  Description of Artificial Sequence: Synthetic oligonucleotide
ggaagacuucauucaaguc

SEQ ID NO: 2835377 - RNA, 19 nt, Artificial Sequence
  Description of Artificial Sequence: Synthetic oligonucleotide
ucacauccucccuuuccuc

SEQ ID NO: 2835378 - RNA, 19 nt, Artificial Sequence
  Description of Artificial Sequence: Synthetic oligonucleotide
ucaaucgcuggugguuucu

SEQ ID NO: 2835379 - RNA, 19 nt, Artificial Sequence
  Description of Artificial Sequence: Synthetic oligonucleotide
auuuauccucaggcacugg

SEQ ID NO: 2835380 - RNA, 19 nt, Artificial Sequence
  Description of Artificial Sequence: Synthetic oligonucleotide
cucaggcagauuagccaac

SEQ ID NO: 2835381 - RNA, 19 nt, Artificial Sequence
  Description of Artificial Sequence: Synthetic oligonucleotide
agccaaccugguguggagg

SEQ ID NO: 2835382 - RNA, 19 nt, Artificial Sequence
  Description of Artificial Sequence: Synthetic oligonucleotide
ccuguccugggauucagac

SEQ ID NO: 2835383 - RNA, 19 nt, Artificial Sequence
  Description of Artificial Sequence: Synthetic oligonucleotide
acauccucccuuuccucau

SEQ ID NO: 2835384 - RNA, 19 nt, Artificial Sequence
  Description of Artificial Sequence: Synthetic oligonucleotide
caggaacgcagcacaguuc

SEQ ID NO: 2835385 - RNA, 19 nt, Artificial Sequence
  Description of Artificial Sequence: Synthetic oligonucleotide
gcaaguuuacgcccggcca

SEQ ID NO: 2835386 - RNA, 19 nt, Artificial Sequence
  Description of Artificial Sequence: Synthetic oligonucleotide
gggaagacuucauucaagu

SEQ ID NO: 2835387 - RNA, 19 nt, Artificial Sequence
  Description of Artificial Sequence: Synthetic oligonucleotide
agucaucaauggucaucug

SEQ ID NO: 2835388 - RNA, 19 nt, Artificial Sequence
  Description of Artificial Sequence: Synthetic oligonucleotide
agcuugguuucugggaaga

SEQ ID NO: 2835389 - RNA, 19 nt, Artificial Sequence
  Description of Artificial Sequence: Synthetic oligonucleotide
uguccaccagggcugugua

SEQ ID NO: 2835390 - RNA, 19 nt, Artificial Sequence
  Description of Artificial Sequence: Synthetic oligonucleotide
uccuguccugggauucaga

SEQ ID NO: 2835391 - RNA, 19 nt, Artificial Sequence
  Description of Artificial Sequence: Synthetic oligonucleotide
gggguacuucuucuugucc

SEQ ID NO: 2835392 - RNA, 19 nt, Artificial Sequence
  Description of Artificial Sequence: Synthetic oligonucleotide
uucaccgaccccggcggag

SEQ ID NO: 2835393 - RNA, 19 nt, Artificial Sequence
  Description of Artificial Sequence: Synthetic oligonucleotide
gguuucucaggcagauuag

SEQ ID NO: 2835394 - RNA, 19 nt, Artificial Sequence
  Description of Artificial Sequence: Synthetic oligonucleotide
acacccaaucaaugguuuu

SEQ ID NO: 2835395 - RNA, 19 nt, Artificial Sequence
  Description of Artificial Sequence: Synthetic oligonucleotide
agucaaucgcuggugguuu

SEQ ID NO: 2835396 - RNA, 19 nt, Artificial Sequence
  Description of Artificial Sequence: Synthetic oligonucleotide
cugggaagacuucauucaa

SEQ ID NO: 2835397 - RNA, 19 nt, Artificial Sequence
  Description of Artificial Sequence: Synthetic oligonucleotide
gaugggcuggugaggccag

SEQ ID NO: 2835398 - RNA, 19 nt, Artificial Sequence
  Description of Artificial Sequence: Synthetic oligonucleotide
ucgaugggcuggugaggcc

SEQ ID NO: 2835399 - RNA, 19 nt, Artificial Sequence
  Description of Artificial Sequence: Synthetic oligonucleotide
gaguuugcaauugucuuuu

SEQ ID NO: 2835400 - RNA, 19 nt, Artificial Sequence
  Description of Artificial Sequence: Synthetic oligonucleotide
uacgcccggccaucuuggg

SEQ ID NO: 2835401 - RNA, 19 nt, Artificial Sequence
  Description of Artificial Sequence: Synthetic oligonucleotide
acagguccucgaugggcug

SEQ ID NO: 2835402 - RNA, 19 nt, Artificial Sequence
  Description of Artificial Sequence: Synthetic oligonucleotide
ccuucaccgaccccggcgg

SEQ ID NO: 2835403 - RNA, 19 nt, Artificial Sequence
  Description of Artificial Sequence: Synthetic oligonucleotide
gggauucagacaggaacgc

SEQ ID NO: 2835404 - RNA, 19 nt, Artificial Sequence
  Description of Artificial Sequence: Synthetic oligonucleotide
gcuguguauuuauccucag

SEQ ID NO: 2835405 - RNA, 19 nt, Artificial Sequence
  Description of Artificial Sequence: Synthetic oligonucleotide
cuguccugggauucagaca

SEQ ID NO: 2835406 - RNA, 19 nt, Artificial Sequence
  Description of Artificial Sequence: Synthetic oligonucleotide
cucaggcacuggaaucuuc

SEQ ID NO: 2835407 - RNA, 19 nt, Artificial Sequence
  Description of Artificial Sequence: Synthetic oligonucleotide
caaccugguguggaggguc

SEQ ID NO: 2835408 - RNA, 19 nt, Artificial Sequence
  Description of Artificial Sequence: Synthetic oligonucleotide
agacacccaaucaaugguu

SEQ ID NO: 2835409 - RNA, 19 nt, Artificial Sequence
  Description of Artificial Sequence: Synthetic oligonucleotide
gguuucugggaagacuuca

SEQ ID NO: 2835410 - RNA, 19 nt, Artificial Sequence
  Description of Artificial Sequence: Synthetic oligonucleotide
aaccugguguggagggucu

SEQ ID NO: 2835411 - RNA, 19 nt, Artificial Sequence
  Description of Artificial Sequence: Synthetic oligonucleotide
cccagucaaucgcuggugg

SEQ ID NO: 2835412 - RNA, 19 nt, Artificial Sequence
  Description of Artificial Sequence: Synthetic oligonucleotide
ccuuuccucauuguccacc

SEQ ID NO: 2835413 - RNA, 19 nt, Artificial Sequence
  Description of Artificial Sequence: Synthetic oligonucleotide
gggcuguguauuuauccuc

SEQ ID NO: 2835414 - RNA, 19 nt, Artificial Sequence
  Description of Artificial Sequence: Synthetic oligonucleotide
ucugaucaaaggggaugau

SEQ ID NO: 2835415 - RNA, 19 nt, Artificial Sequence
  Description of Artificial Sequence: Synthetic oligonucleotide
ggcuguguauuuauccuca

SEQ ID NO: 2835416 - RNA, 19 nt, Artificial Sequence
  Description of Artificial Sequence: Synthetic oligonucleotide
cagguccucgaugggcugg

SEQ ID NO: 2835417 - RNA, 19 nt, Artificial Sequence
  Description of Artificial Sequence: Synthetic oligonucleotide
gcauuguacuucuuuucaa

SEQ ID NO: 2835418 - RNA, 19 nt, Artificial Sequence
  Description of Artificial Sequence: Synthetic oligonucleotide
ggagggucucauuccaaga

SEQ ID NO: 2835419 - RNA, 19 nt, Artificial Sequence
  Description of Artificial Sequence: Synthetic oligonucleotide
gaucaaaggggaugauguu

SEQ ID NO: 2835420 - RNA, 19 nt, Artificial Sequence
  Description of Artificial Sequence: Synthetic oligonucleotide
auccuguccugggauucag

SEQ ID NO: 2835421 - RNA, 19 nt, Artificial Sequence
  Description of Artificial Sequence: Synthetic oligonucleotide
caauggucaucugaucaaa

SEQ ID NO: 2835422 - RNA, 19 nt, Artificial Sequence
  Description of Artificial Sequence: Synthetic oligonucleotide
guccucgaugggcugguga

SEQ ID NO: 2835423 - RNA, 19 nt, Artificial Sequence
  Description of Artificial Sequence: Synthetic oligonucleotide
cagcacaguucuucacauc

SEQ ID NO: 2835424 - RNA, 19 nt, Artificial Sequence
  Description of Artificial Sequence: Synthetic oligonucleotide
gucaaucgcuggugguuuc

SEQ ID NO: 2835425 - RNA, 19 nt, Artificial Sequence
  Description of Artificial Sequence: Synthetic oligonucleotide
gguuucgagguaugaucuc

SEQ ID NO: 2835426 - RNA, 19 nt, Artificial Sequence
  Description of Artificial Sequence: Synthetic oligonucleotide
gauccuguccugggauuca

SEQ ID NO: 2835427 - RNA, 19 nt, Artificial Sequence
  Description of Artificial Sequence: Synthetic oligonucleotide
aguuuacgcccggccaucu

SEQ ID NO: 2835428 - RNA, 19 nt, Artificial Sequence
  Description of Artificial Sequence: Synthetic oligonucleotide
cacucuggucuuguaauaa

SEQ ID NO: 2835429 - RNA, 19 nt, Artificial Sequence
  Description of Artificial Sequence: Synthetic oligonucleotide
gccuuggccacucuggucu

SEQ ID NO: 2835430 - RNA, 19 nt, Artificial Sequence
  Description of Artificial Sequence: Synthetic oligonucleotide
agacuucauucaagucauc

SEQ ID NO: 2835431 - RNA, 19 nt, Artificial Sequence
  Description of Artificial Sequence: Synthetic oligonucleotide
cacagguccucgaugggcu

SEQ ID NO: 2835432 - RNA, 19 nt, Artificial Sequence
  Description of Artificial Sequence: Synthetic oligonucleotide
caaguuuacgcccggccau

SEQ ID NO: 2835433 - RNA, 19 nt, Artificial Sequence
  Description of Artificial Sequence: Synthetic oligonucleotide
ggaguuugcaauugucuuu

SEQ ID NO: 2835434 - RNA, 19 nt, Artificial Sequence
  Description of Artificial Sequence: Synthetic oligonucleotide
gggcuggugaggccaguag

SEQ ID NO: 2835435 - RNA, 19 nt, Artificial Sequence
  Description of Artificial Sequence: Synthetic oligonucleotide
acgcccggccaucuuggga

SEQ ID NO: 2835436 - RNA, 19 nt, Artificial Sequence
  Description of Artificial Sequence: Synthetic oligonucleotide
gggaguuugcaauugucuu

SEQ ID NO: 2835437 - RNA, 19 nt, Artificial Sequence
  Description of Artificial Sequence: Synthetic oligonucleotide
ccucccuuuccucauuguc

SEQ ID NO: 2835438 - RNA, 19 nt, Artificial Sequence
  Description of Artificial Sequence: Synthetic oligonucleotide
caaucgcuggugguuucuc

SEQ ID NO: 2835439 - RNA, 19 nt, Artificial Sequence
  Description of Artificial Sequence: Synthetic oligonucleotide
gacaggaacgcagcacagu

SEQ ID NO: 2835440 - RNA, 19 nt, Artificial Sequence
  Description of Artificial Sequence: Synthetic oligonucleotide
ggauucagacaggaacgca

SEQ ID NO: 2835441 - RNA, 19 nt, Artificial Sequence
  Description of Artificial Sequence: Synthetic oligonucleotide
gacacccaaucaaugguuu

SEQ ID NO: 2835442 - RNA, 19 nt, Artificial Sequence
  Description of Artificial Sequence: Synthetic oligonucleotide
ccucauuguccaccagggc

SEQ ID NO: 2835443 - RNA, 19 nt, Artificial Sequence
  Description of Artificial Sequence: Synthetic oligonucleotide
ugguguggagggucucauu

SEQ ID NO: 2835444 - RNA, 19 nt, Artificial Sequence
  Description of Artificial Sequence: Synthetic oligonucleotide
ggauccuguccugggauuc

SEQ ID NO: 2835445 - RNA, 19 nt, Artificial Sequence
  Description of Artificial Sequence: Synthetic oligonucleotide
caguagggguacuucuucu

SEQ ID NO: 2835446 - RNA, 19 nt, Artificial Sequence
  Description of Artificial Sequence: Synthetic oligonucleotide
accugguguggagggucuc

SEQ ID NO: 2835447 - RNA, 19 nt, Artificial Sequence
  Description of Artificial Sequence: Synthetic oligonucleotide
guccugggauucagacagg

SEQ ID NO: 2835448 - RNA, 19 nt, Artificial Sequence
  Description of Artificial Sequence: Synthetic oligonucleotide
ggaugauguucuuaaucuu

SEQ ID NO: 2835449 - RNA, 19 nt, Artificial Sequence
  Description of Artificial Sequence: Synthetic oligonucleotide
ggugaggccaguaggggua

SEQ ID NO: 2835450 - RNA, 19 nt, Artificial Sequence
  Description of Artificial Sequence: Synthetic oligonucleotide
cuucagggaguuugcaauu

SEQ ID NO: 2835451 - RNA, 19 nt, Artificial Sequence
  Description of Artificial Sequence: Synthetic oligonucleotide
cgcuggugguuucucaggc

SEQ ID NO: 2835452 - RNA, 19 nt, Artificial Sequence
  Description of Artificial Sequence: Synthetic oligonucleotide
ggccacucuggucuuguaa

SEQ ID NO: 2835453 - RNA, 19 nt, Artificial Sequence
  Description of Artificial Sequence: Synthetic oligonucleotide
gcuggugguuucucaggca

SEQ ID NO: 2835454 - RNA, 19 nt, Artificial Sequence
  Description of Artificial Sequence: Synthetic oligonucleotide
ugggcuggugaggccagua

SEQ ID NO: 2835455 - RNA, 19 nt, Artificial Sequence
  Description of Artificial Sequence: Synthetic oligonucleotide
ggucucauuccaagacuuc

SEQ ID NO: 2835456 - RNA, 19 nt, Artificial Sequence
  Description of Artificial Sequence: Synthetic oligonucleotide
gugaggccaguagggguac

SEQ ID NO: 2835457 - RNA, 19 nt, Artificial Sequence
  Description of Artificial Sequence: Synthetic oligonucleotide
gccacucuggucuuguaau

SEQ ID NO: 2835458 - RNA, 19 nt, Artificial Sequence
  Description of Artificial Sequence: Synthetic oligonucleotide
guuucugggaagacuucau

SEQ ID NO: 2835459 - RNA, 19 nt, Artificial Sequence
  Description of Artificial Sequence: Synthetic oligonucleotide
agguccucgaugggcuggu

SEQ ID NO: 2835460 - RNA, 19 nt, Artificial Sequence
  Description of Artificial Sequence: Synthetic oligonucleotide
cuggauccuguccugggau

SEQ ID NO: 2835461 - RNA, 19 nt, Artificial Sequence
  Description of Artificial Sequence: Synthetic oligonucleotide
ccagggcuguguauuuauc

SEQ ID NO: 2835462 - RNA, 19 nt, Artificial Sequence
  Description of Artificial Sequence: Synthetic oligonucleotide
gcccagucaaucgcuggug

SEQ ID NO: 2835463 - RNA, 19 nt, Artificial Sequence
  Description of Artificial Sequence: Synthetic oligonucleotide
ccucgaugggcuggugagg

SEQ ID NO: 2835464 - RNA, 19 nt, Artificial Sequence
  Description of Artificial Sequence: Synthetic oligonucleotide
cgcagcacaguucuucaca

SEQ ID NO: 2835465 - RNA, 19 nt, Artificial Sequence
  Description of Artificial Sequence: Synthetic oligonucleotide
gcuugguuucugggaagac

SEQ ID NO: 2835466 - RNA, 19 nt, Artificial Sequence
  Description of Artificial Sequence: Synthetic oligonucleotide
ccaagccagccuuggccac

SEQ ID NO: 2835467 - RNA, 19 nt, Artificial Sequence
  Description of Artificial Sequence: Synthetic oligonucleotide
ccaccaagccagccuuggc

SEQ ID NO: 2835468 - RNA, 19 nt, Artificial Sequence
  Description of Artificial Sequence: Synthetic oligonucleotide
uggccacucuggucuugua

SEQ ID NO: 2835469 - RNA, 19 nt, Artificial Sequence
  Description of Artificial Sequence: Synthetic oligonucleotide
gggauccuucaccgacccc

SEQ ID NO: 2835470 - RNA, 19 nt, Artificial Sequence
  Description of Artificial Sequence: Synthetic oligonucleotide
gcuucucauauuccuggau

SEQ ID NO: 2835471 - RNA, 19 nt, Artificial Sequence
  Description of Artificial Sequence: Synthetic oligonucleotide
guggagggucucauuccaa

SEQ ID NO: 2835472 - RNA, 19 nt, Artificial Sequence
  Description of Artificial Sequence: Synthetic oligonucleotide
caggcagauuagccaaccu

SEQ ID NO: 2835473 - RNA, 19 nt, Artificial Sequence
  Description of Artificial Sequence: Synthetic oligonucleotide
ccuggauccuguccuggga

SEQ ID NO: 2835474 - RNA, 19 nt, Artificial Sequence
  Description of Artificial Sequence: Synthetic oligonucleotide
cuucaccgaccccggcgga

SEQ ID NO: 2835475 - RNA, 19 nt, Artificial Sequence
  Description of Artificial Sequence: Synthetic oligonucleotide
cagucaaucgcuggugguu

SEQ ID NO: 2835476 - RNA, 19 nt, Artificial Sequence
  Description of Artificial Sequence: Synthetic oligonucleotide
gggcaaguuuacgcccggc

SEQ ID NO: 2835477 - RNA, 19 nt, Artificial Sequence
  Description of Artificial Sequence: Synthetic oligonucleotide
gggucucauuccaagacuu

SEQ ID NO: 2835478 - RNA, 19 nt, Artificial Sequence
  Description of Artificial Sequence: Synthetic oligonucleotide
cagccuuggccacucuggu

SEQ ID NO: 2835479 - RNA, 19 nt, Artificial Sequence
  Description of Artificial Sequence: Synthetic oligonucleotide
gucuuguaauaagcccagu

SEQ ID NO: 2835480 - RNA, 19 nt, Artificial Sequence
  Description of Artificial Sequence: Synthetic oligonucleotide
gaggccaguagggguacuu

SEQ ID NO: 2835481 - RNA, 19 nt, Artificial Sequence
  Description of Artificial Sequence: Synthetic oligonucleotide
ccugggauucagacaggaa

SEQ ID NO: 2835482 - RNA, 19 nt, Artificial Sequence
  Description of Artificial Sequence: Synthetic oligonucleotide
agccagccuuggccacucu

SEQ ID NO: 2835483 - RNA, 19 nt, Artificial Sequence
  Description of Artificial Sequence: Synthetic oligonucleotide
ccacucuggucuuguaaua

SEQ ID NO: 2835484 - RNA, 19 nt, Artificial Sequence
  Description of Artificial Sequence: Synthetic oligonucleotide
cauuguccaccagggcugu

SEQ ID NO: 2835485 - RNA, 19 nt, Artificial Sequence
  Description of Artificial Sequence: Synthetic oligonucleotide
guuuacgcccggccaucuu

SEQ ID NO: 2835486 - RNA, 19 nt, Artificial Sequence
  Description of Artificial Sequence: Synthetic oligonucleotide
caccagggcuguguauuua

SEQ ID NO: 2835487 - RNA, 19 nt, Artificial Sequence
  Description of Artificial Sequence: Synthetic oligonucleotide
ccagucaaucgcugguggu

SEQ ID NO: 2835488 - RNA, 19 nt, Artificial Sequence
  Description of Artificial Sequence: Synthetic oligonucleotide
caagccagccuuggccacu

SEQ ID NO: 2835489 - RNA, 19 nt, Artificial Sequence
  Description of Artificial Sequence: Synthetic oligonucleotide
cccggccaucuugggaucc

SEQ ID NO: 2835490 - RNA, 19 nt, Artificial Sequence
  Description of Artificial Sequence: Synthetic oligonucleotide
cgaugggcuggugaggcca

SEQ ID NO: 2835491 - RNA, 19 nt, Artificial Sequence
  Description of Artificial Sequence: Synthetic oligonucleotide
guccaccagggcuguguau

SEQ ID NO: 2835492 - RNA, 19 nt, Artificial Sequence
  Description of Artificial Sequence: Synthetic oligonucleotide
ccugguguggagggucuca

SEQ ID NO: 2835493 - RNA, 19 nt, Artificial Sequence
  Description of Artificial Sequence: Synthetic oligonucleotide
cugguguggagggucucau

SEQ ID NO: 2835494 - RNA, 19 nt, Artificial Sequence
  Description of Artificial Sequence: Synthetic oligonucleotide
cuggaaucuucagggcauu

SEQ ID NO: 2835495 - RNA, 19 nt, Artificial Sequence
  Description of Artificial Sequence: Synthetic oligonucleotide
gguccucgaugggcuggug

SEQ ID NO: 2835496 - RNA, 19 nt, Artificial Sequence
  Description of Artificial Sequence: Synthetic oligonucleotide
cauccucccuuuccucauu

SEQ ID NO: 2835497 - RNA, 19 nt, Artificial Sequence
  Description of Artificial Sequence: Synthetic oligonucleotide
gcccggccaucuugggauc

SEQ ID NO: 2835498 - RNA, 19 nt, Artificial Sequence
  Description of Artificial Sequence: Synthetic oligonucleotide
gugguuucucaggcagauu

SEQ ID NO: 2835499 - RNA, 19 nt, Artificial Sequence
  Description of Artificial Sequence: Synthetic oligonucleotide
cgcccggccaucuugggau

SEQ ID NO: 2835500 - RNA, 19 nt, Artificial Sequence
  Description of Artificial Sequence: Synthetic oligonucleotide
ggaacgcagcacaguucuu

SEQ ID NO: 2835501 - RNA, 19 nt, Artificial Sequence
  Description of Artificial Sequence: Synthetic oligonucleotide
ccucaggcacuggaaucuu

SEQ ID NO: 2835502 - RNA, 19 nt, Artificial Sequence
  Description of Artificial Sequence: Synthetic oligonucleotide
ccggccaucuugggauccu

SEQ ID NO: 2835503 - RNA, 19 nt, Artificial Sequence
  Description of Artificial Sequence: Synthetic oligonucleotide
ccaagacuucagggaguuu

SEQ ID NO: 2835504 - RNA, 19 nt, Artificial Sequence
  Description of Artificial Sequence: Synthetic oligonucleotide
aauguaaccauaugacccc

SEQ ID NO: 2835505 - RNA, 19 nt, Artificial Sequence
  Description of Artificial Sequence: Synthetic oligonucleotide
uuuuaauguaaccauauga

SEQ ID NO: 2835506 - RNA, 19 nt, Artificial Sequence
  Description of Artificial Sequence: Synthetic oligonucleotide
uaauguaaccauaugaccc

SEQ ID NO: 2835507 - RNA, 19 nt, Artificial Sequence
  Description of Artificial Sequence: Synthetic oligonucleotide
gauggaacagcauugagag

SEQ ID NO: 2835508 - RNA, 19 nt, Artificial Sequence
  Description of Artificial Sequence: Synthetic oligonucleotide
ugauggauaacuugaaugg

SEQ ID NO: 2835509 - RNA, 19 nt, Artificial Sequence
  Description of Artificial Sequence: Synthetic oligonucleotide
auuauuucaaugucuuccc

SEQ ID NO: 2835510 - RNA, 19 nt, Artificial Sequence
  Description of Artificial Sequence: Synthetic oligonucleotide
uaucccaucauaaauguca

SEQ ID NO: 2835511 - RNA, 19 nt, Artificial Sequence
  Description of Artificial Sequence: Synthetic oligonucleotide
aucaucauagacuucuugg

SEQ ID NO: 2835512 - RNA, 19 nt, Artificial Sequence
  Description of Artificial Sequence: Synthetic oligonucleotide
guuagcuuaaauuucuucc

SEQ ID NO: 2835513 - RNA, 19 nt, Artificial Sequence
  Description of Artificial Sequence: Synthetic oligonucleotide
aaugucaucaucugguggu

SEQ ID NO: 2835514 - RNA, 19 nt, Artificial Sequence
  Description of Artificial Sequence: Synthetic oligonucleotide
ucauagucaaucucgacag

SEQ ID NO: 2835515 - RNA, 19 nt, Artificial Sequence
  Description of Artificial Sequence: Synthetic oligonucleotide
ucuucaacaaguuucgaug

SEQ ID NO: 2835516 - RNA, 19 nt, Artificial Sequence
  Description of Artificial Sequence: Synthetic oligonucleotide
uuaaauuucuuccuuaguu

SEQ ID NO: 2835517 - RNA, 19 nt, Artificial Sequence
  Description of Artificial Sequence: Synthetic oligonucleotide
ucaucuucaacaaguuucg

SEQ ID NO: 2835518 - RNA, 19 nt, Artificial Sequence
  Description of Artificial Sequence: Synthetic oligonucleotide
uuaauguaaccauaugacc

SEQ ID NO: 2835519 - RNA, 19 nt, Artificial Sequence
  Description of Artificial Sequence: Synthetic oligonucleotide
uccgcuuccacucugacca

SEQ ID NO: 2835520 - RNA, 19 nt, Artificial Sequence
  Description of Artificial Sequence: Synthetic oligonucleotide
uuucagagaaucauaguca

SEQ ID NO: 2835521 - RNA, 19 nt, Artificial Sequence
  Description of Artificial Sequence: Synthetic oligonucleotide
agaaucauagucaaucucg

SEQ ID NO: 2835522 - RNA, 19 nt, Artificial Sequence
  Description of Artificial Sequence: Synthetic oligonucleotide
aaaugucaucaucuggugg

SEQ ID NO: 2835523 - RNA, 19 nt, Artificial Sequence
  Description of Artificial Sequence: Synthetic oligonucleotide
augauggauaacuugaaug

SEQ ID NO: 2835524 - RNA, 19 nt, Artificial Sequence
  Description of Artificial Sequence: Synthetic oligonucleotide
ucuucaaccugcagcaugg

SEQ ID NO: 2835525 - RNA, 19 nt, Artificial Sequence
  Description of Artificial Sequence: Synthetic oligonucleotide
uucuuggucaucuucaaca

SEQ ID NO: 2835526 - RNA, 19 nt, Artificial Sequence
  Description of Artificial Sequence: Synthetic oligonucleotide
uggaacagcauugagagug

SEQ ID NO: 2835527 - RNA, 19 nt, Artificial Sequence
  Description of Artificial Sequence: Synthetic oligonucleotide
uuugacaucacaacaugcu

SEQ ID NO: 2835528 - RNA, 19 nt, Artificial Sequence
  Description of Artificial Sequence: Synthetic oligonucleotide
ugcaugauggauaacuuga

SEQ ID NO: 2835529 - RNA, 19 nt, Artificial Sequence
  Description of Artificial Sequence: Synthetic oligonucleotide
uucuaucccaucauaaaug

SEQ ID NO: 2835530 - RNA, 19 nt, Artificial Sequence
  Description of Artificial Sequence: Synthetic oligonucleotide
auugagaguguucugcuuc

SEQ ID NO: 2835531 - RNA, 19 nt, Artificial Sequence
  Description of Artificial Sequence: Synthetic oligonucleotide
uuuugcaugauggauaacu

SEQ ID NO: 2835532 - RNA, 19 nt, Artificial Sequence
  Description of Artificial Sequence: Synthetic oligonucleotide
aaucauagucaaucucgac

SEQ ID NO: 2835533 - RNA, 19 nt, Artificial Sequence
  Description of Artificial Sequence: Synthetic oligonucleotide
uuggucaucuucaacaagu

SEQ ID NO: 2835534 - RNA, 19 nt, Artificial Sequence
  Description of Artificial Sequence: Synthetic oligonucleotide
aagcucaguucauucuucc

SEQ ID NO: 2835535 - RNA, 19 nt, Artificial Sequence
  Description of Artificial Sequence: Synthetic oligonucleotide
aucauagucaaucucgaca

SEQ ID NO: 2835536 - RNA, 19 nt, Artificial Sequence
  Description of Artificial Sequence: Synthetic oligonucleotide
uguuuuaauguaaccauau

SEQ ID NO: 2835537 - RNA, 19 nt, Artificial Sequence
  Description of Artificial Sequence: Synthetic oligonucleotide
cauaaaugucaucaucugg

SEQ ID NO: 2835538 - RNA, 19 nt, Artificial Sequence
  Description of Artificial Sequence: Synthetic oligonucleotide
acagcaguuguuuuaaugu

SEQ ID NO: 2835539 - RNA, 19 nt, Artificial Sequence
  Description of Artificial Sequence: Synthetic oligonucleotide
aggagcauccugcucagcc

SEQ ID NO: 2835540 - RNA, 19 nt, Artificial Sequence
  Description of Artificial Sequence: Synthetic oligonucleotide
auucggauuauuucaaugu

SEQ ID NO: 2835541 - RNA, 19 nt, Artificial Sequence
  Description of Artificial Sequence: Synthetic oligonucleotide
cuucaacaaguuucgaugg

SEQ ID NO: 2835542 - RNA, 19 nt, Artificial Sequence
  Description of Artificial Sequence: Synthetic oligonucleotide
uccacucugaccauggcug

SEQ ID NO: 2835543 - RNA, 19 nt, Artificial Sequence
  Description of Artificial Sequence: Synthetic oligonucleotide
aacaaguuucgauggaaca

SEQ ID NO: 2835544 - RNA, 19 nt, Artificial Sequence
  Description of Artificial Sequence: Synthetic oligonucleotide
uucuuuacuguuccuuccg

SEQ ID NO: 2835545 - RNA, 19 nt, Artificial Sequence
  Description of Artificial Sequence: Synthetic oligonucleotide
uggauaacuugaauggggc

SEQ ID NO: 2835546 - RNA, 19 nt, Artificial Sequence
  Description of Artificial Sequence: Synthetic oligonucleotide
aguuguuuuaauguaacca

SEQ ID NO: 2835547 - RNA, 19 nt, Artificial Sequence
  Description of Artificial Sequence: Synthetic oligonucleotide
agcauugagaguguucugc

SEQ ID NO: 2835548 - RNA, 19 nt, Artificial Sequence
  Description of Artificial Sequence: Synthetic oligonucleotide
uuucgauggaacagcauug

SEQ ID NO: 2835549 - RNA, 19 nt, Artificial Sequence
  Description of Artificial Sequence: Synthetic oligonucleotide
gauucggauuauuucaaug

SEQ ID NO: 2835550 - RNA, 19 nt, Artificial Sequence
  Description of Artificial Sequence: Synthetic oligonucleotide
auaaaugucaucaucuggu

SEQ ID NO: 2835551 - RNA, 19 nt, Artificial Sequence
  Description of Artificial Sequence: Synthetic oligonucleotide
ucuuccuuaguucuuguuc

SEQ ID NO: 2835552 - RNA, 19 nt, Artificial Sequence
  Description of Artificial Sequence: Synthetic oligonucleotide
ucaaccugcagcauggauc

SEQ ID NO: 2835553 - RNA, 19 nt, Artificial Sequence
  Description of Artificial Sequence: Synthetic oligonucleotide
ucauaaaugucaucaucug

SEQ ID NO: 2835554 - RNA, 19 nt, Artificial Sequence
  Description of Artificial Sequence: Synthetic oligonucleotide
ucuaucccaucauaaaugu

SEQ ID NO: 2835555 - RNA, 19 nt, Artificial Sequence
  Description of Artificial Sequence: Synthetic oligonucleotide
aucauaaaugucaucaucu

SEQ ID NO: 2835556 - RNA, 19 nt, Artificial Sequence
  Description of Artificial Sequence: Synthetic oligonucleotide
gauggauaacuugaauggg

SEQ ID NO: 2835557 - RNA, 19 nt, Artificial Sequence
  Description of Artificial Sequence: Synthetic oligonucleotide
cuugaauggggccuguuag

SEQ ID NO: 2835558 - RNA, 19 nt, Artificial Sequence
  Description of Artificial Sequence: Synthetic oligonucleotide
cacaacaugcuuuugcaug

SEQ ID NO: 2835559 - RNA, 19 nt, Artificial Sequence
  Description of Artificial Sequence: Synthetic oligonucleotide
cuuugacaucacaacaugc

SEQ ID NO: 2835560 - RNA, 19 nt, Artificial Sequence
  Description of Artificial Sequence: Synthetic oligonucleotide
ucaucauagacuucuuggu

SEQ ID NO: 2835561 - RNA, 19 nt, Artificial Sequence
  Description of Artificial Sequence: Synthetic oligonucleotide
acaugcuuuugcaugaugg

SEQ ID NO: 2835562 - RNA, 19 nt, Artificial Sequence
  Description of Artificial Sequence: Synthetic oligonucleotide
uuuucuuuacuguuccuuc

SEQ ID NO: 2835563 - RNA, 19 nt, Artificial Sequence
  Description of Artificial Sequence: Synthetic oligonucleotide
guuaggagcauccugcuca

SEQ ID NO: 2835564 - RNA, 19 nt, Artificial Sequence
  Description of Artificial Sequence: Synthetic oligonucleotide
caaccugcagcauggaucc

SEQ ID NO: 2835565 - RNA, 19 nt, Artificial Sequence
  Description of Artificial Sequence: Synthetic oligonucleotide
gacagcaguuguuuuaaug

SEQ ID NO: 2835566 - RNA, 19 nt, Artificial Sequence
  Description of Artificial Sequence: Synthetic oligonucleotide
caucacaacaugcuuuugc

SEQ ID NO: 2835567 - RNA, 19 nt, Artificial Sequence
  Description of Artificial Sequence: Synthetic oligonucleotide
uuucuuuacuguuccuucc

SEQ ID NO: 2835568 - RNA, 19 nt, Artificial Sequence
  Description of Artificial Sequence: Synthetic oligonucleotide
gucaucuucaacaaguuuc

SEQ ID NO: 2835569 - RNA, 19 nt, Artificial Sequence
  Description of Artificial Sequence: Synthetic oligonucleotide
uuuacuguuccuuccguuc

SEQ ID NO: 2835570 - RNA, 19 nt, Artificial Sequence
  Description of Artificial Sequence: Synthetic oligonucleotide
uaaaugucaucaucuggug

SEQ ID NO: 2835571 - RNA, 19 nt, Artificial Sequence
  Description of Artificial Sequence: Synthetic oligonucleotide
uuauuucaaugucuucccc

SEQ ID NO: 2835572 - RNA, 19 nt, Artificial Sequence
  Description of Artificial Sequence: Synthetic oligonucleotide
cagagaaucauagucaauc

SEQ ID NO: 2835573 - RNA, 19 nt, Artificial Sequence
  Description of Artificial Sequence: Synthetic oligonucleotide
uucagagaaucauagucaa

SEQ ID NO: 2835574 - RNA, 19 nt, Artificial Sequence
  Description of Artificial Sequence: Synthetic oligonucleotide
aucacaacaugcuuuugca

SEQ ID NO: 2835575 - RNA, 19 nt, Artificial Sequence
  Description of Artificial Sequence: Synthetic oligonucleotide
acaaguuucgauggaacag

SEQ ID NO: 2835576 - RNA, 19 nt, Artificial Sequence
  Description of Artificial Sequence: Synthetic oligonucleotide
agagaaucauagucaaucu

SEQ ID NO: 2835577 - RNA, 19 nt, Artificial Sequence
  Description of Artificial Sequence: Synthetic oligonucleotide
uucggauuauuucaauguc

SEQ ID NO: 2835578 - RNA, 19 nt, Artificial Sequence
  Description of Artificial Sequence: Synthetic oligonucleotide
ucugcuuccguuucagaga

SEQ ID NO: 2835579 - RNA, 19 nt, Artificial Sequence
  Description of Artificial Sequence: Synthetic oligonucleotide
aauggggccuguuagcuua

SEQ ID NO: 2835580 - RNA, 19 nt, Artificial Sequence
  Description of Artificial Sequence: Synthetic oligonucleotide
acaacaugcuuuugcauga

SEQ ID NO: 2835581 - RNA, 19 nt, Artificial Sequence
  Description of Artificial Sequence: Synthetic oligonucleotide
uccuuugacaucacaacau

SEQ ID NO: 2835582 - RNA, 19 nt, Artificial Sequence
  Description of Artificial Sequence: Synthetic oligonucleotide
gaccauggcuguuaggagc

SEQ ID NO: 2835583 - RNA, 19 nt, Artificial Sequence
  Description of Artificial Sequence: Synthetic oligonucleotide
uugucggugauucggauua

SEQ ID NO: 2835584 - RNA, 19 nt, Artificial Sequence
  Description of Artificial Sequence: Synthetic oligonucleotide
acagcauugagaguguucu

SEQ ID NO: 2835585 - RNA, 19 nt, Artificial Sequence
  Description of Artificial Sequence: Synthetic oligonucleotide
uagucaaucucgacagcag

SEQ ID NO: 2835586 - RNA, 19 nt, Artificial Sequence
  Description of Artificial Sequence: Synthetic oligonucleotide
cuugcuugaagcucaguuc

SEQ ID NO: 2835587 - RNA, 19 nt, Artificial Sequence
  Description of Artificial Sequence: Synthetic oligonucleotide
ucuucuaucccaucauaaa

SEQ ID NO: 2835588 - RNA, 19 nt, Artificial Sequence
  Description of Artificial Sequence: Synthetic oligonucleotide
uugcaugauggauaacuug

SEQ ID NO: 2835589 - RNA, 19 nt, Artificial Sequence
  Description of Artificial Sequence: Synthetic oligonucleotide
guuuuaauguaaccauaug

SEQ ID NO: 2835590 - RNA, 19 nt, Artificial Sequence
  Description of Artificial Sequence: Synthetic oligonucleotide
agacuucuuggucaucuuc

SEQ ID NO: 2835591 - RNA, 19 nt, Artificial Sequence
  Description of Artificial Sequence: Synthetic oligonucleotide
ugcuuuugcaugauggaua

SEQ ID NO: 2835592 - RNA, 19 nt, Artificial Sequence
  Description of Artificial Sequence: Synthetic oligonucleotide
auggcuguuaggagcaucc

SEQ ID NO: 2835593 - RNA, 19 nt, Artificial Sequence
  Description of Artificial Sequence: Synthetic oligonucleotide
uggguugucggugauucgg

SEQ ID NO: 2835594 - RNA, 19 nt, Artificial Sequence
  Description of Artificial Sequence: Synthetic oligonucleotide
ggugauucggauuauuuca

SEQ ID NO: 2835595 - RNA, 19 nt, Artificial Sequence
  Description of Artificial Sequence: Synthetic oligonucleotide
agcucaguucauucuuccc

SEQ ID NO: 2835596 - RNA, 19 nt, Artificial Sequence
  Description of Artificial Sequence: Synthetic oligonucleotide
cauaccuccgcuuccacuc

SEQ ID NO: 2835597 - RNA, 19 nt, Artificial Sequence
  Description of Artificial Sequence: Synthetic oligonucleotide
cuugaagcucaguucauuc

SEQ ID NO: 2835598 - RNA, 19 nt, Artificial Sequence
  Description of Artificial Sequence: Synthetic oligonucleotide
uuguuuuaauguaaccaua

SEQ ID NO: 2835599 - RNA, 19 nt, Artificial Sequence
  Description of Artificial Sequence: Synthetic oligonucleotide
aguguucugcuuccguuuc

SEQ ID NO: 2835600 - RNA, 19 nt, Artificial Sequence
  Description of Artificial Sequence: Synthetic oligonucleotide
ucaaucucgacagcaguug

SEQ ID NO: 2835601 - RNA, 19 nt, Artificial Sequence
  Description of Artificial Sequence: Synthetic oligonucleotide
caaguuucgauggaacagc

SEQ ID NO: 2835602 - RNA, 19 nt, Artificial Sequence
  Description of Artificial Sequence: Synthetic oligonucleotide
uuacuguuccuuccguucu

SEQ ID NO: 2835603 - RNA, 19 nt, Artificial Sequence
  Description of Artificial Sequence: Synthetic oligonucleotide
ucuuccccuugcuugaagc

SEQ ID NO: 2835604 - RNA, 19 nt, Artificial Sequence
  Description of Artificial Sequence: Synthetic oligonucleotide
aacauaccuccgcuuccac

SEQ ID NO: 2835605 - RNA, 19 nt, Artificial Sequence
  Description of Artificial Sequence: Synthetic oligonucleotide
aacaugcuuuugcaugaug

SEQ ID NO: 2835606 - RNA, 19 nt, Artificial Sequence
  Description of Artificial Sequence: Synthetic oligonucleotide
ugaagcucaguucauucuu

SEQ ID NO: 2835607 - RNA, 19 nt, Artificial Sequence
  Description of Artificial Sequence: Synthetic oligonucleotide
cauggauccaucaccagca

SEQ ID NO: 2835608 - RNA, 19 nt, Artificial Sequence
  Description of Artificial Sequence: Synthetic oligonucleotide
auagucaaucucgacagca

SEQ ID NO: 2835609 - RNA, 19 nt, Artificial Sequence
  Description of Artificial Sequence: Synthetic oligonucleotide
guggugggaacauaccucc

SEQ ID NO: 2835610 - RNA, 19 nt, Artificial Sequence
  Description of Artificial Sequence: Synthetic oligonucleotide
uucaacaaguuucgaugga

SEQ ID NO: 2835611 - RNA, 19 nt, Artificial Sequence
  Description of Artificial Sequence: Synthetic oligonucleotide
aacagcauugagaguguuc

SEQ ID NO: 2835612 - RNA, 19 nt, Artificial Sequence
  Description of Artificial Sequence: Synthetic oligonucleotide
uugaagcucaguucauucu

SEQ ID NO: 2835613 - RNA, 19 nt, Artificial Sequence
  Description of Artificial Sequence: Synthetic oligonucleotide
aucuucaacaaguuucgau

SEQ ID NO: 2835614 - RNA, 19 nt, Artificial Sequence
  Description of Artificial Sequence: Synthetic oligonucleotide
uuugcaugauggauaacuu

SEQ ID NO: 2835615 - RNA, 19 nt, Artificial Sequence
  Description of Artificial Sequence: Synthetic oligonucleotide
auccugcucagccacauca

SEQ ID NO: 2835616 - RNA, 19 nt, Artificial Sequence
  Description of Artificial Sequence: Synthetic oligonucleotide
ugguggugggaacauaccu

SEQ ID NO: 2835617 - RNA, 19 nt, Artificial Sequence
  Description of Artificial Sequence: Synthetic oligonucleotide
auagacuucuuggucaucu

SEQ ID NO: 2835618 - RNA, 19 nt, Artificial Sequence
  Description of Artificial Sequence: Synthetic oligonucleotide
uugagaguguucugcuucc

SEQ ID NO: 2835619 - RNA, 19 nt, Artificial Sequence
  Description of Artificial Sequence: Synthetic oligonucleotide
uggucuucucuucaaccug

SEQ ID NO: 2835620 - RNA, 19 nt, Artificial Sequence
  Description of Artificial Sequence: Synthetic oligonucleotide
gcuuaaauuucuuccuuag

SEQ ID NO: 2835621 - RNA, 19 nt, Artificial Sequence
  Description of Artificial Sequence: Synthetic oligonucleotide
caacaaguuucgauggaac

SEQ ID NO: 2835622 - RNA, 19 nt, Artificial Sequence
  Description of Artificial Sequence: Synthetic oligonucleotide
uaguucuuguucuuucuuc

SEQ ID NO: 2835623 - RNA, 19 nt, Artificial Sequence
  Description of Artificial Sequence: Synthetic oligonucleotide
ucgauggaacagcauugag

SEQ ID NO: 2835624 - RNA, 19 nt, Artificial Sequence
  Description of Artificial Sequence: Synthetic oligonucleotide
caguuguuuuaauguaacc

SEQ ID NO: 2835625 - RNA, 19 nt, Artificial Sequence
  Description of Artificial Sequence: Synthetic oligonucleotide
guuguuuuaauguaaccau

SEQ ID NO: 2835626 - RNA, 19 nt, Artificial Sequence
  Description of Artificial Sequence: Synthetic oligonucleotide
cauucuucccuccuuugac

SEQ ID NO: 2835627 - RNA, 19 nt, Artificial Sequence
  Description of Artificial Sequence: Synthetic oligonucleotide
auuucaaugucuuccccuu

SEQ ID NO: 2835628 - RNA, 19 nt, Artificial Sequence
  Description of Artificial Sequence: Synthetic oligonucleotide
ucaacaaguuucgauggaa

SEQ ID NO: 2835629 - RNA, 19 nt, Artificial Sequence
  Description of Artificial Sequence: Synthetic oligonucleotide
ugcagcauggauccaucac

SEQ ID NO: 2835630 - RNA, 19 nt, Artificial Sequence
  Description of Artificial Sequence: Synthetic oligonucleotide
ucuuuacuguuccuuccgu

SEQ ID NO: 2835631 - RNA, 19 nt, Artificial Sequence
  Description of Artificial Sequence: Synthetic oligonucleotide
uuucaaugucuuccccuug

SEQ ID NO: 2835632 - RNA, 19 nt, Artificial Sequence
  Description of Artificial Sequence: Synthetic oligonucleotide
agucaaucucgacagcagu

SEQ ID NO: 2835633 - RNA, 19 nt, Artificial Sequence
  Description of Artificial Sequence: Synthetic oligonucleotide
cagccauuuuccuucuggg

SEQ ID NO: 2835634 - RNA, 19 nt, Artificial Sequence
  Description of Artificial Sequence: Synthetic oligonucleotide
uuaggagcauccugcucag

SEQ ID NO: 2835635 - RNA, 19 nt, Artificial Sequence
  Description of Artificial Sequence: Synthetic oligonucleotide
ucuggguugucggugauuc

SEQ ID NO: 2835636 - RNA, 19 nt, Artificial Sequence
  Description of Artificial Sequence: Synthetic oligonucleotide
ucuucucuucaaccugcag

SEQ ID NO: 2835637 - RNA, 19 nt, Artificial Sequence
  Description of Artificial Sequence: Synthetic oligonucleotide
gauaacuugaauggggccu

SEQ ID NO: 2835638 - RNA, 19 nt, Artificial Sequence
  Description of Artificial Sequence: Synthetic oligonucleotide
uucauucuucccuccuuug

SEQ ID NO: 2835639 - RNA, 19 nt, Artificial Sequence
  Description of Artificial Sequence: Synthetic oligonucleotide
uguucugcuuccguuucag

SEQ ID NO: 2835640 - RNA, 19 nt, Artificial Sequence
  Description of Artificial Sequence: Synthetic oligonucleotide
cucaguucauucuucccuc

SEQ ID NO: 2835641 - RNA, 19 nt, Artificial Sequence
  Description of Artificial Sequence: Synthetic oligonucleotide
uccguuucagagaaucaua

SEQ ID NO: 2835642 - RNA, 19 nt, Artificial Sequence
  Description of Artificial Sequence: Synthetic oligonucleotide
ucaguucauucuucccucc

SEQ ID NO: 2835643 - RNA, 19 nt, Artificial Sequence
  Description of Artificial Sequence: Synthetic oligonucleotide
gaaucauagucaaucucga

SEQ ID NO: 2835644 - RNA, 19 nt, Artificial Sequence
  Description of Artificial Sequence: Synthetic oligonucleotide
auaacuugaauggggccug

SEQ ID NO: 2835645 - RNA, 19 nt, Artificial Sequence
  Description of Artificial Sequence: Synthetic oligonucleotide
gacuucuuggucaucuuca

SEQ ID NO: 2835646 - RNA, 19 nt, Artificial Sequence
  Description of Artificial Sequence: Synthetic oligonucleotide
ucauagacuucuuggucau

SEQ ID NO: 2835647 - RNA, 19 nt, Artificial Sequence
  Description of Artificial Sequence: Synthetic oligonucleotide
gcagcauggauccaucacc

SEQ ID NO: 2835648 - RNA, 19 nt, Artificial Sequence
  Description of Artificial Sequence: Synthetic oligonucleotide
uagcuuaaauuucuuccuu

SEQ ID NO: 2835649 - RNA, 19 nt, Artificial Sequence
  Description of Artificial Sequence: Synthetic oligonucleotide
cucuucaaccugcagcaug

SEQ ID NO: 2835650 - RNA, 19 nt, Artificial Sequence
  Description of Artificial Sequence: Synthetic oligonucleotide
ugucaucaucugguggugg

SEQ ID NO: 2835651 - RNA, 19 nt, Artificial Sequence
  Description of Artificial Sequence: Synthetic oligonucleotide
ucggugauucggauuauuu

SEQ ID NO: 2835652 - RNA, 19 nt, Artificial Sequence
  Description of Artificial Sequence: Synthetic oligonucleotide
agcuuaaauuucuuccuua

SEQ ID NO: 2835653 - RNA, 19 nt, Artificial Sequence
  Description of Artificial Sequence: Synthetic oligonucleotide
uucgauggaacagcauuga

SEQ ID NO: 2835654 - RNA, 19 nt, Artificial Sequence
  Description of Artificial Sequence: Synthetic oligonucleotide
cuuggucaucuucaacaag

SEQ ID NO: 2835655 - RNA, 19 nt, Artificial Sequence
  Description of Artificial Sequence: Synthetic oligonucleotide
ucuuguucuuucuucucuu

SEQ ID NO: 2835656 - RNA, 19 nt, Artificial Sequence
  Description of Artificial Sequence: Synthetic oligonucleotide
uuccguuucagagaaucau

SEQ ID NO: 2835657 - RNA, 19 nt, Artificial Sequence
  Description of Artificial Sequence: Synthetic oligonucleotide
gcuguuaggagcauccugc

SEQ ID NO: 2835658 - RNA, 19 nt, Artificial Sequence
  Description of Artificial Sequence: Synthetic oligonucleotide
uucuucccuccuuugacau

SEQ ID NO: 2835659 - RNA, 19 nt, Artificial Sequence
  Description of Artificial Sequence: Synthetic oligonucleotide
ucugaccauggcuguuagg

SEQ ID NO: 2835660 - RNA, 19 nt, Artificial Sequence
  Description of Artificial Sequence: Synthetic oligonucleotide
uggugggaacauaccuccg

SEQ ID NO: 2835661 - RNA, 19 nt, Artificial Sequence
  Description of Artificial Sequence: Synthetic oligonucleotide
auccaucaccagcaucuuc

SEQ ID NO: 2835662 - RNA, 19 nt, Artificial Sequence
  Description of Artificial Sequence: Synthetic oligonucleotide
ucacaacaugcuuuugcau

SEQ ID NO: 2835663 - RNA, 19 nt, Artificial Sequence
  Description of Artificial Sequence: Synthetic oligonucleotide
uccucuucuaucccaucau

SEQ ID NO: 2835664 - RNA, 19 nt, Artificial Sequence
  Description of Artificial Sequence: Synthetic oligonucleotide
aaguuucgauggaacagca

SEQ ID NO: 2835665 - RNA, 19 nt, Artificial Sequence
  Description of Artificial Sequence: Synthetic oligonucleotide
caugcuuuugcaugaugga

SEQ ID NO: 2835666 - RNA, 19 nt, Artificial Sequence
  Description of Artificial Sequence: Synthetic oligonucleotide
uguuaggagcauccugcuc

SEQ ID NO: 2835667 - RNA, 19 nt, Artificial Sequence
  Description of Artificial Sequence: Synthetic oligonucleotide
ugauucggauuauuucaau

SEQ ID NO: 2835668 - RNA, 19 nt, Artificial Sequence
  Description of Artificial Sequence: Synthetic oligonucleotide
agaguguucugcuuccguu

SEQ ID NO: 2835669 - RNA, 19 nt, Artificial Sequence
  Description of Artificial Sequence: Synthetic oligonucleotide
ucagagaaucauagucaau

SEQ ID NO: 2835670 - RNA, 19 nt, Artificial Sequence
  Description of Artificial Sequence: Synthetic oligonucleotide
agccauuuuccuucugggu

SEQ ID NO: 2835671 - RNA, 19 nt, Artificial Sequence
  Description of Artificial Sequence: Synthetic oligonucleotide
ucuggugguggugggaaca

SEQ ID NO: 2835672 - RNA, 19 nt, Artificial Sequence
  Description of Artificial Sequence: Synthetic oligonucleotide
uucaaccugcagcauggau

SEQ ID NO: 2835673 - RNA, 19 nt, Artificial Sequence
  Description of Artificial Sequence: Synthetic oligonucleotide
cuuccuuaguucuuguucu

SEQ ID NO: 2835674 - RNA, 19 nt, Artificial Sequence
  Description of Artificial Sequence: Synthetic oligonucleotide
ggauaacuugaauggggcc

SEQ ID NO: 2835675 - RNA, 19 nt, Artificial Sequence
  Description of Artificial Sequence: Synthetic oligonucleotide
guuucgauggaacagcauu

SEQ ID NO: 2835676 - RNA, 19 nt, Artificial Sequence
  Description of Artificial Sequence: Synthetic oligonucleotide
ccguuucagagaaucauag

SEQ ID NO: 2835677 - RNA, 19 nt, Artificial Sequence
  Description of Artificial Sequence: Synthetic oligonucleotide
ucgacagcaguuguuuuaa

SEQ ID NO: 2835678 - RNA, 19 nt, Artificial Sequence
  Description of Artificial Sequence: Synthetic oligonucleotide
gcauggauccaucaccagc

SEQ ID NO: 2835679 - RNA, 19 nt, Artificial Sequence
  Description of Artificial Sequence: Synthetic oligonucleotide
ugagaguguucugcuuccg

SEQ ID NO: 2835680 - RNA, 19 nt, Artificial Sequence
  Description of Artificial Sequence: Synthetic oligonucleotide
cauagucaaucucgacagc

SEQ ID NO: 2835681 - RNA, 19 nt, Artificial Sequence
  Description of Artificial Sequence: Synthetic oligonucleotide
uuucuuccuuaguucuugu

SEQ ID NO: 2835682 - RNA, 19 nt, Artificial Sequence
  Description of Artificial Sequence: Synthetic oligonucleotide
acuugaauggggccuguua

SEQ ID NO: 2835683 - RNA, 19 nt, Artificial Sequence
  Description of Artificial Sequence: Synthetic oligonucleotide
cucuucuaucccaucauaa

SEQ ID NO: 2835684 - RNA, 19 nt, Artificial Sequence
  Description of Artificial Sequence: Synthetic oligonucleotide
uggucaucuucaacaaguu

SEQ ID NO: 2835685 - RNA, 19 nt, Artificial Sequence
  Description of Artificial Sequence: Synthetic oligonucleotide
acauaccuccgcuuccacu

SEQ ID NO: 2835686 - RNA, 19 nt, Artificial Sequence
  Description of Artificial Sequence: Synthetic oligonucleotide
cacaucaucauagacuucu

SEQ ID NO: 2835687 - RNA, 19 nt, Artificial Sequence
  Description of Artificial Sequence: Synthetic oligonucleotide
cuucccuccuuugacauca

SEQ ID NO: 2835688 - RNA, 19 nt, Artificial Sequence
  Description of Artificial Sequence: Synthetic oligonucleotide
ggugggaacauaccuccgc

SEQ ID NO: 2835689 - RNA, 19 nt, Artificial Sequence
  Description of Artificial Sequence: Synthetic oligonucleotide
aguucauucuucccuccuu

SEQ ID NO: 2835690 - RNA, 19 nt, Artificial Sequence
  Description of Artificial Sequence: Synthetic oligonucleotide
cuaucccaucauaaauguc

SEQ ID NO: 2835691 - RNA, 19 nt, Artificial Sequence
  Description of Artificial Sequence: Synthetic oligonucleotide
aucuggugguggugggaac

SEQ ID NO: 2835692 - RNA, 19 nt, Artificial Sequence
  Description of Artificial Sequence: Synthetic oligonucleotide
gaagcucaguucauucuuc

SEQ ID NO: 2835693 - RNA, 19 nt, Artificial Sequence
  Description of Artificial Sequence: Synthetic oligonucleotide
ggaacauaccuccgcuucc

SEQ ID NO: 2835694 - RNA, 19 nt, Artificial Sequence
  Description of Artificial Sequence: Synthetic oligonucleotide
ccagccauuuuccuucugg

SEQ ID NO: 2835695 - RNA, 19 nt, Artificial Sequence
  Description of Artificial Sequence: Synthetic oligonucleotide
agcauggauccaucaccag

SEQ ID NO: 2835696 - RNA, 19 nt, Artificial Sequence
  Description of Artificial Sequence: Synthetic oligonucleotide
uccuucuggguugucggug

SEQ ID NO: 2835697 - RNA, 19 nt, Artificial Sequence
  Description of Artificial Sequence: Synthetic oligonucleotide
agcaguuguuuuaauguaa

SEQ ID NO: 2835698 - RNA, 19 nt, Artificial Sequence
  Description of Artificial Sequence: Synthetic oligonucleotide
uggauccaucaccagcauc

SEQ ID NO: 2835699 - RNA, 19 nt, Artificial Sequence
  Description of Artificial Sequence: Synthetic oligonucleotide
guucugcccagccauuuuc

SEQ ID NO: 2835700 - RNA, 19 nt, Artificial Sequence
  Description of Artificial Sequence: Synthetic oligonucleotide
guucuuguucuuucuucuc

SEQ ID NO: 2835701 - RNA, 19 nt, Artificial Sequence
  Description of Artificial Sequence: Synthetic oligonucleotide
acgugcuggucuucucuuc

SEQ ID NO: 2835702 - RNA, 19 nt, Artificial Sequence
  Description of Artificial Sequence: Synthetic oligonucleotide
cagcauggauccaucacca

SEQ ID NO: 2835703 - RNA, 19 nt, Artificial Sequence
  Description of Artificial Sequence: Synthetic oligonucleotide
augcuuuugcaugauggau

SEQ ID NO: 2835704 - RNA, 19 nt, Artificial Sequence
  Description of Artificial Sequence: Synthetic oligonucleotide
ccauuuuccuucuggguug

SEQ ID NO: 2835705 - RNA, 19 nt, Artificial Sequence
  Description of Artificial Sequence: Synthetic oligonucleotide
ccuccuuugacaucacaac

SEQ ID NO: 2835706 - RNA, 19 nt, Artificial Sequence
  Description of Artificial Sequence: Synthetic oligonucleotide
cuggcaguucugcccagcc

SEQ ID NO: 2835707 - RNA, 19 nt, Artificial Sequence
  Description of Artificial Sequence: Synthetic oligonucleotide
cuccgcuuccacucugacc

SEQ ID NO: 2835708 - RNA, 19 nt, Artificial Sequence
  Description of Artificial Sequence: Synthetic oligonucleotide
cuucuaucccaucauaaau

SEQ ID NO: 2835709 - RNA, 19 nt, Artificial Sequence
  Description of Artificial Sequence: Synthetic oligonucleotide
gaacauaccuccgcuucca

SEQ ID NO: 2835710 - RNA, 19 nt, Artificial Sequence
  Description of Artificial Sequence: Synthetic oligonucleotide
acuguuccuuccguucuag

SEQ ID NO: 2835711 - RNA, 19 nt, Artificial Sequence
  Description of Artificial Sequence: Synthetic oligonucleotide
gggaacauaccuccgcuuc

SEQ ID NO: 2835712 - RNA, 19 nt, Artificial Sequence
  Description of Artificial Sequence: Synthetic oligonucleotide
ccuuugacaucacaacaug

SEQ ID NO: 2835713 - RNA, 19 nt, Artificial Sequence
  Description of Artificial Sequence: Synthetic oligonucleotide
cuuaaauuucuuccuuagu

SEQ ID NO: 2835714 - RNA, 19 nt, Artificial Sequence
  Description of Artificial Sequence: Synthetic oligonucleotide
cagccacaucaucauagac

SEQ ID NO: 2835715 - RNA, 19 nt, Artificial Sequence
  Description of Artificial Sequence: Synthetic oligonucleotide
accauggcuguuaggagca

SEQ ID NO: 2835716 - RNA, 19 nt, Artificial Sequence
  Description of Artificial Sequence: Synthetic oligonucleotide
aucucgacagcaguuguuu

SEQ ID NO: 2835717 - RNA, 19 nt, Artificial Sequence
  Description of Artificial Sequence: Synthetic oligonucleotide
cuuccguuucagagaauca

SEQ ID NO: 2835718 - RNA, 19 nt, Artificial Sequence
  Description of Artificial Sequence: Synthetic oligonucleotide
ggauccaucaccagcaucu

SEQ ID NO: 2835719 - RNA, 19 nt, Artificial Sequence
  Description of Artificial Sequence: Synthetic oligonucleotide
uuccccuugcuugaagcuc

SEQ ID NO: 2835720 - RNA, 19 nt, Artificial Sequence
  Description of Artificial Sequence: Synthetic oligonucleotide
ggcuguuaggagcauccug

SEQ ID NO: 2835721 - RNA, 19 nt, Artificial Sequence
  Description of Artificial Sequence: Synthetic oligonucleotide
uucuuccuuaguucuuguu

SEQ ID NO: 2835722 - RNA, 19 nt, Artificial Sequence
  Description of Artificial Sequence: Synthetic oligonucleotide
cucugaccauggcuguuag

SEQ ID NO: 2835723 - RNA, 19 nt, Artificial Sequence
  Description of Artificial Sequence: Synthetic oligonucleotide
ggugguggugggaacauac

SEQ ID NO: 2835724 - RNA, 19 nt, Artificial Sequence
  Description of Artificial Sequence: Synthetic oligonucleotide
aaucucgacagcaguuguu

SEQ ID NO: 2835725 - RNA, 19 nt, Artificial Sequence
  Description of Artificial Sequence: Synthetic oligonucleotide
uacuguuccuuccguucua

SEQ ID NO: 2835726 - RNA, 19 nt, Artificial Sequence
  Description of Artificial Sequence: Synthetic oligonucleotide
uuccuucuggguugucggu

SEQ ID NO: 2835727 - RNA, 19 nt, Artificial Sequence
  Description of Artificial Sequence: Synthetic oligonucleotide
accacgugcuggucuucuc

SEQ ID NO: 2835728 - RNA, 19 nt, Artificial Sequence
  Description of Artificial Sequence: Synthetic oligonucleotide
auggaacagcauugagagu

SEQ ID NO: 2835729 - RNA, 19 nt, Artificial Sequence
  Description of Artificial Sequence: Synthetic oligonucleotide
gcuuccguuucagagaauc

SEQ ID NO: 2835730 - RNA, 19 nt, Artificial Sequence
  Description of Artificial Sequence: Synthetic oligonucleotide
uccugcucagccacaucau

SEQ ID NO: 2835731 - RNA, 19 nt, Artificial Sequence
  Description of Artificial Sequence: Synthetic oligonucleotide
cuggguugucggugauucg

SEQ ID NO: 2835732 - RNA, 19 nt, Artificial Sequence
  Description of Artificial Sequence: Synthetic oligonucleotide
cuuccacucugaccauggc

SEQ ID NO: 2835733 - RNA, 19 nt, Artificial Sequence
  Description of Artificial Sequence: Synthetic oligonucleotide
augucaucaucugguggug

SEQ ID NO: 2835734 - RNA, 19 nt, Artificial Sequence
  Description of Artificial Sequence: Synthetic oligonucleotide
gcuuccacucugaccaugg

SEQ ID NO: 2835735 - RNA, 19 nt, Artificial Sequence
  Description of Artificial Sequence: Synthetic oligonucleotide
cugcuuccguuucagagaa

SEQ ID NO: 2835736 - RNA, 19 nt, Artificial Sequence
  Description of Artificial Sequence: Synthetic oligonucleotide
cuggucuucucuucaaccu

SEQ ID NO: 2835737 - RNA, 19 nt, Artificial Sequence
  Description of Artificial Sequence: Synthetic oligonucleotide
ucuucccuccuuugacauc

SEQ ID NO: 2835738 - RNA, 19 nt, Artificial Sequence
  Description of Artificial Sequence: Synthetic oligonucleotide
uccuuaguucuuguucuuu

SEQ ID NO: 2835739 - RNA, 19 nt, Artificial Sequence
  Description of Artificial Sequence: Synthetic oligonucleotide
ugggaacauaccuccgcuu

SEQ ID NO: 2835740 - RNA, 19 nt, Artificial Sequence
  Description of Artificial Sequence: Synthetic oligonucleotide
cucgacagcaguuguuuua

SEQ ID NO: 2835741 - RNA, 19 nt, Artificial Sequence
  Description of Artificial Sequence: Synthetic oligonucleotide
ucccaucauaaaugucauc

SEQ ID NO: 2835742 - RNA, 19 nt, Artificial Sequence
  Description of Artificial Sequence: Synthetic oligonucleotide
uuccuuaguucuuguucuu

SEQ ID NO: 2835743 - RNA, 19 nt, Artificial Sequence
  Description of Artificial Sequence: Synthetic oligonucleotide
gugauucggauuauuucaa

SEQ ID NO: 2835744 - RNA, 19 nt, Artificial Sequence
  Description of Artificial Sequence: Synthetic oligonucleotide
uaccuccgcuuccacucug

SEQ ID NO: 2835745 - RNA, 19 nt, Artificial Sequence
  Description of Artificial Sequence: Synthetic oligonucleotide
auaccuccgcuuccacucu

SEQ ID NO: 2835746 - RNA, 19 nt, Artificial Sequence
  Description of Artificial Sequence: Synthetic oligonucleotide
ucucgacagcaguuguuuu

SEQ ID NO: 2835747 - RNA, 19 nt, Artificial Sequence
  Description of Artificial Sequence: Synthetic oligonucleotide
cagcaguuguuuuaaugua

SEQ ID NO: 2835748 - RNA, 19 nt, Artificial Sequence
  Description of Artificial Sequence: Synthetic oligonucleotide
uagacuucuuggucaucuu

SEQ ID NO: 2835749 - RNA, 19 nt, Artificial Sequence
  Description of Artificial Sequence: Synthetic oligonucleotide
cagcauugagaguguucug

SEQ ID NO: 2835750 - RNA, 19 nt, Artificial Sequence
  Description of Artificial Sequence: Synthetic oligonucleotide
gguggugggaacauaccuc

SEQ ID NO: 2835751 - RNA, 19 nt, Artificial Sequence
  Description of Artificial Sequence: Synthetic oligonucleotide
aguucugcccagccauuuu

SEQ ID NO: 2835752 - RNA, 19 nt, Artificial Sequence
  Description of Artificial Sequence: Synthetic oligonucleotide
gucuuccccuugcuugaag

SEQ ID NO: 2835753 - RNA, 19 nt, Artificial Sequence
  Description of Artificial Sequence: Synthetic oligonucleotide
gccacaucaucauagacuu

SEQ ID NO: 2835754 - RNA, 19 nt, Artificial Sequence
  Description of Artificial Sequence: Synthetic oligonucleotide
ggccuguuagcuuaaauuu

SEQ ID NO: 2835755 - RNA, 19 nt, Artificial Sequence
  Description of Artificial Sequence: Synthetic oligonucleotide
aggaccacgugcuggucuu

SEQ ID NO: 2835756 - RNA, 19 nt, Artificial Sequence
  Description of Artificial Sequence: Synthetic oligonucleotide
gugguggugggaacauacc

SEQ ID NO: 2835757 - RNA, 19 nt, Artificial Sequence
  Description of Artificial Sequence: Synthetic oligonucleotide
gcucaguucauucuucccu

SEQ ID NO: 2835758 - RNA, 19 nt, Artificial Sequence
  Description of Artificial Sequence: Synthetic oligonucleotide
acaucacaacaugcuuuug

SEQ ID NO: 2835759 - RNA, 19 nt, Artificial Sequence
  Description of Artificial Sequence: Synthetic oligonucleotide
gagaguguucugcuuccgu

SEQ ID NO: 2835760 - RNA, 19 nt, Artificial Sequence
  Description of Artificial Sequence: Synthetic oligonucleotide
gaguguucugcuuccguuu

SEQ ID NO: 2835761 - RNA, 19 nt, Artificial Sequence
  Description of Artificial Sequence: Synthetic oligonucleotide
auggauccaucaccagcau

SEQ ID NO: 2835762 - RNA, 19 nt, Artificial Sequence
  Description of Artificial Sequence: Synthetic oligonucleotide
caugauggauaacuugaau

SEQ ID NO: 2835763 - RNA, 19 nt, Artificial Sequence
  Description of Artificial Sequence: Synthetic oligonucleotide
gugggaacauaccuccgcu

SEQ ID NO: 2835764 - RNA, 19 nt, Artificial Sequence
  Description of Artificial Sequence: Synthetic oligonucleotide
cgauggaacagcauugaga

SEQ ID NO: 2835765 - RNA, 19 nt, Artificial Sequence
  Description of Artificial Sequence: Synthetic oligonucleotide
ccuguuagcuuaaauuucu

SEQ ID NO: 2835766 - RNA, 19 nt, Artificial Sequence
  Description of Artificial Sequence: Synthetic oligonucleotide
caucaccagcaucuuccuc

SEQ ID NO: 2835767 - RNA, 19 nt, Artificial Sequence
  Description of Artificial Sequence: Synthetic oligonucleotide
cauggcuguuaggagcauc

SEQ ID NO: 2835768 - RNA, 19 nt, Artificial Sequence
  Description of Artificial Sequence: Synthetic oligonucleotide
accugcagcauggauccau

SEQ ID NO: 2835769 - RNA, 19 nt, Artificial Sequence
  Description of Artificial Sequence: Synthetic oligonucleotide
guucauucuucccuccuuu

SEQ ID NO: 2835770 - RNA, 19 nt, Artificial Sequence
  Description of Artificial Sequence: Synthetic oligonucleotide
acucugaccauggcuguua

SEQ ID NO: 2835771 - RNA, 19 nt, Artificial Sequence
  Description of Artificial Sequence: Synthetic oligonucleotide
aacuugaauggggccuguu

SEQ ID NO: 2835772 - RNA, 19 nt, Artificial Sequence
  Description of Artificial Sequence: Synthetic oligonucleotide
aguuucgauggaacagcau

SEQ ID NO: 2835773 - RNA, 19 nt, Artificial Sequence
  Description of Artificial Sequence: Synthetic oligonucleotide
guucugcuuccguuucaga

SEQ ID NO: 2835774 - RNA, 19 nt, Artificial Sequence
  Description of Artificial Sequence: Synthetic oligonucleotide
cuuuugcaugauggauaac

SEQ ID NO: 2835775 - RNA, 19 nt, Artificial Sequence
  Description of Artificial Sequence: Synthetic oligonucleotide
uggcuguuaggagcauccu

SEQ ID NO: 2835776 - RNA, 19 nt, Artificial Sequence
  Description of Artificial Sequence: Synthetic oligonucleotide
cggugauucggauuauuuc

SEQ ID NO: 2835777 - RNA, 19 nt, Artificial Sequence
  Description of Artificial Sequence: Synthetic oligonucleotide
guguucugcuuccguuuca

SEQ ID NO: 2835778 - RNA, 19 nt, Artificial Sequence
  Description of Artificial Sequence: Synthetic oligonucleotide
gccauuuuccuucuggguu

SEQ ID NO: 2835779 - RNA, 19 nt, Artificial Sequence
  Description of Artificial Sequence: Synthetic oligonucleotide
cugcagcauggauccauca

SEQ ID NO: 2835780 - RNA, 19 nt, Artificial Sequence
  Description of Artificial Sequence: Synthetic oligonucleotide
gggccuguuagcuuaaauu

SEQ ID NO: 2835781 - RNA, 19 nt, Artificial Sequence
  Description of Artificial Sequence: Synthetic oligonucleotide
caucuggugguggugggaa

SEQ ID NO: 2835782 - RNA, 19 nt, Artificial Sequence
  Description of Artificial Sequence: Synthetic oligonucleotide
cuuuacuguuccuuccguu

SEQ ID NO: 2835783 - RNA, 19 nt, Artificial Sequence
  Description of Artificial Sequence: Synthetic oligonucleotide
cccuccuuugacaucacaa

SEQ ID NO: 2835784 - RNA, 19 nt, Artificial Sequence
  Description of Artificial Sequence: Synthetic oligonucleotide
cuuccccuugcuugaagcu

SEQ ID NO: 2835785 - RNA, 19 nt, Artificial Sequence
  Description of Artificial Sequence: Synthetic oligonucleotide
cauagacuucuuggucauc

SEQ ID NO: 2835786 - RNA, 19 nt, Artificial Sequence
  Description of Artificial Sequence: Synthetic oligonucleotide
caaucucgacagcaguugu

SEQ ID NO: 2835787 - RNA, 19 nt, Artificial Sequence
  Description of Artificial Sequence: Synthetic oligonucleotide
guugucggugauucggauu

SEQ ID NO: 2835788 - RNA, 19 nt, Artificial Sequence
  Description of Artificial Sequence: Synthetic oligonucleotide
uucccuccuuugacaucac

SEQ ID NO: 2835789 - RNA, 19 nt, Artificial Sequence
  Description of Artificial Sequence: Synthetic oligonucleotide
gcauugagaguguucugcu

SEQ ID NO: 2835790 - RNA, 19 nt, Artificial Sequence
  Description of Artificial Sequence: Synthetic oligonucleotide
ugucuuccccuugcuugaa

SEQ ID NO: 2835791 - RNA, 19 nt, Artificial Sequence
  Description of Artificial Sequence: Synthetic oligonucleotide
cuguuaggagcauccugcu

SEQ ID NO: 2835792 - RNA, 19 nt, Artificial Sequence
  Description of Artificial Sequence: Synthetic oligonucleotide
caucuucaacaaguuucga

SEQ ID NO: 2835793 - RNA, 19 nt, Artificial Sequence
  Description of Artificial Sequence: Synthetic oligonucleotide
gucaaucucgacagcaguu

SEQ ID NO: 2835794 - RNA, 19 nt, Artificial Sequence
  Description of Artificial Sequence: Synthetic oligonucleotide
cauccugcucagccacauc

SEQ ID NO: 2835795 - RNA, 19 nt, Artificial Sequence
  Description of Artificial Sequence: Synthetic oligonucleotide
uaggagcauccugcucagc

SEQ ID NO: 2835796 - RNA, 19 nt, Artificial Sequence
  Description of Artificial Sequence: Synthetic oligonucleotide
gucuucucuucaaccugca

SEQ ID NO: 2835797 - RNA, 19 nt, Artificial Sequence
  Description of Artificial Sequence: Synthetic oligonucleotide
uucuggguugucggugauu

SEQ ID NO: 2835798 - RNA, 19 nt, Artificial Sequence
  Description of Artificial Sequence: Synthetic oligonucleotide
gaauggggccuguuagcuu

SEQ ID NO: 2835799 - RNA, 19 nt, Artificial Sequence
  Description of Artificial Sequence: Synthetic oligonucleotide
ccugcucagccacaucauc

SEQ ID NO: 2835800 - RNA, 19 nt, Artificial Sequence
  Description of Artificial Sequence: Synthetic oligonucleotide
ccugcagcauggauccauc

SEQ ID NO: 2835801 - RNA, 19 nt, Artificial Sequence
  Description of Artificial Sequence: Synthetic oligonucleotide
gugcuggucuucucuucaa

SEQ ID NO: 2835802 - RNA, 19 nt, Artificial Sequence
  Description of Artificial Sequence: Synthetic oligonucleotide
ugucggugauucggauuau

SEQ ID NO: 2835803 - RNA, 19 nt, Artificial Sequence
  Description of Artificial Sequence: Synthetic oligonucleotide
ugcuuccguuucagagaau

SEQ ID NO: 2835804 - RNA, 19 nt, Artificial Sequence
  Description of Artificial Sequence: Synthetic oligonucleotide
ccuucuggguugucgguga

SEQ ID NO: 2835805 - RNA, 19 nt, Artificial Sequence
  Description of Artificial Sequence: Synthetic oligonucleotide
cauugagaguguucugcuu

SEQ ID NO: 2835806 - RNA, 19 nt, Artificial Sequence
  Description of Artificial Sequence: Synthetic oligonucleotide
caguucauucuucccuccu

SEQ ID NO: 2835807 - RNA, 19 nt, Artificial Sequence
  Description of Artificial Sequence: Synthetic oligonucleotide
aaccugcagcauggaucca

SEQ ID NO: 2835808 - RNA, 19 nt, Artificial Sequence
  Description of Artificial Sequence: Synthetic oligonucleotide
cuguuagcuuaaauuucuu

SEQ ID NO: 2835809 - RNA, 19 nt, Artificial Sequence
  Description of Artificial Sequence: Synthetic oligonucleotide
ggucaucuucaacaaguuu

SEQ ID NO: 2835810 - RNA, 19 nt, Artificial Sequence
  Description of Artificial Sequence: Synthetic oligonucleotide
caggaccacgugcuggucu

SEQ ID NO: 2835811 - RNA, 19 nt, Artificial Sequence
  Description of Artificial Sequence: Synthetic oligonucleotide
uggugguggugggaacaua

SEQ ID NO: 2835812 - RNA, 19 nt, Artificial Sequence
  Description of Artificial Sequence: Synthetic oligonucleotide
accuccgcuuccacucuga

SEQ ID NO: 2835813 - RNA, 19 nt, Artificial Sequence
  Description of Artificial Sequence: Synthetic oligonucleotide
ccccaggaccacgugcugg

SEQ ID NO: 2835814 - RNA, 19 nt, Artificial Sequence
  Description of Artificial Sequence: Synthetic oligonucleotide
ggguugucggugauucgga

SEQ ID NO: 2835815 - RNA, 19 nt, Artificial Sequence
  Description of Artificial Sequence: Synthetic oligonucleotide
cuucaaccugcagcaugga

SEQ ID NO: 2835816 - RNA, 19 nt, Artificial Sequence
  Description of Artificial Sequence: Synthetic oligonucleotide
gaccacgugcuggucuucu

SEQ ID NO: 2835817 - RNA, 19 nt, Artificial Sequence
  Description of Artificial Sequence: Synthetic oligonucleotide
cauuuuccuucuggguugu

SEQ ID NO: 2835818 - RNA, 19 nt, Artificial Sequence
  Description of Artificial Sequence: Synthetic oligonucleotide
ccaucauaaaugucaucau

SEQ ID NO: 2835819 - RNA, 19 nt, Artificial Sequence
  Description of Artificial Sequence: Synthetic oligonucleotide
ccacaucaucauagacuuc

SEQ ID NO: 2835820 - RNA, 19 nt, Artificial Sequence
  Description of Artificial Sequence: Synthetic oligonucleotide
gaacagcauugagaguguu

SEQ ID NO: 2835821 - RNA, 19 nt, Artificial Sequence
  Description of Artificial Sequence: Synthetic oligonucleotide
ggaacagcauugagagugu

SEQ ID NO: 2835822 - RNA, 19 nt, Artificial Sequence
  Description of Artificial Sequence: Synthetic oligonucleotide
gauccaucaccagcaucuu

SEQ ID NO: 2835823 - RNA, 19 nt, Artificial Sequence
  Description of Artificial Sequence: Synthetic oligonucleotide
uggggccuguuagcuuaaa

SEQ ID NO: 2835824 - RNA, 19 nt, Artificial Sequence
  Description of Artificial Sequence: Synthetic oligonucleotide
cagcaucuuccucuucuau

SEQ ID NO: 2835825 - RNA, 19 nt, Artificial Sequence
  Description of Artificial Sequence: Synthetic oligonucleotide
gguugucggugauucggau

SEQ ID NO: 2835826 - RNA, 19 nt, Artificial Sequence
  Description of Artificial Sequence: Synthetic oligonucleotide
ccucuucuaucccaucaua

SEQ ID NO: 2835827 - RNA, 19 nt, Artificial Sequence
  Description of Artificial Sequence: Synthetic oligonucleotide
cacgugcuggucuucucuu

SEQ ID NO: 2835828 - RNA, 19 nt, Artificial Sequence
  Description of Artificial Sequence: Synthetic oligonucleotide
ccuccgcuuccacucugac

SEQ ID NO: 2835829 - RNA, 19 nt, Artificial Sequence
  Description of Artificial Sequence: Synthetic oligonucleotide
ccccuugcuugaagcucag

SEQ ID NO: 2835830 - RNA, 19 nt, Artificial Sequence
  Description of Artificial Sequence: Synthetic oligonucleotide
auggggccuguuagcuuaa

SEQ ID NO: 2835831 - RNA, 19 nt, Artificial Sequence
  Description of Artificial Sequence: Synthetic oligonucleotide
cguuucagagaaucauagu

SEQ ID NO: 2835832 - RNA, 19 nt, Artificial Sequence
  Description of Artificial Sequence: Synthetic oligonucleotide
ggggccuguuagcuuaaau

SEQ ID NO: 2835833 - RNA, 19 nt, Artificial Sequence
  Description of Artificial Sequence: Synthetic oligonucleotide
gucggugauucggauuauu

SEQ ID NO: 2835834 - RNA, 19 nt, Artificial Sequence
  Description of Artificial Sequence: Synthetic oligonucleotide
caacaugcuuuugcaugau

SEQ ID NO: 2835835 - RNA, 19 nt, Artificial Sequence
  Description of Artificial Sequence: Synthetic oligonucleotide
ccacgugcuggucuucucu

SEQ ID NO: 2835836 - RNA, 19 nt, Artificial Sequence
  Description of Artificial Sequence: Synthetic oligonucleotide
cuucuggguugucggugau

SEQ ID NO: 2835837 - RNA, 19 nt, Artificial Sequence
  Description of Artificial Sequence: Synthetic oligonucleotide
cuggugguggugggaacau

SEQ ID NO: 2835838 - RNA, 19 nt, Artificial Sequence
  Description of Artificial Sequence: Synthetic oligonucleotide
ccaucaccagcaucuuccu

SEQ ID NO: 2835839 - RNA, 19 nt, Artificial Sequence
  Description of Artificial Sequence: Synthetic oligonucleotide
caguucugcccagccauuu

SEQ ID NO: 2835840 - RNA, 19 nt, Artificial Sequence
  Description of Artificial Sequence: Synthetic oligonucleotide
cccuggcaguucugcccag

SEQ ID NO: 2835841 - RNA, 19 nt, Artificial Sequence
  Description of Artificial Sequence: Synthetic oligonucleotide
cgcuuccacucugaccaug

SEQ ID NO: 2835842 - RNA, 19 nt, Artificial Sequence
  Description of Artificial Sequence: Synthetic oligonucleotide
ggaccacgugcuggucuuc

SEQ ID NO: 2835843 - RNA, 19 nt, Artificial Sequence
  Description of Artificial Sequence: Synthetic oligonucleotide
ccacucugaccauggcugu

SEQ ID NO: 2835844 - RNA, 19 nt, Artificial Sequence
  Description of Artificial Sequence: Synthetic oligonucleotide
gcaguucugcccagccauu

SEQ ID NO: 2835845 - RNA, 19 nt, Artificial Sequence
  Description of Artificial Sequence: Synthetic oligonucleotide
cgacagcaguuguuuuaau

SEQ ID NO: 2835846 - RNA, 19 nt, Artificial Sequence
  Description of Artificial Sequence: Synthetic oligonucleotide
cccuugcuugaagcucagu

SEQ ID NO: 2835847 - RNA, 19 nt, Artificial Sequence
  Description of Artificial Sequence: Synthetic oligonucleotide
ccgcuuccacucugaccau

SEQ ID NO: 2835848 - RNA, 19 nt, Artificial Sequence
  Description of Artificial Sequence: Synthetic oligonucleotide
ccauggcuguuaggagcau

SEQ ID NO: 2835849 - RNA, 19 nt, Artificial Sequence
  Description of Artificial Sequence: Synthetic oligonucleotide
acuggaauuaaacugagcc

SEQ ID NO: 2835850 - RNA, 19 nt, Artificial Sequence
  Description of Artificial Sequence: Synthetic oligonucleotide
aaaaugaaggaauuucacc

SEQ ID NO: 2835851 - RNA, 19 nt, Artificial Sequence
  Description of Artificial Sequence: Synthetic oligonucleotide
aaaacuuaggcugaaauac

SEQ ID NO: 2835852 - RNA, 19 nt, Artificial Sequence
  Description of Artificial Sequence: Synthetic oligonucleotide
aauagugucacuaaguaac

SEQ ID NO: 2835853 - RNA, 19 nt, Artificial Sequence
  Description of Artificial Sequence: Synthetic oligonucleotide
ucaaucagaauccugaggg

SEQ ID NO: 2835854 - RNA, 19 nt, Artificial Sequence
  Description of Artificial Sequence: Synthetic oligonucleotide
aaaugacugaugcagacac

SEQ ID NO: 2835855 - RNA, 19 nt, Artificial Sequence
  Description of Artificial Sequence: Synthetic oligonucleotide
aaaugaaggaauuucaccu

SEQ ID NO: 2835856 - RNA, 19 nt, Artificial Sequence
  Description of Artificial Sequence: Synthetic oligonucleotide
auuaaacugagccagcagc

SEQ ID NO: 2835857 - RNA, 19 nt, Artificial Sequence
  Description of Artificial Sequence: Synthetic oligonucleotide
uuuuaaaugacugaugcag

SEQ ID NO: 2835858 - RNA, 19 nt, Artificial Sequence
  Description of Artificial Sequence: Synthetic oligonucleotide
aagacuuuauucaacauac

SEQ ID NO: 2835859 - RNA, 19 nt, Artificial Sequence
  Description of Artificial Sequence: Synthetic oligonucleotide
cuaauagucuccaaaaucc

SEQ ID NO: 2835860 - RNA, 19 nt, Artificial Sequence
  Description of Artificial Sequence: Synthetic oligonucleotide
aauguuugaauagugucac

SEQ ID NO: 2835861 - RNA, 19 nt, Artificial Sequence
  Description of Artificial Sequence: Synthetic oligonucleotide
guaacauuuacauaugggc

SEQ ID NO: 2835862 - RNA, 19 nt, Artificial Sequence
  Description of Artificial Sequence: Synthetic oligonucleotide
uaaauauguauccagagua

SEQ ID NO: 2835863 - RNA, 19 nt, Artificial Sequence
  Description of Artificial Sequence: Synthetic oligonucleotide
ugauaaaacaugcaugaug

SEQ ID NO: 2835864 - RNA, 19 nt, Artificial Sequence
  Description of Artificial Sequence: Synthetic oligonucleotide
uucacaaauacacauacaa

SEQ ID NO: 2835865 - RNA, 19 nt, Artificial Sequence
  Description of Artificial Sequence: Synthetic oligonucleotide
acuucacaaauacacauac

SEQ ID NO: 2835866 - RNA, 19 nt, Artificial Sequence
  Description of Artificial Sequence: Synthetic oligonucleotide
uacauaugggccauaauag

SEQ ID NO: 2835867 - RNA, 19 nt, Artificial Sequence
  Description of Artificial Sequence: Synthetic oligonucleotide
uuauucaacauaccucucg

SEQ ID NO: 2835868 - RNA, 19 nt, Artificial Sequence
  Description of Artificial Sequence: Synthetic oligonucleotide
uaacauuuacauaugggcc

SEQ ID NO: 2835869 - RNA, 19 nt, Artificial Sequence
  Description of Artificial Sequence: Synthetic oligonucleotide
uguucaaucagaauccuga

SEQ ID NO: 2835870 - RNA, 19 nt, Artificial Sequence
  Description of Artificial Sequence: Synthetic oligonucleotide
ugccccaaaacuaaguugg

SEQ ID NO: 2835871 - RNA, 19 nt, Artificial Sequence
  Description of Artificial Sequence: Synthetic oligonucleotide
caaaacuggaauuaaacug

SEQ ID NO: 2835872 - RNA, 19 nt, Artificial Sequence
  Description of Artificial Sequence: Synthetic oligonucleotide
uuuaagacuuuauucaaca

SEQ ID NO: 2835873 - RNA, 19 nt, Artificial Sequence
  Description of Artificial Sequence: Synthetic oligonucleotide
uuuggcacaauccauaauc

SEQ ID NO: 2835874 - RNA, 19 nt, Artificial Sequence
  Description of Artificial Sequence: Synthetic oligonucleotide
aacauuuacauaugggcca

SEQ ID NO: 2835875 - RNA, 19 nt, Artificial Sequence
  Description of Artificial Sequence: Synthetic oligonucleotide
cauauaaauauguauccag

SEQ ID NO: 2835876 - RNA, 19 nt, Artificial Sequence
  Description of Artificial Sequence: Synthetic oligonucleotide
uauucaacauaccucucgg

SEQ ID NO: 2835877 - RNA, 19 nt, Artificial Sequence
  Description of Artificial Sequence: Synthetic oligonucleotide
gauaaaacaugcaugauga

SEQ ID NO: 2835878 - RNA, 19 nt, Artificial Sequence
  Description of Artificial Sequence: Synthetic oligonucleotide
uuacauaugggccauaaua

SEQ ID NO: 2835879 - RNA, 19 nt, Artificial Sequence
  Description of Artificial Sequence: Synthetic oligonucleotide
aauauguauccagaguaac

SEQ ID NO: 2835880 - RNA, 19 nt, Artificial Sequence
  Description of Artificial Sequence: Synthetic oligonucleotide
uuugaauagugucacuaag

SEQ ID NO: 2835881 - RNA, 19 nt, Artificial Sequence
  Description of Artificial Sequence: Synthetic oligonucleotide
cauacaaauguuugaauag

SEQ ID NO: 2835882 - RNA, 19 nt, Artificial Sequence
  Description of Artificial Sequence: Synthetic oligonucleotide
ucuaauagucuccaaaauc

SEQ ID NO: 2835883 - RNA, 19 nt, Artificial Sequence
  Description of Artificial Sequence: Synthetic oligonucleotide
uggaauuaaacugagccag

SEQ ID NO: 2835884 - RNA, 19 nt, Artificial Sequence
  Description of Artificial Sequence: Synthetic oligonucleotide
acuaaguuggcugugacuc

SEQ ID NO: 2835885 - RNA, 19 nt, Artificial Sequence
  Description of Artificial Sequence: Synthetic oligonucleotide
agacacuucacaaauacac

SEQ ID NO: 2835886 - RNA, 19 nt, Artificial Sequence
  Description of Artificial Sequence: Synthetic oligonucleotide
caauccauaaucucugucc

SEQ ID NO: 2835887 - RNA, 19 nt, Artificial Sequence
  Description of Artificial Sequence: Synthetic oligonucleotide
uuggcugugacucaugcug

SEQ ID NO: 2835888 - RNA, 19 nt, Artificial Sequence
  Description of Artificial Sequence: Synthetic oligonucleotide
gacuuuuaagacuuuauuc

SEQ ID NO: 2835889 - RNA, 19 nt, Artificial Sequence
  Description of Artificial Sequence: Synthetic oligonucleotide
ucaaaacuggaauuaaacu

SEQ ID NO: 2835890 - RNA, 19 nt, Artificial Sequence
  Description of Artificial Sequence: Synthetic oligonucleotide
uggcauauaaauauguauc

SEQ ID NO: 2835891 - RNA, 19 nt, Artificial Sequence
  Description of Artificial Sequence: Synthetic oligonucleotide
aaugaaggaauuucaccug

SEQ ID NO: 2835892 - RNA, 19 nt, Artificial Sequence
  Description of Artificial Sequence: Synthetic oligonucleotide
cauaauagcaagcauacca

SEQ ID NO: 2835893 - RNA, 19 nt, Artificial Sequence
  Description of Artificial Sequence: Synthetic oligonucleotide
cuugauaaaacaugcauga

SEQ ID NO: 2835894 - RNA, 19 nt, Artificial Sequence
  Description of Artificial Sequence: Synthetic oligonucleotide
uuaaacugagccagcagcc

SEQ ID NO: 2835895 - RNA, 19 nt, Artificial Sequence
  Description of Artificial Sequence: Synthetic oligonucleotide
guuccagaauaccugaugg

SEQ ID NO: 2835896 - RNA, 19 nt, Artificial Sequence
  Description of Artificial Sequence: Synthetic oligonucleotide
uaaguaacauggcauauaa

SEQ ID NO: 2835897 - RNA, 19 nt, Artificial Sequence
  Description of Artificial Sequence: Synthetic oligonucleotide
aauuaaacugagccagcag

SEQ ID NO: 2835898 - RNA, 19 nt, Artificial Sequence
  Description of Artificial Sequence: Synthetic oligonucleotide
cauaccauuaacaaaacaa

SEQ ID NO: 2835899 - RNA, 19 nt, Artificial Sequence
  Description of Artificial Sequence: Synthetic oligonucleotide
uucaaucagaauccugagg

SEQ ID NO: 2835900 - RNA, 19 nt, Artificial Sequence
  Description of Artificial Sequence: Synthetic oligonucleotide
ucaugcuggacuuuuaaga

SEQ ID NO: 2835901 - RNA, 19 nt, Artificial Sequence
  Description of Artificial Sequence: Synthetic oligonucleotide
aauccauaaucucuguccu

SEQ ID NO: 2835902 - RNA, 19 nt, Artificial Sequence
  Description of Artificial Sequence: Synthetic oligonucleotide
auaaauauguauccagagu

SEQ ID NO: 2835903 - RNA, 19 nt, Artificial Sequence
  Description of Artificial Sequence: Synthetic oligonucleotide
aaacuaaguuggcugugac

SEQ ID NO: 2835904 - RNA, 19 nt, Artificial Sequence
  Description of Artificial Sequence: Synthetic oligonucleotide
aagcauaccauuaacaaaa

SEQ ID NO: 2835905 - RNA, 19 nt, Artificial Sequence
  Description of Artificial Sequence: Synthetic oligonucleotide
aaggaauuucaccuguuca

SEQ ID NO: 2835906 - RNA, 19 nt, Artificial Sequence
  Description of Artificial Sequence: Synthetic oligonucleotide
uucaacauaccucucggga

SEQ ID NO: 2835907 - RNA, 19 nt, Artificial Sequence
  Description of Artificial Sequence: Synthetic oligonucleotide
uacaaauguuugaauagug

SEQ ID NO: 2835908 - RNA, 19 nt, Artificial Sequence
  Description of Artificial Sequence: Synthetic oligonucleotide
uccagaguaacauuuacau

SEQ ID NO: 2835909 - RNA, 19 nt, Artificial Sequence
  Description of Artificial Sequence: Synthetic oligonucleotide
aaauguuugaauaguguca

SEQ ID NO: 2835910 - RNA, 19 nt, Artificial Sequence
  Description of Artificial Sequence: Synthetic oligonucleotide
cucgggaaaacuuaggcug

SEQ ID NO: 2835911 - RNA, 19 nt, Artificial Sequence
  Description of Artificial Sequence: Synthetic oligonucleotide
aucucuguccucaagauuc

SEQ ID NO: 2835912 - RNA, 19 nt, Artificial Sequence
  Description of Artificial Sequence: Synthetic oligonucleotide
guccucaagauucuaauag

SEQ ID NO: 2835913 - RNA, 19 nt, Artificial Sequence
  Description of Artificial Sequence: Synthetic oligonucleotide
aaucagaauccugagggag

SEQ ID NO: 2835914 - RNA, 19 nt, Artificial Sequence
  Description of Artificial Sequence: Synthetic oligonucleotide
aaggucagugcccaguuug

SEQ ID NO: 2835915 - RNA, 19 nt, Artificial Sequence
  Description of Artificial Sequence: Synthetic oligonucleotide
uuuuaagacuuuauucaac

SEQ ID NO: 2835916 - RNA, 19 nt, Artificial Sequence
  Description of Artificial Sequence: Synthetic oligonucleotide
caaauguuugaauaguguc

SEQ ID NO: 2835917 - RNA, 19 nt, Artificial Sequence
  Description of Artificial Sequence: Synthetic oligonucleotide
ugaauagugucacuaagua

SEQ ID NO: 2835918 - RNA, 19 nt, Artificial Sequence
  Description of Artificial Sequence: Synthetic oligonucleotide
uaagacuuuauucaacaua

SEQ ID NO: 2835919 - RNA, 19 nt, Artificial Sequence
  Description of Artificial Sequence: Synthetic oligonucleotide
acuuuauucaacauaccuc

SEQ ID NO: 2835920 - RNA, 19 nt, Artificial Sequence
  Description of Artificial Sequence: Synthetic oligonucleotide
uugaauagugucacuaagu

SEQ ID NO: 2835921 - RNA, 19 nt, Artificial Sequence
  Description of Artificial Sequence: Synthetic oligonucleotide
ugcaugaugaaaaguaaaa

SEQ ID NO: 2835922 - RNA, 19 nt, Artificial Sequence
  Description of Artificial Sequence: Synthetic oligonucleotide
uguauccagaguaacauuu

SEQ ID NO: 2835923 - RNA, 19 nt, Artificial Sequence
  Description of Artificial Sequence: Synthetic oligonucleotide
uuaaaugacugaugcagac

SEQ ID NO: 2835924 - RNA, 19 nt, Artificial Sequence
  Description of Artificial Sequence: Synthetic oligonucleotide
gugucacuaaguaacaugg

SEQ ID NO: 2835925 - RNA, 19 nt, Artificial Sequence
  Description of Artificial Sequence: Synthetic oligonucleotide
auaaucucuguccucaaga

SEQ ID NO: 2835926 - RNA, 19 nt, Artificial Sequence
  Description of Artificial Sequence: Synthetic oligonucleotide
ucuccaaaauccuggcugg

SEQ ID NO: 2835927 - RNA, 19 nt, Artificial Sequence
  Description of Artificial Sequence: Synthetic oligonucleotide
aguaacauuuacauauggg

SEQ ID NO: 2835928 - RNA, 19 nt, Artificial Sequence
  Description of Artificial Sequence: Synthetic oligonucleotide
aauccuggcuggucaaaac

SEQ ID NO: 2835929 - RNA, 19 nt, Artificial Sequence
  Description of Artificial Sequence: Synthetic oligonucleotide
ucugacaucagaacucgac

SEQ ID NO: 2835930 - RNA, 19 nt, Artificial Sequence
  Description of Artificial Sequence: Synthetic oligonucleotide
agugucacuaaguaacaug

SEQ ID NO: 2835931 - RNA, 19 nt, Artificial Sequence
  Description of Artificial Sequence: Synthetic oligonucleotide
acauacaaauguuugaaua

SEQ ID NO: 2835932 - RNA, 19 nt, Artificial Sequence
  Description of Artificial Sequence: Synthetic oligonucleotide
auucuaauagucuccaaaa

SEQ ID NO: 2835933 - RNA, 19 nt, Artificial Sequence
  Description of Artificial Sequence: Synthetic oligonucleotide
aguuggcugugacucaugc

SEQ ID NO: 2835934 - RNA, 19 nt, Artificial Sequence
  Description of Artificial Sequence: Synthetic oligonucleotide
accuguucaaucagaaucc

SEQ ID NO: 2835935 - RNA, 19 nt, Artificial Sequence
  Description of Artificial Sequence: Synthetic oligonucleotide
ucacuaaguaacauggcau

SEQ ID NO: 2835936 - RNA, 19 nt, Artificial Sequence
  Description of Artificial Sequence: Synthetic oligonucleotide
uacacauacaaauguuuga

SEQ ID NO: 2835937 - RNA, 19 nt, Artificial Sequence
  Description of Artificial Sequence: Synthetic oligonucleotide
auagucuccaaaauccugg

SEQ ID NO: 2835938 - RNA, 19 nt, Artificial Sequence
  Description of Artificial Sequence: Synthetic oligonucleotide
caccuguucaaucagaauc

SEQ ID NO: 2835939 - RNA, 19 nt, Artificial Sequence
  Description of Artificial Sequence: Synthetic oligonucleotide
gauucuaauagucuccaaa

SEQ ID NO: 2835940 - RNA, 19 nt, Artificial Sequence
  Description of Artificial Sequence: Synthetic oligonucleotide
uuuugucucaucuggucug

SEQ ID NO: 2835941 - RNA, 19 nt, Artificial Sequence
  Description of Artificial Sequence: Synthetic oligonucleotide
acucucacuccucugcccc

SEQ ID NO: 2835942 - RNA, 19 nt, Artificial Sequence
  Description of Artificial Sequence: Synthetic oligonucleotide
ggcauauaaauauguaucc

SEQ ID NO: 2835943 - RNA, 19 nt, Artificial Sequence
  Description of Artificial Sequence: Synthetic oligonucleotide
aggagacccacccaacccc

SEQ ID NO: 2835944 - RNA, 19 nt, Artificial Sequence
  Description of Artificial Sequence: Synthetic oligonucleotide
auggcauauaaauauguau

SEQ ID NO: 2835945 - RNA, 19 nt, Artificial Sequence
  Description of Artificial Sequence: Synthetic oligonucleotide
gucuccaaaauccuggcug

SEQ ID NO: 2835946 - RNA, 19 nt, Artificial Sequence
  Description of Artificial Sequence: Synthetic oligonucleotide
caugcuggacuuuuaagac

SEQ ID NO: 2835947 - RNA, 19 nt, Artificial Sequence
  Description of Artificial Sequence: Synthetic oligonucleotide
cuuuauucaacauaccucu

SEQ ID NO: 2835948 - RNA, 19 nt, Artificial Sequence
  Description of Artificial Sequence: Synthetic oligonucleotide
acaaauacacauacaaaug

SEQ ID NO: 2835949 - RNA, 19 nt, Artificial Sequence
  Description of Artificial Sequence: Synthetic oligonucleotide
uaauagucuccaaaauccu

SEQ ID NO: 2835950 - RNA, 19 nt, Artificial Sequence
  Description of Artificial Sequence: Synthetic oligonucleotide
aauacacauacaaauguuu

SEQ ID NO: 2835951 - RNA, 19 nt, Artificial Sequence
  Description of Artificial Sequence: Synthetic oligonucleotide
acaauccauaaucucuguc

SEQ ID NO: 2835952 - RNA, 19 nt, Artificial Sequence
  Description of Artificial Sequence: Synthetic oligonucleotide
cagaguaacauuuacauau

SEQ ID NO: 2835953 - RNA, 19 nt, Artificial Sequence
  Description of Artificial Sequence: Synthetic oligonucleotide
cagaacucgacucucacuc

SEQ ID NO: 2835954 - RNA, 19 nt, Artificial Sequence
  Description of Artificial Sequence: Synthetic oligonucleotide
uauccagaguaacauuuac

SEQ ID NO: 2835955 - RNA, 19 nt, Artificial Sequence
  Description of Artificial Sequence: Synthetic oligonucleotide
uccauaaucucuguccuca

SEQ ID NO: 2835956 - RNA, 19 nt, Artificial Sequence
  Description of Artificial Sequence: Synthetic oligonucleotide
aucagaacucgacucucac

SEQ ID NO: 2835957 - RNA, 19 nt, Artificial Sequence
  Description of Artificial Sequence: Synthetic oligonucleotide
acacuucacaaauacacau

SEQ ID NO: 2835958 - RNA, 19 nt, Artificial Sequence
  Description of Artificial Sequence: Synthetic oligonucleotide
accccuugauaaaacaugc

SEQ ID NO: 2835959 - RNA, 19 nt, Artificial Sequence
  Description of Artificial Sequence: Synthetic oligonucleotide
gacuuuauucaacauaccu

SEQ ID NO: 2835960 - RNA, 19 nt, Artificial Sequence
  Description of Artificial Sequence: Synthetic oligonucleotide
aacuaaguuggcugugacu

SEQ ID NO: 2835961 - RNA, 19 nt, Artificial Sequence
  Description of Artificial Sequence: Synthetic oligonucleotide
aagauucuaauagucucca

SEQ ID NO: 2835962 - RNA, 19 nt, Artificial Sequence
  Description of Artificial Sequence: Synthetic oligonucleotide
gaaaacuuaggcugaaaua

SEQ ID NO: 2835963 - RNA, 19 nt, Artificial Sequence
  Description of Artificial Sequence: Synthetic oligonucleotide
uguuugaauagugucacua

SEQ ID NO: 2835964 - RNA, 19 nt, Artificial Sequence
  Description of Artificial Sequence: Synthetic oligonucleotide
auauaaauauguauccaga

SEQ ID NO: 2835965 - RNA, 19 nt, Artificial Sequence
  Description of Artificial Sequence: Synthetic oligonucleotide
agaacucgacucucacucc

SEQ ID NO: 2835966 - RNA, 19 nt, Artificial Sequence
  Description of Artificial Sequence: Synthetic oligonucleotide
aauccugagggaggagacc

SEQ ID NO: 2835967 - RNA, 19 nt, Artificial Sequence
  Description of Artificial Sequence: Synthetic oligonucleotide
uuggcacaauccauaaucu

SEQ ID NO: 2835968 - RNA, 19 nt, Artificial Sequence
  Description of Artificial Sequence: Synthetic oligonucleotide
aaaacuaaguuggcuguga

SEQ ID NO: 2835969 - RNA, 19 nt, Artificial Sequence
  Description of Artificial Sequence: Synthetic oligonucleotide
auucaacauaccucucggg

SEQ ID NO: 2835970 - RNA, 19 nt, Artificial Sequence
  Description of Artificial Sequence: Synthetic oligonucleotide
ugacaucagaacucgacuc

SEQ ID NO: 2835971 - RNA, 19 nt, Artificial Sequence
  Description of Artificial Sequence: Synthetic oligonucleotide
cucucgggaaaacuuaggc

SEQ ID NO: 2835972 - RNA, 19 nt, Artificial Sequence
  Description of Artificial Sequence: Synthetic oligonucleotide
ucgacucucacuccucugc

SEQ ID NO: 2835973 - RNA, 19 nt, Artificial Sequence
  Description of Artificial Sequence: Synthetic oligonucleotide
uucuaauagucuccaaaau

SEQ ID NO: 2835974 - RNA, 19 nt, Artificial Sequence
  Description of Artificial Sequence: Synthetic oligonucleotide
ucaacauaccucucgggaa

SEQ ID NO: 2835975 - RNA, 19 nt, Artificial Sequence
  Description of Artificial Sequence: Synthetic oligonucleotide
gucacuaaguaacauggca

SEQ ID NO: 2835976 - RNA, 19 nt, Artificial Sequence
  Description of Artificial Sequence: Synthetic oligonucleotide
aaccccuugauaaaacaug

SEQ ID NO: 2835977 - RNA, 19 nt, Artificial Sequence
  Description of Artificial Sequence: Synthetic oligonucleotide
uaugggccauaauagcaag

SEQ ID NO: 2835978 - RNA, 19 nt, Artificial Sequence
  Description of Artificial Sequence: Synthetic oligonucleotide
ugaugcagacacuucacaa

SEQ ID NO: 2835979 - RNA, 19 nt, Artificial Sequence
  Description of Artificial Sequence: Synthetic oligonucleotide
aggaauuucaccuguucaa

SEQ ID NO: 2835980 - RNA, 19 nt, Artificial Sequence
  Description of Artificial Sequence: Synthetic oligonucleotide
aacuggaauuaaacugagc

SEQ ID NO: 2835981 - RNA, 19 nt, Artificial Sequence
  Description of Artificial Sequence: Synthetic oligonucleotide
ucucgggaaaacuuaggcu

SEQ ID NO: 2835982 - RNA, 19 nt, Artificial Sequence
  Description of Artificial Sequence: Synthetic oligonucleotide
cauaugggccauaauagca

SEQ ID NO: 2835983 - RNA, 19 nt, Artificial Sequence
  Description of Artificial Sequence: Synthetic oligonucleotide
aacauggcauauaaauaug

SEQ ID NO: 2835984 - RNA, 19 nt, Artificial Sequence
  Description of Artificial Sequence: Synthetic oligonucleotide
aaauacacauacaaauguu

SEQ ID NO: 2835985 - RNA, 19 nt, Artificial Sequence
  Description of Artificial Sequence: Synthetic oligonucleotide
aauagcaagcauaccauua

SEQ ID NO: 2835986 - RNA, 19 nt, Artificial Sequence
  Description of Artificial Sequence: Synthetic oligonucleotide
aaacugagccagcagccgu

SEQ ID NO: 2835987 - RNA, 19 nt, Artificial Sequence
  Description of Artificial Sequence: Synthetic oligonucleotide
uccucaagauucuaauagu

SEQ ID NO: 2835988 - RNA, 19 nt, Artificial Sequence
  Description of Artificial Sequence: Synthetic oligonucleotide
uucaccuguucaaucagaa

SEQ ID NO: 2835989 - RNA, 19 nt, Artificial Sequence
  Description of Artificial Sequence: Synthetic oligonucleotide
ugcuggacuuuuaagacuu

SEQ ID NO: 2835990 - RNA, 19 nt, Artificial Sequence
  Description of Artificial Sequence: Synthetic oligonucleotide
auagcaagcauaccauuaa

SEQ ID NO: 2835991 - RNA, 19 nt, Artificial Sequence
  Description of Artificial Sequence: Synthetic oligonucleotide
ucagugcccaguuuggcac

SEQ ID NO: 2835992 - RNA, 19 nt, Artificial Sequence
  Description of Artificial Sequence: Synthetic oligonucleotide
uccuggcuggucaaaacug

SEQ ID NO: 2835993 - RNA, 19 nt, Artificial Sequence
  Description of Artificial Sequence: Synthetic oligonucleotide
gacugaugcagacacuuca

SEQ ID NO: 2835994 - RNA, 19 nt, Artificial Sequence
  Description of Artificial Sequence: Synthetic oligonucleotide
auacaaauguuugaauagu

SEQ ID NO: 2835995 - RNA, 19 nt, Artificial Sequence
  Description of Artificial Sequence: Synthetic oligonucleotide
uggucugacaucagaacuc

SEQ ID NO: 2835996 - RNA, 19 nt, Artificial Sequence
  Description of Artificial Sequence: Synthetic oligonucleotide
ugucacuaaguaacauggc

SEQ ID NO: 2835997 - RNA, 19 nt, Artificial Sequence
  Description of Artificial Sequence: Synthetic oligonucleotide
augaaggaauuucaccugu

SEQ ID NO: 2835998 - RNA, 19 nt, Artificial Sequence
  Description of Artificial Sequence: Synthetic oligonucleotide
aaauauguauccagaguaa

SEQ ID NO: 2835999 - RNA, 19 nt, Artificial Sequence
  Description of Artificial Sequence: Synthetic oligonucleotide
ucuggucugacaucagaac

SEQ ID NO: 2836000 - RNA, 19 nt, Artificial Sequence
  Description of Artificial Sequence: Synthetic oligonucleotide
guucaaucagaauccugag

SEQ ID NO: 2836001 - RNA, 19 nt, Artificial Sequence
  Description of Artificial Sequence: Synthetic oligonucleotide
uggacuuuuaagacuuuau

SEQ ID NO: 2836002 - RNA, 19 nt, Artificial Sequence
  Description of Artificial Sequence: Synthetic oligonucleotide
gaaggaauuucaccuguuc

SEQ ID NO: 2836003 - RNA, 19 nt, Artificial Sequence
  Description of Artificial Sequence: Synthetic oligonucleotide
aaaaggucagugcccaguu

SEQ ID NO: 2836004 - RNA, 19 nt, Artificial Sequence
  Description of Artificial Sequence: Synthetic oligonucleotide
ugggccauaauagcaagca

SEQ ID NO: 2836005 - RNA, 19 nt, Artificial Sequence
  Description of Artificial Sequence: Synthetic oligonucleotide
uuccagaauaccugauggc

SEQ ID NO: 2836006 - RNA, 19 nt, Artificial Sequence
  Description of Artificial Sequence: Synthetic oligonucleotide
auaccauuaacaaaacaaa

SEQ ID NO: 2836007 - RNA, 19 nt, Artificial Sequence
  Description of Artificial Sequence: Synthetic oligonucleotide
uggcugugacucaugcugg

SEQ ID NO: 2836008 - RNA, 19 nt, Artificial Sequence
  Description of Artificial Sequence: Synthetic oligonucleotide
uuaagacuuuauucaacau

SEQ ID NO: 2836009 - RNA, 19 nt, Artificial Sequence
  Description of Artificial Sequence: Synthetic oligonucleotide
gaugcagacacuucacaaa

SEQ ID NO: 2836010 - RNA, 19 nt, Artificial Sequence
  Description of Artificial Sequence: Synthetic oligonucleotide
uaaaugacugaugcagaca

SEQ ID NO: 2836011 - RNA, 19 nt, Artificial Sequence
  Description of Artificial Sequence: Synthetic oligonucleotide
gaauagugucacuaaguaa

SEQ ID NO: 2836012 - RNA, 19 nt, Artificial Sequence
  Description of Artificial Sequence: Synthetic oligonucleotide
caaauacacauacaaaugu

SEQ ID NO: 2836013 - RNA, 19 nt, Artificial Sequence
  Description of Artificial Sequence: Synthetic oligonucleotide
ucuguccucaagauucuaa

SEQ ID NO: 2836014 - RNA, 19 nt, Artificial Sequence
  Description of Artificial Sequence: Synthetic oligonucleotide
acaaauguuugaauagugu

SEQ ID NO: 2836015 - RNA, 19 nt, Artificial Sequence
  Description of Artificial Sequence: Synthetic oligonucleotide
uaaucucuguccucaagau

SEQ ID NO: 2836016 - RNA, 19 nt, Artificial Sequence
  Description of Artificial Sequence: Synthetic oligonucleotide
aaacuuaggcugaaauacu

SEQ ID NO: 2836017 - RNA, 19 nt, Artificial Sequence
  Description of Artificial Sequence: Synthetic oligonucleotide
ccuugauaaaacaugcaug

SEQ ID NO: 2836018 - RNA, 19 nt, Artificial Sequence
  Description of Artificial Sequence: Synthetic oligonucleotide
acuccucugccccaaaacu

SEQ ID NO: 2836019 - RNA, 19 nt, Artificial Sequence
  Description of Artificial Sequence: Synthetic oligonucleotide
gaggagacccacccaaccc

SEQ ID NO: 2836020 - RNA, 19 nt, Artificial Sequence
  Description of Artificial Sequence: Synthetic oligonucleotide
ucugccccaaaacuaaguu

SEQ ID NO: 2836021 - RNA, 19 nt, Artificial Sequence
  Description of Artificial Sequence: Synthetic oligonucleotide
uuuauucaacauaccucuc

SEQ ID NO: 2836022 - RNA, 19 nt, Artificial Sequence
  Description of Artificial Sequence: Synthetic oligonucleotide
cucaugcuggacuuuuaag

SEQ ID NO: 2836023 - RNA, 19 nt, Artificial Sequence
  Description of Artificial Sequence: Synthetic oligonucleotide
gaauuaaacugagccagca

SEQ ID NO: 2836024 - RNA, 19 nt, Artificial Sequence
  Description of Artificial Sequence: Synthetic oligonucleotide
auaauagcaagcauaccau

SEQ ID NO: 2836025 - RNA, 19 nt, Artificial Sequence
  Description of Artificial Sequence: Synthetic oligonucleotide
acacauacaaauguuugaa

SEQ ID NO: 2836026 - RNA, 19 nt, Artificial Sequence
  Description of Artificial Sequence: Synthetic oligonucleotide
ucgggaaaacuuaggcuga

SEQ ID NO: 2836027 - RNA, 19 nt, Artificial Sequence
  Description of Artificial Sequence: Synthetic oligonucleotide
cuggaauuaaacugagcca

SEQ ID NO: 2836028 - RNA, 19 nt, Artificial Sequence
  Description of Artificial Sequence: Synthetic oligonucleotide
aaucucuguccucaagauu

SEQ ID NO: 2836029 - RNA, 19 nt, Artificial Sequence
  Description of Artificial Sequence: Synthetic oligonucleotide
uagcaagcauaccauuaac

SEQ ID NO: 2836030 - RNA, 19 nt, Artificial Sequence
  Description of Artificial Sequence: Synthetic oligonucleotide
acugaugcagacacuucac

SEQ ID NO: 2836031 - RNA, 19 nt, Artificial Sequence
  Description of Artificial Sequence: Synthetic oligonucleotide
aucagaauccugagggagg

SEQ ID NO: 2836032 - RNA, 19 nt, Artificial Sequence
  Description of Artificial Sequence: Synthetic oligonucleotide
uccucugccccaaaacuaa

SEQ ID NO: 2836033 - RNA, 19 nt, Artificial Sequence
  Description of Artificial Sequence: Synthetic oligonucleotide
agacuuuauucaacauacc

SEQ ID NO: 2836034 - RNA, 19 nt, Artificial Sequence
  Description of Artificial Sequence: Synthetic oligonucleotide
uuuacauaugggccauaau

SEQ ID NO: 2836035 - RNA, 19 nt, Artificial Sequence
  Description of Artificial Sequence: Synthetic oligonucleotide
cauaaucucuguccucaag

SEQ ID NO: 2836036 - RNA, 19 nt, Artificial Sequence
  Description of Artificial Sequence: Synthetic oligonucleotide
gcagacacuucacaaauac

SEQ ID NO: 2836037 - RNA, 19 nt, Artificial Sequence
  Description of Artificial Sequence: Synthetic oligonucleotide
ugagccagcagccguucca

SEQ ID NO: 2836038 - RNA, 19 nt, Artificial Sequence
  Description of Artificial Sequence: Synthetic oligonucleotide
cccaaaacuaaguuggcug

SEQ ID NO: 2836039 - RNA, 19 nt, Artificial Sequence
  Description of Artificial Sequence: Synthetic oligonucleotide
auccauaaucucuguccuc

SEQ ID NO: 2836040 - RNA, 19 nt, Artificial Sequence
  Description of Artificial Sequence: Synthetic oligonucleotide
ucagaacucgacucucacu

SEQ ID NO: 2836041 - RNA, 19 nt, Artificial Sequence
  Description of Artificial Sequence: Synthetic oligonucleotide
ugugacucaugcuggacuu

SEQ ID NO: 2836042 - RNA, 19 nt, Artificial Sequence
  Description of Artificial Sequence: Synthetic oligonucleotide
aguuuggcacaauccauaa

SEQ ID NO: 2836043 - RNA, 19 nt, Artificial Sequence
  Description of Artificial Sequence: Synthetic oligonucleotide
uaauagcaagcauaccauu

SEQ ID NO: 2836044 - RNA, 19 nt, Artificial Sequence
  Description of Artificial Sequence: Synthetic oligonucleotide
auccuggcuggucaaaacu

SEQ ID NO: 2836045 - RNA, 19 nt, Artificial Sequence
  Description of Artificial Sequence: Synthetic oligonucleotide
acauggcauauaaauaugu

SEQ ID NO: 2836046 - RNA, 19 nt, Artificial Sequence
  Description of Artificial Sequence: Synthetic oligonucleotide
guuugaauagugucacuaa

SEQ ID NO: 2836047 - RNA, 19 nt, Artificial Sequence
  Description of Artificial Sequence: Synthetic oligonucleotide
acaucagaacucgacucuc

SEQ ID NO: 2836048 - RNA, 19 nt, Artificial Sequence
  Description of Artificial Sequence: Synthetic oligonucleotide
ugucucaucuggucugaca

SEQ ID NO: 2836049 - RNA, 19 nt, Artificial Sequence
  Description of Artificial Sequence: Synthetic oligonucleotide
gacacuucacaaauacaca

SEQ ID NO: 2836050 - RNA, 19 nt, Artificial Sequence
  Description of Artificial Sequence: Synthetic oligonucleotide
agcaagcauaccauuaaca

SEQ ID NO: 2836051 - RNA, 19 nt, Artificial Sequence
  Description of Artificial Sequence: Synthetic oligonucleotide
augcuggacuuuuaagacu

SEQ ID NO: 2836052 - RNA, 19 nt, Artificial Sequence
  Description of Artificial Sequence: Synthetic oligonucleotide
agaauccugagggaggaga

SEQ ID NO: 2836053 - RNA, 19 nt, Artificial Sequence
  Description of Artificial Sequence: Synthetic oligonucleotide
caagcauaccauuaacaaa

SEQ ID NO: 2836054 - RNA, 19 nt, Artificial Sequence
  Description of Artificial Sequence: Synthetic oligonucleotide
aacuuaggcugaaauacuu

SEQ ID NO: 2836055 - RNA, 19 nt, Artificial Sequence
  Description of Artificial Sequence: Synthetic oligonucleotide
cugccccaaaacuaaguug

SEQ ID NO: 2836056 - RNA, 19 nt, Artificial Sequence
  Description of Artificial Sequence: Synthetic oligonucleotide
caugcaugaugaaaaguaa

SEQ ID NO: 2836057 - RNA, 19 nt, Artificial Sequence
  Description of Artificial Sequence: Synthetic oligonucleotide
uguccucaagauucuaaua

SEQ ID NO: 2836058 - RNA, 19 nt, Artificial Sequence
  Description of Artificial Sequence: Synthetic oligonucleotide
auuuacauaugggccauaa

SEQ ID NO: 2836059 - RNA, 19 nt, Artificial Sequence
  Description of Artificial Sequence: Synthetic oligonucleotide
gcaagcauaccauuaacaa

SEQ ID NO: 2836060 - RNA, 19 nt, Artificial Sequence
  Description of Artificial Sequence: Synthetic oligonucleotide
agaguaacauuuacauaug

SEQ ID NO: 2836061 - RNA, 19 nt, Artificial Sequence
  Description of Artificial Sequence: Synthetic oligonucleotide
guaacauggcauauaaaua

SEQ ID NO: 2836062 - RNA, 19 nt, Artificial Sequence
  Description of Artificial Sequence: Synthetic oligonucleotide
agcauaccauuaacaaaac

SEQ ID NO: 2836063 - RNA, 19 nt, Artificial Sequence
  Description of Artificial Sequence: Synthetic oligonucleotide
cuguucaaucagaauccug

SEQ ID NO: 2836064 - RNA, 19 nt, Artificial Sequence
  Description of Artificial Sequence: Synthetic oligonucleotide
augacugaugcagacacuu

SEQ ID NO: 2836065 - RNA, 19 nt, Artificial Sequence
  Description of Artificial Sequence: Synthetic oligonucleotide
aaauccuggcuggucaaaa

SEQ ID NO: 2836066 - RNA, 19 nt, Artificial Sequence
  Description of Artificial Sequence: Synthetic oligonucleotide
acucaugcuggacuuuuaa

SEQ ID NO: 2836067 - RNA, 19 nt, Artificial Sequence
  Description of Artificial Sequence: Synthetic oligonucleotide
gaauccugagggaggagac

SEQ ID NO: 2836068 - RNA, 19 nt, Artificial Sequence
  Description of Artificial Sequence: Synthetic oligonucleotide
cucaagauucuaauagucu

SEQ ID NO: 2836069 - RNA, 19 nt, Artificial Sequence
  Description of Artificial Sequence: Synthetic oligonucleotide
augggccauaauagcaagc

SEQ ID NO: 2836070 - RNA, 19 nt, Artificial Sequence
  Description of Artificial Sequence: Synthetic oligonucleotide
uaccucucgggaaaacuua

SEQ ID NO: 2836071 - RNA, 19 nt, Artificial Sequence
  Description of Artificial Sequence: Synthetic oligonucleotide
gacucucacuccucugccc

SEQ ID NO: 2836072 - RNA, 19 nt, Artificial Sequence
  Description of Artificial Sequence: Synthetic oligonucleotide
gccauaauagcaagcauac

SEQ ID NO: 2836073 - RNA, 19 nt, Artificial Sequence
  Description of Artificial Sequence: Synthetic oligonucleotide
acuaaguaacauggcauau

SEQ ID NO: 2836074 - RNA, 19 nt, Artificial Sequence
  Description of Artificial Sequence: Synthetic oligonucleotide
gacaucagaacucgacucu

SEQ ID NO: 2836075 - RNA, 19 nt, Artificial Sequence
  Description of Artificial Sequence: Synthetic oligonucleotide
ggucugacaucagaacucg

SEQ ID NO: 2836076 - RNA, 19 nt, Artificial Sequence
  Description of Artificial Sequence: Synthetic oligonucleotide
uggcacaauccauaaucuc

SEQ ID NO: 2836077 - RNA, 19 nt, Artificial Sequence
  Description of Artificial Sequence: Synthetic oligonucleotide
ucaucuggucugacaucag

SEQ ID NO: 2836078 - RNA, 19 nt, Artificial Sequence
  Description of Artificial Sequence: Synthetic oligonucleotide
ugcccaguuuggcacaauc

SEQ ID NO: 2836079 - RNA, 19 nt, Artificial Sequence
  Description of Artificial Sequence: Synthetic oligonucleotide
agggaggagacccacccaa

SEQ ID NO: 2836080 - RNA, 19 nt, Artificial Sequence
  Description of Artificial Sequence: Synthetic oligonucleotide
ugaaggaauuucaccuguu

SEQ ID NO: 2836081 - RNA, 19 nt, Artificial Sequence
  Description of Artificial Sequence: Synthetic oligonucleotide
uggcuggucaaaacuggaa

SEQ ID NO: 2836082 - RNA, 19 nt, Artificial Sequence
  Description of Artificial Sequence: Synthetic oligonucleotide
aacucgacucucacuccuc

SEQ ID NO: 2836083 - RNA, 19 nt, Artificial Sequence
  Description of Artificial Sequence: Synthetic oligonucleotide
caaaacuaaguuggcugug

SEQ ID NO: 2836084 - RNA, 19 nt, Artificial Sequence
  Description of Artificial Sequence: Synthetic oligonucleotide
ccucaagauucuaauaguc

SEQ ID NO: 2836085 - RNA, 19 nt, Artificial Sequence
  Description of Artificial Sequence: Synthetic oligonucleotide
auaugggccauaauagcaa

SEQ ID NO: 2836086 - RNA, 19 nt, Artificial Sequence
  Description of Artificial Sequence: Synthetic oligonucleotide
cauggcauauaaauaugua

SEQ ID NO: 2836087 - RNA, 19 nt, Artificial Sequence
  Description of Artificial Sequence: Synthetic oligonucleotide
ugacugaugcagacacuuc

SEQ ID NO: 2836088 - RNA, 19 nt, Artificial Sequence
  Description of Artificial Sequence: Synthetic oligonucleotide
agucuccaaaauccuggcu

SEQ ID NO: 2836089 - RNA, 19 nt, Artificial Sequence
  Description of Artificial Sequence: Synthetic oligonucleotide
cuucacaaauacacauaca

SEQ ID NO: 2836090 - RNA, 19 nt, Artificial Sequence
  Description of Artificial Sequence: Synthetic oligonucleotide
uggucaaaacuggaauuaa

SEQ ID NO: 2836091 - RNA, 19 nt, Artificial Sequence
  Description of Artificial Sequence: Synthetic oligonucleotide
uaaguuggcugugacucau

SEQ ID NO: 2836092 - RNA, 19 nt, Artificial Sequence
  Description of Artificial Sequence: Synthetic oligonucleotide
cacuaaguaacauggcaua

SEQ ID NO: 2836093 - RNA, 19 nt, Artificial Sequence
  Description of Artificial Sequence: Synthetic oligonucleotide
aaugacugaugcagacacu

SEQ ID NO: 2836094 - RNA, 19 nt, Artificial Sequence
  Description of Artificial Sequence: Synthetic oligonucleotide
auccagaguaacauuuaca

SEQ ID NO: 2836095 - RNA, 19 nt, Artificial Sequence
  Description of Artificial Sequence: Synthetic oligonucleotide
aaaggucagugcccaguuu

SEQ ID NO: 2836096 - RNA, 19 nt, Artificial Sequence
  Description of Artificial Sequence: Synthetic oligonucleotide
ucaccuguucaaucagaau

SEQ ID NO: 2836097 - RNA, 19 nt, Artificial Sequence
  Description of Artificial Sequence: Synthetic oligonucleotide
cacuccucugccccaaaac

SEQ ID NO: 2836098 - RNA, 19 nt, Artificial Sequence
  Description of Artificial Sequence: Synthetic oligonucleotide
gucagugcccaguuuggca

SEQ ID NO: 2836099 - RNA, 19 nt, Artificial Sequence
  Description of Artificial Sequence: Synthetic oligonucleotide
ucucaucuggucugacauc

SEQ ID NO: 2836100 - RNA, 19 nt, Artificial Sequence
  Description of Artificial Sequence: Synthetic oligonucleotide
acucgacucucacuccucu

SEQ ID NO: 2836101 - RNA, 19 nt, Artificial Sequence
  Description of Artificial Sequence: Synthetic oligonucleotide
uccaaaauccuggcugguc

SEQ ID NO: 2836102 - RNA, 19 nt, Artificial Sequence
  Description of Artificial Sequence: Synthetic oligonucleotide
auguuugaauagugucacu

SEQ ID NO: 2836103 - RNA, 19 nt, Artificial Sequence
  Description of Artificial Sequence: Synthetic oligonucleotide
augcaugaugaaaaguaaa

SEQ ID NO: 2836104 - RNA, 19 nt, Artificial Sequence
  Description of Artificial Sequence: Synthetic oligonucleotide
aaaauccuggcuggucaaa

SEQ ID NO: 2836105 - RNA, 19 nt, Artificial Sequence
  Description of Artificial Sequence: Synthetic oligonucleotide
acauaccucucgggaaaac

SEQ ID NO: 2836106 - RNA, 19 nt, Artificial Sequence
  Description of Artificial Sequence: Synthetic oligonucleotide
acauuuacauaugggccau

SEQ ID NO: 2836107 - RNA, 19 nt, Artificial Sequence
  Description of Artificial Sequence: Synthetic oligonucleotide
caaucagaauccugaggga

SEQ ID NO: 2836108 - RNA, 19 nt, Artificial Sequence
  Description of Artificial Sequence: Synthetic oligonucleotide
gcacaauccauaaucucug

SEQ ID NO: 2836109 - RNA, 19 nt, Artificial Sequence
  Description of Artificial Sequence: Synthetic oligonucleotide
ccuggcuggucaaaacugg

SEQ ID NO: 2836110 - RNA, 19 nt, Artificial Sequence
  Description of Artificial Sequence: Synthetic oligonucleotide
gucucaucuggucugacau

SEQ ID NO: 2836111 - RNA, 19 nt, Artificial Sequence
  Description of Artificial Sequence: Synthetic oligonucleotide
agacccacccaaccccuug

SEQ ID NO: 2836112 - RNA, 19 nt, Artificial Sequence
  Description of Artificial Sequence: Synthetic oligonucleotide
caacauaccucucgggaaa

SEQ ID NO: 2836113 - RNA, 19 nt, Artificial Sequence
  Description of Artificial Sequence: Synthetic oligonucleotide
ggaggagacccacccaacc

SEQ ID NO: 2836114 - RNA, 19 nt, Artificial Sequence
  Description of Artificial Sequence: Synthetic oligonucleotide
ggaaaacuuaggcugaaau

SEQ ID NO: 2836115 - RNA, 19 nt, Artificial Sequence
  Description of Artificial Sequence: Synthetic oligonucleotide
agccguuccagaauaccug

SEQ ID NO: 2836116 - RNA, 19 nt, Artificial Sequence
  Description of Artificial Sequence: Synthetic oligonucleotide
cagacacuucacaaauaca

SEQ ID NO: 2836117 - RNA, 19 nt, Artificial Sequence
  Description of Artificial Sequence: Synthetic oligonucleotide
aaguaacauggcauauaaa

SEQ ID NO: 2836118 - RNA, 19 nt, Artificial Sequence
  Description of Artificial Sequence: Synthetic oligonucleotide
agauucuaauagucuccaa

SEQ ID NO: 2836119 - RNA, 19 nt, Artificial Sequence
  Description of Artificial Sequence: Synthetic oligonucleotide
cuuaggcugaaauacuuuu

SEQ ID NO: 2836120 - RNA, 19 nt, Artificial Sequence
  Description of Artificial Sequence: Synthetic oligonucleotide
aacauaccucucgggaaaa

SEQ ID NO: 2836121 - RNA, 19 nt, Artificial Sequence
  Description of Artificial Sequence: Synthetic oligonucleotide
gcauauaaauauguaucca

SEQ ID NO: 2836122 - RNA, 19 nt, Artificial Sequence
  Description of Artificial Sequence: Synthetic oligonucleotide
aucuggucugacaucagaa

SEQ ID NO: 2836123 - RNA, 19 nt, Artificial Sequence
  Description of Artificial Sequence: Synthetic oligonucleotide
aggucagugcccaguuugg

SEQ ID NO: 2836124 - RNA, 19 nt, Artificial Sequence
  Description of Artificial Sequence: Synthetic oligonucleotide
accucucgggaaaacuuag

SEQ ID NO: 2836125 - RNA, 19 nt, Artificial Sequence
  Description of Artificial Sequence: Synthetic oligonucleotide
cuggucugacaucagaacu

SEQ ID NO: 2836126 - RNA, 19 nt, Artificial Sequence
  Description of Artificial Sequence: Synthetic oligonucleotide
cugaugcagacacuucaca

SEQ ID NO: 2836127 - RNA, 19 nt, Artificial Sequence
  Description of Artificial Sequence: Synthetic oligonucleotide
gaacucgacucucacuccu

SEQ ID NO: 2836128 - RNA, 19 nt, Artificial Sequence
  Description of Artificial Sequence: Synthetic oligonucleotide
gagccagcagccguuccag

SEQ ID NO: 2836129 - RNA, 19 nt, Artificial Sequence
  Description of Artificial Sequence: Synthetic oligonucleotide
caguuuggcacaauccaua

SEQ ID NO: 2836130 - RNA, 19 nt, Artificial Sequence
  Description of Artificial Sequence: Synthetic oligonucleotide
ggaauuaaacugagccagc

SEQ ID NO: 2836131 - RNA, 19 nt, Artificial Sequence
  Description of Artificial Sequence: Synthetic oligonucleotide
cuaaguuggcugugacuca

SEQ ID NO: 2836132 - RNA, 19 nt, Artificial Sequence
  Description of Artificial Sequence: Synthetic oligonucleotide
cacuucacaaauacacaua

SEQ ID NO: 2836133 - RNA, 19 nt, Artificial Sequence
  Description of Artificial Sequence: Synthetic oligonucleotide
ucacuccucugccccaaaa

SEQ ID NO: 2836134 - RNA, 19 nt, Artificial Sequence
  Description of Artificial Sequence: Synthetic oligonucleotide
cugagggaggagacccacc

SEQ ID NO: 2836135 - RNA, 19 nt, Artificial Sequence
  Description of Artificial Sequence: Synthetic oligonucleotide
cugacaucagaacucgacu

SEQ ID NO: 2836136 - RNA, 19 nt, Artificial Sequence
  Description of Artificial Sequence: Synthetic oligonucleotide
caucagaacucgacucuca

SEQ ID NO: 2836137 - RNA, 19 nt, Artificial Sequence
  Description of Artificial Sequence: Synthetic oligonucleotide
ugacucaugcuggacuuuu

SEQ ID NO: 2836138 - RNA, 19 nt, Artificial Sequence
  Description of Artificial Sequence: Synthetic oligonucleotide
caucuggucugacaucaga

SEQ ID NO: 2836139 - RNA, 19 nt, Artificial Sequence
  Description of Artificial Sequence: Synthetic oligonucleotide
cuaaguaacauggcauaua

SEQ ID NO: 2836140 - RNA, 19 nt, Artificial Sequence
  Description of Artificial Sequence: Synthetic oligonucleotide
cuggucaaaacuggaauua

SEQ ID NO: 2836141 - RNA, 19 nt, Artificial Sequence
  Description of Artificial Sequence: Synthetic oligonucleotide
ggcacaauccauaaucucu

SEQ ID NO: 2836142 - RNA, 19 nt, Artificial Sequence
  Description of Artificial Sequence: Synthetic oligonucleotide
acugagccagcagccguuc

SEQ ID NO: 2836143 - RNA, 19 nt, Artificial Sequence
  Description of Artificial Sequence: Synthetic oligonucleotide
gcauaccauuaacaaaaca

SEQ ID NO: 2836144 - RNA, 19 nt, Artificial Sequence
  Description of Artificial Sequence: Synthetic oligonucleotide
cucgacucucacuccucug

SEQ ID NO: 2836145 - RNA, 19 nt, Artificial Sequence
  Description of Artificial Sequence: Synthetic oligonucleotide
acuuaggcugaaauacuuu

SEQ ID NO: 2836146 - RNA, 19 nt, Artificial Sequence
  Description of Artificial Sequence: Synthetic oligonucleotide
ggccauaauagcaagcaua

SEQ ID NO: 2836147 - RNA, 19 nt, Artificial Sequence
  Description of Artificial Sequence: Synthetic oligonucleotide
cuggcuggucaaaacugga

SEQ ID NO: 2836148 - RNA, 19 nt, Artificial Sequence
  Description of Artificial Sequence: Synthetic oligonucleotide
ccacccaaccccuugauaa

SEQ ID NO: 2836149 - RNA, 19 nt, Artificial Sequence
  Description of Artificial Sequence: Synthetic oligonucleotide
aaguuggcugugacucaug

SEQ ID NO: 2836150 - RNA, 19 nt, Artificial Sequence
  Description of Artificial Sequence: Synthetic oligonucleotide
cccaguuuggcacaaucca

SEQ ID NO: 2836151 - RNA, 19 nt, Artificial Sequence
  Description of Artificial Sequence: Synthetic oligonucleotide
cuccucugccccaaaacua

SEQ ID NO: 2836152 - RNA, 19 nt, Artificial Sequence
  Description of Artificial Sequence: Synthetic oligonucleotide
aacugagccagcagccguu

SEQ ID NO: 2836153 - RNA, 19 nt, Artificial Sequence
  Description of Artificial Sequence: Synthetic oligonucleotide
agcagccguuccagaauac

SEQ ID NO: 2836154 - RNA, 19 nt, Artificial Sequence
  Description of Artificial Sequence: Synthetic oligonucleotide
gacccacccaaccccuuga

SEQ ID NO: 2836155 - RNA, 19 nt, Artificial Sequence
  Description of Artificial Sequence: Synthetic oligonucleotide
ccucucgggaaaacuuagg

SEQ ID NO: 2836156 - RNA, 19 nt, Artificial Sequence
  Description of Artificial Sequence: Synthetic oligonucleotide
cacauacaaauguuugaau

SEQ ID NO: 2836157 - RNA, 19 nt, Artificial Sequence
  Description of Artificial Sequence: Synthetic oligonucleotide
ggacuuuuaagacuuuauu

SEQ ID NO: 2836158 - RNA, 19 nt, Artificial Sequence
  Description of Artificial Sequence: Synthetic oligonucleotide
guauccagaguaacauuua

SEQ ID NO: 2836159 - RNA, 19 nt, Artificial Sequence
  Description of Artificial Sequence: Synthetic oligonucleotide
cuguccucaagauucuaau

SEQ ID NO: 2836160 - RNA, 19 nt, Artificial Sequence
  Description of Artificial Sequence: Synthetic oligonucleotide
caaccccuugauaaaacau

SEQ ID NO: 2836161 - RNA, 19 nt, Artificial Sequence
  Description of Artificial Sequence: Synthetic oligonucleotide
cugugacucaugcuggacu

SEQ ID NO: 2836162 - RNA, 19 nt, Artificial Sequence
  Description of Artificial Sequence: Synthetic oligonucleotide
ggucaaaacuggaauuaaa

SEQ ID NO: 2836163 - RNA, 19 nt, Artificial Sequence
  Description of Artificial Sequence: Synthetic oligonucleotide
cugagccagcagccguucc

SEQ ID NO: 2836164 - RNA, 19 nt, Artificial Sequence
  Description of Artificial Sequence: Synthetic oligonucleotide
gcccaguuuggcacaaucc

SEQ ID NO: 2836165 - RNA, 19 nt, Artificial Sequence
  Description of Artificial Sequence: Synthetic oligonucleotide
cguuccagaauaccugaug

SEQ ID NO: 2836166 - RNA, 19 nt, Artificial Sequence
  Description of Artificial Sequence: Synthetic oligonucleotide
gccguuccagaauaccuga

SEQ ID NO: 2836167 - RNA, 19 nt, Artificial Sequence
  Description of Artificial Sequence: Synthetic oligonucleotide
cagccguuccagaauaccu

SEQ ID NO: 2836168 - RNA, 19 nt, Artificial Sequence
  Description of Artificial Sequence: Synthetic oligonucleotide
acccaaccccuugauaaaa

SEQ ID NO: 2836169 - RNA, 19 nt, Artificial Sequence
  Description of Artificial Sequence: Synthetic oligonucleotide
ucucacuccucugccccaa

SEQ ID NO: 2836170 - RNA, 19 nt, Artificial Sequence
  Description of Artificial Sequence: Synthetic oligonucleotide
cauaccucucgggaaaacu

SEQ ID NO: 2836171 - RNA, 19 nt, Artificial Sequence
  Description of Artificial Sequence: Synthetic oligonucleotide
gcagccguuccagaauacc

SEQ ID NO: 2836172 - RNA, 19 nt, Artificial Sequence
  Description of Artificial Sequence: Synthetic oligonucleotide
ccauaauagcaagcauacc

SEQ ID NO: 2836173 - RNA, 19 nt, Artificial Sequence
  Description of Artificial Sequence: Synthetic oligonucleotide
ccaaccccuugauaaaaca

SEQ ID NO: 2836174 - RNA, 19 nt, Artificial Sequence
  Description of Artificial Sequence: Synthetic oligonucleotide
ccaaaacuaaguuggcugu

SEQ ID NO: 2836175 - RNA, 19 nt, Artificial Sequence
  Description of Artificial Sequence: Synthetic oligonucleotide
guuggcugugacucaugcu

SEQ ID NO: 2836176 - RNA, 19 nt, Artificial Sequence
  Description of Artificial Sequence: Synthetic oligonucleotide
uugucucaucuggucugac

SEQ ID NO: 2836177 - RNA, 19 nt, Artificial Sequence
  Description of Artificial Sequence: Synthetic oligonucleotide
cuggacuuuuaagacuuua

SEQ ID NO: 2836178 - RNA, 19 nt, Artificial Sequence
  Description of Artificial Sequence: Synthetic oligonucleotide
cccaaccccuugauaaaac

SEQ ID NO: 2836179 - RNA, 19 nt, Artificial Sequence
  Description of Artificial Sequence: Synthetic oligonucleotide
ggcuggucaaaacuggaau

SEQ ID NO: 2836180 - RNA, 19 nt, Artificial Sequence
  Description of Artificial Sequence: Synthetic oligonucleotide
ggucagugcccaguuuggc

SEQ ID NO: 2836181 - RNA, 19 nt, Artificial Sequence
  Description of Artificial Sequence: Synthetic oligonucleotide
cagaauccugagggaggag

SEQ ID NO: 2836182 - RNA, 19 nt, Artificial Sequence
  Description of Artificial Sequence: Synthetic oligonucleotide
cucugccccaaaacuaagu

SEQ ID NO: 2836183 - RNA, 19 nt, Artificial Sequence
  Description of Artificial Sequence: Synthetic oligonucleotide
cacccaaccccuugauaaa

SEQ ID NO: 2836184 - RNA, 19 nt, Artificial Sequence
  Description of Artificial Sequence: Synthetic oligonucleotide
cacaauccauaaucucugu

SEQ ID NO: 2836185 - RNA, 19 nt, Artificial Sequence
  Description of Artificial Sequence: Synthetic oligonucleotide
gcuggucaaaacuggaauu

SEQ ID NO: 2836186 - RNA, 19 nt, Artificial Sequence
  Description of Artificial Sequence: Synthetic oligonucleotide
cccuugauaaaacaugcau

SEQ ID NO: 2836187 - RNA, 19 nt, Artificial Sequence
  Description of Artificial Sequence: Synthetic oligonucleotide
ggaauuucaccuguucaau

SEQ ID NO: 2836188 - RNA, 19 nt, Artificial Sequence
  Description of Artificial Sequence: Synthetic oligonucleotide
guuuggcacaauccauaau

SEQ ID NO: 2836189 - RNA, 19 nt, Artificial Sequence
  Description of Artificial Sequence: Synthetic oligonucleotide
acccacccaaccccuugau

SEQ ID NO: 2836190 - RNA, 19 nt, Artificial Sequence
  Description of Artificial Sequence: Synthetic oligonucleotide
cagcagccguuccagaaua

SEQ ID NO: 2836191 - RNA, 19 nt, Artificial Sequence
  Description of Artificial Sequence: Synthetic oligonucleotide
ccucugccccaaaacuaag

SEQ ID NO: 2836192 - RNA, 19 nt, Artificial Sequence
  Description of Artificial Sequence: Synthetic oligonucleotide
ccagaguaacauuuacaua

SEQ ID NO: 2836193 - RNA, 19 nt, Artificial Sequence
  Description of Artificial Sequence: Synthetic oligonucleotide
agugcccaguuuggcacaa

SEQ ID NO: 2836194 - RNA, 19 nt, Artificial Sequence
  Description of Artificial Sequence: Synthetic oligonucleotide
cagugcccaguuuggcaca

SEQ ID NO: 2836195 - RNA, 19 nt, Artificial Sequence
  Description of Artificial Sequence: Synthetic oligonucleotide
ggcugugacucaugcugga

SEQ ID NO: 2836196 - RNA, 19 nt, Artificial Sequence
  Description of Artificial Sequence: Synthetic oligonucleotide
gccagcagccguuccagaa

SEQ ID NO: 2836197 - RNA, 19 nt, Artificial Sequence
  Description of Artificial Sequence: Synthetic oligonucleotide
gacucaugcuggacuuuua

SEQ ID NO: 2836198 - RNA, 19 nt, Artificial Sequence
  Description of Artificial Sequence: Synthetic oligonucleotide
cgacucucacuccucugcc

SEQ ID NO: 2836199 - RNA, 19 nt, Artificial Sequence
  Description of Artificial Sequence: Synthetic oligonucleotide
gcugugacucaugcuggac

SEQ ID NO: 2836200 - RNA, 19 nt, Artificial Sequence
  Description of Artificial Sequence: Synthetic oligonucleotide
gucugacaucagaacucga

SEQ ID NO: 2836201 - RNA, 19 nt, Artificial Sequence
  Description of Artificial Sequence: Synthetic oligonucleotide
ccccuugauaaaacaugca

SEQ ID NO: 2836202 - RNA, 19 nt, Artificial Sequence
  Description of Artificial Sequence: Synthetic oligonucleotide
gccccaaaacuaaguuggc

SEQ ID NO: 2836203 - RNA, 19 nt, Artificial Sequence
  Description of Artificial Sequence: Synthetic oligonucleotide
gggaggagacccacccaac

SEQ ID NO: 2836204 - RNA, 19 nt, Artificial Sequence
  Description of Artificial Sequence: Synthetic oligonucleotide
ccaguuuggcacaauccau

SEQ ID NO: 2836205 - RNA, 19 nt, Artificial Sequence
  Description of Artificial Sequence: Synthetic oligonucleotide
cauuuacauaugggccaua

SEQ ID NO: 2836206 - RNA, 19 nt, Artificial Sequence
  Description of Artificial Sequence: Synthetic oligonucleotide
gggccauaauagcaagcau

SEQ ID NO: 2836207 - RNA, 19 nt, Artificial Sequence
  Description of Artificial Sequence: Synthetic oligonucleotide
ccauaaucucuguccucaa

SEQ ID NO: 2836208 - RNA, 19 nt, Artificial Sequence
  Description of Artificial Sequence: Synthetic oligonucleotide
cucuguccucaagauucua

SEQ ID NO: 2836209 - RNA, 19 nt, Artificial Sequence
  Description of Artificial Sequence: Synthetic oligonucleotide
cuccaaaauccuggcuggu

SEQ ID NO: 2836210 - RNA, 19 nt, Artificial Sequence
  Description of Artificial Sequence: Synthetic oligonucleotide
cucacuccucugccccaaa

SEQ ID NO: 2836211 - RNA, 19 nt, Artificial Sequence
  Description of Artificial Sequence: Synthetic oligonucleotide
ggagacccacccaaccccu

SEQ ID NO: 2836212 - RNA, 19 nt, Artificial Sequence
  Description of Artificial Sequence: Synthetic oligonucleotide
ccuguucaaucagaauccu

SEQ ID NO: 2836213 - RNA, 19 nt, Artificial Sequence
  Description of Artificial Sequence: Synthetic oligonucleotide
ccccaaaacuaaguuggcu

SEQ ID NO: 2836214 - RNA, 19 nt, Artificial Sequence
  Description of Artificial Sequence: Synthetic oligonucleotide
gugacucaugcuggacuuu

SEQ ID NO: 2836215 - RNA, 19 nt, Artificial Sequence
  Description of Artificial Sequence: Synthetic oligonucleotide
ccagcagccguuccagaau

SEQ ID NO: 2836216 - RNA, 19 nt, Artificial Sequence
  Description of Artificial Sequence: Synthetic oligonucleotide
gagacccacccaaccccuu

SEQ ID NO: 2836217 - RNA, 19 nt, Artificial Sequence
  Description of Artificial Sequence: Synthetic oligonucleotide
ccguuccagaauaccugau

SEQ ID NO: 2836218 - RNA, 19 nt, Artificial Sequence
  Description of Artificial Sequence: Synthetic oligonucleotide
gcuggacuuuuaagacuuu

SEQ ID NO: 2836219 - RNA, 19 nt, Artificial Sequence
  Description of Artificial Sequence: Synthetic oligonucleotide
gugcccaguuuggcacaau

SEQ ID NO: 2836220 - RNA, 19 nt, Artificial Sequence
  Description of Artificial Sequence: Synthetic oligonucleotide
aguagaacaagauuucagc

SEQ ID NO: 2836221 - RNA, 19 nt, Artificial Sequence
  Description of Artificial Sequence: Synthetic oligonucleotide
cuuagagccaucuucaucc

SEQ ID NO: 2836222 - RNA, 19 nt, Artificial Sequence
  Description of Artificial Sequence: Synthetic oligonucleotide
ucauagaccaaucuuagcu

SEQ ID NO: 2836223 - RNA, 19 nt, Artificial Sequence
  Description of Artificial Sequence: Synthetic oligonucleotide
gaagagaauagaaaguugg

SEQ ID NO: 2836224 - RNA, 19 nt, Artificial Sequence
  Description of Artificial Sequence: Synthetic oligonucleotide
aaucuuagcuuccugaaga

SEQ ID NO: 2836225 - RNA, 19 nt, Artificial Sequence
  Description of Artificial Sequence: Synthetic oligonucleotide
uaauugauccauaaucugc

SEQ ID NO: 2836226 - RNA, 19 nt, Artificial Sequence
  Description of Artificial Sequence: Synthetic oligonucleotide
agaaaguuggcgaagaugg

SEQ ID NO: 2836227 - RNA, 19 nt, Artificial Sequence
  Description of Artificial Sequence: Synthetic oligonucleotide
gaauaaguugcucaacggg

SEQ ID NO: 2836228 - RNA, 19 nt, Artificial Sequence
  Description of Artificial Sequence: Synthetic oligonucleotide
ucagcaucaguuuaguucc

SEQ ID NO: 2836229 - RNA, 19 nt, Artificial Sequence
  Description of Artificial Sequence: Synthetic oligonucleotide
uuuaguuccucauugccag

SEQ ID NO: 2836230 - RNA, 19 nt, Artificial Sequence
  Description of Artificial Sequence: Synthetic oligonucleotide
aguuuaguuccucauugcc

SEQ ID NO: 2836231 - RNA, 19 nt, Artificial Sequence
  Description of Artificial Sequence: Synthetic oligonucleotide
agaacaagauuucagcauc

SEQ ID NO: 2836232 - RNA, 19 nt, Artificial Sequence
  Description of Artificial Sequence: Synthetic oligonucleotide
uggaagaucuccauggugc

SEQ ID NO: 2836233 - RNA, 19 nt, Artificial Sequence
  Description of Artificial Sequence: Synthetic oligonucleotide
uuuauaucccagaugagau

SEQ ID NO: 2836234 - RNA, 19 nt, Artificial Sequence
  Description of Artificial Sequence: Synthetic oligonucleotide
uccaccacagcucucauug

SEQ ID NO: 2836235 - RNA, 19 nt, Artificial Sequence
  Description of Artificial Sequence: Synthetic oligonucleotide
aacgaggugggccagcccg

SEQ ID NO: 2836236 - RNA, 19 nt, Artificial Sequence
  Description of Artificial Sequence: Synthetic oligonucleotide
aaguuggcgaagauggucc

SEQ ID NO: 2836237 - RNA, 19 nt, Artificial Sequence
  Description of Artificial Sequence: Synthetic oligonucleotide
aagagaauagaaaguuggc

SEQ ID NO: 2836238 - RNA, 19 nt, Artificial Sequence
  Description of Artificial Sequence: Synthetic oligonucleotide
gagaauagaaaguuggcga

SEQ ID NO: 2836239 - RNA, 19 nt, Artificial Sequence
  Description of Artificial Sequence: Synthetic oligonucleotide
gagauuccguaauugaucc

SEQ ID NO: 2836240 - RNA, 19 nt, Artificial Sequence
  Description of Artificial Sequence: Synthetic oligonucleotide
uacacgauguccugcaccg

SEQ ID NO: 2836241 - RNA, 19 nt, Artificial Sequence
  Description of Artificial Sequence: Synthetic oligonucleotide
agagaauagaaaguuggcg

SEQ ID NO: 2836242 - RNA, 19 nt, Artificial Sequence
  Description of Artificial Sequence: Synthetic oligonucleotide
ugucauagaccaaucuuag

SEQ ID NO: 2836243 - RNA, 19 nt, Artificial Sequence
  Description of Artificial Sequence: Synthetic oligonucleotide
aaaguuggcgaagaugguc

SEQ ID NO: 2836244 - RNA, 19 nt, Artificial Sequence
  Description of Artificial Sequence: Synthetic oligonucleotide
aauaaguugcucaacggga

SEQ ID NO: 2836245 - RNA, 19 nt, Artificial Sequence
  Description of Artificial Sequence: Synthetic oligonucleotide
uuuacuucugcaauuucuc

SEQ ID NO: 2836246 - RNA, 19 nt, Artificial Sequence
  Description of Artificial Sequence: Synthetic oligonucleotide
auagaccaaucuuagcuuc

SEQ ID NO: 2836247 - RNA, 19 nt, Artificial Sequence
  Description of Artificial Sequence: Synthetic oligonucleotide
uguagcuuuguuaaccggu

SEQ ID NO: 2836248 - RNA, 19 nt, Artificial Sequence
  Description of Artificial Sequence: Synthetic oligonucleotide
uccucaguagcaaaacgag

SEQ ID NO: 2836249 - RNA, 19 nt, Artificial Sequence
  Description of Artificial Sequence: Synthetic oligonucleotide
uugguaagucccaguaugg

SEQ ID NO: 2836250 - RNA, 19 nt, Artificial Sequence
  Description of Artificial Sequence: Synthetic oligonucleotide
ugagauuccguaauugauc

SEQ ID NO: 2836251 - RNA, 19 nt, Artificial Sequence
  Description of Artificial Sequence: Synthetic oligonucleotide
uuacuucugcaauuucucg

SEQ ID NO: 2836252 - RNA, 19 nt, Artificial Sequence
  Description of Artificial Sequence: Synthetic oligonucleotide
ugcucaacgggaauggggc

SEQ ID NO: 2836253 - RNA, 19 nt, Artificial Sequence
  Description of Artificial Sequence: Synthetic oligonucleotide
ucuucauccacguacggaa

SEQ ID NO: 2836254 - RNA, 19 nt, Artificial Sequence
  Description of Artificial Sequence: Synthetic oligonucleotide
gcauuuauaucccagauga

SEQ ID NO: 2836255 - RNA, 19 nt, Artificial Sequence
  Description of Artificial Sequence: Synthetic oligonucleotide
ugauucuucuguuugaguu

SEQ ID NO: 2836256 - RNA, 19 nt, Artificial Sequence
  Description of Artificial Sequence: Synthetic oligonucleotide
auuuauaucccagaugaga

SEQ ID NO: 2836257 - RNA, 19 nt, Artificial Sequence
  Description of Artificial Sequence: Synthetic oligonucleotide
aaccggucuugguaagucc

SEQ ID NO: 2836258 - RNA, 19 nt, Artificial Sequence
  Description of Artificial Sequence: Synthetic oligonucleotide
ucuccucaguagcaaaacg

SEQ ID NO: 2836259 - RNA, 19 nt, Artificial Sequence
  Description of Artificial Sequence: Synthetic oligonucleotide
uuuauuuacuucugcaauu

SEQ ID NO: 2836260 - RNA, 19 nt, Artificial Sequence
  Description of Artificial Sequence: Synthetic oligonucleotide
guaauugauccauaaucug

SEQ ID NO: 2836261 - RNA, 19 nt, Artificial Sequence
  Description of Artificial Sequence: Synthetic oligonucleotide
guaagucccaguaugguag

SEQ ID NO: 2836262 - RNA, 19 nt, Artificial Sequence
  Description of Artificial Sequence: Synthetic oligonucleotide
uugcucaacgggaaugggg

SEQ ID NO: 2836263 - RNA, 19 nt, Artificial Sequence
  Description of Artificial Sequence: Synthetic oligonucleotide
uauaucccagaugagauuc

SEQ ID NO: 2836264 - RNA, 19 nt, Artificial Sequence
  Description of Artificial Sequence: Synthetic oligonucleotide
aagauuucagcaucaguuu

SEQ ID NO: 2836265 - RNA, 19 nt, Artificial Sequence
  Description of Artificial Sequence: Synthetic oligonucleotide
gaugagauuccguaauuga

SEQ ID NO: 2836266 - RNA, 19 nt, Artificial Sequence
  Description of Artificial Sequence: Synthetic oligonucleotide
gacaccauuuggcagcugc

SEQ ID NO: 2836267 - RNA, 19 nt, Artificial Sequence
  Description of Artificial Sequence: Synthetic oligonucleotide
ugcaauuucucgucucucc

SEQ ID NO: 2836268 - RNA, 19 nt, Artificial Sequence
  Description of Artificial Sequence: Synthetic oligonucleotide
aguaugguaggugacacca

SEQ ID NO: 2836269 - RNA, 19 nt, Artificial Sequence
  Description of Artificial Sequence: Synthetic oligonucleotide
uguuaaccggucuugguaa

SEQ ID NO: 2836270 - RNA, 19 nt, Artificial Sequence
  Description of Artificial Sequence: Synthetic oligonucleotide
cacguacggaauaaguugc

SEQ ID NO: 2836271 - RNA, 19 nt, Artificial Sequence
  Description of Artificial Sequence: Synthetic oligonucleotide
ucaguagcaaaacgaggug

SEQ ID NO: 2836272 - RNA, 19 nt, Artificial Sequence
  Description of Artificial Sequence: Synthetic oligonucleotide
agaauagaaaguuggcgaa

SEQ ID NO: 2836273 - RNA, 19 nt, Artificial Sequence
  Description of Artificial Sequence: Synthetic oligonucleotide
guagaacaagauuucagca

SEQ ID NO: 2836274 - RNA, 19 nt, Artificial Sequence
  Description of Artificial Sequence: Synthetic oligonucleotide
cauugcacuugucauagac

SEQ ID NO: 2836275 - RNA, 19 nt, Artificial Sequence
  Description of Artificial Sequence: Synthetic oligonucleotide
ugcccgaugcggcacagcg

SEQ ID NO: 2836276 - RNA, 19 nt, Artificial Sequence
  Description of Artificial Sequence: Synthetic oligonucleotide
aagaugguccuguagcuuu

SEQ ID NO: 2836277 - RNA, 19 nt, Artificial Sequence
  Description of Artificial Sequence: Synthetic oligonucleotide
ggaauaaguugcucaacgg

SEQ ID NO: 2836278 - RNA, 19 nt, Artificial Sequence
  Description of Artificial Sequence: Synthetic oligonucleotide
ucugcaauuucucgucucu

SEQ ID NO: 2836279 - RNA, 19 nt, Artificial Sequence
  Description of Artificial Sequence: Synthetic oligonucleotide
uuccugaagagaauagaaa

SEQ ID NO: 2836280 - RNA, 19 nt, Artificial Sequence
  Description of Artificial Sequence: Synthetic oligonucleotide
uuguuaaccggucuuggua

SEQ ID NO: 2836281 - RNA, 19 nt, Artificial Sequence
  Description of Artificial Sequence: Synthetic oligonucleotide
uguugauucuucuguuuga

SEQ ID NO: 2836282 - RNA, 19 nt, Artificial Sequence
  Description of Artificial Sequence: Synthetic oligonucleotide
agcaaaacgaggugggcca

SEQ ID NO: 2836283 - RNA, 19 nt, Artificial Sequence
  Description of Artificial Sequence: Synthetic oligonucleotide
uugauccauaaucugcuuc

SEQ ID NO: 2836284 - RNA, 19 nt, Artificial Sequence
  Description of Artificial Sequence: Synthetic oligonucleotide
uccuguagcuuuguuaacc

SEQ ID NO: 2836285 - RNA, 19 nt, Artificial Sequence
  Description of Artificial Sequence: Synthetic oligonucleotide
guaggugacaccauuuggc

SEQ ID NO: 2836286 - RNA, 19 nt, Artificial Sequence
  Description of Artificial Sequence: Synthetic oligonucleotide
accaaucuuagcuuccuga

SEQ ID NO: 2836287 - RNA, 19 nt, Artificial Sequence
  Description of Artificial Sequence: Synthetic oligonucleotide
ugguaggugacaccauuug

SEQ ID NO: 2836288 - RNA, 19 nt, Artificial Sequence
  Description of Artificial Sequence: Synthetic oligonucleotide
agagccaucuucauccacg

SEQ ID NO: 2836289 - RNA, 19 nt, Artificial Sequence
  Description of Artificial Sequence: Synthetic oligonucleotide
ucuuagagccaucuucauc

SEQ ID NO: 2836290 - RNA, 19 nt, Artificial Sequence
  Description of Artificial Sequence: Synthetic oligonucleotide
uacggaauaaguugcucaa

SEQ ID NO: 2836291 - RNA, 19 nt, Artificial Sequence
  Description of Artificial Sequence: Synthetic oligonucleotide
uccauggugcgguacacga

SEQ ID NO: 2836292 - RNA, 19 nt, Artificial Sequence
  Description of Artificial Sequence: Synthetic oligonucleotide
uccacguacggaauaaguu

SEQ ID NO: 2836293 - RNA, 19 nt, Artificial Sequence
  Description of Artificial Sequence: Synthetic oligonucleotide
uuuguuaaccggucuuggu

SEQ ID NO: 2836294 - RNA, 19 nt, Artificial Sequence
  Description of Artificial Sequence: Synthetic oligonucleotide
uaagucccaguaugguagg

SEQ ID NO: 2836295 - RNA, 19 nt, Artificial Sequence
  Description of Artificial Sequence: Synthetic oligonucleotide
aguugcucaacgggaaugg

SEQ ID NO: 2836296 - RNA, 19 nt, Artificial Sequence
  Description of Artificial Sequence: Synthetic oligonucleotide
uagaccaaucuuagcuucc

SEQ ID NO: 2836297 - RNA, 19 nt, Artificial Sequence
  Description of Artificial Sequence: Synthetic oligonucleotide
aucuuagcuuccugaagag

SEQ ID NO: 2836298 - RNA, 19 nt, Artificial Sequence
  Description of Artificial Sequence: Synthetic oligonucleotide
ggugacaccauuuggcagc

SEQ ID NO: 2836299 - RNA, 19 nt, Artificial Sequence
  Description of Artificial Sequence: Synthetic oligonucleotide
acgggaauggggcccauuc

SEQ ID NO: 2836300 - RNA, 19 nt, Artificial Sequence
  Description of Artificial Sequence: Synthetic oligonucleotide
caguagcaaaacgaggugg

SEQ ID NO: 2836301 - RNA, 19 nt, Artificial Sequence
  Description of Artificial Sequence: Synthetic oligonucleotide
aaacgaggugggccagccc

SEQ ID NO: 2836302 - RNA, 19 nt, Artificial Sequence
  Description of Artificial Sequence: Synthetic oligonucleotide
uaucccagaugagauuccg

SEQ ID NO: 2836303 - RNA, 19 nt, Artificial Sequence
  Description of Artificial Sequence: Synthetic oligonucleotide
aaguugcucaacgggaaug

SEQ ID NO: 2836304 - RNA, 19 nt, Artificial Sequence
  Description of Artificial Sequence: Synthetic oligonucleotide
uagcaaaacgaggugggcc

SEQ ID NO: 2836305 - RNA, 19 nt, Artificial Sequence
  Description of Artificial Sequence: Synthetic oligonucleotide
acaagauuucagcaucagu

SEQ ID NO: 2836306 - RNA, 19 nt, Artificial Sequence
  Description of Artificial Sequence: Synthetic oligonucleotide
uuauuuacuucugcaauuu

SEQ ID NO: 2836307 - RNA, 19 nt, Artificial Sequence
  Description of Artificial Sequence: Synthetic oligonucleotide
acuugucauagaccaaucu

SEQ ID NO: 2836308 - RNA, 19 nt, Artificial Sequence
  Description of Artificial Sequence: Synthetic oligonucleotide
guugauucuucuguuugag

SEQ ID NO: 2836309 - RNA, 19 nt, Artificial Sequence
  Description of Artificial Sequence: Synthetic oligonucleotide
guacggaauaaguugcuca

SEQ ID NO: 2836310 - RNA, 19 nt, Artificial Sequence
  Description of Artificial Sequence: Synthetic oligonucleotide
auggcauuuauaucccaga

SEQ ID NO: 2836311 - RNA, 19 nt, Artificial Sequence
  Description of Artificial Sequence: Synthetic oligonucleotide
cuuuguuaaccggucuugg

SEQ ID NO: 2836312 - RNA, 19 nt, Artificial Sequence
  Description of Artificial Sequence: Synthetic oligonucleotide
uaugguaggugacaccauu

SEQ ID NO: 2836313 - RNA, 19 nt, Artificial Sequence
  Description of Artificial Sequence: Synthetic oligonucleotide
uggcauuuauaucccagau

SEQ ID NO: 2836314 - RNA, 19 nt, Artificial Sequence
  Description of Artificial Sequence: Synthetic oligonucleotide
ccguaauugauccauaauc

SEQ ID NO: 2836315 - RNA, 19 nt, Artificial Sequence
  Description of Artificial Sequence: Synthetic oligonucleotide
acgaguagaacaagauuuc

SEQ ID NO: 2836316 - RNA, 19 nt, Artificial Sequence
  Description of Artificial Sequence: Synthetic oligonucleotide
cauuuauaucccagaugag

SEQ ID NO: 2836317 - RNA, 19 nt, Artificial Sequence
  Description of Artificial Sequence: Synthetic oligonucleotide
cucaguagcaaaacgaggu

SEQ ID NO: 2836318 - RNA, 19 nt, Artificial Sequence
  Description of Artificial Sequence: Synthetic oligonucleotide
caguuuaguuccucauugc

SEQ ID NO: 2836319 - RNA, 19 nt, Artificial Sequence
  Description of Artificial Sequence: Synthetic oligonucleotide
accggucuugguaaguccc

SEQ ID NO: 2836320 - RNA, 19 nt, Artificial Sequence
  Description of Artificial Sequence: Synthetic oligonucleotide
cucgucucuccucaguagc

SEQ ID NO: 2836321 - RNA, 19 nt, Artificial Sequence
  Description of Artificial Sequence: Synthetic oligonucleotide
guacacgauguccugcacc

SEQ ID NO: 2836322 - RNA, 19 nt, Artificial Sequence
  Description of Artificial Sequence: Synthetic oligonucleotide
ucccagaugagauuccgua

SEQ ID NO: 2836323 - RNA, 19 nt, Artificial Sequence
  Description of Artificial Sequence: Synthetic oligonucleotide
uccguaauugauccauaau

SEQ ID NO: 2836324 - RNA, 19 nt, Artificial Sequence
  Description of Artificial Sequence: Synthetic oligonucleotide
ucucgucucuccucaguag

SEQ ID NO: 2836325 - RNA, 19 nt, Artificial Sequence
  Description of Artificial Sequence: Synthetic oligonucleotide
uuccguaauugauccauaa

SEQ ID NO: 2836326 - RNA, 19 nt, Artificial Sequence
  Description of Artificial Sequence: Synthetic oligonucleotide
gcgaagaugguccuguagc

SEQ ID NO: 2836327 - RNA, 19 nt, Artificial Sequence
  Description of Artificial Sequence: Synthetic oligonucleotide
cuccucaguagcaaaacga

SEQ ID NO: 2836328 - RNA, 19 nt, Artificial Sequence
  Description of Artificial Sequence: Synthetic oligonucleotide
guucuuagagccaucuuca

SEQ ID NO: 2836329 - RNA, 19 nt, Artificial Sequence
  Description of Artificial Sequence: Synthetic oligonucleotide
aggugacaccauuuggcag

SEQ ID NO: 2836330 - RNA, 19 nt, Artificial Sequence
  Description of Artificial Sequence: Synthetic oligonucleotide
cuguagcuuuguuaaccgg

SEQ ID NO: 2836331 - RNA, 19 nt, Artificial Sequence
  Description of Artificial Sequence: Synthetic oligonucleotide
uugauucuucuguuugagu

SEQ ID NO: 2836332 - RNA, 19 nt, Artificial Sequence
  Description of Artificial Sequence: Synthetic oligonucleotide
uuagcuuccugaagagaau

SEQ ID NO: 2836333 - RNA, 19 nt, Artificial Sequence
  Description of Artificial Sequence: Synthetic oligonucleotide
accauuuggcagcugcaug

SEQ ID NO: 2836334 - RNA, 19 nt, Artificial Sequence
  Description of Artificial Sequence: Synthetic oligonucleotide
cacgaguagaacaagauuu

SEQ ID NO: 2836335 - RNA, 19 nt, Artificial Sequence
  Description of Artificial Sequence: Synthetic oligonucleotide
ggaagaucuccauggugcg

SEQ ID NO: 2836336 - RNA, 19 nt, Artificial Sequence
  Description of Artificial Sequence: Synthetic oligonucleotide
guuuaguuccucauugcca

SEQ ID NO: 2836337 - RNA, 19 nt, Artificial Sequence
  Description of Artificial Sequence: Synthetic oligonucleotide
gucauagaccaaucuuagc

SEQ ID NO: 2836338 - RNA, 19 nt, Artificial Sequence
  Description of Artificial Sequence: Synthetic oligonucleotide
gaagaucuccauggugcgg

SEQ ID NO: 2836339 - RNA, 19 nt, Artificial Sequence
  Description of Artificial Sequence: Synthetic oligonucleotide
aucaguuuaguuccucauu

SEQ ID NO: 2836340 - RNA, 19 nt, Artificial Sequence
  Description of Artificial Sequence: Synthetic oligonucleotide
ggcauuuauaucccagaug

SEQ ID NO: 2836341 - RNA, 19 nt, Artificial Sequence
  Description of Artificial Sequence: Synthetic oligonucleotide
uuucucgucucuccucagu

SEQ ID NO: 2836342 - RNA, 19 nt, Artificial Sequence
  Description of Artificial Sequence: Synthetic oligonucleotide
uucucgucucuccucagua

SEQ ID NO: 2836343 - RNA, 19 nt, Artificial Sequence
  Description of Artificial Sequence: Synthetic oligonucleotide
acacgaguagaacaagauu

SEQ ID NO: 2836344 - RNA, 19 nt, Artificial Sequence
  Description of Artificial Sequence: Synthetic oligonucleotide
guuaaccggucuugguaag

SEQ ID NO: 2836345 - RNA, 19 nt, Artificial Sequence
  Description of Artificial Sequence: Synthetic oligonucleotide
auaucccagaugagauucc

SEQ ID NO: 2836346 - RNA, 19 nt, Artificial Sequence
  Description of Artificial Sequence: Synthetic oligonucleotide
ggucgucguucuuagagcc

SEQ ID NO: 2836347 - RNA, 19 nt, Artificial Sequence
  Description of Artificial Sequence: Synthetic oligonucleotide
cuggaagaucuccauggug

SEQ ID NO: 2836348 - RNA, 19 nt, Artificial Sequence
  Description of Artificial Sequence: Synthetic oligonucleotide
ucgucucuccucaguagca

SEQ ID NO: 2836349 - RNA, 19 nt, Artificial Sequence
  Description of Artificial Sequence: Synthetic oligonucleotide
uagcuuuguuaaccggucu

SEQ ID NO: 2836350 - RNA, 19 nt, Artificial Sequence
  Description of Artificial Sequence: Synthetic oligonucleotide
ugguccuguagcuuuguua

SEQ ID NO: 2836351 - RNA, 19 nt, Artificial Sequence
  Description of Artificial Sequence: Synthetic oligonucleotide
uaaucugcuucagcuguug

SEQ ID NO: 2836352 - RNA, 19 nt, Artificial Sequence
  Description of Artificial Sequence: Synthetic oligonucleotide
uucauccacguacggaaua

SEQ ID NO: 2836353 - RNA, 19 nt, Artificial Sequence
  Description of Artificial Sequence: Synthetic oligonucleotide
acggaauaaguugcucaac

SEQ ID NO: 2836354 - RNA, 19 nt, Artificial Sequence
  Description of Artificial Sequence: Synthetic oligonucleotide
ccuguagcuuuguuaaccg

SEQ ID NO: 2836355 - RNA, 19 nt, Artificial Sequence
  Description of Artificial Sequence: Synthetic oligonucleotide
ccacguacggaauaaguug

SEQ ID NO: 2836356 - RNA, 19 nt, Artificial Sequence
  Description of Artificial Sequence: Synthetic oligonucleotide
cauaaucugcuucagcugu

SEQ ID NO: 2836357 - RNA, 19 nt, Artificial Sequence
  Description of Artificial Sequence: Synthetic oligonucleotide
auagaaaguuggcgaagau

SEQ ID NO: 2836358 - RNA, 19 nt, Artificial Sequence
  Description of Artificial Sequence: Synthetic oligonucleotide
cugcauguuccugagcagc

SEQ ID NO: 2836359 - RNA, 19 nt, Artificial Sequence
  Description of Artificial Sequence: Synthetic oligonucleotide
uuggcgaagaugguccugu

SEQ ID NO: 2836360 - RNA, 19 nt, Artificial Sequence
  Description of Artificial Sequence: Synthetic oligonucleotide
uuagagccaucuucaucca

SEQ ID NO: 2836361 - RNA, 19 nt, Artificial Sequence
  Description of Artificial Sequence: Synthetic oligonucleotide
aucuccauggugcgguaca

SEQ ID NO: 2836362 - RNA, 19 nt, Artificial Sequence
  Description of Artificial Sequence: Synthetic oligonucleotide
caauuucucgucucuccuc

SEQ ID NO: 2836363 - RNA, 19 nt, Artificial Sequence
  Description of Artificial Sequence: Synthetic oligonucleotide
cggaauaaguugcucaacg

SEQ ID NO: 2836364 - RNA, 19 nt, Artificial Sequence
  Description of Artificial Sequence: Synthetic oligonucleotide
gaacaagauuucagcauca

SEQ ID NO: 2836365 - RNA, 19 nt, Artificial Sequence
  Description of Artificial Sequence: Synthetic oligonucleotide
augagauuccguaauugau

SEQ ID NO: 2836366 - RNA, 19 nt, Artificial Sequence
  Description of Artificial Sequence: Synthetic oligonucleotide
agcuuuguuaaccggucuu

SEQ ID NO: 2836367 - RNA, 19 nt, Artificial Sequence
  Description of Artificial Sequence: Synthetic oligonucleotide
cucaacgggaauggggccc

SEQ ID NO: 2836368 - RNA, 19 nt, Artificial Sequence
  Description of Artificial Sequence: Synthetic oligonucleotide
acagcucucauugcacuug

SEQ ID NO: 2836369 - RNA, 19 nt, Artificial Sequence
  Description of Artificial Sequence: Synthetic oligonucleotide
auaaguugcucaacgggaa

SEQ ID NO: 2836370 - RNA, 19 nt, Artificial Sequence
  Description of Artificial Sequence: Synthetic oligonucleotide
caucuucauccacguacgg

SEQ ID NO: 2836371 - RNA, 19 nt, Artificial Sequence
  Description of Artificial Sequence: Synthetic oligonucleotide
gauuccguaauugauccau

SEQ ID NO: 2836372 - RNA, 19 nt, Artificial Sequence
  Description of Artificial Sequence: Synthetic oligonucleotide
caguaugguaggugacacc

SEQ ID NO: 2836373 - RNA, 19 nt, Artificial Sequence
  Description of Artificial Sequence: Synthetic oligonucleotide
aucacacgaguagaacaag

SEQ ID NO: 2836374 - RNA, 19 nt, Artificial Sequence
  Description of Artificial Sequence: Synthetic oligonucleotide
auuucucgucucuccucag

SEQ ID NO: 2836375 - RNA, 19 nt, Artificial Sequence
  Description of Artificial Sequence: Synthetic oligonucleotide
aucuucauccacguacgga

SEQ ID NO: 2836376 - RNA, 19 nt, Artificial Sequence
  Description of Artificial Sequence: Synthetic oligonucleotide
gaccaaucuuagcuuccug

SEQ ID NO: 2836377 - RNA, 19 nt, Artificial Sequence
  Description of Artificial Sequence: Synthetic oligonucleotide
ugcgguacacgauguccug

SEQ ID NO: 2836378 - RNA, 19 nt, Artificial Sequence
  Description of Artificial Sequence: Synthetic oligonucleotide
uguugacucgcgcgccgcc

SEQ ID NO: 2836379 - RNA, 19 nt, Artificial Sequence
  Description of Artificial Sequence: Synthetic oligonucleotide
gucuugguaagucccagua

SEQ ID NO: 2836380 - RNA, 19 nt, Artificial Sequence
  Description of Artificial Sequence: Synthetic oligonucleotide
uaaccggucuugguaaguc

SEQ ID NO: 2836381 - RNA, 19 nt, Artificial Sequence
  Description of Artificial Sequence: Synthetic oligonucleotide
auggggcccauuccaccac

SEQ ID NO: 2836382 - RNA, 19 nt, Artificial Sequence
  Description of Artificial Sequence: Synthetic oligonucleotide
gauucuucuguuugaguuu

SEQ ID NO: 2836383 - RNA, 19 nt, Artificial Sequence
  Description of Artificial Sequence: Synthetic oligonucleotide
uucuuagagccaucuucau

SEQ ID NO: 2836384 - RNA, 19 nt, Artificial Sequence
  Description of Artificial Sequence: Synthetic oligonucleotide
ucccaguaugguaggugac

SEQ ID NO: 2836385 - RNA, 19 nt, Artificial Sequence
  Description of Artificial Sequence: Synthetic oligonucleotide
uuaaccggucuugguaagu

SEQ ID NO: 2836386 - RNA, 19 nt, Artificial Sequence
  Description of Artificial Sequence: Synthetic oligonucleotide
agucccaguaugguaggug

SEQ ID NO: 2836387 - RNA, 19 nt, Artificial Sequence
  Description of Artificial Sequence: Synthetic oligonucleotide
guugcucaacgggaauggg

SEQ ID NO: 2836388 - RNA, 19 nt, Artificial Sequence
  Description of Artificial Sequence: Synthetic oligonucleotide
agcuuccugaagagaauag

SEQ ID NO: 2836389 - RNA, 19 nt, Artificial Sequence
  Description of Artificial Sequence: Synthetic oligonucleotide
cguucuuagagccaucuuc

SEQ ID NO: 2836390 - RNA, 19 nt, Artificial Sequence
  Description of Artificial Sequence: Synthetic oligonucleotide
ugggccagcccggucgucg

SEQ ID NO: 2836391 - RNA, 19 nt, Artificial Sequence
  Description of Artificial Sequence: Synthetic oligonucleotide
ugcacuugucauagaccaa

SEQ ID NO: 2836392 - RNA, 19 nt, Artificial Sequence
  Description of Artificial Sequence: Synthetic oligonucleotide
guagcaaaacgaggugggc

SEQ ID NO: 2836393 - RNA, 19 nt, Artificial Sequence
  Description of Artificial Sequence: Synthetic oligonucleotide
agauuccguaauugaucca

SEQ ID NO: 2836394 - RNA, 19 nt, Artificial Sequence
  Description of Artificial Sequence: Synthetic oligonucleotide
ggugcgguacacgaugucc

SEQ ID NO: 2836395 - RNA, 19 nt, Artificial Sequence
  Description of Artificial Sequence: Synthetic oligonucleotide
agcuguugauucuucuguu

SEQ ID NO: 2836396 - RNA, 19 nt, Artificial Sequence
  Description of Artificial Sequence: Synthetic oligonucleotide
ucgucguucuuagagccau

SEQ ID NO: 2836397 - RNA, 19 nt, Artificial Sequence
  Description of Artificial Sequence: Synthetic oligonucleotide
uugacucgcgcgccgccug

SEQ ID NO: 2836398 - RNA, 19 nt, Artificial Sequence
  Description of Artificial Sequence: Synthetic oligonucleotide
cauuccaccacagcucuca

SEQ ID NO: 2836399 - RNA, 19 nt, Artificial Sequence
  Description of Artificial Sequence: Synthetic oligonucleotide
cacuugucauagaccaauc

SEQ ID NO: 2836400 - RNA, 19 nt, Artificial Sequence
  Description of Artificial Sequence: Synthetic oligonucleotide
cuugucauagaccaaucuu

SEQ ID NO: 2836401 - RNA, 19 nt, Artificial Sequence
  Description of Artificial Sequence: Synthetic oligonucleotide
ugcaccgucuccugcccga

SEQ ID NO: 2836402 - RNA, 19 nt, Artificial Sequence
  Description of Artificial Sequence: Synthetic oligonucleotide
uccucauugccagcauggc

SEQ ID NO: 2836403 - RNA, 19 nt, Artificial Sequence
  Description of Artificial Sequence: Synthetic oligonucleotide
uguccugcaccgucuccug

SEQ ID NO: 2836404 - RNA, 19 nt, Artificial Sequence
  Description of Artificial Sequence: Synthetic oligonucleotide
gaugcggcacagcguggcc

SEQ ID NO: 2836405 - RNA, 19 nt, Artificial Sequence
  Description of Artificial Sequence: Synthetic oligonucleotide
auguccugcaccgucuccu

SEQ ID NO: 2836406 - RNA, 19 nt, Artificial Sequence
  Description of Artificial Sequence: Synthetic oligonucleotide
auccacguacggaauaagu

SEQ ID NO: 2836407 - RNA, 19 nt, Artificial Sequence
  Description of Artificial Sequence: Synthetic oligonucleotide
ccggucgucguucuuagag

SEQ ID NO: 2836408 - RNA, 19 nt, Artificial Sequence
  Description of Artificial Sequence: Synthetic oligonucleotide
ggccguguugacucgcgcg

SEQ ID NO: 2836409 - RNA, 19 nt, Artificial Sequence
  Description of Artificial Sequence: Synthetic oligonucleotide
agaccaaucuuagcuuccu

SEQ ID NO: 2836410 - RNA, 19 nt, Artificial Sequence
  Description of Artificial Sequence: Synthetic oligonucleotide
cugaagagaauagaaaguu

SEQ ID NO: 2836411 - RNA, 19 nt, Artificial Sequence
  Description of Artificial Sequence: Synthetic oligonucleotide
augcggcacagcguggccg

SEQ ID NO: 2836412 - RNA, 19 nt, Artificial Sequence
  Description of Artificial Sequence: Synthetic oligonucleotide
gguaagucccaguauggua

SEQ ID NO: 2836413 - RNA, 19 nt, Artificial Sequence
  Description of Artificial Sequence: Synthetic oligonucleotide
gcuuuguuaaccggucuug

SEQ ID NO: 2836414 - RNA, 19 nt, Artificial Sequence
  Description of Artificial Sequence: Synthetic oligonucleotide
ugcggcacagcguggccgu

SEQ ID NO: 2836415 - RNA, 19 nt, Artificial Sequence
  Description of Artificial Sequence: Synthetic oligonucleotide
ucauugcacuugucauaga

SEQ ID NO: 2836416 - RNA, 19 nt, Artificial Sequence
  Description of Artificial Sequence: Synthetic oligonucleotide
caccacagcucucauugca

SEQ ID NO: 2836417 - RNA, 19 nt, Artificial Sequence
  Description of Artificial Sequence: Synthetic oligonucleotide
cauagaccaaucuuagcuu

SEQ ID NO: 2836418 - RNA, 19 nt, Artificial Sequence
  Description of Artificial Sequence: Synthetic oligonucleotide
cguaauugauccauaaucu

SEQ ID NO: 2836419 - RNA, 19 nt, Artificial Sequence
  Description of Artificial Sequence: Synthetic oligonucleotide
uggccguguugacucgcgc

SEQ ID NO: 2836420 - RNA, 19 nt, Artificial Sequence
  Description of Artificial Sequence: Synthetic oligonucleotide
aguuccucauugccagcau

SEQ ID NO: 2836421 - RNA, 19 nt, Artificial Sequence
  Description of Artificial Sequence: Synthetic oligonucleotide
ucguucuuagagccaucuu

SEQ ID NO: 2836422 - RNA, 19 nt, Artificial Sequence
  Description of Artificial Sequence: Synthetic oligonucleotide
uggggcccauuccaccaca

SEQ ID NO: 2836423 - RNA, 19 nt, Artificial Sequence
  Description of Artificial Sequence: Synthetic oligonucleotide
cacagcguggccguguuga

SEQ ID NO: 2836424 - RNA, 19 nt, Artificial Sequence
  Description of Artificial Sequence: Synthetic oligonucleotide
cauccacguacggaauaag

SEQ ID NO: 2836425 - RNA, 19 nt, Artificial Sequence
  Description of Artificial Sequence: Synthetic oligonucleotide
aagucccaguaugguaggu

SEQ ID NO: 2836426 - RNA, 19 nt, Artificial Sequence
  Description of Artificial Sequence: Synthetic oligonucleotide
caaaacgaggugggccagc

SEQ ID NO: 2836427 - RNA, 19 nt, Artificial Sequence
  Description of Artificial Sequence: Synthetic oligonucleotide
ugacucgcgcgccgccugc

SEQ ID NO: 2836428 - RNA, 19 nt, Artificial Sequence
  Description of Artificial Sequence: Synthetic oligonucleotide
gccguguugacucgcgcgc

SEQ ID NO: 2836429 - RNA, 19 nt, Artificial Sequence
  Description of Artificial Sequence: Synthetic oligonucleotide
cccgaugcggcacagcgug

SEQ ID NO: 2836430 - RNA, 19 nt, Artificial Sequence
  Description of Artificial Sequence: Synthetic oligonucleotide
cacacgaguagaacaagau

SEQ ID NO: 2836431 - RNA, 19 nt, Artificial Sequence
  Description of Artificial Sequence: Synthetic oligonucleotide
cagcuguugauucuucugu

SEQ ID NO: 2836432 - RNA, 19 nt, Artificial Sequence
  Description of Artificial Sequence: Synthetic oligonucleotide
agaugguccuguagcuuug

SEQ ID NO: 2836433 - RNA, 19 nt, Artificial Sequence
  Description of Artificial Sequence: Synthetic oligonucleotide
gaucuccauggugcgguac

SEQ ID NO: 2836434 - RNA, 19 nt, Artificial Sequence
  Description of Artificial Sequence: Synthetic oligonucleotide
ccagcauggcauuuauauc

SEQ ID NO: 2836435 - RNA, 19 nt, Artificial Sequence
  Description of Artificial Sequence: Synthetic oligonucleotide
uggugcgguacacgauguc

SEQ ID NO: 2836436 - RNA, 19 nt, Artificial Sequence
  Description of Artificial Sequence: Synthetic oligonucleotide
cugcaauuucucgucucuc

SEQ ID NO: 2836437 - RNA, 19 nt, Artificial Sequence
  Description of Artificial Sequence: Synthetic oligonucleotide
uccugcccgaugcggcaca

SEQ ID NO: 2836438 - RNA, 19 nt, Artificial Sequence
  Description of Artificial Sequence: Synthetic oligonucleotide
ccugaagagaauagaaagu

SEQ ID NO: 2836439 - RNA, 19 nt, Artificial Sequence
  Description of Artificial Sequence: Synthetic oligonucleotide
ccaguaugguaggugacac

SEQ ID NO: 2836440 - RNA, 19 nt, Artificial Sequence
  Description of Artificial Sequence: Synthetic oligonucleotide
guuggcgaagaugguccug

SEQ ID NO: 2836441 - RNA, 19 nt, Artificial Sequence
  Description of Artificial Sequence: Synthetic oligonucleotide
acaccauuuggcagcugca

SEQ ID NO: 2836442 - RNA, 19 nt, Artificial Sequence
  Description of Artificial Sequence: Synthetic oligonucleotide
caucaguuuaguuccucau

SEQ ID NO: 2836443 - RNA, 19 nt, Artificial Sequence
  Description of Artificial Sequence: Synthetic oligonucleotide
guggccguguugacucgcg

SEQ ID NO: 2836444 - RNA, 19 nt, Artificial Sequence
  Description of Artificial Sequence: Synthetic oligonucleotide
uuccaccacagcucucauu

SEQ ID NO: 2836445 - RNA, 19 nt, Artificial Sequence
  Description of Artificial Sequence: Synthetic oligonucleotide
acguacggaauaaguugcu

SEQ ID NO: 2836446 - RNA, 19 nt, Artificial Sequence
  Description of Artificial Sequence: Synthetic oligonucleotide
cugcaccgucuccugcccg

SEQ ID NO: 2836447 - RNA, 19 nt, Artificial Sequence
  Description of Artificial Sequence: Synthetic oligonucleotide
cucgcgcgccgccugcugc

SEQ ID NO: 2836448 - RNA, 19 nt, Artificial Sequence
  Description of Artificial Sequence: Synthetic oligonucleotide
auaaucugcuucagcuguu

SEQ ID NO: 2836449 - RNA, 19 nt, Artificial Sequence
  Description of Artificial Sequence: Synthetic oligonucleotide
auggugcgguacacgaugu

SEQ ID NO: 2836450 - RNA, 19 nt, Artificial Sequence
  Description of Artificial Sequence: Synthetic oligonucleotide
gaaaguuggcgaagauggu

SEQ ID NO: 2836451 - RNA, 19 nt, Artificial Sequence
  Description of Artificial Sequence: Synthetic oligonucleotide
gcucaacgggaauggggcc

SEQ ID NO: 2836452 - RNA, 19 nt, Artificial Sequence
  Description of Artificial Sequence: Synthetic oligonucleotide
guccugcaccgucuccugc

SEQ ID NO: 2836453 - RNA, 19 nt, Artificial Sequence
  Description of Artificial Sequence: Synthetic oligonucleotide
gucguucuuagagccaucu

SEQ ID NO: 2836454 - RNA, 19 nt, Artificial Sequence
  Description of Artificial Sequence: Synthetic oligonucleotide
acgaggugggccagcccgg

SEQ ID NO: 2836455 - RNA, 19 nt, Artificial Sequence
  Description of Artificial Sequence: Synthetic oligonucleotide
ggaauggggcccauuccac

SEQ ID NO: 2836456 - RNA, 19 nt, Artificial Sequence
  Description of Artificial Sequence: Synthetic oligonucleotide
gcaauuucucgucucuccu

SEQ ID NO: 2836457 - RNA, 19 nt, Artificial Sequence
  Description of Artificial Sequence: Synthetic oligonucleotide
aucccagaugagauuccgu

SEQ ID NO: 2836458 - RNA, 19 nt, Artificial Sequence
  Description of Artificial Sequence: Synthetic oligonucleotide
gguacacgauguccugcac

SEQ ID NO: 2836459 - RNA, 19 nt, Artificial Sequence
  Description of Artificial Sequence: Synthetic oligonucleotide
agcucucauugcacuuguc

SEQ ID NO: 2836460 - RNA, 19 nt, Artificial Sequence
  Description of Artificial Sequence: Synthetic oligonucleotide
auuccguaauugauccaua

SEQ ID NO: 2836461 - RNA, 19 nt, Artificial Sequence
  Description of Artificial Sequence: Synthetic oligonucleotide
guguugacucgcgcgccgc

SEQ ID NO: 2836462 - RNA, 19 nt, Artificial Sequence
  Description of Artificial Sequence: Synthetic oligonucleotide
gaagaugguccuguagcuu

SEQ ID NO: 2836463 - RNA, 19 nt, Artificial Sequence
  Description of Artificial Sequence: Synthetic oligonucleotide
cagcugcauguuccugagc

SEQ ID NO: 2836464 - RNA, 19 nt, Artificial Sequence
  Description of Artificial Sequence: Synthetic oligonucleotide
ccauuuggcagcugcaugu

SEQ ID NO: 2836465 - RNA, 19 nt, Artificial Sequence
  Description of Artificial Sequence: Synthetic oligonucleotide
cuucugcaauuucucgucu

SEQ ID NO: 2836466 - RNA, 19 nt, Artificial Sequence
  Description of Artificial Sequence: Synthetic oligonucleotide
cggucgucguucuuagagc

SEQ ID NO: 2836467 - RNA, 19 nt, Artificial Sequence
  Description of Artificial Sequence: Synthetic oligonucleotide
gcaaaacgaggugggccag

SEQ ID NO: 2836468 - RNA, 19 nt, Artificial Sequence
  Description of Artificial Sequence: Synthetic oligonucleotide
gugcgguacacgauguccu

SEQ ID NO: 2836469 - RNA, 19 nt, Artificial Sequence
  Description of Artificial Sequence: Synthetic oligonucleotide
acucgcgcgccgccugcug

SEQ ID NO: 2836470 - RNA, 19 nt, Artificial Sequence
  Description of Artificial Sequence: Synthetic oligonucleotide
gucgucguucuuagagcca

SEQ ID NO: 2836471 - RNA, 19 nt, Artificial Sequence
  Description of Artificial Sequence: Synthetic oligonucleotide
aacgggaauggggcccauu

SEQ ID NO: 2836472 - RNA, 19 nt, Artificial Sequence
  Description of Artificial Sequence: Synthetic oligonucleotide
gcauggcauuuauauccca

SEQ ID NO: 2836473 - RNA, 19 nt, Artificial Sequence
  Description of Artificial Sequence: Synthetic oligonucleotide
ccucauugccagcauggca

SEQ ID NO: 2836474 - RNA, 19 nt, Artificial Sequence
  Description of Artificial Sequence: Synthetic oligonucleotide
gcccggucgucguucuuag

SEQ ID NO: 2836475 - RNA, 19 nt, Artificial Sequence
  Description of Artificial Sequence: Synthetic oligonucleotide
gggcccauuccaccacagc

SEQ ID NO: 2836476 - RNA, 19 nt, Artificial Sequence
  Description of Artificial Sequence: Synthetic oligonucleotide
agccaucuucauccacgua

SEQ ID NO: 2836477 - RNA, 19 nt, Artificial Sequence
  Description of Artificial Sequence: Synthetic oligonucleotide
gcgguacacgauguccugc

SEQ ID NO: 2836478 - RNA, 19 nt, Artificial Sequence
  Description of Artificial Sequence: Synthetic oligonucleotide
cguguugacucgcgcgccg

SEQ ID NO: 2836479 - RNA, 19 nt, Artificial Sequence
  Description of Artificial Sequence: Synthetic oligonucleotide
cccagaugagauuccguaa

SEQ ID NO: 2836480 - RNA, 19 nt, Artificial Sequence
  Description of Artificial Sequence: Synthetic oligonucleotide
gaugguccuguagcuuugu

SEQ ID NO: 2836481 - RNA, 19 nt, Artificial Sequence
  Description of Artificial Sequence: Synthetic oligonucleotide
ugacaccauuuggcagcug

SEQ ID NO: 2836482 - RNA, 19 nt, Artificial Sequence
  Description of Artificial Sequence: Synthetic oligonucleotide
cagaugagauuccguaauu

SEQ ID NO: 2836483 - RNA, 19 nt, Artificial Sequence
  Description of Artificial Sequence: Synthetic oligonucleotide
ccugcaccgucuccugccc

SEQ ID NO: 2836484 - RNA, 19 nt, Artificial Sequence
  Description of Artificial Sequence: Synthetic oligonucleotide
ccagaugagauuccguaau

SEQ ID NO: 2836485 - RNA, 19 nt, Artificial Sequence
  Description of Artificial Sequence: Synthetic oligonucleotide
gcuguugauucuucuguuu

SEQ ID NO: 2836486 - RNA, 19 nt, Artificial Sequence
  Description of Artificial Sequence: Synthetic oligonucleotide
cccaguaugguaggugaca

SEQ ID NO: 2836487 - RNA, 19 nt, Artificial Sequence
  Description of Artificial Sequence: Synthetic oligonucleotide
cuccugcccgaugcggcac

SEQ ID NO: 2836488 - RNA, 19 nt, Artificial Sequence
  Description of Artificial Sequence: Synthetic oligonucleotide
caccgucuccugcccgaug

SEQ ID NO: 2836489 - RNA, 19 nt, Artificial Sequence
  Description of Artificial Sequence: Synthetic oligonucleotide
ggucuugguaagucccagu

SEQ ID NO: 2836490 - RNA, 19 nt, Artificial Sequence
  Description of Artificial Sequence: Synthetic oligonucleotide
cguacggaauaaguugcuc

SEQ ID NO: 2836491 - RNA, 19 nt, Artificial Sequence
  Description of Artificial Sequence: Synthetic oligonucleotide
cgaguagaacaagauuuca

SEQ ID NO: 2836492 - RNA, 19 nt, Artificial Sequence
  Description of Artificial Sequence: Synthetic oligonucleotide
cagcucucauugcacuugu

SEQ ID NO: 2836493 - RNA, 19 nt, Artificial Sequence
  Description of Artificial Sequence: Synthetic oligonucleotide
cacagcucucauugcacuu

SEQ ID NO: 2836494 - RNA, 19 nt, Artificial Sequence
  Description of Artificial Sequence: Synthetic oligonucleotide
gugacaccauuuggcagcu

SEQ ID NO: 2836495 - RNA, 19 nt, Artificial Sequence
  Description of Artificial Sequence: Synthetic oligonucleotide
gcguggccguguugacucg

SEQ ID NO: 2836496 - RNA, 19 nt, Artificial Sequence
  Description of Artificial Sequence: Synthetic oligonucleotide
guugacucgcgcgccgccu

SEQ ID NO: 2836497 - RNA, 19 nt, Artificial Sequence
  Description of Artificial Sequence: Synthetic oligonucleotide
cgaugcggcacagcguggc

SEQ ID NO: 2836498 - RNA, 19 nt, Artificial Sequence
  Description of Artificial Sequence: Synthetic oligonucleotide
cugcccgaugcggcacagc

SEQ ID NO: 2836499 - RNA, 19 nt, Artificial Sequence
  Description of Artificial Sequence: Synthetic oligonucleotide
ccgaugcggcacagcgugg

SEQ ID NO: 2836500 - RNA, 19 nt, Artificial Sequence
  Description of Artificial Sequence: Synthetic oligonucleotide
ccgucuccugcccgaugcg

SEQ ID NO: 2836501 - RNA, 19 nt, Artificial Sequence
  Description of Artificial Sequence: Synthetic oligonucleotide
cgguacacgauguccugca

SEQ ID NO: 2836502 - RNA, 19 nt, Artificial Sequence
  Description of Artificial Sequence: Synthetic oligonucleotide
cccauuccaccacagcucu

SEQ ID NO: 2836503 - RNA, 19 nt, Artificial Sequence
  Description of Artificial Sequence: Synthetic oligonucleotide
guaugguaggugacaccau

SEQ ID NO: 2836504 - RNA, 19 nt, Artificial Sequence
  Description of Artificial Sequence: Synthetic oligonucleotide
cgaagaugguccuguagcu

SEQ ID NO: 2836505 - RNA, 19 nt, Artificial Sequence
  Description of Artificial Sequence: Synthetic oligonucleotide
ccguguugacucgcgcgcc

SEQ ID NO: 2836506 - RNA, 19 nt, Artificial Sequence
  Description of Artificial Sequence: Synthetic oligonucleotide
cgucuccugcccgaugcgg

SEQ ID NO: 2836507 - RNA, 19 nt, Artificial Sequence
  Description of Artificial Sequence: Synthetic oligonucleotide
cggucuugguaagucccag

SEQ ID NO: 2836508 - RNA, 19 nt, Artificial Sequence
  Description of Artificial Sequence: Synthetic oligonucleotide
gcacagcguggccguguug

SEQ ID NO: 2836509 - RNA, 19 nt, Artificial Sequence
  Description of Artificial Sequence: Synthetic oligonucleotide
ccauuccaccacagcucuc

SEQ ID NO: 2836510 - RNA, 19 nt, Artificial Sequence
  Description of Artificial Sequence: Synthetic oligonucleotide
gccgccugcugcgccugcg

SEQ ID NO: 2836511 - RNA, 19 nt, Artificial Sequence
  Description of Artificial Sequence: Synthetic oligonucleotide
gccagcccggucgucguuc

SEQ ID NO: 2836512 - RNA, 19 nt, Artificial Sequence
  Description of Artificial Sequence: Synthetic oligonucleotide
cguggccguguugacucgc

SEQ ID NO: 2836513 - RNA, 19 nt, Artificial Sequence
  Description of Artificial Sequence: Synthetic oligonucleotide
cgucguucuuagagccauc

SEQ ID NO: 2836514 - RNA, 19 nt, Artificial Sequence
  Description of Artificial Sequence: Synthetic oligonucleotide
ggugggccagcccggucgu

SEQ ID NO: 2836515 - RNA, 19 nt, Artificial Sequence
  Description of Artificial Sequence: Synthetic oligonucleotide
ccugcccgaugcggcacag

SEQ ID NO: 2836516 - RNA, 19 nt, Artificial Sequence
  Description of Artificial Sequence: Synthetic oligonucleotide
ggcacagcguggccguguu

SEQ ID NO: 2836517 - RNA, 19 nt, Artificial Sequence
  Description of Artificial Sequence: Synthetic oligonucleotide
ccauggugcgguacacgau

SEQ ID NO: 2836518 - RNA, 19 nt, Artificial Sequence
  Description of Artificial Sequence: Synthetic oligonucleotide
gugggccagcccggucguc

SEQ ID NO: 2836519 - RNA, 19 nt, Artificial Sequence
  Description of Artificial Sequence: Synthetic oligonucleotide
gggccagcccggucgucgu

SEQ ID NO: 2836520 - RNA, 19 nt, Artificial Sequence
  Description of Artificial Sequence: Synthetic oligonucleotide
cccggucgucguucuuaga

SEQ ID NO: 2836521 - RNA, 19 nt, Artificial Sequence
  Description of Artificial Sequence: Synthetic oligonucleotide
gcggcacagcguggccgug

SEQ ID NO: 2836522 - RNA, 19 nt, Artificial Sequence
  Description of Artificial Sequence: Synthetic oligonucleotide
gcccgaugcggcacagcgu

SEQ ID NO: 2836523 - RNA, 19 nt, Artificial Sequence
  Description of Artificial Sequence: Synthetic oligonucleotide
cgcgcgccgccugcugcgc

SEQ ID NO: 2836524 - RNA, 19 nt, Artificial Sequence
  Description of Artificial Sequence: Synthetic oligonucleotide
caacgggaauggggcccau

SEQ ID NO: 2836525 - RNA, 19 nt, Artificial Sequence
  Description of Artificial Sequence: Synthetic oligonucleotide
cgccgccugcugcgccugc

SEQ ID NO: 2836526 - RNA, 19 nt, Artificial Sequence
  Description of Artificial Sequence: Synthetic oligonucleotide
ggccagcccggucgucguu

SEQ ID NO: 2836527 - RNA, 19 nt, Artificial Sequence
  Description of Artificial Sequence: Synthetic oligonucleotide
cggcacagcguggccgugu

SEQ ID NO: 2836528 - RNA, 19 nt, Artificial Sequence
  Description of Artificial Sequence: Synthetic oligonucleotide
auuaggguuccacaugucc

SEQ ID NO: 2836529 - RNA, 19 nt, Artificial Sequence
  Description of Artificial Sequence: Synthetic oligonucleotide
agccaaaggauucacaggg

SEQ ID NO: 2836530 - RNA, 19 nt, Artificial Sequence
  Description of Artificial Sequence: Synthetic oligonucleotide
auguccagauguuaguucc

SEQ ID NO: 2836531 - RNA, 19 nt, Artificial Sequence
  Description of Artificial Sequence: Synthetic oligonucleotide
ugugguacaggguaagggg

SEQ ID NO: 2836532 - RNA, 19 nt, Artificial Sequence
  Description of Artificial Sequence: Synthetic oligonucleotide
guggauauggguuaggccc

SEQ ID NO: 2836533 - RNA, 19 nt, Artificial Sequence
  Description of Artificial Sequence: Synthetic oligonucleotide
auuccuggaggacaggggc

SEQ ID NO: 2836534 - RNA, 19 nt, Artificial Sequence
  Description of Artificial Sequence: Synthetic oligonucleotide
ucuaucaccaucccugggc

SEQ ID NO: 2836535 - RNA, 19 nt, Artificial Sequence
  Description of Artificial Sequence: Synthetic oligonucleotide
acaaggugacagcugaagc

SEQ ID NO: 2836536 - RNA, 19 nt, Artificial Sequence
  Description of Artificial Sequence: Synthetic oligonucleotide
aagaggaggaaugcuuucc

SEQ ID NO: 2836537 - RNA, 19 nt, Artificial Sequence
  Description of Artificial Sequence: Synthetic oligonucleotide
aguacaaggugacagcuga

SEQ ID NO: 2836538 - RNA, 19 nt, Artificial Sequence
  Description of Artificial Sequence: Synthetic oligonucleotide
ucagagucacugcuggagg

SEQ ID NO: 2836539 - RNA, 19 nt, Artificial Sequence
  Description of Artificial Sequence: Synthetic oligonucleotide
uuaggguuccacaugucca

SEQ ID NO: 2836540 - RNA, 19 nt, Artificial Sequence
  Description of Artificial Sequence: Synthetic oligonucleotide
auugggaacuccugggcac

SEQ ID NO: 2836541 - RNA, 19 nt, Artificial Sequence
  Description of Artificial Sequence: Synthetic oligonucleotide
gacauggagggaaagcugg

SEQ ID NO: 2836542 - RNA, 19 nt, Artificial Sequence
  Description of Artificial Sequence: Synthetic oligonucleotide
agauguuaguuccagccug

SEQ ID NO: 2836543 - RNA, 19 nt, Artificial Sequence
  Description of Artificial Sequence: Synthetic oligonucleotide
gaaagcuggguuucccugg

SEQ ID NO: 2836544 - RNA, 19 nt, Artificial Sequence
  Description of Artificial Sequence: Synthetic oligonucleotide
aaagcuggguuucccuggg

SEQ ID NO: 2836545 - RNA, 19 nt, Artificial Sequence
  Description of Artificial Sequence: Synthetic oligonucleotide
uucauuuucuuccgugucu

SEQ ID NO: 2836546 - RNA, 19 nt, Artificial Sequence
  Description of Artificial Sequence: Synthetic oligonucleotide
ugagacgaggggaggaggg

SEQ ID NO: 2836547 - RNA, 19 nt, Artificial Sequence
  Description of Artificial Sequence: Synthetic oligonucleotide
uauuccuggaggacagggg

SEQ ID NO: 2836548 - RNA, 19 nt, Artificial Sequence
  Description of Artificial Sequence: Synthetic oligonucleotide
ggaaaggcaggguugauag

SEQ ID NO: 2836549 - RNA, 19 nt, Artificial Sequence
  Description of Artificial Sequence: Synthetic oligonucleotide
aaaggauucacagggcaca

SEQ ID NO: 2836550 - RNA, 19 nt, Artificial Sequence
  Description of Artificial Sequence: Synthetic oligonucleotide
guugauaggugguggacag

SEQ ID NO: 2836551 - RNA, 19 nt, Artificial Sequence
  Description of Artificial Sequence: Synthetic oligonucleotide
auaggugguggacaggcag

SEQ ID NO: 2836552 - RNA, 19 nt, Artificial Sequence
  Description of Artificial Sequence: Synthetic oligonucleotide
uucuucauuuucuuccgug

SEQ ID NO: 2836553 - RNA, 19 nt, Artificial Sequence
  Description of Artificial Sequence: Synthetic oligonucleotide
uucacagggcacaugccag

SEQ ID NO: 2836554 - RNA, 19 nt, Artificial Sequence
  Description of Artificial Sequence: Synthetic oligonucleotide
cauucagucagagucacug

SEQ ID NO: 2836555 - RNA, 19 nt, Artificial Sequence
  Description of Artificial Sequence: Synthetic oligonucleotide
aggauugggaacuccuggg

SEQ ID NO: 2836556 - RNA, 19 nt, Artificial Sequence
  Description of Artificial Sequence: Synthetic oligonucleotide
agcuugaugggagagcugg

SEQ ID NO: 2836557 - RNA, 19 nt, Artificial Sequence
  Description of Artificial Sequence: Synthetic oligonucleotide
uuaugagccuucuucauuu

SEQ ID NO: 2836558 - RNA, 19 nt, Artificial Sequence
  Description of Artificial Sequence: Synthetic oligonucleotide
guuaggcccagcauuaggg

SEQ ID NO: 2836559 - RNA, 19 nt, Artificial Sequence
  Description of Artificial Sequence: Synthetic oligonucleotide
guugguauccuggacaccc

SEQ ID NO: 2836560 - RNA, 19 nt, Artificial Sequence
  Description of Artificial Sequence: Synthetic oligonucleotide
ugauaggugguggacaggc

SEQ ID NO: 2836561 - RNA, 19 nt, Artificial Sequence
  Description of Artificial Sequence: Synthetic oligonucleotide
ccugcauucagucagaguc

SEQ ID NO: 2836562 - RNA, 19 nt, Artificial Sequence
  Description of Artificial Sequence: Synthetic oligonucleotide
cauuccaggagccaaagga

SEQ ID NO: 2836563 - RNA, 19 nt, Artificial Sequence
  Description of Artificial Sequence: Synthetic oligonucleotide
ggagccaaaggauucacag

SEQ ID NO: 2836564 - RNA, 19 nt, Artificial Sequence
  Description of Artificial Sequence: Synthetic oligonucleotide
ugucuaucaccaucccugg

SEQ ID NO: 2836565 - RNA, 19 nt, Artificial Sequence
  Description of Artificial Sequence: Synthetic oligonucleotide
gagccaaaggauucacagg

SEQ ID NO: 2836566 - RNA, 19 nt, Artificial Sequence
  Description of Artificial Sequence: Synthetic oligonucleotide
ugguggacaggcaggauug

SEQ ID NO: 2836567 - RNA, 19 nt, Artificial Sequence
  Description of Artificial Sequence: Synthetic oligonucleotide
aaugcuuuccaugcuugug

SEQ ID NO: 2836568 - RNA, 19 nt, Artificial Sequence
  Description of Artificial Sequence: Synthetic oligonucleotide
cuuguguuguuugugaauc

SEQ ID NO: 2836569 - RNA, 19 nt, Artificial Sequence
  Description of Artificial Sequence: Synthetic oligonucleotide
uucccugggguauuccugg

SEQ ID NO: 2836570 - RNA, 19 nt, Artificial Sequence
  Description of Artificial Sequence: Synthetic oligonucleotide
uguuguuugugaaucuuuu

SEQ ID NO: 2836571 - RNA, 19 nt, Artificial Sequence
  Description of Artificial Sequence: Synthetic oligonucleotide
uugaugggagagcugguga

SEQ ID NO: 2836572 - RNA, 19 nt, Artificial Sequence
  Description of Artificial Sequence: Synthetic oligonucleotide
uuuaugagccuucuucauu

SEQ ID NO: 2836573 - RNA, 19 nt, Artificial Sequence
  Description of Artificial Sequence: Synthetic oligonucleotide
ggaggaaugcuuuccaugc

SEQ ID NO: 2836574 - RNA, 19 nt, Artificial Sequence
  Description of Artificial Sequence: Synthetic oligonucleotide
ugaugggagagcuggugag

SEQ ID NO: 2836575 - RNA, 19 nt, Artificial Sequence
  Description of Artificial Sequence: Synthetic oligonucleotide
uaggugguggacaggcagg

SEQ ID NO: 2836576 - RNA, 19 nt, Artificial Sequence
  Description of Artificial Sequence: Synthetic oligonucleotide
uacaaggugacagcugaag

SEQ ID NO: 2836577 - RNA, 19 nt, Artificial Sequence
  Description of Artificial Sequence: Synthetic oligonucleotide
ggauucacagggcacaugc

SEQ ID NO: 2836578 - RNA, 19 nt, Artificial Sequence
  Description of Artificial Sequence: Synthetic oligonucleotide
uaggguuccacauguccag

SEQ ID NO: 2836579 - RNA, 19 nt, Artificial Sequence
  Description of Artificial Sequence: Synthetic oligonucleotide
cugaggguugguauccugg

SEQ ID NO: 2836580 - RNA, 19 nt, Artificial Sequence
  Description of Artificial Sequence: Synthetic oligonucleotide
cucaguacaaggugacagc

SEQ ID NO: 2836581 - RNA, 19 nt, Artificial Sequence
  Description of Artificial Sequence: Synthetic oligonucleotide
aggaggaaugcuuuccaug

SEQ ID NO: 2836582 - RNA, 19 nt, Artificial Sequence
  Description of Artificial Sequence: Synthetic oligonucleotide
ccagauguuaguuccagcc

SEQ ID NO: 2836583 - RNA, 19 nt, Artificial Sequence
  Description of Artificial Sequence: Synthetic oligonucleotide
acaugccaggagcaggugg

SEQ ID NO: 2836584 - RNA, 19 nt, Artificial Sequence
  Description of Artificial Sequence: Synthetic oligonucleotide
caggauugggaacuccugg

SEQ ID NO: 2836585 - RNA, 19 nt, Artificial Sequence
  Description of Artificial Sequence: Synthetic oligonucleotide
aggguugguauccuggaca

SEQ ID NO: 2836586 - RNA, 19 nt, Artificial Sequence
  Description of Artificial Sequence: Synthetic oligonucleotide
augcuuuccaugcuugugu

SEQ ID NO: 2836587 - RNA, 19 nt, Artificial Sequence
  Description of Artificial Sequence: Synthetic oligonucleotide
aggcccugcauucagucag

SEQ ID NO: 2836588 - RNA, 19 nt, Artificial Sequence
  Description of Artificial Sequence: Synthetic oligonucleotide
uuuuaugagccuucuucau

SEQ ID NO: 2836589 - RNA, 19 nt, Artificial Sequence
  Description of Artificial Sequence: Synthetic oligonucleotide
uuucccugggguauuccug

SEQ ID NO: 2836590 - RNA, 19 nt, Artificial Sequence
  Description of Artificial Sequence: Synthetic oligonucleotide
cuaucaccaucccugggcc

SEQ ID NO: 2836591 - RNA, 19 nt, Artificial Sequence
  Description of Artificial Sequence: Synthetic oligonucleotide
ucaguacaaggugacagcu

SEQ ID NO: 2836592 - RNA, 19 nt, Artificial Sequence
  Description of Artificial Sequence: Synthetic oligonucleotide
uggauauggguuaggccca

SEQ ID NO: 2836593 - RNA, 19 nt, Artificial Sequence
  Description of Artificial Sequence: Synthetic oligonucleotide
caaaggauucacagggcac

SEQ ID NO: 2836594 - RNA, 19 nt, Artificial Sequence
  Description of Artificial Sequence: Synthetic oligonucleotide
agcauuaggguuccacaug

SEQ ID NO: 2836595 - RNA, 19 nt, Artificial Sequence
  Description of Artificial Sequence: Synthetic oligonucleotide
ugacagcugaagcuugaug

SEQ ID NO: 2836596 - RNA, 19 nt, Artificial Sequence
  Description of Artificial Sequence: Synthetic oligonucleotide
guauuccuggaggacaggg

SEQ ID NO: 2836597 - RNA, 19 nt, Artificial Sequence
  Description of Artificial Sequence: Synthetic oligonucleotide
gauugggaacuccugggca

SEQ ID NO: 2836598 - RNA, 19 nt, Artificial Sequence
  Description of Artificial Sequence: Synthetic oligonucleotide
auauggguuaggcccagca

SEQ ID NO: 2836599 - RNA, 19 nt, Artificial Sequence
  Description of Artificial Sequence: Synthetic oligonucleotide
augagccuucuucauuuuc

SEQ ID NO: 2836600 - RNA, 19 nt, Artificial Sequence
  Description of Artificial Sequence: Synthetic oligonucleotide
ucacagggcacaugccagg

SEQ ID NO: 2836601 - RNA, 19 nt, Artificial Sequence
  Description of Artificial Sequence: Synthetic oligonucleotide
uccaugcuuguguuguuug

SEQ ID NO: 2836602 - RNA, 19 nt, Artificial Sequence
  Description of Artificial Sequence: Synthetic oligonucleotide
gaaaggcaggguugauagg

SEQ ID NO: 2836603 - RNA, 19 nt, Artificial Sequence
  Description of Artificial Sequence: Synthetic oligonucleotide
cugggcacaaggcuugggg

SEQ ID NO: 2836604 - RNA, 19 nt, Artificial Sequence
  Description of Artificial Sequence: Synthetic oligonucleotide
uccaggagccaaaggauuc

SEQ ID NO: 2836605 - RNA, 19 nt, Artificial Sequence
  Description of Artificial Sequence: Synthetic oligonucleotide
aggcaggguugauaggugg

SEQ ID NO: 2836606 - RNA, 19 nt, Artificial Sequence
  Description of Artificial Sequence: Synthetic oligonucleotide
ggaacuccugggcacaagg

SEQ ID NO: 2836607 - RNA, 19 nt, Artificial Sequence
  Description of Artificial Sequence: Synthetic oligonucleotide
ugaggguugguauccugga

SEQ ID NO: 2836608 - RNA, 19 nt, Artificial Sequence
  Description of Artificial Sequence: Synthetic oligonucleotide
gucagagucacugcuggag

SEQ ID NO: 2836609 - RNA, 19 nt, Artificial Sequence
  Description of Artificial Sequence: Synthetic oligonucleotide
ugaagcuugaugggagagc

SEQ ID NO: 2836610 - RNA, 19 nt, Artificial Sequence
  Description of Artificial Sequence: Synthetic oligonucleotide
aggggaggaggguccaggc

SEQ ID NO: 2836611 - RNA, 19 nt, Artificial Sequence
  Description of Artificial Sequence: Synthetic oligonucleotide
agaggaggaaugcuuucca

SEQ ID NO: 2836612 - RNA, 19 nt, Artificial Sequence
  Description of Artificial Sequence: Synthetic oligonucleotide
augggagagcuggugagac

SEQ ID NO: 2836613 - RNA, 19 nt, Artificial Sequence
  Description of Artificial Sequence: Synthetic oligonucleotide
cauguccagauguuaguuc

SEQ ID NO: 2836614 - RNA, 19 nt, Artificial Sequence
  Description of Artificial Sequence: Synthetic oligonucleotide
cagggcacaugccaggagc

SEQ ID NO: 2836615 - RNA, 19 nt, Artificial Sequence
  Description of Artificial Sequence: Synthetic oligonucleotide
aaggugacagcugaagcuu

SEQ ID NO: 2836616 - RNA, 19 nt, Artificial Sequence
  Description of Artificial Sequence: Synthetic oligonucleotide
augcuuguguuguuuguga

SEQ ID NO: 2836617 - RNA, 19 nt, Artificial Sequence
  Description of Artificial Sequence: Synthetic oligonucleotide
agagcuggugagacgaggg

SEQ ID NO: 2836618 - RNA, 19 nt, Artificial Sequence
  Description of Artificial Sequence: Synthetic oligonucleotide
uuaggcccagcauuagggu

SEQ ID NO: 2836619 - RNA, 19 nt, Artificial Sequence
  Description of Artificial Sequence: Synthetic oligonucleotide
uauggguuaggcccagcau

SEQ ID NO: 2836620 - RNA, 19 nt, Artificial Sequence
  Description of Artificial Sequence: Synthetic oligonucleotide
acaggcaggauugggaacu

SEQ ID NO: 2836621 - RNA, 19 nt, Artificial Sequence
  Description of Artificial Sequence: Synthetic oligonucleotide
gaagaggaggaaugcuuuc

SEQ ID NO: 2836622 - RNA, 19 nt, Artificial Sequence
  Description of Artificial Sequence: Synthetic oligonucleotide
gucuucuugucuaucacca

SEQ ID NO: 2836623 - RNA, 19 nt, Artificial Sequence
  Description of Artificial Sequence: Synthetic oligonucleotide
aggcuugggguggauaugg

SEQ ID NO: 2836624 - RNA, 19 nt, Artificial Sequence
  Description of Artificial Sequence: Synthetic oligonucleotide
uccagauguuaguuccagc

SEQ ID NO: 2836625 - RNA, 19 nt, Artificial Sequence
  Description of Artificial Sequence: Synthetic oligonucleotide
ugggccuaccauuccagga

SEQ ID NO: 2836626 - RNA, 19 nt, Artificial Sequence
  Description of Artificial Sequence: Synthetic oligonucleotide
uuguguuguuugugaaucu

SEQ ID NO: 2836627 - RNA, 19 nt, Artificial Sequence
  Description of Artificial Sequence: Synthetic oligonucleotide
uuccuggaggacaggggcc

SEQ ID NO: 2836628 - RNA, 19 nt, Artificial Sequence
  Description of Artificial Sequence: Synthetic oligonucleotide
uggguuaggcccagcauua

SEQ ID NO: 2836629 - RNA, 19 nt, Artificial Sequence
  Description of Artificial Sequence: Synthetic oligonucleotide
uguccagauguuaguucca

SEQ ID NO: 2836630 - RNA, 19 nt, Artificial Sequence
  Description of Artificial Sequence: Synthetic oligonucleotide
uuccgugucuucuugucua

SEQ ID NO: 2836631 - RNA, 19 nt, Artificial Sequence
  Description of Artificial Sequence: Synthetic oligonucleotide
agggaaagcuggguuuccc

SEQ ID NO: 2836632 - RNA, 19 nt, Artificial Sequence
  Description of Artificial Sequence: Synthetic oligonucleotide
gacacccugguugugguac

SEQ ID NO: 2836633 - RNA, 19 nt, Artificial Sequence
  Description of Artificial Sequence: Synthetic oligonucleotide
ucuuccgugucuucuuguc

SEQ ID NO: 2836634 - RNA, 19 nt, Artificial Sequence
  Description of Artificial Sequence: Synthetic oligonucleotide
gagagcuggugagacgagg

SEQ ID NO: 2836635 - RNA, 19 nt, Artificial Sequence
  Description of Artificial Sequence: Synthetic oligonucleotide
ugguauccuggacacccug

SEQ ID NO: 2836636 - RNA, 19 nt, Artificial Sequence
  Description of Artificial Sequence: Synthetic oligonucleotide
ugggcacaaggcuuggggu

SEQ ID NO: 2836637 - RNA, 19 nt, Artificial Sequence
  Description of Artificial Sequence: Synthetic oligonucleotide
gagucacugcuggaggagg

SEQ ID NO: 2836638 - RNA, 19 nt, Artificial Sequence
  Description of Artificial Sequence: Synthetic oligonucleotide
uuccaggagccaaaggauu

SEQ ID NO: 2836639 - RNA, 19 nt, Artificial Sequence
  Description of Artificial Sequence: Synthetic oligonucleotide
ucccucaguacaaggugac

SEQ ID NO: 2836640 - RNA, 19 nt, Artificial Sequence
  Description of Artificial Sequence: Synthetic oligonucleotide
caugcuuguguuguuugug

SEQ ID NO: 2836641 - RNA, 19 nt, Artificial Sequence
  Description of Artificial Sequence: Synthetic oligonucleotide
aggaaugcuuuccaugcuu

SEQ ID NO: 2836642 - RNA, 19 nt, Artificial Sequence
  Description of Artificial Sequence: Synthetic oligonucleotide
ugcauucagucagagucac

SEQ ID NO: 2836643 - RNA, 19 nt, Artificial Sequence
  Description of Artificial Sequence: Synthetic oligonucleotide
ugcuuguguuguuugugaa

SEQ ID NO: 2836644 - RNA, 19 nt, Artificial Sequence
  Description of Artificial Sequence: Synthetic oligonucleotide
ugggagagcuggugagacg

SEQ ID NO: 2836645 - RNA, 19 nt, Artificial Sequence
  Description of Artificial Sequence: Synthetic oligonucleotide
gaagcuugaugggagagcu

SEQ ID NO: 2836646 - RNA, 19 nt, Artificial Sequence
  Description of Artificial Sequence: Synthetic oligonucleotide
gggaggaggguccaggccc

SEQ ID NO: 2836647 - RNA, 19 nt, Artificial Sequence
  Description of Artificial Sequence: Synthetic oligonucleotide
uugggguggauauggguua

SEQ ID NO: 2836648 - RNA, 19 nt, Artificial Sequence
  Description of Artificial Sequence: Synthetic oligonucleotide
ucauuuucuuccgugucuu

SEQ ID NO: 2836649 - RNA, 19 nt, Artificial Sequence
  Description of Artificial Sequence: Synthetic oligonucleotide
gguuaggcccagcauuagg

SEQ ID NO: 2836650 - RNA, 19 nt, Artificial Sequence
  Description of Artificial Sequence: Synthetic oligonucleotide
uggagggaaagcuggguuu

SEQ ID NO: 2836651 - RNA, 19 nt, Artificial Sequence
  Description of Artificial Sequence: Synthetic oligonucleotide
uguguuguuugugaaucuu

SEQ ID NO: 2836652 - RNA, 19 nt, Artificial Sequence
  Description of Artificial Sequence: Synthetic oligonucleotide
cugguugugguacagggua

SEQ ID NO: 2836653 - RNA, 19 nt, Artificial Sequence
  Description of Artificial Sequence: Synthetic oligonucleotide
caggguugauagguggugg

SEQ ID NO: 2836654 - RNA, 19 nt, Artificial Sequence
  Description of Artificial Sequence: Synthetic oligonucleotide
agcuggguuucccuggggu

SEQ ID NO: 2836655 - RNA, 19 nt, Artificial Sequence
  Description of Artificial Sequence: Synthetic oligonucleotide
uugauaggugguggacagg

SEQ ID NO: 2836656 - RNA, 19 nt, Artificial Sequence
  Description of Artificial Sequence: Synthetic oligonucleotide
uccuggacacccugguugu

SEQ ID NO: 2836657 - RNA, 19 nt, Artificial Sequence
  Description of Artificial Sequence: Synthetic oligonucleotide
cugaagcuugaugggagag

SEQ ID NO: 2836658 - RNA, 19 nt, Artificial Sequence
  Description of Artificial Sequence: Synthetic oligonucleotide
aggcccagcauuaggguuc

SEQ ID NO: 2836659 - RNA, 19 nt, Artificial Sequence
  Description of Artificial Sequence: Synthetic oligonucleotide
caguacaaggugacagcug

SEQ ID NO: 2836660 - RNA, 19 nt, Artificial Sequence
  Description of Artificial Sequence: Synthetic oligonucleotide
aggguugauagguggugga

SEQ ID NO: 2836661 - RNA, 19 nt, Artificial Sequence
  Description of Artificial Sequence: Synthetic oligonucleotide
cuggacacccugguugugg

SEQ ID NO: 2836662 - RNA, 19 nt, Artificial Sequence
  Description of Artificial Sequence: Synthetic oligonucleotide
auggagggaaagcuggguu

SEQ ID NO: 2836663 - RNA, 19 nt, Artificial Sequence
  Description of Artificial Sequence: Synthetic oligonucleotide
gacaggcaggauugggaac

SEQ ID NO: 2836664 - RNA, 19 nt, Artificial Sequence
  Description of Artificial Sequence: Synthetic oligonucleotide
gaacuccugggcacaaggc

SEQ ID NO: 2836665 - RNA, 19 nt, Artificial Sequence
  Description of Artificial Sequence: Synthetic oligonucleotide
gugucuucuugucuaucac

SEQ ID NO: 2836666 - RNA, 19 nt, Artificial Sequence
  Description of Artificial Sequence: Synthetic oligonucleotide
gucuaucaccaucccuggg

SEQ ID NO: 2836667 - RNA, 19 nt, Artificial Sequence
  Description of Artificial Sequence: Synthetic oligonucleotide
uaccauuccaggagccaaa

SEQ ID NO: 2836668 - RNA, 19 nt, Artificial Sequence
  Description of Artificial Sequence: Synthetic oligonucleotide
gggccuaccauuccaggag

SEQ ID NO: 2836669 - RNA, 19 nt, Artificial Sequence
  Description of Artificial Sequence: Synthetic oligonucleotide
agacgaggggaggaggguc

SEQ ID NO: 2836670 - RNA, 19 nt, Artificial Sequence
  Description of Artificial Sequence: Synthetic oligonucleotide
caaggugacagcugaagcu

SEQ ID NO: 2836671 - RNA, 19 nt, Artificial Sequence
  Description of Artificial Sequence: Synthetic oligonucleotide
ggauugggaacuccugggc

SEQ ID NO: 2836672 - RNA, 19 nt, Artificial Sequence
  Description of Artificial Sequence: Synthetic oligonucleotide
aggaggaaaggcaggguug

SEQ ID NO: 2836673 - RNA, 19 nt, Artificial Sequence
  Description of Artificial Sequence: Synthetic oligonucleotide
ccacauguccagauguuag

SEQ ID NO: 2836674 - RNA, 19 nt, Artificial Sequence
  Description of Artificial Sequence: Synthetic oligonucleotide
acaggggccaggaggaaag

SEQ ID NO: 2836675 - RNA, 19 nt, Artificial Sequence
  Description of Artificial Sequence: Synthetic oligonucleotide
aggggccaggaggaaaggc

SEQ ID NO: 2836676 - RNA, 19 nt, Artificial Sequence
  Description of Artificial Sequence: Synthetic oligonucleotide
ucuucuugucuaucaccau

SEQ ID NO: 2836677 - RNA, 19 nt, Artificial Sequence
  Description of Artificial Sequence: Synthetic oligonucleotide
ugguugugguacaggguaa

SEQ ID NO: 2836678 - RNA, 19 nt, Artificial Sequence
  Description of Artificial Sequence: Synthetic oligonucleotide
auuccaggagccaaaggau

SEQ ID NO: 2836679 - RNA, 19 nt, Artificial Sequence
  Description of Artificial Sequence: Synthetic oligonucleotide
uucuuccgugucuucuugu

SEQ ID NO: 2836680 - RNA, 19 nt, Artificial Sequence
  Description of Artificial Sequence: Synthetic oligonucleotide
aaggcaggguugauaggug

SEQ ID NO: 2836681 - RNA, 19 nt, Artificial Sequence
  Description of Artificial Sequence: Synthetic oligonucleotide
gaggguugguauccuggac

SEQ ID NO: 2836682 - RNA, 19 nt, Artificial Sequence
  Description of Artificial Sequence: Synthetic oligonucleotide
cugggccuaccauuccagg

SEQ ID NO: 2836683 - RNA, 19 nt, Artificial Sequence
  Description of Artificial Sequence: Synthetic oligonucleotide
ccugggguauuccuggagg

SEQ ID NO: 2836684 - RNA, 19 nt, Artificial Sequence
  Description of Artificial Sequence: Synthetic oligonucleotide
ccucaguacaaggugacag

SEQ ID NO: 2836685 - RNA, 19 nt, Artificial Sequence
  Description of Artificial Sequence: Synthetic oligonucleotide
uugguauccuggacacccu

SEQ ID NO: 2836686 - RNA, 19 nt, Artificial Sequence
  Description of Artificial Sequence: Synthetic oligonucleotide
guccagauguuaguuccag

SEQ ID NO: 2836687 - RNA, 19 nt, Artificial Sequence
  Description of Artificial Sequence: Synthetic oligonucleotide
uggacacccugguuguggu

SEQ ID NO: 2836688 - RNA, 19 nt, Artificial Sequence
  Description of Artificial Sequence: Synthetic oligonucleotide
uccacauguccagauguua

SEQ ID NO: 2836689 - RNA, 19 nt, Artificial Sequence
  Description of Artificial Sequence: Synthetic oligonucleotide
gacgaggggaggagggucc

SEQ ID NO: 2836690 - RNA, 19 nt, Artificial Sequence
  Description of Artificial Sequence: Synthetic oligonucleotide
acauggagggaaagcuggg

SEQ ID NO: 2836691 - RNA, 19 nt, Artificial Sequence
  Description of Artificial Sequence: Synthetic oligonucleotide
ugcuuuccaugcuuguguu

SEQ ID NO: 2836692 - RNA, 19 nt, Artificial Sequence
  Description of Artificial Sequence: Synthetic oligonucleotide
aaggauucacagggcacau

SEQ ID NO: 2836693 - RNA, 19 nt, Artificial Sequence
  Description of Artificial Sequence: Synthetic oligonucleotide
accauuccaggagccaaag

SEQ ID NO: 2836694 - RNA, 19 nt, Artificial Sequence
  Description of Artificial Sequence: Synthetic oligonucleotide
cugcauucagucagaguca

SEQ ID NO: 2836695 - RNA, 19 nt, Artificial Sequence
  Description of Artificial Sequence: Synthetic oligonucleotide
aucccugggccuaccauuc

SEQ ID NO: 2836696 - RNA, 19 nt, Artificial Sequence
  Description of Artificial Sequence: Synthetic oligonucleotide
cucccucaguacaagguga

SEQ ID NO: 2836697 - RNA, 19 nt, Artificial Sequence
  Description of Artificial Sequence: Synthetic oligonucleotide
gcaggugguggguacgggg

SEQ ID NO: 2836698 - RNA, 19 nt, Artificial Sequence
  Description of Artificial Sequence: Synthetic oligonucleotide
uccuggaggacaggggcca

SEQ ID NO: 2836699 - RNA, 19 nt, Artificial Sequence
  Description of Artificial Sequence: Synthetic oligonucleotide
cuccugggcacaaggcuug

SEQ ID NO: 2836700 - RNA, 19 nt, Artificial Sequence
  Description of Artificial Sequence: Synthetic oligonucleotide
acagggcacaugccaggag

SEQ ID NO: 2836701 - RNA, 19 nt, Artificial Sequence
  Description of Artificial Sequence: Synthetic oligonucleotide
guggacaggcaggauuggg

SEQ ID NO: 2836702 - RNA, 19 nt, Artificial Sequence
  Description of Artificial Sequence: Synthetic oligonucleotide
cugcuggaggaggaggagg

SEQ ID NO: 2836703 - RNA, 19 nt, Artificial Sequence
  Description of Artificial Sequence: Synthetic oligonucleotide
uaggcccagcauuaggguu

SEQ ID NO: 2836704 - RNA, 19 nt, Artificial Sequence
  Description of Artificial Sequence: Synthetic oligonucleotide
agcuggugagacgagggga

SEQ ID NO: 2836705 - RNA, 19 nt, Artificial Sequence
  Description of Artificial Sequence: Synthetic oligonucleotide
aggaagaggaggaaugcuu

SEQ ID NO: 2836706 - RNA, 19 nt, Artificial Sequence
  Description of Artificial Sequence: Synthetic oligonucleotide
gguuccacauguccagaug

SEQ ID NO: 2836707 - RNA, 19 nt, Artificial Sequence
  Description of Artificial Sequence: Synthetic oligonucleotide
gugagacgaggggaggagg

SEQ ID NO: 2836708 - RNA, 19 nt, Artificial Sequence
  Description of Artificial Sequence: Synthetic oligonucleotide
ggaaugcuuuccaugcuug

SEQ ID NO: 2836709 - RNA, 19 nt, Artificial Sequence
  Description of Artificial Sequence: Synthetic oligonucleotide
ggguugguauccuggacac

SEQ ID NO: 2836710 - RNA, 19 nt, Artificial Sequence
  Description of Artificial Sequence: Synthetic oligonucleotide
cuuuccaugcuuguguugu

SEQ ID NO: 2836711 - RNA, 19 nt, Artificial Sequence
  Description of Artificial Sequence: Synthetic oligonucleotide
uggugagacgaggggagga

SEQ ID NO: 2836712 - RNA, 19 nt, Artificial Sequence
  Description of Artificial Sequence: Synthetic oligonucleotide
gguauccuggacacccugg

SEQ ID NO: 2836713 - RNA, 19 nt, Artificial Sequence
  Description of Artificial Sequence: Synthetic oligonucleotide
ugggguggauauggguuag

SEQ ID NO: 2836714 - RNA, 19 nt, Artificial Sequence
  Description of Artificial Sequence: Synthetic oligonucleotide
uaucaccaucccugggccu

SEQ ID NO: 2836715 - RNA, 19 nt, Artificial Sequence
  Description of Artificial Sequence: Synthetic oligonucleotide
uggaggacaggggccagga

SEQ ID NO: 2836716 - RNA, 19 nt, Artificial Sequence
  Description of Artificial Sequence: Synthetic oligonucleotide
aggcaggauugggaacucc

SEQ ID NO: 2836717 - RNA, 19 nt, Artificial Sequence
  Description of Artificial Sequence: Synthetic oligonucleotide
cauuaggguuccacauguc

SEQ ID NO: 2836718 - RNA, 19 nt, Artificial Sequence
  Description of Artificial Sequence: Synthetic oligonucleotide
uugggaacuccugggcaca

SEQ ID NO: 2836719 - RNA, 19 nt, Artificial Sequence
  Description of Artificial Sequence: Synthetic oligonucleotide
ggcacaaggcuuggggugg

SEQ ID NO: 2836720 - RNA, 19 nt, Artificial Sequence
  Description of Artificial Sequence: Synthetic oligonucleotide
gaugggagagcuggugaga

SEQ ID NO: 2836721 - RNA, 19 nt, Artificial Sequence
  Description of Artificial Sequence: Synthetic oligonucleotide
ugggguauuccuggaggac

SEQ ID NO: 2836722 - RNA, 19 nt, Artificial Sequence
  Description of Artificial Sequence: Synthetic oligonucleotide
uauccuggacacccugguu

SEQ ID NO: 2836723 - RNA, 19 nt, Artificial Sequence
  Description of Artificial Sequence: Synthetic oligonucleotide
cauuuucuuccgugucuuc

SEQ ID NO: 2836724 - RNA, 19 nt, Artificial Sequence
  Description of Artificial Sequence: Synthetic oligonucleotide
cugggguauuccuggagga

SEQ ID NO: 2836725 - RNA, 19 nt, Artificial Sequence
  Description of Artificial Sequence: Synthetic oligonucleotide
ggcacaugccaggagcagg

SEQ ID NO: 2836726 - RNA, 19 nt, Artificial Sequence
  Description of Artificial Sequence: Synthetic oligonucleotide
gggcacaaggcuuggggug

SEQ ID NO: 2836727 - RNA, 19 nt, Artificial Sequence
  Description of Artificial Sequence: Synthetic oligonucleotide
gaaugcuuuccaugcuugu

SEQ ID NO: 2836728 - RNA, 19 nt, Artificial Sequence
  Description of Artificial Sequence: Synthetic oligonucleotide
uaugagccuucuucauuuu

SEQ ID NO: 2836729 - RNA, 19 nt, Artificial Sequence
  Description of Artificial Sequence: Synthetic oligonucleotide
cagagucacugcuggagga

SEQ ID NO: 2836730 - RNA, 19 nt, Artificial Sequence
  Description of Artificial Sequence: Synthetic oligonucleotide
uccaggcccugcauucagu

SEQ ID NO: 2836731 - RNA, 19 nt, Artificial Sequence
  Description of Artificial Sequence: Synthetic oligonucleotide
gguugugguacaggguaag

SEQ ID NO: 2836732 - RNA, 19 nt, Artificial Sequence
  Description of Artificial Sequence: Synthetic oligonucleotide
gcuggugagacgaggggag

SEQ ID NO: 2836733 - RNA, 19 nt, Artificial Sequence
  Description of Artificial Sequence: Synthetic oligonucleotide
gguugauaggugguggaca

SEQ ID NO: 2836734 - RNA, 19 nt, Artificial Sequence
  Description of Artificial Sequence: Synthetic oligonucleotide
ggguauuccuggaggacag

SEQ ID NO: 2836735 - RNA, 19 nt, Artificial Sequence
  Description of Artificial Sequence: Synthetic oligonucleotide
gagggaaagcuggguuucc

SEQ ID NO: 2836736 - RNA, 19 nt, Artificial Sequence
  Description of Artificial Sequence: Synthetic oligonucleotide
uccgugucuucuugucuau

SEQ ID NO: 2836737 - RNA, 19 nt, Artificial Sequence
  Description of Artificial Sequence: Synthetic oligonucleotide
guccaggcccugcauucag

SEQ ID NO: 2836738 - RNA, 19 nt, Artificial Sequence
  Description of Artificial Sequence: Synthetic oligonucleotide
ccaaaggauucacagggca

SEQ ID NO: 2836739 - RNA, 19 nt, Artificial Sequence
  Description of Artificial Sequence: Synthetic oligonucleotide
gggagagcuggugagacga

SEQ ID NO: 2836740 - RNA, 19 nt, Artificial Sequence
  Description of Artificial Sequence: Synthetic oligonucleotide
ggguggauauggguuaggc

SEQ ID NO: 2836741 - RNA, 19 nt, Artificial Sequence
  Description of Artificial Sequence: Synthetic oligonucleotide
cuggugagacgaggggagg

SEQ ID NO: 2836742 - RNA, 19 nt, Artificial Sequence
  Description of Artificial Sequence: Synthetic oligonucleotide
uuccaugcuuguguuguuu

SEQ ID NO: 2836743 - RNA, 19 nt, Artificial Sequence
  Description of Artificial Sequence: Synthetic oligonucleotide
aggaaaggcaggguugaua

SEQ ID NO: 2836744 - RNA, 19 nt, Artificial Sequence
  Description of Artificial Sequence: Synthetic oligonucleotide
gcauuaggguuccacaugu

SEQ ID NO: 2836745 - RNA, 19 nt, Artificial Sequence
  Description of Artificial Sequence: Synthetic oligonucleotide
gauauggguuaggcccagc

SEQ ID NO: 2836746 - RNA, 19 nt, Artificial Sequence
  Description of Artificial Sequence: Synthetic oligonucleotide
caugccaggagcagguggu

SEQ ID NO: 2836747 - RNA, 19 nt, Artificial Sequence
  Description of Artificial Sequence: Synthetic oligonucleotide
uuuccaugcuuguguuguu

SEQ ID NO: 2836748 - RNA, 19 nt, Artificial Sequence
  Description of Artificial Sequence: Synthetic oligonucleotide
ucccugggccuaccauucc

SEQ ID NO: 2836749 - RNA, 19 nt, Artificial Sequence
  Description of Artificial Sequence: Synthetic oligonucleotide
ggacaggcaggauugggaa

SEQ ID NO: 2836750 - RNA, 19 nt, Artificial Sequence
  Description of Artificial Sequence: Synthetic oligonucleotide
ggugagacgaggggaggag

SEQ ID NO: 2836751 - RNA, 19 nt, Artificial Sequence
  Description of Artificial Sequence: Synthetic oligonucleotide
ggaggguggggcccugagg

SEQ ID NO: 2836752 - RNA, 19 nt, Artificial Sequence
  Description of Artificial Sequence: Synthetic oligonucleotide
ggccuaccauuccaggagc

SEQ ID NO: 2836753 - RNA, 19 nt, Artificial Sequence
  Description of Artificial Sequence: Synthetic oligonucleotide
gaggaaugcuuuccaugcu

SEQ ID NO: 2836754 - RNA, 19 nt, Artificial Sequence
  Description of Artificial Sequence: Synthetic oligonucleotide
aggugguggacaggcagga

SEQ ID NO: 2836755 - RNA, 19 nt, Artificial Sequence
  Description of Artificial Sequence: Synthetic oligonucleotide
caaggcuugggguggauau

SEQ ID NO: 2836756 - RNA, 19 nt, Artificial Sequence
  Description of Artificial Sequence: Synthetic oligonucleotide
guuucccugggguauuccu

SEQ ID NO: 2836757 - RNA, 19 nt, Artificial Sequence
  Description of Artificial Sequence: Synthetic oligonucleotide
agcaggugguggguacggg

SEQ ID NO: 2836758 - RNA, 19 nt, Artificial Sequence
  Description of Artificial Sequence: Synthetic oligonucleotide
acccugguugugguacagg

SEQ ID NO: 2836759 - RNA, 19 nt, Artificial Sequence
  Description of Artificial Sequence: Synthetic oligonucleotide
ggcgacauggagggaaagc

SEQ ID NO: 2836760 - RNA, 19 nt, Artificial Sequence
  Description of Artificial Sequence: Synthetic oligonucleotide
acuccugggcacaaggcuu

SEQ ID NO: 2836761 - RNA, 19 nt, Artificial Sequence
  Description of Artificial Sequence: Synthetic oligonucleotide
aucaccaucccugggccua

SEQ ID NO: 2836762 - RNA, 19 nt, Artificial Sequence
  Description of Artificial Sequence: Synthetic oligonucleotide
cuaccauuccaggagccaa

SEQ ID NO: 2836763 - RNA, 19 nt, Artificial Sequence
  Description of Artificial Sequence: Synthetic oligonucleotide
cagauguuaguuccagccu

SEQ ID NO: 2836764 - RNA, 19 nt, Artificial Sequence
  Description of Artificial Sequence: Synthetic oligonucleotide
acacccugguugugguaca

SEQ ID NO: 2836765 - RNA, 19 nt, Artificial Sequence
  Description of Artificial Sequence: Synthetic oligonucleotide
uccugggcacaaggcuugg

SEQ ID NO: 2836766 - RNA, 19 nt, Artificial Sequence
  Description of Artificial Sequence: Synthetic oligonucleotide
aggugacagcugaagcuug

SEQ ID NO: 2836767 - RNA, 19 nt, Artificial Sequence
  Description of Artificial Sequence: Synthetic oligonucleotide
gggccaggaggaaaggcag

SEQ ID NO: 2836768 - RNA, 19 nt, Artificial Sequence
  Description of Artificial Sequence: Synthetic oligonucleotide
gaggaagaggaggaaugcu

SEQ ID NO: 2836769 - RNA, 19 nt, Artificial Sequence
  Description of Artificial Sequence: Synthetic oligonucleotide
aggauucacagggcacaug

SEQ ID NO: 2836770 - RNA, 19 nt, Artificial Sequence
  Description of Artificial Sequence: Synthetic oligonucleotide
caggagccaaaggauucac

SEQ ID NO: 2836771 - RNA, 19 nt, Artificial Sequence
  Description of Artificial Sequence: Synthetic oligonucleotide
ccagcauuaggguuccaca

SEQ ID NO: 2836772 - RNA, 19 nt, Artificial Sequence
  Description of Artificial Sequence: Synthetic oligonucleotide
gcuuuccaugcuuguguug

SEQ ID NO: 2836773 - RNA, 19 nt, Artificial Sequence
  Description of Artificial Sequence: Synthetic oligonucleotide
ggaggaaaggcaggguuga

SEQ ID NO: 2836774 - RNA, 19 nt, Artificial Sequence
  Description of Artificial Sequence: Synthetic oligonucleotide
agggcacaugccaggagca

SEQ ID NO: 2836775 - RNA, 19 nt, Artificial Sequence
  Description of Artificial Sequence: Synthetic oligonucleotide
cacauguccagauguuagu

SEQ ID NO: 2836776 - RNA, 19 nt, Artificial Sequence
  Description of Artificial Sequence: Synthetic oligonucleotide
gggguauuccuggaggaca

SEQ ID NO: 2836777 - RNA, 19 nt, Artificial Sequence
  Description of Artificial Sequence: Synthetic oligonucleotide
ggagcaggugguggguacg

SEQ ID NO: 2836778 - RNA, 19 nt, Artificial Sequence
  Description of Artificial Sequence: Synthetic oligonucleotide
accaucccugggccuacca

SEQ ID NO: 2836779 - RNA, 19 nt, Artificial Sequence
  Description of Artificial Sequence: Synthetic oligonucleotide
ucccugggguauuccugga

SEQ ID NO: 2836780 - RNA, 19 nt, Artificial Sequence
  Description of Artificial Sequence: Synthetic oligonucleotide
gaggaggaaugcuuuccau

SEQ ID NO: 2836781 - RNA, 19 nt, Artificial Sequence
  Description of Artificial Sequence: Synthetic oligonucleotide
aggguccaggcccugcauu

SEQ ID NO: 2836782 - RNA, 19 nt, Artificial Sequence
  Description of Artificial Sequence: Synthetic oligonucleotide
cuggaggacaggggccagg

SEQ ID NO: 2836783 - RNA, 19 nt, Artificial Sequence
  Description of Artificial Sequence: Synthetic oligonucleotide
ggagggaaagcuggguuuc

SEQ ID NO: 2836784 - RNA, 19 nt, Artificial Sequence
  Description of Artificial Sequence: Synthetic oligonucleotide
aggagccaaaggauucaca

SEQ ID NO: 2836785 - RNA, 19 nt, Artificial Sequence
  Description of Artificial Sequence: Synthetic oligonucleotide
gguauuccuggaggacagg

SEQ ID NO: 2836786 - RNA, 19 nt, Artificial Sequence
  Description of Artificial Sequence: Synthetic oligonucleotide
cagcauuaggguuccacau

SEQ ID NO: 2836787 - RNA, 19 nt, Artificial Sequence
  Description of Artificial Sequence: Synthetic oligonucleotide
gcugaagcuugaugggaga

SEQ ID NO: 2836788 - RNA, 19 nt, Artificial Sequence
  Description of Artificial Sequence: Synthetic oligonucleotide
ccugggccuaccauuccag

SEQ ID NO: 2836789 - RNA, 19 nt, Artificial Sequence
  Description of Artificial Sequence: Synthetic oligonucleotide
gcaggguugauagguggug

SEQ ID NO: 2836790 - RNA, 19 nt, Artificial Sequence
  Description of Artificial Sequence: Synthetic oligonucleotide
ccauuccaggagccaaagg

SEQ ID NO: 2836791 - RNA, 19 nt, Artificial Sequence
  Description of Artificial Sequence: Synthetic oligonucleotide
gcaggauugggaacuccug

SEQ ID NO: 2836792 - RNA, 19 nt, Artificial Sequence
  Description of Artificial Sequence: Synthetic oligonucleotide
ggguccaggcccugcauuc

SEQ ID NO: 2836793 - RNA, 19 nt, Artificial Sequence
  Description of Artificial Sequence: Synthetic oligonucleotide
gguggacaggcaggauugg

SEQ ID NO: 2836794 - RNA, 19 nt, Artificial Sequence
  Description of Artificial Sequence: Synthetic oligonucleotide
ggggccaggaggaaaggca

SEQ ID NO: 2836795 - RNA, 19 nt, Artificial Sequence
  Description of Artificial Sequence: Synthetic oligonucleotide
gccaaaggauucacagggc

SEQ ID NO: 2836796 - RNA, 19 nt, Artificial Sequence
  Description of Artificial Sequence: Synthetic oligonucleotide
cgugucuucuugucuauca

SEQ ID NO: 2836797 - RNA, 19 nt, Artificial Sequence
  Description of Artificial Sequence: Synthetic oligonucleotide
aggguuccacauguccaga

SEQ ID NO: 2836798 - RNA, 19 nt, Artificial Sequence
  Description of Artificial Sequence: Synthetic oligonucleotide
cuuccgugucuucuugucu

SEQ ID NO: 2836799 - RNA, 19 nt, Artificial Sequence
  Description of Artificial Sequence: Synthetic oligonucleotide
ggguugauaggugguggac

SEQ ID NO: 2836800 - RNA, 19 nt, Artificial Sequence
  Description of Artificial Sequence: Synthetic oligonucleotide
cgacauggagggaaagcug

SEQ ID NO: 2836801 - RNA, 19 nt, Artificial Sequence
  Description of Artificial Sequence: Synthetic oligonucleotide
acaaggcuugggguggaua

SEQ ID NO: 2836802 - RNA, 19 nt, Artificial Sequence
  Description of Artificial Sequence: Synthetic oligonucleotide
ucaccaucccugggccuac

SEQ ID NO: 2836803 - RNA, 19 nt, Artificial Sequence
  Description of Artificial Sequence: Synthetic oligonucleotide
ccaggcccugcauucaguc

SEQ ID NO: 2836804 - RNA, 19 nt, Artificial Sequence
  Description of Artificial Sequence: Synthetic oligonucleotide
caggaggaaaggcaggguu

SEQ ID NO: 2836805 - RNA, 19 nt, Artificial Sequence
  Description of Artificial Sequence: Synthetic oligonucleotide
ggauauggguuaggcccag

SEQ ID NO: 2836806 - RNA, 19 nt, Artificial Sequence
  Description of Artificial Sequence: Synthetic oligonucleotide
cacccugguugugguacag

SEQ ID NO: 2836807 - RNA, 19 nt, Artificial Sequence
  Description of Artificial Sequence: Synthetic oligonucleotide
augccaggagcagguggug

SEQ ID NO: 2836808 - RNA, 19 nt, Artificial Sequence
  Description of Artificial Sequence: Synthetic oligonucleotide
ugggaacuccugggcacaa

SEQ ID NO: 2836809 - RNA, 19 nt, Artificial Sequence
  Description of Artificial Sequence: Synthetic oligonucleotide
gcgacauggagggaaagcu

SEQ ID NO: 2836810 - RNA, 19 nt, Artificial Sequence
  Description of Artificial Sequence: Synthetic oligonucleotide
ggcccugaggguugguauc

SEQ ID NO: 2836811 - RNA, 19 nt, Artificial Sequence
  Description of Artificial Sequence: Synthetic oligonucleotide
cccagcauuaggguuccac

SEQ ID NO: 2836812 - RNA, 19 nt, Artificial Sequence
  Description of Artificial Sequence: Synthetic oligonucleotide
ccugaggguugguauccug

SEQ ID NO: 2836813 - RNA, 19 nt, Artificial Sequence
  Description of Artificial Sequence: Synthetic oligonucleotide
cacagggcacaugccagga

SEQ ID NO: 2836814 - RNA, 19 nt, Artificial Sequence
  Description of Artificial Sequence: Synthetic oligonucleotide
ggcuugggguggauauggg

SEQ ID NO: 2836815 - RNA, 19 nt, Artificial Sequence
  Description of Artificial Sequence: Synthetic oligonucleotide
ggugacagcugaagcuuga

SEQ ID NO: 2836816 - RNA, 19 nt, Artificial Sequence
  Description of Artificial Sequence: Synthetic oligonucleotide
ggaggguccaggcccugca

SEQ ID NO: 2836817 - RNA, 19 nt, Artificial Sequence
  Description of Artificial Sequence: Synthetic oligonucleotide
guguuguuugugaaucuuu

SEQ ID NO: 2836818 - RNA, 19 nt, Artificial Sequence
  Description of Artificial Sequence: Synthetic oligonucleotide
gggaggguggggcccugag

SEQ ID NO: 2836819 - RNA, 19 nt, Artificial Sequence
  Description of Artificial Sequence: Synthetic oligonucleotide
gguugguauccuggacacc

SEQ ID NO: 2836820 - RNA, 19 nt, Artificial Sequence
  Description of Artificial Sequence: Synthetic oligonucleotide
gguuucccugggguauucc

SEQ ID NO: 2836821 - RNA, 19 nt, Artificial Sequence
  Description of Artificial Sequence: Synthetic oligonucleotide
gcuuguguuguuugugaau

SEQ ID NO: 2836822 - RNA, 19 nt, Artificial Sequence
  Description of Artificial Sequence: Synthetic oligonucleotide
gggaaagcuggguuucccu

SEQ ID NO: 2836823 - RNA, 19 nt, Artificial Sequence
  Description of Artificial Sequence: Synthetic oligonucleotide
guacaaggugacagcugaa

SEQ ID NO: 2836824 - RNA, 19 nt, Artificial Sequence
  Description of Artificial Sequence: Synthetic oligonucleotide
gccuaccauuccaggagcc

SEQ ID NO: 2836825 - RNA, 19 nt, Artificial Sequence
  Description of Artificial Sequence: Synthetic oligonucleotide
gggguggauauggguuagg

SEQ ID NO: 2836826 - RNA, 19 nt, Artificial Sequence
  Description of Artificial Sequence: Synthetic oligonucleotide
ggaagaggaggaaugcuuu

SEQ ID NO: 2836827 - RNA, 19 nt, Artificial Sequence
  Description of Artificial Sequence: Synthetic oligonucleotide
ggagagcuggugagacgag

SEQ ID NO: 2836828 - RNA, 19 nt, Artificial Sequence
  Description of Artificial Sequence: Synthetic oligonucleotide
ggguuaggcccagcauuag

SEQ ID NO: 2836829 - RNA, 19 nt, Artificial Sequence
  Description of Artificial Sequence: Synthetic oligonucleotide
gcuugggguggauaugggu

SEQ ID NO: 2836830 - RNA, 19 nt, Artificial Sequence
  Description of Artificial Sequence: Synthetic oligonucleotide
gggcacaugccaggagcag

SEQ ID NO: 2836831 - RNA, 19 nt, Artificial Sequence
  Description of Artificial Sequence: Synthetic oligonucleotide
acgaggggaggagggucca

SEQ ID NO: 2836832 - RNA, 19 nt, Artificial Sequence
  Description of Artificial Sequence: Synthetic oligonucleotide
caggcaggauugggaacuc

SEQ ID NO: 2836833 - RNA, 19 nt, Artificial Sequence
  Description of Artificial Sequence: Synthetic oligonucleotide
gagacgaggggaggagggu

SEQ ID NO: 2836834 - RNA, 19 nt, Artificial Sequence
  Description of Artificial Sequence: Synthetic oligonucleotide
gcuggguuucccuggggua

SEQ ID NO: 2836835 - RNA, 19 nt, Artificial Sequence
  Description of Artificial Sequence: Synthetic oligonucleotide
cccugggguauuccuggag

SEQ ID NO: 2836836 - RNA, 19 nt, Artificial Sequence
  Description of Artificial Sequence: Synthetic oligonucleotide
ggcaggauugggaacuccu

SEQ ID NO: 2836837 - RNA, 19 nt, Artificial Sequence
  Description of Artificial Sequence: Synthetic oligonucleotide
gguggggcccugaggguug

SEQ ID NO: 2836838 - RNA, 19 nt, Artificial Sequence
  Description of Artificial Sequence: Synthetic oligonucleotide
guggggcccugaggguugg

SEQ ID NO: 2836839 - RNA, 19 nt, Artificial Sequence
  Description of Artificial Sequence: Synthetic oligonucleotide
ggcccagcauuaggguucc

SEQ ID NO: 2836840 - RNA, 19 nt, Artificial Sequence
  Description of Artificial Sequence: Synthetic oligonucleotide
gggaacuccugggcacaag

SEQ ID NO: 2836841 - RNA, 19 nt, Artificial Sequence
  Description of Artificial Sequence: Synthetic oligonucleotide
cuggguuucccugggguau

SEQ ID NO: 2836842 - RNA, 19 nt, Artificial Sequence
  Description of Artificial Sequence: Synthetic oligonucleotide
ccuaccauuccaggagcca

SEQ ID NO: 2836843 - RNA, 19 nt, Artificial Sequence
  Description of Artificial Sequence: Synthetic oligonucleotide
gcccugcauucagucagag

SEQ ID NO: 2836844 - RNA, 19 nt, Artificial Sequence
  Description of Artificial Sequence: Synthetic oligonucleotide
gggcgacauggagggaaag

SEQ ID NO: 2836845 - RNA, 19 nt, Artificial Sequence
  Description of Artificial Sequence: Synthetic oligonucleotide
gaggguccaggcccugcau

SEQ ID NO: 2836846 - RNA, 19 nt, Artificial Sequence
  Description of Artificial Sequence: Synthetic oligonucleotide
ccaggagccaaaggauuca

SEQ ID NO: 2836847 - RNA, 19 nt, Artificial Sequence
  Description of Artificial Sequence: Synthetic oligonucleotide
caccaucccugggccuacc

SEQ ID NO: 2836848 - RNA, 19 nt, Artificial Sequence
  Description of Artificial Sequence: Synthetic oligonucleotide
ccugggcacaaggcuuggg

SEQ ID NO: 2836849 - RNA, 19 nt, Artificial Sequence
  Description of Artificial Sequence: Synthetic oligonucleotide
gguccaggcccugcauuca

SEQ ID NO: 2836850 - RNA, 19 nt, Artificial Sequence
  Description of Artificial Sequence: Synthetic oligonucleotide
ggguuccacauguccagau

SEQ ID NO: 2836851 - RNA, 19 nt, Artificial Sequence
  Description of Artificial Sequence: Synthetic oligonucleotide
gugacagcugaagcuugau

SEQ ID NO: 2836852 - RNA, 19 nt, Artificial Sequence
  Description of Artificial Sequence: Synthetic oligonucleotide
ggcaggguugauagguggu

SEQ ID NO: 2836853 - RNA, 19 nt, Artificial Sequence
  Description of Artificial Sequence: Synthetic oligonucleotide
gaggaaaggcaggguugau

SEQ ID NO: 2836854 - RNA, 19 nt, Artificial Sequence
  Description of Artificial Sequence: Synthetic oligonucleotide
ccugguugugguacagggu

SEQ ID NO: 2836855 - RNA, 19 nt, Artificial Sequence
  Description of Artificial Sequence: Synthetic oligonucleotide
ccaugcuuguguuguuugu

SEQ ID NO: 2836856 - RNA, 19 nt, Artificial Sequence
  Description of Artificial Sequence: Synthetic oligonucleotide
cccugggccuaccauucca

SEQ ID NO: 2836857 - RNA, 19 nt, Artificial Sequence
  Description of Artificial Sequence: Synthetic oligonucleotide
gggcccugaggguugguau

SEQ ID NO: 2836858 - RNA, 19 nt, Artificial Sequence
  Description of Artificial Sequence: Synthetic oligonucleotide
caggagcagguggugggua

SEQ ID NO: 2836859 - RNA, 19 nt, Artificial Sequence
  Description of Artificial Sequence: Synthetic oligonucleotide
ggcccugcauucagucaga

SEQ ID NO: 2836860 - RNA, 19 nt, Artificial Sequence
  Description of Artificial Sequence: Synthetic oligonucleotide
ggacacccugguuguggua

SEQ ID NO: 2836861 - RNA, 19 nt, Artificial Sequence
  Description of Artificial Sequence: Synthetic oligonucleotide
ggggcgacauggagggaaa

SEQ ID NO: 2836862 - RNA, 19 nt, Artificial Sequence
  Description of Artificial Sequence: Synthetic oligonucleotide
ccgugucuucuugucuauc

SEQ ID NO: 2836863 - RNA, 19 nt, Artificial Sequence
  Description of Artificial Sequence: Synthetic oligonucleotide
ggaggaggguccaggcccu

SEQ ID NO: 2836864 - RNA, 19 nt, Artificial Sequence
  Description of Artificial Sequence: Synthetic oligonucleotide
uggggcccugaggguuggu

SEQ ID NO: 2836865 - RNA, 19 nt, Artificial Sequence
  Description of Artificial Sequence: Synthetic oligonucleotide
ccuggacacccugguugug

SEQ ID NO: 2836866 - RNA, 19 nt, Artificial Sequence
  Description of Artificial Sequence: Synthetic oligonucleotide
cccucaguacaaggugaca

SEQ ID NO: 2836867 - RNA, 19 nt, Artificial Sequence
  Description of Artificial Sequence: Synthetic oligonucleotide
gcacaaggcuuggggugga

SEQ ID NO: 2836868 - RNA, 19 nt, Artificial Sequence
  Description of Artificial Sequence: Synthetic oligonucleotide
gcuugaugggagagcuggu

SEQ ID NO: 2836869 - RNA, 19 nt, Artificial Sequence
  Description of Artificial Sequence: Synthetic oligonucleotide
ggggcccugaggguuggua

SEQ ID NO: 2836870 - RNA, 19 nt, Artificial Sequence
  Description of Artificial Sequence: Synthetic oligonucleotide
cccugcauucagucagagu

SEQ ID NO: 2836871 - RNA, 19 nt, Artificial Sequence
  Description of Artificial Sequence: Synthetic oligonucleotide
gcauucagucagagucacu

SEQ ID NO: 2836872 - RNA, 19 nt, Artificial Sequence
  Description of Artificial Sequence: Synthetic oligonucleotide
ggacaggggccaggaggaa

SEQ ID NO: 2836873 - RNA, 19 nt, Artificial Sequence
  Description of Artificial Sequence: Synthetic oligonucleotide
ccaggaggaaaggcagggu

SEQ ID NO: 2836874 - RNA, 19 nt, Artificial Sequence
  Description of Artificial Sequence: Synthetic oligonucleotide
cacaaggcuugggguggau

SEQ ID NO: 2836875 - RNA, 19 nt, Artificial Sequence
  Description of Artificial Sequence: Synthetic oligonucleotide
ccaggagcagguggugggu

SEQ ID NO: 2836876 - RNA, 19 nt, Artificial Sequence
  Description of Artificial Sequence: Synthetic oligonucleotide
cccugaggguugguauccu

SEQ ID NO: 2836877 - RNA, 19 nt, Artificial Sequence
  Description of Artificial Sequence: Synthetic oligonucleotide
gcccagcauuaggguucca

SEQ ID NO: 2836878 - RNA, 19 nt, Artificial Sequence
  Description of Artificial Sequence: Synthetic oligonucleotide
auuuguggaagguagacac

SEQ ID NO: 2836879 - RNA, 19 nt, Artificial Sequence
  Description of Artificial Sequence: Synthetic oligonucleotide
aauucauugcacaucaugg

SEQ ID NO: 2836880 - RNA, 19 nt, Artificial Sequence
  Description of Artificial Sequence: Synthetic oligonucleotide
uaugcucagagccaaaagg

SEQ ID NO: 2836881 - RNA, 19 nt, Artificial Sequence
  Description of Artificial Sequence: Synthetic oligonucleotide
ugcauauguaugaagaagc

SEQ ID NO: 2836882 - RNA, 19 nt, Artificial Sequence
  Description of Artificial Sequence: Synthetic oligonucleotide
uuuuaguauuucaagaccu

SEQ ID NO: 2836883 - RNA, 19 nt, Artificial Sequence
  Description of Artificial Sequence: Synthetic oligonucleotide
aagaauucauugcacauca

SEQ ID NO: 2836884 - RNA, 19 nt, Artificial Sequence
  Description of Artificial Sequence: Synthetic oligonucleotide
auuucaagaccuuuuauug

SEQ ID NO: 2836885 - RNA, 19 nt, Artificial Sequence
  Description of Artificial Sequence: Synthetic oligonucleotide
gaacuuaucacccucuuug

SEQ ID NO: 2836886 - RNA, 19 nt, Artificial Sequence
  Description of Artificial Sequence: Synthetic oligonucleotide
ugagcuugaacuuaucacc

SEQ ID NO: 2836887 - RNA, 19 nt, Artificial Sequence
  Description of Artificial Sequence: Synthetic oligonucleotide
aagucuacuucguuauccc

SEQ ID NO: 2836888 - RNA, 19 nt, Artificial Sequence
  Description of Artificial Sequence: Synthetic oligonucleotide
acuucguuaucccuguugc

SEQ ID NO: 2836889 - RNA, 19 nt, Artificial Sequence
  Description of Artificial Sequence: Synthetic oligonucleotide
aacuuaucacccucuuugc

SEQ ID NO: 2836890 - RNA, 19 nt, Artificial Sequence
  Description of Artificial Sequence: Synthetic oligonucleotide
aggcacuaugcucagagcc

SEQ ID NO: 2836891 - RNA, 19 nt, Artificial Sequence
  Description of Artificial Sequence: Synthetic oligonucleotide
aaagaauucauugcacauc

SEQ ID NO: 2836892 - RNA, 19 nt, Artificial Sequence
  Description of Artificial Sequence: Synthetic oligonucleotide
uuugccugaguauuugugg

SEQ ID NO: 2836893 - RNA, 19 nt, Artificial Sequence
  Description of Artificial Sequence: Synthetic oligonucleotide
uaaggcacuaugcucagag

SEQ ID NO: 2836894 - RNA, 19 nt, Artificial Sequence
  Description of Artificial Sequence: Synthetic oligonucleotide
uuuuauugaacucgcucag

SEQ ID NO: 2836895 - RNA, 19 nt, Artificial Sequence
  Description of Artificial Sequence: Synthetic oligonucleotide
auauguaugaagaagccag

SEQ ID NO: 2836896 - RNA, 19 nt, Artificial Sequence
  Description of Artificial Sequence: Synthetic oligonucleotide
uugugcauauguaugaaga

SEQ ID NO: 2836897 - RNA, 19 nt, Artificial Sequence
  Description of Artificial Sequence: Synthetic oligonucleotide
aagaccuuuuauugaacuc

SEQ ID NO: 2836898 - RNA, 19 nt, Artificial Sequence
  Description of Artificial Sequence: Synthetic oligonucleotide
gacaguugagagcagaccc

SEQ ID NO: 2836899 - RNA, 19 nt, Artificial Sequence
  Description of Artificial Sequence: Synthetic oligonucleotide
cacaucauggcaaugcagg

SEQ ID NO: 2836900 - RNA, 19 nt, Artificial Sequence
  Description of Artificial Sequence: Synthetic oligonucleotide
agagucuucacuucuuccg

SEQ ID NO: 2836901 - RNA, 19 nt, Artificial Sequence
  Description of Artificial Sequence: Synthetic oligonucleotide
ucaaagaauucauugcaca

SEQ ID NO: 2836902 - RNA, 19 nt, Artificial Sequence
  Description of Artificial Sequence: Synthetic oligonucleotide
ucuaagggguauuccaugg

SEQ ID NO: 2836903 - RNA, 19 nt, Artificial Sequence
  Description of Artificial Sequence: Synthetic oligonucleotide
uuauugaacucgcucagca

SEQ ID NO: 2836904 - RNA, 19 nt, Artificial Sequence
  Description of Artificial Sequence: Synthetic oligonucleotide
agaguaaggcacuaugcuc

SEQ ID NO: 2836905 - RNA, 19 nt, Artificial Sequence
  Description of Artificial Sequence: Synthetic oligonucleotide
agaccuuuuauugaacucg

SEQ ID NO: 2836906 - RNA, 19 nt, Artificial Sequence
  Description of Artificial Sequence: Synthetic oligonucleotide
gaagaagccagaguaaggc

SEQ ID NO: 2836907 - RNA, 19 nt, Artificial Sequence
  Description of Artificial Sequence: Synthetic oligonucleotide
ucuucuaagggguauucca

SEQ ID NO: 2836908 - RNA, 19 nt, Artificial Sequence
  Description of Artificial Sequence: Synthetic oligonucleotide
acuuaucacccucuuugcc

SEQ ID NO: 2836909 - RNA, 19 nt, Artificial Sequence
  Description of Artificial Sequence: Synthetic oligonucleotide
uauuucaagaccuuuuauu

SEQ ID NO: 2836910 - RNA, 19 nt, Artificial Sequence
  Description of Artificial Sequence: Synthetic oligonucleotide
aacucgcucagcauugugc

SEQ ID NO: 2836911 - RNA, 19 nt, Artificial Sequence
  Description of Artificial Sequence: Synthetic oligonucleotide
cuuuuauugaacucgcuca

SEQ ID NO: 2836912 - RNA, 19 nt, Artificial Sequence
  Description of Artificial Sequence: Synthetic oligonucleotide
agagccaaaagggaagagc

SEQ ID NO: 2836913 - RNA, 19 nt, Artificial Sequence
  Description of Artificial Sequence: Synthetic oligonucleotide
uugagcuugaacuuaucac

SEQ ID NO: 2836914 - RNA, 19 nt, Artificial Sequence
  Description of Artificial Sequence: Synthetic oligonucleotide
gaguauuuguggaagguag

SEQ ID NO: 2836915 - RNA, 19 nt, Artificial Sequence
  Description of Artificial Sequence: Synthetic oligonucleotide
gaagacgcaguacuccugg

SEQ ID NO: 2836916 - RNA, 19 nt, Artificial Sequence
  Description of Artificial Sequence: Synthetic oligonucleotide
uucaaagaauucauugcac

SEQ ID NO: 2836917 - RNA, 19 nt, Artificial Sequence
  Description of Artificial Sequence: Synthetic oligonucleotide
uauuccauggugacaguug

SEQ ID NO: 2836918 - RNA, 19 nt, Artificial Sequence
  Description of Artificial Sequence: Synthetic oligonucleotide
aagugcugaauagagaggu

SEQ ID NO: 2836919 - RNA, 19 nt, Artificial Sequence
  Description of Artificial Sequence: Synthetic oligonucleotide
uggaagguagacaccauca

SEQ ID NO: 2836920 - RNA, 19 nt, Artificial Sequence
  Description of Artificial Sequence: Synthetic oligonucleotide
guaugaagaagccagagua

SEQ ID NO: 2836921 - RNA, 19 nt, Artificial Sequence
  Description of Artificial Sequence: Synthetic oligonucleotide
uucaagaccuuuuauugaa

SEQ ID NO: 2836922 - RNA, 19 nt, Artificial Sequence
  Description of Artificial Sequence: Synthetic oligonucleotide
guugagagcagacccagag

SEQ ID NO: 2836923 - RNA, 19 nt, Artificial Sequence
  Description of Artificial Sequence: Synthetic oligonucleotide
uguaugaagaagccagagu

SEQ ID NO: 2836924 - RNA, 19 nt, Artificial Sequence
  Description of Artificial Sequence: Synthetic oligonucleotide
gacuuguugagcuugaacu

SEQ ID NO: 2836925 - RNA, 19 nt, Artificial Sequence
  Description of Artificial Sequence: Synthetic oligonucleotide
gaagucuacuucguuaucc

SEQ ID NO: 2836926 - RNA, 19 nt, Artificial Sequence
  Description of Artificial Sequence: Synthetic oligonucleotide
ucagcuucuggaauccugc

SEQ ID NO: 2836927 - RNA, 19 nt, Artificial Sequence
  Description of Artificial Sequence: Synthetic oligonucleotide
uuucaagaccuuuuauuga

SEQ ID NO: 2836928 - RNA, 19 nt, Artificial Sequence
  Description of Artificial Sequence: Synthetic oligonucleotide
uaagggguauuccauggug

SEQ ID NO: 2836929 - RNA, 19 nt, Artificial Sequence
  Description of Artificial Sequence: Synthetic oligonucleotide
aaggcacuaugcucagagc

SEQ ID NO: 2836930 - RNA, 19 nt, Artificial Sequence
  Description of Artificial Sequence: Synthetic oligonucleotide
gagccaaaagggaagagcc

SEQ ID NO: 2836931 - RNA, 19 nt, Artificial Sequence
  Description of Artificial Sequence: Synthetic oligonucleotide
augcaggacaggaagacgc

SEQ ID NO: 2836932 - RNA, 19 nt, Artificial Sequence
  Description of Artificial Sequence: Synthetic oligonucleotide
agacuuguugagcuugaac

SEQ ID NO: 2836933 - RNA, 19 nt, Artificial Sequence
  Description of Artificial Sequence: Synthetic oligonucleotide
aucauggcaaugcaggaca

SEQ ID NO: 2836934 - RNA, 19 nt, Artificial Sequence
  Description of Artificial Sequence: Synthetic oligonucleotide
auugugcauauguaugaag

SEQ ID NO: 2836935 - RNA, 19 nt, Artificial Sequence
  Description of Artificial Sequence: Synthetic oligonucleotide
gagaggaagugcugaauag

SEQ ID NO: 2836936 - RNA, 19 nt, Artificial Sequence
  Description of Artificial Sequence: Synthetic oligonucleotide
aaagcuaggcagcucccug

SEQ ID NO: 2836937 - RNA, 19 nt, Artificial Sequence
  Description of Artificial Sequence: Synthetic oligonucleotide
gacgcaguacuccuggaag

SEQ ID NO: 2836938 - RNA, 19 nt, Artificial Sequence
  Description of Artificial Sequence: Synthetic oligonucleotide
aaugcaggacaggaagacg

SEQ ID NO: 2836939 - RNA, 19 nt, Artificial Sequence
  Description of Artificial Sequence: Synthetic oligonucleotide
gagucuucacuucuuccgg

SEQ ID NO: 2836940 - RNA, 19 nt, Artificial Sequence
  Description of Artificial Sequence: Synthetic oligonucleotide
aagcuaggcagcucccugg

SEQ ID NO: 2836941 - RNA, 19 nt, Artificial Sequence
  Description of Artificial Sequence: Synthetic oligonucleotide
agaagccagaguaaggcac

SEQ ID NO: 2836942 - RNA, 19 nt, Artificial Sequence
  Description of Artificial Sequence: Synthetic oligonucleotide
aucugggcagccuucaaag

SEQ ID NO: 2836943 - RNA, 19 nt, Artificial Sequence
  Description of Artificial Sequence: Synthetic oligonucleotide
agagcagacccagagagag

SEQ ID NO: 2836944 - RNA, 19 nt, Artificial Sequence
  Description of Artificial Sequence: Synthetic oligonucleotide
uauguaugaagaagccaga

SEQ ID NO: 2836945 - RNA, 19 nt, Artificial Sequence
  Description of Artificial Sequence: Synthetic oligonucleotide
gaggaagugcugaauagag

SEQ ID NO: 2836946 - RNA, 19 nt, Artificial Sequence
  Description of Artificial Sequence: Synthetic oligonucleotide
cauggugacaguugagagc

SEQ ID NO: 2836947 - RNA, 19 nt, Artificial Sequence
  Description of Artificial Sequence: Synthetic oligonucleotide
auggugacaguugagagca

SEQ ID NO: 2836948 - RNA, 19 nt, Artificial Sequence
  Description of Artificial Sequence: Synthetic oligonucleotide
ucauugcacaucauggcaa

SEQ ID NO: 2836949 - RNA, 19 nt, Artificial Sequence
  Description of Artificial Sequence: Synthetic oligonucleotide
uacuucguuaucccuguug

SEQ ID NO: 2836950 - RNA, 19 nt, Artificial Sequence
  Description of Artificial Sequence: Synthetic oligonucleotide
uccagggccucuucuaagg

SEQ ID NO: 2836951 - RNA, 19 nt, Artificial Sequence
  Description of Artificial Sequence: Synthetic oligonucleotide
cucagagccaaaagggaag

SEQ ID NO: 2836952 - RNA, 19 nt, Artificial Sequence
  Description of Artificial Sequence: Synthetic oligonucleotide
ugugcauauguaugaagaa

SEQ ID NO: 2836953 - RNA, 19 nt, Artificial Sequence
  Description of Artificial Sequence: Synthetic oligonucleotide
agggguauuccauggugac

SEQ ID NO: 2836954 - RNA, 19 nt, Artificial Sequence
  Description of Artificial Sequence: Synthetic oligonucleotide
aguauuucaagaccuuuua

SEQ ID NO: 2836955 - RNA, 19 nt, Artificial Sequence
  Description of Artificial Sequence: Synthetic oligonucleotide
ucuacuucguuaucccugu

SEQ ID NO: 2836956 - RNA, 19 nt, Artificial Sequence
  Description of Artificial Sequence: Synthetic oligonucleotide
ucagcucagacuuguugag

SEQ ID NO: 2836957 - RNA, 19 nt, Artificial Sequence
  Description of Artificial Sequence: Synthetic oligonucleotide
uucuaagggguauuccaug

SEQ ID NO: 2836958 - RNA, 19 nt, Artificial Sequence
  Description of Artificial Sequence: Synthetic oligonucleotide
uuguggaagguagacacca

SEQ ID NO: 2836959 - RNA, 19 nt, Artificial Sequence
  Description of Artificial Sequence: Synthetic oligonucleotide
uuuguggaagguagacacc

SEQ ID NO: 2836960 - RNA, 19 nt, Artificial Sequence
  Description of Artificial Sequence: Synthetic oligonucleotide
gaguaaggcacuaugcuca

SEQ ID NO: 2836961 - RNA, 19 nt, Artificial Sequence
  Description of Artificial Sequence: Synthetic oligonucleotide
agcucagacuuguugagcu

SEQ ID NO: 2836962 - RNA, 19 nt, Artificial Sequence
  Description of Artificial Sequence: Synthetic oligonucleotide
uccggggcuguuuaucugg

SEQ ID NO: 2836963 - RNA, 19 nt, Artificial Sequence
  Description of Artificial Sequence: Synthetic oligonucleotide
gguagacaccaucauaucc

SEQ ID NO: 2836964 - RNA, 19 nt, Artificial Sequence
  Description of Artificial Sequence: Synthetic oligonucleotide
uggaagucuacuucguuau

SEQ ID NO: 2836965 - RNA, 19 nt, Artificial Sequence
  Description of Artificial Sequence: Synthetic oligonucleotide
uugcacaucauggcaaugc

SEQ ID NO: 2836966 - RNA, 19 nt, Artificial Sequence
  Description of Artificial Sequence: Synthetic oligonucleotide
ggcaaugcaggacaggaag

SEQ ID NO: 2836967 - RNA, 19 nt, Artificial Sequence
  Description of Artificial Sequence: Synthetic oligonucleotide
uaguauuucaagaccuuuu

SEQ ID NO: 2836968 - RNA, 19 nt, Artificial Sequence
  Description of Artificial Sequence: Synthetic oligonucleotide
aauccugcuucaucucucu

SEQ ID NO: 2836969 - RNA, 19 nt, Artificial Sequence
  Description of Artificial Sequence: Synthetic oligonucleotide
ugcucagagccaaaaggga

SEQ ID NO: 2836970 - RNA, 19 nt, Artificial Sequence
  Description of Artificial Sequence: Synthetic oligonucleotide
gaagugcugaauagagagg

SEQ ID NO: 2836971 - RNA, 19 nt, Artificial Sequence
  Description of Artificial Sequence: Synthetic oligonucleotide
caccaucauauccagggcc

SEQ ID NO: 2836972 - RNA, 19 nt, Artificial Sequence
  Description of Artificial Sequence: Synthetic oligonucleotide
gugcauauguaugaagaag

SEQ ID NO: 2836973 - RNA, 19 nt, Artificial Sequence
  Description of Artificial Sequence: Synthetic oligonucleotide
cuuugccugaguauuugug

SEQ ID NO: 2836974 - RNA, 19 nt, Artificial Sequence
  Description of Artificial Sequence: Synthetic oligonucleotide
ugcacaucauggcaaugca

SEQ ID NO: 2836975 - RNA, 19 nt, Artificial Sequence
  Description of Artificial Sequence: Synthetic oligonucleotide
agucuucacuucuuccggg

SEQ ID NO: 2836976 - RNA, 19 nt, Artificial Sequence
  Description of Artificial Sequence: Synthetic oligonucleotide
ucagcauugugcauaugua

SEQ ID NO: 2836977 - RNA, 19 nt, Artificial Sequence
  Description of Artificial Sequence: Synthetic oligonucleotide
uugccugaguauuugugga

SEQ ID NO: 2836978 - RNA, 19 nt, Artificial Sequence
  Description of Artificial Sequence: Synthetic oligonucleotide
uauuuguggaagguagaca

SEQ ID NO: 2836979 - RNA, 19 nt, Artificial Sequence
  Description of Artificial Sequence: Synthetic oligonucleotide
uccauggugacaguugaga

SEQ ID NO: 2836980 - RNA, 19 nt, Artificial Sequence
  Description of Artificial Sequence: Synthetic oligonucleotide
gagcuugaacuuaucaccc

SEQ ID NO: 2836981 - RNA, 19 nt, Artificial Sequence
  Description of Artificial Sequence: Synthetic oligonucleotide
uucaucugcagagucuuca

SEQ ID NO: 2836982 - RNA, 19 nt, Artificial Sequence
  Description of Artificial Sequence: Synthetic oligonucleotide
uuuauugaacucgcucagc

SEQ ID NO: 2836983 - RNA, 19 nt, Artificial Sequence
  Description of Artificial Sequence: Synthetic oligonucleotide
guugagcuugaacuuauca

SEQ ID NO: 2836984 - RNA, 19 nt, Artificial Sequence
  Description of Artificial Sequence: Synthetic oligonucleotide
gccuucaaagaauucauug

SEQ ID NO: 2836985 - RNA, 19 nt, Artificial Sequence
  Description of Artificial Sequence: Synthetic oligonucleotide
guagacaccaucauaucca

SEQ ID NO: 2836986 - RNA, 19 nt, Artificial Sequence
  Description of Artificial Sequence: Synthetic oligonucleotide
ucaagaccuuuuauugaac

SEQ ID NO: 2836987 - RNA, 19 nt, Artificial Sequence
  Description of Artificial Sequence: Synthetic oligonucleotide
agcauugugcauauguaug

SEQ ID NO: 2836988 - RNA, 19 nt, Artificial Sequence
  Description of Artificial Sequence: Synthetic oligonucleotide
cucaucagcuucuggaauc

SEQ ID NO: 2836989 - RNA, 19 nt, Artificial Sequence
  Description of Artificial Sequence: Synthetic oligonucleotide
agagaggaagugcugaaua

SEQ ID NO: 2836990 - RNA, 19 nt, Artificial Sequence
  Description of Artificial Sequence: Synthetic oligonucleotide
ucuucacuucuuccggggc

SEQ ID NO: 2836991 - RNA, 19 nt, Artificial Sequence
  Description of Artificial Sequence: Synthetic oligonucleotide
uguuuaucugggcagccuu

SEQ ID NO: 2836992 - RNA, 19 nt, Artificial Sequence
  Description of Artificial Sequence: Synthetic oligonucleotide
gacaggaagacgcaguacu

SEQ ID NO: 2836993 - RNA, 19 nt, Artificial Sequence
  Description of Artificial Sequence: Synthetic oligonucleotide
auguaugaagaagccagag

SEQ ID NO: 2836994 - RNA, 19 nt, Artificial Sequence
  Description of Artificial Sequence: Synthetic oligonucleotide
cuucagcucagacuuguug

SEQ ID NO: 2836995 - RNA, 19 nt, Artificial Sequence
  Description of Artificial Sequence: Synthetic oligonucleotide
acucgcucagcauugugca

SEQ ID NO: 2836996 - RNA, 19 nt, Artificial Sequence
  Description of Artificial Sequence: Synthetic oligonucleotide
uugagagcagacccagaga

SEQ ID NO: 2836997 - RNA, 19 nt, Artificial Sequence
  Description of Artificial Sequence: Synthetic oligonucleotide
ggguauuccauggugacag

SEQ ID NO: 2836998 - RNA, 19 nt, Artificial Sequence
  Description of Artificial Sequence: Synthetic oligonucleotide
ucguuaucccuguugcugu

SEQ ID NO: 2836999 - RNA, 19 nt, Artificial Sequence
  Description of Artificial Sequence: Synthetic oligonucleotide
uuaucccuguugcugucca

SEQ ID NO: 2837000 - RNA, 19 nt, Artificial Sequence
  Description of Artificial Sequence: Synthetic oligonucleotide
cucccgaagaccacgcccc

SEQ ID NO: 2837001 - RNA, 19 nt, Artificial Sequence
  Description of Artificial Sequence: Synthetic oligonucleotide
aguaaggcacuaugcucag

SEQ ID NO: 2837002 - RNA, 19 nt, Artificial Sequence
  Description of Artificial Sequence: Synthetic oligonucleotide
acuuguugagcuugaacuu

SEQ ID NO: 2837003 - RNA, 19 nt, Artificial Sequence
  Description of Artificial Sequence: Synthetic oligonucleotide
ugacaguugagagcagacc

SEQ ID NO: 2837004 - RNA, 19 nt, Artificial Sequence
  Description of Artificial Sequence: Synthetic oligonucleotide
ucaucagcuucuggaaucc

SEQ ID NO: 2837005 - RNA, 19 nt, Artificial Sequence
  Description of Artificial Sequence: Synthetic oligonucleotide
gaccuuuuauugaacucgc

SEQ ID NO: 2837006 - RNA, 19 nt, Artificial Sequence
  Description of Artificial Sequence: Synthetic oligonucleotide
aggaagacgcaguacuccu

SEQ ID NO: 2837007 - RNA, 19 nt, Artificial Sequence
  Description of Artificial Sequence: Synthetic oligonucleotide
uaucugggcagccuucaaa

SEQ ID NO: 2837008 - RNA, 19 nt, Artificial Sequence
  Description of Artificial Sequence: Synthetic oligonucleotide
guauuuguggaagguagac

SEQ ID NO: 2837009 - RNA, 19 nt, Artificial Sequence
  Description of Artificial Sequence: Synthetic oligonucleotide
uuuaucugggcagccuuca

SEQ ID NO: 2837010 - RNA, 19 nt, Artificial Sequence
  Description of Artificial Sequence: Synthetic oligonucleotide
acccagagagaggaagugc

SEQ ID NO: 2837011 - RNA, 19 nt, Artificial Sequence
  Description of Artificial Sequence: Synthetic oligonucleotide
uuguugagcuugaacuuau

SEQ ID NO: 2837012 - RNA, 19 nt, Artificial Sequence
  Description of Artificial Sequence: Synthetic oligonucleotide
ucagacuuguugagcuuga

SEQ ID NO: 2837013 - RNA, 19 nt, Artificial Sequence
  Description of Artificial Sequence: Synthetic oligonucleotide
aagggguauuccaugguga

SEQ ID NO: 2837014 - RNA, 19 nt, Artificial Sequence
  Description of Artificial Sequence: Synthetic oligonucleotide
acaucauggcaaugcagga

SEQ ID NO: 2837015 - RNA, 19 nt, Artificial Sequence
  Description of Artificial Sequence: Synthetic oligonucleotide
aaaagcuaggcagcucccu

SEQ ID NO: 2837016 - RNA, 19 nt, Artificial Sequence
  Description of Artificial Sequence: Synthetic oligonucleotide
ugcucaucagcuucuggaa

SEQ ID NO: 2837017 - RNA, 19 nt, Artificial Sequence
  Description of Artificial Sequence: Synthetic oligonucleotide
ugaacuuaucacccucuuu

SEQ ID NO: 2837018 - RNA, 19 nt, Artificial Sequence
  Description of Artificial Sequence: Synthetic oligonucleotide
ugaguauuuguggaaggua

SEQ ID NO: 2837019 - RNA, 19 nt, Artificial Sequence
  Description of Artificial Sequence: Synthetic oligonucleotide
gucuacuucguuaucccug

SEQ ID NO: 2837020 - RNA, 19 nt, Artificial Sequence
  Description of Artificial Sequence: Synthetic oligonucleotide
uauugaacucgcucagcau

SEQ ID NO: 2837021 - RNA, 19 nt, Artificial Sequence
  Description of Artificial Sequence: Synthetic oligonucleotide
ucagagccaaaagggaaga

SEQ ID NO: 2837022 - RNA, 19 nt, Artificial Sequence
  Description of Artificial Sequence: Synthetic oligonucleotide
agccaaaagggaagagccc

SEQ ID NO: 2837023 - RNA, 19 nt, Artificial Sequence
  Description of Artificial Sequence: Synthetic oligonucleotide
ucuuugccugaguauuugu

SEQ ID NO: 2837024 - RNA, 19 nt, Artificial Sequence
  Description of Artificial Sequence: Synthetic oligonucleotide
agaggaagugcugaauaga

SEQ ID NO: 2837025 - RNA, 19 nt, Artificial Sequence
  Description of Artificial Sequence: Synthetic oligonucleotide
ugggcagccuucaaagaau

SEQ ID NO: 2837026 - RNA, 19 nt, Artificial Sequence
  Description of Artificial Sequence: Synthetic oligonucleotide
uuccauggugacaguugag

SEQ ID NO: 2837027 - RNA, 19 nt, Artificial Sequence
  Description of Artificial Sequence: Synthetic oligonucleotide
caaugcaggacaggaagac

SEQ ID NO: 2837028 - RNA, 19 nt, Artificial Sequence
  Description of Artificial Sequence: Synthetic oligonucleotide
cuaggcagcucccugguca

SEQ ID NO: 2837029 - RNA, 19 nt, Artificial Sequence
  Description of Artificial Sequence: Synthetic oligonucleotide
cuuaucacccucuuugccu

SEQ ID NO: 2837030 - RNA, 19 nt, Artificial Sequence
  Description of Artificial Sequence: Synthetic oligonucleotide
cauauguaugaagaagcca

SEQ ID NO: 2837031 - RNA, 19 nt, Artificial Sequence
  Description of Artificial Sequence: Synthetic oligonucleotide
ccagaguaaggcacuaugc

SEQ ID NO: 2837032 - RNA, 19 nt, Artificial Sequence
  Description of Artificial Sequence: Synthetic oligonucleotide
aucccuguugcuguccagg

SEQ ID NO: 2837033 - RNA, 19 nt, Artificial Sequence
  Description of Artificial Sequence: Synthetic oligonucleotide
cagggccucuucuaagggg

SEQ ID NO: 2837034 - RNA, 19 nt, Artificial Sequence
  Description of Artificial Sequence: Synthetic oligonucleotide
cucagacuuguugagcuug

SEQ ID NO: 2837035 - RNA, 19 nt, Artificial Sequence
  Description of Artificial Sequence: Synthetic oligonucleotide
agucuacuucguuaucccu

SEQ ID NO: 2837036 - RNA, 19 nt, Artificial Sequence
  Description of Artificial Sequence: Synthetic oligonucleotide
ccacacuucaucugcagag

SEQ ID NO: 2837037 - RNA, 19 nt, Artificial Sequence
  Description of Artificial Sequence: Synthetic oligonucleotide
ccuuuuauugaacucgcuc

SEQ ID NO: 2837038 - RNA, 19 nt, Artificial Sequence
  Description of Artificial Sequence: Synthetic oligonucleotide
uucacuucuuccggggcug

SEQ ID NO: 2837039 - RNA, 19 nt, Artificial Sequence
  Description of Artificial Sequence: Synthetic oligonucleotide
acaggaagacgcaguacuc

SEQ ID NO: 2837040 - RNA, 19 nt, Artificial Sequence
  Description of Artificial Sequence: Synthetic oligonucleotide
cucagcauugugcauaugu

SEQ ID NO: 2837041 - RNA, 19 nt, Artificial Sequence
  Description of Artificial Sequence: Synthetic oligonucleotide
ucugggcagccuucaaaga

SEQ ID NO: 2837042 - RNA, 19 nt, Artificial Sequence
  Description of Artificial Sequence: Synthetic oligonucleotide
agcuugaacuuaucacccu

SEQ ID NO: 2837043 - RNA, 19 nt, Artificial Sequence
  Description of Artificial Sequence: Synthetic oligonucleotide
acgcaguacuccuggaagu

SEQ ID NO: 2837044 - RNA, 19 nt, Artificial Sequence
  Description of Artificial Sequence: Synthetic oligonucleotide
aguauuuguggaagguaga

SEQ ID NO: 2837045 - RNA, 19 nt, Artificial Sequence
  Description of Artificial Sequence: Synthetic oligonucleotide
cuggaauccugcuucaucu

SEQ ID NO: 2837046 - RNA, 19 nt, Artificial Sequence
  Description of Artificial Sequence: Synthetic oligonucleotide
caucauggcaaugcaggac

SEQ ID NO: 2837047 - RNA, 19 nt, Artificial Sequence
  Description of Artificial Sequence: Synthetic oligonucleotide
guggaagguagacaccauc

SEQ ID NO: 2837048 - RNA, 19 nt, Artificial Sequence
  Description of Artificial Sequence: Synthetic oligonucleotide
gcauauguaugaagaagcc

SEQ ID NO: 2837049 - RNA, 19 nt, Artificial Sequence
  Description of Artificial Sequence: Synthetic oligonucleotide
aguacuccuggaagucuac

SEQ ID NO: 2837050 - RNA, 19 nt, Artificial Sequence
  Description of Artificial Sequence: Synthetic oligonucleotide
auauccagggccucuucua

SEQ ID NO: 2837051 - RNA, 19 nt, Artificial Sequence
  Description of Artificial Sequence: Synthetic oligonucleotide
gcauugugcauauguauga

SEQ ID NO: 2837052 - RNA, 19 nt, Artificial Sequence
  Description of Artificial Sequence: Synthetic oligonucleotide
cucuucuaagggguauucc

SEQ ID NO: 2837053 - RNA, 19 nt, Artificial Sequence
  Description of Artificial Sequence: Synthetic oligonucleotide
accaucauauccagggccu

SEQ ID NO: 2837054 - RNA, 19 nt, Artificial Sequence
  Description of Artificial Sequence: Synthetic oligonucleotide
gaacucgcucagcauugug

SEQ ID NO: 2837055 - RNA, 19 nt, Artificial Sequence
  Description of Artificial Sequence: Synthetic oligonucleotide
gccaaaagggaagagcccc

SEQ ID NO: 2837056 - RNA, 19 nt, Artificial Sequence
  Description of Artificial Sequence: Synthetic oligonucleotide
aagacgcaguacuccugga

SEQ ID NO: 2837057 - RNA, 19 nt, Artificial Sequence
  Description of Artificial Sequence: Synthetic oligonucleotide
cuggaagucuacuucguua

SEQ ID NO: 2837058 - RNA, 19 nt, Artificial Sequence
  Description of Artificial Sequence: Synthetic oligonucleotide
caguugagagcagacccag

SEQ ID NO: 2837059 - RNA, 19 nt, Artificial Sequence
  Description of Artificial Sequence: Synthetic oligonucleotide
gccagaguaaggcacuaug

SEQ ID NO: 2837060 - RNA, 19 nt, Artificial Sequence
  Description of Artificial Sequence: Synthetic oligonucleotide
aggacaggaagacgcagua

SEQ ID NO: 2837061 - RNA, 19 nt, Artificial Sequence
  Description of Artificial Sequence: Synthetic oligonucleotide
caagaccuuuuauugaacu

SEQ ID NO: 2837062 - RNA, 19 nt, Artificial Sequence
  Description of Artificial Sequence: Synthetic oligonucleotide
uguugagcuugaacuuauc

SEQ ID NO: 2837063 - RNA, 19 nt, Artificial Sequence
  Description of Artificial Sequence: Synthetic oligonucleotide
ugccugaguauuuguggaa

SEQ ID NO: 2837064 - RNA, 19 nt, Artificial Sequence
  Description of Artificial Sequence: Synthetic oligonucleotide
caaagaauucauugcacau

SEQ ID NO: 2837065 - RNA, 19 nt, Artificial Sequence
  Description of Artificial Sequence: Synthetic oligonucleotide
gacccagagagaggaagug

SEQ ID NO: 2837066 - RNA, 19 nt, Artificial Sequence
  Description of Artificial Sequence: Synthetic oligonucleotide
gaauccugcuucaucucuc

SEQ ID NO: 2837067 - RNA, 19 nt, Artificial Sequence
  Description of Artificial Sequence: Synthetic oligonucleotide
acuaugcucagagccaaaa

SEQ ID NO: 2837068 - RNA, 19 nt, Artificial Sequence
  Description of Artificial Sequence: Synthetic oligonucleotide
aucagcuucuggaauccug

SEQ ID NO: 2837069 - RNA, 19 nt, Artificial Sequence
  Description of Artificial Sequence: Synthetic oligonucleotide
ccauggugacaguugagag

SEQ ID NO: 2837070 - RNA, 19 nt, Artificial Sequence
  Description of Artificial Sequence: Synthetic oligonucleotide
uggaauccugcuucaucuc

SEQ ID NO: 2837071 - RNA, 19 nt, Artificial Sequence
  Description of Artificial Sequence: Synthetic oligonucleotide
agacgcaguacuccuggaa

SEQ ID NO: 2837072 - RNA, 19 nt, Artificial Sequence
  Description of Artificial Sequence: Synthetic oligonucleotide
uguggaagguagacaccau

SEQ ID NO: 2837073 - RNA, 19 nt, Artificial Sequence
  Description of Artificial Sequence: Synthetic oligonucleotide
uggcaaugcaggacaggaa

SEQ ID NO: 2837074 - RNA, 19 nt, Artificial Sequence
  Description of Artificial Sequence: Synthetic oligonucleotide
ucauauccagggccucuuc

SEQ ID NO: 2837075 - RNA, 19 nt, Artificial Sequence
  Description of Artificial Sequence: Synthetic oligonucleotide
gggcuguuuaucugggcag

SEQ ID NO: 2837076 - RNA, 19 nt, Artificial Sequence
  Description of Artificial Sequence: Synthetic oligonucleotide
uaucccuguugcuguccag

SEQ ID NO: 2837077 - RNA, 19 nt, Artificial Sequence
  Description of Artificial Sequence: Synthetic oligonucleotide
uuaucugggcagccuucaa

SEQ ID NO: 2837078 - RNA, 19 nt, Artificial Sequence
  Description of Artificial Sequence: Synthetic oligonucleotide
acaguugagagcagaccca

SEQ ID NO: 2837079 - RNA, 19 nt, Artificial Sequence
  Description of Artificial Sequence: Synthetic oligonucleotide
ucccuggucagcagcuccu

SEQ ID NO: 2837080 - RNA, 19 nt, Artificial Sequence
  Description of Artificial Sequence: Synthetic oligonucleotide
ucccuguugcuguccaggu

SEQ ID NO: 2837081 - RNA, 19 nt, Artificial Sequence
  Description of Artificial Sequence: Synthetic oligonucleotide
cagaguaaggcacuaugcu

SEQ ID NO: 2837082 - RNA, 19 nt, Artificial Sequence
  Description of Artificial Sequence: Synthetic oligonucleotide
ucgcucagcauugugcaua

SEQ ID NO: 2837083 - RNA, 19 nt, Artificial Sequence
  Description of Artificial Sequence: Synthetic oligonucleotide
ucuuccggggcuguuuauc

SEQ ID NO: 2837084 - RNA, 19 nt, Artificial Sequence
  Description of Artificial Sequence: Synthetic oligonucleotide
guuaucccuguugcugucc

SEQ ID NO: 2837085 - RNA, 19 nt, Artificial Sequence
  Description of Artificial Sequence: Synthetic oligonucleotide
uuccggggcuguuuaucug

SEQ ID NO: 2837086 - RNA, 19 nt, Artificial Sequence
  Description of Artificial Sequence: Synthetic oligonucleotide
gcuugaacuuaucacccuc

SEQ ID NO: 2837087 - RNA, 19 nt, Artificial Sequence
  Description of Artificial Sequence: Synthetic oligonucleotide
cuugaacuuaucacccucu

SEQ ID NO: 2837088 - RNA, 19 nt, Artificial Sequence
  Description of Artificial Sequence: Synthetic oligonucleotide
cugggcagccuucaaagaa

SEQ ID NO: 2837089 - RNA, 19 nt, Artificial Sequence
  Description of Artificial Sequence: Synthetic oligonucleotide
agggccucuucuaaggggu

SEQ ID NO: 2837090 - RNA, 19 nt, Artificial Sequence
  Description of Artificial Sequence: Synthetic oligonucleotide
ggggcuguuuaucugggca

SEQ ID NO: 2837091 - RNA, 19 nt, Artificial Sequence
  Description of Artificial Sequence: Synthetic oligonucleotide
agcuaggcagcucccuggu

SEQ ID NO: 2837092 - RNA, 19 nt, Artificial Sequence
  Description of Artificial Sequence: Synthetic oligonucleotide
agcuucuggaauccugcuu

SEQ ID NO: 2837093 - RNA, 19 nt, Artificial Sequence
  Description of Artificial Sequence: Synthetic oligonucleotide
guauuucaagaccuuuuau

SEQ ID NO: 2837094 - RNA, 19 nt, Artificial Sequence
  Description of Artificial Sequence: Synthetic oligonucleotide
auugcacaucauggcaaug

SEQ ID NO: 2837095 - RNA, 19 nt, Artificial Sequence
  Description of Artificial Sequence: Synthetic oligonucleotide
cuccucccgaagaccacgc

SEQ ID NO: 2837096 - RNA, 19 nt, Artificial Sequence
  Description of Artificial Sequence: Synthetic oligonucleotide
cagagagaggaagugcuga

SEQ ID NO: 2837097 - RNA, 19 nt, Artificial Sequence
  Description of Artificial Sequence: Synthetic oligonucleotide
gagcagacccagagagagg

SEQ ID NO: 2837098 - RNA, 19 nt, Artificial Sequence
  Description of Artificial Sequence: Synthetic oligonucleotide
cuuguugagcuugaacuua

SEQ ID NO: 2837099 - RNA, 19 nt, Artificial Sequence
  Description of Artificial Sequence: Synthetic oligonucleotide
uccucccgaagaccacgcc

SEQ ID NO: 2837100 - RNA, 19 nt, Artificial Sequence
  Description of Artificial Sequence: Synthetic oligonucleotide
gccugaguauuuguggaag

SEQ ID NO: 2837101 - RNA, 19 nt, Artificial Sequence
  Description of Artificial Sequence: Synthetic oligonucleotide
guuuaucugggcagccuuc

SEQ ID NO: 2837102 - RNA, 19 nt, Artificial Sequence
  Description of Artificial Sequence: Synthetic oligonucleotide
agacaccaucauauccagg

SEQ ID NO: 2837103 - RNA, 19 nt, Artificial Sequence
  Description of Artificial Sequence: Synthetic oligonucleotide
acccucuuugccugaguau

SEQ ID NO: 2837104 - RNA, 19 nt, Artificial Sequence
  Description of Artificial Sequence: Synthetic oligonucleotide
cagcucagacuuguugagc

SEQ ID NO: 2837105 - RNA, 19 nt, Artificial Sequence
  Description of Artificial Sequence: Synthetic oligonucleotide
ugaacucgcucagcauugu

SEQ ID NO: 2837106 - RNA, 19 nt, Artificial Sequence
  Description of Artificial Sequence: Synthetic oligonucleotide
uaucacccucuuugccuga

SEQ ID NO: 2837107 - RNA, 19 nt, Artificial Sequence
  Description of Artificial Sequence: Synthetic oligonucleotide
cuucaucugcagagucuuc

SEQ ID NO: 2837108 - RNA, 19 nt, Artificial Sequence
  Description of Artificial Sequence: Synthetic oligonucleotide
uggugacaguugagagcag

SEQ ID NO: 2837109 - RNA, 19 nt, Artificial Sequence
  Description of Artificial Sequence: Synthetic oligonucleotide
cuucuaagggguauuccau

SEQ ID NO: 2837110 - RNA, 19 nt, Artificial Sequence
  Description of Artificial Sequence: Synthetic oligonucleotide
cauugugcauauguaugaa

SEQ ID NO: 2837111 - RNA, 19 nt, Artificial Sequence
  Description of Artificial Sequence: Synthetic oligonucleotide
cagagccaaaagggaagag

SEQ ID NO: 2837112 - RNA, 19 nt, Artificial Sequence
  Description of Artificial Sequence: Synthetic oligonucleotide
ccucccgaagaccacgccc

SEQ ID NO: 2837113 - RNA, 19 nt, Artificial Sequence
  Description of Artificial Sequence: Synthetic oligonucleotide
cagcauugugcauauguau

SEQ ID NO: 2837114 - RNA, 19 nt, Artificial Sequence
  Description of Artificial Sequence: Synthetic oligonucleotide
gcagagucuucacuucuuc

SEQ ID NO: 2837115 - RNA, 19 nt, Artificial Sequence
  Description of Artificial Sequence: Synthetic oligonucleotide
ggcuguuuaucugggcagc

SEQ ID NO: 2837116 - RNA, 19 nt, Artificial Sequence
  Description of Artificial Sequence: Synthetic oligonucleotide
accuuuuauugaacucgcu

SEQ ID NO: 2837117 - RNA, 19 nt, Artificial Sequence
  Description of Artificial Sequence: Synthetic oligonucleotide
ggugacaguugagagcaga

SEQ ID NO: 2837118 - RNA, 19 nt, Artificial Sequence
  Description of Artificial Sequence: Synthetic oligonucleotide
caguacuccuggaagucua

SEQ ID NO: 2837119 - RNA, 19 nt, Artificial Sequence
  Description of Artificial Sequence: Synthetic oligonucleotide
aucauauccagggccucuu

SEQ ID NO: 2837120 - RNA, 19 nt, Artificial Sequence
  Description of Artificial Sequence: Synthetic oligonucleotide
cacuucaucugcagagucu

SEQ ID NO: 2837121 - RNA, 19 nt, Artificial Sequence
  Description of Artificial Sequence: Synthetic oligonucleotide
ggcacuaugcucagagcca

SEQ ID NO: 2837122 - RNA, 19 nt, Artificial Sequence
  Description of Artificial Sequence: Synthetic oligonucleotide
agguugcucaucagcuucu

SEQ ID NO: 2837123 - RNA, 19 nt, Artificial Sequence
  Description of Artificial Sequence: Synthetic oligonucleotide
acuucuuccggggcuguuu

SEQ ID NO: 2837124 - RNA, 19 nt, Artificial Sequence
  Description of Artificial Sequence: Synthetic oligonucleotide
ggaauccugcuucaucucu

SEQ ID NO: 2837125 - RNA, 19 nt, Artificial Sequence
  Description of Artificial Sequence: Synthetic oligonucleotide
cauauccagggccucuucu

SEQ ID NO: 2837126 - RNA, 19 nt, Artificial Sequence
  Description of Artificial Sequence: Synthetic oligonucleotide
cagccuucaaagaauucau

SEQ ID NO: 2837127 - RNA, 19 nt, Artificial Sequence
  Description of Artificial Sequence: Synthetic oligonucleotide
cuuccggggcuguuuaucu

SEQ ID NO: 2837128 - RNA, 19 nt, Artificial Sequence
  Description of Artificial Sequence: Synthetic oligonucleotide
ccagagagaggaagugcug

SEQ ID NO: 2837129 - RNA, 19 nt, Artificial Sequence
  Description of Artificial Sequence: Synthetic oligonucleotide
uucuggaauccugcuucau

SEQ ID NO: 2837130 - RNA, 19 nt, Artificial Sequence
  Description of Artificial Sequence: Synthetic oligonucleotide
cugaguauuuguggaaggu

SEQ ID NO: 2837131 - RNA, 19 nt, Artificial Sequence
  Description of Artificial Sequence: Synthetic oligonucleotide
ggaagucuacuucguuauc

SEQ ID NO: 2837132 - RNA, 19 nt, Artificial Sequence
  Description of Artificial Sequence: Synthetic oligonucleotide
gcuguuuaucugggcagcc

SEQ ID NO: 2837133 - RNA, 19 nt, Artificial Sequence
  Description of Artificial Sequence: Synthetic oligonucleotide
ccagggccucuucuaaggg

SEQ ID NO: 2837134 - RNA, 19 nt, Artificial Sequence
  Description of Artificial Sequence: Synthetic oligonucleotide
ggaagacgcaguacuccug

SEQ ID NO: 2837135 - RNA, 19 nt, Artificial Sequence
  Description of Artificial Sequence: Synthetic oligonucleotide
uucuuccggggcuguuuau

SEQ ID NO: 2837136 - RNA, 19 nt, Artificial Sequence
  Description of Artificial Sequence: Synthetic oligonucleotide
gcaggacaggaagacgcag

SEQ ID NO: 2837137 - RNA, 19 nt, Artificial Sequence
  Description of Artificial Sequence: Synthetic oligonucleotide
cauugcacaucauggcaau

SEQ ID NO: 2837138 - RNA, 19 nt, Artificial Sequence
  Description of Artificial Sequence: Synthetic oligonucleotide
cuaagggguauuccauggu

SEQ ID NO: 2837139 - RNA, 19 nt, Artificial Sequence
  Description of Artificial Sequence: Synthetic oligonucleotide
gugcugaauagagagguuu

SEQ ID NO: 2837140 - RNA, 19 nt, Artificial Sequence
  Description of Artificial Sequence: Synthetic oligonucleotide
agaauucauugcacaucau

SEQ ID NO: 2837141 - RNA, 19 nt, Artificial Sequence
  Description of Artificial Sequence: Synthetic oligonucleotide
gcucagagccaaaagggaa

SEQ ID NO: 2837142 - RNA, 19 nt, Artificial Sequence
  Description of Artificial Sequence: Synthetic oligonucleotide
caggacaggaagacgcagu

SEQ ID NO: 2837143 - RNA, 19 nt, Artificial Sequence
  Description of Artificial Sequence: Synthetic oligonucleotide
cuucuuccggggcuguuua

SEQ ID NO: 2837144 - RNA, 19 nt, Artificial Sequence
  Description of Artificial Sequence: Synthetic oligonucleotide
aguugagagcagacccaga

SEQ ID NO: 2837145 - RNA, 19 nt, Artificial Sequence
  Description of Artificial Sequence: Synthetic oligonucleotide
gcaaugcaggacaggaaga

SEQ ID NO: 2837146 - RNA, 19 nt, Artificial Sequence
  Description of Artificial Sequence: Synthetic oligonucleotide
agugcugaauagagagguu

SEQ ID NO: 2837147 - RNA, 19 nt, Artificial Sequence
  Description of Artificial Sequence: Synthetic oligonucleotide
ucacuucuuccggggcugu

SEQ ID NO: 2837148 - RNA, 19 nt, Artificial Sequence
  Description of Artificial Sequence: Synthetic oligonucleotide
cuucguuaucccuguugcu

SEQ ID NO: 2837149 - RNA, 19 nt, Artificial Sequence
  Description of Artificial Sequence: Synthetic oligonucleotide
caucugcagagucuucacu

SEQ ID NO: 2837150 - RNA, 19 nt, Artificial Sequence
  Description of Artificial Sequence: Synthetic oligonucleotide
gagagaggaagugcugaau

SEQ ID NO: 2837151 - RNA, 19 nt, Artificial Sequence
  Description of Artificial Sequence: Synthetic oligonucleotide
cugcagagucuucacuucu

SEQ ID NO: 2837152 - RNA, 19 nt, Artificial Sequence
  Description of Artificial Sequence: Synthetic oligonucleotide
ggacaggaagacgcaguac

SEQ ID NO: 2837153 - RNA, 19 nt, Artificial Sequence
  Description of Artificial Sequence: Synthetic oligonucleotide
ccuccucccgaagaccacg

SEQ ID NO: 2837154 - RNA, 19 nt, Artificial Sequence
  Description of Artificial Sequence: Synthetic oligonucleotide
auccugcuucaucucucuu

SEQ ID NO: 2837155 - RNA, 19 nt, Artificial Sequence
  Description of Artificial Sequence: Synthetic oligonucleotide
gguugcucaucagcuucug

SEQ ID NO: 2837156 - RNA, 19 nt, Artificial Sequence
  Description of Artificial Sequence: Synthetic oligonucleotide
guauuccauggugacaguu

SEQ ID NO: 2837157 - RNA, 19 nt, Artificial Sequence
  Description of Artificial Sequence: Synthetic oligonucleotide
ccggggcuguuuaucuggg

SEQ ID NO: 2837158 - RNA, 19 nt, Artificial Sequence
  Description of Artificial Sequence: Synthetic oligonucleotide
cccagagagaggaagugcu

SEQ ID NO: 2837159 - RNA, 19 nt, Artificial Sequence
  Description of Artificial Sequence: Synthetic oligonucleotide
ccccacacuucaucugcag

SEQ ID NO: 2837160 - RNA, 19 nt, Artificial Sequence
  Description of Artificial Sequence: Synthetic oligonucleotide
agccagaguaaggcacuau

SEQ ID NO: 2837161 - RNA, 19 nt, Artificial Sequence
  Description of Artificial Sequence: Synthetic oligonucleotide
guaaggcacuaugcucaga

SEQ ID NO: 2837162 - RNA, 19 nt, Artificial Sequence
  Description of Artificial Sequence: Synthetic oligonucleotide
cacacuucaucugcagagu

SEQ ID NO: 2837163 - RNA, 19 nt, Artificial Sequence
  Description of Artificial Sequence: Synthetic oligonucleotide
caucauauccagggccucu

SEQ ID NO: 2837164 - RNA, 19 nt, Artificial Sequence
  Description of Artificial Sequence: Synthetic oligonucleotide
ccucuucuaagggguauuc

SEQ ID NO: 2837165 - RNA, 19 nt, Artificial Sequence
  Description of Artificial Sequence: Synthetic oligonucleotide
gggguauuccauggugaca

SEQ ID NO: 2837166 - RNA, 19 nt, Artificial Sequence
  Description of Artificial Sequence: Synthetic oligonucleotide
gcacuaugcucagagccaa

SEQ ID NO: 2837167 - RNA, 19 nt, Artificial Sequence
  Description of Artificial Sequence: Synthetic oligonucleotide
cacuaugcucagagccaaa

SEQ ID NO: 2837168 - RNA, 19 nt, Artificial Sequence
  Description of Artificial Sequence: Synthetic oligonucleotide
cccacacuucaucugcaga

SEQ ID NO: 2837169 - RNA, 19 nt, Artificial Sequence
  Description of Artificial Sequence: Synthetic oligonucleotide
cagcuucuggaauccugcu

SEQ ID NO: 2837170 - RNA, 19 nt, Artificial Sequence
  Description of Artificial Sequence: Synthetic oligonucleotide
ggcagccuucaaagaauuc

SEQ ID NO: 2837171 - RNA, 19 nt, Artificial Sequence
  Description of Artificial Sequence: Synthetic oligonucleotide
ccccuccucccgaagacca

SEQ ID NO: 2837172 - RNA, 19 nt, Artificial Sequence
  Description of Artificial Sequence: Synthetic oligonucleotide
cagacuuguugagcuugaa

SEQ ID NO: 2837173 - RNA, 19 nt, Artificial Sequence
  Description of Artificial Sequence: Synthetic oligonucleotide
gcuaggcagcucccugguc

SEQ ID NO: 2837174 - RNA, 19 nt, Artificial Sequence
  Description of Artificial Sequence: Synthetic oligonucleotide
gguauuccauggugacagu

SEQ ID NO: 2837175 - RNA, 19 nt, Artificial Sequence
  Description of Artificial Sequence: Synthetic oligonucleotide
cgcaguacuccuggaaguc

SEQ ID NO: 2837176 - RNA, 19 nt, Artificial Sequence
  Description of Artificial Sequence: Synthetic oligonucleotide
cguuaucccuguugcuguc

SEQ ID NO: 2837177 - RNA, 19 nt, Artificial Sequence
  Description of Artificial Sequence: Synthetic oligonucleotide
ccaucauauccagggccuc

SEQ ID NO: 2837178 - RNA, 19 nt, Artificial Sequence
  Description of Artificial Sequence: Synthetic oligonucleotide
gcaguacuccuggaagucu

SEQ ID NO: 2837179 - RNA, 19 nt, Artificial Sequence
  Description of Artificial Sequence: Synthetic oligonucleotide
cucgcucagcauugugcau

SEQ ID NO: 2837180 - RNA, 19 nt, Artificial Sequence
  Description of Artificial Sequence: Synthetic oligonucleotide
cccuccucccgaagaccac

SEQ ID NO: 2837181 - RNA, 19 nt, Artificial Sequence
  Description of Artificial Sequence: Synthetic oligonucleotide
cggggcuguuuaucugggc

SEQ ID NO: 2837182 - RNA, 19 nt, Artificial Sequence
  Description of Artificial Sequence: Synthetic oligonucleotide
caucagcuucuggaauccu

SEQ ID NO: 2837183 - RNA, 19 nt, Artificial Sequence
  Description of Artificial Sequence: Synthetic oligonucleotide
cccucuuugccugaguauu

SEQ ID NO: 2837184 - RNA, 19 nt, Artificial Sequence
  Description of Artificial Sequence: Synthetic oligonucleotide
gcucagacuuguugagcuu

SEQ ID NO: 2837185 - RNA, 19 nt, Artificial Sequence
  Description of Artificial Sequence: Synthetic oligonucleotide
gggcagccuucaaagaauu

SEQ ID NO: 2837186 - RNA, 19 nt, Artificial Sequence
  Description of Artificial Sequence: Synthetic oligonucleotide
ccucuuugccugaguauuu

SEQ ID NO: 2837187 - RNA, 19 nt, Artificial Sequence
  Description of Artificial Sequence: Synthetic oligonucleotide
cuacuucguuaucccuguu

SEQ ID NO: 2837188 - RNA, 19 nt, Artificial Sequence
  Description of Artificial Sequence: Synthetic oligonucleotide
ggccucuucuaagggguau

SEQ ID NO: 2837189 - RNA, 19 nt, Artificial Sequence
  Description of Artificial Sequence: Synthetic oligonucleotide
ccagguugcucaucagcuu

SEQ ID NO: 2837190 - RNA, 19 nt, Artificial Sequence
  Description of Artificial Sequence: Synthetic oligonucleotide
gccucuucuaagggguauu

SEQ ID NO: 2837191 - RNA, 19 nt, Artificial Sequence
  Description of Artificial Sequence: Synthetic oligonucleotide
gggccucuucuaaggggua

SEQ ID NO: 2837192 - RNA, 19 nt, Artificial Sequence
  Description of Artificial Sequence: Synthetic oligonucleotide
cacuucuuccggggcuguu

SEQ ID NO: 2837193 - RNA, 19 nt, Artificial Sequence
  Description of Artificial Sequence: Synthetic oligonucleotide
cccuguugcuguccagguu

SEQ ID NO: 2837194 - RNA, 19 nt, Artificial Sequence
  Description of Artificial Sequence: Synthetic oligonucleotide
uuuauuucgaucuuguacg

SEQ ID NO: 2837195 - RNA, 19 nt, Artificial Sequence
  Description of Artificial Sequence: Synthetic oligonucleotide
acagcaauagccuagccac

SEQ ID NO: 2837196 - RNA, 19 nt, Artificial Sequence
  Description of Artificial Sequence: Synthetic oligonucleotide
uguccauacagcaauagcc

SEQ ID NO: 2837197 - RNA, 19 nt, Artificial Sequence
  Description of Artificial Sequence: Synthetic oligonucleotide
auuucgaucuuguacgacc

SEQ ID NO: 2837198 - RNA, 19 nt, Artificial Sequence
  Description of Artificial Sequence: Synthetic oligonucleotide
ugcugugucaccaauaucu

SEQ ID NO: 2837199 - RNA, 19 nt, Artificial Sequence
  Description of Artificial Sequence: Synthetic oligonucleotide
ugauagugaaggaacgugg

SEQ ID NO: 2837200 - RNA, 19 nt, Artificial Sequence
  Description of Artificial Sequence: Synthetic oligonucleotide
aaguugauagugaaggaac

SEQ ID NO: 2837201 - RNA, 19 nt, Artificial Sequence
  Description of Artificial Sequence: Synthetic oligonucleotide
uaucaucaaauacagcacc

SEQ ID NO: 2837202 - RNA, 19 nt, Artificial Sequence
  Description of Artificial Sequence: Synthetic oligonucleotide
uucuguaacucucuggcag

SEQ ID NO: 2837203 - RNA, 19 nt, Artificial Sequence
  Description of Artificial Sequence: Synthetic oligonucleotide
ugugucaccaauaucuucu

SEQ ID NO: 2837204 - RNA, 19 nt, Artificial Sequence
  Description of Artificial Sequence: Synthetic oligonucleotide
cagaaguugauagugaagg

SEQ ID NO: 2837205 - RNA, 19 nt, Artificial Sequence
  Description of Artificial Sequence: Synthetic oligonucleotide
aguuccuccauacugaggu

SEQ ID NO: 2837206 - RNA, 19 nt, Artificial Sequence
  Description of Artificial Sequence: Synthetic oligonucleotide
acgaccagcacuuuucugg

SEQ ID NO: 2837207 - RNA, 19 nt, Artificial Sequence
  Description of Artificial Sequence: Synthetic oligonucleotide
ugauagaguuuguagaaca

SEQ ID NO: 2837208 - RNA, 19 nt, Artificial Sequence
  Description of Artificial Sequence: Synthetic oligonucleotide
caaucuacucccauugugg

SEQ ID NO: 2837209 - RNA, 19 nt, Artificial Sequence
  Description of Artificial Sequence: Synthetic oligonucleotide
auucaaucuacucccauug

SEQ ID NO: 2837210 - RNA, 19 nt, Artificial Sequence
  Description of Artificial Sequence: Synthetic oligonucleotide
gucaccaauaucuucuccg

SEQ ID NO: 2837211 - RNA, 19 nt, Artificial Sequence
  Description of Artificial Sequence: Synthetic oligonucleotide
uuuuaucaaacccuucccu

SEQ ID NO: 2837212 - RNA, 19 nt, Artificial Sequence
  Description of Artificial Sequence: Synthetic oligonucleotide
cuucacaccagucucuucg

SEQ ID NO: 2837213 - RNA, 19 nt, Artificial Sequence
  Description of Artificial Sequence: Synthetic oligonucleotide
accagcacuuuucuggugc

SEQ ID NO: 2837214 - RNA, 19 nt, Artificial Sequence
  Description of Artificial Sequence: Synthetic oligonucleotide
gcagauaagguacauaucc

SEQ ID NO: 2837215 - RNA, 19 nt, Artificial Sequence
  Description of Artificial Sequence: Synthetic oligonucleotide
cugaauucugacuucacac

SEQ ID NO: 2837216 - RNA, 19 nt, Artificial Sequence
  Description of Artificial Sequence: Synthetic oligonucleotide
ucaaucuacucccauugug

SEQ ID NO: 2837217 - RNA, 19 nt, Artificial Sequence
  Description of Artificial Sequence: Synthetic oligonucleotide
ugugauagaguuuguagaa

SEQ ID NO: 2837218 - RNA, 19 nt, Artificial Sequence
  Description of Artificial Sequence: Synthetic oligonucleotide
auguccauacagcaauagc

SEQ ID NO: 2837219 - RNA, 19 nt, Artificial Sequence
  Description of Artificial Sequence: Synthetic oligonucleotide
ucuggugcuaucaucaaau

SEQ ID NO: 2837220 - RNA, 19 nt, Artificial Sequence
  Description of Artificial Sequence: Synthetic oligonucleotide
ucaccaauaucuucuccgg

SEQ ID NO: 2837221 - RNA, 19 nt, Artificial Sequence
  Description of Artificial Sequence: Synthetic oligonucleotide
uacagcaauagccuagcca

SEQ ID NO: 2837222 - RNA, 19 nt, Artificial Sequence
  Description of Artificial Sequence: Synthetic oligonucleotide
auauccgacuucccgaagg

SEQ ID NO: 2837223 - RNA, 19 nt, Artificial Sequence
  Description of Artificial Sequence: Synthetic oligonucleotide
guacauauccgacuucccg

SEQ ID NO: 2837224 - RNA, 19 nt, Artificial Sequence
  Description of Artificial Sequence: Synthetic oligonucleotide
agguacauauccgacuucc

SEQ ID NO: 2837225 - RNA, 19 nt, Artificial Sequence
  Description of Artificial Sequence: Synthetic oligonucleotide
uccauucacacuucaagca

SEQ ID NO: 2837226 - RNA, 19 nt, Artificial Sequence
  Description of Artificial Sequence: Synthetic oligonucleotide
acacuucaagcauuccugc

SEQ ID NO: 2837227 - RNA, 19 nt, Artificial Sequence
  Description of Artificial Sequence: Synthetic oligonucleotide
cauccauucacacuucaag

SEQ ID NO: 2837228 - RNA, 19 nt, Artificial Sequence
  Description of Artificial Sequence: Synthetic oligonucleotide
uucccuauguccauacagc

SEQ ID NO: 2837229 - RNA, 19 nt, Artificial Sequence
  Description of Artificial Sequence: Synthetic oligonucleotide
agauaagguacauauccga

SEQ ID NO: 2837230 - RNA, 19 nt, Artificial Sequence
  Description of Artificial Sequence: Synthetic oligonucleotide
ucuucgaaaaccucucgga

SEQ ID NO: 2837231 - RNA, 19 nt, Artificial Sequence
  Description of Artificial Sequence: Synthetic oligonucleotide
aaucuacucccauuguggu

SEQ ID NO: 2837232 - RNA, 19 nt, Artificial Sequence
  Description of Artificial Sequence: Synthetic oligonucleotide
gaaggaacguggcugcagg

SEQ ID NO: 2837233 - RNA, 19 nt, Artificial Sequence
  Description of Artificial Sequence: Synthetic oligonucleotide
cagauaagguacauauccg

SEQ ID NO: 2837234 - RNA, 19 nt, Artificial Sequence
  Description of Artificial Sequence: Synthetic oligonucleotide
ucacacuucaagcauuccu

SEQ ID NO: 2837235 - RNA, 19 nt, Artificial Sequence
  Description of Artificial Sequence: Synthetic oligonucleotide
auaagguacauauccgacu

SEQ ID NO: 2837236 - RNA, 19 nt, Artificial Sequence
  Description of Artificial Sequence: Synthetic oligonucleotide
uguacgaccagcacuuuuc

SEQ ID NO: 2837237 - RNA, 19 nt, Artificial Sequence
  Description of Artificial Sequence: Synthetic oligonucleotide
uacauauccgacuucccga

SEQ ID NO: 2837238 - RNA, 19 nt, Artificial Sequence
  Description of Artificial Sequence: Synthetic oligonucleotide
cuucccgaaggcuucaggg

SEQ ID NO: 2837239 - RNA, 19 nt, Artificial Sequence
  Description of Artificial Sequence: Synthetic oligonucleotide
ucuuguacgaccagcacuu

SEQ ID NO: 2837240 - RNA, 19 nt, Artificial Sequence
  Description of Artificial Sequence: Synthetic oligonucleotide
aauagccuagccacccugc

SEQ ID NO: 2837241 - RNA, 19 nt, Artificial Sequence
  Description of Artificial Sequence: Synthetic oligonucleotide
uaagguacauauccgacuu

SEQ ID NO: 2837242 - RNA, 19 nt, Artificial Sequence
  Description of Artificial Sequence: Synthetic oligonucleotide
auagaguuuguagaacagg

SEQ ID NO: 2837243 - RNA, 19 nt, Artificial Sequence
  Description of Artificial Sequence: Synthetic oligonucleotide
acuucaagcauuccugcug

SEQ ID NO: 2837244 - RNA, 19 nt, Artificial Sequence
  Description of Artificial Sequence: Synthetic oligonucleotide
aaaccucucggacugcugu

SEQ ID NO: 2837245 - RNA, 19 nt, Artificial Sequence
  Description of Artificial Sequence: Synthetic oligonucleotide
aaggaacguggcugcaggc

SEQ ID NO: 2837246 - RNA, 19 nt, Artificial Sequence
  Description of Artificial Sequence: Synthetic oligonucleotide
uuuaucaaacccuucccua

SEQ ID NO: 2837247 - RNA, 19 nt, Artificial Sequence
  Description of Artificial Sequence: Synthetic oligonucleotide
gaauucugacuucacacca

SEQ ID NO: 2837248 - RNA, 19 nt, Artificial Sequence
  Description of Artificial Sequence: Synthetic oligonucleotide
gguucuguaacucucuggc

SEQ ID NO: 2837249 - RNA, 19 nt, Artificial Sequence
  Description of Artificial Sequence: Synthetic oligonucleotide
uuucgaucuuguacgacca

SEQ ID NO: 2837250 - RNA, 19 nt, Artificial Sequence
  Description of Artificial Sequence: Synthetic oligonucleotide
uugauagugaaggaacgug

SEQ ID NO: 2837251 - RNA, 19 nt, Artificial Sequence
  Description of Artificial Sequence: Synthetic oligonucleotide
uucgaaaaccucucggacu

SEQ ID NO: 2837252 - RNA, 19 nt, Artificial Sequence
  Description of Artificial Sequence: Synthetic oligonucleotide
agcaauagccuagccaccc

SEQ ID NO: 2837253 - RNA, 19 nt, Artificial Sequence
  Description of Artificial Sequence: Synthetic oligonucleotide
gauagaguuuguagaacag

SEQ ID NO: 2837254 - RNA, 19 nt, Artificial Sequence
  Description of Artificial Sequence: Synthetic oligonucleotide
uucuagauccauccauuca

SEQ ID NO: 2837255 - RNA, 19 nt, Artificial Sequence
  Description of Artificial Sequence: Synthetic oligonucleotide
uuuucuagauccauccauu

SEQ ID NO: 2837256 - RNA, 19 nt, Artificial Sequence
  Description of Artificial Sequence: Synthetic oligonucleotide
caaacccuucccuaugucc

SEQ ID NO: 2837257 - RNA, 19 nt, Artificial Sequence
  Description of Artificial Sequence: Synthetic oligonucleotide
aggggugguguuuucaguc

SEQ ID NO: 2837258 - RNA, 19 nt, Artificial Sequence
  Description of Artificial Sequence: Synthetic oligonucleotide
accaauaucuucuccgggu

SEQ ID NO: 2837259 - RNA, 19 nt, Artificial Sequence
  Description of Artificial Sequence: Synthetic oligonucleotide
ucuacucccauugugguuc

SEQ ID NO: 2837260 - RNA, 19 nt, Artificial Sequence
  Description of Artificial Sequence: Synthetic oligonucleotide
ucucuucgaaaaccucucg

SEQ ID NO: 2837261 - RNA, 19 nt, Artificial Sequence
  Description of Artificial Sequence: Synthetic oligonucleotide
gauagugaaggaacguggc

SEQ ID NO: 2837262 - RNA, 19 nt, Artificial Sequence
  Description of Artificial Sequence: Synthetic oligonucleotide
aucuuguacgaccagcacu

SEQ ID NO: 2837263 - RNA, 19 nt, Artificial Sequence
  Description of Artificial Sequence: Synthetic oligonucleotide
uagugaaggaacguggcug

SEQ ID NO: 2837264 - RNA, 19 nt, Artificial Sequence
  Description of Artificial Sequence: Synthetic oligonucleotide
gauaagguacauauccgac

SEQ ID NO: 2837265 - RNA, 19 nt, Artificial Sequence
  Description of Artificial Sequence: Synthetic oligonucleotide
aguugauagugaaggaacg

SEQ ID NO: 2837266 - RNA, 19 nt, Artificial Sequence
  Description of Artificial Sequence: Synthetic oligonucleotide
gguguuuucagucuuggca

SEQ ID NO: 2837267 - RNA, 19 nt, Artificial Sequence
  Description of Artificial Sequence: Synthetic oligonucleotide
uuaucaaacccuucccuau

SEQ ID NO: 2837268 - RNA, 19 nt, Artificial Sequence
  Description of Artificial Sequence: Synthetic oligonucleotide
cucuucgaaaaccucucgg

SEQ ID NO: 2837269 - RNA, 19 nt, Artificial Sequence
  Description of Artificial Sequence: Synthetic oligonucleotide
ugguucuguaacucucugg

SEQ ID NO: 2837270 - RNA, 19 nt, Artificial Sequence
  Description of Artificial Sequence: Synthetic oligonucleotide
aagguacauauccgacuuc

SEQ ID NO: 2837271 - RNA, 19 nt, Artificial Sequence
  Description of Artificial Sequence: Synthetic oligonucleotide
uuguagaacaggccugugu

SEQ ID NO: 2837272 - RNA, 19 nt, Artificial Sequence
  Description of Artificial Sequence: Synthetic oligonucleotide
aggguuccuguguugcugc

SEQ ID NO: 2837273 - RNA, 19 nt, Artificial Sequence
  Description of Artificial Sequence: Synthetic oligonucleotide
auaggggugguguuuucag

SEQ ID NO: 2837274 - RNA, 19 nt, Artificial Sequence
  Description of Artificial Sequence: Synthetic oligonucleotide
aauucugacuucacaccag

SEQ ID NO: 2837275 - RNA, 19 nt, Artificial Sequence
  Description of Artificial Sequence: Synthetic oligonucleotide
guaacucucuggcaguccc

SEQ ID NO: 2837276 - RNA, 19 nt, Artificial Sequence
  Description of Artificial Sequence: Synthetic oligonucleotide
uuauuucgaucuuguacga

SEQ ID NO: 2837277 - RNA, 19 nt, Artificial Sequence
  Description of Artificial Sequence: Synthetic oligonucleotide
aaacccuucccuaugucca

SEQ ID NO: 2837278 - RNA, 19 nt, Artificial Sequence
  Description of Artificial Sequence: Synthetic oligonucleotide
auugugguucuguaacucu

SEQ ID NO: 2837279 - RNA, 19 nt, Artificial Sequence
  Description of Artificial Sequence: Synthetic oligonucleotide
gaguuuguagaacaggccu

SEQ ID NO: 2837280 - RNA, 19 nt, Artificial Sequence
  Description of Artificial Sequence: Synthetic oligonucleotide
uauccgacuucccgaaggc

SEQ ID NO: 2837281 - RNA, 19 nt, Artificial Sequence
  Description of Artificial Sequence: Synthetic oligonucleotide
cugugauagaguuuguaga

SEQ ID NO: 2837282 - RNA, 19 nt, Artificial Sequence
  Description of Artificial Sequence: Synthetic oligonucleotide
ucccuauguccauacagca

SEQ ID NO: 2837283 - RNA, 19 nt, Artificial Sequence
  Description of Artificial Sequence: Synthetic oligonucleotide
cuucgaaaaccucucggac

SEQ ID NO: 2837284 - RNA, 19 nt, Artificial Sequence
  Description of Artificial Sequence: Synthetic oligonucleotide
caggcggcagauaagguac

SEQ ID NO: 2837285 - RNA, 19 nt, Artificial Sequence
  Description of Artificial Sequence: Synthetic oligonucleotide
uuucuagauccauccauuc

SEQ ID NO: 2837286 - RNA, 19 nt, Artificial Sequence
  Description of Artificial Sequence: Synthetic oligonucleotide
agaaguugauagugaagga

SEQ ID NO: 2837287 - RNA, 19 nt, Artificial Sequence
  Description of Artificial Sequence: Synthetic oligonucleotide
auacagcaauagccuagcc

SEQ ID NO: 2837288 - RNA, 19 nt, Artificial Sequence
  Description of Artificial Sequence: Synthetic oligonucleotide
gaaguugauagugaaggaa

SEQ ID NO: 2837289 - RNA, 19 nt, Artificial Sequence
  Description of Artificial Sequence: Synthetic oligonucleotide
agauccauccauucacacu

SEQ ID NO: 2837290 - RNA, 19 nt, Artificial Sequence
  Description of Artificial Sequence: Synthetic oligonucleotide
cauacugaggucaauuuua

SEQ ID NO: 2837291 - RNA, 19 nt, Artificial Sequence
  Description of Artificial Sequence: Synthetic oligonucleotide
acaccagucucuucgaaaa

SEQ ID NO: 2837292 - RNA, 19 nt, Artificial Sequence
  Description of Artificial Sequence: Synthetic oligonucleotide
ugccggaugcucagcaggg

SEQ ID NO: 2837293 - RNA, 19 nt, Artificial Sequence
  Description of Artificial Sequence: Synthetic oligonucleotide
auagugaaggaacguggcu

SEQ ID NO: 2837294 - RNA, 19 nt, Artificial Sequence
  Description of Artificial Sequence: Synthetic oligonucleotide
uggcaguccccugugauag

SEQ ID NO: 2837295 - RNA, 19 nt, Artificial Sequence
  Description of Artificial Sequence: Synthetic oligonucleotide
ugucaccaauaucuucucc

SEQ ID NO: 2837296 - RNA, 19 nt, Artificial Sequence
  Description of Artificial Sequence: Synthetic oligonucleotide
ucuguaacucucuggcagu

SEQ ID NO: 2837297 - RNA, 19 nt, Artificial Sequence
  Description of Artificial Sequence: Synthetic oligonucleotide
uccggguucugacaggccu

SEQ ID NO: 2837298 - RNA, 19 nt, Artificial Sequence
  Description of Artificial Sequence: Synthetic oligonucleotide
uagaacaggccuguguaca

SEQ ID NO: 2837299 - RNA, 19 nt, Artificial Sequence
  Description of Artificial Sequence: Synthetic oligonucleotide
uucaaucuacucccauugu

SEQ ID NO: 2837300 - RNA, 19 nt, Artificial Sequence
  Description of Artificial Sequence: Synthetic oligonucleotide
auucacacuucaagcauuc

SEQ ID NO: 2837301 - RNA, 19 nt, Artificial Sequence
  Description of Artificial Sequence: Synthetic oligonucleotide
uucaggguuccuguguugc

SEQ ID NO: 2837302 - RNA, 19 nt, Artificial Sequence
  Description of Artificial Sequence: Synthetic oligonucleotide
cauacagcaauagccuagc

SEQ ID NO: 2837303 - RNA, 19 nt, Artificial Sequence
  Description of Artificial Sequence: Synthetic oligonucleotide
ccugugauagaguuuguag

SEQ ID NO: 2837304 - RNA, 19 nt, Artificial Sequence
  Description of Artificial Sequence: Synthetic oligonucleotide
uguugcugccggaugcuca

SEQ ID NO: 2837305 - RNA, 19 nt, Artificial Sequence
  Description of Artificial Sequence: Synthetic oligonucleotide
ucgaucuuguacgaccagc

SEQ ID NO: 2837306 - RNA, 19 nt, Artificial Sequence
  Description of Artificial Sequence: Synthetic oligonucleotide
ugacuucacaccagucucu

SEQ ID NO: 2837307 - RNA, 19 nt, Artificial Sequence
  Description of Artificial Sequence: Synthetic oligonucleotide
cuucuccggguucugacag

SEQ ID NO: 2837308 - RNA, 19 nt, Artificial Sequence
  Description of Artificial Sequence: Synthetic oligonucleotide
ugacaggccuccuggaaac

SEQ ID NO: 2837309 - RNA, 19 nt, Artificial Sequence
  Description of Artificial Sequence: Synthetic oligonucleotide
ugcuaucaucaaauacagc

SEQ ID NO: 2837310 - RNA, 19 nt, Artificial Sequence
  Description of Artificial Sequence: Synthetic oligonucleotide
uagauccauccauucacac

SEQ ID NO: 2837311 - RNA, 19 nt, Artificial Sequence
  Description of Artificial Sequence: Synthetic oligonucleotide
uggcagaaguugauaguga

SEQ ID NO: 2837312 - RNA, 19 nt, Artificial Sequence
  Description of Artificial Sequence: Synthetic oligonucleotide
agucucuucgaaaaccucu

SEQ ID NO: 2837313 - RNA, 19 nt, Artificial Sequence
  Description of Artificial Sequence: Synthetic oligonucleotide
cuguguugcugccggaugc

SEQ ID NO: 2837314 - RNA, 19 nt, Artificial Sequence
  Description of Artificial Sequence: Synthetic oligonucleotide
uccauacugaggucaauuu

SEQ ID NO: 2837315 - RNA, 19 nt, Artificial Sequence
  Description of Artificial Sequence: Synthetic oligonucleotide
gaaggcuucaggguuccug

SEQ ID NO: 2837316 - RNA, 19 nt, Artificial Sequence
  Description of Artificial Sequence: Synthetic oligonucleotide
ucuucuccggguucugaca

SEQ ID NO: 2837317 - RNA, 19 nt, Artificial Sequence
  Description of Artificial Sequence: Synthetic oligonucleotide
uucgaucuuguacgaccag

SEQ ID NO: 2837318 - RNA, 19 nt, Artificial Sequence
  Description of Artificial Sequence: Synthetic oligonucleotide
uuccuccauacugagguca

SEQ ID NO: 2837319 - RNA, 19 nt, Artificial Sequence
  Description of Artificial Sequence: Synthetic oligonucleotide
uccauccauucacacuuca

SEQ ID NO: 2837320 - RNA, 19 nt, Artificial Sequence
  Description of Artificial Sequence: Synthetic oligonucleotide
gaucuuguacgaccagcac

SEQ ID NO: 2837321 - RNA, 19 nt, Artificial Sequence
  Description of Artificial Sequence: Synthetic oligonucleotide
ugaaggaacguggcugcag

SEQ ID NO: 2837322 - RNA, 19 nt, Artificial Sequence
  Description of Artificial Sequence: Synthetic oligonucleotide
ucaagcauuccugcuggca

SEQ ID NO: 2837323 - RNA, 19 nt, Artificial Sequence
  Description of Artificial Sequence: Synthetic oligonucleotide
uccgacuucccgaaggcuu

SEQ ID NO: 2837324 - RNA, 19 nt, Artificial Sequence
  Description of Artificial Sequence: Synthetic oligonucleotide
ucugacaggccuccuggaa

SEQ ID NO: 2837325 - RNA, 19 nt, Artificial Sequence
  Description of Artificial Sequence: Synthetic oligonucleotide
uucuggugcuaucaucaaa

SEQ ID NO: 2837326 - RNA, 19 nt, Artificial Sequence
  Description of Artificial Sequence: Synthetic oligonucleotide
acuucccgaaggcuucagg

SEQ ID NO: 2837327 - RNA, 19 nt, Artificial Sequence
  Description of Artificial Sequence: Synthetic oligonucleotide
uccugcuggcagaaguuga

SEQ ID NO: 2837328 - RNA, 19 nt, Artificial Sequence
  Description of Artificial Sequence: Synthetic oligonucleotide
caccaauaucuucuccggg

SEQ ID NO: 2837329 - RNA, 19 nt, Artificial Sequence
  Description of Artificial Sequence: Synthetic oligonucleotide
ucuggcaguccccugugau

SEQ ID NO: 2837330 - RNA, 19 nt, Artificial Sequence
  Description of Artificial Sequence: Synthetic oligonucleotide
aaccucucggacugcugug

SEQ ID NO: 2837331 - RNA, 19 nt, Artificial Sequence
  Description of Artificial Sequence: Synthetic oligonucleotide
guugcugccggaugcucag

SEQ ID NO: 2837332 - RNA, 19 nt, Artificial Sequence
  Description of Artificial Sequence: Synthetic oligonucleotide
aggaacguggcugcaggcg

SEQ ID NO: 2837333 - RNA, 19 nt, Artificial Sequence
  Description of Artificial Sequence: Synthetic oligonucleotide
aucaucaaauacagcaccu

SEQ ID NO: 2837334 - RNA, 19 nt, Artificial Sequence
  Description of Artificial Sequence: Synthetic oligonucleotide
uucccgaaggcuucagggu

SEQ ID NO: 2837335 - RNA, 19 nt, Artificial Sequence
  Description of Artificial Sequence: Synthetic oligonucleotide
acauauccgacuucccgaa

SEQ ID NO: 2837336 - RNA, 19 nt, Artificial Sequence
  Description of Artificial Sequence: Synthetic oligonucleotide
uccauacagcaauagccua

SEQ ID NO: 2837337 - RNA, 19 nt, Artificial Sequence
  Description of Artificial Sequence: Synthetic oligonucleotide
aguccccugugauagaguu

SEQ ID NO: 2837338 - RNA, 19 nt, Artificial Sequence
  Description of Artificial Sequence: Synthetic oligonucleotide
guagaacaggccuguguac

SEQ ID NO: 2837339 - RNA, 19 nt, Artificial Sequence
  Description of Artificial Sequence: Synthetic oligonucleotide
agggaccugaauucugacu

SEQ ID NO: 2837340 - RNA, 19 nt, Artificial Sequence
  Description of Artificial Sequence: Synthetic oligonucleotide
uucacaccagucucuucga

SEQ ID NO: 2837341 - RNA, 19 nt, Artificial Sequence
  Description of Artificial Sequence: Synthetic oligonucleotide
gugguguuuucagucuugg

SEQ ID NO: 2837342 - RNA, 19 nt, Artificial Sequence
  Description of Artificial Sequence: Synthetic oligonucleotide
ucuccggguucugacaggc

SEQ ID NO: 2837343 - RNA, 19 nt, Artificial Sequence
  Description of Artificial Sequence: Synthetic oligonucleotide
ucaaacccuucccuauguc

SEQ ID NO: 2837344 - RNA, 19 nt, Artificial Sequence
  Description of Artificial Sequence: Synthetic oligonucleotide
uauuucgaucuuguacgac

SEQ ID NO: 2837345 - RNA, 19 nt, Artificial Sequence
  Description of Artificial Sequence: Synthetic oligonucleotide
uguaacucucuggcagucc

SEQ ID NO: 2837346 - RNA, 19 nt, Artificial Sequence
  Description of Artificial Sequence: Synthetic oligonucleotide
caauagccuagccacccug

SEQ ID NO: 2837347 - RNA, 19 nt, Artificial Sequence
  Description of Artificial Sequence: Synthetic oligonucleotide
ucucggacugcugugucac

SEQ ID NO: 2837348 - RNA, 19 nt, Artificial Sequence
  Description of Artificial Sequence: Synthetic oligonucleotide
cauugugguucuguaacuc

SEQ ID NO: 2837349 - RNA, 19 nt, Artificial Sequence
  Description of Artificial Sequence: Synthetic oligonucleotide
ugcugccggaugcucagca

SEQ ID NO: 2837350 - RNA, 19 nt, Artificial Sequence
  Description of Artificial Sequence: Synthetic oligonucleotide
ucccgaaggcuucaggguu

SEQ ID NO: 2837351 - RNA, 19 nt, Artificial Sequence
  Description of Artificial Sequence: Synthetic oligonucleotide
uagccuagccacccugcug

SEQ ID NO: 2837352 - RNA, 19 nt, Artificial Sequence
  Description of Artificial Sequence: Synthetic oligonucleotide
cccauugugguucuguaac

SEQ ID NO: 2837353 - RNA, 19 nt, Artificial Sequence
  Description of Artificial Sequence: Synthetic oligonucleotide
ccauacagcaauagccuag

SEQ ID NO: 2837354 - RNA, 19 nt, Artificial Sequence
  Description of Artificial Sequence: Synthetic oligonucleotide
uacgaccagcacuuuucug

SEQ ID NO: 2837355 - RNA, 19 nt, Artificial Sequence
  Description of Artificial Sequence: Synthetic oligonucleotide
uucuccggguucugacagg

SEQ ID NO: 2837356 - RNA, 19 nt, Artificial Sequence
  Description of Artificial Sequence: Synthetic oligonucleotide
cuagccacccugcugguga

SEQ ID NO: 2837357 - RNA, 19 nt, Artificial Sequence
  Description of Artificial Sequence: Synthetic oligonucleotide
gugauagaguuuguagaac

SEQ ID NO: 2837358 - RNA, 19 nt, Artificial Sequence
  Description of Artificial Sequence: Synthetic oligonucleotide
cugugucaccaauaucuuc

SEQ ID NO: 2837359 - RNA, 19 nt, Artificial Sequence
  Description of Artificial Sequence: Synthetic oligonucleotide
ucccauugugguucuguaa

SEQ ID NO: 2837360 - RNA, 19 nt, Artificial Sequence
  Description of Artificial Sequence: Synthetic oligonucleotide
auagccuagccacccugcu

SEQ ID NO: 2837361 - RNA, 19 nt, Artificial Sequence
  Description of Artificial Sequence: Synthetic oligonucleotide
uuguacgaccagcacuuuu

SEQ ID NO: 2837362 - RNA, 19 nt, Artificial Sequence
  Description of Artificial Sequence: Synthetic oligonucleotide
gauaggggugguguuuuca

SEQ ID NO: 2837363 - RNA, 19 nt, Artificial Sequence
  Description of Artificial Sequence: Synthetic oligonucleotide
uccuccauacugaggucaa

SEQ ID NO: 2837364 - RNA, 19 nt, Artificial Sequence
  Description of Artificial Sequence: Synthetic oligonucleotide
uacugaggucaauuuuauc

SEQ ID NO: 2837365 - RNA, 19 nt, Artificial Sequence
  Description of Artificial Sequence: Synthetic oligonucleotide
uuuguagaacaggccugug

SEQ ID NO: 2837366 - RNA, 19 nt, Artificial Sequence
  Description of Artificial Sequence: Synthetic oligonucleotide
uucaagcauuccugcuggc

SEQ ID NO: 2837367 - RNA, 19 nt, Artificial Sequence
  Description of Artificial Sequence: Synthetic oligonucleotide
uaggggugguguuuucagu

SEQ ID NO: 2837368 - RNA, 19 nt, Artificial Sequence
  Description of Artificial Sequence: Synthetic oligonucleotide
aacccuucccuauguccau

SEQ ID NO: 2837369 - RNA, 19 nt, Artificial Sequence
  Description of Artificial Sequence: Synthetic oligonucleotide
cagcaauagccuagccacc

SEQ ID NO: 2837370 - RNA, 19 nt, Artificial Sequence
  Description of Artificial Sequence: Synthetic oligonucleotide
ucaggguuccuguguugcu

SEQ ID NO: 2837371 - RNA, 19 nt, Artificial Sequence
  Description of Artificial Sequence: Synthetic oligonucleotide
uucacacuucaagcauucc

SEQ ID NO: 2837372 - RNA, 19 nt, Artificial Sequence
  Description of Artificial Sequence: Synthetic oligonucleotide
agcacuuuucuggugcuau

SEQ ID NO: 2837373 - RNA, 19 nt, Artificial Sequence
  Description of Artificial Sequence: Synthetic oligonucleotide
ucacaccagucucuucgaa

SEQ ID NO: 2837374 - RNA, 19 nt, Artificial Sequence
  Description of Artificial Sequence: Synthetic oligonucleotide
cauauccgacuucccgaag

SEQ ID NO: 2837375 - RNA, 19 nt, Artificial Sequence
  Description of Artificial Sequence: Synthetic oligonucleotide
accugaauucugacuucac

SEQ ID NO: 2837376 - RNA, 19 nt, Artificial Sequence
  Description of Artificial Sequence: Synthetic oligonucleotide
ugcaggcggcagauaaggu

SEQ ID NO: 2837377 - RNA, 19 nt, Artificial Sequence
  Description of Artificial Sequence: Synthetic oligonucleotide
acucccauugugguucugu

SEQ ID NO: 2837378 - RNA, 19 nt, Artificial Sequence
  Description of Artificial Sequence: Synthetic oligonucleotide
cacuuuucuggugcuauca

SEQ ID NO: 2837379 - RNA, 19 nt, Artificial Sequence
  Description of Artificial Sequence: Synthetic oligonucleotide
gcagaaguugauagugaag

SEQ ID NO: 2837380 - RNA, 19 nt, Artificial Sequence
  Description of Artificial Sequence: Synthetic oligonucleotide
cagucucuucgaaaaccuc

SEQ ID NO: 2837381 - RNA, 19 nt, Artificial Sequence
  Description of Artificial Sequence: Synthetic oligonucleotide
aucuacucccauugugguu

SEQ ID NO: 2837382 - RNA, 19 nt, Artificial Sequence
  Description of Artificial Sequence: Synthetic oligonucleotide
caggccuccuggaaacuuc

SEQ ID NO: 2837383 - RNA, 19 nt, Artificial Sequence
  Description of Artificial Sequence: Synthetic oligonucleotide
gaccagcacuuuucuggug

SEQ ID NO: 2837384 - RNA, 19 nt, Artificial Sequence
  Description of Artificial Sequence: Synthetic oligonucleotide
guccauacagcaauagccu

SEQ ID NO: 2837385 - RNA, 19 nt, Artificial Sequence
  Description of Artificial Sequence: Synthetic oligonucleotide
guugauagugaaggaacgu

SEQ ID NO: 2837386 - RNA, 19 nt, Artificial Sequence
  Description of Artificial Sequence: Synthetic oligonucleotide
cagggaccugaauucugac

SEQ ID NO: 2837387 - RNA, 19 nt, Artificial Sequence
  Description of Artificial Sequence: Synthetic oligonucleotide
cugacaggccuccuggaaa

SEQ ID NO: 2837388 - RNA, 19 nt, Artificial Sequence
  Description of Artificial Sequence: Synthetic oligonucleotide
ugcucagcagggaccugaa

SEQ ID NO: 2837389 - RNA, 19 nt, Artificial Sequence
  Description of Artificial Sequence: Synthetic oligonucleotide
gaacguggcugcaggcggc

SEQ ID NO: 2837390 - RNA, 19 nt, Artificial Sequence
  Description of Artificial Sequence: Synthetic oligonucleotide
cucagcagggaccugaauu

SEQ ID NO: 2837391 - RNA, 19 nt, Artificial Sequence
  Description of Artificial Sequence: Synthetic oligonucleotide
caccagucucuucgaaaac

SEQ ID NO: 2837392 - RNA, 19 nt, Artificial Sequence
  Description of Artificial Sequence: Synthetic oligonucleotide
ugcugggaguuccuccaua

SEQ ID NO: 2837393 - RNA, 19 nt, Artificial Sequence
  Description of Artificial Sequence: Synthetic oligonucleotide
guuuguagaacaggccugu

SEQ ID NO: 2837394 - RNA, 19 nt, Artificial Sequence
  Description of Artificial Sequence: Synthetic oligonucleotide
ugauaggggugguguuuuc

SEQ ID NO: 2837395 - RNA, 19 nt, Artificial Sequence
  Description of Artificial Sequence: Synthetic oligonucleotide
gggaccugaauucugacuu

SEQ ID NO: 2837396 - RNA, 19 nt, Artificial Sequence
  Description of Artificial Sequence: Synthetic oligonucleotide
gccuguguacacugcuggg

SEQ ID NO: 2837397 - RNA, 19 nt, Artificial Sequence
  Description of Artificial Sequence: Synthetic oligonucleotide
gguacauauccgacuuccc

SEQ ID NO: 2837398 - RNA, 19 nt, Artificial Sequence
  Description of Artificial Sequence: Synthetic oligonucleotide
aggcuucaggguuccugug

SEQ ID NO: 2837399 - RNA, 19 nt, Artificial Sequence
  Description of Artificial Sequence: Synthetic oligonucleotide
uggugauaggggugguguu

SEQ ID NO: 2837400 - RNA, 19 nt, Artificial Sequence
  Description of Artificial Sequence: Synthetic oligonucleotide
gguuccuguguugcugccg

SEQ ID NO: 2837401 - RNA, 19 nt, Artificial Sequence
  Description of Artificial Sequence: Synthetic oligonucleotide
cuguaacucucuggcaguc

SEQ ID NO: 2837402 - RNA, 19 nt, Artificial Sequence
  Description of Artificial Sequence: Synthetic oligonucleotide
uccuguguugcugccggau

SEQ ID NO: 2837403 - RNA, 19 nt, Artificial Sequence
  Description of Artificial Sequence: Synthetic oligonucleotide
agcagggaccugaauucug

SEQ ID NO: 2837404 - RNA, 19 nt, Artificial Sequence
  Description of Artificial Sequence: Synthetic oligonucleotide
aacguggcugcaggcggca

SEQ ID NO: 2837405 - RNA, 19 nt, Artificial Sequence
  Description of Artificial Sequence: Synthetic oligonucleotide
cuauguccauacagcaaua

SEQ ID NO: 2837406 - RNA, 19 nt, Artificial Sequence
  Description of Artificial Sequence: Synthetic oligonucleotide
ccugcuggugauaggggug

SEQ ID NO: 2837407 - RNA, 19 nt, Artificial Sequence
  Description of Artificial Sequence: Synthetic oligonucleotide
cugcugugucaccaauauc

SEQ ID NO: 2837408 - RNA, 19 nt, Artificial Sequence
  Description of Artificial Sequence: Synthetic oligonucleotide
gcaguccccugugauagag

SEQ ID NO: 2837409 - RNA, 19 nt, Artificial Sequence
  Description of Artificial Sequence: Synthetic oligonucleotide
acucucuggcaguccccug

SEQ ID NO: 2837410 - RNA, 19 nt, Artificial Sequence
  Description of Artificial Sequence: Synthetic oligonucleotide
acccugcuggugauagggg

SEQ ID NO: 2837411 - RNA, 19 nt, Artificial Sequence
  Description of Artificial Sequence: Synthetic oligonucleotide
ggcugcaggcggcagauaa

SEQ ID NO: 2837412 - RNA, 19 nt, Artificial Sequence
  Description of Artificial Sequence: Synthetic oligonucleotide
cucggacugcugugucacc

SEQ ID NO: 2837413 - RNA, 19 nt, Artificial Sequence
  Description of Artificial Sequence: Synthetic oligonucleotide
gacuucccgaaggcuucag

SEQ ID NO: 2837414 - RNA, 19 nt, Artificial Sequence
  Description of Artificial Sequence: Synthetic oligonucleotide
cucucggacugcuguguca

SEQ ID NO: 2837415 - RNA, 19 nt, Artificial Sequence
  Description of Artificial Sequence: Synthetic oligonucleotide
cuccuggaaacuuccacau

SEQ ID NO: 2837416 - RNA, 19 nt, Artificial Sequence
  Description of Artificial Sequence: Synthetic oligonucleotide
ggaccugaauucugacuuc

SEQ ID NO: 2837417 - RNA, 19 nt, Artificial Sequence
  Description of Artificial Sequence: Synthetic oligonucleotide
uuccuguguugcugccgga

SEQ ID NO: 2837418 - RNA, 19 nt, Artificial Sequence
  Description of Artificial Sequence: Synthetic oligonucleotide
guacgaccagcacuuuucu

SEQ ID NO: 2837419 - RNA, 19 nt, Artificial Sequence
  Description of Artificial Sequence: Synthetic oligonucleotide
gccacccugcuggugauag

SEQ ID NO: 2837420 - RNA, 19 nt, Artificial Sequence
  Description of Artificial Sequence: Synthetic oligonucleotide
cuggugcuaucaucaaaua

SEQ ID NO: 2837421 - RNA, 19 nt, Artificial Sequence
  Description of Artificial Sequence: Synthetic oligonucleotide
cgaucuuguacgaccagca

SEQ ID NO: 2837422 - RNA, 19 nt, Artificial Sequence
  Description of Artificial Sequence: Synthetic oligonucleotide
gcugccggaugcucagcag

SEQ ID NO: 2837423 - RNA, 19 nt, Artificial Sequence
  Description of Artificial Sequence: Synthetic oligonucleotide
cucccauugugguucugua

SEQ ID NO: 2837424 - RNA, 19 nt, Artificial Sequence
  Description of Artificial Sequence: Synthetic oligonucleotide
guuuucagucuuggcaagu

SEQ ID NO: 2837425 - RNA, 19 nt, Artificial Sequence
  Description of Artificial Sequence: Synthetic oligonucleotide
cuggcaguccccugugaua

SEQ ID NO: 2837426 - RNA, 19 nt, Artificial Sequence
  Description of Artificial Sequence: Synthetic oligonucleotide
ccgacuucccgaaggcuuc

SEQ ID NO: 2837427 - RNA, 19 nt, Artificial Sequence
  Description of Artificial Sequence: Synthetic oligonucleotide
uagccacccugcuggugau

SEQ ID NO: 2837428 - RNA, 19 nt, Artificial Sequence
  Description of Artificial Sequence: Synthetic oligonucleotide
cccuucccuauguccauac

SEQ ID NO: 2837429 - RNA, 19 nt, Artificial Sequence
  Description of Artificial Sequence: Synthetic oligonucleotide
ggguuccuguguugcugcc

SEQ ID NO: 2837430 - RNA, 19 nt, Artificial Sequence
  Description of Artificial Sequence: Synthetic oligonucleotide
cccgaaggcuucaggguuc

SEQ ID NO: 2837431 - RNA, 19 nt, Artificial Sequence
  Description of Artificial Sequence: Synthetic oligonucleotide
ccuguguacacugcuggga

SEQ ID NO: 2837432 - RNA, 19 nt, Artificial Sequence
  Description of Artificial Sequence: Synthetic oligonucleotide
gcuggugauagggguggug

SEQ ID NO: 2837433 - RNA, 19 nt, Artificial Sequence
  Description of Artificial Sequence: Synthetic oligonucleotide
caggccuguguacacugcu

SEQ ID NO: 2837434 - RNA, 19 nt, Artificial Sequence
  Description of Artificial Sequence: Synthetic oligonucleotide
cuccauacugaggucaauu

SEQ ID NO: 2837435 - RNA, 19 nt, Artificial Sequence
  Description of Artificial Sequence: Synthetic oligonucleotide
uacucccauugugguucug

SEQ ID NO: 2837436 - RNA, 19 nt, Artificial Sequence
  Description of Artificial Sequence: Synthetic oligonucleotide
cggcagauaagguacauau

SEQ ID NO: 2837437 - RNA, 19 nt, Artificial Sequence
  Description of Artificial Sequence: Synthetic oligonucleotide
ggaugcucagcagggaccu

SEQ ID NO: 2837438 - RNA, 19 nt, Artificial Sequence
  Description of Artificial Sequence: Synthetic oligonucleotide
ggggugguguuuucagucu

SEQ ID NO: 2837439 - RNA, 19 nt, Artificial Sequence
  Description of Artificial Sequence: Synthetic oligonucleotide
cccuauguccauacagcaa

SEQ ID NO: 2837440 - RNA, 19 nt, Artificial Sequence
  Description of Artificial Sequence: Synthetic oligonucleotide
gugauaggggugguguuuu

SEQ ID NO: 2837441 - RNA, 19 nt, Artificial Sequence
  Description of Artificial Sequence: Synthetic oligonucleotide
aggcggcagauaagguaca

SEQ ID NO: 2837442 - RNA, 19 nt, Artificial Sequence
  Description of Artificial Sequence: Synthetic oligonucleotide
ccauccauucacacuucaa

SEQ ID NO: 2837443 - RNA, 19 nt, Artificial Sequence
  Description of Artificial Sequence: Synthetic oligonucleotide
cucuggcaguccccuguga

SEQ ID NO: 2837444 - RNA, 19 nt, Artificial Sequence
  Description of Artificial Sequence: Synthetic oligonucleotide
ccggguucugacaggccuc

SEQ ID NO: 2837445 - RNA, 19 nt, Artificial Sequence
  Description of Artificial Sequence: Synthetic oligonucleotide
ccgaaggcuucaggguucc

SEQ ID NO: 2837446 - RNA, 19 nt, Artificial Sequence
  Description of Artificial Sequence: Synthetic oligonucleotide
ggugauaggggugguguuu

SEQ ID NO: 2837447 - RNA, 19 nt, Artificial Sequence
  Description of Artificial Sequence: Synthetic oligonucleotide
acccuucccuauguccaua

SEQ ID NO: 2837448 - RNA, 19 nt, Artificial Sequence
  Description of Artificial Sequence: Synthetic oligonucleotide
ccucucggacugcuguguc

SEQ ID NO: 2837449 - RNA, 19 nt, Artificial Sequence
  Description of Artificial Sequence: Synthetic oligonucleotide
cuacucccauugugguucu

SEQ ID NO: 2837450 - RNA, 19 nt, Artificial Sequence
  Description of Artificial Sequence: Synthetic oligonucleotide
gcaauagccuagccacccu

SEQ ID NO: 2837451 - RNA, 19 nt, Artificial Sequence
  Description of Artificial Sequence: Synthetic oligonucleotide
caguccccugugauagagu

SEQ ID NO: 2837452 - RNA, 19 nt, Artificial Sequence
  Description of Artificial Sequence: Synthetic oligonucleotide
cggguucugacaggccucc

SEQ ID NO: 2837453 - RNA, 19 nt, Artificial Sequence
  Description of Artificial Sequence: Synthetic oligonucleotide
ggcaguccccugugauaga

SEQ ID NO: 2837454 - RNA, 19 nt, Artificial Sequence
  Description of Artificial Sequence: Synthetic oligonucleotide
ccuucccuauguccauaca

SEQ ID NO: 2837455 - RNA, 19 nt, Artificial Sequence
  Description of Artificial Sequence: Synthetic oligonucleotide
ggacugcugugucaccaau

SEQ ID NO: 2837456 - RNA, 19 nt, Artificial Sequence
  Description of Artificial Sequence: Synthetic oligonucleotide
cccugcuggugauaggggu

SEQ ID NO: 2837457 - RNA, 19 nt, Artificial Sequence
  Description of Artificial Sequence: Synthetic oligonucleotide
ccuagccacccugcuggug

SEQ ID NO: 2837458 - RNA, 19 nt, Artificial Sequence
  Description of Artificial Sequence: Synthetic oligonucleotide
cgaaaaccucucggacugc

SEQ ID NO: 2837459 - RNA, 19 nt, Artificial Sequence
  Description of Artificial Sequence: Synthetic oligonucleotide
cagcacuuuucuggugcua

SEQ ID NO: 2837460 - RNA, 19 nt, Artificial Sequence
  Description of Artificial Sequence: Synthetic oligonucleotide
gcggcagauaagguacaua

SEQ ID NO: 2837461 - RNA, 19 nt, Artificial Sequence
  Description of Artificial Sequence: Synthetic oligonucleotide
gcugugucaccaauaucuu

SEQ ID NO: 2837462 - RNA, 19 nt, Artificial Sequence
  Description of Artificial Sequence: Synthetic oligonucleotide
cccugugauagaguuugua

SEQ ID NO: 2837463 - RNA, 19 nt, Artificial Sequence
  Description of Artificial Sequence: Synthetic oligonucleotide
ccagcacuuuucuggugcu

SEQ ID NO: 2837464 - RNA, 19 nt, Artificial Sequence
  Description of Artificial Sequence: Synthetic oligonucleotide
cgaccagcacuuuucuggu

SEQ ID NO: 2837465 - RNA, 19 nt, Artificial Sequence
  Description of Artificial Sequence: Synthetic oligonucleotide
cugcugggaguuccuccau

SEQ ID NO: 2837466 - RNA, 19 nt, Artificial Sequence
  Description of Artificial Sequence: Synthetic oligonucleotide
cuuguacgaccagcacuuu

SEQ ID NO: 2837467 - RNA, 19 nt, Artificial Sequence
  Description of Artificial Sequence: Synthetic oligonucleotide
ggcggcagauaagguacau

SEQ ID NO: 2837468 - RNA, 19 nt, Artificial Sequence
  Description of Artificial Sequence: Synthetic oligonucleotide
cggacugcugugucaccaa

SEQ ID NO: 2837469 - RNA, 19 nt, Artificial Sequence
  Description of Artificial Sequence: Synthetic oligonucleotide
gccuagccacccugcuggu

SEQ ID NO: 2837470 - RNA, 19 nt, Artificial Sequence
  Description of Artificial Sequence: Synthetic oligonucleotide
cgacuucccgaaggcuuca

SEQ ID NO: 2837471 - RNA, 19 nt, Artificial Sequence
  Description of Artificial Sequence: Synthetic oligonucleotide
ccuccauacugaggucaau

SEQ ID NO: 2837472 - RNA, 19 nt, Artificial Sequence
  Description of Artificial Sequence: Synthetic oligonucleotide
uuauuugaaacucugaucu

SEQ ID NO: 2837473 - RNA, 19 nt, Artificial Sequence
  Description of Artificial Sequence: Synthetic oligonucleotide
aaaaccuucccgucggucc

SEQ ID NO: 2837474 - RNA, 19 nt, Artificial Sequence
  Description of Artificial Sequence: Synthetic oligonucleotide
auagaacuuuauuugaaac

SEQ ID NO: 2837475 - RNA, 19 nt, Artificial Sequence
  Description of Artificial Sequence: Synthetic oligonucleotide
acugaaacugcacagcucg

SEQ ID NO: 2837476 - RNA, 19 nt, Artificial Sequence
  Description of Artificial Sequence: Synthetic oligonucleotide
auuaagaaacuggaaaacc

SEQ ID NO: 2837477 - RNA, 19 nt, Artificial Sequence
  Description of Artificial Sequence: Synthetic oligonucleotide
gaaacucugaucuaccaag

SEQ ID NO: 2837478 - RNA, 19 nt, Artificial Sequence
  Description of Artificial Sequence: Synthetic oligonucleotide
aauuuaacugcccggcggg

SEQ ID NO: 2837479 - RNA, 19 nt, Artificial Sequence
  Description of Artificial Sequence: Synthetic oligonucleotide
uuaagaaacuggaaaaccu

SEQ ID NO: 2837480 - RNA, 19 nt, Artificial Sequence
  Description of Artificial Sequence: Synthetic oligonucleotide
ugcauuaagaaacuggaaa

SEQ ID NO: 2837481 - RNA, 19 nt, Artificial Sequence
  Description of Artificial Sequence: Synthetic oligonucleotide
agaacuuuauuugaaacuc

SEQ ID NO: 2837482 - RNA, 19 nt, Artificial Sequence
  Description of Artificial Sequence: Synthetic oligonucleotide
aaacuggaaaaccuucccg

SEQ ID NO: 2837483 - RNA, 19 nt, Artificial Sequence
  Description of Artificial Sequence: Synthetic oligonucleotide
gaauuuaacugcccggcgg

SEQ ID NO: 2837484 - RNA, 19 nt, Artificial Sequence
  Description of Artificial Sequence: Synthetic oligonucleotide
acaaucuuuuguuuagggg

SEQ ID NO: 2837485 - RNA, 19 nt, Artificial Sequence
  Description of Artificial Sequence: Synthetic oligonucleotide
aucuuguacccacugaaac

SEQ ID NO: 2837486 - RNA, 19 nt, Artificial Sequence
  Description of Artificial Sequence: Synthetic oligonucleotide
uuuguaggggccuuggcag

SEQ ID NO: 2837487 - RNA, 19 nt, Artificial Sequence
  Description of Artificial Sequence: Synthetic oligonucleotide
uuuuccaccaacucgggga

SEQ ID NO: 2837488 - RNA, 19 nt, Artificial Sequence
  Description of Artificial Sequence: Synthetic oligonucleotide
uuuauuugaaacucugauc

SEQ ID NO: 2837489 - RNA, 19 nt, Artificial Sequence
  Description of Artificial Sequence: Synthetic oligonucleotide
uuuuggaaaggaaugcgga

SEQ ID NO: 2837490 - RNA, 19 nt, Artificial Sequence
  Description of Artificial Sequence: Synthetic oligonucleotide
aauuucuuccgacuguccu

SEQ ID NO: 2837491 - RNA, 19 nt, Artificial Sequence
  Description of Artificial Sequence: Synthetic oligonucleotide
auuugaaacucugaucuac

SEQ ID NO: 2837492 - RNA, 19 nt, Artificial Sequence
  Description of Artificial Sequence: Synthetic oligonucleotide
ugaucuaccaaguuagcgu

SEQ ID NO: 2837493 - RNA, 19 nt, Artificial Sequence
  Description of Artificial Sequence: Synthetic oligonucleotide
cucugaucuaccaaguuag

SEQ ID NO: 2837494 - RNA, 19 nt, Artificial Sequence
  Description of Artificial Sequence: Synthetic oligonucleotide
uagaacuuuauuugaaacu

SEQ ID NO: 2837495 - RNA, 19 nt, Artificial Sequence
  Description of Artificial Sequence: Synthetic oligonucleotide
uucacaaucuuuuguuuag

SEQ ID NO: 2837496 - RNA, 19 nt, Artificial Sequence
  Description of Artificial Sequence: Synthetic oligonucleotide
aacuggaaaaccuucccgu

SEQ ID NO: 2837497 - RNA, 19 nt, Artificial Sequence
  Description of Artificial Sequence: Synthetic oligonucleotide
cuuuuggaaaggaaugcgg

SEQ ID NO: 2837498 - RNA, 19 nt, Artificial Sequence
  Description of Artificial Sequence: Synthetic oligonucleotide
caaguuagcguuuuccacc

SEQ ID NO: 2837499 - RNA, 19 nt, Artificial Sequence
  Description of Artificial Sequence: Synthetic oligonucleotide
uuuuguaggggccuuggca

SEQ ID NO: 2837500 - RNA, 19 nt, Artificial Sequence
  Description of Artificial Sequence: Synthetic oligonucleotide
agcguuuuccaccaacucg

SEQ ID NO: 2837501 - RNA, 19 nt, Artificial Sequence
  Description of Artificial Sequence: Synthetic oligonucleotide
uuccuuuuggaaaggaaug

SEQ ID NO: 2837502 - RNA, 19 nt, Artificial Sequence
  Description of Artificial Sequence: Synthetic oligonucleotide
uuuguguuuucuucuguag

SEQ ID NO: 2837503 - RNA, 19 nt, Artificial Sequence
  Description of Artificial Sequence: Synthetic oligonucleotide
uuugaaacucugaucuacc

SEQ ID NO: 2837504 - RNA, 19 nt, Artificial Sequence
  Description of Artificial Sequence: Synthetic oligonucleotide
uguuuucuucuguagagga

SEQ ID NO: 2837505 - RNA, 19 nt, Artificial Sequence
  Description of Artificial Sequence: Synthetic oligonucleotide
uggaaaaccuucccgucgg

SEQ ID NO: 2837506 - RNA, 19 nt, Artificial Sequence
  Description of Artificial Sequence: Synthetic oligonucleotide
uuuucuucuguagaggaca

SEQ ID NO: 2837507 - RNA, 19 nt, Artificial Sequence
  Description of Artificial Sequence: Synthetic oligonucleotide
uucuguagaggacagucca

SEQ ID NO: 2837508 - RNA, 19 nt, Artificial Sequence
  Description of Artificial Sequence: Synthetic oligonucleotide
aagaaacuggaaaaccuuc

SEQ ID NO: 2837509 - RNA, 19 nt, Artificial Sequence
  Description of Artificial Sequence: Synthetic oligonucleotide
uuuugaauuucuuccgacu

SEQ ID NO: 2837510 - RNA, 19 nt, Artificial Sequence
  Description of Artificial Sequence: Synthetic oligonucleotide
cacgcuggaauuuaacugc

SEQ ID NO: 2837511 - RNA, 19 nt, Artificial Sequence
  Description of Artificial Sequence: Synthetic oligonucleotide
uucugauuccucuuggcca

SEQ ID NO: 2837512 - RNA, 19 nt, Artificial Sequence
  Description of Artificial Sequence: Synthetic oligonucleotide
agaaacuggaaaaccuucc

SEQ ID NO: 2837513 - RNA, 19 nt, Artificial Sequence
  Description of Artificial Sequence: Synthetic oligonucleotide
uuaggggcugcuuuuguag

SEQ ID NO: 2837514 - RNA, 19 nt, Artificial Sequence
  Description of Artificial Sequence: Synthetic oligonucleotide
aaugcggacucgcauuuug

SEQ ID NO: 2837515 - RNA, 19 nt, Artificial Sequence
  Description of Artificial Sequence: Synthetic oligonucleotide
ucuuuugaauuucuuccga

SEQ ID NO: 2837516 - RNA, 19 nt, Artificial Sequence
  Description of Artificial Sequence: Synthetic oligonucleotide
aacuuuauuugaaacucug

SEQ ID NO: 2837517 - RNA, 19 nt, Artificial Sequence
  Description of Artificial Sequence: Synthetic oligonucleotide
caugauaucagcaagggau

SEQ ID NO: 2837518 - RNA, 19 nt, Artificial Sequence
  Description of Artificial Sequence: Synthetic oligonucleotide
aaacugcacagcucgaccu

SEQ ID NO: 2837519 - RNA, 19 nt, Artificial Sequence
  Description of Artificial Sequence: Synthetic oligonucleotide
cacaaucuuuuguuuaggg

SEQ ID NO: 2837520 - RNA, 19 nt, Artificial Sequence
  Description of Artificial Sequence: Synthetic oligonucleotide
ucugguuucugauuccucu

SEQ ID NO: 2837521 - RNA, 19 nt, Artificial Sequence
  Description of Artificial Sequence: Synthetic oligonucleotide
gacaguccaguuuaucugc

SEQ ID NO: 2837522 - RNA, 19 nt, Artificial Sequence
  Description of Artificial Sequence: Synthetic oligonucleotide
ucuuguacccacugaaacu

SEQ ID NO: 2837523 - RNA, 19 nt, Artificial Sequence
  Description of Artificial Sequence: Synthetic oligonucleotide
ucgcauuuugcauuaagaa

SEQ ID NO: 2837524 - RNA, 19 nt, Artificial Sequence
  Description of Artificial Sequence: Synthetic oligonucleotide
auaucagcaagggaugcac

SEQ ID NO: 2837525 - RNA, 19 nt, Artificial Sequence
  Description of Artificial Sequence: Synthetic oligonucleotide
aaguuagcguuuuccacca

SEQ ID NO: 2837526 - RNA, 19 nt, Artificial Sequence
  Description of Artificial Sequence: Synthetic oligonucleotide
uuagcguuuuccaccaacu

SEQ ID NO: 2837527 - RNA, 19 nt, Artificial Sequence
  Description of Artificial Sequence: Synthetic oligonucleotide
uagaggacaguccaguuua

SEQ ID NO: 2837528 - RNA, 19 nt, Artificial Sequence
  Description of Artificial Sequence: Synthetic oligonucleotide
gcauuuugcauuaagaaac

SEQ ID NO: 2837529 - RNA, 19 nt, Artificial Sequence
  Description of Artificial Sequence: Synthetic oligonucleotide
gauagaacuuuauuugaaa

SEQ ID NO: 2837530 - RNA, 19 nt, Artificial Sequence
  Description of Artificial Sequence: Synthetic oligonucleotide
gaaacugcacagcucgacc

SEQ ID NO: 2837531 - RNA, 19 nt, Artificial Sequence
  Description of Artificial Sequence: Synthetic oligonucleotide
uggaauuuaacugcccggc

SEQ ID NO: 2837532 - RNA, 19 nt, Artificial Sequence
  Description of Artificial Sequence: Synthetic oligonucleotide
aggacaguccaguuuaucu

SEQ ID NO: 2837533 - RNA, 19 nt, Artificial Sequence
  Description of Artificial Sequence: Synthetic oligonucleotide
uuuggaaaggaaugcggac

SEQ ID NO: 2837534 - RNA, 19 nt, Artificial Sequence
  Description of Artificial Sequence: Synthetic oligonucleotide
uuuguuuaggggcugcuuu

SEQ ID NO: 2837535 - RNA, 19 nt, Artificial Sequence
  Description of Artificial Sequence: Synthetic oligonucleotide
cuggaauuuaacugcccgg

SEQ ID NO: 2837536 - RNA, 19 nt, Artificial Sequence
  Description of Artificial Sequence: Synthetic oligonucleotide
uuucuucuguagaggacag

SEQ ID NO: 2837537 - RNA, 19 nt, Artificial Sequence
  Description of Artificial Sequence: Synthetic oligonucleotide
uugaauuucuuccgacugu

SEQ ID NO: 2837538 - RNA, 19 nt, Artificial Sequence
  Description of Artificial Sequence: Synthetic oligonucleotide
uuuccaccaacucggggag

SEQ ID NO: 2837539 - RNA, 19 nt, Artificial Sequence
  Description of Artificial Sequence: Synthetic oligonucleotide
agggaugcaccagugaugg

SEQ ID NO: 2837540 - RNA, 19 nt, Artificial Sequence
  Description of Artificial Sequence: Synthetic oligonucleotide
acuucugguuucugauucc

SEQ ID NO: 2837541 - RNA, 19 nt, Artificial Sequence
  Description of Artificial Sequence: Synthetic oligonucleotide
ugaaacucugaucuaccaa

SEQ ID NO: 2837542 - RNA, 19 nt, Artificial Sequence
  Description of Artificial Sequence: Synthetic oligonucleotide
cuuuugaauuucuuccgac

SEQ ID NO: 2837543 - RNA, 19 nt, Artificial Sequence
  Description of Artificial Sequence: Synthetic oligonucleotide
acuggaaaaccuucccguc

SEQ ID NO: 2837544 - RNA, 19 nt, Artificial Sequence
  Description of Artificial Sequence: Synthetic oligonucleotide
ucuucuguagaggacaguc

SEQ ID NO: 2837545 - RNA, 19 nt, Artificial Sequence
  Description of Artificial Sequence: Synthetic oligonucleotide
cauuaagaaacuggaaaac

SEQ ID NO: 2837546 - RNA, 19 nt, Artificial Sequence
  Description of Artificial Sequence: Synthetic oligonucleotide
cuuguacccacugaaacug

SEQ ID NO: 2837547 - RNA, 19 nt, Artificial Sequence
  Description of Artificial Sequence: Synthetic oligonucleotide
uccuuggcagcccggauag

SEQ ID NO: 2837548 - RNA, 19 nt, Artificial Sequence
  Description of Artificial Sequence: Synthetic oligonucleotide
agaucuuguacccacugaa

SEQ ID NO: 2837549 - RNA, 19 nt, Artificial Sequence
  Description of Artificial Sequence: Synthetic oligonucleotide
agugauggcacgcuggaau

SEQ ID NO: 2837550 - RNA, 19 nt, Artificial Sequence
  Description of Artificial Sequence: Synthetic oligonucleotide
uggccaugauaucagcaag

SEQ ID NO: 2837551 - RNA, 19 nt, Artificial Sequence
  Description of Artificial Sequence: Synthetic oligonucleotide
uugaaacucugaucuacca

SEQ ID NO: 2837552 - RNA, 19 nt, Artificial Sequence
  Description of Artificial Sequence: Synthetic oligonucleotide
ucuguagaggacaguccag

SEQ ID NO: 2837553 - RNA, 19 nt, Artificial Sequence
  Description of Artificial Sequence: Synthetic oligonucleotide
cugaucuaccaaguuagcg

SEQ ID NO: 2837554 - RNA, 19 nt, Artificial Sequence
  Description of Artificial Sequence: Synthetic oligonucleotide
cuggaaaaccuucccgucg

SEQ ID NO: 2837555 - RNA, 19 nt, Artificial Sequence
  Description of Artificial Sequence: Synthetic oligonucleotide
gagcuuuccugacuucugg

SEQ ID NO: 2837556 - RNA, 19 nt, Artificial Sequence
  Description of Artificial Sequence: Synthetic oligonucleotide
cuuggaugccugcuuagcc

SEQ ID NO: 2837557 - RNA, 19 nt, Artificial Sequence
  Description of Artificial Sequence: Synthetic oligonucleotide
uccuuuuggaaaggaaugc

SEQ ID NO: 2837558 - RNA, 19 nt, Artificial Sequence
  Description of Artificial Sequence: Synthetic oligonucleotide
uuuuguguuuucuucugua

SEQ ID NO: 2837559 - RNA, 19 nt, Artificial Sequence
  Description of Artificial Sequence: Synthetic oligonucleotide
uacccacugaaacugcaca

SEQ ID NO: 2837560 - RNA, 19 nt, Artificial Sequence
  Description of Artificial Sequence: Synthetic oligonucleotide
uuggccaugauaucagcaa

SEQ ID NO: 2837561 - RNA, 19 nt, Artificial Sequence
  Description of Artificial Sequence: Synthetic oligonucleotide
uccaguuuaucugccgagg

SEQ ID NO: 2837562 - RNA, 19 nt, Artificial Sequence
  Description of Artificial Sequence: Synthetic oligonucleotide
uuggaaaggaaugcggacu

SEQ ID NO: 2837563 - RNA, 19 nt, Artificial Sequence
  Description of Artificial Sequence: Synthetic oligonucleotide
cuucacaggcuucacaauc

SEQ ID NO: 2837564 - RNA, 19 nt, Artificial Sequence
  Description of Artificial Sequence: Synthetic oligonucleotide
accaaguuagcguuuucca

SEQ ID NO: 2837565 - RNA, 19 nt, Artificial Sequence
  Description of Artificial Sequence: Synthetic oligonucleotide
ugguuucugauuccucuug

SEQ ID NO: 2837566 - RNA, 19 nt, Artificial Sequence
  Description of Artificial Sequence: Synthetic oligonucleotide
gcuggaauuuaacugcccg

SEQ ID NO: 2837567 - RNA, 19 nt, Artificial Sequence
  Description of Artificial Sequence: Synthetic oligonucleotide
ucacaaucuuuuguuuagg

SEQ ID NO: 2837568 - RNA, 19 nt, Artificial Sequence
  Description of Artificial Sequence: Synthetic oligonucleotide
uaccaaguuagcguuuucc

SEQ ID NO: 2837569 - RNA, 19 nt, Artificial Sequence
  Description of Artificial Sequence: Synthetic oligonucleotide
cuucuguagaggacagucc

SEQ ID NO: 2837570 - RNA, 19 nt, Artificial Sequence
  Description of Artificial Sequence: Synthetic oligonucleotide
aaggaaugcggacucgcau

SEQ ID NO: 2837571 - RNA, 19 nt, Artificial Sequence
  Description of Artificial Sequence: Synthetic oligonucleotide
uugcugucuucuuggaugc

SEQ ID NO: 2837572 - RNA, 19 nt, Artificial Sequence
  Description of Artificial Sequence: Synthetic oligonucleotide
uuuugcuuccuuggcagcc

SEQ ID NO: 2837573 - RNA, 19 nt, Artificial Sequence
  Description of Artificial Sequence: Synthetic oligonucleotide
uguacccacugaaacugca

SEQ ID NO: 2837574 - RNA, 19 nt, Artificial Sequence
  Description of Artificial Sequence: Synthetic oligonucleotide
uagaucuuguacccacuga

SEQ ID NO: 2837575 - RNA, 19 nt, Artificial Sequence
  Description of Artificial Sequence: Synthetic oligonucleotide
gaaaggaaugcggacucgc

SEQ ID NO: 2837576 - RNA, 19 nt, Artificial Sequence
  Description of Artificial Sequence: Synthetic oligonucleotide
ugagcuuuccugacuucug

SEQ ID NO: 2837577 - RNA, 19 nt, Artificial Sequence
  Description of Artificial Sequence: Synthetic oligonucleotide
ucugaucuaccaaguuagc

SEQ ID NO: 2837578 - RNA, 19 nt, Artificial Sequence
  Description of Artificial Sequence: Synthetic oligonucleotide
uaggggcugcuuuuguagg

SEQ ID NO: 2837579 - RNA, 19 nt, Artificial Sequence
  Description of Artificial Sequence: Synthetic oligonucleotide
aacucggggagcagagacc

SEQ ID NO: 2837580 - RNA, 19 nt, Artificial Sequence
  Description of Artificial Sequence: Synthetic oligonucleotide
aaaccuucccgucgguccu

SEQ ID NO: 2837581 - RNA, 19 nt, Artificial Sequence
  Description of Artificial Sequence: Synthetic oligonucleotide
ugaauuucuuccgacuguc

SEQ ID NO: 2837582 - RNA, 19 nt, Artificial Sequence
  Description of Artificial Sequence: Synthetic oligonucleotide
ucugauuccucuuggccau

SEQ ID NO: 2837583 - RNA, 19 nt, Artificial Sequence
  Description of Artificial Sequence: Synthetic oligonucleotide
acucugaucuaccaaguua

SEQ ID NO: 2837584 - RNA, 19 nt, Artificial Sequence
  Description of Artificial Sequence: Synthetic oligonucleotide
auuccuuuuggaaaggaau

SEQ ID NO: 2837585 - RNA, 19 nt, Artificial Sequence
  Description of Artificial Sequence: Synthetic oligonucleotide
uaucagcaagggaugcacc

SEQ ID NO: 2837586 - RNA, 19 nt, Artificial Sequence
  Description of Artificial Sequence: Synthetic oligonucleotide
guagaucuuguacccacug

SEQ ID NO: 2837587 - RNA, 19 nt, Artificial Sequence
  Description of Artificial Sequence: Synthetic oligonucleotide
acucgcauuuugcauuaag

SEQ ID NO: 2837588 - RNA, 19 nt, Artificial Sequence
  Description of Artificial Sequence: Synthetic oligonucleotide
ugauaucagcaagggaugc

SEQ ID NO: 2837589 - RNA, 19 nt, Artificial Sequence
  Description of Artificial Sequence: Synthetic oligonucleotide
acccacugaaacugcacag

SEQ ID NO: 2837590 - RNA, 19 nt, Artificial Sequence
  Description of Artificial Sequence: Synthetic oligonucleotide
guuucugauuccucuuggc

SEQ ID NO: 2837591 - RNA, 19 nt, Artificial Sequence
  Description of Artificial Sequence: Synthetic oligonucleotide
guuagcguuuuccaccaac

SEQ ID NO: 2837592 - RNA, 19 nt, Artificial Sequence
  Description of Artificial Sequence: Synthetic oligonucleotide
uuaucugccgaggauuccu

SEQ ID NO: 2837593 - RNA, 19 nt, Artificial Sequence
  Description of Artificial Sequence: Synthetic oligonucleotide
ugccgaggauuccuuuugg

SEQ ID NO: 2837594 - RNA, 19 nt, Artificial Sequence
  Description of Artificial Sequence: Synthetic oligonucleotide
cucgcauuuugcauuaaga

SEQ ID NO: 2837595 - RNA, 19 nt, Artificial Sequence
  Description of Artificial Sequence: Synthetic oligonucleotide
guguuuucuucuguagagg

SEQ ID NO: 2837596 - RNA, 19 nt, Artificial Sequence
  Description of Artificial Sequence: Synthetic oligonucleotide
cuuuauuugaaacucugau

SEQ ID NO: 2837597 - RNA, 19 nt, Artificial Sequence
  Description of Artificial Sequence: Synthetic oligonucleotide
guuuuccaccaacucgggg

SEQ ID NO: 2837598 - RNA, 19 nt, Artificial Sequence
  Description of Artificial Sequence: Synthetic oligonucleotide
uucuuggaugccugcuuag

SEQ ID NO: 2837599 - RNA, 19 nt, Artificial Sequence
  Description of Artificial Sequence: Synthetic oligonucleotide
gguuucugauuccucuugg

SEQ ID NO: 2837600 - RNA, 19 nt, Artificial Sequence
  Description of Artificial Sequence: Synthetic oligonucleotide
gcauuaagaaacuggaaaa

SEQ ID NO: 2837601 - RNA, 19 nt, Artificial Sequence
  Description of Artificial Sequence: Synthetic oligonucleotide
cuuggcagcccggauagcc

SEQ ID NO: 2837602 - RNA, 19 nt, Artificial Sequence
  Description of Artificial Sequence: Synthetic oligonucleotide
uuaacugcccggcggguuc

SEQ ID NO: 2837603 - RNA, 19 nt, Artificial Sequence
  Description of Artificial Sequence: Synthetic oligonucleotide
ggaauuuaacugcccggcg

SEQ ID NO: 2837604 - RNA, 19 nt, Artificial Sequence
  Description of Artificial Sequence: Synthetic oligonucleotide
aacucugaucuaccaaguu

SEQ ID NO: 2837605 - RNA, 19 nt, Artificial Sequence
  Description of Artificial Sequence: Synthetic oligonucleotide
gagcagagaccuucacagg

SEQ ID NO: 2837606 - RNA, 19 nt, Artificial Sequence
  Description of Artificial Sequence: Synthetic oligonucleotide
caacucggggagcagagac

SEQ ID NO: 2837607 - RNA, 19 nt, Artificial Sequence
  Description of Artificial Sequence: Synthetic oligonucleotide
ugaaacugcacagcucgac

SEQ ID NO: 2837608 - RNA, 19 nt, Artificial Sequence
  Description of Artificial Sequence: Synthetic oligonucleotide
aaacucugaucuaccaagu

SEQ ID NO: 2837609 - RNA, 19 nt, Artificial Sequence
  Description of Artificial Sequence: Synthetic oligonucleotide
augauaucagcaagggaug

SEQ ID NO: 2837610 - RNA, 19 nt, Artificial Sequence
  Description of Artificial Sequence: Synthetic oligonucleotide
aguuuaucugccgaggauu

SEQ ID NO: 2837611 - RNA, 19 nt, Artificial Sequence
  Description of Artificial Sequence: Synthetic oligonucleotide
gcguuuuccaccaacucgg

SEQ ID NO: 2837612 - RNA, 19 nt, Artificial Sequence
  Description of Artificial Sequence: Synthetic oligonucleotide
aagggaugcaccagugaug

SEQ ID NO: 2837613 - RNA, 19 nt, Artificial Sequence
  Description of Artificial Sequence: Synthetic oligonucleotide
ugcggacucgcauuuugca

SEQ ID NO: 2837614 - RNA, 19 nt, Artificial Sequence
  Description of Artificial Sequence: Synthetic oligonucleotide
uauuugaaacucugaucua

SEQ ID NO: 2837615 - RNA, 19 nt, Artificial Sequence
  Description of Artificial Sequence: Synthetic oligonucleotide
ucagcaagggaugcaccag

SEQ ID NO: 2837616 - RNA, 19 nt, Artificial Sequence
  Description of Artificial Sequence: Synthetic oligonucleotide
uucccgucgguccuggcgu

SEQ ID NO: 2837617 - RNA, 19 nt, Artificial Sequence
  Description of Artificial Sequence: Synthetic oligonucleotide
ggacaguccaguuuaucug

SEQ ID NO: 2837618 - RNA, 19 nt, Artificial Sequence
  Description of Artificial Sequence: Synthetic oligonucleotide
aggcuucacaaucuuuugu

SEQ ID NO: 2837619 - RNA, 19 nt, Artificial Sequence
  Description of Artificial Sequence: Synthetic oligonucleotide
uuguacccacugaaacugc

SEQ ID NO: 2837620 - RNA, 19 nt, Artificial Sequence
  Description of Artificial Sequence: Synthetic oligonucleotide
ucgguccuggcguagcgcc

SEQ ID NO: 2837621 - RNA, 19 nt, Artificial Sequence
  Description of Artificial Sequence: Synthetic oligonucleotide
cuucccgucgguccuggcg

SEQ ID NO: 2837622 - RNA, 19 nt, Artificial Sequence
  Description of Artificial Sequence: Synthetic oligonucleotide
uuuaggggcugcuuuugua

SEQ ID NO: 2837623 - RNA, 19 nt, Artificial Sequence
  Description of Artificial Sequence: Synthetic oligonucleotide
uguuuaggggcugcuuuug

SEQ ID NO: 2837624 - RNA, 19 nt, Artificial Sequence
  Description of Artificial Sequence: Synthetic oligonucleotide
ucuuuuguuuaggggcugc

SEQ ID NO: 2837625 - RNA, 19 nt, Artificial Sequence
  Description of Artificial Sequence: Synthetic oligonucleotide
ucuuggaugccugcuuagc

SEQ ID NO: 2837626 - RNA, 19 nt, Artificial Sequence
  Description of Artificial Sequence: Synthetic oligonucleotide
acaguccaguuuaucugcc

SEQ ID NO: 2837627 - RNA, 19 nt, Artificial Sequence
  Description of Artificial Sequence: Synthetic oligonucleotide
acuuuauuugaaacucuga

SEQ ID NO: 2837628 - RNA, 19 nt, Artificial Sequence
  Description of Artificial Sequence: Synthetic oligonucleotide
agauagaacuuuauuugaa

SEQ ID NO: 2837629 - RNA, 19 nt, Artificial Sequence
  Description of Artificial Sequence: Synthetic oligonucleotide
gcacgcuggaauuuaacug

SEQ ID NO: 2837630 - RNA, 19 nt, Artificial Sequence
  Description of Artificial Sequence: Synthetic oligonucleotide
guccaguuuaucugccgag

SEQ ID NO: 2837631 - RNA, 19 nt, Artificial Sequence
  Description of Artificial Sequence: Synthetic oligonucleotide
aaaggaaugcggacucgca

SEQ ID NO: 2837632 - RNA, 19 nt, Artificial Sequence
  Description of Artificial Sequence: Synthetic oligonucleotide
cuucacaaucuuuuguuua

SEQ ID NO: 2837633 - RNA, 19 nt, Artificial Sequence
  Description of Artificial Sequence: Synthetic oligonucleotide
uuugcuuccuuggcagccc

SEQ ID NO: 2837634 - RNA, 19 nt, Artificial Sequence
  Description of Artificial Sequence: Synthetic oligonucleotide
uuuaucugccgaggauucc

SEQ ID NO: 2837635 - RNA, 19 nt, Artificial Sequence
  Description of Artificial Sequence: Synthetic oligonucleotide
gaugcaccagugauggcac

SEQ ID NO: 2837636 - RNA, 19 nt, Artificial Sequence
  Description of Artificial Sequence: Synthetic oligonucleotide
acgcuggaauuuaacugcc

SEQ ID NO: 2837637 - RNA, 19 nt, Artificial Sequence
  Description of Artificial Sequence: Synthetic oligonucleotide
gauagccugcucucgcuga

SEQ ID NO: 2837638 - RNA, 19 nt, Artificial Sequence
  Description of Artificial Sequence: Synthetic oligonucleotide
uagcguuuuccaccaacuc

SEQ ID NO: 2837639 - RNA, 19 nt, Artificial Sequence
  Description of Artificial Sequence: Synthetic oligonucleotide
gaauuucuuccgacugucc

SEQ ID NO: 2837640 - RNA, 19 nt, Artificial Sequence
  Description of Artificial Sequence: Synthetic oligonucleotide
cuuuuguaggggccuuggc

SEQ ID NO: 2837641 - RNA, 19 nt, Artificial Sequence
  Description of Artificial Sequence: Synthetic oligonucleotide
gauaucagcaagggaugca

SEQ ID NO: 2837642 - RNA, 19 nt, Artificial Sequence
  Description of Artificial Sequence: Synthetic oligonucleotide
auagccugcucucgcugag

SEQ ID NO: 2837643 - RNA, 19 nt, Artificial Sequence
  Description of Artificial Sequence: Synthetic oligonucleotide
caguccaguuuaucugccg

SEQ ID NO: 2837644 - RNA, 19 nt, Artificial Sequence
  Description of Artificial Sequence: Synthetic oligonucleotide
cugucuucuuggaugccug

SEQ ID NO: 2837645 - RNA, 19 nt, Artificial Sequence
  Description of Artificial Sequence: Synthetic oligonucleotide
aggaaugcggacucgcauu

SEQ ID NO: 2837646 - RNA, 19 nt, Artificial Sequence
  Description of Artificial Sequence: Synthetic oligonucleotide
ugcaccagugauggcacgc

SEQ ID NO: 2837647 - RNA, 19 nt, Artificial Sequence
  Description of Artificial Sequence: Synthetic oligonucleotide
uuccuuggcagcccggaua

SEQ ID NO: 2837648 - RNA, 19 nt, Artificial Sequence
  Description of Artificial Sequence: Synthetic oligonucleotide
acaggcuucacaaucuuuu

SEQ ID NO: 2837649 - RNA, 19 nt, Artificial Sequence
  Description of Artificial Sequence: Synthetic oligonucleotide
caggcuucacaaucuuuug

SEQ ID NO: 2837650 - RNA, 19 nt, Artificial Sequence
  Description of Artificial Sequence: Synthetic oligonucleotide
uguagaggacaguccaguu

SEQ ID NO: 2837651 - RNA, 19 nt, Artificial Sequence
  Description of Artificial Sequence: Synthetic oligonucleotide
uuguuuaggggcugcuuuu

SEQ ID NO: 2837652 - RNA, 19 nt, Artificial Sequence
  Description of Artificial Sequence: Synthetic oligonucleotide
uuguaggggccuuggcagc

SEQ ID NO: 2837653 - RNA, 19 nt, Artificial Sequence
  Description of Artificial Sequence: Synthetic oligonucleotide
ucuaccaaguuagcguuuu

SEQ ID NO: 2837654 - RNA, 19 nt, Artificial Sequence
  Description of Artificial Sequence: Synthetic oligonucleotide
gaucuaccaaguuagcguu

SEQ ID NO: 2837655 - RNA, 19 nt, Artificial Sequence
  Description of Artificial Sequence: Synthetic oligonucleotide
agcccggauagccugcucu

SEQ ID NO: 2837656 - RNA, 19 nt, Artificial Sequence
  Description of Artificial Sequence: Synthetic oligonucleotide
gauuccuuuuggaaaggaa

SEQ ID NO: 2837657 - RNA, 19 nt, Artificial Sequence
  Description of Artificial Sequence: Synthetic oligonucleotide
aacugcacagcucgaccuu

SEQ ID NO: 2837658 - RNA, 19 nt, Artificial Sequence
  Description of Artificial Sequence: Synthetic oligonucleotide
uuggcagcccggauagccu

SEQ ID NO: 2837659 - RNA, 19 nt, Artificial Sequence
  Description of Artificial Sequence: Synthetic oligonucleotide
cccggguagaucuuguacc

SEQ ID NO: 2837660 - RNA, 19 nt, Artificial Sequence
  Description of Artificial Sequence: Synthetic oligonucleotide
acucggggagcagagaccu

SEQ ID NO: 2837661 - RNA, 19 nt, Artificial Sequence
  Description of Artificial Sequence: Synthetic oligonucleotide
augcggacucgcauuuugc

SEQ ID NO: 2837662 - RNA, 19 nt, Artificial Sequence
  Description of Artificial Sequence: Synthetic oligonucleotide
uuucuuccgacuguccuuu

SEQ ID NO: 2837663 - RNA, 19 nt, Artificial Sequence
  Description of Artificial Sequence: Synthetic oligonucleotide
ccuuuuggaaaggaaugcg

SEQ ID NO: 2837664 - RNA, 19 nt, Artificial Sequence
  Description of Artificial Sequence: Synthetic oligonucleotide
uucugguuucugauuccuc

SEQ ID NO: 2837665 - RNA, 19 nt, Artificial Sequence
  Description of Artificial Sequence: Synthetic oligonucleotide
acugcacagcucgaccuuc

SEQ ID NO: 2837666 - RNA, 19 nt, Artificial Sequence
  Description of Artificial Sequence: Synthetic oligonucleotide
ucugccgaggauuccuuuu

SEQ ID NO: 2837667 - RNA, 19 nt, Artificial Sequence
  Description of Artificial Sequence: Synthetic oligonucleotide
ccaaguuagcguuuuccac

SEQ ID NO: 2837668 - RNA, 19 nt, Artificial Sequence
  Description of Artificial Sequence: Synthetic oligonucleotide
aggauuccuuuuggaaagg

SEQ ID NO: 2837669 - RNA, 19 nt, Artificial Sequence
  Description of Artificial Sequence: Synthetic oligonucleotide
uggaugccugcuuagccuu

SEQ ID NO: 2837670 - RNA, 19 nt, Artificial Sequence
  Description of Artificial Sequence: Synthetic oligonucleotide
ugacuucugguuucugauu

SEQ ID NO: 2837671 - RNA, 19 nt, Artificial Sequence
  Description of Artificial Sequence: Synthetic oligonucleotide
ggaugcaccagugauggca

SEQ ID NO: 2837672 - RNA, 19 nt, Artificial Sequence
  Description of Artificial Sequence: Synthetic oligonucleotide
ggguagaucuuguacccac

SEQ ID NO: 2837673 - RNA, 19 nt, Artificial Sequence
  Description of Artificial Sequence: Synthetic oligonucleotide
cucgcugagcuuuccugac

SEQ ID NO: 2837674 - RNA, 19 nt, Artificial Sequence
  Description of Artificial Sequence: Synthetic oligonucleotide
cauuuugcauuaagaaacu

SEQ ID NO: 2837675 - RNA, 19 nt, Artificial Sequence
  Description of Artificial Sequence: Synthetic oligonucleotide
uuuuguuuaggggcugcuu

SEQ ID NO: 2837676 - RNA, 19 nt, Artificial Sequence
  Description of Artificial Sequence: Synthetic oligonucleotide
uggcagcccggauagccug

SEQ ID NO: 2837677 - RNA, 19 nt, Artificial Sequence
  Description of Artificial Sequence: Synthetic oligonucleotide
gaaaaccuucccgucgguc

SEQ ID NO: 2837678 - RNA, 19 nt, Artificial Sequence
  Description of Artificial Sequence: Synthetic oligonucleotide
cugccgaggauuccuuuug

SEQ ID NO: 2837679 - RNA, 19 nt, Artificial Sequence
  Description of Artificial Sequence: Synthetic oligonucleotide
uggcacgcuggaauuuaac

SEQ ID NO: 2837680 - RNA, 19 nt, Artificial Sequence
  Description of Artificial Sequence: Synthetic oligonucleotide
uguaggggccuuggcagca

SEQ ID NO: 2837681 - RNA, 19 nt, Artificial Sequence
  Description of Artificial Sequence: Synthetic oligonucleotide
ugcuuccuuggcagcccgg

SEQ ID NO: 2837682 - RNA, 19 nt, Artificial Sequence
  Description of Artificial Sequence: Synthetic oligonucleotide
ucggggagcagagaccuuc

SEQ ID NO: 2837683 - RNA, 19 nt, Artificial Sequence
  Description of Artificial Sequence: Synthetic oligonucleotide
ucacaggcuucacaaucuu

SEQ ID NO: 2837684 - RNA, 19 nt, Artificial Sequence
  Description of Artificial Sequence: Synthetic oligonucleotide
agccugcucucgcugagcu

SEQ ID NO: 2837685 - RNA, 19 nt, Artificial Sequence
  Description of Artificial Sequence: Synthetic oligonucleotide
ugauuccucuuggccauga

SEQ ID NO: 2837686 - RNA, 19 nt, Artificial Sequence
  Description of Artificial Sequence: Synthetic oligonucleotide
ucgcugagcuuuccugacu

SEQ ID NO: 2837687 - RNA, 19 nt, Artificial Sequence
  Description of Artificial Sequence: Synthetic oligonucleotide
accaacucggggagcagag

SEQ ID NO: 2837688 - RNA, 19 nt, Artificial Sequence
  Description of Artificial Sequence: Synthetic oligonucleotide
cagcucgaccuucauggug

SEQ ID NO: 2837689 - RNA, 19 nt, Artificial Sequence
  Description of Artificial Sequence: Synthetic oligonucleotide
augcaccagugauggcacg

SEQ ID NO: 2837690 - RNA, 19 nt, Artificial Sequence
  Description of Artificial Sequence: Synthetic oligonucleotide
ccggguagaucuuguaccc

SEQ ID NO: 2837691 - RNA, 19 nt, Artificial Sequence
  Description of Artificial Sequence: Synthetic oligonucleotide
aucuuuuguuuaggggcug

SEQ ID NO: 2837692 - RNA, 19 nt, Artificial Sequence
  Description of Artificial Sequence: Synthetic oligonucleotide
uuuaacugcccggcggguu

SEQ ID NO: 2837693 - RNA, 19 nt, Artificial Sequence
  Description of Artificial Sequence: Synthetic oligonucleotide
agagaccuucacaggcuuc

SEQ ID NO: 2837694 - RNA, 19 nt, Artificial Sequence
  Description of Artificial Sequence: Synthetic oligonucleotide
agaccuucacaggcuucac

SEQ ID NO: 2837695 - RNA, 19 nt, Artificial Sequence
  Description of Artificial Sequence: Synthetic oligonucleotide
ugcuuuuguaggggccuug

SEQ ID NO: 2837696 - RNA, 19 nt, Artificial Sequence
  Description of Artificial Sequence: Synthetic oligonucleotide
acagcucgaccuucauggu

SEQ ID NO: 2837697 - RNA, 19 nt, Artificial Sequence
  Description of Artificial Sequence: Synthetic oligonucleotide
uaucugccgaggauuccuu

SEQ ID NO: 2837698 - RNA, 19 nt, Artificial Sequence
  Description of Artificial Sequence: Synthetic oligonucleotide
agcaagggaugcaccagug

SEQ ID NO: 2837699 - RNA, 19 nt, Artificial Sequence
  Description of Artificial Sequence: Synthetic oligonucleotide
ggaaaggaaugcggacucg

SEQ ID NO: 2837700 - RNA, 19 nt, Artificial Sequence
  Description of Artificial Sequence: Synthetic oligonucleotide
gcuuuuguaggggccuugg

SEQ ID NO: 2837701 - RNA, 19 nt, Artificial Sequence
  Description of Artificial Sequence: Synthetic oligonucleotide
caagggaugcaccagugau

SEQ ID NO: 2837702 - RNA, 19 nt, Artificial Sequence
  Description of Artificial Sequence: Synthetic oligonucleotide
cuucuuggaugccugcuua

SEQ ID NO: 2837703 - RNA, 19 nt, Artificial Sequence
  Description of Artificial Sequence: Synthetic oligonucleotide
uaggggccuuggcagcagc

SEQ ID NO: 2837704 - RNA, 19 nt, Artificial Sequence
  Description of Artificial Sequence: Synthetic oligonucleotide
ggcggguucuuuucuuuug

SEQ ID NO: 2837705 - RNA, 19 nt, Artificial Sequence
  Description of Artificial Sequence: Synthetic oligonucleotide
guacccacugaaacugcac

SEQ ID NO: 2837706 - RNA, 19 nt, Artificial Sequence
  Description of Artificial Sequence: Synthetic oligonucleotide
ggauagccugcucucgcug

SEQ ID NO: 2837707 - RNA, 19 nt, Artificial Sequence
  Description of Artificial Sequence: Synthetic oligonucleotide
auuuaacugcccggcgggu

SEQ ID NO: 2837708 - RNA, 19 nt, Artificial Sequence
  Description of Artificial Sequence: Synthetic oligonucleotide
gauggcacgcuggaauuua

SEQ ID NO: 2837709 - RNA, 19 nt, Artificial Sequence
  Description of Artificial Sequence: Synthetic oligonucleotide
cugacuucugguuucugau

SEQ ID NO: 2837710 - RNA, 19 nt, Artificial Sequence
  Description of Artificial Sequence: Synthetic oligonucleotide
gaggacaguccaguuuauc

SEQ ID NO: 2837711 - RNA, 19 nt, Artificial Sequence
  Description of Artificial Sequence: Synthetic oligonucleotide
uucuucuguagaggacagu

SEQ ID NO: 2837712 - RNA, 19 nt, Artificial Sequence
  Description of Artificial Sequence: Synthetic oligonucleotide
ugcacagcucgaccuucau

SEQ ID NO: 2837713 - RNA, 19 nt, Artificial Sequence
  Description of Artificial Sequence: Synthetic oligonucleotide
guagaggacaguccaguuu

SEQ ID NO: 2837714 - RNA, 19 nt, Artificial Sequence
  Description of Artificial Sequence: Synthetic oligonucleotide
cuaccaaguuagcguuuuc

SEQ ID NO: 2837715 - RNA, 19 nt, Artificial Sequence
  Description of Artificial Sequence: Synthetic oligonucleotide
uuccugacuucugguuucu

SEQ ID NO: 2837716 - RNA, 19 nt, Artificial Sequence
  Description of Artificial Sequence: Synthetic oligonucleotide
ggcacgcuggaauuuaacu

SEQ ID NO: 2837717 - RNA, 19 nt, Artificial Sequence
  Description of Artificial Sequence: Synthetic oligonucleotide
cuuuccugacuucugguuu

SEQ ID NO: 2837718 - RNA, 19 nt, Artificial Sequence
  Description of Artificial Sequence: Synthetic oligonucleotide
ugccccggguagaucuugu

SEQ ID NO: 2837719 - RNA, 19 nt, Artificial Sequence
  Description of Artificial Sequence: Synthetic oligonucleotide
cgcauuuugcauuaagaaa

SEQ ID NO: 2837720 - RNA, 19 nt, Artificial Sequence
  Description of Artificial Sequence: Synthetic oligonucleotide
ugauggcacgcuggaauuu

SEQ ID NO: 2837721 - RNA, 19 nt, Artificial Sequence
  Description of Artificial Sequence: Synthetic oligonucleotide
cugaaacugcacagcucga

SEQ ID NO: 2837722 - RNA, 19 nt, Artificial Sequence
  Description of Artificial Sequence: Synthetic oligonucleotide
ggcuucacaaucuuuuguu

SEQ ID NO: 2837723 - RNA, 19 nt, Artificial Sequence
  Description of Artificial Sequence: Synthetic oligonucleotide
aaccuucccgucgguccug

SEQ ID NO: 2837724 - RNA, 19 nt, Artificial Sequence
  Description of Artificial Sequence: Synthetic oligonucleotide
ccugacuucugguuucuga

SEQ ID NO: 2837725 - RNA, 19 nt, Artificial Sequence
  Description of Artificial Sequence: Synthetic oligonucleotide
uggcguagcgccgcccgug

SEQ ID NO: 2837726 - RNA, 19 nt, Artificial Sequence
  Description of Artificial Sequence: Synthetic oligonucleotide
ugcugucuucuuggaugcc

SEQ ID NO: 2837727 - RNA, 19 nt, Artificial Sequence
  Description of Artificial Sequence: Synthetic oligonucleotide
gcacagcucgaccuucaug

SEQ ID NO: 2837728 - RNA, 19 nt, Artificial Sequence
  Description of Artificial Sequence: Synthetic oligonucleotide
guuuaggggcugcuuuugu

SEQ ID NO: 2837729 - RNA, 19 nt, Artificial Sequence
  Description of Artificial Sequence: Synthetic oligonucleotide
cgaggauuccuuuuggaaa

SEQ ID NO: 2837730 - RNA, 19 nt, Artificial Sequence
  Description of Artificial Sequence: Synthetic oligonucleotide
aucugccgaggauuccuuu

SEQ ID NO: 2837731 - RNA, 19 nt, Artificial Sequence
  Description of Artificial Sequence: Synthetic oligonucleotide
uagccugcucucgcugagc

SEQ ID NO: 2837732 - RNA, 19 nt, Artificial Sequence
  Description of Artificial Sequence: Synthetic oligonucleotide
guagcgccgcccgugcccc

SEQ ID NO: 2837733 - RNA, 19 nt, Artificial Sequence
  Description of Artificial Sequence: Synthetic oligonucleotide
uaacugcccggcggguucu

SEQ ID NO: 2837734 - RNA, 19 nt, Artificial Sequence
  Description of Artificial Sequence: Synthetic oligonucleotide
ugcucucgcugagcuuucc

SEQ ID NO: 2837735 - RNA, 19 nt, Artificial Sequence
  Description of Artificial Sequence: Synthetic oligonucleotide
ccuggcguagcgccgcccg

SEQ ID NO: 2837736 - RNA, 19 nt, Artificial Sequence
  Description of Artificial Sequence: Synthetic oligonucleotide
gcaagggaugcaccaguga

SEQ ID NO: 2837737 - RNA, 19 nt, Artificial Sequence
  Description of Artificial Sequence: Synthetic oligonucleotide
gcggguucuuuucuuuuga

SEQ ID NO: 2837738 - RNA, 19 nt, Artificial Sequence
  Description of Artificial Sequence: Synthetic oligonucleotide
aguuagcguuuuccaccaa

SEQ ID NO: 2837739 - RNA, 19 nt, Artificial Sequence
  Description of Artificial Sequence: Synthetic oligonucleotide
cuguagaggacaguccagu

SEQ ID NO: 2837740 - RNA, 19 nt, Artificial Sequence
  Description of Artificial Sequence: Synthetic oligonucleotide
cugagcuuuccugacuucu

SEQ ID NO: 2837741 - RNA, 19 nt, Artificial Sequence
  Description of Artificial Sequence: Synthetic oligonucleotide
ccucuuggccaugauauca

SEQ ID NO: 2837742 - RNA, 19 nt, Artificial Sequence
  Description of Artificial Sequence: Synthetic oligonucleotide
ggauuccuuuuggaaagga

SEQ ID NO: 2837743 - RNA, 19 nt, Artificial Sequence
  Description of Artificial Sequence: Synthetic oligonucleotide
ccaguuuaucugccgagga

SEQ ID NO: 2837744 - RNA, 19 nt, Artificial Sequence
  Description of Artificial Sequence: Synthetic oligonucleotide
ccggauagccugcucucgc

SEQ ID NO: 2837745 - RNA, 19 nt, Artificial Sequence
  Description of Artificial Sequence: Synthetic oligonucleotide
accuucccgucgguccugg

SEQ ID NO: 2837746 - RNA, 19 nt, Artificial Sequence
  Description of Artificial Sequence: Synthetic oligonucleotide
gucgguccuggcguagcgc

SEQ ID NO: 2837747 - RNA, 19 nt, Artificial Sequence
  Description of Artificial Sequence: Synthetic oligonucleotide
cugcacagcucgaccuuca

SEQ ID NO: 2837748 - RNA, 19 nt, Artificial Sequence
  Description of Artificial Sequence: Synthetic oligonucleotide
ccccggguagaucuuguac

SEQ ID NO: 2837749 - RNA, 19 nt, Artificial Sequence
  Description of Artificial Sequence: Synthetic oligonucleotide
ccgaggauuccuuuuggaa

SEQ ID NO: 2837750 - RNA, 19 nt, Artificial Sequence
  Description of Artificial Sequence: Synthetic oligonucleotide
ggguucuuuucuuuugaau

SEQ ID NO: 2837751 - RNA, 19 nt, Artificial Sequence
  Description of Artificial Sequence: Synthetic oligonucleotide
ggacucgcauuuugcauua

SEQ ID NO: 2837752 - RNA, 19 nt, Artificial Sequence
  Description of Artificial Sequence: Synthetic oligonucleotide
gugauggcacgcuggaauu

SEQ ID NO: 2837753 - RNA, 19 nt, Artificial Sequence
  Description of Artificial Sequence: Synthetic oligonucleotide
cguuuuccaccaacucggg

SEQ ID NO: 2837754 - RNA, 19 nt, Artificial Sequence
  Description of Artificial Sequence: Synthetic oligonucleotide
cuucugguuucugauuccu

SEQ ID NO: 2837755 - RNA, 19 nt, Artificial Sequence
  Description of Artificial Sequence: Synthetic oligonucleotide
caguuuaucugccgaggau

SEQ ID NO: 2837756 - RNA, 19 nt, Artificial Sequence
  Description of Artificial Sequence: Synthetic oligonucleotide
gccgaggauuccuuuugga

SEQ ID NO: 2837757 - RNA, 19 nt, Artificial Sequence
  Description of Artificial Sequence: Synthetic oligonucleotide
ccaugauaucagcaaggga

SEQ ID NO: 2837758 - RNA, 19 nt, Artificial Sequence
  Description of Artificial Sequence: Synthetic oligonucleotide
ggcagcagccauugcuguc

SEQ ID NO: 2837759 - RNA, 19 nt, Artificial Sequence
  Description of Artificial Sequence: Synthetic oligonucleotide
aucuaccaaguuagcguuu

SEQ ID NO: 2837760 - RNA, 19 nt, Artificial Sequence
  Description of Artificial Sequence: Synthetic oligonucleotide
gguccuggcguagcgccgc

SEQ ID NO: 2837761 - RNA, 19 nt, Artificial Sequence
  Description of Artificial Sequence: Synthetic oligonucleotide
cugcucucgcugagcuuuc

SEQ ID NO: 2837762 - RNA, 19 nt, Artificial Sequence
  Description of Artificial Sequence: Synthetic oligonucleotide
caccaacucggggagcaga

SEQ ID NO: 2837763 - RNA, 19 nt, Artificial Sequence
  Description of Artificial Sequence: Synthetic oligonucleotide
cagcaagggaugcaccagu

SEQ ID NO: 2837764 - RNA, 19 nt, Artificial Sequence
  Description of Artificial Sequence: Synthetic oligonucleotide
agaggacaguccaguuuau

SEQ ID NO: 2837765 - RNA, 19 nt, Artificial Sequence
  Description of Artificial Sequence: Synthetic oligonucleotide
cuuuuguuuaggggcugcu

SEQ ID NO: 2837766 - RNA, 19 nt, Artificial Sequence
  Description of Artificial Sequence: Synthetic oligonucleotide
cugauuccucuuggccaug

SEQ ID NO: 2837767 - RNA, 19 nt, Artificial Sequence
  Description of Artificial Sequence: Synthetic oligonucleotide
gauuccucuuggccaugau

SEQ ID NO: 2837768 - RNA, 19 nt, Artificial Sequence
  Description of Artificial Sequence: Synthetic oligonucleotide
ggcguagcgccgcccgugc

SEQ ID NO: 2837769 - RNA, 19 nt, Artificial Sequence
  Description of Artificial Sequence: Synthetic oligonucleotide
gcuucacaaucuuuuguuu

SEQ ID NO: 2837770 - RNA, 19 nt, Artificial Sequence
  Description of Artificial Sequence: Synthetic oligonucleotide
ccagugauggcacgcugga

SEQ ID NO: 2837771 - RNA, 19 nt, Artificial Sequence
  Description of Artificial Sequence: Synthetic oligonucleotide
uucuuccgacuguccuuuu

SEQ ID NO: 2837772 - RNA, 19 nt, Artificial Sequence
  Description of Artificial Sequence: Synthetic oligonucleotide
cgcuggaauuuaacugccc

SEQ ID NO: 2837773 - RNA, 19 nt, Artificial Sequence
  Description of Artificial Sequence: Synthetic oligonucleotide
uccuggcguagcgccgccc

SEQ ID NO: 2837774 - RNA, 19 nt, Artificial Sequence
  Description of Artificial Sequence: Synthetic oligonucleotide
auggcacgcuggaauuuaa

SEQ ID NO: 2837775 - RNA, 19 nt, Artificial Sequence
  Description of Artificial Sequence: Synthetic oligonucleotide
gcugagcuuuccugacuuc

SEQ ID NO: 2837776 - RNA, 19 nt, Artificial Sequence
  Description of Artificial Sequence: Synthetic oligonucleotide
ggaaugcggacucgcauuu

SEQ ID NO: 2837777 - RNA, 19 nt, Artificial Sequence
  Description of Artificial Sequence: Synthetic oligonucleotide
gugccccggguagaucuug

SEQ ID NO: 2837778 - RNA, 19 nt, Artificial Sequence
  Description of Artificial Sequence: Synthetic oligonucleotide
ggggagcagagaccuucac

SEQ ID NO: 2837779 - RNA, 19 nt, Artificial Sequence
  Description of Artificial Sequence: Synthetic oligonucleotide
cccggauagccugcucucg

SEQ ID NO: 2837780 - RNA, 19 nt, Artificial Sequence
  Description of Artificial Sequence: Synthetic oligonucleotide
gcagcagccauugcugucu

SEQ ID NO: 2837781 - RNA, 19 nt, Artificial Sequence
  Description of Artificial Sequence: Synthetic oligonucleotide
cguagcgccgcccgugccc

SEQ ID NO: 2837782 - RNA, 19 nt, Artificial Sequence
  Description of Artificial Sequence: Synthetic oligonucleotide
gcugcuuuuguaggggccu

SEQ ID NO: 2837783 - RNA, 19 nt, Artificial Sequence
  Description of Artificial Sequence: Synthetic oligonucleotide
gcuuuccugacuucugguu

SEQ ID NO: 2837784 - RNA, 19 nt, Artificial Sequence
  Description of Artificial Sequence: Synthetic oligonucleotide
gcuuccuuggcagcccgga

SEQ ID NO: 2837785 - RNA, 19 nt, Artificial Sequence
  Description of Artificial Sequence: Synthetic oligonucleotide
guccuggcguagcgccgcc

SEQ ID NO: 2837786 - RNA, 19 nt, Artificial Sequence
  Description of Artificial Sequence: Synthetic oligonucleotide
gcccggauagccugcucuc

SEQ ID NO: 2837787 - RNA, 19 nt, Artificial Sequence
  Description of Artificial Sequence: Synthetic oligonucleotide
gggaugcaccagugauggc

SEQ ID NO: 2837788 - RNA, 19 nt, Artificial Sequence
  Description of Artificial Sequence: Synthetic oligonucleotide
gguagaucuuguacccacu

SEQ ID NO: 2837789 - RNA, 19 nt, Artificial Sequence
  Description of Artificial Sequence: Synthetic oligonucleotide
ucccgucgguccuggcgua

SEQ ID NO: 2837790 - RNA, 19 nt, Artificial Sequence
  Description of Artificial Sequence: Synthetic oligonucleotide
cacaggcuucacaaucuuu

SEQ ID NO: 2837791 - RNA, 19 nt, Artificial Sequence
  Description of Artificial Sequence: Synthetic oligonucleotide
cagagaccuucacaggcuu

SEQ ID NO: 2837792 - RNA, 19 nt, Artificial Sequence
  Description of Artificial Sequence: Synthetic oligonucleotide
ccauugcugucuucuugga

SEQ ID NO: 2837793 - RNA, 19 nt, Artificial Sequence
  Description of Artificial Sequence: Synthetic oligonucleotide
gcagagaccuucacaggcu

SEQ ID NO: 2837794 - RNA, 19 nt, Artificial Sequence
  Description of Artificial Sequence: Synthetic oligonucleotide
gacucgcauuuugcauuaa

SEQ ID NO: 2837795 - RNA, 19 nt, Artificial Sequence
  Description of Artificial Sequence: Synthetic oligonucleotide
ggggccuuggcagcagcca

SEQ ID NO: 2837796 - RNA, 19 nt, Artificial Sequence
  Description of Artificial Sequence: Synthetic oligonucleotide
cgucgguccuggcguagcg

SEQ ID NO: 2837797 - RNA, 19 nt, Artificial Sequence
  Description of Artificial Sequence: Synthetic oligonucleotide
ggcagcccggauagccugc

SEQ ID NO: 2837798 - RNA, 19 nt, Artificial Sequence
  Description of Artificial Sequence: Synthetic oligonucleotide
gcggacucgcauuuugcau

SEQ ID NO: 2837799 - RNA, 19 nt, Artificial Sequence
  Description of Artificial Sequence: Synthetic oligonucleotide
ggaaaaccuucccgucggu

SEQ ID NO: 2837800 - RNA, 19 nt, Artificial Sequence
  Description of Artificial Sequence: Synthetic oligonucleotide
cagugauggcacgcuggaa

SEQ ID NO: 2837801 - RNA, 19 nt, Artificial Sequence
  Description of Artificial Sequence: Synthetic oligonucleotide
cagcccggauagccugcuc

SEQ ID NO: 2837802 - RNA, 19 nt, Artificial Sequence
  Description of Artificial Sequence: Synthetic oligonucleotide
ccgcccgugccccggguag

SEQ ID NO: 2837803 - RNA, 19 nt, Artificial Sequence
  Description of Artificial Sequence: Synthetic oligonucleotide
gaaugcggacucgcauuuu

SEQ ID NO: 2837804 - RNA, 19 nt, Artificial Sequence
  Description of Artificial Sequence: Synthetic oligonucleotide
cuuccuuggcagcccggau

SEQ ID NO: 2837805 - RNA, 19 nt, Artificial Sequence
  Description of Artificial Sequence: Synthetic oligonucleotide
aacugcccggcggguucuu

SEQ ID NO: 2837806 - RNA, 19 nt, Artificial Sequence
  Description of Artificial Sequence: Synthetic oligonucleotide
cgguccuggcguagcgccg

SEQ ID NO: 2837807 - RNA, 19 nt, Artificial Sequence
  Description of Artificial Sequence: Synthetic oligonucleotide
ccgugccccggguagaucu

SEQ ID NO: 2837808 - RNA, 19 nt, Artificial Sequence
  Description of Artificial Sequence: Synthetic oligonucleotide
gcguagcgccgcccgugcc

SEQ ID NO: 2837809 - RNA, 19 nt, Artificial Sequence
  Description of Artificial Sequence: Synthetic oligonucleotide
ccugcucucgcugagcuuu

SEQ ID NO: 2837810 - RNA, 19 nt, Artificial Sequence
  Description of Artificial Sequence: Synthetic oligonucleotide
gcucucgcugagcuuuccu

SEQ ID NO: 2837811 - RNA, 19 nt, Artificial Sequence
  Description of Artificial Sequence: Synthetic oligonucleotide
acugcccggcggguucuuu

SEQ ID NO: 2837812 - RNA, 19 nt, Artificial Sequence
  Description of Artificial Sequence: Synthetic oligonucleotide
cggguucuuuucuuuugaa

SEQ ID NO: 2837813 - RNA, 19 nt, Artificial Sequence
  Description of Artificial Sequence: Synthetic oligonucleotide
cagccauugcugucuucuu

SEQ ID NO: 2837814 - RNA, 19 nt, Artificial Sequence
  Description of Artificial Sequence: Synthetic oligonucleotide
ccgucgguccuggcguagc

SEQ ID NO: 2837815 - RNA, 19 nt, Artificial Sequence
  Description of Artificial Sequence: Synthetic oligonucleotide
cggacucgcauuuugcauu

SEQ ID NO: 2837816 - RNA, 19 nt, Artificial Sequence
  Description of Artificial Sequence: Synthetic oligonucleotide
ccuucccgucgguccuggc

SEQ ID NO: 2837817 - RNA, 19 nt, Artificial Sequence
  Description of Artificial Sequence: Synthetic oligonucleotide
cugcccggcggguucuuuu

SEQ ID NO: 2837818 - RNA, 19 nt, Artificial Sequence
  Description of Artificial Sequence: Synthetic oligonucleotide
ccaacucggggagcagaga

SEQ ID NO: 2837819 - RNA, 19 nt, Artificial Sequence
  Description of Artificial Sequence: Synthetic oligonucleotide
ccuuggcagcccggauagc

SEQ ID NO: 2837820 - RNA, 19 nt, Artificial Sequence
  Description of Artificial Sequence: Synthetic oligonucleotide
cggggagcagagaccuuca

SEQ ID NO: 2837821 - RNA, 19 nt, Artificial Sequence
  Description of Artificial Sequence: Synthetic oligonucleotide
gccccggguagaucuugua

SEQ ID NO: 2837822 - RNA, 19 nt, Artificial Sequence
  Description of Artificial Sequence: Synthetic oligonucleotide
cccgucgguccuggcguag

SEQ ID NO: 2837823 - RNA, 19 nt, Artificial Sequence
  Description of Artificial Sequence: Synthetic oligonucleotide
cugcuuuuguaggggccuu

SEQ ID NO: 2837824 - RNA, 19 nt, Artificial Sequence
  Description of Artificial Sequence: Synthetic oligonucleotide
gcgccgcccgugccccggg

SEQ ID NO: 2837825 - RNA, 19 nt, Artificial Sequence
  Description of Artificial Sequence: Synthetic oligonucleotide
cggguagaucuuguaccca

SEQ ID NO: 2837826 - RNA, 19 nt, Artificial Sequence
  Description of Artificial Sequence: Synthetic oligonucleotide
cgcugagcuuuccugacuu

SEQ ID NO: 2837827 - RNA, 19 nt, Artificial Sequence
  Description of Artificial Sequence: Synthetic oligonucleotide
cagcagccauugcugucuu

SEQ ID NO: 2837828 - RNA, 19 nt, Artificial Sequence
  Description of Artificial Sequence: Synthetic oligonucleotide
cggauagccugcucucgcu

SEQ ID NO: 2837829 - RNA, 19 nt, Artificial Sequence
  Description of Artificial Sequence: Synthetic oligonucleotide
cucggggagcagagaccuu

SEQ ID NO: 2837830 - RNA, 19 nt, Artificial Sequence
  Description of Artificial Sequence: Synthetic oligonucleotide
gcagcccggauagccugcu

SEQ ID NO: 2837831 - RNA, 19 nt, Artificial Sequence
  Description of Artificial Sequence: Synthetic oligonucleotide
ggccuuggcagcagccauu

SEQ ID NO: 2837832 - RNA, 19 nt, Artificial Sequence
  Description of Artificial Sequence: Synthetic oligonucleotide
gccgcccgugccccgggua

SEQ ID NO: 2837833 - RNA, 19 nt, Artificial Sequence
  Description of Artificial Sequence: Synthetic oligonucleotide
cccgugccccggguagauc

SEQ ID NO: 2837834 - RNA, 19 nt, Artificial Sequence
  Description of Artificial Sequence: Synthetic oligonucleotide
gccugcucucgcugagcuu

SEQ ID NO: 2837835 - RNA, 19 nt, Artificial Sequence
  Description of Artificial Sequence: Synthetic oligonucleotide
cggcggguucuuuucuuuu

SEQ ID NO: 2837836 - RNA, 19 nt, Artificial Sequence
  Description of Artificial Sequence: Synthetic oligonucleotide
gcccgugccccggguagau

SEQ ID NO: 2837837 - RNA, 19 nt, Artificial Sequence
  Description of Artificial Sequence: Synthetic oligonucleotide
cgcccgugccccggguaga

SEQ ID NO: 2837838 - RNA, 19 nt, Artificial Sequence
  Description of Artificial Sequence: Synthetic oligonucleotide
cgugccccggguagaucuu

SEQ ID NO: 2837839 - RNA, 19 nt, Artificial Sequence
  Description of Artificial Sequence: Synthetic oligonucleotide
uccacaauaugaaagaucc

SEQ ID NO: 2837840 - RNA, 19 nt, Artificial Sequence
  Description of Artificial Sequence: Synthetic oligonucleotide
agauguuagcucaagaucc

SEQ ID NO: 2837841 - RNA, 19 nt, Artificial Sequence
  Description of Artificial Sequence: Synthetic oligonucleotide
aaaaucuauguagagauca

SEQ ID NO: 2837842 - RNA, 19 nt, Artificial Sequence
  Description of Artificial Sequence: Synthetic oligonucleotide
uauguagagaucauccucc

SEQ ID NO: 2837843 - RNA, 19 nt, Artificial Sequence
  Description of Artificial Sequence: Synthetic oligonucleotide
aauaugaaagauccgucca

SEQ ID NO: 2837844 - RNA, 19 nt, Artificial Sequence
  Description of Artificial Sequence: Synthetic oligonucleotide
uuucgaaagggcuugaaga

SEQ ID NO: 2837845 - RNA, 19 nt, Artificial Sequence
  Description of Artificial Sequence: Synthetic oligonucleotide
aagagaagcgcucucagga

SEQ ID NO: 2837846 - RNA, 19 nt, Artificial Sequence
  Description of Artificial Sequence: Synthetic oligonucleotide
aucuauguagagaucaucc

SEQ ID NO: 2837847 - RNA, 19 nt, Artificial Sequence
  Description of Artificial Sequence: Synthetic oligonucleotide
ugaaagauccguccaauga

SEQ ID NO: 2837848 - RNA, 19 nt, Artificial Sequence
  Description of Artificial Sequence: Synthetic oligonucleotide
aaagauccguccaaugacc

SEQ ID NO: 2837849 - RNA, 19 nt, Artificial Sequence
  Description of Artificial Sequence: Synthetic oligonucleotide
uagcucaagauccaggagc

SEQ ID NO: 2837850 - RNA, 19 nt, Artificial Sequence
  Description of Artificial Sequence: Synthetic oligonucleotide
uuuacacacacagugaaac

SEQ ID NO: 2837851 - RNA, 19 nt, Artificial Sequence
  Description of Artificial Sequence: Synthetic oligonucleotide
caauaugaaagauccgucc

SEQ ID NO: 2837852 - RNA, 19 nt, Artificial Sequence
  Description of Artificial Sequence: Synthetic oligonucleotide
aguagaguuguaucugugg

SEQ ID NO: 2837853 - RNA, 19 nt, Artificial Sequence
  Description of Artificial Sequence: Synthetic oligonucleotide
agaguuguaucuguggucg

SEQ ID NO: 2837854 - RNA, 19 nt, Artificial Sequence
  Description of Artificial Sequence: Synthetic oligonucleotide
ucagcauggaggcaaagga

SEQ ID NO: 2837855 - RNA, 19 nt, Artificial Sequence
  Description of Artificial Sequence: Synthetic oligonucleotide
accaguuuguccuuggcag

SEQ ID NO: 2837856 - RNA, 19 nt, Artificial Sequence
  Description of Artificial Sequence: Synthetic oligonucleotide
uguuagcucaagauccagg

SEQ ID NO: 2837857 - RNA, 19 nt, Artificial Sequence
  Description of Artificial Sequence: Synthetic oligonucleotide
uagauguuagcucaagauc

SEQ ID NO: 2837858 - RNA, 19 nt, Artificial Sequence
  Description of Artificial Sequence: Synthetic oligonucleotide
gaaagauccguccaaugac

SEQ ID NO: 2837859 - RNA, 19 nt, Artificial Sequence
  Description of Artificial Sequence: Synthetic oligonucleotide
  modified_base (9)..(9): a, c, u, g, unknown or other
  modified_base (14)..(14): a, c, u, g, unknown or other
uguggucgnacccnggaac

SEQ ID NO: 2837860 - RNA, 19 nt, Artificial Sequence
  Description of Artificial Sequence: Synthetic oligonucleotide
aaucuauguagagaucauc

SEQ ID NO: 2837861 - RNA, 19 nt, Artificial Sequence
  Description of Artificial Sequence: Synthetic oligonucleotide
augggacccacacagcgcc

SEQ ID NO: 2837862 - RNA, 19 nt, Artificial Sequence
  Description of Artificial Sequence: Synthetic oligonucleotide
ucaggaaucggcucccagg

SEQ ID NO: 2837863 - RNA, 19 nt, Artificial Sequence
  Description of Artificial Sequence: Synthetic oligonucleotide
gaaccuagauguuagcuca

SEQ ID NO: 2837864 - RNA, 19 nt, Artificial Sequence
  Description of Artificial Sequence: Synthetic oligonucleotide
uggagagugucucagcaug

SEQ ID NO: 2837865 - RNA, 19 nt, Artificial Sequence
  Description of Artificial Sequence: Synthetic oligonucleotide
agauccaggagccgcagcg

SEQ ID NO: 2837866 - RNA, 19 nt, Artificial Sequence
  Description of Artificial Sequence: Synthetic oligonucleotide
auuucgaaagggcuugaag

SEQ ID NO: 2837867 - RNA, 19 nt, Artificial Sequence
  Description of Artificial Sequence: Synthetic oligonucleotide
  modified_base (2)..(2): a, c, u, g, unknown or other
  modified_base (7)..(7): a, c, u, g, unknown or other
gnacccnggaaccuagaug

SEQ ID NO: 2837868 - RNA, 19 nt, Artificial Sequence
  Description of Artificial Sequence: Synthetic oligonucleotide
uuuuggagacucccguccg

SEQ ID NO: 2837869 - RNA, 19 nt, Artificial Sequence
  Description of Artificial Sequence: Synthetic oligonucleotide
  modified_base (15)..(15): a, c, u, g, unknown or other
uguaucuguggucgnaccc

SEQ ID NO: 2837870 - RNA, 19 nt, Artificial Sequence
  Description of Artificial Sequence: Synthetic oligonucleotide
uccaaugaccaguuugucc

SEQ ID NO: 2837871 - RNA, 19 nt, Artificial Sequence
  Description of Artificial Sequence: Synthetic oligonucleotide
  modified_base (11)..(11): a, c, u, g, unknown or other
  modified_base (16)..(16): a, c, u, g, unknown or other
ucuguggucgnacccngga

SEQ ID NO: 2837872 - RNA, 19 nt, Artificial Sequence
  Description of Artificial Sequence: Synthetic oligonucleotide
guagagaucauccuccaca

SEQ ID NO: 2837873 - RNA, 19 nt, Artificial Sequence
  Description of Artificial Sequence: Synthetic oligonucleotide
aagggcuugaagaagagaa

SEQ ID NO: 2837874 - RNA, 19 nt, Artificial Sequence
  Description of Artificial Sequence: Synthetic oligonucleotide
ucauccuccacaauaugaa

SEQ ID NO: 2837875 - RNA, 19 nt, Artificial Sequence
  Description of Artificial Sequence: Synthetic oligonucleotide
gagugucucagcauggagg

SEQ ID NO: 2837876 - RNA, 19 nt, Artificial Sequence
  Description of Artificial Sequence: Synthetic oligonucleotide
ucugugucaguggagagug

SEQ ID NO: 2837877 - RNA, 19 nt, Artificial Sequence
  Description of Artificial Sequence: Synthetic oligonucleotide
ucuauguagagaucauccu

SEQ ID NO: 2837878 - RNA, 19 nt, Artificial Sequence
  Description of Artificial Sequence: Synthetic oligonucleotide
uccuccacaauaugaaaga

SEQ ID NO: 2837879 - RNA, 19 nt, Artificial Sequence
  Description of Artificial Sequence: Synthetic oligonucleotide
aguccuaagagaacucggc

SEQ ID NO: 2837880 - RNA, 19 nt, Artificial Sequence
  Description of Artificial Sequence: Synthetic oligonucleotide
uuagcucaagauccaggag

SEQ ID NO: 2837881 - RNA, 19 nt, Artificial Sequence
  Description of Artificial Sequence: Synthetic oligonucleotide
uuccaguagaguuguaucu

SEQ ID NO: 2837882 - RNA, 19 nt, Artificial Sequence
  Description of Artificial Sequence: Synthetic oligonucleotide
ucgcgaagccugcugagcg

SEQ ID NO: 2837883 - RNA, 19 nt, Artificial Sequence
  Description of Artificial Sequence: Synthetic oligonucleotide
uccuaagagaacucggccu

SEQ ID NO: 2837884 - RNA, 19 nt, Artificial Sequence
  Description of Artificial Sequence: Synthetic oligonucleotide
cuauguagagaucauccuc

SEQ ID NO: 2837885 - RNA, 19 nt, Artificial Sequence
  Description of Artificial Sequence: Synthetic oligonucleotide
acaauaugaaagauccguc

SEQ ID NO: 2837886 - RNA, 19 nt, Artificial Sequence
  Description of Artificial Sequence: Synthetic oligonucleotide
uucgaaagggcuugaagaa

SEQ ID NO: 2837887 - RNA, 19 nt, Artificial Sequence
  Description of Artificial Sequence: Synthetic oligonucleotide
guuagcucaagauccagga

SEQ ID NO: 2837888 - RNA, 19 nt, Artificial Sequence
  Description of Artificial Sequence: Synthetic oligonucleotide
gagaucauccuccacaaua

SEQ ID NO: 2837889 - RNA, 19 nt, Artificial Sequence
  Description of Artificial Sequence: Synthetic oligonucleotide
aagauccaggagccgcagc

SEQ ID NO: 2837890 - RNA, 19 nt, Artificial Sequence
  Description of Artificial Sequence: Synthetic oligonucleotide
agaagagaagcgcucucag

SEQ ID NO: 2837891 - RNA, 19 nt, Artificial Sequence
  Description of Artificial Sequence: Synthetic oligonucleotide
  modified_base (16)..(16): a, c, u, g, unknown or other
uuguaucuguggucgnacc

SEQ ID NO: 2837892 - RNA, 19 nt, Artificial Sequence
  Description of Artificial Sequence: Synthetic oligonucleotide
ucuccgugcuugcauuucg

SEQ ID NO: 2837893 - RNA, 19 nt, Artificial Sequence
  Description of Artificial Sequence: Synthetic oligonucleotide
aguggagagugucucagca

SEQ ID NO: 2837894 - RNA, 19 nt, Artificial Sequence
  Description of Artificial Sequence: Synthetic oligonucleotide
aacucggccuuccaguaga

SEQ ID NO: 2837895 - RNA, 19 nt, Artificial Sequence
  Description of Artificial Sequence: Synthetic oligonucleotide
  modified_base (13)..(13): a, c, u, g, unknown or other
  modified_base (18)..(18): a, c, u, g, unknown or other
uaucuguggucgnacccng

SEQ ID NO: 2837896 - RNA, 19 nt, Artificial Sequence
  Description of Artificial Sequence: Synthetic oligonucleotide
ucaggggucgugcucucgg

SEQ ID NO: 2837897 - RNA, 19 nt, Artificial Sequence
  Description of Artificial Sequence: Synthetic oligonucleotide
uccgccgcagcuccgagag

SEQ ID NO: 2837898 - RNA, 19 nt, Artificial Sequence
  Description of Artificial Sequence: Synthetic oligonucleotide
cuuccaguagaguuguauc

SEQ ID NO: 2837899 - RNA, 19 nt, Artificial Sequence
  Description of Artificial Sequence: Synthetic oligonucleotide
ucaagauccaggagccgca

SEQ ID NO: 2837900 - RNA, 19 nt, Artificial Sequence
  Description of Artificial Sequence: Synthetic oligonucleotide
uagagaucauccuccacaa

SEQ ID NO: 2837901 - RNA, 19 nt, Artificial Sequence
  Description of Artificial Sequence: Synthetic oligonucleotide
ugaagaagagaagcgcucu

SEQ ID NO: 2837902 - RNA, 19 nt, Artificial Sequence
  Description of Artificial Sequence: Synthetic oligonucleotide
auaugaaagauccguccaa

SEQ ID NO: 2837903 - RNA, 19 nt, Artificial Sequence
  Description of Artificial Sequence: Synthetic oligonucleotide
ugagcgcucccgaggagcg

SEQ ID NO: 2837904 - RNA, 19 nt, Artificial Sequence
  Description of Artificial Sequence: Synthetic oligonucleotide
agugaaacuugccaccaaa

SEQ ID NO: 2837905 - RNA, 19 nt, Artificial Sequence
  Description of Artificial Sequence: Synthetic oligonucleotide
ucaguggagagugucucag

SEQ ID NO: 2837906 - RNA, 19 nt, Artificial Sequence
  Description of Artificial Sequence: Synthetic oligonucleotide
uccaguagaguuguaucug

SEQ ID NO: 2837907 - RNA, 19 nt, Artificial Sequence
  Description of Artificial Sequence: Synthetic oligonucleotide
augaaagauccguccaaug

SEQ ID NO: 2837908 - RNA, 19 nt, Artificial Sequence
  Description of Artificial Sequence: Synthetic oligonucleotide
cuccacaauaugaaagauc

SEQ ID NO: 2837909 - RNA, 19 nt, Artificial Sequence
  Description of Artificial Sequence: Synthetic oligonucleotide
auccuccacaauaugaaag

SEQ ID NO: 2837910 - RNA, 19 nt, Artificial Sequence
  Description of Artificial Sequence: Synthetic oligonucleotide
cucaagauccaggagccgc

SEQ ID NO: 2837911 - RNA, 19 nt, Artificial Sequence
  Description of Artificial Sequence: Synthetic oligonucleotide
aacccuggugccccucugg

SEQ ID NO: 2837912 - RNA, 19 nt, Artificial Sequence
  Description of Artificial Sequence: Synthetic oligonucleotide
agagugucucagcauggag

SEQ ID NO: 2837913 - RNA, 19 nt, Artificial Sequence
  Description of Artificial Sequence: Synthetic oligonucleotide
ucgaaagggcuugaagaag

SEQ ID NO: 2837914 - RNA, 19 nt, Artificial Sequence
  Description of Artificial Sequence: Synthetic oligonucleotide
uagaguuguaucugugguc

SEQ ID NO: 2837915 - RNA, 19 nt, Artificial Sequence
  Description of Artificial Sequence: Synthetic oligonucleotide
guccuaagagaacucggcc

SEQ ID NO: 2837916 - RNA, 19 nt, Artificial Sequence
  Description of Artificial Sequence: Synthetic oligonucleotide
agcgcucucaggaaucggc

SEQ ID NO: 2837917 - RNA, 19 nt, Artificial Sequence
  Description of Artificial Sequence: Synthetic oligonucleotide
uacacacacagugaaacuu

SEQ ID NO: 2837918 - RNA, 19 nt, Artificial Sequence
  Description of Artificial Sequence: Synthetic oligonucleotide
ucggccuuccaguagaguu

SEQ ID NO: 2837919 - RNA, 19 nt, Artificial Sequence
  Description of Artificial Sequence: Synthetic oligonucleotide
cgugcuugcauuucgaaag

SEQ ID NO: 2837920 - RNA, 19 nt, Artificial Sequence
  Description of Artificial Sequence: Synthetic oligonucleotide
aaugaccaguuuguccuug

SEQ ID NO: 2837921 - RNA, 19 nt, Artificial Sequence
  Description of Artificial Sequence: Synthetic oligonucleotide
uaugaaagauccguccaau

SEQ ID NO: 2837922 - RNA, 19 nt, Artificial Sequence
  Description of Artificial Sequence: Synthetic oligonucleotide
uuuguccuuggcaggcccc

SEQ ID NO: 2837923 - RNA, 19 nt, Artificial Sequence
  Description of Artificial Sequence: Synthetic oligonucleotide
ugucucagcauggaggcaa

SEQ ID NO: 2837924 - RNA, 19 nt, Artificial Sequence
  Description of Artificial Sequence: Synthetic oligonucleotide
aagccugcugagcgcuccc

SEQ ID NO: 2837925 - RNA, 19 nt, Artificial Sequence
  Description of Artificial Sequence: Synthetic oligonucleotide
uguagagaucauccuccac

SEQ ID NO: 2837926 - RNA, 19 nt, Artificial Sequence
  Description of Artificial Sequence: Synthetic oligonucleotide
augaccaguuuguccuugg

SEQ ID NO: 2837927 - RNA, 19 nt, Artificial Sequence
  Description of Artificial Sequence: Synthetic oligonucleotide
  modified_base (14)..(14): a, c, u, g, unknown or other
  modified_base (19)..(19): a, c, u, g, unknown or other
guaucuguggucgnacccn

SEQ ID NO: 2837928 - RNA, 19 nt, Artificial Sequence
  Description of Artificial Sequence: Synthetic oligonucleotide
ugcuugcauuucgaaaggg

SEQ ID NO: 2837929 - RNA, 19 nt, Artificial Sequence
  Description of Artificial Sequence: Synthetic oligonucleotide
aucauccuccacaauauga

SEQ ID NO: 2837930 - RNA, 19 nt, Artificial Sequence
  Description of Artificial Sequence: Synthetic oligonucleotide
gaagcgcucucaggaaucg

SEQ ID NO: 2837931 - RNA, 19 nt, Artificial Sequence
  Description of Artificial Sequence: Synthetic oligonucleotide
gugcuugcauuucgaaagg

SEQ ID NO: 2837932 - RNA, 19 nt, Artificial Sequence
  Description of Artificial Sequence: Synthetic oligonucleotide
ggaaucggcucccaggagc

SEQ ID NO: 2837933 - RNA, 19 nt, Artificial Sequence
  Description of Artificial Sequence: Synthetic oligonucleotide
gcaugggacccacacagcg

SEQ ID NO: 2837934 - RNA, 19 nt, Artificial Sequence
  Description of Artificial Sequence: Synthetic oligonucleotide
aaagggcuugaagaagaga

SEQ ID NO: 2837935 - RNA, 19 nt, Artificial Sequence
  Description of Artificial Sequence: Synthetic oligonucleotide
aaaucuauguagagaucau

SEQ ID NO: 2837936 - RNA, 19 nt, Artificial Sequence
  Description of Artificial Sequence: Synthetic oligonucleotide
uuggcaggccccaucugug

SEQ ID NO: 2837937 - RNA, 19 nt, Artificial Sequence
  Description of Artificial Sequence: Synthetic oligonucleotide
ugcugagcgcucccgagga

SEQ ID NO: 2837938 - RNA, 19 nt, Artificial Sequence
  Description of Artificial Sequence: Synthetic oligonucleotide
ugugucaguggagaguguc

SEQ ID NO: 2837939 - RNA, 19 nt, Artificial Sequence
  Description of Artificial Sequence: Synthetic oligonucleotide
ggaaccuagauguuagcuc

SEQ ID NO: 2837940 - RNA, 19 nt, Artificial Sequence
  Description of Artificial Sequence: Synthetic oligonucleotide
gaaagggcuugaagaagag

SEQ ID NO: 2837941 - RNA, 19 nt, Artificial Sequence
  Description of Artificial Sequence: Synthetic oligonucleotide
gaaucggcucccaggagcc

SEQ ID NO: 2837942 - RNA, 19 nt, Artificial Sequence
  Description of Artificial Sequence: Synthetic oligonucleotide
uuuggagacucccguccga

SEQ ID NO: 2837943 - RNA, 19 nt, Artificial Sequence
  Description of Artificial Sequence: Synthetic oligonucleotide
uaagagaacucggccuucc

SEQ ID NO: 2837944 - RNA, 19 nt, Artificial Sequence
  Description of Artificial Sequence: Synthetic oligonucleotide
cuugaagaagagaagcgcu

SEQ ID NO: 2837945 - RNA, 19 nt, Artificial Sequence
  Description of Artificial Sequence: Synthetic oligonucleotide
caugggacccacacagcgc

SEQ ID NO: 2837946 - RNA, 19 nt, Artificial Sequence
  Description of Artificial Sequence: Synthetic oligonucleotide
cuagauguuagcucaagau

SEQ ID NO: 2837947 - RNA, 19 nt, Artificial Sequence
  Description of Artificial Sequence: Synthetic oligonucleotide
ugaccaguuuguccuuggc

SEQ ID NO: 2837948 - RNA, 19 nt, Artificial Sequence
  Description of Artificial Sequence: Synthetic oligonucleotide
cacaauaugaaagauccgu

SEQ ID NO: 2837949 - RNA, 19 nt, Artificial Sequence
  Description of Artificial Sequence: Synthetic oligonucleotide
agauccguccaaugaccag

SEQ ID NO: 2837950 - RNA, 19 nt, Artificial Sequence
  Description of Artificial Sequence: Synthetic oligonucleotide
aagauccguccaaugacca

SEQ ID NO: 2837951 - RNA, 19 nt, Artificial Sequence
  Description of Artificial Sequence: Synthetic oligonucleotide
aguuuguccuuggcaggcc

SEQ ID NO: 2837952 - RNA, 19 nt, Artificial Sequence
  Description of Artificial Sequence: Synthetic oligonucleotide
acacacacagugaaacuug

SEQ ID NO: 2837953 - RNA, 19 nt, Artificial Sequence
  Description of Artificial Sequence: Synthetic oligonucleotide
guagaguuguaucuguggu

SEQ ID NO: 2837954 - RNA, 19 nt, Artificial Sequence
  Description of Artificial Sequence: Synthetic oligonucleotide
agacucccguccgagcucc

SEQ ID NO: 2837955 - RNA, 19 nt, Artificial Sequence
  Description of Artificial Sequence: Synthetic oligonucleotide
  modified_base (5)..(5): a, c, u, g, unknown or other
  modified_base (10)..(10): a, c, u, g, unknown or other
gucgnacccnggaaccuag

SEQ ID NO: 2837956 - RNA, 19 nt, Artificial Sequence
  Description of Artificial Sequence: Synthetic oligonucleotide
gguacuucccgccauccac

SEQ ID NO: 2837957 - RNA, 19 nt, Artificial Sequence
  Description of Artificial Sequence: Synthetic oligonucleotide
guuuguccuuggcaggccc

SEQ ID NO: 2837958 - RNA, 19 nt, Artificial Sequence
  Description of Artificial Sequence: Synthetic oligonucleotide
agaagcgcucucaggaauc

SEQ ID NO: 2837959 - RNA, 19 nt, Artificial Sequence
  Description of Artificial Sequence: Synthetic oligonucleotide
  modified_base (3)..(3): a, c, u, g, unknown or other
ccnggaaccuagauguuag

SEQ ID NO: 2837960 - RNA, 19 nt, Artificial Sequence
  Description of Artificial Sequence: Synthetic oligonucleotide
gauguuagcucaagaucca

SEQ ID NO: 2837961 - RNA, 19 nt, Artificial Sequence
  Description of Artificial Sequence: Synthetic oligonucleotide
aggagcggaggagucaggg

SEQ ID NO: 2837962 - RNA, 19 nt, Artificial Sequence
  Description of Artificial Sequence: Synthetic oligonucleotide
caguagaguuguaucugug

SEQ ID NO: 2837963 - RNA, 19 nt, Artificial Sequence
  Description of Artificial Sequence: Synthetic oligonucleotide
agaucauccuccacaauau

SEQ ID NO: 2837964 - RNA, 19 nt, Artificial Sequence
  Description of Artificial Sequence: Synthetic oligonucleotide
gaacucggccuuccaguag

SEQ ID NO: 2837965 - RNA, 19 nt, Artificial Sequence
  Description of Artificial Sequence: Synthetic oligonucleotide
ugucaguggagagugucuc

SEQ ID NO: 2837966 - RNA, 19 nt, Artificial Sequence
  Description of Artificial Sequence: Synthetic oligonucleotide
auguagagaucauccucca

SEQ ID NO: 2837967 - RNA, 19 nt, Artificial Sequence
  Description of Artificial Sequence: Synthetic oligonucleotide
aucggcucccaggagcccc

SEQ ID NO: 2837968 - RNA, 19 nt, Artificial Sequence
  Description of Artificial Sequence: Synthetic oligonucleotide
uuggagacucccguccgag

SEQ ID NO: 2837969 - RNA, 19 nt, Artificial Sequence
  Description of Artificial Sequence: Synthetic oligonucleotide
gaggcaaaggauuccacau

SEQ ID NO: 2837970 - RNA, 19 nt, Artificial Sequence
  Description of Artificial Sequence: Synthetic oligonucleotide
ucugguacuucccgccauc

SEQ ID NO: 2837971 - RNA, 19 nt, Artificial Sequence
  Description of Artificial Sequence: Synthetic oligonucleotide
caucugugucaguggagag

SEQ ID NO: 2837972 - RNA, 19 nt, Artificial Sequence
  Description of Artificial Sequence: Synthetic oligonucleotide
ugcucucggagccacucuc

SEQ ID NO: 2837973 - RNA, 19 nt, Artificial Sequence
  Description of Artificial Sequence: Synthetic oligonucleotide
aaucggcucccaggagccc

SEQ ID NO: 2837974 - RNA, 19 nt, Artificial Sequence
  Description of Artificial Sequence: Synthetic oligonucleotide
caguuuguccuuggcaggc

SEQ ID NO: 2837975 - RNA, 19 nt, Artificial Sequence
  Description of Artificial Sequence: Synthetic oligonucleotide
cucucggagccacucuccg

SEQ ID NO: 2837976 - RNA, 19 nt, Artificial Sequence
  Description of Artificial Sequence: Synthetic oligonucleotide
agagaagcgcucucaggaa

SEQ ID NO: 2837977 - RNA, 19 nt, Artificial Sequence
  Description of Artificial Sequence: Synthetic oligonucleotide
  modified_base (8)..(8): a, c, u, g, unknown or other
  modified_base (13)..(13): a, c, u, g, unknown or other
guggucgnacccnggaacc

SEQ ID NO: 2837978 - RNA, 19 nt, Artificial Sequence
  Description of Artificial Sequence: Synthetic oligonucleotide
uggaggcaaaggauuccac

SEQ ID NO: 2837979 - RNA, 19 nt, Artificial Sequence
  Description of Artificial Sequence: Synthetic oligonucleotide
auguuagcucaagauccag

SEQ ID NO: 2837980 - RNA, 19 nt, Artificial Sequence
  Description of Artificial Sequence: Synthetic oligonucleotide
agaacucggccuuccagua

SEQ ID NO: 2837981 - RNA, 19 nt, Artificial Sequence
  Description of Artificial Sequence: Synthetic oligonucleotide
gaggagucaggggucgugc

SEQ ID NO: 2837982 - RNA, 19 nt, Artificial Sequence
  Description of Artificial Sequence: Synthetic oligonucleotide
ugguacuucccgccaucca

SEQ ID NO: 2837983 - RNA, 19 nt, Artificial Sequence
  Description of Artificial Sequence: Synthetic oligonucleotide
  modified_base (2)..(2): a, c, u, g, unknown or other
cnggaaccuagauguuagc

SEQ ID NO: 2837984 - RNA, 19 nt, Artificial Sequence
  Description of Artificial Sequence: Synthetic oligonucleotide
aucugugucaguggagagu

SEQ ID NO: 2837985 - RNA, 19 nt, Artificial Sequence
  Description of Artificial Sequence: Synthetic oligonucleotide
agggcuugaagaagagaag

SEQ ID NO: 2837986 - RNA, 19 nt, Artificial Sequence
  Description of Artificial Sequence: Synthetic oligonucleotide
caggaaucggcucccagga

SEQ ID NO: 2837987 - RNA, 19 nt, Artificial Sequence
  Description of Artificial Sequence: Synthetic oligonucleotide
agcauggaggcaaaggauu

SEQ ID NO: 2837988 - RNA, 19 nt, Artificial Sequence
  Description of Artificial Sequence: Synthetic oligonucleotide
agucgcuccagggcgcucg

SEQ ID NO: 2837989 - RNA, 19 nt, Artificial Sequence
  Description of Artificial Sequence: Synthetic oligonucleotide
cugcugagcgcucccgagg

SEQ ID NO: 2837990 - RNA, 19 nt, Artificial Sequence
  Description of Artificial Sequence: Synthetic oligonucleotide
gagcggaggagucaggggu

SEQ ID NO: 2837991 - RNA, 19 nt, Artificial Sequence
  Description of Artificial Sequence: Synthetic oligonucleotide
  modified_base (4)..(4): a, c, u, g, unknown or other
  modified_base (9)..(9): a, c, u, g, unknown or other
ucgnacccnggaaccuaga

SEQ ID NO: 2837992 - RNA, 19 nt, Artificial Sequence
  Description of Artificial Sequence: Synthetic oligonucleotide
ggaggcaaaggauuccaca

SEQ ID NO: 2837993 - RNA, 19 nt, Artificial Sequence
  Description of Artificial Sequence: Synthetic oligonucleotide
agccacucuccgugcuugc

SEQ ID NO: 2837994 - RNA, 19 nt, Artificial Sequence
  Description of Artificial Sequence: Synthetic oligonucleotide
  modified_base (7)..(7): a, c, u, g, unknown or other
  modified_base (12)..(12): a, c, u, g, unknown or other
uggucgnacccnggaaccu

SEQ ID NO: 2837995 - RNA, 19 nt, Artificial Sequence
  Description of Artificial Sequence: Synthetic oligonucleotide
gaagccugcugagcgcucc

SEQ ID NO: 2837996 - RNA, 19 nt, Artificial Sequence
  Description of Artificial Sequence: Synthetic oligonucleotide
accuagauguuagcucaag

SEQ ID NO: 2837997 - RNA, 19 nt, Artificial Sequence
  Description of Artificial Sequence: Synthetic oligonucleotide
aagcgcucucaggaaucgg

SEQ ID NO: 2837998 - RNA, 19 nt, Artificial Sequence
  Description of Artificial Sequence: Synthetic oligonucleotide
cugagcgcucccgaggagc

SEQ ID NO: 2837999 - RNA, 19 nt, Artificial Sequence
  Description of Artificial Sequence: Synthetic oligonucleotide
aggagccccggcaugggac

SEQ ID NO: 2838000 - RNA, 19 nt, Artificial Sequence
  Description of Artificial Sequence: Synthetic oligonucleotide
aggaaucggcucccaggag

SEQ ID NO: 2838001 - RNA, 19 nt, Artificial Sequence
  Description of Artificial Sequence: Synthetic oligonucleotide
cucaggaaucggcucccag

SEQ ID NO: 2838002 - RNA, 19 nt, Artificial Sequence
  Description of Artificial Sequence: Synthetic oligonucleotide
uccgugcuugcauuucgaa

SEQ ID NO: 2838003 - RNA, 19 nt, Artificial Sequence
  Description of Artificial Sequence: Synthetic oligonucleotide
gcuugcauuucgaaagggc

SEQ ID NO: 2838004 - RNA, 19 nt, Artificial Sequence
  Description of Artificial Sequence: Synthetic oligonucleotide
gauccguccaaugaccagu

SEQ ID NO: 2838005 - RNA, 19 nt, Artificial Sequence
  Description of Artificial Sequence: Synthetic oligonucleotide
aggcaaaggauuccacauu

SEQ ID NO: 2838006 - RNA, 19 nt, Artificial Sequence
  Description of Artificial Sequence: Synthetic oligonucleotide
uacuucccgccauccaccu

SEQ ID NO: 2838007 - RNA, 19 nt, Artificial Sequence
  Description of Artificial Sequence: Synthetic oligonucleotide
caguggagagugucucagc

SEQ ID NO: 2838008 - RNA, 19 nt, Artificial Sequence
  Description of Artificial Sequence: Synthetic oligonucleotide
ggagagugucucagcaugg

SEQ ID NO: 2838009 - RNA, 19 nt, Artificial Sequence
  Description of Artificial Sequence: Synthetic oligonucleotide
ccaaugaccaguuuguccu

SEQ ID NO: 2838010 - RNA, 19 nt, Artificial Sequence
  Description of Artificial Sequence: Synthetic oligonucleotide
ugccccucugguacuuccc

SEQ ID NO: 2838011 - RNA, 19 nt, Artificial Sequence
  Description of Artificial Sequence: Synthetic oligonucleotide
uggagacucccguccgagc

SEQ ID NO: 2838012 - RNA, 19 nt, Artificial Sequence
  Description of Artificial Sequence: Synthetic oligonucleotide
ugggacccacacagcgccg

SEQ ID NO: 2838013 - RNA, 19 nt, Artificial Sequence
  Description of Artificial Sequence: Synthetic oligonucleotide
uccaggagccgcagcgaac

SEQ ID NO: 2838014 - RNA, 19 nt, Artificial Sequence
  Description of Artificial Sequence: Synthetic oligonucleotide
cgagagucgcuccagggcg

SEQ ID NO: 2838015 - RNA, 19 nt, Artificial Sequence
  Description of Artificial Sequence: Synthetic oligonucleotide
ccaguuuguccuuggcagg

SEQ ID NO: 2838016 - RNA, 19 nt, Artificial Sequence
  Description of Artificial Sequence: Synthetic oligonucleotide
ccuggugccccucugguac

SEQ ID NO: 2838017 - RNA, 19 nt, Artificial Sequence
  Description of Artificial Sequence: Synthetic oligonucleotide
ccguccaaugaccaguuug

SEQ ID NO: 2838018 - RNA, 19 nt, Artificial Sequence
  Description of Artificial Sequence: Synthetic oligonucleotide
ggagcggaggagucagggg

SEQ ID NO: 2838019 - RNA, 19 nt, Artificial Sequence
  Description of Artificial Sequence: Synthetic oligonucleotide
ccacaauaugaaagauccg

SEQ ID NO: 2838020 - RNA, 19 nt, Artificial Sequence
  Description of Artificial Sequence: Synthetic oligonucleotide
agcuccgagagucgcucca

SEQ ID NO: 2838021 - RNA, 19 nt, Artificial Sequence
  Description of Artificial Sequence: Synthetic oligonucleotide
cugguacuucccgccaucc

SEQ ID NO: 2838022 - RNA, 19 nt, Artificial Sequence
  Description of Artificial Sequence: Synthetic oligonucleotide
cuccgagagucgcuccagg

SEQ ID NO: 2838023 - RNA, 19 nt, Artificial Sequence
  Description of Artificial Sequence: Synthetic oligonucleotide
ucucggagccacucuccgu

SEQ ID NO: 2838024 - RNA, 19 nt, Artificial Sequence
  Description of Artificial Sequence: Synthetic oligonucleotide
cucucaggaaucggcuccc

SEQ ID NO: 2838025 - RNA, 19 nt, Artificial Sequence
  Description of Artificial Sequence: Synthetic oligonucleotide
aggagucaggggucgugcu

SEQ ID NO: 2838026 - RNA, 19 nt, Artificial Sequence
  Description of Artificial Sequence: Synthetic oligonucleotide
gagagugucucagcaugga

SEQ ID NO: 2838027 - RNA, 19 nt, Artificial Sequence
  Description of Artificial Sequence: Synthetic oligonucleotide
cauccuccacaauaugaaa

SEQ ID NO: 2838028 - RNA, 19 nt, Artificial Sequence
  Description of Artificial Sequence: Synthetic oligonucleotide
  modified_base (19)..(19): a, c, u, g, unknown or other
gaguuguaucuguggucgn

SEQ ID NO: 2838029 - RNA, 19 nt, Artificial Sequence
  Description of Artificial Sequence: Synthetic oligonucleotide
uuguccuuggcaggcccca

SEQ ID NO: 2838030 - RNA, 19 nt, Artificial Sequence
  Description of Artificial Sequence: Synthetic oligonucleotide
ucucagcauggaggcaaag

SEQ ID NO: 2838031 - RNA, 19 nt, Artificial Sequence
  Description of Artificial Sequence: Synthetic oligonucleotide
gucaguggagagugucuca

SEQ ID NO: 2838032 - RNA, 19 nt, Artificial Sequence
  Description of Artificial Sequence: Synthetic oligonucleotide
gugaaacuugccaccaaaa

SEQ ID NO: 2838033 - RNA, 19 nt, Artificial Sequence
  Description of Artificial Sequence: Synthetic oligonucleotide
ucggagccacucuccgugc

SEQ ID NO: 2838034 - RNA, 19 nt, Artificial Sequence
  Description of Artificial Sequence: Synthetic oligonucleotide
cucgcgaagccugcugagc

SEQ ID NO: 2838035 - RNA, 19 nt, Artificial Sequence
  Description of Artificial Sequence: Synthetic oligonucleotide
agagaucauccuccacaau

SEQ ID NO: 2838036 - RNA, 19 nt, Artificial Sequence
  Description of Artificial Sequence: Synthetic oligonucleotide
cuucccgccauccaccucu

SEQ ID NO: 2838037 - RNA, 19 nt, Artificial Sequence
  Description of Artificial Sequence: Synthetic oligonucleotide
gagacucccguccgagcuc

SEQ ID NO: 2838038 - RNA, 19 nt, Artificial Sequence
  Description of Artificial Sequence: Synthetic oligonucleotide
gggucgugcucucggagcc

SEQ ID NO: 2838039 - RNA, 19 nt, Artificial Sequence
  Description of Artificial Sequence: Synthetic oligonucleotide
cuaagagaacucggccuuc

SEQ ID NO: 2838040 - RNA, 19 nt, Artificial Sequence
  Description of Artificial Sequence: Synthetic oligonucleotide
gagagucgcuccagggcgc

SEQ ID NO: 2838041 - RNA, 19 nt, Artificial Sequence
  Description of Artificial Sequence: Synthetic oligonucleotide
acuucccgccauccaccuc

SEQ ID NO: 2838042 - RNA, 19 nt, Artificial Sequence
  Description of Artificial Sequence: Synthetic oligonucleotide
ucccaggagccccggcaug

SEQ ID NO: 2838043 - RNA, 19 nt, Artificial Sequence
  Description of Artificial Sequence: Synthetic oligonucleotide
acucccguccgagcuccgc

SEQ ID NO: 2838044 - RNA, 19 nt, Artificial Sequence
  Description of Artificial Sequence: Synthetic oligonucleotide
uggcaggccccaucugugu

SEQ ID NO: 2838045 - RNA, 19 nt, Artificial Sequence
  Description of Artificial Sequence: Synthetic oligonucleotide
gaacccuggugccccucug

SEQ ID NO: 2838046 - RNA, 19 nt, Artificial Sequence
  Description of Artificial Sequence: Synthetic oligonucleotide
gagaagcgcucucaggaau

SEQ ID NO: 2838047 - RNA, 19 nt, Artificial Sequence
  Description of Artificial Sequence: Synthetic oligonucleotide
cggcaugggacccacacag

SEQ ID NO: 2838048 - RNA, 19 nt, Artificial Sequence
  Description of Artificial Sequence: Synthetic oligonucleotide
acccuggugccccucuggu

SEQ ID NO: 2838049 - RNA, 19 nt, Artificial Sequence
  Description of Artificial Sequence: Synthetic oligonucleotide
  modified_base (12)..(12): a, c, u, g, unknown or other
  modified_base (17)..(17): a, c, u, g, unknown or other
aucuguggucgnacccngg

SEQ ID NO: 2838050 - RNA, 19 nt, Artificial Sequence
  Description of Artificial Sequence: Synthetic oligonucleotide
ggggucgugcucucggagc

SEQ ID NO: 2838051 - RNA, 19 nt, Artificial Sequence
  Description of Artificial Sequence: Synthetic oligonucleotide
  modified_base (10)..(10): a, c, u, g, unknown or other
  modified_base (15)..(15): a, c, u, g, unknown or other
cuguggucgnacccnggaa

SEQ ID NO: 2838052 - RNA, 19 nt, Artificial Sequence
  Description of Artificial Sequence: Synthetic oligonucleotide
aaccuagauguuagcucaa

SEQ ID NO: 2838053 - RNA, 19 nt, Artificial Sequence
  Description of Artificial Sequence: Synthetic oligonucleotide
cuuggcaggccccaucugu

SEQ ID NO: 2838054 - RNA, 19 nt, Artificial Sequence
  Description of Artificial Sequence: Synthetic oligonucleotide
cgaaagggcuugaagaaga

SEQ ID NO: 2838055 - RNA, 19 nt, Artificial Sequence
  Description of Artificial Sequence: Synthetic oligonucleotide
cagcgaacccuggugcccc

SEQ ID NO: 2838056 - RNA, 19 nt, Artificial Sequence
  Description of Artificial Sequence: Synthetic oligonucleotide
cccucugguacuucccgcc

SEQ ID NO: 2838057 - RNA, 19 nt, Artificial Sequence
  Description of Artificial Sequence: Synthetic oligonucleotide
ccaggagccgcagcgaacc

SEQ ID NO: 2838058 - RNA, 19 nt, Artificial Sequence
  Description of Artificial Sequence: Synthetic oligonucleotide
gagucaggggucgugcucu

SEQ ID NO: 2838059 - RNA, 19 nt, Artificial Sequence
  Description of Artificial Sequence: Synthetic oligonucleotide
gauccaggagccgcagcga

SEQ ID NO: 2838060 - RNA, 19 nt, Artificial Sequence
  Description of Artificial Sequence: Synthetic oligonucleotide
gccccucugguacuucccg

SEQ ID NO: 2838061 - RNA, 19 nt, Artificial Sequence
  Description of Artificial Sequence: Synthetic oligonucleotide
acucuccgugcuugcauuu

SEQ ID NO: 2838062 - RNA, 19 nt, Artificial Sequence
  Description of Artificial Sequence: Synthetic oligonucleotide
cuccagggcgcucgcgaag

SEQ ID NO: 2838063 - RNA, 19 nt, Artificial Sequence
  Description of Artificial Sequence: Synthetic oligonucleotide
uuccgccgcagcuccgaga

SEQ ID NO: 2838064 - RNA, 19 nt, Artificial Sequence
  Description of Artificial Sequence: Synthetic oligonucleotide
gccccaucugugucagugg

SEQ ID NO: 2838065 - RNA, 19 nt, Artificial Sequence
  Description of Artificial Sequence: Synthetic oligonucleotide
acccacacagcgccgccau

SEQ ID NO: 2838066 - RNA, 19 nt, Artificial Sequence
  Description of Artificial Sequence: Synthetic oligonucleotide
agggcgcucgcgaagccug

SEQ ID NO: 2838067 - RNA, 19 nt, Artificial Sequence
  Description of Artificial Sequence: Synthetic oligonucleotide
ggagccccggcaugggacc

SEQ ID NO: 2838068 - RNA, 19 nt, Artificial Sequence
  Description of Artificial Sequence: Synthetic oligonucleotide
ucccgccauccaccucugg

SEQ ID NO: 2838069 - RNA, 19 nt, Artificial Sequence
  Description of Artificial Sequence: Synthetic oligonucleotide
gccgcagcgaacccuggug

SEQ ID NO: 2838070 - RNA, 19 nt, Artificial Sequence
  Description of Artificial Sequence: Synthetic oligonucleotide
ccuagauguuagcucaaga

SEQ ID NO: 2838071 - RNA, 19 nt, Artificial Sequence
  Description of Artificial Sequence: Synthetic oligonucleotide
uucccgccauccaccucug

SEQ ID NO: 2838072 - RNA, 19 nt, Artificial Sequence
  Description of Artificial Sequence: Synthetic oligonucleotide
ggagacucccguccgagcu

SEQ ID NO: 2838073 - RNA, 19 nt, Artificial Sequence
  Description of Artificial Sequence: Synthetic oligonucleotide
cucccgaggagcggaggag

SEQ ID NO: 2838074 - RNA, 19 nt, Artificial Sequence
  Description of Artificial Sequence: Synthetic oligonucleotide
ucucaggaaucggcuccca

SEQ ID NO: 2838075 - RNA, 19 nt, Artificial Sequence
  Description of Artificial Sequence: Synthetic oligonucleotide
agccgcagcgaacccuggu

SEQ ID NO: 2838076 - RNA, 19 nt, Artificial Sequence
  Description of Artificial Sequence: Synthetic oligonucleotide
agcgcucccgaggagcgga

SEQ ID NO: 2838077 - RNA, 19 nt, Artificial Sequence
  Description of Artificial Sequence: Synthetic oligonucleotide
guccaaugaccaguuuguc

SEQ ID NO: 2838078 - RNA, 19 nt, Artificial Sequence
  Description of Artificial Sequence: Synthetic oligonucleotide
ggagccgcagcgaacccug

SEQ ID NO: 2838079 - RNA, 19 nt, Artificial Sequence
  Description of Artificial Sequence: Synthetic oligonucleotide
aggagccgcagcgaacccu

SEQ ID NO: 2838080 - RNA, 19 nt, Artificial Sequence
  Description of Artificial Sequence: Synthetic oligonucleotide
cagcuccgagagucgcucc

SEQ ID NO: 2838081 - RNA, 19 nt, Artificial Sequence
  Description of Artificial Sequence: Synthetic oligonucleotide
caggccccaucugugucag

SEQ ID NO: 2838082 - RNA, 19 nt, Artificial Sequence
  Description of Artificial Sequence: Synthetic oligonucleotide
cuccgugcuugcauuucga

SEQ ID NO: 2838083 - RNA, 19 nt, Artificial Sequence
  Description of Artificial Sequence: Synthetic oligonucleotide
agccugcugagcgcucccg

SEQ ID NO: 2838084 - RNA, 19 nt, Artificial Sequence
  Description of Artificial Sequence: Synthetic oligonucleotide
ggagucaggggucgugcuc

SEQ ID NO: 2838085 - RNA, 19 nt, Artificial Sequence
  Description of Artificial Sequence: Synthetic oligonucleotide
gucaggggucgugcucucg

SEQ ID NO: 2838086 - RNA, 19 nt, Artificial Sequence
  Description of Artificial Sequence: Synthetic oligonucleotide
cucuccgugcuugcauuuc

SEQ ID NO: 2838087 - RNA, 19 nt, Artificial Sequence
  Description of Artificial Sequence: Synthetic oligonucleotide
ccaucugugucaguggaga

SEQ ID NO: 2838088 - RNA, 19 nt, Artificial Sequence
  Description of Artificial Sequence: Synthetic oligonucleotide
ccugcugagcgcucccgag

SEQ ID NO: 2838089 - RNA, 19 nt, Artificial Sequence
  Description of Artificial Sequence: Synthetic oligonucleotide
gcucgcgaagccugcugag

SEQ ID NO: 2838090 - RNA, 19 nt, Artificial Sequence
  Description of Artificial Sequence: Synthetic oligonucleotide
cuuccgccgcagcuccgag

SEQ ID NO: 2838091 - RNA, 19 nt, Artificial Sequence
  Description of Artificial Sequence: Synthetic oligonucleotide
ccgcagcgaacccuggugc

SEQ ID NO: 2838092 - RNA, 19 nt, Artificial Sequence
  Description of Artificial Sequence: Synthetic oligonucleotide
gucgugcucucggagccac

SEQ ID NO: 2838093 - RNA, 19 nt, Artificial Sequence
  Description of Artificial Sequence: Synthetic oligonucleotide
cagcauggaggcaaaggau

SEQ ID NO: 2838094 - RNA, 19 nt, Artificial Sequence
  Description of Artificial Sequence: Synthetic oligonucleotide
uccguccaaugaccaguuu

SEQ ID NO: 2838095 - RNA, 19 nt, Artificial Sequence
  Description of Artificial Sequence: Synthetic oligonucleotide
cccggcaugggacccacac

SEQ ID NO: 2838096 - RNA, 19 nt, Artificial Sequence
  Description of Artificial Sequence: Synthetic oligonucleotide
caggagccgcagcgaaccc

SEQ ID NO: 2838097 - RNA, 19 nt, Artificial Sequence
  Description of Artificial Sequence: Synthetic oligonucleotide
agagucgcuccagggcgcu

SEQ ID NO: 2838098 - RNA, 19 nt, Artificial Sequence
  Description of Artificial Sequence: Synthetic oligonucleotide
cauuucgaaagggcuugaa

SEQ ID NO: 2838099 - RNA, 19 nt, Artificial Sequence
  Description of Artificial Sequence: Synthetic oligonucleotide
guccuuggcaggccccauc

SEQ ID NO: 2838100 - RNA, 19 nt, Artificial Sequence
  Description of Artificial Sequence: Synthetic oligonucleotide
ggaggagucaggggucgug

SEQ ID NO: 2838101 - RNA, 19 nt, Artificial Sequence
  Description of Artificial Sequence: Synthetic oligonucleotide
acucggccuuccaguagag

SEQ ID NO: 2838102 - RNA, 19 nt, Artificial Sequence
  Description of Artificial Sequence: Synthetic oligonucleotide
ccgccauccaccucugguc

SEQ ID NO: 2838103 - RNA, 19 nt, Artificial Sequence
  Description of Artificial Sequence: Synthetic oligonucleotide
gcucaagauccaggagccg

SEQ ID NO: 2838104 - RNA, 19 nt, Artificial Sequence
  Description of Artificial Sequence: Synthetic oligonucleotide
gagcgcucccgaggagcgg

SEQ ID NO: 2838105 - RNA, 19 nt, Artificial Sequence
  Description of Artificial Sequence: Synthetic oligonucleotide
ucgugcucucggagccacu

SEQ ID NO: 2838106 - RNA, 19 nt, Artificial Sequence
  Description of Artificial Sequence: Synthetic oligonucleotide
guggagagugucucagcau

SEQ ID NO: 2838107 - RNA, 19 nt, Artificial Sequence
  Description of Artificial Sequence: Synthetic oligonucleotide
gcggaggagucaggggucg

SEQ ID NO: 2838108 - RNA, 19 nt, Artificial Sequence
  Description of Artificial Sequence: Synthetic oligonucleotide
gcagcgaacccuggugccc

SEQ ID NO: 2838109 - RNA, 19 nt, Artificial Sequence
  Description of Artificial Sequence: Synthetic oligonucleotide
gcucccaggagccccggca

SEQ ID NO: 2838110 - RNA, 19 nt, Artificial Sequence
  Description of Artificial Sequence: Synthetic oligonucleotide
gagccgcagcgaacccugg

SEQ ID NO: 2838111 - RNA, 19 nt, Artificial Sequence
  Description of Artificial Sequence: Synthetic oligonucleotide
cggccuuccaguagaguug

SEQ ID NO: 2838112 - RNA, 19 nt, Artificial Sequence
  Description of Artificial Sequence: Synthetic oligonucleotide
cagugaaacuugccaccaa

SEQ ID NO: 2838113 - RNA, 19 nt, Artificial Sequence
  Description of Artificial Sequence: Synthetic oligonucleotide
ucgcuccagggcgcucgcg

SEQ ID NO: 2838114 - RNA, 19 nt, Artificial Sequence
  Description of Artificial Sequence: Synthetic oligonucleotide
gacccacacagcgccgcca

SEQ ID NO: 2838115 - RNA, 19 nt, Artificial Sequence
  Description of Artificial Sequence: Synthetic oligonucleotide
auccguccaaugaccaguu

SEQ ID NO: 2838116 - RNA, 19 nt, Artificial Sequence
  Description of Artificial Sequence: Synthetic oligonucleotide
agcgaacccuggugccccu

SEQ ID NO: 2838117 - RNA, 19 nt, Artificial Sequence
  Description of Artificial Sequence: Synthetic oligonucleotide
gugucaguggagagugucu

SEQ ID NO: 2838118 - RNA, 19 nt, Artificial Sequence
  Description of Artificial Sequence: Synthetic oligonucleotide
gucgcuccagggcgcucgc

SEQ ID NO: 2838119 - RNA, 19 nt, Artificial Sequence
  Description of Artificial Sequence: Synthetic oligonucleotide
gagccccggcaugggaccc

SEQ ID NO: 2838120 - RNA, 19 nt, Artificial Sequence
  Description of Artificial Sequence: Synthetic oligonucleotide
gcucucggagccacucucc

SEQ ID NO: 2838121 - RNA, 19 nt, Artificial Sequence
  Description of Artificial Sequence: Synthetic oligonucleotide
gggacccacacagcgccgc

SEQ ID NO: 2838122 - RNA, 19 nt, Artificial Sequence
  Description of Artificial Sequence: Synthetic oligonucleotide
gcucccgaggagcggagga

SEQ ID NO: 2838123 - RNA, 19 nt, Artificial Sequence
  Description of Artificial Sequence: Synthetic oligonucleotide
ggacccacacagcgccgcc

SEQ ID NO: 2838124 - RNA, 19 nt, Artificial Sequence
  Description of Artificial Sequence: Synthetic oligonucleotide
ccccucugguacuucccgc

SEQ ID NO: 2838125 - RNA, 19 nt, Artificial Sequence
  Description of Artificial Sequence: Synthetic oligonucleotide
gcagcuccgagagucgcuc

SEQ ID NO: 2838126 - RNA, 19 nt, Artificial Sequence
  Description of Artificial Sequence: Synthetic oligonucleotide
uguccuuggcaggccccau

SEQ ID NO: 2838127 - RNA, 19 nt, Artificial Sequence
  Description of Artificial Sequence: Synthetic oligonucleotide
ccaguagaguuguaucugu

SEQ ID NO: 2838128 - RNA, 19 nt, Artificial Sequence
  Description of Artificial Sequence: Synthetic oligonucleotide
ggcaugggacccacacagc

SEQ ID NO: 2838129 - RNA, 19 nt, Artificial Sequence
  Description of Artificial Sequence: Synthetic oligonucleotide
gcugagcgcucccgaggag

SEQ ID NO: 2838130 - RNA, 19 nt, Artificial Sequence
  Description of Artificial Sequence: Synthetic oligonucleotide
cguccaaugaccaguuugu

SEQ ID NO: 2838131 - RNA, 19 nt, Artificial Sequence
  Description of Artificial Sequence: Synthetic oligonucleotide
gcuccgagagucgcuccag

SEQ ID NO: 2838132 - RNA, 19 nt, Artificial Sequence
  Description of Artificial Sequence: Synthetic oligonucleotide
cgcagcgaacccuggugcc

SEQ ID NO: 2838133 - RNA, 19 nt, Artificial Sequence
  Description of Artificial Sequence: Synthetic oligonucleotide
ccgugcuugcauuucgaaa

SEQ ID NO: 2838134 - RNA, 19 nt, Artificial Sequence
  Description of Artificial Sequence: Synthetic oligonucleotide
gacucccguccgagcuccg

SEQ ID NO: 2838135 - RNA, 19 nt, Artificial Sequence
  Description of Artificial Sequence: Synthetic oligonucleotide
ccuaagagaacucggccuu

SEQ ID NO: 2838136 - RNA, 19 nt, Artificial Sequence
  Description of Artificial Sequence: Synthetic oligonucleotide
ccccaucugugucagugga

SEQ ID NO: 2838137 - RNA, 19 nt, Artificial Sequence
  Description of Artificial Sequence: Synthetic oligonucleotide
  modified_base (6)..(6): a, c, u, g, unknown or other
  modified_base (11)..(11): a, c, u, g, unknown or other
ggucgnacccnggaaccua

SEQ ID NO: 2838138 - RNA, 19 nt, Artificial Sequence
  Description of Artificial Sequence: Synthetic oligonucleotide
caggagccccggcauggga

SEQ ID NO: 2838139 - RNA, 19 nt, Artificial Sequence
  Description of Artificial Sequence: Synthetic oligonucleotide
cuccgccuuccgccgcagc

SEQ ID NO: 2838140 - RNA, 19 nt, Artificial Sequence
  Description of Artificial Sequence: Synthetic oligonucleotide
gccgcagcuccgagagucg

SEQ ID NO: 2838141 - RNA, 19 nt, Artificial Sequence
  Description of Artificial Sequence: Synthetic oligonucleotide
cgcgaagccugcugagcgc

SEQ ID NO: 2838142 - RNA, 19 nt, Artificial Sequence
  Description of Artificial Sequence: Synthetic oligonucleotide
cacucuccgugcuugcauu

SEQ ID NO: 2838143 - RNA, 19 nt, Artificial Sequence
  Description of Artificial Sequence: Synthetic oligonucleotide
cccgaggagcggaggaguc

SEQ ID NO: 2838144 - RNA, 19 nt, Artificial Sequence
  Description of Artificial Sequence: Synthetic oligonucleotide
uggugccccucugguacuu

SEQ ID NO: 2838145 - RNA, 19 nt, Artificial Sequence
  Description of Artificial Sequence: Synthetic oligonucleotide
gcgcucgcgaagccugcug

SEQ ID NO: 2838146 - RNA, 19 nt, Artificial Sequence
  Description of Artificial Sequence: Synthetic oligonucleotide
cgcucucaggaaucggcuc

SEQ ID NO: 2838147 - RNA, 19 nt, Artificial Sequence
  Description of Artificial Sequence: Synthetic oligonucleotide
  modified_base (4)..(4): a, c, u, g, unknown or other
cccnggaaccuagauguua

SEQ ID NO: 2838148 - RNA, 19 nt, Artificial Sequence
  Description of Artificial Sequence: Synthetic oligonucleotide
gugcucucggagccacucu

SEQ ID NO: 2838149 - RNA, 19 nt, Artificial Sequence
  Description of Artificial Sequence: Synthetic oligonucleotide
caaugaccaguuuguccuu

SEQ ID NO: 2838150 - RNA, 19 nt, Artificial Sequence
  Description of Artificial Sequence: Synthetic oligonucleotide
cucugguacuucccgccau

SEQ ID NO: 2838151 - RNA, 19 nt, Artificial Sequence
  Description of Artificial Sequence: Synthetic oligonucleotide
ggccuuccaguagaguugu

SEQ ID NO: 2838152 - RNA, 19 nt, Artificial Sequence
  Description of Artificial Sequence: Synthetic oligonucleotide
gccugcugagcgcucccga

SEQ ID NO: 2838153 - RNA, 19 nt, Artificial Sequence
  Description of Artificial Sequence: Synthetic oligonucleotide
  modified_base (5)..(5): a, c, u, g, unknown or other
acccnggaaccuagauguu

SEQ ID NO: 2838154 - RNA, 19 nt, Artificial Sequence
  Description of Artificial Sequence: Synthetic oligonucleotide
ccucugguacuucccgcca

SEQ ID NO: 2838155 - RNA, 19 nt, Artificial Sequence
  Description of Artificial Sequence: Synthetic oligonucleotide
cgugcucucggagccacuc

SEQ ID NO: 2838156 - RNA, 19 nt, Artificial Sequence
  Description of Artificial Sequence: Synthetic oligonucleotide
gcuccagggcgcucgcgaa

SEQ ID NO: 2838157 - RNA, 19 nt, Artificial Sequence
  Description of Artificial Sequence: Synthetic oligonucleotide
ccuuccaguagaguuguau

SEQ ID NO: 2838158 - RNA, 19 nt, Artificial Sequence
  Description of Artificial Sequence: Synthetic oligonucleotide
cucccaggagccccggcau

SEQ ID NO: 2838159 - RNA, 19 nt, Artificial Sequence
  Description of Artificial Sequence: Synthetic oligonucleotide
ccaggagccccggcauggg

SEQ ID NO: 2838160 - RNA, 19 nt, Artificial Sequence
  Description of Artificial Sequence: Synthetic oligonucleotide
agccccggcaugggaccca

SEQ ID NO: 2838161 - RNA, 19 nt, Artificial Sequence
  Description of Artificial Sequence: Synthetic oligonucleotide
cugugucaguggagagugu

SEQ ID NO: 2838162 - RNA, 19 nt, Artificial Sequence
  Description of Artificial Sequence: Synthetic oligonucleotide
gagucgcuccagggcgcuc

SEQ ID NO: 2838163 - RNA, 19 nt, Artificial Sequence
  Description of Artificial Sequence: Synthetic oligonucleotide
cuggugccccucugguacu

SEQ ID NO: 2838164 - RNA, 19 nt, Artificial Sequence
  Description of Artificial Sequence: Synthetic oligonucleotide
ccgcagcuccgagagucgc

SEQ ID NO: 2838165 - RNA, 19 nt, Artificial Sequence
  Description of Artificial Sequence: Synthetic oligonucleotide
gcgaagccugcugagcgcu

SEQ ID NO: 2838166 - RNA, 19 nt, Artificial Sequence
  Description of Artificial Sequence: Synthetic oligonucleotide
ggucgugcucucggagcca

SEQ ID NO: 2838167 - RNA, 19 nt, Artificial Sequence
  Description of Artificial Sequence: Synthetic oligonucleotide
ccggcaugggacccacaca

SEQ ID NO: 2838168 - RNA, 19 nt, Artificial Sequence
  Description of Artificial Sequence: Synthetic oligonucleotide
cccgccauccaccucuggu

SEQ ID NO: 2838169 - RNA, 19 nt, Artificial Sequence
  Description of Artificial Sequence: Synthetic oligonucleotide
ggugccccucugguacuuc

SEQ ID NO: 2838170 - RNA, 19 nt, Artificial Sequence
  Description of Artificial Sequence: Synthetic oligonucleotide
cgcucgcgaagccugcuga

SEQ ID NO: 2838171 - RNA, 19 nt, Artificial Sequence
  Description of Artificial Sequence: Synthetic oligonucleotide
gcgcucucaggaaucggcu

SEQ ID NO: 2838172 - RNA, 19 nt, Artificial Sequence
  Description of Artificial Sequence: Synthetic oligonucleotide
ccuccacaauaugaaagau

SEQ ID NO: 2838173 - RNA, 19 nt, Artificial Sequence
  Description of Artificial Sequence: Synthetic oligonucleotide
cucggccuuccaguagagu

SEQ ID NO: 2838174 - RNA, 19 nt, Artificial Sequence
  Description of Artificial Sequence: Synthetic oligonucleotide
gggcgcucgcgaagccugc

SEQ ID NO: 2838175 - RNA, 19 nt, Artificial Sequence
  Description of Artificial Sequence: Synthetic oligonucleotide
cagggcgcucgcgaagccu

SEQ ID NO: 2838176 - RNA, 19 nt, Artificial Sequence
  Description of Artificial Sequence: Synthetic oligonucleotide
cgcuccagggcgcucgcga

SEQ ID NO: 2838177 - RNA, 19 nt, Artificial Sequence
  Description of Artificial Sequence: Synthetic oligonucleotide
ccgaggagcggaggaguca

SEQ ID NO: 2838178 - RNA, 19 nt, Artificial Sequence
  Description of Artificial Sequence: Synthetic oligonucleotide
gccuuccgccgcagcuccg

SEQ ID NO: 2838179 - RNA, 19 nt, Artificial Sequence
  Description of Artificial Sequence: Synthetic oligonucleotide
cgaagccugcugagcgcuc

SEQ ID NO: 2838180 - RNA, 19 nt, Artificial Sequence
  Description of Artificial Sequence: Synthetic oligonucleotide
ccuuccgccgcagcuccga

SEQ ID NO: 2838181 - RNA, 19 nt, Artificial Sequence
  Description of Artificial Sequence: Synthetic oligonucleotide
  modified_base (3)..(3): a, c, u, g, unknown or other
  modified_base (8)..(8): a, c, u, g, unknown or other
cgnacccnggaaccuagau

SEQ ID NO: 2838182 - RNA, 19 nt, Artificial Sequence
  Description of Artificial Sequence: Synthetic oligonucleotide
gcuccgccuuccgccgcag

SEQ ID NO: 2838183 - RNA, 19 nt, Artificial Sequence
  Description of Artificial Sequence: Synthetic oligonucleotide
gcgcucccgaggagcggag

SEQ ID NO: 2838184 - RNA, 19 nt, Artificial Sequence
  Description of Artificial Sequence: Synthetic oligonucleotide
cgccauccaccucuggucu

SEQ ID NO: 2838185 - RNA, 19 nt, Artificial Sequence
  Description of Artificial Sequence: Synthetic oligonucleotide
cgcucccgaggagcggagg

SEQ ID NO: 2838186 - RNA, 19 nt, Artificial Sequence
  Description of Artificial Sequence: Synthetic oligonucleotide
cccuggugccccucuggua

SEQ ID NO: 2838187 - RNA, 19 nt, Artificial Sequence
  Description of Artificial Sequence: Synthetic oligonucleotide
gccccggcaugggacccac

SEQ ID NO: 2838188 - RNA, 19 nt, Artificial Sequence
  Description of Artificial Sequence: Synthetic oligonucleotide
gcgaacccuggugccccuc

SEQ ID NO: 2838189 - RNA, 19 nt, Artificial Sequence
  Description of Artificial Sequence: Synthetic oligonucleotide
ggcgcucgcgaagccugcu

SEQ ID NO: 2838190 - RNA, 19 nt, Artificial Sequence
  Description of Artificial Sequence: Synthetic oligonucleotide
cgaacccuggugccccucu

SEQ ID NO: 2838191 - RNA, 19 nt, Artificial Sequence
  Description of Artificial Sequence: Synthetic oligonucleotide
cgcagcuccgagagucgcu

SEQ ID NO: 2838192 - RNA, 19 nt, Artificial Sequence
  Description of Artificial Sequence: Synthetic oligonucleotide
gccuuccaguagaguugua

SEQ ID NO: 2838193 - RNA, 19 nt, Artificial Sequence
  Description of Artificial Sequence: Synthetic oligonucleotide
ccccggcaugggacccaca

SEQ ID NO: 2838194 - RNA, 19 nt, Artificial Sequence
  Description of Artificial Sequence: Synthetic oligonucleotide
cggaggagucaggggucgu

SEQ ID NO: 2838195 - RNA, 19 nt, Artificial Sequence
  Description of Artificial Sequence: Synthetic oligonucleotide
ccgccgcagcuccgagagu

SEQ ID NO: 2838196 - RNA, 19 nt, Artificial Sequence
  Description of Artificial Sequence: Synthetic oligonucleotide
  modified_base (1)..(1): a, c, u, g, unknown or other
  modified_base (6)..(6): a, c, u, g, unknown or other
nacccnggaaccuagaugu

SEQ ID NO: 2838197 - RNA, 19 nt, Artificial Sequence
  Description of Artificial Sequence: Synthetic oligonucleotide
  modified_base (1)..(1): a, c, u, g, unknown or other
nggaaccuagauguuagcu

SEQ ID NO: 2838198 - RNA, 19 nt, Artificial Sequence
  Description of Artificial Sequence: Synthetic oligonucleotide
auaauggcaaaguauaccc

SEQ ID NO: 2838199 - RNA, 19 nt, Artificial Sequence
  Description of Artificial Sequence: Synthetic oligonucleotide
aauaacuuggacucuaauc

SEQ ID NO: 2838200 - RNA, 19 nt, Artificial Sequence
  Description of Artificial Sequence: Synthetic oligonucleotide
aauacuacccuuuccacgg

SEQ ID NO: 2838201 - RNA, 19 nt, Artificial Sequence
  Description of Artificial Sequence: Synthetic oligonucleotide
acaaauacuucauauacac

SEQ ID NO: 2838202 - RNA, 19 nt, Artificial Sequence
  Description of Artificial Sequence: Synthetic oligonucleotide
aaauacuucauauacacaa

SEQ ID NO: 2838203 - RNA, 19 nt, Artificial Sequence
  Description of Artificial Sequence: Synthetic oligonucleotide
aauaauggcaaaguauacc

SEQ ID NO: 2838204 - RNA, 19 nt, Artificial Sequence
  Description of Artificial Sequence: Synthetic oligonucleotide
aagacaaugaguuuuauua

SEQ ID NO: 2838205 - RNA, 19 nt, Artificial Sequence
  Description of Artificial Sequence: Synthetic oligonucleotide
auuccaauaacugugauuc

SEQ ID NO: 2838206 - RNA, 19 nt, Artificial Sequence
  Description of Artificial Sequence: Synthetic oligonucleotide
aguaauaauguacugaaca

SEQ ID NO: 2838207 - RNA, 19 nt, Artificial Sequence
  Description of Artificial Sequence: Synthetic oligonucleotide
uuugauuuaguauaugaca

SEQ ID NO: 2838208 - RNA, 19 nt, Artificial Sequence
  Description of Artificial Sequence: Synthetic oligonucleotide
auaacuuggacucuaauca

SEQ ID NO: 2838209 - RNA, 19 nt, Artificial Sequence
  Description of Artificial Sequence: Synthetic oligonucleotide
aaacacuggaaguugggac

SEQ ID NO: 2838210 - RNA, 19 nt, Artificial Sequence
  Description of Artificial Sequence: Synthetic oligonucleotide
auuaucaaaccuuguaaac

SEQ ID NO: 2838211 - RNA, 19 nt, Artificial Sequence
  Description of Artificial Sequence: Synthetic oligonucleotide
aacaaauuccaauaacugu

SEQ ID NO: 2838212 - RNA, 19 nt, Artificial Sequence
  Description of Artificial Sequence: Synthetic oligonucleotide
uguucuuuacacaauguug

SEQ ID NO: 2838213 - RNA, 19 nt, Artificial Sequence
  Description of Artificial Sequence: Synthetic oligonucleotide
aauaauguacugaacauca

SEQ ID NO: 2838214 - RNA, 19 nt, Artificial Sequence
  Description of Artificial Sequence: Synthetic oligonucleotide
ucauauacacaacaaauuc

SEQ ID NO: 2838215 - RNA, 19 nt, Artificial Sequence
  Description of Artificial Sequence: Synthetic oligonucleotide
uuuuauuagugucugcagc

SEQ ID NO: 2838216 - RNA, 19 nt, Artificial Sequence
  Description of Artificial Sequence: Synthetic oligonucleotide
uugauuuaguauaugacaa

SEQ ID NO: 2838217 - RNA, 19 nt, Artificial Sequence
  Description of Artificial Sequence: Synthetic oligonucleotide
cauauacacaacaaauucc

SEQ ID NO: 2838218 - RNA, 19 nt, Artificial Sequence
  Description of Artificial Sequence: Synthetic oligonucleotide
uaauguacugaacaucaag

SEQ ID NO: 2838219 - RNA, 19 nt, Artificial Sequence
  Description of Artificial Sequence: Synthetic oligonucleotide
acacuauggaauuaucugg

SEQ ID NO: 2838220 - RNA, 19 nt, Artificial Sequence
  Description of Artificial Sequence: Synthetic oligonucleotide
acuaaaagcacugucaaug

SEQ ID NO: 2838221 - RNA, 19 nt, Artificial Sequence
  Description of Artificial Sequence: Synthetic oligonucleotide
uuuauuagugucugcagca

SEQ ID NO: 2838222 - RNA, 19 nt, Artificial Sequence
  Description of Artificial Sequence: Synthetic oligonucleotide
agcuguacauaauaauggc

SEQ ID NO: 2838223 - RNA, 19 nt, Artificial Sequence
  Description of Artificial Sequence: Synthetic oligonucleotide
agaaaagggaauacuaccc

SEQ ID NO: 2838224 - RNA, 19 nt, Artificial Sequence
  Description of Artificial Sequence: Synthetic oligonucleotide
uguaaacacuggaaguugg

SEQ ID NO: 2838225 - RNA, 19 nt, Artificial Sequence
  Description of Artificial Sequence: Synthetic oligonucleotide
uagaaaagggaauacuacc

SEQ ID NO: 2838226 - RNA, 19 nt, Artificial Sequence
  Description of Artificial Sequence: Synthetic oligonucleotide
acaauguugcaacagccac

SEQ ID NO: 2838227 - RNA, 19 nt, Artificial Sequence
  Description of Artificial Sequence: Synthetic oligonucleotide
uugggacugaauaacuugg

SEQ ID NO: 2838228 - RNA, 19 nt, Artificial Sequence
  Description of Artificial Sequence: Synthetic oligonucleotide
gacugaauaacuuggacuc

SEQ ID NO: 2838229 - RNA, 19 nt, Artificial Sequence
  Description of Artificial Sequence: Synthetic oligonucleotide
uguacugaacaucaagaca

SEQ ID NO: 2838230 - RNA, 19 nt, Artificial Sequence
  Description of Artificial Sequence: Synthetic oligonucleotide
gaauacuacccuuuccacg

SEQ ID NO: 2838231 - RNA, 19 nt, Artificial Sequence
  Description of Artificial Sequence: Synthetic oligonucleotide
aauuaucugguccuuuuga

SEQ ID NO: 2838232 - RNA, 19 nt, Artificial Sequence
  Description of Artificial Sequence: Synthetic oligonucleotide
auguacugaacaucaagac

SEQ ID NO: 2838233 - RNA, 19 nt, Artificial Sequence
  Description of Artificial Sequence: Synthetic oligonucleotide
aacaucaagacaaugaguu

SEQ ID NO: 2838234 - RNA, 19 nt, Artificial Sequence
  Description of Artificial Sequence: Synthetic oligonucleotide
ugcaacagccacuaaaagc

SEQ ID NO: 2838235 - RNA, 19 nt, Artificial Sequence
  Description of Artificial Sequence: Synthetic oligonucleotide
cuuuacacaauguugcaac

SEQ ID NO: 2838236 - RNA, 19 nt, Artificial Sequence
  Description of Artificial Sequence: Synthetic oligonucleotide
acugcuuccguguggaucg

SEQ ID NO: 2838237 - RNA, 19 nt, Artificial Sequence
  Description of Artificial Sequence: Synthetic oligonucleotide
uaucaaaccuuguaaacac

SEQ ID NO: 2838238 - RNA, 19 nt, Artificial Sequence
  Description of Artificial Sequence: Synthetic oligonucleotide
gauuccuuguucuuuacac

SEQ ID NO: 2838239 - RNA, 19 nt, Artificial Sequence
  Description of Artificial Sequence: Synthetic oligonucleotide
aauacuucauauacacaac

SEQ ID NO: 2838240 - RNA, 19 nt, Artificial Sequence
  Description of Artificial Sequence: Synthetic oligonucleotide
aauguacugaacaucaaga

SEQ ID NO: 2838241 - RNA, 19 nt, Artificial Sequence
  Description of Artificial Sequence: Synthetic oligonucleotide
aagacagaugacaagagcu

SEQ ID NO: 2838242 - RNA, 19 nt, Artificial Sequence
  Description of Artificial Sequence: Synthetic oligonucleotide
ugcagcauagaaaagggaa

SEQ ID NO: 2838243 - RNA, 19 nt, Artificial Sequence
  Description of Artificial Sequence: Synthetic oligonucleotide
acaaauuccaauaacugug

SEQ ID NO: 2838244 - RNA, 19 nt, Artificial Sequence
  Description of Artificial Sequence: Synthetic oligonucleotide
uauggaauuaucugguccu

SEQ ID NO: 2838245 - RNA, 19 nt, Artificial Sequence
  Description of Artificial Sequence: Synthetic oligonucleotide
augacaagagcucagcucu

SEQ ID NO: 2838246 - RNA, 19 nt, Artificial Sequence
  Description of Artificial Sequence: Synthetic oligonucleotide
auagaaaagggaauacuac

SEQ ID NO: 2838247 - RNA, 19 nt, Artificial Sequence
  Description of Artificial Sequence: Synthetic oligonucleotide
agcacugucaaugcaaucg

SEQ ID NO: 2838248 - RNA, 19 nt, Artificial Sequence
  Description of Artificial Sequence: Synthetic oligonucleotide
acgacaaguaauaauguac

SEQ ID NO: 2838249 - RNA, 19 nt, Artificial Sequence
  Description of Artificial Sequence: Synthetic oligonucleotide
uuaucaaaccuuguaaaca

SEQ ID NO: 2838250 - RNA, 19 nt, Artificial Sequence
  Description of Artificial Sequence: Synthetic oligonucleotide
cagcuguacauaauaaugg

SEQ ID NO: 2838251 - RNA, 19 nt, Artificial Sequence
  Description of Artificial Sequence: Synthetic oligonucleotide
ugcacugcaaagagcaggg

SEQ ID NO: 2838252 - RNA, 19 nt, Artificial Sequence
  Description of Artificial Sequence: Synthetic oligonucleotide
uacacaacaaauuccaaua

SEQ ID NO: 2838253 - RNA, 19 nt, Artificial Sequence
  Description of Artificial Sequence: Synthetic oligonucleotide
aacacuggaaguugggacu

SEQ ID NO: 2838254 - RNA, 19 nt, Artificial Sequence
  Description of Artificial Sequence: Synthetic oligonucleotide
uacacaauguugcaacagc

SEQ ID NO: 2838255 - RNA, 19 nt, Artificial Sequence
  Description of Artificial Sequence: Synthetic oligonucleotide
aucacgacaaguaauaaug

SEQ ID NO: 2838256 - RNA, 19 nt, Artificial Sequence
  Description of Artificial Sequence: Synthetic oligonucleotide
guucuuuacacaauguugc

SEQ ID NO: 2838257 - RNA, 19 nt, Artificial Sequence
  Description of Artificial Sequence: Synthetic oligonucleotide
aauaacugugauuccuugu

SEQ ID NO: 2838258 - RNA, 19 nt, Artificial Sequence
  Description of Artificial Sequence: Synthetic oligonucleotide
caaaguauacccuugggca

SEQ ID NO: 2838259 - RNA, 19 nt, Artificial Sequence
  Description of Artificial Sequence: Synthetic oligonucleotide
uucauauacacaacaaauu

SEQ ID NO: 2838260 - RNA, 19 nt, Artificial Sequence
  Description of Artificial Sequence: Synthetic oligonucleotide
ucuaaucacgacaaguaau

SEQ ID NO: 2838261 - RNA, 19 nt, Artificial Sequence
  Description of Artificial Sequence: Synthetic oligonucleotide
caacaaauuccaauaacug

SEQ ID NO: 2838262 - RNA, 19 nt, Artificial Sequence
  Description of Artificial Sequence: Synthetic oligonucleotide
uuggacucuaaucacgaca

SEQ ID NO: 2838263 - RNA, 19 nt, Artificial Sequence
  Description of Artificial Sequence: Synthetic oligonucleotide
agacaaugaguuuuauuag

SEQ ID NO: 2838264 - RNA, 19 nt, Artificial Sequence
  Description of Artificial Sequence: Synthetic oligonucleotide
cacacuauggaauuaucug

SEQ ID NO: 2838265 - RNA, 19 nt, Artificial Sequence
  Description of Artificial Sequence: Synthetic oligonucleotide
cuauggaauuaucuggucc

SEQ ID NO: 2838266 - RNA, 19 nt, Artificial Sequence
  Description of Artificial Sequence: Synthetic oligonucleotide
gauuaucaaaccuuguaaa

SEQ ID NO: 2838267 - RNA, 19 nt, Artificial Sequence
  Description of Artificial Sequence: Synthetic oligonucleotide
ucagcugucguguaggggu

SEQ ID NO: 2838268 - RNA, 19 nt, Artificial Sequence
  Description of Artificial Sequence: Synthetic oligonucleotide
aagggaauacuacccuuuc

SEQ ID NO: 2838269 - RNA, 19 nt, Artificial Sequence
  Description of Artificial Sequence: Synthetic oligonucleotide
aauggcaaaguauacccuu

SEQ ID NO: 2838270 - RNA, 19 nt, Artificial Sequence
  Description of Artificial Sequence: Synthetic oligonucleotide
uguugcaacagccacuaaa

SEQ ID NO: 2838271 - RNA, 19 nt, Artificial Sequence
  Description of Artificial Sequence: Synthetic oligonucleotide
aaucacgacaaguaauaau

SEQ ID NO: 2838272 - RNA, 19 nt, Artificial Sequence
  Description of Artificial Sequence: Synthetic oligonucleotide
cuaaaagcacugucaaugc

SEQ ID NO: 2838273 - RNA, 19 nt, Artificial Sequence
  Description of Artificial Sequence: Synthetic oligonucleotide
guuaaagucagcugucgug

SEQ ID NO: 2838274 - RNA, 19 nt, Artificial Sequence
  Description of Artificial Sequence: Synthetic oligonucleotide
auaauaauggcaaaguaua

SEQ ID NO: 2838275 - RNA, 19 nt, Artificial Sequence
  Description of Artificial Sequence: Synthetic oligonucleotide
uggaaguugggacugaaua

SEQ ID NO: 2838276 - RNA, 19 nt, Artificial Sequence
  Description of Artificial Sequence: Synthetic oligonucleotide
acaacaaauuccaauaacu

SEQ ID NO: 2838277 - RNA, 19 nt, Artificial Sequence
  Description of Artificial Sequence: Synthetic oligonucleotide
uaauaauggcaaaguauac

SEQ ID NO: 2838278 - RNA, 19 nt, Artificial Sequence
  Description of Artificial Sequence: Synthetic oligonucleotide
auacuucauauacacaaca

SEQ ID NO: 2838279 - RNA, 19 nt, Artificial Sequence
  Description of Artificial Sequence: Synthetic oligonucleotide
gcagcaaucacacugcucc

SEQ ID NO: 2838280 - RNA, 19 nt, Artificial Sequence
  Description of Artificial Sequence: Synthetic oligonucleotide
uacauaauaauggcaaagu

SEQ ID NO: 2838281 - RNA, 19 nt, Artificial Sequence
  Description of Artificial Sequence: Synthetic oligonucleotide
auauacacaacaaauucca

SEQ ID NO: 2838282 - RNA, 19 nt, Artificial Sequence
  Description of Artificial Sequence: Synthetic oligonucleotide
aaagucagcugucguguag

SEQ ID NO: 2838283 - RNA, 19 nt, Artificial Sequence
  Description of Artificial Sequence: Synthetic oligonucleotide
aaaguauacccuugggcaa

SEQ ID NO: 2838284 - RNA, 19 nt, Artificial Sequence
  Description of Artificial Sequence: Synthetic oligonucleotide
aauuccaauaacugugauu

SEQ ID NO: 2838285 - RNA, 19 nt, Artificial Sequence
  Description of Artificial Sequence: Synthetic oligonucleotide
aguuuuauuagugucugca

SEQ ID NO: 2838286 - RNA, 19 nt, Artificial Sequence
  Description of Artificial Sequence: Synthetic oligonucleotide
cucagcucuuccuacaacc

SEQ ID NO: 2838287 - RNA, 19 nt, Artificial Sequence
  Description of Artificial Sequence: Synthetic oligonucleotide
uggacucuaaucacgacaa

SEQ ID NO: 2838288 - RNA, 19 nt, Artificial Sequence
  Description of Artificial Sequence: Synthetic oligonucleotide
aaucacacugcuccucuug

SEQ ID NO: 2838289 - RNA, 19 nt, Artificial Sequence
  Description of Artificial Sequence: Synthetic oligonucleotide
uuaaagucagcugucgugu

SEQ ID NO: 2838290 - RNA, 19 nt, Artificial Sequence
  Description of Artificial Sequence: Synthetic oligonucleotide
uggauuaucaaaccuugua

SEQ ID NO: 2838291 - RNA, 19 nt, Artificial Sequence
  Description of Artificial Sequence: Synthetic oligonucleotide
guuuuauuagugucugcag

SEQ ID NO: 2838292 - RNA, 19 nt, Artificial Sequence
  Description of Artificial Sequence: Synthetic oligonucleotide
uaucugguccuuuugauuu

SEQ ID NO: 2838293 - RNA, 19 nt, Artificial Sequence
  Description of Artificial Sequence: Synthetic oligonucleotide
aacuuggacucuaaucacg

SEQ ID NO: 2838294 - RNA, 19 nt, Artificial Sequence
  Description of Artificial Sequence: Synthetic oligonucleotide
aaguauacccuugggcaac

SEQ ID NO: 2838295 - RNA, 19 nt, Artificial Sequence
  Description of Artificial Sequence: Synthetic oligonucleotide
acacaauguugcaacagcc

SEQ ID NO: 2838296 - RNA, 19 nt, Artificial Sequence
  Description of Artificial Sequence: Synthetic oligonucleotide
auacacaacaaauuccaau

SEQ ID NO: 2838297 - RNA, 19 nt, Artificial Sequence
  Description of Artificial Sequence: Synthetic oligonucleotide
agggaauacuacccuuucc

SEQ ID NO: 2838298 - RNA, 19 nt, Artificial Sequence
  Description of Artificial Sequence: Synthetic oligonucleotide
gacaaguaauaauguacug

SEQ ID NO: 2838299 - RNA, 19 nt, Artificial Sequence
  Description of Artificial Sequence: Synthetic oligonucleotide
aacaaauacuucauauaca

SEQ ID NO: 2838300 - RNA, 19 nt, Artificial Sequence
  Description of Artificial Sequence: Synthetic oligonucleotide
cugaacaucaagacaauga

SEQ ID NO: 2838301 - RNA, 19 nt, Artificial Sequence
  Description of Artificial Sequence: Synthetic oligonucleotide
guugggacugaauaacuug

SEQ ID NO: 2838302 - RNA, 19 nt, Artificial Sequence
  Description of Artificial Sequence: Synthetic oligonucleotide
acaagagcucagcucuucc

SEQ ID NO: 2838303 - RNA, 19 nt, Artificial Sequence
  Description of Artificial Sequence: Synthetic oligonucleotide
guacauaauaauggcaaag

SEQ ID NO: 2838304 - RNA, 19 nt, Artificial Sequence
  Description of Artificial Sequence: Synthetic oligonucleotide
uguuacugcuuccgugugg

SEQ ID NO: 2838305 - RNA, 19 nt, Artificial Sequence
  Description of Artificial Sequence: Synthetic oligonucleotide
uuuacacaauguugcaaca

SEQ ID NO: 2838306 - RNA, 19 nt, Artificial Sequence
  Description of Artificial Sequence: Synthetic oligonucleotide
uaaaagcacugucaaugca

SEQ ID NO: 2838307 - RNA, 19 nt, Artificial Sequence
  Description of Artificial Sequence: Synthetic oligonucleotide
uacuucauauacacaacaa

SEQ ID NO: 2838308 - RNA, 19 nt, Artificial Sequence
  Description of Artificial Sequence: Synthetic oligonucleotide
acccuugggcaacaaauac

SEQ ID NO: 2838309 - RNA, 19 nt, Artificial Sequence
  Description of Artificial Sequence: Synthetic oligonucleotide
uggcaaaguauacccuugg

SEQ ID NO: 2838310 - RNA, 19 nt, Artificial Sequence
  Description of Artificial Sequence: Synthetic oligonucleotide
gauuuaguauaugacaaaa

SEQ ID NO: 2838311 - RNA, 19 nt, Artificial Sequence
  Description of Artificial Sequence: Synthetic oligonucleotide
aaaagcacugucaaugcaa

SEQ ID NO: 2838312 - RNA, 19 nt, Artificial Sequence
  Description of Artificial Sequence: Synthetic oligonucleotide
cuguacauaauaauggcaa

SEQ ID NO: 2838313 - RNA, 19 nt, Artificial Sequence
  Description of Artificial Sequence: Synthetic oligonucleotide
uuccuuguucuuuacacaa

SEQ ID NO: 2838314 - RNA, 19 nt, Artificial Sequence
  Description of Artificial Sequence: Synthetic oligonucleotide
aaugcaaucgggguccaca

SEQ ID NO: 2838315 - RNA, 19 nt, Artificial Sequence
  Description of Artificial Sequence: Synthetic oligonucleotide
gaaguugggacugaauaac

SEQ ID NO: 2838316 - RNA, 19 nt, Artificial Sequence
  Description of Artificial Sequence: Synthetic oligonucleotide
acuauggaauuaucugguc

SEQ ID NO: 2838317 - RNA, 19 nt, Artificial Sequence
  Description of Artificial Sequence: Synthetic oligonucleotide
aagucagcugucguguagg

SEQ ID NO: 2838318 - RNA, 19 nt, Artificial Sequence
  Description of Artificial Sequence: Synthetic oligonucleotide
auuagugucugcagcauag

SEQ ID NO: 2838319 - RNA, 19 nt, Artificial Sequence
  Description of Artificial Sequence: Synthetic oligonucleotide
agcauagaaaagggaauac

SEQ ID NO: 2838320 - RNA, 19 nt, Artificial Sequence
  Description of Artificial Sequence: Synthetic oligonucleotide
uuguucuuuacacaauguu

SEQ ID NO: 2838321 - RNA, 19 nt, Artificial Sequence
  Description of Artificial Sequence: Synthetic oligonucleotide
uuacacaauguugcaacag

SEQ ID NO: 2838322 - RNA, 19 nt, Artificial Sequence
  Description of Artificial Sequence: Synthetic oligonucleotide
auaacugugauuccuuguu

SEQ ID NO: 2838323 - RNA, 19 nt, Artificial Sequence
  Description of Artificial Sequence: Synthetic oligonucleotide
uaguuaaagucagcugucg

SEQ ID NO: 2838324 - RNA, 19 nt, Artificial Sequence
  Description of Artificial Sequence: Synthetic oligonucleotide
gaauuaucugguccuuuug

SEQ ID NO: 2838325 - RNA, 19 nt, Artificial Sequence
  Description of Artificial Sequence: Synthetic oligonucleotide
uguacauaauaauggcaaa

SEQ ID NO: 2838326 - RNA, 19 nt, Artificial Sequence
  Description of Artificial Sequence: Synthetic oligonucleotide
cauagaaaagggaauacua

SEQ ID NO: 2838327 - RNA, 19 nt, Artificial Sequence
  Description of Artificial Sequence: Synthetic oligonucleotide
agagcucagcucuuccuac

SEQ ID NO: 2838328 - RNA, 19 nt, Artificial Sequence
  Description of Artificial Sequence: Synthetic oligonucleotide
uccaauaacugugauuccu

SEQ ID NO: 2838329 - RNA, 19 nt, Artificial Sequence
  Description of Artificial Sequence: Synthetic oligonucleotide
ugucaaugcaaucgggguc

SEQ ID NO: 2838330 - RNA, 19 nt, Artificial Sequence
  Description of Artificial Sequence: Synthetic oligonucleotide
acugucaaugcaaucgggg

SEQ ID NO: 2838331 - RNA, 19 nt, Artificial Sequence
  Description of Artificial Sequence: Synthetic oligonucleotide
ucacgacaaguaauaaugu

SEQ ID NO: 2838332 - RNA, 19 nt, Artificial Sequence
  Description of Artificial Sequence: Synthetic oligonucleotide
aauguugcaacagccacua

SEQ ID NO: 2838333 - RNA, 19 nt, Artificial Sequence
  Description of Artificial Sequence: Synthetic oligonucleotide
gugucugcagcauagaaaa

SEQ ID NO: 2838334 - RNA, 19 nt, Artificial Sequence
  Description of Artificial Sequence: Synthetic oligonucleotide
cacaacaaauuccaauaac

SEQ ID NO: 2838335 - RNA, 19 nt, Artificial Sequence
  Description of Artificial Sequence: Synthetic oligonucleotide
ucagcucuuccuacaaccc

SEQ ID NO: 2838336 - RNA, 19 nt, Artificial Sequence
  Description of Artificial Sequence: Synthetic oligonucleotide
ugauuuaguauaugacaaa

SEQ ID NO: 2838337 - RNA, 19 nt, Artificial Sequence
  Description of Artificial Sequence: Synthetic oligonucleotide
cagggcagcaaucacacug

SEQ ID NO: 2838338 - RNA, 19 nt, Artificial Sequence
  Description of Artificial Sequence: Synthetic oligonucleotide
acauaauaauggcaaagua

SEQ ID NO: 2838339 - RNA, 19 nt, Artificial Sequence
  Description of Artificial Sequence: Synthetic oligonucleotide
guccuuuugauuuaguaua

SEQ ID NO: 2838340 - RNA, 19 nt, Artificial Sequence
  Description of Artificial Sequence: Synthetic oligonucleotide
agccacuaaaagcacuguc

SEQ ID NO: 2838341 - RNA, 19 nt, Artificial Sequence
  Description of Artificial Sequence: Synthetic oligonucleotide
uaauggcaaaguauacccu

SEQ ID NO: 2838342 - RNA, 19 nt, Artificial Sequence
  Description of Artificial Sequence: Synthetic oligonucleotide
cauaauaauggcaaaguau

SEQ ID NO: 2838343 - RNA, 19 nt, Artificial Sequence
  Description of Artificial Sequence: Synthetic oligonucleotide
uugcaacagccacuaaaag

SEQ ID NO: 2838344 - RNA, 19 nt, Artificial Sequence
  Description of Artificial Sequence: Synthetic oligonucleotide
aaauuccaauaacugugau

SEQ ID NO: 2838345 - RNA, 19 nt, Artificial Sequence
  Description of Artificial Sequence: Synthetic oligonucleotide
acugcaaagagcagggcag

SEQ ID NO: 2838346 - RNA, 19 nt, Artificial Sequence
  Description of Artificial Sequence: Synthetic oligonucleotide
uucuuuacacaauguugca

SEQ ID NO: 2838347 - RNA, 19 nt, Artificial Sequence
  Description of Artificial Sequence: Synthetic oligonucleotide
uuccguguggaucgggugc

SEQ ID NO: 2838348 - RNA, 19 nt, Artificial Sequence
  Description of Artificial Sequence: Synthetic oligonucleotide
auuaucugguccuuuugau

SEQ ID NO: 2838349 - RNA, 19 nt, Artificial Sequence
  Description of Artificial Sequence: Synthetic oligonucleotide
uaacuuggacucuaaucac

SEQ ID NO: 2838350 - RNA, 19 nt, Artificial Sequence
  Description of Artificial Sequence: Synthetic oligonucleotide
gcaaaguauacccuugggc

SEQ ID NO: 2838351 - RNA, 19 nt, Artificial Sequence
  Description of Artificial Sequence: Synthetic oligonucleotide
aaccccuguuacugcuucc

SEQ ID NO: 2838352 - RNA, 19 nt, Artificial Sequence
  Description of Artificial Sequence: Synthetic oligonucleotide
uauacacaacaaauuccaa

SEQ ID NO: 2838353 - RNA, 19 nt, Artificial Sequence
  Description of Artificial Sequence: Synthetic oligonucleotide
cuaaucacgacaaguaaua

SEQ ID NO: 2838354 - RNA, 19 nt, Artificial Sequence
  Description of Artificial Sequence: Synthetic oligonucleotide
ugugauuccuuguucuuua

SEQ ID NO: 2838355 - RNA, 19 nt, Artificial Sequence
  Description of Artificial Sequence: Synthetic oligonucleotide
uaaacacuggaaguuggga

SEQ ID NO: 2838356 - RNA, 19 nt, Artificial Sequence
  Description of Artificial Sequence: Synthetic oligonucleotide
ugauuccuuguucuuuaca

SEQ ID NO: 2838357 - RNA, 19 nt, Artificial Sequence
  Description of Artificial Sequence: Synthetic oligonucleotide
aguuaaagucagcugucgu

SEQ ID NO: 2838358 - RNA, 19 nt, Artificial Sequence
  Description of Artificial Sequence: Synthetic oligonucleotide
aagcacugucaaugcaauc

SEQ ID NO: 2838359 - RNA, 19 nt, Artificial Sequence
  Description of Artificial Sequence: Synthetic oligonucleotide
augcaaucgggguccacac

SEQ ID NO: 2838360 - RNA, 19 nt, Artificial Sequence
  Description of Artificial Sequence: Synthetic oligonucleotide
agguaguuaaagucagcug

SEQ ID NO: 2838361 - RNA, 19 nt, Artificial Sequence
  Description of Artificial Sequence: Synthetic oligonucleotide
gucaaugcaaucggggucc

SEQ ID NO: 2838362 - RNA, 19 nt, Artificial Sequence
  Description of Artificial Sequence: Synthetic oligonucleotide
gguaguuaaagucagcugu

SEQ ID NO: 2838363 - RNA, 19 nt, Artificial Sequence
  Description of Artificial Sequence: Synthetic oligonucleotide
cacacugcuccucuugucc

SEQ ID NO: 2838364 - RNA, 19 nt, Artificial Sequence
  Description of Artificial Sequence: Synthetic oligonucleotide
uagggguugggcuuacagc

SEQ ID NO: 2838365 - RNA, 19 nt, Artificial Sequence
  Description of Artificial Sequence: Synthetic oligonucleotide
gacaaugaguuuuauuagu

SEQ ID NO: 2838366 - RNA, 19 nt, Artificial Sequence
  Description of Artificial Sequence: Synthetic oligonucleotide
gcaacagccacuaaaagca

SEQ ID NO: 2838367 - RNA, 19 nt, Artificial Sequence
  Description of Artificial Sequence: Synthetic oligonucleotide
agacagaugacaagagcuc

SEQ ID NO: 2838368 - RNA, 19 nt, Artificial Sequence
  Description of Artificial Sequence: Synthetic oligonucleotide
ugggcaacaaauacuucau

SEQ ID NO: 2838369 - RNA, 19 nt, Artificial Sequence
  Description of Artificial Sequence: Synthetic oligonucleotide
caauaacugugauuccuug

SEQ ID NO: 2838370 - RNA, 19 nt, Artificial Sequence
  Description of Artificial Sequence: Synthetic oligonucleotide
agcagggcagcaaucacac

SEQ ID NO: 2838371 - RNA, 19 nt, Artificial Sequence
  Description of Artificial Sequence: Synthetic oligonucleotide
uugggcuuacagccgcugg

SEQ ID NO: 2838372 - RNA, 19 nt, Artificial Sequence
  Description of Artificial Sequence: Synthetic oligonucleotide
agagcagggcagcaaucac

SEQ ID NO: 2838373 - RNA, 19 nt, Artificial Sequence
  Description of Artificial Sequence: Synthetic oligonucleotide
guaaacacuggaaguuggg

SEQ ID NO: 2838374 - RNA, 19 nt, Artificial Sequence
  Description of Artificial Sequence: Synthetic oligonucleotide
gaucgggugcacugcaaag

SEQ ID NO: 2838375 - RNA, 19 nt, Artificial Sequence
  Description of Artificial Sequence: Synthetic oligonucleotide
aagagcucagcucuuccua

SEQ ID NO: 2838376 - RNA, 19 nt, Artificial Sequence
  Description of Artificial Sequence: Synthetic oligonucleotide
ugaauaacuuggacucuaa

SEQ ID NO: 2838377 - RNA, 19 nt, Artificial Sequence
  Description of Artificial Sequence: Synthetic oligonucleotide
guagggguugggcuuacag

SEQ ID NO: 2838378 - RNA, 19 nt, Artificial Sequence
  Description of Artificial Sequence: Synthetic oligonucleotide
ucgggguccacacuaugga

SEQ ID NO: 2838379 - RNA, 19 nt, Artificial Sequence
  Description of Artificial Sequence: Synthetic oligonucleotide
acacaacaaauuccaauaa

SEQ ID NO: 2838380 - RNA, 19 nt, Artificial Sequence
  Description of Artificial Sequence: Synthetic oligonucleotide
aaagagcagggcagcaauc

SEQ ID NO: 2838381 - RNA, 19 nt, Artificial Sequence
  Description of Artificial Sequence: Synthetic oligonucleotide
agccgcuggauuaucaaac

SEQ ID NO: 2838382 - RNA, 19 nt, Artificial Sequence
  Description of Artificial Sequence: Synthetic oligonucleotide
caaauuccaauaacuguga

SEQ ID NO: 2838383 - RNA, 19 nt, Artificial Sequence
  Description of Artificial Sequence: Synthetic oligonucleotide
agaugacaagagcucagcu

SEQ ID NO: 2838384 - RNA, 19 nt, Artificial Sequence
  Description of Artificial Sequence: Synthetic oligonucleotide
ucuuuacacaauguugcaa

SEQ ID NO: 2838385 - RNA, 19 nt, Artificial Sequence
  Description of Artificial Sequence: Synthetic oligonucleotide
agcagcuguacauaauaau

SEQ ID NO: 2838386 - RNA, 19 nt, Artificial Sequence
  Description of Artificial Sequence: Synthetic oligonucleotide
gaaaagggaauacuacccu

SEQ ID NO: 2838387 - RNA, 19 nt, Artificial Sequence
  Description of Artificial Sequence: Synthetic oligonucleotide
guaauaauguacugaacau

SEQ ID NO: 2838388 - RNA, 19 nt, Artificial Sequence
  Description of Artificial Sequence: Synthetic oligonucleotide
uuuccacggagaaacuguc

SEQ ID NO: 2838389 - RNA, 19 nt, Artificial Sequence
  Description of Artificial Sequence: Synthetic oligonucleotide
ggauuaucaaaccuuguaa

SEQ ID NO: 2838390 - RNA, 19 nt, Artificial Sequence
  Description of Artificial Sequence: Synthetic oligonucleotide
uuaucugguccuuuugauu

SEQ ID NO: 2838391 - RNA, 19 nt, Artificial Sequence
  Description of Artificial Sequence: Synthetic oligonucleotide
ugggacugaauaacuugga

SEQ ID NO: 2838392 - RNA, 19 nt, Artificial Sequence
  Description of Artificial Sequence: Synthetic oligonucleotide
gcagcuguacauaauaaug

SEQ ID NO: 2838393 - RNA, 19 nt, Artificial Sequence
  Description of Artificial Sequence: Synthetic oligonucleotide
agggcagcaaucacacugc

SEQ ID NO: 2838394 - RNA, 19 nt, Artificial Sequence
  Description of Artificial Sequence: Synthetic oligonucleotide
gggaauacuacccuuucca

SEQ ID NO: 2838395 - RNA, 19 nt, Artificial Sequence
  Description of Artificial Sequence: Synthetic oligonucleotide
aaucgggguccacacuaug

SEQ ID NO: 2838396 - RNA, 19 nt, Artificial Sequence
  Description of Artificial Sequence: Synthetic oligonucleotide
aacuguccagcagcuguac

SEQ ID NO: 2838397 - RNA, 19 nt, Artificial Sequence
  Description of Artificial Sequence: Synthetic oligonucleotide
uagugucugcagcauagaa

SEQ ID NO: 2838398 - RNA, 19 nt, Artificial Sequence
  Description of Artificial Sequence: Synthetic oligonucleotide
uacuacccuuuccacggag

SEQ ID NO: 2838399 - RNA, 19 nt, Artificial Sequence
  Description of Artificial Sequence: Synthetic oligonucleotide
gugcacugcaaagagcagg

SEQ ID NO: 2838400 - RNA, 19 nt, Artificial Sequence
  Description of Artificial Sequence: Synthetic oligonucleotide
ugguccuuuugauuuagua

SEQ ID NO: 2838401 - RNA, 19 nt, Artificial Sequence
  Description of Artificial Sequence: Synthetic oligonucleotide
aaccuuguaaacacuggaa

SEQ ID NO: 2838402 - RNA, 19 nt, Artificial Sequence
  Description of Artificial Sequence: Synthetic oligonucleotide
gaguuuuauuagugucugc

SEQ ID NO: 2838403 - RNA, 19 nt, Artificial Sequence
  Description of Artificial Sequence: Synthetic oligonucleotide
aaagcacugucaaugcaau

SEQ ID NO: 2838404 - RNA, 19 nt, Artificial Sequence
  Description of Artificial Sequence: Synthetic oligonucleotide
uauacccuugggcaacaaa

SEQ ID NO: 2838405 - RNA, 19 nt, Artificial Sequence
  Description of Artificial Sequence: Synthetic oligonucleotide
ucuuccuacaaccccuguu

SEQ ID NO: 2838406 - RNA, 19 nt, Artificial Sequence
  Description of Artificial Sequence: Synthetic oligonucleotide
uacaaccccuguuacugcu

SEQ ID NO: 2838407 - RNA, 19 nt, Artificial Sequence
  Description of Artificial Sequence: Synthetic oligonucleotide
cacugucaaugcaaucggg

SEQ ID NO: 2838408 - RNA, 19 nt, Artificial Sequence
  Description of Artificial Sequence: Synthetic oligonucleotide
ugggcuuacagccgcugga

SEQ ID NO: 2838409 - RNA, 19 nt, Artificial Sequence
  Description of Artificial Sequence: Synthetic oligonucleotide
uuccacggagaaacugucc

SEQ ID NO: 2838410 - RNA, 19 nt, Artificial Sequence
  Description of Artificial Sequence: Synthetic oligonucleotide
auacccuugggcaacaaau

SEQ ID NO: 2838411 - RNA, 19 nt, Artificial Sequence
  Description of Artificial Sequence: Synthetic oligonucleotide
ugucugcagcauagaaaag

SEQ ID NO: 2838412 - RNA, 19 nt, Artificial Sequence
  Description of Artificial Sequence: Synthetic oligonucleotide
aaguugggacugaauaacu

SEQ ID NO: 2838413 - RNA, 19 nt, Artificial Sequence
  Description of Artificial Sequence: Synthetic oligonucleotide
ucugguccuuuugauuuag

SEQ ID NO: 2838414 - RNA, 19 nt, Artificial Sequence
  Description of Artificial Sequence: Synthetic oligonucleotide
guugcaacagccacuaaaa

SEQ ID NO: 2838415 - RNA, 19 nt, Artificial Sequence
  Description of Artificial Sequence: Synthetic oligonucleotide
acagccacuaaaagcacug

SEQ ID NO: 2838416 - RNA, 19 nt, Artificial Sequence
  Description of Artificial Sequence: Synthetic oligonucleotide
uuccuacaaccccuguuac

SEQ ID NO: 2838417 - RNA, 19 nt, Artificial Sequence
  Description of Artificial Sequence: Synthetic oligonucleotide
agucagcugucguguaggg

SEQ ID NO: 2838418 - RNA, 19 nt, Artificial Sequence
  Description of Artificial Sequence: Synthetic oligonucleotide
uuccaauaacugugauucc

SEQ ID NO: 2838419 - RNA, 19 nt, Artificial Sequence
  Description of Artificial Sequence: Synthetic oligonucleotide
acugaacaucaagacaaug

SEQ ID NO: 2838420 - RNA, 19 nt, Artificial Sequence
  Description of Artificial Sequence: Synthetic oligonucleotide
acucuaaucacgacaagua

SEQ ID NO: 2838421 - RNA, 19 nt, Artificial Sequence
  Description of Artificial Sequence: Synthetic oligonucleotide
caaauacuucauauacaca

SEQ ID NO: 2838422 - RNA, 19 nt, Artificial Sequence
  Description of Artificial Sequence: Synthetic oligonucleotide
aucacacugcuccucuugu

SEQ ID NO: 2838423 - RNA, 19 nt, Artificial Sequence
  Description of Artificial Sequence: Synthetic oligonucleotide
ggcaaaguauacccuuggg

SEQ ID NO: 2838424 - RNA, 19 nt, Artificial Sequence
  Description of Artificial Sequence: Synthetic oligonucleotide
aacagccacuaaaagcacu

SEQ ID NO: 2838425 - RNA, 19 nt, Artificial Sequence
  Description of Artificial Sequence: Synthetic oligonucleotide
uacagccgcuggauuauca

SEQ ID NO: 2838426 - RNA, 19 nt, Artificial Sequence
  Description of Artificial Sequence: Synthetic oligonucleotide
cacaauguugcaacagcca

SEQ ID NO: 2838427 - RNA, 19 nt, Artificial Sequence
  Description of Artificial Sequence: Synthetic oligonucleotide
gagguaguuaaagucagcu

SEQ ID NO: 2838428 - RNA, 19 nt, Artificial Sequence
  Description of Artificial Sequence: Synthetic oligonucleotide
uacccuugggcaacaaaua

SEQ ID NO: 2838429 - RNA, 19 nt, Artificial Sequence
  Description of Artificial Sequence: Synthetic oligonucleotide
agcaaucacacugcuccuc

SEQ ID NO: 2838430 - RNA, 19 nt, Artificial Sequence
  Description of Artificial Sequence: Synthetic oligonucleotide
uaaucacgacaaguaauaa

SEQ ID NO: 2838431 - RNA, 19 nt, Artificial Sequence
  Description of Artificial Sequence: Synthetic oligonucleotide
aucgggguccacacuaugg

SEQ ID NO: 2838432 - RNA, 19 nt, Artificial Sequence
  Description of Artificial Sequence: Synthetic oligonucleotide
uccacacuauggaauuauc

SEQ ID NO: 2838433 - RNA, 19 nt, Artificial Sequence
  Description of Artificial Sequence: Synthetic oligonucleotide
acggagaaacuguccagca

SEQ ID NO: 2838434 - RNA, 19 nt, Artificial Sequence
  Description of Artificial Sequence: Synthetic oligonucleotide
uccuacaaccccuguuacu

SEQ ID NO: 2838435 - RNA, 19 nt, Artificial Sequence
  Description of Artificial Sequence: Synthetic oligonucleotide
gcacugucaaugcaaucgg

SEQ ID NO: 2838436 - RNA, 19 nt, Artificial Sequence
  Description of Artificial Sequence: Synthetic oligonucleotide
guaguuaaagucagcuguc

SEQ ID NO: 2838437 - RNA, 19 nt, Artificial Sequence
  Description of Artificial Sequence: Synthetic oligonucleotide
acuuggacucuaaucacga

SEQ ID NO: 2838438 - RNA, 19 nt, Artificial Sequence
  Description of Artificial Sequence: Synthetic oligonucleotide
acagaugacaagagcucag

SEQ ID NO: 2838439 - RNA, 19 nt, Artificial Sequence
  Description of Artificial Sequence: Synthetic oligonucleotide
uguggaucgggugcacugc

SEQ ID NO: 2838440 - RNA, 19 nt, Artificial Sequence
  Description of Artificial Sequence: Synthetic oligonucleotide
cuacaaccccuguuacugc

SEQ ID NO: 2838441 - RNA, 19 nt, Artificial Sequence
  Description of Artificial Sequence: Synthetic oligonucleotide
cuuccuacaaccccuguua

SEQ ID NO: 2838442 - RNA, 19 nt, Artificial Sequence
  Description of Artificial Sequence: Synthetic oligonucleotide
gacucuaaucacgacaagu

SEQ ID NO: 2838443 - RNA, 19 nt, Artificial Sequence
  Description of Artificial Sequence: Synthetic oligonucleotide
cagaugacaagagcucagc

SEQ ID NO: 2838444 - RNA, 19 nt, Artificial Sequence
  Description of Artificial Sequence: Synthetic oligonucleotide
uacugaacaucaagacaau

SEQ ID NO: 2838445 - RNA, 19 nt, Artificial Sequence
  Description of Artificial Sequence: Synthetic oligonucleotide
ccuuguucuuuacacaaug

SEQ ID NO: 2838446 - RNA, 19 nt, Artificial Sequence
  Description of Artificial Sequence: Synthetic oligonucleotide
cagcucuuccuacaacccc

SEQ ID NO: 2838447 - RNA, 19 nt, Artificial Sequence
  Description of Artificial Sequence: Synthetic oligonucleotide
guguggaucgggugcacug

SEQ ID NO: 2838448 - RNA, 19 nt, Artificial Sequence
  Description of Artificial Sequence: Synthetic oligonucleotide
cacugcaaagagcagggca

SEQ ID NO: 2838449 - RNA, 19 nt, Artificial Sequence
  Description of Artificial Sequence: Synthetic oligonucleotide
guuacugcuuccgugugga

SEQ ID NO: 2838450 - RNA, 19 nt, Artificial Sequence
  Description of Artificial Sequence: Synthetic oligonucleotide
ggaauacuacccuuuccac

SEQ ID NO: 2838451 - RNA, 19 nt, Artificial Sequence
  Description of Artificial Sequence: Synthetic oligonucleotide
agugucugcagcauagaaa

SEQ ID NO: 2838452 - RNA, 19 nt, Artificial Sequence
  Description of Artificial Sequence: Synthetic oligonucleotide
gcuggauuaucaaaccuug

SEQ ID NO: 2838453 - RNA, 19 nt, Artificial Sequence
  Description of Artificial Sequence: Synthetic oligonucleotide
uccuuguucuuuacacaau

SEQ ID NO: 2838454 - RNA, 19 nt, Artificial Sequence
  Description of Artificial Sequence: Synthetic oligonucleotide
ggaaguugggacugaauaa

SEQ ID NO: 2838455 - RNA, 19 nt, Artificial Sequence
  Description of Artificial Sequence: Synthetic oligonucleotide
ccuacaaccccuguuacug

SEQ ID NO: 2838456 - RNA, 19 nt, Artificial Sequence
  Description of Artificial Sequence: Synthetic oligonucleotide
cuuggacucuaaucacgac

SEQ ID NO: 2838457 - RNA, 19 nt, Artificial Sequence
  Description of Artificial Sequence: Synthetic oligonucleotide
ggacugaauaacuuggacu

SEQ ID NO: 2838458 - RNA, 19 nt, Artificial Sequence
  Description of Artificial Sequence: Synthetic oligonucleotide
cucuaaucacgacaaguaa

SEQ ID NO: 2838459 - RNA, 19 nt, Artificial Sequence
  Description of Artificial Sequence: Synthetic oligonucleotide
accccuguuacugcuuccg

SEQ ID NO: 2838460 - RNA, 19 nt, Artificial Sequence
  Description of Artificial Sequence: Synthetic oligonucleotide
uacugcuuccguguggauc

SEQ ID NO: 2838461 - RNA, 19 nt, Artificial Sequence
  Description of Artificial Sequence: Synthetic oligonucleotide
acacugcuccucuugucca

SEQ ID NO: 2838462 - RNA, 19 nt, Artificial Sequence
  Description of Artificial Sequence: Synthetic oligonucleotide
cuuuccacggagaaacugu

SEQ ID NO: 2838463 - RNA, 19 nt, Artificial Sequence
  Description of Artificial Sequence: Synthetic oligonucleotide
uuagugucugcagcauaga

SEQ ID NO: 2838464 - RNA, 19 nt, Artificial Sequence
  Description of Artificial Sequence: Synthetic oligonucleotide
auggcaaaguauacccuug

SEQ ID NO: 2838465 - RNA, 19 nt, Artificial Sequence
  Description of Artificial Sequence: Synthetic oligonucleotide
caacagccacuaaaagcac

SEQ ID NO: 2838466 - RNA, 19 nt, Artificial Sequence
  Description of Artificial Sequence: Synthetic oligonucleotide
cuuccguguggaucgggug

SEQ ID NO: 2838467 - RNA, 19 nt, Artificial Sequence
  Description of Artificial Sequence: Synthetic oligonucleotide
ggcaacaaauacuucauau

SEQ ID NO: 2838468 - RNA, 19 nt, Artificial Sequence
  Description of Artificial Sequence: Synthetic oligonucleotide
gcaacaaauacuucauaua

SEQ ID NO: 2838469 - RNA, 19 nt, Artificial Sequence
  Description of Artificial Sequence: Synthetic oligonucleotide
acugaauaacuuggacucu

SEQ ID NO: 2838470 - RNA, 19 nt, Artificial Sequence
  Description of Artificial Sequence: Synthetic oligonucleotide
gggacugaauaacuuggac

SEQ ID NO: 2838471 - RNA, 19 nt, Artificial Sequence
  Description of Artificial Sequence: Synthetic oligonucleotide
cacuauggaauuaucuggu

SEQ ID NO: 2838472 - RNA, 19 nt, Artificial Sequence
  Description of Artificial Sequence: Synthetic oligonucleotide
acugugauuccuuguucuu

SEQ ID NO: 2838473 - RNA, 19 nt, Artificial Sequence
  Description of Artificial Sequence: Synthetic oligonucleotide
cuugggcaacaaauacuuc

SEQ ID NO: 2838474 - RNA, 19 nt, Artificial Sequence
  Description of Artificial Sequence: Synthetic oligonucleotide
ugcaaucgggguccacacu

SEQ ID NO: 2838475 - RNA, 19 nt, Artificial Sequence
  Description of Artificial Sequence: Synthetic oligonucleotide
aucgggugcacugcaaaga

SEQ ID NO: 2838476 - RNA, 19 nt, Artificial Sequence
  Description of Artificial Sequence: Synthetic oligonucleotide
uaaagucagcugucgugua

SEQ ID NO: 2838477 - RNA, 19 nt, Artificial Sequence
  Description of Artificial Sequence: Synthetic oligonucleotide
ucguguagggguugggcuu

SEQ ID NO: 2838478 - RNA, 19 nt, Artificial Sequence
  Description of Artificial Sequence: Synthetic oligonucleotide
gaacaucaagacaaugagu

SEQ ID NO: 2838479 - RNA, 19 nt, Artificial Sequence
  Description of Artificial Sequence: Synthetic oligonucleotide
cacgacaaguaauaaugua

SEQ ID NO: 2838480 - RNA, 19 nt, Artificial Sequence
  Description of Artificial Sequence: Synthetic oligonucleotide
gggugcacugcaaagagca

SEQ ID NO: 2838481 - RNA, 19 nt, Artificial Sequence
  Description of Artificial Sequence: Synthetic oligonucleotide
acagccgcuggauuaucaa

SEQ ID NO: 2838482 - RNA, 19 nt, Artificial Sequence
  Description of Artificial Sequence: Synthetic oligonucleotide
cuuguucuuuacacaaugu

SEQ ID NO: 2838483 - RNA, 19 nt, Artificial Sequence
  Description of Artificial Sequence: Synthetic oligonucleotide
gccacuaaaagcacuguca

SEQ ID NO: 2838484 - RNA, 19 nt, Artificial Sequence
  Description of Artificial Sequence: Synthetic oligonucleotide
aucaaaccuuguaaacacu

SEQ ID NO: 2838485 - RNA, 19 nt, Artificial Sequence
  Description of Artificial Sequence: Synthetic oligonucleotide
ucaagacaaugaguuuuau

SEQ ID NO: 2838486 - RNA, 19 nt, Artificial Sequence
  Description of Artificial Sequence: Synthetic oligonucleotide
gucagcugucguguagggg

SEQ ID NO: 2838487 - RNA, 19 nt, Artificial Sequence
  Description of Artificial Sequence: Synthetic oligonucleotide
gagcagggcagcaaucaca

SEQ ID NO: 2838488 - RNA, 19 nt, Artificial Sequence
  Description of Artificial Sequence: Synthetic oligonucleotide
cuuguaaacacuggaaguu

SEQ ID NO: 2838489 - RNA, 19 nt, Artificial Sequence
  Description of Artificial Sequence: Synthetic oligonucleotide
aucaagacaaugaguuuua

SEQ ID NO: 2838490 - RNA, 19 nt, Artificial Sequence
  Description of Artificial Sequence: Synthetic oligonucleotide
gcuguacauaauaauggca

SEQ ID NO: 2838491 - RNA, 19 nt, Artificial Sequence
  Description of Artificial Sequence: Synthetic oligonucleotide
gaauaacuuggacucuaau

SEQ ID NO: 2838492 - RNA, 19 nt, Artificial Sequence
  Description of Artificial Sequence: Synthetic oligonucleotide
gugauuccuuguucuuuac

SEQ ID NO: 2838493 - RNA, 19 nt, Artificial Sequence
  Description of Artificial Sequence: Synthetic oligonucleotide
gguccuuuugauuuaguau

SEQ ID NO: 2838494 - RNA, 19 nt, Artificial Sequence
  Description of Artificial Sequence: Synthetic oligonucleotide
aaacuguccagcagcugua

SEQ ID NO: 2838495 - RNA, 19 nt, Artificial Sequence
  Description of Artificial Sequence: Synthetic oligonucleotide
cugcaaagagcagggcagc

SEQ ID NO: 2838496 - RNA, 19 nt, Artificial Sequence
  Description of Artificial Sequence: Synthetic oligonucleotide
gacaagagcucagcucuuc

SEQ ID NO: 2838497 - RNA, 19 nt, Artificial Sequence
  Description of Artificial Sequence: Synthetic oligonucleotide
uccguguggaucgggugca

SEQ ID NO: 2838498 - RNA, 19 nt, Artificial Sequence
  Description of Artificial Sequence: Synthetic oligonucleotide
cugucaaugcaaucggggu

SEQ ID NO: 2838499 - RNA, 19 nt, Artificial Sequence
  Description of Artificial Sequence: Synthetic oligonucleotide
auaauguacugaacaucaa

SEQ ID NO: 2838500 - RNA, 19 nt, Artificial Sequence
  Description of Artificial Sequence: Synthetic oligonucleotide
caaccccuguuacugcuuc

SEQ ID NO: 2838501 - RNA, 19 nt, Artificial Sequence
  Description of Artificial Sequence: Synthetic oligonucleotide
agaaacuguccagcagcug

SEQ ID NO: 2838502 - RNA, 19 nt, Artificial Sequence
  Description of Artificial Sequence: Synthetic oligonucleotide
aguugggacugaauaacuu

SEQ ID NO: 2838503 - RNA, 19 nt, Artificial Sequence
  Description of Artificial Sequence: Synthetic oligonucleotide
gagcucagcucuuccuaca

SEQ ID NO: 2838504 - RNA, 19 nt, Artificial Sequence
  Description of Artificial Sequence: Synthetic oligonucleotide
caucaagacaaugaguuuu

SEQ ID NO: 2838505 - RNA, 19 nt, Artificial Sequence
  Description of Artificial Sequence: Synthetic oligonucleotide
uggaauuaucugguccuuu

SEQ ID NO: 2838506 - RNA, 19 nt, Artificial Sequence
  Description of Artificial Sequence: Synthetic oligonucleotide
gccgcuggauuaucaaacc

SEQ ID NO: 2838507 - RNA, 19 nt, Artificial Sequence
  Description of Artificial Sequence: Synthetic oligonucleotide
cugcagcauagaaaaggga

SEQ ID NO: 2838508 - RNA, 19 nt, Artificial Sequence
  Description of Artificial Sequence: Synthetic oligonucleotide
caauguugcaacagccacu

SEQ ID NO: 2838509 - RNA, 19 nt, Artificial Sequence
  Description of Artificial Sequence: Synthetic oligonucleotide
auacuacccuuuccacgga

SEQ ID NO: 2838510 - RNA, 19 nt, Artificial Sequence
  Description of Artificial Sequence: Synthetic oligonucleotide
uggaucgggugcacugcaa

SEQ ID NO: 2838511 - RNA, 19 nt, Artificial Sequence
  Description of Artificial Sequence: Synthetic oligonucleotide
ugacaagagcucagcucuu

SEQ ID NO: 2838512 - RNA, 19 nt, Artificial Sequence
  Description of Artificial Sequence: Synthetic oligonucleotide
cugaauaacuuggacucua

SEQ ID NO: 2838513 - RNA, 19 nt, Artificial Sequence
  Description of Artificial Sequence: Synthetic oligonucleotide
gucguguagggguugggcu

SEQ ID NO: 2838514 - RNA, 19 nt, Artificial Sequence
  Description of Artificial Sequence: Synthetic oligonucleotide
aguauacccuugggcaaca

SEQ ID NO: 2838515 - RNA, 19 nt, Artificial Sequence
  Description of Artificial Sequence: Synthetic oligonucleotide
cagcauagaaaagggaaua

SEQ ID NO: 2838516 - RNA, 19 nt, Artificial Sequence
  Description of Artificial Sequence: Synthetic oligonucleotide
acuacccuuuccacggaga

SEQ ID NO: 2838517 - RNA, 19 nt, Artificial Sequence
  Description of Artificial Sequence: Synthetic oligonucleotide
aucugguccuuuugauuua

SEQ ID NO: 2838518 - RNA, 19 nt, Artificial Sequence
  Description of Artificial Sequence: Synthetic oligonucleotide
cagcagcuguacauaauaa

SEQ ID NO: 2838519 - RNA, 19 nt, Artificial Sequence
  Description of Artificial Sequence: Synthetic oligonucleotide
gcaaucgggguccacacua

SEQ ID NO: 2838520 - RNA, 19 nt, Artificial Sequence
  Description of Artificial Sequence: Synthetic oligonucleotide
ggguugggcuuacagccgc

SEQ ID NO: 2838521 - RNA, 19 nt, Artificial Sequence
  Description of Artificial Sequence: Synthetic oligonucleotide
ugcuuccguguggaucggg

SEQ ID NO: 2838522 - RNA, 19 nt, Artificial Sequence
  Description of Artificial Sequence: Synthetic oligonucleotide
gcuuacagccgcuggauua

SEQ ID NO: 2838523 - RNA, 19 nt, Artificial Sequence
  Description of Artificial Sequence: Synthetic oligonucleotide
guugggcuuacagccgcug

SEQ ID NO: 2838524 - RNA, 19 nt, Artificial Sequence
  Description of Artificial Sequence: Synthetic oligonucleotide
caaagagcagggcagcaau

SEQ ID NO: 2838525 - RNA, 19 nt, Artificial Sequence
  Description of Artificial Sequence: Synthetic oligonucleotide
ucaaugcaaucggggucca

SEQ ID NO: 2838526 - RNA, 19 nt, Artificial Sequence
  Description of Artificial Sequence: Synthetic oligonucleotide
ggacucuaaucacgacaag

SEQ ID NO: 2838527 - RNA, 19 nt, Artificial Sequence
  Description of Artificial Sequence: Synthetic oligonucleotide
caagacaaugaguuuuauu

SEQ ID NO: 2838528 - RNA, 19 nt, Artificial Sequence
  Description of Artificial Sequence: Synthetic oligonucleotide
acuggaaguugggacugaa

SEQ ID NO: 2838529 - RNA, 19 nt, Artificial Sequence
  Description of Artificial Sequence: Synthetic oligonucleotide
guggaucgggugcacugca

SEQ ID NO: 2838530 - RNA, 19 nt, Artificial Sequence
  Description of Artificial Sequence: Synthetic oligonucleotide
ccuuguaaacacuggaagu

SEQ ID NO: 2838531 - RNA, 19 nt, Artificial Sequence
  Description of Artificial Sequence: Synthetic oligonucleotide
ccacuaaaagcacugucaa

SEQ ID NO: 2838532 - RNA, 19 nt, Artificial Sequence
  Description of Artificial Sequence: Synthetic oligonucleotide
cccuguuacugcuuccgug

SEQ ID NO: 2838533 - RNA, 19 nt, Artificial Sequence
  Description of Artificial Sequence: Synthetic oligonucleotide
auggaauuaucugguccuu

SEQ ID NO: 2838534 - RNA, 19 nt, Artificial Sequence
  Description of Artificial Sequence: Synthetic oligonucleotide
caagagcucagcucuuccu

SEQ ID NO: 2838535 - RNA, 19 nt, Artificial Sequence
  Description of Artificial Sequence: Synthetic oligonucleotide
ggaauuaucugguccuuuu

SEQ ID NO: 2838536 - RNA, 19 nt, Artificial Sequence
  Description of Artificial Sequence: Synthetic oligonucleotide
cuggauuaucaaaccuugu

SEQ ID NO: 2838537 - RNA, 19 nt, Artificial Sequence
  Description of Artificial Sequence: Synthetic oligonucleotide
gcauagaaaagggaauacu

SEQ ID NO: 2838538 - RNA, 19 nt, Artificial Sequence
  Description of Artificial Sequence: Synthetic oligonucleotide
cgacaaguaauaauguacu

SEQ ID NO: 2838539 - RNA, 19 nt, Artificial Sequence
  Description of Artificial Sequence: Synthetic oligonucleotide
gggguugggcuuacagccg

SEQ ID NO: 2838540 - RNA, 19 nt, Artificial Sequence
  Description of Artificial Sequence: Synthetic oligonucleotide
cugucguguagggguuggg

SEQ ID NO: 2838541 - RNA, 19 nt, Artificial Sequence
  Description of Artificial Sequence: Synthetic oligonucleotide
gcugucguguagggguugg

SEQ ID NO: 2838542 - RNA, 19 nt, Artificial Sequence
  Description of Artificial Sequence: Synthetic oligonucleotide
ggaucgggugcacugcaaa

SEQ ID NO: 2838543 - RNA, 19 nt, Artificial Sequence
  Description of Artificial Sequence: Synthetic oligonucleotide
uuacagccgcuggauuauc

SEQ ID NO: 2838544 - RNA, 19 nt, Artificial Sequence
  Description of Artificial Sequence: Synthetic oligonucleotide
cagccgcuggauuaucaaa

SEQ ID NO: 2838545 - RNA, 19 nt, Artificial Sequence
  Description of Artificial Sequence: Synthetic oligonucleotide
uguagggguugggcuuaca

SEQ ID NO: 2838546 - RNA, 19 nt, Artificial Sequence
  Description of Artificial Sequence: Synthetic oligonucleotide
ggugcacugcaaagagcag

SEQ ID NO: 2838547 - RNA, 19 nt, Artificial Sequence
  Description of Artificial Sequence: Synthetic oligonucleotide
ccuguuacugcuuccgugu

SEQ ID NO: 2838548 - RNA, 19 nt, Artificial Sequence
  Description of Artificial Sequence: Synthetic oligonucleotide
gcaaucacacugcuccucu

SEQ ID NO: 2838549 - RNA, 19 nt, Artificial Sequence
  Description of Artificial Sequence: Synthetic oligonucleotide
ccacacuauggaauuaucu

SEQ ID NO: 2838550 - RNA, 19 nt, Artificial Sequence
  Description of Artificial Sequence: Synthetic oligonucleotide
ccuugggcaacaaauacuu

SEQ ID NO: 2838551 - RNA, 19 nt, Artificial Sequence
  Description of Artificial Sequence: Synthetic oligonucleotide
cacuaaaagcacugucaau

SEQ ID NO: 2838552 - RNA, 19 nt, Artificial Sequence
  Description of Artificial Sequence: Synthetic oligonucleotide
agcugucguguagggguug

SEQ ID NO: 2838553 - RNA, 19 nt, Artificial Sequence
  Description of Artificial Sequence: Synthetic oligonucleotide
gcucagcucuuccuacaac

SEQ ID NO: 2838554 - RNA, 19 nt, Artificial Sequence
  Description of Artificial Sequence: Synthetic oligonucleotide
guccacacuauggaauuau

SEQ ID NO: 2838555 - RNA, 19 nt, Artificial Sequence
  Description of Artificial Sequence: Synthetic oligonucleotide
cuuacagccgcuggauuau

SEQ ID NO: 2838556 - RNA, 19 nt, Artificial Sequence
  Description of Artificial Sequence: Synthetic oligonucleotide
auguugcaacagccacuaa

SEQ ID NO: 2838557 - RNA, 19 nt, Artificial Sequence
  Description of Artificial Sequence: Synthetic oligonucleotide
caaugcaaucgggguccac

SEQ ID NO: 2838558 - RNA, 19 nt, Artificial Sequence
  Description of Artificial Sequence: Synthetic oligonucleotide
gcagcauagaaaagggaau

SEQ ID NO: 2838559 - RNA, 19 nt, Artificial Sequence
  Description of Artificial Sequence: Synthetic oligonucleotide
gggcaacaaauacuucaua

SEQ ID NO: 2838560 - RNA, 19 nt, Artificial Sequence
  Description of Artificial Sequence: Synthetic oligonucleotide
acaaccccuguuacugcuu

SEQ ID NO: 2838561 - RNA, 19 nt, Artificial Sequence
  Description of Artificial Sequence: Synthetic oligonucleotide
gcucuuccuacaaccccug

SEQ ID NO: 2838562 - RNA, 19 nt, Artificial Sequence
  Description of Artificial Sequence: Synthetic oligonucleotide
ggcagcaaucacacugcuc

SEQ ID NO: 2838563 - RNA, 19 nt, Artificial Sequence
  Description of Artificial Sequence: Synthetic oligonucleotide
cuggaaguugggacugaau

SEQ ID NO: 2838564 - RNA, 19 nt, Artificial Sequence
  Description of Artificial Sequence: Synthetic oligonucleotide
cugcuuccguguggaucgg

SEQ ID NO: 2838565 - RNA, 19 nt, Artificial Sequence
  Description of Artificial Sequence: Synthetic oligonucleotide
ggguccacacuauggaauu

SEQ ID NO: 2838566 - RNA, 19 nt, Artificial Sequence
  Description of Artificial Sequence: Synthetic oligonucleotide
cugugauuccuuguucuuu

SEQ ID NO: 2838567 - RNA, 19 nt, Artificial Sequence
  Description of Artificial Sequence: Synthetic oligonucleotide
cccuugggcaacaaauacu

SEQ ID NO: 2838568 - RNA, 19 nt, Artificial Sequence
  Description of Artificial Sequence: Synthetic oligonucleotide
ccaauaacugugauuccuu

SEQ ID NO: 2838569 - RNA, 19 nt, Artificial Sequence
  Description of Artificial Sequence: Synthetic oligonucleotide
cagcaaucacacugcuccu

SEQ ID NO: 2838570 - RNA, 19 nt, Artificial Sequence
  Description of Artificial Sequence: Synthetic oligonucleotide
caaucgggguccacacuau

SEQ ID NO: 2838571 - RNA, 19 nt, Artificial Sequence
  Description of Artificial Sequence: Synthetic oligonucleotide
gggguccacacuauggaau

SEQ ID NO: 2838572 - RNA, 19 nt, Artificial Sequence
  Description of Artificial Sequence: Synthetic oligonucleotide
cugguccuuuugauuuagu

SEQ ID NO: 2838573 - RNA, 19 nt, Artificial Sequence
  Description of Artificial Sequence: Synthetic oligonucleotide
guauacccuugggcaacaa

SEQ ID NO: 2838574 - RNA, 19 nt, Artificial Sequence
  Description of Artificial Sequence: Synthetic oligonucleotide
cacuggaaguugggacuga

SEQ ID NO: 2838575 - RNA, 19 nt, Artificial Sequence
  Description of Artificial Sequence: Synthetic oligonucleotide
guguagggguugggcuuac

SEQ ID NO: 2838576 - RNA, 19 nt, Artificial Sequence
  Description of Artificial Sequence: Synthetic oligonucleotide
cucuuccuacaaccccugu

SEQ ID NO: 2838577 - RNA, 19 nt, Artificial Sequence
  Description of Artificial Sequence: Synthetic oligonucleotide
gguccacacuauggaauua

SEQ ID NO: 2838578 - RNA, 19 nt, Artificial Sequence
  Description of Artificial Sequence: Synthetic oligonucleotide
caaucacacugcuccucuu

SEQ ID NO: 2838579 - RNA, 19 nt, Artificial Sequence
  Description of Artificial Sequence: Synthetic oligonucleotide
cagccacuaaaagcacugu

SEQ ID NO: 2838580 - RNA, 19 nt, Artificial Sequence
  Description of Artificial Sequence: Synthetic oligonucleotide
gcuuccguguggaucgggu

SEQ ID NO: 2838581 - RNA, 19 nt, Artificial Sequence
  Description of Artificial Sequence: Synthetic oligonucleotide
ccgcuggauuaucaaaccu

SEQ ID NO: 2838582 - RNA, 19 nt, Artificial Sequence
  Description of Artificial Sequence: Synthetic oligonucleotide
cagcugucguguagggguu

SEQ ID NO: 2838583 - RNA, 19 nt, Artificial Sequence
  Description of Artificial Sequence: Synthetic oligonucleotide
ggcuuacagccgcuggauu

SEQ ID NO: 2838584 - RNA, 19 nt, Artificial Sequence
  Description of Artificial Sequence: Synthetic oligonucleotide
gggcuuacagccgcuggau

SEQ ID NO: 2838585 - RNA, 19 nt, Artificial Sequence
  Description of Artificial Sequence: Synthetic oligonucleotide
cgggguccacacuauggaa

SEQ ID NO: 2838586 - RNA, 19 nt, Artificial Sequence
  Description of Artificial Sequence: Synthetic oligonucleotide
gguugggcuuacagccgcu

SEQ ID NO: 2838587 - RNA, 19 nt, Artificial Sequence
  Description of Artificial Sequence: Synthetic oligonucleotide
ccguguggaucgggugcac

SEQ ID NO: 2838588 - RNA, 19 nt, Artificial Sequence
  Description of Artificial Sequence: Synthetic oligonucleotide
cguguagggguugggcuua

SEQ ID NO: 2838589 - RNA, 19 nt, Artificial Sequence
  Description of Artificial Sequence: Synthetic oligonucleotide
ccccuguuacugcuuccgu

SEQ ID NO: 2838590 - RNA, 19 nt, Artificial Sequence
  Description of Artificial Sequence: Synthetic oligonucleotide
cguguggaucgggugcacu

SEQ ID NO: 2838591 - RNA, 19 nt, Artificial Sequence
  Description of Artificial Sequence: Synthetic oligonucleotide
aaagcuggaauucaggacc

SEQ ID NO: 2838592 - RNA, 19 nt, Artificial Sequence
  Description of Artificial Sequence: Synthetic oligonucleotide
aacauuguaaaauggaaag

SEQ ID NO: 2838593 - RNA, 19 nt, Artificial Sequence
  Description of Artificial Sequence: Synthetic oligonucleotide
  modified_base (17)..(17): a, c, u, g, unknown or other
aauguuuauccuuaagnac

SEQ ID NO: 2838594 - RNA, 19 nt, Artificial Sequence
  Description of Artificial Sequence: Synthetic oligonucleotide
uggguuaagacucagaacc

SEQ ID NO: 2838595 - RNA, 19 nt, Artificial Sequence
  Description of Artificial Sequence: Synthetic oligonucleotide
  modified_base (6)..(6): a, c, u, g, unknown or other
uuaagnaccacaaagucca

SEQ ID NO: 2838596 - RNA, 19 nt, Artificial Sequence
  Description of Artificial Sequence: Synthetic oligonucleotide
aauggaguauauuuuacuc

SEQ ID NO: 2838597 - RNA, 19 nt, Artificial Sequence
  Description of Artificial Sequence: Synthetic oligonucleotide
uuuauuguacuaaagguca

SEQ ID NO: 2838598 - RNA, 19 nt, Artificial Sequence
  Description of Artificial Sequence: Synthetic oligonucleotide
gaaaacucaauguuuaucc

SEQ ID NO: 2838599 - RNA, 19 nt, Artificial Sequence
  Description of Artificial Sequence: Synthetic oligonucleotide
uuguaaaauggaaagaaag

SEQ ID NO: 2838600 - RNA, 19 nt, Artificial Sequence
  Description of Artificial Sequence: Synthetic oligonucleotide
uguccauccacauugaggg

SEQ ID NO: 2838601 - RNA, 19 nt, Artificial Sequence
  Description of Artificial Sequence: Synthetic oligonucleotide
  modified_base (16)..(16): a, c, u, g, unknown or other
auguuuauccuuaagnacc

SEQ ID NO: 2838602 - RNA, 19 nt, Artificial Sequence
  Description of Artificial Sequence: Synthetic oligonucleotide
uuuaguuuaaacuuuacuu

SEQ ID NO: 2838603 - RNA, 19 nt, Artificial Sequence
  Description of Artificial Sequence: Synthetic oligonucleotide
  modified_base (19)..(19): a, c, u, g, unknown or other
ucaauguuuauccuuaagn

SEQ ID NO: 2838604 - RNA, 19 nt, Artificial Sequence
  Description of Artificial Sequence: Synthetic oligonucleotide
aauggaaagaaagugaccu

SEQ ID NO: 2838605 - RNA, 19 nt, Artificial Sequence
  Description of Artificial Sequence: Synthetic oligonucleotide
uguuugguuaaccagaagu

SEQ ID NO: 2838606 - RNA, 19 nt, Artificial Sequence
  Description of Artificial Sequence: Synthetic oligonucleotide
  modified_base (7)..(7): a, c, u, g, unknown or other
cuuaagnaccacaaagucc

SEQ ID NO: 2838607 - RNA, 19 nt, Artificial Sequence
  Description of Artificial Sequence: Synthetic oligonucleotide
  modified_base (10)..(10): a, c, u, g, unknown or other
auccuuaagnaccacaaag

SEQ ID NO: 2838608 - RNA, 19 nt, Artificial Sequence
  Description of Artificial Sequence: Synthetic oligonucleotide
uggaguauauuuuacuccg

SEQ ID NO: 2838609 - RNA, 19 nt, Artificial Sequence
  Description of Artificial Sequence: Synthetic oligonucleotide
uuuacuccgagaaugaaac

SEQ ID NO: 2838610 - RNA, 19 nt, Artificial Sequence
  Description of Artificial Sequence: Synthetic oligonucleotide
uguaaaauggaaagaaagu

SEQ ID NO: 2838611 - RNA, 19 nt, Artificial Sequence
  Description of Artificial Sequence: Synthetic oligonucleotide
auggaguauauuuuacucc

SEQ ID NO: 2838612 - RNA, 19 nt, Artificial Sequence
  Description of Artificial Sequence: Synthetic oligonucleotide
ugaaacauuguaaaaugga

SEQ ID NO: 2838613 - RNA, 19 nt, Artificial Sequence
  Description of Artificial Sequence: Synthetic oligonucleotide
agugauguuuaguuuaaac

SEQ ID NO: 2838614 - RNA, 19 nt, Artificial Sequence
  Description of Artificial Sequence: Synthetic oligonucleotide
uucaggaccacuaaucuca

SEQ ID NO: 2838615 - RNA, 19 nt, Artificial Sequence
  Description of Artificial Sequence: Synthetic oligonucleotide
uuuucagaaaacucaaugu

SEQ ID NO: 2838616 - RNA, 19 nt, Artificial Sequence
  Description of Artificial Sequence: Synthetic oligonucleotide
uugguuaaccagaaguccg

SEQ ID NO: 2838617 - RNA, 19 nt, Artificial Sequence
  Description of Artificial Sequence: Synthetic oligonucleotide
aaauaggcuguccauccac

SEQ ID NO: 2838618 - RNA, 19 nt, Artificial Sequence
  Description of Artificial Sequence: Synthetic oligonucleotide
uacaaaauggaguauauuu

SEQ ID NO: 2838619 - RNA, 19 nt, Artificial Sequence
  Description of Artificial Sequence: Synthetic oligonucleotide
uguacuaaaggucagcuuu

SEQ ID NO: 2838620 - RNA, 19 nt, Artificial Sequence
  Description of Artificial Sequence: Synthetic oligonucleotide
aaagaaagugaccuguccu

SEQ ID NO: 2838621 - RNA, 19 nt, Artificial Sequence
  Description of Artificial Sequence: Synthetic oligonucleotide
aauggacuccuucaggcuc

SEQ ID NO: 2838622 - RNA, 19 nt, Artificial Sequence
  Description of Artificial Sequence: Synthetic oligonucleotide
uguccuuccgcacauuugg

SEQ ID NO: 2838623 - RNA, 19 nt, Artificial Sequence
  Description of Artificial Sequence: Synthetic oligonucleotide
ucuuucaggguauacacug

SEQ ID NO: 2838624 - RNA, 19 nt, Artificial Sequence
  Description of Artificial Sequence: Synthetic oligonucleotide
aauucaggaccacuaaucu

SEQ ID NO: 2838625 - RNA, 19 nt, Artificial Sequence
  Description of Artificial Sequence: Synthetic oligonucleotide
ucaggguauacacugguag

SEQ ID NO: 2838626 - RNA, 19 nt, Artificial Sequence
  Description of Artificial Sequence: Synthetic oligonucleotide
ucauagagcgaccugacga

SEQ ID NO: 2838627 - RNA, 19 nt, Artificial Sequence
  Description of Artificial Sequence: Synthetic oligonucleotide
ugagggacggcacaaacag

SEQ ID NO: 2838628 - RNA, 19 nt, Artificial Sequence
  Description of Artificial Sequence: Synthetic oligonucleotide
uauguguggguuaagacuc

SEQ ID NO: 2838629 - RNA, 19 nt, Artificial Sequence
  Description of Artificial Sequence: Synthetic oligonucleotide
ugauguuuaguuuaaacuu

SEQ ID NO: 2838630 - RNA, 19 nt, Artificial Sequence
  Description of Artificial Sequence: Synthetic oligonucleotide
uuaagacucagaaccauca

SEQ ID NO: 2838631 - RNA, 19 nt, Artificial Sequence
  Description of Artificial Sequence: Synthetic oligonucleotide
aaauggaguauauuuuacu

SEQ ID NO: 2838632 - RNA, 19 nt, Artificial Sequence
  Description of Artificial Sequence: Synthetic oligonucleotide
uuaguuuaaacuuuacuuu

SEQ ID NO: 2838633 - RNA, 19 nt, Artificial Sequence
  Description of Artificial Sequence: Synthetic oligonucleotide
cuaaaggucagcuuuucag

SEQ ID NO: 2838634 - RNA, 19 nt, Artificial Sequence
  Description of Artificial Sequence: Synthetic oligonucleotide
guaaaauggaaagaaagug

SEQ ID NO: 2838635 - RNA, 19 nt, Artificial Sequence
  Description of Artificial Sequence: Synthetic oligonucleotide
auuuucaaagugcucuugg

SEQ ID NO: 2838636 - RNA, 19 nt, Artificial Sequence
  Description of Artificial Sequence: Synthetic oligonucleotide
ucagaaccaucaaagcugg

SEQ ID NO: 2838637 - RNA, 19 nt, Artificial Sequence
  Description of Artificial Sequence: Synthetic oligonucleotide
cuuuucagaaaacucaaug

SEQ ID NO: 2838638 - RNA, 19 nt, Artificial Sequence
  Description of Artificial Sequence: Synthetic oligonucleotide
aaucucaauggacuccuuc

SEQ ID NO: 2838639 - RNA, 19 nt, Artificial Sequence
  Description of Artificial Sequence: Synthetic oligonucleotide
auauuuuacuccgagaaug

SEQ ID NO: 2838640 - RNA, 19 nt, Artificial Sequence
  Description of Artificial Sequence: Synthetic oligonucleotide
cuucguacaaccugaaggc

SEQ ID NO: 2838641 - RNA, 19 nt, Artificial Sequence
  Description of Artificial Sequence: Synthetic oligonucleotide
ucaauggacuccuucaggc

SEQ ID NO: 2838642 - RNA, 19 nt, Artificial Sequence
  Description of Artificial Sequence: Synthetic oligonucleotide
cucagaaccaucaaagcug

SEQ ID NO: 2838643 - RNA, 19 nt, Artificial Sequence
  Description of Artificial Sequence: Synthetic oligonucleotide
uuuucaaagugcucuuggg

SEQ ID NO: 2838644 - RNA, 19 nt, Artificial Sequence
  Description of Artificial Sequence: Synthetic oligonucleotide
aaauggaaagaaagugacc

SEQ ID NO: 2838645 - RNA, 19 nt, Artificial Sequence
  Description of Artificial Sequence: Synthetic oligonucleotide
  modified_base (12)..(12): a, c, u, g, unknown or other
uuauccuuaagnaccacaa

SEQ ID NO: 2838646 - RNA, 19 nt, Artificial Sequence
  Description of Artificial Sequence: Synthetic oligonucleotide
  modified_base (3)..(3): a, c, u, g, unknown or other
agnaccacaaaguccagug

SEQ ID NO: 2838647 - RNA, 19 nt, Artificial Sequence
  Description of Artificial Sequence: Synthetic oligonucleotide
uguggguuaagacucagaa

SEQ ID NO: 2838648 - RNA, 19 nt, Artificial Sequence
  Description of Artificial Sequence: Synthetic oligonucleotide
aaagugaccuguccuaugu

SEQ ID NO: 2838649 - RNA, 19 nt, Artificial Sequence
  Description of Artificial Sequence: Synthetic oligonucleotide
uucuguuugguuaaccaga

SEQ ID NO: 2838650 - RNA, 19 nt, Artificial Sequence
  Description of Artificial Sequence: Synthetic oligonucleotide
guauauuuuacuccgagaa

SEQ ID NO: 2838651 - RNA, 19 nt, Artificial Sequence
  Description of Artificial Sequence: Synthetic oligonucleotide
ucagaaaacucaauguuua

SEQ ID NO: 2838652 - RNA, 19 nt, Artificial Sequence
  Description of Artificial Sequence: Synthetic oligonucleotide
  modified_base (9)..(9): a, c, u, g, unknown or other
uccuuaagnaccacaaagu

SEQ ID NO: 2838653 - RNA, 19 nt, Artificial Sequence
  Description of Artificial Sequence: Synthetic oligonucleotide
gagaaugaaacauuguaaa

SEQ ID NO: 2838654 - RNA, 19 nt, Artificial Sequence
  Description of Artificial Sequence: Synthetic oligonucleotide
  modified_base (13)..(13): a, c, u, g, unknown or other
uuuauccuuaagnaccaca

SEQ ID NO: 2838655 - RNA, 19 nt, Artificial Sequence
  Description of Artificial Sequence: Synthetic oligonucleotide
cuuccaaaucuucauagag

SEQ ID NO: 2838656 - RNA, 19 nt, Artificial Sequence
  Description of Artificial Sequence: Synthetic oligonucleotide
aaaacucaauguuuauccu

SEQ ID NO: 2838657 - RNA, 19 nt, Artificial Sequence
  Description of Artificial Sequence: Synthetic oligonucleotide
gcuucguacaaccugaagg

SEQ ID NO: 2838658 - RNA, 19 nt, Artificial Sequence
  Description of Artificial Sequence: Synthetic oligonucleotide
ucaaagcuggaauucagga

SEQ ID NO: 2838659 - RNA, 19 nt, Artificial Sequence
  Description of Artificial Sequence: Synthetic oligonucleotide
aaacaguucuguuugguua

SEQ ID NO: 2838660 - RNA, 19 nt, Artificial Sequence
  Description of Artificial Sequence: Synthetic oligonucleotide
aaccagaaguccgucaugg

SEQ ID NO: 2838661 - RNA, 19 nt, Artificial Sequence
  Description of Artificial Sequence: Synthetic oligonucleotide
uaguucucaggcuugacca

SEQ ID NO: 2838662 - RNA, 19 nt, Artificial Sequence
  Description of Artificial Sequence: Synthetic oligonucleotide
gaguauauuuuacuccgag

SEQ ID NO: 2838663 - RNA, 19 nt, Artificial Sequence
  Description of Artificial Sequence: Synthetic oligonucleotide
uauuuuacuccgagaauga

SEQ ID NO: 2838664 - RNA, 19 nt, Artificial Sequence
  Description of Artificial Sequence: Synthetic oligonucleotide
caaaucuucauagagcgac

SEQ ID NO: 2838665 - RNA, 19 nt, Artificial Sequence
  Description of Artificial Sequence: Synthetic oligonucleotide
acuaaucucaauggacucc

SEQ ID NO: 2838666 - RNA, 19 nt, Artificial Sequence
  Description of Artificial Sequence: Synthetic oligonucleotide
uuucaaagugcucuugggu

SEQ ID NO: 2838667 - RNA, 19 nt, Artificial Sequence
  Description of Artificial Sequence: Synthetic oligonucleotide
uaaaggucagcuuuucaga

SEQ ID NO: 2838668 - RNA, 19 nt, Artificial Sequence
  Description of Artificial Sequence: Synthetic oligonucleotide
uuuacaaaauggaguauau

SEQ ID NO: 2838669 - RNA, 19 nt, Artificial Sequence
  Description of Artificial Sequence: Synthetic oligonucleotide
gaaagaaagugaccugucc

SEQ ID NO: 2838670 - RNA, 19 nt, Artificial Sequence
  Description of Artificial Sequence: Synthetic oligonucleotide
  modified_base (15)..(15): a, c, u, g, unknown or other
uguuuauccuuaagnacca

SEQ ID NO: 2838671 - RNA, 19 nt, Artificial Sequence
  Description of Artificial Sequence: Synthetic oligonucleotide
uucaaagugcucuuggguc

SEQ ID NO: 2838672 - RNA, 19 nt, Artificial Sequence
  Description of Artificial Sequence: Synthetic oligonucleotide
uuuuacuccgagaaugaaa

SEQ ID NO: 2838673 - RNA, 19 nt, Artificial Sequence
  Description of Artificial Sequence: Synthetic oligonucleotide
agaaaacucaauguuuauc

SEQ ID NO: 2838674 - RNA, 19 nt, Artificial Sequence
  Description of Artificial Sequence: Synthetic oligonucleotide
uacacugguagugugaugu

SEQ ID NO: 2838675 - RNA, 19 nt, Artificial Sequence
  Description of Artificial Sequence: Synthetic oligonucleotide
agaaguccgucaugggucc

SEQ ID NO: 2838676 - RNA, 19 nt, Artificial Sequence
  Description of Artificial Sequence: Synthetic oligonucleotide
aaaucuucauagagcgacc

SEQ ID NO: 2838677 - RNA, 19 nt, Artificial Sequence
  Description of Artificial Sequence: Synthetic oligonucleotide
auugagggacggcacaaac

SEQ ID NO: 2838678 - RNA, 19 nt, Artificial Sequence
  Description of Artificial Sequence: Synthetic oligonucleotide
gucuuccaaaucuucauag

SEQ ID NO: 2838679 - RNA, 19 nt, Artificial Sequence
  Description of Artificial Sequence: Synthetic oligonucleotide
uuauuguacuaaaggucag

SEQ ID NO: 2838680 - RNA, 19 nt, Artificial Sequence
  Description of Artificial Sequence: Synthetic oligonucleotide
gaaggcaccgcucuuucag

SEQ ID NO: 2838681 - RNA, 19 nt, Artificial Sequence
  Description of Artificial Sequence: Synthetic oligonucleotide
aaacauuguaaaauggaaa

SEQ ID NO: 2838682 - RNA, 19 nt, Artificial Sequence
  Description of Artificial Sequence: Synthetic oligonucleotide
aaaggucagcuuuucagaa

SEQ ID NO: 2838683 - RNA, 19 nt, Artificial Sequence
  Description of Artificial Sequence: Synthetic oligonucleotide
uuaaccagaaguccgucau

SEQ ID NO: 2838684 - RNA, 19 nt, Artificial Sequence
  Description of Artificial Sequence: Synthetic oligonucleotide
aagacucagaaccaucaaa

SEQ ID NO: 2838685 - RNA, 19 nt, Artificial Sequence
  Description of Artificial Sequence: Synthetic oligonucleotide
aaacucaauguuuauccuu

SEQ ID NO: 2838686 - RNA, 19 nt, Artificial Sequence
  Description of Artificial Sequence: Synthetic oligonucleotide
guuuauuguacuaaagguc

SEQ ID NO: 2838687 - RNA, 19 nt, Artificial Sequence
  Description of Artificial Sequence: Synthetic oligonucleotide
ucucaauggacuccuucag

SEQ ID NO: 2838688 - RNA, 19 nt, Artificial Sequence
  Description of Artificial Sequence: Synthetic oligonucleotide
ucuucauagagcgaccuga

SEQ ID NO: 2838689 - RNA, 19 nt, Artificial Sequence
  Description of Artificial Sequence: Synthetic oligonucleotide
uauauuuuacuccgagaau

SEQ ID NO: 2838690 - RNA, 19 nt, Artificial Sequence
  Description of Artificial Sequence: Synthetic oligonucleotide
uggguggucuuccaaaucu

SEQ ID NO: 2838691 - RNA, 19 nt, Artificial Sequence
  Description of Artificial Sequence: Synthetic oligonucleotide
aacaguucuguuugguuaa

SEQ ID NO: 2838692 - RNA, 19 nt, Artificial Sequence
  Description of Artificial Sequence: Synthetic oligonucleotide
cuguccauccacauugagg

SEQ ID NO: 2838693 - RNA, 19 nt, Artificial Sequence
  Description of Artificial Sequence: Synthetic oligonucleotide
agacucagaaccaucaaag

SEQ ID NO: 2838694 - RNA, 19 nt, Artificial Sequence
  Description of Artificial Sequence: Synthetic oligonucleotide
aggcuguccauccacauug

SEQ ID NO: 2838695 - RNA, 19 nt, Artificial Sequence
  Description of Artificial Sequence: Synthetic oligonucleotide
ucaaagugcucuuggguca

SEQ ID NO: 2838696 - RNA, 19 nt, Artificial Sequence
  Description of Artificial Sequence: Synthetic oligonucleotide
aguucuguuugguuaacca

SEQ ID NO: 2838697 - RNA, 19 nt, Artificial Sequence
  Description of Artificial Sequence: Synthetic oligonucleotide
augaaacauuguaaaaugg

SEQ ID NO: 2838698 - RNA, 19 nt, Artificial Sequence
  Description of Artificial Sequence: Synthetic oligonucleotide
auucaggaccacuaaucuc

SEQ ID NO: 2838699 - RNA, 19 nt, Artificial Sequence
  Description of Artificial Sequence: Synthetic oligonucleotide
  modified_base (18)..(18): a, c, u, g, unknown or other
caauguuuauccuuaagna

SEQ ID NO: 2838700 - RNA, 19 nt, Artificial Sequence
  Description of Artificial Sequence: Synthetic oligonucleotide
uaguuuaaacuuuacuuuu

SEQ ID NO: 2838701 - RNA, 19 nt, Artificial Sequence
  Description of Artificial Sequence: Synthetic oligonucleotide
aguauauuuuacuccgaga

SEQ ID NO: 2838702 - RNA, 19 nt, Artificial Sequence
  Description of Artificial Sequence: Synthetic oligonucleotide
uucauagagcgaccugacg

SEQ ID NO: 2838703 - RNA, 19 nt, Artificial Sequence
  Description of Artificial Sequence: Synthetic oligonucleotide
accacuaaucucaauggac

SEQ ID NO: 2838704 - RNA, 19 nt, Artificial Sequence
  Description of Artificial Sequence: Synthetic oligonucleotide
aagaaagugaccuguccua

SEQ ID NO: 2838705 - RNA, 19 nt, Artificial Sequence
  Description of Artificial Sequence: Synthetic oligonucleotide
guucuguuugguuaaccag

SEQ ID NO: 2838706 - RNA, 19 nt, Artificial Sequence
  Description of Artificial Sequence: Synthetic oligonucleotide
gaaacauuguaaaauggaa

SEQ ID NO: 2838707 - RNA, 19 nt, Artificial Sequence
  Description of Artificial Sequence: Synthetic oligonucleotide
uccagugauguuuaguuua

SEQ ID NO: 2838708 - RNA, 19 nt, Artificial Sequence
  Description of Artificial Sequence: Synthetic oligonucleotide
agaaugaaacauuguaaaa

SEQ ID NO: 2838709 - RNA, 19 nt, Artificial Sequence
  Description of Artificial Sequence: Synthetic oligonucleotide
aucucaauggacuccuuca

SEQ ID NO: 2838710 - RNA, 19 nt, Artificial Sequence
  Description of Artificial Sequence: Synthetic oligonucleotide
uggaaagaaagugaccugu

SEQ ID NO: 2838711 - RNA, 19 nt, Artificial Sequence
  Description of Artificial Sequence: Synthetic oligonucleotide
aaaauaggcuguccaucca

SEQ ID NO: 2838712 - RNA, 19 nt, Artificial Sequence
  Description of Artificial Sequence: Synthetic oligonucleotide
gaauucaggaccacuaauc

SEQ ID NO: 2838713 - RNA, 19 nt, Artificial Sequence
  Description of Artificial Sequence: Synthetic oligonucleotide
gacucagaaccaucaaagc

SEQ ID NO: 2838714 - RNA, 19 nt, Artificial Sequence
  Description of Artificial Sequence: Synthetic oligonucleotide
uguuuaguuuaaacuuuac

SEQ ID NO: 2838715 - RNA, 19 nt, Artificial Sequence
  Description of Artificial Sequence: Synthetic oligonucleotide
uuucaggguauacacuggu

SEQ ID NO: 2838716 - RNA, 19 nt, Artificial Sequence
  Description of Artificial Sequence: Synthetic oligonucleotide
aguccagugauguuuaguu

SEQ ID NO: 2838717 - RNA, 19 nt, Artificial Sequence
  Description of Artificial Sequence: Synthetic oligonucleotide
ucguacaaccugaaggcac

SEQ ID NO: 2838718 - RNA, 19 nt, Artificial Sequence
  Description of Artificial Sequence: Synthetic oligonucleotide
uuagcaccguuuauuguac

SEQ ID NO: 2838719 - RNA, 19 nt, Artificial Sequence
  Description of Artificial Sequence: Synthetic oligonucleotide
ucuguuugguuaaccagaa

SEQ ID NO: 2838720 - RNA, 19 nt, Artificial Sequence
  Description of Artificial Sequence: Synthetic oligonucleotide
guaguucucaggcuugacc

SEQ ID NO: 2838721 - RNA, 19 nt, Artificial Sequence
  Description of Artificial Sequence: Synthetic oligonucleotide
ucaggcuugaccaggcuuc

SEQ ID NO: 2838722 - RNA, 19 nt, Artificial Sequence
  Description of Artificial Sequence: Synthetic oligonucleotide
ucuuccaaaucuucauaga

SEQ ID NO: 2838723 - RNA, 19 nt, Artificial Sequence
  Description of Artificial Sequence: Synthetic oligonucleotide
gugauguuuaguuuaaacu

SEQ ID NO: 2838724 - RNA, 19 nt, Artificial Sequence
  Description of Artificial Sequence: Synthetic oligonucleotide
caaagcuggaauucaggac

SEQ ID NO: 2838725 - RNA, 19 nt, Artificial Sequence
  Description of Artificial Sequence: Synthetic oligonucleotide
uauuguacuaaaggucagc

SEQ ID NO: 2838726 - RNA, 19 nt, Artificial Sequence
  Description of Artificial Sequence: Synthetic oligonucleotide
gaccugacgauguccagcc

SEQ ID NO: 2838727 - RNA, 19 nt, Artificial Sequence
  Description of Artificial Sequence: Synthetic oligonucleotide
ggaccacuaaucucaaugg

SEQ ID NO: 2838728 - RNA, 19 nt, Artificial Sequence
  Description of Artificial Sequence: Synthetic oligonucleotide
accaucaaagcuggaauuc

SEQ ID NO: 2838729 - RNA, 19 nt, Artificial Sequence
  Description of Artificial Sequence: Synthetic oligonucleotide
uccacauugagggacggca

SEQ ID NO: 2838730 - RNA, 19 nt, Artificial Sequence
  Description of Artificial Sequence: Synthetic oligonucleotide
auuguacuaaaggucagcu

SEQ ID NO: 2838731 - RNA, 19 nt, Artificial Sequence
  Description of Artificial Sequence: Synthetic oligonucleotide
aagugcucuugggucagcc

SEQ ID NO: 2838732 - RNA, 19 nt, Artificial Sequence
  Description of Artificial Sequence: Synthetic oligonucleotide
aaggcaccgcucuuucagg

SEQ ID NO: 2838733 - RNA, 19 nt, Artificial Sequence
  Description of Artificial Sequence: Synthetic oligonucleotide
caggggcugauuuucaaag

SEQ ID NO: 2838734 - RNA, 19 nt, Artificial Sequence
  Description of Artificial Sequence: Synthetic oligonucleotide
gaaugaaacauuguaaaau

SEQ ID NO: 2838735 - RNA, 19 nt, Artificial Sequence
  Description of Artificial Sequence: Synthetic oligonucleotide
agugaccuguccuaugugu

SEQ ID NO: 2838736 - RNA, 19 nt, Artificial Sequence
  Description of Artificial Sequence: Synthetic oligonucleotide
aaccugaaggcaccgcucu

SEQ ID NO: 2838737 - RNA, 19 nt, Artificial Sequence
  Description of Artificial Sequence: Synthetic oligonucleotide
cuuucaggguauacacugg

SEQ ID NO: 2838738 - RNA, 19 nt, Artificial Sequence
  Description of Artificial Sequence: Synthetic oligonucleotide
cagaaguccgucauggguc

SEQ ID NO: 2838739 - RNA, 19 nt, Artificial Sequence
  Description of Artificial Sequence: Synthetic oligonucleotide
aaucuucauagagcgaccu

SEQ ID NO: 2838740 - RNA, 19 nt, Artificial Sequence
  Description of Artificial Sequence: Synthetic oligonucleotide
ccguuuauuguacuaaagg

SEQ ID NO: 2838741 - RNA, 19 nt, Artificial Sequence
  Description of Artificial Sequence: Synthetic oligonucleotide
uugagggacggcacaaaca

SEQ ID NO: 2838742 - RNA, 19 nt, Artificial Sequence
  Description of Artificial Sequence: Synthetic oligonucleotide
cagcuuuucagaaaacuca

SEQ ID NO: 2838743 - RNA, 19 nt, Artificial Sequence
  Description of Artificial Sequence: Synthetic oligonucleotide
cuuccgcacauuugggugg

SEQ ID NO: 2838744 - RNA, 19 nt, Artificial Sequence
  Description of Artificial Sequence: Synthetic oligonucleotide
acaaccugaaggcaccgcu

SEQ ID NO: 2838745 - RNA, 19 nt, Artificial Sequence
  Description of Artificial Sequence: Synthetic oligonucleotide
uacuccgagaaugaaacau

SEQ ID NO: 2838746 - RNA, 19 nt, Artificial Sequence
  Description of Artificial Sequence: Synthetic oligonucleotide
caaaauggaguauauuuua

SEQ ID NO: 2838747 - RNA, 19 nt, Artificial Sequence
  Description of Artificial Sequence: Synthetic oligonucleotide
aacucaauguuuauccuua

SEQ ID NO: 2838748 - RNA, 19 nt, Artificial Sequence
  Description of Artificial Sequence: Synthetic oligonucleotide
cuccgagaaugaaacauug

SEQ ID NO: 2838749 - RNA, 19 nt, Artificial Sequence
  Description of Artificial Sequence: Synthetic oligonucleotide
  modified_base (11)..(11): a, c, u, g, unknown or other
uauccuuaagnaccacaaa

SEQ ID NO: 2838750 - RNA, 19 nt, Artificial Sequence
  Description of Artificial Sequence: Synthetic oligonucleotide
aggucagcuuuucagaaaa

SEQ ID NO: 2838751 - RNA, 19 nt, Artificial Sequence
  Description of Artificial Sequence: Synthetic oligonucleotide
aucaaagcuggaauucagg

SEQ ID NO: 2838752 - RNA, 19 nt, Artificial Sequence
  Description of Artificial Sequence: Synthetic oligonucleotide
acaaaguccagugauguuu

SEQ ID NO: 2838753 - RNA, 19 nt, Artificial Sequence
  Description of Artificial Sequence: Synthetic oligonucleotide
aaaguccagugauguuuag

SEQ ID NO: 2838754 - RNA, 19 nt, Artificial Sequence
  Description of Artificial Sequence: Synthetic oligonucleotide
guuugguuaaccagaaguc

SEQ ID NO: 2838755 - RNA, 19 nt, Artificial Sequence
  Description of Artificial Sequence: Synthetic oligonucleotide
ugguuaaccagaaguccgu

SEQ ID NO: 2838756 - RNA, 19 nt, Artificial Sequence
  Description of Artificial Sequence: Synthetic oligonucleotide
uguauguccuuccgcacau

SEQ ID NO: 2838757 - RNA, 19 nt, Artificial Sequence
  Description of Artificial Sequence: Synthetic oligonucleotide
gcacaaacaguucuguuug

SEQ ID NO: 2838758 - RNA, 19 nt, Artificial Sequence
  Description of Artificial Sequence: Synthetic oligonucleotide
auggaaagaaagugaccug

SEQ ID NO: 2838759 - RNA, 19 nt, Artificial Sequence
  Description of Artificial Sequence: Synthetic oligonucleotide
uggaauucaggaccacuaa

SEQ ID NO: 2838760 - RNA, 19 nt, Artificial Sequence
  Description of Artificial Sequence: Synthetic oligonucleotide
gguagugugauguuggcaa

SEQ ID NO: 2838761 - RNA, 19 nt, Artificial Sequence
  Description of Artificial Sequence: Synthetic oligonucleotide
cugacgauguccagccucc

SEQ ID NO: 2838762 - RNA, 19 nt, Artificial Sequence
  Description of Artificial Sequence: Synthetic oligonucleotide
auuuggguggucuuccaaa

SEQ ID NO: 2838763 - RNA, 19 nt, Artificial Sequence
  Description of Artificial Sequence: Synthetic oligonucleotide
guuuaguuuaaacuuuacu

SEQ ID NO: 2838764 - RNA, 19 nt, Artificial Sequence
  Description of Artificial Sequence: Synthetic oligonucleotide
gaccaggcuucguacaacc

SEQ ID NO: 2838765 - RNA, 19 nt, Artificial Sequence
  Description of Artificial Sequence: Synthetic oligonucleotide
uccauccacauugagggac

SEQ ID NO: 2838766 - RNA, 19 nt, Artificial Sequence
  Description of Artificial Sequence: Synthetic oligonucleotide
gaaagugaccuguccuaug

SEQ ID NO: 2838767 - RNA, 19 nt, Artificial Sequence
  Description of Artificial Sequence: Synthetic oligonucleotide
acauuguaaaauggaaaga

SEQ ID NO: 2838768 - RNA, 19 nt, Artificial Sequence
  Description of Artificial Sequence: Synthetic oligonucleotide
uauacacugguagugugau

SEQ ID NO: 2838769 - RNA, 19 nt, Artificial Sequence
  Description of Artificial Sequence: Synthetic oligonucleotide
uaagacucagaaccaucaa

SEQ ID NO: 2838770 - RNA, 19 nt, Artificial Sequence
  Description of Artificial Sequence: Synthetic oligonucleotide
  modified_base (4)..(4): a, c, u, g, unknown or other
aagnaccacaaaguccagu

SEQ ID NO: 2838771 - RNA, 19 nt, Artificial Sequence
  Description of Artificial Sequence: Synthetic oligonucleotide
uccgagaaugaaacauugu

SEQ ID NO: 2838772 - RNA, 19 nt, Artificial Sequence
  Description of Artificial Sequence: Synthetic oligonucleotide
uagagcgaccugacgaugu

SEQ ID NO: 2838773 - RNA, 19 nt, Artificial Sequence
  Description of Artificial Sequence: Synthetic oligonucleotide
aggguauacacugguagug

SEQ ID NO: 2838774 - RNA, 19 nt, Artificial Sequence
  Description of Artificial Sequence: Synthetic oligonucleotide
acuaaaggucagcuuuuca

SEQ ID NO: 2838775 - RNA, 19 nt, Artificial Sequence
  Description of Artificial Sequence: Synthetic oligonucleotide
  modified_base (5)..(5): a, c, u, g, unknown or other
uaagnaccacaaaguccag

SEQ ID NO: 2838776 - RNA, 19 nt, Artificial Sequence
  Description of Artificial Sequence: Synthetic oligonucleotide
uuuggguggucuuccaaau

SEQ ID NO: 2838777 - RNA, 19 nt, Artificial Sequence
  Description of Artificial Sequence: Synthetic oligonucleotide
aagugaccuguccuaugug

SEQ ID NO: 2838778 - RNA, 19 nt, Artificial Sequence
  Description of Artificial Sequence: Synthetic oligonucleotide
cuucauagagcgaccugac

SEQ ID NO: 2838779 - RNA, 19 nt, Artificial Sequence
  Description of Artificial Sequence: Synthetic oligonucleotide
agugcucuugggucagccg

SEQ ID NO: 2838780 - RNA, 19 nt, Artificial Sequence
  Description of Artificial Sequence: Synthetic oligonucleotide
cuauguguggguuaagacu

SEQ ID NO: 2838781 - RNA, 19 nt, Artificial Sequence
  Description of Artificial Sequence: Synthetic oligonucleotide
aguucucaggcuugaccag

SEQ ID NO: 2838782 - RNA, 19 nt, Artificial Sequence
  Description of Artificial Sequence: Synthetic oligonucleotide
uccuucaggcuccucuccc

SEQ ID NO: 2838783 - RNA, 19 nt, Artificial Sequence
  Description of Artificial Sequence: Synthetic oligonucleotide
uccuauguguggguuaaga

SEQ ID NO: 2838784 - RNA, 19 nt, Artificial Sequence
  Description of Artificial Sequence: Synthetic oligonucleotide
uaaccagaaguccgucaug

SEQ ID NO: 2838785 - RNA, 19 nt, Artificial Sequence
  Description of Artificial Sequence: Synthetic oligonucleotide
aauaggcuguccauccaca

SEQ ID NO: 2838786 - RNA, 19 nt, Artificial Sequence
  Description of Artificial Sequence: Synthetic oligonucleotide
cacuaaucucaauggacuc

SEQ ID NO: 2838787 - RNA, 19 nt, Artificial Sequence
  Description of Artificial Sequence: Synthetic oligonucleotide
gugcucuugggucagccgc

SEQ ID NO: 2838788 - RNA, 19 nt, Artificial Sequence
  Description of Artificial Sequence: Synthetic oligonucleotide
ugauuuucaaagugcucuu

SEQ ID NO: 2838789 - RNA, 19 nt, Artificial Sequence
  Description of Artificial Sequence: Synthetic oligonucleotide
uugaccaggcuucguacaa

SEQ ID NO: 2838790 - RNA, 19 nt, Artificial Sequence
  Description of Artificial Sequence: Synthetic oligonucleotide
auggacuccuucaggcucc

SEQ ID NO: 2838791 - RNA, 19 nt, Artificial Sequence
  Description of Artificial Sequence: Synthetic oligonucleotide
cacaaacaguucuguuugg

SEQ ID NO: 2838792 - RNA, 19 nt, Artificial Sequence
  Description of Artificial Sequence: Synthetic oligonucleotide
cugauuuucaaagugcucu

SEQ ID NO: 2838793 - RNA, 19 nt, Artificial Sequence
  Description of Artificial Sequence: Synthetic oligonucleotide
gaccuguccuauguguggg

SEQ ID NO: 2838794 - RNA, 19 nt, Artificial Sequence
  Description of Artificial Sequence: Synthetic oligonucleotide
gaccacuaaucucaaugga

SEQ ID NO: 2838795 - RNA, 19 nt, Artificial Sequence
  Description of Artificial Sequence: Synthetic oligonucleotide
gcucuuucaggguauacac

SEQ ID NO: 2838796 - RNA, 19 nt, Artificial Sequence
  Description of Artificial Sequence: Synthetic oligonucleotide
gauguccagccuccuguag

SEQ ID NO: 2838797 - RNA, 19 nt, Artificial Sequence
  Description of Artificial Sequence: Synthetic oligonucleotide
guuaaccagaaguccguca

SEQ ID NO: 2838798 - RNA, 19 nt, Artificial Sequence
  Description of Artificial Sequence: Synthetic oligonucleotide
aaguccagugauguuuagu

SEQ ID NO: 2838799 - RNA, 19 nt, Artificial Sequence
  Description of Artificial Sequence: Synthetic oligonucleotide
aggcaccgcucuuucaggg

SEQ ID NO: 2838800 - RNA, 19 nt, Artificial Sequence
  Description of Artificial Sequence: Synthetic oligonucleotide
  modified_base (8)..(8): a, c, u, g, unknown or other
ccuuaagnaccacaaaguc

SEQ ID NO: 2838801 - RNA, 19 nt, Artificial Sequence
  Description of Artificial Sequence: Synthetic oligonucleotide
auguccagccuccuguagu

SEQ ID NO: 2838802 - RNA, 19 nt, Artificial Sequence
  Description of Artificial Sequence: Synthetic oligonucleotide
  modified_base (2)..(2): a, c, u, g, unknown or other
gnaccacaaaguccaguga

SEQ ID NO: 2838803 - RNA, 19 nt, Artificial Sequence
  Description of Artificial Sequence: Synthetic oligonucleotide
gguauacacugguagugug

SEQ ID NO: 2838804 - RNA, 19 nt, Artificial Sequence
  Description of Artificial Sequence: Synthetic oligonucleotide
guggguuaagacucagaac

SEQ ID NO: 2838805 - RNA, 19 nt, Artificial Sequence
  Description of Artificial Sequence: Synthetic oligonucleotide
cacauuuggguggucuucc

SEQ ID NO: 2838806 - RNA, 19 nt, Artificial Sequence
  Description of Artificial Sequence: Synthetic oligonucleotide
agagcgaccugacgauguc

SEQ ID NO: 2838807 - RNA, 19 nt, Artificial Sequence
  Description of Artificial Sequence: Synthetic oligonucleotide
agccgcuguauguccuucc

SEQ ID NO: 2838808 - RNA, 19 nt, Artificial Sequence
  Description of Artificial Sequence: Synthetic oligonucleotide
gaaccaucaaagcuggaau

SEQ ID NO: 2838809 - RNA, 19 nt, Artificial Sequence
  Description of Artificial Sequence: Synthetic oligonucleotide
accagaaguccgucauggg

SEQ ID NO: 2838810 - RNA, 19 nt, Artificial Sequence
  Description of Artificial Sequence: Synthetic oligonucleotide
ggggcugauuuucaaagug

SEQ ID NO: 2838811 - RNA, 19 nt, Artificial Sequence
  Description of Artificial Sequence: Synthetic oligonucleotide
aucuucauagagcgaccug

SEQ ID NO: 2838812 - RNA, 19 nt, Artificial Sequence
  Description of Artificial Sequence: Synthetic oligonucleotide
uccuuccgcacauuugggu

SEQ ID NO: 2838813 - RNA, 19 nt, Artificial Sequence
  Description of Artificial Sequence: Synthetic oligonucleotide
uuacuccgagaaugaaaca

SEQ ID NO: 2838814 - RNA, 19 nt, Artificial Sequence
  Description of Artificial Sequence: Synthetic oligonucleotide
accguuuauuguacuaaag

SEQ ID NO: 2838815 - RNA, 19 nt, Artificial Sequence
  Description of Artificial Sequence: Synthetic oligonucleotide
uguccuauguguggguuaa

SEQ ID NO: 2838816 - RNA, 19 nt, Artificial Sequence
  Description of Artificial Sequence: Synthetic oligonucleotide
uuacaaaauggaguauauu

SEQ ID NO: 2838817 - RNA, 19 nt, Artificial Sequence
  Description of Artificial Sequence: Synthetic oligonucleotide
guuaagacucagaaccauc

SEQ ID NO: 2838818 - RNA, 19 nt, Artificial Sequence
  Description of Artificial Sequence: Synthetic oligonucleotide
uucguacaaccugaaggca

SEQ ID NO: 2838819 - RNA, 19 nt, Artificial Sequence
  Description of Artificial Sequence: Synthetic oligonucleotide
uucaggguauacacuggua

SEQ ID NO: 2838820 - RNA, 19 nt, Artificial Sequence
  Description of Artificial Sequence: Synthetic oligonucleotide
uguguggguuaagacucag

SEQ ID NO: 2838821 - RNA, 19 nt, Artificial Sequence
  Description of Artificial Sequence: Synthetic oligonucleotide
gauguuuaguuuaaacuuu

SEQ ID NO: 2838822 - RNA, 19 nt, Artificial Sequence
  Description of Artificial Sequence: Synthetic oligonucleotide
uuguacuaaaggucagcuu

SEQ ID NO: 2838823 - RNA, 19 nt, Artificial Sequence
  Description of Artificial Sequence: Synthetic oligonucleotide
cugguagugugauguuggc

SEQ ID NO: 2838824 - RNA, 19 nt, Artificial Sequence
  Description of Artificial Sequence: Synthetic oligonucleotide
gacggcacaaacaguucug

SEQ ID NO: 2838825 - RNA, 19 nt, Artificial Sequence
  Description of Artificial Sequence: Synthetic oligonucleotide
caggcuucguacaaccuga

SEQ ID NO: 2838826 - RNA, 19 nt, Artificial Sequence
  Description of Artificial Sequence: Synthetic oligonucleotide
ugguagugugauguuggca

SEQ ID NO: 2838827 - RNA, 19 nt, Artificial Sequence
  Description of Artificial Sequence: Synthetic oligonucleotide
cuggaauucaggaccacua

SEQ ID NO: 2838828 - RNA, 19 nt, Artificial Sequence
  Description of Artificial Sequence: Synthetic oligonucleotide
uuggguggucuuccaaauc

SEQ ID NO: 2838829 - RNA, 19 nt, Artificial Sequence
  Description of Artificial Sequence: Synthetic oligonucleotide
ugcucuugggucagccgcu

SEQ ID NO: 2838830 - RNA, 19 nt, Artificial Sequence
  Description of Artificial Sequence: Synthetic oligonucleotide
aagcuggaauucaggacca

SEQ ID NO: 2838831 - RNA, 19 nt, Artificial Sequence
  Description of Artificial Sequence: Synthetic oligonucleotide
aggggcugauuuucaaagu

SEQ ID NO: 2838832 - RNA, 19 nt, Artificial Sequence
  Description of Artificial Sequence: Synthetic oligonucleotide
ccuauguguggguuaagac

SEQ ID NO: 2838833 - RNA, 19 nt, Artificial Sequence
  Description of Artificial Sequence: Synthetic oligonucleotide
agaaagugaccuguccuau

SEQ ID NO: 2838834 - RNA, 19 nt, Artificial Sequence
  Description of Artificial Sequence: Synthetic oligonucleotide
auaggcuguccauccacau

SEQ ID NO: 2838835 - RNA, 19 nt, Artificial Sequence
  Description of Artificial Sequence: Synthetic oligonucleotide
uguccagccuccuguaguu

SEQ ID NO: 2838836 - RNA, 19 nt, Artificial Sequence
  Description of Artificial Sequence: Synthetic oligonucleotide
acaguucuguuugguuaac

SEQ ID NO: 2838837 - RNA, 19 nt, Artificial Sequence
  Description of Artificial Sequence: Synthetic oligonucleotide
ucaggaccacuaaucucaa

SEQ ID NO: 2838838 - RNA, 19 nt, Artificial Sequence
  Description of Artificial Sequence: Synthetic oligonucleotide
guauacacugguaguguga

SEQ ID NO: 2838839 - RNA, 19 nt, Artificial Sequence
  Description of Artificial Sequence: Synthetic oligonucleotide
ugaaggcaccgcucuuuca

SEQ ID NO: 2838840 - RNA, 19 nt, Artificial Sequence
  Description of Artificial Sequence: Synthetic oligonucleotide
accacaaaguccagugaug

SEQ ID NO: 2838841 - RNA, 19 nt, Artificial Sequence
  Description of Artificial Sequence: Synthetic oligonucleotide
cuugaccaggcuucguaca

SEQ ID NO: 2838842 - RNA, 19 nt, Artificial Sequence
  Description of Artificial Sequence: Synthetic oligonucleotide
agcaccguuuauuguacua

SEQ ID NO: 2838843 - RNA, 19 nt, Artificial Sequence
  Description of Artificial Sequence: Synthetic oligonucleotide
auccacauugagggacggc

SEQ ID NO: 2838844 - RNA, 19 nt, Artificial Sequence
  Description of Artificial Sequence: Synthetic oligonucleotide
gugaccuguccuaugugug

SEQ ID NO: 2838845 - RNA, 19 nt, Artificial Sequence
  Description of Artificial Sequence: Synthetic oligonucleotide
agggacggcacaaacaguu

SEQ ID NO: 2838846 - RNA, 19 nt, Artificial Sequence
  Description of Artificial Sequence: Synthetic oligonucleotide
uacuaaaggucagcuuuuc

SEQ ID NO: 2838847 - RNA, 19 nt, Artificial Sequence
  Description of Artificial Sequence: Synthetic oligonucleotide
  modified_base (14)..(14): a, c, u, g, unknown or other
guuuauccuuaagnaccac

SEQ ID NO: 2838848 - RNA, 19 nt, Artificial Sequence
  Description of Artificial Sequence: Synthetic oligonucleotide
auacacugguagugugaug

SEQ ID NO: 2838849 - RNA, 19 nt, Artificial Sequence
  Description of Artificial Sequence: Synthetic oligonucleotide
cuguauguccuuccgcaca

SEQ ID NO: 2838850 - RNA, 19 nt, Artificial Sequence
  Description of Artificial Sequence: Synthetic oligonucleotide
caaccugaaggcaccgcuc

SEQ ID NO: 2838851 - RNA, 19 nt, Artificial Sequence
  Description of Artificial Sequence: Synthetic oligonucleotide
auuuuacuccgagaaugaa

SEQ ID NO: 2838852 - RNA, 19 nt, Artificial Sequence
  Description of Artificial Sequence: Synthetic oligonucleotide
caaaguccagugauguuua

SEQ ID NO: 2838853 - RNA, 19 nt, Artificial Sequence
  Description of Artificial Sequence: Synthetic oligonucleotide
acucaauguuuauccuuaa

SEQ ID NO: 2838854 - RNA, 19 nt, Artificial Sequence
  Description of Artificial Sequence: Synthetic oligonucleotide
cuguuugguuaaccagaag

SEQ ID NO: 2838855 - RNA, 19 nt, Artificial Sequence
  Description of Artificial Sequence: Synthetic oligonucleotide
cacugguagugugauguug

SEQ ID NO: 2838856 - RNA, 19 nt, Artificial Sequence
  Description of Artificial Sequence: Synthetic oligonucleotide
caaagugcucuugggucag

SEQ ID NO: 2838857 - RNA, 19 nt, Artificial Sequence
  Description of Artificial Sequence: Synthetic oligonucleotide
uacaaccugaaggcaccgc

SEQ ID NO: 2838858 - RNA, 19 nt, Artificial Sequence
  Description of Artificial Sequence: Synthetic oligonucleotide
uaggcuguccauccacauu

SEQ ID NO: 2838859 - RNA, 19 nt, Artificial Sequence
  Description of Artificial Sequence: Synthetic oligonucleotide
caguucuguuugguuaacc

SEQ ID NO: 2838860 - RNA, 19 nt, Artificial Sequence
  Description of Artificial Sequence: Synthetic oligonucleotide
auagagcgaccugacgaug

SEQ ID NO: 2838861 - RNA, 19 nt, Artificial Sequence
  Description of Artificial Sequence: Synthetic oligonucleotide
guacaaccugaaggcaccg

SEQ ID NO: 2838862 - RNA, 19 nt, Artificial Sequence
  Description of Artificial Sequence: Synthetic oligonucleotide
ccuuccgcacauuugggug

SEQ ID NO: 2838863 - RNA, 19 nt, Artificial Sequence
  Description of Artificial Sequence: Synthetic oligonucleotide
gggcugauuuucaaagugc

SEQ ID NO: 2838864 - RNA, 19 nt, Artificial Sequence
  Description of Artificial Sequence: Synthetic oligonucleotide
guggucuuccaaaucuuca

SEQ ID NO: 2838865 - RNA, 19 nt, Artificial Sequence
  Description of Artificial Sequence: Synthetic oligonucleotide
uguaguucucaggcuugac

SEQ ID NO: 2838866 - RNA, 19 nt, Artificial Sequence
  Description of Artificial Sequence: Synthetic oligonucleotide
cugaaggcaccgcucuuuc

SEQ ID NO: 2838867 - RNA, 19 nt, Artificial Sequence
  Description of Artificial Sequence: Synthetic oligonucleotide
ccauccacauugagggacg

SEQ ID NO: 2838868 - RNA, 19 nt, Artificial Sequence
  Description of Artificial Sequence: Synthetic oligonucleotide
cguacaaccugaaggcacc

SEQ ID NO: 2838869 - RNA, 19 nt, Artificial Sequence
  Description of Artificial Sequence: Synthetic oligonucleotide
cuaaucucaauggacuccu

SEQ ID NO: 2838870 - RNA, 19 nt, Artificial Sequence
  Description of Artificial Sequence: Synthetic oligonucleotide
ucccaggggcugauuuuca

SEQ ID NO: 2838871 - RNA, 19 nt, Artificial Sequence
  Description of Artificial Sequence: Synthetic oligonucleotide
cacauugagggacggcaca

SEQ ID NO: 2838872 - RNA, 19 nt, Artificial Sequence
  Description of Artificial Sequence: Synthetic oligonucleotide
agcgaccugacgaugucca

SEQ ID NO: 2838873 - RNA, 19 nt, Artificial Sequence
  Description of Artificial Sequence: Synthetic oligonucleotide
acggcacaaacaguucugu

SEQ ID NO: 2838874 - RNA, 19 nt, Artificial Sequence
  Description of Artificial Sequence: Synthetic oligonucleotide
gagcgaccugacgaugucc

SEQ ID NO: 2838875 - RNA, 19 nt, Artificial Sequence
  Description of Artificial Sequence: Synthetic oligonucleotide
acauugagggacggcacaa

SEQ ID NO: 2838876 - RNA, 19 nt, Artificial Sequence
  Description of Artificial Sequence: Synthetic oligonucleotide
uagcaccguuuauuguacu

SEQ ID NO: 2838877 - RNA, 19 nt, Artificial Sequence
  Description of Artificial Sequence: Synthetic oligonucleotide
ugaccaggcuucguacaac

SEQ ID NO: 2838878 - RNA, 19 nt, Artificial Sequence
  Description of Artificial Sequence: Synthetic oligonucleotide
caccguuuauuguacuaaa

SEQ ID NO: 2838879 - RNA, 19 nt, Artificial Sequence
  Description of Artificial Sequence: Synthetic oligonucleotide
acuccgagaaugaaacauu

SEQ ID NO: 2838880 - RNA, 19 nt, Artificial Sequence
  Description of Artificial Sequence: Synthetic oligonucleotide
cauccacauugagggacgg

SEQ ID NO: 2838881 - RNA, 19 nt, Artificial Sequence
  Description of Artificial Sequence: Synthetic oligonucleotide
gcuugaccaggcuucguac

SEQ ID NO: 2838882 - RNA, 19 nt, Artificial Sequence
  Description of Artificial Sequence: Synthetic oligonucleotide
cguuuauuguacuaaaggu

SEQ ID NO: 2838883 - RNA, 19 nt, Artificial Sequence
  Description of Artificial Sequence: Synthetic oligonucleotide
ucucccaggggcugauuuu

SEQ ID NO: 2838884 - RNA, 19 nt, Artificial Sequence
  Description of Artificial Sequence: Synthetic oligonucleotide
gccuccuguaguucucagg

SEQ ID NO: 2838885 - RNA, 19 nt, Artificial Sequence
  Description of Artificial Sequence: Synthetic oligonucleotide
guccuuccgcacauuuggg

SEQ ID NO: 2838886 - RNA, 19 nt, Artificial Sequence
  Description of Artificial Sequence: Synthetic oligonucleotide
cgagaaugaaacauuguaa

SEQ ID NO: 2838887 - RNA, 19 nt, Artificial Sequence
  Description of Artificial Sequence: Synthetic oligonucleotide
agccuccuguaguucucag

SEQ ID NO: 2838888 - RNA, 19 nt, Artificial Sequence
  Description of Artificial Sequence: Synthetic oligonucleotide
gccgcuguauguccuuccg

SEQ ID NO: 2838889 - RNA, 19 nt, Artificial Sequence
  Description of Artificial Sequence: Synthetic oligonucleotide
ccgagaaugaaacauugua

SEQ ID NO: 2838890 - RNA, 19 nt, Artificial Sequence
  Description of Artificial Sequence: Synthetic oligonucleotide
ggcacaaacaguucuguuu

SEQ ID NO: 2838891 - RNA, 19 nt, Artificial Sequence
  Description of Artificial Sequence: Synthetic oligonucleotide
agcuggaauucaggaccac

SEQ ID NO: 2838892 - RNA, 19 nt, Artificial Sequence
  Description of Artificial Sequence: Synthetic oligonucleotide
uaaucucaauggacuccuu

SEQ ID NO: 2838893 - RNA, 19 nt, Artificial Sequence
  Description of Artificial Sequence: Synthetic oligonucleotide
caggcuugaccaggcuucg

SEQ ID NO: 2838894 - RNA, 19 nt, Artificial Sequence
  Description of Artificial Sequence: Synthetic oligonucleotide
ccuguaguucucaggcuug

SEQ ID NO: 2838895 - RNA, 19 nt, Artificial Sequence
  Description of Artificial Sequence: Synthetic oligonucleotide
ggaaagaaagugaccuguc

SEQ ID NO: 2838896 - RNA, 19 nt, Artificial Sequence
  Description of Artificial Sequence: Synthetic oligonucleotide
ggcuucguacaaccugaag

SEQ ID NO: 2838897 - RNA, 19 nt, Artificial Sequence
  Description of Artificial Sequence: Synthetic oligonucleotide
ggucagccgcuguaugucc

SEQ ID NO: 2838898 - RNA, 19 nt, Artificial Sequence
  Description of Artificial Sequence: Synthetic oligonucleotide
cucccaggggcugauuuuc

SEQ ID NO: 2838899 - RNA, 19 nt, Artificial Sequence
  Description of Artificial Sequence: Synthetic oligonucleotide
cauagagcgaccugacgau

SEQ ID NO: 2838900 - RNA, 19 nt, Artificial Sequence
  Description of Artificial Sequence: Synthetic oligonucleotide
ccugacgauguccagccuc

SEQ ID NO: 2838901 - RNA, 19 nt, Artificial Sequence
  Description of Artificial Sequence: Synthetic oligonucleotide
accuguccuaugugugggu

SEQ ID NO: 2838902 - RNA, 19 nt, Artificial Sequence
  Description of Artificial Sequence: Synthetic oligonucleotide
caggguauacacugguagu

SEQ ID NO: 2838903 - RNA, 19 nt, Artificial Sequence
  Description of Artificial Sequence: Synthetic oligonucleotide
ccacuaaucucaauggacu

SEQ ID NO: 2838904 - RNA, 19 nt, Artificial Sequence
  Description of Artificial Sequence: Synthetic oligonucleotide
gcuguccauccacauugag

SEQ ID NO: 2838905 - RNA, 19 nt, Artificial Sequence
  Description of Artificial Sequence: Synthetic oligonucleotide
uuccgcacauuuggguggu

SEQ ID NO: 2838906 - RNA, 19 nt, Artificial Sequence
  Description of Artificial Sequence: Synthetic oligonucleotide
gcuguauguccuuccgcac

SEQ ID NO: 2838907 - RNA, 19 nt, Artificial Sequence
  Description of Artificial Sequence: Synthetic oligonucleotide
caaacaguucuguuugguu

SEQ ID NO: 2838908 - RNA, 19 nt, Artificial Sequence
  Description of Artificial Sequence: Synthetic oligonucleotide
cauuuggguggucuuccaa

SEQ ID NO: 2838909 - RNA, 19 nt, Artificial Sequence
  Description of Artificial Sequence: Synthetic oligonucleotide
ucagccgcuguauguccuu

SEQ ID NO: 2838910 - RNA, 19 nt, Artificial Sequence
  Description of Artificial Sequence: Synthetic oligonucleotide
cucuuucaggguauacacu

SEQ ID NO: 2838911 - RNA, 19 nt, Artificial Sequence
  Description of Artificial Sequence: Synthetic oligonucleotide
gguggucuuccaaaucuuc

SEQ ID NO: 2838912 - RNA, 19 nt, Artificial Sequence
  Description of Artificial Sequence: Synthetic oligonucleotide
acacugguagugugauguu

SEQ ID NO: 2838913 - RNA, 19 nt, Artificial Sequence
  Description of Artificial Sequence: Synthetic oligonucleotide
caauggacuccuucaggcu

SEQ ID NO: 2838914 - RNA, 19 nt, Artificial Sequence
  Description of Artificial Sequence: Synthetic oligonucleotide
ggaauucaggaccacuaau

SEQ ID NO: 2838915 - RNA, 19 nt, Artificial Sequence
  Description of Artificial Sequence: Synthetic oligonucleotide
ccacauugagggacggcac

SEQ ID NO: 2838916 - RNA, 19 nt, Artificial Sequence
  Description of Artificial Sequence: Synthetic oligonucleotide
gcugauuuucaaagugcuc

SEQ ID NO: 2838917 - RNA, 19 nt, Artificial Sequence
  Description of Artificial Sequence: Synthetic oligonucleotide
cagaaaacucaauguuuau

SEQ ID NO: 2838918 - RNA, 19 nt, Artificial Sequence
  Description of Artificial Sequence: Synthetic oligonucleotide
ggguuaagacucagaacca

SEQ ID NO: 2838919 - RNA, 19 nt, Artificial Sequence
  Description of Artificial Sequence: Synthetic oligonucleotide
ggcugauuuucaaagugcu

SEQ ID NO: 2838920 - RNA, 19 nt, Artificial Sequence
  Description of Artificial Sequence: Synthetic oligonucleotide
ggacggcacaaacaguucu

SEQ ID NO: 2838921 - RNA, 19 nt, Artificial Sequence
  Description of Artificial Sequence: Synthetic oligonucleotide
ggaguauauuuuacuccga

SEQ ID NO: 2838922 - RNA, 19 nt, Artificial Sequence
  Description of Artificial Sequence: Synthetic oligonucleotide
auguguggguuaagacuca

SEQ ID NO: 2838923 - RNA, 19 nt, Artificial Sequence
  Description of Artificial Sequence: Synthetic oligonucleotide
gguuaaccagaaguccguc

SEQ ID NO: 2838924 - RNA, 19 nt, Artificial Sequence
  Description of Artificial Sequence: Synthetic oligonucleotide
cuguccuauguguggguua

SEQ ID NO: 2838925 - RNA, 19 nt, Artificial Sequence
  Description of Artificial Sequence: Synthetic oligonucleotide
guccauccacauugaggga

SEQ ID NO: 2838926 - RNA, 19 nt, Artificial Sequence
  Description of Artificial Sequence: Synthetic oligonucleotide
cuguaguucucaggcuuga

SEQ ID NO: 2838927 - RNA, 19 nt, Artificial Sequence
  Description of Artificial Sequence: Synthetic oligonucleotide
ggcuugaccaggcuucgua

SEQ ID NO: 2838928 - RNA, 19 nt, Artificial Sequence
  Description of Artificial Sequence: Synthetic oligonucleotide
gcaccguuuauuguacuaa

SEQ ID NO: 2838929 - RNA, 19 nt, Artificial Sequence
  Description of Artificial Sequence: Synthetic oligonucleotide
ugacgauguccagccuccu

SEQ ID NO: 2838930 - RNA, 19 nt, Artificial Sequence
  Description of Artificial Sequence: Synthetic oligonucleotide
accugacgauguccagccu

SEQ ID NO: 2838931 - RNA, 19 nt, Artificial Sequence
  Description of Artificial Sequence: Synthetic oligonucleotide
accaggcuucguacaaccu

SEQ ID NO: 2838932 - RNA, 19 nt, Artificial Sequence
  Description of Artificial Sequence: Synthetic oligonucleotide
guguggguuaagacucaga

SEQ ID NO: 2838933 - RNA, 19 nt, Artificial Sequence
  Description of Artificial Sequence: Synthetic oligonucleotide
cgcuguauguccuuccgca

SEQ ID NO: 2838934 - RNA, 19 nt, Artificial Sequence
  Description of Artificial Sequence: Synthetic oligonucleotide
ccagugauguuuaguuuaa

SEQ ID NO: 2838935 - RNA, 19 nt, Artificial Sequence
  Description of Artificial Sequence: Synthetic oligonucleotide
accugaaggcaccgcucuu

SEQ ID NO: 2838936 - RNA, 19 nt, Artificial Sequence
  Description of Artificial Sequence: Synthetic oligonucleotide
ccaaaucuucauagagcga

SEQ ID NO: 2838937 - RNA, 19 nt, Artificial Sequence
  Description of Artificial Sequence: Synthetic oligonucleotide
guccagugauguuuaguuu

SEQ ID NO: 2838938 - RNA, 19 nt, Artificial Sequence
  Description of Artificial Sequence: Synthetic oligonucleotide
gcacauuuggguggucuuc

SEQ ID NO: 2838939 - RNA, 19 nt, Artificial Sequence
  Description of Artificial Sequence: Synthetic oligonucleotide
guacuaaaggucagcuuuu

SEQ ID NO: 2838940 - RNA, 19 nt, Artificial Sequence
  Description of Artificial Sequence: Synthetic oligonucleotide
guccuauguguggguuaag

SEQ ID NO: 2838941 - RNA, 19 nt, Artificial Sequence
  Description of Artificial Sequence: Synthetic oligonucleotide
ccagaaguccgucaugggu

SEQ ID NO: 2838942 - RNA, 19 nt, Artificial Sequence
  Description of Artificial Sequence: Synthetic oligonucleotide
gguuaagacucagaaccau

SEQ ID NO: 2838943 - RNA, 19 nt, Artificial Sequence
  Description of Artificial Sequence: Synthetic oligonucleotide
uggacuccuucaggcuccu

SEQ ID NO: 2838944 - RNA, 19 nt, Artificial Sequence
  Description of Artificial Sequence: Synthetic oligonucleotide
ccgcuguauguccuuccgc

SEQ ID NO: 2838945 - RNA, 19 nt, Artificial Sequence
  Description of Artificial Sequence: Synthetic oligonucleotide
cauugagggacggcacaaa

SEQ ID NO: 2838946 - RNA, 19 nt, Artificial Sequence
  Description of Artificial Sequence: Synthetic oligonucleotide
gcgaccugacgauguccag

SEQ ID NO: 2838947 - RNA, 19 nt, Artificial Sequence
  Description of Artificial Sequence: Synthetic oligonucleotide
cgaccugacgauguccagc

SEQ ID NO: 2838948 - RNA, 19 nt, Artificial Sequence
  Description of Artificial Sequence: Synthetic oligonucleotide
ggguauacacugguagugu

SEQ ID NO: 2838949 - RNA, 19 nt, Artificial Sequence
  Description of Artificial Sequence: Synthetic oligonucleotide
cagaaccaucaaagcugga

SEQ ID NO: 2838950 - RNA, 19 nt, Artificial Sequence
  Description of Artificial Sequence: Synthetic oligonucleotide
gcaccgcucuuucagggua

SEQ ID NO: 2838951 - RNA, 19 nt, Artificial Sequence
  Description of Artificial Sequence: Synthetic oligonucleotide
cagugauguuuaguuuaaa

SEQ ID NO: 2838952 - RNA, 19 nt, Artificial Sequence
  Description of Artificial Sequence: Synthetic oligonucleotide
ccacaaaguccagugaugu

SEQ ID NO: 2838953 - RNA, 19 nt, Artificial Sequence
  Description of Artificial Sequence: Synthetic oligonucleotide
cacaaaguccagugauguu

SEQ ID NO: 2838954 - RNA, 19 nt, Artificial Sequence
  Description of Artificial Sequence: Synthetic oligonucleotide
cagccgcuguauguccuuc

SEQ ID NO: 2838955 - RNA, 19 nt, Artificial Sequence
  Description of Artificial Sequence: Synthetic oligonucleotide
uccucucccaggggcugau

SEQ ID NO: 2838956 - RNA, 19 nt, Artificial Sequence
  Description of Artificial Sequence: Synthetic oligonucleotide
gggacggcacaaacaguuc

SEQ ID NO: 2838957 - RNA, 19 nt, Artificial Sequence
  Description of Artificial Sequence: Synthetic oligonucleotide
gcuggaauucaggaccacu

SEQ ID NO: 2838958 - RNA, 19 nt, Artificial Sequence
  Description of Artificial Sequence: Synthetic oligonucleotide
ccuucaggcuccucuccca

SEQ ID NO: 2838959 - RNA, 19 nt, Artificial Sequence
  Description of Artificial Sequence: Synthetic oligonucleotide
cucucccaggggcugauuu

SEQ ID NO: 2838960 - RNA, 19 nt, Artificial Sequence
  Description of Artificial Sequence: Synthetic oligonucleotide
gagggacggcacaaacagu

SEQ ID NO: 2838961 - RNA, 19 nt, Artificial Sequence
  Description of Artificial Sequence: Synthetic oligonucleotide
guccagccuccuguaguuc

SEQ ID NO: 2838962 - RNA, 19 nt, Artificial Sequence
  Description of Artificial Sequence: Synthetic oligonucleotide
aggcuugaccaggcuucgu

SEQ ID NO: 2838963 - RNA, 19 nt, Artificial Sequence
  Description of Artificial Sequence: Synthetic oligonucleotide
aggcuucguacaaccugaa

SEQ ID NO: 2838964 - RNA, 19 nt, Artificial Sequence
  Description of Artificial Sequence: Synthetic oligonucleotide
cgcucuuucaggguauaca

SEQ ID NO: 2838965 - RNA, 19 nt, Artificial Sequence
  Description of Artificial Sequence: Synthetic oligonucleotide
gucagccgcuguauguccu

SEQ ID NO: 2838966 - RNA, 19 nt, Artificial Sequence
  Description of Artificial Sequence: Synthetic oligonucleotide
gcucuugggucagccgcug

SEQ ID NO: 2838967 - RNA, 19 nt, Artificial Sequence
  Description of Artificial Sequence: Synthetic oligonucleotide
accgcucuuucaggguaua

SEQ ID NO: 2838968 - RNA, 19 nt, Artificial Sequence
  Description of Artificial Sequence: Synthetic oligonucleotide
gcuuuucagaaaacucaau

SEQ ID NO: 2838969 - RNA, 19 nt, Artificial Sequence
  Description of Artificial Sequence: Synthetic oligonucleotide
ggcaccgcucuuucagggu

SEQ ID NO: 2838970 - RNA, 19 nt, Artificial Sequence
  Description of Artificial Sequence: Synthetic oligonucleotide
uccgcacauuugggugguc

SEQ ID NO: 2838971 - RNA, 19 nt, Artificial Sequence
  Description of Artificial Sequence: Synthetic oligonucleotide
ggcuguccauccacauuga

SEQ ID NO: 2838972 - RNA, 19 nt, Artificial Sequence
  Description of Artificial Sequence: Synthetic oligonucleotide
caccgcucuuucaggguau

SEQ ID NO: 2838973 - RNA, 19 nt, Artificial Sequence
  Description of Artificial Sequence: Synthetic oligonucleotide
cuccucucccaggggcuga

SEQ ID NO: 2838974 - RNA, 19 nt, Artificial Sequence
  Description of Artificial Sequence: Synthetic oligonucleotide
cucuugggucagccgcugu

SEQ ID NO: 2838975 - RNA, 19 nt, Artificial Sequence
  Description of Artificial Sequence: Synthetic oligonucleotide
ccgcucuuucaggguauac

SEQ ID NO: 2838976 - RNA, 19 nt, Artificial Sequence
  Description of Artificial Sequence: Synthetic oligonucleotide
caggaccacuaaucucaau

SEQ ID NO: 2838977 - RNA, 19 nt, Artificial Sequence
  Description of Artificial Sequence: Synthetic oligonucleotide
ggguggucuuccaaaucuu

SEQ ID NO: 2838978 - RNA, 19 nt, Artificial Sequence
  Description of Artificial Sequence: Synthetic oligonucleotide
guauguccuuccgcacauu

SEQ ID NO: 2838979 - RNA, 19 nt, Artificial Sequence
  Description of Artificial Sequence: Synthetic oligonucleotide
cgauguccagccuccugua

SEQ ID NO: 2838980 - RNA, 19 nt, Artificial Sequence
  Description of Artificial Sequence: Synthetic oligonucleotide
ccugaaggcaccgcucuuu

SEQ ID NO: 2838981 - RNA, 19 nt, Artificial Sequence
  Description of Artificial Sequence: Synthetic oligonucleotide
ccgcacauuuggguggucu

SEQ ID NO: 2838982 - RNA, 19 nt, Artificial Sequence
  Description of Artificial Sequence: Synthetic oligonucleotide
ccuguccuauguguggguu

SEQ ID NO: 2838983 - RNA, 19 nt, Artificial Sequence
  Description of Artificial Sequence: Synthetic oligonucleotide
ggacuccuucaggcuccuc

SEQ ID NO: 2838984 - RNA, 19 nt, Artificial Sequence
  Description of Artificial Sequence: Synthetic oligonucleotide
cgcacauuuggguggucuu

SEQ ID NO: 2838985 - RNA, 19 nt, Artificial Sequence
  Description of Artificial Sequence: Synthetic oligonucleotide
cggcacaaacaguucuguu

SEQ ID NO: 2838986 - RNA, 19 nt, Artificial Sequence
  Description of Artificial Sequence: Synthetic oligonucleotide
ccucucccaggggcugauu

SEQ ID NO: 2838987 - RNA, 19 nt, Artificial Sequence
  Description of Artificial Sequence: Synthetic oligonucleotide
  modified_base (1)..(1): a, c, u, g, unknown or other
naccacaaaguccagugau

SEQ ID NO: 2838988 - RNA, 19 nt, Artificial Sequence
  Description of Artificial Sequence: Synthetic oligonucleotide
uuguacacaaccuuggagg

SEQ ID NO: 2838989 - RNA, 19 nt, Artificial Sequence
  Description of Artificial Sequence: Synthetic oligonucleotide
aggaccacggcacagaugc

SEQ ID NO: 2838990 - RNA, 19 nt, Artificial Sequence
  Description of Artificial Sequence: Synthetic oligonucleotide
aaagugugacaacagaguc

SEQ ID NO: 2838991 - RNA, 19 nt, Artificial Sequence
  Description of Artificial Sequence: Synthetic oligonucleotide
uuuucgaaggaaaacaucu

SEQ ID NO: 2838992 - RNA, 19 nt, Artificial Sequence
  Description of Artificial Sequence: Synthetic oligonucleotide
uaaaagugugacaacagag

SEQ ID NO: 2838993 - RNA, 19 nt, Artificial Sequence
  Description of Artificial Sequence: Synthetic oligonucleotide
aagaaaguagaauuugugu

SEQ ID NO: 2838994 - RNA, 19 nt, Artificial Sequence
  Description of Artificial Sequence: Synthetic oligonucleotide
gaaaguagaauuugugugc

SEQ ID NO: 2838995 - RNA, 19 nt, Artificial Sequence
  Description of Artificial Sequence: Synthetic oligonucleotide
gacaacgccauauuggacc

SEQ ID NO: 2838996 - RNA, 19 nt, Artificial Sequence
  Description of Artificial Sequence: Synthetic oligonucleotide
uguaaaagugugacaacag

SEQ ID NO: 2838997 - RNA, 19 nt, Artificial Sequence
  Description of Artificial Sequence: Synthetic oligonucleotide
gaucuggucagccaggcag

SEQ ID NO: 2838998 - RNA, 19 nt, Artificial Sequence
  Description of Artificial Sequence: Synthetic oligonucleotide
agcauggucuucuccaucc

SEQ ID NO: 2838999 - RNA, 19 nt, Artificial Sequence
  Description of Artificial Sequence: Synthetic oligonucleotide
auccagguuaccuguaugc

SEQ ID NO: 2839000 - RNA, 19 nt, Artificial Sequence
  Description of Artificial Sequence: Synthetic oligonucleotide
ucgaaggaaaacaucuucc

SEQ ID NO: 2839001 - RNA, 19 nt, Artificial Sequence
  Description of Artificial Sequence: Synthetic oligonucleotide
uuauuauguacuuguacac

SEQ ID NO: 2839002 - RNA, 19 nt, Artificial Sequence
  Description of Artificial Sequence: Synthetic oligonucleotide
uguacacaaccuuggaggg

SEQ ID NO: 2839003 - RNA, 19 nt, Artificial Sequence
  Description of Artificial Sequence: Synthetic oligonucleotide
uucagaacgaucuggucag

SEQ ID NO: 2839004 - RNA, 19 nt, Artificial Sequence
  Description of Artificial Sequence: Synthetic oligonucleotide
aguagaauuugugugcugg

SEQ ID NO: 2839005 - RNA, 19 nt, Artificial Sequence
  Description of Artificial Sequence: Synthetic oligonucleotide
agugugacaacagagucuc

SEQ ID NO: 2839006 - RNA, 19 nt, Artificial Sequence
  Description of Artificial Sequence: Synthetic oligonucleotide
gaauuuucgaaggaaaaca

SEQ ID NO: 2839007 - RNA, 19 nt, Artificial Sequence
  Description of Artificial Sequence: Synthetic oligonucleotide
acacuuguaaaagugugac

SEQ ID NO: 2839008 - RNA, 19 nt, Artificial Sequence
  Description of Artificial Sequence: Synthetic oligonucleotide
acuuguaaaagugugacaa

SEQ ID NO: 2839009 - RNA, 19 nt, Artificial Sequence
  Description of Artificial Sequence: Synthetic oligonucleotide
aaaagugugacaacagagu

SEQ ID NO: 2839010 - RNA, 19 nt, Artificial Sequence
  Description of Artificial Sequence: Synthetic oligonucleotide
aaccuuggagggcacaguc

SEQ ID NO: 2839011 - RNA, 19 nt, Artificial Sequence
  Description of Artificial Sequence: Synthetic oligonucleotide
uguucucucugcagcaugg

SEQ ID NO: 2839012 - RNA, 19 nt, Artificial Sequence
  Description of Artificial Sequence: Synthetic oligonucleotide
auuauguacuuguacacaa

SEQ ID NO: 2839013 - RNA, 19 nt, Artificial Sequence
  Description of Artificial Sequence: Synthetic oligonucleotide
uuguaaaagugugacaaca

SEQ ID NO: 2839014 - RNA, 19 nt, Artificial Sequence
  Description of Artificial Sequence: Synthetic oligonucleotide
acagaugcccacuugguug

SEQ ID NO: 2839015 - RNA, 19 nt, Artificial Sequence
  Description of Artificial Sequence: Synthetic oligonucleotide
caagaaaguagaauuugug

SEQ ID NO: 2839016 - RNA, 19 nt, Artificial Sequence
  Description of Artificial Sequence: Synthetic oligonucleotide
ugacaacagagucucacug

SEQ ID NO: 2839017 - RNA, 19 nt, Artificial Sequence
  Description of Artificial Sequence: Synthetic oligonucleotide
ucucucugcagcauggucu

SEQ ID NO: 2839018 - RNA, 19 nt, Artificial Sequence
  Description of Artificial Sequence: Synthetic oligonucleotide
ugaagguggagucgcacag

SEQ ID NO: 2839019 - RNA, 19 nt, Artificial Sequence
  Description of Artificial Sequence: Synthetic oligonucleotide
uagcccacaagaaaguaga

SEQ ID NO: 2839020 - RNA, 19 nt, Artificial Sequence
  Description of Artificial Sequence: Synthetic oligonucleotide
uucgaaggaaaacaucuuc

SEQ ID NO: 2839021 - RNA, 19 nt, Artificial Sequence
  Description of Artificial Sequence: Synthetic oligonucleotide
ugaauuuucgaaggaaaac

SEQ ID NO: 2839022 - RNA, 19 nt, Artificial Sequence
  Description of Artificial Sequence: Synthetic oligonucleotide
aaaacaucuuccaguguuc

SEQ ID NO: 2839023 - RNA, 19 nt, Artificial Sequence
  Description of Artificial Sequence: Synthetic oligonucleotide
aaaguagaauuugugugcu

SEQ ID NO: 2839024 - RNA, 19 nt, Artificial Sequence
  Description of Artificial Sequence: Synthetic oligonucleotide
acagucugaagguggaguc

SEQ ID NO: 2839025 - RNA, 19 nt, Artificial Sequence
  Description of Artificial Sequence: Synthetic oligonucleotide
acuguagcccacaagaaag

SEQ ID NO: 2839026 - RNA, 19 nt, Artificial Sequence
  Description of Artificial Sequence: Synthetic oligonucleotide
uggaaaggugcccagcaug

SEQ ID NO: 2839027 - RNA, 19 nt, Artificial Sequence
  Description of Artificial Sequence: Synthetic oligonucleotide
gaauuugugugcuggcagc

SEQ ID NO: 2839028 - RNA, 19 nt, Artificial Sequence
  Description of Artificial Sequence: Synthetic oligonucleotide
cuuguacacaaccuuggag

SEQ ID NO: 2839029 - RNA, 19 nt, Artificial Sequence
  Description of Artificial Sequence: Synthetic oligonucleotide
uauuauguacuuguacaca

SEQ ID NO: 2839030 - RNA, 19 nt, Artificial Sequence
  Description of Artificial Sequence: Synthetic oligonucleotide
cagcaugaauuuucgaagg

SEQ ID NO: 2839031 - RNA, 19 nt, Artificial Sequence
  Description of Artificial Sequence: Synthetic oligonucleotide
cagguuaccuguaugcagc

SEQ ID NO: 2839032 - RNA, 19 nt, Artificial Sequence
  Description of Artificial Sequence: Synthetic oligonucleotide
aacaucuuccaguguucuc

SEQ ID NO: 2839033 - RNA, 19 nt, Artificial Sequence
  Description of Artificial Sequence: Synthetic oligonucleotide
cuuucugugcgcgaugugg

SEQ ID NO: 2839034 - RNA, 19 nt, Artificial Sequence
  Description of Artificial Sequence: Synthetic oligonucleotide
cacgacagcaucccgaccc

SEQ ID NO: 2839035 - RNA, 19 nt, Artificial Sequence
  Description of Artificial Sequence: Synthetic oligonucleotide
cucacuguagcccacaaga

SEQ ID NO: 2839036 - RNA, 19 nt, Artificial Sequence
  Description of Artificial Sequence: Synthetic oligonucleotide
uaugcagcgacagccagcc

SEQ ID NO: 2839037 - RNA, 19 nt, Artificial Sequence
  Description of Artificial Sequence: Synthetic oligonucleotide
acaacgccauauuggaccg

SEQ ID NO: 2839038 - RNA, 19 nt, Artificial Sequence
  Description of Artificial Sequence: Synthetic oligonucleotide
aauuuucgaaggaaaacau

SEQ ID NO: 2839039 - RNA, 19 nt, Artificial Sequence
  Description of Artificial Sequence: Synthetic oligonucleotide
caggacacuuguaaaagug

SEQ ID NO: 2839040 - RNA, 19 nt, Artificial Sequence
  Description of Artificial Sequence: Synthetic oligonucleotide
uguaugcagcgacagccag

SEQ ID NO: 2839041 - RNA, 19 nt, Artificial Sequence
  Description of Artificial Sequence: Synthetic oligonucleotide
ugagccuccucguagcuca

SEQ ID NO: 2839042 - RNA, 19 nt, Artificial Sequence
  Description of Artificial Sequence: Synthetic oligonucleotide
ugcagcgacagccagcccu

SEQ ID NO: 2839043 - RNA, 19 nt, Artificial Sequence
  Description of Artificial Sequence: Synthetic oligonucleotide
cuucagaacgaucugguca

SEQ ID NO: 2839044 - RNA, 19 nt, Artificial Sequence
  Description of Artificial Sequence: Synthetic oligonucleotide
ugugacaacagagucucac

SEQ ID NO: 2839045 - RNA, 19 nt, Artificial Sequence
  Description of Artificial Sequence: Synthetic oligonucleotide
uuauguacuuguacacaac

SEQ ID NO: 2839046 - RNA, 19 nt, Artificial Sequence
  Description of Artificial Sequence: Synthetic oligonucleotide
aagguggagucgcacagga

SEQ ID NO: 2839047 - RNA, 19 nt, Artificial Sequence
  Description of Artificial Sequence: Synthetic oligonucleotide
uacacaaccuuggagggca

SEQ ID NO: 2839048 - RNA, 19 nt, Artificial Sequence
  Description of Artificial Sequence: Synthetic oligonucleotide
guaaaagugugacaacaga

SEQ ID NO: 2839049 - RNA, 19 nt, Artificial Sequence
  Description of Artificial Sequence: Synthetic oligonucleotide
ucuccauccagguuaccug

SEQ ID NO: 2839050 - RNA, 19 nt, Artificial Sequence
  Description of Artificial Sequence: Synthetic oligonucleotide
auuuucgaaggaaaacauc

SEQ ID NO: 2839051 - RNA, 19 nt, Artificial Sequence
  Description of Artificial Sequence: Synthetic oligonucleotide
aaaggugcccagcaugaau

SEQ ID NO: 2839052 - RNA, 19 nt, Artificial Sequence
  Description of Artificial Sequence: Synthetic oligonucleotide
gaaaacaucuuccaguguu

SEQ ID NO: 2839053 - RNA, 19 nt, Artificial Sequence
  Description of Artificial Sequence: Synthetic oligonucleotide
uagcucaccggcuuguccc

SEQ ID NO: 2839054 - RNA, 19 nt, Artificial Sequence
  Description of Artificial Sequence: Synthetic oligonucleotide
ugcccagcaugaauuuucg

SEQ ID NO: 2839055 - RNA, 19 nt, Artificial Sequence
  Description of Artificial Sequence: Synthetic oligonucleotide
augcccacuugguuggccc

SEQ ID NO: 2839056 - RNA, 19 nt, Artificial Sequence
  Description of Artificial Sequence: Synthetic oligonucleotide
cuuguaaaagugugacaac

SEQ ID NO: 2839057 - RNA, 19 nt, Artificial Sequence
  Description of Artificial Sequence: Synthetic oligonucleotide
cacaagaaaguagaauuug

SEQ ID NO: 2839058 - RNA, 19 nt, Artificial Sequence
  Description of Artificial Sequence: Synthetic oligonucleotide
ggagggcacagucugaagg

SEQ ID NO: 2839059 - RNA, 19 nt, Artificial Sequence
  Description of Artificial Sequence: Synthetic oligonucleotide
caugaauuuucgaaggaaa

SEQ ID NO: 2839060 - RNA, 19 nt, Artificial Sequence
  Description of Artificial Sequence: Synthetic oligonucleotide
uuucugugcgcgauguggu

SEQ ID NO: 2839061 - RNA, 19 nt, Artificial Sequence
  Description of Artificial Sequence: Synthetic oligonucleotide
ucgcacaggacacuuguaa

SEQ ID NO: 2839062 - RNA, 19 nt, Artificial Sequence
  Description of Artificial Sequence: Synthetic oligonucleotide
aaguagaauuugugugcug

SEQ ID NO: 2839063 - RNA, 19 nt, Artificial Sequence
  Description of Artificial Sequence: Synthetic oligonucleotide
aauuugugugcuggcagcu

SEQ ID NO: 2839064 - RNA, 19 nt, Artificial Sequence
  Description of Artificial Sequence: Synthetic oligonucleotide
cagaugcccacuugguugg

SEQ ID NO: 2839065 - RNA, 19 nt, Artificial Sequence
  Description of Artificial Sequence: Synthetic oligonucleotide
aaacaucuuccaguguucu

SEQ ID NO: 2839066 - RNA, 19 nt, Artificial Sequence
  Description of Artificial Sequence: Synthetic oligonucleotide
agagucucacuguagccca

SEQ ID NO: 2839067 - RNA, 19 nt, Artificial Sequence
  Description of Artificial Sequence: Synthetic oligonucleotide
aagugugacaacagagucu

SEQ ID NO: 2839068 - RNA, 19 nt, Artificial Sequence
  Description of Artificial Sequence: Synthetic oligonucleotide
uccaguguucucucugcag

SEQ ID NO: 2839069 - RNA, 19 nt, Artificial Sequence
  Description of Artificial Sequence: Synthetic oligonucleotide
uuaccuguaugcagcgaca

SEQ ID NO: 2839070 - RNA, 19 nt, Artificial Sequence
  Description of Artificial Sequence: Synthetic oligonucleotide
acagccagcccuuucugug

SEQ ID NO: 2839071 - RNA, 19 nt, Artificial Sequence
  Description of Artificial Sequence: Synthetic oligonucleotide
guagaauuugugugcuggc

SEQ ID NO: 2839072 - RNA, 19 nt, Artificial Sequence
  Description of Artificial Sequence: Synthetic oligonucleotide
acaagaaaguagaauuugu

SEQ ID NO: 2839073 - RNA, 19 nt, Artificial Sequence
  Description of Artificial Sequence: Synthetic oligonucleotide
uagaauuugugugcuggca

SEQ ID NO: 2839074 - RNA, 19 nt, Artificial Sequence
  Description of Artificial Sequence: Synthetic oligonucleotide
cuuccaguguucucucugc

SEQ ID NO: 2839075 - RNA, 19 nt, Artificial Sequence
  Description of Artificial Sequence: Synthetic oligonucleotide
ggcacagaugcccacuugg

SEQ ID NO: 2839076 - RNA, 19 nt, Artificial Sequence
  Description of Artificial Sequence: Synthetic oligonucleotide
agcaugaauuuucgaagga

SEQ ID NO: 2839077 - RNA, 19 nt, Artificial Sequence
  Description of Artificial Sequence: Synthetic oligonucleotide
agaacgaucuggucagcca

SEQ ID NO: 2839078 - RNA, 19 nt, Artificial Sequence
  Description of Artificial Sequence: Synthetic oligonucleotide
accuguaugcagcgacagc

SEQ ID NO: 2839079 - RNA, 19 nt, Artificial Sequence
  Description of Artificial Sequence: Synthetic oligonucleotide
cacaggacacuuguaaaag

SEQ ID NO: 2839080 - RNA, 19 nt, Artificial Sequence
  Description of Artificial Sequence: Synthetic oligonucleotide
agucgcacaggacacuugu

SEQ ID NO: 2839081 - RNA, 19 nt, Artificial Sequence
  Description of Artificial Sequence: Synthetic oligonucleotide
acaggacacuuguaaaagu

SEQ ID NO: 2839082 - RNA, 19 nt, Artificial Sequence
  Description of Artificial Sequence: Synthetic oligonucleotide
acaacagagucucacugua

SEQ ID NO: 2839083 - RNA, 19 nt, Artificial Sequence
  Description of Artificial Sequence: Synthetic oligonucleotide
uuucgaaggaaaacaucuu

SEQ ID NO: 2839084 - RNA, 19 nt, Artificial Sequence
  Description of Artificial Sequence: Synthetic oligonucleotide
uucuccauccagguuaccu

SEQ ID NO: 2839085 - RNA, 19 nt, Artificial Sequence
  Description of Artificial Sequence: Synthetic oligonucleotide
agguuaccuguaugcagcg

SEQ ID NO: 2839086 - RNA, 19 nt, Artificial Sequence
  Description of Artificial Sequence: Synthetic oligonucleotide
guagcccacaagaaaguag

SEQ ID NO: 2839087 - RNA, 19 nt, Artificial Sequence
  Description of Artificial Sequence: Synthetic oligonucleotide
agccaggcagccuggaaag

SEQ ID NO: 2839088 - RNA, 19 nt, Artificial Sequence
  Description of Artificial Sequence: Synthetic oligonucleotide
ucuucuccauccagguuac

SEQ ID NO: 2839089 - RNA, 19 nt, Artificial Sequence
  Description of Artificial Sequence: Synthetic oligonucleotide
guucuuggcgcagaccgcg

SEQ ID NO: 2839090 - RNA, 19 nt, Artificial Sequence
  Description of Artificial Sequence: Synthetic oligonucleotide
gguggagucgcacaggaca

SEQ ID NO: 2839091 - RNA, 19 nt, Artificial Sequence
  Description of Artificial Sequence: Synthetic oligonucleotide
acgacagcaucccgacccc

SEQ ID NO: 2839092 - RNA, 19 nt, Artificial Sequence
  Description of Artificial Sequence: Synthetic oligonucleotide
ugccucaggaccacggcac

SEQ ID NO: 2839093 - RNA, 19 nt, Artificial Sequence
  Description of Artificial Sequence: Synthetic oligonucleotide
auggucuucuccauccagg

SEQ ID NO: 2839094 - RNA, 19 nt, Artificial Sequence
  Description of Artificial Sequence: Synthetic oligonucleotide
uggcagcugccucaggacc

SEQ ID NO: 2839095 - RNA, 19 nt, Artificial Sequence
  Description of Artificial Sequence: Synthetic oligonucleotide
aacgaucuggucagccagg

SEQ ID NO: 2839096 - RNA, 19 nt, Artificial Sequence
  Description of Artificial Sequence: Synthetic oligonucleotide
ugcagggcgcgccaggcgc

SEQ ID NO: 2839097 - RNA, 19 nt, Artificial Sequence
  Description of Artificial Sequence: Synthetic oligonucleotide
ucacuguagcccacaagaa

SEQ ID NO: 2839098 - RNA, 19 nt, Artificial Sequence
  Description of Artificial Sequence: Synthetic oligonucleotide
ugcacgacagcaucccgac

SEQ ID NO: 2839099 - RNA, 19 nt, Artificial Sequence
  Description of Artificial Sequence: Synthetic oligonucleotide
cuccucguagcucaccggc

SEQ ID NO: 2839100 - RNA, 19 nt, Artificial Sequence
  Description of Artificial Sequence: Synthetic oligonucleotide
gacacuuguaaaaguguga

SEQ ID NO: 2839101 - RNA, 19 nt, Artificial Sequence
  Description of Artificial Sequence: Synthetic oligonucleotide
ccuguaugcagcgacagcc

SEQ ID NO: 2839102 - RNA, 19 nt, Artificial Sequence
  Description of Artificial Sequence: Synthetic oligonucleotide
uaccuguaugcagcgacag

SEQ ID NO: 2839103 - RNA, 19 nt, Artificial Sequence
  Description of Artificial Sequence: Synthetic oligonucleotide
augaauuuucgaaggaaaa

SEQ ID NO: 2839104 - RNA, 19 nt, Artificial Sequence
  Description of Artificial Sequence: Synthetic oligonucleotide
ucugugcgcgauguggugc

SEQ ID NO: 2839105 - RNA, 19 nt, Artificial Sequence
  Description of Artificial Sequence: Synthetic oligonucleotide
cauggucuucuccauccag

SEQ ID NO: 2839106 - RNA, 19 nt, Artificial Sequence
  Description of Artificial Sequence: Synthetic oligonucleotide
agcucaccggcuugucccc

SEQ ID NO: 2839107 - RNA, 19 nt, Artificial Sequence
  Description of Artificial Sequence: Synthetic oligonucleotide
acgaucuggucagccaggc

SEQ ID NO: 2839108 - RNA, 19 nt, Artificial Sequence
  Description of Artificial Sequence: Synthetic oligonucleotide
acuugguuggcccggcgcu

SEQ ID NO: 2839109 - RNA, 19 nt, Artificial Sequence
  Description of Artificial Sequence: Synthetic oligonucleotide
acaaccuuggagggcacag

SEQ ID NO: 2839110 - RNA, 19 nt, Artificial Sequence
  Description of Artificial Sequence: Synthetic oligonucleotide
uccagguuaccuguaugca

SEQ ID NO: 2839111 - RNA, 19 nt, Artificial Sequence
  Description of Artificial Sequence: Synthetic oligonucleotide
aaggugcccagcaugaauu

SEQ ID NO: 2839112 - RNA, 19 nt, Artificial Sequence
  Description of Artificial Sequence: Synthetic oligonucleotide
gaagguggagucgcacagg

SEQ ID NO: 2839113 - RNA, 19 nt, Artificial Sequence
  Description of Artificial Sequence: Synthetic oligonucleotide
caacagagucucacuguag

SEQ ID NO: 2839114 - RNA, 19 nt, Artificial Sequence
  Description of Artificial Sequence: Synthetic oligonucleotide
ugcgcgauguggugcgggg

SEQ ID NO: 2839115 - RNA, 19 nt, Artificial Sequence
  Description of Artificial Sequence: Synthetic oligonucleotide
uuccaguguucucucugca

SEQ ID NO: 2839116 - RNA, 19 nt, Artificial Sequence
  Description of Artificial Sequence: Synthetic oligonucleotide
aucuggucagccaggcagc

SEQ ID NO: 2839117 - RNA, 19 nt, Artificial Sequence
  Description of Artificial Sequence: Synthetic oligonucleotide
gaccacggcacagaugccc

SEQ ID NO: 2839118 - RNA, 19 nt, Artificial Sequence
  Description of Artificial Sequence: Synthetic oligonucleotide
cugugcgcgauguggugcg

SEQ ID NO: 2839119 - RNA, 19 nt, Artificial Sequence
  Description of Artificial Sequence: Synthetic oligonucleotide
uucuuggcgcagaccgcgg

SEQ ID NO: 2839120 - RNA, 19 nt, Artificial Sequence
  Description of Artificial Sequence: Synthetic oligonucleotide
uugugugcuggcagcugcc

SEQ ID NO: 2839121 - RNA, 19 nt, Artificial Sequence
  Description of Artificial Sequence: Synthetic oligonucleotide
ggacacuuguaaaagugug

SEQ ID NO: 2839122 - RNA, 19 nt, Artificial Sequence
  Description of Artificial Sequence: Synthetic oligonucleotide
uguggugcggggcgugagc

SEQ ID NO: 2839123 - RNA, 19 nt, Artificial Sequence
  Description of Artificial Sequence: Synthetic oligonucleotide
accgcggaggugugcaggg

SEQ ID NO: 2839124 - RNA, 19 nt, Artificial Sequence
  Description of Artificial Sequence: Synthetic oligonucleotide
agccagcccuuucugugcg

SEQ ID NO: 2839125 - RNA, 19 nt, Artificial Sequence
  Description of Artificial Sequence: Synthetic oligonucleotide
guagcucaccggcuugucc

SEQ ID NO: 2839126 - RNA, 19 nt, Artificial Sequence
  Description of Artificial Sequence: Synthetic oligonucleotide
gccgacaacgccauauugg

SEQ ID NO: 2839127 - RNA, 19 nt, Artificial Sequence
  Description of Artificial Sequence: Synthetic oligonucleotide
ggcccggcgcuucagaacg

SEQ ID NO: 2839128 - RNA, 19 nt, Artificial Sequence
  Description of Artificial Sequence: Synthetic oligonucleotide
aggacacuuguaaaagugu

SEQ ID NO: 2839129 - RNA, 19 nt, Artificial Sequence
  Description of Artificial Sequence: Synthetic oligonucleotide
gacaacagagucucacugu

SEQ ID NO: 2839130 - RNA, 19 nt, Artificial Sequence
  Description of Artificial Sequence: Synthetic oligonucleotide
ucugaagguggagucgcac

SEQ ID NO: 2839131 - RNA, 19 nt, Artificial Sequence
  Description of Artificial Sequence: Synthetic oligonucleotide
caaggcagcucccggcugc

SEQ ID NO: 2839132 - RNA, 19 nt, Artificial Sequence
  Description of Artificial Sequence: Synthetic oligonucleotide
ccaguguucucucugcagc

SEQ ID NO: 2839133 - RNA, 19 nt, Artificial Sequence
  Description of Artificial Sequence: Synthetic oligonucleotide
uuggcgcagaccgcggagg

SEQ ID NO: 2839134 - RNA, 19 nt, Artificial Sequence
  Description of Artificial Sequence: Synthetic oligonucleotide
cauccagguuaccuguaug

SEQ ID NO: 2839135 - RNA, 19 nt, Artificial Sequence
  Description of Artificial Sequence: Synthetic oligonucleotide
ucaggaccacggcacagau

SEQ ID NO: 2839136 - RNA, 19 nt, Artificial Sequence
  Description of Artificial Sequence: Synthetic oligonucleotide
uucugugcgcgauguggug

SEQ ID NO: 2839137 - RNA, 19 nt, Artificial Sequence
  Description of Artificial Sequence: Synthetic oligonucleotide
ugcccacuugguuggcccg

SEQ ID NO: 2839138 - RNA, 19 nt, Artificial Sequence
  Description of Artificial Sequence: Synthetic oligonucleotide
cagucugaagguggagucg

SEQ ID NO: 2839139 - RNA, 19 nt, Artificial Sequence
  Description of Artificial Sequence: Synthetic oligonucleotide
uguagcccacaagaaagua

SEQ ID NO: 2839140 - RNA, 19 nt, Artificial Sequence
  Description of Artificial Sequence: Synthetic oligonucleotide
ucuuggcgcagaccgcgga

SEQ ID NO: 2839141 - RNA, 19 nt, Artificial Sequence
  Description of Artificial Sequence: Synthetic oligonucleotide
cgguucuuggcgcagaccg

SEQ ID NO: 2839142 - RNA, 19 nt, Artificial Sequence
  Description of Artificial Sequence: Synthetic oligonucleotide
cacuugguuggcccggcgc

SEQ ID NO: 2839143 - RNA, 19 nt, Artificial Sequence
  Description of Artificial Sequence: Synthetic oligonucleotide
acucgagccgcccgguucu

SEQ ID NO: 2839144 - RNA, 19 nt, Artificial Sequence
  Description of Artificial Sequence: Synthetic oligonucleotide
ccagguuaccuguaugcag

SEQ ID NO: 2839145 - RNA, 19 nt, Artificial Sequence
  Description of Artificial Sequence: Synthetic oligonucleotide
uuggccacgcggacucgag

SEQ ID NO: 2839146 - RNA, 19 nt, Artificial Sequence
  Description of Artificial Sequence: Synthetic oligonucleotide
caggcagccuggaaaggug

SEQ ID NO: 2839147 - RNA, 19 nt, Artificial Sequence
  Description of Artificial Sequence: Synthetic oligonucleotide
uccucguagcucaccggcu

SEQ ID NO: 2839148 - RNA, 19 nt, Artificial Sequence
  Description of Artificial Sequence: Synthetic oligonucleotide
uuggagggcacagucugaa

SEQ ID NO: 2839149 - RNA, 19 nt, Artificial Sequence
  Description of Artificial Sequence: Synthetic oligonucleotide
uggagggcacagucugaag

SEQ ID NO: 2839150 - RNA, 19 nt, Artificial Sequence
  Description of Artificial Sequence: Synthetic oligonucleotide
agcgacagccagcccuuuc

SEQ ID NO: 2839151 - RNA, 19 nt, Artificial Sequence
  Description of Artificial Sequence: Synthetic oligonucleotide
cacuuguaaaagugugaca

SEQ ID NO: 2839152 - RNA, 19 nt, Artificial Sequence
  Description of Artificial Sequence: Synthetic oligonucleotide
cuggcagcugccucaggac

SEQ ID NO: 2839153 - RNA, 19 nt, Artificial Sequence
  Description of Artificial Sequence: Synthetic oligonucleotide
cagccagcccuuucugugc

SEQ ID NO: 2839154 - RNA, 19 nt, Artificial Sequence
  Description of Artificial Sequence: Synthetic oligonucleotide
caucuuccaguguucucuc

SEQ ID NO: 2839155 - RNA, 19 nt, Artificial Sequence
  Description of Artificial Sequence: Synthetic oligonucleotide
ugugcagggcgcgccaggc

SEQ ID NO: 2839156 - RNA, 19 nt, Artificial Sequence
  Description of Artificial Sequence: Synthetic oligonucleotide
gacucgagccgcccgguuc

SEQ ID NO: 2839157 - RNA, 19 nt, Artificial Sequence
  Description of Artificial Sequence: Synthetic oligonucleotide
gagggcacagucugaaggu

SEQ ID NO: 2839158 - RNA, 19 nt, Artificial Sequence
  Description of Artificial Sequence: Synthetic oligonucleotide
ucuggucagccaggcagcc

SEQ ID NO: 2839159 - RNA, 19 nt, Artificial Sequence
  Description of Artificial Sequence: Synthetic oligonucleotide
auuugugugcuggcagcug

SEQ ID NO: 2839160 - RNA, 19 nt, Artificial Sequence
  Description of Artificial Sequence: Synthetic oligonucleotide
cacuguagcccacaagaaa

SEQ ID NO: 2839161 - RNA, 19 nt, Artificial Sequence
  Description of Artificial Sequence: Synthetic oligonucleotide
agccgcccgguucuuggcg

SEQ ID NO: 2839162 - RNA, 19 nt, Artificial Sequence
  Description of Artificial Sequence: Synthetic oligonucleotide
ggcgugagccuccucguag

SEQ ID NO: 2839163 - RNA, 19 nt, Artificial Sequence
  Description of Artificial Sequence: Synthetic oligonucleotide
ccuuggagggcacagucug

SEQ ID NO: 2839164 - RNA, 19 nt, Artificial Sequence
  Description of Artificial Sequence: Synthetic oligonucleotide
gaccgcggaggugugcagg

SEQ ID NO: 2839165 - RNA, 19 nt, Artificial Sequence
  Description of Artificial Sequence: Synthetic oligonucleotide
guaugcagcgacagccagc

SEQ ID NO: 2839166 - RNA, 19 nt, Artificial Sequence
  Description of Artificial Sequence: Synthetic oligonucleotide
ccaggcgcaaggcagcucc

SEQ ID NO: 2839167 - RNA, 19 nt, Artificial Sequence
  Description of Artificial Sequence: Synthetic oligonucleotide
guacacaaccuuggagggc

SEQ ID NO: 2839168 - RNA, 19 nt, Artificial Sequence
  Description of Artificial Sequence: Synthetic oligonucleotide
gccuccucguagcucaccg

SEQ ID NO: 2839169 - RNA, 19 nt, Artificial Sequence
  Description of Artificial Sequence: Synthetic oligonucleotide
gacggacgccgacaacgcc

SEQ ID NO: 2839170 - RNA, 19 nt, Artificial Sequence
  Description of Artificial Sequence: Synthetic oligonucleotide
gaugcccacuugguuggcc

SEQ ID NO: 2839171 - RNA, 19 nt, Artificial Sequence
  Description of Artificial Sequence: Synthetic oligonucleotide
ggccacgcggacucgagcc

SEQ ID NO: 2839172 - RNA, 19 nt, Artificial Sequence
  Description of Artificial Sequence: Synthetic oligonucleotide
cuguaugcagcgacagcca

SEQ ID NO: 2839173 - RNA, 19 nt, Artificial Sequence
  Description of Artificial Sequence: Synthetic oligonucleotide
gugcccagcaugaauuuuc

SEQ ID NO: 2839174 - RNA, 19 nt, Artificial Sequence
  Description of Artificial Sequence: Synthetic oligonucleotide
caguguucucucugcagca

SEQ ID NO: 2839175 - RNA, 19 nt, Artificial Sequence
  Description of Artificial Sequence: Synthetic oligonucleotide
cugcacgacagcaucccga

SEQ ID NO: 2839176 - RNA, 19 nt, Artificial Sequence
  Description of Artificial Sequence: Synthetic oligonucleotide
guggagucgcacaggacac

SEQ ID NO: 2839177 - RNA, 19 nt, Artificial Sequence
  Description of Artificial Sequence: Synthetic oligonucleotide
ggaaaggugcccagcauga

SEQ ID NO: 2839178 - RNA, 19 nt, Artificial Sequence
  Description of Artificial Sequence: Synthetic oligonucleotide
ggcagcucccggcugcacg

SEQ ID NO: 2839179 - RNA, 19 nt, Artificial Sequence
  Description of Artificial Sequence: Synthetic oligonucleotide
uggccacgcggacucgagc

SEQ ID NO: 2839180 - RNA, 19 nt, Artificial Sequence
  Description of Artificial Sequence: Synthetic oligonucleotide
uuggcccggcgcuucagaa

SEQ ID NO: 2839181 - RNA, 19 nt, Artificial Sequence
  Description of Artificial Sequence: Synthetic oligonucleotide
agccuggaaaggugcccag

SEQ ID NO: 2839182 - RNA, 19 nt, Artificial Sequence
  Description of Artificial Sequence: Synthetic oligonucleotide
acggacgccgacaacgcca

SEQ ID NO: 2839183 - RNA, 19 nt, Artificial Sequence
  Description of Artificial Sequence: Synthetic oligonucleotide
cucguagcucaccggcuug

SEQ ID NO: 2839184 - RNA, 19 nt, Artificial Sequence
  Description of Artificial Sequence: Synthetic oligonucleotide
gugacaacagagucucacu

SEQ ID NO: 2839185 - RNA, 19 nt, Artificial Sequence
  Description of Artificial Sequence: Synthetic oligonucleotide
gggcacagucugaaggugg

SEQ ID NO: 2839186 - RNA, 19 nt, Artificial Sequence
  Description of Artificial Sequence: Synthetic oligonucleotide
gaggugugcagggcgcgcc

SEQ ID NO: 2839187 - RNA, 19 nt, Artificial Sequence
  Description of Artificial Sequence: Synthetic oligonucleotide
uccauccagguuaccugua

SEQ ID NO: 2839188 - RNA, 19 nt, Artificial Sequence
  Description of Artificial Sequence: Synthetic oligonucleotide
gcacaggacacuuguaaaa

SEQ ID NO: 2839189 - RNA, 19 nt, Artificial Sequence
  Description of Artificial Sequence: Synthetic oligonucleotide
ugugugcuggcagcugccu

SEQ ID NO: 2839190 - RNA, 19 nt, Artificial Sequence
  Description of Artificial Sequence: Synthetic oligonucleotide
agggcacagucugaaggug

SEQ ID NO: 2839191 - RNA, 19 nt, Artificial Sequence
  Description of Artificial Sequence: Synthetic oligonucleotide
uggcgcagaccgcggaggu

SEQ ID NO: 2839192 - RNA, 19 nt, Artificial Sequence
  Description of Artificial Sequence: Synthetic oligonucleotide
cccacaagaaaguagaauu

SEQ ID NO: 2839193 - RNA, 19 nt, Artificial Sequence
  Description of Artificial Sequence: Synthetic oligonucleotide
ggcgcaaggcagcucccgg

SEQ ID NO: 2839194 - RNA, 19 nt, Artificial Sequence
  Description of Artificial Sequence: Synthetic oligonucleotide
guggugcggggcgugagcc

SEQ ID NO: 2839195 - RNA, 19 nt, Artificial Sequence
  Description of Artificial Sequence: Synthetic oligonucleotide
agaugcccacuugguuggc

SEQ ID NO: 2839196 - RNA, 19 nt, Artificial Sequence
  Description of Artificial Sequence: Synthetic oligonucleotide
ucguagcucaccggcuugu

SEQ ID NO: 2839197 - RNA, 19 nt, Artificial Sequence
  Description of Artificial Sequence: Synthetic oligonucleotide
gcgcuucagaacgaucugg

SEQ ID NO: 2839198 - RNA, 19 nt, Artificial Sequence
  Description of Artificial Sequence: Synthetic oligonucleotide
gugugcagggcgcgccagg

SEQ ID NO: 2839199 - RNA, 19 nt, Artificial Sequence
  Description of Artificial Sequence: Synthetic oligonucleotide
aguguucucucugcagcau

SEQ ID NO: 2839200 - RNA, 19 nt, Artificial Sequence
  Description of Artificial Sequence: Synthetic oligonucleotide
ccgacaacgccauauugga

SEQ ID NO: 2839201 - RNA, 19 nt, Artificial Sequence
  Description of Artificial Sequence: Synthetic oligonucleotide
uggcccggcgcuucagaac

SEQ ID NO: 2839202 - RNA, 19 nt, Artificial Sequence
  Description of Artificial Sequence: Synthetic oligonucleotide
gcaugaauuuucgaaggaa

SEQ ID NO: 2839203 - RNA, 19 nt, Artificial Sequence
  Description of Artificial Sequence: Synthetic oligonucleotide
ucccggcugcacgacagca

SEQ ID NO: 2839204 - RNA, 19 nt, Artificial Sequence
  Description of Artificial Sequence: Synthetic oligonucleotide
cuuggagggcacagucuga

SEQ ID NO: 2839205 - RNA, 19 nt, Artificial Sequence
  Description of Artificial Sequence: Synthetic oligonucleotide
agccuccucguagcucacc

SEQ ID NO: 2839206 - RNA, 19 nt, Artificial Sequence
  Description of Artificial Sequence: Synthetic oligonucleotide
augcagcgacagccagccc

SEQ ID NO: 2839207 - RNA, 19 nt, Artificial Sequence
  Description of Artificial Sequence: Synthetic oligonucleotide
agucucacuguagcccaca

SEQ ID NO: 2839208 - RNA, 19 nt, Artificial Sequence
  Description of Artificial Sequence: Synthetic oligonucleotide
cagccaggcagccuggaaa

SEQ ID NO: 2839209 - RNA, 19 nt, Artificial Sequence
  Description of Artificial Sequence: Synthetic oligonucleotide
ggcgcuucagaacgaucug

SEQ ID NO: 2839210 - RNA, 19 nt, Artificial Sequence
  Description of Artificial Sequence: Synthetic oligonucleotide
aggcgcaaggcagcucccg

SEQ ID NO: 2839211 - RNA, 19 nt, Artificial Sequence
  Description of Artificial Sequence: Synthetic oligonucleotide
gcugcacgacagcaucccg

SEQ ID NO: 2839212 - RNA, 19 nt, Artificial Sequence
  Description of Artificial Sequence: Synthetic oligonucleotide
gagucgcacaggacacuug

SEQ ID NO: 2839213 - RNA, 19 nt, Artificial Sequence
  Description of Artificial Sequence: Synthetic oligonucleotide
ugugcgcgauguggugcgg

SEQ ID NO: 2839214 - RNA, 19 nt, Artificial Sequence
  Description of Artificial Sequence: Synthetic oligonucleotide
agaccgcggaggugugcag

SEQ ID NO: 2839215 - RNA, 19 nt, Artificial Sequence
  Description of Artificial Sequence: Synthetic oligonucleotide
cugccucaggaccacggca

SEQ ID NO: 2839216 - RNA, 19 nt, Artificial Sequence
  Description of Artificial Sequence: Synthetic oligonucleotide
gugcagggcgcgccaggcg

SEQ ID NO: 2839217 - RNA, 19 nt, Artificial Sequence
  Description of Artificial Sequence: Synthetic oligonucleotide
cggacggacgccgacaacg

SEQ ID NO: 2839218 - RNA, 19 nt, Artificial Sequence
  Description of Artificial Sequence: Synthetic oligonucleotide
aggugcccagcaugaauuu

SEQ ID NO: 2839219 - RNA, 19 nt, Artificial Sequence
  Description of Artificial Sequence: Synthetic oligonucleotide
uggagucgcacaggacacu

SEQ ID NO: 2839220 - RNA, 19 nt, Artificial Sequence
  Description of Artificial Sequence: Synthetic oligonucleotide
gcuucagaacgaucugguc

SEQ ID NO: 2839221 - RNA, 19 nt, Artificial Sequence
  Description of Artificial Sequence: Synthetic oligonucleotide
acggcacagaugcccacuu

SEQ ID NO: 2839222 - RNA, 19 nt, Artificial Sequence
  Description of Artificial Sequence: Synthetic oligonucleotide
accacggcacagaugccca

SEQ ID NO: 2839223 - RNA, 19 nt, Artificial Sequence
  Description of Artificial Sequence: Synthetic oligonucleotide
gacgccgacaacgccauau

SEQ ID NO: 2839224 - RNA, 19 nt, Artificial Sequence
  Description of Artificial Sequence: Synthetic oligonucleotide
gagccgcccgguucuuggc

SEQ ID NO: 2839225 - RNA, 19 nt, Artificial Sequence
  Description of Artificial Sequence: Synthetic oligonucleotide
cuccauccagguuaccugu

SEQ ID NO: 2839226 - RNA, 19 nt, Artificial Sequence
  Description of Artificial Sequence: Synthetic oligonucleotide
aggugugcagggcgcgcca

SEQ ID NO: 2839227 - RNA, 19 nt, Artificial Sequence
  Description of Artificial Sequence: Synthetic oligonucleotide
cuguagcccacaagaaagu

SEQ ID NO: 2839228 - RNA, 19 nt, Artificial Sequence
  Description of Artificial Sequence: Synthetic oligonucleotide
ugguuggcccggcgcuuca

SEQ ID NO: 2839229 - RNA, 19 nt, Artificial Sequence
  Description of Artificial Sequence: Synthetic oligonucleotide
cacgcggacucgagccgcc

SEQ ID NO: 2839230 - RNA, 19 nt, Artificial Sequence
  Description of Artificial Sequence: Synthetic oligonucleotide
gugcgcgauguggugcggg

SEQ ID NO: 2839231 - RNA, 19 nt, Artificial Sequence
  Description of Artificial Sequence: Synthetic oligonucleotide
gcgugagccuccucguagc

SEQ ID NO: 2839232 - RNA, 19 nt, Artificial Sequence
  Description of Artificial Sequence: Synthetic oligonucleotide
ggcugcacgacagcauccc

SEQ ID NO: 2839233 - RNA, 19 nt, Artificial Sequence
  Description of Artificial Sequence: Synthetic oligonucleotide
acacaaccuuggagggcac

SEQ ID NO: 2839234 - RNA, 19 nt, Artificial Sequence
  Description of Artificial Sequence: Synthetic oligonucleotide
uugguuggcccggcgcuuc

SEQ ID NO: 2839235 - RNA, 19 nt, Artificial Sequence
  Description of Artificial Sequence: Synthetic oligonucleotide
cucaggaccacggcacaga

SEQ ID NO: 2839236 - RNA, 19 nt, Artificial Sequence
  Description of Artificial Sequence: Synthetic oligonucleotide
acgccgacaacgccauauu

SEQ ID NO: 2839237 - RNA, 19 nt, Artificial Sequence
  Description of Artificial Sequence: Synthetic oligonucleotide
gcggacucgagccgcccgg

SEQ ID NO: 2839238 - RNA, 19 nt, Artificial Sequence
  Description of Artificial Sequence: Synthetic oligonucleotide
cacagucugaagguggagu

SEQ ID NO: 2839239 - RNA, 19 nt, Artificial Sequence
  Description of Artificial Sequence: Synthetic oligonucleotide
agcccuuucugugcgcgau

SEQ ID NO: 2839240 - RNA, 19 nt, Artificial Sequence
  Description of Artificial Sequence: Synthetic oligonucleotide
gauguggugcggggcguga

SEQ ID NO: 2839241 - RNA, 19 nt, Artificial Sequence
  Description of Artificial Sequence: Synthetic oligonucleotide
auguggugcggggcgugag

SEQ ID NO: 2839242 - RNA, 19 nt, Artificial Sequence
  Description of Artificial Sequence: Synthetic oligonucleotide
caggcgcaaggcagcuccc

SEQ ID NO: 2839243 - RNA, 19 nt, Artificial Sequence
  Description of Artificial Sequence: Synthetic oligonucleotide
uggugcggggcgugagccu

SEQ ID NO: 2839244 - RNA, 19 nt, Artificial Sequence
  Description of Artificial Sequence: Synthetic oligonucleotide
cggggcgugagccuccucg

SEQ ID NO: 2839245 - RNA, 19 nt, Artificial Sequence
  Description of Artificial Sequence: Synthetic oligonucleotide
gagucucacuguagcccac

SEQ ID NO: 2839246 - RNA, 19 nt, Artificial Sequence
  Description of Artificial Sequence: Synthetic oligonucleotide
gucucacuguagcccacaa

SEQ ID NO: 2839247 - RNA, 19 nt, Artificial Sequence
  Description of Artificial Sequence: Synthetic oligonucleotide
agcucccggcugcacgaca

SEQ ID NO: 2839248 - RNA, 19 nt, Artificial Sequence
  Description of Artificial Sequence: Synthetic oligonucleotide
cagccuggaaaggugccca

SEQ ID NO: 2839249 - RNA, 19 nt, Artificial Sequence
  Description of Artificial Sequence: Synthetic oligonucleotide
agccggcggacggacgccg

SEQ ID NO: 2839250 - RNA, 19 nt, Artificial Sequence
  Description of Artificial Sequence: Synthetic oligonucleotide
gguucuuggcgcagaccgc

SEQ ID NO: 2839251 - RNA, 19 nt, Artificial Sequence
  Description of Artificial Sequence: Synthetic oligonucleotide
acgcggacucgagccgccc

SEQ ID NO: 2839252 - RNA, 19 nt, Artificial Sequence
  Description of Artificial Sequence: Synthetic oligonucleotide
ccagccggcggacggacgc

SEQ ID NO: 2839253 - RNA, 19 nt, Artificial Sequence
  Description of Artificial Sequence: Synthetic oligonucleotide
cagaccgcggaggugugca

SEQ ID NO: 2839254 - RNA, 19 nt, Artificial Sequence
  Description of Artificial Sequence: Synthetic oligonucleotide
cgcgauguggugcggggcg

SEQ ID NO: 2839255 - RNA, 19 nt, Artificial Sequence
  Description of Artificial Sequence: Synthetic oligonucleotide
cucccggcugcacgacagc

SEQ ID NO: 2839256 - RNA, 19 nt, Artificial Sequence
  Description of Artificial Sequence: Synthetic oligonucleotide
ccagcccuuucugugcgcg

SEQ ID NO: 2839257 - RNA, 19 nt, Artificial Sequence
  Description of Artificial Sequence: Synthetic oligonucleotide
gcagccuggaaaggugccc

SEQ ID NO: 2839258 - RNA, 19 nt, Artificial Sequence
  Description of Artificial Sequence: Synthetic oligonucleotide
cgcgccaggcgcaaggcag

SEQ ID NO: 2839259 - RNA, 19 nt, Artificial Sequence
  Description of Artificial Sequence: Synthetic oligonucleotide
gggcgcgccaggcgcaagg

SEQ ID NO: 2839260 - RNA, 19 nt, Artificial Sequence
  Description of Artificial Sequence: Synthetic oligonucleotide
ccuccucguagcucaccgg

SEQ ID NO: 2839261 - RNA, 19 nt, Artificial Sequence
  Description of Artificial Sequence: Synthetic oligonucleotide
ggacggacgccgacaacgc

SEQ ID NO: 2839262 - RNA, 19 nt, Artificial Sequence
  Description of Artificial Sequence: Synthetic oligonucleotide
gcgcaaggcagcucccggc

SEQ ID NO: 2839263 - RNA, 19 nt, Artificial Sequence
  Description of Artificial Sequence: Synthetic oligonucleotide
ggcacagucugaaggugga

SEQ ID NO: 2839264 - RNA, 19 nt, Artificial Sequence
  Description of Artificial Sequence: Synthetic oligonucleotide
ggaaaacaucuuccagugu

SEQ ID NO: 2839265 - RNA, 19 nt, Artificial Sequence
  Description of Artificial Sequence: Synthetic oligonucleotide
gcagcucccggcugcacga

SEQ ID NO: 2839266 - RNA, 19 nt, Artificial Sequence
  Description of Artificial Sequence: Synthetic oligonucleotide
gcucccggcugcacgacag

SEQ ID NO: 2839267 - RNA, 19 nt, Artificial Sequence
  Description of Artificial Sequence: Synthetic oligonucleotide
gugagccuccucguagcuc

SEQ ID NO: 2839268 - RNA, 19 nt, Artificial Sequence
  Description of Artificial Sequence: Synthetic oligonucleotide
ggcagccuggaaaggugcc

SEQ ID NO: 2839269 - RNA, 19 nt, Artificial Sequence
  Description of Artificial Sequence: Synthetic oligonucleotide
agcccacaagaaaguagaa

SEQ ID NO: 2839270 - RNA, 19 nt, Artificial Sequence
  Description of Artificial Sequence: Synthetic oligonucleotide
cgcggaggugugcagggcg

SEQ ID NO: 2839271 - RNA, 19 nt, Artificial Sequence
  Description of Artificial Sequence: Synthetic oligonucleotide
ccggcugcacgacagcauc

SEQ ID NO: 2839272 - RNA, 19 nt, Artificial Sequence
  Description of Artificial Sequence: Synthetic oligonucleotide
gcaaggcagcucccggcug

SEQ ID NO: 2839273 - RNA, 19 nt, Artificial Sequence
  Description of Artificial Sequence: Synthetic oligonucleotide
ucgagccgcccgguucuug

SEQ ID NO: 2839274 - RNA, 19 nt, Artificial Sequence
  Description of Artificial Sequence: Synthetic oligonucleotide
cuucuccauccagguuacc

SEQ ID NO: 2839275 - RNA, 19 nt, Artificial Sequence
  Description of Artificial Sequence: Synthetic oligonucleotide
cgagccgcccgguucuugg

SEQ ID NO: 2839276 - RNA, 19 nt, Artificial Sequence
  Description of Artificial Sequence: Synthetic oligonucleotide
cuuggccacgcggacucga

SEQ ID NO: 2839277 - RNA, 19 nt, Artificial Sequence
  Description of Artificial Sequence: Synthetic oligonucleotide
cacagaugcccacuugguu

SEQ ID NO: 2839278 - RNA, 19 nt, Artificial Sequence
  Description of Artificial Sequence: Synthetic oligonucleotide
gccgcccgguucuuggcgc

SEQ ID NO: 2839279 - RNA, 19 nt, Artificial Sequence
  Description of Artificial Sequence: Synthetic oligonucleotide
gcacagucugaagguggag

SEQ ID NO: 2839280 - RNA, 19 nt, Artificial Sequence
  Description of Artificial Sequence: Synthetic oligonucleotide
gcauggucuucuccaucca

SEQ ID NO: 2839281 - RNA, 19 nt, Artificial Sequence
  Description of Artificial Sequence: Synthetic oligonucleotide
ccacaagaaaguagaauuu

SEQ ID NO: 2839282 - RNA, 19 nt, Artificial Sequence
  Description of Artificial Sequence: Synthetic oligonucleotide
gucugaagguggagucgca

SEQ ID NO: 2839283 - RNA, 19 nt, Artificial Sequence
  Description of Artificial Sequence: Synthetic oligonucleotide
gcgacagccagcccuuucu

SEQ ID NO: 2839284 - RNA, 19 nt, Artificial Sequence
  Description of Artificial Sequence: Synthetic oligonucleotide
cgacaacgccauauuggac

SEQ ID NO: 2839285 - RNA, 19 nt, Artificial Sequence
  Description of Artificial Sequence: Synthetic oligonucleotide
ggugugcagggcgcgccag

SEQ ID NO: 2839286 - RNA, 19 nt, Artificial Sequence
  Description of Artificial Sequence: Synthetic oligonucleotide
ggugcggggcgugagccuc

SEQ ID NO: 2839287 - RNA, 19 nt, Artificial Sequence
  Description of Artificial Sequence: Synthetic oligonucleotide
aggcagcucccggcugcac

SEQ ID NO: 2839288 - RNA, 19 nt, Artificial Sequence
  Description of Artificial Sequence: Synthetic oligonucleotide
cacaaccuuggagggcaca

SEQ ID NO: 2839289 - RNA, 19 nt, Artificial Sequence
  Description of Artificial Sequence: Synthetic oligonucleotide
gcccacuugguuggcccgg

SEQ ID NO: 2839290 - RNA, 19 nt, Artificial Sequence
  Description of Artificial Sequence: Synthetic oligonucleotide
ggaggugugcagggcgcgc

SEQ ID NO: 2839291 - RNA, 19 nt, Artificial Sequence
  Description of Artificial Sequence: Synthetic oligonucleotide
gguuaccuguaugcagcga

SEQ ID NO: 2839292 - RNA, 19 nt, Artificial Sequence
  Description of Artificial Sequence: Synthetic oligonucleotide
gcacgacagcaucccgacc

SEQ ID NO: 2839293 - RNA, 19 nt, Artificial Sequence
  Description of Artificial Sequence: Synthetic oligonucleotide
gccaggcagccuggaaagg

SEQ ID NO: 2839294 - RNA, 19 nt, Artificial Sequence
  Description of Artificial Sequence: Synthetic oligonucleotide
gcggaggugugcagggcgc

SEQ ID NO: 2839295 - RNA, 19 nt, Artificial Sequence
  Description of Artificial Sequence: Synthetic oligonucleotide
cuggaaaggugcccagcau

SEQ ID NO: 2839296 - RNA, 19 nt, Artificial Sequence
  Description of Artificial Sequence: Synthetic oligonucleotide
cagcugccucaggaccacg

SEQ ID NO: 2839297 - RNA, 19 nt, Artificial Sequence
  Description of Artificial Sequence: Synthetic oligonucleotide
gcccuuucugugcgcgaug

SEQ ID NO: 2839298 - RNA, 19 nt, Artificial Sequence
  Description of Artificial Sequence: Synthetic oligonucleotide
ggcggacggacgccgacaa

SEQ ID NO: 2839299 - RNA, 19 nt, Artificial Sequence
  Description of Artificial Sequence: Synthetic oligonucleotide
ccuuucugugcgcgaugug

SEQ ID NO: 2839300 - RNA, 19 nt, Artificial Sequence
  Description of Artificial Sequence: Synthetic oligonucleotide
ccacuugguuggcccggcg

SEQ ID NO: 2839301 - RNA, 19 nt, Artificial Sequence
  Description of Artificial Sequence: Synthetic oligonucleotide
ccucaggaccacggcacag

SEQ ID NO: 2839302 - RNA, 19 nt, Artificial Sequence
  Description of Artificial Sequence: Synthetic oligonucleotide
guucucucugcagcauggu

SEQ ID NO: 2839303 - RNA, 19 nt, Artificial Sequence
  Description of Artificial Sequence: Synthetic oligonucleotide
cagcccuuucugugcgcga

SEQ ID NO: 2839304 - RNA, 19 nt, Artificial Sequence
  Description of Artificial Sequence: Synthetic oligonucleotide
cgccgacaacgccauauug

SEQ ID NO: 2839305 - RNA, 19 nt, Artificial Sequence
  Description of Artificial Sequence: Synthetic oligonucleotide
ugcggggcgugagccuccu

SEQ ID NO: 2839306 - RNA, 19 nt, Artificial Sequence
  Description of Artificial Sequence: Synthetic oligonucleotide
cgcacaggacacuuguaaa

SEQ ID NO: 2839307 - RNA, 19 nt, Artificial Sequence
  Description of Artificial Sequence: Synthetic oligonucleotide
cagccggcggacggacgcc

SEQ ID NO: 2839308 - RNA, 19 nt, Artificial Sequence
  Description of Artificial Sequence: Synthetic oligonucleotide
gcccagcaugaauuuucga

SEQ ID NO: 2839309 - RNA, 19 nt, Artificial Sequence
  Description of Artificial Sequence: Synthetic oligonucleotide
gagccuccucguagcucac

SEQ ID NO: 2839310 - RNA, 19 nt, Artificial Sequence
  Description of Artificial Sequence: Synthetic oligonucleotide
gucgcacaggacacuugua

SEQ ID NO: 2839311 - RNA, 19 nt, Artificial Sequence
  Description of Artificial Sequence: Synthetic oligonucleotide
gugugacaacagagucuca

SEQ ID NO: 2839312 - RNA, 19 nt, Artificial Sequence
  Description of Artificial Sequence: Synthetic oligonucleotide
gucagccaggcagccugga

SEQ ID NO: 2839313 - RNA, 19 nt, Artificial Sequence
  Description of Artificial Sequence: Synthetic oligonucleotide
gccucaggaccacggcaca

SEQ ID NO: 2839314 - RNA, 19 nt, Artificial Sequence
  Description of Artificial Sequence: Synthetic oligonucleotide
cccgguucuuggcgcagac

SEQ ID NO: 2839315 - RNA, 19 nt, Artificial Sequence
  Description of Artificial Sequence: Synthetic oligonucleotide
gguuggcccggcgcuucag

SEQ ID NO: 2839316 - RNA, 19 nt, Artificial Sequence
  Description of Artificial Sequence: Synthetic oligonucleotide
gccagcccuuucugugcgc

SEQ ID NO: 2839317 - RNA, 19 nt, Artificial Sequence
  Description of Artificial Sequence: Synthetic oligonucleotide
cggcgcuucagaacgaucu

SEQ ID NO: 2839318 - RNA, 19 nt, Artificial Sequence
  Description of Artificial Sequence: Synthetic oligonucleotide
gcagcauggucuucuccau

SEQ ID NO: 2839319 - RNA, 19 nt, Artificial Sequence
  Description of Artificial Sequence: Synthetic oligonucleotide
ggcgcgccaggcgcaaggc

SEQ ID NO: 2839320 - RNA, 19 nt, Artificial Sequence
  Description of Artificial Sequence: Synthetic oligonucleotide
gugcggggcgugagccucc

SEQ ID NO: 2839321 - RNA, 19 nt, Artificial Sequence
  Description of Artificial Sequence: Synthetic oligonucleotide
caaccuuggagggcacagu

SEQ ID NO: 2839322 - RNA, 19 nt, Artificial Sequence
  Description of Artificial Sequence: Synthetic oligonucleotide
ccgguucuuggcgcagacc

SEQ ID NO: 2839323 - RNA, 19 nt, Artificial Sequence
  Description of Artificial Sequence: Synthetic oligonucleotide
gcgcagaccgcggaggugu

SEQ ID NO: 2839324 - RNA, 19 nt, Artificial Sequence
  Description of Artificial Sequence: Synthetic oligonucleotide
cacggcacagaugcccacu

SEQ ID NO: 2839325 - RNA, 19 nt, Artificial Sequence
  Description of Artificial Sequence: Synthetic oligonucleotide
ggcgcagaccgcggaggug

SEQ ID NO: 2839326 - RNA, 19 nt, Artificial Sequence
  Description of Artificial Sequence: Synthetic oligonucleotide
gcacagaugcccacuuggu

SEQ ID NO: 2839327 - RNA, 19 nt, Artificial Sequence
  Description of Artificial Sequence: Synthetic oligonucleotide
ccacggcacagaugcccac

SEQ ID NO: 2839328 - RNA, 19 nt, Artificial Sequence
  Description of Artificial Sequence: Synthetic oligonucleotide
gcgccaggcgcaaggcagc

SEQ ID NO: 2839329 - RNA, 19 nt, Artificial Sequence
  Description of Artificial Sequence: Synthetic oligonucleotide
gcagaccgcggaggugugc

SEQ ID NO: 2839330 - RNA, 19 nt, Artificial Sequence
  Description of Artificial Sequence: Synthetic oligonucleotide
ggaccacggcacagaugcc

SEQ ID NO: 2839331 - RNA, 19 nt, Artificial Sequence
  Description of Artificial Sequence: Synthetic oligonucleotide
gcgcgauguggugcggggc

SEQ ID NO: 2839332 - RNA, 19 nt, Artificial Sequence
  Description of Artificial Sequence: Synthetic oligonucleotide
ccggcgcuucagaacgauc

SEQ ID NO: 2839333 - RNA, 19 nt, Artificial Sequence
  Description of Artificial Sequence: Synthetic oligonucleotide
cagcucccggcugcacgac

SEQ ID NO: 2839334 - RNA, 19 nt, Artificial Sequence
  Description of Artificial Sequence: Synthetic oligonucleotide
cccacuugguuggcccggc

SEQ ID NO: 2839335 - RNA, 19 nt, Artificial Sequence
  Description of Artificial Sequence: Synthetic oligonucleotide
cgcuucagaacgaucuggu

SEQ ID NO: 2839336 - RNA, 19 nt, Artificial Sequence
  Description of Artificial Sequence: Synthetic oligonucleotide
ggagucgcacaggacacuu

SEQ ID NO: 2839337 - RNA, 19 nt, Artificial Sequence
  Description of Artificial Sequence: Synthetic oligonucleotide
cgcggacucgagccgcccg

SEQ ID NO: 2839338 - RNA, 19 nt, Artificial Sequence
  Description of Artificial Sequence: Synthetic oligonucleotide
cccagccggcggacggacg

SEQ ID NO: 2839339 - RNA, 19 nt, Artificial Sequence
  Description of Artificial Sequence: Synthetic oligonucleotide
ggucuucuccauccagguu

SEQ ID NO: 2839340 - RNA, 19 nt, Artificial Sequence
  Description of Artificial Sequence: Synthetic oligonucleotide
agggcgcgccaggcgcaag

SEQ ID NO: 2839341 - RNA, 19 nt, Artificial Sequence
  Description of Artificial Sequence: Synthetic oligonucleotide
ggggcgugagccuccucgu

SEQ ID NO: 2839342 - RNA, 19 nt, Artificial Sequence
  Description of Artificial Sequence: Synthetic oligonucleotide
cggaggugugcagggcgcg

SEQ ID NO: 2839343 - RNA, 19 nt, Artificial Sequence
  Description of Artificial Sequence: Synthetic oligonucleotide
ccuuggccacgcggacucg

SEQ ID NO: 2839344 - RNA, 19 nt, Artificial Sequence
  Description of Artificial Sequence: Synthetic oligonucleotide
gcggacggacgccgacaac

SEQ ID NO: 2839345 - RNA, 19 nt, Artificial Sequence
  Description of Artificial Sequence: Synthetic oligonucleotide
cggcacagaugcccacuug

SEQ ID NO: 2839346 - RNA, 19 nt, Artificial Sequence
  Description of Artificial Sequence: Synthetic oligonucleotide
gcgcgccaggcgcaaggca

SEQ ID NO: 2839347 - RNA, 19 nt, Artificial Sequence
  Description of Artificial Sequence: Synthetic oligonucleotide
gggcgugagccuccucgua

SEQ ID NO: 2839348 - RNA, 19 nt, Artificial Sequence
  Description of Artificial Sequence: Synthetic oligonucleotide
cuugguuggcccggcgcuu

SEQ ID NO: 2839349 - RNA, 19 nt, Artificial Sequence
  Description of Artificial Sequence: Synthetic oligonucleotide
ggugcccagcaugaauuuu

SEQ ID NO: 2839350 - RNA, 19 nt, Artificial Sequence
  Description of Artificial Sequence: Synthetic oligonucleotide
ccauccagguuaccuguau

SEQ ID NO: 2839351 - RNA, 19 nt, Artificial Sequence
  Description of Artificial Sequence: Synthetic oligonucleotide
cccuuucugugcgcgaugu

SEQ ID NO: 2839352 - RNA, 19 nt, Artificial Sequence
  Description of Artificial Sequence: Synthetic oligonucleotide
cguagcucaccggcuuguc

SEQ ID NO: 2839353 - RNA, 19 nt, Artificial Sequence
  Description of Artificial Sequence: Synthetic oligonucleotide
gcagggcgcgccaggcgca

SEQ ID NO: 2839354 - RNA, 19 nt, Artificial Sequence
  Description of Artificial Sequence: Synthetic oligonucleotide
cgauguggugcggggcgug

SEQ ID NO: 2839355 - RNA, 19 nt, Artificial Sequence
  Description of Artificial Sequence: Synthetic oligonucleotide
cgaucuggucagccaggca

SEQ ID NO: 2839356 - RNA, 19 nt, Artificial Sequence
  Description of Artificial Sequence: Synthetic oligonucleotide
ccgcggaggugugcagggc

SEQ ID NO: 2839357 - RNA, 19 nt, Artificial Sequence
  Description of Artificial Sequence: Synthetic oligonucleotide
ccucguagcucaccggcuu

SEQ ID NO: 2839358 - RNA, 19 nt, Artificial Sequence
  Description of Artificial Sequence: Synthetic oligonucleotide
cgcagaccgcggaggugug

SEQ ID NO: 2839359 - RNA, 19 nt, Artificial Sequence
  Description of Artificial Sequence: Synthetic oligonucleotide
cgcaaggcagcucccggcu

SEQ ID NO: 2839360 - RNA, 19 nt, Artificial Sequence
  Description of Artificial Sequence: Synthetic oligonucleotide
gcccgguucuuggcgcaga

SEQ ID NO: 2839361 - RNA, 19 nt, Artificial Sequence
  Description of Artificial Sequence: Synthetic oligonucleotide
ccccagccggcggacggac

SEQ ID NO: 2839362 - RNA, 19 nt, Artificial Sequence
  Description of Artificial Sequence: Synthetic oligonucleotide
gccaggcgcaaggcagcuc

SEQ ID NO: 2839363 - RNA, 19 nt, Artificial Sequence
  Description of Artificial Sequence: Synthetic oligonucleotide
cagggcgcgccaggcgcaa

SEQ ID NO: 2839364 - RNA, 19 nt, Artificial Sequence
  Description of Artificial Sequence: Synthetic oligonucleotide
ccgcccgguucuuggcgca

SEQ ID NO: 2839365 - RNA, 19 nt, Artificial Sequence
  Description of Artificial Sequence: Synthetic oligonucleotide
gcgauguggugcggggcgu

SEQ ID NO: 2839366 - RNA, 19 nt, Artificial Sequence
  Description of Artificial Sequence: Synthetic oligonucleotide
ggacucgagccgcccgguu

SEQ ID NO: 2839367 - RNA, 19 nt, Artificial Sequence
  Description of Artificial Sequence: Synthetic oligonucleotide
cccggcugcacgacagcau

SEQ ID NO: 2839368 - RNA, 19 nt, Artificial Sequence
  Description of Artificial Sequence: Synthetic oligonucleotide
cgugagccuccucguagcu

SEQ ID NO: 2839369 - RNA, 19 nt, Artificial Sequence
  Description of Artificial Sequence: Synthetic oligonucleotide
gcccggcgcuucagaacga

SEQ ID NO: 2839370 - RNA, 19 nt, Artificial Sequence
  Description of Artificial Sequence: Synthetic oligonucleotide
cgcccgguucuuggcgcag

SEQ ID NO: 2839371 - RNA, 19 nt, Artificial Sequence
  Description of Artificial Sequence: Synthetic oligonucleotide
ggacgccgacaacgccaua

SEQ ID NO: 2839372 - RNA, 19 nt, Artificial Sequence
  Description of Artificial Sequence: Synthetic oligonucleotide
cggacgccgacaacgccau

SEQ ID NO: 2839373 - RNA, 19 nt, Artificial Sequence
  Description of Artificial Sequence: Synthetic oligonucleotide
gccggcggacggacgccga

SEQ ID NO: 2839374 - RNA, 19 nt, Artificial Sequence
  Description of Artificial Sequence: Synthetic oligonucleotide
gcggggcgugagccuccuc

SEQ ID NO: 2839375 - RNA, 19 nt, Artificial Sequence
  Description of Artificial Sequence: Synthetic oligonucleotide
cggcggacggacgccgaca

SEQ ID NO: 2839376 - RNA, 19 nt, Artificial Sequence
  Description of Artificial Sequence: Synthetic oligonucleotide
cucgagccgcccgguucuu

SEQ ID NO: 2839377 - RNA, 19 nt, Artificial Sequence
  Description of Artificial Sequence: Synthetic oligonucleotide
cccggcgcuucagaacgau

SEQ ID NO: 2839378 - RNA, 19 nt, Artificial Sequence
  Description of Artificial Sequence: Synthetic oligonucleotide
cagcgacagccagcccuuu

SEQ ID NO: 2839379 - RNA, 19 nt, Artificial Sequence
  Description of Artificial Sequence: Synthetic oligonucleotide
cgccaggcgcaaggcagcu

SEQ ID NO: 2839380 - RNA, 19 nt, Artificial Sequence
  Description of Artificial Sequence: Synthetic oligonucleotide
cggacucgagccgcccggu

SEQ ID NO: 2839381 - RNA, 19 nt, Artificial Sequence
  Description of Artificial Sequence: Synthetic oligonucleotide
gauuugagacuguagaugg

SEQ ID NO: 2839382 - RNA, 19 nt, Artificial Sequence
  Description of Artificial Sequence: Synthetic oligonucleotide
auggcaugcaccuuguugg

SEQ ID NO: 2839383 - RNA, 19 nt, Artificial Sequence
  Description of Artificial Sequence: Synthetic oligonucleotide
cuuaacguugcccucacgg

SEQ ID NO: 2839384 - RNA, 19 nt, Artificial Sequence
  Description of Artificial Sequence: Synthetic oligonucleotide
aauguuguugucauccagg

SEQ ID NO: 2839385 - RNA, 19 nt, Artificial Sequence
  Description of Artificial Sequence: Synthetic oligonucleotide
gacaauguuguugucaucc

SEQ ID NO: 2839386 - RNA, 19 nt, Artificial Sequence
  Description of Artificial Sequence: Synthetic oligonucleotide
uuuuacgagguacagaguu

SEQ ID NO: 2839387 - RNA, 19 nt, Artificial Sequence
  Description of Artificial Sequence: Synthetic oligonucleotide
aacaccgucuucugcugcc

SEQ ID NO: 2839388 - RNA, 19 nt, Artificial Sequence
  Description of Artificial Sequence: Synthetic oligonucleotide
aacacauguuguccagccc

SEQ ID NO: 2839389 - RNA, 19 nt, Artificial Sequence
  Description of Artificial Sequence: Synthetic oligonucleotide
agagauaaccugugugagc

SEQ ID NO: 2839390 - RNA, 19 nt, Artificial Sequence
  Description of Artificial Sequence: Synthetic oligonucleotide
ugugugagcagagaguucc

SEQ ID NO: 2839391 - RNA, 19 nt, Artificial Sequence
  Description of Artificial Sequence: Synthetic oligonucleotide
uuaacguugcccucacggg

SEQ ID NO: 2839392 - RNA, 19 nt, Artificial Sequence
  Description of Artificial Sequence: Synthetic oligonucleotide
aaccugugugagcagagag

SEQ ID NO: 2839393 - RNA, 19 nt, Artificial Sequence
  Description of Artificial Sequence: Synthetic oligonucleotide
uugucauccaggaagcgac

SEQ ID NO: 2839394 - RNA, 19 nt, Artificial Sequence
  Description of Artificial Sequence: Synthetic oligonucleotide
agauggaacacauguuguc

SEQ ID NO: 2839395 - RNA, 19 nt, Artificial Sequence
  Description of Artificial Sequence: Synthetic oligonucleotide
ugagacuguagauggaaca

SEQ ID NO: 2839396 - RNA, 19 nt, Artificial Sequence
  Description of Artificial Sequence: Synthetic oligonucleotide
aguuguagucuggagacac

SEQ ID NO: 2839397 - RNA, 19 nt, Artificial Sequence
  Description of Artificial Sequence: Synthetic oligonucleotide
agcagcuuagagucagugc

SEQ ID NO: 2839398 - RNA, 19 nt, Artificial Sequence
  Description of Artificial Sequence: Synthetic oligonucleotide
ucucaaugucccaccaagg

SEQ ID NO: 2839399 - RNA, 19 nt, Artificial Sequence
  Description of Artificial Sequence: Synthetic oligonucleotide
uuuacgagguacagaguug

SEQ ID NO: 2839400 - RNA, 19 nt, Artificial Sequence
  Description of Artificial Sequence: Synthetic oligonucleotide
caaugucccaccaaggcac

SEQ ID NO: 2839401 - RNA, 19 nt, Artificial Sequence
  Description of Artificial Sequence: Synthetic oligonucleotide
gaacacauguuguccagcc

SEQ ID NO: 2839402 - RNA, 19 nt, Artificial Sequence
  Description of Artificial Sequence: Synthetic oligonucleotide
ugaggcacuuaccagcagc

SEQ ID NO: 2839403 - RNA, 19 nt, Artificial Sequence
  Description of Artificial Sequence: Synthetic oligonucleotide
gauggaacacauguugucc

SEQ ID NO: 2839404 - RNA, 19 nt, Artificial Sequence
  Description of Artificial Sequence: Synthetic oligonucleotide
uccaggaagcgacaacagg

SEQ ID NO: 2839405 - RNA, 19 nt, Artificial Sequence
  Description of Artificial Sequence: Synthetic oligonucleotide
uaagugucccagacgauca

SEQ ID NO: 2839406 - RNA, 19 nt, Artificial Sequence
  Description of Artificial Sequence: Synthetic oligonucleotide
accagugugucccacaaca

SEQ ID NO: 2839407 - RNA, 19 nt, Artificial Sequence
  Description of Artificial Sequence: Synthetic oligonucleotide
uuguagucuggagacacgg

SEQ ID NO: 2839408 - RNA, 19 nt, Artificial Sequence
  Description of Artificial Sequence: Synthetic oligonucleotide
uuaguguccuccguguccg

SEQ ID NO: 2839409 - RNA, 19 nt, Artificial Sequence
  Description of Artificial Sequence: Synthetic oligonucleotide
uuguugucauccaggaagc

SEQ ID NO: 2839410 - RNA, 19 nt, Artificial Sequence
  Description of Artificial Sequence: Synthetic oligonucleotide
agugugucccacaacaccg

SEQ ID NO: 2839411 - RNA, 19 nt, Artificial Sequence
  Description of Artificial Sequence: Synthetic oligonucleotide
uuagagucagugcccagug

SEQ ID NO: 2839412 - RNA, 19 nt, Artificial Sequence
  Description of Artificial Sequence: Synthetic oligonucleotide
uggucgacaauguuguugu

SEQ ID NO: 2839413 - RNA, 19 nt, Artificial Sequence
  Description of Artificial Sequence: Synthetic oligonucleotide
uucccggcugaccuuaacg

SEQ ID NO: 2839414 - RNA, 19 nt, Artificial Sequence
  Description of Artificial Sequence: Synthetic oligonucleotide
cucaaugucccaccaaggc

SEQ ID NO: 2839415 - RNA, 19 nt, Artificial Sequence
  Description of Artificial Sequence: Synthetic oligonucleotide
aggagagauaaccugugug

SEQ ID NO: 2839416 - RNA, 19 nt, Artificial Sequence
  Description of Artificial Sequence: Synthetic oligonucleotide
gagauaaccugugugagca

SEQ ID NO: 2839417 - RNA, 19 nt, Artificial Sequence
  Description of Artificial Sequence: Synthetic oligonucleotide
gucucaaugucccaccaag

SEQ ID NO: 2839418 - RNA, 19 nt, Artificial Sequence
  Description of Artificial Sequence: Synthetic oligonucleotide
gacacggcuaggcucaugc

SEQ ID NO: 2839419 - RNA, 19 nt, Artificial Sequence
  Description of Artificial Sequence: Synthetic oligonucleotide
uagauggaacacauguugu

SEQ ID NO: 2839420 - RNA, 19 nt, Artificial Sequence
  Description of Artificial Sequence: Synthetic oligonucleotide
cugugaggcacuuaccagc

SEQ ID NO: 2839421 - RNA, 19 nt, Artificial Sequence
  Description of Artificial Sequence: Synthetic oligonucleotide
ucaugcagucaccagugug

SEQ ID NO: 2839422 - RNA, 19 nt, Artificial Sequence
  Description of Artificial Sequence: Synthetic oligonucleotide
gcagcuuagagucagugcc

SEQ ID NO: 2839423 - RNA, 19 nt, Artificial Sequence
  Description of Artificial Sequence: Synthetic oligonucleotide
guguaagugucccagacga

SEQ ID NO: 2839424 - RNA, 19 nt, Artificial Sequence
  Description of Artificial Sequence: Synthetic oligonucleotide
aacaggagagauaaccugu

SEQ ID NO: 2839425 - RNA, 19 nt, Artificial Sequence
  Description of Artificial Sequence: Synthetic oligonucleotide
agagucagugcccagugca

SEQ ID NO: 2839426 - RNA, 19 nt, Artificial Sequence
  Description of Artificial Sequence: Synthetic oligonucleotide
agugggauggcaugcaccu

SEQ ID NO: 2839427 - RNA, 19 nt, Artificial Sequence
  Description of Artificial Sequence: Synthetic oligonucleotide
caugccacaaaguucccug

SEQ ID NO: 2839428 - RNA, 19 nt, Artificial Sequence
  Description of Artificial Sequence: Synthetic oligonucleotide
ugagcagagaguucccggc

SEQ ID NO: 2839429 - RNA, 19 nt, Artificial Sequence
  Description of Artificial Sequence: Synthetic oligonucleotide
ugugaggcacuuaccagca

SEQ ID NO: 2839430 - RNA, 19 nt, Artificial Sequence
  Description of Artificial Sequence: Synthetic oligonucleotide
cuuaguguccuccgugucc

SEQ ID NO: 2839431 - RNA, 19 nt, Artificial Sequence
  Description of Artificial Sequence: Synthetic oligonucleotide
uaacguugcccucacggga

SEQ ID NO: 2839432 - RNA, 19 nt, Artificial Sequence
  Description of Artificial Sequence: Synthetic oligonucleotide
ccacaugccacaaaguucc

SEQ ID NO: 2839433 - RNA, 19 nt, Artificial Sequence
  Description of Artificial Sequence: Synthetic oligonucleotide
gagagauaaccugugugag

SEQ ID NO: 2839434 - RNA, 19 nt, Artificial Sequence
  Description of Artificial Sequence: Synthetic oligonucleotide
ucgacaauguuguugucau

SEQ ID NO: 2839435 - RNA, 19 nt, Artificial Sequence
  Description of Artificial Sequence: Synthetic oligonucleotide
uuugagacuguagauggaa

SEQ ID NO: 2839436 - RNA, 19 nt, Artificial Sequence
  Description of Artificial Sequence: Synthetic oligonucleotide
ucagcuucccauccuguga

SEQ ID NO: 2839437 - RNA, 19 nt, Artificial Sequence
  Description of Artificial Sequence: Synthetic oligonucleotide
cauccugugaggcacuuac

SEQ ID NO: 2839438 - RNA, 19 nt, Artificial Sequence
  Description of Artificial Sequence: Synthetic oligonucleotide
caacaggagagauaaccug

SEQ ID NO: 2839439 - RNA, 19 nt, Artificial Sequence
  Description of Artificial Sequence: Synthetic oligonucleotide
uguuggugguguaaguguc

SEQ ID NO: 2839440 - RNA, 19 nt, Artificial Sequence
  Description of Artificial Sequence: Synthetic oligonucleotide
ugguguaagugucccagac

SEQ ID NO: 2839441 - RNA, 19 nt, Artificial Sequence
  Description of Artificial Sequence: Synthetic oligonucleotide
uguagauggaacacauguu

SEQ ID NO: 2839442 - RNA, 19 nt, Artificial Sequence
  Description of Artificial Sequence: Synthetic oligonucleotide
aaggcacacgugguguccc

SEQ ID NO: 2839443 - RNA, 19 nt, Artificial Sequence
  Description of Artificial Sequence: Synthetic oligonucleotide
uagaucuuggccagguguc

SEQ ID NO: 2839444 - RNA, 19 nt, Artificial Sequence
  Description of Artificial Sequence: Synthetic oligonucleotide
uuacgagguacagaguugu

SEQ ID NO: 2839445 - RNA, 19 nt, Artificial Sequence
  Description of Artificial Sequence: Synthetic oligonucleotide
ggugcauaggcacagguca

SEQ ID NO: 2839446 - RNA, 19 nt, Artificial Sequence
  Description of Artificial Sequence: Synthetic oligonucleotide
agucuggagacacggcuag

SEQ ID NO: 2839447 - RNA, 19 nt, Artificial Sequence
  Description of Artificial Sequence: Synthetic oligonucleotide
auggaacacauguugucca

SEQ ID NO: 2839448 - RNA, 19 nt, Artificial Sequence
  Description of Artificial Sequence: Synthetic oligonucleotide
uugagacuguagauggaac

SEQ ID NO: 2839449 - RNA, 19 nt, Artificial Sequence
  Description of Artificial Sequence: Synthetic oligonucleotide
ucccagacgaucagcuucc

SEQ ID NO: 2839450 - RNA, 19 nt, Artificial Sequence
  Description of Artificial Sequence: Synthetic oligonucleotide
agacgaucagcuucccauc

SEQ ID NO: 2839451 - RNA, 19 nt, Artificial Sequence
  Description of Artificial Sequence: Synthetic oligonucleotide
acagaguuguagucuggag

SEQ ID NO: 2839452 - RNA, 19 nt, Artificial Sequence
  Description of Artificial Sequence: Synthetic oligonucleotide
uggaacacauguuguccag

SEQ ID NO: 2839453 - RNA, 19 nt, Artificial Sequence
  Description of Artificial Sequence: Synthetic oligonucleotide
ugugagcagagaguucccg

SEQ ID NO: 2839454 - RNA, 19 nt, Artificial Sequence
  Description of Artificial Sequence: Synthetic oligonucleotide
ucuggagacacggcuaggc

SEQ ID NO: 2839455 - RNA, 19 nt, Artificial Sequence
  Description of Artificial Sequence: Synthetic oligonucleotide
uguagucuggagacacggc

SEQ ID NO: 2839456 - RNA, 19 nt, Artificial Sequence
  Description of Artificial Sequence: Synthetic oligonucleotide
gacgaucagcuucccaucc

SEQ ID NO: 2839457 - RNA, 19 nt, Artificial Sequence
  Description of Artificial Sequence: Synthetic oligonucleotide
aucuuggccaggugucccc

SEQ ID NO: 2839458 - RNA, 19 nt, Artificial Sequence
  Description of Artificial Sequence: Synthetic oligonucleotide
gagacuguagauggaacac

SEQ ID NO: 2839459 - RNA, 19 nt, Artificial Sequence
  Description of Artificial Sequence: Synthetic oligonucleotide
gguacagaguuguagucug

SEQ ID NO: 2839460 - RNA, 19 nt, Artificial Sequence
  Description of Artificial Sequence: Synthetic oligonucleotide
gucagugcccagugcaugg

SEQ ID NO: 2839461 - RNA, 19 nt, Artificial Sequence
  Description of Artificial Sequence: Synthetic oligonucleotide
ugccacaaaguucccugag

SEQ ID NO: 2839462 - RNA, 19 nt, Artificial Sequence
  Description of Artificial Sequence: Synthetic oligonucleotide
ggagagauaaccuguguga

SEQ ID NO: 2839463 - RNA, 19 nt, Artificial Sequence
  Description of Artificial Sequence: Synthetic oligonucleotide
acuuaccagcagcuuagag

SEQ ID NO: 2839464 - RNA, 19 nt, Artificial Sequence
  Description of Artificial Sequence: Synthetic oligonucleotide
cagugugucccacaacacc

SEQ ID NO: 2839465 - RNA, 19 nt, Artificial Sequence
  Description of Artificial Sequence: Synthetic oligonucleotide
agaucuuggccaggugucc

SEQ ID NO: 2839466 - RNA, 19 nt, Artificial Sequence
  Description of Artificial Sequence: Synthetic oligonucleotide
gcaugcaccuuguuggugg

SEQ ID NO: 2839467 - RNA, 19 nt, Artificial Sequence
  Description of Artificial Sequence: Synthetic oligonucleotide
acgagguacagaguuguag

SEQ ID NO: 2839468 - RNA, 19 nt, Artificial Sequence
  Description of Artificial Sequence: Synthetic oligonucleotide
cuuaccagcagcuuagagu

SEQ ID NO: 2839469 - RNA, 19 nt, Artificial Sequence
  Description of Artificial Sequence: Synthetic oligonucleotide
ugccccgucucaauguccc

SEQ ID NO: 2839470 - RNA, 19 nt, Artificial Sequence
  Description of Artificial Sequence: Synthetic oligonucleotide
cuguagauggaacacaugu

SEQ ID NO: 2839471 - RNA, 19 nt, Artificial Sequence
  Description of Artificial Sequence: Synthetic oligonucleotide
ggaagcgacaacaggagag

SEQ ID NO: 2839472 - RNA, 19 nt, Artificial Sequence
  Description of Artificial Sequence: Synthetic oligonucleotide
aagugucccagacgaucag

SEQ ID NO: 2839473 - RNA, 19 nt, Artificial Sequence
  Description of Artificial Sequence: Synthetic oligonucleotide
gagcuggucgacaauguug

SEQ ID NO: 2839474 - RNA, 19 nt, Artificial Sequence
  Description of Artificial Sequence: Synthetic oligonucleotide
ggauuugagacuguagaug

SEQ ID NO: 2839475 - RNA, 19 nt, Artificial Sequence
  Description of Artificial Sequence: Synthetic oligonucleotide
gguguaagugucccagacg

SEQ ID NO: 2839476 - RNA, 19 nt, Artificial Sequence
  Description of Artificial Sequence: Synthetic oligonucleotide
ccacaaaguucccugaggg

SEQ ID NO: 2839477 - RNA, 19 nt, Artificial Sequence
  Description of Artificial Sequence: Synthetic oligonucleotide
ugagggugcauaggcacag

SEQ ID NO: 2839478 - RNA, 19 nt, Artificial Sequence
  Description of Artificial Sequence: Synthetic oligonucleotide
cagaguuguagucuggaga

SEQ ID NO: 2839479 - RNA, 19 nt, Artificial Sequence
  Description of Artificial Sequence: Synthetic oligonucleotide
uggagacacggcuaggcuc

SEQ ID NO: 2839480 - RNA, 19 nt, Artificial Sequence
  Description of Artificial Sequence: Synthetic oligonucleotide
cacggcuaggcucaugcag

SEQ ID NO: 2839481 - RNA, 19 nt, Artificial Sequence
  Description of Artificial Sequence: Synthetic oligonucleotide
ucccacaacaccgucuucu

SEQ ID NO: 2839482 - RNA, 19 nt, Artificial Sequence
  Description of Artificial Sequence: Synthetic oligonucleotide
gagguacagaguuguaguc

SEQ ID NO: 2839483 - RNA, 19 nt, Artificial Sequence
  Description of Artificial Sequence: Synthetic oligonucleotide
ugucccacaacaccgucuu

SEQ ID NO: 2839484 - RNA, 19 nt, Artificial Sequence
  Description of Artificial Sequence: Synthetic oligonucleotide
agagaguucccggcugacc

SEQ ID NO: 2839485 - RNA, 19 nt, Artificial Sequence
  Description of Artificial Sequence: Synthetic oligonucleotide
cucacgggauuugagacug

SEQ ID NO: 2839486 - RNA, 19 nt, Artificial Sequence
  Description of Artificial Sequence: Synthetic oligonucleotide
gauaaccugugugagcaga

SEQ ID NO: 2839487 - RNA, 19 nt, Artificial Sequence
  Description of Artificial Sequence: Synthetic oligonucleotide
uacagaguuguagucugga

SEQ ID NO: 2839488 - RNA, 19 nt, Artificial Sequence
  Description of Artificial Sequence: Synthetic oligonucleotide
aucagcuucccauccugug

SEQ ID NO: 2839489 - RNA, 19 nt, Artificial Sequence
  Description of Artificial Sequence: Synthetic oligonucleotide
cagguguccccuuaguguc

SEQ ID NO: 2839490 - RNA, 19 nt, Artificial Sequence
  Description of Artificial Sequence: Synthetic oligonucleotide
guaagugucccagacgauc

SEQ ID NO: 2839491 - RNA, 19 nt, Artificial Sequence
  Description of Artificial Sequence: Synthetic oligonucleotide
ugucccaccaaggcacacg

SEQ ID NO: 2839492 - RNA, 19 nt, Artificial Sequence
  Description of Artificial Sequence: Synthetic oligonucleotide
ucccggcugaccuuaacgu

SEQ ID NO: 2839493 - RNA, 19 nt, Artificial Sequence
  Description of Artificial Sequence: Synthetic oligonucleotide
ucauccaggaagcgacaac

SEQ ID NO: 2839494 - RNA, 19 nt, Artificial Sequence
  Description of Artificial Sequence: Synthetic oligonucleotide
acgugguguccccagagcu

SEQ ID NO: 2839495 - RNA, 19 nt, Artificial Sequence
  Description of Artificial Sequence: Synthetic oligonucleotide
gaggagcgcagugggaugg

SEQ ID NO: 2839496 - RNA, 19 nt, Artificial Sequence
  Description of Artificial Sequence: Synthetic oligonucleotide
accuuaacguugcccucac

SEQ ID NO: 2839497 - RNA, 19 nt, Artificial Sequence
  Description of Artificial Sequence: Synthetic oligonucleotide
cuggucgacaauguuguug

SEQ ID NO: 2839498 - RNA, 19 nt, Artificial Sequence
  Description of Artificial Sequence: Synthetic oligonucleotide
uguuguugucauccaggaa

SEQ ID NO: 2839499 - RNA, 19 nt, Artificial Sequence
  Description of Artificial Sequence: Synthetic oligonucleotide
gucccagacgaucagcuuc

SEQ ID NO: 2839500 - RNA, 19 nt, Artificial Sequence
  Description of Artificial Sequence: Synthetic oligonucleotide
cagcuuagagucagugccc

SEQ ID NO: 2839501 - RNA, 19 nt, Artificial Sequence
  Description of Artificial Sequence: Synthetic oligonucleotide
cccaccaaggcacacgugg

SEQ ID NO: 2839502 - RNA, 19 nt, Artificial Sequence
  Description of Artificial Sequence: Synthetic oligonucleotide
acaacaccgucuucugcug

SEQ ID NO: 2839503 - RNA, 19 nt, Artificial Sequence
  Description of Artificial Sequence: Synthetic oligonucleotide
acacgugguguccccagag

SEQ ID NO: 2839504 - RNA, 19 nt, Artificial Sequence
  Description of Artificial Sequence: Synthetic oligonucleotide
cagugggauggcaugcacc

SEQ ID NO: 2839505 - RNA, 19 nt, Artificial Sequence
  Description of Artificial Sequence: Synthetic oligonucleotide
agguacagaguuguagucu

SEQ ID NO: 2839506 - RNA, 19 nt, Artificial Sequence
  Description of Artificial Sequence: Synthetic oligonucleotide
agcuggucgacaauguugu

SEQ ID NO: 2839507 - RNA, 19 nt, Artificial Sequence
  Description of Artificial Sequence: Synthetic oligonucleotide
uucccauccugugaggcac

SEQ ID NO: 2839508 - RNA, 19 nt, Artificial Sequence
  Description of Artificial Sequence: Synthetic oligonucleotide
uagucuggagacacggcua

SEQ ID NO: 2839509 - RNA, 19 nt, Artificial Sequence
  Description of Artificial Sequence: Synthetic oligonucleotide
guguccccagagcuggucg

SEQ ID NO: 2839510 - RNA, 19 nt, Artificial Sequence
  Description of Artificial Sequence: Synthetic oligonucleotide
auaaccugugugagcagag

SEQ ID NO: 2839511 - RNA, 19 nt, Artificial Sequence
  Description of Artificial Sequence: Synthetic oligonucleotide
agcgcagugggauggcaug

SEQ ID NO: 2839512 - RNA, 19 nt, Artificial Sequence
  Description of Artificial Sequence: Synthetic oligonucleotide
gaagcgacaacaggagaga

SEQ ID NO: 2839513 - RNA, 19 nt, Artificial Sequence
  Description of Artificial Sequence: Synthetic oligonucleotide
cugaccuuaacguugcccu

SEQ ID NO: 2839514 - RNA, 19 nt, Artificial Sequence
  Description of Artificial Sequence: Synthetic oligonucleotide
gagaguucccggcugaccu

SEQ ID NO: 2839515 - RNA, 19 nt, Artificial Sequence
  Description of Artificial Sequence: Synthetic oligonucleotide
accuuguuggugguguaag

SEQ ID NO: 2839516 - RNA, 19 nt, Artificial Sequence
  Description of Artificial Sequence: Synthetic oligonucleotide
cauccaggaagcgacaaca

SEQ ID NO: 2839517 - RNA, 19 nt, Artificial Sequence
  Description of Artificial Sequence: Synthetic oligonucleotide
accgucuucugcugccccg

SEQ ID NO: 2839518 - RNA, 19 nt, Artificial Sequence
  Description of Artificial Sequence: Synthetic oligonucleotide
uaggcucaugcagucacca

SEQ ID NO: 2839519 - RNA, 19 nt, Artificial Sequence
  Description of Artificial Sequence: Synthetic oligonucleotide
uguccccuuaguguccucc

SEQ ID NO: 2839520 - RNA, 19 nt, Artificial Sequence
  Description of Artificial Sequence: Synthetic oligonucleotide
guuguagucuggagacacg

SEQ ID NO: 2839521 - RNA, 19 nt, Artificial Sequence
  Description of Artificial Sequence: Synthetic oligonucleotide
agauaaccugugugagcag

SEQ ID NO: 2839522 - RNA, 19 nt, Artificial Sequence
  Description of Artificial Sequence: Synthetic oligonucleotide
aggaagcgacaacaggaga

SEQ ID NO: 2839523 - RNA, 19 nt, Artificial Sequence
  Description of Artificial Sequence: Synthetic oligonucleotide
guagucuggagacacggcu

SEQ ID NO: 2839524 - RNA, 19 nt, Artificial Sequence
  Description of Artificial Sequence: Synthetic oligonucleotide
agacuguagauggaacaca

SEQ ID NO: 2839525 - RNA, 19 nt, Artificial Sequence
  Description of Artificial Sequence: Synthetic oligonucleotide
cuaggcucaugcagucacc

SEQ ID NO: 2839526 - RNA, 19 nt, Artificial Sequence
  Description of Artificial Sequence: Synthetic oligonucleotide
gccacaaaguucccugagg

SEQ ID NO: 2839527 - RNA, 19 nt, Artificial Sequence
  Description of Artificial Sequence: Synthetic oligonucleotide
gucgacaauguuguuguca

SEQ ID NO: 2839528 - RNA, 19 nt, Artificial Sequence
  Description of Artificial Sequence: Synthetic oligonucleotide
uguaagugucccagacgau

SEQ ID NO: 2839529 - RNA, 19 nt, Artificial Sequence
  Description of Artificial Sequence: Synthetic oligonucleotide
gaucuuggccagguguccc

SEQ ID NO: 2839530 - RNA, 19 nt, Artificial Sequence
  Description of Artificial Sequence: Synthetic oligonucleotide
caugcagucaccagugugu

SEQ ID NO: 2839531 - RNA, 19 nt, Artificial Sequence
  Description of Artificial Sequence: Synthetic oligonucleotide
ugugucccacaacaccguc

SEQ ID NO: 2839532 - RNA, 19 nt, Artificial Sequence
  Description of Artificial Sequence: Synthetic oligonucleotide
ugcccagugcauggcauag

SEQ ID NO: 2839533 - RNA, 19 nt, Artificial Sequence
  Description of Artificial Sequence: Synthetic oligonucleotide
ccaggaagcgacaacagga

SEQ ID NO: 2839534 - RNA, 19 nt, Artificial Sequence
  Description of Artificial Sequence: Synthetic oligonucleotide
augcagucaccaguguguc

SEQ ID NO: 2839535 - RNA, 19 nt, Artificial Sequence
  Description of Artificial Sequence: Synthetic oligonucleotide
guccccuuaguguccuccg

SEQ ID NO: 2839536 - RNA, 19 nt, Artificial Sequence
  Description of Artificial Sequence: Synthetic oligonucleotide
ugcccucacgggauuugag

SEQ ID NO: 2839537 - RNA, 19 nt, Artificial Sequence
  Description of Artificial Sequence: Synthetic oligonucleotide
aggcacacguggugucccc

SEQ ID NO: 2839538 - RNA, 19 nt, Artificial Sequence
  Description of Artificial Sequence: Synthetic oligonucleotide
cacaacaccgucuucugcu

SEQ ID NO: 2839539 - RNA, 19 nt, Artificial Sequence
  Description of Artificial Sequence: Synthetic oligonucleotide
cauagaucuuggccaggug

SEQ ID NO: 2839540 - RNA, 19 nt, Artificial Sequence
  Description of Artificial Sequence: Synthetic oligonucleotide
gcgacaacaggagagauaa

SEQ ID NO: 2839541 - RNA, 19 nt, Artificial Sequence
  Description of Artificial Sequence: Synthetic oligonucleotide
aacguugcccucacgggau

SEQ ID NO: 2839542 - RNA, 19 nt, Artificial Sequence
  Description of Artificial Sequence: Synthetic oligonucleotide
gcuaggcucaugcagucac

SEQ ID NO: 2839543 - RNA, 19 nt, Artificial Sequence
  Description of Artificial Sequence: Synthetic oligonucleotide
guacagaguuguagucugg

SEQ ID NO: 2839544 - RNA, 19 nt, Artificial Sequence
  Description of Artificial Sequence: Synthetic oligonucleotide
uaaccugugugagcagaga

SEQ ID NO: 2839545 - RNA, 19 nt, Artificial Sequence
  Description of Artificial Sequence: Synthetic oligonucleotide
ugcugccccgucucaaugu

SEQ ID NO: 2839546 - RNA, 19 nt, Artificial Sequence
  Description of Artificial Sequence: Synthetic oligonucleotide
ugaccuuaacguugcccuc

SEQ ID NO: 2839547 - RNA, 19 nt, Artificial Sequence
  Description of Artificial Sequence: Synthetic oligonucleotide
gaccuuaacguugcccuca

SEQ ID NO: 2839548 - RNA, 19 nt, Artificial Sequence
  Description of Artificial Sequence: Synthetic oligonucleotide
uguccccagagcuggucga

SEQ ID NO: 2839549 - RNA, 19 nt, Artificial Sequence
  Description of Artificial Sequence: Synthetic oligonucleotide
augccacaaaguucccuga

SEQ ID NO: 2839550 - RNA, 19 nt, Artificial Sequence
  Description of Artificial Sequence: Synthetic oligonucleotide
ccugagggugcauaggcac

SEQ ID NO: 2839551 - RNA, 19 nt, Artificial Sequence
  Description of Artificial Sequence: Synthetic oligonucleotide
acaccgucuucugcugccc

SEQ ID NO: 2839552 - RNA, 19 nt, Artificial Sequence
  Description of Artificial Sequence: Synthetic oligonucleotide
agcuuagagucagugccca

SEQ ID NO: 2839553 - RNA, 19 nt, Artificial Sequence
  Description of Artificial Sequence: Synthetic oligonucleotide
acgaucagcuucccauccu

SEQ ID NO: 2839554 - RNA, 19 nt, Artificial Sequence
  Description of Artificial Sequence: Synthetic oligonucleotide
agucagugcccagugcaug

SEQ ID NO: 2839555 - RNA, 19 nt, Artificial Sequence
  Description of Artificial Sequence: Synthetic oligonucleotide
cagacgaucagcuucccau

SEQ ID NO: 2839556 - RNA, 19 nt, Artificial Sequence
  Description of Artificial Sequence: Synthetic oligonucleotide
gcacuuaccagcagcuuag

SEQ ID NO: 2839557 - RNA, 19 nt, Artificial Sequence
  Description of Artificial Sequence: Synthetic oligonucleotide
caacaccgucuucugcugc

SEQ ID NO: 2839558 - RNA, 19 nt, Artificial Sequence
  Description of Artificial Sequence: Synthetic oligonucleotide
cacgugguguccccagagc

SEQ ID NO: 2839559 - RNA, 19 nt, Artificial Sequence
  Description of Artificial Sequence: Synthetic oligonucleotide
uggccagguguccccuuag

SEQ ID NO: 2839560 - RNA, 19 nt, Artificial Sequence
  Description of Artificial Sequence: Synthetic oligonucleotide
aggcucaugcagucaccag

SEQ ID NO: 2839561 - RNA, 19 nt, Artificial Sequence
  Description of Artificial Sequence: Synthetic oligonucleotide
aagcgacaacaggagagau

SEQ ID NO: 2839562 - RNA, 19 nt, Artificial Sequence
  Description of Artificial Sequence: Synthetic oligonucleotide
caaggcacacguggugucc

SEQ ID NO: 2839563 - RNA, 19 nt, Artificial Sequence
  Description of Artificial Sequence: Synthetic oligonucleotide
aggaggagcgcagugggau

SEQ ID NO: 2839564 - RNA, 19 nt, Artificial Sequence
  Description of Artificial Sequence: Synthetic oligonucleotide
aaugucccaccaaggcaca

SEQ ID NO: 2839565 - RNA, 19 nt, Artificial Sequence
  Description of Artificial Sequence: Synthetic oligonucleotide
uggcaugcaccuuguuggu

SEQ ID NO: 2839566 - RNA, 19 nt, Artificial Sequence
  Description of Artificial Sequence: Synthetic oligonucleotide
acuguagauggaacacaug

SEQ ID NO: 2839567 - RNA, 19 nt, Artificial Sequence
  Description of Artificial Sequence: Synthetic oligonucleotide
acggcuaggcucaugcagu

SEQ ID NO: 2839568 - RNA, 19 nt, Artificial Sequence
  Description of Artificial Sequence: Synthetic oligonucleotide
auccaggaagcgacaacag

SEQ ID NO: 2839569 - RNA, 19 nt, Artificial Sequence
  Description of Artificial Sequence: Synthetic oligonucleotide
acgggauuugagacuguag

SEQ ID NO: 2839570 - RNA, 19 nt, Artificial Sequence
  Description of Artificial Sequence: Synthetic oligonucleotide
ucugcugccccgucucaau

SEQ ID NO: 2839571 - RNA, 19 nt, Artificial Sequence
  Description of Artificial Sequence: Synthetic oligonucleotide
agguguccccuuagugucc

SEQ ID NO: 2839572 - RNA, 19 nt, Artificial Sequence
  Description of Artificial Sequence: Synthetic oligonucleotide
uccccuuaguguccuccgu

SEQ ID NO: 2839573 - RNA, 19 nt, Artificial Sequence
  Description of Artificial Sequence: Synthetic oligonucleotide
caccaaggcacacguggug

SEQ ID NO: 2839574 - RNA, 19 nt, Artificial Sequence
  Description of Artificial Sequence: Synthetic oligonucleotide
ccugugaggcacuuaccag

SEQ ID NO: 2839575 - RNA, 19 nt, Artificial Sequence
  Description of Artificial Sequence: Synthetic oligonucleotide
auuugagacuguagaugga

SEQ ID NO: 2839576 - RNA, 19 nt, Artificial Sequence
  Description of Artificial Sequence: Synthetic oligonucleotide
cccacaugccacaaaguuc

SEQ ID NO: 2839577 - RNA, 19 nt, Artificial Sequence
  Description of Artificial Sequence: Synthetic oligonucleotide
accugugugagcagagagu

SEQ ID NO: 2839578 - RNA, 19 nt, Artificial Sequence
  Description of Artificial Sequence: Synthetic oligonucleotide
acaugccacaaaguucccu

SEQ ID NO: 2839579 - RNA, 19 nt, Artificial Sequence
  Description of Artificial Sequence: Synthetic oligonucleotide
uaccagcagcuuagaguca

SEQ ID NO: 2839580 - RNA, 19 nt, Artificial Sequence
  Description of Artificial Sequence: Synthetic oligonucleotide
gacuguagauggaacacau

SEQ ID NO: 2839581 - RNA, 19 nt, Artificial Sequence
  Description of Artificial Sequence: Synthetic oligonucleotide
uggugguguaaguguccca

SEQ ID NO: 2839582 - RNA, 19 nt, Artificial Sequence
  Description of Artificial Sequence: Synthetic oligonucleotide
cccucacgggauuugagac

SEQ ID NO: 2839583 - RNA, 19 nt, Artificial Sequence
  Description of Artificial Sequence: Synthetic oligonucleotide
cagcagcuuagagucagug

SEQ ID NO: 2839584 - RNA, 19 nt, Artificial Sequence
  Description of Artificial Sequence: Synthetic oligonucleotide
agucaccagugugucccac

SEQ ID NO: 2839585 - RNA, 19 nt, Artificial Sequence
  Description of Artificial Sequence: Synthetic oligonucleotide
gcucaugcagucaccagug

SEQ ID NO: 2839586 - RNA, 19 nt, Artificial Sequence
  Description of Artificial Sequence: Synthetic oligonucleotide
ccggcugaccuuaacguug

SEQ ID NO: 2839587 - RNA, 19 nt, Artificial Sequence
  Description of Artificial Sequence: Synthetic oligonucleotide
ggagacacggcuaggcuca

SEQ ID NO: 2839588 - RNA, 19 nt, Artificial Sequence
  Description of Artificial Sequence: Synthetic oligonucleotide
uuggccagguguccccuua

SEQ ID NO: 2839589 - RNA, 19 nt, Artificial Sequence
  Description of Artificial Sequence: Synthetic oligonucleotide
cacaugccacaaaguuccc

SEQ ID NO: 2839590 - RNA, 19 nt, Artificial Sequence
  Description of Artificial Sequence: Synthetic oligonucleotide
cugagggugcauaggcaca

SEQ ID NO: 2839591 - RNA, 19 nt, Artificial Sequence
  Description of Artificial Sequence: Synthetic oligonucleotide
ggcacuuaccagcagcuua

SEQ ID NO: 2839592 - RNA, 19 nt, Artificial Sequence
  Description of Artificial Sequence: Synthetic oligonucleotide
cugccccgucucaaugucc

SEQ ID NO: 2839593 - RNA, 19 nt, Artificial Sequence
  Description of Artificial Sequence: Synthetic oligonucleotide
uacgagguacagaguugua

SEQ ID NO: 2839594 - RNA, 19 nt, Artificial Sequence
  Description of Artificial Sequence: Synthetic oligonucleotide
gagggugcauaggcacagg

SEQ ID NO: 2839595 - RNA, 19 nt, Artificial Sequence
  Description of Artificial Sequence: Synthetic oligonucleotide
ggaacacauguuguccagc

SEQ ID NO: 2839596 - RNA, 19 nt, Artificial Sequence
  Description of Artificial Sequence: Synthetic oligonucleotide
cugugugagcagagaguuc

SEQ ID NO: 2839597 - RNA, 19 nt, Artificial Sequence
  Description of Artificial Sequence: Synthetic oligonucleotide
acccaggaggagcgcagug

SEQ ID NO: 2839598 - RNA, 19 nt, Artificial Sequence
  Description of Artificial Sequence: Synthetic oligonucleotide
gccagguguccccuuagug

SEQ ID NO: 2839599 - RNA, 19 nt, Artificial Sequence
  Description of Artificial Sequence: Synthetic oligonucleotide
aggagcgcagugggauggc

SEQ ID NO: 2839600 - RNA, 19 nt, Artificial Sequence
  Description of Artificial Sequence: Synthetic oligonucleotide
gucaccagugugucccaca

SEQ ID NO: 2839601 - RNA, 19 nt, Artificial Sequence
  Description of Artificial Sequence: Synthetic oligonucleotide
cuuagagucagugcccagu

SEQ ID NO: 2839602 - RNA, 19 nt, Artificial Sequence
  Description of Artificial Sequence: Synthetic oligonucleotide
ucuuggccagguguccccu

SEQ ID NO: 2839603 - RNA, 19 nt, Artificial Sequence
  Description of Artificial Sequence: Synthetic oligonucleotide
ucccaccaaggcacacgug

SEQ ID NO: 2839604 - RNA, 19 nt, Artificial Sequence
  Description of Artificial Sequence: Synthetic oligonucleotide
augucccaccaaggcacac

SEQ ID NO: 2839605 - RNA, 19 nt, Artificial Sequence
  Description of Artificial Sequence: Synthetic oligonucleotide
uugcccucacgggauuuga

SEQ ID NO: 2839606 - RNA, 19 nt, Artificial Sequence
  Description of Artificial Sequence: Synthetic oligonucleotide
guugcccucacgggauuug

SEQ ID NO: 2839607 - RNA, 19 nt, Artificial Sequence
  Description of Artificial Sequence: Synthetic oligonucleotide
gugaggcacuuaccagcag

SEQ ID NO: 2839608 - RNA, 19 nt, Artificial Sequence
  Description of Artificial Sequence: Synthetic oligonucleotide
acacggcuaggcucaugca

SEQ ID NO: 2839609 - RNA, 19 nt, Artificial Sequence
  Description of Artificial Sequence: Synthetic oligonucleotide
gaggcacuuaccagcagcu

SEQ ID NO: 2839610 - RNA, 19 nt, Artificial Sequence
  Description of Artificial Sequence: Synthetic oligonucleotide
gaguuguagucuggagaca

SEQ ID NO: 2839611 - RNA, 19 nt, Artificial Sequence
  Description of Artificial Sequence: Synthetic oligonucleotide
gugguguaagugucccaga

SEQ ID NO: 2839612 - RNA, 19 nt, Artificial Sequence
  Description of Artificial Sequence: Synthetic oligonucleotide
aguguccuccguguccgca

SEQ ID NO: 2839613 - RNA, 19 nt, Artificial Sequence
  Description of Artificial Sequence: Synthetic oligonucleotide
cugcugccccgucucaaug

SEQ ID NO: 2839614 - RNA, 19 nt, Artificial Sequence
  Description of Artificial Sequence: Synthetic oligonucleotide
cgggauuugagacuguaga

SEQ ID NO: 2839615 - RNA, 19 nt, Artificial Sequence
  Description of Artificial Sequence: Synthetic oligonucleotide
ccagagcuggucgacaaug

SEQ ID NO: 2839616 - RNA, 19 nt, Artificial Sequence
  Description of Artificial Sequence: Synthetic oligonucleotide
ucacgggauuugagacugu

SEQ ID NO: 2839617 - RNA, 19 nt, Artificial Sequence
  Description of Artificial Sequence: Synthetic oligonucleotide
agaguucccggcugaccuu

SEQ ID NO: 2839618 - RNA, 19 nt, Artificial Sequence
  Description of Artificial Sequence: Synthetic oligonucleotide
gagcagagaguucccggcu

SEQ ID NO: 2839619 - RNA, 19 nt, Artificial Sequence
  Description of Artificial Sequence: Synthetic oligonucleotide
ggcucaugcagucaccagu

SEQ ID NO: 2839620 - RNA, 19 nt, Artificial Sequence
  Description of Artificial Sequence: Synthetic oligonucleotide
uucugcugccccgucucaa

SEQ ID NO: 2839621 - RNA, 19 nt, Artificial Sequence
  Description of Artificial Sequence: Synthetic oligonucleotide
ggaggagcgcagugggaug

SEQ ID NO: 2839622 - RNA, 19 nt, Artificial Sequence
  Description of Artificial Sequence: Synthetic oligonucleotide
gucuggagacacggcuagg

SEQ ID NO: 2839623 - RNA, 19 nt, Artificial Sequence
  Description of Artificial Sequence: Synthetic oligonucleotide
agugcccagugcauggcau

SEQ ID NO: 2839624 - RNA, 19 nt, Artificial Sequence
  Description of Artificial Sequence: Synthetic oligonucleotide
cccgucucaaugucccacc

SEQ ID NO: 2839625 - RNA, 19 nt, Artificial Sequence
  Description of Artificial Sequence: Synthetic oligonucleotide
uccccagagcuggucgaca

SEQ ID NO: 2839626 - RNA, 19 nt, Artificial Sequence
  Description of Artificial Sequence: Synthetic oligonucleotide
agcgacaacaggagagaua

SEQ ID NO: 2839627 - RNA, 19 nt, Artificial Sequence
  Description of Artificial Sequence: Synthetic oligonucleotide
gucccaccaaggcacacgu

SEQ ID NO: 2839628 - RNA, 19 nt, Artificial Sequence
  Description of Artificial Sequence: Synthetic oligonucleotide
gcuuagagucagugcccag

SEQ ID NO: 2839629 - RNA, 19 nt, Artificial Sequence
  Description of Artificial Sequence: Synthetic oligonucleotide
uaguguccuccguguccgc

SEQ ID NO: 2839630 - RNA, 19 nt, Artificial Sequence
  Description of Artificial Sequence: Synthetic oligonucleotide
gucauccaggaagcgacaa

SEQ ID NO: 2839631 - RNA, 19 nt, Artificial Sequence
  Description of Artificial Sequence: Synthetic oligonucleotide
caccagugugucccacaac

SEQ ID NO: 2839632 - RNA, 19 nt, Artificial Sequence
  Description of Artificial Sequence: Synthetic oligonucleotide
gcacacgugguguccccag

SEQ ID NO: 2839633 - RNA, 19 nt, Artificial Sequence
  Description of Artificial Sequence: Synthetic oligonucleotide
gcccucacgggauuugaga

SEQ ID NO: 2839634 - RNA, 19 nt, Artificial Sequence
  Description of Artificial Sequence: Synthetic oligonucleotide
guucccggcugaccuuaac

SEQ ID NO: 2839635 - RNA, 19 nt, Artificial Sequence
  Description of Artificial Sequence: Synthetic oligonucleotide
cccacaacaccgucuucug

SEQ ID NO: 2839636 - RNA, 19 nt, Artificial Sequence
  Description of Artificial Sequence: Synthetic oligonucleotide
cagagaguucccggcugac

SEQ ID NO: 2839637 - RNA, 19 nt, Artificial Sequence
  Description of Artificial Sequence: Synthetic oligonucleotide
gcauaggcacaggucauga

SEQ ID NO: 2839638 - RNA, 19 nt, Artificial Sequence
  Description of Artificial Sequence: Synthetic oligonucleotide
gcagugggauggcaugcac

SEQ ID NO: 2839639 - RNA, 19 nt, Artificial Sequence
  Description of Artificial Sequence: Synthetic oligonucleotide
gaguucccggcugaccuua

SEQ ID NO: 2839640 - RNA, 19 nt, Artificial Sequence
  Description of Artificial Sequence: Synthetic oligonucleotide
ccuccguguccgcaucugg

SEQ ID NO: 2839641 - RNA, 19 nt, Artificial Sequence
  Description of Artificial Sequence: Synthetic oligonucleotide
cgaucagcuucccauccug

SEQ ID NO: 2839642 - RNA, 19 nt, Artificial Sequence
  Description of Artificial Sequence: Synthetic oligonucleotide
ugguguccccagagcuggu

SEQ ID NO: 2839643 - RNA, 19 nt, Artificial Sequence
  Description of Artificial Sequence: Synthetic oligonucleotide
ccccuuaguguccuccgug

SEQ ID NO: 2839644 - RNA, 19 nt, Artificial Sequence
  Description of Artificial Sequence: Synthetic oligonucleotide
cagagcuggucgacaaugu

SEQ ID NO: 2839645 - RNA, 19 nt, Artificial Sequence
  Description of Artificial Sequence: Synthetic oligonucleotide
ccagguguccccuuagugu

SEQ ID NO: 2839646 - RNA, 19 nt, Artificial Sequence
  Description of Artificial Sequence: Synthetic oligonucleotide
cuggagacacggcuaggcu

SEQ ID NO: 2839647 - RNA, 19 nt, Artificial Sequence
  Description of Artificial Sequence: Synthetic oligonucleotide
ccaaggcacacgugguguc

SEQ ID NO: 2839648 - RNA, 19 nt, Artificial Sequence
  Description of Artificial Sequence: Synthetic oligonucleotide
ccuuaguguccuccguguc

SEQ ID NO: 2839649 - RNA, 19 nt, Artificial Sequence
  Description of Artificial Sequence: Synthetic oligonucleotide
augcaccuuguugguggug

SEQ ID NO: 2839650 - RNA, 19 nt, Artificial Sequence
  Description of Artificial Sequence: Synthetic oligonucleotide
caggagagauaaccugugu

SEQ ID NO: 2839651 - RNA, 19 nt, Artificial Sequence
  Description of Artificial Sequence: Synthetic oligonucleotide
gcugccccgucucaauguc

SEQ ID NO: 2839652 - RNA, 19 nt, Artificial Sequence
  Description of Artificial Sequence: Synthetic oligonucleotide
cacacgugguguccccaga

SEQ ID NO: 2839653 - RNA, 19 nt, Artificial Sequence
  Description of Artificial Sequence: Synthetic oligonucleotide
caggaggagcgcaguggga

SEQ ID NO: 2839654 - RNA, 19 nt, Artificial Sequence
  Description of Artificial Sequence: Synthetic oligonucleotide
ccuuaacguugcccucacg

SEQ ID NO: 2839655 - RNA, 19 nt, Artificial Sequence
  Description of Artificial Sequence: Synthetic oligonucleotide
cggcugaccuuaacguugc

SEQ ID NO: 2839656 - RNA, 19 nt, Artificial Sequence
  Description of Artificial Sequence: Synthetic oligonucleotide
gucuucugcugccccgucu

SEQ ID NO: 2839657 - RNA, 19 nt, Artificial Sequence
  Description of Artificial Sequence: Synthetic oligonucleotide
gugcccagugcauggcaua

SEQ ID NO: 2839658 - RNA, 19 nt, Artificial Sequence
  Description of Artificial Sequence: Synthetic oligonucleotide
cacgggauuugagacugua

SEQ ID NO: 2839659 - RNA, 19 nt, Artificial Sequence
  Description of Artificial Sequence: Synthetic oligonucleotide
cgagguacagaguuguagu

SEQ ID NO: 2839660 - RNA, 19 nt, Artificial Sequence
  Description of Artificial Sequence: Synthetic oligonucleotide
guccccagagcuggucgac

SEQ ID NO: 2839661 - RNA, 19 nt, Artificial Sequence
  Description of Artificial Sequence: Synthetic oligonucleotide
agacacggcuaggcucaug

SEQ ID NO: 2839662 - RNA, 19 nt, Artificial Sequence
  Description of Artificial Sequence: Synthetic oligonucleotide
caugcaccuuguugguggu

SEQ ID NO: 2839663 - RNA, 19 nt, Artificial Sequence
  Description of Artificial Sequence: Synthetic oligonucleotide
gagucagugcccagugcau

SEQ ID NO: 2839664 - RNA, 19 nt, Artificial Sequence
  Description of Artificial Sequence: Synthetic oligonucleotide
acguugcccucacgggauu

SEQ ID NO: 2839665 - RNA, 19 nt, Artificial Sequence
  Description of Artificial Sequence: Synthetic oligonucleotide
gugucccacaacaccgucu

SEQ ID NO: 2839666 - RNA, 19 nt, Artificial Sequence
  Description of Artificial Sequence: Synthetic oligonucleotide
gcauagaucuuggccaggu

SEQ ID NO: 2839667 - RNA, 19 nt, Artificial Sequence
  Description of Artificial Sequence: Synthetic oligonucleotide
cagucaccaguguguccca

SEQ ID NO: 2839668 - RNA, 19 nt, Artificial Sequence
  Description of Artificial Sequence: Synthetic oligonucleotide
gcgcagugggauggcaugc

SEQ ID NO: 2839669 - RNA, 19 nt, Artificial Sequence
  Description of Artificial Sequence: Synthetic oligonucleotide
ggucgacaauguuguuguc

SEQ ID NO: 2839670 - RNA, 19 nt, Artificial Sequence
  Description of Artificial Sequence: Synthetic oligonucleotide
gucccacaacaccgucuuc

SEQ ID NO: 2839671 - RNA, 19 nt, Artificial Sequence
  Description of Artificial Sequence: Synthetic oligonucleotide
aggcacuuaccagcagcuu

SEQ ID NO: 2839672 - RNA, 19 nt, Artificial Sequence
  Description of Artificial Sequence: Synthetic oligonucleotide
aaguucccugagggugcau

SEQ ID NO: 2839673 - RNA, 19 nt, Artificial Sequence
  Description of Artificial Sequence: Synthetic oligonucleotide
cacuuaccagcagcuuaga

SEQ ID NO: 2839674 - RNA, 19 nt, Artificial Sequence
  Description of Artificial Sequence: Synthetic oligonucleotide
cucaugcagucaccagugu

SEQ ID NO: 2839675 - RNA, 19 nt, Artificial Sequence
  Description of Artificial Sequence: Synthetic oligonucleotide
ggcugaccuuaacguugcc

SEQ ID NO: 2839676 - RNA, 19 nt, Artificial Sequence
  Description of Artificial Sequence: Synthetic oligonucleotide
gguguccccagagcugguc

SEQ ID NO: 2839677 - RNA, 19 nt, Artificial Sequence
  Description of Artificial Sequence: Synthetic oligonucleotide
gugugucccacaacaccgu

SEQ ID NO: 2839678 - RNA, 19 nt, Artificial Sequence
  Description of Artificial Sequence: Synthetic oligonucleotide
ccccgucucaaugucccac

SEQ ID NO: 2839679 - RNA, 19 nt, Artificial Sequence
  Description of Artificial Sequence: Synthetic oligonucleotide
gagcgcagugggauggcau

SEQ ID NO: 2839680 - RNA, 19 nt, Artificial Sequence
  Description of Artificial Sequence: Synthetic oligonucleotide
ccugugugagcagagaguu

SEQ ID NO: 2839681 - RNA, 19 nt, Artificial Sequence
  Description of Artificial Sequence: Synthetic oligonucleotide
gugcauaggcacaggucau

SEQ ID NO: 2839682 - RNA, 19 nt, Artificial Sequence
  Description of Artificial Sequence: Synthetic oligonucleotide
ggcuaggcucaugcaguca

SEQ ID NO: 2839683 - RNA, 19 nt, Artificial Sequence
  Description of Artificial Sequence: Synthetic oligonucleotide
cgacaauguuguugucauc

SEQ ID NO: 2839684 - RNA, 19 nt, Artificial Sequence
  Description of Artificial Sequence: Synthetic oligonucleotide
ccccacaugccacaaaguu

SEQ ID NO: 2839685 - RNA, 19 nt, Artificial Sequence
  Description of Artificial Sequence: Synthetic oligonucleotide
cccuuaguguccuccgugu

SEQ ID NO: 2839686 - RNA, 19 nt, Artificial Sequence
  Description of Artificial Sequence: Synthetic oligonucleotide
ccuuguuggugguguaagu

SEQ ID NO: 2839687 - RNA, 19 nt, Artificial Sequence
  Description of Artificial Sequence: Synthetic oligonucleotide
ccucacgggauuugagacu

SEQ ID NO: 2839688 - RNA, 19 nt, Artificial Sequence
  Description of Artificial Sequence: Synthetic oligonucleotide
ccgucucaaugucccacca

SEQ ID NO: 2839689 - RNA, 19 nt, Artificial Sequence
  Description of Artificial Sequence: Synthetic oligonucleotide
aguucccggcugaccuuaa

SEQ ID NO: 2839690 - RNA, 19 nt, Artificial Sequence
  Description of Artificial Sequence: Synthetic oligonucleotide
ggcacacguggugucccca

SEQ ID NO: 2839691 - RNA, 19 nt, Artificial Sequence
  Description of Artificial Sequence: Synthetic oligonucleotide
guguccccuuaguguccuc

SEQ ID NO: 2839692 - RNA, 19 nt, Artificial Sequence
  Description of Artificial Sequence: Synthetic oligonucleotide
gguguccccuuaguguccu

SEQ ID NO: 2839693 - RNA, 19 nt, Artificial Sequence
  Description of Artificial Sequence: Synthetic oligonucleotide
cgacaacaggagagauaac

SEQ ID NO: 2839694 - RNA, 19 nt, Artificial Sequence
  Description of Artificial Sequence: Synthetic oligonucleotide
ccccagagcuggucgacaa

SEQ ID NO: 2839695 - RNA, 19 nt, Artificial Sequence
  Description of Artificial Sequence: Synthetic oligonucleotide
ccaccaaggcacacguggu

SEQ ID NO: 2839696 - RNA, 19 nt, Artificial Sequence
  Description of Artificial Sequence: Synthetic oligonucleotide
ggccagguguccccuuagu

SEQ ID NO: 2839697 - RNA, 19 nt, Artificial Sequence
  Description of Artificial Sequence: Synthetic oligonucleotide
cccagacgaucagcuuccc

SEQ ID NO: 2839698 - RNA, 19 nt, Artificial Sequence
  Description of Artificial Sequence: Synthetic oligonucleotide
gccccgucucaauguccca

SEQ ID NO: 2839699 - RNA, 19 nt, Artificial Sequence
  Description of Artificial Sequence: Synthetic oligonucleotide
cgucucaaugucccaccaa

SEQ ID NO: 2839700 - RNA, 19 nt, Artificial Sequence
  Description of Artificial Sequence: Synthetic oligonucleotide
cuuggccagguguccccuu

SEQ ID NO: 2839701 - RNA, 19 nt, Artificial Sequence
  Description of Artificial Sequence: Synthetic oligonucleotide
gagacacggcuaggcucau

SEQ ID NO: 2839702 - RNA, 19 nt, Artificial Sequence
  Description of Artificial Sequence: Synthetic oligonucleotide
gugggauggcaugcaccuu

SEQ ID NO: 2839703 - RNA, 19 nt, Artificial Sequence
  Description of Artificial Sequence: Synthetic oligonucleotide
cgucuucugcugccccguc

SEQ ID NO: 2839704 - RNA, 19 nt, Artificial Sequence
  Description of Artificial Sequence: Synthetic oligonucleotide
cccggcugaccuuaacguu

SEQ ID NO: 2839705 - RNA, 19 nt, Artificial Sequence
  Description of Artificial Sequence: Synthetic oligonucleotide
cgcagugggauggcaugca

SEQ ID NO: 2839706 - RNA, 19 nt, Artificial Sequence
  Description of Artificial Sequence: Synthetic oligonucleotide
gcuggucgacaauguuguu

SEQ ID NO: 2839707 - RNA, 19 nt, Artificial Sequence
  Description of Artificial Sequence: Synthetic oligonucleotide
ccauccugugaggcacuua

SEQ ID NO: 2839708 - RNA, 19 nt, Artificial Sequence
  Description of Artificial Sequence: Synthetic oligonucleotide
cccagagcuggucgacaau

SEQ ID NO: 2839709 - RNA, 19 nt, Artificial Sequence
  Description of Artificial Sequence: Synthetic oligonucleotide
ccgucuucugcugccccgu

SEQ ID NO: 2839710 - RNA, 19 nt, Artificial Sequence
  Description of Artificial Sequence: Synthetic oligonucleotide
cccauccugugaggcacuu

SEQ ID NO: 2839711 - RNA, 19 nt, Artificial Sequence
  Description of Artificial Sequence: Synthetic oligonucleotide
cguugcccucacgggauuu

SEQ ID NO: 2839712 - RNA, 19 nt, Artificial Sequence
  Description of Artificial Sequence: Synthetic oligonucleotide
uuuucaaucagcaucuuca

SEQ ID NO: 2839713 - RNA, 19 nt, Artificial Sequence
  Description of Artificial Sequence: Synthetic oligonucleotide
aauguuugaguucuucaac

SEQ ID NO: 2839714 - RNA, 19 nt, Artificial Sequence
  Description of Artificial Sequence: Synthetic oligonucleotide
uugaguagaauuaucauac

SEQ ID NO: 2839715 - RNA, 19 nt, Artificial Sequence
  Description of Artificial Sequence: Synthetic oligonucleotide
uuuucauuagcccacuugc

SEQ ID NO: 2839716 - RNA, 19 nt, Artificial Sequence
  Description of Artificial Sequence: Synthetic oligonucleotide
  modified_base (18)..(18): a, c, u, g, unknown or other
uaugauaacuaacaaaana

SEQ ID NO: 2839717 - RNA, 19 nt, Artificial Sequence
  Description of Artificial Sequence: Synthetic oligonucleotide
uguaaauucugccucaaug

SEQ ID NO: 2839718 - RNA, 19 nt, Artificial Sequence
  Description of Artificial Sequence: Synthetic oligonucleotide
uugucuaacaccuuggaug

SEQ ID NO: 2839719 - RNA, 19 nt, Artificial Sequence
  Description of Artificial Sequence: Synthetic oligonucleotide
uggucgauaaauaagggug

SEQ ID NO: 2839720 - RNA, 19 nt, Artificial Sequence
  Description of Artificial Sequence: Synthetic oligonucleotide
agaauuaucauacucagua

SEQ ID NO: 2839721 - RNA, 19 nt, Artificial Sequence
  Description of Artificial Sequence: Synthetic oligonucleotide
accuauuucguguaaauuc

SEQ ID NO: 2839722 - RNA, 19 nt, Artificial Sequence
  Description of Artificial Sequence: Synthetic oligonucleotide
aaugaaauguuugaguucu

SEQ ID NO: 2839723 - RNA, 19 nt, Artificial Sequence
  Description of Artificial Sequence: Synthetic oligonucleotide
aaacucggaaaucucaguc

SEQ ID NO: 2839724 - RNA, 19 nt, Artificial Sequence
  Description of Artificial Sequence: Synthetic oligonucleotide
cuucauacaauucugugcc

SEQ ID NO: 2839725 - RNA, 19 nt, Artificial Sequence
  Description of Artificial Sequence: Synthetic oligonucleotide
  modified_base (16)..(16): a, c, u, g, unknown or other
ugauaacuaacaaaanaaa

SEQ ID NO: 2839726 - RNA, 19 nt, Artificial Sequence
  Description of Artificial Sequence: Synthetic oligonucleotide
auaagggugccauggaucc

SEQ ID NO: 2839727 - RNA, 19 nt, Artificial Sequence
  Description of Artificial Sequence: Synthetic oligonucleotide
aaguuucacagucuugucg

SEQ ID NO: 2839728 - RNA, 19 nt, Artificial Sequence
  Description of Artificial Sequence: Synthetic oligonucleotide
auuucguguaaauucugcc

SEQ ID NO: 2839729 - RNA, 19 nt, Artificial Sequence
  Description of Artificial Sequence: Synthetic oligonucleotide
ugaguucuucaacacaucg

SEQ ID NO: 2839730 - RNA, 19 nt, Artificial Sequence
  Description of Artificial Sequence: Synthetic oligonucleotide
agucaaguuauuuucaucu

SEQ ID NO: 2839731 - RNA, 19 nt, Artificial Sequence
  Description of Artificial Sequence: Synthetic oligonucleotide
auaaauaagggugccaugg

SEQ ID NO: 2839732 - RNA, 19 nt, Artificial Sequence
  Description of Artificial Sequence: Synthetic oligonucleotide
aguuucacagucuugucgg

SEQ ID NO: 2839733 - RNA, 19 nt, Artificial Sequence
  Description of Artificial Sequence: Synthetic oligonucleotide
aauuaucauacucaguaau

SEQ ID NO: 2839734 - RNA, 19 nt, Artificial Sequence
  Description of Artificial Sequence: Synthetic oligonucleotide
uuccuucucaguuagcugg

SEQ ID NO: 2839735 - RNA, 19 nt, Artificial Sequence
  Description of Artificial Sequence: Synthetic oligonucleotide
ucaaguuauuuucaucucc

SEQ ID NO: 2839736 - RNA, 19 nt, Artificial Sequence
  Description of Artificial Sequence: Synthetic oligonucleotide
auagcuuuagaacgacugc

SEQ ID NO: 2839737 - RNA, 19 nt, Artificial Sequence
  Description of Artificial Sequence: Synthetic oligonucleotide
aauagcuuuagaacgacug

SEQ ID NO: 2839738 - RNA, 19 nt, Artificial Sequence
  Description of Artificial Sequence: Synthetic oligonucleotide
aguaaugaaauguuugagu

SEQ ID NO: 2839739 - RNA, 19 nt, Artificial Sequence
  Description of Artificial Sequence: Synthetic oligonucleotide
uggaugaagaaacugcuga

SEQ ID NO: 2839740 - RNA, 19 nt, Artificial Sequence
  Description of Artificial Sequence: Synthetic oligonucleotide
cucaaugcaaacuguauag

SEQ ID NO: 2839741 - RNA, 19 nt, Artificial Sequence
  Description of Artificial Sequence: Synthetic oligonucleotide
aaaagggucuccaaaaucu

SEQ ID NO: 2839742 - RNA, 19 nt, Artificial Sequence
  Description of Artificial Sequence: Synthetic oligonucleotide
aauucugugccaucuguug

SEQ ID NO: 2839743 - RNA, 19 nt, Artificial Sequence
  Description of Artificial Sequence: Synthetic oligonucleotide
guagaauuaucauacucag

SEQ ID NO: 2839744 - RNA, 19 nt, Artificial Sequence
  Description of Artificial Sequence: Synthetic oligonucleotide
ugguucuucugucuggucg

SEQ ID NO: 2839745 - RNA, 19 nt, Artificial Sequence
  Description of Artificial Sequence: Synthetic oligonucleotide
acaucgcucaccuauuucg

SEQ ID NO: 2839746 - RNA, 19 nt, Artificial Sequence
  Description of Artificial Sequence: Synthetic oligonucleotide
ucaguaaugaaauguuuga

SEQ ID NO: 2839747 - RNA, 19 nt, Artificial Sequence
  Description of Artificial Sequence: Synthetic oligonucleotide
ucauacucaguaaugaaau

SEQ ID NO: 2839748 - RNA, 19 nt, Artificial Sequence
  Description of Artificial Sequence: Synthetic oligonucleotide
aaauguuugaguucuucaa

SEQ ID NO: 2839749 - RNA, 19 nt, Artificial Sequence
  Description of Artificial Sequence: Synthetic oligonucleotide
aguucuucaacacaucgcu

SEQ ID NO: 2839750 - RNA, 19 nt, Artificial Sequence
  Description of Artificial Sequence: Synthetic oligonucleotide
aauaagggugccauggauc

SEQ ID NO: 2839751 - RNA, 19 nt, Artificial Sequence
  Description of Artificial Sequence: Synthetic oligonucleotide
ugaugcaauagcuuuagaa

SEQ ID NO: 2839752 - RNA, 19 nt, Artificial Sequence
  Description of Artificial Sequence: Synthetic oligonucleotide
caaguuauuuucaucuccc

SEQ ID NO: 2839753 - RNA, 19 nt, Artificial Sequence
  Description of Artificial Sequence: Synthetic oligonucleotide
uauuucguguaaauucugc

SEQ ID NO: 2839754 - RNA, 19 nt, Artificial Sequence
  Description of Artificial Sequence: Synthetic oligonucleotide
uugucgguaaaccugcuca

SEQ ID NO: 2839755 - RNA, 19 nt, Artificial Sequence
  Description of Artificial Sequence: Synthetic oligonucleotide
cucaguaaugaaauguuug

SEQ ID NO: 2839756 - RNA, 19 nt, Artificial Sequence
  Description of Artificial Sequence: Synthetic oligonucleotide
ugucuggucgauaaauaag

SEQ ID NO: 2839757 - RNA, 19 nt, Artificial Sequence
  Description of Artificial Sequence: Synthetic oligonucleotide
uucuucaacacaucgcuca

SEQ ID NO: 2839758 - RNA, 19 nt, Artificial Sequence
  Description of Artificial Sequence: Synthetic oligonucleotide
aaaguuucacagucuuguc

SEQ ID NO: 2839759 - RNA, 19 nt, Artificial Sequence
  Description of Artificial Sequence: Synthetic oligonucleotide
uuuagaacgacugcuaauc

SEQ ID NO: 2839760 - RNA, 19 nt, Artificial Sequence
  Description of Artificial Sequence: Synthetic oligonucleotide
ugucuaacaccuuggauga

SEQ ID NO: 2839761 - RNA, 19 nt, Artificial Sequence
  Description of Artificial Sequence: Synthetic oligonucleotide
acaccuuggaugaagaaac

SEQ ID NO: 2839762 - RNA, 19 nt, Artificial Sequence
  Description of Artificial Sequence: Synthetic oligonucleotide
ucuggucgauaaauaaggg

SEQ ID NO: 2839763 - RNA, 19 nt, Artificial Sequence
  Description of Artificial Sequence: Synthetic oligonucleotide
aaucagcaucuucaccacc

SEQ ID NO: 2839764 - RNA, 19 nt, Artificial Sequence
  Description of Artificial Sequence: Synthetic oligonucleotide
aguagaauuaucauacuca

SEQ ID NO: 2839765 - RNA, 19 nt, Artificial Sequence
  Description of Artificial Sequence: Synthetic oligonucleotide
uuaucauacucaguaauga

SEQ ID NO: 2839766 - RNA, 19 nt, Artificial Sequence
  Description of Artificial Sequence: Synthetic oligonucleotide
ugcagccucagcaaguucc

SEQ ID NO: 2839767 - RNA, 19 nt, Artificial Sequence
  Description of Artificial Sequence: Synthetic oligonucleotide
aaaaucuugaguagaauua

SEQ ID NO: 2839768 - RNA, 19 nt, Artificial Sequence
  Description of Artificial Sequence: Synthetic oligonucleotide
agaacgacugcuaaucugg

SEQ ID NO: 2839769 - RNA, 19 nt, Artificial Sequence
  Description of Artificial Sequence: Synthetic oligonucleotide
  modified_base (17)..(17): a, c, u, g, unknown or other
augauaacuaacaaaanaa

SEQ ID NO: 2839770 - RNA, 19 nt, Artificial Sequence
  Description of Artificial Sequence: Synthetic oligonucleotide
uucaacacaucgcucaccu

SEQ ID NO: 2839771 - RNA, 19 nt, Artificial Sequence
  Description of Artificial Sequence: Synthetic oligonucleotide
uuucguguaaauucugccu

SEQ ID NO: 2839772 - RNA, 19 nt, Artificial Sequence
  Description of Artificial Sequence: Synthetic oligonucleotide
ugcaauagcuuuagaacga

SEQ ID NO: 2839773 - RNA, 19 nt, Artificial Sequence
  Description of Artificial Sequence: Synthetic oligonucleotide
ucauuagcccacuugcuug

SEQ ID NO: 2839774 - RNA, 19 nt, Artificial Sequence
  Description of Artificial Sequence: Synthetic oligonucleotide
ucucagucaaguuauuuuc

SEQ ID NO: 2839775 - RNA, 19 nt, Artificial Sequence
  Description of Artificial Sequence: Synthetic oligonucleotide
gucuggucgauaaauaagg

SEQ ID NO: 2839776 - RNA, 19 nt, Artificial Sequence
  Description of Artificial Sequence: Synthetic oligonucleotide
augcaaacuguauagauuu

SEQ ID NO: 2839777 - RNA, 19 nt, Artificial Sequence
  Description of Artificial Sequence: Synthetic oligonucleotide
uuugaugcaauagcuuuag

SEQ ID NO: 2839778 - RNA, 19 nt, Artificial Sequence
  Description of Artificial Sequence: Synthetic oligonucleotide
augaagaaacugcugaaga

SEQ ID NO: 2839779 - RNA, 19 nt, Artificial Sequence
  Description of Artificial Sequence: Synthetic oligonucleotide
uucucaguuagcuggcuag

SEQ ID NO: 2839780 - RNA, 19 nt, Artificial Sequence
  Description of Artificial Sequence: Synthetic oligonucleotide
aacucggaaaucucaguca

SEQ ID NO: 2839781 - RNA, 19 nt, Artificial Sequence
  Description of Artificial Sequence: Synthetic oligonucleotide
ucuccaaaaucuugaguag

SEQ ID NO: 2839782 - RNA, 19 nt, Artificial Sequence
  Description of Artificial Sequence: Synthetic oligonucleotide
aaccugcucaauuucuuug

SEQ ID NO: 2839783 - RNA, 19 nt, Artificial Sequence
  Description of Artificial Sequence: Synthetic oligonucleotide
uucguguaaauucugccuc

SEQ ID NO: 2839784 - RNA, 19 nt, Artificial Sequence
  Description of Artificial Sequence: Synthetic oligonucleotide
gaugaagaaacugcugaag

SEQ ID NO: 2839785 - RNA, 19 nt, Artificial Sequence
  Description of Artificial Sequence: Synthetic oligonucleotide
  modified_base (19)..(19): a, c, u, g, unknown or other
uuaugauaacuaacaaaan

SEQ ID NO: 2839786 - RNA, 19 nt, Artificial Sequence
  Description of Artificial Sequence: Synthetic oligonucleotide
acagucuugucgguaaacc

SEQ ID NO: 2839787 - RNA, 19 nt, Artificial Sequence
  Description of Artificial Sequence: Synthetic oligonucleotide
acgacugcuaaucuggcug

SEQ ID NO: 2839788 - RNA, 19 nt, Artificial Sequence
  Description of Artificial Sequence: Synthetic oligonucleotide
aaauaagggugccauggau

SEQ ID NO: 2839789 - RNA, 19 nt, Artificial Sequence
  Description of Artificial Sequence: Synthetic oligonucleotide
gaguagaauuaucauacuc

SEQ ID NO: 2839790 - RNA, 19 nt, Artificial Sequence
  Description of Artificial Sequence: Synthetic oligonucleotide
auguuugaguucuucaaca

SEQ ID NO: 2839791 - RNA, 19 nt, Artificial Sequence
  Description of Artificial Sequence: Synthetic oligonucleotide
ucuaacaccuuggaugaag

SEQ ID NO: 2839792 - RNA, 19 nt, Artificial Sequence
  Description of Artificial Sequence: Synthetic oligonucleotide
ucagcaaguuccuucucag

SEQ ID NO: 2839793 - RNA, 19 nt, Artificial Sequence
  Description of Artificial Sequence: Synthetic oligonucleotide
auacucaguaaugaaaugu

SEQ ID NO: 2839794 - RNA, 19 nt, Artificial Sequence
  Description of Artificial Sequence: Synthetic oligonucleotide
aagaaacugcugaagaacu

SEQ ID NO: 2839795 - RNA, 19 nt, Artificial Sequence
  Description of Artificial Sequence: Synthetic oligonucleotide
caucuguuguguuugacuc

SEQ ID NO: 2839796 - RNA, 19 nt, Artificial Sequence
  Description of Artificial Sequence: Synthetic oligonucleotide
aaucuugaguagaauuauc

SEQ ID NO: 2839797 - RNA, 19 nt, Artificial Sequence
  Description of Artificial Sequence: Synthetic oligonucleotide
gucuccaaaaucuugagua

SEQ ID NO: 2839798 - RNA, 19 nt, Artificial Sequence
  Description of Artificial Sequence: Synthetic oligonucleotide
aaaucuugaguagaauuau

SEQ ID NO: 2839799 - RNA, 19 nt, Artificial Sequence
  Description of Artificial Sequence: Synthetic oligonucleotide
uccaaaaucuugaguagaa

SEQ ID NO: 2839800 - RNA, 19 nt, Artificial Sequence
  Description of Artificial Sequence: Synthetic oligonucleotide
ucuucugucuggucgauaa

SEQ ID NO: 2839801 - RNA, 19 nt, Artificial Sequence
  Description of Artificial Sequence: Synthetic oligonucleotide
auuaucauacucaguaaug

SEQ ID NO: 2839802 - RNA, 19 nt, Artificial Sequence
  Description of Artificial Sequence: Synthetic oligonucleotide
uaaugaaauguuugaguuc

SEQ ID NO: 2839803 - RNA, 19 nt, Artificial Sequence
  Description of Artificial Sequence: Synthetic oligonucleotide
uucaaucagcaucuucacc

SEQ ID NO: 2839804 - RNA, 19 nt, Artificial Sequence
  Description of Artificial Sequence: Synthetic oligonucleotide
uaaauaagggugccaugga

SEQ ID NO: 2839805 - RNA, 19 nt, Artificial Sequence
  Description of Artificial Sequence: Synthetic oligonucleotide
cuugcuugcagccucagca

SEQ ID NO: 2839806 - RNA, 19 nt, Artificial Sequence
  Description of Artificial Sequence: Synthetic oligonucleotide
aagggugccauggaucccg

SEQ ID NO: 2839807 - RNA, 19 nt, Artificial Sequence
  Description of Artificial Sequence: Synthetic oligonucleotide
accugcucaauuucuuugg

SEQ ID NO: 2839808 - RNA, 19 nt, Artificial Sequence
  Description of Artificial Sequence: Synthetic oligonucleotide
aaguuauuuucaucucccu

SEQ ID NO: 2839809 - RNA, 19 nt, Artificial Sequence
  Description of Artificial Sequence: Synthetic oligonucleotide
ucuugaguagaauuaucau

SEQ ID NO: 2839810 - RNA, 19 nt, Artificial Sequence
  Description of Artificial Sequence: Synthetic oligonucleotide
uuggaugaagaaacugcug

SEQ ID NO: 2839811 - RNA, 19 nt, Artificial Sequence
  Description of Artificial Sequence: Synthetic oligonucleotide
ugucuucauacaauucugu

SEQ ID NO: 2839812 - RNA, 19 nt, Artificial Sequence
  Description of Artificial Sequence: Synthetic oligonucleotide
uagaacgacugcuaaucug

SEQ ID NO: 2839813 - RNA, 19 nt, Artificial Sequence
  Description of Artificial Sequence: Synthetic oligonucleotide
aacaccuuggaugaagaaa

SEQ ID NO: 2839814 - RNA, 19 nt, Artificial Sequence
  Description of Artificial Sequence: Synthetic oligonucleotide
agguuugucuaacaccuug

SEQ ID NO: 2839815 - RNA, 19 nt, Artificial Sequence
  Description of Artificial Sequence: Synthetic oligonucleotide
ucggaaaucucagucaagu

SEQ ID NO: 2839816 - RNA, 19 nt, Artificial Sequence
  Description of Artificial Sequence: Synthetic oligonucleotide
uacucaguaaugaaauguu

SEQ ID NO: 2839817 - RNA, 19 nt, Artificial Sequence
  Description of Artificial Sequence: Synthetic oligonucleotide
uuagaacgacugcuaaucu

SEQ ID NO: 2839818 - RNA, 19 nt, Artificial Sequence
  Description of Artificial Sequence: Synthetic oligonucleotide
ucccgaaaguuucacaguc

SEQ ID NO: 2839819 - RNA, 19 nt, Artificial Sequence
  Description of Artificial Sequence: Synthetic oligonucleotide
uuucaaucagcaucuucac

SEQ ID NO: 2839820 - RNA, 19 nt, Artificial Sequence
  Description of Artificial Sequence: Synthetic oligonucleotide
aaugcaaacuguauagauu

SEQ ID NO: 2839821 - RNA, 19 nt, Artificial Sequence
  Description of Artificial Sequence: Synthetic oligonucleotide
uuucauuagcccacuugcu

SEQ ID NO: 2839822 - RNA, 19 nt, Artificial Sequence
  Description of Artificial Sequence: Synthetic oligonucleotide
gaaaguuucacagucuugu

SEQ ID NO: 2839823 - RNA, 19 nt, Artificial Sequence
  Description of Artificial Sequence: Synthetic oligonucleotide
uguguuugacucugguucu

SEQ ID NO: 2839824 - RNA, 19 nt, Artificial Sequence
  Description of Artificial Sequence: Synthetic oligonucleotide
acaauucugugccaucugu

SEQ ID NO: 2839825 - RNA, 19 nt, Artificial Sequence
  Description of Artificial Sequence: Synthetic oligonucleotide
aucuugaguagaauuauca

SEQ ID NO: 2839826 - RNA, 19 nt, Artificial Sequence
  Description of Artificial Sequence: Synthetic oligonucleotide
uuugacucugguucuucug

SEQ ID NO: 2839827 - RNA, 19 nt, Artificial Sequence
  Description of Artificial Sequence: Synthetic oligonucleotide
caaguuccuucucaguuag

SEQ ID NO: 2839828 - RNA, 19 nt, Artificial Sequence
  Description of Artificial Sequence: Synthetic oligonucleotide
cuugaguagaauuaucaua

SEQ ID NO: 2839829 - RNA, 19 nt, Artificial Sequence
  Description of Artificial Sequence: Synthetic oligonucleotide
cauggaucccgucucaaac

SEQ ID NO: 2839830 - RNA, 19 nt, Artificial Sequence
  Description of Artificial Sequence: Synthetic oligonucleotide
uucauuagcccacuugcuu

SEQ ID NO: 2839831 - RNA, 19 nt, Artificial Sequence
  Description of Artificial Sequence: Synthetic oligonucleotide
gaucccgucucaaacucgg

SEQ ID NO: 2839832 - RNA, 19 nt, Artificial Sequence
  Description of Artificial Sequence: Synthetic oligonucleotide
cuagguuugucuaacaccu

SEQ ID NO: 2839833 - RNA, 19 nt, Artificial Sequence
  Description of Artificial Sequence: Synthetic oligonucleotide
cugucuucauacaauucug

SEQ ID NO: 2839834 - RNA, 19 nt, Artificial Sequence
  Description of Artificial Sequence: Synthetic oligonucleotide
uguuguguuugacucuggu

SEQ ID NO: 2839835 - RNA, 19 nt, Artificial Sequence
  Description of Artificial Sequence: Synthetic oligonucleotide
guaaugaaauguuugaguu

SEQ ID NO: 2839836 - RNA, 19 nt, Artificial Sequence
  Description of Artificial Sequence: Synthetic oligonucleotide
ucuggcugucuucauacaa

SEQ ID NO: 2839837 - RNA, 19 nt, Artificial Sequence
  Description of Artificial Sequence: Synthetic oligonucleotide
aguuccuucucaguuagcu

SEQ ID NO: 2839838 - RNA, 19 nt, Artificial Sequence
  Description of Artificial Sequence: Synthetic oligonucleotide
uucugugccaucuguugug

SEQ ID NO: 2839839 - RNA, 19 nt, Artificial Sequence
  Description of Artificial Sequence: Synthetic oligonucleotide
agcaaguuccuucucaguu

SEQ ID NO: 2839840 - RNA, 19 nt, Artificial Sequence
  Description of Artificial Sequence: Synthetic oligonucleotide
gaauuaucauacucaguaa

SEQ ID NO: 2839841 - RNA, 19 nt, Artificial Sequence
  Description of Artificial Sequence: Synthetic oligonucleotide
ucagucaaguuauuuucau

SEQ ID NO: 2839842 - RNA, 19 nt, Artificial Sequence
  Description of Artificial Sequence: Synthetic oligonucleotide
aucucagucaaguuauuuu

SEQ ID NO: 2839843 - RNA, 19 nt, Artificial Sequence
  Description of Artificial Sequence: Synthetic oligonucleotide
cauacucaguaaugaaaug

SEQ ID NO: 2839844 - RNA, 19 nt, Artificial Sequence
  Description of Artificial Sequence: Synthetic oligonucleotide
uucacagucuugucgguaa

SEQ ID NO: 2839845 - RNA, 19 nt, Artificial Sequence
  Description of Artificial Sequence: Synthetic oligonucleotide
agcccacuugcuugcagcc

SEQ ID NO: 2839846 - RNA, 19 nt, Artificial Sequence
  Description of Artificial Sequence: Synthetic oligonucleotide
uagcuuuagaacgacugcu

SEQ ID NO: 2839847 - RNA, 19 nt, Artificial Sequence
  Description of Artificial Sequence: Synthetic oligonucleotide
aguuauuuucaucucccuu

SEQ ID NO: 2839848 - RNA, 19 nt, Artificial Sequence
  Description of Artificial Sequence: Synthetic oligonucleotide
caguaaugaaauguuugag

SEQ ID NO: 2839849 - RNA, 19 nt, Artificial Sequence
  Description of Artificial Sequence: Synthetic oligonucleotide
ucaaugcaaacuguauaga

SEQ ID NO: 2839850 - RNA, 19 nt, Artificial Sequence
  Description of Artificial Sequence: Synthetic oligonucleotide
ucuucaacacaucgcucac

SEQ ID NO: 2839851 - RNA, 19 nt, Artificial Sequence
  Description of Artificial Sequence: Synthetic oligonucleotide
gcuagguuugucuaacacc

SEQ ID NO: 2839852 - RNA, 19 nt, Artificial Sequence
  Description of Artificial Sequence: Synthetic oligonucleotide
uccggcuuuucauuagccc

SEQ ID NO: 2839853 - RNA, 19 nt, Artificial Sequence
  Description of Artificial Sequence: Synthetic oligonucleotide
cauuagcccacuugcuugc

SEQ ID NO: 2839854 - RNA, 19 nt, Artificial Sequence
  Description of Artificial Sequence: Synthetic oligonucleotide
aacgacugcuaaucuggcu

SEQ ID NO: 2839855 - RNA, 19 nt, Artificial Sequence
  Description of Artificial Sequence: Synthetic oligonucleotide
gaguucuucaacacaucgc

SEQ ID NO: 2839856 - RNA, 19 nt, Artificial Sequence
  Description of Artificial Sequence: Synthetic oligonucleotide
aaaccugcucaauuucuuu

SEQ ID NO: 2839857 - RNA, 19 nt, Artificial Sequence
  Description of Artificial Sequence: Synthetic oligonucleotide
ugaguagaauuaucauacu

SEQ ID NO: 2839858 - RNA, 19 nt, Artificial Sequence
  Description of Artificial Sequence: Synthetic oligonucleotide
cuauuucguguaaauucug

SEQ ID NO: 2839859 - RNA, 19 nt, Artificial Sequence
  Description of Artificial Sequence: Synthetic oligonucleotide
ucugucuggucgauaaaua

SEQ ID NO: 2839860 - RNA, 19 nt, Artificial Sequence
  Description of Artificial Sequence: Synthetic oligonucleotide
auacaauucugugccaucu

SEQ ID NO: 2839861 - RNA, 19 nt, Artificial Sequence
  Description of Artificial Sequence: Synthetic oligonucleotide
acuugcuugcagccucagc

SEQ ID NO: 2839862 - RNA, 19 nt, Artificial Sequence
  Description of Artificial Sequence: Synthetic oligonucleotide
uaaaccugcucaauuucuu

SEQ ID NO: 2839863 - RNA, 19 nt, Artificial Sequence
  Description of Artificial Sequence: Synthetic oligonucleotide
agucuugucgguaaaccug

SEQ ID NO: 2839864 - RNA, 19 nt, Artificial Sequence
  Description of Artificial Sequence: Synthetic oligonucleotide
ugcuugcagccucagcaag

SEQ ID NO: 2839865 - RNA, 19 nt, Artificial Sequence
  Description of Artificial Sequence: Synthetic oligonucleotide
cucaaacucggaaaucuca

SEQ ID NO: 2839866 - RNA, 19 nt, Artificial Sequence
  Description of Artificial Sequence: Synthetic oligonucleotide
ucuccggcuuuucauuagc

SEQ ID NO: 2839867 - RNA, 19 nt, Artificial Sequence
  Description of Artificial Sequence: Synthetic oligonucleotide
gaaaucucagucaaguuau

SEQ ID NO: 2839868 - RNA, 19 nt, Artificial Sequence
  Description of Artificial Sequence: Synthetic oligonucleotide
ucucaguuagcuggcuagg

SEQ ID NO: 2839869 - RNA, 19 nt, Artificial Sequence
  Description of Artificial Sequence: Synthetic oligonucleotide
acucggaaaucucagucaa

SEQ ID NO: 2839870 - RNA, 19 nt, Artificial Sequence
  Description of Artificial Sequence: Synthetic oligonucleotide
guuugaguucuucaacaca

SEQ ID NO: 2839871 - RNA, 19 nt, Artificial Sequence
  Description of Artificial Sequence: Synthetic oligonucleotide
aucauacucaguaaugaaa

SEQ ID NO: 2839872 - RNA, 19 nt, Artificial Sequence
  Description of Artificial Sequence: Synthetic oligonucleotide
ucguguaaauucugccuca

SEQ ID NO: 2839873 - RNA, 19 nt, Artificial Sequence
  Description of Artificial Sequence: Synthetic oligonucleotide
ucaccuauuucguguaaau

SEQ ID NO: 2839874 - RNA, 19 nt, Artificial Sequence
  Description of Artificial Sequence: Synthetic oligonucleotide
ggaaaucucagucaaguua

SEQ ID NO: 2839875 - RNA, 19 nt, Artificial Sequence
  Description of Artificial Sequence: Synthetic oligonucleotide
ucgguaaaccugcucaauu

SEQ ID NO: 2839876 - RNA, 19 nt, Artificial Sequence
  Description of Artificial Sequence: Synthetic oligonucleotide
uaaucuggcugucuucaua

SEQ ID NO: 2839877 - RNA, 19 nt, Artificial Sequence
  Description of Artificial Sequence: Synthetic oligonucleotide
ucgcucaccuauuucgugu

SEQ ID NO: 2839878 - RNA, 19 nt, Artificial Sequence
  Description of Artificial Sequence: Synthetic oligonucleotide
caucuucaccaccaucccg

SEQ ID NO: 2839879 - RNA, 19 nt, Artificial Sequence
  Description of Artificial Sequence: Synthetic oligonucleotide
aaucucagucaaguuauuu

SEQ ID NO: 2839880 - RNA, 19 nt, Artificial Sequence
  Description of Artificial Sequence: Synthetic oligonucleotide
uggaucccgucucaaacuc

SEQ ID NO: 2839881 - RNA, 19 nt, Artificial Sequence
  Description of Artificial Sequence: Synthetic oligonucleotide
auggaucccgucucaaacu

SEQ ID NO: 2839882 - RNA, 19 nt, Artificial Sequence
  Description of Artificial Sequence: Synthetic oligonucleotide
ucauacaauucugugccau

SEQ ID NO: 2839883 - RNA, 19 nt, Artificial Sequence
  Description of Artificial Sequence: Synthetic oligonucleotide
uuagcccacuugcuugcag

SEQ ID NO: 2839884 - RNA, 19 nt, Artificial Sequence
  Description of Artificial Sequence: Synthetic oligonucleotide
aagggucuccaaaaucuug

SEQ ID NO: 2839885 - RNA, 19 nt, Artificial Sequence
  Description of Artificial Sequence: Synthetic oligonucleotide
acucugguucuucugucug

SEQ ID NO: 2839886 - RNA, 19 nt, Artificial Sequence
  Description of Artificial Sequence: Synthetic oligonucleotide
cucugguucuucugucugg

SEQ ID NO: 2839887 - RNA, 19 nt, Artificial Sequence
  Description of Artificial Sequence: Synthetic oligonucleotide
uagcccacuugcuugcagc

SEQ ID NO: 2839888 - RNA, 19 nt, Artificial Sequence
  Description of Artificial Sequence: Synthetic oligonucleotide
ugugccaucuguuguguuu

SEQ ID NO: 2839889 - RNA, 19 nt, Artificial Sequence
  Description of Artificial Sequence: Synthetic oligonucleotide
ucaguuagcuggcuagguu

SEQ ID NO: 2839890 - RNA, 19 nt, Artificial Sequence
  Description of Artificial Sequence: Synthetic oligonucleotide
uucugucuggucgauaaau

SEQ ID NO: 2839891 - RNA, 19 nt, Artificial Sequence
  Description of Artificial Sequence: Synthetic oligonucleotide
cauacaauucugugccauc

SEQ ID NO: 2839892 - RNA, 19 nt, Artificial Sequence
  Description of Artificial Sequence: Synthetic oligonucleotide
aucuucaccaccaucccga

SEQ ID NO: 2839893 - RNA, 19 nt, Artificial Sequence
  Description of Artificial Sequence: Synthetic oligonucleotide
uucauacaauucugugcca

SEQ ID NO: 2839894 - RNA, 19 nt, Artificial Sequence
  Description of Artificial Sequence: Synthetic oligonucleotide
guuccuucucaguuagcug

SEQ ID NO: 2839895 - RNA, 19 nt, Artificial Sequence
  Description of Artificial Sequence: Synthetic oligonucleotide
caaucagcaucuucaccac

SEQ ID NO: 2839896 - RNA, 19 nt, Artificial Sequence
  Description of Artificial Sequence: Synthetic oligonucleotide
gucuugucgguaaaccugc

SEQ ID NO: 2839897 - RNA, 19 nt, Artificial Sequence
  Description of Artificial Sequence: Synthetic oligonucleotide
ucgauaaauaagggugcca

SEQ ID NO: 2839898 - RNA, 19 nt, Artificial Sequence
  Description of Artificial Sequence: Synthetic oligonucleotide
cucagucaaguuauuuuca

SEQ ID NO: 2839899 - RNA, 19 nt, Artificial Sequence
  Description of Artificial Sequence: Synthetic oligonucleotide
caaaaucuugaguagaauu

SEQ ID NO: 2839900 - RNA, 19 nt, Artificial Sequence
  Description of Artificial Sequence: Synthetic oligonucleotide
cuuggaugaagaaacugcu

SEQ ID NO: 2839901 - RNA, 19 nt, Artificial Sequence
  Description of Artificial Sequence: Synthetic oligonucleotide
cagucaaguuauuuucauc

SEQ ID NO: 2839902 - RNA, 19 nt, Artificial Sequence
  Description of Artificial Sequence: Synthetic oligonucleotide
cuaacaccuuggaugaaga

SEQ ID NO: 2839903 - RNA, 19 nt, Artificial Sequence
  Description of Artificial Sequence: Synthetic oligonucleotide
ugccucaaugcaaacugua

SEQ ID NO: 2839904 - RNA, 19 nt, Artificial Sequence
  Description of Artificial Sequence: Synthetic oligonucleotide
guuugucuaacaccuugga

SEQ ID NO: 2839905 - RNA, 19 nt, Artificial Sequence
  Description of Artificial Sequence: Synthetic oligonucleotide
gguuugucuaacaccuugg

SEQ ID NO: 2839906 - RNA, 19 nt, Artificial Sequence
  Description of Artificial Sequence: Synthetic oligonucleotide
gucgauaaauaagggugcc

SEQ ID NO: 2839907 - RNA, 19 nt, Artificial Sequence
  Description of Artificial Sequence: Synthetic oligonucleotide
ucccgucucaaacucggaa

SEQ ID NO: 2839908 - RNA, 19 nt, Artificial Sequence
  Description of Artificial Sequence: Synthetic oligonucleotide
aucuguuguguuugacucu

SEQ ID NO: 2839909 - RNA, 19 nt, Artificial Sequence
  Description of Artificial Sequence: Synthetic oligonucleotide
uagcuggcuagguuugucu

SEQ ID NO: 2839910 - RNA, 19 nt, Artificial Sequence
  Description of Artificial Sequence: Synthetic oligonucleotide
ucugguucuucugucuggu

SEQ ID NO: 2839911 - RNA, 19 nt, Artificial Sequence
  Description of Artificial Sequence: Synthetic oligonucleotide
gguaaaccugcucaauuuc

SEQ ID NO: 2839912 - RNA, 19 nt, Artificial Sequence
  Description of Artificial Sequence: Synthetic oligonucleotide
ugucgguaaaccugcucaa

SEQ ID NO: 2839913 - RNA, 19 nt, Artificial Sequence
  Description of Artificial Sequence: Synthetic oligonucleotide
aucgcucaccuauuucgug

SEQ ID NO: 2839914 - RNA, 19 nt, Artificial Sequence
  Description of Artificial Sequence: Synthetic oligonucleotide
uucugccucaaugcaaacu

SEQ ID NO: 2839915 - RNA, 19 nt, Artificial Sequence
  Description of Artificial Sequence: Synthetic oligonucleotide
ggucgauaaauaagggugc

SEQ ID NO: 2839916 - RNA, 19 nt, Artificial Sequence
  Description of Artificial Sequence: Synthetic oligonucleotide
uugaugcaauagcuuuaga

SEQ ID NO: 2839917 - RNA, 19 nt, Artificial Sequence
  Description of Artificial Sequence: Synthetic oligonucleotide
aucccgaaaguuucacagu

SEQ ID NO: 2839918 - RNA, 19 nt, Artificial Sequence
  Description of Artificial Sequence: Synthetic oligonucleotide
cuccggcuuuucauuagcc

SEQ ID NO: 2839919 - RNA, 19 nt, Artificial Sequence
  Description of Artificial Sequence: Synthetic oligonucleotide
agggucuccaaaaucuuga

SEQ ID NO: 2839920 - RNA, 19 nt, Artificial Sequence
  Description of Artificial Sequence: Synthetic oligonucleotide
uaacaccuuggaugaagaa

SEQ ID NO: 2839921 - RNA, 19 nt, Artificial Sequence
  Description of Artificial Sequence: Synthetic oligonucleotide
aaguuccuucucaguuagc

SEQ ID NO: 2839922 - RNA, 19 nt, Artificial Sequence
  Description of Artificial Sequence: Synthetic oligonucleotide
ugacucugguucuucuguc

SEQ ID NO: 2839923 - RNA, 19 nt, Artificial Sequence
  Description of Artificial Sequence: Synthetic oligonucleotide
cugucuggucgauaaauaa

SEQ ID NO: 2839924 - RNA, 19 nt, Artificial Sequence
  Description of Artificial Sequence: Synthetic oligonucleotide
cucggaaaucucagucaag

SEQ ID NO: 2839925 - RNA, 19 nt, Artificial Sequence
  Description of Artificial Sequence: Synthetic oligonucleotide
uugcuugcagccucagcaa

SEQ ID NO: 2839926 - RNA, 19 nt, Artificial Sequence
  Description of Artificial Sequence: Synthetic oligonucleotide
aguuagcuggcuagguuug

SEQ ID NO: 2839927 - RNA, 19 nt, Artificial Sequence
  Description of Artificial Sequence: Synthetic oligonucleotide
gcugucuucauacaauucu

SEQ ID NO: 2839928 - RNA, 19 nt, Artificial Sequence
  Description of Artificial Sequence: Synthetic oligonucleotide
cuugucgguaaaccugcuc

SEQ ID NO: 2839929 - RNA, 19 nt, Artificial Sequence
  Description of Artificial Sequence: Synthetic oligonucleotide
aaagggucuccaaaaucuu

SEQ ID NO: 2839930 - RNA, 19 nt, Artificial Sequence
  Description of Artificial Sequence: Synthetic oligonucleotide
cuucaacacaucgcucacc

SEQ ID NO: 2839931 - RNA, 19 nt, Artificial Sequence
  Description of Artificial Sequence: Synthetic oligonucleotide
ugcaaacuguauagauuuu

SEQ ID NO: 2839932 - RNA, 19 nt, Artificial Sequence
  Description of Artificial Sequence: Synthetic oligonucleotide
gaacgacugcuaaucuggc

SEQ ID NO: 2839933 - RNA, 19 nt, Artificial Sequence
  Description of Artificial Sequence: Synthetic oligonucleotide
caaugcaaacuguauagau

SEQ ID NO: 2839934 - RNA, 19 nt, Artificial Sequence
  Description of Artificial Sequence: Synthetic oligonucleotide
gucucaaacucggaaaucu

SEQ ID NO: 2839935 - RNA, 19 nt, Artificial Sequence
  Description of Artificial Sequence: Synthetic oligonucleotide
uguuugacucugguucuuc

SEQ ID NO: 2839936 - RNA, 19 nt, Artificial Sequence
  Description of Artificial Sequence: Synthetic oligonucleotide
ggcuagguuugucuaacac

SEQ ID NO: 2839937 - RNA, 19 nt, Artificial Sequence
  Description of Artificial Sequence: Synthetic oligonucleotide
gugccaucuguuguguuug

SEQ ID NO: 2839938 - RNA, 19 nt, Artificial Sequence
  Description of Artificial Sequence: Synthetic oligonucleotide
ucugugccaucuguugugu

SEQ ID NO: 2839939 - RNA, 19 nt, Artificial Sequence
  Description of Artificial Sequence: Synthetic oligonucleotide
cuggcuagguuugucuaac

SEQ ID NO: 2839940 - RNA, 19 nt, Artificial Sequence
  Description of Artificial Sequence: Synthetic oligonucleotide
ucuugucgguaaaccugcu

SEQ ID NO: 2839941 - RNA, 19 nt, Artificial Sequence
  Description of Artificial Sequence: Synthetic oligonucleotide
caacacaucgcucaccuau

SEQ ID NO: 2839942 - RNA, 19 nt, Artificial Sequence
  Description of Artificial Sequence: Synthetic oligonucleotide
ucacagucuugucgguaaa

SEQ ID NO: 2839943 - RNA, 19 nt, Artificial Sequence
  Description of Artificial Sequence: Synthetic oligonucleotide
ugccauggaucccgucuca

SEQ ID NO: 2839944 - RNA, 19 nt, Artificial Sequence
  Description of Artificial Sequence: Synthetic oligonucleotide
cuggucgauaaauaagggu

SEQ ID NO: 2839945 - RNA, 19 nt, Artificial Sequence
  Description of Artificial Sequence: Synthetic oligonucleotide
cuccaaaaucuugaguaga

SEQ ID NO: 2839946 - RNA, 19 nt, Artificial Sequence
  Description of Artificial Sequence: Synthetic oligonucleotide
ucccuucuccggcuuuuca

SEQ ID NO: 2839947 - RNA, 19 nt, Artificial Sequence
  Description of Artificial Sequence: Synthetic oligonucleotide
uuagcuggcuagguuuguc

SEQ ID NO: 2839948 - RNA, 19 nt, Artificial Sequence
  Description of Artificial Sequence: Synthetic oligonucleotide
cacaucgcucaccuauuuc

SEQ ID NO: 2839949 - RNA, 19 nt, Artificial Sequence
  Description of Artificial Sequence: Synthetic oligonucleotide
gguucuucugucuggucga

SEQ ID NO: 2839950 - RNA, 19 nt, Artificial Sequence
  Description of Artificial Sequence: Synthetic oligonucleotide
acugcuaaucuggcugucu

SEQ ID NO: 2839951 - RNA, 19 nt, Artificial Sequence
  Description of Artificial Sequence: Synthetic oligonucleotide
acucaguaaugaaauguuu

SEQ ID NO: 2839952 - RNA, 19 nt, Artificial Sequence
  Description of Artificial Sequence: Synthetic oligonucleotide
ggaugaagaaacugcugaa

SEQ ID NO: 2839953 - RNA, 19 nt, Artificial Sequence
  Description of Artificial Sequence: Synthetic oligonucleotide
uggcuagguuugucuaaca

SEQ ID NO: 2839954 - RNA, 19 nt, Artificial Sequence
  Description of Artificial Sequence: Synthetic oligonucleotide
gggucuccaaaaucuugag

SEQ ID NO: 2839955 - RNA, 19 nt, Artificial Sequence
  Description of Artificial Sequence: Synthetic oligonucleotide
ucuucaccaccaucccgaa

SEQ ID NO: 2839956 - RNA, 19 nt, Artificial Sequence
  Description of Artificial Sequence: Synthetic oligonucleotide
aacacaucgcucaccuauu

SEQ ID NO: 2839957 - RNA, 19 nt, Artificial Sequence
  Description of Artificial Sequence: Synthetic oligonucleotide
agcuggcuagguuugucua

SEQ ID NO: 2839958 - RNA, 19 nt, Artificial Sequence
  Description of Artificial Sequence: Synthetic oligonucleotide
guaaaccugcucaauuucu

SEQ ID NO: 2839959 - RNA, 19 nt, Artificial Sequence
  Description of Artificial Sequence: Synthetic oligonucleotide
cacagucuugucgguaaac

SEQ ID NO: 2839960 - RNA, 19 nt, Artificial Sequence
  Description of Artificial Sequence: Synthetic oligonucleotide
aucuggcugucuucauaca

SEQ ID NO: 2839961 - RNA, 19 nt, Artificial Sequence
  Description of Artificial Sequence: Synthetic oligonucleotide
gacucugguucuucugucu

SEQ ID NO: 2839962 - RNA, 19 nt, Artificial Sequence
  Description of Artificial Sequence: Synthetic oligonucleotide
uaagggugccauggauccc

SEQ ID NO: 2839963 - RNA, 19 nt, Artificial Sequence
  Description of Artificial Sequence: Synthetic oligonucleotide
gugccauggaucccgucuc

SEQ ID NO: 2839964 - RNA, 19 nt, Artificial Sequence
  Description of Artificial Sequence: Synthetic oligonucleotide
ccuauuucguguaaauucu

SEQ ID NO: 2839965 - RNA, 19 nt, Artificial Sequence
  Description of Artificial Sequence: Synthetic oligonucleotide
cuuuagaacgacugcuaau

SEQ ID NO: 2839966 - RNA, 19 nt, Artificial Sequence
  Description of Artificial Sequence: Synthetic oligonucleotide
acacaucgcucaccuauuu

SEQ ID NO: 2839967 - RNA, 19 nt, Artificial Sequence
  Description of Artificial Sequence: Synthetic oligonucleotide
gcuuuagaacgacugcuaa

SEQ ID NO: 2839968 - RNA, 19 nt, Artificial Sequence
  Description of Artificial Sequence: Synthetic oligonucleotide
agcuuuagaacgacugcua

SEQ ID NO: 2839969 - RNA, 19 nt, Artificial Sequence
  Description of Artificial Sequence: Synthetic oligonucleotide
uagguuugucuaacaccuu

SEQ ID NO: 2839970 - RNA, 19 nt, Artificial Sequence
  Description of Artificial Sequence: Synthetic oligonucleotide
agaaacugcugaagaacuu

SEQ ID NO: 2839971 - RNA, 19 nt, Artificial Sequence
  Description of Artificial Sequence: Synthetic oligonucleotide
ugccaucuguuguguuuga

SEQ ID NO: 2839972 - RNA, 19 nt, Artificial Sequence
  Description of Artificial Sequence: Synthetic oligonucleotide
guucuucaacacaucgcuc

SEQ ID NO: 2839973 - RNA, 19 nt, Artificial Sequence
  Description of Artificial Sequence: Synthetic oligonucleotide
aaaucucagucaaguuauu

SEQ ID NO: 2839974 - RNA, 19 nt, Artificial Sequence
  Description of Artificial Sequence: Synthetic oligonucleotide
ucaacacaucgcucaccua

SEQ ID NO: 2839975 - RNA, 19 nt, Artificial Sequence
  Description of Artificial Sequence: Synthetic oligonucleotide
guuugacucugguucuucu

SEQ ID NO: 2839976 - RNA, 19 nt, Artificial Sequence
  Description of Artificial Sequence: Synthetic oligonucleotide
ccggcuuuucauuagccca

SEQ ID NO: 2839977 - RNA, 19 nt, Artificial Sequence
  Description of Artificial Sequence: Synthetic oligonucleotide
ggugccauggaucccgucu

SEQ ID NO: 2839978 - RNA, 19 nt, Artificial Sequence
  Description of Artificial Sequence: Synthetic oligonucleotide
gcaauagcuuuagaacgac

SEQ ID NO: 2839979 - RNA, 19 nt, Artificial Sequence
  Description of Artificial Sequence: Synthetic oligonucleotide
caaacucggaaaucucagu

SEQ ID NO: 2839980 - RNA, 19 nt, Artificial Sequence
  Description of Artificial Sequence: Synthetic oligonucleotide
cagucuugucgguaaaccu

SEQ ID NO: 2839981 - RNA, 19 nt, Artificial Sequence
  Description of Artificial Sequence: Synthetic oligonucleotide
caguuagcuggcuagguuu

SEQ ID NO: 2839982 - RNA, 19 nt, Artificial Sequence
  Description of Artificial Sequence: Synthetic oligonucleotide
uugcagccucagcaaguuc

SEQ ID NO: 2839983 - RNA, 19 nt, Artificial Sequence
  Description of Artificial Sequence: Synthetic oligonucleotide
cuucuccggcuuuucauua

SEQ ID NO: 2839984 - RNA, 19 nt, Artificial Sequence
  Description of Artificial Sequence: Synthetic oligonucleotide
ggaucccgucucaaacucg

SEQ ID NO: 2839985 - RNA, 19 nt, Artificial Sequence
  Description of Artificial Sequence: Synthetic oligonucleotide
gcaaguuccuucucaguua

SEQ ID NO: 2839986 - RNA, 19 nt, Artificial Sequence
  Description of Artificial Sequence: Synthetic oligonucleotide
caauagcuuuagaacgacu

SEQ ID NO: 2839987 - RNA, 19 nt, Artificial Sequence
  Description of Artificial Sequence: Synthetic oligonucleotide
cucaccuauuucguguaaa

SEQ ID NO: 2839988 - RNA, 19 nt, Artificial Sequence
  Description of Artificial Sequence: Synthetic oligonucleotide
cugguucuucugucugguc

SEQ ID NO: 2839989 - RNA, 19 nt, Artificial Sequence
  Description of Artificial Sequence: Synthetic oligonucleotide
cuucucaguuagcuggcua

SEQ ID NO: 2839990 - RNA, 19 nt, Artificial Sequence
  Description of Artificial Sequence: Synthetic oligonucleotide
auuagcccacuugcuugca

SEQ ID NO: 2839991 - RNA, 19 nt, Artificial Sequence
  Description of Artificial Sequence: Synthetic oligonucleotide
cuggcugucuucauacaau

SEQ ID NO: 2839992 - RNA, 19 nt, Artificial Sequence
  Description of Artificial Sequence: Synthetic oligonucleotide
ccucaaugcaaacuguaua

SEQ ID NO: 2839993 - RNA, 19 nt, Artificial Sequence
  Description of Artificial Sequence: Synthetic oligonucleotide
caucgcucaccuauuucgu

SEQ ID NO: 2839994 - RNA, 19 nt, Artificial Sequence
  Description of Artificial Sequence: Synthetic oligonucleotide
gacugcuaaucuggcuguc

SEQ ID NO: 2839995 - RNA, 19 nt, Artificial Sequence
  Description of Artificial Sequence: Synthetic oligonucleotide
ucucccuucuccggcuuuu

SEQ ID NO: 2839996 - RNA, 19 nt, Artificial Sequence
  Description of Artificial Sequence: Synthetic oligonucleotide
uucuucugucuggucgaua

SEQ ID NO: 2839997 - RNA, 19 nt, Artificial Sequence
  Description of Artificial Sequence: Synthetic oligonucleotide
caauucugugccaucuguu

SEQ ID NO: 2839998 - RNA, 19 nt, Artificial Sequence
  Description of Artificial Sequence: Synthetic oligonucleotide
cggcuuuucauuagcccac

SEQ ID NO: 2839999 - RNA, 19 nt, Artificial Sequence
  Description of Artificial Sequence: Synthetic oligonucleotide
gcuggcuagguuugucuaa

SEQ ID NO: 2840000 - RNA, 19 nt, Artificial Sequence
  Description of Artificial Sequence: Synthetic oligonucleotide
cuucugucuggucgauaaa

SEQ ID NO: 2840001 - RNA, 19 nt, Artificial Sequence
  Description of Artificial Sequence: Synthetic oligonucleotide
cccgucucaaacucggaaa

SEQ ID NO: 2840002 - RNA, 19 nt, Artificial Sequence
  Description of Artificial Sequence: Synthetic oligonucleotide
ccaucuguuguguuugacu

SEQ ID NO: 2840003 - RNA, 19 nt, Artificial Sequence
  Description of Artificial Sequence: Synthetic oligonucleotide
guguaaauucugccucaau

SEQ ID NO: 2840004 - RNA, 19 nt, Artificial Sequence
  Description of Artificial Sequence: Synthetic oligonucleotide
cacuugcuugcagccucag

SEQ ID NO: 2840005 - RNA, 19 nt, Artificial Sequence
  Description of Artificial Sequence: Synthetic oligonucleotide
cugccucaaugcaaacugu

SEQ ID NO: 2840006 - RNA, 19 nt, Artificial Sequence
  Description of Artificial Sequence: Synthetic oligonucleotide
cucaguuagcuggcuaggu

SEQ ID NO: 2840007 - RNA, 19 nt, Artificial Sequence
  Description of Artificial Sequence: Synthetic oligonucleotide
augaaauguuugaguucuu

SEQ ID NO: 2840008 - RNA, 19 nt, Artificial Sequence
  Description of Artificial Sequence: Synthetic oligonucleotide
cugcuaaucuggcugucuu

SEQ ID NO: 2840009 - RNA, 19 nt, Artificial Sequence
  Description of Artificial Sequence: Synthetic oligonucleotide
cagcaaguuccuucucagu

SEQ ID NO: 2840010 - RNA, 19 nt, Artificial Sequence
  Description of Artificial Sequence: Synthetic oligonucleotide
gccaucuguuguguuugac

SEQ ID NO: 2840011 - RNA, 19 nt, Artificial Sequence
  Description of Artificial Sequence: Synthetic oligonucleotide
cuugcagccucagcaaguu

SEQ ID NO: 2840012 - RNA, 19 nt, Artificial Sequence
  Description of Artificial Sequence: Synthetic oligonucleotide
aucccgucucaaacucgga

SEQ ID NO: 2840013 - RNA, 19 nt, Artificial Sequence
  Description of Artificial Sequence: Synthetic oligonucleotide
guuagcuggcuagguuugu

SEQ ID NO: 2840014 - RNA, 19 nt, Artificial Sequence
  Description of Artificial Sequence: Synthetic oligonucleotide
caccuauuucguguaaauu

SEQ ID NO: 2840015 - RNA, 19 nt, Artificial Sequence
  Description of Artificial Sequence: Synthetic oligonucleotide
gucgguaaaccugcucaau

SEQ ID NO: 2840016 - RNA, 19 nt, Artificial Sequence
  Description of Artificial Sequence: Synthetic oligonucleotide
cgauaaauaagggugccau

SEQ ID NO: 2840017 - RNA, 19 nt, Artificial Sequence
  Description of Artificial Sequence: Synthetic oligonucleotide
gcucaccuauuucguguaa

SEQ ID NO: 2840018 - RNA, 19 nt, Artificial Sequence
  Description of Artificial Sequence: Synthetic oligonucleotide
ccauggaucccgucucaaa

SEQ ID NO: 2840019 - RNA, 19 nt, Artificial Sequence
  Description of Artificial Sequence: Synthetic oligonucleotide
gucuaacaccuuggaugaa

SEQ ID NO: 2840020 - RNA, 19 nt, Artificial Sequence
  Description of Artificial Sequence: Synthetic oligonucleotide
ccgaaaguuucacagucuu

SEQ ID NO: 2840021 - RNA, 19 nt, Artificial Sequence
  Description of Artificial Sequence: Synthetic oligonucleotide
cgucucaaacucggaaauc

SEQ ID NO: 2840022 - RNA, 19 nt, Artificial Sequence
  Description of Artificial Sequence: Synthetic oligonucleotide
gccucaaugcaaacuguau

SEQ ID NO: 2840023 - RNA, 19 nt, Artificial Sequence
  Description of Artificial Sequence: Synthetic oligonucleotide
gcuugcagccucagcaagu

SEQ ID NO: 2840024 - RNA, 19 nt, Artificial Sequence
  Description of Artificial Sequence: Synthetic oligonucleotide
agggugccauggaucccgu

SEQ ID NO: 2840025 - RNA, 19 nt, Artificial Sequence
  Description of Artificial Sequence: Synthetic oligonucleotide
cccgaaaguuucacagucu

SEQ ID NO: 2840026 - RNA, 19 nt, Artificial Sequence
  Description of Artificial Sequence: Synthetic oligonucleotide
ccgucucaaacucggaaau

SEQ ID NO: 2840027 - RNA, 19 nt, Artificial Sequence
  Description of Artificial Sequence: Synthetic oligonucleotide
ccugcucaauuucuuuggu

SEQ ID NO: 2840028 - RNA, 19 nt, Artificial Sequence
  Description of Artificial Sequence: Synthetic oligonucleotide
ccacuugcuugcagccuca

SEQ ID NO: 2840029 - RNA, 19 nt, Artificial Sequence
  Description of Artificial Sequence: Synthetic oligonucleotide
ccaaaaucuugaguagaau

SEQ ID NO: 2840030 - RNA, 19 nt, Artificial Sequence
  Description of Artificial Sequence: Synthetic oligonucleotide
guucuucugucuggucgau

SEQ ID NO: 2840031 - RNA, 19 nt, Artificial Sequence
  Description of Artificial Sequence: Synthetic oligonucleotide
ggcuuuucauuagcccacu

SEQ ID NO: 2840032 - RNA, 19 nt, Artificial Sequence
  Description of Artificial Sequence: Synthetic oligonucleotide
ccuucuccggcuuuucauu

SEQ ID NO: 2840033 - RNA, 19 nt, Artificial Sequence
  Description of Artificial Sequence: Synthetic oligonucleotide
guguuugacucugguucuu

SEQ ID NO: 2840034 - RNA, 19 nt, Artificial Sequence
  Description of Artificial Sequence: Synthetic oligonucleotide
cgguaaaccugcucaauuu

SEQ ID NO: 2840035 - RNA, 19 nt, Artificial Sequence
  Description of Artificial Sequence: Synthetic oligonucleotide
gcagccucagcaaguuccu

SEQ ID NO: 2840036 - RNA, 19 nt, Artificial Sequence
  Description of Artificial Sequence: Synthetic oligonucleotide
gccauggaucccgucucaa

SEQ ID NO: 2840037 - RNA, 19 nt, Artificial Sequence
  Description of Artificial Sequence: Synthetic oligonucleotide
cccuucuccggcuuuucau

SEQ ID NO: 2840038 - RNA, 19 nt, Artificial Sequence
  Description of Artificial Sequence: Synthetic oligonucleotide
gcuuuucauuagcccacuu

SEQ ID NO: 2840039 - RNA, 19 nt, Artificial Sequence
  Description of Artificial Sequence: Synthetic oligonucleotide
cguguaaauucugccucaa

SEQ ID NO: 2840040 - RNA, 19 nt, Artificial Sequence
  Description of Artificial Sequence: Synthetic oligonucleotide
cugugccaucuguuguguu

SEQ ID NO: 2840041 - RNA, 19 nt, Artificial Sequence
  Description of Artificial Sequence: Synthetic oligonucleotide
cgacugcuaaucuggcugu

SEQ ID NO: 2840042 - RNA, 19 nt, Artificial Sequence
  Description of Artificial Sequence: Synthetic oligonucleotide
cgcucaccuauuucgugua

SEQ ID NO: 2840043 - RNA, 19 nt, Artificial Sequence
  Description of Artificial Sequence: Synthetic oligonucleotide
caucucccuucuccggcuu

SEQ ID NO: 2840044 - RNA, 19 nt, Artificial Sequence
  Description of Artificial Sequence: Synthetic oligonucleotide
cggaaaucucagucaaguu

SEQ ID NO: 2840045 - RNA, 19 nt, Artificial Sequence
  Description of Artificial Sequence: Synthetic oligonucleotide
gcccacuugcuugcagccu

SEQ ID NO: 2840046 - RNA, 19 nt, Artificial Sequence
  Description of Artificial Sequence: Synthetic oligonucleotide
ccuucucaguuagcuggcu

SEQ ID NO: 2840047 - RNA, 19 nt, Artificial Sequence
  Description of Artificial Sequence: Synthetic oligonucleotide
cagccucagcaaguuccuu

SEQ ID NO: 2840048 - RNA, 19 nt, Artificial Sequence
  Description of Artificial Sequence: Synthetic oligonucleotide
aagaacauaguauuuucac

SEQ ID NO: 2840049 - RNA, 19 nt, Artificial Sequence
  Description of Artificial Sequence: Synthetic oligonucleotide
uuggaaacgauauaaaggc

SEQ ID NO: 2840050 - RNA, 19 nt, Artificial Sequence
  Description of Artificial Sequence: Synthetic oligonucleotide
aaacaugcggaucugguac

SEQ ID NO: 2840051 - RNA, 19 nt, Artificial Sequence
  Description of Artificial Sequence: Synthetic oligonucleotide
uguaagaaaccccauaacc

SEQ ID NO: 2840052 - RNA, 19 nt, Artificial Sequence
  Description of Artificial Sequence: Synthetic oligonucleotide
cuuggaaacgauauaaagg

SEQ ID NO: 2840053 - RNA, 19 nt, Artificial Sequence
  Description of Artificial Sequence: Synthetic oligonucleotide
augauuaggguacugauuc

SEQ ID NO: 2840054 - RNA, 19 nt, Artificial Sequence
  Description of Artificial Sequence: Synthetic oligonucleotide
gaacuugagaacuugcugg

SEQ ID NO: 2840055 - RNA, 19 nt, Artificial Sequence
  Description of Artificial Sequence: Synthetic oligonucleotide
agaacauaguauuuucacc

SEQ ID NO: 2840056 - RNA, 19 nt, Artificial Sequence
  Description of Artificial Sequence: Synthetic oligonucleotide
agagcuaaccccuaaguac

SEQ ID NO: 2840057 - RNA, 19 nt, Artificial Sequence
  Description of Artificial Sequence: Synthetic oligonucleotide
gaaaagaucagcgaugucc

SEQ ID NO: 2840058 - RNA, 19 nt, Artificial Sequence
  Description of Artificial Sequence: Synthetic oligonucleotide
gauauaaaggcagaagagg

SEQ ID NO: 2840059 - RNA, 19 nt, Artificial Sequence
  Description of Artificial Sequence: Synthetic oligonucleotide
aguauuuucaccugcgauc

SEQ ID NO: 2840060 - RNA, 19 nt, Artificial Sequence
  Description of Artificial Sequence: Synthetic oligonucleotide
aacuuugaaaagaucagcg

SEQ ID NO: 2840061 - RNA, 19 nt, Artificial Sequence
  Description of Artificial Sequence: Synthetic oligonucleotide
auucggaucaaacaugcgg

SEQ ID NO: 2840062 - RNA, 19 nt, Artificial Sequence
  Description of Artificial Sequence: Synthetic oligonucleotide
aaaagaucagcgauguccg

SEQ ID NO: 2840063 - RNA, 19 nt, Artificial Sequence
  Description of Artificial Sequence: Synthetic oligonucleotide
accaucaucugccacaggg

SEQ ID NO: 2840064 - RNA, 19 nt, Artificial Sequence
  Description of Artificial Sequence: Synthetic oligonucleotide
acauaguauuuucaccugc

SEQ ID NO: 2840065 - RNA, 19 nt, Artificial Sequence
  Description of Artificial Sequence: Synthetic oligonucleotide
acuuggaaacgauauaaag

SEQ ID NO: 2840066 - RNA, 19 nt, Artificial Sequence
  Description of Artificial Sequence: Synthetic oligonucleotide
acgauauaaaggcagaaga

SEQ ID NO: 2840067 - RNA, 19 nt, Artificial Sequence
  Description of Artificial Sequence: Synthetic oligonucleotide
aggaaaggagagcuaaccc

SEQ ID NO: 2840068 - RNA, 19 nt, Artificial Sequence
  Description of Artificial Sequence: Synthetic oligonucleotide
ugauucggaucaaacaugc

SEQ ID NO: 2840069 - RNA, 19 nt, Artificial Sequence
  Description of Artificial Sequence: Synthetic oligonucleotide
ucaccugcgaucauguaag

SEQ ID NO: 2840070 - RNA, 19 nt, Artificial Sequence
  Description of Artificial Sequence: Synthetic oligonucleotide
cuaugaacuggccacaggc

SEQ ID NO: 2840071 - RNA, 19 nt, Artificial Sequence
  Description of Artificial Sequence: Synthetic oligonucleotide
gaacuugcuggaaacaugg

SEQ ID NO: 2840072 - RNA, 19 nt, Artificial Sequence
  Description of Artificial Sequence: Synthetic oligonucleotide
acugauucggaucaaacau

SEQ ID NO: 2840073 - RNA, 19 nt, Artificial Sequence
  Description of Artificial Sequence: Synthetic oligonucleotide
uucggaucaaacaugcgga

SEQ ID NO: 2840074 - RNA, 19 nt, Artificial Sequence
  Description of Artificial Sequence: Synthetic oligonucleotide
cauaguauuuucaccugcg

SEQ ID NO: 2840075 - RNA, 19 nt, Artificial Sequence
  Description of Artificial Sequence: Synthetic oligonucleotide
aacgauauaaaggcagaag

SEQ ID NO: 2840076 - RNA, 19 nt, Artificial Sequence
  Description of Artificial Sequence: Synthetic oligonucleotide
aacauggaagaacauagua

SEQ ID NO: 2840077 - RNA, 19 nt, Artificial Sequence
  Description of Artificial Sequence: Synthetic oligonucleotide
uucugcaaguaccucagcc

SEQ ID NO: 2840078 - RNA, 19 nt, Artificial Sequence
  Description of Artificial Sequence: Synthetic oligonucleotide
aacauaguauuuucaccug

SEQ ID NO: 2840079 - RNA, 19 nt, Artificial Sequence
  Description of Artificial Sequence: Synthetic oligonucleotide
auaaccaucaucugccaca

SEQ ID NO: 2840080 - RNA, 19 nt, Artificial Sequence
  Description of Artificial Sequence: Synthetic oligonucleotide
gaacauaguauuuucaccu

SEQ ID NO: 2840081 - RNA, 19 nt, Artificial Sequence
  Description of Artificial Sequence: Synthetic oligonucleotide
aagaucagcgauguccgac

SEQ ID NO: 2840082 - RNA, 19 nt, Artificial Sequence
  Description of Artificial Sequence: Synthetic oligonucleotide
aaaccccauaaccaucauc

SEQ ID NO: 2840083 - RNA, 19 nt, Artificial Sequence
  Description of Artificial Sequence: Synthetic oligonucleotide
gauuaggguacugauucgg

SEQ ID NO: 2840084 - RNA, 19 nt, Artificial Sequence
  Description of Artificial Sequence: Synthetic oligonucleotide
gauaugguuuccaaagcgc

SEQ ID NO: 2840085 - RNA, 19 nt, Artificial Sequence
  Description of Artificial Sequence: Synthetic oligonucleotide
cuuacugccuaugaacugg

SEQ ID NO: 2840086 - RNA, 19 nt, Artificial Sequence
  Description of Artificial Sequence: Synthetic oligonucleotide
uguccgacagugcuuggcg

SEQ ID NO: 2840087 - RNA, 19 nt, Artificial Sequence
  Description of Artificial Sequence: Synthetic oligonucleotide
aaguaccucagccaggaaa

SEQ ID NO: 2840088 - RNA, 19 nt, Artificial Sequence
  Description of Artificial Sequence: Synthetic oligonucleotide
ucagcgauguccgacagug

SEQ ID NO: 2840089 - RNA, 19 nt, Artificial Sequence
  Description of Artificial Sequence: Synthetic oligonucleotide
uacugauucggaucaaaca

SEQ ID NO: 2840090 - RNA, 19 nt, Artificial Sequence
  Description of Artificial Sequence: Synthetic oligonucleotide
aacuugagaacuugcugga

SEQ ID NO: 2840091 - RNA, 19 nt, Artificial Sequence
  Description of Artificial Sequence: Synthetic oligonucleotide
ucugcaaguaccucagcca

SEQ ID NO: 2840092 - RNA, 19 nt, Artificial Sequence
  Description of Artificial Sequence: Synthetic oligonucleotide
ucgucucagaacuugagaa

SEQ ID NO: 2840093 - RNA, 19 nt, Artificial Sequence
  Description of Artificial Sequence: Synthetic oligonucleotide
ggauaugguuuccaaagcg

SEQ ID NO: 2840094 - RNA, 19 nt, Artificial Sequence
  Description of Artificial Sequence: Synthetic oligonucleotide
ucagaacuugagaacuugc

SEQ ID NO: 2840095 - RNA, 19 nt, Artificial Sequence
  Description of Artificial Sequence: Synthetic oligonucleotide
cuaaccccuaaguacuugg

SEQ ID NO: 2840096 - RNA, 19 nt, Artificial Sequence
  Description of Artificial Sequence: Synthetic oligonucleotide
gaacuuugaaaagaucagc

SEQ ID NO: 2840097 - RNA, 19 nt, Artificial Sequence
  Description of Artificial Sequence: Synthetic oligonucleotide
uucaccugcgaucauguaa

SEQ ID NO: 2840098 - RNA, 19 nt, Artificial Sequence
  Description of Artificial Sequence: Synthetic oligonucleotide
gaaucuggcuuguggagag

SEQ ID NO: 2840099 - RNA, 19 nt, Artificial Sequence
  Description of Artificial Sequence: Synthetic oligonucleotide
gaucauguaagaaacccca

SEQ ID NO: 2840100 - RNA, 19 nt, Artificial Sequence
  Description of Artificial Sequence: Synthetic oligonucleotide
ucaaacaugcggaucuggu

SEQ ID NO: 2840101 - RNA, 19 nt, Artificial Sequence
  Description of Artificial Sequence: Synthetic oligonucleotide
acuuugaaaagaucagcga

SEQ ID NO: 2840102 - RNA, 19 nt, Artificial Sequence
  Description of Artificial Sequence: Synthetic oligonucleotide
uucagaacugggcacgugu

SEQ ID NO: 2840103 - RNA, 19 nt, Artificial Sequence
  Description of Artificial Sequence: Synthetic oligonucleotide
uuuucaccugcgaucaugu

SEQ ID NO: 2840104 - RNA, 19 nt, Artificial Sequence
  Description of Artificial Sequence: Synthetic oligonucleotide
ugagcauucgucucagaac

SEQ ID NO: 2840105 - RNA, 19 nt, Artificial Sequence
  Description of Artificial Sequence: Synthetic oligonucleotide
uugagaacuugcuggaaac

SEQ ID NO: 2840106 - RNA, 19 nt, Artificial Sequence
  Description of Artificial Sequence: Synthetic oligonucleotide
uaugguuuccaaagcgcug

SEQ ID NO: 2840107 - RNA, 19 nt, Artificial Sequence
  Description of Artificial Sequence: Synthetic oligonucleotide
guaagaaaccccauaacca

SEQ ID NO: 2840108 - RNA, 19 nt, Artificial Sequence
  Description of Artificial Sequence: Synthetic oligonucleotide
ugauuaggguacugauucg

SEQ ID NO: 2840109 - RNA, 19 nt, Artificial Sequence
  Description of Artificial Sequence: Synthetic oligonucleotide
ggaaacgauauaaaggcag

SEQ ID NO: 2840110 - RNA, 19 nt, Artificial Sequence
  Description of Artificial Sequence: Synthetic oligonucleotide
aaguacuuggaaacgauau

SEQ ID NO: 2840111 - RNA, 19 nt, Artificial Sequence
  Description of Artificial Sequence: Synthetic oligonucleotide
aaagcgcugagcauucguc

SEQ ID NO: 2840112 - RNA, 19 nt, Artificial Sequence
  Description of Artificial Sequence: Synthetic oligonucleotide
cugcgaucauguaagaaac

SEQ ID NO: 2840113 - RNA, 19 nt, Artificial Sequence
  Description of Artificial Sequence: Synthetic oligonucleotide
guuuucagaacugggcacg

SEQ ID NO: 2840114 - RNA, 19 nt, Artificial Sequence
  Description of Artificial Sequence: Synthetic oligonucleotide
uaguauuuucaccugcgau

SEQ ID NO: 2840115 - RNA, 19 nt, Artificial Sequence
  Description of Artificial Sequence: Synthetic oligonucleotide
cuggaaacauggaagaaca

SEQ ID NO: 2840116 - RNA, 19 nt, Artificial Sequence
  Description of Artificial Sequence: Synthetic oligonucleotide
aguaccucagccaggaaag

SEQ ID NO: 2840117 - RNA, 19 nt, Artificial Sequence
  Description of Artificial Sequence: Synthetic oligonucleotide
uucgucucagaacuugaga

SEQ ID NO: 2840118 - RNA, 19 nt, Artificial Sequence
  Description of Artificial Sequence: Synthetic oligonucleotide
acaaaaggguagcuggucu

SEQ ID NO: 2840119 - RNA, 19 nt, Artificial Sequence
  Description of Artificial Sequence: Synthetic oligonucleotide
  modified_base (9)..(9): a, c, u, g, unknown or other
accagagcnguuuucagaa

SEQ ID NO: 2840120 - RNA, 19 nt, Artificial Sequence
  Description of Artificial Sequence: Synthetic oligonucleotide
caucaucugccacagggcc

SEQ ID NO: 2840121 - RNA, 19 nt, Artificial Sequence
  Description of Artificial Sequence: Synthetic oligonucleotide
ucauguaagaaaccccaua

SEQ ID NO: 2840122 - RNA, 19 nt, Artificial Sequence
  Description of Artificial Sequence: Synthetic oligonucleotide
uggaaacgauauaaaggca

SEQ ID NO: 2840123 - RNA, 19 nt, Artificial Sequence
  Description of Artificial Sequence: Synthetic oligonucleotide
aagaaaccccauaaccauc

SEQ ID NO: 2840124 - RNA, 19 nt, Artificial Sequence
  Description of Artificial Sequence: Synthetic oligonucleotide
ucagucuugggaacuuuga

SEQ ID NO: 2840125 - RNA, 19 nt, Artificial Sequence
  Description of Artificial Sequence: Synthetic oligonucleotide
uccagcacccagaugauua

SEQ ID NO: 2840126 - RNA, 19 nt, Artificial Sequence
  Description of Artificial Sequence: Synthetic oligonucleotide
aggguacugauucggauca

SEQ ID NO: 2840127 - RNA, 19 nt, Artificial Sequence
  Description of Artificial Sequence: Synthetic oligonucleotide
uacugaggaaucuggcuug

SEQ ID NO: 2840128 - RNA, 19 nt, Artificial Sequence
  Description of Artificial Sequence: Synthetic oligonucleotide
agucuugggaacuuugaaa

SEQ ID NO: 2840129 - RNA, 19 nt, Artificial Sequence
  Description of Artificial Sequence: Synthetic oligonucleotide
agaugauuaggguacugau

SEQ ID NO: 2840130 - RNA, 19 nt, Artificial Sequence
  Description of Artificial Sequence: Synthetic oligonucleotide
acugccuaugaacuggcca

SEQ ID NO: 2840131 - RNA, 19 nt, Artificial Sequence
  Description of Artificial Sequence: Synthetic oligonucleotide
cugauucggaucaaacaug

SEQ ID NO: 2840132 - RNA, 19 nt, Artificial Sequence
  Description of Artificial Sequence: Synthetic oligonucleotide
gcggauaugguuuccaaag

SEQ ID NO: 2840133 - RNA, 19 nt, Artificial Sequence
  Description of Artificial Sequence: Synthetic oligonucleotide
agcgauguccgacagugcu

SEQ ID NO: 2840134 - RNA, 19 nt, Artificial Sequence
  Description of Artificial Sequence: Synthetic oligonucleotide
cugccuaugaacuggccac

SEQ ID NO: 2840135 - RNA, 19 nt, Artificial Sequence
  Description of Artificial Sequence: Synthetic oligonucleotide
uaaguacuuggaaacgaua

SEQ ID NO: 2840136 - RNA, 19 nt, Artificial Sequence
  Description of Artificial Sequence: Synthetic oligonucleotide
aagcgcugagcauucgucu

SEQ ID NO: 2840137 - RNA, 19 nt, Artificial Sequence
  Description of Artificial Sequence: Synthetic oligonucleotide
ugcaaguaccucagccagg

SEQ ID NO: 2840138 - RNA, 19 nt, Artificial Sequence
  Description of Artificial Sequence: Synthetic oligonucleotide
uacuuggaaacgauauaaa

SEQ ID NO: 2840139 - RNA, 19 nt, Artificial Sequence
  Description of Artificial Sequence: Synthetic oligonucleotide
gagcauucgucucagaacu

SEQ ID NO: 2840140 - RNA, 19 nt, Artificial Sequence
  Description of Artificial Sequence: Synthetic oligonucleotide
auaguauuuucaccugcga

SEQ ID NO: 2840141 - RNA, 19 nt, Artificial Sequence
  Description of Artificial Sequence: Synthetic oligonucleotide
cagugcuuggcggauaugg

SEQ ID NO: 2840142 - RNA, 19 nt, Artificial Sequence
  Description of Artificial Sequence: Synthetic oligonucleotide
aacaugcggaucugguacu

SEQ ID NO: 2840143 - RNA, 19 nt, Artificial Sequence
  Description of Artificial Sequence: Synthetic oligonucleotide
agaggcuccaggguucugc

SEQ ID NO: 2840144 - RNA, 19 nt, Artificial Sequence
  Description of Artificial Sequence: Synthetic oligonucleotide
cacgccaccccuuacugcc

SEQ ID NO: 2840145 - RNA, 19 nt, Artificial Sequence
  Description of Artificial Sequence: Synthetic oligonucleotide
uaggguacugauucggauc

SEQ ID NO: 2840146 - RNA, 19 nt, Artificial Sequence
  Description of Artificial Sequence: Synthetic oligonucleotide
ugguacugaggaaucuggc

SEQ ID NO: 2840147 - RNA, 19 nt, Artificial Sequence
  Description of Artificial Sequence: Synthetic oligonucleotide
cugcaaguaccucagccag

SEQ ID NO: 2840148 - RNA, 19 nt, Artificial Sequence
  Description of Artificial Sequence: Synthetic oligonucleotide
gaagaacauaguauuuuca

SEQ ID NO: 2840149 - RNA, 19 nt, Artificial Sequence
  Description of Artificial Sequence: Synthetic oligonucleotide
ugcgaucauguaagaaacc

SEQ ID NO: 2840150 - RNA, 19 nt, Artificial Sequence
  Description of Artificial Sequence: Synthetic oligonucleotide
agcuuucagucuugggaac

SEQ ID NO: 2840151 - RNA, 19 nt, Artificial Sequence
  Description of Artificial Sequence: Synthetic oligonucleotide
uaaccaucaucugccacag

SEQ ID NO: 2840152 - RNA, 19 nt, Artificial Sequence
  Description of Artificial Sequence: Synthetic oligonucleotide
  modified_base (5)..(5): a, c, u, g, unknown or other
gagcnguuuucagaacugg

SEQ ID NO: 2840153 - RNA, 19 nt, Artificial Sequence
  Description of Artificial Sequence: Synthetic oligonucleotide
aaaggguagcuggucuuuc

SEQ ID NO: 2840154 - RNA, 19 nt, Artificial Sequence
  Description of Artificial Sequence: Synthetic oligonucleotide
  modified_base (4)..(4): a, c, u, g, unknown or other
agcnguuuucagaacuggg

SEQ ID NO: 2840155 - RNA, 19 nt, Artificial Sequence
  Description of Artificial Sequence: Synthetic oligonucleotide
uuacugccuaugaacuggc

SEQ ID NO: 2840156 - RNA, 19 nt, Artificial Sequence
  Description of Artificial Sequence: Synthetic oligonucleotide
ggaacuuugaaaagaucag

SEQ ID NO: 2840157 - RNA, 19 nt, Artificial Sequence
  Description of Artificial Sequence: Synthetic oligonucleotide
gaaacgauauaaaggcaga

SEQ ID NO: 2840158 - RNA, 19 nt, Artificial Sequence
  Description of Artificial Sequence: Synthetic oligonucleotide
uggaagaacauaguauuuu

SEQ ID NO: 2840159 - RNA, 19 nt, Artificial Sequence
  Description of Artificial Sequence: Synthetic oligonucleotide
auuuucaccugcgaucaug

SEQ ID NO: 2840160 - RNA, 19 nt, Artificial Sequence
  Description of Artificial Sequence: Synthetic oligonucleotide
aaccccuaaguacuuggaa

SEQ ID NO: 2840161 - RNA, 19 nt, Artificial Sequence
  Description of Artificial Sequence: Synthetic oligonucleotide
aaacgauauaaaggcagaa

SEQ ID NO: 2840162 - RNA, 19 nt, Artificial Sequence
  Description of Artificial Sequence: Synthetic oligonucleotide
acauggaagaacauaguau

SEQ ID NO: 2840163 - RNA, 19 nt, Artificial Sequence
  Description of Artificial Sequence: Synthetic oligonucleotide
guacuuggaaacgauauaa

SEQ ID NO: 2840164 - RNA, 19 nt, Artificial Sequence
  Description of Artificial Sequence: Synthetic oligonucleotide
uguggagaggcuccagggu

SEQ ID NO: 2840165 - RNA, 19 nt, Artificial Sequence
  Description of Artificial Sequence: Synthetic oligonucleotide
  modified_base (2)..(2): a, c, u, g, unknown or other
cnguuuucagaacugggca

SEQ ID NO: 2840166 - RNA, 19 nt, Artificial Sequence
  Description of Artificial Sequence: Synthetic oligonucleotide
aacugggcacgugugcacg

SEQ ID NO: 2840167 - RNA, 19 nt, Artificial Sequence
  Description of Artificial Sequence: Synthetic oligonucleotide
uuaggguacugauucggau

SEQ ID NO: 2840168 - RNA, 19 nt, Artificial Sequence
  Description of Artificial Sequence: Synthetic oligonucleotide
agaucagcgauguccgaca

SEQ ID NO: 2840169 - RNA, 19 nt, Artificial Sequence
  Description of Artificial Sequence: Synthetic oligonucleotide
aaacauggaagaacauagu

SEQ ID NO: 2840170 - RNA, 19 nt, Artificial Sequence
  Description of Artificial Sequence: Synthetic oligonucleotide
ugcuuggcggauaugguuu

SEQ ID NO: 2840171 - RNA, 19 nt, Artificial Sequence
  Description of Artificial Sequence: Synthetic oligonucleotide
accccuaaguacuuggaaa

SEQ ID NO: 2840172 - RNA, 19 nt, Artificial Sequence
  Description of Artificial Sequence: Synthetic oligonucleotide
agcacccagaugauuaggg

SEQ ID NO: 2840173 - RNA, 19 nt, Artificial Sequence
  Description of Artificial Sequence: Synthetic oligonucleotide
aaggguagcuggucuuucu

SEQ ID NO: 2840174 - RNA, 19 nt, Artificial Sequence
  Description of Artificial Sequence: Synthetic oligonucleotide
auaugguuuccaaagcgcu

SEQ ID NO: 2840175 - RNA, 19 nt, Artificial Sequence
  Description of Artificial Sequence: Synthetic oligonucleotide
ugccugucgaucccggccc

SEQ ID NO: 2840176 - RNA, 19 nt, Artificial Sequence
  Description of Artificial Sequence: Synthetic oligonucleotide
cuugggaacuuugaaaaga

SEQ ID NO: 2840177 - RNA, 19 nt, Artificial Sequence
  Description of Artificial Sequence: Synthetic oligonucleotide
aggguagcuggucuuucuc

SEQ ID NO: 2840178 - RNA, 19 nt, Artificial Sequence
  Description of Artificial Sequence: Synthetic oligonucleotide
agaaaccccauaaccauca

SEQ ID NO: 2840179 - RNA, 19 nt, Artificial Sequence
  Description of Artificial Sequence: Synthetic oligonucleotide
aggagagcuaaccccuaag

SEQ ID NO: 2840180 - RNA, 19 nt, Artificial Sequence
  Description of Artificial Sequence: Synthetic oligonucleotide
uaaccccuaaguacuugga

SEQ ID NO: 2840181 - RNA, 19 nt, Artificial Sequence
  Description of Artificial Sequence: Synthetic oligonucleotide
augcggaucugguacugag

SEQ ID NO: 2840182 - RNA, 19 nt, Artificial Sequence
  Description of Artificial Sequence: Synthetic oligonucleotide
ugcacgccaccccuuacug

SEQ ID NO: 2840183 - RNA, 19 nt, Artificial Sequence
  Description of Artificial Sequence: Synthetic oligonucleotide
aaagaucagcgauguccga

SEQ ID NO: 2840184 - RNA, 19 nt, Artificial Sequence
  Description of Artificial Sequence: Synthetic oligonucleotide
aaggcagaagaggugccug

SEQ ID NO: 2840185 - RNA, 19 nt, Artificial Sequence
  Description of Artificial Sequence: Synthetic oligonucleotide
acugggcacgugugcacgc

SEQ ID NO: 2840186 - RNA, 19 nt, Artificial Sequence
  Description of Artificial Sequence: Synthetic oligonucleotide
cuuugaaaagaucagcgau

SEQ ID NO: 2840187 - RNA, 19 nt, Artificial Sequence
  Description of Artificial Sequence: Synthetic oligonucleotide
uccaggguucugcaaguac

SEQ ID NO: 2840188 - RNA, 19 nt, Artificial Sequence
  Description of Artificial Sequence: Synthetic oligonucleotide
cauggaagaacauaguauu

SEQ ID NO: 2840189 - RNA, 19 nt, Artificial Sequence
  Description of Artificial Sequence: Synthetic oligonucleotide
gauucggaucaaacaugcg

SEQ ID NO: 2840190 - RNA, 19 nt, Artificial Sequence
  Description of Artificial Sequence: Synthetic oligonucleotide
gaucagcgauguccgacag

SEQ ID NO: 2840191 - RNA, 19 nt, Artificial Sequence
  Description of Artificial Sequence: Synthetic oligonucleotide
cauaaccaucaucugccac

SEQ ID NO: 2840192 - RNA, 19 nt, Artificial Sequence
  Description of Artificial Sequence: Synthetic oligonucleotide
cgauauaaaggcagaagag

SEQ ID NO: 2840193 - RNA, 19 nt, Artificial Sequence
  Description of Artificial Sequence: Synthetic oligonucleotide
ucagccaggaaaggagagc

SEQ ID NO: 2840194 - RNA, 19 nt, Artificial Sequence
  Description of Artificial Sequence: Synthetic oligonucleotide
uccaaagcgcugagcauuc

SEQ ID NO: 2840195 - RNA, 19 nt, Artificial Sequence
  Description of Artificial Sequence: Synthetic oligonucleotide
gagagcuaaccccuaagua

SEQ ID NO: 2840196 - RNA, 19 nt, Artificial Sequence
  Description of Artificial Sequence: Synthetic oligonucleotide
ugggaacuuugaaaagauc

SEQ ID NO: 2840197 - RNA, 19 nt, Artificial Sequence
  Description of Artificial Sequence: Synthetic oligonucleotide
uucuccuguccucagcuuu

SEQ ID NO: 2840198 - RNA, 19 nt, Artificial Sequence
  Description of Artificial Sequence: Synthetic oligonucleotide
  modified_base (3)..(3): a, c, u, g, unknown or other
gcnguuuucagaacugggc

SEQ ID NO: 2840199 - RNA, 19 nt, Artificial Sequence
  Description of Artificial Sequence: Synthetic oligonucleotide
gaaaggagagcuaaccccu

SEQ ID NO: 2840200 - RNA, 19 nt, Artificial Sequence
  Description of Artificial Sequence: Synthetic oligonucleotide
gcgaucauguaagaaaccc

SEQ ID NO: 2840201 - RNA, 19 nt, Artificial Sequence
  Description of Artificial Sequence: Synthetic oligonucleotide
aaggagagcuaaccccuaa

SEQ ID NO: 2840202 - RNA, 19 nt, Artificial Sequence
  Description of Artificial Sequence: Synthetic oligonucleotide
uuccaaagcgcugagcauu

SEQ ID NO: 2840203 - RNA, 19 nt, Artificial Sequence
  Description of Artificial Sequence: Synthetic oligonucleotide
accucagccaggaaaggag

SEQ ID NO: 2840204 - RNA, 19 nt, Artificial Sequence
  Description of Artificial Sequence: Synthetic oligonucleotide
cucagaacuugagaacuug

SEQ ID NO: 2840205 - RNA, 19 nt, Artificial Sequence
  Description of Artificial Sequence: Synthetic oligonucleotide
uuuccaaagcgcugagcau

SEQ ID NO: 2840206 - RNA, 19 nt, Artificial Sequence
  Description of Artificial Sequence: Synthetic oligonucleotide
ggaucaaacaugcggaucu

SEQ ID NO: 2840207 - RNA, 19 nt, Artificial Sequence
  Description of Artificial Sequence: Synthetic oligonucleotide
aaaaggguagcuggucuuu

SEQ ID NO: 2840208 - RNA, 19 nt, Artificial Sequence
  Description of Artificial Sequence: Synthetic oligonucleotide
  modified_base (6)..(6): a, c, u, g, unknown or other
agagcnguuuucagaacug

SEQ ID NO: 2840209 - RNA, 19 nt, Artificial Sequence
  Description of Artificial Sequence: Synthetic oligonucleotide
ccaggguucugcaaguacc

SEQ ID NO: 2840210 - RNA, 19 nt, Artificial Sequence
  Description of Artificial Sequence: Synthetic oligonucleotide
cagaacugggcacgugugc

SEQ ID NO: 2840211 - RNA, 19 nt, Artificial Sequence
  Description of Artificial Sequence: Synthetic oligonucleotide
ugguuuccaaagcgcugag

SEQ ID NO: 2840212 - RNA, 19 nt, Artificial Sequence
  Description of Artificial Sequence: Synthetic oligonucleotide
guacugauucggaucaaac

SEQ ID NO: 2840213 - RNA, 19 nt, Artificial Sequence
  Description of Artificial Sequence: Synthetic oligonucleotide
gacaaaaggguagcugguc

SEQ ID NO: 2840214 - RNA, 19 nt, Artificial Sequence
  Description of Artificial Sequence: Synthetic oligonucleotide
  modified_base (10)..(10): a, c, u, g, unknown or other
caccagagcnguuuucaga

SEQ ID NO: 2840215 - RNA, 19 nt, Artificial Sequence
  Description of Artificial Sequence: Synthetic oligonucleotide
aaucuggcuuguggagagg

SEQ ID NO: 2840216 - RNA, 19 nt, Artificial Sequence
  Description of Artificial Sequence: Synthetic oligonucleotide
aucccggccccugucaugg

SEQ ID NO: 2840217 - RNA, 19 nt, Artificial Sequence
  Description of Artificial Sequence: Synthetic oligonucleotide
cugagcauucgucucagaa

SEQ ID NO: 2840218 - RNA, 19 nt, Artificial Sequence
  Description of Artificial Sequence: Synthetic oligonucleotide
auucgucucagaacuugag

SEQ ID NO: 2840219 - RNA, 19 nt, Artificial Sequence
  Description of Artificial Sequence: Synthetic oligonucleotide
aaccaucaucugccacagg

SEQ ID NO: 2840220 - RNA, 19 nt, Artificial Sequence
  Description of Artificial Sequence: Synthetic oligonucleotide
ucggaucaaacaugcggau

SEQ ID NO: 2840221 - RNA, 19 nt, Artificial Sequence
  Description of Artificial Sequence: Synthetic oligonucleotide
uuuucagaacugggcacgu

SEQ ID NO: 2840222 - RNA, 19 nt, Artificial Sequence
  Description of Artificial Sequence: Synthetic oligonucleotide
uaccucagccaggaaagga

SEQ ID NO: 2840223 - RNA, 19 nt, Artificial Sequence
  Description of Artificial Sequence: Synthetic oligonucleotide
gaucaaacaugcggaucug

SEQ ID NO: 2840224 - RNA, 19 nt, Artificial Sequence
  Description of Artificial Sequence: Synthetic oligonucleotide
gguucugcaaguaccucag

SEQ ID NO: 2840225 - RNA, 19 nt, Artificial Sequence
  Description of Artificial Sequence: Synthetic oligonucleotide
  modified_base (7)..(7): a, c, u, g, unknown or other
cagagcnguuuucagaacu

SEQ ID NO: 2840226 - RNA, 19 nt, Artificial Sequence
  Description of Artificial Sequence: Synthetic oligonucleotide
uacugccuaugaacuggcc

SEQ ID NO: 2840227 - RNA, 19 nt, Artificial Sequence
  Description of Artificial Sequence: Synthetic oligonucleotide
gugccugucgaucccggcc

SEQ ID NO: 2840228 - RNA, 19 nt, Artificial Sequence
  Description of Artificial Sequence: Synthetic oligonucleotide
gguggggacaaaaggguag

SEQ ID NO: 2840229 - RNA, 19 nt, Artificial Sequence
  Description of Artificial Sequence: Synthetic oligonucleotide
gauguccgacagugcuugg

SEQ ID NO: 2840230 - RNA, 19 nt, Artificial Sequence
  Description of Artificial Sequence: Synthetic oligonucleotide
gaacugggcacgugugcac

SEQ ID NO: 2840231 - RNA, 19 nt, Artificial Sequence
  Description of Artificial Sequence: Synthetic oligonucleotide
cauucgucucagaacuuga

SEQ ID NO: 2840232 - RNA, 19 nt, Artificial Sequence
  Description of Artificial Sequence: Synthetic oligonucleotide
ccccauaaccaucaucugc

SEQ ID NO: 2840233 - RNA, 19 nt, Artificial Sequence
  Description of Artificial Sequence: Synthetic oligonucleotide
gagcuaaccccuaaguacu

SEQ ID NO: 2840234 - RNA, 19 nt, Artificial Sequence
  Description of Artificial Sequence: Synthetic oligonucleotide
gucucagaacuugagaacu

SEQ ID NO: 2840235 - RNA, 19 nt, Artificial Sequence
  Description of Artificial Sequence: Synthetic oligonucleotide
cgaucauguaagaaacccc

SEQ ID NO: 2840236 - RNA, 19 nt, Artificial Sequence
  Description of Artificial Sequence: Synthetic oligonucleotide
ccugcgaucauguaagaaa

SEQ ID NO: 2840237 - RNA, 19 nt, Artificial Sequence
  Description of Artificial Sequence: Synthetic oligonucleotide
uuggcggauaugguuucca

SEQ ID NO: 2840238 - RNA, 19 nt, Artificial Sequence
  Description of Artificial Sequence: Synthetic oligonucleotide
ccccuuacugccuaugaac

SEQ ID NO: 2840239 - RNA, 19 nt, Artificial Sequence
  Description of Artificial Sequence: Synthetic oligonucleotide
ggguagcuggucuuucucc

SEQ ID NO: 2840240 - RNA, 19 nt, Artificial Sequence
  Description of Artificial Sequence: Synthetic oligonucleotide
guggggacaaaaggguagc

SEQ ID NO: 2840241 - RNA, 19 nt, Artificial Sequence
  Description of Artificial Sequence: Synthetic oligonucleotide
guacugaggaaucuggcuu

SEQ ID NO: 2840242 - RNA, 19 nt, Artificial Sequence
  Description of Artificial Sequence: Synthetic oligonucleotide
ggaaacauggaagaacaua

SEQ ID NO: 2840243 - RNA, 19 nt, Artificial Sequence
  Description of Artificial Sequence: Synthetic oligonucleotide
accccauaaccaucaucug

SEQ ID NO: 2840244 - RNA, 19 nt, Artificial Sequence
  Description of Artificial Sequence: Synthetic oligonucleotide
uuucagaacugggcacgug

SEQ ID NO: 2840245 - RNA, 19 nt, Artificial Sequence
  Description of Artificial Sequence: Synthetic oligonucleotide
caaacaugcggaucuggua

SEQ ID NO: 2840246 - RNA, 19 nt, Artificial Sequence
  Description of Artificial Sequence: Synthetic oligonucleotide
acgugugcacgccaccccu

SEQ ID NO: 2840247 - RNA, 19 nt, Artificial Sequence
  Description of Artificial Sequence: Synthetic oligonucleotide
ggguucugcaaguaccuca

SEQ ID NO: 2840248 - RNA, 19 nt, Artificial Sequence
  Description of Artificial Sequence: Synthetic oligonucleotide
gaggugccugucgaucccg

SEQ ID NO: 2840249 - RNA, 19 nt, Artificial Sequence
  Description of Artificial Sequence: Synthetic oligonucleotide
gcggaucugguacugagga

SEQ ID NO: 2840250 - RNA, 19 nt, Artificial Sequence
  Description of Artificial Sequence: Synthetic oligonucleotide
cacccagaugauuagggua

SEQ ID NO: 2840251 - RNA, 19 nt, Artificial Sequence
  Description of Artificial Sequence: Synthetic oligonucleotide
cagaacuugagaacuugcu

SEQ ID NO: 2840252 - RNA, 19 nt, Artificial Sequence
  Description of Artificial Sequence: Synthetic oligonucleotide
ccaucaucugccacagggc

SEQ ID NO: 2840253 - RNA, 19 nt, Artificial Sequence
  Description of Artificial Sequence: Synthetic oligonucleotide
ugugcacgccaccccuuac

SEQ ID NO: 2840254 - RNA, 19 nt, Artificial Sequence
  Description of Artificial Sequence: Synthetic oligonucleotide
aacuugcuggaaacaugga

SEQ ID NO: 2840255 - RNA, 19 nt, Artificial Sequence
  Description of Artificial Sequence: Synthetic oligonucleotide
ugccuaugaacuggccaca

SEQ ID NO: 2840256 - RNA, 19 nt, Artificial Sequence
  Description of Artificial Sequence: Synthetic oligonucleotide
uggcggauaugguuuccaa

SEQ ID NO: 2840257 - RNA, 19 nt, Artificial Sequence
  Description of Artificial Sequence: Synthetic oligonucleotide
cacgugugcacgccacccc

SEQ ID NO: 2840258 - RNA, 19 nt, Artificial Sequence
  Description of Artificial Sequence: Synthetic oligonucleotide
gaugauuaggguacugauu

SEQ ID NO: 2840259 - RNA, 19 nt, Artificial Sequence
  Description of Artificial Sequence: Synthetic oligonucleotide
accccuuacugccuaugaa

SEQ ID NO: 2840260 - RNA, 19 nt, Artificial Sequence
  Description of Artificial Sequence: Synthetic oligonucleotide
guaccucagccaggaaagg

SEQ ID NO: 2840261 - RNA, 19 nt, Artificial Sequence
  Description of Artificial Sequence: Synthetic oligonucleotide
uauuuucaccugcgaucau

SEQ ID NO: 2840262 - RNA, 19 nt, Artificial Sequence
  Description of Artificial Sequence: Synthetic oligonucleotide
auggaagaacauaguauuu

SEQ ID NO: 2840263 - RNA, 19 nt, Artificial Sequence
  Description of Artificial Sequence: Synthetic oligonucleotide
ugggcacgugugcacgcca

SEQ ID NO: 2840264 - RNA, 19 nt, Artificial Sequence
  Description of Artificial Sequence: Synthetic oligonucleotide
gguacugaggaaucuggcu

SEQ ID NO: 2840265 - RNA, 19 nt, Artificial Sequence
  Description of Artificial Sequence: Synthetic oligonucleotide
aucagcgauguccgacagu

SEQ ID NO: 2840266 - RNA, 19 nt, Artificial Sequence
  Description of Artificial Sequence: Synthetic oligonucleotide
aucugguacugaggaaucu

SEQ ID NO: 2840267 - RNA, 19 nt, Artificial Sequence
  Description of Artificial Sequence: Synthetic oligonucleotide
gcauucgucucagaacuug

SEQ ID NO: 2840268 - RNA, 19 nt, Artificial Sequence
  Description of Artificial Sequence: Synthetic oligonucleotide
gaucccggccccugucaug

SEQ ID NO: 2840269 - RNA, 19 nt, Artificial Sequence
  Description of Artificial Sequence: Synthetic oligonucleotide
agugcuuggcggauauggu

SEQ ID NO: 2840270 - RNA, 19 nt, Artificial Sequence
  Description of Artificial Sequence: Synthetic oligonucleotide
guucugcaaguaccucagc

SEQ ID NO: 2840271 - RNA, 19 nt, Artificial Sequence
  Description of Artificial Sequence: Synthetic oligonucleotide
ugucgaucccggccccugu

SEQ ID NO: 2840272 - RNA, 19 nt, Artificial Sequence
  Description of Artificial Sequence: Synthetic oligonucleotide
cagcacccagaugauuagg

SEQ ID NO: 2840273 - RNA, 19 nt, Artificial Sequence
  Description of Artificial Sequence: Synthetic oligonucleotide
ggggacaaaaggguagcug

SEQ ID NO: 2840274 - RNA, 19 nt, Artificial Sequence
  Description of Artificial Sequence: Synthetic oligonucleotide
cagucuugggaacuuugaa

SEQ ID NO: 2840275 - RNA, 19 nt, Artificial Sequence
  Description of Artificial Sequence: Synthetic oligonucleotide
cuuggcggauaugguuucc

SEQ ID NO: 2840276 - RNA, 19 nt, Artificial Sequence
  Description of Artificial Sequence: Synthetic oligonucleotide
uuucuccuguccucagcuu

SEQ ID NO: 2840277 - RNA, 19 nt, Artificial Sequence
  Description of Artificial Sequence: Synthetic oligonucleotide
acaugcggaucugguacug

SEQ ID NO: 2840278 - RNA, 19 nt, Artificial Sequence
  Description of Artificial Sequence: Synthetic oligonucleotide
aaaggagagcuaaccccua

SEQ ID NO: 2840279 - RNA, 19 nt, Artificial Sequence
  Description of Artificial Sequence: Synthetic oligonucleotide
ccuuacugccuaugaacug

SEQ ID NO: 2840280 - RNA, 19 nt, Artificial Sequence
  Description of Artificial Sequence: Synthetic oligonucleotide
uggggacaaaaggguagcu

SEQ ID NO: 2840281 - RNA, 19 nt, Artificial Sequence
  Description of Artificial Sequence: Synthetic oligonucleotide
cccuaaguacuuggaaacg

SEQ ID NO: 2840282 - RNA, 19 nt, Artificial Sequence
  Description of Artificial Sequence: Synthetic oligonucleotide
gcaaguaccucagccagga

SEQ ID NO: 2840283 - RNA, 19 nt, Artificial Sequence
  Description of Artificial Sequence: Synthetic oligonucleotide
uuucaccugcgaucaugua

SEQ ID NO: 2840284 - RNA, 19 nt, Artificial Sequence
  Description of Artificial Sequence: Synthetic oligonucleotide
cagguggggacaaaagggu

SEQ ID NO: 2840285 - RNA, 19 nt, Artificial Sequence
  Description of Artificial Sequence: Synthetic oligonucleotide
ggagcuccugccaccagag

SEQ ID NO: 2840286 - RNA, 19 nt, Artificial Sequence
  Description of Artificial Sequence: Synthetic oligonucleotide
ggagagcuaaccccuaagu

SEQ ID NO: 2840287 - RNA, 19 nt, Artificial Sequence
  Description of Artificial Sequence: Synthetic oligonucleotide
acuugagaacuugcuggaa

SEQ ID NO: 2840288 - RNA, 19 nt, Artificial Sequence
  Description of Artificial Sequence: Synthetic oligonucleotide
gacagugcuuggcggauau

SEQ ID NO: 2840289 - RNA, 19 nt, Artificial Sequence
  Description of Artificial Sequence: Synthetic oligonucleotide
ccuaaguacuuggaaacga

SEQ ID NO: 2840290 - RNA, 19 nt, Artificial Sequence
  Description of Artificial Sequence: Synthetic oligonucleotide
cggauaugguuuccaaagc

SEQ ID NO: 2840291 - RNA, 19 nt, Artificial Sequence
  Description of Artificial Sequence: Synthetic oligonucleotide
cagcgauguccgacagugc

SEQ ID NO: 2840292 - RNA, 19 nt, Artificial Sequence
  Description of Artificial Sequence: Synthetic oligonucleotide
accugcgaucauguaagaa

SEQ ID NO: 2840293 - RNA, 19 nt, Artificial Sequence
  Description of Artificial Sequence: Synthetic oligonucleotide
ccagcacccagaugauuag

SEQ ID NO: 2840294 - RNA, 19 nt, Artificial Sequence
  Description of Artificial Sequence: Synthetic oligonucleotide
ggaucugguacugaggaau

SEQ ID NO: 2840295 - RNA, 19 nt, Artificial Sequence
  Description of Artificial Sequence: Synthetic oligonucleotide
caggguucugcaaguaccu

SEQ ID NO: 2840296 - RNA, 19 nt, Artificial Sequence
  Description of Artificial Sequence: Synthetic oligonucleotide
gguuuccaaagcgcugagc

SEQ ID NO: 2840297 - RNA, 19 nt, Artificial Sequence
  Description of Artificial Sequence: Synthetic oligonucleotide
ggcggauaugguuuccaaa

SEQ ID NO: 2840298 - RNA, 19 nt, Artificial Sequence
  Description of Artificial Sequence: Synthetic oligonucleotide
ccaggaaaggagagcuaac

SEQ ID NO: 2840299 - RNA, 19 nt, Artificial Sequence
  Description of Artificial Sequence: Synthetic oligonucleotide
  modified_base (11)..(11): a, c, u, g, unknown or other
ccaccagagcnguuuucag

SEQ ID NO: 2840300 - RNA, 19 nt, Artificial Sequence
  Description of Artificial Sequence: Synthetic oligonucleotide
caccccuuacugccuauga

SEQ ID NO: 2840301 - RNA, 19 nt, Artificial Sequence
  Description of Artificial Sequence: Synthetic oligonucleotide
ggucuuucuccuguccuca

SEQ ID NO: 2840302 - RNA, 19 nt, Artificial Sequence
  Description of Artificial Sequence: Synthetic oligonucleotide
cugggcacgugugcacgcc

SEQ ID NO: 2840303 - RNA, 19 nt, Artificial Sequence
  Description of Artificial Sequence: Synthetic oligonucleotide
gccaggaaaggagagcuaa

SEQ ID NO: 2840304 - RNA, 19 nt, Artificial Sequence
  Description of Artificial Sequence: Synthetic oligonucleotide
gguacugauucggaucaaa

SEQ ID NO: 2840305 - RNA, 19 nt, Artificial Sequence
  Description of Artificial Sequence: Synthetic oligonucleotide
gcuaaccccuaaguacuug

SEQ ID NO: 2840306 - RNA, 19 nt, Artificial Sequence
  Description of Artificial Sequence: Synthetic oligonucleotide
gggccaaagccaccuccag

SEQ ID NO: 2840307 - RNA, 19 nt, Artificial Sequence
  Description of Artificial Sequence: Synthetic oligonucleotide
caaagcgcugagcauucgu

SEQ ID NO: 2840308 - RNA, 19 nt, Artificial Sequence
  Description of Artificial Sequence: Synthetic oligonucleotide
caaaaggguagcuggucuu

SEQ ID NO: 2840309 - RNA, 19 nt, Artificial Sequence
  Description of Artificial Sequence: Synthetic oligonucleotide
aggugccugucgaucccgg

SEQ ID NO: 2840310 - RNA, 19 nt, Artificial Sequence
  Description of Artificial Sequence: Synthetic oligonucleotide
gggagcuccugccaccaga

SEQ ID NO: 2840311 - RNA, 19 nt, Artificial Sequence
  Description of Artificial Sequence: Synthetic oligonucleotide
agguggggacaaaagggua

SEQ ID NO: 2840312 - RNA, 19 nt, Artificial Sequence
  Description of Artificial Sequence: Synthetic oligonucleotide
ggugccugucgaucccggc

SEQ ID NO: 2840313 - RNA, 19 nt, Artificial Sequence
  Description of Artificial Sequence: Synthetic oligonucleotide
gugcuuggcggauaugguu

SEQ ID NO: 2840314 - RNA, 19 nt, Artificial Sequence
  Description of Artificial Sequence: Synthetic oligonucleotide
gcacgugugcacgccaccc

SEQ ID NO: 2840315 - RNA, 19 nt, Artificial Sequence
  Description of Artificial Sequence: Synthetic oligonucleotide
gcuuggcggauaugguuuc

SEQ ID NO: 2840316 - RNA, 19 nt, Artificial Sequence
  Description of Artificial Sequence: Synthetic oligonucleotide
  modified_base (8)..(8): a, c, u, g, unknown or other
ccagagcnguuuucagaac

SEQ ID NO: 2840317 - RNA, 19 nt, Artificial Sequence
  Description of Artificial Sequence: Synthetic oligonucleotide
ggcacgugugcacgccacc

SEQ ID NO: 2840318 - RNA, 19 nt, Artificial Sequence
  Description of Artificial Sequence: Synthetic oligonucleotide
gaacuggccacaggccucu

SEQ ID NO: 2840319 - RNA, 19 nt, Artificial Sequence
  Description of Artificial Sequence: Synthetic oligonucleotide
cugucgaucccggccccug

SEQ ID NO: 2840320 - RNA, 19 nt, Artificial Sequence
  Description of Artificial Sequence: Synthetic oligonucleotide
cgauguccgacagugcuug

SEQ ID NO: 2840321 - RNA, 19 nt, Artificial Sequence
  Description of Artificial Sequence: Synthetic oligonucleotide
gcacgccaccccuuacugc

SEQ ID NO: 2840322 - RNA, 19 nt, Artificial Sequence
  Description of Artificial Sequence: Synthetic oligonucleotide
gaaaccccauaaccaucau

SEQ ID NO: 2840323 - RNA, 19 nt, Artificial Sequence
  Description of Artificial Sequence: Synthetic oligonucleotide
cccuuacugccuaugaacu

SEQ ID NO: 2840324 - RNA, 19 nt, Artificial Sequence
  Description of Artificial Sequence: Synthetic oligonucleotide
caugcggaucugguacuga

SEQ ID NO: 2840325 - RNA, 19 nt, Artificial Sequence
  Description of Artificial Sequence: Synthetic oligonucleotide
gugcacgccaccccuuacu

SEQ ID NO: 2840326 - RNA, 19 nt, Artificial Sequence
  Description of Artificial Sequence: Synthetic oligonucleotide
gugugcacgccaccccuua

SEQ ID NO: 2840327 - RNA, 19 nt, Artificial Sequence
  Description of Artificial Sequence: Synthetic oligonucleotide
ccagaugauuaggguacug

SEQ ID NO: 2840328 - RNA, 19 nt, Artificial Sequence
  Description of Artificial Sequence: Synthetic oligonucleotide
agcuaaccccuaaguacuu

SEQ ID NO: 2840329 - RNA, 19 nt, Artificial Sequence
  Description of Artificial Sequence: Synthetic oligonucleotide
ccaaagccaccuccagcac

SEQ ID NO: 2840330 - RNA, 19 nt, Artificial Sequence
  Description of Artificial Sequence: Synthetic oligonucleotide
uccaccagguggggacaaa

SEQ ID NO: 2840331 - RNA, 19 nt, Artificial Sequence
  Description of Artificial Sequence: Synthetic oligonucleotide
ccauaaccaucaucugcca

SEQ ID NO: 2840332 - RNA, 19 nt, Artificial Sequence
  Description of Artificial Sequence: Synthetic oligonucleotide
caccugcgaucauguaaga

SEQ ID NO: 2840333 - RNA, 19 nt, Artificial Sequence
  Description of Artificial Sequence: Synthetic oligonucleotide
agcauucgucucagaacuu

SEQ ID NO: 2840334 - RNA, 19 nt, Artificial Sequence
  Description of Artificial Sequence: Synthetic oligonucleotide
gcuuguggagaggcuccag

SEQ ID NO: 2840335 - RNA, 19 nt, Artificial Sequence
  Description of Artificial Sequence: Synthetic oligonucleotide
gcacccagaugauuagggu

SEQ ID NO: 2840336 - RNA, 19 nt, Artificial Sequence
  Description of Artificial Sequence: Synthetic oligonucleotide
aagccaccuccagcaccca

SEQ ID NO: 2840337 - RNA, 19 nt, Artificial Sequence
  Description of Artificial Sequence: Synthetic oligonucleotide
ggacaaaaggguagcuggu

SEQ ID NO: 2840338 - RNA, 19 nt, Artificial Sequence
  Description of Artificial Sequence: Synthetic oligonucleotide
gagaggcuccaggguucug

SEQ ID NO: 2840339 - RNA, 19 nt, Artificial Sequence
  Description of Artificial Sequence: Synthetic oligonucleotide
gcuuucagucuugggaacu

SEQ ID NO: 2840340 - RNA, 19 nt, Artificial Sequence
  Description of Artificial Sequence: Synthetic oligonucleotide
ccaaagcgcugagcauucg

SEQ ID NO: 2840341 - RNA, 19 nt, Artificial Sequence
  Description of Artificial Sequence: Synthetic oligonucleotide
caaguaccucagccaggaa

SEQ ID NO: 2840342 - RNA, 19 nt, Artificial Sequence
  Description of Artificial Sequence: Synthetic oligonucleotide
cggaucaaacaugcggauc

SEQ ID NO: 2840343 - RNA, 19 nt, Artificial Sequence
  Description of Artificial Sequence: Synthetic oligonucleotide
ggggagcuccugccaccag

SEQ ID NO: 2840344 - RNA, 19 nt, Artificial Sequence
  Description of Artificial Sequence: Synthetic oligonucleotide
  modified_base (14)..(14): a, c, u, g, unknown or other
cugccaccagagcnguuuu

SEQ ID NO: 2840345 - RNA, 19 nt, Artificial Sequence
  Description of Artificial Sequence: Synthetic oligonucleotide
gggcacgugugcacgccac

SEQ ID NO: 2840346 - RNA, 19 nt, Artificial Sequence
  Description of Artificial Sequence: Synthetic oligonucleotide
ggcuuguggagaggcucca

SEQ ID NO: 2840347 - RNA, 19 nt, Artificial Sequence
  Description of Artificial Sequence: Synthetic oligonucleotide
acgccaccccuuacugccu

SEQ ID NO: 2840348 - RNA, 19 nt, Artificial Sequence
  Description of Artificial Sequence: Synthetic oligonucleotide
gcugagcauucgucucaga

SEQ ID NO: 2840349 - RNA, 19 nt, Artificial Sequence
  Description of Artificial Sequence: Synthetic oligonucleotide
cuccaggguucugcaagua

SEQ ID NO: 2840350 - RNA, 19 nt, Artificial Sequence
  Description of Artificial Sequence: Synthetic oligonucleotide
ccaccccuuacugccuaug

SEQ ID NO: 2840351 - RNA, 19 nt, Artificial Sequence
  Description of Artificial Sequence: Synthetic oligonucleotide
cuccaccagguggggacaa

SEQ ID NO: 2840352 - RNA, 19 nt, Artificial Sequence
  Description of Artificial Sequence: Synthetic oligonucleotide
ggguacugauucggaucaa

SEQ ID NO: 2840353 - RNA, 19 nt, Artificial Sequence
  Description of Artificial Sequence: Synthetic oligonucleotide
  modified_base (15)..(15): a, c, u, g, unknown or other
ccugccaccagagcnguuu

SEQ ID NO: 2840354 - RNA, 19 nt, Artificial Sequence
  Description of Artificial Sequence: Synthetic oligonucleotide
cggaucugguacugaggaa

SEQ ID NO: 2840355 - RNA, 19 nt, Artificial Sequence
  Description of Artificial Sequence: Synthetic oligonucleotide
cuccagcacccagaugauu

SEQ ID NO: 2840356 - RNA, 19 nt, Artificial Sequence
  Description of Artificial Sequence: Synthetic oligonucleotide
gcgauguccgacagugcuu

SEQ ID NO: 2840357 - RNA, 19 nt, Artificial Sequence
  Description of Artificial Sequence: Synthetic oligonucleotide
caucugccacagggccaaa

SEQ ID NO: 2840358 - RNA, 19 nt, Artificial Sequence
  Description of Artificial Sequence: Synthetic oligonucleotide
gccaccccuuacugccuau

SEQ ID NO: 2840359 - RNA, 19 nt, Artificial Sequence
  Description of Artificial Sequence: Synthetic oligonucleotide
ccgacagugcuuggcggau

SEQ ID NO: 2840360 - RNA, 19 nt, Artificial Sequence
  Description of Artificial Sequence: Synthetic oligonucleotide
cgccaccccuuacugccua

SEQ ID NO: 2840361 - RNA, 19 nt, Artificial Sequence
  Description of Artificial Sequence: Synthetic oligonucleotide
cgaucccggccccugucau

SEQ ID NO: 2840362 - RNA, 19 nt, Artificial Sequence
  Description of Artificial Sequence: Synthetic oligonucleotide
cgacagugcuuggcggaua

SEQ ID NO: 2840363 - RNA, 19 nt, Artificial Sequence
  Description of Artificial Sequence: Synthetic oligonucleotide
ccugucgaucccggccccu

SEQ ID NO: 2840364 - RNA, 19 nt, Artificial Sequence
  Description of Artificial Sequence: Synthetic oligonucleotide
cgugugcacgccaccccuu

SEQ ID NO: 2840365 - RNA, 19 nt, Artificial Sequence
  Description of Artificial Sequence: Synthetic oligonucleotide
  modified_base (1)..(1): a, c, u, g, unknown or other
nguuuucagaacugggcac

SEQ ID NO: 2840366 - RNA, 19 nt, Artificial Sequence
  Description of Artificial Sequence: Synthetic oligonucleotide
aauuuaauauacuuaaacu

SEQ ID NO: 2840367 - RNA, 19 nt, Artificial Sequence
  Description of Artificial Sequence: Synthetic oligonucleotide
aaucauguuggcuugaauc

SEQ ID NO: 2840368 - RNA, 19 nt, Artificial Sequence
  Description of Artificial Sequence: Synthetic oligonucleotide
aauugcuuuccuuuuacac

SEQ ID NO: 2840369 - RNA, 19 nt, Artificial Sequence
  Description of Artificial Sequence: Synthetic oligonucleotide
aaagagaggagcaagggcc

SEQ ID NO: 2840370 - RNA, 19 nt, Artificial Sequence
  Description of Artificial Sequence: Synthetic oligonucleotide
uaauuuaauauacuuaaac

SEQ ID NO: 2840371 - RNA, 19 nt, Artificial Sequence
  Description of Artificial Sequence: Synthetic oligonucleotide
uuuguuuugauucuuguga

SEQ ID NO: 2840372 - RNA, 19 nt, Artificial Sequence
  Description of Artificial Sequence: Synthetic oligonucleotide
guuggcuugaaucugaugg

SEQ ID NO: 2840373 - RNA, 19 nt, Artificial Sequence
  Description of Artificial Sequence: Synthetic oligonucleotide
uauacuuaaacuuuaaaua

SEQ ID NO: 2840374 - RNA, 19 nt, Artificial Sequence
  Description of Artificial Sequence: Synthetic oligonucleotide
aaacuuuaaauaugaauug

SEQ ID NO: 2840375 - RNA, 19 nt, Artificial Sequence
  Description of Artificial Sequence: Synthetic oligonucleotide
aacuuuaaauaugaauugc

SEQ ID NO: 2840376 - RNA, 19 nt, Artificial Sequence
  Description of Artificial Sequence: Synthetic oligonucleotide
ugaguaaagaggaaauggg

SEQ ID NO: 2840377 - RNA, 19 nt, Artificial Sequence
  Description of Artificial Sequence: Synthetic oligonucleotide
aguccuuuuaauugcaccc

SEQ ID NO: 2840378 - RNA, 19 nt, Artificial Sequence
  Description of Artificial Sequence: Synthetic oligonucleotide
uuuaauauacuuaaacuuu

SEQ ID NO: 2840379 - RNA, 19 nt, Artificial Sequence
  Description of Artificial Sequence: Synthetic oligonucleotide
aaguccuuuuaauugcacc

SEQ ID NO: 2840380 - RNA, 19 nt, Artificial Sequence
  Description of Artificial Sequence: Synthetic oligonucleotide
uuaaauaugaauugcuuuc

SEQ ID NO: 2840381 - RNA, 19 nt, Artificial Sequence
  Description of Artificial Sequence: Synthetic oligonucleotide
uugugcaaaaguauuaacc

SEQ ID NO: 2840382 - RNA, 19 nt, Artificial Sequence
  Description of Artificial Sequence: Synthetic oligonucleotide
ugugcaaaaguauuaacca

SEQ ID NO: 2840383 - RNA, 19 nt, Artificial Sequence
  Description of Artificial Sequence: Synthetic oligonucleotide
auuuaauauacuuaaacuu

SEQ ID NO: 2840384 - RNA, 19 nt, Artificial Sequence
  Description of Artificial Sequence: Synthetic oligonucleotide
aucuaaaagaacuucuguc

SEQ ID NO: 2840385 - RNA, 19 nt, Artificial Sequence
  Description of Artificial Sequence: Synthetic oligonucleotide
ucuaaaagaacuucugucu

SEQ ID NO: 2840386 - RNA, 19 nt, Artificial Sequence
  Description of Artificial Sequence: Synthetic oligonucleotide
auauacuuaaacuuuaaau

SEQ ID NO: 2840387 - RNA, 19 nt, Artificial Sequence
  Description of Artificial Sequence: Synthetic oligonucleotide
aauuucaccauccucugca

SEQ ID NO: 2840388 - RNA, 19 nt, Artificial Sequence
  Description of Artificial Sequence: Synthetic oligonucleotide
caaaagcugauucuaaugg

SEQ ID NO: 2840389 - RNA, 19 nt, Artificial Sequence
  Description of Artificial Sequence: Synthetic oligonucleotide
gauaaguccuuuuaauugc

SEQ ID NO: 2840390 - RNA, 19 nt, Artificial Sequence
  Description of Artificial Sequence: Synthetic oligonucleotide
ucucgaaacuuuaaaauca

SEQ ID NO: 2840391 - RNA, 19 nt, Artificial Sequence
  Description of Artificial Sequence: Synthetic oligonucleotide
ucuucuguucaucaaaagc

SEQ ID NO: 2840392 - RNA, 19 nt, Artificial Sequence
  Description of Artificial Sequence: Synthetic oligonucleotide
gauucuugugaguaaagag

SEQ ID NO: 2840393 - RNA, 19 nt, Artificial Sequence
  Description of Artificial Sequence: Synthetic oligonucleotide
uuugcuaaacugcagagaa

SEQ ID NO: 2840394 - RNA, 19 nt, Artificial Sequence
  Description of Artificial Sequence: Synthetic oligonucleotide
ugaugguuuaacaaucucc

SEQ ID NO: 2840395 - RNA, 19 nt, Artificial Sequence
  Description of Artificial Sequence: Synthetic oligonucleotide
ugcuaaacugcagagaagg

SEQ ID NO: 2840396 - RNA, 19 nt, Artificial Sequence
  Description of Artificial Sequence: Synthetic oligonucleotide
uuaacaaucuccacauuug

SEQ ID NO: 2840397 - RNA, 19 nt, Artificial Sequence
  Description of Artificial Sequence: Synthetic oligonucleotide
uaaacugcagagaagggga

SEQ ID NO: 2840398 - RNA, 19 nt, Artificial Sequence
  Description of Artificial Sequence: Synthetic oligonucleotide
uccacauuugcuaaacugc

SEQ ID NO: 2840399 - RNA, 19 nt, Artificial Sequence
  Description of Artificial Sequence: Synthetic oligonucleotide
aaccaguucagcuacagaa

SEQ ID NO: 2840400 - RNA, 19 nt, Artificial Sequence
  Description of Artificial Sequence: Synthetic oligonucleotide
cuaaugguggaccaaagag

SEQ ID NO: 2840401 - RNA, 19 nt, Artificial Sequence
  Description of Artificial Sequence: Synthetic oligonucleotide
caguguaucaucuggaggc

SEQ ID NO: 2840402 - RNA, 19 nt, Artificial Sequence
  Description of Artificial Sequence: Synthetic oligonucleotide
auacuuaaacuuuaaauau

SEQ ID NO: 2840403 - RNA, 19 nt, Artificial Sequence
  Description of Artificial Sequence: Synthetic oligonucleotide
ugagcaauugugcaaaagu

SEQ ID NO: 2840404 - RNA, 19 nt, Artificial Sequence
  Description of Artificial Sequence: Synthetic oligonucleotide
aaugguggaccaaagagag

SEQ ID NO: 2840405 - RNA, 19 nt, Artificial Sequence
  Description of Artificial Sequence: Synthetic oligonucleotide
aaugggguauuccugguug

SEQ ID NO: 2840406 - RNA, 19 nt, Artificial Sequence
  Description of Artificial Sequence: Synthetic oligonucleotide
uucuugugaguaaagagga

SEQ ID NO: 2840407 - RNA, 19 nt, Artificial Sequence
  Description of Artificial Sequence: Synthetic oligonucleotide
aaucugaugguuuaacaau

SEQ ID NO: 2840408 - RNA, 19 nt, Artificial Sequence
  Description of Artificial Sequence: Synthetic oligonucleotide
uuuaaauaugaauugcuuu

SEQ ID NO: 2840409 - RNA, 19 nt, Artificial Sequence
  Description of Artificial Sequence: Synthetic oligonucleotide
ugcaaaaguauuaaccagu

SEQ ID NO: 2840410 - RNA, 19 nt, Artificial Sequence
  Description of Artificial Sequence: Synthetic oligonucleotide
acuuuaaaaucauguuggc

SEQ ID NO: 2840411 - RNA, 19 nt, Artificial Sequence
  Description of Artificial Sequence: Synthetic oligonucleotide
ugguuuaacaaucuccaca

SEQ ID NO: 2840412 - RNA, 19 nt, Artificial Sequence
  Description of Artificial Sequence: Synthetic oligonucleotide
aaauuucaccauccucugc

SEQ ID NO: 2840413 - RNA, 19 nt, Artificial Sequence
  Description of Artificial Sequence: Synthetic oligonucleotide
uacuuaaacuuuaaauaug

SEQ ID NO: 2840414 - RNA, 19 nt, Artificial Sequence
  Description of Artificial Sequence: Synthetic oligonucleotide
ucagcuacagaaagucucg

SEQ ID NO: 2840415 - RNA, 19 nt, Artificial Sequence
  Description of Artificial Sequence: Synthetic oligonucleotide
auucuugugaguaaagagg

SEQ ID NO: 2840416 - RNA, 19 nt, Artificial Sequence
  Description of Artificial Sequence: Synthetic oligonucleotide
uuuaaauuuuaguuuguaa

SEQ ID NO: 2840417 - RNA, 19 nt, Artificial Sequence
  Description of Artificial Sequence: Synthetic oligonucleotide
aauauacuuaaacuuuaaa

SEQ ID NO: 2840418 - RNA, 19 nt, Artificial Sequence
  Description of Artificial Sequence: Synthetic oligonucleotide
ugaucuaaaagaacuucug

SEQ ID NO: 2840419 - RNA, 19 nt, Artificial Sequence
  Description of Artificial Sequence: Synthetic oligonucleotide
aaguauuaaccaguucagc

SEQ ID NO: 2840420 - RNA, 19 nt, Artificial Sequence
  Description of Artificial Sequence: Synthetic oligonucleotide
ucaaaagcugauucuaaug

SEQ ID NO: 2840421 - RNA, 19 nt, Artificial Sequence
  Description of Artificial Sequence: Synthetic oligonucleotide
uauuaaccaguucagcuac

SEQ ID NO: 2840422 - RNA, 19 nt, Artificial Sequence
  Description of Artificial Sequence: Synthetic oligonucleotide
aaaguauuaaccaguucag

SEQ ID NO: 2840423 - RNA, 19 nt, Artificial Sequence
  Description of Artificial Sequence: Synthetic oligonucleotide
uaaugguggaccaaagaga

SEQ ID NO: 2840424 - RNA, 19 nt, Artificial Sequence
  Description of Artificial Sequence: Synthetic oligonucleotide
aaaagcugauucuaauggu

SEQ ID NO: 2840425 - RNA, 19 nt, Artificial Sequence
  Description of Artificial Sequence: Synthetic oligonucleotide
aacgccugggccuugcgac

SEQ ID NO: 2840426 - RNA, 19 nt, Artificial Sequence
  Description of Artificial Sequence: Synthetic oligonucleotide
gugaguaaagaggaaaugg

SEQ ID NO: 2840427 - RNA, 19 nt, Artificial Sequence
  Description of Artificial Sequence: Synthetic oligonucleotide
aguucagcuacagaaaguc

SEQ ID NO: 2840428 - RNA, 19 nt, Artificial Sequence
  Description of Artificial Sequence: Synthetic oligonucleotide
auugugcaaaaguauuaac

SEQ ID NO: 2840429 - RNA, 19 nt, Artificial Sequence
  Description of Artificial Sequence: Synthetic oligonucleotide
ucugcucugagcaauugug

SEQ ID NO: 2840430 - RNA, 19 nt, Artificial Sequence
  Description of Artificial Sequence: Synthetic oligonucleotide
uuguuuugauucuugugag

SEQ ID NO: 2840431 - RNA, 19 nt, Artificial Sequence
  Description of Artificial Sequence: Synthetic oligonucleotide
gaguaaagaggaaaugggg

SEQ ID NO: 2840432 - RNA, 19 nt, Artificial Sequence
  Description of Artificial Sequence: Synthetic oligonucleotide
auugcuuuccuuuuacaca

SEQ ID NO: 2840433 - RNA, 19 nt, Artificial Sequence
  Description of Artificial Sequence: Synthetic oligonucleotide
aaauaugaauugcuuuccu

SEQ ID NO: 2840434 - RNA, 19 nt, Artificial Sequence
  Description of Artificial Sequence: Synthetic oligonucleotide
uucagcuacagaaagucuc

SEQ ID NO: 2840435 - RNA, 19 nt, Artificial Sequence
  Description of Artificial Sequence: Synthetic oligonucleotide
uaaauaugaauugcuuucc

SEQ ID NO: 2840436 - RNA, 19 nt, Artificial Sequence
  Description of Artificial Sequence: Synthetic oligonucleotide
ucuucacuggauaaguccu

SEQ ID NO: 2840437 - RNA, 19 nt, Artificial Sequence
  Description of Artificial Sequence: Synthetic oligonucleotide
gauauaauuuaauauacuu

SEQ ID NO: 2840438 - RNA, 19 nt, Artificial Sequence
  Description of Artificial Sequence: Synthetic oligonucleotide
uucuguucaucaaaagcug

SEQ ID NO: 2840439 - RNA, 19 nt, Artificial Sequence
  Description of Artificial Sequence: Synthetic oligonucleotide
ucuuggauauaauuuaaua

SEQ ID NO: 2840440 - RNA, 19 nt, Artificial Sequence
  Description of Artificial Sequence: Synthetic oligonucleotide
cuacagaaagucucgaaac

SEQ ID NO: 2840441 - RNA, 19 nt, Artificial Sequence
  Description of Artificial Sequence: Synthetic oligonucleotide
cuaaacugcagagaagggg

SEQ ID NO: 2840442 - RNA, 19 nt, Artificial Sequence
  Description of Artificial Sequence: Synthetic oligonucleotide
uaacaaucuccacauuugc

SEQ ID NO: 2840443 - RNA, 19 nt, Artificial Sequence
  Description of Artificial Sequence: Synthetic oligonucleotide
aaaagaacuucugucuucu

SEQ ID NO: 2840444 - RNA, 19 nt, Artificial Sequence
  Description of Artificial Sequence: Synthetic oligonucleotide
ggauaaguccuuuuaauug

SEQ ID NO: 2840445 - RNA, 19 nt, Artificial Sequence
  Description of Artificial Sequence: Synthetic oligonucleotide
aaagcugauucuaauggug

SEQ ID NO: 2840446 - RNA, 19 nt, Artificial Sequence
  Description of Artificial Sequence: Synthetic oligonucleotide
gucagguaaaauuucacca

SEQ ID NO: 2840447 - RNA, 19 nt, Artificial Sequence
  Description of Artificial Sequence: Synthetic oligonucleotide
gaugguuuaacaaucucca

SEQ ID NO: 2840448 - RNA, 19 nt, Artificial Sequence
  Description of Artificial Sequence: Synthetic oligonucleotide
aauaugaauugcuuuccuu

SEQ ID NO: 2840449 - RNA, 19 nt, Artificial Sequence
  Description of Artificial Sequence: Synthetic oligonucleotide
acuuaaacuuuaaauauga

SEQ ID NO: 2840450 - RNA, 19 nt, Artificial Sequence
  Description of Artificial Sequence: Synthetic oligonucleotide
aagcugauucuaauggugg

SEQ ID NO: 2840451 - RNA, 19 nt, Artificial Sequence
  Description of Artificial Sequence: Synthetic oligonucleotide
uugcuuguaaguucuggag

SEQ ID NO: 2840452 - RNA, 19 nt, Artificial Sequence
  Description of Artificial Sequence: Synthetic oligonucleotide
uucaucaaaagcugauucu

SEQ ID NO: 2840453 - RNA, 19 nt, Artificial Sequence
  Description of Artificial Sequence: Synthetic oligonucleotide
aaauuuuaguuuguaaauu

SEQ ID NO: 2840454 - RNA, 19 nt, Artificial Sequence
  Description of Artificial Sequence: Synthetic oligonucleotide
ucuaaugguggaccaaaga

SEQ ID NO: 2840455 - RNA, 19 nt, Artificial Sequence
  Description of Artificial Sequence: Synthetic oligonucleotide
agguaaaauuucaccaucc

SEQ ID NO: 2840456 - RNA, 19 nt, Artificial Sequence
  Description of Artificial Sequence: Synthetic oligonucleotide
ugaauugcuuuccuuuuac

SEQ ID NO: 2840457 - RNA, 19 nt, Artificial Sequence
  Description of Artificial Sequence: Synthetic oligonucleotide
ugaaucugaugguuuaaca

SEQ ID NO: 2840458 - RNA, 19 nt, Artificial Sequence
  Description of Artificial Sequence: Synthetic oligonucleotide
augagaagggccccucugc

SEQ ID NO: 2840459 - RNA, 19 nt, Artificial Sequence
  Description of Artificial Sequence: Synthetic oligonucleotide
auaugaauugcuuuccuuu

SEQ ID NO: 2840460 - RNA, 19 nt, Artificial Sequence
  Description of Artificial Sequence: Synthetic oligonucleotide
uacagaaagucucgaaacu

SEQ ID NO: 2840461 - RNA, 19 nt, Artificial Sequence
  Description of Artificial Sequence: Synthetic oligonucleotide
aaguucuggaguuggggug

SEQ ID NO: 2840462 - RNA, 19 nt, Artificial Sequence
  Description of Artificial Sequence: Synthetic oligonucleotide
ugguggaccaaagagagga

SEQ ID NO: 2840463 - RNA, 19 nt, Artificial Sequence
  Description of Artificial Sequence: Synthetic oligonucleotide
uguaaguucuggaguuggg

SEQ ID NO: 2840464 - RNA, 19 nt, Artificial Sequence
  Description of Artificial Sequence: Synthetic oligonucleotide
acauuugcuaaacugcaga

SEQ ID NO: 2840465 - RNA, 19 nt, Artificial Sequence
  Description of Artificial Sequence: Synthetic oligonucleotide
gaaucugaugguuuaacaa

SEQ ID NO: 2840466 - RNA, 19 nt, Artificial Sequence
  Description of Artificial Sequence: Synthetic oligonucleotide
aauugugcaaaaguauuaa

SEQ ID NO: 2840467 - RNA, 19 nt, Artificial Sequence
  Description of Artificial Sequence: Synthetic oligonucleotide
uaauauacuuaaacuuuaa

SEQ ID NO: 2840468 - RNA, 19 nt, Artificial Sequence
  Description of Artificial Sequence: Synthetic oligonucleotide
ggaaaugggguauuccugg

SEQ ID NO: 2840469 - RNA, 19 nt, Artificial Sequence
  Description of Artificial Sequence: Synthetic oligonucleotide
cauuugcuaaacugcagag

SEQ ID NO: 2840470 - RNA, 19 nt, Artificial Sequence
  Description of Artificial Sequence: Synthetic oligonucleotide
ugguugcuggaugagaagg

SEQ ID NO: 2840471 - RNA, 19 nt, Artificial Sequence
  Description of Artificial Sequence: Synthetic oligonucleotide
ucuguucaucaaaagcuga

SEQ ID NO: 2840472 - RNA, 19 nt, Artificial Sequence
  Description of Artificial Sequence: Synthetic oligonucleotide
uaaguucuggaguuggggu

SEQ ID NO: 2840473 - RNA, 19 nt, Artificial Sequence
  Description of Artificial Sequence: Synthetic oligonucleotide
uggaccaaagagaggagca

SEQ ID NO: 2840474 - RNA, 19 nt, Artificial Sequence
  Description of Artificial Sequence: Synthetic oligonucleotide
ugcuuguaaguucuggagu

SEQ ID NO: 2840475 - RNA, 19 nt, Artificial Sequence
  Description of Artificial Sequence: Synthetic oligonucleotide
ucagguaaaauuucaccau

SEQ ID NO: 2840476 - RNA, 19 nt, Artificial Sequence
  Description of Artificial Sequence: Synthetic oligonucleotide
ugcuggaugagaagggccc

SEQ ID NO: 2840477 - RNA, 19 nt, Artificial Sequence
  Description of Artificial Sequence: Synthetic oligonucleotide
ucugaugguuuaacaaucu

SEQ ID NO: 2840478 - RNA, 19 nt, Artificial Sequence
  Description of Artificial Sequence: Synthetic oligonucleotide
cuuuguuuugauucuugug

SEQ ID NO: 2840479 - RNA, 19 nt, Artificial Sequence
  Description of Artificial Sequence: Synthetic oligonucleotide
uuguaaguucuggaguugg

SEQ ID NO: 2840480 - RNA, 19 nt, Artificial Sequence
  Description of Artificial Sequence: Synthetic oligonucleotide
aguaaagaggaaauggggu

SEQ ID NO: 2840481 - RNA, 19 nt, Artificial Sequence
  Description of Artificial Sequence: Synthetic oligonucleotide
guaaaauuucaccauccuc

SEQ ID NO: 2840482 - RNA, 19 nt, Artificial Sequence
  Description of Artificial Sequence: Synthetic oligonucleotide
uugugaguaaagaggaaau

SEQ ID NO: 2840483 - RNA, 19 nt, Artificial Sequence
  Description of Artificial Sequence: Synthetic oligonucleotide
gugcaaaaguauuaaccag

SEQ ID NO: 2840484 - RNA, 19 nt, Artificial Sequence
  Description of Artificial Sequence: Synthetic oligonucleotide
aacuucugucuucuguuca

SEQ ID NO: 2840485 - RNA, 19 nt, Artificial Sequence
  Description of Artificial Sequence: Synthetic oligonucleotide
gaggcuucuugcuuguaag

SEQ ID NO: 2840486 - RNA, 19 nt, Artificial Sequence
  Description of Artificial Sequence: Synthetic oligonucleotide
uugauucuugugaguaaag

SEQ ID NO: 2840487 - RNA, 19 nt, Artificial Sequence
  Description of Artificial Sequence: Synthetic oligonucleotide
cuccacauuugcuaaacug

SEQ ID NO: 2840488 - RNA, 19 nt, Artificial Sequence
  Description of Artificial Sequence: Synthetic oligonucleotide
caaagagaggagcaagggc

SEQ ID NO: 2840489 - RNA, 19 nt, Artificial Sequence
  Description of Artificial Sequence: Synthetic oligonucleotide
gucucgaaacuuuaaaauc

SEQ ID NO: 2840490 - RNA, 19 nt, Artificial Sequence
  Description of Artificial Sequence: Synthetic oligonucleotide
ucuugcuuguaaguucugg

SEQ ID NO: 2840491 - RNA, 19 nt, Artificial Sequence
  Description of Artificial Sequence: Synthetic oligonucleotide
agaggaaaugggguauucc

SEQ ID NO: 2840492 - RNA, 19 nt, Artificial Sequence
  Description of Artificial Sequence: Synthetic oligonucleotide
ucuuuguuuugauucuugu

SEQ ID NO: 2840493 - RNA, 19 nt, Artificial Sequence
  Description of Artificial Sequence: Synthetic oligonucleotide
acacaggcugaucuaaaag

SEQ ID NO: 2840494 - RNA, 19 nt, Artificial Sequence
  Description of Artificial Sequence: Synthetic oligonucleotide
auauaauuuaauauacuua

SEQ ID NO: 2840495 - RNA, 19 nt, Artificial Sequence
  Description of Artificial Sequence: Synthetic oligonucleotide
acuuuaaauaugaauugcu

SEQ ID NO: 2840496 - RNA, 19 nt, Artificial Sequence
  Description of Artificial Sequence: Synthetic oligonucleotide
cuucuguucaucaaaagcu

SEQ ID NO: 2840497 - RNA, 19 nt, Artificial Sequence
  Description of Artificial Sequence: Synthetic oligonucleotide
ugugaguaaagaggaaaug

SEQ ID NO: 2840498 - RNA, 19 nt, Artificial Sequence
  Description of Artificial Sequence: Synthetic oligonucleotide
uuugauucuugugaguaaa

SEQ ID NO: 2840499 - RNA, 19 nt, Artificial Sequence
  Description of Artificial Sequence: Synthetic oligonucleotide
augguuuaacaaucuccac

SEQ ID NO: 2840500 - RNA, 19 nt, Artificial Sequence
  Description of Artificial Sequence: Synthetic oligonucleotide
cuggaguugggguggaacg

SEQ ID NO: 2840501 - RNA, 19 nt, Artificial Sequence
  Description of Artificial Sequence: Synthetic oligonucleotide
aguggggucagguaaaauu

SEQ ID NO: 2840502 - RNA, 19 nt, Artificial Sequence
  Description of Artificial Sequence: Synthetic oligonucleotide
cuugcgacuucuucacugg

SEQ ID NO: 2840503 - RNA, 19 nt, Artificial Sequence
  Description of Artificial Sequence: Synthetic oligonucleotide
uggauaaguccuuuuaauu

SEQ ID NO: 2840504 - RNA, 19 nt, Artificial Sequence
  Description of Artificial Sequence: Synthetic oligonucleotide
ucgaaacuuuaaaaucaug

SEQ ID NO: 2840505 - RNA, 19 nt, Artificial Sequence
  Description of Artificial Sequence: Synthetic oligonucleotide
guaaguucuggaguugggg

SEQ ID NO: 2840506 - RNA, 19 nt, Artificial Sequence
  Description of Artificial Sequence: Synthetic oligonucleotide
ugauucuugugaguaaaga

SEQ ID NO: 2840507 - RNA, 19 nt, Artificial Sequence
  Description of Artificial Sequence: Synthetic oligonucleotide
uucuaaugguggaccaaag

SEQ ID NO: 2840508 - RNA, 19 nt, Artificial Sequence
  Description of Artificial Sequence: Synthetic oligonucleotide
ugucuucuguucaucaaaa

SEQ ID NO: 2840509 - RNA, 19 nt, Artificial Sequence
  Description of Artificial Sequence: Synthetic oligonucleotide
aucugaugguuuaacaauc

SEQ ID NO: 2840510 - RNA, 19 nt, Artificial Sequence
  Description of Artificial Sequence: Synthetic oligonucleotide
uuaaccaguucagcuacag

SEQ ID NO: 2840511 - RNA, 19 nt, Artificial Sequence
  Description of Artificial Sequence: Synthetic oligonucleotide
uguaucaucuggaggcuuc

SEQ ID NO: 2840512 - RNA, 19 nt, Artificial Sequence
  Description of Artificial Sequence: Synthetic oligonucleotide
ugauucuaaugguggacca

SEQ ID NO: 2840513 - RNA, 19 nt, Artificial Sequence
  Description of Artificial Sequence: Synthetic oligonucleotide
auuucaccauccucugcac

SEQ ID NO: 2840514 - RNA, 19 nt, Artificial Sequence
  Description of Artificial Sequence: Synthetic oligonucleotide
uuuuaaauuuuaguuugua

SEQ ID NO: 2840515 - RNA, 19 nt, Artificial Sequence
  Description of Artificial Sequence: Synthetic oligonucleotide
cuuggauauaauuuaauau

SEQ ID NO: 2840516 - RNA, 19 nt, Artificial Sequence
  Description of Artificial Sequence: Synthetic oligonucleotide
ugcucugagcaauugugca

SEQ ID NO: 2840517 - RNA, 19 nt, Artificial Sequence
  Description of Artificial Sequence: Synthetic oligonucleotide
cugauucuaaugguggacc

SEQ ID NO: 2840518 - RNA, 19 nt, Artificial Sequence
  Description of Artificial Sequence: Synthetic oligonucleotide
uucaccauccucugcacuc

SEQ ID NO: 2840519 - RNA, 19 nt, Artificial Sequence
  Description of Artificial Sequence: Synthetic oligonucleotide
uuccuuuuacacaggcuga

SEQ ID NO: 2840520 - RNA, 19 nt, Artificial Sequence
  Description of Artificial Sequence: Synthetic oligonucleotide
ucaucaaaagcugauucua

SEQ ID NO: 2840521 - RNA, 19 nt, Artificial Sequence
  Description of Artificial Sequence: Synthetic oligonucleotide
uaugaauugcuuuccuuuu

SEQ ID NO: 2840522 - RNA, 19 nt, Artificial Sequence
  Description of Artificial Sequence: Synthetic oligonucleotide
ggucagguaaaauuucacc

SEQ ID NO: 2840523 - RNA, 19 nt, Artificial Sequence
  Description of Artificial Sequence: Synthetic oligonucleotide
agaacuucugucuucuguu

SEQ ID NO: 2840524 - RNA, 19 nt, Artificial Sequence
  Description of Artificial Sequence: Synthetic oligonucleotide
gaaacuuuaaaaucauguu

SEQ ID NO: 2840525 - RNA, 19 nt, Artificial Sequence
  Description of Artificial Sequence: Synthetic oligonucleotide
aucaaaagcugauucuaau

SEQ ID NO: 2840526 - RNA, 19 nt, Artificial Sequence
  Description of Artificial Sequence: Synthetic oligonucleotide
aagaggaaaugggguauuc

SEQ ID NO: 2840527 - RNA, 19 nt, Artificial Sequence
  Description of Artificial Sequence: Synthetic oligonucleotide
ugcacucuuggauauaauu

SEQ ID NO: 2840528 - RNA, 19 nt, Artificial Sequence
  Description of Artificial Sequence: Synthetic oligonucleotide
acuggauaaguccuuuuaa

SEQ ID NO: 2840529 - RNA, 19 nt, Artificial Sequence
  Description of Artificial Sequence: Synthetic oligonucleotide
uugcuggaugagaagggcc

SEQ ID NO: 2840530 - RNA, 19 nt, Artificial Sequence
  Description of Artificial Sequence: Synthetic oligonucleotide
uuuugauucuugugaguaa

SEQ ID NO: 2840531 - RNA, 19 nt, Artificial Sequence
  Description of Artificial Sequence: Synthetic oligonucleotide
aucaucuggaggcuucuug

SEQ ID NO: 2840532 - RNA, 19 nt, Artificial Sequence
  Description of Artificial Sequence: Synthetic oligonucleotide
uuuacacaggcugaucuaa

SEQ ID NO: 2840533 - RNA, 19 nt, Artificial Sequence
  Description of Artificial Sequence: Synthetic oligonucleotide
gaugagaagggccccucug

SEQ ID NO: 2840534 - RNA, 19 nt, Artificial Sequence
  Description of Artificial Sequence: Synthetic oligonucleotide
aacaaucuccacauuugcu

SEQ ID NO: 2840535 - RNA, 19 nt, Artificial Sequence
  Description of Artificial Sequence: Synthetic oligonucleotide
uugcuaaacugcagagaag

SEQ ID NO: 2840536 - RNA, 19 nt, Artificial Sequence
  Description of Artificial Sequence: Synthetic oligonucleotide
uguuuugauucuugugagu

SEQ ID NO: 2840537 - RNA, 19 nt, Artificial Sequence
  Description of Artificial Sequence: Synthetic oligonucleotide
gaucuaaaagaacuucugu

SEQ ID NO: 2840538 - RNA, 19 nt, Artificial Sequence
  Description of Artificial Sequence: Synthetic oligonucleotide
cacaggcugaucuaaaaga

SEQ ID NO: 2840539 - RNA, 19 nt, Artificial Sequence
  Description of Artificial Sequence: Synthetic oligonucleotide
aaaucauguuggcuugaau

SEQ ID NO: 2840540 - RNA, 19 nt, Artificial Sequence
  Description of Artificial Sequence: Synthetic oligonucleotide
aucuccacauuugcuaaac

SEQ ID NO: 2840541 - RNA, 19 nt, Artificial Sequence
  Description of Artificial Sequence: Synthetic oligonucleotide
aggcugaucuaaaagaacu

SEQ ID NO: 2840542 - RNA, 19 nt, Artificial Sequence
  Description of Artificial Sequence: Synthetic oligonucleotide
agaagggccccucugcucu

SEQ ID NO: 2840543 - RNA, 19 nt, Artificial Sequence
  Description of Artificial Sequence: Synthetic oligonucleotide
uaaagaggaaaugggguau

SEQ ID NO: 2840544 - RNA, 19 nt, Artificial Sequence
  Description of Artificial Sequence: Synthetic oligonucleotide
guauuaaccaguucagcua

SEQ ID NO: 2840545 - RNA, 19 nt, Artificial Sequence
  Description of Artificial Sequence: Synthetic oligonucleotide
uuggcuugaaucugauggu

SEQ ID NO: 2840546 - RNA, 19 nt, Artificial Sequence
  Description of Artificial Sequence: Synthetic oligonucleotide
uaaguccuuuuaauugcac

SEQ ID NO: 2840547 - RNA, 19 nt, Artificial Sequence
  Description of Artificial Sequence: Synthetic oligonucleotide
accaaagagaggagcaagg

SEQ ID NO: 2840548 - RNA, 19 nt, Artificial Sequence
  Description of Artificial Sequence: Synthetic oligonucleotide
gaccaaagagaggagcaag

SEQ ID NO: 2840549 - RNA, 19 nt, Artificial Sequence
  Description of Artificial Sequence: Synthetic oligonucleotide
gacuucuucacuggauaag

SEQ ID NO: 2840550 - RNA, 19 nt, Artificial Sequence
  Description of Artificial Sequence: Synthetic oligonucleotide
acuucuucacuggauaagu

SEQ ID NO: 2840551 - RNA, 19 nt, Artificial Sequence
  Description of Artificial Sequence: Synthetic oligonucleotide
cagguaaaauuucaccauc

SEQ ID NO: 2840552 - RNA, 19 nt, Artificial Sequence
  Description of Artificial Sequence: Synthetic oligonucleotide
uugaaucugaugguuuaac

SEQ ID NO: 2840553 - RNA, 19 nt, Artificial Sequence
  Description of Artificial Sequence: Synthetic oligonucleotide
ugagaagggccccucugcu

SEQ ID NO: 2840554 - RNA, 19 nt, Artificial Sequence
  Description of Artificial Sequence: Synthetic oligonucleotide
cuugcuuguaaguucugga

SEQ ID NO: 2840555 - RNA, 19 nt, Artificial Sequence
  Description of Artificial Sequence: Synthetic oligonucleotide
auuccugguugcuggauga

SEQ ID NO: 2840556 - RNA, 19 nt, Artificial Sequence
  Description of Artificial Sequence: Synthetic oligonucleotide
ggguauuccugguugcugg

SEQ ID NO: 2840557 - RNA, 19 nt, Artificial Sequence
  Description of Artificial Sequence: Synthetic oligonucleotide
cugcucugagcaauugugc

SEQ ID NO: 2840558 - RNA, 19 nt, Artificial Sequence
  Description of Artificial Sequence: Synthetic oligonucleotide
ucauguuggcuugaaucug

SEQ ID NO: 2840559 - RNA, 19 nt, Artificial Sequence
  Description of Artificial Sequence: Synthetic oligonucleotide
guuuugauucuugugagua

SEQ ID NO: 2840560 - RNA, 19 nt, Artificial Sequence
  Description of Artificial Sequence: Synthetic oligonucleotide
aaaugggguauuccugguu

SEQ ID NO: 2840561 - RNA, 19 nt, Artificial Sequence
  Description of Artificial Sequence: Synthetic oligonucleotide
uacacaggcugaucuaaaa

SEQ ID NO: 2840562 - RNA, 19 nt, Artificial Sequence
  Description of Artificial Sequence: Synthetic oligonucleotide
auuugcuaaacugcagaga

SEQ ID NO: 2840563 - RNA, 19 nt, Artificial Sequence
  Description of Artificial Sequence: Synthetic oligonucleotide
agcaauugugcaaaaguau

SEQ ID NO: 2840564 - RNA, 19 nt, Artificial Sequence
  Description of Artificial Sequence: Synthetic oligonucleotide
acugcagagaaggggagug

SEQ ID NO: 2840565 - RNA, 19 nt, Artificial Sequence
  Description of Artificial Sequence: Synthetic oligonucleotide
aaucuccacauuugcuaaa

SEQ ID NO: 2840566 - RNA, 19 nt, Artificial Sequence
  Description of Artificial Sequence: Synthetic oligonucleotide
gaauugcuuuccuuuuaca

SEQ ID NO: 2840567 - RNA, 19 nt, Artificial Sequence
  Description of Artificial Sequence: Synthetic oligonucleotide
aaaaucauguuggcuugaa

SEQ ID NO: 2840568 - RNA, 19 nt, Artificial Sequence
  Description of Artificial Sequence: Synthetic oligonucleotide
ucugucuucuguucaucaa

SEQ ID NO: 2840569 - RNA, 19 nt, Artificial Sequence
  Description of Artificial Sequence: Synthetic oligonucleotide
uaaccaguucagcuacaga

SEQ ID NO: 2840570 - RNA, 19 nt, Artificial Sequence
  Description of Artificial Sequence: Synthetic oligonucleotide
gucuucuguucaucaaaag

SEQ ID NO: 2840571 - RNA, 19 nt, Artificial Sequence
  Description of Artificial Sequence: Synthetic oligonucleotide
caaaaguauuaaccaguuc

SEQ ID NO: 2840572 - RNA, 19 nt, Artificial Sequence
  Description of Artificial Sequence: Synthetic oligonucleotide
ucugcacucuuggauauaa

SEQ ID NO: 2840573 - RNA, 19 nt, Artificial Sequence
  Description of Artificial Sequence: Synthetic oligonucleotide
uuucaccauccucugcacu

SEQ ID NO: 2840574 - RNA, 19 nt, Artificial Sequence
  Description of Artificial Sequence: Synthetic oligonucleotide
cuuuuacacaggcugaucu

SEQ ID NO: 2840575 - RNA, 19 nt, Artificial Sequence
  Description of Artificial Sequence: Synthetic oligonucleotide
gaacuucugucuucuguuc

SEQ ID NO: 2840576 - RNA, 19 nt, Artificial Sequence
  Description of Artificial Sequence: Synthetic oligonucleotide
ugcuuuccuuuuacacagg

SEQ ID NO: 2840577 - RNA, 19 nt, Artificial Sequence
  Description of Artificial Sequence: Synthetic oligonucleotide
agcugauucuaauggugga

SEQ ID NO: 2840578 - RNA, 19 nt, Artificial Sequence
  Description of Artificial Sequence: Synthetic oligonucleotide
aaacugcagagaaggggag

SEQ ID NO: 2840579 - RNA, 19 nt, Artificial Sequence
  Description of Artificial Sequence: Synthetic oligonucleotide
cacucuuggauauaauuua

SEQ ID NO: 2840580 - RNA, 19 nt, Artificial Sequence
  Description of Artificial Sequence: Synthetic oligonucleotide
cuugugaguaaagaggaaa

SEQ ID NO: 2840581 - RNA, 19 nt, Artificial Sequence
  Description of Artificial Sequence: Synthetic oligonucleotide
aggagcaagggccagugua

SEQ ID NO: 2840582 - RNA, 19 nt, Artificial Sequence
  Description of Artificial Sequence: Synthetic oligonucleotide
auuuuaguuuguaaauuuu

SEQ ID NO: 2840583 - RNA, 19 nt, Artificial Sequence
  Description of Artificial Sequence: Synthetic oligonucleotide
uuacacaggcugaucuaaa

SEQ ID NO: 2840584 - RNA, 19 nt, Artificial Sequence
  Description of Artificial Sequence: Synthetic oligonucleotide
uggggucagguaaaauuuc

SEQ ID NO: 2840585 - RNA, 19 nt, Artificial Sequence
  Description of Artificial Sequence: Synthetic oligonucleotide
auucuaaugguggaccaaa

SEQ ID NO: 2840586 - RNA, 19 nt, Artificial Sequence
  Description of Artificial Sequence: Synthetic oligonucleotide
ucuccacauuugcuaaacu

SEQ ID NO: 2840587 - RNA, 19 nt, Artificial Sequence
  Description of Artificial Sequence: Synthetic oligonucleotide
uaaaaucauguuggcuuga

SEQ ID NO: 2840588 - RNA, 19 nt, Artificial Sequence
  Description of Artificial Sequence: Synthetic oligonucleotide
cuuaaacuuuaaauaugaa

SEQ ID NO: 2840589 - RNA, 19 nt, Artificial Sequence
  Description of Artificial Sequence: Synthetic oligonucleotide
cuucuucacuggauaaguc

SEQ ID NO: 2840590 - RNA, 19 nt, Artificial Sequence
  Description of Artificial Sequence: Synthetic oligonucleotide
auccucugcacucuuggau

SEQ ID NO: 2840591 - RNA, 19 nt, Artificial Sequence
  Description of Artificial Sequence: Synthetic oligonucleotide
uguuggcuugaaucugaug

SEQ ID NO: 2840592 - RNA, 19 nt, Artificial Sequence
  Description of Artificial Sequence: Synthetic oligonucleotide
cugaucuaaaagaacuucu

SEQ ID NO: 2840593 - RNA, 19 nt, Artificial Sequence
  Description of Artificial Sequence: Synthetic oligonucleotide
caauugugcaaaaguauua

SEQ ID NO: 2840594 - RNA, 19 nt, Artificial Sequence
  Description of Artificial Sequence: Synthetic oligonucleotide
ucuggaguugggguggaac

SEQ ID NO: 2840595 - RNA, 19 nt, Artificial Sequence
  Description of Artificial Sequence: Synthetic oligonucleotide
gagcaauugugcaaaagua

SEQ ID NO: 2840596 - RNA, 19 nt, Artificial Sequence
  Description of Artificial Sequence: Synthetic oligonucleotide
guugcuggaugagaagggc

SEQ ID NO: 2840597 - RNA, 19 nt, Artificial Sequence
  Description of Artificial Sequence: Synthetic oligonucleotide
cugaugguuuaacaaucuc

SEQ ID NO: 2840598 - RNA, 19 nt, Artificial Sequence
  Description of Artificial Sequence: Synthetic oligonucleotide
cuuuaaauaugaauugcuu

SEQ ID NO: 2840599 - RNA, 19 nt, Artificial Sequence
  Description of Artificial Sequence: Synthetic oligonucleotide
cauguuggcuugaaucuga

SEQ ID NO: 2840600 - RNA, 19 nt, Artificial Sequence
  Description of Artificial Sequence: Synthetic oligonucleotide
aggaaaugggguauuccug

SEQ ID NO: 2840601 - RNA, 19 nt, Artificial Sequence
  Description of Artificial Sequence: Synthetic oligonucleotide
auaaguccuuuuaauugca

SEQ ID NO: 2840602 - RNA, 19 nt, Artificial Sequence
  Description of Artificial Sequence: Synthetic oligonucleotide
gguuuaacaaucuccacau

SEQ ID NO: 2840603 - RNA, 19 nt, Artificial Sequence
  Description of Artificial Sequence: Synthetic oligonucleotide
uggaguugggguggaacgc

SEQ ID NO: 2840604 - RNA, 19 nt, Artificial Sequence
  Description of Artificial Sequence: Synthetic oligonucleotide
ugcgacuucuucacuggau

SEQ ID NO: 2840605 - RNA, 19 nt, Artificial Sequence
  Description of Artificial Sequence: Synthetic oligonucleotide
ugggguggaacgccugggc

SEQ ID NO: 2840606 - RNA, 19 nt, Artificial Sequence
  Description of Artificial Sequence: Synthetic oligonucleotide
augaauugcuuuccuuuua

SEQ ID NO: 2840607 - RNA, 19 nt, Artificial Sequence
  Description of Artificial Sequence: Synthetic oligonucleotide
gggccaguguaucaucugg

SEQ ID NO: 2840608 - RNA, 19 nt, Artificial Sequence
  Description of Artificial Sequence: Synthetic oligonucleotide
ccaguucagcuacagaaag

SEQ ID NO: 2840609 - RNA, 19 nt, Artificial Sequence
  Description of Artificial Sequence: Synthetic oligonucleotide
gcuacagaaagucucgaaa

SEQ ID NO: 2840610 - RNA, 19 nt, Artificial Sequence
  Description of Artificial Sequence: Synthetic oligonucleotide
guggaccaaagagaggagc

SEQ ID NO: 2840611 - RNA, 19 nt, Artificial Sequence
  Description of Artificial Sequence: Synthetic oligonucleotide
aaagaggaaaugggguauu

SEQ ID NO: 2840612 - RNA, 19 nt, Artificial Sequence
  Description of Artificial Sequence: Synthetic oligonucleotide
cuuguaaguucuggaguug

SEQ ID NO: 2840613 - RNA, 19 nt, Artificial Sequence
  Description of Artificial Sequence: Synthetic oligonucleotide
aacugcagagaaggggagu

SEQ ID NO: 2840614 - RNA, 19 nt, Artificial Sequence
  Description of Artificial Sequence: Synthetic oligonucleotide
cugagcaauugugcaaaag

SEQ ID NO: 2840615 - RNA, 19 nt, Artificial Sequence
  Description of Artificial Sequence: Synthetic oligonucleotide
gcuuuccuuuuacacaggc

SEQ ID NO: 2840616 - RNA, 19 nt, Artificial Sequence
  Description of Artificial Sequence: Synthetic oligonucleotide
cugguugcuggaugagaag

SEQ ID NO: 2840617 - RNA, 19 nt, Artificial Sequence
  Description of Artificial Sequence: Synthetic oligonucleotide
agcuacagaaagucucgaa

SEQ ID NO: 2840618 - RNA, 19 nt, Artificial Sequence
  Description of Artificial Sequence: Synthetic oligonucleotide
caucaaaagcugauucuaa

SEQ ID NO: 2840619 - RNA, 19 nt, Artificial Sequence
  Description of Artificial Sequence: Synthetic oligonucleotide
caaucuccacauuugcuaa

SEQ ID NO: 2840620 - RNA, 19 nt, Artificial Sequence
  Description of Artificial Sequence: Synthetic oligonucleotide
ugggccuugcgacuucuuc

SEQ ID NO: 2840621 - RNA, 19 nt, Artificial Sequence
  Description of Artificial Sequence: Synthetic oligonucleotide
ccaguguaucaucuggagg

SEQ ID NO: 2840622 - RNA, 19 nt, Artificial Sequence
  Description of Artificial Sequence: Synthetic oligonucleotide
agcaagggccaguguauca

SEQ ID NO: 2840623 - RNA, 19 nt, Artificial Sequence
  Description of Artificial Sequence: Synthetic oligonucleotide
gaaagucucgaaacuuuaa

SEQ ID NO: 2840624 - RNA, 19 nt, Artificial Sequence
  Description of Artificial Sequence: Synthetic oligonucleotide
aggcuucuugcuuguaagu

SEQ ID NO: 2840625 - RNA, 19 nt, Artificial Sequence
  Description of Artificial Sequence: Synthetic oligonucleotide
uugcgacuucuucacugga

SEQ ID NO: 2840626 - RNA, 19 nt, Artificial Sequence
  Description of Artificial Sequence: Synthetic oligonucleotide
agaggagcaagggccagug

SEQ ID NO: 2840627 - RNA, 19 nt, Artificial Sequence
  Description of Artificial Sequence: Synthetic oligonucleotide
aaggggaguggggucaggu

SEQ ID NO: 2840628 - RNA, 19 nt, Artificial Sequence
  Description of Artificial Sequence: Synthetic oligonucleotide
gguugcuggaugagaaggg

SEQ ID NO: 2840629 - RNA, 19 nt, Artificial Sequence
  Description of Artificial Sequence: Synthetic oligonucleotide
aguguaucaucuggaggcu

SEQ ID NO: 2840630 - RNA, 19 nt, Artificial Sequence
  Description of Artificial Sequence: Synthetic oligonucleotide
gccaguguaucaucuggag

SEQ ID NO: 2840631 - RNA, 19 nt, Artificial Sequence
  Description of Artificial Sequence: Synthetic oligonucleotide
uccuuuuacacaggcugau

SEQ ID NO: 2840632 - RNA, 19 nt, Artificial Sequence
  Description of Artificial Sequence: Synthetic oligonucleotide
acucuuggauauaauuuaa

SEQ ID NO: 2840633 - RNA, 19 nt, Artificial Sequence
  Description of Artificial Sequence: Synthetic oligonucleotide
gagaaggggagugggguca

SEQ ID NO: 2840634 - RNA, 19 nt, Artificial Sequence
  Description of Artificial Sequence: Synthetic oligonucleotide
gcugaucuaaaagaacuuc

SEQ ID NO: 2840635 - RNA, 19 nt, Artificial Sequence
  Description of Artificial Sequence: Synthetic oligonucleotide
ccaaagagaggagcaaggg

SEQ ID NO: 2840636 - RNA, 19 nt, Artificial Sequence
  Description of Artificial Sequence: Synthetic oligonucleotide
ucugagcaauugugcaaaa

SEQ ID NO: 2840637 - RNA, 19 nt, Artificial Sequence
  Description of Artificial Sequence: Synthetic oligonucleotide
agaaagucucgaaacuuua

SEQ ID NO: 2840638 - RNA, 19 nt, Artificial Sequence
  Description of Artificial Sequence: Synthetic oligonucleotide
gauucuaaugguggaccaa

SEQ ID NO: 2840639 - RNA, 19 nt, Artificial Sequence
  Description of Artificial Sequence: Synthetic oligonucleotide
cgaaacuuuaaaaucaugu

SEQ ID NO: 2840640 - RNA, 19 nt, Artificial Sequence
  Description of Artificial Sequence: Synthetic oligonucleotide
agggccaguguaucaucug

SEQ ID NO: 2840641 - RNA, 19 nt, Artificial Sequence
  Description of Artificial Sequence: Synthetic oligonucleotide
ccuugcgacuucuucacug

SEQ ID NO: 2840642 - RNA, 19 nt, Artificial Sequence
  Description of Artificial Sequence: Synthetic oligonucleotide
uucacuggauaaguccuuu

SEQ ID NO: 2840643 - RNA, 19 nt, Artificial Sequence
  Description of Artificial Sequence: Synthetic oligonucleotide
cuaaaagaacuucugucuu

SEQ ID NO: 2840644 - RNA, 19 nt, Artificial Sequence
  Description of Artificial Sequence: Synthetic oligonucleotide
gcuaaacugcagagaaggg

SEQ ID NO: 2840645 - RNA, 19 nt, Artificial Sequence
  Description of Artificial Sequence: Synthetic oligonucleotide
uccugguugcuggaugaga

SEQ ID NO: 2840646 - RNA, 19 nt, Artificial Sequence
  Description of Artificial Sequence: Synthetic oligonucleotide
cuggauaaguccuuuuaau

SEQ ID NO: 2840647 - RNA, 19 nt, Artificial Sequence
  Description of Artificial Sequence: Synthetic oligonucleotide
gagaagggccccucugcuc

SEQ ID NO: 2840648 - RNA, 19 nt, Artificial Sequence
  Description of Artificial Sequence: Synthetic oligonucleotide
ucaccauccucugcacucu

SEQ ID NO: 2840649 - RNA, 19 nt, Artificial Sequence
  Description of Artificial Sequence: Synthetic oligonucleotide
gguaaaauuucaccauccu

SEQ ID NO: 2840650 - RNA, 19 nt, Artificial Sequence
  Description of Artificial Sequence: Synthetic oligonucleotide
gaaaugggguauuccuggu

SEQ ID NO: 2840651 - RNA, 19 nt, Artificial Sequence
  Description of Artificial Sequence: Synthetic oligonucleotide
caagggccaguguaucauc

SEQ ID NO: 2840652 - RNA, 19 nt, Artificial Sequence
  Description of Artificial Sequence: Synthetic oligonucleotide
accaguucagcuacagaaa

SEQ ID NO: 2840653 - RNA, 19 nt, Artificial Sequence
  Description of Artificial Sequence: Synthetic oligonucleotide
ucacuggauaaguccuuuu

SEQ ID NO: 2840654 - RNA, 19 nt, Artificial Sequence
  Description of Artificial Sequence: Synthetic oligonucleotide
cucugagcaauugugcaaa

SEQ ID NO: 2840655 - RNA, 19 nt, Artificial Sequence
  Description of Artificial Sequence: Synthetic oligonucleotide
ugggguauuccugguugcu

SEQ ID NO: 2840656 - RNA, 19 nt, Artificial Sequence
  Description of Artificial Sequence: Synthetic oligonucleotide
cacuggauaaguccuuuua

SEQ ID NO: 2840657 - RNA, 19 nt, Artificial Sequence
  Description of Artificial Sequence: Synthetic oligonucleotide
uggcuugaaucugaugguu

SEQ ID NO: 2840658 - RNA, 19 nt, Artificial Sequence
  Description of Artificial Sequence: Synthetic oligonucleotide
uuccugguugcuggaugag

SEQ ID NO: 2840659 - RNA, 19 nt, Artificial Sequence
  Description of Artificial Sequence: Synthetic oligonucleotide
cugcagagaaggggagugg

SEQ ID NO: 2840660 - RNA, 19 nt, Artificial Sequence
  Description of Artificial Sequence: Synthetic oligonucleotide
gaacgccugggccuugcga

SEQ ID NO: 2840661 - RNA, 19 nt, Artificial Sequence
  Description of Artificial Sequence: Synthetic oligonucleotide
ccacauuugcuaaacugca

SEQ ID NO: 2840662 - RNA, 19 nt, Artificial Sequence
  Description of Artificial Sequence: Synthetic oligonucleotide
augguggaccaaagagagg

SEQ ID NO: 2840663 - RNA, 19 nt, Artificial Sequence
  Description of Artificial Sequence: Synthetic oligonucleotide
cucgaaacuuuaaaaucau

SEQ ID NO: 2840664 - RNA, 19 nt, Artificial Sequence
  Description of Artificial Sequence: Synthetic oligonucleotide
cuuuccuuuuacacaggcu

SEQ ID NO: 2840665 - RNA, 19 nt, Artificial Sequence
  Description of Artificial Sequence: Synthetic oligonucleotide
agagaggagcaagggccag

SEQ ID NO: 2840666 - RNA, 19 nt, Artificial Sequence
  Description of Artificial Sequence: Synthetic oligonucleotide
ggauauaauuuaauauacu

SEQ ID NO: 2840667 - RNA, 19 nt, Artificial Sequence
  Description of Artificial Sequence: Synthetic oligonucleotide
ggccccucugcucugagca

SEQ ID NO: 2840668 - RNA, 19 nt, Artificial Sequence
  Description of Artificial Sequence: Synthetic oligonucleotide
ggccuugcgacuucuucac

SEQ ID NO: 2840669 - RNA, 19 nt, Artificial Sequence
  Description of Artificial Sequence: Synthetic oligonucleotide
ggaguugggguggaacgcc

SEQ ID NO: 2840670 - RNA, 19 nt, Artificial Sequence
  Description of Artificial Sequence: Synthetic oligonucleotide
auuaaccaguucagcuaca

SEQ ID NO: 2840671 - RNA, 19 nt, Artificial Sequence
  Description of Artificial Sequence: Synthetic oligonucleotide
ggggaguggggucagguaa

SEQ ID NO: 2840672 - RNA, 19 nt, Artificial Sequence
  Description of Artificial Sequence: Synthetic oligonucleotide
cuguucaucaaaagcugau

SEQ ID NO: 2840673 - RNA, 19 nt, Artificial Sequence
  Description of Artificial Sequence: Synthetic oligonucleotide
cagaaagucucgaaacuuu

SEQ ID NO: 2840674 - RNA, 19 nt, Artificial Sequence
  Description of Artificial Sequence: Synthetic oligonucleotide
agaaggggaguggggucag

SEQ ID NO: 2840675 - RNA, 19 nt, Artificial Sequence
  Description of Artificial Sequence: Synthetic oligonucleotide
gggccuugcgacuucuuca

SEQ ID NO: 2840676 - RNA, 19 nt, Artificial Sequence
  Description of Artificial Sequence: Synthetic oligonucleotide
uggaugagaagggccccuc

SEQ ID NO: 2840677 - RNA, 19 nt, Artificial Sequence
  Description of Artificial Sequence: Synthetic oligonucleotide
cucuuggauauaauuuaau

SEQ ID NO: 2840678 - RNA, 19 nt, Artificial Sequence
  Description of Artificial Sequence: Synthetic oligonucleotide
gagcaagggccaguguauc

SEQ ID NO: 2840679 - RNA, 19 nt, Artificial Sequence
  Description of Artificial Sequence: Synthetic oligonucleotide
gaagggccccucugcucug

SEQ ID NO: 2840680 - RNA, 19 nt, Artificial Sequence
  Description of Artificial Sequence: Synthetic oligonucleotide
ggaggcuucuugcuuguaa

SEQ ID NO: 2840681 - RNA, 19 nt, Artificial Sequence
  Description of Artificial Sequence: Synthetic oligonucleotide
gggucagguaaaauuucac

SEQ ID NO: 2840682 - RNA, 19 nt, Artificial Sequence
  Description of Artificial Sequence: Synthetic oligonucleotide
gaaggggaguggggucagg

SEQ ID NO: 2840683 - RNA, 19 nt, Artificial Sequence
  Description of Artificial Sequence: Synthetic oligonucleotide
gcuuguaaguucuggaguu

SEQ ID NO: 2840684 - RNA, 19 nt, Artificial Sequence
  Description of Artificial Sequence: Synthetic oligonucleotide
cauccucugcacucuugga

SEQ ID NO: 2840685 - RNA, 19 nt, Artificial Sequence
  Description of Artificial Sequence: Synthetic oligonucleotide
gguauuccugguugcugga

SEQ ID NO: 2840686 - RNA, 19 nt, Artificial Sequence
  Description of Artificial Sequence: Synthetic oligonucleotide
ggggucagguaaaauuuca

SEQ ID NO: 2840687 - RNA, 19 nt, Artificial Sequence
  Description of Artificial Sequence: Synthetic oligonucleotide
guggggucagguaaaauuu

SEQ ID NO: 2840688 - RNA, 19 nt, Artificial Sequence
  Description of Artificial Sequence: Synthetic oligonucleotide
uggaacgccugggccuugc

SEQ ID NO: 2840689 - RNA, 19 nt, Artificial Sequence
  Description of Artificial Sequence: Synthetic oligonucleotide
gcucugagcaauugugcaa

SEQ ID NO: 2840690 - RNA, 19 nt, Artificial Sequence
  Description of Artificial Sequence: Synthetic oligonucleotide
aguugggguggaacgccug

SEQ ID NO: 2840691 - RNA, 19 nt, Artificial Sequence
  Description of Artificial Sequence: Synthetic oligonucleotide
aggggaguggggucaggua

SEQ ID NO: 2840692 - RNA, 19 nt, Artificial Sequence
  Description of Artificial Sequence: Synthetic oligonucleotide
gcgacuucuucacuggaua

SEQ ID NO: 2840693 - RNA, 19 nt, Artificial Sequence
  Description of Artificial Sequence: Synthetic oligonucleotide
caguucagcuacagaaagu

SEQ ID NO: 2840694 - RNA, 19 nt, Artificial Sequence
  Description of Artificial Sequence: Synthetic oligonucleotide
gguggaccaaagagaggag

SEQ ID NO: 2840695 - RNA, 19 nt, Artificial Sequence
  Description of Artificial Sequence: Synthetic oligonucleotide
gggguauuccugguugcug

SEQ ID NO: 2840696 - RNA, 19 nt, Artificial Sequence
  Description of Artificial Sequence: Synthetic oligonucleotide
acgccugggccuugcgacu

SEQ ID NO: 2840697 - RNA, 19 nt, Artificial Sequence
  Description of Artificial Sequence: Synthetic oligonucleotide
cagagaaggggaguggggu

SEQ ID NO: 2840698 - RNA, 19 nt, Artificial Sequence
  Description of Artificial Sequence: Synthetic oligonucleotide
accauccucugcacucuug

SEQ ID NO: 2840699 - RNA, 19 nt, Artificial Sequence
  Description of Artificial Sequence: Synthetic oligonucleotide
uaucaucuggaggcuucuu

SEQ ID NO: 2840700 - RNA, 19 nt, Artificial Sequence
  Description of Artificial Sequence: Synthetic oligonucleotide
caucuggaggcuucuugcu

SEQ ID NO: 2840701 - RNA, 19 nt, Artificial Sequence
  Description of Artificial Sequence: Synthetic oligonucleotide
guucagcuacagaaagucu

SEQ ID NO: 2840702 - RNA, 19 nt, Artificial Sequence
  Description of Artificial Sequence: Synthetic oligonucleotide
ggaacgccugggccuugcg

SEQ ID NO: 2840703 - RNA, 19 nt, Artificial Sequence
  Description of Artificial Sequence: Synthetic oligonucleotide
gcuggaugagaagggcccc

SEQ ID NO: 2840704 - RNA, 19 nt, Artificial Sequence
  Description of Artificial Sequence: Synthetic oligonucleotide
auguuggcuugaaucugau

SEQ ID NO: 2840705 - RNA, 19 nt, Artificial Sequence
  Description of Artificial Sequence: Synthetic oligonucleotide
aagggccccucugcucuga

SEQ ID NO: 2840706 - RNA, 19 nt, Artificial Sequence
  Description of Artificial Sequence: Synthetic oligonucleotide
agggccccucugcucugag

SEQ ID NO: 2840707 - RNA, 19 nt, Artificial Sequence
  Description of Artificial Sequence: Synthetic oligonucleotide
gcacucuuggauauaauuu

SEQ ID NO: 2840708 - RNA, 19 nt, Artificial Sequence
  Description of Artificial Sequence: Synthetic oligonucleotide
cucugcucugagcaauugu

SEQ ID NO: 2840709 - RNA, 19 nt, Artificial Sequence
  Description of Artificial Sequence: Synthetic oligonucleotide
gcaaaaguauuaaccaguu

SEQ ID NO: 2840710 - RNA, 19 nt, Artificial Sequence
  Description of Artificial Sequence: Synthetic oligonucleotide
guaucaucuggaggcuucu

SEQ ID NO: 2840711 - RNA, 19 nt, Artificial Sequence
  Description of Artificial Sequence: Synthetic oligonucleotide
ggccaguguaucaucugga

SEQ ID NO: 2840712 - RNA, 19 nt, Artificial Sequence
  Description of Artificial Sequence: Synthetic oligonucleotide
cagcuacagaaagucucga

SEQ ID NO: 2840713 - RNA, 19 nt, Artificial Sequence
  Description of Artificial Sequence: Synthetic oligonucleotide
ccuuuuacacaggcugauc

SEQ ID NO: 2840714 - RNA, 19 nt, Artificial Sequence
  Description of Artificial Sequence: Synthetic oligonucleotide
ggguggaacgccugggccu

SEQ ID NO: 2840715 - RNA, 19 nt, Artificial Sequence
  Description of Artificial Sequence: Synthetic oligonucleotide
cuucacuggauaaguccuu

SEQ ID NO: 2840716 - RNA, 19 nt, Artificial Sequence
  Description of Artificial Sequence: Synthetic oligonucleotide
gaguugggguggaacgccu

SEQ ID NO: 2840717 - RNA, 19 nt, Artificial Sequence
  Description of Artificial Sequence: Synthetic oligonucleotide
gagaggagcaagggccagu

SEQ ID NO: 2840718 - RNA, 19 nt, Artificial Sequence
  Description of Artificial Sequence: Synthetic oligonucleotide
uucuggaguugggguggaa

SEQ ID NO: 2840719 - RNA, 19 nt, Artificial Sequence
  Description of Artificial Sequence: Synthetic oligonucleotide
gaggagcaagggccagugu

SEQ ID NO: 2840720 - RNA, 19 nt, Artificial Sequence
  Description of Artificial Sequence: Synthetic oligonucleotide
guucuggaguuggggugga

SEQ ID NO: 2840721 - RNA, 19 nt, Artificial Sequence
  Description of Artificial Sequence: Synthetic oligonucleotide
cuggaggcuucuugcuugu

SEQ ID NO: 2840722 - RNA, 19 nt, Artificial Sequence
  Description of Artificial Sequence: Synthetic oligonucleotide
ggagcaagggccaguguau

SEQ ID NO: 2840723 - RNA, 19 nt, Artificial Sequence
  Description of Artificial Sequence: Synthetic oligonucleotide
ggcuucuugcuuguaaguu

SEQ ID NO: 2840724 - RNA, 19 nt, Artificial Sequence
  Description of Artificial Sequence: Synthetic oligonucleotide
ggaugagaagggccccucu

SEQ ID NO: 2840725 - RNA, 19 nt, Artificial Sequence
  Description of Artificial Sequence: Synthetic oligonucleotide
guauuccugguugcuggau

SEQ ID NO: 2840726 - RNA, 19 nt, Artificial Sequence
  Description of Artificial Sequence: Synthetic oligonucleotide
gggaguggggucagguaaa

SEQ ID NO: 2840727 - RNA, 19 nt, Artificial Sequence
  Description of Artificial Sequence: Synthetic oligonucleotide
gggccccucugcucugagc

SEQ ID NO: 2840728 - RNA, 19 nt, Artificial Sequence
  Description of Artificial Sequence: Synthetic oligonucleotide
cgacuucuucacuggauaa

SEQ ID NO: 2840729 - RNA, 19 nt, Artificial Sequence
  Description of Artificial Sequence: Synthetic oligonucleotide
ccucugcucugagcaauug

SEQ ID NO: 2840730 - RNA, 19 nt, Artificial Sequence
  Description of Artificial Sequence: Synthetic oligonucleotide
cuggaugagaagggccccu

SEQ ID NO: 2840731 - RNA, 19 nt, Artificial Sequence
  Description of Artificial Sequence: Synthetic oligonucleotide
gcaagggccaguguaucau

SEQ ID NO: 2840732 - RNA, 19 nt, Artificial Sequence
  Description of Artificial Sequence: Synthetic oligonucleotide
ggaguggggucagguaaaa

SEQ ID NO: 2840733 - RNA, 19 nt, Artificial Sequence
  Description of Artificial Sequence: Synthetic oligonucleotide
gaguggggucagguaaaau

SEQ ID NO: 2840734 - RNA, 19 nt, Artificial Sequence
  Description of Artificial Sequence: Synthetic oligonucleotide
ggcuugaaucugaugguuu

SEQ ID NO: 2840735 - RNA, 19 nt, Artificial Sequence
  Description of Artificial Sequence: Synthetic oligonucleotide
cugcacucuuggauauaau

SEQ ID NO: 2840736 - RNA, 19 nt, Artificial Sequence
  Description of Artificial Sequence: Synthetic oligonucleotide
guguaucaucuggaggcuu

SEQ ID NO: 2840737 - RNA, 19 nt, Artificial Sequence
  Description of Artificial Sequence: Synthetic oligonucleotide
guggaacgccugggccuug

SEQ ID NO: 2840738 - RNA, 19 nt, Artificial Sequence
  Description of Artificial Sequence: Synthetic oligonucleotide
cucugcacucuuggauaua

SEQ ID NO: 2840739 - RNA, 19 nt, Artificial Sequence
  Description of Artificial Sequence: Synthetic oligonucleotide
ccucugcacucuuggauau

SEQ ID NO: 2840740 - RNA, 19 nt, Artificial Sequence
  Description of Artificial Sequence: Synthetic oligonucleotide
gguggaacgccugggccuu

SEQ ID NO: 2840741 - RNA, 19 nt, Artificial Sequence
  Description of Artificial Sequence: Synthetic oligonucleotide
gccccucugcucugagcaa

SEQ ID NO: 2840742 - RNA, 19 nt, Artificial Sequence
  Description of Artificial Sequence: Synthetic oligonucleotide
gccuugcgacuucuucacu

SEQ ID NO: 2840743 - RNA, 19 nt, Artificial Sequence
  Description of Artificial Sequence: Synthetic oligonucleotide
gccugggccuugcgacuuc

SEQ ID NO: 2840744 - RNA, 19 nt, Artificial Sequence
  Description of Artificial Sequence: Synthetic oligonucleotide
caccauccucugcacucuu

SEQ ID NO: 2840745 - RNA, 19 nt, Artificial Sequence
  Description of Artificial Sequence: Synthetic oligonucleotide
cugggccuugcgacuucuu

SEQ ID NO: 2840746 - RNA, 19 nt, Artificial Sequence
  Description of Artificial Sequence: Synthetic oligonucleotide
ccugggccuugcgacuucu

SEQ ID NO: 2840747 - RNA, 19 nt, Artificial Sequence
  Description of Artificial Sequence: Synthetic oligonucleotide
cgccugggccuugcgacuu

SEQ ID NO: 2840748 - RNA, 19 nt, Artificial Sequence
  Description of Artificial Sequence: Synthetic oligonucleotide
auaacuuugaccucucucc

SEQ ID NO: 2840749 - RNA, 19 nt, Artificial Sequence
  Description of Artificial Sequence: Synthetic oligonucleotide
uugccuuugauaaagaaag

SEQ ID NO: 2840750 - RNA, 19 nt, Artificial Sequence
  Description of Artificial Sequence: Synthetic oligonucleotide
aaugaugucauacauggga

SEQ ID NO: 2840751 - RNA, 19 nt, Artificial Sequence
  Description of Artificial Sequence: Synthetic oligonucleotide
uuuaguuggugcaugagcc

SEQ ID NO: 2840752 - RNA, 19 nt, Artificial Sequence
  Description of Artificial Sequence: Synthetic oligonucleotide
uccaaaguccuuuaguugg

SEQ ID NO: 2840753 - RNA, 19 nt, Artificial Sequence
  Description of Artificial Sequence: Synthetic oligonucleotide
aaagaaagggcauucuuug

SEQ ID NO: 2840754 - RNA, 19 nt, Artificial Sequence
  Description of Artificial Sequence: Synthetic oligonucleotide
ucuuuuauucucucgaaug

SEQ ID NO: 2840755 - RNA, 19 nt, Artificial Sequence
  Description of Artificial Sequence: Synthetic oligonucleotide
uggugcaugagccagaaac

SEQ ID NO: 2840756 - RNA, 19 nt, Artificial Sequence
  Description of Artificial Sequence: Synthetic oligonucleotide
uccuuuauaaacccaggag

SEQ ID NO: 2840757 - RNA, 19 nt, Artificial Sequence
  Description of Artificial Sequence: Synthetic oligonucleotide
uuugucgccuguucgaugg

SEQ ID NO: 2840758 - RNA, 19 nt, Artificial Sequence
  Description of Artificial Sequence: Synthetic oligonucleotide
uuauaaacccaggaggagg

SEQ ID NO: 2840759 - RNA, 19 nt, Artificial Sequence
  Description of Artificial Sequence: Synthetic oligonucleotide
gaaagggcauucuuugucg

SEQ ID NO: 2840760 - RNA, 19 nt, Artificial Sequence
  Description of Artificial Sequence: Synthetic oligonucleotide
uaaaaggacuccaagugcu

SEQ ID NO: 2840761 - RNA, 19 nt, Artificial Sequence
  Description of Artificial Sequence: Synthetic oligonucleotide
ucauccuccuuuauaaacc

SEQ ID NO: 2840762 - RNA, 19 nt, Artificial Sequence
  Description of Artificial Sequence: Synthetic oligonucleotide
aaagggcauucuuugucgc

SEQ ID NO: 2840763 - RNA, 19 nt, Artificial Sequence
  Description of Artificial Sequence: Synthetic oligonucleotide
uuuauucucucgaaugaug

SEQ ID NO: 2840764 - RNA, 19 nt, Artificial Sequence
  Description of Artificial Sequence: Synthetic oligonucleotide
uuauucucucgaaugaugu

SEQ ID NO: 2840765 - RNA, 19 nt, Artificial Sequence
  Description of Artificial Sequence: Synthetic oligonucleotide
aacuguucuaacuucuggu

SEQ ID NO: 2840766 - RNA, 19 nt, Artificial Sequence
  Description of Artificial Sequence: Synthetic oligonucleotide
agaaagggcauucuuuguc

SEQ ID NO: 2840767 - RNA, 19 nt, Artificial Sequence
  Description of Artificial Sequence: Synthetic oligonucleotide
uuugauaaagaaagggcau

SEQ ID NO: 2840768 - RNA, 19 nt, Artificial Sequence
  Description of Artificial Sequence: Synthetic oligonucleotide
cuucucaugucuuuuauuc

SEQ ID NO: 2840769 - RNA, 19 nt, Artificial Sequence
  Description of Artificial Sequence: Synthetic oligonucleotide
uguucuaacuucugguugc

SEQ ID NO: 2840770 - RNA, 19 nt, Artificial Sequence
  Description of Artificial Sequence: Synthetic oligonucleotide
ugguauacagucuucuggc

SEQ ID NO: 2840771 - RNA, 19 nt, Artificial Sequence
  Description of Artificial Sequence: Synthetic oligonucleotide
ugagccagaaacucccugg

SEQ ID NO: 2840772 - RNA, 19 nt, Artificial Sequence
  Description of Artificial Sequence: Synthetic oligonucleotide
uccuccuuuauaaacccag

SEQ ID NO: 2840773 - RNA, 19 nt, Artificial Sequence
  Description of Artificial Sequence: Synthetic oligonucleotide
ggagguuucucguaaaagg

SEQ ID NO: 2840774 - RNA, 19 nt, Artificial Sequence
  Description of Artificial Sequence: Synthetic oligonucleotide
gaugucauacaugggaucc

SEQ ID NO: 2840775 - RNA, 19 nt, Artificial Sequence
  Description of Artificial Sequence: Synthetic oligonucleotide
aaccuugcauaacuuugac

SEQ ID NO: 2840776 - RNA, 19 nt, Artificial Sequence
  Description of Artificial Sequence: Synthetic oligonucleotide
gaacuguucuaacuucugg

SEQ ID NO: 2840777 - RNA, 19 nt, Artificial Sequence
  Description of Artificial Sequence: Synthetic oligonucleotide
cugguauacagucuucugg

SEQ ID NO: 2840778 - RNA, 19 nt, Artificial Sequence
  Description of Artificial Sequence: Synthetic oligonucleotide
ccuuuauaaacccaggagg

SEQ ID NO: 2840779 - RNA, 19 nt, Artificial Sequence
  Description of Artificial Sequence: Synthetic oligonucleotide
uauaaacccaggaggaggu

SEQ ID NO: 2840780 - RNA, 19 nt, Artificial Sequence
  Description of Artificial Sequence: Synthetic oligonucleotide
uaaagaaagggcauucuuu

SEQ ID NO: 2840781 - RNA, 19 nt, Artificial Sequence
  Description of Artificial Sequence: Synthetic oligonucleotide
cuuuaguuggugcaugagc

SEQ ID NO: 2840782 - RNA, 19 nt, Artificial Sequence
  Description of Artificial Sequence: Synthetic oligonucleotide
gauccuuacauccuucuca

SEQ ID NO: 2840783 - RNA, 19 nt, Artificial Sequence
  Description of Artificial Sequence: Synthetic oligonucleotide
guaaaaggacuccaagugc

SEQ ID NO: 2840784 - RNA, 19 nt, Artificial Sequence
  Description of Artificial Sequence: Synthetic oligonucleotide
auucuuugucgccuguucg

SEQ ID NO: 2840785 - RNA, 19 nt, Artificial Sequence
  Description of Artificial Sequence: Synthetic oligonucleotide
uucauugcccggcacaucu

SEQ ID NO: 2840786 - RNA, 19 nt, Artificial Sequence
  Description of Artificial Sequence: Synthetic oligonucleotide
cuuuauaaacccaggagga

SEQ ID NO: 2840787 - RNA, 19 nt, Artificial Sequence
  Description of Artificial Sequence: Synthetic oligonucleotide
aaguccuuuaguuggugca

SEQ ID NO: 2840788 - RNA, 19 nt, Artificial Sequence
  Description of Artificial Sequence: Synthetic oligonucleotide
ucucuuuugccugaggagc

SEQ ID NO: 2840789 - RNA, 19 nt, Artificial Sequence
  Description of Artificial Sequence: Synthetic oligonucleotide
caagaggcauccaaagucc

SEQ ID NO: 2840790 - RNA, 19 nt, Artificial Sequence
  Description of Artificial Sequence: Synthetic oligonucleotide
uuugcaacgccaaccuugc

SEQ ID NO: 2840791 - RNA, 19 nt, Artificial Sequence
  Description of Artificial Sequence: Synthetic oligonucleotide
aacugcugcgcgucgugcc

SEQ ID NO: 2840792 - RNA, 19 nt, Artificial Sequence
  Description of Artificial Sequence: Synthetic oligonucleotide
ugcaacucggaacuguucu

SEQ ID NO: 2840793 - RNA, 19 nt, Artificial Sequence
  Description of Artificial Sequence: Synthetic oligonucleotide
ugaccucucucccaagagg

SEQ ID NO: 2840794 - RNA, 19 nt, Artificial Sequence
  Description of Artificial Sequence: Synthetic oligonucleotide
cgaaugaugucauacaugg

SEQ ID NO: 2840795 - RNA, 19 nt, Artificial Sequence
  Description of Artificial Sequence: Synthetic oligonucleotide
ucgaaugaugucauacaug

SEQ ID NO: 2840796 - RNA, 19 nt, Artificial Sequence
  Description of Artificial Sequence: Synthetic oligonucleotide
aacugcuggauccuuacau

SEQ ID NO: 2840797 - RNA, 19 nt, Artificial Sequence
  Description of Artificial Sequence: Synthetic oligonucleotide
accuugcauaacuuugacc

SEQ ID NO: 2840798 - RNA, 19 nt, Artificial Sequence
  Description of Artificial Sequence: Synthetic oligonucleotide
augucuuuuauucucucga

SEQ ID NO: 2840799 - RNA, 19 nt, Artificial Sequence
  Description of Artificial Sequence: Synthetic oligonucleotide
ucguaaaaggacuccaagu

SEQ ID NO: 2840800 - RNA, 19 nt, Artificial Sequence
  Description of Artificial Sequence: Synthetic oligonucleotide
uuuauaaacccaggaggag

SEQ ID NO: 2840801 - RNA, 19 nt, Artificial Sequence
  Description of Artificial Sequence: Synthetic oligonucleotide
uucucuuuugccugaggag

SEQ ID NO: 2840802 - RNA, 19 nt, Artificial Sequence
  Description of Artificial Sequence: Synthetic oligonucleotide
accuuuugcaacgccaacc

SEQ ID NO: 2840803 - RNA, 19 nt, Artificial Sequence
  Description of Artificial Sequence: Synthetic oligonucleotide
ucgucuuucaucugaggug

SEQ ID NO: 2840804 - RNA, 19 nt, Artificial Sequence
  Description of Artificial Sequence: Synthetic oligonucleotide
aacucggaacuguucuaac

SEQ ID NO: 2840805 - RNA, 19 nt, Artificial Sequence
  Description of Artificial Sequence: Synthetic oligonucleotide
ucgugugcaacucggaacu

SEQ ID NO: 2840806 - RNA, 19 nt, Artificial Sequence
  Description of Artificial Sequence: Synthetic oligonucleotide
caugucuuuuauucucucg

SEQ ID NO: 2840807 - RNA, 19 nt, Artificial Sequence
  Description of Artificial Sequence: Synthetic oligonucleotide
ucucaugucuuuuauucuc

SEQ ID NO: 2840808 - RNA, 19 nt, Artificial Sequence
  Description of Artificial Sequence: Synthetic oligonucleotide
uaacuuugaccucucuccc

SEQ ID NO: 2840809 - RNA, 19 nt, Artificial Sequence
  Description of Artificial Sequence: Synthetic oligonucleotide
auacaugggauccucgugu

SEQ ID NO: 2840810 - RNA, 19 nt, Artificial Sequence
  Description of Artificial Sequence: Synthetic oligonucleotide
cucauccuccuuuauaaac

SEQ ID NO: 2840811 - RNA, 19 nt, Artificial Sequence
  Description of Artificial Sequence: Synthetic oligonucleotide
ugcaugagccagaaacucc

SEQ ID NO: 2840812 - RNA, 19 nt, Artificial Sequence
  Description of Artificial Sequence: Synthetic oligonucleotide
acugcuggauccuuacauc

SEQ ID NO: 2840813 - RNA, 19 nt, Artificial Sequence
  Description of Artificial Sequence: Synthetic oligonucleotide
ucucgaaugaugucauaca

SEQ ID NO: 2840814 - RNA, 19 nt, Artificial Sequence
  Description of Artificial Sequence: Synthetic oligonucleotide
ugccuuugauaaagaaagg

SEQ ID NO: 2840815 - RNA, 19 nt, Artificial Sequence
  Description of Artificial Sequence: Synthetic oligonucleotide
uuacauccuucucaugucu

SEQ ID NO: 2840816 - RNA, 19 nt, Artificial Sequence
  Description of Artificial Sequence: Synthetic oligonucleotide
uuucaucugagguggaguc

SEQ ID NO: 2840817 - RNA, 19 nt, Artificial Sequence
  Description of Artificial Sequence: Synthetic oligonucleotide
aagaaagggcauucuuugu

SEQ ID NO: 2840818 - RNA, 19 nt, Artificial Sequence
  Description of Artificial Sequence: Synthetic oligonucleotide
uuaacugcuggauccuuac

SEQ ID NO: 2840819 - RNA, 19 nt, Artificial Sequence
  Description of Artificial Sequence: Synthetic oligonucleotide
uguucgauggccauaccuu

SEQ ID NO: 2840820 - RNA, 19 nt, Artificial Sequence
  Description of Artificial Sequence: Synthetic oligonucleotide
uuugaccucucucccaaga

SEQ ID NO: 2840821 - RNA, 19 nt, Artificial Sequence
  Description of Artificial Sequence: Synthetic oligonucleotide
auccaaaguccuuuaguug

SEQ ID NO: 2840822 - RNA, 19 nt, Artificial Sequence
  Description of Artificial Sequence: Synthetic oligonucleotide
cauccuccuuuauaaaccc

SEQ ID NO: 2840823 - RNA, 19 nt, Artificial Sequence
  Description of Artificial Sequence: Synthetic oligonucleotide
cauaacuuugaccucucuc

SEQ ID NO: 2840824 - RNA, 19 nt, Artificial Sequence
  Description of Artificial Sequence: Synthetic oligonucleotide
auucucucgaaugauguca

SEQ ID NO: 2840825 - RNA, 19 nt, Artificial Sequence
  Description of Artificial Sequence: Synthetic oligonucleotide
cuuuuauucucucgaauga

SEQ ID NO: 2840826 - RNA, 19 nt, Artificial Sequence
  Description of Artificial Sequence: Synthetic oligonucleotide
auaaagaaagggcauucuu

SEQ ID NO: 2840827 - RNA, 19 nt, Artificial Sequence
  Description of Artificial Sequence: Synthetic oligonucleotide
ucugguauacagucuucug

SEQ ID NO: 2840828 - RNA, 19 nt, Artificial Sequence
  Description of Artificial Sequence: Synthetic oligonucleotide
uugaccucucucccaagag

SEQ ID NO: 2840829 - RNA, 19 nt, Artificial Sequence
  Description of Artificial Sequence: Synthetic oligonucleotide
cugcuggauccuuacaucc

SEQ ID NO: 2840830 - RNA, 19 nt, Artificial Sequence
  Description of Artificial Sequence: Synthetic oligonucleotide
ucauacaugggauccucgu

SEQ ID NO: 2840831 - RNA, 19 nt, Artificial Sequence
  Description of Artificial Sequence: Synthetic oligonucleotide
uauacagucuucuggcuuu

SEQ ID NO: 2840832 - RNA, 19 nt, Artificial Sequence
  Description of Artificial Sequence: Synthetic oligonucleotide
ugauaaagaaagggcauuc

SEQ ID NO: 2840833 - RNA, 19 nt, Artificial Sequence
  Description of Artificial Sequence: Synthetic oligonucleotide
cucguaaaaggacuccaag

SEQ ID NO: 2840834 - RNA, 19 nt, Artificial Sequence
  Description of Artificial Sequence: Synthetic oligonucleotide
ucccaagaggcauccaaag

SEQ ID NO: 2840835 - RNA, 19 nt, Artificial Sequence
  Description of Artificial Sequence: Synthetic oligonucleotide
ugcaacgccaaccuugcau

SEQ ID NO: 2840836 - RNA, 19 nt, Artificial Sequence
  Description of Artificial Sequence: Synthetic oligonucleotide
cuggcauguucauugcccg

SEQ ID NO: 2840837 - RNA, 19 nt, Artificial Sequence
  Description of Artificial Sequence: Synthetic oligonucleotide
cucccuggcauguucauug

SEQ ID NO: 2840838 - RNA, 19 nt, Artificial Sequence
  Description of Artificial Sequence: Synthetic oligonucleotide
ucuaacuucugguugccuu

SEQ ID NO: 2840839 - RNA, 19 nt, Artificial Sequence
  Description of Artificial Sequence: Synthetic oligonucleotide
aacuuugaccucucuccca

SEQ ID NO: 2840840 - RNA, 19 nt, Artificial Sequence
  Description of Artificial Sequence: Synthetic oligonucleotide
aaaggacuccaagugcuug

SEQ ID NO: 2840841 - RNA, 19 nt, Artificial Sequence
  Description of Artificial Sequence: Synthetic oligonucleotide
uucucaugucuuuuauucu

SEQ ID NO: 2840842 - RNA, 19 nt, Artificial Sequence
  Description of Artificial Sequence: Synthetic oligonucleotide
uucuuugucgccuguucga

SEQ ID NO: 2840843 - RNA, 19 nt, Artificial Sequence
  Description of Artificial Sequence: Synthetic oligonucleotide
uugccugaggagcuggagc

SEQ ID NO: 2840844 - RNA, 19 nt, Artificial Sequence
  Description of Artificial Sequence: Synthetic oligonucleotide
uugcauaacuuugaccucu

SEQ ID NO: 2840845 - RNA, 19 nt, Artificial Sequence
  Description of Artificial Sequence: Synthetic oligonucleotide
ucgauggccauaccuuuug

SEQ ID NO: 2840846 - RNA, 19 nt, Artificial Sequence
  Description of Artificial Sequence: Synthetic oligonucleotide
agguuucucguaaaaggac

SEQ ID NO: 2840847 - RNA, 19 nt, Artificial Sequence
  Description of Artificial Sequence: Synthetic oligonucleotide
cuguucuaacuucugguug

SEQ ID NO: 2840848 - RNA, 19 nt, Artificial Sequence
  Description of Artificial Sequence: Synthetic oligonucleotide
acaucugguauacagucuu

SEQ ID NO: 2840849 - RNA, 19 nt, Artificial Sequence
  Description of Artificial Sequence: Synthetic oligonucleotide
cugguugccuuugauaaag

SEQ ID NO: 2840850 - RNA, 19 nt, Artificial Sequence
  Description of Artificial Sequence: Synthetic oligonucleotide
aaacccaggaggagguuuc

SEQ ID NO: 2840851 - RNA, 19 nt, Artificial Sequence
  Description of Artificial Sequence: Synthetic oligonucleotide
cuuacauccuucucauguc

SEQ ID NO: 2840852 - RNA, 19 nt, Artificial Sequence
  Description of Artificial Sequence: Synthetic oligonucleotide
uuaguuggugcaugagcca

SEQ ID NO: 2840853 - RNA, 19 nt, Artificial Sequence
  Description of Artificial Sequence: Synthetic oligonucleotide
uuuaacugcuggauccuua

SEQ ID NO: 2840854 - RNA, 19 nt, Artificial Sequence
  Description of Artificial Sequence: Synthetic oligonucleotide
cauaccuuuugcaacgcca

SEQ ID NO: 2840855 - RNA, 19 nt, Artificial Sequence
  Description of Artificial Sequence: Synthetic oligonucleotide
uuuuauucucucgaaugau

SEQ ID NO: 2840856 - RNA, 19 nt, Artificial Sequence
  Description of Artificial Sequence: Synthetic oligonucleotide
gacuccaagugcuugagcu

SEQ ID NO: 2840857 - RNA, 19 nt, Artificial Sequence
  Description of Artificial Sequence: Synthetic oligonucleotide
gccuuugauaaagaaaggg

SEQ ID NO: 2840858 - RNA, 19 nt, Artificial Sequence
  Description of Artificial Sequence: Synthetic oligonucleotide
cucucgaaugaugucauac

SEQ ID NO: 2840859 - RNA, 19 nt, Artificial Sequence
  Description of Artificial Sequence: Synthetic oligonucleotide
gauccucgugugcaacucg

SEQ ID NO: 2840860 - RNA, 19 nt, Artificial Sequence
  Description of Artificial Sequence: Synthetic oligonucleotide
gucucauccuccuuuauaa

SEQ ID NO: 2840861 - RNA, 19 nt, Artificial Sequence
  Description of Artificial Sequence: Synthetic oligonucleotide
uuucucguaaaaggacucc

SEQ ID NO: 2840862 - RNA, 19 nt, Artificial Sequence
  Description of Artificial Sequence: Synthetic oligonucleotide
auggccauaccuuuugcaa

SEQ ID NO: 2840863 - RNA, 19 nt, Artificial Sequence
  Description of Artificial Sequence: Synthetic oligonucleotide
ugucuuuuauucucucgaa

SEQ ID NO: 2840864 - RNA, 19 nt, Artificial Sequence
  Description of Artificial Sequence: Synthetic oligonucleotide
uaguuggugcaugagccag

SEQ ID NO: 2840865 - RNA, 19 nt, Artificial Sequence
  Description of Artificial Sequence: Synthetic oligonucleotide
aacgccaaccuugcauaac

SEQ ID NO: 2840866 - RNA, 19 nt, Artificial Sequence
  Description of Artificial Sequence: Synthetic oligonucleotide
gagguuucucguaaaagga

SEQ ID NO: 2840867 - RNA, 19 nt, Artificial Sequence
  Description of Artificial Sequence: Synthetic oligonucleotide
ugagguggaguccuccagu

SEQ ID NO: 2840868 - RNA, 19 nt, Artificial Sequence
  Description of Artificial Sequence: Synthetic oligonucleotide
acuguucuaacuucugguu

SEQ ID NO: 2840869 - RNA, 19 nt, Artificial Sequence
  Description of Artificial Sequence: Synthetic oligonucleotide
acaugggauccucgugugc

SEQ ID NO: 2840870 - RNA, 19 nt, Artificial Sequence
  Description of Artificial Sequence: Synthetic oligonucleotide
cucgugugcaacucggaac

SEQ ID NO: 2840871 - RNA, 19 nt, Artificial Sequence
  Description of Artificial Sequence: Synthetic oligonucleotide
uugagcugcugcaacugcu

SEQ ID NO: 2840872 - RNA, 19 nt, Artificial Sequence
  Description of Artificial Sequence: Synthetic oligonucleotide
ucucguaaaaggacuccaa

SEQ ID NO: 2840873 - RNA, 19 nt, Artificial Sequence
  Description of Artificial Sequence: Synthetic oligonucleotide
ugucucauccuccuuuaua

SEQ ID NO: 2840874 - RNA, 19 nt, Artificial Sequence
  Description of Artificial Sequence: Synthetic oligonucleotide
ucaucugagguggaguccu

SEQ ID NO: 2840875 - RNA, 19 nt, Artificial Sequence
  Description of Artificial Sequence: Synthetic oligonucleotide
ggccauaccuuuugcaacg

SEQ ID NO: 2840876 - RNA, 19 nt, Artificial Sequence
  Description of Artificial Sequence: Synthetic oligonucleotide
acucggaacuguucuaacu

SEQ ID NO: 2840877 - RNA, 19 nt, Artificial Sequence
  Description of Artificial Sequence: Synthetic oligonucleotide
uucucguaaaaggacucca

SEQ ID NO: 2840878 - RNA, 19 nt, Artificial Sequence
  Description of Artificial Sequence: Synthetic oligonucleotide
ugaugucauacaugggauc

SEQ ID NO: 2840879 - RNA, 19 nt, Artificial Sequence
  Description of Artificial Sequence: Synthetic oligonucleotide
gauggccauaccuuuugca

SEQ ID NO: 2840880 - RNA, 19 nt, Artificial Sequence
  Description of Artificial Sequence: Synthetic oligonucleotide
ucucgucuuucaucugagg

SEQ ID NO: 2840881 - RNA, 19 nt, Artificial Sequence
  Description of Artificial Sequence: Synthetic oligonucleotide
cauacaugggauccucgug

SEQ ID NO: 2840882 - RNA, 19 nt, Artificial Sequence
  Description of Artificial Sequence: Synthetic oligonucleotide
uggccauaccuuuugcaac

SEQ ID NO: 2840883 - RNA, 19 nt, Artificial Sequence
  Description of Artificial Sequence: Synthetic oligonucleotide
cuucucuuuugccugagga

SEQ ID NO: 2840884 - RNA, 19 nt, Artificial Sequence
  Description of Artificial Sequence: Synthetic oligonucleotide
cuggcuuugucucauccuc

SEQ ID NO: 2840885 - RNA, 19 nt, Artificial Sequence
  Description of Artificial Sequence: Synthetic oligonucleotide
uuucuuugcgcuucucuuu

SEQ ID NO: 2840886 - RNA, 19 nt, Artificial Sequence
  Description of Artificial Sequence: Synthetic oligonucleotide
acgccaaccuugcauaacu

SEQ ID NO: 2840887 - RNA, 19 nt, Artificial Sequence
  Description of Artificial Sequence: Synthetic oligonucleotide
uauucucucgaaugauguc

SEQ ID NO: 2840888 - RNA, 19 nt, Artificial Sequence
  Description of Artificial Sequence: Synthetic oligonucleotide
cauugcccggcacaucugg

SEQ ID NO: 2840889 - RNA, 19 nt, Artificial Sequence
  Description of Artificial Sequence: Synthetic oligonucleotide
uugauaaagaaagggcauu

SEQ ID NO: 2840890 - RNA, 19 nt, Artificial Sequence
  Description of Artificial Sequence: Synthetic oligonucleotide
uccuuuaguuggugcauga

SEQ ID NO: 2840891 - RNA, 19 nt, Artificial Sequence
  Description of Artificial Sequence: Synthetic oligonucleotide
ucuggcuuugucucauccu

SEQ ID NO: 2840892 - RNA, 19 nt, Artificial Sequence
  Description of Artificial Sequence: Synthetic oligonucleotide
acuuugaccucucucccaa

SEQ ID NO: 2840893 - RNA, 19 nt, Artificial Sequence
  Description of Artificial Sequence: Synthetic oligonucleotide
auguucauugcccggcaca

SEQ ID NO: 2840894 - RNA, 19 nt, Artificial Sequence
  Description of Artificial Sequence: Synthetic oligonucleotide
uggcuuugucucauccucc

SEQ ID NO: 2840895 - RNA, 19 nt, Artificial Sequence
  Description of Artificial Sequence: Synthetic oligonucleotide
aggagguuucucguaaaag

SEQ ID NO: 2840896 - RNA, 19 nt, Artificial Sequence
  Description of Artificial Sequence: Synthetic oligonucleotide
auccuuacauccuucucau

SEQ ID NO: 2840897 - RNA, 19 nt, Artificial Sequence
  Description of Artificial Sequence: Synthetic oligonucleotide
uucucucgaaugaugucau

SEQ ID NO: 2840898 - RNA, 19 nt, Artificial Sequence
  Description of Artificial Sequence: Synthetic oligonucleotide
cguaaaaggacuccaagug

SEQ ID NO: 2840899 - RNA, 19 nt, Artificial Sequence
  Description of Artificial Sequence: Synthetic oligonucleotide
cuccaagugcuugagcugc

SEQ ID NO: 2840900 - RNA, 19 nt, Artificial Sequence
  Description of Artificial Sequence: Synthetic oligonucleotide
ccuugcauaacuuugaccu

SEQ ID NO: 2840901 - RNA, 19 nt, Artificial Sequence
  Description of Artificial Sequence: Synthetic oligonucleotide
gagccagaaacucccuggc

SEQ ID NO: 2840902 - RNA, 19 nt, Artificial Sequence
  Description of Artificial Sequence: Synthetic oligonucleotide
uuugucucauccuccuuua

SEQ ID NO: 2840903 - RNA, 19 nt, Artificial Sequence
  Description of Artificial Sequence: Synthetic oligonucleotide
ucggaacuguucuaacuuc

SEQ ID NO: 2840904 - RNA, 19 nt, Artificial Sequence
  Description of Artificial Sequence: Synthetic oligonucleotide
uucuuugcgcuucucuuuu

SEQ ID NO: 2840905 - RNA, 19 nt, Artificial Sequence
  Description of Artificial Sequence: Synthetic oligonucleotide
ucugagguggaguccucca

SEQ ID NO: 2840906 - RNA, 19 nt, Artificial Sequence
  Description of Artificial Sequence: Synthetic oligonucleotide
ccaagaggcauccaaaguc

SEQ ID NO: 2840907 - RNA, 19 nt, Artificial Sequence
  Description of Artificial Sequence: Synthetic oligonucleotide
acugcugcgcgucgugccg

SEQ ID NO: 2840908 - RNA, 19 nt, Artificial Sequence
  Description of Artificial Sequence: Synthetic oligonucleotide
cuugagcugcugcaacugc

SEQ ID NO: 2840909 - RNA, 19 nt, Artificial Sequence
  Description of Artificial Sequence: Synthetic oligonucleotide
ugugcaacucggaacuguu

SEQ ID NO: 2840910 - RNA, 19 nt, Artificial Sequence
  Description of Artificial Sequence: Synthetic oligonucleotide
guugccuuugauaaagaaa

SEQ ID NO: 2840911 - RNA, 19 nt, Artificial Sequence
  Description of Artificial Sequence: Synthetic oligonucleotide
ugcuggauccuuacauccu

SEQ ID NO: 2840912 - RNA, 19 nt, Artificial Sequence
  Description of Artificial Sequence: Synthetic oligonucleotide
cuugcauaacuuugaccuc

SEQ ID NO: 2840913 - RNA, 19 nt, Artificial Sequence
  Description of Artificial Sequence: Synthetic oligonucleotide
ccaaccuugcauaacuuug

SEQ ID NO: 2840914 - RNA, 19 nt, Artificial Sequence
  Description of Artificial Sequence: Synthetic oligonucleotide
aucugagguggaguccucc

SEQ ID NO: 2840915 - RNA, 19 nt, Artificial Sequence
  Description of Artificial Sequence: Synthetic oligonucleotide
uggcauguucauugcccgg

SEQ ID NO: 2840916 - RNA, 19 nt, Artificial Sequence
  Description of Artificial Sequence: Synthetic oligonucleotide
uccuucucaugucuuuuau

SEQ ID NO: 2840917 - RNA, 19 nt, Artificial Sequence
  Description of Artificial Sequence: Synthetic oligonucleotide
ugcuugagcugcugcaacu

SEQ ID NO: 2840918 - RNA, 19 nt, Artificial Sequence
  Description of Artificial Sequence: Synthetic oligonucleotide
augagccagaaacucccug

SEQ ID NO: 2840919 - RNA, 19 nt, Artificial Sequence
  Description of Artificial Sequence: Synthetic oligonucleotide
gguggaguccuccaguaac

SEQ ID NO: 2840920 - RNA, 19 nt, Artificial Sequence
  Description of Artificial Sequence: Synthetic oligonucleotide
uucaucugagguggagucc

SEQ ID NO: 2840921 - RNA, 19 nt, Artificial Sequence
  Description of Artificial Sequence: Synthetic oligonucleotide
uuugccugaggagcuggag

SEQ ID NO: 2840922 - RNA, 19 nt, Artificial Sequence
  Description of Artificial Sequence: Synthetic oligonucleotide
cuuuugccugaggagcugg

SEQ ID NO: 2840923 - RNA, 19 nt, Artificial Sequence
  Description of Artificial Sequence: Synthetic oligonucleotide
ccuggcauguucauugccc

SEQ ID NO: 2840924 - RNA, 19 nt, Artificial Sequence
  Description of Artificial Sequence: Synthetic oligonucleotide
caaccuugcauaacuuuga

SEQ ID NO: 2840925 - RNA, 19 nt, Artificial Sequence
  Description of Artificial Sequence: Synthetic oligonucleotide
cuccuuuauaaacccagga

SEQ ID NO: 2840926 - RNA, 19 nt, Artificial Sequence
  Description of Artificial Sequence: Synthetic oligonucleotide
uaacugcuggauccuuaca

SEQ ID NO: 2840927 - RNA, 19 nt, Artificial Sequence
  Description of Artificial Sequence: Synthetic oligonucleotide
uuuugccugaggagcugga

SEQ ID NO: 2840928 - RNA, 19 nt, Artificial Sequence
  Description of Artificial Sequence: Synthetic oligonucleotide
uguucauugcccggcacau

SEQ ID NO: 2840929 - RNA, 19 nt, Artificial Sequence
  Description of Artificial Sequence: Synthetic oligonucleotide
aggaggagguuucucguaa

SEQ ID NO: 2840930 - RNA, 19 nt, Artificial Sequence
  Description of Artificial Sequence: Synthetic oligonucleotide
ugucauacaugggauccuc

SEQ ID NO: 2840931 - RNA, 19 nt, Artificial Sequence
  Description of Artificial Sequence: Synthetic oligonucleotide
ucucauccuccuuuauaaa

SEQ ID NO: 2840932 - RNA, 19 nt, Artificial Sequence
  Description of Artificial Sequence: Synthetic oligonucleotide
augaugucauacaugggau

SEQ ID NO: 2840933 - RNA, 19 nt, Artificial Sequence
  Description of Artificial Sequence: Synthetic oligonucleotide
ugcauaacuuugaccucuc

SEQ ID NO: 2840934 - RNA, 19 nt, Artificial Sequence
  Description of Artificial Sequence: Synthetic oligonucleotide
aacuucugguugccuuuga

SEQ ID NO: 2840935 - RNA, 19 nt, Artificial Sequence
  Description of Artificial Sequence: Synthetic oligonucleotide
uaccuuuugcaacgccaac

SEQ ID NO: 2840936 - RNA, 19 nt, Artificial Sequence
  Description of Artificial Sequence: Synthetic oligonucleotide
guuucucguaaaaggacuc

SEQ ID NO: 2840937 - RNA, 19 nt, Artificial Sequence
  Description of Artificial Sequence: Synthetic oligonucleotide
uaacuucugguugccuuug

SEQ ID NO: 2840938 - RNA, 19 nt, Artificial Sequence
  Description of Artificial Sequence: Synthetic oligonucleotide
gucauacaugggauccucg

SEQ ID NO: 2840939 - RNA, 19 nt, Artificial Sequence
  Description of Artificial Sequence: Synthetic oligonucleotide
gauaaagaaagggcauucu

SEQ ID NO: 2840940 - RNA, 19 nt, Artificial Sequence
  Description of Artificial Sequence: Synthetic oligonucleotide
uacauccuucucaugucuu

SEQ ID NO: 2840941 - RNA, 19 nt, Artificial Sequence
  Description of Artificial Sequence: Synthetic oligonucleotide
uaaacccaggaggagguuu

SEQ ID NO: 2840942 - RNA, 19 nt, Artificial Sequence
  Description of Artificial Sequence: Synthetic oligonucleotide
aagaggcauccaaaguccu

SEQ ID NO: 2840943 - RNA, 19 nt, Artificial Sequence
  Description of Artificial Sequence: Synthetic oligonucleotide
ugguugccuuugauaaaga

SEQ ID NO: 2840944 - RNA, 19 nt, Artificial Sequence
  Description of Artificial Sequence: Synthetic oligonucleotide
ucuuugcgcuucucuuuug

SEQ ID NO: 2840945 - RNA, 19 nt, Artificial Sequence
  Description of Artificial Sequence: Synthetic oligonucleotide
ucucucccaagaggcaucc

SEQ ID NO: 2840946 - RNA, 19 nt, Artificial Sequence
  Description of Artificial Sequence: Synthetic oligonucleotide
cuuugucgccuguucgaug

SEQ ID NO: 2840947 - RNA, 19 nt, Artificial Sequence
  Description of Artificial Sequence: Synthetic oligonucleotide
cccaggaggagguuucucg

SEQ ID NO: 2840948 - RNA, 19 nt, Artificial Sequence
  Description of Artificial Sequence: Synthetic oligonucleotide
auccucgugugcaacucgg

SEQ ID NO: 2840949 - RNA, 19 nt, Artificial Sequence
  Description of Artificial Sequence: Synthetic oligonucleotide
gcaugagccagaaacuccc

SEQ ID NO: 2840950 - RNA, 19 nt, Artificial Sequence
  Description of Artificial Sequence: Synthetic oligonucleotide
agcuggagcugcucucguc

SEQ ID NO: 2840951 - RNA, 19 nt, Artificial Sequence
  Description of Artificial Sequence: Synthetic oligonucleotide
acuucugguugccuuugau

SEQ ID NO: 2840952 - RNA, 19 nt, Artificial Sequence
  Description of Artificial Sequence: Synthetic oligonucleotide
ucauugcccggcacaucug

SEQ ID NO: 2840953 - RNA, 19 nt, Artificial Sequence
  Description of Artificial Sequence: Synthetic oligonucleotide
uucgauggccauaccuuuu

SEQ ID NO: 2840954 - RNA, 19 nt, Artificial Sequence
  Description of Artificial Sequence: Synthetic oligonucleotide
ucuuuugccugaggagcug

SEQ ID NO: 2840955 - RNA, 19 nt, Artificial Sequence
  Description of Artificial Sequence: Synthetic oligonucleotide
acauccuucucaugucuuu

SEQ ID NO: 2840956 - RNA, 19 nt, Artificial Sequence
  Description of Artificial Sequence: Synthetic oligonucleotide
uggaguccuccaguaacug

SEQ ID NO: 2840957 - RNA, 19 nt, Artificial Sequence
  Description of Artificial Sequence: Synthetic oligonucleotide
ugcccggcacaucugguau

SEQ ID NO: 2840958 - RNA, 19 nt, Artificial Sequence
  Description of Artificial Sequence: Synthetic oligonucleotide
caugggauccucgugugca

SEQ ID NO: 2840959 - RNA, 19 nt, Artificial Sequence
  Description of Artificial Sequence: Synthetic oligonucleotide
ucuuugucgccuguucgau

SEQ ID NO: 2840960 - RNA, 19 nt, Artificial Sequence
  Description of Artificial Sequence: Synthetic oligonucleotide
auaccuuuugcaacgccaa

SEQ ID NO: 2840961 - RNA, 19 nt, Artificial Sequence
  Description of Artificial Sequence: Synthetic oligonucleotide
gaggagguuucucguaaaa

SEQ ID NO: 2840962 - RNA, 19 nt, Artificial Sequence
  Description of Artificial Sequence: Synthetic oligonucleotide
caucugguauacagucuuc

SEQ ID NO: 2840963 - RNA, 19 nt, Artificial Sequence
  Description of Artificial Sequence: Synthetic oligonucleotide
cucgucuuucaucugaggu

SEQ ID NO: 2840964 - RNA, 19 nt, Artificial Sequence
  Description of Artificial Sequence: Synthetic oligonucleotide
aaaaggacuccaagugcuu

SEQ ID NO: 2840965 - RNA, 19 nt, Artificial Sequence
  Description of Artificial Sequence: Synthetic oligonucleotide
guucuaacuucugguugcc

SEQ ID NO: 2840966 - RNA, 19 nt, Artificial Sequence
  Description of Artificial Sequence: Synthetic oligonucleotide
ccuccuuuauaaacccagg

SEQ ID NO: 2840967 - RNA, 19 nt, Artificial Sequence
  Description of Artificial Sequence: Synthetic oligonucleotide
ugucgccuguucgauggcc

SEQ ID NO: 2840968 - RNA, 19 nt, Artificial Sequence
  Description of Artificial Sequence: Synthetic oligonucleotide
cauguucauugcccggcac

SEQ ID NO: 2840969 - RNA, 19 nt, Artificial Sequence
  Description of Artificial Sequence: Synthetic oligonucleotide
uccucgugugcaacucgga

SEQ ID NO: 2840970 - RNA, 19 nt, Artificial Sequence
  Description of Artificial Sequence: Synthetic oligonucleotide
agccagaaacucccuggca

SEQ ID NO: 2840971 - RNA, 19 nt, Artificial Sequence
  Description of Artificial Sequence: Synthetic oligonucleotide
gugcaugagccagaaacuc

SEQ ID NO: 2840972 - RNA, 19 nt, Artificial Sequence
  Description of Artificial Sequence: Synthetic oligonucleotide
ucccuggcauguucauugc

SEQ ID NO: 2840973 - RNA, 19 nt, Artificial Sequence
  Description of Artificial Sequence: Synthetic oligonucleotide
cuuugaccucucucccaag

SEQ ID NO: 2840974 - RNA, 19 nt, Artificial Sequence
  Description of Artificial Sequence: Synthetic oligonucleotide
ugcugcaacugcugcgcgu

SEQ ID NO: 2840975 - RNA, 19 nt, Artificial Sequence
  Description of Artificial Sequence: Synthetic oligonucleotide
caaaguccuuuaguuggug

SEQ ID NO: 2840976 - RNA, 19 nt, Artificial Sequence
  Description of Artificial Sequence: Synthetic oligonucleotide
uuuuaacugcuggauccuu

SEQ ID NO: 2840977 - RNA, 19 nt, Artificial Sequence
  Description of Artificial Sequence: Synthetic oligonucleotide
ggcauccaaaguccuuuag

SEQ ID NO: 2840978 - RNA, 19 nt, Artificial Sequence
  Description of Artificial Sequence: Synthetic oligonucleotide
aguccuuuaguuggugcau

SEQ ID NO: 2840979 - RNA, 19 nt, Artificial Sequence
  Description of Artificial Sequence: Synthetic oligonucleotide
agugcuugagcugcugcaa

SEQ ID NO: 2840980 - RNA, 19 nt, Artificial Sequence
  Description of Artificial Sequence: Synthetic oligonucleotide
cagucuucuggcuuugucu

SEQ ID NO: 2840981 - RNA, 19 nt, Artificial Sequence
  Description of Artificial Sequence: Synthetic oligonucleotide
ggcauguucauugcccggc

SEQ ID NO: 2840982 - RNA, 19 nt, Artificial Sequence
  Description of Artificial Sequence: Synthetic oligonucleotide
cucaugucuuuuauucucu

SEQ ID NO: 2840983 - RNA, 19 nt, Artificial Sequence
  Description of Artificial Sequence: Synthetic oligonucleotide
uugucucauccuccuuuau

SEQ ID NO: 2840984 - RNA, 19 nt, Artificial Sequence
  Description of Artificial Sequence: Synthetic oligonucleotide
cucgaaugaugucauacau

SEQ ID NO: 2840985 - RNA, 19 nt, Artificial Sequence
  Description of Artificial Sequence: Synthetic oligonucleotide
uucuaacuucugguugccu

SEQ ID NO: 2840986 - RNA, 19 nt, Artificial Sequence
  Description of Artificial Sequence: Synthetic oligonucleotide
cugcucucgucuuucaucu

SEQ ID NO: 2840987 - RNA, 19 nt, Artificial Sequence
  Description of Artificial Sequence: Synthetic oligonucleotide
guccuuuaguuggugcaug

SEQ ID NO: 2840988 - RNA, 19 nt, Artificial Sequence
  Description of Artificial Sequence: Synthetic oligonucleotide
gagguggaguccuccagua

SEQ ID NO: 2840989 - RNA, 19 nt, Artificial Sequence
  Description of Artificial Sequence: Synthetic oligonucleotide
gcugcucucgucuuucauc

SEQ ID NO: 2840990 - RNA, 19 nt, Artificial Sequence
  Description of Artificial Sequence: Synthetic oligonucleotide
augucauacaugggauccu

SEQ ID NO: 2840991 - RNA, 19 nt, Artificial Sequence
  Description of Artificial Sequence: Synthetic oligonucleotide
ggaacuguucuaacuucug

SEQ ID NO: 2840992 - RNA, 19 nt, Artificial Sequence
  Description of Artificial Sequence: Synthetic oligonucleotide
uugucgccuguucgauggc

SEQ ID NO: 2840993 - RNA, 19 nt, Artificial Sequence
  Description of Artificial Sequence: Synthetic oligonucleotide
gguugccuuugauaaagaa

SEQ ID NO: 2840994 - RNA, 19 nt, Artificial Sequence
  Description of Artificial Sequence: Synthetic oligonucleotide
guauacagucuucuggcuu

SEQ ID NO: 2840995 - RNA, 19 nt, Artificial Sequence
  Description of Artificial Sequence: Synthetic oligonucleotide
uugcccggcacaucuggua

SEQ ID NO: 2840996 - RNA, 19 nt, Artificial Sequence
  Description of Artificial Sequence: Synthetic oligonucleotide
ccagaaacucccuggcaug

SEQ ID NO: 2840997 - RNA, 19 nt, Artificial Sequence
  Description of Artificial Sequence: Synthetic oligonucleotide
gccgcuucugcucccgccg

SEQ ID NO: 2840998 - RNA, 19 nt, Artificial Sequence
  Description of Artificial Sequence: Synthetic oligonucleotide
gcucucgucuuucaucuga

SEQ ID NO: 2840999 - RNA, 19 nt, Artificial Sequence
  Description of Artificial Sequence: Synthetic oligonucleotide
cuuugucucauccuccuuu

SEQ ID NO: 2841000 - RNA, 19 nt, Artificial Sequence
  Description of Artificial Sequence: Synthetic oligonucleotide
cuguucgauggccauaccu

SEQ ID NO: 2841001 - RNA, 19 nt, Artificial Sequence
  Description of Artificial Sequence: Synthetic oligonucleotide
cucccaagaggcauccaaa

SEQ ID NO: 2841002 - RNA, 19 nt, Artificial Sequence
  Description of Artificial Sequence: Synthetic oligonucleotide
ugcucucgucuuucaucug

SEQ ID NO: 2841003 - RNA, 19 nt, Artificial Sequence
  Description of Artificial Sequence: Synthetic oligonucleotide
cggcacaucugguauacag

SEQ ID NO: 2841004 - RNA, 19 nt, Artificial Sequence
  Description of Artificial Sequence: Synthetic oligonucleotide
ugcaacugcugcgcgucgu

SEQ ID NO: 2841005 - RNA, 19 nt, Artificial Sequence
  Description of Artificial Sequence: Synthetic oligonucleotide
gguuucucguaaaaggacu

SEQ ID NO: 2841006 - RNA, 19 nt, Artificial Sequence
  Description of Artificial Sequence: Synthetic oligonucleotide
ugcgcgucgugccgccgcc

SEQ ID NO: 2841007 - RNA, 19 nt, Artificial Sequence
  Description of Artificial Sequence: Synthetic oligonucleotide
cugcugcaacugcugcgcg

SEQ ID NO: 2841008 - RNA, 19 nt, Artificial Sequence
  Description of Artificial Sequence: Synthetic oligonucleotide
cucggaacuguucuaacuu

SEQ ID NO: 2841009 - RNA, 19 nt, Artificial Sequence
  Description of Artificial Sequence: Synthetic oligonucleotide
ggauccuuacauccuucuc

SEQ ID NO: 2841010 - RNA, 19 nt, Artificial Sequence
  Description of Artificial Sequence: Synthetic oligonucleotide
aacccaggaggagguuucu

SEQ ID NO: 2841011 - RNA, 19 nt, Artificial Sequence
  Description of Artificial Sequence: Synthetic oligonucleotide
gcuucucuuuugccugagg

SEQ ID NO: 2841012 - RNA, 19 nt, Artificial Sequence
  Description of Artificial Sequence: Synthetic oligonucleotide
gaggagcuggagcugcucu

SEQ ID NO: 2841013 - RNA, 19 nt, Artificial Sequence
  Description of Artificial Sequence: Synthetic oligonucleotide
ugggauccucgugugcaac

SEQ ID NO: 2841014 - RNA, 19 nt, Artificial Sequence
  Description of Artificial Sequence: Synthetic oligonucleotide
uugcaacgccaaccuugca

SEQ ID NO: 2841015 - RNA, 19 nt, Artificial Sequence
  Description of Artificial Sequence: Synthetic oligonucleotide
gaguccuccaguaacuguu

SEQ ID NO: 2841016 - RNA, 19 nt, Artificial Sequence
  Description of Artificial Sequence: Synthetic oligonucleotide
ucucucgaaugaugucaua

SEQ ID NO: 2841017 - RNA, 19 nt, Artificial Sequence
  Description of Artificial Sequence: Synthetic oligonucleotide
gcaacgccaaccuugcaua

SEQ ID NO: 2841018 - RNA, 19 nt, Artificial Sequence
  Description of Artificial Sequence: Synthetic oligonucleotide
augggauccucgugugcaa

SEQ ID NO: 2841019 - RNA, 19 nt, Artificial Sequence
  Description of Artificial Sequence: Synthetic oligonucleotide
uggagcugcucucgucuuu

SEQ ID NO: 2841020 - RNA, 19 nt, Artificial Sequence
  Description of Artificial Sequence: Synthetic oligonucleotide
agcugcucucgucuuucau

SEQ ID NO: 2841021 - RNA, 19 nt, Artificial Sequence
  Description of Artificial Sequence: Synthetic oligonucleotide
cuuucaucugagguggagu

SEQ ID NO: 2841022 - RNA, 19 nt, Artificial Sequence
  Description of Artificial Sequence: Synthetic oligonucleotide
caacugcugcgcgucgugc

SEQ ID NO: 2841023 - RNA, 19 nt, Artificial Sequence
  Description of Artificial Sequence: Synthetic oligonucleotide
agguggaguccuccaguaa

SEQ ID NO: 2841024 - RNA, 19 nt, Artificial Sequence
  Description of Artificial Sequence: Synthetic oligonucleotide
cugcaacugcugcgcgucg

SEQ ID NO: 2841025 - RNA, 19 nt, Artificial Sequence
  Description of Artificial Sequence: Synthetic oligonucleotide
caacucggaacuguucuaa

SEQ ID NO: 2841026 - RNA, 19 nt, Artificial Sequence
  Description of Artificial Sequence: Synthetic oligonucleotide
guuggugcaugagccagaa

SEQ ID NO: 2841027 - RNA, 19 nt, Artificial Sequence
  Description of Artificial Sequence: Synthetic oligonucleotide
cuaacuucugguugccuuu

SEQ ID NO: 2841028 - RNA, 19 nt, Artificial Sequence
  Description of Artificial Sequence: Synthetic oligonucleotide
gaggcauccaaaguccuuu

SEQ ID NO: 2841029 - RNA, 19 nt, Artificial Sequence
  Description of Artificial Sequence: Synthetic oligonucleotide
acccaggaggagguuucuc

SEQ ID NO: 2841030 - RNA, 19 nt, Artificial Sequence
  Description of Artificial Sequence: Synthetic oligonucleotide
gcuugagcugcugcaacug

SEQ ID NO: 2841031 - RNA, 19 nt, Artificial Sequence
  Description of Artificial Sequence: Synthetic oligonucleotide
aguuggugcaugagccaga

SEQ ID NO: 2841032 - RNA, 19 nt, Artificial Sequence
  Description of Artificial Sequence: Synthetic oligonucleotide
gcauccaaaguccuuuagu

SEQ ID NO: 2841033 - RNA, 19 nt, Artificial Sequence
  Description of Artificial Sequence: Synthetic oligonucleotide
cuucugcucccgccgccgc

SEQ ID NO: 2841034 - RNA, 19 nt, Artificial Sequence
  Description of Artificial Sequence: Synthetic oligonucleotide
ugaggagcuggagcugcuc

SEQ ID NO: 2841035 - RNA, 19 nt, Artificial Sequence
  Description of Artificial Sequence: Synthetic oligonucleotide
aggcauccaaaguccuuua

SEQ ID NO: 2841036 - RNA, 19 nt, Artificial Sequence
  Description of Artificial Sequence: Synthetic oligonucleotide
ucgccuguucgauggccau

SEQ ID NO: 2841037 - RNA, 19 nt, Artificial Sequence
  Description of Artificial Sequence: Synthetic oligonucleotide
uuggugcaugagccagaaa

SEQ ID NO: 2841038 - RNA, 19 nt, Artificial Sequence
  Description of Artificial Sequence: Synthetic oligonucleotide
ggacuccaagugcuugagc

SEQ ID NO: 2841039 - RNA, 19 nt, Artificial Sequence
  Description of Artificial Sequence: Synthetic oligonucleotide
guucgauggccauaccuuu

SEQ ID NO: 2841040 - RNA, 19 nt, Artificial Sequence
  Description of Artificial Sequence: Synthetic oligonucleotide
auccuccuuuauaaaccca

SEQ ID NO: 2841041 - RNA, 19 nt, Artificial Sequence
  Description of Artificial Sequence: Synthetic oligonucleotide
ugcugcgcgucgugccgcc

SEQ ID NO: 2841042 - RNA, 19 nt, Artificial Sequence
  Description of Artificial Sequence: Synthetic oligonucleotide
ccauaccuuuugcaacgcc

SEQ ID NO: 2841043 - RNA, 19 nt, Artificial Sequence
  Description of Artificial Sequence: Synthetic oligonucleotide
gccuguucgauggccauac

SEQ ID NO: 2841044 - RNA, 19 nt, Artificial Sequence
  Description of Artificial Sequence: Synthetic oligonucleotide
ccuuuaguuggugcaugag

SEQ ID NO: 2841045 - RNA, 19 nt, Artificial Sequence
  Description of Artificial Sequence: Synthetic oligonucleotide
cugcgcgucgugccgccgc

SEQ ID NO: 2841046 - RNA, 19 nt, Artificial Sequence
  Description of Artificial Sequence: Synthetic oligonucleotide
caucugagguggaguccuc

SEQ ID NO: 2841047 - RNA, 19 nt, Artificial Sequence
  Description of Artificial Sequence: Synthetic oligonucleotide
gcaacugcugcgcgucgug

SEQ ID NO: 2841048 - RNA, 19 nt, Artificial Sequence
  Description of Artificial Sequence: Synthetic oligonucleotide
auugcccggcacaucuggu

SEQ ID NO: 2841049 - RNA, 19 nt, Artificial Sequence
  Description of Artificial Sequence: Synthetic oligonucleotide
gucgccuguucgauggcca

SEQ ID NO: 2841050 - RNA, 19 nt, Artificial Sequence
  Description of Artificial Sequence: Synthetic oligonucleotide
gggcauucuuugucgccug

SEQ ID NO: 2841051 - RNA, 19 nt, Artificial Sequence
  Description of Artificial Sequence: Synthetic oligonucleotide
ggugcaugagccagaaacu

SEQ ID NO: 2841052 - RNA, 19 nt, Artificial Sequence
  Description of Artificial Sequence: Synthetic oligonucleotide
agaggcauccaaaguccuu

SEQ ID NO: 2841053 - RNA, 19 nt, Artificial Sequence
  Description of Artificial Sequence: Synthetic oligonucleotide
gcugcaacugcugcgcguc

SEQ ID NO: 2841054 - RNA, 19 nt, Artificial Sequence
  Description of Artificial Sequence: Synthetic oligonucleotide
gugcaacucggaacuguuc

SEQ ID NO: 2841055 - RNA, 19 nt, Artificial Sequence
  Description of Artificial Sequence: Synthetic oligonucleotide
caacgccaaccuugcauaa

SEQ ID NO: 2841056 - RNA, 19 nt, Artificial Sequence
  Description of Artificial Sequence: Synthetic oligonucleotide
agaaacucccuggcauguu

SEQ ID NO: 2841057 - RNA, 19 nt, Artificial Sequence
  Description of Artificial Sequence: Synthetic oligonucleotide
auaaacccaggaggagguu

SEQ ID NO: 2841058 - RNA, 19 nt, Artificial Sequence
  Description of Artificial Sequence: Synthetic oligonucleotide
gcauguucauugcccggca

SEQ ID NO: 2841059 - RNA, 19 nt, Artificial Sequence
  Description of Artificial Sequence: Synthetic oligonucleotide
caggaggagguuucucgua

SEQ ID NO: 2841060 - RNA, 19 nt, Artificial Sequence
  Description of Artificial Sequence: Synthetic oligonucleotide
ggagcugcucucgucuuuc

SEQ ID NO: 2841061 - RNA, 19 nt, Artificial Sequence
  Description of Artificial Sequence: Synthetic oligonucleotide
ggauccucgugugcaacuc

SEQ ID NO: 2841062 - RNA, 19 nt, Artificial Sequence
  Description of Artificial Sequence: Synthetic oligonucleotide
guggaguccuccaguaacu

SEQ ID NO: 2841063 - RNA, 19 nt, Artificial Sequence
  Description of Artificial Sequence: Synthetic oligonucleotide
accucucucccaagaggca

SEQ ID NO: 2841064 - RNA, 19 nt, Artificial Sequence
  Description of Artificial Sequence: Synthetic oligonucleotide
aguccuccaguaacuguuu

SEQ ID NO: 2841065 - RNA, 19 nt, Artificial Sequence
  Description of Artificial Sequence: Synthetic oligonucleotide
ccuuuugcaacgccaaccu

SEQ ID NO: 2841066 - RNA, 19 nt, Artificial Sequence
  Description of Artificial Sequence: Synthetic oligonucleotide
guucauugcccggcacauc

SEQ ID NO: 2841067 - RNA, 19 nt, Artificial Sequence
  Description of Artificial Sequence: Synthetic oligonucleotide
ggaggagguuucucguaaa

SEQ ID NO: 2841068 - RNA, 19 nt, Artificial Sequence
  Description of Artificial Sequence: Synthetic oligonucleotide
ggcuuugucucauccuccu

SEQ ID NO: 2841069 - RNA, 19 nt, Artificial Sequence
  Description of Artificial Sequence: Synthetic oligonucleotide
cccuggcauguucauugcc

SEQ ID NO: 2841070 - RNA, 19 nt, Artificial Sequence
  Description of Artificial Sequence: Synthetic oligonucleotide
gugugcaacucggaacugu

SEQ ID NO: 2841071 - RNA, 19 nt, Artificial Sequence
  Description of Artificial Sequence: Synthetic oligonucleotide
cugcugcgcgucgugccgc

SEQ ID NO: 2841072 - RNA, 19 nt, Artificial Sequence
  Description of Artificial Sequence: Synthetic oligonucleotide
ggaguccuccaguaacugu

SEQ ID NO: 2841073 - RNA, 19 nt, Artificial Sequence
  Description of Artificial Sequence: Synthetic oligonucleotide
ggcacaucugguauacagu

SEQ ID NO: 2841074 - RNA, 19 nt, Artificial Sequence
  Description of Artificial Sequence: Synthetic oligonucleotide
caugagccagaaacucccu

SEQ ID NO: 2841075 - RNA, 19 nt, Artificial Sequence
  Description of Artificial Sequence: Synthetic oligonucleotide
gcaacucggaacuguucua

SEQ ID NO: 2841076 - RNA, 19 nt, Artificial Sequence
  Description of Artificial Sequence: Synthetic oligonucleotide
gccauaccuuuugcaacgc

SEQ ID NO: 2841077 - RNA, 19 nt, Artificial Sequence
  Description of Artificial Sequence: Synthetic oligonucleotide
cagaaacucccuggcaugu

SEQ ID NO: 2841078 - RNA, 19 nt, Artificial Sequence
  Description of Artificial Sequence: Synthetic oligonucleotide
cccggcacaucugguauac

SEQ ID NO: 2841079 - RNA, 19 nt, Artificial Sequence
  Description of Artificial Sequence: Synthetic oligonucleotide
cgauggccauaccuuuugc

SEQ ID NO: 2841080 - RNA, 19 nt, Artificial Sequence
  Description of Artificial Sequence: Synthetic oligonucleotide
gucuuucaucugaggugga

SEQ ID NO: 2841081 - RNA, 19 nt, Artificial Sequence
  Description of Artificial Sequence: Synthetic oligonucleotide
ucgugccgccgccgcuucu

SEQ ID NO: 2841082 - RNA, 19 nt, Artificial Sequence
  Description of Artificial Sequence: Synthetic oligonucleotide
gccaaccuugcauaacuuu

SEQ ID NO: 2841083 - RNA, 19 nt, Artificial Sequence
  Description of Artificial Sequence: Synthetic oligonucleotide
gggauccucgugugcaacu

SEQ ID NO: 2841084 - RNA, 19 nt, Artificial Sequence
  Description of Artificial Sequence: Synthetic oligonucleotide
cuuuugcaacgccaaccuu

SEQ ID NO: 2841085 - RNA, 19 nt, Artificial Sequence
  Description of Artificial Sequence: Synthetic oligonucleotide
ccucgugugcaacucggaa

SEQ ID NO: 2841086 - RNA, 19 nt, Artificial Sequence
  Description of Artificial Sequence: Synthetic oligonucleotide
ccuguucgauggccauacc

SEQ ID NO: 2841087 - RNA, 19 nt, Artificial Sequence
  Description of Artificial Sequence: Synthetic oligonucleotide
cauccuucucaugucuuuu

SEQ ID NO: 2841088 - RNA, 19 nt, Artificial Sequence
  Description of Artificial Sequence: Synthetic oligonucleotide
ccaaaguccuuuaguuggu

SEQ ID NO: 2841089 - RNA, 19 nt, Artificial Sequence
  Description of Artificial Sequence: Synthetic oligonucleotide
gucgugccgccgccgcuuc

SEQ ID NO: 2841090 - RNA, 19 nt, Artificial Sequence
  Description of Artificial Sequence: Synthetic oligonucleotide
gcauaacuuugaccucucu

SEQ ID NO: 2841091 - RNA, 19 nt, Artificial Sequence
  Description of Artificial Sequence: Synthetic oligonucleotide
ccaggaggagguuucucgu

SEQ ID NO: 2841092 - RNA, 19 nt, Artificial Sequence
  Description of Artificial Sequence: Synthetic oligonucleotide
guccuccaguaacuguuuu

SEQ ID NO: 2841093 - RNA, 19 nt, Artificial Sequence
  Description of Artificial Sequence: Synthetic oligonucleotide
ggcauucuuugucgccugu

SEQ ID NO: 2841094 - RNA, 19 nt, Artificial Sequence
  Description of Artificial Sequence: Synthetic oligonucleotide
cggaacuguucuaacuucu

SEQ ID NO: 2841095 - RNA, 19 nt, Artificial Sequence
  Description of Artificial Sequence: Synthetic oligonucleotide
gccgccgcuucugcucccg

SEQ ID NO: 2841096 - RNA, 19 nt, Artificial Sequence
  Description of Artificial Sequence: Synthetic oligonucleotide
cuggagcugcucucgucuu

SEQ ID NO: 2841097 - RNA, 19 nt, Artificial Sequence
  Description of Artificial Sequence: Synthetic oligonucleotide
cgcuucugcucccgccgcc

SEQ ID NO: 2841098 - RNA, 19 nt, Artificial Sequence
  Description of Artificial Sequence: Synthetic oligonucleotide
gcugcgcgucgugccgccg

SEQ ID NO: 2841099 - RNA, 19 nt, Artificial Sequence
  Description of Artificial Sequence: Synthetic oligonucleotide
cgugugcaacucggaacug

SEQ ID NO: 2841100 - RNA, 19 nt, Artificial Sequence
  Description of Artificial Sequence: Synthetic oligonucleotide
cgcgucgugccgccgccgc

SEQ ID NO: 2841101 - RNA, 19 nt, Artificial Sequence
  Description of Artificial Sequence: Synthetic oligonucleotide
gcuuugucucauccuccuu

SEQ ID NO: 2841102 - RNA, 19 nt, Artificial Sequence
  Description of Artificial Sequence: Synthetic oligonucleotide
gcccggcacaucugguaua

SEQ ID NO: 2841103 - RNA, 19 nt, Artificial Sequence
  Description of Artificial Sequence: Synthetic oligonucleotide
gcauucuuugucgccuguu

SEQ ID NO: 2841104 - RNA, 19 nt, Artificial Sequence
  Description of Artificial Sequence: Synthetic oligonucleotide
cgugccgccgccgcuucug

SEQ ID NO: 2841105 - RNA, 19 nt, Artificial Sequence
  Description of Artificial Sequence: Synthetic oligonucleotide
ccucucucccaagaggcau

SEQ ID NO: 2841106 - RNA, 19 nt, Artificial Sequence
  Description of Artificial Sequence: Synthetic oligonucleotide
gcgcgucgugccgccgccg

SEQ ID NO: 2841107 - RNA, 19 nt, Artificial Sequence
  Description of Artificial Sequence: Synthetic oligonucleotide
ccgccgcuucugcucccgc

SEQ ID NO: 2841108 - RNA, 19 nt, Artificial Sequence
  Description of Artificial Sequence: Synthetic oligonucleotide
ccggcacaucugguauaca

SEQ ID NO: 2841109 - RNA, 19 nt, Artificial Sequence
  Description of Artificial Sequence: Synthetic oligonucleotide
gcgucgugccgccgccgcu

SEQ ID NO: 2841110 - RNA, 19 nt, Artificial Sequence
  Description of Artificial Sequence: Synthetic oligonucleotide
cgccaaccuugcauaacuu

SEQ ID NO: 2841111 - RNA, 19 nt, Artificial Sequence
  Description of Artificial Sequence: Synthetic oligonucleotide
cgccuguucgauggccaua

SEQ ID NO: 2841112 - RNA, 19 nt, Artificial Sequence
  Description of Artificial Sequence: Synthetic oligonucleotide
cgucgugccgccgccgcuu

SEQ ID NO: 2841113 - RNA, 19 nt, Artificial Sequence
  Description of Artificial Sequence: Synthetic oligonucleotide
aauggagcgaauaagaucg

SEQ ID NO: 2841114 - RNA, 19 nt, Artificial Sequence
  Description of Artificial Sequence: Synthetic oligonucleotide
aauaagaucgaagaucucg

SEQ ID NO: 2841115 - RNA, 19 nt, Artificial Sequence
  Description of Artificial Sequence: Synthetic oligonucleotide
auuuaauuccucuagcguc

SEQ ID NO: 2841116 - RNA, 19 nt, Artificial Sequence
  Description of Artificial Sequence: Synthetic oligonucleotide
uugacuuugauagaaaggc

SEQ ID NO: 2841117 - RNA, 19 nt, Artificial Sequence
  Description of Artificial Sequence: Synthetic oligonucleotide
uucuacuacauuuaauucc

SEQ ID NO: 2841118 - RNA, 19 nt, Artificial Sequence
  Description of Artificial Sequence: Synthetic oligonucleotide
ugcacauccaucuugaaac

SEQ ID NO: 2841119 - RNA, 19 nt, Artificial Sequence
  Description of Artificial Sequence: Synthetic oligonucleotide
auaaguguggccaugcugc

SEQ ID NO: 2841120 - RNA, 19 nt, Artificial Sequence
  Description of Artificial Sequence: Synthetic oligonucleotide
acauuuaauuccucuagcg

SEQ ID NO: 2841121 - RNA, 19 nt, Artificial Sequence
  Description of Artificial Sequence: Synthetic oligonucleotide
ucuacuacauuuaauuccu

SEQ ID NO: 2841122 - RNA, 19 nt, Artificial Sequence
  Description of Artificial Sequence: Synthetic oligonucleotide
uucucuagaagcccgaccc

SEQ ID NO: 2841123 - RNA, 19 nt, Artificial Sequence
  Description of Artificial Sequence: Synthetic oligonucleotide
aagaucgaagaucucgcgg

SEQ ID NO: 2841124 - RNA, 19 nt, Artificial Sequence
  Description of Artificial Sequence: Synthetic oligonucleotide
uguucuacuacauuuaauu

SEQ ID NO: 2841125 - RNA, 19 nt, Artificial Sequence
  Description of Artificial Sequence: Synthetic oligonucleotide
gauagaaaggccuauaagu

SEQ ID NO: 2841126 - RNA, 19 nt, Artificial Sequence
  Description of Artificial Sequence: Synthetic oligonucleotide
uuuaauuccucuagcguca

SEQ ID NO: 2841127 - RNA, 19 nt, Artificial Sequence
  Description of Artificial Sequence: Synthetic oligonucleotide
aaugugcacauccaucuug

SEQ ID NO: 2841128 - RNA, 19 nt, Artificial Sequence
  Description of Artificial Sequence: Synthetic oligonucleotide
ugauagaaaggccuauaag

SEQ ID NO: 2841129 - RNA, 19 nt, Artificial Sequence
  Description of Artificial Sequence: Synthetic oligonucleotide
agaucgaagaucucgcggg

SEQ ID NO: 2841130 - RNA, 19 nt, Artificial Sequence
  Description of Artificial Sequence: Synthetic oligonucleotide
aacuuguucuacuacauuu

SEQ ID NO: 2841131 - RNA, 19 nt, Artificial Sequence
  Description of Artificial Sequence: Synthetic oligonucleotide
cuugacuuugauagaaagg

SEQ ID NO: 2841132 - RNA, 19 nt, Artificial Sequence
  Description of Artificial Sequence: Synthetic oligonucleotide
uuccuuaucugcaagcugu

SEQ ID NO: 2841133 - RNA, 19 nt, Artificial Sequence
  Description of Artificial Sequence: Synthetic oligonucleotide
uggucaaaagccaggcucg

SEQ ID NO: 2841134 - RNA, 19 nt, Artificial Sequence
  Description of Artificial Sequence: Synthetic oligonucleotide
auaagaucgaagaucucgc

SEQ ID NO: 2841135 - RNA, 19 nt, Artificial Sequence
  Description of Artificial Sequence: Synthetic oligonucleotide
uauaaguguggccaugcug

SEQ ID NO: 2841136 - RNA, 19 nt, Artificial Sequence
  Description of Artificial Sequence: Synthetic oligonucleotide
uacauuuaauuccucuagc

SEQ ID NO: 2841137 - RNA, 19 nt, Artificial Sequence
  Description of Artificial Sequence: Synthetic oligonucleotide
aaggccuauaaguguggcc

SEQ ID NO: 2841138 - RNA, 19 nt, Artificial Sequence
  Description of Artificial Sequence: Synthetic oligonucleotide
aauuccucuagcgucagug

SEQ ID NO: 2841139 - RNA, 19 nt, Artificial Sequence
  Description of Artificial Sequence: Synthetic oligonucleotide
cuacauuuaauuccucuag

SEQ ID NO: 2841140 - RNA, 19 nt, Artificial Sequence
  Description of Artificial Sequence: Synthetic oligonucleotide
guuggcguucucuagaagc

SEQ ID NO: 2841141 - RNA, 19 nt, Artificial Sequence
  Description of Artificial Sequence: Synthetic oligonucleotide
uguaaugugcacauccauc

SEQ ID NO: 2841142 - RNA, 19 nt, Artificial Sequence
  Description of Artificial Sequence: Synthetic oligonucleotide
ucauuaauggagcgaauaa

SEQ ID NO: 2841143 - RNA, 19 nt, Artificial Sequence
  Description of Artificial Sequence: Synthetic oligonucleotide
uccaucuugaaacgcuggg

SEQ ID NO: 2841144 - RNA, 19 nt, Artificial Sequence
  Description of Artificial Sequence: Synthetic oligonucleotide
agggucgcuaaccugaauc

SEQ ID NO: 2841145 - RNA, 19 nt, Artificial Sequence
  Description of Artificial Sequence: Synthetic oligonucleotide
aagccaggcucgcagcugc

SEQ ID NO: 2841146 - RNA, 19 nt, Artificial Sequence
  Description of Artificial Sequence: Synthetic oligonucleotide
ugcaguguggaaugguggg

SEQ ID NO: 2841147 - RNA, 19 nt, Artificial Sequence
  Description of Artificial Sequence: Synthetic oligonucleotide
gagcgaauaagaucgaaga

SEQ ID NO: 2841148 - RNA, 19 nt, Artificial Sequence
  Description of Artificial Sequence: Synthetic oligonucleotide
auuaauggagcgaauaaga

SEQ ID NO: 2841149 - RNA, 19 nt, Artificial Sequence
  Description of Artificial Sequence: Synthetic oligonucleotide
uuaauggagcgaauaagau

SEQ ID NO: 2841150 - RNA, 19 nt, Artificial Sequence
  Description of Artificial Sequence: Synthetic oligonucleotide
auagaaaggccuauaagug

SEQ ID NO: 2841151 - RNA, 19 nt, Artificial Sequence
  Description of Artificial Sequence: Synthetic oligonucleotide
aaaggccuauaaguguggc

SEQ ID NO: 2841152 - RNA, 19 nt, Artificial Sequence
  Description of Artificial Sequence: Synthetic oligonucleotide
uugauagaaaggccuauaa

SEQ ID NO: 2841153 - RNA, 19 nt, Artificial Sequence
  Description of Artificial Sequence: Synthetic oligonucleotide
ugacuuugauagaaaggcc

SEQ ID NO: 2841154 - RNA, 19 nt, Artificial Sequence
  Description of Artificial Sequence: Synthetic oligonucleotide
aagggaucgaagaagcuug

SEQ ID NO: 2841155 - RNA, 19 nt, Artificial Sequence
  Description of Artificial Sequence: Synthetic oligonucleotide
uaauggagcgaauaagauc

SEQ ID NO: 2841156 - RNA, 19 nt, Artificial Sequence
  Description of Artificial Sequence: Synthetic oligonucleotide
uacuacauuuaauuccucu

SEQ ID NO: 2841157 - RNA, 19 nt, Artificial Sequence
  Description of Artificial Sequence: Synthetic oligonucleotide
uucacugcauguuccgagg

SEQ ID NO: 2841158 - RNA, 19 nt, Artificial Sequence
  Description of Artificial Sequence: Synthetic oligonucleotide
aacgcuggggaagggaucg

SEQ ID NO: 2841159 - RNA, 19 nt, Artificial Sequence
  Description of Artificial Sequence: Synthetic oligonucleotide
uagaaaggccuauaagugu

SEQ ID NO: 2841160 - RNA, 19 nt, Artificial Sequence
  Description of Artificial Sequence: Synthetic oligonucleotide
uuggcguucucuagaagcc

SEQ ID NO: 2841161 - RNA, 19 nt, Artificial Sequence
  Description of Artificial Sequence: Synthetic oligonucleotide
cauuaauggagcgaauaag

SEQ ID NO: 2841162 - RNA, 19 nt, Artificial Sequence
  Description of Artificial Sequence: Synthetic oligonucleotide
uguucguccuccucgcccg

SEQ ID NO: 2841163 - RNA, 19 nt, Artificial Sequence
  Description of Artificial Sequence: Synthetic oligonucleotide
ucuugaaacgcuggggaag

SEQ ID NO: 2841164 - RNA, 19 nt, Artificial Sequence
  Description of Artificial Sequence: Synthetic oligonucleotide
uguuguucacugcauguuc

SEQ ID NO: 2841165 - RNA, 19 nt, Artificial Sequence
  Description of Artificial Sequence: Synthetic oligonucleotide
uguuccgaggcaugggucc

SEQ ID NO: 2841166 - RNA, 19 nt, Artificial Sequence
  Description of Artificial Sequence: Synthetic oligonucleotide
aggcugguggucaaaagcc

SEQ ID NO: 2841167 - RNA, 19 nt, Artificial Sequence
  Description of Artificial Sequence: Synthetic oligonucleotide
cuccgggucauuaauggag

SEQ ID NO: 2841168 - RNA, 19 nt, Artificial Sequence
  Description of Artificial Sequence: Synthetic oligonucleotide
acuacauuuaauuccucua

SEQ ID NO: 2841169 - RNA, 19 nt, Artificial Sequence
  Description of Artificial Sequence: Synthetic oligonucleotide
aaaagccaggcucgcagcu

SEQ ID NO: 2841170 - RNA, 19 nt, Artificial Sequence
  Description of Artificial Sequence: Synthetic oligonucleotide
uuguucacugcauguuccg

SEQ ID NO: 2841171 - RNA, 19 nt, Artificial Sequence
  Description of Artificial Sequence: Synthetic oligonucleotide
uggagcugaggccaggaca

SEQ ID NO: 2841172 - RNA, 19 nt, Artificial Sequence
  Description of Artificial Sequence: Synthetic oligonucleotide
guggucaaaagccaggcuc

SEQ ID NO: 2841173 - RNA, 19 nt, Artificial Sequence
  Description of Artificial Sequence: Synthetic oligonucleotide
auuccucuagcgucagugg

SEQ ID NO: 2841174 - RNA, 19 nt, Artificial Sequence
  Description of Artificial Sequence: Synthetic oligonucleotide
ucucuagaagcccgacccg

SEQ ID NO: 2841175 - RNA, 19 nt, Artificial Sequence
  Description of Artificial Sequence: Synthetic oligonucleotide
guucuacuacauuuaauuc

SEQ ID NO: 2841176 - RNA, 19 nt, Artificial Sequence
  Description of Artificial Sequence: Synthetic oligonucleotide
caugcugcaguguggaaug

SEQ ID NO: 2841177 - RNA, 19 nt, Artificial Sequence
  Description of Artificial Sequence: Synthetic oligonucleotide
agaaaggccuauaagugug

SEQ ID NO: 2841178 - RNA, 19 nt, Artificial Sequence
  Description of Artificial Sequence: Synthetic oligonucleotide
gaucgaagaagcuugacuu

SEQ ID NO: 2841179 - RNA, 19 nt, Artificial Sequence
  Description of Artificial Sequence: Synthetic oligonucleotide
cuugaaacgcuggggaagg

SEQ ID NO: 2841180 - RNA, 19 nt, Artificial Sequence
  Description of Artificial Sequence: Synthetic oligonucleotide
ggaauggugggugugaaag

SEQ ID NO: 2841181 - RNA, 19 nt, Artificial Sequence
  Description of Artificial Sequence: Synthetic oligonucleotide
uccgggucauuaauggagc

SEQ ID NO: 2841182 - RNA, 19 nt, Artificial Sequence
  Description of Artificial Sequence: Synthetic oligonucleotide
ucgaagaagcuugacuuug

SEQ ID NO: 2841183 - RNA, 19 nt, Artificial Sequence
  Description of Artificial Sequence: Synthetic oligonucleotide
guucacugcauguuccgag

SEQ ID NO: 2841184 - RNA, 19 nt, Artificial Sequence
  Description of Artificial Sequence: Synthetic oligonucleotide
guaaugugcacauccaucu

SEQ ID NO: 2841185 - RNA, 19 nt, Artificial Sequence
  Description of Artificial Sequence: Synthetic oligonucleotide
ugccacucguuccuuaucu

SEQ ID NO: 2841186 - RNA, 19 nt, Artificial Sequence
  Description of Artificial Sequence: Synthetic oligonucleotide
aagaagcuugacuuugaua

SEQ ID NO: 2841187 - RNA, 19 nt, Artificial Sequence
  Description of Artificial Sequence: Synthetic oligonucleotide
aggccuauaaguguggcca

SEQ ID NO: 2841188 - RNA, 19 nt, Artificial Sequence
  Description of Artificial Sequence: Synthetic oligonucleotide
ggguguaaugugcacaucc

SEQ ID NO: 2841189 - RNA, 19 nt, Artificial Sequence
  Description of Artificial Sequence: Synthetic oligonucleotide
caggcugguggucaaaagc

SEQ ID NO: 2841190 - RNA, 19 nt, Artificial Sequence
  Description of Artificial Sequence: Synthetic oligonucleotide
uaaccugaauccgaacuug

SEQ ID NO: 2841191 - RNA, 19 nt, Artificial Sequence
  Description of Artificial Sequence: Synthetic oligonucleotide
gacaccugugugcaggcug

SEQ ID NO: 2841192 - RNA, 19 nt, Artificial Sequence
  Description of Artificial Sequence: Synthetic oligonucleotide
aguguggccaugcugcagu

SEQ ID NO: 2841193 - RNA, 19 nt, Artificial Sequence
  Description of Artificial Sequence: Synthetic oligonucleotide
uuccucuagcgucagugga

SEQ ID NO: 2841194 - RNA, 19 nt, Artificial Sequence
  Description of Artificial Sequence: Synthetic oligonucleotide
gugaaagccacggccaccg

SEQ ID NO: 2841195 - RNA, 19 nt, Artificial Sequence
  Description of Artificial Sequence: Synthetic oligonucleotide
ucuagaagcccgacccggc

SEQ ID NO: 2841196 - RNA, 19 nt, Artificial Sequence
  Description of Artificial Sequence: Synthetic oligonucleotide
gugggugugaaagccacgg

SEQ ID NO: 2841197 - RNA, 19 nt, Artificial Sequence
  Description of Artificial Sequence: Synthetic oligonucleotide
uccgaacuuguucuacuac

SEQ ID NO: 2841198 - RNA, 19 nt, Artificial Sequence
  Description of Artificial Sequence: Synthetic oligonucleotide
gaaaggccuauaagugugg

SEQ ID NO: 2841199 - RNA, 19 nt, Artificial Sequence
  Description of Artificial Sequence: Synthetic oligonucleotide
agcgaauaagaucgaagau

SEQ ID NO: 2841200 - RNA, 19 nt, Artificial Sequence
  Description of Artificial Sequence: Synthetic oligonucleotide
ucguuccuuaucugcaagc

SEQ ID NO: 2841201 - RNA, 19 nt, Artificial Sequence
  Description of Artificial Sequence: Synthetic oligonucleotide
uuaucugcaagcuguuguu

SEQ ID NO: 2841202 - RNA, 19 nt, Artificial Sequence
  Description of Artificial Sequence: Synthetic oligonucleotide
caccuguucguccuccucg

SEQ ID NO: 2841203 - RNA, 19 nt, Artificial Sequence
  Description of Artificial Sequence: Synthetic oligonucleotide
guuguucacugcauguucc

SEQ ID NO: 2841204 - RNA, 19 nt, Artificial Sequence
  Description of Artificial Sequence: Synthetic oligonucleotide
caucuugaaacgcugggga

SEQ ID NO: 2841205 - RNA, 19 nt, Artificial Sequence
  Description of Artificial Sequence: Synthetic oligonucleotide
gagcgcucauagaugaggg

SEQ ID NO: 2841206 - RNA, 19 nt, Artificial Sequence
  Description of Artificial Sequence: Synthetic oligonucleotide
uuguucuacuacauuuaau

SEQ ID NO: 2841207 - RNA, 19 nt, Artificial Sequence
  Description of Artificial Sequence: Synthetic oligonucleotide
caagcuguuguucacugca

SEQ ID NO: 2841208 - RNA, 19 nt, Artificial Sequence
  Description of Artificial Sequence: Synthetic oligonucleotide
ucacugcauguuccgaggc

SEQ ID NO: 2841209 - RNA, 19 nt, Artificial Sequence
  Description of Artificial Sequence: Synthetic oligonucleotide
aggacaccugugugcaggc

SEQ ID NO: 2841210 - RNA, 19 nt, Artificial Sequence
  Description of Artificial Sequence: Synthetic oligonucleotide
agaagcccgacccggccac

SEQ ID NO: 2841211 - RNA, 19 nt, Artificial Sequence
  Description of Artificial Sequence: Synthetic oligonucleotide
uucaccgccgcccaccauc

SEQ ID NO: 2841212 - RNA, 19 nt, Artificial Sequence
  Description of Artificial Sequence: Synthetic oligonucleotide
ucgaagaucucgcgggcgu

SEQ ID NO: 2841213 - RNA, 19 nt, Artificial Sequence
  Description of Artificial Sequence: Synthetic oligonucleotide
gaucgaagaucucgcgggc

SEQ ID NO: 2841214 - RNA, 19 nt, Artificial Sequence
  Description of Artificial Sequence: Synthetic oligonucleotide
gacuuugauagaaaggccu

SEQ ID NO: 2841215 - RNA, 19 nt, Artificial Sequence
  Description of Artificial Sequence: Synthetic oligonucleotide
uggugggugugaaagccac

SEQ ID NO: 2841216 - RNA, 19 nt, Artificial Sequence
  Description of Artificial Sequence: Synthetic oligonucleotide
cucagggucgcuaaccuga

SEQ ID NO: 2841217 - RNA, 19 nt, Artificial Sequence
  Description of Artificial Sequence: Synthetic oligonucleotide
caaaagccaggcucgcagc

SEQ ID NO: 2841218 - RNA, 19 nt, Artificial Sequence
  Description of Artificial Sequence: Synthetic oligonucleotide
ucugcaagcuguuguucac

SEQ ID NO: 2841219 - RNA, 19 nt, Artificial Sequence
  Description of Artificial Sequence: Synthetic oligonucleotide
uuugauagaaaggccuaua

SEQ ID NO: 2841220 - RNA, 19 nt, Artificial Sequence
  Description of Artificial Sequence: Synthetic oligonucleotide
guuccuuaucugcaagcug

SEQ ID NO: 2841221 - RNA, 19 nt, Artificial Sequence
  Description of Artificial Sequence: Synthetic oligonucleotide
gaagaucucgcgggcgucg

SEQ ID NO: 2841222 - RNA, 19 nt, Artificial Sequence
  Description of Artificial Sequence: Synthetic oligonucleotide
uggggaagggaucgaagaa

SEQ ID NO: 2841223 - RNA, 19 nt, Artificial Sequence
  Description of Artificial Sequence: Synthetic oligonucleotide
agcuguuguucacugcaug

SEQ ID NO: 2841224 - RNA, 19 nt, Artificial Sequence
  Description of Artificial Sequence: Synthetic oligonucleotide
ucaguggaugcuccggguc

SEQ ID NO: 2841225 - RNA, 19 nt, Artificial Sequence
  Description of Artificial Sequence: Synthetic oligonucleotide
gggugugaaagccacggcc

SEQ ID NO: 2841226 - RNA, 19 nt, Artificial Sequence
  Description of Artificial Sequence: Synthetic oligonucleotide
agcgcucauagaugagggg

SEQ ID NO: 2841227 - RNA, 19 nt, Artificial Sequence
  Description of Artificial Sequence: Synthetic oligonucleotide
guucucuagaagcccgacc

SEQ ID NO: 2841228 - RNA, 19 nt, Artificial Sequence
  Description of Artificial Sequence: Synthetic oligonucleotide
guggccaugcugcagugug

SEQ ID NO: 2841229 - RNA, 19 nt, Artificial Sequence
  Description of Artificial Sequence: Synthetic oligonucleotide
ugguggucaaaagccaggc

SEQ ID NO: 2841230 - RNA, 19 nt, Artificial Sequence
  Description of Artificial Sequence: Synthetic oligonucleotide
cucuagaagcccgacccgg

SEQ ID NO: 2841231 - RNA, 19 nt, Artificial Sequence
  Description of Artificial Sequence: Synthetic oligonucleotide
gaagcuugacuuugauaga

SEQ ID NO: 2841232 - RNA, 19 nt, Artificial Sequence
  Description of Artificial Sequence: Synthetic oligonucleotide
cugaauccgaacuuguucu

SEQ ID NO: 2841233 - RNA, 19 nt, Artificial Sequence
  Description of Artificial Sequence: Synthetic oligonucleotide
uuaauuccucuagcgucag

SEQ ID NO: 2841234 - RNA, 19 nt, Artificial Sequence
  Description of Artificial Sequence: Synthetic oligonucleotide
gaugcugucgggcaccugu

SEQ ID NO: 2841235 - RNA, 19 nt, Artificial Sequence
  Description of Artificial Sequence: Synthetic oligonucleotide
ucuagcgucaguggaugcu

SEQ ID NO: 2841236 - RNA, 19 nt, Artificial Sequence
  Description of Artificial Sequence: Synthetic oligonucleotide
ugaaacgcuggggaaggga

SEQ ID NO: 2841237 - RNA, 19 nt, Artificial Sequence
  Description of Artificial Sequence: Synthetic oligonucleotide
gcgaauaagaucgaagauc

SEQ ID NO: 2841238 - RNA, 19 nt, Artificial Sequence
  Description of Artificial Sequence: Synthetic oligonucleotide
gaauccgaacuuguucuac

SEQ ID NO: 2841239 - RNA, 19 nt, Artificial Sequence
  Description of Artificial Sequence: Synthetic oligonucleotide
caggacaccugugugcagg

SEQ ID NO: 2841240 - RNA, 19 nt, Artificial Sequence
  Description of Artificial Sequence: Synthetic oligonucleotide
aaacgcuggggaagggauc

SEQ ID NO: 2841241 - RNA, 19 nt, Artificial Sequence
  Description of Artificial Sequence: Synthetic oligonucleotide
ggagcgaauaagaucgaag

SEQ ID NO: 2841242 - RNA, 19 nt, Artificial Sequence
  Description of Artificial Sequence: Synthetic oligonucleotide
uccucuagcgucaguggau

SEQ ID NO: 2841243 - RNA, 19 nt, Artificial Sequence
  Description of Artificial Sequence: Synthetic oligonucleotide
uagaagcccgacccggcca

SEQ ID NO: 2841244 - RNA, 19 nt, Artificial Sequence
  Description of Artificial Sequence: Synthetic oligonucleotide
uggccaugcugcagugugg

SEQ ID NO: 2841245 - RNA, 19 nt, Artificial Sequence
  Description of Artificial Sequence: Synthetic oligonucleotide
cauuuaauuccucuagcgu

SEQ ID NO: 2841246 - RNA, 19 nt, Artificial Sequence
  Description of Artificial Sequence: Synthetic oligonucleotide
cuagaagcccgacccggcc

SEQ ID NO: 2841247 - RNA, 19 nt, Artificial Sequence
  Description of Artificial Sequence: Synthetic oligonucleotide
cuugguggagcugaggcca

SEQ ID NO: 2841248 - RNA, 19 nt, Artificial Sequence
  Description of Artificial Sequence: Synthetic oligonucleotide
ucgcuaaccugaauccgaa

SEQ ID NO: 2841249 - RNA, 19 nt, Artificial Sequence
  Description of Artificial Sequence: Synthetic oligonucleotide
uaaguguggccaugcugca

SEQ ID NO: 2841250 - RNA, 19 nt, Artificial Sequence
  Description of Artificial Sequence: Synthetic oligonucleotide
aucuugaaacgcuggggaa

SEQ ID NO: 2841251 - RNA, 19 nt, Artificial Sequence
  Description of Artificial Sequence: Synthetic oligonucleotide
ucucagggucgcuaaccug

SEQ ID NO: 2841252 - RNA, 19 nt, Artificial Sequence
  Description of Artificial Sequence: Synthetic oligonucleotide
aucgaagaucucgcgggcg

SEQ ID NO: 2841253 - RNA, 19 nt, Artificial Sequence
  Description of Artificial Sequence: Synthetic oligonucleotide
ugugaaagccacggccacc

SEQ ID NO: 2841254 - RNA, 19 nt, Artificial Sequence
  Description of Artificial Sequence: Synthetic oligonucleotide
agcgucaguggaugcuccg

SEQ ID NO: 2841255 - RNA, 19 nt, Artificial Sequence
  Description of Artificial Sequence: Synthetic oligonucleotide
cucguuccuuaucugcaag

SEQ ID NO: 2841256 - RNA, 19 nt, Artificial Sequence
  Description of Artificial Sequence: Synthetic oligonucleotide
cuuguucuacuacauuuaa

SEQ ID NO: 2841257 - RNA, 19 nt, Artificial Sequence
  Description of Artificial Sequence: Synthetic oligonucleotide
ugggugugaaagccacggc

SEQ ID NO: 2841258 - RNA, 19 nt, Artificial Sequence
  Description of Artificial Sequence: Synthetic oligonucleotide
ccggccaccgccuucaccg

SEQ ID NO: 2841259 - RNA, 19 nt, Artificial Sequence
  Description of Artificial Sequence: Synthetic oligonucleotide
aguguggaauggugggugu

SEQ ID NO: 2841260 - RNA, 19 nt, Artificial Sequence
  Description of Artificial Sequence: Synthetic oligonucleotide
aucgaagaagcuugacuuu

SEQ ID NO: 2841261 - RNA, 19 nt, Artificial Sequence
  Description of Artificial Sequence: Synthetic oligonucleotide
aaccugaauccgaacuugu

SEQ ID NO: 2841262 - RNA, 19 nt, Artificial Sequence
  Description of Artificial Sequence: Synthetic oligonucleotide
gggucgcuaaccugaaucc

SEQ ID NO: 2841263 - RNA, 19 nt, Artificial Sequence
  Description of Artificial Sequence: Synthetic oligonucleotide
cacauccaucuugaaacgc

SEQ ID NO: 2841264 - RNA, 19 nt, Artificial Sequence
  Description of Artificial Sequence: Synthetic oligonucleotide
uguucacugcauguuccga

SEQ ID NO: 2841265 - RNA, 19 nt, Artificial Sequence
  Description of Artificial Sequence: Synthetic oligonucleotide
acggccaccgugcucucag

SEQ ID NO: 2841266 - RNA, 19 nt, Artificial Sequence
  Description of Artificial Sequence: Synthetic oligonucleotide
uagcgucaguggaugcucc

SEQ ID NO: 2841267 - RNA, 19 nt, Artificial Sequence
  Description of Artificial Sequence: Synthetic oligonucleotide
ugaauccgaacuuguucua

SEQ ID NO: 2841268 - RNA, 19 nt, Artificial Sequence
  Description of Artificial Sequence: Synthetic oligonucleotide
acaccugugugcaggcugg

SEQ ID NO: 2841269 - RNA, 19 nt, Artificial Sequence
  Description of Artificial Sequence: Synthetic oligonucleotide
gcacauccaucuugaaacg

SEQ ID NO: 2841270 - RNA, 19 nt, Artificial Sequence
  Description of Artificial Sequence: Synthetic oligonucleotide
gucauuaauggagcgaaua

SEQ ID NO: 2841271 - RNA, 19 nt, Artificial Sequence
  Description of Artificial Sequence: Synthetic oligonucleotide
gcugucgggcaccuguucg

SEQ ID NO: 2841272 - RNA, 19 nt, Artificial Sequence
  Description of Artificial Sequence: Synthetic oligonucleotide
ccugaauccgaacuuguuc

SEQ ID NO: 2841273 - RNA, 19 nt, Artificial Sequence
  Description of Artificial Sequence: Synthetic oligonucleotide
aaguguggccaugcugcag

SEQ ID NO: 2841274 - RNA, 19 nt, Artificial Sequence
  Description of Artificial Sequence: Synthetic oligonucleotide
gggaagggaucgaagaagc

SEQ ID NO: 2841275 - RNA, 19 nt, Artificial Sequence
  Description of Artificial Sequence: Synthetic oligonucleotide
ucaccgccgcccaccaucc

SEQ ID NO: 2841276 - RNA, 19 nt, Artificial Sequence
  Description of Artificial Sequence: Synthetic oligonucleotide
cacucguuccuuaucugca

SEQ ID NO: 2841277 - RNA, 19 nt, Artificial Sequence
  Description of Artificial Sequence: Synthetic oligonucleotide
acuuguucuacuacauuua

SEQ ID NO: 2841278 - RNA, 19 nt, Artificial Sequence
  Description of Artificial Sequence: Synthetic oligonucleotide
acugcauguuccgaggcau

SEQ ID NO: 2841279 - RNA, 19 nt, Artificial Sequence
  Description of Artificial Sequence: Synthetic oligonucleotide
ucgggcaccuguucguccu

SEQ ID NO: 2841280 - RNA, 19 nt, Artificial Sequence
  Description of Artificial Sequence: Synthetic oligonucleotide
caccgugcucucagggucg

SEQ ID NO: 2841281 - RNA, 19 nt, Artificial Sequence
  Description of Artificial Sequence: Synthetic oligonucleotide
uugguggagcugaggccag

SEQ ID NO: 2841282 - RNA, 19 nt, Artificial Sequence
  Description of Artificial Sequence: Synthetic oligonucleotide
uugaaacgcuggggaaggg

SEQ ID NO: 2841283 - RNA, 19 nt, Artificial Sequence
  Description of Artificial Sequence: Synthetic oligonucleotide
augugcacauccaucuuga

SEQ ID NO: 2841284 - RNA, 19 nt, Artificial Sequence
  Description of Artificial Sequence: Synthetic oligonucleotide
acucguuccuuaucugcaa

SEQ ID NO: 2841285 - RNA, 19 nt, Artificial Sequence
  Description of Artificial Sequence: Synthetic oligonucleotide
acuuugauagaaaggccua

SEQ ID NO: 2841286 - RNA, 19 nt, Artificial Sequence
  Description of Artificial Sequence: Synthetic oligonucleotide
cuagcgucaguggaugcuc

SEQ ID NO: 2841287 - RNA, 19 nt, Artificial Sequence
  Description of Artificial Sequence: Synthetic oligonucleotide
auccgaacuuguucuacua

SEQ ID NO: 2841288 - RNA, 19 nt, Artificial Sequence
  Description of Artificial Sequence: Synthetic oligonucleotide
uggcguucucuagaagccc

SEQ ID NO: 2841289 - RNA, 19 nt, Artificial Sequence
  Description of Artificial Sequence: Synthetic oligonucleotide
gcuaaccugaauccgaacu

SEQ ID NO: 2841290 - RNA, 19 nt, Artificial Sequence
  Description of Artificial Sequence: Synthetic oligonucleotide
auguuccgaggcauggguc

SEQ ID NO: 2841291 - RNA, 19 nt, Artificial Sequence
  Description of Artificial Sequence: Synthetic oligonucleotide
ggagcugaggccaggacac

SEQ ID NO: 2841292 - RNA, 19 nt, Artificial Sequence
  Description of Artificial Sequence: Synthetic oligonucleotide
cuacuacauuuaauuccuc

SEQ ID NO: 2841293 - RNA, 19 nt, Artificial Sequence
  Description of Artificial Sequence: Synthetic oligonucleotide
ccacucguuccuuaucugc

SEQ ID NO: 2841294 - RNA, 19 nt, Artificial Sequence
  Description of Artificial Sequence: Synthetic oligonucleotide
cccuugguggagcugaggc

SEQ ID NO: 2841295 - RNA, 19 nt, Artificial Sequence
  Description of Artificial Sequence: Synthetic oligonucleotide
ucagggucgcuaaccugaa

SEQ ID NO: 2841296 - RNA, 19 nt, Artificial Sequence
  Description of Artificial Sequence: Synthetic oligonucleotide
gugugaaagccacggccac

SEQ ID NO: 2841297 - RNA, 19 nt, Artificial Sequence
  Description of Artificial Sequence: Synthetic oligonucleotide
cucuagcgucaguggaugc

SEQ ID NO: 2841298 - RNA, 19 nt, Artificial Sequence
  Description of Artificial Sequence: Synthetic oligonucleotide
uccuuaucugcaagcuguu

SEQ ID NO: 2841299 - RNA, 19 nt, Artificial Sequence
  Description of Artificial Sequence: Synthetic oligonucleotide
ggucgcuaaccugaauccg

SEQ ID NO: 2841300 - RNA, 19 nt, Artificial Sequence
  Description of Artificial Sequence: Synthetic oligonucleotide
ccuauaaguguggccaugc

SEQ ID NO: 2841301 - RNA, 19 nt, Artificial Sequence
  Description of Artificial Sequence: Synthetic oligonucleotide
gucgcuaaccugaauccga

SEQ ID NO: 2841302 - RNA, 19 nt, Artificial Sequence
  Description of Artificial Sequence: Synthetic oligonucleotide
ggcguucucuagaagcccg

SEQ ID NO: 2841303 - RNA, 19 nt, Artificial Sequence
  Description of Artificial Sequence: Synthetic oligonucleotide
uaauuccucuagcgucagu

SEQ ID NO: 2841304 - RNA, 19 nt, Artificial Sequence
  Description of Artificial Sequence: Synthetic oligonucleotide
augggucccggguguaaug

SEQ ID NO: 2841305 - RNA, 19 nt, Artificial Sequence
  Description of Artificial Sequence: Synthetic oligonucleotide
gaagggaucgaagaagcuu

SEQ ID NO: 2841306 - RNA, 19 nt, Artificial Sequence
  Description of Artificial Sequence: Synthetic oligonucleotide
cgaauaagaucgaagaucu

SEQ ID NO: 2841307 - RNA, 19 nt, Artificial Sequence
  Description of Artificial Sequence: Synthetic oligonucleotide
ccaucuugaaacgcugggg

SEQ ID NO: 2841308 - RNA, 19 nt, Artificial Sequence
  Description of Artificial Sequence: Synthetic oligonucleotide
aagcccgacccggccaccg

SEQ ID NO: 2841309 - RNA, 19 nt, Artificial Sequence
  Description of Artificial Sequence: Synthetic oligonucleotide
uggagcgaauaagaucgaa

SEQ ID NO: 2841310 - RNA, 19 nt, Artificial Sequence
  Description of Artificial Sequence: Synthetic oligonucleotide
gaugcuccgggucauuaau

SEQ ID NO: 2841311 - RNA, 19 nt, Artificial Sequence
  Description of Artificial Sequence: Synthetic oligonucleotide
ggugugaaagccacggcca

SEQ ID NO: 2841312 - RNA, 19 nt, Artificial Sequence
  Description of Artificial Sequence: Synthetic oligonucleotide
ggaucgaagaagcuugacu

SEQ ID NO: 2841313 - RNA, 19 nt, Artificial Sequence
  Description of Artificial Sequence: Synthetic oligonucleotide
gaauaagaucgaagaucuc

SEQ ID NO: 2841314 - RNA, 19 nt, Artificial Sequence
  Description of Artificial Sequence: Synthetic oligonucleotide
ugugcacauccaucuugaa

SEQ ID NO: 2841315 - RNA, 19 nt, Artificial Sequence
  Description of Artificial Sequence: Synthetic oligonucleotide
ugggucccggguguaaugu

SEQ ID NO: 2841316 - RNA, 19 nt, Artificial Sequence
  Description of Artificial Sequence: Synthetic oligonucleotide
uccucgcccgccgucacug

SEQ ID NO: 2841317 - RNA, 19 nt, Artificial Sequence
  Description of Artificial Sequence: Synthetic oligonucleotide
ggccaggacaccugugugc

SEQ ID NO: 2841318 - RNA, 19 nt, Artificial Sequence
  Description of Artificial Sequence: Synthetic oligonucleotide
ugcucucagggucgcuaac

SEQ ID NO: 2841319 - RNA, 19 nt, Artificial Sequence
  Description of Artificial Sequence: Synthetic oligonucleotide
ugcaggcugguggucaaaa

SEQ ID NO: 2841320 - RNA, 19 nt, Artificial Sequence
  Description of Artificial Sequence: Synthetic oligonucleotide
aagaucucgcgggcgucga

SEQ ID NO: 2841321 - RNA, 19 nt, Artificial Sequence
  Description of Artificial Sequence: Synthetic oligonucleotide
ugcugcaguguggaauggu

SEQ ID NO: 2841322 - RNA, 19 nt, Artificial Sequence
  Description of Artificial Sequence: Synthetic oligonucleotide
gggucauuaauggagcgaa

SEQ ID NO: 2841323 - RNA, 19 nt, Artificial Sequence
  Description of Artificial Sequence: Synthetic oligonucleotide
aagcuguuguucacugcau

SEQ ID NO: 2841324 - RNA, 19 nt, Artificial Sequence
  Description of Artificial Sequence: Synthetic oligonucleotide
gucgaugcugucgggcacc

SEQ ID NO: 2841325 - RNA, 19 nt, Artificial Sequence
  Description of Artificial Sequence: Synthetic oligonucleotide
ucgcagcugccacucguuc

SEQ ID NO: 2841326 - RNA, 19 nt, Artificial Sequence
  Description of Artificial Sequence: Synthetic oligonucleotide
aggcucgcagcugccacuc

SEQ ID NO: 2841327 - RNA, 19 nt, Artificial Sequence
  Description of Artificial Sequence: Synthetic oligonucleotide
gguguaaugugcacaucca

SEQ ID NO: 2841328 - RNA, 19 nt, Artificial Sequence
  Description of Artificial Sequence: Synthetic oligonucleotide
uccgaggcaugggucccgg

SEQ ID NO: 2841329 - RNA, 19 nt, Artificial Sequence
  Description of Artificial Sequence: Synthetic oligonucleotide
uuccgaggcaugggucccg

SEQ ID NO: 2841330 - RNA, 19 nt, Artificial Sequence
  Description of Artificial Sequence: Synthetic oligonucleotide
gaaacgcuggggaagggau

SEQ ID NO: 2841331 - RNA, 19 nt, Artificial Sequence
  Description of Artificial Sequence: Synthetic oligonucleotide
ccuugguggagcugaggcc

SEQ ID NO: 2841332 - RNA, 19 nt, Artificial Sequence
  Description of Artificial Sequence: Synthetic oligonucleotide
ugcugucgggcaccuguuc

SEQ ID NO: 2841333 - RNA, 19 nt, Artificial Sequence
  Description of Artificial Sequence: Synthetic oligonucleotide
ucgcgggcgucgaugcugu

SEQ ID NO: 2841334 - RNA, 19 nt, Artificial Sequence
  Description of Artificial Sequence: Synthetic oligonucleotide
ccgaacuuguucuacuaca

SEQ ID NO: 2841335 - RNA, 19 nt, Artificial Sequence
  Description of Artificial Sequence: Synthetic oligonucleotide
ccaccaucccggaacugcg

SEQ ID NO: 2841336 - RNA, 19 nt, Artificial Sequence
  Description of Artificial Sequence: Synthetic oligonucleotide
cuaaccugaauccgaacuu

SEQ ID NO: 2841337 - RNA, 19 nt, Artificial Sequence
  Description of Artificial Sequence: Synthetic oligonucleotide
agcugaggccaggacaccu

SEQ ID NO: 2841338 - RNA, 19 nt, Artificial Sequence
  Description of Artificial Sequence: Synthetic oligonucleotide
agcccgacccggccaccgc

SEQ ID NO: 2841339 - RNA, 19 nt, Artificial Sequence
  Description of Artificial Sequence: Synthetic oligonucleotide
aagccacggccaccgugcu

SEQ ID NO: 2841340 - RNA, 19 nt, Artificial Sequence
  Description of Artificial Sequence: Synthetic oligonucleotide
gaacuuguucuacuacauu

SEQ ID NO: 2841341 - RNA, 19 nt, Artificial Sequence
  Description of Artificial Sequence: Synthetic oligonucleotide
cauguuccgaggcaugggu

SEQ ID NO: 2841342 - RNA, 19 nt, Artificial Sequence
  Description of Artificial Sequence: Synthetic oligonucleotide
ggccaccgugcucucaggg

SEQ ID NO: 2841343 - RNA, 19 nt, Artificial Sequence
  Description of Artificial Sequence: Synthetic oligonucleotide
ugaaagccacggccaccgu

SEQ ID NO: 2841344 - RNA, 19 nt, Artificial Sequence
  Description of Artificial Sequence: Synthetic oligonucleotide
accgugcucucagggucgc

SEQ ID NO: 2841345 - RNA, 19 nt, Artificial Sequence
  Description of Artificial Sequence: Synthetic oligonucleotide
augcuccgggucauuaaug

SEQ ID NO: 2841346 - RNA, 19 nt, Artificial Sequence
  Description of Artificial Sequence: Synthetic oligonucleotide
guguaaugugcacauccau

SEQ ID NO: 2841347 - RNA, 19 nt, Artificial Sequence
  Description of Artificial Sequence: Synthetic oligonucleotide
cucgcgggcgucgaugcug

SEQ ID NO: 2841348 - RNA, 19 nt, Artificial Sequence
  Description of Artificial Sequence: Synthetic oligonucleotide
guuccgaggcauggguccc

SEQ ID NO: 2841349 - RNA, 19 nt, Artificial Sequence
  Description of Artificial Sequence: Synthetic oligonucleotide
gguuggcguucucuagaag

SEQ ID NO: 2841350 - RNA, 19 nt, Artificial Sequence
  Description of Artificial Sequence: Synthetic oligonucleotide
ggucccggguguaaugugc

SEQ ID NO: 2841351 - RNA, 19 nt, Artificial Sequence
  Description of Artificial Sequence: Synthetic oligonucleotide
uggaugcuccgggucauua

SEQ ID NO: 2841352 - RNA, 19 nt, Artificial Sequence
  Description of Artificial Sequence: Synthetic oligonucleotide
augcugcaguguggaaugg

SEQ ID NO: 2841353 - RNA, 19 nt, Artificial Sequence
  Description of Artificial Sequence: Synthetic oligonucleotide
ucccggguguaaugugcac

SEQ ID NO: 2841354 - RNA, 19 nt, Artificial Sequence
  Description of Artificial Sequence: Synthetic oligonucleotide
cacugcauguuccgaggca

SEQ ID NO: 2841355 - RNA, 19 nt, Artificial Sequence
  Description of Artificial Sequence: Synthetic oligonucleotide
uguggccaugcugcagugu

SEQ ID NO: 2841356 - RNA, 19 nt, Artificial Sequence
  Description of Artificial Sequence: Synthetic oligonucleotide
ugguggagcugaggccagg

SEQ ID NO: 2841357 - RNA, 19 nt, Artificial Sequence
  Description of Artificial Sequence: Synthetic oligonucleotide
gcuguuguucacugcaugu

SEQ ID NO: 2841358 - RNA, 19 nt, Artificial Sequence
  Description of Artificial Sequence: Synthetic oligonucleotide
ccgggucauuaauggagcg

SEQ ID NO: 2841359 - RNA, 19 nt, Artificial Sequence
  Description of Artificial Sequence: Synthetic oligonucleotide
agcuugacuuugauagaaa

SEQ ID NO: 2841360 - RNA, 19 nt, Artificial Sequence
  Description of Artificial Sequence: Synthetic oligonucleotide
gcucucagggucgcuaacc

SEQ ID NO: 2841361 - RNA, 19 nt, Artificial Sequence
  Description of Artificial Sequence: Synthetic oligonucleotide
uccuccucgcccgccguca

SEQ ID NO: 2841362 - RNA, 19 nt, Artificial Sequence
  Description of Artificial Sequence: Synthetic oligonucleotide
gggguuggcguucucuaga

SEQ ID NO: 2841363 - RNA, 19 nt, Artificial Sequence
  Description of Artificial Sequence: Synthetic oligonucleotide
ugucgggcaccuguucguc

SEQ ID NO: 2841364 - RNA, 19 nt, Artificial Sequence
  Description of Artificial Sequence: Synthetic oligonucleotide
gcauguuccgaggcauggg

SEQ ID NO: 2841365 - RNA, 19 nt, Artificial Sequence
  Description of Artificial Sequence: Synthetic oligonucleotide
cgagcgcucauagaugagg

SEQ ID NO: 2841366 - RNA, 19 nt, Artificial Sequence
  Description of Artificial Sequence: Synthetic oligonucleotide
guguggccaugcugcagug

SEQ ID NO: 2841367 - RNA, 19 nt, Artificial Sequence
  Description of Artificial Sequence: Synthetic oligonucleotide
cucgcccgccgucacuggc

SEQ ID NO: 2841368 - RNA, 19 nt, Artificial Sequence
  Description of Artificial Sequence: Synthetic oligonucleotide
agccacggccaccgugcuc

SEQ ID NO: 2841369 - RNA, 19 nt, Artificial Sequence
  Description of Artificial Sequence: Synthetic oligonucleotide
ugugugcaggcuggugguc

SEQ ID NO: 2841370 - RNA, 19 nt, Artificial Sequence
  Description of Artificial Sequence: Synthetic oligonucleotide
aguggaugcuccgggucau

SEQ ID NO: 2841371 - RNA, 19 nt, Artificial Sequence
  Description of Artificial Sequence: Synthetic oligonucleotide
ggugggugugaaagccacg

SEQ ID NO: 2841372 - RNA, 19 nt, Artificial Sequence
  Description of Artificial Sequence: Synthetic oligonucleotide
gucaaaagccaggcucgca

SEQ ID NO: 2841373 - RNA, 19 nt, Artificial Sequence
  Description of Artificial Sequence: Synthetic oligonucleotide
cugccacucguuccuuauc

SEQ ID NO: 2841374 - RNA, 19 nt, Artificial Sequence
  Description of Artificial Sequence: Synthetic oligonucleotide
agggaucgaagaagcuuga

SEQ ID NO: 2841375 - RNA, 19 nt, Artificial Sequence
  Description of Artificial Sequence: Synthetic oligonucleotide
ggucaaaagccaggcucgc

SEQ ID NO: 2841376 - RNA, 19 nt, Artificial Sequence
  Description of Artificial Sequence: Synthetic oligonucleotide
uucguccuccucgcccgcc

SEQ ID NO: 2841377 - RNA, 19 nt, Artificial Sequence
  Description of Artificial Sequence: Synthetic oligonucleotide
cgucaguggaugcuccggg

SEQ ID NO: 2841378 - RNA, 19 nt, Artificial Sequence
  Description of Artificial Sequence: Synthetic oligonucleotide
cuauaaguguggccaugcu

SEQ ID NO: 2841379 - RNA, 19 nt, Artificial Sequence
  Description of Artificial Sequence: Synthetic oligonucleotide
ccaccgugcucucaggguc

SEQ ID NO: 2841380 - RNA, 19 nt, Artificial Sequence
  Description of Artificial Sequence: Synthetic oligonucleotide
gccacucguuccuuaucug

SEQ ID NO: 2841381 - RNA, 19 nt, Artificial Sequence
  Description of Artificial Sequence: Synthetic oligonucleotide
ucgaugcugucgggcaccu

SEQ ID NO: 2841382 - RNA, 19 nt, Artificial Sequence
  Description of Artificial Sequence: Synthetic oligonucleotide
accugugugcaggcuggug

SEQ ID NO: 2841383 - RNA, 19 nt, Artificial Sequence
  Description of Artificial Sequence: Synthetic oligonucleotide
cucucagggucgcuaaccu

SEQ ID NO: 2841384 - RNA, 19 nt, Artificial Sequence
  Description of Artificial Sequence: Synthetic oligonucleotide
gcgucaguggaugcuccgg

SEQ ID NO: 2841385 - RNA, 19 nt, Artificial Sequence
  Description of Artificial Sequence: Synthetic oligonucleotide
ggcgucgaugcugucgggc

SEQ ID NO: 2841386 - RNA, 19 nt, Artificial Sequence
  Description of Artificial Sequence: Synthetic oligonucleotide
gacccggccaccgccuuca

SEQ ID NO: 2841387 - RNA, 19 nt, Artificial Sequence
  Description of Artificial Sequence: Synthetic oligonucleotide
cuuugauagaaaggccuau

SEQ ID NO: 2841388 - RNA, 19 nt, Artificial Sequence
  Description of Artificial Sequence: Synthetic oligonucleotide
cccgagcgcucauagauga

SEQ ID NO: 2841389 - RNA, 19 nt, Artificial Sequence
  Description of Artificial Sequence: Synthetic oligonucleotide
cgggcgucgaugcugucgg

SEQ ID NO: 2841390 - RNA, 19 nt, Artificial Sequence
  Description of Artificial Sequence: Synthetic oligonucleotide
gucaguggaugcuccgggu

SEQ ID NO: 2841391 - RNA, 19 nt, Artificial Sequence
  Description of Artificial Sequence: Synthetic oligonucleotide
gugcucucagggucgcuaa

SEQ ID NO: 2841392 - RNA, 19 nt, Artificial Sequence
  Description of Artificial Sequence: Synthetic oligonucleotide
gcgggcgucgaugcugucg

SEQ ID NO: 2841393 - RNA, 19 nt, Artificial Sequence
  Description of Artificial Sequence: Synthetic oligonucleotide
ccucuagcgucaguggaug

SEQ ID NO: 2841394 - RNA, 19 nt, Artificial Sequence
  Description of Artificial Sequence: Synthetic oligonucleotide
gccaggacaccugugugca

SEQ ID NO: 2841395 - RNA, 19 nt, Artificial Sequence
  Description of Artificial Sequence: Synthetic oligonucleotide
gucccggguguaaugugca

SEQ ID NO: 2841396 - RNA, 19 nt, Artificial Sequence
  Description of Artificial Sequence: Synthetic oligonucleotide
agccaggcucgcagcugcc

SEQ ID NO: 2841397 - RNA, 19 nt, Artificial Sequence
  Description of Artificial Sequence: Synthetic oligonucleotide
guucguccuccucgcccgc

SEQ ID NO: 2841398 - RNA, 19 nt, Artificial Sequence
  Description of Artificial Sequence: Synthetic oligonucleotide
gcgucgaugcugucgggca

SEQ ID NO: 2841399 - RNA, 19 nt, Artificial Sequence
  Description of Artificial Sequence: Synthetic oligonucleotide
cugugugcaggcugguggu

SEQ ID NO: 2841400 - RNA, 19 nt, Artificial Sequence
  Description of Artificial Sequence: Synthetic oligonucleotide
ccgcccaccaucccggaac

SEQ ID NO: 2841401 - RNA, 19 nt, Artificial Sequence
  Description of Artificial Sequence: Synthetic oligonucleotide
auggagcgaauaagaucga

SEQ ID NO: 2841402 - RNA, 19 nt, Artificial Sequence
  Description of Artificial Sequence: Synthetic oligonucleotide
agcugccacucguuccuua

SEQ ID NO: 2841403 - RNA, 19 nt, Artificial Sequence
  Description of Artificial Sequence: Synthetic oligonucleotide
ggguuggcguucucuagaa

SEQ ID NO: 2841404 - RNA, 19 nt, Artificial Sequence
  Description of Artificial Sequence: Synthetic oligonucleotide
agaucucgcgggcgucgau

SEQ ID NO: 2841405 - RNA, 19 nt, Artificial Sequence
  Description of Artificial Sequence: Synthetic oligonucleotide
gcuccgggucauuaaugga

SEQ ID NO: 2841406 - RNA, 19 nt, Artificial Sequence
  Description of Artificial Sequence: Synthetic oligonucleotide
gccuauaaguguggccaug

SEQ ID NO: 2841407 - RNA, 19 nt, Artificial Sequence
  Description of Artificial Sequence: Synthetic oligonucleotide
ggaugcuccgggucauuaa

SEQ ID NO: 2841408 - RNA, 19 nt, Artificial Sequence
  Description of Artificial Sequence: Synthetic oligonucleotide
gggucccggguguaaugug

SEQ ID NO: 2841409 - RNA, 19 nt, Artificial Sequence
  Description of Artificial Sequence: Synthetic oligonucleotide
ggcugguggucaaaagcca

SEQ ID NO: 2841410 - RNA, 19 nt, Artificial Sequence
  Description of Artificial Sequence: Synthetic oligonucleotide
ccuuaucugcaagcuguug

SEQ ID NO: 2841411 - RNA, 19 nt, Artificial Sequence
  Description of Artificial Sequence: Synthetic oligonucleotide
gcagcugccacucguuccu

SEQ ID NO: 2841412 - RNA, 19 nt, Artificial Sequence
  Description of Artificial Sequence: Synthetic oligonucleotide
gccaccgccuucaccgccg

SEQ ID NO: 2841413 - RNA, 19 nt, Artificial Sequence
  Description of Artificial Sequence: Synthetic oligonucleotide
gcugaggccaggacaccug

SEQ ID NO: 2841414 - RNA, 19 nt, Artificial Sequence
  Description of Artificial Sequence: Synthetic oligonucleotide
ggccaugcugcagugugga

SEQ ID NO: 2841415 - RNA, 19 nt, Artificial Sequence
  Description of Artificial Sequence: Synthetic oligonucleotide
gggaucgaagaagcuugac

SEQ ID NO: 2841416 - RNA, 19 nt, Artificial Sequence
  Description of Artificial Sequence: Synthetic oligonucleotide
gaagcccgacccggccacc

SEQ ID NO: 2841417 - RNA, 19 nt, Artificial Sequence
  Description of Artificial Sequence: Synthetic oligonucleotide
gguggucaaaagccaggcu

SEQ ID NO: 2841418 - RNA, 19 nt, Artificial Sequence
  Description of Artificial Sequence: Synthetic oligonucleotide
ccaggcucgcagcugccac

SEQ ID NO: 2841419 - RNA, 19 nt, Artificial Sequence
  Description of Artificial Sequence: Synthetic oligonucleotide
cugucgggcaccuguucgu

SEQ ID NO: 2841420 - RNA, 19 nt, Artificial Sequence
  Description of Artificial Sequence: Synthetic oligonucleotide
gccgucacuggccgcuccc

SEQ ID NO: 2841421 - RNA, 19 nt, Artificial Sequence
  Description of Artificial Sequence: Synthetic oligonucleotide
gguggagcugaggccagga

SEQ ID NO: 2841422 - RNA, 19 nt, Artificial Sequence
  Description of Artificial Sequence: Synthetic oligonucleotide
cugaggccaggacaccugu

SEQ ID NO: 2841423 - RNA, 19 nt, Artificial Sequence
  Description of Artificial Sequence: Synthetic oligonucleotide
gccuucaccgccgcccacc

SEQ ID NO: 2841424 - RNA, 19 nt, Artificial Sequence
  Description of Artificial Sequence: Synthetic oligonucleotide
ccgccgcccaccaucccgg

SEQ ID NO: 2841425 - RNA, 19 nt, Artificial Sequence
  Description of Artificial Sequence: Synthetic oligonucleotide
ccccgagcgcucauagaug

SEQ ID NO: 2841426 - RNA, 19 nt, Artificial Sequence
  Description of Artificial Sequence: Synthetic oligonucleotide
cuguuguucacugcauguu

SEQ ID NO: 2841427 - RNA, 19 nt, Artificial Sequence
  Description of Artificial Sequence: Synthetic oligonucleotide
ccuguucguccuccucgcc

SEQ ID NO: 2841428 - RNA, 19 nt, Artificial Sequence
  Description of Artificial Sequence: Synthetic oligonucleotide
gccacggccaccgugcucu

SEQ ID NO: 2841429 - RNA, 19 nt, Artificial Sequence
  Description of Artificial Sequence: Synthetic oligonucleotide
ggcucgcagcugccacucg

SEQ ID NO: 2841430 - RNA, 19 nt, Artificial Sequence
  Description of Artificial Sequence: Synthetic oligonucleotide
gcaccuguucguccuccuc

SEQ ID NO: 2841431 - RNA, 19 nt, Artificial Sequence
  Description of Artificial Sequence: Synthetic oligonucleotide
ccgagcgcucauagaugag

SEQ ID NO: 2841432 - RNA, 19 nt, Artificial Sequence
  Description of Artificial Sequence: Synthetic oligonucleotide
ccaggacaccugugugcag

SEQ ID NO: 2841433 - RNA, 19 nt, Artificial Sequence
  Description of Artificial Sequence: Synthetic oligonucleotide
gcccgacccggccaccgcc

SEQ ID NO: 2841434 - RNA, 19 nt, Artificial Sequence
  Description of Artificial Sequence: Synthetic oligonucleotide
ggaagggaucgaagaagcu

SEQ ID NO: 2841435 - RNA, 19 nt, Artificial Sequence
  Description of Artificial Sequence: Synthetic oligonucleotide
gcccuugguggagcugagg

SEQ ID NO: 2841436 - RNA, 19 nt, Artificial Sequence
  Description of Artificial Sequence: Synthetic oligonucleotide
gggcgucgaugcugucggg

SEQ ID NO: 2841437 - RNA, 19 nt, Artificial Sequence
  Description of Artificial Sequence: Synthetic oligonucleotide
augcugucgggcaccuguu

SEQ ID NO: 2841438 - RNA, 19 nt, Artificial Sequence
  Description of Artificial Sequence: Synthetic oligonucleotide
caccgccuucaccgccgcc

SEQ ID NO: 2841439 - RNA, 19 nt, Artificial Sequence
  Description of Artificial Sequence: Synthetic oligonucleotide
cgaacuuguucuacuacau

SEQ ID NO: 2841440 - RNA, 19 nt, Artificial Sequence
  Description of Artificial Sequence: Synthetic oligonucleotide
cgcuaaccugaauccgaac

SEQ ID NO: 2841441 - RNA, 19 nt, Artificial Sequence
  Description of Artificial Sequence: Synthetic oligonucleotide
cccggguguaaugugcaca

SEQ ID NO: 2841442 - RNA, 19 nt, Artificial Sequence
  Description of Artificial Sequence: Synthetic oligonucleotide
caggcucgcagcugccacu

SEQ ID NO: 2841443 - RNA, 19 nt, Artificial Sequence
  Description of Artificial Sequence: Synthetic oligonucleotide
gcugccacucguuccuuau

SEQ ID NO: 2841444 - RNA, 19 nt, Artificial Sequence
  Description of Artificial Sequence: Synthetic oligonucleotide
gcucgcagcugccacucgu

SEQ ID NO: 2841445 - RNA, 19 nt, Artificial Sequence
  Description of Artificial Sequence: Synthetic oligonucleotide
gccaccgugcucucagggu

SEQ ID NO: 2841446 - RNA, 19 nt, Artificial Sequence
  Description of Artificial Sequence: Synthetic oligonucleotide
cgucgaugcugucgggcac

SEQ ID NO: 2841447 - RNA, 19 nt, Artificial Sequence
  Description of Artificial Sequence: Synthetic oligonucleotide
cguucucuagaagcccgac

SEQ ID NO: 2841448 - RNA, 19 nt, Artificial Sequence
  Description of Artificial Sequence: Synthetic oligonucleotide
cucgcagcugccacucguu

SEQ ID NO: 2841449 - RNA, 19 nt, Artificial Sequence
  Description of Artificial Sequence: Synthetic oligonucleotide
caccgccgcccaccauccc

SEQ ID NO: 2841450 - RNA, 19 nt, Artificial Sequence
  Description of Artificial Sequence: Synthetic oligonucleotide
acgcuggggaagggaucga

SEQ ID NO: 2841451 - RNA, 19 nt, Artificial Sequence
  Description of Artificial Sequence: Synthetic oligonucleotide
ccggguguaaugugcacau

SEQ ID NO: 2841452 - RNA, 19 nt, Artificial Sequence
  Description of Artificial Sequence: Synthetic oligonucleotide
gcguucucuagaagcccga

SEQ ID NO: 2841453 - RNA, 19 nt, Artificial Sequence
  Description of Artificial Sequence: Synthetic oligonucleotide
ggccuauaaguguggccau

SEQ ID NO: 2841454 - RNA, 19 nt, Artificial Sequence
  Description of Artificial Sequence: Synthetic oligonucleotide
caugggucccggguguaau

SEQ ID NO: 2841455 - RNA, 19 nt, Artificial Sequence
  Description of Artificial Sequence: Synthetic oligonucleotide
ccaugcugcaguguggaau

SEQ ID NO: 2841456 - RNA, 19 nt, Artificial Sequence
  Description of Artificial Sequence: Synthetic oligonucleotide
ccgaggcaugggucccggg

SEQ ID NO: 2841457 - RNA, 19 nt, Artificial Sequence
  Description of Artificial Sequence: Synthetic oligonucleotide
ccucgcccgccgucacugg

SEQ ID NO: 2841458 - RNA, 19 nt, Artificial Sequence
  Description of Artificial Sequence: Synthetic oligonucleotide
ccgucacuggccgcucccc

SEQ ID NO: 2841459 - RNA, 19 nt, Artificial Sequence
  Description of Artificial Sequence: Synthetic oligonucleotide
cccggccaccgccuucacc

SEQ ID NO: 2841460 - RNA, 19 nt, Artificial Sequence
  Description of Artificial Sequence: Synthetic oligonucleotide
cguuccuuaucugcaagcu

SEQ ID NO: 2841461 - RNA, 19 nt, Artificial Sequence
  Description of Artificial Sequence: Synthetic oligonucleotide
ggucauuaauggagcgaau

SEQ ID NO: 2841462 - RNA, 19 nt, Artificial Sequence
  Description of Artificial Sequence: Synthetic oligonucleotide
cgggucauuaauggagcga

SEQ ID NO: 2841463 - RNA, 19 nt, Artificial Sequence
  Description of Artificial Sequence: Synthetic oligonucleotide
ccuucaccgccgcccacca

SEQ ID NO: 2841464 - RNA, 19 nt, Artificial Sequence
  Description of Artificial Sequence: Synthetic oligonucleotide
cgcccgccgucacuggccg

SEQ ID NO: 2841465 - RNA, 19 nt, Artificial Sequence
  Description of Artificial Sequence: Synthetic oligonucleotide
gccaugcugcaguguggaa

SEQ ID NO: 2841466 - RNA, 19 nt, Artificial Sequence
  Description of Artificial Sequence: Synthetic oligonucleotide
ggcaccuguucguccuccu

SEQ ID NO: 2841467 - RNA, 19 nt, Artificial Sequence
  Description of Artificial Sequence: Synthetic oligonucleotide
ccaccgccuucaccgccgc

SEQ ID NO: 2841468 - RNA, 19 nt, Artificial Sequence
  Description of Artificial Sequence: Synthetic oligonucleotide
cgaagaucucgcgggcguc

SEQ ID NO: 2841469 - RNA, 19 nt, Artificial Sequence
  Description of Artificial Sequence: Synthetic oligonucleotide
gugcaggcugguggucaaa

SEQ ID NO: 2841470 - RNA, 19 nt, Artificial Sequence
  Description of Artificial Sequence: Synthetic oligonucleotide
gccaggcucgcagcugcca

SEQ ID NO: 2841471 - RNA, 19 nt, Artificial Sequence
  Description of Artificial Sequence: Synthetic oligonucleotide
ccuccucgcccgccgucac

SEQ ID NO: 2841472 - RNA, 19 nt, Artificial Sequence
  Description of Artificial Sequence: Synthetic oligonucleotide
cacggccaccgugcucuca

SEQ ID NO: 2841473 - RNA, 19 nt, Artificial Sequence
  Description of Artificial Sequence: Synthetic oligonucleotide
gcaugggucccggguguaa

SEQ ID NO: 2841474 - RNA, 19 nt, Artificial Sequence
  Description of Artificial Sequence: Synthetic oligonucleotide
cggccaccgugcucucagg

SEQ ID NO: 2841475 - RNA, 19 nt, Artificial Sequence
  Description of Artificial Sequence: Synthetic oligonucleotide
cagggucgcuaaccugaau

SEQ ID NO: 2841476 - RNA, 19 nt, Artificial Sequence
  Description of Artificial Sequence: Synthetic oligonucleotide
cgugcucucagggucgcua

SEQ ID NO: 2841477 - RNA, 19 nt, Artificial Sequence
  Description of Artificial Sequence: Synthetic oligonucleotide
gcccaccaucccggaacug

SEQ ID NO: 2841478 - RNA, 19 nt, Artificial Sequence
  Description of Artificial Sequence: Synthetic oligonucleotide
ccgccuucaccgccgccca

SEQ ID NO: 2841479 - RNA, 19 nt, Artificial Sequence
  Description of Artificial Sequence: Synthetic oligonucleotide
cuccucgcccgccgucacu

SEQ ID NO: 2841480 - RNA, 19 nt, Artificial Sequence
  Description of Artificial Sequence: Synthetic oligonucleotide
ggacaccugugugcaggcu

SEQ ID NO: 2841481 - RNA, 19 nt, Artificial Sequence
  Description of Artificial Sequence: Synthetic oligonucleotide
cggccaccgccuucaccgc

SEQ ID NO: 2841482 - RNA, 19 nt, Artificial Sequence
  Description of Artificial Sequence: Synthetic oligonucleotide
gccgcccaccaucccggaa

SEQ ID NO: 2841483 - RNA, 19 nt, Artificial Sequence
  Description of Artificial Sequence: Synthetic oligonucleotide
cgccgucacuggccgcucc

SEQ ID NO: 2841484 - RNA, 19 nt, Artificial Sequence
  Description of Artificial Sequence: Synthetic oligonucleotide
ggcaugggucccgggugua

SEQ ID NO: 2841485 - RNA, 19 nt, Artificial Sequence
  Description of Artificial Sequence: Synthetic oligonucleotide
cggguguaaugugcacauc

SEQ ID NO: 2841486 - RNA, 19 nt, Artificial Sequence
  Description of Artificial Sequence: Synthetic oligonucleotide
gcccgccgucacuggccgc

SEQ ID NO: 2841487 - RNA, 19 nt, Artificial Sequence
  Description of Artificial Sequence: Synthetic oligonucleotide
cuucaccgccgcccaccau

SEQ ID NO: 2841488 - RNA, 19 nt, Artificial Sequence
  Description of Artificial Sequence: Synthetic oligonucleotide
caccugugugcaggcuggu

SEQ ID NO: 2841489 - RNA, 19 nt, Artificial Sequence
  Description of Artificial Sequence: Synthetic oligonucleotide
cgacccggccaccgccuuc

SEQ ID NO: 2841490 - RNA, 19 nt, Artificial Sequence
  Description of Artificial Sequence: Synthetic oligonucleotide
cgggcaccuguucguccuc

SEQ ID NO: 2841491 - RNA, 19 nt, Artificial Sequence
  Description of Artificial Sequence: Synthetic oligonucleotide
ccacggccaccgugcucuc

SEQ ID NO: 2841492 - RNA, 19 nt, Artificial Sequence
  Description of Artificial Sequence: Synthetic oligonucleotide
cccgccgucacuggccgcu

SEQ ID NO: 2841493 - RNA, 19 nt, Artificial Sequence
  Description of Artificial Sequence: Synthetic oligonucleotide
cccgacccggccaccgccu

SEQ ID NO: 2841494 - RNA, 19 nt, Artificial Sequence
  Description of Artificial Sequence: Synthetic oligonucleotide
cgccuucaccgccgcccac

SEQ ID NO: 2841495 - RNA, 19 nt, Artificial Sequence
  Description of Artificial Sequence: Synthetic oligonucleotide
cgaugcugucgggcaccug

SEQ ID NO: 2841496 - RNA, 19 nt, Artificial Sequence
  Description of Artificial Sequence: Synthetic oligonucleotide
cgcccaccaucccggaacu

SEQ ID NO: 2841497 - RNA, 19 nt, Artificial Sequence
  Description of Artificial Sequence: Synthetic oligonucleotide
ccgccgucacuggccgcuc

SEQ ID NO: 2841498 - RNA, 19 nt, Artificial Sequence
  Description of Artificial Sequence: Synthetic oligonucleotide
cgcgggcgucgaugcuguc

SEQ ID NO: 2841499 - RNA, 19 nt, Artificial Sequence
  Description of Artificial Sequence: Synthetic oligonucleotide
cgccgcccaccaucccgga

SEQ ID NO: 2841500 - RNA, 19 nt, Artificial Sequence
  Description of Artificial Sequence: Synthetic oligonucleotide
ccgacccggccaccgccuu

SEQ ID NO: 2841501 - RNA, 19 nt, Artificial Sequence
  Description of Artificial Sequence: Synthetic oligonucleotide
ccgugcucucagggucgcu

SEQ ID NO: 2841502 - RNA, 19 nt, Artificial Sequence
  Description of Artificial Sequence: Synthetic oligonucleotide
ugucgaaacauacagagag

SEQ ID NO: 2841503 - RNA, 19 nt, Artificial Sequence
  Description of Artificial Sequence: Synthetic oligonucleotide
aaacuuugaaguccgaaac

SEQ ID NO: 2841504 - RNA, 19 nt, Artificial Sequence
  Description of Artificial Sequence: Synthetic oligonucleotide
uuaauaacagcauacaggu

SEQ ID NO: 2841505 - RNA, 19 nt, Artificial Sequence
  Description of Artificial Sequence: Synthetic oligonucleotide
aauaacgauauucuagguc

SEQ ID NO: 2841506 - RNA, 19 nt, Artificial Sequence
  Description of Artificial Sequence: Synthetic oligonucleotide
agugcugucacaucuaacc

SEQ ID NO: 2841507 - RNA, 19 nt, Artificial Sequence
  Description of Artificial Sequence: Synthetic oligonucleotide
agaauaacgauauucuagg

SEQ ID NO: 2841508 - RNA, 19 nt, Artificial Sequence
  Description of Artificial Sequence: Synthetic oligonucleotide
uaggucagcaaucacaggg

SEQ ID NO: 2841509 - RNA, 19 nt, Artificial Sequence
  Description of Artificial Sequence: Synthetic oligonucleotide
auaacgauauucuagguca

SEQ ID NO: 2841510 - RNA, 19 nt, Artificial Sequence
  Description of Artificial Sequence: Synthetic oligonucleotide
auuaauaacagcauacagg

SEQ ID NO: 2841511 - RNA, 19 nt, Artificial Sequence
  Description of Artificial Sequence: Synthetic oligonucleotide
aucuguaucaacaaaauag

SEQ ID NO: 2841512 - RNA, 19 nt, Artificial Sequence
  Description of Artificial Sequence: Synthetic oligonucleotide
agugucgaaacauacagag

SEQ ID NO: 2841513 - RNA, 19 nt, Artificial Sequence
  Description of Artificial Sequence: Synthetic oligonucleotide
acaugugaaucauaaagcg

SEQ ID NO: 2841514 - RNA, 19 nt, Artificial Sequence
  Description of Artificial Sequence: Synthetic oligonucleotide
ucuucugaaaacuuugaag

SEQ ID NO: 2841515 - RNA, 19 nt, Artificial Sequence
  Description of Artificial Sequence: Synthetic oligonucleotide
auauucacgggcaaaaugc

SEQ ID NO: 2841516 - RNA, 19 nt, Artificial Sequence
  Description of Artificial Sequence: Synthetic oligonucleotide
aacagugcagugucgaaac

SEQ ID NO: 2841517 - RNA, 19 nt, Artificial Sequence
  Description of Artificial Sequence: Synthetic oligonucleotide
guugcuuugauuuuggaac

SEQ ID NO: 2841518 - RNA, 19 nt, Artificial Sequence
  Description of Artificial Sequence: Synthetic oligonucleotide
agauaagugggacacuacc

SEQ ID NO: 2841519 - RNA, 19 nt, Artificial Sequence
  Description of Artificial Sequence: Synthetic oligonucleotide
aagaauaacgauauucuag

SEQ ID NO: 2841520 - RNA, 19 nt, Artificial Sequence
  Description of Artificial Sequence: Synthetic oligonucleotide
ucuugaaggaucuuaaacu

SEQ ID NO: 2841521 - RNA, 19 nt, Artificial Sequence
  Description of Artificial Sequence: Synthetic oligonucleotide
uuugaaguccgaaacucgg

SEQ ID NO: 2841522 - RNA, 19 nt, Artificial Sequence
  Description of Artificial Sequence: Synthetic oligonucleotide
augauuacaugagauaccc

SEQ ID NO: 2841523 - RNA, 19 nt, Artificial Sequence
  Description of Artificial Sequence: Synthetic oligonucleotide
ucuaggucagcaaucacag

SEQ ID NO: 2841524 - RNA, 19 nt, Artificial Sequence
  Description of Artificial Sequence: Synthetic oligonucleotide
agauaaacagugcaguguc

SEQ ID NO: 2841525 - RNA, 19 nt, Artificial Sequence
  Description of Artificial Sequence: Synthetic oligonucleotide
agcaaucauauucacgggc

SEQ ID NO: 2841526 - RNA, 19 nt, Artificial Sequence
  Description of Artificial Sequence: Synthetic oligonucleotide
aaacacuucuuucaguuga

SEQ ID NO: 2841527 - RNA, 19 nt, Artificial Sequence
  Description of Artificial Sequence: Synthetic oligonucleotide
aauagcuaucgccauagca

SEQ ID NO: 2841528 - RNA, 19 nt, Artificial Sequence
  Description of Artificial Sequence: Synthetic oligonucleotide
aacaaaauagcuaucgcca

SEQ ID NO: 2841529 - RNA, 19 nt, Artificial Sequence
  Description of Artificial Sequence: Synthetic oligonucleotide
aaaacuuugaaguccgaaa

SEQ ID NO: 2841530 - RNA, 19 nt, Artificial Sequence
  Description of Artificial Sequence: Synthetic oligonucleotide
aaggaucuuaaacuucuuc

SEQ ID NO: 2841531 - RNA, 19 nt, Artificial Sequence
  Description of Artificial Sequence: Synthetic oligonucleotide
augugaaucauaaagcggg

SEQ ID NO: 2841532 - RNA, 19 nt, Artificial Sequence
  Description of Artificial Sequence: Synthetic oligonucleotide
caacaaaauagcuaucgcc

SEQ ID NO: 2841533 - RNA, 19 nt, Artificial Sequence
  Description of Artificial Sequence: Synthetic oligonucleotide
aucaacaaaauagcuaucg

SEQ ID NO: 2841534 - RNA, 19 nt, Artificial Sequence
  Description of Artificial Sequence: Synthetic oligonucleotide
uguaucaacaaaauagcua

SEQ ID NO: 2841535 - RNA, 19 nt, Artificial Sequence
  Description of Artificial Sequence: Synthetic oligonucleotide
aacucgagucauuaauaac

SEQ ID NO: 2841536 - RNA, 19 nt, Artificial Sequence
  Description of Artificial Sequence: Synthetic oligonucleotide
ugaaggaucuuaaacuucu

SEQ ID NO: 2841537 - RNA, 19 nt, Artificial Sequence
  Description of Artificial Sequence: Synthetic oligonucleotide
ucugaaaacuuugaagucc

SEQ ID NO: 2841538 - RNA, 19 nt, Artificial Sequence
  Description of Artificial Sequence: Synthetic oligonucleotide
uucuugaaggaucuuaaac

SEQ ID NO: 2841539 - RNA, 19 nt, Artificial Sequence
  Description of Artificial Sequence: Synthetic oligonucleotide
ugauuuuggaacucgaguc

SEQ ID NO: 2841540 - RNA, 19 nt, Artificial Sequence
  Description of Artificial Sequence: Synthetic oligonucleotide
cacaugugaaucauaaagc

SEQ ID NO: 2841541 - RNA, 19 nt, Artificial Sequence
  Description of Artificial Sequence: Synthetic oligonucleotide
uuugauuuuggaacucgag

SEQ ID NO: 2841542 - RNA, 19 nt, Artificial Sequence
  Description of Artificial Sequence: Synthetic oligonucleotide
gaaaccgcagcucaagugc

SEQ ID NO: 2841543 - RNA, 19 nt, Artificial Sequence
  Description of Artificial Sequence: Synthetic oligonucleotide
uugauuuuggaacucgagu

SEQ ID NO: 2841544 - RNA, 19 nt, Artificial Sequence
  Description of Artificial Sequence: Synthetic oligonucleotide
cugaaaacuuugaaguccg

SEQ ID NO: 2841545 - RNA, 19 nt, Artificial Sequence
  Description of Artificial Sequence: Synthetic oligonucleotide
uucacgggcaaaaugcugc

SEQ ID NO: 2841546 - RNA, 19 nt, Artificial Sequence
  Description of Artificial Sequence: Synthetic oligonucleotide
caugugaaucauaaagcgg

SEQ ID NO: 2841547 - RNA, 19 nt, Artificial Sequence
  Description of Artificial Sequence: Synthetic oligonucleotide
ucaacaaaauagcuaucgc

SEQ ID NO: 2841548 - RNA, 19 nt, Artificial Sequence
  Description of Artificial Sequence: Synthetic oligonucleotide
aggaucuuaaacuucuucu

SEQ ID NO: 2841549 - RNA, 19 nt, Artificial Sequence
  Description of Artificial Sequence: Synthetic oligonucleotide
gaaacauacagagaggaga

SEQ ID NO: 2841550 - RNA, 19 nt, Artificial Sequence
  Description of Artificial Sequence: Synthetic oligonucleotide
uacugaaucagucacccaa

SEQ ID NO: 2841551 - RNA, 19 nt, Artificial Sequence
  Description of Artificial Sequence: Synthetic oligonucleotide
uucuuaagaguucuucuga

SEQ ID NO: 2841552 - RNA, 19 nt, Artificial Sequence
  Description of Artificial Sequence: Synthetic oligonucleotide
uguugaugggcacauguga

SEQ ID NO: 2841553 - RNA, 19 nt, Artificial Sequence
  Description of Artificial Sequence: Synthetic oligonucleotide
ugugaaucauaaagcgggg

SEQ ID NO: 2841554 - RNA, 19 nt, Artificial Sequence
  Description of Artificial Sequence: Synthetic oligonucleotide
ugucuacugaaucagucac

SEQ ID NO: 2841555 - RNA, 19 nt, Artificial Sequence
  Description of Artificial Sequence: Synthetic oligonucleotide
ucuacugaaucagucaccc

SEQ ID NO: 2841556 - RNA, 19 nt, Artificial Sequence
  Description of Artificial Sequence: Synthetic oligonucleotide
cacccaacguucuugaagg

SEQ ID NO: 2841557 - RNA, 19 nt, Artificial Sequence
  Description of Artificial Sequence: Synthetic oligonucleotide
ucuucuuaagaguucuucu

SEQ ID NO: 2841558 - RNA, 19 nt, Artificial Sequence
  Description of Artificial Sequence: Synthetic oligonucleotide
ucacccaacguucuugaag

SEQ ID NO: 2841559 - RNA, 19 nt, Artificial Sequence
  Description of Artificial Sequence: Synthetic oligonucleotide
aacuuugaaguccgaaacu

SEQ ID NO: 2841560 - RNA, 19 nt, Artificial Sequence
  Description of Artificial Sequence: Synthetic oligonucleotide
ucacaucuaaccucguugc

SEQ ID NO: 2841561 - RNA, 19 nt, Artificial Sequence
  Description of Artificial Sequence: Synthetic oligonucleotide
ugaucuuccccgaugauua

SEQ ID NO: 2841562 - RNA, 19 nt, Artificial Sequence
  Description of Artificial Sequence: Synthetic oligonucleotide
aaccucguugcuuugauuu

SEQ ID NO: 2841563 - RNA, 19 nt, Artificial Sequence
  Description of Artificial Sequence: Synthetic oligonucleotide
acuuugaaguccgaaacuc

SEQ ID NO: 2841564 - RNA, 19 nt, Artificial Sequence
  Description of Artificial Sequence: Synthetic oligonucleotide
cuuugaaguccgaaacucg

SEQ ID NO: 2841565 - RNA, 19 nt, Artificial Sequence
  Description of Artificial Sequence: Synthetic oligonucleotide
aaauagcuaucgccauagc

SEQ ID NO: 2841566 - RNA, 19 nt, Artificial Sequence
  Description of Artificial Sequence: Synthetic oligonucleotide
ucauuaauaacagcauaca

SEQ ID NO: 2841567 - RNA, 19 nt, Artificial Sequence
  Description of Artificial Sequence: Synthetic oligonucleotide
cauacagagaggagagugg

SEQ ID NO: 2841568 - RNA, 19 nt, Artificial Sequence
  Description of Artificial Sequence: Synthetic oligonucleotide
uccaugaaaccgcagcuca

SEQ ID NO: 2841569 - RNA, 19 nt, Artificial Sequence
  Description of Artificial Sequence: Synthetic oligonucleotide
aacgauauucuaggucagc

SEQ ID NO: 2841570 - RNA, 19 nt, Artificial Sequence
  Description of Artificial Sequence: Synthetic oligonucleotide
ucgaaacauacagagagga

SEQ ID NO: 2841571 - RNA, 19 nt, Artificial Sequence
  Description of Artificial Sequence: Synthetic oligonucleotide
cuucuuaagaguucuucug

SEQ ID NO: 2841572 - RNA, 19 nt, Artificial Sequence
  Description of Artificial Sequence: Synthetic oligonucleotide
cuucugaaaacuuugaagu

SEQ ID NO: 2841573 - RNA, 19 nt, Artificial Sequence
  Description of Artificial Sequence: Synthetic oligonucleotide
gucacaucuaaccucguug

SEQ ID NO: 2841574 - RNA, 19 nt, Artificial Sequence
  Description of Artificial Sequence: Synthetic oligonucleotide
acucgagucauuaauaaca

SEQ ID NO: 2841575 - RNA, 19 nt, Artificial Sequence
  Description of Artificial Sequence: Synthetic oligonucleotide
aguggucccaagaauaacg

SEQ ID NO: 2841576 - RNA, 19 nt, Artificial Sequence
  Description of Artificial Sequence: Synthetic oligonucleotide
gucauuaauaacagcauac

SEQ ID NO: 2841577 - RNA, 19 nt, Artificial Sequence
  Description of Artificial Sequence: Synthetic oligonucleotide
ugaaucauaaagcgggguu

SEQ ID NO: 2841578 - RNA, 19 nt, Artificial Sequence
  Description of Artificial Sequence: Synthetic oligonucleotide
ugaaguccgaaacucggcu

SEQ ID NO: 2841579 - RNA, 19 nt, Artificial Sequence
  Description of Artificial Sequence: Synthetic oligonucleotide
ucaguugauccaaaucugu

SEQ ID NO: 2841580 - RNA, 19 nt, Artificial Sequence
  Description of Artificial Sequence: Synthetic oligonucleotide
aaucuguaucaacaaaaua

SEQ ID NO: 2841581 - RNA, 19 nt, Artificial Sequence
  Description of Artificial Sequence: Synthetic oligonucleotide
ucggcucugaucuuccccg

SEQ ID NO: 2841582 - RNA, 19 nt, Artificial Sequence
  Description of Artificial Sequence: Synthetic oligonucleotide
uugauccaaaucuguauca

SEQ ID NO: 2841583 - RNA, 19 nt, Artificial Sequence
  Description of Artificial Sequence: Synthetic oligonucleotide
gauuuuggaacucgaguca

SEQ ID NO: 2841584 - RNA, 19 nt, Artificial Sequence
  Description of Artificial Sequence: Synthetic oligonucleotide
caaaucuguaucaacaaaa

SEQ ID NO: 2841585 - RNA, 19 nt, Artificial Sequence
  Description of Artificial Sequence: Synthetic oligonucleotide
ucagcaaucacaggggcca

SEQ ID NO: 2841586 - RNA, 19 nt, Artificial Sequence
  Description of Artificial Sequence: Synthetic oligonucleotide
cuuggcuccaugaaaccgc

SEQ ID NO: 2841587 - RNA, 19 nt, Artificial Sequence
  Description of Artificial Sequence: Synthetic oligonucleotide
gagucugaugcucaccugc

SEQ ID NO: 2841588 - RNA, 19 nt, Artificial Sequence
  Description of Artificial Sequence: Synthetic oligonucleotide
uauucuaggucagcaauca

SEQ ID NO: 2841589 - RNA, 19 nt, Artificial Sequence
  Description of Artificial Sequence: Synthetic oligonucleotide
uugucuacugaaucaguca

SEQ ID NO: 2841590 - RNA, 19 nt, Artificial Sequence
  Description of Artificial Sequence: Synthetic oligonucleotide
gaaucauaaagcgggguug

SEQ ID NO: 2841591 - RNA, 19 nt, Artificial Sequence
  Description of Artificial Sequence: Synthetic oligonucleotide
cucgagucauuaauaacag

SEQ ID NO: 2841592 - RNA, 19 nt, Artificial Sequence
  Description of Artificial Sequence: Synthetic oligonucleotide
cauauucacgggcaaaaug

SEQ ID NO: 2841593 - RNA, 19 nt, Artificial Sequence
  Description of Artificial Sequence: Synthetic oligonucleotide
uuccccgaugauuacauga

SEQ ID NO: 2841594 - RNA, 19 nt, Artificial Sequence
  Description of Artificial Sequence: Synthetic oligonucleotide
aaguccgaaacucggcucu

SEQ ID NO: 2841595 - RNA, 19 nt, Artificial Sequence
  Description of Artificial Sequence: Synthetic oligonucleotide
ugggacacuaccuuggcuc

SEQ ID NO: 2841596 - RNA, 19 nt, Artificial Sequence
  Description of Artificial Sequence: Synthetic oligonucleotide
agcauacagguccagauaa

SEQ ID NO: 2841597 - RNA, 19 nt, Artificial Sequence
  Description of Artificial Sequence: Synthetic oligonucleotide
uggaacucgagucauuaau

SEQ ID NO: 2841598 - RNA, 19 nt, Artificial Sequence
  Description of Artificial Sequence: Synthetic oligonucleotide
ugaaaccgcagcucaagug

SEQ ID NO: 2841599 - RNA, 19 nt, Artificial Sequence
  Description of Artificial Sequence: Synthetic oligonucleotide
cuugucuacugaaucaguc

SEQ ID NO: 2841600 - RNA, 19 nt, Artificial Sequence
  Description of Artificial Sequence: Synthetic oligonucleotide
aaaucuguaucaacaaaau

SEQ ID NO: 2841601 - RNA, 19 nt, Artificial Sequence
  Description of Artificial Sequence: Synthetic oligonucleotide
uccccgaugauuacaugag

SEQ ID NO: 2841602 - RNA, 19 nt, Artificial Sequence
  Description of Artificial Sequence: Synthetic oligonucleotide
aguugauccaaaucuguau

SEQ ID NO: 2841603 - RNA, 19 nt, Artificial Sequence
  Description of Artificial Sequence: Synthetic oligonucleotide
uaaagcgggguugccaugg

SEQ ID NO: 2841604 - RNA, 19 nt, Artificial Sequence
  Description of Artificial Sequence: Synthetic oligonucleotide
uaagugggacacuaccuug

SEQ ID NO: 2841605 - RNA, 19 nt, Artificial Sequence
  Description of Artificial Sequence: Synthetic oligonucleotide
uccagauaaacagugcagu

SEQ ID NO: 2841606 - RNA, 19 nt, Artificial Sequence
  Description of Artificial Sequence: Synthetic oligonucleotide
ucuuaagaguucuucugaa

SEQ ID NO: 2841607 - RNA, 19 nt, Artificial Sequence
  Description of Artificial Sequence: Synthetic oligonucleotide
uccaaaucuguaucaacaa

SEQ ID NO: 2841608 - RNA, 19 nt, Artificial Sequence
  Description of Artificial Sequence: Synthetic oligonucleotide
uauucacgggcaaaaugcu

SEQ ID NO: 2841609 - RNA, 19 nt, Artificial Sequence
  Description of Artificial Sequence: Synthetic oligonucleotide
uugaaguccgaaacucggc

SEQ ID NO: 2841610 - RNA, 19 nt, Artificial Sequence
  Description of Artificial Sequence: Synthetic oligonucleotide
uucugaaaacuuugaaguc

SEQ ID NO: 2841611 - RNA, 19 nt, Artificial Sequence
  Description of Artificial Sequence: Synthetic oligonucleotide
cucuuccggagucugaugc

SEQ ID NO: 2841612 - RNA, 19 nt, Artificial Sequence
  Description of Artificial Sequence: Synthetic oligonucleotide
ugaaucagucacccaacgu

SEQ ID NO: 2841613 - RNA, 19 nt, Artificial Sequence
  Description of Artificial Sequence: Synthetic oligonucleotide
uaacgauauucuaggucag

SEQ ID NO: 2841614 - RNA, 19 nt, Artificial Sequence
  Description of Artificial Sequence: Synthetic oligonucleotide
auagcuaucgccauagcaa

SEQ ID NO: 2841615 - RNA, 19 nt, Artificial Sequence
  Description of Artificial Sequence: Synthetic oligonucleotide
ucaccugcuuucuuaauuc

SEQ ID NO: 2841616 - RNA, 19 nt, Artificial Sequence
  Description of Artificial Sequence: Synthetic oligonucleotide
ugcagugucgaaacauaca

SEQ ID NO: 2841617 - RNA, 19 nt, Artificial Sequence
  Description of Artificial Sequence: Synthetic oligonucleotide
aagugggacacuaccuugg

SEQ ID NO: 2841618 - RNA, 19 nt, Artificial Sequence
  Description of Artificial Sequence: Synthetic oligonucleotide
gauaaacagugcagugucg

SEQ ID NO: 2841619 - RNA, 19 nt, Artificial Sequence
  Description of Artificial Sequence: Synthetic oligonucleotide
uagcaaucauauucacggg

SEQ ID NO: 2841620 - RNA, 19 nt, Artificial Sequence
  Description of Artificial Sequence: Synthetic oligonucleotide
agucauuaauaacagcaua

SEQ ID NO: 2841621 - RNA, 19 nt, Artificial Sequence
  Description of Artificial Sequence: Synthetic oligonucleotide
aaacucggcucugaucuuc

SEQ ID NO: 2841622 - RNA, 19 nt, Artificial Sequence
  Description of Artificial Sequence: Synthetic oligonucleotide
auauucuaggucagcaauc

SEQ ID NO: 2841623 - RNA, 19 nt, Artificial Sequence
  Description of Artificial Sequence: Synthetic oligonucleotide
aaacuucuucuuaagaguu

SEQ ID NO: 2841624 - RNA, 19 nt, Artificial Sequence
  Description of Artificial Sequence: Synthetic oligonucleotide
cuuaaacuucuucuuaaga

SEQ ID NO: 2841625 - RNA, 19 nt, Artificial Sequence
  Description of Artificial Sequence: Synthetic oligonucleotide
acaggggccaucucuuccg

SEQ ID NO: 2841626 - RNA, 19 nt, Artificial Sequence
  Description of Artificial Sequence: Synthetic oligonucleotide
guugccauggcacacacgu

SEQ ID NO: 2841627 - RNA, 19 nt, Artificial Sequence
  Description of Artificial Sequence: Synthetic oligonucleotide
gaacucgagucauuaauaa

SEQ ID NO: 2841628 - RNA, 19 nt, Artificial Sequence
  Description of Artificial Sequence: Synthetic oligonucleotide
cugaaucagucacccaacg

SEQ ID NO: 2841629 - RNA, 19 nt, Artificial Sequence
  Description of Artificial Sequence: Synthetic oligonucleotide
ugauuacaugagauacccc

SEQ ID NO: 2841630 - RNA, 19 nt, Artificial Sequence
  Description of Artificial Sequence: Synthetic oligonucleotide
accuuggcuccaugaaacc

SEQ ID NO: 2841631 - RNA, 19 nt, Artificial Sequence
  Description of Artificial Sequence: Synthetic oligonucleotide
acaaaauagcuaucgccau

SEQ ID NO: 2841632 - RNA, 19 nt, Artificial Sequence
  Description of Artificial Sequence: Synthetic oligonucleotide
ucagauaagugggacacua

SEQ ID NO: 2841633 - RNA, 19 nt, Artificial Sequence
  Description of Artificial Sequence: Synthetic oligonucleotide
auucuaggucagcaaucac

SEQ ID NO: 2841634 - RNA, 19 nt, Artificial Sequence
  Description of Artificial Sequence: Synthetic oligonucleotide
aucgccauagcaaucauau

SEQ ID NO: 2841635 - RNA, 19 nt, Artificial Sequence
  Description of Artificial Sequence: Synthetic oligonucleotide
ucugaugcucaccugcuuu

SEQ ID NO: 2841636 - RNA, 19 nt, Artificial Sequence
  Description of Artificial Sequence: Synthetic oligonucleotide
acugaaucagucacccaac

SEQ ID NO: 2841637 - RNA, 19 nt, Artificial Sequence
  Description of Artificial Sequence: Synthetic oligonucleotide
cucguugcuuugauuuugg

SEQ ID NO: 2841638 - RNA, 19 nt, Artificial Sequence
  Description of Artificial Sequence: Synthetic oligonucleotide
ucuuccccgaugauuacau

SEQ ID NO: 2841639 - RNA, 19 nt, Artificial Sequence
  Description of Artificial Sequence: Synthetic oligonucleotide
ugccauggcacacacguuu

SEQ ID NO: 2841640 - RNA, 19 nt, Artificial Sequence
  Description of Artificial Sequence: Synthetic oligonucleotide
ucauaaagcgggguugcca

SEQ ID NO: 2841641 - RNA, 19 nt, Artificial Sequence
  Description of Artificial Sequence: Synthetic oligonucleotide
aacucggcucugaucuucc

SEQ ID NO: 2841642 - RNA, 19 nt, Artificial Sequence
  Description of Artificial Sequence: Synthetic oligonucleotide
ucgagucauuaauaacagc

SEQ ID NO: 2841643 - RNA, 19 nt, Artificial Sequence
  Description of Artificial Sequence: Synthetic oligonucleotide
gaaucagucacccaacguu

SEQ ID NO: 2841644 - RNA, 19 nt, Artificial Sequence
  Description of Artificial Sequence: Synthetic oligonucleotide
ugcugcuuuguugaugggc

SEQ ID NO: 2841645 - RNA, 19 nt, Artificial Sequence
  Description of Artificial Sequence: Synthetic oligonucleotide
gcugucacaucuaaccucg

SEQ ID NO: 2841646 - RNA, 19 nt, Artificial Sequence
  Description of Artificial Sequence: Synthetic oligonucleotide
acuaccuuggcuccaugaa

SEQ ID NO: 2841647 - RNA, 19 nt, Artificial Sequence
  Description of Artificial Sequence: Synthetic oligonucleotide
acgauauucuaggucagca

SEQ ID NO: 2841648 - RNA, 19 nt, Artificial Sequence
  Description of Artificial Sequence: Synthetic oligonucleotide
uagcuaucgccauagcaau

SEQ ID NO: 2841649 - RNA, 19 nt, Artificial Sequence
  Description of Artificial Sequence: Synthetic oligonucleotide
gucgaaacauacagagagg

SEQ ID NO: 2841650 - RNA, 19 nt, Artificial Sequence
  Description of Artificial Sequence: Synthetic oligonucleotide
caugaaaccgcagcucaag

SEQ ID NO: 2841651 - RNA, 19 nt, Artificial Sequence
  Description of Artificial Sequence: Synthetic oligonucleotide
cgagucauuaauaacagca

SEQ ID NO: 2841652 - RNA, 19 nt, Artificial Sequence
  Description of Artificial Sequence: Synthetic oligonucleotide
aucauaaagcgggguugcc

SEQ ID NO: 2841653 - RNA, 19 nt, Artificial Sequence
  Description of Artificial Sequence: Synthetic oligonucleotide
guccagauaaacagugcag

SEQ ID NO: 2841654 - RNA, 19 nt, Artificial Sequence
  Description of Artificial Sequence: Synthetic oligonucleotide
auacagagaggagaguggu

SEQ ID NO: 2841655 - RNA, 19 nt, Artificial Sequence
  Description of Artificial Sequence: Synthetic oligonucleotide
ugauccaaaucuguaucaa

SEQ ID NO: 2841656 - RNA, 19 nt, Artificial Sequence
  Description of Artificial Sequence: Synthetic oligonucleotide
aggagaguggucccaagaa

SEQ ID NO: 2841657 - RNA, 19 nt, Artificial Sequence
  Description of Artificial Sequence: Synthetic oligonucleotide
gaaguccgaaacucggcuc

SEQ ID NO: 2841658 - RNA, 19 nt, Artificial Sequence
  Description of Artificial Sequence: Synthetic oligonucleotide
uaaacagugcagugucgaa

SEQ ID NO: 2841659 - RNA, 19 nt, Artificial Sequence
  Description of Artificial Sequence: Synthetic oligonucleotide
aggucagcaaucacagggg

SEQ ID NO: 2841660 - RNA, 19 nt, Artificial Sequence
  Description of Artificial Sequence: Synthetic oligonucleotide
cuuugauuuuggaacucga

SEQ ID NO: 2841661 - RNA, 19 nt, Artificial Sequence
  Description of Artificial Sequence: Synthetic oligonucleotide
uugaugggcacaugugaau

SEQ ID NO: 2841662 - RNA, 19 nt, Artificial Sequence
  Description of Artificial Sequence: Synthetic oligonucleotide
augaaaccgcagcucaagu

SEQ ID NO: 2841663 - RNA, 19 nt, Artificial Sequence
  Description of Artificial Sequence: Synthetic oligonucleotide
agucacccaacguucuuga

SEQ ID NO: 2841664 - RNA, 19 nt, Artificial Sequence
  Description of Artificial Sequence: Synthetic oligonucleotide
ucaagugcugucacaucua

SEQ ID NO: 2841665 - RNA, 19 nt, Artificial Sequence
  Description of Artificial Sequence: Synthetic oligonucleotide
agcgggguugccauggcac

SEQ ID NO: 2841666 - RNA, 19 nt, Artificial Sequence
  Description of Artificial Sequence: Synthetic oligonucleotide
ucuaaccucguugcuuuga

SEQ ID NO: 2841667 - RNA, 19 nt, Artificial Sequence
  Description of Artificial Sequence: Synthetic oligonucleotide
cccaagaauaacgauauuc

SEQ ID NO: 2841668 - RNA, 19 nt, Artificial Sequence
  Description of Artificial Sequence: Synthetic oligonucleotide
gcuuucuuaauuccuaaaa

SEQ ID NO: 2841669 - RNA, 19 nt, Artificial Sequence
  Description of Artificial Sequence: Synthetic oligonucleotide
ggcuccaugaaaccgcagc

SEQ ID NO: 2841670 - RNA, 19 nt, Artificial Sequence
  Description of Artificial Sequence: Synthetic oligonucleotide
caccugcuuucuuaauucc

SEQ ID NO: 2841671 - RNA, 19 nt, Artificial Sequence
  Description of Artificial Sequence: Synthetic oligonucleotide
cuuaagaguucuucugaaa

SEQ ID NO: 2841672 - RNA, 19 nt, Artificial Sequence
  Description of Artificial Sequence: Synthetic oligonucleotide
auacagguccagauaaaca

SEQ ID NO: 2841673 - RNA, 19 nt, Artificial Sequence
  Description of Artificial Sequence: Synthetic oligonucleotide
caagaauaacgauauucua

SEQ ID NO: 2841674 - RNA, 19 nt, Artificial Sequence
  Description of Artificial Sequence: Synthetic oligonucleotide
acgggcaaaaugcugcuuu

SEQ ID NO: 2841675 - RNA, 19 nt, Artificial Sequence
  Description of Artificial Sequence: Synthetic oligonucleotide
aacauacagagaggagagu

SEQ ID NO: 2841676 - RNA, 19 nt, Artificial Sequence
  Description of Artificial Sequence: Synthetic oligonucleotide
gagaguggucccaagaaua

SEQ ID NO: 2841677 - RNA, 19 nt, Artificial Sequence
  Description of Artificial Sequence: Synthetic oligonucleotide
ugucacaucuaaccucguu

SEQ ID NO: 2841678 - RNA, 19 nt, Artificial Sequence
  Description of Artificial Sequence: Synthetic oligonucleotide
gaggagaguggucccaaga

SEQ ID NO: 2841679 - RNA, 19 nt, Artificial Sequence
  Description of Artificial Sequence: Synthetic oligonucleotide
cuugaaggaucuuaaacuu

SEQ ID NO: 2841680 - RNA, 19 nt, Artificial Sequence
  Description of Artificial Sequence: Synthetic oligonucleotide
uuccggagucugaugcuca

SEQ ID NO: 2841681 - RNA, 19 nt, Artificial Sequence
  Description of Artificial Sequence: Synthetic oligonucleotide
ugcuuuguugaugggcaca

SEQ ID NO: 2841682 - RNA, 19 nt, Artificial Sequence
  Description of Artificial Sequence: Synthetic oligonucleotide
cucggcucugaucuucccc

SEQ ID NO: 2841683 - RNA, 19 nt, Artificial Sequence
  Description of Artificial Sequence: Synthetic oligonucleotide
cagauaagugggacacuac

SEQ ID NO: 2841684 - RNA, 19 nt, Artificial Sequence
  Description of Artificial Sequence: Synthetic oligonucleotide
gaauaacgauauucuaggu

SEQ ID NO: 2841685 - RNA, 19 nt, Artificial Sequence
  Description of Artificial Sequence: Synthetic oligonucleotide
uaucgccauagcaaucaua

SEQ ID NO: 2841686 - RNA, 19 nt, Artificial Sequence
  Description of Artificial Sequence: Synthetic oligonucleotide
cgaugauuacaugagauac

SEQ ID NO: 2841687 - RNA, 19 nt, Artificial Sequence
  Description of Artificial Sequence: Synthetic oligonucleotide
cugaugcucaccugcuuuc

SEQ ID NO: 2841688 - RNA, 19 nt, Artificial Sequence
  Description of Artificial Sequence: Synthetic oligonucleotide
ccaacguucuugaaggauc

SEQ ID NO: 2841689 - RNA, 19 nt, Artificial Sequence
  Description of Artificial Sequence: Synthetic oligonucleotide
acucggcucugaucuuccc

SEQ ID NO: 2841690 - RNA, 19 nt, Artificial Sequence
  Description of Artificial Sequence: Synthetic oligonucleotide
uacagagaggagagugguc

SEQ ID NO: 2841691 - RNA, 19 nt, Artificial Sequence
  Description of Artificial Sequence: Synthetic oligonucleotide
ucuuccggagucugaugcu

SEQ ID NO: 2841692 - RNA, 19 nt, Artificial Sequence
  Description of Artificial Sequence: Synthetic oligonucleotide
cgccauagcaaucauauuc

SEQ ID NO: 2841693 - RNA, 19 nt, Artificial Sequence
  Description of Artificial Sequence: Synthetic oligonucleotide
aaaccgcagcucaagugcu

SEQ ID NO: 2841694 - RNA, 19 nt, Artificial Sequence
  Description of Artificial Sequence: Synthetic oligonucleotide
auaaagcgggguugccaug

SEQ ID NO: 2841695 - RNA, 19 nt, Artificial Sequence
  Description of Artificial Sequence: Synthetic oligonucleotide
cagagaggagagugguccc

SEQ ID NO: 2841696 - RNA, 19 nt, Artificial Sequence
  Description of Artificial Sequence: Synthetic oligonucleotide
ucauauucacgggcaaaau

SEQ ID NO: 2841697 - RNA, 19 nt, Artificial Sequence
  Description of Artificial Sequence: Synthetic oligonucleotide
ucacgggcaaaaugcugcu

SEQ ID NO: 2841698 - RNA, 19 nt, Artificial Sequence
  Description of Artificial Sequence: Synthetic oligonucleotide
uuggaacucgagucauuaa

SEQ ID NO: 2841699 - RNA, 19 nt, Artificial Sequence
  Description of Artificial Sequence: Synthetic oligonucleotide
uuuuggaacucgagucauu

SEQ ID NO: 2841700 - RNA, 19 nt, Artificial Sequence
  Description of Artificial Sequence: Synthetic oligonucleotide
ccagauaaacagugcagug

SEQ ID NO: 2841701 - RNA, 19 nt, Artificial Sequence
  Description of Artificial Sequence: Synthetic oligonucleotide
acaucuaaccucguugcuu

SEQ ID NO: 2841702 - RNA, 19 nt, Artificial Sequence
  Description of Artificial Sequence: Synthetic oligonucleotide
agaggagaguggucccaag

SEQ ID NO: 2841703 - RNA, 19 nt, Artificial Sequence
  Description of Artificial Sequence: Synthetic oligonucleotide
ucucuuccggagucugaug

SEQ ID NO: 2841704 - RNA, 19 nt, Artificial Sequence
  Description of Artificial Sequence: Synthetic oligonucleotide
auucacgggcaaaaugcug

SEQ ID NO: 2841705 - RNA, 19 nt, Artificial Sequence
  Description of Artificial Sequence: Synthetic oligonucleotide
uccgaaacucggcucugau

SEQ ID NO: 2841706 - RNA, 19 nt, Artificial Sequence
  Description of Artificial Sequence: Synthetic oligonucleotide
aagcgggguugccauggca

SEQ ID NO: 2841707 - RNA, 19 nt, Artificial Sequence
  Description of Artificial Sequence: Synthetic oligonucleotide
gucagcaaucacaggggcc

SEQ ID NO: 2841708 - RNA, 19 nt, Artificial Sequence
  Description of Artificial Sequence: Synthetic oligonucleotide
uggucccaagaauaacgau

SEQ ID NO: 2841709 - RNA, 19 nt, Artificial Sequence
  Description of Artificial Sequence: Synthetic oligonucleotide
ggucagcaaucacaggggc

SEQ ID NO: 2841710 - RNA, 19 nt, Artificial Sequence
  Description of Artificial Sequence: Synthetic oligonucleotide
ucguugcuuugauuuugga

SEQ ID NO: 2841711 - RNA, 19 nt, Artificial Sequence
  Description of Artificial Sequence: Synthetic oligonucleotide
ucugaucuuccccgaugau

SEQ ID NO: 2841712 - RNA, 19 nt, Artificial Sequence
  Description of Artificial Sequence: Synthetic oligonucleotide
ggggccaucucuuccggag

SEQ ID NO: 2841713 - RNA, 19 nt, Artificial Sequence
  Description of Artificial Sequence: Synthetic oligonucleotide
gaucuuccccgaugauuac

SEQ ID NO: 2841714 - RNA, 19 nt, Artificial Sequence
  Description of Artificial Sequence: Synthetic oligonucleotide
gcaaucauauucacgggca

SEQ ID NO: 2841715 - RNA, 19 nt, Artificial Sequence
  Description of Artificial Sequence: Synthetic oligonucleotide
augcucaccugcuuucuua

SEQ ID NO: 2841716 - RNA, 19 nt, Artificial Sequence
  Description of Artificial Sequence: Synthetic oligonucleotide
acagugcagugucgaaaca

SEQ ID NO: 2841717 - RNA, 19 nt, Artificial Sequence
  Description of Artificial Sequence: Synthetic oligonucleotide
ugcuuugauuuuggaacuc

SEQ ID NO: 2841718 - RNA, 19 nt, Artificial Sequence
  Description of Artificial Sequence: Synthetic oligonucleotide
caaaauagcuaucgccaua

SEQ ID NO: 2841719 - RNA, 19 nt, Artificial Sequence
  Description of Artificial Sequence: Synthetic oligonucleotide
gagucauuaauaacagcau

SEQ ID NO: 2841720 - RNA, 19 nt, Artificial Sequence
  Description of Artificial Sequence: Synthetic oligonucleotide
gcuaucgccauagcaauca

SEQ ID NO: 2841721 - RNA, 19 nt, Artificial Sequence
  Description of Artificial Sequence: Synthetic oligonucleotide
gugcagugucgaaacauac

SEQ ID NO: 2841722 - RNA, 19 nt, Artificial Sequence
  Description of Artificial Sequence: Synthetic oligonucleotide
cauaaagcgggguugccau

SEQ ID NO: 2841723 - RNA, 19 nt, Artificial Sequence
  Description of Artificial Sequence: Synthetic oligonucleotide
cuaccuuggcuccaugaaa

SEQ ID NO: 2841724 - RNA, 19 nt, Artificial Sequence
  Description of Artificial Sequence: Synthetic oligonucleotide
gggacacuaccuuggcucc

SEQ ID NO: 2841725 - RNA, 19 nt, Artificial Sequence
  Description of Artificial Sequence: Synthetic oligonucleotide
aucucuuccggagucugau

SEQ ID NO: 2841726 - RNA, 19 nt, Artificial Sequence
  Description of Artificial Sequence: Synthetic oligonucleotide
cagugucgaaacauacaga

SEQ ID NO: 2841727 - RNA, 19 nt, Artificial Sequence
  Description of Artificial Sequence: Synthetic oligonucleotide
aucuaaccucguugcuuug

SEQ ID NO: 2841728 - RNA, 19 nt, Artificial Sequence
  Description of Artificial Sequence: Synthetic oligonucleotide
cagucacccaacguucuug

SEQ ID NO: 2841729 - RNA, 19 nt, Artificial Sequence
  Description of Artificial Sequence: Synthetic oligonucleotide
agcuaucgccauagcaauc

SEQ ID NO: 2841730 - RNA, 19 nt, Artificial Sequence
  Description of Artificial Sequence: Synthetic oligonucleotide
gcugcuuuguugaugggca

SEQ ID NO: 2841731 - RNA, 19 nt, Artificial Sequence
  Description of Artificial Sequence: Synthetic oligonucleotide
cugcuuuguugaugggcac

SEQ ID NO: 2841732 - RNA, 19 nt, Artificial Sequence
  Description of Artificial Sequence: Synthetic oligonucleotide
ggucccaagaauaacgaua

SEQ ID NO: 2841733 - RNA, 19 nt, Artificial Sequence
  Description of Artificial Sequence: Synthetic oligonucleotide
uccggagucugaugcucac

SEQ ID NO: 2841734 - RNA, 19 nt, Artificial Sequence
  Description of Artificial Sequence: Synthetic oligonucleotide
agugcagugucgaaacaua

SEQ ID NO: 2841735 - RNA, 19 nt, Artificial Sequence
  Description of Artificial Sequence: Synthetic oligonucleotide
cuccaugaaaccgcagcuc

SEQ ID NO: 2841736 - RNA, 19 nt, Artificial Sequence
  Description of Artificial Sequence: Synthetic oligonucleotide
gucccaagaauaacgauau

SEQ ID NO: 2841737 - RNA, 19 nt, Artificial Sequence
  Description of Artificial Sequence: Synthetic oligonucleotide
cuuccggagucugaugcuc

SEQ ID NO: 2841738 - RNA, 19 nt, Artificial Sequence
  Description of Artificial Sequence: Synthetic oligonucleotide
agagaggagagugguccca

SEQ ID NO: 2841739 - RNA, 19 nt, Artificial Sequence
  Description of Artificial Sequence: Synthetic oligonucleotide
caaucauauucacgggcaa

SEQ ID NO: 2841740 - RNA, 19 nt, Artificial Sequence
  Description of Artificial Sequence: Synthetic oligonucleotide
cagauaaacagugcagugu

SEQ ID NO: 2841741 - RNA, 19 nt, Artificial Sequence
  Description of Artificial Sequence: Synthetic oligonucleotide
agcaaucacaggggccauc

SEQ ID NO: 2841742 - RNA, 19 nt, Artificial Sequence
  Description of Artificial Sequence: Synthetic oligonucleotide
aucuuccccgaugauuaca

SEQ ID NO: 2841743 - RNA, 19 nt, Artificial Sequence
  Description of Artificial Sequence: Synthetic oligonucleotide
ccuuggcuccaugaaaccg

SEQ ID NO: 2841744 - RNA, 19 nt, Artificial Sequence
  Description of Artificial Sequence: Synthetic oligonucleotide
aucagucacccaacguucu

SEQ ID NO: 2841745 - RNA, 19 nt, Artificial Sequence
  Description of Artificial Sequence: Synthetic oligonucleotide
uaaccucguugcuuugauu

SEQ ID NO: 2841746 - RNA, 19 nt, Artificial Sequence
  Description of Artificial Sequence: Synthetic oligonucleotide
caagugcugucacaucuaa

SEQ ID NO: 2841747 - RNA, 19 nt, Artificial Sequence
  Description of Artificial Sequence: Synthetic oligonucleotide
caacguucuugaaggaucu

SEQ ID NO: 2841748 - RNA, 19 nt, Artificial Sequence
  Description of Artificial Sequence: Synthetic oligonucleotide
cuuccccgaugauuacaug

SEQ ID NO: 2841749 - RNA, 19 nt, Artificial Sequence
  Description of Artificial Sequence: Synthetic oligonucleotide
uggcuccaugaaaccgcag

SEQ ID NO: 2841750 - RNA, 19 nt, Artificial Sequence
  Description of Artificial Sequence: Synthetic oligonucleotide
ucacaggggccaucucuuc

SEQ ID NO: 2841751 - RNA, 19 nt, Artificial Sequence
  Description of Artificial Sequence: Synthetic oligonucleotide
accucguugcuuugauuuu

SEQ ID NO: 2841752 - RNA, 19 nt, Artificial Sequence
  Description of Artificial Sequence: Synthetic oligonucleotide
caucuaaccucguugcuuu

SEQ ID NO: 2841753 - RNA, 19 nt, Artificial Sequence
  Description of Artificial Sequence: Synthetic oligonucleotide
aaccgcagcucaagugcug

SEQ ID NO: 2841754 - RNA, 19 nt, Artificial Sequence
  Description of Artificial Sequence: Synthetic oligonucleotide
augggcacaugugaaucau

SEQ ID NO: 2841755 - RNA, 19 nt, Artificial Sequence
  Description of Artificial Sequence: Synthetic oligonucleotide
ggaucuuaaacuucuucuu

SEQ ID NO: 2841756 - RNA, 19 nt, Artificial Sequence
  Description of Artificial Sequence: Synthetic oligonucleotide
gugucgaaacauacagaga

SEQ ID NO: 2841757 - RNA, 19 nt, Artificial Sequence
  Description of Artificial Sequence: Synthetic oligonucleotide
cgaaacucggcucugaucu

SEQ ID NO: 2841758 - RNA, 19 nt, Artificial Sequence
  Description of Artificial Sequence: Synthetic oligonucleotide
aucacaggggccaucucuu

SEQ ID NO: 2841759 - RNA, 19 nt, Artificial Sequence
  Description of Artificial Sequence: Synthetic oligonucleotide
ggaacucgagucauuaaua

SEQ ID NO: 2841760 - RNA, 19 nt, Artificial Sequence
  Description of Artificial Sequence: Synthetic oligonucleotide
acccaacguucuugaagga

SEQ ID NO: 2841761 - RNA, 19 nt, Artificial Sequence
  Description of Artificial Sequence: Synthetic oligonucleotide
accgcagcucaagugcugu

SEQ ID NO: 2841762 - RNA, 19 nt, Artificial Sequence
  Description of Artificial Sequence: Synthetic oligonucleotide
gcagcucaagugcugucac

SEQ ID NO: 2841763 - RNA, 19 nt, Artificial Sequence
  Description of Artificial Sequence: Synthetic oligonucleotide
ucccaagaauaacgauauu

SEQ ID NO: 2841764 - RNA, 19 nt, Artificial Sequence
  Description of Artificial Sequence: Synthetic oligonucleotide
cuacugaaucagucaccca

SEQ ID NO: 2841765 - RNA, 19 nt, Artificial Sequence
  Description of Artificial Sequence: Synthetic oligonucleotide
ggagucugaugcucaccug

SEQ ID NO: 2841766 - RNA, 19 nt, Artificial Sequence
  Description of Artificial Sequence: Synthetic oligonucleotide
gggcacaugugaaucauaa

SEQ ID NO: 2841767 - RNA, 19 nt, Artificial Sequence
  Description of Artificial Sequence: Synthetic oligonucleotide
acacuaccuuggcuccaug

SEQ ID NO: 2841768 - RNA, 19 nt, Artificial Sequence
  Description of Artificial Sequence: Synthetic oligonucleotide
ucgccauagcaaucauauu

SEQ ID NO: 2841769 - RNA, 19 nt, Artificial Sequence
  Description of Artificial Sequence: Synthetic oligonucleotide
ccaaaucuguaucaacaaa

SEQ ID NO: 2841770 - RNA, 19 nt, Artificial Sequence
  Description of Artificial Sequence: Synthetic oligonucleotide
aguccgaaacucggcucug

SEQ ID NO: 2841771 - RNA, 19 nt, Artificial Sequence
  Description of Artificial Sequence: Synthetic oligonucleotide
aacguucuugaaggaucuu

SEQ ID NO: 2841772 - RNA, 19 nt, Artificial Sequence
  Description of Artificial Sequence: Synthetic oligonucleotide
caucucuuccggagucuga

SEQ ID NO: 2841773 - RNA, 19 nt, Artificial Sequence
  Description of Artificial Sequence: Synthetic oligonucleotide
gugaaucauaaagcggggu

SEQ ID NO: 2841774 - RNA, 19 nt, Artificial Sequence
  Description of Artificial Sequence: Synthetic oligonucleotide
ccucguugcuuugauuuug

SEQ ID NO: 2841775 - RNA, 19 nt, Artificial Sequence
  Description of Artificial Sequence: Synthetic oligonucleotide
ggcacaugugaaucauaaa

SEQ ID NO: 2841776 - RNA, 19 nt, Artificial Sequence
  Description of Artificial Sequence: Synthetic oligonucleotide
aggggccaucucuuccgga

SEQ ID NO: 2841777 - RNA, 19 nt, Artificial Sequence
  Description of Artificial Sequence: Synthetic oligonucleotide
cuaaccucguugcuuugau

SEQ ID NO: 2841778 - RNA, 19 nt, Artificial Sequence
  Description of Artificial Sequence: Synthetic oligonucleotide
cguucuugaaggaucuuaa

SEQ ID NO: 2841779 - RNA, 19 nt, Artificial Sequence
  Description of Artificial Sequence: Synthetic oligonucleotide
cagcucaagugcugucaca

SEQ ID NO: 2841780 - RNA, 19 nt, Artificial Sequence
  Description of Artificial Sequence: Synthetic oligonucleotide
ccgaugauuacaugagaua

SEQ ID NO: 2841781 - RNA, 19 nt, Artificial Sequence
  Description of Artificial Sequence: Synthetic oligonucleotide
ccgaaacucggcucugauc

SEQ ID NO: 2841782 - RNA, 19 nt, Artificial Sequence
  Description of Artificial Sequence: Synthetic oligonucleotide
ggcaaaaugcugcuuuguu

SEQ ID NO: 2841783 - RNA, 19 nt, Artificial Sequence
  Description of Artificial Sequence: Synthetic oligonucleotide
ggagaguggucccaagaau

SEQ ID NO: 2841784 - RNA, 19 nt, Artificial Sequence
  Description of Artificial Sequence: Synthetic oligonucleotide
ggguugccauggcacacac

SEQ ID NO: 2841785 - RNA, 19 nt, Artificial Sequence
  Description of Artificial Sequence: Synthetic oligonucleotide
gguugccauggcacacacg

SEQ ID NO: 2841786 - RNA, 19 nt, Artificial Sequence
  Description of Artificial Sequence: Synthetic oligonucleotide
gaugcucaccugcuuucuu

SEQ ID NO: 2841787 - RNA, 19 nt, Artificial Sequence
  Description of Artificial Sequence: Synthetic oligonucleotide
gucacccaacguucuugaa

SEQ ID NO: 2841788 - RNA, 19 nt, Artificial Sequence
  Description of Artificial Sequence: Synthetic oligonucleotide
cacaucuaaccucguugcu

SEQ ID NO: 2841789 - RNA, 19 nt, Artificial Sequence
  Description of Artificial Sequence: Synthetic oligonucleotide
cccgaugauuacaugagau

SEQ ID NO: 2841790 - RNA, 19 nt, Artificial Sequence
  Description of Artificial Sequence: Synthetic oligonucleotide
cagugcagugucgaaacau

SEQ ID NO: 2841791 - RNA, 19 nt, Artificial Sequence
  Description of Artificial Sequence: Synthetic oligonucleotide
gacacuaccuuggcuccau

SEQ ID NO: 2841792 - RNA, 19 nt, Artificial Sequence
  Description of Artificial Sequence: Synthetic oligonucleotide
cgggcaaaaugcugcuuug

SEQ ID NO: 2841793 - RNA, 19 nt, Artificial Sequence
  Description of Artificial Sequence: Synthetic oligonucleotide
cgauauucuaggucagcaa

SEQ ID NO: 2841794 - RNA, 19 nt, Artificial Sequence
  Description of Artificial Sequence: Synthetic oligonucleotide
guccgaaacucggcucuga

SEQ ID NO: 2841795 - RNA, 19 nt, Artificial Sequence
  Description of Artificial Sequence: Synthetic oligonucleotide
gcgggguugccauggcaca

SEQ ID NO: 2841796 - RNA, 19 nt, Artificial Sequence
  Description of Artificial Sequence: Synthetic oligonucleotide
gggguugccauggcacaca

SEQ ID NO: 2841797 - RNA, 19 nt, Artificial Sequence
  Description of Artificial Sequence: Synthetic oligonucleotide
gcauacagguccagauaaa

SEQ ID NO: 2841798 - RNA, 19 nt, Artificial Sequence
  Description of Artificial Sequence: Synthetic oligonucleotide
ccaugaaaccgcagcucaa

SEQ ID NO: 2841799 - RNA, 19 nt, Artificial Sequence
  Description of Artificial Sequence: Synthetic oligonucleotide
cuaucgccauagcaaucau

SEQ ID NO: 2841800 - RNA, 19 nt, Artificial Sequence
  Description of Artificial Sequence: Synthetic oligonucleotide
ccccgaugauuacaugaga

SEQ ID NO: 2841801 - RNA, 19 nt, Artificial Sequence
  Description of Artificial Sequence: Synthetic oligonucleotide
ccggagucugaugcucacc

SEQ ID NO: 2841802 - RNA, 19 nt, Artificial Sequence
  Description of Artificial Sequence: Synthetic oligonucleotide
ccuugucuacugaaucagu

SEQ ID NO: 2841803 - RNA, 19 nt, Artificial Sequence
  Description of Artificial Sequence: Synthetic oligonucleotide
ggacacuaccuuggcucca

SEQ ID NO: 2841804 - RNA, 19 nt, Artificial Sequence
  Description of Artificial Sequence: Synthetic oligonucleotide
gggcaaaaugcugcuuugu

SEQ ID NO: 2841805 - RNA, 19 nt, Artificial Sequence
  Description of Artificial Sequence: Synthetic oligonucleotide
cggagucugaugcucaccu

SEQ ID NO: 2841806 - RNA, 19 nt, Artificial Sequence
  Description of Artificial Sequence: Synthetic oligonucleotide
cugucacaucuaaccucgu

SEQ ID NO: 2841807 - RNA, 19 nt, Artificial Sequence
  Description of Artificial Sequence: Synthetic oligonucleotide
gggccaucucuuccggagu

SEQ ID NO: 2841808 - RNA, 19 nt, Artificial Sequence
  Description of Artificial Sequence: Synthetic oligonucleotide
cgcagcucaagugcuguca

SEQ ID NO: 2841809 - RNA, 19 nt, Artificial Sequence
  Description of Artificial Sequence: Synthetic oligonucleotide
ccgcagcucaagugcuguc

SEQ ID NO: 2841810 - RNA, 19 nt, Artificial Sequence
  Description of Artificial Sequence: Synthetic oligonucleotide
cgggguugccauggcacac

SEQ ID NO: 2841811 - RNA, 19 nt, Artificial Sequence
  Description of Artificial Sequence: Synthetic oligonucleotide
cccaacguucuugaaggau

SEQ ID NO: 2841812 - RNA, 19 nt, Artificial Sequence
  Description of Artificial Sequence: Synthetic oligonucleotide
gccauggcacacacguuuu

SEQ ID NO: 2841813 - RNA, 19 nt, Artificial Sequence
  Description of Artificial Sequence: Synthetic oligonucleotide
cacgggcaaaaugcugcuu

SEQ ID NO: 2841814 - RNA, 19 nt, Artificial Sequence
  Description of Artificial Sequence: Synthetic oligonucleotide
cagcaaucacaggggccau

SEQ ID NO: 2841815 - RNA, 19 nt, Artificial Sequence
  Description of Artificial Sequence: Synthetic oligonucleotide
cggcucugaucuuccccga

SEQ ID NO: 2841816 - RNA, 19 nt, Artificial Sequence
  Description of Artificial Sequence: Synthetic oligonucleotide
aaugaagccaaauugacgg

SEQ ID NO: 2841817 - RNA, 19 nt, Artificial Sequence
  Description of Artificial Sequence: Synthetic oligonucleotide
uuauuuacguuuuacaucu

SEQ ID NO: 2841818 - RNA, 19 nt, Artificial Sequence
  Description of Artificial Sequence: Synthetic oligonucleotide
aauguaaccaugcuucauc

SEQ ID NO: 2841819 - RNA, 19 nt, Artificial Sequence
  Description of Artificial Sequence: Synthetic oligonucleotide
uucaaauucaccaauguaa

SEQ ID NO: 2841820 - RNA, 19 nt, Artificial Sequence
  Description of Artificial Sequence: Synthetic oligonucleotide
augacuuuggagcagggcc

SEQ ID NO: 2841821 - RNA, 19 nt, Artificial Sequence
  Description of Artificial Sequence: Synthetic oligonucleotide
uuuucuaggucuuugagcu

SEQ ID NO: 2841822 - RNA, 19 nt, Artificial Sequence
  Description of Artificial Sequence: Synthetic oligonucleotide
aaagaaaccaaggauuuuc

SEQ ID NO: 2841823 - RNA, 19 nt, Artificial Sequence
  Description of Artificial Sequence: Synthetic oligonucleotide
aaaccaaggauuuucccuc

SEQ ID NO: 2841824 - RNA, 19 nt, Artificial Sequence
  Description of Artificial Sequence: Synthetic oligonucleotide
uaaagguucaaaaggacug

SEQ ID NO: 2841825 - RNA, 19 nt, Artificial Sequence
  Description of Artificial Sequence: Synthetic oligonucleotide
aaaggacugauccugaaca

SEQ ID NO: 2841826 - RNA, 19 nt, Artificial Sequence
  Description of Artificial Sequence: Synthetic oligonucleotide
aaauugacgggacgggagc

SEQ ID NO: 2841827 - RNA, 19 nt, Artificial Sequence
  Description of Artificial Sequence: Synthetic oligonucleotide
uguucugccacuuuucuag

SEQ ID NO: 2841828 - RNA, 19 nt, Artificial Sequence
  Description of Artificial Sequence: Synthetic oligonucleotide
aaauucaccaauguaacca

SEQ ID NO: 2841829 - RNA, 19 nt, Artificial Sequence
  Description of Artificial Sequence: Synthetic oligonucleotide
aaaaggacugauccugaac

SEQ ID NO: 2841830 - RNA, 19 nt, Artificial Sequence
  Description of Artificial Sequence: Synthetic oligonucleotide
ucaaaucuagggcugauca

SEQ ID NO: 2841831 - RNA, 19 nt, Artificial Sequence
  Description of Artificial Sequence: Synthetic oligonucleotide
uacaaugaagccaaauuga

SEQ ID NO: 2841832 - RNA, 19 nt, Artificial Sequence
  Description of Artificial Sequence: Synthetic oligonucleotide
uuuauuuacguuuuacauc

SEQ ID NO: 2841833 - RNA, 19 nt, Artificial Sequence
  Description of Artificial Sequence: Synthetic oligonucleotide
uucacgacaauuuucccag

SEQ ID NO: 2841834 - RNA, 19 nt, Artificial Sequence
  Description of Artificial Sequence: Synthetic oligonucleotide
uucaucaucacaguuagga

SEQ ID NO: 2841835 - RNA, 19 nt, Artificial Sequence
  Description of Artificial Sequence: Synthetic oligonucleotide
ugcacaucaaaucuagggc

SEQ ID NO: 2841836 - RNA, 19 nt, Artificial Sequence
  Description of Artificial Sequence: Synthetic oligonucleotide
ucaaauucaccaauguaac

SEQ ID NO: 2841837 - RNA, 19 nt, Artificial Sequence
  Description of Artificial Sequence: Synthetic oligonucleotide
ucuugcuucuucauggucc

SEQ ID NO: 2841838 - RNA, 19 nt, Artificial Sequence
  Description of Artificial Sequence: Synthetic oligonucleotide
uuguugaugcucuucagag

SEQ ID NO: 2841839 - RNA, 19 nt, Artificial Sequence
  Description of Artificial Sequence: Synthetic oligonucleotide
agugucaccagucaggaca

SEQ ID NO: 2841840 - RNA, 19 nt, Artificial Sequence
  Description of Artificial Sequence: Synthetic oligonucleotide
guacaaugaagccaaauug

SEQ ID NO: 2841841 - RNA, 19 nt, Artificial Sequence
  Description of Artificial Sequence: Synthetic oligonucleotide
cacaguuaggaaucgaacg

SEQ ID NO: 2841842 - RNA, 19 nt, Artificial Sequence
  Description of Artificial Sequence: Synthetic oligonucleotide
uguucaaccugccugugag

SEQ ID NO: 2841843 - RNA, 19 nt, Artificial Sequence
  Description of Artificial Sequence: Synthetic oligonucleotide
uauucugcuguaaagguuc

SEQ ID NO: 2841844 - RNA, 19 nt, Artificial Sequence
  Description of Artificial Sequence: Synthetic oligonucleotide
gcuguaaagguucaaaagg

SEQ ID NO: 2841845 - RNA, 19 nt, Artificial Sequence
  Description of Artificial Sequence: Synthetic oligonucleotide
gguucaaaaggacugaucc

SEQ ID NO: 2841846 - RNA, 19 nt, Artificial Sequence
  Description of Artificial Sequence: Synthetic oligonucleotide
accaauguaaccaugcuuc

SEQ ID NO: 2841847 - RNA, 19 nt, Artificial Sequence
  Description of Artificial Sequence: Synthetic oligonucleotide
guugucaguacaaugaagc

SEQ ID NO: 2841848 - RNA, 19 nt, Artificial Sequence
  Description of Artificial Sequence: Synthetic oligonucleotide
cugcacaucaaaucuaggg

SEQ ID NO: 2841849 - RNA, 19 nt, Artificial Sequence
  Description of Artificial Sequence: Synthetic oligonucleotide
uucaccaauguaaccaugc

SEQ ID NO: 2841850 - RNA, 19 nt, Artificial Sequence
  Description of Artificial Sequence: Synthetic oligonucleotide
uccugaacagucuauggag

SEQ ID NO: 2841851 - RNA, 19 nt, Artificial Sequence
  Description of Artificial Sequence: Synthetic oligonucleotide
aagaaaccaaggauuuucc

SEQ ID NO: 2841852 - RNA, 19 nt, Artificial Sequence
  Description of Artificial Sequence: Synthetic oligonucleotide
ugcuguaaagguucaaaag

SEQ ID NO: 2841853 - RNA, 19 nt, Artificial Sequence
  Description of Artificial Sequence: Synthetic oligonucleotide
uucaaaaggacugauccug

SEQ ID NO: 2841854 - RNA, 19 nt, Artificial Sequence
  Description of Artificial Sequence: Synthetic oligonucleotide
agaaaccaaggauuuuccc

SEQ ID NO: 2841855 - RNA, 19 nt, Artificial Sequence
  Description of Artificial Sequence: Synthetic oligonucleotide
ugcuauucugcuguaaagg

SEQ ID NO: 2841856 - RNA, 19 nt, Artificial Sequence
  Description of Artificial Sequence: Synthetic oligonucleotide
cuuuucuaggucuuugagc

SEQ ID NO: 2841857 - RNA, 19 nt, Artificial Sequence
  Description of Artificial Sequence: Synthetic oligonucleotide
uaaccaugcuucaucauca

SEQ ID NO: 2841858 - RNA, 19 nt, Artificial Sequence
  Description of Artificial Sequence: Synthetic oligonucleotide
ucucuucucagcauuguug

SEQ ID NO: 2841859 - RNA, 19 nt, Artificial Sequence
  Description of Artificial Sequence: Synthetic oligonucleotide
aaaucuagggcugaucacu

SEQ ID NO: 2841860 - RNA, 19 nt, Artificial Sequence
  Description of Artificial Sequence: Synthetic oligonucleotide
uguaaagguucaaaaggac

SEQ ID NO: 2841861 - RNA, 19 nt, Artificial Sequence
  Description of Artificial Sequence: Synthetic oligonucleotide
ucaugguccaugaugccag

SEQ ID NO: 2841862 - RNA, 19 nt, Artificial Sequence
  Description of Artificial Sequence: Synthetic oligonucleotide
aaccaaggauuuucccucc

SEQ ID NO: 2841863 - RNA, 19 nt, Artificial Sequence
  Description of Artificial Sequence: Synthetic oligonucleotide
ucaucgaugauuucaaauu

SEQ ID NO: 2841864 - RNA, 19 nt, Artificial Sequence
  Description of Artificial Sequence: Synthetic oligonucleotide
agguucacgacaauuuucc

SEQ ID NO: 2841865 - RNA, 19 nt, Artificial Sequence
  Description of Artificial Sequence: Synthetic oligonucleotide
uuuucuucuugcuucuuca

SEQ ID NO: 2841866 - RNA, 19 nt, Artificial Sequence
  Description of Artificial Sequence: Synthetic oligonucleotide
auuucaaauucaccaaugu

SEQ ID NO: 2841867 - RNA, 19 nt, Artificial Sequence
  Description of Artificial Sequence: Synthetic oligonucleotide
uuugccucucuucucagca

SEQ ID NO: 2841868 - RNA, 19 nt, Artificial Sequence
  Description of Artificial Sequence: Synthetic oligonucleotide
uuugcuauucugcuguaaa

SEQ ID NO: 2841869 - RNA, 19 nt, Artificial Sequence
  Description of Artificial Sequence: Synthetic oligonucleotide
acaguuaggaaucgaacga

SEQ ID NO: 2841870 - RNA, 19 nt, Artificial Sequence
  Description of Artificial Sequence: Synthetic oligonucleotide
guugaugcucuucagagca

SEQ ID NO: 2841871 - RNA, 19 nt, Artificial Sequence
  Description of Artificial Sequence: Synthetic oligonucleotide
aaucgaacgaugacuuugg

SEQ ID NO: 2841872 - RNA, 19 nt, Artificial Sequence
  Description of Artificial Sequence: Synthetic oligonucleotide
acaaugaagccaaauugac

SEQ ID NO: 2841873 - RNA, 19 nt, Artificial Sequence
  Description of Artificial Sequence: Synthetic oligonucleotide
aauucaccaauguaaccau

SEQ ID NO: 2841874 - RNA, 19 nt, Artificial Sequence
  Description of Artificial Sequence: Synthetic oligonucleotide
uacguuuuacaucucuaga

SEQ ID NO: 2841875 - RNA, 19 nt, Artificial Sequence
  Description of Artificial Sequence: Synthetic oligonucleotide
uucaugcgcaccaugguga

SEQ ID NO: 2841876 - RNA, 19 nt, Artificial Sequence
  Description of Artificial Sequence: Synthetic oligonucleotide
ucgaugauuucaaauucac

SEQ ID NO: 2841877 - RNA, 19 nt, Artificial Sequence
  Description of Artificial Sequence: Synthetic oligonucleotide
gaaucgaacgaugacuuug

SEQ ID NO: 2841878 - RNA, 19 nt, Artificial Sequence
  Description of Artificial Sequence: Synthetic oligonucleotide
aaggacugauccugaacag

SEQ ID NO: 2841879 - RNA, 19 nt, Artificial Sequence
  Description of Artificial Sequence: Synthetic oligonucleotide
ugauuucaaauucaccaau

SEQ ID NO: 2841880 - RNA, 19 nt, Artificial Sequence
  Description of Artificial Sequence: Synthetic oligonucleotide
gaucacuccacacuuguuc

SEQ ID NO: 2841881 - RNA, 19 nt, Artificial Sequence
  Description of Artificial Sequence: Synthetic oligonucleotide
aucaucacaguuaggaauc

SEQ ID NO: 2841882 - RNA, 19 nt, Artificial Sequence
  Description of Artificial Sequence: Synthetic oligonucleotide
uuaggaaucgaacgaugac

SEQ ID NO: 2841883 - RNA, 19 nt, Artificial Sequence
  Description of Artificial Sequence: Synthetic oligonucleotide
auuuacguuuuacaucucu

SEQ ID NO: 2841884 - RNA, 19 nt, Artificial Sequence
  Description of Artificial Sequence: Synthetic oligonucleotide
ugagguugucaguacaaug

SEQ ID NO: 2841885 - RNA, 19 nt, Artificial Sequence
  Description of Artificial Sequence: Synthetic oligonucleotide
aaggauuuucccuccugug

SEQ ID NO: 2841886 - RNA, 19 nt, Artificial Sequence
  Description of Artificial Sequence: Synthetic oligonucleotide
acuuuucuaggucuuugag

SEQ ID NO: 2841887 - RNA, 19 nt, Artificial Sequence
  Description of Artificial Sequence: Synthetic oligonucleotide
gauuucaaauucaccaaug

SEQ ID NO: 2841888 - RNA, 19 nt, Artificial Sequence
  Description of Artificial Sequence: Synthetic oligonucleotide
acuccacacuuguucaacc

SEQ ID NO: 2841889 - RNA, 19 nt, Artificial Sequence
  Description of Artificial Sequence: Synthetic oligonucleotide
ucaccagucaggacagccg

SEQ ID NO: 2841890 - RNA, 19 nt, Artificial Sequence
  Description of Artificial Sequence: Synthetic oligonucleotide
ugucaguacaaugaagcca

SEQ ID NO: 2841891 - RNA, 19 nt, Artificial Sequence
  Description of Artificial Sequence: Synthetic oligonucleotide
aagccaaauugacgggacg

SEQ ID NO: 2841892 - RNA, 19 nt, Artificial Sequence
  Description of Artificial Sequence: Synthetic oligonucleotide
uugucaguacaaugaagcc

SEQ ID NO: 2841893 - RNA, 19 nt, Artificial Sequence
  Description of Artificial Sequence: Synthetic oligonucleotide
cgaacgaugacuuuggagc

SEQ ID NO: 2841894 - RNA, 19 nt, Artificial Sequence
  Description of Artificial Sequence: Synthetic oligonucleotide
auuguugaugcucuucaga

SEQ ID NO: 2841895 - RNA, 19 nt, Artificial Sequence
  Description of Artificial Sequence: Synthetic oligonucleotide
ucacaguuaggaaucgaac

SEQ ID NO: 2841896 - RNA, 19 nt, Artificial Sequence
  Description of Artificial Sequence: Synthetic oligonucleotide
agucaggacagccguuugc

SEQ ID NO: 2841897 - RNA, 19 nt, Artificial Sequence
  Description of Artificial Sequence: Synthetic oligonucleotide
acguuuuacaucucuagaa

SEQ ID NO: 2841898 - RNA, 19 nt, Artificial Sequence
  Description of Artificial Sequence: Synthetic oligonucleotide
uaggaaucgaacgaugacu

SEQ ID NO: 2841899 - RNA, 19 nt, Artificial Sequence
  Description of Artificial Sequence: Synthetic oligonucleotide
uucuucuugcuucuucaug

SEQ ID NO: 2841900 - RNA, 19 nt, Artificial Sequence
  Description of Artificial Sequence: Synthetic oligonucleotide
uugcuauucugcuguaaag

SEQ ID NO: 2841901 - RNA, 19 nt, Artificial Sequence
  Description of Artificial Sequence: Synthetic oligonucleotide
aaccaugcuucaucaucac

SEQ ID NO: 2841902 - RNA, 19 nt, Artificial Sequence
  Description of Artificial Sequence: Synthetic oligonucleotide
caaauugacgggacgggag

SEQ ID NO: 2841903 - RNA, 19 nt, Artificial Sequence
  Description of Artificial Sequence: Synthetic oligonucleotide
ucuagggcugaucacucca

SEQ ID NO: 2841904 - RNA, 19 nt, Artificial Sequence
  Description of Artificial Sequence: Synthetic oligonucleotide
uucuaggucuuugagcugc

SEQ ID NO: 2841905 - RNA, 19 nt, Artificial Sequence
  Description of Artificial Sequence: Synthetic oligonucleotide
auucaugcgcaccauggug

SEQ ID NO: 2841906 - RNA, 19 nt, Artificial Sequence
  Description of Artificial Sequence: Synthetic oligonucleotide
guaaccaugcuucaucauc

SEQ ID NO: 2841907 - RNA, 19 nt, Artificial Sequence
  Description of Artificial Sequence: Synthetic oligonucleotide
ugcuucaucaucacaguua

SEQ ID NO: 2841908 - RNA, 19 nt, Artificial Sequence
  Description of Artificial Sequence: Synthetic oligonucleotide
ucaaaaggacugauccuga

SEQ ID NO: 2841909 - RNA, 19 nt, Artificial Sequence
  Description of Artificial Sequence: Synthetic oligonucleotide
cacuuguucaaccugccug

SEQ ID NO: 2841910 - RNA, 19 nt, Artificial Sequence
  Description of Artificial Sequence: Synthetic oligonucleotide
cuguaaagguucaaaagga

SEQ ID NO: 2841911 - RNA, 19 nt, Artificial Sequence
  Description of Artificial Sequence: Synthetic oligonucleotide
acuuguucaaccugccugu

SEQ ID NO: 2841912 - RNA, 19 nt, Artificial Sequence
  Description of Artificial Sequence: Synthetic oligonucleotide
uuggagcagggccugauga

SEQ ID NO: 2841913 - RNA, 19 nt, Artificial Sequence
  Description of Artificial Sequence: Synthetic oligonucleotide
uuugagcugcacaucaaau

SEQ ID NO: 2841914 - RNA, 19 nt, Artificial Sequence
  Description of Artificial Sequence: Synthetic oligonucleotide
cugaacagucuauggaggc

SEQ ID NO: 2841915 - RNA, 19 nt, Artificial Sequence
  Description of Artificial Sequence: Synthetic oligonucleotide
acauucaugcgcaccaugg

SEQ ID NO: 2841916 - RNA, 19 nt, Artificial Sequence
  Description of Artificial Sequence: Synthetic oligonucleotide
uugagcugcacaucaaauc

SEQ ID NO: 2841917 - RNA, 19 nt, Artificial Sequence
  Description of Artificial Sequence: Synthetic oligonucleotide
gaaaccaaggauuuucccu

SEQ ID NO: 2841918 - RNA, 19 nt, Artificial Sequence
  Description of Artificial Sequence: Synthetic oligonucleotide
gagguugucaguacaauga

SEQ ID NO: 2841919 - RNA, 19 nt, Artificial Sequence
  Description of Artificial Sequence: Synthetic oligonucleotide
aaagguucaaaaggacuga

SEQ ID NO: 2841920 - RNA, 19 nt, Artificial Sequence
  Description of Artificial Sequence: Synthetic oligonucleotide
uguugaugcucuucagagc

SEQ ID NO: 2841921 - RNA, 19 nt, Artificial Sequence
  Description of Artificial Sequence: Synthetic oligonucleotide
caucgaugauuucaaauuc

SEQ ID NO: 2841922 - RNA, 19 nt, Artificial Sequence
  Description of Artificial Sequence: Synthetic oligonucleotide
aggacauucaugcgcacca

SEQ ID NO: 2841923 - RNA, 19 nt, Artificial Sequence
  Description of Artificial Sequence: Synthetic oligonucleotide
aaucuagggcugaucacuc

SEQ ID NO: 2841924 - RNA, 19 nt, Artificial Sequence
  Description of Artificial Sequence: Synthetic oligonucleotide
uccacacuuguucaaccug

SEQ ID NO: 2841925 - RNA, 19 nt, Artificial Sequence
  Description of Artificial Sequence: Synthetic oligonucleotide
ccaugcuucaucaucacag

SEQ ID NO: 2841926 - RNA, 19 nt, Artificial Sequence
  Description of Artificial Sequence: Synthetic oligonucleotide
acgacaauuuucccagcuc

SEQ ID NO: 2841927 - RNA, 19 nt, Artificial Sequence
  Description of Artificial Sequence: Synthetic oligonucleotide
ugacuuuggagcagggccu

SEQ ID NO: 2841928 - RNA, 19 nt, Artificial Sequence
  Description of Artificial Sequence: Synthetic oligonucleotide
cuguguguuuucuucuugc

SEQ ID NO: 2841929 - RNA, 19 nt, Artificial Sequence
  Description of Artificial Sequence: Synthetic oligonucleotide
auuguucugccacuuuucu

SEQ ID NO: 2841930 - RNA, 19 nt, Artificial Sequence
  Description of Artificial Sequence: Synthetic oligonucleotide
ucuucagagcaucggccag

SEQ ID NO: 2841931 - RNA, 19 nt, Artificial Sequence
  Description of Artificial Sequence: Synthetic oligonucleotide
augaagccaaauugacggg

SEQ ID NO: 2841932 - RNA, 19 nt, Artificial Sequence
  Description of Artificial Sequence: Synthetic oligonucleotide
gagcagauuguucugccac

SEQ ID NO: 2841933 - RNA, 19 nt, Artificial Sequence
  Description of Artificial Sequence: Synthetic oligonucleotide
uaggucuuugagcugcaca

SEQ ID NO: 2841934 - RNA, 19 nt, Artificial Sequence
  Description of Artificial Sequence: Synthetic oligonucleotide
auguaaccaugcuucauca

SEQ ID NO: 2841935 - RNA, 19 nt, Artificial Sequence
  Description of Artificial Sequence: Synthetic oligonucleotide
aggauuuucccuccugugu

SEQ ID NO: 2841936 - RNA, 19 nt, Artificial Sequence
  Description of Artificial Sequence: Synthetic oligonucleotide
aggucuuugagcugcacau

SEQ ID NO: 2841937 - RNA, 19 nt, Artificial Sequence
  Description of Artificial Sequence: Synthetic oligonucleotide
aucacuccacacuuguuca

SEQ ID NO: 2841938 - RNA, 19 nt, Artificial Sequence
  Description of Artificial Sequence: Synthetic oligonucleotide
agccaaauugacgggacgg

SEQ ID NO: 2841939 - RNA, 19 nt, Artificial Sequence
  Description of Artificial Sequence: Synthetic oligonucleotide
uuucccagcucugugguca

SEQ ID NO: 2841940 - RNA, 19 nt, Artificial Sequence
  Description of Artificial Sequence: Synthetic oligonucleotide
auccugaacagucuaugga

SEQ ID NO: 2841941 - RNA, 19 nt, Artificial Sequence
  Description of Artificial Sequence: Synthetic oligonucleotide
guuuuacaucucuagaaaa

SEQ ID NO: 2841942 - RNA, 19 nt, Artificial Sequence
  Description of Artificial Sequence: Synthetic oligonucleotide
augcgcaccauggugacgg

SEQ ID NO: 2841943 - RNA, 19 nt, Artificial Sequence
  Description of Artificial Sequence: Synthetic oligonucleotide
guucacgacaauuuuccca

SEQ ID NO: 2841944 - RNA, 19 nt, Artificial Sequence
  Description of Artificial Sequence: Synthetic oligonucleotide
agggcugaucacuccacac

SEQ ID NO: 2841945 - RNA, 19 nt, Artificial Sequence
  Description of Artificial Sequence: Synthetic oligonucleotide
cacaucaaaucuagggcug

SEQ ID NO: 2841946 - RNA, 19 nt, Artificial Sequence
  Description of Artificial Sequence: Synthetic oligonucleotide
aucuagggcugaucacucc

SEQ ID NO: 2841947 - RNA, 19 nt, Artificial Sequence
  Description of Artificial Sequence: Synthetic oligonucleotide
uucaugguccaugaugcca

SEQ ID NO: 2841948 - RNA, 19 nt, Artificial Sequence
  Description of Artificial Sequence: Synthetic oligonucleotide
auuuucccagcucuguggu

SEQ ID NO: 2841949 - RNA, 19 nt, Artificial Sequence
  Description of Artificial Sequence: Synthetic oligonucleotide
ugauccugaacagucuaug

SEQ ID NO: 2841950 - RNA, 19 nt, Artificial Sequence
  Description of Artificial Sequence: Synthetic oligonucleotide
ugguccaugaugccagcug

SEQ ID NO: 2841951 - RNA, 19 nt, Artificial Sequence
  Description of Artificial Sequence: Synthetic oligonucleotide
auggugacggcgcggaaag

SEQ ID NO: 2841952 - RNA, 19 nt, Artificial Sequence
  Description of Artificial Sequence: Synthetic oligonucleotide
ucaucaucacaguuaggaa

SEQ ID NO: 2841953 - RNA, 19 nt, Artificial Sequence
  Description of Artificial Sequence: Synthetic oligonucleotide
ucaccaauguaaccaugcu

SEQ ID NO: 2841954 - RNA, 19 nt, Artificial Sequence
  Description of Artificial Sequence: Synthetic oligonucleotide
uggucaucgaugauuucaa

SEQ ID NO: 2841955 - RNA, 19 nt, Artificial Sequence
  Description of Artificial Sequence: Synthetic oligonucleotide
uucaaccugccugugaggu

SEQ ID NO: 2841956 - RNA, 19 nt, Artificial Sequence
  Description of Artificial Sequence: Synthetic oligonucleotide
gaacgaugacuuuggagca

SEQ ID NO: 2841957 - RNA, 19 nt, Artificial Sequence
  Description of Artificial Sequence: Synthetic oligonucleotide
aagugucaccagucaggac

SEQ ID NO: 2841958 - RNA, 19 nt, Artificial Sequence
  Description of Artificial Sequence: Synthetic oligonucleotide
ucugcuguaaagguucaaa

SEQ ID NO: 2841959 - RNA, 19 nt, Artificial Sequence
  Description of Artificial Sequence: Synthetic oligonucleotide
ugagguucacgacaauuuu

SEQ ID NO: 2841960 - RNA, 19 nt, Artificial Sequence
  Description of Artificial Sequence: Synthetic oligonucleotide
uccaugaugccagcugagg

SEQ ID NO: 2841961 - RNA, 19 nt, Artificial Sequence
  Description of Artificial Sequence: Synthetic oligonucleotide
gaugcucuucagagcaucg

SEQ ID NO: 2841962 - RNA, 19 nt, Artificial Sequence
  Description of Artificial Sequence: Synthetic oligonucleotide
aggaccuggcguuugccuc

SEQ ID NO: 2841963 - RNA, 19 nt, Artificial Sequence
  Description of Artificial Sequence: Synthetic oligonucleotide
cuucucagcauuguugaug

SEQ ID NO: 2841964 - RNA, 19 nt, Artificial Sequence
  Description of Artificial Sequence: Synthetic oligonucleotide
ucuguggucaucgaugauu

SEQ ID NO: 2841965 - RNA, 19 nt, Artificial Sequence
  Description of Artificial Sequence: Synthetic oligonucleotide
acagccguuugcuauucug

SEQ ID NO: 2841966 - RNA, 19 nt, Artificial Sequence
  Description of Artificial Sequence: Synthetic oligonucleotide
ucaucacaguuaggaaucg

SEQ ID NO: 2841967 - RNA, 19 nt, Artificial Sequence
  Description of Artificial Sequence: Synthetic oligonucleotide
cagagcaucggccaggaca

SEQ ID NO: 2841968 - RNA, 19 nt, Artificial Sequence
  Description of Artificial Sequence: Synthetic oligonucleotide
agauuguucugccacuuuu

SEQ ID NO: 2841969 - RNA, 19 nt, Artificial Sequence
  Description of Artificial Sequence: Synthetic oligonucleotide
gucaguacaaugaagccaa

SEQ ID NO: 2841970 - RNA, 19 nt, Artificial Sequence
  Description of Artificial Sequence: Synthetic oligonucleotide
uggcguuugccucucuucu

SEQ ID NO: 2841971 - RNA, 19 nt, Artificial Sequence
  Description of Artificial Sequence: Synthetic oligonucleotide
augaggaccuggcguuugc

SEQ ID NO: 2841972 - RNA, 19 nt, Artificial Sequence
  Description of Artificial Sequence: Synthetic oligonucleotide
cagccguuugcuauucugc

SEQ ID NO: 2841973 - RNA, 19 nt, Artificial Sequence
  Description of Artificial Sequence: Synthetic oligonucleotide
ggauuuucccuccugugug

SEQ ID NO: 2841974 - RNA, 19 nt, Artificial Sequence
  Description of Artificial Sequence: Synthetic oligonucleotide
uuuggagcagggccugaug

SEQ ID NO: 2841975 - RNA, 19 nt, Artificial Sequence
  Description of Artificial Sequence: Synthetic oligonucleotide
aacgaugacuuuggagcag

SEQ ID NO: 2841976 - RNA, 19 nt, Artificial Sequence
  Description of Artificial Sequence: Synthetic oligonucleotide
gacauucaugcgcaccaug

SEQ ID NO: 2841977 - RNA, 19 nt, Artificial Sequence
  Description of Artificial Sequence: Synthetic oligonucleotide
agcauuguugaugcucuuc

SEQ ID NO: 2841978 - RNA, 19 nt, Artificial Sequence
  Description of Artificial Sequence: Synthetic oligonucleotide
caaaucuagggcugaucac

SEQ ID NO: 2841979 - RNA, 19 nt, Artificial Sequence
  Description of Artificial Sequence: Synthetic oligonucleotide
cauuguugaugcucuucag

SEQ ID NO: 2841980 - RNA, 19 nt, Artificial Sequence
  Description of Artificial Sequence: Synthetic oligonucleotide
guuaggaaucgaacgauga

SEQ ID NO: 2841981 - RNA, 19 nt, Artificial Sequence
  Description of Artificial Sequence: Synthetic oligonucleotide
aucaaaucuagggcugauc

SEQ ID NO: 2841982 - RNA, 19 nt, Artificial Sequence
  Description of Artificial Sequence: Synthetic oligonucleotide
gaugacuuuggagcagggc

SEQ ID NO: 2841983 - RNA, 19 nt, Artificial Sequence
  Description of Artificial Sequence: Synthetic oligonucleotide
gacgggagcagauuguucu

SEQ ID NO: 2841984 - RNA, 19 nt, Artificial Sequence
  Description of Artificial Sequence: Synthetic oligonucleotide
ugcuucuucaugguccaug

SEQ ID NO: 2841985 - RNA, 19 nt, Artificial Sequence
  Description of Artificial Sequence: Synthetic oligonucleotide
ugccagcugagguugucag

SEQ ID NO: 2841986 - RNA, 19 nt, Artificial Sequence
  Description of Artificial Sequence: Synthetic oligonucleotide
aaaagaaaccaaggauuuu

SEQ ID NO: 2841987 - RNA, 19 nt, Artificial Sequence
  Description of Artificial Sequence: Synthetic oligonucleotide
uuguucaaccugccuguga

SEQ ID NO: 2841988 - RNA, 19 nt, Artificial Sequence
  Description of Artificial Sequence: Synthetic oligonucleotide
gacaauuuucccagcucug

SEQ ID NO: 2841989 - RNA, 19 nt, Artificial Sequence
  Description of Artificial Sequence: Synthetic oligonucleotide
aauugacgggacgggagca

SEQ ID NO: 2841990 - RNA, 19 nt, Artificial Sequence
  Description of Artificial Sequence: Synthetic oligonucleotide
augaugccagcugagguug

SEQ ID NO: 2841991 - RNA, 19 nt, Artificial Sequence
  Description of Artificial Sequence: Synthetic oligonucleotide
acgaugacuuuggagcagg

SEQ ID NO: 2841992 - RNA, 19 nt, Artificial Sequence
  Description of Artificial Sequence: Synthetic oligonucleotide
ugaacagucuauggaggcu

SEQ ID NO: 2841993 - RNA, 19 nt, Artificial Sequence
  Description of Artificial Sequence: Synthetic oligonucleotide
gauuguucugccacuuuuc

SEQ ID NO: 2841994 - RNA, 19 nt, Artificial Sequence
  Description of Artificial Sequence: Synthetic oligonucleotide
agcugcacaucaaaucuag

SEQ ID NO: 2841995 - RNA, 19 nt, Artificial Sequence
  Description of Artificial Sequence: Synthetic oligonucleotide
acaauuuucccagcucugu

SEQ ID NO: 2841996 - RNA, 19 nt, Artificial Sequence
  Description of Artificial Sequence: Synthetic oligonucleotide
aucgaugauuucaaauuca

SEQ ID NO: 2841997 - RNA, 19 nt, Artificial Sequence
  Description of Artificial Sequence: Synthetic oligonucleotide
cacacuuguucaaccugcc

SEQ ID NO: 2841998 - RNA, 19 nt, Artificial Sequence
  Description of Artificial Sequence: Synthetic oligonucleotide
ugugagguucacgacaauu

SEQ ID NO: 2841999 - RNA, 19 nt, Artificial Sequence
  Description of Artificial Sequence: Synthetic oligonucleotide
ccugaacagucuauggagg

SEQ ID NO: 2842000 - RNA, 19 nt, Artificial Sequence
  Description of Artificial Sequence: Synthetic oligonucleotide
guucugccacuuuucuagg

SEQ ID NO: 2842001 - RNA, 19 nt, Artificial Sequence
  Description of Artificial Sequence: Synthetic oligonucleotide
cugccugugagguucacga

SEQ ID NO: 2842002 - RNA, 19 nt, Artificial Sequence
  Description of Artificial Sequence: Synthetic oligonucleotide
aguuaggaaucgaacgaug

SEQ ID NO: 2842003 - RNA, 19 nt, Artificial Sequence
  Description of Artificial Sequence: Synthetic oligonucleotide
agcucuguggucaucgaug

SEQ ID NO: 2842004 - RNA, 19 nt, Artificial Sequence
  Description of Artificial Sequence: Synthetic oligonucleotide
uucuugcuucuucaugguc

SEQ ID NO: 2842005 - RNA, 19 nt, Artificial Sequence
  Description of Artificial Sequence: Synthetic oligonucleotide
agccguuugcuauucugcu

SEQ ID NO: 2842006 - RNA, 19 nt, Artificial Sequence
  Description of Artificial Sequence: Synthetic oligonucleotide
acugauccugaacagucua

SEQ ID NO: 2842007 - RNA, 19 nt, Artificial Sequence
  Description of Artificial Sequence: Synthetic oligonucleotide
agcaucggccaggacauuc

SEQ ID NO: 2842008 - RNA, 19 nt, Artificial Sequence
  Description of Artificial Sequence: Synthetic oligonucleotide
uuucuaggucuuugagcug

SEQ ID NO: 2842009 - RNA, 19 nt, Artificial Sequence
  Description of Artificial Sequence: Synthetic oligonucleotide
ucuuugagcugcacaucaa

SEQ ID NO: 2842010 - RNA, 19 nt, Artificial Sequence
  Description of Artificial Sequence: Synthetic oligonucleotide
agcagauuguucugccacu

SEQ ID NO: 2842011 - RNA, 19 nt, Artificial Sequence
  Description of Artificial Sequence: Synthetic oligonucleotide
acgggacgggagcagauug

SEQ ID NO: 2842012 - RNA, 19 nt, Artificial Sequence
  Description of Artificial Sequence: Synthetic oligonucleotide
agguugucaguacaaugaa

SEQ ID NO: 2842013 - RNA, 19 nt, Artificial Sequence
  Description of Artificial Sequence: Synthetic oligonucleotide
guucaaccugccugugagg

SEQ ID NO: 2842014 - RNA, 19 nt, Artificial Sequence
  Description of Artificial Sequence: Synthetic oligonucleotide
aagguucaaaaggacugau

SEQ ID NO: 2842015 - RNA, 19 nt, Artificial Sequence
  Description of Artificial Sequence: Synthetic oligonucleotide
agguucaaaaggacugauc

SEQ ID NO: 2842016 - RNA, 19 nt, Artificial Sequence
  Description of Artificial Sequence: Synthetic oligonucleotide
guaaagguucaaaaggacu

SEQ ID NO: 2842017 - RNA, 19 nt, Artificial Sequence
  Description of Artificial Sequence: Synthetic oligonucleotide
uuucuucuugcuucuucau

SEQ ID NO: 2842018 - RNA, 19 nt, Artificial Sequence
  Description of Artificial Sequence: Synthetic oligonucleotide
aucacaguuaggaaucgaa

SEQ ID NO: 2842019 - RNA, 19 nt, Artificial Sequence
  Description of Artificial Sequence: Synthetic oligonucleotide
gagguucacgacaauuuuc

SEQ ID NO: 2842020 - RNA, 19 nt, Artificial Sequence
  Description of Artificial Sequence: Synthetic oligonucleotide
cuucaugguccaugaugcc

SEQ ID NO: 2842021 - RNA, 19 nt, Artificial Sequence
  Description of Artificial Sequence: Synthetic oligonucleotide
agcugagguugucaguaca

SEQ ID NO: 2842022 - RNA, 19 nt, Artificial Sequence
  Description of Artificial Sequence: Synthetic oligonucleotide
cuucagagcaucggccagg

SEQ ID NO: 2842023 - RNA, 19 nt, Artificial Sequence
  Description of Artificial Sequence: Synthetic oligonucleotide
uagggcugaucacuccaca

SEQ ID NO: 2842024 - RNA, 19 nt, Artificial Sequence
  Description of Artificial Sequence: Synthetic oligonucleotide
uguaaccaugcuucaucau

SEQ ID NO: 2842025 - RNA, 19 nt, Artificial Sequence
  Description of Artificial Sequence: Synthetic oligonucleotide
agcagggccugaugaggac

SEQ ID NO: 2842026 - RNA, 19 nt, Artificial Sequence
  Description of Artificial Sequence: Synthetic oligonucleotide
cuucaucaucacaguuagg

SEQ ID NO: 2842027 - RNA, 19 nt, Artificial Sequence
  Description of Artificial Sequence: Synthetic oligonucleotide
gucaccagucaggacagcc

SEQ ID NO: 2842028 - RNA, 19 nt, Artificial Sequence
  Description of Artificial Sequence: Synthetic oligonucleotide
caucaucacaguuaggaau

SEQ ID NO: 2842029 - RNA, 19 nt, Artificial Sequence
  Description of Artificial Sequence: Synthetic oligonucleotide
ggccaggacauucaugcgc

SEQ ID NO: 2842030 - RNA, 19 nt, Artificial Sequence
  Description of Artificial Sequence: Synthetic oligonucleotide
ucuaggucuuugagcugca

SEQ ID NO: 2842031 - RNA, 19 nt, Artificial Sequence
  Description of Artificial Sequence: Synthetic oligonucleotide
caaccugccugugagguuc

SEQ ID NO: 2842032 - RNA, 19 nt, Artificial Sequence
  Description of Artificial Sequence: Synthetic oligonucleotide
ugaugcucuucagagcauc

SEQ ID NO: 2842033 - RNA, 19 nt, Artificial Sequence
  Description of Artificial Sequence: Synthetic oligonucleotide
agagcaucggccaggacau

SEQ ID NO: 2842034 - RNA, 19 nt, Artificial Sequence
  Description of Artificial Sequence: Synthetic oligonucleotide
ccacacuuguucaaccugc

SEQ ID NO: 2842035 - RNA, 19 nt, Artificial Sequence
  Description of Artificial Sequence: Synthetic oligonucleotide
cuagggcugaucacuccac

SEQ ID NO: 2842036 - RNA, 19 nt, Artificial Sequence
  Description of Artificial Sequence: Synthetic oligonucleotide
aggaaucgaacgaugacuu

SEQ ID NO: 2842037 - RNA, 19 nt, Artificial Sequence
  Description of Artificial Sequence: Synthetic oligonucleotide
augcucuucagagcaucgg

SEQ ID NO: 2842038 - RNA, 19 nt, Artificial Sequence
  Description of Artificial Sequence: Synthetic oligonucleotide
accaugcuucaucaucaca

SEQ ID NO: 2842039 - RNA, 19 nt, Artificial Sequence
  Description of Artificial Sequence: Synthetic oligonucleotide
ucaugcgcaccauggugac

SEQ ID NO: 2842040 - RNA, 19 nt, Artificial Sequence
  Description of Artificial Sequence: Synthetic oligonucleotide
cugcuguaaagguucaaaa

SEQ ID NO: 2842041 - RNA, 19 nt, Artificial Sequence
  Description of Artificial Sequence: Synthetic oligonucleotide
guuugccucucuucucagc

SEQ ID NO: 2842042 - RNA, 19 nt, Artificial Sequence
  Description of Artificial Sequence: Synthetic oligonucleotide
gucaucgaugauuucaaau

SEQ ID NO: 2842043 - RNA, 19 nt, Artificial Sequence
  Description of Artificial Sequence: Synthetic oligonucleotide
acacuuguucaaccugccu

SEQ ID NO: 2842044 - RNA, 19 nt, Artificial Sequence
  Description of Artificial Sequence: Synthetic oligonucleotide
uuguucugccacuuuucua

SEQ ID NO: 2842045 - RNA, 19 nt, Artificial Sequence
  Description of Artificial Sequence: Synthetic oligonucleotide
uauuuacguuuuacaucuc

SEQ ID NO: 2842046 - RNA, 19 nt, Artificial Sequence
  Description of Artificial Sequence: Synthetic oligonucleotide
cuuugagcugcacaucaaa

SEQ ID NO: 2842047 - RNA, 19 nt, Artificial Sequence
  Description of Artificial Sequence: Synthetic oligonucleotide
gguugucaguacaaugaag

SEQ ID NO: 2842048 - RNA, 19 nt, Artificial Sequence
  Description of Artificial Sequence: Synthetic oligonucleotide
uucagagcaucggccagga

SEQ ID NO: 2842049 - RNA, 19 nt, Artificial Sequence
  Description of Artificial Sequence: Synthetic oligonucleotide
cacuuuucuaggucuuuga

SEQ ID NO: 2842050 - RNA, 19 nt, Artificial Sequence
  Description of Artificial Sequence: Synthetic oligonucleotide
caggacauucaugcgcacc

SEQ ID NO: 2842051 - RNA, 19 nt, Artificial Sequence
  Description of Artificial Sequence: Synthetic oligonucleotide
cuggcguuugccucucuuc

SEQ ID NO: 2842052 - RNA, 19 nt, Artificial Sequence
  Description of Artificial Sequence: Synthetic oligonucleotide
gaugaggaccuggcguuug

SEQ ID NO: 2842053 - RNA, 19 nt, Artificial Sequence
  Description of Artificial Sequence: Synthetic oligonucleotide
ugccucucuucucagcauu

SEQ ID NO: 2842054 - RNA, 19 nt, Artificial Sequence
  Description of Artificial Sequence: Synthetic oligonucleotide
guucaaaaggacugauccu

SEQ ID NO: 2842055 - RNA, 19 nt, Artificial Sequence
  Description of Artificial Sequence: Synthetic oligonucleotide
acaucaaaucuagggcuga

SEQ ID NO: 2842056 - RNA, 19 nt, Artificial Sequence
  Description of Artificial Sequence: Synthetic oligonucleotide
aggacugauccugaacagu

SEQ ID NO: 2842057 - RNA, 19 nt, Artificial Sequence
  Description of Artificial Sequence: Synthetic oligonucleotide
ucacgacaauuuucccagc

SEQ ID NO: 2842058 - RNA, 19 nt, Artificial Sequence
  Description of Artificial Sequence: Synthetic oligonucleotide
gugucaccagucaggacag

SEQ ID NO: 2842059 - RNA, 19 nt, Artificial Sequence
  Description of Artificial Sequence: Synthetic oligonucleotide
uuucccuccuguguguuuu

SEQ ID NO: 2842060 - RNA, 19 nt, Artificial Sequence
  Description of Artificial Sequence: Synthetic oligonucleotide
auugacgggacgggagcag

SEQ ID NO: 2842061 - RNA, 19 nt, Artificial Sequence
  Description of Artificial Sequence: Synthetic oligonucleotide
ggagcagggccugaugagg

SEQ ID NO: 2842062 - RNA, 19 nt, Artificial Sequence
  Description of Artificial Sequence: Synthetic oligonucleotide
acgggagcagauuguucug

SEQ ID NO: 2842063 - RNA, 19 nt, Artificial Sequence
  Description of Artificial Sequence: Synthetic oligonucleotide
ucacuccacacuuguucaa

SEQ ID NO: 2842064 - RNA, 19 nt, Artificial Sequence
  Description of Artificial Sequence: Synthetic oligonucleotide
gcacaucaaaucuagggcu

SEQ ID NO: 2842065 - RNA, 19 nt, Artificial Sequence
  Description of Artificial Sequence: Synthetic oligonucleotide
ugaucacuccacacuuguu

SEQ ID NO: 2842066 - RNA, 19 nt, Artificial Sequence
  Description of Artificial Sequence: Synthetic oligonucleotide
gguucacgacaauuuuccc

SEQ ID NO: 2842067 - RNA, 19 nt, Artificial Sequence
  Description of Artificial Sequence: Synthetic oligonucleotide
gacuuuggagcagggccug

SEQ ID NO: 2842068 - RNA, 19 nt, Artificial Sequence
  Description of Artificial Sequence: Synthetic oligonucleotide
ggacugauccugaacaguc

SEQ ID NO: 2842069 - RNA, 19 nt, Artificial Sequence
  Description of Artificial Sequence: Synthetic oligonucleotide
auucaccaauguaaccaug

SEQ ID NO: 2842070 - RNA, 19 nt, Artificial Sequence
  Description of Artificial Sequence: Synthetic oligonucleotide
gauuuucccuccugugugu

SEQ ID NO: 2842071 - RNA, 19 nt, Artificial Sequence
  Description of Artificial Sequence: Synthetic oligonucleotide
uugaugcucuucagagcau

SEQ ID NO: 2842072 - RNA, 19 nt, Artificial Sequence
  Description of Artificial Sequence: Synthetic oligonucleotide
aucgaacgaugacuuugga

SEQ ID NO: 2842073 - RNA, 19 nt, Artificial Sequence
  Description of Artificial Sequence: Synthetic oligonucleotide
cgaugauuucaaauucacc

SEQ ID NO: 2842074 - RNA, 19 nt, Artificial Sequence
  Description of Artificial Sequence: Synthetic oligonucleotide
gguccaugaugccagcuga

SEQ ID NO: 2842075 - RNA, 19 nt, Artificial Sequence
  Description of Artificial Sequence: Synthetic oligonucleotide
ugaggaccuggcguuugcc

SEQ ID NO: 2842076 - RNA, 19 nt, Artificial Sequence
  Description of Artificial Sequence: Synthetic oligonucleotide
caugguccaugaugccagc

SEQ ID NO: 2842077 - RNA, 19 nt, Artificial Sequence
  Description of Artificial Sequence: Synthetic oligonucleotide
accaaggauuuucccuccu

SEQ ID NO: 2842078 - RNA, 19 nt, Artificial Sequence
  Description of Artificial Sequence: Synthetic oligonucleotide
uuuucccagcucugugguc

SEQ ID NO: 2842079 - RNA, 19 nt, Artificial Sequence
  Description of Artificial Sequence: Synthetic oligonucleotide
cacuccacacuuguucaac

SEQ ID NO: 2842080 - RNA, 19 nt, Artificial Sequence
  Description of Artificial Sequence: Synthetic oligonucleotide
gccaaauugacgggacggg

SEQ ID NO: 2842081 - RNA, 19 nt, Artificial Sequence
  Description of Artificial Sequence: Synthetic oligonucleotide
ucaguacaaugaagccaaa

SEQ ID NO: 2842082 - RNA, 19 nt, Artificial Sequence
  Description of Artificial Sequence: Synthetic oligonucleotide
gcuauucugcuguaaaggu

SEQ ID NO: 2842083 - RNA, 19 nt, Artificial Sequence
  Description of Artificial Sequence: Synthetic oligonucleotide
gggagcagauuguucugcc

SEQ ID NO: 2842084 - RNA, 19 nt, Artificial Sequence
  Description of Artificial Sequence: Synthetic oligonucleotide
aggacagccguuugcuauu

SEQ ID NO: 2842085 - RNA, 19 nt, Artificial Sequence
  Description of Artificial Sequence: Synthetic oligonucleotide
ugccacuuuucuaggucuu

SEQ ID NO: 2842086 - RNA, 19 nt, Artificial Sequence
  Description of Artificial Sequence: Synthetic oligonucleotide
uugacgggacgggagcaga

SEQ ID NO: 2842087 - RNA, 19 nt, Artificial Sequence
  Description of Artificial Sequence: Synthetic oligonucleotide
caaaaggacugauccugaa

SEQ ID NO: 2842088 - RNA, 19 nt, Artificial Sequence
  Description of Artificial Sequence: Synthetic oligonucleotide
ucaggacagccguuugcua

SEQ ID NO: 2842089 - RNA, 19 nt, Artificial Sequence
  Description of Artificial Sequence: Synthetic oligonucleotide
ugccugugagguucacgac

SEQ ID NO: 2842090 - RNA, 19 nt, Artificial Sequence
  Description of Artificial Sequence: Synthetic oligonucleotide
caaggauuuucccuccugu

SEQ ID NO: 2842091 - RNA, 19 nt, Artificial Sequence
  Description of Artificial Sequence: Synthetic oligonucleotide
accauggugacggcgcgga

SEQ ID NO: 2842092 - RNA, 19 nt, Artificial Sequence
  Description of Artificial Sequence: Synthetic oligonucleotide
uguggucaucgaugauuuc

SEQ ID NO: 2842093 - RNA, 19 nt, Artificial Sequence
  Description of Artificial Sequence: Synthetic oligonucleotide
ugacgggacgggagcagau

SEQ ID NO: 2842094 - RNA, 19 nt, Artificial Sequence
  Description of Artificial Sequence: Synthetic oligonucleotide
uuuucccuccuguguguuu

SEQ ID NO: 2842095 - RNA, 19 nt, Artificial Sequence
  Description of Artificial Sequence: Synthetic oligonucleotide
ugaugccagcugagguugu

SEQ ID NO: 2842096 - RNA, 19 nt, Artificial Sequence
  Description of Artificial Sequence: Synthetic oligonucleotide
gccugugagguucacgaca

SEQ ID NO: 2842097 - RNA, 19 nt, Artificial Sequence
  Description of Artificial Sequence: Synthetic oligonucleotide
cugaucacuccacacuugu

SEQ ID NO: 2842098 - RNA, 19 nt, Artificial Sequence
  Description of Artificial Sequence: Synthetic oligonucleotide
gcucuguggucaucgauga

SEQ ID NO: 2842099 - RNA, 19 nt, Artificial Sequence
  Description of Artificial Sequence: Synthetic oligonucleotide
ucaaccugccugugagguu

SEQ ID NO: 2842100 - RNA, 19 nt, Artificial Sequence
  Description of Artificial Sequence: Synthetic oligonucleotide
guccaugaugccagcugag

SEQ ID NO: 2842101 - RNA, 19 nt, Artificial Sequence
  Description of Artificial Sequence: Synthetic oligonucleotide
gagcagggccugaugagga

SEQ ID NO: 2842102 - RNA, 19 nt, Artificial Sequence
  Description of Artificial Sequence: Synthetic oligonucleotide
cuuguucaaccugccugug

SEQ ID NO: 2842103 - RNA, 19 nt, Artificial Sequence
  Description of Artificial Sequence: Synthetic oligonucleotide
uugccucucuucucagcau

SEQ ID NO: 2842104 - RNA, 19 nt, Artificial Sequence
  Description of Artificial Sequence: Synthetic oligonucleotide
cagcugagguugucaguac

SEQ ID NO: 2842105 - RNA, 19 nt, Artificial Sequence
  Description of Artificial Sequence: Synthetic oligonucleotide
gccugaugaggaccuggcg

SEQ ID NO: 2842106 - RNA, 19 nt, Artificial Sequence
  Description of Artificial Sequence: Synthetic oligonucleotide
cuauucugcuguaaagguu

SEQ ID NO: 2842107 - RNA, 19 nt, Artificial Sequence
  Description of Artificial Sequence: Synthetic oligonucleotide
ucucagcauuguugaugcu

SEQ ID NO: 2842108 - RNA, 19 nt, Artificial Sequence
  Description of Artificial Sequence: Synthetic oligonucleotide
gccguuugcuauucugcug

SEQ ID NO: 2842109 - RNA, 19 nt, Artificial Sequence
  Description of Artificial Sequence: Synthetic oligonucleotide
gaacagucuauggaggcuu

SEQ ID NO: 2842110 - RNA, 19 nt, Artificial Sequence
  Description of Artificial Sequence: Synthetic oligonucleotide
caugaugccagcugagguu

SEQ ID NO: 2842111 - RNA, 19 nt, Artificial Sequence
  Description of Artificial Sequence: Synthetic oligonucleotide
aacagucuauggaggcuuu

SEQ ID NO: 2842112 - RNA, 19 nt, Artificial Sequence
  Description of Artificial Sequence: Synthetic oligonucleotide
auucugcuguaaagguuca

SEQ ID NO: 2842113 - RNA, 19 nt, Artificial Sequence
  Description of Artificial Sequence: Synthetic oligonucleotide
cagucaggacagccguuug

SEQ ID NO: 2842114 - RNA, 19 nt, Artificial Sequence
  Description of Artificial Sequence: Synthetic oligonucleotide
gaggaccuggcguuugccu

SEQ ID NO: 2842115 - RNA, 19 nt, Artificial Sequence
  Description of Artificial Sequence: Synthetic oligonucleotide
gcguuugccucucuucuca

SEQ ID NO: 2842116 - RNA, 19 nt, Artificial Sequence
  Description of Artificial Sequence: Synthetic oligonucleotide
ggagcagauuguucugcca

SEQ ID NO: 2842117 - RNA, 19 nt, Artificial Sequence
  Description of Artificial Sequence: Synthetic oligonucleotide
caugcgcaccauggugacg

SEQ ID NO: 2842118 - RNA, 19 nt, Artificial Sequence
  Description of Artificial Sequence: Synthetic oligonucleotide
cacgacaauuuucccagcu

SEQ ID NO: 2842119 - RNA, 19 nt, Artificial Sequence
  Description of Artificial Sequence: Synthetic oligonucleotide
gaugccagcugagguuguc

SEQ ID NO: 2842120 - RNA, 19 nt, Artificial Sequence
  Description of Artificial Sequence: Synthetic oligonucleotide
gcugcacaucaaaucuagg

SEQ ID NO: 2842121 - RNA, 19 nt, Artificial Sequence
  Description of Artificial Sequence: Synthetic oligonucleotide
uucugcuguaaagguucaa

SEQ ID NO: 2842122 - RNA, 19 nt, Artificial Sequence
  Description of Artificial Sequence: Synthetic oligonucleotide
gugagguucacgacaauuu

SEQ ID NO: 2842123 - RNA, 19 nt, Artificial Sequence
  Description of Artificial Sequence: Synthetic oligonucleotide
augccagcugagguuguca

SEQ ID NO: 2842124 - RNA, 19 nt, Artificial Sequence
  Description of Artificial Sequence: Synthetic oligonucleotide
ucagagcaucggccaggac

SEQ ID NO: 2842125 - RNA, 19 nt, Artificial Sequence
  Description of Artificial Sequence: Synthetic oligonucleotide
cuguggucaucgaugauuu

SEQ ID NO: 2842126 - RNA, 19 nt, Artificial Sequence
  Description of Artificial Sequence: Synthetic oligonucleotide
cguuuuacaucucuagaaa

SEQ ID NO: 2842127 - RNA, 19 nt, Artificial Sequence
  Description of Artificial Sequence: Synthetic oligonucleotide
guuugcuauucugcuguaa

SEQ ID NO: 2842128 - RNA, 19 nt, Artificial Sequence
  Description of Artificial Sequence: Synthetic oligonucleotide
auuuucccuccuguguguu

SEQ ID NO: 2842129 - RNA, 19 nt, Artificial Sequence
  Description of Artificial Sequence: Synthetic oligonucleotide
aucggccaggacauucaug

SEQ ID NO: 2842130 - RNA, 19 nt, Artificial Sequence
  Description of Artificial Sequence: Synthetic oligonucleotide
augguccaugaugccagcu

SEQ ID NO: 2842131 - RNA, 19 nt, Artificial Sequence
  Description of Artificial Sequence: Synthetic oligonucleotide
ccaaggauuuucccuccug

SEQ ID NO: 2842132 - RNA, 19 nt, Artificial Sequence
  Description of Artificial Sequence: Synthetic oligonucleotide
caggacagccguuugcuau

SEQ ID NO: 2842133 - RNA, 19 nt, Artificial Sequence
  Description of Artificial Sequence: Synthetic oligonucleotide
gcaccauggugacggcgcg

SEQ ID NO: 2842134 - RNA, 19 nt, Artificial Sequence
  Description of Artificial Sequence: Synthetic oligonucleotide
cauucaugcgcaccauggu

SEQ ID NO: 2842135 - RNA, 19 nt, Artificial Sequence
  Description of Artificial Sequence: Synthetic oligonucleotide
cuaggucuuugagcugcac

SEQ ID NO: 2842136 - RNA, 19 nt, Artificial Sequence
  Description of Artificial Sequence: Synthetic oligonucleotide
cuccacacuuguucaaccu

SEQ ID NO: 2842137 - RNA, 19 nt, Artificial Sequence
  Description of Artificial Sequence: Synthetic oligonucleotide
gacugauccugaacagucu

SEQ ID NO: 2842138 - RNA, 19 nt, Artificial Sequence
  Description of Artificial Sequence: Synthetic oligonucleotide
gagcugcacaucaaaucua

SEQ ID NO: 2842139 - RNA, 19 nt, Artificial Sequence
  Description of Artificial Sequence: Synthetic oligonucleotide
cauggugacggcgcggaaa

SEQ ID NO: 2842140 - RNA, 19 nt, Artificial Sequence
  Description of Artificial Sequence: Synthetic oligonucleotide
gccaggacauucaugcgca

SEQ ID NO: 2842141 - RNA, 19 nt, Artificial Sequence
  Description of Artificial Sequence: Synthetic oligonucleotide
cuucuugcuucuucauggu

SEQ ID NO: 2842142 - RNA, 19 nt, Artificial Sequence
  Description of Artificial Sequence: Synthetic oligonucleotide
gggccugaugaggaccugg

SEQ ID NO: 2842143 - RNA, 19 nt, Artificial Sequence
  Description of Artificial Sequence: Synthetic oligonucleotide
ucccuccuguguguuuucu

SEQ ID NO: 2842144 - RNA, 19 nt, Artificial Sequence
  Description of Artificial Sequence: Synthetic oligonucleotide
ugaugaggaccuggcguuu

SEQ ID NO: 2842145 - RNA, 19 nt, Artificial Sequence
  Description of Artificial Sequence: Synthetic oligonucleotide
caucacaguuaggaaucga

SEQ ID NO: 2842146 - RNA, 19 nt, Artificial Sequence
  Description of Artificial Sequence: Synthetic oligonucleotide
ugcgcaccauggugacggc

SEQ ID NO: 2842147 - RNA, 19 nt, Artificial Sequence
  Description of Artificial Sequence: Synthetic oligonucleotide
ccacuuuucuaggucuuug

SEQ ID NO: 2842148 - RNA, 19 nt, Artificial Sequence
  Description of Artificial Sequence: Synthetic oligonucleotide
uucccuccuguguguuuuc

SEQ ID NO: 2842149 - RNA, 19 nt, Artificial Sequence
  Description of Artificial Sequence: Synthetic oligonucleotide
caccaauguaaccaugcuu

SEQ ID NO: 2842150 - RNA, 19 nt, Artificial Sequence
  Description of Artificial Sequence: Synthetic oligonucleotide
gcugaucacuccacacuug

SEQ ID NO: 2842151 - RNA, 19 nt, Artificial Sequence
  Description of Artificial Sequence: Synthetic oligonucleotide
uucccagcucuguggucau

SEQ ID NO: 2842152 - RNA, 19 nt, Artificial Sequence
  Description of Artificial Sequence: Synthetic oligonucleotide
ugucaccagucaggacagc

SEQ ID NO: 2842153 - RNA, 19 nt, Artificial Sequence
  Description of Artificial Sequence: Synthetic oligonucleotide
gcagggccugaugaggacc

SEQ ID NO: 2842154 - RNA, 19 nt, Artificial Sequence
  Description of Artificial Sequence: Synthetic oligonucleotide
ggccugaugaggaccuggc

SEQ ID NO: 2842155 - RNA, 19 nt, Artificial Sequence
  Description of Artificial Sequence: Synthetic oligonucleotide
ccugaugaggaccuggcgu

SEQ ID NO: 2842156 - RNA, 19 nt, Artificial Sequence
  Description of Artificial Sequence: Synthetic oligonucleotide
caccagucaggacagccgu

SEQ ID NO: 2842157 - RNA, 19 nt, Artificial Sequence
  Description of Artificial Sequence: Synthetic oligonucleotide
ggcguuugccucucuucuc

SEQ ID NO: 2842158 - RNA, 19 nt, Artificial Sequence
  Description of Artificial Sequence: Synthetic oligonucleotide
cugauccugaacagucuau

SEQ ID NO: 2842159 - RNA, 19 nt, Artificial Sequence
  Description of Artificial Sequence: Synthetic oligonucleotide
aaccugccugugagguuca

SEQ ID NO: 2842160 - RNA, 19 nt, Artificial Sequence
  Description of Artificial Sequence: Synthetic oligonucleotide
gcugagguugucaguacaa

SEQ ID NO: 2842161 - RNA, 19 nt, Artificial Sequence
  Description of Artificial Sequence: Synthetic oligonucleotide
gggcugaucacuccacacu

SEQ ID NO: 2842162 - RNA, 19 nt, Artificial Sequence
  Description of Artificial Sequence: Synthetic oligonucleotide
ggucuuugagcugcacauc

SEQ ID NO: 2842163 - RNA, 19 nt, Artificial Sequence
  Description of Artificial Sequence: Synthetic oligonucleotide
ggucaucgaugauuucaaa

SEQ ID NO: 2842164 - RNA, 19 nt, Artificial Sequence
  Description of Artificial Sequence: Synthetic oligonucleotide
caguuaggaaucgaacgau

SEQ ID NO: 2842165 - RNA, 19 nt, Artificial Sequence
  Description of Artificial Sequence: Synthetic oligonucleotide
acagucuauggaggcuuuu

SEQ ID NO: 2842166 - RNA, 19 nt, Artificial Sequence
  Description of Artificial Sequence: Synthetic oligonucleotide
ggcugaucacuccacacuu

SEQ ID NO: 2842167 - RNA, 19 nt, Artificial Sequence
  Description of Artificial Sequence: Synthetic oligonucleotide
ccugccugugagguucacg

SEQ ID NO: 2842168 - RNA, 19 nt, Artificial Sequence
  Description of Artificial Sequence: Synthetic oligonucleotide
ccguuugcuauucugcugu

SEQ ID NO: 2842169 - RNA, 19 nt, Artificial Sequence
  Description of Artificial Sequence: Synthetic oligonucleotide
ccaaauugacgggacggga

SEQ ID NO: 2842170 - RNA, 19 nt, Artificial Sequence
  Description of Artificial Sequence: Synthetic oligonucleotide
gccucucuucucagcauug

SEQ ID NO: 2842171 - RNA, 19 nt, Artificial Sequence
  Description of Artificial Sequence: Synthetic oligonucleotide
cgaugacuuuggagcaggg

SEQ ID NO: 2842172 - RNA, 19 nt, Artificial Sequence
  Description of Artificial Sequence: Synthetic oligonucleotide
ccagcugagguugucagua

SEQ ID NO: 2842173 - RNA, 19 nt, Artificial Sequence
  Description of Artificial Sequence: Synthetic oligonucleotide
accugccugugagguucac

SEQ ID NO: 2842174 - RNA, 19 nt, Artificial Sequence
  Description of Artificial Sequence: Synthetic oligonucleotide
caguacaaugaagccaaau

SEQ ID NO: 2842175 - RNA, 19 nt, Artificial Sequence
  Description of Artificial Sequence: Synthetic oligonucleotide
cgacaauuuucccagcucu

SEQ ID NO: 2842176 - RNA, 19 nt, Artificial Sequence
  Description of Artificial Sequence: Synthetic oligonucleotide
gacagccguuugcuauucu

SEQ ID NO: 2842177 - RNA, 19 nt, Artificial Sequence
  Description of Artificial Sequence: Synthetic oligonucleotide
gcaucggccaggacauuca

SEQ ID NO: 2842178 - RNA, 19 nt, Artificial Sequence
  Description of Artificial Sequence: Synthetic oligonucleotide
cucucuucucagcauuguu

SEQ ID NO: 2842179 - RNA, 19 nt, Artificial Sequence
  Description of Artificial Sequence: Synthetic oligonucleotide
ccaugaugccagcugaggu

SEQ ID NO: 2842180 - RNA, 19 nt, Artificial Sequence
  Description of Artificial Sequence: Synthetic oligonucleotide
cguuugccucucuucucag

SEQ ID NO: 2842181 - RNA, 19 nt, Artificial Sequence
  Description of Artificial Sequence: Synthetic oligonucleotide
gcgcaccauggugacggcg

SEQ ID NO: 2842182 - RNA, 19 nt, Artificial Sequence
  Description of Artificial Sequence: Synthetic oligonucleotide
ggaccuggcguuugccucu

SEQ ID NO: 2842183 - RNA, 19 nt, Artificial Sequence
  Description of Artificial Sequence: Synthetic oligonucleotide
cugagguugucaguacaau

SEQ ID NO: 2842184 - RNA, 19 nt, Artificial Sequence
  Description of Artificial Sequence: Synthetic oligonucleotide
ggacgggagcagauuguuc

SEQ ID NO: 2842185 - RNA, 19 nt, Artificial Sequence
  Description of Artificial Sequence: Synthetic oligonucleotide
gaccuggcguuugccucuc

SEQ ID NO: 2842186 - RNA, 19 nt, Artificial Sequence
  Description of Artificial Sequence: Synthetic oligonucleotide
agggccugaugaggaccug

SEQ ID NO: 2842187 - RNA, 19 nt, Artificial Sequence
  Description of Artificial Sequence: Synthetic oligonucleotide
cgggagcagauuguucugc

SEQ ID NO: 2842188 - RNA, 19 nt, Artificial Sequence
  Description of Artificial Sequence: Synthetic oligonucleotide
ggacagccguuugcuauuc

SEQ ID NO: 2842189 - RNA, 19 nt, Artificial Sequence
  Description of Artificial Sequence: Synthetic oligonucleotide
ccaggacauucaugcgcac

SEQ ID NO: 2842190 - RNA, 19 nt, Artificial Sequence
  Description of Artificial Sequence: Synthetic oligonucleotide
accagucaggacagccguu

SEQ ID NO: 2842191 - RNA, 19 nt, Artificial Sequence
  Description of Artificial Sequence: Synthetic oligonucleotide
caucaaaucuagggcugau

SEQ ID NO: 2842192 - RNA, 19 nt, Artificial Sequence
  Description of Artificial Sequence: Synthetic oligonucleotide
ggaaucgaacgaugacuuu

SEQ ID NO: 2842193 - RNA, 19 nt, Artificial Sequence
  Description of Artificial Sequence: Synthetic oligonucleotide
cuucuucaugguccaugau

SEQ ID NO: 2842194 - RNA, 19 nt, Artificial Sequence
  Description of Artificial Sequence: Synthetic oligonucleotide
cggccaggacauucaugcg

SEQ ID NO: 2842195 - RNA, 19 nt, Artificial Sequence
  Description of Artificial Sequence: Synthetic oligonucleotide
cagauuguucugccacuuu

SEQ ID NO: 2842196 - RNA, 19 nt, Artificial Sequence
  Description of Artificial Sequence: Synthetic oligonucleotide
accuggcguuugccucucu

SEQ ID NO: 2842197 - RNA, 19 nt, Artificial Sequence
  Description of Artificial Sequence: Synthetic oligonucleotide
cagcucuguggucaucgau

SEQ ID NO: 2842198 - RNA, 19 nt, Artificial Sequence
  Description of Artificial Sequence: Synthetic oligonucleotide
ucccagcucuguggucauc

SEQ ID NO: 2842199 - RNA, 19 nt, Artificial Sequence
  Description of Artificial Sequence: Synthetic oligonucleotide
caucggccaggacauucau

SEQ ID NO: 2842200 - RNA, 19 nt, Artificial Sequence
  Description of Artificial Sequence: Synthetic oligonucleotide
gacgggacgggagcagauu

SEQ ID NO: 2842201 - RNA, 19 nt, Artificial Sequence
  Description of Artificial Sequence: Synthetic oligonucleotide
gcagauuguucugccacuu

SEQ ID NO: 2842202 - RNA, 19 nt, Artificial Sequence
  Description of Artificial Sequence: Synthetic oligonucleotide
ccagcucuguggucaucga

SEQ ID NO: 2842203 - RNA, 19 nt, Artificial Sequence
  Description of Artificial Sequence: Synthetic oligonucleotide
cucuguggucaucgaugau

SEQ ID NO: 2842204 - RNA, 19 nt, Artificial Sequence
  Description of Artificial Sequence: Synthetic oligonucleotide
gggacgggagcagauuguu

SEQ ID NO: 2842205 - RNA, 19 nt, Artificial Sequence
  Description of Artificial Sequence: Synthetic oligonucleotide
ggacauucaugcgcaccau

SEQ ID NO: 2842206 - RNA, 19 nt, Artificial Sequence
  Description of Artificial Sequence: Synthetic oligonucleotide
cagcauuguugaugcucuu

SEQ ID NO: 2842207 - RNA, 19 nt, Artificial Sequence
  Description of Artificial Sequence: Synthetic oligonucleotide
ccagucaggacagccguuu

SEQ ID NO: 2842208 - RNA, 19 nt, Artificial Sequence
  Description of Artificial Sequence: Synthetic oligonucleotide
gccacuuuucuaggucuuu

SEQ ID NO: 2842209 - RNA, 19 nt, Artificial Sequence
  Description of Artificial Sequence: Synthetic oligonucleotide
cguuugcuauucugcugua

SEQ ID NO: 2842210 - RNA, 19 nt, Artificial Sequence
  Description of Artificial Sequence: Synthetic oligonucleotide
ccuggcguuugccucucuu

SEQ ID NO: 2842211 - RNA, 19 nt, Artificial Sequence
  Description of Artificial Sequence: Synthetic oligonucleotide
ccauggugacggcgcggaa

SEQ ID NO: 2842212 - RNA, 19 nt, Artificial Sequence
  Description of Artificial Sequence: Synthetic oligonucleotide
cgggacgggagcagauugu

SEQ ID NO: 2842213 - RNA, 19 nt, Artificial Sequence
  Description of Artificial Sequence: Synthetic oligonucleotide
gagcaucggccaggacauu

SEQ ID NO: 2842214 - RNA, 19 nt, Artificial Sequence
  Description of Artificial Sequence: Synthetic oligonucleotide
uuuaaauuaacuuugcaag

SEQ ID NO: 2842215 - RNA, 19 nt, Artificial Sequence
  Description of Artificial Sequence: Synthetic oligonucleotide
aauauuaggaggucaguac

SEQ ID NO: 2842216 - RNA, 19 nt, Artificial Sequence
  Description of Artificial Sequence: Synthetic oligonucleotide
aacacuuaaauauuaggag

SEQ ID NO: 2842217 - RNA, 19 nt, Artificial Sequence
  Description of Artificial Sequence: Synthetic oligonucleotide
aaggaagccagucaguagc

SEQ ID NO: 2842218 - RNA, 19 nt, Artificial Sequence
  Description of Artificial Sequence: Synthetic oligonucleotide
auaguaaacacuuaaauau

SEQ ID NO: 2842219 - RNA, 19 nt, Artificial Sequence
  Description of Artificial Sequence: Synthetic oligonucleotide
uauguauacacacacacac

SEQ ID NO: 2842220 - RNA, 19 nt, Artificial Sequence
  Description of Artificial Sequence: Synthetic oligonucleotide
aaauuaacuuugcaagugg

SEQ ID NO: 2842221 - RNA, 19 nt, Artificial Sequence
  Description of Artificial Sequence: Synthetic oligonucleotide
acaagugucauuuucguuc

SEQ ID NO: 2842222 - RNA, 19 nt, Artificial Sequence
  Description of Artificial Sequence: Synthetic oligonucleotide
uacauauauauauauaugu

SEQ ID NO: 2842223 - RNA, 19 nt, Artificial Sequence
  Description of Artificial Sequence: Synthetic oligonucleotide
uguacauauauauauauau

SEQ ID NO: 2842224 - RNA, 19 nt, Artificial Sequence
  Description of Artificial Sequence: Synthetic oligonucleotide
uauauguccauguauaugu

SEQ ID NO: 2842225 - RNA, 19 nt, Artificial Sequence
  Description of Artificial Sequence: Synthetic oligonucleotide
uucaaaagagacuugagcu

SEQ ID NO: 2842226 - RNA, 19 nt, Artificial Sequence
  Description of Artificial Sequence: Synthetic oligonucleotide
uuaaauauuaggaggucag

SEQ ID NO: 2842227 - RNA, 19 nt, Artificial Sequence
  Description of Artificial Sequence: Synthetic oligonucleotide
uaaacacuuaaauauuagg

SEQ ID NO: 2842228 - RNA, 19 nt, Artificial Sequence
  Description of Artificial Sequence: Synthetic oligonucleotide
acacuuaaauauuaggagg

SEQ ID NO: 2842229 - RNA, 19 nt, Artificial Sequence
  Description of Artificial Sequence: Synthetic oligonucleotide
uguguaugcauauaugucc

SEQ ID NO: 2842230 - RNA, 19 nt, Artificial Sequence
  Description of Artificial Sequence: Synthetic oligonucleotide
cuugcugcaagauuuaggg

SEQ ID NO: 2842231 - RNA, 19 nt, Artificial Sequence
  Description of Artificial Sequence: Synthetic oligonucleotide
aaaacaucaucacaagugu

SEQ ID NO: 2842232 - RNA, 19 nt, Artificial Sequence
  Description of Artificial Sequence: Synthetic oligonucleotide
uauauauauauauguaugu

SEQ ID NO: 2842233 - RNA, 19 nt, Artificial Sequence
  Description of Artificial Sequence: Synthetic oligonucleotide
uucuuaauuuaauggaagg

SEQ ID NO: 2842234 - RNA, 19 nt, Artificial Sequence
  Description of Artificial Sequence: Synthetic oligonucleotide
caaaacaucaucacaagug

SEQ ID NO: 2842235 - RNA, 19 nt, Artificial Sequence
  Description of Artificial Sequence: Synthetic oligonucleotide
gauuaugauaaucacgcug

SEQ ID NO: 2842236 - RNA, 19 nt, Artificial Sequence
  Description of Artificial Sequence: Synthetic oligonucleotide
ugucaaaacaucaucacaa

SEQ ID NO: 2842237 - RNA, 19 nt, Artificial Sequence
  Description of Artificial Sequence: Synthetic oligonucleotide
uauacacacacacacacac

SEQ ID NO: 2842238 - RNA, 19 nt, Artificial Sequence
  Description of Artificial Sequence: Synthetic oligonucleotide
guacuucuuaauuuaaugg

SEQ ID NO: 2842239 - RNA, 19 nt, Artificial Sequence
  Description of Artificial Sequence: Synthetic oligonucleotide
uguauacacacacacacac

SEQ ID NO: 2842240 - RNA, 19 nt, Artificial Sequence
  Description of Artificial Sequence: Synthetic oligonucleotide
augauaaucacgcugaaau

SEQ ID NO: 2842241 - RNA, 19 nt, Artificial Sequence
  Description of Artificial Sequence: Synthetic oligonucleotide
uuaauuuaauggaaggagu

SEQ ID NO: 2842242 - RNA, 19 nt, Artificial Sequence
  Description of Artificial Sequence: Synthetic oligonucleotide
aaacacuuaaauauuagga

SEQ ID NO: 2842243 - RNA, 19 nt, Artificial Sequence
  Description of Artificial Sequence: Synthetic oligonucleotide
aaggugucaaaacaucauc

SEQ ID NO: 2842244 - RNA, 19 nt, Artificial Sequence
  Description of Artificial Sequence: Synthetic oligonucleotide
ucuguauguacauauauau

SEQ ID NO: 2842245 - RNA, 19 nt, Artificial Sequence
  Description of Artificial Sequence: Synthetic oligonucleotide
aauguugugcacuuucuga

SEQ ID NO: 2842246 - RNA, 19 nt, Artificial Sequence
  Description of Artificial Sequence: Synthetic oligonucleotide
aguacuucuuaauuuaaug

SEQ ID NO: 2842247 - RNA, 19 nt, Artificial Sequence
  Description of Artificial Sequence: Synthetic oligonucleotide
uacuucuuaauuuaaugga

SEQ ID NO: 2842248 - RNA, 19 nt, Artificial Sequence
  Description of Artificial Sequence: Synthetic oligonucleotide
uuaaauuaacuuugcaagu

SEQ ID NO: 2842249 - RNA, 19 nt, Artificial Sequence
  Description of Artificial Sequence: Synthetic oligonucleotide
gaaggaguuagacagcagc

SEQ ID NO: 2842250 - RNA, 19 nt, Artificial Sequence
  Description of Artificial Sequence: Synthetic oligonucleotide
guagucuaggaucuggugg

SEQ ID NO: 2842251 - RNA, 19 nt, Artificial Sequence
  Description of Artificial Sequence: Synthetic oligonucleotide
aagggauuuaaauuaacuu

SEQ ID NO: 2842252 - RNA, 19 nt, Artificial Sequence
  Description of Artificial Sequence: Synthetic oligonucleotide
auaggcagagaccaauucg

SEQ ID NO: 2842253 - RNA, 19 nt, Artificial Sequence
  Description of Artificial Sequence: Synthetic oligonucleotide
auauauauauauauguaug

SEQ ID NO: 2842254 - RNA, 19 nt, Artificial Sequence
  Description of Artificial Sequence: Synthetic oligonucleotide
uauguacauauauauauau

SEQ ID NO: 2842255 - RNA, 19 nt, Artificial Sequence
  Description of Artificial Sequence: Synthetic oligonucleotide
uuuacagcagauaguaaac

SEQ ID NO: 2842256 - RNA, 19 nt, Artificial Sequence
  Description of Artificial Sequence: Synthetic oligonucleotide
cuucaaaagagacuugagc

SEQ ID NO: 2842257 - RNA, 19 nt, Artificial Sequence
  Description of Artificial Sequence: Synthetic oligonucleotide
gauaguaaacacuuaaaua

SEQ ID NO: 2842258 - RNA, 19 nt, Artificial Sequence
  Description of Artificial Sequence: Synthetic oligonucleotide
uaaauuaacuuugcaagug

SEQ ID NO: 2842259 - RNA, 19 nt, Artificial Sequence
  Description of Artificial Sequence: Synthetic oligonucleotide
aagagacuugagcuacucc

SEQ ID NO: 2842260 - RNA, 19 nt, Artificial Sequence
  Description of Artificial Sequence: Synthetic oligonucleotide
agauaguaaacacuuaaau

SEQ ID NO: 2842261 - RNA, 19 nt, Artificial Sequence
  Description of Artificial Sequence: Synthetic oligonucleotide
cuucuuaauuuaauggaag

SEQ ID NO: 2842262 - RNA, 19 nt, Artificial Sequence
  Description of Artificial Sequence: Synthetic oligonucleotide
auuuaauggaaggaguuag

SEQ ID NO: 2842263 - RNA, 19 nt, Artificial Sequence
  Description of Artificial Sequence: Synthetic oligonucleotide
auugggaaggugucaaaac

SEQ ID NO: 2842264 - RNA, 19 nt, Artificial Sequence
  Description of Artificial Sequence: Synthetic oligonucleotide
auguauaugugucuguaug

SEQ ID NO: 2842265 - RNA, 19 nt, Artificial Sequence
  Description of Artificial Sequence: Synthetic oligonucleotide
agauuuaggggagaggacg

SEQ ID NO: 2842266 - RNA, 19 nt, Artificial Sequence
  Description of Artificial Sequence: Synthetic oligonucleotide
cauaaagggauuuaaauua

SEQ ID NO: 2842267 - RNA, 19 nt, Artificial Sequence
  Description of Artificial Sequence: Synthetic oligonucleotide
augaauguugugcacuuuc

SEQ ID NO: 2842268 - RNA, 19 nt, Artificial Sequence
  Description of Artificial Sequence: Synthetic oligonucleotide
guagcaaauauguguaugc

SEQ ID NO: 2842269 - RNA, 19 nt, Artificial Sequence
  Description of Artificial Sequence: Synthetic oligonucleotide
uaugcauauauguccaugu

SEQ ID NO: 2842270 - RNA, 19 nt, Artificial Sequence
  Description of Artificial Sequence: Synthetic oligonucleotide
uccauaaagggauuuaaau

SEQ ID NO: 2842271 - RNA, 19 nt, Artificial Sequence
  Description of Artificial Sequence: Synthetic oligonucleotide
agagacuugagcuacucca

SEQ ID NO: 2842272 - RNA, 19 nt, Artificial Sequence
  Description of Artificial Sequence: Synthetic oligonucleotide
agggauuuaaauuaacuuu

SEQ ID NO: 2842273 - RNA, 19 nt, Artificial Sequence
  Description of Artificial Sequence: Synthetic oligonucleotide
ucaguagcaaauaugugua

SEQ ID NO: 2842274 - RNA, 19 nt, Artificial Sequence
  Description of Artificial Sequence: Synthetic oligonucleotide
gauaaucacgcugaaauga

SEQ ID NO: 2842275 - RNA, 19 nt, Artificial Sequence
  Description of Artificial Sequence: Synthetic oligonucleotide
ucuuaauuuaauggaagga

SEQ ID NO: 2842276 - RNA, 19 nt, Artificial Sequence
  Description of Artificial Sequence: Synthetic oligonucleotide
ucugcuucaaaagagacuu

SEQ ID NO: 2842277 - RNA, 19 nt, Artificial Sequence
  Description of Artificial Sequence: Synthetic oligonucleotide
aaagggauuuaaauuaacu

SEQ ID NO: 2842278 - RNA, 19 nt, Artificial Sequence
  Description of Artificial Sequence: Synthetic oligonucleotide
uguguccauccauaaaggg

SEQ ID NO: 2842279 - RNA, 19 nt, Artificial Sequence
  Description of Artificial Sequence: Synthetic oligonucleotide
ucaaaacaucaucacaagu

SEQ ID NO: 2842280 - RNA, 19 nt, Artificial Sequence
  Description of Artificial Sequence: Synthetic oligonucleotide
uuaacuuugcaaguggagu

SEQ ID NO: 2842281 - RNA, 19 nt, Artificial Sequence
  Description of Artificial Sequence: Synthetic oligonucleotide
uguauaugugucuguaugu

SEQ ID NO: 2842282 - RNA, 19 nt, Artificial Sequence
  Description of Artificial Sequence: Synthetic oligonucleotide
uugggaaggugucaaaaca

SEQ ID NO: 2842283 - RNA, 19 nt, Artificial Sequence
  Description of Artificial Sequence: Synthetic oligonucleotide
gagaccaauucguagggcc

SEQ ID NO: 2842284 - RNA, 19 nt, Artificial Sequence
  Description of Artificial Sequence: Synthetic oligonucleotide
aacaucaucacaaguguca

SEQ ID NO: 2842285 - RNA, 19 nt, Artificial Sequence
  Description of Artificial Sequence: Synthetic oligonucleotide
ugugucuguauguacauau

SEQ ID NO: 2842286 - RNA, 19 nt, Artificial Sequence
  Description of Artificial Sequence: Synthetic oligonucleotide
uuucugacucacuugcugc

SEQ ID NO: 2842287 - RNA, 19 nt, Artificial Sequence
  Description of Artificial Sequence: Synthetic oligonucleotide
aaucacgcugaaaugaaug

SEQ ID NO: 2842288 - RNA, 19 nt, Artificial Sequence
  Description of Artificial Sequence: Synthetic oligonucleotide
ucugacacggauuaugaua

SEQ ID NO: 2842289 - RNA, 19 nt, Artificial Sequence
  Description of Artificial Sequence: Synthetic oligonucleotide
cuugagcuacuccaggugg

SEQ ID NO: 2842290 - RNA, 19 nt, Artificial Sequence
  Description of Artificial Sequence: Synthetic oligonucleotide
uaauggaaggaguuagaca

SEQ ID NO: 2842291 - RNA, 19 nt, Artificial Sequence
  Description of Artificial Sequence: Synthetic oligonucleotide
uuuaauggaaggaguuaga

SEQ ID NO: 2842292 - RNA, 19 nt, Artificial Sequence
  Description of Artificial Sequence: Synthetic oligonucleotide
ugcauauauguccauguau

SEQ ID NO: 2842293 - RNA, 19 nt, Artificial Sequence
  Description of Artificial Sequence: Synthetic oligonucleotide
ucauuuucguucugacacg

SEQ ID NO: 2842294 - RNA, 19 nt, Artificial Sequence
  Description of Artificial Sequence: Synthetic oligonucleotide
cuucucugcuucaaaagag

SEQ ID NO: 2842295 - RNA, 19 nt, Artificial Sequence
  Description of Artificial Sequence: Synthetic oligonucleotide
ugucuguauguacauauau

SEQ ID NO: 2842296 - RNA, 19 nt, Artificial Sequence
  Description of Artificial Sequence: Synthetic oligonucleotide
ugauaaucacgcugaaaug

SEQ ID NO: 2842297 - RNA, 19 nt, Artificial Sequence
  Description of Artificial Sequence: Synthetic oligonucleotide
uaggcagagaccaauucgu

SEQ ID NO: 2842298 - RNA, 19 nt, Artificial Sequence
  Description of Artificial Sequence: Synthetic oligonucleotide
cacuuucugacucacuugc

SEQ ID NO: 2842299 - RNA, 19 nt, Artificial Sequence
  Description of Artificial Sequence: Synthetic oligonucleotide
uuaauggaaggaguuagac

SEQ ID NO: 2842300 - RNA, 19 nt, Artificial Sequence
  Description of Artificial Sequence: Synthetic oligonucleotide
aaauauuaggaggucagua

SEQ ID NO: 2842301 - RNA, 19 nt, Artificial Sequence
  Description of Artificial Sequence: Synthetic oligonucleotide
guggacacggcacagcagg

SEQ ID NO: 2842302 - RNA, 19 nt, Artificial Sequence
  Description of Artificial Sequence: Synthetic oligonucleotide
cuuuacagcagauaguaaa

SEQ ID NO: 2842303 - RNA, 19 nt, Artificial Sequence
  Description of Artificial Sequence: Synthetic oligonucleotide
uacagcagauaguaaacac

SEQ ID NO: 2842304 - RNA, 19 nt, Artificial Sequence
  Description of Artificial Sequence: Synthetic oligonucleotide
uuagacagcagcagcuucu

SEQ ID NO: 2842305 - RNA, 19 nt, Artificial Sequence
  Description of Artificial Sequence: Synthetic oligonucleotide
aaaugaauguugugcacuu

SEQ ID NO: 2842306 - RNA, 19 nt, Artificial Sequence
  Description of Artificial Sequence: Synthetic oligonucleotide
uuaggggagaggacguggg

SEQ ID NO: 2842307 - RNA, 19 nt, Artificial Sequence
  Description of Artificial Sequence: Synthetic oligonucleotide
aaagagacuugagcuacuc

SEQ ID NO: 2842308 - RNA, 19 nt, Artificial Sequence
  Description of Artificial Sequence: Synthetic oligonucleotide
uuuucguucugacacggau

SEQ ID NO: 2842309 - RNA, 19 nt, Artificial Sequence
  Description of Artificial Sequence: Synthetic oligonucleotide
cacgcugaaaugaauguug

SEQ ID NO: 2842310 - RNA, 19 nt, Artificial Sequence
  Description of Artificial Sequence: Synthetic oligonucleotide
guaaacacuuaaauauuag

SEQ ID NO: 2842311 - RNA, 19 nt, Artificial Sequence
  Description of Artificial Sequence: Synthetic oligonucleotide
uagucuaggaucuggugga

SEQ ID NO: 2842312 - RNA, 19 nt, Artificial Sequence
  Description of Artificial Sequence: Synthetic oligonucleotide
ucaaaagagacuugagcua

SEQ ID NO: 2842313 - RNA, 19 nt, Artificial Sequence
  Description of Artificial Sequence: Synthetic oligonucleotide
guacauauauauauauaug

SEQ ID NO: 2842314 - RNA, 19 nt, Artificial Sequence
  Description of Artificial Sequence: Synthetic oligonucleotide
uaaagggauuuaaauuaac

SEQ ID NO: 2842315 - RNA, 19 nt, Artificial Sequence
  Description of Artificial Sequence: Synthetic oligonucleotide
cggauuaugauaaucacgc

SEQ ID NO: 2842316 - RNA, 19 nt, Artificial Sequence
  Description of Artificial Sequence: Synthetic oligonucleotide
uuuaggggagaggacgugg

SEQ ID NO: 2842317 - RNA, 19 nt, Artificial Sequence
  Description of Artificial Sequence: Synthetic oligonucleotide
aaacaucaucacaaguguc

SEQ ID NO: 2842318 - RNA, 19 nt, Artificial Sequence
  Description of Artificial Sequence: Synthetic oligonucleotide
gcugaaaugaauguugugc

SEQ ID NO: 2842319 - RNA, 19 nt, Artificial Sequence
  Description of Artificial Sequence: Synthetic oligonucleotide
aauuaacuuugcaagugga

SEQ ID NO: 2842320 - RNA, 19 nt, Artificial Sequence
  Description of Artificial Sequence: Synthetic oligonucleotide
aacuuugcaaguggaguag

SEQ ID NO: 2842321 - RNA, 19 nt, Artificial Sequence
  Description of Artificial Sequence: Synthetic oligonucleotide
ugcaaguggaguagucuag

SEQ ID NO: 2842322 - RNA, 19 nt, Artificial Sequence
  Description of Artificial Sequence: Synthetic oligonucleotide
uugagcuacuccagguggg

SEQ ID NO: 2842323 - RNA, 19 nt, Artificial Sequence
  Description of Artificial Sequence: Synthetic oligonucleotide
uucucugcuucaaaagaga

SEQ ID NO: 2842324 - RNA, 19 nt, Artificial Sequence
  Description of Artificial Sequence: Synthetic oligonucleotide
uucguucugacacggauua

SEQ ID NO: 2842325 - RNA, 19 nt, Artificial Sequence
  Description of Artificial Sequence: Synthetic oligonucleotide
ugaaaugaauguugugcac

SEQ ID NO: 2842326 - RNA, 19 nt, Artificial Sequence
  Description of Artificial Sequence: Synthetic oligonucleotide
gucaaaacaucaucacaag

SEQ ID NO: 2842327 - RNA, 19 nt, Artificial Sequence
  Description of Artificial Sequence: Synthetic oligonucleotide
gcagagaccaauucguagg

SEQ ID NO: 2842328 - RNA, 19 nt, Artificial Sequence
  Description of Artificial Sequence: Synthetic oligonucleotide
ucucugcuucaaaagagac

SEQ ID NO: 2842329 - RNA, 19 nt, Artificial Sequence
  Description of Artificial Sequence: Synthetic oligonucleotide
uaguaaacacuuaaauauu

SEQ ID NO: 2842330 - RNA, 19 nt, Artificial Sequence
  Description of Artificial Sequence: Synthetic oligonucleotide
caaaagagacuugagcuac

SEQ ID NO: 2842331 - RNA, 19 nt, Artificial Sequence
  Description of Artificial Sequence: Synthetic oligonucleotide
uaacuuugcaaguggagua

SEQ ID NO: 2842332 - RNA, 19 nt, Artificial Sequence
  Description of Artificial Sequence: Synthetic oligonucleotide
acggauuaugauaaucacg

SEQ ID NO: 2842333 - RNA, 19 nt, Artificial Sequence
  Description of Artificial Sequence: Synthetic oligonucleotide
gucaguagcaaauaugugu

SEQ ID NO: 2842334 - RNA, 19 nt, Artificial Sequence
  Description of Artificial Sequence: Synthetic oligonucleotide
cugaaaugaauguugugca

SEQ ID NO: 2842335 - RNA, 19 nt, Artificial Sequence
  Description of Artificial Sequence: Synthetic oligonucleotide
gggauuuaaauuaacuuug

SEQ ID NO: 2842336 - RNA, 19 nt, Artificial Sequence
  Description of Artificial Sequence: Synthetic oligonucleotide
uaggaucugguggacacgg

SEQ ID NO: 2842337 - RNA, 19 nt, Artificial Sequence
  Description of Artificial Sequence: Synthetic oligonucleotide
cauauauauauauauguau

SEQ ID NO: 2842338 - RNA, 19 nt, Artificial Sequence
  Description of Artificial Sequence: Synthetic oligonucleotide
ugcuucaaaagagacuuga

SEQ ID NO: 2842339 - RNA, 19 nt, Artificial Sequence
  Description of Artificial Sequence: Synthetic oligonucleotide
uauguccauguauaugugu

SEQ ID NO: 2842340 - RNA, 19 nt, Artificial Sequence
  Description of Artificial Sequence: Synthetic oligonucleotide
aaguggaguagucuaggau

SEQ ID NO: 2842341 - RNA, 19 nt, Artificial Sequence
  Description of Artificial Sequence: Synthetic oligonucleotide
aguagcaaauauguguaug

SEQ ID NO: 2842342 - RNA, 19 nt, Artificial Sequence
  Description of Artificial Sequence: Synthetic oligonucleotide
auguccauguauauguguc

SEQ ID NO: 2842343 - RNA, 19 nt, Artificial Sequence
  Description of Artificial Sequence: Synthetic oligonucleotide
auguguaugcauauauguc

SEQ ID NO: 2842344 - RNA, 19 nt, Artificial Sequence
  Description of Artificial Sequence: Synthetic oligonucleotide
acuuaaauauuaggagguc

SEQ ID NO: 2842345 - RNA, 19 nt, Artificial Sequence
  Description of Artificial Sequence: Synthetic oligonucleotide
auauauguccauguauaug

SEQ ID NO: 2842346 - RNA, 19 nt, Artificial Sequence
  Description of Artificial Sequence: Synthetic oligonucleotide
ugucauuuucguucugaca

SEQ ID NO: 2842347 - RNA, 19 nt, Artificial Sequence
  Description of Artificial Sequence: Synthetic oligonucleotide
gaaggaagccagucaguag

SEQ ID NO: 2842348 - RNA, 19 nt, Artificial Sequence
  Description of Artificial Sequence: Synthetic oligonucleotide
auuaacuuugcaaguggag

SEQ ID NO: 2842349 - RNA, 19 nt, Artificial Sequence
  Description of Artificial Sequence: Synthetic oligonucleotide
aucaucacaagugucauuu

SEQ ID NO: 2842350 - RNA, 19 nt, Artificial Sequence
  Description of Artificial Sequence: Synthetic oligonucleotide
uuugcaaguggaguagucu

SEQ ID NO: 2842351 - RNA, 19 nt, Artificial Sequence
  Description of Artificial Sequence: Synthetic oligonucleotide
cuuucugacucacuugcug

SEQ ID NO: 2842352 - RNA, 19 nt, Artificial Sequence
  Description of Artificial Sequence: Synthetic oligonucleotide
aucacgcugaaaugaaugu

SEQ ID NO: 2842353 - RNA, 19 nt, Artificial Sequence
  Description of Artificial Sequence: Synthetic oligonucleotide
ucacaagugucauuuucgu

SEQ ID NO: 2842354 - RNA, 19 nt, Artificial Sequence
  Description of Artificial Sequence: Synthetic oligonucleotide
auuaggaggucaguacuuc

SEQ ID NO: 2842355 - RNA, 19 nt, Artificial Sequence
  Description of Artificial Sequence: Synthetic oligonucleotide
agcaaauauguguaugcau

SEQ ID NO: 2842356 - RNA, 19 nt, Artificial Sequence
  Description of Artificial Sequence: Synthetic oligonucleotide
ugggaaggugucaaaacau

SEQ ID NO: 2842357 - RNA, 19 nt, Artificial Sequence
  Description of Artificial Sequence: Synthetic oligonucleotide
ucaguacuucuuaauuuaa

SEQ ID NO: 2842358 - RNA, 19 nt, Artificial Sequence
  Description of Artificial Sequence: Synthetic oligonucleotide
aguagucuaggaucuggug

SEQ ID NO: 2842359 - RNA, 19 nt, Artificial Sequence
  Description of Artificial Sequence: Synthetic oligonucleotide
auauauauauauguaugua

SEQ ID NO: 2842360 - RNA, 19 nt, Artificial Sequence
  Description of Artificial Sequence: Synthetic oligonucleotide
caugccagcagucucugug

SEQ ID NO: 2842361 - RNA, 19 nt, Artificial Sequence
  Description of Artificial Sequence: Synthetic oligonucleotide
gacacggcacagcaggaag

SEQ ID NO: 2842362 - RNA, 19 nt, Artificial Sequence
  Description of Artificial Sequence: Synthetic oligonucleotide
aaggaguuagacagcagca

SEQ ID NO: 2842363 - RNA, 19 nt, Artificial Sequence
  Description of Artificial Sequence: Synthetic oligonucleotide
uuacagcagauaguaaaca

SEQ ID NO: 2842364 - RNA, 19 nt, Artificial Sequence
  Description of Artificial Sequence: Synthetic oligonucleotide
ugcaagauuuaggggagag

SEQ ID NO: 2842365 - RNA, 19 nt, Artificial Sequence
  Description of Artificial Sequence: Synthetic oligonucleotide
gauaggcagagaccaauuc

SEQ ID NO: 2842366 - RNA, 19 nt, Artificial Sequence
  Description of Artificial Sequence: Synthetic oligonucleotide
cuuaaauauuaggagguca

SEQ ID NO: 2842367 - RNA, 19 nt, Artificial Sequence
  Description of Artificial Sequence: Synthetic oligonucleotide
acagacauugggaaggugu

SEQ ID NO: 2842368 - RNA, 19 nt, Artificial Sequence
  Description of Artificial Sequence: Synthetic oligonucleotide
acuugagcuacuccaggug

SEQ ID NO: 2842369 - RNA, 19 nt, Artificial Sequence
  Description of Artificial Sequence: Synthetic oligonucleotide
auaugugucuguauguaca

SEQ ID NO: 2842370 - RNA, 19 nt, Artificial Sequence
  Description of Artificial Sequence: Synthetic oligonucleotide
agaccaauucguagggccc

SEQ ID NO: 2842371 - RNA, 19 nt, Artificial Sequence
  Description of Artificial Sequence: Synthetic oligonucleotide
uguccauguauaugugucu

SEQ ID NO: 2842372 - RNA, 19 nt, Artificial Sequence
  Description of Artificial Sequence: Synthetic oligonucleotide
cacggauuaugauaaucac

SEQ ID NO: 2842373 - RNA, 19 nt, Artificial Sequence
  Description of Artificial Sequence: Synthetic oligonucleotide
acacggauuaugauaauca

SEQ ID NO: 2842374 - RNA, 19 nt, Artificial Sequence
  Description of Artificial Sequence: Synthetic oligonucleotide
cugacacggauuaugauaa

SEQ ID NO: 2842375 - RNA, 19 nt, Artificial Sequence
  Description of Artificial Sequence: Synthetic oligonucleotide
uauuaggaggucaguacuu

SEQ ID NO: 2842376 - RNA, 19 nt, Artificial Sequence
  Description of Artificial Sequence: Synthetic oligonucleotide
cauuuucguucugacacgg

SEQ ID NO: 2842377 - RNA, 19 nt, Artificial Sequence
  Description of Artificial Sequence: Synthetic oligonucleotide
uggaaggaguuagacagca

SEQ ID NO: 2842378 - RNA, 19 nt, Artificial Sequence
  Description of Artificial Sequence: Synthetic oligonucleotide
uaugugucuguauguacau

SEQ ID NO: 2842379 - RNA, 19 nt, Artificial Sequence
  Description of Artificial Sequence: Synthetic oligonucleotide
caucacaagugucauuuuc

SEQ ID NO: 2842380 - RNA, 19 nt, Artificial Sequence
  Description of Artificial Sequence: Synthetic oligonucleotide
uaaauauuaggaggucagu

SEQ ID NO: 2842381 - RNA, 19 nt, Artificial Sequence
  Description of Artificial Sequence: Synthetic oligonucleotide
uguugugcacuuucugacu

SEQ ID NO: 2842382 - RNA, 19 nt, Artificial Sequence
  Description of Artificial Sequence: Synthetic oligonucleotide
acauauauauauauaugua

SEQ ID NO: 2842383 - RNA, 19 nt, Artificial Sequence
  Description of Artificial Sequence: Synthetic oligonucleotide
gguggggacagacauuggg

SEQ ID NO: 2842384 - RNA, 19 nt, Artificial Sequence
  Description of Artificial Sequence: Synthetic oligonucleotide
ugguggacacggcacagca

SEQ ID NO: 2842385 - RNA, 19 nt, Artificial Sequence
  Description of Artificial Sequence: Synthetic oligonucleotide
gaagccagagaaggaagcc

SEQ ID NO: 2842386 - RNA, 19 nt, Artificial Sequence
  Description of Artificial Sequence: Synthetic oligonucleotide
acuucuuaauuuaauggaa

SEQ ID NO: 2842387 - RNA, 19 nt, Artificial Sequence
  Description of Artificial Sequence: Synthetic oligonucleotide
uagcaaauauguguaugca

SEQ ID NO: 2842388 - RNA, 19 nt, Artificial Sequence
  Description of Artificial Sequence: Synthetic oligonucleotide
aguaaacacuuaaauauua

SEQ ID NO: 2842389 - RNA, 19 nt, Artificial Sequence
  Description of Artificial Sequence: Synthetic oligonucleotide
gugucaaaacaucaucaca

SEQ ID NO: 2842390 - RNA, 19 nt, Artificial Sequence
  Description of Artificial Sequence: Synthetic oligonucleotide
acuugcugcaagauuuagg

SEQ ID NO: 2842391 - RNA, 19 nt, Artificial Sequence
  Description of Artificial Sequence: Synthetic oligonucleotide
uugcaaguggaguagucua

SEQ ID NO: 2842392 - RNA, 19 nt, Artificial Sequence
  Description of Artificial Sequence: Synthetic oligonucleotide
uuaggaggucaguacuucu

SEQ ID NO: 2842393 - RNA, 19 nt, Artificial Sequence
  Description of Artificial Sequence: Synthetic oligonucleotide
uucugacucacuugcugca

SEQ ID NO: 2842394 - RNA, 19 nt, Artificial Sequence
  Description of Artificial Sequence: Synthetic oligonucleotide
gagacuugagcuacuccag

SEQ ID NO: 2842395 - RNA, 19 nt, Artificial Sequence
  Description of Artificial Sequence: Synthetic oligonucleotide
cuccuggauaggcagagac

SEQ ID NO: 2842396 - RNA, 19 nt, Artificial Sequence
  Description of Artificial Sequence: Synthetic oligonucleotide
uuaugauaaucacgcugaa

SEQ ID NO: 2842397 - RNA, 19 nt, Artificial Sequence
  Description of Artificial Sequence: Synthetic oligonucleotide
gucaguacuucuuaauuua

SEQ ID NO: 2842398 - RNA, 19 nt, Artificial Sequence
  Description of Artificial Sequence: Synthetic oligonucleotide
acagcagauaguaaacacu

SEQ ID NO: 2842399 - RNA, 19 nt, Artificial Sequence
  Description of Artificial Sequence: Synthetic oligonucleotide
uggggacagacauugggaa

SEQ ID NO: 2842400 - RNA, 19 nt, Artificial Sequence
  Description of Artificial Sequence: Synthetic oligonucleotide
gggacagacauugggaagg

SEQ ID NO: 2842401 - RNA, 19 nt, Artificial Sequence
  Description of Artificial Sequence: Synthetic oligonucleotide
cagucaguagcaaauaugu

SEQ ID NO: 2842402 - RNA, 19 nt, Artificial Sequence
  Description of Artificial Sequence: Synthetic oligonucleotide
cacuuaaauauuaggaggu

SEQ ID NO: 2842403 - RNA, 19 nt, Artificial Sequence
  Description of Artificial Sequence: Synthetic oligonucleotide
ggugucaaaacaucaucac

SEQ ID NO: 2842404 - RNA, 19 nt, Artificial Sequence
  Description of Artificial Sequence: Synthetic oligonucleotide
ugagcuacuccaggugggg

SEQ ID NO: 2842405 - RNA, 19 nt, Artificial Sequence
  Description of Artificial Sequence: Synthetic oligonucleotide
aggugucaaaacaucauca

SEQ ID NO: 2842406 - RNA, 19 nt, Artificial Sequence
  Description of Artificial Sequence: Synthetic oligonucleotide
guugugcacuuucugacuc

SEQ ID NO: 2842407 - RNA, 19 nt, Artificial Sequence
  Description of Artificial Sequence: Synthetic oligonucleotide
gaaaugaauguugugcacu

SEQ ID NO: 2842408 - RNA, 19 nt, Artificial Sequence
  Description of Artificial Sequence: Synthetic oligonucleotide
uuucguucugacacggauu

SEQ ID NO: 2842409 - RNA, 19 nt, Artificial Sequence
  Description of Artificial Sequence: Synthetic oligonucleotide
aggucaguacuucuuaauu

SEQ ID NO: 2842410 - RNA, 19 nt, Artificial Sequence
  Description of Artificial Sequence: Synthetic oligonucleotide
agagaccaauucguagggc

SEQ ID NO: 2842411 - RNA, 19 nt, Artificial Sequence
  Description of Artificial Sequence: Synthetic oligonucleotide
guaugcauauauguccaug

SEQ ID NO: 2842412 - RNA, 19 nt, Artificial Sequence
  Description of Artificial Sequence: Synthetic oligonucleotide
aggaguuagacagcagcag

SEQ ID NO: 2842413 - RNA, 19 nt, Artificial Sequence
  Description of Artificial Sequence: Synthetic oligonucleotide
uaugauaaucacgcugaaa

SEQ ID NO: 2842414 - RNA, 19 nt, Artificial Sequence
  Description of Artificial Sequence: Synthetic oligonucleotide
aggacgugggugcuccugg

SEQ ID NO: 2842415 - RNA, 19 nt, Artificial Sequence
  Description of Artificial Sequence: Synthetic oligonucleotide
aggguggggacagacauug

SEQ ID NO: 2842416 - RNA, 19 nt, Artificial Sequence
  Description of Artificial Sequence: Synthetic oligonucleotide
aaauauguguaugcauaua

SEQ ID NO: 2842417 - RNA, 19 nt, Artificial Sequence
  Description of Artificial Sequence: Synthetic oligonucleotide
uaaucacgcugaaaugaau

SEQ ID NO: 2842418 - RNA, 19 nt, Artificial Sequence
  Description of Artificial Sequence: Synthetic oligonucleotide
gacacggauuaugauaauc

SEQ ID NO: 2842419 - RNA, 19 nt, Artificial Sequence
  Description of Artificial Sequence: Synthetic oligonucleotide
ugacucacuugcugcaaga

SEQ ID NO: 2842420 - RNA, 19 nt, Artificial Sequence
  Description of Artificial Sequence: Synthetic oligonucleotide
uccauguauaugugucugu

SEQ ID NO: 2842421 - RNA, 19 nt, Artificial Sequence
  Description of Artificial Sequence: Synthetic oligonucleotide
auaaagggauuuaaauuaa

SEQ ID NO: 2842422 - RNA, 19 nt, Artificial Sequence
  Description of Artificial Sequence: Synthetic oligonucleotide
cagacauugggaagguguc

SEQ ID NO: 2842423 - RNA, 19 nt, Artificial Sequence
  Description of Artificial Sequence: Synthetic oligonucleotide
agugucauuuucguucuga

SEQ ID NO: 2842424 - RNA, 19 nt, Artificial Sequence
  Description of Artificial Sequence: Synthetic oligonucleotide
ggugcuccuggauaggcag

SEQ ID NO: 2842425 - RNA, 19 nt, Artificial Sequence
  Description of Artificial Sequence: Synthetic oligonucleotide
aagccagucaguagcaaau

SEQ ID NO: 2842426 - RNA, 19 nt, Artificial Sequence
  Description of Artificial Sequence: Synthetic oligonucleotide
ggcagagaccaauucguag

SEQ ID NO: 2842427 - RNA, 19 nt, Artificial Sequence
  Description of Artificial Sequence: Synthetic oligonucleotide
gaagccagucaguagcaaa

SEQ ID NO: 2842428 - RNA, 19 nt, Artificial Sequence
  Description of Artificial Sequence: Synthetic oligonucleotide
gcagauaguaaacacuuaa

SEQ ID NO: 2842429 - RNA, 19 nt, Artificial Sequence
  Description of Artificial Sequence: Synthetic oligonucleotide
cuuugcaaguggaguaguc

SEQ ID NO: 2842430 - RNA, 19 nt, Artificial Sequence
  Description of Artificial Sequence: Synthetic oligonucleotide
ucccaugccagcagucucu

SEQ ID NO: 2842431 - RNA, 19 nt, Artificial Sequence
  Description of Artificial Sequence: Synthetic oligonucleotide
auggaaggaguuagacagc

SEQ ID NO: 2842432 - RNA, 19 nt, Artificial Sequence
  Description of Artificial Sequence: Synthetic oligonucleotide
cagauaguaaacacuuaaa

SEQ ID NO: 2842433 - RNA, 19 nt, Artificial Sequence
  Description of Artificial Sequence: Synthetic oligonucleotide
ugcuccuggauaggcagag

SEQ ID NO: 2842434 - RNA, 19 nt, Artificial Sequence
  Description of Artificial Sequence: Synthetic oligonucleotide
acacggcacagcaggaagc

SEQ ID NO: 2842435 - RNA, 19 nt, Artificial Sequence
  Description of Artificial Sequence: Synthetic oligonucleotide
gugucauuuucguucugac

SEQ ID NO: 2842436 - RNA, 19 nt, Artificial Sequence
  Description of Artificial Sequence: Synthetic oligonucleotide
guuagacagcagcagcuuc

SEQ ID NO: 2842437 - RNA, 19 nt, Artificial Sequence
  Description of Artificial Sequence: Synthetic oligonucleotide
ggaguagucuaggaucugg

SEQ ID NO: 2842438 - RNA, 19 nt, Artificial Sequence
  Description of Artificial Sequence: Synthetic oligonucleotide
gaucugguggacacggcac

SEQ ID NO: 2842439 - RNA, 19 nt, Artificial Sequence
  Description of Artificial Sequence: Synthetic oligonucleotide
auaaucacgcugaaaugaa

SEQ ID NO: 2842440 - RNA, 19 nt, Artificial Sequence
  Description of Artificial Sequence: Synthetic oligonucleotide
guguccauccauaaaggga

SEQ ID NO: 2842441 - RNA, 19 nt, Artificial Sequence
  Description of Artificial Sequence: Synthetic oligonucleotide
guccauguauaugugucug

SEQ ID NO: 2842442 - RNA, 19 nt, Artificial Sequence
  Description of Artificial Sequence: Synthetic oligonucleotide
agaaggaagccagucagua

SEQ ID NO: 2842443 - RNA, 19 nt, Artificial Sequence
  Description of Artificial Sequence: Synthetic oligonucleotide
guguaugcauauaugucca

SEQ ID NO: 2842444 - RNA, 19 nt, Artificial Sequence
  Description of Artificial Sequence: Synthetic oligonucleotide
aaaagagacuugagcuacu

SEQ ID NO: 2842445 - RNA, 19 nt, Artificial Sequence
  Description of Artificial Sequence: Synthetic oligonucleotide
uugugcacuuucugacuca

SEQ ID NO: 2842446 - RNA, 19 nt, Artificial Sequence
  Description of Artificial Sequence: Synthetic oligonucleotide
gagaggacgugggugcucc

SEQ ID NO: 2842447 - RNA, 19 nt, Artificial Sequence
  Description of Artificial Sequence: Synthetic oligonucleotide
gaccaauucguagggcccc

SEQ ID NO: 2842448 - RNA, 19 nt, Artificial Sequence
  Description of Artificial Sequence: Synthetic oligonucleotide
cugacucacuugcugcaag

SEQ ID NO: 2842449 - RNA, 19 nt, Artificial Sequence
  Description of Artificial Sequence: Synthetic oligonucleotide
uggauaggcagagaccaau

SEQ ID NO: 2842450 - RNA, 19 nt, Artificial Sequence
  Description of Artificial Sequence: Synthetic oligonucleotide
uguaugcauauauguccau

SEQ ID NO: 2842451 - RNA, 19 nt, Artificial Sequence
  Description of Artificial Sequence: Synthetic oligonucleotide
ccagucaguagcaaauaug

SEQ ID NO: 2842452 - RNA, 19 nt, Artificial Sequence
  Description of Artificial Sequence: Synthetic oligonucleotide
ugugcacuuucugacucac

SEQ ID NO: 2842453 - RNA, 19 nt, Artificial Sequence
  Description of Artificial Sequence: Synthetic oligonucleotide
ucugguggacacggcacag

SEQ ID NO: 2842454 - RNA, 19 nt, Artificial Sequence
  Description of Artificial Sequence: Synthetic oligonucleotide
gacauugggaaggugucaa

SEQ ID NO: 2842455 - RNA, 19 nt, Artificial Sequence
  Description of Artificial Sequence: Synthetic oligonucleotide
guucugacacggauuauga

SEQ ID NO: 2842456 - RNA, 19 nt, Artificial Sequence
  Description of Artificial Sequence: Synthetic oligonucleotide
aucugguggacacggcaca

SEQ ID NO: 2842457 - RNA, 19 nt, Artificial Sequence
  Description of Artificial Sequence: Synthetic oligonucleotide
auguacauauauauauaua

SEQ ID NO: 2842458 - RNA, 19 nt, Artificial Sequence
  Description of Artificial Sequence: Synthetic oligonucleotide
uucugacacggauuaugau

SEQ ID NO: 2842459 - RNA, 19 nt, Artificial Sequence
  Description of Artificial Sequence: Synthetic oligonucleotide
gcaaauauguguaugcaua

SEQ ID NO: 2842460 - RNA, 19 nt, Artificial Sequence
  Description of Artificial Sequence: Synthetic oligonucleotide
augccagcagucucugugu

SEQ ID NO: 2842461 - RNA, 19 nt, Artificial Sequence
  Description of Artificial Sequence: Synthetic oligonucleotide
augcauauauguccaugua

SEQ ID NO: 2842462 - RNA, 19 nt, Artificial Sequence
  Description of Artificial Sequence: Synthetic oligonucleotide
agucaguagcaaauaugug

SEQ ID NO: 2842463 - RNA, 19 nt, Artificial Sequence
  Description of Artificial Sequence: Synthetic oligonucleotide
acucacuugcugcaagauu

SEQ ID NO: 2842464 - RNA, 19 nt, Artificial Sequence
  Description of Artificial Sequence: Synthetic oligonucleotide
auguauacacacacacaca

SEQ ID NO: 2842465 - RNA, 19 nt, Artificial Sequence
  Description of Artificial Sequence: Synthetic oligonucleotide
ucacuugcugcaagauuua

SEQ ID NO: 2842466 - RNA, 19 nt, Artificial Sequence
  Description of Artificial Sequence: Synthetic oligonucleotide
aggaggucaguacuucuua

SEQ ID NO: 2842467 - RNA, 19 nt, Artificial Sequence
  Description of Artificial Sequence: Synthetic oligonucleotide
auauguccauguauaugug

SEQ ID NO: 2842468 - RNA, 19 nt, Artificial Sequence
  Description of Artificial Sequence: Synthetic oligonucleotide
aaugaauguugugcacuuu

SEQ ID NO: 2842469 - RNA, 19 nt, Artificial Sequence
  Description of Artificial Sequence: Synthetic oligonucleotide
agucucuguguccauccau

SEQ ID NO: 2842470 - RNA, 19 nt, Artificial Sequence
  Description of Artificial Sequence: Synthetic oligonucleotide
cagagaaggaagccaguca

SEQ ID NO: 2842471 - RNA, 19 nt, Artificial Sequence
  Description of Artificial Sequence: Synthetic oligonucleotide
cuaggaucugguggacacg

SEQ ID NO: 2842472 - RNA, 19 nt, Artificial Sequence
  Description of Artificial Sequence: Synthetic oligonucleotide
gacuugagcuacuccaggu

SEQ ID NO: 2842473 - RNA, 19 nt, Artificial Sequence
  Description of Artificial Sequence: Synthetic oligonucleotide
agucuaggaucugguggac

SEQ ID NO: 2842474 - RNA, 19 nt, Artificial Sequence
  Description of Artificial Sequence: Synthetic oligonucleotide
aggggagaggacgugggug

SEQ ID NO: 2842475 - RNA, 19 nt, Artificial Sequence
  Description of Artificial Sequence: Synthetic oligonucleotide
gcagucucuguguccaucc

SEQ ID NO: 2842476 - RNA, 19 nt, Artificial Sequence
  Description of Artificial Sequence: Synthetic oligonucleotide
ggaaggugucaaaacauca

SEQ ID NO: 2842477 - RNA, 19 nt, Artificial Sequence
  Description of Artificial Sequence: Synthetic oligonucleotide
caaauauguguaugcauau

SEQ ID NO: 2842478 - RNA, 19 nt, Artificial Sequence
  Description of Artificial Sequence: Synthetic oligonucleotide
ucacgcugaaaugaauguu

SEQ ID NO: 2842479 - RNA, 19 nt, Artificial Sequence
  Description of Artificial Sequence: Synthetic oligonucleotide
cacggcacagcaggaagcc

SEQ ID NO: 2842480 - RNA, 19 nt, Artificial Sequence
  Description of Artificial Sequence: Synthetic oligonucleotide
gcaaguggaguagucuagg

SEQ ID NO: 2842481 - RNA, 19 nt, Artificial Sequence
  Description of Artificial Sequence: Synthetic oligonucleotide
gcauauauguccauguaua

SEQ ID NO: 2842482 - RNA, 19 nt, Artificial Sequence
  Description of Artificial Sequence: Synthetic oligonucleotide
uggacacggcacagcagga

SEQ ID NO: 2842483 - RNA, 19 nt, Artificial Sequence
  Description of Artificial Sequence: Synthetic oligonucleotide
guauacacacacacacaca

SEQ ID NO: 2842484 - RNA, 19 nt, Artificial Sequence
  Description of Artificial Sequence: Synthetic oligonucleotide
auuuaggggagaggacgug

SEQ ID NO: 2842485 - RNA, 19 nt, Artificial Sequence
  Description of Artificial Sequence: Synthetic oligonucleotide
ugggugcuccuggauaggc

SEQ ID NO: 2842486 - RNA, 19 nt, Artificial Sequence
  Description of Artificial Sequence: Synthetic oligonucleotide
caaguggaguagucuagga

SEQ ID NO: 2842487 - RNA, 19 nt, Artificial Sequence
  Description of Artificial Sequence: Synthetic oligonucleotide
auccauaaagggauuuaaa

SEQ ID NO: 2842488 - RNA, 19 nt, Artificial Sequence
  Description of Artificial Sequence: Synthetic oligonucleotide
gcugcaagauuuaggggag

SEQ ID NO: 2842489 - RNA, 19 nt, Artificial Sequence
  Description of Artificial Sequence: Synthetic oligonucleotide
cauccauaaagggauuuaa

SEQ ID NO: 2842490 - RNA, 19 nt, Artificial Sequence
  Description of Artificial Sequence: Synthetic oligonucleotide
gcuucaaaagagacuugag

SEQ ID NO: 2842491 - RNA, 19 nt, Artificial Sequence
  Description of Artificial Sequence: Synthetic oligonucleotide
gucuguauguacauauaua

SEQ ID NO: 2842492 - RNA, 19 nt, Artificial Sequence
  Description of Artificial Sequence: Synthetic oligonucleotide
agacauugggaagguguca

SEQ ID NO: 2842493 - RNA, 19 nt, Artificial Sequence
  Description of Artificial Sequence: Synthetic oligonucleotide
gaaggugucaaaacaucau

SEQ ID NO: 2842494 - RNA, 19 nt, Artificial Sequence
  Description of Artificial Sequence: Synthetic oligonucleotide
cagcagauaguaaacacuu

SEQ ID NO: 2842495 - RNA, 19 nt, Artificial Sequence
  Description of Artificial Sequence: Synthetic oligonucleotide
acuuugcaaguggaguagu

SEQ ID NO: 2842496 - RNA, 19 nt, Artificial Sequence
  Description of Artificial Sequence: Synthetic oligonucleotide
ucugacucacuugcugcaa

SEQ ID NO: 2842497 - RNA, 19 nt, Artificial Sequence
  Description of Artificial Sequence: Synthetic oligonucleotide
gauuuaggggagaggacgu

SEQ ID NO: 2842498 - RNA, 19 nt, Artificial Sequence
  Description of Artificial Sequence: Synthetic oligonucleotide
acgcugaaaugaauguugu

SEQ ID NO: 2842499 - RNA, 19 nt, Artificial Sequence
  Description of Artificial Sequence: Synthetic oligonucleotide
ggaucugguggacacggca

SEQ ID NO: 2842500 - RNA, 19 nt, Artificial Sequence
  Description of Artificial Sequence: Synthetic oligonucleotide
caagugucauuuucguucu

SEQ ID NO: 2842501 - RNA, 19 nt, Artificial Sequence
  Description of Artificial Sequence: Synthetic oligonucleotide
guggggacagacauuggga

SEQ ID NO: 2842502 - RNA, 19 nt, Artificial Sequence
  Description of Artificial Sequence: Synthetic oligonucleotide
ucaucacaagugucauuuu

SEQ ID NO: 2842503 - RNA, 19 nt, Artificial Sequence
  Description of Artificial Sequence: Synthetic oligonucleotide
auacacacacacacacaca

SEQ ID NO: 2842504 - RNA, 19 nt, Artificial Sequence
  Description of Artificial Sequence: Synthetic oligonucleotide
cauugggaaggugucaaaa

SEQ ID NO: 2842505 - RNA, 19 nt, Artificial Sequence
  Description of Artificial Sequence: Synthetic oligonucleotide
gcacuuucugacucacuug

SEQ ID NO: 2842506 - RNA, 19 nt, Artificial Sequence
  Description of Artificial Sequence: Synthetic oligonucleotide
cugcuucaaaagagacuug

SEQ ID NO: 2842507 - RNA, 19 nt, Artificial Sequence
  Description of Artificial Sequence: Synthetic oligonucleotide
ugccagcagucucuguguc

SEQ ID NO: 2842508 - RNA, 19 nt, Artificial Sequence
  Description of Artificial Sequence: Synthetic oligonucleotide
cacuugcugcaagauuuag

SEQ ID NO: 2842509 - RNA, 19 nt, Artificial Sequence
  Description of Artificial Sequence: Synthetic oligonucleotide
acauugggaaggugucaaa

SEQ ID NO: 2842510 - RNA, 19 nt, Artificial Sequence
  Description of Artificial Sequence: Synthetic oligonucleotide
gaggucaguacuucuuaau

SEQ ID NO: 2842511 - RNA, 19 nt, Artificial Sequence
  Description of Artificial Sequence: Synthetic oligonucleotide
acgugggugcuccuggaua

SEQ ID NO: 2842512 - RNA, 19 nt, Artificial Sequence
  Description of Artificial Sequence: Synthetic oligonucleotide
uggaguagucuaggaucug

SEQ ID NO: 2842513 - RNA, 19 nt, Artificial Sequence
  Description of Artificial Sequence: Synthetic oligonucleotide
cucccaugccagcagucuc

SEQ ID NO: 2842514 - RNA, 19 nt, Artificial Sequence
  Description of Artificial Sequence: Synthetic oligonucleotide
cucugcuucaaaagagacu

SEQ ID NO: 2842515 - RNA, 19 nt, Artificial Sequence
  Description of Artificial Sequence: Synthetic oligonucleotide
gaggacgugggugcuccug

SEQ ID NO: 2842516 - RNA, 19 nt, Artificial Sequence
  Description of Artificial Sequence: Synthetic oligonucleotide
guggaguagucuaggaucu

SEQ ID NO: 2842517 - RNA, 19 nt, Artificial Sequence
  Description of Artificial Sequence: Synthetic oligonucleotide
cacagcaggaagccagaga

SEQ ID NO: 2842518 - RNA, 19 nt, Artificial Sequence
  Description of Artificial Sequence: Synthetic oligonucleotide
ugacacggauuaugauaau

SEQ ID NO: 2842519 - RNA, 19 nt, Artificial Sequence
  Description of Artificial Sequence: Synthetic oligonucleotide
acuuucugacucacuugcu

SEQ ID NO: 2842520 - RNA, 19 nt, Artificial Sequence
  Description of Artificial Sequence: Synthetic oligonucleotide
gggaaggugucaaaacauc

SEQ ID NO: 2842521 - RNA, 19 nt, Artificial Sequence
  Description of Artificial Sequence: Synthetic oligonucleotide
aggaagccagucaguagca

SEQ ID NO: 2842522 - RNA, 19 nt, Artificial Sequence
  Description of Artificial Sequence: Synthetic oligonucleotide
ggucaguacuucuuaauuu

SEQ ID NO: 2842523 - RNA, 19 nt, Artificial Sequence
  Description of Artificial Sequence: Synthetic oligonucleotide
ccauaaagggauuuaaauu

SEQ ID NO: 2842524 - RNA, 19 nt, Artificial Sequence
  Description of Artificial Sequence: Synthetic oligonucleotide
cgugggugcuccuggauag

SEQ ID NO: 2842525 - RNA, 19 nt, Artificial Sequence
  Description of Artificial Sequence: Synthetic oligonucleotide
auuuucguucugacacgga

SEQ ID NO: 2842526 - RNA, 19 nt, Artificial Sequence
  Description of Artificial Sequence: Synthetic oligonucleotide
cugguggacacggcacagc

SEQ ID NO: 2842527 - RNA, 19 nt, Artificial Sequence
  Description of Artificial Sequence: Synthetic oligonucleotide
gaguagucuaggaucuggu

SEQ ID NO: 2842528 - RNA, 19 nt, Artificial Sequence
  Description of Artificial Sequence: Synthetic oligonucleotide
gucucuguguccauccaua

SEQ ID NO: 2842529 - RNA, 19 nt, Artificial Sequence
  Description of Artificial Sequence: Synthetic oligonucleotide
caguacuucuuaauuuaau

SEQ ID NO: 2842530 - RNA, 19 nt, Artificial Sequence
  Description of Artificial Sequence: Synthetic oligonucleotide
cguucugacacggauuaug

SEQ ID NO: 2842531 - RNA, 19 nt, Artificial Sequence
  Description of Artificial Sequence: Synthetic oligonucleotide
ggaggucaguacuucuuaa

SEQ ID NO: 2842532 - RNA, 19 nt, Artificial Sequence
  Description of Artificial Sequence: Synthetic oligonucleotide
agcagauaguaaacacuua

SEQ ID NO: 2842533 - RNA, 19 nt, Artificial Sequence
  Description of Artificial Sequence: Synthetic oligonucleotide
ggaaggaguuagacagcag

SEQ ID NO: 2842534 - RNA, 19 nt, Artificial Sequence
  Description of Artificial Sequence: Synthetic oligonucleotide
ggaggguggggacagacau

SEQ ID NO: 2842535 - RNA, 19 nt, Artificial Sequence
  Description of Artificial Sequence: Synthetic oligonucleotide
agcagcuucucugcuucaa

SEQ ID NO: 2842536 - RNA, 19 nt, Artificial Sequence
  Description of Artificial Sequence: Synthetic oligonucleotide
gccagcagucucugugucc

SEQ ID NO: 2842537 - RNA, 19 nt, Artificial Sequence
  Description of Artificial Sequence: Synthetic oligonucleotide
cggcacagcaggaagccag

SEQ ID NO: 2842538 - RNA, 19 nt, Artificial Sequence
  Description of Artificial Sequence: Synthetic oligonucleotide
gagaaggaagccagucagu

SEQ ID NO: 2842539 - RNA, 19 nt, Artificial Sequence
  Description of Artificial Sequence: Synthetic oligonucleotide
ggauuaugauaaucacgcu

SEQ ID NO: 2842540 - RNA, 19 nt, Artificial Sequence
  Description of Artificial Sequence: Synthetic oligonucleotide
augugucuguauguacaua

SEQ ID NO: 2842541 - RNA, 19 nt, Artificial Sequence
  Description of Artificial Sequence: Synthetic oligonucleotide
agccagucaguagcaaaua

SEQ ID NO: 2842542 - RNA, 19 nt, Artificial Sequence
  Description of Artificial Sequence: Synthetic oligonucleotide
gguggacacggcacagcag

SEQ ID NO: 2842543 - RNA, 19 nt, Artificial Sequence
  Description of Artificial Sequence: Synthetic oligonucleotide
gugucuguauguacauaua

SEQ ID NO: 2842544 - RNA, 19 nt, Artificial Sequence
  Description of Artificial Sequence: Synthetic oligonucleotide
cuggauaggcagagaccaa

SEQ ID NO: 2842545 - RNA, 19 nt, Artificial Sequence
  Description of Artificial Sequence: Synthetic oligonucleotide
gacucacuugcugcaagau

SEQ ID NO: 2842546 - RNA, 19 nt, Artificial Sequence
  Description of Artificial Sequence: Synthetic oligonucleotide
agaggacgugggugcuccu

SEQ ID NO: 2842547 - RNA, 19 nt, Artificial Sequence
  Description of Artificial Sequence: Synthetic oligonucleotide
cagucucuguguccaucca

SEQ ID NO: 2842548 - RNA, 19 nt, Artificial Sequence
  Description of Artificial Sequence: Synthetic oligonucleotide
ucguucugacacggauuau

SEQ ID NO: 2842549 - RNA, 19 nt, Artificial Sequence
  Description of Artificial Sequence: Synthetic oligonucleotide
cacaagugucauuuucguu

SEQ ID NO: 2842550 - RNA, 19 nt, Artificial Sequence
  Description of Artificial Sequence: Synthetic oligonucleotide
aggcagagaccaauucgua

SEQ ID NO: 2842551 - RNA, 19 nt, Artificial Sequence
  Description of Artificial Sequence: Synthetic oligonucleotide
cgcugaaaugaauguugug

SEQ ID NO: 2842552 - RNA, 19 nt, Artificial Sequence
  Description of Artificial Sequence: Synthetic oligonucleotide
caguagcaaauauguguau

SEQ ID NO: 2842553 - RNA, 19 nt, Artificial Sequence
  Description of Artificial Sequence: Synthetic oligonucleotide
acggcacagcaggaagcca

SEQ ID NO: 2842554 - RNA, 19 nt, Artificial Sequence
  Description of Artificial Sequence: Synthetic oligonucleotide
gacgugggugcuccuggau

SEQ ID NO: 2842555 - RNA, 19 nt, Artificial Sequence
  Description of Artificial Sequence: Synthetic oligonucleotide
gccagucaguagcaaauau

SEQ ID NO: 2842556 - RNA, 19 nt, Artificial Sequence
  Description of Artificial Sequence: Synthetic oligonucleotide
gugcuccuggauaggcaga

SEQ ID NO: 2842557 - RNA, 19 nt, Artificial Sequence
  Description of Artificial Sequence: Synthetic oligonucleotide
caucaucacaagugucauu

SEQ ID NO: 2842558 - RNA, 19 nt, Artificial Sequence
  Description of Artificial Sequence: Synthetic oligonucleotide
ggacgugggugcuccugga

SEQ ID NO: 2842559 - RNA, 19 nt, Artificial Sequence
  Description of Artificial Sequence: Synthetic oligonucleotide
ggcacagcaggaagccaga

SEQ ID NO: 2842560 - RNA, 19 nt, Artificial Sequence
  Description of Artificial Sequence: Synthetic oligonucleotide
ggguggggacagacauugg

SEQ ID NO: 2842561 - RNA, 19 nt, Artificial Sequence
  Description of Artificial Sequence: Synthetic oligonucleotide
ggaagccagucaguagcaa

SEQ ID NO: 2842562 - RNA, 19 nt, Artificial Sequence
  Description of Artificial Sequence: Synthetic oligonucleotide
gggugcuccuggauaggca

SEQ ID NO: 2842563 - RNA, 19 nt, Artificial Sequence
  Description of Artificial Sequence: Synthetic oligonucleotide
ggacacggcacagcaggaa

SEQ ID NO: 2842564 - RNA, 19 nt, Artificial Sequence
  Description of Artificial Sequence: Synthetic oligonucleotide
gggaggguggggacagaca

SEQ ID NO: 2842565 - RNA, 19 nt, Artificial Sequence
  Description of Artificial Sequence: Synthetic oligonucleotide
ggagaggacgugggugcuc

SEQ ID NO: 2842566 - RNA, 19 nt, Artificial Sequence
  Description of Artificial Sequence: Synthetic oligonucleotide
ccauccauaaagggauuua

SEQ ID NO: 2842567 - RNA, 19 nt, Artificial Sequence
  Description of Artificial Sequence: Synthetic oligonucleotide
cccucccaugccagcaguc

SEQ ID NO: 2842568 - RNA, 19 nt, Artificial Sequence
  Description of Artificial Sequence: Synthetic oligonucleotide
ggauaggcagagaccaauu

SEQ ID NO: 2842569 - RNA, 19 nt, Artificial Sequence
  Description of Artificial Sequence: Synthetic oligonucleotide
ggacagacauugggaaggu

SEQ ID NO: 2842570 - RNA, 19 nt, Artificial Sequence
  Description of Artificial Sequence: Synthetic oligonucleotide
gcuccuggauaggcagaga

SEQ ID NO: 2842571 - RNA, 19 nt, Artificial Sequence
  Description of Artificial Sequence: Synthetic oligonucleotide
ccucccaugccagcagucu

SEQ ID NO: 2842572 - RNA, 19 nt, Artificial Sequence
  Description of Artificial Sequence: Synthetic oligonucleotide
ccaugccagcagucucugu

SEQ ID NO: 2842573 - RNA, 19 nt, Artificial Sequence
  Description of Artificial Sequence: Synthetic oligonucleotide
ccccucccaugccagcagu

SEQ ID NO: 2842574 - RNA, 19 nt, Artificial Sequence
  Description of Artificial Sequence: Synthetic oligonucleotide
aauaugaaaauuuauuacu

SEQ ID NO: 2842575 - RNA, 19 nt, Artificial Sequence
  Description of Artificial Sequence: Synthetic oligonucleotide
gaauaugaaaauuuauuac

SEQ ID NO: 2842576 - RNA, 19 nt, Artificial Sequence
  Description of Artificial Sequence: Synthetic oligonucleotide
ugaaaauuuauuacugugu

SEQ ID NO: 2842577 - RNA, 19 nt, Artificial Sequence
  Description of Artificial Sequence: Synthetic oligonucleotide
uuuuagaauaugaaaauuu

SEQ ID NO: 2842578 - RNA, 19 nt, Artificial Sequence
  Description of Artificial Sequence: Synthetic oligonucleotide
agaauaugaaaauuuauua

SEQ ID NO: 2842579 - RNA, 19 nt, Artificial Sequence
  Description of Artificial Sequence: Synthetic oligonucleotide
uuuagaauaugaaaauuua

SEQ ID NO: 2842580 - RNA, 19 nt, Artificial Sequence
  Description of Artificial Sequence: Synthetic oligonucleotide
augaaaauuuauuacugug

SEQ ID NO: 2842581 - RNA, 19 nt, Artificial Sequence
  Description of Artificial Sequence: Synthetic oligonucleotide
uuagaauaugaaaauuuau

SEQ ID NO: 2842582 - RNA, 19 nt, Artificial Sequence
  Description of Artificial Sequence: Synthetic oligonucleotide
uaugaaaauuuauuacugu

SEQ ID NO: 2842583 - RNA, 19 nt, Artificial Sequence
  Description of Artificial Sequence: Synthetic oligonucleotide
cuucuugccuuguacaggg

SEQ ID NO: 2842584 - RNA, 19 nt, Artificial Sequence
  Description of Artificial Sequence: Synthetic oligonucleotide
auaugaaaauuuauuacug

SEQ ID NO: 2842585 - RNA, 19 nt, Artificial Sequence
  Description of Artificial Sequence: Synthetic oligonucleotide
ucuugccuuguacagggcc

SEQ ID NO: 2842586 - RNA, 19 nt, Artificial Sequence
  Description of Artificial Sequence: Synthetic oligonucleotide
uccuucuugccuuguacag

SEQ ID NO: 2842587 - RNA, 19 nt, Artificial Sequence
  Description of Artificial Sequence: Synthetic oligonucleotide
ucuccuucuugccuuguac

SEQ ID NO: 2842588 - RNA, 19 nt, Artificial Sequence
  Description of Artificial Sequence: Synthetic oligonucleotide
cuugccuuguacagggcca

SEQ ID NO: 2842589 - RNA, 19 nt, Artificial Sequence
  Description of Artificial Sequence: Synthetic oligonucleotide
cuccuucuugccuuguaca

SEQ ID NO: 2842590 - RNA, 19 nt, Artificial Sequence
  Description of Artificial Sequence: Synthetic oligonucleotide
ccuuguacagggccaaaag

SEQ ID NO: 2842591 - RNA, 19 nt, Artificial Sequence
  Description of Artificial Sequence: Synthetic oligonucleotide
ccuucuugccuuguacagg

SEQ ID NO: 2842592 - RNA, 19 nt, Artificial Sequence
  Description of Artificial Sequence: Synthetic oligonucleotide
cucuccuucuugccuugua

SEQ ID NO: 2842593 - RNA, 19 nt, Artificial Sequence
  Description of Artificial Sequence: Synthetic oligonucleotide
gccuuguacagggccaaaa

SEQ ID NO: 2842594 - RNA, 19 nt, Artificial Sequence
  Description of Artificial Sequence: Synthetic oligonucleotide
gaagagaccacacuggucc

SEQ ID NO: 2842595 - RNA, 19 nt, Artificial Sequence
  Description of Artificial Sequence: Synthetic oligonucleotide
ucugguugcacauugagca

SEQ ID NO: 2842596 - RNA, 19 nt, Artificial Sequence
  Description of Artificial Sequence: Synthetic oligonucleotide
aaaacgcaaguccggagcc

SEQ ID NO: 2842597 - RNA, 19 nt, Artificial Sequence
  Description of Artificial Sequence: Synthetic oligonucleotide
uguaaugugccauacugcc

SEQ ID NO: 2842598 - RNA, 19 nt, Artificial Sequence
  Description of Artificial Sequence: Synthetic oligonucleotide
ugcaagagcaaaaccacgg

SEQ ID NO: 2842599 - RNA, 19 nt, Artificial Sequence
  Description of Artificial Sequence: Synthetic oligonucleotide
ucugauucuguccaggucu

SEQ ID NO: 2842600 - RNA, 19 nt, Artificial Sequence
  Description of Artificial Sequence: Synthetic oligonucleotide
ucaccuugaaaucugguug

SEQ ID NO: 2842601 - RNA, 19 nt, Artificial Sequence
  Description of Artificial Sequence: Synthetic oligonucleotide
agcacccaaucucagaucc

SEQ ID NO: 2842602 - RNA, 19 nt, Artificial Sequence
  Description of Artificial Sequence: Synthetic oligonucleotide
accaccuucaucuuccuac

SEQ ID NO: 2842603 - RNA, 19 nt, Artificial Sequence
  Description of Artificial Sequence: Synthetic oligonucleotide
uccucaaaacgcaaguccg

SEQ ID NO: 2842604 - RNA, 19 nt, Artificial Sequence
  Description of Artificial Sequence: Synthetic oligonucleotide
aacaaugagcaccacucag

SEQ ID NO: 2842605 - RNA, 19 nt, Artificial Sequence
  Description of Artificial Sequence: Synthetic oligonucleotide
gacauuuccaugcaagagc

SEQ ID NO: 2842606 - RNA, 19 nt, Artificial Sequence
  Description of Artificial Sequence: Synthetic oligonucleotide
cugaauuucccucugauuc

SEQ ID NO: 2842607 - RNA, 19 nt, Artificial Sequence
  Description of Artificial Sequence: Synthetic oligonucleotide
aguacuacuguguaggaga

SEQ ID NO: 2842608 - RNA, 19 nt, Artificial Sequence
  Description of Artificial Sequence: Synthetic oligonucleotide
ucugccgucaccuugaaau

SEQ ID NO: 2842609 - RNA, 19 nt, Artificial Sequence
  Description of Artificial Sequence: Synthetic oligonucleotide
ugcagcagugcaaucagcg

SEQ ID NO: 2842610 - RNA, 19 nt, Artificial Sequence
  Description of Artificial Sequence: Synthetic oligonucleotide
ucccacagaacaaugagca

SEQ ID NO: 2842611 - RNA, 19 nt, Artificial Sequence
  Description of Artificial Sequence: Synthetic oligonucleotide
agaacaaugagcaccacuc

SEQ ID NO: 2842612 - RNA, 19 nt, Artificial Sequence
  Description of Artificial Sequence: Synthetic oligonucleotide
cauguaaugugccauacug

SEQ ID NO: 2842613 - RNA, 19 nt, Artificial Sequence
  Description of Artificial Sequence: Synthetic oligonucleotide
aaucugguugcacauugag

SEQ ID NO: 2842614 - RNA, 19 nt, Artificial Sequence
  Description of Artificial Sequence: Synthetic oligonucleotide
aucacucugacacuuaaug

SEQ ID NO: 2842615 - RNA, 19 nt, Artificial Sequence
  Description of Artificial Sequence: Synthetic oligonucleotide
aagaagagggaagagacca

SEQ ID NO: 2842616 - RNA, 19 nt, Artificial Sequence
  Description of Artificial Sequence: Synthetic oligonucleotide
aagagcaaaaccacgguag

SEQ ID NO: 2842617 - RNA, 19 nt, Artificial Sequence
  Description of Artificial Sequence: Synthetic oligonucleotide
cuuccuacugucuuucucg

SEQ ID NO: 2842618 - RNA, 19 nt, Artificial Sequence
  Description of Artificial Sequence: Synthetic oligonucleotide
aaguccggagccuucugcc

SEQ ID NO: 2842619 - RNA, 19 nt, Artificial Sequence
  Description of Artificial Sequence: Synthetic oligonucleotide
ucuguccaggucuucaugg

SEQ ID NO: 2842620 - RNA, 19 nt, Artificial Sequence
  Description of Artificial Sequence: Synthetic oligonucleotide
acaucugcucuucugaguc

SEQ ID NO: 2842621 - RNA, 19 nt, Artificial Sequence
  Description of Artificial Sequence: Synthetic oligonucleotide
ccuuuaaucacucugacac

SEQ ID NO: 2842622 - RNA, 19 nt, Artificial Sequence
  Description of Artificial Sequence: Synthetic oligonucleotide
guaggagacauuuccaugc

SEQ ID NO: 2842623 - RNA, 19 nt, Artificial Sequence
  Description of Artificial Sequence: Synthetic oligonucleotide
gaaaucugguugcacauug

SEQ ID NO: 2842624 - RNA, 19 nt, Artificial Sequence
  Description of Artificial Sequence: Synthetic oligonucleotide
aaugugcagacaucugcuc

SEQ ID NO: 2842625 - RNA, 19 nt, Artificial Sequence
  Description of Artificial Sequence: Synthetic oligonucleotide
auaggggaaguguugcagc

SEQ ID NO: 2842626 - RNA, 19 nt, Artificial Sequence
  Description of Artificial Sequence: Synthetic oligonucleotide
agagcaaaaccacgguagc

SEQ ID NO: 2842627 - RNA, 19 nt, Artificial Sequence
  Description of Artificial Sequence: Synthetic oligonucleotide
uuuggcuccauguaaugug

SEQ ID NO: 2842628 - RNA, 19 nt, Artificial Sequence
  Description of Artificial Sequence: Synthetic oligonucleotide
uccaauuuuggcuccaugu

SEQ ID NO: 2842629 - RNA, 19 nt, Artificial Sequence
  Description of Artificial Sequence: Synthetic oligonucleotide
cuucugaguccucaaaacg

SEQ ID NO: 2842630 - RNA, 19 nt, Artificial Sequence
  Description of Artificial Sequence: Synthetic oligonucleotide
ucagauccaauuuuggcuc

SEQ ID NO: 2842631 - RNA, 19 nt, Artificial Sequence
  Description of Artificial Sequence: Synthetic oligonucleotide
acucacucuggccagcagc

SEQ ID NO: 2842632 - RNA, 19 nt, Artificial Sequence
  Description of Artificial Sequence: Synthetic oligonucleotide
uugcacauugagcagugag

SEQ ID NO: 2842633 - RNA, 19 nt, Artificial Sequence
  Description of Artificial Sequence: Synthetic oligonucleotide
ugcacauugagcagugagc

SEQ ID NO: 2842634 - RNA, 19 nt, Artificial Sequence
  Description of Artificial Sequence: Synthetic oligonucleotide
gagggaagagaccacacug

SEQ ID NO: 2842635 - RNA, 19 nt, Artificial Sequence
  Description of Artificial Sequence: Synthetic oligonucleotide
cuguguaggagacauuucc

SEQ ID NO: 2842636 - RNA, 19 nt, Artificial Sequence
  Description of Artificial Sequence: Synthetic oligonucleotide
cacucugacacuuaaugug

SEQ ID NO: 2842637 - RNA, 19 nt, Artificial Sequence
  Description of Artificial Sequence: Synthetic oligonucleotide
aaguggggucaccauaggg

SEQ ID NO: 2842638 - RNA, 19 nt, Artificial Sequence
  Description of Artificial Sequence: Synthetic oligonucleotide
agcaaaaccacgguagcac

SEQ ID NO: 2842639 - RNA, 19 nt, Artificial Sequence
  Description of Artificial Sequence: Synthetic oligonucleotide
ucucagauccaauuuuggc

SEQ ID NO: 2842640 - RNA, 19 nt, Artificial Sequence
  Description of Artificial Sequence: Synthetic oligonucleotide
uuucucgccaguacuacug

SEQ ID NO: 2842641 - RNA, 19 nt, Artificial Sequence
  Description of Artificial Sequence: Synthetic oligonucleotide
ucaggcucgccuuuaauca

SEQ ID NO: 2842642 - RNA, 19 nt, Artificial Sequence
  Description of Artificial Sequence: Synthetic oligonucleotide
uaaugugcagacaucugcu

SEQ ID NO: 2842643 - RNA, 19 nt, Artificial Sequence
  Description of Artificial Sequence: Synthetic oligonucleotide
ugaggguacugccaggacc

SEQ ID NO: 2842644 - RNA, 19 nt, Artificial Sequence
  Description of Artificial Sequence: Synthetic oligonucleotide
caugcaagagcaaaaccac

SEQ ID NO: 2842645 - RNA, 19 nt, Artificial Sequence
  Description of Artificial Sequence: Synthetic oligonucleotide
acucugacacuuaaugugc

SEQ ID NO: 2842646 - RNA, 19 nt, Artificial Sequence
  Description of Artificial Sequence: Synthetic oligonucleotide
caaaacgcaaguccggagc

SEQ ID NO: 2842647 - RNA, 19 nt, Artificial Sequence
  Description of Artificial Sequence: Synthetic oligonucleotide
aaucagcgccuccaccacc

SEQ ID NO: 2842648 - RNA, 19 nt, Artificial Sequence
  Description of Artificial Sequence: Synthetic oligonucleotide
acacuuaaugugcagacau

SEQ ID NO: 2842649 - RNA, 19 nt, Artificial Sequence
  Description of Artificial Sequence: Synthetic oligonucleotide
uguaggagacauuuccaug

SEQ ID NO: 2842650 - RNA, 19 nt, Artificial Sequence
  Description of Artificial Sequence: Synthetic oligonucleotide
uguguaggagacauuucca

SEQ ID NO: 2842651 - RNA, 19 nt, Artificial Sequence
  Description of Artificial Sequence: Synthetic oligonucleotide
ucuucugaguccucaaaac

SEQ ID NO: 2842652 - RNA, 19 nt, Artificial Sequence
  Description of Artificial Sequence: Synthetic oligonucleotide
uaaugugccauacugccuu

SEQ ID NO: 2842653 - RNA, 19 nt, Artificial Sequence
  Description of Artificial Sequence: Synthetic oligonucleotide
ucuucauggagccucucgu

SEQ ID NO: 2842654 - RNA, 19 nt, Artificial Sequence
  Description of Artificial Sequence: Synthetic oligonucleotide
uugagcagugagcacagcu

SEQ ID NO: 2842655 - RNA, 19 nt, Artificial Sequence
  Description of Artificial Sequence: Synthetic oligonucleotide
ugugcagaaggcagggcag

SEQ ID NO: 2842656 - RNA, 19 nt, Artificial Sequence
  Description of Artificial Sequence: Synthetic oligonucleotide
ugacacuuaaugugcagac

SEQ ID NO: 2842657 - RNA, 19 nt, Artificial Sequence
  Description of Artificial Sequence: Synthetic oligonucleotide
acuuaaugugcagacaucu

SEQ ID NO: 2842658 - RNA, 19 nt, Artificial Sequence
  Description of Artificial Sequence: Synthetic oligonucleotide
agcugucugaauuucccuc

SEQ ID NO: 2842659 - RNA, 19 nt, Artificial Sequence
  Description of Artificial Sequence: Synthetic oligonucleotide
uccaugcaagagcaaaacc

SEQ ID NO: 2842660 - RNA, 19 nt, Artificial Sequence
  Description of Artificial Sequence: Synthetic oligonucleotide
cuugaaaucugguugcaca

SEQ ID NO: 2842661 - RNA, 19 nt, Artificial Sequence
  Description of Artificial Sequence: Synthetic oligonucleotide
aguggggucaccauagggg

SEQ ID NO: 2842662 - RNA, 19 nt, Artificial Sequence
  Description of Artificial Sequence: Synthetic oligonucleotide
auguaaugugccauacugc

SEQ ID NO: 2842663 - RNA, 19 nt, Artificial Sequence
  Description of Artificial Sequence: Synthetic oligonucleotide
uucccucugauucugucca

SEQ ID NO: 2842664 - RNA, 19 nt, Artificial Sequence
  Description of Artificial Sequence: Synthetic oligonucleotide
acagaccucggccagccac

SEQ ID NO: 2842665 - RNA, 19 nt, Artificial Sequence
  Description of Artificial Sequence: Synthetic oligonucleotide
guccucaaaacgcaagucc

SEQ ID NO: 2842666 - RNA, 19 nt, Artificial Sequence
  Description of Artificial Sequence: Synthetic oligonucleotide
accauaggggaaguguugc

SEQ ID NO: 2842667 - RNA, 19 nt, Artificial Sequence
  Description of Artificial Sequence: Synthetic oligonucleotide
acagcugucugaauuuccc

SEQ ID NO: 2842668 - RNA, 19 nt, Artificial Sequence
  Description of Artificial Sequence: Synthetic oligonucleotide
ugaauuucccucugauucu

SEQ ID NO: 2842669 - RNA, 19 nt, Artificial Sequence
  Description of Artificial Sequence: Synthetic oligonucleotide
ugucuuucucgccaguacu

SEQ ID NO: 2842670 - RNA, 19 nt, Artificial Sequence
  Description of Artificial Sequence: Synthetic oligonucleotide
agucucuugaggguacugc

SEQ ID NO: 2842671 - RNA, 19 nt, Artificial Sequence
  Description of Artificial Sequence: Synthetic oligonucleotide
caaugagcaccacucaggc

SEQ ID NO: 2842672 - RNA, 19 nt, Artificial Sequence
  Description of Artificial Sequence: Synthetic oligonucleotide
uguugcagcagugcaauca

SEQ ID NO: 2842673 - RNA, 19 nt, Artificial Sequence
  Description of Artificial Sequence: Synthetic oligonucleotide
gcaagcagucucuugaggg

SEQ ID NO: 2842674 - RNA, 19 nt, Artificial Sequence
  Description of Artificial Sequence: Synthetic oligonucleotide
ucacucugacacuuaaugu

SEQ ID NO: 2842675 - RNA, 19 nt, Artificial Sequence
  Description of Artificial Sequence: Synthetic oligonucleotide
uuggcuccauguaaugugc

SEQ ID NO: 2842676 - RNA, 19 nt, Artificial Sequence
  Description of Artificial Sequence: Synthetic oligonucleotide
uuuaaucacucugacacuu

SEQ ID NO: 2842677 - RNA, 19 nt, Artificial Sequence
  Description of Artificial Sequence: Synthetic oligonucleotide
ucaaaacgcaaguccggag

SEQ ID NO: 2842678 - RNA, 19 nt, Artificial Sequence
  Description of Artificial Sequence: Synthetic oligonucleotide
ucgccuuuaaucacucuga

SEQ ID NO: 2842679 - RNA, 19 nt, Artificial Sequence
  Description of Artificial Sequence: Synthetic oligonucleotide
uuucccucugauucugucc

SEQ ID NO: 2842680 - RNA, 19 nt, Artificial Sequence
  Description of Artificial Sequence: Synthetic oligonucleotide
auacugccuuccuucaacg

SEQ ID NO: 2842681 - RNA, 19 nt, Artificial Sequence
  Description of Artificial Sequence: Synthetic oligonucleotide
accacgguagcacccaauc

SEQ ID NO: 2842682 - RNA, 19 nt, Artificial Sequence
  Description of Artificial Sequence: Synthetic oligonucleotide
acaaugagcaccacucagg

SEQ ID NO: 2842683 - RNA, 19 nt, Artificial Sequence
  Description of Artificial Sequence: Synthetic oligonucleotide
ucugacacuuaaugugcag

SEQ ID NO: 2842684 - RNA, 19 nt, Artificial Sequence
  Description of Artificial Sequence: Synthetic oligonucleotide
aauuuuggcuccauguaau

SEQ ID NO: 2842685 - RNA, 19 nt, Artificial Sequence
  Description of Artificial Sequence: Synthetic oligonucleotide
uuuccaugcaagagcaaaa

SEQ ID NO: 2842686 - RNA, 19 nt, Artificial Sequence
  Description of Artificial Sequence: Synthetic oligonucleotide
uguccaggucuucauggag

SEQ ID NO: 2842687 - RNA, 19 nt, Artificial Sequence
  Description of Artificial Sequence: Synthetic oligonucleotide
caccuugaaaucugguugc

SEQ ID NO: 2842688 - RNA, 19 nt, Artificial Sequence
  Description of Artificial Sequence: Synthetic oligonucleotide
acauugagcagugagcaca

SEQ ID NO: 2842689 - RNA, 19 nt, Artificial Sequence
  Description of Artificial Sequence: Synthetic oligonucleotide
gaaguguugcagcagugca

SEQ ID NO: 2842690 - RNA, 19 nt, Artificial Sequence
  Description of Artificial Sequence: Synthetic oligonucleotide
auuucccucugauucuguc

SEQ ID NO: 2842691 - RNA, 19 nt, Artificial Sequence
  Description of Artificial Sequence: Synthetic oligonucleotide
aaugugccauacugccuuc

SEQ ID NO: 2842692 - RNA, 19 nt, Artificial Sequence
  Description of Artificial Sequence: Synthetic oligonucleotide
guaaguggggucaccauag

SEQ ID NO: 2842693 - RNA, 19 nt, Artificial Sequence
  Description of Artificial Sequence: Synthetic oligonucleotide
uggagccucucguaagugg

SEQ ID NO: 2842694 - RNA, 19 nt, Artificial Sequence
  Description of Artificial Sequence: Synthetic oligonucleotide
uaaucacucugacacuuaa

SEQ ID NO: 2842695 - RNA, 19 nt, Artificial Sequence
  Description of Artificial Sequence: Synthetic oligonucleotide
acuacuguguaggagacau

SEQ ID NO: 2842696 - RNA, 19 nt, Artificial Sequence
  Description of Artificial Sequence: Synthetic oligonucleotide
uugaaaucugguugcacau

SEQ ID NO: 2842697 - RNA, 19 nt, Artificial Sequence
  Description of Artificial Sequence: Synthetic oligonucleotide
cucgccuuuaaucacucug

SEQ ID NO: 2842698 - RNA, 19 nt, Artificial Sequence
  Description of Artificial Sequence: Synthetic oligonucleotide
gaaggcagggcagacagac

SEQ ID NO: 2842699 - RNA, 19 nt, Artificial Sequence
  Description of Artificial Sequence: Synthetic oligonucleotide
cagcagugcaaucagcgcc

SEQ ID NO: 2842700 - RNA, 19 nt, Artificial Sequence
  Description of Artificial Sequence: Synthetic oligonucleotide
agacauuuccaugcaagag

SEQ ID NO: 2842701 - RNA, 19 nt, Artificial Sequence
  Description of Artificial Sequence: Synthetic oligonucleotide
guugcagcagugcaaucag

SEQ ID NO: 2842702 - RNA, 19 nt, Artificial Sequence
  Description of Artificial Sequence: Synthetic oligonucleotide
ccaagaagagggaagagac

SEQ ID NO: 2842703 - RNA, 19 nt, Artificial Sequence
  Description of Artificial Sequence: Synthetic oligonucleotide
uccaggucuucauggagcc

SEQ ID NO: 2842704 - RNA, 19 nt, Artificial Sequence
  Description of Artificial Sequence: Synthetic oligonucleotide
uucaucuuccuacugucuu

SEQ ID NO: 2842705 - RNA, 19 nt, Artificial Sequence
  Description of Artificial Sequence: Synthetic oligonucleotide
cauacugccuuccuucaac

SEQ ID NO: 2842706 - RNA, 19 nt, Artificial Sequence
  Description of Artificial Sequence: Synthetic oligonucleotide
aucugguugcacauugagc

SEQ ID NO: 2842707 - RNA, 19 nt, Artificial Sequence
  Description of Artificial Sequence: Synthetic oligonucleotide
cuuaaugugcagacaucug

SEQ ID NO: 2842708 - RNA, 19 nt, Artificial Sequence
  Description of Artificial Sequence: Synthetic oligonucleotide
caaaaccacgguagcaccc

SEQ ID NO: 2842709 - RNA, 19 nt, Artificial Sequence
  Description of Artificial Sequence: Synthetic oligonucleotide
uucauggagccucucguaa

SEQ ID NO: 2842710 - RNA, 19 nt, Artificial Sequence
  Description of Artificial Sequence: Synthetic oligonucleotide
ucauggagccucucguaag

SEQ ID NO: 2842711 - RNA, 19 nt, Artificial Sequence
  Description of Artificial Sequence: Synthetic oligonucleotide
gaggguacugccaggaccc

SEQ ID NO: 2842712 - RNA, 19 nt, Artificial Sequence
  Description of Artificial Sequence: Synthetic oligonucleotide
caagaagagggaagagacc

SEQ ID NO: 2842713 - RNA, 19 nt, Artificial Sequence
  Description of Artificial Sequence: Synthetic oligonucleotide
gagacauuuccaugcaaga

SEQ ID NO: 2842714 - RNA, 19 nt, Artificial Sequence
  Description of Artificial Sequence: Synthetic oligonucleotide
agcaagcagucucuugagg

SEQ ID NO: 2842715 - RNA, 19 nt, Artificial Sequence
  Description of Artificial Sequence: Synthetic oligonucleotide
ugagcaccacucaggcucg

SEQ ID NO: 2842716 - RNA, 19 nt, Artificial Sequence
  Description of Artificial Sequence: Synthetic oligonucleotide
ucucuugaggguacugcca

SEQ ID NO: 2842717 - RNA, 19 nt, Artificial Sequence
  Description of Artificial Sequence: Synthetic oligonucleotide
auuuuggcuccauguaaug

SEQ ID NO: 2842718 - RNA, 19 nt, Artificial Sequence
  Description of Artificial Sequence: Synthetic oligonucleotide
agacaucugcucuucugag

SEQ ID NO: 2842719 - RNA, 19 nt, Artificial Sequence
  Description of Artificial Sequence: Synthetic oligonucleotide
ugccauacugccuuccuuc

SEQ ID NO: 2842720 - RNA, 19 nt, Artificial Sequence
  Description of Artificial Sequence: Synthetic oligonucleotide
uaaguggggucaccauagg

SEQ ID NO: 2842721 - RNA, 19 nt, Artificial Sequence
  Description of Artificial Sequence: Synthetic oligonucleotide
aaugagcaccacucaggcu

SEQ ID NO: 2842722 - RNA, 19 nt, Artificial Sequence
  Description of Artificial Sequence: Synthetic oligonucleotide
cacgguagcacccaaucuc

SEQ ID NO: 2842723 - RNA, 19 nt, Artificial Sequence
  Description of Artificial Sequence: Synthetic oligonucleotide
accuucaucuuccuacugu

SEQ ID NO: 2842724 - RNA, 19 nt, Artificial Sequence
  Description of Artificial Sequence: Synthetic oligonucleotide
aaaaccacgguagcaccca

SEQ ID NO: 2842725 - RNA, 19 nt, Artificial Sequence
  Description of Artificial Sequence: Synthetic oligonucleotide
ucuuccuacugucuuucuc

SEQ ID NO: 2842726 - RNA, 19 nt, Artificial Sequence
  Description of Artificial Sequence: Synthetic oligonucleotide
acauuuccaugcaagagca

SEQ ID NO: 2842727 - RNA, 19 nt, Artificial Sequence
  Description of Artificial Sequence: Synthetic oligonucleotide
gucucuugaggguacugcc

SEQ ID NO: 2842728 - RNA, 19 nt, Artificial Sequence
  Description of Artificial Sequence: Synthetic oligonucleotide
cucuugaggguacugccag

SEQ ID NO: 2842729 - RNA, 19 nt, Artificial Sequence
  Description of Artificial Sequence: Synthetic oligonucleotide
gccaguacuacuguguagg

SEQ ID NO: 2842730 - RNA, 19 nt, Artificial Sequence
  Description of Artificial Sequence: Synthetic oligonucleotide
cucaggcucgccuuuaauc

SEQ ID NO: 2842731 - RNA, 19 nt, Artificial Sequence
  Description of Artificial Sequence: Synthetic oligonucleotide
auuuccaugcaagagcaaa

SEQ ID NO: 2842732 - RNA, 19 nt, Artificial Sequence
  Description of Artificial Sequence: Synthetic oligonucleotide
uuuuggcuccauguaaugu

SEQ ID NO: 2842733 - RNA, 19 nt, Artificial Sequence
  Description of Artificial Sequence: Synthetic oligonucleotide
cauugagcagugagcacag

SEQ ID NO: 2842734 - RNA, 19 nt, Artificial Sequence
  Description of Artificial Sequence: Synthetic oligonucleotide
augugcagacaucugcucu

SEQ ID NO: 2842735 - RNA, 19 nt, Artificial Sequence
  Description of Artificial Sequence: Synthetic oligonucleotide
uaggagacauuuccaugca

SEQ ID NO: 2842736 - RNA, 19 nt, Artificial Sequence
  Description of Artificial Sequence: Synthetic oligonucleotide
acucuggccagcagcaagc

SEQ ID NO: 2842737 - RNA, 19 nt, Artificial Sequence
  Description of Artificial Sequence: Synthetic oligonucleotide
uccucccacagaacaauga

SEQ ID NO: 2842738 - RNA, 19 nt, Artificial Sequence
  Description of Artificial Sequence: Synthetic oligonucleotide
ucuugaggguacugccagg

SEQ ID NO: 2842739 - RNA, 19 nt, Artificial Sequence
  Description of Artificial Sequence: Synthetic oligonucleotide
cauaggggaaguguugcag

SEQ ID NO: 2842740 - RNA, 19 nt, Artificial Sequence
  Description of Artificial Sequence: Synthetic oligonucleotide
aguccucaaaacgcaaguc

SEQ ID NO: 2842741 - RNA, 19 nt, Artificial Sequence
  Description of Artificial Sequence: Synthetic oligonucleotide
uaggggaaguguugcagca

SEQ ID NO: 2842742 - RNA, 19 nt, Artificial Sequence
  Description of Artificial Sequence: Synthetic oligonucleotide
uucuguccaggucuucaug

SEQ ID NO: 2842743 - RNA, 19 nt, Artificial Sequence
  Description of Artificial Sequence: Synthetic oligonucleotide
ugcaaucagcgccuccacc

SEQ ID NO: 2842744 - RNA, 19 nt, Artificial Sequence
  Description of Artificial Sequence: Synthetic oligonucleotide
ucugaauuucccucugauu

SEQ ID NO: 2842745 - RNA, 19 nt, Artificial Sequence
  Description of Artificial Sequence: Synthetic oligonucleotide
ucaccauaggggaaguguu

SEQ ID NO: 2842746 - RNA, 19 nt, Artificial Sequence
  Description of Artificial Sequence: Synthetic oligonucleotide
cucagauccaauuuuggcu

SEQ ID NO: 2842747 - RNA, 19 nt, Artificial Sequence
  Description of Artificial Sequence: Synthetic oligonucleotide
agggaagagaccacacugg

SEQ ID NO: 2842748 - RNA, 19 nt, Artificial Sequence
  Description of Artificial Sequence: Synthetic oligonucleotide
agacagaccucggccagcc

SEQ ID NO: 2842749 - RNA, 19 nt, Artificial Sequence
  Description of Artificial Sequence: Synthetic oligonucleotide
uuccuacugucuuucucgc

SEQ ID NO: 2842750 - RNA, 19 nt, Artificial Sequence
  Description of Artificial Sequence: Synthetic oligonucleotide
gacccugugcagaaggcag

SEQ ID NO: 2842751 - RNA, 19 nt, Artificial Sequence
  Description of Artificial Sequence: Synthetic oligonucleotide
ugucugaauuucccucuga

SEQ ID NO: 2842752 - RNA, 19 nt, Artificial Sequence
  Description of Artificial Sequence: Synthetic oligonucleotide
gaacaaugagcaccacuca

SEQ ID NO: 2842753 - RNA, 19 nt, Artificial Sequence
  Description of Artificial Sequence: Synthetic oligonucleotide
caggacccugugcagaagg

SEQ ID NO: 2842754 - RNA, 19 nt, Artificial Sequence
  Description of Artificial Sequence: Synthetic oligonucleotide
uuaaucacucugacacuua

SEQ ID NO: 2842755 - RNA, 19 nt, Artificial Sequence
  Description of Artificial Sequence: Synthetic oligonucleotide
ugugccauacugccuuccu

SEQ ID NO: 2842756 - RNA, 19 nt, Artificial Sequence
  Description of Artificial Sequence: Synthetic oligonucleotide
aguccggagccuucugccg

SEQ ID NO: 2842757 - RNA, 19 nt, Artificial Sequence
  Description of Artificial Sequence: Synthetic oligonucleotide
ccaugcaagagcaaaacca

SEQ ID NO: 2842758 - RNA, 19 nt, Artificial Sequence
  Description of Artificial Sequence: Synthetic oligonucleotide
cacagcugucugaauuucc

SEQ ID NO: 2842759 - RNA, 19 nt, Artificial Sequence
  Description of Artificial Sequence: Synthetic oligonucleotide
aagagaccacacugguccu

SEQ ID NO: 2842760 - RNA, 19 nt, Artificial Sequence
  Description of Artificial Sequence: Synthetic oligonucleotide
uccauguaaugugccauac

SEQ ID NO: 2842761 - RNA, 19 nt, Artificial Sequence
  Description of Artificial Sequence: Synthetic oligonucleotide
ugugcagacaucugcucuu

SEQ ID NO: 2842762 - RNA, 19 nt, Artificial Sequence
  Description of Artificial Sequence: Synthetic oligonucleotide
augcaagagcaaaaccacg

SEQ ID NO: 2842763 - RNA, 19 nt, Artificial Sequence
  Description of Artificial Sequence: Synthetic oligonucleotide
gauucuguccaggucuuca

SEQ ID NO: 2842764 - RNA, 19 nt, Artificial Sequence
  Description of Artificial Sequence: Synthetic oligonucleotide
ccacagaacaaugagcacc

SEQ ID NO: 2842765 - RNA, 19 nt, Artificial Sequence
  Description of Artificial Sequence: Synthetic oligonucleotide
ucuuucucgccaguacuac

SEQ ID NO: 2842766 - RNA, 19 nt, Artificial Sequence
  Description of Artificial Sequence: Synthetic oligonucleotide
aguguugcagcagugcaau

SEQ ID NO: 2842767 - RNA, 19 nt, Artificial Sequence
  Description of Artificial Sequence: Synthetic oligonucleotide
caaguccggagccuucugc

SEQ ID NO: 2842768 - RNA, 19 nt, Artificial Sequence
  Description of Artificial Sequence: Synthetic oligonucleotide
ucaucuuccuacugucuuu

SEQ ID NO: 2842769 - RNA, 19 nt, Artificial Sequence
  Description of Artificial Sequence: Synthetic oligonucleotide
cagauccaauuuuggcucc

SEQ ID NO: 2842770 - RNA, 19 nt, Artificial Sequence
  Description of Artificial Sequence: Synthetic oligonucleotide
agcacagcugucugaauuu

SEQ ID NO: 2842771 - RNA, 19 nt, Artificial Sequence
  Description of Artificial Sequence: Synthetic oligonucleotide
cugguugcacauugagcag

SEQ ID NO: 2842772 - RNA, 19 nt, Artificial Sequence
  Description of Artificial Sequence: Synthetic oligonucleotide
agugagcacagcugucuga

SEQ ID NO: 2842773 - RNA, 19 nt, Artificial Sequence
  Description of Artificial Sequence: Synthetic oligonucleotide
cuacugucuuucucgccag

SEQ ID NO: 2842774 - RNA, 19 nt, Artificial Sequence
  Description of Artificial Sequence: Synthetic oligonucleotide
cugucuuucucgccaguac

SEQ ID NO: 2842775 - RNA, 19 nt, Artificial Sequence
  Description of Artificial Sequence: Synthetic oligonucleotide
ugguugcacauugagcagu

SEQ ID NO: 2842776 - RNA, 19 nt, Artificial Sequence
  Description of Artificial Sequence: Synthetic oligonucleotide
auccaauuuuggcuccaug

SEQ ID NO: 2842777 - RNA, 19 nt, Artificial Sequence
  Description of Artificial Sequence: Synthetic oligonucleotide
uucucgccaguacuacugu

SEQ ID NO: 2842778 - RNA, 19 nt, Artificial Sequence
  Description of Artificial Sequence: Synthetic oligonucleotide
cagacaucugcucuucuga

SEQ ID NO: 2842779 - RNA, 19 nt, Artificial Sequence
  Description of Artificial Sequence: Synthetic oligonucleotide
cugugcagaaggcagggca

SEQ ID NO: 2842780 - RNA, 19 nt, Artificial Sequence
  Description of Artificial Sequence: Synthetic oligonucleotide
uggcuccauguaaugugcc

SEQ ID NO: 2842781 - RNA, 19 nt, Artificial Sequence
  Description of Artificial Sequence: Synthetic oligonucleotide
cacuuaaugugcagacauc

SEQ ID NO: 2842782 - RNA, 19 nt, Artificial Sequence
  Description of Artificial Sequence: Synthetic oligonucleotide
gagaccacacugguccucc

SEQ ID NO: 2842783 - RNA, 19 nt, Artificial Sequence
  Description of Artificial Sequence: Synthetic oligonucleotide
caccauaggggaaguguug

SEQ ID NO: 2842784 - RNA, 19 nt, Artificial Sequence
  Description of Artificial Sequence: Synthetic oligonucleotide
guggggucaccauagggga

SEQ ID NO: 2842785 - RNA, 19 nt, Artificial Sequence
  Description of Artificial Sequence: Synthetic oligonucleotide
cacucuggccagcagcaag

SEQ ID NO: 2842786 - RNA, 19 nt, Artificial Sequence
  Description of Artificial Sequence: Synthetic oligonucleotide
agcagcaagcagucucuug

SEQ ID NO: 2842787 - RNA, 19 nt, Artificial Sequence
  Description of Artificial Sequence: Synthetic oligonucleotide
ucucgccaguacuacugug

SEQ ID NO: 2842788 - RNA, 19 nt, Artificial Sequence
  Description of Artificial Sequence: Synthetic oligonucleotide
guccaggucuucauggagc

SEQ ID NO: 2842789 - RNA, 19 nt, Artificial Sequence
  Description of Artificial Sequence: Synthetic oligonucleotide
cucacucuggccagcagca

SEQ ID NO: 2842790 - RNA, 19 nt, Artificial Sequence
  Description of Artificial Sequence: Synthetic oligonucleotide
caggucuucauggagccuc

SEQ ID NO: 2842791 - RNA, 19 nt, Artificial Sequence
  Description of Artificial Sequence: Synthetic oligonucleotide
uccuacugucuuucucgcc

SEQ ID NO: 2842792 - RNA, 19 nt, Artificial Sequence
  Description of Artificial Sequence: Synthetic oligonucleotide
ggagccucucguaaguggg

SEQ ID NO: 2842793 - RNA, 19 nt, Artificial Sequence
  Description of Artificial Sequence: Synthetic oligonucleotide
gacacuuaaugugcagaca

SEQ ID NO: 2842794 - RNA, 19 nt, Artificial Sequence
  Description of Artificial Sequence: Synthetic oligonucleotide
ucgccaguacuacugugua

SEQ ID NO: 2842795 - RNA, 19 nt, Artificial Sequence
  Description of Artificial Sequence: Synthetic oligonucleotide
cagcaagcagucucuugag

SEQ ID NO: 2842796 - RNA, 19 nt, Artificial Sequence
  Description of Artificial Sequence: Synthetic oligonucleotide
caguacuacuguguaggag

SEQ ID NO: 2842797 - RNA, 19 nt, Artificial Sequence
  Description of Artificial Sequence: Synthetic oligonucleotide
guagcacccaaucucagau

SEQ ID NO: 2842798 - RNA, 19 nt, Artificial Sequence
  Description of Artificial Sequence: Synthetic oligonucleotide
gcaaaaccacgguagcacc

SEQ ID NO: 2842799 - RNA, 19 nt, Artificial Sequence
  Description of Artificial Sequence: Synthetic oligonucleotide
cagaccucggccagccacc

SEQ ID NO: 2842800 - RNA, 19 nt, Artificial Sequence
  Description of Artificial Sequence: Synthetic oligonucleotide
aaguguugcagcagugcaa

SEQ ID NO: 2842801 - RNA, 19 nt, Artificial Sequence
  Description of Artificial Sequence: Synthetic oligonucleotide
uugaggguacugccaggac

SEQ ID NO: 2842802 - RNA, 19 nt, Artificial Sequence
  Description of Artificial Sequence: Synthetic oligonucleotide
uacugccaggacccugugc

SEQ ID NO: 2842803 - RNA, 19 nt, Artificial Sequence
  Description of Artificial Sequence: Synthetic oligonucleotide
ugguccucccacagaacaa

SEQ ID NO: 2842804 - RNA, 19 nt, Artificial Sequence
  Description of Artificial Sequence: Synthetic oligonucleotide
ccucaaaacgcaaguccgg

SEQ ID NO: 2842805 - RNA, 19 nt, Artificial Sequence
  Description of Artificial Sequence: Synthetic oligonucleotide
gaguccucaaaacgcaagu

SEQ ID NO: 2842806 - RNA, 19 nt, Artificial Sequence
  Description of Artificial Sequence: Synthetic oligonucleotide
ucggccagccacccaagaa

SEQ ID NO: 2842807 - RNA, 19 nt, Artificial Sequence
  Description of Artificial Sequence: Synthetic oligonucleotide
aggacccugugcagaaggc

SEQ ID NO: 2842808 - RNA, 19 nt, Artificial Sequence
  Description of Artificial Sequence: Synthetic oligonucleotide
cucuucugaguccucaaaa

SEQ ID NO: 2842809 - RNA, 19 nt, Artificial Sequence
  Description of Artificial Sequence: Synthetic oligonucleotide
agcagucucuugaggguac

SEQ ID NO: 2842810 - RNA, 19 nt, Artificial Sequence
  Description of Artificial Sequence: Synthetic oligonucleotide
ugccgucaccuugaaaucu

SEQ ID NO: 2842811 - RNA, 19 nt, Artificial Sequence
  Description of Artificial Sequence: Synthetic oligonucleotide
aaucacucugacacuuaau

SEQ ID NO: 2842812 - RNA, 19 nt, Artificial Sequence
  Description of Artificial Sequence: Synthetic oligonucleotide
cucugauucuguccagguc

SEQ ID NO: 2842813 - RNA, 19 nt, Artificial Sequence
  Description of Artificial Sequence: Synthetic oligonucleotide
cacauugagcagugagcac

SEQ ID NO: 2842814 - RNA, 19 nt, Artificial Sequence
  Description of Artificial Sequence: Synthetic oligonucleotide
cugacacuuaaugugcaga

SEQ ID NO: 2842815 - RNA, 19 nt, Artificial Sequence
  Description of Artificial Sequence: Synthetic oligonucleotide
aaacgcaaguccggagccu

SEQ ID NO: 2842816 - RNA, 19 nt, Artificial Sequence
  Description of Artificial Sequence: Synthetic oligonucleotide
auugagcagugagcacagc

SEQ ID NO: 2842817 - RNA, 19 nt, Artificial Sequence
  Description of Artificial Sequence: Synthetic oligonucleotide
aucugcucuucugaguccu

SEQ ID NO: 2842818 - RNA, 19 nt, Artificial Sequence
  Description of Artificial Sequence: Synthetic oligonucleotide
caucuuccuacugucuuuc

SEQ ID NO: 2842819 - RNA, 19 nt, Artificial Sequence
  Description of Artificial Sequence: Synthetic oligonucleotide
guacuacuguguaggagac

SEQ ID NO: 2842820 - RNA, 19 nt, Artificial Sequence
  Description of Artificial Sequence: Synthetic oligonucleotide
gagcaaaaccacgguagca

SEQ ID NO: 2842821 - RNA, 19 nt, Artificial Sequence
  Description of Artificial Sequence: Synthetic oligonucleotide
gagcagugagcacagcugu

SEQ ID NO: 2842822 - RNA, 19 nt, Artificial Sequence
  Description of Artificial Sequence: Synthetic oligonucleotide
ugaaaucugguugcacauu

SEQ ID NO: 2842823 - RNA, 19 nt, Artificial Sequence
  Description of Artificial Sequence: Synthetic oligonucleotide
gcacauugagcagugagca

SEQ ID NO: 2842824 - RNA, 19 nt, Artificial Sequence
  Description of Artificial Sequence: Synthetic oligonucleotide
caagagcaaaaccacggua

SEQ ID NO: 2842825 - RNA, 19 nt, Artificial Sequence
  Description of Artificial Sequence: Synthetic oligonucleotide
gagccucucguaagugggg

SEQ ID NO: 2842826 - RNA, 19 nt, Artificial Sequence
  Description of Artificial Sequence: Synthetic oligonucleotide
cugucugaauuucccucug

SEQ ID NO: 2842827 - RNA, 19 nt, Artificial Sequence
  Description of Artificial Sequence: Synthetic oligonucleotide
agagaccacacugguccuc

SEQ ID NO: 2842828 - RNA, 19 nt, Artificial Sequence
  Description of Artificial Sequence: Synthetic oligonucleotide
gcagacaucugcucuucug

SEQ ID NO: 2842829 - RNA, 19 nt, Artificial Sequence
  Description of Artificial Sequence: Synthetic oligonucleotide
ugcagacaucugcucuucu

SEQ ID NO: 2842830 - RNA, 19 nt, Artificial Sequence
  Description of Artificial Sequence: Synthetic oligonucleotide
aauuucccucugauucugu

SEQ ID NO: 2842831 - RNA, 19 nt, Artificial Sequence
  Description of Artificial Sequence: Synthetic oligonucleotide
caggcucgccuuuaaucac

SEQ ID NO: 2842832 - RNA, 19 nt, Artificial Sequence
  Description of Artificial Sequence: Synthetic oligonucleotide
agcagugcaaucagcgccu

SEQ ID NO: 2842833 - RNA, 19 nt, Artificial Sequence
  Description of Artificial Sequence: Synthetic oligonucleotide
accucggccagccacccaa

SEQ ID NO: 2842834 - RNA, 19 nt, Artificial Sequence
  Description of Artificial Sequence: Synthetic oligonucleotide
aaaccacgguagcacccaa

SEQ ID NO: 2842835 - RNA, 19 nt, Artificial Sequence
  Description of Artificial Sequence: Synthetic oligonucleotide
caaucagcgccuccaccac

SEQ ID NO: 2842836 - RNA, 19 nt, Artificial Sequence
  Description of Artificial Sequence: Synthetic oligonucleotide
cucaaaacgcaaguccgga

SEQ ID NO: 2842837 - RNA, 19 nt, Artificial Sequence
  Description of Artificial Sequence: Synthetic oligonucleotide
cuugaggguacugccagga

SEQ ID NO: 2842838 - RNA, 19 nt, Artificial Sequence
  Description of Artificial Sequence: Synthetic oligonucleotide
ccucccacagaacaaugag

SEQ ID NO: 2842839 - RNA, 19 nt, Artificial Sequence
  Description of Artificial Sequence: Synthetic oligonucleotide
aacgcaaguccggagccuu

SEQ ID NO: 2842840 - RNA, 19 nt, Artificial Sequence
  Description of Artificial Sequence: Synthetic oligonucleotide
ugcucuucugaguccucaa

SEQ ID NO: 2842841 - RNA, 19 nt, Artificial Sequence
  Description of Artificial Sequence: Synthetic oligonucleotide
acgguagcacccaaucuca

SEQ ID NO: 2842842 - RNA, 19 nt, Artificial Sequence
  Description of Artificial Sequence: Synthetic oligonucleotide
cucugacacuuaaugugca

SEQ ID NO: 2842843 - RNA, 19 nt, Artificial Sequence
  Description of Artificial Sequence: Synthetic oligonucleotide
agcaccacucaggcucgcc

SEQ ID NO: 2842844 - RNA, 19 nt, Artificial Sequence
  Description of Artificial Sequence: Synthetic oligonucleotide
agaccucggccagccaccc

SEQ ID NO: 2842845 - RNA, 19 nt, Artificial Sequence
  Description of Artificial Sequence: Synthetic oligonucleotide
ucguaaguggggucaccau

SEQ ID NO: 2842846 - RNA, 19 nt, Artificial Sequence
  Description of Artificial Sequence: Synthetic oligonucleotide
gacaucugcucuucugagu

SEQ ID NO: 2842847 - RNA, 19 nt, Artificial Sequence
  Description of Artificial Sequence: Synthetic oligonucleotide
cacugguccucccacagaa

SEQ ID NO: 2842848 - RNA, 19 nt, Artificial Sequence
  Description of Artificial Sequence: Synthetic oligonucleotide
uagcacccaaucucagauc

SEQ ID NO: 2842849 - RNA, 19 nt, Artificial Sequence
  Description of Artificial Sequence: Synthetic oligonucleotide
cugccgucaccuugaaauc

SEQ ID NO: 2842850 - RNA, 19 nt, Artificial Sequence
  Description of Artificial Sequence: Synthetic oligonucleotide
ccuacugucuuucucgcca

SEQ ID NO: 2842851 - RNA, 19 nt, Artificial Sequence
  Description of Artificial Sequence: Synthetic oligonucleotide
uacugucuuucucgccagu

SEQ ID NO: 2842852 - RNA, 19 nt, Artificial Sequence
  Description of Artificial Sequence: Synthetic oligonucleotide
gcagcagugcaaucagcgc

SEQ ID NO: 2842853 - RNA, 19 nt, Artificial Sequence
  Description of Artificial Sequence: Synthetic oligonucleotide
gccagcagcaagcagucuc

SEQ ID NO: 2842854 - RNA, 19 nt, Artificial Sequence
  Description of Artificial Sequence: Synthetic oligonucleotide
ucccucugauucuguccag

SEQ ID NO: 2842855 - RNA, 19 nt, Artificial Sequence
  Description of Artificial Sequence: Synthetic oligonucleotide
gagcacagcugucugaauu

SEQ ID NO: 2842856 - RNA, 19 nt, Artificial Sequence
  Description of Artificial Sequence: Synthetic oligonucleotide
cuuuaaucacucugacacu

SEQ ID NO: 2842857 - RNA, 19 nt, Artificial Sequence
  Description of Artificial Sequence: Synthetic oligonucleotide
gucaccuugaaaucugguu

SEQ ID NO: 2842858 - RNA, 19 nt, Artificial Sequence
  Description of Artificial Sequence: Synthetic oligonucleotide
ccacccaagaagagggaag

SEQ ID NO: 2842859 - RNA, 19 nt, Artificial Sequence
  Description of Artificial Sequence: Synthetic oligonucleotide
uacuacuguguaggagaca

SEQ ID NO: 2842860 - RNA, 19 nt, Artificial Sequence
  Description of Artificial Sequence: Synthetic oligonucleotide
gucaccauaggggaagugu

SEQ ID NO: 2842861 - RNA, 19 nt, Artificial Sequence
  Description of Artificial Sequence: Synthetic oligonucleotide
agcagugagcacagcuguc

SEQ ID NO: 2842862 - RNA, 19 nt, Artificial Sequence
  Description of Artificial Sequence: Synthetic oligonucleotide
aggggaaguguugcagcag

SEQ ID NO: 2842863 - RNA, 19 nt, Artificial Sequence
  Description of Artificial Sequence: Synthetic oligonucleotide
ucucguaaguggggucacc

SEQ ID NO: 2842864 - RNA, 19 nt, Artificial Sequence
  Description of Artificial Sequence: Synthetic oligonucleotide
uggggucaccauaggggaa

SEQ ID NO: 2842865 - RNA, 19 nt, Artificial Sequence
  Description of Artificial Sequence: Synthetic oligonucleotide
aucuuccuacugucuuucu

SEQ ID NO: 2842866 - RNA, 19 nt, Artificial Sequence
  Description of Artificial Sequence: Synthetic oligonucleotide
agcgccuccaccaccuuca

SEQ ID NO: 2842867 - RNA, 19 nt, Artificial Sequence
  Description of Artificial Sequence: Synthetic oligonucleotide
gguagcacccaaucucaga

SEQ ID NO: 2842868 - RNA, 19 nt, Artificial Sequence
  Description of Artificial Sequence: Synthetic oligonucleotide
gaccacacugguccuccca

SEQ ID NO: 2842869 - RNA, 19 nt, Artificial Sequence
  Description of Artificial Sequence: Synthetic oligonucleotide
ggggucaccauaggggaag

SEQ ID NO: 2842870 - RNA, 19 nt, Artificial Sequence
  Description of Artificial Sequence: Synthetic oligonucleotide
gcagacagaccucggccag

SEQ ID NO: 2842871 - RNA, 19 nt, Artificial Sequence
  Description of Artificial Sequence: Synthetic oligonucleotide
cucguaaguggggucacca

SEQ ID NO: 2842872 - RNA, 19 nt, Artificial Sequence
  Description of Artificial Sequence: Synthetic oligonucleotide
caaucucagauccaauuuu

SEQ ID NO: 2842873 - RNA, 19 nt, Artificial Sequence
  Description of Artificial Sequence: Synthetic oligonucleotide
agauccaauuuuggcucca

SEQ ID NO: 2842874 - RNA, 19 nt, Artificial Sequence
  Description of Artificial Sequence: Synthetic oligonucleotide
gugagcacagcugucugaa

SEQ ID NO: 2842875 - RNA, 19 nt, Artificial Sequence
  Description of Artificial Sequence: Synthetic oligonucleotide
gucugaauuucccucugau

SEQ ID NO: 2842876 - RNA, 19 nt, Artificial Sequence
  Description of Artificial Sequence: Synthetic oligonucleotide
cucgccaguacuacugugu

SEQ ID NO: 2842877 - RNA, 19 nt, Artificial Sequence
  Description of Artificial Sequence: Synthetic oligonucleotide
acugucuuucucgccagua

SEQ ID NO: 2842878 - RNA, 19 nt, Artificial Sequence
  Description of Artificial Sequence: Synthetic oligonucleotide
auggagccucucguaagug

SEQ ID NO: 2842879 - RNA, 19 nt, Artificial Sequence
  Description of Artificial Sequence: Synthetic oligonucleotide
cuucauggagccucucgua

SEQ ID NO: 2842880 - RNA, 19 nt, Artificial Sequence
  Description of Artificial Sequence: Synthetic oligonucleotide
gguugcacauugagcagug

SEQ ID NO: 2842881 - RNA, 19 nt, Artificial Sequence
  Description of Artificial Sequence: Synthetic oligonucleotide
acucaggcucgccuuuaau

SEQ ID NO: 2842882 - RNA, 19 nt, Artificial Sequence
  Description of Artificial Sequence: Synthetic oligonucleotide
accuugaaaucugguugca

SEQ ID NO: 2842883 - RNA, 19 nt, Artificial Sequence
  Description of Artificial Sequence: Synthetic oligonucleotide
gccuuuaaucacucugaca

SEQ ID NO: 2842884 - RNA, 19 nt, Artificial Sequence
  Description of Artificial Sequence: Synthetic oligonucleotide
gagccuucugccgucaccu

SEQ ID NO: 2842885 - RNA, 19 nt, Artificial Sequence
  Description of Artificial Sequence: Synthetic oligonucleotide
ggagccuucugccgucacc

SEQ ID NO: 2842886 - RNA, 19 nt, Artificial Sequence
  Description of Artificial Sequence: Synthetic oligonucleotide
caccuucaucuuccuacug

SEQ ID NO: 2842887 - RNA, 19 nt, Artificial Sequence
  Description of Artificial Sequence: Synthetic oligonucleotide
agccucucguaaguggggu

SEQ ID NO: 2842888 - RNA, 19 nt, Artificial Sequence
  Description of Artificial Sequence: Synthetic oligonucleotide
uucugccgucaccuugaaa

SEQ ID NO: 2842889 - RNA, 19 nt, Artificial Sequence
  Description of Artificial Sequence: Synthetic oligonucleotide
cugaguccucaaaacgcaa

SEQ ID NO: 2842890 - RNA, 19 nt, Artificial Sequence
  Description of Artificial Sequence: Synthetic oligonucleotide
gugcaaucagcgccuccac

SEQ ID NO: 2842891 - RNA, 19 nt, Artificial Sequence
  Description of Artificial Sequence: Synthetic oligonucleotide
cuccauguaaugugccaua

SEQ ID NO: 2842892 - RNA, 19 nt, Artificial Sequence
  Description of Artificial Sequence: Synthetic oligonucleotide
cuucaucuuccuacugucu

SEQ ID NO: 2842893 - RNA, 19 nt, Artificial Sequence
  Description of Artificial Sequence: Synthetic oligonucleotide
cacccaaucucagauccaa

SEQ ID NO: 2842894 - RNA, 19 nt, Artificial Sequence
  Description of Artificial Sequence: Synthetic oligonucleotide
accacucaggcucgccuuu

SEQ ID NO: 2842895 - RNA, 19 nt, Artificial Sequence
  Description of Artificial Sequence: Synthetic oligonucleotide
aggcucgccuuuaaucacu

SEQ ID NO: 2842896 - RNA, 19 nt, Artificial Sequence
  Description of Artificial Sequence: Synthetic oligonucleotide
uccggagccuucugccguc

SEQ ID NO: 2842897 - RNA, 19 nt, Artificial Sequence
  Description of Artificial Sequence: Synthetic oligonucleotide
cauggagccucucguaagu

SEQ ID NO: 2842898 - RNA, 19 nt, Artificial Sequence
  Description of Artificial Sequence: Synthetic oligonucleotide
guccucccacagaacaaug

SEQ ID NO: 2842899 - RNA, 19 nt, Artificial Sequence
  Description of Artificial Sequence: Synthetic oligonucleotide
cagacagaccucggccagc

SEQ ID NO: 2842900 - RNA, 19 nt, Artificial Sequence
  Description of Artificial Sequence: Synthetic oligonucleotide
gcugucugaauuucccucu

SEQ ID NO: 2842901 - RNA, 19 nt, Artificial Sequence
  Description of Artificial Sequence: Synthetic oligonucleotide
ugauucuguccaggucuuc

SEQ ID NO: 2842902 - RNA, 19 nt, Artificial Sequence
  Description of Artificial Sequence: Synthetic oligonucleotide
gucuuucucgccaguacua

SEQ ID NO: 2842903 - RNA, 19 nt, Artificial Sequence
  Description of Artificial Sequence: Synthetic oligonucleotide
cacucacucuggccagcag

SEQ ID NO: 2842904 - RNA, 19 nt, Artificial Sequence
  Description of Artificial Sequence: Synthetic oligonucleotide
guaaugugccauacugccu

SEQ ID NO: 2842905 - RNA, 19 nt, Artificial Sequence
  Description of Artificial Sequence: Synthetic oligonucleotide
aaccacgguagcacccaau

SEQ ID NO: 2842906 - RNA, 19 nt, Artificial Sequence
  Description of Artificial Sequence: Synthetic oligonucleotide
cucucguaaguggggucac

SEQ ID NO: 2842907 - RNA, 19 nt, Artificial Sequence
  Description of Artificial Sequence: Synthetic oligonucleotide
cuuucucgccaguacuacu

SEQ ID NO: 2842908 - RNA, 19 nt, Artificial Sequence
  Description of Artificial Sequence: Synthetic oligonucleotide
ccgucaccuugaaaucugg

SEQ ID NO: 2842909 - RNA, 19 nt, Artificial Sequence
  Description of Artificial Sequence: Synthetic oligonucleotide
ggaagagaccacacugguc

SEQ ID NO: 2842910 - RNA, 19 nt, Artificial Sequence
  Description of Artificial Sequence: Synthetic oligonucleotide
cagucucuugaggguacug

SEQ ID NO: 2842911 - RNA, 19 nt, Artificial Sequence
  Description of Artificial Sequence: Synthetic oligonucleotide
gggaagagaccacacuggu

SEQ ID NO: 2842912 - RNA, 19 nt, Artificial Sequence
  Description of Artificial Sequence: Synthetic oligonucleotide
cggccagccacccaagaag

SEQ ID NO: 2842913 - RNA, 19 nt, Artificial Sequence
  Description of Artificial Sequence: Synthetic oligonucleotide
cauuuccaugcaagagcaa

SEQ ID NO: 2842914 - RNA, 19 nt, Artificial Sequence
  Description of Artificial Sequence: Synthetic oligonucleotide
cccaagaagagggaagaga

SEQ ID NO: 2842915 - RNA, 19 nt, Artificial Sequence
  Description of Artificial Sequence: Synthetic oligonucleotide
cccacagaacaaugagcac

SEQ ID NO: 2842916 - RNA, 19 nt, Artificial Sequence
  Description of Artificial Sequence: Synthetic oligonucleotide
gcaagagcaaaaccacggu

SEQ ID NO: 2842917 - RNA, 19 nt, Artificial Sequence
  Description of Artificial Sequence: Synthetic oligonucleotide
gggaaguguugcagcagug

SEQ ID NO: 2842918 - RNA, 19 nt, Artificial Sequence
  Description of Artificial Sequence: Synthetic oligonucleotide
gccauacugccuuccuuca

SEQ ID NO: 2842919 - RNA, 19 nt, Artificial Sequence
  Description of Artificial Sequence: Synthetic oligonucleotide
gccgucaccuugaaaucug

SEQ ID NO: 2842920 - RNA, 19 nt, Artificial Sequence
  Description of Artificial Sequence: Synthetic oligonucleotide
ccuugaaaucugguugcac

SEQ ID NO: 2842921 - RNA, 19 nt, Artificial Sequence
  Description of Artificial Sequence: Synthetic oligonucleotide
ggggaaguguugcagcagu

SEQ ID NO: 2842922 - RNA, 19 nt, Artificial Sequence
  Description of Artificial Sequence: Synthetic oligonucleotide
gugcagacaucugcucuuc

SEQ ID NO: 2842923 - RNA, 19 nt, Artificial Sequence
  Description of Artificial Sequence: Synthetic oligonucleotide
cccucugauucuguccagg

SEQ ID NO: 2842924 - RNA, 19 nt, Artificial Sequence
  Description of Artificial Sequence: Synthetic oligonucleotide
gugcagaaggcagggcaga

SEQ ID NO: 2842925 - RNA, 19 nt, Artificial Sequence
  Description of Artificial Sequence: Synthetic oligonucleotide
ucacucuggccagcagcaa

SEQ ID NO: 2842926 - RNA, 19 nt, Artificial Sequence
  Description of Artificial Sequence: Synthetic oligonucleotide
acgcaaguccggagccuuc

SEQ ID NO: 2842927 - RNA, 19 nt, Artificial Sequence
  Description of Artificial Sequence: Synthetic oligonucleotide
cagcgccuccaccaccuuc

SEQ ID NO: 2842928 - RNA, 19 nt, Artificial Sequence
  Description of Artificial Sequence: Synthetic oligonucleotide
guugcacauugagcaguga

SEQ ID NO: 2842929 - RNA, 19 nt, Artificial Sequence
  Description of Artificial Sequence: Synthetic oligonucleotide
ggccagccacccaagaaga

SEQ ID NO: 2842930 - RNA, 19 nt, Artificial Sequence
  Description of Artificial Sequence: Synthetic oligonucleotide
cagcugucugaauuucccu

SEQ ID NO: 2842931 - RNA, 19 nt, Artificial Sequence
  Description of Artificial Sequence: Synthetic oligonucleotide
ggacccugugcagaaggca

SEQ ID NO: 2842932 - RNA, 19 nt, Artificial Sequence
  Description of Artificial Sequence: Synthetic oligonucleotide
gcaaguccggagccuucug

SEQ ID NO: 2842933 - RNA, 19 nt, Artificial Sequence
  Description of Artificial Sequence: Synthetic oligonucleotide
gacagaccucggccagcca

SEQ ID NO: 2842934 - RNA, 19 nt, Artificial Sequence
  Description of Artificial Sequence: Synthetic oligonucleotide
guccggagccuucugccgu

SEQ ID NO: 2842935 - RNA, 19 nt, Artificial Sequence
  Description of Artificial Sequence: Synthetic oligonucleotide
cgccuuuaaucacucugac

SEQ ID NO: 2842936 - RNA, 19 nt, Artificial Sequence
  Description of Artificial Sequence: Synthetic oligonucleotide
acccaaucucagauccaau

SEQ ID NO: 2842937 - RNA, 19 nt, Artificial Sequence
  Description of Artificial Sequence: Synthetic oligonucleotide
gauccaauuuuggcuccau

SEQ ID NO: 2842938 - RNA, 19 nt, Artificial Sequence
  Description of Artificial Sequence: Synthetic oligonucleotide
ccucucguaagugggguca

SEQ ID NO: 2842939 - RNA, 19 nt, Artificial Sequence
  Description of Artificial Sequence: Synthetic oligonucleotide
ccaguacuacuguguagga

SEQ ID NO: 2842940 - RNA, 19 nt, Artificial Sequence
  Description of Artificial Sequence: Synthetic oligonucleotide
gcagugagcacagcugucu

SEQ ID NO: 2842941 - RNA, 19 nt, Artificial Sequence
  Description of Artificial Sequence: Synthetic oligonucleotide
gcacagcugucugaauuuc

SEQ ID NO: 2842942 - RNA, 19 nt, Artificial Sequence
  Description of Artificial Sequence: Synthetic oligonucleotide
ccaaucucagauccaauuu

SEQ ID NO: 2842943 - RNA, 19 nt, Artificial Sequence
  Description of Artificial Sequence: Synthetic oligonucleotide
cugauucuguccaggucuu

SEQ ID NO: 2842944 - RNA, 19 nt, Artificial Sequence
  Description of Artificial Sequence: Synthetic oligonucleotide
ggucaccauaggggaagug

SEQ ID NO: 2842945 - RNA, 19 nt, Artificial Sequence
  Description of Artificial Sequence: Synthetic oligonucleotide
ccauaggggaaguguugca

SEQ ID NO: 2842946 - RNA, 19 nt, Artificial Sequence
  Description of Artificial Sequence: Synthetic oligonucleotide
gccaggacccugugcagaa

SEQ ID NO: 2842947 - RNA, 19 nt, Artificial Sequence
  Description of Artificial Sequence: Synthetic oligonucleotide
cucggccagccacccaaga

SEQ ID NO: 2842948 - RNA, 19 nt, Artificial Sequence
  Description of Artificial Sequence: Synthetic oligonucleotide
cgccaguacuacuguguag

SEQ ID NO: 2842949 - RNA, 19 nt, Artificial Sequence
  Description of Artificial Sequence: Synthetic oligonucleotide
gccagccacccaagaagag

SEQ ID NO: 2842950 - RNA, 19 nt, Artificial Sequence
  Description of Artificial Sequence: Synthetic oligonucleotide
agccuucugccgucaccuu

SEQ ID NO: 2842951 - RNA, 19 nt, Artificial Sequence
  Description of Artificial Sequence: Synthetic oligonucleotide
cccaaucucagauccaauu

SEQ ID NO: 2842952 - RNA, 19 nt, Artificial Sequence
  Description of Artificial Sequence: Synthetic oligonucleotide
gccucucguaagugggguc

SEQ ID NO: 2842953 - RNA, 19 nt, Artificial Sequence
  Description of Artificial Sequence: Synthetic oligonucleotide
cacucaggcucgccuuuaa

SEQ ID NO: 2842954 - RNA, 19 nt, Artificial Sequence
  Description of Artificial Sequence: Synthetic oligonucleotide
aggguacugccaggacccu

SEQ ID NO: 2842955 - RNA, 19 nt, Artificial Sequence
  Description of Artificial Sequence: Synthetic oligonucleotide
gccacccaagaagagggaa

SEQ ID NO: 2842956 - RNA, 19 nt, Artificial Sequence
  Description of Artificial Sequence: Synthetic oligonucleotide
cguaaguggggucaccaua

SEQ ID NO: 2842957 - RNA, 19 nt, Artificial Sequence
  Description of Artificial Sequence: Synthetic oligonucleotide
gagcaccacucaggcucgc

SEQ ID NO: 2842958 - RNA, 19 nt, Artificial Sequence
  Description of Artificial Sequence: Synthetic oligonucleotide
ggcucgccuuuaaucacuc

SEQ ID NO: 2842959 - RNA, 19 nt, Artificial Sequence
  Description of Artificial Sequence: Synthetic oligonucleotide
gugccauacugccuuccuu

SEQ ID NO: 2842960 - RNA, 19 nt, Artificial Sequence
  Description of Artificial Sequence: Synthetic oligonucleotide
gaccucggccagccaccca

SEQ ID NO: 2842961 - RNA, 19 nt, Artificial Sequence
  Description of Artificial Sequence: Synthetic oligonucleotide
gcuccauguaaugugccau

SEQ ID NO: 2842962 - RNA, 19 nt, Artificial Sequence
  Description of Artificial Sequence: Synthetic oligonucleotide
ccagcagcaagcagucucu

SEQ ID NO: 2842963 - RNA, 19 nt, Artificial Sequence
  Description of Artificial Sequence: Synthetic oligonucleotide
ccugugcagaaggcagggc

SEQ ID NO: 2842964 - RNA, 19 nt, Artificial Sequence
  Description of Artificial Sequence: Synthetic oligonucleotide
gcaccacucaggcucgccu

SEQ ID NO: 2842965 - RNA, 19 nt, Artificial Sequence
  Description of Artificial Sequence: Synthetic oligonucleotide
cuucugccgucaccuugaa

SEQ ID NO: 2842966 - RNA, 19 nt, Artificial Sequence
  Description of Artificial Sequence: Synthetic oligonucleotide
cgguagcacccaaucucag

SEQ ID NO: 2842967 - RNA, 19 nt, Artificial Sequence
  Description of Artificial Sequence: Synthetic oligonucleotide
ccucugauucuguccaggu

SEQ ID NO: 2842968 - RNA, 19 nt, Artificial Sequence
  Description of Artificial Sequence: Synthetic oligonucleotide
ggcagggcagacagaccuc

SEQ ID NO: 2842969 - RNA, 19 nt, Artificial Sequence
  Description of Artificial Sequence: Synthetic oligonucleotide
caccacucaggcucgccuu

SEQ ID NO: 2842970 - RNA, 19 nt, Artificial Sequence
  Description of Artificial Sequence: Synthetic oligonucleotide
ccaccuucaucuuccuacu

SEQ ID NO: 2842971 - RNA, 19 nt, Artificial Sequence
  Description of Artificial Sequence: Synthetic oligonucleotide
ccucggccagccacccaag

SEQ ID NO: 2842972 - RNA, 19 nt, Artificial Sequence
  Description of Artificial Sequence: Synthetic oligonucleotide
ccauguaaugugccauacu

SEQ ID NO: 2842973 - RNA, 19 nt, Artificial Sequence
  Description of Artificial Sequence: Synthetic oligonucleotide
cuacuguguaggagacauu

SEQ ID NO: 2842974 - RNA, 19 nt, Artificial Sequence
  Description of Artificial Sequence: Synthetic oligonucleotide
gcacccaaucucagaucca

SEQ ID NO: 2842975 - RNA, 19 nt, Artificial Sequence
  Description of Artificial Sequence: Synthetic oligonucleotide
ccauacugccuuccuucaa

SEQ ID NO: 2842976 - RNA, 19 nt, Artificial Sequence
  Description of Artificial Sequence: Synthetic oligonucleotide
ggucuucauggagccucuc

SEQ ID NO: 2842977 - RNA, 19 nt, Artificial Sequence
  Description of Artificial Sequence: Synthetic oligonucleotide
ccacgguagcacccaaucu

SEQ ID NO: 2842978 - RNA, 19 nt, Artificial Sequence
  Description of Artificial Sequence: Synthetic oligonucleotide
gcucgccuuuaaucacucu

SEQ ID NO: 2842979 - RNA, 19 nt, Artificial Sequence
  Description of Artificial Sequence: Synthetic oligonucleotide
gcagucucuugaggguacu

SEQ ID NO: 2842980 - RNA, 19 nt, Artificial Sequence
  Description of Artificial Sequence: Synthetic oligonucleotide
cgucaccuugaaaucuggu

SEQ ID NO: 2842981 - RNA, 19 nt, Artificial Sequence
  Description of Artificial Sequence: Synthetic oligonucleotide
gggucaccauaggggaagu

SEQ ID NO: 2842982 - RNA, 19 nt, Artificial Sequence
  Description of Artificial Sequence: Synthetic oligonucleotide
cggagccuucugccgucac

SEQ ID NO: 2842983 - RNA, 19 nt, Artificial Sequence
  Description of Artificial Sequence: Synthetic oligonucleotide
cgccuccaccaccuucauc

SEQ ID NO: 2842984 - RNA, 19 nt, Artificial Sequence
  Description of Artificial Sequence: Synthetic oligonucleotide
cagcagcaagcagucucuu

SEQ ID NO: 2842985 - RNA, 19 nt, Artificial Sequence
  Description of Artificial Sequence: Synthetic oligonucleotide
ccacucaggcucgccuuua

SEQ ID NO: 2842986 - RNA, 19 nt, Artificial Sequence
  Description of Artificial Sequence: Synthetic oligonucleotide
cgcaaguccggagccuucu

SEQ ID NO: 2842987 - RNA, 19 nt, Artificial Sequence
  Description of Artificial Sequence: Synthetic oligonucleotide
ccggagccuucugccguca

SEQ ID NO: 2842988 - RNA, 19 nt, Artificial Sequence
  Description of Artificial Sequence: Synthetic oligonucleotide
ccaggucuucauggagccu

SEQ ID NO: 2842989 - RNA, 19 nt, Artificial Sequence
  Description of Artificial Sequence: Synthetic oligonucleotide
gcgccuccaccaccuucau

SEQ ID NO: 2842990 - RNA, 19 nt, Artificial Sequence
  Description of Artificial Sequence: Synthetic oligonucleotide
aaacuuuauuguuacaagg

SEQ ID NO: 2842991 - RNA, 19 nt, Artificial Sequence
  Description of Artificial Sequence: Synthetic oligonucleotide
uuuaaauaaacuuuauugu

SEQ ID NO: 2842992 - RNA, 19 nt, Artificial Sequence
  Description of Artificial Sequence: Synthetic oligonucleotide
aauugaauggcaugauccc

SEQ ID NO: 2842993 - RNA, 19 nt, Artificial Sequence
  Description of Artificial Sequence: Synthetic oligonucleotide
ggaaacaugaucaagaugg

SEQ ID NO: 2842994 - RNA, 19 nt, Artificial Sequence
  Description of Artificial Sequence: Synthetic oligonucleotide
ugugacagaacccagcccg

SEQ ID NO: 2842995 - RNA, 19 nt, Artificial Sequence
  Description of Artificial Sequence: Synthetic oligonucleotide
ucuagucacaggaugaagg

SEQ ID NO: 2842996 - RNA, 19 nt, Artificial Sequence
  Description of Artificial Sequence: Synthetic oligonucleotide
agaagcaauaauguggucc

SEQ ID NO: 2842997 - RNA, 19 nt, Artificial Sequence
  Description of Artificial Sequence: Synthetic oligonucleotide
aauaauguggucccaguug

SEQ ID NO: 2842998 - RNA, 19 nt, Artificial Sequence
  Description of Artificial Sequence: Synthetic oligonucleotide
aaugcaggaaacaugauca

SEQ ID NO: 2842999 - RNA, 19 nt, Artificial Sequence
  Description of Artificial Sequence: Synthetic oligonucleotide
aacuuuauuguuacaaggg

SEQ ID NO: 2843000 - RNA, 19 nt, Artificial Sequence
  Description of Artificial Sequence: Synthetic oligonucleotide
acuuuauuguuacaagggg

SEQ ID NO: 2843001 - RNA, 19 nt, Artificial Sequence
  Description of Artificial Sequence: Synthetic oligonucleotide
gaauugaauggcaugaucc

SEQ ID NO: 2843002 - RNA, 19 nt, Artificial Sequence
  Description of Artificial Sequence: Synthetic oligonucleotide
accaugaagacaucgagag

SEQ ID NO: 2843003 - RNA, 19 nt, Artificial Sequence
  Description of Artificial Sequence: Synthetic oligonucleotide
caugaagacaucgagaggc

SEQ ID NO: 2843004 - RNA, 19 nt, Artificial Sequence
  Description of Artificial Sequence: Synthetic oligonucleotide
uaaacuuuauuguuacaag

SEQ ID NO: 2843005 - RNA, 19 nt, Artificial Sequence
  Description of Artificial Sequence: Synthetic oligonucleotide
gaagcaauaaugugguccc

SEQ ID NO: 2843006 - RNA, 19 nt, Artificial Sequence
  Description of Artificial Sequence: Synthetic oligonucleotide
aacaugaucaagaugggcu

SEQ ID NO: 2843007 - RNA, 19 nt, Artificial Sequence
  Description of Artificial Sequence: Synthetic oligonucleotide
aaacaugaucaagaugggc

SEQ ID NO: 2843008 - RNA, 19 nt, Artificial Sequence
  Description of Artificial Sequence: Synthetic oligonucleotide
cuucgaguggaccugagcg

SEQ ID NO: 2843009 - RNA, 19 nt, Artificial Sequence
  Description of Artificial Sequence: Synthetic oligonucleotide
aauggcaugaucccaggga

SEQ ID NO: 2843010 - RNA, 19 nt, Artificial Sequence
  Description of Artificial Sequence: Synthetic oligonucleotide
caacagaugaagcaggaag

SEQ ID NO: 2843011 - RNA, 19 nt, Artificial Sequence
  Description of Artificial Sequence: Synthetic oligonucleotide
aagauggccacaccagccg

SEQ ID NO: 2843012 - RNA, 19 nt, Artificial Sequence
  Description of Artificial Sequence: Synthetic oligonucleotide
aggaagugagcccaauggc

SEQ ID NO: 2843013 - RNA, 19 nt, Artificial Sequence
  Description of Artificial Sequence: Synthetic oligonucleotide
uugaauggcaugaucccag

SEQ ID NO: 2843014 - RNA, 19 nt, Artificial Sequence
  Description of Artificial Sequence: Synthetic oligonucleotide
gucaggacagacaugacgg

SEQ ID NO: 2843015 - RNA, 19 nt, Artificial Sequence
  Description of Artificial Sequence: Synthetic oligonucleotide
ucaccaugaagacaucgag

SEQ ID NO: 2843016 - RNA, 19 nt, Artificial Sequence
  Description of Artificial Sequence: Synthetic oligonucleotide
augaagggagggcagcucc

SEQ ID NO: 2843017 - RNA, 19 nt, Artificial Sequence
  Description of Artificial Sequence: Synthetic oligonucleotide
cuagucacaggaugaaggg

SEQ ID NO: 2843018 - RNA, 19 nt, Artificial Sequence
  Description of Artificial Sequence: Synthetic oligonucleotide
caucgagaggccaugauug

SEQ ID NO: 2843019 - RNA, 19 nt, Artificial Sequence
  Description of Artificial Sequence: Synthetic oligonucleotide
gacaugacggcgcggagcg

SEQ ID NO: 2843020 - RNA, 19 nt, Artificial Sequence
  Description of Artificial Sequence: Synthetic oligonucleotide
auaauguggucccaguugu

SEQ ID NO: 2843021 - RNA, 19 nt, Artificial Sequence
  Description of Artificial Sequence: Synthetic oligonucleotide
aagcagaagcaauaaugug

SEQ ID NO: 2843022 - RNA, 19 nt, Artificial Sequence
  Description of Artificial Sequence: Synthetic oligonucleotide
gaaugcaggaaacaugauc

SEQ ID NO: 2843023 - RNA, 19 nt, Artificial Sequence
  Description of Artificial Sequence: Synthetic oligonucleotide
auggcgauuuccccgacac

SEQ ID NO: 2843024 - RNA, 19 nt, Artificial Sequence
  Description of Artificial Sequence: Synthetic oligonucleotide
aucaagaugggcuggcaag

SEQ ID NO: 2843025 - RNA, 19 nt, Artificial Sequence
  Description of Artificial Sequence: Synthetic oligonucleotide
augaagcaggaagugagcc

SEQ ID NO: 2843026 - RNA, 19 nt, Artificial Sequence
  Description of Artificial Sequence: Synthetic oligonucleotide
ggugacuggaauugaaugg

SEQ ID NO: 2843027 - RNA, 19 nt, Artificial Sequence
  Description of Artificial Sequence: Synthetic oligonucleotide
aggaagucaagauggccac

SEQ ID NO: 2843028 - RNA, 19 nt, Artificial Sequence
  Description of Artificial Sequence: Synthetic oligonucleotide
gaagaggugacuggaauug

SEQ ID NO: 2843029 - RNA, 19 nt, Artificial Sequence
  Description of Artificial Sequence: Synthetic oligonucleotide
aagucaagauggccacacc

SEQ ID NO: 2843030 - RNA, 19 nt, Artificial Sequence
  Description of Artificial Sequence: Synthetic oligonucleotide
ucaagauggccacaccagc

SEQ ID NO: 2843031 - RNA, 19 nt, Artificial Sequence
  Description of Artificial Sequence: Synthetic oligonucleotide
aagguuuaaauaaacuuua

SEQ ID NO: 2843032 - RNA, 19 nt, Artificial Sequence
  Description of Artificial Sequence: Synthetic oligonucleotide
acaaggaccagcccaaggu

SEQ ID NO: 2843033 - RNA, 19 nt, Artificial Sequence
  Description of Artificial Sequence: Synthetic oligonucleotide
agucaggccccucaacagc

SEQ ID NO: 2843034 - RNA, 19 nt, Artificial Sequence
  Description of Artificial Sequence: Synthetic oligonucleotide
agaugaagcaggaagugag

SEQ ID NO: 2843035 - RNA, 19 nt, Artificial Sequence
  Description of Artificial Sequence: Synthetic oligonucleotide
ggucaggaagucaagaugg

SEQ ID NO: 2843036 - RNA, 19 nt, Artificial Sequence
  Description of Artificial Sequence: Synthetic oligonucleotide
acaugaucaagaugggcug

SEQ ID NO: 2843037 - RNA, 19 nt, Artificial Sequence
  Description of Artificial Sequence: Synthetic oligonucleotide
aggugacuggaauugaaug

SEQ ID NO: 2843038 - RNA, 19 nt, Artificial Sequence
  Description of Artificial Sequence: Synthetic oligonucleotide
acuggaauugaauggcaug

SEQ ID NO: 2843039 - RNA, 19 nt, Artificial Sequence
  Description of Artificial Sequence: Synthetic oligonucleotide
agucaagauggccacacca

SEQ ID NO: 2843040 - RNA, 19 nt, Artificial Sequence
  Description of Artificial Sequence: Synthetic oligonucleotide
ucuuguagcucuccaggug

SEQ ID NO: 2843041 - RNA, 19 nt, Artificial Sequence
  Description of Artificial Sequence: Synthetic oligonucleotide
aaggucaggaagucaagau

SEQ ID NO: 2843042 - RNA, 19 nt, Artificial Sequence
  Description of Artificial Sequence: Synthetic oligonucleotide
gaggcaacagaugaagcag

SEQ ID NO: 2843043 - RNA, 19 nt, Artificial Sequence
  Description of Artificial Sequence: Synthetic oligonucleotide
auugcagaagaggugacug

SEQ ID NO: 2843044 - RNA, 19 nt, Artificial Sequence
  Description of Artificial Sequence: Synthetic oligonucleotide
uggucuagucacaggauga

SEQ ID NO: 2843045 - RNA, 19 nt, Artificial Sequence
  Description of Artificial Sequence: Synthetic oligonucleotide
aauguggucccaguuguca

SEQ ID NO: 2843046 - RNA, 19 nt, Artificial Sequence
  Description of Artificial Sequence: Synthetic oligonucleotide
agucacaggaugaagggag

SEQ ID NO: 2843047 - RNA, 19 nt, Artificial Sequence
  Description of Artificial Sequence: Synthetic oligonucleotide
ugaagcaggaagugagccc

SEQ ID NO: 2843048 - RNA, 19 nt, Artificial Sequence
  Description of Artificial Sequence: Synthetic oligonucleotide
caugauugcagaagaggug

SEQ ID NO: 2843049 - RNA, 19 nt, Artificial Sequence
  Description of Artificial Sequence: Synthetic oligonucleotide
augauugcagaagagguga

SEQ ID NO: 2843050 - RNA, 19 nt, Artificial Sequence
  Description of Artificial Sequence: Synthetic oligonucleotide
aggaaugcaggaaacauga

SEQ ID NO: 2843051 - RNA, 19 nt, Artificial Sequence
  Description of Artificial Sequence: Synthetic oligonucleotide
aggucaggaagucaagaug

SEQ ID NO: 2843052 - RNA, 19 nt, Artificial Sequence
  Description of Artificial Sequence: Synthetic oligonucleotide
caagauggccacaccagcc

SEQ ID NO: 2843053 - RNA, 19 nt, Artificial Sequence
  Description of Artificial Sequence: Synthetic oligonucleotide
ccaagcagaagcaauaaug

SEQ ID NO: 2843054 - RNA, 19 nt, Artificial Sequence
  Description of Artificial Sequence: Synthetic oligonucleotide
aucgagaggccaugauugc

SEQ ID NO: 2843055 - RNA, 19 nt, Artificial Sequence
  Description of Artificial Sequence: Synthetic oligonucleotide
gaguggucuagucacagga

SEQ ID NO: 2843056 - RNA, 19 nt, Artificial Sequence
  Description of Artificial Sequence: Synthetic oligonucleotide
gaaacaugaucaagauggg

SEQ ID NO: 2843057 - RNA, 19 nt, Artificial Sequence
  Description of Artificial Sequence: Synthetic oligonucleotide
ugaauggcaugaucccagg

SEQ ID NO: 2843058 - RNA, 19 nt, Artificial Sequence
  Description of Artificial Sequence: Synthetic oligonucleotide
uugcagaagaggugacugg

SEQ ID NO: 2843059 - RNA, 19 nt, Artificial Sequence
  Description of Artificial Sequence: Synthetic oligonucleotide
auuuccccgacaccgagcu

SEQ ID NO: 2843060 - RNA, 19 nt, Artificial Sequence
  Description of Artificial Sequence: Synthetic oligonucleotide
aagaguggucuagucacag

SEQ ID NO: 2843061 - RNA, 19 nt, Artificial Sequence
  Description of Artificial Sequence: Synthetic oligonucleotide
aggaaacaugaucaagaug

SEQ ID NO: 2843062 - RNA, 19 nt, Artificial Sequence
  Description of Artificial Sequence: Synthetic oligonucleotide
ccaguugucaccaugaaga

SEQ ID NO: 2843063 - RNA, 19 nt, Artificial Sequence
  Description of Artificial Sequence: Synthetic oligonucleotide
aacagcagcggcgucagga

SEQ ID NO: 2843064 - RNA, 19 nt, Artificial Sequence
  Description of Artificial Sequence: Synthetic oligonucleotide
gaauggcaugaucccaggg

SEQ ID NO: 2843065 - RNA, 19 nt, Artificial Sequence
  Description of Artificial Sequence: Synthetic oligonucleotide
gacaaggaccagcccaagg

SEQ ID NO: 2843066 - RNA, 19 nt, Artificial Sequence
  Description of Artificial Sequence: Synthetic oligonucleotide
ucgaguggaccugagcgcg

SEQ ID NO: 2843067 - RNA, 19 nt, Artificial Sequence
  Description of Artificial Sequence: Synthetic oligonucleotide
aggacagacaugacggcgc

SEQ ID NO: 2843068 - RNA, 19 nt, Artificial Sequence
  Description of Artificial Sequence: Synthetic oligonucleotide
cacaccagccggaaguucc

SEQ ID NO: 2843069 - RNA, 19 nt, Artificial Sequence
  Description of Artificial Sequence: Synthetic oligonucleotide
ugcaggaaacaugaucaag

SEQ ID NO: 2843070 - RNA, 19 nt, Artificial Sequence
  Description of Artificial Sequence: Synthetic oligonucleotide
gugacuggaauugaauggc

SEQ ID NO: 2843071 - RNA, 19 nt, Artificial Sequence
  Description of Artificial Sequence: Synthetic oligonucleotide
gaacccagcccgcaggcag

SEQ ID NO: 2843072 - RNA, 19 nt, Artificial Sequence
  Description of Artificial Sequence: Synthetic oligonucleotide
auguggucccaguugucac

SEQ ID NO: 2843073 - RNA, 19 nt, Artificial Sequence
  Description of Artificial Sequence: Synthetic oligonucleotide
caggaagucaagauggcca

SEQ ID NO: 2843074 - RNA, 19 nt, Artificial Sequence
  Description of Artificial Sequence: Synthetic oligonucleotide
gaagcaggaagugagccca

SEQ ID NO: 2843075 - RNA, 19 nt, Artificial Sequence
  Description of Artificial Sequence: Synthetic oligonucleotide
uuucagucccgcuucuugu

SEQ ID NO: 2843076 - RNA, 19 nt, Artificial Sequence
  Description of Artificial Sequence: Synthetic oligonucleotide
gaagucaagauggccacac

SEQ ID NO: 2843077 - RNA, 19 nt, Artificial Sequence
  Description of Artificial Sequence: Synthetic oligonucleotide
gaggccaugauugcagaag

SEQ ID NO: 2843078 - RNA, 19 nt, Artificial Sequence
  Description of Artificial Sequence: Synthetic oligonucleotide
uucgaguggaccugagcgc

SEQ ID NO: 2843079 - RNA, 19 nt, Artificial Sequence
  Description of Artificial Sequence: Synthetic oligonucleotide
gcaagaguggucuagucac

SEQ ID NO: 2843080 - RNA, 19 nt, Artificial Sequence
  Description of Artificial Sequence: Synthetic oligonucleotide
agcgcgaggcaccaugagg

SEQ ID NO: 2843081 - RNA, 19 nt, Artificial Sequence
  Description of Artificial Sequence: Synthetic oligonucleotide
augaucaagaugggcuggc

SEQ ID NO: 2843082 - RNA, 19 nt, Artificial Sequence
  Description of Artificial Sequence: Synthetic oligonucleotide
agacaugacggcgcggagc

SEQ ID NO: 2843083 - RNA, 19 nt, Artificial Sequence
  Description of Artificial Sequence: Synthetic oligonucleotide
agcccaauggcgauuuccc

SEQ ID NO: 2843084 - RNA, 19 nt, Artificial Sequence
  Description of Artificial Sequence: Synthetic oligonucleotide
ggcgauuuccccgacaccg

SEQ ID NO: 2843085 - RNA, 19 nt, Artificial Sequence
  Description of Artificial Sequence: Synthetic oligonucleotide
caggaaugcaggaaacaug

SEQ ID NO: 2843086 - RNA, 19 nt, Artificial Sequence
  Description of Artificial Sequence: Synthetic oligonucleotide
ucaggaagucaagauggcc

SEQ ID NO: 2843087 - RNA, 19 nt, Artificial Sequence
  Description of Artificial Sequence: Synthetic oligonucleotide
ugacuggaauugaauggca

SEQ ID NO: 2843088 - RNA, 19 nt, Artificial Sequence
  Description of Artificial Sequence: Synthetic oligonucleotide
ucagucccgcuucuuguag

SEQ ID NO: 2843089 - RNA, 19 nt, Artificial Sequence
  Description of Artificial Sequence: Synthetic oligonucleotide
ggaagugagcccaauggcg

SEQ ID NO: 2843090 - RNA, 19 nt, Artificial Sequence
  Description of Artificial Sequence: Synthetic oligonucleotide
guggucuagucacaggaug

SEQ ID NO: 2843091 - RNA, 19 nt, Artificial Sequence
  Description of Artificial Sequence: Synthetic oligonucleotide
acagcagcggcgucaggac

SEQ ID NO: 2843092 - RNA, 19 nt, Artificial Sequence
  Description of Artificial Sequence: Synthetic oligonucleotide
uuccccgacaccgagcugc

SEQ ID NO: 2843093 - RNA, 19 nt, Artificial Sequence
  Description of Artificial Sequence: Synthetic oligonucleotide
cuuucagucccgcuucuug

SEQ ID NO: 2843094 - RNA, 19 nt, Artificial Sequence
  Description of Artificial Sequence: Synthetic oligonucleotide
ucacaggaugaagggaggg

SEQ ID NO: 2843095 - RNA, 19 nt, Artificial Sequence
  Description of Artificial Sequence: Synthetic oligonucleotide
uccaggugugacagaaccc

SEQ ID NO: 2843096 - RNA, 19 nt, Artificial Sequence
  Description of Artificial Sequence: Synthetic oligonucleotide
agaugggcuggcaagagug

SEQ ID NO: 2843097 - RNA, 19 nt, Artificial Sequence
  Description of Artificial Sequence: Synthetic oligonucleotide
aagaugggcuggcaagagu

SEQ ID NO: 2843098 - RNA, 19 nt, Artificial Sequence
  Description of Artificial Sequence: Synthetic oligonucleotide
ugcagaagaggugacugga

SEQ ID NO: 2843099 - RNA, 19 nt, Artificial Sequence
  Description of Artificial Sequence: Synthetic oligonucleotide
gaugaagcaggaagugagc

SEQ ID NO: 2843100 - RNA, 19 nt, Artificial Sequence
  Description of Artificial Sequence: Synthetic oligonucleotide
caagguuuaaauaaacuuu

SEQ ID NO: 2843101 - RNA, 19 nt, Artificial Sequence
  Description of Artificial Sequence: Synthetic oligonucleotide
ucaagaugggcuggcaaga

SEQ ID NO: 2843102 - RNA, 19 nt, Artificial Sequence
  Description of Artificial Sequence: Synthetic oligonucleotide
agcaauaauguggucccag

SEQ ID NO: 2843103 - RNA, 19 nt, Artificial Sequence
  Description of Artificial Sequence: Synthetic oligonucleotide
ggugugacagaacccagcc

SEQ ID NO: 2843104 - RNA, 19 nt, Artificial Sequence
  Description of Artificial Sequence: Synthetic oligonucleotide
caagcagaagcaauaaugu

SEQ ID NO: 2843105 - RNA, 19 nt, Artificial Sequence
  Description of Artificial Sequence: Synthetic oligonucleotide
auggcaugaucccagggaa

SEQ ID NO: 2843106 - RNA, 19 nt, Artificial Sequence
  Description of Artificial Sequence: Synthetic oligonucleotide
ggagcgaccagacaaggac

SEQ ID NO: 2843107 - RNA, 19 nt, Artificial Sequence
  Description of Artificial Sequence: Synthetic oligonucleotide
agauggccacaccagccgg

SEQ ID NO: 2843108 - RNA, 19 nt, Artificial Sequence
  Description of Artificial Sequence: Synthetic oligonucleotide
acagaugaagcaggaagug

SEQ ID NO: 2843109 - RNA, 19 nt, Artificial Sequence
  Description of Artificial Sequence: Synthetic oligonucleotide
guugucaccaugaagacau

SEQ ID NO: 2843110 - RNA, 19 nt, Artificial Sequence
  Description of Artificial Sequence: Synthetic oligonucleotide
caugaucccagggaaggcc

SEQ ID NO: 2843111 - RNA, 19 nt, Artificial Sequence
  Description of Artificial Sequence: Synthetic oligonucleotide
aagacaucgagaggccaug

SEQ ID NO: 2843112 - RNA, 19 nt, Artificial Sequence
  Description of Artificial Sequence: Synthetic oligonucleotide
ggacccgccaagcagaagc

SEQ ID NO: 2843113 - RNA, 19 nt, Artificial Sequence
  Description of Artificial Sequence: Synthetic oligonucleotide
gucaagauggccacaccag

SEQ ID NO: 2843114 - RNA, 19 nt, Artificial Sequence
  Description of Artificial Sequence: Synthetic oligonucleotide
agaagaggugacuggaauu

SEQ ID NO: 2843115 - RNA, 19 nt, Artificial Sequence
  Description of Artificial Sequence: Synthetic oligonucleotide
gaccagacaaggaccagcc

SEQ ID NO: 2843116 - RNA, 19 nt, Artificial Sequence
  Description of Artificial Sequence: Synthetic oligonucleotide
aauggcgauuuccccgaca

SEQ ID NO: 2843117 - RNA, 19 nt, Artificial Sequence
  Description of Artificial Sequence: Synthetic oligonucleotide
auugaauggcaugauccca

SEQ ID NO: 2843118 - RNA, 19 nt, Artificial Sequence
  Description of Artificial Sequence: Synthetic oligonucleotide
agcaagguuuaaauaaacu

SEQ ID NO: 2843119 - RNA, 19 nt, Artificial Sequence
  Description of Artificial Sequence: Synthetic oligonucleotide
aggaugaagggagggcagc

SEQ ID NO: 2843120 - RNA, 19 nt, Artificial Sequence
  Description of Artificial Sequence: Synthetic oligonucleotide
accagacaaggaccagccc

SEQ ID NO: 2843121 - RNA, 19 nt, Artificial Sequence
  Description of Artificial Sequence: Synthetic oligonucleotide
agucaggaaugcaggaaac

SEQ ID NO: 2843122 - RNA, 19 nt, Artificial Sequence
  Description of Artificial Sequence: Synthetic oligonucleotide
ugaggcgccgggccgagcc

SEQ ID NO: 2843123 - RNA, 19 nt, Artificial Sequence
  Description of Artificial Sequence: Synthetic oligonucleotide
ucaggacagacaugacggc

SEQ ID NO: 2843124 - RNA, 19 nt, Artificial Sequence
  Description of Artificial Sequence: Synthetic oligonucleotide
caugaucaagaugggcugg

SEQ ID NO: 2843125 - RNA, 19 nt, Artificial Sequence
  Description of Artificial Sequence: Synthetic oligonucleotide
aggaggcaacagaugaagc

SEQ ID NO: 2843126 - RNA, 19 nt, Artificial Sequence
  Description of Artificial Sequence: Synthetic oligonucleotide
ucaacagcagcggcgucag

SEQ ID NO: 2843127 - RNA, 19 nt, Artificial Sequence
  Description of Artificial Sequence: Synthetic oligonucleotide
gacagaacccagcccgcag

SEQ ID NO: 2843128 - RNA, 19 nt, Artificial Sequence
  Description of Artificial Sequence: Synthetic oligonucleotide
acaucgagaggccaugauu

SEQ ID NO: 2843129 - RNA, 19 nt, Artificial Sequence
  Description of Artificial Sequence: Synthetic oligonucleotide
aggugugacagaacccagc

SEQ ID NO: 2843130 - RNA, 19 nt, Artificial Sequence
  Description of Artificial Sequence: Synthetic oligonucleotide
ucccgcuucuuguagcucu

SEQ ID NO: 2843131 - RNA, 19 nt, Artificial Sequence
  Description of Artificial Sequence: Synthetic oligonucleotide
agggagggcagcuccuuuc

SEQ ID NO: 2843132 - RNA, 19 nt, Artificial Sequence
  Description of Artificial Sequence: Synthetic oligonucleotide
cuggaauugaauggcauga

SEQ ID NO: 2843133 - RNA, 19 nt, Artificial Sequence
  Description of Artificial Sequence: Synthetic oligonucleotide
uggcaugaucccagggaag

SEQ ID NO: 2843134 - RNA, 19 nt, Artificial Sequence
  Description of Artificial Sequence: Synthetic oligonucleotide
aaggaccagcccaagguca

SEQ ID NO: 2843135 - RNA, 19 nt, Artificial Sequence
  Description of Artificial Sequence: Synthetic oligonucleotide
caggacagacaugacggcg

SEQ ID NO: 2843136 - RNA, 19 nt, Artificial Sequence
  Description of Artificial Sequence: Synthetic oligonucleotide
gccaugauugcagaagagg

SEQ ID NO: 2843137 - RNA, 19 nt, Artificial Sequence
  Description of Artificial Sequence: Synthetic oligonucleotide
gaugggcuggcaagagugg

SEQ ID NO: 2843138 - RNA, 19 nt, Artificial Sequence
  Description of Artificial Sequence: Synthetic oligonucleotide
accaugaggcgccgggccg

SEQ ID NO: 2843139 - RNA, 19 nt, Artificial Sequence
  Description of Artificial Sequence: Synthetic oligonucleotide
ggaggcaacagaugaagca

SEQ ID NO: 2843140 - RNA, 19 nt, Artificial Sequence
  Description of Artificial Sequence: Synthetic oligonucleotide
ggcaugaucccagggaagg

SEQ ID NO: 2843141 - RNA, 19 nt, Artificial Sequence
  Description of Artificial Sequence: Synthetic oligonucleotide
ugaagacaucgagaggcca

SEQ ID NO: 2843142 - RNA, 19 nt, Artificial Sequence
  Description of Artificial Sequence: Synthetic oligonucleotide
uuguagcucuccaggugug

SEQ ID NO: 2843143 - RNA, 19 nt, Artificial Sequence
  Description of Artificial Sequence: Synthetic oligonucleotide
acagacaugacggcgcgga

SEQ ID NO: 2843144 - RNA, 19 nt, Artificial Sequence
  Description of Artificial Sequence: Synthetic oligonucleotide
gaucaagaugggcuggcaa

SEQ ID NO: 2843145 - RNA, 19 nt, Artificial Sequence
  Description of Artificial Sequence: Synthetic oligonucleotide
aggcaacagaugaagcagg

SEQ ID NO: 2843146 - RNA, 19 nt, Artificial Sequence
  Description of Artificial Sequence: Synthetic oligonucleotide
caguugucaccaugaagac

SEQ ID NO: 2843147 - RNA, 19 nt, Artificial Sequence
  Description of Artificial Sequence: Synthetic oligonucleotide
ugagcgcgaggcaccauga

SEQ ID NO: 2843148 - RNA, 19 nt, Artificial Sequence
  Description of Artificial Sequence: Synthetic oligonucleotide
cccaauggcgauuuccccg

SEQ ID NO: 2843149 - RNA, 19 nt, Artificial Sequence
  Description of Artificial Sequence: Synthetic oligonucleotide
gagcccaauggcgauuucc

SEQ ID NO: 2843150 - RNA, 19 nt, Artificial Sequence
  Description of Artificial Sequence: Synthetic oligonucleotide
caggaugaagggagggcag

SEQ ID NO: 2843151 - RNA, 19 nt, Artificial Sequence
  Description of Artificial Sequence: Synthetic oligonucleotide
aagugagcccaauggcgau

SEQ ID NO: 2843152 - RNA, 19 nt, Artificial Sequence
  Description of Artificial Sequence: Synthetic oligonucleotide
gcaggaaacaugaucaaga

SEQ ID NO: 2843153 - RNA, 19 nt, Artificial Sequence
  Description of Artificial Sequence: Synthetic oligonucleotide
ggaauugaauggcaugauc

SEQ ID NO: 2843154 - RNA, 19 nt, Artificial Sequence
  Description of Artificial Sequence: Synthetic oligonucleotide
gagcgaccagacaaggacc

SEQ ID NO: 2843155 - RNA, 19 nt, Artificial Sequence
  Description of Artificial Sequence: Synthetic oligonucleotide
aagaggugacuggaauuga

SEQ ID NO: 2843156 - RNA, 19 nt, Artificial Sequence
  Description of Artificial Sequence: Synthetic oligonucleotide
caaggaccagcccaagguc

SEQ ID NO: 2843157 - RNA, 19 nt, Artificial Sequence
  Description of Artificial Sequence: Synthetic oligonucleotide
acaccgagcugcucccgcg

SEQ ID NO: 2843158 - RNA, 19 nt, Artificial Sequence
  Description of Artificial Sequence: Synthetic oligonucleotide
caccaugaagacaucgaga

SEQ ID NO: 2843159 - RNA, 19 nt, Artificial Sequence
  Description of Artificial Sequence: Synthetic oligonucleotide
cacaggaugaagggagggc

SEQ ID NO: 2843160 - RNA, 19 nt, Artificial Sequence
  Description of Artificial Sequence: Synthetic oligonucleotide
agucccgcuucuuguagcu

SEQ ID NO: 2843161 - RNA, 19 nt, Artificial Sequence
  Description of Artificial Sequence: Synthetic oligonucleotide
aguugucaccaugaagaca

SEQ ID NO: 2843162 - RNA, 19 nt, Artificial Sequence
  Description of Artificial Sequence: Synthetic oligonucleotide
gucacaggaugaagggagg

SEQ ID NO: 2843163 - RNA, 19 nt, Artificial Sequence
  Description of Artificial Sequence: Synthetic oligonucleotide
ggccgagccagucaggccc

SEQ ID NO: 2843164 - RNA, 19 nt, Artificial Sequence
  Description of Artificial Sequence: Synthetic oligonucleotide
accgagcugcucccgcggc

SEQ ID NO: 2843165 - RNA, 19 nt, Artificial Sequence
  Description of Artificial Sequence: Synthetic oligonucleotide
gcaagguuuaaauaaacuu

SEQ ID NO: 2843166 - RNA, 19 nt, Artificial Sequence
  Description of Artificial Sequence: Synthetic oligonucleotide
ucgagaggccaugauugca

SEQ ID NO: 2843167 - RNA, 19 nt, Artificial Sequence
  Description of Artificial Sequence: Synthetic oligonucleotide
cuccuuucagucccgcuuc

SEQ ID NO: 2843168 - RNA, 19 nt, Artificial Sequence
  Description of Artificial Sequence: Synthetic oligonucleotide
uaauguggucccaguuguc

SEQ ID NO: 2843169 - RNA, 19 nt, Artificial Sequence
  Description of Artificial Sequence: Synthetic oligonucleotide
cugagcgcgaggcaccaug

SEQ ID NO: 2843170 - RNA, 19 nt, Artificial Sequence
  Description of Artificial Sequence: Synthetic oligonucleotide
gacaccgagcugcucccgc

SEQ ID NO: 2843171 - RNA, 19 nt, Artificial Sequence
  Description of Artificial Sequence: Synthetic oligonucleotide
uagcucuccaggugugaca

SEQ ID NO: 2843172 - RNA, 19 nt, Artificial Sequence
  Description of Artificial Sequence: Synthetic oligonucleotide
gucuagucacaggaugaag

SEQ ID NO: 2843173 - RNA, 19 nt, Artificial Sequence
  Description of Artificial Sequence: Synthetic oligonucleotide
gauuuccccgacaccgagc

SEQ ID NO: 2843174 - RNA, 19 nt, Artificial Sequence
  Description of Artificial Sequence: Synthetic oligonucleotide
cuuguagcucuccaggugu

SEQ ID NO: 2843175 - RNA, 19 nt, Artificial Sequence
  Description of Artificial Sequence: Synthetic oligonucleotide
ggcgucaggacagacauga

SEQ ID NO: 2843176 - RNA, 19 nt, Artificial Sequence
  Description of Artificial Sequence: Synthetic oligonucleotide
ggcaagaguggucuaguca

SEQ ID NO: 2843177 - RNA, 19 nt, Artificial Sequence
  Description of Artificial Sequence: Synthetic oligonucleotide
ucaggccccucaacagcag

SEQ ID NO: 2843178 - RNA, 19 nt, Artificial Sequence
  Description of Artificial Sequence: Synthetic oligonucleotide
gugugacagaacccagccc

SEQ ID NO: 2843179 - RNA, 19 nt, Artificial Sequence
  Description of Artificial Sequence: Synthetic oligonucleotide
uggaauugaauggcaugau

SEQ ID NO: 2843180 - RNA, 19 nt, Artificial Sequence
  Description of Artificial Sequence: Synthetic oligonucleotide
uucagucccgcuucuugua

SEQ ID NO: 2843181 - RNA, 19 nt, Artificial Sequence
  Description of Artificial Sequence: Synthetic oligonucleotide
cagaacccagcccgcaggc

SEQ ID NO: 2843182 - RNA, 19 nt, Artificial Sequence
  Description of Artificial Sequence: Synthetic oligonucleotide
caccaugaggcgccgggcc

SEQ ID NO: 2843183 - RNA, 19 nt, Artificial Sequence
  Description of Artificial Sequence: Synthetic oligonucleotide
cagucaggaaugcaggaaa

SEQ ID NO: 2843184 - RNA, 19 nt, Artificial Sequence
  Description of Artificial Sequence: Synthetic oligonucleotide
ugaucaagaugggcuggca

SEQ ID NO: 2843185 - RNA, 19 nt, Artificial Sequence
  Description of Artificial Sequence: Synthetic oligonucleotide
guggaccugagcgcgaggc

SEQ ID NO: 2843186 - RNA, 19 nt, Artificial Sequence
  Description of Artificial Sequence: Synthetic oligonucleotide
ggcaccaugaggcgccggg

SEQ ID NO: 2843187 - RNA, 19 nt, Artificial Sequence
  Description of Artificial Sequence: Synthetic oligonucleotide
ggacagacaugacggcgcg

SEQ ID NO: 2843188 - RNA, 19 nt, Artificial Sequence
  Description of Artificial Sequence: Synthetic oligonucleotide
uggaccugagcgcgaggca

SEQ ID NO: 2843189 - RNA, 19 nt, Artificial Sequence
  Description of Artificial Sequence: Synthetic oligonucleotide
caugacggcgcggagcgac

SEQ ID NO: 2843190 - RNA, 19 nt, Artificial Sequence
  Description of Artificial Sequence: Synthetic oligonucleotide
cagcccgcaggcaggaggc

SEQ ID NO: 2843191 - RNA, 19 nt, Artificial Sequence
  Description of Artificial Sequence: Synthetic oligonucleotide
aaggccagucaggaaugca

SEQ ID NO: 2843192 - RNA, 19 nt, Artificial Sequence
  Description of Artificial Sequence: Synthetic oligonucleotide
caagaugggcuggcaagag

SEQ ID NO: 2843193 - RNA, 19 nt, Artificial Sequence
  Description of Artificial Sequence: Synthetic oligonucleotide
uguagcucuccagguguga

SEQ ID NO: 2843194 - RNA, 19 nt, Artificial Sequence
  Description of Artificial Sequence: Synthetic oligonucleotide
cagucccgcuucuuguagc

SEQ ID NO: 2843195 - RNA, 19 nt, Artificial Sequence
  Description of Artificial Sequence: Synthetic oligonucleotide
agcagcggcgucaggacag

SEQ ID NO: 2843196 - RNA, 19 nt, Artificial Sequence
  Description of Artificial Sequence: Synthetic oligonucleotide
gagaggccaugauugcaga

SEQ ID NO: 2843197 - RNA, 19 nt, Artificial Sequence
  Description of Artificial Sequence: Synthetic oligonucleotide
augcaggaaacaugaucaa

SEQ ID NO: 2843198 - RNA, 19 nt, Artificial Sequence
  Description of Artificial Sequence: Synthetic oligonucleotide
uggcgauuuccccgacacc

SEQ ID NO: 2843199 - RNA, 19 nt, Artificial Sequence
  Description of Artificial Sequence: Synthetic oligonucleotide
aucccagggaaggccaguc

SEQ ID NO: 2843200 - RNA, 19 nt, Artificial Sequence
  Description of Artificial Sequence: Synthetic oligonucleotide
ucccagggaaggccaguca

SEQ ID NO: 2843201 - RNA, 19 nt, Artificial Sequence
  Description of Artificial Sequence: Synthetic oligonucleotide
agguuuaaauaaacuuuau

SEQ ID NO: 2843202 - RNA, 19 nt, Artificial Sequence
  Description of Artificial Sequence: Synthetic oligonucleotide
gguuuaaauaaacuuuauu

SEQ ID NO: 2843203 - RNA, 19 nt, Artificial Sequence
  Description of Artificial Sequence: Synthetic oligonucleotide
aagcaauaaugugguccca

SEQ ID NO: 2843204 - RNA, 19 nt, Artificial Sequence
  Description of Artificial Sequence: Synthetic oligonucleotide
uccuuucagucccgcuucu

SEQ ID NO: 2843205 - RNA, 19 nt, Artificial Sequence
  Description of Artificial Sequence: Synthetic oligonucleotide
aguggaccugagcgcgagg

SEQ ID NO: 2843206 - RNA, 19 nt, Artificial Sequence
  Description of Artificial Sequence: Synthetic oligonucleotide
gaaggccagucaggaaugc

SEQ ID NO: 2843207 - RNA, 19 nt, Artificial Sequence
  Description of Artificial Sequence: Synthetic oligonucleotide
gaugaagggagggcagcuc

SEQ ID NO: 2843208 - RNA, 19 nt, Artificial Sequence
  Description of Artificial Sequence: Synthetic oligonucleotide
uggcaagaguggucuaguc

SEQ ID NO: 2843209 - RNA, 19 nt, Artificial Sequence
  Description of Artificial Sequence: Synthetic oligonucleotide
cagacaaggaccagcccaa

SEQ ID NO: 2843210 - RNA, 19 nt, Artificial Sequence
  Description of Artificial Sequence: Synthetic oligonucleotide
aggccccucaacagcagcg

SEQ ID NO: 2843211 - RNA, 19 nt, Artificial Sequence
  Description of Artificial Sequence: Synthetic oligonucleotide
agaggccaugauugcagaa

SEQ ID NO: 2843212 - RNA, 19 nt, Artificial Sequence
  Description of Artificial Sequence: Synthetic oligonucleotide
gucaggaaugcaggaaaca

SEQ ID NO: 2843213 - RNA, 19 nt, Artificial Sequence
  Description of Artificial Sequence: Synthetic oligonucleotide
ugacagaacccagcccgca

SEQ ID NO: 2843214 - RNA, 19 nt, Artificial Sequence
  Description of Artificial Sequence: Synthetic oligonucleotide
ccagacaaggaccagccca

SEQ ID NO: 2843215 - RNA, 19 nt, Artificial Sequence
  Description of Artificial Sequence: Synthetic oligonucleotide
gagccagucaggccccuca

SEQ ID NO: 2843216 - RNA, 19 nt, Artificial Sequence
  Description of Artificial Sequence: Synthetic oligonucleotide
gaguggaccugagcgcgag

SEQ ID NO: 2843217 - RNA, 19 nt, Artificial Sequence
  Description of Artificial Sequence: Synthetic oligonucleotide
ggccagucaggaaugcagg

SEQ ID NO: 2843218 - RNA, 19 nt, Artificial Sequence
  Description of Artificial Sequence: Synthetic oligonucleotide
gacagacaugacggcgcgg

SEQ ID NO: 2843219 - RNA, 19 nt, Artificial Sequence
  Description of Artificial Sequence: Synthetic oligonucleotide
guagcucuccaggugugac

SEQ ID NO: 2843220 - RNA, 19 nt, Artificial Sequence
  Description of Artificial Sequence: Synthetic oligonucleotide
cucaacagcagcggcguca

SEQ ID NO: 2843221 - RNA, 19 nt, Artificial Sequence
  Description of Artificial Sequence: Synthetic oligonucleotide
gcgcgaggcaccaugaggc

SEQ ID NO: 2843222 - RNA, 19 nt, Artificial Sequence
  Description of Artificial Sequence: Synthetic oligonucleotide
gagcgcgaggcaccaugag

SEQ ID NO: 2843223 - RNA, 19 nt, Artificial Sequence
  Description of Artificial Sequence: Synthetic oligonucleotide
cccgacaccgagcugcucc

SEQ ID NO: 2843224 - RNA, 19 nt, Artificial Sequence
  Description of Artificial Sequence: Synthetic oligonucleotide
ccaugaagacaucgagagg

SEQ ID NO: 2843225 - RNA, 19 nt, Artificial Sequence
  Description of Artificial Sequence: Synthetic oligonucleotide
caagaguggucuagucaca

SEQ ID NO: 2843226 - RNA, 19 nt, Artificial Sequence
  Description of Artificial Sequence: Synthetic oligonucleotide
aggaccagcccaaggucag

SEQ ID NO: 2843227 - RNA, 19 nt, Artificial Sequence
  Description of Artificial Sequence: Synthetic oligonucleotide
gcaggaagugagcccaaug

SEQ ID NO: 2843228 - RNA, 19 nt, Artificial Sequence
  Description of Artificial Sequence: Synthetic oligonucleotide
agaggugacuggaauugaa

SEQ ID NO: 2843229 - RNA, 19 nt, Artificial Sequence
  Description of Artificial Sequence: Synthetic oligonucleotide
gauugcagaagaggugacu

SEQ ID NO: 2843230 - RNA, 19 nt, Artificial Sequence
  Description of Artificial Sequence: Synthetic oligonucleotide
ccagggaaggccagucagg

SEQ ID NO: 2843231 - RNA, 19 nt, Artificial Sequence
  Description of Artificial Sequence: Synthetic oligonucleotide
cccaguugucaccaugaag

SEQ ID NO: 2843232 - RNA, 19 nt, Artificial Sequence
  Description of Artificial Sequence: Synthetic oligonucleotide
ccagcccaaggucaggaag

SEQ ID NO: 2843233 - RNA, 19 nt, Artificial Sequence
  Description of Artificial Sequence: Synthetic oligonucleotide
gagggcagcuccuuucagu

SEQ ID NO: 2843234 - RNA, 19 nt, Artificial Sequence
  Description of Artificial Sequence: Synthetic oligonucleotide
gaccugagcgcgaggcacc

SEQ ID NO: 2843235 - RNA, 19 nt, Artificial Sequence
  Description of Artificial Sequence: Synthetic oligonucleotide
gaagacaucgagaggccau

SEQ ID NO: 2843236 - RNA, 19 nt, Artificial Sequence
  Description of Artificial Sequence: Synthetic oligonucleotide
agcuccuuucagucccgcu

SEQ ID NO: 2843237 - RNA, 19 nt, Artificial Sequence
  Description of Artificial Sequence: Synthetic oligonucleotide
caggaaacaugaucaagau

SEQ ID NO: 2843238 - RNA, 19 nt, Artificial Sequence
  Description of Artificial Sequence: Synthetic oligonucleotide
caccgagcugcucccgcgg

SEQ ID NO: 2843239 - RNA, 19 nt, Artificial Sequence
  Description of Artificial Sequence: Synthetic oligonucleotide
ccaugauugcagaagaggu

SEQ ID NO: 2843240 - RNA, 19 nt, Artificial Sequence
  Description of Artificial Sequence: Synthetic oligonucleotide
gggaaggccagucaggaau

SEQ ID NO: 2843241 - RNA, 19 nt, Artificial Sequence
  Description of Artificial Sequence: Synthetic oligonucleotide
gucaggccccucaacagca

SEQ ID NO: 2843242 - RNA, 19 nt, Artificial Sequence
  Description of Artificial Sequence: Synthetic oligonucleotide
aguggucuagucacaggau

SEQ ID NO: 2843243 - RNA, 19 nt, Artificial Sequence
  Description of Artificial Sequence: Synthetic oligonucleotide
caggccccucaacagcagc

SEQ ID NO: 2843244 - RNA, 19 nt, Artificial Sequence
  Description of Artificial Sequence: Synthetic oligonucleotide
ggaaggccagucaggaaug

SEQ ID NO: 2843245 - RNA, 19 nt, Artificial Sequence
  Description of Artificial Sequence: Synthetic oligonucleotide
augggcuggcaagaguggu

SEQ ID NO: 2843246 - RNA, 19 nt, Artificial Sequence
  Description of Artificial Sequence: Synthetic oligonucleotide
uggccacaccagccggaag

SEQ ID NO: 2843247 - RNA, 19 nt, Artificial Sequence
  Description of Artificial Sequence: Synthetic oligonucleotide
cccagggaaggccagucag

SEQ ID NO: 2843248 - RNA, 19 nt, Artificial Sequence
  Description of Artificial Sequence: Synthetic oligonucleotide
gugacagaacccagcccgc

SEQ ID NO: 2843249 - RNA, 19 nt, Artificial Sequence
  Description of Artificial Sequence: Synthetic oligonucleotide
ccccucaacagcagcggcg

SEQ ID NO: 2843250 - RNA, 19 nt, Artificial Sequence
  Description of Artificial Sequence: Synthetic oligonucleotide
uuuccccgacaccgagcug

SEQ ID NO: 2843251 - RNA, 19 nt, Artificial Sequence
  Description of Artificial Sequence: Synthetic oligonucleotide
augacggcgcggagcgacc

SEQ ID NO: 2843252 - RNA, 19 nt, Artificial Sequence
  Description of Artificial Sequence: Synthetic oligonucleotide
ucccgcggcggcuucgagu

SEQ ID NO: 2843253 - RNA, 19 nt, Artificial Sequence
  Description of Artificial Sequence: Synthetic oligonucleotide
gaccagcccaaggucagga

SEQ ID NO: 2843254 - RNA, 19 nt, Artificial Sequence
  Description of Artificial Sequence: Synthetic oligonucleotide
cagacaugacggcgcggag

SEQ ID NO: 2843255 - RNA, 19 nt, Artificial Sequence
  Description of Artificial Sequence: Synthetic oligonucleotide
gcuucgaguggaccugagc

SEQ ID NO: 2843256 - RNA, 19 nt, Artificial Sequence
  Description of Artificial Sequence: Synthetic oligonucleotide
uugucaccaugaagacauc

SEQ ID NO: 2843257 - RNA, 19 nt, Artificial Sequence
  Description of Artificial Sequence: Synthetic oligonucleotide
agacaaggaccagcccaag

SEQ ID NO: 2843258 - RNA, 19 nt, Artificial Sequence
  Description of Artificial Sequence: Synthetic oligonucleotide
cccaaggucaggaagucaa

SEQ ID NO: 2843259 - RNA, 19 nt, Artificial Sequence
  Description of Artificial Sequence: Synthetic oligonucleotide
agacaucgagaggccauga

SEQ ID NO: 2843260 - RNA, 19 nt, Artificial Sequence
  Description of Artificial Sequence: Synthetic oligonucleotide
gauggccacaccagccgga

SEQ ID NO: 2843261 - RNA, 19 nt, Artificial Sequence
  Description of Artificial Sequence: Synthetic oligonucleotide
gcaggcaggaggcaacaga

SEQ ID NO: 2843262 - RNA, 19 nt, Artificial Sequence
  Description of Artificial Sequence: Synthetic oligonucleotide
ccagcccgcaggcaggagg

SEQ ID NO: 2843263 - RNA, 19 nt, Artificial Sequence
  Description of Artificial Sequence: Synthetic oligonucleotide
gacuggaauugaauggcau

SEQ ID NO: 2843264 - RNA, 19 nt, Artificial Sequence
  Description of Artificial Sequence: Synthetic oligonucleotide
guggucccaguugucacca

SEQ ID NO: 2843265 - RNA, 19 nt, Artificial Sequence
  Description of Artificial Sequence: Synthetic oligonucleotide
gacggcgcggagcgaccag

SEQ ID NO: 2843266 - RNA, 19 nt, Artificial Sequence
  Description of Artificial Sequence: Synthetic oligonucleotide
ccaggugugacagaaccca

SEQ ID NO: 2843267 - RNA, 19 nt, Artificial Sequence
  Description of Artificial Sequence: Synthetic oligonucleotide
gaggugacuggaauugaau

SEQ ID NO: 2843268 - RNA, 19 nt, Artificial Sequence
  Description of Artificial Sequence: Synthetic oligonucleotide
agggaaggccagucaggaa

SEQ ID NO: 2843269 - RNA, 19 nt, Artificial Sequence
  Description of Artificial Sequence: Synthetic oligonucleotide
ccagucaggccccucaaca

SEQ ID NO: 2843270 - RNA, 19 nt, Artificial Sequence
  Description of Artificial Sequence: Synthetic oligonucleotide
cagaagaggugacuggaau

SEQ ID NO: 2843271 - RNA, 19 nt, Artificial Sequence
  Description of Artificial Sequence: Synthetic oligonucleotide
cgaggcaccaugaggcgcc

SEQ ID NO: 2843272 - RNA, 19 nt, Artificial Sequence
  Description of Artificial Sequence: Synthetic oligonucleotide
caauaauguggucccaguu

SEQ ID NO: 2843273 - RNA, 19 nt, Artificial Sequence
  Description of Artificial Sequence: Synthetic oligonucleotide
ggaccugagcgcgaggcac

SEQ ID NO: 2843274 - RNA, 19 nt, Artificial Sequence
  Description of Artificial Sequence: Synthetic oligonucleotide
uccccgacaccgagcugcu

SEQ ID NO: 2843275 - RNA, 19 nt, Artificial Sequence
  Description of Artificial Sequence: Synthetic oligonucleotide
accagcccaaggucaggaa

SEQ ID NO: 2843276 - RNA, 19 nt, Artificial Sequence
  Description of Artificial Sequence: Synthetic oligonucleotide
ggccaugauugcagaagag

SEQ ID NO: 2843277 - RNA, 19 nt, Artificial Sequence
  Description of Artificial Sequence: Synthetic oligonucleotide
cccgcggcggcuucgagug

SEQ ID NO: 2843278 - RNA, 19 nt, Artificial Sequence
  Description of Artificial Sequence: Synthetic oligonucleotide
gcccaauggcgauuucccc

SEQ ID NO: 2843279 - RNA, 19 nt, Artificial Sequence
  Description of Artificial Sequence: Synthetic oligonucleotide
gacccgccaagcagaagca

SEQ ID NO: 2843280 - RNA, 19 nt, Artificial Sequence
  Description of Artificial Sequence: Synthetic oligonucleotide
agcggcgucaggacagaca

SEQ ID NO: 2843281 - RNA, 19 nt, Artificial Sequence
  Description of Artificial Sequence: Synthetic oligonucleotide
gacaucgagaggccaugau

SEQ ID NO: 2843282 - RNA, 19 nt, Artificial Sequence
  Description of Artificial Sequence: Synthetic oligonucleotide
ccaauggcgauuuccccga

SEQ ID NO: 2843283 - RNA, 19 nt, Artificial Sequence
  Description of Artificial Sequence: Synthetic oligonucleotide
gaggcaccaugaggcgccg

SEQ ID NO: 2843284 - RNA, 19 nt, Artificial Sequence
  Description of Artificial Sequence: Synthetic oligonucleotide
ggcaacagaugaagcagga

SEQ ID NO: 2843285 - RNA, 19 nt, Artificial Sequence
  Description of Artificial Sequence: Synthetic oligonucleotide
ggagggcagcuccuuucag

SEQ ID NO: 2843286 - RNA, 19 nt, Artificial Sequence
  Description of Artificial Sequence: Synthetic oligonucleotide
ugagcccaauggcgauuuc

SEQ ID NO: 2843287 - RNA, 19 nt, Artificial Sequence
  Description of Artificial Sequence: Synthetic oligonucleotide
gccgggccgagccagucag

SEQ ID NO: 2843288 - RNA, 19 nt, Artificial Sequence
  Description of Artificial Sequence: Synthetic oligonucleotide
ugacggcgcggagcgacca

SEQ ID NO: 2843289 - RNA, 19 nt, Artificial Sequence
  Description of Artificial Sequence: Synthetic oligonucleotide
gcaauaauguggucccagu

SEQ ID NO: 2843290 - RNA, 19 nt, Artificial Sequence
  Description of Artificial Sequence: Synthetic oligonucleotide
ggccccucaacagcagcgg

SEQ ID NO: 2843291 - RNA, 19 nt, Artificial Sequence
  Description of Artificial Sequence: Synthetic oligonucleotide
ggccacaccagccggaagu

SEQ ID NO: 2843292 - RNA, 19 nt, Artificial Sequence
  Description of Artificial Sequence: Synthetic oligonucleotide
agccagucaggccccucaa

SEQ ID NO: 2843293 - RNA, 19 nt, Artificial Sequence
  Description of Artificial Sequence: Synthetic oligonucleotide
gccagucaggaaugcagga

SEQ ID NO: 2843294 - RNA, 19 nt, Artificial Sequence
  Description of Artificial Sequence: Synthetic oligonucleotide
caauggcgauuuccccgac

SEQ ID NO: 2843295 - RNA, 19 nt, Artificial Sequence
  Description of Artificial Sequence: Synthetic oligonucleotide
agaacccagcccgcaggca

SEQ ID NO: 2843296 - RNA, 19 nt, Artificial Sequence
  Description of Artificial Sequence: Synthetic oligonucleotide
agugagcccaauggcgauu

SEQ ID NO: 2843297 - RNA, 19 nt, Artificial Sequence
  Description of Artificial Sequence: Synthetic oligonucleotide
gggagggcagcuccuuuca

SEQ ID NO: 2843298 - RNA, 19 nt, Artificial Sequence
  Description of Artificial Sequence: Synthetic oligonucleotide
ugcucccgcggcggcuucg

SEQ ID NO: 2843299 - RNA, 19 nt, Artificial Sequence
  Description of Artificial Sequence: Synthetic oligonucleotide
gcggagcgaccagacaagg

SEQ ID NO: 2843300 - RNA, 19 nt, Artificial Sequence
  Description of Artificial Sequence: Synthetic oligonucleotide
gcaugaucccagggaaggc

SEQ ID NO: 2843301 - RNA, 19 nt, Artificial Sequence
  Description of Artificial Sequence: Synthetic oligonucleotide
auggccacaccagccggaa

SEQ ID NO: 2843302 - RNA, 19 nt, Artificial Sequence
  Description of Artificial Sequence: Synthetic oligonucleotide
ggucuagucacaggaugaa

SEQ ID NO: 2843303 - RNA, 19 nt, Artificial Sequence
  Description of Artificial Sequence: Synthetic oligonucleotide
agcaggaagugagcccaau

SEQ ID NO: 2843304 - RNA, 19 nt, Artificial Sequence
  Description of Artificial Sequence: Synthetic oligonucleotide
aagcaggaagugagcccaa

SEQ ID NO: 2843305 - RNA, 19 nt, Artificial Sequence
  Description of Artificial Sequence: Synthetic oligonucleotide
ccgacaccgagcugcuccc

SEQ ID NO: 2843306 - RNA, 19 nt, Artificial Sequence
  Description of Artificial Sequence: Synthetic oligonucleotide
ggcggcuucgaguggaccu

SEQ ID NO: 2843307 - RNA, 19 nt, Artificial Sequence
  Description of Artificial Sequence: Synthetic oligonucleotide
accugagcgcgaggcacca

SEQ ID NO: 2843308 - RNA, 19 nt, Artificial Sequence
  Description of Artificial Sequence: Synthetic oligonucleotide
cgaccagacaaggaccagc

SEQ ID NO: 2843309 - RNA, 19 nt, Artificial Sequence
  Description of Artificial Sequence: Synthetic oligonucleotide
gcggcgucaggacagacau

SEQ ID NO: 2843310 - RNA, 19 nt, Artificial Sequence
  Description of Artificial Sequence: Synthetic oligonucleotide
cgauuuccccgacaccgag

SEQ ID NO: 2843311 - RNA, 19 nt, Artificial Sequence
  Description of Artificial Sequence: Synthetic oligonucleotide
caugaggcgccgggccgag

SEQ ID NO: 2843312 - RNA, 19 nt, Artificial Sequence
  Description of Artificial Sequence: Synthetic oligonucleotide
cagcagcggcgucaggaca

SEQ ID NO: 2843313 - RNA, 19 nt, Artificial Sequence
  Description of Artificial Sequence: Synthetic oligonucleotide
cagcuccuuucagucccgc

SEQ ID NO: 2843314 - RNA, 19 nt, Artificial Sequence
  Description of Artificial Sequence: Synthetic oligonucleotide
gccccucaacagcagcggc

SEQ ID NO: 2843315 - RNA, 19 nt, Artificial Sequence
  Description of Artificial Sequence: Synthetic oligonucleotide
ggaccagcccaaggucagg

SEQ ID NO: 2843316 - RNA, 19 nt, Artificial Sequence
  Description of Artificial Sequence: Synthetic oligonucleotide
augaggcgccgggccgagc

SEQ ID NO: 2843317 - RNA, 19 nt, Artificial Sequence
  Description of Artificial Sequence: Synthetic oligonucleotide
ggaagucaagauggccaca

SEQ ID NO: 2843318 - RNA, 19 nt, Artificial Sequence
  Description of Artificial Sequence: Synthetic oligonucleotide
gcgaggcaccaugaggcgc

SEQ ID NO: 2843319 - RNA, 19 nt, Artificial Sequence
  Description of Artificial Sequence: Synthetic oligonucleotide
acggcgcggagcgaccaga

SEQ ID NO: 2843320 - RNA, 19 nt, Artificial Sequence
  Description of Artificial Sequence: Synthetic oligonucleotide
aggcgccgggccgagccag

SEQ ID NO: 2843321 - RNA, 19 nt, Artificial Sequence
  Description of Artificial Sequence: Synthetic oligonucleotide
gcuccuuucagucccgcuu

SEQ ID NO: 2843322 - RNA, 19 nt, Artificial Sequence
  Description of Artificial Sequence: Synthetic oligonucleotide
gcaacagaugaagcaggaa

SEQ ID NO: 2843323 - RNA, 19 nt, Artificial Sequence
  Description of Artificial Sequence: Synthetic oligonucleotide
gcggcuucgaguggaccug

SEQ ID NO: 2843324 - RNA, 19 nt, Artificial Sequence
  Description of Artificial Sequence: Synthetic oligonucleotide
cgcggagcgaccagacaag

SEQ ID NO: 2843325 - RNA, 19 nt, Artificial Sequence
  Description of Artificial Sequence: Synthetic oligonucleotide
uggucccaguugucaccau

SEQ ID NO: 2843326 - RNA, 19 nt, Artificial Sequence
  Description of Artificial Sequence: Synthetic oligonucleotide
gggccgagccagucaggcc

SEQ ID NO: 2843327 - RNA, 19 nt, Artificial Sequence
  Description of Artificial Sequence: Synthetic oligonucleotide
gaucccagggaaggccagu

SEQ ID NO: 2843328 - RNA, 19 nt, Artificial Sequence
  Description of Artificial Sequence: Synthetic oligonucleotide
aggcaccaugaggcgccgg

SEQ ID NO: 2843329 - RNA, 19 nt, Artificial Sequence
  Description of Artificial Sequence: Synthetic oligonucleotide
cuggcaagaguggucuagu

SEQ ID NO: 2843330 - RNA, 19 nt, Artificial Sequence
  Description of Artificial Sequence: Synthetic oligonucleotide
gaggcgccgggccgagcca

SEQ ID NO: 2843331 - RNA, 19 nt, Artificial Sequence
  Description of Artificial Sequence: Synthetic oligonucleotide
cccgcaggcaggaggcaac

SEQ ID NO: 2843332 - RNA, 19 nt, Artificial Sequence
  Description of Artificial Sequence: Synthetic oligonucleotide
ccgagcugcucccgcggcg

SEQ ID NO: 2843333 - RNA, 19 nt, Artificial Sequence
  Description of Artificial Sequence: Synthetic oligonucleotide
gcagaagaggugacuggaa

SEQ ID NO: 2843334 - RNA, 19 nt, Artificial Sequence
  Description of Artificial Sequence: Synthetic oligonucleotide
cgcgaggcaccaugaggcg

SEQ ID NO: 2843335 - RNA, 19 nt, Artificial Sequence
  Description of Artificial Sequence: Synthetic oligonucleotide
acccgccaagcagaagcaa

SEQ ID NO: 2843336 - RNA, 19 nt, Artificial Sequence
  Description of Artificial Sequence: Synthetic oligonucleotide
gcaccaugaggcgccgggc

SEQ ID NO: 2843337 - RNA, 19 nt, Artificial Sequence
  Description of Artificial Sequence: Synthetic oligonucleotide
ccagucaggaaugcaggaa

SEQ ID NO: 2843338 - RNA, 19 nt, Artificial Sequence
  Description of Artificial Sequence: Synthetic oligonucleotide
gggcuggcaagaguggucu

SEQ ID NO: 2843339 - RNA, 19 nt, Artificial Sequence
  Description of Artificial Sequence: Synthetic oligonucleotide
acccagcccgcaggcagga

SEQ ID NO: 2843340 - RNA, 19 nt, Artificial Sequence
  Description of Artificial Sequence: Synthetic oligonucleotide
gccaagcagaagcaauaau

SEQ ID NO: 2843341 - RNA, 19 nt, Artificial Sequence
  Description of Artificial Sequence: Synthetic oligonucleotide
ggcuucgaguggaccugag

SEQ ID NO: 2843342 - RNA, 19 nt, Artificial Sequence
  Description of Artificial Sequence: Synthetic oligonucleotide
gaagggagggcagcuccuu

SEQ ID NO: 2843343 - RNA, 19 nt, Artificial Sequence
  Description of Artificial Sequence: Synthetic oligonucleotide
gcgaccagacaaggaccag

SEQ ID NO: 2843344 - RNA, 19 nt, Artificial Sequence
  Description of Artificial Sequence: Synthetic oligonucleotide
ccgccaagcagaagcaaua

SEQ ID NO: 2843345 - RNA, 19 nt, Artificial Sequence
  Description of Artificial Sequence: Synthetic oligonucleotide
gucccgcuucuuguagcuc

SEQ ID NO: 2843346 - RNA, 19 nt, Artificial Sequence
  Description of Artificial Sequence: Synthetic oligonucleotide
gugagcccaauggcgauuu

SEQ ID NO: 2843347 - RNA, 19 nt, Artificial Sequence
  Description of Artificial Sequence: Synthetic oligonucleotide
cgagcugcucccgcggcgg

SEQ ID NO: 2843348 - RNA, 19 nt, Artificial Sequence
  Description of Artificial Sequence: Synthetic oligonucleotide
acaugacggcgcggagcga

SEQ ID NO: 2843349 - RNA, 19 nt, Artificial Sequence
  Description of Artificial Sequence: Synthetic oligonucleotide
cucccgcggcggcuucgag

SEQ ID NO: 2843350 - RNA, 19 nt, Artificial Sequence
  Description of Artificial Sequence: Synthetic oligonucleotide
gcgauuuccccgacaccga

SEQ ID NO: 2843351 - RNA, 19 nt, Artificial Sequence
  Description of Artificial Sequence: Synthetic oligonucleotide
cagcggcgucaggacagac

SEQ ID NO: 2843352 - RNA, 19 nt, Artificial Sequence
  Description of Artificial Sequence: Synthetic oligonucleotide
ggcgcggagcgaccagaca

SEQ ID NO: 2843353 - RNA, 19 nt, Artificial Sequence
  Description of Artificial Sequence: Synthetic oligonucleotide
cgggccgagccagucaggc

SEQ ID NO: 2843354 - RNA, 19 nt, Artificial Sequence
  Description of Artificial Sequence: Synthetic oligonucleotide
gccgagccagucaggcccc

SEQ ID NO: 2843355 - RNA, 19 nt, Artificial Sequence
  Description of Artificial Sequence: Synthetic oligonucleotide
agcccgcaggcaggaggca

SEQ ID NO: 2843356 - RNA, 19 nt, Artificial Sequence
  Description of Artificial Sequence: Synthetic oligonucleotide
gggacccgccaagcagaag

SEQ ID NO: 2843357 - RNA, 19 nt, Artificial Sequence
  Description of Artificial Sequence: Synthetic oligonucleotide
ggaaugcaggaaacaugau

SEQ ID NO: 2843358 - RNA, 19 nt, Artificial Sequence
  Description of Artificial Sequence: Synthetic oligonucleotide
ccgggccgagccagucagg

SEQ ID NO: 2843359 - RNA, 19 nt, Artificial Sequence
  Description of Artificial Sequence: Synthetic oligonucleotide
cccgccaagcagaagcaau

SEQ ID NO: 2843360 - RNA, 19 nt, Artificial Sequence
  Description of Artificial Sequence: Synthetic oligonucleotide
ccacaccagccggaaguuc

SEQ ID NO: 2843361 - RNA, 19 nt, Artificial Sequence
  Description of Artificial Sequence: Synthetic oligonucleotide
gcgucaggacagacaugac

SEQ ID NO: 2843362 - RNA, 19 nt, Artificial Sequence
  Description of Artificial Sequence: Synthetic oligonucleotide
cugcucccgcggcggcuuc

SEQ ID NO: 2843363 - RNA, 19 nt, Artificial Sequence
  Description of Artificial Sequence: Synthetic oligonucleotide
ccucaacagcagcggcguc

SEQ ID NO: 2843364 - RNA, 19 nt, Artificial Sequence
  Description of Artificial Sequence: Synthetic oligonucleotide
ggcuggcaagaguggucua

SEQ ID NO: 2843365 - RNA, 19 nt, Artificial Sequence
  Description of Artificial Sequence: Synthetic oligonucleotide
ccaugaggcgccgggccga

SEQ ID NO: 2843366 - RNA, 19 nt, Artificial Sequence
  Description of Artificial Sequence: Synthetic oligonucleotide
gcagcggcgucaggacaga

SEQ ID NO: 2843367 - RNA, 19 nt, Artificial Sequence
  Description of Artificial Sequence: Synthetic oligonucleotide
ggggacccgccaagcagaa

SEQ ID NO: 2843368 - RNA, 19 nt, Artificial Sequence
  Description of Artificial Sequence: Synthetic oligonucleotide
cgacaccgagcugcucccg

SEQ ID NO: 2843369 - RNA, 19 nt, Artificial Sequence
  Description of Artificial Sequence: Synthetic oligonucleotide
cggcgcggagcgaccagac

SEQ ID NO: 2843370 - RNA, 19 nt, Artificial Sequence
  Description of Artificial Sequence: Synthetic oligonucleotide
cgccaagcagaagcaauaa

SEQ ID NO: 2843371 - RNA, 19 nt, Artificial Sequence
  Description of Artificial Sequence: Synthetic oligonucleotide
cgcaggcaggaggcaacag

SEQ ID NO: 2843372 - RNA, 19 nt, Artificial Sequence
  Description of Artificial Sequence: Synthetic oligonucleotide
cgaguggaccugagcgcga

SEQ ID NO: 2843373 - RNA, 19 nt, Artificial Sequence
  Description of Artificial Sequence: Synthetic oligonucleotide
gcggcggcuucgaguggac

SEQ ID NO: 2843374 - RNA, 19 nt, Artificial Sequence
  Description of Artificial Sequence: Synthetic oligonucleotide
ccgcggcggcuucgagugg

SEQ ID NO: 2843375 - RNA, 19 nt, Artificial Sequence
  Description of Artificial Sequence: Synthetic oligonucleotide
ccgcaggcaggaggcaaca

SEQ ID NO: 2843376 - RNA, 19 nt, Artificial Sequence
  Description of Artificial Sequence: Synthetic oligonucleotide
gccacaccagccggaaguu

SEQ ID NO: 2843377 - RNA, 19 nt, Artificial Sequence
  Description of Artificial Sequence: Synthetic oligonucleotide
cggcggcuucgaguggacc

SEQ ID NO: 2843378 - RNA, 19 nt, Artificial Sequence
  Description of Artificial Sequence: Synthetic oligonucleotide
cgcggcggcuucgagugga

SEQ ID NO: 2843379 - RNA, 19 nt, Artificial Sequence
  Description of Artificial Sequence: Synthetic oligonucleotide
cccagcccgcaggcaggag

SEQ ID NO: 2843380 - RNA, 19 nt, Artificial Sequence
  Description of Artificial Sequence: Synthetic oligonucleotide
gcgccgggccgagccaguc

SEQ ID NO: 2843381 - RNA, 19 nt, Artificial Sequence
  Description of Artificial Sequence: Synthetic oligonucleotide
gcugcucccgcggcggcuu

SEQ ID NO: 2843382 - RNA, 19 nt, Artificial Sequence
  Description of Artificial Sequence: Synthetic oligonucleotide
cgagccagucaggccccuc

SEQ ID NO: 2843383 - RNA, 19 nt, Artificial Sequence
  Description of Artificial Sequence: Synthetic oligonucleotide
cggcuucgaguggaccuga

SEQ ID NO: 2843384 - RNA, 19 nt, Artificial Sequence
  Description of Artificial Sequence: Synthetic oligonucleotide
cgccgggccgagccaguca

SEQ ID NO: 2843385 - RNA, 19 nt, Artificial Sequence
  Description of Artificial Sequence: Synthetic oligonucleotide
ccuuucagucccgcuucuu

SEQ ID NO: 2843386 - RNA, 19 nt, Artificial Sequence
  Description of Artificial Sequence: Synthetic oligonucleotide
ccccgacaccgagcugcuc

SEQ ID NO: 2843387 - RNA, 19 nt, Artificial Sequence
  Description of Artificial Sequence: Synthetic oligonucleotide
ggcgccgggccgagccagu

SEQ ID NO: 2843388 - RNA, 19 nt, Artificial Sequence
  Description of Artificial Sequence: Synthetic oligonucleotide
ccugagcgcgaggcaccau

SEQ ID NO: 2843389 - RNA, 19 nt, Artificial Sequence
  Description of Artificial Sequence: Synthetic oligonucleotide
ccgagccagucaggccccu

SEQ ID NO: 2843390 - RNA, 19 nt, Artificial Sequence
  Description of Artificial Sequence: Synthetic oligonucleotide
ugaaugugcucucugaucg

SEQ ID NO: 2843391 - RNA, 19 nt, Artificial Sequence
  Description of Artificial Sequence: Synthetic oligonucleotide
aaaggcaucacacaucuug

SEQ ID NO: 2843392 - RNA, 19 nt, Artificial Sequence
  Description of Artificial Sequence: Synthetic oligonucleotide
uugaguauuguagaguucg

SEQ ID NO: 2843393 - RNA, 19 nt, Artificial Sequence
  Description of Artificial Sequence: Synthetic oligonucleotide
ucuccguucacacugauga

SEQ ID NO: 2843394 - RNA, 19 nt, Artificial Sequence
  Description of Artificial Sequence: Synthetic oligonucleotide
caaauuucaguccagggcc

SEQ ID NO: 2843395 - RNA, 19 nt, Artificial Sequence
  Description of Artificial Sequence: Synthetic oligonucleotide
uccugguccaguuugaagg

SEQ ID NO: 2843396 - RNA, 19 nt, Artificial Sequence
  Description of Artificial Sequence: Synthetic oligonucleotide
aauacauccaauugaguau

SEQ ID NO: 2843397 - RNA, 19 nt, Artificial Sequence
  Description of Artificial Sequence: Synthetic oligonucleotide
uaccaggugagaaagaggc

SEQ ID NO: 2843398 - RNA, 19 nt, Artificial Sequence
  Description of Artificial Sequence: Synthetic oligonucleotide
aauugaguauuguagaguu

SEQ ID NO: 2843399 - RNA, 19 nt, Artificial Sequence
  Description of Artificial Sequence: Synthetic oligonucleotide
uucuuucauguaaucaucg

SEQ ID NO: 2843400 - RNA, 19 nt, Artificial Sequence
  Description of Artificial Sequence: Synthetic oligonucleotide
uuucaugacacauuccacc

SEQ ID NO: 2843401 - RNA, 19 nt, Artificial Sequence
  Description of Artificial Sequence: Synthetic oligonucleotide
guauuguagaguucgaugc

SEQ ID NO: 2843402 - RNA, 19 nt, Artificial Sequence
  Description of Artificial Sequence: Synthetic oligonucleotide
uuggguuuggccaugccgg

SEQ ID NO: 2843403 - RNA, 19 nt, Artificial Sequence
  Description of Artificial Sequence: Synthetic oligonucleotide
uucgaugcaaauuucaguc

SEQ ID NO: 2843404 - RNA, 19 nt, Artificial Sequence
  Description of Artificial Sequence: Synthetic oligonucleotide
aaauuccugguccaguuug

SEQ ID NO: 2843405 - RNA, 19 nt, Artificial Sequence
  Description of Artificial Sequence: Synthetic oligonucleotide
aguauuguagaguucgaug

SEQ ID NO: 2843406 - RNA, 19 nt, Artificial Sequence
  Description of Artificial Sequence: Synthetic oligonucleotide
ucucgcuuucucuuuaugg

SEQ ID NO: 2843407 - RNA, 19 nt, Artificial Sequence
  Description of Artificial Sequence: Synthetic oligonucleotide
ucugagauuucucuaccag

SEQ ID NO: 2843408 - RNA, 19 nt, Artificial Sequence
  Description of Artificial Sequence: Synthetic oligonucleotide
uccaguuugaaggaaaucu

SEQ ID NO: 2843409 - RNA, 19 nt, Artificial Sequence
  Description of Artificial Sequence: Synthetic oligonucleotide
aucaucgaaguuuucacug

SEQ ID NO: 2843410 - RNA, 19 nt, Artificial Sequence
  Description of Artificial Sequence: Synthetic oligonucleotide
uccagguucccacaaaggc

SEQ ID NO: 2843411 - RNA, 19 nt, Artificial Sequence
  Description of Artificial Sequence: Synthetic oligonucleotide
uccaauugaguauuguaga

SEQ ID NO: 2843412 - RNA, 19 nt, Artificial Sequence
  Description of Artificial Sequence: Synthetic oligonucleotide
uuuauggugguagacuucc

SEQ ID NO: 2843413 - RNA, 19 nt, Artificial Sequence
  Description of Artificial Sequence: Synthetic oligonucleotide
uagaguucgaugcaaauuu

SEQ ID NO: 2843414 - RNA, 19 nt, Artificial Sequence
  Description of Artificial Sequence: Synthetic oligonucleotide
aucacaucuccguucacac

SEQ ID NO: 2843415 - RNA, 19 nt, Artificial Sequence
  Description of Artificial Sequence: Synthetic oligonucleotide
acaaaggcaucacacaucu

SEQ ID NO: 2843416 - RNA, 19 nt, Artificial Sequence
  Description of Artificial Sequence: Synthetic oligonucleotide
uuucugguggcaaagccca

SEQ ID NO: 2843417 - RNA, 19 nt, Artificial Sequence
  Description of Artificial Sequence: Synthetic oligonucleotide
aaucaucgaaguuuucacu

SEQ ID NO: 2843418 - RNA, 19 nt, Artificial Sequence
  Description of Artificial Sequence: Synthetic oligonucleotide
aucauguuggguuuggcca

SEQ ID NO: 2843419 - RNA, 19 nt, Artificial Sequence
  Description of Artificial Sequence: Synthetic oligonucleotide
uaaucaucgaaguuuucac

SEQ ID NO: 2843420 - RNA, 19 nt, Artificial Sequence
  Description of Artificial Sequence: Synthetic oligonucleotide
uuucucuuuauggugguag

SEQ ID NO: 2843421 - RNA, 19 nt, Artificial Sequence
  Description of Artificial Sequence: Synthetic oligonucleotide
cuggagaccaguuuccagg

SEQ ID NO: 2843422 - RNA, 19 nt, Artificial Sequence
  Description of Artificial Sequence: Synthetic oligonucleotide
ucaucgaaguuuucacugg

SEQ ID NO: 2843423 - RNA, 19 nt, Artificial Sequence
  Description of Artificial Sequence: Synthetic oligonucleotide
uucacuggagaccaguuuc

SEQ ID NO: 2843424 - RNA, 19 nt, Artificial Sequence
  Description of Artificial Sequence: Synthetic oligonucleotide
gaaguuuucacuggagacc

SEQ ID NO: 2843425 - RNA, 19 nt, Artificial Sequence
  Description of Artificial Sequence: Synthetic oligonucleotide
ucggauggugaucacaucu

SEQ ID NO: 2843426 - RNA, 19 nt, Artificial Sequence
  Description of Artificial Sequence: Synthetic oligonucleotide
gacacauuccaccaccagc

SEQ ID NO: 2843427 - RNA, 19 nt, Artificial Sequence
  Description of Artificial Sequence: Synthetic oligonucleotide
uccaccaccagcuugucac

SEQ ID NO: 2843428 - RNA, 19 nt, Artificial Sequence
  Description of Artificial Sequence: Synthetic oligonucleotide
gaucauguuggguuuggcc

SEQ ID NO: 2843429 - RNA, 19 nt, Artificial Sequence
  Description of Artificial Sequence: Synthetic oligonucleotide
uuuugaaugugcucucuga

SEQ ID NO: 2843430 - RNA, 19 nt, Artificial Sequence
  Description of Artificial Sequence: Synthetic oligonucleotide
ugaaggaaaucucaguguu

SEQ ID NO: 2843431 - RNA, 19 nt, Artificial Sequence
  Description of Artificial Sequence: Synthetic oligonucleotide
uucugcaccuguaccaggg

SEQ ID NO: 2843432 - RNA, 19 nt, Artificial Sequence
  Description of Artificial Sequence: Synthetic oligonucleotide
uuuccugucaucugcggug

SEQ ID NO: 2843433 - RNA, 19 nt, Artificial Sequence
  Description of Artificial Sequence: Synthetic oligonucleotide
cugagauuucucuaccagg

SEQ ID NO: 2843434 - RNA, 19 nt, Artificial Sequence
  Description of Artificial Sequence: Synthetic oligonucleotide
aucuugugaaccuucugag

SEQ ID NO: 2843435 - RNA, 19 nt, Artificial Sequence
  Description of Artificial Sequence: Synthetic oligonucleotide
uucaugacacauuccacca

SEQ ID NO: 2843436 - RNA, 19 nt, Artificial Sequence
  Description of Artificial Sequence: Synthetic oligonucleotide
aaccuucugagauuucucu

SEQ ID NO: 2843437 - RNA, 19 nt, Artificial Sequence
  Description of Artificial Sequence: Synthetic oligonucleotide
agauuucucuaccagguga

SEQ ID NO: 2843438 - RNA, 19 nt, Artificial Sequence
  Description of Artificial Sequence: Synthetic oligonucleotide
uuucauaaguucugguaga

SEQ ID NO: 2843439 - RNA, 19 nt, Artificial Sequence
  Description of Artificial Sequence: Synthetic oligonucleotide
aggguuaugacgcucuuca

SEQ ID NO: 2843440 - RNA, 19 nt, Artificial Sequence
  Description of Artificial Sequence: Synthetic oligonucleotide
ucgaaguuuucacuggaga

SEQ ID NO: 2843441 - RNA, 19 nt, Artificial Sequence
  Description of Artificial Sequence: Synthetic oligonucleotide
guuggguuuggccaugccg

SEQ ID NO: 2843442 - RNA, 19 nt, Artificial Sequence
  Description of Artificial Sequence: Synthetic oligonucleotide
aaguuuucacuggagacca

SEQ ID NO: 2843443 - RNA, 19 nt, Artificial Sequence
  Description of Artificial Sequence: Synthetic oligonucleotide
ucugguagaggugacaccu

SEQ ID NO: 2843444 - RNA, 19 nt, Artificial Sequence
  Description of Artificial Sequence: Synthetic oligonucleotide
uauuguagaguucgaugca

SEQ ID NO: 2843445 - RNA, 19 nt, Artificial Sequence
  Description of Artificial Sequence: Synthetic oligonucleotide
auccaauugaguauuguag

SEQ ID NO: 2843446 - RNA, 19 nt, Artificial Sequence
  Description of Artificial Sequence: Synthetic oligonucleotide
uugaaggaaaucucagugu

SEQ ID NO: 2843447 - RNA, 19 nt, Artificial Sequence
  Description of Artificial Sequence: Synthetic oligonucleotide
uaaguucugguagagguga

SEQ ID NO: 2843448 - RNA, 19 nt, Artificial Sequence
  Description of Artificial Sequence: Synthetic oligonucleotide
aucacacaucuugugaacc

SEQ ID NO: 2843449 - RNA, 19 nt, Artificial Sequence
  Description of Artificial Sequence: Synthetic oligonucleotide
caugacacauuccaccacc

SEQ ID NO: 2843450 - RNA, 19 nt, Artificial Sequence
  Description of Artificial Sequence: Synthetic oligonucleotide
ccaucuaggguuaugacgc

SEQ ID NO: 2843451 - RNA, 19 nt, Artificial Sequence
  Description of Artificial Sequence: Synthetic oligonucleotide
uuugaaugugcucucugau

SEQ ID NO: 2843452 - RNA, 19 nt, Artificial Sequence
  Description of Artificial Sequence: Synthetic oligonucleotide
uauggugguagacuuccca

SEQ ID NO: 2843453 - RNA, 19 nt, Artificial Sequence
  Description of Artificial Sequence: Synthetic oligonucleotide
ucuaggguuaugacgcucu

SEQ ID NO: 2843454 - RNA, 19 nt, Artificial Sequence
  Description of Artificial Sequence: Synthetic oligonucleotide
ucugaucggauggugauca

SEQ ID NO: 2843455 - RNA, 19 nt, Artificial Sequence
  Description of Artificial Sequence: Synthetic oligonucleotide
auuuccucaaauuccuggu

SEQ ID NO: 2843456 - RNA, 19 nt, Artificial Sequence
  Description of Artificial Sequence: Synthetic oligonucleotide
ucccacaaaggcaucacac

SEQ ID NO: 2843457 - RNA, 19 nt, Artificial Sequence
  Description of Artificial Sequence: Synthetic oligonucleotide
ucuuuauggugguagacuu

SEQ ID NO: 2843458 - RNA, 19 nt, Artificial Sequence
  Description of Artificial Sequence: Synthetic oligonucleotide
cacacugaugaucauguug

SEQ ID NO: 2843459 - RNA, 19 nt, Artificial Sequence
  Description of Artificial Sequence: Synthetic oligonucleotide
ucucuaccaggugagaaag

SEQ ID NO: 2843460 - RNA, 19 nt, Artificial Sequence
  Description of Artificial Sequence: Synthetic oligonucleotide
gauuucucuaccaggugag

SEQ ID NO: 2843461 - RNA, 19 nt, Artificial Sequence
  Description of Artificial Sequence: Synthetic oligonucleotide
gcaaauuucaguccagggc

SEQ ID NO: 2843462 - RNA, 19 nt, Artificial Sequence
  Description of Artificial Sequence: Synthetic oligonucleotide
ucuuucauguaaucaucga

SEQ ID NO: 2843463 - RNA, 19 nt, Artificial Sequence
  Description of Artificial Sequence: Synthetic oligonucleotide
aaggaaaucucaguguuuu

SEQ ID NO: 2843464 - RNA, 19 nt, Artificial Sequence
  Description of Artificial Sequence: Synthetic oligonucleotide
uuccagguucccacaaagg

SEQ ID NO: 2843465 - RNA, 19 nt, Artificial Sequence
  Description of Artificial Sequence: Synthetic oligonucleotide
uucauaaguucugguagag

SEQ ID NO: 2843466 - RNA, 19 nt, Artificial Sequence
  Description of Artificial Sequence: Synthetic oligonucleotide
gauggugaucacaucuccg

SEQ ID NO: 2843467 - RNA, 19 nt, Artificial Sequence
  Description of Artificial Sequence: Synthetic oligonucleotide
augccggccaccuuucugg

SEQ ID NO: 2843468 - RNA, 19 nt, Artificial Sequence
  Description of Artificial Sequence: Synthetic oligonucleotide
aaagcccacucccacuucu

SEQ ID NO: 2843469 - RNA, 19 nt, Artificial Sequence
  Description of Artificial Sequence: Synthetic oligonucleotide
ucauaaguucugguagagg

SEQ ID NO: 2843470 - RNA, 19 nt, Artificial Sequence
  Description of Artificial Sequence: Synthetic oligonucleotide
ucgaugcaaauuucagucc

SEQ ID NO: 2843471 - RNA, 19 nt, Artificial Sequence
  Description of Artificial Sequence: Synthetic oligonucleotide
ugaaccuucugagauuucu

SEQ ID NO: 2843472 - RNA, 19 nt, Artificial Sequence
  Description of Artificial Sequence: Synthetic oligonucleotide
cauaaguucugguagaggu

SEQ ID NO: 2843473 - RNA, 19 nt, Artificial Sequence
  Description of Artificial Sequence: Synthetic oligonucleotide
guaaucaucgaaguuuuca

SEQ ID NO: 2843474 - RNA, 19 nt, Artificial Sequence
  Description of Artificial Sequence: Synthetic oligonucleotide
cuucccaucccacuucugc

SEQ ID NO: 2843475 - RNA, 19 nt, Artificial Sequence
  Description of Artificial Sequence: Synthetic oligonucleotide
gagaccaguuuccagguuc

SEQ ID NO: 2843476 - RNA, 19 nt, Artificial Sequence
  Description of Artificial Sequence: Synthetic oligonucleotide
auggugaucacaucuccgu

SEQ ID NO: 2843477 - RNA, 19 nt, Artificial Sequence
  Description of Artificial Sequence: Synthetic oligonucleotide
aauuucaguccagggccac

SEQ ID NO: 2843478 - RNA, 19 nt, Artificial Sequence
  Description of Artificial Sequence: Synthetic oligonucleotide
ugcaccuguaccagggccc

SEQ ID NO: 2843479 - RNA, 19 nt, Artificial Sequence
  Description of Artificial Sequence: Synthetic oligonucleotide
uaugacgcucuucacuuuc

SEQ ID NO: 2843480 - RNA, 19 nt, Artificial Sequence
  Description of Artificial Sequence: Synthetic oligonucleotide
cuuucaugacacauuccac

SEQ ID NO: 2843481 - RNA, 19 nt, Artificial Sequence
  Description of Artificial Sequence: Synthetic oligonucleotide
ucuugugaaccuucugaga

SEQ ID NO: 2843482 - RNA, 19 nt, Artificial Sequence
  Description of Artificial Sequence: Synthetic oligonucleotide
ugcccuuucauaaguucug

SEQ ID NO: 2843483 - RNA, 19 nt, Artificial Sequence
  Description of Artificial Sequence: Synthetic oligonucleotide
ucaucugcggugauuuccu

SEQ ID NO: 2843484 - RNA, 19 nt, Artificial Sequence
  Description of Artificial Sequence: Synthetic oligonucleotide
acgcucuucacuuuccugu

SEQ ID NO: 2843485 - RNA, 19 nt, Artificial Sequence
  Description of Artificial Sequence: Synthetic oligonucleotide
gccaucuaggguuaugacg

SEQ ID NO: 2843486 - RNA, 19 nt, Artificial Sequence
  Description of Artificial Sequence: Synthetic oligonucleotide
uugaaugugcucucugauc

SEQ ID NO: 2843487 - RNA, 19 nt, Artificial Sequence
  Description of Artificial Sequence: Synthetic oligonucleotide
ugguagacuucccauccca

SEQ ID NO: 2843488 - RNA, 19 nt, Artificial Sequence
  Description of Artificial Sequence: Synthetic oligonucleotide
ucgcuuucucuuuauggug

SEQ ID NO: 2843489 - RNA, 19 nt, Artificial Sequence
  Description of Artificial Sequence: Synthetic oligonucleotide
cuaccaggugagaaagagg

SEQ ID NO: 2843490 - RNA, 19 nt, Artificial Sequence
  Description of Artificial Sequence: Synthetic oligonucleotide
cuucugagauuucucuacc

SEQ ID NO: 2843491 - RNA, 19 nt, Artificial Sequence
  Description of Artificial Sequence: Synthetic oligonucleotide
caucuugugaaccuucuga

SEQ ID NO: 2843492 - RNA, 19 nt, Artificial Sequence
  Description of Artificial Sequence: Synthetic oligonucleotide
gaaugugcucucugaucgg

SEQ ID NO: 2843493 - RNA, 19 nt, Artificial Sequence
  Description of Artificial Sequence: Synthetic oligonucleotide
aguucgaugcaaauuucag

SEQ ID NO: 2843494 - RNA, 19 nt, Artificial Sequence
  Description of Artificial Sequence: Synthetic oligonucleotide
ucacacaucuugugaaccu

SEQ ID NO: 2843495 - RNA, 19 nt, Artificial Sequence
  Description of Artificial Sequence: Synthetic oligonucleotide
ucaaauuccugguccaguu

SEQ ID NO: 2843496 - RNA, 19 nt, Artificial Sequence
  Description of Artificial Sequence: Synthetic oligonucleotide
ucauguaaucaucgaaguu

SEQ ID NO: 2843497 - RNA, 19 nt, Artificial Sequence
  Description of Artificial Sequence: Synthetic oligonucleotide
cagcuugucacccucucgc

SEQ ID NO: 2843498 - RNA, 19 nt, Artificial Sequence
  Description of Artificial Sequence: Synthetic oligonucleotide
ugugcucucugaucggaug

SEQ ID NO: 2843499 - RNA, 19 nt, Artificial Sequence
  Description of Artificial Sequence: Synthetic oligonucleotide
uucugagauuucucuacca

SEQ ID NO: 2843500 - RNA, 19 nt, Artificial Sequence
  Description of Artificial Sequence: Synthetic oligonucleotide
acuucccuuggcucaugcc

SEQ ID NO: 2843501 - RNA, 19 nt, Artificial Sequence
  Description of Artificial Sequence: Synthetic oligonucleotide
ugacacauuccaccaccag

SEQ ID NO: 2843502 - RNA, 19 nt, Artificial Sequence
  Description of Artificial Sequence: Synthetic oligonucleotide
uucucuaccaggugagaaa

SEQ ID NO: 2843503 - RNA, 19 nt, Artificial Sequence
  Description of Artificial Sequence: Synthetic oligonucleotide
uuuccucaaauuccugguc

SEQ ID NO: 2843504 - RNA, 19 nt, Artificial Sequence
  Description of Artificial Sequence: Synthetic oligonucleotide
ucugcggugauuuccucaa

SEQ ID NO: 2843505 - RNA, 19 nt, Artificial Sequence
  Description of Artificial Sequence: Synthetic oligonucleotide
uguagaguucgaugcaaau

SEQ ID NO: 2843506 - RNA, 19 nt, Artificial Sequence
  Description of Artificial Sequence: Synthetic oligonucleotide
uucucuuuauggugguaga

SEQ ID NO: 2843507 - RNA, 19 nt, Artificial Sequence
  Description of Artificial Sequence: Synthetic oligonucleotide
cuuucauguaaucaucgaa

SEQ ID NO: 2843508 - RNA, 19 nt, Artificial Sequence
  Description of Artificial Sequence: Synthetic oligonucleotide
gugcucucugaucggaugg

SEQ ID NO: 2843509 - RNA, 19 nt, Artificial Sequence
  Description of Artificial Sequence: Synthetic oligonucleotide
ugaguauuguagaguucga

SEQ ID NO: 2843510 - RNA, 19 nt, Artificial Sequence
  Description of Artificial Sequence: Synthetic oligonucleotide
caccuuucaugacacauuc

SEQ ID NO: 2843511 - RNA, 19 nt, Artificial Sequence
  Description of Artificial Sequence: Synthetic oligonucleotide
gaugcaaauuucaguccag

SEQ ID NO: 2843512 - RNA, 19 nt, Artificial Sequence
  Description of Artificial Sequence: Synthetic oligonucleotide
augcaaauuucaguccagg

SEQ ID NO: 2843513 - RNA, 19 nt, Artificial Sequence
  Description of Artificial Sequence: Synthetic oligonucleotide
aaugugcucucugaucgga

SEQ ID NO: 2843514 - RNA, 19 nt, Artificial Sequence
  Description of Artificial Sequence: Synthetic oligonucleotide
guagaggugacaccuuuca

SEQ ID NO: 2843515 - RNA, 19 nt, Artificial Sequence
  Description of Artificial Sequence: Synthetic oligonucleotide
acuuuccugucaucugcgg

SEQ ID NO: 2843516 - RNA, 19 nt, Artificial Sequence
  Description of Artificial Sequence: Synthetic oligonucleotide
ggugguagacuucccaucc

SEQ ID NO: 2843517 - RNA, 19 nt, Artificial Sequence
  Description of Artificial Sequence: Synthetic oligonucleotide
agacuucccaucccacuuc

SEQ ID NO: 2843518 - RNA, 19 nt, Artificial Sequence
  Description of Artificial Sequence: Synthetic oligonucleotide
gagauuucucuaccaggug

SEQ ID NO: 2843519 - RNA, 19 nt, Artificial Sequence
  Description of Artificial Sequence: Synthetic oligonucleotide
acauuccaccaccagcuug

SEQ ID NO: 2843520 - RNA, 19 nt, Artificial Sequence
  Description of Artificial Sequence: Synthetic oligonucleotide
agaccaguuuccagguucc

SEQ ID NO: 2843521 - RNA, 19 nt, Artificial Sequence
  Description of Artificial Sequence: Synthetic oligonucleotide
acuggagaccaguuuccag

SEQ ID NO: 2843522 - RNA, 19 nt, Artificial Sequence
  Description of Artificial Sequence: Synthetic oligonucleotide
ugugaaccuucugagauuu

SEQ ID NO: 2843523 - RNA, 19 nt, Artificial Sequence
  Description of Artificial Sequence: Synthetic oligonucleotide
uguaccagggccccgccau

SEQ ID NO: 2843524 - RNA, 19 nt, Artificial Sequence
  Description of Artificial Sequence: Synthetic oligonucleotide
cacuuuccugucaucugcg

SEQ ID NO: 2843525 - RNA, 19 nt, Artificial Sequence
  Description of Artificial Sequence: Synthetic oligonucleotide
uuccugguccaguuugaag

SEQ ID NO: 2843526 - RNA, 19 nt, Artificial Sequence
  Description of Artificial Sequence: Synthetic oligonucleotide
caggugagaaagaggcugc

SEQ ID NO: 2843527 - RNA, 19 nt, Artificial Sequence
  Description of Artificial Sequence: Synthetic oligonucleotide
gguggcaaagcccacuccc

SEQ ID NO: 2843528 - RNA, 19 nt, Artificial Sequence
  Description of Artificial Sequence: Synthetic oligonucleotide
uuguagaguucgaugcaaa

SEQ ID NO: 2843529 - RNA, 19 nt, Artificial Sequence
  Description of Artificial Sequence: Synthetic oligonucleotide
aaggcaucacacaucuugu

SEQ ID NO: 2843530 - RNA, 19 nt, Artificial Sequence
  Description of Artificial Sequence: Synthetic oligonucleotide
uuuucacuggagaccaguu

SEQ ID NO: 2843531 - RNA, 19 nt, Artificial Sequence
  Description of Artificial Sequence: Synthetic oligonucleotide
caucacacaucuugugaac

SEQ ID NO: 2843532 - RNA, 19 nt, Artificial Sequence
  Description of Artificial Sequence: Synthetic oligonucleotide
uucccuuggcucaugcccu

SEQ ID NO: 2843533 - RNA, 19 nt, Artificial Sequence
  Description of Artificial Sequence: Synthetic oligonucleotide
ugcggugauuuccucaaau

SEQ ID NO: 2843534 - RNA, 19 nt, Artificial Sequence
  Description of Artificial Sequence: Synthetic oligonucleotide
ucucugaucggauggugau

SEQ ID NO: 2843535 - RNA, 19 nt, Artificial Sequence
  Description of Artificial Sequence: Synthetic oligonucleotide
uuucucuaccaggugagaa

SEQ ID NO: 2843536 - RNA, 19 nt, Artificial Sequence
  Description of Artificial Sequence: Synthetic oligonucleotide
uacauccaauugaguauug

SEQ ID NO: 2843537 - RNA, 19 nt, Artificial Sequence
  Description of Artificial Sequence: Synthetic oligonucleotide
ccaauugaguauuguagag

SEQ ID NO: 2843538 - RNA, 19 nt, Artificial Sequence
  Description of Artificial Sequence: Synthetic oligonucleotide
ugaugaucauguuggguuu

SEQ ID NO: 2843539 - RNA, 19 nt, Artificial Sequence
  Description of Artificial Sequence: Synthetic oligonucleotide
caugcccuuucauaaguuc

SEQ ID NO: 2843540 - RNA, 19 nt, Artificial Sequence
  Description of Artificial Sequence: Synthetic oligonucleotide
cacaaaggcaucacacauc

SEQ ID NO: 2843541 - RNA, 19 nt, Artificial Sequence
  Description of Artificial Sequence: Synthetic oligonucleotide
auugaguauuguagaguuc

SEQ ID NO: 2843542 - RNA, 19 nt, Artificial Sequence
  Description of Artificial Sequence: Synthetic oligonucleotide
gaucacaucuccguucaca

SEQ ID NO: 2843543 - RNA, 19 nt, Artificial Sequence
  Description of Artificial Sequence: Synthetic oligonucleotide
guucacacugaugaucaug

SEQ ID NO: 2843544 - RNA, 19 nt, Artificial Sequence
  Description of Artificial Sequence: Synthetic oligonucleotide
aaauuucaguccagggcca

SEQ ID NO: 2843545 - RNA, 19 nt, Artificial Sequence
  Description of Artificial Sequence: Synthetic oligonucleotide
ucauguuggguuuggccau

SEQ ID NO: 2843546 - RNA, 19 nt, Artificial Sequence
  Description of Artificial Sequence: Synthetic oligonucleotide
gucaucugcggugauuucc

SEQ ID NO: 2843547 - RNA, 19 nt, Artificial Sequence
  Description of Artificial Sequence: Synthetic oligonucleotide
ugguccaguuugaaggaaa

SEQ ID NO: 2843548 - RNA, 19 nt, Artificial Sequence
  Description of Artificial Sequence: Synthetic oligonucleotide
uucccacaaaggcaucaca

SEQ ID NO: 2843549 - RNA, 19 nt, Artificial Sequence
  Description of Artificial Sequence: Synthetic oligonucleotide
ggugacaccuuucaugaca

SEQ ID NO: 2843550 - RNA, 19 nt, Artificial Sequence
  Description of Artificial Sequence: Synthetic oligonucleotide
ucucuuuauggugguagac

SEQ ID NO: 2843551 - RNA, 19 nt, Artificial Sequence
  Description of Artificial Sequence: Synthetic oligonucleotide
cuuuauggugguagacuuc

SEQ ID NO: 2843552 - RNA, 19 nt, Artificial Sequence
  Description of Artificial Sequence: Synthetic oligonucleotide
auaaguucugguagaggug

SEQ ID NO: 2843553 - RNA, 19 nt, Artificial Sequence
  Description of Artificial Sequence: Synthetic oligonucleotide
acaucuugugaaccuucug

SEQ ID NO: 2843554 - RNA, 19 nt, Artificial Sequence
  Description of Artificial Sequence: Synthetic oligonucleotide
uucugguagaggugacacc

SEQ ID NO: 2843555 - RNA, 19 nt, Artificial Sequence
  Description of Artificial Sequence: Synthetic oligonucleotide
guucugguagaggugacac

SEQ ID NO: 2843556 - RNA, 19 nt, Artificial Sequence
  Description of Artificial Sequence: Synthetic oligonucleotide
gaugaucauguuggguuug

SEQ ID NO: 2843557 - RNA, 19 nt, Artificial Sequence
  Description of Artificial Sequence: Synthetic oligonucleotide
acuucugcaccuguaccag

SEQ ID NO: 2843558 - RNA, 19 nt, Artificial Sequence
  Description of Artificial Sequence: Synthetic oligonucleotide
uuauggugguagacuuccc

SEQ ID NO: 2843559 - RNA, 19 nt, Artificial Sequence
  Description of Artificial Sequence: Synthetic oligonucleotide
agaguucgaugcaaauuuc

SEQ ID NO: 2843560 - RNA, 19 nt, Artificial Sequence
  Description of Artificial Sequence: Synthetic oligonucleotide
accuuucugguggcaaagc

SEQ ID NO: 2843561 - RNA, 19 nt, Artificial Sequence
  Description of Artificial Sequence: Synthetic oligonucleotide
gacgcucuucacuuuccug

SEQ ID NO: 2843562 - RNA, 19 nt, Artificial Sequence
  Description of Artificial Sequence: Synthetic oligonucleotide
ugaucggauggugaucaca

SEQ ID NO: 2843563 - RNA, 19 nt, Artificial Sequence
  Description of Artificial Sequence: Synthetic oligonucleotide
uguaaucaucgaaguuuuc

SEQ ID NO: 2843564 - RNA, 19 nt, Artificial Sequence
  Description of Artificial Sequence: Synthetic oligonucleotide
guuaugacgcucuucacuu

SEQ ID NO: 2843565 - RNA, 19 nt, Artificial Sequence
  Description of Artificial Sequence: Synthetic oligonucleotide
auuguagaguucgaugcaa

SEQ ID NO: 2843566 - RNA, 19 nt, Artificial Sequence
  Description of Artificial Sequence: Synthetic oligonucleotide
augaucauguuggguuugg

SEQ ID NO: 2843567 - RNA, 19 nt, Artificial Sequence
  Description of Artificial Sequence: Synthetic oligonucleotide
auacauccaauugaguauu

SEQ ID NO: 2843568 - RNA, 19 nt, Artificial Sequence
  Description of Artificial Sequence: Synthetic oligonucleotide
cauguaaucaucgaaguuu

SEQ ID NO: 2843569 - RNA, 19 nt, Artificial Sequence
  Description of Artificial Sequence: Synthetic oligonucleotide
gaguucgaugcaaauuuca

SEQ ID NO: 2843570 - RNA, 19 nt, Artificial Sequence
  Description of Artificial Sequence: Synthetic oligonucleotide
accagcuugucacccucuc

SEQ ID NO: 2843571 - RNA, 19 nt, Artificial Sequence
  Description of Artificial Sequence: Synthetic oligonucleotide
ucugcaccuguaccagggc

SEQ ID NO: 2843572 - RNA, 19 nt, Artificial Sequence
  Description of Artificial Sequence: Synthetic oligonucleotide
cacugaugaucauguuggg

SEQ ID NO: 2843573 - RNA, 19 nt, Artificial Sequence
  Description of Artificial Sequence: Synthetic oligonucleotide
aaguucugguagaggugac

SEQ ID NO: 2843574 - RNA, 19 nt, Artificial Sequence
  Description of Artificial Sequence: Synthetic oligonucleotide
ccuuucaugacacauucca

SEQ ID NO: 2843575 - RNA, 19 nt, Artificial Sequence
  Description of Artificial Sequence: Synthetic oligonucleotide
aucugcggugauuuccuca

SEQ ID NO: 2843576 - RNA, 19 nt, Artificial Sequence
  Description of Artificial Sequence: Synthetic oligonucleotide
ccuucugagauuucucuac

SEQ ID NO: 2843577 - RNA, 19 nt, Artificial Sequence
  Description of Artificial Sequence: Synthetic oligonucleotide
cauccaauugaguauugua

SEQ ID NO: 2843578 - RNA, 19 nt, Artificial Sequence
  Description of Artificial Sequence: Synthetic oligonucleotide
cugaugaucauguuggguu

SEQ ID NO: 2843579 - RNA, 19 nt, Artificial Sequence
  Description of Artificial Sequence: Synthetic oligonucleotide
cacuucugcaccuguacca

SEQ ID NO: 2843580 - RNA, 19 nt, Artificial Sequence
  Description of Artificial Sequence: Synthetic oligonucleotide
uggcaaagcccacucccac

SEQ ID NO: 2843581 - RNA, 19 nt, Artificial Sequence
  Description of Artificial Sequence: Synthetic oligonucleotide
augacgcucuucacuuucc

SEQ ID NO: 2843582 - RNA, 19 nt, Artificial Sequence
  Description of Artificial Sequence: Synthetic oligonucleotide
cugcaccuguaccagggcc

SEQ ID NO: 2843583 - RNA, 19 nt, Artificial Sequence
  Description of Artificial Sequence: Synthetic oligonucleotide
ggauggugaucacaucucc

SEQ ID NO: 2843584 - RNA, 19 nt, Artificial Sequence
  Description of Artificial Sequence: Synthetic oligonucleotide
aauuccugguccaguuuga

SEQ ID NO: 2843585 - RNA, 19 nt, Artificial Sequence
  Description of Artificial Sequence: Synthetic oligonucleotide
accuuucaugacacauucc

SEQ ID NO: 2843586 - RNA, 19 nt, Artificial Sequence
  Description of Artificial Sequence: Synthetic oligonucleotide
accuguaccagggccccgc

SEQ ID NO: 2843587 - RNA, 19 nt, Artificial Sequence
  Description of Artificial Sequence: Synthetic oligonucleotide
aggcaucacacaucuugug

SEQ ID NO: 2843588 - RNA, 19 nt, Artificial Sequence
  Description of Artificial Sequence: Synthetic oligonucleotide
cuucugcaccuguaccagg

SEQ ID NO: 2843589 - RNA, 19 nt, Artificial Sequence
  Description of Artificial Sequence: Synthetic oligonucleotide
ucccaucccacuucugcac

SEQ ID NO: 2843590 - RNA, 19 nt, Artificial Sequence
  Description of Artificial Sequence: Synthetic oligonucleotide
ucacccucucgcuuucucu

SEQ ID NO: 2843591 - RNA, 19 nt, Artificial Sequence
  Description of Artificial Sequence: Synthetic oligonucleotide
ugguagaggugacaccuuu

SEQ ID NO: 2843592 - RNA, 19 nt, Artificial Sequence
  Description of Artificial Sequence: Synthetic oligonucleotide
aucuaggguuaugacgcuc

SEQ ID NO: 2843593 - RNA, 19 nt, Artificial Sequence
  Description of Artificial Sequence: Synthetic oligonucleotide
ggugaucacaucuccguuc

SEQ ID NO: 2843594 - RNA, 19 nt, Artificial Sequence
  Description of Artificial Sequence: Synthetic oligonucleotide
aucgaaguuuucacuggag

SEQ ID NO: 2843595 - RNA, 19 nt, Artificial Sequence
  Description of Artificial Sequence: Synthetic oligonucleotide
agggccacuucccuuggcu

SEQ ID NO: 2843596 - RNA, 19 nt, Artificial Sequence
  Description of Artificial Sequence: Synthetic oligonucleotide
guucgaugcaaauuucagu

SEQ ID NO: 2843597 - RNA, 19 nt, Artificial Sequence
  Description of Artificial Sequence: Synthetic oligonucleotide
uagaggugacaccuuucau

SEQ ID NO: 2843598 - RNA, 19 nt, Artificial Sequence
  Description of Artificial Sequence: Synthetic oligonucleotide
uguuggguuuggccaugcc

SEQ ID NO: 2843599 - RNA, 19 nt, Artificial Sequence
  Description of Artificial Sequence: Synthetic oligonucleotide
caguccagggccacuuccc

SEQ ID NO: 2843600 - RNA, 19 nt, Artificial Sequence
  Description of Artificial Sequence: Synthetic oligonucleotide
augcccuuucauaaguucu

SEQ ID NO: 2843601 - RNA, 19 nt, Artificial Sequence
  Description of Artificial Sequence: Synthetic oligonucleotide
auguaaucaucgaaguuuu

SEQ ID NO: 2843602 - RNA, 19 nt, Artificial Sequence
  Description of Artificial Sequence: Synthetic oligonucleotide
aguuuccagguucccacaa

SEQ ID NO: 2843603 - RNA, 19 nt, Artificial Sequence
  Description of Artificial Sequence: Synthetic oligonucleotide
cacuucuuucauguaauca

SEQ ID NO: 2843604 - RNA, 19 nt, Artificial Sequence
  Description of Artificial Sequence: Synthetic oligonucleotide
ucaugcccuuucauaaguu

SEQ ID NO: 2843605 - RNA, 19 nt, Artificial Sequence
  Description of Artificial Sequence: Synthetic oligonucleotide
uggcucaugcccuuucaua

SEQ ID NO: 2843606 - RNA, 19 nt, Artificial Sequence
  Description of Artificial Sequence: Synthetic oligonucleotide
cgaaguuuucacuggagac

SEQ ID NO: 2843607 - RNA, 19 nt, Artificial Sequence
  Description of Artificial Sequence: Synthetic oligonucleotide
gaaccuucugagauuucuc

SEQ ID NO: 2843608 - RNA, 19 nt, Artificial Sequence
  Description of Artificial Sequence: Synthetic oligonucleotide
uugugaaccuucugagauu

SEQ ID NO: 2843609 - RNA, 19 nt, Artificial Sequence
  Description of Artificial Sequence: Synthetic oligonucleotide
ugaucauguuggguuuggc

SEQ ID NO: 2843610 - RNA, 19 nt, Artificial Sequence
  Description of Artificial Sequence: Synthetic oligonucleotide
ggcaucacacaucuuguga

SEQ ID NO: 2843611 - RNA, 19 nt, Artificial Sequence
  Description of Artificial Sequence: Synthetic oligonucleotide
ugguggcaaagcccacucc

SEQ ID NO: 2843612 - RNA, 19 nt, Artificial Sequence
  Description of Artificial Sequence: Synthetic oligonucleotide
acauccaauugaguauugu

SEQ ID NO: 2843613 - RNA, 19 nt, Artificial Sequence
  Description of Artificial Sequence: Synthetic oligonucleotide
ucugguggcaaagcccacu

SEQ ID NO: 2843614 - RNA, 19 nt, Artificial Sequence
  Description of Artificial Sequence: Synthetic oligonucleotide
uuggcucaugcccuuucau

SEQ ID NO: 2843615 - RNA, 19 nt, Artificial Sequence
  Description of Artificial Sequence: Synthetic oligonucleotide
uggugaucacaucuccguu

SEQ ID NO: 2843616 - RNA, 19 nt, Artificial Sequence
  Description of Artificial Sequence: Synthetic oligonucleotide
ccaguuuccagguucccac

SEQ ID NO: 2843617 - RNA, 19 nt, Artificial Sequence
  Description of Artificial Sequence: Synthetic oligonucleotide
cucgcuuucucuuuauggu

SEQ ID NO: 2843618 - RNA, 19 nt, Artificial Sequence
  Description of Artificial Sequence: Synthetic oligonucleotide
uggguuuggccaugccggc

SEQ ID NO: 2843619 - RNA, 19 nt, Artificial Sequence
  Description of Artificial Sequence: Synthetic oligonucleotide
caucgaaguuuucacugga

SEQ ID NO: 2843620 - RNA, 19 nt, Artificial Sequence
  Description of Artificial Sequence: Synthetic oligonucleotide
accuucugagauuucucua

SEQ ID NO: 2843621 - RNA, 19 nt, Artificial Sequence
  Description of Artificial Sequence: Synthetic oligonucleotide
cgcuuucucuuuauggugg

SEQ ID NO: 2843622 - RNA, 19 nt, Artificial Sequence
  Description of Artificial Sequence: Synthetic oligonucleotide
cucucugaucggaugguga

SEQ ID NO: 2843623 - RNA, 19 nt, Artificial Sequence
  Description of Artificial Sequence: Synthetic oligonucleotide
uuccugucaucugcgguga

SEQ ID NO: 2843624 - RNA, 19 nt, Artificial Sequence
  Description of Artificial Sequence: Synthetic oligonucleotide
ccuuucugguggcaaagcc

SEQ ID NO: 2843625 - RNA, 19 nt, Artificial Sequence
  Description of Artificial Sequence: Synthetic oligonucleotide
ggcucaugcccuuucauaa

SEQ ID NO: 2843626 - RNA, 19 nt, Artificial Sequence
  Description of Artificial Sequence: Synthetic oligonucleotide
gugguagacuucccauccc

SEQ ID NO: 2843627 - RNA, 19 nt, Artificial Sequence
  Description of Artificial Sequence: Synthetic oligonucleotide
agggccccgccaucuaggg

SEQ ID NO: 2843628 - RNA, 19 nt, Artificial Sequence
  Description of Artificial Sequence: Synthetic oligonucleotide
gguuaugacgcucuucacu

SEQ ID NO: 2843629 - RNA, 19 nt, Artificial Sequence
  Description of Artificial Sequence: Synthetic oligonucleotide
aguccagggccacuucccu

SEQ ID NO: 2843630 - RNA, 19 nt, Artificial Sequence
  Description of Artificial Sequence: Synthetic oligonucleotide
cauuccaccaccagcuugu

SEQ ID NO: 2843631 - RNA, 19 nt, Artificial Sequence
  Description of Artificial Sequence: Synthetic oligonucleotide
ccggccaccuuucuggugg

SEQ ID NO: 2843632 - RNA, 19 nt, Artificial Sequence
  Description of Artificial Sequence: Synthetic oligonucleotide
agcuugucacccucucgcu

SEQ ID NO: 2843633 - RNA, 19 nt, Artificial Sequence
  Description of Artificial Sequence: Synthetic oligonucleotide
uuucaguccagggccacuu

SEQ ID NO: 2843634 - RNA, 19 nt, Artificial Sequence
  Description of Artificial Sequence: Synthetic oligonucleotide
aguucugguagaggugaca

SEQ ID NO: 2843635 - RNA, 19 nt, Artificial Sequence
  Description of Artificial Sequence: Synthetic oligonucleotide
cugguggcaaagcccacuc

SEQ ID NO: 2843636 - RNA, 19 nt, Artificial Sequence
  Description of Artificial Sequence: Synthetic oligonucleotide
gacaccuuucaugacacau

SEQ ID NO: 2843637 - RNA, 19 nt, Artificial Sequence
  Description of Artificial Sequence: Synthetic oligonucleotide
gcaucacacaucuugugaa

SEQ ID NO: 2843638 - RNA, 19 nt, Artificial Sequence
  Description of Artificial Sequence: Synthetic oligonucleotide
caugccggccaccuuucug

SEQ ID NO: 2843639 - RNA, 19 nt, Artificial Sequence
  Description of Artificial Sequence: Synthetic oligonucleotide
uuggccaugccggccaccu

SEQ ID NO: 2843640 - RNA, 19 nt, Artificial Sequence
  Description of Artificial Sequence: Synthetic oligonucleotide
cagggccccgccaucuagg

SEQ ID NO: 2843641 - RNA, 19 nt, Artificial Sequence
  Description of Artificial Sequence: Synthetic oligonucleotide
uuaugacgcucuucacuuu

SEQ ID NO: 2843642 - RNA, 19 nt, Artificial Sequence
  Description of Artificial Sequence: Synthetic oligonucleotide
cacuucccuuggcucaugc

SEQ ID NO: 2843643 - RNA, 19 nt, Artificial Sequence
  Description of Artificial Sequence: Synthetic oligonucleotide
ugaucacaucuccguucac

SEQ ID NO: 2843644 - RNA, 19 nt, Artificial Sequence
  Description of Artificial Sequence: Synthetic oligonucleotide
gcucaugcccuuucauaag

SEQ ID NO: 2843645 - RNA, 19 nt, Artificial Sequence
  Description of Artificial Sequence: Synthetic oligonucleotide
caccuuucugguggcaaag

SEQ ID NO: 2843646 - RNA, 19 nt, Artificial Sequence
  Description of Artificial Sequence: Synthetic oligonucleotide
auuucucuaccaggugaga

SEQ ID NO: 2843647 - RNA, 19 nt, Artificial Sequence
  Description of Artificial Sequence: Synthetic oligonucleotide
uaggguuaugacgcucuuc

SEQ ID NO: 2843648 - RNA, 19 nt, Artificial Sequence
  Description of Artificial Sequence: Synthetic oligonucleotide
guagacuucccaucccacu

SEQ ID NO: 2843649 - RNA, 19 nt, Artificial Sequence
  Description of Artificial Sequence: Synthetic oligonucleotide
caauugaguauuguagagu

SEQ ID NO: 2843650 - RNA, 19 nt, Artificial Sequence
  Description of Artificial Sequence: Synthetic oligonucleotide
ggugagaaagaggcugcag

SEQ ID NO: 2843651 - RNA, 19 nt, Artificial Sequence
  Description of Artificial Sequence: Synthetic oligonucleotide
ugcucucugaucggauggu

SEQ ID NO: 2843652 - RNA, 19 nt, Artificial Sequence
  Description of Artificial Sequence: Synthetic oligonucleotide
cagguucccacaaaggcau

SEQ ID NO: 2843653 - RNA, 19 nt, Artificial Sequence
  Description of Artificial Sequence: Synthetic oligonucleotide
uugucacccucucgcuuuc

SEQ ID NO: 2843654 - RNA, 19 nt, Artificial Sequence
  Description of Artificial Sequence: Synthetic oligonucleotide
ugucaucugcggugauuuc

SEQ ID NO: 2843655 - RNA, 19 nt, Artificial Sequence
  Description of Artificial Sequence: Synthetic oligonucleotide
guucccacaaaggcaucac

SEQ ID NO: 2843656 - RNA, 19 nt, Artificial Sequence
  Description of Artificial Sequence: Synthetic oligonucleotide
augacacauuccaccacca

SEQ ID NO: 2843657 - RNA, 19 nt, Artificial Sequence
  Description of Artificial Sequence: Synthetic oligonucleotide
uucugguggcaaagcccac

SEQ ID NO: 2843658 - RNA, 19 nt, Artificial Sequence
  Description of Artificial Sequence: Synthetic oligonucleotide
cucuuuauggugguagacu

SEQ ID NO: 2843659 - RNA, 19 nt, Artificial Sequence
  Description of Artificial Sequence: Synthetic oligonucleotide
ccguucacacugaugauca

SEQ ID NO: 2843660 - RNA, 19 nt, Artificial Sequence
  Description of Artificial Sequence: Synthetic oligonucleotide
cggugauuuccucaaauuc

SEQ ID NO: 2843661 - RNA, 19 nt, Artificial Sequence
  Description of Artificial Sequence: Synthetic oligonucleotide
ccagguucccacaaaggca

SEQ ID NO: 2843662 - RNA, 19 nt, Artificial Sequence
  Description of Artificial Sequence: Synthetic oligonucleotide
cuuggcucaugcccuuuca

SEQ ID NO: 2843663 - RNA, 19 nt, Artificial Sequence
  Description of Artificial Sequence: Synthetic oligonucleotide
guuuccagguucccacaaa

SEQ ID NO: 2843664 - RNA, 19 nt, Artificial Sequence
  Description of Artificial Sequence: Synthetic oligonucleotide
aucccacuucugcaccugu

SEQ ID NO: 2843665 - RNA, 19 nt, Artificial Sequence
  Description of Artificial Sequence: Synthetic oligonucleotide
guuuucacuggagaccagu

SEQ ID NO: 2843666 - RNA, 19 nt, Artificial Sequence
  Description of Artificial Sequence: Synthetic oligonucleotide
acaccuuucaugacacauu

SEQ ID NO: 2843667 - RNA, 19 nt, Artificial Sequence
  Description of Artificial Sequence: Synthetic oligonucleotide
auuucaguccagggccacu

SEQ ID NO: 2843668 - RNA, 19 nt, Artificial Sequence
  Description of Artificial Sequence: Synthetic oligonucleotide
ccacuucugcaccuguacc

SEQ ID NO: 2843669 - RNA, 19 nt, Artificial Sequence
  Description of Artificial Sequence: Synthetic oligonucleotide
cucaugcccuuucauaagu

SEQ ID NO: 2843670 - RNA, 19 nt, Artificial Sequence
  Description of Artificial Sequence: Synthetic oligonucleotide
gcccuuucauaaguucugg

SEQ ID NO: 2843671 - RNA, 19 nt, Artificial Sequence
  Description of Artificial Sequence: Synthetic oligonucleotide
gaguauuguagaguucgau

SEQ ID NO: 2843672 - RNA, 19 nt, Artificial Sequence
  Description of Artificial Sequence: Synthetic oligonucleotide
guagaguucgaugcaaauu

SEQ ID NO: 2843673 - RNA, 19 nt, Artificial Sequence
  Description of Artificial Sequence: Synthetic oligonucleotide
aucuccguucacacugaug

SEQ ID NO: 2843674 - RNA, 19 nt, Artificial Sequence
  Description of Artificial Sequence: Synthetic oligonucleotide
cauguuggguuuggccaug

SEQ ID NO: 2843675 - RNA, 19 nt, Artificial Sequence
  Description of Artificial Sequence: Synthetic oligonucleotide
cucugaucggauggugauc

SEQ ID NO: 2843676 - RNA, 19 nt, Artificial Sequence
  Description of Artificial Sequence: Synthetic oligonucleotide
cuuuccugucaucugcggu

SEQ ID NO: 2843677 - RNA, 19 nt, Artificial Sequence
  Description of Artificial Sequence: Synthetic oligonucleotide
aggugagaaagaggcugca

SEQ ID NO: 2843678 - RNA, 19 nt, Artificial Sequence
  Description of Artificial Sequence: Synthetic oligonucleotide
gaccaguuuccagguuccc

SEQ ID NO: 2843679 - RNA, 19 nt, Artificial Sequence
  Description of Artificial Sequence: Synthetic oligonucleotide
ccagcuugucacccucucg

SEQ ID NO: 2843680 - RNA, 19 nt, Artificial Sequence
  Description of Artificial Sequence: Synthetic oligonucleotide
auuccugguccaguuugaa

SEQ ID NO: 2843681 - RNA, 19 nt, Artificial Sequence
  Description of Artificial Sequence: Synthetic oligonucleotide
uuuggccaugccggccacc

SEQ ID NO: 2843682 - RNA, 19 nt, Artificial Sequence
  Description of Artificial Sequence: Synthetic oligonucleotide
cacaucuugugaaccuucu

SEQ ID NO: 2843683 - RNA, 19 nt, Artificial Sequence
  Description of Artificial Sequence: Synthetic oligonucleotide
cugaucggauggugaucac

SEQ ID NO: 2843684 - RNA, 19 nt, Artificial Sequence
  Description of Artificial Sequence: Synthetic oligonucleotide
gucacccucucgcuuucuc

SEQ ID NO: 2843685 - RNA, 19 nt, Artificial Sequence
  Description of Artificial Sequence: Synthetic oligonucleotide
cuugucacccucucgcuuu

SEQ ID NO: 2843686 - RNA, 19 nt, Artificial Sequence
  Description of Artificial Sequence: Synthetic oligonucleotide
aguuuucacuggagaccag

SEQ ID NO: 2843687 - RNA, 19 nt, Artificial Sequence
  Description of Artificial Sequence: Synthetic oligonucleotide
gguagacuucccaucccac

SEQ ID NO: 2843688 - RNA, 19 nt, Artificial Sequence
  Description of Artificial Sequence: Synthetic oligonucleotide
guggcaaagcccacuccca

SEQ ID NO: 2843689 - RNA, 19 nt, Artificial Sequence
  Description of Artificial Sequence: Synthetic oligonucleotide
cgaugcaaauuucagucca

SEQ ID NO: 2843690 - RNA, 19 nt, Artificial Sequence
  Description of Artificial Sequence: Synthetic oligonucleotide
caguuuccagguucccaca

SEQ ID NO: 2843691 - RNA, 19 nt, Artificial Sequence
  Description of Artificial Sequence: Synthetic oligonucleotide
caaagcccacucccacuuc

SEQ ID NO: 2843692 - RNA, 19 nt, Artificial Sequence
  Description of Artificial Sequence: Synthetic oligonucleotide
accaggugagaaagaggcu

SEQ ID NO: 2843693 - RNA, 19 nt, Artificial Sequence
  Description of Artificial Sequence: Synthetic oligonucleotide
caucugcggugauuuccuc

SEQ ID NO: 2843694 - RNA, 19 nt, Artificial Sequence
  Description of Artificial Sequence: Synthetic oligonucleotide
ggccacuucccuuggcuca

SEQ ID NO: 2843695 - RNA, 19 nt, Artificial Sequence
  Description of Artificial Sequence: Synthetic oligonucleotide
caucccacuucugcaccug

SEQ ID NO: 2843696 - RNA, 19 nt, Artificial Sequence
  Description of Artificial Sequence: Synthetic oligonucleotide
agcccacucccacuucuuu

SEQ ID NO: 2843697 - RNA, 19 nt, Artificial Sequence
  Description of Artificial Sequence: Synthetic oligonucleotide
gguagaggugacaccuuuc

SEQ ID NO: 2843698 - RNA, 19 nt, Artificial Sequence
  Description of Artificial Sequence: Synthetic oligonucleotide
ggguuaugacgcucuucac

SEQ ID NO: 2843699 - RNA, 19 nt, Artificial Sequence
  Description of Artificial Sequence: Synthetic oligonucleotide
cccaucccacuucugcacc

SEQ ID NO: 2843700 - RNA, 19 nt, Artificial Sequence
  Description of Artificial Sequence: Synthetic oligonucleotide
cucaaauuccugguccagu

SEQ ID NO: 2843701 - RNA, 19 nt, Artificial Sequence
  Description of Artificial Sequence: Synthetic oligonucleotide
cccacucccacuucuuuca

SEQ ID NO: 2843702 - RNA, 19 nt, Artificial Sequence
  Description of Artificial Sequence: Synthetic oligonucleotide
acccucucgcuuucucuuu

SEQ ID NO: 2843703 - RNA, 19 nt, Artificial Sequence
  Description of Artificial Sequence: Synthetic oligonucleotide
ccacuucuuucauguaauc

SEQ ID NO: 2843704 - RNA, 19 nt, Artificial Sequence
  Description of Artificial Sequence: Synthetic oligonucleotide
agguucccacaaaggcauc

SEQ ID NO: 2843705 - RNA, 19 nt, Artificial Sequence
  Description of Artificial Sequence: Synthetic oligonucleotide
ccugguccaguuugaagga

SEQ ID NO: 2843706 - RNA, 19 nt, Artificial Sequence
  Description of Artificial Sequence: Synthetic oligonucleotide
cugucaucugcggugauuu

SEQ ID NO: 2843707 - RNA, 19 nt, Artificial Sequence
  Description of Artificial Sequence: Synthetic oligonucleotide
cacuggagaccaguuucca

SEQ ID NO: 2843708 - RNA, 19 nt, Artificial Sequence
  Description of Artificial Sequence: Synthetic oligonucleotide
ccucaaauuccugguccag

SEQ ID NO: 2843709 - RNA, 19 nt, Artificial Sequence
  Description of Artificial Sequence: Synthetic oligonucleotide
uccugucaucugcggugau

SEQ ID NO: 2843710 - RNA, 19 nt, Artificial Sequence
  Description of Artificial Sequence: Synthetic oligonucleotide
gcccacucccacuucuuuc

SEQ ID NO: 2843711 - RNA, 19 nt, Artificial Sequence
  Description of Artificial Sequence: Synthetic oligonucleotide
cggauggugaucacaucuc

SEQ ID NO: 2843712 - RNA, 19 nt, Artificial Sequence
  Description of Artificial Sequence: Synthetic oligonucleotide
gcucuucacuuuccuguca

SEQ ID NO: 2843713 - RNA, 19 nt, Artificial Sequence
  Description of Artificial Sequence: Synthetic oligonucleotide
ucccuuggcucaugcccuu

SEQ ID NO: 2843714 - RNA, 19 nt, Artificial Sequence
  Description of Artificial Sequence: Synthetic oligonucleotide
acuucccaucccacuucug

SEQ ID NO: 2843715 - RNA, 19 nt, Artificial Sequence
  Description of Artificial Sequence: Synthetic oligonucleotide
ugucacccucucgcuuucu

SEQ ID NO: 2843716 - RNA, 19 nt, Artificial Sequence
  Description of Artificial Sequence: Synthetic oligonucleotide
augugcucucugaucggau

SEQ ID NO: 2843717 - RNA, 19 nt, Artificial Sequence
  Description of Artificial Sequence: Synthetic oligonucleotide
gcucucugaucggauggug

SEQ ID NO: 2843718 - RNA, 19 nt, Artificial Sequence
  Description of Artificial Sequence: Synthetic oligonucleotide
ccaccaccagcuugucacc

SEQ ID NO: 2843719 - RNA, 19 nt, Artificial Sequence
  Description of Artificial Sequence: Synthetic oligonucleotide
guaccagggccccgccauc

SEQ ID NO: 2843720 - RNA, 19 nt, Artificial Sequence
  Description of Artificial Sequence: Synthetic oligonucleotide
caaauuccugguccaguuu

SEQ ID NO: 2843721 - RNA, 19 nt, Artificial Sequence
  Description of Artificial Sequence: Synthetic oligonucleotide
cuuucucuuuaugguggua

SEQ ID NO: 2843722 - RNA, 19 nt, Artificial Sequence
  Description of Artificial Sequence: Synthetic oligonucleotide
ggguuuggccaugccggcc

SEQ ID NO: 2843723 - RNA, 19 nt, Artificial Sequence
  Description of Artificial Sequence: Synthetic oligonucleotide
caucuaggguuaugacgcu

SEQ ID NO: 2843724 - RNA, 19 nt, Artificial Sequence
  Description of Artificial Sequence: Synthetic oligonucleotide
ggccccgccaucuaggguu

SEQ ID NO: 2843725 - RNA, 19 nt, Artificial Sequence
  Description of Artificial Sequence: Synthetic oligonucleotide
gcuuucucuuuaugguggu

SEQ ID NO: 2843726 - RNA, 19 nt, Artificial Sequence
  Description of Artificial Sequence: Synthetic oligonucleotide
cuguaccagggccccgcca

SEQ ID NO: 2843727 - RNA, 19 nt, Artificial Sequence
  Description of Artificial Sequence: Synthetic oligonucleotide
cugguccaguuugaaggaa

SEQ ID NO: 2843728 - RNA, 19 nt, Artificial Sequence
  Description of Artificial Sequence: Synthetic oligonucleotide
gugaaccuucugagauuuc

SEQ ID NO: 2843729 - RNA, 19 nt, Artificial Sequence
  Description of Artificial Sequence: Synthetic oligonucleotide
ccagggccccgccaucuag

SEQ ID NO: 2843730 - RNA, 19 nt, Artificial Sequence
  Description of Artificial Sequence: Synthetic oligonucleotide
ccuuggcucaugcccuuuc

SEQ ID NO: 2843731 - RNA, 19 nt, Artificial Sequence
  Description of Artificial Sequence: Synthetic oligonucleotide
cgcucuucacuuuccuguc

SEQ ID NO: 2843732 - RNA, 19 nt, Artificial Sequence
  Description of Artificial Sequence: Synthetic oligonucleotide
cacccucucgcuuucucuu

SEQ ID NO: 2843733 - RNA, 19 nt, Artificial Sequence
  Description of Artificial Sequence: Synthetic oligonucleotide
cccacuucuuucauguaau

SEQ ID NO: 2843734 - RNA, 19 nt, Artificial Sequence
  Description of Artificial Sequence: Synthetic oligonucleotide
gcggugauuuccucaaauu

SEQ ID NO: 2843735 - RNA, 19 nt, Artificial Sequence
  Description of Artificial Sequence: Synthetic oligonucleotide
ccagggccacuucccuugg

SEQ ID NO: 2843736 - RNA, 19 nt, Artificial Sequence
  Description of Artificial Sequence: Synthetic oligonucleotide
cgccaucuaggguuaugac

SEQ ID NO: 2843737 - RNA, 19 nt, Artificial Sequence
  Description of Artificial Sequence: Synthetic oligonucleotide
accagggccccgccaucua

SEQ ID NO: 2843738 - RNA, 19 nt, Artificial Sequence
  Description of Artificial Sequence: Synthetic oligonucleotide
gguccaguuugaaggaaau

SEQ ID NO: 2843739 - RNA, 19 nt, Artificial Sequence
  Description of Artificial Sequence: Synthetic oligonucleotide
ccuguaccagggccccgcc

SEQ ID NO: 2843740 - RNA, 19 nt, Artificial Sequence
  Description of Artificial Sequence: Synthetic oligonucleotide
cacacaucuugugaaccuu

SEQ ID NO: 2843741 - RNA, 19 nt, Artificial Sequence
  Description of Artificial Sequence: Synthetic oligonucleotide
ccgccaucuaggguuauga

SEQ ID NO: 2843742 - RNA, 19 nt, Artificial Sequence
  Description of Artificial Sequence: Synthetic oligonucleotide
gccaccuuucugguggcaa

SEQ ID NO: 2843743 - RNA, 19 nt, Artificial Sequence
  Description of Artificial Sequence: Synthetic oligonucleotide
ccaccuuucugguggcaaa

SEQ ID NO: 2843744 - RNA, 19 nt, Artificial Sequence
  Description of Artificial Sequence: Synthetic oligonucleotide
cuccguucacacugaugau

SEQ ID NO: 2843745 - RNA, 19 nt, Artificial Sequence
  Description of Artificial Sequence: Synthetic oligonucleotide
gccggccaccuuucuggug

SEQ ID NO: 2843746 - RNA, 19 nt, Artificial Sequence
  Description of Artificial Sequence: Synthetic oligonucleotide
cuaggguuaugacgcucuu

SEQ ID NO: 2843747 - RNA, 19 nt, Artificial Sequence
  Description of Artificial Sequence: Synthetic oligonucleotide
cugcggugauuuccucaaa

SEQ ID NO: 2843748 - RNA, 19 nt, Artificial Sequence
  Description of Artificial Sequence: Synthetic oligonucleotide
cugguagaggugacaccuu

SEQ ID NO: 2843749 - RNA, 19 nt, Artificial Sequence
  Description of Artificial Sequence: Synthetic oligonucleotide
gcuugucacccucucgcuu

SEQ ID NO: 2843750 - RNA, 19 nt, Artificial Sequence
  Description of Artificial Sequence: Synthetic oligonucleotide
guccagggccacuucccuu

SEQ ID NO: 2843751 - RNA, 19 nt, Artificial Sequence
  Description of Artificial Sequence: Synthetic oligonucleotide
caucuccguucacacugau

SEQ ID NO: 2843752 - RNA, 19 nt, Artificial Sequence
  Description of Artificial Sequence: Synthetic oligonucleotide
cacauuccaccaccagcuu

SEQ ID NO: 2843753 - RNA, 19 nt, Artificial Sequence
  Description of Artificial Sequence: Synthetic oligonucleotide
caaaggcaucacacaucuu

SEQ ID NO: 2843754 - RNA, 19 nt, Artificial Sequence
  Description of Artificial Sequence: Synthetic oligonucleotide
cccgccaucuaggguuaug

SEQ ID NO: 2843755 - RNA, 19 nt, Artificial Sequence
  Description of Artificial Sequence: Synthetic oligonucleotide
cccucucgcuuucucuuua

SEQ ID NO: 2843756 - RNA, 19 nt, Artificial Sequence
  Description of Artificial Sequence: Synthetic oligonucleotide
cggccaccuuucugguggc

SEQ ID NO: 2843757 - RNA, 19 nt, Artificial Sequence
  Description of Artificial Sequence: Synthetic oligonucleotide
ggccaccuuucugguggca

SEQ ID NO: 2843758 - RNA, 19 nt, Artificial Sequence
  Description of Artificial Sequence: Synthetic oligonucleotide
ccacuucccuuggcucaug

SEQ ID NO: 2843759 - RNA, 19 nt, Artificial Sequence
  Description of Artificial Sequence: Synthetic oligonucleotide
gccacuucccuuggcucau

SEQ ID NO: 2843760 - RNA, 19 nt, Artificial Sequence
  Description of Artificial Sequence: Synthetic oligonucleotide
gggccccgccaucuagggu

SEQ ID NO: 2843761 - RNA, 19 nt, Artificial Sequence
  Description of Artificial Sequence: Synthetic oligonucleotide
ccugucaucugcggugauu

SEQ ID NO: 2843762 - RNA, 19 nt, Artificial Sequence
  Description of Artificial Sequence: Synthetic oligonucleotide
gccccgccaucuaggguua

SEQ ID NO: 2843763 - RNA, 19 nt, Artificial Sequence
  Description of Artificial Sequence: Synthetic oligonucleotide
cguucacacugaugaucau

SEQ ID NO: 2843764 - RNA, 19 nt, Artificial Sequence
  Description of Artificial Sequence: Synthetic oligonucleotide
ccaugccggccaccuuucu

SEQ ID NO: 2843765 - RNA, 19 nt, Artificial Sequence
  Description of Artificial Sequence: Synthetic oligonucleotide
cccuuggcucaugcccuuu

SEQ ID NO: 2843766 - RNA, 19 nt, Artificial Sequence
  Description of Artificial Sequence: Synthetic oligonucleotide
ccccgccaucuaggguuau

SEQ ID NO: 2843767 - RNA, 19 nt, Artificial Sequence
  Description of Artificial Sequence: Synthetic oligonucleotide
gaagaaaucauauacggcg

SEQ ID NO: 2843768 - RNA, 19 nt, Artificial Sequence
  Description of Artificial Sequence: Synthetic oligonucleotide
aaaguugugaacuuccagc

SEQ ID NO: 2843769 - RNA, 19 nt, Artificial Sequence
  Description of Artificial Sequence: Synthetic oligonucleotide
aaaccuucuacauaacucc

SEQ ID NO: 2843770 - RNA, 19 nt, Artificial Sequence
  Description of Artificial Sequence: Synthetic oligonucleotide
aaguugugaacuuccagcc

SEQ ID NO: 2843771 - RNA, 19 nt, Artificial Sequence
  Description of Artificial Sequence: Synthetic oligonucleotide
aguuuaucaaguccaagcc

SEQ ID NO: 2843772 - RNA, 19 nt, Artificial Sequence
  Description of Artificial Sequence: Synthetic oligonucleotide
uuuaucaaguccaagccag

SEQ ID NO: 2843773 - RNA, 19 nt, Artificial Sequence
  Description of Artificial Sequence: Synthetic oligonucleotide
uggaagaaaucauauacgg

SEQ ID NO: 2843774 - RNA, 19 nt, Artificial Sequence
  Description of Artificial Sequence: Synthetic oligonucleotide
aaucauauacggcguaggc

SEQ ID NO: 2843775 - RNA, 19 nt, Artificial Sequence
  Description of Artificial Sequence: Synthetic oligonucleotide
aaugacaguucuuauacca

SEQ ID NO: 2843776 - RNA, 19 nt, Artificial Sequence
  Description of Artificial Sequence: Synthetic oligonucleotide
uguacuucccgacugacag

SEQ ID NO: 2843777 - RNA, 19 nt, Artificial Sequence
  Description of Artificial Sequence: Synthetic oligonucleotide
uuuucagcuccacauaagg

SEQ ID NO: 2843778 - RNA, 19 nt, Artificial Sequence
  Description of Artificial Sequence: Synthetic oligonucleotide
gauuguguaguuuaucaag

SEQ ID NO: 2843779 - RNA, 19 nt, Artificial Sequence
  Description of Artificial Sequence: Synthetic oligonucleotide
aaaaccuucuacauaacuc

SEQ ID NO: 2843780 - RNA, 19 nt, Artificial Sequence
  Description of Artificial Sequence: Synthetic oligonucleotide
uuggaagaaaucauauacg

SEQ ID NO: 2843781 - RNA, 19 nt, Artificial Sequence
  Description of Artificial Sequence: Synthetic oligonucleotide
gaauggagaacucaugucc

SEQ ID NO: 2843782 - RNA, 19 nt, Artificial Sequence
  Description of Artificial Sequence: Synthetic oligonucleotide
ugaacuuccagccauugug

SEQ ID NO: 2843783 - RNA, 19 nt, Artificial Sequence
  Description of Artificial Sequence: Synthetic oligonucleotide
ucauauacggcguaggcug

SEQ ID NO: 2843784 - RNA, 19 nt, Artificial Sequence
  Description of Artificial Sequence: Synthetic oligonucleotide
aaaugacaguucuuauacc

SEQ ID NO: 2843785 - RNA, 19 nt, Artificial Sequence
  Description of Artificial Sequence: Synthetic oligonucleotide
uaguuuaucaaguccaagc

SEQ ID NO: 2843786 - RNA, 19 nt, Artificial Sequence
  Description of Artificial Sequence: Synthetic oligonucleotide
ucaaguccaagccagaacu

SEQ ID NO: 2843787 - RNA, 19 nt, Artificial Sequence
  Description of Artificial Sequence: Synthetic oligonucleotide
ucaaaaguugugaacuucc

SEQ ID NO: 2843788 - RNA, 19 nt, Artificial Sequence
  Description of Artificial Sequence: Synthetic oligonucleotide
aaaaguugugaacuuccag

SEQ ID NO: 2843789 - RNA, 19 nt, Artificial Sequence
  Description of Artificial Sequence: Synthetic oligonucleotide
uguguaguuuaucaagucc

SEQ ID NO: 2843790 - RNA, 19 nt, Artificial Sequence
  Description of Artificial Sequence: Synthetic oligonucleotide
caaaugacaguucuuauac

SEQ ID NO: 2843791 - RNA, 19 nt, Artificial Sequence
  Description of Artificial Sequence: Synthetic oligonucleotide
aguucuuauaccaccagcc

SEQ ID NO: 2843792 - RNA, 19 nt, Artificial Sequence
  Description of Artificial Sequence: Synthetic oligonucleotide
ucuuauaccaccagccacc

SEQ ID NO: 2843793 - RNA, 19 nt, Artificial Sequence
  Description of Artificial Sequence: Synthetic oligonucleotide
cuugaagaaguccagcugc

SEQ ID NO: 2843794 - RNA, 19 nt, Artificial Sequence
  Description of Artificial Sequence: Synthetic oligonucleotide
uuugcuggaugccacuugg

SEQ ID NO: 2843795 - RNA, 19 nt, Artificial Sequence
  Description of Artificial Sequence: Synthetic oligonucleotide
ugugucagugcacaguugc

SEQ ID NO: 2843796 - RNA, 19 nt, Artificial Sequence
  Description of Artificial Sequence: Synthetic oligonucleotide
acucauguccuuuccaugg

SEQ ID NO: 2843797 - RNA, 19 nt, Artificial Sequence
  Description of Artificial Sequence: Synthetic oligonucleotide
uccguauuugccauucggg

SEQ ID NO: 2843798 - RNA, 19 nt, Artificial Sequence
  Description of Artificial Sequence: Synthetic oligonucleotide
agggcaauaucauugucuc

SEQ ID NO: 2843799 - RNA, 19 nt, Artificial Sequence
  Description of Artificial Sequence: Synthetic oligonucleotide
agccagaacuccuucaugg

SEQ ID NO: 2843800 - RNA, 19 nt, Artificial Sequence
  Description of Artificial Sequence: Synthetic oligonucleotide
aaguccaagccagaacucc

SEQ ID NO: 2843801 - RNA, 19 nt, Artificial Sequence
  Description of Artificial Sequence: Synthetic oligonucleotide
acagucugcaaaucugccc

SEQ ID NO: 2843802 - RNA, 19 nt, Artificial Sequence
  Description of Artificial Sequence: Synthetic oligonucleotide
aaaucauauacggcguagg

SEQ ID NO: 2843803 - RNA, 19 nt, Artificial Sequence
  Description of Artificial Sequence: Synthetic oligonucleotide
uccacauaaggaauggaga

SEQ ID NO: 2843804 - RNA, 19 nt, Artificial Sequence
  Description of Artificial Sequence: Synthetic oligonucleotide
ugcaaaucugcccucaccu

SEQ ID NO: 2843805 - RNA, 19 nt, Artificial Sequence
  Description of Artificial Sequence: Synthetic oligonucleotide
gagauuguguaguuuauca

SEQ ID NO: 2843806 - RNA, 19 nt, Artificial Sequence
  Description of Artificial Sequence: Synthetic oligonucleotide
uucuacauaacuccgccaa

SEQ ID NO: 2843807 - RNA, 19 nt, Artificial Sequence
  Description of Artificial Sequence: Synthetic oligonucleotide
uucagcuccacauaaggaa

SEQ ID NO: 2843808 - RNA, 19 nt, Artificial Sequence
  Description of Artificial Sequence: Synthetic oligonucleotide
uugacagucugcaaaucug

SEQ ID NO: 2843809 - RNA, 19 nt, Artificial Sequence
  Description of Artificial Sequence: Synthetic oligonucleotide
ucggguugccaaaugacag

SEQ ID NO: 2843810 - RNA, 19 nt, Artificial Sequence
  Description of Artificial Sequence: Synthetic oligonucleotide
uucguugacagucugcaaa

SEQ ID NO: 2843811 - RNA, 19 nt, Artificial Sequence
  Description of Artificial Sequence: Synthetic oligonucleotide
uaggcugauucguugacag

SEQ ID NO: 2843812 - RNA, 19 nt, Artificial Sequence
  Description of Artificial Sequence: Synthetic oligonucleotide
guauuugccauucggguug

SEQ ID NO: 2843813 - RNA, 19 nt, Artificial Sequence
  Description of Artificial Sequence: Synthetic oligonucleotide
uucuuauaccaccagccac

SEQ ID NO: 2843814 - RNA, 19 nt, Artificial Sequence
  Description of Artificial Sequence: Synthetic oligonucleotide
uaaggaauggagaacucau

SEQ ID NO: 2843815 - RNA, 19 nt, Artificial Sequence
  Description of Artificial Sequence: Synthetic oligonucleotide
ucugucaaaaguugugaac

SEQ ID NO: 2843816 - RNA, 19 nt, Artificial Sequence
  Description of Artificial Sequence: Synthetic oligonucleotide
cuccacauaaggaauggag

SEQ ID NO: 2843817 - RNA, 19 nt, Artificial Sequence
  Description of Artificial Sequence: Synthetic oligonucleotide
aggaauggagaacucaugu

SEQ ID NO: 2843818 - RNA, 19 nt, Artificial Sequence
  Description of Artificial Sequence: Synthetic oligonucleotide
ugacagucugcaaaucugc

SEQ ID NO: 2843819 - RNA, 19 nt, Artificial Sequence
  Description of Artificial Sequence: Synthetic oligonucleotide
aacuccuucaugggguccc

SEQ ID NO: 2843820 - RNA, 19 nt, Artificial Sequence
  Description of Artificial Sequence: Synthetic oligonucleotide
aucaaguccaagccagaac

SEQ ID NO: 2843821 - RNA, 19 nt, Artificial Sequence
  Description of Artificial Sequence: Synthetic oligonucleotide
auaucauugucucugucaa

SEQ ID NO: 2843822 - RNA, 19 nt, Artificial Sequence
  Description of Artificial Sequence: Synthetic oligonucleotide
acauaaggaauggagaacu

SEQ ID NO: 2843823 - RNA, 19 nt, Artificial Sequence
  Description of Artificial Sequence: Synthetic oligonucleotide
accaugaugugucagugca

SEQ ID NO: 2843824 - RNA, 19 nt, Artificial Sequence
  Description of Artificial Sequence: Synthetic oligonucleotide
cauugugguagguaagggc

SEQ ID NO: 2843825 - RNA, 19 nt, Artificial Sequence
  Description of Artificial Sequence: Synthetic oligonucleotide
agugugucgugccuguggg

SEQ ID NO: 2843826 - RNA, 19 nt, Artificial Sequence
  Description of Artificial Sequence: Synthetic oligonucleotide
cucauaucgaguaggggug

SEQ ID NO: 2843827 - RNA, 19 nt, Artificial Sequence
  Description of Artificial Sequence: Synthetic oligonucleotide
aacucauguccuuuccaug

SEQ ID NO: 2843828 - RNA, 19 nt, Artificial Sequence
  Description of Artificial Sequence: Synthetic oligonucleotide
uuucagcuccacauaagga

SEQ ID NO: 2843829 - RNA, 19 nt, Artificial Sequence
  Description of Artificial Sequence: Synthetic oligonucleotide
gaaaucauauacggcguag

SEQ ID NO: 2843830 - RNA, 19 nt, Artificial Sequence
  Description of Artificial Sequence: Synthetic oligonucleotide
uacauaacuccgccaacgc

SEQ ID NO: 2843831 - RNA, 19 nt, Artificial Sequence
  Description of Artificial Sequence: Synthetic oligonucleotide
auggcucccaguucacucc

SEQ ID NO: 2843832 - RNA, 19 nt, Artificial Sequence
  Description of Artificial Sequence: Synthetic oligonucleotide
cuacauaacuccgccaacg

SEQ ID NO: 2843833 - RNA, 19 nt, Artificial Sequence
  Description of Artificial Sequence: Synthetic oligonucleotide
uucggguugccaaaugaca

SEQ ID NO: 2843834 - RNA, 19 nt, Artificial Sequence
  Description of Artificial Sequence: Synthetic oligonucleotide
cuuccagccauugugguag

SEQ ID NO: 2843835 - RNA, 19 nt, Artificial Sequence
  Description of Artificial Sequence: Synthetic oligonucleotide
uucacucccucacugugcc

SEQ ID NO: 2843836 - RNA, 19 nt, Artificial Sequence
  Description of Artificial Sequence: Synthetic oligonucleotide
auugugguagguaagggca

SEQ ID NO: 2843837 - RNA, 19 nt, Artificial Sequence
  Description of Artificial Sequence: Synthetic oligonucleotide
ucaccucauaucgaguagg

SEQ ID NO: 2843838 - RNA, 19 nt, Artificial Sequence
  Description of Artificial Sequence: Synthetic oligonucleotide
accgcucuuugcuggaugc

SEQ ID NO: 2843839 - RNA, 19 nt, Artificial Sequence
  Description of Artificial Sequence: Synthetic oligonucleotide
uugaagaaguccagcugcc

SEQ ID NO: 2843840 - RNA, 19 nt, Artificial Sequence
  Description of Artificial Sequence: Synthetic oligonucleotide
gaacuuccagccauugugg

SEQ ID NO: 2843841 - RNA, 19 nt, Artificial Sequence
  Description of Artificial Sequence: Synthetic oligonucleotide
uuguaccgcucuuugcugg

SEQ ID NO: 2843842 - RNA, 19 nt, Artificial Sequence
  Description of Artificial Sequence: Synthetic oligonucleotide
cugcccucaccucauaucg

SEQ ID NO: 2843843 - RNA, 19 nt, Artificial Sequence
  Description of Artificial Sequence: Synthetic oligonucleotide
uguaguuuaucaaguccaa

SEQ ID NO: 2843844 - RNA, 19 nt, Artificial Sequence
  Description of Artificial Sequence: Synthetic oligonucleotide
aauggagaacucauguccu

SEQ ID NO: 2843845 - RNA, 19 nt, Artificial Sequence
  Description of Artificial Sequence: Synthetic oligonucleotide
aagaaaucauauacggcgu

SEQ ID NO: 2843846 - RNA, 19 nt, Artificial Sequence
  Description of Artificial Sequence: Synthetic oligonucleotide
ugccacuuggaagaaauca

SEQ ID NO: 2843847 - RNA, 19 nt, Artificial Sequence
  Description of Artificial Sequence: Synthetic oligonucleotide
aaccuucuacauaacuccg

SEQ ID NO: 2843848 - RNA, 19 nt, Artificial Sequence
  Description of Artificial Sequence: Synthetic oligonucleotide
ugauucguugacagucugc

SEQ ID NO: 2843849 - RNA, 19 nt, Artificial Sequence
  Description of Artificial Sequence: Synthetic oligonucleotide
cuggaugccacuuggaaga

SEQ ID NO: 2843850 - RNA, 19 nt, Artificial Sequence
  Description of Artificial Sequence: Synthetic oligonucleotide
gauucguugacagucugca

SEQ ID NO: 2843851 - RNA, 19 nt, Artificial Sequence
  Description of Artificial Sequence: Synthetic oligonucleotide
ggcaauaucauugucucug

SEQ ID NO: 2843852 - RNA, 19 nt, Artificial Sequence
  Description of Artificial Sequence: Synthetic oligonucleotide
ucucugucaaaaguuguga

SEQ ID NO: 2843853 - RNA, 19 nt, Artificial Sequence
  Description of Artificial Sequence: Synthetic oligonucleotide
ucauugucucugucaaaag

SEQ ID NO: 2843854 - RNA, 19 nt, Artificial Sequence
  Description of Artificial Sequence: Synthetic oligonucleotide
agcuuguaccgcucuuugc

SEQ ID NO: 2843855 - RNA, 19 nt, Artificial Sequence
  Description of Artificial Sequence: Synthetic oligonucleotide
aguggugagauuguguagu

SEQ ID NO: 2843856 - RNA, 19 nt, Artificial Sequence
  Description of Artificial Sequence: Synthetic oligonucleotide
guuuaucaaguccaagcca

SEQ ID NO: 2843857 - RNA, 19 nt, Artificial Sequence
  Description of Artificial Sequence: Synthetic oligonucleotide
aguccagcugcccagugug

SEQ ID NO: 2843858 - RNA, 19 nt, Artificial Sequence
  Description of Artificial Sequence: Synthetic oligonucleotide
aguucacucccucacugug

SEQ ID NO: 2843859 - RNA, 19 nt, Artificial Sequence
  Description of Artificial Sequence: Synthetic oligonucleotide
aguugcugagggcaauauc

SEQ ID NO: 2843860 - RNA, 19 nt, Artificial Sequence
  Description of Artificial Sequence: Synthetic oligonucleotide
auaaggaauggagaacuca

SEQ ID NO: 2843861 - RNA, 19 nt, Artificial Sequence
  Description of Artificial Sequence: Synthetic oligonucleotide
cuccguauuugccauucgg

SEQ ID NO: 2843862 - RNA, 19 nt, Artificial Sequence
  Description of Artificial Sequence: Synthetic oligonucleotide
aucauugucucugucaaaa

SEQ ID NO: 2843863 - RNA, 19 nt, Artificial Sequence
  Description of Artificial Sequence: Synthetic oligonucleotide
agaacuccuucaugggguc

SEQ ID NO: 2843864 - RNA, 19 nt, Artificial Sequence
  Description of Artificial Sequence: Synthetic oligonucleotide
ucuacauaacuccgccaac

SEQ ID NO: 2843865 - RNA, 19 nt, Artificial Sequence
  Description of Artificial Sequence: Synthetic oligonucleotide
guguaguuuaucaagucca

SEQ ID NO: 2843866 - RNA, 19 nt, Artificial Sequence
  Description of Artificial Sequence: Synthetic oligonucleotide
gagaacucauguccuuucc

SEQ ID NO: 2843867 - RNA, 19 nt, Artificial Sequence
  Description of Artificial Sequence: Synthetic oligonucleotide
auacggcguaggcugauuc

SEQ ID NO: 2843868 - RNA, 19 nt, Artificial Sequence
  Description of Artificial Sequence: Synthetic oligonucleotide
agauuguguaguuuaucaa

SEQ ID NO: 2843869 - RNA, 19 nt, Artificial Sequence
  Description of Artificial Sequence: Synthetic oligonucleotide
uacggcguaggcugauucg

SEQ ID NO: 2843870 - RNA, 19 nt, Artificial Sequence
  Description of Artificial Sequence: Synthetic oligonucleotide
caguucuuauaccaccagc

SEQ ID NO: 2843871 - RNA, 19 nt, Artificial Sequence
  Description of Artificial Sequence: Synthetic oligonucleotide
auucggguugccaaaugac

SEQ ID NO: 2843872 - RNA, 19 nt, Artificial Sequence
  Description of Artificial Sequence: Synthetic oligonucleotide
acaguucuuauaccaccag

SEQ ID NO: 2843873 - RNA, 19 nt, Artificial Sequence
  Description of Artificial Sequence: Synthetic oligonucleotide
aacuuccagccauuguggu

SEQ ID NO: 2843874 - RNA, 19 nt, Artificial Sequence
  Description of Artificial Sequence: Synthetic oligonucleotide
acugacagcuuguaccgcu

SEQ ID NO: 2843875 - RNA, 19 nt, Artificial Sequence
  Description of Artificial Sequence: Synthetic oligonucleotide
uuguguaguuuaucaaguc

SEQ ID NO: 2843876 - RNA, 19 nt, Artificial Sequence
  Description of Artificial Sequence: Synthetic oligonucleotide
ugucagugcacaguugcug

SEQ ID NO: 2843877 - RNA, 19 nt, Artificial Sequence
  Description of Artificial Sequence: Synthetic oligonucleotide
agaacucauguccuuucca

SEQ ID NO: 2843878 - RNA, 19 nt, Artificial Sequence
  Description of Artificial Sequence: Synthetic oligonucleotide
uccgccaacgcuugaagaa

SEQ ID NO: 2843879 - RNA, 19 nt, Artificial Sequence
  Description of Artificial Sequence: Synthetic oligonucleotide
uacuucccgacugacagcu

SEQ ID NO: 2843880 - RNA, 19 nt, Artificial Sequence
  Description of Artificial Sequence: Synthetic oligonucleotide
caacgcuugaagaagucca

SEQ ID NO: 2843881 - RNA, 19 nt, Artificial Sequence
  Description of Artificial Sequence: Synthetic oligonucleotide
ugccaaaugacaguucuua

SEQ ID NO: 2843882 - RNA, 19 nt, Artificial Sequence
  Description of Artificial Sequence: Synthetic oligonucleotide
caccucauaucgaguaggg

SEQ ID NO: 2843883 - RNA, 19 nt, Artificial Sequence
  Description of Artificial Sequence: Synthetic oligonucleotide
aagggcauccccugccgug

SEQ ID NO: 2843884 - RNA, 19 nt, Artificial Sequence
  Description of Artificial Sequence: Synthetic oligonucleotide
ucauguccuuuccauggcu

SEQ ID NO: 2843885 - RNA, 19 nt, Artificial Sequence
  Description of Artificial Sequence: Synthetic oligonucleotide
aucauauacggcguaggcu

SEQ ID NO: 2843886 - RNA, 19 nt, Artificial Sequence
  Description of Artificial Sequence: Synthetic oligonucleotide
accuucuacauaacuccgc

SEQ ID NO: 2843887 - RNA, 19 nt, Artificial Sequence
  Description of Artificial Sequence: Synthetic oligonucleotide
aaggaauggagaacucaug

SEQ ID NO: 2843888 - RNA, 19 nt, Artificial Sequence
  Description of Artificial Sequence: Synthetic oligonucleotide
ccgacugacagcuuguacc

SEQ ID NO: 2843889 - RNA, 19 nt, Artificial Sequence
  Description of Artificial Sequence: Synthetic oligonucleotide
uucaugggguccccaaaac

SEQ ID NO: 2843890 - RNA, 19 nt, Artificial Sequence
  Description of Artificial Sequence: Synthetic oligonucleotide
agguaagggcauccccugc

SEQ ID NO: 2843891 - RNA, 19 nt, Artificial Sequence
  Description of Artificial Sequence: Synthetic oligonucleotide
uagguaagggcauccccug

SEQ ID NO: 2843892 - RNA, 19 nt, Artificial Sequence
  Description of Artificial Sequence: Synthetic oligonucleotide
ugcuggaugccacuuggaa

SEQ ID NO: 2843893 - RNA, 19 nt, Artificial Sequence
  Description of Artificial Sequence: Synthetic oligonucleotide
uaucgaguaggggugccag

SEQ ID NO: 2843894 - RNA, 19 nt, Artificial Sequence
  Description of Artificial Sequence: Synthetic oligonucleotide
acauaacuccgccaacgcu

SEQ ID NO: 2843895 - RNA, 19 nt, Artificial Sequence
  Description of Artificial Sequence: Synthetic oligonucleotide
ucagugcacaguugcugag

SEQ ID NO: 2843896 - RNA, 19 nt, Artificial Sequence
  Description of Artificial Sequence: Synthetic oligonucleotide
guaagggcauccccugccg

SEQ ID NO: 2843897 - RNA, 19 nt, Artificial Sequence
  Description of Artificial Sequence: Synthetic oligonucleotide
guccccaaaaccuucuaca

SEQ ID NO: 2843898 - RNA, 19 nt, Artificial Sequence
  Description of Artificial Sequence: Synthetic oligonucleotide
ggugccaguggugagauug

SEQ ID NO: 2843899 - RNA, 19 nt, Artificial Sequence
  Description of Artificial Sequence: Synthetic oligonucleotide
guucuuauaccaccagcca

SEQ ID NO: 2843900 - RNA, 19 nt, Artificial Sequence
  Description of Artificial Sequence: Synthetic oligonucleotide
ucuccguauuugccauucg

SEQ ID NO: 2843901 - RNA, 19 nt, Artificial Sequence
  Description of Artificial Sequence: Synthetic oligonucleotide
ugaugugucagugcacagu

SEQ ID NO: 2843902 - RNA, 19 nt, Artificial Sequence
  Description of Artificial Sequence: Synthetic oligonucleotide
gcugagggcaauaucauug

SEQ ID NO: 2843903 - RNA, 19 nt, Artificial Sequence
  Description of Artificial Sequence: Synthetic oligonucleotide
ucgaguaggggugccagug

SEQ ID NO: 2843904 - RNA, 19 nt, Artificial Sequence
  Description of Artificial Sequence: Synthetic oligonucleotide
ucguugacagucugcaaau

SEQ ID NO: 2843905 - RNA, 19 nt, Artificial Sequence
  Description of Artificial Sequence: Synthetic oligonucleotide
guaguuuaucaaguccaag

SEQ ID NO: 2843906 - RNA, 19 nt, Artificial Sequence
  Description of Artificial Sequence: Synthetic oligonucleotide
aaguccagcugcccagugu

SEQ ID NO: 2843907 - RNA, 19 nt, Artificial Sequence
  Description of Artificial Sequence: Synthetic oligonucleotide
uugccauucggguugccaa

SEQ ID NO: 2843908 - RNA, 19 nt, Artificial Sequence
  Description of Artificial Sequence: Synthetic oligonucleotide
aguugugaacuuccagcca

SEQ ID NO: 2843909 - RNA, 19 nt, Artificial Sequence
  Description of Artificial Sequence: Synthetic oligonucleotide
cuuguaccgcucuuugcug

SEQ ID NO: 2843910 - RNA, 19 nt, Artificial Sequence
  Description of Artificial Sequence: Synthetic oligonucleotide
ugucaaaaguugugaacuu

SEQ ID NO: 2843911 - RNA, 19 nt, Artificial Sequence
  Description of Artificial Sequence: Synthetic oligonucleotide
uccccaaaaccuucuacau

SEQ ID NO: 2843912 - RNA, 19 nt, Artificial Sequence
  Description of Artificial Sequence: Synthetic oligonucleotide
agcuccacauaaggaaugg

SEQ ID NO: 2843913 - RNA, 19 nt, Artificial Sequence
  Description of Artificial Sequence: Synthetic oligonucleotide
cuggucucuccguauuugc

SEQ ID NO: 2843914 - RNA, 19 nt, Artificial Sequence
  Description of Artificial Sequence: Synthetic oligonucleotide
cuucccgacugacagcuug

SEQ ID NO: 2843915 - RNA, 19 nt, Artificial Sequence
  Description of Artificial Sequence: Synthetic oligonucleotide
ugugaacuuccagccauug

SEQ ID NO: 2843916 - RNA, 19 nt, Artificial Sequence
  Description of Artificial Sequence: Synthetic oligonucleotide
cauaaggaauggagaacuc

SEQ ID NO: 2843917 - RNA, 19 nt, Artificial Sequence
  Description of Artificial Sequence: Synthetic oligonucleotide
ggaagaaaucauauacggc

SEQ ID NO: 2843918 - RNA, 19 nt, Artificial Sequence
  Description of Artificial Sequence: Synthetic oligonucleotide
caaaucugcccucaccuca

SEQ ID NO: 2843919 - RNA, 19 nt, Artificial Sequence
  Description of Artificial Sequence: Synthetic oligonucleotide
cauggcucccaguucacuc

SEQ ID NO: 2843920 - RNA, 19 nt, Artificial Sequence
  Description of Artificial Sequence: Synthetic oligonucleotide
cacauaaggaauggagaac

SEQ ID NO: 2843921 - RNA, 19 nt, Artificial Sequence
  Description of Artificial Sequence: Synthetic oligonucleotide
uuugccauucggguugcca

SEQ ID NO: 2843922 - RNA, 19 nt, Artificial Sequence
  Description of Artificial Sequence: Synthetic oligonucleotide
ugagauuguguaguuuauc

SEQ ID NO: 2843923 - RNA, 19 nt, Artificial Sequence
  Description of Artificial Sequence: Synthetic oligonucleotide
gacagucugcaaaucugcc

SEQ ID NO: 2843924 - RNA, 19 nt, Artificial Sequence
  Description of Artificial Sequence: Synthetic oligonucleotide
acugugccuggucucuccg

SEQ ID NO: 2843925 - RNA, 19 nt, Artificial Sequence
  Description of Artificial Sequence: Synthetic oligonucleotide
gacaguucuuauaccacca

SEQ ID NO: 2843926 - RNA, 19 nt, Artificial Sequence
  Description of Artificial Sequence: Synthetic oligonucleotide
agaaaucauauacggcgua

SEQ ID NO: 2843927 - RNA, 19 nt, Artificial Sequence
  Description of Artificial Sequence: Synthetic oligonucleotide
ggugagauuguguaguuua

SEQ ID NO: 2843928 - RNA, 19 nt, Artificial Sequence
  Description of Artificial Sequence: Synthetic oligonucleotide
gcuggaugccacuuggaag

SEQ ID NO: 2843929 - RNA, 19 nt, Artificial Sequence
  Description of Artificial Sequence: Synthetic oligonucleotide
uaucaaguccaagccagaa

SEQ ID NO: 2843930 - RNA, 19 nt, Artificial Sequence
  Description of Artificial Sequence: Synthetic oligonucleotide
ugaagaaguccagcugccc

SEQ ID NO: 2843931 - RNA, 19 nt, Artificial Sequence
  Description of Artificial Sequence: Synthetic oligonucleotide
cagugugucgugccugugg

SEQ ID NO: 2843932 - RNA, 19 nt, Artificial Sequence
  Description of Artificial Sequence: Synthetic oligonucleotide
cucaccucauaucgaguag

SEQ ID NO: 2843933 - RNA, 19 nt, Artificial Sequence
  Description of Artificial Sequence: Synthetic oligonucleotide
ucugcccucaccucauauc

SEQ ID NO: 2843934 - RNA, 19 nt, Artificial Sequence
  Description of Artificial Sequence: Synthetic oligonucleotide
augaugugucagugcacag

SEQ ID NO: 2843935 - RNA, 19 nt, Artificial Sequence
  Description of Artificial Sequence: Synthetic oligonucleotide
ucauaucgaguaggggugc

SEQ ID NO: 2843936 - RNA, 19 nt, Artificial Sequence
  Description of Artificial Sequence: Synthetic oligonucleotide
gucucugucaaaaguugug

SEQ ID NO: 2843937 - RNA, 19 nt, Artificial Sequence
  Description of Artificial Sequence: Synthetic oligonucleotide
cugcaaaucugcccucacc

SEQ ID NO: 2843938 - RNA, 19 nt, Artificial Sequence
  Description of Artificial Sequence: Synthetic oligonucleotide
caugaugugucagugcaca

SEQ ID NO: 2843939 - RNA, 19 nt, Artificial Sequence
  Description of Artificial Sequence: Synthetic oligonucleotide
guugacagucugcaaaucu

SEQ ID NO: 2843940 - RNA, 19 nt, Artificial Sequence
  Description of Artificial Sequence: Synthetic oligonucleotide
caaaaguugugaacuucca

SEQ ID NO: 2843941 - RNA, 19 nt, Artificial Sequence
  Description of Artificial Sequence: Synthetic oligonucleotide
uuuccauggcucccaguuc

SEQ ID NO: 2843942 - RNA, 19 nt, Artificial Sequence
  Description of Artificial Sequence: Synthetic oligonucleotide
cucauguccuuuccauggc

SEQ ID NO: 2843943 - RNA, 19 nt, Artificial Sequence
  Description of Artificial Sequence: Synthetic oligonucleotide
gucagugcacaguugcuga

SEQ ID NO: 2843944 - RNA, 19 nt, Artificial Sequence
  Description of Artificial Sequence: Synthetic oligonucleotide
ccuucuacauaacuccgcc

SEQ ID NO: 2843945 - RNA, 19 nt, Artificial Sequence
  Description of Artificial Sequence: Synthetic oligonucleotide
agucugcaaaucugcccuc

SEQ ID NO: 2843946 - RNA, 19 nt, Artificial Sequence
  Description of Artificial Sequence: Synthetic oligonucleotide
gguagguaagggcaucccc

SEQ ID NO: 2843947 - RNA, 19 nt, Artificial Sequence
  Description of Artificial Sequence: Synthetic oligonucleotide
uugcugagggcaauaucau

SEQ ID NO: 2843948 - RNA, 19 nt, Artificial Sequence
  Description of Artificial Sequence: Synthetic oligonucleotide
ugagggcaauaucauuguc

SEQ ID NO: 2843949 - RNA, 19 nt, Artificial Sequence
  Description of Artificial Sequence: Synthetic oligonucleotide
cugucaaaaguugugaacu

SEQ ID NO: 2843950 - RNA, 19 nt, Artificial Sequence
  Description of Artificial Sequence: Synthetic oligonucleotide
gucaaaaguugugaacuuc

SEQ ID NO: 2843951 - RNA, 19 nt, Artificial Sequence
  Description of Artificial Sequence: Synthetic oligonucleotide
gaugugucagugcacaguu

SEQ ID NO: 2843952 - RNA, 19 nt, Artificial Sequence
  Description of Artificial Sequence: Synthetic oligonucleotide
cccaaaaccuucuacauaa

SEQ ID NO: 2843953 - RNA, 19 nt, Artificial Sequence
  Description of Artificial Sequence: Synthetic oligonucleotide
acuccgccaacgcuugaag

SEQ ID NO: 2843954 - RNA, 19 nt, Artificial Sequence
  Description of Artificial Sequence: Synthetic oligonucleotide
uccaagccagaacuccuuc

SEQ ID NO: 2843955 - RNA, 19 nt, Artificial Sequence
  Description of Artificial Sequence: Synthetic oligonucleotide
uguaccgcucuuugcugga

SEQ ID NO: 2843956 - RNA, 19 nt, Artificial Sequence
  Description of Artificial Sequence: Synthetic oligonucleotide
cauucggguugccaaauga

SEQ ID NO: 2843957 - RNA, 19 nt, Artificial Sequence
  Description of Artificial Sequence: Synthetic oligonucleotide
caguggugagauuguguag

SEQ ID NO: 2843958 - RNA, 19 nt, Artificial Sequence
  Description of Artificial Sequence: Synthetic oligonucleotide
gcuugaagaaguccagcug

SEQ ID NO: 2843959 - RNA, 19 nt, Artificial Sequence
  Description of Artificial Sequence: Synthetic oligonucleotide
caccaugaugugucagugc

SEQ ID NO: 2843960 - RNA, 19 nt, Artificial Sequence
  Description of Artificial Sequence: Synthetic oligonucleotide
gguaagggcauccccugcc

SEQ ID NO: 2843961 - RNA, 19 nt, Artificial Sequence
  Description of Artificial Sequence: Synthetic oligonucleotide
ugugccuggucucuccgua

SEQ ID NO: 2843962 - RNA, 19 nt, Artificial Sequence
  Description of Artificial Sequence: Synthetic oligonucleotide
ugacagcuuguaccgcucu

SEQ ID NO: 2843963 - RNA, 19 nt, Artificial Sequence
  Description of Artificial Sequence: Synthetic oligonucleotide
accucauaucgaguagggg

SEQ ID NO: 2843964 - RNA, 19 nt, Artificial Sequence
  Description of Artificial Sequence: Synthetic oligonucleotide
cuuugcuggaugccacuug

SEQ ID NO: 2843965 - RNA, 19 nt, Artificial Sequence
  Description of Artificial Sequence: Synthetic oligonucleotide
agggcauccccugccgugc

SEQ ID NO: 2843966 - RNA, 19 nt, Artificial Sequence
  Description of Artificial Sequence: Synthetic oligonucleotide
ggaauggagaacucauguc

SEQ ID NO: 2843967 - RNA, 19 nt, Artificial Sequence
  Description of Artificial Sequence: Synthetic oligonucleotide
uaccgcucuuugcuggaug

SEQ ID NO: 2843968 - RNA, 19 nt, Artificial Sequence
  Description of Artificial Sequence: Synthetic oligonucleotide
gagggcaauaucauugucu

SEQ ID NO: 2843969 - RNA, 19 nt, Artificial Sequence
  Description of Artificial Sequence: Synthetic oligonucleotide
uaucauugucucugucaaa

SEQ ID NO: 2843970 - RNA, 19 nt, Artificial Sequence
  Description of Artificial Sequence: Synthetic oligonucleotide
guugugaacuuccagccau

SEQ ID NO: 2843971 - RNA, 19 nt, Artificial Sequence
  Description of Artificial Sequence: Synthetic oligonucleotide
caugggguccccaaaaccu

SEQ ID NO: 2843972 - RNA, 19 nt, Artificial Sequence
  Description of Artificial Sequence: Synthetic oligonucleotide
ucuguacuucccgacugac

SEQ ID NO: 2843973 - RNA, 19 nt, Artificial Sequence
  Description of Artificial Sequence: Synthetic oligonucleotide
gaacucauguccuuuccau

SEQ ID NO: 2843974 - RNA, 19 nt, Artificial Sequence
  Description of Artificial Sequence: Synthetic oligonucleotide
cugauucguugacagucug

SEQ ID NO: 2843975 - RNA, 19 nt, Artificial Sequence
  Description of Artificial Sequence: Synthetic oligonucleotide
cagcuccacauaaggaaug

SEQ ID NO: 2843976 - RNA, 19 nt, Artificial Sequence
  Description of Artificial Sequence: Synthetic oligonucleotide
caaguccaagccagaacuc

SEQ ID NO: 2843977 - RNA, 19 nt, Artificial Sequence
  Description of Artificial Sequence: Synthetic oligonucleotide
ggcugauucguugacaguc

SEQ ID NO: 2843978 - RNA, 19 nt, Artificial Sequence
  Description of Artificial Sequence: Synthetic oligonucleotide
gccauugugguagguaagg

SEQ ID NO: 2843979 - RNA, 19 nt, Artificial Sequence
  Description of Artificial Sequence: Synthetic oligonucleotide
uggcucccaguucacuccc

SEQ ID NO: 2843980 - RNA, 19 nt, Artificial Sequence
  Description of Artificial Sequence: Synthetic oligonucleotide
auaacuccgccaacgcuug

SEQ ID NO: 2843981 - RNA, 19 nt, Artificial Sequence
  Description of Artificial Sequence: Synthetic oligonucleotide
uaagggcauccccugccgu

SEQ ID NO: 2843982 - RNA, 19 nt, Artificial Sequence
  Description of Artificial Sequence: Synthetic oligonucleotide
uucccgacugacagcuugu

SEQ ID NO: 2843983 - RNA, 19 nt, Artificial Sequence
  Description of Artificial Sequence: Synthetic oligonucleotide
cauugucucugucaaaagu

SEQ ID NO: 2843984 - RNA, 19 nt, Artificial Sequence
  Description of Artificial Sequence: Synthetic oligonucleotide
aaaucugcccucaccucau

SEQ ID NO: 2843985 - RNA, 19 nt, Artificial Sequence
  Description of Artificial Sequence: Synthetic oligonucleotide
cauaacuccgccaacgcuu

SEQ ID NO: 2843986 - RNA, 19 nt, Artificial Sequence
  Description of Artificial Sequence: Synthetic oligonucleotide
caaaaccuucuacauaacu

SEQ ID NO: 2843987 - RNA, 19 nt, Artificial Sequence
  Description of Artificial Sequence: Synthetic oligonucleotide
cagugcacaguugcugagg

SEQ ID NO: 2843988 - RNA, 19 nt, Artificial Sequence
  Description of Artificial Sequence: Synthetic oligonucleotide
uauuugccauucggguugc

SEQ ID NO: 2843989 - RNA, 19 nt, Artificial Sequence
  Description of Artificial Sequence: Synthetic oligonucleotide
ugccucuguacuucccgac

SEQ ID NO: 2843990 - RNA, 19 nt, Artificial Sequence
  Description of Artificial Sequence: Synthetic oligonucleotide
guucacucccucacugugc

SEQ ID NO: 2843991 - RNA, 19 nt, Artificial Sequence
  Description of Artificial Sequence: Synthetic oligonucleotide
ugguagguaagggcauccc

SEQ ID NO: 2843992 - RNA, 19 nt, Artificial Sequence
  Description of Artificial Sequence: Synthetic oligonucleotide
cagccauugugguagguaa

SEQ ID NO: 2843993 - RNA, 19 nt, Artificial Sequence
  Description of Artificial Sequence: Synthetic oligonucleotide
cuucuacauaacuccgcca

SEQ ID NO: 2843994 - RNA, 19 nt, Artificial Sequence
  Description of Artificial Sequence: Synthetic oligonucleotide
cagcuuguaccgcucuuug

SEQ ID NO: 2843995 - RNA, 19 nt, Artificial Sequence
  Description of Artificial Sequence: Synthetic oligonucleotide
cagucugcaaaucugcccu

SEQ ID NO: 2843996 - RNA, 19 nt, Artificial Sequence
  Description of Artificial Sequence: Synthetic oligonucleotide
cauaucgaguaggggugcc

SEQ ID NO: 2843997 - RNA, 19 nt, Artificial Sequence
  Description of Artificial Sequence: Synthetic oligonucleotide
guacuucccgacugacagc

SEQ ID NO: 2843998 - RNA, 19 nt, Artificial Sequence
  Description of Artificial Sequence: Synthetic oligonucleotide
ggucucuccguauuugcca

SEQ ID NO: 2843999 - RNA, 19 nt, Artificial Sequence
  Description of Artificial Sequence: Synthetic oligonucleotide
ugcccucaccucauaucga

SEQ ID NO: 2844000 - RNA, 19 nt, Artificial Sequence
  Description of Artificial Sequence: Synthetic oligonucleotide
ugccauucggguugccaaa

SEQ ID NO: 2844001 - RNA, 19 nt, Artificial Sequence
  Description of Artificial Sequence: Synthetic oligonucleotide
uugccaaaugacaguucuu

SEQ ID NO: 2844002 - RNA, 19 nt, Artificial Sequence
  Description of Artificial Sequence: Synthetic oligonucleotide
cagaacuccuucauggggu

SEQ ID NO: 2844003 - RNA, 19 nt, Artificial Sequence
  Description of Artificial Sequence: Synthetic oligonucleotide
cacugugccuggucucucc

SEQ ID NO: 2844004 - RNA, 19 nt, Artificial Sequence
  Description of Artificial Sequence: Synthetic oligonucleotide
aacuccgccaacgcuugaa

SEQ ID NO: 2844005 - RNA, 19 nt, Artificial Sequence
  Description of Artificial Sequence: Synthetic oligonucleotide
uuccagccauugugguagg

SEQ ID NO: 2844006 - RNA, 19 nt, Artificial Sequence
  Description of Artificial Sequence: Synthetic oligonucleotide
ugcugagggcaauaucauu

SEQ ID NO: 2844007 - RNA, 19 nt, Artificial Sequence
  Description of Artificial Sequence: Synthetic oligonucleotide
gugguagguaagggcaucc

SEQ ID NO: 2844008 - RNA, 19 nt, Artificial Sequence
  Description of Artificial Sequence: Synthetic oligonucleotide
uggagaacucauguccuuu

SEQ ID NO: 2844009 - RNA, 19 nt, Artificial Sequence
  Description of Artificial Sequence: Synthetic oligonucleotide
cucuccguauuugccauuc

SEQ ID NO: 2844010 - RNA, 19 nt, Artificial Sequence
  Description of Artificial Sequence: Synthetic oligonucleotide
aguccaagccagaacuccu

SEQ ID NO: 2844011 - RNA, 19 nt, Artificial Sequence
  Description of Artificial Sequence: Synthetic oligonucleotide
cuucaugggguccccaaaa

SEQ ID NO: 2844012 - RNA, 19 nt, Artificial Sequence
  Description of Artificial Sequence: Synthetic oligonucleotide
uugugaacuuccagccauu

SEQ ID NO: 2844013 - RNA, 19 nt, Artificial Sequence
  Description of Artificial Sequence: Synthetic oligonucleotide
uaggggugccaguggugag

SEQ ID NO: 2844014 - RNA, 19 nt, Artificial Sequence
  Description of Artificial Sequence: Synthetic oligonucleotide
cacuuggaagaaaucauau

SEQ ID NO: 2844015 - RNA, 19 nt, Artificial Sequence
  Description of Artificial Sequence: Synthetic oligonucleotide
cuuuccauggcucccaguu

SEQ ID NO: 2844016 - RNA, 19 nt, Artificial Sequence
  Description of Artificial Sequence: Synthetic oligonucleotide
guagguaagggcauccccu

SEQ ID NO: 2844017 - RNA, 19 nt, Artificial Sequence
  Description of Artificial Sequence: Synthetic oligonucleotide
auucguugacagucugcaa

SEQ ID NO: 2844018 - RNA, 19 nt, Artificial Sequence
  Description of Artificial Sequence: Synthetic oligonucleotide
ccacauaaggaauggagaa

SEQ ID NO: 2844019 - RNA, 19 nt, Artificial Sequence
  Description of Artificial Sequence: Synthetic oligonucleotide
acuccuucauggggucccc

SEQ ID NO: 2844020 - RNA, 19 nt, Artificial Sequence
  Description of Artificial Sequence: Synthetic oligonucleotide
gcccucaccucauaucgag

SEQ ID NO: 2844021 - RNA, 19 nt, Artificial Sequence
  Description of Artificial Sequence: Synthetic oligonucleotide
cugacagcuuguaccgcuc

SEQ ID NO: 2844022 - RNA, 19 nt, Artificial Sequence
  Description of Artificial Sequence: Synthetic oligonucleotide
ccucauaucgaguaggggu

SEQ ID NO: 2844023 - RNA, 19 nt, Artificial Sequence
  Description of Artificial Sequence: Synthetic oligonucleotide
ggcguaggcugauucguug

SEQ ID NO: 2844024 - RNA, 19 nt, Artificial Sequence
  Description of Artificial Sequence: Synthetic oligonucleotide
auggagaacucauguccuu

SEQ ID NO: 2844025 - RNA, 19 nt, Artificial Sequence
  Description of Artificial Sequence: Synthetic oligonucleotide
gugugucgugccugugggg

SEQ ID NO: 2844026 - RNA, 19 nt, Artificial Sequence
  Description of Artificial Sequence: Synthetic oligonucleotide
ugcccagugugucgugccu

SEQ ID NO: 2844027 - RNA, 19 nt, Artificial Sequence
  Description of Artificial Sequence: Synthetic oligonucleotide
gaacuccuucauggggucc

SEQ ID NO: 2844028 - RNA, 19 nt, Artificial Sequence
  Description of Artificial Sequence: Synthetic oligonucleotide
ucuuugcuggaugccacuu

SEQ ID NO: 2844029 - RNA, 19 nt, Artificial Sequence
  Description of Artificial Sequence: Synthetic oligonucleotide
gcuuguaccgcucuuugcu

SEQ ID NO: 2844030 - RNA, 19 nt, Artificial Sequence
  Description of Artificial Sequence: Synthetic oligonucleotide
acggcguaggcugauucgu

SEQ ID NO: 2844031 - RNA, 19 nt, Artificial Sequence
  Description of Artificial Sequence: Synthetic oligonucleotide
aucugcccucaccucauau

SEQ ID NO: 2844032 - RNA, 19 nt, Artificial Sequence
  Description of Artificial Sequence: Synthetic oligonucleotide
aucgaguaggggugccagu

SEQ ID NO: 2844033 - RNA, 19 nt, Artificial Sequence
  Description of Artificial Sequence: Synthetic oligonucleotide
agccauugugguagguaag

SEQ ID NO: 2844034 - RNA, 19 nt, Artificial Sequence
  Description of Artificial Sequence: Synthetic oligonucleotide
gguccccaaaaccuucuac

SEQ ID NO: 2844035 - RNA, 19 nt, Artificial Sequence
  Description of Artificial Sequence: Synthetic oligonucleotide
cauauacggcguaggcuga

SEQ ID NO: 2844036 - RNA, 19 nt, Artificial Sequence
  Description of Artificial Sequence: Synthetic oligonucleotide
auaucgaguaggggugcca

SEQ ID NO: 2844037 - RNA, 19 nt, Artificial Sequence
  Description of Artificial Sequence: Synthetic oligonucleotide
uccagcugcccaguguguc

SEQ ID NO: 2844038 - RNA, 19 nt, Artificial Sequence
  Description of Artificial Sequence: Synthetic oligonucleotide
augccacuuggaagaaauc

SEQ ID NO: 2844039 - RNA, 19 nt, Artificial Sequence
  Description of Artificial Sequence: Synthetic oligonucleotide
acagcuuguaccgcucuuu

SEQ ID NO: 2844040 - RNA, 19 nt, Artificial Sequence
  Description of Artificial Sequence: Synthetic oligonucleotide
aggcugauucguugacagu

SEQ ID NO: 2844041 - RNA, 19 nt, Artificial Sequence
  Description of Artificial Sequence: Synthetic oligonucleotide
ccaacgcuugaagaagucc

SEQ ID NO: 2844042 - RNA, 19 nt, Artificial Sequence
  Description of Artificial Sequence: Synthetic oligonucleotide
guaggcugauucguugaca

SEQ ID NO: 2844043 - RNA, 19 nt, Artificial Sequence
  Description of Artificial Sequence: Synthetic oligonucleotide
ugccuggucucuccguauu

SEQ ID NO: 2844044 - RNA, 19 nt, Artificial Sequence
  Description of Artificial Sequence: Synthetic oligonucleotide
uccccugccgugccucugu

SEQ ID NO: 2844045 - RNA, 19 nt, Artificial Sequence
  Description of Artificial Sequence: Synthetic oligonucleotide
auuugccauucggguugcc

SEQ ID NO: 2844046 - RNA, 19 nt, Artificial Sequence
  Description of Artificial Sequence: Synthetic oligonucleotide
agaaguccagcugcccagu

SEQ ID NO: 2844047 - RNA, 19 nt, Artificial Sequence
  Description of Artificial Sequence: Synthetic oligonucleotide
ccaaaugacaguucuuaua

SEQ ID NO: 2844048 - RNA, 19 nt, Artificial Sequence
  Description of Artificial Sequence: Synthetic oligonucleotide
ggauuuucagcuccacaua

SEQ ID NO: 2844049 - RNA, 19 nt, Artificial Sequence
  Description of Artificial Sequence: Synthetic oligonucleotide
aaucugcccucaccucaua

SEQ ID NO: 2844050 - RNA, 19 nt, Artificial Sequence
  Description of Artificial Sequence: Synthetic oligonucleotide
ccauugugguagguaaggg

SEQ ID NO: 2844051 - RNA, 19 nt, Artificial Sequence
  Description of Artificial Sequence: Synthetic oligonucleotide
cucuguacuucccgacuga

SEQ ID NO: 2844052 - RNA, 19 nt, Artificial Sequence
  Description of Artificial Sequence: Synthetic oligonucleotide
agccaccaugaugugucag

SEQ ID NO: 2844053 - RNA, 19 nt, Artificial Sequence
  Description of Artificial Sequence: Synthetic oligonucleotide
ucccucacugugccugguc

SEQ ID NO: 2844054 - RNA, 19 nt, Artificial Sequence
  Description of Artificial Sequence: Synthetic oligonucleotide
cugagggcaauaucauugu

SEQ ID NO: 2844055 - RNA, 19 nt, Artificial Sequence
  Description of Artificial Sequence: Synthetic oligonucleotide
ccagcugcccagugugucg

SEQ ID NO: 2844056 - RNA, 19 nt, Artificial Sequence
  Description of Artificial Sequence: Synthetic oligonucleotide
ccucuguacuucccgacug

SEQ ID NO: 2844057 - RNA, 19 nt, Artificial Sequence
  Description of Artificial Sequence: Synthetic oligonucleotide
uggugagauuguguaguuu

SEQ ID NO: 2844058 - RNA, 19 nt, Artificial Sequence
  Description of Artificial Sequence: Synthetic oligonucleotide
ugccgugccucuguacuuc

SEQ ID NO: 2844059 - RNA, 19 nt, Artificial Sequence
  Description of Artificial Sequence: Synthetic oligonucleotide
cuccgccaacgcuugaaga

SEQ ID NO: 2844060 - RNA, 19 nt, Artificial Sequence
  Description of Artificial Sequence: Synthetic oligonucleotide
uaacuccgccaacgcuuga

SEQ ID NO: 2844061 - RNA, 19 nt, Artificial Sequence
  Description of Artificial Sequence: Synthetic oligonucleotide
ccaguggugagauugugua

SEQ ID NO: 2844062 - RNA, 19 nt, Artificial Sequence
  Description of Artificial Sequence: Synthetic oligonucleotide
gugccucuguacuucccga

SEQ ID NO: 2844063 - RNA, 19 nt, Artificial Sequence
  Description of Artificial Sequence: Synthetic oligonucleotide
aggggugccaguggugaga

SEQ ID NO: 2844064 - RNA, 19 nt, Artificial Sequence
  Description of Artificial Sequence: Synthetic oligonucleotide
gcaaaucugcccucaccuc

SEQ ID NO: 2844065 - RNA, 19 nt, Artificial Sequence
  Description of Artificial Sequence: Synthetic oligonucleotide
cgugccucuguacuucccg

SEQ ID NO: 2844066 - RNA, 19 nt, Artificial Sequence
  Description of Artificial Sequence: Synthetic oligonucleotide
cucccaguucacucccuca

SEQ ID NO: 2844067 - RNA, 19 nt, Artificial Sequence
  Description of Artificial Sequence: Synthetic oligonucleotide
uauacggcguaggcugauu

SEQ ID NO: 2844068 - RNA, 19 nt, Artificial Sequence
  Description of Artificial Sequence: Synthetic oligonucleotide
augugucagugcacaguug

SEQ ID NO: 2844069 - RNA, 19 nt, Artificial Sequence
  Description of Artificial Sequence: Synthetic oligonucleotide
ccaaaaccuucuacauaac

SEQ ID NO: 2844070 - RNA, 19 nt, Artificial Sequence
  Description of Artificial Sequence: Synthetic oligonucleotide
caagccagaacuccuucau

SEQ ID NO: 2844071 - RNA, 19 nt, Artificial Sequence
  Description of Artificial Sequence: Synthetic oligonucleotide
gugaacuuccagccauugu

SEQ ID NO: 2844072 - RNA, 19 nt, Artificial Sequence
  Description of Artificial Sequence: Synthetic oligonucleotide
acaguugcugagggcaaua

SEQ ID NO: 2844073 - RNA, 19 nt, Artificial Sequence
  Description of Artificial Sequence: Synthetic oligonucleotide
uggaugccacuuggaagaa

SEQ ID NO: 2844074 - RNA, 19 nt, Artificial Sequence
  Description of Artificial Sequence: Synthetic oligonucleotide
auauacggcguaggcugau

SEQ ID NO: 2844075 - RNA, 19 nt, Artificial Sequence
  Description of Artificial Sequence: Synthetic oligonucleotide
ucucuccguauuugccauu

SEQ ID NO: 2844076 - RNA, 19 nt, Artificial Sequence
  Description of Artificial Sequence: Synthetic oligonucleotide
ccaugaugugucagugcac

SEQ ID NO: 2844077 - RNA, 19 nt, Artificial Sequence
  Description of Artificial Sequence: Synthetic oligonucleotide
gucucuccguauuugccau

SEQ ID NO: 2844078 - RNA, 19 nt, Artificial Sequence
  Description of Artificial Sequence: Synthetic oligonucleotide
ccaccaugaugugucagug

SEQ ID NO: 2844079 - RNA, 19 nt, Artificial Sequence
  Description of Artificial Sequence: Synthetic oligonucleotide
gcguaggcugauucguuga

SEQ ID NO: 2844080 - RNA, 19 nt, Artificial Sequence
  Description of Artificial Sequence: Synthetic oligonucleotide
gcaauaucauugucucugu

SEQ ID NO: 2844081 - RNA, 19 nt, Artificial Sequence
  Description of Artificial Sequence: Synthetic oligonucleotide
ccucaccucauaucgagua

SEQ ID NO: 2844082 - RNA, 19 nt, Artificial Sequence
  Description of Artificial Sequence: Synthetic oligonucleotide
ccacuuggaagaaaucaua

SEQ ID NO: 2844083 - RNA, 19 nt, Artificial Sequence
  Description of Artificial Sequence: Synthetic oligonucleotide
augggguccccaaaaccuu

SEQ ID NO: 2844084 - RNA, 19 nt, Artificial Sequence
  Description of Artificial Sequence: Synthetic oligonucleotide
gcucuuugcuggaugccac

SEQ ID NO: 2844085 - RNA, 19 nt, Artificial Sequence
  Description of Artificial Sequence: Synthetic oligonucleotide
agcugcccagugugucgug

SEQ ID NO: 2844086 - RNA, 19 nt, Artificial Sequence
  Description of Artificial Sequence: Synthetic oligonucleotide
ccgccaacgcuugaagaag

SEQ ID NO: 2844087 - RNA, 19 nt, Artificial Sequence
  Description of Artificial Sequence: Synthetic oligonucleotide
ccaagccagaacuccuuca

SEQ ID NO: 2844088 - RNA, 19 nt, Artificial Sequence
  Description of Artificial Sequence: Synthetic oligonucleotide
ccuggucucuccguauuug

SEQ ID NO: 2844089 - RNA, 19 nt, Artificial Sequence
  Description of Artificial Sequence: Synthetic oligonucleotide
gguugccaaaugacaguuc

SEQ ID NO: 2844090 - RNA, 19 nt, Artificial Sequence
  Description of Artificial Sequence: Synthetic oligonucleotide
gugagauuguguaguuuau

SEQ ID NO: 2844091 - RNA, 19 nt, Artificial Sequence
  Description of Artificial Sequence: Synthetic oligonucleotide
caguucacucccucacugu

SEQ ID NO: 2844092 - RNA, 19 nt, Artificial Sequence
  Description of Artificial Sequence: Synthetic oligonucleotide
ccguauuugccauucgggu

SEQ ID NO: 2844093 - RNA, 19 nt, Artificial Sequence
  Description of Artificial Sequence: Synthetic oligonucleotide
gccaccaugaugugucagu

SEQ ID NO: 2844094 - RNA, 19 nt, Artificial Sequence
  Description of Artificial Sequence: Synthetic oligonucleotide
ucccgacugacagcuugua

SEQ ID NO: 2844095 - RNA, 19 nt, Artificial Sequence
  Description of Artificial Sequence: Synthetic oligonucleotide
cucuuugcuggaugccacu

SEQ ID NO: 2844096 - RNA, 19 nt, Artificial Sequence
  Description of Artificial Sequence: Synthetic oligonucleotide
cggauuuucagcuccacau

SEQ ID NO: 2844097 - RNA, 19 nt, Artificial Sequence
  Description of Artificial Sequence: Synthetic oligonucleotide
gacagcuuguaccgcucuu

SEQ ID NO: 2844098 - RNA, 19 nt, Artificial Sequence
  Description of Artificial Sequence: Synthetic oligonucleotide
cguaggcugauucguugac

SEQ ID NO: 2844099 - RNA, 19 nt, Artificial Sequence
  Description of Artificial Sequence: Synthetic oligonucleotide
caccagccaccaugaugug

SEQ ID NO: 2844100 - RNA, 19 nt, Artificial Sequence
  Description of Artificial Sequence: Synthetic oligonucleotide
cccgacugacagcuuguac

SEQ ID NO: 2844101 - RNA, 19 nt, Artificial Sequence
  Description of Artificial Sequence: Synthetic oligonucleotide
ccauucggguugccaaaug

SEQ ID NO: 2844102 - RNA, 19 nt, Artificial Sequence
  Description of Artificial Sequence: Synthetic oligonucleotide
gcucccaguucacucccuc

SEQ ID NO: 2844103 - RNA, 19 nt, Artificial Sequence
  Description of Artificial Sequence: Synthetic oligonucleotide
gcugcccagugugucgugc

SEQ ID NO: 2844104 - RNA, 19 nt, Artificial Sequence
  Description of Artificial Sequence: Synthetic oligonucleotide
gccgugccucuguacuucc

SEQ ID NO: 2844105 - RNA, 19 nt, Artificial Sequence
  Description of Artificial Sequence: Synthetic oligonucleotide
gccaaaugacaguucuuau

SEQ ID NO: 2844106 - RNA, 19 nt, Artificial Sequence
  Description of Artificial Sequence: Synthetic oligonucleotide
gccacuuggaagaaaucau

SEQ ID NO: 2844107 - RNA, 19 nt, Artificial Sequence
  Description of Artificial Sequence: Synthetic oligonucleotide
cagccaccaugauguguca

SEQ ID NO: 2844108 - RNA, 19 nt, Artificial Sequence
  Description of Artificial Sequence: Synthetic oligonucleotide
gugucagugcacaguugcu

SEQ ID NO: 2844109 - RNA, 19 nt, Artificial Sequence
  Description of Artificial Sequence: Synthetic oligonucleotide
gcugauucguugacagucu

SEQ ID NO: 2844110 - RNA, 19 nt, Artificial Sequence
  Description of Artificial Sequence: Synthetic oligonucleotide
gcuccacauaaggaaugga

SEQ ID NO: 2844111 - RNA, 19 nt, Artificial Sequence
  Description of Artificial Sequence: Synthetic oligonucleotide
gccaacgcuugaagaaguc

SEQ ID NO: 2844112 - RNA, 19 nt, Artificial Sequence
  Description of Artificial Sequence: Synthetic oligonucleotide
auccccugccgugccucug

SEQ ID NO: 2844113 - RNA, 19 nt, Artificial Sequence
  Description of Artificial Sequence: Synthetic oligonucleotide
gggcaauaucauugucucu

SEQ ID NO: 2844114 - RNA, 19 nt, Artificial Sequence
  Description of Artificial Sequence: Synthetic oligonucleotide
gccucuguacuucccgacu

SEQ ID NO: 2844115 - RNA, 19 nt, Artificial Sequence
  Description of Artificial Sequence: Synthetic oligonucleotide
ccugccgugccucuguacu

SEQ ID NO: 2844116 - RNA, 19 nt, Artificial Sequence
  Description of Artificial Sequence: Synthetic oligonucleotide
gcccagugugucgugccug

SEQ ID NO: 2844117 - RNA, 19 nt, Artificial Sequence
  Description of Artificial Sequence: Synthetic oligonucleotide
ggguugccaaaugacaguu

SEQ ID NO: 2844118 - RNA, 19 nt, Artificial Sequence
  Description of Artificial Sequence: Synthetic oligonucleotide
gggcauccccugccgugcc

SEQ ID NO: 2844119 - RNA, 19 nt, Artificial Sequence
  Description of Artificial Sequence: Synthetic oligonucleotide
ccccaaaaccuucuacaua

SEQ ID NO: 2844120 - RNA, 19 nt, Artificial Sequence
  Description of Artificial Sequence: Synthetic oligonucleotide
ccgugccucuguacuuccc

SEQ ID NO: 2844121 - RNA, 19 nt, Artificial Sequence
  Description of Artificial Sequence: Synthetic oligonucleotide
ggggccuuggaguggcccu

SEQ ID NO: 2844122 - RNA, 19 nt, Artificial Sequence
  Description of Artificial Sequence: Synthetic oligonucleotide
cugugccuggucucuccgu

SEQ ID NO: 2844123 - RNA, 19 nt, Artificial Sequence
  Description of Artificial Sequence: Synthetic oligonucleotide
cguauuugccauucggguu

SEQ ID NO: 2844124 - RNA, 19 nt, Artificial Sequence
  Description of Artificial Sequence: Synthetic oligonucleotide
gugccaguggugagauugu

SEQ ID NO: 2844125 - RNA, 19 nt, Artificial Sequence
  Description of Artificial Sequence: Synthetic oligonucleotide
gccaguggugagauugugu

SEQ ID NO: 2844126 - RNA, 19 nt, Artificial Sequence
  Description of Artificial Sequence: Synthetic oligonucleotide
gugccuggucucuccguau

SEQ ID NO: 2844127 - RNA, 19 nt, Artificial Sequence
  Description of Artificial Sequence: Synthetic oligonucleotide
ccgcucuuugcuggaugcc

SEQ ID NO: 2844128 - RNA, 19 nt, Artificial Sequence
  Description of Artificial Sequence: Synthetic oligonucleotide
guccaagccagaacuccuu

SEQ ID NO: 2844129 - RNA, 19 nt, Artificial Sequence
  Description of Artificial Sequence: Synthetic oligonucleotide
gcauccccugccgugccuc

SEQ ID NO: 2844130 - RNA, 19 nt, Artificial Sequence
  Description of Artificial Sequence: Synthetic oligonucleotide
ggaugccacuuggaagaaa

SEQ ID NO: 2844131 - RNA, 19 nt, Artificial Sequence
  Description of Artificial Sequence: Synthetic oligonucleotide
ccagccauugugguaggua

SEQ ID NO: 2844132 - RNA, 19 nt, Artificial Sequence
  Description of Artificial Sequence: Synthetic oligonucleotide
cguugacagucugcaaauc

SEQ ID NO: 2844133 - RNA, 19 nt, Artificial Sequence
  Description of Artificial Sequence: Synthetic oligonucleotide
caguugcugagggcaauau

SEQ ID NO: 2844134 - RNA, 19 nt, Artificial Sequence
  Description of Artificial Sequence: Synthetic oligonucleotide
gcacaguugcugagggcaa

SEQ ID NO: 2844135 - RNA, 19 nt, Artificial Sequence
  Description of Artificial Sequence: Synthetic oligonucleotide
cgcucuuugcuggaugcca

SEQ ID NO: 2844136 - RNA, 19 nt, Artificial Sequence
  Description of Artificial Sequence: Synthetic oligonucleotide
ggguccccaaaaccuucua

SEQ ID NO: 2844137 - RNA, 19 nt, Artificial Sequence
  Description of Artificial Sequence: Synthetic oligonucleotide
cccugccgugccucuguac

SEQ ID NO: 2844138 - RNA, 19 nt, Artificial Sequence
  Description of Artificial Sequence: Synthetic oligonucleotide
cagcugcccagugugucgu

SEQ ID NO: 2844139 - RNA, 19 nt, Artificial Sequence
  Description of Artificial Sequence: Synthetic oligonucleotide
gggccuuggaguggcccuc

SEQ ID NO: 2844140 - RNA, 19 nt, Artificial Sequence
  Description of Artificial Sequence: Synthetic oligonucleotide
cccucacugugccuggucu

SEQ ID NO: 2844141 - RNA, 19 nt, Artificial Sequence
  Description of Artificial Sequence: Synthetic oligonucleotide
cacaguugcugagggcaau

SEQ ID NO: 2844142 - RNA, 19 nt, Artificial Sequence
  Description of Artificial Sequence: Synthetic oligonucleotide
cugccgugccucuguacuu

SEQ ID NO: 2844143 - RNA, 19 nt, Artificial Sequence
  Description of Artificial Sequence: Synthetic oligonucleotide
acuucccgacugacagcuu

SEQ ID NO: 2844144 - RNA, 19 nt, Artificial Sequence
  Description of Artificial Sequence: Synthetic oligonucleotide
cauccccugccgugccucu

SEQ ID NO: 2844145 - RNA, 19 nt, Artificial Sequence
  Description of Artificial Sequence: Synthetic oligonucleotide
ccagugugucgugccugug

SEQ ID NO: 2844146 - RNA, 19 nt, Artificial Sequence
  Description of Artificial Sequence: Synthetic oligonucleotide
guccagcugcccagugugu

SEQ ID NO: 2844147 - RNA, 19 nt, Artificial Sequence
  Description of Artificial Sequence: Synthetic oligonucleotide
guaccgcucuuugcuggau

SEQ ID NO: 2844148 - RNA, 19 nt, Artificial Sequence
  Description of Artificial Sequence: Synthetic oligonucleotide
cccaguucacucccucacu

SEQ ID NO: 2844149 - RNA, 19 nt, Artificial Sequence
  Description of Artificial Sequence: Synthetic oligonucleotide
cccagugugucgugccugu

SEQ ID NO: 2844150 - RNA, 19 nt, Artificial Sequence
  Description of Artificial Sequence: Synthetic oligonucleotide
cggguugccaaaugacagu

SEQ ID NO: 2844151 - RNA, 19 nt, Artificial Sequence
  Description of Artificial Sequence: Synthetic oligonucleotide
gccauucggguugccaaau

SEQ ID NO: 2844152 - RNA, 19 nt, Artificial Sequence
  Description of Artificial Sequence: Synthetic oligonucleotide
cgccaacgcuugaagaagu

SEQ ID NO: 2844153 - RNA, 19 nt, Artificial Sequence
  Description of Artificial Sequence: Synthetic oligonucleotide
cccucaccucauaucgagu

SEQ ID NO: 2844154 - RNA, 19 nt, Artificial Sequence
  Description of Artificial Sequence: Synthetic oligonucleotide
gccuggucucuccguauuu

SEQ ID NO: 2844155 - RNA, 19 nt, Artificial Sequence
  Description of Artificial Sequence: Synthetic oligonucleotide
ggcauccccugccgugccu

SEQ ID NO: 2844156 - RNA, 19 nt, Artificial Sequence
  Description of Artificial Sequence: Synthetic oligonucleotide
ccuuuccauggcucccagu

SEQ ID NO: 2844157 - RNA, 19 nt, Artificial Sequence
  Description of Artificial Sequence: Synthetic oligonucleotide
cucccucacugugccuggu

SEQ ID NO: 2844158 - RNA, 19 nt, Artificial Sequence
  Description of Artificial Sequence: Synthetic oligonucleotide
ggcucccaguucacucccu

SEQ ID NO: 2844159 - RNA, 19 nt, Artificial Sequence
  Description of Artificial Sequence: Synthetic oligonucleotide
ccccugccgugccucugua

SEQ ID NO: 2844160 - RNA, 19 nt, Artificial Sequence
  Description of Artificial Sequence: Synthetic oligonucleotide
cggcguaggcugauucguu

SEQ ID NO: 2844161 - RNA, 19 nt, Artificial Sequence
  Description of Artificial Sequence: Synthetic oligonucleotide
uagaugaagauguucaugg

SEQ ID NO: 2844162 - RNA, 19 nt, Artificial Sequence
  Description of Artificial Sequence: Synthetic oligonucleotide
gaugaugccauccaguggg

SEQ ID NO: 2844163 - RNA, 19 nt, Artificial Sequence
  Description of Artificial Sequence: Synthetic oligonucleotide
uuuacuugccuucauacag

SEQ ID NO: 2844164 - RNA, 19 nt, Artificial Sequence
  Description of Artificial Sequence: Synthetic oligonucleotide
gaaaguaggagccaacagg

SEQ ID NO: 2844165 - RNA, 19 nt, Artificial Sequence
  Description of Artificial Sequence: Synthetic oligonucleotide
uucauacaggauuugaugc

SEQ ID NO: 2844166 - RNA, 19 nt, Artificial Sequence
  Description of Artificial Sequence: Synthetic oligonucleotide
augaagauguucauggugc

SEQ ID NO: 2844167 - RNA, 19 nt, Artificial Sequence
  Description of Artificial Sequence: Synthetic oligonucleotide
aaagacuucccgcacccgg

SEQ ID NO: 2844168 - RNA, 19 nt, Artificial Sequence
  Description of Artificial Sequence: Synthetic oligonucleotide
cauggagucuccaugaaag

SEQ ID NO: 2844169 - RNA, 19 nt, Artificial Sequence
  Description of Artificial Sequence: Synthetic oligonucleotide
aguugcuagcuccaguacc

SEQ ID NO: 2844170 - RNA, 19 nt, Artificial Sequence
  Description of Artificial Sequence: Synthetic oligonucleotide
uguucuuuggcuuuuacuu

SEQ ID NO: 2844171 - RNA, 19 nt, Artificial Sequence
  Description of Artificial Sequence: Synthetic oligonucleotide
ucuccaugaaaguaggagc

SEQ ID NO: 2844172 - RNA, 19 nt, Artificial Sequence
  Description of Artificial Sequence: Synthetic oligonucleotide
gaugaagauguucauggug

SEQ ID NO: 2844173 - RNA, 19 nt, Artificial Sequence
  Description of Artificial Sequence: Synthetic oligonucleotide
uucaauucccucaugguaa

SEQ ID NO: 2844174 - RNA, 19 nt, Artificial Sequence
  Description of Artificial Sequence: Synthetic oligonucleotide
ucagccaggagagagacag

SEQ ID NO: 2844175 - RNA, 19 nt, Artificial Sequence
  Description of Artificial Sequence: Synthetic oligonucleotide
acuuguagucuccaacccc

SEQ ID NO: 2844176 - RNA, 19 nt, Artificial Sequence
  Description of Artificial Sequence: Synthetic oligonucleotide
aaccuugcgcuccacuacc

SEQ ID NO: 2844177 - RNA, 19 nt, Artificial Sequence
  Description of Artificial Sequence: Synthetic oligonucleotide
aaccacaccaggcaggaug

SEQ ID NO: 2844178 - RNA, 19 nt, Artificial Sequence
  Description of Artificial Sequence: Synthetic oligonucleotide
uuugucgaaccacaccagg

SEQ ID NO: 2844179 - RNA, 19 nt, Artificial Sequence
  Description of Artificial Sequence: Synthetic oligonucleotide
ugaacguggggucagccag

SEQ ID NO: 2844180 - RNA, 19 nt, Artificial Sequence
  Description of Artificial Sequence: Synthetic oligonucleotide
uuacuugccuucauacagg

SEQ ID NO: 2844181 - RNA, 19 nt, Artificial Sequence
  Description of Artificial Sequence: Synthetic oligonucleotide
ugaaaguaggagccaacag

SEQ ID NO: 2844182 - RNA, 19 nt, Artificial Sequence
  Description of Artificial Sequence: Synthetic oligonucleotide
gauuugaugcacugggcag

SEQ ID NO: 2844183 - RNA, 19 nt, Artificial Sequence
  Description of Artificial Sequence: Synthetic oligonucleotide
cuucauacaggauuugaug

SEQ ID NO: 2844184 - RNA, 19 nt, Artificial Sequence
  Description of Artificial Sequence: Synthetic oligonucleotide
caggauuugaugcacuggg

SEQ ID NO: 2844185 - RNA, 19 nt, Artificial Sequence
  Description of Artificial Sequence: Synthetic oligonucleotide
cuccaugaaaguaggagcc

SEQ ID NO: 2844186 - RNA, 19 nt, Artificial Sequence
  Description of Artificial Sequence: Synthetic oligonucleotide
uucuuuggcuuuuacuugc

SEQ ID NO: 2844187 - RNA, 19 nt, Artificial Sequence
  Description of Artificial Sequence: Synthetic oligonucleotide
agaccugacaagcgguucc

SEQ ID NO: 2844188 - RNA, 19 nt, Artificial Sequence
  Description of Artificial Sequence: Synthetic oligonucleotide
ugaugcacugggcagaccu

SEQ ID NO: 2844189 - RNA, 19 nt, Artificial Sequence
  Description of Artificial Sequence: Synthetic oligonucleotide
ugagccaaagacuucccgc

SEQ ID NO: 2844190 - RNA, 19 nt, Artificial Sequence
  Description of Artificial Sequence: Synthetic oligonucleotide
uuuuacuugccuucauaca

SEQ ID NO: 2844191 - RNA, 19 nt, Artificial Sequence
  Description of Artificial Sequence: Synthetic oligonucleotide
ucuccaaccccacccaucc

SEQ ID NO: 2844192 - RNA, 19 nt, Artificial Sequence
  Description of Artificial Sequence: Synthetic oligonucleotide
ucauacaggauuugaugca

SEQ ID NO: 2844193 - RNA, 19 nt, Artificial Sequence
  Description of Artificial Sequence: Synthetic oligonucleotide
agaggacuugcucgcagcc

SEQ ID NO: 2844194 - RNA, 19 nt, Artificial Sequence
  Description of Artificial Sequence: Synthetic oligonucleotide
uaccccauccucaugaguc

SEQ ID NO: 2844195 - RNA, 19 nt, Artificial Sequence
  Description of Artificial Sequence: Synthetic oligonucleotide
uccucaugaguccaguaga

SEQ ID NO: 2844196 - RNA, 19 nt, Artificial Sequence
  Description of Artificial Sequence: Synthetic oligonucleotide
ugucgaaccacaccaggca

SEQ ID NO: 2844197 - RNA, 19 nt, Artificial Sequence
  Description of Artificial Sequence: Synthetic oligonucleotide
aauucccucaugguaaccu

SEQ ID NO: 2844198 - RNA, 19 nt, Artificial Sequence
  Description of Artificial Sequence: Synthetic oligonucleotide
auccucaugaguccaguag

SEQ ID NO: 2844199 - RNA, 19 nt, Artificial Sequence
  Description of Artificial Sequence: Synthetic oligonucleotide
caggcucugaugaacgugg

SEQ ID NO: 2844200 - RNA, 19 nt, Artificial Sequence
  Description of Artificial Sequence: Synthetic oligonucleotide
aggaugaugccauccagug

SEQ ID NO: 2844201 - RNA, 19 nt, Artificial Sequence
  Description of Artificial Sequence: Synthetic oligonucleotide
uugucgaaccacaccaggc

SEQ ID NO: 2844202 - RNA, 19 nt, Artificial Sequence
  Description of Artificial Sequence: Synthetic oligonucleotide
uccaaccccacccauccag

SEQ ID NO: 2844203 - RNA, 19 nt, Artificial Sequence
  Description of Artificial Sequence: Synthetic oligonucleotide
cauggugcccacuucagug

SEQ ID NO: 2844204 - RNA, 19 nt, Artificial Sequence
  Description of Artificial Sequence: Synthetic oligonucleotide
caguagaugaagauguuca

SEQ ID NO: 2844205 - RNA, 19 nt, Artificial Sequence
  Description of Artificial Sequence: Synthetic oligonucleotide
accgugggcccauaauucc

SEQ ID NO: 2844206 - RNA, 19 nt, Artificial Sequence
  Description of Artificial Sequence: Synthetic oligonucleotide
acuucagugagcugguggu

SEQ ID NO: 2844207 - RNA, 19 nt, Artificial Sequence
  Description of Artificial Sequence: Synthetic oligonucleotide
ucgaaccacaccaggcagg

SEQ ID NO: 2844208 - RNA, 19 nt, Artificial Sequence
  Description of Artificial Sequence: Synthetic oligonucleotide
acuacccggaacucacccc

SEQ ID NO: 2844209 - RNA, 19 nt, Artificial Sequence
  Description of Artificial Sequence: Synthetic oligonucleotide
uacaggauuugaugcacug

SEQ ID NO: 2844210 - RNA, 19 nt, Artificial Sequence
  Description of Artificial Sequence: Synthetic oligonucleotide
uuggcuuuuacuugccuuc

SEQ ID NO: 2844211 - RNA, 19 nt, Artificial Sequence
  Description of Artificial Sequence: Synthetic oligonucleotide
gucuccaugaaaguaggag

SEQ ID NO: 2844212 - RNA, 19 nt, Artificial Sequence
  Description of Artificial Sequence: Synthetic oligonucleotide
gacaagcgguuccugagcc

SEQ ID NO: 2844213 - RNA, 19 nt, Artificial Sequence
  Description of Artificial Sequence: Synthetic oligonucleotide
uuguucuuuggcuuuuacu

SEQ ID NO: 2844214 - RNA, 19 nt, Artificial Sequence
  Description of Artificial Sequence: Synthetic oligonucleotide
cagccagaggacuugcucg

SEQ ID NO: 2844215 - RNA, 19 nt, Artificial Sequence
  Description of Artificial Sequence: Synthetic oligonucleotide
agccagaggacuugcucgc

SEQ ID NO: 2844216 - RNA, 19 nt, Artificial Sequence
  Description of Artificial Sequence: Synthetic oligonucleotide
aagacuucccgcacccggc

SEQ ID NO: 2844217 - RNA, 19 nt, Artificial Sequence
  Description of Artificial Sequence: Synthetic oligonucleotide
ugaguccaguagaugaaga

SEQ ID NO: 2844218 - RNA, 19 nt, Artificial Sequence
  Description of Artificial Sequence: Synthetic oligonucleotide
ugcugcacugccaccgugg

SEQ ID NO: 2844219 - RNA, 19 nt, Artificial Sequence
  Description of Artificial Sequence: Synthetic oligonucleotide
uggucuggcccguacagcc

SEQ ID NO: 2844220 - RNA, 19 nt, Artificial Sequence
  Description of Artificial Sequence: Synthetic oligonucleotide
uccacuacccggaacucac

SEQ ID NO: 2844221 - RNA, 19 nt, Artificial Sequence
  Description of Artificial Sequence: Synthetic oligonucleotide
uccugagccaaagacuucc

SEQ ID NO: 2844222 - RNA, 19 nt, Artificial Sequence
  Description of Artificial Sequence: Synthetic oligonucleotide
ugggcagaccugacaagcg

SEQ ID NO: 2844223 - RNA, 19 nt, Artificial Sequence
  Description of Artificial Sequence: Synthetic oligonucleotide
cacuucagugagcuggugg

SEQ ID NO: 2844224 - RNA, 19 nt, Artificial Sequence
  Description of Artificial Sequence: Synthetic oligonucleotide
ugacaagcgguuccugagc

SEQ ID NO: 2844225 - RNA, 19 nt, Artificial Sequence
  Description of Artificial Sequence: Synthetic oligonucleotide
uuuguucuuuggcuuuuac

SEQ ID NO: 2844226 - RNA, 19 nt, Artificial Sequence
  Description of Artificial Sequence: Synthetic oligonucleotide
uuuggcuuuuacuugccuu

SEQ ID NO: 2844227 - RNA, 19 nt, Artificial Sequence
  Description of Artificial Sequence: Synthetic oligonucleotide
agccaggagagagacaggg

SEQ ID NO: 2844228 - RNA, 19 nt, Artificial Sequence
  Description of Artificial Sequence: Synthetic oligonucleotide
guagaugaagauguucaug

SEQ ID NO: 2844229 - RNA, 19 nt, Artificial Sequence
  Description of Artificial Sequence: Synthetic oligonucleotide
acaggggucauggagucuc

SEQ ID NO: 2844230 - RNA, 19 nt, Artificial Sequence
  Description of Artificial Sequence: Synthetic oligonucleotide
uaaccuugcgcuccacuac

SEQ ID NO: 2844231 - RNA, 19 nt, Artificial Sequence
  Description of Artificial Sequence: Synthetic oligonucleotide
accccauccucaugagucc

SEQ ID NO: 2844232 - RNA, 19 nt, Artificial Sequence
  Description of Artificial Sequence: Synthetic oligonucleotide
agacaggggucauggaguc

SEQ ID NO: 2844233 - RNA, 19 nt, Artificial Sequence
  Description of Artificial Sequence: Synthetic oligonucleotide
cugacaagcgguuccugag

SEQ ID NO: 2844234 - RNA, 19 nt, Artificial Sequence
  Description of Artificial Sequence: Synthetic oligonucleotide
cuugcgcuccacuacccgg

SEQ ID NO: 2844235 - RNA, 19 nt, Artificial Sequence
  Description of Artificial Sequence: Synthetic oligonucleotide
gguccagcaggcuuugucg

SEQ ID NO: 2844236 - RNA, 19 nt, Artificial Sequence
  Description of Artificial Sequence: Synthetic oligonucleotide
gagucuccaugaaaguagg

SEQ ID NO: 2844237 - RNA, 19 nt, Artificial Sequence
  Description of Artificial Sequence: Synthetic oligonucleotide
caugguaaccuugcgcucc

SEQ ID NO: 2844238 - RNA, 19 nt, Artificial Sequence
  Description of Artificial Sequence: Synthetic oligonucleotide
ucccucaugguaaccuugc

SEQ ID NO: 2844239 - RNA, 19 nt, Artificial Sequence
  Description of Artificial Sequence: Synthetic oligonucleotide
uguagucuccaaccccacc

SEQ ID NO: 2844240 - RNA, 19 nt, Artificial Sequence
  Description of Artificial Sequence: Synthetic oligonucleotide
aguagaugaagauguucau

SEQ ID NO: 2844241 - RNA, 19 nt, Artificial Sequence
  Description of Artificial Sequence: Synthetic oligonucleotide
uacuugccuucauacagga

SEQ ID NO: 2844242 - RNA, 19 nt, Artificial Sequence
  Description of Artificial Sequence: Synthetic oligonucleotide
ucauggagucuccaugaaa

SEQ ID NO: 2844243 - RNA, 19 nt, Artificial Sequence
  Description of Artificial Sequence: Synthetic oligonucleotide
gcuuugucgaaccacacca

SEQ ID NO: 2844244 - RNA, 19 nt, Artificial Sequence
  Description of Artificial Sequence: Synthetic oligonucleotide
accccacccauccaggcuc

SEQ ID NO: 2844245 - RNA, 19 nt, Artificial Sequence
  Description of Artificial Sequence: Synthetic oligonucleotide
caccccaaguccuagccag

SEQ ID NO: 2844246 - RNA, 19 nt, Artificial Sequence
  Description of Artificial Sequence: Synthetic oligonucleotide
uugcucgcagcccuucucc

SEQ ID NO: 2844247 - RNA, 19 nt, Artificial Sequence
  Description of Artificial Sequence: Synthetic oligonucleotide
acaggauuugaugcacugg

SEQ ID NO: 2844248 - RNA, 19 nt, Artificial Sequence
  Description of Artificial Sequence: Synthetic oligonucleotide
gagccaaagacuucccgca

SEQ ID NO: 2844249 - RNA, 19 nt, Artificial Sequence
  Description of Artificial Sequence: Synthetic oligonucleotide
cauacaggauuugaugcac

SEQ ID NO: 2844250 - RNA, 19 nt, Artificial Sequence
  Description of Artificial Sequence: Synthetic oligonucleotide
uucccucaugguaaccuug

SEQ ID NO: 2844251 - RNA, 19 nt, Artificial Sequence
  Description of Artificial Sequence: Synthetic oligonucleotide
ucaauucccucaugguaac

SEQ ID NO: 2844252 - RNA, 19 nt, Artificial Sequence
  Description of Artificial Sequence: Synthetic oligonucleotide
ggagucuccaugaaaguag

SEQ ID NO: 2844253 - RNA, 19 nt, Artificial Sequence
  Description of Artificial Sequence: Synthetic oligonucleotide
aggauuugaugcacugggc

SEQ ID NO: 2844254 - RNA, 19 nt, Artificial Sequence
  Description of Artificial Sequence: Synthetic oligonucleotide
augaaaguaggagccaaca

SEQ ID NO: 2844255 - RNA, 19 nt, Artificial Sequence
  Description of Artificial Sequence: Synthetic oligonucleotide
cuuugucgaaccacaccag

SEQ ID NO: 2844256 - RNA, 19 nt, Artificial Sequence
  Description of Artificial Sequence: Synthetic oligonucleotide
caugaaaguaggagccaac

SEQ ID NO: 2844257 - RNA, 19 nt, Artificial Sequence
  Description of Artificial Sequence: Synthetic oligonucleotide
agaugaagauguucauggu

SEQ ID NO: 2844258 - RNA, 19 nt, Artificial Sequence
  Description of Artificial Sequence: Synthetic oligonucleotide
cucaccccaaguccuagcc

SEQ ID NO: 2844259 - RNA, 19 nt, Artificial Sequence
  Description of Artificial Sequence: Synthetic oligonucleotide
uugccuucauacaggauuu

SEQ ID NO: 2844260 - RNA, 19 nt, Artificial Sequence
  Description of Artificial Sequence: Synthetic oligonucleotide
ugggcugucugcugcacug

SEQ ID NO: 2844261 - RNA, 19 nt, Artificial Sequence
  Description of Artificial Sequence: Synthetic oligonucleotide
cucaugguaaccuugcgcu

SEQ ID NO: 2844262 - RNA, 19 nt, Artificial Sequence
  Description of Artificial Sequence: Synthetic oligonucleotide
guggggaguugcuagcucc

SEQ ID NO: 2844263 - RNA, 19 nt, Artificial Sequence
  Description of Artificial Sequence: Synthetic oligonucleotide
agccaaagacuucccgcac

SEQ ID NO: 2844264 - RNA, 19 nt, Artificial Sequence
  Description of Artificial Sequence: Synthetic oligonucleotide
acucaccccaaguccuagc

SEQ ID NO: 2844265 - RNA, 19 nt, Artificial Sequence
  Description of Artificial Sequence: Synthetic oligonucleotide
gaagauguucauggugccc

SEQ ID NO: 2844266 - RNA, 19 nt, Artificial Sequence
  Description of Artificial Sequence: Synthetic oligonucleotide
gagcugguggucuggcccg

SEQ ID NO: 2844267 - RNA, 19 nt, Artificial Sequence
  Description of Artificial Sequence: Synthetic oligonucleotide
gucgaaccacaccaggcag

SEQ ID NO: 2844268 - RNA, 19 nt, Artificial Sequence
  Description of Artificial Sequence: Synthetic oligonucleotide
guucauggugcccacuuca

SEQ ID NO: 2844269 - RNA, 19 nt, Artificial Sequence
  Description of Artificial Sequence: Synthetic oligonucleotide
cugagccaaagacuucccg

SEQ ID NO: 2844270 - RNA, 19 nt, Artificial Sequence
  Description of Artificial Sequence: Synthetic oligonucleotide
uucagugagcugguggucu

SEQ ID NO: 2844271 - RNA, 19 nt, Artificial Sequence
  Description of Artificial Sequence: Synthetic oligonucleotide
cucgcagcccuucuccugg

SEQ ID NO: 2844272 - RNA, 19 nt, Artificial Sequence
  Description of Artificial Sequence: Synthetic oligonucleotide
uccagugcccgcuucaauu

SEQ ID NO: 2844273 - RNA, 19 nt, Artificial Sequence
  Description of Artificial Sequence: Synthetic oligonucleotide
aguggggaguugcuagcuc

SEQ ID NO: 2844274 - RNA, 19 nt, Artificial Sequence
  Description of Artificial Sequence: Synthetic oligonucleotide
auuugaugcacugggcaga

SEQ ID NO: 2844275 - RNA, 19 nt, Artificial Sequence
  Description of Artificial Sequence: Synthetic oligonucleotide
aguccuagccagguccagc

SEQ ID NO: 2844276 - RNA, 19 nt, Artificial Sequence
  Description of Artificial Sequence: Synthetic oligonucleotide
ccaaguccuagccaggucc

SEQ ID NO: 2844277 - RNA, 19 nt, Artificial Sequence
  Description of Artificial Sequence: Synthetic oligonucleotide
ggauuugaugcacugggca

SEQ ID NO: 2844278 - RNA, 19 nt, Artificial Sequence
  Description of Artificial Sequence: Synthetic oligonucleotide
uggugcccacuucagugag

SEQ ID NO: 2844279 - RNA, 19 nt, Artificial Sequence
  Description of Artificial Sequence: Synthetic oligonucleotide
augaguccaguagaugaag

SEQ ID NO: 2844280 - RNA, 19 nt, Artificial Sequence
  Description of Artificial Sequence: Synthetic oligonucleotide
gucugcugcacugccaccg

SEQ ID NO: 2844281 - RNA, 19 nt, Artificial Sequence
  Description of Artificial Sequence: Synthetic oligonucleotide
cuucaauucccucauggua

SEQ ID NO: 2844282 - RNA, 19 nt, Artificial Sequence
  Description of Artificial Sequence: Synthetic oligonucleotide
aggcaggaugaugccaucc

SEQ ID NO: 2844283 - RNA, 19 nt, Artificial Sequence
  Description of Artificial Sequence: Synthetic oligonucleotide
cugggcagaccugacaagc

SEQ ID NO: 2844284 - RNA, 19 nt, Artificial Sequence
  Description of Artificial Sequence: Synthetic oligonucleotide
cacuacccggaacucaccc

SEQ ID NO: 2844285 - RNA, 19 nt, Artificial Sequence
  Description of Artificial Sequence: Synthetic oligonucleotide
agugagcugguggucuggc

SEQ ID NO: 2844286 - RNA, 19 nt, Artificial Sequence
  Description of Artificial Sequence: Synthetic oligonucleotide
ucauggugcccacuucagu

SEQ ID NO: 2844287 - RNA, 19 nt, Artificial Sequence
  Description of Artificial Sequence: Synthetic oligonucleotide
aaccccacccauccaggcu

SEQ ID NO: 2844288 - RNA, 19 nt, Artificial Sequence
  Description of Artificial Sequence: Synthetic oligonucleotide
aguaccccauccucaugag

SEQ ID NO: 2844289 - RNA, 19 nt, Artificial Sequence
  Description of Artificial Sequence: Synthetic oligonucleotide
agacuucccgcacccggcg

SEQ ID NO: 2844290 - RNA, 19 nt, Artificial Sequence
  Description of Artificial Sequence: Synthetic oligonucleotide
cuugccuucauacaggauu

SEQ ID NO: 2844291 - RNA, 19 nt, Artificial Sequence
  Description of Artificial Sequence: Synthetic oligonucleotide
gaugaacguggggucagcc

SEQ ID NO: 2844292 - RNA, 19 nt, Artificial Sequence
  Description of Artificial Sequence: Synthetic oligonucleotide
uuugaugcacugggcagac

SEQ ID NO: 2844293 - RNA, 19 nt, Artificial Sequence
  Description of Artificial Sequence: Synthetic oligonucleotide
cucugaugaacgugggguc

SEQ ID NO: 2844294 - RNA, 19 nt, Artificial Sequence
  Description of Artificial Sequence: Synthetic oligonucleotide
uguucauggugcccacuuc

SEQ ID NO: 2844295 - RNA, 19 nt, Artificial Sequence
  Description of Artificial Sequence: Synthetic oligonucleotide
gcccacuucagugagcugg

SEQ ID NO: 2844296 - RNA, 19 nt, Artificial Sequence
  Description of Artificial Sequence: Synthetic oligonucleotide
augaacguggggucagcca

SEQ ID NO: 2844297 - RNA, 19 nt, Artificial Sequence
  Description of Artificial Sequence: Synthetic oligonucleotide
uugcgcuccacuacccgga

SEQ ID NO: 2844298 - RNA, 19 nt, Artificial Sequence
  Description of Artificial Sequence: Synthetic oligonucleotide
agugcccgcuucaauuccc

SEQ ID NO: 2844299 - RNA, 19 nt, Artificial Sequence
  Description of Artificial Sequence: Synthetic oligonucleotide
auggagucuccaugaaagu

SEQ ID NO: 2844300 - RNA, 19 nt, Artificial Sequence
  Description of Artificial Sequence: Synthetic oligonucleotide
auccaggcucugaugaacg

SEQ ID NO: 2844301 - RNA, 19 nt, Artificial Sequence
  Description of Artificial Sequence: Synthetic oligonucleotide
ggaugaugccauccagugg

SEQ ID NO: 2844302 - RNA, 19 nt, Artificial Sequence
  Description of Artificial Sequence: Synthetic oligonucleotide
uggagucuccaugaaagua

SEQ ID NO: 2844303 - RNA, 19 nt, Artificial Sequence
  Description of Artificial Sequence: Synthetic oligonucleotide
cagaggacuugcucgcagc

SEQ ID NO: 2844304 - RNA, 19 nt, Artificial Sequence
  Description of Artificial Sequence: Synthetic oligonucleotide
ucagugagcugguggucug

SEQ ID NO: 2844305 - RNA, 19 nt, Artificial Sequence
  Description of Artificial Sequence: Synthetic oligonucleotide
ucaccccaaguccuagcca

SEQ ID NO: 2844306 - RNA, 19 nt, Artificial Sequence
  Description of Artificial Sequence: Synthetic oligonucleotide
uccaugaaaguaggagcca

SEQ ID NO: 2844307 - RNA, 19 nt, Artificial Sequence
  Description of Artificial Sequence: Synthetic oligonucleotide
aacucaccccaaguccuag

SEQ ID NO: 2844308 - RNA, 19 nt, Artificial Sequence
  Description of Artificial Sequence: Synthetic oligonucleotide
uccaguaccccauccucau

SEQ ID NO: 2844309 - RNA, 19 nt, Artificial Sequence
  Description of Artificial Sequence: Synthetic oligonucleotide
auggugcccacuucaguga

SEQ ID NO: 2844310 - RNA, 19 nt, Artificial Sequence
  Description of Artificial Sequence: Synthetic oligonucleotide
acugggcagaccugacaag

SEQ ID NO: 2844311 - RNA, 19 nt, Artificial Sequence
  Description of Artificial Sequence: Synthetic oligonucleotide
gaguugcuagcuccaguac

SEQ ID NO: 2844312 - RNA, 19 nt, Artificial Sequence
  Description of Artificial Sequence: Synthetic oligonucleotide
auguucauggugcccacuu

SEQ ID NO: 2844313 - RNA, 19 nt, Artificial Sequence
  Description of Artificial Sequence: Synthetic oligonucleotide
uggggaguugcuagcucca

SEQ ID NO: 2844314 - RNA, 19 nt, Artificial Sequence
  Description of Artificial Sequence: Synthetic oligonucleotide
guaaccuugcgcuccacua

SEQ ID NO: 2844315 - RNA, 19 nt, Artificial Sequence
  Description of Artificial Sequence: Synthetic oligonucleotide
ucaugguaaccuugcgcuc

SEQ ID NO: 2844316 - RNA, 19 nt, Artificial Sequence
  Description of Artificial Sequence: Synthetic oligonucleotide
caguaccccauccucauga

SEQ ID NO: 2844317 - RNA, 19 nt, Artificial Sequence
  Description of Artificial Sequence: Synthetic oligonucleotide
ggcccguacagccagagga

SEQ ID NO: 2844318 - RNA, 19 nt, Artificial Sequence
  Description of Artificial Sequence: Synthetic oligonucleotide
ccaacuuguagucuccaac

SEQ ID NO: 2844319 - RNA, 19 nt, Artificial Sequence
  Description of Artificial Sequence: Synthetic oligonucleotide
caccgugggcccauaauuc

SEQ ID NO: 2844320 - RNA, 19 nt, Artificial Sequence
  Description of Artificial Sequence: Synthetic oligonucleotide
caggcuuugucgaaccaca

SEQ ID NO: 2844321 - RNA, 19 nt, Artificial Sequence
  Description of Artificial Sequence: Synthetic oligonucleotide
uagcuccaguaccccaucc

SEQ ID NO: 2844322 - RNA, 19 nt, Artificial Sequence
  Description of Artificial Sequence: Synthetic oligonucleotide
ggucauggagucuccauga

SEQ ID NO: 2844323 - RNA, 19 nt, Artificial Sequence
  Description of Artificial Sequence: Synthetic oligonucleotide
uccuccagugcccgcuuca

SEQ ID NO: 2844324 - RNA, 19 nt, Artificial Sequence
  Description of Artificial Sequence: Synthetic oligonucleotide
caugaguccaguagaugaa

SEQ ID NO: 2844325 - RNA, 19 nt, Artificial Sequence
  Description of Artificial Sequence: Synthetic oligonucleotide
ugcuagcuccaguacccca

SEQ ID NO: 2844326 - RNA, 19 nt, Artificial Sequence
  Description of Artificial Sequence: Synthetic oligonucleotide
uuguagucuccaaccccac

SEQ ID NO: 2844327 - RNA, 19 nt, Artificial Sequence
  Description of Artificial Sequence: Synthetic oligonucleotide
uccuagccagguccagcag

SEQ ID NO: 2844328 - RNA, 19 nt, Artificial Sequence
  Description of Artificial Sequence: Synthetic oligonucleotide
gguggucuggcccguacag

SEQ ID NO: 2844329 - RNA, 19 nt, Artificial Sequence
  Description of Artificial Sequence: Synthetic oligonucleotide
cuacccggaacucacccca

SEQ ID NO: 2844330 - RNA, 19 nt, Artificial Sequence
  Description of Artificial Sequence: Synthetic oligonucleotide
gaacguggggucagccagg

SEQ ID NO: 2844331 - RNA, 19 nt, Artificial Sequence
  Description of Artificial Sequence: Synthetic oligonucleotide
cagcaggcuuugucgaacc

SEQ ID NO: 2844332 - RNA, 19 nt, Artificial Sequence
  Description of Artificial Sequence: Synthetic oligonucleotide
cauccaggcucugaugaac

SEQ ID NO: 2844333 - RNA, 19 nt, Artificial Sequence
  Description of Artificial Sequence: Synthetic oligonucleotide
gggcagaccugacaagcgg

SEQ ID NO: 2844334 - RNA, 19 nt, Artificial Sequence
  Description of Artificial Sequence: Synthetic oligonucleotide
gucuggcccguacagccag

SEQ ID NO: 2844335 - RNA, 19 nt, Artificial Sequence
  Description of Artificial Sequence: Synthetic oligonucleotide
gggucauggagucuccaug

SEQ ID NO: 2844336 - RNA, 19 nt, Artificial Sequence
  Description of Artificial Sequence: Synthetic oligonucleotide
ccucaugguaaccuugcgc

SEQ ID NO: 2844337 - RNA, 19 nt, Artificial Sequence
  Description of Artificial Sequence: Synthetic oligonucleotide
ugguggucuggcccguaca

SEQ ID NO: 2844338 - RNA, 19 nt, Artificial Sequence
  Description of Artificial Sequence: Synthetic oligonucleotide
ccaaagacuucccgcaccc

SEQ ID NO: 2844339 - RNA, 19 nt, Artificial Sequence
  Description of Artificial Sequence: Synthetic oligonucleotide
cucaugaguccaguagaug

SEQ ID NO: 2844340 - RNA, 19 nt, Artificial Sequence
  Description of Artificial Sequence: Synthetic oligonucleotide
uggcuuuuacuugccuuca

SEQ ID NO: 2844341 - RNA, 19 nt, Artificial Sequence
  Description of Artificial Sequence: Synthetic oligonucleotide
ggcuuugucgaaccacacc

SEQ ID NO: 2844342 - RNA, 19 nt, Artificial Sequence
  Description of Artificial Sequence: Synthetic oligonucleotide
guccuagccagguccagca

SEQ ID NO: 2844343 - RNA, 19 nt, Artificial Sequence
  Description of Artificial Sequence: Synthetic oligonucleotide
cgcuucaauucccucaugg

SEQ ID NO: 2844344 - RNA, 19 nt, Artificial Sequence
  Description of Artificial Sequence: Synthetic oligonucleotide
caaccccacccauccaggc

SEQ ID NO: 2844345 - RNA, 19 nt, Artificial Sequence
  Description of Artificial Sequence: Synthetic oligonucleotide
agcgguuccugagccaaag

SEQ ID NO: 2844346 - RNA, 19 nt, Artificial Sequence
  Description of Artificial Sequence: Synthetic oligonucleotide
cugaugaacguggggucag

SEQ ID NO: 2844347 - RNA, 19 nt, Artificial Sequence
  Description of Artificial Sequence: Synthetic oligonucleotide
uggcccguacagccagagg

SEQ ID NO: 2844348 - RNA, 19 nt, Artificial Sequence
  Description of Artificial Sequence: Synthetic oligonucleotide
uccaggcucugaugaacgu

SEQ ID NO: 2844349 - RNA, 19 nt, Artificial Sequence
  Description of Artificial Sequence: Synthetic oligonucleotide
gaggacuugcucgcagccc

SEQ ID NO: 2844350 - RNA, 19 nt, Artificial Sequence
  Description of Artificial Sequence: Synthetic oligonucleotide
auucccucaugguaaccuu

SEQ ID NO: 2844351 - RNA, 19 nt, Artificial Sequence
  Description of Artificial Sequence: Synthetic oligonucleotide
gcaggaugaugccauccag

SEQ ID NO: 2844352 - RNA, 19 nt, Artificial Sequence
  Description of Artificial Sequence: Synthetic oligonucleotide
ccuagccagguccagcagg

SEQ ID NO: 2844353 - RNA, 19 nt, Artificial Sequence
  Description of Artificial Sequence: Synthetic oligonucleotide
gagacaggggucauggagu

SEQ ID NO: 2844354 - RNA, 19 nt, Artificial Sequence
  Description of Artificial Sequence: Synthetic oligonucleotide
aaguccuagccagguccag

SEQ ID NO: 2844355 - RNA, 19 nt, Artificial Sequence
  Description of Artificial Sequence: Synthetic oligonucleotide
gaugcacugggcagaccug

SEQ ID NO: 2844356 - RNA, 19 nt, Artificial Sequence
  Description of Artificial Sequence: Synthetic oligonucleotide
ggaguugcuagcuccagua

SEQ ID NO: 2844357 - RNA, 19 nt, Artificial Sequence
  Description of Artificial Sequence: Synthetic oligonucleotide
gaguccaguagaugaagau

SEQ ID NO: 2844358 - RNA, 19 nt, Artificial Sequence
  Description of Artificial Sequence: Synthetic oligonucleotide
augguaaccuugcgcucca

SEQ ID NO: 2844359 - RNA, 19 nt, Artificial Sequence
  Description of Artificial Sequence: Synthetic oligonucleotide
cacugggcagaccugacaa

SEQ ID NO: 2844360 - RNA, 19 nt, Artificial Sequence
  Description of Artificial Sequence: Synthetic oligonucleotide
aacguggggucagccagga

SEQ ID NO: 2844361 - RNA, 19 nt, Artificial Sequence
  Description of Artificial Sequence: Synthetic oligonucleotide
ggcucugaugaacgugggg

SEQ ID NO: 2844362 - RNA, 19 nt, Artificial Sequence
  Description of Artificial Sequence: Synthetic oligonucleotide
ugcacugggcagaccugac

SEQ ID NO: 2844363 - RNA, 19 nt, Artificial Sequence
  Description of Artificial Sequence: Synthetic oligonucleotide
acaagcgguuccugagcca

SEQ ID NO: 2844364 - RNA, 19 nt, Artificial Sequence
  Description of Artificial Sequence: Synthetic oligonucleotide
cagugcccgcuucaauucc

SEQ ID NO: 2844365 - RNA, 19 nt, Artificial Sequence
  Description of Artificial Sequence: Synthetic oligonucleotide
cuccaguaccccauccuca

SEQ ID NO: 2844366 - RNA, 19 nt, Artificial Sequence
  Description of Artificial Sequence: Synthetic oligonucleotide
aggcuuugucgaaccacac

SEQ ID NO: 2844367 - RNA, 19 nt, Artificial Sequence
  Description of Artificial Sequence: Synthetic oligonucleotide
cagcccuucuccugggcug

SEQ ID NO: 2844368 - RNA, 19 nt, Artificial Sequence
  Description of Artificial Sequence: Synthetic oligonucleotide
uccagcaggcuuugucgaa

SEQ ID NO: 2844369 - RNA, 19 nt, Artificial Sequence
  Description of Artificial Sequence: Synthetic oligonucleotide
accuugcgcuccacuaccc

SEQ ID NO: 2844370 - RNA, 19 nt, Artificial Sequence
  Description of Artificial Sequence: Synthetic oligonucleotide
cuugcucgcagcccuucuc

SEQ ID NO: 2844371 - RNA, 19 nt, Artificial Sequence
  Description of Artificial Sequence: Synthetic oligonucleotide
ugaugaacguggggucagc

SEQ ID NO: 2844372 - RNA, 19 nt, Artificial Sequence
  Description of Artificial Sequence: Synthetic oligonucleotide
gagagagacaggggucaug

SEQ ID NO: 2844373 - RNA, 19 nt, Artificial Sequence
  Description of Artificial Sequence: Synthetic oligonucleotide
ggggucagccaggagagag

SEQ ID NO: 2844374 - RNA, 19 nt, Artificial Sequence
  Description of Artificial Sequence: Synthetic oligonucleotide
gccaaagacuucccgcacc

SEQ ID NO: 2844375 - RNA, 19 nt, Artificial Sequence
  Description of Artificial Sequence: Synthetic oligonucleotide
caaagacuucccgcacccg

SEQ ID NO: 2844376 - RNA, 19 nt, Artificial Sequence
  Description of Artificial Sequence: Synthetic oligonucleotide
auacaggauuugaugcacu

SEQ ID NO: 2844377 - RNA, 19 nt, Artificial Sequence
  Description of Artificial Sequence: Synthetic oligonucleotide
uugcuagcuccaguacccc

SEQ ID NO: 2844378 - RNA, 19 nt, Artificial Sequence
  Description of Artificial Sequence: Synthetic oligonucleotide
caaguccuagccaggucca

SEQ ID NO: 2844379 - RNA, 19 nt, Artificial Sequence
  Description of Artificial Sequence: Synthetic oligonucleotide
uuuuguucuuuggcuuuua

SEQ ID NO: 2844380 - RNA, 19 nt, Artificial Sequence
  Description of Artificial Sequence: Synthetic oligonucleotide
caccaggcaggaugaugcc

SEQ ID NO: 2844381 - RNA, 19 nt, Artificial Sequence
  Description of Artificial Sequence: Synthetic oligonucleotide
guuccugagccaaagacuu

SEQ ID NO: 2844382 - RNA, 19 nt, Artificial Sequence
  Description of Artificial Sequence: Synthetic oligonucleotide
guccagcaggcuuugucga

SEQ ID NO: 2844383 - RNA, 19 nt, Artificial Sequence
  Description of Artificial Sequence: Synthetic oligonucleotide
acuugcucgcagcccuucu

SEQ ID NO: 2844384 - RNA, 19 nt, Artificial Sequence
  Description of Artificial Sequence: Synthetic oligonucleotide
agcaggcuuugucgaacca

SEQ ID NO: 2844385 - RNA, 19 nt, Artificial Sequence
  Description of Artificial Sequence: Synthetic oligonucleotide
acccggaacucaccccaag

SEQ ID NO: 2844386 - RNA, 19 nt, Artificial Sequence
  Description of Artificial Sequence: Synthetic oligonucleotide
ugcucgcagcccuucuccu

SEQ ID NO: 2844387 - RNA, 19 nt, Artificial Sequence
  Description of Artificial Sequence: Synthetic oligonucleotide
augcacugggcagaccuga

SEQ ID NO: 2844388 - RNA, 19 nt, Artificial Sequence
  Description of Artificial Sequence: Synthetic oligonucleotide
cuagcuccaguaccccauc

SEQ ID NO: 2844389 - RNA, 19 nt, Artificial Sequence
  Description of Artificial Sequence: Synthetic oligonucleotide
cggaacucaccccaagucc

SEQ ID NO: 2844390 - RNA, 19 nt, Artificial Sequence
  Description of Artificial Sequence: Synthetic oligonucleotide
gacuucccgcacccggcgc

SEQ ID NO: 2844391 - RNA, 19 nt, Artificial Sequence
  Description of Artificial Sequence: Synthetic oligonucleotide
caauucccucaugguaacc

SEQ ID NO: 2844392 - RNA, 19 nt, Artificial Sequence
  Description of Artificial Sequence: Synthetic oligonucleotide
gcugcacugccaccguggg

SEQ ID NO: 2844393 - RNA, 19 nt, Artificial Sequence
  Description of Artificial Sequence: Synthetic oligonucleotide
ugccuucauacaggauuug

SEQ ID NO: 2844394 - RNA, 19 nt, Artificial Sequence
  Description of Artificial Sequence: Synthetic oligonucleotide
ucgcagcccuucuccuggg

SEQ ID NO: 2844395 - RNA, 19 nt, Artificial Sequence
  Description of Artificial Sequence: Synthetic oligonucleotide
ggucagccaggagagagac

SEQ ID NO: 2844396 - RNA, 19 nt, Artificial Sequence
  Description of Artificial Sequence: Synthetic oligonucleotide
agucuccaaccccacccau

SEQ ID NO: 2844397 - RNA, 19 nt, Artificial Sequence
  Description of Artificial Sequence: Synthetic oligonucleotide
accaggcaggaugaugcca

SEQ ID NO: 2844398 - RNA, 19 nt, Artificial Sequence
  Description of Artificial Sequence: Synthetic oligonucleotide
cagccaggagagagacagg

SEQ ID NO: 2844399 - RNA, 19 nt, Artificial Sequence
  Description of Artificial Sequence: Synthetic oligonucleotide
caggaugaugccauccagu

SEQ ID NO: 2844400 - RNA, 19 nt, Artificial Sequence
  Description of Artificial Sequence: Synthetic oligonucleotide
cuucagugagcuggugguc

SEQ ID NO: 2844401 - RNA, 19 nt, Artificial Sequence
  Description of Artificial Sequence: Synthetic oligonucleotide
gagagacaggggucaugga

SEQ ID NO: 2844402 - RNA, 19 nt, Artificial Sequence
  Description of Artificial Sequence: Synthetic oligonucleotide
ccaguagaugaagauguuc

SEQ ID NO: 2844403 - RNA, 19 nt, Artificial Sequence
  Description of Artificial Sequence: Synthetic oligonucleotide
caggggucauggagucucc

SEQ ID NO: 2844404 - RNA, 19 nt, Artificial Sequence
  Description of Artificial Sequence: Synthetic oligonucleotide
ccaaccccacccauccagg

SEQ ID NO: 2844405 - RNA, 19 nt, Artificial Sequence
  Description of Artificial Sequence: Synthetic oligonucleotide
ucuggcccguacagccaga

SEQ ID NO: 2844406 - RNA, 19 nt, Artificial Sequence
  Description of Artificial Sequence: Synthetic oligonucleotide
gcuuuuacuugccuucaua

SEQ ID NO: 2844407 - RNA, 19 nt, Artificial Sequence
  Description of Artificial Sequence: Synthetic oligonucleotide
gucauggagucuccaugaa

SEQ ID NO: 2844408 - RNA, 19 nt, Artificial Sequence
  Description of Artificial Sequence: Synthetic oligonucleotide
aggcucugaugaacguggg

SEQ ID NO: 2844409 - RNA, 19 nt, Artificial Sequence
  Description of Artificial Sequence: Synthetic oligonucleotide
cugguggucuggcccguac

SEQ ID NO: 2844410 - RNA, 19 nt, Artificial Sequence
  Description of Artificial Sequence: Synthetic oligonucleotide
gcucugaugaacguggggu

SEQ ID NO: 2844411 - RNA, 19 nt, Artificial Sequence
  Description of Artificial Sequence: Synthetic oligonucleotide
cagugagcugguggucugg

SEQ ID NO: 2844412 - RNA, 19 nt, Artificial Sequence
  Description of Artificial Sequence: Synthetic oligonucleotide
caagcgguuccugagccaa

SEQ ID NO: 2844413 - RNA, 19 nt, Artificial Sequence
  Description of Artificial Sequence: Synthetic oligonucleotide
cagaccugacaagcgguuc

SEQ ID NO: 2844414 - RNA, 19 nt, Artificial Sequence
  Description of Artificial Sequence: Synthetic oligonucleotide
ccauccaguggggaguugc

SEQ ID NO: 2844415 - RNA, 19 nt, Artificial Sequence
  Description of Artificial Sequence: Synthetic oligonucleotide
ugcgcuccacuacccggaa

SEQ ID NO: 2844416 - RNA, 19 nt, Artificial Sequence
  Description of Artificial Sequence: Synthetic oligonucleotide
cccauccaggcucugauga

SEQ ID NO: 2844417 - RNA, 19 nt, Artificial Sequence
  Description of Artificial Sequence: Synthetic oligonucleotide
cgguuccugagccaaagac

SEQ ID NO: 2844418 - RNA, 19 nt, Artificial Sequence
  Description of Artificial Sequence: Synthetic oligonucleotide
ccggaacucaccccaaguc

SEQ ID NO: 2844419 - RNA, 19 nt, Artificial Sequence
  Description of Artificial Sequence: Synthetic oligonucleotide
cugcacugccaccgugggc

SEQ ID NO: 2844420 - RNA, 19 nt, Artificial Sequence
  Description of Artificial Sequence: Synthetic oligonucleotide
guggucuggcccguacagc

SEQ ID NO: 2844421 - RNA, 19 nt, Artificial Sequence
  Description of Artificial Sequence: Synthetic oligonucleotide
uacccggaacucaccccaa

SEQ ID NO: 2844422 - RNA, 19 nt, Artificial Sequence
  Description of Artificial Sequence: Synthetic oligonucleotide
ccagugcccgcuucaauuc

SEQ ID NO: 2844423 - RNA, 19 nt, Artificial Sequence
  Description of Artificial Sequence: Synthetic oligonucleotide
ggcugucugcugcacugcc

SEQ ID NO: 2844424 - RNA, 19 nt, Artificial Sequence
  Description of Artificial Sequence: Synthetic oligonucleotide
agucuccaugaaaguagga

SEQ ID NO: 2844425 - RNA, 19 nt, Artificial Sequence
  Description of Artificial Sequence: Synthetic oligonucleotide
uugaugcacugggcagacc

SEQ ID NO: 2844426 - RNA, 19 nt, Artificial Sequence
  Description of Artificial Sequence: Synthetic oligonucleotide
gcaggcuuugucgaaccac

SEQ ID NO: 2844427 - RNA, 19 nt, Artificial Sequence
  Description of Artificial Sequence: Synthetic oligonucleotide
accccaaguccuagccagg

SEQ ID NO: 2844428 - RNA, 19 nt, Artificial Sequence
  Description of Artificial Sequence: Synthetic oligonucleotide
cuggcccguacagccagag

SEQ ID NO: 2844429 - RNA, 19 nt, Artificial Sequence
  Description of Artificial Sequence: Synthetic oligonucleotide
ccgugggcccauaauuccc

SEQ ID NO: 2844430 - RNA, 19 nt, Artificial Sequence
  Description of Artificial Sequence: Synthetic oligonucleotide
ccagaggacuugcucgcag

SEQ ID NO: 2844431 - RNA, 19 nt, Artificial Sequence
  Description of Artificial Sequence: Synthetic oligonucleotide
ccuugcgcuccacuacccg

SEQ ID NO: 2844432 - RNA, 19 nt, Artificial Sequence
  Description of Artificial Sequence: Synthetic oligonucleotide
gcccgcuucaauucccuca

SEQ ID NO: 2844433 - RNA, 19 nt, Artificial Sequence
  Description of Artificial Sequence: Synthetic oligonucleotide
ggaacucaccccaaguccu

SEQ ID NO: 2844434 - RNA, 19 nt, Artificial Sequence
  Description of Artificial Sequence: Synthetic oligonucleotide
gccaggagagagacagggg

SEQ ID NO: 2844435 - RNA, 19 nt, Artificial Sequence
  Description of Artificial Sequence: Synthetic oligonucleotide
gucuccaaccccacccauc

SEQ ID NO: 2844436 - RNA, 19 nt, Artificial Sequence
  Description of Artificial Sequence: Synthetic oligonucleotide
cgugggcccauaauucccc

SEQ ID NO: 2844437 - RNA, 19 nt, Artificial Sequence
  Description of Artificial Sequence: Synthetic oligonucleotide
gugcccacuucagugagcu

SEQ ID NO: 2844438 - RNA, 19 nt, Artificial Sequence
  Description of Artificial Sequence: Synthetic oligonucleotide
ccugacaagcgguuccuga

SEQ ID NO: 2844439 - RNA, 19 nt, Artificial Sequence
  Description of Artificial Sequence: Synthetic oligonucleotide
ugcccacuucagugagcug

SEQ ID NO: 2844440 - RNA, 19 nt, Artificial Sequence
  Description of Artificial Sequence: Synthetic oligonucleotide
gacuugcucgcagcccuuc

SEQ ID NO: 2844441 - RNA, 19 nt, Artificial Sequence
  Description of Artificial Sequence: Synthetic oligonucleotide
caggcaggaugaugccauc

SEQ ID NO: 2844442 - RNA, 19 nt, Artificial Sequence
  Description of Artificial Sequence: Synthetic oligonucleotide
cauccucaugaguccagua

SEQ ID NO: 2844443 - RNA, 19 nt, Artificial Sequence
  Description of Artificial Sequence: Synthetic oligonucleotide
ugcccgcuucaauucccuc

SEQ ID NO: 2844444 - RNA, 19 nt, Artificial Sequence
  Description of Artificial Sequence: Synthetic oligonucleotide
cugcugcacugccaccgug

SEQ ID NO: 2844445 - RNA, 19 nt, Artificial Sequence
  Description of Artificial Sequence: Synthetic oligonucleotide
ccaggagagagacaggggu

SEQ ID NO: 2844446 - RNA, 19 nt, Artificial Sequence
  Description of Artificial Sequence: Synthetic oligonucleotide
accugacaagcgguuccug

SEQ ID NO: 2844447 - RNA, 19 nt, Artificial Sequence
  Description of Artificial Sequence: Synthetic oligonucleotide
cccucaugguaaccuugcg

SEQ ID NO: 2844448 - RNA, 19 nt, Artificial Sequence
  Description of Artificial Sequence: Synthetic oligonucleotide
gccuucauacaggauuuga

SEQ ID NO: 2844449 - RNA, 19 nt, Artificial Sequence
  Description of Artificial Sequence: Synthetic oligonucleotide
cuuuggcuuuuacuugccu

SEQ ID NO: 2844450 - RNA, 19 nt, Artificial Sequence
  Description of Artificial Sequence: Synthetic oligonucleotide
cuccacuacccggaacuca

SEQ ID NO: 2844451 - RNA, 19 nt, Artificial Sequence
  Description of Artificial Sequence: Synthetic oligonucleotide
gaacucaccccaaguccua

SEQ ID NO: 2844452 - RNA, 19 nt, Artificial Sequence
  Description of Artificial Sequence: Synthetic oligonucleotide
acccggcgcuccuccagug

SEQ ID NO: 2844453 - RNA, 19 nt, Artificial Sequence
  Description of Artificial Sequence: Synthetic oligonucleotide
ccaggcucugaugaacgug

SEQ ID NO: 2844454 - RNA, 19 nt, Artificial Sequence
  Description of Artificial Sequence: Synthetic oligonucleotide
ugccaccgugggcccauaa

SEQ ID NO: 2844455 - RNA, 19 nt, Artificial Sequence
  Description of Artificial Sequence: Synthetic oligonucleotide
gauguucauggugcccacu

SEQ ID NO: 2844456 - RNA, 19 nt, Artificial Sequence
  Description of Artificial Sequence: Synthetic oligonucleotide
gcucgcagcccuucuccug

SEQ ID NO: 2844457 - RNA, 19 nt, Artificial Sequence
  Description of Artificial Sequence: Synthetic oligonucleotide
acguggggucagccaggag

SEQ ID NO: 2844458 - RNA, 19 nt, Artificial Sequence
  Description of Artificial Sequence: Synthetic oligonucleotide
aggggucauggagucucca

SEQ ID NO: 2844459 - RNA, 19 nt, Artificial Sequence
  Description of Artificial Sequence: Synthetic oligonucleotide
guaccccauccucaugagu

SEQ ID NO: 2844460 - RNA, 19 nt, Artificial Sequence
  Description of Artificial Sequence: Synthetic oligonucleotide
ggcgcuccuccagugcccg

SEQ ID NO: 2844461 - RNA, 19 nt, Artificial Sequence
  Description of Artificial Sequence: Synthetic oligonucleotide
cccauccucaugaguccag

SEQ ID NO: 2844462 - RNA, 19 nt, Artificial Sequence
  Description of Artificial Sequence: Synthetic oligonucleotide
gguaaccuugcgcuccacu

SEQ ID NO: 2844463 - RNA, 19 nt, Artificial Sequence
  Description of Artificial Sequence: Synthetic oligonucleotide
ccggcgcuccuccagugcc

SEQ ID NO: 2844464 - RNA, 19 nt, Artificial Sequence
  Description of Artificial Sequence: Synthetic oligonucleotide
gaccugacaagcgguuccu

SEQ ID NO: 2844465 - RNA, 19 nt, Artificial Sequence
  Description of Artificial Sequence: Synthetic oligonucleotide
ccagcaggcuuugucgaac

SEQ ID NO: 2844466 - RNA, 19 nt, Artificial Sequence
  Description of Artificial Sequence: Synthetic oligonucleotide
acuugccuucauacaggau

SEQ ID NO: 2844467 - RNA, 19 nt, Artificial Sequence
  Description of Artificial Sequence: Synthetic oligonucleotide
ggggaguugcuagcuccag

SEQ ID NO: 2844468 - RNA, 19 nt, Artificial Sequence
  Description of Artificial Sequence: Synthetic oligonucleotide
cauccaguggggaguugcu

SEQ ID NO: 2844469 - RNA, 19 nt, Artificial Sequence
  Description of Artificial Sequence: Synthetic oligonucleotide
acugccaccgugggcccau

SEQ ID NO: 2844470 - RNA, 19 nt, Artificial Sequence
  Description of Artificial Sequence: Synthetic oligonucleotide
ccacuacccggaacucacc

SEQ ID NO: 2844471 - RNA, 19 nt, Artificial Sequence
  Description of Artificial Sequence: Synthetic oligonucleotide
uggggucagccaggagaga

SEQ ID NO: 2844472 - RNA, 19 nt, Artificial Sequence
  Description of Artificial Sequence: Synthetic oligonucleotide
gcacugggcagaccugaca

SEQ ID NO: 2844473 - RNA, 19 nt, Artificial Sequence
  Description of Artificial Sequence: Synthetic oligonucleotide
aagcgguuccugagccaaa

SEQ ID NO: 2844474 - RNA, 19 nt, Artificial Sequence
  Description of Artificial Sequence: Synthetic oligonucleotide
ugguaaccuugcgcuccac

SEQ ID NO: 2844475 - RNA, 19 nt, Artificial Sequence
  Description of Artificial Sequence: Synthetic oligonucleotide
gcacccggcgcuccuccag

SEQ ID NO: 2844476 - RNA, 19 nt, Artificial Sequence
  Description of Artificial Sequence: Synthetic oligonucleotide
uucccgcacccggcgcucc

SEQ ID NO: 2844477 - RNA, 19 nt, Artificial Sequence
  Description of Artificial Sequence: Synthetic oligonucleotide
gcccguacagccagaggac

SEQ ID NO: 2844478 - RNA, 19 nt, Artificial Sequence
  Description of Artificial Sequence: Synthetic oligonucleotide
cacccauccaggcucugau

SEQ ID NO: 2844479 - RNA, 19 nt, Artificial Sequence
  Description of Artificial Sequence: Synthetic oligonucleotide
gggaguugcuagcuccagu

SEQ ID NO: 2844480 - RNA, 19 nt, Artificial Sequence
  Description of Artificial Sequence: Synthetic oligonucleotide
gggucagccaggagagaga

SEQ ID NO: 2844481 - RNA, 19 nt, Artificial Sequence
  Description of Artificial Sequence: Synthetic oligonucleotide
ccaguaccccauccucaug

SEQ ID NO: 2844482 - RNA, 19 nt, Artificial Sequence
  Description of Artificial Sequence: Synthetic oligonucleotide
ggcagaccugacaagcggu

SEQ ID NO: 2844483 - RNA, 19 nt, Artificial Sequence
  Description of Artificial Sequence: Synthetic oligonucleotide
cccaaguccuagccagguc

SEQ ID NO: 2844484 - RNA, 19 nt, Artificial Sequence
  Description of Artificial Sequence: Synthetic oligonucleotide
cuccaaccccacccaucca

SEQ ID NO: 2844485 - RNA, 19 nt, Artificial Sequence
  Description of Artificial Sequence: Synthetic oligonucleotide
agcugguggucuggcccgu

SEQ ID NO: 2844486 - RNA, 19 nt, Artificial Sequence
  Description of Artificial Sequence: Synthetic oligonucleotide
ccaggcaggaugaugccau

SEQ ID NO: 2844487 - RNA, 19 nt, Artificial Sequence
  Description of Artificial Sequence: Synthetic oligonucleotide
gacaggggucauggagucu

SEQ ID NO: 2844488 - RNA, 19 nt, Artificial Sequence
  Description of Artificial Sequence: Synthetic oligonucleotide
gcgguuccugagccaaaga

SEQ ID NO: 2844489 - RNA, 19 nt, Artificial Sequence
  Description of Artificial Sequence: Synthetic oligonucleotide
gcagcccuucuccugggcu

SEQ ID NO: 2844490 - RNA, 19 nt, Artificial Sequence
  Description of Artificial Sequence: Synthetic oligonucleotide
cccaacuuguagucuccaa

SEQ ID NO: 2844491 - RNA, 19 nt, Artificial Sequence
  Description of Artificial Sequence: Synthetic oligonucleotide
ccucaugaguccaguagau

SEQ ID NO: 2844492 - RNA, 19 nt, Artificial Sequence
  Description of Artificial Sequence: Synthetic oligonucleotide
ggggucauggagucuccau

SEQ ID NO: 2844493 - RNA, 19 nt, Artificial Sequence
  Description of Artificial Sequence: Synthetic oligonucleotide
gcuagcuccaguaccccau

SEQ ID NO: 2844494 - RNA, 19 nt, Artificial Sequence
  Description of Artificial Sequence: Synthetic oligonucleotide
ggucuggcccguacagcca

SEQ ID NO: 2844495 - RNA, 19 nt, Artificial Sequence
  Description of Artificial Sequence: Synthetic oligonucleotide
cugggcugucugcugcacu

SEQ ID NO: 2844496 - RNA, 19 nt, Artificial Sequence
  Description of Artificial Sequence: Synthetic oligonucleotide
cccggcgcuccuccagugc

SEQ ID NO: 2844497 - RNA, 19 nt, Artificial Sequence
  Description of Artificial Sequence: Synthetic oligonucleotide
cgaaccacaccaggcagga

SEQ ID NO: 2844498 - RNA, 19 nt, Artificial Sequence
  Description of Artificial Sequence: Synthetic oligonucleotide
cgcuccacuacccggaacu

SEQ ID NO: 2844499 - RNA, 19 nt, Artificial Sequence
  Description of Artificial Sequence: Synthetic oligonucleotide
ccauccaggcucugaugaa

SEQ ID NO: 2844500 - RNA, 19 nt, Artificial Sequence
  Description of Artificial Sequence: Synthetic oligonucleotide
ggcuuuuacuugccuucau

SEQ ID NO: 2844501 - RNA, 19 nt, Artificial Sequence
  Description of Artificial Sequence: Synthetic oligonucleotide
ccagguccagcaggcuuug

SEQ ID NO: 2844502 - RNA, 19 nt, Artificial Sequence
  Description of Artificial Sequence: Synthetic oligonucleotide
gugcccgcuucaauucccu

SEQ ID NO: 2844503 - RNA, 19 nt, Artificial Sequence
  Description of Artificial Sequence: Synthetic oligonucleotide
ccaccgugggcccauaauu

SEQ ID NO: 2844504 - RNA, 19 nt, Artificial Sequence
  Description of Artificial Sequence: Synthetic oligonucleotide
gcgcuccacuacccggaac

SEQ ID NO: 2844505 - RNA, 19 nt, Artificial Sequence
  Description of Artificial Sequence: Synthetic oligonucleotide
ccgcacccggcgcuccucc

SEQ ID NO: 2844506 - RNA, 19 nt, Artificial Sequence
  Description of Artificial Sequence: Synthetic oligonucleotide
gccagaggacuugcucgca

SEQ ID NO: 2844507 - RNA, 19 nt, Artificial Sequence
  Description of Artificial Sequence: Synthetic oligonucleotide
ccgcuucaauucccucaug

SEQ ID NO: 2844508 - RNA, 19 nt, Artificial Sequence
  Description of Artificial Sequence: Synthetic oligonucleotide
cuccagugcccgcuucaau

SEQ ID NO: 2844509 - RNA, 19 nt, Artificial Sequence
  Description of Artificial Sequence: Synthetic oligonucleotide
cccgcuucaauucccucau

SEQ ID NO: 2844510 - RNA, 19 nt, Artificial Sequence
  Description of Artificial Sequence: Synthetic oligonucleotide
cccacuucagugagcuggu

SEQ ID NO: 2844511 - RNA, 19 nt, Artificial Sequence
  Description of Artificial Sequence: Synthetic oligonucleotide
ccacuucagugagcuggug

SEQ ID NO: 2844512 - RNA, 19 nt, Artificial Sequence
  Description of Artificial Sequence: Synthetic oligonucleotide
cacccggcgcuccuccagu

SEQ ID NO: 2844513 - RNA, 19 nt, Artificial Sequence
  Description of Artificial Sequence: Synthetic oligonucleotide
gccaccgugggcccauaau

SEQ ID NO: 2844514 - RNA, 19 nt, Artificial Sequence
  Description of Artificial Sequence: Synthetic oligonucleotide
gaaccacaccaggcaggau

SEQ ID NO: 2844515 - RNA, 19 nt, Artificial Sequence
  Description of Artificial Sequence: Synthetic oligonucleotide
cggcgcuccuccagugccc

SEQ ID NO: 2844516 - RNA, 19 nt, Artificial Sequence
  Description of Artificial Sequence: Synthetic oligonucleotide
cccggaacucaccccaagu

SEQ ID NO: 2844517 - RNA, 19 nt, Artificial Sequence
  Description of Artificial Sequence: Synthetic oligonucleotide
ccccauccucaugagucca

SEQ ID NO: 2844518 - RNA, 19 nt, Artificial Sequence
  Description of Artificial Sequence: Synthetic oligonucleotide
cgcagcccuucuccugggc

SEQ ID NO: 2844519 - RNA, 19 nt, Artificial Sequence
  Description of Artificial Sequence: Synthetic oligonucleotide
gcagaccugacaagcgguu

SEQ ID NO: 2844520 - RNA, 19 nt, Artificial Sequence
  Description of Artificial Sequence: Synthetic oligonucleotide
cacugccaccgugggccca

SEQ ID NO: 2844521 - RNA, 19 nt, Artificial Sequence
  Description of Artificial Sequence: Synthetic oligonucleotide
gccauccaguggggaguug

SEQ ID NO: 2844522 - RNA, 19 nt, Artificial Sequence
  Description of Artificial Sequence: Synthetic oligonucleotide
ccacccauccaggcucuga

SEQ ID NO: 2844523 - RNA, 19 nt, Artificial Sequence
  Description of Artificial Sequence: Synthetic oligonucleotide
ccccaacuuguagucucca

SEQ ID NO: 2844524 - RNA, 19 nt, Artificial Sequence
  Description of Artificial Sequence: Synthetic oligonucleotide
ggagagagacaggggucau

SEQ ID NO: 2844525 - RNA, 19 nt, Artificial Sequence
  Description of Artificial Sequence: Synthetic oligonucleotide
ccauccucaugaguccagu

SEQ ID NO: 2844526 - RNA, 19 nt, Artificial Sequence
  Description of Artificial Sequence: Synthetic oligonucleotide
ccguacagccagaggacuu

SEQ ID NO: 2844527 - RNA, 19 nt, Artificial Sequence
  Description of Artificial Sequence: Synthetic oligonucleotide
cccguacagccagaggacu

SEQ ID NO: 2844528 - RNA, 19 nt, Artificial Sequence
  Description of Artificial Sequence: Synthetic oligonucleotide
ccuccagugcccgcuucaa

SEQ ID NO: 2844529 - RNA, 19 nt, Artificial Sequence
  Description of Artificial Sequence: Synthetic oligonucleotide
ccccaaguccuagccaggu

SEQ ID NO: 2844530 - RNA, 19 nt, Artificial Sequence
  Description of Artificial Sequence: Synthetic oligonucleotide
cccacccauccaggcucug

SEQ ID NO: 2844531 - RNA, 19 nt, Artificial Sequence
  Description of Artificial Sequence: Synthetic oligonucleotide
gcugguggucuggcccgua

SEQ ID NO: 2844532 - RNA, 19 nt, Artificial Sequence
  Description of Artificial Sequence: Synthetic oligonucleotide
cccgcacccggcgcuccuc

SEQ ID NO: 2844533 - RNA, 19 nt, Artificial Sequence
  Description of Artificial Sequence: Synthetic oligonucleotide
ggacuugcucgcagcccuu

SEQ ID NO: 2844534 - RNA, 19 nt, Artificial Sequence
  Description of Artificial Sequence: Synthetic oligonucleotide
ccccacccauccaggcucu

SEQ ID NO: 2844535 - RNA, 19 nt, Artificial Sequence
  Description of Artificial Sequence: Synthetic oligonucleotide
cugccaccgugggcccaua

SEQ ID NO: 2844536 - RNA, 19 nt, Artificial Sequence
  Description of Artificial Sequence: Synthetic oligonucleotide
ccacaccaggcaggaugau

SEQ ID NO: 2844537 - RNA, 19 nt, Artificial Sequence
  Description of Artificial Sequence: Synthetic oligonucleotide
uucaagagaacacaaagcc

SEQ ID NO: 2844538 - RNA, 19 nt, Artificial Sequence
  Description of Artificial Sequence: Synthetic oligonucleotide
aacccaacaauucccaccc

SEQ ID NO: 2844539 - RNA, 19 nt, Artificial Sequence
  Description of Artificial Sequence: Synthetic oligonucleotide
aaggucagagggcugagcc

SEQ ID NO: 2844540 - RNA, 19 nt, Artificial Sequence
  Description of Artificial Sequence: Synthetic oligonucleotide
uuucaagagaacacaaagc

SEQ ID NO: 2844541 - RNA, 19 nt, Artificial Sequence
  Description of Artificial Sequence: Synthetic oligonucleotide
aauagucccaacaggaagg

SEQ ID NO: 2844542 - RNA, 19 nt, Artificial Sequence
  Description of Artificial Sequence: Synthetic oligonucleotide
ugagauguguuucaagaga

SEQ ID NO: 2844543 - RNA, 19 nt, Artificial Sequence
  Description of Artificial Sequence: Synthetic oligonucleotide
gguaaacaaggucagaggg

SEQ ID NO: 2844544 - RNA, 19 nt, Artificial Sequence
  Description of Artificial Sequence: Synthetic oligonucleotide
aagccagcauuccuggccc

SEQ ID NO: 2844545 - RNA, 19 nt, Artificial Sequence
  Description of Artificial Sequence: Synthetic oligonucleotide
uggucaauagucccaacag

SEQ ID NO: 2844546 - RNA, 19 nt, Artificial Sequence
  Description of Artificial Sequence: Synthetic oligonucleotide
acaguggacaugcuguccc

SEQ ID NO: 2844547 - RNA, 19 nt, Artificial Sequence
  Description of Artificial Sequence: Synthetic oligonucleotide
uggaggaccggaaagcggg

SEQ ID NO: 2844548 - RNA, 19 nt, Artificial Sequence
  Description of Artificial Sequence: Synthetic oligonucleotide
aaagcgggcagcucauugg

SEQ ID NO: 2844549 - RNA, 19 nt, Artificial Sequence
  Description of Artificial Sequence: Synthetic oligonucleotide
cacauaucccaguacaagg

SEQ ID NO: 2844550 - RNA, 19 nt, Artificial Sequence
  Description of Artificial Sequence: Synthetic oligonucleotide
ucaagagaacacaaagcca

SEQ ID NO: 2844551 - RNA, 19 nt, Artificial Sequence
  Description of Artificial Sequence: Synthetic oligonucleotide
acaauucccacccugagau

SEQ ID NO: 2844552 - RNA, 19 nt, Artificial Sequence
  Description of Artificial Sequence: Synthetic oligonucleotide
agcagguccaagcugcgcc

SEQ ID NO: 2844553 - RNA, 19 nt, Artificial Sequence
  Description of Artificial Sequence: Synthetic oligonucleotide
aacaacuuugcaggcacac

SEQ ID NO: 2844554 - RNA, 19 nt, Artificial Sequence
  Description of Artificial Sequence: Synthetic oligonucleotide
aguacaagggauccaaccu

SEQ ID NO: 2844555 - RNA, 19 nt, Artificial Sequence
  Description of Artificial Sequence: Synthetic oligonucleotide
agcucauuggucaauaguc

SEQ ID NO: 2844556 - RNA, 19 nt, Artificial Sequence
  Description of Artificial Sequence: Synthetic oligonucleotide
gaacacauaucccaguaca

SEQ ID NO: 2844557 - RNA, 19 nt, Artificial Sequence
  Description of Artificial Sequence: Synthetic oligonucleotide
uuggucaauagucccaaca

SEQ ID NO: 2844558 - RNA, 19 nt, Artificial Sequence
  Description of Artificial Sequence: Synthetic oligonucleotide
uccuccaaggguaaacaag

SEQ ID NO: 2844559 - RNA, 19 nt, Artificial Sequence
  Description of Artificial Sequence: Synthetic oligonucleotide
agaacacauaucccaguac

SEQ ID NO: 2844560 - RNA, 19 nt, Artificial Sequence
  Description of Artificial Sequence: Synthetic oligonucleotide
uguguuucaagagaacaca

SEQ ID NO: 2844561 - RNA, 19 nt, Artificial Sequence
  Description of Artificial Sequence: Synthetic oligonucleotide
ucuagccggaagcaggucc

SEQ ID NO: 2844562 - RNA, 19 nt, Artificial Sequence
  Description of Artificial Sequence: Synthetic oligonucleotide
ugagaagagcccuugggac

SEQ ID NO: 2844563 - RNA, 19 nt, Artificial Sequence
  Description of Artificial Sequence: Synthetic oligonucleotide
aagggauccaaccucccca

SEQ ID NO: 2844564 - RNA, 19 nt, Artificial Sequence
  Description of Artificial Sequence: Synthetic oligonucleotide
uacaagggauccaaccucc

SEQ ID NO: 2844565 - RNA, 19 nt, Artificial Sequence
  Description of Artificial Sequence: Synthetic oligonucleotide
caacuuugcaggcacacag

SEQ ID NO: 2844566 - RNA, 19 nt, Artificial Sequence
  Description of Artificial Sequence: Synthetic oligonucleotide
ucgucuagccggaagcagg

SEQ ID NO: 2844567 - RNA, 19 nt, Artificial Sequence
  Description of Artificial Sequence: Synthetic oligonucleotide
uggcccaacaacuuugcag

SEQ ID NO: 2844568 - RNA, 19 nt, Artificial Sequence
  Description of Artificial Sequence: Synthetic oligonucleotide
aacaauucccacccugaga

SEQ ID NO: 2844569 - RNA, 19 nt, Artificial Sequence
  Description of Artificial Sequence: Synthetic oligonucleotide
cucauuggucaauaguccc

SEQ ID NO: 2844570 - RNA, 19 nt, Artificial Sequence
  Description of Artificial Sequence: Synthetic oligonucleotide
acuuugcaggcacacagag

SEQ ID NO: 2844571 - RNA, 19 nt, Artificial Sequence
  Description of Artificial Sequence: Synthetic oligonucleotide
gauguguuucaagagaaca

SEQ ID NO: 2844572 - RNA, 19 nt, Artificial Sequence
  Description of Artificial Sequence: Synthetic oligonucleotide
ugaggagugagaagagccc

SEQ ID NO: 2844573 - RNA, 19 nt, Artificial Sequence
  Description of Artificial Sequence: Synthetic oligonucleotide
aggguaaacaaggucagag

SEQ ID NO: 2844574 - RNA, 19 nt, Artificial Sequence
  Description of Artificial Sequence: Synthetic oligonucleotide
ucauuggucaauaguccca

SEQ ID NO: 2844575 - RNA, 19 nt, Artificial Sequence
  Description of Artificial Sequence: Synthetic oligonucleotide
ggcccaacaacuuugcagg

SEQ ID NO: 2844576 - RNA, 19 nt, Artificial Sequence
  Description of Artificial Sequence: Synthetic oligonucleotide
aagagaacacaaagccagc

SEQ ID NO: 2844577 - RNA, 19 nt, Artificial Sequence
  Description of Artificial Sequence: Synthetic oligonucleotide
caguacaagggauccaacc

SEQ ID NO: 2844578 - RNA, 19 nt, Artificial Sequence
  Description of Artificial Sequence: Synthetic oligonucleotide
acacaacccaacaauuccc

SEQ ID NO: 2844579 - RNA, 19 nt, Artificial Sequence
  Description of Artificial Sequence: Synthetic oligonucleotide
acauaucccaguacaaggg

SEQ ID NO: 2844580 - RNA, 19 nt, Artificial Sequence
  Description of Artificial Sequence: Synthetic oligonucleotide
ucgggauccagcucugccg

SEQ ID NO: 2844581 - RNA, 19 nt, Artificial Sequence
  Description of Artificial Sequence: Synthetic oligonucleotide
cugagauguguuucaagag

SEQ ID NO: 2844582 - RNA, 19 nt, Artificial Sequence
  Description of Artificial Sequence: Synthetic oligonucleotide
cacagaacacauaucccag

SEQ ID NO: 2844583 - RNA, 19 nt, Artificial Sequence
  Description of Artificial Sequence: Synthetic oligonucleotide
cucacagaacacauauccc

SEQ ID NO: 2844584 - RNA, 19 nt, Artificial Sequence
  Description of Artificial Sequence: Synthetic oligonucleotide
caaggguaaacaaggucag

SEQ ID NO: 2844585 - RNA, 19 nt, Artificial Sequence
  Description of Artificial Sequence: Synthetic oligonucleotide
aaacacagcagcucacuuu

SEQ ID NO: 2844586 - RNA, 19 nt, Artificial Sequence
  Description of Artificial Sequence: Synthetic oligonucleotide
uccaaggguaaacaagguc

SEQ ID NO: 2844587 - RNA, 19 nt, Artificial Sequence
  Description of Artificial Sequence: Synthetic oligonucleotide
uuggaggaccggaaagcgg

SEQ ID NO: 2844588 - RNA, 19 nt, Artificial Sequence
  Description of Artificial Sequence: Synthetic oligonucleotide
agcacuucgggauccagcu

SEQ ID NO: 2844589 - RNA, 19 nt, Artificial Sequence
  Description of Artificial Sequence: Synthetic oligonucleotide
aggcacacagaguaccuuc

SEQ ID NO: 2844590 - RNA, 19 nt, Artificial Sequence
  Description of Artificial Sequence: Synthetic oligonucleotide
gaaagcgggcagcucauug

SEQ ID NO: 2844591 - RNA, 19 nt, Artificial Sequence
  Description of Artificial Sequence: Synthetic oligonucleotide
agaguaccuuccuccaagg

SEQ ID NO: 2844592 - RNA, 19 nt, Artificial Sequence
  Description of Artificial Sequence: Synthetic oligonucleotide
aacaaggucagagggcuga

SEQ ID NO: 2844593 - RNA, 19 nt, Artificial Sequence
  Description of Artificial Sequence: Synthetic oligonucleotide
ccuccaaggguaaacaagg

SEQ ID NO: 2844594 - RNA, 19 nt, Artificial Sequence
  Description of Artificial Sequence: Synthetic oligonucleotide
uuugaggagugagaagagc

SEQ ID NO: 2844595 - RNA, 19 nt, Artificial Sequence
  Description of Artificial Sequence: Synthetic oligonucleotide
gucaauagucccaacagga

SEQ ID NO: 2844596 - RNA, 19 nt, Artificial Sequence
  Description of Artificial Sequence: Synthetic oligonucleotide
uaucccaguacaagggauc

SEQ ID NO: 2844597 - RNA, 19 nt, Artificial Sequence
  Description of Artificial Sequence: Synthetic oligonucleotide
acacauaucccaguacaag

SEQ ID NO: 2844598 - RNA, 19 nt, Artificial Sequence
  Description of Artificial Sequence: Synthetic oligonucleotide
ggucaauagucccaacagg

SEQ ID NO: 2844599 - RNA, 19 nt, Artificial Sequence
  Description of Artificial Sequence: Synthetic oligonucleotide
guaaacaaggucagagggc

SEQ ID NO: 2844600 - RNA, 19 nt, Artificial Sequence
  Description of Artificial Sequence: Synthetic oligonucleotide
uguggcucacagaacacau

SEQ ID NO: 2844601 - RNA, 19 nt, Artificial Sequence
  Description of Artificial Sequence: Synthetic oligonucleotide
agucccaacaggaagggug

SEQ ID NO: 2844602 - RNA, 19 nt, Artificial Sequence
  Description of Artificial Sequence: Synthetic oligonucleotide
aaggcgcgcucgucuagcc

SEQ ID NO: 2844603 - RNA, 19 nt, Artificial Sequence
  Description of Artificial Sequence: Synthetic oligonucleotide
guugccgccgagaaggccg

SEQ ID NO: 2844604 - RNA, 19 nt, Artificial Sequence
  Description of Artificial Sequence: Synthetic oligonucleotide
aaggccggagccacggacc

SEQ ID NO: 2844605 - RNA, 19 nt, Artificial Sequence
  Description of Artificial Sequence: Synthetic oligonucleotide
guuggaggaccggaaagcg

SEQ ID NO: 2844606 - RNA, 19 nt, Artificial Sequence
  Description of Artificial Sequence: Synthetic oligonucleotide
agggauccaaccuccccac

SEQ ID NO: 2844607 - RNA, 19 nt, Artificial Sequence
  Description of Artificial Sequence: Synthetic oligonucleotide
gaguaccuuccuccaaggg

SEQ ID NO: 2844608 - RNA, 19 nt, Artificial Sequence
  Description of Artificial Sequence: Synthetic oligonucleotide
aaccuccccacccugcaca

SEQ ID NO: 2844609 - RNA, 19 nt, Artificial Sequence
  Description of Artificial Sequence: Synthetic oligonucleotide
ugcacacaacccaacaauu

SEQ ID NO: 2844610 - RNA, 19 nt, Artificial Sequence
  Description of Artificial Sequence: Synthetic oligonucleotide
ccaaggguaaacaagguca

SEQ ID NO: 2844611 - RNA, 19 nt, Artificial Sequence
  Description of Artificial Sequence: Synthetic oligonucleotide
auagucccaacaggaaggg

SEQ ID NO: 2844612 - RNA, 19 nt, Artificial Sequence
  Description of Artificial Sequence: Synthetic oligonucleotide
gagaagagcccuugggaca

SEQ ID NO: 2844613 - RNA, 19 nt, Artificial Sequence
  Description of Artificial Sequence: Synthetic oligonucleotide
gagauguguuucaagagaa

SEQ ID NO: 2844614 - RNA, 19 nt, Artificial Sequence
  Description of Artificial Sequence: Synthetic oligonucleotide
gggguugccgccgagaagg

SEQ ID NO: 2844615 - RNA, 19 nt, Artificial Sequence
  Description of Artificial Sequence: Synthetic oligonucleotide
aagcgggcagcucauuggu

SEQ ID NO: 2844616 - RNA, 19 nt, Artificial Sequence
  Description of Artificial Sequence: Synthetic oligonucleotide
caacaggaagggugcagcg

SEQ ID NO: 2844617 - RNA, 19 nt, Artificial Sequence
  Description of Artificial Sequence: Synthetic oligonucleotide
agaagagcccuugggacag

SEQ ID NO: 2844618 - RNA, 19 nt, Artificial Sequence
  Description of Artificial Sequence: Synthetic oligonucleotide
guacaagggauccaaccuc

SEQ ID NO: 2844619 - RNA, 19 nt, Artificial Sequence
  Description of Artificial Sequence: Synthetic oligonucleotide
auuggucaauagucccaac

SEQ ID NO: 2844620 - RNA, 19 nt, Artificial Sequence
  Description of Artificial Sequence: Synthetic oligonucleotide
acagaacacauaucccagu

SEQ ID NO: 2844621 - RNA, 19 nt, Artificial Sequence
  Description of Artificial Sequence: Synthetic oligonucleotide
aggucagagggcugagccg

SEQ ID NO: 2844622 - RNA, 19 nt, Artificial Sequence
  Description of Artificial Sequence: Synthetic oligonucleotide
agauguguuucaagagaac

SEQ ID NO: 2844623 - RNA, 19 nt, Artificial Sequence
  Description of Artificial Sequence: Synthetic oligonucleotide
agcugcgccguccuuuggg

SEQ ID NO: 2844624 - RNA, 19 nt, Artificial Sequence
  Description of Artificial Sequence: Synthetic oligonucleotide
gagaaggccggagccacgg

SEQ ID NO: 2844625 - RNA, 19 nt, Artificial Sequence
  Description of Artificial Sequence: Synthetic oligonucleotide
caacaauucccacccugag

SEQ ID NO: 2844626 - RNA, 19 nt, Artificial Sequence
  Description of Artificial Sequence: Synthetic oligonucleotide
agagaacacaaagccagca

SEQ ID NO: 2844627 - RNA, 19 nt, Artificial Sequence
  Description of Artificial Sequence: Synthetic oligonucleotide
caagggauccaaccucccc

SEQ ID NO: 2844628 - RNA, 19 nt, Artificial Sequence
  Description of Artificial Sequence: Synthetic oligonucleotide
aacaggaagggugcagcgu

SEQ ID NO: 2844629 - RNA, 19 nt, Artificial Sequence
  Description of Artificial Sequence: Synthetic oligonucleotide
uccaggccgggcuuccacg

SEQ ID NO: 2844630 - RNA, 19 nt, Artificial Sequence
  Description of Artificial Sequence: Synthetic oligonucleotide
uggacaugcugucccugug

SEQ ID NO: 2844631 - RNA, 19 nt, Artificial Sequence
  Description of Artificial Sequence: Synthetic oligonucleotide
gaaggccggagccacggac

SEQ ID NO: 2844632 - RNA, 19 nt, Artificial Sequence
  Description of Artificial Sequence: Synthetic oligonucleotide
uugggguugccgccgagaa

SEQ ID NO: 2844633 - RNA, 19 nt, Artificial Sequence
  Description of Artificial Sequence: Synthetic oligonucleotide
aggccgggcuuccacgccc

SEQ ID NO: 2844634 - RNA, 19 nt, Artificial Sequence
  Description of Artificial Sequence: Synthetic oligonucleotide
agagggcugagccgcgccg

SEQ ID NO: 2844635 - RNA, 19 nt, Artificial Sequence
  Description of Artificial Sequence: Synthetic oligonucleotide
ccugagauguguuucaaga

SEQ ID NO: 2844636 - RNA, 19 nt, Artificial Sequence
  Description of Artificial Sequence: Synthetic oligonucleotide
uuccacgccccgcagccgc

SEQ ID NO: 2844637 - RNA, 19 nt, Artificial Sequence
  Description of Artificial Sequence: Synthetic oligonucleotide
uccaaccuccccacccugc

SEQ ID NO: 2844638 - RNA, 19 nt, Artificial Sequence
  Description of Artificial Sequence: Synthetic oligonucleotide
cauaucccaguacaaggga

SEQ ID NO: 2844639 - RNA, 19 nt, Artificial Sequence
  Description of Artificial Sequence: Synthetic oligonucleotide
aggaccggaaagcgggcag

SEQ ID NO: 2844640 - RNA, 19 nt, Artificial Sequence
  Description of Artificial Sequence: Synthetic oligonucleotide
aacuuugcaggcacacaga

SEQ ID NO: 2844641 - RNA, 19 nt, Artificial Sequence
  Description of Artificial Sequence: Synthetic oligonucleotide
ccaacaacuuugcaggcac

SEQ ID NO: 2844642 - RNA, 19 nt, Artificial Sequence
  Description of Artificial Sequence: Synthetic oligonucleotide
acaagggauccaaccuccc

SEQ ID NO: 2844643 - RNA, 19 nt, Artificial Sequence
  Description of Artificial Sequence: Synthetic oligonucleotide
cacacagaguaccuuccuc

SEQ ID NO: 2844644 - RNA, 19 nt, Artificial Sequence
  Description of Artificial Sequence: Synthetic oligonucleotide
cauuccuggcccaacaacu

SEQ ID NO: 2844645 - RNA, 19 nt, Artificial Sequence
  Description of Artificial Sequence: Synthetic oligonucleotide
aaggguaaacaaggucaga

SEQ ID NO: 2844646 - RNA, 19 nt, Artificial Sequence
  Description of Artificial Sequence: Synthetic oligonucleotide
ggcgcgcucgucuagccgg

SEQ ID NO: 2844647 - RNA, 19 nt, Artificial Sequence
  Description of Artificial Sequence: Synthetic oligonucleotide
aggccggagccacggaccg

SEQ ID NO: 2844648 - RNA, 19 nt, Artificial Sequence
  Description of Artificial Sequence: Synthetic oligonucleotide
uugccgccgagaaggccgg

SEQ ID NO: 2844649 - RNA, 19 nt, Artificial Sequence
  Description of Artificial Sequence: Synthetic oligonucleotide
guaccuuccuccaagggua

SEQ ID NO: 2844650 - RNA, 19 nt, Artificial Sequence
  Description of Artificial Sequence: Synthetic oligonucleotide
ugggguugccgccgagaag

SEQ ID NO: 2844651 - RNA, 19 nt, Artificial Sequence
  Description of Artificial Sequence: Synthetic oligonucleotide
gcucauuggucaauagucc

SEQ ID NO: 2844652 - RNA, 19 nt, Artificial Sequence
  Description of Artificial Sequence: Synthetic oligonucleotide
gguuggaggaccggaaagc

SEQ ID NO: 2844653 - RNA, 19 nt, Artificial Sequence
  Description of Artificial Sequence: Synthetic oligonucleotide
caagcugcgccguccuuug

SEQ ID NO: 2844654 - RNA, 19 nt, Artificial Sequence
  Description of Artificial Sequence: Synthetic oligonucleotide
gauccagcucugccgccag

SEQ ID NO: 2844655 - RNA, 19 nt, Artificial Sequence
  Description of Artificial Sequence: Synthetic oligonucleotide
aagagcccuugggacagug

SEQ ID NO: 2844656 - RNA, 19 nt, Artificial Sequence
  Description of Artificial Sequence: Synthetic oligonucleotide
uaaggcgcgcucgucuagc

SEQ ID NO: 2844657 - RNA, 19 nt, Artificial Sequence
  Description of Artificial Sequence: Synthetic oligonucleotide
ggucagagggcugagccgc

SEQ ID NO: 2844658 - RNA, 19 nt, Artificial Sequence
  Description of Artificial Sequence: Synthetic oligonucleotide
caggaagggugcagcgucc

SEQ ID NO: 2844659 - RNA, 19 nt, Artificial Sequence
  Description of Artificial Sequence: Synthetic oligonucleotide
gaagggugcagcguccgga

SEQ ID NO: 2844660 - RNA, 19 nt, Artificial Sequence
  Description of Artificial Sequence: Synthetic oligonucleotide
gagccacggaccgagcagc

SEQ ID NO: 2844661 - RNA, 19 nt, Artificial Sequence
  Description of Artificial Sequence: Synthetic oligonucleotide
auaucccaguacaagggau

SEQ ID NO: 2844662 - RNA, 19 nt, Artificial Sequence
  Description of Artificial Sequence: Synthetic oligonucleotide
uugcaggcacacagaguac

SEQ ID NO: 2844663 - RNA, 19 nt, Artificial Sequence
  Description of Artificial Sequence: Synthetic oligonucleotide
acuaaggcgcgcucgucua

SEQ ID NO: 2844664 - RNA, 19 nt, Artificial Sequence
  Description of Artificial Sequence: Synthetic oligonucleotide
cagcucacuuugaggagug

SEQ ID NO: 2844665 - RNA, 19 nt, Artificial Sequence
  Description of Artificial Sequence: Synthetic oligonucleotide
cuagccggaagcaggucca

SEQ ID NO: 2844666 - RNA, 19 nt, Artificial Sequence
  Description of Artificial Sequence: Synthetic oligonucleotide
aagcugcgccguccuuugg

SEQ ID NO: 2844667 - RNA, 19 nt, Artificial Sequence
  Description of Artificial Sequence: Synthetic oligonucleotide
cacagaguaccuuccucca

SEQ ID NO: 2844668 - RNA, 19 nt, Artificial Sequence
  Description of Artificial Sequence: Synthetic oligonucleotide
acagaguaccuuccuccaa

SEQ ID NO: 2844669 - RNA, 19 nt, Artificial Sequence
  Description of Artificial Sequence: Synthetic oligonucleotide
aggaagggugcagcguccg

SEQ ID NO: 2844670 - RNA, 19 nt, Artificial Sequence
  Description of Artificial Sequence: Synthetic oligonucleotide
agcauuccuggcccaacaa

SEQ ID NO: 2844671 - RNA, 19 nt, Artificial Sequence
  Description of Artificial Sequence: Synthetic oligonucleotide
cagaacacauaucccagua

SEQ ID NO: 2844672 - RNA, 19 nt, Artificial Sequence
  Description of Artificial Sequence: Synthetic oligonucleotide
guccggaccgcgcacgcgc

SEQ ID NO: 2844673 - RNA, 19 nt, Artificial Sequence
  Description of Artificial Sequence: Synthetic oligonucleotide
gccggaagcagguccaagc

SEQ ID NO: 2844674 - RNA, 19 nt, Artificial Sequence
  Description of Artificial Sequence: Synthetic oligonucleotide
ugagccgcgccgguuggag

SEQ ID NO: 2844675 - RNA, 19 nt, Artificial Sequence
  Description of Artificial Sequence: Synthetic oligonucleotide
cuaaggcgcgcucgucuag

SEQ ID NO: 2844676 - RNA, 19 nt, Artificial Sequence
  Description of Artificial Sequence: Synthetic oligonucleotide
cugucccuguggcucacag

SEQ ID NO: 2844677 - RNA, 19 nt, Artificial Sequence
  Description of Artificial Sequence: Synthetic oligonucleotide
ggagccacggaccgagcag

SEQ ID NO: 2844678 - RNA, 19 nt, Artificial Sequence
  Description of Artificial Sequence: Synthetic oligonucleotide
cucgucuagccggaagcag

SEQ ID NO: 2844679 - RNA, 19 nt, Artificial Sequence
  Description of Artificial Sequence: Synthetic oligonucleotide
gcucacuuugaggagugag

SEQ ID NO: 2844680 - RNA, 19 nt, Artificial Sequence
  Description of Artificial Sequence: Synthetic oligonucleotide
agccgcgccgguuggagga

SEQ ID NO: 2844681 - RNA, 19 nt, Artificial Sequence
  Description of Artificial Sequence: Synthetic oligonucleotide
gcagguccaagcugcgccg

SEQ ID NO: 2844682 - RNA, 19 nt, Artificial Sequence
  Description of Artificial Sequence: Synthetic oligonucleotide
agcccuugggacaguggac

SEQ ID NO: 2844683 - RNA, 19 nt, Artificial Sequence
  Description of Artificial Sequence: Synthetic oligonucleotide
auccaaccuccccacccug

SEQ ID NO: 2844684 - RNA, 19 nt, Artificial Sequence
  Description of Artificial Sequence: Synthetic oligonucleotide
aguggacaugcugucccug

SEQ ID NO: 2844685 - RNA, 19 nt, Artificial Sequence
  Description of Artificial Sequence: Synthetic oligonucleotide
aggcgcgcucgucuagccg

SEQ ID NO: 2844686 - RNA, 19 nt, Artificial Sequence
  Description of Artificial Sequence: Synthetic oligonucleotide
caauucccacccugagaug

SEQ ID NO: 2844687 - RNA, 19 nt, Artificial Sequence
  Description of Artificial Sequence: Synthetic oligonucleotide
cacuucgggauccagcucu

SEQ ID NO: 2844688 - RNA, 19 nt, Artificial Sequence
  Description of Artificial Sequence: Synthetic oligonucleotide
gauccaaccuccccacccu

SEQ ID NO: 2844689 - RNA, 19 nt, Artificial Sequence
  Description of Artificial Sequence: Synthetic oligonucleotide
accgagcagcacuucggga

SEQ ID NO: 2844690 - RNA, 19 nt, Artificial Sequence
  Description of Artificial Sequence: Synthetic oligonucleotide
uaccuuccuccaaggguaa

SEQ ID NO: 2844691 - RNA, 19 nt, Artificial Sequence
  Description of Artificial Sequence: Synthetic oligonucleotide
cguccuuugggguugccgc

SEQ ID NO: 2844692 - RNA, 19 nt, Artificial Sequence
  Description of Artificial Sequence: Synthetic oligonucleotide
gcugcgccguccuuugggg

SEQ ID NO: 2844693 - RNA, 19 nt, Artificial Sequence
  Description of Artificial Sequence: Synthetic oligonucleotide
ggaccgagcagcacuucgg

SEQ ID NO: 2844694 - RNA, 19 nt, Artificial Sequence
  Description of Artificial Sequence: Synthetic oligonucleotide
ccaacaggaagggugcagc

SEQ ID NO: 2844695 - RNA, 19 nt, Artificial Sequence
  Description of Artificial Sequence: Synthetic oligonucleotide
ugcgccguccuuugggguu

SEQ ID NO: 2844696 - RNA, 19 nt, Artificial Sequence
  Description of Artificial Sequence: Synthetic oligonucleotide
gcgcacgcgcacuaaggcg

SEQ ID NO: 2844697 - RNA, 19 nt, Artificial Sequence
  Description of Artificial Sequence: Synthetic oligonucleotide
gagccgcgccgguuggagg

SEQ ID NO: 2844698 - RNA, 19 nt, Artificial Sequence
  Description of Artificial Sequence: Synthetic oligonucleotide
gcauuccuggcccaacaac

SEQ ID NO: 2844699 - RNA, 19 nt, Artificial Sequence
  Description of Artificial Sequence: Synthetic oligonucleotide
cccaacaauucccacccug

SEQ ID NO: 2844700 - RNA, 19 nt, Artificial Sequence
  Description of Artificial Sequence: Synthetic oligonucleotide
gaggagugagaagagcccu

SEQ ID NO: 2844701 - RNA, 19 nt, Artificial Sequence
  Description of Artificial Sequence: Synthetic oligonucleotide
cacccugagauguguuuca

SEQ ID NO: 2844702 - RNA, 19 nt, Artificial Sequence
  Description of Artificial Sequence: Synthetic oligonucleotide
agagcccuugggacagugg

SEQ ID NO: 2844703 - RNA, 19 nt, Artificial Sequence
  Description of Artificial Sequence: Synthetic oligonucleotide
ccaacaauucccacccuga

SEQ ID NO: 2844704 - RNA, 19 nt, Artificial Sequence
  Description of Artificial Sequence: Synthetic oligonucleotide
ggcacacagaguaccuucc

SEQ ID NO: 2844705 - RNA, 19 nt, Artificial Sequence
  Description of Artificial Sequence: Synthetic oligonucleotide
cugcacacaacccaacaau

SEQ ID NO: 2844706 - RNA, 19 nt, Artificial Sequence
  Description of Artificial Sequence: Synthetic oligonucleotide
cgcacgcgcacuaaggcgc

SEQ ID NO: 2844707 - RNA, 19 nt, Artificial Sequence
  Description of Artificial Sequence: Synthetic oligonucleotide
agccgcgccccggagcagc

SEQ ID NO: 2844708 - RNA, 19 nt, Artificial Sequence
  Description of Artificial Sequence: Synthetic oligonucleotide
agcguccggaccgcgcacg

SEQ ID NO: 2844709 - RNA, 19 nt, Artificial Sequence
  Description of Artificial Sequence: Synthetic oligonucleotide
ucccaguacaagggaucca

SEQ ID NO: 2844710 - RNA, 19 nt, Artificial Sequence
  Description of Artificial Sequence: Synthetic oligonucleotide
ggaagggugcagcguccgg

SEQ ID NO: 2844711 - RNA, 19 nt, Artificial Sequence
  Description of Artificial Sequence: Synthetic oligonucleotide
gcacacaacccaacaauuc

SEQ ID NO: 2844712 - RNA, 19 nt, Artificial Sequence
  Description of Artificial Sequence: Synthetic oligonucleotide
cuguggcucacagaacaca

SEQ ID NO: 2844713 - RNA, 19 nt, Artificial Sequence
  Description of Artificial Sequence: Synthetic oligonucleotide
auuccuggcccaacaacuu

SEQ ID NO: 2844714 - RNA, 19 nt, Artificial Sequence
  Description of Artificial Sequence: Synthetic oligonucleotide
caacaacuuugcaggcaca

SEQ ID NO: 2844715 - RNA, 19 nt, Artificial Sequence
  Description of Artificial Sequence: Synthetic oligonucleotide
ccuggcccaacaacuuugc

SEQ ID NO: 2844716 - RNA, 19 nt, Artificial Sequence
  Description of Artificial Sequence: Synthetic oligonucleotide
uccggaccgcgcacgcgca

SEQ ID NO: 2844717 - RNA, 19 nt, Artificial Sequence
  Description of Artificial Sequence: Synthetic oligonucleotide
acccugcacacaacccaac

SEQ ID NO: 2844718 - RNA, 19 nt, Artificial Sequence
  Description of Artificial Sequence: Synthetic oligonucleotide
uagucccaacaggaagggu

SEQ ID NO: 2844719 - RNA, 19 nt, Artificial Sequence
  Description of Artificial Sequence: Synthetic oligonucleotide
accggaaagcgggcagcuc

SEQ ID NO: 2844720 - RNA, 19 nt, Artificial Sequence
  Description of Artificial Sequence: Synthetic oligonucleotide
cacccugcacacaacccaa

SEQ ID NO: 2844721 - RNA, 19 nt, Artificial Sequence
  Description of Artificial Sequence: Synthetic oligonucleotide
agaaggccggagccacgga

SEQ ID NO: 2844722 - RNA, 19 nt, Artificial Sequence
  Description of Artificial Sequence: Synthetic oligonucleotide
ggcugagccgcgccgguug

SEQ ID NO: 2844723 - RNA, 19 nt, Artificial Sequence
  Description of Artificial Sequence: Synthetic oligonucleotide
cuuugcaggcacacagagu

SEQ ID NO: 2844724 - RNA, 19 nt, Artificial Sequence
  Description of Artificial Sequence: Synthetic oligonucleotide
cccugagauguguuucaag

SEQ ID NO: 2844725 - RNA, 19 nt, Artificial Sequence
  Description of Artificial Sequence: Synthetic oligonucleotide
caaccuccccacccugcac

SEQ ID NO: 2844726 - RNA, 19 nt, Artificial Sequence
  Description of Artificial Sequence: Synthetic oligonucleotide
ucccaacaggaagggugca

SEQ ID NO: 2844727 - RNA, 19 nt, Artificial Sequence
  Description of Artificial Sequence: Synthetic oligonucleotide
cccacccugcacacaaccc

SEQ ID NO: 2844728 - RNA, 19 nt, Artificial Sequence
  Description of Artificial Sequence: Synthetic oligonucleotide
cuucgggauccagcucugc

SEQ ID NO: 2844729 - RNA, 19 nt, Artificial Sequence
  Description of Artificial Sequence: Synthetic oligonucleotide
ucccacccugagauguguu

SEQ ID NO: 2844730 - RNA, 19 nt, Artificial Sequence
  Description of Artificial Sequence: Synthetic oligonucleotide
cacuaaggcgcgcucgucu

SEQ ID NO: 2844731 - RNA, 19 nt, Artificial Sequence
  Description of Artificial Sequence: Synthetic oligonucleotide
cgcucgucuagccggaagc

SEQ ID NO: 2844732 - RNA, 19 nt, Artificial Sequence
  Description of Artificial Sequence: Synthetic oligonucleotide
acccaacaauucccacccu

SEQ ID NO: 2844733 - RNA, 19 nt, Artificial Sequence
  Description of Artificial Sequence: Synthetic oligonucleotide
agccggaagcagguccaag

SEQ ID NO: 2844734 - RNA, 19 nt, Artificial Sequence
  Description of Artificial Sequence: Synthetic oligonucleotide
gguccaagcugcgccgucc

SEQ ID NO: 2844735 - RNA, 19 nt, Artificial Sequence
  Description of Artificial Sequence: Synthetic oligonucleotide
acuucgggauccagcucug

SEQ ID NO: 2844736 - RNA, 19 nt, Artificial Sequence
  Description of Artificial Sequence: Synthetic oligonucleotide
ccuguggcucacagaacac

SEQ ID NO: 2844737 - RNA, 19 nt, Artificial Sequence
  Description of Artificial Sequence: Synthetic oligonucleotide
ccaguacaagggauccaac

SEQ ID NO: 2844738 - RNA, 19 nt, Artificial Sequence
  Description of Artificial Sequence: Synthetic oligonucleotide
gcccaacaacuuugcaggc

SEQ ID NO: 2844739 - RNA, 19 nt, Artificial Sequence
  Description of Artificial Sequence: Synthetic oligonucleotide
ccggaaagcgggcagcuca

SEQ ID NO: 2844740 - RNA, 19 nt, Artificial Sequence
  Description of Artificial Sequence: Synthetic oligonucleotide
cuuccacgccccgcagccg

SEQ ID NO: 2844741 - RNA, 19 nt, Artificial Sequence
  Description of Artificial Sequence: Synthetic oligonucleotide
caggccgggcuuccacgcc

SEQ ID NO: 2844742 - RNA, 19 nt, Artificial Sequence
  Description of Artificial Sequence: Synthetic oligonucleotide
uccccacccugcacacaac

SEQ ID NO: 2844743 - RNA, 19 nt, Artificial Sequence
  Description of Artificial Sequence: Synthetic oligonucleotide
cuccaaggguaaacaaggu

SEQ ID NO: 2844744 - RNA, 19 nt, Artificial Sequence
  Description of Artificial Sequence: Synthetic oligonucleotide
ccccacccugcacacaacc

SEQ ID NO: 2844745 - RNA, 19 nt, Artificial Sequence
  Description of Artificial Sequence: Synthetic oligonucleotide
gccggagccacggaccgag

SEQ ID NO: 2844746 - RNA, 19 nt, Artificial Sequence
  Description of Artificial Sequence: Synthetic oligonucleotide
gcugagccgcgccgguugg

SEQ ID NO: 2844747 - RNA, 19 nt, Artificial Sequence
  Description of Artificial Sequence: Synthetic oligonucleotide
gcccuugggacaguggaca

SEQ ID NO: 2844748 - RNA, 19 nt, Artificial Sequence
  Description of Artificial Sequence: Synthetic oligonucleotide
ggagcagcgccgcgacugc

SEQ ID NO: 2844749 - RNA, 19 nt, Artificial Sequence
  Description of Artificial Sequence: Synthetic oligonucleotide
gcgcacuaaggcgcgcucg

SEQ ID NO: 2844750 - RNA, 19 nt, Artificial Sequence
  Description of Artificial Sequence: Synthetic oligonucleotide
ggaccggaaagcgggcagc

SEQ ID NO: 2844751 - RNA, 19 nt, Artificial Sequence
  Description of Artificial Sequence: Synthetic oligonucleotide
aggagugagaagagcccuu

SEQ ID NO: 2844752 - RNA, 19 nt, Artificial Sequence
  Description of Artificial Sequence: Synthetic oligonucleotide
acggaccgagcagcacuuc

SEQ ID NO: 2844753 - RNA, 19 nt, Artificial Sequence
  Description of Artificial Sequence: Synthetic oligonucleotide
uccaagcugcgccguccuu

SEQ ID NO: 2844754 - RNA, 19 nt, Artificial Sequence
  Description of Artificial Sequence: Synthetic oligonucleotide
acccugagauguguuucaa

SEQ ID NO: 2844755 - RNA, 19 nt, Artificial Sequence
  Description of Artificial Sequence: Synthetic oligonucleotide
cggaccgagcagcacuucg

SEQ ID NO: 2844756 - RNA, 19 nt, Artificial Sequence
  Description of Artificial Sequence: Synthetic oligonucleotide
gggauccaaccuccccacc

SEQ ID NO: 2844757 - RNA, 19 nt, Artificial Sequence
  Description of Artificial Sequence: Synthetic oligonucleotide
ccugcacacaacccaacaa

SEQ ID NO: 2844758 - RNA, 19 nt, Artificial Sequence
  Description of Artificial Sequence: Synthetic oligonucleotide
acgcgcacuaaggcgcgcu

SEQ ID NO: 2844759 - RNA, 19 nt, Artificial Sequence
  Description of Artificial Sequence: Synthetic oligonucleotide
gcagccgcgccccggagca

SEQ ID NO: 2844760 - RNA, 19 nt, Artificial Sequence
  Description of Artificial Sequence: Synthetic oligonucleotide
gcagcguccggaccgcgca

SEQ ID NO: 2844761 - RNA, 19 nt, Artificial Sequence
  Description of Artificial Sequence: Synthetic oligonucleotide
cccaacaggaagggugcag

SEQ ID NO: 2844762 - RNA, 19 nt, Artificial Sequence
  Description of Artificial Sequence: Synthetic oligonucleotide
ccguccuuugggguugccg

SEQ ID NO: 2844763 - RNA, 19 nt, Artificial Sequence
  Description of Artificial Sequence: Synthetic oligonucleotide
gcgcucgucuagccggaag

SEQ ID NO: 2844764 - RNA, 19 nt, Artificial Sequence
  Description of Artificial Sequence: Synthetic oligonucleotide
ggaggaccggaaagcgggc

SEQ ID NO: 2844765 - RNA, 19 nt, Artificial Sequence
  Description of Artificial Sequence: Synthetic oligonucleotide
gguugccgccgagaaggcc

SEQ ID NO: 2844766 - RNA, 19 nt, Artificial Sequence
  Description of Artificial Sequence: Synthetic oligonucleotide
cccaguacaagggauccaa

SEQ ID NO: 2844767 - RNA, 19 nt, Artificial Sequence
  Description of Artificial Sequence: Synthetic oligonucleotide
gaccggaaagcgggcagcu

SEQ ID NO: 2844768 - RNA, 19 nt, Artificial Sequence
  Description of Artificial Sequence: Synthetic oligonucleotide
uagccggaagcagguccaa

SEQ ID NO: 2844769 - RNA, 19 nt, Artificial Sequence
  Description of Artificial Sequence: Synthetic oligonucleotide
ccgagaaggccggagccac

SEQ ID NO: 2844770 - RNA, 19 nt, Artificial Sequence
  Description of Artificial Sequence: Synthetic oligonucleotide
ggugcagcguccggaccgc

SEQ ID NO: 2844771 - RNA, 19 nt, Artificial Sequence
  Description of Artificial Sequence: Synthetic oligonucleotide
ccgccgagaaggccggagc

SEQ ID NO: 2844772 - RNA, 19 nt, Artificial Sequence
  Description of Artificial Sequence: Synthetic oligonucleotide
gcacgcgcacuaaggcgcg

SEQ ID NO: 2844773 - RNA, 19 nt, Artificial Sequence
  Description of Artificial Sequence: Synthetic oligonucleotide
cgccgagaaggccggagcc

SEQ ID NO: 2844774 - RNA, 19 nt, Artificial Sequence
  Description of Artificial Sequence: Synthetic oligonucleotide
gcagcucacuuugaggagu

SEQ ID NO: 2844775 - RNA, 19 nt, Artificial Sequence
  Description of Artificial Sequence: Synthetic oligonucleotide
gcucgucuagccggaagca

SEQ ID NO: 2844776 - RNA, 19 nt, Artificial Sequence
  Description of Artificial Sequence: Synthetic oligonucleotide
cagcguccggaccgcgcac

SEQ ID NO: 2844777 - RNA, 19 nt, Artificial Sequence
  Description of Artificial Sequence: Synthetic oligonucleotide
cacgccccgcagccgcgcc

SEQ ID NO: 2844778 - RNA, 19 nt, Artificial Sequence
  Description of Artificial Sequence: Synthetic oligonucleotide
ccuugggacaguggacaug

SEQ ID NO: 2844779 - RNA, 19 nt, Artificial Sequence
  Description of Artificial Sequence: Synthetic oligonucleotide
gucuagccggaagcagguc

SEQ ID NO: 2844780 - RNA, 19 nt, Artificial Sequence
  Description of Artificial Sequence: Synthetic oligonucleotide
ggcagcucauuggucaaua

SEQ ID NO: 2844781 - RNA, 19 nt, Artificial Sequence
  Description of Artificial Sequence: Synthetic oligonucleotide
agccacggaccgagcagca

SEQ ID NO: 2844782 - RNA, 19 nt, Artificial Sequence
  Description of Artificial Sequence: Synthetic oligonucleotide
cccugcacacaacccaaca

SEQ ID NO: 2844783 - RNA, 19 nt, Artificial Sequence
  Description of Artificial Sequence: Synthetic oligonucleotide
gugcagcguccggaccgcg

SEQ ID NO: 2844784 - RNA, 19 nt, Artificial Sequence
  Description of Artificial Sequence: Synthetic oligonucleotide
ccgagcagcacuucgggau

SEQ ID NO: 2844785 - RNA, 19 nt, Artificial Sequence
  Description of Artificial Sequence: Synthetic oligonucleotide
gcacuucgggauccagcuc

SEQ ID NO: 2844786 - RNA, 19 nt, Artificial Sequence
  Description of Artificial Sequence: Synthetic oligonucleotide
accuuccuccaaggguaaa

SEQ ID NO: 2844787 - RNA, 19 nt, Artificial Sequence
  Description of Artificial Sequence: Synthetic oligonucleotide
cggagcagcgccgcgacug

SEQ ID NO: 2844788 - RNA, 19 nt, Artificial Sequence
  Description of Artificial Sequence: Synthetic oligonucleotide
cgagaaggccggagccacg

SEQ ID NO: 2844789 - RNA, 19 nt, Artificial Sequence
  Description of Artificial Sequence: Synthetic oligonucleotide
cacgcgcacuaaggcgcgc

SEQ ID NO: 2844790 - RNA, 19 nt, Artificial Sequence
  Description of Artificial Sequence: Synthetic oligonucleotide
gcacacagaguaccuuccu

SEQ ID NO: 2844791 - RNA, 19 nt, Artificial Sequence
  Description of Artificial Sequence: Synthetic oligonucleotide
ccagcauuccuggcccaac

SEQ ID NO: 2844792 - RNA, 19 nt, Artificial Sequence
  Description of Artificial Sequence: Synthetic oligonucleotide
gccgagaaggccggagcca

SEQ ID NO: 2844793 - RNA, 19 nt, Artificial Sequence
  Description of Artificial Sequence: Synthetic oligonucleotide
cacggaccgagcagcacuu

SEQ ID NO: 2844794 - RNA, 19 nt, Artificial Sequence
  Description of Artificial Sequence: Synthetic oligonucleotide
gcguccggaccgcgcacgc

SEQ ID NO: 2844795 - RNA, 19 nt, Artificial Sequence
  Description of Artificial Sequence: Synthetic oligonucleotide
cgcgccgguuggaggaccg

SEQ ID NO: 2844796 - RNA, 19 nt, Artificial Sequence
  Description of Artificial Sequence: Synthetic oligonucleotide
ccggaagcagguccaagcu

SEQ ID NO: 2844797 - RNA, 19 nt, Artificial Sequence
  Description of Artificial Sequence: Synthetic oligonucleotide
ccacggaccgagcagcacu

SEQ ID NO: 2844798 - RNA, 19 nt, Artificial Sequence
  Description of Artificial Sequence: Synthetic oligonucleotide
ggguugccgccgagaaggc

SEQ ID NO: 2844799 - RNA, 19 nt, Artificial Sequence
  Description of Artificial Sequence: Synthetic oligonucleotide
cugcgccguccuuuggggu

SEQ ID NO: 2844800 - RNA, 19 nt, Artificial Sequence
  Description of Artificial Sequence: Synthetic oligonucleotide
gcacuaaggcgcgcucguc

SEQ ID NO: 2844801 - RNA, 19 nt, Artificial Sequence
  Description of Artificial Sequence: Synthetic oligonucleotide
ccgguuggaggaccggaaa

SEQ ID NO: 2844802 - RNA, 19 nt, Artificial Sequence
  Description of Artificial Sequence: Synthetic oligonucleotide
gaccgcgcacgcgcacuaa

SEQ ID NO: 2844803 - RNA, 19 nt, Artificial Sequence
  Description of Artificial Sequence: Synthetic oligonucleotide
gccgguuggaggaccggaa

SEQ ID NO: 2844804 - RNA, 19 nt, Artificial Sequence
  Description of Artificial Sequence: Synthetic oligonucleotide
gaagagcccuugggacagu

SEQ ID NO: 2844805 - RNA, 19 nt, Artificial Sequence
  Description of Artificial Sequence: Synthetic oligonucleotide
gccacggaccgagcagcac

SEQ ID NO: 2844806 - RNA, 19 nt, Artificial Sequence
  Description of Artificial Sequence: Synthetic oligonucleotide
ggaccgcgcacgcgcacua

SEQ ID NO: 2844807 - RNA, 19 nt, Artificial Sequence
  Description of Artificial Sequence: Synthetic oligonucleotide
caggcacacagaguaccuu

SEQ ID NO: 2844808 - RNA, 19 nt, Artificial Sequence
  Description of Artificial Sequence: Synthetic oligonucleotide
cgcagccgcgccccggagc

SEQ ID NO: 2844809 - RNA, 19 nt, Artificial Sequence
  Description of Artificial Sequence: Synthetic oligonucleotide
cugagccgcgccgguugga

SEQ ID NO: 2844810 - RNA, 19 nt, Artificial Sequence
  Description of Artificial Sequence: Synthetic oligonucleotide
gcgccgguuggaggaccgg

SEQ ID NO: 2844811 - RNA, 19 nt, Artificial Sequence
  Description of Artificial Sequence: Synthetic oligonucleotide
cgggcuuccacgccccgca

SEQ ID NO: 2844812 - RNA, 19 nt, Artificial Sequence
  Description of Artificial Sequence: Synthetic oligonucleotide
cgucuagccggaagcaggu

SEQ ID NO: 2844813 - RNA, 19 nt, Artificial Sequence
  Description of Artificial Sequence: Synthetic oligonucleotide
cggagccacggaccgagca

SEQ ID NO: 2844814 - RNA, 19 nt, Artificial Sequence
  Description of Artificial Sequence: Synthetic oligonucleotide
gccgcgccccggagcagcg

SEQ ID NO: 2844815 - RNA, 19 nt, Artificial Sequence
  Description of Artificial Sequence: Synthetic oligonucleotide
ccgggcuuccacgccccgc

SEQ ID NO: 2844816 - RNA, 19 nt, Artificial Sequence
  Description of Artificial Sequence: Synthetic oligonucleotide
ccggagccacggaccgagc

SEQ ID NO: 2844817 - RNA, 19 nt, Artificial Sequence
  Description of Artificial Sequence: Synthetic oligonucleotide
cagguccaagcugcgccgu

SEQ ID NO: 2844818 - RNA, 19 nt, Artificial Sequence
  Description of Artificial Sequence: Synthetic oligonucleotide
cgcgcacuaaggcgcgcuc

SEQ ID NO: 2844819 - RNA, 19 nt, Artificial Sequence
  Description of Artificial Sequence: Synthetic oligonucleotide
cagccgcgccccggagcag

SEQ ID NO: 2844820 - RNA, 19 nt, Artificial Sequence
  Description of Artificial Sequence: Synthetic oligonucleotide
cguccggaccgcgcacgcg

SEQ ID NO: 2844821 - RNA, 19 nt, Artificial Sequence
  Description of Artificial Sequence: Synthetic oligonucleotide
ccggaccgcgcacgcgcac

SEQ ID NO: 2844822 - RNA, 19 nt, Artificial Sequence
  Description of Artificial Sequence: Synthetic oligonucleotide
ccaagcugcgccguccuuu

SEQ ID NO: 2844823 - RNA, 19 nt, Artificial Sequence
  Description of Artificial Sequence: Synthetic oligonucleotide
cgcacuaaggcgcgcucgu

SEQ ID NO: 2844824 - RNA, 19 nt, Artificial Sequence
  Description of Artificial Sequence: Synthetic oligonucleotide
ccgcgccgguuggaggacc

SEQ ID NO: 2844825 - RNA, 19 nt, Artificial Sequence
  Description of Artificial Sequence: Synthetic oligonucleotide
ccacgccccgcagccgcgc

SEQ ID NO: 2844826 - RNA, 19 nt, Artificial Sequence
  Description of Artificial Sequence: Synthetic oligonucleotide
gccgcgccgguuggaggac

SEQ ID NO: 2844827 - RNA, 19 nt, Artificial Sequence
  Description of Artificial Sequence: Synthetic oligonucleotide
cccuugggacaguggacau

SEQ ID NO: 2844828 - RNA, 19 nt, Artificial Sequence
  Description of Artificial Sequence: Synthetic oligonucleotide
gccguccuuugggguugcc

SEQ ID NO: 2844829 - RNA, 19 nt, Artificial Sequence
  Description of Artificial Sequence: Synthetic oligonucleotide
gcgcgcucgucuagccgga

SEQ ID NO: 2844830 - RNA, 19 nt, Artificial Sequence
  Description of Artificial Sequence: Synthetic oligonucleotide
ggaaagcgggcagcucauu

SEQ ID NO: 2844831 - RNA, 19 nt, Artificial Sequence
  Description of Artificial Sequence: Synthetic oligonucleotide
ggccggagccacggaccga

SEQ ID NO: 2844832 - RNA, 19 nt, Artificial Sequence
  Description of Artificial Sequence: Synthetic oligonucleotide
ccgcagccgcgccccggag

SEQ ID NO: 2844833 - RNA, 19 nt, Artificial Sequence
  Description of Artificial Sequence: Synthetic oligonucleotide
gggcagcucauuggucaau

SEQ ID NO: 2844834 - RNA, 19 nt, Artificial Sequence
  Description of Artificial Sequence: Synthetic oligonucleotide
cgccccggagcagcgccgc

SEQ ID NO: 2844835 - RNA, 19 nt, Artificial Sequence
  Description of Artificial Sequence: Synthetic oligonucleotide
cggaaagcgggcagcucau

SEQ ID NO: 2844836 - RNA, 19 nt, Artificial Sequence
  Description of Artificial Sequence: Synthetic oligonucleotide
ccgcgccccggagcagcgc

SEQ ID NO: 2844837 - RNA, 19 nt, Artificial Sequence
  Description of Artificial Sequence: Synthetic oligonucleotide
gggcugagccgcgccgguu

SEQ ID NO: 2844838 - RNA, 19 nt, Artificial Sequence
  Description of Artificial Sequence: Synthetic oligonucleotide
cggaccgcgcacgcgcacu

SEQ ID NO: 2844839 - RNA, 19 nt, Artificial Sequence
  Description of Artificial Sequence: Synthetic oligonucleotide
cgcgcucgucuagccggaa

SEQ ID NO: 2844840 - RNA, 19 nt, Artificial Sequence
  Description of Artificial Sequence: Synthetic oligonucleotide
aauaauaucagguuuguaa

SEQ ID NO: 2844841 - RNA, 19 nt, Artificial Sequence
  Description of Artificial Sequence: Synthetic oligonucleotide
aauacugcauugucgauac

SEQ ID NO: 2844842 - RNA, 19 nt, Artificial Sequence
  Description of Artificial Sequence: Synthetic oligonucleotide
aauaauacugcauugucga

SEQ ID NO: 2844843 - RNA, 19 nt, Artificial Sequence
  Description of Artificial Sequence: Synthetic oligonucleotide
acuauuaucgucaagguac

SEQ ID NO: 2844844 - RNA, 19 nt, Artificial Sequence
  Description of Artificial Sequence: Synthetic oligonucleotide
auaacgaccaaacuguaac

SEQ ID NO: 2844845 - RNA, 19 nt, Artificial Sequence
  Description of Artificial Sequence: Synthetic oligonucleotide
uuugcuauaaggaauaaua

SEQ ID NO: 2844846 - RNA, 19 nt, Artificial Sequence
  Description of Artificial Sequence: Synthetic oligonucleotide
ugaaaugccaaaauaauau

SEQ ID NO: 2844847 - RNA, 19 nt, Artificial Sequence
  Description of Artificial Sequence: Synthetic oligonucleotide
aauaagcacaucuagucca

SEQ ID NO: 2844848 - RNA, 19 nt, Artificial Sequence
  Description of Artificial Sequence: Synthetic oligonucleotide
uuuuggaauaagcacaucu

SEQ ID NO: 2844849 - RNA, 19 nt, Artificial Sequence
  Description of Artificial Sequence: Synthetic oligonucleotide
ucauuuaauguuuuggcug

SEQ ID NO: 2844850 - RNA, 19 nt, Artificial Sequence
  Description of Artificial Sequence: Synthetic oligonucleotide
ugguacuucuucuagaaag

SEQ ID NO: 2844851 - RNA, 19 nt, Artificial Sequence
  Description of Artificial Sequence: Synthetic oligonucleotide
aucaauaguaacuugcugu

SEQ ID NO: 2844852 - RNA, 19 nt, Artificial Sequence
  Description of Artificial Sequence: Synthetic oligonucleotide
uccaucaauaguaacuugc

SEQ ID NO: 2844853 - RNA, 19 nt, Artificial Sequence
  Description of Artificial Sequence: Synthetic oligonucleotide
aaagcuccaggauaacgac

SEQ ID NO: 2844854 - RNA, 19 nt, Artificial Sequence
  Description of Artificial Sequence: Synthetic oligonucleotide
ugcauugucgauaccaucc

SEQ ID NO: 2844855 - RNA, 19 nt, Artificial Sequence
  Description of Artificial Sequence: Synthetic oligonucleotide
cuuucgaaaaggaacaaac

SEQ ID NO: 2844856 - RNA, 19 nt, Artificial Sequence
  Description of Artificial Sequence: Synthetic oligonucleotide
uaacuuucgaaaaggaaca

SEQ ID NO: 2844857 - RNA, 19 nt, Artificial Sequence
  Description of Artificial Sequence: Synthetic oligonucleotide
uuggaauaagcacaucuag

SEQ ID NO: 2844858 - RNA, 19 nt, Artificial Sequence
  Description of Artificial Sequence: Synthetic oligonucleotide
aaugccaaaauaauaucag

SEQ ID NO: 2844859 - RNA, 19 nt, Artificial Sequence
  Description of Artificial Sequence: Synthetic oligonucleotide
ugaaguaauuccuuugccc

SEQ ID NO: 2844860 - RNA, 19 nt, Artificial Sequence
  Description of Artificial Sequence: Synthetic oligonucleotide
aaggccauagcguccacac

SEQ ID NO: 2844861 - RNA, 19 nt, Artificial Sequence
  Description of Artificial Sequence: Synthetic oligonucleotide
gaauaauacugcauugucg

SEQ ID NO: 2844862 - RNA, 19 nt, Artificial Sequence
  Description of Artificial Sequence: Synthetic oligonucleotide
aauaucagguuuguaaucu

SEQ ID NO: 2844863 - RNA, 19 nt, Artificial Sequence
  Description of Artificial Sequence: Synthetic oligonucleotide
uuugaaaugccaaaauaau

SEQ ID NO: 2844864 - RNA, 19 nt, Artificial Sequence
  Description of Artificial Sequence: Synthetic oligonucleotide
aacuguaacuuucgaaaag

SEQ ID NO: 2844865 - RNA, 19 nt, Artificial Sequence
  Description of Artificial Sequence: Synthetic oligonucleotide
aaacuuucuguccaugugu

SEQ ID NO: 2844866 - RNA, 19 nt, Artificial Sequence
  Description of Artificial Sequence: Synthetic oligonucleotide
uaaggaauaauacugcauu

SEQ ID NO: 2844867 - RNA, 19 nt, Artificial Sequence
  Description of Artificial Sequence: Synthetic oligonucleotide
cuauaaggaauaauacugc

SEQ ID NO: 2844868 - RNA, 19 nt, Artificial Sequence
  Description of Artificial Sequence: Synthetic oligonucleotide
auuaucgucaagguacugc

SEQ ID NO: 2844869 - RNA, 19 nt, Artificial Sequence
  Description of Artificial Sequence: Synthetic oligonucleotide
uuaauguuuuggcugcuag

SEQ ID NO: 2844870 - RNA, 19 nt, Artificial Sequence
  Description of Artificial Sequence: Synthetic oligonucleotide
aaggaauaauacugcauug

SEQ ID NO: 2844871 - RNA, 19 nt, Artificial Sequence
  Description of Artificial Sequence: Synthetic oligonucleotide
aaaauuccuaggucgacgu

SEQ ID NO: 2844872 - RNA, 19 nt, Artificial Sequence
  Description of Artificial Sequence: Synthetic oligonucleotide
cuuccgaaaggccauagcg

SEQ ID NO: 2844873 - RNA, 19 nt, Artificial Sequence
  Description of Artificial Sequence: Synthetic oligonucleotide
cauuuaauguuuuggcugc

SEQ ID NO: 2844874 - RNA, 19 nt, Artificial Sequence
  Description of Artificial Sequence: Synthetic oligonucleotide
uauaaggaauaauacugca

SEQ ID NO: 2844875 - RNA, 19 nt, Artificial Sequence
  Description of Artificial Sequence: Synthetic oligonucleotide
aaaugccaaaauaauauca

SEQ ID NO: 2844876 - RNA, 19 nt, Artificial Sequence
  Description of Artificial Sequence: Synthetic oligonucleotide
uaguccaucaauaguaacu

SEQ ID NO: 2844877 - RNA, 19 nt, Artificial Sequence
  Description of Artificial Sequence: Synthetic oligonucleotide
gaauaagcacaucuagucc

SEQ ID NO: 2844878 - RNA, 19 nt, Artificial Sequence
  Description of Artificial Sequence: Synthetic oligonucleotide
ugcuauaaggaauaauacu

SEQ ID NO: 2844879 - RNA, 19 nt, Artificial Sequence
  Description of Artificial Sequence: Synthetic oligonucleotide
auaauaucagguuuguaau

SEQ ID NO: 2844880 - RNA, 19 nt, Artificial Sequence
  Description of Artificial Sequence: Synthetic oligonucleotide
ucguaggugaccaugccag

SEQ ID NO: 2844881 - RNA, 19 nt, Artificial Sequence
  Description of Artificial Sequence: Synthetic oligonucleotide
acuguaacuuucgaaaagg

SEQ ID NO: 2844882 - RNA, 19 nt, Artificial Sequence
  Description of Artificial Sequence: Synthetic oligonucleotide
caggauaacgaccaaacug

SEQ ID NO: 2844883 - RNA, 19 nt, Artificial Sequence
  Description of Artificial Sequence: Synthetic oligonucleotide
uugcuauaaggaauaauac

SEQ ID NO: 2844884 - RNA, 19 nt, Artificial Sequence
  Description of Artificial Sequence: Synthetic oligonucleotide
acucgauaaaucuggagug

SEQ ID NO: 2844885 - RNA, 19 nt, Artificial Sequence
  Description of Artificial Sequence: Synthetic oligonucleotide
ucgaaaaggaacaaacuuu

SEQ ID NO: 2844886 - RNA, 19 nt, Artificial Sequence
  Description of Artificial Sequence: Synthetic oligonucleotide
acuucuucuagaaaguguc

SEQ ID NO: 2844887 - RNA, 19 nt, Artificial Sequence
  Description of Artificial Sequence: Synthetic oligonucleotide
aaguaauuccuuugcccuc

SEQ ID NO: 2844888 - RNA, 19 nt, Artificial Sequence
  Description of Artificial Sequence: Synthetic oligonucleotide
uuucgaaaaggaacaaacu

SEQ ID NO: 2844889 - RNA, 19 nt, Artificial Sequence
  Description of Artificial Sequence: Synthetic oligonucleotide
uaaaucuggagugugguac

SEQ ID NO: 2844890 - RNA, 19 nt, Artificial Sequence
  Description of Artificial Sequence: Synthetic oligonucleotide
uugaaaugccaaaauaaua

SEQ ID NO: 2844891 - RNA, 19 nt, Artificial Sequence
  Description of Artificial Sequence: Synthetic oligonucleotide
uccuagacaaguuccacug

SEQ ID NO: 2844892 - RNA, 19 nt, Artificial Sequence
  Description of Artificial Sequence: Synthetic oligonucleotide
uguaacuuucgaaaaggaa

SEQ ID NO: 2844893 - RNA, 19 nt, Artificial Sequence
  Description of Artificial Sequence: Synthetic oligonucleotide
gcuauaaggaauaauacug

SEQ ID NO: 2844894 - RNA, 19 nt, Artificial Sequence
  Description of Artificial Sequence: Synthetic oligonucleotide
acuugcuguaacucuggcc

SEQ ID NO: 2844895 - RNA, 19 nt, Artificial Sequence
  Description of Artificial Sequence: Synthetic oligonucleotide
aaaagcuccaggauaacga

SEQ ID NO: 2844896 - RNA, 19 nt, Artificial Sequence
  Description of Artificial Sequence: Synthetic oligonucleotide
aacuugcuguaacucuggc

SEQ ID NO: 2844897 - RNA, 19 nt, Artificial Sequence
  Description of Artificial Sequence: Synthetic oligonucleotide
caaacuguaacuuucgaaa

SEQ ID NO: 2844898 - RNA, 19 nt, Artificial Sequence
  Description of Artificial Sequence: Synthetic oligonucleotide
uccaggauaacgaccaaac

SEQ ID NO: 2844899 - RNA, 19 nt, Artificial Sequence
  Description of Artificial Sequence: Synthetic oligonucleotide
aguaacuugcuguaacucu

SEQ ID NO: 2844900 - RNA, 19 nt, Artificial Sequence
  Description of Artificial Sequence: Synthetic oligonucleotide
uuuggaauaagcacaucua

SEQ ID NO: 2844901 - RNA, 19 nt, Artificial Sequence
  Description of Artificial Sequence: Synthetic oligonucleotide
aauuccuaggucgacgucu

SEQ ID NO: 2844902 - RNA, 19 nt, Artificial Sequence
  Description of Artificial Sequence: Synthetic oligonucleotide
acaaguuccacugcucagc

SEQ ID NO: 2844903 - RNA, 19 nt, Artificial Sequence
  Description of Artificial Sequence: Synthetic oligonucleotide
uucuuuauaccugcacucg

SEQ ID NO: 2844904 - RNA, 19 nt, Artificial Sequence
  Description of Artificial Sequence: Synthetic oligonucleotide
ugucaaaagcuccaggaua

SEQ ID NO: 2844905 - RNA, 19 nt, Artificial Sequence
  Description of Artificial Sequence: Synthetic oligonucleotide
cugcacucgauaaaucugg

SEQ ID NO: 2844906 - RNA, 19 nt, Artificial Sequence
  Description of Artificial Sequence: Synthetic oligonucleotide
auuccuuugcccucuuccg

SEQ ID NO: 2844907 - RNA, 19 nt, Artificial Sequence
  Description of Artificial Sequence: Synthetic oligonucleotide
aagcacaucuaguccauca

SEQ ID NO: 2844908 - RNA, 19 nt, Artificial Sequence
  Description of Artificial Sequence: Synthetic oligonucleotide
accauccuagacaaguucc

SEQ ID NO: 2844909 - RNA, 19 nt, Artificial Sequence
  Description of Artificial Sequence: Synthetic oligonucleotide
ucaauaguaacuugcugua

SEQ ID NO: 2844910 - RNA, 19 nt, Artificial Sequence
  Description of Artificial Sequence: Synthetic oligonucleotide
uagaaaguguccugggucu

SEQ ID NO: 2844911 - RNA, 19 nt, Artificial Sequence
  Description of Artificial Sequence: Synthetic oligonucleotide
uccuuugagucguagguga

SEQ ID NO: 2844912 - RNA, 19 nt, Artificial Sequence
  Description of Artificial Sequence: Synthetic oligonucleotide
uguaacucuggccugucaa

SEQ ID NO: 2844913 - RNA, 19 nt, Artificial Sequence
  Description of Artificial Sequence: Synthetic oligonucleotide
agugugguacuucuucuag

SEQ ID NO: 2844914 - RNA, 19 nt, Artificial Sequence
  Description of Artificial Sequence: Synthetic oligonucleotide
ugugguacuucuucuagaa

SEQ ID NO: 2844915 - RNA, 19 nt, Artificial Sequence
  Description of Artificial Sequence: Synthetic oligonucleotide
uguguuugaguggaagucc

SEQ ID NO: 2844916 - RNA, 19 nt, Artificial Sequence
  Description of Artificial Sequence: Synthetic oligonucleotide
uacuucuucuagaaagugu

SEQ ID NO: 2844917 - RNA, 19 nt, Artificial Sequence
  Description of Artificial Sequence: Synthetic oligonucleotide
uaggugaccaugccagagg

SEQ ID NO: 2844918 - RNA, 19 nt, Artificial Sequence
  Description of Artificial Sequence: Synthetic oligonucleotide
cuucuuuauaccugcacuc

SEQ ID NO: 2844919 - RNA, 19 nt, Artificial Sequence
  Description of Artificial Sequence: Synthetic oligonucleotide
agcuucuuuauaccugcac

SEQ ID NO: 2844920 - RNA, 19 nt, Artificial Sequence
  Description of Artificial Sequence: Synthetic oligonucleotide
gucgauaccauccuagaca

SEQ ID NO: 2844921 - RNA, 19 nt, Artificial Sequence
  Description of Artificial Sequence: Synthetic oligonucleotide
uuuggcugcuagcugaagu

SEQ ID NO: 2844922 - RNA, 19 nt, Artificial Sequence
  Description of Artificial Sequence: Synthetic oligonucleotide
uuugcccucuuccgaaagg

SEQ ID NO: 2844923 - RNA, 19 nt, Artificial Sequence
  Description of Artificial Sequence: Synthetic oligonucleotide
aggauaacgaccaaacugu

SEQ ID NO: 2844924 - RNA, 19 nt, Artificial Sequence
  Description of Artificial Sequence: Synthetic oligonucleotide
cuagaaaguguccuggguc

SEQ ID NO: 2844925 - RNA, 19 nt, Artificial Sequence
  Description of Artificial Sequence: Synthetic oligonucleotide
ugcuagcugaaguaauucc

SEQ ID NO: 2844926 - RNA, 19 nt, Artificial Sequence
  Description of Artificial Sequence: Synthetic oligonucleotide
ucuuuauaccugcacucga

SEQ ID NO: 2844927 - RNA, 19 nt, Artificial Sequence
  Description of Artificial Sequence: Synthetic oligonucleotide
uacugcauugucgauacca

SEQ ID NO: 2844928 - RNA, 19 nt, Artificial Sequence
  Description of Artificial Sequence: Synthetic oligonucleotide
gaaguaauuccuuugcccu

SEQ ID NO: 2844929 - RNA, 19 nt, Artificial Sequence
  Description of Artificial Sequence: Synthetic oligonucleotide
aacucuggccugucaaaag

SEQ ID NO: 2844930 - RNA, 19 nt, Artificial Sequence
  Description of Artificial Sequence: Synthetic oligonucleotide
ucgauaccauccuagacaa

SEQ ID NO: 2844931 - RNA, 19 nt, Artificial Sequence
  Description of Artificial Sequence: Synthetic oligonucleotide
ugcauuuugaaaugccaaa

SEQ ID NO: 2844932 - RNA, 19 nt, Artificial Sequence
  Description of Artificial Sequence: Synthetic oligonucleotide
acuuucuguccaugugucc

SEQ ID NO: 2844933 - RNA, 19 nt, Artificial Sequence
  Description of Artificial Sequence: Synthetic oligonucleotide
aaauuccuaggucgacguc

SEQ ID NO: 2844934 - RNA, 19 nt, Artificial Sequence
  Description of Artificial Sequence: Synthetic oligonucleotide
uuugagucguaggugacca

SEQ ID NO: 2844935 - RNA, 19 nt, Artificial Sequence
  Description of Artificial Sequence: Synthetic oligonucleotide
uuauaccugcacucgauaa

SEQ ID NO: 2844936 - RNA, 19 nt, Artificial Sequence
  Description of Artificial Sequence: Synthetic oligonucleotide
uaauaucagguuuguaauc

SEQ ID NO: 2844937 - RNA, 19 nt, Artificial Sequence
  Description of Artificial Sequence: Synthetic oligonucleotide
aucgucaagguacugcuga

SEQ ID NO: 2844938 - RNA, 19 nt, Artificial Sequence
  Description of Artificial Sequence: Synthetic oligonucleotide
auagcguccacacuauuau

SEQ ID NO: 2844939 - RNA, 19 nt, Artificial Sequence
  Description of Artificial Sequence: Synthetic oligonucleotide
agcguccacacuauuaucg

SEQ ID NO: 2844940 - RNA, 19 nt, Artificial Sequence
  Description of Artificial Sequence: Synthetic oligonucleotide
gaaggaaugcccgagcuuc

SEQ ID NO: 2844941 - RNA, 19 nt, Artificial Sequence
  Description of Artificial Sequence: Synthetic oligonucleotide
uauaccugcacucgauaaa

SEQ ID NO: 2844942 - RNA, 19 nt, Artificial Sequence
  Description of Artificial Sequence: Synthetic oligonucleotide
guaguuaccgcuucucuca

SEQ ID NO: 2844943 - RNA, 19 nt, Artificial Sequence
  Description of Artificial Sequence: Synthetic oligonucleotide
gugaccaugccagagguag

SEQ ID NO: 2844944 - RNA, 19 nt, Artificial Sequence
  Description of Artificial Sequence: Synthetic oligonucleotide
auugucgauaccauccuag

SEQ ID NO: 2844945 - RNA, 19 nt, Artificial Sequence
  Description of Artificial Sequence: Synthetic oligonucleotide
ucuaguccaucaauaguaa

SEQ ID NO: 2844946 - RNA, 19 nt, Artificial Sequence
  Description of Artificial Sequence: Synthetic oligonucleotide
uuccgaaaggccauagcgu

SEQ ID NO: 2844947 - RNA, 19 nt, Artificial Sequence
  Description of Artificial Sequence: Synthetic oligonucleotide
uccugcauuuugaaaugcc

SEQ ID NO: 2844948 - RNA, 19 nt, Artificial Sequence
  Description of Artificial Sequence: Synthetic oligonucleotide
uucuucuagaaaguguccu

SEQ ID NO: 2844949 - RNA, 19 nt, Artificial Sequence
  Description of Artificial Sequence: Synthetic oligonucleotide
ggucuuuuggaauaagcac

SEQ ID NO: 2844950 - RNA, 19 nt, Artificial Sequence
  Description of Artificial Sequence: Synthetic oligonucleotide
ucuggagugugguacuucu

SEQ ID NO: 2844951 - RNA, 19 nt, Artificial Sequence
  Description of Artificial Sequence: Synthetic oligonucleotide
caaaagcuccaggauaacg

SEQ ID NO: 2844952 - RNA, 19 nt, Artificial Sequence
  Description of Artificial Sequence: Synthetic oligonucleotide
ugucgauaccauccuagac

SEQ ID NO: 2844953 - RNA, 19 nt, Artificial Sequence
  Description of Artificial Sequence: Synthetic oligonucleotide
accugcacucgauaaaucu

SEQ ID NO: 2844954 - RNA, 19 nt, Artificial Sequence
  Description of Artificial Sequence: Synthetic oligonucleotide
gacaaguuccacugcucag

SEQ ID NO: 2844955 - RNA, 19 nt, Artificial Sequence
  Description of Artificial Sequence: Synthetic oligonucleotide
caaacuuucuguccaugug

SEQ ID NO: 2844956 - RNA, 19 nt, Artificial Sequence
  Description of Artificial Sequence: Synthetic oligonucleotide
guuaccgcuucucucauga

SEQ ID NO: 2844957 - RNA, 19 nt, Artificial Sequence
  Description of Artificial Sequence: Synthetic oligonucleotide
gacgucuuugcuauaagga

SEQ ID NO: 2844958 - RNA, 19 nt, Artificial Sequence
  Description of Artificial Sequence: Synthetic oligonucleotide
cuucuucuagaaagugucc

SEQ ID NO: 2844959 - RNA, 19 nt, Artificial Sequence
  Description of Artificial Sequence: Synthetic oligonucleotide
uuuauaccugcacucgaua

SEQ ID NO: 2844960 - RNA, 19 nt, Artificial Sequence
  Description of Artificial Sequence: Synthetic oligonucleotide
guaacuugcuguaacucug

SEQ ID NO: 2844961 - RNA, 19 nt, Artificial Sequence
  Description of Artificial Sequence: Synthetic oligonucleotide
aguccugcauuuugaaaug

SEQ ID NO: 2844962 - RNA, 19 nt, Artificial Sequence
  Description of Artificial Sequence: Synthetic oligonucleotide
gaccaaacuguaacuuucg

SEQ ID NO: 2844963 - RNA, 19 nt, Artificial Sequence
  Description of Artificial Sequence: Synthetic oligonucleotide
acacuauuaucgucaaggu

SEQ ID NO: 2844964 - RNA, 19 nt, Artificial Sequence
  Description of Artificial Sequence: Synthetic oligonucleotide
aggaauaauacugcauugu

SEQ ID NO: 2844965 - RNA, 19 nt, Artificial Sequence
  Description of Artificial Sequence: Synthetic oligonucleotide
caucaauaguaacuugcug

SEQ ID NO: 2844966 - RNA, 19 nt, Artificial Sequence
  Description of Artificial Sequence: Synthetic oligonucleotide
ugcccgagcuucuuuauac

SEQ ID NO: 2844967 - RNA, 19 nt, Artificial Sequence
  Description of Artificial Sequence: Synthetic oligonucleotide
uaacgaccaaacuguaacu

SEQ ID NO: 2844968 - RNA, 19 nt, Artificial Sequence
  Description of Artificial Sequence: Synthetic oligonucleotide
acgucuuugcuauaaggaa

SEQ ID NO: 2844969 - RNA, 19 nt, Artificial Sequence
  Description of Artificial Sequence: Synthetic oligonucleotide
ucgauaaaucuggagugug

SEQ ID NO: 2844970 - RNA, 19 nt, Artificial Sequence
  Description of Artificial Sequence: Synthetic oligonucleotide
gcugaaguaauuccuuugc

SEQ ID NO: 2844971 - RNA, 19 nt, Artificial Sequence
  Description of Artificial Sequence: Synthetic oligonucleotide
uaauacugcauugucgaua

SEQ ID NO: 2844972 - RNA, 19 nt, Artificial Sequence
  Description of Artificial Sequence: Synthetic oligonucleotide
uuguguuugaguggaaguc

SEQ ID NO: 2844973 - RNA, 19 nt, Artificial Sequence
  Description of Artificial Sequence: Synthetic oligonucleotide
ugagucguaggugaccaug

SEQ ID NO: 2844974 - RNA, 19 nt, Artificial Sequence
  Description of Artificial Sequence: Synthetic oligonucleotide
aacaaacuuucuguccaug

SEQ ID NO: 2844975 - RNA, 19 nt, Artificial Sequence
  Description of Artificial Sequence: Synthetic oligonucleotide
ucuuccgaaaggccauagc

SEQ ID NO: 2844976 - RNA, 19 nt, Artificial Sequence
  Description of Artificial Sequence: Synthetic oligonucleotide
accgcuucucucaugaaag

SEQ ID NO: 2844977 - RNA, 19 nt, Artificial Sequence
  Description of Artificial Sequence: Synthetic oligonucleotide
augccagagguaguuaccg

SEQ ID NO: 2844978 - RNA, 19 nt, Artificial Sequence
  Description of Artificial Sequence: Synthetic oligonucleotide
caugccagagguaguuacc

SEQ ID NO: 2844979 - RNA, 19 nt, Artificial Sequence
  Description of Artificial Sequence: Synthetic oligonucleotide
uugucgauaccauccuaga

SEQ ID NO: 2844980 - RNA, 19 nt, Artificial Sequence
  Description of Artificial Sequence: Synthetic oligonucleotide
auccuagacaaguuccacu

SEQ ID NO: 2844981 - RNA, 19 nt, Artificial Sequence
  Description of Artificial Sequence: Synthetic oligonucleotide
caaguuccacugcucagcc

SEQ ID NO: 2844982 - RNA, 19 nt, Artificial Sequence
  Description of Artificial Sequence: Synthetic oligonucleotide
uaccgcuucucucaugaaa

SEQ ID NO: 2844983 - RNA, 19 nt, Artificial Sequence
  Description of Artificial Sequence: Synthetic oligonucleotide
uguuugaguggaaguccug

SEQ ID NO: 2844984 - RNA, 19 nt, Artificial Sequence
  Description of Artificial Sequence: Synthetic oligonucleotide
aggucgacgucuuugcuau

SEQ ID NO: 2844985 - RNA, 19 nt, Artificial Sequence
  Description of Artificial Sequence: Synthetic oligonucleotide
guguccuuugagucguagg

SEQ ID NO: 2844986 - RNA, 19 nt, Artificial Sequence
  Description of Artificial Sequence: Synthetic oligonucleotide
aacgaccaaacuguaacuu

SEQ ID NO: 2844987 - RNA, 19 nt, Artificial Sequence
  Description of Artificial Sequence: Synthetic oligonucleotide
cuaguccaucaauaguaac

SEQ ID NO: 2844988 - RNA, 19 nt, Artificial Sequence
  Description of Artificial Sequence: Synthetic oligonucleotide
aguaauuccuuugcccucu

SEQ ID NO: 2844989 - RNA, 19 nt, Artificial Sequence
  Description of Artificial Sequence: Synthetic oligonucleotide
auaaggaauaauacugcau

SEQ ID NO: 2844990 - RNA, 19 nt, Artificial Sequence
  Description of Artificial Sequence: Synthetic oligonucleotide
ucgacgucuuugcuauaag

SEQ ID NO: 2844991 - RNA, 19 nt, Artificial Sequence
  Description of Artificial Sequence: Synthetic oligonucleotide
uuggcugcuagcugaagua

SEQ ID NO: 2844992 - RNA, 19 nt, Artificial Sequence
  Description of Artificial Sequence: Synthetic oligonucleotide
uaucgucaagguacugcug

SEQ ID NO: 2844993 - RNA, 19 nt, Artificial Sequence
  Description of Artificial Sequence: Synthetic oligonucleotide
uagacaaguuccacugcuc

SEQ ID NO: 2844994 - RNA, 19 nt, Artificial Sequence
  Description of Artificial Sequence: Synthetic oligonucleotide
aguccaucaauaguaacuu

SEQ ID NO: 2844995 - RNA, 19 nt, Artificial Sequence
  Description of Artificial Sequence: Synthetic oligonucleotide
uggccugucaaaagcucca

SEQ ID NO: 2844996 - RNA, 19 nt, Artificial Sequence
  Description of Artificial Sequence: Synthetic oligonucleotide
uaguaacuugcuguaacuc

SEQ ID NO: 2844997 - RNA, 19 nt, Artificial Sequence
  Description of Artificial Sequence: Synthetic oligonucleotide
gauaaaucuggaguguggu

SEQ ID NO: 2844998 - RNA, 19 nt, Artificial Sequence
  Description of Artificial Sequence: Synthetic oligonucleotide
cacucgauaaaucuggagu

SEQ ID NO: 2844999 - RNA, 19 nt, Artificial Sequence
  Description of Artificial Sequence: Synthetic oligonucleotide
uccuaggucgacgucuuug

SEQ ID NO: 2845000 - RNA, 19 nt, Artificial Sequence
  Description of Artificial Sequence: Synthetic oligonucleotide
aaugcccgagcuucuuuau

SEQ ID NO: 2845001 - RNA, 19 nt, Artificial Sequence
  Description of Artificial Sequence: Synthetic oligonucleotide
gaagggcacucccaguuca

SEQ ID NO: 2845002 - RNA, 19 nt, Artificial Sequence
  Description of Artificial Sequence: Synthetic oligonucleotide
ugcugaaggaaugcccgag

SEQ ID NO: 2845003 - RNA, 19 nt, Artificial Sequence
  Description of Artificial Sequence: Synthetic oligonucleotide
ugcacucgauaaaucugga

SEQ ID NO: 2845004 - RNA, 19 nt, Artificial Sequence
  Description of Artificial Sequence: Synthetic oligonucleotide
agcuccaggauaacgacca

SEQ ID NO: 2845005 - RNA, 19 nt, Artificial Sequence
  Description of Artificial Sequence: Synthetic oligonucleotide
cuuugagucguaggugacc

SEQ ID NO: 2845006 - RNA, 19 nt, Artificial Sequence
  Description of Artificial Sequence: Synthetic oligonucleotide
gucaaaagcuccaggauaa

SEQ ID NO: 2845007 - RNA, 19 nt, Artificial Sequence
  Description of Artificial Sequence: Synthetic oligonucleotide
aaauaauaucagguuugua

SEQ ID NO: 2845008 - RNA, 19 nt, Artificial Sequence
  Description of Artificial Sequence: Synthetic oligonucleotide
gagucguaggugaccaugc

SEQ ID NO: 2845009 - RNA, 19 nt, Artificial Sequence
  Description of Artificial Sequence: Synthetic oligonucleotide
accaaacuguaacuuucga

SEQ ID NO: 2845010 - RNA, 19 nt, Artificial Sequence
  Description of Artificial Sequence: Synthetic oligonucleotide
guaggugaccaugccagag

SEQ ID NO: 2845011 - RNA, 19 nt, Artificial Sequence
  Description of Artificial Sequence: Synthetic oligonucleotide
auaaaucuggaguguggua

SEQ ID NO: 2845012 - RNA, 19 nt, Artificial Sequence
  Description of Artificial Sequence: Synthetic oligonucleotide
guacuucuucuagaaagug

SEQ ID NO: 2845013 - RNA, 19 nt, Artificial Sequence
  Description of Artificial Sequence: Synthetic oligonucleotide
auaauacugcauugucgau

SEQ ID NO: 2845014 - RNA, 19 nt, Artificial Sequence
  Description of Artificial Sequence: Synthetic oligonucleotide
guccacacuauuaucguca

SEQ ID NO: 2845015 - RNA, 19 nt, Artificial Sequence
  Description of Artificial Sequence: Synthetic oligonucleotide
ugaaggaaugcccgagcuu

SEQ ID NO: 2845016 - RNA, 19 nt, Artificial Sequence
  Description of Artificial Sequence: Synthetic oligonucleotide
uaggucgacgucuuugcua

SEQ ID NO: 2845017 - RNA, 19 nt, Artificial Sequence
  Description of Artificial Sequence: Synthetic oligonucleotide
auaccugcacucgauaaau

SEQ ID NO: 2845018 - RNA, 19 nt, Artificial Sequence
  Description of Artificial Sequence: Synthetic oligonucleotide
cuguaacuuucgaaaagga

SEQ ID NO: 2845019 - RNA, 19 nt, Artificial Sequence
  Description of Artificial Sequence: Synthetic oligonucleotide
uccugggucuuuuggaaua

SEQ ID NO: 2845020 - RNA, 19 nt, Artificial Sequence
  Description of Artificial Sequence: Synthetic oligonucleotide
acgaccaaacuguaacuuu

SEQ ID NO: 2845021 - RNA, 19 nt, Artificial Sequence
  Description of Artificial Sequence: Synthetic oligonucleotide
uguguccuuugagucguag

SEQ ID NO: 2845022 - RNA, 19 nt, Artificial Sequence
  Description of Artificial Sequence: Synthetic oligonucleotide
agagguaguuaccgcuucu

SEQ ID NO: 2845023 - RNA, 19 nt, Artificial Sequence
  Description of Artificial Sequence: Synthetic oligonucleotide
aacuuucgaaaaggaacaa

SEQ ID NO: 2845024 - RNA, 19 nt, Artificial Sequence
  Description of Artificial Sequence: Synthetic oligonucleotide
gguaguuaccgcuucucuc

SEQ ID NO: 2845025 - RNA, 19 nt, Artificial Sequence
  Description of Artificial Sequence: Synthetic oligonucleotide
uaacucuggccugucaaaa

SEQ ID NO: 2845026 - RNA, 19 nt, Artificial Sequence
  Description of Artificial Sequence: Synthetic oligonucleotide
ugcccucuuccgaaaggcc

SEQ ID NO: 2845027 - RNA, 19 nt, Artificial Sequence
  Description of Artificial Sequence: Synthetic oligonucleotide
uuuaauguuuuggcugcua

SEQ ID NO: 2845028 - RNA, 19 nt, Artificial Sequence
  Description of Artificial Sequence: Synthetic oligonucleotide
gauaacgaccaaacuguaa

SEQ ID NO: 2845029 - RNA, 19 nt, Artificial Sequence
  Description of Artificial Sequence: Synthetic oligonucleotide
uccacacuauuaucgucaa

SEQ ID NO: 2845030 - RNA, 19 nt, Artificial Sequence
  Description of Artificial Sequence: Synthetic oligonucleotide
cuuugcccucuuccgaaag

SEQ ID NO: 2845031 - RNA, 19 nt, Artificial Sequence
  Description of Artificial Sequence: Synthetic oligonucleotide
ccauguguccuuugagucg

SEQ ID NO: 2845032 - RNA, 19 nt, Artificial Sequence
  Description of Artificial Sequence: Synthetic oligonucleotide
aaaggccauagcguccaca

SEQ ID NO: 2845033 - RNA, 19 nt, Artificial Sequence
  Description of Artificial Sequence: Synthetic oligonucleotide
auacugcauugucgauacc

SEQ ID NO: 2845034 - RNA, 19 nt, Artificial Sequence
  Description of Artificial Sequence: Synthetic oligonucleotide
aaguguccugggucuuuug

SEQ ID NO: 2845035 - RNA, 19 nt, Artificial Sequence
  Description of Artificial Sequence: Synthetic oligonucleotide
cauagcguccacacuauua

SEQ ID NO: 2845036 - RNA, 19 nt, Artificial Sequence
  Description of Artificial Sequence: Synthetic oligonucleotide
guccaucaauaguaacuug

SEQ ID NO: 2845037 - RNA, 19 nt, Artificial Sequence
  Description of Artificial Sequence: Synthetic oligonucleotide
uagcugaaguaauuccuuu

SEQ ID NO: 2845038 - RNA, 19 nt, Artificial Sequence
  Description of Artificial Sequence: Synthetic oligonucleotide
ugccagagguaguuaccgc

SEQ ID NO: 2845039 - RNA, 19 nt, Artificial Sequence
  Description of Artificial Sequence: Synthetic oligonucleotide
aagguacugcugaaggaau

SEQ ID NO: 2845040 - RNA, 19 nt, Artificial Sequence
  Description of Artificial Sequence: Synthetic oligonucleotide
gguuuguaaucuugaauaa

SEQ ID NO: 2845041 - RNA, 19 nt, Artificial Sequence
  Description of Artificial Sequence: Synthetic oligonucleotide
auaucagguuuguaaucuu

SEQ ID NO: 2845042 - RNA, 19 nt, Artificial Sequence
  Description of Artificial Sequence: Synthetic oligonucleotide
uauuaucgucaagguacug

SEQ ID NO: 2845043 - RNA, 19 nt, Artificial Sequence
  Description of Artificial Sequence: Synthetic oligonucleotide
aaguuccacugcucagcca

SEQ ID NO: 2845044 - RNA, 19 nt, Artificial Sequence
  Description of Artificial Sequence: Synthetic oligonucleotide
uugcuguaacucuggccug

SEQ ID NO: 2845045 - RNA, 19 nt, Artificial Sequence
  Description of Artificial Sequence: Synthetic oligonucleotide
caagguacugcugaaggaa

SEQ ID NO: 2845046 - RNA, 19 nt, Artificial Sequence
  Description of Artificial Sequence: Synthetic oligonucleotide
gaaugcccgagcuucuuua

SEQ ID NO: 2845047 - RNA, 19 nt, Artificial Sequence
  Description of Artificial Sequence: Synthetic oligonucleotide
gucguaggugaccaugcca

SEQ ID NO: 2845048 - RNA, 19 nt, Artificial Sequence
  Description of Artificial Sequence: Synthetic oligonucleotide
gggucuuuuggaauaagca

SEQ ID NO: 2845049 - RNA, 19 nt, Artificial Sequence
  Description of Artificial Sequence: Synthetic oligonucleotide
cuagacaaguuccacugcu

SEQ ID NO: 2845050 - RNA, 19 nt, Artificial Sequence
  Description of Artificial Sequence: Synthetic oligonucleotide
ccugucaaaagcuccagga

SEQ ID NO: 2845051 - RNA, 19 nt, Artificial Sequence
  Description of Artificial Sequence: Synthetic oligonucleotide
cauccuagacaaguuccac

SEQ ID NO: 2845052 - RNA, 19 nt, Artificial Sequence
  Description of Artificial Sequence: Synthetic oligonucleotide
guacugcugaaggaaugcc

SEQ ID NO: 2845053 - RNA, 19 nt, Artificial Sequence
  Description of Artificial Sequence: Synthetic oligonucleotide
ccuaggucgacgucuuugc

SEQ ID NO: 2845054 - RNA, 19 nt, Artificial Sequence
  Description of Artificial Sequence: Synthetic oligonucleotide
cugcauugucgauaccauc

SEQ ID NO: 2845055 - RNA, 19 nt, Artificial Sequence
  Description of Artificial Sequence: Synthetic oligonucleotide
ucuuugcuauaaggaauaa

SEQ ID NO: 2845056 - RNA, 19 nt, Artificial Sequence
  Description of Artificial Sequence: Synthetic oligonucleotide
guaacucuggccugucaaa

SEQ ID NO: 2845057 - RNA, 19 nt, Artificial Sequence
  Description of Artificial Sequence: Synthetic oligonucleotide
ucuguccauguguccuuug

SEQ ID NO: 2845058 - RNA, 19 nt, Artificial Sequence
  Description of Artificial Sequence: Synthetic oligonucleotide
cgauaaaucuggagugugg

SEQ ID NO: 2845059 - RNA, 19 nt, Artificial Sequence
  Description of Artificial Sequence: Synthetic oligonucleotide
ccugcacucgauaaaucug

SEQ ID NO: 2845060 - RNA, 19 nt, Artificial Sequence
  Description of Artificial Sequence: Synthetic oligonucleotide
cugcuagcugaaguaauuc

SEQ ID NO: 2845061 - RNA, 19 nt, Artificial Sequence
  Description of Artificial Sequence: Synthetic oligonucleotide
cgagcuucuuuauaccugc

SEQ ID NO: 2845062 - RNA, 19 nt, Artificial Sequence
  Description of Artificial Sequence: Synthetic oligonucleotide
uaccugcacucgauaaauc

SEQ ID NO: 2845063 - RNA, 19 nt, Artificial Sequence
  Description of Artificial Sequence: Synthetic oligonucleotide
ucaaaagcuccaggauaac

SEQ ID NO: 2845064 - RNA, 19 nt, Artificial Sequence
  Description of Artificial Sequence: Synthetic oligonucleotide
ugaccaugccagagguagu

SEQ ID NO: 2845065 - RNA, 19 nt, Artificial Sequence
  Description of Artificial Sequence: Synthetic oligonucleotide
guccuuugagucguaggug

SEQ ID NO: 2845066 - RNA, 19 nt, Artificial Sequence
  Description of Artificial Sequence: Synthetic oligonucleotide
uuuuggcugcuagcugaag

SEQ ID NO: 2845067 - RNA, 19 nt, Artificial Sequence
  Description of Artificial Sequence: Synthetic oligonucleotide
auuuaauguuuuggcugcu

SEQ ID NO: 2845068 - RNA, 19 nt, Artificial Sequence
  Description of Artificial Sequence: Synthetic oligonucleotide
gugugguacuucuucuaga

SEQ ID NO: 2845069 - RNA, 19 nt, Artificial Sequence
  Description of Artificial Sequence: Synthetic oligonucleotide
guguccugggucuuuugga

SEQ ID NO: 2845070 - RNA, 19 nt, Artificial Sequence
  Description of Artificial Sequence: Synthetic oligonucleotide
ugcuguaacucuggccugu

SEQ ID NO: 2845071 - RNA, 19 nt, Artificial Sequence
  Description of Artificial Sequence: Synthetic oligonucleotide
gagguaguuaccgcuucuc

SEQ ID NO: 2845072 - RNA, 19 nt, Artificial Sequence
  Description of Artificial Sequence: Synthetic oligonucleotide
ucgucaagguacugcugaa

SEQ ID NO: 2845073 - RNA, 19 nt, Artificial Sequence
  Description of Artificial Sequence: Synthetic oligonucleotide
aguuaccgcuucucucaug

SEQ ID NO: 2845074 - RNA, 19 nt, Artificial Sequence
  Description of Artificial Sequence: Synthetic oligonucleotide
uaguuaccgcuucucucau

SEQ ID NO: 2845075 - RNA, 19 nt, Artificial Sequence
  Description of Artificial Sequence: Synthetic oligonucleotide
cacuauuaucgucaaggua

SEQ ID NO: 2845076 - RNA, 19 nt, Artificial Sequence
  Description of Artificial Sequence: Synthetic oligonucleotide
gcacucgauaaaucuggag

SEQ ID NO: 2845077 - RNA, 19 nt, Artificial Sequence
  Description of Artificial Sequence: Synthetic oligonucleotide
acugcauugucgauaccau

SEQ ID NO: 2845078 - RNA, 19 nt, Artificial Sequence
  Description of Artificial Sequence: Synthetic oligonucleotide
guccauguguccuuugagu

SEQ ID NO: 2845079 - RNA, 19 nt, Artificial Sequence
  Description of Artificial Sequence: Synthetic oligonucleotide
cagagguaguuaccgcuuc

SEQ ID NO: 2845080 - RNA, 19 nt, Artificial Sequence
  Description of Artificial Sequence: Synthetic oligonucleotide
uagcguccacacuauuauc

SEQ ID NO: 2845081 - RNA, 19 nt, Artificial Sequence
  Description of Artificial Sequence: Synthetic oligonucleotide
cuauuaucgucaagguacu

SEQ ID NO: 2845082 - RNA, 19 nt, Artificial Sequence
  Description of Artificial Sequence: Synthetic oligonucleotide
gcugaaggaaugcccgagc

SEQ ID NO: 2845083 - RNA, 19 nt, Artificial Sequence
  Description of Artificial Sequence: Synthetic oligonucleotide
guccugcauuuugaaaugc

SEQ ID NO: 2845084 - RNA, 19 nt, Artificial Sequence
  Description of Artificial Sequence: Synthetic oligonucleotide
ggccauagcguccacacua

SEQ ID NO: 2845085 - RNA, 19 nt, Artificial Sequence
  Description of Artificial Sequence: Synthetic oligonucleotide
aaggaaugcccgagcuucu

SEQ ID NO: 2845086 - RNA, 19 nt, Artificial Sequence
  Description of Artificial Sequence: Synthetic oligonucleotide
cgacgucuuugcuauaagg

SEQ ID NO: 2845087 - RNA, 19 nt, Artificial Sequence
  Description of Artificial Sequence: Synthetic oligonucleotide
aaucuggagugugguacuu

SEQ ID NO: 2845088 - RNA, 19 nt, Artificial Sequence
  Description of Artificial Sequence: Synthetic oligonucleotide
cuuuauaccugcacucgau

SEQ ID NO: 2845089 - RNA, 19 nt, Artificial Sequence
  Description of Artificial Sequence: Synthetic oligonucleotide
gccugucaaaagcuccagg

SEQ ID NO: 2845090 - RNA, 19 nt, Artificial Sequence
  Description of Artificial Sequence: Synthetic oligonucleotide
uggcugcuagcugaaguaa

SEQ ID NO: 2845091 - RNA, 19 nt, Artificial Sequence
  Description of Artificial Sequence: Synthetic oligonucleotide
ccaugccagagguaguuac

SEQ ID NO: 2845092 - RNA, 19 nt, Artificial Sequence
  Description of Artificial Sequence: Synthetic oligonucleotide
cuguccauguguccuuuga

SEQ ID NO: 2845093 - RNA, 19 nt, Artificial Sequence
  Description of Artificial Sequence: Synthetic oligonucleotide
gccaaaauaauaucagguu

SEQ ID NO: 2845094 - RNA, 19 nt, Artificial Sequence
  Description of Artificial Sequence: Synthetic oligonucleotide
cucuuccgaaaggccauag

SEQ ID NO: 2845095 - RNA, 19 nt, Artificial Sequence
  Description of Artificial Sequence: Synthetic oligonucleotide
ccaaacuguaacuuucgaa

SEQ ID NO: 2845096 - RNA, 19 nt, Artificial Sequence
  Description of Artificial Sequence: Synthetic oligonucleotide
cgaccaaacuguaacuuuc

SEQ ID NO: 2845097 - RNA, 19 nt, Artificial Sequence
  Description of Artificial Sequence: Synthetic oligonucleotide
ccgagcuucuuuauaccug

SEQ ID NO: 2845098 - RNA, 19 nt, Artificial Sequence
  Description of Artificial Sequence: Synthetic oligonucleotide
gaguggaaguccugcauuu

SEQ ID NO: 2845099 - RNA, 19 nt, Artificial Sequence
  Description of Artificial Sequence: Synthetic oligonucleotide
ccuagacaaguuccacugc

SEQ ID NO: 2845100 - RNA, 19 nt, Artificial Sequence
  Description of Artificial Sequence: Synthetic oligonucleotide
ccaaaauaauaucagguuu

SEQ ID NO: 2845101 - RNA, 19 nt, Artificial Sequence
  Description of Artificial Sequence: Synthetic oligonucleotide
cugaaggaaugcccgagcu

SEQ ID NO: 2845102 - RNA, 19 nt, Artificial Sequence
  Description of Artificial Sequence: Synthetic oligonucleotide
gucgacgucuuugcuauaa

SEQ ID NO: 2845103 - RNA, 19 nt, Artificial Sequence
  Description of Artificial Sequence: Synthetic oligonucleotide
uuaccgcuucucucaugaa

SEQ ID NO: 2845104 - RNA, 19 nt, Artificial Sequence
  Description of Artificial Sequence: Synthetic oligonucleotide
gugguacuucuucuagaaa

SEQ ID NO: 2845105 - RNA, 19 nt, Artificial Sequence
  Description of Artificial Sequence: Synthetic oligonucleotide
auaccauccuagacaaguu

SEQ ID NO: 2845106 - RNA, 19 nt, Artificial Sequence
  Description of Artificial Sequence: Synthetic oligonucleotide
cugggucuuuuggaauaag

SEQ ID NO: 2845107 - RNA, 19 nt, Artificial Sequence
  Description of Artificial Sequence: Synthetic oligonucleotide
caauaguaacuugcuguaa

SEQ ID NO: 2845108 - RNA, 19 nt, Artificial Sequence
  Description of Artificial Sequence: Synthetic oligonucleotide
cauguguccuuugagucgu

SEQ ID NO: 2845109 - RNA, 19 nt, Artificial Sequence
  Description of Artificial Sequence: Synthetic oligonucleotide
ccgaaaggccauagcgucc

SEQ ID NO: 2845110 - RNA, 19 nt, Artificial Sequence
  Description of Artificial Sequence: Synthetic oligonucleotide
uugagucguaggugaccau

SEQ ID NO: 2845111 - RNA, 19 nt, Artificial Sequence
  Description of Artificial Sequence: Synthetic oligonucleotide
cugucaaaagcuccaggau

SEQ ID NO: 2845112 - RNA, 19 nt, Artificial Sequence
  Description of Artificial Sequence: Synthetic oligonucleotide
aguggaaguccugcauuuu

SEQ ID NO: 2845113 - RNA, 19 nt, Artificial Sequence
  Description of Artificial Sequence: Synthetic oligonucleotide
guguuugaguggaaguccu

SEQ ID NO: 2845114 - RNA, 19 nt, Artificial Sequence
  Description of Artificial Sequence: Synthetic oligonucleotide
auuccuaggucgacgucuu

SEQ ID NO: 2845115 - RNA, 19 nt, Artificial Sequence
  Description of Artificial Sequence: Synthetic oligonucleotide
augcccgagcuucuuuaua

SEQ ID NO: 2845116 - RNA, 19 nt, Artificial Sequence
  Description of Artificial Sequence: Synthetic oligonucleotide
ccuuugagucguaggugac

SEQ ID NO: 2845117 - RNA, 19 nt, Artificial Sequence
  Description of Artificial Sequence: Synthetic oligonucleotide
gcccgagcuucuuuauacc

SEQ ID NO: 2845118 - RNA, 19 nt, Artificial Sequence
  Description of Artificial Sequence: Synthetic oligonucleotide
cauugucgauaccauccua

SEQ ID NO: 2845119 - RNA, 19 nt, Artificial Sequence
  Description of Artificial Sequence: Synthetic oligonucleotide
cucgauaaaucuggagugu

SEQ ID NO: 2845120 - RNA, 19 nt, Artificial Sequence
  Description of Artificial Sequence: Synthetic oligonucleotide
ccaucaauaguaacuugcu

SEQ ID NO: 2845121 - RNA, 19 nt, Artificial Sequence
  Description of Artificial Sequence: Synthetic oligonucleotide
ccauccuagacaaguucca

SEQ ID NO: 2845122 - RNA, 19 nt, Artificial Sequence
  Description of Artificial Sequence: Synthetic oligonucleotide
guuuuggcugcuagcugaa

SEQ ID NO: 2845123 - RNA, 19 nt, Artificial Sequence
  Description of Artificial Sequence: Synthetic oligonucleotide
gccagagguaguuaccgcu

SEQ ID NO: 2845124 - RNA, 19 nt, Artificial Sequence
  Description of Artificial Sequence: Synthetic oligonucleotide
gagcuucuuuauaccugca

SEQ ID NO: 2845125 - RNA, 19 nt, Artificial Sequence
  Description of Artificial Sequence: Synthetic oligonucleotide
ggcacucccaguucauuua

SEQ ID NO: 2845126 - RNA, 19 nt, Artificial Sequence
  Description of Artificial Sequence: Synthetic oligonucleotide
cagaagggcacucccaguu

SEQ ID NO: 2845127 - RNA, 19 nt, Artificial Sequence
  Description of Artificial Sequence: Synthetic oligonucleotide
cucagccagaagggcacuc

SEQ ID NO: 2845128 - RNA, 19 nt, Artificial Sequence
  Description of Artificial Sequence: Synthetic oligonucleotide
ggccugucaaaagcuccag

SEQ ID NO: 2845129 - RNA, 19 nt, Artificial Sequence
  Description of Artificial Sequence: Synthetic oligonucleotide
gaccaugccagagguaguu

SEQ ID NO: 2845130 - RNA, 19 nt, Artificial Sequence
  Description of Artificial Sequence: Synthetic oligonucleotide
uuccuaggucgacgucuuu

SEQ ID NO: 2845131 - RNA, 19 nt, Artificial Sequence
  Description of Artificial Sequence: Synthetic oligonucleotide
gcauugucgauaccauccu

SEQ ID NO: 2845132 - RNA, 19 nt, Artificial Sequence
  Description of Artificial Sequence: Synthetic oligonucleotide
gcccucuuccgaaaggcca

SEQ ID NO: 2845133 - RNA, 19 nt, Artificial Sequence
  Description of Artificial Sequence: Synthetic oligonucleotide
gcacucccaguucauuuaa

SEQ ID NO: 2845134 - RNA, 19 nt, Artificial Sequence
  Description of Artificial Sequence: Synthetic oligonucleotide
cuaggucgacgucuuugcu

SEQ ID NO: 2845135 - RNA, 19 nt, Artificial Sequence
  Description of Artificial Sequence: Synthetic oligonucleotide
cguccacacuauuaucguc

SEQ ID NO: 2845136 - RNA, 19 nt, Artificial Sequence
  Description of Artificial Sequence: Synthetic oligonucleotide
gaaaguguccugggucuuu

SEQ ID NO: 2845137 - RNA, 19 nt, Artificial Sequence
  Description of Artificial Sequence: Synthetic oligonucleotide
gcacaucuaguccaucaau

SEQ ID NO: 2845138 - RNA, 19 nt, Artificial Sequence
  Description of Artificial Sequence: Synthetic oligonucleotide
guccugggucuuuuggaau

SEQ ID NO: 2845139 - RNA, 19 nt, Artificial Sequence
  Description of Artificial Sequence: Synthetic oligonucleotide
ggauaacgaccaaacugua

SEQ ID NO: 2845140 - RNA, 19 nt, Artificial Sequence
  Description of Artificial Sequence: Synthetic oligonucleotide
guuccacugcucagccaga

SEQ ID NO: 2845141 - RNA, 19 nt, Artificial Sequence
  Description of Artificial Sequence: Synthetic oligonucleotide
gcguccacacuauuaucgu

SEQ ID NO: 2845142 - RNA, 19 nt, Artificial Sequence
  Description of Artificial Sequence: Synthetic oligonucleotide
cgucuuugcuauaaggaau

SEQ ID NO: 2845143 - RNA, 19 nt, Artificial Sequence
  Description of Artificial Sequence: Synthetic oligonucleotide
cccgagcuucuuuauaccu

SEQ ID NO: 2845144 - RNA, 19 nt, Artificial Sequence
  Description of Artificial Sequence: Synthetic oligonucleotide
ccaggauaacgaccaaacu

SEQ ID NO: 2845145 - RNA, 19 nt, Artificial Sequence
  Description of Artificial Sequence: Synthetic oligonucleotide
gggcacucccaguucauuu

SEQ ID NO: 2845146 - RNA, 19 nt, Artificial Sequence
  Description of Artificial Sequence: Synthetic oligonucleotide
cgauaccauccuagacaag

SEQ ID NO: 2845147 - RNA, 19 nt, Artificial Sequence
  Description of Artificial Sequence: Synthetic oligonucleotide
cacucccaguucauuuaau

SEQ ID NO: 2845148 - RNA, 19 nt, Artificial Sequence
  Description of Artificial Sequence: Synthetic oligonucleotide
guaauuccuuugcccucuu

SEQ ID NO: 2845149 - RNA, 19 nt, Artificial Sequence
  Description of Artificial Sequence: Synthetic oligonucleotide
gcugcuagcugaaguaauu

SEQ ID NO: 2845150 - RNA, 19 nt, Artificial Sequence
  Description of Artificial Sequence: Synthetic oligonucleotide
ggaaugcccgagcuucuuu

SEQ ID NO: 2845151 - RNA, 19 nt, Artificial Sequence
  Description of Artificial Sequence: Synthetic oligonucleotide
ccuuugcccucuuccgaaa

SEQ ID NO: 2845152 - RNA, 19 nt, Artificial Sequence
  Description of Artificial Sequence: Synthetic oligonucleotide
ggcugcuagcugaaguaau

SEQ ID NO: 2845153 - RNA, 19 nt, Artificial Sequence
  Description of Artificial Sequence: Synthetic oligonucleotide
ccagagguaguuaccgcuu

SEQ ID NO: 2845154 - RNA, 19 nt, Artificial Sequence
  Description of Artificial Sequence: Synthetic oligonucleotide
cguaggugaccaugccaga

SEQ ID NO: 2845155 - RNA, 19 nt, Artificial Sequence
  Description of Artificial Sequence: Synthetic oligonucleotide
gcuccaggauaacgaccaa

SEQ ID NO: 2845156 - RNA, 19 nt, Artificial Sequence
  Description of Artificial Sequence: Synthetic oligonucleotide
ggugaccaugccagaggua

SEQ ID NO: 2845157 - RNA, 19 nt, Artificial Sequence
  Description of Artificial Sequence: Synthetic oligonucleotide
ccugggucuuuuggaauaa

SEQ ID NO: 2845158 - RNA, 19 nt, Artificial Sequence
  Description of Artificial Sequence: Synthetic oligonucleotide
cccucuuccgaaaggccau

SEQ ID NO: 2845159 - RNA, 19 nt, Artificial Sequence
  Description of Artificial Sequence: Synthetic oligonucleotide
gccauagcguccacacuau

SEQ ID NO: 2845160 - RNA, 19 nt, Artificial Sequence
  Description of Artificial Sequence: Synthetic oligonucleotide
auguguccuuugagucgua

SEQ ID NO: 2845161 - RNA, 19 nt, Artificial Sequence
  Description of Artificial Sequence: Synthetic oligonucleotide
ggucgacgucuuugcuaua

SEQ ID NO: 2845162 - RNA, 19 nt, Artificial Sequence
  Description of Artificial Sequence: Synthetic oligonucleotide
gcucagccagaagggcacu

SEQ ID NO: 2845163 - RNA, 19 nt, Artificial Sequence
  Description of Artificial Sequence: Synthetic oligonucleotide
ccucuuccgaaaggccaua

SEQ ID NO: 2845164 - RNA, 19 nt, Artificial Sequence
  Description of Artificial Sequence: Synthetic oligonucleotide
ccauagcguccacacuauu

SEQ ID NO: 2845165 - RNA, 19 nt, Artificial Sequence
  Description of Artificial Sequence: Synthetic oligonucleotide
uguguauucaccauugagg

SEQ ID NO: 2845166 - RNA, 19 nt, Artificial Sequence
  Description of Artificial Sequence: Synthetic oligonucleotide
auaggaaccaucuggaagc

SEQ ID NO: 2845167 - RNA, 19 nt, Artificial Sequence
  Description of Artificial Sequence: Synthetic oligonucleotide
uuuagcaugaggcagcugc

SEQ ID NO: 2845168 - RNA, 19 nt, Artificial Sequence
  Description of Artificial Sequence: Synthetic oligonucleotide
uuaagggccagguagaugc

SEQ ID NO: 2845169 - RNA, 19 nt, Artificial Sequence
  Description of Artificial Sequence: Synthetic oligonucleotide
aaagcuguaccgcagacgu

SEQ ID NO: 2845170 - RNA, 19 nt, Artificial Sequence
  Description of Artificial Sequence: Synthetic oligonucleotide
cuguguuuuagcaugaggc

SEQ ID NO: 2845171 - RNA, 19 nt, Artificial Sequence
  Description of Artificial Sequence: Synthetic oligonucleotide
ucucagaugaguccgaggc

SEQ ID NO: 2845172 - RNA, 19 nt, Artificial Sequence
  Description of Artificial Sequence: Synthetic oligonucleotide
guguauucaccauugaggg

SEQ ID NO: 2845173 - RNA, 19 nt, Artificial Sequence
  Description of Artificial Sequence: Synthetic oligonucleotide
ucuggaagcuuuaagggcc

SEQ ID NO: 2845174 - RNA, 19 nt, Artificial Sequence
  Description of Artificial Sequence: Synthetic oligonucleotide
agcuuuaagggccagguag

SEQ ID NO: 2845175 - RNA, 19 nt, Artificial Sequence
  Description of Artificial Sequence: Synthetic oligonucleotide
agugagguuauuuccugcc

SEQ ID NO: 2845176 - RNA, 19 nt, Artificial Sequence
  Description of Artificial Sequence: Synthetic oligonucleotide
aucuggaagcuuuaagggc

SEQ ID NO: 2845177 - RNA, 19 nt, Artificial Sequence
  Description of Artificial Sequence: Synthetic oligonucleotide
uccacuauagcgcaagcug

SEQ ID NO: 2845178 - RNA, 19 nt, Artificial Sequence
  Description of Artificial Sequence: Synthetic oligonucleotide
caucuggaagcuuuaaggg

SEQ ID NO: 2845179 - RNA, 19 nt, Artificial Sequence
  Description of Artificial Sequence: Synthetic oligonucleotide
uguuuuagcaugaggcagc

SEQ ID NO: 2845180 - RNA, 19 nt, Artificial Sequence
  Description of Artificial Sequence: Synthetic oligonucleotide
uggguugccagccacuagg

SEQ ID NO: 2845181 - RNA, 19 nt, Artificial Sequence
  Description of Artificial Sequence: Synthetic oligonucleotide
aucuccagaaucugugccc

SEQ ID NO: 2845182 - RNA, 19 nt, Artificial Sequence
  Description of Artificial Sequence: Synthetic oligonucleotide
uguguuuuagcaugaggca

SEQ ID NO: 2845183 - RNA, 19 nt, Artificial Sequence
  Description of Artificial Sequence: Synthetic oligonucleotide
cauaggaaccaucuggaag

SEQ ID NO: 2845184 - RNA, 19 nt, Artificial Sequence
  Description of Artificial Sequence: Synthetic oligonucleotide
aggacuugcagugucaagg

SEQ ID NO: 2845185 - RNA, 19 nt, Artificial Sequence
  Description of Artificial Sequence: Synthetic oligonucleotide
agcuguaccgcagacgugc

SEQ ID NO: 2845186 - RNA, 19 nt, Artificial Sequence
  Description of Artificial Sequence: Synthetic oligonucleotide
aaaagcuguaccgcagacg

SEQ ID NO: 2845187 - RNA, 19 nt, Artificial Sequence
  Description of Artificial Sequence: Synthetic oligonucleotide
acuguguuuuagcaugagg

SEQ ID NO: 2845188 - RNA, 19 nt, Artificial Sequence
  Description of Artificial Sequence: Synthetic oligonucleotide
aaguaccacaucugugggg

SEQ ID NO: 2845189 - RNA, 19 nt, Artificial Sequence
  Description of Artificial Sequence: Synthetic oligonucleotide
agagagacagggcaggucu

SEQ ID NO: 2845190 - RNA, 19 nt, Artificial Sequence
  Description of Artificial Sequence: Synthetic oligonucleotide
ugagguuauuuccugccug

SEQ ID NO: 2845191 - RNA, 19 nt, Artificial Sequence
  Description of Artificial Sequence: Synthetic oligonucleotide
cagacgugcauucuguggg

SEQ ID NO: 2845192 - RNA, 19 nt, Artificial Sequence
  Description of Artificial Sequence: Synthetic oligonucleotide
auucucucagaugaguccg

SEQ ID NO: 2845193 - RNA, 19 nt, Artificial Sequence
  Description of Artificial Sequence: Synthetic oligonucleotide
ucagaugaguccgaggccc

SEQ ID NO: 2845194 - RNA, 19 nt, Artificial Sequence
  Description of Artificial Sequence: Synthetic oligonucleotide
agcgcaagcugacugcccc

SEQ ID NO: 2845195 - RNA, 19 nt, Artificial Sequence
  Description of Artificial Sequence: Synthetic oligonucleotide
cauucucucagaugagucc

SEQ ID NO: 2845196 - RNA, 19 nt, Artificial Sequence
  Description of Artificial Sequence: Synthetic oligonucleotide
guauucaccauugagggca

SEQ ID NO: 2845197 - RNA, 19 nt, Artificial Sequence
  Description of Artificial Sequence: Synthetic oligonucleotide
uauagcgcaagcugacugc

SEQ ID NO: 2845198 - RNA, 19 nt, Artificial Sequence
  Description of Artificial Sequence: Synthetic oligonucleotide
gacagugucucugaggcug

SEQ ID NO: 2845199 - RNA, 19 nt, Artificial Sequence
  Description of Artificial Sequence: Synthetic oligonucleotide
uguugaaggaaccggccgu

SEQ ID NO: 2845200 - RNA, 19 nt, Artificial Sequence
  Description of Artificial Sequence: Synthetic oligonucleotide
ccaucuggaagcuuuaagg

SEQ ID NO: 2845201 - RNA, 19 nt, Artificial Sequence
  Description of Artificial Sequence: Synthetic oligonucleotide
agcugacugccccagaaag

SEQ ID NO: 2845202 - RNA, 19 nt, Artificial Sequence
  Description of Artificial Sequence: Synthetic oligonucleotide
guguguauucaccauugag

SEQ ID NO: 2845203 - RNA, 19 nt, Artificial Sequence
  Description of Artificial Sequence: Synthetic oligonucleotide
agucuugggaaggagggcg

SEQ ID NO: 2845204 - RNA, 19 nt, Artificial Sequence
  Description of Artificial Sequence: Synthetic oligonucleotide
gacagggcaggucucaccc

SEQ ID NO: 2845205 - RNA, 19 nt, Artificial Sequence
  Description of Artificial Sequence: Synthetic oligonucleotide
ucauucucucagaugaguc

SEQ ID NO: 2845206 - RNA, 19 nt, Artificial Sequence
  Description of Artificial Sequence: Synthetic oligonucleotide
ugguguugaaggaaccggc

SEQ ID NO: 2845207 - RNA, 19 nt, Artificial Sequence
  Description of Artificial Sequence: Synthetic oligonucleotide
aaggaaccggccguggaac

SEQ ID NO: 2845208 - RNA, 19 nt, Artificial Sequence
  Description of Artificial Sequence: Synthetic oligonucleotide
guuauuuccugccugccca

SEQ ID NO: 2845209 - RNA, 19 nt, Artificial Sequence
  Description of Artificial Sequence: Synthetic oligonucleotide
gagguuauuuccugccugc

SEQ ID NO: 2845210 - RNA, 19 nt, Artificial Sequence
  Description of Artificial Sequence: Synthetic oligonucleotide
cauugagggcauaggaacc

SEQ ID NO: 2845211 - RNA, 19 nt, Artificial Sequence
  Description of Artificial Sequence: Synthetic oligonucleotide
uuccggaugaucuccagaa

SEQ ID NO: 2845212 - RNA, 19 nt, Artificial Sequence
  Description of Artificial Sequence: Synthetic oligonucleotide
ucuccagaaucugugcccg

SEQ ID NO: 2845213 - RNA, 19 nt, Artificial Sequence
  Description of Artificial Sequence: Synthetic oligonucleotide
guguugaaggaaccggccg

SEQ ID NO: 2845214 - RNA, 19 nt, Artificial Sequence
  Description of Artificial Sequence: Synthetic oligonucleotide
uguauucaccauugagggc

SEQ ID NO: 2845215 - RNA, 19 nt, Artificial Sequence
  Description of Artificial Sequence: Synthetic oligonucleotide
agggcaucaguguguauuc

SEQ ID NO: 2845216 - RNA, 19 nt, Artificial Sequence
  Description of Artificial Sequence: Synthetic oligonucleotide
auucuguggguugccagcc

SEQ ID NO: 2845217 - RNA, 19 nt, Artificial Sequence
  Description of Artificial Sequence: Synthetic oligonucleotide
uucaccauugagggcauag

SEQ ID NO: 2845218 - RNA, 19 nt, Artificial Sequence
  Description of Artificial Sequence: Synthetic oligonucleotide
cauucuguggguugccagc

SEQ ID NO: 2845219 - RNA, 19 nt, Artificial Sequence
  Description of Artificial Sequence: Synthetic oligonucleotide
cuauagcgcaagcugacug

SEQ ID NO: 2845220 - RNA, 19 nt, Artificial Sequence
  Description of Artificial Sequence: Synthetic oligonucleotide
auagcgcaagcugacugcc

SEQ ID NO: 2845221 - RNA, 19 nt, Artificial Sequence
  Description of Artificial Sequence: Synthetic oligonucleotide
ucucuugugacgggcagag

SEQ ID NO: 2845222 - RNA, 19 nt, Artificial Sequence
  Description of Artificial Sequence: Synthetic oligonucleotide
gugacgggcagagagacag

SEQ ID NO: 2845223 - RNA, 19 nt, Artificial Sequence
  Description of Artificial Sequence: Synthetic oligonucleotide
ugaggcagcugcagaagcc

SEQ ID NO: 2845224 - RNA, 19 nt, Artificial Sequence
  Description of Artificial Sequence: Synthetic oligonucleotide
guguuuuagcaugaggcag

SEQ ID NO: 2845225 - RNA, 19 nt, Artificial Sequence
  Description of Artificial Sequence: Synthetic oligonucleotide
accaucuggaagcuuuaag

SEQ ID NO: 2845226 - RNA, 19 nt, Artificial Sequence
  Description of Artificial Sequence: Synthetic oligonucleotide
ucuacagcacuucccgacu

SEQ ID NO: 2845227 - RNA, 19 nt, Artificial Sequence
  Description of Artificial Sequence: Synthetic oligonucleotide
auuuccugccugcccaggg

SEQ ID NO: 2845228 - RNA, 19 nt, Artificial Sequence
  Description of Artificial Sequence: Synthetic oligonucleotide
acagugagguuauuuccug

SEQ ID NO: 2845229 - RNA, 19 nt, Artificial Sequence
  Description of Artificial Sequence: Synthetic oligonucleotide
uuagcaugaggcagcugca

SEQ ID NO: 2845230 - RNA, 19 nt, Artificial Sequence
  Description of Artificial Sequence: Synthetic oligonucleotide
aggucucacccucuacagc

SEQ ID NO: 2845231 - RNA, 19 nt, Artificial Sequence
  Description of Artificial Sequence: Synthetic oligonucleotide
cuugcagugucaagggcug

SEQ ID NO: 2845232 - RNA, 19 nt, Artificial Sequence
  Description of Artificial Sequence: Synthetic oligonucleotide
cucuacagcacuucccgac

SEQ ID NO: 2845233 - RNA, 19 nt, Artificial Sequence
  Description of Artificial Sequence: Synthetic oligonucleotide
agacagggcaggucucacc

SEQ ID NO: 2845234 - RNA, 19 nt, Artificial Sequence
  Description of Artificial Sequence: Synthetic oligonucleotide
gccacuaggacuugcagug

SEQ ID NO: 2845235 - RNA, 19 nt, Artificial Sequence
  Description of Artificial Sequence: Synthetic oligonucleotide
ugccccagaaaguaccaca

SEQ ID NO: 2845236 - RNA, 19 nt, Artificial Sequence
  Description of Artificial Sequence: Synthetic oligonucleotide
gacgggcagagagacaggg

SEQ ID NO: 2845237 - RNA, 19 nt, Artificial Sequence
  Description of Artificial Sequence: Synthetic oligonucleotide
uuauuuccugccugcccag

SEQ ID NO: 2845238 - RNA, 19 nt, Artificial Sequence
  Description of Artificial Sequence: Synthetic oligonucleotide
agaaaguaccacaucugug

SEQ ID NO: 2845239 - RNA, 19 nt, Artificial Sequence
  Description of Artificial Sequence: Synthetic oligonucleotide
ucaccauugagggcauagg

SEQ ID NO: 2845240 - RNA, 19 nt, Artificial Sequence
  Description of Artificial Sequence: Synthetic oligonucleotide
gugguguugaaggaaccgg

SEQ ID NO: 2845241 - RNA, 19 nt, Artificial Sequence
  Description of Artificial Sequence: Synthetic oligonucleotide
ugccguggcuccacuauag

SEQ ID NO: 2845242 - RNA, 19 nt, Artificial Sequence
  Description of Artificial Sequence: Synthetic oligonucleotide
ggacagugagguuauuucc

SEQ ID NO: 2845243 - RNA, 19 nt, Artificial Sequence
  Description of Artificial Sequence: Synthetic oligonucleotide
ugcagugucaagggcuggg

SEQ ID NO: 2845244 - RNA, 19 nt, Artificial Sequence
  Description of Artificial Sequence: Synthetic oligonucleotide
acuugcagugucaagggcu

SEQ ID NO: 2845245 - RNA, 19 nt, Artificial Sequence
  Description of Artificial Sequence: Synthetic oligonucleotide
ugcccagggacgcuuccgg

SEQ ID NO: 2845246 - RNA, 19 nt, Artificial Sequence
  Description of Artificial Sequence: Synthetic oligonucleotide
aguccgaggccccggcacc

SEQ ID NO: 2845247 - RNA, 19 nt, Artificial Sequence
  Description of Artificial Sequence: Synthetic oligonucleotide
ugaaggaaccggccgugga

SEQ ID NO: 2845248 - RNA, 19 nt, Artificial Sequence
  Description of Artificial Sequence: Synthetic oligonucleotide
agccacuaggacuugcagu

SEQ ID NO: 2845249 - RNA, 19 nt, Artificial Sequence
  Description of Artificial Sequence: Synthetic oligonucleotide
ucuguggguugccagccac

SEQ ID NO: 2845250 - RNA, 19 nt, Artificial Sequence
  Description of Artificial Sequence: Synthetic oligonucleotide
caagggcugggccagcggg

SEQ ID NO: 2845251 - RNA, 19 nt, Artificial Sequence
  Description of Artificial Sequence: Synthetic oligonucleotide
ggacuugcagugucaaggg

SEQ ID NO: 2845252 - RNA, 19 nt, Artificial Sequence
  Description of Artificial Sequence: Synthetic oligonucleotide
caucaguguguauucacca

SEQ ID NO: 2845253 - RNA, 19 nt, Artificial Sequence
  Description of Artificial Sequence: Synthetic oligonucleotide
agguuauuuccugccugcc

SEQ ID NO: 2845254 - RNA, 19 nt, Artificial Sequence
  Description of Artificial Sequence: Synthetic oligonucleotide
uucccgacuguguuuuagc

SEQ ID NO: 2845255 - RNA, 19 nt, Artificial Sequence
  Description of Artificial Sequence: Synthetic oligonucleotide
cacuauagcgcaagcugac

SEQ ID NO: 2845256 - RNA, 19 nt, Artificial Sequence
  Description of Artificial Sequence: Synthetic oligonucleotide
uuuaagggccagguagaug

SEQ ID NO: 2845257 - RNA, 19 nt, Artificial Sequence
  Description of Artificial Sequence: Synthetic oligonucleotide
cauuucucuugugacgggc

SEQ ID NO: 2845258 - RNA, 19 nt, Artificial Sequence
  Description of Artificial Sequence: Synthetic oligonucleotide
ccagucuugggaaggaggg

SEQ ID NO: 2845259 - RNA, 19 nt, Artificial Sequence
  Description of Artificial Sequence: Synthetic oligonucleotide
gacugccccagaaaguacc

SEQ ID NO: 2845260 - RNA, 19 nt, Artificial Sequence
  Description of Artificial Sequence: Synthetic oligonucleotide
ucccgacuguguuuuagca

SEQ ID NO: 2845261 - RNA, 19 nt, Artificial Sequence
  Description of Artificial Sequence: Synthetic oligonucleotide
cagaaucugugcccggcgg

SEQ ID NO: 2845262 - RNA, 19 nt, Artificial Sequence
  Description of Artificial Sequence: Synthetic oligonucleotide
augaguccgaggccccggc

SEQ ID NO: 2845263 - RNA, 19 nt, Artificial Sequence
  Description of Artificial Sequence: Synthetic oligonucleotide
ucaagggcugggccagcgg

SEQ ID NO: 2845264 - RNA, 19 nt, Artificial Sequence
  Description of Artificial Sequence: Synthetic oligonucleotide
caggucucacccucuacag

SEQ ID NO: 2845265 - RNA, 19 nt, Artificial Sequence
  Description of Artificial Sequence: Synthetic oligonucleotide
ggucucacccucuacagca

SEQ ID NO: 2845266 - RNA, 19 nt, Artificial Sequence
  Description of Artificial Sequence: Synthetic oligonucleotide
uuuccugccugcccaggga

SEQ ID NO: 2845267 - RNA, 19 nt, Artificial Sequence
  Description of Artificial Sequence: Synthetic oligonucleotide
uugugacgggcagagagac

SEQ ID NO: 2845268 - RNA, 19 nt, Artificial Sequence
  Description of Artificial Sequence: Synthetic oligonucleotide
gacuugcagugucaagggc

SEQ ID NO: 2845269 - RNA, 19 nt, Artificial Sequence
  Description of Artificial Sequence: Synthetic oligonucleotide
cucagaugaguccgaggcc

SEQ ID NO: 2845270 - RNA, 19 nt, Artificial Sequence
  Description of Artificial Sequence: Synthetic oligonucleotide
guugccagccacuaggacu

SEQ ID NO: 2845271 - RNA, 19 nt, Artificial Sequence
  Description of Artificial Sequence: Synthetic oligonucleotide
cagugagguuauuuccugc

SEQ ID NO: 2845272 - RNA, 19 nt, Artificial Sequence
  Description of Artificial Sequence: Synthetic oligonucleotide
cucucagaugaguccgagg

SEQ ID NO: 2845273 - RNA, 19 nt, Artificial Sequence
  Description of Artificial Sequence: Synthetic oligonucleotide
aucaguguguauucaccau

SEQ ID NO: 2845274 - RNA, 19 nt, Artificial Sequence
  Description of Artificial Sequence: Synthetic oligonucleotide
agaaucugugcccggcggu

SEQ ID NO: 2845275 - RNA, 19 nt, Artificial Sequence
  Description of Artificial Sequence: Synthetic oligonucleotide
aguguguauucaccauuga

SEQ ID NO: 2845276 - RNA, 19 nt, Artificial Sequence
  Description of Artificial Sequence: Synthetic oligonucleotide
gcagacgugcauucugugg

SEQ ID NO: 2845277 - RNA, 19 nt, Artificial Sequence
  Description of Artificial Sequence: Synthetic oligonucleotide
uaggacuugcagugucaag

SEQ ID NO: 2845278 - RNA, 19 nt, Artificial Sequence
  Description of Artificial Sequence: Synthetic oligonucleotide
aagggcugggccagcgggc

SEQ ID NO: 2845279 - RNA, 19 nt, Artificial Sequence
  Description of Artificial Sequence: Synthetic oligonucleotide
gaggcagcugcagaagccc

SEQ ID NO: 2845280 - RNA, 19 nt, Artificial Sequence
  Description of Artificial Sequence: Synthetic oligonucleotide
ccgacuguguuuuagcaug

SEQ ID NO: 2845281 - RNA, 19 nt, Artificial Sequence
  Description of Artificial Sequence: Synthetic oligonucleotide
uccagaaucugugcccggc

SEQ ID NO: 2845282 - RNA, 19 nt, Artificial Sequence
  Description of Artificial Sequence: Synthetic oligonucleotide
accgcagacgugcauucug

SEQ ID NO: 2845283 - RNA, 19 nt, Artificial Sequence
  Description of Artificial Sequence: Synthetic oligonucleotide
gguuauuuccugccugccc

SEQ ID NO: 2845284 - RNA, 19 nt, Artificial Sequence
  Description of Artificial Sequence: Synthetic oligonucleotide
gaagcuuuaagggccaggu

SEQ ID NO: 2845285 - RNA, 19 nt, Artificial Sequence
  Description of Artificial Sequence: Synthetic oligonucleotide
agcacuucccgacuguguu

SEQ ID NO: 2845286 - RNA, 19 nt, Artificial Sequence
  Description of Artificial Sequence: Synthetic oligonucleotide
uugaaggaaccggccgugg

SEQ ID NO: 2845287 - RNA, 19 nt, Artificial Sequence
  Description of Artificial Sequence: Synthetic oligonucleotide
agcaugaggcagcugcaga

SEQ ID NO: 2845288 - RNA, 19 nt, Artificial Sequence
  Description of Artificial Sequence: Synthetic oligonucleotide
uacagcacuucccgacugu

SEQ ID NO: 2845289 - RNA, 19 nt, Artificial Sequence
  Description of Artificial Sequence: Synthetic oligonucleotide
aggaaccggccguggaacg

SEQ ID NO: 2845290 - RNA, 19 nt, Artificial Sequence
  Description of Artificial Sequence: Synthetic oligonucleotide
ucucucagaugaguccgag

SEQ ID NO: 2845291 - RNA, 19 nt, Artificial Sequence
  Description of Artificial Sequence: Synthetic oligonucleotide
gggacagugagguuauuuc

SEQ ID NO: 2845292 - RNA, 19 nt, Artificial Sequence
  Description of Artificial Sequence: Synthetic oligonucleotide
cccucauucucucagauga

SEQ ID NO: 2845293 - RNA, 19 nt, Artificial Sequence
  Description of Artificial Sequence: Synthetic oligonucleotide
uccugccugcccagggacg

SEQ ID NO: 2845294 - RNA, 19 nt, Artificial Sequence
  Description of Artificial Sequence: Synthetic oligonucleotide
ugcagccagucuugggaag

SEQ ID NO: 2845295 - RNA, 19 nt, Artificial Sequence
  Description of Artificial Sequence: Synthetic oligonucleotide
ggugcagccagucuuggga

SEQ ID NO: 2845296 - RNA, 19 nt, Artificial Sequence
  Description of Artificial Sequence: Synthetic oligonucleotide
cccauuucucuugugacgg

SEQ ID NO: 2845297 - RNA, 19 nt, Artificial Sequence
  Description of Artificial Sequence: Synthetic oligonucleotide
aagcugacugccccagaaa

SEQ ID NO: 2845298 - RNA, 19 nt, Artificial Sequence
  Description of Artificial Sequence: Synthetic oligonucleotide
gaugaguccgaggccccgg

SEQ ID NO: 2845299 - RNA, 19 nt, Artificial Sequence
  Description of Artificial Sequence: Synthetic oligonucleotide
uauuuccugccugcccagg

SEQ ID NO: 2845300 - RNA, 19 nt, Artificial Sequence
  Description of Artificial Sequence: Synthetic oligonucleotide
ucucacccucuacagcacu

SEQ ID NO: 2845301 - RNA, 19 nt, Artificial Sequence
  Description of Artificial Sequence: Synthetic oligonucleotide
acccucuacagcacuuccc

SEQ ID NO: 2845302 - RNA, 19 nt, Artificial Sequence
  Description of Artificial Sequence: Synthetic oligonucleotide
uguaccgcagacgugcauu

SEQ ID NO: 2845303 - RNA, 19 nt, Artificial Sequence
  Description of Artificial Sequence: Synthetic oligonucleotide
uuccugccugcccagggac

SEQ ID NO: 2845304 - RNA, 19 nt, Artificial Sequence
  Description of Artificial Sequence: Synthetic oligonucleotide
uucucucagaugaguccga

SEQ ID NO: 2845305 - RNA, 19 nt, Artificial Sequence
  Description of Artificial Sequence: Synthetic oligonucleotide
agggcauaggaaccaucug

SEQ ID NO: 2845306 - RNA, 19 nt, Artificial Sequence
  Description of Artificial Sequence: Synthetic oligonucleotide
ucugaggcugccguggcuc

SEQ ID NO: 2845307 - RNA, 19 nt, Artificial Sequence
  Description of Artificial Sequence: Synthetic oligonucleotide
ucucugaggcugccguggc

SEQ ID NO: 2845308 - RNA, 19 nt, Artificial Sequence
  Description of Artificial Sequence: Synthetic oligonucleotide
gaaggaaccggccguggaa

SEQ ID NO: 2845309 - RNA, 19 nt, Artificial Sequence
  Description of Artificial Sequence: Synthetic oligonucleotide
gaaucugugcccggcggug

SEQ ID NO: 2845310 - RNA, 19 nt, Artificial Sequence
  Description of Artificial Sequence: Synthetic oligonucleotide
ugcccggcggugcagccag

SEQ ID NO: 2845311 - RNA, 19 nt, Artificial Sequence
  Description of Artificial Sequence: Synthetic oligonucleotide
acgugcauucuguggguug

SEQ ID NO: 2845312 - RNA, 19 nt, Artificial Sequence
  Description of Artificial Sequence: Synthetic oligonucleotide
cccucuacagcacuucccg

SEQ ID NO: 2845313 - RNA, 19 nt, Artificial Sequence
  Description of Artificial Sequence: Synthetic oligonucleotide
ugacgggcagagagacagg

SEQ ID NO: 2845314 - RNA, 19 nt, Artificial Sequence
  Description of Artificial Sequence: Synthetic oligonucleotide
ugagggcauaggaaccauc

SEQ ID NO: 2845315 - RNA, 19 nt, Artificial Sequence
  Description of Artificial Sequence: Synthetic oligonucleotide
cagugucaagggcugggcc

SEQ ID NO: 2845316 - RNA, 19 nt, Artificial Sequence
  Description of Artificial Sequence: Synthetic oligonucleotide
cuugggaaggagggcgugg

SEQ ID NO: 2845317 - RNA, 19 nt, Artificial Sequence
  Description of Artificial Sequence: Synthetic oligonucleotide
ugacugccccagaaaguac

SEQ ID NO: 2845318 - RNA, 19 nt, Artificial Sequence
  Description of Artificial Sequence: Synthetic oligonucleotide
caccauugagggcauagga

SEQ ID NO: 2845319 - RNA, 19 nt, Artificial Sequence
  Description of Artificial Sequence: Synthetic oligonucleotide
uagcaugaggcagcugcag

SEQ ID NO: 2845320 - RNA, 19 nt, Artificial Sequence
  Description of Artificial Sequence: Synthetic oligonucleotide
aagcuuuaagggccaggua

SEQ ID NO: 2845321 - RNA, 19 nt, Artificial Sequence
  Description of Artificial Sequence: Synthetic oligonucleotide
cuugugacgggcagagaga

SEQ ID NO: 2845322 - RNA, 19 nt, Artificial Sequence
  Description of Artificial Sequence: Synthetic oligonucleotide
gacgcuuccggaugaucuc

SEQ ID NO: 2845323 - RNA, 19 nt, Artificial Sequence
  Description of Artificial Sequence: Synthetic oligonucleotide
guugaaggaaccggccgug

SEQ ID NO: 2845324 - RNA, 19 nt, Artificial Sequence
  Description of Artificial Sequence: Synthetic oligonucleotide
cacuaggacuugcaguguc

SEQ ID NO: 2845325 - RNA, 19 nt, Artificial Sequence
  Description of Artificial Sequence: Synthetic oligonucleotide
ccagaaaguaccacaucug

SEQ ID NO: 2845326 - RNA, 19 nt, Artificial Sequence
  Description of Artificial Sequence: Synthetic oligonucleotide
cguggcuccacuauagcgc

SEQ ID NO: 2845327 - RNA, 19 nt, Artificial Sequence
  Description of Artificial Sequence: Synthetic oligonucleotide
cuacagcacuucccgacug

SEQ ID NO: 2845328 - RNA, 19 nt, Artificial Sequence
  Description of Artificial Sequence: Synthetic oligonucleotide
gaguccgaggccccggcac

SEQ ID NO: 2845329 - RNA, 19 nt, Artificial Sequence
  Description of Artificial Sequence: Synthetic oligonucleotide
gacagugagguuauuuccu

SEQ ID NO: 2845330 - RNA, 19 nt, Artificial Sequence
  Description of Artificial Sequence: Synthetic oligonucleotide
uauucaccauugagggcau

SEQ ID NO: 2845331 - RNA, 19 nt, Artificial Sequence
  Description of Artificial Sequence: Synthetic oligonucleotide
accauugagggcauaggaa

SEQ ID NO: 2845332 - RNA, 19 nt, Artificial Sequence
  Description of Artificial Sequence: Synthetic oligonucleotide
gacuguguuuuagcaugag

SEQ ID NO: 2845333 - RNA, 19 nt, Artificial Sequence
  Description of Artificial Sequence: Synthetic oligonucleotide
agugucucugaggcugccg

SEQ ID NO: 2845334 - RNA, 19 nt, Artificial Sequence
  Description of Artificial Sequence: Synthetic oligonucleotide
auuucucuugugacgggca

SEQ ID NO: 2845335 - RNA, 19 nt, Artificial Sequence
  Description of Artificial Sequence: Synthetic oligonucleotide
cuucccgacuguguuuuag

SEQ ID NO: 2845336 - RNA, 19 nt, Artificial Sequence
  Description of Artificial Sequence: Synthetic oligonucleotide
ugugacgggcagagagaca

SEQ ID NO: 2845337 - RNA, 19 nt, Artificial Sequence
  Description of Artificial Sequence: Synthetic oligonucleotide
agacgugcauucugugggu

SEQ ID NO: 2845338 - RNA, 19 nt, Artificial Sequence
  Description of Artificial Sequence: Synthetic oligonucleotide
cagaaaguaccacaucugu

SEQ ID NO: 2845339 - RNA, 19 nt, Artificial Sequence
  Description of Artificial Sequence: Synthetic oligonucleotide
ggcaucaguguguauucac

SEQ ID NO: 2845340 - RNA, 19 nt, Artificial Sequence
  Description of Artificial Sequence: Synthetic oligonucleotide
guggcuccacuauagcgca

SEQ ID NO: 2845341 - RNA, 19 nt, Artificial Sequence
  Description of Artificial Sequence: Synthetic oligonucleotide
uucucuugugacgggcaga

SEQ ID NO: 2845342 - RNA, 19 nt, Artificial Sequence
  Description of Artificial Sequence: Synthetic oligonucleotide
cacccucuacagcacuucc

SEQ ID NO: 2845343 - RNA, 19 nt, Artificial Sequence
  Description of Artificial Sequence: Synthetic oligonucleotide
acuauagcgcaagcugacu

SEQ ID NO: 2845344 - RNA, 19 nt, Artificial Sequence
  Description of Artificial Sequence: Synthetic oligonucleotide
uucuguggguugccagcca

SEQ ID NO: 2845345 - RNA, 19 nt, Artificial Sequence
  Description of Artificial Sequence: Synthetic oligonucleotide
cagaugaguccgaggcccc

SEQ ID NO: 2845346 - RNA, 19 nt, Artificial Sequence
  Description of Artificial Sequence: Synthetic oligonucleotide
uagcgcaagcugacugccc

SEQ ID NO: 2845347 - RNA, 19 nt, Artificial Sequence
  Description of Artificial Sequence: Synthetic oligonucleotide
gagggcauaggaaccaucu

SEQ ID NO: 2845348 - RNA, 19 nt, Artificial Sequence
  Description of Artificial Sequence: Synthetic oligonucleotide
ugcauucuguggguugcca

SEQ ID NO: 2845349 - RNA, 19 nt, Artificial Sequence
  Description of Artificial Sequence: Synthetic oligonucleotide
gguguugaaggaaccggcc

SEQ ID NO: 2845350 - RNA, 19 nt, Artificial Sequence
  Description of Artificial Sequence: Synthetic oligonucleotide
gcaucaguguguauucacc

SEQ ID NO: 2845351 - RNA, 19 nt, Artificial Sequence
  Description of Artificial Sequence: Synthetic oligonucleotide
uaagggccagguagaugcu

SEQ ID NO: 2845352 - RNA, 19 nt, Artificial Sequence
  Description of Artificial Sequence: Synthetic oligonucleotide
ccccauuucucuugugacg

SEQ ID NO: 2845353 - RNA, 19 nt, Artificial Sequence
  Description of Artificial Sequence: Synthetic oligonucleotide
uccggaugaucuccagaau

SEQ ID NO: 2845354 - RNA, 19 nt, Artificial Sequence
  Description of Artificial Sequence: Synthetic oligonucleotide
agggcugggccagcgggcc

SEQ ID NO: 2845355 - RNA, 19 nt, Artificial Sequence
  Description of Artificial Sequence: Synthetic oligonucleotide
uugggaaggagggcguggu

SEQ ID NO: 2845356 - RNA, 19 nt, Artificial Sequence
  Description of Artificial Sequence: Synthetic oligonucleotide
ucuugggaaggagggcgug

SEQ ID NO: 2845357 - RNA, 19 nt, Artificial Sequence
  Description of Artificial Sequence: Synthetic oligonucleotide
cagccacuaggacuugcag

SEQ ID NO: 2845358 - RNA, 19 nt, Artificial Sequence
  Description of Artificial Sequence: Synthetic oligonucleotide
gcauucuguggguugccag

SEQ ID NO: 2845359 - RNA, 19 nt, Artificial Sequence
  Description of Artificial Sequence: Synthetic oligonucleotide
agaugaguccgaggccccg

SEQ ID NO: 2845360 - RNA, 19 nt, Artificial Sequence
  Description of Artificial Sequence: Synthetic oligonucleotide
agggcgugguguugaagga

SEQ ID NO: 2845361 - RNA, 19 nt, Artificial Sequence
  Description of Artificial Sequence: Synthetic oligonucleotide
acuaggacuugcaguguca

SEQ ID NO: 2845362 - RNA, 19 nt, Artificial Sequence
  Description of Artificial Sequence: Synthetic oligonucleotide
ccguggcuccacuauagcg

SEQ ID NO: 2845363 - RNA, 19 nt, Artificial Sequence
  Description of Artificial Sequence: Synthetic oligonucleotide
aggcagcugcagaagcccc

SEQ ID NO: 2845364 - RNA, 19 nt, Artificial Sequence
  Description of Artificial Sequence: Synthetic oligonucleotide
ccggaugaucuccagaauc

SEQ ID NO: 2845365 - RNA, 19 nt, Artificial Sequence
  Description of Artificial Sequence: Synthetic oligonucleotide
uguggguugccagccacua

SEQ ID NO: 2845366 - RNA, 19 nt, Artificial Sequence
  Description of Artificial Sequence: Synthetic oligonucleotide
uaggaaccaucuggaagcu

SEQ ID NO: 2845367 - RNA, 19 nt, Artificial Sequence
  Description of Artificial Sequence: Synthetic oligonucleotide
acagcacuucccgacugug

SEQ ID NO: 2845368 - RNA, 19 nt, Artificial Sequence
  Description of Artificial Sequence: Synthetic oligonucleotide
acgggcagagagacagggc

SEQ ID NO: 2845369 - RNA, 19 nt, Artificial Sequence
  Description of Artificial Sequence: Synthetic oligonucleotide
guaccgcagacgugcauuc

SEQ ID NO: 2845370 - RNA, 19 nt, Artificial Sequence
  Description of Artificial Sequence: Synthetic oligonucleotide
ggaagcuuuaagggccagg

SEQ ID NO: 2845371 - RNA, 19 nt, Artificial Sequence
  Description of Artificial Sequence: Synthetic oligonucleotide
agacagugucucugaggcu

SEQ ID NO: 2845372 - RNA, 19 nt, Artificial Sequence
  Description of Artificial Sequence: Synthetic oligonucleotide
gccagucuugggaaggagg

SEQ ID NO: 2845373 - RNA, 19 nt, Artificial Sequence
  Description of Artificial Sequence: Synthetic oligonucleotide
ugaguccgaggccccggca

SEQ ID NO: 2845374 - RNA, 19 nt, Artificial Sequence
  Description of Artificial Sequence: Synthetic oligonucleotide
gccguguccagacaguguc

SEQ ID NO: 2845375 - RNA, 19 nt, Artificial Sequence
  Description of Artificial Sequence: Synthetic oligonucleotide
uugcagugucaagggcugg

SEQ ID NO: 2845376 - RNA, 19 nt, Artificial Sequence
  Description of Artificial Sequence: Synthetic oligonucleotide
ggcauaggaaccaucugga

SEQ ID NO: 2845377 - RNA, 19 nt, Artificial Sequence
  Description of Artificial Sequence: Synthetic oligonucleotide
gcaggucucacccucuaca

SEQ ID NO: 2845378 - RNA, 19 nt, Artificial Sequence
  Description of Artificial Sequence: Synthetic oligonucleotide
caagcugacugccccagaa

SEQ ID NO: 2845379 - RNA, 19 nt, Artificial Sequence
  Description of Artificial Sequence: Synthetic oligonucleotide
aaccaucuggaagcuuuaa

SEQ ID NO: 2845380 - RNA, 19 nt, Artificial Sequence
  Description of Artificial Sequence: Synthetic oligonucleotide
cuccagaaucugugcccgg

SEQ ID NO: 2845381 - RNA, 19 nt, Artificial Sequence
  Description of Artificial Sequence: Synthetic oligonucleotide
gucaagggcugggccagcg

SEQ ID NO: 2845382 - RNA, 19 nt, Artificial Sequence
  Description of Artificial Sequence: Synthetic oligonucleotide
cugacugccccagaaagua

SEQ ID NO: 2845383 - RNA, 19 nt, Artificial Sequence
  Description of Artificial Sequence: Synthetic oligonucleotide
cagggcaggucucacccuc

SEQ ID NO: 2845384 - RNA, 19 nt, Artificial Sequence
  Description of Artificial Sequence: Synthetic oligonucleotide
gagggcaucaguguguauu

SEQ ID NO: 2845385 - RNA, 19 nt, Artificial Sequence
  Description of Artificial Sequence: Synthetic oligonucleotide
cuuccggaugaucuccaga

SEQ ID NO: 2845386 - RNA, 19 nt, Artificial Sequence
  Description of Artificial Sequence: Synthetic oligonucleotide
gaaggagggcgugguguug

SEQ ID NO: 2845387 - RNA, 19 nt, Artificial Sequence
  Description of Artificial Sequence: Synthetic oligonucleotide
cagucuugggaaggagggc

SEQ ID NO: 2845388 - RNA, 19 nt, Artificial Sequence
  Description of Artificial Sequence: Synthetic oligonucleotide
uggaagcuuuaagggccag

SEQ ID NO: 2845389 - RNA, 19 nt, Artificial Sequence
  Description of Artificial Sequence: Synthetic oligonucleotide
agccgggacagugagguua

SEQ ID NO: 2845390 - RNA, 19 nt, Artificial Sequence
  Description of Artificial Sequence: Synthetic oligonucleotide
guggguugccagccacuag

SEQ ID NO: 2845391 - RNA, 19 nt, Artificial Sequence
  Description of Artificial Sequence: Synthetic oligonucleotide
ggcuccacuauagcgcaag

SEQ ID NO: 2845392 - RNA, 19 nt, Artificial Sequence
  Description of Artificial Sequence: Synthetic oligonucleotide
ccagaaucugugcccggcg

SEQ ID NO: 2845393 - RNA, 19 nt, Artificial Sequence
  Description of Artificial Sequence: Synthetic oligonucleotide
ugugcccggcggugcagcc

SEQ ID NO: 2845394 - RNA, 19 nt, Artificial Sequence
  Description of Artificial Sequence: Synthetic oligonucleotide
caacagggcagccgggaca

SEQ ID NO: 2845395 - RNA, 19 nt, Artificial Sequence
  Description of Artificial Sequence: Synthetic oligonucleotide
ccacuauagcgcaagcuga

SEQ ID NO: 2845396 - RNA, 19 nt, Artificial Sequence
  Description of Artificial Sequence: Synthetic oligonucleotide
acagggcaggucucacccu

SEQ ID NO: 2845397 - RNA, 19 nt, Artificial Sequence
  Description of Artificial Sequence: Synthetic oligonucleotide
ugggccagcgggccguguc

SEQ ID NO: 2845398 - RNA, 19 nt, Artificial Sequence
  Description of Artificial Sequence: Synthetic oligonucleotide
aucugugcccggcggugca

SEQ ID NO: 2845399 - RNA, 19 nt, Artificial Sequence
  Description of Artificial Sequence: Synthetic oligonucleotide
cccagaaaguaccacaucu

SEQ ID NO: 2845400 - RNA, 19 nt, Artificial Sequence
  Description of Artificial Sequence: Synthetic oligonucleotide
uugagggcauaggaaccau

SEQ ID NO: 2845401 - RNA, 19 nt, Artificial Sequence
  Description of Artificial Sequence: Synthetic oligonucleotide
aagcuguaccgcagacgug

SEQ ID NO: 2845402 - RNA, 19 nt, Artificial Sequence
  Description of Artificial Sequence: Synthetic oligonucleotide
gcaugaggcagcugcagaa

SEQ ID NO: 2845403 - RNA, 19 nt, Artificial Sequence
  Description of Artificial Sequence: Synthetic oligonucleotide
gugagguuauuuccugccu

SEQ ID NO: 2845404 - RNA, 19 nt, Artificial Sequence
  Description of Artificial Sequence: Synthetic oligonucleotide
acugccccagaaaguacca

SEQ ID NO: 2845405 - RNA, 19 nt, Artificial Sequence
  Description of Artificial Sequence: Synthetic oligonucleotide
gagacagggcaggucucac

SEQ ID NO: 2845406 - RNA, 19 nt, Artificial Sequence
  Description of Artificial Sequence: Synthetic oligonucleotide
agccagucuugggaaggag

SEQ ID NO: 2845407 - RNA, 19 nt, Artificial Sequence
  Description of Artificial Sequence: Synthetic oligonucleotide
gcuuuaagggccagguaga

SEQ ID NO: 2845408 - RNA, 19 nt, Artificial Sequence
  Description of Artificial Sequence: Synthetic oligonucleotide
cagggcagccgggacagug

SEQ ID NO: 2845409 - RNA, 19 nt, Artificial Sequence
  Description of Artificial Sequence: Synthetic oligonucleotide
gugcagccagucuugggaa

SEQ ID NO: 2845410 - RNA, 19 nt, Artificial Sequence
  Description of Artificial Sequence: Synthetic oligonucleotide
ggcgugguguugaaggaac

SEQ ID NO: 2845411 - RNA, 19 nt, Artificial Sequence
  Description of Artificial Sequence: Synthetic oligonucleotide
gugucucugaggcugccgu

SEQ ID NO: 2845412 - RNA, 19 nt, Artificial Sequence
  Description of Artificial Sequence: Synthetic oligonucleotide
cagagagacagggcagguc

SEQ ID NO: 2845413 - RNA, 19 nt, Artificial Sequence
  Description of Artificial Sequence: Synthetic oligonucleotide
ccauuucucuugugacggg

SEQ ID NO: 2845414 - RNA, 19 nt, Artificial Sequence
  Description of Artificial Sequence: Synthetic oligonucleotide
cuaggacuugcagugucaa

SEQ ID NO: 2845415 - RNA, 19 nt, Artificial Sequence
  Description of Artificial Sequence: Synthetic oligonucleotide
cagcgggccguguccagac

SEQ ID NO: 2845416 - RNA, 19 nt, Artificial Sequence
  Description of Artificial Sequence: Synthetic oligonucleotide
ccucauucucucagaugag

SEQ ID NO: 2845417 - RNA, 19 nt, Artificial Sequence
  Description of Artificial Sequence: Synthetic oligonucleotide
cgugguguugaaggaaccg

SEQ ID NO: 2845418 - RNA, 19 nt, Artificial Sequence
  Description of Artificial Sequence: Synthetic oligonucleotide
guuuuagcaugaggcagcu

SEQ ID NO: 2845419 - RNA, 19 nt, Artificial Sequence
  Description of Artificial Sequence: Synthetic oligonucleotide
cucauucucucagaugagu

SEQ ID NO: 2845420 - RNA, 19 nt, Artificial Sequence
  Description of Artificial Sequence: Synthetic oligonucleotide
gcgggccguguccagacag

SEQ ID NO: 2845421 - RNA, 19 nt, Artificial Sequence
  Description of Artificial Sequence: Synthetic oligonucleotide
gguugccagccacuaggac

SEQ ID NO: 2845422 - RNA, 19 nt, Artificial Sequence
  Description of Artificial Sequence: Synthetic oligonucleotide
gaaccaucuggaagcuuua

SEQ ID NO: 2845423 - RNA, 19 nt, Artificial Sequence
  Description of Artificial Sequence: Synthetic oligonucleotide
gcuuccggaugaucuccag

SEQ ID NO: 2845424 - RNA, 19 nt, Artificial Sequence
  Description of Artificial Sequence: Synthetic oligonucleotide
gaaccggccguggaacgaa

SEQ ID NO: 2845425 - RNA, 19 nt, Artificial Sequence
  Description of Artificial Sequence: Synthetic oligonucleotide
gggcagccgggacagugag

SEQ ID NO: 2845426 - RNA, 19 nt, Artificial Sequence
  Description of Artificial Sequence: Synthetic oligonucleotide
uaccgcagacgugcauucu

SEQ ID NO: 2845427 - RNA, 19 nt, Artificial Sequence
  Description of Artificial Sequence: Synthetic oligonucleotide
ccagggacgcuuccggaug

SEQ ID NO: 2845428 - RNA, 19 nt, Artificial Sequence
  Description of Artificial Sequence: Synthetic oligonucleotide
gugcauucuguggguugcc

SEQ ID NO: 2845429 - RNA, 19 nt, Artificial Sequence
  Description of Artificial Sequence: Synthetic oligonucleotide
gcuccacuauagcgcaagc

SEQ ID NO: 2845430 - RNA, 19 nt, Artificial Sequence
  Description of Artificial Sequence: Synthetic oligonucleotide
cugccccagaaaguaccac

SEQ ID NO: 2845431 - RNA, 19 nt, Artificial Sequence
  Description of Artificial Sequence: Synthetic oligonucleotide
gaggcugccguggcuccac

SEQ ID NO: 2845432 - RNA, 19 nt, Artificial Sequence
  Description of Artificial Sequence: Synthetic oligonucleotide
gucucacccucuacagcac

SEQ ID NO: 2845433 - RNA, 19 nt, Artificial Sequence
  Description of Artificial Sequence: Synthetic oligonucleotide
cgugcauucuguggguugc

SEQ ID NO: 2845434 - RNA, 19 nt, Artificial Sequence
  Description of Artificial Sequence: Synthetic oligonucleotide
gcauaggaaccaucuggaa

SEQ ID NO: 2845435 - RNA, 19 nt, Artificial Sequence
  Description of Artificial Sequence: Synthetic oligonucleotide
gcagugucaagggcugggc

SEQ ID NO: 2845436 - RNA, 19 nt, Artificial Sequence
  Description of Artificial Sequence: Synthetic oligonucleotide
ggacgcuuccggaugaucu

SEQ ID NO: 2845437 - RNA, 19 nt, Artificial Sequence
  Description of Artificial Sequence: Synthetic oligonucleotide
cagggacgcuuccggauga

SEQ ID NO: 2845438 - RNA, 19 nt, Artificial Sequence
  Description of Artificial Sequence: Synthetic oligonucleotide
uggcuccacuauagcgcaa

SEQ ID NO: 2845439 - RNA, 19 nt, Artificial Sequence
  Description of Artificial Sequence: Synthetic oligonucleotide
gcagccgggacagugaggu

SEQ ID NO: 2845440 - RNA, 19 nt, Artificial Sequence
  Description of Artificial Sequence: Synthetic oligonucleotide
cugugcccggcggugcagc

SEQ ID NO: 2845441 - RNA, 19 nt, Artificial Sequence
  Description of Artificial Sequence: Synthetic oligonucleotide
agggcagccgggacaguga

SEQ ID NO: 2845442 - RNA, 19 nt, Artificial Sequence
  Description of Artificial Sequence: Synthetic oligonucleotide
cagugucucugaggcugcc

SEQ ID NO: 2845443 - RNA, 19 nt, Artificial Sequence
  Description of Artificial Sequence: Synthetic oligonucleotide
gccguggcuccacuauagc

SEQ ID NO: 2845444 - RNA, 19 nt, Artificial Sequence
  Description of Artificial Sequence: Synthetic oligonucleotide
ggcggugcagccagucuug

SEQ ID NO: 2845445 - RNA, 19 nt, Artificial Sequence
  Description of Artificial Sequence: Synthetic oligonucleotide
ggcaggucucacccucuac

SEQ ID NO: 2845446 - RNA, 19 nt, Artificial Sequence
  Description of Artificial Sequence: Synthetic oligonucleotide
ccccucauucucucagaug

SEQ ID NO: 2845447 - RNA, 19 nt, Artificial Sequence
  Description of Artificial Sequence: Synthetic oligonucleotide
cuccacuauagcgcaagcu

SEQ ID NO: 2845448 - RNA, 19 nt, Artificial Sequence
  Description of Artificial Sequence: Synthetic oligonucleotide
ccaacagggcagccgggac

SEQ ID NO: 2845449 - RNA, 19 nt, Artificial Sequence
  Description of Artificial Sequence: Synthetic oligonucleotide
aggagggcgugguguugaa

SEQ ID NO: 2845450 - RNA, 19 nt, Artificial Sequence
  Description of Artificial Sequence: Synthetic oligonucleotide
ccagccacuaggacuugca

SEQ ID NO: 2845451 - RNA, 19 nt, Artificial Sequence
  Description of Artificial Sequence: Synthetic oligonucleotide
agcgggccguguccagaca

SEQ ID NO: 2845452 - RNA, 19 nt, Artificial Sequence
  Description of Artificial Sequence: Synthetic oligonucleotide
uccgaggccccggcacccc

SEQ ID NO: 2845453 - RNA, 19 nt, Artificial Sequence
  Description of Artificial Sequence: Synthetic oligonucleotide
gggccguguccagacagug

SEQ ID NO: 2845454 - RNA, 19 nt, Artificial Sequence
  Description of Artificial Sequence: Synthetic oligonucleotide
cuuuaagggccagguagau

SEQ ID NO: 2845455 - RNA, 19 nt, Artificial Sequence
  Description of Artificial Sequence: Synthetic oligonucleotide
gggaaggagggcguggugu

SEQ ID NO: 2845456 - RNA, 19 nt, Artificial Sequence
  Description of Artificial Sequence: Synthetic oligonucleotide
guccgaggccccggcaccc

SEQ ID NO: 2845457 - RNA, 19 nt, Artificial Sequence
  Description of Artificial Sequence: Synthetic oligonucleotide
gcgugguguugaaggaacc

SEQ ID NO: 2845458 - RNA, 19 nt, Artificial Sequence
  Description of Artificial Sequence: Synthetic oligonucleotide
ggagggcgugguguugaag

SEQ ID NO: 2845459 - RNA, 19 nt, Artificial Sequence
  Description of Artificial Sequence: Synthetic oligonucleotide
acuucccgacuguguuuua

SEQ ID NO: 2845460 - RNA, 19 nt, Artificial Sequence
  Description of Artificial Sequence: Synthetic oligonucleotide
aaccggccguggaacgaaa

SEQ ID NO: 2845461 - RNA, 19 nt, Artificial Sequence
  Description of Artificial Sequence: Synthetic oligonucleotide
agggcaggucucacccucu

SEQ ID NO: 2845462 - RNA, 19 nt, Artificial Sequence
  Description of Artificial Sequence: Synthetic oligonucleotide
aggaaccaucuggaagcuu

SEQ ID NO: 2845463 - RNA, 19 nt, Artificial Sequence
  Description of Artificial Sequence: Synthetic oligonucleotide
cagcacuucccgacugugu

SEQ ID NO: 2845464 - RNA, 19 nt, Artificial Sequence
  Description of Artificial Sequence: Synthetic oligonucleotide
ggaaccggccguggaacga

SEQ ID NO: 2845465 - RNA, 19 nt, Artificial Sequence
  Description of Artificial Sequence: Synthetic oligonucleotide
ggcagccgggacagugagg

SEQ ID NO: 2845466 - RNA, 19 nt, Artificial Sequence
  Description of Artificial Sequence: Synthetic oligonucleotide
ccccagaaaguaccacauc

SEQ ID NO: 2845467 - RNA, 19 nt, Artificial Sequence
  Description of Artificial Sequence: Synthetic oligonucleotide
cagccagucuugggaagga

SEQ ID NO: 2845468 - RNA, 19 nt, Artificial Sequence
  Description of Artificial Sequence: Synthetic oligonucleotide
cuguggguugccagccacu

SEQ ID NO: 2845469 - RNA, 19 nt, Artificial Sequence
  Description of Artificial Sequence: Synthetic oligonucleotide
ggguugccagccacuagga

SEQ ID NO: 2845470 - RNA, 19 nt, Artificial Sequence
  Description of Artificial Sequence: Synthetic oligonucleotide
aggcugccguggcuccacu

SEQ ID NO: 2845471 - RNA, 19 nt, Artificial Sequence
  Description of Artificial Sequence: Synthetic oligonucleotide
cugccguggcuccacuaua

SEQ ID NO: 2845472 - RNA, 19 nt, Artificial Sequence
  Description of Artificial Sequence: Synthetic oligonucleotide
gcggugcagccagucuugg

SEQ ID NO: 2845473 - RNA, 19 nt, Artificial Sequence
  Description of Artificial Sequence: Synthetic oligonucleotide
gucuugggaaggagggcgu

SEQ ID NO: 2845474 - RNA, 19 nt, Artificial Sequence
  Description of Artificial Sequence: Synthetic oligonucleotide
cgcagacgugcauucugug

SEQ ID NO: 2845475 - RNA, 19 nt, Artificial Sequence
  Description of Artificial Sequence: Synthetic oligonucleotide
ggaaggagggcgugguguu

SEQ ID NO: 2845476 - RNA, 19 nt, Artificial Sequence
  Description of Artificial Sequence: Synthetic oligonucleotide
cacuucccgacuguguuuu

SEQ ID NO: 2845477 - RNA, 19 nt, Artificial Sequence
  Description of Artificial Sequence: Synthetic oligonucleotide
accggccguggaacgaaaa

SEQ ID NO: 2845478 - RNA, 19 nt, Artificial Sequence
  Description of Artificial Sequence: Synthetic oligonucleotide
gggcaucaguguguauuca

SEQ ID NO: 2845479 - RNA, 19 nt, Artificial Sequence
  Description of Artificial Sequence: Synthetic oligonucleotide
gacgugcauucuguggguu

SEQ ID NO: 2845480 - RNA, 19 nt, Artificial Sequence
  Description of Artificial Sequence: Synthetic oligonucleotide
ccucuacagcacuucccga

SEQ ID NO: 2845481 - RNA, 19 nt, Artificial Sequence
  Description of Artificial Sequence: Synthetic oligonucleotide
gcugccguggcuccacuau

SEQ ID NO: 2845482 - RNA, 19 nt, Artificial Sequence
  Description of Artificial Sequence: Synthetic oligonucleotide
gggcugggccagcgggccg

SEQ ID NO: 2845483 - RNA, 19 nt, Artificial Sequence
  Description of Artificial Sequence: Synthetic oligonucleotide
gcaagcugacugccccaga

SEQ ID NO: 2845484 - RNA, 19 nt, Artificial Sequence
  Description of Artificial Sequence: Synthetic oligonucleotide
gcugacugccccagaaagu

SEQ ID NO: 2845485 - RNA, 19 nt, Artificial Sequence
  Description of Artificial Sequence: Synthetic oligonucleotide
auucaccauugagggcaua

SEQ ID NO: 2845486 - RNA, 19 nt, Artificial Sequence
  Description of Artificial Sequence: Synthetic oligonucleotide
ccccaacagggcagccggg

SEQ ID NO: 2845487 - RNA, 19 nt, Artificial Sequence
  Description of Artificial Sequence: Synthetic oligonucleotide
agggacgcuuccggaugau

SEQ ID NO: 2845488 - RNA, 19 nt, Artificial Sequence
  Description of Artificial Sequence: Synthetic oligonucleotide
gggagggcaucagugugua

SEQ ID NO: 2845489 - RNA, 19 nt, Artificial Sequence
  Description of Artificial Sequence: Synthetic oligonucleotide
cgacuguguuuuagcauga

SEQ ID NO: 2845490 - RNA, 19 nt, Artificial Sequence
  Description of Artificial Sequence: Synthetic oligonucleotide
cggugcagccagucuuggg

SEQ ID NO: 2845491 - RNA, 19 nt, Artificial Sequence
  Description of Artificial Sequence: Synthetic oligonucleotide
gggcgugguguugaaggaa

SEQ ID NO: 2845492 - RNA, 19 nt, Artificial Sequence
  Description of Artificial Sequence: Synthetic oligonucleotide
cgcaagcugacugccccag

SEQ ID NO: 2845493 - RNA, 19 nt, Artificial Sequence
  Description of Artificial Sequence: Synthetic oligonucleotide
cucuugugacgggcagaga

SEQ ID NO: 2845494 - RNA, 19 nt, Artificial Sequence
  Description of Artificial Sequence: Synthetic oligonucleotide
gcgcaagcugacugcccca

SEQ ID NO: 2845495 - RNA, 19 nt, Artificial Sequence
  Description of Artificial Sequence: Synthetic oligonucleotide
gggacgcuuccggaugauc

SEQ ID NO: 2845496 - RNA, 19 nt, Artificial Sequence
  Description of Artificial Sequence: Synthetic oligonucleotide
gccagcgggccguguccag

SEQ ID NO: 2845497 - RNA, 19 nt, Artificial Sequence
  Description of Artificial Sequence: Synthetic oligonucleotide
ggggagggcaucagugugu

SEQ ID NO: 2845498 - RNA, 19 nt, Artificial Sequence
  Description of Artificial Sequence: Synthetic oligonucleotide
gcccagggacgcuuccgga

SEQ ID NO: 2845499 - RNA, 19 nt, Artificial Sequence
  Description of Artificial Sequence: Synthetic oligonucleotide
gcuguaccgcagacgugca

SEQ ID NO: 2845500 - RNA, 19 nt, Artificial Sequence
  Description of Artificial Sequence: Synthetic oligonucleotide
gccccagaaaguaccacau

SEQ ID NO: 2845501 - RNA, 19 nt, Artificial Sequence
  Description of Artificial Sequence: Synthetic oligonucleotide
cccaacagggcagccggga

SEQ ID NO: 2845502 - RNA, 19 nt, Artificial Sequence
  Description of Artificial Sequence: Synthetic oligonucleotide
gugcccggcggugcagcca

SEQ ID NO: 2845503 - RNA, 19 nt, Artificial Sequence
  Description of Artificial Sequence: Synthetic oligonucleotide
cccgacuguguuuuagcau

SEQ ID NO: 2845504 - RNA, 19 nt, Artificial Sequence
  Description of Artificial Sequence: Synthetic oligonucleotide
cuguaccgcagacgugcau

SEQ ID NO: 2845505 - RNA, 19 nt, Artificial Sequence
  Description of Artificial Sequence: Synthetic oligonucleotide
gcagagagacagggcaggu

SEQ ID NO: 2845506 - RNA, 19 nt, Artificial Sequence
  Description of Artificial Sequence: Synthetic oligonucleotide
acagggcagccgggacagu

SEQ ID NO: 2845507 - RNA, 19 nt, Artificial Sequence
  Description of Artificial Sequence: Synthetic oligonucleotide
ccgcagacgugcauucugu

SEQ ID NO: 2845508 - RNA, 19 nt, Artificial Sequence
  Description of Artificial Sequence: Synthetic oligonucleotide
gggcaggucucacccucua

SEQ ID NO: 2845509 - RNA, 19 nt, Artificial Sequence
  Description of Artificial Sequence: Synthetic oligonucleotide
gcacuucccgacuguguuu

SEQ ID NO: 2845510 - RNA, 19 nt, Artificial Sequence
  Description of Artificial Sequence: Synthetic oligonucleotide
ggccguguccagacagugu

SEQ ID NO: 2845511 - RNA, 19 nt, Artificial Sequence
  Description of Artificial Sequence: Synthetic oligonucleotide
cccagggacgcuuccggau

SEQ ID NO: 2845512 - RNA, 19 nt, Artificial Sequence
  Description of Artificial Sequence: Synthetic oligonucleotide
ccguguccagacagugucu

SEQ ID NO: 2845513 - RNA, 19 nt, Artificial Sequence
  Description of Artificial Sequence: Synthetic oligonucleotide
cccggcggugcagccaguc

SEQ ID NO: 2845514 - RNA, 19 nt, Artificial Sequence
  Description of Artificial Sequence: Synthetic oligonucleotide
ccagcgggccguguccaga

SEQ ID NO: 2845515 - RNA, 19 nt, Artificial Sequence
  Description of Artificial Sequence: Synthetic oligonucleotide
gccgggacagugagguuau

SEQ ID NO: 2845516 - RNA, 19 nt, Artificial Sequence
  Description of Artificial Sequence: Synthetic oligonucleotide
ggcugggccagcgggccgu

SEQ ID NO: 2845517 - RNA, 19 nt, Artificial Sequence
  Description of Artificial Sequence: Synthetic oligonucleotide
ggagggcaucaguguguau

SEQ ID NO: 2845518 - RNA, 19 nt, Artificial Sequence
  Description of Artificial Sequence: Synthetic oligonucleotide
gccugcccagggacgcuuc

SEQ ID NO: 2845519 - RNA, 19 nt, Artificial Sequence
  Description of Artificial Sequence: Synthetic oligonucleotide
gcugggccagcgggccgug

SEQ ID NO: 2845520 - RNA, 19 nt, Artificial Sequence
  Description of Artificial Sequence: Synthetic oligonucleotide
ccacuaggacuugcagugu

SEQ ID NO: 2845521 - RNA, 19 nt, Artificial Sequence
  Description of Artificial Sequence: Synthetic oligonucleotide
cgggacagugagguuauuu

SEQ ID NO: 2845522 - RNA, 19 nt, Artificial Sequence
  Description of Artificial Sequence: Synthetic oligonucleotide
cagccgggacagugagguu

SEQ ID NO: 2845523 - RNA, 19 nt, Artificial Sequence
  Description of Artificial Sequence: Synthetic oligonucleotide
ccggcggugcagccagucu

SEQ ID NO: 2845524 - RNA, 19 nt, Artificial Sequence
  Description of Artificial Sequence: Synthetic oligonucleotide
cggcggugcagccagucuu

SEQ ID NO: 2845525 - RNA, 19 nt, Artificial Sequence
  Description of Artificial Sequence: Synthetic oligonucleotide
cgggccguguccagacagu

SEQ ID NO: 2845526 - RNA, 19 nt, Artificial Sequence
  Description of Artificial Sequence: Synthetic oligonucleotide
cugggccagcgggccgugu

SEQ ID NO: 2845527 - RNA, 19 nt, Artificial Sequence
  Description of Artificial Sequence: Synthetic oligonucleotide
gcccggcggugcagccagu

SEQ ID NO: 2845528 - RNA, 19 nt, Artificial Sequence
  Description of Artificial Sequence: Synthetic oligonucleotide
ccgggacagugagguuauu

SEQ ID NO: 2845529 - RNA, 19 nt, Artificial Sequence
  Description of Artificial Sequence: Synthetic oligonucleotide
cuuuauugaaacaucagag

SEQ ID NO: 2845530 - RNA, 19 nt, Artificial Sequence
  Description of Artificial Sequence: Synthetic oligonucleotide
uuauugaaacaucagagac

SEQ ID NO: 2845531 - RNA, 19 nt, Artificial Sequence
  Description of Artificial Sequence: Synthetic oligonucleotide
ucuaaggccacgaagaaca

SEQ ID NO: 2845532 - RNA, 19 nt, Artificial Sequence
  Description of Artificial Sequence: Synthetic oligonucleotide
uucaggacagacauguugg

SEQ ID NO: 2845533 - RNA, 19 nt, Artificial Sequence
  Description of Artificial Sequence: Synthetic oligonucleotide
gauucuuuccucaacaugc

SEQ ID NO: 2845534 - RNA, 19 nt, Artificial Sequence
  Description of Artificial Sequence: Synthetic oligonucleotide
aacaaagaugcuucaggac

SEQ ID NO: 2845535 - RNA, 19 nt, Artificial Sequence
  Description of Artificial Sequence: Synthetic oligonucleotide
agaacaaagaugcuucagg

SEQ ID NO: 2845536 - RNA, 19 nt, Artificial Sequence
  Description of Artificial Sequence: Synthetic oligonucleotide
uuuauugaaacaucagaga

SEQ ID NO: 2845537 - RNA, 19 nt, Artificial Sequence
  Description of Artificial Sequence: Synthetic oligonucleotide
ugaggagacaaagugaggg

SEQ ID NO: 2845538 - RNA, 19 nt, Artificial Sequence
  Description of Artificial Sequence: Synthetic oligonucleotide
uauugaaacaucagagacc

SEQ ID NO: 2845539 - RNA, 19 nt, Artificial Sequence
  Description of Artificial Sequence: Synthetic oligonucleotide
agugagaaggcaucuaagg

SEQ ID NO: 2845540 - RNA, 19 nt, Artificial Sequence
  Description of Artificial Sequence: Synthetic oligonucleotide
uuuucugugucccaaggca

SEQ ID NO: 2845541 - RNA, 19 nt, Artificial Sequence
  Description of Artificial Sequence: Synthetic oligonucleotide
uacucuucuggucugaggc

SEQ ID NO: 2845542 - RNA, 19 nt, Artificial Sequence
  Description of Artificial Sequence: Synthetic oligonucleotide
ugaaacaucagagaccaug

SEQ ID NO: 2845543 - RNA, 19 nt, Artificial Sequence
  Description of Artificial Sequence: Synthetic oligonucleotide
cauggagcuaacaaggagc

SEQ ID NO: 2845544 - RNA, 19 nt, Artificial Sequence
  Description of Artificial Sequence: Synthetic oligonucleotide
aacaucagagaccauggga

SEQ ID NO: 2845545 - RNA, 19 nt, Artificial Sequence
  Description of Artificial Sequence: Synthetic oligonucleotide
aagguuuccguucuggagu

SEQ ID NO: 2845546 - RNA, 19 nt, Artificial Sequence
  Description of Artificial Sequence: Synthetic oligonucleotide
auugaaacaucagagacca

SEQ ID NO: 2845547 - RNA, 19 nt, Artificial Sequence
  Description of Artificial Sequence: Synthetic oligonucleotide
gacacaugugaguacagag

SEQ ID NO: 2845548 - RNA, 19 nt, Artificial Sequence
  Description of Artificial Sequence: Synthetic oligonucleotide
gaaacaucagagaccaugg

SEQ ID NO: 2845549 - RNA, 19 nt, Artificial Sequence
  Description of Artificial Sequence: Synthetic oligonucleotide
uuuccuauuggacuguccu

SEQ ID NO: 2845550 - RNA, 19 nt, Artificial Sequence
  Description of Artificial Sequence: Synthetic oligonucleotide
caguacuuggacuaggacc

SEQ ID NO: 2845551 - RNA, 19 nt, Artificial Sequence
  Description of Artificial Sequence: Synthetic oligonucleotide
aaggccacgaagaacaaag

SEQ ID NO: 2845552 - RNA, 19 nt, Artificial Sequence
  Description of Artificial Sequence: Synthetic oligonucleotide
ugugucccaaggcaggugg

SEQ ID NO: 2845553 - RNA, 19 nt, Artificial Sequence
  Description of Artificial Sequence: Synthetic oligonucleotide
cacaugugaguacagagcc

SEQ ID NO: 2845554 - RNA, 19 nt, Artificial Sequence
  Description of Artificial Sequence: Synthetic oligonucleotide
uuagucaagguucccagcu

SEQ ID NO: 2845555 - RNA, 19 nt, Artificial Sequence
  Description of Artificial Sequence: Synthetic oligonucleotide
ucuuuccucaacaugccug

SEQ ID NO: 2845556 - RNA, 19 nt, Artificial Sequence
  Description of Artificial Sequence: Synthetic oligonucleotide
uccacuacucuucuggucu

SEQ ID NO: 2845557 - RNA, 19 nt, Artificial Sequence
  Description of Artificial Sequence: Synthetic oligonucleotide
uauuggacuguccuagggc

SEQ ID NO: 2845558 - RNA, 19 nt, Artificial Sequence
  Description of Artificial Sequence: Synthetic oligonucleotide
aaacaucagagaccauggg

SEQ ID NO: 2845559 - RNA, 19 nt, Artificial Sequence
  Description of Artificial Sequence: Synthetic oligonucleotide
ugagacagccacuugucag

SEQ ID NO: 2845560 - RNA, 19 nt, Artificial Sequence
  Description of Artificial Sequence: Synthetic oligonucleotide
ugaguacagagccaggaac

SEQ ID NO: 2845561 - RNA, 19 nt, Artificial Sequence
  Description of Artificial Sequence: Synthetic oligonucleotide
ugagauagugagaaggcau

SEQ ID NO: 2845562 - RNA, 19 nt, Artificial Sequence
  Description of Artificial Sequence: Synthetic oligonucleotide
ucauggagcuaacaaggag

SEQ ID NO: 2845563 - RNA, 19 nt, Artificial Sequence
  Description of Artificial Sequence: Synthetic oligonucleotide
ccacgaagaacaaagaugc

SEQ ID NO: 2845564 - RNA, 19 nt, Artificial Sequence
  Description of Artificial Sequence: Synthetic oligonucleotide
accugagauagugagaagg

SEQ ID NO: 2845565 - RNA, 19 nt, Artificial Sequence
  Description of Artificial Sequence: Synthetic oligonucleotide
aggagcuuccgagagaggc

SEQ ID NO: 2845566 - RNA, 19 nt, Artificial Sequence
  Description of Artificial Sequence: Synthetic oligonucleotide
uaagguuuccguucuggag

SEQ ID NO: 2845567 - RNA, 19 nt, Artificial Sequence
  Description of Artificial Sequence: Synthetic oligonucleotide
uaggccacggcugagacag

SEQ ID NO: 2845568 - RNA, 19 nt, Artificial Sequence
  Description of Artificial Sequence: Synthetic oligonucleotide
uuucugugucccaaggcag

SEQ ID NO: 2845569 - RNA, 19 nt, Artificial Sequence
  Description of Artificial Sequence: Synthetic oligonucleotide
gaacaaagaugcuucagga

SEQ ID NO: 2845570 - RNA, 19 nt, Artificial Sequence
  Description of Artificial Sequence: Synthetic oligonucleotide
cuuuccucaacaugccugg

SEQ ID NO: 2845571 - RNA, 19 nt, Artificial Sequence
  Description of Artificial Sequence: Synthetic oligonucleotide
aacaaggagcucagggucc

SEQ ID NO: 2845572 - RNA, 19 nt, Artificial Sequence
  Description of Artificial Sequence: Synthetic oligonucleotide
aacuccuuuccuauuggac

SEQ ID NO: 2845573 - RNA, 19 nt, Artificial Sequence
  Description of Artificial Sequence: Synthetic oligonucleotide
cuuuagucaagguucccag

SEQ ID NO: 2845574 - RNA, 19 nt, Artificial Sequence
  Description of Artificial Sequence: Synthetic oligonucleotide
aguacuuggacuaggacca

SEQ ID NO: 2845575 - RNA, 19 nt, Artificial Sequence
  Description of Artificial Sequence: Synthetic oligonucleotide
uccuuggcagcccaagggg

SEQ ID NO: 2845576 - RNA, 19 nt, Artificial Sequence
  Description of Artificial Sequence: Synthetic oligonucleotide
agagccaggaacuccuuuc

SEQ ID NO: 2845577 - RNA, 19 nt, Artificial Sequence
  Description of Artificial Sequence: Synthetic oligonucleotide
acuccuuuccuauuggacu

SEQ ID NO: 2845578 - RNA, 19 nt, Artificial Sequence
  Description of Artificial Sequence: Synthetic oligonucleotide
uggacuaggaccagggccu

SEQ ID NO: 2845579 - RNA, 19 nt, Artificial Sequence
  Description of Artificial Sequence: Synthetic oligonucleotide
uguccuagggcuuuucugu

SEQ ID NO: 2845580 - RNA, 19 nt, Artificial Sequence
  Description of Artificial Sequence: Synthetic oligonucleotide
gcuaacaaggagcucaggg

SEQ ID NO: 2845581 - RNA, 19 nt, Artificial Sequence
  Description of Artificial Sequence: Synthetic oligonucleotide
gaggagacaaagugagggg

SEQ ID NO: 2845582 - RNA, 19 nt, Artificial Sequence
  Description of Artificial Sequence: Synthetic oligonucleotide
acacaugugaguacagagc

SEQ ID NO: 2845583 - RNA, 19 nt, Artificial Sequence
  Description of Artificial Sequence: Synthetic oligonucleotide
auuggacuguccuagggcu

SEQ ID NO: 2845584 - RNA, 19 nt, Artificial Sequence
  Description of Artificial Sequence: Synthetic oligonucleotide
caugggaugggcccuaagg

SEQ ID NO: 2845585 - RNA, 19 nt, Artificial Sequence
  Description of Artificial Sequence: Synthetic oligonucleotide
uccuauuggacuguccuag

SEQ ID NO: 2845586 - RNA, 19 nt, Artificial Sequence
  Description of Artificial Sequence: Synthetic oligonucleotide
aggacagacauguugggga

SEQ ID NO: 2845587 - RNA, 19 nt, Artificial Sequence
  Description of Artificial Sequence: Synthetic oligonucleotide
gaggcuguggcuuuaguca

SEQ ID NO: 2845588 - RNA, 19 nt, Artificial Sequence
  Description of Artificial Sequence: Synthetic oligonucleotide
ucuggucugaggcuguggc

SEQ ID NO: 2845589 - RNA, 19 nt, Artificial Sequence
  Description of Artificial Sequence: Synthetic oligonucleotide
agucaagguucccagcuuc

SEQ ID NO: 2845590 - RNA, 19 nt, Artificial Sequence
  Description of Artificial Sequence: Synthetic oligonucleotide
gugagaaggcaucuaaggc

SEQ ID NO: 2845591 - RNA, 19 nt, Artificial Sequence
  Description of Artificial Sequence: Synthetic oligonucleotide
aagaacaaagaugcuucag

SEQ ID NO: 2845592 - RNA, 19 nt, Artificial Sequence
  Description of Artificial Sequence: Synthetic oligonucleotide
gagaccaugggaugggccc

SEQ ID NO: 2845593 - RNA, 19 nt, Artificial Sequence
  Description of Artificial Sequence: Synthetic oligonucleotide
uguggcuuuagucaagguu

SEQ ID NO: 2845594 - RNA, 19 nt, Artificial Sequence
  Description of Artificial Sequence: Synthetic oligonucleotide
uucugugucccaaggcagg

SEQ ID NO: 2845595 - RNA, 19 nt, Artificial Sequence
  Description of Artificial Sequence: Synthetic oligonucleotide
aaggggauacaggagcuuc

SEQ ID NO: 2845596 - RNA, 19 nt, Artificial Sequence
  Description of Artificial Sequence: Synthetic oligonucleotide
uucugggcaccugagauag

SEQ ID NO: 2845597 - RNA, 19 nt, Artificial Sequence
  Description of Artificial Sequence: Synthetic oligonucleotide
aagugaggggcucccacag

SEQ ID NO: 2845598 - RNA, 19 nt, Artificial Sequence
  Description of Artificial Sequence: Synthetic oligonucleotide
uagugagaaggcaucuaag

SEQ ID NO: 2845599 - RNA, 19 nt, Artificial Sequence
  Description of Artificial Sequence: Synthetic oligonucleotide
acaguacuuggacuaggac

SEQ ID NO: 2845600 - RNA, 19 nt, Artificial Sequence
  Description of Artificial Sequence: Synthetic oligonucleotide
gaugcuucaggacagacau

SEQ ID NO: 2845601 - RNA, 19 nt, Artificial Sequence
  Description of Artificial Sequence: Synthetic oligonucleotide
uacagagccaggaacuccu

SEQ ID NO: 2845602 - RNA, 19 nt, Artificial Sequence
  Description of Artificial Sequence: Synthetic oligonucleotide
gagacagccacuugucagc

SEQ ID NO: 2845603 - RNA, 19 nt, Artificial Sequence
  Description of Artificial Sequence: Synthetic oligonucleotide
uccucaacaugccuggccu

SEQ ID NO: 2845604 - RNA, 19 nt, Artificial Sequence
  Description of Artificial Sequence: Synthetic oligonucleotide
agagaggccccucauggag

SEQ ID NO: 2845605 - RNA, 19 nt, Artificial Sequence
  Description of Artificial Sequence: Synthetic oligonucleotide
caugugaguacagagccag

SEQ ID NO: 2845606 - RNA, 19 nt, Artificial Sequence
  Description of Artificial Sequence: Synthetic oligonucleotide
aagaugcuucaggacagac

SEQ ID NO: 2845607 - RNA, 19 nt, Artificial Sequence
  Description of Artificial Sequence: Synthetic oligonucleotide
uuuagucaagguucccagc

SEQ ID NO: 2845608 - RNA, 19 nt, Artificial Sequence
  Description of Artificial Sequence: Synthetic oligonucleotide
auagugagaaggcaucuaa

SEQ ID NO: 2845609 - RNA, 19 nt, Artificial Sequence
  Description of Artificial Sequence: Synthetic oligonucleotide
aaagugaggggcucccaca

SEQ ID NO: 2845610 - RNA, 19 nt, Artificial Sequence
  Description of Artificial Sequence: Synthetic oligonucleotide
auacaggagcuuccgagag

SEQ ID NO: 2845611 - RNA, 19 nt, Artificial Sequence
  Description of Artificial Sequence: Synthetic oligonucleotide
cuauuggacuguccuaggg

SEQ ID NO: 2845612 - RNA, 19 nt, Artificial Sequence
  Description of Artificial Sequence: Synthetic oligonucleotide
aggaacuccuuuccuauug

SEQ ID NO: 2845613 - RNA, 19 nt, Artificial Sequence
  Description of Artificial Sequence: Synthetic oligonucleotide
ucaggacagacauguuggg

SEQ ID NO: 2845614 - RNA, 19 nt, Artificial Sequence
  Description of Artificial Sequence: Synthetic oligonucleotide
guggcuuuagucaagguuc

SEQ ID NO: 2845615 - RNA, 19 nt, Artificial Sequence
  Description of Artificial Sequence: Synthetic oligonucleotide
acauguuggggacugggca

SEQ ID NO: 2845616 - RNA, 19 nt, Artificial Sequence
  Description of Artificial Sequence: Synthetic oligonucleotide
ccucauggagcuaacaagg

SEQ ID NO: 2845617 - RNA, 19 nt, Artificial Sequence
  Description of Artificial Sequence: Synthetic oligonucleotide
gauacaggagcuuccgaga

SEQ ID NO: 2845618 - RNA, 19 nt, Artificial Sequence
  Description of Artificial Sequence: Synthetic oligonucleotide
aucagagaccaugggaugg

SEQ ID NO: 2845619 - RNA, 19 nt, Artificial Sequence
  Description of Artificial Sequence: Synthetic oligonucleotide
ggauacaggagcuuccgag

SEQ ID NO: 2845620 - RNA, 19 nt, Artificial Sequence
  Description of Artificial Sequence: Synthetic oligonucleotide
ucuggagucaggauucuuu

SEQ ID NO: 2845621 - RNA, 19 nt, Artificial Sequence
  Description of Artificial Sequence: Synthetic oligonucleotide
cuuuucugugucccaaggc

SEQ ID NO: 2845622 - RNA, 19 nt, Artificial Sequence
  Description of Artificial Sequence: Synthetic oligonucleotide
agcccaaggggauacagga

SEQ ID NO: 2845623 - RNA, 19 nt, Artificial Sequence
  Description of Artificial Sequence: Synthetic oligonucleotide
acagccacuugucagcugu

SEQ ID NO: 2845624 - RNA, 19 nt, Artificial Sequence
  Description of Artificial Sequence: Synthetic oligonucleotide
acaugccuggccugggccc

SEQ ID NO: 2845625 - RNA, 19 nt, Artificial Sequence
  Description of Artificial Sequence: Synthetic oligonucleotide
acaggagcuuccgagagag

SEQ ID NO: 2845626 - RNA, 19 nt, Artificial Sequence
  Description of Artificial Sequence: Synthetic oligonucleotide
uuccucaacaugccuggcc

SEQ ID NO: 2845627 - RNA, 19 nt, Artificial Sequence
  Description of Artificial Sequence: Synthetic oligonucleotide
aggaccagggccuccuugg

SEQ ID NO: 2845628 - RNA, 19 nt, Artificial Sequence
  Description of Artificial Sequence: Synthetic oligonucleotide
cuugccuccacuacucuuc

SEQ ID NO: 2845629 - RNA, 19 nt, Artificial Sequence
  Description of Artificial Sequence: Synthetic oligonucleotide
cauguuggggacugggcag

SEQ ID NO: 2845630 - RNA, 19 nt, Artificial Sequence
  Description of Artificial Sequence: Synthetic oligonucleotide
uccccaugacacaugugag

SEQ ID NO: 2845631 - RNA, 19 nt, Artificial Sequence
  Description of Artificial Sequence: Synthetic oligonucleotide
ucaggauucuuuccucaac

SEQ ID NO: 2845632 - RNA, 19 nt, Artificial Sequence
  Description of Artificial Sequence: Synthetic oligonucleotide
augggaugggcccuaaggu

SEQ ID NO: 2845633 - RNA, 19 nt, Artificial Sequence
  Description of Artificial Sequence: Synthetic oligonucleotide
aaguugcccuucugggcac

SEQ ID NO: 2845634 - RNA, 19 nt, Artificial Sequence
  Description of Artificial Sequence: Synthetic oligonucleotide
uguccuugccuccacuacu

SEQ ID NO: 2845635 - RNA, 19 nt, Artificial Sequence
  Description of Artificial Sequence: Synthetic oligonucleotide
uggcuuuagucaagguucc

SEQ ID NO: 2845636 - RNA, 19 nt, Artificial Sequence
  Description of Artificial Sequence: Synthetic oligonucleotide
ugaggcuguggcuuuaguc

SEQ ID NO: 2845637 - RNA, 19 nt, Artificial Sequence
  Description of Artificial Sequence: Synthetic oligonucleotide
ucagagaccaugggauggg

SEQ ID NO: 2845638 - RNA, 19 nt, Artificial Sequence
  Description of Artificial Sequence: Synthetic oligonucleotide
gaagaacaaagaugcuuca

SEQ ID NO: 2845639 - RNA, 19 nt, Artificial Sequence
  Description of Artificial Sequence: Synthetic oligonucleotide
uugucagcuguccuugccu

SEQ ID NO: 2845640 - RNA, 19 nt, Artificial Sequence
  Description of Artificial Sequence: Synthetic oligonucleotide
gagaaggcaucuaaggcca

SEQ ID NO: 2845641 - RNA, 19 nt, Artificial Sequence
  Description of Artificial Sequence: Synthetic oligonucleotide
aucuaaggccacgaagaac

SEQ ID NO: 2845642 - RNA, 19 nt, Artificial Sequence
  Description of Artificial Sequence: Synthetic oligonucleotide
acuuggacuaggaccaggg

SEQ ID NO: 2845643 - RNA, 19 nt, Artificial Sequence
  Description of Artificial Sequence: Synthetic oligonucleotide
uuaguggcugaggagacaa

SEQ ID NO: 2845644 - RNA, 19 nt, Artificial Sequence
  Description of Artificial Sequence: Synthetic oligonucleotide
agguuuccguucuggaguc

SEQ ID NO: 2845645 - RNA, 19 nt, Artificial Sequence
  Description of Artificial Sequence: Synthetic oligonucleotide
uuuccguucuggagucagg

SEQ ID NO: 2845646 - RNA, 19 nt, Artificial Sequence
  Description of Artificial Sequence: Synthetic oligonucleotide
cuccuuggcagcccaaggg

SEQ ID NO: 2845647 - RNA, 19 nt, Artificial Sequence
  Description of Artificial Sequence: Synthetic oligonucleotide
uggagucaggauucuuucc

SEQ ID NO: 2845648 - RNA, 19 nt, Artificial Sequence
  Description of Artificial Sequence: Synthetic oligonucleotide
gcugaggagacaaagugag

SEQ ID NO: 2845649 - RNA, 19 nt, Artificial Sequence
  Description of Artificial Sequence: Synthetic oligonucleotide
agacaaagugaggggcucc

SEQ ID NO: 2845650 - RNA, 19 nt, Artificial Sequence
  Description of Artificial Sequence: Synthetic oligonucleotide
aagguucccagcuucccuu

SEQ ID NO: 2845651 - RNA, 19 nt, Artificial Sequence
  Description of Artificial Sequence: Synthetic oligonucleotide
ucccacaguacuuggacua

SEQ ID NO: 2845652 - RNA, 19 nt, Artificial Sequence
  Description of Artificial Sequence: Synthetic oligonucleotide
acaaggagcucaggguccc

SEQ ID NO: 2845653 - RNA, 19 nt, Artificial Sequence
  Description of Artificial Sequence: Synthetic oligonucleotide
agacauguuggggacuggg

SEQ ID NO: 2845654 - RNA, 19 nt, Artificial Sequence
  Description of Artificial Sequence: Synthetic oligonucleotide
gaaggcaucuaaggccacg

SEQ ID NO: 2845655 - RNA, 19 nt, Artificial Sequence
  Description of Artificial Sequence: Synthetic oligonucleotide
gagauagugagaaggcauc

SEQ ID NO: 2845656 - RNA, 19 nt, Artificial Sequence
  Description of Artificial Sequence: Synthetic oligonucleotide
cuuuccuauuggacugucc

SEQ ID NO: 2845657 - RNA, 19 nt, Artificial Sequence
  Description of Artificial Sequence: Synthetic oligonucleotide
gagccaggaacuccuuucc

SEQ ID NO: 2845658 - RNA, 19 nt, Artificial Sequence
  Description of Artificial Sequence: Synthetic oligonucleotide
ggagcuaacaaggagcuca

SEQ ID NO: 2845659 - RNA, 19 nt, Artificial Sequence
  Description of Artificial Sequence: Synthetic oligonucleotide
ggcaucuaaggccacgaag

SEQ ID NO: 2845660 - RNA, 19 nt, Artificial Sequence
  Description of Artificial Sequence: Synthetic oligonucleotide
acgaagaacaaagaugcuu

SEQ ID NO: 2845661 - RNA, 19 nt, Artificial Sequence
  Description of Artificial Sequence: Synthetic oligonucleotide
cuugucagcuguccuugcc

SEQ ID NO: 2845662 - RNA, 19 nt, Artificial Sequence
  Description of Artificial Sequence: Synthetic oligonucleotide
agagaccaugggaugggcc

SEQ ID NO: 2845663 - RNA, 19 nt, Artificial Sequence
  Description of Artificial Sequence: Synthetic oligonucleotide
aaggcaucuaaggccacga

SEQ ID NO: 2845664 - RNA, 19 nt, Artificial Sequence
  Description of Artificial Sequence: Synthetic oligonucleotide
cuggagucaggauucuuuc

SEQ ID NO: 2845665 - RNA, 19 nt, Artificial Sequence
  Description of Artificial Sequence: Synthetic oligonucleotide
ggacugggcagccauaggc

SEQ ID NO: 2845666 - RNA, 19 nt, Artificial Sequence
  Description of Artificial Sequence: Synthetic oligonucleotide
cugaggagacaaagugagg

SEQ ID NO: 2845667 - RNA, 19 nt, Artificial Sequence
  Description of Artificial Sequence: Synthetic oligonucleotide
uagggcuuuucuguguccc

SEQ ID NO: 2845668 - RNA, 19 nt, Artificial Sequence
  Description of Artificial Sequence: Synthetic oligonucleotide
auguuggggacugggcagc

SEQ ID NO: 2845669 - RNA, 19 nt, Artificial Sequence
  Description of Artificial Sequence: Synthetic oligonucleotide
ggaacuccuuuccuauugg

SEQ ID NO: 2845670 - RNA, 19 nt, Artificial Sequence
  Description of Artificial Sequence: Synthetic oligonucleotide
ccugagauagugagaaggc

SEQ ID NO: 2845671 - RNA, 19 nt, Artificial Sequence
  Description of Artificial Sequence: Synthetic oligonucleotide
cucaacaugccuggccugg

SEQ ID NO: 2845672 - RNA, 19 nt, Artificial Sequence
  Description of Artificial Sequence: Synthetic oligonucleotide
cuguccuagggcuuuucug

SEQ ID NO: 2845673 - RNA, 19 nt, Artificial Sequence
  Description of Artificial Sequence: Synthetic oligonucleotide
caucagagaccaugggaug

SEQ ID NO: 2845674 - RNA, 19 nt, Artificial Sequence
  Description of Artificial Sequence: Synthetic oligonucleotide
uucccagcuucccuuuuga

SEQ ID NO: 2845675 - RNA, 19 nt, Artificial Sequence
  Description of Artificial Sequence: Synthetic oligonucleotide
acagacauguuggggacug

SEQ ID NO: 2845676 - RNA, 19 nt, Artificial Sequence
  Description of Artificial Sequence: Synthetic oligonucleotide
gccacgaagaacaaagaug

SEQ ID NO: 2845677 - RNA, 19 nt, Artificial Sequence
  Description of Artificial Sequence: Synthetic oligonucleotide
ugacacaugugaguacaga

SEQ ID NO: 2845678 - RNA, 19 nt, Artificial Sequence
  Description of Artificial Sequence: Synthetic oligonucleotide
caugacacaugugaguaca

SEQ ID NO: 2845679 - RNA, 19 nt, Artificial Sequence
  Description of Artificial Sequence: Synthetic oligonucleotide
caaagugaggggcucccac

SEQ ID NO: 2845680 - RNA, 19 nt, Artificial Sequence
  Description of Artificial Sequence: Synthetic oligonucleotide
cgaagaacaaagaugcuuc

SEQ ID NO: 2845681 - RNA, 19 nt, Artificial Sequence
  Description of Artificial Sequence: Synthetic oligonucleotide
uacuuggacuaggaccagg

SEQ ID NO: 2845682 - RNA, 19 nt, Artificial Sequence
  Description of Artificial Sequence: Synthetic oligonucleotide
caggauucuuuccucaaca

SEQ ID NO: 2845683 - RNA, 19 nt, Artificial Sequence
  Description of Artificial Sequence: Synthetic oligonucleotide
ucccaaggcagguggaggu

SEQ ID NO: 2845684 - RNA, 19 nt, Artificial Sequence
  Description of Artificial Sequence: Synthetic oligonucleotide
cuaacaaggagcucagggu

SEQ ID NO: 2845685 - RNA, 19 nt, Artificial Sequence
  Description of Artificial Sequence: Synthetic oligonucleotide
gacugggcagccauaggcc

SEQ ID NO: 2845686 - RNA, 19 nt, Artificial Sequence
  Description of Artificial Sequence: Synthetic oligonucleotide
aggggauacaggagcuucc

SEQ ID NO: 2845687 - RNA, 19 nt, Artificial Sequence
  Description of Artificial Sequence: Synthetic oligonucleotide
gagcuuccgagagaggccc

SEQ ID NO: 2845688 - RNA, 19 nt, Artificial Sequence
  Description of Artificial Sequence: Synthetic oligonucleotide
uacaggagcuuccgagaga

SEQ ID NO: 2845689 - RNA, 19 nt, Artificial Sequence
  Description of Artificial Sequence: Synthetic oligonucleotide
uuccguucuggagucagga

SEQ ID NO: 2845690 - RNA, 19 nt, Artificial Sequence
  Description of Artificial Sequence: Synthetic oligonucleotide
gacaaagugaggggcuccc

SEQ ID NO: 2845691 - RNA, 19 nt, Artificial Sequence
  Description of Artificial Sequence: Synthetic oligonucleotide
agccacuugucagcugucc

SEQ ID NO: 2845692 - RNA, 19 nt, Artificial Sequence
  Description of Artificial Sequence: Synthetic oligonucleotide
gcuuuucugugucccaagg

SEQ ID NO: 2845693 - RNA, 19 nt, Artificial Sequence
  Description of Artificial Sequence: Synthetic oligonucleotide
agauagugagaaggcaucu

SEQ ID NO: 2845694 - RNA, 19 nt, Artificial Sequence
  Description of Artificial Sequence: Synthetic oligonucleotide
uggaggucggaaguugccc

SEQ ID NO: 2845695 - RNA, 19 nt, Artificial Sequence
  Description of Artificial Sequence: Synthetic oligonucleotide
cuuggacuaggaccagggc

SEQ ID NO: 2845696 - RNA, 19 nt, Artificial Sequence
  Description of Artificial Sequence: Synthetic oligonucleotide
gacauguuggggacugggc

SEQ ID NO: 2845697 - RNA, 19 nt, Artificial Sequence
  Description of Artificial Sequence: Synthetic oligonucleotide
ucaagguucccagcuuccc

SEQ ID NO: 2845698 - RNA, 19 nt, Artificial Sequence
  Description of Artificial Sequence: Synthetic oligonucleotide
aggauucuuuccucaacau

SEQ ID NO: 2845699 - RNA, 19 nt, Artificial Sequence
  Description of Artificial Sequence: Synthetic oligonucleotide
ggaaguugcccuucugggc

SEQ ID NO: 2845700 - RNA, 19 nt, Artificial Sequence
  Description of Artificial Sequence: Synthetic oligonucleotide
auggagcuaacaaggagcu

SEQ ID NO: 2845701 - RNA, 19 nt, Artificial Sequence
  Description of Artificial Sequence: Synthetic oligonucleotide
caggacagacauguugggg

SEQ ID NO: 2845702 - RNA, 19 nt, Artificial Sequence
  Description of Artificial Sequence: Synthetic oligonucleotide
ugucagcuguccuugccuc

SEQ ID NO: 2845703 - RNA, 19 nt, Artificial Sequence
  Description of Artificial Sequence: Synthetic oligonucleotide
ugcccuucugggcaccuga

SEQ ID NO: 2845704 - RNA, 19 nt, Artificial Sequence
  Description of Artificial Sequence: Synthetic oligonucleotide
uaggaccagggccuccuug

SEQ ID NO: 2845705 - RNA, 19 nt, Artificial Sequence
  Description of Artificial Sequence: Synthetic oligonucleotide
guuuccguucuggagucag

SEQ ID NO: 2845706 - RNA, 19 nt, Artificial Sequence
  Description of Artificial Sequence: Synthetic oligonucleotide
gagucaggauucuuuccuc

SEQ ID NO: 2845707 - RNA, 19 nt, Artificial Sequence
  Description of Artificial Sequence: Synthetic oligonucleotide
cauaggccacggcugagac

SEQ ID NO: 2845708 - RNA, 19 nt, Artificial Sequence
  Description of Artificial Sequence: Synthetic oligonucleotide
ucaacaugccuggccuggg

SEQ ID NO: 2845709 - RNA, 19 nt, Artificial Sequence
  Description of Artificial Sequence: Synthetic oligonucleotide
aaagaugcuucaggacaga

SEQ ID NO: 2845710 - RNA, 19 nt, Artificial Sequence
  Description of Artificial Sequence: Synthetic oligonucleotide
cuaagguuuccguucugga

SEQ ID NO: 2845711 - RNA, 19 nt, Artificial Sequence
  Description of Artificial Sequence: Synthetic oligonucleotide
cccaaggggauacaggagc

SEQ ID NO: 2845712 - RNA, 19 nt, Artificial Sequence
  Description of Artificial Sequence: Synthetic oligonucleotide
cagcccaaggggauacagg

SEQ ID NO: 2845713 - RNA, 19 nt, Artificial Sequence
  Description of Artificial Sequence: Synthetic oligonucleotide
gcaucuaaggccacgaaga

SEQ ID NO: 2845714 - RNA, 19 nt, Artificial Sequence
  Description of Artificial Sequence: Synthetic oligonucleotide
acuguccuagggcuuuucu

SEQ ID NO: 2845715 - RNA, 19 nt, Artificial Sequence
  Description of Artificial Sequence: Synthetic oligonucleotide
ugggaugggcccuaagguu

SEQ ID NO: 2845716 - RNA, 19 nt, Artificial Sequence
  Description of Artificial Sequence: Synthetic oligonucleotide
ucuucuggucugaggcugu

SEQ ID NO: 2845717 - RNA, 19 nt, Artificial Sequence
  Description of Artificial Sequence: Synthetic oligonucleotide
cugggcaccugagauagug

SEQ ID NO: 2845718 - RNA, 19 nt, Artificial Sequence
  Description of Artificial Sequence: Synthetic oligonucleotide
gggcaccugagauagugag

SEQ ID NO: 2845719 - RNA, 19 nt, Artificial Sequence
  Description of Artificial Sequence: Synthetic oligonucleotide
ugggcagccauaggccacg

SEQ ID NO: 2845720 - RNA, 19 nt, Artificial Sequence
  Description of Artificial Sequence: Synthetic oligonucleotide
gagcuaacaaggagcucag

SEQ ID NO: 2845721 - RNA, 19 nt, Artificial Sequence
  Description of Artificial Sequence: Synthetic oligonucleotide
cucuucuggucugaggcug

SEQ ID NO: 2845722 - RNA, 19 nt, Artificial Sequence
  Description of Artificial Sequence: Synthetic oligonucleotide
uccuagggcuuuucugugu

SEQ ID NO: 2845723 - RNA, 19 nt, Artificial Sequence
  Description of Artificial Sequence: Synthetic oligonucleotide
ugggcaccugagauaguga

SEQ ID NO: 2845724 - RNA, 19 nt, Artificial Sequence
  Description of Artificial Sequence: Synthetic oligonucleotide
uuccuauuggacuguccua

SEQ ID NO: 2845725 - RNA, 19 nt, Artificial Sequence
  Description of Artificial Sequence: Synthetic oligonucleotide
uuccgagagaggccccuca

SEQ ID NO: 2845726 - RNA, 19 nt, Artificial Sequence
  Description of Artificial Sequence: Synthetic oligonucleotide
agaggccccucauggagcu

SEQ ID NO: 2845727 - RNA, 19 nt, Artificial Sequence
  Description of Artificial Sequence: Synthetic oligonucleotide
agaugcuucaggacagaca

SEQ ID NO: 2845728 - RNA, 19 nt, Artificial Sequence
  Description of Artificial Sequence: Synthetic oligonucleotide
uucuggucugaggcugugg

SEQ ID NO: 2845729 - RNA, 19 nt, Artificial Sequence
  Description of Artificial Sequence: Synthetic oligonucleotide
cacaguacuuggacuagga

SEQ ID NO: 2845730 - RNA, 19 nt, Artificial Sequence
  Description of Artificial Sequence: Synthetic oligonucleotide
cucauggagcuaacaagga

SEQ ID NO: 2845731 - RNA, 19 nt, Artificial Sequence
  Description of Artificial Sequence: Synthetic oligonucleotide
guacagagccaggaacucc

SEQ ID NO: 2845732 - RNA, 19 nt, Artificial Sequence
  Description of Artificial Sequence: Synthetic oligonucleotide
gaguacagagccaggaacu

SEQ ID NO: 2845733 - RNA, 19 nt, Artificial Sequence
  Description of Artificial Sequence: Synthetic oligonucleotide
uggucugaggcuguggcuu

SEQ ID NO: 2845734 - RNA, 19 nt, Artificial Sequence
  Description of Artificial Sequence: Synthetic oligonucleotide
guucccagcuucccuuuug

SEQ ID NO: 2845735 - RNA, 19 nt, Artificial Sequence
  Description of Artificial Sequence: Synthetic oligonucleotide
cgagagaggccccucaugg

SEQ ID NO: 2845736 - RNA, 19 nt, Artificial Sequence
  Description of Artificial Sequence: Synthetic oligonucleotide
acuacucuucuggucugag

SEQ ID NO: 2845737 - RNA, 19 nt, Artificial Sequence
  Description of Artificial Sequence: Synthetic oligonucleotide
uugccuccacuacucuucu

SEQ ID NO: 2845738 - RNA, 19 nt, Artificial Sequence
  Description of Artificial Sequence: Synthetic oligonucleotide
ucugugucccaaggcaggu

SEQ ID NO: 2845739 - RNA, 19 nt, Artificial Sequence
  Description of Artificial Sequence: Synthetic oligonucleotide
gagacaaagugaggggcuc

SEQ ID NO: 2845740 - RNA, 19 nt, Artificial Sequence
  Description of Artificial Sequence: Synthetic oligonucleotide
ugggcccuaagguuuccgu

SEQ ID NO: 2845741 - RNA, 19 nt, Artificial Sequence
  Description of Artificial Sequence: Synthetic oligonucleotide
uagucaagguucccagcuu

SEQ ID NO: 2845742 - RNA, 19 nt, Artificial Sequence
  Description of Artificial Sequence: Synthetic oligonucleotide
cuguccuugccuccacuac

SEQ ID NO: 2845743 - RNA, 19 nt, Artificial Sequence
  Description of Artificial Sequence: Synthetic oligonucleotide
ucugaggcuguggcuuuag

SEQ ID NO: 2845744 - RNA, 19 nt, Artificial Sequence
  Description of Artificial Sequence: Synthetic oligonucleotide
aaggagcucagggucccca

SEQ ID NO: 2845745 - RNA, 19 nt, Artificial Sequence
  Description of Artificial Sequence: Synthetic oligonucleotide
gagaggccccucauggagc

SEQ ID NO: 2845746 - RNA, 19 nt, Artificial Sequence
  Description of Artificial Sequence: Synthetic oligonucleotide
cuccacuacucuucugguc

SEQ ID NO: 2845747 - RNA, 19 nt, Artificial Sequence
  Description of Artificial Sequence: Synthetic oligonucleotide
ccuaagguuuccguucugg

SEQ ID NO: 2845748 - RNA, 19 nt, Artificial Sequence
  Description of Artificial Sequence: Synthetic oligonucleotide
cugagauagugagaaggca

SEQ ID NO: 2845749 - RNA, 19 nt, Artificial Sequence
  Description of Artificial Sequence: Synthetic oligonucleotide
gauagugagaaggcaucua

SEQ ID NO: 2845750 - RNA, 19 nt, Artificial Sequence
  Description of Artificial Sequence: Synthetic oligonucleotide
gucaagguucccagcuucc

SEQ ID NO: 2845751 - RNA, 19 nt, Artificial Sequence
  Description of Artificial Sequence: Synthetic oligonucleotide
gcuguggcuuuagucaagg

SEQ ID NO: 2845752 - RNA, 19 nt, Artificial Sequence
  Description of Artificial Sequence: Synthetic oligonucleotide
gucagcuguccuugccucc

SEQ ID NO: 2845753 - RNA, 19 nt, Artificial Sequence
  Description of Artificial Sequence: Synthetic oligonucleotide
uaaggccacgaagaacaaa

SEQ ID NO: 2845754 - RNA, 19 nt, Artificial Sequence
  Description of Artificial Sequence: Synthetic oligonucleotide
gagagaggccccucaugga

SEQ ID NO: 2845755 - RNA, 19 nt, Artificial Sequence
  Description of Artificial Sequence: Synthetic oligonucleotide
auaggccacggcugagaca

SEQ ID NO: 2845756 - RNA, 19 nt, Artificial Sequence
  Description of Artificial Sequence: Synthetic oligonucleotide
gcucccacaguacuuggac

SEQ ID NO: 2845757 - RNA, 19 nt, Artificial Sequence
  Description of Artificial Sequence: Synthetic oligonucleotide
agccaggaacuccuuuccu

SEQ ID NO: 2845758 - RNA, 19 nt, Artificial Sequence
  Description of Artificial Sequence: Synthetic oligonucleotide
uuuccucaacaugccuggc

SEQ ID NO: 2845759 - RNA, 19 nt, Artificial Sequence
  Description of Artificial Sequence: Synthetic oligonucleotide
ggagucaggauucuuuccu

SEQ ID NO: 2845760 - RNA, 19 nt, Artificial Sequence
  Description of Artificial Sequence: Synthetic oligonucleotide
augacacaugugaguacag

SEQ ID NO: 2845761 - RNA, 19 nt, Artificial Sequence
  Description of Artificial Sequence: Synthetic oligonucleotide
cggaaguugcccuucuggg

SEQ ID NO: 2845762 - RNA, 19 nt, Artificial Sequence
  Description of Artificial Sequence: Synthetic oligonucleotide
uccgagagaggccccucau

SEQ ID NO: 2845763 - RNA, 19 nt, Artificial Sequence
  Description of Artificial Sequence: Synthetic oligonucleotide
aguugcccuucugggcacc

SEQ ID NO: 2845764 - RNA, 19 nt, Artificial Sequence
  Description of Artificial Sequence: Synthetic oligonucleotide
ggggauacaggagcuuccg

SEQ ID NO: 2845765 - RNA, 19 nt, Artificial Sequence
  Description of Artificial Sequence: Synthetic oligonucleotide
uuggacuguccuagggcuu

SEQ ID NO: 2845766 - RNA, 19 nt, Artificial Sequence
  Description of Artificial Sequence: Synthetic oligonucleotide
gcaccugagauagugagaa

SEQ ID NO: 2845767 - RNA, 19 nt, Artificial Sequence
  Description of Artificial Sequence: Synthetic oligonucleotide
gucaggauucuuuccucaa

SEQ ID NO: 2845768 - RNA, 19 nt, Artificial Sequence
  Description of Artificial Sequence: Synthetic oligonucleotide
ccuauuggacuguccuagg

SEQ ID NO: 2845769 - RNA, 19 nt, Artificial Sequence
  Description of Artificial Sequence: Synthetic oligonucleotide
uccguucuggagucaggau

SEQ ID NO: 2845770 - RNA, 19 nt, Artificial Sequence
  Description of Artificial Sequence: Synthetic oligonucleotide
ggcccuaagguuuccguuc

SEQ ID NO: 2845771 - RNA, 19 nt, Artificial Sequence
  Description of Artificial Sequence: Synthetic oligonucleotide
agggcuuuucuguguccca

SEQ ID NO: 2845772 - RNA, 19 nt, Artificial Sequence
  Description of Artificial Sequence: Synthetic oligonucleotide
caucuaaggccacgaagaa

SEQ ID NO: 2845773 - RNA, 19 nt, Artificial Sequence
  Description of Artificial Sequence: Synthetic oligonucleotide
agguggaggucggaaguug

SEQ ID NO: 2845774 - RNA, 19 nt, Artificial Sequence
  Description of Artificial Sequence: Synthetic oligonucleotide
agcuaacaaggagcucagg

SEQ ID NO: 2845775 - RNA, 19 nt, Artificial Sequence
  Description of Artificial Sequence: Synthetic oligonucleotide
aggucggaaguugcccuuc

SEQ ID NO: 2845776 - RNA, 19 nt, Artificial Sequence
  Description of Artificial Sequence: Synthetic oligonucleotide
ggcuuuucugugucccaag

SEQ ID NO: 2845777 - RNA, 19 nt, Artificial Sequence
  Description of Artificial Sequence: Synthetic oligonucleotide
cugagacagccacuuguca

SEQ ID NO: 2845778 - RNA, 19 nt, Artificial Sequence
  Description of Artificial Sequence: Synthetic oligonucleotide
agacagccacuugucagcu

SEQ ID NO: 2845779 - RNA, 19 nt, Artificial Sequence
  Description of Artificial Sequence: Synthetic oligonucleotide
gacagccacuugucagcug

SEQ ID NO: 2845780 - RNA, 19 nt, Artificial Sequence
  Description of Artificial Sequence: Synthetic oligonucleotide
agugaggggcucccacagu

SEQ ID NO: 2845781 - RNA, 19 nt, Artificial Sequence
  Description of Artificial Sequence: Synthetic oligonucleotide
acaugugaguacagagcca

SEQ ID NO: 2845782 - RNA, 19 nt, Artificial Sequence
  Description of Artificial Sequence: Synthetic oligonucleotide
caccugagauagugagaag

SEQ ID NO: 2845783 - RNA, 19 nt, Artificial Sequence
  Description of Artificial Sequence: Synthetic oligonucleotide
gcuuuagucaagguuccca

SEQ ID NO: 2845784 - RNA, 19 nt, Artificial Sequence
  Description of Artificial Sequence: Synthetic oligonucleotide
uccuuuccuauuggacugu

SEQ ID NO: 2845785 - RNA, 19 nt, Artificial Sequence
  Description of Artificial Sequence: Synthetic oligonucleotide
guggaggucggaaguugcc

SEQ ID NO: 2845786 - RNA, 19 nt, Artificial Sequence
  Description of Artificial Sequence: Synthetic oligonucleotide
uggacuguccuagggcuuu

SEQ ID NO: 2845787 - RNA, 19 nt, Artificial Sequence
  Description of Artificial Sequence: Synthetic oligonucleotide
ggccugggcccuuaguggc

SEQ ID NO: 2845788 - RNA, 19 nt, Artificial Sequence
  Description of Artificial Sequence: Synthetic oligonucleotide
ggcccuuaguggcugagga

SEQ ID NO: 2845789 - RNA, 19 nt, Artificial Sequence
  Description of Artificial Sequence: Synthetic oligonucleotide
augggcccuaagguuuccg

SEQ ID NO: 2845790 - RNA, 19 nt, Artificial Sequence
  Description of Artificial Sequence: Synthetic oligonucleotide
acggcugagacagccacuu

SEQ ID NO: 2845791 - RNA, 19 nt, Artificial Sequence
  Description of Artificial Sequence: Synthetic oligonucleotide
gcagccauaggccacggcu

SEQ ID NO: 2845792 - RNA, 19 nt, Artificial Sequence
  Description of Artificial Sequence: Synthetic oligonucleotide
ggagcuuccgagagaggcc

SEQ ID NO: 2845793 - RNA, 19 nt, Artificial Sequence
  Description of Artificial Sequence: Synthetic oligonucleotide
gguggaggucggaaguugc

SEQ ID NO: 2845794 - RNA, 19 nt, Artificial Sequence
  Description of Artificial Sequence: Synthetic oligonucleotide
ccuuaguggcugaggagac

SEQ ID NO: 2845795 - RNA, 19 nt, Artificial Sequence
  Description of Artificial Sequence: Synthetic oligonucleotide
uugaaacaucagagaccau

SEQ ID NO: 2845796 - RNA, 19 nt, Artificial Sequence
  Description of Artificial Sequence: Synthetic oligonucleotide
agaccaugggaugggcccu

SEQ ID NO: 2845797 - RNA, 19 nt, Artificial Sequence
  Description of Artificial Sequence: Synthetic oligonucleotide
guccuugccuccacuacuc

SEQ ID NO: 2845798 - RNA, 19 nt, Artificial Sequence
  Description of Artificial Sequence: Synthetic oligonucleotide
cagagaccaugggaugggc

SEQ ID NO: 2845799 - RNA, 19 nt, Artificial Sequence
  Description of Artificial Sequence: Synthetic oligonucleotide
uggcagcccaaggggauac

SEQ ID NO: 2845800 - RNA, 19 nt, Artificial Sequence
  Description of Artificial Sequence: Synthetic oligonucleotide
ggcugaggagacaaaguga

SEQ ID NO: 2845801 - RNA, 19 nt, Artificial Sequence
  Description of Artificial Sequence: Synthetic oligonucleotide
acaaagugaggggcuccca

SEQ ID NO: 2845802 - RNA, 19 nt, Artificial Sequence
  Description of Artificial Sequence: Synthetic oligonucleotide
caggagcuuccgagagagg

SEQ ID NO: 2845803 - RNA, 19 nt, Artificial Sequence
  Description of Artificial Sequence: Synthetic oligonucleotide
cuucugggcaccugagaua

SEQ ID NO: 2845804 - RNA, 19 nt, Artificial Sequence
  Description of Artificial Sequence: Synthetic oligonucleotide
gaugggcccuaagguuucc

SEQ ID NO: 2845805 - RNA, 19 nt, Artificial Sequence
  Description of Artificial Sequence: Synthetic oligonucleotide
ggggacugggcagccauag

SEQ ID NO: 2845806 - RNA, 19 nt, Artificial Sequence
  Description of Artificial Sequence: Synthetic oligonucleotide
gaggggcucccacaguacu

SEQ ID NO: 2845807 - RNA, 19 nt, Artificial Sequence
  Description of Artificial Sequence: Synthetic oligonucleotide
aggcaucuaaggccacgaa

SEQ ID NO: 2845808 - RNA, 19 nt, Artificial Sequence
  Description of Artificial Sequence: Synthetic oligonucleotide
ugggcccuuaguggcugag

SEQ ID NO: 2845809 - RNA, 19 nt, Artificial Sequence
  Description of Artificial Sequence: Synthetic oligonucleotide
ugccuccacuacucuucug

SEQ ID NO: 2845810 - RNA, 19 nt, Artificial Sequence
  Description of Artificial Sequence: Synthetic oligonucleotide
agcuuccgagagaggcccc

SEQ ID NO: 2845811 - RNA, 19 nt, Artificial Sequence
  Description of Artificial Sequence: Synthetic oligonucleotide
guacuuggacuaggaccag

SEQ ID NO: 2845812 - RNA, 19 nt, Artificial Sequence
  Description of Artificial Sequence: Synthetic oligonucleotide
ccaugacacaugugaguac

SEQ ID NO: 2845813 - RNA, 19 nt, Artificial Sequence
  Description of Artificial Sequence: Synthetic oligonucleotide
gacuaggaccagggccucc

SEQ ID NO: 2845814 - RNA, 19 nt, Artificial Sequence
  Description of Artificial Sequence: Synthetic oligonucleotide
aggagcucaggguccccau

SEQ ID NO: 2845815 - RNA, 19 nt, Artificial Sequence
  Description of Artificial Sequence: Synthetic oligonucleotide
cagacauguuggggacugg

SEQ ID NO: 2845816 - RNA, 19 nt, Artificial Sequence
  Description of Artificial Sequence: Synthetic oligonucleotide
aaggcagguggaggucgga

SEQ ID NO: 2845817 - RNA, 19 nt, Artificial Sequence
  Description of Artificial Sequence: Synthetic oligonucleotide
cuaaggccacgaagaacaa

SEQ ID NO: 2845818 - RNA, 19 nt, Artificial Sequence
  Description of Artificial Sequence: Synthetic oligonucleotide
cuuaguggcugaggagaca

SEQ ID NO: 2845819 - RNA, 19 nt, Artificial Sequence
  Description of Artificial Sequence: Synthetic oligonucleotide
gggacugggcagccauagg

SEQ ID NO: 2845820 - RNA, 19 nt, Artificial Sequence
  Description of Artificial Sequence: Synthetic oligonucleotide
ccuccuuggcagcccaagg

SEQ ID NO: 2845821 - RNA, 19 nt, Artificial Sequence
  Description of Artificial Sequence: Synthetic oligonucleotide
ucugggcaccugagauagu

SEQ ID NO: 2845822 - RNA, 19 nt, Artificial Sequence
  Description of Artificial Sequence: Synthetic oligonucleotide
uggagcuaacaaggagcuc

SEQ ID NO: 2845823 - RNA, 19 nt, Artificial Sequence
  Description of Artificial Sequence: Synthetic oligonucleotide
ggggcucccacaguacuug

SEQ ID NO: 2845824 - RNA, 19 nt, Artificial Sequence
  Description of Artificial Sequence: Synthetic oligonucleotide
ggagcucaggguccccaug

SEQ ID NO: 2845825 - RNA, 19 nt, Artificial Sequence
  Description of Artificial Sequence: Synthetic oligonucleotide
cccuuaguggcugaggaga

SEQ ID NO: 2845826 - RNA, 19 nt, Artificial Sequence
  Description of Artificial Sequence: Synthetic oligonucleotide
gcagcccaaggggauacag

SEQ ID NO: 2845827 - RNA, 19 nt, Artificial Sequence
  Description of Artificial Sequence: Synthetic oligonucleotide
uuggcagcccaaggggaua

SEQ ID NO: 2845828 - RNA, 19 nt, Artificial Sequence
  Description of Artificial Sequence: Synthetic oligonucleotide
aggccacgaagaacaaaga

SEQ ID NO: 2845829 - RNA, 19 nt, Artificial Sequence
  Description of Artificial Sequence: Synthetic oligonucleotide
aggccccucauggagcuaa

SEQ ID NO: 2845830 - RNA, 19 nt, Artificial Sequence
  Description of Artificial Sequence: Synthetic oligonucleotide
agguucccagcuucccuuu

SEQ ID NO: 2845831 - RNA, 19 nt, Artificial Sequence
  Description of Artificial Sequence: Synthetic oligonucleotide
gggcucccacaguacuugg

SEQ ID NO: 2845832 - RNA, 19 nt, Artificial Sequence
  Description of Artificial Sequence: Synthetic oligonucleotide
uucuggagucaggauucuu

SEQ ID NO: 2845833 - RNA, 19 nt, Artificial Sequence
  Description of Artificial Sequence: Synthetic oligonucleotide
cuucuggucugaggcugug

SEQ ID NO: 2845834 - RNA, 19 nt, Artificial Sequence
  Description of Artificial Sequence: Synthetic oligonucleotide
ccacggcugagacagccac

SEQ ID NO: 2845835 - RNA, 19 nt, Artificial Sequence
  Description of Artificial Sequence: Synthetic oligonucleotide
caagguucccagcuucccu

SEQ ID NO: 2845836 - RNA, 19 nt, Artificial Sequence
  Description of Artificial Sequence: Synthetic oligonucleotide
cugugucccaaggcaggug

SEQ ID NO: 2845837 - RNA, 19 nt, Artificial Sequence
  Description of Artificial Sequence: Synthetic oligonucleotide
uggggacugggcagccaua

SEQ ID NO: 2845838 - RNA, 19 nt, Artificial Sequence
  Description of Artificial Sequence: Synthetic oligonucleotide
ggccacgaagaacaaagau

SEQ ID NO: 2845839 - RNA, 19 nt, Artificial Sequence
  Description of Artificial Sequence: Synthetic oligonucleotide
gccaggaacuccuuuccua

SEQ ID NO: 2845840 - RNA, 19 nt, Artificial Sequence
  Description of Artificial Sequence: Synthetic oligonucleotide
ggccacggcugagacagcc

SEQ ID NO: 2845841 - RNA, 19 nt, Artificial Sequence
  Description of Artificial Sequence: Synthetic oligonucleotide
ggaggucggaaguugcccu

SEQ ID NO: 2845842 - RNA, 19 nt, Artificial Sequence
  Description of Artificial Sequence: Synthetic oligonucleotide
guggcugaggagacaaagu

SEQ ID NO: 2845843 - RNA, 19 nt, Artificial Sequence
  Description of Artificial Sequence: Synthetic oligonucleotide
cuuggcagcccaaggggau

SEQ ID NO: 2845844 - RNA, 19 nt, Artificial Sequence
  Description of Artificial Sequence: Synthetic oligonucleotide
gacuguccuagggcuuuuc

SEQ ID NO: 2845845 - RNA, 19 nt, Artificial Sequence
  Description of Artificial Sequence: Synthetic oligonucleotide
gggauacaggagcuuccga

SEQ ID NO: 2845846 - RNA, 19 nt, Artificial Sequence
  Description of Artificial Sequence: Synthetic oligonucleotide
gcucaggguccccaugaca

SEQ ID NO: 2845847 - RNA, 19 nt, Artificial Sequence
  Description of Artificial Sequence: Synthetic oligonucleotide
cacgaagaacaaagaugcu

SEQ ID NO: 2845848 - RNA, 19 nt, Artificial Sequence
  Description of Artificial Sequence: Synthetic oligonucleotide
ggagacaaagugaggggcu

SEQ ID NO: 2845849 - RNA, 19 nt, Artificial Sequence
  Description of Artificial Sequence: Synthetic oligonucleotide
gcagguggaggucggaagu

SEQ ID NO: 2845850 - RNA, 19 nt, Artificial Sequence
  Description of Artificial Sequence: Synthetic oligonucleotide
aggcagguggaggucggaa

SEQ ID NO: 2845851 - RNA, 19 nt, Artificial Sequence
  Description of Artificial Sequence: Synthetic oligonucleotide
ggcuuuagucaagguuccc

SEQ ID NO: 2845852 - RNA, 19 nt, Artificial Sequence
  Description of Artificial Sequence: Synthetic oligonucleotide
gacagacauguuggggacu

SEQ ID NO: 2845853 - RNA, 19 nt, Artificial Sequence
  Description of Artificial Sequence: Synthetic oligonucleotide
cccaugacacaugugagua

SEQ ID NO: 2845854 - RNA, 19 nt, Artificial Sequence
  Description of Artificial Sequence: Synthetic oligonucleotide
ccacuacucuucuggucug

SEQ ID NO: 2845855 - RNA, 19 nt, Artificial Sequence
  Description of Artificial Sequence: Synthetic oligonucleotide
cuuccgagagaggccccuc

SEQ ID NO: 2845856 - RNA, 19 nt, Artificial Sequence
  Description of Artificial Sequence: Synthetic oligonucleotide
ggcuguggcuuuagucaag

SEQ ID NO: 2845857 - RNA, 19 nt, Artificial Sequence
  Description of Artificial Sequence: Synthetic oligonucleotide
ccuuggcagcccaagggga

SEQ ID NO: 2845858 - RNA, 19 nt, Artificial Sequence
  Description of Artificial Sequence: Synthetic oligonucleotide
ccucaacaugccuggccug

SEQ ID NO: 2845859 - RNA, 19 nt, Artificial Sequence
  Description of Artificial Sequence: Synthetic oligonucleotide
ggcaccugagauagugaga

SEQ ID NO: 2845860 - RNA, 19 nt, Artificial Sequence
  Description of Artificial Sequence: Synthetic oligonucleotide
cccacaguacuuggacuag

SEQ ID NO: 2845861 - RNA, 19 nt, Artificial Sequence
  Description of Artificial Sequence: Synthetic oligonucleotide
gcuguccuugccuccacua

SEQ ID NO: 2845862 - RNA, 19 nt, Artificial Sequence
  Description of Artificial Sequence: Synthetic oligonucleotide
gggcccuuaguggcugagg

SEQ ID NO: 2845863 - RNA, 19 nt, Artificial Sequence
  Description of Artificial Sequence: Synthetic oligonucleotide
gcccaaggggauacaggag

SEQ ID NO: 2845864 - RNA, 19 nt, Artificial Sequence
  Description of Artificial Sequence: Synthetic oligonucleotide
gaggucggaaguugcccuu

SEQ ID NO: 2845865 - RNA, 19 nt, Artificial Sequence
  Description of Artificial Sequence: Synthetic oligonucleotide
cuggucugaggcuguggcu

SEQ ID NO: 2845866 - RNA, 19 nt, Artificial Sequence
  Description of Artificial Sequence: Synthetic oligonucleotide
cacuacucuucuggucuga

SEQ ID NO: 2845867 - RNA, 19 nt, Artificial Sequence
  Description of Artificial Sequence: Synthetic oligonucleotide
gccuccuuggcagcccaag

SEQ ID NO: 2845868 - RNA, 19 nt, Artificial Sequence
  Description of Artificial Sequence: Synthetic oligonucleotide
ccgagagaggccccucaug

SEQ ID NO: 2845869 - RNA, 19 nt, Artificial Sequence
  Description of Artificial Sequence: Synthetic oligonucleotide
ccccucauggagcuaacaa

SEQ ID NO: 2845870 - RNA, 19 nt, Artificial Sequence
  Description of Artificial Sequence: Synthetic oligonucleotide
ccuucugggcaccugagau

SEQ ID NO: 2845871 - RNA, 19 nt, Artificial Sequence
  Description of Artificial Sequence: Synthetic oligonucleotide
ggaugggcccuaagguuuc

SEQ ID NO: 2845872 - RNA, 19 nt, Artificial Sequence
  Description of Artificial Sequence: Synthetic oligonucleotide
aggggcucccacaguacuu

SEQ ID NO: 2845873 - RNA, 19 nt, Artificial Sequence
  Description of Artificial Sequence: Synthetic oligonucleotide
ggcagccauaggccacggc

SEQ ID NO: 2845874 - RNA, 19 nt, Artificial Sequence
  Description of Artificial Sequence: Synthetic oligonucleotide
guuggggacugggcagcca

SEQ ID NO: 2845875 - RNA, 19 nt, Artificial Sequence
  Description of Artificial Sequence: Synthetic oligonucleotide
gugucccaaggcaggugga

SEQ ID NO: 2845876 - RNA, 19 nt, Artificial Sequence
  Description of Artificial Sequence: Synthetic oligonucleotide
ccaggaacuccuuuccuau

SEQ ID NO: 2845877 - RNA, 19 nt, Artificial Sequence
  Description of Artificial Sequence: Synthetic oligonucleotide
gggcuuuucugugucccaa

SEQ ID NO: 2845878 - RNA, 19 nt, Artificial Sequence
  Description of Artificial Sequence: Synthetic oligonucleotide
gccacuugucagcuguccu

SEQ ID NO: 2845879 - RNA, 19 nt, Artificial Sequence
  Description of Artificial Sequence: Synthetic oligonucleotide
ccaaggggauacaggagcu

SEQ ID NO: 2845880 - RNA, 19 nt, Artificial Sequence
  Description of Artificial Sequence: Synthetic oligonucleotide
gggaugggcccuaagguuu

SEQ ID NO: 2845881 - RNA, 19 nt, Artificial Sequence
  Description of Artificial Sequence: Synthetic oligonucleotide
gcccuaagguuuccguucu

SEQ ID NO: 2845882 - RNA, 19 nt, Artificial Sequence
  Description of Artificial Sequence: Synthetic oligonucleotide
cuguggcuuuagucaaggu

SEQ ID NO: 2845883 - RNA, 19 nt, Artificial Sequence
  Description of Artificial Sequence: Synthetic oligonucleotide
acagagccaggaacuccuu

SEQ ID NO: 2845884 - RNA, 19 nt, Artificial Sequence
  Description of Artificial Sequence: Synthetic oligonucleotide
ccuuuccuauuggacuguc

SEQ ID NO: 2845885 - RNA, 19 nt, Artificial Sequence
  Description of Artificial Sequence: Synthetic oligonucleotide
gccauaggccacggcugag

SEQ ID NO: 2845886 - RNA, 19 nt, Artificial Sequence
  Description of Artificial Sequence: Synthetic oligonucleotide
gaccaugggaugggcccua

SEQ ID NO: 2845887 - RNA, 19 nt, Artificial Sequence
  Description of Artificial Sequence: Synthetic oligonucleotide
aggccacggcugagacagc

SEQ ID NO: 2845888 - RNA, 19 nt, Artificial Sequence
  Description of Artificial Sequence: Synthetic oligonucleotide
guucuggagucaggauucu

SEQ ID NO: 2845889 - RNA, 19 nt, Artificial Sequence
  Description of Artificial Sequence: Synthetic oligonucleotide
gguccccaugacacaugug

SEQ ID NO: 2845890 - RNA, 19 nt, Artificial Sequence
  Description of Artificial Sequence: Synthetic oligonucleotide
ccaugggaugggcccuaag

SEQ ID NO: 2845891 - RNA, 19 nt, Artificial Sequence
  Description of Artificial Sequence: Synthetic oligonucleotide
ggcucccacaguacuugga

SEQ ID NO: 2845892 - RNA, 19 nt, Artificial Sequence
  Description of Artificial Sequence: Synthetic oligonucleotide
cacggcugagacagccacu

SEQ ID NO: 2845893 - RNA, 19 nt, Artificial Sequence
  Description of Artificial Sequence: Synthetic oligonucleotide
gcccuucugggcaccugag

SEQ ID NO: 2845894 - RNA, 19 nt, Artificial Sequence
  Description of Artificial Sequence: Synthetic oligonucleotide
accaugggaugggcccuaa

SEQ ID NO: 2845895 - RNA, 19 nt, Artificial Sequence
  Description of Artificial Sequence: Synthetic oligonucleotide
ccccaugacacaugugagu

SEQ ID NO: 2845896 - RNA, 19 nt, Artificial Sequence
  Description of Artificial Sequence: Synthetic oligonucleotide
caggguccccaugacacau

SEQ ID NO: 2845897 - RNA, 19 nt, Artificial Sequence
  Description of Artificial Sequence: Synthetic oligonucleotide
ccugggcccuuaguggcug

SEQ ID NO: 2845898 - RNA, 19 nt, Artificial Sequence
  Description of Artificial Sequence: Synthetic oligonucleotide
ggucggaaguugcccuucu

SEQ ID NO: 2845899 - RNA, 19 nt, Artificial Sequence
  Description of Artificial Sequence: Synthetic oligonucleotide
cccuaagguuuccguucug

SEQ ID NO: 2845900 - RNA, 19 nt, Artificial Sequence
  Description of Artificial Sequence: Synthetic oligonucleotide
cugggcccuuaguggcuga

SEQ ID NO: 2845901 - RNA, 19 nt, Artificial Sequence
  Description of Artificial Sequence: Synthetic oligonucleotide
ccguucuggagucaggauu

SEQ ID NO: 2845902 - RNA, 19 nt, Artificial Sequence
  Description of Artificial Sequence: Synthetic oligonucleotide
caggaacuccuuuccuauu

SEQ ID NO: 2845903 - RNA, 19 nt, Artificial Sequence
  Description of Artificial Sequence: Synthetic oligonucleotide
cugaggcuguggcuuuagu

SEQ ID NO: 2845904 - RNA, 19 nt, Artificial Sequence
  Description of Artificial Sequence: Synthetic oligonucleotide
ggacuaggaccagggccuc

SEQ ID NO: 2845905 - RNA, 19 nt, Artificial Sequence
  Description of Artificial Sequence: Synthetic oligonucleotide
cagagccaggaacuccuuu

SEQ ID NO: 2845906 - RNA, 19 nt, Artificial Sequence
  Description of Artificial Sequence: Synthetic oligonucleotide
gggcagccauaggccacgg

SEQ ID NO: 2845907 - RNA, 19 nt, Artificial Sequence
  Description of Artificial Sequence: Synthetic oligonucleotide
gguuuccguucuggaguca

SEQ ID NO: 2845908 - RNA, 19 nt, Artificial Sequence
  Description of Artificial Sequence: Synthetic oligonucleotide
gggcccuaagguuuccguu

SEQ ID NO: 2845909 - RNA, 19 nt, Artificial Sequence
  Description of Artificial Sequence: Synthetic oligonucleotide
cccuucugggcaccugaga

SEQ ID NO: 2845910 - RNA, 19 nt, Artificial Sequence
  Description of Artificial Sequence: Synthetic oligonucleotide
ccuccacuacucuucuggu

SEQ ID NO: 2845911 - RNA, 19 nt, Artificial Sequence
  Description of Artificial Sequence: Synthetic oligonucleotide
ccacuugucagcuguccuu

SEQ ID NO: 2845912 - RNA, 19 nt, Artificial Sequence
  Description of Artificial Sequence: Synthetic oligonucleotide
caaggggauacaggagcuu

SEQ ID NO: 2845913 - RNA, 19 nt, Artificial Sequence
  Description of Artificial Sequence: Synthetic oligonucleotide
gccacggcugagacagcca

SEQ ID NO: 2845914 - RNA, 19 nt, Artificial Sequence
  Description of Artificial Sequence: Synthetic oligonucleotide
ggucugaggcuguggcuuu

SEQ ID NO: 2845915 - RNA, 19 nt, Artificial Sequence
  Description of Artificial Sequence: Synthetic oligonucleotide
ugccuggccugggcccuua

SEQ ID NO: 2845916 - RNA, 19 nt, Artificial Sequence
  Description of Artificial Sequence: Synthetic oligonucleotide
cagguggaggucggaaguu

SEQ ID NO: 2845917 - RNA, 19 nt, Artificial Sequence
  Description of Artificial Sequence: Synthetic oligonucleotide
gccccucauggagcuaaca

SEQ ID NO: 2845918 - RNA, 19 nt, Artificial Sequence
  Description of Artificial Sequence: Synthetic oligonucleotide
gcuuccgagagaggccccu

SEQ ID NO: 2845919 - RNA, 19 nt, Artificial Sequence
  Description of Artificial Sequence: Synthetic oligonucleotide
ggcagcccaaggggauaca

SEQ ID NO: 2845920 - RNA, 19 nt, Artificial Sequence
  Description of Artificial Sequence: Synthetic oligonucleotide
ccuugccuccacuacucuu

SEQ ID NO: 2845921 - RNA, 19 nt, Artificial Sequence
  Description of Artificial Sequence: Synthetic oligonucleotide
gguucccagcuucccuuuu

SEQ ID NO: 2845922 - RNA, 19 nt, Artificial Sequence
  Description of Artificial Sequence: Synthetic oligonucleotide
ggccccucauggagcuaac

SEQ ID NO: 2845923 - RNA, 19 nt, Artificial Sequence
  Description of Artificial Sequence: Synthetic oligonucleotide
gaggccccucauggagcua

SEQ ID NO: 2845924 - RNA, 19 nt, Artificial Sequence
  Description of Artificial Sequence: Synthetic oligonucleotide
augccuggccugggcccuu

SEQ ID NO: 2845925 - RNA, 19 nt, Artificial Sequence
  Description of Artificial Sequence: Synthetic oligonucleotide
cggcugagacagccacuug

SEQ ID NO: 2845926 - RNA, 19 nt, Artificial Sequence
  Description of Artificial Sequence: Synthetic oligonucleotide
gccugggcccuuaguggcu

SEQ ID NO: 2845927 - RNA, 19 nt, Artificial Sequence
  Description of Artificial Sequence: Synthetic oligonucleotide
ggacuguccuagggcuuuu

SEQ ID NO: 2845928 - RNA, 19 nt, Artificial Sequence
  Description of Artificial Sequence: Synthetic oligonucleotide
aacaagaaggcccagacag

SEQ ID NO: 2845929 - RNA, 19 nt, Artificial Sequence
  Description of Artificial Sequence: Synthetic oligonucleotide
uauguugucaaacccagcg

SEQ ID NO: 2845930 - RNA, 19 nt, Artificial Sequence
  Description of Artificial Sequence: Synthetic oligonucleotide
aacagaguggaccauaguc

SEQ ID NO: 2845931 - RNA, 19 nt, Artificial Sequence
  Description of Artificial Sequence: Synthetic oligonucleotide
ucagcagagaaccagagag

SEQ ID NO: 2845932 - RNA, 19 nt, Artificial Sequence
  Description of Artificial Sequence: Synthetic oligonucleotide
caagacauggaacagaggg

SEQ ID NO: 2845933 - RNA, 19 nt, Artificial Sequence
  Description of Artificial Sequence: Synthetic oligonucleotide
gaacucaugagucaaguag

SEQ ID NO: 2845934 - RNA, 19 nt, Artificial Sequence
  Description of Artificial Sequence: Synthetic oligonucleotide
aacagugagggccagcgac

SEQ ID NO: 2845935 - RNA, 19 nt, Artificial Sequence
  Description of Artificial Sequence: Synthetic oligonucleotide
uuuauguugucaaacccag

SEQ ID NO: 2845936 - RNA, 19 nt, Artificial Sequence
  Description of Artificial Sequence: Synthetic oligonucleotide
caaaguuggacuaaaugcc

SEQ ID NO: 2845937 - RNA, 19 nt, Artificial Sequence
  Description of Artificial Sequence: Synthetic oligonucleotide
uuuuauguugucaaaccca

SEQ ID NO: 2845938 - RNA, 19 nt, Artificial Sequence
  Description of Artificial Sequence: Synthetic oligonucleotide
ucaaguaguggucacuggg

SEQ ID NO: 2845939 - RNA, 19 nt, Artificial Sequence
  Description of Artificial Sequence: Synthetic oligonucleotide
aaguaguggucacuggggc

SEQ ID NO: 2845940 - RNA, 19 nt, Artificial Sequence
  Description of Artificial Sequence: Synthetic oligonucleotide
aaacacgagacacaacaag

SEQ ID NO: 2845941 - RNA, 19 nt, Artificial Sequence
  Description of Artificial Sequence: Synthetic oligonucleotide
guuuuggaggcacaaagcg

SEQ ID NO: 2845942 - RNA, 19 nt, Artificial Sequence
  Description of Artificial Sequence: Synthetic oligonucleotide
uuuggaggcacaaagcgca

SEQ ID NO: 2845943 - RNA, 19 nt, Artificial Sequence
  Description of Artificial Sequence: Synthetic oligonucleotide
uguugucaaacccagcgag

SEQ ID NO: 2845944 - RNA, 19 nt, Artificial Sequence
  Description of Artificial Sequence: Synthetic oligonucleotide
acaacaagaaggcccagac

SEQ ID NO: 2845945 - RNA, 19 nt, Artificial Sequence
  Description of Artificial Sequence: Synthetic oligonucleotide
agacacaacaagaaggccc

SEQ ID NO: 2845946 - RNA, 19 nt, Artificial Sequence
  Description of Artificial Sequence: Synthetic oligonucleotide
aggcauuuggguuugguuc

SEQ ID NO: 2845947 - RNA, 19 nt, Artificial Sequence
  Description of Artificial Sequence: Synthetic oligonucleotide
gaguuuuggaggcacaaag

SEQ ID NO: 2845948 - RNA, 19 nt, Artificial Sequence
  Description of Artificial Sequence: Synthetic oligonucleotide
gcaaaguuggacuaaaugc

SEQ ID NO: 2845949 - RNA, 19 nt, Artificial Sequence
  Description of Artificial Sequence: Synthetic oligonucleotide
ucaugagucaaguaguggu

SEQ ID NO: 2845950 - RNA, 19 nt, Artificial Sequence
  Description of Artificial Sequence: Synthetic oligonucleotide
uucacaauggcuucuccag

SEQ ID NO: 2845951 - RNA, 19 nt, Artificial Sequence
  Description of Artificial Sequence: Synthetic oligonucleotide
aagcgcauggcagaggggc

SEQ ID NO: 2845952 - RNA, 19 nt, Artificial Sequence
  Description of Artificial Sequence: Synthetic oligonucleotide
caaaacacgagacacaaca

SEQ ID NO: 2845953 - RNA, 19 nt, Artificial Sequence
  Description of Artificial Sequence: Synthetic oligonucleotide
cuaugucagagugagaugc

SEQ ID NO: 2845954 - RNA, 19 nt, Artificial Sequence
  Description of Artificial Sequence: Synthetic oligonucleotide
uggaccauaguccuagccc

SEQ ID NO: 2845955 - RNA, 19 nt, Artificial Sequence
  Description of Artificial Sequence: Synthetic oligonucleotide
uuggggagggcacagagug

SEQ ID NO: 2845956 - RNA, 19 nt, Artificial Sequence
  Description of Artificial Sequence: Synthetic oligonucleotide
acagaguggaccauagucc

SEQ ID NO: 2845957 - RNA, 19 nt, Artificial Sequence
  Description of Artificial Sequence: Synthetic oligonucleotide
agcagagaaccagagaggc

SEQ ID NO: 2845958 - RNA, 19 nt, Artificial Sequence
  Description of Artificial Sequence: Synthetic oligonucleotide
uggacuaaaugccaguggu

SEQ ID NO: 2845959 - RNA, 19 nt, Artificial Sequence
  Description of Artificial Sequence: Synthetic oligonucleotide
gacagcaagacauggaaca

SEQ ID NO: 2845960 - RNA, 19 nt, Artificial Sequence
  Description of Artificial Sequence: Synthetic oligonucleotide
uuuuggaggcacaaagcgc

SEQ ID NO: 2845961 - RNA, 19 nt, Artificial Sequence
  Description of Artificial Sequence: Synthetic oligonucleotide
ggugagagaguuuuggagg

SEQ ID NO: 2845962 - RNA, 19 nt, Artificial Sequence
  Description of Artificial Sequence: Synthetic oligonucleotide
uuggacuaaaugccagugg

SEQ ID NO: 2845963 - RNA, 19 nt, Artificial Sequence
  Description of Artificial Sequence: Synthetic oligonucleotide
ugagaugcaggcuucuacc

SEQ ID NO: 2845964 - RNA, 19 nt, Artificial Sequence
  Description of Artificial Sequence: Synthetic oligonucleotide
acgagacacaacaagaagg

SEQ ID NO: 2845965 - RNA, 19 nt, Artificial Sequence
  Description of Artificial Sequence: Synthetic oligonucleotide
ugucagagugagaugcagg

SEQ ID NO: 2845966 - RNA, 19 nt, Artificial Sequence
  Description of Artificial Sequence: Synthetic oligonucleotide
acuggggcaacagugaggg

SEQ ID NO: 2845967 - RNA, 19 nt, Artificial Sequence
  Description of Artificial Sequence: Synthetic oligonucleotide
aagacauggaacagagggg

SEQ ID NO: 2845968 - RNA, 19 nt, Artificial Sequence
  Description of Artificial Sequence: Synthetic oligonucleotide
uccuaugucagagugagau

SEQ ID NO: 2845969 - RNA, 19 nt, Artificial Sequence
  Description of Artificial Sequence: Synthetic oligonucleotide
aggugagagaguuuuggag

SEQ ID NO: 2845970 - RNA, 19 nt, Artificial Sequence
  Description of Artificial Sequence: Synthetic oligonucleotide
caaagcgcauggcagaggg

SEQ ID NO: 2845971 - RNA, 19 nt, Artificial Sequence
  Description of Artificial Sequence: Synthetic oligonucleotide
aguuuuggaggcacaaagc

SEQ ID NO: 2845972 - RNA, 19 nt, Artificial Sequence
  Description of Artificial Sequence: Synthetic oligonucleotide
aacacgagacacaacaaga

SEQ ID NO: 2845973 - RNA, 19 nt, Artificial Sequence
  Description of Artificial Sequence: Synthetic oligonucleotide
caaguaguggucacugggg

SEQ ID NO: 2845974 - RNA, 19 nt, Artificial Sequence
  Description of Artificial Sequence: Synthetic oligonucleotide
accuggaugcuucacaaug

SEQ ID NO: 2845975 - RNA, 19 nt, Artificial Sequence
  Description of Artificial Sequence: Synthetic oligonucleotide
gucagagugagaugcaggc

SEQ ID NO: 2845976 - RNA, 19 nt, Artificial Sequence
  Description of Artificial Sequence: Synthetic oligonucleotide
uccaccaaaacacgagaca

SEQ ID NO: 2845977 - RNA, 19 nt, Artificial Sequence
  Description of Artificial Sequence: Synthetic oligonucleotide
gagggcacagaguggaggg

SEQ ID NO: 2845978 - RNA, 19 nt, Artificial Sequence
  Description of Artificial Sequence: Synthetic oligonucleotide
agaaggcccagacagcaag

SEQ ID NO: 2845979 - RNA, 19 nt, Artificial Sequence
  Description of Artificial Sequence: Synthetic oligonucleotide
aacucaugagucaaguagu

SEQ ID NO: 2845980 - RNA, 19 nt, Artificial Sequence
  Description of Artificial Sequence: Synthetic oligonucleotide
gaacagaggggaugcaaag

SEQ ID NO: 2845981 - RNA, 19 nt, Artificial Sequence
  Description of Artificial Sequence: Synthetic oligonucleotide
agaguggaggggcagaacu

SEQ ID NO: 2845982 - RNA, 19 nt, Artificial Sequence
  Description of Artificial Sequence: Synthetic oligonucleotide
uggggcaacagugagggcc

SEQ ID NO: 2845983 - RNA, 19 nt, Artificial Sequence
  Description of Artificial Sequence: Synthetic oligonucleotide
aaaguuggacuaaaugcca

SEQ ID NO: 2845984 - RNA, 19 nt, Artificial Sequence
  Description of Artificial Sequence: Synthetic oligonucleotide
aaggugagagaguuuugga

SEQ ID NO: 2845985 - RNA, 19 nt, Artificial Sequence
  Description of Artificial Sequence: Synthetic oligonucleotide
caaggugagagaguuuugg

SEQ ID NO: 2845986 - RNA, 19 nt, Artificial Sequence
  Description of Artificial Sequence: Synthetic oligonucleotide
uuuggguuugguucagcug

SEQ ID NO: 2845987 - RNA, 19 nt, Artificial Sequence
  Description of Artificial Sequence: Synthetic oligonucleotide
gacuaaaugccagugguga

SEQ ID NO: 2845988 - RNA, 19 nt, Artificial Sequence
  Description of Artificial Sequence: Synthetic oligonucleotide
gaugcaggcuucuaccaac

SEQ ID NO: 2845989 - RNA, 19 nt, Artificial Sequence
  Description of Artificial Sequence: Synthetic oligonucleotide
auggcagaggggcucuugc

SEQ ID NO: 2845990 - RNA, 19 nt, Artificial Sequence
  Description of Artificial Sequence: Synthetic oligonucleotide
uugucaaacccagcgaggc

SEQ ID NO: 2845991 - RNA, 19 nt, Artificial Sequence
  Description of Artificial Sequence: Synthetic oligonucleotide
gugagagaguuuuggaggc

SEQ ID NO: 2845992 - RNA, 19 nt, Artificial Sequence
  Description of Artificial Sequence: Synthetic oligonucleotide
aaguccaccaaaacacgag

SEQ ID NO: 2845993 - RNA, 19 nt, Artificial Sequence
  Description of Artificial Sequence: Synthetic oligonucleotide
auuuggguuugguucagcu

SEQ ID NO: 2845994 - RNA, 19 nt, Artificial Sequence
  Description of Artificial Sequence: Synthetic oligonucleotide
agaggggaugcaaaguugg

SEQ ID NO: 2845995 - RNA, 19 nt, Artificial Sequence
  Description of Artificial Sequence: Synthetic oligonucleotide
aggggcagaacucaugagu

SEQ ID NO: 2845996 - RNA, 19 nt, Artificial Sequence
  Description of Artificial Sequence: Synthetic oligonucleotide
agcaagacauggaacagag

SEQ ID NO: 2845997 - RNA, 19 nt, Artificial Sequence
  Description of Artificial Sequence: Synthetic oligonucleotide
gaugcuucacaauggcuuc

SEQ ID NO: 2845998 - RNA, 19 nt, Artificial Sequence
  Description of Artificial Sequence: Synthetic oligonucleotide
agacauggaacagagggga

SEQ ID NO: 2845999 - RNA, 19 nt, Artificial Sequence
  Description of Artificial Sequence: Synthetic oligonucleotide
uaggggugcuccaccaagg

SEQ ID NO: 2846000 - RNA, 19 nt, Artificial Sequence
  Description of Artificial Sequence: Synthetic oligonucleotide
ugcccugauggcuaggcug

SEQ ID NO: 2846001 - RNA, 19 nt, Artificial Sequence
  Description of Artificial Sequence: Synthetic oligonucleotide
cccaaguccaccaaaacac

SEQ ID NO: 2846002 - RNA, 19 nt, Artificial Sequence
  Description of Artificial Sequence: Synthetic oligonucleotide
aaguuggacuaaaugccag

SEQ ID NO: 2846003 - RNA, 19 nt, Artificial Sequence
  Description of Artificial Sequence: Synthetic oligonucleotide
gaguggaccauaguccuag

SEQ ID NO: 2846004 - RNA, 19 nt, Artificial Sequence
  Description of Artificial Sequence: Synthetic oligonucleotide
cacgagacacaacaagaag

SEQ ID NO: 2846005 - RNA, 19 nt, Artificial Sequence
  Description of Artificial Sequence: Synthetic oligonucleotide
uuauguugucaaacccagc

SEQ ID NO: 2846006 - RNA, 19 nt, Artificial Sequence
  Description of Artificial Sequence: Synthetic oligonucleotide
ucacuggggcaacagugag

SEQ ID NO: 2846007 - RNA, 19 nt, Artificial Sequence
  Description of Artificial Sequence: Synthetic oligonucleotide
aaggcccagacagcaagac

SEQ ID NO: 2846008 - RNA, 19 nt, Artificial Sequence
  Description of Artificial Sequence: Synthetic oligonucleotide
auggcugguccugaggccc

SEQ ID NO: 2846009 - RNA, 19 nt, Artificial Sequence
  Description of Artificial Sequence: Synthetic oligonucleotide
accagagaggcuccuaugu

SEQ ID NO: 2846010 - RNA, 19 nt, Artificial Sequence
  Description of Artificial Sequence: Synthetic oligonucleotide
caugagucaaguagugguc

SEQ ID NO: 2846011 - RNA, 19 nt, Artificial Sequence
  Description of Artificial Sequence: Synthetic oligonucleotide
auaguccuagcccugccca

SEQ ID NO: 2846012 - RNA, 19 nt, Artificial Sequence
  Description of Artificial Sequence: Synthetic oligonucleotide
ucgcggugcaugcaggugc

SEQ ID NO: 2846013 - RNA, 19 nt, Artificial Sequence
  Description of Artificial Sequence: Synthetic oligonucleotide
uaugucagagugagaugca

SEQ ID NO: 2846014 - RNA, 19 nt, Artificial Sequence
  Description of Artificial Sequence: Synthetic oligonucleotide
ggaggcacaaagcgcaugg

SEQ ID NO: 2846015 - RNA, 19 nt, Artificial Sequence
  Description of Artificial Sequence: Synthetic oligonucleotide
ggggcucuugcccugaugg

SEQ ID NO: 2846016 - RNA, 19 nt, Artificial Sequence
  Description of Artificial Sequence: Synthetic oligonucleotide
aggggaugcaaaguuggac

SEQ ID NO: 2846017 - RNA, 19 nt, Artificial Sequence
  Description of Artificial Sequence: Synthetic oligonucleotide
aguccaccaaaacacgaga

SEQ ID NO: 2846018 - RNA, 19 nt, Artificial Sequence
  Description of Artificial Sequence: Synthetic oligonucleotide
aaccagagaggcuccuaug

SEQ ID NO: 2846019 - RNA, 19 nt, Artificial Sequence
  Description of Artificial Sequence: Synthetic oligonucleotide
agucaaguaguggucacug

SEQ ID NO: 2846020 - RNA, 19 nt, Artificial Sequence
  Description of Artificial Sequence: Synthetic oligonucleotide
uggcuucuccagcagcagg

SEQ ID NO: 2846021 - RNA, 19 nt, Artificial Sequence
  Description of Artificial Sequence: Synthetic oligonucleotide
gacacaacaagaaggccca

SEQ ID NO: 2846022 - RNA, 19 nt, Artificial Sequence
  Description of Artificial Sequence: Synthetic oligonucleotide
uucagcugggguaggggug

SEQ ID NO: 2846023 - RNA, 19 nt, Artificial Sequence
  Description of Artificial Sequence: Synthetic oligonucleotide
aacccagcgaggccucagg

SEQ ID NO: 2846024 - RNA, 19 nt, Artificial Sequence
  Description of Artificial Sequence: Synthetic oligonucleotide
acagaggggaugcaaaguu

SEQ ID NO: 2846025 - RNA, 19 nt, Artificial Sequence
  Description of Artificial Sequence: Synthetic oligonucleotide
agaggcuccuaugucagag

SEQ ID NO: 2846026 - RNA, 19 nt, Artificial Sequence
  Description of Artificial Sequence: Synthetic oligonucleotide
cuggaugcuucacaauggc

SEQ ID NO: 2846027 - RNA, 19 nt, Artificial Sequence
  Description of Artificial Sequence: Synthetic oligonucleotide
aguuggacuaaaugccagu

SEQ ID NO: 2846028 - RNA, 19 nt, Artificial Sequence
  Description of Artificial Sequence: Synthetic oligonucleotide
ugucaaacccagcgaggcc

SEQ ID NO: 2846029 - RNA, 19 nt, Artificial Sequence
  Description of Artificial Sequence: Synthetic oligonucleotide
cagcagagaaccagagagg

SEQ ID NO: 2846030 - RNA, 19 nt, Artificial Sequence
  Description of Artificial Sequence: Synthetic oligonucleotide
agggccagcgaccucagca

SEQ ID NO: 2846031 - RNA, 19 nt, Artificial Sequence
  Description of Artificial Sequence: Synthetic oligonucleotide
aacagaggggaugcaaagu

SEQ ID NO: 2846032 - RNA, 19 nt, Artificial Sequence
  Description of Artificial Sequence: Synthetic oligonucleotide
uggguuugguucagcuggg

SEQ ID NO: 2846033 - RNA, 19 nt, Artificial Sequence
  Description of Artificial Sequence: Synthetic oligonucleotide
guuggacuaaaugccagug

SEQ ID NO: 2846034 - RNA, 19 nt, Artificial Sequence
  Description of Artificial Sequence: Synthetic oligonucleotide
guugucaaacccagcgagg

SEQ ID NO: 2846035 - RNA, 19 nt, Artificial Sequence
  Description of Artificial Sequence: Synthetic oligonucleotide
aaggauggcugguccugag

SEQ ID NO: 2846036 - RNA, 19 nt, Artificial Sequence
  Description of Artificial Sequence: Synthetic oligonucleotide
cucaugagucaaguagugg

SEQ ID NO: 2846037 - RNA, 19 nt, Artificial Sequence
  Description of Artificial Sequence: Synthetic oligonucleotide
aggcuccuaugucagagug

SEQ ID NO: 2846038 - RNA, 19 nt, Artificial Sequence
  Description of Artificial Sequence: Synthetic oligonucleotide
agacagcaagacauggaac

SEQ ID NO: 2846039 - RNA, 19 nt, Artificial Sequence
  Description of Artificial Sequence: Synthetic oligonucleotide
guaggggugcuccaccaag

SEQ ID NO: 2846040 - RNA, 19 nt, Artificial Sequence
  Description of Artificial Sequence: Synthetic oligonucleotide
gucaaguaguggucacugg

SEQ ID NO: 2846041 - RNA, 19 nt, Artificial Sequence
  Description of Artificial Sequence: Synthetic oligonucleotide
ugcuccaccaaggauggcu

SEQ ID NO: 2846042 - RNA, 19 nt, Artificial Sequence
  Description of Artificial Sequence: Synthetic oligonucleotide
auguugucaaacccagcga

SEQ ID NO: 2846043 - RNA, 19 nt, Artificial Sequence
  Description of Artificial Sequence: Synthetic oligonucleotide
uaggcuggcugcccacucg

SEQ ID NO: 2846044 - RNA, 19 nt, Artificial Sequence
  Description of Artificial Sequence: Synthetic oligonucleotide
cauaguccuagcccugccc

SEQ ID NO: 2846045 - RNA, 19 nt, Artificial Sequence
  Description of Artificial Sequence: Synthetic oligonucleotide
acaauggcuucuccagcag

SEQ ID NO: 2846046 - RNA, 19 nt, Artificial Sequence
  Description of Artificial Sequence: Synthetic oligonucleotide
acagugagggccagcgacc

SEQ ID NO: 2846047 - RNA, 19 nt, Artificial Sequence
  Description of Artificial Sequence: Synthetic oligonucleotide
ugagucaaguaguggucac

SEQ ID NO: 2846048 - RNA, 19 nt, Artificial Sequence
  Description of Artificial Sequence: Synthetic oligonucleotide
aggcacaaagcgcauggca

SEQ ID NO: 2846049 - RNA, 19 nt, Artificial Sequence
  Description of Artificial Sequence: Synthetic oligonucleotide
aggcuggcugcccacucgc

SEQ ID NO: 2846050 - RNA, 19 nt, Artificial Sequence
  Description of Artificial Sequence: Synthetic oligonucleotide
ugcaggugcccuuggggag

SEQ ID NO: 2846051 - RNA, 19 nt, Artificial Sequence
  Description of Artificial Sequence: Synthetic oligonucleotide
gugagaugcaggcuucuac

SEQ ID NO: 2846052 - RNA, 19 nt, Artificial Sequence
  Description of Artificial Sequence: Synthetic oligonucleotide
gauggcugguccugaggcc

SEQ ID NO: 2846053 - RNA, 19 nt, Artificial Sequence
  Description of Artificial Sequence: Synthetic oligonucleotide
acagcaagacauggaacag

SEQ ID NO: 2846054 - RNA, 19 nt, Artificial Sequence
  Description of Artificial Sequence: Synthetic oligonucleotide
aguggaccauaguccuagc

SEQ ID NO: 2846055 - RNA, 19 nt, Artificial Sequence
  Description of Artificial Sequence: Synthetic oligonucleotide
ugauggcuaggcuggcugc

SEQ ID NO: 2846056 - RNA, 19 nt, Artificial Sequence
  Description of Artificial Sequence: Synthetic oligonucleotide
gagaugcaggcuucuacca

SEQ ID NO: 2846057 - RNA, 19 nt, Artificial Sequence
  Description of Artificial Sequence: Synthetic oligonucleotide
cuucacaauggcuucucca

SEQ ID NO: 2846058 - RNA, 19 nt, Artificial Sequence
  Description of Artificial Sequence: Synthetic oligonucleotide
agagaaccagagaggcucc

SEQ ID NO: 2846059 - RNA, 19 nt, Artificial Sequence
  Description of Artificial Sequence: Synthetic oligonucleotide
acccagcgaggccucaggc

SEQ ID NO: 2846060 - RNA, 19 nt, Artificial Sequence
  Description of Artificial Sequence: Synthetic oligonucleotide
ggauggcugguccugaggc

SEQ ID NO: 2846061 - RNA, 19 nt, Artificial Sequence
  Description of Artificial Sequence: Synthetic oligonucleotide
aggauggcugguccugagg

SEQ ID NO: 2846062 - RNA, 19 nt, Artificial Sequence
  Description of Artificial Sequence: Synthetic oligonucleotide
acauggaacagaggggaug

SEQ ID NO: 2846063 - RNA, 19 nt, Artificial Sequence
  Description of Artificial Sequence: Synthetic oligonucleotide
cugauggcuaggcuggcug

SEQ ID NO: 2846064 - RNA, 19 nt, Artificial Sequence
  Description of Artificial Sequence: Synthetic oligonucleotide
gagacacaacaagaaggcc

SEQ ID NO: 2846065 - RNA, 19 nt, Artificial Sequence
  Description of Artificial Sequence: Synthetic oligonucleotide
guuugguucagcuggggua

SEQ ID NO: 2846066 - RNA, 19 nt, Artificial Sequence
  Description of Artificial Sequence: Synthetic oligonucleotide
augagucaaguagugguca

SEQ ID NO: 2846067 - RNA, 19 nt, Artificial Sequence
  Description of Artificial Sequence: Synthetic oligonucleotide
cgagacacaacaagaaggc

SEQ ID NO: 2846068 - RNA, 19 nt, Artificial Sequence
  Description of Artificial Sequence: Synthetic oligonucleotide
acuaaaugccaguggugaa

SEQ ID NO: 2846069 - RNA, 19 nt, Artificial Sequence
  Description of Artificial Sequence: Synthetic oligonucleotide
gcuccuaugucagagugag

SEQ ID NO: 2846070 - RNA, 19 nt, Artificial Sequence
  Description of Artificial Sequence: Synthetic oligonucleotide
cagagaggcuccuauguca

SEQ ID NO: 2846071 - RNA, 19 nt, Artificial Sequence
  Description of Artificial Sequence: Synthetic oligonucleotide
cagaggggaugcaaaguug

SEQ ID NO: 2846072 - RNA, 19 nt, Artificial Sequence
  Description of Artificial Sequence: Synthetic oligonucleotide
cacaauggcuucuccagca

SEQ ID NO: 2846073 - RNA, 19 nt, Artificial Sequence
  Description of Artificial Sequence: Synthetic oligonucleotide
agagaggcuccuaugucag

SEQ ID NO: 2846074 - RNA, 19 nt, Artificial Sequence
  Description of Artificial Sequence: Synthetic oligonucleotide
gcaacagugagggccagcg

SEQ ID NO: 2846075 - RNA, 19 nt, Artificial Sequence
  Description of Artificial Sequence: Synthetic oligonucleotide
ggcacaaagcgcauggcag

SEQ ID NO: 2846076 - RNA, 19 nt, Artificial Sequence
  Description of Artificial Sequence: Synthetic oligonucleotide
cagacagcaagacauggaa

SEQ ID NO: 2846077 - RNA, 19 nt, Artificial Sequence
  Description of Artificial Sequence: Synthetic oligonucleotide
uggaggggcagaacucaug

SEQ ID NO: 2846078 - RNA, 19 nt, Artificial Sequence
  Description of Artificial Sequence: Synthetic oligonucleotide
augucagagugagaugcag

SEQ ID NO: 2846079 - RNA, 19 nt, Artificial Sequence
  Description of Artificial Sequence: Synthetic oligonucleotide
ccuggaugcuucacaaugg

SEQ ID NO: 2846080 - RNA, 19 nt, Artificial Sequence
  Description of Artificial Sequence: Synthetic oligonucleotide
uggggagggcacagagugg

SEQ ID NO: 2846081 - RNA, 19 nt, Artificial Sequence
  Description of Artificial Sequence: Synthetic oligonucleotide
guggaccauaguccuagcc

SEQ ID NO: 2846082 - RNA, 19 nt, Artificial Sequence
  Description of Artificial Sequence: Synthetic oligonucleotide
cacuggggcaacagugagg

SEQ ID NO: 2846083 - RNA, 19 nt, Artificial Sequence
  Description of Artificial Sequence: Synthetic oligonucleotide
ugcaugcaggugcccuugg

SEQ ID NO: 2846084 - RNA, 19 nt, Artificial Sequence
  Description of Artificial Sequence: Synthetic oligonucleotide
gaugcaaaguuggacuaaa

SEQ ID NO: 2846085 - RNA, 19 nt, Artificial Sequence
  Description of Artificial Sequence: Synthetic oligonucleotide
ugcccaaguccaccaaaac

SEQ ID NO: 2846086 - RNA, 19 nt, Artificial Sequence
  Description of Artificial Sequence: Synthetic oligonucleotide
agaacucaugagucaagua

SEQ ID NO: 2846087 - RNA, 19 nt, Artificial Sequence
  Description of Artificial Sequence: Synthetic oligonucleotide
gcgaccucagcagagaacc

SEQ ID NO: 2846088 - RNA, 19 nt, Artificial Sequence
  Description of Artificial Sequence: Synthetic oligonucleotide
agagugagaugcaggcuuc

SEQ ID NO: 2846089 - RNA, 19 nt, Artificial Sequence
  Description of Artificial Sequence: Synthetic oligonucleotide
caaguccaccaaaacacga

SEQ ID NO: 2846090 - RNA, 19 nt, Artificial Sequence
  Description of Artificial Sequence: Synthetic oligonucleotide
acucaugagucaaguagug

SEQ ID NO: 2846091 - RNA, 19 nt, Artificial Sequence
  Description of Artificial Sequence: Synthetic oligonucleotide
gaggggcagaacucaugag

SEQ ID NO: 2846092 - RNA, 19 nt, Artificial Sequence
  Description of Artificial Sequence: Synthetic oligonucleotide
aguggaggggcagaacuca

SEQ ID NO: 2846093 - RNA, 19 nt, Artificial Sequence
  Description of Artificial Sequence: Synthetic oligonucleotide
cuugcccugauggcuaggc

SEQ ID NO: 2846094 - RNA, 19 nt, Artificial Sequence
  Description of Artificial Sequence: Synthetic oligonucleotide
caccaaggauggcuggucc

SEQ ID NO: 2846095 - RNA, 19 nt, Artificial Sequence
  Description of Artificial Sequence: Synthetic oligonucleotide
aaagcgcauggcagagggg

SEQ ID NO: 2846096 - RNA, 19 nt, Artificial Sequence
  Description of Artificial Sequence: Synthetic oligonucleotide
gggugcuccaccaaggaug

SEQ ID NO: 2846097 - RNA, 19 nt, Artificial Sequence
  Description of Artificial Sequence: Synthetic oligonucleotide
ucagagugagaugcaggcu

SEQ ID NO: 2846098 - RNA, 19 nt, Artificial Sequence
  Description of Artificial Sequence: Synthetic oligonucleotide
caagaaggcccagacagca

SEQ ID NO: 2846099 - RNA, 19 nt, Artificial Sequence
  Description of Artificial Sequence: Synthetic oligonucleotide
agaugcaggcuucuaccaa

SEQ ID NO: 2846100 - RNA, 19 nt, Artificial Sequence
  Description of Artificial Sequence: Synthetic oligonucleotide
ccaaguccaccaaaacacg

SEQ ID NO: 2846101 - RNA, 19 nt, Artificial Sequence
  Description of Artificial Sequence: Synthetic oligonucleotide
uggaacagaggggaugcaa

SEQ ID NO: 2846102 - RNA, 19 nt, Artificial Sequence
  Description of Artificial Sequence: Synthetic oligonucleotide
cacaaagcgcauggcagag

SEQ ID NO: 2846103 - RNA, 19 nt, Artificial Sequence
  Description of Artificial Sequence: Synthetic oligonucleotide
gauggcuaggcuggcugcc

SEQ ID NO: 2846104 - RNA, 19 nt, Artificial Sequence
  Description of Artificial Sequence: Synthetic oligonucleotide
ggugcuccaccaaggaugg

SEQ ID NO: 2846105 - RNA, 19 nt, Artificial Sequence
  Description of Artificial Sequence: Synthetic oligonucleotide
accaaggauggcugguccu

SEQ ID NO: 2846106 - RNA, 19 nt, Artificial Sequence
  Description of Artificial Sequence: Synthetic oligonucleotide
ggcauuuggguuugguuca

SEQ ID NO: 2846107 - RNA, 19 nt, Artificial Sequence
  Description of Artificial Sequence: Synthetic oligonucleotide
auggcuaggcuggcugccc

SEQ ID NO: 2846108 - RNA, 19 nt, Artificial Sequence
  Description of Artificial Sequence: Synthetic oligonucleotide
ggucacuggggcaacagug

SEQ ID NO: 2846109 - RNA, 19 nt, Artificial Sequence
  Description of Artificial Sequence: Synthetic oligonucleotide
uggcagaggggcucuugcc

SEQ ID NO: 2846110 - RNA, 19 nt, Artificial Sequence
  Description of Artificial Sequence: Synthetic oligonucleotide
aaacccagcgaggccucag

SEQ ID NO: 2846111 - RNA, 19 nt, Artificial Sequence
  Description of Artificial Sequence: Synthetic oligonucleotide
ggaacagaguggaccauag

SEQ ID NO: 2846112 - RNA, 19 nt, Artificial Sequence
  Description of Artificial Sequence: Synthetic oligonucleotide
acacgagacacaacaagaa

SEQ ID NO: 2846113 - RNA, 19 nt, Artificial Sequence
  Description of Artificial Sequence: Synthetic oligonucleotide
ccaccaaaacacgagacac

SEQ ID NO: 2846114 - RNA, 19 nt, Artificial Sequence
  Description of Artificial Sequence: Synthetic oligonucleotide
acagaccuggaugcuucac

SEQ ID NO: 2846115 - RNA, 19 nt, Artificial Sequence
  Description of Artificial Sequence: Synthetic oligonucleotide
ggaggggcagaacucauga

SEQ ID NO: 2846116 - RNA, 19 nt, Artificial Sequence
  Description of Artificial Sequence: Synthetic oligonucleotide
ugagagaguuuuggaggca

SEQ ID NO: 2846117 - RNA, 19 nt, Artificial Sequence
  Description of Artificial Sequence: Synthetic oligonucleotide
ugguucagcugggguaggg

SEQ ID NO: 2846118 - RNA, 19 nt, Artificial Sequence
  Description of Artificial Sequence: Synthetic oligonucleotide
acaaagcgcauggcagagg

SEQ ID NO: 2846119 - RNA, 19 nt, Artificial Sequence
  Description of Artificial Sequence: Synthetic oligonucleotide
ggcagaggggcucuugccc

SEQ ID NO: 2846120 - RNA, 19 nt, Artificial Sequence
  Description of Artificial Sequence: Synthetic oligonucleotide
aggccucaggcauuugggu

SEQ ID NO: 2846121 - RNA, 19 nt, Artificial Sequence
  Description of Artificial Sequence: Synthetic oligonucleotide
caccaaaacacgagacaca

SEQ ID NO: 2846122 - RNA, 19 nt, Artificial Sequence
  Description of Artificial Sequence: Synthetic oligonucleotide
agcgaccucagcagagaac

SEQ ID NO: 2846123 - RNA, 19 nt, Artificial Sequence
  Description of Artificial Sequence: Synthetic oligonucleotide
ucaggcauuuggguuuggu

SEQ ID NO: 2846124 - RNA, 19 nt, Artificial Sequence
  Description of Artificial Sequence: Synthetic oligonucleotide
guccaccaaaacacgagac

SEQ ID NO: 2846125 - RNA, 19 nt, Artificial Sequence
  Description of Artificial Sequence: Synthetic oligonucleotide
cuccaccaaggauggcugg

SEQ ID NO: 2846126 - RNA, 19 nt, Artificial Sequence
  Description of Artificial Sequence: Synthetic oligonucleotide
guaguggucacuggggcaa

SEQ ID NO: 2846127 - RNA, 19 nt, Artificial Sequence
  Description of Artificial Sequence: Synthetic oligonucleotide
uccaccaaggauggcuggu

SEQ ID NO: 2846128 - RNA, 19 nt, Artificial Sequence
  Description of Artificial Sequence: Synthetic oligonucleotide
aguccuagcccugcccaag

SEQ ID NO: 2846129 - RNA, 19 nt, Artificial Sequence
  Description of Artificial Sequence: Synthetic oligonucleotide
ggagggcacagaguggagg

SEQ ID NO: 2846130 - RNA, 19 nt, Artificial Sequence
  Description of Artificial Sequence: Synthetic oligonucleotide
cacucgcggugcaugcagg

SEQ ID NO: 2846131 - RNA, 19 nt, Artificial Sequence
  Description of Artificial Sequence: Synthetic oligonucleotide
gcccaaguccaccaaaaca

SEQ ID NO: 2846132 - RNA, 19 nt, Artificial Sequence
  Description of Artificial Sequence: Synthetic oligonucleotide
ggggaugcaaaguuggacu

SEQ ID NO: 2846133 - RNA, 19 nt, Artificial Sequence
  Description of Artificial Sequence: Synthetic oligonucleotide
uugcccugauggcuaggcu

SEQ ID NO: 2846134 - RNA, 19 nt, Artificial Sequence
  Description of Artificial Sequence: Synthetic oligonucleotide
ugagggccagcgaccucag

SEQ ID NO: 2846135 - RNA, 19 nt, Artificial Sequence
  Description of Artificial Sequence: Synthetic oligonucleotide
ugcaggcuucuaccaacuc

SEQ ID NO: 2846136 - RNA, 19 nt, Artificial Sequence
  Description of Artificial Sequence: Synthetic oligonucleotide
uggcuaggcuggcugccca

SEQ ID NO: 2846137 - RNA, 19 nt, Artificial Sequence
  Description of Artificial Sequence: Synthetic oligonucleotide
caacaagaaggcccagaca

SEQ ID NO: 2846138 - RNA, 19 nt, Artificial Sequence
  Description of Artificial Sequence: Synthetic oligonucleotide
agaguuuuggaggcacaaa

SEQ ID NO: 2846139 - RNA, 19 nt, Artificial Sequence
  Description of Artificial Sequence: Synthetic oligonucleotide
uggaggcacaaagcgcaug

SEQ ID NO: 2846140 - RNA, 19 nt, Artificial Sequence
  Description of Artificial Sequence: Synthetic oligonucleotide
acucgcggugcaugcaggu

SEQ ID NO: 2846141 - RNA, 19 nt, Artificial Sequence
  Description of Artificial Sequence: Synthetic oligonucleotide
gugagggccagcgaccuca

SEQ ID NO: 2846142 - RNA, 19 nt, Artificial Sequence
  Description of Artificial Sequence: Synthetic oligonucleotide
gaaccagagaggcuccuau

SEQ ID NO: 2846143 - RNA, 19 nt, Artificial Sequence
  Description of Artificial Sequence: Synthetic oligonucleotide
cagaguggaccauaguccu

SEQ ID NO: 2846144 - RNA, 19 nt, Artificial Sequence
  Description of Artificial Sequence: Synthetic oligonucleotide
ugcuucacaauggcuucuc

SEQ ID NO: 2846145 - RNA, 19 nt, Artificial Sequence
  Description of Artificial Sequence: Synthetic oligonucleotide
gguucagcugggguagggg

SEQ ID NO: 2846146 - RNA, 19 nt, Artificial Sequence
  Description of Artificial Sequence: Synthetic oligonucleotide
agugagggccagcgaccuc

SEQ ID NO: 2846147 - RNA, 19 nt, Artificial Sequence
  Description of Artificial Sequence: Synthetic oligonucleotide
gaggcacaaagcgcauggc

SEQ ID NO: 2846148 - RNA, 19 nt, Artificial Sequence
  Description of Artificial Sequence: Synthetic oligonucleotide
gucacuggggcaacaguga

SEQ ID NO: 2846149 - RNA, 19 nt, Artificial Sequence
  Description of Artificial Sequence: Synthetic oligonucleotide
gaccauaguccuagcccug

SEQ ID NO: 2846150 - RNA, 19 nt, Artificial Sequence
  Description of Artificial Sequence: Synthetic oligonucleotide
uuggaggcacaaagcgcau

SEQ ID NO: 2846151 - RNA, 19 nt, Artificial Sequence
  Description of Artificial Sequence: Synthetic oligonucleotide
gaguggaggggcagaacuc

SEQ ID NO: 2846152 - RNA, 19 nt, Artificial Sequence
  Description of Artificial Sequence: Synthetic oligonucleotide
cucuugcccugauggcuag

SEQ ID NO: 2846153 - RNA, 19 nt, Artificial Sequence
  Description of Artificial Sequence: Synthetic oligonucleotide
ggacuaaaugccaguggug

SEQ ID NO: 2846154 - RNA, 19 nt, Artificial Sequence
  Description of Artificial Sequence: Synthetic oligonucleotide
gcuggcugcccacucgcgg

SEQ ID NO: 2846155 - RNA, 19 nt, Artificial Sequence
  Description of Artificial Sequence: Synthetic oligonucleotide
ccuagcccugcccaagucc

SEQ ID NO: 2846156 - RNA, 19 nt, Artificial Sequence
  Description of Artificial Sequence: Synthetic oligonucleotide
uugguucagcugggguagg

SEQ ID NO: 2846157 - RNA, 19 nt, Artificial Sequence
  Description of Artificial Sequence: Synthetic oligonucleotide
agggcacagaguggagggg

SEQ ID NO: 2846158 - RNA, 19 nt, Artificial Sequence
  Description of Artificial Sequence: Synthetic oligonucleotide
ggaccauaguccuagcccu

SEQ ID NO: 2846159 - RNA, 19 nt, Artificial Sequence
  Description of Artificial Sequence: Synthetic oligonucleotide
uccuagcccugcccaaguc

SEQ ID NO: 2846160 - RNA, 19 nt, Artificial Sequence
  Description of Artificial Sequence: Synthetic oligonucleotide
ucuugcccugauggcuagg

SEQ ID NO: 2846161 - RNA, 19 nt, Artificial Sequence
  Description of Artificial Sequence: Synthetic oligonucleotide
guucagcugggguaggggu

SEQ ID NO: 2846162 - RNA, 19 nt, Artificial Sequence
  Description of Artificial Sequence: Synthetic oligonucleotide
uaguccuagcccugcccaa

SEQ ID NO: 2846163 - RNA, 19 nt, Artificial Sequence
  Description of Artificial Sequence: Synthetic oligonucleotide
uggcugguccugaggcccc

SEQ ID NO: 2846164 - RNA, 19 nt, Artificial Sequence
  Description of Artificial Sequence: Synthetic oligonucleotide
cauuuggguuugguucagc

SEQ ID NO: 2846165 - RNA, 19 nt, Artificial Sequence
  Description of Artificial Sequence: Synthetic oligonucleotide
uggcugcccacucgcggug

SEQ ID NO: 2846166 - RNA, 19 nt, Artificial Sequence
  Description of Artificial Sequence: Synthetic oligonucleotide
gggccagcgaccucagcag

SEQ ID NO: 2846167 - RNA, 19 nt, Artificial Sequence
  Description of Artificial Sequence: Synthetic oligonucleotide
gcccugauggcuaggcugg

SEQ ID NO: 2846168 - RNA, 19 nt, Artificial Sequence
  Description of Artificial Sequence: Synthetic oligonucleotide
ccuaugucagagugagaug

SEQ ID NO: 2846169 - RNA, 19 nt, Artificial Sequence
  Description of Artificial Sequence: Synthetic oligonucleotide
gaaggcccagacagcaaga

SEQ ID NO: 2846170 - RNA, 19 nt, Artificial Sequence
  Description of Artificial Sequence: Synthetic oligonucleotide
aggaacagaguggaccaua

SEQ ID NO: 2846171 - RNA, 19 nt, Artificial Sequence
  Description of Artificial Sequence: Synthetic oligonucleotide
ccuuggggagggcacagag

SEQ ID NO: 2846172 - RNA, 19 nt, Artificial Sequence
  Description of Artificial Sequence: Synthetic oligonucleotide
agagaguuuuggaggcaca

SEQ ID NO: 2846173 - RNA, 19 nt, Artificial Sequence
  Description of Artificial Sequence: Synthetic oligonucleotide
cagagugagaugcaggcuu

SEQ ID NO: 2846174 - RNA, 19 nt, Artificial Sequence
  Description of Artificial Sequence: Synthetic oligonucleotide
gcacaaagcgcauggcaga

SEQ ID NO: 2846175 - RNA, 19 nt, Artificial Sequence
  Description of Artificial Sequence: Synthetic oligonucleotide
ugcccacucgcggugcaug

SEQ ID NO: 2846176 - RNA, 19 nt, Artificial Sequence
  Description of Artificial Sequence: Synthetic oligonucleotide
aagaaggcccagacagcaa

SEQ ID NO: 2846177 - RNA, 19 nt, Artificial Sequence
  Description of Artificial Sequence: Synthetic oligonucleotide
cacaacaagaaggcccaga

SEQ ID NO: 2846178 - RNA, 19 nt, Artificial Sequence
  Description of Artificial Sequence: Synthetic oligonucleotide
acagaguggaggggcagaa

SEQ ID NO: 2846179 - RNA, 19 nt, Artificial Sequence
  Description of Artificial Sequence: Synthetic oligonucleotide
cugcccaaguccaccaaaa

SEQ ID NO: 2846180 - RNA, 19 nt, Artificial Sequence
  Description of Artificial Sequence: Synthetic oligonucleotide
cccagacagcaagacaugg

SEQ ID NO: 2846181 - RNA, 19 nt, Artificial Sequence
  Description of Artificial Sequence: Synthetic oligonucleotide
gcuucacaauggcuucucc

SEQ ID NO: 2846182 - RNA, 19 nt, Artificial Sequence
  Description of Artificial Sequence: Synthetic oligonucleotide
cuaggcuggcugcccacuc

SEQ ID NO: 2846183 - RNA, 19 nt, Artificial Sequence
  Description of Artificial Sequence: Synthetic oligonucleotide
ugggguaggggugcuccac

SEQ ID NO: 2846184 - RNA, 19 nt, Artificial Sequence
  Description of Artificial Sequence: Synthetic oligonucleotide
augcuucacaauggcuucu

SEQ ID NO: 2846185 - RNA, 19 nt, Artificial Sequence
  Description of Artificial Sequence: Synthetic oligonucleotide
gaggggaugcaaaguugga

SEQ ID NO: 2846186 - RNA, 19 nt, Artificial Sequence
  Description of Artificial Sequence: Synthetic oligonucleotide
gcaugcaggugcccuuggg

SEQ ID NO: 2846187 - RNA, 19 nt, Artificial Sequence
  Description of Artificial Sequence: Synthetic oligonucleotide
gggaugcaaaguuggacua

SEQ ID NO: 2846188 - RNA, 19 nt, Artificial Sequence
  Description of Artificial Sequence: Synthetic oligonucleotide
gaacagaguggaccauagu

SEQ ID NO: 2846189 - RNA, 19 nt, Artificial Sequence
  Description of Artificial Sequence: Synthetic oligonucleotide
ggaugcuucacaauggcuu

SEQ ID NO: 2846190 - RNA, 19 nt, Artificial Sequence
  Description of Artificial Sequence: Synthetic oligonucleotide
aggggcucuugcccugaug

SEQ ID NO: 2846191 - RNA, 19 nt, Artificial Sequence
  Description of Artificial Sequence: Synthetic oligonucleotide
gagaggcuccuaugucaga

SEQ ID NO: 2846192 - RNA, 19 nt, Artificial Sequence
  Description of Artificial Sequence: Synthetic oligonucleotide
gcaagacauggaacagagg

SEQ ID NO: 2846193 - RNA, 19 nt, Artificial Sequence
  Description of Artificial Sequence: Synthetic oligonucleotide
cccagccaaggugagagag

SEQ ID NO: 2846194 - RNA, 19 nt, Artificial Sequence
  Description of Artificial Sequence: Synthetic oligonucleotide
augcaggcuucuaccaacu

SEQ ID NO: 2846195 - RNA, 19 nt, Artificial Sequence
  Description of Artificial Sequence: Synthetic oligonucleotide
gcagaacucaugagucaag

SEQ ID NO: 2846196 - RNA, 19 nt, Artificial Sequence
  Description of Artificial Sequence: Synthetic oligonucleotide
ggcagaacucaugagucaa

SEQ ID NO: 2846197 - RNA, 19 nt, Artificial Sequence
  Description of Artificial Sequence: Synthetic oligonucleotide
cauggcagaggggcucuug

SEQ ID NO: 2846198 - RNA, 19 nt, Artificial Sequence
  Description of Artificial Sequence: Synthetic oligonucleotide
acacaacaagaaggcccag

SEQ ID NO: 2846199 - RNA, 19 nt, Artificial Sequence
  Description of Artificial Sequence: Synthetic oligonucleotide
gggcacagaguggaggggc

SEQ ID NO: 2846200 - RNA, 19 nt, Artificial Sequence
  Description of Artificial Sequence: Synthetic oligonucleotide
gugcaugcaggugcccuug

SEQ ID NO: 2846201 - RNA, 19 nt, Artificial Sequence
  Description of Artificial Sequence: Synthetic oligonucleotide
cgaggccucaggcauuugg

SEQ ID NO: 2846202 - RNA, 19 nt, Artificial Sequence
  Description of Artificial Sequence: Synthetic oligonucleotide
uagcccugcccaaguccac

SEQ ID NO: 2846203 - RNA, 19 nt, Artificial Sequence
  Description of Artificial Sequence: Synthetic oligonucleotide
ugcccuuggggagggcaca

SEQ ID NO: 2846204 - RNA, 19 nt, Artificial Sequence
  Description of Artificial Sequence: Synthetic oligonucleotide
ccaaaacacgagacacaac

SEQ ID NO: 2846205 - RNA, 19 nt, Artificial Sequence
  Description of Artificial Sequence: Synthetic oligonucleotide
cagaacucaugagucaagu

SEQ ID NO: 2846206 - RNA, 19 nt, Artificial Sequence
  Description of Artificial Sequence: Synthetic oligonucleotide
agugagaugcaggcuucua

SEQ ID NO: 2846207 - RNA, 19 nt, Artificial Sequence
  Description of Artificial Sequence: Synthetic oligonucleotide
gcaggugcccuuggggagg

SEQ ID NO: 2846208 - RNA, 19 nt, Artificial Sequence
  Description of Artificial Sequence: Synthetic oligonucleotide
gggguaggggugcuccacc

SEQ ID NO: 2846209 - RNA, 19 nt, Artificial Sequence
  Description of Artificial Sequence: Synthetic oligonucleotide
gggcagaacucaugaguca

SEQ ID NO: 2846210 - RNA, 19 nt, Artificial Sequence
  Description of Artificial Sequence: Synthetic oligonucleotide
gagucaaguaguggucacu

SEQ ID NO: 2846211 - RNA, 19 nt, Artificial Sequence
  Description of Artificial Sequence: Synthetic oligonucleotide
ggggagggcacagagugga

SEQ ID NO: 2846212 - RNA, 19 nt, Artificial Sequence
  Description of Artificial Sequence: Synthetic oligonucleotide
augcaaaguuggacuaaau

SEQ ID NO: 2846213 - RNA, 19 nt, Artificial Sequence
  Description of Artificial Sequence: Synthetic oligonucleotide
ccagagaggcuccuauguc

SEQ ID NO: 2846214 - RNA, 19 nt, Artificial Sequence
  Description of Artificial Sequence: Synthetic oligonucleotide
gcuccaccaaggauggcug

SEQ ID NO: 2846215 - RNA, 19 nt, Artificial Sequence
  Description of Artificial Sequence: Synthetic oligonucleotide
gaggcuccuaugucagagu

SEQ ID NO: 2846216 - RNA, 19 nt, Artificial Sequence
  Description of Artificial Sequence: Synthetic oligonucleotide
ggcccagacagcaagacau

SEQ ID NO: 2846217 - RNA, 19 nt, Artificial Sequence
  Description of Artificial Sequence: Synthetic oligonucleotide
agaaccagagaggcuccua

SEQ ID NO: 2846218 - RNA, 19 nt, Artificial Sequence
  Description of Artificial Sequence: Synthetic oligonucleotide
cucgcggugcaugcaggug

SEQ ID NO: 2846219 - RNA, 19 nt, Artificial Sequence
  Description of Artificial Sequence: Synthetic oligonucleotide
aguggucacuggggcaaca

SEQ ID NO: 2846220 - RNA, 19 nt, Artificial Sequence
  Description of Artificial Sequence: Synthetic oligonucleotide
ccaaggugagagaguuuug

SEQ ID NO: 2846221 - RNA, 19 nt, Artificial Sequence
  Description of Artificial Sequence: Synthetic oligonucleotide
ccagacagcaagacaugga

SEQ ID NO: 2846222 - RNA, 19 nt, Artificial Sequence
  Description of Artificial Sequence: Synthetic oligonucleotide
cagaguggaggggcagaac

SEQ ID NO: 2846223 - RNA, 19 nt, Artificial Sequence
  Description of Artificial Sequence: Synthetic oligonucleotide
ccacucgcggugcaugcag

SEQ ID NO: 2846224 - RNA, 19 nt, Artificial Sequence
  Description of Artificial Sequence: Synthetic oligonucleotide
cuuggggagggcacagagu

SEQ ID NO: 2846225 - RNA, 19 nt, Artificial Sequence
  Description of Artificial Sequence: Synthetic oligonucleotide
gggcucuugcccugauggc

SEQ ID NO: 2846226 - RNA, 19 nt, Artificial Sequence
  Description of Artificial Sequence: Synthetic oligonucleotide
caggugcccuuggggaggg

SEQ ID NO: 2846227 - RNA, 19 nt, Artificial Sequence
  Description of Artificial Sequence: Synthetic oligonucleotide
ggguuugguucagcugggg

SEQ ID NO: 2846228 - RNA, 19 nt, Artificial Sequence
  Description of Artificial Sequence: Synthetic oligonucleotide
ccaaggauggcugguccug

SEQ ID NO: 2846229 - RNA, 19 nt, Artificial Sequence
  Description of Artificial Sequence: Synthetic oligonucleotide
caaggauggcugguccuga

SEQ ID NO: 2846230 - RNA, 19 nt, Artificial Sequence
  Description of Artificial Sequence: Synthetic oligonucleotide
uaguggucacuggggcaac

SEQ ID NO: 2846231 - RNA, 19 nt, Artificial Sequence
  Description of Artificial Sequence: Synthetic oligonucleotide
cuggggcaacagugagggc

SEQ ID NO: 2846232 - RNA, 19 nt, Artificial Sequence
  Description of Artificial Sequence: Synthetic oligonucleotide
gcauuuggguuugguucag

SEQ ID NO: 2846233 - RNA, 19 nt, Artificial Sequence
  Description of Artificial Sequence: Synthetic oligonucleotide
caggcauuuggguuugguu

SEQ ID NO: 2846234 - RNA, 19 nt, Artificial Sequence
  Description of Artificial Sequence: Synthetic oligonucleotide
gagggccagcgaccucagc

SEQ ID NO: 2846235 - RNA, 19 nt, Artificial Sequence
  Description of Artificial Sequence: Synthetic oligonucleotide
caacagugagggccagcga

SEQ ID NO: 2846236 - RNA, 19 nt, Artificial Sequence
  Description of Artificial Sequence: Synthetic oligonucleotide
agcgcauggcagaggggcu

SEQ ID NO: 2846237 - RNA, 19 nt, Artificial Sequence
  Description of Artificial Sequence: Synthetic oligonucleotide
gccagcgaccucagcagag

SEQ ID NO: 2846238 - RNA, 19 nt, Artificial Sequence
  Description of Artificial Sequence: Synthetic oligonucleotide
ggguaggggugcuccacca

SEQ ID NO: 2846239 - RNA, 19 nt, Artificial Sequence
  Description of Artificial Sequence: Synthetic oligonucleotide
agcgaggccucaggcauuu

SEQ ID NO: 2846240 - RNA, 19 nt, Artificial Sequence
  Description of Artificial Sequence: Synthetic oligonucleotide
ggaugcaaaguuggacuaa

SEQ ID NO: 2846241 - RNA, 19 nt, Artificial Sequence
  Description of Artificial Sequence: Synthetic oligonucleotide
agaggggcucuugcccuga

SEQ ID NO: 2846242 - RNA, 19 nt, Artificial Sequence
  Description of Artificial Sequence: Synthetic oligonucleotide
ggggcaacagugagggcca

SEQ ID NO: 2846243 - RNA, 19 nt, Artificial Sequence
  Description of Artificial Sequence: Synthetic oligonucleotide
cuggcugcccacucgcggu

SEQ ID NO: 2846244 - RNA, 19 nt, Artificial Sequence
  Description of Artificial Sequence: Synthetic oligonucleotide
cucaggcauuuggguuugg

SEQ ID NO: 2846245 - RNA, 19 nt, Artificial Sequence
  Description of Artificial Sequence: Synthetic oligonucleotide
agaguggaccauaguccua

SEQ ID NO: 2846246 - RNA, 19 nt, Artificial Sequence
  Description of Artificial Sequence: Synthetic oligonucleotide
cagcgaccucagcagagaa

SEQ ID NO: 2846247 - RNA, 19 nt, Artificial Sequence
  Description of Artificial Sequence: Synthetic oligonucleotide
cuccuaugucagagugaga

SEQ ID NO: 2846248 - RNA, 19 nt, Artificial Sequence
  Description of Artificial Sequence: Synthetic oligonucleotide
ggugcccuuggggagggca

SEQ ID NO: 2846249 - RNA, 19 nt, Artificial Sequence
  Description of Artificial Sequence: Synthetic oligonucleotide
gcccacucgcggugcaugc

SEQ ID NO: 2846250 - RNA, 19 nt, Artificial Sequence
  Description of Artificial Sequence: Synthetic oligonucleotide
cugggguaggggugcucca

SEQ ID NO: 2846251 - RNA, 19 nt, Artificial Sequence
  Description of Artificial Sequence: Synthetic oligonucleotide
gacauggaacagaggggau

SEQ ID NO: 2846252 - RNA, 19 nt, Artificial Sequence
  Description of Artificial Sequence: Synthetic oligonucleotide
gagugagaugcaggcuucu

SEQ ID NO: 2846253 - RNA, 19 nt, Artificial Sequence
  Description of Artificial Sequence: Synthetic oligonucleotide
gguaggggugcuccaccaa

SEQ ID NO: 2846254 - RNA, 19 nt, Artificial Sequence
  Description of Artificial Sequence: Synthetic oligonucleotide
gcagaggggcucuugcccu

SEQ ID NO: 2846255 - RNA, 19 nt, Artificial Sequence
  Description of Artificial Sequence: Synthetic oligonucleotide
ggcuccuaugucagaguga

SEQ ID NO: 2846256 - RNA, 19 nt, Artificial Sequence
  Description of Artificial Sequence: Synthetic oligonucleotide
gagaaccagagaggcuccu

SEQ ID NO: 2846257 - RNA, 19 nt, Artificial Sequence
  Description of Artificial Sequence: Synthetic oligonucleotide
ggcuaggcuggcugcccac

SEQ ID NO: 2846258 - RNA, 19 nt, Artificial Sequence
  Description of Artificial Sequence: Synthetic oligonucleotide
ggcaacagugagggccagc

SEQ ID NO: 2846259 - RNA, 19 nt, Artificial Sequence
  Description of Artificial Sequence: Synthetic oligonucleotide
gcccagacagcaagacaug

SEQ ID NO: 2846260 - RNA, 19 nt, Artificial Sequence
  Description of Artificial Sequence: Synthetic oligonucleotide
guccuagcccugcccaagu

SEQ ID NO: 2846261 - RNA, 19 nt, Artificial Sequence
  Description of Artificial Sequence: Synthetic oligonucleotide
ggcacagaguggaggggca

SEQ ID NO: 2846262 - RNA, 19 nt, Artificial Sequence
  Description of Artificial Sequence: Synthetic oligonucleotide
gccucaggcauuuggguuu

SEQ ID NO: 2846263 - RNA, 19 nt, Artificial Sequence
  Description of Artificial Sequence: Synthetic oligonucleotide
ggccagcgaccucagcaga

SEQ ID NO: 2846264 - RNA, 19 nt, Artificial Sequence
  Description of Artificial Sequence: Synthetic oligonucleotide
cgcggugcaugcaggugcc

SEQ ID NO: 2846265 - RNA, 19 nt, Artificial Sequence
  Description of Artificial Sequence: Synthetic oligonucleotide
ggcuggcugcccacucgcg

SEQ ID NO: 2846266 - RNA, 19 nt, Artificial Sequence
  Description of Artificial Sequence: Synthetic oligonucleotide
ccaccaaggauggcugguc

SEQ ID NO: 2846267 - RNA, 19 nt, Artificial Sequence
  Description of Artificial Sequence: Synthetic oligonucleotide
ggccucaggcauuuggguu

SEQ ID NO: 2846268 - RNA, 19 nt, Artificial Sequence
  Description of Artificial Sequence: Synthetic oligonucleotide
cccagcgaggccucaggca

SEQ ID NO: 2846269 - RNA, 19 nt, Artificial Sequence
  Description of Artificial Sequence: Synthetic oligonucleotide
ccucaggcauuuggguuug

SEQ ID NO: 2846270 - RNA, 19 nt, Artificial Sequence
  Description of Artificial Sequence: Synthetic oligonucleotide
aggugcccuuggggagggc

SEQ ID NO: 2846271 - RNA, 19 nt, Artificial Sequence
  Description of Artificial Sequence: Synthetic oligonucleotide
gggagggcacagaguggag

SEQ ID NO: 2846272 - RNA, 19 nt, Artificial Sequence
  Description of Artificial Sequence: Synthetic oligonucleotide
gcucuugcccugauggcua

SEQ ID NO: 2846273 - RNA, 19 nt, Artificial Sequence
  Description of Artificial Sequence: Synthetic oligonucleotide
gcccugcccaaguccacca

SEQ ID NO: 2846274 - RNA, 19 nt, Artificial Sequence
  Description of Artificial Sequence: Synthetic oligonucleotide
caaacccagcgaggccuca

SEQ ID NO: 2846275 - RNA, 19 nt, Artificial Sequence
  Description of Artificial Sequence: Synthetic oligonucleotide
agccaaggugagagaguuu

SEQ ID NO: 2846276 - RNA, 19 nt, Artificial Sequence
  Description of Artificial Sequence: Synthetic oligonucleotide
ccugcccaaguccaccaaa

SEQ ID NO: 2846277 - RNA, 19 nt, Artificial Sequence
  Description of Artificial Sequence: Synthetic oligonucleotide
cagugagggccagcgaccu

SEQ ID NO: 2846278 - RNA, 19 nt, Artificial Sequence
  Description of Artificial Sequence: Synthetic oligonucleotide
ggugcaugcaggugcccuu

SEQ ID NO: 2846279 - RNA, 19 nt, Artificial Sequence
  Description of Artificial Sequence: Synthetic oligonucleotide
gcccuuggggagggcacag

SEQ ID NO: 2846280 - RNA, 19 nt, Artificial Sequence
  Description of Artificial Sequence: Synthetic oligonucleotide
gcgcauggcagaggggcuc

SEQ ID NO: 2846281 - RNA, 19 nt, Artificial Sequence
  Description of Artificial Sequence: Synthetic oligonucleotide
gugcuccaccaaggauggc

SEQ ID NO: 2846282 - RNA, 19 nt, Artificial Sequence
  Description of Artificial Sequence: Synthetic oligonucleotide
gcagagaaccagagaggcu

SEQ ID NO: 2846283 - RNA, 19 nt, Artificial Sequence
  Description of Artificial Sequence: Synthetic oligonucleotide
ggggugcuccaccaaggau

SEQ ID NO: 2846284 - RNA, 19 nt, Artificial Sequence
  Description of Artificial Sequence: Synthetic oligonucleotide
cuccagcagcaggaacaga

SEQ ID NO: 2846285 - RNA, 19 nt, Artificial Sequence
  Description of Artificial Sequence: Synthetic oligonucleotide
ccagcgaccucagcagaga

SEQ ID NO: 2846286 - RNA, 19 nt, Artificial Sequence
  Description of Artificial Sequence: Synthetic oligonucleotide
ccagccaaggugagagagu

SEQ ID NO: 2846287 - RNA, 19 nt, Artificial Sequence
  Description of Artificial Sequence: Synthetic oligonucleotide
gggcaacagugagggccag

SEQ ID NO: 2846288 - RNA, 19 nt, Artificial Sequence
  Description of Artificial Sequence: Synthetic oligonucleotide
cccugauggcuaggcuggc

SEQ ID NO: 2846289 - RNA, 19 nt, Artificial Sequence
  Description of Artificial Sequence: Synthetic oligonucleotide
gaggggcucuugcccugau

SEQ ID NO: 2846290 - RNA, 19 nt, Artificial Sequence
  Description of Artificial Sequence: Synthetic oligonucleotide
caggaacagaguggaccau

SEQ ID NO: 2846291 - RNA, 19 nt, Artificial Sequence
  Description of Artificial Sequence: Synthetic oligonucleotide
gcuaggcuggcugcccacu

SEQ ID NO: 2846292 - RNA, 19 nt, Artificial Sequence
  Description of Artificial Sequence: Synthetic oligonucleotide
gcggugcaugcaggugccc

SEQ ID NO: 2846293 - RNA, 19 nt, Artificial Sequence
  Description of Artificial Sequence: Synthetic oligonucleotide
cgaccucagcagagaacca

SEQ ID NO: 2846294 - RNA, 19 nt, Artificial Sequence
  Description of Artificial Sequence: Synthetic oligonucleotide
cagcgaggccucaggcauu

SEQ ID NO: 2846295 - RNA, 19 nt, Artificial Sequence
  Description of Artificial Sequence: Synthetic oligonucleotide
cccacucgcggugcaugca

SEQ ID NO: 2846296 - RNA, 19 nt, Artificial Sequence
  Description of Artificial Sequence: Synthetic oligonucleotide
cccugcccaaguccaccaa

SEQ ID NO: 2846297 - RNA, 19 nt, Artificial Sequence
  Description of Artificial Sequence: Synthetic oligonucleotide
gcgaggccucaggcauuug

SEQ ID NO: 2846298 - RNA, 19 nt, Artificial Sequence
  Description of Artificial Sequence: Synthetic oligonucleotide
cccuuggggagggcacaga

SEQ ID NO: 2846299 - RNA, 19 nt, Artificial Sequence
  Description of Artificial Sequence: Synthetic oligonucleotide
cugcccacucgcggugcau

SEQ ID NO: 2846300 - RNA, 19 nt, Artificial Sequence
  Description of Artificial Sequence: Synthetic oligonucleotide
cggugcaugcaggugcccu

SEQ ID NO: 2846301 - RNA, 19 nt, Artificial Sequence
  Description of Artificial Sequence: Synthetic oligonucleotide
cgcauggcagaggggcucu

SEQ ID NO: 2846302 - RNA, 19 nt, Artificial Sequence
  Description of Artificial Sequence: Synthetic oligonucleotide
gcauggcagaggggcucuu

SEQ ID NO: 2846303 - RNA, 19 nt, Artificial Sequence
  Description of Artificial Sequence: Synthetic oligonucleotide
aauggcauagucuacaugg

SEQ ID NO: 2846304 - RNA, 19 nt, Artificial Sequence
  Description of Artificial Sequence: Synthetic oligonucleotide
aacacuauuacucuugggg

SEQ ID NO: 2846305 - RNA, 19 nt, Artificial Sequence
  Description of Artificial Sequence: Synthetic oligonucleotide
uaaggaaugacacaggaag

SEQ ID NO: 2846306 - RNA, 19 nt, Artificial Sequence
  Description of Artificial Sequence: Synthetic oligonucleotide
aauagucuuuaucuggugc

SEQ ID NO: 2846307 - RNA, 19 nt, Artificial Sequence
  Description of Artificial Sequence: Synthetic oligonucleotide
uuaaauuaaggaaugacac

SEQ ID NO: 2846308 - RNA, 19 nt, Artificial Sequence
  Description of Artificial Sequence: Synthetic oligonucleotide
aaauuaaggaaugacacag

SEQ ID NO: 2846309 - RNA, 19 nt, Artificial Sequence
  Description of Artificial Sequence: Synthetic oligonucleotide
acaugauuaacacuauuac

SEQ ID NO: 2846310 - RNA, 19 nt, Artificial Sequence
  Description of Artificial Sequence: Synthetic oligonucleotide
augauuaacacuauuacuc

SEQ ID NO: 2846311 - RNA, 19 nt, Artificial Sequence
  Description of Artificial Sequence: Synthetic oligonucleotide
ucuguguucaccacgauga

SEQ ID NO: 2846312 - RNA, 19 nt, Artificial Sequence
  Description of Artificial Sequence: Synthetic oligonucleotide
ucuacaugggcucuuaggc

SEQ ID NO: 2846313 - RNA, 19 nt, Artificial Sequence
  Description of Artificial Sequence: Synthetic oligonucleotide
gagauaguggcuuauucgg

SEQ ID NO: 2846314 - RNA, 19 nt, Artificial Sequence
  Description of Artificial Sequence: Synthetic oligonucleotide
ugagauaguggcuuauucg

SEQ ID NO: 2846315 - RNA, 19 nt, Artificial Sequence
  Description of Artificial Sequence: Synthetic oligonucleotide
acagagauacccuugauca

SEQ ID NO: 2846316 - RNA, 19 nt, Artificial Sequence
  Description of Artificial Sequence: Synthetic oligonucleotide
uccauggugcucuugaugg

SEQ ID NO: 2846317 - RNA, 19 nt, Artificial Sequence
  Description of Artificial Sequence: Synthetic oligonucleotide
uuuucuuggagcgaauucg

SEQ ID NO: 2846318 - RNA, 19 nt, Artificial Sequence
  Description of Artificial Sequence: Synthetic oligonucleotide
aagguuaggucauuuuggg

SEQ ID NO: 2846319 - RNA, 19 nt, Artificial Sequence
  Description of Artificial Sequence: Synthetic oligonucleotide
cuuggagcgaauucgaagg

SEQ ID NO: 2846320 - RNA, 19 nt, Artificial Sequence
  Description of Artificial Sequence: Synthetic oligonucleotide
uaggcaaccaccaugugcc

SEQ ID NO: 2846321 - RNA, 19 nt, Artificial Sequence
  Description of Artificial Sequence: Synthetic oligonucleotide
cauacuguguaguaguggg

SEQ ID NO: 2846322 - RNA, 19 nt, Artificial Sequence
  Description of Artificial Sequence: Synthetic oligonucleotide
gaugaaguugugcaugagg

SEQ ID NO: 2846323 - RNA, 19 nt, Artificial Sequence
  Description of Artificial Sequence: Synthetic oligonucleotide
uuaacacuauuacucuugg

SEQ ID NO: 2846324 - RNA, 19 nt, Artificial Sequence
  Description of Artificial Sequence: Synthetic oligonucleotide
ugaaucacaaucaggaaau

SEQ ID NO: 2846325 - RNA, 19 nt, Artificial Sequence
  Description of Artificial Sequence: Synthetic oligonucleotide
cuuaaauuaaggaaugaca

SEQ ID NO: 2846326 - RNA, 19 nt, Artificial Sequence
  Description of Artificial Sequence: Synthetic oligonucleotide
uggauucugaaucacaauc

SEQ ID NO: 2846327 - RNA, 19 nt, Artificial Sequence
  Description of Artificial Sequence: Synthetic oligonucleotide
uucgguuggauucugaauc

SEQ ID NO: 2846328 - RNA, 19 nt, Artificial Sequence
  Description of Artificial Sequence: Synthetic oligonucleotide
ugaucaauggcauagucua

SEQ ID NO: 2846329 - RNA, 19 nt, Artificial Sequence
  Description of Artificial Sequence: Synthetic oligonucleotide
uuaggcaaccaccaugugc

SEQ ID NO: 2846330 - RNA, 19 nt, Artificial Sequence
  Description of Artificial Sequence: Synthetic oligonucleotide
ucuggugcaaccauaauuu

SEQ ID NO: 2846331 - RNA, 19 nt, Artificial Sequence
  Description of Artificial Sequence: Synthetic oligonucleotide
gaagguuaggucauuuugg

SEQ ID NO: 2846332 - RNA, 19 nt, Artificial Sequence
  Description of Artificial Sequence: Synthetic oligonucleotide
auuaaggaaugacacagga

SEQ ID NO: 2846333 - RNA, 19 nt, Artificial Sequence
  Description of Artificial Sequence: Synthetic oligonucleotide
ucgaaggaagguuagguca

SEQ ID NO: 2846334 - RNA, 19 nt, Artificial Sequence
  Description of Artificial Sequence: Synthetic oligonucleotide
ucacaaucaggaaauaguc

SEQ ID NO: 2846335 - RNA, 19 nt, Artificial Sequence
  Description of Artificial Sequence: Synthetic oligonucleotide
ucuuaggcaaccaccaugu

SEQ ID NO: 2846336 - RNA, 19 nt, Artificial Sequence
  Description of Artificial Sequence: Synthetic oligonucleotide
aaucacaaucaggaaauag

SEQ ID NO: 2846337 - RNA, 19 nt, Artificial Sequence
  Description of Artificial Sequence: Synthetic oligonucleotide
aaggaaugacacaggaagc

SEQ ID NO: 2846338 - RNA, 19 nt, Artificial Sequence
  Description of Artificial Sequence: Synthetic oligonucleotide
ugauuaacacuauuacucu

SEQ ID NO: 2846339 - RNA, 19 nt, Artificial Sequence
  Description of Artificial Sequence: Synthetic oligonucleotide
uugaucaauggcauagucu

SEQ ID NO: 2846340 - RNA, 19 nt, Artificial Sequence
  Description of Artificial Sequence: Synthetic oligonucleotide
acuggaucaccagagacac

SEQ ID NO: 2846341 - RNA, 19 nt, Artificial Sequence
  Description of Artificial Sequence: Synthetic oligonucleotide
auuucacgcacagugcucc

SEQ ID NO: 2846342 - RNA, 19 nt, Artificial Sequence
  Description of Artificial Sequence: Synthetic oligonucleotide
acaaucaggaaauagucuu

SEQ ID NO: 2846343 - RNA, 19 nt, Artificial Sequence
  Description of Artificial Sequence: Synthetic oligonucleotide
ucuuggagcgaauucgaag

SEQ ID NO: 2846344 - RNA, 19 nt, Artificial Sequence
  Description of Artificial Sequence: Synthetic oligonucleotide
ucaggaaauagucuuuauc

SEQ ID NO: 2846345 - RNA, 19 nt, Artificial Sequence
  Description of Artificial Sequence: Synthetic oligonucleotide
aauuaaggaaugacacagg

SEQ ID NO: 2846346 - RNA, 19 nt, Artificial Sequence
  Description of Artificial Sequence: Synthetic oligonucleotide
aaauagucuuuaucuggug

SEQ ID NO: 2846347 - RNA, 19 nt, Artificial Sequence
  Description of Artificial Sequence: Synthetic oligonucleotide
ugacacaggaagcugagau

SEQ ID NO: 2846348 - RNA, 19 nt, Artificial Sequence
  Description of Artificial Sequence: Synthetic oligonucleotide
aagaugaaguugugcauga

SEQ ID NO: 2846349 - RNA, 19 nt, Artificial Sequence
  Description of Artificial Sequence: Synthetic oligonucleotide
aagucucuugaguguuucc

SEQ ID NO: 2846350 - RNA, 19 nt, Artificial Sequence
  Description of Artificial Sequence: Synthetic oligonucleotide
acugacaugauuaacacua

SEQ ID NO: 2846351 - RNA, 19 nt, Artificial Sequence
  Description of Artificial Sequence: Synthetic oligonucleotide
gauacccuugaucaauggc

SEQ ID NO: 2846352 - RNA, 19 nt, Artificial Sequence
  Description of Artificial Sequence: Synthetic oligonucleotide
auagucuuuaucuggugca

SEQ ID NO: 2846353 - RNA, 19 nt, Artificial Sequence
  Description of Artificial Sequence: Synthetic oligonucleotide
acacaggaagcugagauag

SEQ ID NO: 2846354 - RNA, 19 nt, Artificial Sequence
  Description of Artificial Sequence: Synthetic oligonucleotide
ucaccagagacacuccuug

SEQ ID NO: 2846355 - RNA, 19 nt, Artificial Sequence
  Description of Artificial Sequence: Synthetic oligonucleotide
aggaaauagucuuuaucug

SEQ ID NO: 2846356 - RNA, 19 nt, Artificial Sequence
  Description of Artificial Sequence: Synthetic oligonucleotide
augagguuggcauacugug

SEQ ID NO: 2846357 - RNA, 19 nt, Artificial Sequence
  Description of Artificial Sequence: Synthetic oligonucleotide
auuaacacuauuacucuug

SEQ ID NO: 2846358 - RNA, 19 nt, Artificial Sequence
  Description of Artificial Sequence: Synthetic oligonucleotide
uuaucuggugcaaccauaa

SEQ ID NO: 2846359 - RNA, 19 nt, Artificial Sequence
  Description of Artificial Sequence: Synthetic oligonucleotide
acgaugauuccuugcacuc

SEQ ID NO: 2846360 - RNA, 19 nt, Artificial Sequence
  Description of Artificial Sequence: Synthetic oligonucleotide
ucucuugaguguuuccucc

SEQ ID NO: 2846361 - RNA, 19 nt, Artificial Sequence
  Description of Artificial Sequence: Synthetic oligonucleotide
uucuguguucaccacgaug

SEQ ID NO: 2846362 - RNA, 19 nt, Artificial Sequence
  Description of Artificial Sequence: Synthetic oligonucleotide
cucugaagucucuugagug

SEQ ID NO: 2846363 - RNA, 19 nt, Artificial Sequence
  Description of Artificial Sequence: Synthetic oligonucleotide
uggugcaaccauaauuuca

SEQ ID NO: 2846364 - RNA, 19 nt, Artificial Sequence
  Description of Artificial Sequence: Synthetic oligonucleotide
uugggguggacagagauac

SEQ ID NO: 2846365 - RNA, 19 nt, Artificial Sequence
  Description of Artificial Sequence: Synthetic oligonucleotide
ugacuggaucaccagagac

SEQ ID NO: 2846366 - RNA, 19 nt, Artificial Sequence
  Description of Artificial Sequence: Synthetic oligonucleotide
uuaaggaaugacacaggaa

SEQ ID NO: 2846367 - RNA, 19 nt, Artificial Sequence
  Description of Artificial Sequence: Synthetic oligonucleotide
ucugaagucucuugagugu

SEQ ID NO: 2846368 - RNA, 19 nt, Artificial Sequence
  Description of Artificial Sequence: Synthetic oligonucleotide
uuucuuggagcgaauucga

SEQ ID NO: 2846369 - RNA, 19 nt, Artificial Sequence
  Description of Artificial Sequence: Synthetic oligonucleotide
aucacaaucaggaaauagu

SEQ ID NO: 2846370 - RNA, 19 nt, Artificial Sequence
  Description of Artificial Sequence: Synthetic oligonucleotide
uugugcaugagguuggcau

SEQ ID NO: 2846371 - RNA, 19 nt, Artificial Sequence
  Description of Artificial Sequence: Synthetic oligonucleotide
uggaucaccagagacacuc

SEQ ID NO: 2846372 - RNA, 19 nt, Artificial Sequence
  Description of Artificial Sequence: Synthetic oligonucleotide
gucuacaugggcucuuagg

SEQ ID NO: 2846373 - RNA, 19 nt, Artificial Sequence
  Description of Artificial Sequence: Synthetic oligonucleotide
uuguccauggugcucuuga

SEQ ID NO: 2846374 - RNA, 19 nt, Artificial Sequence
  Description of Artificial Sequence: Synthetic oligonucleotide
uugaguguuuccuccaccu

SEQ ID NO: 2846375 - RNA, 19 nt, Artificial Sequence
  Description of Artificial Sequence: Synthetic oligonucleotide
gacagagauacccuugauc

SEQ ID NO: 2846376 - RNA, 19 nt, Artificial Sequence
  Description of Artificial Sequence: Synthetic oligonucleotide
uguaguagugggguugucc

SEQ ID NO: 2846377 - RNA, 19 nt, Artificial Sequence
  Description of Artificial Sequence: Synthetic oligonucleotide
caggaaauagucuuuaucu

SEQ ID NO: 2846378 - RNA, 19 nt, Artificial Sequence
  Description of Artificial Sequence: Synthetic oligonucleotide
auuccuugcacuccuuucu

SEQ ID NO: 2846379 - RNA, 19 nt, Artificial Sequence
  Description of Artificial Sequence: Synthetic oligonucleotide
uaacacuauuacucuuggg

SEQ ID NO: 2846380 - RNA, 19 nt, Artificial Sequence
  Description of Artificial Sequence: Synthetic oligonucleotide
gucuuuaucuggugcaacc

SEQ ID NO: 2846381 - RNA, 19 nt, Artificial Sequence
  Description of Artificial Sequence: Synthetic oligonucleotide
ugcaaccauaauuucauuu

SEQ ID NO: 2846382 - RNA, 19 nt, Artificial Sequence
  Description of Artificial Sequence: Synthetic oligonucleotide
augaaguugugcaugaggu

SEQ ID NO: 2846383 - RNA, 19 nt, Artificial Sequence
  Description of Artificial Sequence: Synthetic oligonucleotide
aaugacacaggaagcugag

SEQ ID NO: 2846384 - RNA, 19 nt, Artificial Sequence
  Description of Artificial Sequence: Synthetic oligonucleotide
aauuucacgcacagugcuc

SEQ ID NO: 2846385 - RNA, 19 nt, Artificial Sequence
  Description of Artificial Sequence: Synthetic oligonucleotide
uccuuguugggguggacag

SEQ ID NO: 2846386 - RNA, 19 nt, Artificial Sequence
  Description of Artificial Sequence: Synthetic oligonucleotide
ugccaucucggaccgaucc

SEQ ID NO: 2846387 - RNA, 19 nt, Artificial Sequence
  Description of Artificial Sequence: Synthetic oligonucleotide
uacaugggcucuuaggcaa

SEQ ID NO: 2846388 - RNA, 19 nt, Artificial Sequence
  Description of Artificial Sequence: Synthetic oligonucleotide
guguucaccacgaugauuc

SEQ ID NO: 2846389 - RNA, 19 nt, Artificial Sequence
  Description of Artificial Sequence: Synthetic oligonucleotide
uuuaucuggugcaaccaua

SEQ ID NO: 2846390 - RNA, 19 nt, Artificial Sequence
  Description of Artificial Sequence: Synthetic oligonucleotide
uguugggguggacagagau

SEQ ID NO: 2846391 - RNA, 19 nt, Artificial Sequence
  Description of Artificial Sequence: Synthetic oligonucleotide
uaguggcuuauucgguugg

SEQ ID NO: 2846392 - RNA, 19 nt, Artificial Sequence
  Description of Artificial Sequence: Synthetic oligonucleotide
uggacagagauacccuuga

SEQ ID NO: 2846393 - RNA, 19 nt, Artificial Sequence
  Description of Artificial Sequence: Synthetic oligonucleotide
uggcauacuguguaguagu

SEQ ID NO: 2846394 - RNA, 19 nt, Artificial Sequence
  Description of Artificial Sequence: Synthetic oligonucleotide
accacgaugauuccuugca

SEQ ID NO: 2846395 - RNA, 19 nt, Artificial Sequence
  Description of Artificial Sequence: Synthetic oligonucleotide
ggaagguuaggucauuuug

SEQ ID NO: 2846396 - RNA, 19 nt, Artificial Sequence
  Description of Artificial Sequence: Synthetic oligonucleotide
uggcauagucuacaugggc

SEQ ID NO: 2846397 - RNA, 19 nt, Artificial Sequence
  Description of Artificial Sequence: Synthetic oligonucleotide
gaccuuaaauuaaggaaug

SEQ ID NO: 2846398 - RNA, 19 nt, Artificial Sequence
  Description of Artificial Sequence: Synthetic oligonucleotide
gacaugauuaacacuauua

SEQ ID NO: 2846399 - RNA, 19 nt, Artificial Sequence
  Description of Artificial Sequence: Synthetic oligonucleotide
agguuaggucauuuugggg

SEQ ID NO: 2846400 - RNA, 19 nt, Artificial Sequence
  Description of Artificial Sequence: Synthetic oligonucleotide
aaguugugcaugagguugg

SEQ ID NO: 2846401 - RNA, 19 nt, Artificial Sequence
  Description of Artificial Sequence: Synthetic oligonucleotide
ucaagaugaaguugugcau

SEQ ID NO: 2846402 - RNA, 19 nt, Artificial Sequence
  Description of Artificial Sequence: Synthetic oligonucleotide
auaguggcuuauucgguug

SEQ ID NO: 2846403 - RNA, 19 nt, Artificial Sequence
  Description of Artificial Sequence: Synthetic oligonucleotide
auucugaaucacaaucagg

SEQ ID NO: 2846404 - RNA, 19 nt, Artificial Sequence
  Description of Artificial Sequence: Synthetic oligonucleotide
caagaugaaguugugcaug

SEQ ID NO: 2846405 - RNA, 19 nt, Artificial Sequence
  Description of Artificial Sequence: Synthetic oligonucleotide
agauacccuugaucaaugg

SEQ ID NO: 2846406 - RNA, 19 nt, Artificial Sequence
  Description of Artificial Sequence: Synthetic oligonucleotide
uuggcauacuguguaguag

SEQ ID NO: 2846407 - RNA, 19 nt, Artificial Sequence
  Description of Artificial Sequence: Synthetic oligonucleotide
aucuggugcaaccauaauu

SEQ ID NO: 2846408 - RNA, 19 nt, Artificial Sequence
  Description of Artificial Sequence: Synthetic oligonucleotide
uauucgguuggauucugaa

SEQ ID NO: 2846409 - RNA, 19 nt, Artificial Sequence
  Description of Artificial Sequence: Synthetic oligonucleotide
caggaagcugagauagugg

SEQ ID NO: 2846410 - RNA, 19 nt, Artificial Sequence
  Description of Artificial Sequence: Synthetic oligonucleotide
cuuguugggguggacagag

SEQ ID NO: 2846411 - RNA, 19 nt, Artificial Sequence
  Description of Artificial Sequence: Synthetic oligonucleotide
agcuccgaggcgccgacgc

SEQ ID NO: 2846412 - RNA, 19 nt, Artificial Sequence
  Description of Artificial Sequence: Synthetic oligonucleotide
uucgaaggaagguuagguc

SEQ ID NO: 2846413 - RNA, 19 nt, Artificial Sequence
  Description of Artificial Sequence: Synthetic oligonucleotide
uacuguguaguaguggggu

SEQ ID NO: 2846414 - RNA, 19 nt, Artificial Sequence
  Description of Artificial Sequence: Synthetic oligonucleotide
ucuuuaucuggugcaacca

SEQ ID NO: 2846415 - RNA, 19 nt, Artificial Sequence
  Description of Artificial Sequence: Synthetic oligonucleotide
uucaccacgaugauuccuu

SEQ ID NO: 2846416 - RNA, 19 nt, Artificial Sequence
  Description of Artificial Sequence: Synthetic oligonucleotide
augggaaugccuucugugu

SEQ ID NO: 2846417 - RNA, 19 nt, Artificial Sequence
  Description of Artificial Sequence: Synthetic oligonucleotide
gaauucgaaggaagguuag

SEQ ID NO: 2846418 - RNA, 19 nt, Artificial Sequence
  Description of Artificial Sequence: Synthetic oligonucleotide
ucucggaccgauccagcag

SEQ ID NO: 2846419 - RNA, 19 nt, Artificial Sequence
  Description of Artificial Sequence: Synthetic oligonucleotide
cucuuaggcaaccaccaug

SEQ ID NO: 2846420 - RNA, 19 nt, Artificial Sequence
  Description of Artificial Sequence: Synthetic oligonucleotide
acaggaagcugagauagug

SEQ ID NO: 2846421 - RNA, 19 nt, Artificial Sequence
  Description of Artificial Sequence: Synthetic oligonucleotide
gagcgaauucgaaggaagg

SEQ ID NO: 2846422 - RNA, 19 nt, Artificial Sequence
  Description of Artificial Sequence: Synthetic oligonucleotide
guaguagugggguugucca

SEQ ID NO: 2846423 - RNA, 19 nt, Artificial Sequence
  Description of Artificial Sequence: Synthetic oligonucleotide
cuugaucaauggcauaguc

SEQ ID NO: 2846424 - RNA, 19 nt, Artificial Sequence
  Description of Artificial Sequence: Synthetic oligonucleotide
ugagguuggcauacugugu

SEQ ID NO: 2846425 - RNA, 19 nt, Artificial Sequence
  Description of Artificial Sequence: Synthetic oligonucleotide
uccuugcacuccuuucugg

SEQ ID NO: 2846426 - RNA, 19 nt, Artificial Sequence
  Description of Artificial Sequence: Synthetic oligonucleotide
aggaaugacacaggaagcu

SEQ ID NO: 2846427 - RNA, 19 nt, Artificial Sequence
  Description of Artificial Sequence: Synthetic oligonucleotide
aaucaggaaauagucuuua

SEQ ID NO: 2846428 - RNA, 19 nt, Artificial Sequence
  Description of Artificial Sequence: Synthetic oligonucleotide
gauuccuugcacuccuuuc

SEQ ID NO: 2846429 - RNA, 19 nt, Artificial Sequence
  Description of Artificial Sequence: Synthetic oligonucleotide
guagugggguuguccaugg

SEQ ID NO: 2846430 - RNA, 19 nt, Artificial Sequence
  Description of Artificial Sequence: Synthetic oligonucleotide
acgcacagugcuccgugcc

SEQ ID NO: 2846431 - RNA, 19 nt, Artificial Sequence
  Description of Artificial Sequence: Synthetic oligonucleotide
ucgguuggauucugaauca

SEQ ID NO: 2846432 - RNA, 19 nt, Artificial Sequence
  Description of Artificial Sequence: Synthetic oligonucleotide
gagacacuccuuguugggg

SEQ ID NO: 2846433 - RNA, 19 nt, Artificial Sequence
  Description of Artificial Sequence: Synthetic oligonucleotide
ucuugaguguuuccuccac

SEQ ID NO: 2846434 - RNA, 19 nt, Artificial Sequence
  Description of Artificial Sequence: Synthetic oligonucleotide
gggaccuuaaauuaaggaa

SEQ ID NO: 2846435 - RNA, 19 nt, Artificial Sequence
  Description of Artificial Sequence: Synthetic oligonucleotide
uggcucugaagucucuuga

SEQ ID NO: 2846436 - RNA, 19 nt, Artificial Sequence
  Description of Artificial Sequence: Synthetic oligonucleotide
cugagauaguggcuuauuc

SEQ ID NO: 2846437 - RNA, 19 nt, Artificial Sequence
  Description of Artificial Sequence: Synthetic oligonucleotide
gaaugacacaggaagcuga

SEQ ID NO: 2846438 - RNA, 19 nt, Artificial Sequence
  Description of Artificial Sequence: Synthetic oligonucleotide
uacccuugaucaauggcau

SEQ ID NO: 2846439 - RNA, 19 nt, Artificial Sequence
  Description of Artificial Sequence: Synthetic oligonucleotide
cuccgugccuucaagauga

SEQ ID NO: 2846440 - RNA, 19 nt, Artificial Sequence
  Description of Artificial Sequence: Synthetic oligonucleotide
uuccuugcacuccuuucug

SEQ ID NO: 2846441 - RNA, 19 nt, Artificial Sequence
  Description of Artificial Sequence: Synthetic oligonucleotide
cucggaccgauccagcagc

SEQ ID NO: 2846442 - RNA, 19 nt, Artificial Sequence
  Description of Artificial Sequence: Synthetic oligonucleotide
ggcuuauucgguuggauuc

SEQ ID NO: 2846443 - RNA, 19 nt, Artificial Sequence
  Description of Artificial Sequence: Synthetic oligonucleotide
agucuuuaucuggugcaac

SEQ ID NO: 2846444 - RNA, 19 nt, Artificial Sequence
  Description of Artificial Sequence: Synthetic oligonucleotide
caugauuaacacuauuacu

SEQ ID NO: 2846445 - RNA, 19 nt, Artificial Sequence
  Description of Artificial Sequence: Synthetic oligonucleotide
uuggagcgaauucgaagga

SEQ ID NO: 2846446 - RNA, 19 nt, Artificial Sequence
  Description of Artificial Sequence: Synthetic oligonucleotide
agacacuccuuguuggggu

SEQ ID NO: 2846447 - RNA, 19 nt, Artificial Sequence
  Description of Artificial Sequence: Synthetic oligonucleotide
uccagcagcuccgaggcgc

SEQ ID NO: 2846448 - RNA, 19 nt, Artificial Sequence
  Description of Artificial Sequence: Synthetic oligonucleotide
uugcacuccuuucuggcuc

SEQ ID NO: 2846449 - RNA, 19 nt, Artificial Sequence
  Description of Artificial Sequence: Synthetic oligonucleotide
agagauacccuugaucaau

SEQ ID NO: 2846450 - RNA, 19 nt, Artificial Sequence
  Description of Artificial Sequence: Synthetic oligonucleotide
uuauucgguuggauucuga

SEQ ID NO: 2846451 - RNA, 19 nt, Artificial Sequence
  Description of Artificial Sequence: Synthetic oligonucleotide
gaaauagucuuuaucuggu

SEQ ID NO: 2846452 - RNA, 19 nt, Artificial Sequence
  Description of Artificial Sequence: Synthetic oligonucleotide
ucaauggcauagucuacau

SEQ ID NO: 2846453 - RNA, 19 nt, Artificial Sequence
  Description of Artificial Sequence: Synthetic oligonucleotide
ugacaugauuaacacuauu

SEQ ID NO: 2846454 - RNA, 19 nt, Artificial Sequence
  Description of Artificial Sequence: Synthetic oligonucleotide
agucucuugaguguuuccu

SEQ ID NO: 2846455 - RNA, 19 nt, Artificial Sequence
  Description of Artificial Sequence: Synthetic oligonucleotide
ucacgcacagugcuccgug

SEQ ID NO: 2846456 - RNA, 19 nt, Artificial Sequence
  Description of Artificial Sequence: Synthetic oligonucleotide
gagguuggcauacugugua

SEQ ID NO: 2846457 - RNA, 19 nt, Artificial Sequence
  Description of Artificial Sequence: Synthetic oligonucleotide
gaugauuccuugcacuccu

SEQ ID NO: 2846458 - RNA, 19 nt, Artificial Sequence
  Description of Artificial Sequence: Synthetic oligonucleotide
auucgguuggauucugaau

SEQ ID NO: 2846459 - RNA, 19 nt, Artificial Sequence
  Description of Artificial Sequence: Synthetic oligonucleotide
aguagugggguuguccaug

SEQ ID NO: 2846460 - RNA, 19 nt, Artificial Sequence
  Description of Artificial Sequence: Synthetic oligonucleotide
gacuggaucaccagagaca

SEQ ID NO: 2846461 - RNA, 19 nt, Artificial Sequence
  Description of Artificial Sequence: Synthetic oligonucleotide
uuucacgcacagugcuccg

SEQ ID NO: 2846462 - RNA, 19 nt, Artificial Sequence
  Description of Artificial Sequence: Synthetic oligonucleotide
ugugcaugagguuggcaua

SEQ ID NO: 2846463 - RNA, 19 nt, Artificial Sequence
  Description of Artificial Sequence: Synthetic oligonucleotide
uuggauucugaaucacaau

SEQ ID NO: 2846464 - RNA, 19 nt, Artificial Sequence
  Description of Artificial Sequence: Synthetic oligonucleotide
gagauacccuugaucaaug

SEQ ID NO: 2846465 - RNA, 19 nt, Artificial Sequence
  Description of Artificial Sequence: Synthetic oligonucleotide
uuucuggcucugaagucuc

SEQ ID NO: 2846466 - RNA, 19 nt, Artificial Sequence
  Description of Artificial Sequence: Synthetic oligonucleotide
agugcuccgugccuucaag

SEQ ID NO: 2846467 - RNA, 19 nt, Artificial Sequence
  Description of Artificial Sequence: Synthetic oligonucleotide
ugaaguugugcaugagguu

SEQ ID NO: 2846468 - RNA, 19 nt, Artificial Sequence
  Description of Artificial Sequence: Synthetic oligonucleotide
ccuuaaauuaaggaaugac

SEQ ID NO: 2846469 - RNA, 19 nt, Artificial Sequence
  Description of Artificial Sequence: Synthetic oligonucleotide
ugggaaugccuucuguguu

SEQ ID NO: 2846470 - RNA, 19 nt, Artificial Sequence
  Description of Artificial Sequence: Synthetic oligonucleotide
ugggcucuuaggcaaccac

SEQ ID NO: 2846471 - RNA, 19 nt, Artificial Sequence
  Description of Artificial Sequence: Synthetic oligonucleotide
ugccuucaagaugaaguug

SEQ ID NO: 2846472 - RNA, 19 nt, Artificial Sequence
  Description of Artificial Sequence: Synthetic oligonucleotide
gaguguuuccuccaccucu

SEQ ID NO: 2846473 - RNA, 19 nt, Artificial Sequence
  Description of Artificial Sequence: Synthetic oligonucleotide
ggaccgauccagcagcucc

SEQ ID NO: 2846474 - RNA, 19 nt, Artificial Sequence
  Description of Artificial Sequence: Synthetic oligonucleotide
agcgaauucgaaggaaggu

SEQ ID NO: 2846475 - RNA, 19 nt, Artificial Sequence
  Description of Artificial Sequence: Synthetic oligonucleotide
aguugugcaugagguuggc

SEQ ID NO: 2846476 - RNA, 19 nt, Artificial Sequence
  Description of Artificial Sequence: Synthetic oligonucleotide
uguucaccacgaugauucc

SEQ ID NO: 2846477 - RNA, 19 nt, Artificial Sequence
  Description of Artificial Sequence: Synthetic oligonucleotide
auacuguguaguagugggg

SEQ ID NO: 2846478 - RNA, 19 nt, Artificial Sequence
  Description of Artificial Sequence: Synthetic oligonucleotide
gacacuccuuguuggggug

SEQ ID NO: 2846479 - RNA, 19 nt, Artificial Sequence
  Description of Artificial Sequence: Synthetic oligonucleotide
cuccuuucuggcucugaag

SEQ ID NO: 2846480 - RNA, 19 nt, Artificial Sequence
  Description of Artificial Sequence: Synthetic oligonucleotide
guccauggugcucuugaug

SEQ ID NO: 2846481 - RNA, 19 nt, Artificial Sequence
  Description of Artificial Sequence: Synthetic oligonucleotide
ugaguguuuccuccaccuc

SEQ ID NO: 2846482 - RNA, 19 nt, Artificial Sequence
  Description of Artificial Sequence: Synthetic oligonucleotide
uucuuggagcgaauucgaa

SEQ ID NO: 2846483 - RNA, 19 nt, Artificial Sequence
  Description of Artificial Sequence: Synthetic oligonucleotide
agguuggcauacuguguag

SEQ ID NO: 2846484 - RNA, 19 nt, Artificial Sequence
  Description of Artificial Sequence: Synthetic oligonucleotide
ggagcgaauucgaaggaag

SEQ ID NO: 2846485 - RNA, 19 nt, Artificial Sequence
  Description of Artificial Sequence: Synthetic oligonucleotide
ugcuccgugccuucaagau

SEQ ID NO: 2846486 - RNA, 19 nt, Artificial Sequence
  Description of Artificial Sequence: Synthetic oligonucleotide
uggcuuauucgguuggauu

SEQ ID NO: 2846487 - RNA, 19 nt, Artificial Sequence
  Description of Artificial Sequence: Synthetic oligonucleotide
gaagucucuugaguguuuc

SEQ ID NO: 2846488 - RNA, 19 nt, Artificial Sequence
  Description of Artificial Sequence: Synthetic oligonucleotide
cuguguaguagugggguug

SEQ ID NO: 2846489 - RNA, 19 nt, Artificial Sequence
  Description of Artificial Sequence: Synthetic oligonucleotide
gggucaauuucacgcacag

SEQ ID NO: 2846490 - RNA, 19 nt, Artificial Sequence
  Description of Artificial Sequence: Synthetic oligonucleotide
agucuacaugggcucuuag

SEQ ID NO: 2846491 - RNA, 19 nt, Artificial Sequence
  Description of Artificial Sequence: Synthetic oligonucleotide
cuacaugggcucuuaggca

SEQ ID NO: 2846492 - RNA, 19 nt, Artificial Sequence
  Description of Artificial Sequence: Synthetic oligonucleotide
gaccgauccagcagcuccg

SEQ ID NO: 2846493 - RNA, 19 nt, Artificial Sequence
  Description of Artificial Sequence: Synthetic oligonucleotide
accaccaugugcccacuga

SEQ ID NO: 2846494 - RNA, 19 nt, Artificial Sequence
  Description of Artificial Sequence: Synthetic oligonucleotide
aucaggaaauagucuuuau

SEQ ID NO: 2846495 - RNA, 19 nt, Artificial Sequence
  Description of Artificial Sequence: Synthetic oligonucleotide
aucucggaccgauccagca

SEQ ID NO: 2846496 - RNA, 19 nt, Artificial Sequence
  Description of Artificial Sequence: Synthetic oligonucleotide
caauggcauagucuacaug

SEQ ID NO: 2846497 - RNA, 19 nt, Artificial Sequence
  Description of Artificial Sequence: Synthetic oligonucleotide
cuggcucugaagucucuug

SEQ ID NO: 2846498 - RNA, 19 nt, Artificial Sequence
  Description of Artificial Sequence: Synthetic oligonucleotide
ugcucuugaugggaaugcc

SEQ ID NO: 2846499 - RNA, 19 nt, Artificial Sequence
  Description of Artificial Sequence: Synthetic oligonucleotide
accuuaaauuaaggaauga

SEQ ID NO: 2846500 - RNA, 19 nt, Artificial Sequence
  Description of Artificial Sequence: Synthetic oligonucleotide
gucucuugaguguuuccuc

SEQ ID NO: 2846501 - RNA, 19 nt, Artificial Sequence
  Description of Artificial Sequence: Synthetic oligonucleotide
acuccuuucuggcucugaa

SEQ ID NO: 2846502 - RNA, 19 nt, Artificial Sequence
  Description of Artificial Sequence: Synthetic oligonucleotide
gauaguggcuuauucgguu

SEQ ID NO: 2846503 - RNA, 19 nt, Artificial Sequence
  Description of Artificial Sequence: Synthetic oligonucleotide
aggcaaccaccaugugccc

SEQ ID NO: 2846504 - RNA, 19 nt, Artificial Sequence
  Description of Artificial Sequence: Synthetic oligonucleotide
aguguuuccuccaccucug

SEQ ID NO: 2846505 - RNA, 19 nt, Artificial Sequence
  Description of Artificial Sequence: Synthetic oligonucleotide
gaucaauggcauagucuac

SEQ ID NO: 2846506 - RNA, 19 nt, Artificial Sequence
  Description of Artificial Sequence: Synthetic oligonucleotide
gacacaggaagcugagaua

SEQ ID NO: 2846507 - RNA, 19 nt, Artificial Sequence
  Description of Artificial Sequence: Synthetic oligonucleotide
ggggaccuuaaauuaagga

SEQ ID NO: 2846508 - RNA, 19 nt, Artificial Sequence
  Description of Artificial Sequence: Synthetic oligonucleotide
gauuaacacuauuacucuu

SEQ ID NO: 2846509 - RNA, 19 nt, Artificial Sequence
  Description of Artificial Sequence: Synthetic oligonucleotide
gggguggacagagauaccc

SEQ ID NO: 2846510 - RNA, 19 nt, Artificial Sequence
  Description of Artificial Sequence: Synthetic oligonucleotide
cccacugacaugauuaaca

SEQ ID NO: 2846511 - RNA, 19 nt, Artificial Sequence
  Description of Artificial Sequence: Synthetic oligonucleotide
caccacgaugauuccuugc

SEQ ID NO: 2846512 - RNA, 19 nt, Artificial Sequence
  Description of Artificial Sequence: Synthetic oligonucleotide
uagucuuuaucuggugcaa

SEQ ID NO: 2846513 - RNA, 19 nt, Artificial Sequence
  Description of Artificial Sequence: Synthetic oligonucleotide
gaagcugagauaguggcuu

SEQ ID NO: 2846514 - RNA, 19 nt, Artificial Sequence
  Description of Artificial Sequence: Synthetic oligonucleotide
aaggaagguuaggucauuu

SEQ ID NO: 2846515 - RNA, 19 nt, Artificial Sequence
  Description of Artificial Sequence: Synthetic oligonucleotide
ugaagucucuugaguguuu

SEQ ID NO: 2846516 - RNA, 19 nt, Artificial Sequence
  Description of Artificial Sequence: Synthetic oligonucleotide
ccacugacaugauuaacac

SEQ ID NO: 2846517 - RNA, 19 nt, Artificial Sequence
  Description of Artificial Sequence: Synthetic oligonucleotide
aaccaccaugugcccacug

SEQ ID NO: 2846518 - RNA, 19 nt, Artificial Sequence
  Description of Artificial Sequence: Synthetic oligonucleotide
ggcgccgacgcucagcgag

SEQ ID NO: 2846519 - RNA, 19 nt, Artificial Sequence
  Description of Artificial Sequence: Synthetic oligonucleotide
aggaagguuaggucauuuu

SEQ ID NO: 2846520 - RNA, 19 nt, Artificial Sequence
  Description of Artificial Sequence: Synthetic oligonucleotide
uaucuggugcaaccauaau

SEQ ID NO: 2846521 - RNA, 19 nt, Artificial Sequence
  Description of Artificial Sequence: Synthetic oligonucleotide
ggcucugaagucucuugag

SEQ ID NO: 2846522 - RNA, 19 nt, Artificial Sequence
  Description of Artificial Sequence: Synthetic oligonucleotide
gcauacuguguaguagugg

SEQ ID NO: 2846523 - RNA, 19 nt, Artificial Sequence
  Description of Artificial Sequence: Synthetic oligonucleotide
guuggcauacuguguagua

SEQ ID NO: 2846524 - RNA, 19 nt, Artificial Sequence
  Description of Artificial Sequence: Synthetic oligonucleotide
agauaguggcuuauucggu

SEQ ID NO: 2846525 - RNA, 19 nt, Artificial Sequence
  Description of Artificial Sequence: Synthetic oligonucleotide
cuggugcaaccauaauuuc

SEQ ID NO: 2846526 - RNA, 19 nt, Artificial Sequence
  Description of Artificial Sequence: Synthetic oligonucleotide
gugcucuugaugggaaugc

SEQ ID NO: 2846527 - RNA, 19 nt, Artificial Sequence
  Description of Artificial Sequence: Synthetic oligonucleotide
cccuugaucaauggcauag

SEQ ID NO: 2846528 - RNA, 19 nt, Artificial Sequence
  Description of Artificial Sequence: Synthetic oligonucleotide
agaugaaguugugcaugag

SEQ ID NO: 2846529 - RNA, 19 nt, Artificial Sequence
  Description of Artificial Sequence: Synthetic oligonucleotide
gccuucuguguucaccacg

SEQ ID NO: 2846530 - RNA, 19 nt, Artificial Sequence
  Description of Artificial Sequence: Synthetic oligonucleotide
cacaaucaggaaauagucu

SEQ ID NO: 2846531 - RNA, 19 nt, Artificial Sequence
  Description of Artificial Sequence: Synthetic oligonucleotide
ugugcccacugacaugauu

SEQ ID NO: 2846532 - RNA, 19 nt, Artificial Sequence
  Description of Artificial Sequence: Synthetic oligonucleotide
ggaaugacacaggaagcug

SEQ ID NO: 2846533 - RNA, 19 nt, Artificial Sequence
  Description of Artificial Sequence: Synthetic oligonucleotide
guggacagagauacccuug

SEQ ID NO: 2846534 - RNA, 19 nt, Artificial Sequence
  Description of Artificial Sequence: Synthetic oligonucleotide
uggagcgaauucgaaggaa

SEQ ID NO: 2846535 - RNA, 19 nt, Artificial Sequence
  Description of Artificial Sequence: Synthetic oligonucleotide
cuuauucgguuggauucug

SEQ ID NO: 2846536 - RNA, 19 nt, Artificial Sequence
  Description of Artificial Sequence: Synthetic oligonucleotide
caucucggaccgauccagc

SEQ ID NO: 2846537 - RNA, 19 nt, Artificial Sequence
  Description of Artificial Sequence: Synthetic oligonucleotide
ugcccacugacaugauuaa

SEQ ID NO: 2846538 - RNA, 19 nt, Artificial Sequence
  Description of Artificial Sequence: Synthetic oligonucleotide
gcauagucuacaugggcuc

SEQ ID NO: 2846539 - RNA, 19 nt, Artificial Sequence
  Description of Artificial Sequence: Synthetic oligonucleotide
ccuugcacuccuuucuggc

SEQ ID NO: 2846540 - RNA, 19 nt, Artificial Sequence
  Description of Artificial Sequence: Synthetic oligonucleotide
uguguucaccacgaugauu

SEQ ID NO: 2846541 - RNA, 19 nt, Artificial Sequence
  Description of Artificial Sequence: Synthetic oligonucleotide
aagcugagauaguggcuua

SEQ ID NO: 2846542 - RNA, 19 nt, Artificial Sequence
  Description of Artificial Sequence: Synthetic oligonucleotide
ggaccuuaaauuaaggaau

SEQ ID NO: 2846543 - RNA, 19 nt, Artificial Sequence
  Description of Artificial Sequence: Synthetic oligonucleotide
ccagagacacuccuuguug

SEQ ID NO: 2846544 - RNA, 19 nt, Artificial Sequence
  Description of Artificial Sequence: Synthetic oligonucleotide
ugggguuguccauggugcu

SEQ ID NO: 2846545 - RNA, 19 nt, Artificial Sequence
  Description of Artificial Sequence: Synthetic oligonucleotide
caugagguuggcauacugu

SEQ ID NO: 2846546 - RNA, 19 nt, Artificial Sequence
  Description of Artificial Sequence: Synthetic oligonucleotide
acuguguaguagugggguu

SEQ ID NO: 2846547 - RNA, 19 nt, Artificial Sequence
  Description of Artificial Sequence: Synthetic oligonucleotide
acacuccuuguuggggugg

SEQ ID NO: 2846548 - RNA, 19 nt, Artificial Sequence
  Description of Artificial Sequence: Synthetic oligonucleotide
uccgaggcgccgacgcuca

SEQ ID NO: 2846549 - RNA, 19 nt, Artificial Sequence
  Description of Artificial Sequence: Synthetic oligonucleotide
uguccauggugcucuugau

SEQ ID NO: 2846550 - RNA, 19 nt, Artificial Sequence
  Description of Artificial Sequence: Synthetic oligonucleotide
gugcaugagguuggcauac

SEQ ID NO: 2846551 - RNA, 19 nt, Artificial Sequence
  Description of Artificial Sequence: Synthetic oligonucleotide
gugcccacugacaugauua

SEQ ID NO: 2846552 - RNA, 19 nt, Artificial Sequence
  Description of Artificial Sequence: Synthetic oligonucleotide
ggugcucuugaugggaaug

SEQ ID NO: 2846553 - RNA, 19 nt, Artificial Sequence
  Description of Artificial Sequence: Synthetic oligonucleotide
uaguagugggguuguccau

SEQ ID NO: 2846554 - RNA, 19 nt, Artificial Sequence
  Description of Artificial Sequence: Synthetic oligonucleotide
cacgaugauuccuugcacu

SEQ ID NO: 2846555 - RNA, 19 nt, Artificial Sequence
  Description of Artificial Sequence: Synthetic oligonucleotide
acaugggcucuuaggcaac

SEQ ID NO: 2846556 - RNA, 19 nt, Artificial Sequence
  Description of Artificial Sequence: Synthetic oligonucleotide
cucuugaguguuuccucca

SEQ ID NO: 2846557 - RNA, 19 nt, Artificial Sequence
  Description of Artificial Sequence: Synthetic oligonucleotide
cacgcacagugcuccgugc

SEQ ID NO: 2846558 - RNA, 19 nt, Artificial Sequence
  Description of Artificial Sequence: Synthetic oligonucleotide
cuuaggcaaccaccaugug

SEQ ID NO: 2846559 - RNA, 19 nt, Artificial Sequence
  Description of Artificial Sequence: Synthetic oligonucleotide
gcaaccauaauuucauuuu

SEQ ID NO: 2846560 - RNA, 19 nt, Artificial Sequence
  Description of Artificial Sequence: Synthetic oligonucleotide
gcaaccaccaugugcccac

SEQ ID NO: 2846561 - RNA, 19 nt, Artificial Sequence
  Description of Artificial Sequence: Synthetic oligonucleotide
cuuucuggcucugaagucu

SEQ ID NO: 2846562 - RNA, 19 nt, Artificial Sequence
  Description of Artificial Sequence: Synthetic oligonucleotide
ugggguggacagagauacc

SEQ ID NO: 2846563 - RNA, 19 nt, Artificial Sequence
  Description of Artificial Sequence: Synthetic oligonucleotide
cauggugcucuugauggga

SEQ ID NO: 2846564 - RNA, 19 nt, Artificial Sequence
  Description of Artificial Sequence: Synthetic oligonucleotide
gcaugagguuggcauacug

SEQ ID NO: 2846565 - RNA, 19 nt, Artificial Sequence
  Description of Artificial Sequence: Synthetic oligonucleotide
uuguugggguggacagaga

SEQ ID NO: 2846566 - RNA, 19 nt, Artificial Sequence
  Description of Artificial Sequence: Synthetic oligonucleotide
ucggaccgauccagcagcu

SEQ ID NO: 2846567 - RNA, 19 nt, Artificial Sequence
  Description of Artificial Sequence: Synthetic oligonucleotide
caugggcucuuaggcaacc

SEQ ID NO: 2846568 - RNA, 19 nt, Artificial Sequence
  Description of Artificial Sequence: Synthetic oligonucleotide
gggaaugccuucuguguuc

SEQ ID NO: 2846569 - RNA, 19 nt, Artificial Sequence
  Description of Artificial Sequence: Synthetic oligonucleotide
caccucugccaucucggac

SEQ ID NO: 2846570 - RNA, 19 nt, Artificial Sequence
  Description of Artificial Sequence: Synthetic oligonucleotide
caccaugugcccacugaca

SEQ ID NO: 2846571 - RNA, 19 nt, Artificial Sequence
  Description of Artificial Sequence: Synthetic oligonucleotide
uucacgcacagugcuccgu

SEQ ID NO: 2846572 - RNA, 19 nt, Artificial Sequence
  Description of Artificial Sequence: Synthetic oligonucleotide
auccagcagcuccgaggcg

SEQ ID NO: 2846573 - RNA, 19 nt, Artificial Sequence
  Description of Artificial Sequence: Synthetic oligonucleotide
aguggcuuauucgguugga

SEQ ID NO: 2846574 - RNA, 19 nt, Artificial Sequence
  Description of Artificial Sequence: Synthetic oligonucleotide
gggcucuuaggcaaccacc

SEQ ID NO: 2846575 - RNA, 19 nt, Artificial Sequence
  Description of Artificial Sequence: Synthetic oligonucleotide
ccuucuguguucaccacga

SEQ ID NO: 2846576 - RNA, 19 nt, Artificial Sequence
  Description of Artificial Sequence: Synthetic oligonucleotide
ggcucuuaggcaaccacca

SEQ ID NO: 2846577 - RNA, 19 nt, Artificial Sequence
  Description of Artificial Sequence: Synthetic oligonucleotide
ggugcaaccauaauuucau

SEQ ID NO: 2846578 - RNA, 19 nt, Artificial Sequence
  Description of Artificial Sequence: Synthetic oligonucleotide
cugacuggaucaccagaga

SEQ ID NO: 2846579 - RNA, 19 nt, Artificial Sequence
  Description of Artificial Sequence: Synthetic oligonucleotide
gcuccgugccuucaagaug

SEQ ID NO: 2846580 - RNA, 19 nt, Artificial Sequence
  Description of Artificial Sequence: Synthetic oligonucleotide
uggugcucuugaugggaau

SEQ ID NO: 2846581 - RNA, 19 nt, Artificial Sequence
  Description of Artificial Sequence: Synthetic oligonucleotide
cuugaugggaaugccuucu

SEQ ID NO: 2846582 - RNA, 19 nt, Artificial Sequence
  Description of Artificial Sequence: Synthetic oligonucleotide
ccgacgcucagcgaguucc

SEQ ID NO: 2846583 - RNA, 19 nt, Artificial Sequence
  Description of Artificial Sequence: Synthetic oligonucleotide
ggcauagucuacaugggcu

SEQ ID NO: 2846584 - RNA, 19 nt, Artificial Sequence
  Description of Artificial Sequence: Synthetic oligonucleotide
guguuuccuccaccucugc

SEQ ID NO: 2846585 - RNA, 19 nt, Artificial Sequence
  Description of Artificial Sequence: Synthetic oligonucleotide
cagagauacccuugaucaa

SEQ ID NO: 2846586 - RNA, 19 nt, Artificial Sequence
  Description of Artificial Sequence: Synthetic oligonucleotide
cuuuaucuggugcaaccau

SEQ ID NO: 2846587 - RNA, 19 nt, Artificial Sequence
  Description of Artificial Sequence: Synthetic oligonucleotide
ggcauacuguguaguagug

SEQ ID NO: 2846588 - RNA, 19 nt, Artificial Sequence
  Description of Artificial Sequence: Synthetic oligonucleotide
gaaugccuucuguguucac

SEQ ID NO: 2846589 - RNA, 19 nt, Artificial Sequence
  Description of Artificial Sequence: Synthetic oligonucleotide
cgugccuucaagaugaagu

SEQ ID NO: 2846590 - RNA, 19 nt, Artificial Sequence
  Description of Artificial Sequence: Synthetic oligonucleotide
ugcaugagguuggcauacu

SEQ ID NO: 2846591 - RNA, 19 nt, Artificial Sequence
  Description of Artificial Sequence: Synthetic oligonucleotide
augacacaggaagcugaga

SEQ ID NO: 2846592 - RNA, 19 nt, Artificial Sequence
  Description of Artificial Sequence: Synthetic oligonucleotide
uagucuacaugggcucuua

SEQ ID NO: 2846593 - RNA, 19 nt, Artificial Sequence
  Description of Artificial Sequence: Synthetic oligonucleotide
acuccuuguugggguggac

SEQ ID NO: 2846594 - RNA, 19 nt, Artificial Sequence
  Description of Artificial Sequence: Synthetic oligonucleotide
gugccuucaagaugaaguu

SEQ ID NO: 2846595 - RNA, 19 nt, Artificial Sequence
  Description of Artificial Sequence: Synthetic oligonucleotide
gugcuccgugccuucaaga

SEQ ID NO: 2846596 - RNA, 19 nt, Artificial Sequence
  Description of Artificial Sequence: Synthetic oligonucleotide
uagugggguuguccauggu

SEQ ID NO: 2846597 - RNA, 19 nt, Artificial Sequence
  Description of Artificial Sequence: Synthetic oligonucleotide
cuugcacuccuuucuggcu

SEQ ID NO: 2846598 - RNA, 19 nt, Artificial Sequence
  Description of Artificial Sequence: Synthetic oligonucleotide
auagucuacaugggcucuu

SEQ ID NO: 2846599 - RNA, 19 nt, Artificial Sequence
  Description of Artificial Sequence: Synthetic oligonucleotide
ccauggugcucuugauggg

SEQ ID NO: 2846600 - RNA, 19 nt, Artificial Sequence
  Description of Artificial Sequence: Synthetic oligonucleotide
cuccuuguugggguggaca

SEQ ID NO: 2846601 - RNA, 19 nt, Artificial Sequence
  Description of Artificial Sequence: Synthetic oligonucleotide
gccuucaagaugaaguugu

SEQ ID NO: 2846602 - RNA, 19 nt, Artificial Sequence
  Description of Artificial Sequence: Synthetic oligonucleotide
caaucaggaaauagucuuu

SEQ ID NO: 2846603 - RNA, 19 nt, Artificial Sequence
  Description of Artificial Sequence: Synthetic oligonucleotide
aucaccagagacacuccuu

SEQ ID NO: 2846604 - RNA, 19 nt, Artificial Sequence
  Description of Artificial Sequence: Synthetic oligonucleotide
ccuuucuggcucugaaguc

SEQ ID NO: 2846605 - RNA, 19 nt, Artificial Sequence
  Description of Artificial Sequence: Synthetic oligonucleotide
cacugacaugauuaacacu

SEQ ID NO: 2846606 - RNA, 19 nt, Artificial Sequence
  Description of Artificial Sequence: Synthetic oligonucleotide
ccaccaugugcccacugac

SEQ ID NO: 2846607 - RNA, 19 nt, Artificial Sequence
  Description of Artificial Sequence: Synthetic oligonucleotide
ccaucucggaccgauccag

SEQ ID NO: 2846608 - RNA, 19 nt, Artificial Sequence
  Description of Artificial Sequence: Synthetic oligonucleotide
agcugagauaguggcuuau

SEQ ID NO: 2846609 - RNA, 19 nt, Artificial Sequence
  Description of Artificial Sequence: Synthetic oligonucleotide
ggaaugccuucuguguuca

SEQ ID NO: 2846610 - RNA, 19 nt, Artificial Sequence
  Description of Artificial Sequence: Synthetic oligonucleotide
acccuugaucaauggcaua

SEQ ID NO: 2846611 - RNA, 19 nt, Artificial Sequence
  Description of Artificial Sequence: Synthetic oligonucleotide
ccucugccaucucggaccg

SEQ ID NO: 2846612 - RNA, 19 nt, Artificial Sequence
  Description of Artificial Sequence: Synthetic oligonucleotide
guugugcaugagguuggca

SEQ ID NO: 2846613 - RNA, 19 nt, Artificial Sequence
  Description of Artificial Sequence: Synthetic oligonucleotide
auggugcucuugaugggaa

SEQ ID NO: 2846614 - RNA, 19 nt, Artificial Sequence
  Description of Artificial Sequence: Synthetic oligonucleotide
ccacgaugauuccuugcac

SEQ ID NO: 2846615 - RNA, 19 nt, Artificial Sequence
  Description of Artificial Sequence: Synthetic oligonucleotide
cgaauucgaaggaagguua

SEQ ID NO: 2846616 - RNA, 19 nt, Artificial Sequence
  Description of Artificial Sequence: Synthetic oligonucleotide
cuccgaggcgccgacgcuc

SEQ ID NO: 2846617 - RNA, 19 nt, Artificial Sequence
  Description of Artificial Sequence: Synthetic oligonucleotide
guugggguggacagagaua

SEQ ID NO: 2846618 - RNA, 19 nt, Artificial Sequence
  Description of Artificial Sequence: Synthetic oligonucleotide
ggaucaccagagacacucc

SEQ ID NO: 2846619 - RNA, 19 nt, Artificial Sequence
  Description of Artificial Sequence: Synthetic oligonucleotide
augggcucuuaggcaacca

SEQ ID NO: 2846620 - RNA, 19 nt, Artificial Sequence
  Description of Artificial Sequence: Synthetic oligonucleotide
cugacaugauuaacacuau

SEQ ID NO: 2846621 - RNA, 19 nt, Artificial Sequence
  Description of Artificial Sequence: Synthetic oligonucleotide
cauagucuacaugggcucu

SEQ ID NO: 2846622 - RNA, 19 nt, Artificial Sequence
  Description of Artificial Sequence: Synthetic oligonucleotide
ccaugugcccacugacaug

SEQ ID NO: 2846623 - RNA, 19 nt, Artificial Sequence
  Description of Artificial Sequence: Synthetic oligonucleotide
guucaccacgaugauuccu

SEQ ID NO: 2846624 - RNA, 19 nt, Artificial Sequence
  Description of Artificial Sequence: Synthetic oligonucleotide
uccgugccuucaagaugaa

SEQ ID NO: 2846625 - RNA, 19 nt, Artificial Sequence
  Description of Artificial Sequence: Synthetic oligonucleotide
cgaugauuccuugcacucc

SEQ ID NO: 2846626 - RNA, 19 nt, Artificial Sequence
  Description of Artificial Sequence: Synthetic oligonucleotide
accgauccagcagcuccga

SEQ ID NO: 2846627 - RNA, 19 nt, Artificial Sequence
  Description of Artificial Sequence: Synthetic oligonucleotide
gguggacagagauacccuu

SEQ ID NO: 2846628 - RNA, 19 nt, Artificial Sequence
  Description of Artificial Sequence: Synthetic oligonucleotide
ggggucaauuucacgcaca

SEQ ID NO: 2846629 - RNA, 19 nt, Artificial Sequence
  Description of Artificial Sequence: Synthetic oligonucleotide
gcuuauucgguuggauucu

SEQ ID NO: 2846630 - RNA, 19 nt, Artificial Sequence
  Description of Artificial Sequence: Synthetic oligonucleotide
cugaagucucuugaguguu

SEQ ID NO: 2846631 - RNA, 19 nt, Artificial Sequence
  Description of Artificial Sequence: Synthetic oligonucleotide
gccaucucggaccgaucca

SEQ ID NO: 2846632 - RNA, 19 nt, Artificial Sequence
  Description of Artificial Sequence: Synthetic oligonucleotide
ggguuguccauggugcucu

SEQ ID NO: 2846633 - RNA, 19 nt, Artificial Sequence
  Description of Artificial Sequence: Synthetic oligonucleotide
gguuggcauacuguguagu

SEQ ID NO: 2846634 - RNA, 19 nt, Artificial Sequence
  Description of Artificial Sequence: Synthetic oligonucleotide
gcgaauucgaaggaagguu

SEQ ID NO: 2846635 - RNA, 19 nt, Artificial Sequence
  Description of Artificial Sequence: Synthetic oligonucleotide
ggcaaccaccaugugccca

SEQ ID NO: 2846636 - RNA, 19 nt, Artificial Sequence
  Description of Artificial Sequence: Synthetic oligonucleotide
caccagagacacuccuugu

SEQ ID NO: 2846637 - RNA, 19 nt, Artificial Sequence
  Description of Artificial Sequence: Synthetic oligonucleotide
ggaagcugagauaguggcu

SEQ ID NO: 2846638 - RNA, 19 nt, Artificial Sequence
  Description of Artificial Sequence: Synthetic oligonucleotide
cacuccuuguuggggugga

SEQ ID NO: 2846639 - RNA, 19 nt, Artificial Sequence
  Description of Artificial Sequence: Synthetic oligonucleotide
gaaggaagguuaggucauu

SEQ ID NO: 2846640 - RNA, 19 nt, Artificial Sequence
  Description of Artificial Sequence: Synthetic oligonucleotide
gcccacugacaugauuaac

SEQ ID NO: 2846641 - RNA, 19 nt, Artificial Sequence
  Description of Artificial Sequence: Synthetic oligonucleotide
gggguuguccauggugcuc

SEQ ID NO: 2846642 - RNA, 19 nt, Artificial Sequence
  Description of Artificial Sequence: Synthetic oligonucleotide
guggcuuauucgguuggau

SEQ ID NO: 2846643 - RNA, 19 nt, Artificial Sequence
  Description of Artificial Sequence: Synthetic oligonucleotide
gcucuugaugggaaugccu

SEQ ID NO: 2846644 - RNA, 19 nt, Artificial Sequence
  Description of Artificial Sequence: Synthetic oligonucleotide
cagcagcuccgaggcgccg

SEQ ID NO: 2846645 - RNA, 19 nt, Artificial Sequence
  Description of Artificial Sequence: Synthetic oligonucleotide
gugcaaccauaauuucauu

SEQ ID NO: 2846646 - RNA, 19 nt, Artificial Sequence
  Description of Artificial Sequence: Synthetic oligonucleotide
cacuccuuucuggcucuga

SEQ ID NO: 2846647 - RNA, 19 nt, Artificial Sequence
  Description of Artificial Sequence: Synthetic oligonucleotide
gcagcuccgaggcgccgac

SEQ ID NO: 2846648 - RNA, 19 nt, Artificial Sequence
  Description of Artificial Sequence: Synthetic oligonucleotide
cagcuccgaggcgccgacg

SEQ ID NO: 2846649 - RNA, 19 nt, Artificial Sequence
  Description of Artificial Sequence: Synthetic oligonucleotide
cagugcuccgugccuucaa

SEQ ID NO: 2846650 - RNA, 19 nt, Artificial Sequence
  Description of Artificial Sequence: Synthetic oligonucleotide
cuguguucaccacgaugau

SEQ ID NO: 2846651 - RNA, 19 nt, Artificial Sequence
  Description of Artificial Sequence: Synthetic oligonucleotide
ggacagagauacccuugau

SEQ ID NO: 2846652 - RNA, 19 nt, Artificial Sequence
  Description of Artificial Sequence: Synthetic oligonucleotide
ggucaauuucacgcacagu

SEQ ID NO: 2846653 - RNA, 19 nt, Artificial Sequence
  Description of Artificial Sequence: Synthetic oligonucleotide
ggguggacagagauacccu

SEQ ID NO: 2846654 - RNA, 19 nt, Artificial Sequence
  Description of Artificial Sequence: Synthetic oligonucleotide
aggcgccgacgcucagcga

SEQ ID NO: 2846655 - RNA, 19 nt, Artificial Sequence
  Description of Artificial Sequence: Synthetic oligonucleotide
ccgugccuucaagaugaag

SEQ ID NO: 2846656 - RNA, 19 nt, Artificial Sequence
  Description of Artificial Sequence: Synthetic oligonucleotide
cuggaucaccagagacacu

SEQ ID NO: 2846657 - RNA, 19 nt, Artificial Sequence
  Description of Artificial Sequence: Synthetic oligonucleotide
cuucuguguucaccacgau

SEQ ID NO: 2846658 - RNA, 19 nt, Artificial Sequence
  Description of Artificial Sequence: Synthetic oligonucleotide
cgguuggauucugaaucac

SEQ ID NO: 2846659 - RNA, 19 nt, Artificial Sequence
  Description of Artificial Sequence: Synthetic oligonucleotide
cgaaggaagguuaggucau

SEQ ID NO: 2846660 - RNA, 19 nt, Artificial Sequence
  Description of Artificial Sequence: Synthetic oligonucleotide
ccaccucugccaucucgga

SEQ ID NO: 2846661 - RNA, 19 nt, Artificial Sequence
  Description of Artificial Sequence: Synthetic oligonucleotide
gcucuuaggcaaccaccau

SEQ ID NO: 2846662 - RNA, 19 nt, Artificial Sequence
  Description of Artificial Sequence: Synthetic oligonucleotide
ccuuguugggguggacaga

SEQ ID NO: 2846663 - RNA, 19 nt, Artificial Sequence
  Description of Artificial Sequence: Synthetic oligonucleotide
gcugagauaguggcuuauu

SEQ ID NO: 2846664 - RNA, 19 nt, Artificial Sequence
  Description of Artificial Sequence: Synthetic oligonucleotide
gccgacgcucagcgaguuc

SEQ ID NO: 2846665 - RNA, 19 nt, Artificial Sequence
  Description of Artificial Sequence: Synthetic oligonucleotide
gcacuccuuucuggcucug

SEQ ID NO: 2846666 - RNA, 19 nt, Artificial Sequence
  Description of Artificial Sequence: Synthetic oligonucleotide
caaccaccaugugcccacu

SEQ ID NO: 2846667 - RNA, 19 nt, Artificial Sequence
  Description of Artificial Sequence: Synthetic oligonucleotide
cucugccaucucggaccga

SEQ ID NO: 2846668 - RNA, 19 nt, Artificial Sequence
  Description of Artificial Sequence: Synthetic oligonucleotide
gcuccgaggcgccgacgcu

SEQ ID NO: 2846669 - RNA, 19 nt, Artificial Sequence
  Description of Artificial Sequence: Synthetic oligonucleotide
cgcacagugcuccgugccu

SEQ ID NO: 2846670 - RNA, 19 nt, Artificial Sequence
  Description of Artificial Sequence: Synthetic oligonucleotide
ccgaggcgccgacgcucag

SEQ ID NO: 2846671 - RNA, 19 nt, Artificial Sequence
  Description of Artificial Sequence: Synthetic oligonucleotide
cggaccgauccagcagcuc

SEQ ID NO: 2846672 - RNA, 19 nt, Artificial Sequence
  Description of Artificial Sequence: Synthetic oligonucleotide
gcgccgacgcucagcgagu

SEQ ID NO: 2846673 - RNA, 19 nt, Artificial Sequence
  Description of Artificial Sequence: Synthetic oligonucleotide
cgccgacgcucagcgaguu

SEQ ID NO: 2846674 - RNA, 19 nt, Artificial Sequence
  Description of Artificial Sequence: Synthetic oligonucleotide
aaaaugcaaaagcugaugg

SEQ ID NO: 2846675 - RNA, 19 nt, Artificial Sequence
  Description of Artificial Sequence: Synthetic oligonucleotide
aagcugauggcucugaaac

SEQ ID NO: 2846676 - RNA, 19 nt, Artificial Sequence
  Description of Artificial Sequence: Synthetic oligonucleotide
uucacuagaacauaccagg

SEQ ID NO: 2846677 - RNA, 19 nt, Artificial Sequence
  Description of Artificial Sequence: Synthetic oligonucleotide
aaaugcaaaagcugauggc

SEQ ID NO: 2846678 - RNA, 19 nt, Artificial Sequence
  Description of Artificial Sequence: Synthetic oligonucleotide
acuagaacauaccaggugg

SEQ ID NO: 2846679 - RNA, 19 nt, Artificial Sequence
  Description of Artificial Sequence: Synthetic oligonucleotide
gaaacagaagguuuugugg

SEQ ID NO: 2846680 - RNA, 19 nt, Artificial Sequence
  Description of Artificial Sequence: Synthetic oligonucleotide
cucaauaugaggaccaggg

SEQ ID NO: 2846681 - RNA, 19 nt, Artificial Sequence
  Description of Artificial Sequence: Synthetic oligonucleotide
aauaugaggaccaggggac

SEQ ID NO: 2846682 - RNA, 19 nt, Artificial Sequence
  Description of Artificial Sequence: Synthetic oligonucleotide
ucaaacaaagaguuggagc

SEQ ID NO: 2846683 - RNA, 19 nt, Artificial Sequence
  Description of Artificial Sequence: Synthetic oligonucleotide
aaacagaagguuuuguggu

SEQ ID NO: 2846684 - RNA, 19 nt, Artificial Sequence
  Description of Artificial Sequence: Synthetic oligonucleotide
aagaguuggagcuccacag

SEQ ID NO: 2846685 - RNA, 19 nt, Artificial Sequence
  Description of Artificial Sequence: Synthetic oligonucleotide
aacaaagaguuggagcucc

SEQ ID NO: 2846686 - RNA, 19 nt, Artificial Sequence
  Description of Artificial Sequence: Synthetic oligonucleotide
aaugcaaaagcugauggcu

SEQ ID NO: 2846687 - RNA, 19 nt, Artificial Sequence
  Description of Artificial Sequence: Synthetic oligonucleotide
ucggcugggacccacaagg

SEQ ID NO: 2846688 - RNA, 19 nt, Artificial Sequence
  Description of Artificial Sequence: Synthetic oligonucleotide
uuuguggucaccuucugug

SEQ ID NO: 2846689 - RNA, 19 nt, Artificial Sequence
  Description of Artificial Sequence: Synthetic oligonucleotide
uggguuuugaccucacugg

SEQ ID NO: 2846690 - RNA, 19 nt, Artificial Sequence
  Description of Artificial Sequence: Synthetic oligonucleotide
acucugaacagcugggccc

SEQ ID NO: 2846691 - RNA, 19 nt, Artificial Sequence
  Description of Artificial Sequence: Synthetic oligonucleotide
ugaaacagaagguuuugug

SEQ ID NO: 2846692 - RNA, 19 nt, Artificial Sequence
  Description of Artificial Sequence: Synthetic oligonucleotide
aacaguaucuggcaaugga

SEQ ID NO: 2846693 - RNA, 19 nt, Artificial Sequence
  Description of Artificial Sequence: Synthetic oligonucleotide
ucaauaugaggaccagggg

SEQ ID NO: 2846694 - RNA, 19 nt, Artificial Sequence
  Description of Artificial Sequence: Synthetic oligonucleotide
aacagaagguuuugugguc

SEQ ID NO: 2846695 - RNA, 19 nt, Artificial Sequence
  Description of Artificial Sequence: Synthetic oligonucleotide
uccauucccucaaacaaag

SEQ ID NO: 2846696 - RNA, 19 nt, Artificial Sequence
  Description of Artificial Sequence: Synthetic oligonucleotide
cauucccucaaacaaagag

SEQ ID NO: 2846697 - RNA, 19 nt, Artificial Sequence
  Description of Artificial Sequence: Synthetic oligonucleotide
aagaccuggcucccgaggg

SEQ ID NO: 2846698 - RNA, 19 nt, Artificial Sequence
  Description of Artificial Sequence: Synthetic oligonucleotide
ucugcucaaagccuguccc

SEQ ID NO: 2846699 - RNA, 19 nt, Artificial Sequence
  Description of Artificial Sequence: Synthetic oligonucleotide
aaagaguuggagcuccaca

SEQ ID NO: 2846700 - RNA, 19 nt, Artificial Sequence
  Description of Artificial Sequence: Synthetic oligonucleotide
ucaccuucugugaaccugg

SEQ ID NO: 2846701 - RNA, 19 nt, Artificial Sequence
  Description of Artificial Sequence: Synthetic oligonucleotide
ggagcuaagaggcuggagg

SEQ ID NO: 2846702 - RNA, 19 nt, Artificial Sequence
  Description of Artificial Sequence: Synthetic oligonucleotide
agauccugggagcuggggc

SEQ ID NO: 2846703 - RNA, 19 nt, Artificial Sequence
  Description of Artificial Sequence: Synthetic oligonucleotide
aggaggaacaguaucuggc

SEQ ID NO: 2846704 - RNA, 19 nt, Artificial Sequence
  Description of Artificial Sequence: Synthetic oligonucleotide
uccccuguucacuagaaca

SEQ ID NO: 2846705 - RNA, 19 nt, Artificial Sequence
  Description of Artificial Sequence: Synthetic oligonucleotide
uucccucaaacaaagaguu

SEQ ID NO: 2846706 - RNA, 19 nt, Artificial Sequence
  Description of Artificial Sequence: Synthetic oligonucleotide
aaagccuguccccuguuca

SEQ ID NO: 2846707 - RNA, 19 nt, Artificial Sequence
  Description of Artificial Sequence: Synthetic oligonucleotide
ugaaccuggcuggagaucc

SEQ ID NO: 2846708 - RNA, 19 nt, Artificial Sequence
  Description of Artificial Sequence: Synthetic oligonucleotide
caaacaaagaguuggagcu

SEQ ID NO: 2846709 - RNA, 19 nt, Artificial Sequence
  Description of Artificial Sequence: Synthetic oligonucleotide
acuggcauccuccagagua

SEQ ID NO: 2846710 - RNA, 19 nt, Artificial Sequence
  Description of Artificial Sequence: Synthetic oligonucleotide
agggcuggucagcagaucg

SEQ ID NO: 2846711 - RNA, 19 nt, Artificial Sequence
  Description of Artificial Sequence: Synthetic oligonucleotide
caguaucuggcaauggagc

SEQ ID NO: 2846712 - RNA, 19 nt, Artificial Sequence
  Description of Artificial Sequence: Synthetic oligonucleotide
aaacaaagaguuggagcuc

SEQ ID NO: 2846713 - RNA, 19 nt, Artificial Sequence
  Description of Artificial Sequence: Synthetic oligonucleotide
agcagaucggcugggaccc

SEQ ID NO: 2846714 - RNA, 19 nt, Artificial Sequence
  Description of Artificial Sequence: Synthetic oligonucleotide
accagguggguuuugaccu

SEQ ID NO: 2846715 - RNA, 19 nt, Artificial Sequence
  Description of Artificial Sequence: Synthetic oligonucleotide
agguuuuguggucaccuuc

SEQ ID NO: 2846716 - RNA, 19 nt, Artificial Sequence
  Description of Artificial Sequence: Synthetic oligonucleotide
aguaucuggcaauggagca

SEQ ID NO: 2846717 - RNA, 19 nt, Artificial Sequence
  Description of Artificial Sequence: Synthetic oligonucleotide
aagaggcuggaggaagacc

SEQ ID NO: 2846718 - RNA, 19 nt, Artificial Sequence
  Description of Artificial Sequence: Synthetic oligonucleotide
acaugaggccaugaguacc

SEQ ID NO: 2846719 - RNA, 19 nt, Artificial Sequence
  Description of Artificial Sequence: Synthetic oligonucleotide
guggguuuugaccucacug

SEQ ID NO: 2846720 - RNA, 19 nt, Artificial Sequence
  Description of Artificial Sequence: Synthetic oligonucleotide
uggucagcagaucggcugg

SEQ ID NO: 2846721 - RNA, 19 nt, Artificial Sequence
  Description of Artificial Sequence: Synthetic oligonucleotide
cauccuccagaguaggagg

SEQ ID NO: 2846722 - RNA, 19 nt, Artificial Sequence
  Description of Artificial Sequence: Synthetic oligonucleotide
gaguuggagcuccacaggc

SEQ ID NO: 2846723 - RNA, 19 nt, Artificial Sequence
  Description of Artificial Sequence: Synthetic oligonucleotide
aagccuguccccuguucac

SEQ ID NO: 2846724 - RNA, 19 nt, Artificial Sequence
  Description of Artificial Sequence: Synthetic oligonucleotide
aaagcugauggcucugaaa

SEQ ID NO: 2846725 - RNA, 19 nt, Artificial Sequence
  Description of Artificial Sequence: Synthetic oligonucleotide
agaguuggagcuccacagg

SEQ ID NO: 2846726 - RNA, 19 nt, Artificial Sequence
  Description of Artificial Sequence: Synthetic oligonucleotide
uggagcuccacaggcaugg

SEQ ID NO: 2846727 - RNA, 19 nt, Artificial Sequence
  Description of Artificial Sequence: Synthetic oligonucleotide
gacucugaacagcugggcc

SEQ ID NO: 2846728 - RNA, 19 nt, Artificial Sequence
  Description of Artificial Sequence: Synthetic oligonucleotide
agggccucaauaugaggac

SEQ ID NO: 2846729 - RNA, 19 nt, Artificial Sequence
  Description of Artificial Sequence: Synthetic oligonucleotide
ggugguggagcuaagaggc

SEQ ID NO: 2846730 - RNA, 19 nt, Artificial Sequence
  Description of Artificial Sequence: Synthetic oligonucleotide
gaagaccuggcucccgagg

SEQ ID NO: 2846731 - RNA, 19 nt, Artificial Sequence
  Description of Artificial Sequence: Synthetic oligonucleotide
uuuuguggucaccuucugu

SEQ ID NO: 2846732 - RNA, 19 nt, Artificial Sequence
  Description of Artificial Sequence: Synthetic oligonucleotide
ugcaaaagcugauggcucu

SEQ ID NO: 2846733 - RNA, 19 nt, Artificial Sequence
  Description of Artificial Sequence: Synthetic oligonucleotide
ucacuagaacauaccaggu

SEQ ID NO: 2846734 - RNA, 19 nt, Artificial Sequence
  Description of Artificial Sequence: Synthetic oligonucleotide
ucugaaacagaagguuuug

SEQ ID NO: 2846735 - RNA, 19 nt, Artificial Sequence
  Description of Artificial Sequence: Synthetic oligonucleotide
gagagucacauguuuaaaa

SEQ ID NO: 2846736 - RNA, 19 nt, Artificial Sequence
  Description of Artificial Sequence: Synthetic oligonucleotide
ugauggcucugaaacagaa

SEQ ID NO: 2846737 - RNA, 19 nt, Artificial Sequence
  Description of Artificial Sequence: Synthetic oligonucleotide
acaguaucuggcaauggag

SEQ ID NO: 2846738 - RNA, 19 nt, Artificial Sequence
  Description of Artificial Sequence: Synthetic oligonucleotide
cacaagggcagcugcagag

SEQ ID NO: 2846739 - RNA, 19 nt, Artificial Sequence
  Description of Artificial Sequence: Synthetic oligonucleotide
acggugguggagcuaagag

SEQ ID NO: 2846740 - RNA, 19 nt, Artificial Sequence
  Description of Artificial Sequence: Synthetic oligonucleotide
auucccucaaacaaagagu

SEQ ID NO: 2846741 - RNA, 19 nt, Artificial Sequence
  Description of Artificial Sequence: Synthetic oligonucleotide
ggccaugaguaccugaggg

SEQ ID NO: 2846742 - RNA, 19 nt, Artificial Sequence
  Description of Artificial Sequence: Synthetic oligonucleotide
uggucuggagcuguccucg

SEQ ID NO: 2846743 - RNA, 19 nt, Artificial Sequence
  Description of Artificial Sequence: Synthetic oligonucleotide
gaggccaugaguaccugag

SEQ ID NO: 2846744 - RNA, 19 nt, Artificial Sequence
  Description of Artificial Sequence: Synthetic oligonucleotide
cacuagaacauaccaggug

SEQ ID NO: 2846745 - RNA, 19 nt, Artificial Sequence
  Description of Artificial Sequence: Synthetic oligonucleotide
ugagggccucaauaugagg

SEQ ID NO: 2846746 - RNA, 19 nt, Artificial Sequence
  Description of Artificial Sequence: Synthetic oligonucleotide
agcuccauucccucaaaca

SEQ ID NO: 2846747 - RNA, 19 nt, Artificial Sequence
  Description of Artificial Sequence: Synthetic oligonucleotide
cugggcaccacgguggugg

SEQ ID NO: 2846748 - RNA, 19 nt, Artificial Sequence
  Description of Artificial Sequence: Synthetic oligonucleotide
cccucaaacaaagaguugg

SEQ ID NO: 2846749 - RNA, 19 nt, Artificial Sequence
  Description of Artificial Sequence: Synthetic oligonucleotide
gagggccucaauaugagga

SEQ ID NO: 2846750 - RNA, 19 nt, Artificial Sequence
  Description of Artificial Sequence: Synthetic oligonucleotide
cucaaacaaagaguuggag

SEQ ID NO: 2846751 - RNA, 19 nt, Artificial Sequence
  Description of Artificial Sequence: Synthetic oligonucleotide
agaggcuggaggaagaccu

SEQ ID NO: 2846752 - RNA, 19 nt, Artificial Sequence
  Description of Artificial Sequence: Synthetic oligonucleotide
aaaagcugauggcucugaa

SEQ ID NO: 2846753 - RNA, 19 nt, Artificial Sequence
  Description of Artificial Sequence: Synthetic oligonucleotide
gagcuaagaggcuggagga

SEQ ID NO: 2846754 - RNA, 19 nt, Artificial Sequence
  Description of Artificial Sequence: Synthetic oligonucleotide
cuggucagcagaucggcug

SEQ ID NO: 2846755 - RNA, 19 nt, Artificial Sequence
  Description of Artificial Sequence: Synthetic oligonucleotide
cagaguaggaggaacagua

SEQ ID NO: 2846756 - RNA, 19 nt, Artificial Sequence
  Description of Artificial Sequence: Synthetic oligonucleotide
uguggucaccuucugugaa

SEQ ID NO: 2846757 - RNA, 19 nt, Artificial Sequence
  Description of Artificial Sequence: Synthetic oligonucleotide
uccagaguaggaggaacag

SEQ ID NO: 2846758 - RNA, 19 nt, Artificial Sequence
  Description of Artificial Sequence: Synthetic oligonucleotide
cagcagaucggcugggacc

SEQ ID NO: 2846759 - RNA, 19 nt, Artificial Sequence
  Description of Artificial Sequence: Synthetic oligonucleotide
acaagggcagcugcagagc

SEQ ID NO: 2846760 - RNA, 19 nt, Artificial Sequence
  Description of Artificial Sequence: Synthetic oligonucleotide
gauccugggagcuggggca

SEQ ID NO: 2846761 - RNA, 19 nt, Artificial Sequence
  Description of Artificial Sequence: Synthetic oligonucleotide
ggggacucugaacagcugg

SEQ ID NO: 2846762 - RNA, 19 nt, Artificial Sequence
  Description of Artificial Sequence: Synthetic oligonucleotide
gacaugaggccaugaguac

SEQ ID NO: 2846763 - RNA, 19 nt, Artificial Sequence
  Description of Artificial Sequence: Synthetic oligonucleotide
agaagguuuuguggucacc

SEQ ID NO: 2846764 - RNA, 19 nt, Artificial Sequence
  Description of Artificial Sequence: Synthetic oligonucleotide
uggcucugaaacagaaggu

SEQ ID NO: 2846765 - RNA, 19 nt, Artificial Sequence
  Description of Artificial Sequence: Synthetic oligonucleotide
aggaacaguaucuggcaau

SEQ ID NO: 2846766 - RNA, 19 nt, Artificial Sequence
  Description of Artificial Sequence: Synthetic oligonucleotide
augcaaaagcugauggcuc

SEQ ID NO: 2846767 - RNA, 19 nt, Artificial Sequence
  Description of Artificial Sequence: Synthetic oligonucleotide
gaacaguaucuggcaaugg

SEQ ID NO: 2846768 - RNA, 19 nt, Artificial Sequence
  Description of Artificial Sequence: Synthetic oligonucleotide
ugugaaccuggcuggagau

SEQ ID NO: 2846769 - RNA, 19 nt, Artificial Sequence
  Description of Artificial Sequence: Synthetic oligonucleotide
gauggcucugaaacagaag

SEQ ID NO: 2846770 - RNA, 19 nt, Artificial Sequence
  Description of Artificial Sequence: Synthetic oligonucleotide
uaccugagggccucaauau

SEQ ID NO: 2846771 - RNA, 19 nt, Artificial Sequence
  Description of Artificial Sequence: Synthetic oligonucleotide
auggucuggagcuguccuc

SEQ ID NO: 2846772 - RNA, 19 nt, Artificial Sequence
  Description of Artificial Sequence: Synthetic oligonucleotide
uuguggucaccuucuguga

SEQ ID NO: 2846773 - RNA, 19 nt, Artificial Sequence
  Description of Artificial Sequence: Synthetic oligonucleotide
cugagggccucaauaugag

SEQ ID NO: 2846774 - RNA, 19 nt, Artificial Sequence
  Description of Artificial Sequence: Synthetic oligonucleotide
cucugcucaaagccugucc

SEQ ID NO: 2846775 - RNA, 19 nt, Artificial Sequence
  Description of Artificial Sequence: Synthetic oligonucleotide
guaucuggcaauggagcag

SEQ ID NO: 2846776 - RNA, 19 nt, Artificial Sequence
  Description of Artificial Sequence: Synthetic oligonucleotide
uggucaccuucugugaacc

SEQ ID NO: 2846777 - RNA, 19 nt, Artificial Sequence
  Description of Artificial Sequence: Synthetic oligonucleotide
acagaagguuuugugguca

SEQ ID NO: 2846778 - RNA, 19 nt, Artificial Sequence
  Description of Artificial Sequence: Synthetic oligonucleotide
ucccucaaacaaagaguug

SEQ ID NO: 2846779 - RNA, 19 nt, Artificial Sequence
  Description of Artificial Sequence: Synthetic oligonucleotide
agcuccacaggcauggucu

SEQ ID NO: 2846780 - RNA, 19 nt, Artificial Sequence
  Description of Artificial Sequence: Synthetic oligonucleotide
guaggaggaacaguaucug

SEQ ID NO: 2846781 - RNA, 19 nt, Artificial Sequence
  Description of Artificial Sequence: Synthetic oligonucleotide
gcugauggcucugaaacag

SEQ ID NO: 2846782 - RNA, 19 nt, Artificial Sequence
  Description of Artificial Sequence: Synthetic oligonucleotide
cuggcauccuccagaguag

SEQ ID NO: 2846783 - RNA, 19 nt, Artificial Sequence
  Description of Artificial Sequence: Synthetic oligonucleotide
ggugucuguguucuccggg

SEQ ID NO: 2846784 - RNA, 19 nt, Artificial Sequence
  Description of Artificial Sequence: Synthetic oligonucleotide
cuggaggaagaccuggcuc

SEQ ID NO: 2846785 - RNA, 19 nt, Artificial Sequence
  Description of Artificial Sequence: Synthetic oligonucleotide
agccaccagcuccauuccc

SEQ ID NO: 2846786 - RNA, 19 nt, Artificial Sequence
  Description of Artificial Sequence: Synthetic oligonucleotide
ugguggagcuaagaggcug

SEQ ID NO: 2846787 - RNA, 19 nt, Artificial Sequence
  Description of Artificial Sequence: Synthetic oligonucleotide
uagaacauaccaggugggu

SEQ ID NO: 2846788 - RNA, 19 nt, Artificial Sequence
  Description of Artificial Sequence: Synthetic oligonucleotide
ucuguguucuccgggcucu

SEQ ID NO: 2846789 - RNA, 19 nt, Artificial Sequence
  Description of Artificial Sequence: Synthetic oligonucleotide
aagguuuuguggucaccuu

SEQ ID NO: 2846790 - RNA, 19 nt, Artificial Sequence
  Description of Artificial Sequence: Synthetic oligonucleotide
gaacauaccagguggguuu

SEQ ID NO: 2846791 - RNA, 19 nt, Artificial Sequence
  Description of Artificial Sequence: Synthetic oligonucleotide
gacccacaagggcagcugc

SEQ ID NO: 2846792 - RNA, 19 nt, Artificial Sequence
  Description of Artificial Sequence: Synthetic oligonucleotide
ggggcaagccaccagcucc

SEQ ID NO: 2846793 - RNA, 19 nt, Artificial Sequence
  Description of Artificial Sequence: Synthetic oligonucleotide
gaagguuuuguggucaccu

SEQ ID NO: 2846794 - RNA, 19 nt, Artificial Sequence
  Description of Artificial Sequence: Synthetic oligonucleotide
cugcucaaagccugucccc

SEQ ID NO: 2846795 - RNA, 19 nt, Artificial Sequence
  Description of Artificial Sequence: Synthetic oligonucleotide
ugcucaaagccuguccccu

SEQ ID NO: 2846796 - RNA, 19 nt, Artificial Sequence
  Description of Artificial Sequence: Synthetic oligonucleotide
gucaccuucugugaaccug

SEQ ID NO: 2846797 - RNA, 19 nt, Artificial Sequence
  Description of Artificial Sequence: Synthetic oligonucleotide
accugagggccucaauaug

SEQ ID NO: 2846798 - RNA, 19 nt, Artificial Sequence
  Description of Artificial Sequence: Synthetic oligonucleotide
ucugugaaccuggcuggag

SEQ ID NO: 2846799 - RNA, 19 nt, Artificial Sequence
  Description of Artificial Sequence: Synthetic oligonucleotide
agaccuggcucccgagggg

SEQ ID NO: 2846800 - RNA, 19 nt, Artificial Sequence
  Description of Artificial Sequence: Synthetic oligonucleotide
acgagggcuggucagcaga

SEQ ID NO: 2846801 - RNA, 19 nt, Artificial Sequence
  Description of Artificial Sequence: Synthetic oligonucleotide
cagagagucacauguuuaa

SEQ ID NO: 2846802 - RNA, 19 nt, Artificial Sequence
  Description of Artificial Sequence: Synthetic oligonucleotide
ggguuuugaccucacuggc

SEQ ID NO: 2846803 - RNA, 19 nt, Artificial Sequence
  Description of Artificial Sequence: Synthetic oligonucleotide
ccuguucacuagaacauac

SEQ ID NO: 2846804 - RNA, 19 nt, Artificial Sequence
  Description of Artificial Sequence: Synthetic oligonucleotide
cugggacccacaagggcag

SEQ ID NO: 2846805 - RNA, 19 nt, Artificial Sequence
  Description of Artificial Sequence: Synthetic oligonucleotide
guaccugagggccucaaua

SEQ ID NO: 2846806 - RNA, 19 nt, Artificial Sequence
  Description of Artificial Sequence: Synthetic oligonucleotide
ggaacaguaucuggcaaug

SEQ ID NO: 2846807 - RNA, 19 nt, Artificial Sequence
  Description of Artificial Sequence: Synthetic oligonucleotide
cuaagaggcuggaggaaga

SEQ ID NO: 2846808 - RNA, 19 nt, Artificial Sequence
  Description of Artificial Sequence: Synthetic oligonucleotide
gaggaacaguaucuggcaa

SEQ ID NO: 2846809 - RNA, 19 nt, Artificial Sequence
  Description of Artificial Sequence: Synthetic oligonucleotide
uguccccuguucacuagaa

SEQ ID NO: 2846810 - RNA, 19 nt, Artificial Sequence
  Description of Artificial Sequence: Synthetic oligonucleotide
uuggagcuccacaggcaug

SEQ ID NO: 2846811 - RNA, 19 nt, Artificial Sequence
  Description of Artificial Sequence: Synthetic oligonucleotide
agaacauaccagguggguu

SEQ ID NO: 2846812 - RNA, 19 nt, Artificial Sequence
  Description of Artificial Sequence: Synthetic oligonucleotide
uggcauccuccagaguagg

SEQ ID NO: 2846813 - RNA, 19 nt, Artificial Sequence
  Description of Artificial Sequence: Synthetic oligonucleotide
guuuuguggucaccuucug

SEQ ID NO: 2846814 - RNA, 19 nt, Artificial Sequence
  Description of Artificial Sequence: Synthetic oligonucleotide
aggaagaccuggcucccga

SEQ ID NO: 2846815 - RNA, 19 nt, Artificial Sequence
  Description of Artificial Sequence: Synthetic oligonucleotide
ggaggaacaguaucuggca

SEQ ID NO: 2846816 - RNA, 19 nt, Artificial Sequence
  Description of Artificial Sequence: Synthetic oligonucleotide
gcuccauucccucaaacaa

SEQ ID NO: 2846817 - RNA, 19 nt, Artificial Sequence
  Description of Artificial Sequence: Synthetic oligonucleotide
gcuaagaggcuggaggaag

SEQ ID NO: 2846818 - RNA, 19 nt, Artificial Sequence
  Description of Artificial Sequence: Synthetic oligonucleotide
ccaugaguaccugagggcc

SEQ ID NO: 2846819 - RNA, 19 nt, Artificial Sequence
  Description of Artificial Sequence: Synthetic oligonucleotide
uguucuccgggcucugcuc

SEQ ID NO: 2846820 - RNA, 19 nt, Artificial Sequence
  Description of Artificial Sequence: Synthetic oligonucleotide
uccgggcucugcucaaagc

SEQ ID NO: 2846821 - RNA, 19 nt, Artificial Sequence
  Description of Artificial Sequence: Synthetic oligonucleotide
uggcacgagggcuggucag

SEQ ID NO: 2846822 - RNA, 19 nt, Artificial Sequence
  Description of Artificial Sequence: Synthetic oligonucleotide
accagcuccauucccucaa

SEQ ID NO: 2846823 - RNA, 19 nt, Artificial Sequence
  Description of Artificial Sequence: Synthetic oligonucleotide
cagaagguuuuguggucac

SEQ ID NO: 2846824 - RNA, 19 nt, Artificial Sequence
  Description of Artificial Sequence: Synthetic oligonucleotide
uaugaggaccaggggacuc

SEQ ID NO: 2846825 - RNA, 19 nt, Artificial Sequence
  Description of Artificial Sequence: Synthetic oligonucleotide
gagauccugggagcugggg

SEQ ID NO: 2846826 - RNA, 19 nt, Artificial Sequence
  Description of Artificial Sequence: Synthetic oligonucleotide
guggucaccuucugugaac

SEQ ID NO: 2846827 - RNA, 19 nt, Artificial Sequence
  Description of Artificial Sequence: Synthetic oligonucleotide
uggagcuaagaggcuggag

SEQ ID NO: 2846828 - RNA, 19 nt, Artificial Sequence
  Description of Artificial Sequence: Synthetic oligonucleotide
gguggagcuaagaggcugg

SEQ ID NO: 2846829 - RNA, 19 nt, Artificial Sequence
  Description of Artificial Sequence: Synthetic oligonucleotide
gccaugaguaccugagggc

SEQ ID NO: 2846830 - RNA, 19 nt, Artificial Sequence
  Description of Artificial Sequence: Synthetic oligonucleotide
aaccuggcuggagauccug

SEQ ID NO: 2846831 - RNA, 19 nt, Artificial Sequence
  Description of Artificial Sequence: Synthetic oligonucleotide
aucggcugggacccacaag

SEQ ID NO: 2846832 - RNA, 19 nt, Artificial Sequence
  Description of Artificial Sequence: Synthetic oligonucleotide
cuccauucccucaaacaaa

SEQ ID NO: 2846833 - RNA, 19 nt, Artificial Sequence
  Description of Artificial Sequence: Synthetic oligonucleotide
gcauccuccagaguaggag

SEQ ID NO: 2846834 - RNA, 19 nt, Artificial Sequence
  Description of Artificial Sequence: Synthetic oligonucleotide
gcuggggcaagccaccagc

SEQ ID NO: 2846835 - RNA, 19 nt, Artificial Sequence
  Description of Artificial Sequence: Synthetic oligonucleotide
agagagucacauguuuaaa

SEQ ID NO: 2846836 - RNA, 19 nt, Artificial Sequence
  Description of Artificial Sequence: Synthetic oligonucleotide
ggacaugaggccaugagua

SEQ ID NO: 2846837 - RNA, 19 nt, Artificial Sequence
  Description of Artificial Sequence: Synthetic oligonucleotide
cugugaaccuggcuggaga

SEQ ID NO: 2846838 - RNA, 19 nt, Artificial Sequence
  Description of Artificial Sequence: Synthetic oligonucleotide
caaagaguuggagcuccac

SEQ ID NO: 2846839 - RNA, 19 nt, Artificial Sequence
  Description of Artificial Sequence: Synthetic oligonucleotide
ggggugucuguguucuccg

SEQ ID NO: 2846840 - RNA, 19 nt, Artificial Sequence
  Description of Artificial Sequence: Synthetic oligonucleotide
aacauaccagguggguuuu

SEQ ID NO: 2846841 - RNA, 19 nt, Artificial Sequence
  Description of Artificial Sequence: Synthetic oligonucleotide
gucccugggcaccacggug

SEQ ID NO: 2846842 - RNA, 19 nt, Artificial Sequence
  Description of Artificial Sequence: Synthetic oligonucleotide
guucuccgggcucugcuca

SEQ ID NO: 2846843 - RNA, 19 nt, Artificial Sequence
  Description of Artificial Sequence: Synthetic oligonucleotide
accacggugguggagcuaa

SEQ ID NO: 2846844 - RNA, 19 nt, Artificial Sequence
  Description of Artificial Sequence: Synthetic oligonucleotide
ccgggcucugcucaaagcc

SEQ ID NO: 2846845 - RNA, 19 nt, Artificial Sequence
  Description of Artificial Sequence: Synthetic oligonucleotide
caaagccuguccccuguuc

SEQ ID NO: 2846846 - RNA, 19 nt, Artificial Sequence
  Description of Artificial Sequence: Synthetic oligonucleotide
ugaccucacuggcauccuc

SEQ ID NO: 2846847 - RNA, 19 nt, Artificial Sequence
  Description of Artificial Sequence: Synthetic oligonucleotide
gggacucugaacagcuggg

SEQ ID NO: 2846848 - RNA, 19 nt, Artificial Sequence
  Description of Artificial Sequence: Synthetic oligonucleotide
accuucugugaaccuggcu

SEQ ID NO: 2846849 - RNA, 19 nt, Artificial Sequence
  Description of Artificial Sequence: Synthetic oligonucleotide
gaggaagaccuggcucccg

SEQ ID NO: 2846850 - RNA, 19 nt, Artificial Sequence
  Description of Artificial Sequence: Synthetic oligonucleotide
aguaccugagggccucaau

SEQ ID NO: 2846851 - RNA, 19 nt, Artificial Sequence
  Description of Artificial Sequence: Synthetic oligonucleotide
caugaggccaugaguaccu

SEQ ID NO: 2846852 - RNA, 19 nt, Artificial Sequence
  Description of Artificial Sequence: Synthetic oligonucleotide
aguuggagcuccacaggca

SEQ ID NO: 2846853 - RNA, 19 nt, Artificial Sequence
  Description of Artificial Sequence: Synthetic oligonucleotide
auaugaggaccaggggacu

SEQ ID NO: 2846854 - RNA, 19 nt, Artificial Sequence
  Description of Artificial Sequence: Synthetic oligonucleotide
agggucccugggcaccacg

SEQ ID NO: 2846855 - RNA, 19 nt, Artificial Sequence
  Description of Artificial Sequence: Synthetic oligonucleotide
uggggcaagccaccagcuc

SEQ ID NO: 2846856 - RNA, 19 nt, Artificial Sequence
  Description of Artificial Sequence: Synthetic oligonucleotide
ugaggaccaggggacucug

SEQ ID NO: 2846857 - RNA, 19 nt, Artificial Sequence
  Description of Artificial Sequence: Synthetic oligonucleotide
ggcccagagagucacaugu

SEQ ID NO: 2846858 - RNA, 19 nt, Artificial Sequence
  Description of Artificial Sequence: Synthetic oligonucleotide
gcaggcacagggucccugg

SEQ ID NO: 2846859 - RNA, 19 nt, Artificial Sequence
  Description of Artificial Sequence: Synthetic oligonucleotide
ccugagggccucaauauga

SEQ ID NO: 2846860 - RNA, 19 nt, Artificial Sequence
  Description of Artificial Sequence: Synthetic oligonucleotide
uguguucuccgggcucugc

SEQ ID NO: 2846861 - RNA, 19 nt, Artificial Sequence
  Description of Artificial Sequence: Synthetic oligonucleotide
ucaaagccuguccccuguu

SEQ ID NO: 2846862 - RNA, 19 nt, Artificial Sequence
  Description of Artificial Sequence: Synthetic oligonucleotide
ggcaccacggugguggagc

SEQ ID NO: 2846863 - RNA, 19 nt, Artificial Sequence
  Description of Artificial Sequence: Synthetic oligonucleotide
agaguaggaggaacaguau

SEQ ID NO: 2846864 - RNA, 19 nt, Artificial Sequence
  Description of Artificial Sequence: Synthetic oligonucleotide
cggugguggagcuaagagg

SEQ ID NO: 2846865 - RNA, 19 nt, Artificial Sequence
  Description of Artificial Sequence: Synthetic oligonucleotide
guuggagcuccacaggcau

SEQ ID NO: 2846866 - RNA, 19 nt, Artificial Sequence
  Description of Artificial Sequence: Synthetic oligonucleotide
ccuggcuggagauccuggg

SEQ ID NO: 2846867 - RNA, 19 nt, Artificial Sequence
  Description of Artificial Sequence: Synthetic oligonucleotide
gucuguguucuccgggcuc

SEQ ID NO: 2846868 - RNA, 19 nt, Artificial Sequence
  Description of Artificial Sequence: Synthetic oligonucleotide
caccuucugugaaccuggc

SEQ ID NO: 2846869 - RNA, 19 nt, Artificial Sequence
  Description of Artificial Sequence: Synthetic oligonucleotide
cucugaaacagaagguuuu

SEQ ID NO: 2846870 - RNA, 19 nt, Artificial Sequence
  Description of Artificial Sequence: Synthetic oligonucleotide
cugauggcucugaaacaga

SEQ ID NO: 2846871 - RNA, 19 nt, Artificial Sequence
  Description of Artificial Sequence: Synthetic oligonucleotide
gcugggacccacaagggca

SEQ ID NO: 2846872 - RNA, 19 nt, Artificial Sequence
  Description of Artificial Sequence: Synthetic oligonucleotide
cacagggucccugggcacc

SEQ ID NO: 2846873 - RNA, 19 nt, Artificial Sequence
  Description of Artificial Sequence: Synthetic oligonucleotide
cauaccagguggguuuuga

SEQ ID NO: 2846874 - RNA, 19 nt, Artificial Sequence
  Description of Artificial Sequence: Synthetic oligonucleotide
aucuggcaauggagcaggc

SEQ ID NO: 2846875 - RNA, 19 nt, Artificial Sequence
  Description of Artificial Sequence: Synthetic oligonucleotide
ggcugggacccacaagggc

SEQ ID NO: 2846876 - RNA, 19 nt, Artificial Sequence
  Description of Artificial Sequence: Synthetic oligonucleotide
agggcaggcuggggcaagc

SEQ ID NO: 2846877 - RNA, 19 nt, Artificial Sequence
  Description of Artificial Sequence: Synthetic oligonucleotide
caggcacagggucccuggg

SEQ ID NO: 2846878 - RNA, 19 nt, Artificial Sequence
  Description of Artificial Sequence: Synthetic oligonucleotide
accuggcuggagauccugg

SEQ ID NO: 2846879 - RNA, 19 nt, Artificial Sequence
  Description of Artificial Sequence: Synthetic oligonucleotide
cagcuccauucccucaaac

SEQ ID NO: 2846880 - RNA, 19 nt, Artificial Sequence
  Description of Artificial Sequence: Synthetic oligonucleotide
ccucaauaugaggaccagg

SEQ ID NO: 2846881 - RNA, 19 nt, Artificial Sequence
  Description of Artificial Sequence: Synthetic oligonucleotide
cuccgggcucugcucaaag

SEQ ID NO: 2846882 - RNA, 19 nt, Artificial Sequence
  Description of Artificial Sequence: Synthetic oligonucleotide
guccccuguucacuagaac

SEQ ID NO: 2846883 - RNA, 19 nt, Artificial Sequence
  Description of Artificial Sequence: Synthetic oligonucleotide
ggagcaggcacaggguccc

SEQ ID NO: 2846884 - RNA, 19 nt, Artificial Sequence
  Description of Artificial Sequence: Synthetic oligonucleotide
gaucggcugggacccacaa

SEQ ID NO: 2846885 - RNA, 19 nt, Artificial Sequence
  Description of Artificial Sequence: Synthetic oligonucleotide
ggaagaccuggcucccgag

SEQ ID NO: 2846886 - RNA, 19 nt, Artificial Sequence
  Description of Artificial Sequence: Synthetic oligonucleotide
gcagagcugggcaaggcac

SEQ ID NO: 2846887 - RNA, 19 nt, Artificial Sequence
  Description of Artificial Sequence: Synthetic oligonucleotide
cucugaacagcugggccca

SEQ ID NO: 2846888 - RNA, 19 nt, Artificial Sequence
  Description of Artificial Sequence: Synthetic oligonucleotide
caaaagcugauggcucuga

SEQ ID NO: 2846889 - RNA, 19 nt, Artificial Sequence
  Description of Artificial Sequence: Synthetic oligonucleotide
gggugucuguguucuccgg

SEQ ID NO: 2846890 - RNA, 19 nt, Artificial Sequence
  Description of Artificial Sequence: Synthetic oligonucleotide
cuggcuggagauccuggga

SEQ ID NO: 2846891 - RNA, 19 nt, Artificial Sequence
  Description of Artificial Sequence: Synthetic oligonucleotide
guggcacgagggcugguca

SEQ ID NO: 2846892 - RNA, 19 nt, Artificial Sequence
  Description of Artificial Sequence: Synthetic oligonucleotide
gguuuugaccucacuggca

SEQ ID NO: 2846893 - RNA, 19 nt, Artificial Sequence
  Description of Artificial Sequence: Synthetic oligonucleotide
agcuaagaggcuggaggaa

SEQ ID NO: 2846894 - RNA, 19 nt, Artificial Sequence
  Description of Artificial Sequence: Synthetic oligonucleotide
uccuccagaguaggaggaa

SEQ ID NO: 2846895 - RNA, 19 nt, Artificial Sequence
  Description of Artificial Sequence: Synthetic oligonucleotide
ggacucugaacagcugggc

SEQ ID NO: 2846896 - RNA, 19 nt, Artificial Sequence
  Description of Artificial Sequence: Synthetic oligonucleotide
auccugggagcuggggcag

SEQ ID NO: 2846897 - RNA, 19 nt, Artificial Sequence
  Description of Artificial Sequence: Synthetic oligonucleotide
cauggucuggagcuguccu

SEQ ID NO: 2846898 - RNA, 19 nt, Artificial Sequence
  Description of Artificial Sequence: Synthetic oligonucleotide
ggcuggucagcagaucggc

SEQ ID NO: 2846899 - RNA, 19 nt, Artificial Sequence
  Description of Artificial Sequence: Synthetic oligonucleotide
caggggacucugaacagcu

SEQ ID NO: 2846900 - RNA, 19 nt, Artificial Sequence
  Description of Artificial Sequence: Synthetic oligonucleotide
ccucaaacaaagaguugga

SEQ ID NO: 2846901 - RNA, 19 nt, Artificial Sequence
  Description of Artificial Sequence: Synthetic oligonucleotide
gggccucaauaugaggacc

SEQ ID NO: 2846902 - RNA, 19 nt, Artificial Sequence
  Description of Artificial Sequence: Synthetic oligonucleotide
acaaagaguuggagcucca

SEQ ID NO: 2846903 - RNA, 19 nt, Artificial Sequence
  Description of Artificial Sequence: Synthetic oligonucleotide
ggucuggagcuguccucgg

SEQ ID NO: 2846904 - RNA, 19 nt, Artificial Sequence
  Description of Artificial Sequence: Synthetic oligonucleotide
ggccucaauaugaggacca

SEQ ID NO: 2846905 - RNA, 19 nt, Artificial Sequence
  Description of Artificial Sequence: Synthetic oligonucleotide
aggcauggucuggagcugu

SEQ ID NO: 2846906 - RNA, 19 nt, Artificial Sequence
  Description of Artificial Sequence: Synthetic oligonucleotide
caugaguaccugagggccu

SEQ ID NO: 2846907 - RNA, 19 nt, Artificial Sequence
  Description of Artificial Sequence: Synthetic oligonucleotide
agccuguccccuguucacu

SEQ ID NO: 2846908 - RNA, 19 nt, Artificial Sequence
  Description of Artificial Sequence: Synthetic oligonucleotide
ugaguaccugagggccuca

SEQ ID NO: 2846909 - RNA, 19 nt, Artificial Sequence
  Description of Artificial Sequence: Synthetic oligonucleotide
agguggguuuugaccucac

SEQ ID NO: 2846910 - RNA, 19 nt, Artificial Sequence
  Description of Artificial Sequence: Synthetic oligonucleotide
gcaaaagcugauggcucug

SEQ ID NO: 2846911 - RNA, 19 nt, Artificial Sequence
  Description of Artificial Sequence: Synthetic oligonucleotide
cuguccccuguucacuaga

SEQ ID NO: 2846912 - RNA, 19 nt, Artificial Sequence
  Description of Artificial Sequence: Synthetic oligonucleotide
gcaggcuggggcaagccac

SEQ ID NO: 2846913 - RNA, 19 nt, Artificial Sequence
  Description of Artificial Sequence: Synthetic oligonucleotide
agcaggcacagggucccug

SEQ ID NO: 2846914 - RNA, 19 nt, Artificial Sequence
  Description of Artificial Sequence: Synthetic oligonucleotide
gggcuggucagcagaucgg

SEQ ID NO: 2846915 - RNA, 19 nt, Artificial Sequence
  Description of Artificial Sequence: Synthetic oligonucleotide
cugaaacagaagguuuugu

SEQ ID NO: 2846916 - RNA, 19 nt, Artificial Sequence
  Description of Artificial Sequence: Synthetic oligonucleotide
ugggcaccacgguggugga

SEQ ID NO: 2846917 - RNA, 19 nt, Artificial Sequence
  Description of Artificial Sequence: Synthetic oligonucleotide
acauaccagguggguuuug

SEQ ID NO: 2846918 - RNA, 19 nt, Artificial Sequence
  Description of Artificial Sequence: Synthetic oligonucleotide
augaggccaugaguaccug

SEQ ID NO: 2846919 - RNA, 19 nt, Artificial Sequence
  Description of Artificial Sequence: Synthetic oligonucleotide
gggucccugggcaccacgg

SEQ ID NO: 2846920 - RNA, 19 nt, Artificial Sequence
  Description of Artificial Sequence: Synthetic oligonucleotide
gggcucugcucaaagccug

SEQ ID NO: 2846921 - RNA, 19 nt, Artificial Sequence
  Description of Artificial Sequence: Synthetic oligonucleotide
cucaaagccuguccccugu

SEQ ID NO: 2846922 - RNA, 19 nt, Artificial Sequence
  Description of Artificial Sequence: Synthetic oligonucleotide
acagggucccugggcacca

SEQ ID NO: 2846923 - RNA, 19 nt, Artificial Sequence
  Description of Artificial Sequence: Synthetic oligonucleotide
ccagagagucacauguuua

SEQ ID NO: 2846924 - RNA, 19 nt, Artificial Sequence
  Description of Artificial Sequence: Synthetic oligonucleotide
caggcauggucuggagcug

SEQ ID NO: 2846925 - RNA, 19 nt, Artificial Sequence
  Description of Artificial Sequence: Synthetic oligonucleotide
cagaucggcugggacccac

SEQ ID NO: 2846926 - RNA, 19 nt, Artificial Sequence
  Description of Artificial Sequence: Synthetic oligonucleotide
gccucaauaugaggaccag

SEQ ID NO: 2846927 - RNA, 19 nt, Artificial Sequence
  Description of Artificial Sequence: Synthetic oligonucleotide
ggucagcagaucggcuggg

SEQ ID NO: 2846928 - RNA, 19 nt, Artificial Sequence
  Description of Artificial Sequence: Synthetic oligonucleotide
acccacaagggcagcugca

SEQ ID NO: 2846929 - RNA, 19 nt, Artificial Sequence
  Description of Artificial Sequence: Synthetic oligonucleotide
guguucuccgggcucugcu

SEQ ID NO: 2846930 - RNA, 19 nt, Artificial Sequence
  Description of Artificial Sequence: Synthetic oligonucleotide
ggacccacaagggcagcug

SEQ ID NO: 2846931 - RNA, 19 nt, Artificial Sequence
  Description of Artificial Sequence: Synthetic oligonucleotide
gcugggcccagagagucac

SEQ ID NO: 2846932 - RNA, 19 nt, Artificial Sequence
  Description of Artificial Sequence: Synthetic oligonucleotide
ugggacccacaagggcagc

SEQ ID NO: 2846933 - RNA, 19 nt, Artificial Sequence
  Description of Artificial Sequence: Synthetic oligonucleotide
ggagauccugggagcuggg

SEQ ID NO: 2846934 - RNA, 19 nt, Artificial Sequence
  Description of Artificial Sequence: Synthetic oligonucleotide
caccagcuccauucccuca

SEQ ID NO: 2846935 - RNA, 19 nt, Artificial Sequence
  Description of Artificial Sequence: Synthetic oligonucleotide
gcauggucuggagcugucc

SEQ ID NO: 2846936 - RNA, 19 nt, Artificial Sequence
  Description of Artificial Sequence: Synthetic oligonucleotide
ggcacgagggcuggucagc

SEQ ID NO: 2846937 - RNA, 19 nt, Artificial Sequence
  Description of Artificial Sequence: Synthetic oligonucleotide
aggggacucugaacagcug

SEQ ID NO: 2846938 - RNA, 19 nt, Artificial Sequence
  Description of Artificial Sequence: Synthetic oligonucleotide
cagguggguuuugaccuca

SEQ ID NO: 2846939 - RNA, 19 nt, Artificial Sequence
  Description of Artificial Sequence: Synthetic oligonucleotide
ucuccgggcucugcucaaa

SEQ ID NO: 2846940 - RNA, 19 nt, Artificial Sequence
  Description of Artificial Sequence: Synthetic oligonucleotide
ggcuggggcaagccaccag

SEQ ID NO: 2846941 - RNA, 19 nt, Artificial Sequence
  Description of Artificial Sequence: Synthetic oligonucleotide
ggcucugaaacagaagguu

SEQ ID NO: 2846942 - RNA, 19 nt, Artificial Sequence
  Description of Artificial Sequence: Synthetic oligonucleotide
ggcaggcuggggcaagcca

SEQ ID NO: 2846943 - RNA, 19 nt, Artificial Sequence
  Description of Artificial Sequence: Synthetic oligonucleotide
agaucggcugggacccaca

SEQ ID NO: 2846944 - RNA, 19 nt, Artificial Sequence
  Description of Artificial Sequence: Synthetic oligonucleotide
gucagcagaucggcuggga

SEQ ID NO: 2846945 - RNA, 19 nt, Artificial Sequence
  Description of Artificial Sequence: Synthetic oligonucleotide
cugggagcuggggcagggc

SEQ ID NO: 2846946 - RNA, 19 nt, Artificial Sequence
  Description of Artificial Sequence: Synthetic oligonucleotide
gagggcuggucagcagauc

SEQ ID NO: 2846947 - RNA, 19 nt, Artificial Sequence
  Description of Artificial Sequence: Synthetic oligonucleotide
cacggugguggagcuaaga

SEQ ID NO: 2846948 - RNA, 19 nt, Artificial Sequence
  Description of Artificial Sequence: Synthetic oligonucleotide
gguggcacgagggcugguc

SEQ ID NO: 2846949 - RNA, 19 nt, Artificial Sequence
  Description of Artificial Sequence: Synthetic oligonucleotide
guggagcuaagaggcugga

SEQ ID NO: 2846950 - RNA, 19 nt, Artificial Sequence
  Description of Artificial Sequence: Synthetic oligonucleotide
gcuggaggaagaccuggcu

SEQ ID NO: 2846951 - RNA, 19 nt, Artificial Sequence
  Description of Artificial Sequence: Synthetic oligonucleotide
cagcugcagagcugggcaa

SEQ ID NO: 2846952 - RNA, 19 nt, Artificial Sequence
  Description of Artificial Sequence: Synthetic oligonucleotide
gaggaccaggggacucuga

SEQ ID NO: 2846953 - RNA, 19 nt, Artificial Sequence
  Description of Artificial Sequence: Synthetic oligonucleotide
cuggggcaagccaccagcu

SEQ ID NO: 2846954 - RNA, 19 nt, Artificial Sequence
  Description of Artificial Sequence: Synthetic oligonucleotide
gaguaccugagggccucaa

SEQ ID NO: 2846955 - RNA, 19 nt, Artificial Sequence
  Description of Artificial Sequence: Synthetic oligonucleotide
ccucacuggcauccuccag

SEQ ID NO: 2846956 - RNA, 19 nt, Artificial Sequence
  Description of Artificial Sequence: Synthetic oligonucleotide
ccagguggguuuugaccuc

SEQ ID NO: 2846957 - RNA, 19 nt, Artificial Sequence
  Description of Artificial Sequence: Synthetic oligonucleotide
cuguguucuccgggcucug

SEQ ID NO: 2846958 - RNA, 19 nt, Artificial Sequence
  Description of Artificial Sequence: Synthetic oligonucleotide
cagggcaggcuggggcaag

SEQ ID NO: 2846959 - RNA, 19 nt, Artificial Sequence
  Description of Artificial Sequence: Synthetic oligonucleotide
gggguggcacgagggcugg

SEQ ID NO: 2846960 - RNA, 19 nt, Artificial Sequence
  Description of Artificial Sequence: Synthetic oligonucleotide
gcucugaaacagaagguuu

SEQ ID NO: 2846961 - RNA, 19 nt, Artificial Sequence
  Description of Artificial Sequence: Synthetic oligonucleotide
gggcaagccaccagcucca

SEQ ID NO: 2846962 - RNA, 19 nt, Artificial Sequence
  Description of Artificial Sequence: Synthetic oligonucleotide
ccugggagcuggggcaggg

SEQ ID NO: 2846963 - RNA, 19 nt, Artificial Sequence
  Description of Artificial Sequence: Synthetic oligonucleotide
agcugggcccagagaguca

SEQ ID NO: 2846964 - RNA, 19 nt, Artificial Sequence
  Description of Artificial Sequence: Synthetic oligonucleotide
gguggguuuugaccucacu

SEQ ID NO: 2846965 - RNA, 19 nt, Artificial Sequence
  Description of Artificial Sequence: Synthetic oligonucleotide
cggcugggacccacaaggg

SEQ ID NO: 2846966 - RNA, 19 nt, Artificial Sequence
  Description of Artificial Sequence: Synthetic oligonucleotide
ccauucccucaaacaaaga

SEQ ID NO: 2846967 - RNA, 19 nt, Artificial Sequence
  Description of Artificial Sequence: Synthetic oligonucleotide
ggcauccuccagaguagga

SEQ ID NO: 2846968 - RNA, 19 nt, Artificial Sequence
  Description of Artificial Sequence: Synthetic oligonucleotide
ccccuguucacuagaacau

SEQ ID NO: 2846969 - RNA, 19 nt, Artificial Sequence
  Description of Artificial Sequence: Synthetic oligonucleotide
gaaccuggcuggagauccu

SEQ ID NO: 2846970 - RNA, 19 nt, Artificial Sequence
  Description of Artificial Sequence: Synthetic oligonucleotide
gccuguccccuguucacua

SEQ ID NO: 2846971 - RNA, 19 nt, Artificial Sequence
  Description of Artificial Sequence: Synthetic oligonucleotide
ccacaagggcagcugcaga

SEQ ID NO: 2846972 - RNA, 19 nt, Artificial Sequence
  Description of Artificial Sequence: Synthetic oligonucleotide
gcucugcucaaagccuguc

SEQ ID NO: 2846973 - RNA, 19 nt, Artificial Sequence
  Description of Artificial Sequence: Synthetic oligonucleotide
gcacgagggcuggucagca

SEQ ID NO: 2846974 - RNA, 19 nt, Artificial Sequence
  Description of Artificial Sequence: Synthetic oligonucleotide
gggcaggcuggggcaagcc

SEQ ID NO: 2846975 - RNA, 19 nt, Artificial Sequence
  Description of Artificial Sequence: Synthetic oligonucleotide
ggcauggucuggagcuguc

SEQ ID NO: 2846976 - RNA, 19 nt, Artificial Sequence
  Description of Artificial Sequence: Synthetic oligonucleotide
ggucaccuucugugaaccu

SEQ ID NO: 2846977 - RNA, 19 nt, Artificial Sequence
  Description of Artificial Sequence: Synthetic oligonucleotide
gugguggagcuaagaggcu

SEQ ID NO: 2846978 - RNA, 19 nt, Artificial Sequence
  Description of Artificial Sequence: Synthetic oligonucleotide
cccagagagucacauguuu

SEQ ID NO: 2846979 - RNA, 19 nt, Artificial Sequence
  Description of Artificial Sequence: Synthetic oligonucleotide
ccacggugguggagcuaag

SEQ ID NO: 2846980 - RNA, 19 nt, Artificial Sequence
  Description of Artificial Sequence: Synthetic oligonucleotide
ccagaguaggaggaacagu

SEQ ID NO: 2846981 - RNA, 19 nt, Artificial Sequence
  Description of Artificial Sequence: Synthetic oligonucleotide
gggcaccacggugguggag

SEQ ID NO: 2846982 - RNA, 19 nt, Artificial Sequence
  Description of Artificial Sequence: Synthetic oligonucleotide
gcuggucagcagaucggcu

SEQ ID NO: 2846983 - RNA, 19 nt, Artificial Sequence
  Description of Artificial Sequence: Synthetic oligonucleotide
gggacccacaagggcagcu

SEQ ID NO: 2846984 - RNA, 19 nt, Artificial Sequence
  Description of Artificial Sequence: Synthetic oligonucleotide
gcaccacggugguggagcu

SEQ ID NO: 2846985 - RNA, 19 nt, Artificial Sequence
  Description of Artificial Sequence: Synthetic oligonucleotide
cgggcucugcucaaagccu

SEQ ID NO: 2846986 - RNA, 19 nt, Artificial Sequence
  Description of Artificial Sequence: Synthetic oligonucleotide
gagcaggcacagggucccu

SEQ ID NO: 2846987 - RNA, 19 nt, Artificial Sequence
  Description of Artificial Sequence: Synthetic oligonucleotide
ccugggcaccacgguggug

SEQ ID NO: 2846988 - RNA, 19 nt, Artificial Sequence
  Description of Artificial Sequence: Synthetic oligonucleotide
caccacggugguggagcua

SEQ ID NO: 2846989 - RNA, 19 nt, Artificial Sequence
  Description of Artificial Sequence: Synthetic oligonucleotide
gcagaucggcugggaccca

SEQ ID NO: 2846990 - RNA, 19 nt, Artificial Sequence
  Description of Artificial Sequence: Synthetic oligonucleotide
ggagcuccacaggcauggu

SEQ ID NO: 2846991 - RNA, 19 nt, Artificial Sequence
  Description of Artificial Sequence: Synthetic oligonucleotide
cgagggcuggucagcagau

SEQ ID NO: 2846992 - RNA, 19 nt, Artificial Sequence
  Description of Artificial Sequence: Synthetic oligonucleotide
gcccagagagucacauguu

SEQ ID NO: 2846993 - RNA, 19 nt, Artificial Sequence
  Description of Artificial Sequence: Synthetic oligonucleotide
ggcaagccaccagcuccau

SEQ ID NO: 2846994 - RNA, 19 nt, Artificial Sequence
  Description of Artificial Sequence: Synthetic oligonucleotide
ggguggcacgagggcuggu

SEQ ID NO: 2846995 - RNA, 19 nt, Artificial Sequence
  Description of Artificial Sequence: Synthetic oligonucleotide
aauuccuaaauuuaaauca

SEQ ID NO: 2846996 - RNA, 19 nt, Artificial Sequence
  Description of Artificial Sequence: Synthetic oligonucleotide
aaauuccuaaauuuaaauc

SEQ ID NO: 2846997 - RNA, 19 nt, Artificial Sequence
  Description of Artificial Sequence: Synthetic oligonucleotide
uaaauuagugccuuuaucc

SEQ ID NO: 2846998 - RNA, 19 nt, Artificial Sequence
  Description of Artificial Sequence: Synthetic oligonucleotide
uuauuuauauuccaagcag

SEQ ID NO: 2846999 - RNA, 19 nt, Artificial Sequence
  Description of Artificial Sequence: Synthetic oligonucleotide
aacauaucuuuugagaggc

SEQ ID NO: 2847000 - RNA, 19 nt, Artificial Sequence
  Description of Artificial Sequence: Synthetic oligonucleotide
uaaaucaucugucugaacu

SEQ ID NO: 2847001 - RNA, 19 nt, Artificial Sequence
  Description of Artificial Sequence: Synthetic oligonucleotide
uauuuauauuccaagcagg

SEQ ID NO: 2847002 - RNA, 19 nt, Artificial Sequence
  Description of Artificial Sequence: Synthetic oligonucleotide
uuauauuccaagcaggccu

SEQ ID NO: 2847003 - RNA, 19 nt, Artificial Sequence
  Description of Artificial Sequence: Synthetic oligonucleotide
uauuaggugaagcagcucc

SEQ ID NO: 2847004 - RNA, 19 nt, Artificial Sequence
  Description of Artificial Sequence: Synthetic oligonucleotide
aauuuaaaucaucugucug

SEQ ID NO: 2847005 - RNA, 19 nt, Artificial Sequence
  Description of Artificial Sequence: Synthetic oligonucleotide
aguaugucuauuuugggag

SEQ ID NO: 2847006 - RNA, 19 nt, Artificial Sequence
  Description of Artificial Sequence: Synthetic oligonucleotide
uucgauacugauuacacug

SEQ ID NO: 2847007 - RNA, 19 nt, Artificial Sequence
  Description of Artificial Sequence: Synthetic oligonucleotide
cuuugucuaaauuagugcc

SEQ ID NO: 2847008 - RNA, 19 nt, Artificial Sequence
  Description of Artificial Sequence: Synthetic oligonucleotide
uaaauuuaaaucaucuguc

SEQ ID NO: 2847009 - RNA, 19 nt, Artificial Sequence
  Description of Artificial Sequence: Synthetic oligonucleotide
auuacacugguuauuaugc

SEQ ID NO: 2847010 - RNA, 19 nt, Artificial Sequence
  Description of Artificial Sequence: Synthetic oligonucleotide
aaauuuaaaucaucugucu

SEQ ID NO: 2847011 - RNA, 19 nt, Artificial Sequence
  Description of Artificial Sequence: Synthetic oligonucleotide
uuagugauccacagcaugg

SEQ ID NO: 2847012 - RNA, 19 nt, Artificial Sequence
  Description of Artificial Sequence: Synthetic oligonucleotide
ucuucauaaguuuuguuug

SEQ ID NO: 2847013 - RNA, 19 nt, Artificial Sequence
  Description of Artificial Sequence: Synthetic oligonucleotide
uuaaauucugcagaaaucu

SEQ ID NO: 2847014 - RNA, 19 nt, Artificial Sequence
  Description of Artificial Sequence: Synthetic oligonucleotide
uuuucuauuaggugaagca

SEQ ID NO: 2847015 - RNA, 19 nt, Artificial Sequence
  Description of Artificial Sequence: Synthetic oligonucleotide
uuuauccauacuuaguucu

SEQ ID NO: 2847016 - RNA, 19 nt, Artificial Sequence
  Description of Artificial Sequence: Synthetic oligonucleotide
ucugcagaaaucucuagag

SEQ ID NO: 2847017 - RNA, 19 nt, Artificial Sequence
  Description of Artificial Sequence: Synthetic oligonucleotide
auuuaaaucaucugucuga

SEQ ID NO: 2847018 - RNA, 19 nt, Artificial Sequence
  Description of Artificial Sequence: Synthetic oligonucleotide
uucuuugucuaaauuagug

SEQ ID NO: 2847019 - RNA, 19 nt, Artificial Sequence
  Description of Artificial Sequence: Synthetic oligonucleotide
ugaucuguccauuaaauuc

SEQ ID NO: 2847020 - RNA, 19 nt, Artificial Sequence
  Description of Artificial Sequence: Synthetic oligonucleotide
uccuaaauuuaaaucaucu

SEQ ID NO: 2847021 - RNA, 19 nt, Artificial Sequence
  Description of Artificial Sequence: Synthetic oligonucleotide
ugaaaauuccuaaauuuaa

SEQ ID NO: 2847022 - RNA, 19 nt, Artificial Sequence
  Description of Artificial Sequence: Synthetic oligonucleotide
aaauuagugccuuuaucca

SEQ ID NO: 2847023 - RNA, 19 nt, Artificial Sequence
  Description of Artificial Sequence: Synthetic oligonucleotide
auuuauauuccaagcaggc

SEQ ID NO: 2847024 - RNA, 19 nt, Artificial Sequence
  Description of Artificial Sequence: Synthetic oligonucleotide
gaacauaucuuuugagagg

SEQ ID NO: 2847025 - RNA, 19 nt, Artificial Sequence
  Description of Artificial Sequence: Synthetic oligonucleotide
ucuuugucuaaauuagugc

SEQ ID NO: 2847026 - RNA, 19 nt, Artificial Sequence
  Description of Artificial Sequence: Synthetic oligonucleotide
aaucaucugucugaacucc

SEQ ID NO: 2847027 - RNA, 19 nt, Artificial Sequence
  Description of Artificial Sequence: Synthetic oligonucleotide
agaagaguuucuaaugucc

SEQ ID NO: 2847028 - RNA, 19 nt, Artificial Sequence
  Description of Artificial Sequence: Synthetic oligonucleotide
aaguaugucuauuuuggga

SEQ ID NO: 2847029 - RNA, 19 nt, Artificial Sequence
  Description of Artificial Sequence: Synthetic oligonucleotide
uucuauuaggugaagcagc

SEQ ID NO: 2847030 - RNA, 19 nt, Artificial Sequence
  Description of Artificial Sequence: Synthetic oligonucleotide
gauuacacugguuauuaug

SEQ ID NO: 2847031 - RNA, 19 nt, Artificial Sequence
  Description of Artificial Sequence: Synthetic oligonucleotide
uuuagugcugaucugucca

SEQ ID NO: 2847032 - RNA, 19 nt, Artificial Sequence
  Description of Artificial Sequence: Synthetic oligonucleotide
uguuucuuugucuaaauua

SEQ ID NO: 2847033 - RNA, 19 nt, Artificial Sequence
  Description of Artificial Sequence: Synthetic oligonucleotide
uguccauuaaauucugcag

SEQ ID NO: 2847034 - RNA, 19 nt, Artificial Sequence
  Description of Artificial Sequence: Synthetic oligonucleotide
cauacuuaguucuugcuug

SEQ ID NO: 2847035 - RNA, 19 nt, Artificial Sequence
  Description of Artificial Sequence: Synthetic oligonucleotide
gaugagaugaagcaacuuc

SEQ ID NO: 2847036 - RNA, 19 nt, Artificial Sequence
  Description of Artificial Sequence: Synthetic oligonucleotide
gaugaagcaacuucuggug

SEQ ID NO: 2847037 - RNA, 19 nt, Artificial Sequence
  Description of Artificial Sequence: Synthetic oligonucleotide
uugggagagguucucacgg

SEQ ID NO: 2847038 - RNA, 19 nt, Artificial Sequence
  Description of Artificial Sequence: Synthetic oligonucleotide
ucuauuuugggagagguuc

SEQ ID NO: 2847039 - RNA, 19 nt, Artificial Sequence
  Description of Artificial Sequence: Synthetic oligonucleotide
uugaaaauuccuaaauuua

SEQ ID NO: 2847040 - RNA, 19 nt, Artificial Sequence
  Description of Artificial Sequence: Synthetic oligonucleotide
ugaugucugacucaguuuc

SEQ ID NO: 2847041 - RNA, 19 nt, Artificial Sequence
  Description of Artificial Sequence: Synthetic oligonucleotide
ugcagaaaucucuagagaa

SEQ ID NO: 2847042 - RNA, 19 nt, Artificial Sequence
  Description of Artificial Sequence: Synthetic oligonucleotide
uggucuucgauacugauua

SEQ ID NO: 2847043 - RNA, 19 nt, Artificial Sequence
  Description of Artificial Sequence: Synthetic oligonucleotide
ucauugaaaauuccuaaau

SEQ ID NO: 2847044 - RNA, 19 nt, Artificial Sequence
  Description of Artificial Sequence: Synthetic oligonucleotide
uuucuaaugucccucucug

SEQ ID NO: 2847045 - RNA, 19 nt, Artificial Sequence
  Description of Artificial Sequence: Synthetic oligonucleotide
acuuugcugaugcaggaac

SEQ ID NO: 2847046 - RNA, 19 nt, Artificial Sequence
  Description of Artificial Sequence: Synthetic oligonucleotide
ggaacauaucuuuugagag

SEQ ID NO: 2847047 - RNA, 19 nt, Artificial Sequence
  Description of Artificial Sequence: Synthetic oligonucleotide
guuucuuugucuaaauuag

SEQ ID NO: 2847048 - RNA, 19 nt, Artificial Sequence
  Description of Artificial Sequence: Synthetic oligonucleotide
ucuucgauacugauuacac

SEQ ID NO: 2847049 - RNA, 19 nt, Artificial Sequence
  Description of Artificial Sequence: Synthetic oligonucleotide
uuucuauuaggugaagcag

SEQ ID NO: 2847050 - RNA, 19 nt, Artificial Sequence
  Description of Artificial Sequence: Synthetic oligonucleotide
uuguuuguuucucuggucu

SEQ ID NO: 2847051 - RNA, 19 nt, Artificial Sequence
  Description of Artificial Sequence: Synthetic oligonucleotide
uagagaagaguuucuaaug

SEQ ID NO: 2847052 - RNA, 19 nt, Artificial Sequence
  Description of Artificial Sequence: Synthetic oligonucleotide
uuucucgaugagaugaagc

SEQ ID NO: 2847053 - RNA, 19 nt, Artificial Sequence
  Description of Artificial Sequence: Synthetic oligonucleotide
uucucgaugagaugaagca

SEQ ID NO: 2847054 - RNA, 19 nt, Artificial Sequence
  Description of Artificial Sequence: Synthetic oligonucleotide
ugcaucauugaaaauuccu

SEQ ID NO: 2847055 - RNA, 19 nt, Artificial Sequence
  Description of Artificial Sequence: Synthetic oligonucleotide
ucgauacugauuacacugg

SEQ ID NO: 2847056 - RNA, 19 nt, Artificial Sequence
  Description of Artificial Sequence: Synthetic oligonucleotide
cauaaguuuuguuuguuuc

SEQ ID NO: 2847057 - RNA, 19 nt, Artificial Sequence
  Description of Artificial Sequence: Synthetic oligonucleotide
agagaagaguuucuaaugu

SEQ ID NO: 2847058 - RNA, 19 nt, Artificial Sequence
  Description of Artificial Sequence: Synthetic oligonucleotide
ucuuuugagaggcuuauuu

SEQ ID NO: 2847059 - RNA, 19 nt, Artificial Sequence
  Description of Artificial Sequence: Synthetic oligonucleotide
uuuugagaggcuuauuuau

SEQ ID NO: 2847060 - RNA, 19 nt, Artificial Sequence
  Description of Artificial Sequence: Synthetic oligonucleotide
uuugucuaaauuagugccu

SEQ ID NO: 2847061 - RNA, 19 nt, Artificial Sequence
  Description of Artificial Sequence: Synthetic oligonucleotide
auccauacuuaguucuugc

SEQ ID NO: 2847062 - RNA, 19 nt, Artificial Sequence
  Description of Artificial Sequence: Synthetic oligonucleotide
ucuauuaggugaagcagcu

SEQ ID NO: 2847063 - RNA, 19 nt, Artificial Sequence
  Description of Artificial Sequence: Synthetic oligonucleotide
uaaugucccucucuguuag

SEQ ID NO: 2847064 - RNA, 19 nt, Artificial Sequence
  Description of Artificial Sequence: Synthetic oligonucleotide
gagaggcuuauuuauauuc

SEQ ID NO: 2847065 - RNA, 19 nt, Artificial Sequence
  Description of Artificial Sequence: Synthetic oligonucleotide
agaugaagcaacuucuggu

SEQ ID NO: 2847066 - RNA, 19 nt, Artificial Sequence
  Description of Artificial Sequence: Synthetic oligonucleotide
aggaacauaucuuuugaga

SEQ ID NO: 2847067 - RNA, 19 nt, Artificial Sequence
  Description of Artificial Sequence: Synthetic oligonucleotide
uauuaugccagcuguuucu

SEQ ID NO: 2847068 - RNA, 19 nt, Artificial Sequence
  Description of Artificial Sequence: Synthetic oligonucleotide
auaaguuuuguuuguuucu

SEQ ID NO: 2847069 - RNA, 19 nt, Artificial Sequence
  Description of Artificial Sequence: Synthetic oligonucleotide
aauuagugccuuuauccau

SEQ ID NO: 2847070 - RNA, 19 nt, Artificial Sequence
  Description of Artificial Sequence: Synthetic oligonucleotide
aggacauuucuucauaagu

SEQ ID NO: 2847071 - RNA, 19 nt, Artificial Sequence
  Description of Artificial Sequence: Synthetic oligonucleotide
ugguuauuaugccagcugu

SEQ ID NO: 2847072 - RNA, 19 nt, Artificial Sequence
  Description of Artificial Sequence: Synthetic oligonucleotide
aucucuagagaagaguuuc

SEQ ID NO: 2847073 - RNA, 19 nt, Artificial Sequence
  Description of Artificial Sequence: Synthetic oligonucleotide
auacugauuacacugguua

SEQ ID NO: 2847074 - RNA, 19 nt, Artificial Sequence
  Description of Artificial Sequence: Synthetic oligonucleotide
agaggcuuauuuauauucc

SEQ ID NO: 2847075 - RNA, 19 nt, Artificial Sequence
  Description of Artificial Sequence: Synthetic oligonucleotide
agugcaucauugaaaauuc

SEQ ID NO: 2847076 - RNA, 19 nt, Artificial Sequence
  Description of Artificial Sequence: Synthetic oligonucleotide
uuugggagagguucucacg

SEQ ID NO: 2847077 - RNA, 19 nt, Artificial Sequence
  Description of Artificial Sequence: Synthetic oligonucleotide
ugaagcagcuccaucugcc

SEQ ID NO: 2847078 - RNA, 19 nt, Artificial Sequence
  Description of Artificial Sequence: Synthetic oligonucleotide
cucgaugagaugaagcaac

SEQ ID NO: 2847079 - RNA, 19 nt, Artificial Sequence
  Description of Artificial Sequence: Synthetic oligonucleotide
uuuauauuccaagcaggcc

SEQ ID NO: 2847080 - RNA, 19 nt, Artificial Sequence
  Description of Artificial Sequence: Synthetic oligonucleotide
uucugcagaaaucucuaga

SEQ ID NO: 2847081 - RNA, 19 nt, Artificial Sequence
  Description of Artificial Sequence: Synthetic oligonucleotide
ugcaggaacauaucuuuug

SEQ ID NO: 2847082 - RNA, 19 nt, Artificial Sequence
  Description of Artificial Sequence: Synthetic oligonucleotide
uaugccagcuguuucuuug

SEQ ID NO: 2847083 - RNA, 19 nt, Artificial Sequence
  Description of Artificial Sequence: Synthetic oligonucleotide
aguuuuguuuguuucucug

SEQ ID NO: 2847084 - RNA, 19 nt, Artificial Sequence
  Description of Artificial Sequence: Synthetic oligonucleotide
aagcaggccuuuuaggaca

SEQ ID NO: 2847085 - RNA, 19 nt, Artificial Sequence
  Description of Artificial Sequence: Synthetic oligonucleotide
aaaucucuagagaagaguu

SEQ ID NO: 2847086 - RNA, 19 nt, Artificial Sequence
  Description of Artificial Sequence: Synthetic oligonucleotide
ucuaaugucccucucuguu

SEQ ID NO: 2847087 - RNA, 19 nt, Artificial Sequence
  Description of Artificial Sequence: Synthetic oligonucleotide
gugaaguaugucuauuuug

SEQ ID NO: 2847088 - RNA, 19 nt, Artificial Sequence
  Description of Artificial Sequence: Synthetic oligonucleotide
ucuguuagugauccacagc

SEQ ID NO: 2847089 - RNA, 19 nt, Artificial Sequence
  Description of Artificial Sequence: Synthetic oligonucleotide
ugagaugaagcaacuucug

SEQ ID NO: 2847090 - RNA, 19 nt, Artificial Sequence
  Description of Artificial Sequence: Synthetic oligonucleotide
ucuaaauuagugccuuuau

SEQ ID NO: 2847091 - RNA, 19 nt, Artificial Sequence
  Description of Artificial Sequence: Synthetic oligonucleotide
uuucucuggucuucgauac

SEQ ID NO: 2847092 - RNA, 19 nt, Artificial Sequence
  Description of Artificial Sequence: Synthetic oligonucleotide
cuguuagugauccacagca

SEQ ID NO: 2847093 - RNA, 19 nt, Artificial Sequence
  Description of Artificial Sequence: Synthetic oligonucleotide
guuagugauccacagcaug

SEQ ID NO: 2847094 - RNA, 19 nt, Artificial Sequence
  Description of Artificial Sequence: Synthetic oligonucleotide
aagaguuucuaaugucccu

SEQ ID NO: 2847095 - RNA, 19 nt, Artificial Sequence
  Description of Artificial Sequence: Synthetic oligonucleotide
ugcugaugcaggaacauau

SEQ ID NO: 2847096 - RNA, 19 nt, Artificial Sequence
  Description of Artificial Sequence: Synthetic oligonucleotide
gaagaguuucuaauguccc

SEQ ID NO: 2847097 - RNA, 19 nt, Artificial Sequence
  Description of Artificial Sequence: Synthetic oligonucleotide
uuuuagugcugaucugucc

SEQ ID NO: 2847098 - RNA, 19 nt, Artificial Sequence
  Description of Artificial Sequence: Synthetic oligonucleotide
gcuuauuuauauuccaagc

SEQ ID NO: 2847099 - RNA, 19 nt, Artificial Sequence
  Description of Artificial Sequence: Synthetic oligonucleotide
uucuuucucccucuggaga

SEQ ID NO: 2847100 - RNA, 19 nt, Artificial Sequence
  Description of Artificial Sequence: Synthetic oligonucleotide
uuuaggacauuucuucaua

SEQ ID NO: 2847101 - RNA, 19 nt, Artificial Sequence
  Description of Artificial Sequence: Synthetic oligonucleotide
agaguuucuaaugucccuc

SEQ ID NO: 2847102 - RNA, 19 nt, Artificial Sequence
  Description of Artificial Sequence: Synthetic oligonucleotide
uuuguuucucuggucuucg

SEQ ID NO: 2847103 - RNA, 19 nt, Artificial Sequence
  Description of Artificial Sequence: Synthetic oligonucleotide
uuuaaaucaucugucugaa

SEQ ID NO: 2847104 - RNA, 19 nt, Artificial Sequence
  Description of Artificial Sequence: Synthetic oligonucleotide
ugucugacucaguuucucg

SEQ ID NO: 2847105 - RNA, 19 nt, Artificial Sequence
  Description of Artificial Sequence: Synthetic oligonucleotide
uagugcaucauugaaaauu

SEQ ID NO: 2847106 - RNA, 19 nt, Artificial Sequence
  Description of Artificial Sequence: Synthetic oligonucleotide
uuauuaugccagcuguuuc

SEQ ID NO: 2847107 - RNA, 19 nt, Artificial Sequence
  Description of Artificial Sequence: Synthetic oligonucleotide
cuaaauuagugccuuuauc

SEQ ID NO: 2847108 - RNA, 19 nt, Artificial Sequence
  Description of Artificial Sequence: Synthetic oligonucleotide
ugccuuuauccauacuuag

SEQ ID NO: 2847109 - RNA, 19 nt, Artificial Sequence
  Description of Artificial Sequence: Synthetic oligonucleotide
uuccaagcaggccuuuuag

SEQ ID NO: 2847110 - RNA, 19 nt, Artificial Sequence
  Description of Artificial Sequence: Synthetic oligonucleotide
ucuagagaagaguuucuaa

SEQ ID NO: 2847111 - RNA, 19 nt, Artificial Sequence
  Description of Artificial Sequence: Synthetic oligonucleotide
uuucuuugucuaaauuagu

SEQ ID NO: 2847112 - RNA, 19 nt, Artificial Sequence
  Description of Artificial Sequence: Synthetic oligonucleotide
aaguuuuguuuguuucucu

SEQ ID NO: 2847113 - RNA, 19 nt, Artificial Sequence
  Description of Artificial Sequence: Synthetic oligonucleotide
aggugaagcagcuccaucu

SEQ ID NO: 2847114 - RNA, 19 nt, Artificial Sequence
  Description of Artificial Sequence: Synthetic oligonucleotide
agauggacaggguacuuug

SEQ ID NO: 2847115 - RNA, 19 nt, Artificial Sequence
  Description of Artificial Sequence: Synthetic oligonucleotide
uuuuaggacauuucuucau

SEQ ID NO: 2847116 - RNA, 19 nt, Artificial Sequence
  Description of Artificial Sequence: Synthetic oligonucleotide
uaggacauuucuucauaag

SEQ ID NO: 2847117 - RNA, 19 nt, Artificial Sequence
  Description of Artificial Sequence: Synthetic oligonucleotide
caggguacuuugcugaugc

SEQ ID NO: 2847118 - RNA, 19 nt, Artificial Sequence
  Description of Artificial Sequence: Synthetic oligonucleotide
uaugucuauuuugggagag

SEQ ID NO: 2847119 - RNA, 19 nt, Artificial Sequence
  Description of Artificial Sequence: Synthetic oligonucleotide
uccaagcaggccuuuuagg

SEQ ID NO: 2847120 - RNA, 19 nt, Artificial Sequence
  Description of Artificial Sequence: Synthetic oligonucleotide
aucauugaaaauuccuaaa

SEQ ID NO: 2847121 - RNA, 19 nt, Artificial Sequence
  Description of Artificial Sequence: Synthetic oligonucleotide
uaaauucugcagaaaucuc

SEQ ID NO: 2847122 - RNA, 19 nt, Artificial Sequence
  Description of Artificial Sequence: Synthetic oligonucleotide
uuacacugguuauuaugcc

SEQ ID NO: 2847123 - RNA, 19 nt, Artificial Sequence
  Description of Artificial Sequence: Synthetic oligonucleotide
acuuaguucuugcuugucu

SEQ ID NO: 2847124 - RNA, 19 nt, Artificial Sequence
  Description of Artificial Sequence: Synthetic oligonucleotide
acuccagcguccuucuugg

SEQ ID NO: 2847125 - RNA, 19 nt, Artificial Sequence
  Description of Artificial Sequence: Synthetic oligonucleotide
ugacucaguuucucgauga

SEQ ID NO: 2847126 - RNA, 19 nt, Artificial Sequence
  Description of Artificial Sequence: Synthetic oligonucleotide
aaccugaugucugacucag

SEQ ID NO: 2847127 - RNA, 19 nt, Artificial Sequence
  Description of Artificial Sequence: Synthetic oligonucleotide
cuuuauccauacuuaguuc

SEQ ID NO: 2847128 - RNA, 19 nt, Artificial Sequence
  Description of Artificial Sequence: Synthetic oligonucleotide
ggcuuauuuauauuccaag

SEQ ID NO: 2847129 - RNA, 19 nt, Artificial Sequence
  Description of Artificial Sequence: Synthetic oligonucleotide
uuugagaggcuuauuuaua

SEQ ID NO: 2847130 - RNA, 19 nt, Artificial Sequence
  Description of Artificial Sequence: Synthetic oligonucleotide
guccauuaaauucugcaga

SEQ ID NO: 2847131 - RNA, 19 nt, Artificial Sequence
  Description of Artificial Sequence: Synthetic oligonucleotide
ugguagugcaucauugaaa

SEQ ID NO: 2847132 - RNA, 19 nt, Artificial Sequence
  Description of Artificial Sequence: Synthetic oligonucleotide
auccacagcaugguagugc

SEQ ID NO: 2847133 - RNA, 19 nt, Artificial Sequence
  Description of Artificial Sequence: Synthetic oligonucleotide
uuaggacauuucuucauaa

SEQ ID NO: 2847134 - RNA, 19 nt, Artificial Sequence
  Description of Artificial Sequence: Synthetic oligonucleotide
ugucugaacuccagcgucc

SEQ ID NO: 2847135 - RNA, 19 nt, Artificial Sequence
  Description of Artificial Sequence: Synthetic oligonucleotide
ugucuauuuugggagaggu

SEQ ID NO: 2847136 - RNA, 19 nt, Artificial Sequence
  Description of Artificial Sequence: Synthetic oligonucleotide
cuggagauggacaggguac

SEQ ID NO: 2847137 - RNA, 19 nt, Artificial Sequence
  Description of Artificial Sequence: Synthetic oligonucleotide
uuuugggagagguucucac

SEQ ID NO: 2847138 - RNA, 19 nt, Artificial Sequence
  Description of Artificial Sequence: Synthetic oligonucleotide
ugauccacagcaugguagu

SEQ ID NO: 2847139 - RNA, 19 nt, Artificial Sequence
  Description of Artificial Sequence: Synthetic oligonucleotide
uuccuaaauuuaaaucauc

SEQ ID NO: 2847140 - RNA, 19 nt, Artificial Sequence
  Description of Artificial Sequence: Synthetic oligonucleotide
ucuggagauggacagggua

SEQ ID NO: 2847141 - RNA, 19 nt, Artificial Sequence
  Description of Artificial Sequence: Synthetic oligonucleotide
gaaaauuccuaaauuuaaa

SEQ ID NO: 2847142 - RNA, 19 nt, Artificial Sequence
  Description of Artificial Sequence: Synthetic oligonucleotide
ugaugcaggaacauaucuu

SEQ ID NO: 2847143 - RNA, 19 nt, Artificial Sequence
  Description of Artificial Sequence: Synthetic oligonucleotide
uccacagcaugguagugca

SEQ ID NO: 2847144 - RNA, 19 nt, Artificial Sequence
  Description of Artificial Sequence: Synthetic oligonucleotide
uaaguuuuguuuguuucuc

SEQ ID NO: 2847145 - RNA, 19 nt, Artificial Sequence
  Description of Artificial Sequence: Synthetic oligonucleotide
gguacuuugcugaugcagg

SEQ ID NO: 2847146 - RNA, 19 nt, Artificial Sequence
  Description of Artificial Sequence: Synthetic oligonucleotide
ucucuggucuucgauacug

SEQ ID NO: 2847147 - RNA, 19 nt, Artificial Sequence
  Description of Artificial Sequence: Synthetic oligonucleotide
uucuggugaaguaugucua

SEQ ID NO: 2847148 - RNA, 19 nt, Artificial Sequence
  Description of Artificial Sequence: Synthetic oligonucleotide
cuguccauuaaauucugca

SEQ ID NO: 2847149 - RNA, 19 nt, Artificial Sequence
  Description of Artificial Sequence: Synthetic oligonucleotide
augagaugaagcaacuucu

SEQ ID NO: 2847150 - RNA, 19 nt, Artificial Sequence
  Description of Artificial Sequence: Synthetic oligonucleotide
gaggcuuauuuauauucca

SEQ ID NO: 2847151 - RNA, 19 nt, Artificial Sequence
  Description of Artificial Sequence: Synthetic oligonucleotide
cucuguuagugauccacag

SEQ ID NO: 2847152 - RNA, 19 nt, Artificial Sequence
  Description of Artificial Sequence: Synthetic oligonucleotide
caucauugaaaauuccuaa

SEQ ID NO: 2847153 - RNA, 19 nt, Artificial Sequence
  Description of Artificial Sequence: Synthetic oligonucleotide
uauauuccaagcaggccuu

SEQ ID NO: 2847154 - RNA, 19 nt, Artificial Sequence
  Description of Artificial Sequence: Synthetic oligonucleotide
ucauaaguuuuguuuguuu

SEQ ID NO: 2847155 - RNA, 19 nt, Artificial Sequence
  Description of Artificial Sequence: Synthetic oligonucleotide
gguagugcaucauugaaaa

SEQ ID NO: 2847156 - RNA, 19 nt, Artificial Sequence
  Description of Artificial Sequence: Synthetic oligonucleotide
aguuucuaaugucccucuc

SEQ ID NO: 2847157 - RNA, 19 nt, Artificial Sequence
  Description of Artificial Sequence: Synthetic oligonucleotide
uccuucuugggagaggcug

SEQ ID NO: 2847158 - RNA, 19 nt, Artificial Sequence
  Description of Artificial Sequence: Synthetic oligonucleotide
caggaacauaucuuuugag

SEQ ID NO: 2847159 - RNA, 19 nt, Artificial Sequence
  Description of Artificial Sequence: Synthetic oligonucleotide
uuuguuuguuucucugguc

SEQ ID NO: 2847160 - RNA, 19 nt, Artificial Sequence
  Description of Artificial Sequence: Synthetic oligonucleotide
ccuuuuaggacauuucuuc

SEQ ID NO: 2847161 - RNA, 19 nt, Artificial Sequence
  Description of Artificial Sequence: Synthetic oligonucleotide
uauccauacuuaguucuug

SEQ ID NO: 2847162 - RNA, 19 nt, Artificial Sequence
  Description of Artificial Sequence: Synthetic oligonucleotide
acacugguuauuaugccag

SEQ ID NO: 2847163 - RNA, 19 nt, Artificial Sequence
  Description of Artificial Sequence: Synthetic oligonucleotide
caacuucuggugaaguaug

SEQ ID NO: 2847164 - RNA, 19 nt, Artificial Sequence
  Description of Artificial Sequence: Synthetic oligonucleotide
ucucuagagaagaguuucu

SEQ ID NO: 2847165 - RNA, 19 nt, Artificial Sequence
  Description of Artificial Sequence: Synthetic oligonucleotide
uccagcguccuucuuggga

SEQ ID NO: 2847166 - RNA, 19 nt, Artificial Sequence
  Description of Artificial Sequence: Synthetic oligonucleotide
auucugcagaaaucucuag

SEQ ID NO: 2847167 - RNA, 19 nt, Artificial Sequence
  Description of Artificial Sequence: Synthetic oligonucleotide
aauucugcagaaaucucua

SEQ ID NO: 2847168 - RNA, 19 nt, Artificial Sequence
  Description of Artificial Sequence: Synthetic oligonucleotide
cuuuuaggacauuucuuca

SEQ ID NO: 2847169 - RNA, 19 nt, Artificial Sequence
  Description of Artificial Sequence: Synthetic oligonucleotide
uguuucucuggucuucgau

SEQ ID NO: 2847170 - RNA, 19 nt, Artificial Sequence
  Description of Artificial Sequence: Synthetic oligonucleotide
cugguuauuaugccagcug

SEQ ID NO: 2847171 - RNA, 19 nt, Artificial Sequence
  Description of Artificial Sequence: Synthetic oligonucleotide
ccuaaauuuaaaucaucug

SEQ ID NO: 2847172 - RNA, 19 nt, Artificial Sequence
  Description of Artificial Sequence: Synthetic oligonucleotide
ucgaugagaugaagcaacu

SEQ ID NO: 2847173 - RNA, 19 nt, Artificial Sequence
  Description of Artificial Sequence: Synthetic oligonucleotide
caagcaggccuuuuaggac

SEQ ID NO: 2847174 - RNA, 19 nt, Artificial Sequence
  Description of Artificial Sequence: Synthetic oligonucleotide
uccauacuuaguucuugcu

SEQ ID NO: 2847175 - RNA, 19 nt, Artificial Sequence
  Description of Artificial Sequence: Synthetic oligonucleotide
augaagcaacuucugguga

SEQ ID NO: 2847176 - RNA, 19 nt, Artificial Sequence
  Description of Artificial Sequence: Synthetic oligonucleotide
ugcugaucuguccauuaaa

SEQ ID NO: 2847177 - RNA, 19 nt, Artificial Sequence
  Description of Artificial Sequence: Synthetic oligonucleotide
ucaguuucucgaugagaug

SEQ ID NO: 2847178 - RNA, 19 nt, Artificial Sequence
  Description of Artificial Sequence: Synthetic oligonucleotide
gaugcaggaacauaucuuu

SEQ ID NO: 2847179 - RNA, 19 nt, Artificial Sequence
  Description of Artificial Sequence: Synthetic oligonucleotide
auuccuaaauuuaaaucau

SEQ ID NO: 2847180 - RNA, 19 nt, Artificial Sequence
  Description of Artificial Sequence: Synthetic oligonucleotide
uuauccauacuuaguucuu

SEQ ID NO: 2847181 - RNA, 19 nt, Artificial Sequence
  Description of Artificial Sequence: Synthetic oligonucleotide
cucucuguuagugauccac

SEQ ID NO: 2847182 - RNA, 19 nt, Artificial Sequence
  Description of Artificial Sequence: Synthetic oligonucleotide
auacuuaguucuugcuugu

SEQ ID NO: 2847183 - RNA, 19 nt, Artificial Sequence
  Description of Artificial Sequence: Synthetic oligonucleotide
uacugauuacacugguuau

SEQ ID NO: 2847184 - RNA, 19 nt, Artificial Sequence
  Description of Artificial Sequence: Synthetic oligonucleotide
uuaaaucaucugucugaac

SEQ ID NO: 2847185 - RNA, 19 nt, Artificial Sequence
  Description of Artificial Sequence: Synthetic oligonucleotide
augguagugcaucauugaa

SEQ ID NO: 2847186 - RNA, 19 nt, Artificial Sequence
  Description of Artificial Sequence: Synthetic oligonucleotide
ucugacucaguuucucgau

SEQ ID NO: 2847187 - RNA, 19 nt, Artificial Sequence
  Description of Artificial Sequence: Synthetic oligonucleotide
agaaaucucuagagaagag

SEQ ID NO: 2847188 - RNA, 19 nt, Artificial Sequence
  Description of Artificial Sequence: Synthetic oligonucleotide
caguuucucgaugagauga

SEQ ID NO: 2847189 - RNA, 19 nt, Artificial Sequence
  Description of Artificial Sequence: Synthetic oligonucleotide
uggugaaguaugucuauuu

SEQ ID NO: 2847190 - RNA, 19 nt, Artificial Sequence
  Description of Artificial Sequence: Synthetic oligonucleotide
gacucaguuucucgaugag

SEQ ID NO: 2847191 - RNA, 19 nt, Artificial Sequence
  Description of Artificial Sequence: Synthetic oligonucleotide
uuagugccuuuauccauac

SEQ ID NO: 2847192 - RNA, 19 nt, Artificial Sequence
  Description of Artificial Sequence: Synthetic oligonucleotide
acuucuggugaaguauguc

SEQ ID NO: 2847193 - RNA, 19 nt, Artificial Sequence
  Description of Artificial Sequence: Synthetic oligonucleotide
acagcaugguagugcauca

SEQ ID NO: 2847194 - RNA, 19 nt, Artificial Sequence
  Description of Artificial Sequence: Synthetic oligonucleotide
ucuggugaaguaugucuau

SEQ ID NO: 2847195 - RNA, 19 nt, Artificial Sequence
  Description of Artificial Sequence: Synthetic oligonucleotide
cagaaaucucuagagaaga

SEQ ID NO: 2847196 - RNA, 19 nt, Artificial Sequence
  Description of Artificial Sequence: Synthetic oligonucleotide
gaaaucucuagagaagagu

SEQ ID NO: 2847197 - RNA, 19 nt, Artificial Sequence
  Description of Artificial Sequence: Synthetic oligonucleotide
uaucuuuugagaggcuuau

SEQ ID NO: 2847198 - RNA, 19 nt, Artificial Sequence
  Description of Artificial Sequence: Synthetic oligonucleotide
uguuagugauccacagcau

SEQ ID NO: 2847199 - RNA, 19 nt, Artificial Sequence
  Description of Artificial Sequence: Synthetic oligonucleotide
ugaacuccagcguccuucu

SEQ ID NO: 2847200 - RNA, 19 nt, Artificial Sequence
  Description of Artificial Sequence: Synthetic oligonucleotide
uucuaaugucccucucugu

SEQ ID NO: 2847201 - RNA, 19 nt, Artificial Sequence
  Description of Artificial Sequence: Synthetic oligonucleotide
ugcaaccugaugucugacu

SEQ ID NO: 2847202 - RNA, 19 nt, Artificial Sequence
  Description of Artificial Sequence: Synthetic oligonucleotide
cuuuugagaggcuuauuua

SEQ ID NO: 2847203 - RNA, 19 nt, Artificial Sequence
  Description of Artificial Sequence: Synthetic oligonucleotide
cuagagaagaguuucuaau

SEQ ID NO: 2847204 - RNA, 19 nt, Artificial Sequence
  Description of Artificial Sequence: Synthetic oligonucleotide
uugucuaaauuagugccuu

SEQ ID NO: 2847205 - RNA, 19 nt, Artificial Sequence
  Description of Artificial Sequence: Synthetic oligonucleotide
augucugacucaguuucuc

SEQ ID NO: 2847206 - RNA, 19 nt, Artificial Sequence
  Description of Artificial Sequence: Synthetic oligonucleotide
ugucccucucuguuaguga

SEQ ID NO: 2847207 - RNA, 19 nt, Artificial Sequence
  Description of Artificial Sequence: Synthetic oligonucleotide
cuucuggugaaguaugucu

SEQ ID NO: 2847208 - RNA, 19 nt, Artificial Sequence
  Description of Artificial Sequence: Synthetic oligonucleotide
uuugcugaugcaggaacau

SEQ ID NO: 2847209 - RNA, 19 nt, Artificial Sequence
  Description of Artificial Sequence: Synthetic oligonucleotide
cucaguuucucgaugagau

SEQ ID NO: 2847210 - RNA, 19 nt, Artificial Sequence
  Description of Artificial Sequence: Synthetic oligonucleotide
ucucgaugagaugaagcaa

SEQ ID NO: 2847211 - RNA, 19 nt, Artificial Sequence
  Description of Artificial Sequence: Synthetic oligonucleotide
caugguagugcaucauuga

SEQ ID NO: 2847212 - RNA, 19 nt, Artificial Sequence
  Description of Artificial Sequence: Synthetic oligonucleotide
aaucucuagagaagaguuu

SEQ ID NO: 2847213 - RNA, 19 nt, Artificial Sequence
  Description of Artificial Sequence: Synthetic oligonucleotide
uuagugcugaucuguccau

SEQ ID NO: 2847214 - RNA, 19 nt, Artificial Sequence
  Description of Artificial Sequence: Synthetic oligonucleotide
guaugucuauuuugggaga

SEQ ID NO: 2847215 - RNA, 19 nt, Artificial Sequence
  Description of Artificial Sequence: Synthetic oligonucleotide
guuucucuggucuucgaua

SEQ ID NO: 2847216 - RNA, 19 nt, Artificial Sequence
  Description of Artificial Sequence: Synthetic oligonucleotide
ucuggucuucgauacugau

SEQ ID NO: 2847217 - RNA, 19 nt, Artificial Sequence
  Description of Artificial Sequence: Synthetic oligonucleotide
ugagaggcuuauuuauauu

SEQ ID NO: 2847218 - RNA, 19 nt, Artificial Sequence
  Description of Artificial Sequence: Synthetic oligonucleotide
cugaacuccagcguccuuc

SEQ ID NO: 2847219 - RNA, 19 nt, Artificial Sequence
  Description of Artificial Sequence: Synthetic oligonucleotide
acugguuauuaugccagcu

SEQ ID NO: 2847220 - RNA, 19 nt, Artificial Sequence
  Description of Artificial Sequence: Synthetic oligonucleotide
cuuugcugaugcaggaaca

SEQ ID NO: 2847221 - RNA, 19 nt, Artificial Sequence
  Description of Artificial Sequence: Synthetic oligonucleotide
gucugacucaguuucucga

SEQ ID NO: 2847222 - RNA, 19 nt, Artificial Sequence
  Description of Artificial Sequence: Synthetic oligonucleotide
augucuauuuugggagagg

SEQ ID NO: 2847223 - RNA, 19 nt, Artificial Sequence
  Description of Artificial Sequence: Synthetic oligonucleotide
cugacucaguuucucgaug

SEQ ID NO: 2847224 - RNA, 19 nt, Artificial Sequence
  Description of Artificial Sequence: Synthetic oligonucleotide
aacuucuggugaaguaugu

SEQ ID NO: 2847225 - RNA, 19 nt, Artificial Sequence
  Description of Artificial Sequence: Synthetic oligonucleotide
gugaagcagcuccaucugc

SEQ ID NO: 2847226 - RNA, 19 nt, Artificial Sequence
  Description of Artificial Sequence: Synthetic oligonucleotide
uguuuguuucucuggucuu

SEQ ID NO: 2847227 - RNA, 19 nt, Artificial Sequence
  Description of Artificial Sequence: Synthetic oligonucleotide
gcagaaaucucuagagaag

SEQ ID NO: 2847228 - RNA, 19 nt, Artificial Sequence
  Description of Artificial Sequence: Synthetic oligonucleotide
ugauuacacugguuauuau

SEQ ID NO: 2847229 - RNA, 19 nt, Artificial Sequence
  Description of Artificial Sequence: Synthetic oligonucleotide
aagcaacuucuggugaagu

SEQ ID NO: 2847230 - RNA, 19 nt, Artificial Sequence
  Description of Artificial Sequence: Synthetic oligonucleotide
guuucuaaugucccucucu

SEQ ID NO: 2847231 - RNA, 19 nt, Artificial Sequence
  Description of Artificial Sequence: Synthetic oligonucleotide
uucauaaguuuuguuuguu

SEQ ID NO: 2847232 - RNA, 19 nt, Artificial Sequence
  Description of Artificial Sequence: Synthetic oligonucleotide
gauggacaggguacuuugc

SEQ ID NO: 2847233 - RNA, 19 nt, Artificial Sequence
  Description of Artificial Sequence: Synthetic oligonucleotide
agugcugaucuguccauua

SEQ ID NO: 2847234 - RNA, 19 nt, Artificial Sequence
  Description of Artificial Sequence: Synthetic oligonucleotide
guuucucgaugagaugaag

SEQ ID NO: 2847235 - RNA, 19 nt, Artificial Sequence
  Description of Artificial Sequence: Synthetic oligonucleotide
uggagauggacaggguacu

SEQ ID NO: 2847236 - RNA, 19 nt, Artificial Sequence
  Description of Artificial Sequence: Synthetic oligonucleotide
gcaaccugaugucugacuc

SEQ ID NO: 2847237 - RNA, 19 nt, Artificial Sequence
  Description of Artificial Sequence: Synthetic oligonucleotide
agcaugguagugcaucauu

SEQ ID NO: 2847238 - RNA, 19 nt, Artificial Sequence
  Description of Artificial Sequence: Synthetic oligonucleotide
guacuuugcugaugcagga

SEQ ID NO: 2847239 - RNA, 19 nt, Artificial Sequence
  Description of Artificial Sequence: Synthetic oligonucleotide
acugauuacacugguuauu

SEQ ID NO: 2847240 - RNA, 19 nt, Artificial Sequence
  Description of Artificial Sequence: Synthetic oligonucleotide
uaggugaagcagcuccauc

SEQ ID NO: 2847241 - RNA, 19 nt, Artificial Sequence
  Description of Artificial Sequence: Synthetic oligonucleotide
auuccaagcaggccuuuua

SEQ ID NO: 2847242 - RNA, 19 nt, Artificial Sequence
  Description of Artificial Sequence: Synthetic oligonucleotide
uagugauccacagcauggu

SEQ ID NO: 2847243 - RNA, 19 nt, Artificial Sequence
  Description of Artificial Sequence: Synthetic oligonucleotide
agcaacuucuggugaagua

SEQ ID NO: 2847244 - RNA, 19 nt, Artificial Sequence
  Description of Artificial Sequence: Synthetic oligonucleotide
cacugguuauuaugccagc

SEQ ID NO: 2847245 - RNA, 19 nt, Artificial Sequence
  Description of Artificial Sequence: Synthetic oligonucleotide
auuagugccuuuauccaua

SEQ ID NO: 2847246 - RNA, 19 nt, Artificial Sequence
  Description of Artificial Sequence: Synthetic oligonucleotide
ggacaggguacuuugcuga

SEQ ID NO: 2847247 - RNA, 19 nt, Artificial Sequence
  Description of Artificial Sequence: Synthetic oligonucleotide
cuccaucugccuucuuacc

SEQ ID NO: 2847248 - RNA, 19 nt, Artificial Sequence
  Description of Artificial Sequence: Synthetic oligonucleotide
acucaguuucucgaugaga

SEQ ID NO: 2847249 - RNA, 19 nt, Artificial Sequence
  Description of Artificial Sequence: Synthetic oligonucleotide
augucccucucuguuagug

SEQ ID NO: 2847250 - RNA, 19 nt, Artificial Sequence
  Description of Artificial Sequence: Synthetic oligonucleotide
auuaggugaagcagcucca

SEQ ID NO: 2847251 - RNA, 19 nt, Artificial Sequence
  Description of Artificial Sequence: Synthetic oligonucleotide
cauugaaaauuccuaaauu

SEQ ID NO: 2847252 - RNA, 19 nt, Artificial Sequence
  Description of Artificial Sequence: Synthetic oligonucleotide
gucuucgauacugauuaca

SEQ ID NO: 2847253 - RNA, 19 nt, Artificial Sequence
  Description of Artificial Sequence: Synthetic oligonucleotide
ggguacuuugcugaugcag

SEQ ID NO: 2847254 - RNA, 19 nt, Artificial Sequence
  Description of Artificial Sequence: Synthetic oligonucleotide
ucucccucuggagauggac

SEQ ID NO: 2847255 - RNA, 19 nt, Artificial Sequence
  Description of Artificial Sequence: Synthetic oligonucleotide
auuuugggagagguucuca

SEQ ID NO: 2847256 - RNA, 19 nt, Artificial Sequence
  Description of Artificial Sequence: Synthetic oligonucleotide
ggugaagcagcuccaucug

SEQ ID NO: 2847257 - RNA, 19 nt, Artificial Sequence
  Description of Artificial Sequence: Synthetic oligonucleotide
ccagcguccuucuugggag

SEQ ID NO: 2847258 - RNA, 19 nt, Artificial Sequence
  Description of Artificial Sequence: Synthetic oligonucleotide
agugauccacagcauggua

SEQ ID NO: 2847259 - RNA, 19 nt, Artificial Sequence
  Description of Artificial Sequence: Synthetic oligonucleotide
gcaggaacauaucuuuuga

SEQ ID NO: 2847260 - RNA, 19 nt, Artificial Sequence
  Description of Artificial Sequence: Synthetic oligonucleotide
cugcagaaaucucuagaga

SEQ ID NO: 2847261 - RNA, 19 nt, Artificial Sequence
  Description of Artificial Sequence: Synthetic oligonucleotide
cuucauaaguuuuguuugu

SEQ ID NO: 2847262 - RNA, 19 nt, Artificial Sequence
  Description of Artificial Sequence: Synthetic oligonucleotide
uucucuggucuucgauacu

SEQ ID NO: 2847263 - RNA, 19 nt, Artificial Sequence
  Description of Artificial Sequence: Synthetic oligonucleotide
cugauuacacugguuauua

SEQ ID NO: 2847264 - RNA, 19 nt, Artificial Sequence
  Description of Artificial Sequence: Synthetic oligonucleotide
auaucuuuugagaggcuua

SEQ ID NO: 2847265 - RNA, 19 nt, Artificial Sequence
  Description of Artificial Sequence: Synthetic oligonucleotide
cuaaugucccucucuguua

SEQ ID NO: 2847266 - RNA, 19 nt, Artificial Sequence
  Description of Artificial Sequence: Synthetic oligonucleotide
ugggagagguucucacggu

SEQ ID NO: 2847267 - RNA, 19 nt, Artificial Sequence
  Description of Artificial Sequence: Synthetic oligonucleotide
uuguuucucuggucuucga

SEQ ID NO: 2847268 - RNA, 19 nt, Artificial Sequence
  Description of Artificial Sequence: Synthetic oligonucleotide
uuaggugaagcagcuccau

SEQ ID NO: 2847269 - RNA, 19 nt, Artificial Sequence
  Description of Artificial Sequence: Synthetic oligonucleotide
gcuccaucugccuucuuac

SEQ ID NO: 2847270 - RNA, 19 nt, Artificial Sequence
  Description of Artificial Sequence: Synthetic oligonucleotide
gcaugguagugcaucauug

SEQ ID NO: 2847271 - RNA, 19 nt, Artificial Sequence
  Description of Artificial Sequence: Synthetic oligonucleotide
gaguuucuaaugucccucu

SEQ ID NO: 2847272 - RNA, 19 nt, Artificial Sequence
  Description of Artificial Sequence: Synthetic oligonucleotide
ugucuaaauuagugccuuu

SEQ ID NO: 2847273 - RNA, 19 nt, Artificial Sequence
  Description of Artificial Sequence: Synthetic oligonucleotide
agcuguuucuuugucuaaa

SEQ ID NO: 2847274 - RNA, 19 nt, Artificial Sequence
  Description of Artificial Sequence: Synthetic oligonucleotide
gucuaaauuagugccuuua

SEQ ID NO: 2847275 - RNA, 19 nt, Artificial Sequence
  Description of Artificial Sequence: Synthetic oligonucleotide
ccaagcaggccuuuuagga

SEQ ID NO: 2847276 - RNA, 19 nt, Artificial Sequence
  Description of Artificial Sequence: Synthetic oligonucleotide
cugaugcaggaacauaucu

SEQ ID NO: 2847277 - RNA, 19 nt, Artificial Sequence
  Description of Artificial Sequence: Synthetic oligonucleotide
ccucuggagauggacaggg

SEQ ID NO: 2847278 - RNA, 19 nt, Artificial Sequence
  Description of Artificial Sequence: Synthetic oligonucleotide
cuuaguucuugcuugucuu

SEQ ID NO: 2847279 - RNA, 19 nt, Artificial Sequence
  Description of Artificial Sequence: Synthetic oligonucleotide
aggcuuauuuauauuccaa

SEQ ID NO: 2847280 - RNA, 19 nt, Artificial Sequence
  Description of Artificial Sequence: Synthetic oligonucleotide
aucuguccauuaaauucug

SEQ ID NO: 2847281 - RNA, 19 nt, Artificial Sequence
  Description of Artificial Sequence: Synthetic oligonucleotide
gugcaucauugaaaauucc

SEQ ID NO: 2847282 - RNA, 19 nt, Artificial Sequence
  Description of Artificial Sequence: Synthetic oligonucleotide
gauccacagcaugguagug

SEQ ID NO: 2847283 - RNA, 19 nt, Artificial Sequence
  Description of Artificial Sequence: Synthetic oligonucleotide
cuauuuugggagagguucu

SEQ ID NO: 2847284 - RNA, 19 nt, Artificial Sequence
  Description of Artificial Sequence: Synthetic oligonucleotide
caaccugaugucugacuca

SEQ ID NO: 2847285 - RNA, 19 nt, Artificial Sequence
  Description of Artificial Sequence: Synthetic oligonucleotide
cucccucuggagauggaca

SEQ ID NO: 2847286 - RNA, 19 nt, Artificial Sequence
  Description of Artificial Sequence: Synthetic oligonucleotide
gggagagguucucacggug

SEQ ID NO: 2847287 - RNA, 19 nt, Artificial Sequence
  Description of Artificial Sequence: Synthetic oligonucleotide
guuauuaugccagcuguuu

SEQ ID NO: 2847288 - RNA, 19 nt, Artificial Sequence
  Description of Artificial Sequence: Synthetic oligonucleotide
auuaugccagcuguuucuu

SEQ ID NO: 2847289 - RNA, 19 nt, Artificial Sequence
  Description of Artificial Sequence: Synthetic oligonucleotide
ucccucucuguuagugauc

SEQ ID NO: 2847290 - RNA, 19 nt, Artificial Sequence
  Description of Artificial Sequence: Synthetic oligonucleotide
acaggguacuuugcugaug

SEQ ID NO: 2847291 - RNA, 19 nt, Artificial Sequence
  Description of Artificial Sequence: Synthetic oligonucleotide
uuaugccagcuguuucuuu

SEQ ID NO: 2847292 - RNA, 19 nt, Artificial Sequence
  Description of Artificial Sequence: Synthetic oligonucleotide
uacuuaguucuugcuuguc

SEQ ID NO: 2847293 - RNA, 19 nt, Artificial Sequence
  Description of Artificial Sequence: Synthetic oligonucleotide
cccucucuguuagugaucc

SEQ ID NO: 2847294 - RNA, 19 nt, Artificial Sequence
  Description of Artificial Sequence: Synthetic oligonucleotide
gcaucauugaaaauuccua

SEQ ID NO: 2847295 - RNA, 19 nt, Artificial Sequence
  Description of Artificial Sequence: Synthetic oligonucleotide
gaagcagcuccaucugccu

SEQ ID NO: 2847296 - RNA, 19 nt, Artificial Sequence
  Description of Artificial Sequence: Synthetic oligonucleotide
cuucgauacugauuacacu

SEQ ID NO: 2847297 - RNA, 19 nt, Artificial Sequence
  Description of Artificial Sequence: Synthetic oligonucleotide
uagugccuuuauccauacu

SEQ ID NO: 2847298 - RNA, 19 nt, Artificial Sequence
  Description of Artificial Sequence: Synthetic oligonucleotide
cuauuaggugaagcagcuc

SEQ ID NO: 2847299 - RNA, 19 nt, Artificial Sequence
  Description of Artificial Sequence: Synthetic oligonucleotide
ggccuuuuaggacauuucu

SEQ ID NO: 2847300 - RNA, 19 nt, Artificial Sequence
  Description of Artificial Sequence: Synthetic oligonucleotide
uugcugaugcaggaacaua

SEQ ID NO: 2847301 - RNA, 19 nt, Artificial Sequence
  Description of Artificial Sequence: Synthetic oligonucleotide
agcguccuucuugggagag

SEQ ID NO: 2847302 - RNA, 19 nt, Artificial Sequence
  Description of Artificial Sequence: Synthetic oligonucleotide
uauuccaagcaggccuuuu

SEQ ID NO: 2847303 - RNA, 19 nt, Artificial Sequence
  Description of Artificial Sequence: Synthetic oligonucleotide
cucuggucuucgauacuga

SEQ ID NO: 2847304 - RNA, 19 nt, Artificial Sequence
  Description of Artificial Sequence: Synthetic oligonucleotide
gauacugauuacacugguu

SEQ ID NO: 2847305 - RNA, 19 nt, Artificial Sequence
  Description of Artificial Sequence: Synthetic oligonucleotide
aggguacuuugcugaugca

SEQ ID NO: 2847306 - RNA, 19 nt, Artificial Sequence
  Description of Artificial Sequence: Synthetic oligonucleotide
uucucccucuggagaugga

SEQ ID NO: 2847307 - RNA, 19 nt, Artificial Sequence
  Description of Artificial Sequence: Synthetic oligonucleotide
cucuagagaagaguuucua

SEQ ID NO: 2847308 - RNA, 19 nt, Artificial Sequence
  Description of Artificial Sequence: Synthetic oligonucleotide
ucugaacuccagcguccuu

SEQ ID NO: 2847309 - RNA, 19 nt, Artificial Sequence
  Description of Artificial Sequence: Synthetic oligonucleotide
gugcugaucuguccauuaa

SEQ ID NO: 2847310 - RNA, 19 nt, Artificial Sequence
  Description of Artificial Sequence: Synthetic oligonucleotide
ggacauuucuucauaaguu

SEQ ID NO: 2847311 - RNA, 19 nt, Artificial Sequence
  Description of Artificial Sequence: Synthetic oligonucleotide
cauaucuuuugagaggcuu

SEQ ID NO: 2847312 - RNA, 19 nt, Artificial Sequence
  Description of Artificial Sequence: Synthetic oligonucleotide
ccuuuauccauacuuaguu

SEQ ID NO: 2847313 - RNA, 19 nt, Artificial Sequence
  Description of Artificial Sequence: Synthetic oligonucleotide
acauaucuuuugagaggcu

SEQ ID NO: 2847314 - RNA, 19 nt, Artificial Sequence
  Description of Artificial Sequence: Synthetic oligonucleotide
ggugaaguaugucuauuuu

SEQ ID NO: 2847315 - RNA, 19 nt, Artificial Sequence
  Description of Artificial Sequence: Synthetic oligonucleotide
cugaucuguccauuaaauu

SEQ ID NO: 2847316 - RNA, 19 nt, Artificial Sequence
  Description of Artificial Sequence: Synthetic oligonucleotide
gaugucugacucaguuucu

SEQ ID NO: 2847317 - RNA, 19 nt, Artificial Sequence
  Description of Artificial Sequence: Synthetic oligonucleotide
gagguucucacgguguuuu

SEQ ID NO: 2847318 - RNA, 19 nt, Artificial Sequence
  Description of Artificial Sequence: Synthetic oligonucleotide
ccagcuguuucuuugucua

SEQ ID NO: 2847319 - RNA, 19 nt, Artificial Sequence
  Description of Artificial Sequence: Synthetic oligonucleotide
gucccucucuguuagugau

SEQ ID NO: 2847320 - RNA, 19 nt, Artificial Sequence
  Description of Artificial Sequence: Synthetic oligonucleotide
cuccagcguccuucuuggg

SEQ ID NO: 2847321 - RNA, 19 nt, Artificial Sequence
  Description of Artificial Sequence: Synthetic oligonucleotide
uagugcugaucuguccauu

SEQ ID NO: 2847322 - RNA, 19 nt, Artificial Sequence
  Description of Artificial Sequence: Synthetic oligonucleotide
gacaggguacuuugcugau

SEQ ID NO: 2847323 - RNA, 19 nt, Artificial Sequence
  Description of Artificial Sequence: Synthetic oligonucleotide
cguccuucuugggagaggc

SEQ ID NO: 2847324 - RNA, 19 nt, Artificial Sequence
  Description of Artificial Sequence: Synthetic oligonucleotide
gagagguucucacgguguu

SEQ ID NO: 2847325 - RNA, 19 nt, Artificial Sequence
  Description of Artificial Sequence: Synthetic oligonucleotide
augcaggaacauaucuuuu

SEQ ID NO: 2847326 - RNA, 19 nt, Artificial Sequence
  Description of Artificial Sequence: Synthetic oligonucleotide
gcaacuucuggugaaguau

SEQ ID NO: 2847327 - RNA, 19 nt, Artificial Sequence
  Description of Artificial Sequence: Synthetic oligonucleotide
agagguucucacgguguuu

SEQ ID NO: 2847328 - RNA, 19 nt, Artificial Sequence
  Description of Artificial Sequence: Synthetic oligonucleotide
gcugaugcaggaacauauc

SEQ ID NO: 2847329 - RNA, 19 nt, Artificial Sequence
  Description of Artificial Sequence: Synthetic oligonucleotide
ggucuucgauacugauuac

SEQ ID NO: 2847330 - RNA, 19 nt, Artificial Sequence
  Description of Artificial Sequence: Synthetic oligonucleotide
aucuuuugagaggcuuauu

SEQ ID NO: 2847331 - RNA, 19 nt, Artificial Sequence
  Description of Artificial Sequence: Synthetic oligonucleotide
gagauggacaggguacuuu

SEQ ID NO: 2847332 - RNA, 19 nt, Artificial Sequence
  Description of Artificial Sequence: Synthetic oligonucleotide
cuguuucuuugucuaaauu

SEQ ID NO: 2847333 - RNA, 19 nt, Artificial Sequence
  Description of Artificial Sequence: Synthetic oligonucleotide
cuggucuucgauacugauu

SEQ ID NO: 2847334 - RNA, 19 nt, Artificial Sequence
  Description of Artificial Sequence: Synthetic oligonucleotide
cugaugucugacucaguuu

SEQ ID NO: 2847335 - RNA, 19 nt, Artificial Sequence
  Description of Artificial Sequence: Synthetic oligonucleotide
gcugaucuguccauuaaau

SEQ ID NO: 2847336 - RNA, 19 nt, Artificial Sequence
  Description of Artificial Sequence: Synthetic oligonucleotide
guagugcaucauugaaaau

SEQ ID NO: 2847337 - RNA, 19 nt, Artificial Sequence
  Description of Artificial Sequence: Synthetic oligonucleotide
auauuccaagcaggccuuu

SEQ ID NO: 2847338 - RNA, 19 nt, Artificial Sequence
  Description of Artificial Sequence: Synthetic oligonucleotide
cagcuguuucuuugucuaa

SEQ ID NO: 2847339 - RNA, 19 nt, Artificial Sequence
  Description of Artificial Sequence: Synthetic oligonucleotide
gcuguuucuuugucuaaau

SEQ ID NO: 2847340 - RNA, 19 nt, Artificial Sequence
  Description of Artificial Sequence: Synthetic oligonucleotide
agcaggccuuuuaggacau

SEQ ID NO: 2847341 - RNA, 19 nt, Artificial Sequence
  Description of Artificial Sequence: Synthetic oligonucleotide
ccugaugucugacucaguu

SEQ ID NO: 2847342 - RNA, 19 nt, Artificial Sequence
  Description of Artificial Sequence: Synthetic oligonucleotide
ggagagguucucacggugu

SEQ ID NO: 2847343 - RNA, 19 nt, Artificial Sequence
  Description of Artificial Sequence: Synthetic oligonucleotide
ccauacuuaguucuugcuu

SEQ ID NO: 2847344 - RNA, 19 nt, Artificial Sequence
  Description of Artificial Sequence: Synthetic oligonucleotide
cagcguccuucuugggaga

SEQ ID NO: 2847345 - RNA, 19 nt, Artificial Sequence
  Description of Artificial Sequence: Synthetic oligonucleotide
gccuuuauccauacuuagu

SEQ ID NO: 2847346 - RNA, 19 nt, Artificial Sequence
  Description of Artificial Sequence: Synthetic oligonucleotide
gucugaacuccagcguccu

SEQ ID NO: 2847347 - RNA, 19 nt, Artificial Sequence
  Description of Artificial Sequence: Synthetic oligonucleotide
gcguccuucuugggagagg

SEQ ID NO: 2847348 - RNA, 19 nt, Artificial Sequence
  Description of Artificial Sequence: Synthetic oligonucleotide
cccucuggagauggacagg

SEQ ID NO: 2847349 - RNA, 19 nt, Artificial Sequence
  Description of Artificial Sequence: Synthetic oligonucleotide
gucuauuuugggagagguu

SEQ ID NO: 2847350 - RNA, 19 nt, Artificial Sequence
  Description of Artificial Sequence: Synthetic oligonucleotide
caggccuuuuaggacauuu

SEQ ID NO: 2847351 - RNA, 19 nt, Artificial Sequence
  Description of Artificial Sequence: Synthetic oligonucleotide
caucugccuucuuaccuuu

SEQ ID NO: 2847352 - RNA, 19 nt, Artificial Sequence
  Description of Artificial Sequence: Synthetic oligonucleotide
gguuauuaugccagcuguu

SEQ ID NO: 2847353 - RNA, 19 nt, Artificial Sequence
  Description of Artificial Sequence: Synthetic oligonucleotide
accugaugucugacucagu

SEQ ID NO: 2847354 - RNA, 19 nt, Artificial Sequence
  Description of Artificial Sequence: Synthetic oligonucleotide
cuggugaaguaugucuauu

SEQ ID NO: 2847355 - RNA, 19 nt, Artificial Sequence
  Description of Artificial Sequence: Synthetic oligonucleotide
gccuuuuaggacauuucuu

SEQ ID NO: 2847356 - RNA, 19 nt, Artificial Sequence
  Description of Artificial Sequence: Synthetic oligonucleotide
aucugccuucuuaccuuuu

SEQ ID NO: 2847357 - RNA, 19 nt, Artificial Sequence
  Description of Artificial Sequence: Synthetic oligonucleotide
ccaucugccuucuuaccuu

SEQ ID NO: 2847358 - RNA, 19 nt, Artificial Sequence
  Description of Artificial Sequence: Synthetic oligonucleotide
cgauacugauuacacuggu

SEQ ID NO: 2847359 - RNA, 19 nt, Artificial Sequence
  Description of Artificial Sequence: Synthetic oligonucleotide
gaacuccagcguccuucuu

SEQ ID NO: 2847360 - RNA, 19 nt, Artificial Sequence
  Description of Artificial Sequence: Synthetic oligonucleotide
cagcaugguagugcaucau

SEQ ID NO: 2847361 - RNA, 19 nt, Artificial Sequence
  Description of Artificial Sequence: Synthetic oligonucleotide
ccucucuguuagugaucca

SEQ ID NO: 2847362 - RNA, 19 nt, Artificial Sequence
  Description of Artificial Sequence: Synthetic oligonucleotide
ggagauggacaggguacuu

SEQ ID NO: 2847363 - RNA, 19 nt, Artificial Sequence
  Description of Artificial Sequence: Synthetic oligonucleotide
gcagcuccaucugccuucu

SEQ ID NO: 2847364 - RNA, 19 nt, Artificial Sequence
  Description of Artificial Sequence: Synthetic oligonucleotide
cgaugagaugaagcaacuu

SEQ ID NO: 2847365 - RNA, 19 nt, Artificial Sequence
  Description of Artificial Sequence: Synthetic oligonucleotide
cagcuccaucugccuucuu

SEQ ID NO: 2847366 - RNA, 19 nt, Artificial Sequence
  Description of Artificial Sequence: Synthetic oligonucleotide
gcaggccuuuuaggacauu

SEQ ID NO: 2847367 - RNA, 19 nt, Artificial Sequence
  Description of Artificial Sequence: Synthetic oligonucleotide
uucucuaggaccuucaugg

SEQ ID NO: 2847368 - RNA, 19 nt, Artificial Sequence
  Description of Artificial Sequence: Synthetic oligonucleotide
uuuucuagcaccuccaucu

SEQ ID NO: 2847369 - RNA, 19 nt, Artificial Sequence
  Description of Artificial Sequence: Synthetic oligonucleotide
auagaagcggaagauaggc

SEQ ID NO: 2847370 - RNA, 19 nt, Artificial Sequence
  Description of Artificial Sequence: Synthetic oligonucleotide
gugcacuugauauagaagc

SEQ ID NO: 2847371 - RNA, 19 nt, Artificial Sequence
  Description of Artificial Sequence: Synthetic oligonucleotide
ugucuuacaccucauguug

SEQ ID NO: 2847372 - RNA, 19 nt, Artificial Sequence
  Description of Artificial Sequence: Synthetic oligonucleotide
agauguauuccccacaugu

SEQ ID NO: 2847373 - RNA, 19 nt, Artificial Sequence
  Description of Artificial Sequence: Synthetic oligonucleotide
agaagcggaagauaggcag

SEQ ID NO: 2847374 - RNA, 19 nt, Artificial Sequence
  Description of Artificial Sequence: Synthetic oligonucleotide
uugauauagaagcggaaga

SEQ ID NO: 2847375 - RNA, 19 nt, Artificial Sequence
  Description of Artificial Sequence: Synthetic oligonucleotide
ugcacuugauauagaagcg

SEQ ID NO: 2847376 - RNA, 19 nt, Artificial Sequence
  Description of Artificial Sequence: Synthetic oligonucleotide
uauagaagcggaagauagg

SEQ ID NO: 2847377 - RNA, 19 nt, Artificial Sequence
  Description of Artificial Sequence: Synthetic oligonucleotide
ucagccuggaaauuucgcg

SEQ ID NO: 2847378 - RNA, 19 nt, Artificial Sequence
  Description of Artificial Sequence: Synthetic oligonucleotide
ucugucuugaaggugaucu

SEQ ID NO: 2847379 - RNA, 19 nt, Artificial Sequence
  Description of Artificial Sequence: Synthetic oligonucleotide
auauagaagcggaagauag

SEQ ID NO: 2847380 - RNA, 19 nt, Artificial Sequence
  Description of Artificial Sequence: Synthetic oligonucleotide
ucuaggaccuucauggggu

SEQ ID NO: 2847381 - RNA, 19 nt, Artificial Sequence
  Description of Artificial Sequence: Synthetic oligonucleotide
uccgggucugucuugaagg

SEQ ID NO: 2847382 - RNA, 19 nt, Artificial Sequence
  Description of Artificial Sequence: Synthetic oligonucleotide
uuucgugcgguucucuagg

SEQ ID NO: 2847383 - RNA, 19 nt, Artificial Sequence
  Description of Artificial Sequence: Synthetic oligonucleotide
aagauaggcagacccaggu

SEQ ID NO: 2847384 - RNA, 19 nt, Artificial Sequence
  Description of Artificial Sequence: Synthetic oligonucleotide
cuugauauagaagcggaag

SEQ ID NO: 2847385 - RNA, 19 nt, Artificial Sequence
  Description of Artificial Sequence: Synthetic oligonucleotide
ugucuugaaggugaucucg

SEQ ID NO: 2847386 - RNA, 19 nt, Artificial Sequence
  Description of Artificial Sequence: Synthetic oligonucleotide
uggacgguuucuuugcggg

SEQ ID NO: 2847387 - RNA, 19 nt, Artificial Sequence
  Description of Artificial Sequence: Synthetic oligonucleotide
aaggugaucucggccaagc

SEQ ID NO: 2847388 - RNA, 19 nt, Artificial Sequence
  Description of Artificial Sequence: Synthetic oligonucleotide
caugggguuguucagcucc

SEQ ID NO: 2847389 - RNA, 19 nt, Artificial Sequence
  Description of Artificial Sequence: Synthetic oligonucleotide
aucucggccaagcagcgcg

SEQ ID NO: 2847390 - RNA, 19 nt, Artificial Sequence
  Description of Artificial Sequence: Synthetic oligonucleotide
acgcuuuuccuccuccucc

SEQ ID NO: 2847391 - RNA, 19 nt, Artificial Sequence
  Description of Artificial Sequence: Synthetic oligonucleotide
auguauuccccacaugucu

SEQ ID NO: 2847392 - RNA, 19 nt, Artificial Sequence
  Description of Artificial Sequence: Synthetic oligonucleotide
aacuucuucccuuguagau

SEQ ID NO: 2847393 - RNA, 19 nt, Artificial Sequence
  Description of Artificial Sequence: Synthetic oligonucleotide
uccaucuccagcuucgagu

SEQ ID NO: 2847394 - RNA, 19 nt, Artificial Sequence
  Description of Artificial Sequence: Synthetic oligonucleotide
ucuuugcgggcauugaacu

SEQ ID NO: 2847395 - RNA, 19 nt, Artificial Sequence
  Description of Artificial Sequence: Synthetic oligonucleotide
uucuuugcgggcauugaac

SEQ ID NO: 2847396 - RNA, 19 nt, Artificial Sequence
  Description of Artificial Sequence: Synthetic oligonucleotide
ugcugcagcagcauggccu

SEQ ID NO: 2847397 - RNA, 19 nt, Artificial Sequence
  Description of Artificial Sequence: Synthetic oligonucleotide
uccagcuucgagucuuucg

SEQ ID NO: 2847398 - RNA, 19 nt, Artificial Sequence
  Description of Artificial Sequence: Synthetic oligonucleotide
uguagucuguguucuccgg

SEQ ID NO: 2847399 - RNA, 19 nt, Artificial Sequence
  Description of Artificial Sequence: Synthetic oligonucleotide
aagcggaagauaggcagac

SEQ ID NO: 2847400 - RNA, 19 nt, Artificial Sequence
  Description of Artificial Sequence: Synthetic oligonucleotide
guaggccucguucuggacg

SEQ ID NO: 2847401 - RNA, 19 nt, Artificial Sequence
  Description of Artificial Sequence: Synthetic oligonucleotide
uaggccucguucuggacgg

SEQ ID NO: 2847402 - RNA, 19 nt, Artificial Sequence
  Description of Artificial Sequence: Synthetic oligonucleotide
ugguucagguccuucagcu

SEQ ID NO: 2847403 - RNA, 19 nt, Artificial Sequence
  Description of Artificial Sequence: Synthetic oligonucleotide
ugauauagaagcggaagau

SEQ ID NO: 2847404 - RNA, 19 nt, Artificial Sequence
  Description of Artificial Sequence: Synthetic oligonucleotide
accuucaugggguuguuca

SEQ ID NO: 2847405 - RNA, 19 nt, Artificial Sequence
  Description of Artificial Sequence: Synthetic oligonucleotide
uggaaauuucgcguggccc

SEQ ID NO: 2847406 - RNA, 19 nt, Artificial Sequence
  Description of Artificial Sequence: Synthetic oligonucleotide
uuccccacaugucuuacac

SEQ ID NO: 2847407 - RNA, 19 nt, Artificial Sequence
  Description of Artificial Sequence: Synthetic oligonucleotide
uucuggacgguuucuuugc

SEQ ID NO: 2847408 - RNA, 19 nt, Artificial Sequence
  Description of Artificial Sequence: Synthetic oligonucleotide
ugaucucggccaagcagcg

SEQ ID NO: 2847409 - RNA, 19 nt, Artificial Sequence
  Description of Artificial Sequence: Synthetic oligonucleotide
cucuaggaccuucaugggg

SEQ ID NO: 2847410 - RNA, 19 nt, Artificial Sequence
  Description of Artificial Sequence: Synthetic oligonucleotide
ucuggacgguuucuuugcg

SEQ ID NO: 2847411 - RNA, 19 nt, Artificial Sequence
  Description of Artificial Sequence: Synthetic oligonucleotide
cucucgcucaucuuccucc

SEQ ID NO: 2847412 - RNA, 19 nt, Artificial Sequence
  Description of Artificial Sequence: Synthetic oligonucleotide
guagucuguguucuccggg

SEQ ID NO: 2847413 - RNA, 19 nt, Artificial Sequence
  Description of Artificial Sequence: Synthetic oligonucleotide
auuucgcguggccccaugc

SEQ ID NO: 2847414 - RNA, 19 nt, Artificial Sequence
  Description of Artificial Sequence: Synthetic oligonucleotide
uuucuuugcgggcauugaa

SEQ ID NO: 2847415 - RNA, 19 nt, Artificial Sequence
  Description of Artificial Sequence: Synthetic oligonucleotide
ggaaauuucgcguggcccc

SEQ ID NO: 2847416 - RNA, 19 nt, Artificial Sequence
  Description of Artificial Sequence: Synthetic oligonucleotide
cuucucucgcucaucuucc

SEQ ID NO: 2847417 - RNA, 19 nt, Artificial Sequence
  Description of Artificial Sequence: Synthetic oligonucleotide
uuguagauguauuccccac

SEQ ID NO: 2847418 - RNA, 19 nt, Artificial Sequence
  Description of Artificial Sequence: Synthetic oligonucleotide
ucucuaggaccuucauggg

SEQ ID NO: 2847419 - RNA, 19 nt, Artificial Sequence
  Description of Artificial Sequence: Synthetic oligonucleotide
cauugaacuucuucccuug

SEQ ID NO: 2847420 - RNA, 19 nt, Artificial Sequence
  Description of Artificial Sequence: Synthetic oligonucleotide
uucaugggguuguucagcu

SEQ ID NO: 2847421 - RNA, 19 nt, Artificial Sequence
  Description of Artificial Sequence: Synthetic oligonucleotide
cugcagguuuucuagcacc

SEQ ID NO: 2847422 - RNA, 19 nt, Artificial Sequence
  Description of Artificial Sequence: Synthetic oligonucleotide
caugguguagucuguguuc

SEQ ID NO: 2847423 - RNA, 19 nt, Artificial Sequence
  Description of Artificial Sequence: Synthetic oligonucleotide
ugcagguuuucuagcaccu

SEQ ID NO: 2847424 - RNA, 19 nt, Artificial Sequence
  Description of Artificial Sequence: Synthetic oligonucleotide
ucuugaaggugaucucggc

SEQ ID NO: 2847425 - RNA, 19 nt, Artificial Sequence
  Description of Artificial Sequence: Synthetic oligonucleotide
uuugcgggcauugaacuuc

SEQ ID NO: 2847426 - RNA, 19 nt, Artificial Sequence
  Description of Artificial Sequence: Synthetic oligonucleotide
uagaagcggaagauaggca

SEQ ID NO: 2847427 - RNA, 19 nt, Artificial Sequence
  Description of Artificial Sequence: Synthetic oligonucleotide
gugaucucggccaagcagc

SEQ ID NO: 2847428 - RNA, 19 nt, Artificial Sequence
  Description of Artificial Sequence: Synthetic oligonucleotide
guucuggacgguuucuuug

SEQ ID NO: 2847429 - RNA, 19 nt, Artificial Sequence
  Description of Artificial Sequence: Synthetic oligonucleotide
uguauuccccacaugucuu

SEQ ID NO: 2847430 - RNA, 19 nt, Artificial Sequence
  Description of Artificial Sequence: Synthetic oligonucleotide
uucccuuguagauguauuc

SEQ ID NO: 2847431 - RNA, 19 nt, Artificial Sequence
  Description of Artificial Sequence: Synthetic oligonucleotide
cuuucgugcgguucucuag

SEQ ID NO: 2847432 - RNA, 19 nt, Artificial Sequence
  Description of Artificial Sequence: Synthetic oligonucleotide
gaagauaggcagacccagg

SEQ ID NO: 2847433 - RNA, 19 nt, Artificial Sequence
  Description of Artificial Sequence: Synthetic oligonucleotide
cugcacacgcuuuuccucc

SEQ ID NO: 2847434 - RNA, 19 nt, Artificial Sequence
  Description of Artificial Sequence: Synthetic oligonucleotide
guguagucuguguucuccg

SEQ ID NO: 2847435 - RNA, 19 nt, Artificial Sequence
  Description of Artificial Sequence: Synthetic oligonucleotide
uccugcagguuuucuagca

SEQ ID NO: 2847436 - RNA, 19 nt, Artificial Sequence
  Description of Artificial Sequence: Synthetic oligonucleotide
ggugaucucggccaagcag

SEQ ID NO: 2847437 - RNA, 19 nt, Artificial Sequence
  Description of Artificial Sequence: Synthetic oligonucleotide
ugacaggcggugcugcagc

SEQ ID NO: 2847438 - RNA, 19 nt, Artificial Sequence
  Description of Artificial Sequence: Synthetic oligonucleotide
augucuuacaccucauguu

SEQ ID NO: 2847439 - RNA, 19 nt, Artificial Sequence
  Description of Artificial Sequence: Synthetic oligonucleotide
cuuguagauguauucccca

SEQ ID NO: 2847440 - RNA, 19 nt, Artificial Sequence
  Description of Artificial Sequence: Synthetic oligonucleotide
ucugcacacgcuuuuccuc

SEQ ID NO: 2847441 - RNA, 19 nt, Artificial Sequence
  Description of Artificial Sequence: Synthetic oligonucleotide
agcuucucagccuggaaau

SEQ ID NO: 2847442 - RNA, 19 nt, Artificial Sequence
  Description of Artificial Sequence: Synthetic oligonucleotide
cacuugauauagaagcgga

SEQ ID NO: 2847443 - RNA, 19 nt, Artificial Sequence
  Description of Artificial Sequence: Synthetic oligonucleotide
ucuuggucuucucucgcuc

SEQ ID NO: 2847444 - RNA, 19 nt, Artificial Sequence
  Description of Artificial Sequence: Synthetic oligonucleotide
uagauguauuccccacaug

SEQ ID NO: 2847445 - RNA, 19 nt, Artificial Sequence
  Description of Artificial Sequence: Synthetic oligonucleotide
gcggaagauaggcagaccc

SEQ ID NO: 2847446 - RNA, 19 nt, Artificial Sequence
  Description of Artificial Sequence: Synthetic oligonucleotide
cuucugcacacgcuuuucc

SEQ ID NO: 2847447 - RNA, 19 nt, Artificial Sequence
  Description of Artificial Sequence: Synthetic oligonucleotide
acaugucuuacaccucaug

SEQ ID NO: 2847448 - RNA, 19 nt, Artificial Sequence
  Description of Artificial Sequence: Synthetic oligonucleotide
uccugcugcuuguucgccg

SEQ ID NO: 2847449 - RNA, 19 nt, Artificial Sequence
  Description of Artificial Sequence: Synthetic oligonucleotide
uagucuguguucuccgggu

SEQ ID NO: 2847450 - RNA, 19 nt, Artificial Sequence
  Description of Artificial Sequence: Synthetic oligonucleotide
cuccaggagcuucucagcc

SEQ ID NO: 2847451 - RNA, 19 nt, Artificial Sequence
  Description of Artificial Sequence: Synthetic oligonucleotide
gucuugaaggugaucucgg

SEQ ID NO: 2847452 - RNA, 19 nt, Artificial Sequence
  Description of Artificial Sequence: Synthetic oligonucleotide
cucagccuggaaauuucgc

SEQ ID NO: 2847453 - RNA, 19 nt, Artificial Sequence
  Description of Artificial Sequence: Synthetic oligonucleotide
agccuggaaauuucgcgug

SEQ ID NO: 2847454 - RNA, 19 nt, Artificial Sequence
  Description of Artificial Sequence: Synthetic oligonucleotide
gauguauuccccacauguc

SEQ ID NO: 2847455 - RNA, 19 nt, Artificial Sequence
  Description of Artificial Sequence: Synthetic oligonucleotide
cuucgagucuuucgugcgg

SEQ ID NO: 2847456 - RNA, 19 nt, Artificial Sequence
  Description of Artificial Sequence: Synthetic oligonucleotide
cuggacgguuucuuugcgg

SEQ ID NO: 2847457 - RNA, 19 nt, Artificial Sequence
  Description of Artificial Sequence: Synthetic oligonucleotide
cugccgcugguucaggucc

SEQ ID NO: 2847458 - RNA, 19 nt, Artificial Sequence
  Description of Artificial Sequence: Synthetic oligonucleotide
cuucaugggguuguucagc

SEQ ID NO: 2847459 - RNA, 19 nt, Artificial Sequence
  Description of Artificial Sequence: Synthetic oligonucleotide
uguucuccgggucugucuu

SEQ ID NO: 2847460 - RNA, 19 nt, Artificial Sequence
  Description of Artificial Sequence: Synthetic oligonucleotide
ucgcguggccccaugcucc

SEQ ID NO: 2847461 - RNA, 19 nt, Artificial Sequence
  Description of Artificial Sequence: Synthetic oligonucleotide
aauuucgcguggccccaug

SEQ ID NO: 2847462 - RNA, 19 nt, Artificial Sequence
  Description of Artificial Sequence: Synthetic oligonucleotide
cuggaaauuucgcguggcc

SEQ ID NO: 2847463 - RNA, 19 nt, Artificial Sequence
  Description of Artificial Sequence: Synthetic oligonucleotide
ggaagauaggcagacccag

SEQ ID NO: 2847464 - RNA, 19 nt, Artificial Sequence
  Description of Artificial Sequence: Synthetic oligonucleotide
gagcuucucagccuggaaa

SEQ ID NO: 2847465 - RNA, 19 nt, Artificial Sequence
  Description of Artificial Sequence: Synthetic oligonucleotide
auugaacuucuucccuugu

SEQ ID NO: 2847466 - RNA, 19 nt, Artificial Sequence
  Description of Artificial Sequence: Synthetic oligonucleotide
uuucgcguggccccaugcu

SEQ ID NO: 2847467 - RNA, 19 nt, Artificial Sequence
  Description of Artificial Sequence: Synthetic oligonucleotide
guuuucuagcaccuccauc

SEQ ID NO: 2847468 - RNA, 19 nt, Artificial Sequence
  Description of Artificial Sequence: Synthetic oligonucleotide
gcacuugauauagaagcgg

SEQ ID NO: 2847469 - RNA, 19 nt, Artificial Sequence
  Description of Artificial Sequence: Synthetic oligonucleotide
caugucuuacaccucaugu

SEQ ID NO: 2847470 - RNA, 19 nt, Artificial Sequence
  Description of Artificial Sequence: Synthetic oligonucleotide
ccuuguagauguauucccc

SEQ ID NO: 2847471 - RNA, 19 nt, Artificial Sequence
  Description of Artificial Sequence: Synthetic oligonucleotide
uccugugacaggcggugcu

SEQ ID NO: 2847472 - RNA, 19 nt, Artificial Sequence
  Description of Artificial Sequence: Synthetic oligonucleotide
ucuguguucuccgggucug

SEQ ID NO: 2847473 - RNA, 19 nt, Artificial Sequence
  Description of Artificial Sequence: Synthetic oligonucleotide
auaggcagacccagguagg

SEQ ID NO: 2847474 - RNA, 19 nt, Artificial Sequence
  Description of Artificial Sequence: Synthetic oligonucleotide
gcuccugcagguuuucuag

SEQ ID NO: 2847475 - RNA, 19 nt, Artificial Sequence
  Description of Artificial Sequence: Synthetic oligonucleotide
augguguagucuguguucu

SEQ ID NO: 2847476 - RNA, 19 nt, Artificial Sequence
  Description of Artificial Sequence: Synthetic oligonucleotide
auggccucgaaguccacau

SEQ ID NO: 2847477 - RNA, 19 nt, Artificial Sequence
  Description of Artificial Sequence: Synthetic oligonucleotide
cugguucagguccuucagc

SEQ ID NO: 2847478 - RNA, 19 nt, Artificial Sequence
  Description of Artificial Sequence: Synthetic oligonucleotide
ggccucgaaguccacaugc

SEQ ID NO: 2847479 - RNA, 19 nt, Artificial Sequence
  Description of Artificial Sequence: Synthetic oligonucleotide
uccacaugcgccugccgcu

SEQ ID NO: 2847480 - RNA, 19 nt, Artificial Sequence
  Description of Artificial Sequence: Synthetic oligonucleotide
cgggcauugaacuucuucc

SEQ ID NO: 2847481 - RNA, 19 nt, Artificial Sequence
  Description of Artificial Sequence: Synthetic oligonucleotide
uucgcguggccccaugcuc

SEQ ID NO: 2847482 - RNA, 19 nt, Artificial Sequence
  Description of Artificial Sequence: Synthetic oligonucleotide
accgccucugccuuccucu

SEQ ID NO: 2847483 - RNA, 19 nt, Artificial Sequence
  Description of Artificial Sequence: Synthetic oligonucleotide
gcuucgagucuuucgugcg

SEQ ID NO: 2847484 - RNA, 19 nt, Artificial Sequence
  Description of Artificial Sequence: Synthetic oligonucleotide
uucagcuccucguccucgc

SEQ ID NO: 2847485 - RNA, 19 nt, Artificial Sequence
  Description of Artificial Sequence: Synthetic oligonucleotide
gggcauugaacuucuuccc

SEQ ID NO: 2847486 - RNA, 19 nt, Artificial Sequence
  Description of Artificial Sequence: Synthetic oligonucleotide
gguguagucuguguucucc

SEQ ID NO: 2847487 - RNA, 19 nt, Artificial Sequence
  Description of Artificial Sequence: Synthetic oligonucleotide
cccuuguagauguauuccc

SEQ ID NO: 2847488 - RNA, 19 nt, Artificial Sequence
  Description of Artificial Sequence: Synthetic oligonucleotide
gacgguuucuuugcgggca

SEQ ID NO: 2847489 - RNA, 19 nt, Artificial Sequence
  Description of Artificial Sequence: Synthetic oligonucleotide
aggcagacccagguaggcc

SEQ ID NO: 2847490 - RNA, 19 nt, Artificial Sequence
  Description of Artificial Sequence: Synthetic oligonucleotide
ucuucccuuguagauguau

SEQ ID NO: 2847491 - RNA, 19 nt, Artificial Sequence
  Description of Artificial Sequence: Synthetic oligonucleotide
uccccacaugucuuacacc

SEQ ID NO: 2847492 - RNA, 19 nt, Artificial Sequence
  Description of Artificial Sequence: Synthetic oligonucleotide
uucgagucuuucgugcggu

SEQ ID NO: 2847493 - RNA, 19 nt, Artificial Sequence
  Description of Artificial Sequence: Synthetic oligonucleotide
cugcuccugugacaggcgg

SEQ ID NO: 2847494 - RNA, 19 nt, Artificial Sequence
  Description of Artificial Sequence: Synthetic oligonucleotide
cacacgcuuuuccuccucc

SEQ ID NO: 2847495 - RNA, 19 nt, Artificial Sequence
  Description of Artificial Sequence: Synthetic oligonucleotide
ucuuucgugcgguucucua

SEQ ID NO: 2847496 - RNA, 19 nt, Artificial Sequence
  Description of Artificial Sequence: Synthetic oligonucleotide
gcuuguucgccgcugcucc

SEQ ID NO: 2847497 - RNA, 19 nt, Artificial Sequence
  Description of Artificial Sequence: Synthetic oligonucleotide
agcggaagauaggcagacc

SEQ ID NO: 2847498 - RNA, 19 nt, Artificial Sequence
  Description of Artificial Sequence: Synthetic oligonucleotide
uaggcagacccagguaggc

SEQ ID NO: 2847499 - RNA, 19 nt, Artificial Sequence
  Description of Artificial Sequence: Synthetic oligonucleotide
uugcgggcauugaacuucu

SEQ ID NO: 2847500 - RNA, 19 nt, Artificial Sequence
  Description of Artificial Sequence: Synthetic oligonucleotide
gaagcggaagauaggcaga

SEQ ID NO: 2847501 - RNA, 19 nt, Artificial Sequence
  Description of Artificial Sequence: Synthetic oligonucleotide
guagauguauuccccacau

SEQ ID NO: 2847502 - RNA, 19 nt, Artificial Sequence
  Description of Artificial Sequence: Synthetic oligonucleotide
uuggucuucucucgcucau

SEQ ID NO: 2847503 - RNA, 19 nt, Artificial Sequence
  Description of Artificial Sequence: Synthetic oligonucleotide
ugugacaggcggugcugca

SEQ ID NO: 2847504 - RNA, 19 nt, Artificial Sequence
  Description of Artificial Sequence: Synthetic oligonucleotide
guggccccaugcuccaugg

SEQ ID NO: 2847505 - RNA, 19 nt, Artificial Sequence
  Description of Artificial Sequence: Synthetic oligonucleotide
caggcggugcugcagcagc

SEQ ID NO: 2847506 - RNA, 19 nt, Artificial Sequence
  Description of Artificial Sequence: Synthetic oligonucleotide
gggguuguucagcuccucg

SEQ ID NO: 2847507 - RNA, 19 nt, Artificial Sequence
  Description of Artificial Sequence: Synthetic oligonucleotide
guucagcuccucguccucg

SEQ ID NO: 2847508 - RNA, 19 nt, Artificial Sequence
  Description of Artificial Sequence: Synthetic oligonucleotide
uauuccccacaugucuuac

SEQ ID NO: 2847509 - RNA, 19 nt, Artificial Sequence
  Description of Artificial Sequence: Synthetic oligonucleotide
aggaccuucaugggguugu

SEQ ID NO: 2847510 - RNA, 19 nt, Artificial Sequence
  Description of Artificial Sequence: Synthetic oligonucleotide
aagcagcgcgugcacuuga

SEQ ID NO: 2847511 - RNA, 19 nt, Artificial Sequence
  Description of Artificial Sequence: Synthetic oligonucleotide
cugucuugaaggugaucuc

SEQ ID NO: 2847512 - RNA, 19 nt, Artificial Sequence
  Description of Artificial Sequence: Synthetic oligonucleotide
ucucucgcucaucuuccuc

SEQ ID NO: 2847513 - RNA, 19 nt, Artificial Sequence
  Description of Artificial Sequence: Synthetic oligonucleotide
gagucuuucgugcgguucu

SEQ ID NO: 2847514 - RNA, 19 nt, Artificial Sequence
  Description of Artificial Sequence: Synthetic oligonucleotide
uucgugcgguucucuagga

SEQ ID NO: 2847515 - RNA, 19 nt, Artificial Sequence
  Description of Artificial Sequence: Synthetic oligonucleotide
cuccgggucugucuugaag

SEQ ID NO: 2847516 - RNA, 19 nt, Artificial Sequence
  Description of Artificial Sequence: Synthetic oligonucleotide
cuuggucuucucucgcuca

SEQ ID NO: 2847517 - RNA, 19 nt, Artificial Sequence
  Description of Artificial Sequence: Synthetic oligonucleotide
ucgugcgguucucuaggac

SEQ ID NO: 2847518 - RNA, 19 nt, Artificial Sequence
  Description of Artificial Sequence: Synthetic oligonucleotide
uccuucugcacacgcuuuu

SEQ ID NO: 2847519 - RNA, 19 nt, Artificial Sequence
  Description of Artificial Sequence: Synthetic oligonucleotide
gaaauuucgcguggcccca

SEQ ID NO: 2847520 - RNA, 19 nt, Artificial Sequence
  Description of Artificial Sequence: Synthetic oligonucleotide
gugcccuugcugcccaccg

SEQ ID NO: 2847521 - RNA, 19 nt, Artificial Sequence
  Description of Artificial Sequence: Synthetic oligonucleotide
ugcuccugugacaggcggu

SEQ ID NO: 2847522 - RNA, 19 nt, Artificial Sequence
  Description of Artificial Sequence: Synthetic oligonucleotide
ucggccaagcagcgcgugc

SEQ ID NO: 2847523 - RNA, 19 nt, Artificial Sequence
  Description of Artificial Sequence: Synthetic oligonucleotide
cgugcgguucucuaggacc

SEQ ID NO: 2847524 - RNA, 19 nt, Artificial Sequence
  Description of Artificial Sequence: Synthetic oligonucleotide
agguaggccucguucugga

SEQ ID NO: 2847525 - RNA, 19 nt, Artificial Sequence
  Description of Artificial Sequence: Synthetic oligonucleotide
augcgccugccgcugguuc

SEQ ID NO: 2847526 - RNA, 19 nt, Artificial Sequence
  Description of Artificial Sequence: Synthetic oligonucleotide
gcugguucagguccuucag

SEQ ID NO: 2847527 - RNA, 19 nt, Artificial Sequence
  Description of Artificial Sequence: Synthetic oligonucleotide
acuugauauagaagcggaa

SEQ ID NO: 2847528 - RNA, 19 nt, Artificial Sequence
  Description of Artificial Sequence: Synthetic oligonucleotide
cagguaggccucguucugg

SEQ ID NO: 2847529 - RNA, 19 nt, Artificial Sequence
  Description of Artificial Sequence: Synthetic oligonucleotide
agcauggccucgaagucca

SEQ ID NO: 2847530 - RNA, 19 nt, Artificial Sequence
  Description of Artificial Sequence: Synthetic oligonucleotide
acacgcuuuuccuccuccu

SEQ ID NO: 2847531 - RNA, 19 nt, Artificial Sequence
  Description of Artificial Sequence: Synthetic oligonucleotide
agguuuucuagcaccucca

SEQ ID NO: 2847532 - RNA, 19 nt, Artificial Sequence
  Description of Artificial Sequence: Synthetic oligonucleotide
ccaucuccagcuucgaguc

SEQ ID NO: 2847533 - RNA, 19 nt, Artificial Sequence
  Description of Artificial Sequence: Synthetic oligonucleotide
gguuguucagcuccucguc

SEQ ID NO: 2847534 - RNA, 19 nt, Artificial Sequence
  Description of Artificial Sequence: Synthetic oligonucleotide
ugcgccugccgcugguuca

SEQ ID NO: 2847535 - RNA, 19 nt, Artificial Sequence
  Description of Artificial Sequence: Synthetic oligonucleotide
uucucucgcucaucuuccu

SEQ ID NO: 2847536 - RNA, 19 nt, Artificial Sequence
  Description of Artificial Sequence: Synthetic oligonucleotide
agcuccugcagguuuucua

SEQ ID NO: 2847537 - RNA, 19 nt, Artificial Sequence
  Description of Artificial Sequence: Synthetic oligonucleotide
gaaggugaucucggccaag

SEQ ID NO: 2847538 - RNA, 19 nt, Artificial Sequence
  Description of Artificial Sequence: Synthetic oligonucleotide
uggccucgaaguccacaug

SEQ ID NO: 2847539 - RNA, 19 nt, Artificial Sequence
  Description of Artificial Sequence: Synthetic oligonucleotide
agucuuucgugcgguucuc

SEQ ID NO: 2847540 - RNA, 19 nt, Artificial Sequence
  Description of Artificial Sequence: Synthetic oligonucleotide
uguucgccgcugcuccugu

SEQ ID NO: 2847541 - RNA, 19 nt, Artificial Sequence
  Description of Artificial Sequence: Synthetic oligonucleotide
cagcuucgagucuuucgug

SEQ ID NO: 2847542 - RNA, 19 nt, Artificial Sequence
  Description of Artificial Sequence: Synthetic oligonucleotide
ggccccaugcuccauggug

SEQ ID NO: 2847543 - RNA, 19 nt, Artificial Sequence
  Description of Artificial Sequence: Synthetic oligonucleotide
cuccaucuccagcuucgag

SEQ ID NO: 2847544 - RNA, 19 nt, Artificial Sequence
  Description of Artificial Sequence: Synthetic oligonucleotide
ugcacacgcuuuuccuccu

SEQ ID NO: 2847545 - RNA, 19 nt, Artificial Sequence
  Description of Artificial Sequence: Synthetic oligonucleotide
gguuucuuugcgggcauug

SEQ ID NO: 2847546 - RNA, 19 nt, Artificial Sequence
  Description of Artificial Sequence: Synthetic oligonucleotide
cacgcuuuuccuccuccuc

SEQ ID NO: 2847547 - RNA, 19 nt, Artificial Sequence
  Description of Artificial Sequence: Synthetic oligonucleotide
aggugaucucggccaagca

SEQ ID NO: 2847548 - RNA, 19 nt, Artificial Sequence
  Description of Artificial Sequence: Synthetic oligonucleotide
ugcuuguucgccgcugcuc

SEQ ID NO: 2847549 - RNA, 19 nt, Artificial Sequence
  Description of Artificial Sequence: Synthetic oligonucleotide
gccuggaaauuucgcgugg

SEQ ID NO: 2847550 - RNA, 19 nt, Artificial Sequence
  Description of Artificial Sequence: Synthetic oligonucleotide
ucguccucgcgcuccuucu

SEQ ID NO: 2847551 - RNA, 19 nt, Artificial Sequence
  Description of Artificial Sequence: Synthetic oligonucleotide
gggucugucuugaagguga

SEQ ID NO: 2847552 - RNA, 19 nt, Artificial Sequence
  Description of Artificial Sequence: Synthetic oligonucleotide
agcgcgugcacuugauaua

SEQ ID NO: 2847553 - RNA, 19 nt, Artificial Sequence
  Description of Artificial Sequence: Synthetic oligonucleotide
uuguucgccgcugcuccug

SEQ ID NO: 2847554 - RNA, 19 nt, Artificial Sequence
  Description of Artificial Sequence: Synthetic oligonucleotide
ucgcgcuccuucugcacac

SEQ ID NO: 2847555 - RNA, 19 nt, Artificial Sequence
  Description of Artificial Sequence: Synthetic oligonucleotide
cgugcacuugauauagaag

SEQ ID NO: 2847556 - RNA, 19 nt, Artificial Sequence
  Description of Artificial Sequence: Synthetic oligonucleotide
ucaugggguuguucagcuc

SEQ ID NO: 2847557 - RNA, 19 nt, Artificial Sequence
  Description of Artificial Sequence: Synthetic oligonucleotide
cugugacaggcggugcugc

SEQ ID NO: 2847558 - RNA, 19 nt, Artificial Sequence
  Description of Artificial Sequence: Synthetic oligonucleotide
uaggaccuucaugggguug

SEQ ID NO: 2847559 - RNA, 19 nt, Artificial Sequence
  Description of Artificial Sequence: Synthetic oligonucleotide
gugacaggcggugcugcag

SEQ ID NO: 2847560 - RNA, 19 nt, Artificial Sequence
  Description of Artificial Sequence: Synthetic oligonucleotide
ucucggccaagcagcgcgu

SEQ ID NO: 2847561 - RNA, 19 nt, Artificial Sequence
  Description of Artificial Sequence: Synthetic oligonucleotide
guuucuuugcgggcauuga

SEQ ID NO: 2847562 - RNA, 19 nt, Artificial Sequence
  Description of Artificial Sequence: Synthetic oligonucleotide
ucgccgcugcuccugugac

SEQ ID NO: 2847563 - RNA, 19 nt, Artificial Sequence
  Description of Artificial Sequence: Synthetic oligonucleotide
ugcugcuuguucgccgcug

SEQ ID NO: 2847564 - RNA, 19 nt, Artificial Sequence
  Description of Artificial Sequence: Synthetic oligonucleotide
uguguucuccgggucuguc

SEQ ID NO: 2847565 - RNA, 19 nt, Artificial Sequence
  Description of Artificial Sequence: Synthetic oligonucleotide
guauuccccacaugucuua

SEQ ID NO: 2847566 - RNA, 19 nt, Artificial Sequence
  Description of Artificial Sequence: Synthetic oligonucleotide
gccgcugcuccugugacag

SEQ ID NO: 2847567 - RNA, 19 nt, Artificial Sequence
  Description of Artificial Sequence: Synthetic oligonucleotide
ccuucaugggguuguucag

SEQ ID NO: 2847568 - RNA, 19 nt, Artificial Sequence
  Description of Artificial Sequence: Synthetic oligonucleotide
gcgcgugcacuugauauag

SEQ ID NO: 2847569 - RNA, 19 nt, Artificial Sequence
  Description of Artificial Sequence: Synthetic oligonucleotide
cagccuggaaauuucgcgu

SEQ ID NO: 2847570 - RNA, 19 nt, Artificial Sequence
  Description of Artificial Sequence: Synthetic oligonucleotide
ccugcugcuuguucgccgc

SEQ ID NO: 2847571 - RNA, 19 nt, Artificial Sequence
  Description of Artificial Sequence: Synthetic oligonucleotide
ccacaugucuuacaccuca

SEQ ID NO: 2847572 - RNA, 19 nt, Artificial Sequence
  Description of Artificial Sequence: Synthetic oligonucleotide
cucguccucgcgcuccuuc

SEQ ID NO: 2847573 - RNA, 19 nt, Artificial Sequence
  Description of Artificial Sequence: Synthetic oligonucleotide
gcgugcacuugauauagaa

SEQ ID NO: 2847574 - RNA, 19 nt, Artificial Sequence
  Description of Artificial Sequence: Synthetic oligonucleotide
ugguguagucuguguucuc

SEQ ID NO: 2847575 - RNA, 19 nt, Artificial Sequence
  Description of Artificial Sequence: Synthetic oligonucleotide
gcugcuuguucgccgcugc

SEQ ID NO: 2847576 - RNA, 19 nt, Artificial Sequence
  Description of Artificial Sequence: Synthetic oligonucleotide
aaauuucgcguggccccau

SEQ ID NO: 2847577 - RNA, 19 nt, Artificial Sequence
  Description of Artificial Sequence: Synthetic oligonucleotide
acgguuucuuugcgggcau

SEQ ID NO: 2847578 - RNA, 19 nt, Artificial Sequence
  Description of Artificial Sequence: Synthetic oligonucleotide
gaucucggccaagcagcgc

SEQ ID NO: 2847579 - RNA, 19 nt, Artificial Sequence
  Description of Artificial Sequence: Synthetic oligonucleotide
gacaggcggugcugcagca

SEQ ID NO: 2847580 - RNA, 19 nt, Artificial Sequence
  Description of Artificial Sequence: Synthetic oligonucleotide
ggacgguuucuuugcgggc

SEQ ID NO: 2847581 - RNA, 19 nt, Artificial Sequence
  Description of Artificial Sequence: Synthetic oligonucleotide
ugccgcugguucagguccu

SEQ ID NO: 2847582 - RNA, 19 nt, Artificial Sequence
  Description of Artificial Sequence: Synthetic oligonucleotide
caagcagcgcgugcacuug

SEQ ID NO: 2847583 - RNA, 19 nt, Artificial Sequence
  Description of Artificial Sequence: Synthetic oligonucleotide
gcgggcauugaacuucuuc

SEQ ID NO: 2847584 - RNA, 19 nt, Artificial Sequence
  Description of Artificial Sequence: Synthetic oligonucleotide
ucguucuggacgguuucuu

SEQ ID NO: 2847585 - RNA, 19 nt, Artificial Sequence
  Description of Artificial Sequence: Synthetic oligonucleotide
cacaugcgccugccgcugg

SEQ ID NO: 2847586 - RNA, 19 nt, Artificial Sequence
  Description of Artificial Sequence: Synthetic oligonucleotide
cucgcgcuccuucugcaca

SEQ ID NO: 2847587 - RNA, 19 nt, Artificial Sequence
  Description of Artificial Sequence: Synthetic oligonucleotide
gcccuugcugcccaccgcc

SEQ ID NO: 2847588 - RNA, 19 nt, Artificial Sequence
  Description of Artificial Sequence: Synthetic oligonucleotide
acaggcggugcugcagcag

SEQ ID NO: 2847589 - RNA, 19 nt, Artificial Sequence
  Description of Artificial Sequence: Synthetic oligonucleotide
gccucgaaguccacaugcg

SEQ ID NO: 2847590 - RNA, 19 nt, Artificial Sequence
  Description of Artificial Sequence: Synthetic oligonucleotide
ucuccagcuucgagucuuu

SEQ ID NO: 2847591 - RNA, 19 nt, Artificial Sequence
  Description of Artificial Sequence: Synthetic oligonucleotide
gucuguguucuccgggucu

SEQ ID NO: 2847592 - RNA, 19 nt, Artificial Sequence
  Description of Artificial Sequence: Synthetic oligonucleotide
ggcauugaacuucuucccu

SEQ ID NO: 2847593 - RNA, 19 nt, Artificial Sequence
  Description of Artificial Sequence: Synthetic oligonucleotide
ggucuucucucgcucaucu

SEQ ID NO: 2847594 - RNA, 19 nt, Artificial Sequence
  Description of Artificial Sequence: Synthetic oligonucleotide
cagcgcgugcacuugauau

SEQ ID NO: 2847595 - RNA, 19 nt, Artificial Sequence
  Description of Artificial Sequence: Synthetic oligonucleotide
ccuggaaauuucgcguggc

SEQ ID NO: 2847596 - RNA, 19 nt, Artificial Sequence
  Description of Artificial Sequence: Synthetic oligonucleotide
acaugcgccugccgcuggu

SEQ ID NO: 2847597 - RNA, 19 nt, Artificial Sequence
  Description of Artificial Sequence: Synthetic oligonucleotide
gcuccugugacaggcggug

SEQ ID NO: 2847598 - RNA, 19 nt, Artificial Sequence
  Description of Artificial Sequence: Synthetic oligonucleotide
ccuccugcugcuuguucgc

SEQ ID NO: 2847599 - RNA, 19 nt, Artificial Sequence
  Description of Artificial Sequence: Synthetic oligonucleotide
cuccugcugcuuguucgcc

SEQ ID NO: 2847600 - RNA, 19 nt, Artificial Sequence
  Description of Artificial Sequence: Synthetic oligonucleotide
cagacccagguaggccucg

SEQ ID NO: 2847601 - RNA, 19 nt, Artificial Sequence
  Description of Artificial Sequence: Synthetic oligonucleotide
ccccacaugucuuacaccu

SEQ ID NO: 2847602 - RNA, 19 nt, Artificial Sequence
  Description of Artificial Sequence: Synthetic oligonucleotide
ugcccaccgccucugccuu

SEQ ID NO: 2847603 - RNA, 19 nt, Artificial Sequence
  Description of Artificial Sequence: Synthetic oligonucleotide
ccucuuggucuucucucgc

SEQ ID NO: 2847604 - RNA, 19 nt, Artificial Sequence
  Description of Artificial Sequence: Synthetic oligonucleotide
cuucccuuguagauguauu

SEQ ID NO: 2847605 - RNA, 19 nt, Artificial Sequence
  Description of Artificial Sequence: Synthetic oligonucleotide
gaccuucaugggguuguuc

SEQ ID NO: 2847606 - RNA, 19 nt, Artificial Sequence
  Description of Artificial Sequence: Synthetic oligonucleotide
ucgagucuuucgugcgguu

SEQ ID NO: 2847607 - RNA, 19 nt, Artificial Sequence
  Description of Artificial Sequence: Synthetic oligonucleotide
cauggccucgaaguccaca

SEQ ID NO: 2847608 - RNA, 19 nt, Artificial Sequence
  Description of Artificial Sequence: Synthetic oligonucleotide
augggguuguucagcuccu

SEQ ID NO: 2847609 - RNA, 19 nt, Artificial Sequence
  Description of Artificial Sequence: Synthetic oligonucleotide
cuccugugacaggcggugc

SEQ ID NO: 2847610 - RNA, 19 nt, Artificial Sequence
  Description of Artificial Sequence: Synthetic oligonucleotide
guguucuccgggucugucu

SEQ ID NO: 2847611 - RNA, 19 nt, Artificial Sequence
  Description of Artificial Sequence: Synthetic oligonucleotide
uucuucccuuguagaugua

SEQ ID NO: 2847612 - RNA, 19 nt, Artificial Sequence
  Description of Artificial Sequence: Synthetic oligonucleotide
uggccccaugcuccauggu

SEQ ID NO: 2847613 - RNA, 19 nt, Artificial Sequence
  Description of Artificial Sequence: Synthetic oligonucleotide
ggguuguucagcuccucgu

SEQ ID NO: 2847614 - RNA, 19 nt, Artificial Sequence
  Description of Artificial Sequence: Synthetic oligonucleotide
ucuccgggucugucuugaa

SEQ ID NO: 2847615 - RNA, 19 nt, Artificial Sequence
  Description of Artificial Sequence: Synthetic oligonucleotide
ccagcuucgagucuuucgu

SEQ ID NO: 2847616 - RNA, 19 nt, Artificial Sequence
  Description of Artificial Sequence: Synthetic oligonucleotide
gugcgguucucuaggaccu

SEQ ID NO: 2847617 - RNA, 19 nt, Artificial Sequence
  Description of Artificial Sequence: Synthetic oligonucleotide
gguaggccucguucuggac

SEQ ID NO: 2847618 - RNA, 19 nt, Artificial Sequence
  Description of Artificial Sequence: Synthetic oligonucleotide
cuugcugcccaccgccucu

SEQ ID NO: 2847619 - RNA, 19 nt, Artificial Sequence
  Description of Artificial Sequence: Synthetic oligonucleotide
ccagguaggccucguucug

SEQ ID NO: 2847620 - RNA, 19 nt, Artificial Sequence
  Description of Artificial Sequence: Synthetic oligonucleotide
cuucucagccuggaaauuu

SEQ ID NO: 2847621 - RNA, 19 nt, Artificial Sequence
  Description of Artificial Sequence: Synthetic oligonucleotide
ugggguuguucagcuccuc

SEQ ID NO: 2847622 - RNA, 19 nt, Artificial Sequence
  Description of Artificial Sequence: Synthetic oligonucleotide
gcugcccaccgccucugcc

SEQ ID NO: 2847623 - RNA, 19 nt, Artificial Sequence
  Description of Artificial Sequence: Synthetic oligonucleotide
gcauugaacuucuucccuu

SEQ ID NO: 2847624 - RNA, 19 nt, Artificial Sequence
  Description of Artificial Sequence: Synthetic oligonucleotide
guucgccgcugcuccugug

SEQ ID NO: 2847625 - RNA, 19 nt, Artificial Sequence
  Description of Artificial Sequence: Synthetic oligonucleotide
gucugucuugaaggugauc

SEQ ID NO: 2847626 - RNA, 19 nt, Artificial Sequence
  Description of Artificial Sequence: Synthetic oligonucleotide
ccucguucuggacgguuuc

SEQ ID NO: 2847627 - RNA, 19 nt, Artificial Sequence
  Description of Artificial Sequence: Synthetic oligonucleotide
cuucagcuccugcagguuu

SEQ ID NO: 2847628 - RNA, 19 nt, Artificial Sequence
  Description of Artificial Sequence: Synthetic oligonucleotide
cuccuccaggagcuucuca

SEQ ID NO: 2847629 - RNA, 19 nt, Artificial Sequence
  Description of Artificial Sequence: Synthetic oligonucleotide
ccugccgcugguucagguc

SEQ ID NO: 2847630 - RNA, 19 nt, Artificial Sequence
  Description of Artificial Sequence: Synthetic oligonucleotide
cuuugcgggcauugaacuu

SEQ ID NO: 2847631 - RNA, 19 nt, Artificial Sequence
  Description of Artificial Sequence: Synthetic oligonucleotide
cucggccaagcagcgcgug

SEQ ID NO: 2847632 - RNA, 19 nt, Artificial Sequence
  Description of Artificial Sequence: Synthetic oligonucleotide
cugcagcagcauggccucg

SEQ ID NO: 2847633 - RNA, 19 nt, Artificial Sequence
  Description of Artificial Sequence: Synthetic oligonucleotide
gguuuucuagcaccuccau

SEQ ID NO: 2847634 - RNA, 19 nt, Artificial Sequence
  Description of Artificial Sequence: Synthetic oligonucleotide
gcgcuccuucugcacacgc

SEQ ID NO: 2847635 - RNA, 19 nt, Artificial Sequence
  Description of Artificial Sequence: Synthetic oligonucleotide
cccacaugucuuacaccuc

SEQ ID NO: 2847636 - RNA, 19 nt, Artificial Sequence
  Description of Artificial Sequence: Synthetic oligonucleotide
ccugugacaggcggugcug

SEQ ID NO: 2847637 - RNA, 19 nt, Artificial Sequence
  Description of Artificial Sequence: Synthetic oligonucleotide
caccgccucugccuuccuc

SEQ ID NO: 2847638 - RNA, 19 nt, Artificial Sequence
  Description of Artificial Sequence: Synthetic oligonucleotide
cuccagcuucgagucuuuc

SEQ ID NO: 2847639 - RNA, 19 nt, Artificial Sequence
  Description of Artificial Sequence: Synthetic oligonucleotide
cggaagauaggcagaccca

SEQ ID NO: 2847640 - RNA, 19 nt, Artificial Sequence
  Description of Artificial Sequence: Synthetic oligonucleotide
agacccagguaggccucgu

SEQ ID NO: 2847641 - RNA, 19 nt, Artificial Sequence
  Description of Artificial Sequence: Synthetic oligonucleotide
ggccaagcagcgcgugcac

SEQ ID NO: 2847642 - RNA, 19 nt, Artificial Sequence
  Description of Artificial Sequence: Synthetic oligonucleotide
ccuucugcacacgcuuuuc

SEQ ID NO: 2847643 - RNA, 19 nt, Artificial Sequence
  Description of Artificial Sequence: Synthetic oligonucleotide
agcagcgcgugcacuugau

SEQ ID NO: 2847644 - RNA, 19 nt, Artificial Sequence
  Description of Artificial Sequence: Synthetic oligonucleotide
ugcgggcauugaacuucuu

SEQ ID NO: 2847645 - RNA, 19 nt, Artificial Sequence
  Description of Artificial Sequence: Synthetic oligonucleotide
cuuguucgccgcugcuccu

SEQ ID NO: 2847646 - RNA, 19 nt, Artificial Sequence
  Description of Artificial Sequence: Synthetic oligonucleotide
ccuugcugcccaccgccuc

SEQ ID NO: 2847647 - RNA, 19 nt, Artificial Sequence
  Description of Artificial Sequence: Synthetic oligonucleotide
ccucgcgcuccuucugcac

SEQ ID NO: 2847648 - RNA, 19 nt, Artificial Sequence
  Description of Artificial Sequence: Synthetic oligonucleotide
cgagucuuucgugcgguuc

SEQ ID NO: 2847649 - RNA, 19 nt, Artificial Sequence
  Description of Artificial Sequence: Synthetic oligonucleotide
cuaggaccuucaugggguu

SEQ ID NO: 2847650 - RNA, 19 nt, Artificial Sequence
  Description of Artificial Sequence: Synthetic oligonucleotide
cucguucuggacgguuucu

SEQ ID NO: 2847651 - RNA, 19 nt, Artificial Sequence
  Description of Artificial Sequence: Synthetic oligonucleotide
gucuuucgugcgguucucu

SEQ ID NO: 2847652 - RNA, 19 nt, Artificial Sequence
  Description of Artificial Sequence: Synthetic oligonucleotide
cgcugguucagguccuuca

SEQ ID NO: 2847653 - RNA, 19 nt, Artificial Sequence
  Description of Artificial Sequence: Synthetic oligonucleotide
cuccuucugcacacgcuuu

SEQ ID NO: 2847654 - RNA, 19 nt, Artificial Sequence
  Description of Artificial Sequence: Synthetic oligonucleotide
cccaugcuccaugguguag

SEQ ID NO: 2847655 - RNA, 19 nt, Artificial Sequence
  Description of Artificial Sequence: Synthetic oligonucleotide
gccccaugcuccauggugu

SEQ ID NO: 2847656 - RNA, 19 nt, Artificial Sequence
  Description of Artificial Sequence: Synthetic oligonucleotide
caucuccagcuucgagucu

SEQ ID NO: 2847657 - RNA, 19 nt, Artificial Sequence
  Description of Artificial Sequence: Synthetic oligonucleotide
ccacaugcgccugccgcug

SEQ ID NO: 2847658 - RNA, 19 nt, Artificial Sequence
  Description of Artificial Sequence: Synthetic oligonucleotide
gcagacccagguaggccuc

SEQ ID NO: 2847659 - RNA, 19 nt, Artificial Sequence
  Description of Artificial Sequence: Synthetic oligonucleotide
gcgccugccgcugguucag

SEQ ID NO: 2847660 - RNA, 19 nt, Artificial Sequence
  Description of Artificial Sequence: Synthetic oligonucleotide
ccaugguguagucuguguu

SEQ ID NO: 2847661 - RNA, 19 nt, Artificial Sequence
  Description of Artificial Sequence: Synthetic oligonucleotide
cugcuuguucgccgcugcu

SEQ ID NO: 2847662 - RNA, 19 nt, Artificial Sequence
  Description of Artificial Sequence: Synthetic oligonucleotide
gcagcgcgugcacuugaua

SEQ ID NO: 2847663 - RNA, 19 nt, Artificial Sequence
  Description of Artificial Sequence: Synthetic oligonucleotide
gacccagguaggccucguu

SEQ ID NO: 2847664 - RNA, 19 nt, Artificial Sequence
  Description of Artificial Sequence: Synthetic oligonucleotide
cgaaguccacaugcgccug

SEQ ID NO: 2847665 - RNA, 19 nt, Artificial Sequence
  Description of Artificial Sequence: Synthetic oligonucleotide
cgggucugucuugaaggug

SEQ ID NO: 2847666 - RNA, 19 nt, Artificial Sequence
  Description of Artificial Sequence: Synthetic oligonucleotide
ccaagcagcgcgugcacuu

SEQ ID NO: 2847667 - RNA, 19 nt, Artificial Sequence
  Description of Artificial Sequence: Synthetic oligonucleotide
cguccucgcgcuccuucug

SEQ ID NO: 2847668 - RNA, 19 nt, Artificial Sequence
  Description of Artificial Sequence: Synthetic oligonucleotide
aggccucguucuggacggu

SEQ ID NO: 2847669 - RNA, 19 nt, Artificial Sequence
  Description of Artificial Sequence: Synthetic oligonucleotide
ccgggucugucuugaaggu

SEQ ID NO: 2847670 - RNA, 19 nt, Artificial Sequence
  Description of Artificial Sequence: Synthetic oligonucleotide
ccgcugcuccugugacagg

SEQ ID NO: 2847671 - RNA, 19 nt, Artificial Sequence
  Description of Artificial Sequence: Synthetic oligonucleotide
gcuccaugguguagucugu

SEQ ID NO: 2847672 - RNA, 19 nt, Artificial Sequence
  Description of Artificial Sequence: Synthetic oligonucleotide
cuguguucuccgggucugu

SEQ ID NO: 2847673 - RNA, 19 nt, Artificial Sequence
  Description of Artificial Sequence: Synthetic oligonucleotide
cugcugcuuguucgccgcu

SEQ ID NO: 2847674 - RNA, 19 nt, Artificial Sequence
  Description of Artificial Sequence: Synthetic oligonucleotide
ggucugucuugaaggugau

SEQ ID NO: 2847675 - RNA, 19 nt, Artificial Sequence
  Description of Artificial Sequence: Synthetic oligonucleotide
ccccaugcuccauggugua

SEQ ID NO: 2847676 - RNA, 19 nt, Artificial Sequence
  Description of Artificial Sequence: Synthetic oligonucleotide
gcuucucagccuggaaauu

SEQ ID NO: 2847677 - RNA, 19 nt, Artificial Sequence
  Description of Artificial Sequence: Synthetic oligonucleotide
gccugccgcugguucaggu

SEQ ID NO: 2847678 - RNA, 19 nt, Artificial Sequence
  Description of Artificial Sequence: Synthetic oligonucleotide
gccaagcagcgcgugcacu

SEQ ID NO: 2847679 - RNA, 19 nt, Artificial Sequence
  Description of Artificial Sequence: Synthetic oligonucleotide
cgcgcuccuucugcacacg

SEQ ID NO: 2847680 - RNA, 19 nt, Artificial Sequence
  Description of Artificial Sequence: Synthetic oligonucleotide
cggccaagcagcgcgugca

SEQ ID NO: 2847681 - RNA, 19 nt, Artificial Sequence
  Description of Artificial Sequence: Synthetic oligonucleotide
ccgcugguucagguccuuc

SEQ ID NO: 2847682 - RNA, 19 nt, Artificial Sequence
  Description of Artificial Sequence: Synthetic oligonucleotide
cgcgugcacuugauauaga

SEQ ID NO: 2847683 - RNA, 19 nt, Artificial Sequence
  Description of Artificial Sequence: Synthetic oligonucleotide
gccucguucuggacgguuu

SEQ ID NO: 2847684 - RNA, 19 nt, Artificial Sequence
  Description of Artificial Sequence: Synthetic oligonucleotide
gcauggccucgaaguccac

SEQ ID NO: 2847685 - RNA, 19 nt, Artificial Sequence
  Description of Artificial Sequence: Synthetic oligonucleotide
gcccaccgccucugccuuc

SEQ ID NO: 2847686 - RNA, 19 nt, Artificial Sequence
  Description of Artificial Sequence: Synthetic oligonucleotide
cgcuccuucugcacacgcu

SEQ ID NO: 2847687 - RNA, 19 nt, Artificial Sequence
  Description of Artificial Sequence: Synthetic oligonucleotide
caugcgccugccgcugguu

SEQ ID NO: 2847688 - RNA, 19 nt, Artificial Sequence
  Description of Artificial Sequence: Synthetic oligonucleotide
cgcguggccccaugcucca

SEQ ID NO: 2847689 - RNA, 19 nt, Artificial Sequence
  Description of Artificial Sequence: Synthetic oligonucleotide
cgccgcugcuccugugaca

SEQ ID NO: 2847690 - RNA, 19 nt, Artificial Sequence
  Description of Artificial Sequence: Synthetic oligonucleotide
cccuugcugcccaccgccu

SEQ ID NO: 2847691 - RNA, 19 nt, Artificial Sequence
  Description of Artificial Sequence: Synthetic oligonucleotide
ggaccuucaugggguuguu

SEQ ID NO: 2847692 - RNA, 19 nt, Artificial Sequence
  Description of Artificial Sequence: Synthetic oligonucleotide
ggccucguucuggacgguu

SEQ ID NO: 2847693 - RNA, 19 nt, Artificial Sequence
  Description of Artificial Sequence: Synthetic oligonucleotide
cgccugccgcugguucagg

SEQ ID NO: 2847694 - RNA, 19 nt, Artificial Sequence
  Description of Artificial Sequence: Synthetic oligonucleotide
gccgcugguucagguccuu

SEQ ID NO: 2847695 - RNA, 19 nt, Artificial Sequence
  Description of Artificial Sequence: Synthetic oligonucleotide
gcguggccccaugcuccau

SEQ ID NO: 2847696 - RNA, 19 nt, Artificial Sequence
  Description of Artificial Sequence: Synthetic oligonucleotide
ccaccgccucugccuuccu

SEQ ID NO: 2847697 - RNA, 19 nt, Artificial Sequence
  Description of Artificial Sequence: Synthetic oligonucleotide
cgguuucuuugcgggcauu

SEQ ID NO: 2847698 - RNA, 19 nt, Artificial Sequence
  Description of Artificial Sequence: Synthetic oligonucleotide
ccucguccucgcgcuccuu

SEQ ID NO: 2847699 - RNA, 19 nt, Artificial Sequence
  Description of Artificial Sequence: Synthetic oligonucleotide
uuuauugauccucaaaccc

SEQ ID NO: 2847700 - RNA, 19 nt, Artificial Sequence
  Description of Artificial Sequence: Synthetic oligonucleotide
auuuauugauccucaaacc

SEQ ID NO: 2847701 - RNA, 19 nt, Artificial Sequence
  Description of Artificial Sequence: Synthetic oligonucleotide
uuuucugagaugcuaagag

SEQ ID NO: 2847702 - RNA, 19 nt, Artificial Sequence
  Description of Artificial Sequence: Synthetic oligonucleotide
aaacuccauuuauugaucc

SEQ ID NO: 2847703 - RNA, 19 nt, Artificial Sequence
  Description of Artificial Sequence: Synthetic oligonucleotide
acugaagucagcuugcuuc

SEQ ID NO: 2847704 - RNA, 19 nt, Artificial Sequence
  Description of Artificial Sequence: Synthetic oligonucleotide
uaugcaagaguugugaagg

SEQ ID NO: 2847705 - RNA, 19 nt, Artificial Sequence
  Description of Artificial Sequence: Synthetic oligonucleotide
aaaaguucuaugcaagagu

SEQ ID NO: 2847706 - RNA, 19 nt, Artificial Sequence
  Description of Artificial Sequence: Synthetic oligonucleotide
aaagguuguaagguggacc

SEQ ID NO: 2847707 - RNA, 19 nt, Artificial Sequence
  Description of Artificial Sequence: Synthetic oligonucleotide
cauuuauugauccucaaac

SEQ ID NO: 2847708 - RNA, 19 nt, Artificial Sequence
  Description of Artificial Sequence: Synthetic oligonucleotide
auucuguuuucugagaugc

SEQ ID NO: 2847709 - RNA, 19 nt, Artificial Sequence
  Description of Artificial Sequence: Synthetic oligonucleotide
aaggcggaugguuaggugg

SEQ ID NO: 2847710 - RNA, 19 nt, Artificial Sequence
  Description of Artificial Sequence: Synthetic oligonucleotide
uuugugaucaucaucggau

SEQ ID NO: 2847711 - RNA, 19 nt, Artificial Sequence
  Description of Artificial Sequence: Synthetic oligonucleotide
agaggugagccccacagcc

SEQ ID NO: 2847712 - RNA, 19 nt, Artificial Sequence
  Description of Artificial Sequence: Synthetic oligonucleotide
uguaagguggaccaugaug

SEQ ID NO: 2847713 - RNA, 19 nt, Artificial Sequence
  Description of Artificial Sequence: Synthetic oligonucleotide
uucugagaugcuaagagga

SEQ ID NO: 2847714 - RNA, 19 nt, Artificial Sequence
  Description of Artificial Sequence: Synthetic oligonucleotide
cuaacugcuccacaaagcg

SEQ ID NO: 2847715 - RNA, 19 nt, Artificial Sequence
  Description of Artificial Sequence: Synthetic oligonucleotide
ucagcauuugugaucauca

SEQ ID NO: 2847716 - RNA, 19 nt, Artificial Sequence
  Description of Artificial Sequence: Synthetic oligonucleotide
uuuucuccauuacuguugg

SEQ ID NO: 2847717 - RNA, 19 nt, Artificial Sequence
  Description of Artificial Sequence: Synthetic oligonucleotide
uuauugauccucaaaccca

SEQ ID NO: 2847718 - RNA, 19 nt, Artificial Sequence
  Description of Artificial Sequence: Synthetic oligonucleotide
aucaucaucggaugcaggg

SEQ ID NO: 2847719 - RNA, 19 nt, Artificial Sequence
  Description of Artificial Sequence: Synthetic oligonucleotide
aucguaggagccuaacugc

SEQ ID NO: 2847720 - RNA, 19 nt, Artificial Sequence
  Description of Artificial Sequence: Synthetic oligonucleotide
aagguuguaagguggacca

SEQ ID NO: 2847721 - RNA, 19 nt, Artificial Sequence
  Description of Artificial Sequence: Synthetic oligonucleotide
aacuguguacacugaaguc

SEQ ID NO: 2847722 - RNA, 19 nt, Artificial Sequence
  Description of Artificial Sequence: Synthetic oligonucleotide
gaucguaggagccuaacug

SEQ ID NO: 2847723 - RNA, 19 nt, Artificial Sequence
  Description of Artificial Sequence: Synthetic oligonucleotide
uuucugagaugcuaagagg

SEQ ID NO: 2847724 - RNA, 19 nt, Artificial Sequence
  Description of Artificial Sequence: Synthetic oligonucleotide
guugugagcagccacaaug

SEQ ID NO: 2847725 - RNA, 19 nt, Artificial Sequence
  Description of Artificial Sequence: Synthetic oligonucleotide
guaagguggaccaugaugc

SEQ ID NO: 2847726 - RNA, 19 nt, Artificial Sequence
  Description of Artificial Sequence: Synthetic oligonucleotide
ugaccuugcagccacaacu

SEQ ID NO: 2847727 - RNA, 19 nt, Artificial Sequence
  Description of Artificial Sequence: Synthetic oligonucleotide
aggcccuugaccuugcagc

SEQ ID NO: 2847728 - RNA, 19 nt, Artificial Sequence
  Description of Artificial Sequence: Synthetic oligonucleotide
aaagcggccaucccugggg

SEQ ID NO: 2847729 - RNA, 19 nt, Artificial Sequence
  Description of Artificial Sequence: Synthetic oligonucleotide
gcauuugugaucaucaucg

SEQ ID NO: 2847730 - RNA, 19 nt, Artificial Sequence
  Description of Artificial Sequence: Synthetic oligonucleotide
ugagcagccacaaugcggu

SEQ ID NO: 2847731 - RNA, 19 nt, Artificial Sequence
  Description of Artificial Sequence: Synthetic oligonucleotide
cacaaugcgguaaaagggc

SEQ ID NO: 2847732 - RNA, 19 nt, Artificial Sequence
  Description of Artificial Sequence: Synthetic oligonucleotide
gagaaagguuguaaggugg

SEQ ID NO: 2847733 - RNA, 19 nt, Artificial Sequence
  Description of Artificial Sequence: Synthetic oligonucleotide
acuucucgagcucucuucc

SEQ ID NO: 2847734 - RNA, 19 nt, Artificial Sequence
  Description of Artificial Sequence: Synthetic oligonucleotide
auuacuguugggcagugga

SEQ ID NO: 2847735 - RNA, 19 nt, Artificial Sequence
  Description of Artificial Sequence: Synthetic oligonucleotide
ugagaaagguuguaaggug

SEQ ID NO: 2847736 - RNA, 19 nt, Artificial Sequence
  Description of Artificial Sequence: Synthetic oligonucleotide
aaaacuccauuuauugauc

SEQ ID NO: 2847737 - RNA, 19 nt, Artificial Sequence
  Description of Artificial Sequence: Synthetic oligonucleotide
agcauuugugaucaucauc

SEQ ID NO: 2847738 - RNA, 19 nt, Artificial Sequence
  Description of Artificial Sequence: Synthetic oligonucleotide
aaugcgguaaaagggccgg

SEQ ID NO: 2847739 - RNA, 19 nt, Artificial Sequence
  Description of Artificial Sequence: Synthetic oligonucleotide
aauccaaugccggauccgg

SEQ ID NO: 2847740 - RNA, 19 nt, Artificial Sequence
  Description of Artificial Sequence: Synthetic oligonucleotide
cagaaguuucuccauaggc

SEQ ID NO: 2847741 - RNA, 19 nt, Artificial Sequence
  Description of Artificial Sequence: Synthetic oligonucleotide
acuuguugugagcagccac

SEQ ID NO: 2847742 - RNA, 19 nt, Artificial Sequence
  Description of Artificial Sequence: Synthetic oligonucleotide
auccgguccagguugaggg

SEQ ID NO: 2847743 - RNA, 19 nt, Artificial Sequence
  Description of Artificial Sequence: Synthetic oligonucleotide
uccgauucuguuuucugag

SEQ ID NO: 2847744 - RNA, 19 nt, Artificial Sequence
  Description of Artificial Sequence: Synthetic oligonucleotide
uucuccauuacuguugggc

SEQ ID NO: 2847745 - RNA, 19 nt, Artificial Sequence
  Description of Artificial Sequence: Synthetic oligonucleotide
guugugaaggcccuugacc

SEQ ID NO: 2847746 - RNA, 19 nt, Artificial Sequence
  Description of Artificial Sequence: Synthetic oligonucleotide
agaaagacccagaaguuuc

SEQ ID NO: 2847747 - RNA, 19 nt, Artificial Sequence
  Description of Artificial Sequence: Synthetic oligonucleotide
agagaggugagccccacag

SEQ ID NO: 2847748 - RNA, 19 nt, Artificial Sequence
  Description of Artificial Sequence: Synthetic oligonucleotide
guacacugaagucagcuug

SEQ ID NO: 2847749 - RNA, 19 nt, Artificial Sequence
  Description of Artificial Sequence: Synthetic oligonucleotide
ugcugagaaagguuguaag

SEQ ID NO: 2847750 - RNA, 19 nt, Artificial Sequence
  Description of Artificial Sequence: Synthetic oligonucleotide
uaagaggacuucucgagcu

SEQ ID NO: 2847751 - RNA, 19 nt, Artificial Sequence
  Description of Artificial Sequence: Synthetic oligonucleotide
aguucuaugcaagaguugu

SEQ ID NO: 2847752 - RNA, 19 nt, Artificial Sequence
  Description of Artificial Sequence: Synthetic oligonucleotide
aaaacccagaaagacccag

SEQ ID NO: 2847753 - RNA, 19 nt, Artificial Sequence
  Description of Artificial Sequence: Synthetic oligonucleotide
ugugaucaucaucggaugc

SEQ ID NO: 2847754 - RNA, 19 nt, Artificial Sequence
  Description of Artificial Sequence: Synthetic oligonucleotide
acuguugggcaguggaucg

SEQ ID NO: 2847755 - RNA, 19 nt, Artificial Sequence
  Description of Artificial Sequence: Synthetic oligonucleotide
aggcuuagagaggugagcc

SEQ ID NO: 2847756 - RNA, 19 nt, Artificial Sequence
  Description of Artificial Sequence: Synthetic oligonucleotide
ugauccucaaacccaacaa

SEQ ID NO: 2847757 - RNA, 19 nt, Artificial Sequence
  Description of Artificial Sequence: Synthetic oligonucleotide
uugauccucaaacccaaca

SEQ ID NO: 2847758 - RNA, 19 nt, Artificial Sequence
  Description of Artificial Sequence: Synthetic oligonucleotide
aaaguucuaugcaagaguu

SEQ ID NO: 2847759 - RNA, 19 nt, Artificial Sequence
  Description of Artificial Sequence: Synthetic oligonucleotide
guaugcucugcugagaaag

SEQ ID NO: 2847760 - RNA, 19 nt, Artificial Sequence
  Description of Artificial Sequence: Synthetic oligonucleotide
uauugauccucaaacccaa

SEQ ID NO: 2847761 - RNA, 19 nt, Artificial Sequence
  Description of Artificial Sequence: Synthetic oligonucleotide
ucuccauuacuguugggca

SEQ ID NO: 2847762 - RNA, 19 nt, Artificial Sequence
  Description of Artificial Sequence: Synthetic oligonucleotide
uaugcucugcugagaaagg

SEQ ID NO: 2847763 - RNA, 19 nt, Artificial Sequence
  Description of Artificial Sequence: Synthetic oligonucleotide
uaacugcuccacaaagcgg

SEQ ID NO: 2847764 - RNA, 19 nt, Artificial Sequence
  Description of Artificial Sequence: Synthetic oligonucleotide
uguuuucugagaugcuaag

SEQ ID NO: 2847765 - RNA, 19 nt, Artificial Sequence
  Description of Artificial Sequence: Synthetic oligonucleotide
augcuaagaggacuucucg

SEQ ID NO: 2847766 - RNA, 19 nt, Artificial Sequence
  Description of Artificial Sequence: Synthetic oligonucleotide
acuccauuuauugauccuc

SEQ ID NO: 2847767 - RNA, 19 nt, Artificial Sequence
  Description of Artificial Sequence: Synthetic oligonucleotide
ugugagcagccacaaugcg

SEQ ID NO: 2847768 - RNA, 19 nt, Artificial Sequence
  Description of Artificial Sequence: Synthetic oligonucleotide
acuguguacacugaaguca

SEQ ID NO: 2847769 - RNA, 19 nt, Artificial Sequence
  Description of Artificial Sequence: Synthetic oligonucleotide
uucuaugcaagaguuguga

SEQ ID NO: 2847770 - RNA, 19 nt, Artificial Sequence
  Description of Artificial Sequence: Synthetic oligonucleotide
uacacugaagucagcuugc

SEQ ID NO: 2847771 - RNA, 19 nt, Artificial Sequence
  Description of Artificial Sequence: Synthetic oligonucleotide
gccacaaugcgguaaaagg

SEQ ID NO: 2847772 - RNA, 19 nt, Artificial Sequence
  Description of Artificial Sequence: Synthetic oligonucleotide
aaaagggccgguuggcgca

SEQ ID NO: 2847773 - RNA, 19 nt, Artificial Sequence
  Description of Artificial Sequence: Synthetic oligonucleotide
gauucuguuuucugagaug

SEQ ID NO: 2847774 - RNA, 19 nt, Artificial Sequence
  Description of Artificial Sequence: Synthetic oligonucleotide
uucgaagucucucagcauu

SEQ ID NO: 2847775 - RNA, 19 nt, Artificial Sequence
  Description of Artificial Sequence: Synthetic oligonucleotide
aagaggacuucucgagcuc

SEQ ID NO: 2847776 - RNA, 19 nt, Artificial Sequence
  Description of Artificial Sequence: Synthetic oligonucleotide
uaaaagggccgguuggcgc

SEQ ID NO: 2847777 - RNA, 19 nt, Artificial Sequence
  Description of Artificial Sequence: Synthetic oligonucleotide
cuguguacacugaagucag

SEQ ID NO: 2847778 - RNA, 19 nt, Artificial Sequence
  Description of Artificial Sequence: Synthetic oligonucleotide
gcugagaaagguuguaagg

SEQ ID NO: 2847779 - RNA, 19 nt, Artificial Sequence
  Description of Artificial Sequence: Synthetic oligonucleotide
auuugugaucaucaucgga

SEQ ID NO: 2847780 - RNA, 19 nt, Artificial Sequence
  Description of Artificial Sequence: Synthetic oligonucleotide
agucucucagcauuuguga

SEQ ID NO: 2847781 - RNA, 19 nt, Artificial Sequence
  Description of Artificial Sequence: Synthetic oligonucleotide
agaaguuucuccauaggcu

SEQ ID NO: 2847782 - RNA, 19 nt, Artificial Sequence
  Description of Artificial Sequence: Synthetic oligonucleotide
ucugagaugcuaagaggac

SEQ ID NO: 2847783 - RNA, 19 nt, Artificial Sequence
  Description of Artificial Sequence: Synthetic oligonucleotide
aacuccauuuauugauccu

SEQ ID NO: 2847784 - RNA, 19 nt, Artificial Sequence
  Description of Artificial Sequence: Synthetic oligonucleotide
ugagaugcuaagaggacuu

SEQ ID NO: 2847785 - RNA, 19 nt, Artificial Sequence
  Description of Artificial Sequence: Synthetic oligonucleotide
augcaagaguugugaaggc

SEQ ID NO: 2847786 - RNA, 19 nt, Artificial Sequence
  Description of Artificial Sequence: Synthetic oligonucleotide
aagcaaggcggaugguuag

SEQ ID NO: 2847787 - RNA, 19 nt, Artificial Sequence
  Description of Artificial Sequence: Synthetic oligonucleotide
cuaagaggacuucucgagc

SEQ ID NO: 2847788 - RNA, 19 nt, Artificial Sequence
  Description of Artificial Sequence: Synthetic oligonucleotide
acaaugcgguaaaagggcc

SEQ ID NO: 2847789 - RNA, 19 nt, Artificial Sequence
  Description of Artificial Sequence: Synthetic oligonucleotide
ucaucaucggaugcagggg

SEQ ID NO: 2847790 - RNA, 19 nt, Artificial Sequence
  Description of Artificial Sequence: Synthetic oligonucleotide
ugcuaagaggacuucucga

SEQ ID NO: 2847791 - RNA, 19 nt, Artificial Sequence
  Description of Artificial Sequence: Synthetic oligonucleotide
aagucucucagcauuugug

SEQ ID NO: 2847792 - RNA, 19 nt, Artificial Sequence
  Description of Artificial Sequence: Synthetic oligonucleotide
uugugaucaucaucggaug

SEQ ID NO: 2847793 - RNA, 19 nt, Artificial Sequence
  Description of Artificial Sequence: Synthetic oligonucleotide
guaggagccuaacugcucc

SEQ ID NO: 2847794 - RNA, 19 nt, Artificial Sequence
  Description of Artificial Sequence: Synthetic oligonucleotide
uccauaggcuuagagaggu

SEQ ID NO: 2847795 - RNA, 19 nt, Artificial Sequence
  Description of Artificial Sequence: Synthetic oligonucleotide
caugguaugcucugcugag

SEQ ID NO: 2847796 - RNA, 19 nt, Artificial Sequence
  Description of Artificial Sequence: Synthetic oligonucleotide
aacccagaaagacccagaa

SEQ ID NO: 2847797 - RNA, 19 nt, Artificial Sequence
  Description of Artificial Sequence: Synthetic oligonucleotide
ugaucaucaucggaugcag

SEQ ID NO: 2847798 - RNA, 19 nt, Artificial Sequence
  Description of Artificial Sequence: Synthetic oligonucleotide
ccacaaugcgguaaaaggg

SEQ ID NO: 2847799 - RNA, 19 nt, Artificial Sequence
  Description of Artificial Sequence: Synthetic oligonucleotide
aaggcccuugaccuugcag

SEQ ID NO: 2847800 - RNA, 19 nt, Artificial Sequence
  Description of Artificial Sequence: Synthetic oligonucleotide
ugggcaguggaucguagga

SEQ ID NO: 2847801 - RNA, 19 nt, Artificial Sequence
  Description of Artificial Sequence: Synthetic oligonucleotide
caaugcgguaaaagggccg

SEQ ID NO: 2847802 - RNA, 19 nt, Artificial Sequence
  Description of Artificial Sequence: Synthetic oligonucleotide
gcuaagaggacuucucgag

SEQ ID NO: 2847803 - RNA, 19 nt, Artificial Sequence
  Description of Artificial Sequence: Synthetic oligonucleotide
uuccuucgaagucucucag

SEQ ID NO: 2847804 - RNA, 19 nt, Artificial Sequence
  Description of Artificial Sequence: Synthetic oligonucleotide
ugguaugcucugcugagaa

SEQ ID NO: 2847805 - RNA, 19 nt, Artificial Sequence
  Description of Artificial Sequence: Synthetic oligonucleotide
cauuugugaucaucaucgg

SEQ ID NO: 2847806 - RNA, 19 nt, Artificial Sequence
  Description of Artificial Sequence: Synthetic oligonucleotide
uugggcaguggaucguagg

SEQ ID NO: 2847807 - RNA, 19 nt, Artificial Sequence
  Description of Artificial Sequence: Synthetic oligonucleotide
ucuaugcaagaguugugaa

SEQ ID NO: 2847808 - RNA, 19 nt, Artificial Sequence
  Description of Artificial Sequence: Synthetic oligonucleotide
uguuucuccaggcuccgau

SEQ ID NO: 2847809 - RNA, 19 nt, Artificial Sequence
  Description of Artificial Sequence: Synthetic oligonucleotide
ugcaagaguugugaaggcc

SEQ ID NO: 2847810 - RNA, 19 nt, Artificial Sequence
  Description of Artificial Sequence: Synthetic oligonucleotide
cacaaagcggccaucccug

SEQ ID NO: 2847811 - RNA, 19 nt, Artificial Sequence
  Description of Artificial Sequence: Synthetic oligonucleotide
ucuguuuucugagaugcua

SEQ ID NO: 2847812 - RNA, 19 nt, Artificial Sequence
  Description of Artificial Sequence: Synthetic oligonucleotide
acagccaauccaaugccgg

SEQ ID NO: 2847813 - RNA, 19 nt, Artificial Sequence
  Description of Artificial Sequence: Synthetic oligonucleotide
cacagccaauccaaugccg

SEQ ID NO: 2847814 - RNA, 19 nt, Artificial Sequence
  Description of Artificial Sequence: Synthetic oligonucleotide
ucguaggagccuaacugcu

SEQ ID NO: 2847815 - RNA, 19 nt, Artificial Sequence
  Description of Artificial Sequence: Synthetic oligonucleotide
acaacuguguacacugaag

SEQ ID NO: 2847816 - RNA, 19 nt, Artificial Sequence
  Description of Artificial Sequence: Synthetic oligonucleotide
gauccucaaacccaacaaa

SEQ ID NO: 2847817 - RNA, 19 nt, Artificial Sequence
  Description of Artificial Sequence: Synthetic oligonucleotide
gccacaacuguguacacug

SEQ ID NO: 2847818 - RNA, 19 nt, Artificial Sequence
  Description of Artificial Sequence: Synthetic oligonucleotide
guaaaagggccgguuggcg

SEQ ID NO: 2847819 - RNA, 19 nt, Artificial Sequence
  Description of Artificial Sequence: Synthetic oligonucleotide
uaaaacccagaaagaccca

SEQ ID NO: 2847820 - RNA, 19 nt, Artificial Sequence
  Description of Artificial Sequence: Synthetic oligonucleotide
gugagcagccacaaugcgg

SEQ ID NO: 2847821 - RNA, 19 nt, Artificial Sequence
  Description of Artificial Sequence: Synthetic oligonucleotide
cuccauuacuguugggcag

SEQ ID NO: 2847822 - RNA, 19 nt, Artificial Sequence
  Description of Artificial Sequence: Synthetic oligonucleotide
ucagcuugcuucuguuucu

SEQ ID NO: 2847823 - RNA, 19 nt, Artificial Sequence
  Description of Artificial Sequence: Synthetic oligonucleotide
gucagcuugcuucuguuuc

SEQ ID NO: 2847824 - RNA, 19 nt, Artificial Sequence
  Description of Artificial Sequence: Synthetic oligonucleotide
cuuguugugagcagccaca

SEQ ID NO: 2847825 - RNA, 19 nt, Artificial Sequence
  Description of Artificial Sequence: Synthetic oligonucleotide
cuccauaggcuuagagagg

SEQ ID NO: 2847826 - RNA, 19 nt, Artificial Sequence
  Description of Artificial Sequence: Synthetic oligonucleotide
gagcucucuuccuucgaag

SEQ ID NO: 2847827 - RNA, 19 nt, Artificial Sequence
  Description of Artificial Sequence: Synthetic oligonucleotide
aaagcaaggcggaugguua

SEQ ID NO: 2847828 - RNA, 19 nt, Artificial Sequence
  Description of Artificial Sequence: Synthetic oligonucleotide
agccacccaaagcaaggcg

SEQ ID NO: 2847829 - RNA, 19 nt, Artificial Sequence
  Description of Artificial Sequence: Synthetic oligonucleotide
gacuucucgagcucucuuc

SEQ ID NO: 2847830 - RNA, 19 nt, Artificial Sequence
  Description of Artificial Sequence: Synthetic oligonucleotide
agcucucuuccuucgaagu

SEQ ID NO: 2847831 - RNA, 19 nt, Artificial Sequence
  Description of Artificial Sequence: Synthetic oligonucleotide
gaaguuucuccauaggcuu

SEQ ID NO: 2847832 - RNA, 19 nt, Artificial Sequence
  Description of Artificial Sequence: Synthetic oligonucleotide
uguacacugaagucagcuu

SEQ ID NO: 2847833 - RNA, 19 nt, Artificial Sequence
  Description of Artificial Sequence: Synthetic oligonucleotide
aaguucuaugcaagaguug

SEQ ID NO: 2847834 - RNA, 19 nt, Artificial Sequence
  Description of Artificial Sequence: Synthetic oligonucleotide
uccacaaagcggccauccc

SEQ ID NO: 2847835 - RNA, 19 nt, Artificial Sequence
  Description of Artificial Sequence: Synthetic oligonucleotide
uaggcuuagagaggugagc

SEQ ID NO: 2847836 - RNA, 19 nt, Artificial Sequence
  Description of Artificial Sequence: Synthetic oligonucleotide
acccagaaagacccagaag

SEQ ID NO: 2847837 - RNA, 19 nt, Artificial Sequence
  Description of Artificial Sequence: Synthetic oligonucleotide
uccaaugccggauccgguc

SEQ ID NO: 2847838 - RNA, 19 nt, Artificial Sequence
  Description of Artificial Sequence: Synthetic oligonucleotide
gaucaucaucggaugcagg

SEQ ID NO: 2847839 - RNA, 19 nt, Artificial Sequence
  Description of Artificial Sequence: Synthetic oligonucleotide
uuacuguugggcaguggau

SEQ ID NO: 2847840 - RNA, 19 nt, Artificial Sequence
  Description of Artificial Sequence: Synthetic oligonucleotide
ucuguuucuccaggcuccg

SEQ ID NO: 2847841 - RNA, 19 nt, Artificial Sequence
  Description of Artificial Sequence: Synthetic oligonucleotide
uccauuacuguugggcagu

SEQ ID NO: 2847842 - RNA, 19 nt, Artificial Sequence
  Description of Artificial Sequence: Synthetic oligonucleotide
ggcgcagccacccaaagca

SEQ ID NO: 2847843 - RNA, 19 nt, Artificial Sequence
  Description of Artificial Sequence: Synthetic oligonucleotide
uccuucgaagucucucagc

SEQ ID NO: 2847844 - RNA, 19 nt, Artificial Sequence
  Description of Artificial Sequence: Synthetic oligonucleotide
cucgagcucucuuccuucg

SEQ ID NO: 2847845 - RNA, 19 nt, Artificial Sequence
  Description of Artificial Sequence: Synthetic oligonucleotide
gaccuugcagccacaacug

SEQ ID NO: 2847846 - RNA, 19 nt, Artificial Sequence
  Description of Artificial Sequence: Synthetic oligonucleotide
uacuguugggcaguggauc

SEQ ID NO: 2847847 - RNA, 19 nt, Artificial Sequence
  Description of Artificial Sequence: Synthetic oligonucleotide
uccagguugagggcaacca

SEQ ID NO: 2847848 - RNA, 19 nt, Artificial Sequence
  Description of Artificial Sequence: Synthetic oligonucleotide
cuuccuucgaagucucuca

SEQ ID NO: 2847849 - RNA, 19 nt, Artificial Sequence
  Description of Artificial Sequence: Synthetic oligonucleotide
cucucagcauuugugauca

SEQ ID NO: 2847850 - RNA, 19 nt, Artificial Sequence
  Description of Artificial Sequence: Synthetic oligonucleotide
acaaagcggccaucccugg

SEQ ID NO: 2847851 - RNA, 19 nt, Artificial Sequence
  Description of Artificial Sequence: Synthetic oligonucleotide
agccacaaugcgguaaaag

SEQ ID NO: 2847852 - RNA, 19 nt, Artificial Sequence
  Description of Artificial Sequence: Synthetic oligonucleotide
ggguaaaacccagaaagac

SEQ ID NO: 2847853 - RNA, 19 nt, Artificial Sequence
  Description of Artificial Sequence: Synthetic oligonucleotide
gcaagaguugugaaggccc

SEQ ID NO: 2847854 - RNA, 19 nt, Artificial Sequence
  Description of Artificial Sequence: Synthetic oligonucleotide
gauccgguccagguugagg

SEQ ID NO: 2847855 - RNA, 19 nt, Artificial Sequence
  Description of Artificial Sequence: Synthetic oligonucleotide
ccuaacugcuccacaaagc

SEQ ID NO: 2847856 - RNA, 19 nt, Artificial Sequence
  Description of Artificial Sequence: Synthetic oligonucleotide
uccauuuauugauccucaa

SEQ ID NO: 2847857 - RNA, 19 nt, Artificial Sequence
  Description of Artificial Sequence: Synthetic oligonucleotide
uguguacacugaagucagc

SEQ ID NO: 2847858 - RNA, 19 nt, Artificial Sequence
  Description of Artificial Sequence: Synthetic oligonucleotide
uuucuccauuacuguuggg

SEQ ID NO: 2847859 - RNA, 19 nt, Artificial Sequence
  Description of Artificial Sequence: Synthetic oligonucleotide
ggcaguggaucguaggagc

SEQ ID NO: 2847860 - RNA, 19 nt, Artificial Sequence
  Description of Artificial Sequence: Synthetic oligonucleotide
cauaggcuuagagagguga

SEQ ID NO: 2847861 - RNA, 19 nt, Artificial Sequence
  Description of Artificial Sequence: Synthetic oligonucleotide
auaggcuuagagaggugag

SEQ ID NO: 2847862 - RNA, 19 nt, Artificial Sequence
  Description of Artificial Sequence: Synthetic oligonucleotide
aggcggaugguuagguggc

SEQ ID NO: 2847863 - RNA, 19 nt, Artificial Sequence
  Description of Artificial Sequence: Synthetic oligonucleotide
ugcagccacaacuguguac

SEQ ID NO: 2847864 - RNA, 19 nt, Artificial Sequence
  Description of Artificial Sequence: Synthetic oligonucleotide
ugcucugcugagaaagguu

SEQ ID NO: 2847865 - RNA, 19 nt, Artificial Sequence
  Description of Artificial Sequence: Synthetic oligonucleotide
uucuguuuucugagaugcu

SEQ ID NO: 2847866 - RNA, 19 nt, Artificial Sequence
  Description of Artificial Sequence: Synthetic oligonucleotide
cuccauuuauugauccuca

SEQ ID NO: 2847867 - RNA, 19 nt, Artificial Sequence
  Description of Artificial Sequence: Synthetic oligonucleotide
agaugcuaagaggacuucu

SEQ ID NO: 2847868 - RNA, 19 nt, Artificial Sequence
  Description of Artificial Sequence: Synthetic oligonucleotide
ugagccccacagccaaucc

SEQ ID NO: 2847869 - RNA, 19 nt, Artificial Sequence
  Description of Artificial Sequence: Synthetic oligonucleotide
ucucuuccuucgaagucuc

SEQ ID NO: 2847870 - RNA, 19 nt, Artificial Sequence
  Description of Artificial Sequence: Synthetic oligonucleotide
aaacccagaaagacccaga

SEQ ID NO: 2847871 - RNA, 19 nt, Artificial Sequence
  Description of Artificial Sequence: Synthetic oligonucleotide
gaaagguuguaagguggac

SEQ ID NO: 2847872 - RNA, 19 nt, Artificial Sequence
  Description of Artificial Sequence: Synthetic oligonucleotide
uucucgagcucucuuccuu

SEQ ID NO: 2847873 - RNA, 19 nt, Artificial Sequence
  Description of Artificial Sequence: Synthetic oligonucleotide
agaaagguuguaaggugga

SEQ ID NO: 2847874 - RNA, 19 nt, Artificial Sequence
  Description of Artificial Sequence: Synthetic oligonucleotide
gagaggugagccccacagc

SEQ ID NO: 2847875 - RNA, 19 nt, Artificial Sequence
  Description of Artificial Sequence: Synthetic oligonucleotide
caauccaaugccggauccg

SEQ ID NO: 2847876 - RNA, 19 nt, Artificial Sequence
  Description of Artificial Sequence: Synthetic oligonucleotide
ucgaagucucucagcauuu

SEQ ID NO: 2847877 - RNA, 19 nt, Artificial Sequence
  Description of Artificial Sequence: Synthetic oligonucleotide
uugaccuugcagccacaac

SEQ ID NO: 2847878 - RNA, 19 nt, Artificial Sequence
  Description of Artificial Sequence: Synthetic oligonucleotide
cuccacaaagcggccaucc

SEQ ID NO: 2847879 - RNA, 19 nt, Artificial Sequence
  Description of Artificial Sequence: Synthetic oligonucleotide
gccuaacugcuccacaaag

SEQ ID NO: 2847880 - RNA, 19 nt, Artificial Sequence
  Description of Artificial Sequence: Synthetic oligonucleotide
gcuuagagaggugagcccc

SEQ ID NO: 2847881 - RNA, 19 nt, Artificial Sequence
  Description of Artificial Sequence: Synthetic oligonucleotide
guuuucugagaugcuaaga

SEQ ID NO: 2847882 - RNA, 19 nt, Artificial Sequence
  Description of Artificial Sequence: Synthetic oligonucleotide
uuggcgcagccacccaaag

SEQ ID NO: 2847883 - RNA, 19 nt, Artificial Sequence
  Description of Artificial Sequence: Synthetic oligonucleotide
ucucgagcucucuuccuuc

SEQ ID NO: 2847884 - RNA, 19 nt, Artificial Sequence
  Description of Artificial Sequence: Synthetic oligonucleotide
cucagcauuugugaucauc

SEQ ID NO: 2847885 - RNA, 19 nt, Artificial Sequence
  Description of Artificial Sequence: Synthetic oligonucleotide
caacuguguacacugaagu

SEQ ID NO: 2847886 - RNA, 19 nt, Artificial Sequence
  Description of Artificial Sequence: Synthetic oligonucleotide
cuccgauucuguuuucuga

SEQ ID NO: 2847887 - RNA, 19 nt, Artificial Sequence
  Description of Artificial Sequence: Synthetic oligonucleotide
gugaucaucaucggaugca

SEQ ID NO: 2847888 - RNA, 19 nt, Artificial Sequence
  Description of Artificial Sequence: Synthetic oligonucleotide
uggcgcagccacccaaagc

SEQ ID NO: 2847889 - RNA, 19 nt, Artificial Sequence
  Description of Artificial Sequence: Synthetic oligonucleotide
gguuguaagguggaccaug

SEQ ID NO: 2847890 - RNA, 19 nt, Artificial Sequence
  Description of Artificial Sequence: Synthetic oligonucleotide
caaagcggccaucccuggg

SEQ ID NO: 2847891 - RNA, 19 nt, Artificial Sequence
  Description of Artificial Sequence: Synthetic oligonucleotide
auugauccucaaacccaac

SEQ ID NO: 2847892 - RNA, 19 nt, Artificial Sequence
  Description of Artificial Sequence: Synthetic oligonucleotide
cccagaaagacccagaagu

SEQ ID NO: 2847893 - RNA, 19 nt, Artificial Sequence
  Description of Artificial Sequence: Synthetic oligonucleotide
cugagaaagguuguaaggu

SEQ ID NO: 2847894 - RNA, 19 nt, Artificial Sequence
  Description of Artificial Sequence: Synthetic oligonucleotide
aggagccuaacugcuccac

SEQ ID NO: 2847895 - RNA, 19 nt, Artificial Sequence
  Description of Artificial Sequence: Synthetic oligonucleotide
acugcuccacaaagcggcc

SEQ ID NO: 2847896 - RNA, 19 nt, Artificial Sequence
  Description of Artificial Sequence: Synthetic oligonucleotide
gccacccaaagcaaggcgg

SEQ ID NO: 2847897 - RNA, 19 nt, Artificial Sequence
  Description of Artificial Sequence: Synthetic oligonucleotide
gugaaggcccuugaccuug

SEQ ID NO: 2847898 - RNA, 19 nt, Artificial Sequence
  Description of Artificial Sequence: Synthetic oligonucleotide
uggggcacuuguugugagc

SEQ ID NO: 2847899 - RNA, 19 nt, Artificial Sequence
  Description of Artificial Sequence: Synthetic oligonucleotide
aaugccggauccgguccag

SEQ ID NO: 2847900 - RNA, 19 nt, Artificial Sequence
  Description of Artificial Sequence: Synthetic oligonucleotide
ugaaggcccuugaccuugc

SEQ ID NO: 2847901 - RNA, 19 nt, Artificial Sequence
  Description of Artificial Sequence: Synthetic oligonucleotide
guucuaugcaagaguugug

SEQ ID NO: 2847902 - RNA, 19 nt, Artificial Sequence
  Description of Artificial Sequence: Synthetic oligonucleotide
aggugagccccacagccaa

SEQ ID NO: 2847903 - RNA, 19 nt, Artificial Sequence
  Description of Artificial Sequence: Synthetic oligonucleotide
agcaaggcggaugguuagg

SEQ ID NO: 2847904 - RNA, 19 nt, Artificial Sequence
  Description of Artificial Sequence: Synthetic oligonucleotide
gaagucagcuugcuucugu

SEQ ID NO: 2847905 - RNA, 19 nt, Artificial Sequence
  Description of Artificial Sequence: Synthetic oligonucleotide
gguaaaagggccgguuggc

SEQ ID NO: 2847906 - RNA, 19 nt, Artificial Sequence
  Description of Artificial Sequence: Synthetic oligonucleotide
uuguugugagcagccacaa

SEQ ID NO: 2847907 - RNA, 19 nt, Artificial Sequence
  Description of Artificial Sequence: Synthetic oligonucleotide
gaagucucucagcauuugu

SEQ ID NO: 2847908 - RNA, 19 nt, Artificial Sequence
  Description of Artificial Sequence: Synthetic oligonucleotide
gcucugcugagaaagguug

SEQ ID NO: 2847909 - RNA, 19 nt, Artificial Sequence
  Description of Artificial Sequence: Synthetic oligonucleotide
caaggcggaugguuaggug

SEQ ID NO: 2847910 - RNA, 19 nt, Artificial Sequence
  Description of Artificial Sequence: Synthetic oligonucleotide
uuguaagguggaccaugau

SEQ ID NO: 2847911 - RNA, 19 nt, Artificial Sequence
  Description of Artificial Sequence: Synthetic oligonucleotide
uguugugagcagccacaau

SEQ ID NO: 2847912 - RNA, 19 nt, Artificial Sequence
  Description of Artificial Sequence: Synthetic oligonucleotide
acccaaagcaaggcggaug

SEQ ID NO: 2847913 - RNA, 19 nt, Artificial Sequence
  Description of Artificial Sequence: Synthetic oligonucleotide
ucgagcucucuuccuucga

SEQ ID NO: 2847914 - RNA, 19 nt, Artificial Sequence
  Description of Artificial Sequence: Synthetic oligonucleotide
uaggagccuaacugcucca

SEQ ID NO: 2847915 - RNA, 19 nt, Artificial Sequence
  Description of Artificial Sequence: Synthetic oligonucleotide
ugaagucagcuugcuucug

SEQ ID NO: 2847916 - RNA, 19 nt, Artificial Sequence
  Description of Artificial Sequence: Synthetic oligonucleotide
ugccggauccgguccaggu

SEQ ID NO: 2847917 - RNA, 19 nt, Artificial Sequence
  Description of Artificial Sequence: Synthetic oligonucleotide
ugugaaggcccuugaccuu

SEQ ID NO: 2847918 - RNA, 19 nt, Artificial Sequence
  Description of Artificial Sequence: Synthetic oligonucleotide
ccagaaguuucuccauagg

SEQ ID NO: 2847919 - RNA, 19 nt, Artificial Sequence
  Description of Artificial Sequence: Synthetic oligonucleotide
cuuagagaggugagcccca

SEQ ID NO: 2847920 - RNA, 19 nt, Artificial Sequence
  Description of Artificial Sequence: Synthetic oligonucleotide
uuagagaggugagccccac

SEQ ID NO: 2847921 - RNA, 19 nt, Artificial Sequence
  Description of Artificial Sequence: Synthetic oligonucleotide
cauuacuguugggcagugg

SEQ ID NO: 2847922 - RNA, 19 nt, Artificial Sequence
  Description of Artificial Sequence: Synthetic oligonucleotide
ggcacuuguugugagcagc

SEQ ID NO: 2847923 - RNA, 19 nt, Artificial Sequence
  Description of Artificial Sequence: Synthetic oligonucleotide
aaguuucuccauaggcuua

SEQ ID NO: 2847924 - RNA, 19 nt, Artificial Sequence
  Description of Artificial Sequence: Synthetic oligonucleotide
augcucugcugagaaaggu

SEQ ID NO: 2847925 - RNA, 19 nt, Artificial Sequence
  Description of Artificial Sequence: Synthetic oligonucleotide
agucagcuugcuucuguuu

SEQ ID NO: 2847926 - RNA, 19 nt, Artificial Sequence
  Description of Artificial Sequence: Synthetic oligonucleotide
aaagggccgguuggcgcag

SEQ ID NO: 2847927 - RNA, 19 nt, Artificial Sequence
  Description of Artificial Sequence: Synthetic oligonucleotide
gcuugcuucuguuucucca

SEQ ID NO: 2847928 - RNA, 19 nt, Artificial Sequence
  Description of Artificial Sequence: Synthetic oligonucleotide
gcagccacccaaagcaagg

SEQ ID NO: 2847929 - RNA, 19 nt, Artificial Sequence
  Description of Artificial Sequence: Synthetic oligonucleotide
accuugcagccacaacugu

SEQ ID NO: 2847930 - RNA, 19 nt, Artificial Sequence
  Description of Artificial Sequence: Synthetic oligonucleotide
agccuaacugcuccacaaa

SEQ ID NO: 2847931 - RNA, 19 nt, Artificial Sequence
  Description of Artificial Sequence: Synthetic oligonucleotide
ggcuuagagaggugagccc

SEQ ID NO: 2847932 - RNA, 19 nt, Artificial Sequence
  Description of Artificial Sequence: Synthetic oligonucleotide
agggccgguuggcgcagcc

SEQ ID NO: 2847933 - RNA, 19 nt, Artificial Sequence
  Description of Artificial Sequence: Synthetic oligonucleotide
cuggggcacuuguugugag

SEQ ID NO: 2847934 - RNA, 19 nt, Artificial Sequence
  Description of Artificial Sequence: Synthetic oligonucleotide
uggaucguaggagccuaac

SEQ ID NO: 2847935 - RNA, 19 nt, Artificial Sequence
  Description of Artificial Sequence: Synthetic oligonucleotide
ccaauccaaugccggaucc

SEQ ID NO: 2847936 - RNA, 19 nt, Artificial Sequence
  Description of Artificial Sequence: Synthetic oligonucleotide
acccagaaguuucuccaua

SEQ ID NO: 2847937 - RNA, 19 nt, Artificial Sequence
  Description of Artificial Sequence: Synthetic oligonucleotide
ccuugcagccacaacugug

SEQ ID NO: 2847938 - RNA, 19 nt, Artificial Sequence
  Description of Artificial Sequence: Synthetic oligonucleotide
guguacacugaagucagcu

SEQ ID NO: 2847939 - RNA, 19 nt, Artificial Sequence
  Description of Artificial Sequence: Synthetic oligonucleotide
gcgguaaaagggccgguug

SEQ ID NO: 2847940 - RNA, 19 nt, Artificial Sequence
  Description of Artificial Sequence: Synthetic oligonucleotide
ggcccuugaccuugcagcc

SEQ ID NO: 2847941 - RNA, 19 nt, Artificial Sequence
  Description of Artificial Sequence: Synthetic oligonucleotide
uguugggcaguggaucgua

SEQ ID NO: 2847942 - RNA, 19 nt, Artificial Sequence
  Description of Artificial Sequence: Synthetic oligonucleotide
aguggaucguaggagccua

SEQ ID NO: 2847943 - RNA, 19 nt, Artificial Sequence
  Description of Artificial Sequence: Synthetic oligonucleotide
agccacaacuguguacacu

SEQ ID NO: 2847944 - RNA, 19 nt, Artificial Sequence
  Description of Artificial Sequence: Synthetic oligonucleotide
gaaagacccagaaguuucu

SEQ ID NO: 2847945 - RNA, 19 nt, Artificial Sequence
  Description of Artificial Sequence: Synthetic oligonucleotide
gagaugcuaagaggacuuc

SEQ ID NO: 2847946 - RNA, 19 nt, Artificial Sequence
  Description of Artificial Sequence: Synthetic oligonucleotide
agccaauccaaugccggau

SEQ ID NO: 2847947 - RNA, 19 nt, Artificial Sequence
  Description of Artificial Sequence: Synthetic oligonucleotide
cagccacccaaagcaaggc

SEQ ID NO: 2847948 - RNA, 19 nt, Artificial Sequence
  Description of Artificial Sequence: Synthetic oligonucleotide
gcuccgauucuguuuucug

SEQ ID NO: 2847949 - RNA, 19 nt, Artificial Sequence
  Description of Artificial Sequence: Synthetic oligonucleotide
uugcagccacaacugugua

SEQ ID NO: 2847950 - RNA, 19 nt, Artificial Sequence
  Description of Artificial Sequence: Synthetic oligonucleotide
guugggcaguggaucguag

SEQ ID NO: 2847951 - RNA, 19 nt, Artificial Sequence
  Description of Artificial Sequence: Synthetic oligonucleotide
ugcgguaaaagggccgguu

SEQ ID NO: 2847952 - RNA, 19 nt, Artificial Sequence
  Description of Artificial Sequence: Synthetic oligonucleotide
augguaugcucugcugaga

SEQ ID NO: 2847953 - RNA, 19 nt, Artificial Sequence
  Description of Artificial Sequence: Synthetic oligonucleotide
ccaaugccggauccggucc

SEQ ID NO: 2847954 - RNA, 19 nt, Artificial Sequence
  Description of Artificial Sequence: Synthetic oligonucleotide
cagguugagggcaaccagu

SEQ ID NO: 2847955 - RNA, 19 nt, Artificial Sequence
  Description of Artificial Sequence: Synthetic oligonucleotide
acacugaagucagcuugcu

SEQ ID NO: 2847956 - RNA, 19 nt, Artificial Sequence
  Description of Artificial Sequence: Synthetic oligonucleotide
aagaguugugaaggcccuu

SEQ ID NO: 2847957 - RNA, 19 nt, Artificial Sequence
  Description of Artificial Sequence: Synthetic oligonucleotide
agccccacagccaauccaa

SEQ ID NO: 2847958 - RNA, 19 nt, Artificial Sequence
  Description of Artificial Sequence: Synthetic oligonucleotide
uccaggcuccgauucuguu

SEQ ID NO: 2847959 - RNA, 19 nt, Artificial Sequence
  Description of Artificial Sequence: Synthetic oligonucleotide
ccggauccgguccagguug

SEQ ID NO: 2847960 - RNA, 19 nt, Artificial Sequence
  Description of Artificial Sequence: Synthetic oligonucleotide
caagaguugugaaggcccu

SEQ ID NO: 2847961 - RNA, 19 nt, Artificial Sequence
  Description of Artificial Sequence: Synthetic oligonucleotide
gggguaaaacccagaaaga

SEQ ID NO: 2847962 - RNA, 19 nt, Artificial Sequence
  Description of Artificial Sequence: Synthetic oligonucleotide
gcacuuguugugagcagcc

SEQ ID NO: 2847963 - RNA, 19 nt, Artificial Sequence
  Description of Artificial Sequence: Synthetic oligonucleotide
aagggccgguuggcgcagc

SEQ ID NO: 2847964 - RNA, 19 nt, Artificial Sequence
  Description of Artificial Sequence: Synthetic oligonucleotide
cugagaugcuaagaggacu

SEQ ID NO: 2847965 - RNA, 19 nt, Artificial Sequence
  Description of Artificial Sequence: Synthetic oligonucleotide
gaggugagccccacagcca

SEQ ID NO: 2847966 - RNA, 19 nt, Artificial Sequence
  Description of Artificial Sequence: Synthetic oligonucleotide
gcucucuuccuucgaaguc

SEQ ID NO: 2847967 - RNA, 19 nt, Artificial Sequence
  Description of Artificial Sequence: Synthetic oligonucleotide
agguugagggcaaccaguu

SEQ ID NO: 2847968 - RNA, 19 nt, Artificial Sequence
  Description of Artificial Sequence: Synthetic oligonucleotide
gggcaguggaucguaggag

SEQ ID NO: 2847969 - RNA, 19 nt, Artificial Sequence
  Description of Artificial Sequence: Synthetic oligonucleotide
cagccaauccaaugccgga

SEQ ID NO: 2847970 - RNA, 19 nt, Artificial Sequence
  Description of Artificial Sequence: Synthetic oligonucleotide
gcaguggaucguaggagcc

SEQ ID NO: 2847971 - RNA, 19 nt, Artificial Sequence
  Description of Artificial Sequence: Synthetic oligonucleotide
ccauuuauugauccucaaa

SEQ ID NO: 2847972 - RNA, 19 nt, Artificial Sequence
  Description of Artificial Sequence: Synthetic oligonucleotide
gucucucagcauuugugau

SEQ ID NO: 2847973 - RNA, 19 nt, Artificial Sequence
  Description of Artificial Sequence: Synthetic oligonucleotide
gccaauccaaugccggauc

SEQ ID NO: 2847974 - RNA, 19 nt, Artificial Sequence
  Description of Artificial Sequence: Synthetic oligonucleotide
guccagguugagggcaacc

SEQ ID NO: 2847975 - RNA, 19 nt, Artificial Sequence
  Description of Artificial Sequence: Synthetic oligonucleotide
aggcuccgauucuguuuuc

SEQ ID NO: 2847976 - RNA, 19 nt, Artificial Sequence
  Description of Artificial Sequence: Synthetic oligonucleotide
gaggacuucucgagcucuc

SEQ ID NO: 2847977 - RNA, 19 nt, Artificial Sequence
  Description of Artificial Sequence: Synthetic oligonucleotide
cugcugagaaagguuguaa

SEQ ID NO: 2847978 - RNA, 19 nt, Artificial Sequence
  Description of Artificial Sequence: Synthetic oligonucleotide
ggagccuaacugcuccaca

SEQ ID NO: 2847979 - RNA, 19 nt, Artificial Sequence
  Description of Artificial Sequence: Synthetic oligonucleotide
ggccgguuggcgcagccac

SEQ ID NO: 2847980 - RNA, 19 nt, Artificial Sequence
  Description of Artificial Sequence: Synthetic oligonucleotide
cuugaccuugcagccacaa

SEQ ID NO: 2847981 - RNA, 19 nt, Artificial Sequence
  Description of Artificial Sequence: Synthetic oligonucleotide
gacccagaaguuucuccau

SEQ ID NO: 2847982 - RNA, 19 nt, Artificial Sequence
  Description of Artificial Sequence: Synthetic oligonucleotide
cagcuugcuucuguuucuc

SEQ ID NO: 2847983 - RNA, 19 nt, Artificial Sequence
  Description of Artificial Sequence: Synthetic oligonucleotide
gggcacuuguugugagcag

SEQ ID NO: 2847984 - RNA, 19 nt, Artificial Sequence
  Description of Artificial Sequence: Synthetic oligonucleotide
ggaucguaggagccuaacu

SEQ ID NO: 2847985 - RNA, 19 nt, Artificial Sequence
  Description of Artificial Sequence: Synthetic oligonucleotide
caaugccggauccggucca

SEQ ID NO: 2847986 - RNA, 19 nt, Artificial Sequence
  Description of Artificial Sequence: Synthetic oligonucleotide
auccaaugccggauccggu

SEQ ID NO: 2847987 - RNA, 19 nt, Artificial Sequence
  Description of Artificial Sequence: Synthetic oligonucleotide
gaaggcccuugaccuugca

SEQ ID NO: 2847988 - RNA, 19 nt, Artificial Sequence
  Description of Artificial Sequence: Synthetic oligonucleotide
caaagcaaggcggaugguu

SEQ ID NO: 2847989 - RNA, 19 nt, Artificial Sequence
  Description of Artificial Sequence: Synthetic oligonucleotide
cucugcugagaaagguugu

SEQ ID NO: 2847990 - RNA, 19 nt, Artificial Sequence
  Description of Artificial Sequence: Synthetic oligonucleotide
augccggauccgguccagg

SEQ ID NO: 2847991 - RNA, 19 nt, Artificial Sequence
  Description of Artificial Sequence: Synthetic oligonucleotide
gguaugcucugcugagaaa

SEQ ID NO: 2847992 - RNA, 19 nt, Artificial Sequence
  Description of Artificial Sequence: Synthetic oligonucleotide
caggcuccgauucuguuuu

SEQ ID NO: 2847993 - RNA, 19 nt, Artificial Sequence
  Description of Artificial Sequence: Synthetic oligonucleotide
ccccacagccaauccaaug

SEQ ID NO: 2847994 - RNA, 19 nt, Artificial Sequence
  Description of Artificial Sequence: Synthetic oligonucleotide
cggaugguuagguggcccc

SEQ ID NO: 2847995 - RNA, 19 nt, Artificial Sequence
  Description of Artificial Sequence: Synthetic oligonucleotide
cagaaagacccagaaguuu

SEQ ID NO: 2847996 - RNA, 19 nt, Artificial Sequence
  Description of Artificial Sequence: Synthetic oligonucleotide
cacuuguugugagcagcca

SEQ ID NO: 2847997 - RNA, 19 nt, Artificial Sequence
  Description of Artificial Sequence: Synthetic oligonucleotide
agguuguaagguggaccau

SEQ ID NO: 2847998 - RNA, 19 nt, Artificial Sequence
  Description of Artificial Sequence: Synthetic oligonucleotide
gguuggcgcagccacccaa

SEQ ID NO: 2847999 - RNA, 19 nt, Artificial Sequence
  Description of Artificial Sequence: Synthetic oligonucleotide
ucucagcauuugugaucau

SEQ ID NO: 2848000 - RNA, 19 nt, Artificial Sequence
  Description of Artificial Sequence: Synthetic oligonucleotide
cgcagccacccaaagcaag

SEQ ID NO: 2848001 - RNA, 19 nt, Artificial Sequence
  Description of Artificial Sequence: Synthetic oligonucleotide
augcgguaaaagggccggu

SEQ ID NO: 2848002 - RNA, 19 nt, Artificial Sequence
  Description of Artificial Sequence: Synthetic oligonucleotide
ccacccaaagcaaggcgga

SEQ ID NO: 2848003 - RNA, 19 nt, Artificial Sequence
  Description of Artificial Sequence: Synthetic oligonucleotide
cuucucgagcucucuuccu

SEQ ID NO: 2848004 - RNA, 19 nt, Artificial Sequence
  Description of Artificial Sequence: Synthetic oligonucleotide
gcggaugguuagguggccc

SEQ ID NO: 2848005 - RNA, 19 nt, Artificial Sequence
  Description of Artificial Sequence: Synthetic oligonucleotide
cguaggagccuaacugcuc

SEQ ID NO: 2848006 - RNA, 19 nt, Artificial Sequence
  Description of Artificial Sequence: Synthetic oligonucleotide
ccgauucuguuuucugaga

SEQ ID NO: 2848007 - RNA, 19 nt, Artificial Sequence
  Description of Artificial Sequence: Synthetic oligonucleotide
cagcauuugugaucaucau

SEQ ID NO: 2848008 - RNA, 19 nt, Artificial Sequence
  Description of Artificial Sequence: Synthetic oligonucleotide
ccauaggcuuagagaggug

SEQ ID NO: 2848009 - RNA, 19 nt, Artificial Sequence
  Description of Artificial Sequence: Synthetic oligonucleotide
cugcuccacaaagcggcca

SEQ ID NO: 2848010 - RNA, 19 nt, Artificial Sequence
  Description of Artificial Sequence: Synthetic oligonucleotide
ccacaaagcggccaucccu

SEQ ID NO: 2848011 - RNA, 19 nt, Artificial Sequence
  Description of Artificial Sequence: Synthetic oligonucleotide
ggcggaugguuagguggcc

SEQ ID NO: 2848012 - RNA, 19 nt, Artificial Sequence
  Description of Artificial Sequence: Synthetic oligonucleotide
gcggccaucccuggggcac

SEQ ID NO: 2848013 - RNA, 19 nt, Artificial Sequence
  Description of Artificial Sequence: Synthetic oligonucleotide
ccauuacuguugggcagug

SEQ ID NO: 2848014 - RNA, 19 nt, Artificial Sequence
  Description of Artificial Sequence: Synthetic oligonucleotide
ccagaaagacccagaaguu

SEQ ID NO: 2848015 - RNA, 19 nt, Artificial Sequence
  Description of Artificial Sequence: Synthetic oligonucleotide
caguggaucguaggagccu

SEQ ID NO: 2848016 - RNA, 19 nt, Artificial Sequence
  Description of Artificial Sequence: Synthetic oligonucleotide
gagcagccacaaugcggua

SEQ ID NO: 2848017 - RNA, 19 nt, Artificial Sequence
  Description of Artificial Sequence: Synthetic oligonucleotide
ggauccgguccagguugag

SEQ ID NO: 2848018 - RNA, 19 nt, Artificial Sequence
  Description of Artificial Sequence: Synthetic oligonucleotide
cuccaggcuccgauucugu

SEQ ID NO: 2848019 - RNA, 19 nt, Artificial Sequence
  Description of Artificial Sequence: Synthetic oligonucleotide
guggaucguaggagccuaa

SEQ ID NO: 2848020 - RNA, 19 nt, Artificial Sequence
  Description of Artificial Sequence: Synthetic oligonucleotide
cgauucuguuuucugagau

SEQ ID NO: 2848021 - RNA, 19 nt, Artificial Sequence
  Description of Artificial Sequence: Synthetic oligonucleotide
gcaaggcggaugguuaggu

SEQ ID NO: 2848022 - RNA, 19 nt, Artificial Sequence
  Description of Artificial Sequence: Synthetic oligonucleotide
cuguuucuccaggcuccga

SEQ ID NO: 2848023 - RNA, 19 nt, Artificial Sequence
  Description of Artificial Sequence: Synthetic oligonucleotide
gguccagguugagggcaac

SEQ ID NO: 2848024 - RNA, 19 nt, Artificial Sequence
  Description of Artificial Sequence: Synthetic oligonucleotide
ggcuccgauucuguuuucu

SEQ ID NO: 2848025 - RNA, 19 nt, Artificial Sequence
  Description of Artificial Sequence: Synthetic oligonucleotide
caucccuggggcacuuguu

SEQ ID NO: 2848026 - RNA, 19 nt, Artificial Sequence
  Description of Artificial Sequence: Synthetic oligonucleotide
gguugagggcaaccaguuu

SEQ ID NO: 2848027 - RNA, 19 nt, Artificial Sequence
  Description of Artificial Sequence: Synthetic oligonucleotide
ggacuucucgagcucucuu

SEQ ID NO: 2848028 - RNA, 19 nt, Artificial Sequence
  Description of Artificial Sequence: Synthetic oligonucleotide
ccgguccagguugagggca

SEQ ID NO: 2848029 - RNA, 19 nt, Artificial Sequence
  Description of Artificial Sequence: Synthetic oligonucleotide
cuguugggcaguggaucgu

SEQ ID NO: 2848030 - RNA, 19 nt, Artificial Sequence
  Description of Artificial Sequence: Synthetic oligonucleotide
cagccacaaugcgguaaaa

SEQ ID NO: 2848031 - RNA, 19 nt, Artificial Sequence
  Description of Artificial Sequence: Synthetic oligonucleotide
ccaggcuccgauucuguuu

SEQ ID NO: 2848032 - RNA, 19 nt, Artificial Sequence
  Description of Artificial Sequence: Synthetic oligonucleotide
ccaucccuggggcacuugu

SEQ ID NO: 2848033 - RNA, 19 nt, Artificial Sequence
  Description of Artificial Sequence: Synthetic oligonucleotide
ccuugaccuugcagccaca

SEQ ID NO: 2848034 - RNA, 19 nt, Artificial Sequence
  Description of Artificial Sequence: Synthetic oligonucleotide
cacccaaagcaaggcggau

SEQ ID NO: 2848035 - RNA, 19 nt, Artificial Sequence
  Description of Artificial Sequence: Synthetic oligonucleotide
gccggauccgguccagguu

SEQ ID NO: 2848036 - RNA, 19 nt, Artificial Sequence
  Description of Artificial Sequence: Synthetic oligonucleotide
gcgcagccacccaaagcaa

SEQ ID NO: 2848037 - RNA, 19 nt, Artificial Sequence
  Description of Artificial Sequence: Synthetic oligonucleotide
gggccgguuggcgcagcca

SEQ ID NO: 2848038 - RNA, 19 nt, Artificial Sequence
  Description of Artificial Sequence: Synthetic oligonucleotide
gccaucccuggggcacuug

SEQ ID NO: 2848039 - RNA, 19 nt, Artificial Sequence
  Description of Artificial Sequence: Synthetic oligonucleotide
cggauccgguccagguuga

SEQ ID NO: 2848040 - RNA, 19 nt, Artificial Sequence
  Description of Artificial Sequence: Synthetic oligonucleotide
ggugagccccacagccaau

SEQ ID NO: 2848041 - RNA, 19 nt, Artificial Sequence
  Description of Artificial Sequence: Synthetic oligonucleotide
ccaaagcaaggcggauggu

SEQ ID NO: 2848042 - RNA, 19 nt, Artificial Sequence
  Description of Artificial Sequence: Synthetic oligonucleotide
ggccaucccuggggcacuu

SEQ ID NO: 2848043 - RNA, 19 nt, Artificial Sequence
  Description of Artificial Sequence: Synthetic oligonucleotide
gaaaaguuaacacagaggc

SEQ ID NO: 2848044 - RNA, 19 nt, Artificial Sequence
  Description of Artificial Sequence: Synthetic oligonucleotide
aaaguuaacacagaggcuc

SEQ ID NO: 2848045 - RNA, 19 nt, Artificial Sequence
  Description of Artificial Sequence: Synthetic oligonucleotide
auuguauggauccaguccc

SEQ ID NO: 2848046 - RNA, 19 nt, Artificial Sequence
  Description of Artificial Sequence: Synthetic oligonucleotide
uaaauuaggaucuuccuug

SEQ ID NO: 2848047 - RNA, 19 nt, Artificial Sequence
  Description of Artificial Sequence: Synthetic oligonucleotide
ucugcugcuaucaugaucu

SEQ ID NO: 2848048 - RNA, 19 nt, Artificial Sequence
  Description of Artificial Sequence: Synthetic oligonucleotide
uaaccuugaagccaucucg

SEQ ID NO: 2848049 - RNA, 19 nt, Artificial Sequence
  Description of Artificial Sequence: Synthetic oligonucleotide
uauuguauggauccagucc

SEQ ID NO: 2848050 - RNA, 19 nt, Artificial Sequence
  Description of Artificial Sequence: Synthetic oligonucleotide
uagguagccaauacaaugg

SEQ ID NO: 2848051 - RNA, 19 nt, Artificial Sequence
  Description of Artificial Sequence: Synthetic oligonucleotide
ucuuuauuagagauaaacu

SEQ ID NO: 2848052 - RNA, 19 nt, Artificial Sequence
  Description of Artificial Sequence: Synthetic oligonucleotide
uauaauggguuccacagcu

SEQ ID NO: 2848053 - RNA, 19 nt, Artificial Sequence
  Description of Artificial Sequence: Synthetic oligonucleotide
uuagguagccaauacaaug

SEQ ID NO: 2848054 - RNA, 19 nt, Artificial Sequence
  Description of Artificial Sequence: Synthetic oligonucleotide
aauggcuagucuuuauuag

SEQ ID NO: 2848055 - RNA, 19 nt, Artificial Sequence
  Description of Artificial Sequence: Synthetic oligonucleotide
aaauuaggaucuuccuugg

SEQ ID NO: 2848056 - RNA, 19 nt, Artificial Sequence
  Description of Artificial Sequence: Synthetic oligonucleotide
uagcauauuguauggaucc

SEQ ID NO: 2848057 - RNA, 19 nt, Artificial Sequence
  Description of Artificial Sequence: Synthetic oligonucleotide
aaaggagcgugucgcaacc

SEQ ID NO: 2848058 - RNA, 19 nt, Artificial Sequence
  Description of Artificial Sequence: Synthetic oligonucleotide
uuagagauaaacuuuccau

SEQ ID NO: 2848059 - RNA, 19 nt, Artificial Sequence
  Description of Artificial Sequence: Synthetic oligonucleotide
aacacagaggcucagugga

SEQ ID NO: 2848060 - RNA, 19 nt, Artificial Sequence
  Description of Artificial Sequence: Synthetic oligonucleotide
uaauggguuccacagcugg

SEQ ID NO: 2848061 - RNA, 19 nt, Artificial Sequence
  Description of Artificial Sequence: Synthetic oligonucleotide
agagauaaacuuuccauca

SEQ ID NO: 2848062 - RNA, 19 nt, Artificial Sequence
  Description of Artificial Sequence: Synthetic oligonucleotide
uuuuggagguagcauauug

SEQ ID NO: 2848063 - RNA, 19 nt, Artificial Sequence
  Description of Artificial Sequence: Synthetic oligonucleotide
uuaacacagaggcucagug

SEQ ID NO: 2848064 - RNA, 19 nt, Artificial Sequence
  Description of Artificial Sequence: Synthetic oligonucleotide
ugcagccaaaaccagauga

SEQ ID NO: 2848065 - RNA, 19 nt, Artificial Sequence
  Description of Artificial Sequence: Synthetic oligonucleotide
ucacauucugaaaaguuaa

SEQ ID NO: 2848066 - RNA, 19 nt, Artificial Sequence
  Description of Artificial Sequence: Synthetic oligonucleotide
uggcuagucuuuauuagag

SEQ ID NO: 2848067 - RNA, 19 nt, Artificial Sequence
  Description of Artificial Sequence: Synthetic oligonucleotide
auuagagauaaacuuucca

SEQ ID NO: 2848068 - RNA, 19 nt, Artificial Sequence
  Description of Artificial Sequence: Synthetic oligonucleotide
auauuguauggauccaguc

SEQ ID NO: 2848069 - RNA, 19 nt, Artificial Sequence
  Description of Artificial Sequence: Synthetic oligonucleotide
gacuaaauuaggaucuucc

SEQ ID NO: 2848070 - RNA, 19 nt, Artificial Sequence
  Description of Artificial Sequence: Synthetic oligonucleotide
uagagauaaacuuuccauc

SEQ ID NO: 2848071 - RNA, 19 nt, Artificial Sequence
  Description of Artificial Sequence: Synthetic oligonucleotide
gucuuuauuagagauaaac

SEQ ID NO: 2848072 - RNA, 19 nt, Artificial Sequence
  Description of Artificial Sequence: Synthetic oligonucleotide
uauuagagauaaacuuucc

SEQ ID NO: 2848073 - RNA, 19 nt, Artificial Sequence
  Description of Artificial Sequence: Synthetic oligonucleotide
uuccaucacauucugaaaa

SEQ ID NO: 2848074 - RNA, 19 nt, Artificial Sequence
  Description of Artificial Sequence: Synthetic oligonucleotide
uagucuuuauuagagauaa

SEQ ID NO: 2848075 - RNA, 19 nt, Artificial Sequence
  Description of Artificial Sequence: Synthetic oligonucleotide
gaagcaaaggagcgugucg

SEQ ID NO: 2848076 - RNA, 19 nt, Artificial Sequence
  Description of Artificial Sequence: Synthetic oligonucleotide
gagguagcauauuguaugg

SEQ ID NO: 2848077 - RNA, 19 nt, Artificial Sequence
  Description of Artificial Sequence: Synthetic oligonucleotide
ucaguggaccaguuggugg

SEQ ID NO: 2848078 - RNA, 19 nt, Artificial Sequence
  Description of Artificial Sequence: Synthetic oligonucleotide
acuaaauuaggaucuuccu

SEQ ID NO: 2848079 - RNA, 19 nt, Artificial Sequence
  Description of Artificial Sequence: Synthetic oligonucleotide
aaccuugaagccaucucgc

SEQ ID NO: 2848080 - RNA, 19 nt, Artificial Sequence
  Description of Artificial Sequence: Synthetic oligonucleotide
uuauaauggguuccacagc

SEQ ID NO: 2848081 - RNA, 19 nt, Artificial Sequence
  Description of Artificial Sequence: Synthetic oligonucleotide
cuuugugcagccaaaacca

SEQ ID NO: 2848082 - RNA, 19 nt, Artificial Sequence
  Description of Artificial Sequence: Synthetic oligonucleotide
uccaucacauucugaaaag

SEQ ID NO: 2848083 - RNA, 19 nt, Artificial Sequence
  Description of Artificial Sequence: Synthetic oligonucleotide
gaugcagcccacuauucgc

SEQ ID NO: 2848084 - RNA, 19 nt, Artificial Sequence
  Description of Artificial Sequence: Synthetic oligonucleotide
agauaaacuuuccaucaca

SEQ ID NO: 2848085 - RNA, 19 nt, Artificial Sequence
  Description of Artificial Sequence: Synthetic oligonucleotide
uauggauccagucccuucu

SEQ ID NO: 2848086 - RNA, 19 nt, Artificial Sequence
  Description of Artificial Sequence: Synthetic oligonucleotide
agguagccaauacaauggc

SEQ ID NO: 2848087 - RNA, 19 nt, Artificial Sequence
  Description of Artificial Sequence: Synthetic oligonucleotide
uggaagggacuaaauuagg

SEQ ID NO: 2848088 - RNA, 19 nt, Artificial Sequence
  Description of Artificial Sequence: Synthetic oligonucleotide
aagccaucucgcccgagac

SEQ ID NO: 2848089 - RNA, 19 nt, Artificial Sequence
  Description of Artificial Sequence: Synthetic oligonucleotide
aaccagaugacagugcagu

SEQ ID NO: 2848090 - RNA, 19 nt, Artificial Sequence
  Description of Artificial Sequence: Synthetic oligonucleotide
uguagccugcuccucauca

SEQ ID NO: 2848091 - RNA, 19 nt, Artificial Sequence
  Description of Artificial Sequence: Synthetic oligonucleotide
ucugaaaaguuaacacaga

SEQ ID NO: 2848092 - RNA, 19 nt, Artificial Sequence
  Description of Artificial Sequence: Synthetic oligonucleotide
cuuccuuggugccugaagc

SEQ ID NO: 2848093 - RNA, 19 nt, Artificial Sequence
  Description of Artificial Sequence: Synthetic oligonucleotide
agaugcagcccacuauucg

SEQ ID NO: 2848094 - RNA, 19 nt, Artificial Sequence
  Description of Artificial Sequence: Synthetic oligonucleotide
aggaacaccaccuccagaa

SEQ ID NO: 2848095 - RNA, 19 nt, Artificial Sequence
  Description of Artificial Sequence: Synthetic oligonucleotide
gaacaccaccuccagaagc

SEQ ID NO: 2848096 - RNA, 19 nt, Artificial Sequence
  Description of Artificial Sequence: Synthetic oligonucleotide
auucgcuuguuggugaugg

SEQ ID NO: 2848097 - RNA, 19 nt, Artificial Sequence
  Description of Artificial Sequence: Synthetic oligonucleotide
cuuuauuagagauaaacuu

SEQ ID NO: 2848098 - RNA, 19 nt, Artificial Sequence
  Description of Artificial Sequence: Synthetic oligonucleotide
ugauggaagggacuaaauu

SEQ ID NO: 2848099 - RNA, 19 nt, Artificial Sequence
  Description of Artificial Sequence: Synthetic oligonucleotide
accagcuuauaauggguuc

SEQ ID NO: 2848100 - RNA, 19 nt, Artificial Sequence
  Description of Artificial Sequence: Synthetic oligonucleotide
uagccaauacaauggcuag

SEQ ID NO: 2848101 - RNA, 19 nt, Artificial Sequence
  Description of Artificial Sequence: Synthetic oligonucleotide
gacaagcagaugcacuucc

SEQ ID NO: 2848102 - RNA, 19 nt, Artificial Sequence
  Description of Artificial Sequence: Synthetic oligonucleotide
agugcaguuguccucuuca

SEQ ID NO: 2848103 - RNA, 19 nt, Artificial Sequence
  Description of Artificial Sequence: Synthetic oligonucleotide
ugguuagguagccaauaca

SEQ ID NO: 2848104 - RNA, 19 nt, Artificial Sequence
  Description of Artificial Sequence: Synthetic oligonucleotide
acauucugaaaaguuaaca

SEQ ID NO: 2848105 - RNA, 19 nt, Artificial Sequence
  Description of Artificial Sequence: Synthetic oligonucleotide
ggcucaguggaccaguugg

SEQ ID NO: 2848106 - RNA, 19 nt, Artificial Sequence
  Description of Artificial Sequence: Synthetic oligonucleotide
aaaaguuaacacagaggcu

SEQ ID NO: 2848107 - RNA, 19 nt, Artificial Sequence
  Description of Artificial Sequence: Synthetic oligonucleotide
caucaguaggaacaccacc

SEQ ID NO: 2848108 - RNA, 19 nt, Artificial Sequence
  Description of Artificial Sequence: Synthetic oligonucleotide
cucaucaguaggaacacca

SEQ ID NO: 2848109 - RNA, 19 nt, Artificial Sequence
  Description of Artificial Sequence: Synthetic oligonucleotide
gauccagucccuucucugc

SEQ ID NO: 2848110 - RNA, 19 nt, Artificial Sequence
  Description of Artificial Sequence: Synthetic oligonucleotide
cgcgaaguaaccuugaagc

SEQ ID NO: 2848111 - RNA, 19 nt, Artificial Sequence
  Description of Artificial Sequence: Synthetic oligonucleotide
uggaccucgccuuugugca

SEQ ID NO: 2848112 - RNA, 19 nt, Artificial Sequence
  Description of Artificial Sequence: Synthetic oligonucleotide
caguggaccaguugguggg

SEQ ID NO: 2848113 - RNA, 19 nt, Artificial Sequence
  Description of Artificial Sequence: Synthetic oligonucleotide
aucaguaggaacaccaccu

SEQ ID NO: 2848114 - RNA, 19 nt, Artificial Sequence
  Description of Artificial Sequence: Synthetic oligonucleotide
auggcuagucuuuauuaga

SEQ ID NO: 2848115 - RNA, 19 nt, Artificial Sequence
  Description of Artificial Sequence: Synthetic oligonucleotide
aggagcgugucgcaaccgc

SEQ ID NO: 2848116 - RNA, 19 nt, Artificial Sequence
  Description of Artificial Sequence: Synthetic oligonucleotide
augacagugcaguuguccu

SEQ ID NO: 2848117 - RNA, 19 nt, Artificial Sequence
  Description of Artificial Sequence: Synthetic oligonucleotide
acuauucgcuuguugguga

SEQ ID NO: 2848118 - RNA, 19 nt, Artificial Sequence
  Description of Artificial Sequence: Synthetic oligonucleotide
ucaucaguaggaacaccac

SEQ ID NO: 2848119 - RNA, 19 nt, Artificial Sequence
  Description of Artificial Sequence: Synthetic oligonucleotide
ccuuugugcagccaaaacc

SEQ ID NO: 2848120 - RNA, 19 nt, Artificial Sequence
  Description of Artificial Sequence: Synthetic oligonucleotide
cccacuauucgcuuguugg

SEQ ID NO: 2848121 - RNA, 19 nt, Artificial Sequence
  Description of Artificial Sequence: Synthetic oligonucleotide
agggacuaaauuaggaucu

SEQ ID NO: 2848122 - RNA, 19 nt, Artificial Sequence
  Description of Artificial Sequence: Synthetic oligonucleotide
cuggaccucgccuuugugc

SEQ ID NO: 2848123 - RNA, 19 nt, Artificial Sequence
  Description of Artificial Sequence: Synthetic oligonucleotide
cuuguuggugauggaaggg

SEQ ID NO: 2848124 - RNA, 19 nt, Artificial Sequence
  Description of Artificial Sequence: Synthetic oligonucleotide
ggcaccagcuuauaauggg

SEQ ID NO: 2848125 - RNA, 19 nt, Artificial Sequence
  Description of Artificial Sequence: Synthetic oligonucleotide
uuguuggugauggaaggga

SEQ ID NO: 2848126 - RNA, 19 nt, Artificial Sequence
  Description of Artificial Sequence: Synthetic oligonucleotide
ucucgcccgagacaagcag

SEQ ID NO: 2848127 - RNA, 19 nt, Artificial Sequence
  Description of Artificial Sequence: Synthetic oligonucleotide
acagaugcagcccacuauu

SEQ ID NO: 2848128 - RNA, 19 nt, Artificial Sequence
  Description of Artificial Sequence: Synthetic oligonucleotide
uuuccaucacauucugaaa

SEQ ID NO: 2848129 - RNA, 19 nt, Artificial Sequence
  Description of Artificial Sequence: Synthetic oligonucleotide
cacauucugaaaaguuaac

SEQ ID NO: 2848130 - RNA, 19 nt, Artificial Sequence
  Description of Artificial Sequence: Synthetic oligonucleotide
ucccucuccagcccuguag

SEQ ID NO: 2848131 - RNA, 19 nt, Artificial Sequence
  Description of Artificial Sequence: Synthetic oligonucleotide
gcugcuaucaugaucuccc

SEQ ID NO: 2848132 - RNA, 19 nt, Artificial Sequence
  Description of Artificial Sequence: Synthetic oligonucleotide
ucaguaggaacaccaccuc

SEQ ID NO: 2848133 - RNA, 19 nt, Artificial Sequence
  Description of Artificial Sequence: Synthetic oligonucleotide
ucccacuccgcgaaguaac

SEQ ID NO: 2848134 - RNA, 19 nt, Artificial Sequence
  Description of Artificial Sequence: Synthetic oligonucleotide
gaagggacuaaauuaggau

SEQ ID NO: 2848135 - RNA, 19 nt, Artificial Sequence
  Description of Artificial Sequence: Synthetic oligonucleotide
uuugguuagguagccaaua

SEQ ID NO: 2848136 - RNA, 19 nt, Artificial Sequence
  Description of Artificial Sequence: Synthetic oligonucleotide
aguaggaacaccaccucca

SEQ ID NO: 2848137 - RNA, 19 nt, Artificial Sequence
  Description of Artificial Sequence: Synthetic oligonucleotide
ugucgcaaccgcgccaugg

SEQ ID NO: 2848138 - RNA, 19 nt, Artificial Sequence
  Description of Artificial Sequence: Synthetic oligonucleotide
uaggaucuuccuuggugcc

SEQ ID NO: 2848139 - RNA, 19 nt, Artificial Sequence
  Description of Artificial Sequence: Synthetic oligonucleotide
uggggcaccagcuuauaau

SEQ ID NO: 2848140 - RNA, 19 nt, Artificial Sequence
  Description of Artificial Sequence: Synthetic oligonucleotide
aguuguccucuucacagau

SEQ ID NO: 2848141 - RNA, 19 nt, Artificial Sequence
  Description of Artificial Sequence: Synthetic oligonucleotide
acaauggcuagucuuuauu

SEQ ID NO: 2848142 - RNA, 19 nt, Artificial Sequence
  Description of Artificial Sequence: Synthetic oligonucleotide
caaaggagcgugucgcaac

SEQ ID NO: 2848143 - RNA, 19 nt, Artificial Sequence
  Description of Artificial Sequence: Synthetic oligonucleotide
auaaacuuuccaucacauu

SEQ ID NO: 2848144 - RNA, 19 nt, Artificial Sequence
  Description of Artificial Sequence: Synthetic oligonucleotide
guaggaacaccaccuccag

SEQ ID NO: 2848145 - RNA, 19 nt, Artificial Sequence
  Description of Artificial Sequence: Synthetic oligonucleotide
guaaccuugaagccaucuc

SEQ ID NO: 2848146 - RNA, 19 nt, Artificial Sequence
  Description of Artificial Sequence: Synthetic oligonucleotide
aaaccagaugacagugcag

SEQ ID NO: 2848147 - RNA, 19 nt, Artificial Sequence
  Description of Artificial Sequence: Synthetic oligonucleotide
guagcauauuguauggauc

SEQ ID NO: 2848148 - RNA, 19 nt, Artificial Sequence
  Description of Artificial Sequence: Synthetic oligonucleotide
ccugaagccgcuuuuggag

SEQ ID NO: 2848149 - RNA, 19 nt, Artificial Sequence
  Description of Artificial Sequence: Synthetic oligonucleotide
aucacauucugaaaaguua

SEQ ID NO: 2848150 - RNA, 19 nt, Artificial Sequence
  Description of Artificial Sequence: Synthetic oligonucleotide
guagccaauacaauggcua

SEQ ID NO: 2848151 - RNA, 19 nt, Artificial Sequence
  Description of Artificial Sequence: Synthetic oligonucleotide
aaguuaacacagaggcuca

SEQ ID NO: 2848152 - RNA, 19 nt, Artificial Sequence
  Description of Artificial Sequence: Synthetic oligonucleotide
gcccgagacaagcagaugc

SEQ ID NO: 2848153 - RNA, 19 nt, Artificial Sequence
  Description of Artificial Sequence: Synthetic oligonucleotide
accaccuccagaagcaaag

SEQ ID NO: 2848154 - RNA, 19 nt, Artificial Sequence
  Description of Artificial Sequence: Synthetic oligonucleotide
aguaaccuugaagccaucu

SEQ ID NO: 2848155 - RNA, 19 nt, Artificial Sequence
  Description of Artificial Sequence: Synthetic oligonucleotide
gguuagguagccaauacaa

SEQ ID NO: 2848156 - RNA, 19 nt, Artificial Sequence
  Description of Artificial Sequence: Synthetic oligonucleotide
uuggugauggaagggacua

SEQ ID NO: 2848157 - RNA, 19 nt, Artificial Sequence
  Description of Artificial Sequence: Synthetic oligonucleotide
gucgcaaccgcgccauggg

SEQ ID NO: 2848158 - RNA, 19 nt, Artificial Sequence
  Description of Artificial Sequence: Synthetic oligonucleotide
ucgcaaccgcgccaugggg

SEQ ID NO: 2848159 - RNA, 19 nt, Artificial Sequence
  Description of Artificial Sequence: Synthetic oligonucleotide
uggguuccacagcuggggc

SEQ ID NO: 2848160 - RNA, 19 nt, Artificial Sequence
  Description of Artificial Sequence: Synthetic oligonucleotide
ugcugcuaucaugaucucc

SEQ ID NO: 2848161 - RNA, 19 nt, Artificial Sequence
  Description of Artificial Sequence: Synthetic oligonucleotide
gauaaacuuuccaucacau

SEQ ID NO: 2848162 - RNA, 19 nt, Artificial Sequence
  Description of Artificial Sequence: Synthetic oligonucleotide
ugcuaucaugaucucccuc

SEQ ID NO: 2848163 - RNA, 19 nt, Artificial Sequence
  Description of Artificial Sequence: Synthetic oligonucleotide
agacaagcagaugcacuuc

SEQ ID NO: 2848164 - RNA, 19 nt, Artificial Sequence
  Description of Artificial Sequence: Synthetic oligonucleotide
agcuuauaauggguuccac

SEQ ID NO: 2848165 - RNA, 19 nt, Artificial Sequence
  Description of Artificial Sequence: Synthetic oligonucleotide
gaagccaucucgcccgaga

SEQ ID NO: 2848166 - RNA, 19 nt, Artificial Sequence
  Description of Artificial Sequence: Synthetic oligonucleotide
caauggcuagucuuuauua

SEQ ID NO: 2848167 - RNA, 19 nt, Artificial Sequence
  Description of Artificial Sequence: Synthetic oligonucleotide
uggauccagucccuucucu

SEQ ID NO: 2848168 - RNA, 19 nt, Artificial Sequence
  Description of Artificial Sequence: Synthetic oligonucleotide
agagcucccacuccgcgaa

SEQ ID NO: 2848169 - RNA, 19 nt, Artificial Sequence
  Description of Artificial Sequence: Synthetic oligonucleotide
guagccugcuccucaucag

SEQ ID NO: 2848170 - RNA, 19 nt, Artificial Sequence
  Description of Artificial Sequence: Synthetic oligonucleotide
uccagaagcaaaggagcgu

SEQ ID NO: 2848171 - RNA, 19 nt, Artificial Sequence
  Description of Artificial Sequence: Synthetic oligonucleotide
uacaauggcuagucuuuau

SEQ ID NO: 2848172 - RNA, 19 nt, Artificial Sequence
  Description of Artificial Sequence: Synthetic oligonucleotide
acaagcagaugcacuuccg

SEQ ID NO: 2848173 - RNA, 19 nt, Artificial Sequence
  Description of Artificial Sequence: Synthetic oligonucleotide
cacuauucgcuuguuggug

SEQ ID NO: 2848174 - RNA, 19 nt, Artificial Sequence
  Description of Artificial Sequence: Synthetic oligonucleotide
uugguggggcaccagcuua

SEQ ID NO: 2848175 - RNA, 19 nt, Artificial Sequence
  Description of Artificial Sequence: Synthetic oligonucleotide
aaggagcgugucgcaaccg

SEQ ID NO: 2848176 - RNA, 19 nt, Artificial Sequence
  Description of Artificial Sequence: Synthetic oligonucleotide
caucucgcccgagacaagc

SEQ ID NO: 2848177 - RNA, 19 nt, Artificial Sequence
  Description of Artificial Sequence: Synthetic oligonucleotide
gcgaaguaaccuugaagcc

SEQ ID NO: 2848178 - RNA, 19 nt, Artificial Sequence
  Description of Artificial Sequence: Synthetic oligonucleotide
gcuuauaauggguuccaca

SEQ ID NO: 2848179 - RNA, 19 nt, Artificial Sequence
  Description of Artificial Sequence: Synthetic oligonucleotide
cuaaauuaggaucuuccuu

SEQ ID NO: 2848180 - RNA, 19 nt, Artificial Sequence
  Description of Artificial Sequence: Synthetic oligonucleotide
cuaucaugaucucccucuc

SEQ ID NO: 2848181 - RNA, 19 nt, Artificial Sequence
  Description of Artificial Sequence: Synthetic oligonucleotide
cucugcugcuaucaugauc

SEQ ID NO: 2848182 - RNA, 19 nt, Artificial Sequence
  Description of Artificial Sequence: Synthetic oligonucleotide
gaaguaaccuugaagccau

SEQ ID NO: 2848183 - RNA, 19 nt, Artificial Sequence
  Description of Artificial Sequence: Synthetic oligonucleotide
gcauauuguauggauccag

SEQ ID NO: 2848184 - RNA, 19 nt, Artificial Sequence
  Description of Artificial Sequence: Synthetic oligonucleotide
auccagucccuucucugcu

SEQ ID NO: 2848185 - RNA, 19 nt, Artificial Sequence
  Description of Artificial Sequence: Synthetic oligonucleotide
gcuaucaugaucucccucu

SEQ ID NO: 2848186 - RNA, 19 nt, Artificial Sequence
  Description of Artificial Sequence: Synthetic oligonucleotide
guauggauccagucccuuc

SEQ ID NO: 2848187 - RNA, 19 nt, Artificial Sequence
  Description of Artificial Sequence: Synthetic oligonucleotide
cauauuguauggauccagu

SEQ ID NO: 2848188 - RNA, 19 nt, Artificial Sequence
  Description of Artificial Sequence: Synthetic oligonucleotide
agcaaaggagcgugucgca

SEQ ID NO: 2848189 - RNA, 19 nt, Artificial Sequence
  Description of Artificial Sequence: Synthetic oligonucleotide
ucgcuuguuggugauggaa

SEQ ID NO: 2848190 - RNA, 19 nt, Artificial Sequence
  Description of Artificial Sequence: Synthetic oligonucleotide
ucgcccgagacaagcagau

SEQ ID NO: 2848191 - RNA, 19 nt, Artificial Sequence
  Description of Artificial Sequence: Synthetic oligonucleotide
ccuugaagccaucucgccc

SEQ ID NO: 2848192 - RNA, 19 nt, Artificial Sequence
  Description of Artificial Sequence: Synthetic oligonucleotide
uccgcgaaguaaccuugaa

SEQ ID NO: 2848193 - RNA, 19 nt, Artificial Sequence
  Description of Artificial Sequence: Synthetic oligonucleotide
ccagcuuauaauggguucc

SEQ ID NO: 2848194 - RNA, 19 nt, Artificial Sequence
  Description of Artificial Sequence: Synthetic oligonucleotide
agcauauuguauggaucca

SEQ ID NO: 2848195 - RNA, 19 nt, Artificial Sequence
  Description of Artificial Sequence: Synthetic oligonucleotide
ggauccagucccuucucug

SEQ ID NO: 2848196 - RNA, 19 nt, Artificial Sequence
  Description of Artificial Sequence: Synthetic oligonucleotide
uauucgcuuguuggugaug

SEQ ID NO: 2848197 - RNA, 19 nt, Artificial Sequence
  Description of Artificial Sequence: Synthetic oligonucleotide
cagaugacagugcaguugu

SEQ ID NO: 2848198 - RNA, 19 nt, Artificial Sequence
  Description of Artificial Sequence: Synthetic oligonucleotide
cagaugcagcccacuauuc

SEQ ID NO: 2848199 - RNA, 19 nt, Artificial Sequence
  Description of Artificial Sequence: Synthetic oligonucleotide
ggaagggacuaaauuagga

SEQ ID NO: 2848200 - RNA, 19 nt, Artificial Sequence
  Description of Artificial Sequence: Synthetic oligonucleotide
gagcgugucgcaaccgcgc

SEQ ID NO: 2848201 - RNA, 19 nt, Artificial Sequence
  Description of Artificial Sequence: Synthetic oligonucleotide
gccaauacaauggcuaguc

SEQ ID NO: 2848202 - RNA, 19 nt, Artificial Sequence
  Description of Artificial Sequence: Synthetic oligonucleotide
aguggaccaguuggugggg

SEQ ID NO: 2848203 - RNA, 19 nt, Artificial Sequence
  Description of Artificial Sequence: Synthetic oligonucleotide
gguagcauauuguauggau

SEQ ID NO: 2848204 - RNA, 19 nt, Artificial Sequence
  Description of Artificial Sequence: Synthetic oligonucleotide
uugaagccaucucgcccga

SEQ ID NO: 2848205 - RNA, 19 nt, Artificial Sequence
  Description of Artificial Sequence: Synthetic oligonucleotide
gacagugcaguuguccucu

SEQ ID NO: 2848206 - RNA, 19 nt, Artificial Sequence
  Description of Artificial Sequence: Synthetic oligonucleotide
agcuggggcaucgcuggac

SEQ ID NO: 2848207 - RNA, 19 nt, Artificial Sequence
  Description of Artificial Sequence: Synthetic oligonucleotide
acuccgcgaaguaaccuug

SEQ ID NO: 2848208 - RNA, 19 nt, Artificial Sequence
  Description of Artificial Sequence: Synthetic oligonucleotide
ggaacaccaccuccagaag

SEQ ID NO: 2848209 - RNA, 19 nt, Artificial Sequence
  Description of Artificial Sequence: Synthetic oligonucleotide
uucgcuuguuggugaugga

SEQ ID NO: 2848210 - RNA, 19 nt, Artificial Sequence
  Description of Artificial Sequence: Synthetic oligonucleotide
ccagaagcaaaggagcgug

SEQ ID NO: 2848211 - RNA, 19 nt, Artificial Sequence
  Description of Artificial Sequence: Synthetic oligonucleotide
agccaauacaauggcuagu

SEQ ID NO: 2848212 - RNA, 19 nt, Artificial Sequence
  Description of Artificial Sequence: Synthetic oligonucleotide
ugguggggcaccagcuuau

SEQ ID NO: 2848213 - RNA, 19 nt, Artificial Sequence
  Description of Artificial Sequence: Synthetic oligonucleotide
aaguaaccuugaagccauc

SEQ ID NO: 2848214 - RNA, 19 nt, Artificial Sequence
  Description of Artificial Sequence: Synthetic oligonucleotide
agaggcucaguggaccagu

SEQ ID NO: 2848215 - RNA, 19 nt, Artificial Sequence
  Description of Artificial Sequence: Synthetic oligonucleotide
guuguccucuucacagaug

SEQ ID NO: 2848216 - RNA, 19 nt, Artificial Sequence
  Description of Artificial Sequence: Synthetic oligonucleotide
ucgccuuugugcagccaaa

SEQ ID NO: 2848217 - RNA, 19 nt, Artificial Sequence
  Description of Artificial Sequence: Synthetic oligonucleotide
agccaucucgcccgagaca

SEQ ID NO: 2848218 - RNA, 19 nt, Artificial Sequence
  Description of Artificial Sequence: Synthetic oligonucleotide
uguauggauccagucccuu

SEQ ID NO: 2848219 - RNA, 19 nt, Artificial Sequence
  Description of Artificial Sequence: Synthetic oligonucleotide
ggaucuuccuuggugccug

SEQ ID NO: 2848220 - RNA, 19 nt, Artificial Sequence
  Description of Artificial Sequence: Synthetic oligonucleotide
ggcccacgagcccucaggg

SEQ ID NO: 2848221 - RNA, 19 nt, Artificial Sequence
  Description of Artificial Sequence: Synthetic oligonucleotide
agguagcauauuguaugga

SEQ ID NO: 2848222 - RNA, 19 nt, Artificial Sequence
  Description of Artificial Sequence: Synthetic oligonucleotide
gaccaguugguggggcacc

SEQ ID NO: 2848223 - RNA, 19 nt, Artificial Sequence
  Description of Artificial Sequence: Synthetic oligonucleotide
auacaauggcuagucuuua

SEQ ID NO: 2848224 - RNA, 19 nt, Artificial Sequence
  Description of Artificial Sequence: Synthetic oligonucleotide
cucgccuuugugcagccaa

SEQ ID NO: 2848225 - RNA, 19 nt, Artificial Sequence
  Description of Artificial Sequence: Synthetic oligonucleotide
aggaucuuccuuggugccu

SEQ ID NO: 2848226 - RNA, 19 nt, Artificial Sequence
  Description of Artificial Sequence: Synthetic oligonucleotide
cagccaaaaccagaugaca

SEQ ID NO: 2848227 - RNA, 19 nt, Artificial Sequence
  Description of Artificial Sequence: Synthetic oligonucleotide
cgcuuguuggugauggaag

SEQ ID NO: 2848228 - RNA, 19 nt, Artificial Sequence
  Description of Artificial Sequence: Synthetic oligonucleotide
gggcaccagcuuauaaugg

SEQ ID NO: 2848229 - RNA, 19 nt, Artificial Sequence
  Description of Artificial Sequence: Synthetic oligonucleotide
ggagcgugucgcaaccgcg

SEQ ID NO: 2848230 - RNA, 19 nt, Artificial Sequence
  Description of Artificial Sequence: Synthetic oligonucleotide
gcaaccgcgccauggggcc

SEQ ID NO: 2848231 - RNA, 19 nt, Artificial Sequence
  Description of Artificial Sequence: Synthetic oligonucleotide
gcagccaaaaccagaugac

SEQ ID NO: 2848232 - RNA, 19 nt, Artificial Sequence
  Description of Artificial Sequence: Synthetic oligonucleotide
ccuuggugccugaagccgc

SEQ ID NO: 2848233 - RNA, 19 nt, Artificial Sequence
  Description of Artificial Sequence: Synthetic oligonucleotide
augcagcccacuauucgcu

SEQ ID NO: 2848234 - RNA, 19 nt, Artificial Sequence
  Description of Artificial Sequence: Synthetic oligonucleotide
cucgcccgagacaagcaga

SEQ ID NO: 2848235 - RNA, 19 nt, Artificial Sequence
  Description of Artificial Sequence: Synthetic oligonucleotide
ccgcgaaguaaccuugaag

SEQ ID NO: 2848236 - RNA, 19 nt, Artificial Sequence
  Description of Artificial Sequence: Synthetic oligonucleotide
uggugccugaagccgcuuu

SEQ ID NO: 2848237 - RNA, 19 nt, Artificial Sequence
  Description of Artificial Sequence: Synthetic oligonucleotide
gggcccacgagcccucagg

SEQ ID NO: 2848238 - RNA, 19 nt, Artificial Sequence
  Description of Artificial Sequence: Synthetic oligonucleotide
ucucugcugcuaucaugau

SEQ ID NO: 2848239 - RNA, 19 nt, Artificial Sequence
  Description of Artificial Sequence: Synthetic oligonucleotide
agaugacagugcaguuguc

SEQ ID NO: 2848240 - RNA, 19 nt, Artificial Sequence
  Description of Artificial Sequence: Synthetic oligonucleotide
ugcagcccacuauucgcuu

SEQ ID NO: 2848241 - RNA, 19 nt, Artificial Sequence
  Description of Artificial Sequence: Synthetic oligonucleotide
ggacuaaauuaggaucuuc

SEQ ID NO: 2848242 - RNA, 19 nt, Artificial Sequence
  Description of Artificial Sequence: Synthetic oligonucleotide
agccgcuuuuggagguagc

SEQ ID NO: 2848243 - RNA, 19 nt, Artificial Sequence
  Description of Artificial Sequence: Synthetic oligonucleotide
cagcuuauaauggguucca

SEQ ID NO: 2848244 - RNA, 19 nt, Artificial Sequence
  Description of Artificial Sequence: Synthetic oligonucleotide
gugccugaagccgcuuuug

SEQ ID NO: 2848245 - RNA, 19 nt, Artificial Sequence
  Description of Artificial Sequence: Synthetic oligonucleotide
ggugauggaagggacuaaa

SEQ ID NO: 2848246 - RNA, 19 nt, Artificial Sequence
  Description of Artificial Sequence: Synthetic oligonucleotide
ggggcaucgcuggaccucg

SEQ ID NO: 2848247 - RNA, 19 nt, Artificial Sequence
  Description of Artificial Sequence: Synthetic oligonucleotide
uggggcaucgcuggaccuc

SEQ ID NO: 2848248 - RNA, 19 nt, Artificial Sequence
  Description of Artificial Sequence: Synthetic oligonucleotide
uggugauggaagggacuaa

SEQ ID NO: 2848249 - RNA, 19 nt, Artificial Sequence
  Description of Artificial Sequence: Synthetic oligonucleotide
guuaacacagaggcucagu

SEQ ID NO: 2848250 - RNA, 19 nt, Artificial Sequence
  Description of Artificial Sequence: Synthetic oligonucleotide
guuagguagccaauacaau

SEQ ID NO: 2848251 - RNA, 19 nt, Artificial Sequence
  Description of Artificial Sequence: Synthetic oligonucleotide
ccagagcucccacuccgcg

SEQ ID NO: 2848252 - RNA, 19 nt, Artificial Sequence
  Description of Artificial Sequence: Synthetic oligonucleotide
ugcgccgccagagcuccca

SEQ ID NO: 2848253 - RNA, 19 nt, Artificial Sequence
  Description of Artificial Sequence: Synthetic oligonucleotide
guuggugauggaagggacu

SEQ ID NO: 2848254 - RNA, 19 nt, Artificial Sequence
  Description of Artificial Sequence: Synthetic oligonucleotide
aucgcuggaccucgccuuu

SEQ ID NO: 2848255 - RNA, 19 nt, Artificial Sequence
  Description of Artificial Sequence: Synthetic oligonucleotide
aaccgcgccauggggccca

SEQ ID NO: 2848256 - RNA, 19 nt, Artificial Sequence
  Description of Artificial Sequence: Synthetic oligonucleotide
gcagcccacuauucgcuug

SEQ ID NO: 2848257 - RNA, 19 nt, Artificial Sequence
  Description of Artificial Sequence: Synthetic oligonucleotide
cagagcucccacuccgcga

SEQ ID NO: 2848258 - RNA, 19 nt, Artificial Sequence
  Description of Artificial Sequence: Synthetic oligonucleotide
cagaggcucaguggaccag

SEQ ID NO: 2848259 - RNA, 19 nt, Artificial Sequence
  Description of Artificial Sequence: Synthetic oligonucleotide
ucccuucucugcugcuauc

SEQ ID NO: 2848260 - RNA, 19 nt, Artificial Sequence
  Description of Artificial Sequence: Synthetic oligonucleotide
cgaaguaaccuugaagcca

SEQ ID NO: 2848261 - RNA, 19 nt, Artificial Sequence
  Description of Artificial Sequence: Synthetic oligonucleotide
gccaucucgcccgagacaa

SEQ ID NO: 2848262 - RNA, 19 nt, Artificial Sequence
  Description of Artificial Sequence: Synthetic oligonucleotide
agcucccacuccgcgaagu

SEQ ID NO: 2848263 - RNA, 19 nt, Artificial Sequence
  Description of Artificial Sequence: Synthetic oligonucleotide
accaguugguggggcacca

SEQ ID NO: 2848264 - RNA, 19 nt, Artificial Sequence
  Description of Artificial Sequence: Synthetic oligonucleotide
gccauggggcccacgagcc

SEQ ID NO: 2848265 - RNA, 19 nt, Artificial Sequence
  Description of Artificial Sequence: Synthetic oligonucleotide
ggcaucgcuggaccucgcc

SEQ ID NO: 2848266 - RNA, 19 nt, Artificial Sequence
  Description of Artificial Sequence: Synthetic oligonucleotide
cuccgcgaaguaaccuuga

SEQ ID NO: 2848267 - RNA, 19 nt, Artificial Sequence
  Description of Artificial Sequence: Synthetic oligonucleotide
cccacuccgcgaaguaacc

SEQ ID NO: 2848268 - RNA, 19 nt, Artificial Sequence
  Description of Artificial Sequence: Synthetic oligonucleotide
aucucgcccgagacaagca

SEQ ID NO: 2848269 - RNA, 19 nt, Artificial Sequence
  Description of Artificial Sequence: Synthetic oligonucleotide
gccgccagagcucccacuc

SEQ ID NO: 2848270 - RNA, 19 nt, Artificial Sequence
  Description of Artificial Sequence: Synthetic oligonucleotide
gcccacuauucgcuuguug

SEQ ID NO: 2848271 - RNA, 19 nt, Artificial Sequence
  Description of Artificial Sequence: Synthetic oligonucleotide
cgcaaccgcgccauggggc

SEQ ID NO: 2848272 - RNA, 19 nt, Artificial Sequence
  Description of Artificial Sequence: Synthetic oligonucleotide
guggggcaccagcuuauaa

SEQ ID NO: 2848273 - RNA, 19 nt, Artificial Sequence
  Description of Artificial Sequence: Synthetic oligonucleotide
cuguagccugcuccucauc

SEQ ID NO: 2848274 - RNA, 19 nt, Artificial Sequence
  Description of Artificial Sequence: Synthetic oligonucleotide
ggaccucgccuuugugcag

SEQ ID NO: 2848275 - RNA, 19 nt, Artificial Sequence
  Description of Artificial Sequence: Synthetic oligonucleotide
cugcugcuaucaugaucuc

SEQ ID NO: 2848276 - RNA, 19 nt, Artificial Sequence
  Description of Artificial Sequence: Synthetic oligonucleotide
ucgcuggaccucgccuuug

SEQ ID NO: 2848277 - RNA, 19 nt, Artificial Sequence
  Description of Artificial Sequence: Synthetic oligonucleotide
caccagcuuauaauggguu

SEQ ID NO: 2848278 - RNA, 19 nt, Artificial Sequence
  Description of Artificial Sequence: Synthetic oligonucleotide
cuuggugccugaagccgcu

SEQ ID NO: 2848279 - RNA, 19 nt, Artificial Sequence
  Description of Artificial Sequence: Synthetic oligonucleotide
ggaccaguugguggggcac

SEQ ID NO: 2848280 - RNA, 19 nt, Artificial Sequence
  Description of Artificial Sequence: Synthetic oligonucleotide
gguagccaauacaauggcu

SEQ ID NO: 2848281 - RNA, 19 nt, Artificial Sequence
  Description of Artificial Sequence: Synthetic oligonucleotide
cuauucgcuuguuggugau

SEQ ID NO: 2848282 - RNA, 19 nt, Artificial Sequence
  Description of Artificial Sequence: Synthetic oligonucleotide
agccugcuccucaucagua

SEQ ID NO: 2848283 - RNA, 19 nt, Artificial Sequence
  Description of Artificial Sequence: Synthetic oligonucleotide
cacuccgcgaaguaaccuu

SEQ ID NO: 2848284 - RNA, 19 nt, Artificial Sequence
  Description of Artificial Sequence: Synthetic oligonucleotide
gcuggaccucgccuuugug

SEQ ID NO: 2848285 - RNA, 19 nt, Artificial Sequence
  Description of Artificial Sequence: Synthetic oligonucleotide
cagaagcaaaggagcgugu

SEQ ID NO: 2848286 - RNA, 19 nt, Artificial Sequence
  Description of Artificial Sequence: Synthetic oligonucleotide
guugguggggcaccagcuu

SEQ ID NO: 2848287 - RNA, 19 nt, Artificial Sequence
  Description of Artificial Sequence: Synthetic oligonucleotide
ccgagacaagcagaugcac

SEQ ID NO: 2848288 - RNA, 19 nt, Artificial Sequence
  Description of Artificial Sequence: Synthetic oligonucleotide
gugauggaagggacuaaau

SEQ ID NO: 2848289 - RNA, 19 nt, Artificial Sequence
  Description of Artificial Sequence: Synthetic oligonucleotide
acagugcaguuguccucuu

SEQ ID NO: 2848290 - RNA, 19 nt, Artificial Sequence
  Description of Artificial Sequence: Synthetic oligonucleotide
gaagccgcuuuuggaggua

SEQ ID NO: 2848291 - RNA, 19 nt, Artificial Sequence
  Description of Artificial Sequence: Synthetic oligonucleotide
auggggcccacgagcccuc

SEQ ID NO: 2848292 - RNA, 19 nt, Artificial Sequence
  Description of Artificial Sequence: Synthetic oligonucleotide
cugcuaucaugaucucccu

SEQ ID NO: 2848293 - RNA, 19 nt, Artificial Sequence
  Description of Artificial Sequence: Synthetic oligonucleotide
cauggggcccacgagcccu

SEQ ID NO: 2848294 - RNA, 19 nt, Artificial Sequence
  Description of Artificial Sequence: Synthetic oligonucleotide
cagcccacuauucgcuugu

SEQ ID NO: 2848295 - RNA, 19 nt, Artificial Sequence
  Description of Artificial Sequence: Synthetic oligonucleotide
gcccacgagcccucagggc

SEQ ID NO: 2848296 - RNA, 19 nt, Artificial Sequence
  Description of Artificial Sequence: Synthetic oligonucleotide
cucccacuccgcgaaguaa

SEQ ID NO: 2848297 - RNA, 19 nt, Artificial Sequence
  Description of Artificial Sequence: Synthetic oligonucleotide
caaccgcgccauggggccc

SEQ ID NO: 2848298 - RNA, 19 nt, Artificial Sequence
  Description of Artificial Sequence: Synthetic oligonucleotide
acgagcccucagggccugc

SEQ ID NO: 2848299 - RNA, 19 nt, Artificial Sequence
  Description of Artificial Sequence: Synthetic oligonucleotide
ccacuauucgcuuguuggu

SEQ ID NO: 2848300 - RNA, 19 nt, Artificial Sequence
  Description of Artificial Sequence: Synthetic oligonucleotide
gcaucgcuggaccucgccu

SEQ ID NO: 2848301 - RNA, 19 nt, Artificial Sequence
  Description of Artificial Sequence: Synthetic oligonucleotide
gcgccauggggcccacgag

SEQ ID NO: 2848302 - RNA, 19 nt, Artificial Sequence
  Description of Artificial Sequence: Synthetic oligonucleotide
gcaccagcuuauaaugggu

SEQ ID NO: 2848303 - RNA, 19 nt, Artificial Sequence
  Description of Artificial Sequence: Synthetic oligonucleotide
gugucgcaaccgcgccaug

SEQ ID NO: 2848304 - RNA, 19 nt, Artificial Sequence
  Description of Artificial Sequence: Synthetic oligonucleotide
cacgagcccucagggccug

SEQ ID NO: 2848305 - RNA, 19 nt, Artificial Sequence
  Description of Artificial Sequence: Synthetic oligonucleotide
ccauggggcccacgagccc

SEQ ID NO: 2848306 - RNA, 19 nt, Artificial Sequence
  Description of Artificial Sequence: Synthetic oligonucleotide
cgagacaagcagaugcacu

SEQ ID NO: 2848307 - RNA, 19 nt, Artificial Sequence
  Description of Artificial Sequence: Synthetic oligonucleotide
gggccugcgccgccagagc

SEQ ID NO: 2848308 - RNA, 19 nt, Artificial Sequence
  Description of Artificial Sequence: Synthetic oligonucleotide
ggugccugaagccgcuuuu

SEQ ID NO: 2848309 - RNA, 19 nt, Artificial Sequence
  Description of Artificial Sequence: Synthetic oligonucleotide
ccgccagagcucccacucc

SEQ ID NO: 2848310 - RNA, 19 nt, Artificial Sequence
  Description of Artificial Sequence: Synthetic oligonucleotide
ccaucucgcccgagacaag

SEQ ID NO: 2848311 - RNA, 19 nt, Artificial Sequence
  Description of Artificial Sequence: Synthetic oligonucleotide
ccaauacaauggcuagucu

SEQ ID NO: 2848312 - RNA, 19 nt, Artificial Sequence
  Description of Artificial Sequence: Synthetic oligonucleotide
cuuuuggagguagcauauu

SEQ ID NO: 2848313 - RNA, 19 nt, Artificial Sequence
  Description of Artificial Sequence: Synthetic oligonucleotide
uggggcccacgagcccuca

SEQ ID NO: 2848314 - RNA, 19 nt, Artificial Sequence
  Description of Artificial Sequence: Synthetic oligonucleotide
gcgugucgcaaccgcgcca

SEQ ID NO: 2848315 - RNA, 19 nt, Artificial Sequence
  Description of Artificial Sequence: Synthetic oligonucleotide
ggggcccacgagcccucag

SEQ ID NO: 2848316 - RNA, 19 nt, Artificial Sequence
  Description of Artificial Sequence: Synthetic oligonucleotide
agcccacuauucgcuuguu

SEQ ID NO: 2848317 - RNA, 19 nt, Artificial Sequence
  Description of Artificial Sequence: Synthetic oligonucleotide
gcucccacuccgcgaagua

SEQ ID NO: 2848318 - RNA, 19 nt, Artificial Sequence
  Description of Artificial Sequence: Synthetic oligonucleotide
ggccugcgccgccagagcu

SEQ ID NO: 2848319 - RNA, 19 nt, Artificial Sequence
  Description of Artificial Sequence: Synthetic oligonucleotide
gcucaguggaccaguuggu

SEQ ID NO: 2848320 - RNA, 19 nt, Artificial Sequence
  Description of Artificial Sequence: Synthetic oligonucleotide
cugcgccgccagagcuccc

SEQ ID NO: 2848321 - RNA, 19 nt, Artificial Sequence
  Description of Artificial Sequence: Synthetic oligonucleotide
ccaguugguggggcaccag

SEQ ID NO: 2848322 - RNA, 19 nt, Artificial Sequence
  Description of Artificial Sequence: Synthetic oligonucleotide
gaggcucaguggaccaguu

SEQ ID NO: 2848323 - RNA, 19 nt, Artificial Sequence
  Description of Artificial Sequence: Synthetic oligonucleotide
accgcgccauggggcccac

SEQ ID NO: 2848324 - RNA, 19 nt, Artificial Sequence
  Description of Artificial Sequence: Synthetic oligonucleotide
cagcuggggcaucgcugga

SEQ ID NO: 2848325 - RNA, 19 nt, Artificial Sequence
  Description of Artificial Sequence: Synthetic oligonucleotide
gggacuaaauuaggaucuu

SEQ ID NO: 2848326 - RNA, 19 nt, Artificial Sequence
  Description of Artificial Sequence: Synthetic oligonucleotide
cgcgccauggggcccacga

SEQ ID NO: 2848327 - RNA, 19 nt, Artificial Sequence
  Description of Artificial Sequence: Synthetic oligonucleotide
gccugcgccgccagagcuc

SEQ ID NO: 2848328 - RNA, 19 nt, Artificial Sequence
  Description of Artificial Sequence: Synthetic oligonucleotide
gguggggcaccagcuuaua

SEQ ID NO: 2848329 - RNA, 19 nt, Artificial Sequence
  Description of Artificial Sequence: Synthetic oligonucleotide
gggcaucgcuggaccucgc

SEQ ID NO: 2848330 - RNA, 19 nt, Artificial Sequence
  Description of Artificial Sequence: Synthetic oligonucleotide
ccacagcuggggcaucgcu

SEQ ID NO: 2848331 - RNA, 19 nt, Artificial Sequence
  Description of Artificial Sequence: Synthetic oligonucleotide
ccacuccgcgaaguaaccu

SEQ ID NO: 2848332 - RNA, 19 nt, Artificial Sequence
  Description of Artificial Sequence: Synthetic oligonucleotide
cgccuuugugcagccaaaa

SEQ ID NO: 2848333 - RNA, 19 nt, Artificial Sequence
  Description of Artificial Sequence: Synthetic oligonucleotide
cgcccgagacaagcagaug

SEQ ID NO: 2848334 - RNA, 19 nt, Artificial Sequence
  Description of Artificial Sequence: Synthetic oligonucleotide
cgugucgcaaccgcgccau

SEQ ID NO: 2848335 - RNA, 19 nt, Artificial Sequence
  Description of Artificial Sequence: Synthetic oligonucleotide
ccucgccuuugugcagcca

SEQ ID NO: 2848336 - RNA, 19 nt, Artificial Sequence
  Description of Artificial Sequence: Synthetic oligonucleotide
ccgcgccauggggcccacg

SEQ ID NO: 2848337 - RNA, 19 nt, Artificial Sequence
  Description of Artificial Sequence: Synthetic oligonucleotide
cgccgccagagcucccacu

SEQ ID NO: 2848338 - RNA, 19 nt, Artificial Sequence
  Description of Artificial Sequence: Synthetic oligonucleotide
auaacgauaagucaaaauc

SEQ ID NO: 2848339 - RNA, 19 nt, Artificial Sequence
  Description of Artificial Sequence: Synthetic oligonucleotide
aaucucuuguguuucagcc

SEQ ID NO: 2848340 - RNA, 19 nt, Artificial Sequence
  Description of Artificial Sequence: Synthetic oligonucleotide
aaaaucaagguccacagcu

SEQ ID NO: 2848341 - RNA, 19 nt, Artificial Sequence
  Description of Artificial Sequence: Synthetic oligonucleotide
uaagucaaaauccagauau

SEQ ID NO: 2848342 - RNA, 19 nt, Artificial Sequence
  Description of Artificial Sequence: Synthetic oligonucleotide
aucuguaaggcucaaaucg

SEQ ID NO: 2848343 - RNA, 19 nt, Artificial Sequence
  Description of Artificial Sequence: Synthetic oligonucleotide
aguuacugaagauaauggc

SEQ ID NO: 2848344 - RNA, 19 nt, Artificial Sequence
  Description of Artificial Sequence: Synthetic oligonucleotide
uaacgauaagucaaaaucc

SEQ ID NO: 2848345 - RNA, 19 nt, Artificial Sequence
  Description of Artificial Sequence: Synthetic oligonucleotide
uucaagaaaucuuucacag

SEQ ID NO: 2848346 - RNA, 19 nt, Artificial Sequence
  Description of Artificial Sequence: Synthetic oligonucleotide
aacaaguaauucuucuugg

SEQ ID NO: 2848347 - RNA, 19 nt, Artificial Sequence
  Description of Artificial Sequence: Synthetic oligonucleotide
aaaucggugauuucauaac

SEQ ID NO: 2848348 - RNA, 19 nt, Artificial Sequence
  Description of Artificial Sequence: Synthetic oligonucleotide
uuucaagucauucucaccu

SEQ ID NO: 2848349 - RNA, 19 nt, Artificial Sequence
  Description of Artificial Sequence: Synthetic oligonucleotide
aaauacauguuccaauucu

SEQ ID NO: 2848350 - RNA, 19 nt, Artificial Sequence
  Description of Artificial Sequence: Synthetic oligonucleotide
uuguguuucagccuuauca

SEQ ID NO: 2848351 - RNA, 19 nt, Artificial Sequence
  Description of Artificial Sequence: Synthetic oligonucleotide
aaaucuuucacagucucuc

SEQ ID NO: 2848352 - RNA, 19 nt, Artificial Sequence
  Description of Artificial Sequence: Synthetic oligonucleotide
aauucuggaaaaucaaggu

SEQ ID NO: 2848353 - RNA, 19 nt, Artificial Sequence
  Description of Artificial Sequence: Synthetic oligonucleotide
ucuuuguagauucaacugc

SEQ ID NO: 2848354 - RNA, 19 nt, Artificial Sequence
  Description of Artificial Sequence: Synthetic oligonucleotide
aaguaauucuucuugggcu

SEQ ID NO: 2848355 - RNA, 19 nt, Artificial Sequence
  Description of Artificial Sequence: Synthetic oligonucleotide
aaaucucuuguguuucagc

SEQ ID NO: 2848356 - RNA, 19 nt, Artificial Sequence
  Description of Artificial Sequence: Synthetic oligonucleotide
uugccuaaaaugcagagcu

SEQ ID NO: 2848357 - RNA, 19 nt, Artificial Sequence
  Description of Artificial Sequence: Synthetic oligonucleotide
guucuaaggguuuaaagag

SEQ ID NO: 2848358 - RNA, 19 nt, Artificial Sequence
  Description of Artificial Sequence: Synthetic oligonucleotide
uuaagcuuccaguagaaac

SEQ ID NO: 2848359 - RNA, 19 nt, Artificial Sequence
  Description of Artificial Sequence: Synthetic oligonucleotide
caauucuggaaaaucaagg

SEQ ID NO: 2848360 - RNA, 19 nt, Artificial Sequence
  Description of Artificial Sequence: Synthetic oligonucleotide
ucauaaaagucucuguugu

SEQ ID NO: 2848361 - RNA, 19 nt, Artificial Sequence
  Description of Artificial Sequence: Synthetic oligonucleotide
ucuagauggagauucggag

SEQ ID NO: 2848362 - RNA, 19 nt, Artificial Sequence
  Description of Artificial Sequence: Synthetic oligonucleotide
ucuguaaggcucaaaucgg

SEQ ID NO: 2848363 - RNA, 19 nt, Artificial Sequence
  Description of Artificial Sequence: Synthetic oligonucleotide
auuuucaagucauucucac

SEQ ID NO: 2848364 - RNA, 19 nt, Artificial Sequence
  Description of Artificial Sequence: Synthetic oligonucleotide
aguagaaacaguuacugaa

SEQ ID NO: 2848365 - RNA, 19 nt, Artificial Sequence
  Description of Artificial Sequence: Synthetic oligonucleotide
uucacaauuggacccagag

SEQ ID NO: 2848366 - RNA, 19 nt, Artificial Sequence
  Description of Artificial Sequence: Synthetic oligonucleotide
gaacaaguaauucuucuug

SEQ ID NO: 2848367 - RNA, 19 nt, Artificial Sequence
  Description of Artificial Sequence: Synthetic oligonucleotide
caagaaaucuuucacaguc

SEQ ID NO: 2848368 - RNA, 19 nt, Artificial Sequence
  Description of Artificial Sequence: Synthetic oligonucleotide
ucuaaggguuuaaagagcu

SEQ ID NO: 2848369 - RNA, 19 nt, Artificial Sequence
  Description of Artificial Sequence: Synthetic oligonucleotide
ugacuaacauucaagaaau

SEQ ID NO: 2848370 - RNA, 19 nt, Artificial Sequence
  Description of Artificial Sequence: Synthetic oligonucleotide
aagauaauggcuccugaga

SEQ ID NO: 2848371 - RNA, 19 nt, Artificial Sequence
  Description of Artificial Sequence: Synthetic oligonucleotide
aagucauucucaccugugg

SEQ ID NO: 2848372 - RNA, 19 nt, Artificial Sequence
  Description of Artificial Sequence: Synthetic oligonucleotide
ucaaaauccagauaugguu

SEQ ID NO: 2848373 - RNA, 19 nt, Artificial Sequence
  Description of Artificial Sequence: Synthetic oligonucleotide
uguuucagccuuaucaucu

SEQ ID NO: 2848374 - RNA, 19 nt, Artificial Sequence
  Description of Artificial Sequence: Synthetic oligonucleotide
ugauuucauaacuuaagcu

SEQ ID NO: 2848375 - RNA, 19 nt, Artificial Sequence
  Description of Artificial Sequence: Synthetic oligonucleotide
uuacugaagauaauggcuc

SEQ ID NO: 2848376 - RNA, 19 nt, Artificial Sequence
  Description of Artificial Sequence: Synthetic oligonucleotide
aguaauucuucuugggcuc

SEQ ID NO: 2848377 - RNA, 19 nt, Artificial Sequence
  Description of Artificial Sequence: Synthetic oligonucleotide
aacuuaagcuuccaguaga

SEQ ID NO: 2848378 - RNA, 19 nt, Artificial Sequence
  Description of Artificial Sequence: Synthetic oligonucleotide
gauucaacugcuucugaag

SEQ ID NO: 2848379 - RNA, 19 nt, Artificial Sequence
  Description of Artificial Sequence: Synthetic oligonucleotide
agaaaucuuucacagucuc

SEQ ID NO: 2848380 - RNA, 19 nt, Artificial Sequence
  Description of Artificial Sequence: Synthetic oligonucleotide
uguagauucaacugcuucu

SEQ ID NO: 2848381 - RNA, 19 nt, Artificial Sequence
  Description of Artificial Sequence: Synthetic oligonucleotide
ucuggcuucacaauuggac

SEQ ID NO: 2848382 - RNA, 19 nt, Artificial Sequence
  Description of Artificial Sequence: Synthetic oligonucleotide
uggaacuggaucuguaagg

SEQ ID NO: 2848383 - RNA, 19 nt, Artificial Sequence
  Description of Artificial Sequence: Synthetic oligonucleotide
uuccaauucuggaaaauca

SEQ ID NO: 2848384 - RNA, 19 nt, Artificial Sequence
  Description of Artificial Sequence: Synthetic oligonucleotide
agucaaaauccagauaugg

SEQ ID NO: 2848385 - RNA, 19 nt, Artificial Sequence
  Description of Artificial Sequence: Synthetic oligonucleotide
aaugcagagcuucucuuug

SEQ ID NO: 2848386 - RNA, 19 nt, Artificial Sequence
  Description of Artificial Sequence: Synthetic oligonucleotide
uuuaaagagcugacggugc

SEQ ID NO: 2848387 - RNA, 19 nt, Artificial Sequence
  Description of Artificial Sequence: Synthetic oligonucleotide
uaaaaugcagagcuucucu

SEQ ID NO: 2848388 - RNA, 19 nt, Artificial Sequence
  Description of Artificial Sequence: Synthetic oligonucleotide
agccuuaucaucuggcuuc

SEQ ID NO: 2848389 - RNA, 19 nt, Artificial Sequence
  Description of Artificial Sequence: Synthetic oligonucleotide
uccagauaugguucuaagg

SEQ ID NO: 2848390 - RNA, 19 nt, Artificial Sequence
  Description of Artificial Sequence: Synthetic oligonucleotide
ucucuuuguagauucaacu

SEQ ID NO: 2848391 - RNA, 19 nt, Artificial Sequence
  Description of Artificial Sequence: Synthetic oligonucleotide
acaaguaauucuucuuggg

SEQ ID NO: 2848392 - RNA, 19 nt, Artificial Sequence
  Description of Artificial Sequence: Synthetic oligonucleotide
aaaauccagauaugguucu

SEQ ID NO: 2848393 - RNA, 19 nt, Artificial Sequence
  Description of Artificial Sequence: Synthetic oligonucleotide
aaucggugauuucauaacu

SEQ ID NO: 2848394 - RNA, 19 nt, Artificial Sequence
  Description of Artificial Sequence: Synthetic oligonucleotide
ucuucuugggcucuuugcc

SEQ ID NO: 2848395 - RNA, 19 nt, Artificial Sequence
  Description of Artificial Sequence: Synthetic oligonucleotide
uuccaguagaaacaguuac

SEQ ID NO: 2848396 - RNA, 19 nt, Artificial Sequence
  Description of Artificial Sequence: Synthetic oligonucleotide
caguuacugaagauaaugg

SEQ ID NO: 2848397 - RNA, 19 nt, Artificial Sequence
  Description of Artificial Sequence: Synthetic oligonucleotide
gaagauaauggcuccugag

SEQ ID NO: 2848398 - RNA, 19 nt, Artificial Sequence
  Description of Artificial Sequence: Synthetic oligonucleotide
ucucugaacaaguaauucu

SEQ ID NO: 2848399 - RNA, 19 nt, Artificial Sequence
  Description of Artificial Sequence: Synthetic oligonucleotide
uaacuuaagcuuccaguag

SEQ ID NO: 2848400 - RNA, 19 nt, Artificial Sequence
  Description of Artificial Sequence: Synthetic oligonucleotide
uuuucuagauggagauucg

SEQ ID NO: 2848401 - RNA, 19 nt, Artificial Sequence
  Description of Artificial Sequence: Synthetic oligonucleotide
acuaacauucaagaaaucu

SEQ ID NO: 2848402 - RNA, 19 nt, Artificial Sequence
  Description of Artificial Sequence: Synthetic oligonucleotide
ccagauaugguucuaaggg

SEQ ID NO: 2848403 - RNA, 19 nt, Artificial Sequence
  Description of Artificial Sequence: Synthetic oligonucleotide
gugauuucauaacuuaagc

SEQ ID NO: 2848404 - RNA, 19 nt, Artificial Sequence
  Description of Artificial Sequence: Synthetic oligonucleotide
auaacuuaagcuuccagua

SEQ ID NO: 2848405 - RNA, 19 nt, Artificial Sequence
  Description of Artificial Sequence: Synthetic oligonucleotide
uucgauuugcugcugcaag

SEQ ID NO: 2848406 - RNA, 19 nt, Artificial Sequence
  Description of Artificial Sequence: Synthetic oligonucleotide
uuaucaucuggcuucacaa

SEQ ID NO: 2848407 - RNA, 19 nt, Artificial Sequence
  Description of Artificial Sequence: Synthetic oligonucleotide
cuugagaaaucccagagga

SEQ ID NO: 2848408 - RNA, 19 nt, Artificial Sequence
  Description of Artificial Sequence: Synthetic oligonucleotide
caaaauccagauaugguuc

SEQ ID NO: 2848409 - RNA, 19 nt, Artificial Sequence
  Description of Artificial Sequence: Synthetic oligonucleotide
caaguaauucuucuugggc

SEQ ID NO: 2848410 - RNA, 19 nt, Artificial Sequence
  Description of Artificial Sequence: Synthetic oligonucleotide
uagauggagauucggagcu

SEQ ID NO: 2848411 - RNA, 19 nt, Artificial Sequence
  Description of Artificial Sequence: Synthetic oligonucleotide
uucuaaggguuuaaagagc

SEQ ID NO: 2848412 - RNA, 19 nt, Artificial Sequence
  Description of Artificial Sequence: Synthetic oligonucleotide
uaaggguuuaaagagcuga

SEQ ID NO: 2848413 - RNA, 19 nt, Artificial Sequence
  Description of Artificial Sequence: Synthetic oligonucleotide
ugcauuuucaagucauucu

SEQ ID NO: 2848414 - RNA, 19 nt, Artificial Sequence
  Description of Artificial Sequence: Synthetic oligonucleotide
gauuucauaacuuaagcuu

SEQ ID NO: 2848415 - RNA, 19 nt, Artificial Sequence
  Description of Artificial Sequence: Synthetic oligonucleotide
ucucauaaaagucucuguu

SEQ ID NO: 2848416 - RNA, 19 nt, Artificial Sequence
  Description of Artificial Sequence: Synthetic oligonucleotide
cuagauggagauucggagc

SEQ ID NO: 2848417 - RNA, 19 nt, Artificial Sequence
  Description of Artificial Sequence: Synthetic oligonucleotide
acaguuacugaagauaaug

SEQ ID NO: 2848418 - RNA, 19 nt, Artificial Sequence
  Description of Artificial Sequence: Synthetic oligonucleotide
gacccagagauguacacgc

SEQ ID NO: 2848419 - RNA, 19 nt, Artificial Sequence
  Description of Artificial Sequence: Synthetic oligonucleotide
ggguuuaaagagcugacgg

SEQ ID NO: 2848420 - RNA, 19 nt, Artificial Sequence
  Description of Artificial Sequence: Synthetic oligonucleotide
ugcuucugaagacucaugu

SEQ ID NO: 2848421 - RNA, 19 nt, Artificial Sequence
  Description of Artificial Sequence: Synthetic oligonucleotide
ucauaacuuaagcuuccag

SEQ ID NO: 2848422 - RNA, 19 nt, Artificial Sequence
  Description of Artificial Sequence: Synthetic oligonucleotide
aaacaguuacugaagauaa

SEQ ID NO: 2848423 - RNA, 19 nt, Artificial Sequence
  Description of Artificial Sequence: Synthetic oligonucleotide
aacgauaagucaaaaucca

SEQ ID NO: 2848424 - RNA, 19 nt, Artificial Sequence
  Description of Artificial Sequence: Synthetic oligonucleotide
aaaagucucuguugucuug

SEQ ID NO: 2848425 - RNA, 19 nt, Artificial Sequence
  Description of Artificial Sequence: Synthetic oligonucleotide
ugguucuaaggguuuaaag

SEQ ID NO: 2848426 - RNA, 19 nt, Artificial Sequence
  Description of Artificial Sequence: Synthetic oligonucleotide
cucuuuguagauucaacug

SEQ ID NO: 2848427 - RNA, 19 nt, Artificial Sequence
  Description of Artificial Sequence: Synthetic oligonucleotide
auaaaagucucuguugucu

SEQ ID NO: 2848428 - RNA, 19 nt, Artificial Sequence
  Description of Artificial Sequence: Synthetic oligonucleotide
uucuagauggagauucgga

SEQ ID NO: 2848429 - RNA, 19 nt, Artificial Sequence
  Description of Artificial Sequence: Synthetic oligonucleotide
ucaucuggcuucacaauug

SEQ ID NO: 2848430 - RNA, 19 nt, Artificial Sequence
  Description of Artificial Sequence: Synthetic oligonucleotide
ucgauuugcugcugcaagg

SEQ ID NO: 2848431 - RNA, 19 nt, Artificial Sequence
  Description of Artificial Sequence: Synthetic oligonucleotide
gaaaucccagaggauaacg

SEQ ID NO: 2848432 - RNA, 19 nt, Artificial Sequence
  Description of Artificial Sequence: Synthetic oligonucleotide
uguggaaauacauguucca

SEQ ID NO: 2848433 - RNA, 19 nt, Artificial Sequence
  Description of Artificial Sequence: Synthetic oligonucleotide
uucggagcucucauaaaag

SEQ ID NO: 2848434 - RNA, 19 nt, Artificial Sequence
  Description of Artificial Sequence: Synthetic oligonucleotide
guuuaaagagcugacggug

SEQ ID NO: 2848435 - RNA, 19 nt, Artificial Sequence
  Description of Artificial Sequence: Synthetic oligonucleotide
uggaaaaucaagguccaca

SEQ ID NO: 2848436 - RNA, 19 nt, Artificial Sequence
  Description of Artificial Sequence: Synthetic oligonucleotide
ggaaaaucaagguccacag

SEQ ID NO: 2848437 - RNA, 19 nt, Artificial Sequence
  Description of Artificial Sequence: Synthetic oligonucleotide
auucaacugcuucugaaga

SEQ ID NO: 2848438 - RNA, 19 nt, Artificial Sequence
  Description of Artificial Sequence: Synthetic oligonucleotide
agauaauggcuccugagaa

SEQ ID NO: 2848439 - RNA, 19 nt, Artificial Sequence
  Description of Artificial Sequence: Synthetic oligonucleotide
uguguuucagccuuaucau

SEQ ID NO: 2848440 - RNA, 19 nt, Artificial Sequence
  Description of Artificial Sequence: Synthetic oligonucleotide
gguucuaaggguuuaaaga

SEQ ID NO: 2848441 - RNA, 19 nt, Artificial Sequence
  Description of Artificial Sequence: Synthetic oligonucleotide
acgcuuugcauuuucaagu

SEQ ID NO: 2848442 - RNA, 19 nt, Artificial Sequence
  Description of Artificial Sequence: Synthetic oligonucleotide
uuuucaagucauucucacc

SEQ ID NO: 2848443 - RNA, 19 nt, Artificial Sequence
  Description of Artificial Sequence: Synthetic oligonucleotide
aaucccagaggauaacgau

SEQ ID NO: 2848444 - RNA, 19 nt, Artificial Sequence
  Description of Artificial Sequence: Synthetic oligonucleotide
uguaaggcucaaaucggug

SEQ ID NO: 2848445 - RNA, 19 nt, Artificial Sequence
  Description of Artificial Sequence: Synthetic oligonucleotide
uuguagauucaacugcuuc

SEQ ID NO: 2848446 - RNA, 19 nt, Artificial Sequence
  Description of Artificial Sequence: Synthetic oligonucleotide
cugacuaacauucaagaaa

SEQ ID NO: 2848447 - RNA, 19 nt, Artificial Sequence
  Description of Artificial Sequence: Synthetic oligonucleotide
ugccugacuaacauucaag

SEQ ID NO: 2848448 - RNA, 19 nt, Artificial Sequence
  Description of Artificial Sequence: Synthetic oligonucleotide
aaagagcugacggugcaag

SEQ ID NO: 2848449 - RNA, 19 nt, Artificial Sequence
  Description of Artificial Sequence: Synthetic oligonucleotide
uccaauucuggaaaaucaa

SEQ ID NO: 2848450 - RNA, 19 nt, Artificial Sequence
  Description of Artificial Sequence: Synthetic oligonucleotide
ucuggaaaaucaaggucca

SEQ ID NO: 2848451 - RNA, 19 nt, Artificial Sequence
  Description of Artificial Sequence: Synthetic oligonucleotide
ugagaaaucccagaggaua

SEQ ID NO: 2848452 - RNA, 19 nt, Artificial Sequence
  Description of Artificial Sequence: Synthetic oligonucleotide
uuaaagagcugacggugca

SEQ ID NO: 2848453 - RNA, 19 nt, Artificial Sequence
  Description of Artificial Sequence: Synthetic oligonucleotide
aaggguuuaaagagcugac

SEQ ID NO: 2848454 - RNA, 19 nt, Artificial Sequence
  Description of Artificial Sequence: Synthetic oligonucleotide
auuggacccagagauguac

SEQ ID NO: 2848455 - RNA, 19 nt, Artificial Sequence
  Description of Artificial Sequence: Synthetic oligonucleotide
cuuugccuaaaaugcagag

SEQ ID NO: 2848456 - RNA, 19 nt, Artificial Sequence
  Description of Artificial Sequence: Synthetic oligonucleotide
uccaguagaaacaguuacu

SEQ ID NO: 2848457 - RNA, 19 nt, Artificial Sequence
  Description of Artificial Sequence: Synthetic oligonucleotide
gauaagucaaaauccagau

SEQ ID NO: 2848458 - RNA, 19 nt, Artificial Sequence
  Description of Artificial Sequence: Synthetic oligonucleotide
aaaaugcagagcuucucuu

SEQ ID NO: 2848459 - RNA, 19 nt, Artificial Sequence
  Description of Artificial Sequence: Synthetic oligonucleotide
ugaagauaauggcuccuga

SEQ ID NO: 2848460 - RNA, 19 nt, Artificial Sequence
  Description of Artificial Sequence: Synthetic oligonucleotide
uggaaauacauguuccaau

SEQ ID NO: 2848461 - RNA, 19 nt, Artificial Sequence
  Description of Artificial Sequence: Synthetic oligonucleotide
ucuuugccuaaaaugcaga

SEQ ID NO: 2848462 - RNA, 19 nt, Artificial Sequence
  Description of Artificial Sequence: Synthetic oligonucleotide
ucccagaggauaacgauaa

SEQ ID NO: 2848463 - RNA, 19 nt, Artificial Sequence
  Description of Artificial Sequence: Synthetic oligonucleotide
cucuuugccuaaaaugcag

SEQ ID NO: 2848464 - RNA, 19 nt, Artificial Sequence
  Description of Artificial Sequence: Synthetic oligonucleotide
uucagccuuaucaucuggc

SEQ ID NO: 2848465 - RNA, 19 nt, Artificial Sequence
  Description of Artificial Sequence: Synthetic oligonucleotide
ugcaaguguggaaauacau

SEQ ID NO: 2848466 - RNA, 19 nt, Artificial Sequence
  Description of Artificial Sequence: Synthetic oligonucleotide
ugagaaaucucuuguguuu

SEQ ID NO: 2848467 - RNA, 19 nt, Artificial Sequence
  Description of Artificial Sequence: Synthetic oligonucleotide
uuucuagauggagauucgg

SEQ ID NO: 2848468 - RNA, 19 nt, Artificial Sequence
  Description of Artificial Sequence: Synthetic oligonucleotide
uucacagucucucuguguu

SEQ ID NO: 2848469 - RNA, 19 nt, Artificial Sequence
  Description of Artificial Sequence: Synthetic oligonucleotide
gaggauaacgauaagucaa

SEQ ID NO: 2848470 - RNA, 19 nt, Artificial Sequence
  Description of Artificial Sequence: Synthetic oligonucleotide
agagauguacacgcuuugc

SEQ ID NO: 2848471 - RNA, 19 nt, Artificial Sequence
  Description of Artificial Sequence: Synthetic oligonucleotide
aaucuuucacagucucucu

SEQ ID NO: 2848472 - RNA, 19 nt, Artificial Sequence
  Description of Artificial Sequence: Synthetic oligonucleotide
ucacaauuggacccagaga

SEQ ID NO: 2848473 - RNA, 19 nt, Artificial Sequence
  Description of Artificial Sequence: Synthetic oligonucleotide
gaaacaguuacugaagaua

SEQ ID NO: 2848474 - RNA, 19 nt, Artificial Sequence
  Description of Artificial Sequence: Synthetic oligonucleotide
gaaaaucaagguccacagc

SEQ ID NO: 2848475 - RNA, 19 nt, Artificial Sequence
  Description of Artificial Sequence: Synthetic oligonucleotide
cacgcuuugcauuuucaag

SEQ ID NO: 2848476 - RNA, 19 nt, Artificial Sequence
  Description of Artificial Sequence: Synthetic oligonucleotide
uggcuucacaauuggaccc

SEQ ID NO: 2848477 - RNA, 19 nt, Artificial Sequence
  Description of Artificial Sequence: Synthetic oligonucleotide
ugaacaaguaauucuucuu

SEQ ID NO: 2848478 - RNA, 19 nt, Artificial Sequence
  Description of Artificial Sequence: Synthetic oligonucleotide
uacugaagauaauggcucc

SEQ ID NO: 2848479 - RNA, 19 nt, Artificial Sequence
  Description of Artificial Sequence: Synthetic oligonucleotide
ucugaacaaguaauucuuc

SEQ ID NO: 2848480 - RNA, 19 nt, Artificial Sequence
  Description of Artificial Sequence: Synthetic oligonucleotide
gucucuguugucuugagaa

SEQ ID NO: 2848481 - RNA, 19 nt, Artificial Sequence
  Description of Artificial Sequence: Synthetic oligonucleotide
acauguuccaauucuggaa

SEQ ID NO: 2848482 - RNA, 19 nt, Artificial Sequence
  Description of Artificial Sequence: Synthetic oligonucleotide
aaaugcagagcuucucuuu

SEQ ID NO: 2848483 - RNA, 19 nt, Artificial Sequence
  Description of Artificial Sequence: Synthetic oligonucleotide
agauucggagcucucauaa

SEQ ID NO: 2848484 - RNA, 19 nt, Artificial Sequence
  Description of Artificial Sequence: Synthetic oligonucleotide
ucaagucauucucaccugu

SEQ ID NO: 2848485 - RNA, 19 nt, Artificial Sequence
  Description of Artificial Sequence: Synthetic oligonucleotide
ugucuugagaaaucccaga

SEQ ID NO: 2848486 - RNA, 19 nt, Artificial Sequence
  Description of Artificial Sequence: Synthetic oligonucleotide
ucaagaaaucuuucacagu

SEQ ID NO: 2848487 - RNA, 19 nt, Artificial Sequence
  Description of Artificial Sequence: Synthetic oligonucleotide
auucggagcucucauaaaa

SEQ ID NO: 2848488 - RNA, 19 nt, Artificial Sequence
  Description of Artificial Sequence: Synthetic oligonucleotide
aagcuuccaguagaaacag

SEQ ID NO: 2848489 - RNA, 19 nt, Artificial Sequence
  Description of Artificial Sequence: Synthetic oligonucleotide
ucuguugucuugagaaauc

SEQ ID NO: 2848490 - RNA, 19 nt, Artificial Sequence
  Description of Artificial Sequence: Synthetic oligonucleotide
aaagucucuguugucuuga

SEQ ID NO: 2848491 - RNA, 19 nt, Artificial Sequence
  Description of Artificial Sequence: Synthetic oligonucleotide
acauccuugccugacuaac

SEQ ID NO: 2848492 - RNA, 19 nt, Artificial Sequence
  Description of Artificial Sequence: Synthetic oligonucleotide
uucaacugcuucugaagac

SEQ ID NO: 2848493 - RNA, 19 nt, Artificial Sequence
  Description of Artificial Sequence: Synthetic oligonucleotide
gaucuguaaggcucaaauc

SEQ ID NO: 2848494 - RNA, 19 nt, Artificial Sequence
  Description of Artificial Sequence: Synthetic oligonucleotide
ggcucuuugccuaaaaugc

SEQ ID NO: 2848495 - RNA, 19 nt, Artificial Sequence
  Description of Artificial Sequence: Synthetic oligonucleotide
uuuucgauuugcugcugca

SEQ ID NO: 2848496 - RNA, 19 nt, Artificial Sequence
  Description of Artificial Sequence: Synthetic oligonucleotide
gagauguacacgcuuugca

SEQ ID NO: 2848497 - RNA, 19 nt, Artificial Sequence
  Description of Artificial Sequence: Synthetic oligonucleotide
aaaucaagguccacagcug

SEQ ID NO: 2848498 - RNA, 19 nt, Artificial Sequence
  Description of Artificial Sequence: Synthetic oligonucleotide
agauguacacgcuuugcau

SEQ ID NO: 2848499 - RNA, 19 nt, Artificial Sequence
  Description of Artificial Sequence: Synthetic oligonucleotide
ggugauuucauaacuuaag

SEQ ID NO: 2848500 - RNA, 19 nt, Artificial Sequence
  Description of Artificial Sequence: Synthetic oligonucleotide
uaaggcucaaaucggugau

SEQ ID NO: 2848501 - RNA, 19 nt, Artificial Sequence
  Description of Artificial Sequence: Synthetic oligonucleotide
aaggcugucugucucugaa

SEQ ID NO: 2848502 - RNA, 19 nt, Artificial Sequence
  Description of Artificial Sequence: Synthetic oligonucleotide
caaguguggaaauacaugu

SEQ ID NO: 2848503 - RNA, 19 nt, Artificial Sequence
  Description of Artificial Sequence: Synthetic oligonucleotide
uccugagaaaucucuugug

SEQ ID NO: 2848504 - RNA, 19 nt, Artificial Sequence
  Description of Artificial Sequence: Synthetic oligonucleotide
agaaacaguuacugaagau

SEQ ID NO: 2848505 - RNA, 19 nt, Artificial Sequence
  Description of Artificial Sequence: Synthetic oligonucleotide
cauaacuuaagcuuccagu

SEQ ID NO: 2848506 - RNA, 19 nt, Artificial Sequence
  Description of Artificial Sequence: Synthetic oligonucleotide
ucauucucaccuguggaca

SEQ ID NO: 2848507 - RNA, 19 nt, Artificial Sequence
  Description of Artificial Sequence: Synthetic oligonucleotide
agucauucucaccugugga

SEQ ID NO: 2848508 - RNA, 19 nt, Artificial Sequence
  Description of Artificial Sequence: Synthetic oligonucleotide
ucggagcucucauaaaagu

SEQ ID NO: 2848509 - RNA, 19 nt, Artificial Sequence
  Description of Artificial Sequence: Synthetic oligonucleotide
aaaucccagaggauaacga

SEQ ID NO: 2848510 - RNA, 19 nt, Artificial Sequence
  Description of Artificial Sequence: Synthetic oligonucleotide
auaauggcuccugagaaau

SEQ ID NO: 2848511 - RNA, 19 nt, Artificial Sequence
  Description of Artificial Sequence: Synthetic oligonucleotide
cacaauuggacccagagau

SEQ ID NO: 2848512 - RNA, 19 nt, Artificial Sequence
  Description of Artificial Sequence: Synthetic oligonucleotide
auccagauaugguucuaag

SEQ ID NO: 2848513 - RNA, 19 nt, Artificial Sequence
  Description of Artificial Sequence: Synthetic oligonucleotide
gaaaucucuuguguuucag

SEQ ID NO: 2848514 - RNA, 19 nt, Artificial Sequence
  Description of Artificial Sequence: Synthetic oligonucleotide
cuggaacuggaucuguaag

SEQ ID NO: 2848515 - RNA, 19 nt, Artificial Sequence
  Description of Artificial Sequence: Synthetic oligonucleotide
guaaggcucaaaucgguga

SEQ ID NO: 2848516 - RNA, 19 nt, Artificial Sequence
  Description of Artificial Sequence: Synthetic oligonucleotide
ucagccuuaucaucuggcu

SEQ ID NO: 2848517 - RNA, 19 nt, Artificial Sequence
  Description of Artificial Sequence: Synthetic oligonucleotide
guagauucaacugcuucug

SEQ ID NO: 2848518 - RNA, 19 nt, Artificial Sequence
  Description of Artificial Sequence: Synthetic oligonucleotide
uucaagucauucucaccug

SEQ ID NO: 2848519 - RNA, 19 nt, Artificial Sequence
  Description of Artificial Sequence: Synthetic oligonucleotide
aggguuuaaagagcugacg

SEQ ID NO: 2848520 - RNA, 19 nt, Artificial Sequence
  Description of Artificial Sequence: Synthetic oligonucleotide
agauucaacugcuucugaa

SEQ ID NO: 2848521 - RNA, 19 nt, Artificial Sequence
  Description of Artificial Sequence: Synthetic oligonucleotide
aagaaaucuuucacagucu

SEQ ID NO: 2848522 - RNA, 19 nt, Artificial Sequence
  Description of Artificial Sequence: Synthetic oligonucleotide
caaaucggugauuucauaa

SEQ ID NO: 2848523 - RNA, 19 nt, Artificial Sequence
  Description of Artificial Sequence: Synthetic oligonucleotide
ucggugauuucauaacuua

SEQ ID NO: 2848524 - RNA, 19 nt, Artificial Sequence
  Description of Artificial Sequence: Synthetic oligonucleotide
guuacugaagauaauggcu

SEQ ID NO: 2848525 - RNA, 19 nt, Artificial Sequence
  Description of Artificial Sequence: Synthetic oligonucleotide
uugcauuuucaagucauuc

SEQ ID NO: 2848526 - RNA, 19 nt, Artificial Sequence
  Description of Artificial Sequence: Synthetic oligonucleotide
guguggaaauacauguucc

SEQ ID NO: 2848527 - RNA, 19 nt, Artificial Sequence
  Description of Artificial Sequence: Synthetic oligonucleotide
aucaucuggcuucacaauu

SEQ ID NO: 2848528 - RNA, 19 nt, Artificial Sequence
  Description of Artificial Sequence: Synthetic oligonucleotide
caucuggcuucacaauugg

SEQ ID NO: 2848529 - RNA, 19 nt, Artificial Sequence
  Description of Artificial Sequence: Synthetic oligonucleotide
uaaaagucucuguugucuu

SEQ ID NO: 2848530 - RNA, 19 nt, Artificial Sequence
  Description of Artificial Sequence: Synthetic oligonucleotide
ugucucugaacaaguaauu

SEQ ID NO: 2848531 - RNA, 19 nt, Artificial Sequence
  Description of Artificial Sequence: Synthetic oligonucleotide
cauaaaagucucuguuguc

SEQ ID NO: 2848532 - RNA, 19 nt, Artificial Sequence
  Description of Artificial Sequence: Synthetic oligonucleotide
gauaauggcuccugagaaa

SEQ ID NO: 2848533 - RNA, 19 nt, Artificial Sequence
  Description of Artificial Sequence: Synthetic oligonucleotide
auaagucaaaauccagaua

SEQ ID NO: 2848534 - RNA, 19 nt, Artificial Sequence
  Description of Artificial Sequence: Synthetic oligonucleotide
agaaaucccagaggauaac

SEQ ID NO: 2848535 - RNA, 19 nt, Artificial Sequence
  Description of Artificial Sequence: Synthetic oligonucleotide
gauaacgauaagucaaaau

SEQ ID NO: 2848536 - RNA, 19 nt, Artificial Sequence
  Description of Artificial Sequence: Synthetic oligonucleotide
gagaaaucucuuguguuuc

SEQ ID NO: 2848537 - RNA, 19 nt, Artificial Sequence
  Description of Artificial Sequence: Synthetic oligonucleotide
gcauuuucaagucauucuc

SEQ ID NO: 2848538 - RNA, 19 nt, Artificial Sequence
  Description of Artificial Sequence: Synthetic oligonucleotide
aagucaaaauccagauaug

SEQ ID NO: 2848539 - RNA, 19 nt, Artificial Sequence
  Description of Artificial Sequence: Synthetic oligonucleotide
agagcuucucuuuguagau

SEQ ID NO: 2848540 - RNA, 19 nt, Artificial Sequence
  Description of Artificial Sequence: Synthetic oligonucleotide
uuucacagucucucugugu

SEQ ID NO: 2848541 - RNA, 19 nt, Artificial Sequence
  Description of Artificial Sequence: Synthetic oligonucleotide
cuuaucaucuggcuucaca

SEQ ID NO: 2848542 - RNA, 19 nt, Artificial Sequence
  Description of Artificial Sequence: Synthetic oligonucleotide
uagauucaacugcuucuga

SEQ ID NO: 2848543 - RNA, 19 nt, Artificial Sequence
  Description of Artificial Sequence: Synthetic oligonucleotide
agaaaucucuuguguuuca

SEQ ID NO: 2848544 - RNA, 19 nt, Artificial Sequence
  Description of Artificial Sequence: Synthetic oligonucleotide
cauguuccaauucuggaaa

SEQ ID NO: 2848545 - RNA, 19 nt, Artificial Sequence
  Description of Artificial Sequence: Synthetic oligonucleotide
aauccagauaugguucuaa

SEQ ID NO: 2848546 - RNA, 19 nt, Artificial Sequence
  Description of Artificial Sequence: Synthetic oligonucleotide
cagagcuucucuuuguaga

SEQ ID NO: 2848547 - RNA, 19 nt, Artificial Sequence
  Description of Artificial Sequence: Synthetic oligonucleotide
ccaauucuggaaaaucaag

SEQ ID NO: 2848548 - RNA, 19 nt, Artificial Sequence
  Description of Artificial Sequence: Synthetic oligonucleotide
cugucugucucugaacaag

SEQ ID NO: 2848549 - RNA, 19 nt, Artificial Sequence
  Description of Artificial Sequence: Synthetic oligonucleotide
auuugcugcugcaaggcug

SEQ ID NO: 2848550 - RNA, 19 nt, Artificial Sequence
  Description of Artificial Sequence: Synthetic oligonucleotide
uggcuccugagaaaucucu

SEQ ID NO: 2848551 - RNA, 19 nt, Artificial Sequence
  Description of Artificial Sequence: Synthetic oligonucleotide
gggcucuuugccuaaaaug

SEQ ID NO: 2848552 - RNA, 19 nt, Artificial Sequence
  Description of Artificial Sequence: Synthetic oligonucleotide
cuaacauucaagaaaucuu

SEQ ID NO: 2848553 - RNA, 19 nt, Artificial Sequence
  Description of Artificial Sequence: Synthetic oligonucleotide
uuugcauuuucaagucauu

SEQ ID NO: 2848554 - RNA, 19 nt, Artificial Sequence
  Description of Artificial Sequence: Synthetic oligonucleotide
uucucaccuguggacaucc

SEQ ID NO: 2848555 - RNA, 19 nt, Artificial Sequence
  Description of Artificial Sequence: Synthetic oligonucleotide
ggaacuggaucuguaaggc

SEQ ID NO: 2848556 - RNA, 19 nt, Artificial Sequence
  Description of Artificial Sequence: Synthetic oligonucleotide
caagucauucucaccugug

SEQ ID NO: 2848557 - RNA, 19 nt, Artificial Sequence
  Description of Artificial Sequence: Synthetic oligonucleotide
ccuugccugacuaacauuc

SEQ ID NO: 2848558 - RNA, 19 nt, Artificial Sequence
  Description of Artificial Sequence: Synthetic oligonucleotide
uugccugacuaacauucaa

SEQ ID NO: 2848559 - RNA, 19 nt, Artificial Sequence
  Description of Artificial Sequence: Synthetic oligonucleotide
acgauaagucaaaauccag

SEQ ID NO: 2848560 - RNA, 19 nt, Artificial Sequence
  Description of Artificial Sequence: Synthetic oligonucleotide
uuggacccagagauguaca

SEQ ID NO: 2848561 - RNA, 19 nt, Artificial Sequence
  Description of Artificial Sequence: Synthetic oligonucleotide
uuuguagauucaacugcuu

SEQ ID NO: 2848562 - RNA, 19 nt, Artificial Sequence
  Description of Artificial Sequence: Synthetic oligonucleotide
agagcugacggugcaagug

SEQ ID NO: 2848563 - RNA, 19 nt, Artificial Sequence
  Description of Artificial Sequence: Synthetic oligonucleotide
guuccaauucuggaaaauc

SEQ ID NO: 2848564 - RNA, 19 nt, Artificial Sequence
  Description of Artificial Sequence: Synthetic oligonucleotide
uaucaucuggcuucacaau

SEQ ID NO: 2848565 - RNA, 19 nt, Artificial Sequence
  Description of Artificial Sequence: Synthetic oligonucleotide
aagagcugacggugcaagu

SEQ ID NO: 2848566 - RNA, 19 nt, Artificial Sequence
  Description of Artificial Sequence: Synthetic oligonucleotide
cuaaaaugcagagcuucuc

SEQ ID NO: 2848567 - RNA, 19 nt, Artificial Sequence
  Description of Artificial Sequence: Synthetic oligonucleotide
auguacacgcuuugcauuu

SEQ ID NO: 2848568 - RNA, 19 nt, Artificial Sequence
  Description of Artificial Sequence: Synthetic oligonucleotide
cuuuguagauucaacugcu

SEQ ID NO: 2848569 - RNA, 19 nt, Artificial Sequence
  Description of Artificial Sequence: Synthetic oligonucleotide
cuuucacagucucucugug

SEQ ID NO: 2848570 - RNA, 19 nt, Artificial Sequence
  Description of Artificial Sequence: Synthetic oligonucleotide
cuaaggguuuaaagagcug

SEQ ID NO: 2848571 - RNA, 19 nt, Artificial Sequence
  Description of Artificial Sequence: Synthetic oligonucleotide
ucucuguugucuugagaaa

SEQ ID NO: 2848572 - RNA, 19 nt, Artificial Sequence
  Description of Artificial Sequence: Synthetic oligonucleotide
ucaaaucggugauuucaua

SEQ ID NO: 2848573 - RNA, 19 nt, Artificial Sequence
  Description of Artificial Sequence: Synthetic oligonucleotide
ucaagguccacagcuggaa

SEQ ID NO: 2848574 - RNA, 19 nt, Artificial Sequence
  Description of Artificial Sequence: Synthetic oligonucleotide
agauaugguucuaaggguu

SEQ ID NO: 2848575 - RNA, 19 nt, Artificial Sequence
  Description of Artificial Sequence: Synthetic oligonucleotide
cugaagauaauggcuccug

SEQ ID NO: 2848576 - RNA, 19 nt, Artificial Sequence
  Description of Artificial Sequence: Synthetic oligonucleotide
auccuugccugacuaacau

SEQ ID NO: 2848577 - RNA, 19 nt, Artificial Sequence
  Description of Artificial Sequence: Synthetic oligonucleotide
ugggcucuuugccuaaaau

SEQ ID NO: 2848578 - RNA, 19 nt, Artificial Sequence
  Description of Artificial Sequence: Synthetic oligonucleotide
ggugcaaguguggaaauac

SEQ ID NO: 2848579 - RNA, 19 nt, Artificial Sequence
  Description of Artificial Sequence: Synthetic oligonucleotide
caacugcuucugaagacuc

SEQ ID NO: 2848580 - RNA, 19 nt, Artificial Sequence
  Description of Artificial Sequence: Synthetic oligonucleotide
caccuguggacauccuugc

SEQ ID NO: 2848581 - RNA, 19 nt, Artificial Sequence
  Description of Artificial Sequence: Synthetic oligonucleotide
uguuccaauucuggaaaau

SEQ ID NO: 2848582 - RNA, 19 nt, Artificial Sequence
  Description of Artificial Sequence: Synthetic oligonucleotide
gacggugcaaguguggaaa

SEQ ID NO: 2848583 - RNA, 19 nt, Artificial Sequence
  Description of Artificial Sequence: Synthetic oligonucleotide
gucucugaacaaguaauuc

SEQ ID NO: 2848584 - RNA, 19 nt, Artificial Sequence
  Description of Artificial Sequence: Synthetic oligonucleotide
uggagauucggagcucuca

SEQ ID NO: 2848585 - RNA, 19 nt, Artificial Sequence
  Description of Artificial Sequence: Synthetic oligonucleotide
acacgcuuugcauuuucaa

SEQ ID NO: 2848586 - RNA, 19 nt, Artificial Sequence
  Description of Artificial Sequence: Synthetic oligonucleotide
ugcagagcuucucuuugua

SEQ ID NO: 2848587 - RNA, 19 nt, Artificial Sequence
  Description of Artificial Sequence: Synthetic oligonucleotide
ugcaaggcugucugucucu

SEQ ID NO: 2848588 - RNA, 19 nt, Artificial Sequence
  Description of Artificial Sequence: Synthetic oligonucleotide
ccaguagaaacaguuacug

SEQ ID NO: 2848589 - RNA, 19 nt, Artificial Sequence
  Description of Artificial Sequence: Synthetic oligonucleotide
cugaacaaguaauucuucu

SEQ ID NO: 2848590 - RNA, 19 nt, Artificial Sequence
  Description of Artificial Sequence: Synthetic oligonucleotide
cagagauguacacgcuuug

SEQ ID NO: 2848591 - RNA, 19 nt, Artificial Sequence
  Description of Artificial Sequence: Synthetic oligonucleotide
uuucgauuugcugcugcaa

SEQ ID NO: 2848592 - RNA, 19 nt, Artificial Sequence
  Description of Artificial Sequence: Synthetic oligonucleotide
cuuugcauuuucaagucau

SEQ ID NO: 2848593 - RNA, 19 nt, Artificial Sequence
  Description of Artificial Sequence: Synthetic oligonucleotide
uaugguucuaaggguuuaa

SEQ ID NO: 2848594 - RNA, 19 nt, Artificial Sequence
  Description of Artificial Sequence: Synthetic oligonucleotide
gcaaguguggaaauacaug

SEQ ID NO: 2848595 - RNA, 19 nt, Artificial Sequence
  Description of Artificial Sequence: Synthetic oligonucleotide
gauguacacgcuuugcauu

SEQ ID NO: 2848596 - RNA, 19 nt, Artificial Sequence
  Description of Artificial Sequence: Synthetic oligonucleotide
acugaagauaauggcuccu

SEQ ID NO: 2848597 - RNA, 19 nt, Artificial Sequence
  Description of Artificial Sequence: Synthetic oligonucleotide
caguagaaacaguuacuga

SEQ ID NO: 2848598 - RNA, 19 nt, Artificial Sequence
  Description of Artificial Sequence: Synthetic oligonucleotide
guguuucagccuuaucauc

SEQ ID NO: 2848599 - RNA, 19 nt, Artificial Sequence
  Description of Artificial Sequence: Synthetic oligonucleotide
gcucaaaucggugauuuca

SEQ ID NO: 2848600 - RNA, 19 nt, Artificial Sequence
  Description of Artificial Sequence: Synthetic oligonucleotide
cacagcuggaacuggaucu

SEQ ID NO: 2848601 - RNA, 19 nt, Artificial Sequence
  Description of Artificial Sequence: Synthetic oligonucleotide
gcuccugagaaaucucuug

SEQ ID NO: 2848602 - RNA, 19 nt, Artificial Sequence
  Description of Artificial Sequence: Synthetic oligonucleotide
uccacagcuggaacuggau

SEQ ID NO: 2848603 - RNA, 19 nt, Artificial Sequence
  Description of Artificial Sequence: Synthetic oligonucleotide
aacaguuacugaagauaau

SEQ ID NO: 2848604 - RNA, 19 nt, Artificial Sequence
  Description of Artificial Sequence: Synthetic oligonucleotide
aaguguggaaauacauguu

SEQ ID NO: 2848605 - RNA, 19 nt, Artificial Sequence
  Description of Artificial Sequence: Synthetic oligonucleotide
gagcucucauaaaagucuc

SEQ ID NO: 2848606 - RNA, 19 nt, Artificial Sequence
  Description of Artificial Sequence: Synthetic oligonucleotide
aggauaacgauaagucaaa

SEQ ID NO: 2848607 - RNA, 19 nt, Artificial Sequence
  Description of Artificial Sequence: Synthetic oligonucleotide
uaauggcuccugagaaauc

SEQ ID NO: 2848608 - RNA, 19 nt, Artificial Sequence
  Description of Artificial Sequence: Synthetic oligonucleotide
augcagagcuucucuuugu

SEQ ID NO: 2848609 - RNA, 19 nt, Artificial Sequence
  Description of Artificial Sequence: Synthetic oligonucleotide
aacugcuucugaagacuca

SEQ ID NO: 2848610 - RNA, 19 nt, Artificial Sequence
  Description of Artificial Sequence: Synthetic oligonucleotide
auguuccaauucuggaaaa

SEQ ID NO: 2848611 - RNA, 19 nt, Artificial Sequence
  Description of Artificial Sequence: Synthetic oligonucleotide
acaauuggacccagagaug

SEQ ID NO: 2848612 - RNA, 19 nt, Artificial Sequence
  Description of Artificial Sequence: Synthetic oligonucleotide
ugcugcaaggcugucuguc

SEQ ID NO: 2848613 - RNA, 19 nt, Artificial Sequence
  Description of Artificial Sequence: Synthetic oligonucleotide
cucugaacaaguaauucuu

SEQ ID NO: 2848614 - RNA, 19 nt, Artificial Sequence
  Description of Artificial Sequence: Synthetic oligonucleotide
cugucucugaacaaguaau

SEQ ID NO: 2848615 - RNA, 19 nt, Artificial Sequence
  Description of Artificial Sequence: Synthetic oligonucleotide
cuuccaguagaaacaguua

SEQ ID NO: 2848616 - RNA, 19 nt, Artificial Sequence
  Description of Artificial Sequence: Synthetic oligonucleotide
ggaucuguaaggcucaaau

SEQ ID NO: 2848617 - RNA, 19 nt, Artificial Sequence
  Description of Artificial Sequence: Synthetic oligonucleotide
ggaaauacauguuccaauu

SEQ ID NO: 2848618 - RNA, 19 nt, Artificial Sequence
  Description of Artificial Sequence: Synthetic oligonucleotide
gcagagcuucucuuuguag

SEQ ID NO: 2848619 - RNA, 19 nt, Artificial Sequence
  Description of Artificial Sequence: Synthetic oligonucleotide
acuggaucuguaaggcuca

SEQ ID NO: 2848620 - RNA, 19 nt, Artificial Sequence
  Description of Artificial Sequence: Synthetic oligonucleotide
cagauaugguucuaagggu

SEQ ID NO: 2848621 - RNA, 19 nt, Artificial Sequence
  Description of Artificial Sequence: Synthetic oligonucleotide
uaaagagcugacggugcaa

SEQ ID NO: 2848622 - RNA, 19 nt, Artificial Sequence
  Description of Artificial Sequence: Synthetic oligonucleotide
auucucaccuguggacauc

SEQ ID NO: 2848623 - RNA, 19 nt, Artificial Sequence
  Description of Artificial Sequence: Synthetic oligonucleotide
gauucggagcucucauaaa

SEQ ID NO: 2848624 - RNA, 19 nt, Artificial Sequence
  Description of Artificial Sequence: Synthetic oligonucleotide
uguggacauccuugccuga

SEQ ID NO: 2848625 - RNA, 19 nt, Artificial Sequence
  Description of Artificial Sequence: Synthetic oligonucleotide
ggacccagagauguacacg

SEQ ID NO: 2848626 - RNA, 19 nt, Artificial Sequence
  Description of Artificial Sequence: Synthetic oligonucleotide
gucaaaauccagauauggu

SEQ ID NO: 2848627 - RNA, 19 nt, Artificial Sequence
  Description of Artificial Sequence: Synthetic oligonucleotide
agauggagauucggagcuc

SEQ ID NO: 2848628 - RNA, 19 nt, Artificial Sequence
  Description of Artificial Sequence: Synthetic oligonucleotide
acuuaagcuuccaguagaa

SEQ ID NO: 2848629 - RNA, 19 nt, Artificial Sequence
  Description of Artificial Sequence: Synthetic oligonucleotide
cauccuugccugacuaaca

SEQ ID NO: 2848630 - RNA, 19 nt, Artificial Sequence
  Description of Artificial Sequence: Synthetic oligonucleotide
ucuuguguuucagccuuau

SEQ ID NO: 2848631 - RNA, 19 nt, Artificial Sequence
  Description of Artificial Sequence: Synthetic oligonucleotide
aaauccagauaugguucua

SEQ ID NO: 2848632 - RNA, 19 nt, Artificial Sequence
  Description of Artificial Sequence: Synthetic oligonucleotide
uugggcucuuugccuaaaa

SEQ ID NO: 2848633 - RNA, 19 nt, Artificial Sequence
  Description of Artificial Sequence: Synthetic oligonucleotide
gccuaaaaugcagagcuuc

SEQ ID NO: 2848634 - RNA, 19 nt, Artificial Sequence
  Description of Artificial Sequence: Synthetic oligonucleotide
ugacggugcaaguguggaa

SEQ ID NO: 2848635 - RNA, 19 nt, Artificial Sequence
  Description of Artificial Sequence: Synthetic oligonucleotide
gguuuaaagagcugacggu

SEQ ID NO: 2848636 - RNA, 19 nt, Artificial Sequence
  Description of Artificial Sequence: Synthetic oligonucleotide
cgauaagucaaaauccaga

SEQ ID NO: 2848637 - RNA, 19 nt, Artificial Sequence
  Description of Artificial Sequence: Synthetic oligonucleotide
aauucuucuugggcucuuu

SEQ ID NO: 2848638 - RNA, 19 nt, Artificial Sequence
  Description of Artificial Sequence: Synthetic oligonucleotide
cuuguguuucagccuuauc

SEQ ID NO: 2848639 - RNA, 19 nt, Artificial Sequence
  Description of Artificial Sequence: Synthetic oligonucleotide
ugccuaaaaugcagagcuu

SEQ ID NO: 2848640 - RNA, 19 nt, Artificial Sequence
  Description of Artificial Sequence: Synthetic oligonucleotide
gaaaucuuucacagucucu

SEQ ID NO: 2848641 - RNA, 19 nt, Artificial Sequence
  Description of Artificial Sequence: Synthetic oligonucleotide
ggagcucucauaaaagucu

SEQ ID NO: 2848642 - RNA, 19 nt, Artificial Sequence
  Description of Artificial Sequence: Synthetic oligonucleotide
guacacgcuuugcauuuuc

SEQ ID NO: 2848643 - RNA, 19 nt, Artificial Sequence
  Description of Artificial Sequence: Synthetic oligonucleotide
auggcuccugagaaaucuc

SEQ ID NO: 2848644 - RNA, 19 nt, Artificial Sequence
  Description of Artificial Sequence: Synthetic oligonucleotide
aucggugauuucauaacuu

SEQ ID NO: 2848645 - RNA, 19 nt, Artificial Sequence
  Description of Artificial Sequence: Synthetic oligonucleotide
gauggagauucggagcucu

SEQ ID NO: 2848646 - RNA, 19 nt, Artificial Sequence
  Description of Artificial Sequence: Synthetic oligonucleotide
gacuaacauucaagaaauc

SEQ ID NO: 2848647 - RNA, 19 nt, Artificial Sequence
  Description of Artificial Sequence: Synthetic oligonucleotide
gagcugacggugcaagugu

SEQ ID NO: 2848648 - RNA, 19 nt, Artificial Sequence
  Description of Artificial Sequence: Synthetic oligonucleotide
cugcaaggcugucugucuc

SEQ ID NO: 2848649 - RNA, 19 nt, Artificial Sequence
  Description of Artificial Sequence: Synthetic oligonucleotide
aggcucaaaucggugauuu

SEQ ID NO: 2848650 - RNA, 19 nt, Artificial Sequence
  Description of Artificial Sequence: Synthetic oligonucleotide
cucucauaaaagucucugu

SEQ ID NO: 2848651 - RNA, 19 nt, Artificial Sequence
  Description of Artificial Sequence: Synthetic oligonucleotide
gagauucggagcucucaua

SEQ ID NO: 2848652 - RNA, 19 nt, Artificial Sequence
  Description of Artificial Sequence: Synthetic oligonucleotide
gacauccuugccugacuaa

SEQ ID NO: 2848653 - RNA, 19 nt, Artificial Sequence
  Description of Artificial Sequence: Synthetic oligonucleotide
auaugguucuaaggguuua

SEQ ID NO: 2848654 - RNA, 19 nt, Artificial Sequence
  Description of Artificial Sequence: Synthetic oligonucleotide
aaggcucaaaucggugauu

SEQ ID NO: 2848655 - RNA, 19 nt, Artificial Sequence
  Description of Artificial Sequence: Synthetic oligonucleotide
augguucuaaggguuuaaa

SEQ ID NO: 2848656 - RNA, 19 nt, Artificial Sequence
  Description of Artificial Sequence: Synthetic oligonucleotide
ucacagucucucuguguuu

SEQ ID NO: 2848657 - RNA, 19 nt, Artificial Sequence
  Description of Artificial Sequence: Synthetic oligonucleotide
aucccagaggauaacgaua

SEQ ID NO: 2848658 - RNA, 19 nt, Artificial Sequence
  Description of Artificial Sequence: Synthetic oligonucleotide
cuccugagaaaucucuugu

SEQ ID NO: 2848659 - RNA, 19 nt, Artificial Sequence
  Description of Artificial Sequence: Synthetic oligonucleotide
uccuugccugacuaacauu

SEQ ID NO: 2848660 - RNA, 19 nt, Artificial Sequence
  Description of Artificial Sequence: Synthetic oligonucleotide
cugagaaaucucuuguguu

SEQ ID NO: 2848661 - RNA, 19 nt, Artificial Sequence
  Description of Artificial Sequence: Synthetic oligonucleotide
cucaaaucggugauuucau

SEQ ID NO: 2848662 - RNA, 19 nt, Artificial Sequence
  Description of Artificial Sequence: Synthetic oligonucleotide
aauuggacccagagaugua

SEQ ID NO: 2848663 - RNA, 19 nt, Artificial Sequence
  Description of Artificial Sequence: Synthetic oligonucleotide
aucaagguccacagcugga

SEQ ID NO: 2848664 - RNA, 19 nt, Artificial Sequence
  Description of Artificial Sequence: Synthetic oligonucleotide
cuucuugggcucuuugccu

SEQ ID NO: 2848665 - RNA, 19 nt, Artificial Sequence
  Description of Artificial Sequence: Synthetic oligonucleotide
cuguaaggcucaaaucggu

SEQ ID NO: 2848666 - RNA, 19 nt, Artificial Sequence
  Description of Artificial Sequence: Synthetic oligonucleotide
guggacauccuugccugac

SEQ ID NO: 2848667 - RNA, 19 nt, Artificial Sequence
  Description of Artificial Sequence: Synthetic oligonucleotide
acggugcaaguguggaaau

SEQ ID NO: 2848668 - RNA, 19 nt, Artificial Sequence
  Description of Artificial Sequence: Synthetic oligonucleotide
ucucaccuguggacauccu

SEQ ID NO: 2848669 - RNA, 19 nt, Artificial Sequence
  Description of Artificial Sequence: Synthetic oligonucleotide
gauaugguucuaaggguuu

SEQ ID NO: 2848670 - RNA, 19 nt, Artificial Sequence
  Description of Artificial Sequence: Synthetic oligonucleotide
gcuuugcauuuucaaguca

SEQ ID NO: 2848671 - RNA, 19 nt, Artificial Sequence
  Description of Artificial Sequence: Synthetic oligonucleotide
cuggaaaaucaagguccac

SEQ ID NO: 2848672 - RNA, 19 nt, Artificial Sequence
  Description of Artificial Sequence: Synthetic oligonucleotide
auggagauucggagcucuc

SEQ ID NO: 2848673 - RNA, 19 nt, Artificial Sequence
  Description of Artificial Sequence: Synthetic oligonucleotide
gugcaaguguggaaauaca

SEQ ID NO: 2848674 - RNA, 19 nt, Artificial Sequence
  Description of Artificial Sequence: Synthetic oligonucleotide
cugacggugcaagugugga

SEQ ID NO: 2848675 - RNA, 19 nt, Artificial Sequence
  Description of Artificial Sequence: Synthetic oligonucleotide
cuucacaauuggacccaga

SEQ ID NO: 2848676 - RNA, 19 nt, Artificial Sequence
  Description of Artificial Sequence: Synthetic oligonucleotide
uggaucuguaaggcucaaa

SEQ ID NO: 2848677 - RNA, 19 nt, Artificial Sequence
  Description of Artificial Sequence: Synthetic oligonucleotide
agcugacggugcaagugug

SEQ ID NO: 2848678 - RNA, 19 nt, Artificial Sequence
  Description of Artificial Sequence: Synthetic oligonucleotide
gcugacggugcaagugugg

SEQ ID NO: 2848679 - RNA, 19 nt, Artificial Sequence
  Description of Artificial Sequence: Synthetic oligonucleotide
uguacacgcuuugcauuuu

SEQ ID NO: 2848680 - RNA, 19 nt, Artificial Sequence
  Description of Artificial Sequence: Synthetic oligonucleotide
cggagcucucauaaaaguc

SEQ ID NO: 2848681 - RNA, 19 nt, Artificial Sequence
  Description of Artificial Sequence: Synthetic oligonucleotide
aucuggcuucacaauugga

SEQ ID NO: 2848682 - RNA, 19 nt, Artificial Sequence
  Description of Artificial Sequence: Synthetic oligonucleotide
gcucuuugccuaaaaugca

SEQ ID NO: 2848683 - RNA, 19 nt, Artificial Sequence
  Description of Artificial Sequence: Synthetic oligonucleotide
cucuguugucuugagaaau

SEQ ID NO: 2848684 - RNA, 19 nt, Artificial Sequence
  Description of Artificial Sequence: Synthetic oligonucleotide
guaauucuucuugggcucu

SEQ ID NO: 2848685 - RNA, 19 nt, Artificial Sequence
  Description of Artificial Sequence: Synthetic oligonucleotide
ccugagaaaucucuugugu

SEQ ID NO: 2848686 - RNA, 19 nt, Artificial Sequence
  Description of Artificial Sequence: Synthetic oligonucleotide
cgcuuugcauuuucaaguc

SEQ ID NO: 2848687 - RNA, 19 nt, Artificial Sequence
  Description of Artificial Sequence: Synthetic oligonucleotide
gcuuccaguagaaacaguu

SEQ ID NO: 2848688 - RNA, 19 nt, Artificial Sequence
  Description of Artificial Sequence: Synthetic oligonucleotide
ggacauccuugccugacua

SEQ ID NO: 2848689 - RNA, 19 nt, Artificial Sequence
  Description of Artificial Sequence: Synthetic oligonucleotide
ggauaacgauaagucaaaa

SEQ ID NO: 2848690 - RNA, 19 nt, Artificial Sequence
  Description of Artificial Sequence: Synthetic oligonucleotide
guccacagcuggaacugga

SEQ ID NO: 2848691 - RNA, 19 nt, Artificial Sequence
  Description of Artificial Sequence: Synthetic oligonucleotide
ggagauucggagcucucau

SEQ ID NO: 2848692 - RNA, 19 nt, Artificial Sequence
  Description of Artificial Sequence: Synthetic oligonucleotide
cauucucaccuguggacau

SEQ ID NO: 2848693 - RNA, 19 nt, Artificial Sequence
  Description of Artificial Sequence: Synthetic oligonucleotide
ggcuucacaauuggaccca

SEQ ID NO: 2848694 - RNA, 19 nt, Artificial Sequence
  Description of Artificial Sequence: Synthetic oligonucleotide
gcuucacaauuggacccag

SEQ ID NO: 2848695 - RNA, 19 nt, Artificial Sequence
  Description of Artificial Sequence: Synthetic oligonucleotide
ccuaaaaugcagagcuucu

SEQ ID NO: 2848696 - RNA, 19 nt, Artificial Sequence
  Description of Artificial Sequence: Synthetic oligonucleotide
caaggcugucugucucuga

SEQ ID NO: 2848697 - RNA, 19 nt, Artificial Sequence
  Description of Artificial Sequence: Synthetic oligonucleotide
ggcucaaaucggugauuuc

SEQ ID NO: 2848698 - RNA, 19 nt, Artificial Sequence
  Description of Artificial Sequence: Synthetic oligonucleotide
gucugucucugaacaagua

SEQ ID NO: 2848699 - RNA, 19 nt, Artificial Sequence
  Description of Artificial Sequence: Synthetic oligonucleotide
acccagagauguacacgcu

SEQ ID NO: 2848700 - RNA, 19 nt, Artificial Sequence
  Description of Artificial Sequence: Synthetic oligonucleotide
gcugucugucucugaacaa

SEQ ID NO: 2848701 - RNA, 19 nt, Artificial Sequence
  Description of Artificial Sequence: Synthetic oligonucleotide
gcaaggcugucugucucug

SEQ ID NO: 2848702 - RNA, 19 nt, Artificial Sequence
  Description of Artificial Sequence: Synthetic oligonucleotide
agcuggaacuggaucugua

SEQ ID NO: 2848703 - RNA, 19 nt, Artificial Sequence
  Description of Artificial Sequence: Synthetic oligonucleotide
gcugcaaggcugucugucu

SEQ ID NO: 2848704 - RNA, 19 nt, Artificial Sequence
  Description of Artificial Sequence: Synthetic oligonucleotide
cucuuguguuucagccuua

SEQ ID NO: 2848705 - RNA, 19 nt, Artificial Sequence
  Description of Artificial Sequence: Synthetic oligonucleotide
cagccuuaucaucuggcuu

SEQ ID NO: 2848706 - RNA, 19 nt, Artificial Sequence
  Description of Artificial Sequence: Synthetic oligonucleotide
cggugauuucauaacuuaa

SEQ ID NO: 2848707 - RNA, 19 nt, Artificial Sequence
  Description of Artificial Sequence: Synthetic oligonucleotide
cccagaggauaacgauaag

SEQ ID NO: 2848708 - RNA, 19 nt, Artificial Sequence
  Description of Artificial Sequence: Synthetic oligonucleotide
cacagucucucuguguuuu

SEQ ID NO: 2848709 - RNA, 19 nt, Artificial Sequence
  Description of Artificial Sequence: Synthetic oligonucleotide
cucaccuguggacauccuu

SEQ ID NO: 2848710 - RNA, 19 nt, Artificial Sequence
  Description of Artificial Sequence: Synthetic oligonucleotide
ccagagauguacacgcuuu

SEQ ID NO: 2848711 - RNA, 19 nt, Artificial Sequence
  Description of Artificial Sequence: Synthetic oligonucleotide
cuugggcucuuugccuaaa

SEQ ID NO: 2848712 - RNA, 19 nt, Artificial Sequence
  Description of Artificial Sequence: Synthetic oligonucleotide
uugcugcugcaaggcuguc

SEQ ID NO: 2848713 - RNA, 19 nt, Artificial Sequence
  Description of Artificial Sequence: Synthetic oligonucleotide
cuggaucuguaaggcucaa

SEQ ID NO: 2848714 - RNA, 19 nt, Artificial Sequence
  Description of Artificial Sequence: Synthetic oligonucleotide
ccuuaucaucuggcuucac

SEQ ID NO: 2848715 - RNA, 19 nt, Artificial Sequence
  Description of Artificial Sequence: Synthetic oligonucleotide
cugcugcaaggcugucugu

SEQ ID NO: 2848716 - RNA, 19 nt, Artificial Sequence
  Description of Artificial Sequence: Synthetic oligonucleotide
cagcuggaacuggaucugu

SEQ ID NO: 2848717 - RNA, 19 nt, Artificial Sequence
  Description of Artificial Sequence: Synthetic oligonucleotide
cccagagauguacacgcuu

SEQ ID NO: 2848718 - RNA, 19 nt, Artificial Sequence
  Description of Artificial Sequence: Synthetic oligonucleotide
ggcuccugagaaaucucuu

SEQ ID NO: 2848719 - RNA, 19 nt, Artificial Sequence
  Description of Artificial Sequence: Synthetic oligonucleotide
cggugcaaguguggaaaua

SEQ ID NO: 2848720 - RNA, 19 nt, Artificial Sequence
  Description of Artificial Sequence: Synthetic oligonucleotide
aaaguguucaauuuguggg

SEQ ID NO: 2848721 - RNA, 19 nt, Artificial Sequence
  Description of Artificial Sequence: Synthetic oligonucleotide
uuaagaauccacaugauag

SEQ ID NO: 2848722 - RNA, 19 nt, Artificial Sequence
  Description of Artificial Sequence: Synthetic oligonucleotide
aaguauuuauucuacacac

SEQ ID NO: 2848723 - RNA, 19 nt, Artificial Sequence
  Description of Artificial Sequence: Synthetic oligonucleotide
aaagaagcauuucagaagg

SEQ ID NO: 2848724 - RNA, 19 nt, Artificial Sequence
  Description of Artificial Sequence: Synthetic oligonucleotide
aacauuccaccauugagcc

SEQ ID NO: 2848725 - RNA, 19 nt, Artificial Sequence
  Description of Artificial Sequence: Synthetic oligonucleotide
aauguuuauuaucuucagc

SEQ ID NO: 2848726 - RNA, 19 nt, Artificial Sequence
  Description of Artificial Sequence: Synthetic oligonucleotide
uuuauuaucuucagcagag

SEQ ID NO: 2848727 - RNA, 19 nt, Artificial Sequence
  Description of Artificial Sequence: Synthetic oligonucleotide
aaaaugauaagaagaacac

SEQ ID NO: 2848728 - RNA, 19 nt, Artificial Sequence
  Description of Artificial Sequence: Synthetic oligonucleotide
aguauuaaaagaaaagaac

SEQ ID NO: 2848729 - RNA, 19 nt, Artificial Sequence
  Description of Artificial Sequence: Synthetic oligonucleotide
uuaaaagaaaagaacagaa

SEQ ID NO: 2848730 - RNA, 19 nt, Artificial Sequence
  Description of Artificial Sequence: Synthetic oligonucleotide
aaguguucaauuugugggc

SEQ ID NO: 2848731 - RNA, 19 nt, Artificial Sequence
  Description of Artificial Sequence: Synthetic oligonucleotide
auguuuauuaucuucagca

SEQ ID NO: 2848732 - RNA, 19 nt, Artificial Sequence
  Description of Artificial Sequence: Synthetic oligonucleotide
uauuaucuucagcagaggg

SEQ ID NO: 2848733 - RNA, 19 nt, Artificial Sequence
  Description of Artificial Sequence: Synthetic oligonucleotide
acaaguauuuauucuacac

SEQ ID NO: 2848734 - RNA, 19 nt, Artificial Sequence
  Description of Artificial Sequence: Synthetic oligonucleotide
uuugcaccgaaacagaagc

SEQ ID NO: 2848735 - RNA, 19 nt, Artificial Sequence
  Description of Artificial Sequence: Synthetic oligonucleotide
uuauguucuaccauuacac

SEQ ID NO: 2848736 - RNA, 19 nt, Artificial Sequence
  Description of Artificial Sequence: Synthetic oligonucleotide
ucuaccauuacacuuccag

SEQ ID NO: 2848737 - RNA, 19 nt, Artificial Sequence
  Description of Artificial Sequence: Synthetic oligonucleotide
uaaaguguucaauuugugg

SEQ ID NO: 2848738 - RNA, 19 nt, Artificial Sequence
  Description of Artificial Sequence: Synthetic oligonucleotide
uuauucuacacaccuaugc

SEQ ID NO: 2848739 - RNA, 19 nt, Artificial Sequence
  Description of Artificial Sequence: Synthetic oligonucleotide
ugaauguuuauuaucuuca

SEQ ID NO: 2848740 - RNA, 19 nt, Artificial Sequence
  Description of Artificial Sequence: Synthetic oligonucleotide
aaaugaauguuuauuaucu

SEQ ID NO: 2848741 - RNA, 19 nt, Artificial Sequence
  Description of Artificial Sequence: Synthetic oligonucleotide
uaacauuccaccauugagc

SEQ ID NO: 2848742 - RNA, 19 nt, Artificial Sequence
  Description of Artificial Sequence: Synthetic oligonucleotide
uaaagaagcauuucagaag

SEQ ID NO: 2848743 - RNA, 19 nt, Artificial Sequence
  Description of Artificial Sequence: Synthetic oligonucleotide
acagguuuuauguucuacc

SEQ ID NO: 2848744 - RNA, 19 nt, Artificial Sequence
  Description of Artificial Sequence: Synthetic oligonucleotide
gaaaaugauaagaagaaca

SEQ ID NO: 2848745 - RNA, 19 nt, Artificial Sequence
  Description of Artificial Sequence: Synthetic oligonucleotide
ucuaugucuagcaaaguca

SEQ ID NO: 2848746 - RNA, 19 nt, Artificial Sequence
  Description of Artificial Sequence: Synthetic oligonucleotide
uuaaagaagcauuucagaa

SEQ ID NO: 2848747 - RNA, 19 nt, Artificial Sequence
  Description of Artificial Sequence: Synthetic oligonucleotide
augaauguuuauuaucuuc

SEQ ID NO: 2848748 - RNA, 19 nt, Artificial Sequence
  Description of Artificial Sequence: Synthetic oligonucleotide
uuuauguucuaccauuaca

SEQ ID NO: 2848749 - RNA, 19 nt, Artificial Sequence
  Description of Artificial Sequence: Synthetic oligonucleotide
aaugauaagaagaacacua

SEQ ID NO: 2848750 - RNA, 19 nt, Artificial Sequence
  Description of Artificial Sequence: Synthetic oligonucleotide
auugcgcuaacauuccacc

SEQ ID NO: 2848751 - RNA, 19 nt, Artificial Sequence
  Description of Artificial Sequence: Synthetic oligonucleotide
gauuaaagaagcauuucag

SEQ ID NO: 2848752 - RNA, 19 nt, Artificial Sequence
  Description of Artificial Sequence: Synthetic oligonucleotide
agauuaaagaagcauuuca

SEQ ID NO: 2848753 - RNA, 19 nt, Artificial Sequence
  Description of Artificial Sequence: Synthetic oligonucleotide
aaagucagaguucaaguau

SEQ ID NO: 2848754 - RNA, 19 nt, Artificial Sequence
  Description of Artificial Sequence: Synthetic oligonucleotide
uucaaguauuaaaagaaaa

SEQ ID NO: 2848755 - RNA, 19 nt, Artificial Sequence
  Description of Artificial Sequence: Synthetic oligonucleotide
aagaagagagugcagauua

SEQ ID NO: 2848756 - RNA, 19 nt, Artificial Sequence
  Description of Artificial Sequence: Synthetic oligonucleotide
agcaguacagguuuuaugu

SEQ ID NO: 2848757 - RNA, 19 nt, Artificial Sequence
  Description of Artificial Sequence: Synthetic oligonucleotide
aaacagaagcaguacaggu

SEQ ID NO: 2848758 - RNA, 19 nt, Artificial Sequence
  Description of Artificial Sequence: Synthetic oligonucleotide
aagaaaggacaguugagcu

SEQ ID NO: 2848759 - RNA, 19 nt, Artificial Sequence
  Description of Artificial Sequence: Synthetic oligonucleotide
uucaagauaacaaguauuu

SEQ ID NO: 2848760 - RNA, 19 nt, Artificial Sequence
  Description of Artificial Sequence: Synthetic oligonucleotide
aagaacagaagaaaggaca

SEQ ID NO: 2848761 - RNA, 19 nt, Artificial Sequence
  Description of Artificial Sequence: Synthetic oligonucleotide
ucaguuaagaauccacaug

SEQ ID NO: 2848762 - RNA, 19 nt, Artificial Sequence
  Description of Artificial Sequence: Synthetic oligonucleotide
auaagaagaacacuaguaa

SEQ ID NO: 2848763 - RNA, 19 nt, Artificial Sequence
  Description of Artificial Sequence: Synthetic oligonucleotide
aagaagaacacuaguaaug

SEQ ID NO: 2848764 - RNA, 19 nt, Artificial Sequence
  Description of Artificial Sequence: Synthetic oligonucleotide
agaagaacacuaguaaugg

SEQ ID NO: 2848765 - RNA, 19 nt, Artificial Sequence
  Description of Artificial Sequence: Synthetic oligonucleotide
uucuccucaguuaagaauc

SEQ ID NO: 2848766 - RNA, 19 nt, Artificial Sequence
  Description of Artificial Sequence: Synthetic oligonucleotide
aaguauuaaaagaaaagaa

SEQ ID NO: 2848767 - RNA, 19 nt, Artificial Sequence
  Description of Artificial Sequence: Synthetic oligonucleotide
uauucuacacaccuaugca

SEQ ID NO: 2848768 - RNA, 19 nt, Artificial Sequence
  Description of Artificial Sequence: Synthetic oligonucleotide
gaaaggacaguugagcucc

SEQ ID NO: 2848769 - RNA, 19 nt, Artificial Sequence
  Description of Artificial Sequence: Synthetic oligonucleotide
agaguucaaguauuaaaag

SEQ ID NO: 2848770 - RNA, 19 nt, Artificial Sequence
  Description of Artificial Sequence: Synthetic oligonucleotide
acaccuaugcauuugccuc

SEQ ID NO: 2848771 - RNA, 19 nt, Artificial Sequence
  Description of Artificial Sequence: Synthetic oligonucleotide
cuuugugucaucagugucc

SEQ ID NO: 2848772 - RNA, 19 nt, Artificial Sequence
  Description of Artificial Sequence: Synthetic oligonucleotide
uuaguuucuccucaguuaa

SEQ ID NO: 2848773 - RNA, 19 nt, Artificial Sequence
  Description of Artificial Sequence: Synthetic oligonucleotide
aagaacacuaguaauggca

SEQ ID NO: 2848774 - RNA, 19 nt, Artificial Sequence
  Description of Artificial Sequence: Synthetic oligonucleotide
uguucuaccauuacacuuc

SEQ ID NO: 2848775 - RNA, 19 nt, Artificial Sequence
  Description of Artificial Sequence: Synthetic oligonucleotide
auaacaaguauuuauucua

SEQ ID NO: 2848776 - RNA, 19 nt, Artificial Sequence
  Description of Artificial Sequence: Synthetic oligonucleotide
gaauccacaugauagcaug

SEQ ID NO: 2848777 - RNA, 19 nt, Artificial Sequence
  Description of Artificial Sequence: Synthetic oligonucleotide
uaagaauccacaugauagc

SEQ ID NO: 2848778 - RNA, 19 nt, Artificial Sequence
  Description of Artificial Sequence: Synthetic oligonucleotide
cuaacauuccaccauugag

SEQ ID NO: 2848779 - RNA, 19 nt, Artificial Sequence
  Description of Artificial Sequence: Synthetic oligonucleotide
gaagaaaggacaguugagc

SEQ ID NO: 2848780 - RNA, 19 nt, Artificial Sequence
  Description of Artificial Sequence: Synthetic oligonucleotide
ucagcagaggggaaaauga

SEQ ID NO: 2848781 - RNA, 19 nt, Artificial Sequence
  Description of Artificial Sequence: Synthetic oligonucleotide
agagagugcagauuaaaga

SEQ ID NO: 2848782 - RNA, 19 nt, Artificial Sequence
  Description of Artificial Sequence: Synthetic oligonucleotide
uuaucuucagcagagggga

SEQ ID NO: 2848783 - RNA, 19 nt, Artificial Sequence
  Description of Artificial Sequence: Synthetic oligonucleotide
caauuugugggccacacac

SEQ ID NO: 2848784 - RNA, 19 nt, Artificial Sequence
  Description of Artificial Sequence: Synthetic oligonucleotide
cuaguaauggcacuaccag

SEQ ID NO: 2848785 - RNA, 19 nt, Artificial Sequence
  Description of Artificial Sequence: Synthetic oligonucleotide
uuucaagauaacaaguauu

SEQ ID NO: 2848786 - RNA, 19 nt, Artificial Sequence
  Description of Artificial Sequence: Synthetic oligonucleotide
ucacacacugucaaucucc

SEQ ID NO: 2848787 - RNA, 19 nt, Artificial Sequence
  Description of Artificial Sequence: Synthetic oligonucleotide
ugauaagaagaacacuagu

SEQ ID NO: 2848788 - RNA, 19 nt, Artificial Sequence
  Description of Artificial Sequence: Synthetic oligonucleotide
cuaaccuucacacacuguc

SEQ ID NO: 2848789 - RNA, 19 nt, Artificial Sequence
  Description of Artificial Sequence: Synthetic oligonucleotide
uuuugcaccgaaacagaag

SEQ ID NO: 2848790 - RNA, 19 nt, Artificial Sequence
  Description of Artificial Sequence: Synthetic oligonucleotide
caaaugaauguuuauuauc

SEQ ID NO: 2848791 - RNA, 19 nt, Artificial Sequence
  Description of Artificial Sequence: Synthetic oligonucleotide
uucuaugucuagcaaaguc

SEQ ID NO: 2848792 - RNA, 19 nt, Artificial Sequence
  Description of Artificial Sequence: Synthetic oligonucleotide
gaguucaaguauuaaaaga

SEQ ID NO: 2848793 - RNA, 19 nt, Artificial Sequence
  Description of Artificial Sequence: Synthetic oligonucleotide
uaccauuacacuuccaggu

SEQ ID NO: 2848794 - RNA, 19 nt, Artificial Sequence
  Description of Artificial Sequence: Synthetic oligonucleotide
uaacaaguauuuauucuac

SEQ ID NO: 2848795 - RNA, 19 nt, Artificial Sequence
  Description of Artificial Sequence: Synthetic oligonucleotide
cuaugucuagcaaagucag

SEQ ID NO: 2848796 - RNA, 19 nt, Artificial Sequence
  Description of Artificial Sequence: Synthetic oligonucleotide
ucagaguucaaguauuaaa

SEQ ID NO: 2848797 - RNA, 19 nt, Artificial Sequence
  Description of Artificial Sequence: Synthetic oligonucleotide
uuaaaguguucaauuugug

SEQ ID NO: 2848798 - RNA, 19 nt, Artificial Sequence
  Description of Artificial Sequence: Synthetic oligonucleotide
agaaaggacaguugagcuc

SEQ ID NO: 2848799 - RNA, 19 nt, Artificial Sequence
  Description of Artificial Sequence: Synthetic oligonucleotide
acugucaaucuccauugcg

SEQ ID NO: 2848800 - RNA, 19 nt, Artificial Sequence
  Description of Artificial Sequence: Synthetic oligonucleotide
gaauguuuauuaucuucag

SEQ ID NO: 2848801 - RNA, 19 nt, Artificial Sequence
  Description of Artificial Sequence: Synthetic oligonucleotide
uaguaauggcacuaccagg

SEQ ID NO: 2848802 - RNA, 19 nt, Artificial Sequence
  Description of Artificial Sequence: Synthetic oligonucleotide
gaaacagaagcaguacagg

SEQ ID NO: 2848803 - RNA, 19 nt, Artificial Sequence
  Description of Artificial Sequence: Synthetic oligonucleotide
gaagaaagaagagagugca

SEQ ID NO: 2848804 - RNA, 19 nt, Artificial Sequence
  Description of Artificial Sequence: Synthetic oligonucleotide
aacaaguauuuauucuaca

SEQ ID NO: 2848805 - RNA, 19 nt, Artificial Sequence
  Description of Artificial Sequence: Synthetic oligonucleotide
augucuagcaaagucagag

SEQ ID NO: 2848806 - RNA, 19 nt, Artificial Sequence
  Description of Artificial Sequence: Synthetic oligonucleotide
auagcauggguacaggaca

SEQ ID NO: 2848807 - RNA, 19 nt, Artificial Sequence
  Description of Artificial Sequence: Synthetic oligonucleotide
uaagaagaacacuaguaau

SEQ ID NO: 2848808 - RNA, 19 nt, Artificial Sequence
  Description of Artificial Sequence: Synthetic oligonucleotide
auuaucuucagcagagggg

SEQ ID NO: 2848809 - RNA, 19 nt, Artificial Sequence
  Description of Artificial Sequence: Synthetic oligonucleotide
ucaaaugaauguuuauuau

SEQ ID NO: 2848810 - RNA, 19 nt, Artificial Sequence
  Description of Artificial Sequence: Synthetic oligonucleotide
aaaugauaagaagaacacu

SEQ ID NO: 2848811 - RNA, 19 nt, Artificial Sequence
  Description of Artificial Sequence: Synthetic oligonucleotide
gagagugcagauuaaagaa

SEQ ID NO: 2848812 - RNA, 19 nt, Artificial Sequence
  Description of Artificial Sequence: Synthetic oligonucleotide
aauggcacuaccaggaaga

SEQ ID NO: 2848813 - RNA, 19 nt, Artificial Sequence
  Description of Artificial Sequence: Synthetic oligonucleotide
cugucaaucuccauugcgc

SEQ ID NO: 2848814 - RNA, 19 nt, Artificial Sequence
  Description of Artificial Sequence: Synthetic oligonucleotide
uugagcuccacuuuguguc

SEQ ID NO: 2848815 - RNA, 19 nt, Artificial Sequence
  Description of Artificial Sequence: Synthetic oligonucleotide
uuugugucaucaguguccg

SEQ ID NO: 2848816 - RNA, 19 nt, Artificial Sequence
  Description of Artificial Sequence: Synthetic oligonucleotide
caaguauuaaaagaaaaga

SEQ ID NO: 2848817 - RNA, 19 nt, Artificial Sequence
  Description of Artificial Sequence: Synthetic oligonucleotide
aguauuuauucuacacacc

SEQ ID NO: 2848818 - RNA, 19 nt, Artificial Sequence
  Description of Artificial Sequence: Synthetic oligonucleotide
aguucaaguauuaaaagaa

SEQ ID NO: 2848819 - RNA, 19 nt, Artificial Sequence
  Description of Artificial Sequence: Synthetic oligonucleotide
aggacaucgagguuaaagu

SEQ ID NO: 2848820 - RNA, 19 nt, Artificial Sequence
  Description of Artificial Sequence: Synthetic oligonucleotide
agaacacuaguaauggcac

SEQ ID NO: 2848821 - RNA, 19 nt, Artificial Sequence
  Description of Artificial Sequence: Synthetic oligonucleotide
gauaacaaguauuuauucu

SEQ ID NO: 2848822 - RNA, 19 nt, Artificial Sequence
  Description of Artificial Sequence: Synthetic oligonucleotide
ggcacuaccaggaagaaag

SEQ ID NO: 2848823 - RNA, 19 nt, Artificial Sequence
  Description of Artificial Sequence: Synthetic oligonucleotide
cuaccauuacacuuccagg

SEQ ID NO: 2848824 - RNA, 19 nt, Artificial Sequence
  Description of Artificial Sequence: Synthetic oligonucleotide
caguuaagaauccacauga

SEQ ID NO: 2848825 - RNA, 19 nt, Artificial Sequence
  Description of Artificial Sequence: Synthetic oligonucleotide
uuucagaagggacaaguua

SEQ ID NO: 2848826 - RNA, 19 nt, Artificial Sequence
  Description of Artificial Sequence: Synthetic oligonucleotide
uccacuuugugucaucagu

SEQ ID NO: 2848827 - RNA, 19 nt, Artificial Sequence
  Description of Artificial Sequence: Synthetic oligonucleotide
aguguucaauuugugggcc

SEQ ID NO: 2848828 - RNA, 19 nt, Artificial Sequence
  Description of Artificial Sequence: Synthetic oligonucleotide
cuccauugcgcuaacauuc

SEQ ID NO: 2848829 - RNA, 19 nt, Artificial Sequence
  Description of Artificial Sequence: Synthetic oligonucleotide
aagagagugcagauuaaag

SEQ ID NO: 2848830 - RNA, 19 nt, Artificial Sequence
  Description of Artificial Sequence: Synthetic oligonucleotide
cacacuucagcguauuggc

SEQ ID NO: 2848831 - RNA, 19 nt, Artificial Sequence
  Description of Artificial Sequence: Synthetic oligonucleotide
ugugucaucaguguccgca

SEQ ID NO: 2848832 - RNA, 19 nt, Artificial Sequence
  Description of Artificial Sequence: Synthetic oligonucleotide
aggggaaaaugauaagaag

SEQ ID NO: 2848833 - RNA, 19 nt, Artificial Sequence
  Description of Artificial Sequence: Synthetic oligonucleotide
acacugucaaucuccauug

SEQ ID NO: 2848834 - RNA, 19 nt, Artificial Sequence
  Description of Artificial Sequence: Synthetic oligonucleotide
uugccucuaaccuucacac

SEQ ID NO: 2848835 - RNA, 19 nt, Artificial Sequence
  Description of Artificial Sequence: Synthetic oligonucleotide
gauaagaagaacacuagua

SEQ ID NO: 2848836 - RNA, 19 nt, Artificial Sequence
  Description of Artificial Sequence: Synthetic oligonucleotide
acuuugugucaucaguguc

SEQ ID NO: 2848837 - RNA, 19 nt, Artificial Sequence
  Description of Artificial Sequence: Synthetic oligonucleotide
aagcaguacagguuuuaug

SEQ ID NO: 2848838 - RNA, 19 nt, Artificial Sequence
  Description of Artificial Sequence: Synthetic oligonucleotide
gagugcagauuaaagaagc

SEQ ID NO: 2848839 - RNA, 19 nt, Artificial Sequence
  Description of Artificial Sequence: Synthetic oligonucleotide
uuuuauguucuaccauuac

SEQ ID NO: 2848840 - RNA, 19 nt, Artificial Sequence
  Description of Artificial Sequence: Synthetic oligonucleotide
uuuauucuacacaccuaug

SEQ ID NO: 2848841 - RNA, 19 nt, Artificial Sequence
  Description of Artificial Sequence: Synthetic oligonucleotide
aagauaacaaguauuuauu

SEQ ID NO: 2848842 - RNA, 19 nt, Artificial Sequence
  Description of Artificial Sequence: Synthetic oligonucleotide
acaaguuaguuucuccuca

SEQ ID NO: 2848843 - RNA, 19 nt, Artificial Sequence
  Description of Artificial Sequence: Synthetic oligonucleotide
ccaggaagaaagaagagag

SEQ ID NO: 2848844 - RNA, 19 nt, Artificial Sequence
  Description of Artificial Sequence: Synthetic oligonucleotide
augcauuugccucuaaccu

SEQ ID NO: 2848845 - RNA, 19 nt, Artificial Sequence
  Description of Artificial Sequence: Synthetic oligonucleotide
cuaccaggaagaaagaaga

SEQ ID NO: 2848846 - RNA, 19 nt, Artificial Sequence
  Description of Artificial Sequence: Synthetic oligonucleotide
guuuauuaucuucagcaga

SEQ ID NO: 2848847 - RNA, 19 nt, Artificial Sequence
  Description of Artificial Sequence: Synthetic oligonucleotide
aagaauccacaugauagca

SEQ ID NO: 2848848 - RNA, 19 nt, Artificial Sequence
  Description of Artificial Sequence: Synthetic oligonucleotide
agaaagaagagagugcaga

SEQ ID NO: 2848849 - RNA, 19 nt, Artificial Sequence
  Description of Artificial Sequence: Synthetic oligonucleotide
acuaccaggaagaaagaag

SEQ ID NO: 2848850 - RNA, 19 nt, Artificial Sequence
  Description of Artificial Sequence: Synthetic oligonucleotide
aguaauggcacuaccagga

SEQ ID NO: 2848851 - RNA, 19 nt, Artificial Sequence
  Description of Artificial Sequence: Synthetic oligonucleotide
aaugaauguuuauuaucuu

SEQ ID NO: 2848852 - RNA, 19 nt, Artificial Sequence
  Description of Artificial Sequence: Synthetic oligonucleotide
uugugggccacacacuuca

SEQ ID NO: 2848853 - RNA, 19 nt, Artificial Sequence
  Description of Artificial Sequence: Synthetic oligonucleotide
agaacagaagaaaggacag

SEQ ID NO: 2848854 - RNA, 19 nt, Artificial Sequence
  Description of Artificial Sequence: Synthetic oligonucleotide
ucuagcaaagucagaguuc

SEQ ID NO: 2848855 - RNA, 19 nt, Artificial Sequence
  Description of Artificial Sequence: Synthetic oligonucleotide
guauuuauucuacacaccu

SEQ ID NO: 2848856 - RNA, 19 nt, Artificial Sequence
  Description of Artificial Sequence: Synthetic oligonucleotide
acuucagcguauuggcaac

SEQ ID NO: 2848857 - RNA, 19 nt, Artificial Sequence
  Description of Artificial Sequence: Synthetic oligonucleotide
uauguucuaccauuacacu

SEQ ID NO: 2848858 - RNA, 19 nt, Artificial Sequence
  Description of Artificial Sequence: Synthetic oligonucleotide
acacacuucagcguauugg

SEQ ID NO: 2848859 - RNA, 19 nt, Artificial Sequence
  Description of Artificial Sequence: Synthetic oligonucleotide
gguuaaaguguucaauuug

SEQ ID NO: 2848860 - RNA, 19 nt, Artificial Sequence
  Description of Artificial Sequence: Synthetic oligonucleotide
ugcaccgaaacagaagcag

SEQ ID NO: 2848861 - RNA, 19 nt, Artificial Sequence
  Description of Artificial Sequence: Synthetic oligonucleotide
uccucaguuaagaauccac

SEQ ID NO: 2848862 - RNA, 19 nt, Artificial Sequence
  Description of Artificial Sequence: Synthetic oligonucleotide
auccaggugucucaaauga

SEQ ID NO: 2848863 - RNA, 19 nt, Artificial Sequence
  Description of Artificial Sequence: Synthetic oligonucleotide
cagaguucaaguauuaaaa

SEQ ID NO: 2848864 - RNA, 19 nt, Artificial Sequence
  Description of Artificial Sequence: Synthetic oligonucleotide
acagaagcaguacagguuu

SEQ ID NO: 2848865 - RNA, 19 nt, Artificial Sequence
  Description of Artificial Sequence: Synthetic oligonucleotide
caaguauuuauucuacaca

SEQ ID NO: 2848866 - RNA, 19 nt, Artificial Sequence
  Description of Artificial Sequence: Synthetic oligonucleotide
acaguugagcuccacuuug

SEQ ID NO: 2848867 - RNA, 19 nt, Artificial Sequence
  Description of Artificial Sequence: Synthetic oligonucleotide
gaagcauuucagaagggac

SEQ ID NO: 2848868 - RNA, 19 nt, Artificial Sequence
  Description of Artificial Sequence: Synthetic oligonucleotide
uuucuccucaguuaagaau

SEQ ID NO: 2848869 - RNA, 19 nt, Artificial Sequence
  Description of Artificial Sequence: Synthetic oligonucleotide
agcaaagucagaguucaag

SEQ ID NO: 2848870 - RNA, 19 nt, Artificial Sequence
  Description of Artificial Sequence: Synthetic oligonucleotide
ugucaaucuccauugcgcu

SEQ ID NO: 2848871 - RNA, 19 nt, Artificial Sequence
  Description of Artificial Sequence: Synthetic oligonucleotide
accauugagccuucuaugu

SEQ ID NO: 2848872 - RNA, 19 nt, Artificial Sequence
  Description of Artificial Sequence: Synthetic oligonucleotide
agaggggaaaaugauaaga

SEQ ID NO: 2848873 - RNA, 19 nt, Artificial Sequence
  Description of Artificial Sequence: Synthetic oligonucleotide
auucuacacaccuaugcau

SEQ ID NO: 2848874 - RNA, 19 nt, Artificial Sequence
  Description of Artificial Sequence: Synthetic oligonucleotide
aauccacaugauagcaugg

SEQ ID NO: 2848875 - RNA, 19 nt, Artificial Sequence
  Description of Artificial Sequence: Synthetic oligonucleotide
aagcauuucagaagggaca

SEQ ID NO: 2848876 - RNA, 19 nt, Artificial Sequence
  Description of Artificial Sequence: Synthetic oligonucleotide
ucucaaaugaauguuuauu

SEQ ID NO: 2848877 - RNA, 19 nt, Artificial Sequence
  Description of Artificial Sequence: Synthetic oligonucleotide
uuauuaucuucagcagagg

SEQ ID NO: 2848878 - RNA, 19 nt, Artificial Sequence
  Description of Artificial Sequence: Synthetic oligonucleotide
uaaccuucacacacuguca

SEQ ID NO: 2848879 - RNA, 19 nt, Artificial Sequence
  Description of Artificial Sequence: Synthetic oligonucleotide
ugucucaaaugaauguuua

SEQ ID NO: 2848880 - RNA, 19 nt, Artificial Sequence
  Description of Artificial Sequence: Synthetic oligonucleotide
gauagcauggguacaggac

SEQ ID NO: 2848881 - RNA, 19 nt, Artificial Sequence
  Description of Artificial Sequence: Synthetic oligonucleotide
uauuuauucuacacaccua

SEQ ID NO: 2848882 - RNA, 19 nt, Artificial Sequence
  Description of Artificial Sequence: Synthetic oligonucleotide
aaccuucacacacugucaa

SEQ ID NO: 2848883 - RNA, 19 nt, Artificial Sequence
  Description of Artificial Sequence: Synthetic oligonucleotide
uaccaggaagaaagaagag

SEQ ID NO: 2848884 - RNA, 19 nt, Artificial Sequence
  Description of Artificial Sequence: Synthetic oligonucleotide
augauaagaagaacacuag

SEQ ID NO: 2848885 - RNA, 19 nt, Artificial Sequence
  Description of Artificial Sequence: Synthetic oligonucleotide
uucuacacaccuaugcauu

SEQ ID NO: 2848886 - RNA, 19 nt, Artificial Sequence
  Description of Artificial Sequence: Synthetic oligonucleotide
gacaaguuaguuucuccuc

SEQ ID NO: 2848887 - RNA, 19 nt, Artificial Sequence
  Description of Artificial Sequence: Synthetic oligonucleotide
uucagcagaggggaaaaug

SEQ ID NO: 2848888 - RNA, 19 nt, Artificial Sequence
  Description of Artificial Sequence: Synthetic oligonucleotide
aguuaguuucuccucaguu

SEQ ID NO: 2848889 - RNA, 19 nt, Artificial Sequence
  Description of Artificial Sequence: Synthetic oligonucleotide
ugauagcauggguacagga

SEQ ID NO: 2848890 - RNA, 19 nt, Artificial Sequence
  Description of Artificial Sequence: Synthetic oligonucleotide
cagaagaaaggacaguuga

SEQ ID NO: 2848891 - RNA, 19 nt, Artificial Sequence
  Description of Artificial Sequence: Synthetic oligonucleotide
uccauugcgcuaacauucc

SEQ ID NO: 2848892 - RNA, 19 nt, Artificial Sequence
  Description of Artificial Sequence: Synthetic oligonucleotide
aacacuaguaauggcacua

SEQ ID NO: 2848893 - RNA, 19 nt, Artificial Sequence
  Description of Artificial Sequence: Synthetic oligonucleotide
caguacagguuuuauguuc

SEQ ID NO: 2848894 - RNA, 19 nt, Artificial Sequence
  Description of Artificial Sequence: Synthetic oligonucleotide
ucagaagggacaaguuagu

SEQ ID NO: 2848895 - RNA, 19 nt, Artificial Sequence
  Description of Artificial Sequence: Synthetic oligonucleotide
caagauaacaaguauuuau

SEQ ID NO: 2848896 - RNA, 19 nt, Artificial Sequence
  Description of Artificial Sequence: Synthetic oligonucleotide
ucaaucuccauugcgcuaa

SEQ ID NO: 2848897 - RNA, 19 nt, Artificial Sequence
  Description of Artificial Sequence: Synthetic oligonucleotide
auguucuaccauuacacuu

SEQ ID NO: 2848898 - RNA, 19 nt, Artificial Sequence
  Description of Artificial Sequence: Synthetic oligonucleotide
acuaguaauggcacuacca

SEQ ID NO: 2848899 - RNA, 19 nt, Artificial Sequence
  Description of Artificial Sequence: Synthetic oligonucleotide
aggugucucaaaugaaugu

SEQ ID NO: 2848900 - RNA, 19 nt, Artificial Sequence
  Description of Artificial Sequence: Synthetic oligonucleotide
gaaguauccaggugucuca

SEQ ID NO: 2848901 - RNA, 19 nt, Artificial Sequence
  Description of Artificial Sequence: Synthetic oligonucleotide
ugcgcuaacauuccaccau

SEQ ID NO: 2848902 - RNA, 19 nt, Artificial Sequence
  Description of Artificial Sequence: Synthetic oligonucleotide
ucuccucaguuaagaaucc

SEQ ID NO: 2848903 - RNA, 19 nt, Artificial Sequence
  Description of Artificial Sequence: Synthetic oligonucleotide
uccacaugauagcaugggu

SEQ ID NO: 2848904 - RNA, 19 nt, Artificial Sequence
  Description of Artificial Sequence: Synthetic oligonucleotide
aaguuaguuucuccucagu

SEQ ID NO: 2848905 - RNA, 19 nt, Artificial Sequence
  Description of Artificial Sequence: Synthetic oligonucleotide
aucuccauugcgcuaacau

SEQ ID NO: 2848906 - RNA, 19 nt, Artificial Sequence
  Description of Artificial Sequence: Synthetic oligonucleotide
agagugcagauuaaagaag

SEQ ID NO: 2848907 - RNA, 19 nt, Artificial Sequence
  Description of Artificial Sequence: Synthetic oligonucleotide
cauugcgcuaacauuccac

SEQ ID NO: 2848908 - RNA, 19 nt, Artificial Sequence
  Description of Artificial Sequence: Synthetic oligonucleotide
caggugucucaaaugaaug

SEQ ID NO: 2848909 - RNA, 19 nt, Artificial Sequence
  Description of Artificial Sequence: Synthetic oligonucleotide
aagaaagaagagagugcag

SEQ ID NO: 2848910 - RNA, 19 nt, Artificial Sequence
  Description of Artificial Sequence: Synthetic oligonucleotide
accgaaacagaagcaguac

SEQ ID NO: 2848911 - RNA, 19 nt, Artificial Sequence
  Description of Artificial Sequence: Synthetic oligonucleotide
agaagcauuucagaaggga

SEQ ID NO: 2848912 - RNA, 19 nt, Artificial Sequence
  Description of Artificial Sequence: Synthetic oligonucleotide
caggacaucgagguuaaag

SEQ ID NO: 2848913 - RNA, 19 nt, Artificial Sequence
  Description of Artificial Sequence: Synthetic oligonucleotide
ccuucuaugucuagcaaag

SEQ ID NO: 2848914 - RNA, 19 nt, Artificial Sequence
  Description of Artificial Sequence: Synthetic oligonucleotide
auuugugggccacacacuu

SEQ ID NO: 2848915 - RNA, 19 nt, Artificial Sequence
  Description of Artificial Sequence: Synthetic oligonucleotide
caaguuaguuucuccucag

SEQ ID NO: 2848916 - RNA, 19 nt, Artificial Sequence
  Description of Artificial Sequence: Synthetic oligonucleotide
agaagaaaggacaguugag

SEQ ID NO: 2848917 - RNA, 19 nt, Artificial Sequence
  Description of Artificial Sequence: Synthetic oligonucleotide
aucgagguuaaaguguuca

SEQ ID NO: 2848918 - RNA, 19 nt, Artificial Sequence
  Description of Artificial Sequence: Synthetic oligonucleotide
cuagcaaagucagaguuca

SEQ ID NO: 2848919 - RNA, 19 nt, Artificial Sequence
  Description of Artificial Sequence: Synthetic oligonucleotide
guuaagaauccacaugaua

SEQ ID NO: 2848920 - RNA, 19 nt, Artificial Sequence
  Description of Artificial Sequence: Synthetic oligonucleotide
ugagccuucuaugucuagc

SEQ ID NO: 2848921 - RNA, 19 nt, Artificial Sequence
  Description of Artificial Sequence: Synthetic oligonucleotide
uguccgcagaaguauccag

SEQ ID NO: 2848922 - RNA, 19 nt, Artificial Sequence
  Description of Artificial Sequence: Synthetic oligonucleotide
guuaguuucuccucaguua

SEQ ID NO: 2848923 - RNA, 19 nt, Artificial Sequence
  Description of Artificial Sequence: Synthetic oligonucleotide
agguuaaaguguucaauuu

SEQ ID NO: 2848924 - RNA, 19 nt, Artificial Sequence
  Description of Artificial Sequence: Synthetic oligonucleotide
ugucuagcaaagucagagu

SEQ ID NO: 2848925 - RNA, 19 nt, Artificial Sequence
  Description of Artificial Sequence: Synthetic oligonucleotide
uccgcagaaguauccaggu

SEQ ID NO: 2848926 - RNA, 19 nt, Artificial Sequence
  Description of Artificial Sequence: Synthetic oligonucleotide
aaagaagagagugcagauu

SEQ ID NO: 2848927 - RNA, 19 nt, Artificial Sequence
  Description of Artificial Sequence: Synthetic oligonucleotide
cuaugcauuugccucuaac

SEQ ID NO: 2848928 - RNA, 19 nt, Artificial Sequence
  Description of Artificial Sequence: Synthetic oligonucleotide
ucaauuugugggccacaca

SEQ ID NO: 2848929 - RNA, 19 nt, Artificial Sequence
  Description of Artificial Sequence: Synthetic oligonucleotide
aguuucuccucaguuaaga

SEQ ID NO: 2848930 - RNA, 19 nt, Artificial Sequence
  Description of Artificial Sequence: Synthetic oligonucleotide
aagaagcauuucagaaggg

SEQ ID NO: 2848931 - RNA, 19 nt, Artificial Sequence
  Description of Artificial Sequence: Synthetic oligonucleotide
uaugucuagcaaagucaga

SEQ ID NO: 2848932 - RNA, 19 nt, Artificial Sequence
  Description of Artificial Sequence: Synthetic oligonucleotide
uucaauuugugggccacac

SEQ ID NO: 2848933 - RNA, 19 nt, Artificial Sequence
  Description of Artificial Sequence: Synthetic oligonucleotide
ucagcguauuggcaacuac

SEQ ID NO: 2848934 - RNA, 19 nt, Artificial Sequence
  Description of Artificial Sequence: Synthetic oligonucleotide
aacagaagcaguacagguu

SEQ ID NO: 2848935 - RNA, 19 nt, Artificial Sequence
  Description of Artificial Sequence: Synthetic oligonucleotide
cagguuuuauguucuacca

SEQ ID NO: 2848936 - RNA, 19 nt, Artificial Sequence
  Description of Artificial Sequence: Synthetic oligonucleotide
guuaaaguguucaauuugu

SEQ ID NO: 2848937 - RNA, 19 nt, Artificial Sequence
  Description of Artificial Sequence: Synthetic oligonucleotide
caccauugagccuucuaug

SEQ ID NO: 2848938 - RNA, 19 nt, Artificial Sequence
  Description of Artificial Sequence: Synthetic oligonucleotide
gaggggaaaaugauaagaa

SEQ ID NO: 2848939 - RNA, 19 nt, Artificial Sequence
  Description of Artificial Sequence: Synthetic oligonucleotide
ugcauuugccucuaaccuu

SEQ ID NO: 2848940 - RNA, 19 nt, Artificial Sequence
  Description of Artificial Sequence: Synthetic oligonucleotide
guucuaccauuacacuucc

SEQ ID NO: 2848941 - RNA, 19 nt, Artificial Sequence
  Description of Artificial Sequence: Synthetic oligonucleotide
ggacaucgagguuaaagug

SEQ ID NO: 2848942 - RNA, 19 nt, Artificial Sequence
  Description of Artificial Sequence: Synthetic oligonucleotide
auuugccucuaaccuucac

SEQ ID NO: 2848943 - RNA, 19 nt, Artificial Sequence
  Description of Artificial Sequence: Synthetic oligonucleotide
ucaucaguguccgcagaag

SEQ ID NO: 2848944 - RNA, 19 nt, Artificial Sequence
  Description of Artificial Sequence: Synthetic oligonucleotide
ucaguguccgcagaaguau

SEQ ID NO: 2848945 - RNA, 19 nt, Artificial Sequence
  Description of Artificial Sequence: Synthetic oligonucleotide
aauuugugggccacacacu

SEQ ID NO: 2848946 - RNA, 19 nt, Artificial Sequence
  Description of Artificial Sequence: Synthetic oligonucleotide
gagguuaaaguguucaauu

SEQ ID NO: 2848947 - RNA, 19 nt, Artificial Sequence
  Description of Artificial Sequence: Synthetic oligonucleotide
uaguuucuccucaguuaag

SEQ ID NO: 2848948 - RNA, 19 nt, Artificial Sequence
  Description of Artificial Sequence: Synthetic oligonucleotide
ucaagauaacaaguauuua

SEQ ID NO: 2848949 - RNA, 19 nt, Artificial Sequence
  Description of Artificial Sequence: Synthetic oligonucleotide
ggaagaaagaagagagugc

SEQ ID NO: 2848950 - RNA, 19 nt, Artificial Sequence
  Description of Artificial Sequence: Synthetic oligonucleotide
agguuuuauguucuaccau

SEQ ID NO: 2848951 - RNA, 19 nt, Artificial Sequence
  Description of Artificial Sequence: Synthetic oligonucleotide
ucuaaccuucacacacugu

SEQ ID NO: 2848952 - RNA, 19 nt, Artificial Sequence
  Description of Artificial Sequence: Synthetic oligonucleotide
uacagguuuuauguucuac

SEQ ID NO: 2848953 - RNA, 19 nt, Artificial Sequence
  Description of Artificial Sequence: Synthetic oligonucleotide
gccucuaaccuucacacac

SEQ ID NO: 2848954 - RNA, 19 nt, Artificial Sequence
  Description of Artificial Sequence: Synthetic oligonucleotide
uguucaauuugugggccac

SEQ ID NO: 2848955 - RNA, 19 nt, Artificial Sequence
  Description of Artificial Sequence: Synthetic oligonucleotide
cucuaaccuucacacacug

SEQ ID NO: 2848956 - RNA, 19 nt, Artificial Sequence
  Description of Artificial Sequence: Synthetic oligonucleotide
cacuaguaauggcacuacc

SEQ ID NO: 2848957 - RNA, 19 nt, Artificial Sequence
  Description of Artificial Sequence: Synthetic oligonucleotide
acagaagaaaggacaguug

SEQ ID NO: 2848958 - RNA, 19 nt, Artificial Sequence
  Description of Artificial Sequence: Synthetic oligonucleotide
uugcgcuaacauuccacca

SEQ ID NO: 2848959 - RNA, 19 nt, Artificial Sequence
  Description of Artificial Sequence: Synthetic oligonucleotide
uugcaccgaaacagaagca

SEQ ID NO: 2848960 - RNA, 19 nt, Artificial Sequence
  Description of Artificial Sequence: Synthetic oligonucleotide
ucuacacaccuaugcauuu

SEQ ID NO: 2848961 - RNA, 19 nt, Artificial Sequence
  Description of Artificial Sequence: Synthetic oligonucleotide
aggacaguugagcuccacu

SEQ ID NO: 2848962 - RNA, 19 nt, Artificial Sequence
  Description of Artificial Sequence: Synthetic oligonucleotide
ugagcuccacuuuguguca

SEQ ID NO: 2848963 - RNA, 19 nt, Artificial Sequence
  Description of Artificial Sequence: Synthetic oligonucleotide
gaaagaagagagugcagau

SEQ ID NO: 2848964 - RNA, 19 nt, Artificial Sequence
  Description of Artificial Sequence: Synthetic oligonucleotide
guccgcagaaguauccagg

SEQ ID NO: 2848965 - RNA, 19 nt, Artificial Sequence
  Description of Artificial Sequence: Synthetic oligonucleotide
caaagucagaguucaagua

SEQ ID NO: 2848966 - RNA, 19 nt, Artificial Sequence
  Description of Artificial Sequence: Synthetic oligonucleotide
agcauuucagaagggacaa

SEQ ID NO: 2848967 - RNA, 19 nt, Artificial Sequence
  Description of Artificial Sequence: Synthetic oligonucleotide
cagauuaaagaagcauuuc

SEQ ID NO: 2848968 - RNA, 19 nt, Artificial Sequence
  Description of Artificial Sequence: Synthetic oligonucleotide
ucgagguuaaaguguucaa

SEQ ID NO: 2848969 - RNA, 19 nt, Artificial Sequence
  Description of Artificial Sequence: Synthetic oligonucleotide
acacaccuaugcauuugcc

SEQ ID NO: 2848970 - RNA, 19 nt, Artificial Sequence
  Description of Artificial Sequence: Synthetic oligonucleotide
gggaaaaugauaagaagaa

SEQ ID NO: 2848971 - RNA, 19 nt, Artificial Sequence
  Description of Artificial Sequence: Synthetic oligonucleotide
cgaaacagaagcaguacag

SEQ ID NO: 2848972 - RNA, 19 nt, Artificial Sequence
  Description of Artificial Sequence: Synthetic oligonucleotide
guucaaguauuaaaagaaa

SEQ ID NO: 2848973 - RNA, 19 nt, Artificial Sequence
  Description of Artificial Sequence: Synthetic oligonucleotide
ugucaucaguguccgcaga

SEQ ID NO: 2848974 - RNA, 19 nt, Artificial Sequence
  Description of Artificial Sequence: Synthetic oligonucleotide
uccaggugucucaaaugaa

SEQ ID NO: 2848975 - RNA, 19 nt, Artificial Sequence
  Description of Artificial Sequence: Synthetic oligonucleotide
cagaggggaaaaugauaag

SEQ ID NO: 2848976 - RNA, 19 nt, Artificial Sequence
  Description of Artificial Sequence: Synthetic oligonucleotide
augauagcauggguacagg

SEQ ID NO: 2848977 - RNA, 19 nt, Artificial Sequence
  Description of Artificial Sequence: Synthetic oligonucleotide
gaagagagugcagauuaaa

SEQ ID NO: 2848978 - RNA, 19 nt, Artificial Sequence
  Description of Artificial Sequence: Synthetic oligonucleotide
uagcauggguacaggacau

SEQ ID NO: 2848979 - RNA, 19 nt, Artificial Sequence
  Description of Artificial Sequence: Synthetic oligonucleotide
ucuucagcagaggggaaaa

SEQ ID NO: 2848980 - RNA, 19 nt, Artificial Sequence
  Description of Artificial Sequence: Synthetic oligonucleotide
gacaucgagguuaaagugu

SEQ ID NO: 2848981 - RNA, 19 nt, Artificial Sequence
  Description of Artificial Sequence: Synthetic oligonucleotide
cagcguauuggcaacuaca

SEQ ID NO: 2848982 - RNA, 19 nt, Artificial Sequence
  Description of Artificial Sequence: Synthetic oligonucleotide
accauuacacuuccagguu

SEQ ID NO: 2848983 - RNA, 19 nt, Artificial Sequence
  Description of Artificial Sequence: Synthetic oligonucleotide
aaggacaguugagcuccac

SEQ ID NO: 2848984 - RNA, 19 nt, Artificial Sequence
  Description of Artificial Sequence: Synthetic oligonucleotide
uuugugggccacacacuuc

SEQ ID NO: 2848985 - RNA, 19 nt, Artificial Sequence
  Description of Artificial Sequence: Synthetic oligonucleotide
cacuucagcguauuggcaa

SEQ ID NO: 2848986 - RNA, 19 nt, Artificial Sequence
  Description of Artificial Sequence: Synthetic oligonucleotide
cauugagccuucuaugucu

SEQ ID NO: 2848987 - RNA, 19 nt, Artificial Sequence
  Description of Artificial Sequence: Synthetic oligonucleotide
gggacaaguuaguuucucc

SEQ ID NO: 2848988 - RNA, 19 nt, Artificial Sequence
  Description of Artificial Sequence: Synthetic oligonucleotide
guacaggacaucgagguua

SEQ ID NO: 2848989 - RNA, 19 nt, Artificial Sequence
  Description of Artificial Sequence: Synthetic oligonucleotide
agcguauuggcaacuacau

SEQ ID NO: 2848990 - RNA, 19 nt, Artificial Sequence
  Description of Artificial Sequence: Synthetic oligonucleotide
ccacuuugugucaucagug

SEQ ID NO: 2848991 - RNA, 19 nt, Artificial Sequence
  Description of Artificial Sequence: Synthetic oligonucleotide
uugagccuucuaugucuag

SEQ ID NO: 2848992 - RNA, 19 nt, Artificial Sequence
  Description of Artificial Sequence: Synthetic oligonucleotide
agugcagauuaaagaagca

SEQ ID NO: 2848993 - RNA, 19 nt, Artificial Sequence
  Description of Artificial Sequence: Synthetic oligonucleotide
guuucuccucaguuaagaa

SEQ ID NO: 2848994 - RNA, 19 nt, Artificial Sequence
  Description of Artificial Sequence: Synthetic oligonucleotide
aaguauccaggugucucaa

SEQ ID NO: 2848995 - RNA, 19 nt, Artificial Sequence
  Description of Artificial Sequence: Synthetic oligonucleotide
uccaccauugagccuucua

SEQ ID NO: 2848996 - RNA, 19 nt, Artificial Sequence
  Description of Artificial Sequence: Synthetic oligonucleotide
gcagaggggaaaaugauaa

SEQ ID NO: 2848997 - RNA, 19 nt, Artificial Sequence
  Description of Artificial Sequence: Synthetic oligonucleotide
ugccucuaaccuucacaca

SEQ ID NO: 2848998 - RNA, 19 nt, Artificial Sequence
  Description of Artificial Sequence: Synthetic oligonucleotide
gguuuuauguucuaccauu

SEQ ID NO: 2848999 - RNA, 19 nt, Artificial Sequence
  Description of Artificial Sequence: Synthetic oligonucleotide
guuuuauguucuaccauua

SEQ ID NO: 2849000 - RNA, 19 nt, Artificial Sequence
  Description of Artificial Sequence: Synthetic oligonucleotide
cuccacuuugugucaucag

SEQ ID NO: 2849001 - RNA, 19 nt, Artificial Sequence
  Description of Artificial Sequence: Synthetic oligonucleotide
ugugggccacacacuucag

SEQ ID NO: 2849002 - RNA, 19 nt, Artificial Sequence
  Description of Artificial Sequence: Synthetic oligonucleotide
agcuccacuuugugucauc

SEQ ID NO: 2849003 - RNA, 19 nt, Artificial Sequence
  Description of Artificial Sequence: Synthetic oligonucleotide
gugggccacacacuucagc

SEQ ID NO: 2849004 - RNA, 19 nt, Artificial Sequence
  Description of Artificial Sequence: Synthetic oligonucleotide
acaucgagguuaaaguguu

SEQ ID NO: 2849005 - RNA, 19 nt, Artificial Sequence
  Description of Artificial Sequence: Synthetic oligonucleotide
uaucuucagcagaggggaa

SEQ ID NO: 2849006 - RNA, 19 nt, Artificial Sequence
  Description of Artificial Sequence: Synthetic oligonucleotide
cucaguuaagaauccacau

SEQ ID NO: 2849007 - RNA, 19 nt, Artificial Sequence
  Description of Artificial Sequence: Synthetic oligonucleotide
cuacacaccuaugcauuug

SEQ ID NO: 2849008 - RNA, 19 nt, Artificial Sequence
  Description of Artificial Sequence: Synthetic oligonucleotide
agaauccacaugauagcau

SEQ ID NO: 2849009 - RNA, 19 nt, Artificial Sequence
  Description of Artificial Sequence: Synthetic oligonucleotide
guauccaggugucucaaau

SEQ ID NO: 2849010 - RNA, 19 nt, Artificial Sequence
  Description of Artificial Sequence: Synthetic oligonucleotide
cacugucaaucuccauugc

SEQ ID NO: 2849011 - RNA, 19 nt, Artificial Sequence
  Description of Artificial Sequence: Synthetic oligonucleotide
guugagcuccacuuugugu

SEQ ID NO: 2849012 - RNA, 19 nt, Artificial Sequence
  Description of Artificial Sequence: Synthetic oligonucleotide
cacacacugucaaucucca

SEQ ID NO: 2849013 - RNA, 19 nt, Artificial Sequence
  Description of Artificial Sequence: Synthetic oligonucleotide
gucaucaguguccgcagaa

SEQ ID NO: 2849014 - RNA, 19 nt, Artificial Sequence
  Description of Artificial Sequence: Synthetic oligonucleotide
gcuaacauuccaccauuga

SEQ ID NO: 2849015 - RNA, 19 nt, Artificial Sequence
  Description of Artificial Sequence: Synthetic oligonucleotide
ggguacaggacaucgaggu

SEQ ID NO: 2849016 - RNA, 19 nt, Artificial Sequence
  Description of Artificial Sequence: Synthetic oligonucleotide
ggacaaguuaguuucuccu

SEQ ID NO: 2849017 - RNA, 19 nt, Artificial Sequence
  Description of Artificial Sequence: Synthetic oligonucleotide
aaucuccauugcgcuaaca

SEQ ID NO: 2849018 - RNA, 19 nt, Artificial Sequence
  Description of Artificial Sequence: Synthetic oligonucleotide
cacacacuucagcguauug

SEQ ID NO: 2849019 - RNA, 19 nt, Artificial Sequence
  Description of Artificial Sequence: Synthetic oligonucleotide
cauggguacaggacaucga

SEQ ID NO: 2849020 - RNA, 19 nt, Artificial Sequence
  Description of Artificial Sequence: Synthetic oligonucleotide
aucuucagcagaggggaaa

SEQ ID NO: 2849021 - RNA, 19 nt, Artificial Sequence
  Description of Artificial Sequence: Synthetic oligonucleotide
caccgaaacagaagcagua

SEQ ID NO: 2849022 - RNA, 19 nt, Artificial Sequence
  Description of Artificial Sequence: Synthetic oligonucleotide
cacaccuaugcauuugccu

SEQ ID NO: 2849023 - RNA, 19 nt, Artificial Sequence
  Description of Artificial Sequence: Synthetic oligonucleotide
gcauuugccucuaaccuuc

SEQ ID NO: 2849024 - RNA, 19 nt, Artificial Sequence
  Description of Artificial Sequence: Synthetic oligonucleotide
guguucaauuugugggcca

SEQ ID NO: 2849025 - RNA, 19 nt, Artificial Sequence
  Description of Artificial Sequence: Synthetic oligonucleotide
ccucaguuaagaauccaca

SEQ ID NO: 2849026 - RNA, 19 nt, Artificial Sequence
  Description of Artificial Sequence: Synthetic oligonucleotide
cacacugucaaucuccauu

SEQ ID NO: 2849027 - RNA, 19 nt, Artificial Sequence
  Description of Artificial Sequence: Synthetic oligonucleotide
agccuucuaugucuagcaa

SEQ ID NO: 2849028 - RNA, 19 nt, Artificial Sequence
  Description of Artificial Sequence: Synthetic oligonucleotide
aguauccaggugucucaaa

SEQ ID NO: 2849029 - RNA, 19 nt, Artificial Sequence
  Description of Artificial Sequence: Synthetic oligonucleotide
guaauggcacuaccaggaa

SEQ ID NO: 2849030 - RNA, 19 nt, Artificial Sequence
  Description of Artificial Sequence: Synthetic oligonucleotide
agaagcaguacagguuuua

SEQ ID NO: 2849031 - RNA, 19 nt, Artificial Sequence
  Description of Artificial Sequence: Synthetic oligonucleotide
caguguccgcagaaguauc

SEQ ID NO: 2849032 - RNA, 19 nt, Artificial Sequence
  Description of Artificial Sequence: Synthetic oligonucleotide
ccuucacacacugucaauc

SEQ ID NO: 2849033 - RNA, 19 nt, Artificial Sequence
  Description of Artificial Sequence: Synthetic oligonucleotide
cauuccaccauugagccuu

SEQ ID NO: 2849034 - RNA, 19 nt, Artificial Sequence
  Description of Artificial Sequence: Synthetic oligonucleotide
agcagaggggaaaaugaua

SEQ ID NO: 2849035 - RNA, 19 nt, Artificial Sequence
  Description of Artificial Sequence: Synthetic oligonucleotide
accuucacacacugucaau

SEQ ID NO: 2849036 - RNA, 19 nt, Artificial Sequence
  Description of Artificial Sequence: Synthetic oligonucleotide
aucaguguccgcagaagua

SEQ ID NO: 2849037 - RNA, 19 nt, Artificial Sequence
  Description of Artificial Sequence: Synthetic oligonucleotide
uucagcguauuggcaacua

SEQ ID NO: 2849038 - RNA, 19 nt, Artificial Sequence
  Description of Artificial Sequence: Synthetic oligonucleotide
caucgagguuaaaguguuc

SEQ ID NO: 2849039 - RNA, 19 nt, Artificial Sequence
  Description of Artificial Sequence: Synthetic oligonucleotide
cacuuugugucaucagugu

SEQ ID NO: 2849040 - RNA, 19 nt, Artificial Sequence
  Description of Artificial Sequence: Synthetic oligonucleotide
gaacagaagaaaggacagu

SEQ ID NO: 2849041 - RNA, 19 nt, Artificial Sequence
  Description of Artificial Sequence: Synthetic oligonucleotide
gccuucuaugucuagcaaa

SEQ ID NO: 2849042 - RNA, 19 nt, Artificial Sequence
  Description of Artificial Sequence: Synthetic oligonucleotide
uagcaaagucagaguucaa

SEQ ID NO: 2849043 - RNA, 19 nt, Artificial Sequence
  Description of Artificial Sequence: Synthetic oligonucleotide
acacuucagcguauuggca

SEQ ID NO: 2849044 - RNA, 19 nt, Artificial Sequence
  Description of Artificial Sequence: Synthetic oligonucleotide
gacaguugagcuccacuuu

SEQ ID NO: 2849045 - RNA, 19 nt, Artificial Sequence
  Description of Artificial Sequence: Synthetic oligonucleotide
caucaguguccgcagaagu

SEQ ID NO: 2849046 - RNA, 19 nt, Artificial Sequence
  Description of Artificial Sequence: Synthetic oligonucleotide
agaagagagugcagauuaa

SEQ ID NO: 2849047 - RNA, 19 nt, Artificial Sequence
  Description of Artificial Sequence: Synthetic oligonucleotide
agucagaguucaaguauua

SEQ ID NO: 2849048 - RNA, 19 nt, Artificial Sequence
  Description of Artificial Sequence: Synthetic oligonucleotide
gucaaucuccauugcgcua

SEQ ID NO: 2849049 - RNA, 19 nt, Artificial Sequence
  Description of Artificial Sequence: Synthetic oligonucleotide
gucucaaaugaauguuuau

SEQ ID NO: 2849050 - RNA, 19 nt, Artificial Sequence
  Description of Artificial Sequence: Synthetic oligonucleotide
uugugucaucaguguccgc

SEQ ID NO: 2849051 - RNA, 19 nt, Artificial Sequence
  Description of Artificial Sequence: Synthetic oligonucleotide
auugagccuucuaugucua

SEQ ID NO: 2849052 - RNA, 19 nt, Artificial Sequence
  Description of Artificial Sequence: Synthetic oligonucleotide
gugcagauuaaagaagcau

SEQ ID NO: 2849053 - RNA, 19 nt, Artificial Sequence
  Description of Artificial Sequence: Synthetic oligonucleotide
uggcacuaccaggaagaaa

SEQ ID NO: 2849054 - RNA, 19 nt, Artificial Sequence
  Description of Artificial Sequence: Synthetic oligonucleotide
gaagcaguacagguuuuau

SEQ ID NO: 2849055 - RNA, 19 nt, Artificial Sequence
  Description of Artificial Sequence: Synthetic oligonucleotide
ccacaugauagcaugggua

SEQ ID NO: 2849056 - RNA, 19 nt, Artificial Sequence
  Description of Artificial Sequence: Synthetic oligonucleotide
aaaggacaguugagcucca

SEQ ID NO: 2849057 - RNA, 19 nt, Artificial Sequence
  Description of Artificial Sequence: Synthetic oligonucleotide
ccauugagccuucuauguc

SEQ ID NO: 2849058 - RNA, 19 nt, Artificial Sequence
  Description of Artificial Sequence: Synthetic oligonucleotide
cacuaccaggaagaaagaa

SEQ ID NO: 2849059 - RNA, 19 nt, Artificial Sequence
  Description of Artificial Sequence: Synthetic oligonucleotide
cauuacacuuccagguuuu

SEQ ID NO: 2849060 - RNA, 19 nt, Artificial Sequence
  Description of Artificial Sequence: Synthetic oligonucleotide
caaucuccauugcgcuaac

SEQ ID NO: 2849061 - RNA, 19 nt, Artificial Sequence
  Description of Artificial Sequence: Synthetic oligonucleotide
acacacugucaaucuccau

SEQ ID NO: 2849062 - RNA, 19 nt, Artificial Sequence
  Description of Artificial Sequence: Synthetic oligonucleotide
ccgaaacagaagcaguaca

SEQ ID NO: 2849063 - RNA, 19 nt, Artificial Sequence
  Description of Artificial Sequence: Synthetic oligonucleotide
guucaauuugugggccaca

SEQ ID NO: 2849064 - RNA, 19 nt, Artificial Sequence
  Description of Artificial Sequence: Synthetic oligonucleotide
gcagaaguauccagguguc

SEQ ID NO: 2849065 - RNA, 19 nt, Artificial Sequence
  Description of Artificial Sequence: Synthetic oligonucleotide
caccuaugcauuugccucu

SEQ ID NO: 2849066 - RNA, 19 nt, Artificial Sequence
  Description of Artificial Sequence: Synthetic oligonucleotide
ggacaguugagcuccacuu

SEQ ID NO: 2849067 - RNA, 19 nt, Artificial Sequence
  Description of Artificial Sequence: Synthetic oligonucleotide
auuccaccauugagccuuc

SEQ ID NO: 2849068 - RNA, 19 nt, Artificial Sequence
  Description of Artificial Sequence: Synthetic oligonucleotide
guguccgcagaaguaucca

SEQ ID NO: 2849069 - RNA, 19 nt, Artificial Sequence
  Description of Artificial Sequence: Synthetic oligonucleotide
cauuugccucuaaccuuca

SEQ ID NO: 2849070 - RNA, 19 nt, Artificial Sequence
  Description of Artificial Sequence: Synthetic oligonucleotide
guacagguuuuauguucua

SEQ ID NO: 2849071 - RNA, 19 nt, Artificial Sequence
  Description of Artificial Sequence: Synthetic oligonucleotide
gugucucaaaugaauguuu

SEQ ID NO: 2849072 - RNA, 19 nt, Artificial Sequence
  Description of Artificial Sequence: Synthetic oligonucleotide
ggugucucaaaugaauguu

SEQ ID NO: 2849073 - RNA, 19 nt, Artificial Sequence
  Description of Artificial Sequence: Synthetic oligonucleotide
cuccucaguuaagaaucca

SEQ ID NO: 2849074 - RNA, 19 nt, Artificial Sequence
  Description of Artificial Sequence: Synthetic oligonucleotide
cgcagaaguauccaggugu

SEQ ID NO: 2849075 - RNA, 19 nt, Artificial Sequence
  Description of Artificial Sequence: Synthetic oligonucleotide
caguugagcuccacuuugu

SEQ ID NO: 2849076 - RNA, 19 nt, Artificial Sequence
  Description of Artificial Sequence: Synthetic oligonucleotide
gcuccacuuugugucauca

SEQ ID NO: 2849077 - RNA, 19 nt, Artificial Sequence
  Description of Artificial Sequence: Synthetic oligonucleotide
cagcagaggggaaaaugau

SEQ ID NO: 2849078 - RNA, 19 nt, Artificial Sequence
  Description of Artificial Sequence: Synthetic oligonucleotide
accuaugcauuugccucua

SEQ ID NO: 2849079 - RNA, 19 nt, Artificial Sequence
  Description of Artificial Sequence: Synthetic oligonucleotide
ccaggugucucaaaugaau

SEQ ID NO: 2849080 - RNA, 19 nt, Artificial Sequence
  Description of Artificial Sequence: Synthetic oligonucleotide
cgcuaacauuccaccauug

SEQ ID NO: 2849081 - RNA, 19 nt, Artificial Sequence
  Description of Artificial Sequence: Synthetic oligonucleotide
cuucuaugucuagcaaagu

SEQ ID NO: 2849082 - RNA, 19 nt, Artificial Sequence
  Description of Artificial Sequence: Synthetic oligonucleotide
ccgcagaaguauccaggug

SEQ ID NO: 2849083 - RNA, 19 nt, Artificial Sequence
  Description of Artificial Sequence: Synthetic oligonucleotide
ccaccauugagccuucuau

SEQ ID NO: 2849084 - RNA, 19 nt, Artificial Sequence
  Description of Artificial Sequence: Synthetic oligonucleotide
uuccaccauugagccuucu

SEQ ID NO: 2849085 - RNA, 19 nt, Artificial Sequence
  Description of Artificial Sequence: Synthetic oligonucleotide
gcaguacagguuuuauguu

SEQ ID NO: 2849086 - RNA, 19 nt, Artificial Sequence
  Description of Artificial Sequence: Synthetic oligonucleotide
cuucagcguauuggcaacu

SEQ ID NO: 2849087 - RNA, 19 nt, Artificial Sequence
  Description of Artificial Sequence: Synthetic oligonucleotide
gcaccgaaacagaagcagu

SEQ ID NO: 2849088 - RNA, 19 nt, Artificial Sequence
  Description of Artificial Sequence: Synthetic oligonucleotide
gcacuaccaggaagaaaga

SEQ ID NO: 2849089 - RNA, 19 nt, Artificial Sequence
  Description of Artificial Sequence: Synthetic oligonucleotide
cagaaguauccaggugucu

SEQ ID NO: 2849090 - RNA, 19 nt, Artificial Sequence
  Description of Artificial Sequence: Synthetic oligonucleotide
gguacaggacaucgagguu

SEQ ID NO: 2849091 - RNA, 19 nt, Artificial Sequence
  Description of Artificial Sequence: Synthetic oligonucleotide
ccauugcgcuaacauucca

SEQ ID NO: 2849092 - RNA, 19 nt, Artificial Sequence
  Description of Artificial Sequence: Synthetic oligonucleotide
ccucuaaccuucacacacu

SEQ ID NO: 2849093 - RNA, 19 nt, Artificial Sequence
  Description of Artificial Sequence: Synthetic oligonucleotide
ccauuacacuuccagguuu

SEQ ID NO: 2849094 - RNA, 19 nt, Artificial Sequence
  Description of Artificial Sequence: Synthetic oligonucleotide
cagaagcaguacagguuuu

SEQ ID NO: 2849095 - RNA, 19 nt, Artificial Sequence
  Description of Artificial Sequence: Synthetic oligonucleotide
gcgcuaacauuccaccauu

SEQ ID NO: 2849096 - RNA, 19 nt, Artificial Sequence
  Description of Artificial Sequence: Synthetic oligonucleotide
gagcuccacuuugugucau

SEQ ID NO: 2849097 - RNA, 19 nt, Artificial Sequence
  Description of Artificial Sequence: Synthetic oligonucleotide
acaggacaucgagguuaaa

SEQ ID NO: 2849098 - RNA, 19 nt, Artificial Sequence
  Description of Artificial Sequence: Synthetic oligonucleotide
gcguauuggcaacuacauu

SEQ ID NO: 2849099 - RNA, 19 nt, Artificial Sequence
  Description of Artificial Sequence: Synthetic oligonucleotide
cuucagcagaggggaaaau

SEQ ID NO: 2849100 - RNA, 19 nt, Artificial Sequence
  Description of Artificial Sequence: Synthetic oligonucleotide
cgagguuaaaguguucaau

SEQ ID NO: 2849101 - RNA, 19 nt, Artificial Sequence
  Description of Artificial Sequence: Synthetic oligonucleotide
ccuaugcauuugccucuaa

SEQ ID NO: 2849102 - RNA, 19 nt, Artificial Sequence
  Description of Artificial Sequence: Synthetic oligonucleotide
ccacacacuucagcguauu

SEQ ID NO: 2849103 - RNA, 19 nt, Artificial Sequence
  Description of Artificial Sequence: Synthetic oligonucleotide
ucaguuuaaaauaaaacag

SEQ ID NO: 2849104 - RNA, 19 nt, Artificial Sequence
  Description of Artificial Sequence: Synthetic oligonucleotide
aauuuaaauguaaugaugg

SEQ ID NO: 2849105 - RNA, 19 nt, Artificial Sequence
  Description of Artificial Sequence: Synthetic oligonucleotide
uuaaauguaaugauggcag

SEQ ID NO: 2849106 - RNA, 19 nt, Artificial Sequence
  Description of Artificial Sequence: Synthetic oligonucleotide
uuaguuuuaacuuacagaa

SEQ ID NO: 2849107 - RNA, 19 nt, Artificial Sequence
  Description of Artificial Sequence: Synthetic oligonucleotide
uuuucauuaaauaaucccc

SEQ ID NO: 2849108 - RNA, 19 nt, Artificial Sequence
  Description of Artificial Sequence: Synthetic oligonucleotide
aauuugaagucuuuguuuc

SEQ ID NO: 2849109 - RNA, 19 nt, Artificial Sequence
  Description of Artificial Sequence: Synthetic oligonucleotide
uucaguuuaaaauaaaaca

SEQ ID NO: 2849110 - RNA, 19 nt, Artificial Sequence
  Description of Artificial Sequence: Synthetic oligonucleotide
uuucacaugagacaaagcc

SEQ ID NO: 2849111 - RNA, 19 nt, Artificial Sequence
  Description of Artificial Sequence: Synthetic oligonucleotide
aguuuuaacuuacagaaag

SEQ ID NO: 2849112 - RNA, 19 nt, Artificial Sequence
  Description of Artificial Sequence: Synthetic oligonucleotide
gaugacauuuuacagaugc

SEQ ID NO: 2849113 - RNA, 19 nt, Artificial Sequence
  Description of Artificial Sequence: Synthetic oligonucleotide
uuaaaauaaaacagcaugu

SEQ ID NO: 2849114 - RNA, 19 nt, Artificial Sequence
  Description of Artificial Sequence: Synthetic oligonucleotide
gguauaaccacucagaggc

SEQ ID NO: 2849115 - RNA, 19 nt, Artificial Sequence
  Description of Artificial Sequence: Synthetic oligonucleotide
aauguaaugauggcagucc

SEQ ID NO: 2849116 - RNA, 19 nt, Artificial Sequence
  Description of Artificial Sequence: Synthetic oligonucleotide
aaggaaauuaaaugauaac

SEQ ID NO: 2849117 - RNA, 19 nt, Artificial Sequence
  Description of Artificial Sequence: Synthetic oligonucleotide
agaaauuuaaauguaauga

SEQ ID NO: 2849118 - RNA, 19 nt, Artificial Sequence
  Description of Artificial Sequence: Synthetic oligonucleotide
acagaaaggaaauuaaaug

SEQ ID NO: 2849119 - RNA, 19 nt, Artificial Sequence
  Description of Artificial Sequence: Synthetic oligonucleotide
aagucuuuguuucacauga

SEQ ID NO: 2849120 - RNA, 19 nt, Artificial Sequence
  Description of Artificial Sequence: Synthetic oligonucleotide
auuuaaauguaaugauggc

SEQ ID NO: 2849121 - RNA, 19 nt, Artificial Sequence
  Description of Artificial Sequence: Synthetic oligonucleotide
aguacaacuacccagaaua

SEQ ID NO: 2849122 - RNA, 19 nt, Artificial Sequence
  Description of Artificial Sequence: Synthetic oligonucleotide
auuacaaagucugggaacc

SEQ ID NO: 2849123 - RNA, 19 nt, Artificial Sequence
  Description of Artificial Sequence: Synthetic oligonucleotide
ucacaugagacaaagccag

SEQ ID NO: 2849124 - RNA, 19 nt, Artificial Sequence
  Description of Artificial Sequence: Synthetic oligonucleotide
auuuuacagaugcucacgc

SEQ ID NO: 2849125 - RNA, 19 nt, Artificial Sequence
  Description of Artificial Sequence: Synthetic oligonucleotide
aaaugguauaaccacucag

SEQ ID NO: 2849126 - RNA, 19 nt, Artificial Sequence
  Description of Artificial Sequence: Synthetic oligonucleotide
uuagauuacaaagucuggg

SEQ ID NO: 2849127 - RNA, 19 nt, Artificial Sequence
  Description of Artificial Sequence: Synthetic oligonucleotide
auuaguuuuaacuuacaga

SEQ ID NO: 2849128 - RNA, 19 nt, Artificial Sequence
  Description of Artificial Sequence: Synthetic oligonucleotide
caagccuuagauuacaaag

SEQ ID NO: 2849129 - RNA, 19 nt, Artificial Sequence
  Description of Artificial Sequence: Synthetic oligonucleotide
ucucucucaagacaagugg

SEQ ID NO: 2849130 - RNA, 19 nt, Artificial Sequence
  Description of Artificial Sequence: Synthetic oligonucleotide
aaauuuaaauguaaugaug

SEQ ID NO: 2849131 - RNA, 19 nt, Artificial Sequence
  Description of Artificial Sequence: Synthetic oligonucleotide
aaagucugggaaccggagc

SEQ ID NO: 2849132 - RNA, 19 nt, Artificial Sequence
  Description of Artificial Sequence: Synthetic oligonucleotide
caguuuaaaauaaaacagc

SEQ ID NO: 2849133 - RNA, 19 nt, Artificial Sequence
  Description of Artificial Sequence: Synthetic oligonucleotide
uuuaaauguaaugauggca

SEQ ID NO: 2849134 - RNA, 19 nt, Artificial Sequence
  Description of Artificial Sequence: Synthetic oligonucleotide
aaaauaaaacagcauguuu

SEQ ID NO: 2849135 - RNA, 19 nt, Artificial Sequence
  Description of Artificial Sequence: Synthetic oligonucleotide
aggaaauuaaaugauaaca

SEQ ID NO: 2849136 - RNA, 19 nt, Artificial Sequence
  Description of Artificial Sequence: Synthetic oligonucleotide
aaauaaaacagcauguuuu

SEQ ID NO: 2849137 - RNA, 19 nt, Artificial Sequence
  Description of Artificial Sequence: Synthetic oligonucleotide
ucuuuguuucacaugagac

SEQ ID NO: 2849138 - RNA, 19 nt, Artificial Sequence
  Description of Artificial Sequence: Synthetic oligonucleotide
accccuaaaugguauaacc

SEQ ID NO: 2849139 - RNA, 19 nt, Artificial Sequence
  Description of Artificial Sequence: Synthetic oligonucleotide
uuuuaacuuacagaaagga

SEQ ID NO: 2849140 - RNA, 19 nt, Artificial Sequence
  Description of Artificial Sequence: Synthetic oligonucleotide
aaauguaaugauggcaguc

SEQ ID NO: 2849141 - RNA, 19 nt, Artificial Sequence
  Description of Artificial Sequence: Synthetic oligonucleotide
uacgauguggaauuugaag

SEQ ID NO: 2849142 - RNA, 19 nt, Artificial Sequence
  Description of Artificial Sequence: Synthetic oligonucleotide
acaacuacccagaauagac

SEQ ID NO: 2849143 - RNA, 19 nt, Artificial Sequence
  Description of Artificial Sequence: Synthetic oligonucleotide
uuuaacuuacagaaaggaa

SEQ ID NO: 2849144 - RNA, 19 nt, Artificial Sequence
  Description of Artificial Sequence: Synthetic oligonucleotide
gacaacaagccuuagauua

SEQ ID NO: 2849145 - RNA, 19 nt, Artificial Sequence
  Description of Artificial Sequence: Synthetic oligonucleotide
uucacaugagacaaagcca

SEQ ID NO: 2849146 - RNA, 19 nt, Artificial Sequence
  Description of Artificial Sequence: Synthetic oligonucleotide
aaaggaaauuaaaugauaa

SEQ ID NO: 2849147 - RNA, 19 nt, Artificial Sequence
  Description of Artificial Sequence: Synthetic oligonucleotide
acgauguggaauuugaagu

SEQ ID NO: 2849148 - RNA, 19 nt, Artificial Sequence
  Description of Artificial Sequence: Synthetic oligonucleotide
cagaaaggaaauuaaauga

SEQ ID NO: 2849149 - RNA, 19 nt, Artificial Sequence
  Description of Artificial Sequence: Synthetic oligonucleotide
acauuuuacagaugcucac

SEQ ID NO: 2849150 - RNA, 19 nt, Artificial Sequence
  Description of Artificial Sequence: Synthetic oligonucleotide
uugaugacauuuuacagau

SEQ ID NO: 2849151 - RNA, 19 nt, Artificial Sequence
  Description of Artificial Sequence: Synthetic oligonucleotide
uuuacagaugcucacgcuc

SEQ ID NO: 2849152 - RNA, 19 nt, Artificial Sequence
  Description of Artificial Sequence: Synthetic oligonucleotide
ucuacgauguggaauuuga

SEQ ID NO: 2849153 - RNA, 19 nt, Artificial Sequence
  Description of Artificial Sequence: Synthetic oligonucleotide
gaagcaucugcuucaaggc

SEQ ID NO: 2849154 - RNA, 19 nt, Artificial Sequence
  Description of Artificial Sequence: Synthetic oligonucleotide
aaugguauaaccacucaga

SEQ ID NO: 2849155 - RNA, 19 nt, Artificial Sequence
  Description of Artificial Sequence: Synthetic oligonucleotide
aaugauggcaguccuggga

SEQ ID NO: 2849156 - RNA, 19 nt, Artificial Sequence
  Description of Artificial Sequence: Synthetic oligonucleotide
gauuacaaagucugggaac

SEQ ID NO: 2849157 - RNA, 19 nt, Artificial Sequence
  Description of Artificial Sequence: Synthetic oligonucleotide
aguuuaaaauaaaacagca

SEQ ID NO: 2849158 - RNA, 19 nt, Artificial Sequence
  Description of Artificial Sequence: Synthetic oligonucleotide
uuucccaaaguacaacuac

SEQ ID NO: 2849159 - RNA, 19 nt, Artificial Sequence
  Description of Artificial Sequence: Synthetic oligonucleotide
agaauguuucucugucugc

SEQ ID NO: 2849160 - RNA, 19 nt, Artificial Sequence
  Description of Artificial Sequence: Synthetic oligonucleotide
uguuucacaugagacaaag

SEQ ID NO: 2849161 - RNA, 19 nt, Artificial Sequence
  Description of Artificial Sequence: Synthetic oligonucleotide
cauuaguuuuaacuuacag

SEQ ID NO: 2849162 - RNA, 19 nt, Artificial Sequence
  Description of Artificial Sequence: Synthetic oligonucleotide
uagauuacaaagucuggga

SEQ ID NO: 2849163 - RNA, 19 nt, Artificial Sequence
  Description of Artificial Sequence: Synthetic oligonucleotide
agccuuagauuacaaaguc

SEQ ID NO: 2849164 - RNA, 19 nt, Artificial Sequence
  Description of Artificial Sequence: Synthetic oligonucleotide
ugcacaaucgagagcaccc

SEQ ID NO: 2849165 - RNA, 19 nt, Artificial Sequence
  Description of Artificial Sequence: Synthetic oligonucleotide
cuuagauuacaaagucugg

SEQ ID NO: 2849166 - RNA, 19 nt, Artificial Sequence
  Description of Artificial Sequence: Synthetic oligonucleotide
guaaugauggcaguccugg

SEQ ID NO: 2849167 - RNA, 19 nt, Artificial Sequence
  Description of Artificial Sequence: Synthetic oligonucleotide
ugguauaaccacucagagg

SEQ ID NO: 2849168 - RNA, 19 nt, Artificial Sequence
  Description of Artificial Sequence: Synthetic oligonucleotide
augguauaaccacucagag

SEQ ID NO: 2849169 - RNA, 19 nt, Artificial Sequence
  Description of Artificial Sequence: Synthetic oligonucleotide
cuaaaugguauaaccacuc

SEQ ID NO: 2849170 - RNA, 19 nt, Artificial Sequence
  Description of Artificial Sequence: Synthetic oligonucleotide
augagacaaagccagguug

SEQ ID NO: 2849171 - RNA, 19 nt, Artificial Sequence
  Description of Artificial Sequence: Synthetic oligonucleotide
guuugcacaaucgagagca

SEQ ID NO: 2849172 - RNA, 19 nt, Artificial Sequence
  Description of Artificial Sequence: Synthetic oligonucleotide
ucccaaaguacaacuaccc

SEQ ID NO: 2849173 - RNA, 19 nt, Artificial Sequence
  Description of Artificial Sequence: Synthetic oligonucleotide
agacuuucaguuuaaaaua

SEQ ID NO: 2849174 - RNA, 19 nt, Artificial Sequence
  Description of Artificial Sequence: Synthetic oligonucleotide
uuacagaaaggaaauuaaa

SEQ ID NO: 2849175 - RNA, 19 nt, Artificial Sequence
  Description of Artificial Sequence: Synthetic oligonucleotide
uggaauuugaagucuuugu

SEQ ID NO: 2849176 - RNA, 19 nt, Artificial Sequence
  Description of Artificial Sequence: Synthetic oligonucleotide
uucccaaaguacaacuacc

SEQ ID NO: 2849177 - RNA, 19 nt, Artificial Sequence
  Description of Artificial Sequence: Synthetic oligonucleotide
cuugaugacauuuuacaga

SEQ ID NO: 2849178 - RNA, 19 nt, Artificial Sequence
  Description of Artificial Sequence: Synthetic oligonucleotide
guugaugggaagcaucugc

SEQ ID NO: 2849179 - RNA, 19 nt, Artificial Sequence
  Description of Artificial Sequence: Synthetic oligonucleotide
gaaauuuaaauguaaugau

SEQ ID NO: 2849180 - RNA, 19 nt, Artificial Sequence
  Description of Artificial Sequence: Synthetic oligonucleotide
ucucaagacaagugggugc

SEQ ID NO: 2849181 - RNA, 19 nt, Artificial Sequence
  Description of Artificial Sequence: Synthetic oligonucleotide
aacuacccagaauagacuu

SEQ ID NO: 2849182 - RNA, 19 nt, Artificial Sequence
  Description of Artificial Sequence: Synthetic oligonucleotide
cucucucaagacaaguggg

SEQ ID NO: 2849183 - RNA, 19 nt, Artificial Sequence
  Description of Artificial Sequence: Synthetic oligonucleotide
uucaaggcuacauugucuc

SEQ ID NO: 2849184 - RNA, 19 nt, Artificial Sequence
  Description of Artificial Sequence: Synthetic oligonucleotide
agaauagacuuucaguuua

SEQ ID NO: 2849185 - RNA, 19 nt, Artificial Sequence
  Description of Artificial Sequence: Synthetic oligonucleotide
aacaccagccuggagaucu

SEQ ID NO: 2849186 - RNA, 19 nt, Artificial Sequence
  Description of Artificial Sequence: Synthetic oligonucleotide
acauugucucucucaagac

SEQ ID NO: 2849187 - RNA, 19 nt, Artificial Sequence
  Description of Artificial Sequence: Synthetic oligonucleotide
uaaaugguauaaccacuca

SEQ ID NO: 2849188 - RNA, 19 nt, Artificial Sequence
  Description of Artificial Sequence: Synthetic oligonucleotide
aaccggagcucgcaacacc

SEQ ID NO: 2849189 - RNA, 19 nt, Artificial Sequence
  Description of Artificial Sequence: Synthetic oligonucleotide
uuacagaugcucacgcucu

SEQ ID NO: 2849190 - RNA, 19 nt, Artificial Sequence
  Description of Artificial Sequence: Synthetic oligonucleotide
aagacaagugggugccacg

SEQ ID NO: 2849191 - RNA, 19 nt, Artificial Sequence
  Description of Artificial Sequence: Synthetic oligonucleotide
uaaaauaaaacagcauguu

SEQ ID NO: 2849192 - RNA, 19 nt, Artificial Sequence
  Description of Artificial Sequence: Synthetic oligonucleotide
ccuuagauuacaaagucug

SEQ ID NO: 2849193 - RNA, 19 nt, Artificial Sequence
  Description of Artificial Sequence: Synthetic oligonucleotide
ucgagagcaccccuaaaug

SEQ ID NO: 2849194 - RNA, 19 nt, Artificial Sequence
  Description of Artificial Sequence: Synthetic oligonucleotide
cuuuguuucacaugagaca

SEQ ID NO: 2849195 - RNA, 19 nt, Artificial Sequence
  Description of Artificial Sequence: Synthetic oligonucleotide
uguaaugauggcaguccug

SEQ ID NO: 2849196 - RNA, 19 nt, Artificial Sequence
  Description of Artificial Sequence: Synthetic oligonucleotide
gaagucuuuguuucacaug

SEQ ID NO: 2849197 - RNA, 19 nt, Artificial Sequence
  Description of Artificial Sequence: Synthetic oligonucleotide
uccugggagacaacaagcc

SEQ ID NO: 2849198 - RNA, 19 nt, Artificial Sequence
  Description of Artificial Sequence: Synthetic oligonucleotide
aagugggugccacguuugc

SEQ ID NO: 2849199 - RNA, 19 nt, Artificial Sequence
  Description of Artificial Sequence: Synthetic oligonucleotide
aguccugggagacaacaag

SEQ ID NO: 2849200 - RNA, 19 nt, Artificial Sequence
  Description of Artificial Sequence: Synthetic oligonucleotide
accauguccagaauguuuc

SEQ ID NO: 2849201 - RNA, 19 nt, Artificial Sequence
  Description of Artificial Sequence: Synthetic oligonucleotide
cauuuuacagaugcucacg

SEQ ID NO: 2849202 - RNA, 19 nt, Artificial Sequence
  Description of Artificial Sequence: Synthetic oligonucleotide
auagacuuucaguuuaaaa

SEQ ID NO: 2849203 - RNA, 19 nt, Artificial Sequence
  Description of Artificial Sequence: Synthetic oligonucleotide
gaugggaagcaucugcuuc

SEQ ID NO: 2849204 - RNA, 19 nt, Artificial Sequence
  Description of Artificial Sequence: Synthetic oligonucleotide
acguuugcacaaucgagag

SEQ ID NO: 2849205 - RNA, 19 nt, Artificial Sequence
  Description of Artificial Sequence: Synthetic oligonucleotide
caaaguacaacuacccaga

SEQ ID NO: 2849206 - RNA, 19 nt, Artificial Sequence
  Description of Artificial Sequence: Synthetic oligonucleotide
agauuacaaagucugggaa

SEQ ID NO: 2849207 - RNA, 19 nt, Artificial Sequence
  Description of Artificial Sequence: Synthetic oligonucleotide
uugaugggaagcaucugcu

SEQ ID NO: 2849208 - RNA, 19 nt, Artificial Sequence
  Description of Artificial Sequence: Synthetic oligonucleotide
cuuacagaaaggaaauuaa

SEQ ID NO: 2849209 - RNA, 19 nt, Artificial Sequence
  Description of Artificial Sequence: Synthetic oligonucleotide
aagccuuagauuacaaagu

SEQ ID NO: 2849210 - RNA, 19 nt, Artificial Sequence
  Description of Artificial Sequence: Synthetic oligonucleotide
gagacaacaagccuuagau

SEQ ID NO: 2849211 - RNA, 19 nt, Artificial Sequence
  Description of Artificial Sequence: Synthetic oligonucleotide
uuugaagucuuuguuucac

SEQ ID NO: 2849212 - RNA, 19 nt, Artificial Sequence
  Description of Artificial Sequence: Synthetic oligonucleotide
uacaaagucugggaaccgg

SEQ ID NO: 2849213 - RNA, 19 nt, Artificial Sequence
  Description of Artificial Sequence: Synthetic oligonucleotide
ucucucaagacaagugggu

SEQ ID NO: 2849214 - RNA, 19 nt, Artificial Sequence
  Description of Artificial Sequence: Synthetic oligonucleotide
ugaagucuuuguuucacau

SEQ ID NO: 2849215 - RNA, 19 nt, Artificial Sequence
  Description of Artificial Sequence: Synthetic oligonucleotide
cagaauguuucucugucug

SEQ ID NO: 2849216 - RNA, 19 nt, Artificial Sequence
  Description of Artificial Sequence: Synthetic oligonucleotide
ugccacguuugcacaaucg

SEQ ID NO: 2849217 - RNA, 19 nt, Artificial Sequence
  Description of Artificial Sequence: Synthetic oligonucleotide
gacauuuuacagaugcuca

SEQ ID NO: 2849218 - RNA, 19 nt, Artificial Sequence
  Description of Artificial Sequence: Synthetic oligonucleotide
uauaaccacucagaggcug

SEQ ID NO: 2849219 - RNA, 19 nt, Artificial Sequence
  Description of Artificial Sequence: Synthetic oligonucleotide
ccaaaguacaacuacccag

SEQ ID NO: 2849220 - RNA, 19 nt, Artificial Sequence
  Description of Artificial Sequence: Synthetic oligonucleotide
aagcaucugcuucaaggcu

SEQ ID NO: 2849221 - RNA, 19 nt, Artificial Sequence
  Description of Artificial Sequence: Synthetic oligonucleotide
aaggcuacauugucucucu

SEQ ID NO: 2849222 - RNA, 19 nt, Artificial Sequence
  Description of Artificial Sequence: Synthetic oligonucleotide
uaaauguaaugauggcagu

SEQ ID NO: 2849223 - RNA, 19 nt, Artificial Sequence
  Description of Artificial Sequence: Synthetic oligonucleotide
ucagaggcugaccaccaug

SEQ ID NO: 2849224 - RNA, 19 nt, Artificial Sequence
  Description of Artificial Sequence: Synthetic oligonucleotide
agaaaggaaauuaaaugau

SEQ ID NO: 2849225 - RNA, 19 nt, Artificial Sequence
  Description of Artificial Sequence: Synthetic oligonucleotide
cuggagaucuucauccuug

SEQ ID NO: 2849226 - RNA, 19 nt, Artificial Sequence
  Description of Artificial Sequence: Synthetic oligonucleotide
ucauuaguuuuaacuuaca

SEQ ID NO: 2849227 - RNA, 19 nt, Artificial Sequence
  Description of Artificial Sequence: Synthetic oligonucleotide
acuuacagaaaggaaauua

SEQ ID NO: 2849228 - RNA, 19 nt, Artificial Sequence
  Description of Artificial Sequence: Synthetic oligonucleotide
accacucagaggcugacca

SEQ ID NO: 2849229 - RNA, 19 nt, Artificial Sequence
  Description of Artificial Sequence: Synthetic oligonucleotide
uuuucccaaaguacaacua

SEQ ID NO: 2849230 - RNA, 19 nt, Artificial Sequence
  Description of Artificial Sequence: Synthetic oligonucleotide
uuuuacagaugcucacgcu

SEQ ID NO: 2849231 - RNA, 19 nt, Artificial Sequence
  Description of Artificial Sequence: Synthetic oligonucleotide
ugcuucaaggcuacauugu

SEQ ID NO: 2849232 - RNA, 19 nt, Artificial Sequence
  Description of Artificial Sequence: Synthetic oligonucleotide
cugcuucaaggcuacauug

SEQ ID NO: 2849233 - RNA, 19 nt, Artificial Sequence
  Description of Artificial Sequence: Synthetic oligonucleotide
aucgagagcaccccuaaau

SEQ ID NO: 2849234 - RNA, 19 nt, Artificial Sequence
  Description of Artificial Sequence: Synthetic oligonucleotide
aaaguacaacuacccagaa

SEQ ID NO: 2849235 - RNA, 19 nt, Artificial Sequence
  Description of Artificial Sequence: Synthetic oligonucleotide
ucugcuucaaggcuacauu

SEQ ID NO: 2849236 - RNA, 19 nt, Artificial Sequence
  Description of Artificial Sequence: Synthetic oligonucleotide
acccagaauagacuuucag

SEQ ID NO: 2849237 - RNA, 19 nt, Artificial Sequence
  Description of Artificial Sequence: Synthetic oligonucleotide
acaacaagccuuagauuac

SEQ ID NO: 2849238 - RNA, 19 nt, Artificial Sequence
  Description of Artificial Sequence: Synthetic oligonucleotide
aaguacaacuacccagaau

SEQ ID NO: 2849239 - RNA, 19 nt, Artificial Sequence
  Description of Artificial Sequence: Synthetic oligonucleotide
cucaagacaagugggugcc

SEQ ID NO: 2849240 - RNA, 19 nt, Artificial Sequence
  Description of Artificial Sequence: Synthetic oligonucleotide
uaaugauggcaguccuggg

SEQ ID NO: 2849241 - RNA, 19 nt, Artificial Sequence
  Description of Artificial Sequence: Synthetic oligonucleotide
gaccaccauguccagaaug

SEQ ID NO: 2849242 - RNA, 19 nt, Artificial Sequence
  Description of Artificial Sequence: Synthetic oligonucleotide
ucuggcaggaccacacuuc

SEQ ID NO: 2849243 - RNA, 19 nt, Artificial Sequence
  Description of Artificial Sequence: Synthetic oligonucleotide
cucucucucucucucuugg

SEQ ID NO: 2849244 - RNA, 19 nt, Artificial Sequence
  Description of Artificial Sequence: Synthetic oligonucleotide
uaguuuuaacuuacagaaa

SEQ ID NO: 2849245 - RNA, 19 nt, Artificial Sequence
  Description of Artificial Sequence: Synthetic oligonucleotide
uucucugucugcucuggca

SEQ ID NO: 2849246 - RNA, 19 nt, Artificial Sequence
  Description of Artificial Sequence: Synthetic oligonucleotide
auuugaagucuuuguuuca

SEQ ID NO: 2849247 - RNA, 19 nt, Artificial Sequence
  Description of Artificial Sequence: Synthetic oligonucleotide
aggaccacacuucauuagu

SEQ ID NO: 2849248 - RNA, 19 nt, Artificial Sequence
  Description of Artificial Sequence: Synthetic oligonucleotide
uugaagucuuuguuucaca

SEQ ID NO: 2849249 - RNA, 19 nt, Artificial Sequence
  Description of Artificial Sequence: Synthetic oligonucleotide
augggaagcaucugcuuca

SEQ ID NO: 2849250 - RNA, 19 nt, Artificial Sequence
  Description of Artificial Sequence: Synthetic oligonucleotide
gaauuugaagucuuuguuu

SEQ ID NO: 2849251 - RNA, 19 nt, Artificial Sequence
  Description of Artificial Sequence: Synthetic oligonucleotide
auugucucucucaagacaa

SEQ ID NO: 2849252 - RNA, 19 nt, Artificial Sequence
  Description of Artificial Sequence: Synthetic oligonucleotide
gaaaggaaauuaaaugaua

SEQ ID NO: 2849253 - RNA, 19 nt, Artificial Sequence
  Description of Artificial Sequence: Synthetic oligonucleotide
ccccaaagaaauuuaaaug

SEQ ID NO: 2849254 - RNA, 19 nt, Artificial Sequence
  Description of Artificial Sequence: Synthetic oligonucleotide
uuacaaagucugggaaccg

SEQ ID NO: 2849255 - RNA, 19 nt, Artificial Sequence
  Description of Artificial Sequence: Synthetic oligonucleotide
auguaaugauggcaguccu

SEQ ID NO: 2849256 - RNA, 19 nt, Artificial Sequence
  Description of Artificial Sequence: Synthetic oligonucleotide
aucuucauccuugaugaca

SEQ ID NO: 2849257 - RNA, 19 nt, Artificial Sequence
  Description of Artificial Sequence: Synthetic oligonucleotide
acaaagccagguugauggg

SEQ ID NO: 2849258 - RNA, 19 nt, Artificial Sequence
  Description of Artificial Sequence: Synthetic oligonucleotide
cacguuugcacaaucgaga

SEQ ID NO: 2849259 - RNA, 19 nt, Artificial Sequence
  Description of Artificial Sequence: Synthetic oligonucleotide
caaagucugggaaccggag

SEQ ID NO: 2849260 - RNA, 19 nt, Artificial Sequence
  Description of Artificial Sequence: Synthetic oligonucleotide
aaccacucagaggcugacc

SEQ ID NO: 2849261 - RNA, 19 nt, Artificial Sequence
  Description of Artificial Sequence: Synthetic oligonucleotide
ucauccuugaugacauuuu

SEQ ID NO: 2849262 - RNA, 19 nt, Artificial Sequence
  Description of Artificial Sequence: Synthetic oligonucleotide
cuucauuaguuuuaacuua

SEQ ID NO: 2849263 - RNA, 19 nt, Artificial Sequence
  Description of Artificial Sequence: Synthetic oligonucleotide
ugucugcucuggcaggacc

SEQ ID NO: 2849264 - RNA, 19 nt, Artificial Sequence
  Description of Artificial Sequence: Synthetic oligonucleotide
cucucucucucucuugggc

SEQ ID NO: 2849265 - RNA, 19 nt, Artificial Sequence
  Description of Artificial Sequence: Synthetic oligonucleotide
gaugcucacgcucucucuc

SEQ ID NO: 2849266 - RNA, 19 nt, Artificial Sequence
  Description of Artificial Sequence: Synthetic oligonucleotide
agccagguugaugggaagc

SEQ ID NO: 2849267 - RNA, 19 nt, Artificial Sequence
  Description of Artificial Sequence: Synthetic oligonucleotide
uguuucucugucugcucug

SEQ ID NO: 2849268 - RNA, 19 nt, Artificial Sequence
  Description of Artificial Sequence: Synthetic oligonucleotide
gucuuuguuucacaugaga

SEQ ID NO: 2849269 - RNA, 19 nt, Artificial Sequence
  Description of Artificial Sequence: Synthetic oligonucleotide
ucucucucucucucuuggg

SEQ ID NO: 2849270 - RNA, 19 nt, Artificial Sequence
  Description of Artificial Sequence: Synthetic oligonucleotide
acacuucauuaguuuuaac

SEQ ID NO: 2849271 - RNA, 19 nt, Artificial Sequence
  Description of Artificial Sequence: Synthetic oligonucleotide
gacuuucaguuuaaaauaa

SEQ ID NO: 2849272 - RNA, 19 nt, Artificial Sequence
  Description of Artificial Sequence: Synthetic oligonucleotide
aaagccagguugaugggaa

SEQ ID NO: 2849273 - RNA, 19 nt, Artificial Sequence
  Description of Artificial Sequence: Synthetic oligonucleotide
cccuaaaugguauaaccac

SEQ ID NO: 2849274 - RNA, 19 nt, Artificial Sequence
  Description of Artificial Sequence: Synthetic oligonucleotide
cucucucucacucucucuc

SEQ ID NO: 2849275 - RNA, 19 nt, Artificial Sequence
  Description of Artificial Sequence: Synthetic oligonucleotide
uugucucucucaagacaag

SEQ ID NO: 2849276 - RNA, 19 nt, Artificial Sequence
  Description of Artificial Sequence: Synthetic oligonucleotide
acaugagacaaagccaggu

SEQ ID NO: 2849277 - RNA, 19 nt, Artificial Sequence
  Description of Artificial Sequence: Synthetic oligonucleotide
aauagacuuucaguuuaaa

SEQ ID NO: 2849278 - RNA, 19 nt, Artificial Sequence
  Description of Artificial Sequence: Synthetic oligonucleotide
uucauccuugaugacauuu

SEQ ID NO: 2849279 - RNA, 19 nt, Artificial Sequence
  Description of Artificial Sequence: Synthetic oligonucleotide
cucucucucucucucacuc

SEQ ID NO: 2849280 - RNA, 19 nt, Artificial Sequence
  Description of Artificial Sequence: Synthetic oligonucleotide
ugggagacaacaagccuua

SEQ ID NO: 2849281 - RNA, 19 nt, Artificial Sequence
  Description of Artificial Sequence: Synthetic oligonucleotide
guggaauuugaagucuuug

SEQ ID NO: 2849282 - RNA, 19 nt, Artificial Sequence
  Description of Artificial Sequence: Synthetic oligonucleotide
cuacccagaauagacuuuc

SEQ ID NO: 2849283 - RNA, 19 nt, Artificial Sequence
  Description of Artificial Sequence: Synthetic oligonucleotide
acaagccuuagauuacaaa

SEQ ID NO: 2849284 - RNA, 19 nt, Artificial Sequence
  Description of Artificial Sequence: Synthetic oligonucleotide
gugggugccacguuugcac

SEQ ID NO: 2849285 - RNA, 19 nt, Artificial Sequence
  Description of Artificial Sequence: Synthetic oligonucleotide
aagccagguugaugggaag

SEQ ID NO: 2849286 - RNA, 19 nt, Artificial Sequence
  Description of Artificial Sequence: Synthetic oligonucleotide
ugaugacauuuuacagaug

SEQ ID NO: 2849287 - RNA, 19 nt, Artificial Sequence
  Description of Artificial Sequence: Synthetic oligonucleotide
accacacuucauuaguuuu

SEQ ID NO: 2849288 - RNA, 19 nt, Artificial Sequence
  Description of Artificial Sequence: Synthetic oligonucleotide
uugcacaaucgagagcacc

SEQ ID NO: 2849289 - RNA, 19 nt, Artificial Sequence
  Description of Artificial Sequence: Synthetic oligonucleotide
uggagaucuucauccuuga

SEQ ID NO: 2849290 - RNA, 19 nt, Artificial Sequence
  Description of Artificial Sequence: Synthetic oligonucleotide
ugucucucucaagacaagu

SEQ ID NO: 2849291 - RNA, 19 nt, Artificial Sequence
  Description of Artificial Sequence: Synthetic oligonucleotide
uguggaauuugaagucuuu

SEQ ID NO: 2849292 - RNA, 19 nt, Artificial Sequence
  Description of Artificial Sequence: Synthetic oligonucleotide
cacaugagacaaagccagg

SEQ ID NO: 2849293 - RNA, 19 nt, Artificial Sequence
  Description of Artificial Sequence: Synthetic oligonucleotide
caggaccacacuucauuag

SEQ ID NO: 2849294 - RNA, 19 nt, Artificial Sequence
  Description of Artificial Sequence: Synthetic oligonucleotide
uuucucugucugcucuggc

SEQ ID NO: 2849295 - RNA, 19 nt, Artificial Sequence
  Description of Artificial Sequence: Synthetic oligonucleotide
acaagugggugccacguuu

SEQ ID NO: 2849296 - RNA, 19 nt, Artificial Sequence
  Description of Artificial Sequence: Synthetic oligonucleotide
guacaacuacccagaauag

SEQ ID NO: 2849297 - RNA, 19 nt, Artificial Sequence
  Description of Artificial Sequence: Synthetic oligonucleotide
cccaaagaaauuuaaaugu

SEQ ID NO: 2849298 - RNA, 19 nt, Artificial Sequence
  Description of Artificial Sequence: Synthetic oligonucleotide
cacucagaggcugaccacc

SEQ ID NO: 2849299 - RNA, 19 nt, Artificial Sequence
  Description of Artificial Sequence: Synthetic oligonucleotide
cagguugaugggaagcauc

SEQ ID NO: 2849300 - RNA, 19 nt, Artificial Sequence
  Description of Artificial Sequence: Synthetic oligonucleotide
cucucaagacaagugggug

SEQ ID NO: 2849301 - RNA, 19 nt, Artificial Sequence
  Description of Artificial Sequence: Synthetic oligonucleotide
guuucucugucugcucugg

SEQ ID NO: 2849302 - RNA, 19 nt, Artificial Sequence
  Description of Artificial Sequence: Synthetic oligonucleotide
cugaccaccauguccagaa

SEQ ID NO: 2849303 - RNA, 19 nt, Artificial Sequence
  Description of Artificial Sequence: Synthetic oligonucleotide
ucucucacucucucucucu

SEQ ID NO: 2849304 - RNA, 19 nt, Artificial Sequence
  Description of Artificial Sequence: Synthetic oligonucleotide
ggaaauuaaaugauaacau

SEQ ID NO: 2849305 - RNA, 19 nt, Artificial Sequence
  Description of Artificial Sequence: Synthetic oligonucleotide
caagugggugccacguuug

SEQ ID NO: 2849306 - RNA, 19 nt, Artificial Sequence
  Description of Artificial Sequence: Synthetic oligonucleotide
gucucucucaagacaagug

SEQ ID NO: 2849307 - RNA, 19 nt, Artificial Sequence
  Description of Artificial Sequence: Synthetic oligonucleotide
ucucucucacucucucucu

SEQ ID NO: 2849308 - RNA, 19 nt, Artificial Sequence
  Description of Artificial Sequence: Synthetic oligonucleotide
caaggcuacauugucucuc

SEQ ID NO: 2849309 - RNA, 19 nt, Artificial Sequence
  Description of Artificial Sequence: Synthetic oligonucleotide
agacaacaagccuuagauu

SEQ ID NO: 2849310 - RNA, 19 nt, Artificial Sequence
  Description of Artificial Sequence: Synthetic oligonucleotide
gaauguuucucugucugcu

SEQ ID NO: 2849311 - RNA, 19 nt, Artificial Sequence
  Description of Artificial Sequence: Synthetic oligonucleotide
ucucucucucucucucuug

SEQ ID NO: 2849312 - RNA, 19 nt, Artificial Sequence
  Description of Artificial Sequence: Synthetic oligonucleotide
agguugaugggaagcaucu

SEQ ID NO: 2849313 - RNA, 19 nt, Artificial Sequence
  Description of Artificial Sequence: Synthetic oligonucleotide
guccugggagacaacaagc

SEQ ID NO: 2849314 - RNA, 19 nt, Artificial Sequence
  Description of Artificial Sequence: Synthetic oligonucleotide
aaucgagagcaccccuaaa

SEQ ID NO: 2849315 - RNA, 19 nt, Artificial Sequence
  Description of Artificial Sequence: Synthetic oligonucleotide
cucacucucucucucucuc

SEQ ID NO: 2849316 - RNA, 19 nt, Artificial Sequence
  Description of Artificial Sequence: Synthetic oligonucleotide
cucugucugcucuggcagg

SEQ ID NO: 2849317 - RNA, 19 nt, Artificial Sequence
  Description of Artificial Sequence: Synthetic oligonucleotide
ucucucucucucucucuca

SEQ ID NO: 2849318 - RNA, 19 nt, Artificial Sequence
  Description of Artificial Sequence: Synthetic oligonucleotide
ucucacucucucucucucu

SEQ ID NO: 2849319 - RNA, 19 nt, Artificial Sequence
  Description of Artificial Sequence: Synthetic oligonucleotide
agaggcugaccaccauguc

SEQ ID NO: 2849320 - RNA, 19 nt, Artificial Sequence
  Description of Artificial Sequence: Synthetic oligonucleotide
uuugcacaaucgagagcac

SEQ ID NO: 2849321 - RNA, 19 nt, Artificial Sequence
  Description of Artificial Sequence: Synthetic oligonucleotide
aacuuacagaaaggaaauu

SEQ ID NO: 2849322 - RNA, 19 nt, Artificial Sequence
  Description of Artificial Sequence: Synthetic oligonucleotide
gauguggaauuugaagucu

SEQ ID NO: 2849323 - RNA, 19 nt, Artificial Sequence
  Description of Artificial Sequence: Synthetic oligonucleotide
cucucucucucucucucac

SEQ ID NO: 2849324 - RNA, 19 nt, Artificial Sequence
  Description of Artificial Sequence: Synthetic oligonucleotide
cucucucucucucacucuc

SEQ ID NO: 2849325 - RNA, 19 nt, Artificial Sequence
  Description of Artificial Sequence: Synthetic oligonucleotide
agaugcucacgcucucucu

SEQ ID NO: 2849326 - RNA, 19 nt, Artificial Sequence
  Description of Artificial Sequence: Synthetic oligonucleotide
ucucucucucucacucucu

SEQ ID NO: 2849327 - RNA, 19 nt, Artificial Sequence
  Description of Artificial Sequence: Synthetic oligonucleotide
ucugucugcucuggcagga

SEQ ID NO: 2849328 - RNA, 19 nt, Artificial Sequence
  Description of Artificial Sequence: Synthetic oligonucleotide
agacaagugggugccacgu

SEQ ID NO: 2849329 - RNA, 19 nt, Artificial Sequence
  Description of Artificial Sequence: Synthetic oligonucleotide
guuucacaugagacaaagc

SEQ ID NO: 2849330 - RNA, 19 nt, Artificial Sequence
  Description of Artificial Sequence: Synthetic oligonucleotide
uacccagaauagacuuuca

SEQ ID NO: 2849331 - RNA, 19 nt, Artificial Sequence
  Description of Artificial Sequence: Synthetic oligonucleotide
ucucucucucacucucucu

SEQ ID NO: 2849332 - RNA, 19 nt, Artificial Sequence
  Description of Artificial Sequence: Synthetic oligonucleotide
caagacaagugggugccac

SEQ ID NO: 2849333 - RNA, 19 nt, Artificial Sequence
  Description of Artificial Sequence: Synthetic oligonucleotide
ucugggaaccggagcucgc

SEQ ID NO: 2849334 - RNA, 19 nt, Artificial Sequence
  Description of Artificial Sequence: Synthetic oligonucleotide
ucucucucucucucucucu

SEQ ID NO: 2849335 - RNA, 19 nt, Artificial Sequence
  Description of Artificial Sequence: Synthetic oligonucleotide
ucucucucucucucacucu

SEQ ID NO: 2849336 - RNA, 19 nt, Artificial Sequence
  Description of Artificial Sequence: Synthetic oligonucleotide
cgagagcaccccuaaaugg

SEQ ID NO: 2849337 - RNA, 19 nt, Artificial Sequence
  Description of Artificial Sequence: Synthetic oligonucleotide
agacaaagccagguugaug

SEQ ID NO: 2849338 - RNA, 19 nt, Artificial Sequence
  Description of Artificial Sequence: Synthetic oligonucleotide
ccacguuugcacaaucgag

SEQ ID NO: 2849339 - RNA, 19 nt, Artificial Sequence
  Description of Artificial Sequence: Synthetic oligonucleotide
ugaugggaagcaucugcuu

SEQ ID NO: 2849340 - RNA, 19 nt, Artificial Sequence
  Description of Artificial Sequence: Synthetic oligonucleotide
gaucuucauccuugaugac

SEQ ID NO: 2849341 - RNA, 19 nt, Artificial Sequence
  Description of Artificial Sequence: Synthetic oligonucleotide
ucacucucucucucucucu

SEQ ID NO: 2849342 - RNA, 19 nt, Artificial Sequence
  Description of Artificial Sequence: Synthetic oligonucleotide
acuuucaguuuaaaauaaa

SEQ ID NO: 2849343 - RNA, 19 nt, Artificial Sequence
  Description of Artificial Sequence: Synthetic oligonucleotide
aacaagccuuagauuacaa

SEQ ID NO: 2849344 - RNA, 19 nt, Artificial Sequence
  Description of Artificial Sequence: Synthetic oligonucleotide
agcucgcaacaccagccug

SEQ ID NO: 2849345 - RNA, 19 nt, Artificial Sequence
  Description of Artificial Sequence: Synthetic oligonucleotide
uacagaugcucacgcucuc

SEQ ID NO: 2849346 - RNA, 19 nt, Artificial Sequence
  Description of Artificial Sequence: Synthetic oligonucleotide
gcuacauugucucucucaa

SEQ ID NO: 2849347 - RNA, 19 nt, Artificial Sequence
  Description of Artificial Sequence: Synthetic oligonucleotide
ugggugccacguuugcaca

SEQ ID NO: 2849348 - RNA, 19 nt, Artificial Sequence
  Description of Artificial Sequence: Synthetic oligonucleotide
cucucucucucucucucuc

SEQ ID NO: 2849349 - RNA, 19 nt, Artificial Sequence
  Description of Artificial Sequence: Synthetic oligonucleotide
ucucucucucucucucacu

SEQ ID NO: 2849350 - RNA, 19 nt, Artificial Sequence
  Description of Artificial Sequence: Synthetic oligonucleotide
cauguccagaauguuucuc

SEQ ID NO: 2849351 - RNA, 19 nt, Artificial Sequence
  Description of Artificial Sequence: Synthetic oligonucleotide
gaauagacuuucaguuuaa

SEQ ID NO: 2849352 - RNA, 19 nt, Artificial Sequence
  Description of Artificial Sequence: Synthetic oligonucleotide
augcucacgcucucucucu

SEQ ID NO: 2849353 - RNA, 19 nt, Artificial Sequence
  Description of Artificial Sequence: Synthetic oligonucleotide
acucucucucucucucucu

SEQ ID NO: 2849354 - RNA, 19 nt, Artificial Sequence
  Description of Artificial Sequence: Synthetic oligonucleotide
aucugcuucaaggcuacau

SEQ ID NO: 2849355 - RNA, 19 nt, Artificial Sequence
  Description of Artificial Sequence: Synthetic oligonucleotide
cagaugcucacgcucucuc

SEQ ID NO: 2849356 - RNA, 19 nt, Artificial Sequence
  Description of Artificial Sequence: Synthetic oligonucleotide
auaaccacucagaggcuga

SEQ ID NO: 2849357 - RNA, 19 nt, Artificial Sequence
  Description of Artificial Sequence: Synthetic oligonucleotide
gcuucaaggcuacauuguc

SEQ ID NO: 2849358 - RNA, 19 nt, Artificial Sequence
  Description of Artificial Sequence: Synthetic oligonucleotide
ggagacaacaagccuuaga

SEQ ID NO: 2849359 - RNA, 19 nt, Artificial Sequence
  Description of Artificial Sequence: Synthetic oligonucleotide
cuucaaggcuacauugucu

SEQ ID NO: 2849360 - RNA, 19 nt, Artificial Sequence
  Description of Artificial Sequence: Synthetic oligonucleotide
cucucacucucucucucuc

SEQ ID NO: 2849361 - RNA, 19 nt, Artificial Sequence
  Description of Artificial Sequence: Synthetic oligonucleotide
cucucucucucacucucuc

SEQ ID NO: 2849362 - RNA, 19 nt, Artificial Sequence
  Description of Artificial Sequence: Synthetic oligonucleotide
cucuacgauguggaauuug

SEQ ID NO: 2849363 - RNA, 19 nt, Artificial Sequence
  Description of Artificial Sequence: Synthetic oligonucleotide
agucuuuguuucacaugag

SEQ ID NO: 2849364 - RNA, 19 nt, Artificial Sequence
  Description of Artificial Sequence: Synthetic oligonucleotide
cacucucucucucucucuc

SEQ ID NO: 2849365 - RNA, 19 nt, Artificial Sequence
  Description of Artificial Sequence: Synthetic oligonucleotide
ggcuacauugucucucuca

SEQ ID NO: 2849366 - RNA, 19 nt, Artificial Sequence
  Description of Artificial Sequence: Synthetic oligonucleotide
ggagcucgcaacaccagcc

SEQ ID NO: 2849367 - RNA, 19 nt, Artificial Sequence
  Description of Artificial Sequence: Synthetic oligonucleotide
gagagcaccccuaaauggu

SEQ ID NO: 2849368 - RNA, 19 nt, Artificial Sequence
  Description of Artificial Sequence: Synthetic oligonucleotide
ccaaagaaauuuaaaugua

SEQ ID NO: 2849369 - RNA, 19 nt, Artificial Sequence
  Description of Artificial Sequence: Synthetic oligonucleotide
uggcaguccugggagacaa

SEQ ID NO: 2849370 - RNA, 19 nt, Artificial Sequence
  Description of Artificial Sequence: Synthetic oligonucleotide
ucacgcucucucucucucu

SEQ ID NO: 2849371 - RNA, 19 nt, Artificial Sequence
  Description of Artificial Sequence: Synthetic oligonucleotide
cucucucacucucucucuc

SEQ ID NO: 2849372 - RNA, 19 nt, Artificial Sequence
  Description of Artificial Sequence: Synthetic oligonucleotide
aggcuacauugucucucuc

SEQ ID NO: 2849373 - RNA, 19 nt, Artificial Sequence
  Description of Artificial Sequence: Synthetic oligonucleotide
cucacgcucucucucucuc

SEQ ID NO: 2849374 - RNA, 19 nt, Artificial Sequence
  Description of Artificial Sequence: Synthetic oligonucleotide
ccagaauagacuuucaguu

SEQ ID NO: 2849375 - RNA, 19 nt, Artificial Sequence
  Description of Artificial Sequence: Synthetic oligonucleotide
cacgcucucucucucucuc

SEQ ID NO: 2849376 - RNA, 19 nt, Artificial Sequence
  Description of Artificial Sequence: Synthetic oligonucleotide
ugggaaccggagcucgcaa

SEQ ID NO: 2849377 - RNA, 19 nt, Artificial Sequence
  Description of Artificial Sequence: Synthetic oligonucleotide
gcucgcaacaccagccugg

SEQ ID NO: 2849378 - RNA, 19 nt, Artificial Sequence
  Description of Artificial Sequence: Synthetic oligonucleotide
uaaccacucagaggcugac

SEQ ID NO: 2849379 - RNA, 19 nt, Artificial Sequence
  Description of Artificial Sequence: Synthetic oligonucleotide
ggaaccggagcucgcaaca

SEQ ID NO: 2849380 - RNA, 19 nt, Artificial Sequence
  Description of Artificial Sequence: Synthetic oligonucleotide
cuggcaggaccacacuuca

SEQ ID NO: 2849381 - RNA, 19 nt, Artificial Sequence
  Description of Artificial Sequence: Synthetic oligonucleotide
cuacgauguggaauuugaa

SEQ ID NO: 2849382 - RNA, 19 nt, Artificial Sequence
  Description of Artificial Sequence: Synthetic oligonucleotide
caacaagccuuagauuaca

SEQ ID NO: 2849383 - RNA, 19 nt, Artificial Sequence
  Description of Artificial Sequence: Synthetic oligonucleotide
cacacuucauuaguuuuaa

SEQ ID NO: 2849384 - RNA, 19 nt, Artificial Sequence
  Description of Artificial Sequence: Synthetic oligonucleotide
accggagcucgcaacacca

SEQ ID NO: 2849385 - RNA, 19 nt, Artificial Sequence
  Description of Artificial Sequence: Synthetic oligonucleotide
cugggagacaacaagccuu

SEQ ID NO: 2849386 - RNA, 19 nt, Artificial Sequence
  Description of Artificial Sequence: Synthetic oligonucleotide
gccacguuugcacaaucga

SEQ ID NO: 2849387 - RNA, 19 nt, Artificial Sequence
  Description of Artificial Sequence: Synthetic oligonucleotide
caccccuaaaugguauaac

SEQ ID NO: 2849388 - RNA, 19 nt, Artificial Sequence
  Description of Artificial Sequence: Synthetic oligonucleotide
ucaagacaagugggugcca

SEQ ID NO: 2849389 - RNA, 19 nt, Artificial Sequence
  Description of Artificial Sequence: Synthetic oligonucleotide
ccccuaaaugguauaacca

SEQ ID NO: 2849390 - RNA, 19 nt, Artificial Sequence
  Description of Artificial Sequence: Synthetic oligonucleotide
gaaccggagcucgcaacac

SEQ ID NO: 2849391 - RNA, 19 nt, Artificial Sequence
  Description of Artificial Sequence: Synthetic oligonucleotide
ucugcucuggcaggaccac

SEQ ID NO: 2849392 - RNA, 19 nt, Artificial Sequence
  Description of Artificial Sequence: Synthetic oligonucleotide
caaagccagguugauggga

SEQ ID NO: 2849393 - RNA, 19 nt, Artificial Sequence
  Description of Artificial Sequence: Synthetic oligonucleotide
acagaugcucacgcucucu

SEQ ID NO: 2849394 - RNA, 19 nt, Artificial Sequence
  Description of Artificial Sequence: Synthetic oligonucleotide
agugggugccacguuugca

SEQ ID NO: 2849395 - RNA, 19 nt, Artificial Sequence
  Description of Artificial Sequence: Synthetic oligonucleotide
gaccacacuucauuaguuu

SEQ ID NO: 2849396 - RNA, 19 nt, Artificial Sequence
  Description of Artificial Sequence: Synthetic oligonucleotide
caaucgagagcaccccuaa

SEQ ID NO: 2849397 - RNA, 19 nt, Artificial Sequence
  Description of Artificial Sequence: Synthetic oligonucleotide
ucgcaacaccagccuggag

SEQ ID NO: 2849398 - RNA, 19 nt, Artificial Sequence
  Description of Artificial Sequence: Synthetic oligonucleotide
agcaccccuaaaugguaua

SEQ ID NO: 2849399 - RNA, 19 nt, Artificial Sequence
  Description of Artificial Sequence: Synthetic oligonucleotide
cagaggcugaccaccaugu

SEQ ID NO: 2849400 - RNA, 19 nt, Artificial Sequence
  Description of Artificial Sequence: Synthetic oligonucleotide
cagaauagacuuucaguuu

SEQ ID NO: 2849401 - RNA, 19 nt, Artificial Sequence
  Description of Artificial Sequence: Synthetic oligonucleotide
acaaucgagagcaccccua

SEQ ID NO: 2849402 - RNA, 19 nt, Artificial Sequence
  Description of Artificial Sequence: Synthetic oligonucleotide
auguggaauuugaagucuu

SEQ ID NO: 2849403 - RNA, 19 nt, Artificial Sequence
  Description of Artificial Sequence: Synthetic oligonucleotide
acucagaggcugaccacca

SEQ ID NO: 2849404 - RNA, 19 nt, Artificial Sequence
  Description of Artificial Sequence: Synthetic oligonucleotide
ccuaaaugguauaaccacu

SEQ ID NO: 2849405 - RNA, 19 nt, Artificial Sequence
  Description of Artificial Sequence: Synthetic oligonucleotide
gucugcucuggcaggacca

SEQ ID NO: 2849406 - RNA, 19 nt, Artificial Sequence
  Description of Artificial Sequence: Synthetic oligonucleotide
ugggaagcaucugcuucaa

SEQ ID NO: 2849407 - RNA, 19 nt, Artificial Sequence
  Description of Artificial Sequence: Synthetic oligonucleotide
acgcucucucucucucucu

SEQ ID NO: 2849408 - RNA, 19 nt, Artificial Sequence
  Description of Artificial Sequence: Synthetic oligonucleotide
agagcaccccuaaauggua

SEQ ID NO: 2849409 - RNA, 19 nt, Artificial Sequence
  Description of Artificial Sequence: Synthetic oligonucleotide
cccagaauagacuuucagu

SEQ ID NO: 2849410 - RNA, 19 nt, Artificial Sequence
  Description of Artificial Sequence: Synthetic oligonucleotide
accagccuggagaucuuca

SEQ ID NO: 2849411 - RNA, 19 nt, Artificial Sequence
  Description of Artificial Sequence: Synthetic oligonucleotide
uggcaggaccacacuucau

SEQ ID NO: 2849412 - RNA, 19 nt, Artificial Sequence
  Description of Artificial Sequence: Synthetic oligonucleotide
gagcucgcaacaccagccu

SEQ ID NO: 2849413 - RNA, 19 nt, Artificial Sequence
  Description of Artificial Sequence: Synthetic oligonucleotide
caugagacaaagccagguu

SEQ ID NO: 2849414 - RNA, 19 nt, Artificial Sequence
  Description of Artificial Sequence: Synthetic oligonucleotide
gcacaaucgagagcacccc

SEQ ID NO: 2849415 - RNA, 19 nt, Artificial Sequence
  Description of Artificial Sequence: Synthetic oligonucleotide
gggaaccggagcucgcaac

SEQ ID NO: 2849416 - RNA, 19 nt, Artificial Sequence
  Description of Artificial Sequence: Synthetic oligonucleotide
gguugaugggaagcaucug

SEQ ID NO: 2849417 - RNA, 19 nt, Artificial Sequence
  Description of Artificial Sequence: Synthetic oligonucleotide
cccaaaguacaacuaccca

SEQ ID NO: 2849418 - RNA, 19 nt, Artificial Sequence
  Description of Artificial Sequence: Synthetic oligonucleotide
caguccugggagacaacaa

SEQ ID NO: 2849419 - RNA, 19 nt, Artificial Sequence
  Description of Artificial Sequence: Synthetic oligonucleotide
gugccacguuugcacaauc

SEQ ID NO: 2849420 - RNA, 19 nt, Artificial Sequence
  Description of Artificial Sequence: Synthetic oligonucleotide
caccauguccagaauguuu

SEQ ID NO: 2849421 - RNA, 19 nt, Artificial Sequence
  Description of Artificial Sequence: Synthetic oligonucleotide
gcaucugcuucaaggcuac

SEQ ID NO: 2849422 - RNA, 19 nt, Artificial Sequence
  Description of Artificial Sequence: Synthetic oligonucleotide
auggcaguccugggagaca

SEQ ID NO: 2849423 - RNA, 19 nt, Artificial Sequence
  Description of Artificial Sequence: Synthetic oligonucleotide
cguuugcacaaucgagagc

SEQ ID NO: 2849424 - RNA, 19 nt, Artificial Sequence
  Description of Artificial Sequence: Synthetic oligonucleotide
gggaagcaucugcuucaag

SEQ ID NO: 2849425 - RNA, 19 nt, Artificial Sequence
  Description of Artificial Sequence: Synthetic oligonucleotide
gcaacaccagccuggagau

SEQ ID NO: 2849426 - RNA, 19 nt, Artificial Sequence
  Description of Artificial Sequence: Synthetic oligonucleotide
ccacacuucauuaguuuua

SEQ ID NO: 2849427 - RNA, 19 nt, Artificial Sequence
  Description of Artificial Sequence: Synthetic oligonucleotide
gccagguugaugggaagca

SEQ ID NO: 2849428 - RNA, 19 nt, Artificial Sequence
  Description of Artificial Sequence: Synthetic oligonucleotide
cacaaucgagagcaccccu

SEQ ID NO: 2849429 - RNA, 19 nt, Artificial Sequence
  Description of Artificial Sequence: Synthetic oligonucleotide
cucgcaacaccagccugga

SEQ ID NO: 2849430 - RNA, 19 nt, Artificial Sequence
  Description of Artificial Sequence: Synthetic oligonucleotide
cugggaaccggagcucgca

SEQ ID NO: 2849431 - RNA, 19 nt, Artificial Sequence
  Description of Artificial Sequence: Synthetic oligonucleotide
cugucugcucuggcaggac

SEQ ID NO: 2849432 - RNA, 19 nt, Artificial Sequence
  Description of Artificial Sequence: Synthetic oligonucleotide
ccacucagaggcugaccac

SEQ ID NO: 2849433 - RNA, 19 nt, Artificial Sequence
  Description of Artificial Sequence: Synthetic oligonucleotide
gccuuagauuacaaagucu

SEQ ID NO: 2849434 - RNA, 19 nt, Artificial Sequence
  Description of Artificial Sequence: Synthetic oligonucleotide
guauaaccacucagaggcu

SEQ ID NO: 2849435 - RNA, 19 nt, Artificial Sequence
  Description of Artificial Sequence: Synthetic oligonucleotide
cggagcucgcaacaccagc

SEQ ID NO: 2849436 - RNA, 19 nt, Artificial Sequence
  Description of Artificial Sequence: Synthetic oligonucleotide
gacaagugggugccacguu

SEQ ID NO: 2849437 - RNA, 19 nt, Artificial Sequence
  Description of Artificial Sequence: Synthetic oligonucleotide
gagcaccccuaaaugguau

SEQ ID NO: 2849438 - RNA, 19 nt, Artificial Sequence
  Description of Artificial Sequence: Synthetic oligonucleotide
gggagacaacaagccuuag

SEQ ID NO: 2849439 - RNA, 19 nt, Artificial Sequence
  Description of Artificial Sequence: Synthetic oligonucleotide
gcaccccuaaaugguauaa

SEQ ID NO: 2849440 - RNA, 19 nt, Artificial Sequence
  Description of Artificial Sequence: Synthetic oligonucleotide
ccggagcucgcaacaccag

SEQ ID NO: 2849441 - RNA, 19 nt, Artificial Sequence
  Description of Artificial Sequence: Synthetic oligonucleotide
cucucucucucucucucuu

SEQ ID NO: 2849442 - RNA, 19 nt, Artificial Sequence
  Description of Artificial Sequence: Synthetic oligonucleotide
ccagaauguuucucugucu

SEQ ID NO: 2849443 - RNA, 19 nt, Artificial Sequence
  Description of Artificial Sequence: Synthetic oligonucleotide
caacaccagccuggagauc

SEQ ID NO: 2849444 - RNA, 19 nt, Artificial Sequence
  Description of Artificial Sequence: Synthetic oligonucleotide
gggugccacguuugcacaa

SEQ ID NO: 2849445 - RNA, 19 nt, Artificial Sequence
  Description of Artificial Sequence: Synthetic oligonucleotide
ccugggagacaacaagccu

SEQ ID NO: 2849446 - RNA, 19 nt, Artificial Sequence
  Description of Artificial Sequence: Synthetic oligonucleotide
ggagaucuucauccuugau

SEQ ID NO: 2849447 - RNA, 19 nt, Artificial Sequence
  Description of Artificial Sequence: Synthetic oligonucleotide
cgcucucucucucucucuc

SEQ ID NO: 2849448 - RNA, 19 nt, Artificial Sequence
  Description of Artificial Sequence: Synthetic oligonucleotide
cugcucuggcaggaccaca

SEQ ID NO: 2849449 - RNA, 19 nt, Artificial Sequence
  Description of Artificial Sequence: Synthetic oligonucleotide
gcugaccaccauguccaga

SEQ ID NO: 2849450 - RNA, 19 nt, Artificial Sequence
  Description of Artificial Sequence: Synthetic oligonucleotide
gcucucucucucucucucu

SEQ ID NO: 2849451 - RNA, 19 nt, Artificial Sequence
  Description of Artificial Sequence: Synthetic oligonucleotide
gccuggagaucuucauccu

SEQ ID NO: 2849452 - RNA, 19 nt, Artificial Sequence
  Description of Artificial Sequence: Synthetic oligonucleotide
ggaccacacuucauuaguu

SEQ ID NO: 2849453 - RNA, 19 nt, Artificial Sequence
  Description of Artificial Sequence: Synthetic oligonucleotide
caucugcuucaaggcuaca

SEQ ID NO: 2849454 - RNA, 19 nt, Artificial Sequence
  Description of Artificial Sequence: Synthetic oligonucleotide
gcucacgcucucucucucu

SEQ ID NO: 2849455 - RNA, 19 nt, Artificial Sequence
  Description of Artificial Sequence: Synthetic oligonucleotide
cucagaggcugaccaccau

SEQ ID NO: 2849456 - RNA, 19 nt, Artificial Sequence
  Description of Artificial Sequence: Synthetic oligonucleotide
cuucauccuugaugacauu

SEQ ID NO: 2849457 - RNA, 19 nt, Artificial Sequence
  Description of Artificial Sequence: Synthetic oligonucleotide
ggugccacguuugcacaau

SEQ ID NO: 2849458 - RNA, 19 nt, Artificial Sequence
  Description of Artificial Sequence: Synthetic oligonucleotide
ggcaguccugggagacaac

SEQ ID NO: 2849459 - RNA, 19 nt, Artificial Sequence
  Description of Artificial Sequence: Synthetic oligonucleotide
ccagccuggagaucuucau

SEQ ID NO: 2849460 - RNA, 19 nt, Artificial Sequence
  Description of Artificial Sequence: Synthetic oligonucleotide
ccagguugaugggaagcau

SEQ ID NO: 2849461 - RNA, 19 nt, Artificial Sequence
  Description of Artificial Sequence: Synthetic oligonucleotide
ccaccauguccagaauguu

SEQ ID NO: 2849462 - RNA, 19 nt, Artificial Sequence
  Description of Artificial Sequence: Synthetic oligonucleotide
acaaugcaaaucuauacac

SEQ ID NO: 2849463 - RNA, 19 nt, Artificial Sequence
  Description of Artificial Sequence: Synthetic oligonucleotide
aaucuauacacauuccuca

SEQ ID NO: 2849464 - RNA, 19 nt, Artificial Sequence
  Description of Artificial Sequence: Synthetic oligonucleotide
aaugcaaaucuauacacau

SEQ ID NO: 2849465 - RNA, 19 nt, Artificial Sequence
  Description of Artificial Sequence: Synthetic oligonucleotide
ugcaaaucuauacacauuc

SEQ ID NO: 2849466 - RNA, 19 nt, Artificial Sequence
  Description of Artificial Sequence: Synthetic oligonucleotide
agacaaugcaaaucuauac

SEQ ID NO: 2849467 - RNA, 19 nt, Artificial Sequence
  Description of Artificial Sequence: Synthetic oligonucleotide
aaaucuauacacauuccuc

SEQ ID NO: 2849468 - RNA, 19 nt, Artificial Sequence
  Description of Artificial Sequence: Synthetic oligonucleotide
auacagagaauguauguuc

SEQ ID NO: 2849469 - RNA, 19 nt, Artificial Sequence
  Description of Artificial Sequence: Synthetic oligonucleotide
aauguauguucccuaucuc

SEQ ID NO: 2849470 - RNA, 19 nt, Artificial Sequence
  Description of Artificial Sequence: Synthetic oligonucleotide
uucccuaucucacacacac

SEQ ID NO: 2849471 - RNA, 19 nt, Artificial Sequence
  Description of Artificial Sequence: Synthetic oligonucleotide
uacagagaauguauguucc

SEQ ID NO: 2849472 - RNA, 19 nt, Artificial Sequence
  Description of Artificial Sequence: Synthetic oligonucleotide
acacagacaaugcaaaucu

SEQ ID NO: 2849473 - RNA, 19 nt, Artificial Sequence
  Description of Artificial Sequence: Synthetic oligonucleotide
uguauguucccuaucucac

SEQ ID NO: 2849474 - RNA, 19 nt, Artificial Sequence
  Description of Artificial Sequence: Synthetic oligonucleotide
gacaaugcaaaucuauaca

SEQ ID NO: 2849475 - RNA, 19 nt, Artificial Sequence
  Description of Artificial Sequence: Synthetic oligonucleotide
uacacacauacagagaaug

SEQ ID NO: 2849476 - RNA, 19 nt, Artificial Sequence
  Description of Artificial Sequence: Synthetic oligonucleotide
acagagaauguauguuccc

SEQ ID NO: 2849477 - RNA, 19 nt, Artificial Sequence
  Description of Artificial Sequence: Synthetic oligonucleotide
cacacacagucacagaugg

SEQ ID NO: 2849478 - RNA, 19 nt, Artificial Sequence
  Description of Artificial Sequence: Synthetic oligonucleotide
cuaucucacacacacaguc

SEQ ID NO: 2849479 - RNA, 19 nt, Artificial Sequence
  Description of Artificial Sequence: Synthetic oligonucleotide
uauguucccuaucucacac

SEQ ID NO: 2849480 - RNA, 19 nt, Artificial Sequence
  Description of Artificial Sequence: Synthetic oligonucleotide
uguucccuaucucacacac

SEQ ID NO: 2849481 - RNA, 19 nt, Artificial Sequence
  Description of Artificial Sequence: Synthetic oligonucleotide
acauacagagaauguaugu

SEQ ID NO: 2849482 - RNA, 19 nt, Artificial Sequence
  Description of Artificial Sequence: Synthetic oligonucleotide
auguauguucccuaucuca

SEQ ID NO: 2849483 - RNA, 19 nt, Artificial Sequence
  Description of Artificial Sequence: Synthetic oligonucleotide
agaauguauguucccuauc

SEQ ID NO: 2849484 - RNA, 19 nt, Artificial Sequence
  Description of Artificial Sequence: Synthetic oligonucleotide
gaauguauguucccuaucu

SEQ ID NO: 2849485 - RNA, 19 nt, Artificial Sequence
  Description of Artificial Sequence: Synthetic oligonucleotide
uaucucacacacacaguca

SEQ ID NO: 2849486 - RNA, 19 nt, Artificial Sequence
  Description of Artificial Sequence: Synthetic oligonucleotide
cacacagucacagauggac

SEQ ID NO: 2849487 - RNA, 19 nt, Artificial Sequence
  Description of Artificial Sequence: Synthetic oligonucleotide
gucacagauggacacagac

SEQ ID NO: 2849488 - RNA, 19 nt, Artificial Sequence
  Description of Artificial Sequence: Synthetic oligonucleotide
cagauggacacagacaaug

SEQ ID NO: 2849489 - RNA, 19 nt, Artificial Sequence
  Description of Artificial Sequence: Synthetic oligonucleotide
cacagucacagauggacac

SEQ ID NO: 2849490 - RNA, 19 nt, Artificial Sequence
  Description of Artificial Sequence: Synthetic oligonucleotide
gacacagacaaugcaaauc

SEQ ID NO: 2849491 - RNA, 19 nt, Artificial Sequence
  Description of Artificial Sequence: Synthetic oligonucleotide
caaugcaaaucuauacaca

SEQ ID NO: 2849492 - RNA, 19 nt, Artificial Sequence
  Description of Artificial Sequence: Synthetic oligonucleotide
agagaauguauguucccua

SEQ ID NO: 2849493 - RNA, 19 nt, Artificial Sequence
  Description of Artificial Sequence: Synthetic oligonucleotide
cccuaucucacacacacag

SEQ ID NO: 2849494 - RNA, 19 nt, Artificial Sequence
  Description of Artificial Sequence: Synthetic oligonucleotide
acagacaaugcaaaucuau

SEQ ID NO: 2849495 - RNA, 19 nt, Artificial Sequence
  Description of Artificial Sequence: Synthetic oligonucleotide
caaaucuauacacauuccu

SEQ ID NO: 2849496 - RNA, 19 nt, Artificial Sequence
  Description of Artificial Sequence: Synthetic oligonucleotide
guauguucccuaucucaca

SEQ ID NO: 2849497 - RNA, 19 nt, Artificial Sequence
  Description of Artificial Sequence: Synthetic oligonucleotide
cagacaaugcaaaucuaua

SEQ ID NO: 2849498 - RNA, 19 nt, Artificial Sequence
  Description of Artificial Sequence: Synthetic oligonucleotide
gagaauguauguucccuau

SEQ ID NO: 2849499 - RNA, 19 nt, Artificial Sequence
  Description of Artificial Sequence: Synthetic oligonucleotide
acacacauacagagaaugu

SEQ ID NO: 2849500 - RNA, 19 nt, Artificial Sequence
  Description of Artificial Sequence: Synthetic oligonucleotide
acacacacagucacagaug

SEQ ID NO: 2849501 - RNA, 19 nt, Artificial Sequence
  Description of Artificial Sequence: Synthetic oligonucleotide
ucccuaucucacacacaca

SEQ ID NO: 2849502 - RNA, 19 nt, Artificial Sequence
  Description of Artificial Sequence: Synthetic oligonucleotide
cacacauacagagaaugua

SEQ ID NO: 2849503 - RNA, 19 nt, Artificial Sequence
  Description of Artificial Sequence: Synthetic oligonucleotide
gcaaaucuauacacauucc

SEQ ID NO: 2849504 - RNA, 19 nt, Artificial Sequence
  Description of Artificial Sequence: Synthetic oligonucleotide
auguucccuaucucacaca

SEQ ID NO: 2849505 - RNA, 19 nt, Artificial Sequence
  Description of Artificial Sequence: Synthetic oligonucleotide
acagucacagauggacaca

SEQ ID NO: 2849506 - RNA, 19 nt, Artificial Sequence
  Description of Artificial Sequence: Synthetic oligonucleotide
acacagucacagauggaca

SEQ ID NO: 2849507 - RNA, 19 nt, Artificial Sequence
  Description of Artificial Sequence: Synthetic oligonucleotide
cauacagagaauguauguu

SEQ ID NO: 2849508 - RNA, 19 nt, Artificial Sequence
  Description of Artificial Sequence: Synthetic oligonucleotide
augcaaaucuauacacauu

SEQ ID NO: 2849509 - RNA, 19 nt, Artificial Sequence
  Description of Artificial Sequence: Synthetic oligonucleotide
cagagaauguauguucccu

SEQ ID NO: 2849510 - RNA, 19 nt, Artificial Sequence
  Description of Artificial Sequence: Synthetic oligonucleotide
cacagacaaugcaaaucua

SEQ ID NO: 2849511 - RNA, 19 nt, Artificial Sequence
  Description of Artificial Sequence: Synthetic oligonucleotide
acagauggacacagacaau

SEQ ID NO: 2849512 - RNA, 19 nt, Artificial Sequence
  Description of Artificial Sequence: Synthetic oligonucleotide
agucacagauggacacaga

SEQ ID NO: 2849513 - RNA, 19 nt, Artificial Sequence
  Description of Artificial Sequence: Synthetic oligonucleotide
guucccuaucucacacaca

SEQ ID NO: 2849514 - RNA, 19 nt, Artificial Sequence
  Description of Artificial Sequence: Synthetic oligonucleotide
acacacagucacagaugga

SEQ ID NO: 2849515 - RNA, 19 nt, Artificial Sequence
  Description of Artificial Sequence: Synthetic oligonucleotide
ccuaucucacacacacagu

SEQ ID NO: 2849516 - RNA, 19 nt, Artificial Sequence
  Description of Artificial Sequence: Synthetic oligonucleotide
uucaaaaugaauuuugucc

SEQ ID NO: 2849517 - RNA, 19 nt, Artificial Sequence
  Description of Artificial Sequence: Synthetic oligonucleotide
aguuccauaauacauaaac

SEQ ID NO: 2849518 - RNA, 19 nt, Artificial Sequence
  Description of Artificial Sequence: Synthetic oligonucleotide
aauacauaaacugaagaac

SEQ ID NO: 2849519 - RNA, 19 nt, Artificial Sequence
  Description of Artificial Sequence: Synthetic oligonucleotide
aaaguugucuagcagaaag

SEQ ID NO: 2849520 - RNA, 19 nt, Artificial Sequence
  Description of Artificial Sequence: Synthetic oligonucleotide
aauuuucuaagucagauuu

SEQ ID NO: 2849521 - RNA, 19 nt, Artificial Sequence
  Description of Artificial Sequence: Synthetic oligonucleotide
aaugauaguaucuguaugu

SEQ ID NO: 2849522 - RNA, 19 nt, Artificial Sequence
  Description of Artificial Sequence: Synthetic oligonucleotide
auuagcugaacauacauug

SEQ ID NO: 2849523 - RNA, 19 nt, Artificial Sequence
  Description of Artificial Sequence: Synthetic oligonucleotide
aauuucaugaacaguauuc

SEQ ID NO: 2849524 - RNA, 19 nt, Artificial Sequence
  Description of Artificial Sequence: Synthetic oligonucleotide
ucaucuaagagucucauaa

SEQ ID NO: 2849525 - RNA, 19 nt, Artificial Sequence
  Description of Artificial Sequence: Synthetic oligonucleotide
augaacaguauucauacuc

SEQ ID NO: 2849526 - RNA, 19 nt, Artificial Sequence
  Description of Artificial Sequence: Synthetic oligonucleotide
aaaagaacagcagaacuuc

SEQ ID NO: 2849527 - RNA, 19 nt, Artificial Sequence
  Description of Artificial Sequence: Synthetic oligonucleotide
gauguuaacaccgaaauca

SEQ ID NO: 2849528 - RNA, 19 nt, Artificial Sequence
  Description of Artificial Sequence: Synthetic oligonucleotide
uguuagaccuuucaaaaug

SEQ ID NO: 2849529 - RNA, 19 nt, Artificial Sequence
  Description of Artificial Sequence: Synthetic oligonucleotide
aagaacguggcugaaaccg

SEQ ID NO: 2849530 - RNA, 19 nt, Artificial Sequence
  Description of Artificial Sequence: Synthetic oligonucleotide
aaaccugauguucugaaug

SEQ ID NO: 2849531 - RNA, 19 nt, Artificial Sequence
  Description of Artificial Sequence: Synthetic oligonucleotide
cauaaacugaagaacgugg

SEQ ID NO: 2849532 - RNA, 19 nt, Artificial Sequence
  Description of Artificial Sequence: Synthetic oligonucleotide
aaggcguccagcuucuccc

SEQ ID NO: 2849533 - RNA, 19 nt, Artificial Sequence
  Description of Artificial Sequence: Synthetic oligonucleotide
ucuauuucuggaaaccugc

SEQ ID NO: 2849534 - RNA, 19 nt, Artificial Sequence
  Description of Artificial Sequence: Synthetic oligonucleotide
uaauacauaaacugaagaa

SEQ ID NO: 2849535 - RNA, 19 nt, Artificial Sequence
  Description of Artificial Sequence: Synthetic oligonucleotide
uccauaauacauaaacuga

SEQ ID NO: 2849536 - RNA, 19 nt, Artificial Sequence
  Description of Artificial Sequence: Synthetic oligonucleotide
uucauacucaguucuauag

SEQ ID NO: 2849537 - RNA, 19 nt, Artificial Sequence
  Description of Artificial Sequence: Synthetic oligonucleotide
cagaugaucauuauccagg

SEQ ID NO: 2849538 - RNA, 19 nt, Artificial Sequence
  Description of Artificial Sequence: Synthetic oligonucleotide
auacauaaacugaagaacg

SEQ ID NO: 2849539 - RNA, 19 nt, Artificial Sequence
  Description of Artificial Sequence: Synthetic oligonucleotide
uuggcuaacagaaaagaac

SEQ ID NO: 2849540 - RNA, 19 nt, Artificial Sequence
  Description of Artificial Sequence: Synthetic oligonucleotide
agucucauaauuucugcac

SEQ ID NO: 2849541 - RNA, 19 nt, Artificial Sequence
  Description of Artificial Sequence: Synthetic oligonucleotide
ucaaagcucagauaggaca

SEQ ID NO: 2849542 - RNA, 19 nt, Artificial Sequence
  Description of Artificial Sequence: Synthetic oligonucleotide
auaauacauaaacugaaga

SEQ ID NO: 2849543 - RNA, 19 nt, Artificial Sequence
  Description of Artificial Sequence: Synthetic oligonucleotide
aucaaacaaaaccugaugu

SEQ ID NO: 2849544 - RNA, 19 nt, Artificial Sequence
  Description of Artificial Sequence: Synthetic oligonucleotide
accgaaaucaucuaagagu

SEQ ID NO: 2849545 - RNA, 19 nt, Artificial Sequence
  Description of Artificial Sequence: Synthetic oligonucleotide
uugucuagcagaaaggcgu

SEQ ID NO: 2849546 - RNA, 19 nt, Artificial Sequence
  Description of Artificial Sequence: Synthetic oligonucleotide
uucuauaguuccauaauac

SEQ ID NO: 2849547 - RNA, 19 nt, Artificial Sequence
  Description of Artificial Sequence: Synthetic oligonucleotide
aguauucauacucaguucu

SEQ ID NO: 2849548 - RNA, 19 nt, Artificial Sequence
  Description of Artificial Sequence: Synthetic oligonucleotide
ggagucaucaaacaaaacc

SEQ ID NO: 2849549 - RNA, 19 nt, Artificial Sequence
  Description of Artificial Sequence: Synthetic oligonucleotide
auacauugcagccugaaga

SEQ ID NO: 2849550 - RNA, 19 nt, Artificial Sequence
  Description of Artificial Sequence: Synthetic oligonucleotide
ugcacaauuuucuaaguca

SEQ ID NO: 2849551 - RNA, 19 nt, Artificial Sequence
  Description of Artificial Sequence: Synthetic oligonucleotide
augaucauuauccagguaa

SEQ ID NO: 2849552 - RNA, 19 nt, Artificial Sequence
  Description of Artificial Sequence: Synthetic oligonucleotide
uucuaagucagauuuuggc

SEQ ID NO: 2849553 - RNA, 19 nt, Artificial Sequence
  Description of Artificial Sequence: Synthetic oligonucleotide
cugauguucugaaugauag

SEQ ID NO: 2849554 - RNA, 19 nt, Artificial Sequence
  Description of Artificial Sequence: Synthetic oligonucleotide
aaaccgguagcuguuagac

SEQ ID NO: 2849555 - RNA, 19 nt, Artificial Sequence
  Description of Artificial Sequence: Synthetic oligonucleotide
aagaauuucaugaacagua

SEQ ID NO: 2849556 - RNA, 19 nt, Artificial Sequence
  Description of Artificial Sequence: Synthetic oligonucleotide
agaaaagaacagcagaacu

SEQ ID NO: 2849557 - RNA, 19 nt, Artificial Sequence
  Description of Artificial Sequence: Synthetic oligonucleotide
agagucucauaauuucugc

SEQ ID NO: 2849558 - RNA, 19 nt, Artificial Sequence
  Description of Artificial Sequence: Synthetic oligonucleotide
uucuauuagcugaacauac

SEQ ID NO: 2849559 - RNA, 19 nt, Artificial Sequence
  Description of Artificial Sequence: Synthetic oligonucleotide
ucauuauccagguaagaca

SEQ ID NO: 2849560 - RNA, 19 nt, Artificial Sequence
  Description of Artificial Sequence: Synthetic oligonucleotide
ucuaagucagauuuuggcu

SEQ ID NO: 2849561 - RNA, 19 nt, Artificial Sequence
  Description of Artificial Sequence: Synthetic oligonucleotide
ugaacaguauucauacuca

SEQ ID NO: 2849562 - RNA, 19 nt, Artificial Sequence
  Description of Artificial Sequence: Synthetic oligonucleotide
aacuucaccacuucuauua

SEQ ID NO: 2849563 - RNA, 19 nt, Artificial Sequence
  Description of Artificial Sequence: Synthetic oligonucleotide
uucugcacaauuuucuaag

SEQ ID NO: 2849564 - RNA, 19 nt, Artificial Sequence
  Description of Artificial Sequence: Synthetic oligonucleotide
uauaguuccauaauacaua

SEQ ID NO: 2849565 - RNA, 19 nt, Artificial Sequence
  Description of Artificial Sequence: Synthetic oligonucleotide
auuucuggaaaccugcuca

SEQ ID NO: 2849566 - RNA, 19 nt, Artificial Sequence
  Description of Artificial Sequence: Synthetic oligonucleotide
aguugucuagcagaaaggc

SEQ ID NO: 2849567 - RNA, 19 nt, Artificial Sequence
  Description of Artificial Sequence: Synthetic oligonucleotide
auaguaucuguaugucucc

SEQ ID NO: 2849568 - RNA, 19 nt, Artificial Sequence
  Description of Artificial Sequence: Synthetic oligonucleotide
ugaagaacguggcugaaac

SEQ ID NO: 2849569 - RNA, 19 nt, Artificial Sequence
  Description of Artificial Sequence: Synthetic oligonucleotide
cuaacagaaaagaacagca

SEQ ID NO: 2849570 - RNA, 19 nt, Artificial Sequence
  Description of Artificial Sequence: Synthetic oligonucleotide
aucauuauccagguaagac

SEQ ID NO: 2849571 - RNA, 19 nt, Artificial Sequence
  Description of Artificial Sequence: Synthetic oligonucleotide
ucuauaguuccauaauaca

SEQ ID NO: 2849572 - RNA, 19 nt, Artificial Sequence
  Description of Artificial Sequence: Synthetic oligonucleotide
uaagacaugagcuucucaa

SEQ ID NO: 2849573 - RNA, 19 nt, Artificial Sequence
  Description of Artificial Sequence: Synthetic oligonucleotide
cauaauacauaaacugaag

SEQ ID NO: 2849574 - RNA, 19 nt, Artificial Sequence
  Description of Artificial Sequence: Synthetic oligonucleotide
uggaaaccugcucagauga

SEQ ID NO: 2849575 - RNA, 19 nt, Artificial Sequence
  Description of Artificial Sequence: Synthetic oligonucleotide
uccagguaagacaugagcu

SEQ ID NO: 2849576 - RNA, 19 nt, Artificial Sequence
  Description of Artificial Sequence: Synthetic oligonucleotide
uaacagaaaagaacagcag

SEQ ID NO: 2849577 - RNA, 19 nt, Artificial Sequence
  Description of Artificial Sequence: Synthetic oligonucleotide
uuuucuaagucagauuuug

SEQ ID NO: 2849578 - RNA, 19 nt, Artificial Sequence
  Description of Artificial Sequence: Synthetic oligonucleotide
cuguaugucuccaucgucg

SEQ ID NO: 2849579 - RNA, 19 nt, Artificial Sequence
  Description of Artificial Sequence: Synthetic oligonucleotide
acucccucgauguuaacac

SEQ ID NO: 2849580 - RNA, 19 nt, Artificial Sequence
  Description of Artificial Sequence: Synthetic oligonucleotide
auaaacugaagaacguggc

SEQ ID NO: 2849581 - RNA, 19 nt, Artificial Sequence
  Description of Artificial Sequence: Synthetic oligonucleotide
uacucaguucuauaguucc

SEQ ID NO: 2849582 - RNA, 19 nt, Artificial Sequence
  Description of Artificial Sequence: Synthetic oligonucleotide
acaguauucauacucaguu

SEQ ID NO: 2849583 - RNA, 19 nt, Artificial Sequence
  Description of Artificial Sequence: Synthetic oligonucleotide
caugucgcagccaagacug

SEQ ID NO: 2849584 - RNA, 19 nt, Artificial Sequence
  Description of Artificial Sequence: Synthetic oligonucleotide
ucagaugaucauuauccag

SEQ ID NO: 2849585 - RNA, 19 nt, Artificial Sequence
  Description of Artificial Sequence: Synthetic oligonucleotide
ugaucauuauccagguaag

SEQ ID NO: 2849586 - RNA, 19 nt, Artificial Sequence
  Description of Artificial Sequence: Synthetic oligonucleotide
aucgucgucuaucaugucg

SEQ ID NO: 2849587 - RNA, 19 nt, Artificial Sequence
  Description of Artificial Sequence: Synthetic oligonucleotide
uuucuaagucagauuuugg

SEQ ID NO: 2849588 - RNA, 19 nt, Artificial Sequence
  Description of Artificial Sequence: Synthetic oligonucleotide
gauaguaucuguaugucuc

SEQ ID NO: 2849589 - RNA, 19 nt, Artificial Sequence
  Description of Artificial Sequence: Synthetic oligonucleotide
gaaugauaguaucuguaug

SEQ ID NO: 2849590 - RNA, 19 nt, Artificial Sequence
  Description of Artificial Sequence: Synthetic oligonucleotide
cugaacauacauugcagcc

SEQ ID NO: 2849591 - RNA, 19 nt, Artificial Sequence
  Description of Artificial Sequence: Synthetic oligonucleotide
ucgauguuaacaccgaaau

SEQ ID NO: 2849592 - RNA, 19 nt, Artificial Sequence
  Description of Artificial Sequence: Synthetic oligonucleotide
ucuaucaugucgcagccaa

SEQ ID NO: 2849593 - RNA, 19 nt, Artificial Sequence
  Description of Artificial Sequence: Synthetic oligonucleotide
acuucuauuagcugaacau

SEQ ID NO: 2849594 - RNA, 19 nt, Artificial Sequence
  Description of Artificial Sequence: Synthetic oligonucleotide
cuaagagucucauaauuuc

SEQ ID NO: 2849595 - RNA, 19 nt, Artificial Sequence
  Description of Artificial Sequence: Synthetic oligonucleotide
ucccucgauguuaacaccg

SEQ ID NO: 2849596 - RNA, 19 nt, Artificial Sequence
  Description of Artificial Sequence: Synthetic oligonucleotide
uuucaaaaugaauuuuguc

SEQ ID NO: 2849597 - RNA, 19 nt, Artificial Sequence
  Description of Artificial Sequence: Synthetic oligonucleotide
ucgucuaucaugucgcagc

SEQ ID NO: 2849598 - RNA, 19 nt, Artificial Sequence
  Description of Artificial Sequence: Synthetic oligonucleotide
caaagcucagauaggacag

SEQ ID NO: 2849599 - RNA, 19 nt, Artificial Sequence
  Description of Artificial Sequence: Synthetic oligonucleotide
gaacauacauugcagccug

SEQ ID NO: 2849600 - RNA, 19 nt, Artificial Sequence
  Description of Artificial Sequence: Synthetic oligonucleotide
uaagagucucauaauuucu

SEQ ID NO: 2849601 - RNA, 19 nt, Artificial Sequence
  Description of Artificial Sequence: Synthetic oligonucleotide
ugaaugauaguaucuguau

SEQ ID NO: 2849602 - RNA, 19 nt, Artificial Sequence
  Description of Artificial Sequence: Synthetic oligonucleotide
ucuaagagucucauaauuu

SEQ ID NO: 2849603 - RNA, 19 nt, Artificial Sequence
  Description of Artificial Sequence: Synthetic oligonucleotide
uagcugaacauacauugca

SEQ ID NO: 2849604 - RNA, 19 nt, Artificial Sequence
  Description of Artificial Sequence: Synthetic oligonucleotide
uuuuggcuaacagaaaaga

SEQ ID NO: 2849605 - RNA, 19 nt, Artificial Sequence
  Description of Artificial Sequence: Synthetic oligonucleotide
cagauuuuggcuaacagaa

SEQ ID NO: 2849606 - RNA, 19 nt, Artificial Sequence
  Description of Artificial Sequence: Synthetic oligonucleotide
aacaccgaaaucaucuaag

SEQ ID NO: 2849607 - RNA, 19 nt, Artificial Sequence
  Description of Artificial Sequence: Synthetic oligonucleotide
aacugaagaacguggcuga

SEQ ID NO: 2849608 - RNA, 19 nt, Artificial Sequence
  Description of Artificial Sequence: Synthetic oligonucleotide
ucaggccuggacaugagug

SEQ ID NO: 2849609 - RNA, 19 nt, Artificial Sequence
  Description of Artificial Sequence: Synthetic oligonucleotide
uguucugaaugauaguauc

SEQ ID NO: 2849610 - RNA, 19 nt, Artificial Sequence
  Description of Artificial Sequence: Synthetic oligonucleotide
uacauaaacugaagaacgu

SEQ ID NO: 2849611 - RNA, 19 nt, Artificial Sequence
  Description of Artificial Sequence: Synthetic oligonucleotide
uuagcugaacauacauugc

SEQ ID NO: 2849612 - RNA, 19 nt, Artificial Sequence
  Description of Artificial Sequence: Synthetic oligonucleotide
aaaaugaauuuuguccuga

SEQ ID NO: 2849613 - RNA, 19 nt, Artificial Sequence
  Description of Artificial Sequence: Synthetic oligonucleotide
aaccgguagcuguuagacc

SEQ ID NO: 2849614 - RNA, 19 nt, Artificial Sequence
  Description of Artificial Sequence: Synthetic oligonucleotide
ucuauuagcugaacauaca

SEQ ID NO: 2849615 - RNA, 19 nt, Artificial Sequence
  Description of Artificial Sequence: Synthetic oligonucleotide
gaaaucaucuaagagucuc

SEQ ID NO: 2849616 - RNA, 19 nt, Artificial Sequence
  Description of Artificial Sequence: Synthetic oligonucleotide
uucugaaugauaguaucug

SEQ ID NO: 2849617 - RNA, 19 nt, Artificial Sequence
  Description of Artificial Sequence: Synthetic oligonucleotide
uuauccagguaagacauga

SEQ ID NO: 2849618 - RNA, 19 nt, Artificial Sequence
  Description of Artificial Sequence: Synthetic oligonucleotide
aaccugauguucugaauga

SEQ ID NO: 2849619 - RNA, 19 nt, Artificial Sequence
  Description of Artificial Sequence: Synthetic oligonucleotide
uccaucgucgucuaucaug

SEQ ID NO: 2849620 - RNA, 19 nt, Artificial Sequence
  Description of Artificial Sequence: Synthetic oligonucleotide
ucaucaaacaaaaccugau

SEQ ID NO: 2849621 - RNA, 19 nt, Artificial Sequence
  Description of Artificial Sequence: Synthetic oligonucleotide
gacaugagcuucucaaagc

SEQ ID NO: 2849622 - RNA, 19 nt, Artificial Sequence
  Description of Artificial Sequence: Synthetic oligonucleotide
uaaacugaagaacguggcu

SEQ ID NO: 2849623 - RNA, 19 nt, Artificial Sequence
  Description of Artificial Sequence: Synthetic oligonucleotide
ucauacucaguucuauagu

SEQ ID NO: 2849624 - RNA, 19 nt, Artificial Sequence
  Description of Artificial Sequence: Synthetic oligonucleotide
agcucuauuucuggaaacc

SEQ ID NO: 2849625 - RNA, 19 nt, Artificial Sequence
  Description of Artificial Sequence: Synthetic oligonucleotide
auaguuccauaauacauaa

SEQ ID NO: 2849626 - RNA, 19 nt, Artificial Sequence
  Description of Artificial Sequence: Synthetic oligonucleotide
uaauuucugcacaauuuuc

SEQ ID NO: 2849627 - RNA, 19 nt, Artificial Sequence
  Description of Artificial Sequence: Synthetic oligonucleotide
gaacaguauucauacucag

SEQ ID NO: 2849628 - RNA, 19 nt, Artificial Sequence
  Description of Artificial Sequence: Synthetic oligonucleotide
aaacaaaaccugauguucu

SEQ ID NO: 2849629 - RNA, 19 nt, Artificial Sequence
  Description of Artificial Sequence: Synthetic oligonucleotide
ucauaauuucugcacaauu

SEQ ID NO: 2849630 - RNA, 19 nt, Artificial Sequence
  Description of Artificial Sequence: Synthetic oligonucleotide
uccagcuucucccugacuc

SEQ ID NO: 2849631 - RNA, 19 nt, Artificial Sequence
  Description of Artificial Sequence: Synthetic oligonucleotide
cugaagaauuucaugaaca

SEQ ID NO: 2849632 - RNA, 19 nt, Artificial Sequence
  Description of Artificial Sequence: Synthetic oligonucleotide
aaguugucuagcagaaagg

SEQ ID NO: 2849633 - RNA, 19 nt, Artificial Sequence
  Description of Artificial Sequence: Synthetic oligonucleotide
ucucaaagcucagauagga

SEQ ID NO: 2849634 - RNA, 19 nt, Artificial Sequence
  Description of Artificial Sequence: Synthetic oligonucleotide
ucugaaugauaguaucugu

SEQ ID NO: 2849635 - RNA, 19 nt, Artificial Sequence
  Description of Artificial Sequence: Synthetic oligonucleotide
auaggacaggaagucaggc

SEQ ID NO: 2849636 - RNA, 19 nt, Artificial Sequence
  Description of Artificial Sequence: Synthetic oligonucleotide
uaugucuccaucgucgucu

SEQ ID NO: 2849637 - RNA, 19 nt, Artificial Sequence
  Description of Artificial Sequence: Synthetic oligonucleotide
caaacaaaaccugauguuc

SEQ ID NO: 2849638 - RNA, 19 nt, Artificial Sequence
  Description of Artificial Sequence: Synthetic oligonucleotide
ucaaacaaaaccugauguu

SEQ ID NO: 2849639 - RNA, 19 nt, Artificial Sequence
  Description of Artificial Sequence: Synthetic oligonucleotide
agaccuuucaaaaugaauu

SEQ ID NO: 2849640 - RNA, 19 nt, Artificial Sequence
  Description of Artificial Sequence: Synthetic oligonucleotide
ugauaguaucuguaugucu

SEQ ID NO: 2849641 - RNA, 19 nt, Artificial Sequence
  Description of Artificial Sequence: Synthetic oligonucleotide
aagagucucauaauuucug

SEQ ID NO: 2849642 - RNA, 19 nt, Artificial Sequence
  Description of Artificial Sequence: Synthetic oligonucleotide
acaugaguggcacaaaguu

SEQ ID NO: 2849643 - RNA, 19 nt, Artificial Sequence
  Description of Artificial Sequence: Synthetic oligonucleotide
auuucaugaacaguauuca

SEQ ID NO: 2849644 - RNA, 19 nt, Artificial Sequence
  Description of Artificial Sequence: Synthetic oligonucleotide
uacauugcagccugaagaa

SEQ ID NO: 2849645 - RNA, 19 nt, Artificial Sequence
  Description of Artificial Sequence: Synthetic oligonucleotide
aguucuauaguuccauaau

SEQ ID NO: 2849646 - RNA, 19 nt, Artificial Sequence
  Description of Artificial Sequence: Synthetic oligonucleotide
caucaaacaaaaccugaug

SEQ ID NO: 2849647 - RNA, 19 nt, Artificial Sequence
  Description of Artificial Sequence: Synthetic oligonucleotide
acaauuuucuaagucagau

SEQ ID NO: 2849648 - RNA, 19 nt, Artificial Sequence
  Description of Artificial Sequence: Synthetic oligonucleotide
ucuggaaaccugcucagau

SEQ ID NO: 2849649 - RNA, 19 nt, Artificial Sequence
  Description of Artificial Sequence: Synthetic oligonucleotide
ugaacauacauugcagccu

SEQ ID NO: 2849650 - RNA, 19 nt, Artificial Sequence
  Description of Artificial Sequence: Synthetic oligonucleotide
gauguucugaaugauagua

SEQ ID NO: 2849651 - RNA, 19 nt, Artificial Sequence
  Description of Artificial Sequence: Synthetic oligonucleotide
uuucuggaaaccugcucag

SEQ ID NO: 2849652 - RNA, 19 nt, Artificial Sequence
  Description of Artificial Sequence: Synthetic oligonucleotide
aaaugaauuuuguccugau

SEQ ID NO: 2849653 - RNA, 19 nt, Artificial Sequence
  Description of Artificial Sequence: Synthetic oligonucleotide
aucuaagagucucauaauu

SEQ ID NO: 2849654 - RNA, 19 nt, Artificial Sequence
  Description of Artificial Sequence: Synthetic oligonucleotide
gucagauuuuggcuaacag

SEQ ID NO: 2849655 - RNA, 19 nt, Artificial Sequence
  Description of Artificial Sequence: Synthetic oligonucleotide
ucaugucgcagccaagacu

SEQ ID NO: 2849656 - RNA, 19 nt, Artificial Sequence
  Description of Artificial Sequence: Synthetic oligonucleotide
aaaccugcucagaugauca

SEQ ID NO: 2849657 - RNA, 19 nt, Artificial Sequence
  Description of Artificial Sequence: Synthetic oligonucleotide
ucagauaggacaggaaguc

SEQ ID NO: 2849658 - RNA, 19 nt, Artificial Sequence
  Description of Artificial Sequence: Synthetic oligonucleotide
uauuagcugaacauacauu

SEQ ID NO: 2849659 - RNA, 19 nt, Artificial Sequence
  Description of Artificial Sequence: Synthetic oligonucleotide
augauaguaucuguauguc

SEQ ID NO: 2849660 - RNA, 19 nt, Artificial Sequence
  Description of Artificial Sequence: Synthetic oligonucleotide
agaacuucaccacuucuau

SEQ ID NO: 2849661 - RNA, 19 nt, Artificial Sequence
  Description of Artificial Sequence: Synthetic oligonucleotide
agaugaucauuauccaggu

SEQ ID NO: 2849662 - RNA, 19 nt, Artificial Sequence
  Description of Artificial Sequence: Synthetic oligonucleotide
gauaggacaggaagucagg

SEQ ID NO: 2849663 - RNA, 19 nt, Artificial Sequence
  Description of Artificial Sequence: Synthetic oligonucleotide
ucucauaauuucugcacaa

SEQ ID NO: 2849664 - RNA, 19 nt, Artificial Sequence
  Description of Artificial Sequence: Synthetic oligonucleotide
augaguggcacaaaguugu

SEQ ID NO: 2849665 - RNA, 19 nt, Artificial Sequence
  Description of Artificial Sequence: Synthetic oligonucleotide
agacugcacagccucguac

SEQ ID NO: 2849666 - RNA, 19 nt, Artificial Sequence
  Description of Artificial Sequence: Synthetic oligonucleotide
agauaggacaggaagucag

SEQ ID NO: 2849667 - RNA, 19 nt, Artificial Sequence
  Description of Artificial Sequence: Synthetic oligonucleotide
uaucaugucgcagccaaga

SEQ ID NO: 2849668 - RNA, 19 nt, Artificial Sequence
  Description of Artificial Sequence: Synthetic oligonucleotide
uagaccuuucaaaaugaau

SEQ ID NO: 2849669 - RNA, 19 nt, Artificial Sequence
  Description of Artificial Sequence: Synthetic oligonucleotide
ucguacagcucuauuucug

SEQ ID NO: 2849670 - RNA, 19 nt, Artificial Sequence
  Description of Artificial Sequence: Synthetic oligonucleotide
acauaaacugaagaacgug

SEQ ID NO: 2849671 - RNA, 19 nt, Artificial Sequence
  Description of Artificial Sequence: Synthetic oligonucleotide
uauuucuggaaaccugcuc

SEQ ID NO: 2849672 - RNA, 19 nt, Artificial Sequence
  Description of Artificial Sequence: Synthetic oligonucleotide
aucaugucgcagccaagac

SEQ ID NO: 2849673 - RNA, 19 nt, Artificial Sequence
  Description of Artificial Sequence: Synthetic oligonucleotide
caaaaugaauuuuguccug

SEQ ID NO: 2849674 - RNA, 19 nt, Artificial Sequence
  Description of Artificial Sequence: Synthetic oligonucleotide
agcagaaaggcguccagcu

SEQ ID NO: 2849675 - RNA, 19 nt, Artificial Sequence
  Description of Artificial Sequence: Synthetic oligonucleotide
cucuauuucuggaaaccug

SEQ ID NO: 2849676 - RNA, 19 nt, Artificial Sequence
  Description of Artificial Sequence: Synthetic oligonucleotide
agcuguuagaccuuucaaa

SEQ ID NO: 2849677 - RNA, 19 nt, Artificial Sequence
  Description of Artificial Sequence: Synthetic oligonucleotide
aaagcucagauaggacagg

SEQ ID NO: 2849678 - RNA, 19 nt, Artificial Sequence
  Description of Artificial Sequence: Synthetic oligonucleotide
aggaagucaggccuggaca

SEQ ID NO: 2849679 - RNA, 19 nt, Artificial Sequence
  Description of Artificial Sequence: Synthetic oligonucleotide
uuucugcacaauuuucuaa

SEQ ID NO: 2849680 - RNA, 19 nt, Artificial Sequence
  Description of Artificial Sequence: Synthetic oligonucleotide
gcucagauaggacaggaag

SEQ ID NO: 2849681 - RNA, 19 nt, Artificial Sequence
  Description of Artificial Sequence: Synthetic oligonucleotide
ugaaaccgguagcuguuag

SEQ ID NO: 2849682 - RNA, 19 nt, Artificial Sequence
  Description of Artificial Sequence: Synthetic oligonucleotide
gagucaucaaacaaaaccu

SEQ ID NO: 2849683 - RNA, 19 nt, Artificial Sequence
  Description of Artificial Sequence: Synthetic oligonucleotide
guugucuagcagaaaggcg

SEQ ID NO: 2849684 - RNA, 19 nt, Artificial Sequence
  Description of Artificial Sequence: Synthetic oligonucleotide
auuuuggcuaacagaaaag

SEQ ID NO: 2849685 - RNA, 19 nt, Artificial Sequence
  Description of Artificial Sequence: Synthetic oligonucleotide
uaggacaggaagucaggcc

SEQ ID NO: 2849686 - RNA, 19 nt, Artificial Sequence
  Description of Artificial Sequence: Synthetic oligonucleotide
aguggcacaaaguugucua

SEQ ID NO: 2849687 - RNA, 19 nt, Artificial Sequence
  Description of Artificial Sequence: Synthetic oligonucleotide
uaagucagauuuuggcuaa

SEQ ID NO: 2849688 - RNA, 19 nt, Artificial Sequence
  Description of Artificial Sequence: Synthetic oligonucleotide
ucuccaucgucgucuauca

SEQ ID NO: 2849689 - RNA, 19 nt, Artificial Sequence
  Description of Artificial Sequence: Synthetic oligonucleotide
acagaaaagaacagcagaa

SEQ ID NO: 2849690 - RNA, 19 nt, Artificial Sequence
  Description of Artificial Sequence: Synthetic oligonucleotide
uuagaccuuucaaaaugaa

SEQ ID NO: 2849691 - RNA, 19 nt, Artificial Sequence
  Description of Artificial Sequence: Synthetic oligonucleotide
uuucaugaacaguauucau

SEQ ID NO: 2849692 - RNA, 19 nt, Artificial Sequence
  Description of Artificial Sequence: Synthetic oligonucleotide
ccgaaaucaucuaagaguc

SEQ ID NO: 2849693 - RNA, 19 nt, Artificial Sequence
  Description of Artificial Sequence: Synthetic oligonucleotide
aaaucaucuaagagucuca

SEQ ID NO: 2849694 - RNA, 19 nt, Artificial Sequence
  Description of Artificial Sequence: Synthetic oligonucleotide
gaagaacguggcugaaacc

SEQ ID NO: 2849695 - RNA, 19 nt, Artificial Sequence
  Description of Artificial Sequence: Synthetic oligonucleotide
uggauggagucaucaaaca

SEQ ID NO: 2849696 - RNA, 19 nt, Artificial Sequence
  Description of Artificial Sequence: Synthetic oligonucleotide
uauccagguaagacaugag

SEQ ID NO: 2849697 - RNA, 19 nt, Artificial Sequence
  Description of Artificial Sequence: Synthetic oligonucleotide
ccuuucaaaaugaauuuug

SEQ ID NO: 2849698 - RNA, 19 nt, Artificial Sequence
  Description of Artificial Sequence: Synthetic oligonucleotide
aacaguauucauacucagu

SEQ ID NO: 2849699 - RNA, 19 nt, Artificial Sequence
  Description of Artificial Sequence: Synthetic oligonucleotide
caccgaaaucaucuaagag

SEQ ID NO: 2849700 - RNA, 19 nt, Artificial Sequence
  Description of Artificial Sequence: Synthetic oligonucleotide
cuaagucagauuuuggcua

SEQ ID NO: 2849701 - RNA, 19 nt, Artificial Sequence
  Description of Artificial Sequence: Synthetic oligonucleotide
cauacauugcagccugaag

SEQ ID NO: 2849702 - RNA, 19 nt, Artificial Sequence
  Description of Artificial Sequence: Synthetic oligonucleotide
ucuguaugucuccaucguc

SEQ ID NO: 2849703 - RNA, 19 nt, Artificial Sequence
  Description of Artificial Sequence: Synthetic oligonucleotide
agcuucucaaagcucagau

SEQ ID NO: 2849704 - RNA, 19 nt, Artificial Sequence
  Description of Artificial Sequence: Synthetic oligonucleotide
acuucaccacuucuauuag

SEQ ID NO: 2849705 - RNA, 19 nt, Artificial Sequence
  Description of Artificial Sequence: Synthetic oligonucleotide
ucugcacaauuuucuaagu

SEQ ID NO: 2849706 - RNA, 19 nt, Artificial Sequence
  Description of Artificial Sequence: Synthetic oligonucleotide
ugcucagaugaucauuauc

SEQ ID NO: 2849707 - RNA, 19 nt, Artificial Sequence
  Description of Artificial Sequence: Synthetic oligonucleotide
agcagaacuucaccacuuc

SEQ ID NO: 2849708 - RNA, 19 nt, Artificial Sequence
  Description of Artificial Sequence: Synthetic oligonucleotide
aaucaucuaagagucucau

SEQ ID NO: 2849709 - RNA, 19 nt, Artificial Sequence
  Description of Artificial Sequence: Synthetic oligonucleotide
uguaugucuccaucgucgu

SEQ ID NO: 2849710 - RNA, 19 nt, Artificial Sequence
  Description of Artificial Sequence: Synthetic oligonucleotide
uguuaacaccgaaaucauc

SEQ ID NO: 2849711 - RNA, 19 nt, Artificial Sequence
  Description of Artificial Sequence: Synthetic oligonucleotide
gagucucauaauuucugca

SEQ ID NO: 2849712 - RNA, 19 nt, Artificial Sequence
  Description of Artificial Sequence: Synthetic oligonucleotide
augagcuucucaaagcuca

SEQ ID NO: 2849713 - RNA, 19 nt, Artificial Sequence
  Description of Artificial Sequence: Synthetic oligonucleotide
acaccgaaaucaucuaaga

SEQ ID NO: 2849714 - RNA, 19 nt, Artificial Sequence
  Description of Artificial Sequence: Synthetic oligonucleotide
auacucaguucuauaguuc

SEQ ID NO: 2849715 - RNA, 19 nt, Artificial Sequence
  Description of Artificial Sequence: Synthetic oligonucleotide
uauucauacucaguucuau

SEQ ID NO: 2849716 - RNA, 19 nt, Artificial Sequence
  Description of Artificial Sequence: Synthetic oligonucleotide
guucuauaguuccauaaua

SEQ ID NO: 2849717 - RNA, 19 nt, Artificial Sequence
  Description of Artificial Sequence: Synthetic oligonucleotide
gcuaacagaaaagaacagc

SEQ ID NO: 2849718 - RNA, 19 nt, Artificial Sequence
  Description of Artificial Sequence: Synthetic oligonucleotide
aucuguaugucuccaucgu

SEQ ID NO: 2849719 - RNA, 19 nt, Artificial Sequence
  Description of Artificial Sequence: Synthetic oligonucleotide
guaucuguaugucuccauc

SEQ ID NO: 2849720 - RNA, 19 nt, Artificial Sequence
  Description of Artificial Sequence: Synthetic oligonucleotide
cuauaguuccauaauacau

SEQ ID NO: 2849721 - RNA, 19 nt, Artificial Sequence
  Description of Artificial Sequence: Synthetic oligonucleotide
auuucugcacaauuuucua

SEQ ID NO: 2849722 - RNA, 19 nt, Artificial Sequence
  Description of Artificial Sequence: Synthetic oligonucleotide
guagcuguuagaccuuuca

SEQ ID NO: 2849723 - RNA, 19 nt, Artificial Sequence
  Description of Artificial Sequence: Synthetic oligonucleotide
ugauguucugaaugauagu

SEQ ID NO: 2849724 - RNA, 19 nt, Artificial Sequence
  Description of Artificial Sequence: Synthetic oligonucleotide
gcugaacauacauugcagc

SEQ ID NO: 2849725 - RNA, 19 nt, Artificial Sequence
  Description of Artificial Sequence: Synthetic oligonucleotide
gucucauaauuucugcaca

SEQ ID NO: 2849726 - RNA, 19 nt, Artificial Sequence
  Description of Artificial Sequence: Synthetic oligonucleotide
ucuagcagaaaggcgucca

SEQ ID NO: 2849727 - RNA, 19 nt, Artificial Sequence
  Description of Artificial Sequence: Synthetic oligonucleotide
caccacuucuauuagcuga

SEQ ID NO: 2849728 - RNA, 19 nt, Artificial Sequence
  Description of Artificial Sequence: Synthetic oligonucleotide
uagcuguuagaccuuucaa

SEQ ID NO: 2849729 - RNA, 19 nt, Artificial Sequence
  Description of Artificial Sequence: Synthetic oligonucleotide
caguauucauacucaguuc

SEQ ID NO: 2849730 - RNA, 19 nt, Artificial Sequence
  Description of Artificial Sequence: Synthetic oligonucleotide
aagucaggccuggacauga

SEQ ID NO: 2849731 - RNA, 19 nt, Artificial Sequence
  Description of Artificial Sequence: Synthetic oligonucleotide
guuagaccuuucaaaauga

SEQ ID NO: 2849732 - RNA, 19 nt, Artificial Sequence
  Description of Artificial Sequence: Synthetic oligonucleotide
cugcacaauuuucuaaguc

SEQ ID NO: 2849733 - RNA, 19 nt, Artificial Sequence
  Description of Artificial Sequence: Synthetic oligonucleotide
cucaaagcucagauaggac

SEQ ID NO: 2849734 - RNA, 19 nt, Artificial Sequence
  Description of Artificial Sequence: Synthetic oligonucleotide
gacugcacagccucguaca

SEQ ID NO: 2849735 - RNA, 19 nt, Artificial Sequence
  Description of Artificial Sequence: Synthetic oligonucleotide
agcugaacauacauugcag

SEQ ID NO: 2849736 - RNA, 19 nt, Artificial Sequence
  Description of Artificial Sequence: Synthetic oligonucleotide
gaaaccugcucagaugauc

SEQ ID NO: 2849737 - RNA, 19 nt, Artificial Sequence
  Description of Artificial Sequence: Synthetic oligonucleotide
ucccugacucccucgaugu

SEQ ID NO: 2849738 - RNA, 19 nt, Artificial Sequence
  Description of Artificial Sequence: Synthetic oligonucleotide
cuggaaaccugcucagaug

SEQ ID NO: 2849739 - RNA, 19 nt, Artificial Sequence
  Description of Artificial Sequence: Synthetic oligonucleotide
ggacaugaguggcacaaag

SEQ ID NO: 2849740 - RNA, 19 nt, Artificial Sequence
  Description of Artificial Sequence: Synthetic oligonucleotide
cuuucaaaaugaauuuugu

SEQ ID NO: 2849741 - RNA, 19 nt, Artificial Sequence
  Description of Artificial Sequence: Synthetic oligonucleotide
cauuauccagguaagacau

SEQ ID NO: 2849742 - RNA, 19 nt, Artificial Sequence
  Description of Artificial Sequence: Synthetic oligonucleotide
cugaaugauaguaucugua

SEQ ID NO: 2849743 - RNA, 19 nt, Artificial Sequence
  Description of Artificial Sequence: Synthetic oligonucleotide
aagcucagauaggacagga

SEQ ID NO: 2849744 - RNA, 19 nt, Artificial Sequence
  Description of Artificial Sequence: Synthetic oligonucleotide
cauaauuucugcacaauuu

SEQ ID NO: 2849745 - RNA, 19 nt, Artificial Sequence
  Description of Artificial Sequence: Synthetic oligonucleotide
ugucuagcagaaaggcguc

SEQ ID NO: 2849746 - RNA, 19 nt, Artificial Sequence
  Description of Artificial Sequence: Synthetic oligonucleotide
gcacaauuuucuaagucag

SEQ ID NO: 2849747 - RNA, 19 nt, Artificial Sequence
  Description of Artificial Sequence: Synthetic oligonucleotide
gcuguuagaccuuucaaaa

SEQ ID NO: 2849748 - RNA, 19 nt, Artificial Sequence
  Description of Artificial Sequence: Synthetic oligonucleotide
auucauacucaguucuaua

SEQ ID NO: 2849749 - RNA, 19 nt, Artificial Sequence
  Description of Artificial Sequence: Synthetic oligonucleotide
aggccuggacaugaguggc

SEQ ID NO: 2849750 - RNA, 19 nt, Artificial Sequence
  Description of Artificial Sequence: Synthetic oligonucleotide
aagucagauuuuggcuaac

SEQ ID NO: 2849751 - RNA, 19 nt, Artificial Sequence
  Description of Artificial Sequence: Synthetic oligonucleotide
acguggcugaaaccgguag

SEQ ID NO: 2849752 - RNA, 19 nt, Artificial Sequence
  Description of Artificial Sequence: Synthetic oligonucleotide
acaaaguugucuagcagaa

SEQ ID NO: 2849753 - RNA, 19 nt, Artificial Sequence
  Description of Artificial Sequence: Synthetic oligonucleotide
aaacgcuggauggagucau

SEQ ID NO: 2849754 - RNA, 19 nt, Artificial Sequence
  Description of Artificial Sequence: Synthetic oligonucleotide
gaaaccgguagcuguuaga

SEQ ID NO: 2849755 - RNA, 19 nt, Artificial Sequence
  Description of Artificial Sequence: Synthetic oligonucleotide
uggagucaucaaacaaaac

SEQ ID NO: 2849756 - RNA, 19 nt, Artificial Sequence
  Description of Artificial Sequence: Synthetic oligonucleotide
uucucccugacucccucga

SEQ ID NO: 2849757 - RNA, 19 nt, Artificial Sequence
  Description of Artificial Sequence: Synthetic oligonucleotide
aguaucuguaugucuccau

SEQ ID NO: 2849758 - RNA, 19 nt, Artificial Sequence
  Description of Artificial Sequence: Synthetic oligonucleotide
auggagucaucaaacaaaa

SEQ ID NO: 2849759 - RNA, 19 nt, Artificial Sequence
  Description of Artificial Sequence: Synthetic oligonucleotide
cucagaugaucauuaucca

SEQ ID NO: 2849760 - RNA, 19 nt, Artificial Sequence
  Description of Artificial Sequence: Synthetic oligonucleotide
cuagcagaaaggcguccag

SEQ ID NO: 2849761 - RNA, 19 nt, Artificial Sequence
  Description of Artificial Sequence: Synthetic oligonucleotide
caguucuauaguuccauaa

SEQ ID NO: 2849762 - RNA, 19 nt, Artificial Sequence
  Description of Artificial Sequence: Synthetic oligonucleotide
cagguaagacaugagcuuc

SEQ ID NO: 2849763 - RNA, 19 nt, Artificial Sequence
  Description of Artificial Sequence: Synthetic oligonucleotide
guggcacaaaguugucuag

SEQ ID NO: 2849764 - RNA, 19 nt, Artificial Sequence
  Description of Artificial Sequence: Synthetic oligonucleotide
gacaggaagucaggccugg

SEQ ID NO: 2849765 - RNA, 19 nt, Artificial Sequence
  Description of Artificial Sequence: Synthetic oligonucleotide
gaagaauuucaugaacagu

SEQ ID NO: 2849766 - RNA, 19 nt, Artificial Sequence
  Description of Artificial Sequence: Synthetic oligonucleotide
caaaaccugauguucugaa

SEQ ID NO: 2849767 - RNA, 19 nt, Artificial Sequence
  Description of Artificial Sequence: Synthetic oligonucleotide
uagcagaaaggcguccagc

SEQ ID NO: 2849768 - RNA, 19 nt, Artificial Sequence
  Description of Artificial Sequence: Synthetic oligonucleotide
uaguaucuguaugucucca

SEQ ID NO: 2849769 - RNA, 19 nt, Artificial Sequence
  Description of Artificial Sequence: Synthetic oligonucleotide
cucgauguuaacaccgaaa

SEQ ID NO: 2849770 - RNA, 19 nt, Artificial Sequence
  Description of Artificial Sequence: Synthetic oligonucleotide
ucgcagccaagacugcaca

SEQ ID NO: 2849771 - RNA, 19 nt, Artificial Sequence
  Description of Artificial Sequence: Synthetic oligonucleotide
agaauuucaugaacaguau

SEQ ID NO: 2849772 - RNA, 19 nt, Artificial Sequence
  Description of Artificial Sequence: Synthetic oligonucleotide
ccugaagaauuucaugaac

SEQ ID NO: 2849773 - RNA, 19 nt, Artificial Sequence
  Description of Artificial Sequence: Synthetic oligonucleotide
gaucauuauccagguaaga

SEQ ID NO: 2849774 - RNA, 19 nt, Artificial Sequence
  Description of Artificial Sequence: Synthetic oligonucleotide
acaaaaccugauguucuga

SEQ ID NO: 2849775 - RNA, 19 nt, Artificial Sequence
  Description of Artificial Sequence: Synthetic oligonucleotide
ccauaauacauaaacugaa

SEQ ID NO: 2849776 - RNA, 19 nt, Artificial Sequence
  Description of Artificial Sequence: Synthetic oligonucleotide
caggaagucaggccuggac

SEQ ID NO: 2849777 - RNA, 19 nt, Artificial Sequence
  Description of Artificial Sequence: Synthetic oligonucleotide
cacuucuauuagcugaaca

SEQ ID NO: 2849778 - RNA, 19 nt, Artificial Sequence
  Description of Artificial Sequence: Synthetic oligonucleotide
cagcucuauuucuggaaac

SEQ ID NO: 2849779 - RNA, 19 nt, Artificial Sequence
  Description of Artificial Sequence: Synthetic oligonucleotide
guuccauaauacauaaacu

SEQ ID NO: 2849780 - RNA, 19 nt, Artificial Sequence
  Description of Artificial Sequence: Synthetic oligonucleotide
gacucccucgauguuaaca

SEQ ID NO: 2849781 - RNA, 19 nt, Artificial Sequence
  Description of Artificial Sequence: Synthetic oligonucleotide
cuauuagcugaacauacau

SEQ ID NO: 2849782 - RNA, 19 nt, Artificial Sequence
  Description of Artificial Sequence: Synthetic oligonucleotide
cucagauaggacaggaagu

SEQ ID NO: 2849783 - RNA, 19 nt, Artificial Sequence
  Description of Artificial Sequence: Synthetic oligonucleotide
uaguuccauaauacauaaa

SEQ ID NO: 2849784 - RNA, 19 nt, Artificial Sequence
  Description of Artificial Sequence: Synthetic oligonucleotide
cucccucgauguuaacacc

SEQ ID NO: 2849785 - RNA, 19 nt, Artificial Sequence
  Description of Artificial Sequence: Synthetic oligonucleotide
cuaucaugucgcagccaag

SEQ ID NO: 2849786 - RNA, 19 nt, Artificial Sequence
  Description of Artificial Sequence: Synthetic oligonucleotide
guaagacaugagcuucuca

SEQ ID NO: 2849787 - RNA, 19 nt, Artificial Sequence
  Description of Artificial Sequence: Synthetic oligonucleotide
gaauuucaugaacaguauu

SEQ ID NO: 2849788 - RNA, 19 nt, Artificial Sequence
  Description of Artificial Sequence: Synthetic oligonucleotide
cacaauuuucuaagucaga

SEQ ID NO: 2849789 - RNA, 19 nt, Artificial Sequence
  Description of Artificial Sequence: Synthetic oligonucleotide
cagaacuucaccacuucua

SEQ ID NO: 2849790 - RNA, 19 nt, Artificial Sequence
  Description of Artificial Sequence: Synthetic oligonucleotide
cauacucaguucuauaguu

SEQ ID NO: 2849791 - RNA, 19 nt, Artificial Sequence
  Description of Artificial Sequence: Synthetic oligonucleotide
agucagauuuuggcuaaca

SEQ ID NO: 2849792 - RNA, 19 nt, Artificial Sequence
  Description of Artificial Sequence: Synthetic oligonucleotide
gcacaaaguugucuagcag

SEQ ID NO: 2849793 - RNA, 19 nt, Artificial Sequence
  Description of Artificial Sequence: Synthetic oligonucleotide
cuucuauuagcugaacaua

SEQ ID NO: 2849794 - RNA, 19 nt, Artificial Sequence
  Description of Artificial Sequence: Synthetic oligonucleotide
cucccugacucccucgaug

SEQ ID NO: 2849795 - RNA, 19 nt, Artificial Sequence
  Description of Artificial Sequence: Synthetic oligonucleotide
ugucgcagccaagacugca

SEQ ID NO: 2849796 - RNA, 19 nt, Artificial Sequence
  Description of Artificial Sequence: Synthetic oligonucleotide
auguucugaaugauaguau

SEQ ID NO: 2849797 - RNA, 19 nt, Artificial Sequence
  Description of Artificial Sequence: Synthetic oligonucleotide
aaccugcucagaugaucau

SEQ ID NO: 2849798 - RNA, 19 nt, Artificial Sequence
  Description of Artificial Sequence: Synthetic oligonucleotide
aucaucuaagagucucaua

SEQ ID NO: 2849799 - RNA, 19 nt, Artificial Sequence
  Description of Artificial Sequence: Synthetic oligonucleotide
guacagcucuauuucugga

SEQ ID NO: 2849800 - RNA, 19 nt, Artificial Sequence
  Description of Artificial Sequence: Synthetic oligonucleotide
aagacugcacagccucgua

SEQ ID NO: 2849801 - RNA, 19 nt, Artificial Sequence
  Description of Artificial Sequence: Synthetic oligonucleotide
auguuaacaccgaaaucau

SEQ ID NO: 2849802 - RNA, 19 nt, Artificial Sequence
  Description of Artificial Sequence: Synthetic oligonucleotide
ugaguggcacaaaguuguc

SEQ ID NO: 2849803 - RNA, 19 nt, Artificial Sequence
  Description of Artificial Sequence: Synthetic oligonucleotide
gccaagacugcacagccuc

SEQ ID NO: 2849804 - RNA, 19 nt, Artificial Sequence
  Description of Artificial Sequence: Synthetic oligonucleotide
gucuccaucgucgucuauc

SEQ ID NO: 2849805 - RNA, 19 nt, Artificial Sequence
  Description of Artificial Sequence: Synthetic oligonucleotide
ggauggagucaucaaacaa

SEQ ID NO: 2849806 - RNA, 19 nt, Artificial Sequence
  Description of Artificial Sequence: Synthetic oligonucleotide
ggcuaacagaaaagaacag

SEQ ID NO: 2849807 - RNA, 19 nt, Artificial Sequence
  Description of Artificial Sequence: Synthetic oligonucleotide
acauacauugcagccugaa

SEQ ID NO: 2849808 - RNA, 19 nt, Artificial Sequence
  Description of Artificial Sequence: Synthetic oligonucleotide
uucuggaaaccugcucaga

SEQ ID NO: 2849809 - RNA, 19 nt, Artificial Sequence
  Description of Artificial Sequence: Synthetic oligonucleotide
gucgucuaucaugucgcag

SEQ ID NO: 2849810 - RNA, 19 nt, Artificial Sequence
  Description of Artificial Sequence: Synthetic oligonucleotide
gaugaucauuauccaggua

SEQ ID NO: 2849811 - RNA, 19 nt, Artificial Sequence
  Description of Artificial Sequence: Synthetic oligonucleotide
guucugaaugauaguaucu

SEQ ID NO: 2849812 - RNA, 19 nt, Artificial Sequence
  Description of Artificial Sequence: Synthetic oligonucleotide
auuuucuaagucagauuuu

SEQ ID NO: 2849813 - RNA, 19 nt, Artificial Sequence
  Description of Artificial Sequence: Synthetic oligonucleotide
auuauccagguaagacaug

SEQ ID NO: 2849814 - RNA, 19 nt, Artificial Sequence
  Description of Artificial Sequence: Synthetic oligonucleotide
cauugcagccugaagaauu

SEQ ID NO: 2849815 - RNA, 19 nt, Artificial Sequence
  Description of Artificial Sequence: Synthetic oligonucleotide
aacgcuggauggagucauc

SEQ ID NO: 2849816 - RNA, 19 nt, Artificial Sequence
  Description of Artificial Sequence: Synthetic oligonucleotide
cuggacaugaguggcacaa

SEQ ID NO: 2849817 - RNA, 19 nt, Artificial Sequence
  Description of Artificial Sequence: Synthetic oligonucleotide
accacuucuauuagcugaa

SEQ ID NO: 2849818 - RNA, 19 nt, Artificial Sequence
  Description of Artificial Sequence: Synthetic oligonucleotide
agguaagacaugagcuucu

SEQ ID NO: 2849819 - RNA, 19 nt, Artificial Sequence
  Description of Artificial Sequence: Synthetic oligonucleotide
auugcagccugaagaauuu

SEQ ID NO: 2849820 - RNA, 19 nt, Artificial Sequence
  Description of Artificial Sequence: Synthetic oligonucleotide
gcuggauggagucaucaaa

SEQ ID NO: 2849821 - RNA, 19 nt, Artificial Sequence
  Description of Artificial Sequence: Synthetic oligonucleotide
gacaugaguggcacaaagu

SEQ ID NO: 2849822 - RNA, 19 nt, Artificial Sequence
  Description of Artificial Sequence: Synthetic oligonucleotide
aacauacauugcagccuga

SEQ ID NO: 2849823 - RNA, 19 nt, Artificial Sequence
  Description of Artificial Sequence: Synthetic oligonucleotide
uggcugaaaccgguagcug

SEQ ID NO: 2849824 - RNA, 19 nt, Artificial Sequence
  Description of Artificial Sequence: Synthetic oligonucleotide
agauuuuggcuaacagaaa

SEQ ID NO: 2849825 - RNA, 19 nt, Artificial Sequence
  Description of Artificial Sequence: Synthetic oligonucleotide
acucaguucuauaguucca

SEQ ID NO: 2849826 - RNA, 19 nt, Artificial Sequence
  Description of Artificial Sequence: Synthetic oligonucleotide
cugacucccucgauguuaa

SEQ ID NO: 2849827 - RNA, 19 nt, Artificial Sequence
  Description of Artificial Sequence: Synthetic oligonucleotide
cagcuucucccugacuccc

SEQ ID NO: 2849828 - RNA, 19 nt, Artificial Sequence
  Description of Artificial Sequence: Synthetic oligonucleotide
guaugucuccaucgucguc

SEQ ID NO: 2849829 - RNA, 19 nt, Artificial Sequence
  Description of Artificial Sequence: Synthetic oligonucleotide
gucuagcagaaaggcgucc

SEQ ID NO: 2849830 - RNA, 19 nt, Artificial Sequence
  Description of Artificial Sequence: Synthetic oligonucleotide
cuauuucuggaaaccugcu

SEQ ID NO: 2849831 - RNA, 19 nt, Artificial Sequence
  Description of Artificial Sequence: Synthetic oligonucleotide
acgcuggauggagucauca

SEQ ID NO: 2849832 - RNA, 19 nt, Artificial Sequence
  Description of Artificial Sequence: Synthetic oligonucleotide
gucgcagccaagacugcac

SEQ ID NO: 2849833 - RNA, 19 nt, Artificial Sequence
  Description of Artificial Sequence: Synthetic oligonucleotide
ccagcuucucccugacucc

SEQ ID NO: 2849834 - RNA, 19 nt, Artificial Sequence
  Description of Artificial Sequence: Synthetic oligonucleotide
caauuuucuaagucagauu

SEQ ID NO: 2849835 - RNA, 19 nt, Artificial Sequence
  Description of Artificial Sequence: Synthetic oligonucleotide
ccaagacugcacagccucg

SEQ ID NO: 2849836 - RNA, 19 nt, Artificial Sequence
  Description of Artificial Sequence: Synthetic oligonucleotide
cagauaggacaggaaguca

SEQ ID NO: 2849837 - RNA, 19 nt, Artificial Sequence
  Description of Artificial Sequence: Synthetic oligonucleotide
ucucccugacucccucgau

SEQ ID NO: 2849838 - RNA, 19 nt, Artificial Sequence
  Description of Artificial Sequence: Synthetic oligonucleotide
guauucauacucaguucua

SEQ ID NO: 2849839 - RNA, 19 nt, Artificial Sequence
  Description of Artificial Sequence: Synthetic oligonucleotide
augucgcagccaagacugc

SEQ ID NO: 2849840 - RNA, 19 nt, Artificial Sequence
  Description of Artificial Sequence: Synthetic oligonucleotide
acauugcagccugaagaau

SEQ ID NO: 2849841 - RNA, 19 nt, Artificial Sequence
  Description of Artificial Sequence: Synthetic oligonucleotide
guggcugaaaccgguagcu

SEQ ID NO: 2849842 - RNA, 19 nt, Artificial Sequence
  Description of Artificial Sequence: Synthetic oligonucleotide
gccugaagaauuucaugaa

SEQ ID NO: 2849843 - RNA, 19 nt, Artificial Sequence
  Description of Artificial Sequence: Synthetic oligonucleotide
cuguuagaccuuucaaaau

SEQ ID NO: 2849844 - RNA, 19 nt, Artificial Sequence
  Description of Artificial Sequence: Synthetic oligonucleotide
accugauguucugaaugau

SEQ ID NO: 2849845 - RNA, 19 nt, Artificial Sequence
  Description of Artificial Sequence: Synthetic oligonucleotide
gagcuucucaaagcucaga

SEQ ID NO: 2849846 - RNA, 19 nt, Artificial Sequence
  Description of Artificial Sequence: Synthetic oligonucleotide
cucguacagcucuauuucu

SEQ ID NO: 2849847 - RNA, 19 nt, Artificial Sequence
  Description of Artificial Sequence: Synthetic oligonucleotide
uggacaugaguggcacaaa

SEQ ID NO: 2849848 - RNA, 19 nt, Artificial Sequence
  Description of Artificial Sequence: Synthetic oligonucleotide
ggcugaaaccgguagcugu

SEQ ID NO: 2849849 - RNA, 19 nt, Artificial Sequence
  Description of Artificial Sequence: Synthetic oligonucleotide
accugcucagaugaucauu

SEQ ID NO: 2849850 - RNA, 19 nt, Artificial Sequence
  Description of Artificial Sequence: Synthetic oligonucleotide
caucuaagagucucauaau

SEQ ID NO: 2849851 - RNA, 19 nt, Artificial Sequence
  Description of Artificial Sequence: Synthetic oligonucleotide
ccugcucagaugaucauua

SEQ ID NO: 2849852 - RNA, 19 nt, Artificial Sequence
  Description of Artificial Sequence: Synthetic oligonucleotide
aacguggcugaaaccggua

SEQ ID NO: 2849853 - RNA, 19 nt, Artificial Sequence
  Description of Artificial Sequence: Synthetic oligonucleotide
gaacuucaccacuucuauu

SEQ ID NO: 2849854 - RNA, 19 nt, Artificial Sequence
  Description of Artificial Sequence: Synthetic oligonucleotide
caugaacaguauucauacu

SEQ ID NO: 2849855 - RNA, 19 nt, Artificial Sequence
  Description of Artificial Sequence: Synthetic oligonucleotide
aggcguccagcuucucccu

SEQ ID NO: 2849856 - RNA, 19 nt, Artificial Sequence
  Description of Artificial Sequence: Synthetic oligonucleotide
gaguggcacaaaguugucu

SEQ ID NO: 2849857 - RNA, 19 nt, Artificial Sequence
  Description of Artificial Sequence: Synthetic oligonucleotide
cgucuaucaugucgcagcc

SEQ ID NO: 2849858 - RNA, 19 nt, Artificial Sequence
  Description of Artificial Sequence: Synthetic oligonucleotide
acugaagaacguggcugaa

SEQ ID NO: 2849859 - RNA, 19 nt, Artificial Sequence
  Description of Artificial Sequence: Synthetic oligonucleotide
gguaagacaugagcuucuc

SEQ ID NO: 2849860 - RNA, 19 nt, Artificial Sequence
  Description of Artificial Sequence: Synthetic oligonucleotide
ggaagucaggccuggacau

SEQ ID NO: 2849861 - RNA, 19 nt, Artificial Sequence
  Description of Artificial Sequence: Synthetic oligonucleotide
augucuccaucgucgucua

SEQ ID NO: 2849862 - RNA, 19 nt, Artificial Sequence
  Description of Artificial Sequence: Synthetic oligonucleotide
ccaucgucgucuaucaugu

SEQ ID NO: 2849863 - RNA, 19 nt, Artificial Sequence
  Description of Artificial Sequence: Synthetic oligonucleotide
agcucagauaggacaggaa

SEQ ID NO: 2849864 - RNA, 19 nt, Artificial Sequence
  Description of Artificial Sequence: Synthetic oligonucleotide
cucaguucuauaguuccau

SEQ ID NO: 2849865 - RNA, 19 nt, Artificial Sequence
  Description of Artificial Sequence: Synthetic oligonucleotide
cugaagaacguggcugaaa

SEQ ID NO: 2849866 - RNA, 19 nt, Artificial Sequence
  Description of Artificial Sequence: Synthetic oligonucleotide
cguggcugaaaccgguagc

SEQ ID NO: 2849867 - RNA, 19 nt, Artificial Sequence
  Description of Artificial Sequence: Synthetic oligonucleotide
agucaggccuggacaugag

SEQ ID NO: 2849868 - RNA, 19 nt, Artificial Sequence
  Description of Artificial Sequence: Synthetic oligonucleotide
cgauguuaacaccgaaauc

SEQ ID NO: 2849869 - RNA, 19 nt, Artificial Sequence
  Description of Artificial Sequence: Synthetic oligonucleotide
ccugauguucugaaugaua

SEQ ID NO: 2849870 - RNA, 19 nt, Artificial Sequence
  Description of Artificial Sequence: Synthetic oligonucleotide
ggacaggaagucaggccug

SEQ ID NO: 2849871 - RNA, 19 nt, Artificial Sequence
  Description of Artificial Sequence: Synthetic oligonucleotide
agccucguacagcucuauu

SEQ ID NO: 2849872 - RNA, 19 nt, Artificial Sequence
  Description of Artificial Sequence: Synthetic oligonucleotide
agccaagacugcacagccu

SEQ ID NO: 2849873 - RNA, 19 nt, Artificial Sequence
  Description of Artificial Sequence: Synthetic oligonucleotide
ugucuccaucgucgucuau

SEQ ID NO: 2849874 - RNA, 19 nt, Artificial Sequence
  Description of Artificial Sequence: Synthetic oligonucleotide
caaaguugucuagcagaaa

SEQ ID NO: 2849875 - RNA, 19 nt, Artificial Sequence
  Description of Artificial Sequence: Synthetic oligonucleotide
caucgucgucuaucauguc

SEQ ID NO: 2849876 - RNA, 19 nt, Artificial Sequence
  Description of Artificial Sequence: Synthetic oligonucleotide
ugacucccucgauguuaac

SEQ ID NO: 2849877 - RNA, 19 nt, Artificial Sequence
  Description of Artificial Sequence: Synthetic oligonucleotide
gucuaucaugucgcagcca

SEQ ID NO: 2849878 - RNA, 19 nt, Artificial Sequence
  Description of Artificial Sequence: Synthetic oligonucleotide
cucauaauuucugcacaau

SEQ ID NO: 2849879 - RNA, 19 nt, Artificial Sequence
  Description of Artificial Sequence: Synthetic oligonucleotide
gucaggccuggacaugagu

SEQ ID NO: 2849880 - RNA, 19 nt, Artificial Sequence
  Description of Artificial Sequence: Synthetic oligonucleotide
gcucuauuucuggaaaccu

SEQ ID NO: 2849881 - RNA, 19 nt, Artificial Sequence
  Description of Artificial Sequence: Synthetic oligonucleotide
gccuggacaugaguggcac

SEQ ID NO: 2849882 - RNA, 19 nt, Artificial Sequence
  Description of Artificial Sequence: Synthetic oligonucleotide
gccucguacagcucuauuu

SEQ ID NO: 2849883 - RNA, 19 nt, Artificial Sequence
  Description of Artificial Sequence: Synthetic oligonucleotide
caagacugcacagccucgu

SEQ ID NO: 2849884 - RNA, 19 nt, Artificial Sequence
  Description of Artificial Sequence: Synthetic oligonucleotide
cagcagaacuucaccacuu

SEQ ID NO: 2849885 - RNA, 19 nt, Artificial Sequence
  Description of Artificial Sequence: Synthetic oligonucleotide
ggcguccagcuucucccug

SEQ ID NO: 2849886 - RNA, 19 nt, Artificial Sequence
  Description of Artificial Sequence: Synthetic oligonucleotide
cgcagccaagacugcacag

SEQ ID NO: 2849887 - RNA, 19 nt, Artificial Sequence
  Description of Artificial Sequence: Synthetic oligonucleotide
cugaaaccgguagcuguua

SEQ ID NO: 2849888 - RNA, 19 nt, Artificial Sequence
  Description of Artificial Sequence: Synthetic oligonucleotide
gguagcuguuagaccuuuc

SEQ ID NO: 2849889 - RNA, 19 nt, Artificial Sequence
  Description of Artificial Sequence: Synthetic oligonucleotide
acagccucguacagcucua

SEQ ID NO: 2849890 - RNA, 19 nt, Artificial Sequence
  Description of Artificial Sequence: Synthetic oligonucleotide
ccagguaagacaugagcuu

SEQ ID NO: 2849891 - RNA, 19 nt, Artificial Sequence
  Description of Artificial Sequence: Synthetic oligonucleotide
cccucgauguuaacaccga

SEQ ID NO: 2849892 - RNA, 19 nt, Artificial Sequence
  Description of Artificial Sequence: Synthetic oligonucleotide
ccugacucccucgauguua

SEQ ID NO: 2849893 - RNA, 19 nt, Artificial Sequence
  Description of Artificial Sequence: Synthetic oligonucleotide
cugcucagaugaucauuau

SEQ ID NO: 2849894 - RNA, 19 nt, Artificial Sequence
  Description of Artificial Sequence: Synthetic oligonucleotide
ccacuucuauuagcugaac

SEQ ID NO: 2849895 - RNA, 19 nt, Artificial Sequence
  Description of Artificial Sequence: Synthetic oligonucleotide
ccucgauguuaacaccgaa

SEQ ID NO: 2849896 - RNA, 19 nt, Artificial Sequence
  Description of Artificial Sequence: Synthetic oligonucleotide
ggccuggacaugaguggca

SEQ ID NO: 2849897 - RNA, 19 nt, Artificial Sequence
  Description of Artificial Sequence: Synthetic oligonucleotide
gcugaaaccgguagcuguu

SEQ ID NO: 2849898 - RNA, 19 nt, Artificial Sequence
  Description of Artificial Sequence: Synthetic oligonucleotide
ccuggacaugaguggcaca

SEQ ID NO: 2849899 - RNA, 19 nt, Artificial Sequence
  Description of Artificial Sequence: Synthetic oligonucleotide
cgaaaucaucuaagagucu

SEQ ID NO: 2849900 - RNA, 19 nt, Artificial Sequence
  Description of Artificial Sequence: Synthetic oligonucleotide
ggaaaccugcucagaugau

SEQ ID NO: 2849901 - RNA, 19 nt, Artificial Sequence
  Description of Artificial Sequence: Synthetic oligonucleotide
cgucgucuaucaugucgca

SEQ ID NO: 2849902 - RNA, 19 nt, Artificial Sequence
  Description of Artificial Sequence: Synthetic oligonucleotide
cuccaucgucgucuaucau

SEQ ID NO: 2849903 - RNA, 19 nt, Artificial Sequence
  Description of Artificial Sequence: Synthetic oligonucleotide
cgcuggauggagucaucaa

SEQ ID NO: 2849904 - RNA, 19 nt, Artificial Sequence
  Description of Artificial Sequence: Synthetic oligonucleotide
cagccucguacagcucuau

SEQ ID NO: 2849905 - RNA, 19 nt, Artificial Sequence
  Description of Artificial Sequence: Synthetic oligonucleotide
ccgguagcuguuagaccuu

SEQ ID NO: 2849906 - RNA, 19 nt, Artificial Sequence
  Description of Artificial Sequence: Synthetic oligonucleotide
cccugacucccucgauguu

SEQ ID NO: 2849907 - RNA, 19 nt, Artificial Sequence
  Description of Artificial Sequence: Synthetic oligonucleotide
cgguagcuguuagaccuuu

SEQ ID NO: 2849908 - RNA, 19 nt, Artificial Sequence
  Description of Artificial Sequence: Synthetic oligonucleotide
aaaacaauaaaaugaaacg

SEQ ID NO: 2849909 - RNA, 19 nt, Artificial Sequence
  Description of Artificial Sequence: Synthetic oligonucleotide
aauaaaaugaaacgucacg

SEQ ID NO: 2849910 - RNA, 19 nt, Artificial Sequence
  Description of Artificial Sequence: Synthetic oligonucleotide
aaugucaaacauuaaaauc

SEQ ID NO: 2849911 - RNA, 19 nt, Artificial Sequence
  Description of Artificial Sequence: Synthetic oligonucleotide
ucaguaagaacuaagaugu

SEQ ID NO: 2849912 - RNA, 19 nt, Artificial Sequence
  Description of Artificial Sequence: Synthetic oligonucleotide
acuucauuuguacaaaucc

SEQ ID NO: 2849913 - RNA, 19 nt, Artificial Sequence
  Description of Artificial Sequence: Synthetic oligonucleotide
augucaaacauuaaaaucc

SEQ ID NO: 2849914 - RNA, 19 nt, Artificial Sequence
  Description of Artificial Sequence: Synthetic oligonucleotide
aaaugaaccacauuaggug

SEQ ID NO: 2849915 - RNA, 19 nt, Artificial Sequence
  Description of Artificial Sequence: Synthetic oligonucleotide
uuuauaaguaucucuacag

SEQ ID NO: 2849916 - RNA, 19 nt, Artificial Sequence
  Description of Artificial Sequence: Synthetic oligonucleotide
caaaacaauaaaaugaaac

SEQ ID NO: 2849917 - RNA, 19 nt, Artificial Sequence
  Description of Artificial Sequence: Synthetic oligonucleotide
uaauauuucuguaugugcc

SEQ ID NO: 2849918 - RNA, 19 nt, Artificial Sequence
  Description of Artificial Sequence: Synthetic oligonucleotide
auuaaaauccuaugucacc

SEQ ID NO: 2849919 - RNA, 19 nt, Artificial Sequence
  Description of Artificial Sequence: Synthetic oligonucleotide
aaaucucuguucuacacag

SEQ ID NO: 2849920 - RNA, 19 nt, Artificial Sequence
  Description of Artificial Sequence: Synthetic oligonucleotide
aacaauaaaaugaaacguc

SEQ ID NO: 2849921 - RNA, 19 nt, Artificial Sequence
  Description of Artificial Sequence: Synthetic oligonucleotide
auuaaucucauuuaagaca

SEQ ID NO: 2849922 - RNA, 19 nt, Artificial Sequence
  Description of Artificial Sequence: Synthetic oligonucleotide
uuuauuuauaaguaucucu

SEQ ID NO: 2849923 - RNA, 19 nt, Artificial Sequence
  Description of Artificial Sequence: Synthetic oligonucleotide
uuguacaaaucccacacgg

SEQ ID NO: 2849924 - RNA, 19 nt, Artificial Sequence
  Description of Artificial Sequence: Synthetic oligonucleotide
uuaaucucauuuaagacaa

SEQ ID NO: 2849925 - RNA, 19 nt, Artificial Sequence
  Description of Artificial Sequence: Synthetic oligonucleotide
agagaaaugaaccacauua

SEQ ID NO: 2849926 - RNA, 19 nt, Artificial Sequence
  Description of Artificial Sequence: Synthetic oligonucleotide
ucuagugcgcauuagcugg

SEQ ID NO: 2849927 - RNA, 19 nt, Artificial Sequence
  Description of Artificial Sequence: Synthetic oligonucleotide
aaacaauaaaaugaaacgu

SEQ ID NO: 2849928 - RNA, 19 nt, Artificial Sequence
  Description of Artificial Sequence: Synthetic oligonucleotide
aauaacaaugaacauuuau

SEQ ID NO: 2849929 - RNA, 19 nt, Artificial Sequence
  Description of Artificial Sequence: Synthetic oligonucleotide
uaagauguaauauuucugu

SEQ ID NO: 2849930 - RNA, 19 nt, Artificial Sequence
  Description of Artificial Sequence: Synthetic oligonucleotide
uuauuuauaaguaucucua

SEQ ID NO: 2849931 - RNA, 19 nt, Artificial Sequence
  Description of Artificial Sequence: Synthetic oligonucleotide
gauguaauauuucuguaug

SEQ ID NO: 2849932 - RNA, 19 nt, Artificial Sequence
  Description of Artificial Sequence: Synthetic oligonucleotide
uauaaguaucucuacagca

SEQ ID NO: 2849933 - RNA, 19 nt, Artificial Sequence
  Description of Artificial Sequence: Synthetic oligonucleotide
aaccauuucugacaagagg

SEQ ID NO: 2849934 - RNA, 19 nt, Artificial Sequence
  Description of Artificial Sequence: Synthetic oligonucleotide
accauuucugacaagaggc

SEQ ID NO: 2849935 - RNA, 19 nt, Artificial Sequence
  Description of Artificial Sequence: Synthetic oligonucleotide
ugugccauuuccaaaaugu

SEQ ID NO: 2849936 - RNA, 19 nt, Artificial Sequence
  Description of Artificial Sequence: Synthetic oligonucleotide
acauuaaucucauuuaaga

SEQ ID NO: 2849937 - RNA, 19 nt, Artificial Sequence
  Description of Artificial Sequence: Synthetic oligonucleotide
aaugaaccacauuagguga

SEQ ID NO: 2849938 - RNA, 19 nt, Artificial Sequence
  Description of Artificial Sequence: Synthetic oligonucleotide
agaaaugaaccacauuagg

SEQ ID NO: 2849939 - RNA, 19 nt, Artificial Sequence
  Description of Artificial Sequence: Synthetic oligonucleotide
gucaguaagaacuaagaug

SEQ ID NO: 2849940 - RNA, 19 nt, Artificial Sequence
  Description of Artificial Sequence: Synthetic oligonucleotide
accacauuaggugacagcc

SEQ ID NO: 2849941 - RNA, 19 nt, Artificial Sequence
  Description of Artificial Sequence: Synthetic oligonucleotide
acaaugaacauuuauuuau

SEQ ID NO: 2849942 - RNA, 19 nt, Artificial Sequence
  Description of Artificial Sequence: Synthetic oligonucleotide
acuaagauguaauauuucu

SEQ ID NO: 2849943 - RNA, 19 nt, Artificial Sequence
  Description of Artificial Sequence: Synthetic oligonucleotide
uuauaaguaucucuacagc

SEQ ID NO: 2849944 - RNA, 19 nt, Artificial Sequence
  Description of Artificial Sequence: Synthetic oligonucleotide
cuacacagagaaaugaacc

SEQ ID NO: 2849945 - RNA, 19 nt, Artificial Sequence
  Description of Artificial Sequence: Synthetic oligonucleotide
aaaaugucaaacauuaaaa

SEQ ID NO: 2849946 - RNA, 19 nt, Artificial Sequence
  Description of Artificial Sequence: Synthetic oligonucleotide
uucauuuguacaaauccca

SEQ ID NO: 2849947 - RNA, 19 nt, Artificial Sequence
  Description of Artificial Sequence: Synthetic oligonucleotide
aacauuuauuuauaaguau

SEQ ID NO: 2849948 - RNA, 19 nt, Artificial Sequence
  Description of Artificial Sequence: Synthetic oligonucleotide
uucuguaugugccauuucc

SEQ ID NO: 2849949 - RNA, 19 nt, Artificial Sequence
  Description of Artificial Sequence: Synthetic oligonucleotide
aauauuucuguaugugcca

SEQ ID NO: 2849950 - RNA, 19 nt, Artificial Sequence
  Description of Artificial Sequence: Synthetic oligonucleotide
uuaaaauccuaugucacca

SEQ ID NO: 2849951 - RNA, 19 nt, Artificial Sequence
  Description of Artificial Sequence: Synthetic oligonucleotide
acauuuauuuauaaguauc

SEQ ID NO: 2849952 - RNA, 19 nt, Artificial Sequence
  Description of Artificial Sequence: Synthetic oligonucleotide
guaauauuucuguaugugc

SEQ ID NO: 2849953 - RNA, 19 nt, Artificial Sequence
  Description of Artificial Sequence: Synthetic oligonucleotide
auuuauaaguaucucuaca

SEQ ID NO: 2849954 - RNA, 19 nt, Artificial Sequence
  Description of Artificial Sequence: Synthetic oligonucleotide
uaacaaugaacauuuauuu

SEQ ID NO: 2849955 - RNA, 19 nt, Artificial Sequence
  Description of Artificial Sequence: Synthetic oligonucleotide
uguaauauuucuguaugug

SEQ ID NO: 2849956 - RNA, 19 nt, Artificial Sequence
  Description of Artificial Sequence: Synthetic oligonucleotide
gacaagaggccucacacag

SEQ ID NO: 2849957 - RNA, 19 nt, Artificial Sequence
  Description of Artificial Sequence: Synthetic oligonucleotide
uaaguaucucuacagcacc

SEQ ID NO: 2849958 - RNA, 19 nt, Artificial Sequence
  Description of Artificial Sequence: Synthetic oligonucleotide
acaaaucccacacggguac

SEQ ID NO: 2849959 - RNA, 19 nt, Artificial Sequence
  Description of Artificial Sequence: Synthetic oligonucleotide
uguacaaaucccacacggg

SEQ ID NO: 2849960 - RNA, 19 nt, Artificial Sequence
  Description of Artificial Sequence: Synthetic oligonucleotide
cauuaaucucauuuaagac

SEQ ID NO: 2849961 - RNA, 19 nt, Artificial Sequence
  Description of Artificial Sequence: Synthetic oligonucleotide
auuuccaaaaugucaaaca

SEQ ID NO: 2849962 - RNA, 19 nt, Artificial Sequence
  Description of Artificial Sequence: Synthetic oligonucleotide
gaaacgucacgucaguaag

SEQ ID NO: 2849963 - RNA, 19 nt, Artificial Sequence
  Description of Artificial Sequence: Synthetic oligonucleotide
auaaaaugaaacgucacgu

SEQ ID NO: 2849964 - RNA, 19 nt, Artificial Sequence
  Description of Artificial Sequence: Synthetic oligonucleotide
aaugaacauuuauuuauaa

SEQ ID NO: 2849965 - RNA, 19 nt, Artificial Sequence
  Description of Artificial Sequence: Synthetic oligonucleotide
cauuaaaauccuaugucac

SEQ ID NO: 2849966 - RNA, 19 nt, Artificial Sequence
  Description of Artificial Sequence: Synthetic oligonucleotide
aaccacauuaggugacagc

SEQ ID NO: 2849967 - RNA, 19 nt, Artificial Sequence
  Description of Artificial Sequence: Synthetic oligonucleotide
uuuguacaaaucccacacg

SEQ ID NO: 2849968 - RNA, 19 nt, Artificial Sequence
  Description of Artificial Sequence: Synthetic oligonucleotide
caaacauuaaaauccuaug

SEQ ID NO: 2849969 - RNA, 19 nt, Artificial Sequence
  Description of Artificial Sequence: Synthetic oligonucleotide
uccuaugucaccaaaucuc

SEQ ID NO: 2849970 - RNA, 19 nt, Artificial Sequence
  Description of Artificial Sequence: Synthetic oligonucleotide
agaacuaagauguaauauu

SEQ ID NO: 2849971 - RNA, 19 nt, Artificial Sequence
  Description of Artificial Sequence: Synthetic oligonucleotide
auaaguaucucuacagcac

SEQ ID NO: 2849972 - RNA, 19 nt, Artificial Sequence
  Description of Artificial Sequence: Synthetic oligonucleotide
agaugaauggccguggcgg

SEQ ID NO: 2849973 - RNA, 19 nt, Artificial Sequence
  Description of Artificial Sequence: Synthetic oligonucleotide
auaaauaacaaugaacauu

SEQ ID NO: 2849974 - RNA, 19 nt, Artificial Sequence
  Description of Artificial Sequence: Synthetic oligonucleotide
uccuugucagccaugcagg

SEQ ID NO: 2849975 - RNA, 19 nt, Artificial Sequence
  Description of Artificial Sequence: Synthetic oligonucleotide
caggauggcguccugaucg

SEQ ID NO: 2849976 - RNA, 19 nt, Artificial Sequence
  Description of Artificial Sequence: Synthetic oligonucleotide
aagaugaauggccguggcg

SEQ ID NO: 2849977 - RNA, 19 nt, Artificial Sequence
  Description of Artificial Sequence: Synthetic oligonucleotide
aucucuguucuacacagag

SEQ ID NO: 2849978 - RNA, 19 nt, Artificial Sequence
  Description of Artificial Sequence: Synthetic oligonucleotide
cuaagauguaauauuucug

SEQ ID NO: 2849979 - RNA, 19 nt, Artificial Sequence
  Description of Artificial Sequence: Synthetic oligonucleotide
auuuauuuauaaguaucuc

SEQ ID NO: 2849980 - RNA, 19 nt, Artificial Sequence
  Description of Artificial Sequence: Synthetic oligonucleotide
ugccauuuccaaaauguca

SEQ ID NO: 2849981 - RNA, 19 nt, Artificial Sequence
  Description of Artificial Sequence: Synthetic oligonucleotide
aagaacuaagauguaauau

SEQ ID NO: 2849982 - RNA, 19 nt, Artificial Sequence
  Description of Artificial Sequence: Synthetic oligonucleotide
auccuugucagccaugcag

SEQ ID NO: 2849983 - RNA, 19 nt, Artificial Sequence
  Description of Artificial Sequence: Synthetic oligonucleotide
uaugucaccaaaucucugu

SEQ ID NO: 2849984 - RNA, 19 nt, Artificial Sequence
  Description of Artificial Sequence: Synthetic oligonucleotide
uugucagccaugcaggugu

SEQ ID NO: 2849985 - RNA, 19 nt, Artificial Sequence
  Description of Artificial Sequence: Synthetic oligonucleotide
ucgucauucacuucauuug

SEQ ID NO: 2849986 - RNA, 19 nt, Artificial Sequence
  Description of Artificial Sequence: Synthetic oligonucleotide
acacacauuaaucucauuu

SEQ ID NO: 2849987 - RNA, 19 nt, Artificial Sequence
  Description of Artificial Sequence: Synthetic oligonucleotide
gaaaccauuucugacaaga

SEQ ID NO: 2849988 - RNA, 19 nt, Artificial Sequence
  Description of Artificial Sequence: Synthetic oligonucleotide
uguucuacacagagaaaug

SEQ ID NO: 2849989 - RNA, 19 nt, Artificial Sequence
  Description of Artificial Sequence: Synthetic oligonucleotide
aacuaagauguaauauuuc

SEQ ID NO: 2849990 - RNA, 19 nt, Artificial Sequence
  Description of Artificial Sequence: Synthetic oligonucleotide
uaaaaugaaacgucacguc

SEQ ID NO: 2849991 - RNA, 19 nt, Artificial Sequence
  Description of Artificial Sequence: Synthetic oligonucleotide
agauguaauauuucuguau

SEQ ID NO: 2849992 - RNA, 19 nt, Artificial Sequence
  Description of Artificial Sequence: Synthetic oligonucleotide
aaguaucucuacagcaccc

SEQ ID NO: 2849993 - RNA, 19 nt, Artificial Sequence
  Description of Artificial Sequence: Synthetic oligonucleotide
auucacuucauuuguacaa

SEQ ID NO: 2849994 - RNA, 19 nt, Artificial Sequence
  Description of Artificial Sequence: Synthetic oligonucleotide
ucucuagugcgcauuagcu

SEQ ID NO: 2849995 - RNA, 19 nt, Artificial Sequence
  Description of Artificial Sequence: Synthetic oligonucleotide
ucauuuguacaaaucccac

SEQ ID NO: 2849996 - RNA, 19 nt, Artificial Sequence
  Description of Artificial Sequence: Synthetic oligonucleotide
caauaaaaugaaacgucac

SEQ ID NO: 2849997 - RNA, 19 nt, Artificial Sequence
  Description of Artificial Sequence: Synthetic oligonucleotide
aaugaaacgucacgucagu

SEQ ID NO: 2849998 - RNA, 19 nt, Artificial Sequence
  Description of Artificial Sequence: Synthetic oligonucleotide
ugcggugaaaccauuucug

SEQ ID NO: 2849999 - RNA, 19 nt, Artificial Sequence
  Description of Artificial Sequence: Synthetic oligonucleotide
augcaggugucacagcccc

SEQ ID NO: 2850000 - RNA, 19 nt, Artificial Sequence
  Description of Artificial Sequence: Synthetic oligonucleotide
cacauuaaucucauuuaag

SEQ ID NO: 2850001 - RNA, 19 nt, Artificial Sequence
  Description of Artificial Sequence: Synthetic oligonucleotide
gagaaaugaaccacauuag

SEQ ID NO: 2850002 - RNA, 19 nt, Artificial Sequence
  Description of Artificial Sequence: Synthetic oligonucleotide
ucuguaugugccauuucca

SEQ ID NO: 2850003 - RNA, 19 nt, Artificial Sequence
  Description of Artificial Sequence: Synthetic oligonucleotide
acaauaaaaugaaacguca

SEQ ID NO: 2850004 - RNA, 19 nt, Artificial Sequence
  Description of Artificial Sequence: Synthetic oligonucleotide
auaacaaugaacauuuauu

SEQ ID NO: 2850005 - RNA, 19 nt, Artificial Sequence
  Description of Artificial Sequence: Synthetic oligonucleotide
aaucucauuuaagacaaaa

SEQ ID NO: 2850006 - RNA, 19 nt, Artificial Sequence
  Description of Artificial Sequence: Synthetic oligonucleotide
ugaaacgucacgucaguaa

SEQ ID NO: 2850007 - RNA, 19 nt, Artificial Sequence
  Description of Artificial Sequence: Synthetic oligonucleotide
ucauuccgggugcagaugc

SEQ ID NO: 2850008 - RNA, 19 nt, Artificial Sequence
  Description of Artificial Sequence: Synthetic oligonucleotide
acacagagaaaugaaccac

SEQ ID NO: 2850009 - RNA, 19 nt, Artificial Sequence
  Description of Artificial Sequence: Synthetic oligonucleotide
guuucggucauuccgggug

SEQ ID NO: 2850010 - RNA, 19 nt, Artificial Sequence
  Description of Artificial Sequence: Synthetic oligonucleotide
aaaauccuaugucaccaaa

SEQ ID NO: 2850011 - RNA, 19 nt, Artificial Sequence
  Description of Artificial Sequence: Synthetic oligonucleotide
aguaucucuacagcacccc

SEQ ID NO: 2850012 - RNA, 19 nt, Artificial Sequence
  Description of Artificial Sequence: Synthetic oligonucleotide
acauccuugucagccaugc

SEQ ID NO: 2850013 - RNA, 19 nt, Artificial Sequence
  Description of Artificial Sequence: Synthetic oligonucleotide
aagauguaauauuucugua

SEQ ID NO: 2850014 - RNA, 19 nt, Artificial Sequence
  Description of Artificial Sequence: Synthetic oligonucleotide
uucuacacagagaaaugaa

SEQ ID NO: 2850015 - RNA, 19 nt, Artificial Sequence
  Description of Artificial Sequence: Synthetic oligonucleotide
uaagaacuaagauguaaua

SEQ ID NO: 2850016 - RNA, 19 nt, Artificial Sequence
  Description of Artificial Sequence: Synthetic oligonucleotide
auuagcuggacauccuugu

SEQ ID NO: 2850017 - RNA, 19 nt, Artificial Sequence
  Description of Artificial Sequence: Synthetic oligonucleotide
gucagaagaugaauggccg

SEQ ID NO: 2850018 - RNA, 19 nt, Artificial Sequence
  Description of Artificial Sequence: Synthetic oligonucleotide
acacauuaaucucauuuaa

SEQ ID NO: 2850019 - RNA, 19 nt, Artificial Sequence
  Description of Artificial Sequence: Synthetic oligonucleotide
aaucccacacggguacacc

SEQ ID NO: 2850020 - RNA, 19 nt, Artificial Sequence
  Description of Artificial Sequence: Synthetic oligonucleotide
uaggcgucaccgcucacgg

SEQ ID NO: 2850021 - RNA, 19 nt, Artificial Sequence
  Description of Artificial Sequence: Synthetic oligonucleotide
gaacauuuauuuauaagua

SEQ ID NO: 2850022 - RNA, 19 nt, Artificial Sequence
  Description of Artificial Sequence: Synthetic oligonucleotide
cucuguucuacacagagaa

SEQ ID NO: 2850023 - RNA, 19 nt, Artificial Sequence
  Description of Artificial Sequence: Synthetic oligonucleotide
agcuggacauccuugucag

SEQ ID NO: 2850024 - RNA, 19 nt, Artificial Sequence
  Description of Artificial Sequence: Synthetic oligonucleotide
auguaauauuucuguaugu

SEQ ID NO: 2850025 - RNA, 19 nt, Artificial Sequence
  Description of Artificial Sequence: Synthetic oligonucleotide
aucgucauucacuucauuu

SEQ ID NO: 2850026 - RNA, 19 nt, Artificial Sequence
  Description of Artificial Sequence: Synthetic oligonucleotide
cauuaggugacagccgugg

SEQ ID NO: 2850027 - RNA, 19 nt, Artificial Sequence
  Description of Artificial Sequence: Synthetic oligonucleotide
aaaucccacacggguacac

SEQ ID NO: 2850028 - RNA, 19 nt, Artificial Sequence
  Description of Artificial Sequence: Synthetic oligonucleotide
aguaagaacuaagauguaa

SEQ ID NO: 2850029 - RNA, 19 nt, Artificial Sequence
  Description of Artificial Sequence: Synthetic oligonucleotide
ugcagaugcggugaaacca

SEQ ID NO: 2850030 - RNA, 19 nt, Artificial Sequence
  Description of Artificial Sequence: Synthetic oligonucleotide
cuggacauccuugucagcc

SEQ ID NO: 2850031 - RNA, 19 nt, Artificial Sequence
  Description of Artificial Sequence: Synthetic oligonucleotide
uuaggcgucaccgcucacg

SEQ ID NO: 2850032 - RNA, 19 nt, Artificial Sequence
  Description of Artificial Sequence: Synthetic oligonucleotide
cugaucgucauucacuuca

SEQ ID NO: 2850033 - RNA, 19 nt, Artificial Sequence
  Description of Artificial Sequence: Synthetic oligonucleotide
gagcccauaggcuguuucg

SEQ ID NO: 2850034 - RNA, 19 nt, Artificial Sequence
  Description of Artificial Sequence: Synthetic oligonucleotide
aaaccauuucugacaagag

SEQ ID NO: 2850035 - RNA, 19 nt, Artificial Sequence
  Description of Artificial Sequence: Synthetic oligonucleotide
cauuuauuuauaaguaucu

SEQ ID NO: 2850036 - RNA, 19 nt, Artificial Sequence
  Description of Artificial Sequence: Synthetic oligonucleotide
gaaaugaaccacauuaggu

SEQ ID NO: 2850037 - RNA, 19 nt, Artificial Sequence
  Description of Artificial Sequence: Synthetic oligonucleotide
ggcuguuucggucauuccg

SEQ ID NO: 2850038 - RNA, 19 nt, Artificial Sequence
  Description of Artificial Sequence: Synthetic oligonucleotide
auccuaugucaccaaaucu

SEQ ID NO: 2850039 - RNA, 19 nt, Artificial Sequence
  Description of Artificial Sequence: Synthetic oligonucleotide
agaagaugaauggccgugg

SEQ ID NO: 2850040 - RNA, 19 nt, Artificial Sequence
  Description of Artificial Sequence: Synthetic oligonucleotide
cacgucaguaagaacuaag

SEQ ID NO: 2850041 - RNA, 19 nt, Artificial Sequence
  Description of Artificial Sequence: Synthetic oligonucleotide
gaugcggugaaaccauuuc

SEQ ID NO: 2850042 - RNA, 19 nt, Artificial Sequence
  Description of Artificial Sequence: Synthetic oligonucleotide
gucacagccccacaccgcg

SEQ ID NO: 2850043 - RNA, 19 nt, Artificial Sequence
  Description of Artificial Sequence: Synthetic oligonucleotide
aucccacacggguacaccg

SEQ ID NO: 2850044 - RNA, 19 nt, Artificial Sequence
  Description of Artificial Sequence: Synthetic oligonucleotide
cauuuccaaaaugucaaac

SEQ ID NO: 2850045 - RNA, 19 nt, Artificial Sequence
  Description of Artificial Sequence: Synthetic oligonucleotide
gaagaugaauggccguggc

SEQ ID NO: 2850046 - RNA, 19 nt, Artificial Sequence
  Description of Artificial Sequence: Synthetic oligonucleotide
uacaaaucccacacgggua

SEQ ID NO: 2850047 - RNA, 19 nt, Artificial Sequence
  Description of Artificial Sequence: Synthetic oligonucleotide
aggugucacagccccacac

SEQ ID NO: 2850048 - RNA, 19 nt, Artificial Sequence
  Description of Artificial Sequence: Synthetic oligonucleotide
gauaaauaacaaugaacau

SEQ ID NO: 2850049 - RNA, 19 nt, Artificial Sequence
  Description of Artificial Sequence: Synthetic oligonucleotide
cauuagcuggacauccuug

SEQ ID NO: 2850050 - RNA, 19 nt, Artificial Sequence
  Description of Artificial Sequence: Synthetic oligonucleotide
cucucuagugcgcauuagc

SEQ ID NO: 2850051 - RNA, 19 nt, Artificial Sequence
  Description of Artificial Sequence: Synthetic oligonucleotide
uuucggucauuccgggugc

SEQ ID NO: 2850052 - RNA, 19 nt, Artificial Sequence
  Description of Artificial Sequence: Synthetic oligonucleotide
gugucacagccccacaccg

SEQ ID NO: 2850053 - RNA, 19 nt, Artificial Sequence
  Description of Artificial Sequence: Synthetic oligonucleotide
aacgucacgucaguaagaa

SEQ ID NO: 2850054 - RNA, 19 nt, Artificial Sequence
  Description of Artificial Sequence: Synthetic oligonucleotide
ucucuguucuacacagaga

SEQ ID NO: 2850055 - RNA, 19 nt, Artificial Sequence
  Description of Artificial Sequence: Synthetic oligonucleotide
ucagaagaugaauggccgu

SEQ ID NO: 2850056 - RNA, 19 nt, Artificial Sequence
  Description of Artificial Sequence: Synthetic oligonucleotide
gaugaauggccguggcggc

SEQ ID NO: 2850057 - RNA, 19 nt, Artificial Sequence
  Description of Artificial Sequence: Synthetic oligonucleotide
aaauccuaugucaccaaau

SEQ ID NO: 2850058 - RNA, 19 nt, Artificial Sequence
  Description of Artificial Sequence: Synthetic oligonucleotide
cucuagugcgcauuagcug

SEQ ID NO: 2850059 - RNA, 19 nt, Artificial Sequence
  Description of Artificial Sequence: Synthetic oligonucleotide
ugacaagaggccucacaca

SEQ ID NO: 2850060 - RNA, 19 nt, Artificial Sequence
  Description of Artificial Sequence: Synthetic oligonucleotide
cacuucauuuguacaaauc

SEQ ID NO: 2850061 - RNA, 19 nt, Artificial Sequence
  Description of Artificial Sequence: Synthetic oligonucleotide
uaaaauccuaugucaccaa

SEQ ID NO: 2850062 - RNA, 19 nt, Artificial Sequence
  Description of Artificial Sequence: Synthetic oligonucleotide
augcggugaaaccauuucu

SEQ ID NO: 2850063 - RNA, 19 nt, Artificial Sequence
  Description of Artificial Sequence: Synthetic oligonucleotide
cauuuguacaaaucccaca

SEQ ID NO: 2850064 - RNA, 19 nt, Artificial Sequence
  Description of Artificial Sequence: Synthetic oligonucleotide
augaaccacauuaggugac

SEQ ID NO: 2850065 - RNA, 19 nt, Artificial Sequence
  Description of Artificial Sequence: Synthetic oligonucleotide
ucccacacggguacaccgg

SEQ ID NO: 2850066 - RNA, 19 nt, Artificial Sequence
  Description of Artificial Sequence: Synthetic oligonucleotide
ggucagaagaugaauggcc

SEQ ID NO: 2850067 - RNA, 19 nt, Artificial Sequence
  Description of Artificial Sequence: Synthetic oligonucleotide
uuaggugacagccgugguu

SEQ ID NO: 2850068 - RNA, 19 nt, Artificial Sequence
  Description of Artificial Sequence: Synthetic oligonucleotide
cacagagaaaugaaccaca

SEQ ID NO: 2850069 - RNA, 19 nt, Artificial Sequence
  Description of Artificial Sequence: Synthetic oligonucleotide
gguacaccgggucagaaga

SEQ ID NO: 2850070 - RNA, 19 nt, Artificial Sequence
  Description of Artificial Sequence: Synthetic oligonucleotide
uucacuucauuuguacaaa

SEQ ID NO: 2850071 - RNA, 19 nt, Artificial Sequence
  Description of Artificial Sequence: Synthetic oligonucleotide
guucuacacagagaaauga

SEQ ID NO: 2850072 - RNA, 19 nt, Artificial Sequence
  Description of Artificial Sequence: Synthetic oligonucleotide
uccugaucgucauucacuu

SEQ ID NO: 2850073 - RNA, 19 nt, Artificial Sequence
  Description of Artificial Sequence: Synthetic oligonucleotide
agccccacaccgcggaggc

SEQ ID NO: 2850074 - RNA, 19 nt, Artificial Sequence
  Description of Artificial Sequence: Synthetic oligonucleotide
cacacacacacauuaaucu

SEQ ID NO: 2850075 - RNA, 19 nt, Artificial Sequence
  Description of Artificial Sequence: Synthetic oligonucleotide
caugcaggugucacagccc

SEQ ID NO: 2850076 - RNA, 19 nt, Artificial Sequence
  Description of Artificial Sequence: Synthetic oligonucleotide
cacacauuaaucucauuua

SEQ ID NO: 2850077 - RNA, 19 nt, Artificial Sequence
  Description of Artificial Sequence: Synthetic oligonucleotide
accaaaucucuguucuaca

SEQ ID NO: 2850078 - RNA, 19 nt, Artificial Sequence
  Description of Artificial Sequence: Synthetic oligonucleotide
uuucugacaagaggccuca

SEQ ID NO: 2850079 - RNA, 19 nt, Artificial Sequence
  Description of Artificial Sequence: Synthetic oligonucleotide
caaaucucuguucuacaca

SEQ ID NO: 2850080 - RNA, 19 nt, Artificial Sequence
  Description of Artificial Sequence: Synthetic oligonucleotide
caagaggccucacacagga

SEQ ID NO: 2850081 - RNA, 19 nt, Artificial Sequence
  Description of Artificial Sequence: Synthetic oligonucleotide
cauucacuucauuuguaca

SEQ ID NO: 2850082 - RNA, 19 nt, Artificial Sequence
  Description of Artificial Sequence: Synthetic oligonucleotide
guacaaaucccacacgggu

SEQ ID NO: 2850083 - RNA, 19 nt, Artificial Sequence
  Description of Artificial Sequence: Synthetic oligonucleotide
gugaaaccauuucugacaa

SEQ ID NO: 2850084 - RNA, 19 nt, Artificial Sequence
  Description of Artificial Sequence: Synthetic oligonucleotide
ugucaccaaaucucuguuc

SEQ ID NO: 2850085 - RNA, 19 nt, Artificial Sequence
  Description of Artificial Sequence: Synthetic oligonucleotide
agccaugcaggugucacag

SEQ ID NO: 2850086 - RNA, 19 nt, Artificial Sequence
  Description of Artificial Sequence: Synthetic oligonucleotide
uaggugacagccgugguua

SEQ ID NO: 2850087 - RNA, 19 nt, Artificial Sequence
  Description of Artificial Sequence: Synthetic oligonucleotide
caccaaaucucuguucuac

SEQ ID NO: 2850088 - RNA, 19 nt, Artificial Sequence
  Description of Artificial Sequence: Synthetic oligonucleotide
accgcggaggccucggccg

SEQ ID NO: 2850089 - RNA, 19 nt, Artificial Sequence
  Description of Artificial Sequence: Synthetic oligonucleotide
ugucacagccccacaccgc

SEQ ID NO: 2850090 - RNA, 19 nt, Artificial Sequence
  Description of Artificial Sequence: Synthetic oligonucleotide
gucaccaaaucucuguucu

SEQ ID NO: 2850091 - RNA, 19 nt, Artificial Sequence
  Description of Artificial Sequence: Synthetic oligonucleotide
ucacuucauuuguacaaau

SEQ ID NO: 2850092 - RNA, 19 nt, Artificial Sequence
  Description of Artificial Sequence: Synthetic oligonucleotide
uuagcuggacauccuuguc

SEQ ID NO: 2850093 - RNA, 19 nt, Artificial Sequence
  Description of Artificial Sequence: Synthetic oligonucleotide
cuaugucaccaaaucucug

SEQ ID NO: 2850094 - RNA, 19 nt, Artificial Sequence
  Description of Artificial Sequence: Synthetic oligonucleotide
augugccauuuccaaaaug

SEQ ID NO: 2850095 - RNA, 19 nt, Artificial Sequence
  Description of Artificial Sequence: Synthetic oligonucleotide
ucuguucuacacagagaaa

SEQ ID NO: 2850096 - RNA, 19 nt, Artificial Sequence
  Description of Artificial Sequence: Synthetic oligonucleotide
accgaaggccucucuagug

SEQ ID NO: 2850097 - RNA, 19 nt, Artificial Sequence
  Description of Artificial Sequence: Synthetic oligonucleotide
ugaaccacauuaggugaca

SEQ ID NO: 2850098 - RNA, 19 nt, Artificial Sequence
  Description of Artificial Sequence: Synthetic oligonucleotide
auuucuguaugugccauuu

SEQ ID NO: 2850099 - RNA, 19 nt, Artificial Sequence
  Description of Artificial Sequence: Synthetic oligonucleotide
acgucaguaagaacuaaga

SEQ ID NO: 2850100 - RNA, 19 nt, Artificial Sequence
  Description of Artificial Sequence: Synthetic oligonucleotide
gcuguuucggucauuccgg

SEQ ID NO: 2850101 - RNA, 19 nt, Artificial Sequence
  Description of Artificial Sequence: Synthetic oligonucleotide
cagaagaugaauggccgug

SEQ ID NO: 2850102 - RNA, 19 nt, Artificial Sequence
  Description of Artificial Sequence: Synthetic oligonucleotide
cuguuucggucauuccggg

SEQ ID NO: 2850103 - RNA, 19 nt, Artificial Sequence
  Description of Artificial Sequence: Synthetic oligonucleotide
ucagccaugcaggugucac

SEQ ID NO: 2850104 - RNA, 19 nt, Artificial Sequence
  Description of Artificial Sequence: Synthetic oligonucleotide
uggacauccuugucagcca

SEQ ID NO: 2850105 - RNA, 19 nt, Artificial Sequence
  Description of Artificial Sequence: Synthetic oligonucleotide
gugacagccgugguuaggc

SEQ ID NO: 2850106 - RNA, 19 nt, Artificial Sequence
  Description of Artificial Sequence: Synthetic oligonucleotide
ugacagccgugguuaggcg

SEQ ID NO: 2850107 - RNA, 19 nt, Artificial Sequence
  Description of Artificial Sequence: Synthetic oligonucleotide
gaaccacauuaggugacag

SEQ ID NO: 2850108 - RNA, 19 nt, Artificial Sequence
  Description of Artificial Sequence: Synthetic oligonucleotide
caaugaacauuuauuuaua

SEQ ID NO: 2850109 - RNA, 19 nt, Artificial Sequence
  Description of Artificial Sequence: Synthetic oligonucleotide
gaacuaagauguaauauuu

SEQ ID NO: 2850110 - RNA, 19 nt, Artificial Sequence
  Description of Artificial Sequence: Synthetic oligonucleotide
ggcgucaccgcucacggcc

SEQ ID NO: 2850111 - RNA, 19 nt, Artificial Sequence
  Description of Artificial Sequence: Synthetic oligonucleotide
aggcuguuucggucauucc

SEQ ID NO: 2850112 - RNA, 19 nt, Artificial Sequence
  Description of Artificial Sequence: Synthetic oligonucleotide
agcccauaggcuguuucgg

SEQ ID NO: 2850113 - RNA, 19 nt, Artificial Sequence
  Description of Artificial Sequence: Synthetic oligonucleotide
uaggcuguuucggucauuc

SEQ ID NO: 2850114 - RNA, 19 nt, Artificial Sequence
  Description of Artificial Sequence: Synthetic oligonucleotide
aaacgucacgucaguaaga

SEQ ID NO: 2850115 - RNA, 19 nt, Artificial Sequence
  Description of Artificial Sequence: Synthetic oligonucleotide
auuccgggugcagaugcgg

SEQ ID NO: 2850116 - RNA, 19 nt, Artificial Sequence
  Description of Artificial Sequence: Synthetic oligonucleotide
uacaccgggucagaagaug

SEQ ID NO: 2850117 - RNA, 19 nt, Artificial Sequence
  Description of Artificial Sequence: Synthetic oligonucleotide
uuucuguaugugccauuuc

SEQ ID NO: 2850118 - RNA, 19 nt, Artificial Sequence
  Description of Artificial Sequence: Synthetic oligonucleotide
auauuucuguaugugccau

SEQ ID NO: 2850119 - RNA, 19 nt, Artificial Sequence
  Description of Artificial Sequence: Synthetic oligonucleotide
auuaggugacagccguggu

SEQ ID NO: 2850120 - RNA, 19 nt, Artificial Sequence
  Description of Artificial Sequence: Synthetic oligonucleotide
acggccgguggaccgaagg

SEQ ID NO: 2850121 - RNA, 19 nt, Artificial Sequence
  Description of Artificial Sequence: Synthetic oligonucleotide
ugaucgucauucacuucau

SEQ ID NO: 2850122 - RNA, 19 nt, Artificial Sequence
  Description of Artificial Sequence: Synthetic oligonucleotide
guaagaacuaagauguaau

SEQ ID NO: 2850123 - RNA, 19 nt, Artificial Sequence
  Description of Artificial Sequence: Synthetic oligonucleotide
ccaugcaggugucacagcc

SEQ ID NO: 2850124 - RNA, 19 nt, Artificial Sequence
  Description of Artificial Sequence: Synthetic oligonucleotide
acgucacgucaguaagaac

SEQ ID NO: 2850125 - RNA, 19 nt, Artificial Sequence
  Description of Artificial Sequence: Synthetic oligonucleotide
gugcagaugcggugaaacc

SEQ ID NO: 2850126 - RNA, 19 nt, Artificial Sequence
  Description of Artificial Sequence: Synthetic oligonucleotide
ccaaaucucuguucuacac

SEQ ID NO: 2850127 - RNA, 19 nt, Artificial Sequence
  Description of Artificial Sequence: Synthetic oligonucleotide
acagccgugguuaggcguc

SEQ ID NO: 2850128 - RNA, 19 nt, Artificial Sequence
  Description of Artificial Sequence: Synthetic oligonucleotide
ccauuucugacaagaggcc

SEQ ID NO: 2850129 - RNA, 19 nt, Artificial Sequence
  Description of Artificial Sequence: Synthetic oligonucleotide
uguuucggucauuccgggu

SEQ ID NO: 2850130 - RNA, 19 nt, Artificial Sequence
  Description of Artificial Sequence: Synthetic oligonucleotide
cuguaugugccauuuccaa

SEQ ID NO: 2850131 - RNA, 19 nt, Artificial Sequence
  Description of Artificial Sequence: Synthetic oligonucleotide
ggugucacagccccacacc

SEQ ID NO: 2850132 - RNA, 19 nt, Artificial Sequence
  Description of Artificial Sequence: Synthetic oligonucleotide
cauuccgggugcagaugcg

SEQ ID NO: 2850133 - RNA, 19 nt, Artificial Sequence
  Description of Artificial Sequence: Synthetic oligonucleotide
aaggccucucuagugcgca

SEQ ID NO: 2850134 - RNA, 19 nt, Artificial Sequence
  Description of Artificial Sequence: Synthetic oligonucleotide
ggaccgaaggccucucuag

SEQ ID NO: 2850135 - RNA, 19 nt, Artificial Sequence
  Description of Artificial Sequence: Synthetic oligonucleotide
uggaccgaaggccucucua

SEQ ID NO: 2850136 - RNA, 19 nt, Artificial Sequence
  Description of Artificial Sequence: Synthetic oligonucleotide
uauuucuguaugugccauu

SEQ ID NO: 2850137 - RNA, 19 nt, Artificial Sequence
  Description of Artificial Sequence: Synthetic oligonucleotide
uccgggugcagaugcggug

SEQ ID NO: 2850138 - RNA, 19 nt, Artificial Sequence
  Description of Artificial Sequence: Synthetic oligonucleotide
ucacagccccacaccgcgg

SEQ ID NO: 2850139 - RNA, 19 nt, Artificial Sequence
  Description of Artificial Sequence: Synthetic oligonucleotide
acaagaggccucacacagg

SEQ ID NO: 2850140 - RNA, 19 nt, Artificial Sequence
  Description of Artificial Sequence: Synthetic oligonucleotide
ccacacacacacauuaauc

SEQ ID NO: 2850141 - RNA, 19 nt, Artificial Sequence
  Description of Artificial Sequence: Synthetic oligonucleotide
ucacacaggauggcguccu

SEQ ID NO: 2850142 - RNA, 19 nt, Artificial Sequence
  Description of Artificial Sequence: Synthetic oligonucleotide
uuccgggugcagaugcggu

SEQ ID NO: 2850143 - RNA, 19 nt, Artificial Sequence
  Description of Artificial Sequence: Synthetic oligonucleotide
ggugcagaugcggugaaac

SEQ ID NO: 2850144 - RNA, 19 nt, Artificial Sequence
  Description of Artificial Sequence: Synthetic oligonucleotide
ugguuaggcgucaccgcuc

SEQ ID NO: 2850145 - RNA, 19 nt, Artificial Sequence
  Description of Artificial Sequence: Synthetic oligonucleotide
agugcgcauuagcuggaca

SEQ ID NO: 2850146 - RNA, 19 nt, Artificial Sequence
  Description of Artificial Sequence: Synthetic oligonucleotide
gaggccucggccgucagga

SEQ ID NO: 2850147 - RNA, 19 nt, Artificial Sequence
  Description of Artificial Sequence: Synthetic oligonucleotide
aaucucuguucuacacaga

SEQ ID NO: 2850148 - RNA, 19 nt, Artificial Sequence
  Description of Artificial Sequence: Synthetic oligonucleotide
acacggguacaccggguca

SEQ ID NO: 2850149 - RNA, 19 nt, Artificial Sequence
  Description of Artificial Sequence: Synthetic oligonucleotide
gccauuuccaaaaugucaa

SEQ ID NO: 2850150 - RNA, 19 nt, Artificial Sequence
  Description of Artificial Sequence: Synthetic oligonucleotide
cacacggguacaccggguc

SEQ ID NO: 2850151 - RNA, 19 nt, Artificial Sequence
  Description of Artificial Sequence: Synthetic oligonucleotide
cgggucagaagaugaaugg

SEQ ID NO: 2850152 - RNA, 19 nt, Artificial Sequence
  Description of Artificial Sequence: Synthetic oligonucleotide
ucaccaaaucucuguucua

SEQ ID NO: 2850153 - RNA, 19 nt, Artificial Sequence
  Description of Artificial Sequence: Synthetic oligonucleotide
cuugucagccaugcaggug

SEQ ID NO: 2850154 - RNA, 19 nt, Artificial Sequence
  Description of Artificial Sequence: Synthetic oligonucleotide
cacauuaggugacagccgu

SEQ ID NO: 2850155 - RNA, 19 nt, Artificial Sequence
  Description of Artificial Sequence: Synthetic oligonucleotide
ccacauuaggugacagccg

SEQ ID NO: 2850156 - RNA, 19 nt, Artificial Sequence
  Description of Artificial Sequence: Synthetic oligonucleotide
gggucagaagaugaauggc

SEQ ID NO: 2850157 - RNA, 19 nt, Artificial Sequence
  Description of Artificial Sequence: Synthetic oligonucleotide
ccgggucagaagaugaaug

SEQ ID NO: 2850158 - RNA, 19 nt, Artificial Sequence
  Description of Artificial Sequence: Synthetic oligonucleotide
ugcgcauuagcuggacauc

SEQ ID NO: 2850159 - RNA, 19 nt, Artificial Sequence
  Description of Artificial Sequence: Synthetic oligonucleotide
gaaggccucucuagugcgc

SEQ ID NO: 2850160 - RNA, 19 nt, Artificial Sequence
  Description of Artificial Sequence: Synthetic oligonucleotide
acaccgggucagaagauga

SEQ ID NO: 2850161 - RNA, 19 nt, Artificial Sequence
  Description of Artificial Sequence: Synthetic oligonucleotide
cacggguacaccgggucag

SEQ ID NO: 2850162 - RNA, 19 nt, Artificial Sequence
  Description of Artificial Sequence: Synthetic oligonucleotide
gugccauuuccaaaauguc

SEQ ID NO: 2850163 - RNA, 19 nt, Artificial Sequence
  Description of Artificial Sequence: Synthetic oligonucleotide
ggguacaccgggucagaag

SEQ ID NO: 2850164 - RNA, 19 nt, Artificial Sequence
  Description of Artificial Sequence: Synthetic oligonucleotide
aggcgucaccgcucacggc

SEQ ID NO: 2850165 - RNA, 19 nt, Artificial Sequence
  Description of Artificial Sequence: Synthetic oligonucleotide
ucacgucaguaagaacuaa

SEQ ID NO: 2850166 - RNA, 19 nt, Artificial Sequence
  Description of Artificial Sequence: Synthetic oligonucleotide
aggauggcguccugaucgu

SEQ ID NO: 2850167 - RNA, 19 nt, Artificial Sequence
  Description of Artificial Sequence: Synthetic oligonucleotide
ccgaaggccucucuagugc

SEQ ID NO: 2850168 - RNA, 19 nt, Artificial Sequence
  Description of Artificial Sequence: Synthetic oligonucleotide
aggugacagccgugguuag

SEQ ID NO: 2850169 - RNA, 19 nt, Artificial Sequence
  Description of Artificial Sequence: Synthetic oligonucleotide
auggcguccugaucgucau

SEQ ID NO: 2850170 - RNA, 19 nt, Artificial Sequence
  Description of Artificial Sequence: Synthetic oligonucleotide
cgucacgucaguaagaacu

SEQ ID NO: 2850171 - RNA, 19 nt, Artificial Sequence
  Description of Artificial Sequence: Synthetic oligonucleotide
ugcaggugucacagcccca

SEQ ID NO: 2850172 - RNA, 19 nt, Artificial Sequence
  Description of Artificial Sequence: Synthetic oligonucleotide
acaccgcggaggccucggc

SEQ ID NO: 2850173 - RNA, 19 nt, Artificial Sequence
  Description of Artificial Sequence: Synthetic oligonucleotide
gugguuaggcgucaccgcu

SEQ ID NO: 2850174 - RNA, 19 nt, Artificial Sequence
  Description of Artificial Sequence: Synthetic oligonucleotide
gacauccuugucagccaug

SEQ ID NO: 2850175 - RNA, 19 nt, Artificial Sequence
  Description of Artificial Sequence: Synthetic oligonucleotide
gacagccgugguuaggcgu

SEQ ID NO: 2850176 - RNA, 19 nt, Artificial Sequence
  Description of Artificial Sequence: Synthetic oligonucleotide
gugcgcauuagcuggacau

SEQ ID NO: 2850177 - RNA, 19 nt, Artificial Sequence
  Description of Artificial Sequence: Synthetic oligonucleotide
gcgcauuagcuggacaucc

SEQ ID NO: 2850178 - RNA, 19 nt, Artificial Sequence
  Description of Artificial Sequence: Synthetic oligonucleotide
ccgugguuaggcgucaccg

SEQ ID NO: 2850179 - RNA, 19 nt, Artificial Sequence
  Description of Artificial Sequence: Synthetic oligonucleotide
ucggucauuccgggugcag

SEQ ID NO: 2850180 - RNA, 19 nt, Artificial Sequence
  Description of Artificial Sequence: Synthetic oligonucleotide
acauuaggugacagccgug

SEQ ID NO: 2850181 - RNA, 19 nt, Artificial Sequence
  Description of Artificial Sequence: Synthetic oligonucleotide
gcggugaaaccauuucuga

SEQ ID NO: 2850182 - RNA, 19 nt, Artificial Sequence
  Description of Artificial Sequence: Synthetic oligonucleotide
ugucagccaugcagguguc

SEQ ID NO: 2850183 - RNA, 19 nt, Artificial Sequence
  Description of Artificial Sequence: Synthetic oligonucleotide
cuagugcgcauuagcugga

SEQ ID NO: 2850184 - RNA, 19 nt, Artificial Sequence
  Description of Artificial Sequence: Synthetic oligonucleotide
accgggucagaagaugaau

SEQ ID NO: 2850185 - RNA, 19 nt, Artificial Sequence
  Description of Artificial Sequence: Synthetic oligonucleotide
gguuaggcgucaccgcuca

SEQ ID NO: 2850186 - RNA, 19 nt, Artificial Sequence
  Description of Artificial Sequence: Synthetic oligonucleotide
acacaggauggcguccuga

SEQ ID NO: 2850187 - RNA, 19 nt, Artificial Sequence
  Description of Artificial Sequence: Synthetic oligonucleotide
gucauuccgggugcagaug

SEQ ID NO: 2850188 - RNA, 19 nt, Artificial Sequence
  Description of Artificial Sequence: Synthetic oligonucleotide
cauuucugacaagaggccu

SEQ ID NO: 2850189 - RNA, 19 nt, Artificial Sequence
  Description of Artificial Sequence: Synthetic oligonucleotide
ggcguccugaucgucauuc

SEQ ID NO: 2850190 - RNA, 19 nt, Artificial Sequence
  Description of Artificial Sequence: Synthetic oligonucleotide
ucggccgucaggagcccau

SEQ ID NO: 2850191 - RNA, 19 nt, Artificial Sequence
  Description of Artificial Sequence: Synthetic oligonucleotide
gucacgucaguaagaacua

SEQ ID NO: 2850192 - RNA, 19 nt, Artificial Sequence
  Description of Artificial Sequence: Synthetic oligonucleotide
cgaaggccucucuagugcg

SEQ ID NO: 2850193 - RNA, 19 nt, Artificial Sequence
  Description of Artificial Sequence: Synthetic oligonucleotide
acagccccacaccgcggag

SEQ ID NO: 2850194 - RNA, 19 nt, Artificial Sequence
  Description of Artificial Sequence: Synthetic oligonucleotide
augaaacgucacgucagua

SEQ ID NO: 2850195 - RNA, 19 nt, Artificial Sequence
  Description of Artificial Sequence: Synthetic oligonucleotide
caccgcggaggccucggcc

SEQ ID NO: 2850196 - RNA, 19 nt, Artificial Sequence
  Description of Artificial Sequence: Synthetic oligonucleotide
ggugacagccgugguuagg

SEQ ID NO: 2850197 - RNA, 19 nt, Artificial Sequence
  Description of Artificial Sequence: Synthetic oligonucleotide
gaccgaaggccucucuagu

SEQ ID NO: 2850198 - RNA, 19 nt, Artificial Sequence
  Description of Artificial Sequence: Synthetic oligonucleotide
guccugaucgucauucacu

SEQ ID NO: 2850199 - RNA, 19 nt, Artificial Sequence
  Description of Artificial Sequence: Synthetic oligonucleotide
ggagcccauaggcuguuuc

SEQ ID NO: 2850200 - RNA, 19 nt, Artificial Sequence
  Description of Artificial Sequence: Synthetic oligonucleotide
caccgcucacggccggugg

SEQ ID NO: 2850201 - RNA, 19 nt, Artificial Sequence
  Description of Artificial Sequence: Synthetic oligonucleotide
ccauaggcuguuucgguca

SEQ ID NO: 2850202 - RNA, 19 nt, Artificial Sequence
  Description of Artificial Sequence: Synthetic oligonucleotide
ucaccgcucacggccggug

SEQ ID NO: 2850203 - RNA, 19 nt, Artificial Sequence
  Description of Artificial Sequence: Synthetic oligonucleotide
cggugaaaccauuucugac

SEQ ID NO: 2850204 - RNA, 19 nt, Artificial Sequence
  Description of Artificial Sequence: Synthetic oligonucleotide
accgcucacggccggugga

SEQ ID NO: 2850205 - RNA, 19 nt, Artificial Sequence
  Description of Artificial Sequence: Synthetic oligonucleotide
cccauaggcuguuucgguc

SEQ ID NO: 2850206 - RNA, 19 nt, Artificial Sequence
  Description of Artificial Sequence: Synthetic oligonucleotide
agaugcggugaaaccauuu

SEQ ID NO: 2850207 - RNA, 19 nt, Artificial Sequence
  Description of Artificial Sequence: Synthetic oligonucleotide
gucauucacuucauuugua

SEQ ID NO: 2850208 - RNA, 19 nt, Artificial Sequence
  Description of Artificial Sequence: Synthetic oligonucleotide
uucggucauuccgggugca

SEQ ID NO: 2850209 - RNA, 19 nt, Artificial Sequence
  Description of Artificial Sequence: Synthetic oligonucleotide
ccuaugucaccaaaucucu

SEQ ID NO: 2850210 - RNA, 19 nt, Artificial Sequence
  Description of Artificial Sequence: Synthetic oligonucleotide
cagccccacaccgcggagg

SEQ ID NO: 2850211 - RNA, 19 nt, Artificial Sequence
  Description of Artificial Sequence: Synthetic oligonucleotide
uagugcgcauuagcuggac

SEQ ID NO: 2850212 - RNA, 19 nt, Artificial Sequence
  Description of Artificial Sequence: Synthetic oligonucleotide
ggccucggccgucaggagc

SEQ ID NO: 2850213 - RNA, 19 nt, Artificial Sequence
  Description of Artificial Sequence: Synthetic oligonucleotide
cccacacggguacaccggg

SEQ ID NO: 2850214 - RNA, 19 nt, Artificial Sequence
  Description of Artificial Sequence: Synthetic oligonucleotide
ggccgguggaccgaaggcc

SEQ ID NO: 2850215 - RNA, 19 nt, Artificial Sequence
  Description of Artificial Sequence: Synthetic oligonucleotide
gcaggugucacagccccac

SEQ ID NO: 2850216 - RNA, 19 nt, Artificial Sequence
  Description of Artificial Sequence: Synthetic oligonucleotide
cacagccccacaccgcgga

SEQ ID NO: 2850217 - RNA, 19 nt, Artificial Sequence
  Description of Artificial Sequence: Synthetic oligonucleotide
cgugguuaggcgucaccgc

SEQ ID NO: 2850218 - RNA, 19 nt, Artificial Sequence
  Description of Artificial Sequence: Synthetic oligonucleotide
ggaggccucggccgucagg

SEQ ID NO: 2850219 - RNA, 19 nt, Artificial Sequence
  Description of Artificial Sequence: Synthetic oligonucleotide
gccucggccgucaggagcc

SEQ ID NO: 2850220 - RNA, 19 nt, Artificial Sequence
  Description of Artificial Sequence: Synthetic oligonucleotide
cacacaggauggcguccug

SEQ ID NO: 2850221 - RNA, 19 nt, Artificial Sequence
  Description of Artificial Sequence: Synthetic oligonucleotide
caguaagaacuaagaugua

SEQ ID NO: 2850222 - RNA, 19 nt, Artificial Sequence
  Description of Artificial Sequence: Synthetic oligonucleotide
uucugacaagaggccucac

SEQ ID NO: 2850223 - RNA, 19 nt, Artificial Sequence
  Description of Artificial Sequence: Synthetic oligonucleotide
cagccaugcaggugucaca

SEQ ID NO: 2850224 - RNA, 19 nt, Artificial Sequence
  Description of Artificial Sequence: Synthetic oligonucleotide
ggccgucaggagcccauag

SEQ ID NO: 2850225 - RNA, 19 nt, Artificial Sequence
  Description of Artificial Sequence: Synthetic oligonucleotide
ccaaaaugucaaacauuaa

SEQ ID NO: 2850226 - RNA, 19 nt, Artificial Sequence
  Description of Artificial Sequence: Synthetic oligonucleotide
agccgugguuaggcgucac

SEQ ID NO: 2850227 - RNA, 19 nt, Artificial Sequence
  Description of Artificial Sequence: Synthetic oligonucleotide
cauccuugucagccaugca

SEQ ID NO: 2850228 - RNA, 19 nt, Artificial Sequence
  Description of Artificial Sequence: Synthetic oligonucleotide
aagaggccucacacaggau

SEQ ID NO: 2850229 - RNA, 19 nt, Artificial Sequence
  Description of Artificial Sequence: Synthetic oligonucleotide
aggccucggccgucaggag

SEQ ID NO: 2850230 - RNA, 19 nt, Artificial Sequence
  Description of Artificial Sequence: Synthetic oligonucleotide
caccgggucagaagaugaa

SEQ ID NO: 2850231 - RNA, 19 nt, Artificial Sequence
  Description of Artificial Sequence: Synthetic oligonucleotide
ggucauuccgggugcagau

SEQ ID NO: 2850232 - RNA, 19 nt, Artificial Sequence
  Description of Artificial Sequence: Synthetic oligonucleotide
gcuggacauccuugucagc

SEQ ID NO: 2850233 - RNA, 19 nt, Artificial Sequence
  Description of Artificial Sequence: Synthetic oligonucleotide
gaucgucauucacuucauu

SEQ ID NO: 2850234 - RNA, 19 nt, Artificial Sequence
  Description of Artificial Sequence: Synthetic oligonucleotide
guuaggcgucaccgcucac

SEQ ID NO: 2850235 - RNA, 19 nt, Artificial Sequence
  Description of Artificial Sequence: Synthetic oligonucleotide
caaaucccacacggguaca

SEQ ID NO: 2850236 - RNA, 19 nt, Artificial Sequence
  Description of Artificial Sequence: Synthetic oligonucleotide
cguccugaucgucauucac

SEQ ID NO: 2850237 - RNA, 19 nt, Artificial Sequence
  Description of Artificial Sequence: Synthetic oligonucleotide
gccgugguuaggcgucacc

SEQ ID NO: 2850238 - RNA, 19 nt, Artificial Sequence
  Description of Artificial Sequence: Synthetic oligonucleotide
ccugaucgucauucacuuc

SEQ ID NO: 2850239 - RNA, 19 nt, Artificial Sequence
  Description of Artificial Sequence: Synthetic oligonucleotide
ccauuuccaaaaugucaaa

SEQ ID NO: 2850240 - RNA, 19 nt, Artificial Sequence
  Description of Artificial Sequence: Synthetic oligonucleotide
acggguacaccgggucaga

SEQ ID NO: 2850241 - RNA, 19 nt, Artificial Sequence
  Description of Artificial Sequence: Synthetic oligonucleotide
aggccucucuagugcgcau

SEQ ID NO: 2850242 - RNA, 19 nt, Artificial Sequence
  Description of Artificial Sequence: Synthetic oligonucleotide
cagagaaaugaaccacauu

SEQ ID NO: 2850243 - RNA, 19 nt, Artificial Sequence
  Description of Artificial Sequence: Synthetic oligonucleotide
ucacggccgguggaccgaa

SEQ ID NO: 2850244 - RNA, 19 nt, Artificial Sequence
  Description of Artificial Sequence: Synthetic oligonucleotide
uggcguccugaucgucauu

SEQ ID NO: 2850245 - RNA, 19 nt, Artificial Sequence
  Description of Artificial Sequence: Synthetic oligonucleotide
gcgucaccgcucacggccg

SEQ ID NO: 2850246 - RNA, 19 nt, Artificial Sequence
  Description of Artificial Sequence: Synthetic oligonucleotide
gucagccaugcagguguca

SEQ ID NO: 2850247 - RNA, 19 nt, Artificial Sequence
  Description of Artificial Sequence: Synthetic oligonucleotide
caggugucacagccccaca

SEQ ID NO: 2850248 - RNA, 19 nt, Artificial Sequence
  Description of Artificial Sequence: Synthetic oligonucleotide
cauaggcuguuucggucau

SEQ ID NO: 2850249 - RNA, 19 nt, Artificial Sequence
  Description of Artificial Sequence: Synthetic oligonucleotide
gcauuagcuggacauccuu

SEQ ID NO: 2850250 - RNA, 19 nt, Artificial Sequence
  Description of Artificial Sequence: Synthetic oligonucleotide
auaggcuguuucggucauu

SEQ ID NO: 2850251 - RNA, 19 nt, Artificial Sequence
  Description of Artificial Sequence: Synthetic oligonucleotide
ggacauccuugucagccau

SEQ ID NO: 2850252 - RNA, 19 nt, Artificial Sequence
  Description of Artificial Sequence: Synthetic oligonucleotide
ccucucuagugcgcauuag

SEQ ID NO: 2850253 - RNA, 19 nt, Artificial Sequence
  Description of Artificial Sequence: Synthetic oligonucleotide
cacggccgguggaccgaag

SEQ ID NO: 2850254 - RNA, 19 nt, Artificial Sequence
  Description of Artificial Sequence: Synthetic oligonucleotide
gcagaugcggugaaaccau

SEQ ID NO: 2850255 - RNA, 19 nt, Artificial Sequence
  Description of Artificial Sequence: Synthetic oligonucleotide
cucacggccgguggaccga

SEQ ID NO: 2850256 - RNA, 19 nt, Artificial Sequence
  Description of Artificial Sequence: Synthetic oligonucleotide
gccucucuagugcgcauua

SEQ ID NO: 2850257 - RNA, 19 nt, Artificial Sequence
  Description of Artificial Sequence: Synthetic oligonucleotide
gcguccugaucgucauuca

SEQ ID NO: 2850258 - RNA, 19 nt, Artificial Sequence
  Description of Artificial Sequence: Synthetic oligonucleotide
cgucaguaagaacuaagau

SEQ ID NO: 2850259 - RNA, 19 nt, Artificial Sequence
  Description of Artificial Sequence: Synthetic oligonucleotide
gcccauaggcuguuucggu

SEQ ID NO: 2850260 - RNA, 19 nt, Artificial Sequence
  Description of Artificial Sequence: Synthetic oligonucleotide
cccacacacacacauuaau

SEQ ID NO: 2850261 - RNA, 19 nt, Artificial Sequence
  Description of Artificial Sequence: Synthetic oligonucleotide
cggccgguggaccgaaggc

SEQ ID NO: 2850262 - RNA, 19 nt, Artificial Sequence
  Description of Artificial Sequence: Synthetic oligonucleotide
guggaccgaaggccucucu

SEQ ID NO: 2850263 - RNA, 19 nt, Artificial Sequence
  Description of Artificial Sequence: Synthetic oligonucleotide
guacaccgggucagaagau

SEQ ID NO: 2850264 - RNA, 19 nt, Artificial Sequence
  Description of Artificial Sequence: Synthetic oligonucleotide
gguggaccgaaggccucuc

SEQ ID NO: 2850265 - RNA, 19 nt, Artificial Sequence
  Description of Artificial Sequence: Synthetic oligonucleotide
ggauggcguccugaucguc

SEQ ID NO: 2850266 - RNA, 19 nt, Artificial Sequence
  Description of Artificial Sequence: Synthetic oligonucleotide
cacacacauuaaucucauu

SEQ ID NO: 2850267 - RNA, 19 nt, Artificial Sequence
  Description of Artificial Sequence: Synthetic oligonucleotide
cagaugcggugaaaccauu

SEQ ID NO: 2850268 - RNA, 19 nt, Artificial Sequence
  Description of Artificial Sequence: Synthetic oligonucleotide
ccgggugcagaugcgguga

SEQ ID NO: 2850269 - RNA, 19 nt, Artificial Sequence
  Description of Artificial Sequence: Synthetic oligonucleotide
ccccacacacacacauuaa

SEQ ID NO: 2850270 - RNA, 19 nt, Artificial Sequence
  Description of Artificial Sequence: Synthetic oligonucleotide
ccuugucagccaugcaggu

SEQ ID NO: 2850271 - RNA, 19 nt, Artificial Sequence
  Description of Artificial Sequence: Synthetic oligonucleotide
ccgguggaccgaaggccuc

SEQ ID NO: 2850272 - RNA, 19 nt, Artificial Sequence
  Description of Artificial Sequence: Synthetic oligonucleotide
cagccgugguuaggcguca

SEQ ID NO: 2850273 - RNA, 19 nt, Artificial Sequence
  Description of Artificial Sequence: Synthetic oligonucleotide
gccgguggaccgaaggccu

SEQ ID NO: 2850274 - RNA, 19 nt, Artificial Sequence
  Description of Artificial Sequence: Synthetic oligonucleotide
cucggccgucaggagccca

SEQ ID NO: 2850275 - RNA, 19 nt, Artificial Sequence
  Description of Artificial Sequence: Synthetic oligonucleotide
cgucaccgcucacggccgg

SEQ ID NO: 2850276 - RNA, 19 nt, Artificial Sequence
  Description of Artificial Sequence: Synthetic oligonucleotide
ccgcucacggccgguggac

SEQ ID NO: 2850277 - RNA, 19 nt, Artificial Sequence
  Description of Artificial Sequence: Synthetic oligonucleotide
ccacaccgcggaggccucg

SEQ ID NO: 2850278 - RNA, 19 nt, Artificial Sequence
  Description of Artificial Sequence: Synthetic oligonucleotide
cggucauuccgggugcaga

SEQ ID NO: 2850279 - RNA, 19 nt, Artificial Sequence
  Description of Artificial Sequence: Synthetic oligonucleotide
gggugcagaugcggugaaa

SEQ ID NO: 2850280 - RNA, 19 nt, Artificial Sequence
  Description of Artificial Sequence: Synthetic oligonucleotide
cccacaccgcggaggccuc

SEQ ID NO: 2850281 - RNA, 19 nt, Artificial Sequence
  Description of Artificial Sequence: Synthetic oligonucleotide
gucaccgcucacggccggu

SEQ ID NO: 2850282 - RNA, 19 nt, Artificial Sequence
  Description of Artificial Sequence: Synthetic oligonucleotide
ccccacaccgcggaggccu

SEQ ID NO: 2850283 - RNA, 19 nt, Artificial Sequence
  Description of Artificial Sequence: Synthetic oligonucleotide
cgcauuagcuggacauccu

SEQ ID NO: 2850284 - RNA, 19 nt, Artificial Sequence
  Description of Artificial Sequence: Synthetic oligonucleotide
gcggaggccucggccguca

SEQ ID NO: 2850285 - RNA, 19 nt, Artificial Sequence
  Description of Artificial Sequence: Synthetic oligonucleotide
ggccucucuagugcgcauu

SEQ ID NO: 2850286 - RNA, 19 nt, Artificial Sequence
  Description of Artificial Sequence: Synthetic oligonucleotide
ccacacggguacaccgggu

SEQ ID NO: 2850287 - RNA, 19 nt, Artificial Sequence
  Description of Artificial Sequence: Synthetic oligonucleotide
ccucggccgucaggagccc

SEQ ID NO: 2850288 - RNA, 19 nt, Artificial Sequence
  Description of Artificial Sequence: Synthetic oligonucleotide
gccccacaccgcggaggcc

SEQ ID NO: 2850289 - RNA, 19 nt, Artificial Sequence
  Description of Artificial Sequence: Synthetic oligonucleotide
cggaggccucggccgucag

SEQ ID NO: 2850290 - RNA, 19 nt, Artificial Sequence
  Description of Artificial Sequence: Synthetic oligonucleotide
cggguacaccgggucagaa

SEQ ID NO: 2850291 - RNA, 19 nt, Artificial Sequence
  Description of Artificial Sequence: Synthetic oligonucleotide
cgguggaccgaaggccucu

SEQ ID NO: 2850292 - RNA, 19 nt, Artificial Sequence
  Description of Artificial Sequence: Synthetic oligonucleotide
ccgcggaggccucggccgu

SEQ ID NO: 2850293 - RNA, 19 nt, Artificial Sequence
  Description of Artificial Sequence: Synthetic oligonucleotide
cgcggaggccucggccguc

SEQ ID NO: 2850294 - RNA, 19 nt, Artificial Sequence
  Description of Artificial Sequence: Synthetic oligonucleotide
cggccgucaggagcccaua

SEQ ID NO: 2850295 - RNA, 19 nt, Artificial Sequence
  Description of Artificial Sequence: Synthetic oligonucleotide
uaaacuuucacaaaagacu

SEQ ID NO: 2850296 - RNA, 19 nt, Artificial Sequence
  Description of Artificial Sequence: Synthetic oligonucleotide
aacaguuuuguccaagggg

SEQ ID NO: 2850297 - RNA, 19 nt, Artificial Sequence
  Description of Artificial Sequence: Synthetic oligonucleotide
auaucggucaauuccagcc

SEQ ID NO: 2850298 - RNA, 19 nt, Artificial Sequence
  Description of Artificial Sequence: Synthetic oligonucleotide
uuuaaugauggaaacaaaa

SEQ ID NO: 2850299 - RNA, 19 nt, Artificial Sequence
  Description of Artificial Sequence: Synthetic oligonucleotide
ucaaauuugaccuuggcuu

SEQ ID NO: 2850300 - RNA, 19 nt, Artificial Sequence
  Description of Artificial Sequence: Synthetic oligonucleotide
guugacaacaguuuugucc

SEQ ID NO: 2850301 - RNA, 19 nt, Artificial Sequence
  Description of Artificial Sequence: Synthetic oligonucleotide
uuauaaacuuucacaaaag

SEQ ID NO: 2850302 - RNA, 19 nt, Artificial Sequence
  Description of Artificial Sequence: Synthetic oligonucleotide
auaaacuuucacaaaagac

SEQ ID NO: 2850303 - RNA, 19 nt, Artificial Sequence
  Description of Artificial Sequence: Synthetic oligonucleotide
uauaaacuuucacaaaaga

SEQ ID NO: 2850304 - RNA, 19 nt, Artificial Sequence
  Description of Artificial Sequence: Synthetic oligonucleotide
ucaauguucuucacgauga

SEQ ID NO: 2850305 - RNA, 19 nt, Artificial Sequence
  Description of Artificial Sequence: Synthetic oligonucleotide
uaguuauaaacuuucacaa

SEQ ID NO: 2850306 - RNA, 19 nt, Artificial Sequence
  Description of Artificial Sequence: Synthetic oligonucleotide
guaguuauaaacuuucaca

SEQ ID NO: 2850307 - RNA, 19 nt, Artificial Sequence
  Description of Artificial Sequence: Synthetic oligonucleotide
uugacaacaguuuugucca

SEQ ID NO: 2850308 - RNA, 19 nt, Artificial Sequence
  Description of Artificial Sequence: Synthetic oligonucleotide
uucgacagcaagcagccgg

SEQ ID NO: 2850309 - RNA, 19 nt, Artificial Sequence
  Description of Artificial Sequence: Synthetic oligonucleotide
uguaguuauaaacuuucac

SEQ ID NO: 2850310 - RNA, 19 nt, Artificial Sequence
  Description of Artificial Sequence: Synthetic oligonucleotide
aauuccagccaccagggca

SEQ ID NO: 2850311 - RNA, 19 nt, Artificial Sequence
  Description of Artificial Sequence: Synthetic oligonucleotide
gucaauuccagccaccagg

SEQ ID NO: 2850312 - RNA, 19 nt, Artificial Sequence
  Description of Artificial Sequence: Synthetic oligonucleotide
ucacuuuucggggauaucg

SEQ ID NO: 2850313 - RNA, 19 nt, Artificial Sequence
  Description of Artificial Sequence: Synthetic oligonucleotide
acagcaagcagccgguucc

SEQ ID NO: 2850314 - RNA, 19 nt, Artificial Sequence
  Description of Artificial Sequence: Synthetic oligonucleotide
cuaaaagcgaagcuucugg

SEQ ID NO: 2850315 - RNA, 19 nt, Artificial Sequence
  Description of Artificial Sequence: Synthetic oligonucleotide
auuguaguuauaaacuuuc

SEQ ID NO: 2850316 - RNA, 19 nt, Artificial Sequence
  Description of Artificial Sequence: Synthetic oligonucleotide
auauaccuaaaagcgaagc

SEQ ID NO: 2850317 - RNA, 19 nt, Artificial Sequence
  Description of Artificial Sequence: Synthetic oligonucleotide
cauuucgacagcaagcagc

SEQ ID NO: 2850318 - RNA, 19 nt, Artificial Sequence
  Description of Artificial Sequence: Synthetic oligonucleotide
uguaagggcggucugaagu

SEQ ID NO: 2850319 - RNA, 19 nt, Artificial Sequence
  Description of Artificial Sequence: Synthetic oligonucleotide
aacuugcccauuucgacag

SEQ ID NO: 2850320 - RNA, 19 nt, Artificial Sequence
  Description of Artificial Sequence: Synthetic oligonucleotide
aaauauaccuaaaagcgaa

SEQ ID NO: 2850321 - RNA, 19 nt, Artificial Sequence
  Description of Artificial Sequence: Synthetic oligonucleotide
auguucuucacgaugacgg

SEQ ID NO: 2850322 - RNA, 19 nt, Artificial Sequence
  Description of Artificial Sequence: Synthetic oligonucleotide
aaaauauaccuaaaagcga

SEQ ID NO: 2850323 - RNA, 19 nt, Artificial Sequence
  Description of Artificial Sequence: Synthetic oligonucleotide
ugaagugccaucgucaaug

SEQ ID NO: 2850324 - RNA, 19 nt, Artificial Sequence
  Description of Artificial Sequence: Synthetic oligonucleotide
auuuucuucuugcccaugg

SEQ ID NO: 2850325 - RNA, 19 nt, Artificial Sequence
  Description of Artificial Sequence: Synthetic oligonucleotide
uccacagaguaccuugugg

SEQ ID NO: 2850326 - RNA, 19 nt, Artificial Sequence
  Description of Artificial Sequence: Synthetic oligonucleotide
accagcaccacuuucccgg

SEQ ID NO: 2850327 - RNA, 19 nt, Artificial Sequence
  Description of Artificial Sequence: Synthetic oligonucleotide
gaaggaaggacacuuccgc

SEQ ID NO: 2850328 - RNA, 19 nt, Artificial Sequence
  Description of Artificial Sequence: Synthetic oligonucleotide
aaaccauuuguucuucccu

SEQ ID NO: 2850329 - RNA, 19 nt, Artificial Sequence
  Description of Artificial Sequence: Synthetic oligonucleotide
ucgucaauguucuucacga

SEQ ID NO: 2850330 - RNA, 19 nt, Artificial Sequence
  Description of Artificial Sequence: Synthetic oligonucleotide
aauguucuucacgaugacg

SEQ ID NO: 2850331 - RNA, 19 nt, Artificial Sequence
  Description of Artificial Sequence: Synthetic oligonucleotide
ggugauuguaguuauaaac

SEQ ID NO: 2850332 - RNA, 19 nt, Artificial Sequence
  Description of Artificial Sequence: Synthetic oligonucleotide
uguaucguuccucaaauuu

SEQ ID NO: 2850333 - RNA, 19 nt, Artificial Sequence
  Description of Artificial Sequence: Synthetic oligonucleotide
aaagcgaagcuucuggaaa

SEQ ID NO: 2850334 - RNA, 19 nt, Artificial Sequence
  Description of Artificial Sequence: Synthetic oligonucleotide
acgaugacggcuuugcguc

SEQ ID NO: 2850335 - RNA, 19 nt, Artificial Sequence
  Description of Artificial Sequence: Synthetic oligonucleotide
agugccaucgucaauguuc

SEQ ID NO: 2850336 - RNA, 19 nt, Artificial Sequence
  Description of Artificial Sequence: Synthetic oligonucleotide
aaccauuuguucuucccug

SEQ ID NO: 2850337 - RNA, 19 nt, Artificial Sequence
  Description of Artificial Sequence: Synthetic oligonucleotide
auuucgacagcaagcagcc

SEQ ID NO: 2850338 - RNA, 19 nt, Artificial Sequence
  Description of Artificial Sequence: Synthetic oligonucleotide
uaccuugugggcaugaggu

SEQ ID NO: 2850339 - RNA, 19 nt, Artificial Sequence
  Description of Artificial Sequence: Synthetic oligonucleotide
uaucguuccucaaauuuga

SEQ ID NO: 2850340 - RNA, 19 nt, Artificial Sequence
  Description of Artificial Sequence: Synthetic oligonucleotide
guagcguccagccaggacc

SEQ ID NO: 2850341 - RNA, 19 nt, Artificial Sequence
  Description of Artificial Sequence: Synthetic oligonucleotide
acaacaguuuuguccaagg

SEQ ID NO: 2850342 - RNA, 19 nt, Artificial Sequence
  Description of Artificial Sequence: Synthetic oligonucleotide
caugaacuugcccauuucg

SEQ ID NO: 2850343 - RNA, 19 nt, Artificial Sequence
  Description of Artificial Sequence: Synthetic oligonucleotide
aucgucaauguucuucacg

SEQ ID NO: 2850344 - RNA, 19 nt, Artificial Sequence
  Description of Artificial Sequence: Synthetic oligonucleotide
uucccagcagaaaggaagg

SEQ ID NO: 2850345 - RNA, 19 nt, Artificial Sequence
  Description of Artificial Sequence: Synthetic oligonucleotide
uuuucggggauaucgguca

SEQ ID NO: 2850346 - RNA, 19 nt, Artificial Sequence
  Description of Artificial Sequence: Synthetic oligonucleotide
ucuucccugucuuguaucg

SEQ ID NO: 2850347 - RNA, 19 nt, Artificial Sequence
  Description of Artificial Sequence: Synthetic oligonucleotide
gcagcugucacuuuucggg

SEQ ID NO: 2850348 - RNA, 19 nt, Artificial Sequence
  Description of Artificial Sequence: Synthetic oligonucleotide
uaccuaaaagcgaagcuuc

SEQ ID NO: 2850349 - RNA, 19 nt, Artificial Sequence
  Description of Artificial Sequence: Synthetic oligonucleotide
aaacuuucacaaaagacuu

SEQ ID NO: 2850350 - RNA, 19 nt, Artificial Sequence
  Description of Artificial Sequence: Synthetic oligonucleotide
cucgccuugcguuucaggg

SEQ ID NO: 2850351 - RNA, 19 nt, Artificial Sequence
  Description of Artificial Sequence: Synthetic oligonucleotide
aaaagcgaagcuucuggaa

SEQ ID NO: 2850352 - RNA, 19 nt, Artificial Sequence
  Description of Artificial Sequence: Synthetic oligonucleotide
aaaggaaggaaggacacuu

SEQ ID NO: 2850353 - RNA, 19 nt, Artificial Sequence
  Description of Artificial Sequence: Synthetic oligonucleotide
ugaacuugcccauuucgac

SEQ ID NO: 2850354 - RNA, 19 nt, Artificial Sequence
  Description of Artificial Sequence: Synthetic oligonucleotide
uuggcgauuuucuucuugc

SEQ ID NO: 2850355 - RNA, 19 nt, Artificial Sequence
  Description of Artificial Sequence: Synthetic oligonucleotide
agaaaggaaggaaggacac

SEQ ID NO: 2850356 - RNA, 19 nt, Artificial Sequence
  Description of Artificial Sequence: Synthetic oligonucleotide
ugauuguaguuauaaacuu

SEQ ID NO: 2850357 - RNA, 19 nt, Artificial Sequence
  Description of Artificial Sequence: Synthetic oligonucleotide
gguuucaugaacuugccca

SEQ ID NO: 2850358 - RNA, 19 nt, Artificial Sequence
  Description of Artificial Sequence: Synthetic oligonucleotide
uuuuaaugauggaaacaaa

SEQ ID NO: 2850359 - RNA, 19 nt, Artificial Sequence
  Description of Artificial Sequence: Synthetic oligonucleotide
guucccagcagaaaggaag

SEQ ID NO: 2850360 - RNA, 19 nt, Artificial Sequence
  Description of Artificial Sequence: Synthetic oligonucleotide
uaaaagcgaagcuucugga

SEQ ID NO: 2850361 - RNA, 19 nt, Artificial Sequence
  Description of Artificial Sequence: Synthetic oligonucleotide
uugaccuuggcuucucgcc

SEQ ID NO: 2850362 - RNA, 19 nt, Artificial Sequence
  Description of Artificial Sequence: Synthetic oligonucleotide
ggggauaucggucaauucc

SEQ ID NO: 2850363 - RNA, 19 nt, Artificial Sequence
  Description of Artificial Sequence: Synthetic oligonucleotide
aauauaccuaaaagcgaag

SEQ ID NO: 2850364 - RNA, 19 nt, Artificial Sequence
  Description of Artificial Sequence: Synthetic oligonucleotide
acuuucacaaaagacuuga

SEQ ID NO: 2850365 - RNA, 19 nt, Artificial Sequence
  Description of Artificial Sequence: Synthetic oligonucleotide
ucguuccucaaauuugacc

SEQ ID NO: 2850366 - RNA, 19 nt, Artificial Sequence
  Description of Artificial Sequence: Synthetic oligonucleotide
ugucuuguaucguuccuca

SEQ ID NO: 2850367 - RNA, 19 nt, Artificial Sequence
  Description of Artificial Sequence: Synthetic oligonucleotide
ucucugaagacauccuugu

SEQ ID NO: 2850368 - RNA, 19 nt, Artificial Sequence
  Description of Artificial Sequence: Synthetic oligonucleotide
uuguaguuauaaacuuuca

SEQ ID NO: 2850369 - RNA, 19 nt, Artificial Sequence
  Description of Artificial Sequence: Synthetic oligonucleotide
cagcagaaaggaaggaagg

SEQ ID NO: 2850370 - RNA, 19 nt, Artificial Sequence
  Description of Artificial Sequence: Synthetic oligonucleotide
uuuucuucuugcccauggc

SEQ ID NO: 2850371 - RNA, 19 nt, Artificial Sequence
  Description of Artificial Sequence: Synthetic oligonucleotide
aguuauaaacuuucacaaa

SEQ ID NO: 2850372 - RNA, 19 nt, Artificial Sequence
  Description of Artificial Sequence: Synthetic oligonucleotide
gauaucggucaauuccagc

SEQ ID NO: 2850373 - RNA, 19 nt, Artificial Sequence
  Description of Artificial Sequence: Synthetic oligonucleotide
aggaccagcaccacuuucc

SEQ ID NO: 2850374 - RNA, 19 nt, Artificial Sequence
  Description of Artificial Sequence: Synthetic oligonucleotide
uuguccaaggggaugucca

SEQ ID NO: 2850375 - RNA, 19 nt, Artificial Sequence
  Description of Artificial Sequence: Synthetic oligonucleotide
uccaaggggauguccacag

SEQ ID NO: 2850376 - RNA, 19 nt, Artificial Sequence
  Description of Artificial Sequence: Synthetic oligonucleotide
uuguugacaacaguuuugu

SEQ ID NO: 2850377 - RNA, 19 nt, Artificial Sequence
  Description of Artificial Sequence: Synthetic oligonucleotide
ugcccauuucgacagcaag

SEQ ID NO: 2850378 - RNA, 19 nt, Artificial Sequence
  Description of Artificial Sequence: Synthetic oligonucleotide
aucggucaauuccagccac

SEQ ID NO: 2850379 - RNA, 19 nt, Artificial Sequence
  Description of Artificial Sequence: Synthetic oligonucleotide
caaggggauguccacagag

SEQ ID NO: 2850380 - RNA, 19 nt, Artificial Sequence
  Description of Artificial Sequence: Synthetic oligonucleotide
caaauuugaccuuggcuuc

SEQ ID NO: 2850381 - RNA, 19 nt, Artificial Sequence
  Description of Artificial Sequence: Synthetic oligonucleotide
uaucggucaauuccagcca

SEQ ID NO: 2850382 - RNA, 19 nt, Artificial Sequence
  Description of Artificial Sequence: Synthetic oligonucleotide
uccucaaauuugaccuugg

SEQ ID NO: 2850383 - RNA, 19 nt, Artificial Sequence
  Description of Artificial Sequence: Synthetic oligonucleotide
uuugaccuuggcuucucgc

SEQ ID NO: 2850384 - RNA, 19 nt, Artificial Sequence
  Description of Artificial Sequence: Synthetic oligonucleotide
cugaagacauccuuguuga

SEQ ID NO: 2850385 - RNA, 19 nt, Artificial Sequence
  Description of Artificial Sequence: Synthetic oligonucleotide
ugggucucugaagacaucc

SEQ ID NO: 2850386 - RNA, 19 nt, Artificial Sequence
  Description of Artificial Sequence: Synthetic oligonucleotide
caacaguuuuguccaaggg

SEQ ID NO: 2850387 - RNA, 19 nt, Artificial Sequence
  Description of Artificial Sequence: Synthetic oligonucleotide
acuuucccggguuucauga

SEQ ID NO: 2850388 - RNA, 19 nt, Artificial Sequence
  Description of Artificial Sequence: Synthetic oligonucleotide
uucacgaugacggcuuugc

SEQ ID NO: 2850389 - RNA, 19 nt, Artificial Sequence
  Description of Artificial Sequence: Synthetic oligonucleotide
gaagacauccuuguugaca

SEQ ID NO: 2850390 - RNA, 19 nt, Artificial Sequence
  Description of Artificial Sequence: Synthetic oligonucleotide
cacuuuucggggauaucgg

SEQ ID NO: 2850391 - RNA, 19 nt, Artificial Sequence
  Description of Artificial Sequence: Synthetic oligonucleotide
cagaaaggaaggaaggaca

SEQ ID NO: 2850392 - RNA, 19 nt, Artificial Sequence
  Description of Artificial Sequence: Synthetic oligonucleotide
guaucguuccucaaauuug

SEQ ID NO: 2850393 - RNA, 19 nt, Artificial Sequence
  Description of Artificial Sequence: Synthetic oligonucleotide
gaacuugcccauuucgaca

SEQ ID NO: 2850394 - RNA, 19 nt, Artificial Sequence
  Description of Artificial Sequence: Synthetic oligonucleotide
aagcgaagcuucuggaaaa

SEQ ID NO: 2850395 - RNA, 19 nt, Artificial Sequence
  Description of Artificial Sequence: Synthetic oligonucleotide
ucugaagugccaucgucaa

SEQ ID NO: 2850396 - RNA, 19 nt, Artificial Sequence
  Description of Artificial Sequence: Synthetic oligonucleotide
guaccuugugggcaugagg

SEQ ID NO: 2850397 - RNA, 19 nt, Artificial Sequence
  Description of Artificial Sequence: Synthetic oligonucleotide
uccggaguagcguccagcc

SEQ ID NO: 2850398 - RNA, 19 nt, Artificial Sequence
  Description of Artificial Sequence: Synthetic oligonucleotide
aauuugaccuuggcuucuc

SEQ ID NO: 2850399 - RNA, 19 nt, Artificial Sequence
  Description of Artificial Sequence: Synthetic oligonucleotide
uguucuucacgaugacggc

SEQ ID NO: 2850400 - RNA, 19 nt, Artificial Sequence
  Description of Artificial Sequence: Synthetic oligonucleotide
guaagggcggucugaagug

SEQ ID NO: 2850401 - RNA, 19 nt, Artificial Sequence
  Description of Artificial Sequence: Synthetic oligonucleotide
uccuuguugacaacaguuu

SEQ ID NO: 2850402 - RNA, 19 nt, Artificial Sequence
  Description of Artificial Sequence: Synthetic oligonucleotide
uuucccggguuucaugaac

SEQ ID NO: 2850403 - RNA, 19 nt, Artificial Sequence
  Description of Artificial Sequence: Synthetic oligonucleotide
aguagcguccagccaggac

SEQ ID NO: 2850404 - RNA, 19 nt, Artificial Sequence
  Description of Artificial Sequence: Synthetic oligonucleotide
uccagccaggaccagcacc

SEQ ID NO: 2850405 - RNA, 19 nt, Artificial Sequence
  Description of Artificial Sequence: Synthetic oligonucleotide
uuuguucuucccugucuug

SEQ ID NO: 2850406 - RNA, 19 nt, Artificial Sequence
  Description of Artificial Sequence: Synthetic oligonucleotide
auaccuaaaagcgaagcuu

SEQ ID NO: 2850407 - RNA, 19 nt, Artificial Sequence
  Description of Artificial Sequence: Synthetic oligonucleotide
cuuugcguccggaguagcg

SEQ ID NO: 2850408 - RNA, 19 nt, Artificial Sequence
  Description of Artificial Sequence: Synthetic oligonucleotide
cuuuucggggauaucgguc

SEQ ID NO: 2850409 - RNA, 19 nt, Artificial Sequence
  Description of Artificial Sequence: Synthetic oligonucleotide
ugcguuucagggcuggguc

SEQ ID NO: 2850410 - RNA, 19 nt, Artificial Sequence
  Description of Artificial Sequence: Synthetic oligonucleotide
auuuguucuucccugucuu

SEQ ID NO: 2850411 - RNA, 19 nt, Artificial Sequence
  Description of Artificial Sequence: Synthetic oligonucleotide
uucaugaacuugcccauuu

SEQ ID NO: 2850412 - RNA, 19 nt, Artificial Sequence
  Description of Artificial Sequence: Synthetic oligonucleotide
aaauuugaccuuggcuucu

SEQ ID NO: 2850413 - RNA, 19 nt, Artificial Sequence
  Description of Artificial Sequence: Synthetic oligonucleotide
aaggaaggaaggacacuuc

SEQ ID NO: 2850414 - RNA, 19 nt, Artificial Sequence
  Description of Artificial Sequence: Synthetic oligonucleotide
gugauuguaguuauaaacu

SEQ ID NO: 2850415 - RNA, 19 nt, Artificial Sequence
  Description of Artificial Sequence: Synthetic oligonucleotide
cacagaguaccuugugggc

SEQ ID NO: 2850416 - RNA, 19 nt, Artificial Sequence
  Description of Artificial Sequence: Synthetic oligonucleotide
ugaccuuggcuucucgccu

SEQ ID NO: 2850417 - RNA, 19 nt, Artificial Sequence
  Description of Artificial Sequence: Synthetic oligonucleotide
uuccucaaauuugaccuug

SEQ ID NO: 2850418 - RNA, 19 nt, Artificial Sequence
  Description of Artificial Sequence: Synthetic oligonucleotide
ccacagaguaccuuguggg

SEQ ID NO: 2850419 - RNA, 19 nt, Artificial Sequence
  Description of Artificial Sequence: Synthetic oligonucleotide
uucuucacgaugacggcuu

SEQ ID NO: 2850420 - RNA, 19 nt, Artificial Sequence
  Description of Artificial Sequence: Synthetic oligonucleotide
uggcagcugucacuuuucg

SEQ ID NO: 2850421 - RNA, 19 nt, Artificial Sequence
  Description of Artificial Sequence: Synthetic oligonucleotide
gacaacaguuuuguccaag

SEQ ID NO: 2850422 - RNA, 19 nt, Artificial Sequence
  Description of Artificial Sequence: Synthetic oligonucleotide
uucccggguuucaugaacu

SEQ ID NO: 2850423 - RNA, 19 nt, Artificial Sequence
  Description of Artificial Sequence: Synthetic oligonucleotide
aacuuucacaaaagacuug

SEQ ID NO: 2850424 - RNA, 19 nt, Artificial Sequence
  Description of Artificial Sequence: Synthetic oligonucleotide
auuugaccuuggcuucucg

SEQ ID NO: 2850425 - RNA, 19 nt, Artificial Sequence
  Description of Artificial Sequence: Synthetic oligonucleotide
gaggugauuguaguuauaa

SEQ ID NO: 2850426 - RNA, 19 nt, Artificial Sequence
  Description of Artificial Sequence: Synthetic oligonucleotide
acuuuucggggauaucggu

SEQ ID NO: 2850427 - RNA, 19 nt, Artificial Sequence
  Description of Artificial Sequence: Synthetic oligonucleotide
aagggcggucugaagugcc

SEQ ID NO: 2850428 - RNA, 19 nt, Artificial Sequence
  Description of Artificial Sequence: Synthetic oligonucleotide
augaggugauuguaguuau

SEQ ID NO: 2850429 - RNA, 19 nt, Artificial Sequence
  Description of Artificial Sequence: Synthetic oligonucleotide
gaugacggcuuugcguccg

SEQ ID NO: 2850430 - RNA, 19 nt, Artificial Sequence
  Description of Artificial Sequence: Synthetic oligonucleotide
gacauccuuguugacaaca

SEQ ID NO: 2850431 - RNA, 19 nt, Artificial Sequence
  Description of Artificial Sequence: Synthetic oligonucleotide
cagcugucacuuuucgggg

SEQ ID NO: 2850432 - RNA, 19 nt, Artificial Sequence
  Description of Artificial Sequence: Synthetic oligonucleotide
ucaugaacuugcccauuuc

SEQ ID NO: 2850433 - RNA, 19 nt, Artificial Sequence
  Description of Artificial Sequence: Synthetic oligonucleotide
uuggcuucucgccucgccu

SEQ ID NO: 2850434 - RNA, 19 nt, Artificial Sequence
  Description of Artificial Sequence: Synthetic oligonucleotide
caagcagccgguucccagc

SEQ ID NO: 2850435 - RNA, 19 nt, Artificial Sequence
  Description of Artificial Sequence: Synthetic oligonucleotide
uguccacagaguaccuugu

SEQ ID NO: 2850436 - RNA, 19 nt, Artificial Sequence
  Description of Artificial Sequence: Synthetic oligonucleotide
ggcgauuuucuucuugccc

SEQ ID NO: 2850437 - RNA, 19 nt, Artificial Sequence
  Description of Artificial Sequence: Synthetic oligonucleotide
acagaguaccuugugggca

SEQ ID NO: 2850438 - RNA, 19 nt, Artificial Sequence
  Description of Artificial Sequence: Synthetic oligonucleotide
uuguucuucccugucuugu

SEQ ID NO: 2850439 - RNA, 19 nt, Artificial Sequence
  Description of Artificial Sequence: Synthetic oligonucleotide
gggauguccacagaguacc

SEQ ID NO: 2850440 - RNA, 19 nt, Artificial Sequence
  Description of Artificial Sequence: Synthetic oligonucleotide
aguuuuguccaaggggaug

SEQ ID NO: 2850441 - RNA, 19 nt, Artificial Sequence
  Description of Artificial Sequence: Synthetic oligonucleotide
ucgacagcaagcagccggu

SEQ ID NO: 2850442 - RNA, 19 nt, Artificial Sequence
  Description of Artificial Sequence: Synthetic oligonucleotide
ccggguuucaugaacuugc

SEQ ID NO: 2850443 - RNA, 19 nt, Artificial Sequence
  Description of Artificial Sequence: Synthetic oligonucleotide
uuugcguccggaguagcgu

SEQ ID NO: 2850444 - RNA, 19 nt, Artificial Sequence
  Description of Artificial Sequence: Synthetic oligonucleotide
cuuggcgauuuucuucuug

SEQ ID NO: 2850445 - RNA, 19 nt, Artificial Sequence
  Description of Artificial Sequence: Synthetic oligonucleotide
ugugggcaugaggugauug

SEQ ID NO: 2850446 - RNA, 19 nt, Artificial Sequence
  Description of Artificial Sequence: Synthetic oligonucleotide
uggcgauuuucuucuugcc

SEQ ID NO: 2850447 - RNA, 19 nt, Artificial Sequence
  Description of Artificial Sequence: Synthetic oligonucleotide
agcagaaaggaaggaagga

SEQ ID NO: 2850448 - RNA, 19 nt, Artificial Sequence
  Description of Artificial Sequence: Synthetic oligonucleotide
ucgccuugcguuucagggc

SEQ ID NO: 2850449 - RNA, 19 nt, Artificial Sequence
  Description of Artificial Sequence: Synthetic oligonucleotide
ucgcuuggcgauuuucuuc

SEQ ID NO: 2850450 - RNA, 19 nt, Artificial Sequence
  Description of Artificial Sequence: Synthetic oligonucleotide
gacggcuuugcguccggag

SEQ ID NO: 2850451 - RNA, 19 nt, Artificial Sequence
  Description of Artificial Sequence: Synthetic oligonucleotide
gaccagcaccacuuucccg

SEQ ID NO: 2850452 - RNA, 19 nt, Artificial Sequence
  Description of Artificial Sequence: Synthetic oligonucleotide
cucaaauuugaccuuggcu

SEQ ID NO: 2850453 - RNA, 19 nt, Artificial Sequence
  Description of Artificial Sequence: Synthetic oligonucleotide
uagcguccagccaggacca

SEQ ID NO: 2850454 - RNA, 19 nt, Artificial Sequence
  Description of Artificial Sequence: Synthetic oligonucleotide
aggggauguccacagagua

SEQ ID NO: 2850455 - RNA, 19 nt, Artificial Sequence
  Description of Artificial Sequence: Synthetic oligonucleotide
augaacuugcccauuucga

SEQ ID NO: 2850456 - RNA, 19 nt, Artificial Sequence
  Description of Artificial Sequence: Synthetic oligonucleotide
ggaaggaaggacacuuccg

SEQ ID NO: 2850457 - RNA, 19 nt, Artificial Sequence
  Description of Artificial Sequence: Synthetic oligonucleotide
ucggucaauuccagccacc

SEQ ID NO: 2850458 - RNA, 19 nt, Artificial Sequence
  Description of Artificial Sequence: Synthetic oligonucleotide
auccuuguugacaacaguu

SEQ ID NO: 2850459 - RNA, 19 nt, Artificial Sequence
  Description of Artificial Sequence: Synthetic oligonucleotide
uucuucccugucuuguauc

SEQ ID NO: 2850460 - RNA, 19 nt, Artificial Sequence
  Description of Artificial Sequence: Synthetic oligonucleotide
uguccaaggggauguccac

SEQ ID NO: 2850461 - RNA, 19 nt, Artificial Sequence
  Description of Artificial Sequence: Synthetic oligonucleotide
gacagcaagcagccgguuc

SEQ ID NO: 2850462 - RNA, 19 nt, Artificial Sequence
  Description of Artificial Sequence: Synthetic oligonucleotide
gccgguucccagcagaaag

SEQ ID NO: 2850463 - RNA, 19 nt, Artificial Sequence
  Description of Artificial Sequence: Synthetic oligonucleotide
agacauccuuguugacaac

SEQ ID NO: 2850464 - RNA, 19 nt, Artificial Sequence
  Description of Artificial Sequence: Synthetic oligonucleotide
aggugauuguaguuauaaa

SEQ ID NO: 2850465 - RNA, 19 nt, Artificial Sequence
  Description of Artificial Sequence: Synthetic oligonucleotide
acuugcccauuucgacagc

SEQ ID NO: 2850466 - RNA, 19 nt, Artificial Sequence
  Description of Artificial Sequence: Synthetic oligonucleotide
aaggggauguccacagagu

SEQ ID NO: 2850467 - RNA, 19 nt, Artificial Sequence
  Description of Artificial Sequence: Synthetic oligonucleotide
ucuugcccauggcagcugu

SEQ ID NO: 2850468 - RNA, 19 nt, Artificial Sequence
  Description of Artificial Sequence: Synthetic oligonucleotide
auggcuguaagggcggucu

SEQ ID NO: 2850469 - RNA, 19 nt, Artificial Sequence
  Description of Artificial Sequence: Synthetic oligonucleotide
acggcuuugcguccggagu

SEQ ID NO: 2850470 - RNA, 19 nt, Artificial Sequence
  Description of Artificial Sequence: Synthetic oligonucleotide
cuuggcuucucgccucgcc

SEQ ID NO: 2850471 - RNA, 19 nt, Artificial Sequence
  Description of Artificial Sequence: Synthetic oligonucleotide
caugaggugauuguaguua

SEQ ID NO: 2850472 - RNA, 19 nt, Artificial Sequence
  Description of Artificial Sequence: Synthetic oligonucleotide
uguugacaacaguuuuguc

SEQ ID NO: 2850473 - RNA, 19 nt, Artificial Sequence
  Description of Artificial Sequence: Synthetic oligonucleotide
uucccugucuuguaucguu

SEQ ID NO: 2850474 - RNA, 19 nt, Artificial Sequence
  Description of Artificial Sequence: Synthetic oligonucleotide
uguucuucccugucuugua

SEQ ID NO: 2850475 - RNA, 19 nt, Artificial Sequence
  Description of Artificial Sequence: Synthetic oligonucleotide
uugcccauggcagcuguca

SEQ ID NO: 2850476 - RNA, 19 nt, Artificial Sequence
  Description of Artificial Sequence: Synthetic oligonucleotide
gcagaaaggaaggaaggac

SEQ ID NO: 2850477 - RNA, 19 nt, Artificial Sequence
  Description of Artificial Sequence: Synthetic oligonucleotide
caauguucuucacgaugac

SEQ ID NO: 2850478 - RNA, 19 nt, Artificial Sequence
  Description of Artificial Sequence: Synthetic oligonucleotide
ucccugucuuguaucguuc

SEQ ID NO: 2850479 - RNA, 19 nt, Artificial Sequence
  Description of Artificial Sequence: Synthetic oligonucleotide
ugcguccggaguagcgucc

SEQ ID NO: 2850480 - RNA, 19 nt, Artificial Sequence
  Description of Artificial Sequence: Synthetic oligonucleotide
aucguuccucaaauuugac

SEQ ID NO: 2850481 - RNA, 19 nt, Artificial Sequence
  Description of Artificial Sequence: Synthetic oligonucleotide
gauuguaguuauaaacuuu

SEQ ID NO: 2850482 - RNA, 19 nt, Artificial Sequence
  Description of Artificial Sequence: Synthetic oligonucleotide
cuuguaucguuccucaaau

SEQ ID NO: 2850483 - RNA, 19 nt, Artificial Sequence
  Description of Artificial Sequence: Synthetic oligonucleotide
agcugucacuuuucgggga

SEQ ID NO: 2850484 - RNA, 19 nt, Artificial Sequence
  Description of Artificial Sequence: Synthetic oligonucleotide
accuugugggcaugaggug

SEQ ID NO: 2850485 - RNA, 19 nt, Artificial Sequence
  Description of Artificial Sequence: Synthetic oligonucleotide
gggcauggcuguaagggcg

SEQ ID NO: 2850486 - RNA, 19 nt, Artificial Sequence
  Description of Artificial Sequence: Synthetic oligonucleotide
accuuggcuucucgccucg

SEQ ID NO: 2850487 - RNA, 19 nt, Artificial Sequence
  Description of Artificial Sequence: Synthetic oligonucleotide
ugaggugauuguaguuaua

SEQ ID NO: 2850488 - RNA, 19 nt, Artificial Sequence
  Description of Artificial Sequence: Synthetic oligonucleotide
ggcagcugucacuuuucgg

SEQ ID NO: 2850489 - RNA, 19 nt, Artificial Sequence
  Description of Artificial Sequence: Synthetic oligonucleotide
ugaucgcuuggcgauuuuc

SEQ ID NO: 2850490 - RNA, 19 nt, Artificial Sequence
  Description of Artificial Sequence: Synthetic oligonucleotide
uuucgacagcaagcagccg

SEQ ID NO: 2850491 - RNA, 19 nt, Artificial Sequence
  Description of Artificial Sequence: Synthetic oligonucleotide
uuguaucguuccucaaauu

SEQ ID NO: 2850492 - RNA, 19 nt, Artificial Sequence
  Description of Artificial Sequence: Synthetic oligonucleotide
guuuuguccaaggggaugu

SEQ ID NO: 2850493 - RNA, 19 nt, Artificial Sequence
  Description of Artificial Sequence: Synthetic oligonucleotide
ucucgccucgccuugcguu

SEQ ID NO: 2850494 - RNA, 19 nt, Artificial Sequence
  Description of Artificial Sequence: Synthetic oligonucleotide
ugcccauggcagcugucac

SEQ ID NO: 2850495 - RNA, 19 nt, Artificial Sequence
  Description of Artificial Sequence: Synthetic oligonucleotide
aucgcuuggcgauuuucuu

SEQ ID NO: 2850496 - RNA, 19 nt, Artificial Sequence
  Description of Artificial Sequence: Synthetic oligonucleotide
cacuuucccggguuucaug

SEQ ID NO: 2850497 - RNA, 19 nt, Artificial Sequence
  Description of Artificial Sequence: Synthetic oligonucleotide
uuugaucgcuuggcgauuu

SEQ ID NO: 2850498 - RNA, 19 nt, Artificial Sequence
  Description of Artificial Sequence: Synthetic oligonucleotide
uucagggcugggucucuga

SEQ ID NO: 2850499 - RNA, 19 nt, Artificial Sequence
  Description of Artificial Sequence: Synthetic oligonucleotide
uugcguccggaguagcguc

SEQ ID NO: 2850500 - RNA, 19 nt, Artificial Sequence
  Description of Artificial Sequence: Synthetic oligonucleotide
uugcguuucagggcugggu

SEQ ID NO: 2850501 - RNA, 19 nt, Artificial Sequence
  Description of Artificial Sequence: Synthetic oligonucleotide
guuucaugaacuugcccau

SEQ ID NO: 2850502 - RNA, 19 nt, Artificial Sequence
  Description of Artificial Sequence: Synthetic oligonucleotide
uuucggggauaucggucaa

SEQ ID NO: 2850503 - RNA, 19 nt, Artificial Sequence
  Description of Artificial Sequence: Synthetic oligonucleotide
gggauaucggucaauucca

SEQ ID NO: 2850504 - RNA, 19 nt, Artificial Sequence
  Description of Artificial Sequence: Synthetic oligonucleotide
uugcccauuucgacagcaa

SEQ ID NO: 2850505 - RNA, 19 nt, Artificial Sequence
  Description of Artificial Sequence: Synthetic oligonucleotide
guccacagaguaccuugug

SEQ ID NO: 2850506 - RNA, 19 nt, Artificial Sequence
  Description of Artificial Sequence: Synthetic oligonucleotide
agcaccacuuucccggguu

SEQ ID NO: 2850507 - RNA, 19 nt, Artificial Sequence
  Description of Artificial Sequence: Synthetic oligonucleotide
ugggcaugaggugauugua

SEQ ID NO: 2850508 - RNA, 19 nt, Artificial Sequence
  Description of Artificial Sequence: Synthetic oligonucleotide
cuucucgccucgccuugcg

SEQ ID NO: 2850509 - RNA, 19 nt, Artificial Sequence
  Description of Artificial Sequence: Synthetic oligonucleotide
ucggggauaucggucaauu

SEQ ID NO: 2850510 - RNA, 19 nt, Artificial Sequence
  Description of Artificial Sequence: Synthetic oligonucleotide
cuguaagggcggucugaag

SEQ ID NO: 2850511 - RNA, 19 nt, Artificial Sequence
  Description of Artificial Sequence: Synthetic oligonucleotide
gaccuuggcuucucgccuc

SEQ ID NO: 2850512 - RNA, 19 nt, Artificial Sequence
  Description of Artificial Sequence: Synthetic oligonucleotide
gcggucugaagugccaucg

SEQ ID NO: 2850513 - RNA, 19 nt, Artificial Sequence
  Description of Artificial Sequence: Synthetic oligonucleotide
caauuccagccaccagggc

SEQ ID NO: 2850514 - RNA, 19 nt, Artificial Sequence
  Description of Artificial Sequence: Synthetic oligonucleotide
caucgucaauguucuucac

SEQ ID NO: 2850515 - RNA, 19 nt, Artificial Sequence
  Description of Artificial Sequence: Synthetic oligonucleotide
cguuccucaaauuugaccu

SEQ ID NO: 2850516 - RNA, 19 nt, Artificial Sequence
  Description of Artificial Sequence: Synthetic oligonucleotide
ggucaauuccagccaccag

SEQ ID NO: 2850517 - RNA, 19 nt, Artificial Sequence
  Description of Artificial Sequence: Synthetic oligonucleotide
gaucgcuuggcgauuuucu

SEQ ID NO: 2850518 - RNA, 19 nt, Artificial Sequence
  Description of Artificial Sequence: Synthetic oligonucleotide
ggaccagcaccacuuuccc

SEQ ID NO: 2850519 - RNA, 19 nt, Artificial Sequence
  Description of Artificial Sequence: Synthetic oligonucleotide
aagugccaucgucaauguu

SEQ ID NO: 2850520 - RNA, 19 nt, Artificial Sequence
  Description of Artificial Sequence: Synthetic oligonucleotide
uggcuguaagggcggucug

SEQ ID NO: 2850521 - RNA, 19 nt, Artificial Sequence
  Description of Artificial Sequence: Synthetic oligonucleotide
ggucugaagugccaucguc

SEQ ID NO: 2850522 - RNA, 19 nt, Artificial Sequence
  Description of Artificial Sequence: Synthetic oligonucleotide
augacggcuuugcguccgg

SEQ ID NO: 2850523 - RNA, 19 nt, Artificial Sequence
  Description of Artificial Sequence: Synthetic oligonucleotide
cggaguagcguccagccag

SEQ ID NO: 2850524 - RNA, 19 nt, Artificial Sequence
  Description of Artificial Sequence: Synthetic oligonucleotide
cacgaugacggcuuugcgu

SEQ ID NO: 2850525 - RNA, 19 nt, Artificial Sequence
  Description of Artificial Sequence: Synthetic oligonucleotide
ugacaacaguuuuguccaa

SEQ ID NO: 2850526 - RNA, 19 nt, Artificial Sequence
  Description of Artificial Sequence: Synthetic oligonucleotide
cauuuguucuucccugucu

SEQ ID NO: 2850527 - RNA, 19 nt, Artificial Sequence
  Description of Artificial Sequence: Synthetic oligonucleotide
gcccauuucgacagcaagc

SEQ ID NO: 2850528 - RNA, 19 nt, Artificial Sequence
  Description of Artificial Sequence: Synthetic oligonucleotide
accuaaaagcgaagcuucu

SEQ ID NO: 2850529 - RNA, 19 nt, Artificial Sequence
  Description of Artificial Sequence: Synthetic oligonucleotide
uuuugaucgcuuggcgauu

SEQ ID NO: 2850530 - RNA, 19 nt, Artificial Sequence
  Description of Artificial Sequence: Synthetic oligonucleotide
ccgguucccagcagaaagg

SEQ ID NO: 2850531 - RNA, 19 nt, Artificial Sequence
  Description of Artificial Sequence: Synthetic oligonucleotide
ccaucgucaauguucuuca

SEQ ID NO: 2850532 - RNA, 19 nt, Artificial Sequence
  Description of Artificial Sequence: Synthetic oligonucleotide
uuucaugaacuugcccauu

SEQ ID NO: 2850533 - RNA, 19 nt, Artificial Sequence
  Description of Artificial Sequence: Synthetic oligonucleotide
gggcaugaggugauuguag

SEQ ID NO: 2850534 - RNA, 19 nt, Artificial Sequence
  Description of Artificial Sequence: Synthetic oligonucleotide
gccaucgucaauguucuuc

SEQ ID NO: 2850535 - RNA, 19 nt, Artificial Sequence
  Description of Artificial Sequence: Synthetic oligonucleotide
gaagugccaucgucaaugu

SEQ ID NO: 2850536 - RNA, 19 nt, Artificial Sequence
  Description of Artificial Sequence: Synthetic oligonucleotide
ccucaaauuugaccuuggc

SEQ ID NO: 2850537 - RNA, 19 nt, Artificial Sequence
  Description of Artificial Sequence: Synthetic oligonucleotide
ggauaucggucaauuccag

SEQ ID NO: 2850538 - RNA, 19 nt, Artificial Sequence
  Description of Artificial Sequence: Synthetic oligonucleotide
gcaagcagccgguucccag

SEQ ID NO: 2850539 - RNA, 19 nt, Artificial Sequence
  Description of Artificial Sequence: Synthetic oligonucleotide
cuugcguuucagggcuggg

SEQ ID NO: 2850540 - RNA, 19 nt, Artificial Sequence
  Description of Artificial Sequence: Synthetic oligonucleotide
cuugcccauuucgacagca

SEQ ID NO: 2850541 - RNA, 19 nt, Artificial Sequence
  Description of Artificial Sequence: Synthetic oligonucleotide
uucucgccucgccuugcgu

SEQ ID NO: 2850542 - RNA, 19 nt, Artificial Sequence
  Description of Artificial Sequence: Synthetic oligonucleotide
uuucagggcugggucucug

SEQ ID NO: 2850543 - RNA, 19 nt, Artificial Sequence
  Description of Artificial Sequence: Synthetic oligonucleotide
ucuucacgaugacggcuuu

SEQ ID NO: 2850544 - RNA, 19 nt, Artificial Sequence
  Description of Artificial Sequence: Synthetic oligonucleotide
gaaaggaaggaaggacacu

SEQ ID NO: 2850545 - RNA, 19 nt, Artificial Sequence
  Description of Artificial Sequence: Synthetic oligonucleotide
uccagccaccagggcaugg

SEQ ID NO: 2850546 - RNA, 19 nt, Artificial Sequence
  Description of Artificial Sequence: Synthetic oligonucleotide
agccaggaccagcaccacu

SEQ ID NO: 2850547 - RNA, 19 nt, Artificial Sequence
  Description of Artificial Sequence: Synthetic oligonucleotide
ucccagcagaaaggaagga

SEQ ID NO: 2850548 - RNA, 19 nt, Artificial Sequence
  Description of Artificial Sequence: Synthetic oligonucleotide
caggaccagcaccacuuuc

SEQ ID NO: 2850549 - RNA, 19 nt, Artificial Sequence
  Description of Artificial Sequence: Synthetic oligonucleotide
ggcauggcuguaagggcgg

SEQ ID NO: 2850550 - RNA, 19 nt, Artificial Sequence
  Description of Artificial Sequence: Synthetic oligonucleotide
ccuaaaagcgaagcuucug

SEQ ID NO: 2850551 - RNA, 19 nt, Artificial Sequence
  Description of Artificial Sequence: Synthetic oligonucleotide
uggcuucucgccucgccuu

SEQ ID NO: 2850552 - RNA, 19 nt, Artificial Sequence
  Description of Artificial Sequence: Synthetic oligonucleotide
uucuugcccauggcagcug

SEQ ID NO: 2850553 - RNA, 19 nt, Artificial Sequence
  Description of Artificial Sequence: Synthetic oligonucleotide
ggaguagcguccagccagg

SEQ ID NO: 2850554 - RNA, 19 nt, Artificial Sequence
  Description of Artificial Sequence: Synthetic oligonucleotide
cccugucuuguaucguucc

SEQ ID NO: 2850555 - RNA, 19 nt, Artificial Sequence
  Description of Artificial Sequence: Synthetic oligonucleotide
guccggaguagcguccagc

SEQ ID NO: 2850556 - RNA, 19 nt, Artificial Sequence
  Description of Artificial Sequence: Synthetic oligonucleotide
cuucacgaugacggcuuug

SEQ ID NO: 2850557 - RNA, 19 nt, Artificial Sequence
  Description of Artificial Sequence: Synthetic oligonucleotide
guucuucacgaugacggcu

SEQ ID NO: 2850558 - RNA, 19 nt, Artificial Sequence
  Description of Artificial Sequence: Synthetic oligonucleotide
gugggcaugaggugauugu

SEQ ID NO: 2850559 - RNA, 19 nt, Artificial Sequence
  Description of Artificial Sequence: Synthetic oligonucleotide
cccauuucgacagcaagca

SEQ ID NO: 2850560 - RNA, 19 nt, Artificial Sequence
  Description of Artificial Sequence: Synthetic oligonucleotide
ggcaugaggugauuguagu

SEQ ID NO: 2850561 - RNA, 19 nt, Artificial Sequence
  Description of Artificial Sequence: Synthetic oligonucleotide
ucccggguuucaugaacuu

SEQ ID NO: 2850562 - RNA, 19 nt, Artificial Sequence
  Description of Artificial Sequence: Synthetic oligonucleotide
agcagccgguucccagcag

SEQ ID NO: 2850563 - RNA, 19 nt, Artificial Sequence
  Description of Artificial Sequence: Synthetic oligonucleotide
cuugcccauggcagcuguc

SEQ ID NO: 2850564 - RNA, 19 nt, Artificial Sequence
  Description of Artificial Sequence: Synthetic oligonucleotide
uugaucgcuuggcgauuuu

SEQ ID NO: 2850565 - RNA, 19 nt, Artificial Sequence
  Description of Artificial Sequence: Synthetic oligonucleotide
agccaccagggcauggcug

SEQ ID NO: 2850566 - RNA, 19 nt, Artificial Sequence
  Description of Artificial Sequence: Synthetic oligonucleotide
gugccaucgucaauguucu

SEQ ID NO: 2850567 - RNA, 19 nt, Artificial Sequence
  Description of Artificial Sequence: Synthetic oligonucleotide
ggggauguccacagaguac

SEQ ID NO: 2850568 - RNA, 19 nt, Artificial Sequence
  Description of Artificial Sequence: Synthetic oligonucleotide
ccauuucgacagcaagcag

SEQ ID NO: 2850569 - RNA, 19 nt, Artificial Sequence
  Description of Artificial Sequence: Synthetic oligonucleotide
cugggucucugaagacauc

SEQ ID NO: 2850570 - RNA, 19 nt, Artificial Sequence
  Description of Artificial Sequence: Synthetic oligonucleotide
guucuucccugucuuguau

SEQ ID NO: 2850571 - RNA, 19 nt, Artificial Sequence
  Description of Artificial Sequence: Synthetic oligonucleotide
agaguaccuugugggcaug

SEQ ID NO: 2850572 - RNA, 19 nt, Artificial Sequence
  Description of Artificial Sequence: Synthetic oligonucleotide
guccaaggggauguccaca

SEQ ID NO: 2850573 - RNA, 19 nt, Artificial Sequence
  Description of Artificial Sequence: Synthetic oligonucleotide
gucuuguaucguuccucaa

SEQ ID NO: 2850574 - RNA, 19 nt, Artificial Sequence
  Description of Artificial Sequence: Synthetic oligonucleotide
uucggggauaucggucaau

SEQ ID NO: 2850575 - RNA, 19 nt, Artificial Sequence
  Description of Artificial Sequence: Synthetic oligonucleotide
cuuucacaaaagacuugau

SEQ ID NO: 2850576 - RNA, 19 nt, Artificial Sequence
  Description of Artificial Sequence: Synthetic oligonucleotide
cauccuuguugacaacagu

SEQ ID NO: 2850577 - RNA, 19 nt, Artificial Sequence
  Description of Artificial Sequence: Synthetic oligonucleotide
cuuucccggguuucaugaa

SEQ ID NO: 2850578 - RNA, 19 nt, Artificial Sequence
  Description of Artificial Sequence: Synthetic oligonucleotide
ccauuuguucuucccuguc

SEQ ID NO: 2850579 - RNA, 19 nt, Artificial Sequence
  Description of Artificial Sequence: Synthetic oligonucleotide
ggcuuugcguccggaguag

SEQ ID NO: 2850580 - RNA, 19 nt, Artificial Sequence
  Description of Artificial Sequence: Synthetic oligonucleotide
cauggcuguaagggcgguc

SEQ ID NO: 2850581 - RNA, 19 nt, Artificial Sequence
  Description of Artificial Sequence: Synthetic oligonucleotide
ggcugggucucugaagaca

SEQ ID NO: 2850582 - RNA, 19 nt, Artificial Sequence
  Description of Artificial Sequence: Synthetic oligonucleotide
ccagcaccacuuucccggg

SEQ ID NO: 2850583 - RNA, 19 nt, Artificial Sequence
  Description of Artificial Sequence: Synthetic oligonucleotide
cagaguaccuugugggcau

SEQ ID NO: 2850584 - RNA, 19 nt, Artificial Sequence
  Description of Artificial Sequence: Synthetic oligonucleotide
cuugugggcaugaggugau

SEQ ID NO: 2850585 - RNA, 19 nt, Artificial Sequence
  Description of Artificial Sequence: Synthetic oligonucleotide
gcagccgguucccagcaga

SEQ ID NO: 2850586 - RNA, 19 nt, Artificial Sequence
  Description of Artificial Sequence: Synthetic oligonucleotide
caccacuuucccggguuuc

SEQ ID NO: 2850587 - RNA, 19 nt, Artificial Sequence
  Description of Artificial Sequence: Synthetic oligonucleotide
ggcuucucgccucgccuug

SEQ ID NO: 2850588 - RNA, 19 nt, Artificial Sequence
  Description of Artificial Sequence: Synthetic oligonucleotide
ccuugugggcaugagguga

SEQ ID NO: 2850589 - RNA, 19 nt, Artificial Sequence
  Description of Artificial Sequence: Synthetic oligonucleotide
gucacuuuucggggauauc

SEQ ID NO: 2850590 - RNA, 19 nt, Artificial Sequence
  Description of Artificial Sequence: Synthetic oligonucleotide
guuccucaaauuugaccuu

SEQ ID NO: 2850591 - RNA, 19 nt, Artificial Sequence
  Description of Artificial Sequence: Synthetic oligonucleotide
ccucgccuugcguuucagg

SEQ ID NO: 2850592 - RNA, 19 nt, Artificial Sequence
  Description of Artificial Sequence: Synthetic oligonucleotide
ugacggcuuugcguccgga

SEQ ID NO: 2850593 - RNA, 19 nt, Artificial Sequence
  Description of Artificial Sequence: Synthetic oligonucleotide
cggguuucaugaacuugcc

SEQ ID NO: 2850594 - RNA, 19 nt, Artificial Sequence
  Description of Artificial Sequence: Synthetic oligonucleotide
ccuugcguuucagggcugg

SEQ ID NO: 2850595 - RNA, 19 nt, Artificial Sequence
  Description of Artificial Sequence: Synthetic oligonucleotide
agcaagcagccgguuccca

SEQ ID NO: 2850596 - RNA, 19 nt, Artificial Sequence
  Description of Artificial Sequence: Synthetic oligonucleotide
uuccagccaccagggcaug

SEQ ID NO: 2850597 - RNA, 19 nt, Artificial Sequence
  Description of Artificial Sequence: Synthetic oligonucleotide
agggcggucugaagugcca

SEQ ID NO: 2850598 - RNA, 19 nt, Artificial Sequence
  Description of Artificial Sequence: Synthetic oligonucleotide
ggucucugaagacauccuu

SEQ ID NO: 2850599 - RNA, 19 nt, Artificial Sequence
  Description of Artificial Sequence: Synthetic oligonucleotide
gcuguaagggcggucugaa

SEQ ID NO: 2850600 - RNA, 19 nt, Artificial Sequence
  Description of Artificial Sequence: Synthetic oligonucleotide
guccagccaggaccagcac

SEQ ID NO: 2850601 - RNA, 19 nt, Artificial Sequence
  Description of Artificial Sequence: Synthetic oligonucleotide
caguuuuguccaaggggau

SEQ ID NO: 2850602 - RNA, 19 nt, Artificial Sequence
  Description of Artificial Sequence: Synthetic oligonucleotide
ggcggucugaagugccauc

SEQ ID NO: 2850603 - RNA, 19 nt, Artificial Sequence
  Description of Artificial Sequence: Synthetic oligonucleotide
cagccgguucccagcagaa

SEQ ID NO: 2850604 - RNA, 19 nt, Artificial Sequence
  Description of Artificial Sequence: Synthetic oligonucleotide
cccggguuucaugaacuug

SEQ ID NO: 2850605 - RNA, 19 nt, Artificial Sequence
  Description of Artificial Sequence: Synthetic oligonucleotide
ggcuguaagggcggucuga

SEQ ID NO: 2850606 - RNA, 19 nt, Artificial Sequence
  Description of Artificial Sequence: Synthetic oligonucleotide
gaguagcguccagccagga

SEQ ID NO: 2850607 - RNA, 19 nt, Artificial Sequence
  Description of Artificial Sequence: Synthetic oligonucleotide
gccaccagggcauggcugu

SEQ ID NO: 2850608 - RNA, 19 nt, Artificial Sequence
  Description of Artificial Sequence: Synthetic oligonucleotide
cguccagccaggaccagca

SEQ ID NO: 2850609 - RNA, 19 nt, Artificial Sequence
  Description of Artificial Sequence: Synthetic oligonucleotide
ccuuguugacaacaguuuu

SEQ ID NO: 2850610 - RNA, 19 nt, Artificial Sequence
  Description of Artificial Sequence: Synthetic oligonucleotide
uugugggcaugaggugauu

SEQ ID NO: 2850611 - RNA, 19 nt, Artificial Sequence
  Description of Artificial Sequence: Synthetic oligonucleotide
gggcugggucucugaagac

SEQ ID NO: 2850612 - RNA, 19 nt, Artificial Sequence
  Description of Artificial Sequence: Synthetic oligonucleotide
agccgguucccagcagaaa

SEQ ID NO: 2850613 - RNA, 19 nt, Artificial Sequence
  Description of Artificial Sequence: Synthetic oligonucleotide
ucgccucgccuugcguuuc

SEQ ID NO: 2850614 - RNA, 19 nt, Artificial Sequence
  Description of Artificial Sequence: Synthetic oligonucleotide
ugccaucgucaauguucuu

SEQ ID NO: 2850615 - RNA, 19 nt, Artificial Sequence
  Description of Artificial Sequence: Synthetic oligonucleotide
gcuuugcguccggaguagc

SEQ ID NO: 2850616 - RNA, 19 nt, Artificial Sequence
  Description of Artificial Sequence: Synthetic oligonucleotide
cccagcagaaaggaaggaa

SEQ ID NO: 2850617 - RNA, 19 nt, Artificial Sequence
  Description of Artificial Sequence: Synthetic oligonucleotide
cgaugacggcuuugcgucc

SEQ ID NO: 2850618 - RNA, 19 nt, Artificial Sequence
  Description of Artificial Sequence: Synthetic oligonucleotide
gcaugaggugauuguaguu

SEQ ID NO: 2850619 - RNA, 19 nt, Artificial Sequence
  Description of Artificial Sequence: Synthetic oligonucleotide
gguucccagcagaaaggaa

SEQ ID NO: 2850620 - RNA, 19 nt, Artificial Sequence
  Description of Artificial Sequence: Synthetic oligonucleotide
gcguuucagggcugggucu

SEQ ID NO: 2850621 - RNA, 19 nt, Artificial Sequence
  Description of Artificial Sequence: Synthetic oligonucleotide
gcuucucgccucgccuugc

SEQ ID NO: 2850622 - RNA, 19 nt, Artificial Sequence
  Description of Artificial Sequence: Synthetic oligonucleotide
cugaagugccaucgucaau

SEQ ID NO: 2850623 - RNA, 19 nt, Artificial Sequence
  Description of Artificial Sequence: Synthetic oligonucleotide
cgcuuggcgauuuucuucu

SEQ ID NO: 2850624 - RNA, 19 nt, Artificial Sequence
  Description of Artificial Sequence: Synthetic oligonucleotide
cuucccugucuuguaucgu

SEQ ID NO: 2850625 - RNA, 19 nt, Artificial Sequence
  Description of Artificial Sequence: Synthetic oligonucleotide
gccaggaccagcaccacuu

SEQ ID NO: 2850626 - RNA, 19 nt, Artificial Sequence
  Description of Artificial Sequence: Synthetic oligonucleotide
cucgccucgccuugcguuu

SEQ ID NO: 2850627 - RNA, 19 nt, Artificial Sequence
  Description of Artificial Sequence: Synthetic oligonucleotide
caccagggcauggcuguaa

SEQ ID NO: 2850628 - RNA, 19 nt, Artificial Sequence
  Description of Artificial Sequence: Synthetic oligonucleotide
guuucagggcugggucucu

SEQ ID NO: 2850629 - RNA, 19 nt, Artificial Sequence
  Description of Artificial Sequence: Synthetic oligonucleotide
gcccauggcagcugucacu

SEQ ID NO: 2850630 - RNA, 19 nt, Artificial Sequence
  Description of Artificial Sequence: Synthetic oligonucleotide
cugucacuuuucggggaua

SEQ ID NO: 2850631 - RNA, 19 nt, Artificial Sequence
  Description of Artificial Sequence: Synthetic oligonucleotide
cggucaauuccagccacca

SEQ ID NO: 2850632 - RNA, 19 nt, Artificial Sequence
  Description of Artificial Sequence: Synthetic oligonucleotide
gggucucugaagacauccu

SEQ ID NO: 2850633 - RNA, 19 nt, Artificial Sequence
  Description of Artificial Sequence: Synthetic oligonucleotide
ccaaggggauguccacaga

SEQ ID NO: 2850634 - RNA, 19 nt, Artificial Sequence
  Description of Artificial Sequence: Synthetic oligonucleotide
ccggaguagcguccagcca

SEQ ID NO: 2850635 - RNA, 19 nt, Artificial Sequence
  Description of Artificial Sequence: Synthetic oligonucleotide
gccucgccuugcguuucag

SEQ ID NO: 2850636 - RNA, 19 nt, Artificial Sequence
  Description of Artificial Sequence: Synthetic oligonucleotide
cgccuugcguuucagggcu

SEQ ID NO: 2850637 - RNA, 19 nt, Artificial Sequence
  Description of Artificial Sequence: Synthetic oligonucleotide
cgguucccagcagaaagga

SEQ ID NO: 2850638 - RNA, 19 nt, Artificial Sequence
  Description of Artificial Sequence: Synthetic oligonucleotide
ccuuggcuucucgccucgc

SEQ ID NO: 2850639 - RNA, 19 nt, Artificial Sequence
  Description of Artificial Sequence: Synthetic oligonucleotide
gcguccggaguagcgucca

SEQ ID NO: 2850640 - RNA, 19 nt, Artificial Sequence
  Description of Artificial Sequence: Synthetic oligonucleotide
gccuugcguuucagggcug

SEQ ID NO: 2850641 - RNA, 19 nt, Artificial Sequence
  Description of Artificial Sequence: Synthetic oligonucleotide
cggcuuugcguccggagua

SEQ ID NO: 2850642 - RNA, 19 nt, Artificial Sequence
  Description of Artificial Sequence: Synthetic oligonucleotide
cagcaccacuuucccgggu

SEQ ID NO: 2850643 - RNA, 19 nt, Artificial Sequence
  Description of Artificial Sequence: Synthetic oligonucleotide
cgauuuucuucuugcccau

SEQ ID NO: 2850644 - RNA, 19 nt, Artificial Sequence
  Description of Artificial Sequence: Synthetic oligonucleotide
cguccggaguagcguccag

SEQ ID NO: 2850645 - RNA, 19 nt, Artificial Sequence
  Description of Artificial Sequence: Synthetic oligonucleotide
gcaccacuuucccggguuu

SEQ ID NO: 2850646 - RNA, 19 nt, Artificial Sequence
  Description of Artificial Sequence: Synthetic oligonucleotide
cgucaauguucuucacgau

SEQ ID NO: 2850647 - RNA, 19 nt, Artificial Sequence
  Description of Artificial Sequence: Synthetic oligonucleotide
gggcggucugaagugccau

SEQ ID NO: 2850648 - RNA, 19 nt, Artificial Sequence
  Description of Artificial Sequence: Synthetic oligonucleotide
gcuuggcgauuuucuucuu

SEQ ID NO: 2850649 - RNA, 19 nt, Artificial Sequence
  Description of Artificial Sequence: Synthetic oligonucleotide
gcauggcuguaagggcggu

SEQ ID NO: 2850650 - RNA, 19 nt, Artificial Sequence
  Description of Artificial Sequence: Synthetic oligonucleotide
ccaggaccagcaccacuuu

SEQ ID NO: 2850651 - RNA, 19 nt, Artificial Sequence
  Description of Artificial Sequence: Synthetic oligonucleotide
ccacuuucccggguuucau

SEQ ID NO: 2850652 - RNA, 19 nt, Artificial Sequence
  Description of Artificial Sequence: Synthetic oligonucleotide
cggucugaagugccaucgu

SEQ ID NO: 2850653 - RNA, 19 nt, Artificial Sequence
  Description of Artificial Sequence: Synthetic oligonucleotide
cgccucgccuugcguuuca

SEQ ID NO: 2850654 - RNA, 19 nt, Artificial Sequence
  Description of Artificial Sequence: Synthetic oligonucleotide
ccaccagggcauggcugua

SEQ ID NO: 2850655 - RNA, 19 nt, Artificial Sequence
  Description of Artificial Sequence: Synthetic oligonucleotide
ccauggcagcugucacuuu

SEQ ID NO: 2850656 - RNA, 19 nt, Artificial Sequence
  Description of Artificial Sequence: Synthetic oligonucleotide
cgacagcaagcagccgguu

SEQ ID NO: 2850657 - RNA, 19 nt, Artificial Sequence
  Description of Artificial Sequence: Synthetic oligonucleotide
aauaguaccucccacgugu

SEQ ID NO: 2850658 - RNA, 19 nt, Artificial Sequence
  Description of Artificial Sequence: Synthetic oligonucleotide
ucuaauaguaccucccacg

SEQ ID NO: 2850659 - RNA, 19 nt, Artificial Sequence
  Description of Artificial Sequence: Synthetic oligonucleotide
uauguaaugaaagggagag

SEQ ID NO: 2850660 - RNA, 19 nt, Artificial Sequence
  Description of Artificial Sequence: Synthetic oligonucleotide
aaucaggaauuucugacag

SEQ ID NO: 2850661 - RNA, 19 nt, Artificial Sequence
  Description of Artificial Sequence: Synthetic oligonucleotide
uccagauauguaaugaaag

SEQ ID NO: 2850662 - RNA, 19 nt, Artificial Sequence
  Description of Artificial Sequence: Synthetic oligonucleotide
aggaauuucugacagguuc

SEQ ID NO: 2850663 - RNA, 19 nt, Artificial Sequence
  Description of Artificial Sequence: Synthetic oligonucleotide
aucagugcaauucugcaac

SEQ ID NO: 2850664 - RNA, 19 nt, Artificial Sequence
  Description of Artificial Sequence: Synthetic oligonucleotide
uguaaugaaagggagagcu

SEQ ID NO: 2850665 - RNA, 19 nt, Artificial Sequence
  Description of Artificial Sequence: Synthetic oligonucleotide
ucuuucuccaguaaacagc

SEQ ID NO: 2850666 - RNA, 19 nt, Artificial Sequence
  Description of Artificial Sequence: Synthetic oligonucleotide
gagacagacuuccuaaugg

SEQ ID NO: 2850667 - RNA, 19 nt, Artificial Sequence
  Description of Artificial Sequence: Synthetic oligonucleotide
guaaacagcuucuugagac

SEQ ID NO: 2850668 - RNA, 19 nt, Artificial Sequence
  Description of Artificial Sequence: Synthetic oligonucleotide
uccaguguaggcauugagg

SEQ ID NO: 2850669 - RNA, 19 nt, Artificial Sequence
  Description of Artificial Sequence: Synthetic oligonucleotide
uacugaaucaggaauuucu

SEQ ID NO: 2850670 - RNA, 19 nt, Artificial Sequence
  Description of Artificial Sequence: Synthetic oligonucleotide
ugaaucaggaauuucugac

SEQ ID NO: 2850671 - RNA, 19 nt, Artificial Sequence
  Description of Artificial Sequence: Synthetic oligonucleotide
gauauguaaugaaagggag

SEQ ID NO: 2850672 - RNA, 19 nt, Artificial Sequence
  Description of Artificial Sequence: Synthetic oligonucleotide
aucgcaguagcacuacucc

SEQ ID NO: 2850673 - RNA, 19 nt, Artificial Sequence
  Description of Artificial Sequence: Synthetic oligonucleotide
aagcccaccgaacaggcgg

SEQ ID NO: 2850674 - RNA, 19 nt, Artificial Sequence
  Description of Artificial Sequence: Synthetic oligonucleotide
aggaucaacagcugucucc

SEQ ID NO: 2850675 - RNA, 19 nt, Artificial Sequence
  Description of Artificial Sequence: Synthetic oligonucleotide
acugucugaaagcucuucc

SEQ ID NO: 2850676 - RNA, 19 nt, Artificial Sequence
  Description of Artificial Sequence: Synthetic oligonucleotide
gacagguucuaauaguacc

SEQ ID NO: 2850677 - RNA, 19 nt, Artificial Sequence
  Description of Artificial Sequence: Synthetic oligonucleotide
aaaacacggauaucggugu

SEQ ID NO: 2850678 - RNA, 19 nt, Artificial Sequence
  Description of Artificial Sequence: Synthetic oligonucleotide
ugagguaucgaacugcaaa

SEQ ID NO: 2850679 - RNA, 19 nt, Artificial Sequence
  Description of Artificial Sequence: Synthetic oligonucleotide
cagauauguaaugaaaggg

SEQ ID NO: 2850680 - RNA, 19 nt, Artificial Sequence
  Description of Artificial Sequence: Synthetic oligonucleotide
uucugcaacaggaucaaca

SEQ ID NO: 2850681 - RNA, 19 nt, Artificial Sequence
  Description of Artificial Sequence: Synthetic oligonucleotide
uaucgaacugcaaagccca

SEQ ID NO: 2850682 - RNA, 19 nt, Artificial Sequence
  Description of Artificial Sequence: Synthetic oligonucleotide
auaucgguguccuuuguuc

SEQ ID NO: 2850683 - RNA, 19 nt, Artificial Sequence
  Description of Artificial Sequence: Synthetic oligonucleotide
ugaaagggagagcugacca

SEQ ID NO: 2850684 - RNA, 19 nt, Artificial Sequence
  Description of Artificial Sequence: Synthetic oligonucleotide
agguaccugugcuugaacc

SEQ ID NO: 2850685 - RNA, 19 nt, Artificial Sequence
  Description of Artificial Sequence: Synthetic oligonucleotide
gagguaucgaacugcaaag

SEQ ID NO: 2850686 - RNA, 19 nt, Artificial Sequence
  Description of Artificial Sequence: Synthetic oligonucleotide
agugcaauucugcaacagg

SEQ ID NO: 2850687 - RNA, 19 nt, Artificial Sequence
  Description of Artificial Sequence: Synthetic oligonucleotide
aauccuuucggcaucgcag

SEQ ID NO: 2850688 - RNA, 19 nt, Artificial Sequence
  Description of Artificial Sequence: Synthetic oligonucleotide
uccuuuguucuccagauau

SEQ ID NO: 2850689 - RNA, 19 nt, Artificial Sequence
  Description of Artificial Sequence: Synthetic oligonucleotide
agguucuaauaguaccucc

SEQ ID NO: 2850690 - RNA, 19 nt, Artificial Sequence
  Description of Artificial Sequence: Synthetic oligonucleotide
uaaugaaagggagagcuga

SEQ ID NO: 2850691 - RNA, 19 nt, Artificial Sequence
  Description of Artificial Sequence: Synthetic oligonucleotide
ugucugaaagcucuuccgc

SEQ ID NO: 2850692 - RNA, 19 nt, Artificial Sequence
  Description of Artificial Sequence: Synthetic oligonucleotide
aacacggauaucggugucc

SEQ ID NO: 2850693 - RNA, 19 nt, Artificial Sequence
  Description of Artificial Sequence: Synthetic oligonucleotide
uuguucuccagauauguaa

SEQ ID NO: 2850694 - RNA, 19 nt, Artificial Sequence
  Description of Artificial Sequence: Synthetic oligonucleotide
ucugaaagcucuuccgcag

SEQ ID NO: 2850695 - RNA, 19 nt, Artificial Sequence
  Description of Artificial Sequence: Synthetic oligonucleotide
ucaggaauuucugacaggu

SEQ ID NO: 2850696 - RNA, 19 nt, Artificial Sequence
  Description of Artificial Sequence: Synthetic oligonucleotide
agcuucuugagacagacuu

SEQ ID NO: 2850697 - RNA, 19 nt, Artificial Sequence
  Description of Artificial Sequence: Synthetic oligonucleotide
ugaccacacaagcugguag

SEQ ID NO: 2850698 - RNA, 19 nt, Artificial Sequence
  Description of Artificial Sequence: Synthetic oligonucleotide
ugagacagacuuccuaaug

SEQ ID NO: 2850699 - RNA, 19 nt, Artificial Sequence
  Description of Artificial Sequence: Synthetic oligonucleotide
agauauguaaugaaaggga

SEQ ID NO: 2850700 - RNA, 19 nt, Artificial Sequence
  Description of Artificial Sequence: Synthetic oligonucleotide
aaacagcuucuugagacag

SEQ ID NO: 2850701 - RNA, 19 nt, Artificial Sequence
  Description of Artificial Sequence: Synthetic oligonucleotide
aguagcacuacuccagugu

SEQ ID NO: 2850702 - RNA, 19 nt, Artificial Sequence
  Description of Artificial Sequence: Synthetic oligonucleotide
cugguagaaauccuuucgg

SEQ ID NO: 2850703 - RNA, 19 nt, Artificial Sequence
  Description of Artificial Sequence: Synthetic oligonucleotide
aaugaaagggagagcugac

SEQ ID NO: 2850704 - RNA, 19 nt, Artificial Sequence
  Description of Artificial Sequence: Synthetic oligonucleotide
cuuccuaauggcuucccgc

SEQ ID NO: 2850705 - RNA, 19 nt, Artificial Sequence
  Description of Artificial Sequence: Synthetic oligonucleotide
ucugacagguucuaauagu

SEQ ID NO: 2850706 - RNA, 19 nt, Artificial Sequence
  Description of Artificial Sequence: Synthetic oligonucleotide
acagcuucuugagacagac

SEQ ID NO: 2850707 - RNA, 19 nt, Artificial Sequence
  Description of Artificial Sequence: Synthetic oligonucleotide
ugguagaaauccuuucggc

SEQ ID NO: 2850708 - RNA, 19 nt, Artificial Sequence
  Description of Artificial Sequence: Synthetic oligonucleotide
acguguaacguguugaaaa

SEQ ID NO: 2850709 - RNA, 19 nt, Artificial Sequence
  Description of Artificial Sequence: Synthetic oligonucleotide
ucaucagugcaauucugca

SEQ ID NO: 2850710 - RNA, 19 nt, Artificial Sequence
  Description of Artificial Sequence: Synthetic oligonucleotide
cacuccacuauuuccacag

SEQ ID NO: 2850711 - RNA, 19 nt, Artificial Sequence
  Description of Artificial Sequence: Synthetic oligonucleotide
aacugcaaagcccaccgaa

SEQ ID NO: 2850712 - RNA, 19 nt, Artificial Sequence
  Description of Artificial Sequence: Synthetic oligonucleotide
gagagcugaccacacaagc

SEQ ID NO: 2850713 - RNA, 19 nt, Artificial Sequence
  Description of Artificial Sequence: Synthetic oligonucleotide
aaauccuuucggcaucgca

SEQ ID NO: 2850714 - RNA, 19 nt, Artificial Sequence
  Description of Artificial Sequence: Synthetic oligonucleotide
ucuccgguuguacugaauc

SEQ ID NO: 2850715 - RNA, 19 nt, Artificial Sequence
  Description of Artificial Sequence: Synthetic oligonucleotide
uccacuauuuccacagccu

SEQ ID NO: 2850716 - RNA, 19 nt, Artificial Sequence
  Description of Artificial Sequence: Synthetic oligonucleotide
uaggcauugagguaucgaa

SEQ ID NO: 2850717 - RNA, 19 nt, Artificial Sequence
  Description of Artificial Sequence: Synthetic oligonucleotide
ucuccaguaaacagcuucu

SEQ ID NO: 2850718 - RNA, 19 nt, Artificial Sequence
  Description of Artificial Sequence: Synthetic oligonucleotide
auuucugacagguucuaau

SEQ ID NO: 2850719 - RNA, 19 nt, Artificial Sequence
  Description of Artificial Sequence: Synthetic oligonucleotide
caauucugcaacaggauca

SEQ ID NO: 2850720 - RNA, 19 nt, Artificial Sequence
  Description of Artificial Sequence: Synthetic oligonucleotide
cugucugaaagcucuuccg

SEQ ID NO: 2850721 - RNA, 19 nt, Artificial Sequence
  Description of Artificial Sequence: Synthetic oligonucleotide
uucuaauaguaccucccac

SEQ ID NO: 2850722 - RNA, 19 nt, Artificial Sequence
  Description of Artificial Sequence: Synthetic oligonucleotide
cucuuucuccaguaaacag

SEQ ID NO: 2850723 - RNA, 19 nt, Artificial Sequence
  Description of Artificial Sequence: Synthetic oligonucleotide
caguaaacagcuucuugag

SEQ ID NO: 2850724 - RNA, 19 nt, Artificial Sequence
  Description of Artificial Sequence: Synthetic oligonucleotide
ugcaaagcccaccgaacag

SEQ ID NO: 2850725 - RNA, 19 nt, Artificial Sequence
  Description of Artificial Sequence: Synthetic oligonucleotide
gacgaggccgccaagcacg

SEQ ID NO: 2850726 - RNA, 19 nt, Artificial Sequence
  Description of Artificial Sequence: Synthetic oligonucleotide
aaacacggauaucgguguc

SEQ ID NO: 2850727 - RNA, 19 nt, Artificial Sequence
  Description of Artificial Sequence: Synthetic oligonucleotide
ccagauauguaaugaaagg

SEQ ID NO: 2850728 - RNA, 19 nt, Artificial Sequence
  Description of Artificial Sequence: Synthetic oligonucleotide
aagguaccugugcuugaac

SEQ ID NO: 2850729 - RNA, 19 nt, Artificial Sequence
  Description of Artificial Sequence: Synthetic oligonucleotide
uguucuccagauauguaau

SEQ ID NO: 2850730 - RNA, 19 nt, Artificial Sequence
  Description of Artificial Sequence: Synthetic oligonucleotide
aguaccucccacguguaac

SEQ ID NO: 2850731 - RNA, 19 nt, Artificial Sequence
  Description of Artificial Sequence: Synthetic oligonucleotide
aaagggagagcugaccaca

SEQ ID NO: 2850732 - RNA, 19 nt, Artificial Sequence
  Description of Artificial Sequence: Synthetic oligonucleotide
uuguacugaaucaggaauu

SEQ ID NO: 2850733 - RNA, 19 nt, Artificial Sequence
  Description of Artificial Sequence: Synthetic oligonucleotide
uaaacagcuucuugagaca

SEQ ID NO: 2850734 - RNA, 19 nt, Artificial Sequence
  Description of Artificial Sequence: Synthetic oligonucleotide
aguguaggcauugagguau

SEQ ID NO: 2850735 - RNA, 19 nt, Artificial Sequence
  Description of Artificial Sequence: Synthetic oligonucleotide
augaaagggagagcugacc

SEQ ID NO: 2850736 - RNA, 19 nt, Artificial Sequence
  Description of Artificial Sequence: Synthetic oligonucleotide
uuucugacagguucuaaua

SEQ ID NO: 2850737 - RNA, 19 nt, Artificial Sequence
  Description of Artificial Sequence: Synthetic oligonucleotide
uucuccagauauguaauga

SEQ ID NO: 2850738 - RNA, 19 nt, Artificial Sequence
  Description of Artificial Sequence: Synthetic oligonucleotide
caccagcucgcacagaagg

SEQ ID NO: 2850739 - RNA, 19 nt, Artificial Sequence
  Description of Artificial Sequence: Synthetic oligonucleotide
gaucgugucgcggacgagg

SEQ ID NO: 2850740 - RNA, 19 nt, Artificial Sequence
  Description of Artificial Sequence: Synthetic oligonucleotide
gcugguagaaauccuuucg

SEQ ID NO: 2850741 - RNA, 19 nt, Artificial Sequence
  Description of Artificial Sequence: Synthetic oligonucleotide
agcacuacuccaguguagg

SEQ ID NO: 2850742 - RNA, 19 nt, Artificial Sequence
  Description of Artificial Sequence: Synthetic oligonucleotide
agcugguagaaauccuuuc

SEQ ID NO: 2850743 - RNA, 19 nt, Artificial Sequence
  Description of Artificial Sequence: Synthetic oligonucleotide
agguaucgaacugcaaagc

SEQ ID NO: 2850744 - RNA, 19 nt, Artificial Sequence
  Description of Artificial Sequence: Synthetic oligonucleotide
aauggcuucccgcuccccu

SEQ ID NO: 2850745 - RNA, 19 nt, Artificial Sequence
  Description of Artificial Sequence: Synthetic oligonucleotide
uccgacaccagcucgcaca

SEQ ID NO: 2850746 - RNA, 19 nt, Artificial Sequence
  Description of Artificial Sequence: Synthetic oligonucleotide
uuccacagccuccucacca

SEQ ID NO: 2850747 - RNA, 19 nt, Artificial Sequence
  Description of Artificial Sequence: Synthetic oligonucleotide
uguccuuuguucuccagau

SEQ ID NO: 2850748 - RNA, 19 nt, Artificial Sequence
  Description of Artificial Sequence: Synthetic oligonucleotide
guaucgaacugcaaagccc

SEQ ID NO: 2850749 - RNA, 19 nt, Artificial Sequence
  Description of Artificial Sequence: Synthetic oligonucleotide
uaauaguaccucccacgug

SEQ ID NO: 2850750 - RNA, 19 nt, Artificial Sequence
  Description of Artificial Sequence: Synthetic oligonucleotide
uuccuaauggcuucccgcu

SEQ ID NO: 2850751 - RNA, 19 nt, Artificial Sequence
  Description of Artificial Sequence: Synthetic oligonucleotide
ugacagguucuaauaguac

SEQ ID NO: 2850752 - RNA, 19 nt, Artificial Sequence
  Description of Artificial Sequence: Synthetic oligonucleotide
gaggccgccaagcacgcgg

SEQ ID NO: 2850753 - RNA, 19 nt, Artificial Sequence
  Description of Artificial Sequence: Synthetic oligonucleotide
ucuccagauauguaaugaa

SEQ ID NO: 2850754 - RNA, 19 nt, Artificial Sequence
  Description of Artificial Sequence: Synthetic oligonucleotide
cuccacuauuuccacagcc

SEQ ID NO: 2850755 - RNA, 19 nt, Artificial Sequence
  Description of Artificial Sequence: Synthetic oligonucleotide
gguaccugugcuugaaccg

SEQ ID NO: 2850756 - RNA, 19 nt, Artificial Sequence
  Description of Artificial Sequence: Synthetic oligonucleotide
acuuccuaauggcuucccg

SEQ ID NO: 2850757 - RNA, 19 nt, Artificial Sequence
  Description of Artificial Sequence: Synthetic oligonucleotide
cacuauuuccacagccucc

SEQ ID NO: 2850758 - RNA, 19 nt, Artificial Sequence
  Description of Artificial Sequence: Synthetic oligonucleotide
uccgguuguacugaaucag

SEQ ID NO: 2850759 - RNA, 19 nt, Artificial Sequence
  Description of Artificial Sequence: Synthetic oligonucleotide
acuacuccaguguaggcau

SEQ ID NO: 2850760 - RNA, 19 nt, Artificial Sequence
  Description of Artificial Sequence: Synthetic oligonucleotide
guaccucccacguguaacg

SEQ ID NO: 2850761 - RNA, 19 nt, Artificial Sequence
  Description of Artificial Sequence: Synthetic oligonucleotide
cauugagguaucgaacugc

SEQ ID NO: 2850762 - RNA, 19 nt, Artificial Sequence
  Description of Artificial Sequence: Synthetic oligonucleotide
gguaucgaacugcaaagcc

SEQ ID NO: 2850763 - RNA, 19 nt, Artificial Sequence
  Description of Artificial Sequence: Synthetic oligonucleotide
aucaggaauuucugacagg

SEQ ID NO: 2850764 - RNA, 19 nt, Artificial Sequence
  Description of Artificial Sequence: Synthetic oligonucleotide
cuuucggcaucgcaguagc

SEQ ID NO: 2850765 - RNA, 19 nt, Artificial Sequence
  Description of Artificial Sequence: Synthetic oligonucleotide
ugaaagcucuuccgcagac

SEQ ID NO: 2850766 - RNA, 19 nt, Artificial Sequence
  Description of Artificial Sequence: Synthetic oligonucleotide
ugcaauucugcaacaggau

SEQ ID NO: 2850767 - RNA, 19 nt, Artificial Sequence
  Description of Artificial Sequence: Synthetic oligonucleotide
cuugagacagacuuccuaa

SEQ ID NO: 2850768 - RNA, 19 nt, Artificial Sequence
  Description of Artificial Sequence: Synthetic oligonucleotide
auguaaugaaagggagagc

SEQ ID NO: 2850769 - RNA, 19 nt, Artificial Sequence
  Description of Artificial Sequence: Synthetic oligonucleotide
gacucuuucuccaguaaac

SEQ ID NO: 2850770 - RNA, 19 nt, Artificial Sequence
  Description of Artificial Sequence: Synthetic oligonucleotide
uaucgguguccuuuguucu

SEQ ID NO: 2850771 - RNA, 19 nt, Artificial Sequence
  Description of Artificial Sequence: Synthetic oligonucleotide
caaagcccaccgaacaggc

SEQ ID NO: 2850772 - RNA, 19 nt, Artificial Sequence
  Description of Artificial Sequence: Synthetic oligonucleotide
gaaagggagagcugaccac

SEQ ID NO: 2850773 - RNA, 19 nt, Artificial Sequence
  Description of Artificial Sequence: Synthetic oligonucleotide
acuauuuccacagccuccu

SEQ ID NO: 2850774 - RNA, 19 nt, Artificial Sequence
  Description of Artificial Sequence: Synthetic oligonucleotide
agaaauccuuucggcaucg

SEQ ID NO: 2850775 - RNA, 19 nt, Artificial Sequence
  Description of Artificial Sequence: Synthetic oligonucleotide
ggaucaacagcugucuccg

SEQ ID NO: 2850776 - RNA, 19 nt, Artificial Sequence
  Description of Artificial Sequence: Synthetic oligonucleotide
gucguccaggcucaggcgg

SEQ ID NO: 2850777 - RNA, 19 nt, Artificial Sequence
  Description of Artificial Sequence: Synthetic oligonucleotide
aauucugcaacaggaucaa

SEQ ID NO: 2850778 - RNA, 19 nt, Artificial Sequence
  Description of Artificial Sequence: Synthetic oligonucleotide
acugcaaagcccaccgaac

SEQ ID NO: 2850779 - RNA, 19 nt, Artificial Sequence
  Description of Artificial Sequence: Synthetic oligonucleotide
aucaacagcugucuccggu

SEQ ID NO: 2850780 - RNA, 19 nt, Artificial Sequence
  Description of Artificial Sequence: Synthetic oligonucleotide
acuccacuauuuccacagc

SEQ ID NO: 2850781 - RNA, 19 nt, Artificial Sequence
  Description of Artificial Sequence: Synthetic oligonucleotide
auauguaaugaaagggaga

SEQ ID NO: 2850782 - RNA, 19 nt, Artificial Sequence
  Description of Artificial Sequence: Synthetic oligonucleotide
ucuuccgcagacucuuucu

SEQ ID NO: 2850783 - RNA, 19 nt, Artificial Sequence
  Description of Artificial Sequence: Synthetic oligonucleotide
ucgcacagaagguaccugu

SEQ ID NO: 2850784 - RNA, 19 nt, Artificial Sequence
  Description of Artificial Sequence: Synthetic oligonucleotide
uagcacuacuccaguguag

SEQ ID NO: 2850785 - RNA, 19 nt, Artificial Sequence
  Description of Artificial Sequence: Synthetic oligonucleotide
guuguacugaaucaggaau

SEQ ID NO: 2850786 - RNA, 19 nt, Artificial Sequence
  Description of Artificial Sequence: Synthetic oligonucleotide
aucgguguccuuuguucuc

SEQ ID NO: 2850787 - RNA, 19 nt, Artificial Sequence
  Description of Artificial Sequence: Synthetic oligonucleotide
acagccuccucaccagcac

SEQ ID NO: 2850788 - RNA, 19 nt, Artificial Sequence
  Description of Artificial Sequence: Synthetic oligonucleotide
uccucaccagcacugucug

SEQ ID NO: 2850789 - RNA, 19 nt, Artificial Sequence
  Description of Artificial Sequence: Synthetic oligonucleotide
uuuguucuccagauaugua

SEQ ID NO: 2850790 - RNA, 19 nt, Artificial Sequence
  Description of Artificial Sequence: Synthetic oligonucleotide
gacaccagcucgcacagaa

SEQ ID NO: 2850791 - RNA, 19 nt, Artificial Sequence
  Description of Artificial Sequence: Synthetic oligonucleotide
guucuaauaguaccuccca

SEQ ID NO: 2850792 - RNA, 19 nt, Artificial Sequence
  Description of Artificial Sequence: Synthetic oligonucleotide
aggcauugagguaucgaac

SEQ ID NO: 2850793 - RNA, 19 nt, Artificial Sequence
  Description of Artificial Sequence: Synthetic oligonucleotide
cuucaucagugcaauucug

SEQ ID NO: 2850794 - RNA, 19 nt, Artificial Sequence
  Description of Artificial Sequence: Synthetic oligonucleotide
uucggcaucgcaguagcac

SEQ ID NO: 2850795 - RNA, 19 nt, Artificial Sequence
  Description of Artificial Sequence: Synthetic oligonucleotide
ucggcaucgcaguagcacu

SEQ ID NO: 2850796 - RNA, 19 nt, Artificial Sequence
  Description of Artificial Sequence: Synthetic oligonucleotide
agacucuuucuccaguaaa

SEQ ID NO: 2850797 - RNA, 19 nt, Artificial Sequence
  Description of Artificial Sequence: Synthetic oligonucleotide
gaccacacaagcugguaga

SEQ ID NO: 2850798 - RNA, 19 nt, Artificial Sequence
  Description of Artificial Sequence: Synthetic oligonucleotide
gguucuaauaguaccuccc

SEQ ID NO: 2850799 - RNA, 19 nt, Artificial Sequence
  Description of Artificial Sequence: Synthetic oligonucleotide
uguacugaaucaggaauuu

SEQ ID NO: 2850800 - RNA, 19 nt, Artificial Sequence
  Description of Artificial Sequence: Synthetic oligonucleotide
cuuucuccaguaaacagcu

SEQ ID NO: 2850801 - RNA, 19 nt, Artificial Sequence
  Description of Artificial Sequence: Synthetic oligonucleotide
cagacuuccuaauggcuuc

SEQ ID NO: 2850802 - RNA, 19 nt, Artificial Sequence
  Description of Artificial Sequence: Synthetic oligonucleotide
caucgcaguagcacuacuc

SEQ ID NO: 2850803 - RNA, 19 nt, Artificial Sequence
  Description of Artificial Sequence: Synthetic oligonucleotide
auccuuucggcaucgcagu

SEQ ID NO: 2850804 - RNA, 19 nt, Artificial Sequence
  Description of Artificial Sequence: Synthetic oligonucleotide
auugagguaucgaacugca

SEQ ID NO: 2850805 - RNA, 19 nt, Artificial Sequence
  Description of Artificial Sequence: Synthetic oligonucleotide
agacuuccuaauggcuucc

SEQ ID NO: 2850806 - RNA, 19 nt, Artificial Sequence
  Description of Artificial Sequence: Synthetic oligonucleotide
ucagugcaauucugcaaca

SEQ ID NO: 2850807 - RNA, 19 nt, Artificial Sequence
  Description of Artificial Sequence: Synthetic oligonucleotide
guagaaauccuuucggcau

SEQ ID NO: 2850808 - RNA, 19 nt, Artificial Sequence
  Description of Artificial Sequence: Synthetic oligonucleotide
aacagcugucuccgguugu

SEQ ID NO: 2850809 - RNA, 19 nt, Artificial Sequence
  Description of Artificial Sequence: Synthetic oligonucleotide
gugcaauucugcaacagga

SEQ ID NO: 2850810 - RNA, 19 nt, Artificial Sequence
  Description of Artificial Sequence: Synthetic oligonucleotide
acaggaucaacagcugucu

SEQ ID NO: 2850811 - RNA, 19 nt, Artificial Sequence
  Description of Artificial Sequence: Synthetic oligonucleotide
uccuccgacaccagcucgc

SEQ ID NO: 2850812 - RNA, 19 nt, Artificial Sequence
  Description of Artificial Sequence: Synthetic oligonucleotide
cagaagguaccugugcuug

SEQ ID NO: 2850813 - RNA, 19 nt, Artificial Sequence
  Description of Artificial Sequence: Synthetic oligonucleotide
uguaggcauugagguaucg

SEQ ID NO: 2850814 - RNA, 19 nt, Artificial Sequence
  Description of Artificial Sequence: Synthetic oligonucleotide
ucgcaguagcacuacucca

SEQ ID NO: 2850815 - RNA, 19 nt, Artificial Sequence
  Description of Artificial Sequence: Synthetic oligonucleotide
aagcacgcggucguccagg

SEQ ID NO: 2850816 - RNA, 19 nt, Artificial Sequence
  Description of Artificial Sequence: Synthetic oligonucleotide
uugagacagacuuccuaau

SEQ ID NO: 2850817 - RNA, 19 nt, Artificial Sequence
  Description of Artificial Sequence: Synthetic oligonucleotide
gucugaaagcucuuccgca

SEQ ID NO: 2850818 - RNA, 19 nt, Artificial Sequence
  Description of Artificial Sequence: Synthetic oligonucleotide
aucgugucgcggacgaggc

SEQ ID NO: 2850819 - RNA, 19 nt, Artificial Sequence
  Description of Artificial Sequence: Synthetic oligonucleotide
cuccagauauguaaugaaa

SEQ ID NO: 2850820 - RNA, 19 nt, Artificial Sequence
  Description of Artificial Sequence: Synthetic oligonucleotide
cacgcggucguccaggcuc

SEQ ID NO: 2850821 - RNA, 19 nt, Artificial Sequence
  Description of Artificial Sequence: Synthetic oligonucleotide
ucaacagcugucuccgguu

SEQ ID NO: 2850822 - RNA, 19 nt, Artificial Sequence
  Description of Artificial Sequence: Synthetic oligonucleotide
aauuucugacagguucuaa

SEQ ID NO: 2850823 - RNA, 19 nt, Artificial Sequence
  Description of Artificial Sequence: Synthetic oligonucleotide
guaaugaaagggagagcug

SEQ ID NO: 2850824 - RNA, 19 nt, Artificial Sequence
  Description of Artificial Sequence: Synthetic oligonucleotide
ucgaacugcaaagcccacc

SEQ ID NO: 2850825 - RNA, 19 nt, Artificial Sequence
  Description of Artificial Sequence: Synthetic oligonucleotide
acacaagcugguagaaauc

SEQ ID NO: 2850826 - RNA, 19 nt, Artificial Sequence
  Description of Artificial Sequence: Synthetic oligonucleotide
gaucaacagcugucuccgg

SEQ ID NO: 2850827 - RNA, 19 nt, Artificial Sequence
  Description of Artificial Sequence: Synthetic oligonucleotide
guaccugugcuugaaccgc

SEQ ID NO: 2850828 - RNA, 19 nt, Artificial Sequence
  Description of Artificial Sequence: Synthetic oligonucleotide
uuuccacagccuccucacc

SEQ ID NO: 2850829 - RNA, 19 nt, Artificial Sequence
  Description of Artificial Sequence: Synthetic oligonucleotide
uacuccaguguaggcauug

SEQ ID NO: 2850830 - RNA, 19 nt, Artificial Sequence
  Description of Artificial Sequence: Synthetic oligonucleotide
cugacagguucuaauagua

SEQ ID NO: 2850831 - RNA, 19 nt, Artificial Sequence
  Description of Artificial Sequence: Synthetic oligonucleotide
ugcgccgaaggucccgugc

SEQ ID NO: 2850832 - RNA, 19 nt, Artificial Sequence
  Description of Artificial Sequence: Synthetic oligonucleotide
agagcugaccacacaagcu

SEQ ID NO: 2850833 - RNA, 19 nt, Artificial Sequence
  Description of Artificial Sequence: Synthetic oligonucleotide
agcacgcggucguccaggc

SEQ ID NO: 2850834 - RNA, 19 nt, Artificial Sequence
  Description of Artificial Sequence: Synthetic oligonucleotide
aaagcccaccgaacaggcg

SEQ ID NO: 2850835 - RNA, 19 nt, Artificial Sequence
  Description of Artificial Sequence: Synthetic oligonucleotide
ucacuccacuauuuccaca

SEQ ID NO: 2850836 - RNA, 19 nt, Artificial Sequence
  Description of Artificial Sequence: Synthetic oligonucleotide
ucgguguccuuuguucucc

SEQ ID NO: 2850837 - RNA, 19 nt, Artificial Sequence
  Description of Artificial Sequence: Synthetic oligonucleotide
caccagcacugucugaaag

SEQ ID NO: 2850838 - RNA, 19 nt, Artificial Sequence
  Description of Artificial Sequence: Synthetic oligonucleotide
cuaauaguaccucccacgu

SEQ ID NO: 2850839 - RNA, 19 nt, Artificial Sequence
  Description of Artificial Sequence: Synthetic oligonucleotide
aggcucaggcggcagcgcg

SEQ ID NO: 2850840 - RNA, 19 nt, Artificial Sequence
  Description of Artificial Sequence: Synthetic oligonucleotide
uaccugugcuugaaccgca

SEQ ID NO: 2850841 - RNA, 19 nt, Artificial Sequence
  Description of Artificial Sequence: Synthetic oligonucleotide
cuccaguguaggcauugag

SEQ ID NO: 2850842 - RNA, 19 nt, Artificial Sequence
  Description of Artificial Sequence: Synthetic oligonucleotide
acccgggcgaucgugucgc

SEQ ID NO: 2850843 - RNA, 19 nt, Artificial Sequence
  Description of Artificial Sequence: Synthetic oligonucleotide
cacacaagcugguagaaau

SEQ ID NO: 2850844 - RNA, 19 nt, Artificial Sequence
  Description of Artificial Sequence: Synthetic oligonucleotide
cgaacugcaaagcccaccg

SEQ ID NO: 2850845 - RNA, 19 nt, Artificial Sequence
  Description of Artificial Sequence: Synthetic oligonucleotide
cuaauggcuucccgcuccc

SEQ ID NO: 2850846 - RNA, 19 nt, Artificial Sequence
  Description of Artificial Sequence: Synthetic oligonucleotide
acggauaucgguguccuuu

SEQ ID NO: 2850847 - RNA, 19 nt, Artificial Sequence
  Description of Artificial Sequence: Synthetic oligonucleotide
agaagguaccugugcuuga

SEQ ID NO: 2850848 - RNA, 19 nt, Artificial Sequence
  Description of Artificial Sequence: Synthetic oligonucleotide
acagacuuccuaauggcuu

SEQ ID NO: 2850849 - RNA, 19 nt, Artificial Sequence
  Description of Artificial Sequence: Synthetic oligonucleotide
ucccacguguaacguguug

SEQ ID NO: 2850850 - RNA, 19 nt, Artificial Sequence
  Description of Artificial Sequence: Synthetic oligonucleotide
ucguccaggcucaggcggc

SEQ ID NO: 2850851 - RNA, 19 nt, Artificial Sequence
  Description of Artificial Sequence: Synthetic oligonucleotide
gcaaagcccaccgaacagg

SEQ ID NO: 2850852 - RNA, 19 nt, Artificial Sequence
  Description of Artificial Sequence: Synthetic oligonucleotide
cagcucgcacagaagguac

SEQ ID NO: 2850853 - RNA, 19 nt, Artificial Sequence
  Description of Artificial Sequence: Synthetic oligonucleotide
guguccuuuguucuccaga

SEQ ID NO: 2850854 - RNA, 19 nt, Artificial Sequence
  Description of Artificial Sequence: Synthetic oligonucleotide
agcucgcacagaagguacc

SEQ ID NO: 2850855 - RNA, 19 nt, Artificial Sequence
  Description of Artificial Sequence: Synthetic oligonucleotide
cuuccgcagacucuuucuc

SEQ ID NO: 2850856 - RNA, 19 nt, Artificial Sequence
  Description of Artificial Sequence: Synthetic oligonucleotide
uccuaauggcuucccgcuc

SEQ ID NO: 2850857 - RNA, 19 nt, Artificial Sequence
  Description of Artificial Sequence: Synthetic oligonucleotide
gcugucuccgguuguacug

SEQ ID NO: 2850858 - RNA, 19 nt, Artificial Sequence
  Description of Artificial Sequence: Synthetic oligonucleotide
agcugucuccgguuguacu

SEQ ID NO: 2850859 - RNA, 19 nt, Artificial Sequence
  Description of Artificial Sequence: Synthetic oligonucleotide
ccuaauggcuucccgcucc

SEQ ID NO: 2850860 - RNA, 19 nt, Artificial Sequence
  Description of Artificial Sequence: Synthetic oligonucleotide
uugagguaucgaacugcaa

SEQ ID NO: 2850861 - RNA, 19 nt, Artificial Sequence
  Description of Artificial Sequence: Synthetic oligonucleotide
guccuccgacaccagcucg

SEQ ID NO: 2850862 - RNA, 19 nt, Artificial Sequence
  Description of Artificial Sequence: Synthetic oligonucleotide
guagcacuacuccagugua

SEQ ID NO: 2850863 - RNA, 19 nt, Artificial Sequence
  Description of Artificial Sequence: Synthetic oligonucleotide
caucagugcaauucugcaa

SEQ ID NO: 2850864 - RNA, 19 nt, Artificial Sequence
  Description of Artificial Sequence: Synthetic oligonucleotide
cugcaaagcccaccgaaca

SEQ ID NO: 2850865 - RNA, 19 nt, Artificial Sequence
  Description of Artificial Sequence: Synthetic oligonucleotide
ggcauugagguaucgaacu

SEQ ID NO: 2850866 - RNA, 19 nt, Artificial Sequence
  Description of Artificial Sequence: Synthetic oligonucleotide
caacagcugucuccgguug

SEQ ID NO: 2850867 - RNA, 19 nt, Artificial Sequence
  Description of Artificial Sequence: Synthetic oligonucleotide
caggcggcugcgccgaagg

SEQ ID NO: 2850868 - RNA, 19 nt, Artificial Sequence
  Description of Artificial Sequence: Synthetic oligonucleotide
aagcugguagaaauccuuu

SEQ ID NO: 2850869 - RNA, 19 nt, Artificial Sequence
  Description of Artificial Sequence: Synthetic oligonucleotide
caguagcacuacuccagug

SEQ ID NO: 2850870 - RNA, 19 nt, Artificial Sequence
  Description of Artificial Sequence: Synthetic oligonucleotide
cacuacuccaguguaggca

SEQ ID NO: 2850871 - RNA, 19 nt, Artificial Sequence
  Description of Artificial Sequence: Synthetic oligonucleotide
cagugcaauucugcaacag

SEQ ID NO: 2850872 - RNA, 19 nt, Artificial Sequence
  Description of Artificial Sequence: Synthetic oligonucleotide
uuucggcaucgcaguagca

SEQ ID NO: 2850873 - RNA, 19 nt, Artificial Sequence
  Description of Artificial Sequence: Synthetic oligonucleotide
auucugcaacaggaucaac

SEQ ID NO: 2850874 - RNA, 19 nt, Artificial Sequence
  Description of Artificial Sequence: Synthetic oligonucleotide
agcgcgcguccuccgacac

SEQ ID NO: 2850875 - RNA, 19 nt, Artificial Sequence
  Description of Artificial Sequence: Synthetic oligonucleotide
cagguucuaauaguaccuc

SEQ ID NO: 2850876 - RNA, 19 nt, Artificial Sequence
  Description of Artificial Sequence: Synthetic oligonucleotide
gguuguacugaaucaggaa

SEQ ID NO: 2850877 - RNA, 19 nt, Artificial Sequence
  Description of Artificial Sequence: Synthetic oligonucleotide
ccgguuguacugaaucagg

SEQ ID NO: 2850878 - RNA, 19 nt, Artificial Sequence
  Description of Artificial Sequence: Synthetic oligonucleotide
ugcacccgggcgaucgugu

SEQ ID NO: 2850879 - RNA, 19 nt, Artificial Sequence
  Description of Artificial Sequence: Synthetic oligonucleotide
aacagcuucuugagacaga

SEQ ID NO: 2850880 - RNA, 19 nt, Artificial Sequence
  Description of Artificial Sequence: Synthetic oligonucleotide
gcauugagguaucgaacug

SEQ ID NO: 2850881 - RNA, 19 nt, Artificial Sequence
  Description of Artificial Sequence: Synthetic oligonucleotide
accucccacguguaacgug

SEQ ID NO: 2850882 - RNA, 19 nt, Artificial Sequence
  Description of Artificial Sequence: Synthetic oligonucleotide
acacggauaucgguguccu

SEQ ID NO: 2850883 - RNA, 19 nt, Artificial Sequence
  Description of Artificial Sequence: Synthetic oligonucleotide
cuccgguuguacugaauca

SEQ ID NO: 2850884 - RNA, 19 nt, Artificial Sequence
  Description of Artificial Sequence: Synthetic oligonucleotide
acaagcugguagaaauccu

SEQ ID NO: 2850885 - RNA, 19 nt, Artificial Sequence
  Description of Artificial Sequence: Synthetic oligonucleotide
uaguaccucccacguguaa

SEQ ID NO: 2850886 - RNA, 19 nt, Artificial Sequence
  Description of Artificial Sequence: Synthetic oligonucleotide
ggucccgugcacccgggcg

SEQ ID NO: 2850887 - RNA, 19 nt, Artificial Sequence
  Description of Artificial Sequence: Synthetic oligonucleotide
gaagguaccugugcuugaa

SEQ ID NO: 2850888 - RNA, 19 nt, Artificial Sequence
  Description of Artificial Sequence: Synthetic oligonucleotide
cucuuccgcagacucuuuc

SEQ ID NO: 2850889 - RNA, 19 nt, Artificial Sequence
  Description of Artificial Sequence: Synthetic oligonucleotide
agcccaccgaacaggcggc

SEQ ID NO: 2850890 - RNA, 19 nt, Artificial Sequence
  Description of Artificial Sequence: Synthetic oligonucleotide
guaggcauugagguaucga

SEQ ID NO: 2850891 - RNA, 19 nt, Artificial Sequence
  Description of Artificial Sequence: Synthetic oligonucleotide
gacuuccuaauggcuuccc

SEQ ID NO: 2850892 - RNA, 19 nt, Artificial Sequence
  Description of Artificial Sequence: Synthetic oligonucleotide
gggagagcugaccacacaa

SEQ ID NO: 2850893 - RNA, 19 nt, Artificial Sequence
  Description of Artificial Sequence: Synthetic oligonucleotide
uccccuucaucagugcaau

SEQ ID NO: 2850894 - RNA, 19 nt, Artificial Sequence
  Description of Artificial Sequence: Synthetic oligonucleotide
gauaucgguguccuuuguu

SEQ ID NO: 2850895 - RNA, 19 nt, Artificial Sequence
  Description of Artificial Sequence: Synthetic oligonucleotide
ucaccagcacugucugaaa

SEQ ID NO: 2850896 - RNA, 19 nt, Artificial Sequence
  Description of Artificial Sequence: Synthetic oligonucleotide
cgcaguagcacuacuccag

SEQ ID NO: 2850897 - RNA, 19 nt, Artificial Sequence
  Description of Artificial Sequence: Synthetic oligonucleotide
gacagacuuccuaauggcu

SEQ ID NO: 2850898 - RNA, 19 nt, Artificial Sequence
  Description of Artificial Sequence: Synthetic oligonucleotide
gaauuucugacagguucua

SEQ ID NO: 2850899 - RNA, 19 nt, Artificial Sequence
  Description of Artificial Sequence: Synthetic oligonucleotide
cacagaagguaccugugcu

SEQ ID NO: 2850900 - RNA, 19 nt, Artificial Sequence
  Description of Artificial Sequence: Synthetic oligonucleotide
aggucccgugcacccgggc

SEQ ID NO: 2850901 - RNA, 19 nt, Artificial Sequence
  Description of Artificial Sequence: Synthetic oligonucleotide
cugaaagcucuuccgcaga

SEQ ID NO: 2850902 - RNA, 19 nt, Artificial Sequence
  Description of Artificial Sequence: Synthetic oligonucleotide
guacugaaucaggaauuuc

SEQ ID NO: 2850903 - RNA, 19 nt, Artificial Sequence
  Description of Artificial Sequence: Synthetic oligonucleotide
gaacugcaaagcccaccga

SEQ ID NO: 2850904 - RNA, 19 nt, Artificial Sequence
  Description of Artificial Sequence: Synthetic oligonucleotide
ggucguccaggcucaggcg

SEQ ID NO: 2850905 - RNA, 19 nt, Artificial Sequence
  Description of Artificial Sequence: Synthetic oligonucleotide
aucgaacugcaaagcccac

SEQ ID NO: 2850906 - RNA, 19 nt, Artificial Sequence
  Description of Artificial Sequence: Synthetic oligonucleotide
ggagagcugaccacacaag

SEQ ID NO: 2850907 - RNA, 19 nt, Artificial Sequence
  Description of Artificial Sequence: Synthetic oligonucleotide
cccuucaucagugcaauuc

SEQ ID NO: 2850908 - RNA, 19 nt, Artificial Sequence
  Description of Artificial Sequence: Synthetic oligonucleotide
gaaauccuuucggcaucgc

SEQ ID NO: 2850909 - RNA, 19 nt, Artificial Sequence
  Description of Artificial Sequence: Synthetic oligonucleotide
caggaucaacagcugucuc

SEQ ID NO: 2850910 - RNA, 19 nt, Artificial Sequence
  Description of Artificial Sequence: Synthetic oligonucleotide
ccacuauuuccacagccuc

SEQ ID NO: 2850911 - RNA, 19 nt, Artificial Sequence
  Description of Artificial Sequence: Synthetic oligonucleotide
ucgugucgcggacgaggcc

SEQ ID NO: 2850912 - RNA, 19 nt, Artificial Sequence
  Description of Artificial Sequence: Synthetic oligonucleotide
cacccgggcgaucgugucg

SEQ ID NO: 2850913 - RNA, 19 nt, Artificial Sequence
  Description of Artificial Sequence: Synthetic oligonucleotide
uccuuucggcaucgcagua

SEQ ID NO: 2850914 - RNA, 19 nt, Artificial Sequence
  Description of Artificial Sequence: Synthetic oligonucleotide
accgaacaggcggcugcgc

SEQ ID NO: 2850915 - RNA, 19 nt, Artificial Sequence
  Description of Artificial Sequence: Synthetic oligonucleotide
ccuuuguucuccagauaug

SEQ ID NO: 2850916 - RNA, 19 nt, Artificial Sequence
  Description of Artificial Sequence: Synthetic oligonucleotide
uuucuccaguaaacagcuu

SEQ ID NO: 2850917 - RNA, 19 nt, Artificial Sequence
  Description of Artificial Sequence: Synthetic oligonucleotide
cuccccuucaucagugcaa

SEQ ID NO: 2850918 - RNA, 19 nt, Artificial Sequence
  Description of Artificial Sequence: Synthetic oligonucleotide
ugucuccgguuguacugaa

SEQ ID NO: 2850919 - RNA, 19 nt, Artificial Sequence
  Description of Artificial Sequence: Synthetic oligonucleotide
ucgcggacgaggccgccaa

SEQ ID NO: 2850920 - RNA, 19 nt, Artificial Sequence
  Description of Artificial Sequence: Synthetic oligonucleotide
caagcugguagaaauccuu

SEQ ID NO: 2850921 - RNA, 19 nt, Artificial Sequence
  Description of Artificial Sequence: Synthetic oligonucleotide
cacugucugaaagcucuuc

SEQ ID NO: 2850922 - RNA, 19 nt, Artificial Sequence
  Description of Artificial Sequence: Synthetic oligonucleotide
agccuccucaccagcacug

SEQ ID NO: 2850923 - RNA, 19 nt, Artificial Sequence
  Description of Artificial Sequence: Synthetic oligonucleotide
ggaauuucugacagguucu

SEQ ID NO: 2850924 - RNA, 19 nt, Artificial Sequence
  Description of Artificial Sequence: Synthetic oligonucleotide
accacacaagcugguagaa

SEQ ID NO: 2850925 - RNA, 19 nt, Artificial Sequence
  Description of Artificial Sequence: Synthetic oligonucleotide
acgaggccgccaagcacgc

SEQ ID NO: 2850926 - RNA, 19 nt, Artificial Sequence
  Description of Artificial Sequence: Synthetic oligonucleotide
cucgcacagaagguaccug

SEQ ID NO: 2850927 - RNA, 19 nt, Artificial Sequence
  Description of Artificial Sequence: Synthetic oligonucleotide
gaacaggcggcugcgccga

SEQ ID NO: 2850928 - RNA, 19 nt, Artificial Sequence
  Description of Artificial Sequence: Synthetic oligonucleotide
caagcacgcggucguccag

SEQ ID NO: 2850929 - RNA, 19 nt, Artificial Sequence
  Description of Artificial Sequence: Synthetic oligonucleotide
gguguccuuuguucuccag

SEQ ID NO: 2850930 - RNA, 19 nt, Artificial Sequence
  Description of Artificial Sequence: Synthetic oligonucleotide
caccgaacaggcggcugcg

SEQ ID NO: 2850931 - RNA, 19 nt, Artificial Sequence
  Description of Artificial Sequence: Synthetic oligonucleotide
accagcucgcacagaaggu

SEQ ID NO: 2850932 - RNA, 19 nt, Artificial Sequence
  Description of Artificial Sequence: Synthetic oligonucleotide
uaauggcuucccgcucccc

SEQ ID NO: 2850933 - RNA, 19 nt, Artificial Sequence
  Description of Artificial Sequence: Synthetic oligonucleotide
ucaggcggcagcgcgcguc

SEQ ID NO: 2850934 - RNA, 19 nt, Artificial Sequence
  Description of Artificial Sequence: Synthetic oligonucleotide
uaccucccacguguaacgu

SEQ ID NO: 2850935 - RNA, 19 nt, Artificial Sequence
  Description of Artificial Sequence: Synthetic oligonucleotide
ccgaaggucccgugcaccc

SEQ ID NO: 2850936 - RNA, 19 nt, Artificial Sequence
  Description of Artificial Sequence: Synthetic oligonucleotide
cgugucgcggacgaggccg

SEQ ID NO: 2850937 - RNA, 19 nt, Artificial Sequence
  Description of Artificial Sequence: Synthetic oligonucleotide
gucccgugcacccgggcga

SEQ ID NO: 2850938 - RNA, 19 nt, Artificial Sequence
  Description of Artificial Sequence: Synthetic oligonucleotide
gcggcugcgccgaaggucc

SEQ ID NO: 2850939 - RNA, 19 nt, Artificial Sequence
  Description of Artificial Sequence: Synthetic oligonucleotide
ccaccgaacaggcggcugc

SEQ ID NO: 2850940 - RNA, 19 nt, Artificial Sequence
  Description of Artificial Sequence: Synthetic oligonucleotide
caggcggcagcgcgcgucc

SEQ ID NO: 2850941 - RNA, 19 nt, Artificial Sequence
  Description of Artificial Sequence: Synthetic oligonucleotide
cagacucuuucuccaguaa

SEQ ID NO: 2850942 - RNA, 19 nt, Artificial Sequence
  Description of Artificial Sequence: Synthetic oligonucleotide
gcacuacuccaguguaggc

SEQ ID NO: 2850943 - RNA, 19 nt, Artificial Sequence
  Description of Artificial Sequence: Synthetic oligonucleotide
acaccagcucgcacagaag

SEQ ID NO: 2850944 - RNA, 19 nt, Artificial Sequence
  Description of Artificial Sequence: Synthetic oligonucleotide
acuccaguguaggcauuga

SEQ ID NO: 2850945 - RNA, 19 nt, Artificial Sequence
  Description of Artificial Sequence: Synthetic oligonucleotide
cgaacaggcggcugcgccg

SEQ ID NO: 2850946 - RNA, 19 nt, Artificial Sequence
  Description of Artificial Sequence: Synthetic oligonucleotide
gccgccaagcacgcggucg

SEQ ID NO: 2850947 - RNA, 19 nt, Artificial Sequence
  Description of Artificial Sequence: Synthetic oligonucleotide
cggucguccaggcucaggc

SEQ ID NO: 2850948 - RNA, 19 nt, Artificial Sequence
  Description of Artificial Sequence: Synthetic oligonucleotide
ccuuucggcaucgcaguag

SEQ ID NO: 2850949 - RNA, 19 nt, Artificial Sequence
  Description of Artificial Sequence: Synthetic oligonucleotide
ggacgaggccgccaagcac

SEQ ID NO: 2850950 - RNA, 19 nt, Artificial Sequence
  Description of Artificial Sequence: Synthetic oligonucleotide
gcuucuugagacagacuuc

SEQ ID NO: 2850951 - RNA, 19 nt, Artificial Sequence
  Description of Artificial Sequence: Synthetic oligonucleotide
acagcugucuccgguugua

SEQ ID NO: 2850952 - RNA, 19 nt, Artificial Sequence
  Description of Artificial Sequence: Synthetic oligonucleotide
ccgaacaggcggcugcgcc

SEQ ID NO: 2850953 - RNA, 19 nt, Artificial Sequence
  Description of Artificial Sequence: Synthetic oligonucleotide
cugucuccgguuguacuga

SEQ ID NO: 2850954 - RNA, 19 nt, Artificial Sequence
  Description of Artificial Sequence: Synthetic oligonucleotide
gcagacucuuucuccagua

SEQ ID NO: 2850955 - RNA, 19 nt, Artificial Sequence
  Description of Artificial Sequence: Synthetic oligonucleotide
ccgacaccagcucgcacag

SEQ ID NO: 2850956 - RNA, 19 nt, Artificial Sequence
  Description of Artificial Sequence: Synthetic oligonucleotide
ggcgaucgugucgcggacg

SEQ ID NO: 2850957 - RNA, 19 nt, Artificial Sequence
  Description of Artificial Sequence: Synthetic oligonucleotide
gcuccccuucaucagugca

SEQ ID NO: 2850958 - RNA, 19 nt, Artificial Sequence
  Description of Artificial Sequence: Synthetic oligonucleotide
ccaggcucaggcggcagcg

SEQ ID NO: 2850959 - RNA, 19 nt, Artificial Sequence
  Description of Artificial Sequence: Synthetic oligonucleotide
cacguguaacguguugaaa

SEQ ID NO: 2850960 - RNA, 19 nt, Artificial Sequence
  Description of Artificial Sequence: Synthetic oligonucleotide
gcgaucgugucgcggacga

SEQ ID NO: 2850961 - RNA, 19 nt, Artificial Sequence
  Description of Artificial Sequence: Synthetic oligonucleotide
acaggcggcugcgccgaag

SEQ ID NO: 2850962 - RNA, 19 nt, Artificial Sequence
  Description of Artificial Sequence: Synthetic oligonucleotide
auaguaccucccacgugua

SEQ ID NO: 2850963 - RNA, 19 nt, Artificial Sequence
  Description of Artificial Sequence: Synthetic oligonucleotide
ccuucaucagugcaauucu

SEQ ID NO: 2850964 - RNA, 19 nt, Artificial Sequence
  Description of Artificial Sequence: Synthetic oligonucleotide
guccuuuguucuccagaua

SEQ ID NO: 2850965 - RNA, 19 nt, Artificial Sequence
  Description of Artificial Sequence: Synthetic oligonucleotide
cagcugucuccgguuguac

SEQ ID NO: 2850966 - RNA, 19 nt, Artificial Sequence
  Description of Artificial Sequence: Synthetic oligonucleotide
cuccgacaccagcucgcac

SEQ ID NO: 2850967 - RNA, 19 nt, Artificial Sequence
  Description of Artificial Sequence: Synthetic oligonucleotide
cggauaucgguguccuuug

SEQ ID NO: 2850968 - RNA, 19 nt, Artificial Sequence
  Description of Artificial Sequence: Synthetic oligonucleotide
guguaggcauugagguauc

SEQ ID NO: 2850969 - RNA, 19 nt, Artificial Sequence
  Description of Artificial Sequence: Synthetic oligonucleotide
ggcaucgcaguagcacuac

SEQ ID NO: 2850970 - RNA, 19 nt, Artificial Sequence
  Description of Artificial Sequence: Synthetic oligonucleotide
cccacguguaacguguuga

SEQ ID NO: 2850971 - RNA, 19 nt, Artificial Sequence
  Description of Artificial Sequence: Synthetic oligonucleotide
cgguuguacugaaucagga

SEQ ID NO: 2850972 - RNA, 19 nt, Artificial Sequence
  Description of Artificial Sequence: Synthetic oligonucleotide
gccgaaggucccgugcacc

SEQ ID NO: 2850973 - RNA, 19 nt, Artificial Sequence
  Description of Artificial Sequence: Synthetic oligonucleotide
gccaagcacgcggucgucc

SEQ ID NO: 2850974 - RNA, 19 nt, Artificial Sequence
  Description of Artificial Sequence: Synthetic oligonucleotide
gcggacgaggccgccaagc

SEQ ID NO: 2850975 - RNA, 19 nt, Artificial Sequence
  Description of Artificial Sequence: Synthetic oligonucleotide
caggcucaggcggcagcgc

SEQ ID NO: 2850976 - RNA, 19 nt, Artificial Sequence
  Description of Artificial Sequence: Synthetic oligonucleotide
ccgugcacccgggcgaucg

SEQ ID NO: 2850977 - RNA, 19 nt, Artificial Sequence
  Description of Artificial Sequence: Synthetic oligonucleotide
gugcacccgggcgaucgug

SEQ ID NO: 2850978 - RNA, 19 nt, Artificial Sequence
  Description of Artificial Sequence: Synthetic oligonucleotide
aacaggcggcugcgccgaa

SEQ ID NO: 2850979 - RNA, 19 nt, Artificial Sequence
  Description of Artificial Sequence: Synthetic oligonucleotide
gcaguagcacuacuccagu

SEQ ID NO: 2850980 - RNA, 19 nt, Artificial Sequence
  Description of Artificial Sequence: Synthetic oligonucleotide
aggcggcugcgccgaaggu

SEQ ID NO: 2850981 - RNA, 19 nt, Artificial Sequence
  Description of Artificial Sequence: Synthetic oligonucleotide
gugucgcggacgaggccgc

SEQ ID NO: 2850982 - RNA, 19 nt, Artificial Sequence
  Description of Artificial Sequence: Synthetic oligonucleotide
ugucgcggacgaggccgcc

SEQ ID NO: 2850983 - RNA, 19 nt, Artificial Sequence
  Description of Artificial Sequence: Synthetic oligonucleotide
ccgcagacucuuucuccag

SEQ ID NO: 2850984 - RNA, 19 nt, Artificial Sequence
  Description of Artificial Sequence: Synthetic oligonucleotide
ccucccacguguaacgugu

SEQ ID NO: 2850985 - RNA, 19 nt, Artificial Sequence
  Description of Artificial Sequence: Synthetic oligonucleotide
ggcggcugcgccgaagguc

SEQ ID NO: 2850986 - RNA, 19 nt, Artificial Sequence
  Description of Artificial Sequence: Synthetic oligonucleotide
ccaagcacgcggucgucca

SEQ ID NO: 2850987 - RNA, 19 nt, Artificial Sequence
  Description of Artificial Sequence: Synthetic oligonucleotide
ccacguguaacguguugaa

SEQ ID NO: 2850988 - RNA, 19 nt, Artificial Sequence
  Description of Artificial Sequence: Synthetic oligonucleotide
gcgccgaaggucccgugca

SEQ ID NO: 2850989 - RNA, 19 nt, Artificial Sequence
  Description of Artificial Sequence: Synthetic oligonucleotide
acgcggucguccaggcuca

SEQ ID NO: 2850990 - RNA, 19 nt, Artificial Sequence
  Description of Artificial Sequence: Synthetic oligonucleotide
ccgcuccccuucaucagug

SEQ ID NO: 2850991 - RNA, 19 nt, Artificial Sequence
  Description of Artificial Sequence: Synthetic oligonucleotide
ucccgugcacccgggcgau

SEQ ID NO: 2850992 - RNA, 19 nt, Artificial Sequence
  Description of Artificial Sequence: Synthetic oligonucleotide
gcagcgcgcguccuccgac

SEQ ID NO: 2850993 - RNA, 19 nt, Artificial Sequence
  Description of Artificial Sequence: Synthetic oligonucleotide
cugcgccgaaggucccgug

SEQ ID NO: 2850994 - RNA, 19 nt, Artificial Sequence
  Description of Artificial Sequence: Synthetic oligonucleotide
cagcgcgcguccuccgaca

SEQ ID NO: 2850995 - RNA, 19 nt, Artificial Sequence
  Description of Artificial Sequence: Synthetic oligonucleotide
ggcugcgccgaaggucccg

SEQ ID NO: 2850996 - RNA, 19 nt, Artificial Sequence
  Description of Artificial Sequence: Synthetic oligonucleotide
caggaauuucugacagguu

SEQ ID NO: 2850997 - RNA, 19 nt, Artificial Sequence
  Description of Artificial Sequence: Synthetic oligonucleotide
ggcucaggcggcagcgcgc

SEQ ID NO: 2850998 - RNA, 19 nt, Artificial Sequence
  Description of Artificial Sequence: Synthetic oligonucleotide
aggccgccaagcacgcggu

SEQ ID NO: 2850999 - RNA, 19 nt, Artificial Sequence
  Description of Artificial Sequence: Synthetic oligonucleotide
ggauaucgguguccuuugu

SEQ ID NO: 2851000 - RNA, 19 nt, Artificial Sequence
  Description of Artificial Sequence: Synthetic oligonucleotide
gggcgaucgugucgcggac

SEQ ID NO: 2851001 - RNA, 19 nt, Artificial Sequence
  Description of Artificial Sequence: Synthetic oligonucleotide
ccuccucaccagcacuguc

SEQ ID NO: 2851002 - RNA, 19 nt, Artificial Sequence
  Description of Artificial Sequence: Synthetic oligonucleotide
gcggcagcgcgcguccucc

SEQ ID NO: 2851003 - RNA, 19 nt, Artificial Sequence
  Description of Artificial Sequence: Synthetic oligonucleotide
gucgcggacgaggccgcca

SEQ ID NO: 2851004 - RNA, 19 nt, Artificial Sequence
  Description of Artificial Sequence: Synthetic oligonucleotide
cgaaggucccgugcacccg

SEQ ID NO: 2851005 - RNA, 19 nt, Artificial Sequence
  Description of Artificial Sequence: Synthetic oligonucleotide
ccagcucgcacagaaggua

SEQ ID NO: 2851006 - RNA, 19 nt, Artificial Sequence
  Description of Artificial Sequence: Synthetic oligonucleotide
gcggucguccaggcucagg

SEQ ID NO: 2851007 - RNA, 19 nt, Artificial Sequence
  Description of Artificial Sequence: Synthetic oligonucleotide
gcucgcacagaagguaccu

SEQ ID NO: 2851008 - RNA, 19 nt, Artificial Sequence
  Description of Artificial Sequence: Synthetic oligonucleotide
cgcguccuccgacaccagc

SEQ ID NO: 2851009 - RNA, 19 nt, Artificial Sequence
  Description of Artificial Sequence: Synthetic oligonucleotide
gcacccgggcgaucguguc

SEQ ID NO: 2851010 - RNA, 19 nt, Artificial Sequence
  Description of Artificial Sequence: Synthetic oligonucleotide
gcguccuccgacaccagcu

SEQ ID NO: 2851011 - RNA, 19 nt, Artificial Sequence
  Description of Artificial Sequence: Synthetic oligonucleotide
ggcagcgcgcguccuccga

SEQ ID NO: 2851012 - RNA, 19 nt, Artificial Sequence
  Description of Artificial Sequence: Synthetic oligonucleotide
cgggcgaucgugucgcgga

SEQ ID NO: 2851013 - RNA, 19 nt, Artificial Sequence
  Description of Artificial Sequence: Synthetic oligonucleotide
cuccaguaaacagcuucuu

SEQ ID NO: 2851014 - RNA, 19 nt, Artificial Sequence
  Description of Artificial Sequence: Synthetic oligonucleotide
gcaucgcaguagcacuacu

SEQ ID NO: 2851015 - RNA, 19 nt, Artificial Sequence
  Description of Artificial Sequence: Synthetic oligonucleotide
ccgggcgaucgugucgcgg

SEQ ID NO: 2851016 - RNA, 19 nt, Artificial Sequence
  Description of Artificial Sequence: Synthetic oligonucleotide
gcgcgcguccuccgacacc

SEQ ID NO: 2851017 - RNA, 19 nt, Artificial Sequence
  Description of Artificial Sequence: Synthetic oligonucleotide
ggcggcagcgcgcguccuc

SEQ ID NO: 2851018 - RNA, 19 nt, Artificial Sequence
  Description of Artificial Sequence: Synthetic oligonucleotide
cgcgcguccuccgacacca

SEQ ID NO: 2851019 - RNA, 19 nt, Artificial Sequence
  Description of Artificial Sequence: Synthetic oligonucleotide
ccacacaagcugguagaaa

SEQ ID NO: 2851020 - RNA, 19 nt, Artificial Sequence
  Description of Artificial Sequence: Synthetic oligonucleotide
cccaccgaacaggcggcug

SEQ ID NO: 2851021 - RNA, 19 nt, Artificial Sequence
  Description of Artificial Sequence: Synthetic oligonucleotide
cuacuccaguguaggcauu

SEQ ID NO: 2851022 - RNA, 19 nt, Artificial Sequence
  Description of Artificial Sequence: Synthetic oligonucleotide
cggacgaggccgccaagca

SEQ ID NO: 2851023 - RNA, 19 nt, Artificial Sequence
  Description of Artificial Sequence: Synthetic oligonucleotide
ccucaccagcacugucuga

SEQ ID NO: 2851024 - RNA, 19 nt, Artificial Sequence
  Description of Artificial Sequence: Synthetic oligonucleotide
gucuccgguuguacugaau

SEQ ID NO: 2851025 - RNA, 19 nt, Artificial Sequence
  Description of Artificial Sequence: Synthetic oligonucleotide
cgccgaaggucccgugcac

SEQ ID NO: 2851026 - RNA, 19 nt, Artificial Sequence
  Description of Artificial Sequence: Synthetic oligonucleotide
cucccacguguaacguguu

SEQ ID NO: 2851027 - RNA, 19 nt, Artificial Sequence
  Description of Artificial Sequence: Synthetic oligonucleotide
aggcggcagcgcgcguccu

SEQ ID NO: 2851028 - RNA, 19 nt, Artificial Sequence
  Description of Artificial Sequence: Synthetic oligonucleotide
ggccgccaagcacgcgguc

SEQ ID NO: 2851029 - RNA, 19 nt, Artificial Sequence
  Description of Artificial Sequence: Synthetic oligonucleotide
ccuccgacaccagcucgca

SEQ ID NO: 2851030 - RNA, 19 nt, Artificial Sequence
  Description of Artificial Sequence: Synthetic oligonucleotide
cccgggcgaucgugucgcg

SEQ ID NO: 2851031 - RNA, 19 nt, Artificial Sequence
  Description of Artificial Sequence: Synthetic oligonucleotide
cacggauaucgguguccuu

SEQ ID NO: 2851032 - RNA, 19 nt, Artificial Sequence
  Description of Artificial Sequence: Synthetic oligonucleotide
cccgcuccccuucaucagu

SEQ ID NO: 2851033 - RNA, 19 nt, Artificial Sequence
  Description of Artificial Sequence: Synthetic oligonucleotide
cggcaucgcaguagcacua

SEQ ID NO: 2851034 - RNA, 19 nt, Artificial Sequence
  Description of Artificial Sequence: Synthetic oligonucleotide
gcugcgccgaaggucccgu

SEQ ID NO: 2851035 - RNA, 19 nt, Artificial Sequence
  Description of Artificial Sequence: Synthetic oligonucleotide
cgcagacucuuucuccagu

SEQ ID NO: 2851036 - RNA, 19 nt, Artificial Sequence
  Description of Artificial Sequence: Synthetic oligonucleotide
cgaucgugucgcggacgag

SEQ ID NO: 2851037 - RNA, 19 nt, Artificial Sequence
  Description of Artificial Sequence: Synthetic oligonucleotide
ccgccaagcacgcggucgu

SEQ ID NO: 2851038 - RNA, 19 nt, Artificial Sequence
  Description of Artificial Sequence: Synthetic oligonucleotide
cgguguccuuuguucucca

SEQ ID NO: 2851039 - RNA, 19 nt, Artificial Sequence
  Description of Artificial Sequence: Synthetic oligonucleotide
cggcagcgcgcguccuccg

SEQ ID NO: 2851040 - RNA, 19 nt, Artificial Sequence
  Description of Artificial Sequence: Synthetic oligonucleotide
cgcggacgaggccgccaag

SEQ ID NO: 2851041 - RNA, 19 nt, Artificial Sequence
  Description of Artificial Sequence: Synthetic oligonucleotide
cgaggccgccaagcacgcg

SEQ ID NO: 2851042 - RNA, 19 nt, Artificial Sequence
  Description of Artificial Sequence: Synthetic oligonucleotide
gcacgcggucguccaggcu

SEQ ID NO: 2851043 - RNA, 19 nt, Artificial Sequence
  Description of Artificial Sequence: Synthetic oligonucleotide
gcuucccgcuccccuucau

SEQ ID NO: 2851044 - RNA, 19 nt, Artificial Sequence
  Description of Artificial Sequence: Synthetic oligonucleotide
gcgcguccuccgacaccag

SEQ ID NO: 2851045 - RNA, 19 nt, Artificial Sequence
  Description of Artificial Sequence: Synthetic oligonucleotide
cggcugcgccgaagguccc

SEQ ID NO: 2851046 - RNA, 19 nt, Artificial Sequence
  Description of Artificial Sequence: Synthetic oligonucleotide
cucaggcggcagcgcgcgu

SEQ ID NO: 2851047 - RNA, 19 nt, Artificial Sequence
  Description of Artificial Sequence: Synthetic oligonucleotide
gcacugucugaaagcucuu

SEQ ID NO: 2851048 - RNA, 19 nt, Artificial Sequence
  Description of Artificial Sequence: Synthetic oligonucleotide
cguccaggcucaggcggca

SEQ ID NO: 2851049 - RNA, 19 nt, Artificial Sequence
  Description of Artificial Sequence: Synthetic oligonucleotide
gcccaccgaacaggcggcu

SEQ ID NO: 2851050 - RNA, 19 nt, Artificial Sequence
  Description of Artificial Sequence: Synthetic oligonucleotide
cgccaagcacgcggucguc

SEQ ID NO: 2851051 - RNA, 19 nt, Artificial Sequence
  Description of Artificial Sequence: Synthetic oligonucleotide
gcucuuccgcagacucuuu

SEQ ID NO: 2851052 - RNA, 19 nt, Artificial Sequence
  Description of Artificial Sequence: Synthetic oligonucleotide
cccgugcacccgggcgauc

SEQ ID NO: 2851053 - RNA, 19 nt, Artificial Sequence
  Description of Artificial Sequence: Synthetic oligonucleotide
ccccuucaucagugcaauu

SEQ ID NO: 2851054 - RNA, 19 nt, Artificial Sequence
  Description of Artificial Sequence: Synthetic oligonucleotide
cgcggucguccaggcucag

SEQ ID NO: 2851055 - RNA, 19 nt, Artificial Sequence
  Description of Artificial Sequence: Synthetic oligonucleotide
cgacaccagcucgcacaga

SEQ ID NO: 2851056 - RNA, 19 nt, Artificial Sequence
  Description of Artificial Sequence: Synthetic oligonucleotide
cgugcacccgggcgaucgu

SEQ ID NO: 2851057 - RNA, 19 nt, Artificial Sequence
  Description of Artificial Sequence: Synthetic oligonucleotide
aacacaaauucccuuaagc

SEQ ID NO: 2851058 - RNA, 19 nt, Artificial Sequence
  Description of Artificial Sequence: Synthetic oligonucleotide
aaggauaucauguacacaa

SEQ ID NO: 2851059 - RNA, 19 nt, Artificial Sequence
  Description of Artificial Sequence: Synthetic oligonucleotide
uacacaaagauccacauuc

SEQ ID NO: 2851060 - RNA, 19 nt, Artificial Sequence
  Description of Artificial Sequence: Synthetic oligonucleotide
uacguuagaguucugacag

SEQ ID NO: 2851061 - RNA, 19 nt, Artificial Sequence
  Description of Artificial Sequence: Synthetic oligonucleotide
uuagaguucugacaggcgg

SEQ ID NO: 2851062 - RNA, 19 nt, Artificial Sequence
  Description of Artificial Sequence: Synthetic oligonucleotide
aagucgaaggaaccgaugg

SEQ ID NO: 2851063 - RNA, 19 nt, Artificial Sequence
  Description of Artificial Sequence: Synthetic oligonucleotide
acacaaauucccuuaagcg

SEQ ID NO: 2851064 - RNA, 19 nt, Artificial Sequence
  Description of Artificial Sequence: Synthetic oligonucleotide
ucagguuucugacagaugu

SEQ ID NO: 2851065 - RNA, 19 nt, Artificial Sequence
  Description of Artificial Sequence: Synthetic oligonucleotide
uguacaguuuaccacauac

SEQ ID NO: 2851066 - RNA, 19 nt, Artificial Sequence
  Description of Artificial Sequence: Synthetic oligonucleotide
uguugcagaacacaaauuc

SEQ ID NO: 2851067 - RNA, 19 nt, Artificial Sequence
  Description of Artificial Sequence: Synthetic oligonucleotide
uuuacugucuuccucuugc

SEQ ID NO: 2851068 - RNA, 19 nt, Artificial Sequence
  Description of Artificial Sequence: Synthetic oligonucleotide
ugugucagguuucugacag

SEQ ID NO: 2851069 - RNA, 19 nt, Artificial Sequence
  Description of Artificial Sequence: Synthetic oligonucleotide
ucgaucaugguacaucagg

SEQ ID NO: 2851070 - RNA, 19 nt, Artificial Sequence
  Description of Artificial Sequence: Synthetic oligonucleotide
aaugaagucgaaggaaccg

SEQ ID NO: 2851071 - RNA, 19 nt, Artificial Sequence
  Description of Artificial Sequence: Synthetic oligonucleotide
ucagguaaggaucaucagc

SEQ ID NO: 2851072 - RNA, 19 nt, Artificial Sequence
  Description of Artificial Sequence: Synthetic oligonucleotide
aaagauccacauuccauag

SEQ ID NO: 2851073 - RNA, 19 nt, Artificial Sequence
  Description of Artificial Sequence: Synthetic oligonucleotide
uuuucuuauagccagcuuu

SEQ ID NO: 2851074 - RNA, 19 nt, Artificial Sequence
  Description of Artificial Sequence: Synthetic oligonucleotide
aaugcagccacucuauuaa

SEQ ID NO: 2851075 - RNA, 19 nt, Artificial Sequence
  Description of Artificial Sequence: Synthetic oligonucleotide
aguacguuagaguucugac

SEQ ID NO: 2851076 - RNA, 19 nt, Artificial Sequence
  Description of Artificial Sequence: Synthetic oligonucleotide
cacaaauucccuuaagcgc

SEQ ID NO: 2851077 - RNA, 19 nt, Artificial Sequence
  Description of Artificial Sequence: Synthetic oligonucleotide
uucuccuuagccaaaggcc

SEQ ID NO: 2851078 - RNA, 19 nt, Artificial Sequence
  Description of Artificial Sequence: Synthetic oligonucleotide
uugcagaacacaaauuccc

SEQ ID NO: 2851079 - RNA, 19 nt, Artificial Sequence
  Description of Artificial Sequence: Synthetic oligonucleotide
agacguggucauuuuaucc

SEQ ID NO: 2851080 - RNA, 19 nt, Artificial Sequence
  Description of Artificial Sequence: Synthetic oligonucleotide
accgauuuuacugucuucc

SEQ ID NO: 2851081 - RNA, 19 nt, Artificial Sequence
  Description of Artificial Sequence: Synthetic oligonucleotide
uucugcaaggauaucaugu

SEQ ID NO: 2851082 - RNA, 19 nt, Artificial Sequence
  Description of Artificial Sequence: Synthetic oligonucleotide
aguuguacaguuuaccaca

SEQ ID NO: 2851083 - RNA, 19 nt, Artificial Sequence
  Description of Artificial Sequence: Synthetic oligonucleotide
auaucauguacacaaagau

SEQ ID NO: 2851084 - RNA, 19 nt, Artificial Sequence
  Description of Artificial Sequence: Synthetic oligonucleotide
uuauccaggaguuuacucu

SEQ ID NO: 2851085 - RNA, 19 nt, Artificial Sequence
  Description of Artificial Sequence: Synthetic oligonucleotide
ucaucagcauaccaguugc

SEQ ID NO: 2851086 - RNA, 19 nt, Artificial Sequence
  Description of Artificial Sequence: Synthetic oligonucleotide
uggacgaccgauuuuacug

SEQ ID NO: 2851087 - RNA, 19 nt, Artificial Sequence
  Description of Artificial Sequence: Synthetic oligonucleotide
uuucuccuuagccaaaggc

SEQ ID NO: 2851088 - RNA, 19 nt, Artificial Sequence
  Description of Artificial Sequence: Synthetic oligonucleotide
augugaacaagucuuggag

SEQ ID NO: 2851089 - RNA, 19 nt, Artificial Sequence
  Description of Artificial Sequence: Synthetic oligonucleotide
accacauacucacuucugc

SEQ ID NO: 2851090 - RNA, 19 nt, Artificial Sequence
  Description of Artificial Sequence: Synthetic oligonucleotide
uggagcaaaggaaacaacu

SEQ ID NO: 2851091 - RNA, 19 nt, Artificial Sequence
  Description of Artificial Sequence: Synthetic oligonucleotide
aaaggccagaaugaagucg

SEQ ID NO: 2851092 - RNA, 19 nt, Artificial Sequence
  Description of Artificial Sequence: Synthetic oligonucleotide
ucuauuaaggacuguugca

SEQ ID NO: 2851093 - RNA, 19 nt, Artificial Sequence
  Description of Artificial Sequence: Synthetic oligonucleotide
caguuuaccacauacucac

SEQ ID NO: 2851094 - RNA, 19 nt, Artificial Sequence
  Description of Artificial Sequence: Synthetic oligonucleotide
uuucugacagaugugaaca

SEQ ID NO: 2851095 - RNA, 19 nt, Artificial Sequence
  Description of Artificial Sequence: Synthetic oligonucleotide
ugcaaggauaucauguaca

SEQ ID NO: 2851096 - RNA, 19 nt, Artificial Sequence
  Description of Artificial Sequence: Synthetic oligonucleotide
acugggaaccaaugcagcc

SEQ ID NO: 2851097 - RNA, 19 nt, Artificial Sequence
  Description of Artificial Sequence: Synthetic oligonucleotide
agaaugaagucgaaggaac

SEQ ID NO: 2851098 - RNA, 19 nt, Artificial Sequence
  Description of Artificial Sequence: Synthetic oligonucleotide
aagacguggucauuuuauc

SEQ ID NO: 2851099 - RNA, 19 nt, Artificial Sequence
  Description of Artificial Sequence: Synthetic oligonucleotide
cucuauuaaggacuguugc

SEQ ID NO: 2851100 - RNA, 19 nt, Artificial Sequence
  Description of Artificial Sequence: Synthetic oligonucleotide
ucuccuuagccaaaggcca

SEQ ID NO: 2851101 - RNA, 19 nt, Artificial Sequence
  Description of Artificial Sequence: Synthetic oligonucleotide
gaacuauacucucagguuc

SEQ ID NO: 2851102 - RNA, 19 nt, Artificial Sequence
  Description of Artificial Sequence: Synthetic oligonucleotide
uauacucucagguucguuc

SEQ ID NO: 2851103 - RNA, 19 nt, Artificial Sequence
  Description of Artificial Sequence: Synthetic oligonucleotide
cuuauagccagcuuuucuc

SEQ ID NO: 2851104 - RNA, 19 nt, Artificial Sequence
  Description of Artificial Sequence: Synthetic oligonucleotide
ucaugguacaucagguaag

SEQ ID NO: 2851105 - RNA, 19 nt, Artificial Sequence
  Description of Artificial Sequence: Synthetic oligonucleotide
ugcaguaugcccauguguc

SEQ ID NO: 2851106 - RNA, 19 nt, Artificial Sequence
  Description of Artificial Sequence: Synthetic oligonucleotide
cuauuaaggacuguugcag

SEQ ID NO: 2851107 - RNA, 19 nt, Artificial Sequence
  Description of Artificial Sequence: Synthetic oligonucleotide
ucgaaggaaccgauggacg

SEQ ID NO: 2851108 - RNA, 19 nt, Artificial Sequence
  Description of Artificial Sequence: Synthetic oligonucleotide
auacucucagguucguucg

SEQ ID NO: 2851109 - RNA, 19 nt, Artificial Sequence
  Description of Artificial Sequence: Synthetic oligonucleotide
aacuauacucucagguucg

SEQ ID NO: 2851110 - RNA, 19 nt, Artificial Sequence
  Description of Artificial Sequence: Synthetic oligonucleotide
uuacucugggucuuguugc

SEQ ID NO: 2851111 - RNA, 19 nt, Artificial Sequence
  Description of Artificial Sequence: Synthetic oligonucleotide
gccagaaugaagucgaagg

SEQ ID NO: 2851112 - RNA, 19 nt, Artificial Sequence
  Description of Artificial Sequence: Synthetic oligonucleotide
ugggucuuguugcagaaca

SEQ ID NO: 2851113 - RNA, 19 nt, Artificial Sequence
  Description of Artificial Sequence: Synthetic oligonucleotide
guaaggaucaucagcauac

SEQ ID NO: 2851114 - RNA, 19 nt, Artificial Sequence
  Description of Artificial Sequence: Synthetic oligonucleotide
aaggaaccgauggacgacc

SEQ ID NO: 2851115 - RNA, 19 nt, Artificial Sequence
  Description of Artificial Sequence: Synthetic oligonucleotide
uccacauuccauaguuggg

SEQ ID NO: 2851116 - RNA, 19 nt, Artificial Sequence
  Description of Artificial Sequence: Synthetic oligonucleotide
ugcagccacucuauuaagg

SEQ ID NO: 2851117 - RNA, 19 nt, Artificial Sequence
  Description of Artificial Sequence: Synthetic oligonucleotide
ucuuauagccagcuuuucu

SEQ ID NO: 2851118 - RNA, 19 nt, Artificial Sequence
  Description of Artificial Sequence: Synthetic oligonucleotide
cauuccauaguugggagcc

SEQ ID NO: 2851119 - RNA, 19 nt, Artificial Sequence
  Description of Artificial Sequence: Synthetic oligonucleotide
acauuccauaguugggagc

SEQ ID NO: 2851120 - RNA, 19 nt, Artificial Sequence
  Description of Artificial Sequence: Synthetic oligonucleotide
acauacucacuucugcaag

SEQ ID NO: 2851121 - RNA, 19 nt, Artificial Sequence
  Description of Artificial Sequence: Synthetic oligonucleotide
gauaucauguacacaaaga

SEQ ID NO: 2851122 - RNA, 19 nt, Artificial Sequence
  Description of Artificial Sequence: Synthetic oligonucleotide
uuaccacauacucacuucu

SEQ ID NO: 2851123 - RNA, 19 nt, Artificial Sequence
  Description of Artificial Sequence: Synthetic oligonucleotide
ugguacaucagguaaggau

SEQ ID NO: 2851124 - RNA, 19 nt, Artificial Sequence
  Description of Artificial Sequence: Synthetic oligonucleotide
aucagcauaccaguugcgc

SEQ ID NO: 2851125 - RNA, 19 nt, Artificial Sequence
  Description of Artificial Sequence: Synthetic oligonucleotide
uuccgugugcugcaguacg

SEQ ID NO: 2851126 - RNA, 19 nt, Artificial Sequence
  Description of Artificial Sequence: Synthetic oligonucleotide
cauacucacuucugcaagg

SEQ ID NO: 2851127 - RNA, 19 nt, Artificial Sequence
  Description of Artificial Sequence: Synthetic oligonucleotide
gauuuuacugucuuccucu

SEQ ID NO: 2851128 - RNA, 19 nt, Artificial Sequence
  Description of Artificial Sequence: Synthetic oligonucleotide
aguucugacaggcggcuuc

SEQ ID NO: 2851129 - RNA, 19 nt, Artificial Sequence
  Description of Artificial Sequence: Synthetic oligonucleotide
acaaauucccuuaagcgcu

SEQ ID NO: 2851130 - RNA, 19 nt, Artificial Sequence
  Description of Artificial Sequence: Synthetic oligonucleotide
ucugaacuauacucucagg

SEQ ID NO: 2851131 - RNA, 19 nt, Artificial Sequence
  Description of Artificial Sequence: Synthetic oligonucleotide
aggacuguugcaguaugcc

SEQ ID NO: 2851132 - RNA, 19 nt, Artificial Sequence
  Description of Artificial Sequence: Synthetic oligonucleotide
gacacugggaaccaaugca

SEQ ID NO: 2851133 - RNA, 19 nt, Artificial Sequence
  Description of Artificial Sequence: Synthetic oligonucleotide
uuuucuccuuagccaaagg

SEQ ID NO: 2851134 - RNA, 19 nt, Artificial Sequence
  Description of Artificial Sequence: Synthetic oligonucleotide
ugaacuauacucucagguu

SEQ ID NO: 2851135 - RNA, 19 nt, Artificial Sequence
  Description of Artificial Sequence: Synthetic oligonucleotide
uuuauccaggaguuuacuc

SEQ ID NO: 2851136 - RNA, 19 nt, Artificial Sequence
  Description of Artificial Sequence: Synthetic oligonucleotide
uuuaccacauacucacuuc

SEQ ID NO: 2851137 - RNA, 19 nt, Artificial Sequence
  Description of Artificial Sequence: Synthetic oligonucleotide
ugaaagcucugaacuauac

SEQ ID NO: 2851138 - RNA, 19 nt, Artificial Sequence
  Description of Artificial Sequence: Synthetic oligonucleotide
cagguaaggaucaucagca

SEQ ID NO: 2851139 - RNA, 19 nt, Artificial Sequence
  Description of Artificial Sequence: Synthetic oligonucleotide
uuucuuauagccagcuuuu

SEQ ID NO: 2851140 - RNA, 19 nt, Artificial Sequence
  Description of Artificial Sequence: Synthetic oligonucleotide
gacguggucauuuuaucca

SEQ ID NO: 2851141 - RNA, 19 nt, Artificial Sequence
  Description of Artificial Sequence: Synthetic oligonucleotide
guucguucgaucaugguac

SEQ ID NO: 2851142 - RNA, 19 nt, Artificial Sequence
  Description of Artificial Sequence: Synthetic oligonucleotide
ucucagguucguucgauca

SEQ ID NO: 2851143 - RNA, 19 nt, Artificial Sequence
  Description of Artificial Sequence: Synthetic oligonucleotide
uguugcaguaugcccaugu

SEQ ID NO: 2851144 - RNA, 19 nt, Artificial Sequence
  Description of Artificial Sequence: Synthetic oligonucleotide
uguacacaaagauccacau

SEQ ID NO: 2851145 - RNA, 19 nt, Artificial Sequence
  Description of Artificial Sequence: Synthetic oligonucleotide
aggaucaucagcauaccag

SEQ ID NO: 2851146 - RNA, 19 nt, Artificial Sequence
  Description of Artificial Sequence: Synthetic oligonucleotide
ugcagaacacaaauucccu

SEQ ID NO: 2851147 - RNA, 19 nt, Artificial Sequence
  Description of Artificial Sequence: Synthetic oligonucleotide
uauuaaggacuguugcagu

SEQ ID NO: 2851148 - RNA, 19 nt, Artificial Sequence
  Description of Artificial Sequence: Synthetic oligonucleotide
agauccacauuccauaguu

SEQ ID NO: 2851149 - RNA, 19 nt, Artificial Sequence
  Description of Artificial Sequence: Synthetic oligonucleotide
ugcaguacguuagaguucu

SEQ ID NO: 2851150 - RNA, 19 nt, Artificial Sequence
  Description of Artificial Sequence: Synthetic oligonucleotide
auuuuauccaggaguuuac

SEQ ID NO: 2851151 - RNA, 19 nt, Artificial Sequence
  Description of Artificial Sequence: Synthetic oligonucleotide
uaugaaagcucugaacuau

SEQ ID NO: 2851152 - RNA, 19 nt, Artificial Sequence
  Description of Artificial Sequence: Synthetic oligonucleotide
cucugaacuauacucucag

SEQ ID NO: 2851153 - RNA, 19 nt, Artificial Sequence
  Description of Artificial Sequence: Synthetic oligonucleotide
gaugugaacaagucuugga

SEQ ID NO: 2851154 - RNA, 19 nt, Artificial Sequence
  Description of Artificial Sequence: Synthetic oligonucleotide
ucugacaggcggcuucagg

SEQ ID NO: 2851155 - RNA, 19 nt, Artificial Sequence
  Description of Artificial Sequence: Synthetic oligonucleotide
uaaggacuguugcaguaug

SEQ ID NO: 2851156 - RNA, 19 nt, Artificial Sequence
  Description of Artificial Sequence: Synthetic oligonucleotide
uugcgccucuuccagaaag

SEQ ID NO: 2851157 - RNA, 19 nt, Artificial Sequence
  Description of Artificial Sequence: Synthetic oligonucleotide
gugaacaagucuuggagca

SEQ ID NO: 2851158 - RNA, 19 nt, Artificial Sequence
  Description of Artificial Sequence: Synthetic oligonucleotide
caucagguaaggaucauca

SEQ ID NO: 2851159 - RNA, 19 nt, Artificial Sequence
  Description of Artificial Sequence: Synthetic oligonucleotide
caggaguuuacucuggguc

SEQ ID NO: 2851160 - RNA, 19 nt, Artificial Sequence
  Description of Artificial Sequence: Synthetic oligonucleotide
aaggacuguugcaguaugc

SEQ ID NO: 2851161 - RNA, 19 nt, Artificial Sequence
  Description of Artificial Sequence: Synthetic oligonucleotide
uccaggaguuuacucuggg

SEQ ID NO: 2851162 - RNA, 19 nt, Artificial Sequence
  Description of Artificial Sequence: Synthetic oligonucleotide
aaagacguggucauuuuau

SEQ ID NO: 2851163 - RNA, 19 nt, Artificial Sequence
  Description of Artificial Sequence: Synthetic oligonucleotide
uuccagaaagacgugguca

SEQ ID NO: 2851164 - RNA, 19 nt, Artificial Sequence
  Description of Artificial Sequence: Synthetic oligonucleotide
ugacagaugugaacaaguc

SEQ ID NO: 2851165 - RNA, 19 nt, Artificial Sequence
  Description of Artificial Sequence: Synthetic oligonucleotide
caugugucagguuucugac

SEQ ID NO: 2851166 - RNA, 19 nt, Artificial Sequence
  Description of Artificial Sequence: Synthetic oligonucleotide
ggauaucauguacacaaag

SEQ ID NO: 2851167 - RNA, 19 nt, Artificial Sequence
  Description of Artificial Sequence: Synthetic oligonucleotide
aggaguuuacucugggucu

SEQ ID NO: 2851168 - RNA, 19 nt, Artificial Sequence
  Description of Artificial Sequence: Synthetic oligonucleotide
aguugggagccuaugaaag

SEQ ID NO: 2851169 - RNA, 19 nt, Artificial Sequence
  Description of Artificial Sequence: Synthetic oligonucleotide
guuucugacagaugugaac

SEQ ID NO: 2851170 - RNA, 19 nt, Artificial Sequence
  Description of Artificial Sequence: Synthetic oligonucleotide
guugcagaacacaaauucc

SEQ ID NO: 2851171 - RNA, 19 nt, Artificial Sequence
  Description of Artificial Sequence: Synthetic oligonucleotide
uggucauuuuauccaggag

SEQ ID NO: 2851172 - RNA, 19 nt, Artificial Sequence
  Description of Artificial Sequence: Synthetic oligonucleotide
uugcaguaugcccaugugu

SEQ ID NO: 2851173 - RNA, 19 nt, Artificial Sequence
  Description of Artificial Sequence: Synthetic oligonucleotide
cuucaggacacugggaacc

SEQ ID NO: 2851174 - RNA, 19 nt, Artificial Sequence
  Description of Artificial Sequence: Synthetic oligonucleotide
gaaugaagucgaaggaacc

SEQ ID NO: 2851175 - RNA, 19 nt, Artificial Sequence
  Description of Artificial Sequence: Synthetic oligonucleotide
aaggccagaaugaagucga

SEQ ID NO: 2851176 - RNA, 19 nt, Artificial Sequence
  Description of Artificial Sequence: Synthetic oligonucleotide
gaacacaaauucccuuaag

SEQ ID NO: 2851177 - RNA, 19 nt, Artificial Sequence
  Description of Artificial Sequence: Synthetic oligonucleotide
caguuguacaguuuaccac

SEQ ID NO: 2851178 - RNA, 19 nt, Artificial Sequence
  Description of Artificial Sequence: Synthetic oligonucleotide
auaguugggagccuaugaa

SEQ ID NO: 2851179 - RNA, 19 nt, Artificial Sequence
  Description of Artificial Sequence: Synthetic oligonucleotide
uuuuacugucuuccucuug

SEQ ID NO: 2851180 - RNA, 19 nt, Artificial Sequence
  Description of Artificial Sequence: Synthetic oligonucleotide
ucuuguugcagaacacaaa

SEQ ID NO: 2851181 - RNA, 19 nt, Artificial Sequence
  Description of Artificial Sequence: Synthetic oligonucleotide
acacaaagauccacauucc

SEQ ID NO: 2851182 - RNA, 19 nt, Artificial Sequence
  Description of Artificial Sequence: Synthetic oligonucleotide
ucugcaaggauaucaugua

SEQ ID NO: 2851183 - RNA, 19 nt, Artificial Sequence
  Description of Artificial Sequence: Synthetic oligonucleotide
ucuuggagcaaaggaaaca

SEQ ID NO: 2851184 - RNA, 19 nt, Artificial Sequence
  Description of Artificial Sequence: Synthetic oligonucleotide
aagauccacauuccauagu

SEQ ID NO: 2851185 - RNA, 19 nt, Artificial Sequence
  Description of Artificial Sequence: Synthetic oligonucleotide
guucgaucaugguacauca

SEQ ID NO: 2851186 - RNA, 19 nt, Artificial Sequence
  Description of Artificial Sequence: Synthetic oligonucleotide
caagucuuggagcaaagga

SEQ ID NO: 2851187 - RNA, 19 nt, Artificial Sequence
  Description of Artificial Sequence: Synthetic oligonucleotide
agaugugaacaagucuugg

SEQ ID NO: 2851188 - RNA, 19 nt, Artificial Sequence
  Description of Artificial Sequence: Synthetic oligonucleotide
uaccaguugcgccucuucc

SEQ ID NO: 2851189 - RNA, 19 nt, Artificial Sequence
  Description of Artificial Sequence: Synthetic oligonucleotide
agcuuuucuccuuagccaa

SEQ ID NO: 2851190 - RNA, 19 nt, Artificial Sequence
  Description of Artificial Sequence: Synthetic oligonucleotide
cacauuccauaguugggag

SEQ ID NO: 2851191 - RNA, 19 nt, Artificial Sequence
  Description of Artificial Sequence: Synthetic oligonucleotide
auuaaggacuguugcagua

SEQ ID NO: 2851192 - RNA, 19 nt, Artificial Sequence
  Description of Artificial Sequence: Synthetic oligonucleotide
uuccucuugccuuuccgug

SEQ ID NO: 2851193 - RNA, 19 nt, Artificial Sequence
  Description of Artificial Sequence: Synthetic oligonucleotide
uccagaaagacguggucau

SEQ ID NO: 2851194 - RNA, 19 nt, Artificial Sequence
  Description of Artificial Sequence: Synthetic oligonucleotide
aguaugcccaugugucagg

SEQ ID NO: 2851195 - RNA, 19 nt, Artificial Sequence
  Description of Artificial Sequence: Synthetic oligonucleotide
gacuguugcaguaugccca

SEQ ID NO: 2851196 - RNA, 19 nt, Artificial Sequence
  Description of Artificial Sequence: Synthetic oligonucleotide
aucagguaaggaucaucag

SEQ ID NO: 2851197 - RNA, 19 nt, Artificial Sequence
  Description of Artificial Sequence: Synthetic oligonucleotide
ugggaaccaaugcagccac

SEQ ID NO: 2851198 - RNA, 19 nt, Artificial Sequence
  Description of Artificial Sequence: Synthetic oligonucleotide
acguggucauuuuauccag

SEQ ID NO: 2851199 - RNA, 19 nt, Artificial Sequence
  Description of Artificial Sequence: Synthetic oligonucleotide
gguacaucagguaaggauc

SEQ ID NO: 2851200 - RNA, 19 nt, Artificial Sequence
  Description of Artificial Sequence: Synthetic oligonucleotide
guugggagccuaugaaagc

SEQ ID NO: 2851201 - RNA, 19 nt, Artificial Sequence
  Description of Artificial Sequence: Synthetic oligonucleotide
uaguugggagccuaugaaa

SEQ ID NO: 2851202 - RNA, 19 nt, Artificial Sequence
  Description of Artificial Sequence: Synthetic oligonucleotide
uugggagccuaugaaagcu

SEQ ID NO: 2851203 - RNA, 19 nt, Artificial Sequence
  Description of Artificial Sequence: Synthetic oligonucleotide
ugaagucgaaggaaccgau

SEQ ID NO: 2851204 - RNA, 19 nt, Artificial Sequence
  Description of Artificial Sequence: Synthetic oligonucleotide
ucagguucguucgaucaug

SEQ ID NO: 2851205 - RNA, 19 nt, Artificial Sequence
  Description of Artificial Sequence: Synthetic oligonucleotide
uugccuuuccgugugcugc

SEQ ID NO: 2851206 - RNA, 19 nt, Artificial Sequence
  Description of Artificial Sequence: Synthetic oligonucleotide
guacguuagaguucugaca

SEQ ID NO: 2851207 - RNA, 19 nt, Artificial Sequence
  Description of Artificial Sequence: Synthetic oligonucleotide
uaccacauacucacuucug

SEQ ID NO: 2851208 - RNA, 19 nt, Artificial Sequence
  Description of Artificial Sequence: Synthetic oligonucleotide
ugcugcaguacguuagagu

SEQ ID NO: 2851209 - RNA, 19 nt, Artificial Sequence
  Description of Artificial Sequence: Synthetic oligonucleotide
agaacacaaauucccuuaa

SEQ ID NO: 2851210 - RNA, 19 nt, Artificial Sequence
  Description of Artificial Sequence: Synthetic oligonucleotide
acaagucuuggagcaaagg

SEQ ID NO: 2851211 - RNA, 19 nt, Artificial Sequence
  Description of Artificial Sequence: Synthetic oligonucleotide
uucgaucaugguacaucag

SEQ ID NO: 2851212 - RNA, 19 nt, Artificial Sequence
  Description of Artificial Sequence: Synthetic oligonucleotide
uuuuauccaggaguuuacu

SEQ ID NO: 2851213 - RNA, 19 nt, Artificial Sequence
  Description of Artificial Sequence: Synthetic oligonucleotide
auaccaguugcgccucuuc

SEQ ID NO: 2851214 - RNA, 19 nt, Artificial Sequence
  Description of Artificial Sequence: Synthetic oligonucleotide
ggucauuuuauccaggagu

SEQ ID NO: 2851215 - RNA, 19 nt, Artificial Sequence
  Description of Artificial Sequence: Synthetic oligonucleotide
acaucagguaaggaucauc

SEQ ID NO: 2851216 - RNA, 19 nt, Artificial Sequence
  Description of Artificial Sequence: Synthetic oligonucleotide
uuacugucuuccucuugcc

SEQ ID NO: 2851217 - RNA, 19 nt, Artificial Sequence
  Description of Artificial Sequence: Synthetic oligonucleotide
acaguuuaccacauacuca

SEQ ID NO: 2851218 - RNA, 19 nt, Artificial Sequence
  Description of Artificial Sequence: Synthetic oligonucleotide
ccagcuuuucuccuuagcc

SEQ ID NO: 2851219 - RNA, 19 nt, Artificial Sequence
  Description of Artificial Sequence: Synthetic oligonucleotide
guuagaguucugacaggcg

SEQ ID NO: 2851220 - RNA, 19 nt, Artificial Sequence
  Description of Artificial Sequence: Synthetic oligonucleotide
aacaagucuuggagcaaag

SEQ ID NO: 2851221 - RNA, 19 nt, Artificial Sequence
  Description of Artificial Sequence: Synthetic oligonucleotide
ugucagguuucugacagau

SEQ ID NO: 2851222 - RNA, 19 nt, Artificial Sequence
  Description of Artificial Sequence: Synthetic oligonucleotide
cugaacuauacucucaggu

SEQ ID NO: 2851223 - RNA, 19 nt, Artificial Sequence
  Description of Artificial Sequence: Synthetic oligonucleotide
cauguacacaaagauccac

SEQ ID NO: 2851224 - RNA, 19 nt, Artificial Sequence
  Description of Artificial Sequence: Synthetic oligonucleotide
acacugggaaccaaugcag

SEQ ID NO: 2851225 - RNA, 19 nt, Artificial Sequence
  Description of Artificial Sequence: Synthetic oligonucleotide
augcccaugugucagguuu

SEQ ID NO: 2851226 - RNA, 19 nt, Artificial Sequence
  Description of Artificial Sequence: Synthetic oligonucleotide
agccacucuauuaaggacu

SEQ ID NO: 2851227 - RNA, 19 nt, Artificial Sequence
  Description of Artificial Sequence: Synthetic oligonucleotide
acucuauuaaggacuguug

SEQ ID NO: 2851228 - RNA, 19 nt, Artificial Sequence
  Description of Artificial Sequence: Synthetic oligonucleotide
uacugucuuccucuugccu

SEQ ID NO: 2851229 - RNA, 19 nt, Artificial Sequence
  Description of Artificial Sequence: Synthetic oligonucleotide
cagguucguucgaucaugg

SEQ ID NO: 2851230 - RNA, 19 nt, Artificial Sequence
  Description of Artificial Sequence: Synthetic oligonucleotide
gacagaugugaacaagucu

SEQ ID NO: 2851231 - RNA, 19 nt, Artificial Sequence
  Description of Artificial Sequence: Synthetic oligonucleotide
cuuuucuccuuagccaaag

SEQ ID NO: 2851232 - RNA, 19 nt, Artificial Sequence
  Description of Artificial Sequence: Synthetic oligonucleotide
acaaagauccacauuccau

SEQ ID NO: 2851233 - RNA, 19 nt, Artificial Sequence
  Description of Artificial Sequence: Synthetic oligonucleotide
cauaguugggagccuauga

SEQ ID NO: 2851234 - RNA, 19 nt, Artificial Sequence
  Description of Artificial Sequence: Synthetic oligonucleotide
cugcaaggauaucauguac

SEQ ID NO: 2851235 - RNA, 19 nt, Artificial Sequence
  Description of Artificial Sequence: Synthetic oligonucleotide
cacugggaaccaaugcagc

SEQ ID NO: 2851236 - RNA, 19 nt, Artificial Sequence
  Description of Artificial Sequence: Synthetic oligonucleotide
acguuagaguucugacagg

SEQ ID NO: 2851237 - RNA, 19 nt, Artificial Sequence
  Description of Artificial Sequence: Synthetic oligonucleotide
uuaaggacuguugcaguau

SEQ ID NO: 2851238 - RNA, 19 nt, Artificial Sequence
  Description of Artificial Sequence: Synthetic oligonucleotide
gucgaaggaaccgauggac

SEQ ID NO: 2851239 - RNA, 19 nt, Artificial Sequence
  Description of Artificial Sequence: Synthetic oligonucleotide
uaaggaucaucagcauacc

SEQ ID NO: 2851240 - RNA, 19 nt, Artificial Sequence
  Description of Artificial Sequence: Synthetic oligonucleotide
gcaaggauaucauguacac

SEQ ID NO: 2851241 - RNA, 19 nt, Artificial Sequence
  Description of Artificial Sequence: Synthetic oligonucleotide
ggagcaaaggaaacaacug

SEQ ID NO: 2851242 - RNA, 19 nt, Artificial Sequence
  Description of Artificial Sequence: Synthetic oligonucleotide
guugcaguaugcccaugug

SEQ ID NO: 2851243 - RNA, 19 nt, Artificial Sequence
  Description of Artificial Sequence: Synthetic oligonucleotide
caucagcauaccaguugcg

SEQ ID NO: 2851244 - RNA, 19 nt, Artificial Sequence
  Description of Artificial Sequence: Synthetic oligonucleotide
augaagucgaaggaaccga

SEQ ID NO: 2851245 - RNA, 19 nt, Artificial Sequence
  Description of Artificial Sequence: Synthetic oligonucleotide
cuuguugcagaacacaaau

SEQ ID NO: 2851246 - RNA, 19 nt, Artificial Sequence
  Description of Artificial Sequence: Synthetic oligonucleotide
guggucauuuuauccagga

SEQ ID NO: 2851247 - RNA, 19 nt, Artificial Sequence
  Description of Artificial Sequence: Synthetic oligonucleotide
uuguugcagaacacaaauu

SEQ ID NO: 2851248 - RNA, 19 nt, Artificial Sequence
  Description of Artificial Sequence: Synthetic oligonucleotide
gaucaugguacaucaggua

SEQ ID NO: 2851249 - RNA, 19 nt, Artificial Sequence
  Description of Artificial Sequence: Synthetic oligonucleotide
uccucuugccuuuccgugu

SEQ ID NO: 2851250 - RNA, 19 nt, Artificial Sequence
  Description of Artificial Sequence: Synthetic oligonucleotide
cauuuuauccaggaguuua

SEQ ID NO: 2851251 - RNA, 19 nt, Artificial Sequence
  Description of Artificial Sequence: Synthetic oligonucleotide
aguugcgccucuuccagaa

SEQ ID NO: 2851252 - RNA, 19 nt, Artificial Sequence
  Description of Artificial Sequence: Synthetic oligonucleotide
gaaagcucugaacuauacu

SEQ ID NO: 2851253 - RNA, 19 nt, Artificial Sequence
  Description of Artificial Sequence: Synthetic oligonucleotide
cagcuuuucuccuuagcca

SEQ ID NO: 2851254 - RNA, 19 nt, Artificial Sequence
  Description of Artificial Sequence: Synthetic oligonucleotide
ugacaggcggcuucaggac

SEQ ID NO: 2851255 - RNA, 19 nt, Artificial Sequence
  Description of Artificial Sequence: Synthetic oligonucleotide
accaguugcgccucuucca

SEQ ID NO: 2851256 - RNA, 19 nt, Artificial Sequence
  Description of Artificial Sequence: Synthetic oligonucleotide
auggacgaccgauuuuacu

SEQ ID NO: 2851257 - RNA, 19 nt, Artificial Sequence
  Description of Artificial Sequence: Synthetic oligonucleotide
cagaacacaaauucccuua

SEQ ID NO: 2851258 - RNA, 19 nt, Artificial Sequence
  Description of Artificial Sequence: Synthetic oligonucleotide
gaagucgaaggaaccgaug

SEQ ID NO: 2851259 - RNA, 19 nt, Artificial Sequence
  Description of Artificial Sequence: Synthetic oligonucleotide
uucugacagaugugaacaa

SEQ ID NO: 2851260 - RNA, 19 nt, Artificial Sequence
  Description of Artificial Sequence: Synthetic oligonucleotide
caguaugcccaugugucag

SEQ ID NO: 2851261 - RNA, 19 nt, Artificial Sequence
  Description of Artificial Sequence: Synthetic oligonucleotide
ucugggucuuguugcagaa

SEQ ID NO: 2851262 - RNA, 19 nt, Artificial Sequence
  Description of Artificial Sequence: Synthetic oligonucleotide
cagccacucuauuaaggac

SEQ ID NO: 2851263 - RNA, 19 nt, Artificial Sequence
  Description of Artificial Sequence: Synthetic oligonucleotide
uacucugggucuuguugca

SEQ ID NO: 2851264 - RNA, 19 nt, Artificial Sequence
  Description of Artificial Sequence: Synthetic oligonucleotide
gagccuaugaaagcucuga

SEQ ID NO: 2851265 - RNA, 19 nt, Artificial Sequence
  Description of Artificial Sequence: Synthetic oligonucleotide
gaaggaaccgauggacgac

SEQ ID NO: 2851266 - RNA, 19 nt, Artificial Sequence
  Description of Artificial Sequence: Synthetic oligonucleotide
aauucccuuaagcgcuuuu

SEQ ID NO: 2851267 - RNA, 19 nt, Artificial Sequence
  Description of Artificial Sequence: Synthetic oligonucleotide
cacuucugcaaggauauca

SEQ ID NO: 2851268 - RNA, 19 nt, Artificial Sequence
  Description of Artificial Sequence: Synthetic oligonucleotide
caaaggccagaaugaaguc

SEQ ID NO: 2851269 - RNA, 19 nt, Artificial Sequence
  Description of Artificial Sequence: Synthetic oligonucleotide
cuuccagaaagacgugguc

SEQ ID NO: 2851270 - RNA, 19 nt, Artificial Sequence
  Description of Artificial Sequence: Synthetic oligonucleotide
gugugcugcaguacguuag

SEQ ID NO: 2851271 - RNA, 19 nt, Artificial Sequence
  Description of Artificial Sequence: Synthetic oligonucleotide
ggacuguugcaguaugccc

SEQ ID NO: 2851272 - RNA, 19 nt, Artificial Sequence
  Description of Artificial Sequence: Synthetic oligonucleotide
cuaugaaagcucugaacua

SEQ ID NO: 2851273 - RNA, 19 nt, Artificial Sequence
  Description of Artificial Sequence: Synthetic oligonucleotide
cuccuuagccaaaggccag

SEQ ID NO: 2851274 - RNA, 19 nt, Artificial Sequence
  Description of Artificial Sequence: Synthetic oligonucleotide
agaaagacguggucauuuu

SEQ ID NO: 2851275 - RNA, 19 nt, Artificial Sequence
  Description of Artificial Sequence: Synthetic oligonucleotide
ccuaugaaagcucugaacu

SEQ ID NO: 2851276 - RNA, 19 nt, Artificial Sequence
  Description of Artificial Sequence: Synthetic oligonucleotide
cacaaagauccacauucca

SEQ ID NO: 2851277 - RNA, 19 nt, Artificial Sequence
  Description of Artificial Sequence: Synthetic oligonucleotide
gaaagacguggucauuuua

SEQ ID NO: 2851278 - RNA, 19 nt, Artificial Sequence
  Description of Artificial Sequence: Synthetic oligonucleotide
augcagccacucuauuaag

SEQ ID NO: 2851279 - RNA, 19 nt, Artificial Sequence
  Description of Artificial Sequence: Synthetic oligonucleotide
augugucagguuucugaca

SEQ ID NO: 2851280 - RNA, 19 nt, Artificial Sequence
  Description of Artificial Sequence: Synthetic oligonucleotide
uucguucgaucaugguaca

SEQ ID NO: 2851281 - RNA, 19 nt, Artificial Sequence
  Description of Artificial Sequence: Synthetic oligonucleotide
acuguugcaguaugcccau

SEQ ID NO: 2851282 - RNA, 19 nt, Artificial Sequence
  Description of Artificial Sequence: Synthetic oligonucleotide
cacauacucacuucugcaa

SEQ ID NO: 2851283 - RNA, 19 nt, Artificial Sequence
  Description of Artificial Sequence: Synthetic oligonucleotide
guacaucagguaaggauca

SEQ ID NO: 2851284 - RNA, 19 nt, Artificial Sequence
  Description of Artificial Sequence: Synthetic oligonucleotide
gcggcuucaggacacuggg

SEQ ID NO: 2851285 - RNA, 19 nt, Artificial Sequence
  Description of Artificial Sequence: Synthetic oligonucleotide
auuuuacugucuuccucuu

SEQ ID NO: 2851286 - RNA, 19 nt, Artificial Sequence
  Description of Artificial Sequence: Synthetic oligonucleotide
gaacaagucuuggagcaaa

SEQ ID NO: 2851287 - RNA, 19 nt, Artificial Sequence
  Description of Artificial Sequence: Synthetic oligonucleotide
cagguuucugacagaugug

SEQ ID NO: 2851288 - RNA, 19 nt, Artificial Sequence
  Description of Artificial Sequence: Synthetic oligonucleotide
gguucguucgaucauggua

SEQ ID NO: 2851289 - RNA, 19 nt, Artificial Sequence
  Description of Artificial Sequence: Synthetic oligonucleotide
auacucacuucugcaagga

SEQ ID NO: 2851290 - RNA, 19 nt, Artificial Sequence
  Description of Artificial Sequence: Synthetic oligonucleotide
acaggcggcuucaggacac

SEQ ID NO: 2851291 - RNA, 19 nt, Artificial Sequence
  Description of Artificial Sequence: Synthetic oligonucleotide
ugggagccuaugaaagcuc

SEQ ID NO: 2851292 - RNA, 19 nt, Artificial Sequence
  Description of Artificial Sequence: Synthetic oligonucleotide
ggacacugggaaccaaugc

SEQ ID NO: 2851293 - RNA, 19 nt, Artificial Sequence
  Description of Artificial Sequence: Synthetic oligonucleotide
uacucucagguucguucga

SEQ ID NO: 2851294 - RNA, 19 nt, Artificial Sequence
  Description of Artificial Sequence: Synthetic oligonucleotide
cugacagaugugaacaagu

SEQ ID NO: 2851295 - RNA, 19 nt, Artificial Sequence
  Description of Artificial Sequence: Synthetic oligonucleotide
acuucugcaaggauaucau

SEQ ID NO: 2851296 - RNA, 19 nt, Artificial Sequence
  Description of Artificial Sequence: Synthetic oligonucleotide
agccuaugaaagcucugaa

SEQ ID NO: 2851297 - RNA, 19 nt, Artificial Sequence
  Description of Artificial Sequence: Synthetic oligonucleotide
uacucacuucugcaaggau

SEQ ID NO: 2851298 - RNA, 19 nt, Artificial Sequence
  Description of Artificial Sequence: Synthetic oligonucleotide
uccgugugcugcaguacgu

SEQ ID NO: 2851299 - RNA, 19 nt, Artificial Sequence
  Description of Artificial Sequence: Synthetic oligonucleotide
cucacuucugcaaggauau

SEQ ID NO: 2851300 - RNA, 19 nt, Artificial Sequence
  Description of Artificial Sequence: Synthetic oligonucleotide
gacgaccgauuuuacuguc

SEQ ID NO: 2851301 - RNA, 19 nt, Artificial Sequence
  Description of Artificial Sequence: Synthetic oligonucleotide
cagaaugaagucgaaggaa

SEQ ID NO: 2851302 - RNA, 19 nt, Artificial Sequence
  Description of Artificial Sequence: Synthetic oligonucleotide
uccauaguugggagccuau

SEQ ID NO: 2851303 - RNA, 19 nt, Artificial Sequence
  Description of Artificial Sequence: Synthetic oligonucleotide
uucaggacacugggaacca

SEQ ID NO: 2851304 - RNA, 19 nt, Artificial Sequence
  Description of Artificial Sequence: Synthetic oligonucleotide
cugcaguacguuagaguuc

SEQ ID NO: 2851305 - RNA, 19 nt, Artificial Sequence
  Description of Artificial Sequence: Synthetic oligonucleotide
gccuaugaaagcucugaac

SEQ ID NO: 2851306 - RNA, 19 nt, Artificial Sequence
  Description of Artificial Sequence: Synthetic oligonucleotide
ugaacaagucuuggagcaa

SEQ ID NO: 2851307 - RNA, 19 nt, Artificial Sequence
  Description of Artificial Sequence: Synthetic oligonucleotide
gcagccacucuauuaagga

SEQ ID NO: 2851308 - RNA, 19 nt, Artificial Sequence
  Description of Artificial Sequence: Synthetic oligonucleotide
agaguucugacaggcggcu

SEQ ID NO: 2851309 - RNA, 19 nt, Artificial Sequence
  Description of Artificial Sequence: Synthetic oligonucleotide
gacaggcggcuucaggaca

SEQ ID NO: 2851310 - RNA, 19 nt, Artificial Sequence
  Description of Artificial Sequence: Synthetic oligonucleotide
accgauggacgaccgauuu

SEQ ID NO: 2851311 - RNA, 19 nt, Artificial Sequence
  Description of Artificial Sequence: Synthetic oligonucleotide
guuuaccacauacucacuu

SEQ ID NO: 2851312 - RNA, 19 nt, Artificial Sequence
  Description of Artificial Sequence: Synthetic oligonucleotide
gaccgauuuuacugucuuc

SEQ ID NO: 2851313 - RNA, 19 nt, Artificial Sequence
  Description of Artificial Sequence: Synthetic oligonucleotide
uucuuauagccagcuuuuc

SEQ ID NO: 2851314 - RNA, 19 nt, Artificial Sequence
  Description of Artificial Sequence: Synthetic oligonucleotide
agcauaccaguugcgccuc

SEQ ID NO: 2851315 - RNA, 19 nt, Artificial Sequence
  Description of Artificial Sequence: Synthetic oligonucleotide
caaugcagccacucuauua

SEQ ID NO: 2851316 - RNA, 19 nt, Artificial Sequence
  Description of Artificial Sequence: Synthetic oligonucleotide
ucuugccuuuccgugugcu

SEQ ID NO: 2851317 - RNA, 19 nt, Artificial Sequence
  Description of Artificial Sequence: Synthetic oligonucleotide
ggaucaucagcauaccagu

SEQ ID NO: 2851318 - RNA, 19 nt, Artificial Sequence
  Description of Artificial Sequence: Synthetic oligonucleotide
ugcccaugugucagguuuc

SEQ ID NO: 2851319 - RNA, 19 nt, Artificial Sequence
  Description of Artificial Sequence: Synthetic oligonucleotide
uuuccgugugcugcaguac

SEQ ID NO: 2851320 - RNA, 19 nt, Artificial Sequence
  Description of Artificial Sequence: Synthetic oligonucleotide
aggacacugggaaccaaug

SEQ ID NO: 2851321 - RNA, 19 nt, Artificial Sequence
  Description of Artificial Sequence: Synthetic oligonucleotide
gucuuguugcagaacacaa

SEQ ID NO: 2851322 - RNA, 19 nt, Artificial Sequence
  Description of Artificial Sequence: Synthetic oligonucleotide
uccuuagccaaaggccaga

SEQ ID NO: 2851323 - RNA, 19 nt, Artificial Sequence
  Description of Artificial Sequence: Synthetic oligonucleotide
uuguacaguuuaccacaua

SEQ ID NO: 2851324 - RNA, 19 nt, Artificial Sequence
  Description of Artificial Sequence: Synthetic oligonucleotide
gguaaggaucaucagcaua

SEQ ID NO: 2851325 - RNA, 19 nt, Artificial Sequence
  Description of Artificial Sequence: Synthetic oligonucleotide
agguaaggaucaucagcau

SEQ ID NO: 2851326 - RNA, 19 nt, Artificial Sequence
  Description of Artificial Sequence: Synthetic oligonucleotide
cucucagguucguucgauc

SEQ ID NO: 2851327 - RNA, 19 nt, Artificial Sequence
  Description of Artificial Sequence: Synthetic oligonucleotide
ucauuuuauccaggaguuu

SEQ ID NO: 2851328 - RNA, 19 nt, Artificial Sequence
  Description of Artificial Sequence: Synthetic oligonucleotide
gucauuuuauccaggaguu

SEQ ID NO: 2851329 - RNA, 19 nt, Artificial Sequence
  Description of Artificial Sequence: Synthetic oligonucleotide
auccaggaguuuacucugg

SEQ ID NO: 2851330 - RNA, 19 nt, Artificial Sequence
  Description of Artificial Sequence: Synthetic oligonucleotide
gcugcaguacguuagaguu

SEQ ID NO: 2851331 - RNA, 19 nt, Artificial Sequence
  Description of Artificial Sequence: Synthetic oligonucleotide
gauggacgaccgauuuuac

SEQ ID NO: 2851332 - RNA, 19 nt, Artificial Sequence
  Description of Artificial Sequence: Synthetic oligonucleotide
gccucuuccagaaagacgu

SEQ ID NO: 2851333 - RNA, 19 nt, Artificial Sequence
  Description of Artificial Sequence: Synthetic oligonucleotide
ccaugugucagguuucuga

SEQ ID NO: 2851334 - RNA, 19 nt, Artificial Sequence
  Description of Artificial Sequence: Synthetic oligonucleotide
cguuagaguucugacaggc

SEQ ID NO: 2851335 - RNA, 19 nt, Artificial Sequence
  Description of Artificial Sequence: Synthetic oligonucleotide
gaaccaaugcagccacucu

SEQ ID NO: 2851336 - RNA, 19 nt, Artificial Sequence
  Description of Artificial Sequence: Synthetic oligonucleotide
accaaugcagccacucuau

SEQ ID NO: 2851337 - RNA, 19 nt, Artificial Sequence
  Description of Artificial Sequence: Synthetic oligonucleotide
aguuuacucugggucuugu

SEQ ID NO: 2851338 - RNA, 19 nt, Artificial Sequence
  Description of Artificial Sequence: Synthetic oligonucleotide
cuuuccgugugcugcagua

SEQ ID NO: 2851339 - RNA, 19 nt, Artificial Sequence
  Description of Artificial Sequence: Synthetic oligonucleotide
cugggaaccaaugcagcca

SEQ ID NO: 2851340 - RNA, 19 nt, Artificial Sequence
  Description of Artificial Sequence: Synthetic oligonucleotide
gaguuuacucugggucuug

SEQ ID NO: 2851341 - RNA, 19 nt, Artificial Sequence
  Description of Artificial Sequence: Synthetic oligonucleotide
aggaaccgauggacgaccg

SEQ ID NO: 2851342 - RNA, 19 nt, Artificial Sequence
  Description of Artificial Sequence: Synthetic oligonucleotide
caguacguuagaguucuga

SEQ ID NO: 2851343 - RNA, 19 nt, Artificial Sequence
  Description of Artificial Sequence: Synthetic oligonucleotide
uuccauaguugggagccua

SEQ ID NO: 2851344 - RNA, 19 nt, Artificial Sequence
  Description of Artificial Sequence: Synthetic oligonucleotide
ggaaccaaugcagccacuc

SEQ ID NO: 2851345 - RNA, 19 nt, Artificial Sequence
  Description of Artificial Sequence: Synthetic oligonucleotide
agccagcuuuucuccuuag

SEQ ID NO: 2851346 - RNA, 19 nt, Artificial Sequence
  Description of Artificial Sequence: Synthetic oligonucleotide
caaggauaucauguacaca

SEQ ID NO: 2851347 - RNA, 19 nt, Artificial Sequence
  Description of Artificial Sequence: Synthetic oligonucleotide
ccagaaugaagucgaagga

SEQ ID NO: 2851348 - RNA, 19 nt, Artificial Sequence
  Description of Artificial Sequence: Synthetic oligonucleotide
agguucguucgaucauggu

SEQ ID NO: 2851349 - RNA, 19 nt, Artificial Sequence
  Description of Artificial Sequence: Synthetic oligonucleotide
ggucuuguugcagaacaca

SEQ ID NO: 2851350 - RNA, 19 nt, Artificial Sequence
  Description of Artificial Sequence: Synthetic oligonucleotide
acuauacucucagguucgu

SEQ ID NO: 2851351 - RNA, 19 nt, Artificial Sequence
  Description of Artificial Sequence: Synthetic oligonucleotide
gaaccgauggacgaccgau

SEQ ID NO: 2851352 - RNA, 19 nt, Artificial Sequence
  Description of Artificial Sequence: Synthetic oligonucleotide
ccaguugcgccucuuccag

SEQ ID NO: 2851353 - RNA, 19 nt, Artificial Sequence
  Description of Artificial Sequence: Synthetic oligonucleotide
agccaaaggccagaaugaa

SEQ ID NO: 2851354 - RNA, 19 nt, Artificial Sequence
  Description of Artificial Sequence: Synthetic oligonucleotide
ggcggcuucaggacacugg

SEQ ID NO: 2851355 - RNA, 19 nt, Artificial Sequence
  Description of Artificial Sequence: Synthetic oligonucleotide
aguuuaccacauacucacu

SEQ ID NO: 2851356 - RNA, 19 nt, Artificial Sequence
  Description of Artificial Sequence: Synthetic oligonucleotide
ggccagaaugaagucgaag

SEQ ID NO: 2851357 - RNA, 19 nt, Artificial Sequence
  Description of Artificial Sequence: Synthetic oligonucleotide
aaauucccuuaagcgcuuu

SEQ ID NO: 2851358 - RNA, 19 nt, Artificial Sequence
  Description of Artificial Sequence: Synthetic oligonucleotide
aggauaucauguacacaaa

SEQ ID NO: 2851359 - RNA, 19 nt, Artificial Sequence
  Description of Artificial Sequence: Synthetic oligonucleotide
gucagguuucugacagaug

SEQ ID NO: 2851360 - RNA, 19 nt, Artificial Sequence
  Description of Artificial Sequence: Synthetic oligonucleotide
gccacucuauuaaggacug

SEQ ID NO: 2851361 - RNA, 19 nt, Artificial Sequence
  Description of Artificial Sequence: Synthetic oligonucleotide
augguacaucagguaagga

SEQ ID NO: 2851362 - RNA, 19 nt, Artificial Sequence
  Description of Artificial Sequence: Synthetic oligonucleotide
augaaagcucugaacuaua

SEQ ID NO: 2851363 - RNA, 19 nt, Artificial Sequence
  Description of Artificial Sequence: Synthetic oligonucleotide
uacaucagguaaggaucau

SEQ ID NO: 2851364 - RNA, 19 nt, Artificial Sequence
  Description of Artificial Sequence: Synthetic oligonucleotide
cuuccucuugccuuuccgu

SEQ ID NO: 2851365 - RNA, 19 nt, Artificial Sequence
  Description of Artificial Sequence: Synthetic oligonucleotide
ccacauacucacuucugca

SEQ ID NO: 2851366 - RNA, 19 nt, Artificial Sequence
  Description of Artificial Sequence: Synthetic oligonucleotide
acgaccgauuuuacugucu

SEQ ID NO: 2851367 - RNA, 19 nt, Artificial Sequence
  Description of Artificial Sequence: Synthetic oligonucleotide
uaugcccaugugucagguu

SEQ ID NO: 2851368 - RNA, 19 nt, Artificial Sequence
  Description of Artificial Sequence: Synthetic oligonucleotide
auuccauaguugggagccu

SEQ ID NO: 2851369 - RNA, 19 nt, Artificial Sequence
  Description of Artificial Sequence: Synthetic oligonucleotide
gcaguaugcccauguguca

SEQ ID NO: 2851370 - RNA, 19 nt, Artificial Sequence
  Description of Artificial Sequence: Synthetic oligonucleotide
aaccgauggacgaccgauu

SEQ ID NO: 2851371 - RNA, 19 nt, Artificial Sequence
  Description of Artificial Sequence: Synthetic oligonucleotide
uucugacaggcggcuucag

SEQ ID NO: 2851372 - RNA, 19 nt, Artificial Sequence
  Description of Artificial Sequence: Synthetic oligonucleotide
acucucagguucguucgau

SEQ ID NO: 2851373 - RNA, 19 nt, Artificial Sequence
  Description of Artificial Sequence: Synthetic oligonucleotide
gccagcuuuucuccuuagc

SEQ ID NO: 2851374 - RNA, 19 nt, Artificial Sequence
  Description of Artificial Sequence: Synthetic oligonucleotide
guucugacaggcggcuuca

SEQ ID NO: 2851375 - RNA, 19 nt, Artificial Sequence
  Description of Artificial Sequence: Synthetic oligonucleotide
cgauuuuacugucuuccuc

SEQ ID NO: 2851376 - RNA, 19 nt, Artificial Sequence
  Description of Artificial Sequence: Synthetic oligonucleotide
cguggucauuuuauccagg

SEQ ID NO: 2851377 - RNA, 19 nt, Artificial Sequence
  Description of Artificial Sequence: Synthetic oligonucleotide
ccacauuccauaguuggga

SEQ ID NO: 2851378 - RNA, 19 nt, Artificial Sequence
  Description of Artificial Sequence: Synthetic oligonucleotide
ucaggacacugggaaccaa

SEQ ID NO: 2851379 - RNA, 19 nt, Artificial Sequence
  Description of Artificial Sequence: Synthetic oligonucleotide
guacacaaagauccacauu

SEQ ID NO: 2851380 - RNA, 19 nt, Artificial Sequence
  Description of Artificial Sequence: Synthetic oligonucleotide
ucguucgaucaugguacau

SEQ ID NO: 2851381 - RNA, 19 nt, Artificial Sequence
  Description of Artificial Sequence: Synthetic oligonucleotide
cacucuauuaaggacuguu

SEQ ID NO: 2851382 - RNA, 19 nt, Artificial Sequence
  Description of Artificial Sequence: Synthetic oligonucleotide
ccucuugccuuuccgugug

SEQ ID NO: 2851383 - RNA, 19 nt, Artificial Sequence
  Description of Artificial Sequence: Synthetic oligonucleotide
ggacgaccgauuuuacugu

SEQ ID NO: 2851384 - RNA, 19 nt, Artificial Sequence
  Description of Artificial Sequence: Synthetic oligonucleotide
cguucgaucaugguacauc

SEQ ID NO: 2851385 - RNA, 19 nt, Artificial Sequence
  Description of Artificial Sequence: Synthetic oligonucleotide
gugucagguuucugacaga

SEQ ID NO: 2851386 - RNA, 19 nt, Artificial Sequence
  Description of Artificial Sequence: Synthetic oligonucleotide
cagaaagacguggucauuu

SEQ ID NO: 2851387 - RNA, 19 nt, Artificial Sequence
  Description of Artificial Sequence: Synthetic oligonucleotide
ggagccuaugaaagcucug

SEQ ID NO: 2851388 - RNA, 19 nt, Artificial Sequence
  Description of Artificial Sequence: Synthetic oligonucleotide
gaucaucagcauaccaguu

SEQ ID NO: 2851389 - RNA, 19 nt, Artificial Sequence
  Description of Artificial Sequence: Synthetic oligonucleotide
gguuucugacagaugugaa

SEQ ID NO: 2851390 - RNA, 19 nt, Artificial Sequence
  Description of Artificial Sequence: Synthetic oligonucleotide
guuguacaguuuaccacau

SEQ ID NO: 2851391 - RNA, 19 nt, Artificial Sequence
  Description of Artificial Sequence: Synthetic oligonucleotide
gcucugaacuauacucuca

SEQ ID NO: 2851392 - RNA, 19 nt, Artificial Sequence
  Description of Artificial Sequence: Synthetic oligonucleotide
gggucuuguugcagaacac

SEQ ID NO: 2851393 - RNA, 19 nt, Artificial Sequence
  Description of Artificial Sequence: Synthetic oligonucleotide
caggacacugggaaccaau

SEQ ID NO: 2851394 - RNA, 19 nt, Artificial Sequence
  Description of Artificial Sequence: Synthetic oligonucleotide
ggaaccgauggacgaccga

SEQ ID NO: 2851395 - RNA, 19 nt, Artificial Sequence
  Description of Artificial Sequence: Synthetic oligonucleotide
guuuacucugggucuuguu

SEQ ID NO: 2851396 - RNA, 19 nt, Artificial Sequence
  Description of Artificial Sequence: Synthetic oligonucleotide
gcagaacacaaauucccuu

SEQ ID NO: 2851397 - RNA, 19 nt, Artificial Sequence
  Description of Artificial Sequence: Synthetic oligonucleotide
ccauaguugggagccuaug

SEQ ID NO: 2851398 - RNA, 19 nt, Artificial Sequence
  Description of Artificial Sequence: Synthetic oligonucleotide
guaugcccaugugucaggu

SEQ ID NO: 2851399 - RNA, 19 nt, Artificial Sequence
  Description of Artificial Sequence: Synthetic oligonucleotide
caguugcgccucuuccaga

SEQ ID NO: 2851400 - RNA, 19 nt, Artificial Sequence
  Description of Artificial Sequence: Synthetic oligonucleotide
aggcggcuucaggacacug

SEQ ID NO: 2851401 - RNA, 19 nt, Artificial Sequence
  Description of Artificial Sequence: Synthetic oligonucleotide
cucagguucguucgaucau

SEQ ID NO: 2851402 - RNA, 19 nt, Artificial Sequence
  Description of Artificial Sequence: Synthetic oligonucleotide
guugcgccucuuccagaaa

SEQ ID NO: 2851403 - RNA, 19 nt, Artificial Sequence
  Description of Artificial Sequence: Synthetic oligonucleotide
cgaucaugguacaucaggu

SEQ ID NO: 2851404 - RNA, 19 nt, Artificial Sequence
  Description of Artificial Sequence: Synthetic oligonucleotide
cuuagccaaaggccagaau

SEQ ID NO: 2851405 - RNA, 19 nt, Artificial Sequence
  Description of Artificial Sequence: Synthetic oligonucleotide
caaauucccuuaagcgcuu

SEQ ID NO: 2851406 - RNA, 19 nt, Artificial Sequence
  Description of Artificial Sequence: Synthetic oligonucleotide
cuguugcaguaugcccaug

SEQ ID NO: 2851407 - RNA, 19 nt, Artificial Sequence
  Description of Artificial Sequence: Synthetic oligonucleotide
gggagccuaugaaagcucu

SEQ ID NO: 2851408 - RNA, 19 nt, Artificial Sequence
  Description of Artificial Sequence: Synthetic oligonucleotide
cgauggacgaccgauuuua

SEQ ID NO: 2851409 - RNA, 19 nt, Artificial Sequence
  Description of Artificial Sequence: Synthetic oligonucleotide
aggccagaaugaagucgaa

SEQ ID NO: 2851410 - RNA, 19 nt, Artificial Sequence
  Description of Artificial Sequence: Synthetic oligonucleotide
gcuuuucuccuuagccaaa

SEQ ID NO: 2851411 - RNA, 19 nt, Artificial Sequence
  Description of Artificial Sequence: Synthetic oligonucleotide
ccgauuuuacugucuuccu

SEQ ID NO: 2851412 - RNA, 19 nt, Artificial Sequence
  Description of Artificial Sequence: Synthetic oligonucleotide
ggaguuuacucugggucuu

SEQ ID NO: 2851413 - RNA, 19 nt, Artificial Sequence
  Description of Artificial Sequence: Synthetic oligonucleotide
gccuuuccgugugcugcag

SEQ ID NO: 2851414 - RNA, 19 nt, Artificial Sequence
  Description of Artificial Sequence: Synthetic oligonucleotide
ccaggaguuuacucugggu

SEQ ID NO: 2851415 - RNA, 19 nt, Artificial Sequence
  Description of Artificial Sequence: Synthetic oligonucleotide
cuauacucucagguucguu

SEQ ID NO: 2851416 - RNA, 19 nt, Artificial Sequence
  Description of Artificial Sequence: Synthetic oligonucleotide
cccaugugucagguuucug

SEQ ID NO: 2851417 - RNA, 19 nt, Artificial Sequence
  Description of Artificial Sequence: Synthetic oligonucleotide
ccuuagccaaaggccagaa

SEQ ID NO: 2851418 - RNA, 19 nt, Artificial Sequence
  Description of Artificial Sequence: Synthetic oligonucleotide
cgugugcugcaguacguua

SEQ ID NO: 2851419 - RNA, 19 nt, Artificial Sequence
  Description of Artificial Sequence: Synthetic oligonucleotide
gaguucugacaggcggcuu

SEQ ID NO: 2851420 - RNA, 19 nt, Artificial Sequence
  Description of Artificial Sequence: Synthetic oligonucleotide
cauaccaguugcgccucuu

SEQ ID NO: 2851421 - RNA, 19 nt, Artificial Sequence
  Description of Artificial Sequence: Synthetic oligonucleotide
gcaguacguuagaguucug

SEQ ID NO: 2851422 - RNA, 19 nt, Artificial Sequence
  Description of Artificial Sequence: Synthetic oligonucleotide
gcccaugugucagguuucu

SEQ ID NO: 2851423 - RNA, 19 nt, Artificial Sequence
  Description of Artificial Sequence: Synthetic oligonucleotide
gcauaccaguugcgccucu

SEQ ID NO: 2851424 - RNA, 19 nt, Artificial Sequence
  Description of Artificial Sequence: Synthetic oligonucleotide
cgaccgauuuuacugucuu

SEQ ID NO: 2851425 - RNA, 19 nt, Artificial Sequence
  Description of Artificial Sequence: Synthetic oligonucleotide
ccuuuccgugugcugcagu

SEQ ID NO: 2851426 - RNA, 19 nt, Artificial Sequence
  Description of Artificial Sequence: Synthetic oligonucleotide
gggaaccaaugcagccacu

SEQ ID NO: 2851427 - RNA, 19 nt, Artificial Sequence
  Description of Artificial Sequence: Synthetic oligonucleotide
ccaaugcagccacucuauu

SEQ ID NO: 2851428 - RNA, 19 nt, Artificial Sequence
  Description of Artificial Sequence: Synthetic oligonucleotide
caggcggcuucaggacacu

SEQ ID NO: 2851429 - RNA, 19 nt, Artificial Sequence
  Description of Artificial Sequence: Synthetic oligonucleotide
ccgauggacgaccgauuuu

SEQ ID NO: 2851430 - RNA, 19 nt, Artificial Sequence
  Description of Artificial Sequence: Synthetic oligonucleotide
ccagaaagacguggucauu

SEQ ID NO: 2851431 - RNA, 19 nt, Artificial Sequence
  Description of Artificial Sequence: Synthetic oligonucleotide
ccacucuauuaaggacugu

SEQ ID NO: 2851432 - RNA, 19 nt, Artificial Sequence
  Description of Artificial Sequence: Synthetic oligonucleotide
ccgugugcugcaguacguu

SEQ ID NO: 2851433 - RNA, 19 nt, Artificial Sequence
  Description of Artificial Sequence: Synthetic oligonucleotide
uuugcuaacacaauagcgc

SEQ ID NO: 2851434 - RNA, 19 nt, Artificial Sequence
  Description of Artificial Sequence: Synthetic oligonucleotide
aagauguuaucauaguucu

SEQ ID NO: 2851435 - RNA, 19 nt, Artificial Sequence
  Description of Artificial Sequence: Synthetic oligonucleotide
ucauaguucuucuugacga

SEQ ID NO: 2851436 - RNA, 19 nt, Artificial Sequence
  Description of Artificial Sequence: Synthetic oligonucleotide
guuaucauaguucuucuug

SEQ ID NO: 2851437 - RNA, 19 nt, Artificial Sequence
  Description of Artificial Sequence: Synthetic oligonucleotide
caagauguuaucauaguuc

SEQ ID NO: 2851438 - RNA, 19 nt, Artificial Sequence
  Description of Artificial Sequence: Synthetic oligonucleotide
uucuucuugacgaugggcu

SEQ ID NO: 2851439 - RNA, 19 nt, Artificial Sequence
  Description of Artificial Sequence: Synthetic oligonucleotide
uuaucauaguucuucuuga

SEQ ID NO: 2851440 - RNA, 19 nt, Artificial Sequence
  Description of Artificial Sequence: Synthetic oligonucleotide
guuugcuaacacaauagcg

SEQ ID NO: 2851441 - RNA, 19 nt, Artificial Sequence
  Description of Artificial Sequence: Synthetic oligonucleotide
agcgcugacacucaagaug

SEQ ID NO: 2851442 - RNA, 19 nt, Artificial Sequence
  Description of Artificial Sequence: Synthetic oligonucleotide
ucaagauguuaucauaguu

SEQ ID NO: 2851443 - RNA, 19 nt, Artificial Sequence
  Description of Artificial Sequence: Synthetic oligonucleotide
ugacgaugggcucauagaa

SEQ ID NO: 2851444 - RNA, 19 nt, Artificial Sequence
  Description of Artificial Sequence: Synthetic oligonucleotide
uugcuaacacaauagcgcu

SEQ ID NO: 2851445 - RNA, 19 nt, Artificial Sequence
  Description of Artificial Sequence: Synthetic oligonucleotide
uguauucuucccacgugug

SEQ ID NO: 2851446 - RNA, 19 nt, Artificial Sequence
  Description of Artificial Sequence: Synthetic oligonucleotide
uauucuucccacgugugca

SEQ ID NO: 2851447 - RNA, 19 nt, Artificial Sequence
  Description of Artificial Sequence: Synthetic oligonucleotide
cuugacgaugggcucauag

SEQ ID NO: 2851448 - RNA, 19 nt, Artificial Sequence
  Description of Artificial Sequence: Synthetic oligonucleotide
uugacgaugggcucauaga

SEQ ID NO: 2851449 - RNA, 19 nt, Artificial Sequence
  Description of Artificial Sequence: Synthetic oligonucleotide
uaucauaguucuucuugac

SEQ ID NO: 2851450 - RNA, 19 nt, Artificial Sequence
  Description of Artificial Sequence: Synthetic oligonucleotide
agguuugcuaacacaauag

SEQ ID NO: 2851451 - RNA, 19 nt, Artificial Sequence
  Description of Artificial Sequence: Synthetic oligonucleotide
gacacucaagauguuauca

SEQ ID NO: 2851452 - RNA, 19 nt, Artificial Sequence
  Description of Artificial Sequence: Synthetic oligonucleotide
auguuaucauaguucuucu

SEQ ID NO: 2851453 - RNA, 19 nt, Artificial Sequence
  Description of Artificial Sequence: Synthetic oligonucleotide
gguuugcuaacacaauagc

SEQ ID NO: 2851454 - RNA, 19 nt, Artificial Sequence
  Description of Artificial Sequence: Synthetic oligonucleotide
guauucuucccacgugugc

SEQ ID NO: 2851455 - RNA, 19 nt, Artificial Sequence
  Description of Artificial Sequence: Synthetic oligonucleotide
cagagguuugcuaacacaa

SEQ ID NO: 2851456 - RNA, 19 nt, Artificial Sequence
  Description of Artificial Sequence: Synthetic oligonucleotide
acacucaagauguuaucau

SEQ ID NO: 2851457 - RNA, 19 nt, Artificial Sequence
  Description of Artificial Sequence: Synthetic oligonucleotide
gagguuugcuaacacaaua

SEQ ID NO: 2851458 - RNA, 19 nt, Artificial Sequence
  Description of Artificial Sequence: Synthetic oligonucleotide
ucuucccacgugugcaucc

SEQ ID NO: 2851459 - RNA, 19 nt, Artificial Sequence
  Description of Artificial Sequence: Synthetic oligonucleotide
auaguucuucuugacgaug

SEQ ID NO: 2851460 - RNA, 19 nt, Artificial Sequence
  Description of Artificial Sequence: Synthetic oligonucleotide
acgugugcauccucucuuc

SEQ ID NO: 2851461 - RNA, 19 nt, Artificial Sequence
  Description of Artificial Sequence: Synthetic oligonucleotide
uguuaucauaguucuucuu

SEQ ID NO: 2851462 - RNA, 19 nt, Artificial Sequence
  Description of Artificial Sequence: Synthetic oligonucleotide
ugacacucaagauguuauc

SEQ ID NO: 2851463 - RNA, 19 nt, Artificial Sequence
  Description of Artificial Sequence: Synthetic oligonucleotide
ucccacgugugcauccucu

SEQ ID NO: 2851464 - RNA, 19 nt, Artificial Sequence
  Description of Artificial Sequence: Synthetic oligonucleotide
auucuucccacgugugcau

SEQ ID NO: 2851465 - RNA, 19 nt, Artificial Sequence
  Description of Artificial Sequence: Synthetic oligonucleotide
cacucaagauguuaucaua

SEQ ID NO: 2851466 - RNA, 19 nt, Artificial Sequence
  Description of Artificial Sequence: Synthetic oligonucleotide
cugacacucaagauguuau

SEQ ID NO: 2851467 - RNA, 19 nt, Artificial Sequence
  Description of Artificial Sequence: Synthetic oligonucleotide
cucaagauguuaucauagu

SEQ ID NO: 2851468 - RNA, 19 nt, Artificial Sequence
  Description of Artificial Sequence: Synthetic oligonucleotide
cuucuugacgaugggcuca

SEQ ID NO: 2851469 - RNA, 19 nt, Artificial Sequence
  Description of Artificial Sequence: Synthetic oligonucleotide
uagcgcugacacucaagau

SEQ ID NO: 2851470 - RNA, 19 nt, Artificial Sequence
  Description of Artificial Sequence: Synthetic oligonucleotide
agagguuugcuaacacaau

SEQ ID NO: 2851471 - RNA, 19 nt, Artificial Sequence
  Description of Artificial Sequence: Synthetic oligonucleotide
uucuugacgaugggcucau

SEQ ID NO: 2851472 - RNA, 19 nt, Artificial Sequence
  Description of Artificial Sequence: Synthetic oligonucleotide
uucuucccacgugugcauc

SEQ ID NO: 2851473 - RNA, 19 nt, Artificial Sequence
  Description of Artificial Sequence: Synthetic oligonucleotide
uucccacgugugcauccuc

SEQ ID NO: 2851474 - RNA, 19 nt, Artificial Sequence
  Description of Artificial Sequence: Synthetic oligonucleotide
cauaguucuucuugacgau

SEQ ID NO: 2851475 - RNA, 19 nt, Artificial Sequence
  Description of Artificial Sequence: Synthetic oligonucleotide
agauguuaucauaguucuu

SEQ ID NO: 2851476 - RNA, 19 nt, Artificial Sequence
  Description of Artificial Sequence: Synthetic oligonucleotide
gcugacacucaagauguua

SEQ ID NO: 2851477 - RNA, 19 nt, Artificial Sequence
  Description of Artificial Sequence: Synthetic oligonucleotide
gcgcugacacucaagaugu

SEQ ID NO: 2851478 - RNA, 19 nt, Artificial Sequence
  Description of Artificial Sequence: Synthetic oligonucleotide
cacgugugcauccucucuu

SEQ ID NO: 2851479 - RNA, 19 nt, Artificial Sequence
  Description of Artificial Sequence: Synthetic oligonucleotide
ucuugacgaugggcucaua

SEQ ID NO: 2851480 - RNA, 19 nt, Artificial Sequence
  Description of Artificial Sequence: Synthetic oligonucleotide
cuucccacgugugcauccu

SEQ ID NO: 2851481 - RNA, 19 nt, Artificial Sequence
  Description of Artificial Sequence: Synthetic oligonucleotide
ccacgugugcauccucucu

SEQ ID NO: 2851482 - RNA, 19 nt, Artificial Sequence
  Description of Artificial Sequence: Synthetic oligonucleotide
cgcugacacucaagauguu

SEQ ID NO: 2851483 - RNA, 19 nt, Artificial Sequence
  Description of Artificial Sequence: Synthetic oligonucleotide
auaaauauugccauuaucc

SEQ ID NO: 2851484 - RNA, 19 nt, Artificial Sequence
  Description of Artificial Sequence: Synthetic oligonucleotide
agugauuuuguauuuaugc

SEQ ID NO: 2851485 - RNA, 19 nt, Artificial Sequence
  Description of Artificial Sequence: Synthetic oligonucleotide
acugguauaauccuucucc

SEQ ID NO: 2851486 - RNA, 19 nt, Artificial Sequence
  Description of Artificial Sequence: Synthetic oligonucleotide
aauauugccauuauccacc

SEQ ID NO: 2851487 - RNA, 19 nt, Artificial Sequence
  Description of Artificial Sequence: Synthetic oligonucleotide
aaauauugccauuauccac

SEQ ID NO: 2851488 - RNA, 19 nt, Artificial Sequence
  Description of Artificial Sequence: Synthetic oligonucleotide
uuauagacugguauaaucc

SEQ ID NO: 2851489 - RNA, 19 nt, Artificial Sequence
  Description of Artificial Sequence: Synthetic oligonucleotide
ucugucauggacaacagca

SEQ ID NO: 2851490 - RNA, 19 nt, Artificial Sequence
  Description of Artificial Sequence: Synthetic oligonucleotide
aaaaugaccacuucucugu

SEQ ID NO: 2851491 - RNA, 19 nt, Artificial Sequence
  Description of Artificial Sequence: Synthetic oligonucleotide
aauguccauagcaugauac

SEQ ID NO: 2851492 - RNA, 19 nt, Artificial Sequence
  Description of Artificial Sequence: Synthetic oligonucleotide
uuugugguagaaaaugacc

SEQ ID NO: 2851493 - RNA, 19 nt, Artificial Sequence
  Description of Artificial Sequence: Synthetic oligonucleotide
uuuaaaagguuccucagaa

SEQ ID NO: 2851494 - RNA, 19 nt, Artificial Sequence
  Description of Artificial Sequence: Synthetic oligonucleotide
auugccauuauccaccguc

SEQ ID NO: 2851495 - RNA, 19 nt, Artificial Sequence
  Description of Artificial Sequence: Synthetic oligonucleotide
uuguauuuaugccaggggc

SEQ ID NO: 2851496 - RNA, 19 nt, Artificial Sequence
  Description of Artificial Sequence: Synthetic oligonucleotide
uuuaucaggaagaacucug

SEQ ID NO: 2851497 - RNA, 19 nt, Artificial Sequence
  Description of Artificial Sequence: Synthetic oligonucleotide
uuuguauuuaugccagggg

SEQ ID NO: 2851498 - RNA, 19 nt, Artificial Sequence
  Description of Artificial Sequence: Synthetic oligonucleotide
ugauuuuguauuuaugcca

SEQ ID NO: 2851499 - RNA, 19 nt, Artificial Sequence
  Description of Artificial Sequence: Synthetic oligonucleotide
cagagucacauuuaaaagg

SEQ ID NO: 2851500 - RNA, 19 nt, Artificial Sequence
  Description of Artificial Sequence: Synthetic oligonucleotide
ucugaugucauccucucug

SEQ ID NO: 2851501 - RNA, 19 nt, Artificial Sequence
  Description of Artificial Sequence: Synthetic oligonucleotide
uugugguagaaaaugacca

SEQ ID NO: 2851502 - RNA, 19 nt, Artificial Sequence
  Description of Artificial Sequence: Synthetic oligonucleotide
gaaagugucacauaaauau

SEQ ID NO: 2851503 - RNA, 19 nt, Artificial Sequence
  Description of Artificial Sequence: Synthetic oligonucleotide
aaacuauacaugacugucc

SEQ ID NO: 2851504 - RNA, 19 nt, Artificial Sequence
  Description of Artificial Sequence: Synthetic oligonucleotide
aauccuuugcuuuacuccu

SEQ ID NO: 2851505 - RNA, 19 nt, Artificial Sequence
  Description of Artificial Sequence: Synthetic oligonucleotide
uaaauauugccauuaucca

SEQ ID NO: 2851506 - RNA, 19 nt, Artificial Sequence
  Description of Artificial Sequence: Synthetic oligonucleotide
ucagagucacauuuaaaag

SEQ ID NO: 2851507 - RNA, 19 nt, Artificial Sequence
  Description of Artificial Sequence: Synthetic oligonucleotide
uuuuguauuuaugccaggg

SEQ ID NO: 2851508 - RNA, 19 nt, Artificial Sequence
  Description of Artificial Sequence: Synthetic oligonucleotide
aguguaaggguccuccagc

SEQ ID NO: 2851509 - RNA, 19 nt, Artificial Sequence
  Description of Artificial Sequence: Synthetic oligonucleotide
gaauccuuugcuuuacucc

SEQ ID NO: 2851510 - RNA, 19 nt, Artificial Sequence
  Description of Artificial Sequence: Synthetic oligonucleotide
aacuauacaugacugucca

SEQ ID NO: 2851511 - RNA, 19 nt, Artificial Sequence
  Description of Artificial Sequence: Synthetic oligonucleotide
aucagagucacauuuaaaa

SEQ ID NO: 2851512 - RNA, 19 nt, Artificial Sequence
  Description of Artificial Sequence: Synthetic oligonucleotide
uuuauagacugguauaauc

SEQ ID NO: 2851513 - RNA, 19 nt, Artificial Sequence
  Description of Artificial Sequence: Synthetic oligonucleotide
gauuuuguauuuaugccag

SEQ ID NO: 2851514 - RNA, 19 nt, Artificial Sequence
  Description of Artificial Sequence: Synthetic oligonucleotide
ucucugccaacacagacag

SEQ ID NO: 2851515 - RNA, 19 nt, Artificial Sequence
  Description of Artificial Sequence: Synthetic oligonucleotide
aaagguuccucagaaagug

SEQ ID NO: 2851516 - RNA, 19 nt, Artificial Sequence
  Description of Artificial Sequence: Synthetic oligonucleotide
auaauccuucuccuguugc

SEQ ID NO: 2851517 - RNA, 19 nt, Artificial Sequence
  Description of Artificial Sequence: Synthetic oligonucleotide
uguauuuaugccaggggca

SEQ ID NO: 2851518 - RNA, 19 nt, Artificial Sequence
  Description of Artificial Sequence: Synthetic oligonucleotide
aacacagacagaagugugc

SEQ ID NO: 2851519 - RNA, 19 nt, Artificial Sequence
  Description of Artificial Sequence: Synthetic oligonucleotide
uuguucagagauuccaggg

SEQ ID NO: 2851520 - RNA, 19 nt, Artificial Sequence
  Description of Artificial Sequence: Synthetic oligonucleotide
cuuugaauucuccaguggc

SEQ ID NO: 2851521 - RNA, 19 nt, Artificial Sequence
  Description of Artificial Sequence: Synthetic oligonucleotide
uuugcuuuacuccuuugga

SEQ ID NO: 2851522 - RNA, 19 nt, Artificial Sequence
  Description of Artificial Sequence: Synthetic oligonucleotide
gaaaaugaccacuucucug

SEQ ID NO: 2851523 - RNA, 19 nt, Artificial Sequence
  Description of Artificial Sequence: Synthetic oligonucleotide
ugacuguccauugaaaucc

SEQ ID NO: 2851524 - RNA, 19 nt, Artificial Sequence
  Description of Artificial Sequence: Synthetic oligonucleotide
uagaaaaugaccacuucuc

SEQ ID NO: 2851525 - RNA, 19 nt, Artificial Sequence
  Description of Artificial Sequence: Synthetic oligonucleotide
aaauccucaauuucuccca

SEQ ID NO: 2851526 - RNA, 19 nt, Artificial Sequence
  Description of Artificial Sequence: Synthetic oligonucleotide
agaagugugcuucuucuuc

SEQ ID NO: 2851527 - RNA, 19 nt, Artificial Sequence
  Description of Artificial Sequence: Synthetic oligonucleotide
cucaucaucuuguucagag

SEQ ID NO: 2851528 - RNA, 19 nt, Artificial Sequence
  Description of Artificial Sequence: Synthetic oligonucleotide
aagugucacauaaauauug

SEQ ID NO: 2851529 - RNA, 19 nt, Artificial Sequence
  Description of Artificial Sequence: Synthetic oligonucleotide
ugcuuuacuccuuuggagc

SEQ ID NO: 2851530 - RNA, 19 nt, Artificial Sequence
  Description of Artificial Sequence: Synthetic oligonucleotide
ucuucuucucaucaucuug

SEQ ID NO: 2851531 - RNA, 19 nt, Artificial Sequence
  Description of Artificial Sequence: Synthetic oligonucleotide
auucuuucuaacuuucuga

SEQ ID NO: 2851532 - RNA, 19 nt, Artificial Sequence
  Description of Artificial Sequence: Synthetic oligonucleotide
gugauuuuguauuuaugcc

SEQ ID NO: 2851533 - RNA, 19 nt, Artificial Sequence
  Description of Artificial Sequence: Synthetic oligonucleotide
ucuccuguugccaaaguga

SEQ ID NO: 2851534 - RNA, 19 nt, Artificial Sequence
  Description of Artificial Sequence: Synthetic oligonucleotide
uuugaauucuccaguggca

SEQ ID NO: 2851535 - RNA, 19 nt, Artificial Sequence
  Description of Artificial Sequence: Synthetic oligonucleotide
uccauugaaauccucaauu

SEQ ID NO: 2851536 - RNA, 19 nt, Artificial Sequence
  Description of Artificial Sequence: Synthetic oligonucleotide
augacuguccauugaaauc

SEQ ID NO: 2851537 - RNA, 19 nt, Artificial Sequence
  Description of Artificial Sequence: Synthetic oligonucleotide
uuacuuugaauucuccagu

SEQ ID NO: 2851538 - RNA, 19 nt, Artificial Sequence
  Description of Artificial Sequence: Synthetic oligonucleotide
ucugaauuacuuugaauuc

SEQ ID NO: 2851539 - RNA, 19 nt, Artificial Sequence
  Description of Artificial Sequence: Synthetic oligonucleotide
acuggggucuugcugaugg

SEQ ID NO: 2851540 - RNA, 19 nt, Artificial Sequence
  Description of Artificial Sequence: Synthetic oligonucleotide
aaaucagagucacauuuaa

SEQ ID NO: 2851541 - RNA, 19 nt, Artificial Sequence
  Description of Artificial Sequence: Synthetic oligonucleotide
auuucucccaaguguaagg

SEQ ID NO: 2851542 - RNA, 19 nt, Artificial Sequence
  Description of Artificial Sequence: Synthetic oligonucleotide
augauacuccccuuugugg

SEQ ID NO: 2851543 - RNA, 19 nt, Artificial Sequence
  Description of Artificial Sequence: Synthetic oligonucleotide
ucuuguucagagauuccag

SEQ ID NO: 2851544 - RNA, 19 nt, Artificial Sequence
  Description of Artificial Sequence: Synthetic oligonucleotide
uaaggguccuccagcaugg

SEQ ID NO: 2851545 - RNA, 19 nt, Artificial Sequence
  Description of Artificial Sequence: Synthetic oligonucleotide
ucugccaacacagacagaa

SEQ ID NO: 2851546 - RNA, 19 nt, Artificial Sequence
  Description of Artificial Sequence: Synthetic oligonucleotide
uugcugaugggucuuuggg

SEQ ID NO: 2851547 - RNA, 19 nt, Artificial Sequence
  Description of Artificial Sequence: Synthetic oligonucleotide
uauacaugacuguccauug

SEQ ID NO: 2851548 - RNA, 19 nt, Artificial Sequence
  Description of Artificial Sequence: Synthetic oligonucleotide
cuuguucagagauuccagg

SEQ ID NO: 2851549 - RNA, 19 nt, Artificial Sequence
  Description of Artificial Sequence: Synthetic oligonucleotide
ucaauuucucccaagugua

SEQ ID NO: 2851550 - RNA, 19 nt, Artificial Sequence
  Description of Artificial Sequence: Synthetic oligonucleotide
uauagacugguauaauccu

SEQ ID NO: 2851551 - RNA, 19 nt, Artificial Sequence
  Description of Artificial Sequence: Synthetic oligonucleotide
auugaaauccucaauuucu

SEQ ID NO: 2851552 - RNA, 19 nt, Artificial Sequence
  Description of Artificial Sequence: Synthetic oligonucleotide
agugucacauaaauauugc

SEQ ID NO: 2851553 - RNA, 19 nt, Artificial Sequence
  Description of Artificial Sequence: Synthetic oligonucleotide
agucacauuuaaaagguuc

SEQ ID NO: 2851554 - RNA, 19 nt, Artificial Sequence
  Description of Artificial Sequence: Synthetic oligonucleotide
cuuugcuuuacuccuuugg

SEQ ID NO: 2851555 - RNA, 19 nt, Artificial Sequence
  Description of Artificial Sequence: Synthetic oligonucleotide
accgucacagugugaaucc

SEQ ID NO: 2851556 - RNA, 19 nt, Artificial Sequence
  Description of Artificial Sequence: Synthetic oligonucleotide
ugaauuacuuugaauucuc

SEQ ID NO: 2851557 - RNA, 19 nt, Artificial Sequence
  Description of Artificial Sequence: Synthetic oligonucleotide
aauuucucccaaguguaag

SEQ ID NO: 2851558 - RNA, 19 nt, Artificial Sequence
  Description of Artificial Sequence: Synthetic oligonucleotide
cuuuggagcaccacugggg

SEQ ID NO: 2851559 - RNA, 19 nt, Artificial Sequence
  Description of Artificial Sequence: Synthetic oligonucleotide
cauuuaaaagguuccucag

SEQ ID NO: 2851560 - RNA, 19 nt, Artificial Sequence
  Description of Artificial Sequence: Synthetic oligonucleotide
acagacagaagugugcuuc

SEQ ID NO: 2851561 - RNA, 19 nt, Artificial Sequence
  Description of Artificial Sequence: Synthetic oligonucleotide
acuuugaauucuccagugg

SEQ ID NO: 2851562 - RNA, 19 nt, Artificial Sequence
  Description of Artificial Sequence: Synthetic oligonucleotide
uuuugucugccauauauuu

SEQ ID NO: 2851563 - RNA, 19 nt, Artificial Sequence
  Description of Artificial Sequence: Synthetic oligonucleotide
aaaugaccacuucucuguc

SEQ ID NO: 2851564 - RNA, 19 nt, Artificial Sequence
  Description of Artificial Sequence: Synthetic oligonucleotide
aaguguaaggguccuccag

SEQ ID NO: 2851565 - RNA, 19 nt, Artificial Sequence
  Description of Artificial Sequence: Synthetic oligonucleotide
uugcuuuacuccuuuggag

SEQ ID NO: 2851566 - RNA, 19 nt, Artificial Sequence
  Description of Artificial Sequence: Synthetic oligonucleotide
auuuaaaagguuccucaga

SEQ ID NO: 2851567 - RNA, 19 nt, Artificial Sequence
  Description of Artificial Sequence: Synthetic oligonucleotide
aggaagaacucugaauuac

SEQ ID NO: 2851568 - RNA, 19 nt, Artificial Sequence
  Description of Artificial Sequence: Synthetic oligonucleotide
gucuuugggguuuauagac

SEQ ID NO: 2851569 - RNA, 19 nt, Artificial Sequence
  Description of Artificial Sequence: Synthetic oligonucleotide
auuauccaccgucacagug

SEQ ID NO: 2851570 - RNA, 19 nt, Artificial Sequence
  Description of Artificial Sequence: Synthetic oligonucleotide
ugcugaugggucuuugggg

SEQ ID NO: 2851571 - RNA, 19 nt, Artificial Sequence
  Description of Artificial Sequence: Synthetic oligonucleotide
ugccaacacagacagaagu

SEQ ID NO: 2851572 - RNA, 19 nt, Artificial Sequence
  Description of Artificial Sequence: Synthetic oligonucleotide
cuuugugguagaaaaugac

SEQ ID NO: 2851573 - RNA, 19 nt, Artificial Sequence
  Description of Artificial Sequence: Synthetic oligonucleotide
ugaaauccucaauuucucc

SEQ ID NO: 2851574 - RNA, 19 nt, Artificial Sequence
  Description of Artificial Sequence: Synthetic oligonucleotide
uguucagagauuccagggu

SEQ ID NO: 2851575 - RNA, 19 nt, Artificial Sequence
  Description of Artificial Sequence: Synthetic oligonucleotide
agaaaaugaccacuucucu

SEQ ID NO: 2851576 - RNA, 19 nt, Artificial Sequence
  Description of Artificial Sequence: Synthetic oligonucleotide
uuauccaccgucacagugu

SEQ ID NO: 2851577 - RNA, 19 nt, Artificial Sequence
  Description of Artificial Sequence: Synthetic oligonucleotide
ugauacuccccuuuguggu

SEQ ID NO: 2851578 - RNA, 19 nt, Artificial Sequence
  Description of Artificial Sequence: Synthetic oligonucleotide
uuaucaggaagaacucuga

SEQ ID NO: 2851579 - RNA, 19 nt, Artificial Sequence
  Description of Artificial Sequence: Synthetic oligonucleotide
uuucucccaaguguaaggg

SEQ ID NO: 2851580 - RNA, 19 nt, Artificial Sequence
  Description of Artificial Sequence: Synthetic oligonucleotide
gaccacuucucugucaugg

SEQ ID NO: 2851581 - RNA, 19 nt, Artificial Sequence
  Description of Artificial Sequence: Synthetic oligonucleotide
uacuuugaauucuccagug

SEQ ID NO: 2851582 - RNA, 19 nt, Artificial Sequence
  Description of Artificial Sequence: Synthetic oligonucleotide
auuuaugccaggggcaaac

SEQ ID NO: 2851583 - RNA, 19 nt, Artificial Sequence
  Description of Artificial Sequence: Synthetic oligonucleotide
uuuggagcaccacuggggu

SEQ ID NO: 2851584 - RNA, 19 nt, Artificial Sequence
  Description of Artificial Sequence: Synthetic oligonucleotide
uuugggguuuauagacugg

SEQ ID NO: 2851585 - RNA, 19 nt, Artificial Sequence
  Description of Artificial Sequence: Synthetic oligonucleotide
uauaauccuucuccuguug

SEQ ID NO: 2851586 - RNA, 19 nt, Artificial Sequence
  Description of Artificial Sequence: Synthetic oligonucleotide
ucaucuuguucagagauuc

SEQ ID NO: 2851587 - RNA, 19 nt, Artificial Sequence
  Description of Artificial Sequence: Synthetic oligonucleotide
uugaaauccucaauuucuc

SEQ ID NO: 2851588 - RNA, 19 nt, Artificial Sequence
  Description of Artificial Sequence: Synthetic oligonucleotide
uucuuucuaacuuucugau

SEQ ID NO: 2851589 - RNA, 19 nt, Artificial Sequence
  Description of Artificial Sequence: Synthetic oligonucleotide
cuuugggguuuauagacug

SEQ ID NO: 2851590 - RNA, 19 nt, Artificial Sequence
  Description of Artificial Sequence: Synthetic oligonucleotide
uacaugacuguccauugaa

SEQ ID NO: 2851591 - RNA, 19 nt, Artificial Sequence
  Description of Artificial Sequence: Synthetic oligonucleotide
uccauagcaugauacuccc

SEQ ID NO: 2851592 - RNA, 19 nt, Artificial Sequence
  Description of Artificial Sequence: Synthetic oligonucleotide
cauucuuucuaacuuucug

SEQ ID NO: 2851593 - RNA, 19 nt, Artificial Sequence
  Description of Artificial Sequence: Synthetic oligonucleotide
cacagugugaauccuuugc

SEQ ID NO: 2851594 - RNA, 19 nt, Artificial Sequence
  Description of Artificial Sequence: Synthetic oligonucleotide
ucucccaaguguaaggguc

SEQ ID NO: 2851595 - RNA, 19 nt, Artificial Sequence
  Description of Artificial Sequence: Synthetic oligonucleotide
caaacuauacaugacuguc

SEQ ID NO: 2851596 - RNA, 19 nt, Artificial Sequence
  Description of Artificial Sequence: Synthetic oligonucleotide
ugugguagaaaaugaccac

SEQ ID NO: 2851597 - RNA, 19 nt, Artificial Sequence
  Description of Artificial Sequence: Synthetic oligonucleotide
aggggcaaacuauacauga

SEQ ID NO: 2851598 - RNA, 19 nt, Artificial Sequence
  Description of Artificial Sequence: Synthetic oligonucleotide
uccucaauuucucccaagu

SEQ ID NO: 2851599 - RNA, 19 nt, Artificial Sequence
  Description of Artificial Sequence: Synthetic oligonucleotide
uaugccaggggcaaacuau

SEQ ID NO: 2851600 - RNA, 19 nt, Artificial Sequence
  Description of Artificial Sequence: Synthetic oligonucleotide
uucagagauuccagggucc

SEQ ID NO: 2851601 - RNA, 19 nt, Artificial Sequence
  Description of Artificial Sequence: Synthetic oligonucleotide
cauaaauauugccauuauc

SEQ ID NO: 2851602 - RNA, 19 nt, Artificial Sequence
  Description of Artificial Sequence: Synthetic oligonucleotide
uggacaacagcagucauuc

SEQ ID NO: 2851603 - RNA, 19 nt, Artificial Sequence
  Description of Artificial Sequence: Synthetic oligonucleotide
acagaagugugcuucuucu

SEQ ID NO: 2851604 - RNA, 19 nt, Artificial Sequence
  Description of Artificial Sequence: Synthetic oligonucleotide
ucuaacuuucugaugucau

SEQ ID NO: 2851605 - RNA, 19 nt, Artificial Sequence
  Description of Artificial Sequence: Synthetic oligonucleotide
agagucacauuuaaaaggu

SEQ ID NO: 2851606 - RNA, 19 nt, Artificial Sequence
  Description of Artificial Sequence: Synthetic oligonucleotide
gucacauuuaaaagguucc

SEQ ID NO: 2851607 - RNA, 19 nt, Artificial Sequence
  Description of Artificial Sequence: Synthetic oligonucleotide
uucuccuguugccaaagug

SEQ ID NO: 2851608 - RNA, 19 nt, Artificial Sequence
  Description of Artificial Sequence: Synthetic oligonucleotide
acuuucugaugucauccuc

SEQ ID NO: 2851609 - RNA, 19 nt, Artificial Sequence
  Description of Artificial Sequence: Synthetic oligonucleotide
cauugaaauccucaauuuc

SEQ ID NO: 2851610 - RNA, 19 nt, Artificial Sequence
  Description of Artificial Sequence: Synthetic oligonucleotide
auauugccauuauccaccg

SEQ ID NO: 2851611 - RNA, 19 nt, Artificial Sequence
  Description of Artificial Sequence: Synthetic oligonucleotide
uaauccuucuccuguugcc

SEQ ID NO: 2851612 - RNA, 19 nt, Artificial Sequence
  Description of Artificial Sequence: Synthetic oligonucleotide
ugucauggacaacagcagu

SEQ ID NO: 2851613 - RNA, 19 nt, Artificial Sequence
  Description of Artificial Sequence: Synthetic oligonucleotide
ucuuucuaacuuucugaug

SEQ ID NO: 2851614 - RNA, 19 nt, Artificial Sequence
  Description of Artificial Sequence: Synthetic oligonucleotide
uccccuuugugguagaaaa

SEQ ID NO: 2851615 - RNA, 19 nt, Artificial Sequence
  Description of Artificial Sequence: Synthetic oligonucleotide
uuuuaucaggaagaacucu

SEQ ID NO: 2851616 - RNA, 19 nt, Artificial Sequence
  Description of Artificial Sequence: Synthetic oligonucleotide
guaaggguccuccagcaug

SEQ ID NO: 2851617 - RNA, 19 nt, Artificial Sequence
  Description of Artificial Sequence: Synthetic oligonucleotide
auuuuguauuuaugccagg

SEQ ID NO: 2851618 - RNA, 19 nt, Artificial Sequence
  Description of Artificial Sequence: Synthetic oligonucleotide
caugauacuccccuuugug

SEQ ID NO: 2851619 - RNA, 19 nt, Artificial Sequence
  Description of Artificial Sequence: Synthetic oligonucleotide
aaugaccacuucucuguca

SEQ ID NO: 2851620 - RNA, 19 nt, Artificial Sequence
  Description of Artificial Sequence: Synthetic oligonucleotide
uccuuuggagcaccacugg

SEQ ID NO: 2851621 - RNA, 19 nt, Artificial Sequence
  Description of Artificial Sequence: Synthetic oligonucleotide
acagugugaauccuuugcu

SEQ ID NO: 2851622 - RNA, 19 nt, Artificial Sequence
  Description of Artificial Sequence: Synthetic oligonucleotide
aacucugaauuacuuugaa

SEQ ID NO: 2851623 - RNA, 19 nt, Artificial Sequence
  Description of Artificial Sequence: Synthetic oligonucleotide
gaugucauccucucugcca

SEQ ID NO: 2851624 - RNA, 19 nt, Artificial Sequence
  Description of Artificial Sequence: Synthetic oligonucleotide
agcagucauucuuucuaac

SEQ ID NO: 2851625 - RNA, 19 nt, Artificial Sequence
  Description of Artificial Sequence: Synthetic oligonucleotide
aacagcagucauucuuucu

SEQ ID NO: 2851626 - RNA, 19 nt, Artificial Sequence
  Description of Artificial Sequence: Synthetic oligonucleotide
uguccauugaaauccucaa

SEQ ID NO: 2851627 - RNA, 19 nt, Artificial Sequence
  Description of Artificial Sequence: Synthetic oligonucleotide
ucuuugggguuuauagacu

SEQ ID NO: 2851628 - RNA, 19 nt, Artificial Sequence
  Description of Artificial Sequence: Synthetic oligonucleotide
agugugaauccuuugcuuu

SEQ ID NO: 2851629 - RNA, 19 nt, Artificial Sequence
  Description of Artificial Sequence: Synthetic oligonucleotide
agcgaauguccauagcaug

SEQ ID NO: 2851630 - RNA, 19 nt, Artificial Sequence
  Description of Artificial Sequence: Synthetic oligonucleotide
ugaauccuuugcuuuacuc

SEQ ID NO: 2851631 - RNA, 19 nt, Artificial Sequence
  Description of Artificial Sequence: Synthetic oligonucleotide
gugucacauaaauauugcc

SEQ ID NO: 2851632 - RNA, 19 nt, Artificial Sequence
  Description of Artificial Sequence: Synthetic oligonucleotide
acagcagucauucuuucua

SEQ ID NO: 2851633 - RNA, 19 nt, Artificial Sequence
  Description of Artificial Sequence: Synthetic oligonucleotide
cucagaaagugucacauaa

SEQ ID NO: 2851634 - RNA, 19 nt, Artificial Sequence
  Description of Artificial Sequence: Synthetic oligonucleotide
aucaggaagaacucugaau

SEQ ID NO: 2851635 - RNA, 19 nt, Artificial Sequence
  Description of Artificial Sequence: Synthetic oligonucleotide
uauccaccgucacagugug

SEQ ID NO: 2851636 - RNA, 19 nt, Artificial Sequence
  Description of Artificial Sequence: Synthetic oligonucleotide
ugguauaauccuucuccug

SEQ ID NO: 2851637 - RNA, 19 nt, Artificial Sequence
  Description of Artificial Sequence: Synthetic oligonucleotide
uuaaaagguuccucagaaa

SEQ ID NO: 2851638 - RNA, 19 nt, Artificial Sequence
  Description of Artificial Sequence: Synthetic oligonucleotide
cuugcugaugggucuuugg

SEQ ID NO: 2851639 - RNA, 19 nt, Artificial Sequence
  Description of Artificial Sequence: Synthetic oligonucleotide
cuaacuuucugaugucauc

SEQ ID NO: 2851640 - RNA, 19 nt, Artificial Sequence
  Description of Artificial Sequence: Synthetic oligonucleotide
guagaaaaugaccacuucu

SEQ ID NO: 2851641 - RNA, 19 nt, Artificial Sequence
  Description of Artificial Sequence: Synthetic oligonucleotide
aagugauuuuguauuuaug

SEQ ID NO: 2851642 - RNA, 19 nt, Artificial Sequence
  Description of Artificial Sequence: Synthetic oligonucleotide
ucauucuuucuaacuuucu

SEQ ID NO: 2851643 - RNA, 19 nt, Artificial Sequence
  Description of Artificial Sequence: Synthetic oligonucleotide
ucagaaagugucacauaaa

SEQ ID NO: 2851644 - RNA, 19 nt, Artificial Sequence
  Description of Artificial Sequence: Synthetic oligonucleotide
ucauggacaacagcaguca

SEQ ID NO: 2851645 - RNA, 19 nt, Artificial Sequence
  Description of Artificial Sequence: Synthetic oligonucleotide
uugccauuauccaccguca

SEQ ID NO: 2851646 - RNA, 19 nt, Artificial Sequence
  Description of Artificial Sequence: Synthetic oligonucleotide
acuccuuuggagcaccacu

SEQ ID NO: 2851647 - RNA, 19 nt, Artificial Sequence
  Description of Artificial Sequence: Synthetic oligonucleotide
uuugucugccauauauuuu

SEQ ID NO: 2851648 - RNA, 19 nt, Artificial Sequence
  Description of Artificial Sequence: Synthetic oligonucleotide
ugccaaagugauuuuguau

SEQ ID NO: 2851649 - RNA, 19 nt, Artificial Sequence
  Description of Artificial Sequence: Synthetic oligonucleotide
gaauuacuuugaauucucc

SEQ ID NO: 2851650 - RNA, 19 nt, Artificial Sequence
  Description of Artificial Sequence: Synthetic oligonucleotide
cugucauggacaacagcag

SEQ ID NO: 2851651 - RNA, 19 nt, Artificial Sequence
  Description of Artificial Sequence: Synthetic oligonucleotide
guucagagauuccaggguc

SEQ ID NO: 2851652 - RNA, 19 nt, Artificial Sequence
  Description of Artificial Sequence: Synthetic oligonucleotide
aauccuucuccuguugcca

SEQ ID NO: 2851653 - RNA, 19 nt, Artificial Sequence
  Description of Artificial Sequence: Synthetic oligonucleotide
uguccauagcaugauacuc

SEQ ID NO: 2851654 - RNA, 19 nt, Artificial Sequence
  Description of Artificial Sequence: Synthetic oligonucleotide
uguugccaaagugauuuug

SEQ ID NO: 2851655 - RNA, 19 nt, Artificial Sequence
  Description of Artificial Sequence: Synthetic oligonucleotide
uuuacuccuuuggagcacc

SEQ ID NO: 2851656 - RNA, 19 nt, Artificial Sequence
  Description of Artificial Sequence: Synthetic oligonucleotide
agcaugauacuccccuuug

SEQ ID NO: 2851657 - RNA, 19 nt, Artificial Sequence
  Description of Artificial Sequence: Synthetic oligonucleotide
ucucugucauggacaacag

SEQ ID NO: 2851658 - RNA, 19 nt, Artificial Sequence
  Description of Artificial Sequence: Synthetic oligonucleotide
uucuaacuuucugauguca

SEQ ID NO: 2851659 - RNA, 19 nt, Artificial Sequence
  Description of Artificial Sequence: Synthetic oligonucleotide
caugguagcagcgaauguc

SEQ ID NO: 2851660 - RNA, 19 nt, Artificial Sequence
  Description of Artificial Sequence: Synthetic oligonucleotide
agucauucuuucuaacuuu

SEQ ID NO: 2851661 - RNA, 19 nt, Artificial Sequence
  Description of Artificial Sequence: Synthetic oligonucleotide
caacacagacagaagugug

SEQ ID NO: 2851662 - RNA, 19 nt, Artificial Sequence
  Description of Artificial Sequence: Synthetic oligonucleotide
ucacauuuaaaagguuccu

SEQ ID NO: 2851663 - RNA, 19 nt, Artificial Sequence
  Description of Artificial Sequence: Synthetic oligonucleotide
aucuuguucagagauucca

SEQ ID NO: 2851664 - RNA, 19 nt, Artificial Sequence
  Description of Artificial Sequence: Synthetic oligonucleotide
guccauagcaugauacucc

SEQ ID NO: 2851665 - RNA, 19 nt, Artificial Sequence
  Description of Artificial Sequence: Synthetic oligonucleotide
acauaaauauugccauuau

SEQ ID NO: 2851666 - RNA, 19 nt, Artificial Sequence
  Description of Artificial Sequence: Synthetic oligonucleotide
aaaaucagagucacauuua

SEQ ID NO: 2851667 - RNA, 19 nt, Artificial Sequence
  Description of Artificial Sequence: Synthetic oligonucleotide
auguccauagcaugauacu

SEQ ID NO: 2851668 - RNA, 19 nt, Artificial Sequence
  Description of Artificial Sequence: Synthetic oligonucleotide
uccucagaaagugucacau

SEQ ID NO: 2851669 - RNA, 19 nt, Artificial Sequence
  Description of Artificial Sequence: Synthetic oligonucleotide
cugaugucauccucucugc

SEQ ID NO: 2851670 - RNA, 19 nt, Artificial Sequence
  Description of Artificial Sequence: Synthetic oligonucleotide
uccaccgucacagugugaa

SEQ ID NO: 2851671 - RNA, 19 nt, Artificial Sequence
  Description of Artificial Sequence: Synthetic oligonucleotide
agcagcgaauguccauagc

SEQ ID NO: 2851672 - RNA, 19 nt, Artificial Sequence
  Description of Artificial Sequence: Synthetic oligonucleotide
agagauuccaggguccaug

SEQ ID NO: 2851673 - RNA, 19 nt, Artificial Sequence
  Description of Artificial Sequence: Synthetic oligonucleotide
aaagugucacauaaauauu

SEQ ID NO: 2851674 - RNA, 19 nt, Artificial Sequence
  Description of Artificial Sequence: Synthetic oligonucleotide
agguuccucagaaaguguc

SEQ ID NO: 2851675 - RNA, 19 nt, Artificial Sequence
  Description of Artificial Sequence: Synthetic oligonucleotide
cucaauuucucccaagugu

SEQ ID NO: 2851676 - RNA, 19 nt, Artificial Sequence
  Description of Artificial Sequence: Synthetic oligonucleotide
acuucucugucauggacaa

SEQ ID NO: 2851677 - RNA, 19 nt, Artificial Sequence
  Description of Artificial Sequence: Synthetic oligonucleotide
gucacauaaauauugccau

SEQ ID NO: 2851678 - RNA, 19 nt, Artificial Sequence
  Description of Artificial Sequence: Synthetic oligonucleotide
agcaugguagcagcgaaug

SEQ ID NO: 2851679 - RNA, 19 nt, Artificial Sequence
  Description of Artificial Sequence: Synthetic oligonucleotide
uugaauucuccaguggcau

SEQ ID NO: 2851680 - RNA, 19 nt, Artificial Sequence
  Description of Artificial Sequence: Synthetic oligonucleotide
uggagcaccacuggggucu

SEQ ID NO: 2851681 - RNA, 19 nt, Artificial Sequence
  Description of Artificial Sequence: Synthetic oligonucleotide
cucccaaguguaagggucc

SEQ ID NO: 2851682 - RNA, 19 nt, Artificial Sequence
  Description of Artificial Sequence: Synthetic oligonucleotide
gacagaagugugcuucuuc

SEQ ID NO: 2851683 - RNA, 19 nt, Artificial Sequence
  Description of Artificial Sequence: Synthetic oligonucleotide
uugggguuuauagacuggu

SEQ ID NO: 2851684 - RNA, 19 nt, Artificial Sequence
  Description of Artificial Sequence: Synthetic oligonucleotide
ugugcuucuucuucucauc

SEQ ID NO: 2851685 - RNA, 19 nt, Artificial Sequence
  Description of Artificial Sequence: Synthetic oligonucleotide
acucugaauuacuuugaau

SEQ ID NO: 2851686 - RNA, 19 nt, Artificial Sequence
  Description of Artificial Sequence: Synthetic oligonucleotide
augucauccucucugccaa

SEQ ID NO: 2851687 - RNA, 19 nt, Artificial Sequence
  Description of Artificial Sequence: Synthetic oligonucleotide
agcaccacuggggucuugc

SEQ ID NO: 2851688 - RNA, 19 nt, Artificial Sequence
  Description of Artificial Sequence: Synthetic oligonucleotide
auccucucugccaacacag

SEQ ID NO: 2851689 - RNA, 19 nt, Artificial Sequence
  Description of Artificial Sequence: Synthetic oligonucleotide
cuguccauugaaauccuca

SEQ ID NO: 2851690 - RNA, 19 nt, Artificial Sequence
  Description of Artificial Sequence: Synthetic oligonucleotide
auacaugacuguccauuga

SEQ ID NO: 2851691 - RNA, 19 nt, Artificial Sequence
  Description of Artificial Sequence: Synthetic oligonucleotide
ugugaauccuuugcuuuac

SEQ ID NO: 2851692 - RNA, 19 nt, Artificial Sequence
  Description of Artificial Sequence: Synthetic oligonucleotide
gaauucuccaguggcauaa

SEQ ID NO: 2851693 - RNA, 19 nt, Artificial Sequence
  Description of Artificial Sequence: Synthetic oligonucleotide
ccauuauccaccgucacag

SEQ ID NO: 2851694 - RNA, 19 nt, Artificial Sequence
  Description of Artificial Sequence: Synthetic oligonucleotide
cauagcaugauacuccccu

SEQ ID NO: 2851695 - RNA, 19 nt, Artificial Sequence
  Description of Artificial Sequence: Synthetic oligonucleotide
uuaugccaggggcaaacua

SEQ ID NO: 2851696 - RNA, 19 nt, Artificial Sequence
  Description of Artificial Sequence: Synthetic oligonucleotide
uagcagcgaauguccauag

SEQ ID NO: 2851697 - RNA, 19 nt, Artificial Sequence
  Description of Artificial Sequence: Synthetic oligonucleotide
ucacauaaauauugccauu

SEQ ID NO: 2851698 - RNA, 19 nt, Artificial Sequence
  Description of Artificial Sequence: Synthetic oligonucleotide
ucacagugugaauccuuug

SEQ ID NO: 2851699 - RNA, 19 nt, Artificial Sequence
  Description of Artificial Sequence: Synthetic oligonucleotide
gcagcgaauguccauagca

SEQ ID NO: 2851700 - RNA, 19 nt, Artificial Sequence
  Description of Artificial Sequence: Synthetic oligonucleotide
gacaacagcagucauucuu

SEQ ID NO: 2851701 - RNA, 19 nt, Artificial Sequence
  Description of Artificial Sequence: Synthetic oligonucleotide
gguauaauccuucuccugu

SEQ ID NO: 2851702 - RNA, 19 nt, Artificial Sequence
  Description of Artificial Sequence: Synthetic oligonucleotide
uugccaaagugauuuugua

SEQ ID NO: 2851703 - RNA, 19 nt, Artificial Sequence
  Description of Artificial Sequence: Synthetic oligonucleotide
uucucccaaguguaagggu

SEQ ID NO: 2851704 - RNA, 19 nt, Artificial Sequence
  Description of Artificial Sequence: Synthetic oligonucleotide
cacuucucugucauggaca

SEQ ID NO: 2851705 - RNA, 19 nt, Artificial Sequence
  Description of Artificial Sequence: Synthetic oligonucleotide
uuccucagaaagugucaca

SEQ ID NO: 2851706 - RNA, 19 nt, Artificial Sequence
  Description of Artificial Sequence: Synthetic oligonucleotide
aaucagagucacauuuaaa

SEQ ID NO: 2851707 - RNA, 19 nt, Artificial Sequence
  Description of Artificial Sequence: Synthetic oligonucleotide
ucagagauuccagggucca

SEQ ID NO: 2851708 - RNA, 19 nt, Artificial Sequence
  Description of Artificial Sequence: Synthetic oligonucleotide
cucucugccaacacagaca

SEQ ID NO: 2851709 - RNA, 19 nt, Artificial Sequence
  Description of Artificial Sequence: Synthetic oligonucleotide
gaacucugaauuacuuuga

SEQ ID NO: 2851710 - RNA, 19 nt, Artificial Sequence
  Description of Artificial Sequence: Synthetic oligonucleotide
gaagugugcuucuucuucu

SEQ ID NO: 2851711 - RNA, 19 nt, Artificial Sequence
  Description of Artificial Sequence: Synthetic oligonucleotide
cacauaaauauugccauua

SEQ ID NO: 2851712 - RNA, 19 nt, Artificial Sequence
  Description of Artificial Sequence: Synthetic oligonucleotide
uagcaugauacuccccuuu

SEQ ID NO: 2851713 - RNA, 19 nt, Artificial Sequence
  Description of Artificial Sequence: Synthetic oligonucleotide
uucugaugucauccucucu

SEQ ID NO: 2851714 - RNA, 19 nt, Artificial Sequence
  Description of Artificial Sequence: Synthetic oligonucleotide
ugccauuauccaccgucac

SEQ ID NO: 2851715 - RNA, 19 nt, Artificial Sequence
  Description of Artificial Sequence: Synthetic oligonucleotide
gacugguauaauccuucuc

SEQ ID NO: 2851716 - RNA, 19 nt, Artificial Sequence
  Description of Artificial Sequence: Synthetic oligonucleotide
gucauucuuucuaacuuuc

SEQ ID NO: 2851717 - RNA, 19 nt, Artificial Sequence
  Description of Artificial Sequence: Synthetic oligonucleotide
agaaagugucacauaaaua

SEQ ID NO: 2851718 - RNA, 19 nt, Artificial Sequence
  Description of Artificial Sequence: Synthetic oligonucleotide
cucugucauggacaacagc

SEQ ID NO: 2851719 - RNA, 19 nt, Artificial Sequence
  Description of Artificial Sequence: Synthetic oligonucleotide
cuucuucucaucaucuugu

SEQ ID NO: 2851720 - RNA, 19 nt, Artificial Sequence
  Description of Artificial Sequence: Synthetic oligonucleotide
guuccucagaaagugucac

SEQ ID NO: 2851721 - RNA, 19 nt, Artificial Sequence
  Description of Artificial Sequence: Synthetic oligonucleotide
uguaaggguccuccagcau

SEQ ID NO: 2851722 - RNA, 19 nt, Artificial Sequence
  Description of Artificial Sequence: Synthetic oligonucleotide
caggggcaaacuauacaug

SEQ ID NO: 2851723 - RNA, 19 nt, Artificial Sequence
  Description of Artificial Sequence: Synthetic oligonucleotide
uccagcaugguagcagcga

SEQ ID NO: 2851724 - RNA, 19 nt, Artificial Sequence
  Description of Artificial Sequence: Synthetic oligonucleotide
gguuuauagacugguauaa

SEQ ID NO: 2851725 - RNA, 19 nt, Artificial Sequence
  Description of Artificial Sequence: Synthetic oligonucleotide
cagaaagugucacauaaau

SEQ ID NO: 2851726 - RNA, 19 nt, Artificial Sequence
  Description of Artificial Sequence: Synthetic oligonucleotide
ugaauucuccaguggcaua

SEQ ID NO: 2851727 - RNA, 19 nt, Artificial Sequence
  Description of Artificial Sequence: Synthetic oligonucleotide
caucaucuuguucagagau

SEQ ID NO: 2851728 - RNA, 19 nt, Artificial Sequence
  Description of Artificial Sequence: Synthetic oligonucleotide
uuuaugccaggggcaaacu

SEQ ID NO: 2851729 - RNA, 19 nt, Artificial Sequence
  Description of Artificial Sequence: Synthetic oligonucleotide
gugcuucuucuucucauca

SEQ ID NO: 2851730 - RNA, 19 nt, Artificial Sequence
  Description of Artificial Sequence: Synthetic oligonucleotide
gguagaaaaugaccacuuc

SEQ ID NO: 2851731 - RNA, 19 nt, Artificial Sequence
  Description of Artificial Sequence: Synthetic oligonucleotide
ugccaggggcaaacuauac

SEQ ID NO: 2851732 - RNA, 19 nt, Artificial Sequence
  Description of Artificial Sequence: Synthetic oligonucleotide
guauuuaugccaggggcaa

SEQ ID NO: 2851733 - RNA, 19 nt, Artificial Sequence
  Description of Artificial Sequence: Synthetic oligonucleotide
aagguuccucagaaagugu

SEQ ID NO: 2851734 - RNA, 19 nt, Artificial Sequence
  Description of Artificial Sequence: Synthetic oligonucleotide
ccaaguguaaggguccucc

SEQ ID NO: 2851735 - RNA, 19 nt, Artificial Sequence
  Description of Artificial Sequence: Synthetic oligonucleotide
ugggguuuauagacuggua

SEQ ID NO: 2851736 - RNA, 19 nt, Artificial Sequence
  Description of Artificial Sequence: Synthetic oligonucleotide
cuccagcaugguagcagcg

SEQ ID NO: 2851737 - RNA, 19 nt, Artificial Sequence
  Description of Artificial Sequence: Synthetic oligonucleotide
caccgucacagugugaauc

SEQ ID NO: 2851738 - RNA, 19 nt, Artificial Sequence
  Description of Artificial Sequence: Synthetic oligonucleotide
auagcaugauacuccccuu

SEQ ID NO: 2851739 - RNA, 19 nt, Artificial Sequence
  Description of Artificial Sequence: Synthetic oligonucleotide
ggucuuugggguuuauaga

SEQ ID NO: 2851740 - RNA, 19 nt, Artificial Sequence
  Description of Artificial Sequence: Synthetic oligonucleotide
acuauacaugacuguccau

SEQ ID NO: 2851741 - RNA, 19 nt, Artificial Sequence
  Description of Artificial Sequence: Synthetic oligonucleotide
cugccaacacagacagaag

SEQ ID NO: 2851742 - RNA, 19 nt, Artificial Sequence
  Description of Artificial Sequence: Synthetic oligonucleotide
cugaauuacuuugaauucu

SEQ ID NO: 2851743 - RNA, 19 nt, Artificial Sequence
  Description of Artificial Sequence: Synthetic oligonucleotide
uccucucugccaacacaga

SEQ ID NO: 2851744 - RNA, 19 nt, Artificial Sequence
  Description of Artificial Sequence: Synthetic oligonucleotide
uuacuccuuuggagcacca

SEQ ID NO: 2851745 - RNA, 19 nt, Artificial Sequence
  Description of Artificial Sequence: Synthetic oligonucleotide
uggggucuugcugaugggu

SEQ ID NO: 2851746 - RNA, 19 nt, Artificial Sequence
  Description of Artificial Sequence: Synthetic oligonucleotide
cuuuacuccuuuggagcac

SEQ ID NO: 2851747 - RNA, 19 nt, Artificial Sequence
  Description of Artificial Sequence: Synthetic oligonucleotide
gauacuccccuuuguggua

SEQ ID NO: 2851748 - RNA, 19 nt, Artificial Sequence
  Description of Artificial Sequence: Synthetic oligonucleotide
gcuuuacuccuuuggagca

SEQ ID NO: 2851749 - RNA, 19 nt, Artificial Sequence
  Description of Artificial Sequence: Synthetic oligonucleotide
caacagcagucauucuuuc

SEQ ID NO: 2851750 - RNA, 19 nt, Artificial Sequence
  Description of Artificial Sequence: Synthetic oligonucleotide
uucuucucaucaucuuguu

SEQ ID NO: 2851751 - RNA, 19 nt, Artificial Sequence
  Description of Artificial Sequence: Synthetic oligonucleotide
ucuugcugaugggucuuug

SEQ ID NO: 2851752 - RNA, 19 nt, Artificial Sequence
  Description of Artificial Sequence: Synthetic oligonucleotide
cccuuugugguagaaaaug

SEQ ID NO: 2851753 - RNA, 19 nt, Artificial Sequence
  Description of Artificial Sequence: Synthetic oligonucleotide
gaauguccauagcaugaua

SEQ ID NO: 2851754 - RNA, 19 nt, Artificial Sequence
  Description of Artificial Sequence: Synthetic oligonucleotide
auagacugguauaauccuu

SEQ ID NO: 2851755 - RNA, 19 nt, Artificial Sequence
  Description of Artificial Sequence: Synthetic oligonucleotide
accacuucucugucaugga

SEQ ID NO: 2851756 - RNA, 19 nt, Artificial Sequence
  Description of Artificial Sequence: Synthetic oligonucleotide
gccaacacagacagaagug

SEQ ID NO: 2851757 - RNA, 19 nt, Artificial Sequence
  Description of Artificial Sequence: Synthetic oligonucleotide
ccuuuggagcaccacuggg

SEQ ID NO: 2851758 - RNA, 19 nt, Artificial Sequence
  Description of Artificial Sequence: Synthetic oligonucleotide
acuguccauugaaauccuc

SEQ ID NO: 2851759 - RNA, 19 nt, Artificial Sequence
  Description of Artificial Sequence: Synthetic oligonucleotide
ggguuuauagacugguaua

SEQ ID NO: 2851760 - RNA, 19 nt, Artificial Sequence
  Description of Artificial Sequence: Synthetic oligonucleotide
cuauacaugacuguccauu

SEQ ID NO: 2851761 - RNA, 19 nt, Artificial Sequence
  Description of Artificial Sequence: Synthetic oligonucleotide
caccacuggggucuugcug

SEQ ID NO: 2851762 - RNA, 19 nt, Artificial Sequence
  Description of Artificial Sequence: Synthetic oligonucleotide
uauuuaugccaggggcaaa

SEQ ID NO: 2851763 - RNA, 19 nt, Artificial Sequence
  Description of Artificial Sequence: Synthetic oligonucleotide
ugaccacuucucugucaug

SEQ ID NO: 2851764 - RNA, 19 nt, Artificial Sequence
  Description of Artificial Sequence: Synthetic oligonucleotide
gugguagaaaaugaccacu

SEQ ID NO: 2851765 - RNA, 19 nt, Artificial Sequence
  Description of Artificial Sequence: Synthetic oligonucleotide
gugugaauccuuugcuuua

SEQ ID NO: 2851766 - RNA, 19 nt, Artificial Sequence
  Description of Artificial Sequence: Synthetic oligonucleotide
gaagaacucugaauuacuu

SEQ ID NO: 2851767 - RNA, 19 nt, Artificial Sequence
  Description of Artificial Sequence: Synthetic oligonucleotide
guagcagcgaauguccaua

SEQ ID NO: 2851768 - RNA, 19 nt, Artificial Sequence
  Description of Artificial Sequence: Synthetic oligonucleotide
cugguauaauccuucuccu

SEQ ID NO: 2851769 - RNA, 19 nt, Artificial Sequence
  Description of Artificial Sequence: Synthetic oligonucleotide
caauuucucccaaguguaa

SEQ ID NO: 2851770 - RNA, 19 nt, Artificial Sequence
  Description of Artificial Sequence: Synthetic oligonucleotide
cauccucucugccaacaca

SEQ ID NO: 2851771 - RNA, 19 nt, Artificial Sequence
  Description of Artificial Sequence: Synthetic oligonucleotide
ccuuugugguagaaaauga

SEQ ID NO: 2851772 - RNA, 19 nt, Artificial Sequence
  Description of Artificial Sequence: Synthetic oligonucleotide
cuggggucuugcugauggg

SEQ ID NO: 2851773 - RNA, 19 nt, Artificial Sequence
  Description of Artificial Sequence: Synthetic oligonucleotide
caggaagaacucugaauua

SEQ ID NO: 2851774 - RNA, 19 nt, Artificial Sequence
  Description of Artificial Sequence: Synthetic oligonucleotide
ccucaauuucucccaagug

SEQ ID NO: 2851775 - RNA, 19 nt, Artificial Sequence
  Description of Artificial Sequence: Synthetic oligonucleotide
ugaugggucuuugggguuu

SEQ ID NO: 2851776 - RNA, 19 nt, Artificial Sequence
  Description of Artificial Sequence: Synthetic oligonucleotide
caaguguaaggguccucca

SEQ ID NO: 2851777 - RNA, 19 nt, Artificial Sequence
  Description of Artificial Sequence: Synthetic oligonucleotide
uccuucuccuguugccaaa

SEQ ID NO: 2851778 - RNA, 19 nt, Artificial Sequence
  Description of Artificial Sequence: Synthetic oligonucleotide
ccuccagcaugguagcagc

SEQ ID NO: 2851779 - RNA, 19 nt, Artificial Sequence
  Description of Artificial Sequence: Synthetic oligonucleotide
uccuguugccaaagugauu

SEQ ID NO: 2851780 - RNA, 19 nt, Artificial Sequence
  Description of Artificial Sequence: Synthetic oligonucleotide
uuggagcaccacugggguc

SEQ ID NO: 2851781 - RNA, 19 nt, Artificial Sequence
  Description of Artificial Sequence: Synthetic oligonucleotide
gcugaugggucuuuggggu

SEQ ID NO: 2851782 - RNA, 19 nt, Artificial Sequence
  Description of Artificial Sequence: Synthetic oligonucleotide
ugucauccucucugccaac

SEQ ID NO: 2851783 - RNA, 19 nt, Artificial Sequence
  Description of Artificial Sequence: Synthetic oligonucleotide
cagucauucuuucuaacuu

SEQ ID NO: 2851784 - RNA, 19 nt, Artificial Sequence
  Description of Artificial Sequence: Synthetic oligonucleotide
uacuccuuuggagcaccac

SEQ ID NO: 2851785 - RNA, 19 nt, Artificial Sequence
  Description of Artificial Sequence: Synthetic oligonucleotide
caaagugauuuuguauuua

SEQ ID NO: 2851786 - RNA, 19 nt, Artificial Sequence
  Description of Artificial Sequence: Synthetic oligonucleotide
ccucucugccaacacagac

SEQ ID NO: 2851787 - RNA, 19 nt, Artificial Sequence
  Description of Artificial Sequence: Synthetic oligonucleotide
gcagucauucuuucuaacu

SEQ ID NO: 2851788 - RNA, 19 nt, Artificial Sequence
  Description of Artificial Sequence: Synthetic oligonucleotide
gcgaauguccauagcauga

SEQ ID NO: 2851789 - RNA, 19 nt, Artificial Sequence
  Description of Artificial Sequence: Synthetic oligonucleotide
gccauuauccaccgucaca

SEQ ID NO: 2851790 - RNA, 19 nt, Artificial Sequence
  Description of Artificial Sequence: Synthetic oligonucleotide
ucccaaguguaaggguccu

SEQ ID NO: 2851791 - RNA, 19 nt, Artificial Sequence
  Description of Artificial Sequence: Synthetic oligonucleotide
auggacaacagcagucauu

SEQ ID NO: 2851792 - RNA, 19 nt, Artificial Sequence
  Description of Artificial Sequence: Synthetic oligonucleotide
cagcagucauucuuucuaa

SEQ ID NO: 2851793 - RNA, 19 nt, Artificial Sequence
  Description of Artificial Sequence: Synthetic oligonucleotide
aucaucuuguucagagauu

SEQ ID NO: 2851794 - RNA, 19 nt, Artificial Sequence
  Description of Artificial Sequence: Synthetic oligonucleotide
guauaauccuucuccuguu

SEQ ID NO: 2851795 - RNA, 19 nt, Artificial Sequence
  Description of Artificial Sequence: Synthetic oligonucleotide
ccacuucucugucauggac

SEQ ID NO: 2851796 - RNA, 19 nt, Artificial Sequence
  Description of Artificial Sequence: Synthetic oligonucleotide
gguuccucagaaaguguca

SEQ ID NO: 2851797 - RNA, 19 nt, Artificial Sequence
  Description of Artificial Sequence: Synthetic oligonucleotide
cuccuguugccaaagugau

SEQ ID NO: 2851798 - RNA, 19 nt, Artificial Sequence
  Description of Artificial Sequence: Synthetic oligonucleotide
guuuauagacugguauaau

SEQ ID NO: 2851799 - RNA, 19 nt, Artificial Sequence
  Description of Artificial Sequence: Synthetic oligonucleotide
ugggucuuugggguuuaua

SEQ ID NO: 2851800 - RNA, 19 nt, Artificial Sequence
  Description of Artificial Sequence: Synthetic oligonucleotide
guccauugaaauccucaau

SEQ ID NO: 2851801 - RNA, 19 nt, Artificial Sequence
  Description of Artificial Sequence: Synthetic oligonucleotide
ggggcaaacuauacaugac

SEQ ID NO: 2851802 - RNA, 19 nt, Artificial Sequence
  Description of Artificial Sequence: Synthetic oligonucleotide
gugugcuucuucuucucau

SEQ ID NO: 2851803 - RNA, 19 nt, Artificial Sequence
  Description of Artificial Sequence: Synthetic oligonucleotide
uacuccccuuugugguaga

SEQ ID NO: 2851804 - RNA, 19 nt, Artificial Sequence
  Description of Artificial Sequence: Synthetic oligonucleotide
cagcgaauguccauagcau

SEQ ID NO: 2851805 - RNA, 19 nt, Artificial Sequence
  Description of Artificial Sequence: Synthetic oligonucleotide
ggaagaacucugaauuacu

SEQ ID NO: 2851806 - RNA, 19 nt, Artificial Sequence
  Description of Artificial Sequence: Synthetic oligonucleotide
ccauagcaugauacucccc

SEQ ID NO: 2851807 - RNA, 19 nt, Artificial Sequence
  Description of Artificial Sequence: Synthetic oligonucleotide
aggguccuccagcauggua

SEQ ID NO: 2851808 - RNA, 19 nt, Artificial Sequence
  Description of Artificial Sequence: Synthetic oligonucleotide
cagacagaagugugcuucu

SEQ ID NO: 2851809 - RNA, 19 nt, Artificial Sequence
  Description of Artificial Sequence: Synthetic oligonucleotide
augccaggggcaaacuaua

SEQ ID NO: 2851810 - RNA, 19 nt, Artificial Sequence
  Description of Artificial Sequence: Synthetic oligonucleotide
ccuguugccaaagugauuu

SEQ ID NO: 2851811 - RNA, 19 nt, Artificial Sequence
  Description of Artificial Sequence: Synthetic oligonucleotide
ggggucuugcugauggguc

SEQ ID NO: 2851812 - RNA, 19 nt, Artificial Sequence
  Description of Artificial Sequence: Synthetic oligonucleotide
cagugugaauccuuugcuu

SEQ ID NO: 2851813 - RNA, 19 nt, Artificial Sequence
  Description of Artificial Sequence: Synthetic oligonucleotide
agacagaagugugcuucuu

SEQ ID NO: 2851814 - RNA, 19 nt, Artificial Sequence
  Description of Artificial Sequence: Synthetic oligonucleotide
ccuuugcuuuacuccuuug

SEQ ID NO: 2851815 - RNA, 19 nt, Artificial Sequence
  Description of Artificial Sequence: Synthetic oligonucleotide
gucacagugugaauccuuu

SEQ ID NO: 2851816 - RNA, 19 nt, Artificial Sequence
  Description of Artificial Sequence: Synthetic oligonucleotide
cuucucugucauggacaac

SEQ ID NO: 2851817 - RNA, 19 nt, Artificial Sequence
  Description of Artificial Sequence: Synthetic oligonucleotide
gacuguccauugaaauccu

SEQ ID NO: 2851818 - RNA, 19 nt, Artificial Sequence
  Description of Artificial Sequence: Synthetic oligonucleotide
cauuauccaccgucacagu

SEQ ID NO: 2851819 - RNA, 19 nt, Artificial Sequence
  Description of Artificial Sequence: Synthetic oligonucleotide
ccauugaaauccucaauuu

SEQ ID NO: 2851820 - RNA, 19 nt, Artificial Sequence
  Description of Artificial Sequence: Synthetic oligonucleotide
gaugggucuuugggguuua

SEQ ID NO: 2851821 - RNA, 19 nt, Artificial Sequence
  Description of Artificial Sequence: Synthetic oligonucleotide
auccuuugcuuuacuccuu

SEQ ID NO: 2851822 - RNA, 19 nt, Artificial Sequence
  Description of Artificial Sequence: Synthetic oligonucleotide
gggucuugcugaugggucu

SEQ ID NO: 2851823 - RNA, 19 nt, Artificial Sequence
  Description of Artificial Sequence: Synthetic oligonucleotide
gcaugauacuccccuuugu

SEQ ID NO: 2851824 - RNA, 19 nt, Artificial Sequence
  Description of Artificial Sequence: Synthetic oligonucleotide
cauggacaacagcagucau

SEQ ID NO: 2851825 - RNA, 19 nt, Artificial Sequence
  Description of Artificial Sequence: Synthetic oligonucleotide
gguagcagcgaauguccau

SEQ ID NO: 2851826 - RNA, 19 nt, Artificial Sequence
  Description of Artificial Sequence: Synthetic oligonucleotide
gagucacauuuaaaagguu

SEQ ID NO: 2851827 - RNA, 19 nt, Artificial Sequence
  Description of Artificial Sequence: Synthetic oligonucleotide
ccaacacagacagaagugu

SEQ ID NO: 2851828 - RNA, 19 nt, Artificial Sequence
  Description of Artificial Sequence: Synthetic oligonucleotide
ccagcaugguagcagcgaa

SEQ ID NO: 2851829 - RNA, 19 nt, Artificial Sequence
  Description of Artificial Sequence: Synthetic oligonucleotide
acuccccuuugugguagaa

SEQ ID NO: 2851830 - RNA, 19 nt, Artificial Sequence
  Description of Artificial Sequence: Synthetic oligonucleotide
cuccccuuugugguagaaa

SEQ ID NO: 2851831 - RNA, 19 nt, Artificial Sequence
  Description of Artificial Sequence: Synthetic oligonucleotide
cagaagugugcuucuucuu

SEQ ID NO: 2851832 - RNA, 19 nt, Artificial Sequence
  Description of Artificial Sequence: Synthetic oligonucleotide
cucugccaacacagacaga

SEQ ID NO: 2851833 - RNA, 19 nt, Artificial Sequence
  Description of Artificial Sequence: Synthetic oligonucleotide
cacuggggucuugcugaug

SEQ ID NO: 2851834 - RNA, 19 nt, Artificial Sequence
  Description of Artificial Sequence: Synthetic oligonucleotide
gcaugguagcagcgaaugu

SEQ ID NO: 2851835 - RNA, 19 nt, Artificial Sequence
  Description of Artificial Sequence: Synthetic oligonucleotide
cugaugggucuuugggguu

SEQ ID NO: 2851836 - RNA, 19 nt, Artificial Sequence
  Description of Artificial Sequence: Synthetic oligonucleotide
cacagacagaagugugcuu

SEQ ID NO: 2851837 - RNA, 19 nt, Artificial Sequence
  Description of Artificial Sequence: Synthetic oligonucleotide
ccucagaaagugucacaua

SEQ ID NO: 2851838 - RNA, 19 nt, Artificial Sequence
  Description of Artificial Sequence: Synthetic oligonucleotide
gagcaccacuggggucuug

SEQ ID NO: 2851839 - RNA, 19 nt, Artificial Sequence
  Description of Artificial Sequence: Synthetic oligonucleotide
augggucuuugggguuuau

SEQ ID NO: 2851840 - RNA, 19 nt, Artificial Sequence
  Description of Artificial Sequence: Synthetic oligonucleotide
ggacaacagcagucauucu

SEQ ID NO: 2851841 - RNA, 19 nt, Artificial Sequence
  Description of Artificial Sequence: Synthetic oligonucleotide
cuguugccaaagugauuuu

SEQ ID NO: 2851842 - RNA, 19 nt, Artificial Sequence
  Description of Artificial Sequence: Synthetic oligonucleotide
cccaaguguaaggguccuc

SEQ ID NO: 2851843 - RNA, 19 nt, Artificial Sequence
  Description of Artificial Sequence: Synthetic oligonucleotide
gcaccacuggggucuugcu

SEQ ID NO: 2851844 - RNA, 19 nt, Artificial Sequence
  Description of Artificial Sequence: Synthetic oligonucleotide
cagagauuccaggguccau

SEQ ID NO: 2851845 - RNA, 19 nt, Artificial Sequence
  Description of Artificial Sequence: Synthetic oligonucleotide
ccccuuugugguagaaaau

SEQ ID NO: 2851846 - RNA, 19 nt, Artificial Sequence
  Description of Artificial Sequence: Synthetic oligonucleotide
ggucuugcugaugggucuu

SEQ ID NO: 2851847 - RNA, 19 nt, Artificial Sequence
  Description of Artificial Sequence: Synthetic oligonucleotide
ccgucacagugugaauccu

SEQ ID NO: 2851848 - RNA, 19 nt, Artificial Sequence
  Description of Artificial Sequence: Synthetic oligonucleotide
ccaccgucacagugugaau

SEQ ID NO: 2851849 - RNA, 19 nt, Artificial Sequence
  Description of Artificial Sequence: Synthetic oligonucleotide
ggagcaccacuggggucuu

SEQ ID NO: 2851850 - RNA, 19 nt, Artificial Sequence
  Description of Artificial Sequence: Synthetic oligonucleotide
uuaaugaucauuuucauag

SEQ ID NO: 2851851 - RNA, 19 nt, Artificial Sequence
  Description of Artificial Sequence: Synthetic oligonucleotide
auuuucauagcuuuguucc

SEQ ID NO: 2851852 - RNA, 19 nt, Artificial Sequence
  Description of Artificial Sequence: Synthetic oligonucleotide
uucaauaauucuuaaaugc

SEQ ID NO: 2851853 - RNA, 19 nt, Artificial Sequence
  Description of Artificial Sequence: Synthetic oligonucleotide
uguaauauuuuaauguucc

SEQ ID NO: 2851854 - RNA, 19 nt, Artificial Sequence
  Description of Artificial Sequence: Synthetic oligonucleotide
uuuauaggcauuaaaggcc

SEQ ID NO: 2851855 - RNA, 19 nt, Artificial Sequence
  Description of Artificial Sequence: Synthetic oligonucleotide
augauuuucaagaaaacgc

SEQ ID NO: 2851856 - RNA, 19 nt, Artificial Sequence
  Description of Artificial Sequence: Synthetic oligonucleotide
ucauuaaugaucauuuuca

SEQ ID NO: 2851857 - RNA, 19 nt, Artificial Sequence
  Description of Artificial Sequence: Synthetic oligonucleotide
ucuucaauaauucuuaaau

SEQ ID NO: 2851858 - RNA, 19 nt, Artificial Sequence
  Description of Artificial Sequence: Synthetic oligonucleotide
auuacauuggcuuuaacca

SEQ ID NO: 2851859 - RNA, 19 nt, Artificial Sequence
  Description of Artificial Sequence: Synthetic oligonucleotide
gauuacauuggcuuuaacc

SEQ ID NO: 2851860 - RNA, 19 nt, Artificial Sequence
  Description of Artificial Sequence: Synthetic oligonucleotide
aaugcuuugcuuugccucc

SEQ ID NO: 2851861 - RNA, 19 nt, Artificial Sequence
  Description of Artificial Sequence: Synthetic oligonucleotide
acuuuauaggcauuaaagg

SEQ ID NO: 2851862 - RNA, 19 nt, Artificial Sequence
  Description of Artificial Sequence: Synthetic oligonucleotide
cuuuauaggcauuaaaggc

SEQ ID NO: 2851863 - RNA, 19 nt, Artificial Sequence
  Description of Artificial Sequence: Synthetic oligonucleotide
uuugcuaaagcacuguacc

SEQ ID NO: 2851864 - RNA, 19 nt, Artificial Sequence
  Description of Artificial Sequence: Synthetic oligonucleotide
ugauauagcauuccaaacc

SEQ ID NO: 2851865 - RNA, 19 nt, Artificial Sequence
  Description of Artificial Sequence: Synthetic oligonucleotide
uuucucaugauuuucaaga

SEQ ID NO: 2851866 - RNA, 19 nt, Artificial Sequence
  Description of Artificial Sequence: Synthetic oligonucleotide
aaaugcuuugcuuugccuc

SEQ ID NO: 2851867 - RNA, 19 nt, Artificial Sequence
  Description of Artificial Sequence: Synthetic oligonucleotide
aauucuuaaaugcuuugcu

SEQ ID NO: 2851868 - RNA, 19 nt, Artificial Sequence
  Description of Artificial Sequence: Synthetic oligonucleotide
auuccaaaccuccaucucc

SEQ ID NO: 2851869 - RNA, 19 nt, Artificial Sequence
  Description of Artificial Sequence: Synthetic oligonucleotide
uauagcauuccaaaccucc

SEQ ID NO: 2851870 - RNA, 19 nt, Artificial Sequence
  Description of Artificial Sequence: Synthetic oligonucleotide
ucaauaauucuuaaaugcu

SEQ ID NO: 2851871 - RNA, 19 nt, Artificial Sequence
  Description of Artificial Sequence: Synthetic oligonucleotide
aaacaaucuucauagauuu

SEQ ID NO: 2851872 - RNA, 19 nt, Artificial Sequence
  Description of Artificial Sequence: Synthetic oligonucleotide
uucaguagugcacaaagca

SEQ ID NO: 2851873 - RNA, 19 nt, Artificial Sequence
  Description of Artificial Sequence: Synthetic oligonucleotide
gacuuuauaggcauuaaag

SEQ ID NO: 2851874 - RNA, 19 nt, Artificial Sequence
  Description of Artificial Sequence: Synthetic oligonucleotide
uucauagauuucaagacga

SEQ ID NO: 2851875 - RNA, 19 nt, Artificial Sequence
  Description of Artificial Sequence: Synthetic oligonucleotide
uagaggaagaacaaaacaa

SEQ ID NO: 2851876 - RNA, 19 nt, Artificial Sequence
  Description of Artificial Sequence: Synthetic oligonucleotide
aaugaucauuuucauagcu

SEQ ID NO: 2851877 - RNA, 19 nt, Artificial Sequence
  Description of Artificial Sequence: Synthetic oligonucleotide
ucaagaaaacgcugaaagg

SEQ ID NO: 2851878 - RNA, 19 nt, Artificial Sequence
  Description of Artificial Sequence: Synthetic oligonucleotide
ucuucauagauuucaagac

SEQ ID NO: 2851879 - RNA, 19 nt, Artificial Sequence
  Description of Artificial Sequence: Synthetic oligonucleotide
aguucaguagugcacaaag

SEQ ID NO: 2851880 - RNA, 19 nt, Artificial Sequence
  Description of Artificial Sequence: Synthetic oligonucleotide
aaagcagucuuaucauggg

SEQ ID NO: 2851881 - RNA, 19 nt, Artificial Sequence
  Description of Artificial Sequence: Synthetic oligonucleotide
gauuucaagacgaucacgc

SEQ ID NO: 2851882 - RNA, 19 nt, Artificial Sequence
  Description of Artificial Sequence: Synthetic oligonucleotide
aucuucauagauuucaaga

SEQ ID NO: 2851883 - RNA, 19 nt, Artificial Sequence
  Description of Artificial Sequence: Synthetic oligonucleotide
ucugauauagcauuccaaa

SEQ ID NO: 2851884 - RNA, 19 nt, Artificial Sequence
  Description of Artificial Sequence: Synthetic oligonucleotide
uuuucuucaauaauucuua

SEQ ID NO: 2851885 - RNA, 19 nt, Artificial Sequence
  Description of Artificial Sequence: Synthetic oligonucleotide
gaaaggauuccuuagcuuc

SEQ ID NO: 2851886 - RNA, 19 nt, Artificial Sequence
  Description of Artificial Sequence: Synthetic oligonucleotide
caugauuuucaagaaaacg

SEQ ID NO: 2851887 - RNA, 19 nt, Artificial Sequence
  Description of Artificial Sequence: Synthetic oligonucleotide
cuucauagauuucaagacg

SEQ ID NO: 2851888 - RNA, 19 nt, Artificial Sequence
  Description of Artificial Sequence: Synthetic oligonucleotide
uuuuguaucugguugugga

SEQ ID NO: 2851889 - RNA, 19 nt, Artificial Sequence
  Description of Artificial Sequence: Synthetic oligonucleotide
aagaacaaaacaaucuuca

SEQ ID NO: 2851890 - RNA, 19 nt, Artificial Sequence
  Description of Artificial Sequence: Synthetic oligonucleotide
caaagcagucuuaucaugg

SEQ ID NO: 2851891 - RNA, 19 nt, Artificial Sequence
  Description of Artificial Sequence: Synthetic oligonucleotide
ucaguagugcacaaagcag

SEQ ID NO: 2851892 - RNA, 19 nt, Artificial Sequence
  Description of Artificial Sequence: Synthetic oligonucleotide
agcauuggaagguacccgc

SEQ ID NO: 2851893 - RNA, 19 nt, Artificial Sequence
  Description of Artificial Sequence: Synthetic oligonucleotide
ugcauguaauauuuuaaug

SEQ ID NO: 2851894 - RNA, 19 nt, Artificial Sequence
  Description of Artificial Sequence: Synthetic oligonucleotide
ucagcuuugcuaaagcacu

SEQ ID NO: 2851895 - RNA, 19 nt, Artificial Sequence
  Description of Artificial Sequence: Synthetic oligonucleotide
auagauuucaagacgauca

SEQ ID NO: 2851896 - RNA, 19 nt, Artificial Sequence
  Description of Artificial Sequence: Synthetic oligonucleotide
uuugcauguaauauuuuaa

SEQ ID NO: 2851897 - RNA, 19 nt, Artificial Sequence
  Description of Artificial Sequence: Synthetic oligonucleotide
uucaagacgaucacgcucu

SEQ ID NO: 2851898 - RNA, 19 nt, Artificial Sequence
  Description of Artificial Sequence: Synthetic oligonucleotide
uaaagcacuguaccgagga

SEQ ID NO: 2851899 - RNA, 19 nt, Artificial Sequence
  Description of Artificial Sequence: Synthetic oligonucleotide
cuucaauaauucuuaaaug

SEQ ID NO: 2851900 - RNA, 19 nt, Artificial Sequence
  Description of Artificial Sequence: Synthetic oligonucleotide
auuuugaucuugcuucuuc

SEQ ID NO: 2851901 - RNA, 19 nt, Artificial Sequence
  Description of Artificial Sequence: Synthetic oligonucleotide
uguauuccaaguauuaauu

SEQ ID NO: 2851902 - RNA, 19 nt, Artificial Sequence
  Description of Artificial Sequence: Synthetic oligonucleotide
uuauaggcauuaaaggccu

SEQ ID NO: 2851903 - RNA, 19 nt, Artificial Sequence
  Description of Artificial Sequence: Synthetic oligonucleotide
uuguagaggaagaacaaaa

SEQ ID NO: 2851904 - RNA, 19 nt, Artificial Sequence
  Description of Artificial Sequence: Synthetic oligonucleotide
aaaacgcugaaaggauucc

SEQ ID NO: 2851905 - RNA, 19 nt, Artificial Sequence
  Description of Artificial Sequence: Synthetic oligonucleotide
uguagaggaagaacaaaac

SEQ ID NO: 2851906 - RNA, 19 nt, Artificial Sequence
  Description of Artificial Sequence: Synthetic oligonucleotide
uuagcuuccuuguauuuug

SEQ ID NO: 2851907 - RNA, 19 nt, Artificial Sequence
  Description of Artificial Sequence: Synthetic oligonucleotide
agcuuuguucccaugaagc

SEQ ID NO: 2851908 - RNA, 19 nt, Artificial Sequence
  Description of Artificial Sequence: Synthetic oligonucleotide
uuggcuuuaaccaguucag

SEQ ID NO: 2851909 - RNA, 19 nt, Artificial Sequence
  Description of Artificial Sequence: Synthetic oligonucleotide
uuacauuggcuuuaaccag

SEQ ID NO: 2851910 - RNA, 19 nt, Artificial Sequence
  Description of Artificial Sequence: Synthetic oligonucleotide
ucuuaaaugcuuugcuuug

SEQ ID NO: 2851911 - RNA, 19 nt, Artificial Sequence
  Description of Artificial Sequence: Synthetic oligonucleotide
uuaaaugcuuugcuuugcc

SEQ ID NO: 2851912 - RNA, 19 nt, Artificial Sequence
  Description of Artificial Sequence: Synthetic oligonucleotide
ucuuaucauggguugcugg

SEQ ID NO: 2851913 - RNA, 19 nt, Artificial Sequence
  Description of Artificial Sequence: Synthetic oligonucleotide
aagguacccgcuuuucuuc

SEQ ID NO: 2851914 - RNA, 19 nt, Artificial Sequence
  Description of Artificial Sequence: Synthetic oligonucleotide
aagacgaucacgcucugau

SEQ ID NO: 2851915 - RNA, 19 nt, Artificial Sequence
  Description of Artificial Sequence: Synthetic oligonucleotide
uuuucucaugauuuucaag

SEQ ID NO: 2851916 - RNA, 19 nt, Artificial Sequence
  Description of Artificial Sequence: Synthetic oligonucleotide
uuuugcauguaauauuuua

SEQ ID NO: 2851917 - RNA, 19 nt, Artificial Sequence
  Description of Artificial Sequence: Synthetic oligonucleotide
ucccaugaagcauuggaag

SEQ ID NO: 2851918 - RNA, 19 nt, Artificial Sequence
  Description of Artificial Sequence: Synthetic oligonucleotide
ucggucuggacuuuauagg

SEQ ID NO: 2851919 - RNA, 19 nt, Artificial Sequence
  Description of Artificial Sequence: Synthetic oligonucleotide
uaauucuuaaaugcuuugc

SEQ ID NO: 2851920 - RNA, 19 nt, Artificial Sequence
  Description of Artificial Sequence: Synthetic oligonucleotide
auaauucuuaaaugcuuug

SEQ ID NO: 2851921 - RNA, 19 nt, Artificial Sequence
  Description of Artificial Sequence: Synthetic oligonucleotide
aauaauucuuaaaugcuuu

SEQ ID NO: 2851922 - RNA, 19 nt, Artificial Sequence
  Description of Artificial Sequence: Synthetic oligonucleotide
uugcuaaagcacuguaccg

SEQ ID NO: 2851923 - RNA, 19 nt, Artificial Sequence
  Description of Artificial Sequence: Synthetic oligonucleotide
uuucaagacgaucacgcuc

SEQ ID NO: 2851924 - RNA, 19 nt, Artificial Sequence
  Description of Artificial Sequence: Synthetic oligonucleotide
uucuuaaaugcuuugcuuu

SEQ ID NO: 2851925 - RNA, 19 nt, Artificial Sequence
  Description of Artificial Sequence: Synthetic oligonucleotide
uuuuguagaggaagaacaa

SEQ ID NO: 2851926 - RNA, 19 nt, Artificial Sequence
  Description of Artificial Sequence: Synthetic oligonucleotide
uuguauuccaaguauuaau

SEQ ID NO: 2851927 - RNA, 19 nt, Artificial Sequence
  Description of Artificial Sequence: Synthetic oligonucleotide
ugaucauuuucauagcuuu

SEQ ID NO: 2851928 - RNA, 19 nt, Artificial Sequence
  Description of Artificial Sequence: Synthetic oligonucleotide
gauauagcauuccaaaccu

SEQ ID NO: 2851929 - RNA, 19 nt, Artificial Sequence
  Description of Artificial Sequence: Synthetic oligonucleotide
aagcacuguaccgaggauc

SEQ ID NO: 2851930 - RNA, 19 nt, Artificial Sequence
  Description of Artificial Sequence: Synthetic oligonucleotide
uuuucaagaaaacgcugaa

SEQ ID NO: 2851931 - RNA, 19 nt, Artificial Sequence
  Description of Artificial Sequence: Synthetic oligonucleotide
cucaugauuuucaagaaaa

SEQ ID NO: 2851932 - RNA, 19 nt, Artificial Sequence
  Description of Artificial Sequence: Synthetic oligonucleotide
uuccaaaccuccaucuccc

SEQ ID NO: 2851933 - RNA, 19 nt, Artificial Sequence
  Description of Artificial Sequence: Synthetic oligonucleotide
cucggucuggacuuuauag

SEQ ID NO: 2851934 - RNA, 19 nt, Artificial Sequence
  Description of Artificial Sequence: Synthetic oligonucleotide
ucaugauuuucaagaaaac

SEQ ID NO: 2851935 - RNA, 19 nt, Artificial Sequence
  Description of Artificial Sequence: Synthetic oligonucleotide
aagucauuuucucaugauu

SEQ ID NO: 2851936 - RNA, 19 nt, Artificial Sequence
  Description of Artificial Sequence: Synthetic oligonucleotide
uguggaagucauuuucuca

SEQ ID NO: 2851937 - RNA, 19 nt, Artificial Sequence
  Description of Artificial Sequence: Synthetic oligonucleotide
guagaggaagaacaaaaca

SEQ ID NO: 2851938 - RNA, 19 nt, Artificial Sequence
  Description of Artificial Sequence: Synthetic oligonucleotide
caagaaaacgcugaaagga

SEQ ID NO: 2851939 - RNA, 19 nt, Artificial Sequence
  Description of Artificial Sequence: Synthetic oligonucleotide
uuuucauagcuuuguuccc

SEQ ID NO: 2851940 - RNA, 19 nt, Artificial Sequence
  Description of Artificial Sequence: Synthetic oligonucleotide
auaggcauuaaaggccugc

SEQ ID NO: 2851941 - RNA, 19 nt, Artificial Sequence
  Description of Artificial Sequence: Synthetic oligonucleotide
uuuugaucuugcuucuucu

SEQ ID NO: 2851942 - RNA, 19 nt, Artificial Sequence
  Description of Artificial Sequence: Synthetic oligonucleotide
ucucacucagcuuugcuaa

SEQ ID NO: 2851943 - RNA, 19 nt, Artificial Sequence
  Description of Artificial Sequence: Synthetic oligonucleotide
uuuaaccaguucaguagug

SEQ ID NO: 2851944 - RNA, 19 nt, Artificial Sequence
  Description of Artificial Sequence: Synthetic oligonucleotide
gaacaaaacaaucuucaua

SEQ ID NO: 2851945 - RNA, 19 nt, Artificial Sequence
  Description of Artificial Sequence: Synthetic oligonucleotide
auguaauauuuuaauguuc

SEQ ID NO: 2851946 - RNA, 19 nt, Artificial Sequence
  Description of Artificial Sequence: Synthetic oligonucleotide
cucagcuuugcuaaagcac

SEQ ID NO: 2851947 - RNA, 19 nt, Artificial Sequence
  Description of Artificial Sequence: Synthetic oligonucleotide
uacauuggcuuuaaccagu

SEQ ID NO: 2851948 - RNA, 19 nt, Artificial Sequence
  Description of Artificial Sequence: Synthetic oligonucleotide
uugcauguaauauuuuaau

SEQ ID NO: 2851949 - RNA, 19 nt, Artificial Sequence
  Description of Artificial Sequence: Synthetic oligonucleotide
agcauuccaaaccuccauc

SEQ ID NO: 2851950 - RNA, 19 nt, Artificial Sequence
  Description of Artificial Sequence: Synthetic oligonucleotide
uaaugaucauuuucauagc

SEQ ID NO: 2851951 - RNA, 19 nt, Artificial Sequence
  Description of Artificial Sequence: Synthetic oligonucleotide
uuugcuuugccuccuuccu

SEQ ID NO: 2851952 - RNA, 19 nt, Artificial Sequence
  Description of Artificial Sequence: Synthetic oligonucleotide
uguaccgaggaucauuaau

SEQ ID NO: 2851953 - RNA, 19 nt, Artificial Sequence
  Description of Artificial Sequence: Synthetic oligonucleotide
uccuuuguauuccaaguau

SEQ ID NO: 2851954 - RNA, 19 nt, Artificial Sequence
  Description of Artificial Sequence: Synthetic oligonucleotide
uccccaaacaucuguucgg

SEQ ID NO: 2851955 - RNA, 19 nt, Artificial Sequence
  Description of Artificial Sequence: Synthetic oligonucleotide
cuuugcuaaagcacuguac

SEQ ID NO: 2851956 - RNA, 19 nt, Artificial Sequence
  Description of Artificial Sequence: Synthetic oligonucleotide
gcuuuaaccaguucaguag

SEQ ID NO: 2851957 - RNA, 19 nt, Artificial Sequence
  Description of Artificial Sequence: Synthetic oligonucleotide
cugauauagcauuccaaac

SEQ ID NO: 2851958 - RNA, 19 nt, Artificial Sequence
  Description of Artificial Sequence: Synthetic oligonucleotide
uuuguucccaugaagcauu

SEQ ID NO: 2851959 - RNA, 19 nt, Artificial Sequence
  Description of Artificial Sequence: Synthetic oligonucleotide
uuguaucugguuguggaag

SEQ ID NO: 2851960 - RNA, 19 nt, Artificial Sequence
  Description of Artificial Sequence: Synthetic oligonucleotide
aggaagaacaaaacaaucu

SEQ ID NO: 2851961 - RNA, 19 nt, Artificial Sequence
  Description of Artificial Sequence: Synthetic oligonucleotide
uuaaccaguucaguagugc

SEQ ID NO: 2851962 - RNA, 19 nt, Artificial Sequence
  Description of Artificial Sequence: Synthetic oligonucleotide
aaccaguucaguagugcac

SEQ ID NO: 2851963 - RNA, 19 nt, Artificial Sequence
  Description of Artificial Sequence: Synthetic oligonucleotide
gaagcauuggaagguaccc

SEQ ID NO: 2851964 - RNA, 19 nt, Artificial Sequence
  Description of Artificial Sequence: Synthetic oligonucleotide
auuaaugaucauuuucaua

SEQ ID NO: 2851965 - RNA, 19 nt, Artificial Sequence
  Description of Artificial Sequence: Synthetic oligonucleotide
auuuucaagaaaacgcuga

SEQ ID NO: 2851966 - RNA, 19 nt, Artificial Sequence
  Description of Artificial Sequence: Synthetic oligonucleotide
cuuugcuuugccuccuucc

SEQ ID NO: 2851967 - RNA, 19 nt, Artificial Sequence
  Description of Artificial Sequence: Synthetic oligonucleotide
uaaccaguucaguagugca

SEQ ID NO: 2851968 - RNA, 19 nt, Artificial Sequence
  Description of Artificial Sequence: Synthetic oligonucleotide
ucucaugauuuucaagaaa

SEQ ID NO: 2851969 - RNA, 19 nt, Artificial Sequence
  Description of Artificial Sequence: Synthetic oligonucleotide
aagcauuggaagguacccg

SEQ ID NO: 2851970 - RNA, 19 nt, Artificial Sequence
  Description of Artificial Sequence: Synthetic oligonucleotide
uagcuuuguucccaugaag

SEQ ID NO: 2851971 - RNA, 19 nt, Artificial Sequence
  Description of Artificial Sequence: Synthetic oligonucleotide
uuuuccucuuucucggucu

SEQ ID NO: 2851972 - RNA, 19 nt, Artificial Sequence
  Description of Artificial Sequence: Synthetic oligonucleotide
guaccgaggaucauuaaug

SEQ ID NO: 2851973 - RNA, 19 nt, Artificial Sequence
  Description of Artificial Sequence: Synthetic oligonucleotide
aucacgcucugauauagca

SEQ ID NO: 2851974 - RNA, 19 nt, Artificial Sequence
  Description of Artificial Sequence: Synthetic oligonucleotide
uuuguauuccaaguauuaa

SEQ ID NO: 2851975 - RNA, 19 nt, Artificial Sequence
  Description of Artificial Sequence: Synthetic oligonucleotide
uucuucaauaauucuuaaa

SEQ ID NO: 2851976 - RNA, 19 nt, Artificial Sequence
  Description of Artificial Sequence: Synthetic oligonucleotide
cuccccaaacaucuguucg

SEQ ID NO: 2851977 - RNA, 19 nt, Artificial Sequence
  Description of Artificial Sequence: Synthetic oligonucleotide
agauuucaagacgaucacg

SEQ ID NO: 2851978 - RNA, 19 nt, Artificial Sequence
  Description of Artificial Sequence: Synthetic oligonucleotide
acaaagcagucuuaucaug

SEQ ID NO: 2851979 - RNA, 19 nt, Artificial Sequence
  Description of Artificial Sequence: Synthetic oligonucleotide
ugcuaaagcacuguaccga

SEQ ID NO: 2851980 - RNA, 19 nt, Artificial Sequence
  Description of Artificial Sequence: Synthetic oligonucleotide
auucuuaaaugcuuugcuu

SEQ ID NO: 2851981 - RNA, 19 nt, Artificial Sequence
  Description of Artificial Sequence: Synthetic oligonucleotide
uguaucugguuguggaagu

SEQ ID NO: 2851982 - RNA, 19 nt, Artificial Sequence
  Description of Artificial Sequence: Synthetic oligonucleotide
gaaaacgcugaaaggauuc

SEQ ID NO: 2851983 - RNA, 19 nt, Artificial Sequence
  Description of Artificial Sequence: Synthetic oligonucleotide
aucauuuucauagcuuugu

SEQ ID NO: 2851984 - RNA, 19 nt, Artificial Sequence
  Description of Artificial Sequence: Synthetic oligonucleotide
uuucauagcuuuguuccca

SEQ ID NO: 2851985 - RNA, 19 nt, Artificial Sequence
  Description of Artificial Sequence: Synthetic oligonucleotide
uucccaugaagcauuggaa

SEQ ID NO: 2851986 - RNA, 19 nt, Artificial Sequence
  Description of Artificial Sequence: Synthetic oligonucleotide
aagaaaacgcugaaaggau

SEQ ID NO: 2851987 - RNA, 19 nt, Artificial Sequence
  Description of Artificial Sequence: Synthetic oligonucleotide
uaccgaggaucauuaauga

SEQ ID NO: 2851988 - RNA, 19 nt, Artificial Sequence
  Description of Artificial Sequence: Synthetic oligonucleotide
uaaaugcuuugcuuugccu

SEQ ID NO: 2851989 - RNA, 19 nt, Artificial Sequence
  Description of Artificial Sequence: Synthetic oligonucleotide
uucucaugauuuucaagaa

SEQ ID NO: 2851990 - RNA, 19 nt, Artificial Sequence
  Description of Artificial Sequence: Synthetic oligonucleotide
uuuguaucugguuguggaa

SEQ ID NO: 2851991 - RNA, 19 nt, Artificial Sequence
  Description of Artificial Sequence: Synthetic oligonucleotide
uagugcacaaagcagucuu

SEQ ID NO: 2851992 - RNA, 19 nt, Artificial Sequence
  Description of Artificial Sequence: Synthetic oligonucleotide
uuuguagaggaagaacaaa

SEQ ID NO: 2851993 - RNA, 19 nt, Artificial Sequence
  Description of Artificial Sequence: Synthetic oligonucleotide
guucccaugaagcauugga

SEQ ID NO: 2851994 - RNA, 19 nt, Artificial Sequence
  Description of Artificial Sequence: Synthetic oligonucleotide
agucauuuucucaugauuu

SEQ ID NO: 2851995 - RNA, 19 nt, Artificial Sequence
  Description of Artificial Sequence: Synthetic oligonucleotide
uugaucuugcuucuucuuu

SEQ ID NO: 2851996 - RNA, 19 nt, Artificial Sequence
  Description of Artificial Sequence: Synthetic oligonucleotide
uuccuuuguauuccaagua

SEQ ID NO: 2851997 - RNA, 19 nt, Artificial Sequence
  Description of Artificial Sequence: Synthetic oligonucleotide
cuuaaaugcuuugcuuugc

SEQ ID NO: 2851998 - RNA, 19 nt, Artificial Sequence
  Description of Artificial Sequence: Synthetic oligonucleotide
uuccuuagcuuccuuguau

SEQ ID NO: 2851999 - RNA, 19 nt, Artificial Sequence
  Description of Artificial Sequence: Synthetic oligonucleotide
ucuuucucggucuggacuu

SEQ ID NO: 2852000 - RNA, 19 nt, Artificial Sequence
  Description of Artificial Sequence: Synthetic oligonucleotide
uccaaguauuaauuguuuu

SEQ ID NO: 2852001 - RNA, 19 nt, Artificial Sequence
  Description of Artificial Sequence: Synthetic oligonucleotide
uuccaaguauuaauuguuu

SEQ ID NO: 2852002 - RNA, 19 nt, Artificial Sequence
  Description of Artificial Sequence: Synthetic oligonucleotide
auuucaagacgaucacgcu

SEQ ID NO: 2852003 - RNA, 19 nt, Artificial Sequence
  Description of Artificial Sequence: Synthetic oligonucleotide
cauagcuuuguucccauga

SEQ ID NO: 2852004 - RNA, 19 nt, Artificial Sequence
  Description of Artificial Sequence: Synthetic oligonucleotide
aguagugcacaaagcaguc

SEQ ID NO: 2852005 - RNA, 19 nt, Artificial Sequence
  Description of Artificial Sequence: Synthetic oligonucleotide
auuuucucaugauuuucaa

SEQ ID NO: 2852006 - RNA, 19 nt, Artificial Sequence
  Description of Artificial Sequence: Synthetic oligonucleotide
agaggaagaacaaaacaau

SEQ ID NO: 2852007 - RNA, 19 nt, Artificial Sequence
  Description of Artificial Sequence: Synthetic oligonucleotide
uucucacucagcuuugcua

SEQ ID NO: 2852008 - RNA, 19 nt, Artificial Sequence
  Description of Artificial Sequence: Synthetic oligonucleotide
acucagcuuugcuaaagca

SEQ ID NO: 2852009 - RNA, 19 nt, Artificial Sequence
  Description of Artificial Sequence: Synthetic oligonucleotide
cuaaagcacuguaccgagg

SEQ ID NO: 2852010 - RNA, 19 nt, Artificial Sequence
  Description of Artificial Sequence: Synthetic oligonucleotide
ugaaaggauuccuuagcuu

SEQ ID NO: 2852011 - RNA, 19 nt, Artificial Sequence
  Description of Artificial Sequence: Synthetic oligonucleotide
uggaagucauuuucucaug

SEQ ID NO: 2852012 - RNA, 19 nt, Artificial Sequence
  Description of Artificial Sequence: Synthetic oligonucleotide
cauagauuucaagacgauc

SEQ ID NO: 2852013 - RNA, 19 nt, Artificial Sequence
  Description of Artificial Sequence: Synthetic oligonucleotide
accuccaucuccccaaaca

SEQ ID NO: 2852014 - RNA, 19 nt, Artificial Sequence
  Description of Artificial Sequence: Synthetic oligonucleotide
uuaucauggguugcuggug

SEQ ID NO: 2852015 - RNA, 19 nt, Artificial Sequence
  Description of Artificial Sequence: Synthetic oligonucleotide
ucauagauuucaagacgau

SEQ ID NO: 2852016 - RNA, 19 nt, Artificial Sequence
  Description of Artificial Sequence: Synthetic oligonucleotide
cuuuguauuccaaguauua

SEQ ID NO: 2852017 - RNA, 19 nt, Artificial Sequence
  Description of Artificial Sequence: Synthetic oligonucleotide
uuucucacucagcuuugcu

SEQ ID NO: 2852018 - RNA, 19 nt, Artificial Sequence
  Description of Artificial Sequence: Synthetic oligonucleotide
uuucaagaaaacgcugaaa

SEQ ID NO: 2852019 - RNA, 19 nt, Artificial Sequence
  Description of Artificial Sequence: Synthetic oligonucleotide
agauuacauuggcuuuaac

SEQ ID NO: 2852020 - RNA, 19 nt, Artificial Sequence
  Description of Artificial Sequence: Synthetic oligonucleotide
uuguggaagucauuuucuc

SEQ ID NO: 2852021 - RNA, 19 nt, Artificial Sequence
  Description of Artificial Sequence: Synthetic oligonucleotide
aaacgcugaaaggauuccu

SEQ ID NO: 2852022 - RNA, 19 nt, Artificial Sequence
  Description of Artificial Sequence: Synthetic oligonucleotide
gauuccuuagcuuccuugu

SEQ ID NO: 2852023 - RNA, 19 nt, Artificial Sequence
  Description of Artificial Sequence: Synthetic oligonucleotide
acaaaacaaucuucauaga

SEQ ID NO: 2852024 - RNA, 19 nt, Artificial Sequence
  Description of Artificial Sequence: Synthetic oligonucleotide
auagcuuuguucccaugaa

SEQ ID NO: 2852025 - RNA, 19 nt, Artificial Sequence
  Description of Artificial Sequence: Synthetic oligonucleotide
gguuguggaagucauuuuc

SEQ ID NO: 2852026 - RNA, 19 nt, Artificial Sequence
  Description of Artificial Sequence: Synthetic oligonucleotide
ccgaggaucauuaaugauc

SEQ ID NO: 2852027 - RNA, 19 nt, Artificial Sequence
  Description of Artificial Sequence: Synthetic oligonucleotide
aggaucauuaaugaucauu

SEQ ID NO: 2852028 - RNA, 19 nt, Artificial Sequence
  Description of Artificial Sequence: Synthetic oligonucleotide
ucacucagcuuugcuaaag

SEQ ID NO: 2852029 - RNA, 19 nt, Artificial Sequence
  Description of Artificial Sequence: Synthetic oligonucleotide
aaccuccaucuccccaaac

SEQ ID NO: 2852030 - RNA, 19 nt, Artificial Sequence
  Description of Artificial Sequence: Synthetic oligonucleotide
gacgaucacgcucugauau

SEQ ID NO: 2852031 - RNA, 19 nt, Artificial Sequence
  Description of Artificial Sequence: Synthetic oligonucleotide
auuccaaguauuaauuguu

SEQ ID NO: 2852032 - RNA, 19 nt, Artificial Sequence
  Description of Artificial Sequence: Synthetic oligonucleotide
uuugaucuugcuucuucuu

SEQ ID NO: 2852033 - RNA, 19 nt, Artificial Sequence
  Description of Artificial Sequence: Synthetic oligonucleotide
gcuaaagcacuguaccgag

SEQ ID NO: 2852034 - RNA, 19 nt, Artificial Sequence
  Description of Artificial Sequence: Synthetic oligonucleotide
cccaugaagcauuggaagg

SEQ ID NO: 2852035 - RNA, 19 nt, Artificial Sequence
  Description of Artificial Sequence: Synthetic oligonucleotide
cacucagcuuugcuaaagc

SEQ ID NO: 2852036 - RNA, 19 nt, Artificial Sequence
  Description of Artificial Sequence: Synthetic oligonucleotide
uagcauuccaaaccuccau

SEQ ID NO: 2852037 - RNA, 19 nt, Artificial Sequence
  Description of Artificial Sequence: Synthetic oligonucleotide
augaagcauuggaagguac

SEQ ID NO: 2852038 - RNA, 19 nt, Artificial Sequence
  Description of Artificial Sequence: Synthetic oligonucleotide
ccuuguauuuugaucuugc

SEQ ID NO: 2852039 - RNA, 19 nt, Artificial Sequence
  Description of Artificial Sequence: Synthetic oligonucleotide
cauguaauauuuuaauguu

SEQ ID NO: 2852040 - RNA, 19 nt, Artificial Sequence
  Description of Artificial Sequence: Synthetic oligonucleotide
aaagcacuguaccgaggau

SEQ ID NO: 2852041 - RNA, 19 nt, Artificial Sequence
  Description of Artificial Sequence: Synthetic oligonucleotide
accaguucaguagugcaca

SEQ ID NO: 2852042 - RNA, 19 nt, Artificial Sequence
  Description of Artificial Sequence: Synthetic oligonucleotide
uauaggcauuaaaggccug

SEQ ID NO: 2852043 - RNA, 19 nt, Artificial Sequence
  Description of Artificial Sequence: Synthetic oligonucleotide
aagauuacauuggcuuuaa

SEQ ID NO: 2852044 - RNA, 19 nt, Artificial Sequence
  Description of Artificial Sequence: Synthetic oligonucleotide
ucacgcucugauauagcau

SEQ ID NO: 2852045 - RNA, 19 nt, Artificial Sequence
  Description of Artificial Sequence: Synthetic oligonucleotide
agucuuaucauggguugcu

SEQ ID NO: 2852046 - RNA, 19 nt, Artificial Sequence
  Description of Artificial Sequence: Synthetic oligonucleotide
auuggaagguacccgcuuu

SEQ ID NO: 2852047 - RNA, 19 nt, Artificial Sequence
  Description of Artificial Sequence: Synthetic oligonucleotide
auauagcauuccaaaccuc

SEQ ID NO: 2852048 - RNA, 19 nt, Artificial Sequence
  Description of Artificial Sequence: Synthetic oligonucleotide
agcacuguaccgaggauca

SEQ ID NO: 2852049 - RNA, 19 nt, Artificial Sequence
  Description of Artificial Sequence: Synthetic oligonucleotide
uuuucucacucagcuuugc

SEQ ID NO: 2852050 - RNA, 19 nt, Artificial Sequence
  Description of Artificial Sequence: Synthetic oligonucleotide
guucaguagugcacaaagc

SEQ ID NO: 2852051 - RNA, 19 nt, Artificial Sequence
  Description of Artificial Sequence: Synthetic oligonucleotide
ggauuccuuagcuuccuug

SEQ ID NO: 2852052 - RNA, 19 nt, Artificial Sequence
  Description of Artificial Sequence: Synthetic oligonucleotide
ugcacaaagcagucuuauc

SEQ ID NO: 2852053 - RNA, 19 nt, Artificial Sequence
  Description of Artificial Sequence: Synthetic oligonucleotide
uccuuagcuuccuuguauu

SEQ ID NO: 2852054 - RNA, 19 nt, Artificial Sequence
  Description of Artificial Sequence: Synthetic oligonucleotide
uucauagcuuuguucccau

SEQ ID NO: 2852055 - RNA, 19 nt, Artificial Sequence
  Description of Artificial Sequence: Synthetic oligonucleotide
gcagucuuaucauggguug

SEQ ID NO: 2852056 - RNA, 19 nt, Artificial Sequence
  Description of Artificial Sequence: Synthetic oligonucleotide
uaggcauuaaaggccugcu

SEQ ID NO: 2852057 - RNA, 19 nt, Artificial Sequence
  Description of Artificial Sequence: Synthetic oligonucleotide
cauuccaaaccuccaucuc

SEQ ID NO: 2852058 - RNA, 19 nt, Artificial Sequence
  Description of Artificial Sequence: Synthetic oligonucleotide
ucuccccaaacaucuguuc

SEQ ID NO: 2852059 - RNA, 19 nt, Artificial Sequence
  Description of Artificial Sequence: Synthetic oligonucleotide
caauaauucuuaaaugcuu

SEQ ID NO: 2852060 - RNA, 19 nt, Artificial Sequence
  Description of Artificial Sequence: Synthetic oligonucleotide
cuuccuuuguauuccaagu

SEQ ID NO: 2852061 - RNA, 19 nt, Artificial Sequence
  Description of Artificial Sequence: Synthetic oligonucleotide
guggaagucauuuucucau

SEQ ID NO: 2852062 - RNA, 19 nt, Artificial Sequence
  Description of Artificial Sequence: Synthetic oligonucleotide
aacgcugaaaggauuccuu

SEQ ID NO: 2852063 - RNA, 19 nt, Artificial Sequence
  Description of Artificial Sequence: Synthetic oligonucleotide
ucauagcuuuguucccaug

SEQ ID NO: 2852064 - RNA, 19 nt, Artificial Sequence
  Description of Artificial Sequence: Synthetic oligonucleotide
ccuuccuuuguauuccaag

SEQ ID NO: 2852065 - RNA, 19 nt, Artificial Sequence
  Description of Artificial Sequence: Synthetic oligonucleotide
uagcuuccuuguauuuuga

SEQ ID NO: 2852066 - RNA, 19 nt, Artificial Sequence
  Description of Artificial Sequence: Synthetic oligonucleotide
gcuuccuuguauuuugauc

SEQ ID NO: 2852067 - RNA, 19 nt, Artificial Sequence
  Description of Artificial Sequence: Synthetic oligonucleotide
cucugauauagcauuccaa

SEQ ID NO: 2852068 - RNA, 19 nt, Artificial Sequence
  Description of Artificial Sequence: Synthetic oligonucleotide
caaaccuccaucuccccaa

SEQ ID NO: 2852069 - RNA, 19 nt, Artificial Sequence
  Description of Artificial Sequence: Synthetic oligonucleotide
cuuaucauggguugcuggu

SEQ ID NO: 2852070 - RNA, 19 nt, Artificial Sequence
  Description of Artificial Sequence: Synthetic oligonucleotide
cuuuaaccaguucaguagu

SEQ ID NO: 2852071 - RNA, 19 nt, Artificial Sequence
  Description of Artificial Sequence: Synthetic oligonucleotide
auagcauuccaaaccucca

SEQ ID NO: 2852072 - RNA, 19 nt, Artificial Sequence
  Description of Artificial Sequence: Synthetic oligonucleotide
uguucccaugaagcauugg

SEQ ID NO: 2852073 - RNA, 19 nt, Artificial Sequence
  Description of Artificial Sequence: Synthetic oligonucleotide
caguagugcacaaagcagu

SEQ ID NO: 2852074 - RNA, 19 nt, Artificial Sequence
  Description of Artificial Sequence: Synthetic oligonucleotide
accgaggaucauuaaugau

SEQ ID NO: 2852075 - RNA, 19 nt, Artificial Sequence
  Description of Artificial Sequence: Synthetic oligonucleotide
uuggaagguacccgcuuuu

SEQ ID NO: 2852076 - RNA, 19 nt, Artificial Sequence
  Description of Artificial Sequence: Synthetic oligonucleotide
agcagucuuaucauggguu

SEQ ID NO: 2852077 - RNA, 19 nt, Artificial Sequence
  Description of Artificial Sequence: Synthetic oligonucleotide
augaucauuuucauagcuu

SEQ ID NO: 2852078 - RNA, 19 nt, Artificial Sequence
  Description of Artificial Sequence: Synthetic oligonucleotide
ggaagaacaaaacaaucuu

SEQ ID NO: 2852079 - RNA, 19 nt, Artificial Sequence
  Description of Artificial Sequence: Synthetic oligonucleotide
uccaaaccuccaucucccc

SEQ ID NO: 2852080 - RNA, 19 nt, Artificial Sequence
  Description of Artificial Sequence: Synthetic oligonucleotide
cagcuuugcuaaagcacug

SEQ ID NO: 2852081 - RNA, 19 nt, Artificial Sequence
  Description of Artificial Sequence: Synthetic oligonucleotide
aaaccuccaucuccccaaa

SEQ ID NO: 2852082 - RNA, 19 nt, Artificial Sequence
  Description of Artificial Sequence: Synthetic oligonucleotide
guauuuugaucuugcuucu

SEQ ID NO: 2852083 - RNA, 19 nt, Artificial Sequence
  Description of Artificial Sequence: Synthetic oligonucleotide
ucaagacgaucacgcucug

SEQ ID NO: 2852084 - RNA, 19 nt, Artificial Sequence
  Description of Artificial Sequence: Synthetic oligonucleotide
acccgcuuuucuucaauaa

SEQ ID NO: 2852085 - RNA, 19 nt, Artificial Sequence
  Description of Artificial Sequence: Synthetic oligonucleotide
auuccuuagcuuccuugua

SEQ ID NO: 2852086 - RNA, 19 nt, Artificial Sequence
  Description of Artificial Sequence: Synthetic oligonucleotide
gaagucauuuucucaugau

SEQ ID NO: 2852087 - RNA, 19 nt, Artificial Sequence
  Description of Artificial Sequence: Synthetic oligonucleotide
gcuuuguucccaugaagca

SEQ ID NO: 2852088 - RNA, 19 nt, Artificial Sequence
  Description of Artificial Sequence: Synthetic oligonucleotide
gaagguacccgcuuuucuu

SEQ ID NO: 2852089 - RNA, 19 nt, Artificial Sequence
  Description of Artificial Sequence: Synthetic oligonucleotide
uggacuuuauaggcauuaa

SEQ ID NO: 2852090 - RNA, 19 nt, Artificial Sequence
  Description of Artificial Sequence: Synthetic oligonucleotide
gaucacgcucugauauagc

SEQ ID NO: 2852091 - RNA, 19 nt, Artificial Sequence
  Description of Artificial Sequence: Synthetic oligonucleotide
cagucuuaucauggguugc

SEQ ID NO: 2852092 - RNA, 19 nt, Artificial Sequence
  Description of Artificial Sequence: Synthetic oligonucleotide
ucucggucuggacuuuaua

SEQ ID NO: 2852093 - RNA, 19 nt, Artificial Sequence
  Description of Artificial Sequence: Synthetic oligonucleotide
agaaaacgcugaaaggauu

SEQ ID NO: 2852094 - RNA, 19 nt, Artificial Sequence
  Description of Artificial Sequence: Synthetic oligonucleotide
acgcugaaaggauuccuua

SEQ ID NO: 2852095 - RNA, 19 nt, Artificial Sequence
  Description of Artificial Sequence: Synthetic oligonucleotide
acuguaccgaggaucauua

SEQ ID NO: 2852096 - RNA, 19 nt, Artificial Sequence
  Description of Artificial Sequence: Synthetic oligonucleotide
agguacccgcuuuucuuca

SEQ ID NO: 2852097 - RNA, 19 nt, Artificial Sequence
  Description of Artificial Sequence: Synthetic oligonucleotide
ggcuuuaaccaguucagua

SEQ ID NO: 2852098 - RNA, 19 nt, Artificial Sequence
  Description of Artificial Sequence: Synthetic oligonucleotide
uuccucuuucucggucugg

SEQ ID NO: 2852099 - RNA, 19 nt, Artificial Sequence
  Description of Artificial Sequence: Synthetic oligonucleotide
aucauggguugcuggugcu

SEQ ID NO: 2852100 - RNA, 19 nt, Artificial Sequence
  Description of Artificial Sequence: Synthetic oligonucleotide
cgaggaucauuaaugauca

SEQ ID NO: 2852101 - RNA, 19 nt, Artificial Sequence
  Description of Artificial Sequence: Synthetic oligonucleotide
ggaucauuaaugaucauuu

SEQ ID NO: 2852102 - RNA, 19 nt, Artificial Sequence
  Description of Artificial Sequence: Synthetic oligonucleotide
uggcuuuaaccaguucagu

SEQ ID NO: 2852103 - RNA, 19 nt, Artificial Sequence
  Description of Artificial Sequence: Synthetic oligonucleotide
cauuaaugaucauuuucau

SEQ ID NO: 2852104 - RNA, 19 nt, Artificial Sequence
  Description of Artificial Sequence: Synthetic oligonucleotide
ucuggacuuuauaggcauu

SEQ ID NO: 2852105 - RNA, 19 nt, Artificial Sequence
  Description of Artificial Sequence: Synthetic oligonucleotide
agcuuugcuaaagcacugu

SEQ ID NO: 2852106 - RNA, 19 nt, Artificial Sequence
  Description of Artificial Sequence: Synthetic oligonucleotide
uccuuccuuuguauuccaa

SEQ ID NO: 2852107 - RNA, 19 nt, Artificial Sequence
  Description of Artificial Sequence: Synthetic oligonucleotide
uugccuccuuccuuuguau

SEQ ID NO: 2852108 - RNA, 19 nt, Artificial Sequence
  Description of Artificial Sequence: Synthetic oligonucleotide
uacccgcuuuucuucaaua

SEQ ID NO: 2852109 - RNA, 19 nt, Artificial Sequence
  Description of Artificial Sequence: Synthetic oligonucleotide
gaucauuaaugaucauuuu

SEQ ID NO: 2852110 - RNA, 19 nt, Artificial Sequence
  Description of Artificial Sequence: Synthetic oligonucleotide
ggacuuuauaggcauuaaa

SEQ ID NO: 2852111 - RNA, 19 nt, Artificial Sequence
  Description of Artificial Sequence: Synthetic oligonucleotide
guuguggaagucauuuucu

SEQ ID NO: 2852112 - RNA, 19 nt, Artificial Sequence
  Description of Artificial Sequence: Synthetic oligonucleotide
ugguuguggaagucauuuu

SEQ ID NO: 2852113 - RNA, 19 nt, Artificial Sequence
  Description of Artificial Sequence: Synthetic oligonucleotide
uucucggucuggacuuuau

SEQ ID NO: 2852114 - RNA, 19 nt, Artificial Sequence
  Description of Artificial Sequence: Synthetic oligonucleotide
gucuuaucauggguugcug

SEQ ID NO: 2852115 - RNA, 19 nt, Artificial Sequence
  Description of Artificial Sequence: Synthetic oligonucleotide
uauuuugaucuugcuucuu

SEQ ID NO: 2852116 - RNA, 19 nt, Artificial Sequence
  Description of Artificial Sequence: Synthetic oligonucleotide
acgcucugauauagcauuc

SEQ ID NO: 2852117 - RNA, 19 nt, Artificial Sequence
  Description of Artificial Sequence: Synthetic oligonucleotide
aggcauuaaaggccugcuu

SEQ ID NO: 2852118 - RNA, 19 nt, Artificial Sequence
  Description of Artificial Sequence: Synthetic oligonucleotide
cgcuuuucuucaauaauuc

SEQ ID NO: 2852119 - RNA, 19 nt, Artificial Sequence
  Description of Artificial Sequence: Synthetic oligonucleotide
cucuuucucggucuggacu

SEQ ID NO: 2852120 - RNA, 19 nt, Artificial Sequence
  Description of Artificial Sequence: Synthetic oligonucleotide
uggaagguacccgcuuuuc

SEQ ID NO: 2852121 - RNA, 19 nt, Artificial Sequence
  Description of Artificial Sequence: Synthetic oligonucleotide
ggcauuaaaggccugcuuu

SEQ ID NO: 2852122 - RNA, 19 nt, Artificial Sequence
  Description of Artificial Sequence: Synthetic oligonucleotide
cacaaagcagucuuaucau

SEQ ID NO: 2852123 - RNA, 19 nt, Artificial Sequence
  Description of Artificial Sequence: Synthetic oligonucleotide
gucuggacuuuauaggcau

SEQ ID NO: 2852124 - RNA, 19 nt, Artificial Sequence
  Description of Artificial Sequence: Synthetic oligonucleotide
gcucugauauagcauucca

SEQ ID NO: 2852125 - RNA, 19 nt, Artificial Sequence
  Description of Artificial Sequence: Synthetic oligonucleotide
gucauuuucucaugauuuu

SEQ ID NO: 2852126 - RNA, 19 nt, Artificial Sequence
  Description of Artificial Sequence: Synthetic oligonucleotide
aucugguuguggaagucau

SEQ ID NO: 2852127 - RNA, 19 nt, Artificial Sequence
  Description of Artificial Sequence: Synthetic oligonucleotide
cacgcucugauauagcauu

SEQ ID NO: 2852128 - RNA, 19 nt, Artificial Sequence
  Description of Artificial Sequence: Synthetic oligonucleotide
agacgaucacgcucugaua

SEQ ID NO: 2852129 - RNA, 19 nt, Artificial Sequence
  Description of Artificial Sequence: Synthetic oligonucleotide
acgaucacgcucugauaua

SEQ ID NO: 2852130 - RNA, 19 nt, Artificial Sequence
  Description of Artificial Sequence: Synthetic oligonucleotide
aaacaucuguucggcuuuu

SEQ ID NO: 2852131 - RNA, 19 nt, Artificial Sequence
  Description of Artificial Sequence: Synthetic oligonucleotide
cauuggcuuuaaccaguuc

SEQ ID NO: 2852132 - RNA, 19 nt, Artificial Sequence
  Description of Artificial Sequence: Synthetic oligonucleotide
guaucugguuguggaaguc

SEQ ID NO: 2852133 - RNA, 19 nt, Artificial Sequence
  Description of Artificial Sequence: Synthetic oligonucleotide
cuggacuuuauaggcauua

SEQ ID NO: 2852134 - RNA, 19 nt, Artificial Sequence
  Description of Artificial Sequence: Synthetic oligonucleotide
gcuuuucuucaauaauucu

SEQ ID NO: 2852135 - RNA, 19 nt, Artificial Sequence
  Description of Artificial Sequence: Synthetic oligonucleotide
cuuuguucccaugaagcau

SEQ ID NO: 2852136 - RNA, 19 nt, Artificial Sequence
  Description of Artificial Sequence: Synthetic oligonucleotide
caugaagcauuggaaggua

SEQ ID NO: 2852137 - RNA, 19 nt, Artificial Sequence
  Description of Artificial Sequence: Synthetic oligonucleotide
caucuccccaaacaucugu

SEQ ID NO: 2852138 - RNA, 19 nt, Artificial Sequence
  Description of Artificial Sequence: Synthetic oligonucleotide
cugguuguggaagucauuu

SEQ ID NO: 2852139 - RNA, 19 nt, Artificial Sequence
  Description of Artificial Sequence: Synthetic oligonucleotide
agugcacaaagcagucuua

SEQ ID NO: 2852140 - RNA, 19 nt, Artificial Sequence
  Description of Artificial Sequence: Synthetic oligonucleotide
ggucuggacuuuauaggca

SEQ ID NO: 2852141 - RNA, 19 nt, Artificial Sequence
  Description of Artificial Sequence: Synthetic oligonucleotide
ucauggguugcuggugcuu

SEQ ID NO: 2852142 - RNA, 19 nt, Artificial Sequence
  Description of Artificial Sequence: Synthetic oligonucleotide
uuucucggucuggacuuua

SEQ ID NO: 2852143 - RNA, 19 nt, Artificial Sequence
  Description of Artificial Sequence: Synthetic oligonucleotide
acauuggcuuuaaccaguu

SEQ ID NO: 2852144 - RNA, 19 nt, Artificial Sequence
  Description of Artificial Sequence: Synthetic oligonucleotide
aucuccccaaacaucuguu

SEQ ID NO: 2852145 - RNA, 19 nt, Artificial Sequence
  Description of Artificial Sequence: Synthetic oligonucleotide
cgaucacgcucugauauag

SEQ ID NO: 2852146 - RNA, 19 nt, Artificial Sequence
  Description of Artificial Sequence: Synthetic oligonucleotide
gcuuugcuaaagcacugua

SEQ ID NO: 2852147 - RNA, 19 nt, Artificial Sequence
  Description of Artificial Sequence: Synthetic oligonucleotide
cuuagcuuccuuguauuuu

SEQ ID NO: 2852148 - RNA, 19 nt, Artificial Sequence
  Description of Artificial Sequence: Synthetic oligonucleotide
augcuuugcuuugccuccu

SEQ ID NO: 2852149 - RNA, 19 nt, Artificial Sequence
  Description of Artificial Sequence: Synthetic oligonucleotide
ccccaaacaucuguucggc

SEQ ID NO: 2852150 - RNA, 19 nt, Artificial Sequence
  Description of Artificial Sequence: Synthetic oligonucleotide
ggaagguacccgcuuuucu

SEQ ID NO: 2852151 - RNA, 19 nt, Artificial Sequence
  Description of Artificial Sequence: Synthetic oligonucleotide
auggguugcuggugcuuuu

SEQ ID NO: 2852152 - RNA, 19 nt, Artificial Sequence
  Description of Artificial Sequence: Synthetic oligonucleotide
guagugcacaaagcagucu

SEQ ID NO: 2852153 - RNA, 19 nt, Artificial Sequence
  Description of Artificial Sequence: Synthetic oligonucleotide
gcauuaaaggccugcuuuu

SEQ ID NO: 2852154 - RNA, 19 nt, Artificial Sequence
  Description of Artificial Sequence: Synthetic oligonucleotide
gcuuugcuuugccuccuuc

SEQ ID NO: 2852155 - RNA, 19 nt, Artificial Sequence
  Description of Artificial Sequence: Synthetic oligonucleotide
gugcacaaagcagucuuau

SEQ ID NO: 2852156 - RNA, 19 nt, Artificial Sequence
  Description of Artificial Sequence: Synthetic oligonucleotide
ccaaaccuccaucucccca

SEQ ID NO: 2852157 - RNA, 19 nt, Artificial Sequence
  Description of Artificial Sequence: Synthetic oligonucleotide
ccucuuucucggucuggac

SEQ ID NO: 2852158 - RNA, 19 nt, Artificial Sequence
  Description of Artificial Sequence: Synthetic oligonucleotide
cauuggaagguacccgcuu

SEQ ID NO: 2852159 - RNA, 19 nt, Artificial Sequence
  Description of Artificial Sequence: Synthetic oligonucleotide
caguucaguagugcacaaa

SEQ ID NO: 2852160 - RNA, 19 nt, Artificial Sequence
  Description of Artificial Sequence: Synthetic oligonucleotide
cuguaccgaggaucauuaa

SEQ ID NO: 2852161 - RNA, 19 nt, Artificial Sequence
  Description of Artificial Sequence: Synthetic oligonucleotide
cgcucugauauagcauucc

SEQ ID NO: 2852162 - RNA, 19 nt, Artificial Sequence
  Description of Artificial Sequence: Synthetic oligonucleotide
gaggaucauuaaugaucau

SEQ ID NO: 2852163 - RNA, 19 nt, Artificial Sequence
  Description of Artificial Sequence: Synthetic oligonucleotide
guacccgcuuuucuucaau

SEQ ID NO: 2852164 - RNA, 19 nt, Artificial Sequence
  Description of Artificial Sequence: Synthetic oligonucleotide
cuuugccuccuuccuuugu

SEQ ID NO: 2852165 - RNA, 19 nt, Artificial Sequence
  Description of Artificial Sequence: Synthetic oligonucleotide
ccgcuuuucuucaauaauu

SEQ ID NO: 2852166 - RNA, 19 nt, Artificial Sequence
  Description of Artificial Sequence: Synthetic oligonucleotide
ccuuuguauuccaaguauu

SEQ ID NO: 2852167 - RNA, 19 nt, Artificial Sequence
  Description of Artificial Sequence: Synthetic oligonucleotide
gguacccgcuuuucuucaa

SEQ ID NO: 2852168 - RNA, 19 nt, Artificial Sequence
  Description of Artificial Sequence: Synthetic oligonucleotide
cacuguaccgaggaucauu

SEQ ID NO: 2852169 - RNA, 19 nt, Artificial Sequence
  Description of Artificial Sequence: Synthetic oligonucleotide
cauggguugcuggugcuuu

SEQ ID NO: 2852170 - RNA, 19 nt, Artificial Sequence
  Description of Artificial Sequence: Synthetic oligonucleotide
ccaguucaguagugcacaa

SEQ ID NO: 2852171 - RNA, 19 nt, Artificial Sequence
  Description of Artificial Sequence: Synthetic oligonucleotide
cccgcuuuucuucaauaau

SEQ ID NO: 2852172 - RNA, 19 nt, Artificial Sequence
  Description of Artificial Sequence: Synthetic oligonucleotide
gcauuggaagguacccgcu

SEQ ID NO: 2852173 - RNA, 19 nt, Artificial Sequence
  Description of Artificial Sequence: Synthetic oligonucleotide
ccuuagcuuccuuguauuu

SEQ ID NO: 2852174 - RNA, 19 nt, Artificial Sequence
  Description of Artificial Sequence: Synthetic oligonucleotide
cuuucucggucuggacuuu

SEQ ID NO: 2852175 - RNA, 19 nt, Artificial Sequence
  Description of Artificial Sequence: Synthetic oligonucleotide
gcacuguaccgaggaucau

SEQ ID NO: 2852176 - RNA, 19 nt, Artificial Sequence
  Description of Artificial Sequence: Synthetic oligonucleotide
agucagaaaauacucagcc

SEQ ID NO: 2852177 - RNA, 19 nt, Artificial Sequence
  Description of Artificial Sequence: Synthetic oligonucleotide
aguaucuuuaauugcauac

SEQ ID NO: 2852178 - RNA, 19 nt, Artificial Sequence
  Description of Artificial Sequence: Synthetic oligonucleotide
uuuaauugcauacggagcu

SEQ ID NO: 2852179 - RNA, 19 nt, Artificial Sequence
  Description of Artificial Sequence: Synthetic oligonucleotide
ucagaaaauacucagcccu

SEQ ID NO: 2852180 - RNA, 19 nt, Artificial Sequence
  Description of Artificial Sequence: Synthetic oligonucleotide
ugcaacugaagcaugaugc

SEQ ID NO: 2852181 - RNA, 19 nt, Artificial Sequence
  Description of Artificial Sequence: Synthetic oligonucleotide
uaucuuuaauugcauacgg

SEQ ID NO: 2852182 - RNA, 19 nt, Artificial Sequence
  Description of Artificial Sequence: Synthetic oligonucleotide
ugaaagaucaugaaccugu

SEQ ID NO: 2852183 - RNA, 19 nt, Artificial Sequence
  Description of Artificial Sequence: Synthetic oligonucleotide
agauuaguaucuuuaauug

SEQ ID NO: 2852184 - RNA, 19 nt, Artificial Sequence
  Description of Artificial Sequence: Synthetic oligonucleotide
aaugugcuagaaucgaaag

SEQ ID NO: 2852185 - RNA, 19 nt, Artificial Sequence
  Description of Artificial Sequence: Synthetic oligonucleotide
aaagaucaugaaccugucc

SEQ ID NO: 2852186 - RNA, 19 nt, Artificial Sequence
  Description of Artificial Sequence: Synthetic oligonucleotide
aaugcaaucacuuggugua

SEQ ID NO: 2852187 - RNA, 19 nt, Artificial Sequence
  Description of Artificial Sequence: Synthetic oligonucleotide
aacugaagcaugaugcugc

SEQ ID NO: 2852188 - RNA, 19 nt, Artificial Sequence
  Description of Artificial Sequence: Synthetic oligonucleotide
ugcuagaaucgaaagaugc

SEQ ID NO: 2852189 - RNA, 19 nt, Artificial Sequence
  Description of Artificial Sequence: Synthetic oligonucleotide
aaucgaaagaugcaacuga

SEQ ID NO: 2852190 - RNA, 19 nt, Artificial Sequence
  Description of Artificial Sequence: Synthetic oligonucleotide
aauccugccaacuggccgg

SEQ ID NO: 2852191 - RNA, 19 nt, Artificial Sequence
  Description of Artificial Sequence: Synthetic oligonucleotide
auacggagcucuuacaaac

SEQ ID NO: 2852192 - RNA, 19 nt, Artificial Sequence
  Description of Artificial Sequence: Synthetic oligonucleotide
gauuaguaucuuuaauugc

SEQ ID NO: 2852193 - RNA, 19 nt, Artificial Sequence
  Description of Artificial Sequence: Synthetic oligonucleotide
ugcucaaugugcuagaauc

SEQ ID NO: 2852194 - RNA, 19 nt, Artificial Sequence
  Description of Artificial Sequence: Synthetic oligonucleotide
aagacccuaaaucagcgcu

SEQ ID NO: 2852195 - RNA, 19 nt, Artificial Sequence
  Description of Artificial Sequence: Synthetic oligonucleotide
guaguuguuucgcaaaggg

SEQ ID NO: 2852196 - RNA, 19 nt, Artificial Sequence
  Description of Artificial Sequence: Synthetic oligonucleotide
ugacaaaagaggaaaugca

SEQ ID NO: 2852197 - RNA, 19 nt, Artificial Sequence
  Description of Artificial Sequence: Synthetic oligonucleotide
cuuuaauugcauacggagc

SEQ ID NO: 2852198 - RNA, 19 nt, Artificial Sequence
  Description of Artificial Sequence: Synthetic oligonucleotide
agcucuuacaaacugguca

SEQ ID NO: 2852199 - RNA, 19 nt, Artificial Sequence
  Description of Artificial Sequence: Synthetic oligonucleotide
uccuccucaagucagaaaa

SEQ ID NO: 2852200 - RNA, 19 nt, Artificial Sequence
  Description of Artificial Sequence: Synthetic oligonucleotide
ucaagucagaaaauacuca

SEQ ID NO: 2852201 - RNA, 19 nt, Artificial Sequence
  Description of Artificial Sequence: Synthetic oligonucleotide
ugugcuagaaucgaaagau

SEQ ID NO: 2852202 - RNA, 19 nt, Artificial Sequence
  Description of Artificial Sequence: Synthetic oligonucleotide
aguggagcaaaggacaucg

SEQ ID NO: 2852203 - RNA, 19 nt, Artificial Sequence
  Description of Artificial Sequence: Synthetic oligonucleotide
gaaagaugcaacugaagca

SEQ ID NO: 2852204 - RNA, 19 nt, Artificial Sequence
  Description of Artificial Sequence: Synthetic oligonucleotide
auuaguaucuuuaauugca

SEQ ID NO: 2852205 - RNA, 19 nt, Artificial Sequence
  Description of Artificial Sequence: Synthetic oligonucleotide
aagucagaaaauacucagc

SEQ ID NO: 2852206 - RNA, 19 nt, Artificial Sequence
  Description of Artificial Sequence: Synthetic oligonucleotide
agucuuccggauuucgugc

SEQ ID NO: 2852207 - RNA, 19 nt, Artificial Sequence
  Description of Artificial Sequence: Synthetic oligonucleotide
aagucuuccggauuucgug

SEQ ID NO: 2852208 - RNA, 19 nt, Artificial Sequence
  Description of Artificial Sequence: Synthetic oligonucleotide
aaaucagcgcucccgaaca

SEQ ID NO: 2852209 - RNA, 19 nt, Artificial Sequence
  Description of Artificial Sequence: Synthetic oligonucleotide
aagaugcucaaugugcuag

SEQ ID NO: 2852210 - RNA, 19 nt, Artificial Sequence
  Description of Artificial Sequence: Synthetic oligonucleotide
cugacaaaagaggaaaugc

SEQ ID NO: 2852211 - RNA, 19 nt, Artificial Sequence
  Description of Artificial Sequence: Synthetic oligonucleotide
cucaagucagaaaauacuc

SEQ ID NO: 2852212 - RNA, 19 nt, Artificial Sequence
  Description of Artificial Sequence: Synthetic oligonucleotide
uuucgcaaagggcugucgg

SEQ ID NO: 2852213 - RNA, 19 nt, Artificial Sequence
  Description of Artificial Sequence: Synthetic oligonucleotide
gcuugaaagaucaugaacc

SEQ ID NO: 2852214 - RNA, 19 nt, Artificial Sequence
  Description of Artificial Sequence: Synthetic oligonucleotide
gaauccugccaacuggccg

SEQ ID NO: 2852215 - RNA, 19 nt, Artificial Sequence
  Description of Artificial Sequence: Synthetic oligonucleotide
gaagcgggacgcuugaaag

SEQ ID NO: 2852216 - RNA, 19 nt, Artificial Sequence
  Description of Artificial Sequence: Synthetic oligonucleotide
aguuguuucgcaaagggcu

SEQ ID NO: 2852217 - RNA, 19 nt, Artificial Sequence
  Description of Artificial Sequence: Synthetic oligonucleotide
agaaucgaaagaugcaacu

SEQ ID NO: 2852218 - RNA, 19 nt, Artificial Sequence
  Description of Artificial Sequence: Synthetic oligonucleotide
gagcaaaggacaucggcag

SEQ ID NO: 2852219 - RNA, 19 nt, Artificial Sequence
  Description of Artificial Sequence: Synthetic oligonucleotide
aaaagaugcucaaugugcu

SEQ ID NO: 2852220 - RNA, 19 nt, Artificial Sequence
  Description of Artificial Sequence: Synthetic oligonucleotide
ucccgaacagcccuauugg

SEQ ID NO: 2852221 - RNA, 19 nt, Artificial Sequence
  Description of Artificial Sequence: Synthetic oligonucleotide
gauuuguagguucugcgca

SEQ ID NO: 2852222 - RNA, 19 nt, Artificial Sequence
  Description of Artificial Sequence: Synthetic oligonucleotide
agccagaaagcccugguag

SEQ ID NO: 2852223 - RNA, 19 nt, Artificial Sequence
  Description of Artificial Sequence: Synthetic oligonucleotide
cuuacaaacuggucaggcc

SEQ ID NO: 2852224 - RNA, 19 nt, Artificial Sequence
  Description of Artificial Sequence: Synthetic oligonucleotide
uaaaucagcgcucccgaac

SEQ ID NO: 2852225 - RNA, 19 nt, Artificial Sequence
  Description of Artificial Sequence: Synthetic oligonucleotide
uucugcgcagcucagccag

SEQ ID NO: 2852226 - RNA, 19 nt, Artificial Sequence
  Description of Artificial Sequence: Synthetic oligonucleotide
aagcaugaugcugcugucc

SEQ ID NO: 2852227 - RNA, 19 nt, Artificial Sequence
  Description of Artificial Sequence: Synthetic oligonucleotide
uaguuguuucgcaaagggc

SEQ ID NO: 2852228 - RNA, 19 nt, Artificial Sequence
  Description of Artificial Sequence: Synthetic oligonucleotide
ucaggaauccugccaacug

SEQ ID NO: 2852229 - RNA, 19 nt, Artificial Sequence
  Description of Artificial Sequence: Synthetic oligonucleotide
uagaaucgaaagaugcaac

SEQ ID NO: 2852230 - RNA, 19 nt, Artificial Sequence
  Description of Artificial Sequence: Synthetic oligonucleotide
uccaucugcaucaggaauc

SEQ ID NO: 2852231 - RNA, 19 nt, Artificial Sequence
  Description of Artificial Sequence: Synthetic oligonucleotide
cagaagacccuaaaucagc

SEQ ID NO: 2852232 - RNA, 19 nt, Artificial Sequence
  Description of Artificial Sequence: Synthetic oligonucleotide
ucgaaagaugcaacugaag

SEQ ID NO: 2852233 - RNA, 19 nt, Artificial Sequence
  Description of Artificial Sequence: Synthetic oligonucleotide
ugguaguuguuucgcaaag

SEQ ID NO: 2852234 - RNA, 19 nt, Artificial Sequence
  Description of Artificial Sequence: Synthetic oligonucleotide
uucgcaaagggcugucggg

SEQ ID NO: 2852235 - RNA, 19 nt, Artificial Sequence
  Description of Artificial Sequence: Synthetic oligonucleotide
gaaucgaaagaugcaacug

SEQ ID NO: 2852236 - RNA, 19 nt, Artificial Sequence
  Description of Artificial Sequence: Synthetic oligonucleotide
uuaguaucuuuaauugcau

SEQ ID NO: 2852237 - RNA, 19 nt, Artificial Sequence
  Description of Artificial Sequence: Synthetic oligonucleotide
auuuguagguucugcgcag

SEQ ID NO: 2852238 - RNA, 19 nt, Artificial Sequence
  Description of Artificial Sequence: Synthetic oligonucleotide
gacaucggcagucugacaa

SEQ ID NO: 2852239 - RNA, 19 nt, Artificial Sequence
  Description of Artificial Sequence: Synthetic oligonucleotide
agucagucgggacaccagg

SEQ ID NO: 2852240 - RNA, 19 nt, Artificial Sequence
  Description of Artificial Sequence: Synthetic oligonucleotide
uauuggaugcagaagucuu

SEQ ID NO: 2852241 - RNA, 19 nt, Artificial Sequence
  Description of Artificial Sequence: Synthetic oligonucleotide
cucagcggggauuuguagg

SEQ ID NO: 2852242 - RNA, 19 nt, Artificial Sequence
  Description of Artificial Sequence: Synthetic oligonucleotide
aucaugaaccuguccaucu

SEQ ID NO: 2852243 - RNA, 19 nt, Artificial Sequence
  Description of Artificial Sequence: Synthetic oligonucleotide
gucagaaaauacucagccc

SEQ ID NO: 2852244 - RNA, 19 nt, Artificial Sequence
  Description of Artificial Sequence: Synthetic oligonucleotide
gacgcuugaaagaucauga

SEQ ID NO: 2852245 - RNA, 19 nt, Artificial Sequence
  Description of Artificial Sequence: Synthetic oligonucleotide
ucagcgcucccgaacagcc

SEQ ID NO: 2852246 - RNA, 19 nt, Artificial Sequence
  Description of Artificial Sequence: Synthetic oligonucleotide
agaagacccuaaaucagcg

SEQ ID NO: 2852247 - RNA, 19 nt, Artificial Sequence
  Description of Artificial Sequence: Synthetic oligonucleotide
gaaaugcaaucacuuggug

SEQ ID NO: 2852248 - RNA, 19 nt, Artificial Sequence
  Description of Artificial Sequence: Synthetic oligonucleotide
uugcauacggagcucuuac

SEQ ID NO: 2852249 - RNA, 19 nt, Artificial Sequence
  Description of Artificial Sequence: Synthetic oligonucleotide
caggaauccugccaacugg

SEQ ID NO: 2852250 - RNA, 19 nt, Artificial Sequence
  Description of Artificial Sequence: Synthetic oligonucleotide
uucgugcgcgccuugagug

SEQ ID NO: 2852251 - RNA, 19 nt, Artificial Sequence
  Description of Artificial Sequence: Synthetic oligonucleotide
aagaggaaaugcaaucacu

SEQ ID NO: 2852252 - RNA, 19 nt, Artificial Sequence
  Description of Artificial Sequence: Synthetic oligonucleotide
ucaugaaccuguccaucug

SEQ ID NO: 2852253 - RNA, 19 nt, Artificial Sequence
  Description of Artificial Sequence: Synthetic oligonucleotide
ucagcggggauuuguaggu

SEQ ID NO: 2852254 - RNA, 19 nt, Artificial Sequence
  Description of Artificial Sequence: Synthetic oligonucleotide
gaacagcccuauuggaugc

SEQ ID NO: 2852255 - RNA, 19 nt, Artificial Sequence
  Description of Artificial Sequence: Synthetic oligonucleotide
caugaaccuguccaucugc

SEQ ID NO: 2852256 - RNA, 19 nt, Artificial Sequence
  Description of Artificial Sequence: Synthetic oligonucleotide
ggaugcagaagucuuccgg

SEQ ID NO: 2852257 - RNA, 19 nt, Artificial Sequence
  Description of Artificial Sequence: Synthetic oligonucleotide
ucaaugugcuagaaucgaa

SEQ ID NO: 2852258 - RNA, 19 nt, Artificial Sequence
  Description of Artificial Sequence: Synthetic oligonucleotide
agucugacaaaagaggaaa

SEQ ID NO: 2852259 - RNA, 19 nt, Artificial Sequence
  Description of Artificial Sequence: Synthetic oligonucleotide
augugcuagaaucgaaaga

SEQ ID NO: 2852260 - RNA, 19 nt, Artificial Sequence
  Description of Artificial Sequence: Synthetic oligonucleotide
ggcagaagacccuaaauca

SEQ ID NO: 2852261 - RNA, 19 nt, Artificial Sequence
  Description of Artificial Sequence: Synthetic oligonucleotide
aggaauccugccaacuggc

SEQ ID NO: 2852262 - RNA, 19 nt, Artificial Sequence
  Description of Artificial Sequence: Synthetic oligonucleotide
aaaggacaucggcagucug

SEQ ID NO: 2852263 - RNA, 19 nt, Artificial Sequence
  Description of Artificial Sequence: Synthetic oligonucleotide
uugaaagaucaugaaccug

SEQ ID NO: 2852264 - RNA, 19 nt, Artificial Sequence
  Description of Artificial Sequence: Synthetic oligonucleotide
gaagacccuaaaucagcgc

SEQ ID NO: 2852265 - RNA, 19 nt, Artificial Sequence
  Description of Artificial Sequence: Synthetic oligonucleotide
aucaguggagcaaaggaca

SEQ ID NO: 2852266 - RNA, 19 nt, Artificial Sequence
  Description of Artificial Sequence: Synthetic oligonucleotide
gcucuuacaaacuggucag

SEQ ID NO: 2852267 - RNA, 19 nt, Artificial Sequence
  Description of Artificial Sequence: Synthetic oligonucleotide
augcaacugaagcaugaug

SEQ ID NO: 2852268 - RNA, 19 nt, Artificial Sequence
  Description of Artificial Sequence: Synthetic oligonucleotide
guagguucugcgcagcuca

SEQ ID NO: 2852269 - RNA, 19 nt, Artificial Sequence
  Description of Artificial Sequence: Synthetic oligonucleotide
agcggggauuuguagguuc

SEQ ID NO: 2852270 - RNA, 19 nt, Artificial Sequence
  Description of Artificial Sequence: Synthetic oligonucleotide
ggcagucugacaaaagagg

SEQ ID NO: 2852271 - RNA, 19 nt, Artificial Sequence
  Description of Artificial Sequence: Synthetic oligonucleotide
aggacaucggcagucugac

SEQ ID NO: 2852272 - RNA, 19 nt, Artificial Sequence
  Description of Artificial Sequence: Synthetic oligonucleotide
aacuggucaggcccaucag

SEQ ID NO: 2852273 - RNA, 19 nt, Artificial Sequence
  Description of Artificial Sequence: Synthetic oligonucleotide
cagaaaauacucagcccug

SEQ ID NO: 2852274 - RNA, 19 nt, Artificial Sequence
  Description of Artificial Sequence: Synthetic oligonucleotide
uccccagucagucgggaca

SEQ ID NO: 2852275 - RNA, 19 nt, Artificial Sequence
  Description of Artificial Sequence: Synthetic oligonucleotide
cacucucucugcuucgccg

SEQ ID NO: 2852276 - RNA, 19 nt, Artificial Sequence
  Description of Artificial Sequence: Synthetic oligonucleotide
ggauuuguagguucugcgc

SEQ ID NO: 2852277 - RNA, 19 nt, Artificial Sequence
  Description of Artificial Sequence: Synthetic oligonucleotide
agaaagcccugguaguugu

SEQ ID NO: 2852278 - RNA, 19 nt, Artificial Sequence
  Description of Artificial Sequence: Synthetic oligonucleotide
acaaaagaggaaaugcaau

SEQ ID NO: 2852279 - RNA, 19 nt, Artificial Sequence
  Description of Artificial Sequence: Synthetic oligonucleotide
auuggaugcagaagucuuc

SEQ ID NO: 2852280 - RNA, 19 nt, Artificial Sequence
  Description of Artificial Sequence: Synthetic oligonucleotide
aaucagcgcucccgaacag

SEQ ID NO: 2852281 - RNA, 19 nt, Artificial Sequence
  Description of Artificial Sequence: Synthetic oligonucleotide
uaauugcauacggagcucu

SEQ ID NO: 2852282 - RNA, 19 nt, Artificial Sequence
  Description of Artificial Sequence: Synthetic oligonucleotide
agaagucuuccggauuucg

SEQ ID NO: 2852283 - RNA, 19 nt, Artificial Sequence
  Description of Artificial Sequence: Synthetic oligonucleotide
cucccgaacagcccuauug

SEQ ID NO: 2852284 - RNA, 19 nt, Artificial Sequence
  Description of Artificial Sequence: Synthetic oligonucleotide
aaagaugcucaaugugcua

SEQ ID NO: 2852285 - RNA, 19 nt, Artificial Sequence
  Description of Artificial Sequence: Synthetic oligonucleotide
aagcgggacgcuugaaaga

SEQ ID NO: 2852286 - RNA, 19 nt, Artificial Sequence
  Description of Artificial Sequence: Synthetic oligonucleotide
acggagcucuuacaaacug

SEQ ID NO: 2852287 - RNA, 19 nt, Artificial Sequence
  Description of Artificial Sequence: Synthetic oligonucleotide
agaucaugaaccuguccau

SEQ ID NO: 2852288 - RNA, 19 nt, Artificial Sequence
  Description of Artificial Sequence: Synthetic oligonucleotide
uuucgugcgcgccuugagu

SEQ ID NO: 2852289 - RNA, 19 nt, Artificial Sequence
  Description of Artificial Sequence: Synthetic oligonucleotide
agcccugguaguuguuucg

SEQ ID NO: 2852290 - RNA, 19 nt, Artificial Sequence
  Description of Artificial Sequence: Synthetic oligonucleotide
ucaguggagcaaaggacau

SEQ ID NO: 2852291 - RNA, 19 nt, Artificial Sequence
  Description of Artificial Sequence: Synthetic oligonucleotide
cuagaaucgaaagaugcaa

SEQ ID NO: 2852292 - RNA, 19 nt, Artificial Sequence
  Description of Artificial Sequence: Synthetic oligonucleotide
uacggagcucuuacaaacu

SEQ ID NO: 2852293 - RNA, 19 nt, Artificial Sequence
  Description of Artificial Sequence: Synthetic oligonucleotide
ucagccagaaagcccuggu

SEQ ID NO: 2852294 - RNA, 19 nt, Artificial Sequence
  Description of Artificial Sequence: Synthetic oligonucleotide
uaguaucuuuaauugcaua

SEQ ID NO: 2852295 - RNA, 19 nt, Artificial Sequence
  Description of Artificial Sequence: Synthetic oligonucleotide
ugcuguccuccucaaguca

SEQ ID NO: 2852296 - RNA, 19 nt, Artificial Sequence
  Description of Artificial Sequence: Synthetic oligonucleotide
cagauuaguaucuuuaauu

SEQ ID NO: 2852297 - RNA, 19 nt, Artificial Sequence
  Description of Artificial Sequence: Synthetic oligonucleotide
ucugcuucgccggggaagc

SEQ ID NO: 2852298 - RNA, 19 nt, Artificial Sequence
  Description of Artificial Sequence: Synthetic oligonucleotide
auuucgugcgcgccuugag

SEQ ID NO: 2852299 - RNA, 19 nt, Artificial Sequence
  Description of Artificial Sequence: Synthetic oligonucleotide
gacccuaaaucagcgcucc

SEQ ID NO: 2852300 - RNA, 19 nt, Artificial Sequence
  Description of Artificial Sequence: Synthetic oligonucleotide
ccuugagugccucagcggg

SEQ ID NO: 2852301 - RNA, 19 nt, Artificial Sequence
  Description of Artificial Sequence: Synthetic oligonucleotide
caaugugcuagaaucgaaa

SEQ ID NO: 2852302 - RNA, 19 nt, Artificial Sequence
  Description of Artificial Sequence: Synthetic oligonucleotide
cagcccuggcagaagaccc

SEQ ID NO: 2852303 - RNA, 19 nt, Artificial Sequence
  Description of Artificial Sequence: Synthetic oligonucleotide
aucagcgcucccgaacagc

SEQ ID NO: 2852304 - RNA, 19 nt, Artificial Sequence
  Description of Artificial Sequence: Synthetic oligonucleotide
agcccuauuggaugcagaa

SEQ ID NO: 2852305 - RNA, 19 nt, Artificial Sequence
  Description of Artificial Sequence: Synthetic oligonucleotide
guuguuucgcaaagggcug

SEQ ID NO: 2852306 - RNA, 19 nt, Artificial Sequence
  Description of Artificial Sequence: Synthetic oligonucleotide
aagaugcaacugaagcaug

SEQ ID NO: 2852307 - RNA, 19 nt, Artificial Sequence
  Description of Artificial Sequence: Synthetic oligonucleotide
gguucugcgcagcucagcc

SEQ ID NO: 2852308 - RNA, 19 nt, Artificial Sequence
  Description of Artificial Sequence: Synthetic oligonucleotide
ugcauacggagcucuuaca

SEQ ID NO: 2852309 - RNA, 19 nt, Artificial Sequence
  Description of Artificial Sequence: Synthetic oligonucleotide
ucgcaaagggcugucgggc

SEQ ID NO: 2852310 - RNA, 19 nt, Artificial Sequence
  Description of Artificial Sequence: Synthetic oligonucleotide
ucuuccggauuucgugcgc

SEQ ID NO: 2852311 - RNA, 19 nt, Artificial Sequence
  Description of Artificial Sequence: Synthetic oligonucleotide
ugucgggcugcaugugggg

SEQ ID NO: 2852312 - RNA, 19 nt, Artificial Sequence
  Description of Artificial Sequence: Synthetic oligonucleotide
cuugaaagaucaugaaccu

SEQ ID NO: 2852313 - RNA, 19 nt, Artificial Sequence
  Description of Artificial Sequence: Synthetic oligonucleotide
agaugcucaaugugcuaga

SEQ ID NO: 2852314 - RNA, 19 nt, Artificial Sequence
  Description of Artificial Sequence: Synthetic oligonucleotide
uuaauugcauacggagcuc

SEQ ID NO: 2852315 - RNA, 19 nt, Artificial Sequence
  Description of Artificial Sequence: Synthetic oligonucleotide
gguaguuguuucgcaaagg

SEQ ID NO: 2852316 - RNA, 19 nt, Artificial Sequence
  Description of Artificial Sequence: Synthetic oligonucleotide
ucuccgccuccccagucag

SEQ ID NO: 2852317 - RNA, 19 nt, Artificial Sequence
  Description of Artificial Sequence: Synthetic oligonucleotide
uucuccgccuccccaguca

SEQ ID NO: 2852318 - RNA, 19 nt, Artificial Sequence
  Description of Artificial Sequence: Synthetic oligonucleotide
acugaagcaugaugcugcu

SEQ ID NO: 2852319 - RNA, 19 nt, Artificial Sequence
  Description of Artificial Sequence: Synthetic oligonucleotide
gaucaugaaccuguccauc

SEQ ID NO: 2852320 - RNA, 19 nt, Artificial Sequence
  Description of Artificial Sequence: Synthetic oligonucleotide
gcucaaugugcuagaaucg

SEQ ID NO: 2852321 - RNA, 19 nt, Artificial Sequence
  Description of Artificial Sequence: Synthetic oligonucleotide
uuguagguucugcgcagcu

SEQ ID NO: 2852322 - RNA, 19 nt, Artificial Sequence
  Description of Artificial Sequence: Synthetic oligonucleotide
agcgcucccgaacagcccu

SEQ ID NO: 2852323 - RNA, 19 nt, Artificial Sequence
  Description of Artificial Sequence: Synthetic oligonucleotide
agacccuaaaucagcgcuc

SEQ ID NO: 2852324 - RNA, 19 nt, Artificial Sequence
  Description of Artificial Sequence: Synthetic oligonucleotide
gaaagaucaugaaccuguc

SEQ ID NO: 2852325 - RNA, 19 nt, Artificial Sequence
  Description of Artificial Sequence: Synthetic oligonucleotide
gcgcagcucagccagaaag

SEQ ID NO: 2852326 - RNA, 19 nt, Artificial Sequence
  Description of Artificial Sequence: Synthetic oligonucleotide
ugcagaagucuuccggauu

SEQ ID NO: 2852327 - RNA, 19 nt, Artificial Sequence
  Description of Artificial Sequence: Synthetic oligonucleotide
gaagcaugaugcugcuguc

SEQ ID NO: 2852328 - RNA, 19 nt, Artificial Sequence
  Description of Artificial Sequence: Synthetic oligonucleotide
acccuaaaucagcgcuccc

SEQ ID NO: 2852329 - RNA, 19 nt, Artificial Sequence
  Description of Artificial Sequence: Synthetic oligonucleotide
ugcuucgccggggaagcgg

SEQ ID NO: 2852330 - RNA, 19 nt, Artificial Sequence
  Description of Artificial Sequence: Synthetic oligonucleotide
agaugcaacugaagcauga

SEQ ID NO: 2852331 - RNA, 19 nt, Artificial Sequence
  Description of Artificial Sequence: Synthetic oligonucleotide
uugagugccucagcgggga

SEQ ID NO: 2852332 - RNA, 19 nt, Artificial Sequence
  Description of Artificial Sequence: Synthetic oligonucleotide
cuuccggauuucgugcgcg

SEQ ID NO: 2852333 - RNA, 19 nt, Artificial Sequence
  Description of Artificial Sequence: Synthetic oligonucleotide
gcagaagacccuaaaucag

SEQ ID NO: 2852334 - RNA, 19 nt, Artificial Sequence
  Description of Artificial Sequence: Synthetic oligonucleotide
cacuucuccgccuccccag

SEQ ID NO: 2852335 - RNA, 19 nt, Artificial Sequence
  Description of Artificial Sequence: Synthetic oligonucleotide
ggagcaaaggacaucggca

SEQ ID NO: 2852336 - RNA, 19 nt, Artificial Sequence
  Description of Artificial Sequence: Synthetic oligonucleotide
aucaggaauccugccaacu

SEQ ID NO: 2852337 - RNA, 19 nt, Artificial Sequence
  Description of Artificial Sequence: Synthetic oligonucleotide
aucgaaagaugcaacugaa

SEQ ID NO: 2852338 - RNA, 19 nt, Artificial Sequence
  Description of Artificial Sequence: Synthetic oligonucleotide
cucaaugugcuagaaucga

SEQ ID NO: 2852339 - RNA, 19 nt, Artificial Sequence
  Description of Artificial Sequence: Synthetic oligonucleotide
uagguucugcgcagcucag

SEQ ID NO: 2852340 - RNA, 19 nt, Artificial Sequence
  Description of Artificial Sequence: Synthetic oligonucleotide
gggauggcccacuucuccg

SEQ ID NO: 2852341 - RNA, 19 nt, Artificial Sequence
  Description of Artificial Sequence: Synthetic oligonucleotide
ugaaccuguccaucugcau

SEQ ID NO: 2852342 - RNA, 19 nt, Artificial Sequence
  Description of Artificial Sequence: Synthetic oligonucleotide
cucuuacaaacuggucagg

SEQ ID NO: 2852343 - RNA, 19 nt, Artificial Sequence
  Description of Artificial Sequence: Synthetic oligonucleotide
ucgccggggaagcgggacg

SEQ ID NO: 2852344 - RNA, 19 nt, Artificial Sequence
  Description of Artificial Sequence: Synthetic oligonucleotide
guuucgcaaagggcugucg

SEQ ID NO: 2852345 - RNA, 19 nt, Artificial Sequence
  Description of Artificial Sequence: Synthetic oligonucleotide
cauacggagcucuuacaaa

SEQ ID NO: 2852346 - RNA, 19 nt, Artificial Sequence
  Description of Artificial Sequence: Synthetic oligonucleotide
acgcuugaaagaucaugaa

SEQ ID NO: 2852347 - RNA, 19 nt, Artificial Sequence
  Description of Artificial Sequence: Synthetic oligonucleotide
ucucucugcuucgccgggg

SEQ ID NO: 2852348 - RNA, 19 nt, Artificial Sequence
  Description of Artificial Sequence: Synthetic oligonucleotide
ggacgcuugaaagaucaug

SEQ ID NO: 2852349 - RNA, 19 nt, Artificial Sequence
  Description of Artificial Sequence: Synthetic oligonucleotide
uguagguucugcgcagcuc

SEQ ID NO: 2852350 - RNA, 19 nt, Artificial Sequence
  Description of Artificial Sequence: Synthetic oligonucleotide
augcucaaugugcuagaau

SEQ ID NO: 2852351 - RNA, 19 nt, Artificial Sequence
  Description of Artificial Sequence: Synthetic oligonucleotide
cagucagucgggacaccag

SEQ ID NO: 2852352 - RNA, 19 nt, Artificial Sequence
  Description of Artificial Sequence: Synthetic oligonucleotide
uuguuucgcaaagggcugu

SEQ ID NO: 2852353 - RNA, 19 nt, Artificial Sequence
  Description of Artificial Sequence: Synthetic oligonucleotide
agcgggacgcuugaaagau

SEQ ID NO: 2852354 - RNA, 19 nt, Artificial Sequence
  Description of Artificial Sequence: Synthetic oligonucleotide
caucaggaauccugccaac

SEQ ID NO: 2852355 - RNA, 19 nt, Artificial Sequence
  Description of Artificial Sequence: Synthetic oligonucleotide
uuccggauuucgugcgcgc

SEQ ID NO: 2852356 - RNA, 19 nt, Artificial Sequence
  Description of Artificial Sequence: Synthetic oligonucleotide
cucugcuucgccggggaag

SEQ ID NO: 2852357 - RNA, 19 nt, Artificial Sequence
  Description of Artificial Sequence: Synthetic oligonucleotide
cugguaguuguuucgcaaa

SEQ ID NO: 2852358 - RNA, 19 nt, Artificial Sequence
  Description of Artificial Sequence: Synthetic oligonucleotide
gcagucugacaaaagagga

SEQ ID NO: 2852359 - RNA, 19 nt, Artificial Sequence
  Description of Artificial Sequence: Synthetic oligonucleotide
gugcuagaaucgaaagaug

SEQ ID NO: 2852360 - RNA, 19 nt, Artificial Sequence
  Description of Artificial Sequence: Synthetic oligonucleotide
cagucugacaaaagaggaa

SEQ ID NO: 2852361 - RNA, 19 nt, Artificial Sequence
  Description of Artificial Sequence: Synthetic oligonucleotide
ucgugcgcgccuugagugc

SEQ ID NO: 2852362 - RNA, 19 nt, Artificial Sequence
  Description of Artificial Sequence: Synthetic oligonucleotide
uccggauuucgugcgcgcc

SEQ ID NO: 2852363 - RNA, 19 nt, Artificial Sequence
  Description of Artificial Sequence: Synthetic oligonucleotide
cgaacagcccuauuggaug

SEQ ID NO: 2852364 - RNA, 19 nt, Artificial Sequence
  Description of Artificial Sequence: Synthetic oligonucleotide
caaagggcugucgggcugc

SEQ ID NO: 2852365 - RNA, 19 nt, Artificial Sequence
  Description of Artificial Sequence: Synthetic oligonucleotide
gcugucgggcugcaugugg

SEQ ID NO: 2852366 - RNA, 19 nt, Artificial Sequence
  Description of Artificial Sequence: Synthetic oligonucleotide
cccuaaaucagcgcucccg

SEQ ID NO: 2852367 - RNA, 19 nt, Artificial Sequence
  Description of Artificial Sequence: Synthetic oligonucleotide
augaaccuguccaucugca

SEQ ID NO: 2852368 - RNA, 19 nt, Artificial Sequence
  Description of Artificial Sequence: Synthetic oligonucleotide
gcuagaaucgaaagaugca

SEQ ID NO: 2852369 - RNA, 19 nt, Artificial Sequence
  Description of Artificial Sequence: Synthetic oligonucleotide
acagcccuauuggaugcag

SEQ ID NO: 2852370 - RNA, 19 nt, Artificial Sequence
  Description of Artificial Sequence: Synthetic oligonucleotide
cucucucugcuucgccggg

SEQ ID NO: 2852371 - RNA, 19 nt, Artificial Sequence
  Description of Artificial Sequence: Synthetic oligonucleotide
accaggaaggccacucucu

SEQ ID NO: 2852372 - RNA, 19 nt, Artificial Sequence
  Description of Artificial Sequence: Synthetic oligonucleotide
acaucggcagucugacaaa

SEQ ID NO: 2852373 - RNA, 19 nt, Artificial Sequence
  Description of Artificial Sequence: Synthetic oligonucleotide
gcauacggagcucuuacaa

SEQ ID NO: 2852374 - RNA, 19 nt, Artificial Sequence
  Description of Artificial Sequence: Synthetic oligonucleotide
uccgccuccccagucaguc

SEQ ID NO: 2852375 - RNA, 19 nt, Artificial Sequence
  Description of Artificial Sequence: Synthetic oligonucleotide
gaugcucaaugugcuagaa

SEQ ID NO: 2852376 - RNA, 19 nt, Artificial Sequence
  Description of Artificial Sequence: Synthetic oligonucleotide
ccuauuggaugcagaaguc

SEQ ID NO: 2852377 - RNA, 19 nt, Artificial Sequence
  Description of Artificial Sequence: Synthetic oligonucleotide
gcaucaggaauccugccaa

SEQ ID NO: 2852378 - RNA, 19 nt, Artificial Sequence
  Description of Artificial Sequence: Synthetic oligonucleotide
ggggauggcccacuucucc

SEQ ID NO: 2852379 - RNA, 19 nt, Artificial Sequence
  Description of Artificial Sequence: Synthetic oligonucleotide
auugcauacggagcucuua

SEQ ID NO: 2852380 - RNA, 19 nt, Artificial Sequence
  Description of Artificial Sequence: Synthetic oligonucleotide
uguccuccucaagucagaa

SEQ ID NO: 2852381 - RNA, 19 nt, Artificial Sequence
  Description of Artificial Sequence: Synthetic oligonucleotide
aauugcauacggagcucuu

SEQ ID NO: 2852382 - RNA, 19 nt, Artificial Sequence
  Description of Artificial Sequence: Synthetic oligonucleotide
cgcuugaaagaucaugaac

SEQ ID NO: 2852383 - RNA, 19 nt, Artificial Sequence
  Description of Artificial Sequence: Synthetic oligonucleotide
ggggauuuguagguucugc

SEQ ID NO: 2852384 - RNA, 19 nt, Artificial Sequence
  Description of Artificial Sequence: Synthetic oligonucleotide
cucagcccuggcagaagac

SEQ ID NO: 2852385 - RNA, 19 nt, Artificial Sequence
  Description of Artificial Sequence: Synthetic oligonucleotide
caccaggaaggccacucuc

SEQ ID NO: 2852386 - RNA, 19 nt, Artificial Sequence
  Description of Artificial Sequence: Synthetic oligonucleotide
agugccucagcggggauuu

SEQ ID NO: 2852387 - RNA, 19 nt, Artificial Sequence
  Description of Artificial Sequence: Synthetic oligonucleotide
uguuucgcaaagggcuguc

SEQ ID NO: 2852388 - RNA, 19 nt, Artificial Sequence
  Description of Artificial Sequence: Synthetic oligonucleotide
gauuucgugcgcgccuuga

SEQ ID NO: 2852389 - RNA, 19 nt, Artificial Sequence
  Description of Artificial Sequence: Synthetic oligonucleotide
gcuguccuccucaagucag

SEQ ID NO: 2852390 - RNA, 19 nt, Artificial Sequence
  Description of Artificial Sequence: Synthetic oligonucleotide
acuucuccgccuccccagu

SEQ ID NO: 2852391 - RNA, 19 nt, Artificial Sequence
  Description of Artificial Sequence: Synthetic oligonucleotide
ugccucagcggggauuugu

SEQ ID NO: 2852392 - RNA, 19 nt, Artificial Sequence
  Description of Artificial Sequence: Synthetic oligonucleotide
gcaaaggacaucggcaguc

SEQ ID NO: 2852393 - RNA, 19 nt, Artificial Sequence
  Description of Artificial Sequence: Synthetic oligonucleotide
gucgggacaccaggaaggc

SEQ ID NO: 2852394 - RNA, 19 nt, Artificial Sequence
  Description of Artificial Sequence: Synthetic oligonucleotide
cuaaaucagcgcucccgaa

SEQ ID NO: 2852395 - RNA, 19 nt, Artificial Sequence
  Description of Artificial Sequence: Synthetic oligonucleotide
ggauggcccacuucuccgc

SEQ ID NO: 2852396 - RNA, 19 nt, Artificial Sequence
  Description of Artificial Sequence: Synthetic oligonucleotide
ggaaaugcaaucacuuggu

SEQ ID NO: 2852397 - RNA, 19 nt, Artificial Sequence
  Description of Artificial Sequence: Synthetic oligonucleotide
ucugcgcagcucagccaga

SEQ ID NO: 2852398 - RNA, 19 nt, Artificial Sequence
  Description of Artificial Sequence: Synthetic oligonucleotide
gagcucuuacaaacugguc

SEQ ID NO: 2852399 - RNA, 19 nt, Artificial Sequence
  Description of Artificial Sequence: Synthetic oligonucleotide
cggagcucuuacaaacugg

SEQ ID NO: 2852400 - RNA, 19 nt, Artificial Sequence
  Description of Artificial Sequence: Synthetic oligonucleotide
cuccucaagucagaaaaua

SEQ ID NO: 2852401 - RNA, 19 nt, Artificial Sequence
  Description of Artificial Sequence: Synthetic oligonucleotide
ggaagcgggacgcuugaaa

SEQ ID NO: 2852402 - RNA, 19 nt, Artificial Sequence
  Description of Artificial Sequence: Synthetic oligonucleotide
cccuauuggaugcagaagu

SEQ ID NO: 2852403 - RNA, 19 nt, Artificial Sequence
  Description of Artificial Sequence: Synthetic oligonucleotide
ucgggacaccaggaaggcc

SEQ ID NO: 2852404 - RNA, 19 nt, Artificial Sequence
  Description of Artificial Sequence: Synthetic oligonucleotide
guucugcgcagcucagcca

SEQ ID NO: 2852405 - RNA, 19 nt, Artificial Sequence
  Description of Artificial Sequence: Synthetic oligonucleotide
ccuaaaucagcgcucccga

SEQ ID NO: 2852406 - RNA, 19 nt, Artificial Sequence
  Description of Artificial Sequence: Synthetic oligonucleotide
uucgccggggaagcgggac

SEQ ID NO: 2852407 - RNA, 19 nt, Artificial Sequence
  Description of Artificial Sequence: Synthetic oligonucleotide
ucucugcuucgccggggaa

SEQ ID NO: 2852408 - RNA, 19 nt, Artificial Sequence
  Description of Artificial Sequence: Synthetic oligonucleotide
cuccccagucagucgggac

SEQ ID NO: 2852409 - RNA, 19 nt, Artificial Sequence
  Description of Artificial Sequence: Synthetic oligonucleotide
gcaaagggcugucgggcug

SEQ ID NO: 2852410 - RNA, 19 nt, Artificial Sequence
  Description of Artificial Sequence: Synthetic oligonucleotide
ggaauccugccaacuggcc

SEQ ID NO: 2852411 - RNA, 19 nt, Artificial Sequence
  Description of Artificial Sequence: Synthetic oligonucleotide
ugcgcagcucagccagaaa

SEQ ID NO: 2852412 - RNA, 19 nt, Artificial Sequence
  Description of Artificial Sequence: Synthetic oligonucleotide
ggaaggccacucucucugc

SEQ ID NO: 2852413 - RNA, 19 nt, Artificial Sequence
  Description of Artificial Sequence: Synthetic oligonucleotide
gcaaucacuugguguaaaa

SEQ ID NO: 2852414 - RNA, 19 nt, Artificial Sequence
  Description of Artificial Sequence: Synthetic oligonucleotide
ggagcucuuacaaacuggu

SEQ ID NO: 2852415 - RNA, 19 nt, Artificial Sequence
  Description of Artificial Sequence: Synthetic oligonucleotide
cagcgcucccgaacagccc

SEQ ID NO: 2852416 - RNA, 19 nt, Artificial Sequence
  Description of Artificial Sequence: Synthetic oligonucleotide
cgccuugagugccucagcg

SEQ ID NO: 2852417 - RNA, 19 nt, Artificial Sequence
  Description of Artificial Sequence: Synthetic oligonucleotide
gcaacugaagcaugaugcu

SEQ ID NO: 2852418 - RNA, 19 nt, Artificial Sequence
  Description of Artificial Sequence: Synthetic oligonucleotide
aggcccaucaguggagcaa

SEQ ID NO: 2852419 - RNA, 19 nt, Artificial Sequence
  Description of Artificial Sequence: Synthetic oligonucleotide
cugaagcaugaugcugcug

SEQ ID NO: 2852420 - RNA, 19 nt, Artificial Sequence
  Description of Artificial Sequence: Synthetic oligonucleotide
gcuucgccggggaagcggg

SEQ ID NO: 2852421 - RNA, 19 nt, Artificial Sequence
  Description of Artificial Sequence: Synthetic oligonucleotide
caguggagcaaaggacauc

SEQ ID NO: 2852422 - RNA, 19 nt, Artificial Sequence
  Description of Artificial Sequence: Synthetic oligonucleotide
cagaagucuuccggauuuc

SEQ ID NO: 2852423 - RNA, 19 nt, Artificial Sequence
  Description of Artificial Sequence: Synthetic oligonucleotide
cuguccuccucaagucaga

SEQ ID NO: 2852424 - RNA, 19 nt, Artificial Sequence
  Description of Artificial Sequence: Synthetic oligonucleotide
gcccuauuggaugcagaag

SEQ ID NO: 2852425 - RNA, 19 nt, Artificial Sequence
  Description of Artificial Sequence: Synthetic oligonucleotide
cuucuccgccuccccaguc

SEQ ID NO: 2852426 - RNA, 19 nt, Artificial Sequence
  Description of Artificial Sequence: Synthetic oligonucleotide
cgggacaccaggaaggcca

SEQ ID NO: 2852427 - RNA, 19 nt, Artificial Sequence
  Description of Artificial Sequence: Synthetic oligonucleotide
cucucugcuucgccgggga

SEQ ID NO: 2852428 - RNA, 19 nt, Artificial Sequence
  Description of Artificial Sequence: Synthetic oligonucleotide
gcagaagucuuccggauuu

SEQ ID NO: 2852429 - RNA, 19 nt, Artificial Sequence
  Description of Artificial Sequence: Synthetic oligonucleotide
ugagugccucagcggggau

SEQ ID NO: 2852430 - RNA, 19 nt, Artificial Sequence
  Description of Artificial Sequence: Synthetic oligonucleotide
acaaacuggucaggcccau

SEQ ID NO: 2852431 - RNA, 19 nt, Artificial Sequence
  Description of Artificial Sequence: Synthetic oligonucleotide
ccugguaguuguuucgcaa

SEQ ID NO: 2852432 - RNA, 19 nt, Artificial Sequence
  Description of Artificial Sequence: Synthetic oligonucleotide
cagcccuauuggaugcaga

SEQ ID NO: 2852433 - RNA, 19 nt, Artificial Sequence
  Description of Artificial Sequence: Synthetic oligonucleotide
guccuccucaagucagaaa

SEQ ID NO: 2852434 - RNA, 19 nt, Artificial Sequence
  Description of Artificial Sequence: Synthetic oligonucleotide
cgggacgcuugaaagauca

SEQ ID NO: 2852435 - RNA, 19 nt, Artificial Sequence
  Description of Artificial Sequence: Synthetic oligonucleotide
caucggcagucugacaaaa

SEQ ID NO: 2852436 - RNA, 19 nt, Artificial Sequence
  Description of Artificial Sequence: Synthetic oligonucleotide
caaacuggucaggcccauc

SEQ ID NO: 2852437 - RNA, 19 nt, Artificial Sequence
  Description of Artificial Sequence: Synthetic oligonucleotide
agcccuggcagaagacccu

SEQ ID NO: 2852438 - RNA, 19 nt, Artificial Sequence
  Description of Artificial Sequence: Synthetic oligonucleotide
gcccugguaguuguuucgc

SEQ ID NO: 2852439 - RNA, 19 nt, Artificial Sequence
  Description of Artificial Sequence: Synthetic oligonucleotide
cagccagaaagcccuggua

SEQ ID NO: 2852440 - RNA, 19 nt, Artificial Sequence
  Description of Artificial Sequence: Synthetic oligonucleotide
ggauuucgugcgcgccuug

SEQ ID NO: 2852441 - RNA, 19 nt, Artificial Sequence
  Description of Artificial Sequence: Synthetic oligonucleotide
cgccuccccagucagucgg

SEQ ID NO: 2852442 - RNA, 19 nt, Artificial Sequence
  Description of Artificial Sequence: Synthetic oligonucleotide
caggcccaucaguggagca

SEQ ID NO: 2852443 - RNA, 19 nt, Artificial Sequence
  Description of Artificial Sequence: Synthetic oligonucleotide
cugcuucgccggggaagcg

SEQ ID NO: 2852444 - RNA, 19 nt, Artificial Sequence
  Description of Artificial Sequence: Synthetic oligonucleotide
ggggaagcgggacgcuuga

SEQ ID NO: 2852445 - RNA, 19 nt, Artificial Sequence
  Description of Artificial Sequence: Synthetic oligonucleotide
cccacuucuccgccucccc

SEQ ID NO: 2852446 - RNA, 19 nt, Artificial Sequence
  Description of Artificial Sequence: Synthetic oligonucleotide
cccgaacagcccuauugga

SEQ ID NO: 2852447 - RNA, 19 nt, Artificial Sequence
  Description of Artificial Sequence: Synthetic oligonucleotide
ugcgcgccuugagugccuc

SEQ ID NO: 2852448 - RNA, 19 nt, Artificial Sequence
  Description of Artificial Sequence: Synthetic oligonucleotide
ggcccaucaguggagcaaa

SEQ ID NO: 2852449 - RNA, 19 nt, Artificial Sequence
  Description of Artificial Sequence: Synthetic oligonucleotide
gcgccuugagugccucagc

SEQ ID NO: 2852450 - RNA, 19 nt, Artificial Sequence
  Description of Artificial Sequence: Synthetic oligonucleotide
ggacaucggcagucugaca

SEQ ID NO: 2852451 - RNA, 19 nt, Artificial Sequence
  Description of Artificial Sequence: Synthetic oligonucleotide
aagggcugucgggcugcau

SEQ ID NO: 2852452 - RNA, 19 nt, Artificial Sequence
  Description of Artificial Sequence: Synthetic oligonucleotide
gggcugucgggcugcaugu

SEQ ID NO: 2852453 - RNA, 19 nt, Artificial Sequence
  Description of Artificial Sequence: Synthetic oligonucleotide
ccgaacagcccuauuggau

SEQ ID NO: 2852454 - RNA, 19 nt, Artificial Sequence
  Description of Artificial Sequence: Synthetic oligonucleotide
cggggaagcgggacgcuug

SEQ ID NO: 2852455 - RNA, 19 nt, Artificial Sequence
  Description of Artificial Sequence: Synthetic oligonucleotide
cccugguaguuguuucgca

SEQ ID NO: 2852456 - RNA, 19 nt, Artificial Sequence
  Description of Artificial Sequence: Synthetic oligonucleotide
cuucgccggggaagcggga

SEQ ID NO: 2852457 - RNA, 19 nt, Artificial Sequence
  Description of Artificial Sequence: Synthetic oligonucleotide
ccaacuggccggggucucc

SEQ ID NO: 2852458 - RNA, 19 nt, Artificial Sequence
  Description of Artificial Sequence: Synthetic oligonucleotide
cgugcgcgccuugagugcc

SEQ ID NO: 2852459 - RNA, 19 nt, Artificial Sequence
  Description of Artificial Sequence: Synthetic oligonucleotide
cgcgccuugagugccucag

SEQ ID NO: 2852460 - RNA, 19 nt, Artificial Sequence
  Description of Artificial Sequence: Synthetic oligonucleotide
gccuccccagucagucggg

SEQ ID NO: 2852461 - RNA, 19 nt, Artificial Sequence
  Description of Artificial Sequence: Synthetic oligonucleotide
ggcugucgggcugcaugug

SEQ ID NO: 2852462 - RNA, 19 nt, Artificial Sequence
  Description of Artificial Sequence: Synthetic oligonucleotide
ccacuucuccgccucccca

SEQ ID NO: 2852463 - RNA, 19 nt, Artificial Sequence
  Description of Artificial Sequence: Synthetic oligonucleotide
gcucagccagaaagcccug

SEQ ID NO: 2852464 - RNA, 19 nt, Artificial Sequence
  Description of Artificial Sequence: Synthetic oligonucleotide
gugccucagcggggauuug

SEQ ID NO: 2852465 - RNA, 19 nt, Artificial Sequence
  Description of Artificial Sequence: Synthetic oligonucleotide
gccucagcggggauuugua

SEQ ID NO: 2852466 - RNA, 19 nt, Artificial Sequence
  Description of Artificial Sequence: Synthetic oligonucleotide
gcgggacgcuugaaagauc

SEQ ID NO: 2852467 - RNA, 19 nt, Artificial Sequence
  Description of Artificial Sequence: Synthetic oligonucleotide
ccugccaacuggccggggu

SEQ ID NO: 2852468 - RNA, 19 nt, Artificial Sequence
  Description of Artificial Sequence: Synthetic oligonucleotide
ccggauuucgugcgcgccu

SEQ ID NO: 2852469 - RNA, 19 nt, Artificial Sequence
  Description of Artificial Sequence: Synthetic oligonucleotide
cggggauuuguagguucug

SEQ ID NO: 2852470 - RNA, 19 nt, Artificial Sequence
  Description of Artificial Sequence: Synthetic oligonucleotide
gccaacuggccggggucuc

SEQ ID NO: 2852471 - RNA, 19 nt, Artificial Sequence
  Description of Artificial Sequence: Synthetic oligonucleotide
gcccuggcagaagacccua

SEQ ID NO: 2852472 - RNA, 19 nt, Artificial Sequence
  Description of Artificial Sequence: Synthetic oligonucleotide
gggaagcgggacgcuugaa

SEQ ID NO: 2852473 - RNA, 19 nt, Artificial Sequence
  Description of Artificial Sequence: Synthetic oligonucleotide
cuccgccuccccagucagu

SEQ ID NO: 2852474 - RNA, 19 nt, Artificial Sequence
  Description of Artificial Sequence: Synthetic oligonucleotide
cccuggcagaagacccuaa

SEQ ID NO: 2852475 - RNA, 19 nt, Artificial Sequence
  Description of Artificial Sequence: Synthetic oligonucleotide
ccuccccagucagucggga

SEQ ID NO: 2852476 - RNA, 19 nt, Artificial Sequence
  Description of Artificial Sequence: Synthetic oligonucleotide
gcgcgccuugagugccuca

SEQ ID NO: 2852477 - RNA, 19 nt, Artificial Sequence
  Description of Artificial Sequence: Synthetic oligonucleotide
gggacgcuugaaagaucau

SEQ ID NO: 2852478 - RNA, 19 nt, Artificial Sequence
  Description of Artificial Sequence: Synthetic oligonucleotide
gugcgcgccuugagugccu

SEQ ID NO: 2852479 - RNA, 19 nt, Artificial Sequence
  Description of Artificial Sequence: Synthetic oligonucleotide
cagcggggauuuguagguu

SEQ ID NO: 2852480 - RNA, 19 nt, Artificial Sequence
  Description of Artificial Sequence: Synthetic oligonucleotide
gcgcucccgaacagcccua

SEQ ID NO: 2852481 - RNA, 19 nt, Artificial Sequence
  Description of Artificial Sequence: Synthetic oligonucleotide
gccggggaagcgggacgcu

SEQ ID NO: 2852482 - RNA, 19 nt, Artificial Sequence
  Description of Artificial Sequence: Synthetic oligonucleotide
cggauuucgugcgcgccuu

SEQ ID NO: 2852483 - RNA, 19 nt, Artificial Sequence
  Description of Artificial Sequence: Synthetic oligonucleotide
ccggggaagcgggacgcuu

SEQ ID NO: 2852484 - RNA, 19 nt, Artificial Sequence
  Description of Artificial Sequence: Synthetic oligonucleotide
cgcucccgaacagcccuau

SEQ ID NO: 2852485 - RNA, 19 nt, Artificial Sequence
  Description of Artificial Sequence: Synthetic oligonucleotide
aaugcuaugauacuggauc

SEQ ID NO: 2852486 - RNA, 19 nt, Artificial Sequence
  Description of Artificial Sequence: Synthetic oligonucleotide
uuaacuggaacacaaaacc

SEQ ID NO: 2852487 - RNA, 19 nt, Artificial Sequence
  Description of Artificial Sequence: Synthetic oligonucleotide
aauauucaaaaguugacca

SEQ ID NO: 2852488 - RNA, 19 nt, Artificial Sequence
  Description of Artificial Sequence: Synthetic oligonucleotide
uacacuauugacaacauca

SEQ ID NO: 2852489 - RNA, 19 nt, Artificial Sequence
  Description of Artificial Sequence: Synthetic oligonucleotide
acuauugacaacaucaucc

SEQ ID NO: 2852490 - RNA, 19 nt, Artificial Sequence
  Description of Artificial Sequence: Synthetic oligonucleotide
aauauagccuguuaaaaga

SEQ ID NO: 2852491 - RNA, 19 nt, Artificial Sequence
  Description of Artificial Sequence: Synthetic oligonucleotide
aauaauauucaaaaguuga

SEQ ID NO: 2852492 - RNA, 19 nt, Artificial Sequence
  Description of Artificial Sequence: Synthetic oligonucleotide
ucaacaaacucucuugggg

SEQ ID NO: 2852493 - RNA, 19 nt, Artificial Sequence
  Description of Artificial Sequence: Synthetic oligonucleotide
aaucaacaaacucucuugg

SEQ ID NO: 2852494 - RNA, 19 nt, Artificial Sequence
  Description of Artificial Sequence: Synthetic oligonucleotide
ucuauuacacuauugacaa

SEQ ID NO: 2852495 - RNA, 19 nt, Artificial Sequence
  Description of Artificial Sequence: Synthetic oligonucleotide
uucuucaaugcuaugauac

SEQ ID NO: 2852496 - RNA, 19 nt, Artificial Sequence
  Description of Artificial Sequence: Synthetic oligonucleotide
aacaccuugggcuuuguag

SEQ ID NO: 2852497 - RNA, 19 nt, Artificial Sequence
  Description of Artificial Sequence: Synthetic oligonucleotide
aaagugcuccaaaauaucc

SEQ ID NO: 2852498 - RNA, 19 nt, Artificial Sequence
  Description of Artificial Sequence: Synthetic oligonucleotide
gaauauagccuguuaaaag

SEQ ID NO: 2852499 - RNA, 19 nt, Artificial Sequence
  Description of Artificial Sequence: Synthetic oligonucleotide
uucaaugcuaugauacugg

SEQ ID NO: 2852500 - RNA, 19 nt, Artificial Sequence
  Description of Artificial Sequence: Synthetic oligonucleotide
uguuaaaagacucuggcuu

SEQ ID NO: 2852501 - RNA, 19 nt, Artificial Sequence
  Description of Artificial Sequence: Synthetic oligonucleotide
uauuacacuauugacaaca

SEQ ID NO: 2852502 - RNA, 19 nt, Artificial Sequence
  Description of Artificial Sequence: Synthetic oligonucleotide
auaggagaaaucaacaaac

SEQ ID NO: 2852503 - RNA, 19 nt, Artificial Sequence
  Description of Artificial Sequence: Synthetic oligonucleotide
uuuaacuggaacacaaaac

SEQ ID NO: 2852504 - RNA, 19 nt, Artificial Sequence
  Description of Artificial Sequence: Synthetic oligonucleotide
ucauccauaacaccuuggg

SEQ ID NO: 2852505 - RNA, 19 nt, Artificial Sequence
  Description of Artificial Sequence: Synthetic oligonucleotide
gauaguuauagccacgaac

SEQ ID NO: 2852506 - RNA, 19 nt, Artificial Sequence
  Description of Artificial Sequence: Synthetic oligonucleotide
uaauauucaaaaguugacc

SEQ ID NO: 2852507 - RNA, 19 nt, Artificial Sequence
  Description of Artificial Sequence: Synthetic oligonucleotide
ucaaaaguugaccagcagu

SEQ ID NO: 2852508 - RNA, 19 nt, Artificial Sequence
  Description of Artificial Sequence: Synthetic oligonucleotide
aagacucuggcuuggauug

SEQ ID NO: 2852509 - RNA, 19 nt, Artificial Sequence
  Description of Artificial Sequence: Synthetic oligonucleotide
uccagugaagucauuaacc

SEQ ID NO: 2852510 - RNA, 19 nt, Artificial Sequence
  Description of Artificial Sequence: Synthetic oligonucleotide
auccauaacaccuugggcu

SEQ ID NO: 2852511 - RNA, 19 nt, Artificial Sequence
  Description of Artificial Sequence: Synthetic oligonucleotide
uguaacgcaucacacagca

SEQ ID NO: 2852512 - RNA, 19 nt, Artificial Sequence
  Description of Artificial Sequence: Synthetic oligonucleotide
ucuccaaacuguuacaucu

SEQ ID NO: 2852513 - RNA, 19 nt, Artificial Sequence
  Description of Artificial Sequence: Synthetic oligonucleotide
auugucuuuaacuggaaca

SEQ ID NO: 2852514 - RNA, 19 nt, Artificial Sequence
  Description of Artificial Sequence: Synthetic oligonucleotide
uauaggagaaaucaacaaa

SEQ ID NO: 2852515 - RNA, 19 nt, Artificial Sequence
  Description of Artificial Sequence: Synthetic oligonucleotide
augauacuggaucagagug

SEQ ID NO: 2852516 - RNA, 19 nt, Artificial Sequence
  Description of Artificial Sequence: Synthetic oligonucleotide
uggucuauuacacuauuga

SEQ ID NO: 2852517 - RNA, 19 nt, Artificial Sequence
  Description of Artificial Sequence: Synthetic oligonucleotide
ucuuggggaaauaauauuc

SEQ ID NO: 2852518 - RNA, 19 nt, Artificial Sequence
  Description of Artificial Sequence: Synthetic oligonucleotide
ucugaauauagccuguuaa

SEQ ID NO: 2852519 - RNA, 19 nt, Artificial Sequence
  Description of Artificial Sequence: Synthetic oligonucleotide
ucugucugaauauagccug

SEQ ID NO: 2852520 - RNA, 19 nt, Artificial Sequence
  Description of Artificial Sequence: Synthetic oligonucleotide
uggaacacaaaaccagccg

SEQ ID NO: 2852521 - RNA, 19 nt, Artificial Sequence
  Description of Artificial Sequence: Synthetic oligonucleotide
uguuacaucuuucauuuuc

SEQ ID NO: 2852522 - RNA, 19 nt, Artificial Sequence
  Description of Artificial Sequence: Synthetic oligonucleotide
cuuggauugucuuuaacug

SEQ ID NO: 2852523 - RNA, 19 nt, Artificial Sequence
  Description of Artificial Sequence: Synthetic oligonucleotide
aggauaaaaguccuucuuc

SEQ ID NO: 2852524 - RNA, 19 nt, Artificial Sequence
  Description of Artificial Sequence: Synthetic oligonucleotide
aaaaguccuucuucauagc

SEQ ID NO: 2852525 - RNA, 19 nt, Artificial Sequence
  Description of Artificial Sequence: Synthetic oligonucleotide
auaauauucaaaaguugac

SEQ ID NO: 2852526 - RNA, 19 nt, Artificial Sequence
  Description of Artificial Sequence: Synthetic oligonucleotide
cacuaaacucuucugaggg

SEQ ID NO: 2852527 - RNA, 19 nt, Artificial Sequence
  Description of Artificial Sequence: Synthetic oligonucleotide
aggagaaaucaacaaacuc

SEQ ID NO: 2852528 - RNA, 19 nt, Artificial Sequence
  Description of Artificial Sequence: Synthetic oligonucleotide
uuucacuccagucaagacu

SEQ ID NO: 2852529 - RNA, 19 nt, Artificial Sequence
  Description of Artificial Sequence: Synthetic oligonucleotide
uuggauugucuuuaacugg

SEQ ID NO: 2852530 - RNA, 19 nt, Artificial Sequence
  Description of Artificial Sequence: Synthetic oligonucleotide
ucauuuucuuggcaacucg

SEQ ID NO: 2852531 - RNA, 19 nt, Artificial Sequence
  Description of Artificial Sequence: Synthetic oligonucleotide
agcaauucucuucaaagug

SEQ ID NO: 2852532 - RNA, 19 nt, Artificial Sequence
  Description of Artificial Sequence: Synthetic oligonucleotide
aauccaagcgccacggccc

SEQ ID NO: 2852533 - RNA, 19 nt, Artificial Sequence
  Description of Artificial Sequence: Synthetic oligonucleotide
acuguuacaucuuucauuu

SEQ ID NO: 2852534 - RNA, 19 nt, Artificial Sequence
  Description of Artificial Sequence: Synthetic oligonucleotide
uaacgcaucacacagcaau

SEQ ID NO: 2852535 - RNA, 19 nt, Artificial Sequence
  Description of Artificial Sequence: Synthetic oligonucleotide
aaaguugaccagcaguggu

SEQ ID NO: 2852536 - RNA, 19 nt, Artificial Sequence
  Description of Artificial Sequence: Synthetic oligonucleotide
gaagucauuaaccgguccc

SEQ ID NO: 2852537 - RNA, 19 nt, Artificial Sequence
  Description of Artificial Sequence: Synthetic oligonucleotide
ucucguuucacuccaguca

SEQ ID NO: 2852538 - RNA, 19 nt, Artificial Sequence
  Description of Artificial Sequence: Synthetic oligonucleotide
auauucaaaaguugaccag

SEQ ID NO: 2852539 - RNA, 19 nt, Artificial Sequence
  Description of Artificial Sequence: Synthetic oligonucleotide
uguagagauacccacuaaa

SEQ ID NO: 2852540 - RNA, 19 nt, Artificial Sequence
  Description of Artificial Sequence: Synthetic oligonucleotide
uggauugucuuuaacugga

SEQ ID NO: 2852541 - RNA, 19 nt, Artificial Sequence
  Description of Artificial Sequence: Synthetic oligonucleotide
ugcuccaaaauauccagug

SEQ ID NO: 2852542 - RNA, 19 nt, Artificial Sequence
  Description of Artificial Sequence: Synthetic oligonucleotide
uagagauacccacuaaacu

SEQ ID NO: 2852543 - RNA, 19 nt, Artificial Sequence
  Description of Artificial Sequence: Synthetic oligonucleotide
agugcuccaaaauauccag

SEQ ID NO: 2852544 - RNA, 19 nt, Artificial Sequence
  Description of Artificial Sequence: Synthetic oligonucleotide
uauguggucuauuacacua

SEQ ID NO: 2852545 - RNA, 19 nt, Artificial Sequence
  Description of Artificial Sequence: Synthetic oligonucleotide
ucaagacuuacuccacagg

SEQ ID NO: 2852546 - RNA, 19 nt, Artificial Sequence
  Description of Artificial Sequence: Synthetic oligonucleotide
aacuguuacaucuuucauu

SEQ ID NO: 2852547 - RNA, 19 nt, Artificial Sequence
  Description of Artificial Sequence: Synthetic oligonucleotide
caaaauauccagugaaguc

SEQ ID NO: 2852548 - RNA, 19 nt, Artificial Sequence
  Description of Artificial Sequence: Synthetic oligonucleotide
uaacuggaacacaaaacca

SEQ ID NO: 2852549 - RNA, 19 nt, Artificial Sequence
  Description of Artificial Sequence: Synthetic oligonucleotide
aaaaguugaccagcagugg

SEQ ID NO: 2852550 - RNA, 19 nt, Artificial Sequence
  Description of Artificial Sequence: Synthetic oligonucleotide
caguauaggagaaaucaac

SEQ ID NO: 2852551 - RNA, 19 nt, Artificial Sequence
  Description of Artificial Sequence: Synthetic oligonucleotide
aaagacucuggcuuggauu

SEQ ID NO: 2852552 - RNA, 19 nt, Artificial Sequence
  Description of Artificial Sequence: Synthetic oligonucleotide
uuacuccacaggauaaaag

SEQ ID NO: 2852553 - RNA, 19 nt, Artificial Sequence
  Description of Artificial Sequence: Synthetic oligonucleotide
agugguguaacgcaucaca

SEQ ID NO: 2852554 - RNA, 19 nt, Artificial Sequence
  Description of Artificial Sequence: Synthetic oligonucleotide
aaccggucccaauccaagc

SEQ ID NO: 2852555 - RNA, 19 nt, Artificial Sequence
  Description of Artificial Sequence: Synthetic oligonucleotide
ucauuaaccggucccaauc

SEQ ID NO: 2852556 - RNA, 19 nt, Artificial Sequence
  Description of Artificial Sequence: Synthetic oligonucleotide
guuaaaagacucuggcuug

SEQ ID NO: 2852557 - RNA, 19 nt, Artificial Sequence
  Description of Artificial Sequence: Synthetic oligonucleotide
aucaacaaacucucuuggg

SEQ ID NO: 2852558 - RNA, 19 nt, Artificial Sequence
  Description of Artificial Sequence: Synthetic oligonucleotide
uuuucuuggcaacucgcca

SEQ ID NO: 2852559 - RNA, 19 nt, Artificial Sequence
  Description of Artificial Sequence: Synthetic oligonucleotide
uaugauacuggaucagagu

SEQ ID NO: 2852560 - RNA, 19 nt, Artificial Sequence
  Description of Artificial Sequence: Synthetic oligonucleotide
gguguaacgcaucacacag

SEQ ID NO: 2852561 - RNA, 19 nt, Artificial Sequence
  Description of Artificial Sequence: Synthetic oligonucleotide
acuggaacacaaaaccagc

SEQ ID NO: 2852562 - RNA, 19 nt, Artificial Sequence
  Description of Artificial Sequence: Synthetic oligonucleotide
uuaaaagacucuggcuugg

SEQ ID NO: 2852563 - RNA, 19 nt, Artificial Sequence
  Description of Artificial Sequence: Synthetic oligonucleotide
ugaauauagccuguuaaaa

SEQ ID NO: 2852564 - RNA, 19 nt, Artificial Sequence
  Description of Artificial Sequence: Synthetic oligonucleotide
agaucugucugaauauagc

SEQ ID NO: 2852565 - RNA, 19 nt, Artificial Sequence
  Description of Artificial Sequence: Synthetic oligonucleotide
auauagccuguuaaaagac

SEQ ID NO: 2852566 - RNA, 19 nt, Artificial Sequence
  Description of Artificial Sequence: Synthetic oligonucleotide
auuuucuuggcaacucgcc

SEQ ID NO: 2852567 - RNA, 19 nt, Artificial Sequence
  Description of Artificial Sequence: Synthetic oligonucleotide
agugaagucauuaaccggu

SEQ ID NO: 2852568 - RNA, 19 nt, Artificial Sequence
  Description of Artificial Sequence: Synthetic oligonucleotide
ucucuuggggaaauaauau

SEQ ID NO: 2852569 - RNA, 19 nt, Artificial Sequence
  Description of Artificial Sequence: Synthetic oligonucleotide
uauagccuguuaaaagacu

SEQ ID NO: 2852570 - RNA, 19 nt, Artificial Sequence
  Description of Artificial Sequence: Synthetic oligonucleotide
uugucuuuaacuggaacac

SEQ ID NO: 2852571 - RNA, 19 nt, Artificial Sequence
  Description of Artificial Sequence: Synthetic oligonucleotide
uaggagaaaucaacaaacu

SEQ ID NO: 2852572 - RNA, 19 nt, Artificial Sequence
  Description of Artificial Sequence: Synthetic oligonucleotide
auagccuguuaaaagacuc

SEQ ID NO: 2852573 - RNA, 19 nt, Artificial Sequence
  Description of Artificial Sequence: Synthetic oligonucleotide
aaaccagccgcagggauag

SEQ ID NO: 2852574 - RNA, 19 nt, Artificial Sequence
  Description of Artificial Sequence: Synthetic oligonucleotide
aauucuggucucguuucac

SEQ ID NO: 2852575 - RNA, 19 nt, Artificial Sequence
  Description of Artificial Sequence: Synthetic oligonucleotide
uagcccacaguauaggaga

SEQ ID NO: 2852576 - RNA, 19 nt, Artificial Sequence
  Description of Artificial Sequence: Synthetic oligonucleotide
cacuuaucuucuucaaugc

SEQ ID NO: 2852577 - RNA, 19 nt, Artificial Sequence
  Description of Artificial Sequence: Synthetic oligonucleotide
cauuuucuuggcaacucgc

SEQ ID NO: 2852578 - RNA, 19 nt, Artificial Sequence
  Description of Artificial Sequence: Synthetic oligonucleotide
uucaaaaguugaccagcag

SEQ ID NO: 2852579 - RNA, 19 nt, Artificial Sequence
  Description of Artificial Sequence: Synthetic oligonucleotide
aguauaggagaaaucaaca

SEQ ID NO: 2852580 - RNA, 19 nt, Artificial Sequence
  Description of Artificial Sequence: Synthetic oligonucleotide
auacccacuaaacucuucu

SEQ ID NO: 2852581 - RNA, 19 nt, Artificial Sequence
  Description of Artificial Sequence: Synthetic oligonucleotide
uuucuuggcaacucgccac

SEQ ID NO: 2852582 - RNA, 19 nt, Artificial Sequence
  Description of Artificial Sequence: Synthetic oligonucleotide
cacaguauaggagaaauca

SEQ ID NO: 2852583 - RNA, 19 nt, Artificial Sequence
  Description of Artificial Sequence: Synthetic oligonucleotide
uccacaggauaaaaguccu

SEQ ID NO: 2852584 - RNA, 19 nt, Artificial Sequence
  Description of Artificial Sequence: Synthetic oligonucleotide
aacaaacucucuuggggaa

SEQ ID NO: 2852585 - RNA, 19 nt, Artificial Sequence
  Description of Artificial Sequence: Synthetic oligonucleotide
uccagucaagacuuacucc

SEQ ID NO: 2852586 - RNA, 19 nt, Artificial Sequence
  Description of Artificial Sequence: Synthetic oligonucleotide
acgaacaaauucuggucuc

SEQ ID NO: 2852587 - RNA, 19 nt, Artificial Sequence
  Description of Artificial Sequence: Synthetic oligonucleotide
gucuauuacacuauugaca

SEQ ID NO: 2852588 - RNA, 19 nt, Artificial Sequence
  Description of Artificial Sequence: Synthetic oligonucleotide
cuggaacacaaaaccagcc

SEQ ID NO: 2852589 - RNA, 19 nt, Artificial Sequence
  Description of Artificial Sequence: Synthetic oligonucleotide
gauugucuuuaacuggaac

SEQ ID NO: 2852590 - RNA, 19 nt, Artificial Sequence
  Description of Artificial Sequence: Synthetic oligonucleotide
ucuucaaugcuaugauacu

SEQ ID NO: 2852591 - RNA, 19 nt, Artificial Sequence
  Description of Artificial Sequence: Synthetic oligonucleotide
aacacaaaaccagccgcag

SEQ ID NO: 2852592 - RNA, 19 nt, Artificial Sequence
  Description of Artificial Sequence: Synthetic oligonucleotide
caacucgccacuuaucuuc

SEQ ID NO: 2852593 - RNA, 19 nt, Artificial Sequence
  Description of Artificial Sequence: Synthetic oligonucleotide
cauuaaccggucccaaucc

SEQ ID NO: 2852594 - RNA, 19 nt, Artificial Sequence
  Description of Artificial Sequence: Synthetic oligonucleotide
cagaucugucugaauauag

SEQ ID NO: 2852595 - RNA, 19 nt, Artificial Sequence
  Description of Artificial Sequence: Synthetic oligonucleotide
aaauucuggucucguuuca

SEQ ID NO: 2852596 - RNA, 19 nt, Artificial Sequence
  Description of Artificial Sequence: Synthetic oligonucleotide
caauccaagcgccacggcc

SEQ ID NO: 2852597 - RNA, 19 nt, Artificial Sequence
  Description of Artificial Sequence: Synthetic oligonucleotide
uaaccggucccaauccaag

SEQ ID NO: 2852598 - RNA, 19 nt, Artificial Sequence
  Description of Artificial Sequence: Synthetic oligonucleotide
cagugaagucauuaaccgg

SEQ ID NO: 2852599 - RNA, 19 nt, Artificial Sequence
  Description of Artificial Sequence: Synthetic oligonucleotide
ccagugaagucauuaaccg

SEQ ID NO: 2852600 - RNA, 19 nt, Artificial Sequence
  Description of Artificial Sequence: Synthetic oligonucleotide
caagacuuacuccacagga

SEQ ID NO: 2852601 - RNA, 19 nt, Artificial Sequence
  Description of Artificial Sequence: Synthetic oligonucleotide
accggucccaauccaagcg

SEQ ID NO: 2852602 - RNA, 19 nt, Artificial Sequence
  Description of Artificial Sequence: Synthetic oligonucleotide
cuucaaugcuaugauacug

SEQ ID NO: 2852603 - RNA, 19 nt, Artificial Sequence
  Description of Artificial Sequence: Synthetic oligonucleotide
cuuggggaaauaauauuca

SEQ ID NO: 2852604 - RNA, 19 nt, Artificial Sequence
  Description of Artificial Sequence: Synthetic oligonucleotide
ucuuuaacuggaacacaaa

SEQ ID NO: 2852605 - RNA, 19 nt, Artificial Sequence
  Description of Artificial Sequence: Synthetic oligonucleotide
cauccauaacaccuugggc

SEQ ID NO: 2852606 - RNA, 19 nt, Artificial Sequence
  Description of Artificial Sequence: Synthetic oligonucleotide
ccuguuaaaagacucuggc

SEQ ID NO: 2852607 - RNA, 19 nt, Artificial Sequence
  Description of Artificial Sequence: Synthetic oligonucleotide
cuauugacaacaucaucca

SEQ ID NO: 2852608 - RNA, 19 nt, Artificial Sequence
  Description of Artificial Sequence: Synthetic oligonucleotide
uauccagugaagucauuaa

SEQ ID NO: 2852609 - RNA, 19 nt, Artificial Sequence
  Description of Artificial Sequence: Synthetic oligonucleotide
guauaggagaaaucaacaa

SEQ ID NO: 2852610 - RNA, 19 nt, Artificial Sequence
  Description of Artificial Sequence: Synthetic oligonucleotide
ugguguaacgcaucacaca

SEQ ID NO: 2852611 - RNA, 19 nt, Artificial Sequence
  Description of Artificial Sequence: Synthetic oligonucleotide
ggauaaaaguccuucuuca

SEQ ID NO: 2852612 - RNA, 19 nt, Artificial Sequence
  Description of Artificial Sequence: Synthetic oligonucleotide
aaauauccagugaagucau

SEQ ID NO: 2852613 - RNA, 19 nt, Artificial Sequence
  Description of Artificial Sequence: Synthetic oligonucleotide
uuggggaaauaauauucaa

SEQ ID NO: 2852614 - RNA, 19 nt, Artificial Sequence
  Description of Artificial Sequence: Synthetic oligonucleotide
aagugcuccaaaauaucca

SEQ ID NO: 2852615 - RNA, 19 nt, Artificial Sequence
  Description of Artificial Sequence: Synthetic oligonucleotide
acccacuaaacucuucuga

SEQ ID NO: 2852616 - RNA, 19 nt, Artificial Sequence
  Description of Artificial Sequence: Synthetic oligonucleotide
aagucauuaaccgguccca

SEQ ID NO: 2852617 - RNA, 19 nt, Artificial Sequence
  Description of Artificial Sequence: Synthetic oligonucleotide
ccacuuaucuucuucaaug

SEQ ID NO: 2852618 - RNA, 19 nt, Artificial Sequence
  Description of Artificial Sequence: Synthetic oligonucleotide
cagggauaguuauagccac

SEQ ID NO: 2852619 - RNA, 19 nt, Artificial Sequence
  Description of Artificial Sequence: Synthetic oligonucleotide
augcuaugauacuggauca

SEQ ID NO: 2852620 - RNA, 19 nt, Artificial Sequence
  Description of Artificial Sequence: Synthetic oligonucleotide
aacaaauucuggucucguu

SEQ ID NO: 2852621 - RNA, 19 nt, Artificial Sequence
  Description of Artificial Sequence: Synthetic oligonucleotide
agacuuacuccacaggaua

SEQ ID NO: 2852622 - RNA, 19 nt, Artificial Sequence
  Description of Artificial Sequence: Synthetic oligonucleotide
gaaaucaacaaacucucuu

SEQ ID NO: 2852623 - RNA, 19 nt, Artificial Sequence
  Description of Artificial Sequence: Synthetic oligonucleotide
uuaaccggucccaauccaa

SEQ ID NO: 2852624 - RNA, 19 nt, Artificial Sequence
  Description of Artificial Sequence: Synthetic oligonucleotide
ucccaauccaagcgccacg

SEQ ID NO: 2852625 - RNA, 19 nt, Artificial Sequence
  Description of Artificial Sequence: Synthetic oligonucleotide
uuacacuauugacaacauc

SEQ ID NO: 2852626 - RNA, 19 nt, Artificial Sequence
  Description of Artificial Sequence: Synthetic oligonucleotide
auugacaacaucauccaua

SEQ ID NO: 2852627 - RNA, 19 nt, Artificial Sequence
  Description of Artificial Sequence: Synthetic oligonucleotide
caacaaacucucuugggga

SEQ ID NO: 2852628 - RNA, 19 nt, Artificial Sequence
  Description of Artificial Sequence: Synthetic oligonucleotide
uagccuguuaaaagacucu

SEQ ID NO: 2852629 - RNA, 19 nt, Artificial Sequence
  Description of Artificial Sequence: Synthetic oligonucleotide
uacuggaucagaguguuuu

SEQ ID NO: 2852630 - RNA, 19 nt, Artificial Sequence
  Description of Artificial Sequence: Synthetic oligonucleotide
ggaucagaguguuuugaag

SEQ ID NO: 2852631 - RNA, 19 nt, Artificial Sequence
  Description of Artificial Sequence: Synthetic oligonucleotide
ggucuauuacacuauugac

SEQ ID NO: 2852632 - RNA, 19 nt, Artificial Sequence
  Description of Artificial Sequence: Synthetic oligonucleotide
cugaauauagccuguuaaa

SEQ ID NO: 2852633 - RNA, 19 nt, Artificial Sequence
  Description of Artificial Sequence: Synthetic oligonucleotide
ggagaaaucaacaaacucu

SEQ ID NO: 2852634 - RNA, 19 nt, Artificial Sequence
  Description of Artificial Sequence: Synthetic oligonucleotide
uuggcaacucgccacuuau

SEQ ID NO: 2852635 - RNA, 19 nt, Artificial Sequence
  Description of Artificial Sequence: Synthetic oligonucleotide
acuaaacucuucugagggu

SEQ ID NO: 2852636 - RNA, 19 nt, Artificial Sequence
  Description of Artificial Sequence: Synthetic oligonucleotide
auuaaccggucccaaucca

SEQ ID NO: 2852637 - RNA, 19 nt, Artificial Sequence
  Description of Artificial Sequence: Synthetic oligonucleotide
uggaucagaguguuuugaa

SEQ ID NO: 2852638 - RNA, 19 nt, Artificial Sequence
  Description of Artificial Sequence: Synthetic oligonucleotide
guuauagccacgaacaaau

SEQ ID NO: 2852639 - RNA, 19 nt, Artificial Sequence
  Description of Artificial Sequence: Synthetic oligonucleotide
agucaagacuuacuccaca

SEQ ID NO: 2852640 - RNA, 19 nt, Artificial Sequence
  Description of Artificial Sequence: Synthetic oligonucleotide
acgcagaucugucugaaua

SEQ ID NO: 2852641 - RNA, 19 nt, Artificial Sequence
  Description of Artificial Sequence: Synthetic oligonucleotide
uccauaacaccuugggcuu

SEQ ID NO: 2852642 - RNA, 19 nt, Artificial Sequence
  Description of Artificial Sequence: Synthetic oligonucleotide
auagcccacaguauaggag

SEQ ID NO: 2852643 - RNA, 19 nt, Artificial Sequence
  Description of Artificial Sequence: Synthetic oligonucleotide
ucgccacuuaucuucuuca

SEQ ID NO: 2852644 - RNA, 19 nt, Artificial Sequence
  Description of Artificial Sequence: Synthetic oligonucleotide
aacucucuuggggaaauaa

SEQ ID NO: 2852645 - RNA, 19 nt, Artificial Sequence
  Description of Artificial Sequence: Synthetic oligonucleotide
uccaaacuguuacaucuuu

SEQ ID NO: 2852646 - RNA, 19 nt, Artificial Sequence
  Description of Artificial Sequence: Synthetic oligonucleotide
uucuuggcaacucgccacu

SEQ ID NO: 2852647 - RNA, 19 nt, Artificial Sequence
  Description of Artificial Sequence: Synthetic oligonucleotide
gcuuuguagagauacccac

SEQ ID NO: 2852648 - RNA, 19 nt, Artificial Sequence
  Description of Artificial Sequence: Synthetic oligonucleotide
aguuauagccacgaacaaa

SEQ ID NO: 2852649 - RNA, 19 nt, Artificial Sequence
  Description of Artificial Sequence: Synthetic oligonucleotide
ugucuuuaacuggaacaca

SEQ ID NO: 2852650 - RNA, 19 nt, Artificial Sequence
  Description of Artificial Sequence: Synthetic oligonucleotide
uguggucuauuacacuauu

SEQ ID NO: 2852651 - RNA, 19 nt, Artificial Sequence
  Description of Artificial Sequence: Synthetic oligonucleotide
auucaaaaguugaccagca

SEQ ID NO: 2852652 - RNA, 19 nt, Artificial Sequence
  Description of Artificial Sequence: Synthetic oligonucleotide
aagacuuacuccacaggau

SEQ ID NO: 2852653 - RNA, 19 nt, Artificial Sequence
  Description of Artificial Sequence: Synthetic oligonucleotide
uacccacuaaacucuucug

SEQ ID NO: 2852654 - RNA, 19 nt, Artificial Sequence
  Description of Artificial Sequence: Synthetic oligonucleotide
uucuccaaacuguuacauc

SEQ ID NO: 2852655 - RNA, 19 nt, Artificial Sequence
  Description of Artificial Sequence: Synthetic oligonucleotide
gaacacaaaaccagccgca

SEQ ID NO: 2852656 - RNA, 19 nt, Artificial Sequence
  Description of Artificial Sequence: Synthetic oligonucleotide
cacuauugacaacaucauc

SEQ ID NO: 2852657 - RNA, 19 nt, Artificial Sequence
  Description of Artificial Sequence: Synthetic oligonucleotide
auauccagugaagucauua

SEQ ID NO: 2852658 - RNA, 19 nt, Artificial Sequence
  Description of Artificial Sequence: Synthetic oligonucleotide
cucucuuggggaaauaaua

SEQ ID NO: 2852659 - RNA, 19 nt, Artificial Sequence
  Description of Artificial Sequence: Synthetic oligonucleotide
gcaauucucuucaaagugc

SEQ ID NO: 2852660 - RNA, 19 nt, Artificial Sequence
  Description of Artificial Sequence: Synthetic oligonucleotide
caucauccauaacaccuug

SEQ ID NO: 2852661 - RNA, 19 nt, Artificial Sequence
  Description of Artificial Sequence: Synthetic oligonucleotide
uuguagagauacccacuaa

SEQ ID NO: 2852662 - RNA, 19 nt, Artificial Sequence
  Description of Artificial Sequence: Synthetic oligonucleotide
cccacuaaacucuucugag

SEQ ID NO: 2852663 - RNA, 19 nt, Artificial Sequence
  Description of Artificial Sequence: Synthetic oligonucleotide
cgcagggauaguuauagcc

SEQ ID NO: 2852664 - RNA, 19 nt, Artificial Sequence
  Description of Artificial Sequence: Synthetic oligonucleotide
acgcaucacacagcaauuc

SEQ ID NO: 2852665 - RNA, 19 nt, Artificial Sequence
  Description of Artificial Sequence: Synthetic oligonucleotide
ccagucaagacuuacucca

SEQ ID NO: 2852666 - RNA, 19 nt, Artificial Sequence
  Description of Artificial Sequence: Synthetic oligonucleotide
uccuucuucauagcccaca

SEQ ID NO: 2852667 - RNA, 19 nt, Artificial Sequence
  Description of Artificial Sequence: Synthetic oligonucleotide
cuauuacacuauugacaac

SEQ ID NO: 2852668 - RNA, 19 nt, Artificial Sequence
  Description of Artificial Sequence: Synthetic oligonucleotide
ccacuaaacucuucugagg

SEQ ID NO: 2852669 - RNA, 19 nt, Artificial Sequence
  Description of Artificial Sequence: Synthetic oligonucleotide
cauagcccacaguauagga

SEQ ID NO: 2852670 - RNA, 19 nt, Artificial Sequence
  Description of Artificial Sequence: Synthetic oligonucleotide
ucguuucacuccagucaag

SEQ ID NO: 2852671 - RNA, 19 nt, Artificial Sequence
  Description of Artificial Sequence: Synthetic oligonucleotide
gcguauguggucuauuaca

SEQ ID NO: 2852672 - RNA, 19 nt, Artificial Sequence
  Description of Artificial Sequence: Synthetic oligonucleotide
caccuugggcuuuguagag

SEQ ID NO: 2852673 - RNA, 19 nt, Artificial Sequence
  Description of Artificial Sequence: Synthetic oligonucleotide
aaaaccagccgcagggaua

SEQ ID NO: 2852674 - RNA, 19 nt, Artificial Sequence
  Description of Artificial Sequence: Synthetic oligonucleotide
uuauagccacgaacaaauu

SEQ ID NO: 2852675 - RNA, 19 nt, Artificial Sequence
  Description of Artificial Sequence: Synthetic oligonucleotide
acaguauaggagaaaucaa

SEQ ID NO: 2852676 - RNA, 19 nt, Artificial Sequence
  Description of Artificial Sequence: Synthetic oligonucleotide
gcuuggauugucuuuaacu

SEQ ID NO: 2852677 - RNA, 19 nt, Artificial Sequence
  Description of Artificial Sequence: Synthetic oligonucleotide
uaaaagacucuggcuugga

SEQ ID NO: 2852678 - RNA, 19 nt, Artificial Sequence
  Description of Artificial Sequence: Synthetic oligonucleotide
cucgccacuuaucuucuuc

SEQ ID NO: 2852679 - RNA, 19 nt, Artificial Sequence
  Description of Artificial Sequence: Synthetic oligonucleotide
gucucguuucacuccaguc

SEQ ID NO: 2852680 - RNA, 19 nt, Artificial Sequence
  Description of Artificial Sequence: Synthetic oligonucleotide
cagucaagacuuacuccac

SEQ ID NO: 2852681 - RNA, 19 nt, Artificial Sequence
  Description of Artificial Sequence: Synthetic oligonucleotide
agggauaguuauagccacg

SEQ ID NO: 2852682 - RNA, 19 nt, Artificial Sequence
  Description of Artificial Sequence: Synthetic oligonucleotide
caauucucuucaaagugcu

SEQ ID NO: 2852683 - RNA, 19 nt, Artificial Sequence
  Description of Artificial Sequence: Synthetic oligonucleotide
cucguuucacuccagucaa

SEQ ID NO: 2852684 - RNA, 19 nt, Artificial Sequence
  Description of Artificial Sequence: Synthetic oligonucleotide
ucagaguguuuugaaguuu

SEQ ID NO: 2852685 - RNA, 19 nt, Artificial Sequence
  Description of Artificial Sequence: Synthetic oligonucleotide
guggucuauuacacuauug

SEQ ID NO: 2852686 - RNA, 19 nt, Artificial Sequence
  Description of Artificial Sequence: Synthetic oligonucleotide
gugguguaacgcaucacac

SEQ ID NO: 2852687 - RNA, 19 nt, Artificial Sequence
  Description of Artificial Sequence: Synthetic oligonucleotide
ugaccagcagugguguaac

SEQ ID NO: 2852688 - RNA, 19 nt, Artificial Sequence
  Description of Artificial Sequence: Synthetic oligonucleotide
cacgaacaaauucuggucu

SEQ ID NO: 2852689 - RNA, 19 nt, Artificial Sequence
  Description of Artificial Sequence: Synthetic oligonucleotide
cagaguguuuugaaguuua

SEQ ID NO: 2852690 - RNA, 19 nt, Artificial Sequence
  Description of Artificial Sequence: Synthetic oligonucleotide
acacuauugacaacaucau

SEQ ID NO: 2852691 - RNA, 19 nt, Artificial Sequence
  Description of Artificial Sequence: Synthetic oligonucleotide
agccacgaacaaauucugg

SEQ ID NO: 2852692 - RNA, 19 nt, Artificial Sequence
  Description of Artificial Sequence: Synthetic oligonucleotide
gaccagcagugguguaacg

SEQ ID NO: 2852693 - RNA, 19 nt, Artificial Sequence
  Description of Artificial Sequence: Synthetic oligonucleotide
cuuuguagagauacccacu

SEQ ID NO: 2852694 - RNA, 19 nt, Artificial Sequence
  Description of Artificial Sequence: Synthetic oligonucleotide
cuguuaaaagacucuggcu

SEQ ID NO: 2852695 - RNA, 19 nt, Artificial Sequence
  Description of Artificial Sequence: Synthetic oligonucleotide
auuacacuauugacaacau

SEQ ID NO: 2852696 - RNA, 19 nt, Artificial Sequence
  Description of Artificial Sequence: Synthetic oligonucleotide
agcagugguguaacgcauc

SEQ ID NO: 2852697 - RNA, 19 nt, Artificial Sequence
  Description of Artificial Sequence: Synthetic oligonucleotide
aacgcaucacacagcaauu

SEQ ID NO: 2852698 - RNA, 19 nt, Artificial Sequence
  Description of Artificial Sequence: Synthetic oligonucleotide
gccgcagggauaguuauag

SEQ ID NO: 2852699 - RNA, 19 nt, Artificial Sequence
  Description of Artificial Sequence: Synthetic oligonucleotide
gacuuacuccacaggauaa

SEQ ID NO: 2852700 - RNA, 19 nt, Artificial Sequence
  Description of Artificial Sequence: Synthetic oligonucleotide
cauaacaccuugggcuuug

SEQ ID NO: 2852701 - RNA, 19 nt, Artificial Sequence
  Description of Artificial Sequence: Synthetic oligonucleotide
aacucgccacuuaucuucu

SEQ ID NO: 2852702 - RNA, 19 nt, Artificial Sequence
  Description of Artificial Sequence: Synthetic oligonucleotide
gauacuggaucagaguguu

SEQ ID NO: 2852703 - RNA, 19 nt, Artificial Sequence
  Description of Artificial Sequence: Synthetic oligonucleotide
ccacgaacaaauucugguc

SEQ ID NO: 2852704 - RNA, 19 nt, Artificial Sequence
  Description of Artificial Sequence: Synthetic oligonucleotide
acuuacuccacaggauaaa

SEQ ID NO: 2852705 - RNA, 19 nt, Artificial Sequence
  Description of Artificial Sequence: Synthetic oligonucleotide
aucacacagcaauucucuu

SEQ ID NO: 2852706 - RNA, 19 nt, Artificial Sequence
  Description of Artificial Sequence: Synthetic oligonucleotide
cuuacuccacaggauaaaa

SEQ ID NO: 2852707 - RNA, 19 nt, Artificial Sequence
  Description of Artificial Sequence: Synthetic oligonucleotide
gauacccacuaaacucuuc

SEQ ID NO: 2852708 - RNA, 19 nt, Artificial Sequence
  Description of Artificial Sequence: Synthetic oligonucleotide
cuggucucguuucacucca

SEQ ID NO: 2852709 - RNA, 19 nt, Artificial Sequence
  Description of Artificial Sequence: Synthetic oligonucleotide
ggcguauguggucuauuac

SEQ ID NO: 2852710 - RNA, 19 nt, Artificial Sequence
  Description of Artificial Sequence: Synthetic oligonucleotide
ugucugaauauagccuguu

SEQ ID NO: 2852711 - RNA, 19 nt, Artificial Sequence
  Description of Artificial Sequence: Synthetic oligonucleotide
uggucucguuucacuccag

SEQ ID NO: 2852712 - RNA, 19 nt, Artificial Sequence
  Description of Artificial Sequence: Synthetic oligonucleotide
cacuccagucaagacuuac

SEQ ID NO: 2852713 - RNA, 19 nt, Artificial Sequence
  Description of Artificial Sequence: Synthetic oligonucleotide
cuggaucagaguguuuuga

SEQ ID NO: 2852714 - RNA, 19 nt, Artificial Sequence
  Description of Artificial Sequence: Synthetic oligonucleotide
cacagcaauucucuucaaa

SEQ ID NO: 2852715 - RNA, 19 nt, Artificial Sequence
  Description of Artificial Sequence: Synthetic oligonucleotide
acucucuuggggaaauaau

SEQ ID NO: 2852716 - RNA, 19 nt, Artificial Sequence
  Description of Artificial Sequence: Synthetic oligonucleotide
gggauaguuauagccacga

SEQ ID NO: 2852717 - RNA, 19 nt, Artificial Sequence
  Description of Artificial Sequence: Synthetic oligonucleotide
guguaacgcaucacacagc

SEQ ID NO: 2852718 - RNA, 19 nt, Artificial Sequence
  Description of Artificial Sequence: Synthetic oligonucleotide
ggcaacucgccacuuaucu

SEQ ID NO: 2852719 - RNA, 19 nt, Artificial Sequence
  Description of Artificial Sequence: Synthetic oligonucleotide
acaaacucucuuggggaaa

SEQ ID NO: 2852720 - RNA, 19 nt, Artificial Sequence
  Description of Artificial Sequence: Synthetic oligonucleotide
gccacgaacaaauucuggu

SEQ ID NO: 2852721 - RNA, 19 nt, Artificial Sequence
  Description of Artificial Sequence: Synthetic oligonucleotide
gucugaauauagccuguua

SEQ ID NO: 2852722 - RNA, 19 nt, Artificial Sequence
  Description of Artificial Sequence: Synthetic oligonucleotide
guauguggucuauuacacu

SEQ ID NO: 2852723 - RNA, 19 nt, Artificial Sequence
  Description of Artificial Sequence: Synthetic oligonucleotide
gcuccaaaauauccaguga

SEQ ID NO: 2852724 - RNA, 19 nt, Artificial Sequence
  Description of Artificial Sequence: Synthetic oligonucleotide
agucauuaaccggucccaa

SEQ ID NO: 2852725 - RNA, 19 nt, Artificial Sequence
  Description of Artificial Sequence: Synthetic oligonucleotide
gacucuggcuuggauuguc

SEQ ID NO: 2852726 - RNA, 19 nt, Artificial Sequence
  Description of Artificial Sequence: Synthetic oligonucleotide
auccaagcgccacggcccu

SEQ ID NO: 2852727 - RNA, 19 nt, Artificial Sequence
  Description of Artificial Sequence: Synthetic oligonucleotide
gaacaaauucuggucucgu

SEQ ID NO: 2852728 - RNA, 19 nt, Artificial Sequence
  Description of Artificial Sequence: Synthetic oligonucleotide
auguggucuauuacacuau

SEQ ID NO: 2852729 - RNA, 19 nt, Artificial Sequence
  Description of Artificial Sequence: Synthetic oligonucleotide
cuaaacucuucugaggguu

SEQ ID NO: 2852730 - RNA, 19 nt, Artificial Sequence
  Description of Artificial Sequence: Synthetic oligonucleotide
ccagcagugguguaacgca

SEQ ID NO: 2852731 - RNA, 19 nt, Artificial Sequence
  Description of Artificial Sequence: Synthetic oligonucleotide
gucccaauccaagcgccac

SEQ ID NO: 2852732 - RNA, 19 nt, Artificial Sequence
  Description of Artificial Sequence: Synthetic oligonucleotide
uggcuuggauugucuuuaa

SEQ ID NO: 2852733 - RNA, 19 nt, Artificial Sequence
  Description of Artificial Sequence: Synthetic oligonucleotide
aauauccagugaagucauu

SEQ ID NO: 2852734 - RNA, 19 nt, Artificial Sequence
  Description of Artificial Sequence: Synthetic oligonucleotide
ggcuuuguagagauaccca

SEQ ID NO: 2852735 - RNA, 19 nt, Artificial Sequence
  Description of Artificial Sequence: Synthetic oligonucleotide
cgaacaaauucuggucucg

SEQ ID NO: 2852736 - RNA, 19 nt, Artificial Sequence
  Description of Artificial Sequence: Synthetic oligonucleotide
aaacucucuuggggaaaua

SEQ ID NO: 2852737 - RNA, 19 nt, Artificial Sequence
  Description of Artificial Sequence: Synthetic oligonucleotide
accuugggcuuuguagaga

SEQ ID NO: 2852738 - RNA, 19 nt, Artificial Sequence
  Description of Artificial Sequence: Synthetic oligonucleotide
cucuuggggaaauaauauu

SEQ ID NO: 2852739 - RNA, 19 nt, Artificial Sequence
  Description of Artificial Sequence: Synthetic oligonucleotide
ccacaguauaggagaaauc

SEQ ID NO: 2852740 - RNA, 19 nt, Artificial Sequence
  Description of Artificial Sequence: Synthetic oligonucleotide
ggcuuggauugucuuuaac

SEQ ID NO: 2852741 - RNA, 19 nt, Artificial Sequence
  Description of Artificial Sequence: Synthetic oligonucleotide
ccggucccaauccaagcgc

SEQ ID NO: 2852742 - RNA, 19 nt, Artificial Sequence
  Description of Artificial Sequence: Synthetic oligonucleotide
gucauuaaccggucccaau

SEQ ID NO: 2852743 - RNA, 19 nt, Artificial Sequence
  Description of Artificial Sequence: Synthetic oligonucleotide
ggauaguuauagccacgaa

SEQ ID NO: 2852744 - RNA, 19 nt, Artificial Sequence
  Description of Artificial Sequence: Synthetic oligonucleotide
cuuggcaacucgccacuua

SEQ ID NO: 2852745 - RNA, 19 nt, Artificial Sequence
  Description of Artificial Sequence: Synthetic oligonucleotide
cugucugaauauagccugu

SEQ ID NO: 2852746 - RNA, 19 nt, Artificial Sequence
  Description of Artificial Sequence: Synthetic oligonucleotide
auaacaccuugggcuuugu

SEQ ID NO: 2852747 - RNA, 19 nt, Artificial Sequence
  Description of Artificial Sequence: Synthetic oligonucleotide
accagccgcagggauaguu

SEQ ID NO: 2852748 - RNA, 19 nt, Artificial Sequence
  Description of Artificial Sequence: Synthetic oligonucleotide
gggcguauguggucuauua

SEQ ID NO: 2852749 - RNA, 19 nt, Artificial Sequence
  Description of Artificial Sequence: Synthetic oligonucleotide
agacucuggcuuggauugu

SEQ ID NO: 2852750 - RNA, 19 nt, Artificial Sequence
  Description of Artificial Sequence: Synthetic oligonucleotide
ugggcguauguggucuauu

SEQ ID NO: 2852751 - RNA, 19 nt, Artificial Sequence
  Description of Artificial Sequence: Synthetic oligonucleotide
agcccacaguauaggagaa

SEQ ID NO: 2852752 - RNA, 19 nt, Artificial Sequence
  Description of Artificial Sequence: Synthetic oligonucleotide
ccaagcgccacggcccugg

SEQ ID NO: 2852753 - RNA, 19 nt, Artificial Sequence
  Description of Artificial Sequence: Synthetic oligonucleotide
cggucccaauccaagcgcc

SEQ ID NO: 2852754 - RNA, 19 nt, Artificial Sequence
  Description of Artificial Sequence: Synthetic oligonucleotide
guugaccagcaguggugua

SEQ ID NO: 2852755 - RNA, 19 nt, Artificial Sequence
  Description of Artificial Sequence: Synthetic oligonucleotide
gcagaucugucugaauaua

SEQ ID NO: 2852756 - RNA, 19 nt, Artificial Sequence
  Description of Artificial Sequence: Synthetic oligonucleotide
caaacucucuuggggaaau

SEQ ID NO: 2852757 - RNA, 19 nt, Artificial Sequence
  Description of Artificial Sequence: Synthetic oligonucleotide
ccaauccaagcgccacggc

SEQ ID NO: 2852758 - RNA, 19 nt, Artificial Sequence
  Description of Artificial Sequence: Synthetic oligonucleotide
guaacgcaucacacagcaa

SEQ ID NO: 2852759 - RNA, 19 nt, Artificial Sequence
  Description of Artificial Sequence: Synthetic oligonucleotide
acucgccacuuaucuucuu

SEQ ID NO: 2852760 - RNA, 19 nt, Artificial Sequence
  Description of Artificial Sequence: Synthetic oligonucleotide
cuugggcuuuguagagaua

SEQ ID NO: 2852761 - RNA, 19 nt, Artificial Sequence
  Description of Artificial Sequence: Synthetic oligonucleotide
gugcuccaaaauauccagu

SEQ ID NO: 2852762 - RNA, 19 nt, Artificial Sequence
  Description of Artificial Sequence: Synthetic oligonucleotide
ggucucguuucacuccagu

SEQ ID NO: 2852763 - RNA, 19 nt, Artificial Sequence
  Description of Artificial Sequence: Synthetic oligonucleotide
cguuucacuccagucaaga

SEQ ID NO: 2852764 - RNA, 19 nt, Artificial Sequence
  Description of Artificial Sequence: Synthetic oligonucleotide
ccgcagggauaguuauagc

SEQ ID NO: 2852765 - RNA, 19 nt, Artificial Sequence
  Description of Artificial Sequence: Synthetic oligonucleotide
cagcagugguguaacgcau

SEQ ID NO: 2852766 - RNA, 19 nt, Artificial Sequence
  Description of Artificial Sequence: Synthetic oligonucleotide
uccaagcgccacggcccug

SEQ ID NO: 2852767 - RNA, 19 nt, Artificial Sequence
  Description of Artificial Sequence: Synthetic oligonucleotide
auacuggaucagaguguuu

SEQ ID NO: 2852768 - RNA, 19 nt, Artificial Sequence
  Description of Artificial Sequence: Synthetic oligonucleotide
cagccgcagggauaguuau

SEQ ID NO: 2852769 - RNA, 19 nt, Artificial Sequence
  Description of Artificial Sequence: Synthetic oligonucleotide
cccacaguauaggagaaau

SEQ ID NO: 2852770 - RNA, 19 nt, Artificial Sequence
  Description of Artificial Sequence: Synthetic oligonucleotide
aaccagccgcagggauagu

SEQ ID NO: 2852771 - RNA, 19 nt, Artificial Sequence
  Description of Artificial Sequence: Synthetic oligonucleotide
ccagccgcagggauaguua

SEQ ID NO: 2852772 - RNA, 19 nt, Artificial Sequence
  Description of Artificial Sequence: Synthetic oligonucleotide
agccgcagggauaguuaua

SEQ ID NO: 2852773 - RNA, 19 nt, Artificial Sequence
  Description of Artificial Sequence: Synthetic oligonucleotide
gcaacucgccacuuaucuu

SEQ ID NO: 2852774 - RNA, 19 nt, Artificial Sequence
  Description of Artificial Sequence: Synthetic oligonucleotide
cuguuacaucuuucauuuu

SEQ ID NO: 2852775 - RNA, 19 nt, Artificial Sequence
  Description of Artificial Sequence: Synthetic oligonucleotide
gcccugggcguaugugguc

SEQ ID NO: 2852776 - RNA, 19 nt, Artificial Sequence
  Description of Artificial Sequence: Synthetic oligonucleotide
cgcaucacacagcaauucu

SEQ ID NO: 2852777 - RNA, 19 nt, Artificial Sequence
  Description of Artificial Sequence: Synthetic oligonucleotide
cgcagaucugucugaauau

SEQ ID NO: 2852778 - RNA, 19 nt, Artificial Sequence
  Description of Artificial Sequence: Synthetic oligonucleotide
ggcccugggcguauguggu

SEQ ID NO: 2852779 - RNA, 19 nt, Artificial Sequence
  Description of Artificial Sequence: Synthetic oligonucleotide
cacggcccugggcguaugu

SEQ ID NO: 2852780 - RNA, 19 nt, Artificial Sequence
  Description of Artificial Sequence: Synthetic oligonucleotide
cugggcguauguggucuau

SEQ ID NO: 2852781 - RNA, 19 nt, Artificial Sequence
  Description of Artificial Sequence: Synthetic oligonucleotide
cccugggcguauguggucu

SEQ ID NO: 2852782 - RNA, 19 nt, Artificial Sequence
  Description of Artificial Sequence: Synthetic oligonucleotide
ccacaggauaaaaguccuu

SEQ ID NO: 2852783 - RNA, 19 nt, Artificial Sequence
  Description of Artificial Sequence: Synthetic oligonucleotide
ccugggcguauguggucua

SEQ ID NO: 2852784 - RNA, 19 nt, Artificial Sequence
  Description of Artificial Sequence: Synthetic oligonucleotide
ccauaacaccuugggcuuu

SEQ ID NO: 2852785 - RNA, 19 nt, Artificial Sequence
  Description of Artificial Sequence: Synthetic oligonucleotide
ccacggcccugggcguaug

SEQ ID NO: 2852786 - RNA, 19 nt, Artificial Sequence
  Description of Artificial Sequence: Synthetic oligonucleotide
gccacggcccugggcguau

SEQ ID NO: 2852787 - RNA, 19 nt, Artificial Sequence
  Description of Artificial Sequence: Synthetic oligonucleotide
cgccacggcccugggcgua

SEQ ID NO: 2852788 - RNA, 19 nt, Artificial Sequence
  Description of Artificial Sequence: Synthetic oligonucleotide
uuugcugugguucugcuag

SEQ ID NO: 2852789 - RNA, 19 nt, Artificial Sequence
  Description of Artificial Sequence: Synthetic oligonucleotide
aacacuguggucaugaaug

SEQ ID NO: 2852790 - RNA, 19 nt, Artificial Sequence
  Description of Artificial Sequence: Synthetic oligonucleotide
aagcugguccaccaguggc

SEQ ID NO: 2852791 - RNA, 19 nt, Artificial Sequence
  Description of Artificial Sequence: Synthetic oligonucleotide
ucauggguagccaccagcg

SEQ ID NO: 2852792 - RNA, 19 nt, Artificial Sequence
  Description of Artificial Sequence: Synthetic oligonucleotide
aaugggaggguggacuucc

SEQ ID NO: 2852793 - RNA, 19 nt, Artificial Sequence
  Description of Artificial Sequence: Synthetic oligonucleotide
auaguagucauggguagcc

SEQ ID NO: 2852794 - RNA, 19 nt, Artificial Sequence
  Description of Artificial Sequence: Synthetic oligonucleotide
uguuggacgaggaggagcc

SEQ ID NO: 2852795 - RNA, 19 nt, Artificial Sequence
  Description of Artificial Sequence: Synthetic oligonucleotide
uguuguuggacgaggagga

SEQ ID NO: 2852796 - RNA, 19 nt, Artificial Sequence
  Description of Artificial Sequence: Synthetic oligonucleotide
gucuuccuaguuuacaggg

SEQ ID NO: 2852797 - RNA, 19 nt, Artificial Sequence
  Description of Artificial Sequence: Synthetic oligonucleotide
uucugcuaggucaggacgg

SEQ ID NO: 2852798 - RNA, 19 nt, Artificial Sequence
  Description of Artificial Sequence: Synthetic oligonucleotide
uguuggucuggucaggaug

SEQ ID NO: 2852799 - RNA, 19 nt, Artificial Sequence
  Description of Artificial Sequence: Synthetic oligonucleotide
auggaugacuggcugcugc

SEQ ID NO: 2852800 - RNA, 19 nt, Artificial Sequence
  Description of Artificial Sequence: Synthetic oligonucleotide
aguagucauggguagccac

SEQ ID NO: 2852801 - RNA, 19 nt, Artificial Sequence
  Description of Artificial Sequence: Synthetic oligonucleotide
aaagcugguccaccagugg

SEQ ID NO: 2852802 - RNA, 19 nt, Artificial Sequence
  Description of Artificial Sequence: Synthetic oligonucleotide
ugcuucaugguuucaggag

SEQ ID NO: 2852803 - RNA, 19 nt, Artificial Sequence
  Description of Artificial Sequence: Synthetic oligonucleotide
guggucaugaaugggaggg

SEQ ID NO: 2852804 - RNA, 19 nt, Artificial Sequence
  Description of Artificial Sequence: Synthetic oligonucleotide
ucgccgauaguagucaugg

SEQ ID NO: 2852805 - RNA, 19 nt, Artificial Sequence
  Description of Artificial Sequence: Synthetic oligonucleotide
agucuuccuaguuuacagg

SEQ ID NO: 2852806 - RNA, 19 nt, Artificial Sequence
  Description of Artificial Sequence: Synthetic oligonucleotide
uuccuaguuuacagggugg

SEQ ID NO: 2852807 - RNA, 19 nt, Artificial Sequence
  Description of Artificial Sequence: Synthetic oligonucleotide
guucugcuaggucaggacg

SEQ ID NO: 2852808 - RNA, 19 nt, Artificial Sequence
  Description of Artificial Sequence: Synthetic oligonucleotide
aggauggaugacuggcugc

SEQ ID NO: 2852809 - RNA, 19 nt, Artificial Sequence
  Description of Artificial Sequence: Synthetic oligonucleotide
auggguagccaccagcgag

SEQ ID NO: 2852810 - RNA, 19 nt, Artificial Sequence
  Description of Artificial Sequence: Synthetic oligonucleotide
caugguuucaggagccagg

SEQ ID NO: 2852811 - RNA, 19 nt, Artificial Sequence
  Description of Artificial Sequence: Synthetic oligonucleotide
uacucugcacuuccgcagg

SEQ ID NO: 2852812 - RNA, 19 nt, Artificial Sequence
  Description of Artificial Sequence: Synthetic oligonucleotide
cuguuguuggacgaggagg

SEQ ID NO: 2852813 - RNA, 19 nt, Artificial Sequence
  Description of Artificial Sequence: Synthetic oligonucleotide
cuuccuaguuuacagggug

SEQ ID NO: 2852814 - RNA, 19 nt, Artificial Sequence
  Description of Artificial Sequence: Synthetic oligonucleotide
guuggucuggucaggaugg

SEQ ID NO: 2852815 - RNA, 19 nt, Artificial Sequence
  Description of Artificial Sequence: Synthetic oligonucleotide
cagucuuccuaguuuacag

SEQ ID NO: 2852816 - RNA, 19 nt, Artificial Sequence
  Description of Artificial Sequence: Synthetic oligonucleotide
cuucaugguuucaggagcc

SEQ ID NO: 2852817 - RNA, 19 nt, Artificial Sequence
  Description of Artificial Sequence: Synthetic oligonucleotide
uguggucaugaaugggagg

SEQ ID NO: 2852818 - RNA, 19 nt, Artificial Sequence
  Description of Artificial Sequence: Synthetic oligonucleotide
uaguuuacaggguggggug

SEQ ID NO: 2852819 - RNA, 19 nt, Artificial Sequence
  Description of Artificial Sequence: Synthetic oligonucleotide
gaagggauggcugccauac

SEQ ID NO: 2852820 - RNA, 19 nt, Artificial Sequence
  Description of Artificial Sequence: Synthetic oligonucleotide
cauacuucaggacccgcgc

SEQ ID NO: 2852821 - RNA, 19 nt, Artificial Sequence
  Description of Artificial Sequence: Synthetic oligonucleotide
augggugggacucuggccu

SEQ ID NO: 2852822 - RNA, 19 nt, Artificial Sequence
  Description of Artificial Sequence: Synthetic oligonucleotide
ugcuaggucaggacggggc

SEQ ID NO: 2852823 - RNA, 19 nt, Artificial Sequence
  Description of Artificial Sequence: Synthetic oligonucleotide
uccuaguuuacaggguggg

SEQ ID NO: 2852824 - RNA, 19 nt, Artificial Sequence
  Description of Artificial Sequence: Synthetic oligonucleotide
gguuucaggagccagguca

SEQ ID NO: 2852825 - RNA, 19 nt, Artificial Sequence
  Description of Artificial Sequence: Synthetic oligonucleotide
ucuggccuagcacugcuga

SEQ ID NO: 2852826 - RNA, 19 nt, Artificial Sequence
  Description of Artificial Sequence: Synthetic oligonucleotide
gcugccauacuucaggacc

SEQ ID NO: 2852827 - RNA, 19 nt, Artificial Sequence
  Description of Artificial Sequence: Synthetic oligonucleotide
acacuguggucaugaaugg

SEQ ID NO: 2852828 - RNA, 19 nt, Artificial Sequence
  Description of Artificial Sequence: Synthetic oligonucleotide
cuucuggaggccugcaggg

SEQ ID NO: 2852829 - RNA, 19 nt, Artificial Sequence
  Description of Artificial Sequence: Synthetic oligonucleotide
uucaggagccaggucaccg

SEQ ID NO: 2852830 - RNA, 19 nt, Artificial Sequence
  Description of Artificial Sequence: Synthetic oligonucleotide
cuggcugcagucuuccuag

SEQ ID NO: 2852831 - RNA, 19 nt, Artificial Sequence
  Description of Artificial Sequence: Synthetic oligonucleotide
uccaacacuguggucauga

SEQ ID NO: 2852832 - RNA, 19 nt, Artificial Sequence
  Description of Artificial Sequence: Synthetic oligonucleotide
uacuucaggacccgcgcgc

SEQ ID NO: 2852833 - RNA, 19 nt, Artificial Sequence
  Description of Artificial Sequence: Synthetic oligonucleotide
uccaccaguggccaggguc

SEQ ID NO: 2852834 - RNA, 19 nt, Artificial Sequence
  Description of Artificial Sequence: Synthetic oligonucleotide
ucaggagccaggucaccgg

SEQ ID NO: 2852835 - RNA, 19 nt, Artificial Sequence
  Description of Artificial Sequence: Synthetic oligonucleotide
caggaacuguuguuggacg

SEQ ID NO: 2852836 - RNA, 19 nt, Artificial Sequence
  Description of Artificial Sequence: Synthetic oligonucleotide
acuguuguuggacgaggag

SEQ ID NO: 2852837 - RNA, 19 nt, Artificial Sequence
  Description of Artificial Sequence: Synthetic oligonucleotide
cuagcacugcugaagucgc

SEQ ID NO: 2852838 - RNA, 19 nt, Artificial Sequence
  Description of Artificial Sequence: Synthetic oligonucleotide
gaacuguuguuggacgagg

SEQ ID NO: 2852839 - RNA, 19 nt, Artificial Sequence
  Description of Artificial Sequence: Synthetic oligonucleotide
auacuucaggacccgcgcg

SEQ ID NO: 2852840 - RNA, 19 nt, Artificial Sequence
  Description of Artificial Sequence: Synthetic oligonucleotide
ugaagucgcauuugcugug

SEQ ID NO: 2852841 - RNA, 19 nt, Artificial Sequence
  Description of Artificial Sequence: Synthetic oligonucleotide
gauucugccgagugcucag

SEQ ID NO: 2852842 - RNA, 19 nt, Artificial Sequence
  Description of Artificial Sequence: Synthetic oligonucleotide
ucuuccuaguuuacagggu

SEQ ID NO: 2852843 - RNA, 19 nt, Artificial Sequence
  Description of Artificial Sequence: Synthetic oligonucleotide
gaugggugggacucuggcc

SEQ ID NO: 2852844 - RNA, 19 nt, Artificial Sequence
  Description of Artificial Sequence: Synthetic oligonucleotide
guacucugcacuuccgcag

SEQ ID NO: 2852845 - RNA, 19 nt, Artificial Sequence
  Description of Artificial Sequence: Synthetic oligonucleotide
ucaggauggaugacuggcu

SEQ ID NO: 2852846 - RNA, 19 nt, Artificial Sequence
  Description of Artificial Sequence: Synthetic oligonucleotide
gauaguagucauggguagc

SEQ ID NO: 2852847 - RNA, 19 nt, Artificial Sequence
  Description of Artificial Sequence: Synthetic oligonucleotide
ugcucaggagacuccaaca

SEQ ID NO: 2852848 - RNA, 19 nt, Artificial Sequence
  Description of Artificial Sequence: Synthetic oligonucleotide
uggguagccaccagcgagc

SEQ ID NO: 2852849 - RNA, 19 nt, Artificial Sequence
  Description of Artificial Sequence: Synthetic oligonucleotide
gucaggauggaugacuggc

SEQ ID NO: 2852850 - RNA, 19 nt, Artificial Sequence
  Description of Artificial Sequence: Synthetic oligonucleotide
cugccauacuucaggaccc

SEQ ID NO: 2852851 - RNA, 19 nt, Artificial Sequence
  Description of Artificial Sequence: Synthetic oligonucleotide
uccgcaggaacuguuguug

SEQ ID NO: 2852852 - RNA, 19 nt, Artificial Sequence
  Description of Artificial Sequence: Synthetic oligonucleotide
ccagcgagccgcuagaagg

SEQ ID NO: 2852853 - RNA, 19 nt, Artificial Sequence
  Description of Artificial Sequence: Synthetic oligonucleotide
ucuguugcuggcugcaguc

SEQ ID NO: 2852854 - RNA, 19 nt, Artificial Sequence
  Description of Artificial Sequence: Synthetic oligonucleotide
cuguggucaugaaugggag

SEQ ID NO: 2852855 - RNA, 19 nt, Artificial Sequence
  Description of Artificial Sequence: Synthetic oligonucleotide
acuguggucaugaauggga

SEQ ID NO: 2852856 - RNA, 19 nt, Artificial Sequence
  Description of Artificial Sequence: Synthetic oligonucleotide
gcuucaugguuucaggagc

SEQ ID NO: 2852857 - RNA, 19 nt, Artificial Sequence
  Description of Artificial Sequence: Synthetic oligonucleotide
ugcacuuccgcaggaacug

SEQ ID NO: 2852858 - RNA, 19 nt, Artificial Sequence
  Description of Artificial Sequence: Synthetic oligonucleotide
gaagucgcauuugcugugg

SEQ ID NO: 2852859 - RNA, 19 nt, Artificial Sequence
  Description of Artificial Sequence: Synthetic oligonucleotide
cucguguuggucuggucag

SEQ ID NO: 2852860 - RNA, 19 nt, Artificial Sequence
  Description of Artificial Sequence: Synthetic oligonucleotide
uuguuggacgaggaggagc

SEQ ID NO: 2852861 - RNA, 19 nt, Artificial Sequence
  Description of Artificial Sequence: Synthetic oligonucleotide
ucaugaaugggagggugga

SEQ ID NO: 2852862 - RNA, 19 nt, Artificial Sequence
  Description of Artificial Sequence: Synthetic oligonucleotide
ggagacuccaacacugugg

SEQ ID NO: 2852863 - RNA, 19 nt, Artificial Sequence
  Description of Artificial Sequence: Synthetic oligonucleotide
ucaugguuucaggagccag

SEQ ID NO: 2852864 - RNA, 19 nt, Artificial Sequence
  Description of Artificial Sequence: Synthetic oligonucleotide
ugcugcuucaugguuucag

SEQ ID NO: 2852865 - RNA, 19 nt, Artificial Sequence
  Description of Artificial Sequence: Synthetic oligonucleotide
gucauggguagccaccagc

SEQ ID NO: 2852866 - RNA, 19 nt, Artificial Sequence
  Description of Artificial Sequence: Synthetic oligonucleotide
augaaugggaggguggacu

SEQ ID NO: 2852867 - RNA, 19 nt, Artificial Sequence
  Description of Artificial Sequence: Synthetic oligonucleotide
ucugcuaggucaggacggg

SEQ ID NO: 2852868 - RNA, 19 nt, Artificial Sequence
  Description of Artificial Sequence: Synthetic oligonucleotide
ucugccgagugcucaggag

SEQ ID NO: 2852869 - RNA, 19 nt, Artificial Sequence
  Description of Artificial Sequence: Synthetic oligonucleotide
ugggaggguggacuucccg

SEQ ID NO: 2852870 - RNA, 19 nt, Artificial Sequence
  Description of Artificial Sequence: Synthetic oligonucleotide
aguuuacaggguggggugg

SEQ ID NO: 2852871 - RNA, 19 nt, Artificial Sequence
  Description of Artificial Sequence: Synthetic oligonucleotide
agcugguccaccaguggcc

SEQ ID NO: 2852872 - RNA, 19 nt, Artificial Sequence
  Description of Artificial Sequence: Synthetic oligonucleotide
uggccuagcacugcugaag

SEQ ID NO: 2852873 - RNA, 19 nt, Artificial Sequence
  Description of Artificial Sequence: Synthetic oligonucleotide
gcuucuggaggccugcagg

SEQ ID NO: 2852874 - RNA, 19 nt, Artificial Sequence
  Description of Artificial Sequence: Synthetic oligonucleotide
agggauucugccgagugcu

SEQ ID NO: 2852875 - RNA, 19 nt, Artificial Sequence
  Description of Artificial Sequence: Synthetic oligonucleotide
acaggguggggugggaugg

SEQ ID NO: 2852876 - RNA, 19 nt, Artificial Sequence
  Description of Artificial Sequence: Synthetic oligonucleotide
gucgcauuugcugugguuc

SEQ ID NO: 2852877 - RNA, 19 nt, Artificial Sequence
  Description of Artificial Sequence: Synthetic oligonucleotide
ucuggaggccugcagggau

SEQ ID NO: 2852878 - RNA, 19 nt, Artificial Sequence
  Description of Artificial Sequence: Synthetic oligonucleotide
guggucgggcuucuggagg

SEQ ID NO: 2852879 - RNA, 19 nt, Artificial Sequence
  Description of Artificial Sequence: Synthetic oligonucleotide
guagucauggguagccacc

SEQ ID NO: 2852880 - RNA, 19 nt, Artificial Sequence
  Description of Artificial Sequence: Synthetic oligonucleotide
uggacgaggaggagcccag

SEQ ID NO: 2852881 - RNA, 19 nt, Artificial Sequence
  Description of Artificial Sequence: Synthetic oligonucleotide
ccuagcacugcugaagucg

SEQ ID NO: 2852882 - RNA, 19 nt, Artificial Sequence
  Description of Artificial Sequence: Synthetic oligonucleotide
ugggacucuggccuagcac

SEQ ID NO: 2852883 - RNA, 19 nt, Artificial Sequence
  Description of Artificial Sequence: Synthetic oligonucleotide
gccagggucggccuuaggg

SEQ ID NO: 2852884 - RNA, 19 nt, Artificial Sequence
  Description of Artificial Sequence: Synthetic oligonucleotide
cagcgagccgcuagaaggg

SEQ ID NO: 2852885 - RNA, 19 nt, Artificial Sequence
  Description of Artificial Sequence: Synthetic oligonucleotide
ugccgagugcucaggagac

SEQ ID NO: 2852886 - RNA, 19 nt, Artificial Sequence
  Description of Artificial Sequence: Synthetic oligonucleotide
ucggccuuagggagacccg

SEQ ID NO: 2852887 - RNA, 19 nt, Artificial Sequence
  Description of Artificial Sequence: Synthetic oligonucleotide
ucuagcuccugcugguguc

SEQ ID NO: 2852888 - RNA, 19 nt, Artificial Sequence
  Description of Artificial Sequence: Synthetic oligonucleotide
gcugcuucaugguuucagg

SEQ ID NO: 2852889 - RNA, 19 nt, Artificial Sequence
  Description of Artificial Sequence: Synthetic oligonucleotide
uggucgggcuucuggaggc

SEQ ID NO: 2852890 - RNA, 19 nt, Artificial Sequence
  Description of Artificial Sequence: Synthetic oligonucleotide
ugguccaccaguggccagg

SEQ ID NO: 2852891 - RNA, 19 nt, Artificial Sequence
  Description of Artificial Sequence: Synthetic oligonucleotide
guuuacagggugggguggg

SEQ ID NO: 2852892 - RNA, 19 nt, Artificial Sequence
  Description of Artificial Sequence: Synthetic oligonucleotide
cagggucggccuuagggag

SEQ ID NO: 2852893 - RNA, 19 nt, Artificial Sequence
  Description of Artificial Sequence: Synthetic oligonucleotide
caggauggaugacuggcug

SEQ ID NO: 2852894 - RNA, 19 nt, Artificial Sequence
  Description of Artificial Sequence: Synthetic oligonucleotide
ugaaugggaggguggacuu

SEQ ID NO: 2852895 - RNA, 19 nt, Artificial Sequence
  Description of Artificial Sequence: Synthetic oligonucleotide
ucgcauuugcugugguucu

SEQ ID NO: 2852896 - RNA, 19 nt, Artificial Sequence
  Description of Artificial Sequence: Synthetic oligonucleotide
agggauggcugccauacuu

SEQ ID NO: 2852897 - RNA, 19 nt, Artificial Sequence
  Description of Artificial Sequence: Synthetic oligonucleotide
ggagccaggucaccggugg

SEQ ID NO: 2852898 - RNA, 19 nt, Artificial Sequence
  Description of Artificial Sequence: Synthetic oligonucleotide
aacuguuguuggacgagga

SEQ ID NO: 2852899 - RNA, 19 nt, Artificial Sequence
  Description of Artificial Sequence: Synthetic oligonucleotide
uagucauggguagccacca

SEQ ID NO: 2852900 - RNA, 19 nt, Artificial Sequence
  Description of Artificial Sequence: Synthetic oligonucleotide
uggaugacuggcugcugcu

SEQ ID NO: 2852901 - RNA, 19 nt, Artificial Sequence
  Description of Artificial Sequence: Synthetic oligonucleotide
uuggacgaggaggagccca

SEQ ID NO: 2852902 - RNA, 19 nt, Artificial Sequence
  Description of Artificial Sequence: Synthetic oligonucleotide
acugcugaagucgcauuug

SEQ ID NO: 2852903 - RNA, 19 nt, Artificial Sequence
  Description of Artificial Sequence: Synthetic oligonucleotide
ugcagucuuccuaguuuac

SEQ ID NO: 2852904 - RNA, 19 nt, Artificial Sequence
  Description of Artificial Sequence: Synthetic oligonucleotide
uucugccgagugcucagga

SEQ ID NO: 2852905 - RNA, 19 nt, Artificial Sequence
  Description of Artificial Sequence: Synthetic oligonucleotide
gcuaggucaggacggggcg

SEQ ID NO: 2852906 - RNA, 19 nt, Artificial Sequence
  Description of Artificial Sequence: Synthetic oligonucleotide
ccauacuucaggacccgcg

SEQ ID NO: 2852907 - RNA, 19 nt, Artificial Sequence
  Description of Artificial Sequence: Synthetic oligonucleotide
gagccgcuagaagggaugg

SEQ ID NO: 2852908 - RNA, 19 nt, Artificial Sequence
  Description of Artificial Sequence: Synthetic oligonucleotide
gacggggcgcucguguugg

SEQ ID NO: 2852909 - RNA, 19 nt, Artificial Sequence
  Description of Artificial Sequence: Synthetic oligonucleotide
uugcugugguucugcuagg

SEQ ID NO: 2852910 - RNA, 19 nt, Artificial Sequence
  Description of Artificial Sequence: Synthetic oligonucleotide
caggcgucgccgauaguag

SEQ ID NO: 2852911 - RNA, 19 nt, Artificial Sequence
  Description of Artificial Sequence: Synthetic oligonucleotide
uguugcuggcugcagucuu

SEQ ID NO: 2852912 - RNA, 19 nt, Artificial Sequence
  Description of Artificial Sequence: Synthetic oligonucleotide
cagggauucugccgagugc

SEQ ID NO: 2852913 - RNA, 19 nt, Artificial Sequence
  Description of Artificial Sequence: Synthetic oligonucleotide
accagcgagccgcuagaag

SEQ ID NO: 2852914 - RNA, 19 nt, Artificial Sequence
  Description of Artificial Sequence: Synthetic oligonucleotide
aggccugcagggauucugc

SEQ ID NO: 2852915 - RNA, 19 nt, Artificial Sequence
  Description of Artificial Sequence: Synthetic oligonucleotide
ugccauacuucaggacccg

SEQ ID NO: 2852916 - RNA, 19 nt, Artificial Sequence
  Description of Artificial Sequence: Synthetic oligonucleotide
uagaagggauggcugccau

SEQ ID NO: 2852917 - RNA, 19 nt, Artificial Sequence
  Description of Artificial Sequence: Synthetic oligonucleotide
uggggcacggcguccccgg

SEQ ID NO: 2852918 - RNA, 19 nt, Artificial Sequence
  Description of Artificial Sequence: Synthetic oligonucleotide
gugcucaggagacuccaac

SEQ ID NO: 2852919 - RNA, 19 nt, Artificial Sequence
  Description of Artificial Sequence: Synthetic oligonucleotide
ccaccaguggccagggucg

SEQ ID NO: 2852920 - RNA, 19 nt, Artificial Sequence
  Description of Artificial Sequence: Synthetic oligonucleotide
ggucuggucaggauggaug

SEQ ID NO: 2852921 - RNA, 19 nt, Artificial Sequence
  Description of Artificial Sequence: Synthetic oligonucleotide
cacuguggucaugaauggg

SEQ ID NO: 2852922 - RNA, 19 nt, Artificial Sequence
  Description of Artificial Sequence: Synthetic oligonucleotide
aggguggacuucccgaaaa

SEQ ID NO: 2852923 - RNA, 19 nt, Artificial Sequence
  Description of Artificial Sequence: Synthetic oligonucleotide
gguacucugcacuuccgca

SEQ ID NO: 2852924 - RNA, 19 nt, Artificial Sequence
  Description of Artificial Sequence: Synthetic oligonucleotide
guuucaggagccaggucac

SEQ ID NO: 2852925 - RNA, 19 nt, Artificial Sequence
  Description of Artificial Sequence: Synthetic oligonucleotide
cuaguuuacaggguggggu

SEQ ID NO: 2852926 - RNA, 19 nt, Artificial Sequence
  Description of Artificial Sequence: Synthetic oligonucleotide
aagggauggcugccauacu

SEQ ID NO: 2852927 - RNA, 19 nt, Artificial Sequence
  Description of Artificial Sequence: Synthetic oligonucleotide
gcucaggagacuccaacac

SEQ ID NO: 2852928 - RNA, 19 nt, Artificial Sequence
  Description of Artificial Sequence: Synthetic oligonucleotide
cugcuucaugguuucagga

SEQ ID NO: 2852929 - RNA, 19 nt, Artificial Sequence
  Description of Artificial Sequence: Synthetic oligonucleotide
agucauggguagccaccag

SEQ ID NO: 2852930 - RNA, 19 nt, Artificial Sequence
  Description of Artificial Sequence: Synthetic oligonucleotide
gaggccugcagggauucug

SEQ ID NO: 2852931 - RNA, 19 nt, Artificial Sequence
  Description of Artificial Sequence: Synthetic oligonucleotide
uaguagucauggguagcca

SEQ ID NO: 2852932 - RNA, 19 nt, Artificial Sequence
  Description of Artificial Sequence: Synthetic oligonucleotide
gcucguguuggucugguca

SEQ ID NO: 2852933 - RNA, 19 nt, Artificial Sequence
  Description of Artificial Sequence: Synthetic oligonucleotide
ggaugggugggacucuggc

SEQ ID NO: 2852934 - RNA, 19 nt, Artificial Sequence
  Description of Artificial Sequence: Synthetic oligonucleotide
gguucugcuaggucaggac

SEQ ID NO: 2852935 - RNA, 19 nt, Artificial Sequence
  Description of Artificial Sequence: Synthetic oligonucleotide
auuugcugugguucugcua

SEQ ID NO: 2852936 - RNA, 19 nt, Artificial Sequence
  Description of Artificial Sequence: Synthetic oligonucleotide
uucaugguuucaggagcca

SEQ ID NO: 2852937 - RNA, 19 nt, Artificial Sequence
  Description of Artificial Sequence: Synthetic oligonucleotide
ucguguuggucuggucagg

SEQ ID NO: 2852938 - RNA, 19 nt, Artificial Sequence
  Description of Artificial Sequence: Synthetic oligonucleotide
acuccaacacuguggucau

SEQ ID NO: 2852939 - RNA, 19 nt, Artificial Sequence
  Description of Artificial Sequence: Synthetic oligonucleotide
cugccgagugcucaggaga

SEQ ID NO: 2852940 - RNA, 19 nt, Artificial Sequence
  Description of Artificial Sequence: Synthetic oligonucleotide
agccaggucaccggugguc

SEQ ID NO: 2852941 - RNA, 19 nt, Artificial Sequence
  Description of Artificial Sequence: Synthetic oligonucleotide
acuuccgcaggaacuguug

SEQ ID NO: 2852942 - RNA, 19 nt, Artificial Sequence
  Description of Artificial Sequence: Synthetic oligonucleotide
ggucaggauggaugacugg

SEQ ID NO: 2852943 - RNA, 19 nt, Artificial Sequence
  Description of Artificial Sequence: Synthetic oligonucleotide
auucugccgagugcucagg

SEQ ID NO: 2852944 - RNA, 19 nt, Artificial Sequence
  Description of Artificial Sequence: Synthetic oligonucleotide
aggucaccgguggucgggc

SEQ ID NO: 2852945 - RNA, 19 nt, Artificial Sequence
  Description of Artificial Sequence: Synthetic oligonucleotide
ggucaugaaugggagggug

SEQ ID NO: 2852946 - RNA, 19 nt, Artificial Sequence
  Description of Artificial Sequence: Synthetic oligonucleotide
uuuacagggugggguggga

SEQ ID NO: 2852947 - RNA, 19 nt, Artificial Sequence
  Description of Artificial Sequence: Synthetic oligonucleotide
gcagggauucugccgagug

SEQ ID NO: 2852948 - RNA, 19 nt, Artificial Sequence
  Description of Artificial Sequence: Synthetic oligonucleotide
ucgggcuucuggaggccug

SEQ ID NO: 2852949 - RNA, 19 nt, Artificial Sequence
  Description of Artificial Sequence: Synthetic oligonucleotide
aggacccgcgcgcuccagg

SEQ ID NO: 2852950 - RNA, 19 nt, Artificial Sequence
  Description of Artificial Sequence: Synthetic oligonucleotide
gccugcagggauucugccg

SEQ ID NO: 2852951 - RNA, 19 nt, Artificial Sequence
  Description of Artificial Sequence: Synthetic oligonucleotide
aggaggagcccaggcgucg

SEQ ID NO: 2852952 - RNA, 19 nt, Artificial Sequence
  Description of Artificial Sequence: Synthetic oligonucleotide
uaggucaggacggggcgcu

SEQ ID NO: 2852953 - RNA, 19 nt, Artificial Sequence
  Description of Artificial Sequence: Synthetic oligonucleotide
ggguacucugcacuuccgc

SEQ ID NO: 2852954 - RNA, 19 nt, Artificial Sequence
  Description of Artificial Sequence: Synthetic oligonucleotide
guuguuggacgaggaggag

SEQ ID NO: 2852955 - RNA, 19 nt, Artificial Sequence
  Description of Artificial Sequence: Synthetic oligonucleotide
gauggaugacuggcugcug

SEQ ID NO: 2852956 - RNA, 19 nt, Artificial Sequence
  Description of Artificial Sequence: Synthetic oligonucleotide
uuccgcaggaacuguuguu

SEQ ID NO: 2852957 - RNA, 19 nt, Artificial Sequence
  Description of Artificial Sequence: Synthetic oligonucleotide
ugcugugguucugcuaggu

SEQ ID NO: 2852958 - RNA, 19 nt, Artificial Sequence
  Description of Artificial Sequence: Synthetic oligonucleotide
gagugcucaggagacucca

SEQ ID NO: 2852959 - RNA, 19 nt, Artificial Sequence
  Description of Artificial Sequence: Synthetic oligonucleotide
agcacugcugaagucgcau

SEQ ID NO: 2852960 - RNA, 19 nt, Artificial Sequence
  Description of Artificial Sequence: Synthetic oligonucleotide
cugcagucuuccuaguuua

SEQ ID NO: 2852961 - RNA, 19 nt, Artificial Sequence
  Description of Artificial Sequence: Synthetic oligonucleotide
caugaaugggaggguggac

SEQ ID NO: 2852962 - RNA, 19 nt, Artificial Sequence
  Description of Artificial Sequence: Synthetic oligonucleotide
cgauaguagucauggguag

SEQ ID NO: 2852963 - RNA, 19 nt, Artificial Sequence
  Description of Artificial Sequence: Synthetic oligonucleotide
gguggucgggcuucuggag

SEQ ID NO: 2852964 - RNA, 19 nt, Artificial Sequence
  Description of Artificial Sequence: Synthetic oligonucleotide
uagcacugcugaagucgca

SEQ ID NO: 2852965 - RNA, 19 nt, Artificial Sequence
  Description of Artificial Sequence: Synthetic oligonucleotide
uggucaugaaugggagggu

SEQ ID NO: 2852966 - RNA, 19 nt, Artificial Sequence
  Description of Artificial Sequence: Synthetic oligonucleotide
agccgcuagaagggauggc

SEQ ID NO: 2852967 - RNA, 19 nt, Artificial Sequence
  Description of Artificial Sequence: Synthetic oligonucleotide
gccuuagggagacccgggg

SEQ ID NO: 2852968 - RNA, 19 nt, Artificial Sequence
  Description of Artificial Sequence: Synthetic oligonucleotide
gccgauaguagucaugggu

SEQ ID NO: 2852969 - RNA, 19 nt, Artificial Sequence
  Description of Artificial Sequence: Synthetic oligonucleotide
gcaggaacuguuguuggac

SEQ ID NO: 2852970 - RNA, 19 nt, Artificial Sequence
  Description of Artificial Sequence: Synthetic oligonucleotide
gacucuggccuagcacugc

SEQ ID NO: 2852971 - RNA, 19 nt, Artificial Sequence
  Description of Artificial Sequence: Synthetic oligonucleotide
ugguuucaggagccagguc

SEQ ID NO: 2852972 - RNA, 19 nt, Artificial Sequence
  Description of Artificial Sequence: Synthetic oligonucleotide
ugggaugggugggacucug

SEQ ID NO: 2852973 - RNA, 19 nt, Artificial Sequence
  Description of Artificial Sequence: Synthetic oligonucleotide
ggugggaugggugggacuc

SEQ ID NO: 2852974 - RNA, 19 nt, Artificial Sequence
  Description of Artificial Sequence: Synthetic oligonucleotide
uucuggaggccugcaggga

SEQ ID NO: 2852975 - RNA, 19 nt, Artificial Sequence
  Description of Artificial Sequence: Synthetic oligonucleotide
ggauggcugccauacuuca

SEQ ID NO: 2852976 - RNA, 19 nt, Artificial Sequence
  Description of Artificial Sequence: Synthetic oligonucleotide
gggacucuggccuagcacu

SEQ ID NO: 2852977 - RNA, 19 nt, Artificial Sequence
  Description of Artificial Sequence: Synthetic oligonucleotide
ucuggucaggauggaugac

SEQ ID NO: 2852978 - RNA, 19 nt, Artificial Sequence
  Description of Artificial Sequence: Synthetic oligonucleotide
gacuggcugcugcugcuuc

SEQ ID NO: 2852979 - RNA, 19 nt, Artificial Sequence
  Description of Artificial Sequence: Synthetic oligonucleotide
acccgcgcgcuccaggaga

SEQ ID NO: 2852980 - RNA, 19 nt, Artificial Sequence
  Description of Artificial Sequence: Synthetic oligonucleotide
caggucaccgguggucggg

SEQ ID NO: 2852981 - RNA, 19 nt, Artificial Sequence
  Description of Artificial Sequence: Synthetic oligonucleotide
acucugcacuuccgcagga

SEQ ID NO: 2852982 - RNA, 19 nt, Artificial Sequence
  Description of Artificial Sequence: Synthetic oligonucleotide
aggagcccaggcgucgccg

SEQ ID NO: 2852983 - RNA, 19 nt, Artificial Sequence
  Description of Artificial Sequence: Synthetic oligonucleotide
aggcgucgccgauaguagu

SEQ ID NO: 2852984 - RNA, 19 nt, Artificial Sequence
  Description of Artificial Sequence: Synthetic oligonucleotide
agaagggauggcugccaua

SEQ ID NO: 2852985 - RNA, 19 nt, Artificial Sequence
  Description of Artificial Sequence: Synthetic oligonucleotide
uuacaggguggggugggau

SEQ ID NO: 2852986 - RNA, 19 nt, Artificial Sequence
  Description of Artificial Sequence: Synthetic oligonucleotide
gcuagaagggauggcugcc

SEQ ID NO: 2852987 - RNA, 19 nt, Artificial Sequence
  Description of Artificial Sequence: Synthetic oligonucleotide
acuucaggacccgcgcgcu

SEQ ID NO: 2852988 - RNA, 19 nt, Artificial Sequence
  Description of Artificial Sequence: Synthetic oligonucleotide
ccgauaguagucaugggua

SEQ ID NO: 2852989 - RNA, 19 nt, Artificial Sequence
  Description of Artificial Sequence: Synthetic oligonucleotide
gaaugggaggguggacuuc

SEQ ID NO: 2852990 - RNA, 19 nt, Artificial Sequence
  Description of Artificial Sequence: Synthetic oligonucleotide
cuagaagggauggcugcca

SEQ ID NO: 2852991 - RNA, 19 nt, Artificial Sequence
  Description of Artificial Sequence: Synthetic oligonucleotide
gccaggucaccgguggucg

SEQ ID NO: 2852992 - RNA, 19 nt, Artificial Sequence
  Description of Artificial Sequence: Synthetic oligonucleotide
gggaggguggacuucccga

SEQ ID NO: 2852993 - RNA, 19 nt, Artificial Sequence
  Description of Artificial Sequence: Synthetic oligonucleotide
gccaccagcgagccgcuag

SEQ ID NO: 2852994 - RNA, 19 nt, Artificial Sequence
  Description of Artificial Sequence: Synthetic oligonucleotide
ucaccgguggucgggcuuc

SEQ ID NO: 2852995 - RNA, 19 nt, Artificial Sequence
  Description of Artificial Sequence: Synthetic oligonucleotide
gucgccgauaguagucaug

SEQ ID NO: 2852996 - RNA, 19 nt, Artificial Sequence
  Description of Artificial Sequence: Synthetic oligonucleotide
gaggagcccaggcgucgcc

SEQ ID NO: 2852997 - RNA, 19 nt, Artificial Sequence
  Description of Artificial Sequence: Synthetic oligonucleotide
ccuaguuuacagggugggg

SEQ ID NO: 2852998 - RNA, 19 nt, Artificial Sequence
  Description of Artificial Sequence: Synthetic oligonucleotide
ccugcagggauucugccga

SEQ ID NO: 2852999 - RNA, 19 nt, Artificial Sequence
  Description of Artificial Sequence: Synthetic oligonucleotide
augggaggguggacuuccc

SEQ ID NO: 2853000 - RNA, 19 nt, Artificial Sequence
  Description of Artificial Sequence: Synthetic oligonucleotide
cucaggagacuccaacacu

SEQ ID NO: 2853001 - RNA, 19 nt, Artificial Sequence
  Description of Artificial Sequence: Synthetic oligonucleotide
cugcuaggucaggacgggg

SEQ ID NO: 2853002 - RNA, 19 nt, Artificial Sequence
  Description of Artificial Sequence: Synthetic oligonucleotide
ccgcaggaacuguuguugg

SEQ ID NO: 2853003 - RNA, 19 nt, Artificial Sequence
  Description of Artificial Sequence: Synthetic oligonucleotide
cauggguagccaccagcga

SEQ ID NO: 2853004 - RNA, 19 nt, Artificial Sequence
  Description of Artificial Sequence: Synthetic oligonucleotide
cgcuagaagggauggcugc

SEQ ID NO: 2853005 - RNA, 19 nt, Artificial Sequence
  Description of Artificial Sequence: Synthetic oligonucleotide
guugcuggcugcagucuuc

SEQ ID NO: 2853006 - RNA, 19 nt, Artificial Sequence
  Description of Artificial Sequence: Synthetic oligonucleotide
cugcagggauucugccgag

SEQ ID NO: 2853007 - RNA, 19 nt, Artificial Sequence
  Description of Artificial Sequence: Synthetic oligonucleotide
ugcagggauucugccgagu

SEQ ID NO: 2853008 - RNA, 19 nt, Artificial Sequence
  Description of Artificial Sequence: Synthetic oligonucleotide
gacccgcgcgcuccaggag

SEQ ID NO: 2853009 - RNA, 19 nt, Artificial Sequence
  Description of Artificial Sequence: Synthetic oligonucleotide
uggucuggucaggauggau

SEQ ID NO: 2853010 - RNA, 19 nt, Artificial Sequence
  Description of Artificial Sequence: Synthetic oligonucleotide
gaggaggagcccaggcguc

SEQ ID NO: 2853011 - RNA, 19 nt, Artificial Sequence
  Description of Artificial Sequence: Synthetic oligonucleotide
ggauucugccgagugcuca

SEQ ID NO: 2853012 - RNA, 19 nt, Artificial Sequence
  Description of Artificial Sequence: Synthetic oligonucleotide
ggucaggacggggcgcucg

SEQ ID NO: 2853013 - RNA, 19 nt, Artificial Sequence
  Description of Artificial Sequence: Synthetic oligonucleotide
uagcuccugcuggugucug

SEQ ID NO: 2853014 - RNA, 19 nt, Artificial Sequence
  Description of Artificial Sequence: Synthetic oligonucleotide
cuggucaggauggaugacu

SEQ ID NO: 2853015 - RNA, 19 nt, Artificial Sequence
  Description of Artificial Sequence: Synthetic oligonucleotide
uccccgggguacucugcac

SEQ ID NO: 2853016 - RNA, 19 nt, Artificial Sequence
  Description of Artificial Sequence: Synthetic oligonucleotide
gugggacucuggccuagca

SEQ ID NO: 2853017 - RNA, 19 nt, Artificial Sequence
  Description of Artificial Sequence: Synthetic oligonucleotide
cugguccaccaguggccag

SEQ ID NO: 2853018 - RNA, 19 nt, Artificial Sequence
  Description of Artificial Sequence: Synthetic oligonucleotide
ccgguggucgggcuucugg

SEQ ID NO: 2853019 - RNA, 19 nt, Artificial Sequence
  Description of Artificial Sequence: Synthetic oligonucleotide
gcagucuuccuaguuuaca

SEQ ID NO: 2853020 - RNA, 19 nt, Artificial Sequence
  Description of Artificial Sequence: Synthetic oligonucleotide
gggauggcugccauacuuc

SEQ ID NO: 2853021 - RNA, 19 nt, Artificial Sequence
  Description of Artificial Sequence: Synthetic oligonucleotide
ccagggucggccuuaggga

SEQ ID NO: 2853022 - RNA, 19 nt, Artificial Sequence
  Description of Artificial Sequence: Synthetic oligonucleotide
caacacuguggucaugaau

SEQ ID NO: 2853023 - RNA, 19 nt, Artificial Sequence
  Description of Artificial Sequence: Synthetic oligonucleotide
ccgcuagaagggauggcug

SEQ ID NO: 2853024 - RNA, 19 nt, Artificial Sequence
  Description of Artificial Sequence: Synthetic oligonucleotide
ugggugggacucuggccua

SEQ ID NO: 2853025 - RNA, 19 nt, Artificial Sequence
  Description of Artificial Sequence: Synthetic oligonucleotide
ggaugacuggcugcugcug

SEQ ID NO: 2853026 - RNA, 19 nt, Artificial Sequence
  Description of Artificial Sequence: Synthetic oligonucleotide
guuggacgaggaggagccc

SEQ ID NO: 2853027 - RNA, 19 nt, Artificial Sequence
  Description of Artificial Sequence: Synthetic oligonucleotide
uggcugcagucuuccuagu

SEQ ID NO: 2853028 - RNA, 19 nt, Artificial Sequence
  Description of Artificial Sequence: Synthetic oligonucleotide
ggccuuagggagacccggg

SEQ ID NO: 2853029 - RNA, 19 nt, Artificial Sequence
  Description of Artificial Sequence: Synthetic oligonucleotide
cuuccgcaggaacuguugu

SEQ ID NO: 2853030 - RNA, 19 nt, Artificial Sequence
  Description of Artificial Sequence: Synthetic oligonucleotide
cacggcguccccgggguac

SEQ ID NO: 2853031 - RNA, 19 nt, Artificial Sequence
  Description of Artificial Sequence: Synthetic oligonucleotide
gcccaggcgucgccgauag

SEQ ID NO: 2853032 - RNA, 19 nt, Artificial Sequence
  Description of Artificial Sequence: Synthetic oligonucleotide
guccccgggguacucugca

SEQ ID NO: 2853033 - RNA, 19 nt, Artificial Sequence
  Description of Artificial Sequence: Synthetic oligonucleotide
aggacggggcgcucguguu

SEQ ID NO: 2853034 - RNA, 19 nt, Artificial Sequence
  Description of Artificial Sequence: Synthetic oligonucleotide
cuucaggacccgcgcgcuc

SEQ ID NO: 2853035 - RNA, 19 nt, Artificial Sequence
  Description of Artificial Sequence: Synthetic oligonucleotide
agcgagccgcuagaaggga

SEQ ID NO: 2853036 - RNA, 19 nt, Artificial Sequence
  Description of Artificial Sequence: Synthetic oligonucleotide
gguccaccaguggccaggg

SEQ ID NO: 2853037 - RNA, 19 nt, Artificial Sequence
  Description of Artificial Sequence: Synthetic oligonucleotide
ggacucuggccuagcacug

SEQ ID NO: 2853038 - RNA, 19 nt, Artificial Sequence
  Description of Artificial Sequence: Synthetic oligonucleotide
ucaggacggggcgcucgug

SEQ ID NO: 2853039 - RNA, 19 nt, Artificial Sequence
  Description of Artificial Sequence: Synthetic oligonucleotide
cauuugcugugguucugcu

SEQ ID NO: 2853040 - RNA, 19 nt, Artificial Sequence
  Description of Artificial Sequence: Synthetic oligonucleotide
guggggcacggcguccccg

SEQ ID NO: 2853041 - RNA, 19 nt, Artificial Sequence
  Description of Artificial Sequence: Synthetic oligonucleotide
gcuggcugcagucuuccua

SEQ ID NO: 2853042 - RNA, 19 nt, Artificial Sequence
  Description of Artificial Sequence: Synthetic oligonucleotide
gggguacucugcacuuccg

SEQ ID NO: 2853043 - RNA, 19 nt, Artificial Sequence
  Description of Artificial Sequence: Synthetic oligonucleotide
caccaguggccagggucgg

SEQ ID NO: 2853044 - RNA, 19 nt, Artificial Sequence
  Description of Artificial Sequence: Synthetic oligonucleotide
ggccugcagggauucugcc

SEQ ID NO: 2853045 - RNA, 19 nt, Artificial Sequence
  Description of Artificial Sequence: Synthetic oligonucleotide
aguggccagggucggccuu

SEQ ID NO: 2853046 - RNA, 19 nt, Artificial Sequence
  Description of Artificial Sequence: Synthetic oligonucleotide
cgggguacucugcacuucc

SEQ ID NO: 2853047 - RNA, 19 nt, Artificial Sequence
  Description of Artificial Sequence: Synthetic oligonucleotide
gcugcagucuuccuaguuu

SEQ ID NO: 2853048 - RNA, 19 nt, Artificial Sequence
  Description of Artificial Sequence: Synthetic oligonucleotide
ggauggaugacuggcugcu

SEQ ID NO: 2853049 - RNA, 19 nt, Artificial Sequence
  Description of Artificial Sequence: Synthetic oligonucleotide
ggacggggcgcucguguug

SEQ ID NO: 2853050 - RNA, 19 nt, Artificial Sequence
  Description of Artificial Sequence: Synthetic oligonucleotide
aggagccaggucaccggug

SEQ ID NO: 2853051 - RNA, 19 nt, Artificial Sequence
  Description of Artificial Sequence: Synthetic oligonucleotide
caggguggggugggauggg

SEQ ID NO: 2853052 - RNA, 19 nt, Artificial Sequence
  Description of Artificial Sequence: Synthetic oligonucleotide
cgagccgcuagaagggaug

SEQ ID NO: 2853053 - RNA, 19 nt, Artificial Sequence
  Description of Artificial Sequence: Synthetic oligonucleotide
ggcgucgccgauaguaguc

SEQ ID NO: 2853054 - RNA, 19 nt, Artificial Sequence
  Description of Artificial Sequence: Synthetic oligonucleotide
agugcucaggagacuccaa

SEQ ID NO: 2853055 - RNA, 19 nt, Artificial Sequence
  Description of Artificial Sequence: Synthetic oligonucleotide
ccgagugcucaggagacuc

SEQ ID NO: 2853056 - RNA, 19 nt, Artificial Sequence
  Description of Artificial Sequence: Synthetic oligonucleotide
uggccagggucggccuuag

SEQ ID NO: 2853057 - RNA, 19 nt, Artificial Sequence
  Description of Artificial Sequence: Synthetic oligonucleotide
gggcacggcguccccgggg

SEQ ID NO: 2853058 - RNA, 19 nt, Artificial Sequence
  Description of Artificial Sequence: Synthetic oligonucleotide
agggucggccuuagggaga

SEQ ID NO: 2853059 - RNA, 19 nt, Artificial Sequence
  Description of Artificial Sequence: Synthetic oligonucleotide
cuggccuagcacugcugaa

SEQ ID NO: 2853060 - RNA, 19 nt, Artificial Sequence
  Description of Artificial Sequence: Synthetic oligonucleotide
gggaugggugggacucugg

SEQ ID NO: 2853061 - RNA, 19 nt, Artificial Sequence
  Description of Artificial Sequence: Synthetic oligonucleotide
ggccuagcacugcugaagu

SEQ ID NO: 2853062 - RNA, 19 nt, Artificial Sequence
  Description of Artificial Sequence: Synthetic oligonucleotide
cacugcugaagucgcauuu

SEQ ID NO: 2853063 - RNA, 19 nt, Artificial Sequence
  Description of Artificial Sequence: Synthetic oligonucleotide
cgagugcucaggagacucc

SEQ ID NO: 2853064 - RNA, 19 nt, Artificial Sequence
  Description of Artificial Sequence: Synthetic oligonucleotide
ggacccgcgcgcuccagga

SEQ ID NO: 2853065 - RNA, 19 nt, Artificial Sequence
  Description of Artificial Sequence: Synthetic oligonucleotide
ggacgaggaggagcccagg

SEQ ID NO: 2853066 - RNA, 19 nt, Artificial Sequence
  Description of Artificial Sequence: Synthetic oligonucleotide
ccaggucaccgguggucgg

SEQ ID NO: 2853067 - RNA, 19 nt, Artificial Sequence
  Description of Artificial Sequence: Synthetic oligonucleotide
gccgcuagaagggauggcu

SEQ ID NO: 2853068 - RNA, 19 nt, Artificial Sequence
  Description of Artificial Sequence: Synthetic oligonucleotide
aggucaggacggggcgcuc

SEQ ID NO: 2853069 - RNA, 19 nt, Artificial Sequence
  Description of Artificial Sequence: Synthetic oligonucleotide
ccaggcgucgccgauagua

SEQ ID NO: 2853070 - RNA, 19 nt, Artificial Sequence
  Description of Artificial Sequence: Synthetic oligonucleotide
ggggcgcucguguuggucu

SEQ ID NO: 2853071 - RNA, 19 nt, Artificial Sequence
  Description of Artificial Sequence: Synthetic oligonucleotide
gcugguccaccaguggcca

SEQ ID NO: 2853072 - RNA, 19 nt, Artificial Sequence
  Description of Artificial Sequence: Synthetic oligonucleotide
gggucggccuuagggagac

SEQ ID NO: 2853073 - RNA, 19 nt, Artificial Sequence
  Description of Artificial Sequence: Synthetic oligonucleotide
gccauacuucaggacccgc

SEQ ID NO: 2853074 - RNA, 19 nt, Artificial Sequence
  Description of Artificial Sequence: Synthetic oligonucleotide
gggcgcucguguuggucug

SEQ ID NO: 2853075 - RNA, 19 nt, Artificial Sequence
  Description of Artificial Sequence: Synthetic oligonucleotide
gccuagcacugcugaaguc

SEQ ID NO: 2853076 - RNA, 19 nt, Artificial Sequence
  Description of Artificial Sequence: Synthetic oligonucleotide
ggaggagcccaggcgucgc

SEQ ID NO: 2853077 - RNA, 19 nt, Artificial Sequence
  Description of Artificial Sequence: Synthetic oligonucleotide
cuccaacacuguggucaug

SEQ ID NO: 2853078 - RNA, 19 nt, Artificial Sequence
  Description of Artificial Sequence: Synthetic oligonucleotide
guguuggucuggucaggau

SEQ ID NO: 2853079 - RNA, 19 nt, Artificial Sequence
  Description of Artificial Sequence: Synthetic oligonucleotide
ggagcccaggcgucgccga

SEQ ID NO: 2853080 - RNA, 19 nt, Artificial Sequence
  Description of Artificial Sequence: Synthetic oligonucleotide
ggcgcucguguuggucugg

SEQ ID NO: 2853081 - RNA, 19 nt, Artificial Sequence
  Description of Artificial Sequence: Synthetic oligonucleotide
ggugggacucuggccuagc

SEQ ID NO: 2853082 - RNA, 19 nt, Artificial Sequence
  Description of Artificial Sequence: Synthetic oligonucleotide
cggccuuagggagacccgg

SEQ ID NO: 2853083 - RNA, 19 nt, Artificial Sequence
  Description of Artificial Sequence: Synthetic oligonucleotide
caggagccaggucaccggu

SEQ ID NO: 2853084 - RNA, 19 nt, Artificial Sequence
  Description of Artificial Sequence: Synthetic oligonucleotide
gcguccccgggguacucug

SEQ ID NO: 2853085 - RNA, 19 nt, Artificial Sequence
  Description of Artificial Sequence: Synthetic oligonucleotide
cuagcuccugcuggugucu

SEQ ID NO: 2853086 - RNA, 19 nt, Artificial Sequence
  Description of Artificial Sequence: Synthetic oligonucleotide
gucaggacggggcgcucgu

SEQ ID NO: 2853087 - RNA, 19 nt, Artificial Sequence
  Description of Artificial Sequence: Synthetic oligonucleotide
gcgucgccgauaguaguca

SEQ ID NO: 2853088 - RNA, 19 nt, Artificial Sequence
  Description of Artificial Sequence: Synthetic oligonucleotide
acggcguccccgggguacu

SEQ ID NO: 2853089 - RNA, 19 nt, Artificial Sequence
  Description of Artificial Sequence: Synthetic oligonucleotide
gggugggacucuggccuag

SEQ ID NO: 2853090 - RNA, 19 nt, Artificial Sequence
  Description of Artificial Sequence: Synthetic oligonucleotide
gagccaggucaccgguggu

SEQ ID NO: 2853091 - RNA, 19 nt, Artificial Sequence
  Description of Artificial Sequence: Synthetic oligonucleotide
cgccgauaguagucauggg

SEQ ID NO: 2853092 - RNA, 19 nt, Artificial Sequence
  Description of Artificial Sequence: Synthetic oligonucleotide
gguggggcacggcgucccc

SEQ ID NO: 2853093 - RNA, 19 nt, Artificial Sequence
  Description of Artificial Sequence: Synthetic oligonucleotide
ggguggggcacggcguccc

SEQ ID NO: 2853094 - RNA, 19 nt, Artificial Sequence
  Description of Artificial Sequence: Synthetic oligonucleotide
ggucgggcuucuggaggcc

SEQ ID NO: 2853095 - RNA, 19 nt, Artificial Sequence
  Description of Artificial Sequence: Synthetic oligonucleotide
ggggcacggcguccccggg

SEQ ID NO: 2853096 - RNA, 19 nt, Artificial Sequence
  Description of Artificial Sequence: Synthetic oligonucleotide
ggggugggaugggugggac

SEQ ID NO: 2853097 - RNA, 19 nt, Artificial Sequence
  Description of Artificial Sequence: Synthetic oligonucleotide
cuggugucuguugcuggcu

SEQ ID NO: 2853098 - RNA, 19 nt, Artificial Sequence
  Description of Artificial Sequence: Synthetic oligonucleotide
cuguugcuggcugcagucu

SEQ ID NO: 2853099 - RNA, 19 nt, Artificial Sequence
  Description of Artificial Sequence: Synthetic oligonucleotide
cacuuccgcaggaacuguu

SEQ ID NO: 2853100 - RNA, 19 nt, Artificial Sequence
  Description of Artificial Sequence: Synthetic oligonucleotide
cccgcgcgcuccaggagac
